(19) United States
(12) Patent Application Publication
(10) Pub. No.: US 2016/0024575 A1
(43) Pub. Date: Jan. 28, 2016

(54) CIRCULATING SMALL NONCODING RNA MARKERS

(71) Applicant: The Regents of the University of California, Oakland, CA (US)

(72) Inventors: Stephen Spindler, Riverside, CA (US); Joseph M. Dhahbi, Riverside, CA (US)

(73) Assignee: The Regents of the University of California, Oakland, CA (US)

(21) Appl. No.: 14/268,848

(22) Filed: May 2, 2014

Related U.S. Application Data
(60) Provisional application No. 61/818,869, filed on May 2, 2013.

(51) Int. Cl. C12Q 1/68

(52) U.S. Cl. CPC C12Q 1/6876; C12Q 1/6886; C12Q 2600/178; C12Q 2600/166

(57) ABSTRACT

This application describes small noncoding RNA markers that can be found in a biological sample taken from an individual. The level of such markers are useful for determining the individual's health status, especially in comparison with others. Methods and kits for the use of these markers are provided as well.

### CROSS-REFERENCES TO RELATED APPLICATIONS

[0001] This application claims the benefit of U.S. Provisional Application No. 61/818,869, filed May 2, 2013, the contents of which are hereby incorporated by reference in their entirety for all purposes.

### REFERENCE TO A “SEQUENCE LISTING,” A TABLE, OR A COMPUTER PROGRAM LISTING APPENDIX SUBMITTED AS AN ASCII TEXT FILE

[0002] The Sequence Listing written in file “Sequence Listing for 81906-907996 (217410US).txt”, created on Dec. 22, 2014 and containing 3,336 bytes, machine format IBM-PC, MS-Windows operating system is hereby incorporated by reference in its entirety for all purposes.

### BACKGROUND OF THE INVENTION

[0003] Small noncoding RNAs (sncRNAs) mediate a variety of cellular functions in animals and plants. It has been discovered using deep sequencing that sncRNAs circulate in the blood of humans and other mammals. The most abundant types of circulating sncRNAs are microRNAs (miRNAs), 5′ transfer RNA (tRNA) halves, and YRNA fragments, with minute amounts of other types. It has been suggested that some sncRNAs are specifically processed and secreted as macromolecular complexes to protect the non-coding RNAs from degradation.

[0004] Properties of circulating sncRNAs are consistent with a possible role as signaling molecules. For instance, it has been shown that circulating miRNAs can enter cells and regulate cellular functions.

[0005] 5′ tRNA halves are derived from a small subset of tRNAs, implying that they are produced by tRNA type-specific biogenesis and/or release. The 5′ tRNA halves are not in exosomes or microvesicles, but circulate as particles of 100-300 kDa. The size of these particles suggest that the 5′ tRNA halves are a component of a macromolecular complex; this is supported by the loss of 5′ tRNA halves from serum or plasma treated with EDTA, a chelating agent, but their retention in plasma anticoagulated with heparin or citrate. A survey of somatic tissues reveals that 5′ tRNA halves are concentrated within blood cells and hematopoietic tissues, but scant in other tissues, suggesting that they may be produced by blood cells.

[0006] Full-length YRNAs are small (84-112 nt) RNAs with poorly characterized functions, best known because they make up part of the Ro ribonucleoprotein autoantigens in connective tissue diseases. The present inventors have discovered YRNA fragments of lengths 27 nt and 30-33 nt, derived from the 5′ ends of specific YRNAs, and generated by cleavage within a predicted internal loop. These 5′ YRNA fragments make up a large proportion of all small RNAs (including miRNAs) present in human serum. They are also present in plasma, are not present in exosomes or microvesicles, and circulate as part of a complex with a mass between 100 and 300 kDa.

[0007] Studies have also shown that sncRNAs may server as markers of health and disease states. For example, serum levels of specific sncRNAs such as 5′ tRNA halves change markedly with age. Additionally, caloric restriction can mitigate these age-related changes, thereby indicating that sncRNA levels are under physiologic control. The inventors have discovered that levels of circulating tRNA-derived and YRNA-derived fragments correlate to the presence of breast cancer.

[0008] There is a need in the pertinent field for non-invasive methods for detection of healthy and disease states, including various types of cancer, such as breast cancer. There is also a need for measuring circulating small noncoding RNAs. The present invention satisfies these needs and provides related advantages as well.

### BRIEF SUMMARY OF THE INVENTION

[0009] The present invention is based, in part, on the discovery of two types of small noncoding RNA molecules (5′ tRNA halves and YRNA fragments) found in the circulating blood (e.g., serum or plasma) of a mammal (e.g., human). The 5′ tRNA halves are derived from the 5′ end of a subset of tRNAs and correspond to the first 27, 28, 29, 30, 31, 32, 33, 34, or even 35 nucleotides of a tRNA gene sequence (e.g., any one of those named in Table 3 or Table 4). They are found in serum as particles of about 100-300 kDa, being a part of a macromolecular structure (e.g., in complex with one or more proteins) but not in exosomes or microvesicles. These 5′ tRNA halves are also found within blood cells and hematopoietic tissues, indicating their origin as being produced by blood cells. The inventors observed that the serum levels of these small RNAs change markedly, either increase or decrease, with age (see, e.g., Table 3 or Table 4), and that such change can be mitigated by calorie restrictions.

[0010] The second type of small noncoding RNA molecules identified by the inventors are YRNAs. They are small (84-112 nt) RNAs that correspond to the first 27 or 30-33 nucleotides of a YRNA gene sequence (e.g., any one of those named in Table 5 or provided herein). They make up part of the Ro ribonucleoprotein autoantigens in connective tissue diseases. In surveying small RNAs present in the serum of healthy adult humans, the inventors have discovered YRNA fragments that are derived from the 5′ ends of specific YRNAs which were previously either annotated as pseudogenes or predicted informatically. There fragments are generated by cleavage within a predicted internal loop. The 5′ YRNA fragments provided herein make up a large proportion of all small RNAs (including miRNAs) present in human serum. They are also present in plasma, but are not in exosomes or microvesicles. Like, 5′ tRNA halves, YRNA fragments circulate as part of a complex with a mass between 100 and 300 kDa.

[0011] The inventors have observed that the serum levels of these small RNAs can increase or decrease with the presence of cancer such as breast cancer, aging and caloric restriction. As such, the present invention provides novel markers and non-invasive means for monitoring an individual's health status such as aging, potential longevity, and presence/risk of disease such as cancer, infectious diseases, cardiovascular diseases, neurodegenerative disorders including Alzheimer's disease, Huntington's disease, etc., especially in comparison with one or more other individuals with known health/aging/caloric intake status.

[0012] In the first aspect, the present invention provides novel polynucleotides (e.g., small RNA molecules) that each corresponds to a section of a tRNA having the polynucleotide sequence of the first 27, 28, 29, 30, 31, 32, 33, 34, or 35 nucleotides starting from the 5′ end of the tRNA sequence, or a complement thereof. Table 3 and 4 provide a list of these tRNAs. The invention also provides polynucleotide sequences that are complementary to the small RNA sequences, as such complementary sequences can be useful for detecting these small RNA molecules.

[0013] In the second aspect, the present invention provides novel polynucleotides (e.g., small RNA molecules) that each corresponds to a section of a YRNA having the polynucleotide sequence of the first 27, 28, 29, 30, 31, 32, 33, 34, or 35 nucleotides starting from the 5′ end of the YRNA sequence, or a complement thereof. Table 5 provides a list of these YRNAs. The invention also provides polynucleotide sequences that are complementary to the small RNA sequences, as such complementary sequences can be useful for detecting these small RNA molecules.

[0014] In the third aspect, the present invention provides a polynucleotide probe including a tRNA half or YRNA fragment described herein and a detectable moiety. The snRNA can be conjugated (e.g., linked) to the detectable label.

[0015] In the fourth aspect, the present invention provides a kit for detecting a polynucleotide having the nucleotide sequence corresponding to the first 27, 28, 29, 30, 31, 32, 33, 34, or 35 nucleotides starting from the 5′ end of the a tRNA provided in Table 3 or Table 4, or a YRNA provided in Table 5, or the complement thereof. The kit in some cases includes appropriate primters for amplifying a tRNA half or YRNA fragment as described herein. The kit may also contain a control that provides a sample of the polynucleotide or a complement thereof and the polynucleotide probe described above. As the kit may beused for diagnositic purposes as described herein, in some embodiments, the kit may further include a standard control in which the target tRNa half or YRNA fragment of the kit is at a concentration of a known state of health/age/caloric intake.

[0016] In another aspect, the present invention provides an expression cassette (e.g., expression vector) that includes a promoter, e.g., a heterologous promoter, that is operably linked to the polynucleotide described herein. The expression cassette can be introduced (e.g., transformed or transfected) into a host cells such as a eukaryotic cell or a prokaryotic cell. Alternatively, the expression cassette can be introduced into a stable cell line. In some embodiments, the expression cassette is introduced into a human cell.

[0017] In yet another aspect, the present invention provides a method for quantitating a polynucleotide having a nucleotide sequence corresponding to the first 27, 28, 29, 30, 31, 32, 33, 34, or 35 nucleotides of a tRNA provided in Tables 3 or 4, or a YRNA provided in Table 5; or a complement thereof. The method includes extracting nucleic acids (e.g., RNA) from a biological sample and measuring the level of the polynucleotide in the extract. In some cases, the step of measuring comprises an amplification reaction. In other cases, the step of measuring comprises sequencing. The biological sample can be whole blood, serum, plasma, saliva, mucus, urine, cerebrospinal fluid, nipple fluid, or another bodily fluid. Optionally, the biological sample can be a tissue sample such as breast tissue, hematopoietic tissue and lymphoid tissue, from, e.g., a biopsy.

[0018] In another aspect, the present invention provides a method for determining or monitoring the health status of a mammal based on the level of at least one polynucleotide or complement thereof in a biological sample taken from the mammal (e.g., a human patient). The method includes quantitating at least one polynucleotide has a nucleotide sequence corresponding to the first 27, 28, 29, 30, 31, 32, 33, 34, or 35 nucleotides of a tRNA provided in Table 3 or Table 4 or a YRNA gene provided in Table 5; or a complement thereof in the sample. The method also includes comparing the level to that of a control sample and concluding that the health status of the mammal is better or worse than the control if the level of the polynucleotide(s) is greater than that of the control sample. In some cases, the mammal is a human being. In some cases, the health status is aging status and/or predicted longevity. In some cases, the health status is caloric intake, especially in relation with caloric consumption by the mammal (e.g., after subtraction of the number of calories consumed due to physical/physiological activity during the same time period). In other instances, the health status is the risk or presence of breast cancer. In some cases, the health status is the presence or risk of certain diseases, for example, various types of cancer, infectious diseases, cardiovascular diseases, neurodegenerative disorders including but not limited to Alzheimer's disease, Huntington's disease, etc. In some cases, the biological sample is blood, serum, or plasma. In other cases, the biological sample is blood cells and hematopoietic tissues (e.g., leukocytes). Depending on the specific small RNA marker, as shown in Table 3, an increase or decrease can indicate a relatively better/improved health status or more restricted calorie intake. An increase or a decrease in the level of the specific small RNA marker, as shown in Tables 4 and 5, can indicate the presence of breast cancer. Once a diagnosis is made that a subject being tested has or is at risk of later developing a disorder among those named above, the subject should be given treatment for the disorder or regularly monitored for the onset of the disorder such that preventive and/or therapeutic measures can be taken as appropriate.

[0019] Typically, the determining and monitoring is based on comparing the level of one or more small RNA molecules found in a biological sample taken from a mammal (e.g., a human) with the level of the same small RNA marker(s) found in the same type of tissue or cell sample taken from another mammal (i.e., a control subject of the same species, often the same gender, with known age and health status, such as predicted longevity, presence/absence/risk of certain diseases, and caloric intake over consumption) to establish a comparison in terms of an increased or decreased level, which in turn provides indication of more or less advanced aging process, better or worse disease state/risk, in relation to the control subject. In some cases, the monitoring is achieved by comparing the levels of one or more small RNA marker(s) in the same individual's samples taken at two or more different times to establish a comparison, and the detected increase/decrease (or lack thereof) will indicate the changes (or lack thereof) in the individual's health status during the period marked by the times when the samples were taken. Once a conclusion is reached regarding the individual's health status, either comparing with a control subject or comparing with the individual him/herself at an earlier time, additional steps in terms of therapeutic and preventive measures may be taken to remedy any undesirable effects, such as by changing caloric intake/consumption, changing life style to prevent/minimize risk of certain diseases, staring treatment for conditions such as cancer or neurodegenerative diseases, or maintaining a routine of regular medical examination for early detection and intervention of any relevant medical conditions.

[0020] In yet another aspect, the present invention provides a kit for determining or monitoring the health status of a mammal (e.g., a human). The kit contains agents for detecting one or more small RNA markers (e.g., those having a nucleotide sequence corresponding to the first 30-35 nucleotides of the tRNA listed in Tables 3 and 4, or those having a nucleotide sequence corresponding to the first 27-35 nucleotides of the YRNA listed in Table 5.), such as by performing an amplification reaction (e.g., polymerase chain reaction or PCR and reverse transcription polymerase chain reaction or RT-PCR) to identify the RNA marker. In some cases, the agent for detection may include the polynucleotide probe described above. The kit may also contain a standard control sample, which provides the standard value(s) of the marker(s) from a particular tissue/cell sample from a subject of known health status such as aging, disease presence/risk, and caloric intake (in relation to caloric consumption). Optionally, an instruction manual is also provided in the kit.

### BRIEF DESCRIPTION OF THE DRAWINGS

[0021] FIG. 1A-FIG. 1C show the length distribution of reads obtained by deep sequencing of small RNAs extracted from mouse serum. Shown here are only those reads that map to the mm10 (GRCm38) mouse genome. FIG. 1A shows length distribution is displayed by abundance of sequencing reads combined from 9 serum samples. Reads were mapped to the mouse genome with bowtie according to Maq's default policy, either allowing (blue bars) or disallowing (red bars) multiple reportable alignments for each read. FIG. 1B shows combined reads were mapped to the mouse genome with bowtie according to the end-to-end k-difference policy, either allowing (blue bars) or disallowing (red bars) multiple reportable alignments for each read. FIG. 1C shows length distribution of separate sequencing reads obtained from 9 individual serum small RNA samples. Length distribution is displayed by abundance of sequencing reads that were mapped to the mouse genome with bowtie according to Maq's default policy, and allowing multiple reportable alignments for each read. Bars with different colors denote the source of the sequenced serum small RNA from the 9 different samples.

[0022] FIG. 2A-FIG. 2C show and annotation of combined sequencing reads of small RNAs extracted from 9 mouse serum samples. FIG. 2A shows length distribution by abundance of the total reads mapped to the mouse genome (black bars), with reads annotated as mapping to either miRNAs (red bars), tRNAs (blue bars), rRNAs (green bars), or other small RNAs (yellow bars). Other small RNAs include scRNA, snRNA, and srpRNA. Note that the reads in the 20-24 nt and the 30-33 nt peaks are almost exclusively annotated as miRNAs and tRNAs, respectively. FIG. 2B shows a pie chart showing the percentage of reads mapping to the specific types of small RNAs. FIG. 2C shows frequencies of 5′ tRNA half types represented in the aligned reads.

[0023] FIG. 3A-FIG. 3B show UCSC genome browser screenshots illustrating alignment of reads to two tRNA genes. Shown are the Illumina sequencing reads (red), and the tRNA genes (blue) as annotated in the tRNA genes track “Transfer RNA genes identified with tRNAscan-SE”. FIG. 3A shows the alignment (number of reads, y-axis) shows that all the sequencing reads align to the 5′ end of chr1.tRNA704-GlyGCC gene. FIG. 3B shows the majority of the sequencing reads align to the 5′ end of chr11.tRNA945-ArgCCG gene, whereas only a very small number of sequencing reads aligns to the 3′ end.

[0024] FIG. 4 shows cleavage sites of tRNAs. The cloverleaf structure of chr1.tRNA704-GlyGCC gene (SEQ ID NO:1) showing cleavage sites at the anticodon loop, with the percentage of the reads that map to the 5′ end of the tRNA (arrowheads). The cleavage sites are upstream of the GCC anticodon located at nucleotides 33 to 35. Numbers inside the anticodon loop indicate anticodon nucleotides positions

[0025] FIG. 5A-FIG. 5G show detection of 5′ tRNA halves in mouse serum. Northern blot analysis of RNA extracted from U2OS cells cultured in the absence (−) or presence (+) of sodium arsenite (AS), or from 0.4 ml of mouse serum. The blot was hybridized to a ³²P-end-labeled oligonucleotide probe complementary to the 5′ (FIG. 5A) or 3′ end (FIG. 5B) of tRNA-Gly-GCC. The blot was also hybridized to a ³²P-end-labeled oligonucleotide probe complementary to the 5′ (FIG. 5C) or 3′ end (FIG. 5D) of tRNA-Val-CAC. 5′ tRNA halves were also detected in fractionated mouse serum. (FIGS. 5E-F) Northern blotting analysis was carried out on RNA extracted from either 0.4 ml of mouse whole serum, from the supernatant (Sup) after ultracentrifugation of 0.4 ml of mouse serum at 110,000 g, or the ultracentrifugation pellet. The blot was hybridized to a ³²P-end-labeled oligonucleotide probe complementary to the 5′ (FIG. 5E) or 3′ end (FIG. 5F) of tRNA-Gly-GCC. FIG. 5G shows that ultrafiltration indicates a size for tRNA serum particles between 100 and 300 kDa. Samples of 0.2 ml serum mixed with 1.8 ml PBS were subjected to ultrafiltration through Vivaspin 2 columns with 30, 100, and 300 kDa MW cut-offs. Total RNAs were extracted from filtrate (f) and concentrate (c) fractions. Blot was hybridized to ³²P-end-labeled oligonucleotide probes complementary to the 5′ end of tRNA-Gly-GCC. The positions of full length tRNAs and tRNA halves are indicated on the right. DM: decade markers.

[0026] FIG. 6A-FIG. 6B show Northern blotting analysis of tRNA-Val-CAC halves in mouse serum. FIG. 6A shows RNA extracted from 0.4 ml of mouse whole serum, from supernatant or pellet after ultracentrifugation of 0.4 ml of mouse serum at 11x0000 g and analyzed with northern blotting by hybridization to a ³²P 5′-end labeled oligonucleotide probe complementary to the 5′ end of tRNA-Val-CAC. FIG. 6B shows RNA extracted from 0.2 ml serum mixed with 1.8 ml PBS subjected to ultrafiltration with Vivaspin 2 columns with 30, 100, and 300 kDa MW cut-off. Total RNAs were extracted from filtrate (f) and concentrate (c) fractions. Blot was hybridized to a ³²P 5′-end labeled oligonucleotide probe complementary to the 5′ end of tRNA-Val-CAC. The positions of full length tRNAs and tRNA halves are indicated on the right. DM: decade markers.

[0027] FIG. 7A-FIG. 7F show tissue distribution of tRNA-Gly-GCC halves. Northern blotting analysis of RNA extracted from the indicated mouse tissues. Blots were hybridized with ³²P-end-labeled oligonucleotide probes complementary to the 5′ (FIGS. 7A, C, and E) or 3′ end (FIGS. 7B, D, and F) of tRNA-Gly-GCC. The positions of full length tRNAs and tRNA halves are indicated on the right. DM: decade markers.

[0028] FIG. 8A-FIG. 8E show tissue distribution of tRNA-Val-CAC halves. Northern blotting analysis of RNA extracted from the indicated mouse tissues. Blots were hybridized with ³²P-end-labeled oligonucleotide probes complementary to the 5′ (FIGS. 8A, B, and D) or 3′ end (FIGS. 8C and E) of tRNA-Val-CAC. The positions of full length tRNAs and tRNA halves are indicated on the right. DM: decade markers.

[0029] FIG. 9 shows detection of 5′ tRNA halves in mouse plasma and serum. Northern blot of RNAs extracted from 0.4 ml of mouse serum, serum treated with EDTA, and heparin- or EDTA-collected plasma, hybridized to a ³²P 5′-end labeled oligonucleotide probe complementary to the 5′ end of tRNA-Gly-GCC. EDTA sharply lowers the abundance of 5′ tRNA halves in serum; in plasma, 5′ tRNA halves are abundant when heparin is the anticoagulant, but are nearly absent when EDTA is present. 5′ tRNA halves are similarly abundant when calcium citrate is used as the anticoagulant (not shown).

[0030] FIG. 10A-FIG. 10C show real-time PCR amplification plots of circulating miRNAs. Shown are the amplification plots for miR-16 (blue), miR-24 (black), and the spiked-in miR-Cel-39 (red) measured in mouse serum (FIG. 10A), mouse serum treated with EDTA (FIG. 10B), and mouse plasma collected on EDTA (FIG. 10C). The y-axis represents the relative fluorescence units (RFU) in a semi-log scale. The x-axis represents the cycle at which fluorescence was detected above an automatically determined threshold for the indicated miRNA. EDTA does not change the concentration of miRNAs in plasma.

[0031] FIG. 11 shows 5′ tRNA halves are also present in human serum and leukocytes, but not in EDTA plasma. RNAs were extracted from human leukocytes, 0.4 ml of human serum, or EDTA-collected plasma. The Northern blot was hybridized to a ³²P 5′-end labeled oligonucleotide probe complementary to the 5′ end of tRNA-Gly-GCC. The positions of full length tRNAs and tRNA halves are indicated on the right. DM: decade markers.

[0032] FIG. 12 shows length distribution of sequencing reads that mapped to the RepeatMasker classes of DNA, LINE, LTR, Low_complexity, RC, SINE, Satellite, and Simple_repeat. Read length distribution is displayed by abundance of sequencing.

[0033] FIG. 13A-FIG. 13B show the scarcity of 5′ tRNA-Asn halves in mouse serum. Northern blot analysis of RNA extracted from U2OS cells cultured in the absence (−) or presence (+) of sodium arsenite (AS), or from 0.4 ml of mouse serum, or from the supernatant (Sup) after ultracentrifugation of 0.4 ml of mouse serum at 110000 g. The blot was hybridized to a ³²P-end-labeled oligonucleotide probe complementary to the 5′ end of tRNA-Gly-GCC (FIG. 13A) or the 5′ end of tRNA-Asn-GTT (FIG. 13B). The blot hybridized to the 5′ end of tRNA-Gly-GCC was exposed to an X-ray film for 25 minutes, while the blot hybridized to the 5′ end of tRNA-Asn was exposed for 5 days. The positions of full length tRNAs and tRNA halves are indicated on the right. DM: decade markers.

[0034] FIG. 14A-FIG. 14E show the length distribution and annotation of small RNAs in human serum. FIG. 14A: Length distribution of reads obtained by deep sequencing of small RNAs extracted from human serum. Shown here are only those reads that map to the hg19 (GRCh37) human genome, with length distribution plotted against abundance of sequencing reads. Sequencing reads combined from five different human serum samples were mapped to the human genome with Bowtie according to the end-to-end k-difference policy with two mismatches, either allowing (blue bars) or disallowing (red bars) multiple reportable alignments for each read. FIG. 14B: Sequencing reads from the five individual human serum samples shown as a pool in (FIG. 14A). Bars with different colors denote the source of the sequenced human serum small RNA from the five individual samples. Distributions in the five individual samples are similar. FIG. 14C: Length distribution of annotated reads obtained by deep sequencing of small RNAs extracted from the five human serum samples. Length distribution is plotted against abundance of the reads annotated as miRNAs, YRNAs, tRNAs, rRNAs, or other sRNAs (snRNAs and snoRNAs). FIG. 14D: A pie chart showing the percentage of reads from the five pooled samples mapping to the indicated specific types of small RNAs. FIG. 14E: Frequencies of YRNA types represented in the aligned reads. YRNAs are classified in Ensembl as RNY1, RNY3, RNY4, RNY5, pseudogenes originating from the four human YRNAs (RNY1P, RNY3P, RNY4P, RNY5P), and a group of predicted YRNAs from the Rfam database.

[0035] FIG. 15A-FIG. 15E show characterization of circulating 5′ YRNA fragments. FIG. 15A: UCSC genome browser screenshots illustrating alignment of reads to YRNAs from Ensembl GRCh37 release 70. Shown are the Illumina sequencing reads (blue) aligning to the ENST00000516507 transcript encoded by the RNY4 gene (upper panel) and the ENST00000362735 transcript encoded by the RNY4P24 pseudogene (lower panel). Also shown are the Gene Annotations from ENCODE/GENCODE Version 14, and a custom track (YRNAs) depicting the coding strand. The alignment (number of reads, y-axis) shows that the majority of the sequencing reads align to the 5′ end of the YRNA. FIG. 15B: Important features of predicted YRNA secondary structure (SEQ ID NO:2), cleavage sites, and frequencies. The schematic structure of YRNAs was produced by Varna (6) from the RF00019 Y_RNA Family. The ‘conservation’ option was chosen as the coloring scheme for the secondary structure. The 5′ and 3′ ends are indicated. The putative cleavage sites at the predicted internal loop are denoted by arrows, with the percentage of the reads that map to the 5′ ends of YRNAs. FIG. 15C-FIG. 15D: Northern blot analysis of RNA extracted from human serum or plasma, and from U2OS cells. The blot was hybridized to 32P-end-labeled oligonucleotide probes complementary to the 5′ (C) or 3′ (D) ends of RNY4. Lanes 1-3: RNA extracted from 0.2 ml of whole serum, EDTA plasma (Plasma-E) or heparin plasma (Plasma-H). Lanes 4-7: Samples of 0.2 ml serum mixed with 1.8 ml PBS were subjected to ultrafiltration through Vivaspin 2 columns with 100 and 300 kDa MW cut-offs. Total RNAs were extracted from filtrate (f) and concentrate (c) fractions after the ultrafiltration step. Lanes 8-9: RNAs extracted from U2OS cells (CON), and U2OS cells treated with UV (UV). FIG. 15E: Northern blotting analysis of RNA extracted from either 0.2 ml of whole serum (Whole), from the supernatant (Sup) after ultracentrifugation of 0.2 ml of serum at 110,000 g, or the ultracentrifugation pellet (Pellet). The blot was hybridized to a 32P-end-labeled oligonucleotide probe complementary to the 5′ end of RNY4. The positions of full length YRNAs and YRNA fragments are indicated on the right. M: decade markers.

[0036] FIG. 16A-FIG. 16E show comparison of read length and annotation of sequencing reads from human serum and EDTA plasma. Serum: red; Plasma: blue. FIG. 16A: Length distribution of all reads mapping to the hg19 (GRCh37) human genome is displayed by abundance of sequencing reads from serum and EDTA plasma prepared from blood drawn from the same individual. Reads were mapped to the human genome with Bowtie according to the end-to-end k-difference policy with zero mismatches and allowing multiple reportable alignments for each read. FIG. 16B: miRNAs map to reads in the 20-24 nt peak in both serum and plasma. The x-axis represents the read length in nucleotides. The y-axis represents the reads of the indicated length as the percentage of the total reads sequenced from the human sample (serum or plasma). FIG. 16C: YRNAs reads make up the 27 nt peak in both serum and plasma. FIG. 16D: YRNAs also map to the 30-33 nt peak in both serum and plasma. FIG. 16E: tRNAs map to reads in the 30-33 nt peak in serum, but not plasma.

[0037] FIG. 17A-FIG. 17E show comparison of small RNA species in human and mouse serum. Human: red; mouse: blue. FIG. 17A: Comparison of read length distributions of small RNAs extracted from human and mouse sera. Length distribution is displayed by percentage of sequencing reads that map to the hg19 human genome or mm10 mouse genome. Reads were mapped with Bowtie according to the end-to-end k-difference policy allowing two mismatches and multiple reportable alignments for each read. FIG. 17B: Comparison of the annotated noncoding small RNAs in human and mouse serum. The x-axis denotes the types of annotated small RNAs: YRNAs, tRNAs, rRNAs, and Other (other noncoding small RNAs including snRNAs and snoRNAs). The y-axis represents the reads that map to the indicated small RNA type as percentage of the total reads sequenced from the human or mouse serum samples. FIG. 17C: YRNAs map to reads in the 27 nt peak in human serum, but are scarce in mouse serum. FIG. 17D: YRNAs are present in the 30-33 nt size range in human, but are scarce in mouse serum. FIG. 17E: tRNAs map to reads in the 30-33 nt peak in mouse, but are scarce in human. In FIG. 17C-FIG. 17E, the x-axis represents the read length in nucleotides. The y-axis represents the percentage of the total number of reads sequenced from the human or mouse serum samples that are of the indicated length.

### DETAILED DESCRIPTION OF THE INVENTION

### I. Definitions

[0038] As used herein, the following terms have the meanings ascribed to them unless specified otherwise.

[0039] In this disclosure the term “or” is generally employed in its sense including “and/or” unless the content clearly dictates otherwise.

[0040] The term “nucleic acid” or “polynucleotide” refers to deoxyribonucleic acids (DNA) or ribonucleic acids (RNA) and polymers thereof in either single- or double-stranded form. Unless specifically limited, the term encompasses nucleic acids containing known analogues of natural nucleotides that have similar binding properties as the reference nucleic acid and are metabolized in a manner similar to naturally occurring nucleotides. Unless otherwise indicated, a particular nucleic acid sequence also implicitly encompasses conservatively modified variants thereof (e.g., degenerate codon substitutions), alleles, orthologs, SNPs, and complementary sequences as well as the sequence explicitly indicated. Specifically, degenerate codon substitutions may be achieved by generating sequences in which the third position of one or more selected (or all) codons is substituted with mixed-base and/or deoxyinosine residues (Batzer et al., Nucleic Acid Res. 19:5081 (1991); Ohtsuka et al., J. Biol. Chem. 260:2605-2608 (1985); and Rossolini et al., Mol. Cell. Probes 8:91-98 (1994)).

[0041] The term “gene” means the segment of DNA involved in producing a RNA or polypeptide chain. It may include regions preceding and following the non-coding region. It may also include regions preceding and following the coding region (leader and trailer) as well as intervening sequences (introns) between individual coding segments (exons).

[0042] The term “nucleotide” covers naturally occurring nucleotides as well as nonnaturally occurring nucleotides. It should be clear to the person skilled in the art that various nucleotides which previously have been considered “non-naturally occurring” have subsequently been found in nature. Thus, “nucleotides” includes not only the known purine and pyrimidine heterocycles-containing molecules, but also heterocyclic analogues and tautomers thereof. Illustrative examples of other types of nucleotides are molecules containing adenine, guanine, thymine, cytosine, uracil, purine, xanthine, diaminopurine, 8-oxo-N6-methyladenine, 7-deazaxanthine, 7-deazaguanine, N4,N4-ethanocytosin, N6,N6-ethano-2,6-diaminopurine, 5-methylcytosine, 5-(C3-C6)-alkynylcytosine, 5-fluorouracil, 5-bromouracil, pseudoisocytosine, 2-hydroxy-5-methyl-4-triazolopyridin, isocytosine, isoguanin, inosine and the “non-naturally occurring” nucleotides described in U.S. Pat. No. 5,432,272. The term “nucleotide” is intended to cover every and all of these examples as well as analogues and tautomers thereof. Especially interesting nucleotides are those containing adenine, guanine, thymine, cytosine, and uracil, which are considered as the naturally occurring nucleotides in relation to therapeutic and diagnostic application in humans. Nucleotides include the natural 2′-deoxy and 2′-hydroxyl sugars, e.g., as described in Kornberg and Baker, DNA Replication, 2nd Ed. (Freeman, San Francisco, 1992) as well as their analogs.

[0043] In this disclosure the term “isolated” nucleic acid molecule means a nucleic acid molecule that is separated from other nucleic acid molecules that are usually associated with the isolated nucleic acid molecule. Thus, an “isolated” nucleic acid molecule includes, without limitation, a nucleic acid molecule that is free of nucleotide sequences that naturally flank one or both ends of the nucleic acid in the genome of the organism from which the isolated nucleic acid is derived (e.g., a cDNA or genomic DNA fragment produced by PCR or restriction endonuclease digestion). Such an isolated nucleic acid molecule is generally introduced into a vector (e.g., a cloning vector or an expression vector) for convenience of manipulation or to generate a fusion nucleic acid molecule. In addition, an isolated nucleic acid molecule can include an engineered nucleic acid molecule such as a recombinant or a synthetic nucleic acid molecule. A nucleic acid molecule existing among hundreds to millions of other nucleic acid molecules within, for example, a nucleic acid library (e.g., a cDNA or genomic library) or a gel (e.g., agarose, or polyacrylamide) containing restriction-digested genomic DNA, is not an “isolated” nucleic acid.

[0044] “Purified polynucleotide” or “isolated polynucleotide” refers to a polynucleotide of interest or fragment thereof which is essentially free, e.g., contains less than about 50%, preferably less than about 70%, and more preferably less than about at least 90%, of the protein with which the polynucleotide is naturally associated. Techniques for purifying polynucleotides of interest are well-known in the art and include, for example, disruption of the cell containing the polynucleotide with a chaotropic agent and separation of the polynucleotide(s) and proteins by ion-exchange chromatography, affinity chromatography and sedimentation according to density.

[0045] “Analogs” in reference to nucleotides includes synthetic nucleotides having modified base moieties and/or modified sugar moieties. Such analogs include synthetic nucleotides designed to enhance binding properties, e.g., duplex or triplex stability, specificity, or the like.

[0046] “Complementary,” as used herein, refers to the capacity for precise pairing between two nucleotides on one or two oligomeric strands. For example, if a nucleobase at a certain position of an antisense compound is capable of hydrogen bonding with a nucleobase at a certain position of a target nucleic acid, said target nucleic acid being a DNA, RNA, or oligonucleotide molecule, then the position of hydrogen bonding between the oligonucleotide and the target nucleic acid is considered to be a complementary position. The oligomeric compound and the further DNA, RNA, or oligonucleotide molecule are complementary to each other when a sufficient number of complementary positions in each molecule are occupied by nucleotides which can hydrogen bond with each other. Thus, “specifically hybridizable” and “complementary” are terms which are used to indicate a sufficient degree of precise pairing or complementarity over a sufficient number of nucleotides such that stable and specific binding occurs between the oligomeric compound and a target nucleic acid.

[0047] “Percentage of sequence identity” is determined by comparing two optimally aligned sequences over a comparison window, wherein the portion of the polynucleotide sequence in the comparison window may comprise additions or deletions (i.e., gaps) as compared to the reference sequence (e.g., a polypeptide of the invention), which does not comprise additions or deletions, for optimal alignment of the two sequences. The percentage is calculated by determining the number of positions at which the identical nucleic acid base or amino acid residue occurs in both sequences to yield the number of matched positions, dividing the number of matched positions by the total number of positions in the window of comparison and multiplying the result by 100 to yield the percentage of sequence identity.

[0048] The terms “identical” or percent “identity,” in the context of two or more nucleic acids or polypeptide sequences, refer to two or more sequences or subsequences that are the same sequences. Two sequences are “substantially identical” if two sequences have a specified percentage of amino acid residues or nucleotides that are the same (i.e., 70%, 75%, 80%, 85%, 90%, 95%, 96%, 97%, 98% or 99% sequence identity over a specified region, or, when not specified, over the entire sequence of a reference sequence), when compared and aligned for maximum correspondence over a comparison window, or designated region as measured using one of the following sequence comparison algorithms or by manual alignment and visual inspection. Optionally, the identity exists over a region that is at least about 10, 15, 25 or 50 nucleotides in length, or over the full length of the reference sequence.

[0049] For sequence comparison, typically one sequence acts as a reference sequence, to which test sequences are compared. When using a sequence comparison algorithm, test and reference sequences are entered into a computer, subsequence coordinates are designated, if necessary, and sequence algorithm program parameters are designated. Default program parameters can be used, or alternative parameters can be designated. The sequence comparison algorithm then calculates the percent sequence identities for the test sequences relative to the reference sequence, based on the program parameters.

[0050] Two examples of algorithms that are suitable for determining percent sequence identity and sequence similarity are the BLAST and BLAST 2.0 algorithms, which are described in Altschul et al. (1977) Nuc. Acids Res. 25:3389-3402, and Altschul et al. (1990) J. Mol. Biol. 215:403-410, respectively. Software for performing BLAST analyses is publicly available through the National Center for Biotechnology Information. This algorithm involves first identifying high scoring sequence pairs (HSPs) by identifying short words of length W in the query sequence, which either match or satisfy some positive-valued threshold score T when aligned with a word of the same length in a database sequence. T is referred to as the neighborhood word score threshold (Altschul et al., supra). These initial neighborhood word hits act as seeds for initiating searches to find longer HSPs containing them. The word hits are extended in both directions along each sequence for as far as the cumulative alignment score can be increased. Cumulative scores are calculated using, for nucleotide sequences, the parameters M (reward score for a pair of matching residues; always >0) and N (penalty score for mismatching residues; always <0). For amino acid sequences, a scoring matrix is used to calculate the cumulative score. Extension of the word hits in each direction are halted when: the cumulative alignment score falls off by the quantity X from its maximum achieved value; the cumulative score goes to zero or below, due to the accumulation of one or more negative-scoring residue alignments; or the end of either sequence is reached. The BLAST algorithm parameters W, T, and X determine the sensitivity and speed of the alignment. The BLASTN program (for nucleotide sequences) uses as defaults a wordlength (W) of 11, an expectation (E) or 10, M=5, N=−4 and a comparison of both strands. For amino acid sequences, the BLASTP program uses as defaults a wordlength of 3, and expectation (E) of 10, and the BLOSUM62 scoring matrix (see Henikoff and Henikoff (1989) Proc. Natl. Acad. Sci. USA 89:10915) alignments (B) of 50, expectation (E) of 10, M=5, N=−4, and a comparison of both strands.

[0051] The BLAST algorithm also performs a statistical analysis of the similarity between two sequences (see, e.g., Karlin and Altschul (1993) Proc. Natl. Acad. Sci. USA 90:5873-5787). One measure of similarity provided by the BLAST algorithm is the smallest sum probability (P(N)), which provides an indication of the probability by which a match between two nucleotide or amino acid sequences would occur by chance. For example, a nucleic acid is considered similar to a reference sequence if the smallest sum probability in a comparison of the test nucleic acid to the reference nucleic acid is less than about 0.2, more preferably less than about 0.01, and most preferably less than about 0.001.

[0052] The term “variant” refers to biologically active derivatives of the reference molecule that retain desired activity. In general, the term “variant” refers to molecules (e.g., small non-coding RNAs, microRNAs, tRNAs, YRNAs) having a native sequence and structure with one or more additions, substitutions (generally conservative in nature) and/or deletions, relative to the native molecule, so long as the modifications do not destroy biological activity and which are “substantially homologous” to the reference molecule. In general, the sequences of such variants will have a high degree of sequence homology to the reference sequence, e.g., sequence homology of more than 50%, generally more than 60%-70%, even more particularly 80%-85% or more, such as at least 90%-95% or more, when the two sequences are aligned.

[0053] “Recombinant” as used herein to describe a nucleic acid molecule means a polynucleotide of genomic, cDNA, viral, semisynthetic, or synthetic origin which, by virtue of its origin or manipulation, is not associated with all or a portion of the polynucleotide with which it is associated in nature. The term “recombinant” as used with respect to a protein or polypeptide means a polypeptide produced by expression of a recombinant polynucleotide. In general, the gene of interest is cloned and then expressed in transformed organisms, as described further below. The host organism expresses the foreign gene to produce the protein under expression conditions.

[0054] The term “transformation” refers to the insertion of an exogenous polynucleotide into a host cell, irrespective of the method used for the insertion. For example, direct uptake, transduction or f-mating are included. The exogenous polynucleotide may be maintained as a non-integrated vector, for example, a plasmid, or alternatively, may be integrated into the host genome.

[0055] A “expression vector” or “expression cassette” is capable of transferring nucleic acid sequences to target cells (e.g., viral vectors, non-viral vectors, particulate carriers, and liposomes). Typically, “vector expression cassette” and “expression vector” refer to any nucleic acid construct capable of directing the expression of a nucleic acid of interest and which can transfer nucleic acid sequences to target cells. Thus, the term includes cloning and expression vehicles, as well as viral vectors.

[0056] “Recombinant host cells”, “host cells,” “cells”, “cell lines,” “cell cultures”, and other such terms denoting microorganisms or higher eukaryotic cell lines cultured as unicellular entities refer to cells which can be, or have been, used as recipients for recombinant vector or other transferred DNA, and include the original progeny of the original cell which has been transfected.

[0057] “Operably linked” refers to an arrangement of elements wherein the components so described are configured so as to perform their usual function. Thus, a given promoter operably linked to a coding sequence is capable of effecting the expression of the coding or non-coding sequence when the proper enzymes are present. Expression is meant to include the transcription of any one or more of transcription of a small non-coding RNA, e.g., microRNA, siRNA, piRNA, snRNA, and lncRNA, antisense nucleic acid, or mRNA from a DNA or RNA template and can further include translation of a protein from an mRNA template. The promoter need not be contiguous with the coding sequence, so long as it functions to direct the expression thereof. Thus, for example, intervening untranslated yet transcribed sequences can be present between the promoter sequence and the coding or non-coding sequence and the promoter sequence can still be considered “operably linked” to the coding or non-coding sequence.

[0058] The phrase “differentially expressed” refers to differences in the quantity and/or the frequency of a biomarker present in a sample taken from patients having, for example, cancer caloric restriction, or age-related disease, as compared to a control subject. For example, a biomarker can be a YRNA-derived fragment which is present at an elevated level or at a decreased level in samples of patients with breast cancer compared to samples of control subjects. Alternatively, a biomarker can be a YRNA-derived fragment which is detected at a higher frequency or at a lower frequency in samples of patients with cancer compared to samples of control subjects or control tissues. A biomarker can be differentially present in terms of quantity, frequency or both.

[0059] The terms “subject,” “individual,” and “patient,” are used interchangeably herein and refer to any mammalian subject for whom diagnosis, prognosis, treatment, or therapy is desired, particularly humans. Other subjects may include cattle, dogs, cats, guinea pigs, rabbits, rats, mice, horses, and so on. In some cases, the methods of the invention find use in experimental animals, in veterinary application, and in the development of animal models for disease, including, but not limited to, rodents including mice, rats, and hamsters; primates, and transgenic animals.

[0060] As used herein, a “biological sample” refers to a sample of tissue or fluid isolated from a subject, including but not limited to, for example, urine, blood, plasma, serum, fecal matter, bone marrow, bile, spinal fluid, lymph fluid, samples of the skin, external secretions of the skin, respiratory, intestinal, and genitourinary tracts, tears, saliva, milk, blood cells, organs, biopsies, and also samples containing cells or tissues derived from the subject and grown in culture, and in vitro cell culture constituents, including but not limited to, conditioned media resulting from the growth of cells and tissues in culture, recombinant cells, stem cells, and cell components.

[0061] A “polynucleotide hybridization method” as used herein refers to a method for detecting the presence and/or quantity of a pre-determined polynucleotide sequence based on its ability to form Watson-Crick base-pairing, under appropriate hybridization conditions, with a polynucleotide probe of a known sequence. Examples of such hybridization methods include Southern blot, Northern blot, and in situ hybridization.

[0062] A “label,” “detectable label,” or “detectable moiety” is a composition detectable by spectroscopic, photochemical, biochemical, immunochemical, chemical, or other physical means. For example, useful labels include ³²P, fluorescent dyes, electron-dense reagents, enzymes (e.g., as commonly used in an ELISA), biotin, digoxigenin, or haptens and proteins that can be made detectable, e.g., by incorporating a radioactive component into the peptide or used to detect antibodies specifically reactive with the peptide. Typically a detectable label is attached to a probe or a molecule with defined binding characteristics (e.g., a polypeptide with a known binding specificity or a polynucleotide), so as to allow the presence of the probe (and therefore its binding target) to be readily detectable.

[0063] The term “caloric restriction” refers to a diet in which the amount of calories is reduced in comparison to a normal diet without malnutrition. Typically, a caloric restricted diet constitutes about 90% or 85%, often 80%, 75%, 70%, 65%, 60%, 55%, or 50% of a normal diet for a subject. As appreciated by one of skill in the art, a normal diet is determined with respect to factors such as age, sex, height and body frame, and the like.

[0064] The term “biomarker of caloric restriction” refers to a nucleic acid sequence that is differentially expressed in caloric-restricted subject. Caloric-restricted biomarkers include those that are up-regulated (i.e., expressed at a higher level) in caloric-restriction, as well as those that are down-regulated (i.e., expressed at a lower level).

[0065] The term “up-regulation” means that the ratio of the level of product in treated vs. control is greater than one. Often, the ratio is 1.1, 1.3, 1.5, 2.0 or greater. As appreciated by those in the art, statistical analysis is typically performed to evaluate significance.

[0066] The term “down-regulation” as used herein means that the ratio of the level of product in treated vs. control is less than one. Often the ratio is 0.75, 0.5, 0.25 or less. As appreciated by those in the art, statistical analysis is typically performed to evaluate significance.

### II. General Methodology

[0067] Practicing this invention utilizes routine techniques in the field of molecular biology. Basic texts disclosing the general methods of use in this invention include Sambrook and Russell, Molecular Cloning, A Laboratory Manual (3rd ed. 2001); Kriegler, Gene Transfer and Expression: A Laboratory Manual (1990); and Current Protocols in Molecular Biology (Ausubel et al., eds., 1994)).

### III. Detailed Description of the Embodiments

### A. Small Non-Coding RNAs

[0068] As disclosed above, the small non-coding RNAs used herein refer to 5′ tRNA halves that are derived from specific tRNAs (e.g., as in Tables 3 and 4). For instance, the 5′ tRNA halves having a nucleic acid sequence corresponding to the first 27-35, e.g., 27, 28, 29, 30, 31, 32, 33, 34, 35 nucleic acids of a tRNA gene. The sncRNAs also refer to the YRNA fragments derived from specific YRNAs (e.g., as in Table 5). For instance, the YRNA fragments, having a nucleic acid sequence corresponding to the first 27-35, e.g., 27, 28, 29, 30, 31, 32, 33, 34, 35 nucleic acids of a YRNA gene (or pseudogene).

[0069] The 5′ tRNA half can be generated from the specific tRNA from which it is derived. For example, a tRNA can be cleaved by, e.g., an in vitro cleavage reaction, to generate its cognate 5′ tRNA half. Similarly, a YRNA fragment can be produced from its cognate YRNA by cleavage.

[0070] The source of the sncRNA can be naturally-occuring or synthetic. In some embodiments, a synthetic sncRNA can have a sequence that is different from a naturally-occurring sncRNA and effectively mimic the naturally-occurring sncRNA. For example, the synthetic sncRNA can have at least about 50%, at least about 55%, at least about 60%, at least about 65%, at least about 70%, at least about 75%, at least about 80%, at least about 85%, at least about 90%, at least about 95%, at least about 96%, at least about 97%, at least about 98%, at least about 99%, or greater sequence similarity to the naturally-occurring sncRNA.

[0071] Synthetic polynucleotides or oligonucleotides can be generated by, e.g., using N-phosphonate or phosphoramidite chemistries (Froehler et al., Nucleic Acid Res. 14:5399-5407 (1986); McBride et al., Tetrahedron Lett. 24:246-248 (1983)). Synthetic sequences are typically between about 10 and about 500 bases in length, more typically between about 20 and about 100 bases, and most preferably between about 40 and about 70 bases in length. In some embodiments, synthetic nucleic acids include non-natural bases, such as, but by no means limited to, inosine. As noted above, nucleic acid analogues may be used as binding sites for hybridization. An example of a suitable nucleic acid analogue is peptide nucleic acid (see, e.g., Egholm et al., Nature 363:566-568 (1993); U.S. Pat. No. 5,539,083).

### B. Generating a Small Non-Coding RNA Expression Constructs

[0072] In some embodiments, expression vector that comprise a heterologous promoter and a polynucleotide sequence for a tRNA or YRNA (e.g., as provided in Tables 3-5) is generated and introduced to a host cell (e.g., a eukaryotic cell, a prokaryotic cell, a human cell, and a cell line). Examples of promoters include, but are not limited to, inducible promoters, constitutive promoters, enhancers, and other regulatory elements. In some embodiments, the promoter is an elongation factor 1α (EF1α) promoter, a U6 promoter, or a CMV promoter. In addition to the tRNA or YRNA sequence and the promoter to which it is operably linked, the expression cassette may contain one or more additional components, including, but not limited to regulatory elements such as enhancers. In some embodiments, the sncRNA sequence is optionally associated with a regulatory element that directs the expression of the sncRNA sequence in a target cell.

[0073] In some embodiments, the expression vector can replicate and direct expression of a sncRNA in the target cell. Various expression vectors that can be used herein include, but are not limited to, expression vectors that can be used for nucleic acid expression in prokaryotic and/or eukaryotic cells. Non-limiting examples of expression vectors for use in prokaryotic cells include pUC8, pUC9, pBR322 and pBR329 available from BioRad Laboratories, (Richmond, Calif.), pPL and pKK223 available from Pharmacia (Piscataway, N.J.). Non-limiting examples of expression vectors for use in eukaryotic cells include pSVL and pKSV-10 available from Pharmacia; pBPV-1/pML2d (International Biotechnologies, Inc.); pcDNA and pTDT1 (ATCC, #31255); viral vectors based on vaccinia virus, poliovirus, adenovirus, adeno-associated virus, herpes simplex virus, a lentivirus; vectors derived from retroviruses such as Rous Sarcoma Virus, Harvey Sarcoma Virus, avian leukosis virus, human immunodeficiency virus, myeloproliferative sarcoma virus, and mammary tumor virus); and the like. Additional examples of suitable eukaryotic vectors include bovine papilloma virus-based vectors, Epstein-Barr virus-based vectors, SV40, 2-micron circle, pcDNA3.1, pcDNA3.1/GS, pYES2/GS, pMT, p IND, pIND(Sp1), pVgRXR (Invitrogen), and the like, or their derivatives

[0074] In some embodiments, the expression vectors disclosed herein can include one or more coding regions that encode a polypeptide (a “marker”) that allows for detection and/or selection of the genetically modified host cell comprising the expression vectors. The marker can be a drug resistance protein such as neomycin phosphotransferase, aminoglycoside phosphotranferase (APH); a toxin; or fluorescence. Various selection systems that are well known in the art can be used herein. The selectable marker can optionally be present on a separate plasmid and introduced by co-transfection.

[0075] Skilled artisans will appreciate that any methods, expression vectors, and target cells suitable for adaptation to the expression of a 5′ tRNA or YRNA in target cells can be used herein and can be readily adapted to the specific circumstances.

### C. Quantitating a Small Non-Coding RNA

[0076] In certain embodiments, the disclosure relates to methods of analyzing samples for expression of sncRNA or RNA disclosed herein. Typical methods are based on hybridization analysis of polynucleotides, and sequencing of polynucleotides. The most commonly used methods known in the art for the quantification of RNA expression in a sample include northern blotting and in situ hybridization; RNAse protection assays; and reverse transcription polymerase chain reaction (RT-PCR). Alternatively, antibodies may be employed that can recognize specific duplexes, including DNA duplexes, RNA duplexes, and DNA-RNA hybrid duplexes or DNA-protein duplexes. Representative methods for sequencing-based gene expression analysis include Serial Analysis of Gene Expression (SAGE), and gene expression analysis by massively parallel signature sequencing (MPSS). In certain embodiments, a sncRNA detection agent such as a complementary nucleotide sequence can be labeled to allow detection in an imaging system, such as a positron emission tomography (PET) scan, single-photon emission computed tomography (SPECT) or a similar type of scan by administering the labeled detection agent to the subject and then scanning the brain of the subject for binding. In those instances the detection agent may be labeled so as to only emit signal if bound to the sncRNA.

[0077] Reverse Transcriptase PCR (RT-PCR) may be used to compare sncRNA levels in different sample populations, in normal and disease samples, with or without drug treatment, to characterize patterns of sncRNA levels, to discriminate between closely related sncRNAs, and to analyze RNA structure. This method typically employs isolation of sncRNA from a target sample, e.g., blood, serum, plasma or other bodily fluid.

[0078] General methods for nucleic acid (e.g., RNA) extraction are well known in the art and are disclosed in standard textbooks of molecular biology, including Ausubel et al., Current Protocols of Molecular Biology, John Wiley and Sons (1997). Methods for RNA extraction from paraffin embedded tissues are disclosed, for example, in Rupp and Locker, Lab Invest. 56:A67 (1987), and De Andres et al., BioTechniques 18:42044 (1995). In particular, RNA isolation can be performed using purification kit, buffer set and protease from commercial manufacturers, such as Qiagen, according to the manufacturer's instructions. For example, total RNA from cells in culture can be isolated using Qiagen RNeasy mini-columns. RNA may be isolated, for example, by cesium chloride density gradient centrifugation.

[0079] RT-PCR can be performed using commercially available equipment, such as the ABI PRISM 7700™ Sequence Detection System™. Differential RNA expression can also be identified, or confirmed using the microarray technique.

[0080] In addition, methods of measuring sncRNA include contacting a sample from a subject with a probe, which can be a nucleic acid-containing compound. Such nucleic acid-containing compound can be complementary to at least a portion, including at least 2, at least 3, at least 4, at least 5, at least 6, at least 7, at least 8, at least 9, at least 10, or at least 11 or more nucleic acids of the sncRNA sequence. The probe can also be complementary to at least 50% m at least 60%, at least 70%, at least 80%, at least 90% or at least 95%, at least 98%, or more of the sncRNA sequence. The probe can itself emit a signal or be linked to or bind to a compound that emits a signal, that can be measured, or can be used in a method of measurement such as during a PCR-based technique.

### D. Diagnosing Health Status Using a Small Noncoding RNA

[0081] The present invention related to assaying sncRNA (e.g., 5′tRNA halves and YRNA fragments) to determine or monitor an individual's health status, e.g., aging and/or caloric restriction. The present invention also relates to the use of sncRNA biomarkers to detect cancer, e.g., breast cancer. More specifically, the biomarkers of the present invention can be used in diagnostic tests to determine, characterize, qualify, and/or assess cancer status, for example, to diagnose cancer, in an individual, subject or patient.

[0082] In some embodiments, the presence or level of one or more 5′ tRNA halves, e.g., 1, 2, 3, 4, 5, 6, 7, 8, 9, 10, 20, 30, 40, 50 or more 5′ tRNA halves, are used to determine a subject's health status. In some cases, the 5′ tRNA halves are selected from those disclosed in Tables 3 and 4 and Dhahbi et al., BMC Genomics, 2013, 14:298, the disclosure of which is herein incorporated by reference in its entirety for all purposes.

[0083] In some embodiments, the presence or level of one or more YRNA fragments, e.g., 1, 2, 3, 4, 5, 6, 7, 8, 9, 10, 20, 30, 40, 50 or more YRNA fragment, are used to determine a subject's health status. In some cases, the 5′ YRNA fragment are selected from those disclosed in Table 5 and Dhahbi et al., Physiol Genomics, 2013, 45(21):990-998, the disclosure of which is herein incorporated by reference in its entirety for all purposes.

[0084] Detection and quantification of RNA expression can be achieved by any one of a number of methods well known in the art, including those described above. For instance, using the known sequences for the sncRNA biomarkers, specific probes and primers can be designed for use in the detection methods described herein as appropriate.

[0085] In some cases, the RNA detection method requires isolation of nucleic acid from a sample, such as a cell or tissue sample. Nucleic acids, including RNA and specifically scnRNAs, can be isolated using any suitable technique known in the art. For example, phenol-based extraction is a common method for isolation of RNA. Phenol-based reagents contain a combination of denaturants and RNase inhibitors for cell and tissue disruption and subsequent separation of RNA from contaminants. Phenol-based isolation procedures can recover RNA species in the 10-200-nucleotide range (e.g., sncRNAs). In addition, extraction procedures such as those using TRIZOL™ or TRI REAGENT™, will purify all RNAs, large and small, and are efficient methods for isolating total RNA from biological samples that contain small non-coding RNAs.

### E. Kits

[0086] For use in diagnostic, research and therapeutic applications suggested above, kits are also provided by the invention. In the diagnostic and research applications such kits may include any or all of the following: assay reagents, buffers, hybridization probes and/or primers, control small non-coding RNAs, etc. A therapeutic product may include sterile saline or another pharmaceutically acceptable emulsion and suspension base.

[0087] The kits may include instructional materials containing directions (i.e., protocols) for the practice of the methods of this invention. While the instructional materials typically comprise written or printed materials they are not limited to such. Any medium capable of storing such instructions and communicating them to an end user is contemplated by this invention. Such media include, but are not limited to electronic storage media (e.g., magnetic discs, tapes, cartridges, chips), optical media (e.g., CD ROM), digital media, and the like. Such media may include addresses to internet sites that provide such instructional materials.

[0088] A wide variety of kits and components can be prepared according to the present invention, depending upon the intended user of the kit and the particular needs of the user.

### IV. Examples

[0089] The following examples are offered to illustrate, but not to limit the claimed invention.

### Example 1

### 5′ tRNA Halves are Present as Abundant Complexes in Serum, Concentrated in Blood Cells, and Modulated by Aging and Calorie Restriction

[0090] Small RNAs complex with proteins to mediate a variety of functions in animals and plants. Some small RNAs, particularly miRNAs, circulate in mammalian blood and may carry out a signaling function by entering target cells and modulating gene expression. The subject of this study is a set of circulating 30-33 nt RNAs that are processed derivatives of the 5′ ends of a small subset of tRNA genes, and closely resemble cellular tRNA derivatives (tRFs, tiRNAs, half-tRNAs, 5′ tRNA halves) previously shown to inhibit translation initiation in response to stress in cultured cells.

[0091] In sequencing small RNAs extracted from mouse serum, we identified abundant 5′ tRNA halves derived from a small subset of tRNAs, implying that they are produced by tRNA type-specific biogenesis and/or release. The 5′ tRNA halves are not in exosomes or microvesicles, but circulate as particles of 100-300 kDa. The size of these particles suggest that the 5′ tRNA halves are a component of a macromolecular complex; this is supported by the loss of 5′ tRNA halves from serum or plasma treated with EDTA, a chelating agent, but their retention in plasma anticoagulated with heparin or citrate. A survey of somatic tissues reveals that 5′ tRNA halves are concentrated within blood cells and hematopoietic tissues, but scant in other tissues, suggesting that they may be produced by blood cells. Serum levels of specific subtypes of 5′ tRNA halves change markedly with age, either up or down, and these changes can be prevented by calorie restriction.

[0092] We demonstrate that 5′ tRNA halves circulate in the blood in a stable form, most likely as part of a nucleoprotein complex, and their serum levels are subject to regulation by age and calorie restriction. They may be produced by blood cells, but their cellular targets are not yet known. The characteristics of these circulating molecules, and their known function in suppression of translation initiation, suggest that they are a novel form of signaling molecule.

[0093] Several classes of small RNAs have been found to mediate biological functions in animals and plants [1-5]. miRNAs, siRNAs, piRNAs, and others are bound by Argonaute proteins, and have the common property of directing protein complexes to nucleic acids with sequence complementarity, where they may cleave or otherwise alter the target [6]. In both plants and animals, some small RNAs are able to travel between tissues within an organism, thus transferring their functions to other cells. In vertebrates, there has been much recent interest in the presence of specific miRNAs in the plasma and serum; there is some evidence that these can be taken up by cells and alter gene expression, and there is also interest in the possibility that they can be markers of specific disease states, including cancer [7-9].

[0094] There is also evidence for processing of non-coding RNAs into smaller RNAs, many with as yet poorly understood functions [10, 11]. Many of the non-coding RNAs that appear to undergo processing into smaller RNAs have well studied functions, although their smaller derivatives often do not. In particular, tRNA is processed into shorter forms termed tRNA fragments (tRFs) [12, 13]. The subject of this report is a tRNA fragment created by cleavage of tRNA near the anticodon loop to create a “5′ tRNA half” (the term we will use here). Previous reports have described 5′ tRNA halves as intracellular molecules interacting with components of the translation initiation complex. 5′ tRNA halves have been shown to be induced by the ribonuclease angiogenin in response to stress in cultured cells, to promote assembly of stress granules carrying stalled preinitiation complexes, and to inhibit mRNA translation [14, 15]; little more is known about their function.

[0095] We have sequenced small RNAs present in mouse serum; when multiple reportable alignments of the sequencing reads to the mouse genome were allowed, we noted the presence of a class of tRNA-derived 30-33 nt fragments that closely resemble the 5′ tRNA halves previously described in stressed cell cultures. Investigation of these 5′ tRNA halves reveals a novel class of circulating small RNAs whose characteristics, including changes with age that are antagonized by calorie restriction, strongly suggest physiologic regulation and function.

### Results

### Sequencing and Computational Analysis of Small RNAs Circulating in Mouse Serum

[0096] While investigating the effects of aging and calorie restriction (CR) on the profiles of cell-free small RNAs circulating in the bloodstream, we used small RNA-Seq (Illumina reads of 50 nt) to compare the serum levels of small RNAs from young and old control mice, and old mice subjected to CR. A combined total of 196,083,881 pre-processed sequencing reads obtained from 9 different serum samples, were mapped to the mouse genome with bowtie using parameters that align reads according to a policy similar to Maq's default policy [16]. Alignment of the combined 196,083,881 pre-processed sequencing reads generated a dataset of 163,078,230 mapped reads (83.2%), ranging from 5 to 48 nt. The size distribution of the mapped reads revealed an expected peak at 20-24 nt consistent with the size of miRNAs (FIG. 1).

[0097] Only if multiple reportable alignments are allowed during bowtie mapping does an unfamiliar second peak emerge at 30-33 nt (FIG. 1A). The 30-33 nt peak persists when the bowtie alignment mode is changed from the Maq's default policy (n option) to the end-to-end k-difference policy (v option), but again disappears when multiple reportable alignments are suppressed (FIG. 1B). The same two-peak pattern was observed when the 9 individual sequenced serum small RNA samples were mapped to the mouse genome (FIG. 1C). Dependence of the 30-33 nt peak on multiple reportable alignments indicates that the reads are encoded by repetitive DNA. Six percent of the 163,078,230 mapped reads, aligned to a group of RepeatMasker classes (DNA, LINE, LTR, Low complexity, RC, SINE, Satellite, and Simple repeat); these reads were mainly <20 nt in size (FIG. 12) and were not considered for further analysis.

[0098] Annotation analysis of the mapped sequencing reads revealed that the 30-33 nt peak consists of reads mapping to tRNA genes (FIG. 2A), which are present in multiple copies in the genome. Reads in the 20-24 nt peak were mostly annotated as miRNAs. Further analysis showed that of the total 163,078,230 reads that mapped to the mouse genome, 128,703,415 (79%) map to sequences encoding small RNAs, of which 67% and 31% were annotated as tRNAs and miRNAs, respectively (FIG. 2B). The remaining <3% of reads mapped to sequences annotated as encoding rRNA and other small RNAs (scRNA, snRNA, srpRNA).

Characterization of Circulating Small RNAs Derived from tRNAs

[0099] Since the 86,343,437 reads that align to tRNA genes are only 30 to 33 nt, and thus do not represent full length tRNAs, we examined the tRNA end distribution of the reads, and annotated the reads based on their overlap with 5′ or 3′ ends of tRNAs. More than 99% of the tRNA-derived reads align with the 5′ end of a tRNA; this is exemplified in FIG. 3 for two tRNA genes.

[0100] 23%, 17%, 35%, and 26% of the sequencing reads that map to tRNAs are 30, 31, 32, and 33 nucleotide in size, respectively (Table 1), indicating that full length tRNAs are cleaved in the anticodon loop at more than one site and at varying rates to generate the 5′ tRNA halves found in serum. As an example, FIG. 4 depicts the size frequency of reads mapping to the 5′ end of the chr1.tRNA704-GlyGCC gene; this indicates that this tRNA is cleaved at different rates and at 4 different sites located upstream of the GCC anticodon in the anticodon loop.

TABLE 1
Total number and percentage of the different sizes of sequencing reads
that map to tRNAs

| Read size in nucleotides | number of reads | Percentage of reads |
|---|---|---|
| 30 | 16649224 | 23% |
| 31 | 12343893 | 17% |
| 32 | 25190160 | 35% |
| 33 | 18724475 | 26% |

[0101] It is unlikely that this result is a sequencing artifact: the full length of most tRNAs is 75-90 nt, and the sequencing runs used to generate these data were 50 cycles while the reads occupy a narrow size range of 30-33 nt. This pattern suggests that the tRNA reads were derived from processed fragments of full length tRNAs; the remainder of the tRNA was not significantly detected in the serum small RNA libraries. In support of this conclusion, tRNAs have been shown to undergo cleavage within anticodon loops to produce tRNA-derived stress-induced fragments (tiRNAs) when cultured cells are subjected to stresses such as arsenite, heat shock, or ultraviolet irradiation [17, 18]. Such cleavage of the anticodon loop does not seem to be part of a tRNA degradation process, because the generated 5′ tRNA fragments are stable in the cell. Our findings indicate that tRNA fragments highly similar to tiRNAs are present under normal (unstressed) conditions, and can remain stable even after they are released into the peripheral blood. 5′ but not 3′ tRNA fragments inhibit mRNA translation initiation in cultured cell lines [18].

[0102] The individual 5′ tRNA halves present in serum are derived from a small subset of tRNAs (FIG. 2C). The most abundant circulating tRNA halves were derived from the isoacceptors of glycine (46%), valine (44%), glutamine (8%), and histidine (1%), and the remaining amino acids together represented <1%. We contrasted the number of tRNA genes in the Genomic tRNA Database [19], with the relative abundances of the circulating 5′ tRNA halves, and found no correlation (Table 2). For example, the most abundant circulating 5′ tRNA halves were derived from tRNA-Gly, and the copy number of tRNA-Gly gene is 29; on the other hand tRNA-Cys genes, with a copy number of 57, generate <1% of the 5′ tRNA-Cys halves.

TABLE 2
Frequencies of circulating 5′ tRNA halves and the gene copy number
of tRNAs from which the tRNA halves were derived

| | | % of |
|---|---|---|
| tRNA type | gene copy number | circulating tRNA halves |
| Gly | 29 | 46% |
| Val | 23 | 44% |
| Glu | 21 | 8% |
| His | 11 | 1% |
| Others* | 351 | <1% |

*All the remaining tRNAs combined.

[0103] This implies a tRNA type-specific biogenesis and/or release of the circulating 5′ tRNA halves.

Presence in Circulating Mouse Blood of Particles Containing Stable Cell-Free 5′ tRNA Halves

[0104] To obtain an independent validation of the sequencing results, we used Northern blotting to analyze small RNAs circulating in the mouse serum. As a positive control for detection of tRNA halves by Northern blotting, we included RNA from U2OS cells cultured in the absence or presence of sodium arsenite, which is known to generate tRNA halves in these cells [18]. We probed RNA from mouse serum with oligonucleotides complementary to 5′ or 3′ ends of specific tRNAs. Probes specific for the 5′ ends of tRNA-Gly-GCC or tRNA-Val-CAC detected a band migrating near the 30 nt RNA marker (FIGS. 5A and C) confirming the presence of stable circulating 5′ tRNA halves. No significant bands migrated with the 30 nt RNA marker when the same Northern blot was probed for the 3′ end of tRNA-Gly-GCC or tRNA-Val-CAC (FIGS. 5B and D).

[0105] We also probed RNA from mouse serum with a probe complementary to the 5′ end of tRNA-Asn-GTT to confirm the low abundance of circulating tRNA halves derived from tRNAs that were barely detected in the sequencing data. A 5-day exposure to X-ray film showed a very weak signal from tRNA-Asn-GTT probe compared to the strong signal from the tRNA-Gly-GCC probe obtained after a short (25 minute) exposure (FIG. 13). These results are consistent with the sequencing, and inconsistent with a sequencing bias. They imply a tRNA type-specific biogenesis and/or release of the circulating 5′ tRNA halves.

[0106] We next asked if the 5′ tRNA halves are contained within circulating exosomes or microvesicles. We Northern blotted RNA extracted from pellet or supernatant after ultracentrifugation of mouse serum at 110,000 g for 2 hours. A probe for the 5′ end of tRNA-Gly-GCC detected an ˜30 nt band present mainly in the supernatant and visible only as a trace in the pellet (FIG. 5E), while a probe for the 3′ end did not detect any significant signal (FIG. 5F). Identical results were obtained for the 5′ end of tRNA-Val-CAC (FIG. 6A). These findings indicate that the 5′tRNA halves are mostly not included in exosomes or microvesicles, which would pellet in these conditions. Similarly, exosome encapsulation is not required for the stability of circulating miRNAs; after pelleting exosomes by ultracentrifugation of plasma, miRNAs were still detected in the supernatant fraction [20, 21].

[0107] Because the tRNA halves we observe are stable in circulation but not encapsulated in exosomes, they are most likely complexed to carrying factors (e.g., proteins that protect them from degradation). To determine the size range of the putative complexes carrying the 5′ tRNA halves in the serum, we Northern blotted RNA extracted from concentrate or filtrate fractions after ultrafiltration of mouse serum samples through Vivaspin 2 columns with 30, 100, or 300 kDa MW cut-off. A probe for the 5′ end of tRNA-Gly-GCC detected a ˜30 nt band in the concentrates of 30 and 100 kDa MW cut-off, and in the filtrate of 300 kDa MW cut-off (FIG. 5G). Identical results were obtained for the 5′ end of tRNA-Val-CAC (FIG. 6B).

[0108] Thus 5′ tRNA halves circulate as part of 100-300 kDa complexes, while the 5′ tRNA halves themselves are only ˜10 kDa. This is reminiscent of reports that miRNAs can circulate in the bloodstream as components of RNA-protein/lipoprotein complexes. Stable argonaute 2-miRNA complexes that are not part of microvesicles were recovered from plasma and serum, and high-density lipoprotein has been reported to carry and deliver miRNAs to recipient cells [20-22].

5′ tRNA Halves are Concentrated in Hematopoietic and Lymphoid Tissues

[0109] To investigate whether 5′ tRNA halves are present in tissues we extracted total RNA from liver, spleen, and testes, and did Northern blots with probes complementary to 5′ and 3′ ends of tRNAs. We detected tRNA halves with a probe complementary to the 5′ end of tRNA-Gly-GCC in the spleen, but not in the liver and testes; a probe for the 3′ end tRNAs detected only full length tRNAs in all 3 tissues (FIG. 7A-B). This prompted us to explore the possibility that 5′ tRNA halves are present specifically in hematopoietic tissues. Northern blotting of several mouse tissues confirmed that 5′ tRNA halves are present in hematopoietic and lymphoid tissues including spleen, lymph nodes, fetal liver, leukocytes, bone marrow, and thymus, but almost absent in non-immune tissues including testes, liver, heart, brain, and kidney (FIG. 7); the presence of 3′ tRNA halves was not significant in any tissue. This finding is consistent with a previous report [23], in which tRNA halves were unexpectedly detected on cloning of microRNAs from human fetal liver, which is the main hematopoietic organ during fetal development. Identical results were obtained when the same Northern blots were probed for the 5′ and 3′ ends of tRNA-Val-CAC (FIG. 8).

[0110] More extensive studies will establish if 5′ tRNA halves are concentrated in particular blood cell types, although the very high levels in lymph nodes point to lymphocytes as one such type. The evidence does not establish whether the 5′ tRNA halves are concentrated in hematopoietic cells because they are produced there, or because they are preferentially taken up from the blood: neither the origin nor the destinations of the 5′ tRNA halves is certain. The low levels of 5′ tRNA halves present in non-hematopoietic tissues may indicate low levels in those tissues, but they may also be derived from residual blood cells in those tissues.

A Chelating Agent Destabilizes Circulating 5′ tRNA Halves

[0111] Because clotting has the potential to release particles that are not present in circulating blood, we asked if 5′ tRNA halves circulating in the mouse serum are also present in mouse plasma. Northern blotting with a 5′ tRNA half probe gave a very weak band in a plasma sample when compared to the band derived from an equal volume of serum from the same mouse (FIG. 9). The lack of 5′ tRNA halves in plasma is not due to a global loss of small RNAs during preparation of the plasma, which was anticoagulated with EDTA. We used qPCR to assess the integrity of two circulating miRNAs in mouse serum, serum treated with EDTA, and plasma collected with EDTA. As shown by amplification in all three specimens (FIG. 10), EDTA does not affect these circulating miRNAs.

[0112] This result could suggest that 5′ tRNA halves are an artifact of blood clotting, but could also be an effect of EDTA, a chelating agent that depletes ions required for clotting. To assess the effects of EDTA on 5′ tRNA halves, we used Northern blotting to analyze a sample of serum that was incubated with EDTA for 15 min before RNA extraction. We also analyzed a sample of plasma extracted from blood collected with heparin, a nonchelating anticoagulant. This analysis showed that treatment of serum with EDTA significantly decreased the signal corresponding the 5′ tRNA halves, while 5′ tRNA halves are abundant in heparinized plasma (FIG. 9). The same results were obtained with RNAs from human plasma collected on EDTA and from serum (FIG. 11). These findings suggest that chelation of ions by EDTA destabilizes the complexes carrying 5′ tRNA halves, exposing the RNA to ribonucleases which are abundant in plasma.

Calorie Restriction Offsets Age-Associated Changes in Levels of Specific Circulating 5′ tRNA Halves

[0113] Calorie restriction (CR) can delay, prevent, or reverse many age-associated changes in physiologic parameters. We used aging and CR as model physiologic states to explore the possibility that they are associated with changes in the levels of circulating 5′ tRNA halves. We performed pairwise comparisons between young and old control groups to measure the differential abundance in circulating 5′ tRNA halves associated with old age, and between old control and old CR groups to determine whether CR has an effect on any age-associated changes.

[0114] This analysis revealed that aging is associated with alterations, either increase or decrease, in the circulating levels of 5′ tRNA halves derived from specific tRNA isoacceptors (Table 3). Notably, CR mitigated most of these age-related changes (Table 3), although it did not completely prevent them. CR has been shown to oppose the molecular and biological markers of aging including alterations in gene expression [24]. A causal relationship between circulating 5′ tRNA halves and the manifestations of aging is not established by this study, but it does indicate that levels are regulated in an age-associated fashion.

TABLE 3
Age-associated changes in the levels of mouse circulating 5′ tRNA halves and the
effects of CR on the age-associated changes

| | Young | Old | | Age | | CR | |
|---|---|---|---|---|---|---|---|
| tRNA* | control † | control† | Old CR† | FC‡ | p-value | FC‡ | p-value |
| His-GTG | | | | | | | |
| chr4:82619623-82619694 | 797 | 2988 | 1554 | 3.8 | 3.1E−11 | −2 | 6.8E−04 |
| chr2:122377363-122377434 | 798 | 2994 | 1549 | 3.8 | 3.7E−11 | −2 | 6.4E−04 |
| chr3:96452495-96452566 | 307 | 1140 | 590 | 3.8 | 3.8E−11 | −2 | 6.1E−04 |
| chr2:122375494-122375565 | 808 | 2990 | 1533 | 3.8 | 3.9E−11 | −2 | 5.0E−04 |
| chr2:122377968-122378039 | 309 | 1163 | 600 | 3.8 | 4.2E−11 | −2 | 6.6E−04 |
| chr3:96458070-96458141 | 802 | 2993 | 1523 | 3.8 | 4.3E−11 | −2 | 4.8E−04 |
| chr3:96500366-96500437 | 796 | 2954 | 1524 | 3.8 | 4.5E−11 | −2 | 5.9E−04 |
| chr3:96410069-96410140 | 301 | 1148 | 590 | 3.9 | 2.0E−11 | −2 | 5.5E−04 |
| Arg-CCG | | | | | | | |
| chr11: 107012866-107012938 | 1243 | 256 | 302 | −5 | 9.9E−12 | 1.2 | 4.7E−01 |
| Cys-GCA | | | | | | | |
| chr11:97798906-97798977 | 933 | 370 | 688 | −2.6 | 2.5E−06 | 1.8 | 2.4E−03 |
| chr11:97988246-97988317 | 928 | 376 | 700 | −2.5 | 3.9E−06 | 1.8 | 2.2E−03 |
| chr11:97988923-97988994 | 930 | 360 | 684 | −2.6 | 1.3E−06 | 1.9 | 1.5E−03 |
| Gly-GCC | | | | | | | |
| chr1:171074302-171074372 | 16868 | 3739 | 3807 | −4.5 | 3.5E−14 | −1 | 9.6E−01 |
| chr1:171066631-171066701 | 16820 | 3730 | 3790 | −4.5 | 4.3E−14 | −1 | 9.6E−01 |
| chr1:171081876-171081946 | 16779 | 3725 | 3788 | −4.4 | 5.3E−14 | −1 | 9.6E−01 |
| Lys-CTT | | | | | | | |
| chr17:23533962-23534034 | 4175 | 1939 | 3286 | −2.2 | 8.8E−06 | 1.7 | 3.7E−03 |
| chr3:96428235-96428307 | 4215 | 1964 | 3353 | −2.2 | 1.0E−05 | 1.7 | 3.3E−03 |
| chr17:23547360-23547432 | 4098 | 1923 | 3272 | −2.2 | 1.1E−05 | 1.7 | 3.4E−03 |
| chr17:23535332-23535404 | 14085 | 6569 | 11132 | −2.2 | 1.2E−05 | 1.7 | 4.1E−03 |
| chr13:23436340-23436412 | 4181 | 1962 | 3321 | −2.2 | 1.2E−05 | 1.7 | 3.9E−03 |
| chr3:96499512-96499584 | 13865 | 6507 | 11017 | −2.2 | 1.3E−05 | 1.7 | 3.9E−03 |
| chr11:48833883-48833955 | 13905 | 6539 | 11051 | −2.2 | 1.4E−05 | 1.7 | 4.1E−03 |
| Val-AAC | | | | | | | |
| chr13:23401073-23401145 | 1247 | 451 | 814 | −2.8 | 3.3E−07 | 1.8 | 4.1E−03 |
| chr13:23413248-23413320 | 1246 | 467 | 836 | −2.7 | 5.4E−07 | 1.8 | 4.0E−03 |

*tRNA isoacceptor identity with corresponding genomic positions of the tRNA genes in the mouse mm10 genome.
†Average tRNA read count for the indicated experimental group reported as counts per million (cpm) reads in the sequenced library from the indicated experimental group.
‡Fold change calculated by EdgeR from pairwise comparisons between the young and old control groups for the age effect, or between the old control and old CR groups for the CR effect.

### Conclusions

[0115] Deep sequencing of small RNAs extracted from mouse serum identifies a population of tRNA-derived molecules, termed 5′ tRNA halves, previously described only as stress-induced inhibitors of translation initiation in cultured cells. 5′ tRNA halves are more abundant than miRNAs in mouse serum, and are derived from distinct subset of tRNAs by cleavage near the anticodon loop; the 3′ portion of the tRNA molecule is present in serum only in trace quantities. Ultracentrifugation and size fractionation establish that the 5′ tRNA halves circulate as part of a larger complex, but are not contained in exosomes or microvesicles; their sensitivity to the chelating agent EDTA provides further evidence that they exist as circulating nucleoprotein complexes. They are concentrated in hematopoietic and lymphoid tissues, and present in other tissues at very low levels that may reflect residual blood cells. The origin of the serum particles, and their destinations, are uncertain; however their concentration in blood cells suggest that they may be produced by these cells. Levels of serum 5′ tRNA halves are distinctly changed in aged mice, and calorie restriction inhibits these changes, indicating that they are subject to physiologic regulation. Taken together with the extant evidence that 5′ tRNA halves can regulate mRNA translation, the characteristics of the circulating 5′ tRNA halves we have discovered suggest that they function as signaling molecules with as yet unknown physiologic roles.

[0116] To date, the only known function of 5′ tRNA halves is inhibition of translation in cultured cells subjected to a variety of stressors; transfection of 5′ tRNA halves inhibits global translation in U2OS cells [14, 18]. [14, 18]. A study published while this paper was in preparation reported induction of 5′ tRNA halves in human airway epithelial cells upon infection with respiratory syncytial virus (RSV). Induction involves cleavage at the tRNA anticodon loop by angiogenin, and at least one type, the 5′ tRNA-Glu-CTC half, promotes RSV replication [25]. Our findings indicate that 5′ tRNA halves function on an organismal rather than merely a cellular level. Furthermore they are likely to function in a context much broader than cellular stress or infection: we find 5′ tRNA halves in unstressed conditions. Changes in their expression (either increased or decreased) with age are also consistent with a broader physiologic role, and it is particularly interesting that these changes are partially mitigated by calorie restriction.

[0117] The most extensively studied cellular tRNA halves are generated under stress conditions by angiogenin, which cleaves mature tRNAs within the anticodon loops [26]. The stress-induced tRNA halves target the translation initiation machinery to reprogram protein translation in order to promote cell survival during stress [14, 26]. Pull-down and mass spectrometry analyses of RNA-protein complexes have identified several cellular proteins (YB-1, FXR-1, and PABP1) bound to intracellular 5′ tRNA halves [14]. The nature of the proteins and/or other factors that bind and stabilize the extracellular form of 5′ tRNAs halves has yet to be elucidated. Understanding of the origin, composition, and destinations of these complexes will provide insights into their role in organismal physiology.

### Materials and Methods

### Serum Collection, RNA Isolation, and Small RNA Library Construction

[0118] Male mice of the long-lived B6C3F1 strain were fed either control or calorie-restricted (CR) diet (40% fewer calories than the control). Three mice were studied from each of three groups: young (7-month) and old (27-month) mice fed the control diet, and old (27-month) mice fed the CR diet. Total RNA including small RNA was isolated from each serum sample with miRNeasy kit (Qiagen) and used to construct indexed sequencing libraries with the Illumina TruSeq Small RNA Sample Prep Kit. The libraries were pooled and sequenced on an Illumina HiSeq 2000 instrument to generate 50 base reads.

[0119] Mice and diets. One-month-old male mice of the long-lived B6C3F1 strain were purchased from Harlan (Indianapolis, Ind.). One week after arrival, mice were individually housed and randomly assigned to one of two groups, control or calorie restricted (CR). Control mice were fed 93 kcal/wk of a defined control diet (AIN-93M, diet no. F05312, BIO-SERV). CR mice were fed 52.2 kcal/wk of a defined CR diet (AIN-93M 40% Restricted, diet no. F05314, BIO-SERV). The CR mice consumed ˜40% fewer calories than the control group. The CR diet was enriched so that the CR mice consumed approximately the same amount of protein, vitamins, and minerals per gram of body weight as the control mice. All mice had free access to water. Mice were maintained at 20-24° C. and 50-60% humidity with lights on from 0600 to 1800 h. Sentinel mice were kept in the same room as the experimental mice, and serum samples were screened every 6 months for titers against 11 common pathogens. No positive titers were found during these studies. At 27-months of age, mice were euthanized, and blood was collected through cardiac puncture and processed immediately. A group of control mice were euthanized at 7 months of age and used as a young control group. Each group consisted of 3 mice. The Institutional Animal Care and Use Committee of the University of California, Riverside, approved animal protocols.

[0120] RNA isolation, and small RNA library construction. Immediately after collection, blood was transferred to BD Microtainer tubes (Becton, Dickinson and Company), incubated for 30 min at room temperature to allow blood clotting, and centrifuged at 5,000 g for 10 min. The serum supernatant was transferred to new tubes, centrifuged at 16,000 g for 15 min to remove any residual cells and cell-debris, and stored at −80° C. before use. Isolation of total RNA including small RNA was performed with miRNeasy kit (Qiagen) according to the manufacturer's protocol with the exceptions of mixing 2 mL of Qiazol reagent with 0.4 mL serum, loading the entire aqueous phase onto a single column from the MinElute Cleanup Kit (Qiagen), and eluting the RNA in 20 μL of RNase-free water.

[0121] One fourth (5 μL) of the RNA isolated from each serum sample was used to construct sequencing libraries with the Illumina TruSeq Small RNA Sample Prep Kit, following the manufacturer's protocol. Briefly, 3′ and 5′ adapters were sequentially ligated to small RNA molecules and the obtained ligation products were subjected to a reverse transcription reaction to create single stranded cDNA. To selectively enrich those fragments that have adapter molecules on both ends, the cDNA was amplified with 15 PCR cycles using a common primer and a primer containing an index tag; this allows multiplexing and sequencing different samples in a single lane of a flowcell. The amplified cDNA constructs were gel purified, and validated by checking the size, purity, and concentration of the amplicons on the Agilent Bioanalyzer High Sensitivity DNA chip. The libraries were pooled in equimolar amounts, and sequenced on an Illumina HiSeq 2000 instrument to generate 50 base reads. Image deconvolution and quality values calculation were performed using the modules of the Illumina pipeline.

[0122] RNA extraction from mouse tissues, stressed U2OS cells, fractionated mouse serum and plasma for Northern blot analysis. For stress induction, U2OS cells were cultured in McCoy's 5A Medium supplemented with 10% fetal calf serum and 1% of penicillin/streptomycin, and treated with 500 μM of sodium arsenite (Sigma) for 2 hours before RNA extraction. Tissues and sera were collected from one-year-old mice fed control diet. Tissues were flash frozen in liquid nitrogen. Serum samples were centrifuged at 110,000 g for 2 hrs, and supernatant and pellet fractions were separated. Samples of 0.2 ml serum mixed with 1.8 ml PBS were subjected to ultrafiltration through Vivaspin 2 columns (GE Healthcare) with 30, 100, or 300 kDa MW cut-off, and concentrate and filtrate fractions were collected. All samples were stored at −80° C. before RNA extraction. For plasma preparation, mouse blood samples were mixed with 0.5 M EDTA (10 μl/ml) or sodium heparin (5.5 mg/ml) and centrifuged at 10,000 g for 10 min. The plasma supernatant was transferred to new tubes, centrifuged at 16,000 g for 15 min to remove any residual cells and cell-debris, and stored at −80° C. before use. Total RNA including small RNA was isolated from tissue samples, cell pellets or serum fractions with miRNeasy kit (Qiagen).

[0123] Collection of human blood and RNA extraction from serum and plasma. Human blood samples were collected with Institutional Review Board approval after obtaining informed consent. Blood was collected from one young adult male in BD Vacutainer Venous Blood Collection Tubes (BD Diagnostics): K2 EDTA Spray-Dried (BD-366643) or Spray-Coated Sodium Heparin (BD367874). Blood was transferred to Leucosep Centrifuge Tubes (Grenier Bio One #227290P) and centrifuged at 800 g for 15 min at room temperature. The plasma supernatant was transferred to fresh tubes, centrifuged at 16,000 g for 15 min to remove any residual cells and cell-debris, and stored at −80° C. before use. Total RNA including small RNA was isolated from plasma or serum with miRNeasy kit (Qiagen).

[0124] Preparation of leukocytes from mouse and human blood and RNA extraction. Blood was collected on EDTA, centrifuged at 1000 g for 15 minutes to separate the plasma and blood cells. The buffy coat was collected, incubated in erythrocyte lysis buffer (Qiagen), and washed with PBS. Leukocyte pellets were flash frozen in liquid nitrogen, and stored at −80° C. before use. Total RNA including small RNA was isolated from leukocytes pellets with miRNeasy kit (Qiagen).

### Mapping and Annotation of Sequencing Reads

[0125] Sequencing reads were pre-processed with FASTX-Toolkit (hannonlab.cshl.edu) to trim the adaptor sequences, and discard low quality reads. The obtained clean reads were mapped to the mouse reference genome (GRCm38/mm10) with bowtie version 0.12.8 [16] using different combinations of alignment and reporting options. We used the option “−n 0-114” to align the sequencing reads according to a policy similar to Maq's default policy and requiring no mismatches in the first 14 bases (the high-quality end of the read). In addition, this mode of alignment was combined with options that define which and how many alignments should be reported; the option “−k 1-best” instructed bowtie to report only the best alignment if more than one valid alignment exists, while the option “−m 1” instructed bowtie to refrain from reporting any alignments for reads having multiple reportable alignments. The “−k 1-best” and “−m 1” modes of alignment reporting were also used in combination with the end-to-end k-difference (−v) alignment mode. Varying the alignment and reporting modes allowed the differential detection of two predominant peak sizes of sequencing reads as described in the results section.

[0126] Annotation analysis of the mapped sequencing reads was performed with bedtools [27] using the following databases: the Genomic tRNA Database [19] (gtrnadb.ucsc.edu), miRBase 18 (mirbase.org), and rRNA, snRNA, scRNA, and srpRNA which were extracted from the RepeatMasker track (genome.ucsc.edu; mm10).

Analysis of Differentially Abundant Circulating tRNA Halves

[0127] The bowtie alignment files generated above from the young and old control and old CR serum sequencing samples were analyzed with bedtools [27] to obtain the coverage of the tRNA genes included in the Genomic tRNA Database [19] (gtrnadb.ucsc.edu), and to determine the read count for each tRNA in the database. The tRNA read counts were further analyzed with the Bioconductor package edgeR [28] to detect the changes in the levels of circulating 5′ tRNA halves in the different experimental groups. The algorithm of edgeR fits a negative binomial model to the count data, estimates dispersion, and measures differences using the generalized linear model likelihood ratio test which is recommended for experiments with multiple factors, such as the simultaneous analysis of age and diet in our study. The fitted count data was analyzed by performing pairwise comparisons between the different experimental groups: young and old control groups were compared to measure the differential abundance in circulating 5′ tRNA halves associated with old age; old control and old CR groups were compared to determine whether CR has an effect on any age-associated changes. The results were further filtered to keep only 5′ tRNA halves that achieved a minimum of 500 counts per million (cpm) in at least one of the 3 experimental groups.

### Northern Blot Assays

[0128] RNAs analyzed with Northern blots were extracted from normal or sodium arsenite-treated U2OS and from a variety of tissues and sera harvested from one-year-old mice fed control diet. Before RNA extraction, some serum samples were centrifuged at 110,000×g for 2 hrs, and supernatant and pellet fractions were separated, or were separated into concentrate and filtrate fractions by ultrafiltration through Vivaspin 2 columns with 30, 100, or 300 kDa MW cut-off. RNAs were separated on 15% denaturing polyacrylamide gels, transferred and fixed to a membrane by chemical cross-linking [29], and hybridized with probes complementary to 5′ and 3′ ends of tRNAs.

[0129] RNAs extracted from tissue samples, cell pellets or serum fractions as described above were separated on 15% polyacrylamide Criterion TBE-Urea gels (Bio-Rad), transferred to a Hybond NX membrane (GE life sciences), and fixed to the membrane by chemical cross-linking (1). Blots were hybridized overnight at 42° C. in ULTRAhyb-Oligo Buffer (Invitrogen) with the following ³²P-5′-end labeled oligonucleotide probes against the 5′ end of tRNA-Gly-GCC (5′-GGCGAGAATTCTACCACTGAACCACCAA; SEQ ID NO:3), the 3′ end of tRNA-Gly-GCC (5′-TGCATTGGCCGGGAACCGAACCCGGGCCTCCCGCG; SEQ ID NO:4), the 5′ end of tRNA-Val-CAC (5′-AGGCGAACGTGATAACCACTACACTACGGA; SEQ ID NO:5), or the 3′ end of tRNA-Val-CAC (5′-TGTTTCCGCCCGGTTTCGAACCGGGGACCTTTCGCG; SEQ ID NO:6), or the 5′ end of tRNA-Asn-GTT (5′-CGAACGCGCTAACCGATTGCGCCACAGA; SEQ ID NO:7). Membranes were washed twice with 2×SSC, 0.1% SDS solution for 30 minutes, and exposed to X-ray films for detection of signals

Real Time Quantitative PCR (qPCR)

[0130] For qPCR assays, 10 fmoles of the synthetic C. elegans cel-miR-39 (Qiagen #MSY0000010) were spiked into 0.2 ml of serum or plasma before RNA extraction to account for variations during RNA extraction, cDNA synthesis, and real-time PCR. One fourth of total RNA extracted from 0.2 ml serum or plasma was reverse transcribed using the miScript Reverse Transcription Kit (Qiagen) according to the manufacturer's protocol. The obtained reverse transcription product was amplified using the following Qiagen reagents: SYBR Green PCR Master Mix, Universal Primer, and miScript Primer Assays for miR-16, miR-24, and miR-Cel-39. Real-time qPCR was carried out on a Bio-Rad CFX96 thermocycler.

### REFERENCES

[0131] 1. Okamura K: Diversity of animal small RNA pathways and their biological utility. Wiley interdisciplinary reviews RNA 2012, 3(3):351-368.
[0132] 2. Wery M, Kwapisz M, Morillon A: Noncoding RNAs in gene regulation. Wiley interdisciplinary reviews Systems biology and medicine 2011, 3(6):728-738.
[0133] 3. Zhang C: Novel functions for small RNA molecules. Current opinion in molecular therapeutics 2009, 11(6):641-651.
[0134] 4. Zhang S, Sun L, Kragler F: The phloem-delivered RNA pool contains small noncoding RNAs and interferes with translation. Plant physiology 2009, 150(1):378-387.
[0135] 5. Esteller M: Non-coding RNAs in human disease. Nature reviews Genetics 2011, 12(12):861-874.
[0136] 6. Joshua-Tor L, Hannon G J: Ancestral roles of small RNAs: an Ago-centric perspective. Cold Spring Harbor perspectives in biology 2011, 3(10):a003772.
[0137] 7. Allegra A, Alonci A, Campo S, Penna G, Petrungaro A, Gerace D, Musolino C: Circulating microRNAs: New biomarkers in diagnosis, prognosis and treatment of cancer (Review). International journal of oncology 2012, 41(6):1897-1912.
[0138] 8. Etheridge A, Lee I, Hood L, Galas D, Wang K: Extracellular microRNA: a new source of biomarkers. Mutation research 2011, 717(1-2):85-90.
[0139] 9. Zen K, Zhang C Y: Circulating microRNAs: a novel class of biomarkers to diagnose and monitor human cancers. Medicinal research reviews 2012, 32(2):326-348.
[0140] 10. Rother S, Meister G: Small RNAs derived from longer non-coding RNAs. Biochimie 2011, 93(11):1905-1915.
[0141] 11. Tuck A C, Tollervey D: RNA in pieces. Trends in genetics: TIG 2011, 27(10):422-432.
[0142] 12. Sobala A, Hutvagner G: Transfer RNA-derived fragments: origins, processing, and functions. Wiley interdisciplinary reviews RNA 2011, 2(6):853-862.
[0143] 13. Lee Y S, Shibata Y, Malhotra A, Dutta A: A novel class of small RNAs: tRNA-derived RNA fragments (tRFs). Genes & development 2009, 23(22):2639-2649.
[0144] 14. Ivanov P, Emara M M, Villen J, Gygi S P, Anderson P: Angiogenin-induced tRNA fragments inhibit translation initiation. Molecular cell 2011, 43(4):613-623.
[0145] 15. Saikia M, Krokowski D, Guan B J, Ivanov P, Parisien M, Hu G F, Anderson P, Pan T, Hatzoglou M: Genome-wide identification and quantitative analysis of cleaved tRNA fragments induced by cellular stress. The Journal of biological chemistry 2012.
[0146] 16. Langmead B, Trapnell C, Pop M, Salzberg S L: Ultrafast and memory-efficient alignment of short DNA sequences to the human genome. Genome biology 2009, 10(3):R25.
[0147] 17. Thompson D M, Lu C, Green P J, Parker R: tRNA cleavage is a conserved response to oxidative stress in eukaryotes. RNA 2008, 14(10):2095-2103.
[0148] 18. Yamasaki S, Ivanov P, Hu G F, Anderson P: Angiogenin cleaves tRNA and promotes stress-induced translational repression. The Journal of cell biology 2009, 185(1):35-42.
[0149] 19. Chan P P, Lowe T M: GtRNAdb: a database of transfer RNA genes detected in genomic sequence. Nucleic acids research 2009, 37(Database issue):D93-97.
[0150] 20. Arroyo J D, Chevillet J R, Kroh E M, Ruf I K, Pritchard C C, Gibson D F, Mitchell P S, Bennett C F, Pogosova-Agadjanyan E L, Stirewalt D L et al: Argonaute2 complexes carry a population of circulating microRNAs independent of vesicles in human plasma. In: Proceedings of the National Academy of Sciences of the United States of America. vol. 108, 2011/03/09 edn; 2011: 5003-5008.
[0151] 21. Turchinovich A, Burwinkel B: Distinct AGO1 and AGO2 associated miRNA profiles in human cells and blood plasma. RNA biology 2012, 9(8).
[0152] 22. Vickers K C, Palmisano B T, Shoucri B M, Shamburek R D, Remaley A T: MicroRNAs are transported in plasma and delivered to recipient cells by high-density lipoproteins. Nature cell biology 2011, 13(4):423-433.
[0153] 23. Fu H, Feng J, Liu Q, Sun F, Tie Y, Zhu J, Xing R, Sun Z, Zheng X: Stress induces tRNA cleavage by angiogenin in mammalian cells. FEBS letters 2009, 583(2):437-442.
[0154] 24. Spindler S R, Dhahbi J M: Conserved and tissue-specific genic and physiologic responses to caloric restriction and altered IGFI signaling in mitotic and postmitotic tissues. Annual review of nutrition 2007, 27:193-217.
[0155] 25. Wang Q, Lee I, Ren J, Ajay S S, Lee Y S, Bao X: Identification and Functional Characterization of tRNA-derived RNA Fragments (tRFs) in Respiratory Syncytial Virus Infection. Molecular therapy: the journal of the American Society of Gene Therapy 2012.
[0156] 26. Li S, Hu G F: Emerging role of angiogenin in stress response and cell survival under adverse conditions. Journal of cellular physiology 2012, 227(7):2822-2826.
[0157] 27. Quinlan A R, Hall I M: BEDTools: a flexible suite of utilities for comparing genomic features. Bioinformatics 2010, 26(6):841-842.
[0158] 28. Robinson M D, McCarthy D J, Smyth G K: edgeR: a Bioconductor package for differential expression analysis of digital gene expression data. Bioinformatics 2010, 26(1):139-140.
[0159] 29. Pall G S, Hamilton A J: Improved northern blot method for enhanced detection of small RNA. Nature protocols 2008, 3(6):1077-1084.

### Example 2

### 5′ YRNA Fragments Derived by Processing of Transcripts from Specific YRNA Genes and Pseudogenes are Abundant in Human Serum and Plasma

[0160] Small noncoding RNAs carry out a variety of functions in eukaryotic cells, and in multiple species they can travel between cells, thus serving as signaling molecules. In mammals multiple small RNAs have been found to circulate in the blood, although in most cases the targets of these RNAs, and even their functions, are not well-understood. YRNAs are small (84-112 nt) RNAs with poorly characterized functions, best known because they make up part of the Ro ribonucleoprotein autoantigens in connective tissue diseases. In surveying small RNAs present in the serum of healthy adult humans, we have found YRNA fragments of lengths 27 nt and 30-33 nt, derived from the 5′ ends of specific YRNAs and generated by cleavage within a predicted internal loop. Many of the YRNAs from which these fragments are derived, were previously annotated only as pseudogenes, or predicted informatically. These 5′ YRNA fragments make up a large proportion of all small RNAs (including miRNAs) present in human serum. They are also present in plasma, are not present in exosomes or microvesicles, and circulate as part of a complex with a mass between 100 and 300 kDa. Mouse serum contains far fewer 5′ YRNA fragments, possibly reflecting the much greater copy number of YRNA genes and pseudogenes in humans. The processing and secretion of specific YRNAs to produce 5′ end fragments that circulate in stable complexes are consistent with a signaling function.

[0161] Small noncoding regulatory RNAs, including miRNAs, siRNAs, piRNAs, and others, have been the focus of much recent interest, not only because they are crucial for a wide range of biological functions, but also because they are involved in the pathology of cancer and many other human diseases (Esteller M., Nature reviews Genetics 12: 861-874, 2011; Joshua-Tor L, and Hannon G J., Cold Spring Harbor perspectives in biology 3: a003772, 2011; Martens-Uzunova et al., Cancer letters 2013; Okamura K., Wiley interdisciplinary reviews RNA 3: 351-368, 2012; Wery et al., Wiley interdisciplinary reviews Systems biology and medicine 3: 728-738, 2011; Zhang C., Current opinion in molecular therapeutics 11: 641-651, 2009; Zhang et al., Plant physiology, 150: 378-387, 2009). Although miRNAs in particular have been found to have broad biological roles, next generation sequencing has revealed new small RNA types with uncertain functions. Well-described small noncoding RNAs such as tRNAs, snoRNAs, and YRNAs have been found to give rise to smaller RNA species (Dhahbi et al., BMC genomics 14: 298, 2013; Kapranov et al., Science, 316: 1484-1488, 2007; Rother and Meister, Biochimie, 93: 1905-1915, 2011; Tuck and Tollervey, Trends in Genetics, 27: 422-432, 2011); although in many cases the functions of the noncoding RNAs that undergo processing into smaller RNAs are known, the functions of their smaller derivatives remain poorly understood. Intracellular 5′ tRNA halves have been shown to be cleaved by the ribonuclease angiogenin in response to stress and infections; the generated 5′ tRNA halves promote assembly of stress granules carrying stalled preinitiation complexes, and inhibit mRNA translation (Gong et al., BMC infectious diseases, 13: 285, 2013; Ivanov et al., Molecular Cell, 43: 613-623, 2011; Saikia et al., The Journal of biological chemistry, 2012). Some snoRNA-derived RNAs exhibited miRNA-like regulatory activity, while the expression levels of other snoRNA-derived RNAs are altered in cancer (Martens-Uzunova et al., Oncogene 31: 978-991, 2012). It has been proposed that snoRNA-derived RNAs may act as tumor suppressors and oncogenes (Martens-Uzunova et al, Cancer letters, 2013). Human YRNA-derived fragments were first detected in cells exposed to apoptotic stimuli (Rutjes et al., The Journal of biological chemistry, 274: 24799-24807, 1999). They were later observed in solid tumors (Meiri et al., Nucleic acids research, 38: 6234-6246, 2010; Schotte et al., Leukemia, 23: 313-322, 2009) and in cultured cells as a response to the chemical stressor poly(I:C) (Nicolas et al., FEBS letters, 586: 1226-1230, 2012).

[0162] In both plants and animals, some small RNAs are able to travel between tissues within an organism, thus transferring their functions to other cells. There has been much recent interest in specific miRNAs circulating in the plasma and serum, and some evidence that these can be taken up by cells and alter gene expression; there is also interest in the possibility that they can be markers of specific disease states, particularly cancer (Allegra et al., International journal of oncology, 41: 1897-1912, 2012; Etheridge et al., Mutation Research 717: 85-90, 2011; Zen K, and Zhang C Y, Medicinal research reviews, 32: 326-348, 2012). Using deep sequencing, we recently demonstrated that the levels of many miRNAs circulating in the mouse are increased with age, and that these increases can be antagonized by calorie restriction (Dhahbi et al, Aging, 5: 130-141, 2013). The genes targeted by this set of age-modulated miRNAs are predicted to regulate biological processes directly relevant to the manifestations of aging, and the miRNAs themselves have been linked to diseases associated with old age.

[0163] We recently reported a novel class of circulating small RNAs, 5′ tRNA halves, which prior to our report were described only as stress-induced inhibitors of translation initiation in cultured cells (Dhahbi et al., BMC genomics, 14: 298, 2013). We found that the 5′ tRNA halves are concentrated in hematopoietic and lymphoid tissues, and present in other tissues at very low levels, suggesting that they may be processed in blood cells and released into the blood. Our findings imply that 5′ tRNA halves function on an organismal rather than merely a cellular level. Moreover, they likely function in a context much broader than cellular stress or infection: we find circulating 5′ tRNA halves in unstressed conditions. Changes in their expression with age are also consistent with a broader physiologic role, and it is particularly interesting that these changes are partially mitigated by calorie restriction.

[0164] The subject of this report is yet another derivative of a known class of small noncoding RNAs, the YRNAs. They are a largely unexplored noncoding RNA species that are transcribed by RNA polymerase III from four YRNA genes in man (hY1, hY3, hY4 and hY5), and two genes in mice (mY1 and mY3) (Wolin and Steitz, Cell, 32: 735-744, 1983). The sizes of the human YRNAs are 112 nt (hY1), 101 nt (hY3), 98 nt (hY4), and 84 nt (hY5). In addition to the annotated genes, the human genome carries a very large number of YRNA sequences that have been annotated as pseudogenes, while the mouse has few or none (Perreault et al., Nucleic acids research, 33: 2032-2041, 2005; Perreault et al., Molecular biology and evolution, 24: 1678-1689, 2007). YRNAs are components of Ro ribonucleoproteins (Ro RNPs), which are clinically significant autoantigens that are recognized by antibodies in patients with connective tissue diseases (Bouffard et al., The Journal of rheumatology, 23: 1838-1841, 1996; Lerner et al., Science, 211: 400-402, 1981; Reed et al., J Immunol, 191: 110-116, 2013). Although YRNAs are reported to function in chromosomal DNA replication and quality control of noncoding RNA (Sim and Wolin, Wiley interdisciplinary reviews RNA, 2: 686-699, 2011), the function of YRNA-derived fragments has yet to be elucidated. Here we report the presence of abundant cell-free YRNA-derived fragments circulating as large complexes in human serum and plasma. These fragments are derived mostly from the 5′ ends of YRNAs and seem to rise from cleavage of YRNAs at a predicted internal loop to produce what we term “5′ YRNA fragments.”

### Materials and Methods

### Collection of Blood and Separation of Serum and Plasma.

[0165] Blood samples were collected from 5 adult women between 30 and 57 years of age, after obtaining informed consent. To obtain serum samples, blood was collected in BD Vacutainer SST tubes (#367985, BD, Franklin Lakes, N.J.), incubated for 30 min at room temperature to allow coagulation, and centrifuged at 5,000 g for 10 min. To obtain plasma samples, blood was collected in BD K2 EDTA Spray-Dried tubes (#366643, BD, Franklin Lakes, N.J.) or in tubes containing sodium heparin (5.5 mg/ml), transferred to Leucosep tubes (#227290P, Grenier Bio One, Monroe, N.C.) and centrifuged at 800 g for 15 min at room temperature. Serum and plasma supernatants were transferred to new tubes, centrifuged at 16,000 g for 15 min to remove any residual cells and cell debris, and stored at −80° C. before use. Blood samples were also collected from 5 male B6C3F1 mice (Charles River Laboratories) at 7 months of age. Immediately after collection, blood was transferred to BD Microtainer tubes (#365967, BD, Franklin Lakes, N.J.), and processed as described above for the human blood samples to prepare mouse serum.

### RNA Isolation and Small RNA Library Construction.

[0166] Isolation of total RNA, including small RNA, was performed with the miRNeasy kit (#217004, Qiagen, Hilden, Germany) according to the manufacturer's protocol except for the following alterations: 1 mL of Qiazol reagent was mixed with 0.2 mL serum or plasma, the entire aqueous phase was loaded onto a single column from the MinElute Cleanup Kit (#74204, Qiagen, Hilden, Germany), and RNA was eluted in 20 μL of RNase-free water. One fourth (5 μL) of the RNA isolated from each serum or plasma samples was used to construct sequencing libraries with the Illumina TruSeq Small RNA Sample Prep Kit (#RS-200-0012, Illumina, San Diego, Calif.), following the manufacturer's protocol. Briefly, 3′ and 5′ adapters were sequentially ligated to small RNA molecules and the obtained ligation products were subjected to a reverse transcription reaction to create single stranded cDNA. To selectively enrich those fragments that have adapter molecules on both ends, the cDNA was amplified with 15 PCR cycles using a common primer and a primer containing an index tag to allow sample multiplexing. The amplified cDNA constructs were gel purified, and validated by checking the size, purity, and concentration of the amplicons on the Agilent Bioanalyzer High Sensitivity DNA chip (#5067-4626, Genomics Agilent, Santa Clara, Calif.). The libraries were pooled in equimolar amounts, and sequenced on an Illumina HiSeq 2000 instrument to generate 50 base reads.

### Mapping and Annotation of Sequencing Reads.

[0167] Sequencing reads were pre-processed with FASTX-Toolkit (hannonlab.cshl.edu) to trim the adaptor sequences, and discard low quality reads. The filtered reads were mapped to the human (hg19) or mouse (mm10) genomes with Bowtie version 0.12.8 (Langmead et al., Genome biology 10: R25, 2009) using the “end-to-end k-difference (−v)” alignment mode and allowing 2 or 0 mismatches. In addition, this mode of alignment was combined with options that define which and how many alignments should be reported: the option “−k 1-best” instructed Bowtie to report only the best alignment if more than one valid alignment exists, while the option “−m 1” instructed Bowtie to refrain from reporting any alignments for reads having multiple reportable alignments Annotation of the mapped sequencing reads was performed with BEDTools (Quinlan et al., Bioinformatics 26: 841-842, 2010) using noncoding RNAs from Ensembl GRCh37 release 70, miRNAs from miRBase and tRNAs from Genomic tRNA Database (Chan and Lowe, Nucleic acids research 37: D93-97, 2009).

### Northern Blot Analysis.

[0168] RNAs analyzed with Northern blots were extracted from normal or UV-irradiated U2OS cells (# HTB-96, ATCC, Manassas, Va.) and from fractionated human serum. Before RNA extraction, some serum samples were centrifuged at 110,000 g for 2 hours, followed by separation of supernatant and pellet fractions, and others were separated into concentrate and filtrate fractions by ultrafiltration through Vivaspin 2 columns (GE Healthcare) with 100 or 300 kDa MW cut-off. Total RNA including small RNA was isolated from cell pellets or serum fractions with the miRNeasy kit (Qiagen). RNAs were separated on 15% denaturing polyacrylamide gels, transferred, and fixed to a membrane by chemical cross-linking (Pall GS, and Hamilton A J., Nature protocols 3: 1077-1084, 2008). Blots were hybridized overnight at 42° C. in ULTRAhyb-Oligo Buffer (Invitrogen) with the following ³²P-5′-end labeled oligonucleotide probes against the 5′ end (5′-AGTTCTGATAACCCACTACCATCGGACCAGCC; SEQ ID NO:8), or 3′ end (5′-AGCCAGTCAAATTTAGCAGTGGGGGGTTGTAT; SEQ ID NO:9) of RNY4. Membranes were washed twice with 2×SSC at 42° C., 0.1% SDS for 30 minutes, and exposed to X-ray films for detection of signals

### Results

### Sequencing and Computational Analysis of Small RNAs Circulating in Human Serums.

[0169] We used RNA-Seq (Illumina reads of 50 nt) to characterize small RNAs circulating in human serum, using indexed libraries to distinguish reads from each serum sample. A combined total of 58,203,901 pre-processed sequencing reads was obtained from five human serum samples. The pooled sequencing reads were mapped to the human genome with Bowtie using parameters that align reads according to the end-to-end k-difference policy, allowing two mismatches and reporting only the best alignment if more than one valid alignment exists (Langmead et al., Genome biology 10: R25, 2009). This analysis generated a dataset of 51,887,820 mapped reads (89.15%), ranging in size from 18 to 49 nt. When reads with more than one alignment were discarded, the size distribution of the mapped reads revealed an expected peak at 20-24 nt consistent with the size of miRNAs (FIG. 14A, red bars). When multiple reportable alignments are allowed, two more peaks emerge: a major peak at 30-33 nt and a minor peak at 27 nt (FIG. 14A, blue bars). The same pattern was observed when reads from the individual serum samples were mapped to the human genome allowing two mismatches and multiple reportable alignments (FIG. 14B).

[0170] Annotation of the mapped sequencing reads revealed that, as expected, reads in the 20-24 nt peak were derived from miRNAs (FIG. 14C). Reads in the 27 nt peak map to YRNA genes, while the 30-33 nt peak consists of reads mapping to YRNA genes, and to a lesser extent to tRNA genes (FIG. 14C). Further annotation analysis showed that of the total 51,887,820 reads that mapped to the human genome, 45,890,222 (88%) align to known small RNAs, of which 44% were annotated as miRNAs, 33% as YRNAs, and 22% as tRNAs (FIG. 14D). The remaining <1% of reads mapped to sequences annotated as rRNA, snRNA and snoRNA. We have previously characterized 5′ tRNA halves circulating as large nucleoprotein complexes in the mouse (Dhahbi et al., BMC genomics 14: 298, 2013), and the tRNAs sequenced here appear to be the human correspondent of those tRNA fragments. Here we focus on the reads annotated as YRNAs.

[0171] Most circulating small RNAs that align to YRNA genes are derived from the RNY4 gene and its pseudogenes (FIG. 1E). The YRNA genes used in our analysis are from Ensembl GRCh37 release 70, where the YRNAs are found in the ‘misc_RNA’ category under the ‘gene_biotype’ attribute. Ensembl annotates 3 groups as YRNAs: i) four human YRNAs: RNY1, RNY3, RNY4, and RNY5; ii) pseudogenes originating from the four human YRNAs; and iii) a group of predicted YRNAs from the Rfam database. Among the serum-derived sequence reads that align with YRNAs, 27% map to RNY4, while 42% map to the RNY4 pseudogenes (FIG. 14E). Only 2% of YRNA reads map to RNY1, RNY3, and RNY5 combined, while an additional 0.02% map to the pseudogenes of RNY1, RNY3, and RNY5 combined (FIG. 14E). A further 28% of YRNA reads map to the YRNAs predicted in Rfam (FIG. 14E). These results indicate that the 4 human YRNAs are present in the circulation in non-random proportions; genes annotated as YRNA pseudogenes, and Rfam-predicted YRNAs, are also expressed.

Characterization of Circulating Small RNAs that Align to YRNAs.

[0172] The serum-derived sequencing reads that align to YRNA genes are either 27 nt or 30-33 nt in size, while the size of full length YRNAs is 84-112 nt. We asked if the YRNA reads were the products of random fragmentation of full-length YRNAs, or alternatively show evidence of processing to produce specific fragments. We examined the alignment of YRNA reads to the genes from which they were transcribed, and annotated them based on their overlap with 5′ or 3′ ends of the genes. This analysis revealed that >95% of the YRNA-derived reads align with the 5′ end of YRNA; this is exemplified in FIG. 15A for the transcripts ENST00000516507 and ENST00000362735 encoded by the RNY4 gene and the RNY4P24 pseudogene, respectively. This alignment places the 3′ end of the fragment in an internal loop of a predicted schematic YRNA structure (FIG. 15B). We note also that the lengths of reads mapping to YRNAs vary, and that the proportions of each length are distinctly different [FIG. 15B: 27 nt (3%), 30 nt (1%), 31 nt (15%), 32 nt (77%), and 33 nt (1%)]; thus cleavage seems to occur at varying rates at different sites in the predicted internal loop. This evidence indicates that 5′ YRNA fragments circulating in the serum are generated by cleavage in the internal loop of full-length YRNA transcripts.

[0173] Northern blotting confirms the presence 5′ YRNA fragments in human serum and plasma. A probe specific for the 5′ end of RNY4 detected a major band migrating near the 30 nt RNA marker, and a minor band at ˜27 nt (FIG. 15C, lane 1). This verifies the sequencing data and confirms the presence of 5′ YRNA fragments circulating in the bloodstream in a stable cell-free form. The two-band pattern was also detected in an equal volume of EDTA or heparin plasma obtained from the same blood sample as the serum (FIG. 15C, lanes 2-3). This result indicates that the chelating agent EDTA used as an anticoagulant in preparing the plasma sample does not affect the circulating complexes containing the 5′ YRNA fragments. This is in contrast to circulating complexes containing the 5′ tRNA halves, which we found to be destabilized by EDTA (Dhahbi et al., BMC genomics 14: 298, 2013).

[0174] As a positive control for detection of YRNA fragments by Northern blotting, we included RNA from U2OS cells exposed to UV irradiation, which is known to strongly induce apoptosis. Cleavage of YRNAs, with generation of stable cellular YRNA-derived fragments, has been observed after exposure of cells to apoptotic stimuli (30). RNA extracted from U2OS cells treated with UV produced the same two bands present in serum (FIG. 15C, lanes 8-9), further validating the 5′ YRNA fragments identified by deep sequencing of circulating small RNAs. No significant bands migrating with the 30 nt RNA marker were detected when the same Northern blot was probed for the 3′ end of RNY4 (FIG. 15D). These results indicate that YRNA fragments found circulating in the blood are highly similar to fragments produced during apoptosis.

[0175] We next asked if the 5′ YRNA fragments are free, or contained within circulating exosomes or microvesicles. We Northern blotted RNA extracted from pellet and from supernatant after ultracentrifugation of human serum at 110,000 g for 2 hours. A probe for the 5′ end of RNY4 detected bands (at ˜30 nt and ˜27 nt) present in the supernatant and visible only as a trace in the pellet (FIG. 15E), indicating that YRNA is not circulating in an exosome or microvesicle. Because the YRNA fragments are stable in the circulation, but not encapsulated in exosomes, they are most likely complexed to carrying factors (e.g., proteins that protect them from degradation). To determine the size range of the putative complexes carrying the YRNA fragments in the serum, we Northern blotted RNA extracted from concentrate or filtrate fractions after ultrafiltration of human serum samples through Vivaspin 2 columns with 100 or 300 kDa MW cut-off. A probe for the 5′ end of RNY4 detected the familiar two bands (at ˜30 nt and ˜27 nt) in the concentrate of 100 kDa MW cut-off, and in the filtrate of 300 kDa MW cut-off (FIG. 15C, lanes 4-7), while a probe for the 3′ end of RNY4 did not detect any significant signal (FIG. 15D, lanes 4-7). This result suggests that 5′ YRNA fragments circulate as complexes with a mass between 100 and 300 kDa.

Human Serum and EDTA Plasma have Similar Profiles of Circulating 5′ YRNA Fragments.

[0176] We asked if the same 5′ YRNA fragments are present in both serum and plasma. We prepared serum and plasma from blood collected from the same individual at the same time; plasma was prepared from blood treated with the anticoagulant EDTA, and serum from coagulated blood. Sequencing of small RNAs extracted from equal amounts of serum and EDTA plasma shows that plasma displays the same peak pattern (20-24 nt, 27 nt and 30-33 nt peaks) found in serum, with the exception that reads of 30 nt are significantly under-represented in the EDTA plasma when compared to serum (FIG. 16A).

[0177] Comparison of the annotations of the sequencing reads revealed that miRNAs map to the 20-24 nt peak approximately equally in serum and EDTA plasma (FIG. 16B). YRNAs also map to the 27 nt and 30-33 nt peaks in both serum and EDTA-plasma (FIG. 16C-D). We previously observed that 5′ tRNA halves circulate in the mouse as complexes that are disrupted by EDTA treatment, so that they are not present in EDTA plasma (7). Consistent with this, tRNAs that map to the 30-33 nt peak in the serum sample (FIG. 14C), were barely detected in the EDTA plasma when compared to the serum (FIG. 16E). This accounts for the significant under-representation of 30 nt reads in the EDTA plasma noted above (FIG. 16A). This result indicates that, in contrast to circulating complexes carrying 5′ tRNA halves, the circulating complexes of 5′ YRNA fragments are not sensitive to chelation of ions.

5′ YRNA Fragments are Much More Abundant in Human than in Mouse Serum.

[0178] We sequenced five mouse serum samples to obtain a combined total of 71,725,136 pre-processed sequencing reads. Alignment to the mm10 mouse genome with Bowtie using the end-to-end k-difference policy while allowing two mismatches and reporting only the best alignment if more than one valid alignment exists (16), generated a dataset of 62,111,449 mapped reads (86.6%), ranging from 18 to 49 nt. Comparison of the length distribution revealed that both human and mouse serum display 20-24 nt and 30-33 nt peaks (FIG. 17A). However, reads of length 27 nt are significantly less abundant in mouse than in human serum (FIG. 17A). Comparison of the annotation of the sequencing reads from the human and mouse sera revealed a major difference in the composition of circulating small RNAs between human and mouse (FIG. 17B-E). The 5′ YRNA fragments are abundant in human serum, but scarce in the mouse, whereas the 5′ tRNA halves are significantly more abundant in the mouse serum (FIG. 17B). While abundant 26-28 nt and 30-33 nt YRNA reads are present in human serum, they are almost absent from mouse serum (FIG. 17C-D). Instead, tRNAs make up the bulk of 30-33 nt reads in mouse serum (FIG. 17E).

### Discussion

[0179] While surveying the profiles of cell-free small RNAs circulating in human blood, we identified abundant small RNAs derived from YRNAs, a class of small noncoding RNAs which complex with Ro protein in the cytoplasm, but as yet have incompletely characterized functions. We obtained 45,890,222 sequencing reads aligning to known small RNAs and found that 33% of these reads were annotated as YRNAs (FIG. 14D). Furthermore, >95% of the sequencing reads that map to YRNA genes are 27 nt or 30-33 nt long and align with the 5′ end of YRNAs, indicating that they were produced by cleavage of the parent YRNA. Northern blotting (FIG. 15C-E) confirms the presence of 5′ YRNA fragments circulating in the bloodstream in a stable cell-free form.

[0180] The serum YRNAs are derived from a subset of YRNA genes, many of them previously annotated as pseudogenes. While 27% of all sequencing reads that align with YRNAs were derived from RNY4, only 2% mapped to RNY1, RNY3, and RNY5 combined (FIG. 14E). This finding indicates that the 4 human YRNAs are disproportionately represented in the circulation, implying a type-specific biogenesis and/or release of the circulating 5′ YRNA fragments. The Rfam database includes a group of predicted YRNAs assembled from noncoding RNAs with conserved RNA secondary structure; 28% of our YRNA reads map to Rfam-predicted YRNAs (FIG. 14E), supporting the validity of the Rfam predictions.

[0181] More interestingly, 42% of the sequencing reads that align with YRNAs map to pseudogenes arising from RNY4, while only 0.02% map to the pseudogenes of RNY1, RNY3, and RNY5 combined (FIG. 14E). There are 1000 YRNA pseudogenes in the human genome, while YRNA pseudogenes are very rare in the mouse genome (Perreault et al., Nucleic acids research 33: 2032-2041, 2005, Perreault et al., Molecular biology and evolution 24: 1678-1689, 2007). This result clearly indicates that RNY4 sequences in the human genome that have been annotated as pseudogenes are transcribed, and that the transcripts are processed and secreted, calling into question their annotation as pseudogenes. Because so little is known about the biological role of YRNAs in general, and nothing is known about potential function of the circulating 5′ YRNA fragments we have found, the significance of this finding is at present unclear. However, there is evidence that a class of pseudogenes that arose from human YRNAs through the L1 retrotransposition machinery may be involved in post-transcriptional regulation of genes (Perreault et al., Nucleic acids research 33: 2032-2041, 2005, Perreault et al., Molecular biology and evolution 24: 1678-1689, 2007).

[0182] The YRNA reads represent fragments processed from full length (84-112 nt) YRNAs: the sequencing runs used to generate these reads were 50 cycles, yet only reads of length 27 nt or 30-33 nt are recovered and longer species were not present (FIG. 14A-C). Despite the primary sequence divergence among YRNAs (genes and pseudogenes), their secondary structure as predicted by Varna (Darty et al., Bioinformatics 25: 1974-1975, 2009) is characterized by a large internal loop and a stem structure formed by base-pairing between the highly conserved 5′ and 3′ ends (FIG. 15B). Internal loops in YRNAs have been shown to be accessible to nucleases that cleave single-stranded RNA (Chen X, and Wolin S L., J Mol Med (Berl) 82: 232-239, 2004; Teunissen et al., Nucleic acids research 28: 610-619, 2000; van Gelder et al., Nucleic acids research 22: 2498-2506, 1994). Given the existence of a predicted internal loop, and the narrow size range of 27-33 nt of sequencing reads that map to YRNAs, we suggest that full length YRNA transcripts are cleaved in the internal loop to generate the 5′ YRNA fragments found in serum. In addition, the variety of 5′ YRNA fragment sizes indicates that full length YRNAs are cleaved at more than one site, and at varying rates, to generate the 5′ YRNA fragments found in serum (FIG. 15B).

[0183] Because clotting has the potential to release cellular components that are not present in circulating blood, we asked if the same peak pattern of small RNAs in the human serum is also present in human plasma. Sequencing analysis of small RNAs extracted from serum and EDTA plasma samples prepared from the same person revealed that YRNAs are present in equivalent amounts and types in serum and EDTA plasma (FIG. 16), demonstrating that serum 5′ YRNA fragments are not an artifact of blood clotting. We find evidence that the 5′ YRNA fragments circulate as part of a complex with a mass between 100 and 300 kDa (FIG. 15C-D). This complex is not destabilized by the chelating agent EDTA, in contrast to our previous finding that complexes carrying circulating 5′ tRNA halves are highly sensitive to EDTA.

[0184] This study points out a puzzling feature of circulating small RNAs: 5′ YRNA fragments are abundant in human serum, but scarce in the mouse (FIG. 17C-D), while the converse seems to be the case with 5′ tRNA halves (FIG. 17E). The apparent low abundance of circulating 5′ tRNA halves in human serum is to some extent a function of the high abundance of 5′ YRNA fragments: 5′ tRNA halves are present, but form a lower proportion of all small RNAs than in the mouse, where there are a few 5′ YRNA fragments. The near absence of YRNA-derived fragments in mouse serum may reflect the scarcity of YRNA gene copies, and in particular YRNA pseudogene copies, in the mouse genome, and suggests that any presumed function of the circulating 5′ YRNA fragments is not deeply conserved. While YRNA genes themselves are conserved, humans, but not mice carry a large number of YRNA pseudogenes.

[0185] Secreted miRNAs, the most extensively studied circulating small RNAs, circulate in the blood as part of microvesicles, exosomes, or apoptotic bodies, and also in association with the lipoproteins HDL and LDL, Argonaute proteins, nucleophosmin-1, and ribosomal proteins L10a and L5 (Arroyo et al., Proceedings of the National Academy of Sciences of the United States of America, 5003-5008, 2011; Turchinovich A, and Burwinkel B., RNA biology 9: 2012; Turchinovich et al., Nucleic acids research 39: 7223-7233, 2011; Vickers et al., Nature Cell Biology 13: 423-433, 2011; Wang et al., Nucleic acids research 38: 7248-7259, 2010; Zernecke et al., Science Signaling 2: ra81, 2009). Nothing is currently known about the packaging of circulating small RNAs other than miRNAs, nor is it known how small RNAs, including miRNAs, make their way out of the cell into the extracellular space. Our Northern blot analysis of RNA extracted from pellet or supernatant after ultracentrifugation of human serum indicates that circulating 5′ RNY4 fragments are not included in exosomes or microvesicles (FIG. 2E). In line with this observation, exosome encapsulation is not required for the stability of circulating miRNAs and 5′ tRNA halves. Because the YRNA fragments are stable in the circulation but not encapsulated in exosomes, they are most likely complexed to proteins that protect them from degradation. While the 5′ YRNA fragments have a predicted mass of only ˜10 kDa, our analysis indicates that they circulate as part of 100-300 kDa complexes (FIG. 2E), the nature and identity of which remain to be determined.

[0186] Currently the tissues/cells of origin of circulating small RNAs, the mechanisms by which they are delivered, and their functions in recipient cells, remain largely unknown. However, information about the properties of one type of circulating small RNAs, i.e., miRNAs, has been emerging. Vickers et al. demonstrated that circulating miRNA/HDL complexes from atherosclerotic subjects, when delivered into cultured hepatocytes, altered expression of genes with functions related to lipid metabolism, inflammation, and atherosclerosis (Vickers et al., Nature Cell Biology 13: 423-433, 2011). Extracellular miRNAs secreted by endothelial cells are reported to alter gene expression in recipient cells. miR-126 triggered the production of the chemokine CXCL12 in recipient vascular cells (Zernecke et al., Science Signaling 2: ra81, 2009) while miR-143/145 altered gene expression in co-cultured smooth muscle cells to reduce the formation of atherosclerotic lesions in the aorta of ApoE(−/−) mice (Hergenreider et al., Nature cell biology 14: 249-256, 2012). Similarly, miR-150 secreted by human blood cells and cultured monocytic THP-1 cells, reduced c-Myb expression and enhanced cell migration after delivery into HMEC-1 cells (Zhang et al., Molecular cell 39: 133-144, 2010). Thus, there is evidence that extracellular miRNAs can enter target cells and alter gene expression with significant functional consequences. This suggests that other circulating small RNAs, such as 5′ YRNA fragments and 5′ tRNA halves, may also be capable of crossing the membranes of target cells and modulating cellular functions.

[0187] Reports of YRNA-derived fragments in cells or tissues are scant. Human YRNA-derived fragments were first observed in cells exposed to apoptotic stimuli (Rutjes et al., The Journal of biological chemistry 274: 24799-24807, 1999). The apoptosis-induced YRNA fragments have small (22-25 nt) and large (27-36 nt) sizes, and remain bound to Ro after they are cleaved. However, whether these fragments are derived from the 5′ or 3′ ends, or both, was not determined; Rutjes and colleagues (Rutjes, supra) used a non-specified mixture of probes for the four human YRNAs during Northern blot analysis. The same study also showed that the cleavage of YRNA is caspase-dependent. This suggests that the nucleases that cleave YRNAs might be caspase-activated nucleases also involved in inter-nucleosomal cleavage of chromatin that results in the DNA ladder during apoptosis. Whether the 5′ YRNA fragments abundantly circulating in the bloodstream of healthy human subjects can be linked to such an apoptotic cleavage remains to be investigated.

[0188] Production of 3′ end fragments of human RNY5 was observed upon treatment of cancerous and non-cancerous cell lines with the stressor poly(I:C), a double-stranded RNA mimic immunostimulant chemical (Nicolas et al., FEBS letters 586: 1226-1230, 2012). The same study reported the presence of 3′ end fragments of human RNY5 RNA in non-stressed MCF 7 mammary adenocarcinoma cells (Nicolas, supra). Only a human RNY5 3′ end probe was used in the Northern blotting analysis in this study, and so it is not known if 5′ end fragments of human RNY5 RNA were also present in these cells. Likewise, two 25-nt fragments derived from RNY1 and RNY3 RNAs were detected in solid tumors and in normal serum (Meiri et al., Nucleic acids research 38: 6234-6246, 2010; Schotte et al., Leukemia 23: 313-322, 2009). These two small RNAs were initially classified as miRNAs, but subsequently removed from miRBase because they lacked gene regulatory activity. Larger (27-36 nt) fragments derived from YRNAs, similar to the ones reported here, were not reported in solid tumors and in normal serum, most likely because in these studies sequences whose length exceeded 17-25 nt were systematically discarded (Meiri et al., Nucleic acids research 38: 6234-6246, 2010). In another study, 28 nt YRNA fragments were found in vesicles released by immune cells, along with full length YRNAs, and full length and derivatives of SRP-RNA and vault-RNA (Nolte-'t Hoen et al., Nucleic acids research 40: 9272-9285, 2012). The vesicular small RNAs were enriched relative to cellular RNA, suggesting their selective release into the extracellular space and potential regulatory functions in target cells.

[0189] In this study, we have identified an abundant (comparable to miRNA) class of small RNA circulating in human blood, derived largely from genomic sequences annotated as YRNA pseudogenes. Taken together, the evidence discussed here indicates a potential for a variety of functions for 5′ YRNA fragments.

### Example 3

### Extracellular tRNA- and YRNA-Derived Fragments as Disease Biomarkers

[0190] The development of non-invasive specific biomarkers for early detection of cancer is key for effective therapeutic and preventive approaches to confront the worldwide morbidity and mortality of cancer and its rising financial burden. Circulating miRNAs are emerging as novel blood-based markers for the detection of human cancers, especially at an early stage. More recently, other small non-coding small RNAs were detected in plasma and serum, offering potential as a new class of biomarkers for diseases. Non-coding RNAs, with well known functions, undergo processing into smaller RNAs, in particular, tRNA is processed into tRNA fragments which were shown to function as inhibitors of translation initiation in response to stress in cultured cells. We recently reported the presence of tRNA- and YRNA-derived fragments in serum/plasma where they circulate as a component of a stable macromolecular complex. We found that the abundance of 5′ tRNA halves in the serum changes with age and calorie restriction, strongly suggesting that they are a novel form of signaling molecule, and thus, could serve as markers of health and disease states. YRNA-derived fragments were detected in MCF7 mammary adenocarcinoma cells and found significantly induced upon treatment of cancerous and non-cancerous cell lines with the stressor poly(I:C), a double-stranded RNA mimic immunostimulant chemical.

[0191] Here, we used high-throughput sequencing of small RNAs to perform genome-wide measurements of the serum levels of tRNA and YRNA fragments from 5 healthy female controls and 5 female patients with breast cancer. The analysis revealed that breast cancer is associated with significant differences in the abundance of circulating noncoding small RNAs derived from tRNAs and YRNAs (Tables 4 and 5). The observed differences in the levels of the circulating YRNA- and tRNA-derived fragments are linked to the presence of cancer. Thus, the profile of these fragments in serum, plasma, and other body fluids can be used new minimally invasive cancer markers.

TABLE 4
Breast cancer-associated changes in the serum levels of 5′ tRNA halves.

| | Normal | | | |
|---|---|---|---|---|
| tRNA¹ | (cpm)² | Tumor (cpm)² | FC³ | P-value |
| Arg-CCG | | | | |
| chr17: 66016013-66016085 | 49 | 145 | 3 | 0.003 |
| Arg-CCT | | | | |
| chr7: 139025446-139025518 | 23 | 47 | 2 | 0.006 |
| Arg-TCT | | | | |
| chr1: 159111401-159111474 | 6 | 17 | 3 | 0.005 |
| chr1: 94313129-94313213 | 1714 | 4033 | 2 | 0.004 |
| chr9: 131102355-131102445 | 6 | 13 | 2 | 0.007 |
| chr17: 8024243-8024330 | 12 | 22 | 2 | 0.018 |
| Asn-GTT | | | | |
| chr1: 148248115-148248188 | 26 | 72 | 3 | 0.008 |
| Cys-GCA | | | | |
| chr4: 124430005-124430076 | 85 | 164 | 2 | 0.008 |
| chr17: 37023898-37023969 | 553 | 1073 | 2 | 0.010 |
| chr17: 37025545-37025616 | 87 | 181 | 2 | 0.003 |
| chr17: 37309987-37310058 | 83 | 163 | 2 | 0.007 |
| chr17: 37310744-37310815 | 80 | 163 | 2 | 0.006 |
| Gln-TTG | | | | |
| chr6: 145503859-145503930 | 3 | 7 | 2 | 0.036 |
| Gly-TCC | | | | |
| chr1: 161432166-161432237 | 2 | 5 | 2 | 0.016 |
| Leu-AAG | | | | |
| chr5: 180528840-180528921 | 5 | 12 | 2 | 0.007 |
| chr14: 21078291-21078372 | 2 | 5 | 2 | 0.023 |
| Pro-TGG | | | | |
| chr16: 3234133-3234204 | 134 | 200 | 1 | 0.031 |
| Ser-GCT | | | | |
| chr6: 26305718-26305801 | 33 | 55 | 2 | 0.032 |
| chr6: 27265775-27265856 | 3 | 7 | 2 | 0.019 |
| Trp-CCA | | | | |
| chr6: 26331672-26331743 | 23 | 39 | 2 | 0.041 |
| Val-AAC | | | | |
| chr3: 169490018-169490090 | 15896 | 30605 | 2 | 0.017 |
| chr5: 180591154-180591226 | 16231 | 31153 | 2 | 0.017 |
| chr5: 180596610-180596682 | 16125 | 31093 | 2 | 0.016 |
| chr5: 180615416-180615488 | 3021 | 5485 | 2 | 0.021 |
| chr5: 180645270-180645342 | 4304 | 8291 | 2 | 0.016 |
| chr6: 27618707-27618779 | 4259 | 8194 | 2 | 0.017 |
| chr6: 27648885-27648957 | 4344 | 8315 | 2 | 0.017 |
| chr6: 27721179-27721251 | 4232 | 8154 | 2 | 0.017 |
| Val-CAC | | | | |
| chr1: 149298555-149298627 | 4331 | 8279 | 2 | 0.017 |
| chr1: 149684088-149684161 | 4391 | 8347 | 2 | 0.018 |
| chr1: 161369490-161369562 | 4414 | 8422 | 2 | 0.015 |
| chr5: 180524070-180524142 | 16273 | 31118 | 2 | 0.017 |
| chr5: 180529253-180529325 | 4466 | 8487 | 2 | 0.018 |
| chr5: 180600650-180600722 | 16731 | 31644 | 2 | 0.018 |
| chr5: 180649395-180649467 | 4395 | 8333 | 2 | 0.017 |
| chr6: 26538282-26538354 | 16594 | 31522 | 2 | 0.018 |
| chr6: 27173867-27173939 | 272 | 516 | 2 | 0.020 |
| chr6: 27248049-27248121 | 8352 | 17964 | 2 | 0.018 |
| chr6: 27696327-27696399 | 25 | 45 | 2 | 0.044 |
| Val-TAC | | | | |
| chr6: 27258405-27258477 | 200 | 354 | 2 | 0.035 |
| Asp-GTC | | | | |
| chr6: 27471523-27471594 | 94 | 56 | −2 | 0.039 |
| chr12: 125411891-125411962 | 29 | 15 | −2 | 0.020 |
| chr12: 125424193-125424264 | 31 | 16 | −2 | 0.015 |
| chr17: 8125556-8125627 | 30 | 14 | −2 | 0.009 |
| Lys-TTT | | | | |
| chr6: 27559593-27559665 | 115 | 61 | −2 | 0.016 |
| chr6: 28918806-28918878 | 4322 | 2407 | −2 | 0.042 |

¹tRNA isoacceptor identity with corresponding genomic positions in the human hg19 genome.
²Average tRNA read count for the indicated experimental group reported as counts per million (cpm) reads in the sequenced library.
³Fold change calculated by EdgeR from comparison between the normal and breast cancer serum samples.

TABLE 5
Breast cancer-associated changes in the serum levels of YRNA-derived fragments.

| Y_RNA¹ | Genomic coordinates | Normal (cpm)² | Tumor (cpm)² | FC³ | P-value | End⁴ |
|---|---|---|---|---|---|---|
| Y_RNA.400 | chr8:98784541-98784653 | 7.4 | 4.1 | -1.8 | 0.014 | 5′ |
| Y_RNA.353 | chr1:155092966-155093074 | 7.8 | 4.6 | -1.7 | 0.041 | 5′ |
| Y_RNA.31 | chrX:135653864-135653974 | 103.4 | 63.8 | -1.6 | 0.024 | 5′ |
| Y_RNA.112 | chr3:164840501-164840611 | 108.4 | 71.2 | -1.5 | 0.039 | 5′ |
| Y_RNA.367 | chrX:19394892-19394993 | 4.5 | 8.3 | 1.8 | 0.014 | 5′ |
| Y_RNA.639 | chr14:56535161-56535245 | 9.9 | 6.5 | -1.5 | 0.035 | 5′ |
| Y_RNA.166 | chr20:16651286-16651387 | 10.4 | 18.4 | 1.8 | 0.014 | 3′ |
| Y_RNA.597 | chr2:206890317-206890421 | 20.2 | 35.6 | 1.8 | 0.029 | 3′ |
| Y_RNA.535 | chr12:42848522-42848623 | 25.0 | 43.3 | 1.7 | 0.013 | 3′ |
| Y_RNA.180 | chr15:59867827-59867922 | 10.8 | 18.2 | 1.7 | 0.044 | 3′ |
| Y_RNA.168 | chr14:100049354-100049455 | 28.3 | 47.3 | 1.7 | 0.007 | 3′ |
| Y_RNA.450 | chr6:34789222-34789319 | 14.9 | 24.5 | 1.6 | 0.017 | 3′ |
| Y_RNA.212 | chr11:107955640-107955741 | 24.5 | 40.1 | 1.6 | 0.024 | 3′ |
| Y_RNA.511 | chr11:64063509-64063610 | 21.8 | 35.3 | 1.6 | 0.022 | 3′ |
| Y_RNA.481 | chr15:30965953-30966046 | 20.4 | 33.0 | 1.6 | 0.021 | 3′ |
| Y_RNA.505 | chr15:52454948-52455049 | 21.2 | 34.0 | 1.6 | 0.040 | 3′ |
| Y_RNA.148 | chr6:106902703-106902804 | 26.8 | 43.0 | 1.6 | 0.032 | 3′ |
| Y_RNA.469 | chr20:431307-431406 | 14.1 | 22.6 | 1.6 | 0.037 | 3′ |
| Y_RNA.170 | chr4:158689165-158689265 | 10.0 | 15.6 | 1.6 | 0.031 | 3′ |
| Y_RNA.595 | chr2:113337061-113337161 | 5.7 | 8.9 | 1.6 | 0.040 | 3′ |
| RNY4P18 | chr9:113859605-113859693 | 206.0 | 328.7 | 1.6 | 0.037 | 3′ |
| RNY4P25 | chr1:151411476-151411571 | 507.1 | 777.0 | 1.5 | 0.039 | 3′ |
| Y_RNA.218 | chr17:43148810-43148911 | 16.8 | 25.6 | 1.5 | 0.035 | 3′ |
| Y_RNA.699 | chrX:41175741-41175842 | 5.7 | 8.6 | 1.5 | 0.017 | 3′ |
| Y_RNA.492 | chr12:123252646-123252747 | 15 | 23 | 1.5 | 0.017 | 3′ |

¹YRNA identity with corresponding genomic positions in the human hg19 genome.
²Average YRNA read count for the indicated experimental group reported as counts per million (cpm) reads in the sequenced library.
³Fold change calculated by EdgeR from comparison between the normal and breast cancer serum samples.
⁴Indicates whether the sequencing reads map to the 5′ or 3′ end YRNAs.

[0192] It is understood that the examples and embodiments described herein are for illustrative purposes only and that various modifications or changes in light thereof will be suggested to persons skilled in the art and are to be included within the spirit and purview of this application and scope of the appended claims. All publications, patents, and patent applications cited herein are hereby incorporated by reference in their entirety for all purposes.

1. A method for assessing risk of colon cancer in a human patient, said method comprising the steps of:
(1) contacting genomic DNA isolated from a colon mucosa sample from the human patient with a bisulfite, wherein the bisulfite converts unmethylated cytosines in DNA present in the sample to uracils;
(2) performing a polymerase chain reaction (PCR) to amplify a genomic DNA sequence comprising SEQ ID NO:1 using a primer consisting of SEQ ID NO:4 and a primer consisting of SEQ ID NO:5;
(3) determining methylation status of cytosine-phosphate-guanine pairs (CpGs) in the genomic sequence amplified in step (2) and comparing the number of methylated CpGs with the number of methylated CpGs in the genomic sequence from a non-cancer colon mucosa sample and processed through steps (1) to (2); and
(4) determining the human patient, whose colon mucosa sample contains more methylated CpGs in the genomic sequence amplified in step (2) compared to the number of methylated CpGs with the number of methylated CpGs in the genomic sequence from a non-cancer colon mucosa tissue sample and processed through steps (1) to (2), as having an increased risk of colon cancer compared with a human subject not diagnosed with colon cancer.

2-5. (canceled)

6. The method according to claim 1, wherein the bisulfite is sodium bisulfite.

7. The method according to claim 1, wherein step (2) comprises combined bisulfate restriction analysis (COBRA).

8-11. (canceled)

12. The method according to claim 1, wherein step (2) or (3) further comprises using a primer or probe comprising a sequence selected from the group consisting of: SEQ ID NOs:8, 9, 10, and 11.

13-23. (canceled)

24. (canceled)

The application's sequence listing, which the Patent Office published only in electronic form, follows.

SEQUENCE LISTING (28195 sequences)

SEQ ID NO: 1 - RNA, 71 nt, Artificial Sequence
  synthetic chr1.tRNA704-GlyGCC gene cloverleaf structure
gcaugggugguucagugguagaauucucgccugccacgcgggaggcccggguucgauucccggcccaugca

SEQ ID NO: 2 - RNA, 111 nt, Artificial Sequence
  synthetic predicted YRNA structure
ggcugguccgarkgyagugrguuaugasgagagaywryyaruwdmucacagmyagwdmcmswwdwbyudvywyhyhmyccmcucccacurcurmacuugacuurgycuuww

SEQ ID NO: 3 - DNA, 28 bp, Artificial Sequence
  synthetic 32-P-5'-end labeled oligonucleotide probe against 5' end of tRNA-Gly-GCC
  modified_base (1)...(1): 32-P-5'-end labeled g
ggcgagaattctaccactgaaccaccaa

SEQ ID NO: 4 - DNA, 35 bp, Artificial Sequence
  synthetic 32-P-5'-end labeled oligonucleotide probe against 3' end of tRNA-Gly-GCC
  modified_base (1)...(1): 32-P-5'-end labeled t
tgcattggccgggaaccgaacccgggcctcccgcg

SEQ ID NO: 5 - DNA, 30 bp, Artificial Sequence
  synthetic 32-P-5'-end labeled oligonucleotide probe against 5' end of tRNA-Val-CAC
  modified_base (1)...(1): 32-P-5'-end labeled a
aggcgaacgtgataaccactacactacgga

SEQ ID NO: 6 - DNA, 36 bp, Artificial Sequence
  synthetic 32-P-5'-end labeled oligonucleotide probe against 3' end of tRNA-Val-CAC
  modified_base (1)...(1): 32-P-5'-end labeled t
tgtttccgcccggtttcgaaccggggacctttcgcg

SEQ ID NO: 7 - DNA, 28 bp, Artificial Sequence
  synthetic 32-P-5'-end labeled oligonucleotide probe against 5' end of tRNA-Asn-GTT
  modified_base (1)...(1): 32-P-5'-end labeled c
cgaacgcgctaaccgattgcgccacaga

SEQ ID NO: 8 - DNA, 32 bp, Artificial Sequence
  synthetic 32-P-5'-end labeled oligonucleotide probe against 5' end of RNY4 YRNA
  modified_base (1)...(1): 32-P-5'-end labeled a
agttctgataacccactaccatcggaccagcc

SEQ ID NO: 9 - DNA, 32 bp, Artificial Sequence
  synthetic 32-P-5'-end labeled oligonucleotide probe against 3' end of RNY4 YRNA
  modified_base (1)...(1): 32-P-5'-end labeled a
agccagtcaaatttagcagtggggggttgtat

SEQ ID NO: 10 - DNA, 30 bp, Artificial Sequence
  synthetic circulating small noncoding RNA (sncRNA) 5' transfer RNA (tRNA) half
gcgagaattctaccactgaaccaccaatgc

SEQ ID NO: 11 - DNA, 33 bp, Artificial Sequence
  synthetic circulating small noncoding RNA (sncRNA) 5' transfer RNA (tRNA) half
aggcgaacgtgataaccactacactacggaaac

SEQ ID NO: 12 - DNA, 31 bp, Artificial Sequence
  synthetic circulating small noncoding RNA (sncRNA) 5' transfer RNA (tRNA) half
ggcgagaattctaccactgaaccaccaatgc

SEQ ID NO: 13 - DNA, 32 bp, Artificial Sequence
  synthetic circulating small noncoding RNA (sncRNA) 5' transfer RNA (tRNA) half
ggcgaacgtgataaccactacactacggaaac

SEQ ID NO: 14 - DNA, 33 bp, Artificial Sequence
  synthetic circulating small noncoding RNA (sncRNA) 5' transfer RNA (tRNA) half
gtttccgtagtgtagtggttatcacgttcgcct

SEQ ID NO: 15 - DNA, 32 bp, Artificial Sequence
  synthetic circulating small noncoding RNA (sncRNA) 5' transfer RNA (tRNA) half
gtttccgtagtgtagtggttatcacgttcgcc

SEQ ID NO: 16 - DNA, 32 bp, Artificial Sequence
  synthetic circulating small noncoding RNA (sncRNA) 5' transfer RNA (tRNA) half
aggcgagaattctaccactgaaccaccaatgc

SEQ ID NO: 17 - DNA, 30 bp, Artificial Sequence
  synthetic circulating small noncoding RNA (sncRNA) 5' transfer RNA (tRNA) half
gcattggtggttcagtggtagaattctcgc

SEQ ID NO: 18 - DNA, 31 bp, Artificial Sequence
  synthetic circulating small noncoding RNA (sncRNA) 5' transfer RNA (tRNA) half
gcattggtggttcagtggtagaattctcgcc

SEQ ID NO: 19 - DNA, 31 bp, Artificial Sequence
  synthetic circulating small noncoding RNA (sncRNA) 5' transfer RNA (tRNA) half
cgccgaatcctaaccactagaccaccaggga

SEQ ID NO: 20 - DNA, 32 bp, Artificial Sequence
  synthetic circulating small noncoding RNA (sncRNA) 5' transfer RNA (tRNA) half
gtctcatgctctaccgactgagctagccgggc

SEQ ID NO: 21 - DNA, 32 bp, Artificial Sequence
  synthetic circulating small noncoding RNA (sncRNA) 5' transfer RNA (tRNA) half
gcattggtggttcagtggtagaattctcgcct

SEQ ID NO: 22 - DNA, 30 bp, Artificial Sequence
  synthetic circulating small noncoding RNA (sncRNA) 5' transfer RNA (tRNA) half
gccgaatcctaaccactagaccaccaggga

SEQ ID NO: 23 - DNA, 32 bp, Artificial Sequence
  synthetic circulating small noncoding RNA (sncRNA) 5' transfer RNA (tRNA) half
gcgccgaatcctaaccactagaccaccaggga

SEQ ID NO: 24 - DNA, 32 bp, Artificial Sequence
  synthetic circulating small noncoding RNA (sncRNA) 5' transfer RNA (tRNA) half
gcatgggtggttcagtggtagaattctcgcct

SEQ ID NO: 25 - DNA, 33 bp, Artificial Sequence
  synthetic circulating small noncoding RNA (sncRNA) 5' transfer RNA (tRNA) half
agtctcatgctctaccgactgagctagccgggc

SEQ ID NO: 26 - DNA, 32 bp, Artificial Sequence
  synthetic circulating small noncoding RNA (sncRNA) 5' transfer RNA (tRNA) half
gtctgatgctctaccgactgagctatccgggc

SEQ ID NO: 27 - DNA, 32 bp, Artificial Sequence
  synthetic circulating small noncoding RNA (sncRNA) 5' transfer RNA (tRNA) half
gtcccatgctctaccgactgagctagccgggc

SEQ ID NO: 28 - DNA, 31 bp, Artificial Sequence
  synthetic circulating small noncoding RNA (sncRNA) 5' transfer RNA (tRNA) half
gcatgggtggttcagtggtagaattctcgcc

SEQ ID NO: 29 - DNA, 32 bp, Artificial Sequence
  synthetic circulating small noncoding RNA (sncRNA) 5' transfer RNA (tRNA) half
gcccggctagctcagtcggtagagcatgagac

SEQ ID NO: 30 - DNA, 33 bp, Artificial Sequence
  synthetic circulating small noncoding RNA (sncRNA) 5' transfer RNA (tRNA) half
agcgccgaatcctaaccactagaccaccaggga

SEQ ID NO: 31 - DNA, 30 bp, Artificial Sequence
  synthetic circulating small noncoding RNA (sncRNA) 5' transfer RNA (tRNA) half
gcagagtactaaccactatacgatcacggc

SEQ ID NO: 32 - DNA, 33 bp, Artificial Sequence
  synthetic circulating small noncoding RNA (sncRNA) 5' transfer RNA (tRNA) half
aggcgaatgtgataaccactacactacggaaac

SEQ ID NO: 33 - DNA, 30 bp, Artificial Sequence
  synthetic circulating small noncoding RNA (sncRNA) 5' transfer RNA (tRNA) half
gcatgggtggttcagtggtagaattctcgc

SEQ ID NO: 34 - DNA, 33 bp, Artificial Sequence
  synthetic circulating small noncoding RNA (sncRNA) 5' transfer RNA (tRNA) half
gcccggctagctcagtcggtagagcatgagact

SEQ ID NO: 35 - DNA, 31 bp, Artificial Sequence
  synthetic circulating small noncoding RNA (sncRNA) 5' transfer RNA (tRNA) half
tccctggtggtctagtggttaggattcggcg

SEQ ID NO: 36 - DNA, 33 bp, Artificial Sequence
  synthetic circulating small noncoding RNA (sncRNA) 5' transfer RNA (tRNA) half
agtcccatgctctaccgactgagctagccgggc

SEQ ID NO: 37 - DNA, 30 bp, Artificial Sequence
  synthetic circulating small noncoding RNA (sncRNA) 5' transfer RNA (tRNA) half
tccctggtggtctagtggttaggattcggc

SEQ ID NO: 38 - DNA, 32 bp, Artificial Sequence
  synthetic circulating small noncoding RNA (sncRNA) 5' transfer RNA (tRNA) half
tccctggtggtctagtggttaggattcggcgc

SEQ ID NO: 39 - DNA, 32 bp, Artificial Sequence
  synthetic circulating small noncoding RNA (sncRNA) 5' transfer RNA (tRNA) half
ggcgaatgtgataaccactacactacggaaac

SEQ ID NO: 40 - DNA, 32 bp, Artificial Sequence
  synthetic circulating small noncoding RNA (sncRNA) 5' transfer RNA (tRNA) half
gcccggatagctcagtcggtagagcatcagac

SEQ ID NO: 41 - DNA, 31 bp, Artificial Sequence
  synthetic circulating small noncoding RNA (sncRNA) 5' transfer RNA (tRNA) half
gcgaacgtgataaccactacactacggaaac

SEQ ID NO: 42 - DNA, 32 bp, Artificial Sequence
  synthetic circulating small noncoding RNA (sncRNA) 5' transfer RNA (tRNA) half
agtcaaatgctctaccactgagctataccccc

SEQ ID NO: 43 - DNA, 28 bp, Artificial Sequence
  synthetic circulating small noncoding RNA (sncRNA) 5' transfer RNA (tRNA) half
gagaattctaccactgaaccaccaatgc

SEQ ID NO: 44 - DNA, 33 bp, Artificial Sequence
  synthetic circulating small noncoding RNA (sncRNA) 5' transfer RNA (tRNA) half
aggcgagcgtgatgaccactacactacggaaac

SEQ ID NO: 45 - DNA, 18 bp, Artificial Sequence
  synthetic circulating small noncoding RNA (sncRNA) 5' transfer RNA (tRNA) half
ccactgaaccaccaatgc

SEQ ID NO: 46 - DNA, 32 bp, Artificial Sequence
  synthetic circulating small noncoding RNA (sncRNA) 5' transfer RNA (tRNA) half
accaggaatcctaaccgctagaccatgtggga

SEQ ID NO: 47 - DNA, 31 bp, Artificial Sequence
  synthetic circulating small noncoding RNA (sncRNA) 5' transfer RNA (tRNA) half
gcccagcacgcttccgctgcgccactctgct

SEQ ID NO: 48 - DNA, 31 bp, Artificial Sequence
  synthetic circulating small noncoding RNA (sncRNA) 5' transfer RNA (tRNA) half
cgcagagtactaaccactatacgatcacggc

SEQ ID NO: 49 - DNA, 31 bp, Artificial Sequence
  synthetic circulating small noncoding RNA (sncRNA) 5' transfer RNA (tRNA) half
gtttccgtagtgtagtggttatcacgttcgc

SEQ ID NO: 50 - DNA, 29 bp, Artificial Sequence
  synthetic circulating small noncoding RNA (sncRNA) 5' transfer RNA (tRNA) half
cgagaattctaccactgaaccaccaatgc

SEQ ID NO: 51 - DNA, 30 bp, Artificial Sequence
  synthetic circulating small noncoding RNA (sncRNA) 5' transfer RNA (tRNA) half
gccgtgatcgtatagtggttagtactctgc

SEQ ID NO: 52 - DNA, 33 bp, Artificial Sequence
  synthetic circulating small noncoding RNA (sncRNA) 5' transfer RNA (tRNA) half
tccctggtggtctagtggttaggattcggcgct

SEQ ID NO: 53 - DNA, 30 bp, Artificial Sequence
  synthetic circulating small noncoding RNA (sncRNA) 5' transfer RNA (tRNA) half
cccatgctctaccgactgagctagccgggc

SEQ ID NO: 54 - DNA, 30 bp, Artificial Sequence
  synthetic circulating small noncoding RNA (sncRNA) 5' transfer RNA (tRNA) half
caggaatcctaaccgctagaccatatggga

SEQ ID NO: 55 - DNA, 32 bp, Artificial Sequence
  synthetic circulating small noncoding RNA (sncRNA) 5' transfer RNA (tRNA) half
accaggaatcctaaccgctagaccatatggga

SEQ ID NO: 56 - DNA, 33 bp, Artificial Sequence
  synthetic circulating small noncoding RNA (sncRNA) 5' transfer RNA (tRNA) half
agtctgatgctctaccgactgagctatccgggc

SEQ ID NO: 57 - DNA, 32 bp, Artificial Sequence
  synthetic circulating small noncoding RNA (sncRNA) 5' transfer RNA (tRNA) half
tcccacatggtctagcggttaggattcctggt

SEQ ID NO: 58 - DNA, 34 bp, Artificial Sequence
  synthetic circulating small noncoding RNA (sncRNA) 5' transfer RNA (tRNA) half
gagtctcatgctctaccgactgagctagccgggc

SEQ ID NO: 59 - DNA, 30 bp, Artificial Sequence
  synthetic circulating small noncoding RNA (sncRNA) 5' transfer RNA (tRNA) half
ctcatgctctaccgactgagctagccgggc

SEQ ID NO: 60 - DNA, 30 bp, Artificial Sequence
  synthetic circulating small noncoding RNA (sncRNA) 5' transfer RNA (tRNA) half
caggaatcctaaccgctagaccatgtggga

SEQ ID NO: 61 - DNA, 31 bp, Artificial Sequence
  synthetic circulating small noncoding RNA (sncRNA) 5' transfer RNA (tRNA) half
ggcgagaattctaccattgaactaccaatgc

SEQ ID NO: 62 - DNA, 31 bp, Artificial Sequence
  synthetic circulating small noncoding RNA (sncRNA) 5' transfer RNA (tRNA) half
agcagagtggcgcagcggaagcgtgctgggc

SEQ ID NO: 63 - DNA, 32 bp, Artificial Sequence
  synthetic circulating small noncoding RNA (sncRNA) 5' transfer RNA (tRNA) half
gggggtatagctcagtggtagagcatttgact

SEQ ID NO: 64 - DNA, 33 bp, Artificial Sequence
  synthetic circulating small noncoding RNA (sncRNA) 5' transfer RNA (tRNA) half
aaccaggaatcctaaccgctagaccatgtggga

SEQ ID NO: 65 - DNA, 33 bp, Artificial Sequence
  synthetic circulating small noncoding RNA (sncRNA) 5' transfer RNA (tRNA) half
gacccagtggcctaatggataaggcatcagcct

SEQ ID NO: 66 - DNA, 33 bp, Artificial Sequence
  synthetic circulating small noncoding RNA (sncRNA) 5' transfer RNA (tRNA) half
gtttctgtagtgtagtggttatcacgctcgcct

SEQ ID NO: 67 - DNA, 33 bp, Artificial Sequence
  synthetic circulating small noncoding RNA (sncRNA) 5' transfer RNA (tRNA) half
gtttccgtagtgtagtggtcatcacgctcgcct

SEQ ID NO: 68 - DNA, 29 bp, Artificial Sequence
  synthetic circulating small noncoding RNA (sncRNA) 5' transfer RNA (tRNA) half
gtctgatgctctaccgactgagctatccg

SEQ ID NO: 69 - DNA, 33 bp, Artificial Sequence
  synthetic circulating small noncoding RNA (sncRNA) 5' transfer RNA (tRNA) half
aaccaggaatcctaaccgctagaccatatggga

SEQ ID NO: 70 - DNA, 33 bp, Artificial Sequence
  synthetic circulating small noncoding RNA (sncRNA) 5' transfer RNA (tRNA) half
gtttccctagtgtagtggttatcacgttcgcct

SEQ ID NO: 71 - DNA, 28 bp, Artificial Sequence
  synthetic circulating small noncoding RNA (sncRNA) 5' transfer RNA (tRNA) half
gcattggtggttcagtggtagaattctc

SEQ ID NO: 72 - DNA, 31 bp, Artificial Sequence
  synthetic circulating small noncoding RNA (sncRNA) 5' transfer RNA (tRNA) half
ggcgagaattctaccattgaaccaccaatgc

SEQ ID NO: 73 - DNA, 30 bp, Artificial Sequence
  synthetic circulating small noncoding RNA (sncRNA) 5' transfer RNA (tRNA) half
tcccacatggtctagcggttaggattcctg

SEQ ID NO: 74 - DNA, 32 bp, Artificial Sequence
  synthetic circulating small noncoding RNA (sncRNA) 5' transfer RNA (tRNA) half
gtttccgtagtgtagtggttatcacgctcgcc

SEQ ID NO: 75 - DNA, 34 bp, Artificial Sequence
  synthetic circulating small noncoding RNA (sncRNA) 5' transfer RNA (tRNA) half
aaaccaggaatcctaaccgctagaccatgtggga

SEQ ID NO: 76 - DNA, 28 bp, Artificial Sequence
  synthetic circulating small noncoding RNA (sncRNA) 5' transfer RNA (tRNA) half
ggaatcctaaccgctagaccatgtggga

SEQ ID NO: 77 - DNA, 33 bp, Artificial Sequence
  synthetic circulating small noncoding RNA (sncRNA) 5' transfer RNA (tRNA) half
tcccacatggtctagcggttaggattcctggtt

SEQ ID NO: 78 - DNA, 31 bp, Artificial Sequence
  synthetic circulating small noncoding RNA (sncRNA) 5' transfer RNA (tRNA) half
agcgagaatcatacccctagaccaacgagcc

SEQ ID NO: 79 - DNA, 32 bp, Artificial Sequence
  synthetic circulating small noncoding RNA (sncRNA) 5' transfer RNA (tRNA) half
acgcagagtactaaccactatacgatcacggc

SEQ ID NO: 80 - DNA, 33 bp, Artificial Sequence
  synthetic circulating small noncoding RNA (sncRNA) 5' transfer RNA (tRNA) half
gtttccgtagtgtagtggttatcacgctcgcct

SEQ ID NO: 81 - DNA, 29 bp, Artificial Sequence
  synthetic circulating small noncoding RNA (sncRNA) 5' transfer RNA (tRNA) half
gcagagtactaaccactatacgatcacgg

SEQ ID NO: 82 - DNA, 29 bp, Artificial Sequence
  synthetic circulating small noncoding RNA (sncRNA) 5' transfer RNA (tRNA) half
gcattggtggttcagtggtagaattctcg

SEQ ID NO: 83 - DNA, 18 bp, Artificial Sequence
  synthetic circulating small noncoding RNA (sncRNA) 5' transfer RNA (tRNA) half
gcattggtggttcagtgg

SEQ ID NO: 84 - DNA, 30 bp, Artificial Sequence
  synthetic circulating small noncoding RNA (sncRNA) 5' transfer RNA (tRNA) half
tcccatatggtctagcggttaggattcctg

SEQ ID NO: 85 - DNA, 32 bp, Artificial Sequence
  synthetic circulating small noncoding RNA (sncRNA) 5' transfer RNA (tRNA) half
aggcgagaattctaccattgaactaccaatgc

SEQ ID NO: 86 - DNA, 32 bp, Artificial Sequence
  synthetic circulating small noncoding RNA (sncRNA) 5' transfer RNA (tRNA) half
tcccatatggtctagcggttaggattcctggt

SEQ ID NO: 87 - DNA, 15 bp, Artificial Sequence
  synthetic circulating small noncoding RNA (sncRNA) 5' transfer RNA (tRNA) half
ctcggccacgactac

SEQ ID NO: 88 - DNA, 34 bp, Artificial Sequence
  synthetic circulating small noncoding RNA (sncRNA) 5' transfer RNA (tRNA) half
gaggcgaacgtgataaccactacactacggaaac

SEQ ID NO: 89 - DNA, 32 bp, Artificial Sequence
  synthetic circulating small noncoding RNA (sncRNA) 5' transfer RNA (tRNA) half
gtttccctagtgtagtggttatcacgttcgcc

SEQ ID NO: 90 - DNA, 34 bp, Artificial Sequence
  synthetic circulating small noncoding RNA (sncRNA) 5' transfer RNA (tRNA) half
gcccggctagctcagtcggtagagcatgagactc

SEQ ID NO: 91 - DNA, 31 bp, Artificial Sequence
  synthetic circulating small noncoding RNA (sncRNA) 5' transfer RNA (tRNA) half
gccgtgatcgtatagtggttagtactctgcg

SEQ ID NO: 92 - DNA, 31 bp, Artificial Sequence
  synthetic circulating small noncoding RNA (sncRNA) 5' transfer RNA (tRNA) half
tctcatgctctaccgactgagctagccgggc

SEQ ID NO: 93 - DNA, 30 bp, Artificial Sequence
  synthetic circulating small noncoding RNA (sncRNA) 5' transfer RNA (tRNA) half
gcccggctagctcagtcggtagagcatgag

SEQ ID NO: 94 - DNA, 20 bp, Artificial Sequence
  synthetic circulating small noncoding RNA (sncRNA) 5' transfer RNA (tRNA) half
acgcagagtactaaccacta

SEQ ID NO: 95 - DNA, 34 bp, Artificial Sequence
  synthetic circulating small noncoding RNA (sncRNA) 5' transfer RNA (tRNA) half
aaaccaggaatcctaaccgctagaccatatggga

SEQ ID NO: 96 - DNA, 32 bp, Artificial Sequence
  synthetic circulating small noncoding RNA (sncRNA) 5' transfer RNA (tRNA) half
aagcgagaatcatacccctagaccaacgagcc

SEQ ID NO: 97 - DNA, 29 bp, Artificial Sequence
  synthetic circulating small noncoding RNA (sncRNA) 5' transfer RNA (tRNA) half
ccgaatcctaaccactagaccaccaggga

SEQ ID NO: 98 - DNA, 32 bp, Artificial Sequence
  synthetic circulating small noncoding RNA (sncRNA) 5' transfer RNA (tRNA) half
ggcgagcgtgatgaccactacactacggaaac

SEQ ID NO: 99 - DNA, 34 bp, Artificial Sequence
  synthetic circulating small noncoding RNA (sncRNA) 5' transfer RNA (tRNA) half
tcccacatggtctagcggttaggattcctggttt

SEQ ID NO: 100 - DNA, 28 bp, Artificial Sequence
  synthetic circulating small noncoding RNA (sncRNA) 5' transfer RNA (tRNA) half
tcccacatggtctagcggttaggattcc

SEQ ID NO: 101 - DNA, 31 bp, Artificial Sequence
  synthetic circulating small noncoding RNA (sncRNA) 5' transfer RNA (tRNA) half
gcattggtagttcaatggtagaattctcgcc

SEQ ID NO: 102 - DNA, 29 bp, Artificial Sequence
  synthetic circulating small noncoding RNA (sncRNA) 5' transfer RNA (tRNA) half
ccatgctctaccgactgagctagccgggc

SEQ ID NO: 103 - DNA, 28 bp, Artificial Sequence
  synthetic circulating small noncoding RNA (sncRNA) 5' transfer RNA (tRNA) half
ggaatcctaaccgctagaccatatggga

SEQ ID NO: 104 - DNA, 29 bp, Artificial Sequence
  synthetic circulating small noncoding RNA (sncRNA) 5' transfer RNA (tRNA) half
aggaatcctaaccgctagaccatatggga

SEQ ID NO: 105 - DNA, 32 bp, Artificial Sequence
  synthetic circulating small noncoding RNA (sncRNA) 5' transfer RNA (tRNA) half
aggcgagaattctaccattgaaccaccaatgc

SEQ ID NO: 106 - DNA, 34 bp, Artificial Sequence
  synthetic circulating small noncoding RNA (sncRNA) 5' transfer RNA (tRNA) half
gtttccgtagtgtagtggttatcacgttcgcctc

SEQ ID NO: 107 - DNA, 33 bp, Artificial Sequence
  synthetic circulating small noncoding RNA (sncRNA) 5' transfer RNA (tRNA) half
gcccggatagctcagtcggtagagcatcagact

SEQ ID NO: 108 - DNA, 31 bp, Artificial Sequence
  synthetic circulating small noncoding RNA (sncRNA) 5' transfer RNA (tRNA) half
ccaggaatcctaaccgctagaccatgtggga

SEQ ID NO: 109 - DNA, 31 bp, Artificial Sequence
  synthetic circulating small noncoding RNA (sncRNA) 5' transfer RNA (tRNA) half
ggctcgttggtctaggggtatgattctcgct

SEQ ID NO: 110 - DNA, 19 bp, Artificial Sequence
  synthetic circulating small noncoding RNA (sncRNA) 5' transfer RNA (tRNA) half
cgcagagtactaaccacta

SEQ ID NO: 111 - DNA, 33 bp, Artificial Sequence
  synthetic circulating small noncoding RNA (sncRNA) 5' transfer RNA (tRNA) half
tcccatatggtctagcggttaggattcctggtt

SEQ ID NO: 112 - DNA, 29 bp, Artificial Sequence
  synthetic circulating small noncoding RNA (sncRNA) 5' transfer RNA (tRNA) half
aggaatcctaaccgctagaccatgtggga

SEQ ID NO: 113 - DNA, 27 bp, Artificial Sequence
  synthetic circulating small noncoding RNA (sncRNA) 5' transfer RNA (tRNA) half
tgcgctctaccactgagctacatcccc

SEQ ID NO: 114 - DNA, 34 bp, Artificial Sequence
  synthetic circulating small noncoding RNA (sncRNA) 5' transfer RNA (tRNA) half
gagcgccgaatcctaaccactagaccaccaggga

SEQ ID NO: 115 - DNA, 31 bp, Artificial Sequence
  synthetic circulating small noncoding RNA (sncRNA) 5' transfer RNA (tRNA) half
gcattggtggttcaatggtagaattctcgcc

SEQ ID NO: 116 - DNA, 31 bp, Artificial Sequence
  synthetic circulating small noncoding RNA (sncRNA) 5' transfer RNA (tRNA) half
gtcaaatgctctaccactgagctataccccc

SEQ ID NO: 117 - DNA, 31 bp, Artificial Sequence
  synthetic circulating small noncoding RNA (sncRNA) 5' transfer RNA (tRNA) half
ccaggaatcctaaccgctagaccatatggga

SEQ ID NO: 118 - DNA, 34 bp, Artificial Sequence
  synthetic circulating small noncoding RNA (sncRNA) 5' transfer RNA (tRNA) half
gagtcccatgctctaccgactgagctagccgggc

SEQ ID NO: 119 - DNA, 30 bp, Artificial Sequence
  synthetic circulating small noncoding RNA (sncRNA) 5' transfer RNA (tRNA) half
cgaacgtgataaccactacactacggaaac

SEQ ID NO: 120 - DNA, 31 bp, Artificial Sequence
  synthetic circulating small noncoding RNA (sncRNA) 5' transfer RNA (tRNA) half
tcccatgctctaccgactgagctagccgggc

SEQ ID NO: 121 - DNA, 30 bp, Artificial Sequence
  synthetic circulating small noncoding RNA (sncRNA) 5' transfer RNA (tRNA) half
gcaagaattctaccactgaaccaccaatgc

SEQ ID NO: 122 - DNA, 32 bp, Artificial Sequence
  synthetic circulating small noncoding RNA (sncRNA) 5' transfer RNA (tRNA) half
gtccagagtgctaaccattacaccatggaacc

SEQ ID NO: 123 - DNA, 30 bp, Artificial Sequence
  synthetic circulating small noncoding RNA (sncRNA) 5' transfer RNA (tRNA) half
gcgagaattctaccattgaactaccaatgc

SEQ ID NO: 124 - DNA, 29 bp, Artificial Sequence
  synthetic circulating small noncoding RNA (sncRNA) 5' transfer RNA (tRNA) half
cagagtactaaccactatacgatcacggc

SEQ ID NO: 125 - DNA, 32 bp, Artificial Sequence
  synthetic circulating small noncoding RNA (sncRNA) 5' transfer RNA (tRNA) half
ggctcgttggtctaggggtatgattctcgctt

SEQ ID NO: 126 - DNA, 26 bp, Artificial Sequence
  synthetic circulating small noncoding RNA (sncRNA) 5' transfer RNA (tRNA) half
gaattctaccactgaaccaccaatgc

SEQ ID NO: 127 - DNA, 28 bp, Artificial Sequence
  synthetic circulating small noncoding RNA (sncRNA) 5' transfer RNA (tRNA) half
gagaatcatacccctagaccaacgagcc

SEQ ID NO: 128 - DNA, 29 bp, Artificial Sequence
  synthetic circulating small noncoding RNA (sncRNA) 5' transfer RNA (tRNA) half
gtctcatgctctaccgactgagctagccg

SEQ ID NO: 129 - DNA, 15 bp, Artificial Sequence
  synthetic circulating small noncoding RNA (sncRNA) 5' transfer RNA (tRNA) half
gtagtcgtggccgag

SEQ ID NO: 130 - DNA, 31 bp, Artificial Sequence
  synthetic circulating small noncoding RNA (sncRNA) 5' transfer RNA (tRNA) half
gcccggctagctcagtcggtagagcatgaga

SEQ ID NO: 131 - DNA, 32 bp, Artificial Sequence
  synthetic circulating small noncoding RNA (sncRNA) 5' transfer RNA (tRNA) half
gcattggtagttcaatggtagaattctcgcct

SEQ ID NO: 132 - DNA, 31 bp, Artificial Sequence
  synthetic circulating small noncoding RNA (sncRNA) 5' transfer RNA (tRNA) half
agtctcatgctctaccgactgagctagccgg

SEQ ID NO: 133 - DNA, 19 bp, Artificial Sequence
  synthetic circulating small noncoding RNA (sncRNA) 5' transfer RNA (tRNA) half
ggcgagaattctaccactg

SEQ ID NO: 134 - DNA, 26 bp, Artificial Sequence
  synthetic circulating small noncoding RNA (sncRNA) 5' transfer RNA (tRNA) half
gccttagaccgctcggccatcctgac

SEQ ID NO: 135 - DNA, 21 bp, Artificial Sequence
  synthetic circulating small noncoding RNA (sncRNA) 5' transfer RNA (tRNA) half
agaccgctcggccatcctgac

SEQ ID NO: 136 - DNA, 32 bp, Artificial Sequence
  synthetic circulating small noncoding RNA (sncRNA) 5' transfer RNA (tRNA) half
aggcgaacgtgataaccactacactacggaaa

SEQ ID NO: 137 - DNA, 32 bp, Artificial Sequence
  synthetic circulating small noncoding RNA (sncRNA) 5' transfer RNA (tRNA) half
ggcggggatactaaccactatactaacgagga

SEQ ID NO: 138 - DNA, 30 bp, Artificial Sequence
  synthetic circulating small noncoding RNA (sncRNA) 5' transfer RNA (tRNA) half
gtttccgtagtgtagtggttatcacgttcg

SEQ ID NO: 139 - DNA, 30 bp, Artificial Sequence
  synthetic circulating small noncoding RNA (sncRNA) 5' transfer RNA (tRNA) half
gcgagaattctaccattgaaccaccaatgc

SEQ ID NO: 140 - DNA, 34 bp, Artificial Sequence
  synthetic circulating small noncoding RNA (sncRNA) 5' transfer RNA (tRNA) half
caacgcagagtactaaccactatacgatcacggc

SEQ ID NO: 141 - DNA, 31 bp, Artificial Sequence
  synthetic circulating small noncoding RNA (sncRNA) 5' transfer RNA (tRNA) half
tcccacatggtctagcggttaggattcctgg

SEQ ID NO: 142 - DNA, 29 bp, Artificial Sequence
  synthetic circulating small noncoding RNA (sncRNA) 5' transfer RNA (tRNA) half
cggatagctcagtcggtagagcatcagac

SEQ ID NO: 143 - DNA, 31 bp, Artificial Sequence
  synthetic circulating small noncoding RNA (sncRNA) 5' transfer RNA (tRNA) half
ggcaagaattctaccactgaaccaccaatgc

SEQ ID NO: 144 - DNA, 20 bp, Artificial Sequence
  synthetic circulating small noncoding RNA (sncRNA) 5' transfer RNA (tRNA) half
gtctgatgctctaccgactg

SEQ ID NO: 145 - DNA, 31 bp, Artificial Sequence
  synthetic circulating small noncoding RNA (sncRNA) 5' transfer RNA (tRNA) half
ggttccatagtgtagcggttatcacgtctgc

SEQ ID NO: 146 - DNA, 18 bp, Artificial Sequence
  synthetic circulating small noncoding RNA (sncRNA) 5' transfer RNA (tRNA) half
gcggttatcacgtctgct

SEQ ID NO: 147 - DNA, 29 bp, Artificial Sequence
  synthetic circulating small noncoding RNA (sncRNA) 5' transfer RNA (tRNA) half
tcccacatggtctagcggttaggattcct

SEQ ID NO: 148 - DNA, 30 bp, Artificial Sequence; identical to SEQ ID NO: 5
  synthetic circulating small noncoding RNA (sncRNA) 5' transfer RNA (tRNA) half

SEQ ID NO: 149 - DNA, 32 bp, Artificial Sequence
  synthetic circulating small noncoding RNA (sncRNA) 5' transfer RNA (tRNA) half
gcgccgctggtgtagtggtatcatgcaagatt

SEQ ID NO: 150 - DNA, 34 bp, Artificial Sequence
  synthetic circulating small noncoding RNA (sncRNA) 5' transfer RNA (tRNA) half
tcccatatggtctagcggttaggattcctggttt

SEQ ID NO: 151 - DNA, 16 bp, Artificial Sequence
  synthetic circulating small noncoding RNA (sncRNA) 5' transfer RNA (tRNA) half
gcgccgaatcctaacc

SEQ ID NO: 152 - DNA, 32 bp, Artificial Sequence
  synthetic circulating small noncoding RNA (sncRNA) 5' transfer RNA (tRNA) half
ggttccatagtgtagcggttatcacgtctgct

SEQ ID NO: 153 - DNA, 28 bp, Artificial Sequence
  synthetic circulating small noncoding RNA (sncRNA) 5' transfer RNA (tRNA) half
gcgagaattctaccactgaaccaccaat

SEQ ID NO: 154 - DNA, 32 bp, Artificial Sequence
  synthetic circulating small noncoding RNA (sncRNA) 5' transfer RNA (tRNA) half
gccgtgatcgtatagtggttagtactctgcgt

SEQ ID NO: 155 - DNA, 32 bp, Artificial Sequence
  synthetic circulating small noncoding RNA (sncRNA) 5' transfer RNA (tRNA) half
gtccagagtgctaaccattacaccatgggacc

SEQ ID NO: 156 - DNA, 33 bp, Artificial Sequence
  synthetic circulating small noncoding RNA (sncRNA) 5' transfer RNA (tRNA) half
agtccagagtgctaaccattacaccatggaacc

SEQ ID NO: 157 - DNA, 21 bp, Artificial Sequence
  synthetic circulating small noncoding RNA (sncRNA) 5' transfer RNA (tRNA) half
gtctgatgctctaccgactga

SEQ ID NO: 158 - DNA, 32 bp, Artificial Sequence
  synthetic circulating small noncoding RNA (sncRNA) 5' transfer RNA (tRNA) half
gtttccgtagtgtagtggtcatcacgctcgcc

SEQ ID NO: 159 - DNA, 20 bp, Artificial Sequence
  synthetic circulating small noncoding RNA (sncRNA) 5' transfer RNA (tRNA) half
gtctcatgctctaccgactg

SEQ ID NO: 160 - DNA, 29 bp, Artificial Sequence
  synthetic circulating small noncoding RNA (sncRNA) 5' transfer RNA (tRNA) half
ccgtgatcgtatagtggttagtactctgc

SEQ ID NO: 161 - DNA, 35 bp, Artificial Sequence
  synthetic circulating small noncoding RNA (sncRNA) 5' transfer RNA (tRNA) half
aaaaccaggaatcctaaccgctagaccatgtggga

SEQ ID NO: 162 - DNA, 31 bp, Artificial Sequence
  synthetic circulating small noncoding RNA (sncRNA) 5' transfer RNA (tRNA) half
ggcgaacgtgataaccactacactacggaaa

SEQ ID NO: 163 - DNA, 21 bp, Artificial Sequence
  synthetic circulating small noncoding RNA (sncRNA) 5' transfer RNA (tRNA) half
agaccgctcggccacgctacc

SEQ ID NO: 164 - DNA, 32 bp, Artificial Sequence
  synthetic circulating small noncoding RNA (sncRNA) 5' transfer RNA (tRNA) half
agtcaaatgctctacccctgagctataccccc

SEQ ID NO: 165 - DNA, 32 bp, Artificial Sequence
  synthetic circulating small noncoding RNA (sncRNA) 5' transfer RNA (tRNA) half
tttccgtagtgtagtggttatcacgttcgcct

SEQ ID NO: 166 - DNA, 20 bp, Artificial Sequence
  synthetic circulating small noncoding RNA (sncRNA) 5' transfer RNA (tRNA) half
aggcgagaattctaccactg

SEQ ID NO: 167 - DNA, 28 bp, Artificial Sequence
  synthetic circulating small noncoding RNA (sncRNA) 5' transfer RNA (tRNA) half
gcatgggtggttcagtggtagaattctc

SEQ ID NO: 168 - DNA, 28 bp, Artificial Sequence
  synthetic circulating small noncoding RNA (sncRNA) 5' transfer RNA (tRNA) half
tcccatatggtctagcggttaggattcc

SEQ ID NO: 169 - DNA, 18 bp, Artificial Sequence
  synthetic circulating small noncoding RNA (sncRNA) 5' transfer RNA (tRNA) half
gtctgatgctctaccgac

SEQ ID NO: 170 - DNA, 34 bp, Artificial Sequence
  synthetic circulating small noncoding RNA (sncRNA) 5' transfer RNA (tRNA) half
gagtccagagtgctaaccattacaccatggaacc

SEQ ID NO: 171 - DNA, 23 bp, Artificial Sequence
  synthetic circulating small noncoding RNA (sncRNA) 5' transfer RNA (tRNA) half
ggcgaacgtgataaccactacac

SEQ ID NO: 172 - DNA, 30 bp, Artificial Sequence
  synthetic circulating small noncoding RNA (sncRNA) 5' transfer RNA (tRNA) half
tccgtagtgtagtggttatcacgttcgcct

SEQ ID NO: 173 - DNA, 30 bp, Artificial Sequence
  synthetic circulating small noncoding RNA (sncRNA) 5' transfer RNA (tRNA) half
gcgagaatcatacccctagaccaacgagcc

SEQ ID NO: 174 - DNA, 34 bp, Artificial Sequence
  synthetic circulating small noncoding RNA (sncRNA) 5' transfer RNA (tRNA) half
gcgccgctggtgtagtggtatcatgcaagattcc

SEQ ID NO: 175 - DNA, 31 bp, Artificial Sequence
  synthetic circulating small noncoding RNA (sncRNA) 5' transfer RNA (tRNA) half
gcgaatgtgataaccactacactacggaaac

SEQ ID NO: 176 - DNA, 30 bp, Artificial Sequence
  synthetic circulating small noncoding RNA (sncRNA) 5' transfer RNA (tRNA) half
agtctcatgctctaccgactgagctagccg

SEQ ID NO: 177 - DNA, 18 bp, Artificial Sequence
  synthetic circulating small noncoding RNA (sncRNA) 5' transfer RNA (tRNA) half
acgcagagtactaaccac

SEQ ID NO: 178 - DNA, 30 bp, Artificial Sequence
  synthetic circulating small noncoding RNA (sncRNA) 5' transfer RNA (tRNA) half
cgcagagtactaaccactatacgatcacgg

SEQ ID NO: 179 - DNA, 29 bp, Artificial Sequence
  synthetic circulating small noncoding RNA (sncRNA) 5' transfer RNA (tRNA) half
tcccatatggtctagcggttaggattcct

SEQ ID NO: 180 - DNA, 34 bp, Artificial Sequence
  synthetic circulating small noncoding RNA (sncRNA) 5' transfer RNA (tRNA) half
aagtctgatgctctaccgactgagctatccgggc

SEQ ID NO: 181 - DNA, 32 bp, Artificial Sequence
  synthetic circulating small noncoding RNA (sncRNA) 5' transfer RNA (tRNA) half
gcattggtggttcaatggtagaattctcgcct

SEQ ID NO: 182 - DNA, 20 bp, Artificial Sequence
  synthetic circulating small noncoding RNA (sncRNA) 5' transfer RNA (tRNA) half
tagtggttagtactctgcgt

SEQ ID NO: 183 - DNA, 29 bp, Artificial Sequence
  synthetic circulating small noncoding RNA (sncRNA) 5' transfer RNA (tRNA) half
gcatgggtggttcagtggtagaattctcg

SEQ ID NO: 184 - DNA, 31 bp, Artificial Sequence
  synthetic circulating small noncoding RNA (sncRNA) 5' transfer RNA (tRNA) half
cgccaaatcctaaccactagaccaccaggga

SEQ ID NO: 185 - DNA, 31 bp, Artificial Sequence
  synthetic circulating small noncoding RNA (sncRNA) 5' transfer RNA (tRNA) half
tttccgtagtgtagtggttatcacgttcgcc

SEQ ID NO: 186 - DNA, 33 bp, Artificial Sequence
  synthetic circulating small noncoding RNA (sncRNA) 5' transfer RNA (tRNA) half
gtttctgtagtgtagtggttatcacgttcgcct

SEQ ID NO: 187 - DNA, 32 bp, Artificial Sequence
  synthetic circulating small noncoding RNA (sncRNA) 5' transfer RNA (tRNA) half
ggccccatggtgtaatggttagcactctggac

SEQ ID NO: 188 - DNA, 35 bp, Artificial Sequence
  synthetic circulating small noncoding RNA (sncRNA) 5' transfer RNA (tRNA) half
aaaaccaggaatcctaaccgctagaccatatggga

SEQ ID NO: 189 - DNA, 33 bp, Artificial Sequence
  synthetic circulating small noncoding RNA (sncRNA) 5' transfer RNA (tRNA) half
aggcggggatactaaccactatactaacgagga

SEQ ID NO: 190 - DNA, 23 bp, Artificial Sequence
  synthetic circulating small noncoding RNA (sncRNA) 5' transfer RNA (tRNA) half
gataaccactacactacggaaac

SEQ ID NO: 191 - DNA, 31 bp, Artificial Sequence
  synthetic circulating small noncoding RNA (sncRNA) 5' transfer RNA (tRNA) half
tctgatgctctaccgactgagctatccgggc

SEQ ID NO: 192 - DNA, 18 bp, Artificial Sequence
  synthetic circulating small noncoding RNA (sncRNA) 5' transfer RNA (tRNA) half
gcgagaattctaccactg

SEQ ID NO: 193 - DNA, 23 bp, Artificial Sequence
  synthetic circulating small noncoding RNA (sncRNA) 5' transfer RNA (tRNA) half
gtgtagtggttatcacgttcgcc

SEQ ID NO: 194 - DNA, 27 bp, Artificial Sequence
  synthetic circulating small noncoding RNA (sncRNA) 5' transfer RNA (tRNA) half
ggggatgtagctcagtggtagagcgca

SEQ ID NO: 195 - DNA, 27 bp, Artificial Sequence
  synthetic circulating small noncoding RNA (sncRNA) 5' transfer RNA (tRNA) half
ggcggtgagagcgccgaatcctaacca

SEQ ID NO: 196 - DNA, 32 bp, Artificial Sequence
  synthetic circulating small noncoding RNA (sncRNA) 5' transfer RNA (tRNA) half
gcgccaaatcctaaccactagaccaccaggga

SEQ ID NO: 197 - DNA, 31 bp, Artificial Sequence
  synthetic circulating small noncoding RNA (sncRNA) 5' transfer RNA (tRNA) half
gggggtatagctcagtggtagagcatttgac

SEQ ID NO: 198 - DNA, 29 bp, Artificial Sequence
  synthetic circulating small noncoding RNA (sncRNA) 5' transfer RNA (tRNA) half
gcgagaattctaccactgaaccaccaatg

SEQ ID NO: 199 - DNA, 29 bp, Artificial Sequence
  synthetic circulating small noncoding RNA (sncRNA) 5' transfer RNA (tRNA) half
tccctggtggtctagtggttaggattcgg

SEQ ID NO: 200 - DNA, 30 bp, Artificial Sequence
  synthetic circulating small noncoding RNA (sncRNA) 5' transfer RNA (tRNA) half
gcgccgctggtgtagtggtatcatgcaaga

SEQ ID NO: 201 - DNA, 30 bp, Artificial Sequence
  synthetic circulating small noncoding RNA (sncRNA) 5' transfer RNA (tRNA) half
agtcccatgctctaccgactgagctagccg

SEQ ID NO: 202 - DNA, 13 bp, Artificial Sequence
  synthetic circulating small noncoding RNA (sncRNA) 5' transfer RNA (tRNA) half
cggccacctcgtc

SEQ ID NO: 203 - DNA, 31 bp, Artificial Sequence
  synthetic circulating small noncoding RNA (sncRNA) 5' transfer RNA (tRNA) half
aggcgaacgtgataaccactacactacggaa

SEQ ID NO: 204 - DNA, 20 bp, Artificial Sequence
  synthetic circulating small noncoding RNA (sncRNA) 5' transfer RNA (tRNA) half
ggcgagaattctaccactga

SEQ ID NO: 205 - DNA, 32 bp, Artificial Sequence
  synthetic circulating small noncoding RNA (sncRNA) 5' transfer RNA (tRNA) half
ggcgagaattctaccactgaaccaccaatgcc

SEQ ID NO: 206 - DNA, 16 bp, Artificial Sequence
  synthetic circulating small noncoding RNA (sncRNA) 5' transfer RNA (tRNA) half
acgcagagtactaacc

SEQ ID NO: 207 - DNA, 28 bp, Artificial Sequence
  synthetic circulating small noncoding RNA (sncRNA) 5' transfer RNA (tRNA) half
ggctcgttggtctaggggtatgattctc

SEQ ID NO: 208 - DNA, 26 bp, Artificial Sequence
  synthetic circulating small noncoding RNA (sncRNA) 5' transfer RNA (tRNA) half
gtctgatgctctaccgactgagctat

SEQ ID NO: 209 - DNA, 21 bp, Artificial Sequence
  synthetic circulating small noncoding RNA (sncRNA) 5' transfer RNA (tRNA) half
gtcaggatggccgagcggtct

SEQ ID NO: 210 - DNA, 21 bp, Artificial Sequence
  synthetic circulating small noncoding RNA (sncRNA) 5' transfer RNA (tRNA) half
ggtagcgtggccgagcggtct

SEQ ID NO: 211 - DNA, 27 bp, Artificial Sequence
  synthetic circulating small noncoding RNA (sncRNA) 5' transfer RNA (tRNA) half
agaattctaccactgaaccaccaatgc

SEQ ID NO: 212 - DNA, 35 bp, Artificial Sequence
  synthetic circulating small noncoding RNA (sncRNA) 5' transfer RNA (tRNA) half
tcccacatggtctagcggttaggattcctggtttt

SEQ ID NO: 213 - DNA, 32 bp, Artificial Sequence
  synthetic circulating small noncoding RNA (sncRNA) 5' transfer RNA (tRNA) half
aggcaagaattctaccactgaaccaccaatgc

SEQ ID NO: 214 - DNA, 30 bp, Artificial Sequence
  synthetic circulating small noncoding RNA (sncRNA) 5' transfer RNA (tRNA) half
gccaaatcctaaccactagaccaccaggga

SEQ ID NO: 215 - DNA, 26 bp, Artificial Sequence
  synthetic circulating small noncoding RNA (sncRNA) 5' transfer RNA (tRNA) half
gtcaggatggccgagcggtctaaggc

SEQ ID NO: 216 - DNA, 29 bp, Artificial Sequence
  synthetic circulating small noncoding RNA (sncRNA) 5' transfer RNA (tRNA) half
cggctagctcagtcggtagagcatgagac

SEQ ID NO: 217 - DNA, 32 bp, Artificial Sequence
  synthetic circulating small noncoding RNA (sncRNA) 5' transfer RNA (tRNA) half
gtttctgtagtgtagtggttatcacgttcgcc

SEQ ID NO: 218 - DNA, 30 bp, Artificial Sequence
  synthetic circulating small noncoding RNA (sncRNA) 5' transfer RNA (tRNA) half
ggttccatagtgtagcggttatcacgtctg

SEQ ID NO: 219 - DNA, 15 bp, Artificial Sequence
  synthetic circulating small noncoding RNA (sncRNA) 5' transfer RNA (tRNA) half
gttatcacgtctgct

SEQ ID NO: 220 - DNA, 34 bp, Artificial Sequence
  synthetic circulating small noncoding RNA (sncRNA) 5' transfer RNA (tRNA) half
caggcggggatactaaccactatactaacgagga

SEQ ID NO: 221 - DNA, 16 bp, Artificial Sequence
  synthetic circulating small noncoding RNA (sncRNA) 5' transfer RNA (tRNA) half
gctcggccatcctgac

SEQ ID NO: 222 - DNA, 31 bp, Artificial Sequence
  synthetic circulating small noncoding RNA (sncRNA) 5' transfer RNA (tRNA) half
tccagagtgctaaccattacaccatggaacc

SEQ ID NO: 223 - DNA, 18 bp, Artificial Sequence
  synthetic circulating small noncoding RNA (sncRNA) 5' transfer RNA (tRNA) half
gcatgggtggttcagtgg

SEQ ID NO: 224 - DNA, 21 bp, Artificial Sequence
  synthetic circulating small noncoding RNA (sncRNA) 5' transfer RNA (tRNA) half
aggcgagaattctaccactga

SEQ ID NO: 225 - DNA, 32 bp, Artificial Sequence
  synthetic circulating small noncoding RNA (sncRNA) 5' transfer RNA (tRNA) half
gtccaatgcgctatccattgcgccacggagcc

SEQ ID NO: 226 - DNA, 31 bp, Artificial Sequence
  synthetic circulating small noncoding RNA (sncRNA) 5' transfer RNA (tRNA) half
tcccatatggtctagcggttaggattcctgg

SEQ ID NO: 227 - DNA, 14 bp, Artificial Sequence
  synthetic circulating small noncoding RNA (sncRNA) 5' transfer RNA (tRNA) half
gccgaatcctaacc

SEQ ID NO: 228 - DNA, 31 bp, Artificial Sequence
  synthetic circulating small noncoding RNA (sncRNA) 5' transfer RNA (tRNA) half
ccggctagctcagtcggtagagcatgagact

SEQ ID NO: 229 - DNA, 32 bp, Artificial Sequence
  synthetic circulating small noncoding RNA (sncRNA) 5' transfer RNA (tRNA) half
gtctgatgctctaccgactgagctatccaggc

SEQ ID NO: 230 - DNA, 25 bp, Artificial Sequence
  synthetic circulating small noncoding RNA (sncRNA) 5' transfer RNA (tRNA) half
gtctgatgctctaccgactgagcta

SEQ ID NO: 231 - DNA, 28 bp, Artificial Sequence
  synthetic circulating small noncoding RNA (sncRNA) 5' transfer RNA (tRNA) half
atgcgctctaccactgagctacatcccc

SEQ ID NO: 232 - DNA, 16 bp, Artificial Sequence
  synthetic circulating small noncoding RNA (sncRNA) 5' transfer RNA (tRNA) half
gcagagtactaaccac

SEQ ID NO: 233 - DNA, 21 bp, Artificial Sequence
  synthetic circulating small noncoding RNA (sncRNA) 5' transfer RNA (tRNA) half
agtctcatgctctaccgactg

SEQ ID NO: 234 - DNA, 32 bp, Artificial Sequence
  synthetic circulating small noncoding RNA (sncRNA) 5' transfer RNA (tRNA) half
tctggcgccttagaccactcggccatcctgac

SEQ ID NO: 235 - DNA, 32 bp, Artificial Sequence
  synthetic circulating small noncoding RNA (sncRNA) 5' transfer RNA (tRNA) half
ggttccatggtgtaatggttagcactctggac

SEQ ID NO: 236 - DNA, 23 bp, Artificial Sequence
  synthetic circulating small noncoding RNA (sncRNA) 5' transfer RNA (tRNA) half
gtttccgtagtgtagtggttatc

SEQ ID NO: 237 - DNA, 30 bp, Artificial Sequence
  synthetic circulating small noncoding RNA (sncRNA) 5' transfer RNA (tRNA) half
gtctcatgctctaccgactgagctagccgg

SEQ ID NO: 238 - DNA, 19 bp, Artificial Sequence
  synthetic circulating small noncoding RNA (sncRNA) 5' transfer RNA (tRNA) half
cagtggtagaattctcgcc

SEQ ID NO: 239 - DNA, 30 bp, Artificial Sequence
  synthetic circulating small noncoding RNA (sncRNA) 5' transfer RNA (tRNA) half
ggcgaacgtgataaccactacactacggaa

SEQ ID NO: 240 - DNA, 29 bp, Artificial Sequence
  synthetic circulating small noncoding RNA (sncRNA) 5' transfer RNA (tRNA) half
ggcgaacgtgataaccactacactacgga

SEQ ID NO: 241 - DNA, 31 bp, Artificial Sequence
  synthetic circulating small noncoding RNA (sncRNA) 5' transfer RNA (tRNA) half
ttccgtagtgtagtggttatcacgttcgcct

SEQ ID NO: 242 - DNA, 17 bp, Artificial Sequence
  synthetic circulating small noncoding RNA (sncRNA) 5' transfer RNA (tRNA) half
cgcagagtactaaccac

SEQ ID NO: 243 - DNA, 30 bp, Artificial Sequence
  synthetic circulating small noncoding RNA (sncRNA) 5' transfer RNA (tRNA) half
gcattggtagttcaatggtagaattctcgc

SEQ ID NO: 244 - DNA, 33 bp, Artificial Sequence
  synthetic circulating small noncoding RNA (sncRNA) 5' transfer RNA (tRNA) half
gggcccagcacgcttccgctgcgccactctgct

SEQ ID NO: 245 - DNA, 29 bp, Artificial Sequence
  synthetic circulating small noncoding RNA (sncRNA) 5' transfer RNA (tRNA) half
gccgaatcctaaccactagaccaccaggg

SEQ ID NO: 246 - DNA, 32 bp, Artificial Sequence
  synthetic circulating small noncoding RNA (sncRNA) 5' transfer RNA (tRNA) half
ggcccagcacgcttccgctgcgccactctgct

SEQ ID NO: 247 - DNA, 36 bp, Artificial Sequence
  synthetic circulating small noncoding RNA (sncRNA) 5' transfer RNA (tRNA) half
gggccgcggcggtgagagcgccgaatcctaaccact

SEQ ID NO: 248 - DNA, 12 bp, Artificial Sequence
  synthetic circulating small noncoding RNA (sncRNA) 5' transfer RNA (tRNA) half
ggccgggaatcg

SEQ ID NO: 249 - DNA, 13 bp, Artificial Sequence
  synthetic circulating small noncoding RNA (sncRNA) 5' transfer RNA (tRNA) half
ggccgggaatcga

SEQ ID NO: 250 - DNA, 15 bp, Artificial Sequence
  synthetic circulating small noncoding RNA (sncRNA) 5' transfer RNA (tRNA) half
ggccgggaatcgaac

SEQ ID NO: 251 - DNA, 32 bp, Artificial Sequence
  synthetic circulating small noncoding RNA (sncRNA) 5' transfer RNA (tRNA) half
gtttctgtagtgtagtggttatcacgctcgcc

SEQ ID NO: 252 - DNA, 33 bp, Artificial Sequence
  synthetic circulating small noncoding RNA (sncRNA) 5' transfer RNA (tRNA) half
caggcgagaattctaccactgaaccaccaatgc

SEQ ID NO: 253 - DNA, 19 bp, Artificial Sequence
  synthetic circulating small noncoding RNA (sncRNA) 5' transfer RNA (tRNA) half
tagtggttagtactctgcg

SEQ ID NO: 254 - DNA, 20 bp, Artificial Sequence
  synthetic circulating small noncoding RNA (sncRNA) 5' transfer RNA (tRNA) half
cagtcggtagagcatgagac

SEQ ID NO: 255 - DNA, 33 bp, Artificial Sequence
  synthetic circulating small noncoding RNA (sncRNA) 5' transfer RNA (tRNA) half
gcgccgctggtgtagtggtatcatgcaagattc

SEQ ID NO: 256 - DNA, 34 bp, Artificial Sequence
  synthetic circulating small noncoding RNA (sncRNA) 5' transfer RNA (tRNA) half
gcccggatgatcctcagtggtctggggtgcaggc

SEQ ID NO: 257 - DNA, 18 bp, Artificial Sequence
  synthetic circulating small noncoding RNA (sncRNA) 5' transfer RNA (tRNA) half
gcagagtactaaccacta

SEQ ID NO: 258 - DNA, 30 bp, Artificial Sequence
  synthetic circulating small noncoding RNA (sncRNA) 5' transfer RNA (tRNA) half
gcattggtggttcaatggtagaattctcgc

SEQ ID NO: 259 - DNA, 29 bp, Artificial Sequence
  synthetic circulating small noncoding RNA (sncRNA) 5' transfer RNA (tRNA) half
ggcgagaattctaccactgaaccaccaat

SEQ ID NO: 260 - DNA, 27 bp, Artificial Sequence
  synthetic circulating small noncoding RNA (sncRNA) 5' transfer RNA (tRNA) half
gcgccgctggtgtagtggtatcatgca

SEQ ID NO: 261 - DNA, 17 bp, Artificial Sequence
  synthetic circulating small noncoding RNA (sncRNA) 5' transfer RNA (tRNA) half
acgcagagtactaacca

SEQ ID NO: 262 - DNA, 33 bp, Artificial Sequence
  synthetic circulating small noncoding RNA (sncRNA) 5' transfer RNA (tRNA) half
aacgcagagtactaaccactatacgatcacggc

SEQ ID NO: 263 - DNA, 20 bp, Artificial Sequence
  synthetic circulating small noncoding RNA (sncRNA) 5' transfer RNA (tRNA) half
cagtggtagaattctcgcct

SEQ ID NO: 264 - DNA, 29 bp, Artificial Sequence
  synthetic circulating small noncoding RNA (sncRNA) 5' transfer RNA (tRNA) half
tccgtagtgtagtggttatcacgttcgcc

SEQ ID NO: 265 - DNA, 30 bp, Artificial Sequence
  synthetic circulating small noncoding RNA (sncRNA) 5' transfer RNA (tRNA) half
ttccgtagtgtagtggttatcacgttcgcc

SEQ ID NO: 266 - DNA, 29 bp, Artificial Sequence
  synthetic circulating small noncoding RNA (sncRNA) 5' transfer RNA (tRNA) half
gaacgtgataaccactacactacggaaac

SEQ ID NO: 267 - DNA, 26 bp, Artificial Sequence
  synthetic circulating small noncoding RNA (sncRNA) 5' transfer RNA (tRNA) half
gcattggtggttcagtggtagaattc

SEQ ID NO: 268 - DNA, 33 bp, Artificial Sequence
  synthetic circulating small noncoding RNA (sncRNA) 5' transfer RNA (tRNA) half
gccgtgactcggattcgaaccgaggttgctgcg

SEQ ID NO: 269 - DNA, 32 bp, Artificial Sequence
  synthetic circulating small noncoding RNA (sncRNA) 5' transfer RNA (tRNA) half
agcgaccacgaagggactcgaacccccaatct

SEQ ID NO: 270 - DNA, 17 bp, Artificial Sequence
  synthetic circulating small noncoding RNA (sncRNA) 5' transfer RNA (tRNA) half
accgggcggaaacagca

SEQ ID NO: 271 - DNA, 30 bp, Artificial Sequence
  synthetic circulating small noncoding RNA (sncRNA) 5' transfer RNA (tRNA) half
ggctcgttggtctaggggtatgattctcgc

SEQ ID NO: 272 - DNA, 34 bp, Artificial Sequence
  synthetic circulating small noncoding RNA (sncRNA) 5' transfer RNA (tRNA) half
gactccgccgggactcgaacccggaacctttgaa

SEQ ID NO: 273 - DNA, 17 bp, Artificial Sequence
  synthetic circulating small noncoding RNA (sncRNA) 5' transfer RNA (tRNA) half
gcccggatgatcctcag

SEQ ID NO: 274 - DNA, 21 bp, Artificial Sequence
  synthetic circulating small noncoding RNA (sncRNA) 5' transfer RNA (tRNA) half
aactcggatcgctggattcag

SEQ ID NO: 275 - DNA, 33 bp, Artificial Sequence
  synthetic circulating small noncoding RNA (sncRNA) 5' transfer RNA (tRNA) half
ggttccatggtgtaatggttagcactctggact

SEQ ID NO: 276 - DNA, 30 bp, Artificial Sequence
  synthetic circulating small noncoding RNA (sncRNA) 5' transfer RNA (tRNA) half
cgccgaatcctaaccactagaccaccaggg

SEQ ID NO: 277 - DNA, 40 bp, Artificial Sequence
  synthetic circulating small noncoding RNA (sncRNA) 5' transfer RNA (tRNA) half
gggattaagagtcccatgctctaccgactgagctagccgg

SEQ ID NO: 278 - DNA, 34 bp, Artificial Sequence
  synthetic circulating small noncoding RNA (sncRNA) 5' transfer RNA (tRNA) half
tccctggtggtctagtggttaggattcggcgctc

SEQ ID NO: 279 - DNA, 28 bp, Artificial Sequence
  synthetic circulating small noncoding RNA (sncRNA) 5' transfer RNA (tRNA) half
cgaatcctaaccactagaccaccaggga

SEQ ID NO: 280 - DNA, 15 bp, Artificial Sequence
  synthetic circulating small noncoding RNA (sncRNA) 5' transfer RNA (tRNA) half
cgcagagtactaacc

SEQ ID NO: 281 - DNA, 16 bp, Artificial Sequence
  synthetic circulating small noncoding RNA (sncRNA) 5' transfer RNA (tRNA) half
actcggccacgactac

SEQ ID NO: 282 - DNA, 28 bp, Artificial Sequence
  synthetic circulating small noncoding RNA (sncRNA) 5' transfer RNA (tRNA) half
gcagagtactaaccactatacgatcacg

SEQ ID NO: 283 - DNA, 30 bp, Artificial Sequence
  synthetic circulating small noncoding RNA (sncRNA) 5' transfer RNA (tRNA) half
cggctagctcagtcggtagagcatgagact

SEQ ID NO: 284 - DNA, 23 bp, Artificial Sequence
  synthetic circulating small noncoding RNA (sncRNA) 5' transfer RNA (tRNA) half
aggcgagaattctaccactgaac

SEQ ID NO: 285 - DNA, 31 bp, Artificial Sequence
  synthetic circulating small noncoding RNA (sncRNA) 5' transfer RNA (tRNA) half
ggggatgtagctcagtggtagagcgcgcgct

SEQ ID NO: 286 - DNA, 21 bp, Artificial Sequence
  synthetic circulating small noncoding RNA (sncRNA) 5' transfer RNA (tRNA) half
agaccgctcggccacactacc

SEQ ID NO: 287 - DNA, 29 bp, Artificial Sequence
  synthetic circulating small noncoding RNA (sncRNA) 5' transfer RNA (tRNA) half
gccgtgatcgtatagtggttagtactctg

SEQ ID NO: 288 - DNA, 30 bp, Artificial Sequence
  synthetic circulating small noncoding RNA (sncRNA) 5' transfer RNA (tRNA) half
ggggatgtagctcagtggtagagcgcgcgc

SEQ ID NO: 289 - DNA, 21 bp, Artificial Sequence
  synthetic circulating small noncoding RNA (sncRNA) 5' transfer RNA (tRNA) half
gtctcatgctctaccgactga

SEQ ID NO: 290 - DNA, 34 bp, Artificial Sequence
  synthetic circulating small noncoding RNA (sncRNA) 5' transfer RNA (tRNA) half
ggttccatggtgtaatggttagcactctggactc

SEQ ID NO: 291 - DNA, 33 bp, Artificial Sequence
  synthetic circulating small noncoding RNA (sncRNA) 5' transfer RNA (tRNA) half
gactccgccgggactcgaacccggaacctttga

SEQ ID NO: 292 - DNA, 30 bp, Artificial Sequence
  synthetic circulating small noncoding RNA (sncRNA) 5' transfer RNA (tRNA) half
aggcgagaattctaccactgaaccaccaat

SEQ ID NO: 293 - DNA, 20 bp, Artificial Sequence
  synthetic circulating small noncoding RNA (sncRNA) 5' transfer RNA (tRNA) half
gcggttatcacgtctgcttt

SEQ ID NO: 294 - DNA, 28 bp, Artificial Sequence
  synthetic circulating small noncoding RNA (sncRNA) 5' transfer RNA (tRNA) half
attggtggttcagtggtagaattctcgc

SEQ ID NO: 295 - DNA, 29 bp, Artificial Sequence
  synthetic circulating small noncoding RNA (sncRNA) 5' transfer RNA (tRNA) half
gcgccgctggtgtagtggtatcatgcaag

SEQ ID NO: 296 - DNA, 29 bp, Artificial Sequence
  synthetic circulating small noncoding RNA (sncRNA) 5' transfer RNA (tRNA) half
ggggatgtagctcagtggtagagcgcgcg

SEQ ID NO: 297 - DNA, 35 bp, Artificial Sequence
  synthetic circulating small noncoding RNA (sncRNA) 5' transfer RNA (tRNA) half
gcgccgctggtgtagtggtatcatgcaagattccc

SEQ ID NO: 298 - DNA, 29 bp, Artificial Sequence
  synthetic circulating small noncoding RNA (sncRNA) 5' transfer RNA (tRNA) half
gtttccgtagtgtagtggttatcacgttc

SEQ ID NO: 299 - DNA, 31 bp, Artificial Sequence
  synthetic circulating small noncoding RNA (sncRNA) 5' transfer RNA (tRNA) half
gcgccgaatcctaaccactagaccaccaggg

SEQ ID NO: 300 - DNA, 31 bp, Artificial Sequence
  synthetic circulating small noncoding RNA (sncRNA) 5' transfer RNA (tRNA) half
ggctcgttggtctaggggtatgattctcggt

SEQ ID NO: 301 - DNA, 33 bp, Artificial Sequence
  synthetic circulating small noncoding RNA (sncRNA) 5' transfer RNA (tRNA) half
agcgccaaatcctaaccactagaccaccaggga

SEQ ID NO: 302 - DNA, 21 bp, Artificial Sequence
  synthetic circulating small noncoding RNA (sncRNA) 5' transfer RNA (tRNA) half
aacgcagagtactaaccacta

SEQ ID NO: 303 - DNA, 18 bp, Artificial Sequence
  synthetic circulating small noncoding RNA (sncRNA) 5' transfer RNA (tRNA) half
cagtggtagaattctcgc

SEQ ID NO: 304 - DNA, 26 bp, Artificial Sequence
  synthetic circulating small noncoding RNA (sncRNA) 5' transfer RNA (tRNA) half
aatcctaaccactagaccaccaggga

SEQ ID NO: 305 - DNA, 34 bp, Artificial Sequence
  synthetic circulating small noncoding RNA (sncRNA) 5' transfer RNA (tRNA) half
gccgtgatcgtatagtggttagtactctgcgttg

SEQ ID NO: 306 - DNA, 35 bp, Artificial Sequence
  synthetic circulating small noncoding RNA (sncRNA) 5' transfer RNA (tRNA) half
agagcgccgaatcctaaccactagaccaccaggga

SEQ ID NO: 307 - DNA, 37 bp, Artificial Sequence
  synthetic circulating small noncoding RNA (sncRNA) 5' transfer RNA (tRNA) half
gggccgcggcggtgagagcgccgaatcctaaccacta

SEQ ID NO: 308 - DNA, 14 bp, Artificial Sequence
  synthetic circulating small noncoding RNA (sncRNA) 5' transfer RNA (tRNA) half
aggcgagaattcta

SEQ ID NO: 309 - DNA, 30 bp, Artificial Sequence
  synthetic circulating small noncoding RNA (sncRNA) 5' transfer RNA (tRNA) half
gtctgatgctctaccgactgagctatccgg

SEQ ID NO: 310 - DNA, 30 bp, Artificial Sequence
  synthetic circulating small noncoding RNA (sncRNA) 5' transfer RNA (tRNA) half
gtcccatgctctaccgactgagctagccgg

SEQ ID NO: 311 - DNA, 20 bp, Artificial Sequence
  synthetic circulating small noncoding RNA (sncRNA) 5' transfer RNA (tRNA) half
cagtcggtagagcatcagac

SEQ ID NO: 312 - DNA, 15 bp, Artificial Sequence
  synthetic circulating small noncoding RNA (sncRNA) 5' transfer RNA (tRNA) half
cgccgaatcctaacc

SEQ ID NO: 313 - DNA, 20 bp, Artificial Sequence
  synthetic circulating small noncoding RNA (sncRNA) 5' transfer RNA (tRNA) half
aactcggatcgctggattca

SEQ ID NO: 314 - DNA, 19 bp, Artificial Sequence
  synthetic circulating small noncoding RNA (sncRNA) 5' transfer RNA (tRNA) half
gcgagaattctaccactga

SEQ ID NO: 315 - DNA, 22 bp, Artificial Sequence
  synthetic circulating small noncoding RNA (sncRNA) 5' transfer RNA (tRNA) half
ggcgagaattctaccactgaac

SEQ ID NO: 316 - DNA, 22 bp, Artificial Sequence
  synthetic circulating small noncoding RNA (sncRNA) 5' transfer RNA (tRNA) half
agtctcatgctctaccgactga

SEQ ID NO: 317 - DNA, 24 bp, Artificial Sequence
  synthetic circulating small noncoding RNA (sncRNA) 5' transfer RNA (tRNA) half
gtctcatgctctaccgactgagct

SEQ ID NO: 318 - DNA, 33 bp, Artificial Sequence
  synthetic circulating small noncoding RNA (sncRNA) 5' transfer RNA (tRNA) half
agcagagtggcgcagcggaagcgtgctgggccc

SEQ ID NO: 319 - DNA, 18 bp, Artificial Sequence
  synthetic circulating small noncoding RNA (sncRNA) 5' transfer RNA (tRNA) half
ccgctcggccatcctgac

SEQ ID NO: 320 - DNA, 35 bp, Artificial Sequence
  synthetic circulating small noncoding RNA (sncRNA) 5' transfer RNA (tRNA) half
tcccatatggtctagcggttaggattcctggtttt

SEQ ID NO: 321 - DNA, 20 bp, Artificial Sequence
  synthetic circulating small noncoding RNA (sncRNA) 5' transfer RNA (tRNA) half
tcagtggtagaattctcgcc

SEQ ID NO: 322 - DNA, 32 bp, Artificial Sequence
  synthetic circulating small noncoding RNA (sncRNA) 5' transfer RNA (tRNA) half
agcagagtggcgcagcggaagcgtgctgggcc

SEQ ID NO: 323 - DNA, 26 bp, Artificial Sequence
  synthetic circulating small noncoding RNA (sncRNA) 5' transfer RNA (tRNA) half
tgctctaccgactgagctagccgggc

SEQ ID NO: 324 - DNA, 27 bp, Artificial Sequence
  synthetic circulating small noncoding RNA (sncRNA) 5' transfer RNA (tRNA) half
gtctcatgctctaccgactgagctagc

SEQ ID NO: 325 - DNA, 35 bp, Artificial Sequence
  synthetic circulating small noncoding RNA (sncRNA) 5' transfer RNA (tRNA) half
acaggcggggatactaaccactatactaacgagga

SEQ ID NO: 326 - DNA, 22 bp, Artificial Sequence
  synthetic circulating small noncoding RNA (sncRNA) 5' transfer RNA (tRNA) half
agtcccatgctctaccgactga

SEQ ID NO: 327 - DNA, 32 bp, Artificial Sequence
  synthetic circulating small noncoding RNA (sncRNA) 5' transfer RNA (tRNA) half
gggggtatagctcaggggtagagcatttgact

SEQ ID NO: 328 - DNA, 32 bp, Artificial Sequence
  synthetic circulating small noncoding RNA (sncRNA) 5' transfer RNA (tRNA) half
ggctcgttggtctaggggtatgattctcggtt

SEQ ID NO: 329 - DNA, 15 bp, Artificial Sequence
  synthetic circulating small noncoding RNA (sncRNA) 5' transfer RNA (tRNA) half
gcgccgaatcctaac

SEQ ID NO: 330 - DNA, 31 bp, Artificial Sequence
  synthetic circulating small noncoding RNA (sncRNA) 5' transfer RNA (tRNA) half
gtctgatgctctaccgactgagctatccggg

SEQ ID NO: 331 - DNA, 16 bp, Artificial Sequence
  synthetic circulating small noncoding RNA (sncRNA) 5' transfer RNA (tRNA) half
gtcaggatggccgagc

SEQ ID NO: 332 - DNA, 16 bp, Artificial Sequence
  synthetic circulating small noncoding RNA (sncRNA) 5' transfer RNA (tRNA) half
aggcgagaattctacc

SEQ ID NO: 333 - DNA, 21 bp, Artificial Sequence
  synthetic circulating small noncoding RNA (sncRNA) 5' transfer RNA (tRNA) half
tcagtcggtagagcatcagac

SEQ ID NO: 334 - DNA, 33 bp, Artificial Sequence
  synthetic circulating small noncoding RNA (sncRNA) 5' transfer RNA (tRNA) half
aggcgagaattctaccactgaaccaccaatgcc

SEQ ID NO: 335 - DNA, 21 bp, Artificial Sequence
  synthetic circulating small noncoding RNA (sncRNA) 5' transfer RNA (tRNA) half
gacgacgaggatgggattcga

SEQ ID NO: 336 - DNA, 15 bp, Artificial Sequence
  synthetic circulating small noncoding RNA (sncRNA) 5' transfer RNA (tRNA) half
ggcgagaattctacc

SEQ ID NO: 337 - DNA, 17 bp, Artificial Sequence
  synthetic circulating small noncoding RNA (sncRNA) 5' transfer RNA (tRNA) half
gttatcacgtctgcttt

SEQ ID NO: 338 - DNA, 26 bp, Artificial Sequence
  synthetic circulating small noncoding RNA (sncRNA) 5' transfer RNA (tRNA) half
gcatgggtggttcagtggtagaattc

SEQ ID NO: 339 - DNA, 34 bp, Artificial Sequence
  synthetic circulating small noncoding RNA (sncRNA) 5' transfer RNA (tRNA) half
gcaggcgagaattctaccactgaaccaccaatgc

SEQ ID NO: 340 - DNA, 16 bp, Artificial Sequence
  synthetic circulating small noncoding RNA (sncRNA) 5' transfer RNA (tRNA) half
cgcagagtactaacca

SEQ ID NO: 341 - DNA, 29 bp, Artificial Sequence
  synthetic circulating small noncoding RNA (sncRNA) 5' transfer RNA (tRNA) half
cgcagagtactaaccactatacgatcacg

SEQ ID NO: 342 - DNA, 21 bp, Artificial Sequence
  synthetic circulating small noncoding RNA (sncRNA) 5' transfer RNA (tRNA) half
tcagtggtagaattctcgcct

SEQ ID NO: 343 - DNA, 21 bp, Artificial Sequence
  synthetic circulating small noncoding RNA (sncRNA) 5' transfer RNA (tRNA) half
cagtcggtagagcatgagact

SEQ ID NO: 344 - DNA, 15 bp, Artificial Sequence
  synthetic circulating small noncoding RNA (sncRNA) 5' transfer RNA (tRNA) half
cgactccgccgggac

SEQ ID NO: 345 - DNA, 33 bp, Artificial Sequence
  synthetic circulating small noncoding RNA (sncRNA) 5' transfer RNA (tRNA) half
gaagcgagaatcatacccctagaccaacgagcc

SEQ ID NO: 346 - DNA, 15 bp, Artificial Sequence
  synthetic circulating small noncoding RNA (sncRNA) 5' transfer RNA (tRNA) half
gtgtttccgcccggt

SEQ ID NO: 347 - DNA, 16 bp, Artificial Sequence
  synthetic circulating small noncoding RNA (sncRNA) 5' transfer RNA (tRNA) half
ggttatcacgtctgct

SEQ ID NO: 348 - DNA, 21 bp, Artificial Sequence
  synthetic circulating small noncoding RNA (sncRNA) 5' transfer RNA (tRNA) half
agtctgatgctctaccgactg

SEQ ID NO: 349 - DNA, 18 bp, Artificial Sequence
  synthetic circulating small noncoding RNA (sncRNA) 5' transfer RNA (tRNA) half
gtcggtagagcatcagac

SEQ ID NO: 350 - DNA, 28 bp, Artificial Sequence
  synthetic circulating small noncoding RNA (sncRNA) 5' transfer RNA (tRNA) half
ggggatgtagctcagtggtagagcgcat

SEQ ID NO: 351 - DNA, 30 bp, Artificial Sequence
  synthetic circulating small noncoding RNA (sncRNA) 5' transfer RNA (tRNA) half
ctgatgctctaccgactgagctatccgggc

SEQ ID NO: 352 - DNA, 14 bp, Artificial Sequence
  synthetic circulating small noncoding RNA (sncRNA) 5' transfer RNA (tRNA) half
tcggccacgactac

SEQ ID NO: 353 - DNA, 16 bp, Artificial Sequence
  synthetic circulating small noncoding RNA (sncRNA) 5' transfer RNA (tRNA) half
ggttaggattcggcgc

SEQ ID NO: 354 - DNA, 31 bp, Artificial Sequence
  synthetic circulating small noncoding RNA (sncRNA) 5' transfer RNA (tRNA) half
ggttccatggtgtaatggttagcactctgga

SEQ ID NO: 355 - DNA, 32 bp, Artificial Sequence
  synthetic circulating small noncoding RNA (sncRNA) 5' transfer RNA (tRNA) half
ccctgaccgggaatcgaacccgggccgcggcg

SEQ ID NO: 356 - DNA, 29 bp, Artificial Sequence
  synthetic circulating small noncoding RNA (sncRNA) 5' transfer RNA (tRNA) half
gtcccatgctctaccgactgagctagccg

SEQ ID NO: 357 - DNA, 16 bp, Artificial Sequence
  synthetic circulating small noncoding RNA (sncRNA) 5' transfer RNA (tRNA) half
gcgagaattctaccac

SEQ ID NO: 358 - DNA, 18 bp, Artificial Sequence
  synthetic circulating small noncoding RNA (sncRNA) 5' transfer RNA (tRNA) half
ggcgagaattctaccact

SEQ ID NO: 359 - DNA, 32 bp, Artificial Sequence
  synthetic circulating small noncoding RNA (sncRNA) 5' transfer RNA (tRNA) half
ggcattggtggttcagtggtagaattctcgcc

SEQ ID NO: 360 - DNA, 21 bp, Artificial Sequence
  synthetic circulating small noncoding RNA (sncRNA) 5' transfer RNA (tRNA) half
ataacgtgtttccgcccggtt

SEQ ID NO: 361 - DNA, 13 bp, Artificial Sequence
  synthetic circulating small noncoding RNA (sncRNA) 5' transfer RNA (tRNA) half
ggcgagaattcta

SEQ ID NO: 362 - DNA, 29 bp, Artificial Sequence
  synthetic circulating small noncoding RNA (sncRNA) 5' transfer RNA (tRNA) half
cattggtggttcagtggtagaattctcgc

SEQ ID NO: 363 - DNA, 29 bp, Artificial Sequence
  synthetic circulating small noncoding RNA (sncRNA) 5' transfer RNA (tRNA) half
agtcccatgctctaccgactgagctagcc

SEQ ID NO: 364 - DNA, 19 bp, Artificial Sequence
  synthetic circulating small noncoding RNA (sncRNA) 5' transfer RNA (tRNA) half
cgccgaatcctaaccacta

SEQ ID NO: 365 - DNA, 34 bp, Artificial Sequence
  synthetic circulating small noncoding RNA (sncRNA) 5' transfer RNA (tRNA) half
aacgcagcgccttagaccgctcggccatcctgac

SEQ ID NO: 366 - DNA, 30 bp, Artificial Sequence
  synthetic circulating small noncoding RNA (sncRNA) 5' transfer RNA (tRNA) half
ccggctagctcagtcggtagagcatgagac

SEQ ID NO: 367 - DNA, 30 bp, Artificial Sequence
  synthetic circulating small noncoding RNA (sncRNA) 5' transfer RNA (tRNA) half
ccgtgatcgtatagtggttagtactctgcg

SEQ ID NO: 368 - DNA, 32 bp, Artificial Sequence
  synthetic circulating small noncoding RNA (sncRNA) 5' transfer RNA (tRNA) half
gtcaggatggccgagtggtctaaggcgccaga

SEQ ID NO: 369 - DNA, 35 bp, Artificial Sequence
  synthetic circulating small noncoding RNA (sncRNA) 5' transfer RNA (tRNA) half
aggcaccgctgggattcgaacccaggatctcctgt

SEQ ID NO: 370 - DNA, 21 bp, Artificial Sequence
  synthetic circulating small noncoding RNA (sncRNA) 5' transfer RNA (tRNA) half
agtcccatgctctaccgactg

SEQ ID NO: 371 - DNA, 34 bp, Artificial Sequence
  synthetic circulating small noncoding RNA (sncRNA) 5' transfer RNA (tRNA) half
gggccgcggcggtgagagcgccgaatcctaacca

SEQ ID NO: 372 - DNA, 14 bp, Artificial Sequence
  synthetic circulating small noncoding RNA (sncRNA) 5' transfer RNA (tRNA) half
ggcgagaattctac

SEQ ID NO: 373 - DNA, 37 bp, Artificial Sequence
  synthetic circulating small noncoding RNA (sncRNA) 5' transfer RNA (tRNA) half
gcccggatgatcctcagtggtctggggtgcaggcttc

SEQ ID NO: 374 - DNA, 22 bp, Artificial Sequence
  synthetic circulating small noncoding RNA (sncRNA) 5' transfer RNA (tRNA) half
agtctgatgctctaccgactga

SEQ ID NO: 375 - DNA, 20 bp, Artificial Sequence
  synthetic circulating small noncoding RNA (sncRNA) 5' transfer RNA (tRNA) half
actcggatcgctggattcag

SEQ ID NO: 376 - DNA, 18 bp, Artificial Sequence
  synthetic circulating small noncoding RNA (sncRNA) 5' transfer RNA (tRNA) half
gtggttagtactctgcgt

SEQ ID NO: 377 - DNA, 27 bp, Artificial Sequence
  synthetic circulating small noncoding RNA (sncRNA) 5' transfer RNA (tRNA) half
ctcatgctctaccgactgagctagccg

SEQ ID NO: 378 - DNA, 20 bp, Artificial Sequence
  synthetic circulating small noncoding RNA (sncRNA) 5' transfer RNA (tRNA) half
taacgtgtttccgcccggtt

SEQ ID NO: 379 - DNA, 15 bp, Artificial Sequence
  synthetic circulating small noncoding RNA (sncRNA) 5' transfer RNA (tRNA) half
ctcggccatcctgac

SEQ ID NO: 380 - DNA, 19 bp, Artificial Sequence
  synthetic circulating small noncoding RNA (sncRNA) 5' transfer RNA (tRNA) half
gcggttatcacgtctgctt

SEQ ID NO: 381 - DNA, 27 bp, Artificial Sequence
  synthetic circulating small noncoding RNA (sncRNA) 5' transfer RNA (tRNA) half
gcagagtactaaccactatacgatcac

SEQ ID NO: 382 - DNA, 21 bp, Artificial Sequence
  synthetic circulating small noncoding RNA (sncRNA) 5' transfer RNA (tRNA) half
ggcgagaattctaccactgaa

SEQ ID NO: 383 - DNA, 36 bp, Artificial Sequence
  synthetic circulating small noncoding RNA (sncRNA) 5' transfer RNA (tRNA) half
aatgccgtgactcggattcgaaccgaggttgctgcg

SEQ ID NO: 384 - DNA, 33 bp, Artificial Sequence
  synthetic circulating small noncoding RNA (sncRNA) 5' transfer RNA (tRNA) half
ggccccatggtgtaatggttagcactctggact

SEQ ID NO: 385 - DNA, 17 bp, Artificial Sequence
  synthetic circulating small noncoding RNA (sncRNA) 5' transfer RNA (tRNA) half
gcgaacgtgataaccac

SEQ ID NO: 386 - DNA, 16 bp, Artificial Sequence
  synthetic circulating small noncoding RNA (sncRNA) 5' transfer RNA (tRNA) half
ggttagtactctgcgt

SEQ ID NO: 387 - DNA, 33 bp, Artificial Sequence
  synthetic circulating small noncoding RNA (sncRNA) 5' transfer RNA (tRNA) half
agtccaatgcgctatccattgcgccacggagcc

SEQ ID NO: 388 - DNA, 31 bp, Artificial Sequence
  synthetic circulating small noncoding RNA (sncRNA) 5' transfer RNA (tRNA) half
tccagagtgctaaccattacaccatgggacc

SEQ ID NO: 389 - DNA, 21 bp, Artificial Sequence
  synthetic circulating small noncoding RNA (sncRNA) 5' transfer RNA (tRNA) half
ggtagtgtggccgagcggtct

SEQ ID NO: 390 - DNA, 30 bp, Artificial Sequence
  synthetic circulating small noncoding RNA (sncRNA) 5' transfer RNA (tRNA) half
acgcagagtactaaccactatacgatcacg

SEQ ID NO: 391 - DNA, 22 bp, Artificial Sequence
  synthetic circulating small noncoding RNA (sncRNA) 5' transfer RNA (tRNA) half
caacgcagagtactaaccacta

SEQ ID NO: 392 - DNA, 30 bp, Artificial Sequence
  synthetic circulating small noncoding RNA (sncRNA) 5' transfer RNA (tRNA) half
tcaaatgctctaccactgagctataccccc

SEQ ID NO: 393 - DNA, 34 bp, Artificial Sequence
  synthetic circulating small noncoding RNA (sncRNA) 5' transfer RNA (tRNA) half
gaccccgacgtgacttgaacacgcaaccttctga

SEQ ID NO: 394 - DNA, 35 bp, Artificial Sequence
  synthetic circulating small noncoding RNA (sncRNA) 5' transfer RNA (tRNA) half
agagtccagagtgctaaccattacaccatggaacc

SEQ ID NO: 395 - DNA, 18 bp, Artificial Sequence
  synthetic circulating small noncoding RNA (sncRNA) 5' transfer RNA (tRNA) half
aaccgggcggaaacagca

SEQ ID NO: 396 - DNA, 34 bp, Artificial Sequence
  synthetic circulating small noncoding RNA (sncRNA) 5' transfer RNA (tRNA) half
gtttccgtagtgtagtggttatcacgttcgccta

SEQ ID NO: 397 - DNA, 35 bp, Artificial Sequence
  synthetic circulating small noncoding RNA (sncRNA) 5' transfer RNA (tRNA) half
agagtcccatgctctaccgactgagctagccgggc

SEQ ID NO: 398 - DNA, 23 bp, Artificial Sequence
  synthetic circulating small noncoding RNA (sncRNA) 5' transfer RNA (tRNA) half
gcagagtactaaccactatacga

SEQ ID NO: 399 - DNA, 19 bp, Artificial Sequence
  synthetic circulating small noncoding RNA (sncRNA) 5' transfer RNA (tRNA) half
gtctgatgctctaccgact

SEQ ID NO: 400 - DNA, 32 bp, Artificial Sequence
  synthetic circulating small noncoding RNA (sncRNA) 5' transfer RNA (tRNA) half
gcctggatagctcagtcggtagagcatcagac

SEQ ID NO: 401 - DNA, 31 bp, Artificial Sequence
  synthetic circulating small noncoding RNA (sncRNA) 5' transfer RNA (tRNA) half
gcgagaattctaccactgaaccaccaatgcc

SEQ ID NO: 402 - DNA, 13 bp, Artificial Sequence
  synthetic circulating small noncoding RNA (sncRNA) 5' transfer RNA (tRNA) half
cggccacgactac

SEQ ID NO: 403 - DNA, 15 bp, Artificial Sequence
  synthetic circulating small noncoding RNA (sncRNA) 5' transfer RNA (tRNA) half
ctgaaccaccaatgc

SEQ ID NO: 404 - DNA, 22 bp, Artificial Sequence
  synthetic circulating small noncoding RNA (sncRNA) 5' transfer RNA (tRNA) half
agacgacgaggatgggattcga

SEQ ID NO: 405 - DNA, 30 bp, Artificial Sequence
  synthetic circulating small noncoding RNA (sncRNA) 5' transfer RNA (tRNA) half
cgaatgtgataaccactacactacggaaac

SEQ ID NO: 406 - DNA, 32 bp, Artificial Sequence
  synthetic circulating small noncoding RNA (sncRNA) 5' transfer RNA (tRNA) half
gacccagtggcctaatggataaggcatcagcc

SEQ ID NO: 407 - DNA, 31 bp, Artificial Sequence
  synthetic circulating small noncoding RNA (sncRNA) 5' transfer RNA (tRNA) half
cgccgaatcctagccactagaccaccaggga

SEQ ID NO: 408 - DNA, 22 bp, Artificial Sequence
  synthetic circulating small noncoding RNA (sncRNA) 5' transfer RNA (tRNA) half
aggcgagaattctaccactgaa

SEQ ID NO: 409 - DNA, 28 bp, Artificial Sequence
  synthetic circulating small noncoding RNA (sncRNA) 5' transfer RNA (tRNA) half
cccatgctctaccgactgagctagccgg

SEQ ID NO: 410 - DNA, 19 bp, Artificial Sequence
  synthetic circulating small noncoding RNA (sncRNA) 5' transfer RNA (tRNA) half
aggcgagaattctaccact

SEQ ID NO: 411 - DNA, 27 bp, Artificial Sequence
  synthetic circulating small noncoding RNA (sncRNA) 5' transfer RNA (tRNA) half
gcattggtggttcagtggtagaattct

SEQ ID NO: 412 - DNA, 36 bp, Artificial Sequence
  synthetic circulating small noncoding RNA (sncRNA) 5' transfer RNA (tRNA) half
cagaaggtcctgggttcgagccccagtggaaccacg

SEQ ID NO: 413 - DNA, 18 bp, Artificial Sequence
  synthetic circulating small noncoding RNA (sncRNA) 5' transfer RNA (tRNA) half
ccgctcggccacgctacc

SEQ ID NO: 414 - DNA, 35 bp, Artificial Sequence
  synthetic circulating small noncoding RNA (sncRNA) 5' transfer RNA (tRNA) half
tgttcccacaccgggagtcgaacccgggccgcctg

SEQ ID NO: 415 - DNA, 21 bp, Artificial Sequence
  synthetic circulating small noncoding RNA (sncRNA) 5' transfer RNA (tRNA) half
tcagtcggtagagcatgagac

SEQ ID NO: 416 - DNA, 34 bp, Artificial Sequence
  synthetic circulating small noncoding RNA (sncRNA) 5' transfer RNA (tRNA) half
gcccggatagctcagtcggtagagcatcagactt

SEQ ID NO: 417 - DNA, 31 bp, Artificial Sequence
  synthetic circulating small noncoding RNA (sncRNA) 5' transfer RNA (tRNA) half
acgcagagtactaaccactatacgatcacgg

SEQ ID NO: 418 - DNA, 14 bp, Artificial Sequence
  synthetic circulating small noncoding RNA (sncRNA) 5' transfer RNA (tRNA) half
gttcccacaccggg

SEQ ID NO: 419 - DNA, 19 bp, Artificial Sequence
  synthetic circulating small noncoding RNA (sncRNA) 5' transfer RNA (tRNA) half
gcagagtactaaccactat

SEQ ID NO: 420 - DNA, 15 bp, Artificial Sequence
  synthetic circulating small noncoding RNA (sncRNA) 5' transfer RNA (tRNA) half
gcagagtactaacca

SEQ ID NO: 421 - DNA, 35 bp, Artificial Sequence
  synthetic circulating small noncoding RNA (sncRNA) 5' transfer RNA (tRNA) half
gcattggccgggaatcgaacccgggcctcccgcgt

SEQ ID NO: 422 - DNA, 22 bp, Artificial Sequence
  synthetic circulating small noncoding RNA (sncRNA) 5' transfer RNA (tRNA) half
tcgattcccggccaatgcacga

SEQ ID NO: 423 - DNA, 24 bp, Artificial Sequence
  synthetic circulating small noncoding RNA (sncRNA) 5' transfer RNA (tRNA) half
gttcccacaccgggagtcgaaccc

SEQ ID NO: 424 - DNA, 15 bp, Artificial Sequence
  synthetic circulating small noncoding RNA (sncRNA) 5' transfer RNA (tRNA) half
aggcgagaattctac

SEQ ID NO: 425 - DNA, 31 bp, Artificial Sequence
  synthetic circulating small noncoding RNA (sncRNA) 5' transfer RNA (tRNA) half
agcatgcgctctaccactgagctacatcccc

SEQ ID NO: 426 - DNA, 31 bp, Artificial Sequence
  synthetic circulating small noncoding RNA (sncRNA) 5' transfer RNA (tRNA) half
gcgccgctggtgtagtggtatcatgcaagat

SEQ ID NO: 427 - DNA, 13 bp, Artificial Sequence
  synthetic circulating small noncoding RNA (sncRNA) 5' transfer RNA (tRNA) half
gccgggaatcgaa

SEQ ID NO: 428 - DNA, 34 bp, Artificial Sequence
  synthetic circulating small noncoding RNA (sncRNA) 5' transfer RNA (tRNA) half
gactctggtgggactcgaacccacaacctttgaa

SEQ ID NO: 429 - DNA, 31 bp, Artificial Sequence
  synthetic circulating small noncoding RNA (sncRNA) 5' transfer RNA (tRNA) half
gcccggatagctcagtcggtagagcatcaga

SEQ ID NO: 430 - DNA, 27 bp, Artificial Sequence
  synthetic circulating small noncoding RNA (sncRNA) 5' transfer RNA (tRNA) half
aggcgagaattctaccactgaaccacc

SEQ ID NO: 431 - DNA, 21 bp, Artificial Sequence
  synthetic circulating small noncoding RNA (sncRNA) 5' transfer RNA (tRNA) half
gcgagaattctaccactgaac

SEQ ID NO: 432 - DNA, 29 bp, Artificial Sequence
  synthetic circulating small noncoding RNA (sncRNA) 5' transfer RNA (tRNA) half
gggccgcggcggtgagagcgccgaatcct

SEQ ID NO: 433 - DNA, 28 bp, Artificial Sequence
  synthetic circulating small noncoding RNA (sncRNA) 5' transfer RNA (tRNA) half
ctcatgctctaccgactgagctagccgg

SEQ ID NO: 434 - DNA, 20 bp, Artificial Sequence
  synthetic circulating small noncoding RNA (sncRNA) 5' transfer RNA (tRNA) half
aaccgggcggaaacaacttt

SEQ ID NO: 435 - DNA, 27 bp, Artificial Sequence
  synthetic circulating small noncoding RNA (sncRNA) 5' transfer RNA (tRNA) half
tggttaggattcggcgctctcaccgcc

SEQ ID NO: 436 - DNA, 25 bp, Artificial Sequence
  synthetic circulating small noncoding RNA (sncRNA) 5' transfer RNA (tRNA) half
gtctcatgctctaccgactgagcta

SEQ ID NO: 437 - DNA, 17 bp, Artificial Sequence
  synthetic circulating small noncoding RNA (sncRNA) 5' transfer RNA (tRNA) half
gtggttatcacgttcgc

SEQ ID NO: 438 - DNA, 13 bp, Artificial Sequence
  synthetic circulating small noncoding RNA (sncRNA) 5' transfer RNA (tRNA) half
aggcgagaattct

SEQ ID NO: 439 - DNA, 32 bp, Artificial Sequence
  synthetic circulating small noncoding RNA (sncRNA) 5' transfer RNA (tRNA) half
gcgccgaatcctagccactagaccaccaggga

SEQ ID NO: 440 - DNA, 32 bp, Artificial Sequence
  synthetic circulating small noncoding RNA (sncRNA) 5' transfer RNA (tRNA) half
agcgccgaatcctaaccactagaccaccaggg

SEQ ID NO: 441 - DNA, 33 bp, Artificial Sequence
  synthetic circulating small noncoding RNA (sncRNA) 5' transfer RNA (tRNA) half
gtttccgtagtgtagtggttagcgcgttcgcct

SEQ ID NO: 442 - DNA, 26 bp, Artificial Sequence
  synthetic circulating small noncoding RNA (sncRNA) 5' transfer RNA (tRNA) half
atagctcagtcggtagagcatcagac

SEQ ID NO: 443 - DNA, 17 bp, Artificial Sequence
  synthetic circulating small noncoding RNA (sncRNA) 5' transfer RNA (tRNA) half
gcgagaattctaccact

SEQ ID NO: 444 - DNA, 17 bp, Artificial Sequence
  synthetic circulating small noncoding RNA (sncRNA) 5' transfer RNA (tRNA) half
agcgccgaatcctaacc

SEQ ID NO: 445 - DNA, 23 bp, Artificial Sequence
  synthetic circulating small noncoding RNA (sncRNA) 5' transfer RNA (tRNA) half
gcgagaattctaccactgaacca

SEQ ID NO: 446 - DNA, 32 bp, Artificial Sequence
  synthetic circulating small noncoding RNA (sncRNA) 5' transfer RNA (tRNA) half
ggcatgggtggttcagtggtagaattctcgcc

SEQ ID NO: 447 - DNA, 16 bp, Artificial Sequence
  synthetic circulating small noncoding RNA (sncRNA) 5' transfer RNA (tRNA) half
gcccagcacgcttccg

SEQ ID NO: 448 - DNA, 28 bp, Artificial Sequence
  synthetic circulating small noncoding RNA (sncRNA) 5' transfer RNA (tRNA) half
ggggatgtagctcagtggtagagcgcgc

SEQ ID NO: 449 - DNA, 30 bp, Artificial Sequence
  synthetic circulating small noncoding RNA (sncRNA) 5' transfer RNA (tRNA) half
atgggtggttcagtggtagaattctcgcct

SEQ ID NO: 450 - DNA, 18 bp, Artificial Sequence
  synthetic circulating small noncoding RNA (sncRNA) 5' transfer RNA (tRNA) half
gccgaatcctaaccacta

SEQ ID NO: 451 - DNA, 23 bp, Artificial Sequence
  synthetic circulating small noncoding RNA (sncRNA) 5' transfer RNA (tRNA) half
gttcagtggtagaattctcgcct

SEQ ID NO: 452 - DNA, 19 bp, Artificial Sequence
  synthetic circulating small noncoding RNA (sncRNA) 5' transfer RNA (tRNA) half
gacaggcggggatactcac

SEQ ID NO: 453 - DNA, 36 bp, Artificial Sequence
  synthetic circulating small noncoding RNA (sncRNA) 5' transfer RNA (tRNA) half
acgcagaaggtcctgggttcgagccccagtggaacc

SEQ ID NO: 454 - DNA, 19 bp, Artificial Sequence
  synthetic circulating small noncoding RNA (sncRNA) 5' transfer RNA (tRNA) half
accactagaccaccaggga

SEQ ID NO: 455 - DNA, 34 bp, Artificial Sequence
  synthetic circulating small noncoding RNA (sncRNA) 5' transfer RNA (tRNA) half
attcttgcgacccgggttcgattcccgggcggcg

SEQ ID NO: 456 - DNA, 16 bp, Artificial Sequence
  synthetic circulating small noncoding RNA (sncRNA) 5' transfer RNA (tRNA) half
ggccgggaatcgaacc

SEQ ID NO: 457 - DNA, 40 bp, Artificial Sequence
  synthetic circulating small noncoding RNA (sncRNA) 5' transfer RNA (tRNA) half
gagattaagagtctcatgctctaccgactgagctagccgg

SEQ ID NO: 458 - DNA, 14 bp, Artificial Sequence
  synthetic circulating small noncoding RNA (sncRNA) 5' transfer RNA (tRNA) half
gcccagcacgcttc

SEQ ID NO: 459 - DNA, 17 bp, Artificial Sequence
  synthetic circulating small noncoding RNA (sncRNA) 5' transfer RNA (tRNA) half
gcggttatcacgtctgc

SEQ ID NO: 460 - DNA, 30 bp, Artificial Sequence
  synthetic circulating small noncoding RNA (sncRNA) 5' transfer RNA (tRNA) half
gggggtgtagctcagtggtagagcgcgtgc

SEQ ID NO: 461 - DNA, 29 bp, Artificial Sequence
  synthetic circulating small noncoding RNA (sncRNA) 5' transfer RNA (tRNA) half
attggtggttcagtggtagaattctcgcc

SEQ ID NO: 462 - DNA, 26 bp, Artificial Sequence
  synthetic circulating small noncoding RNA (sncRNA) 5' transfer RNA (tRNA) half
ggcgagaattctaccactgaaccacc

SEQ ID NO: 463 - DNA, 22 bp, Artificial Sequence
  synthetic circulating small noncoding RNA (sncRNA) 5' transfer RNA (tRNA) half
tcagtcggtagagcatgagact

SEQ ID NO: 464 - DNA, 33 bp, Artificial Sequence
  synthetic circulating small noncoding RNA (sncRNA) 5' transfer RNA (tRNA) half
aagcgagcgctctaccatttgagctaatccccc

SEQ ID NO: 465 - DNA, 13 bp, Artificial Sequence
  synthetic circulating small noncoding RNA (sncRNA) 5' transfer RNA (tRNA) half
tcgattcccggcc

SEQ ID NO: 466 - DNA, 17 bp, Artificial Sequence
  synthetic circulating small noncoding RNA (sncRNA) 5' transfer RNA (tRNA) half
gtcccatgctctaccga

SEQ ID NO: 467 - DNA, 25 bp, Artificial Sequence
  synthetic circulating small noncoding RNA (sncRNA) 5' transfer RNA (tRNA) half
tagctcagtcggtagagcatcagac

SEQ ID NO: 468 - DNA, 14 bp, Artificial Sequence
  synthetic circulating small noncoding RNA (sncRNA) 5' transfer RNA (tRNA) half
tacactacggaaac

SEQ ID NO: 469 - DNA, 16 bp, Artificial Sequence
  synthetic circulating small noncoding RNA (sncRNA) 5' transfer RNA (tRNA) half
gtagtcgtggccgagt

SEQ ID NO: 470 - DNA, 27 bp, Artificial Sequence
  synthetic circulating small noncoding RNA (sncRNA) 5' transfer RNA (tRNA) half
gcgagaattctaccactgaaccaccaa

SEQ ID NO: 471 - DNA, 15 bp, Artificial Sequence
  synthetic circulating small noncoding RNA (sncRNA) 5' transfer RNA (tRNA) half
gttcgattcccggcc

SEQ ID NO: 472 - DNA, 22 bp, Artificial Sequence
  synthetic circulating small noncoding RNA (sncRNA) 5' transfer RNA (tRNA) half
acgcagagtactaaccactata

SEQ ID NO: 473 - DNA, 15 bp, Artificial Sequence
  synthetic circulating small noncoding RNA (sncRNA) 5' transfer RNA (tRNA) half
gttcccacaccggga

SEQ ID NO: 474 - DNA, 24 bp, Artificial Sequence
  synthetic circulating small noncoding RNA (sncRNA) 5' transfer RNA (tRNA) half
agctcagtcggtagagcatgagac

SEQ ID NO: 475 - DNA, 17 bp, Artificial Sequence
  synthetic circulating small noncoding RNA (sncRNA) 5' transfer RNA (tRNA) half
ggcgagaattctaccac

SEQ ID NO: 476 - DNA, 18 bp, Artificial Sequence
  synthetic circulating small noncoding RNA (sncRNA) 5' transfer RNA (tRNA) half
gtcaggatggccgagcgg

SEQ ID NO: 477 - DNA, 16 bp, Artificial Sequence
  synthetic circulating small noncoding RNA (sncRNA) 5' transfer RNA (tRNA) half
gtgtttccgcccggtt

SEQ ID NO: 478 - DNA, 24 bp, Artificial Sequence
  synthetic circulating small noncoding RNA (sncRNA) 5' transfer RNA (tRNA) half
gcgagaattctaccactgaaccac

SEQ ID NO: 479 - DNA, 33 bp, Artificial Sequence
  synthetic circulating small noncoding RNA (sncRNA) 5' transfer RNA (tRNA) half
gggcctcccgcgtggcaggcgagaattctacca

SEQ ID NO: 480 - DNA, 21 bp, Artificial Sequence
  synthetic circulating small noncoding RNA (sncRNA) 5' transfer RNA (tRNA) half
ccctgaccgggaatcgaaccc

SEQ ID NO: 481 - DNA, 35 bp, Artificial Sequence
  synthetic circulating small noncoding RNA (sncRNA) 5' transfer RNA (tRNA) half
gggccgcggcggtgagagcgccgaatcctaaccac

SEQ ID NO: 482 - DNA, 33 bp, Artificial Sequence
  synthetic circulating small noncoding RNA (sncRNA) 5' transfer RNA (tRNA) half
ggctcgttggtctaggggtatgattctcgcttc

SEQ ID NO: 483 - DNA, 31 bp, Artificial Sequence
  synthetic circulating small noncoding RNA (sncRNA) 5' transfer RNA (tRNA) half
gtctcatgctctaccgactgagctagccggg

SEQ ID NO: 484 - DNA, 26 bp, Artificial Sequence
  synthetic circulating small noncoding RNA (sncRNA) 5' transfer RNA (tRNA) half
agtcccatgctctaccgactgagcta

SEQ ID NO: 485 - DNA, 31 bp, Artificial Sequence
  synthetic circulating small noncoding RNA (sncRNA) 5' transfer RNA (tRNA) half
gcggggatactaaccactatactaacgagga

SEQ ID NO: 486 - DNA, 14 bp, Artificial Sequence
  synthetic circulating small noncoding RNA (sncRNA) 5' transfer RNA (tRNA) half
cgactccgccggga

SEQ ID NO: 487 - DNA, 16 bp, Artificial Sequence
  synthetic circulating small noncoding RNA (sncRNA) 5' transfer RNA (tRNA) half
gtggttagtactctgc

SEQ ID NO: 488 - DNA, 12 bp, Artificial Sequence
  synthetic circulating small noncoding RNA (sncRNA) 5' transfer RNA (tRNA) half
ggccacgactac

SEQ ID NO: 489 - DNA, 27 bp, Artificial Sequence
  synthetic circulating small noncoding RNA (sncRNA) 5' transfer RNA (tRNA) half
cccatgctctaccgactgagctagccg

SEQ ID NO: 490 - DNA, 29 bp, Artificial Sequence
  synthetic circulating small noncoding RNA (sncRNA) 5' transfer RNA (tRNA) half
tctcatgctctaccgactgagctagccgg

SEQ ID NO: 491 - DNA, 14 bp, Artificial Sequence
  synthetic circulating small noncoding RNA (sncRNA) 5' transfer RNA (tRNA) half
gcagagtactaacc

SEQ ID NO: 492 - DNA, 19 bp, Artificial Sequence
  synthetic circulating small noncoding RNA (sncRNA) 5' transfer RNA (tRNA) half
agacgacgaggatgggatt

SEQ ID NO: 493 - DNA, 35 bp, Artificial Sequence
  synthetic circulating small noncoding RNA (sncRNA) 5' transfer RNA (tRNA) half
agcgaccacgaagggactcgaacccccaatcttct

SEQ ID NO: 494 - DNA, 18 bp, Artificial Sequence
  synthetic circulating small noncoding RNA (sncRNA) 5' transfer RNA (tRNA) half
gtccagagtgctaaccat

SEQ ID NO: 495 - DNA, 14 bp, Artificial Sequence
  synthetic circulating small noncoding RNA (sncRNA) 5' transfer RNA (tRNA) half
ggttaggattcggc

SEQ ID NO: 496 - DNA, 14 bp, Artificial Sequence
  synthetic circulating small noncoding RNA (sncRNA) 5' transfer RNA (tRNA) half
gttcccataccggg

SEQ ID NO: 497 - DNA, 14 bp, Artificial Sequence
  synthetic circulating small noncoding RNA (sncRNA) 5' transfer RNA (tRNA) half
tgtttccgcccggt

SEQ ID NO: 498 - DNA, 19 bp, Artificial Sequence
  synthetic circulating small noncoding RNA (sncRNA) 5' transfer RNA (tRNA) half
tcagtggtagaattctcgc

SEQ ID NO: 499 - DNA, 35 bp, Artificial Sequence
  synthetic circulating small noncoding RNA (sncRNA) 5' transfer RNA (tRNA) half
gaacgcagcgccttagaccgctcggccatcctgac

SEQ ID NO: 500 - DNA, 30 bp, Artificial Sequence
  synthetic circulating small noncoding RNA (sncRNA) 5' transfer RNA (tRNA) half
attggtggttcagtggtagaattctcgcct

SEQ ID NO: 501 - DNA, 20 bp, Artificial Sequence
  synthetic circulating small noncoding RNA (sncRNA) 5' transfer RNA (tRNA) half
gcgagaattctaccactgaa

SEQ ID NO: 502 - DNA, 27 bp, Artificial Sequence
  synthetic circulating small noncoding RNA (sncRNA) 5' transfer RNA (tRNA) half
ggaatcctaaccgctagaccatgtggg

SEQ ID NO: 503 - DNA, 13 bp, Artificial Sequence
  synthetic circulating small noncoding RNA (sncRNA) 5' transfer RNA (tRNA) half
gagctatccgggc

SEQ ID NO: 504 - DNA, 31 bp, Artificial Sequence
  synthetic circulating small noncoding RNA (sncRNA) 5' transfer RNA (tRNA) half
agtcccatgctctaccgactgagctagccgg

SEQ ID NO: 505 - DNA, 17 bp, Artificial Sequence
  synthetic circulating small noncoding RNA (sncRNA) 5' transfer RNA (tRNA) half
gtggttagtactctgcg

SEQ ID NO: 506 - DNA, 33 bp, Artificial Sequence
  synthetic circulating small noncoding RNA (sncRNA) 5' transfer RNA (tRNA) half
cgcagcaacctcggttcgaatccgagtcacggc

SEQ ID NO: 507 - DNA, 29 bp, Artificial Sequence
  synthetic circulating small noncoding RNA (sncRNA) 5' transfer RNA (tRNA) half
cgagaatcatacccctagaccaacgagcc

SEQ ID NO: 508 - DNA, 37 bp, Artificial Sequence
  synthetic circulating small noncoding RNA (sncRNA) 5' transfer RNA (tRNA) half
gtcgagccagccaggagtcgaacctagaatcttctga

SEQ ID NO: 509 - DNA, 27 bp, Artificial Sequence
  synthetic circulating small noncoding RNA (sncRNA) 5' transfer RNA (tRNA) half
gctagctcagtcggtagagcatgagac

SEQ ID NO: 510 - DNA, 30 bp, Artificial Sequence
  synthetic circulating small noncoding RNA (sncRNA) 5' transfer RNA (tRNA) half
gttccatagtgtagcggttatcacgtctgc

SEQ ID NO: 511 - DNA, 12 bp, Artificial Sequence
  synthetic circulating small noncoding RNA (sncRNA) 5' transfer RNA (tRNA) half
cgattcccggcc

SEQ ID NO: 512 - DNA, 13 bp, Artificial Sequence
  synthetic circulating small noncoding RNA (sncRNA) 5' transfer RNA (tRNA) half
gacgaggtggccg

SEQ ID NO: 513 - DNA, 25 bp, Artificial Sequence
  synthetic circulating small noncoding RNA (sncRNA) 5' transfer RNA (tRNA) half
agtctcatgctctaccgactgagct

SEQ ID NO: 514 - DNA, 15 bp, Artificial Sequence
  synthetic circulating small noncoding RNA (sncRNA) 5' transfer RNA (tRNA) half
ggttagtactctgcg

SEQ ID NO: 515 - DNA, 14 bp, Artificial Sequence
  synthetic circulating small noncoding RNA (sncRNA) 5' transfer RNA (tRNA) half
tagaattctcgcct

SEQ ID NO: 516 - DNA, 27 bp, Artificial Sequence
  synthetic circulating small noncoding RNA (sncRNA) 5' transfer RNA (tRNA) half
gagaatcatacccctagaccaacgagc

SEQ ID NO: 517 - DNA, 25 bp, Artificial Sequence
  synthetic circulating small noncoding RNA (sncRNA) 5' transfer RNA (tRNA) half
agtcccatgctctaccgactgagct

SEQ ID NO: 518 - DNA, 14 bp, Artificial Sequence
  synthetic circulating small noncoding RNA (sncRNA) 5' transfer RNA (tRNA) half
ggccgggaatcgaa

SEQ ID NO: 519 - DNA, 20 bp, Artificial Sequence
  synthetic circulating small noncoding RNA (sncRNA) 5' transfer RNA (tRNA) half
aatggtggagatgccgggga

SEQ ID NO: 520 - DNA, 36 bp, Artificial Sequence
  synthetic circulating small noncoding RNA (sncRNA) 5' transfer RNA (tRNA) half
gcgcccgaacagggacttgaaccctggaccctcaga

SEQ ID NO: 521 - DNA, 23 bp, Artificial Sequence
  synthetic circulating small noncoding RNA (sncRNA) 5' transfer RNA (tRNA) half
tcccacaccgggagtcgaacccg

SEQ ID NO: 522 - DNA, 22 bp, Artificial Sequence
  synthetic circulating small noncoding RNA (sncRNA) 5' transfer RNA (tRNA) half
gttcagtggtagaattctcgcc

SEQ ID NO: 523 - DNA, 32 bp, Artificial Sequence
  synthetic circulating small noncoding RNA (sncRNA) 5' transfer RNA (tRNA) half
gtccatcgccttaaccactcggccacctcgtc

SEQ ID NO: 524 - DNA, 14 bp, Artificial Sequence
  synthetic circulating small noncoding RNA (sncRNA) 5' transfer RNA (tRNA) half
gcgagaatcatacc

SEQ ID NO: 525 - DNA, 13 bp, Artificial Sequence
  synthetic circulating small noncoding RNA (sncRNA) 5' transfer RNA (tRNA) half
gagctagccgggc

SEQ ID NO: 526 - DNA, 29 bp, Artificial Sequence
  synthetic circulating small noncoding RNA (sncRNA) 5' transfer RNA (tRNA) half
ccctggtggtctagtggttaggattcggc

SEQ ID NO: 527 - DNA, 30 bp, Artificial Sequence
  synthetic circulating small noncoding RNA (sncRNA) 5' transfer RNA (tRNA) half
gccgaatcctagccactagaccaccaggga

SEQ ID NO: 528 - DNA, 34 bp, Artificial Sequence
  synthetic circulating small noncoding RNA (sncRNA) 5' transfer RNA (tRNA) half
ggttccatagtgtagcggttatcacgtctgcttt

SEQ ID NO: 529 - DNA, 29 bp, Artificial Sequence
  synthetic circulating small noncoding RNA (sncRNA) 5' transfer RNA (tRNA) half
tcccatgctctaccgactgagctagccgg

SEQ ID NO: 530 - DNA, 21 bp, Artificial Sequence
  synthetic circulating small noncoding RNA (sncRNA) 5' transfer RNA (tRNA) half
ctgaatccagcgatccgagtt

SEQ ID NO: 531 - DNA, 29 bp, Artificial Sequence
  synthetic circulating small noncoding RNA (sncRNA) 5' transfer RNA (tRNA) half
caggaatcctaaccgctagaccatatggg

SEQ ID NO: 532 - DNA, 15 bp, Artificial Sequence
  synthetic circulating small noncoding RNA (sncRNA) 5' transfer RNA (tRNA) half
gagtactaaccacta

SEQ ID NO: 533 - DNA, 31 bp, Artificial Sequence
  synthetic circulating small noncoding RNA (sncRNA) 5' transfer RNA (tRNA) half
cctgaccgggaatcgaacccgggccgcggcg

SEQ ID NO: 534 - DNA, 16 bp, Artificial Sequence
  synthetic circulating small noncoding RNA (sncRNA) 5' transfer RNA (tRNA) half
gttatcacgtctgctt

SEQ ID NO: 535 - DNA, 32 bp, Artificial Sequence
  synthetic circulating small noncoding RNA (sncRNA) 5' transfer RNA (tRNA) half
gtttccgtagtgtagtggttagcgcgttcgcc

SEQ ID NO: 536 - DNA, 36 bp, Artificial Sequence
  synthetic circulating small noncoding RNA (sncRNA) 5' transfer RNA (tRNA) half
agtggttaggattcggcgctctcaccgccgcggccc

SEQ ID NO: 537 - DNA, 20 bp, Artificial Sequence
  synthetic circulating small noncoding RNA (sncRNA) 5' transfer RNA (tRNA) half
cgccgaatcctaaccactag

SEQ ID NO: 538 - DNA, 21 bp, Artificial Sequence
  synthetic circulating small noncoding RNA (sncRNA) 5' transfer RNA (tRNA) half
acgcagagtactaaccactat

SEQ ID NO: 539 - DNA, 33 bp, Artificial Sequence
  synthetic circulating small noncoding RNA (sncRNA) 5' transfer RNA (tRNA) half
ccctgaccgggaatcgaacccgggccgcggcgg

SEQ ID NO: 540 - DNA, 33 bp, Artificial Sequence
  synthetic circulating small noncoding RNA (sncRNA) 5' transfer RNA (tRNA) half
gcattggtggttcagtggtagaattctcgcctg

SEQ ID NO: 541 - DNA, 20 bp, Artificial Sequence
  synthetic circulating small noncoding RNA (sncRNA) 5' transfer RNA (tRNA) half
caaactgtttccgcccggtt

SEQ ID NO: 542 - DNA, 32 bp, Artificial Sequence
  synthetic circulating small noncoding RNA (sncRNA) 5' transfer RNA (tRNA) half
agtcaaatgctctacccctgagctatgccccc

SEQ ID NO: 543 - DNA, 30 bp, Artificial Sequence
  synthetic circulating small noncoding RNA (sncRNA) 5' transfer RNA (tRNA) half
ggcgagaattctaccactgaaccaccaatg

SEQ ID NO: 544 - DNA, 14 bp, Artificial Sequence
  synthetic circulating small noncoding RNA (sncRNA) 5' transfer RNA (tRNA) half
cccggtgtgggaac

SEQ ID NO: 545 - DNA, 38 bp, Artificial Sequence
  synthetic circulating small noncoding RNA (sncRNA) 5' transfer RNA (tRNA) half
tgtgcattggccgggaatcgaacccgggcctcccgcgt

SEQ ID NO: 546 - DNA, 24 bp, Artificial Sequence
  synthetic circulating small noncoding RNA (sncRNA) 5' transfer RNA (tRNA) half
ccttaaccactcggccacgactac

SEQ ID NO: 547 - DNA, 36 bp, Artificial Sequence
  synthetic circulating small noncoding RNA (sncRNA) 5' transfer RNA (tRNA) half
tccgactccgccgggactcgaacccggaacctttga

SEQ ID NO: 548 - DNA, 30 bp, Artificial Sequence
  synthetic circulating small noncoding RNA (sncRNA) 5' transfer RNA (tRNA) half
cccagcacgcttccgctgcgccactctgct

SEQ ID NO: 549 - DNA, 22 bp, Artificial Sequence
  synthetic circulating small noncoding RNA (sncRNA) 5' transfer RNA (tRNA) half
tccctgaccgggaatcgaaccc

SEQ ID NO: 550 - DNA, 35 bp, Artificial Sequence
  synthetic circulating small noncoding RNA (sncRNA) 5' transfer RNA (tRNA) half
aaagtctgatgctctaccgactgagctatccgggc

SEQ ID NO: 551 - DNA, 25 bp, Artificial Sequence
  synthetic circulating small noncoding RNA (sncRNA) 5' transfer RNA (tRNA) half
gttcccacaccgggagtcgaacccg

SEQ ID NO: 552 - DNA, 15 bp, Artificial Sequence
  synthetic circulating small noncoding RNA (sncRNA) 5' transfer RNA (tRNA) half
gttcgattcccgggc

SEQ ID NO: 553 - DNA, 13 bp, Artificial Sequence
  synthetic circulating small noncoding RNA (sncRNA) 5' transfer RNA (tRNA) half
gtttccgcccggt

SEQ ID NO: 554 - DNA, 21 bp, Artificial Sequence
  synthetic circulating small noncoding RNA (sncRNA) 5' transfer RNA (tRNA) half
aaccgggcggaaacaactttt

SEQ ID NO: 555 - DNA, 32 bp, Artificial Sequence
  synthetic circulating small noncoding RNA (sncRNA) 5' transfer RNA (tRNA) half
tccctggtagtctagtggttaggattcggtgc

SEQ ID NO: 556 - DNA, 16 bp, Artificial Sequence
  synthetic circulating small noncoding RNA (sncRNA) 5' transfer RNA (tRNA) half
ggtagaattctcgcct

SEQ ID NO: 557 - DNA, 34 bp, Artificial Sequence
  synthetic circulating small noncoding RNA (sncRNA) 5' transfer RNA (tRNA) half
gtcaggatggccgagcggtctaaggcgctgcgtt

SEQ ID NO: 558 - DNA, 36 bp, Artificial Sequence
  synthetic circulating small noncoding RNA (sncRNA) 5' transfer RNA (tRNA) half
ccgagaggtcccgggttcaaatcccggacgagcccc

SEQ ID NO: 559 - DNA, 18 bp, Artificial Sequence
  synthetic circulating small noncoding RNA (sncRNA) 5' transfer RNA (tRNA) half
ggtagcgtggccgagcgg

SEQ ID NO: 560 - DNA, 33 bp, Artificial Sequence
  synthetic circulating small noncoding RNA (sncRNA) 5' transfer RNA (tRNA) half
gccgtgatcgtatagtggttagtactctgcgtt

SEQ ID NO: 561 - DNA, 17 bp, Artificial Sequence
  synthetic circulating small noncoding RNA (sncRNA) 5' transfer RNA (tRNA) half
tggttagtactctgcgt

SEQ ID NO: 562 - DNA, 20 bp, Artificial Sequence
  synthetic circulating small noncoding RNA (sncRNA) 5' transfer RNA (tRNA) half
tgaatccagcgatccgagtt

SEQ ID NO: 563 - DNA, 18 bp, Artificial Sequence
  synthetic circulating small noncoding RNA (sncRNA) 5' transfer RNA (tRNA) half
ggcgaacgtgataaccac

SEQ ID NO: 564 - DNA, 18 bp, Artificial Sequence
  synthetic circulating small noncoding RNA (sncRNA) 5' transfer RNA (tRNA) half
aggcgagaattctaccac

SEQ ID NO: 565 - DNA, 25 bp, Artificial Sequence
  synthetic circulating small noncoding RNA (sncRNA) 5' transfer RNA (tRNA) half
gcgagaattctaccactgaaccacc

SEQ ID NO: 566 - DNA, 18 bp, Artificial Sequence
  synthetic circulating small noncoding RNA (sncRNA) 5' transfer RNA (tRNA) half
agtctcatgctctaccga

SEQ ID NO: 567 - DNA, 15 bp, Artificial Sequence
  synthetic circulating small noncoding RNA (sncRNA) 5' transfer RNA (tRNA) half
gttcccataccggga

SEQ ID NO: 568 - DNA, 15 bp, Artificial Sequence
  synthetic circulating small noncoding RNA (sncRNA) 5' transfer RNA (tRNA) half
gcgagaattctacca

SEQ ID NO: 569 - DNA, 22 bp, Artificial Sequence
  synthetic circulating small noncoding RNA (sncRNA) 5' transfer RNA (tRNA) half
gaactcggatcgctggattcag

SEQ ID NO: 570 - DNA, 18 bp, Artificial Sequence
  synthetic circulating small noncoding RNA (sncRNA) 5' transfer RNA (tRNA) half
ccattgaactaccaatgc

SEQ ID NO: 571 - DNA, 31 bp, Artificial Sequence
  synthetic circulating small noncoding RNA (sncRNA) 5' transfer RNA (tRNA) half
gtttccctagtgtagtggttatcacgttcgc

SEQ ID NO: 572 - DNA, 31 bp, Artificial Sequence
  synthetic circulating small noncoding RNA (sncRNA) 5' transfer RNA (tRNA) half
gcagcgccttagaccgctcggccatcctgac

SEQ ID NO: 573 - DNA, 35 bp, Artificial Sequence
  synthetic circulating small noncoding RNA (sncRNA) 5' transfer RNA (tRNA) half
acgcagaaggtcctgggttcgagccccagtggaac

SEQ ID NO: 574 - DNA, 27 bp, Artificial Sequence
  synthetic circulating small noncoding RNA (sncRNA) 5' transfer RNA (tRNA) half
gtctgatgctctaccgactgagctatc

SEQ ID NO: 575 - DNA, 13 bp, Artificial Sequence
  synthetic circulating small noncoding RNA (sncRNA) 5' transfer RNA (tRNA) half
gcgagaattctac

SEQ ID NO: 576 - DNA, 26 bp, Artificial Sequence
  synthetic circulating small noncoding RNA (sncRNA) 5' transfer RNA (tRNA) half
gtctcatgctctaccgactgagctag

SEQ ID NO: 577 - DNA, 21 bp, Artificial Sequence
  synthetic circulating small noncoding RNA (sncRNA) 5' transfer RNA (tRNA) half
agagtccagagtgctaaccat

SEQ ID NO: 578 - DNA, 17 bp, Artificial Sequence
  synthetic circulating small noncoding RNA (sncRNA) 5' transfer RNA (tRNA) half
gtctcatgctctaccga

SEQ ID NO: 579 - DNA, 18 bp, Artificial Sequence
  synthetic circulating small noncoding RNA (sncRNA) 5' transfer RNA (tRNA) half
tagtggttagtactctgc

SEQ ID NO: 580 - DNA, 19 bp, Artificial Sequence
  synthetic circulating small noncoding RNA (sncRNA) 5' transfer RNA (tRNA) half
gagtcccatgctctaccga

SEQ ID NO: 581 - DNA, 19 bp, Artificial Sequence
  synthetic circulating small noncoding RNA (sncRNA) 5' transfer RNA (tRNA) half
gccgaatcctaaccactag

SEQ ID NO: 582 - DNA, 27 bp, Artificial Sequence
  synthetic circulating small noncoding RNA (sncRNA) 5' transfer RNA (tRNA) half
gaatcctaaccactagaccaccaggga

SEQ ID NO: 583 - DNA, 22 bp, Artificial Sequence
  synthetic circulating small noncoding RNA (sncRNA) 5' transfer RNA (tRNA) half
tcccacaccgggagtcgaaccc

SEQ ID NO: 584 - DNA, 16 bp, Artificial Sequence
  synthetic circulating small noncoding RNA (sncRNA) 5' transfer RNA (tRNA) half
aagcgagaatcatacc

SEQ ID NO: 585 - DNA, 18 bp, Artificial Sequence
  synthetic circulating small noncoding RNA (sncRNA) 5' transfer RNA (tRNA) half
gtcccatgctctaccgac

SEQ ID NO: 586 - DNA, 34 bp, Artificial Sequence
  synthetic circulating small noncoding RNA (sncRNA) 5' transfer RNA (tRNA) half
ccctgaccgggaatcgaacccgggccgcggcggt

SEQ ID NO: 587 - DNA, 15 bp, Artificial Sequence
  synthetic circulating small noncoding RNA (sncRNA) 5' transfer RNA (tRNA) half
cgtgtttccgcccgg

SEQ ID NO: 588 - DNA, 15 bp, Artificial Sequence
  synthetic circulating small noncoding RNA (sncRNA) 5' transfer RNA (tRNA) half
gtcaggatggccgag

SEQ ID NO: 589 - DNA, 16 bp, Artificial Sequence
  synthetic circulating small noncoding RNA (sncRNA) 5' transfer RNA (tRNA) half
gtggtagaattctcgc

SEQ ID NO: 590 - DNA, 33 bp, Artificial Sequence
  synthetic circulating small noncoding RNA (sncRNA) 5' transfer RNA (tRNA) half
gggggattagctcaaatggtagagcgctcgctt

SEQ ID NO: 591 - DNA, 25 bp, Artificial Sequence
  synthetic circulating small noncoding RNA (sncRNA) 5' transfer RNA (tRNA) half
ggcgagaattctaccactgaaccac

SEQ ID NO: 592 - DNA, 28 bp, Artificial Sequence
  synthetic circulating small noncoding RNA (sncRNA) 5' transfer RNA (tRNA) half
gggccgcggcggtgagagcgccgaatcc

SEQ ID NO: 593 - DNA, 18 bp, Artificial Sequence
  synthetic circulating small noncoding RNA (sncRNA) 5' transfer RNA (tRNA) half
ttccgcagcgagcagggt

SEQ ID NO: 594 - DNA, 22 bp, Artificial Sequence
  synthetic circulating small noncoding RNA (sncRNA) 5' transfer RNA (tRNA) half
aactcggatcgctggattcaga

SEQ ID NO: 595 - DNA, 35 bp, Artificial Sequence
  synthetic circulating small noncoding RNA (sncRNA) 5' transfer RNA (tRNA) half
agaagattgcaggttcgagtcctgccgcggtcgac

SEQ ID NO: 596 - DNA, 18 bp, Artificial Sequence
  synthetic circulating small noncoding RNA (sncRNA) 5' transfer RNA (tRNA) half
agtggtagaattctcgcc

SEQ ID NO: 597 - DNA, 28 bp, Artificial Sequence
  synthetic circulating small noncoding RNA (sncRNA) 5' transfer RNA (tRNA) half
cagagtactaaccactatacgatcacgg

SEQ ID NO: 598 - DNA, 20 bp, Artificial Sequence
  synthetic circulating small noncoding RNA (sncRNA) 5' transfer RNA (tRNA) half
gcccagcacgcttccgctgc

SEQ ID NO: 599 - DNA, 15 bp, Artificial Sequence
  synthetic circulating small noncoding RNA (sncRNA) 5' transfer RNA (tRNA) half
ggtagaattctcgcc

SEQ ID NO: 600 - DNA, 28 bp, Artificial Sequence
  synthetic circulating small noncoding RNA (sncRNA) 5' transfer RNA (tRNA) half
cgccgctggtgtagtggtatcatgcaag

SEQ ID NO: 601 - DNA, 15 bp, Artificial Sequence
  synthetic circulating small noncoding RNA (sncRNA) 5' transfer RNA (tRNA) half
agcgagaatcatacc

SEQ ID NO: 602 - DNA, 28 bp, Artificial Sequence
  synthetic circulating small noncoding RNA (sncRNA) 5' transfer RNA (tRNA) half
cgtgatcgtatagtggttagtactctgc

SEQ ID NO: 603 - DNA, 34 bp, Artificial Sequence
  synthetic circulating small noncoding RNA (sncRNA) 5' transfer RNA (tRNA) half
aggcaccgctgggattcgaacccaggatctcctg

SEQ ID NO: 604 - DNA, 14 bp, Artificial Sequence
  synthetic circulating small noncoding RNA (sncRNA) 5' transfer RNA (tRNA) half
gtttccgcccggtt

SEQ ID NO: 605 - DNA, 34 bp, Artificial Sequence
  synthetic circulating small noncoding RNA (sncRNA) 5' transfer RNA (tRNA) half
tcagaagattgcaggttcgagtcctgccgcggtc

SEQ ID NO: 606 - DNA, 29 bp, Artificial Sequence
  synthetic circulating small noncoding RNA (sncRNA) 5' transfer RNA (tRNA) half
cgccgctggtgtagtggtatcatgcaaga

SEQ ID NO: 607 - DNA, 18 bp, Artificial Sequence
  synthetic circulating small noncoding RNA (sncRNA) 5' transfer RNA (tRNA) half
ggttatcacgtctgcttt

SEQ ID NO: 608 - DNA, 34 bp, Artificial Sequence
  synthetic circulating small noncoding RNA (sncRNA) 5' transfer RNA (tRNA) half
ccccgtcggggaattgaaccccggtctcccgcgt

SEQ ID NO: 609 - DNA, 33 bp, Artificial Sequence
  synthetic circulating small noncoding RNA (sncRNA) 5' transfer RNA (tRNA) half
gtctggcgccttagaccactcggccatcctgac

SEQ ID NO: 610 - DNA, 20 bp, Artificial Sequence
  synthetic circulating small noncoding RNA (sncRNA) 5' transfer RNA (tRNA) half
cagagtgctaaccattacac

SEQ ID NO: 611 - DNA, 28 bp, Artificial Sequence
  synthetic circulating small noncoding RNA (sncRNA) 5' transfer RNA (tRNA) half
cgcagagtactaaccactatacgatcac

SEQ ID NO: 612 - DNA, 14 bp, Artificial Sequence
  synthetic circulating small noncoding RNA (sncRNA) 5' transfer RNA (tRNA) half
gtttccgtagtgta

SEQ ID NO: 613 - DNA, 34 bp, Artificial Sequence
  synthetic circulating small noncoding RNA (sncRNA) 5' transfer RNA (tRNA) half
aatccagcgccttagaccgctcggccacactacc

SEQ ID NO: 614 - DNA, 33 bp, Artificial Sequence
  synthetic circulating small noncoding RNA (sncRNA) 5' transfer RNA (tRNA) half
gcatgggtggttcagtggtagaattctcgcctg

SEQ ID NO: 615 - DNA, 15 bp, Artificial Sequence
  synthetic circulating small noncoding RNA (sncRNA) 5' transfer RNA (tRNA) half
aagcgagaatcatac

SEQ ID NO: 616 - DNA, 29 bp, Artificial Sequence
  synthetic circulating small noncoding RNA (sncRNA) 5' transfer RNA (tRNA) half
tcatgctctaccgactgagctagccgggc

SEQ ID NO: 617 - DNA, 28 bp, Artificial Sequence
  synthetic circulating small noncoding RNA (sncRNA) 5' transfer RNA (tRNA) half
tctgatgctctaccgactgagctatccg

SEQ ID NO: 618 - DNA, 14 bp, Artificial Sequence
  synthetic circulating small noncoding RNA (sncRNA) 5' transfer RNA (tRNA) half
gtagtcgtggccga

SEQ ID NO: 619 - DNA, 37 bp, Artificial Sequence
  synthetic circulating small noncoding RNA (sncRNA) 5' transfer RNA (tRNA) half
acccgggcctcccgcgtggcaggcgagaattctacca

SEQ ID NO: 620 - DNA, 24 bp, Artificial Sequence
  synthetic circulating small noncoding RNA (sncRNA) 5' transfer RNA (tRNA) half
gggttcgactcccggtgtgggaac

SEQ ID NO: 621 - DNA, 35 bp, Artificial Sequence
  synthetic circulating small noncoding RNA (sncRNA) 5' transfer RNA (tRNA) half
tccctgaccgggaatcgaacccgggccgcggcggt

SEQ ID NO: 622 - DNA, 30 bp, Artificial Sequence
  synthetic circulating small noncoding RNA (sncRNA) 5' transfer RNA (tRNA) half
ccctggtggtctagtggttaggattcggcg

SEQ ID NO: 623 - DNA, 34 bp, Artificial Sequence
  synthetic circulating small noncoding RNA (sncRNA) 5' transfer RNA (tRNA) half
ggctcgtccgggatttgaacccgggacctctcgc

SEQ ID NO: 624 - DNA, 18 bp, Artificial Sequence
  synthetic circulating small noncoding RNA (sncRNA) 5' transfer RNA (tRNA) half
tggtggagatgccgggga

SEQ ID NO: 625 - DNA, 19 bp, Artificial Sequence
  synthetic circulating small noncoding RNA (sncRNA) 5' transfer RNA (tRNA) half
caggaatcctaaccgctag

SEQ ID NO: 626 - DNA, 20 bp, Artificial Sequence
  synthetic circulating small noncoding RNA (sncRNA) 5' transfer RNA (tRNA) half
aaccactagaccaccaggga

SEQ ID NO: 627 - DNA, 35 bp, Artificial Sequence
  synthetic circulating small noncoding RNA (sncRNA) 5' transfer RNA (tRNA) half
gcccggatgatcctcagtggtctggggtgcaggct

SEQ ID NO: 628 - DNA, 27 bp, Artificial Sequence
  synthetic circulating small noncoding RNA (sncRNA) 5' transfer RNA (tRNA) half
cggctagctcagtcggtagagcatgag

SEQ ID NO: 629 - DNA, 15 bp, Artificial Sequence
  synthetic circulating small noncoding RNA (sncRNA) 5' transfer RNA (tRNA) half
gcgagaatcataccc

SEQ ID NO: 630 - DNA, 20 bp, Artificial Sequence
  synthetic circulating small noncoding RNA (sncRNA) 5' transfer RNA (tRNA) half
cgcagagtactaaccactat

SEQ ID NO: 631 - DNA, 13 bp, Artificial Sequence
  synthetic circulating small noncoding RNA (sncRNA) 5' transfer RNA (tRNA) half
tagaattctcgcc

SEQ ID NO: 632 - DNA, 14 bp, Artificial Sequence
  synthetic circulating small noncoding RNA (sncRNA) 5' transfer RNA (tRNA) half
gtagaattctcgcc

SEQ ID NO: 633 - DNA, 28 bp, Artificial Sequence
  synthetic circulating small noncoding RNA (sncRNA) 5' transfer RNA (tRNA) half
gcccagcacgcttccgctgcgccactct

SEQ ID NO: 634 - DNA, 28 bp, Artificial Sequence
  synthetic circulating small noncoding RNA (sncRNA) 5' transfer RNA (tRNA) half
tccctggtggtctagtggttaggattcg

SEQ ID NO: 635 - DNA, 16 bp, Artificial Sequence
  synthetic circulating small noncoding RNA (sncRNA) 5' transfer RNA (tRNA) half
gtctgatgctctaccg

SEQ ID NO: 636 - DNA, 20 bp, Artificial Sequence
  synthetic circulating small noncoding RNA (sncRNA) 5' transfer RNA (tRNA) half
gaccgctcggccacactacc

SEQ ID NO: 637 - DNA, 32 bp, Artificial Sequence
  synthetic circulating small noncoding RNA (sncRNA) 5' transfer RNA (tRNA) half
ggggatgtagctcagtggtagagcgcgcgctt

SEQ ID NO: 638 - DNA, 29 bp, Artificial Sequence
  synthetic circulating small noncoding RNA (sncRNA) 5' transfer RNA (tRNA) half
gaatgtgataaccactacactacggaaac

SEQ ID NO: 639 - DNA, 37 bp, Artificial Sequence
  synthetic circulating small noncoding RNA (sncRNA) 5' transfer RNA (tRNA) half
agcgactctggtgggactcgaacccacaacctttgaa

SEQ ID NO: 640 - DNA, 24 bp, Artificial Sequence
  synthetic circulating small noncoding RNA (sncRNA) 5' transfer RNA (tRNA) half
gttcccataccgggagtcgaaccc

SEQ ID NO: 641 - DNA, 12 bp, Artificial Sequence
  synthetic circulating small noncoding RNA (sncRNA) 5' transfer RNA (tRNA) half
gtttccgcccgg

SEQ ID NO: 642 - DNA, 26 bp, Artificial Sequence
  synthetic circulating small noncoding RNA (sncRNA) 5' transfer RNA (tRNA) half
aggcgagaattctaccactgaaccac

SEQ ID NO: 643 - DNA, 33 bp, Artificial Sequence
  synthetic circulating small noncoding RNA (sncRNA) 5' transfer RNA (tRNA) half
ggcattggtggttcagtggtagaattctcgcct

SEQ ID NO: 644 - DNA, 32 bp, Artificial Sequence
  synthetic circulating small noncoding RNA (sncRNA) 5' transfer RNA (tRNA) half
gtctcatgctctacccactgagctatctgggc

SEQ ID NO: 645 - DNA, 27 bp, Artificial Sequence
  synthetic circulating small noncoding RNA (sncRNA) 5' transfer RNA (tRNA) half
agaatcatacccctagaccaacgagcc

SEQ ID NO: 646 - DNA, 20 bp, Artificial Sequence
  synthetic circulating small noncoding RNA (sncRNA) 5' transfer RNA (tRNA) half
cgtggcaggcgagaattcta

SEQ ID NO: 647 - DNA, 37 bp, Artificial Sequence
  synthetic circulating small noncoding RNA (sncRNA) 5' transfer RNA (tRNA) half
tcagaagattgcaggttcgagtcctgccgcggtcgac

SEQ ID NO: 648 - DNA, 18 bp, Artificial Sequence
  synthetic circulating small noncoding RNA (sncRNA) 5' transfer RNA (tRNA) half
gtggttatcacgttcgcc

SEQ ID NO: 649 - DNA, 35 bp, Artificial Sequence
  synthetic circulating small noncoding RNA (sncRNA) 5' transfer RNA (tRNA) half
acaggagatcctgggttcgaatcccagcggggcct

SEQ ID NO: 650 - DNA, 19 bp, Artificial Sequence
  synthetic circulating small noncoding RNA (sncRNA) 5' transfer RNA (tRNA) half
agtggtagaattctcgcct

SEQ ID NO: 651 - DNA, 19 bp, Artificial Sequence
  synthetic circulating small noncoding RNA (sncRNA) 5' transfer RNA (tRNA) half
atggtggagatgccgggga

SEQ ID NO: 652 - DNA, 13 bp, Artificial Sequence
  synthetic circulating small noncoding RNA (sncRNA) 5' transfer RNA (tRNA) half
gagctaatccccc

SEQ ID NO: 653 - DNA, 21 bp, Artificial Sequence
  synthetic circulating small noncoding RNA (sncRNA) 5' transfer RNA (tRNA) half
ttcagtggtagaattctcgcc

SEQ ID NO: 654 - DNA, 26 bp, Artificial Sequence
  synthetic circulating small noncoding RNA (sncRNA) 5' transfer RNA (tRNA) half
gcccggctagctcagtcggtagagca

SEQ ID NO: 655 - DNA, 33 bp, Artificial Sequence
  synthetic circulating small noncoding RNA (sncRNA) 5' transfer RNA (tRNA) half
aaagcgagaatcatacccctagaccaacgagcc

SEQ ID NO: 656 - DNA, 16 bp, Artificial Sequence
  synthetic circulating small noncoding RNA (sncRNA) 5' transfer RNA (tRNA) half
cgtgtttccgcccggt

SEQ ID NO: 657 - DNA, 32 bp, Artificial Sequence
  synthetic circulating small noncoding RNA (sncRNA) 5' transfer RNA (tRNA) half
cgcagcgccttagaccgctcggccatcctgac

SEQ ID NO: 658 - DNA, 33 bp, Artificial Sequence
  synthetic circulating small noncoding RNA (sncRNA) 5' transfer RNA (tRNA) half
gcattggtggttcagtggtagaattctcgcctc

SEQ ID NO: 659 - DNA, 17 bp, Artificial Sequence
  synthetic circulating small noncoding RNA (sncRNA) 5' transfer RNA (tRNA) half
gtctgatgctctaccga

SEQ ID NO: 660 - DNA, 19 bp, Artificial Sequence
  synthetic circulating small noncoding RNA (sncRNA) 5' transfer RNA (tRNA) half
agtccagagtgctaaccat

SEQ ID NO: 661 - DNA, 33 bp, Artificial Sequence
  synthetic circulating small noncoding RNA (sncRNA) 5' transfer RNA (tRNA) half
gctcgtccgggatttgaacccgggacctctcgc

SEQ ID NO: 662 - DNA, 17 bp, Artificial Sequence
  synthetic circulating small noncoding RNA (sncRNA) 5' transfer RNA (tRNA) half
gcccagcacgcttccgc

SEQ ID NO: 663 - DNA, 15 bp, Artificial Sequence
  synthetic circulating small noncoding RNA (sncRNA) 5' transfer RNA (tRNA) half
ggtatgattctcggt

SEQ ID NO: 664 - DNA, 13 bp, Artificial Sequence
  synthetic circulating small noncoding RNA (sncRNA) 5' transfer RNA (tRNA) half
gagctataccccc

SEQ ID NO: 665 - DNA, 31 bp, Artificial Sequence
  synthetic circulating small noncoding RNA (sncRNA) 5' transfer RNA (tRNA) half
gtttccgtagtgtagtggttatcacgctcgc

SEQ ID NO: 666 - DNA, 32 bp, Artificial Sequence
  synthetic circulating small noncoding RNA (sncRNA) 5' transfer RNA (tRNA) half
agtcaaatgctctacccctgagctataccacc

SEQ ID NO: 667 - DNA, 27 bp, Artificial Sequence
  synthetic circulating small noncoding RNA (sncRNA) 5' transfer RNA (tRNA) half
cccacatggtctagcggttaggattcc

SEQ ID NO: 668 - DNA, 25 bp, Artificial Sequence
  synthetic circulating small noncoding RNA (sncRNA) 5' transfer RNA (tRNA) half
gtcccatgctctaccgactgagcta

SEQ ID NO: 669 - DNA, 16 bp, Artificial Sequence
  synthetic circulating small noncoding RNA (sncRNA) 5' transfer RNA (tRNA) half
gtctcccgcgtgacag

SEQ ID NO: 670 - DNA, 26 bp, Artificial Sequence
  synthetic circulating small noncoding RNA (sncRNA) 5' transfer RNA (tRNA) half
aatcctaaccgctagaccatatggga

SEQ ID NO: 671 - DNA, 19 bp, Artificial Sequence
  synthetic circulating small noncoding RNA (sncRNA) 5' transfer RNA (tRNA) half
tctgatgctctaccgactg

SEQ ID NO: 672 - DNA, 37 bp, Artificial Sequence
  synthetic circulating small noncoding RNA (sncRNA) 5' transfer RNA (tRNA) half
gctggggattgtgggttcgagtcccatctgggtcgca

SEQ ID NO: 673 - DNA, 19 bp, Artificial Sequence
  synthetic circulating small noncoding RNA (sncRNA) 5' transfer RNA (tRNA) half
aacgtgtttccgcccggtt

SEQ ID NO: 674 - DNA, 30 bp, Artificial Sequence
  synthetic circulating small noncoding RNA (sncRNA) 5' transfer RNA (tRNA) half
gggggtatagctcagtggtagagcatttga

SEQ ID NO: 675 - DNA, 34 bp, Artificial Sequence
  synthetic circulating small noncoding RNA (sncRNA) 5' transfer RNA (tRNA) half
gaccccgacgtgatttgaacacgcaaccttctga

SEQ ID NO: 676 - DNA, 27 bp, Artificial Sequence
  synthetic circulating small noncoding RNA (sncRNA) 5' transfer RNA (tRNA) half
gagtactaaccactatacgatcacggc

SEQ ID NO: 677 - DNA, 20 bp, Artificial Sequence
  synthetic circulating small noncoding RNA (sncRNA) 5' transfer RNA (tRNA) half
gagtccagagtgctaaccat

SEQ ID NO: 678 - DNA, 31 bp, Artificial Sequence
  synthetic circulating small noncoding RNA (sncRNA) 5' transfer RNA (tRNA) half
tccctggtagtctagtggttaggattcggtg

SEQ ID NO: 679 - DNA, 37 bp, Artificial Sequence
  synthetic circulating small noncoding RNA (sncRNA) 5' transfer RNA (tRNA) half
cttccctgaccgggaatcgaacccgggccgcggcggt

SEQ ID NO: 680 - DNA, 31 bp, Artificial Sequence
  synthetic circulating small noncoding RNA (sncRNA) 5' transfer RNA (tRNA) half
gcgagcgtgatgaccactacactacggaaac

SEQ ID NO: 681 - DNA, 36 bp, Artificial Sequence
  synthetic circulating small noncoding RNA (sncRNA) 5' transfer RNA (tRNA) half
ttccctgaccgggaatcgaacccgggccgcggcggt

SEQ ID NO: 682 - DNA, 32 bp, Artificial Sequence
  synthetic circulating small noncoding RNA (sncRNA) 5' transfer RNA (tRNA) half
gagtctcatgctctaccgactgagctagccgg

SEQ ID NO: 683 - DNA, 18 bp, Artificial Sequence
  synthetic circulating small noncoding RNA (sncRNA) 5' transfer RNA (tRNA) half
gtctcatgctctaccgac

SEQ ID NO: 684 - DNA, 15 bp, Artificial Sequence
  synthetic circulating small noncoding RNA (sncRNA) 5' transfer RNA (tRNA) half
ctcggccatcgctgc

SEQ ID NO: 685 - DNA, 16 bp, Artificial Sequence
  synthetic circulating small noncoding RNA (sncRNA) 5' transfer RNA (tRNA) half
cggaagcgtgctgggc

SEQ ID NO: 686 - DNA, 19 bp, Artificial Sequence
  synthetic circulating small noncoding RNA (sncRNA) 5' transfer RNA (tRNA) half
gtctcatgctctaccgact

SEQ ID NO: 687 - DNA, 27 bp, Artificial Sequence
  synthetic circulating small noncoding RNA (sncRNA) 5' transfer RNA (tRNA) half
ctgatgctctaccgactgagctatccg

SEQ ID NO: 688 - DNA, 33 bp, Artificial Sequence
  synthetic circulating small noncoding RNA (sncRNA) 5' transfer RNA (tRNA) half
tgtcagaagtgggattcgaacccacgcctccat

SEQ ID NO: 689 - DNA, 34 bp, Artificial Sequence
  synthetic circulating small noncoding RNA (sncRNA) 5' transfer RNA (tRNA) half
taggcgaatgtgataaccactacactacggaaac

SEQ ID NO: 690 - DNA, 20 bp, Artificial Sequence
  synthetic circulating small noncoding RNA (sncRNA) 5' transfer RNA (tRNA) half
atcccaccgctgccatcttt

SEQ ID NO: 691 - DNA, 24 bp, Artificial Sequence
  synthetic circulating small noncoding RNA (sncRNA) 5' transfer RNA (tRNA) half
aggcgaacgtgataaccactacac

SEQ ID NO: 692 - DNA, 25 bp, Artificial Sequence
  synthetic circulating small noncoding RNA (sncRNA) 5' transfer RNA (tRNA) half
tagctcagtcggtagagcatgagac

SEQ ID NO: 693 - DNA, 27 bp, Artificial Sequence
  synthetic circulating small noncoding RNA (sncRNA) 5' transfer RNA (tRNA) half
ggtggttcagtggtagaattctcgcct

SEQ ID NO: 694 - DNA, 21 bp, Artificial Sequence
  synthetic circulating small noncoding RNA (sncRNA) 5' transfer RNA (tRNA) half
gttcagtggtagaattctcgc

SEQ ID NO: 695 - DNA, 30 bp, Artificial Sequence
  synthetic circulating small noncoding RNA (sncRNA) 5' transfer RNA (tRNA) half
gccgtgatcgtataggggttagtactctgc

SEQ ID NO: 696 - DNA, 33 bp, Artificial Sequence
  synthetic circulating small noncoding RNA (sncRNA) 5' transfer RNA (tRNA) half
gactctggtgggactcgaacccacaacctttga

SEQ ID NO: 697 - DNA, 14 bp, Artificial Sequence
  synthetic circulating small noncoding RNA (sncRNA) 5' transfer RNA (tRNA) half
accgggcggaaaca

SEQ ID NO: 698 - DNA, 34 bp, Artificial Sequence
  synthetic circulating small noncoding RNA (sncRNA) 5' transfer RNA (tRNA) half
cattggccgggaatcgaacccgggcctcccgcgt

SEQ ID NO: 699 - DNA, 35 bp, Artificial Sequence
  synthetic circulating small noncoding RNA (sncRNA) 5' transfer RNA (tRNA) half
acaggagatcctgggttcgaatcccagcggtgcct

SEQ ID NO: 700 - DNA, 16 bp, Artificial Sequence
  synthetic circulating small noncoding RNA (sncRNA) 5' transfer RNA (tRNA) half
gatgctctaccgactg

SEQ ID NO: 701 - DNA, 26 bp, Artificial Sequence
  synthetic circulating small noncoding RNA (sncRNA) 5' transfer RNA (tRNA) half
gagaattctaccactgaaccaccaat

SEQ ID NO: 702 - DNA, 22 bp, Artificial Sequence
  synthetic circulating small noncoding RNA (sncRNA) 5' transfer RNA (tRNA) half
ttcagtggtagaattctcgcct

SEQ ID NO: 703 - DNA, 31 bp, Artificial Sequence
  synthetic circulating small noncoding RNA (sncRNA) 5' transfer RNA (tRNA) half
gtcccatgctctaccgactgagctagccggg

SEQ ID NO: 704 - DNA, 27 bp, Artificial Sequence
  synthetic circulating small noncoding RNA (sncRNA) 5' transfer RNA (tRNA) half
gcatgggtggttcagtggtagaattct

SEQ ID NO: 705 - DNA, 28 bp, Artificial Sequence
  synthetic circulating small noncoding RNA (sncRNA) 5' transfer RNA (tRNA) half
ccctgaccgggaatcgaacccgggccgc

SEQ ID NO: 706 - DNA, 34 bp, Artificial Sequence
  synthetic circulating small noncoding RNA (sncRNA) 5' transfer RNA (tRNA) half
ggcaccgctgggattcgaacccaggatctcctgt

SEQ ID NO: 707 - DNA, 31 bp, Artificial Sequence
  synthetic circulating small noncoding RNA (sncRNA) 5' transfer RNA (tRNA) half
gtttctgtagtgtagtggttatcacgctcgc

SEQ ID NO: 708 - DNA, 16 bp, Artificial Sequence
  synthetic circulating small noncoding RNA (sncRNA) 5' transfer RNA (tRNA) half
ccgactccgccgggac

SEQ ID NO: 709 - DNA, 21 bp, Artificial Sequence
  synthetic circulating small noncoding RNA (sncRNA) 5' transfer RNA (tRNA) half
tagtggttagtactctgcgtt

SEQ ID NO: 710 - DNA, 28 bp, Artificial Sequence
  synthetic circulating small noncoding RNA (sncRNA) 5' transfer RNA (tRNA) half
agtcccatgctctaccgactgagctagc

SEQ ID NO: 711 - DNA, 14 bp, Artificial Sequence
  synthetic circulating small noncoding RNA (sncRNA) 5' transfer RNA (tRNA) half
gaagcgtgctgggc

SEQ ID NO: 712 - DNA, 14 bp, Artificial Sequence
  synthetic circulating small noncoding RNA (sncRNA) 5' transfer RNA (tRNA) half
gactccgccgggac

SEQ ID NO: 713 - DNA, 30 bp, Artificial Sequence
  synthetic circulating small noncoding RNA (sncRNA) 5' transfer RNA (tRNA) half
gcatgcgctctaccactgagctacatcccc

SEQ ID NO: 714 - DNA, 24 bp, Artificial Sequence
  synthetic circulating small noncoding RNA (sncRNA) 5' transfer RNA (tRNA) half
ggcgagaattctaccactgaacca

SEQ ID NO: 715 - DNA, 30 bp, Artificial Sequence
  synthetic circulating small noncoding RNA (sncRNA) 5' transfer RNA (tRNA) half
ggcggtgagagcgccgaatcctaaccacta

SEQ ID NO: 716 - DNA, 32 bp, Artificial Sequence
  synthetic circulating small noncoding RNA (sncRNA) 5' transfer RNA (tRNA) half
agcgagcgctctaccatttgagctaatccccc

SEQ ID NO: 717 - DNA, 14 bp, Artificial Sequence
  synthetic circulating small noncoding RNA (sncRNA) 5' transfer RNA (tRNA) half
gagcgccgaatcct

SEQ ID NO: 718 - DNA, 21 bp, Artificial Sequence
  synthetic circulating small noncoding RNA (sncRNA) 5' transfer RNA (tRNA) half
taatggataaggcatcagcct

SEQ ID NO: 719 - DNA, 32 bp, Artificial Sequence
  synthetic circulating small noncoding RNA (sncRNA) 5' transfer RNA (tRNA) half
gaccagtgctctaacccctgagctatggagcc

SEQ ID NO: 720 - DNA, 23 bp, Artificial Sequence
  synthetic circulating small noncoding RNA (sncRNA) 5' transfer RNA (tRNA) half
cgggttcgactcccggtgtggga

SEQ ID NO: 721 - DNA, 28 bp, Artificial Sequence
  synthetic circulating small noncoding RNA (sncRNA) 5' transfer RNA (tRNA) half
ggcggtgagagcgccgaatcctaaccac

SEQ ID NO: 722 - DNA, 12 bp, Artificial Sequence
  synthetic circulating small noncoding RNA (sncRNA) 5' transfer RNA (tRNA) half
ggcgagaattct

SEQ ID NO: 723 - DNA, 13 bp, Artificial Sequence
  synthetic circulating small noncoding RNA (sncRNA) 5' transfer RNA (tRNA) half
accgggcggaaac

SEQ ID NO: 724 - DNA, 20 bp, Artificial Sequence
  synthetic circulating small noncoding RNA (sncRNA) 5' transfer RNA (tRNA) half
gtcccatgctctaccgactg

SEQ ID NO: 725 - DNA, 32 bp, Artificial Sequence
  synthetic circulating small noncoding RNA (sncRNA) 5' transfer RNA (tRNA) half
agtcaaatgctctacccctgagttataccccc

SEQ ID NO: 726 - DNA, 24 bp, Artificial Sequence
  synthetic circulating small noncoding RNA (sncRNA) 5' transfer RNA (tRNA) half
gtcccatgctctaccgactgagct

SEQ ID NO: 727 - DNA, 29 bp, Artificial Sequence
  synthetic circulating small noncoding RNA (sncRNA) 5' transfer RNA (tRNA) half
atgggtggttcagtggtagaattctcgcc

SEQ ID NO: 728 - DNA, 29 bp, Artificial Sequence
  synthetic circulating small noncoding RNA (sncRNA) 5' transfer RNA (tRNA) half
caggaatcctaaccgctagaccatgtggg

SEQ ID NO: 729 - DNA, 32 bp, Artificial Sequence
  synthetic circulating small noncoding RNA (sncRNA) 5' transfer RNA (tRNA) half
caccacgctctaaccaactgagctaaccggcc

SEQ ID NO: 730 - DNA, 26 bp, Artificial Sequence
  synthetic circulating small noncoding RNA (sncRNA) 5' transfer RNA (tRNA) half
gccttagaccgctcggccacgctacc

SEQ ID NO: 731 - DNA, 17 bp, Artificial Sequence
  synthetic circulating small noncoding RNA (sncRNA) 5' transfer RNA (tRNA) half
cactgaaccaccaatgc

SEQ ID NO: 732 - DNA, 24 bp, Artificial Sequence
  synthetic circulating small noncoding RNA (sncRNA) 5' transfer RNA (tRNA) half
cgcagagtactaaccactatacga

SEQ ID NO: 733 - DNA, 30 bp, Artificial Sequence
  synthetic circulating small noncoding RNA (sncRNA) 5' transfer RNA (tRNA) half
agtctgatgctctaccgactgagctatccg

SEQ ID NO: 734 - DNA, 35 bp, Artificial Sequence
  synthetic circulating small noncoding RNA (sncRNA) 5' transfer RNA (tRNA) half
tgaggcgaacgtgataaccactacactacggaaac

SEQ ID NO: 735 - DNA, 20 bp, Artificial Sequence
  synthetic circulating small noncoding RNA (sncRNA) 5' transfer RNA (tRNA) half
tctgatgctctaccgactga

SEQ ID NO: 736 - DNA, 19 bp, Artificial Sequence
  synthetic circulating small noncoding RNA (sncRNA) 5' transfer RNA (tRNA) half
accactgaaccaccaatgc

SEQ ID NO: 737 - DNA, 32 bp, Artificial Sequence
  synthetic circulating small noncoding RNA (sncRNA) 5' transfer RNA (tRNA) half
ggcgagaattctaccactgaaccaccaatgct

SEQ ID NO: 738 - DNA, 34 bp, Artificial Sequence
  synthetic circulating small noncoding RNA (sncRNA) 5' transfer RNA (tRNA) half
gccgtgactcggattcgaaccgaggttgctgcgg

SEQ ID NO: 739 - DNA, 36 bp, Artificial Sequence
  synthetic circulating small noncoding RNA (sncRNA) 5' transfer RNA (tRNA) half
gcgagaggtcccgggttcaaatcccggacgagcccc

SEQ ID NO: 740 - DNA, 13 bp, Artificial Sequence
  synthetic circulating small noncoding RNA (sncRNA) 5' transfer RNA (tRNA) half
gtagtcgtggccg

SEQ ID NO: 741 - DNA, 19 bp, Artificial Sequence
  synthetic circulating small noncoding RNA (sncRNA) 5' transfer RNA (tRNA) half
gcccagcacgcttccgctg

SEQ ID NO: 742 - DNA, 38 bp, Artificial Sequence
  synthetic circulating small noncoding RNA (sncRNA) 5' transfer RNA (tRNA) half
ggcaccgctgggattcgaacccaggatctcctgtttac

SEQ ID NO: 743 - DNA, 13 bp, Artificial Sequence
  synthetic circulating small noncoding RNA (sncRNA) 5' transfer RNA (tRNA) half
gccgaatcctaac

SEQ ID NO: 744 - DNA, 31 bp, Artificial Sequence
  synthetic circulating small noncoding RNA (sncRNA) 5' transfer RNA (tRNA) half
ggggatgtagctcagtggtagagcgcatgct

SEQ ID NO: 745 - DNA, 15 bp, Artificial Sequence
  synthetic circulating small noncoding RNA (sncRNA) 5' transfer RNA (tRNA) half
gtagaattctcgcct

SEQ ID NO: 746 - DNA, 26 bp, Artificial Sequence
  synthetic circulating small noncoding RNA (sncRNA) 5' transfer RNA (tRNA) half
agtctgatgctctaccgactgagcta

SEQ ID NO: 747 - DNA, 23 bp, Artificial Sequence
  synthetic circulating small noncoding RNA (sncRNA) 5' transfer RNA (tRNA) half
acgcagagtactaaccactatac

SEQ ID NO: 748 - DNA, 30 bp, Artificial Sequence
  synthetic circulating small noncoding RNA (sncRNA) 5' transfer RNA (tRNA) half
gcgaacgtgataaccactacactacggaaa

SEQ ID NO: 749 - DNA, 37 bp, Artificial Sequence
  synthetic circulating small noncoding RNA (sncRNA) 5' transfer RNA (tRNA) half
tccgactccgccgggactcgaacccggaacctttgaa

SEQ ID NO: 750 - DNA, 33 bp, Artificial Sequence
  synthetic circulating small noncoding RNA (sncRNA) 5' transfer RNA (tRNA) half
agtccagagtgctaaccattacaccatgggacc

SEQ ID NO: 751 - DNA, 36 bp, Artificial Sequence
  synthetic circulating small noncoding RNA (sncRNA) 5' transfer RNA (tRNA) half
gtctgatgctctaccgactgagctatccgggctctt

SEQ ID NO: 752 - DNA, 37 bp, Artificial Sequence
  synthetic circulating small noncoding RNA (sncRNA) 5' transfer RNA (tRNA) half
tagtggttaggattcggcgctctcaccgccgcggccc

SEQ ID NO: 753 - DNA, 35 bp, Artificial Sequence
  synthetic circulating small noncoding RNA (sncRNA) 5' transfer RNA (tRNA) half
tccctggtggtctagtggttaggattcggcgctct

SEQ ID NO: 754 - DNA, 35 bp, Artificial Sequence
  synthetic circulating small noncoding RNA (sncRNA) 5' transfer RNA (tRNA) half
ggttccatggtgtaatggttagcactctggactct

SEQ ID NO: 755 - DNA, 21 bp, Artificial Sequence
  synthetic circulating small noncoding RNA (sncRNA) 5' transfer RNA (tRNA) half
gtcccatgctctaccgactga

SEQ ID NO: 756 - DNA, 12 bp, Artificial Sequence
  synthetic circulating small noncoding RNA (sncRNA) 5' transfer RNA (tRNA) half
ccgggcggaaac

SEQ ID NO: 757 - DNA, 31 bp, Artificial Sequence
  synthetic circulating small noncoding RNA (sncRNA) 5' transfer RNA (tRNA) half
ggcattggtggttcagtggtagaattctcgc

SEQ ID NO: 758 - DNA, 15 bp, Artificial Sequence
  synthetic circulating small noncoding RNA (sncRNA) 5' transfer RNA (tRNA) half
gcccccgaagagact

SEQ ID NO: 759 - DNA, 31 bp, Artificial Sequence
  synthetic circulating small noncoding RNA (sncRNA) 5' transfer RNA (tRNA) half
ccctggtggtctagtggttaggattcggcgc

SEQ ID NO: 760 - DNA, 34 bp, Artificial Sequence
  synthetic circulating small noncoding RNA (sncRNA) 5' transfer RNA (tRNA) half
cgcagaaggtcctgggttcgagccccagtggaac

SEQ ID NO: 761 - DNA, 18 bp, Artificial Sequence
  synthetic circulating small noncoding RNA (sncRNA) 5' transfer RNA (tRNA) half
atcctgccgactacgtca

SEQ ID NO: 762 - DNA, 20 bp, Artificial Sequence
  synthetic circulating small noncoding RNA (sncRNA) 5' transfer RNA (tRNA) half
gcgccgaatcctaaccacta

SEQ ID NO: 763 - DNA, 28 bp, Artificial Sequence
  synthetic circulating small noncoding RNA (sncRNA) 5' transfer RNA (tRNA) half
ggcgagaattctaccactgaaccaccaa

SEQ ID NO: 764 - DNA, 38 bp, Artificial Sequence
  synthetic circulating small noncoding RNA (sncRNA) 5' transfer RNA (tRNA) half
gtaaacaggagatcctgggttcgaatcccagcggggcc

SEQ ID NO: 765 - DNA, 28 bp, Artificial Sequence
  synthetic circulating small noncoding RNA (sncRNA) 5' transfer RNA (tRNA) half
gtcccatgctctaccgactgagctagcc

SEQ ID NO: 766 - DNA, 29 bp, Artificial Sequence
  synthetic circulating small noncoding RNA (sncRNA) 5' transfer RNA (tRNA) half
ggctcgttggtctaggggtatgattctcg

SEQ ID NO: 767 - DNA, 28 bp, Artificial Sequence
  synthetic circulating small noncoding RNA (sncRNA) 5' transfer RNA (tRNA) half
gtctgatgctctaccgactgagctatcc

SEQ ID NO: 768 - DNA, 17 bp, Artificial Sequence
  synthetic circulating small noncoding RNA (sncRNA) 5' transfer RNA (tRNA) half
agtggtagaattctcgc

SEQ ID NO: 769 - DNA, 31 bp, Artificial Sequence
  synthetic circulating small noncoding RNA (sncRNA) 5' transfer RNA (tRNA) half
gcgagaattctaccactgaaccaccaatgcg

SEQ ID NO: 770 - DNA, 19 bp, Artificial Sequence
  synthetic circulating small noncoding RNA (sncRNA) 5' transfer RNA (tRNA) half
actcggatcgctggattca

SEQ ID NO: 771 - DNA, 15 bp, Artificial Sequence
  synthetic circulating small noncoding RNA (sncRNA) 5' transfer RNA (tRNA) half
tcccccgaccgctcc

SEQ ID NO: 772 - DNA, 27 bp, Artificial Sequence
  synthetic circulating small noncoding RNA (sncRNA) 5' transfer RNA (tRNA) half
gtcccatgctctaccgactgagctagc

SEQ ID NO: 773 - DNA, 24 bp, Artificial Sequence
  synthetic circulating small noncoding RNA (sncRNA) 5' transfer RNA (tRNA) half
agtctcatgctctaccgactgagc

SEQ ID NO: 774 - DNA, 17 bp, Artificial Sequence
  synthetic circulating small noncoding RNA (sncRNA) 5' transfer RNA (tRNA) half
tggagggggcacccgga

SEQ ID NO: 775 - DNA, 22 bp, Artificial Sequence
  synthetic circulating small noncoding RNA (sncRNA) 5' transfer RNA (tRNA) half
ttgtgtcagaagtgggattcga

SEQ ID NO: 776 - DNA, 23 bp, Artificial Sequence
  synthetic circulating small noncoding RNA (sncRNA) 5' transfer RNA (tRNA) half
tggttcagtggtagaattctcgc

SEQ ID NO: 777 - DNA, 17 bp, Artificial Sequence
  synthetic circulating small noncoding RNA (sncRNA) 5' transfer RNA (tRNA) half
cgccgaatcctaaccac

SEQ ID NO: 778 - DNA, 30 bp, Artificial Sequence
  synthetic circulating small noncoding RNA (sncRNA) 5' transfer RNA (tRNA) half
ccggatagctcagtcggtagagcatcagac

SEQ ID NO: 779 - DNA, 15 bp, Artificial Sequence
  synthetic circulating small noncoding RNA (sncRNA) 5' transfer RNA (tRNA) half
ggttaggattcggcg

SEQ ID NO: 780 - DNA, 13 bp, Artificial Sequence
  synthetic circulating small noncoding RNA (sncRNA) 5' transfer RNA (tRNA) half
gccggggatcgaa

SEQ ID NO: 781 - DNA, 24 bp, Artificial Sequence
  synthetic circulating small noncoding RNA (sncRNA) 5' transfer RNA (tRNA) half
gtgtagtggttatcacgttcgcct

SEQ ID NO: 782 - DNA, 16 bp, Artificial Sequence
  synthetic circulating small noncoding RNA (sncRNA) 5' transfer RNA (tRNA) half
tggttagtactctgcg

SEQ ID NO: 783 - DNA, 29 bp, Artificial Sequence
  synthetic circulating small noncoding RNA (sncRNA) 5' transfer RNA (tRNA) half
cgtgatcgtatagtggttagtactctgcg

SEQ ID NO: 784 - DNA, 34 bp, Artificial Sequence
  synthetic circulating small noncoding RNA (sncRNA) 5' transfer RNA (tRNA) half
gcattggtggttcagtggtagaattctcgcctgc

SEQ ID NO: 785 - DNA, 24 bp, Artificial Sequence
  synthetic circulating small noncoding RNA (sncRNA) 5' transfer RNA (tRNA) half
gtggttcagtggtagaattctcgc

SEQ ID NO: 786 - DNA, 31 bp, Artificial Sequence
  synthetic circulating small noncoding RNA (sncRNA) 5' transfer RNA (tRNA) half
cccggatagctcagtcggtagagcatcagac

SEQ ID NO: 787 - DNA, 27 bp, Artificial Sequence
  synthetic circulating small noncoding RNA (sncRNA) 5' transfer RNA (tRNA) half
aatgctctaccactgagctataccccc

SEQ ID NO: 788 - DNA, 36 bp, Artificial Sequence
  synthetic circulating small noncoding RNA (sncRNA) 5' transfer RNA (tRNA) half
cctgccgtgactcggattcgaaccgaggttgctgcg

SEQ ID NO: 789 - DNA, 29 bp, Artificial Sequence
  synthetic circulating small noncoding RNA (sncRNA) 5' transfer RNA (tRNA) half
cgccgaatcctaaccactagaccaccagg

SEQ ID NO: 790 - DNA, 23 bp, Artificial Sequence
  synthetic circulating small noncoding RNA (sncRNA) 5' transfer RNA (tRNA) half
cttaaccactcggccacgactac

SEQ ID NO: 791 - DNA, 30 bp, Artificial Sequence
  synthetic circulating small noncoding RNA (sncRNA) 5' transfer RNA (tRNA) half
tccctggtagtctagtggttaggattcggt

SEQ ID NO: 792 - DNA, 23 bp, Artificial Sequence
  synthetic circulating small noncoding RNA (sncRNA) 5' transfer RNA (tRNA) half
tctaccatttgagctaatccccc

SEQ ID NO: 793 - DNA, 32 bp, Artificial Sequence
  synthetic circulating small noncoding RNA (sncRNA) 5' transfer RNA (tRNA) half
gggccgcggcggtgagagcgccgaatcctaac

SEQ ID NO: 794 - DNA, 21 bp, Artificial Sequence
  synthetic circulating small noncoding RNA (sncRNA) 5' transfer RNA (tRNA) half
cagtcggtagagcatcagact

SEQ ID NO: 795 - DNA, 26 bp, Artificial Sequence
  synthetic circulating small noncoding RNA (sncRNA) 5' transfer RNA (tRNA) half
tccctggtggtctagtggttaggatt

SEQ ID NO: 796 - DNA, 40 bp, Artificial Sequence
  synthetic circulating small noncoding RNA (sncRNA) 5' transfer RNA (tRNA) half
ccggctagctcagtcggtagagcatgagactcttaatctc

SEQ ID NO: 797 - DNA, 22 bp, Artificial Sequence
  synthetic circulating small noncoding RNA (sncRNA) 5' transfer RNA (tRNA) half
acttgaaccctggaccctcaga

SEQ ID NO: 798 - DNA, 21 bp, Artificial Sequence
  synthetic circulating small noncoding RNA (sncRNA) 5' transfer RNA (tRNA) half
cgccgaatcctaaccactaga

SEQ ID NO: 799 - DNA, 29 bp, Artificial Sequence
  synthetic circulating small noncoding RNA (sncRNA) 5' transfer RNA (tRNA) half
acgcagagtactaaccactatacgatcac

SEQ ID NO: 800 - DNA, 25 bp, Artificial Sequence
  synthetic circulating small noncoding RNA (sncRNA) 5' transfer RNA (tRNA) half
agctcagtcggtagagcatgagact

SEQ ID NO: 801 - DNA, 34 bp, Artificial Sequence
  synthetic circulating small noncoding RNA (sncRNA) 5' transfer RNA (tRNA) half
ccgagaggtcccgggttcaaatcccggacgagcc

SEQ ID NO: 802 - DNA, 26 bp, Artificial Sequence
  synthetic circulating small noncoding RNA (sncRNA) 5' transfer RNA (tRNA) half
agtctcatgctctaccgactgagcta

SEQ ID NO: 803 - DNA, 26 bp, Artificial Sequence
  synthetic circulating small noncoding RNA (sncRNA) 5' transfer RNA (tRNA) half
acgcagagtactaaccactatacgat

SEQ ID NO: 804 - DNA, 19 bp, Artificial Sequence
  synthetic circulating small noncoding RNA (sncRNA) 5' transfer RNA (tRNA) half
aacgcagagtactaaccac

SEQ ID NO: 805 - DNA, 22 bp, Artificial Sequence
  synthetic circulating small noncoding RNA (sncRNA) 5' transfer RNA (tRNA) half
gccgtgactcggattcgaaccg

SEQ ID NO: 806 - DNA, 38 bp, Artificial Sequence
  synthetic circulating small noncoding RNA (sncRNA) 5' transfer RNA (tRNA) half
gcttccctgaccgggaatcgaacccgggccgcggcggt

SEQ ID NO: 807 - DNA, 34 bp, Artificial Sequence
  synthetic circulating small noncoding RNA (sncRNA) 5' transfer RNA (tRNA) half
caggagatcctgggttcgaatcccagcggggcct

SEQ ID NO: 808 - DNA, 34 bp, Artificial Sequence
  synthetic circulating small noncoding RNA (sncRNA) 5' transfer RNA (tRNA) half
gcccgaacagggacttgaaccctggaccctcaga

SEQ ID NO: 809 - DNA, 18 bp, Artificial Sequence
  synthetic circulating small noncoding RNA (sncRNA) 5' transfer RNA (tRNA) half
ccattgaaccaccaatgc

SEQ ID NO: 810 - DNA, 11 bp, Artificial Sequence
  synthetic circulating small noncoding RNA (sncRNA) 5' transfer RNA (tRNA) half
gccgggaatcg

SEQ ID NO: 811 - DNA, 28 bp, Artificial Sequence
  synthetic circulating small noncoding RNA (sncRNA) 5' transfer RNA (tRNA) half
ccggctagctcagtcggtagagcatgag

SEQ ID NO: 812 - DNA, 37 bp, Artificial Sequence
  synthetic circulating small noncoding RNA (sncRNA) 5' transfer RNA (tRNA) half
tcctgccgtgactcggattcgaaccgaggttgctgcg

SEQ ID NO: 813 - DNA, 25 bp, Artificial Sequence
  synthetic circulating small noncoding RNA (sncRNA) 5' transfer RNA (tRNA) half
gtggagatgccggggatcgaacccg

SEQ ID NO: 814 - DNA, 11 bp, Artificial Sequence
  synthetic circulating small noncoding RNA (sncRNA) 5' transfer RNA (tRNA) half
gcccggtttcg

SEQ ID NO: 815 - DNA, 24 bp, Artificial Sequence
  synthetic circulating small noncoding RNA (sncRNA) 5' transfer RNA (tRNA) half
aggcgagaattctaccactgaacc

SEQ ID NO: 816 - DNA, 20 bp, Artificial Sequence
  synthetic circulating small noncoding RNA (sncRNA) 5' transfer RNA (tRNA) half
ctgaatccagcgatccgagt

SEQ ID NO: 817 - DNA, 22 bp, Artificial Sequence
  synthetic circulating small noncoding RNA (sncRNA) 5' transfer RNA (tRNA) half
cgccgaatcctaaccactagac

SEQ ID NO: 818 - DNA, 30 bp, Artificial Sequence
  synthetic circulating small noncoding RNA (sncRNA) 5' transfer RNA (tRNA) half
tagcgcccgaacagggacttgaaccctgga

SEQ ID NO: 819 - DNA, 35 bp, Artificial Sequence
  synthetic circulating small noncoding RNA (sncRNA) 5' transfer RNA (tRNA) half
tgttcccataccgggagtcgaacccgggccgcctg

SEQ ID NO: 820 - DNA, 33 bp, Artificial Sequence
  synthetic circulating small noncoding RNA (sncRNA) 5' transfer RNA (tRNA) half
cagaaggtcctgggttcgagccccagtggaacc

SEQ ID NO: 821 - DNA, 33 bp, Artificial Sequence
  synthetic circulating small noncoding RNA (sncRNA) 5' transfer RNA (tRNA) half
ggttccatagtgtagcggttatcacgtctgctt

SEQ ID NO: 822 - DNA, 21 bp, Artificial Sequence
  synthetic circulating small noncoding RNA (sncRNA) 5' transfer RNA (tRNA) half
gaactcggatcgctggattca

SEQ ID NO: 823 - DNA, 15 bp, Artificial Sequence
  synthetic circulating small noncoding RNA (sncRNA) 5' transfer RNA (tRNA) half
ccgactccgccggga

SEQ ID NO: 824 - DNA, 17 bp, Artificial Sequence
  synthetic circulating small noncoding RNA (sncRNA) 5' transfer RNA (tRNA) half
gtggtagaattctcgcc

SEQ ID NO: 825 - DNA, 13 bp, Artificial Sequence
  synthetic circulating small noncoding RNA (sncRNA) 5' transfer RNA (tRNA) half
gactccgccggga

SEQ ID NO: 826 - DNA, 28 bp, Artificial Sequence
  synthetic circulating small noncoding RNA (sncRNA) 5' transfer RNA (tRNA) half
caggaatcctaaccgctagaccatatgg

SEQ ID NO: 827 - DNA, 14 bp, Artificial Sequence
  synthetic circulating small noncoding RNA (sncRNA) 5' transfer RNA (tRNA) half
aaccgggcggaaac

SEQ ID NO: 828 - DNA, 17 bp, Artificial Sequence
  synthetic circulating small noncoding RNA (sncRNA) 5' transfer RNA (tRNA) half
gagaatcatacccctag

SEQ ID NO: 829 - DNA, 30 bp, Artificial Sequence
  synthetic circulating small noncoding RNA (sncRNA) 5' transfer RNA (tRNA) half
agcagagtggcgcagcggaagcgtgctggg

SEQ ID NO: 830 - DNA, 20 bp, Artificial Sequence
  synthetic circulating small noncoding RNA (sncRNA) 5' transfer RNA (tRNA) half
gtgcattggccgggaatcga

SEQ ID NO: 831 - DNA, 25 bp, Artificial Sequence
  synthetic circulating small noncoding RNA (sncRNA) 5' transfer RNA (tRNA) half
aggcgagaattctaccactgaacca

SEQ ID NO: 832 - DNA, 32 bp, Artificial Sequence
  synthetic circulating small noncoding RNA (sncRNA) 5' transfer RNA (tRNA) half
accgaccacgaagggactcgaaccctcaatct

SEQ ID NO: 833 - DNA, 30 bp, Artificial Sequence
  synthetic circulating small noncoding RNA (sncRNA) 5' transfer RNA (tRNA) half
gcagagtactaaccactatacgatctcggc

SEQ ID NO: 834 - DNA, 21 bp, Artificial Sequence
  synthetic circulating small noncoding RNA (sncRNA) 5' transfer RNA (tRNA) half
aaatggtggagatgccgggga

SEQ ID NO: 835 - DNA, 20 bp, Artificial Sequence
  synthetic circulating small noncoding RNA (sncRNA) 5' transfer RNA (tRNA) half
gaccgctcggccacgctacc

SEQ ID NO: 836 - DNA, 35 bp, Artificial Sequence
  synthetic circulating small noncoding RNA (sncRNA) 5' transfer RNA (tRNA) half
gggctcgtccgggatttgaacccgggacctctcgc

SEQ ID NO: 837 - DNA, 31 bp, Artificial Sequence
  synthetic circulating small noncoding RNA (sncRNA) 5' transfer RNA (tRNA) half
ttgcgacccgggttcgattcccgggcggcgc

SEQ ID NO: 838 - DNA, 35 bp, Artificial Sequence
  synthetic circulating small noncoding RNA (sncRNA) 5' transfer RNA (tRNA) half
gtcaggatggccgagcggtctaaggcgctgcgttc

SEQ ID NO: 839 - DNA, 36 bp, Artificial Sequence
  synthetic circulating small noncoding RNA (sncRNA) 5' transfer RNA (tRNA) half
agcgactctggtgggactcgaacccacaacctttga

SEQ ID NO: 840 - DNA, 15 bp, Artificial Sequence
  synthetic circulating small noncoding RNA (sncRNA) 5' transfer RNA (tRNA) half
gttaggattcggcgc

SEQ ID NO: 841 - DNA, 31 bp, Artificial Sequence
  synthetic circulating small noncoding RNA (sncRNA) 5' transfer RNA (tRNA) half
cccggctagctcagtcggtagagcatgagac

SEQ ID NO: 842 - DNA, 37 bp, Artificial Sequence
  synthetic circulating small noncoding RNA (sncRNA) 5' transfer RNA (tRNA) half
gctgaccccgacgtgatttgaacacgcaaccttctga

SEQ ID NO: 843 - DNA, 22 bp, Artificial Sequence
  synthetic circulating small noncoding RNA (sncRNA) 5' transfer RNA (tRNA) half
gcagagtactaaccactatacg

SEQ ID NO: 844 - DNA, 32 bp, Artificial Sequence
  synthetic circulating small noncoding RNA (sncRNA) 5' transfer RNA (tRNA) half
gcattggccgggaatcgaacccgggcctcccg

SEQ ID NO: 845 - DNA, 21 bp, Artificial Sequence
  synthetic circulating small noncoding RNA (sncRNA) 5' transfer RNA (tRNA) half
gcgccgaatcctaaccactag

SEQ ID NO: 846 - DNA, 27 bp, Artificial Sequence
  synthetic circulating small noncoding RNA (sncRNA) 5' transfer RNA (tRNA) half
gggccgcggcggtgagagcgccgaatc

SEQ ID NO: 847 - DNA, 26 bp, Artificial Sequence
  synthetic circulating small noncoding RNA (sncRNA) 5' transfer RNA (tRNA) half
ggtggttcagtggtagaattctcgcc

SEQ ID NO: 848 - DNA, 33 bp, Artificial Sequence
  synthetic circulating small noncoding RNA (sncRNA) 5' transfer RNA (tRNA) half
cagtcaaatgctctaccactgagctataccccc

SEQ ID NO: 849 - DNA, 18 bp, Artificial Sequence
  synthetic circulating small noncoding RNA (sncRNA) 5' transfer RNA (tRNA) half
gcgccgaatcctaaccac

SEQ ID NO: 850 - DNA, 15 bp, Artificial Sequence
  synthetic circulating small noncoding RNA (sncRNA) 5' transfer RNA (tRNA) half
cgagccagccaggag

SEQ ID NO: 851 - DNA, 27 bp, Artificial Sequence
  synthetic circulating small noncoding RNA (sncRNA) 5' transfer RNA (tRNA) half
tagcgcccgaacagggacttgaaccct

SEQ ID NO: 852 - DNA, 19 bp, Artificial Sequence
  synthetic circulating small noncoding RNA (sncRNA) 5' transfer RNA (tRNA) half
tctcatgctctaccgactg

SEQ ID NO: 853 - DNA, 32 bp, Artificial Sequence
  synthetic circulating small noncoding RNA (sncRNA) 5' transfer RNA (tRNA) half
cgccgcggcccgggttcgattcccggtcaggg

SEQ ID NO: 854 - DNA, 21 bp, Artificial Sequence
  synthetic circulating small noncoding RNA (sncRNA) 5' transfer RNA (tRNA) half
gcagagtactaaccactatac

SEQ ID NO: 855 - DNA, 32 bp, Artificial Sequence
  synthetic circulating small noncoding RNA (sncRNA) 5' transfer RNA (tRNA) half
agtctcatgctctaccgactgagctagccggg

SEQ ID NO: 856 - DNA, 13 bp, Artificial Sequence
  synthetic circulating small noncoding RNA (sncRNA) 5' transfer RNA (tRNA) half
gggggattagctc

SEQ ID NO: 857 - DNA, 19 bp, Artificial Sequence
  synthetic circulating small noncoding RNA (sncRNA) 5' transfer RNA (tRNA) half
agtctcatgctctaccgac

SEQ ID NO: 858 - DNA, 14 bp, Artificial Sequence
  synthetic circulating small noncoding RNA (sncRNA) 5' transfer RNA (tRNA) half
agcgagaatcatac

SEQ ID NO: 859 - DNA, 26 bp, Artificial Sequence
  synthetic circulating small noncoding RNA (sncRNA) 5' transfer RNA (tRNA) half
gtctccccgtcggggaatcgaacccc

SEQ ID NO: 860 - DNA, 15 bp, Artificial Sequence
  synthetic circulating small noncoding RNA (sncRNA) 5' transfer RNA (tRNA) half
ctagaccaccaggga

SEQ ID NO: 861 - DNA, 37 bp, Artificial Sequence
  synthetic circulating small noncoding RNA (sncRNA) 5' transfer RNA (tRNA) half
gtccctgggtgggctcgaaccaccaacctttcggtta

SEQ ID NO: 862 - DNA, 20 bp, Artificial Sequence
  synthetic circulating small noncoding RNA (sncRNA) 5' transfer RNA (tRNA) half
agtctcatgctctaccgact

SEQ ID NO: 863 - DNA, 15 bp, Artificial Sequence
  synthetic circulating small noncoding RNA (sncRNA) 5' transfer RNA (tRNA) half
tgtttccgcccggtt

SEQ ID NO: 864 - DNA, 19 bp, Artificial Sequence
  synthetic circulating small noncoding RNA (sncRNA) 5' transfer RNA (tRNA) half
gtggcaggcgagaattcta

SEQ ID NO: 865 - DNA, 34 bp, Artificial Sequence
  synthetic circulating small noncoding RNA (sncRNA) 5' transfer RNA (tRNA) half
agcaccacgctctaaccaactgagctaaccggcc

SEQ ID NO: 866 - DNA, 14 bp, Artificial Sequence
  synthetic circulating small noncoding RNA (sncRNA) 5' transfer RNA (tRNA) half
cccggtatgggaac

SEQ ID NO: 867 - DNA, 35 bp, Artificial Sequence
  synthetic circulating small noncoding RNA (sncRNA) 5' transfer RNA (tRNA) half
gaccccgacgtgacttgaacacgcaaccttctgat

SEQ ID NO: 868 - DNA, 25 bp, Artificial Sequence
  synthetic circulating small noncoding RNA (sncRNA) 5' transfer RNA (tRNA) half
tctccccgtcggggaatcgaacccc

SEQ ID NO: 869 - DNA, 31 bp, Artificial Sequence
  synthetic circulating small noncoding RNA (sncRNA) 5' transfer RNA (tRNA) half
aggcgagaattctaccactgaaccaccaatg

SEQ ID NO: 870 - DNA, 31 bp, Artificial Sequence
  synthetic circulating small noncoding RNA (sncRNA) 5' transfer RNA (tRNA) half
gggggtgtagctcagtggtagagcgcgtgct

SEQ ID NO: 871 - DNA, 16 bp, Artificial Sequence
  synthetic circulating small noncoding RNA (sncRNA) 5' transfer RNA (tRNA) half
acgtgtttccgcccgg

SEQ ID NO: 872 - DNA, 29 bp, Artificial Sequence
  synthetic circulating small noncoding RNA (sncRNA) 5' transfer RNA (tRNA) half
ccggctagctcagtcggtagagcatgaga

SEQ ID NO: 873 - DNA, 15 bp, Artificial Sequence
  synthetic circulating small noncoding RNA (sncRNA) 5' transfer RNA (tRNA) half
tcccggtgtgggaac

SEQ ID NO: 874 - DNA, 13 bp, Artificial Sequence
  synthetic circulating small noncoding RNA (sncRNA) 5' transfer RNA (tRNA) half
ttcgattcccggc

SEQ ID NO: 875 - DNA, 36 bp, Artificial Sequence
  synthetic circulating small noncoding RNA (sncRNA) 5' transfer RNA (tRNA) half
cgcagcaacctcggttcgaatccgagtcacggcatt

SEQ ID NO: 876 - DNA, 31 bp, Artificial Sequence
  synthetic circulating small noncoding RNA (sncRNA) 5' transfer RNA (tRNA) half
gacccagtggcctaatggataaggcatcagc

SEQ ID NO: 877 - DNA, 13 bp, Artificial Sequence
  synthetic circulating small noncoding RNA (sncRNA) 5' transfer RNA (tRNA) half
agaattctcgcct

SEQ ID NO: 878 - DNA, 35 bp, Artificial Sequence
  synthetic circulating small noncoding RNA (sncRNA) 5' transfer RNA (tRNA) half
attcttgcgacccgggttcgattcccgggcggcgc

SEQ ID NO: 879 - DNA, 18 bp, Artificial Sequence
  synthetic circulating small noncoding RNA (sncRNA) 5' transfer RNA (tRNA) half
atggttagcactctggac

SEQ ID NO: 880 - DNA, 19 bp, Artificial Sequence
  synthetic circulating small noncoding RNA (sncRNA) 5' transfer RNA (tRNA) half
agcgagaatcataccccta

SEQ ID NO: 881 - DNA, 17 bp, Artificial Sequence
  synthetic circulating small noncoding RNA (sncRNA) 5' transfer RNA (tRNA) half
cgtgtttccgcccggtt

SEQ ID NO: 882 - DNA, 19 bp, Artificial Sequence
  synthetic circulating small noncoding RNA (sncRNA) 5' transfer RNA (tRNA) half
tagtggttaggattcggcg

SEQ ID NO: 883 - DNA, 16 bp, Artificial Sequence
  synthetic circulating small noncoding RNA (sncRNA) 5' transfer RNA (tRNA) half
agcgagaatcataccc

SEQ ID NO: 884 - DNA, 12 bp, Artificial Sequence
  synthetic circulating small noncoding RNA (sncRNA) 5' transfer RNA (tRNA) half
gcccggtttcga

SEQ ID NO: 885 - DNA, 34 bp, Artificial Sequence
  synthetic circulating small noncoding RNA (sncRNA) 5' transfer RNA (tRNA) half
aatccagcgccttagaccgctcggccacgctacc

SEQ ID NO: 886 - DNA, 25 bp, Artificial Sequence
  synthetic circulating small noncoding RNA (sncRNA) 5' transfer RNA (tRNA) half
cgggttcgactcccggtgtgggaac

SEQ ID NO: 887 - DNA, 29 bp, Artificial Sequence
  synthetic circulating small noncoding RNA (sncRNA) 5' transfer RNA (tRNA) half
aggcgagaattctaccactgaaccaccaa

SEQ ID NO: 888 - DNA, 33 bp, Artificial Sequence
  synthetic circulating small noncoding RNA (sncRNA) 5' transfer RNA (tRNA) half
tggtagaattctcgcctgccacgcgggaggccc

SEQ ID NO: 889 - DNA, 28 bp, Artificial Sequence
  synthetic circulating small noncoding RNA (sncRNA) 5' transfer RNA (tRNA) half
gtctcatgctctaccgactgagctagcc

SEQ ID NO: 890 - DNA, 25 bp, Artificial Sequence
  synthetic circulating small noncoding RNA (sncRNA) 5' transfer RNA (tRNA) half
aattctaccactgaaccaccaatgc

SEQ ID NO: 891 - DNA, 14 bp, Artificial Sequence
  synthetic circulating small noncoding RNA (sncRNA) 5' transfer RNA (tRNA) half
ggtatgattctcgc

SEQ ID NO: 892 - DNA, 34 bp, Artificial Sequence
  synthetic circulating small noncoding RNA (sncRNA) 5' transfer RNA (tRNA) half
gttcccacaccgggagtcgaacccgggccgcctg

SEQ ID NO: 893 - DNA, 30 bp, Artificial Sequence
  synthetic circulating small noncoding RNA (sncRNA) 5' transfer RNA (tRNA) half
gcccggatagctcagtcggtagagcatcag

SEQ ID NO: 894 - DNA, 32 bp, Artificial Sequence
  synthetic circulating small noncoding RNA (sncRNA) 5' transfer RNA (tRNA) half
gagtcccatgctctaccgactgagctagccgg

SEQ ID NO: 895 - DNA, 20 bp, Artificial Sequence
  synthetic circulating small noncoding RNA (sncRNA) 5' transfer RNA (tRNA) half
ttcagtggtagaattctcgc

SEQ ID NO: 896 - DNA, 14 bp, Artificial Sequence
  synthetic circulating small noncoding RNA (sncRNA) 5' transfer RNA (tRNA) half
cgccgaatcctaac

SEQ ID NO: 897 - DNA, 26 bp, Artificial Sequence
  synthetic circulating small noncoding RNA (sncRNA) 5' transfer RNA (tRNA) half
ggattaagagtcccatgctctaccga

SEQ ID NO: 898 - DNA, 36 bp, Artificial Sequence
  synthetic circulating small noncoding RNA (sncRNA) 5' transfer RNA (tRNA) half
catgccgtgactcggattcgaaccgaggttgctgcg

SEQ ID NO: 899 - DNA, 31 bp, Artificial Sequence
  synthetic circulating small noncoding RNA (sncRNA) 5' transfer RNA (tRNA) half
gcagagtactaaccactatacgatcacggcg

SEQ ID NO: 900 - DNA, 35 bp, Artificial Sequence
  synthetic circulating small noncoding RNA (sncRNA) 5' transfer RNA (tRNA) half
cgcccgaacagggacttgaaccctggaccctcaga

SEQ ID NO: 901 - DNA, 22 bp, Artificial Sequence
  synthetic circulating small noncoding RNA (sncRNA) 5' transfer RNA (tRNA) half
gcgaacgtgataaccactacac

SEQ ID NO: 902 - DNA, 16 bp, Artificial Sequence
  synthetic circulating small noncoding RNA (sncRNA) 5' transfer RNA (tRNA) half
cttccctgaccgggaa

SEQ ID NO: 903 - DNA, 20 bp, Artificial Sequence
  synthetic circulating small noncoding RNA (sncRNA) 5' transfer RNA (tRNA) half
gcagcggaagcgtgctgggc

SEQ ID NO: 904 - DNA, 34 bp, Artificial Sequence
  synthetic circulating small noncoding RNA (sncRNA) 5' transfer RNA (tRNA) half
gagccagccaggagtcgaacctagaatcttctga

SEQ ID NO: 905 - DNA, 32 bp, Artificial Sequence
  synthetic circulating small noncoding RNA (sncRNA) 5' transfer RNA (tRNA) half
gtccatcgccttaaccactcggccacgactac

SEQ ID NO: 906 - DNA, 21 bp, Artificial Sequence
  synthetic circulating small noncoding RNA (sncRNA) 5' transfer RNA (tRNA) half
gccgaatcctaaccactagac

SEQ ID NO: 907 - DNA, 12 bp, Artificial Sequence
  synthetic circulating small noncoding RNA (sncRNA) 5' transfer RNA (tRNA) half
gccgggaatcga

SEQ ID NO: 908 - DNA, 34 bp, Artificial Sequence
  synthetic circulating small noncoding RNA (sncRNA) 5' transfer RNA (tRNA) half
gacccagtggcctaatggataaggcatcagcctc

SEQ ID NO: 909 - DNA, 32 bp, Artificial Sequence
  synthetic circulating small noncoding RNA (sncRNA) 5' transfer RNA (tRNA) half
aggcgaatgtgataaccactacactacggaaa

SEQ ID NO: 910 - DNA, 14 bp, Artificial Sequence
  synthetic circulating small noncoding RNA (sncRNA) 5' transfer RNA (tRNA) half
gccgtgactcggat

SEQ ID NO: 911 - DNA, 33 bp, Artificial Sequence
  synthetic circulating small noncoding RNA (sncRNA) 5' transfer RNA (tRNA) half
ggctcgttggtctaggggtatgattctcgcttt

SEQ ID NO: 912 - DNA, 23 bp, Artificial Sequence
  synthetic circulating small noncoding RNA (sncRNA) 5' transfer RNA (tRNA) half
ggcgagaattctaccactgaacc

SEQ ID NO: 913 - DNA, 38 bp, Artificial Sequence
  synthetic circulating small noncoding RNA (sncRNA) 5' transfer RNA (tRNA) half
agtgcattggccgggaatcgaacccgggcctcccgcgt

SEQ ID NO: 914 - DNA, 22 bp, Artificial Sequence
  synthetic circulating small noncoding RNA (sncRNA) 5' transfer RNA (tRNA) half
tcagtcggtagagcatcagact

SEQ ID NO: 915 - DNA, 23 bp, Artificial Sequence
  synthetic circulating small noncoding RNA (sncRNA) 5' transfer RNA (tRNA) half
accgggaatcgaacccgggccgc

SEQ ID NO: 916 - DNA, 22 bp, Artificial Sequence
  synthetic circulating small noncoding RNA (sncRNA) 5' transfer RNA (tRNA) half
tagtggttagtactctgcgttg

SEQ ID NO: 917 - DNA, 15 bp, Artificial Sequence
  synthetic circulating small noncoding RNA (sncRNA) 5' transfer RNA (tRNA) half
gcccagcacgcttcc

SEQ ID NO: 918 - DNA, 22 bp, Artificial Sequence
  synthetic circulating small noncoding RNA (sncRNA) 5' transfer RNA (tRNA) half
gggttcgactcccggtgtggga

SEQ ID NO: 919 - DNA, 33 bp, Artificial Sequence
  synthetic circulating small noncoding RNA (sncRNA) 5' transfer RNA (tRNA) half
agcgccgaatcctagccactagaccaccaggga

SEQ ID NO: 920 - DNA, 20 bp, Artificial Sequence
  synthetic circulating small noncoding RNA (sncRNA) 5' transfer RNA (tRNA) half
caacgcagagtactaaccac

SEQ ID NO: 921 - DNA, 24 bp, Artificial Sequence
  synthetic circulating small noncoding RNA (sncRNA) 5' transfer RNA (tRNA) half
gtctgatgctctaccgactgagct

SEQ ID NO: 922 - DNA, 34 bp, Artificial Sequence
  synthetic circulating small noncoding RNA (sncRNA) 5' transfer RNA (tRNA) half
tggttaggattcggcgctctcaccgccgcggccc

SEQ ID NO: 923 - DNA, 21 bp, Artificial Sequence
  synthetic circulating small noncoding RNA (sncRNA) 5' transfer RNA (tRNA) half
gcgtggcaggcgagaattcta

SEQ ID NO: 924 - DNA, 37 bp, Artificial Sequence
  synthetic circulating small noncoding RNA (sncRNA) 5' transfer RNA (tRNA) half
agcgcccgaacagggacttgaaccctggaccctcaga

SEQ ID NO: 925 - DNA, 29 bp, Artificial Sequence
  synthetic circulating small noncoding RNA (sncRNA) 5' transfer RNA (tRNA) half
cccacatggtctagcggttaggattcctg

SEQ ID NO: 926 - DNA, 17 bp, Artificial Sequence
  synthetic circulating small noncoding RNA (sncRNA) 5' transfer RNA (tRNA) half
gcgccgaatcctaacca

SEQ ID NO: 927 - DNA, 30 bp, Artificial Sequence
  synthetic circulating small noncoding RNA (sncRNA) 5' transfer RNA (tRNA) half
cgagcgtgatgaccactacactacggaaac

SEQ ID NO: 928 - DNA, 19 bp, Artificial Sequence
  synthetic circulating small noncoding RNA (sncRNA) 5' transfer RNA (tRNA) half
agtcggtagagcatcagac

SEQ ID NO: 929 - DNA, 23 bp, Artificial Sequence
  synthetic circulating small noncoding RNA (sncRNA) 5' transfer RNA (tRNA) half
gttcccacaccgggagtcgaacc

SEQ ID NO: 930 - DNA, 20 bp, Artificial Sequence
  synthetic circulating small noncoding RNA (sncRNA) 5' transfer RNA (tRNA) half
ggtagtgtggccgagcggtc

SEQ ID NO: 931 - DNA, 30 bp, Artificial Sequence
  synthetic circulating small noncoding RNA (sncRNA) 5' transfer RNA (tRNA) half
tttccgtagtgtagtggttatcacgttcgc

SEQ ID NO: 932 - DNA, 31 bp, Artificial Sequence
  synthetic circulating small noncoding RNA (sncRNA) 5' transfer RNA (tRNA) half
gtcaggatggccgagcggtctaaggcgctgc

SEQ ID NO: 933 - DNA, 28 bp, Artificial Sequence
  synthetic circulating small noncoding RNA (sncRNA) 5' transfer RNA (tRNA) half
agagtggcgcagcggaagcgtgctgggc

SEQ ID NO: 934 - DNA, 34 bp, Artificial Sequence
  synthetic circulating small noncoding RNA (sncRNA) 5' transfer RNA (tRNA) half
gcgagaggtcccgggttcaaatcccggacgagcc

SEQ ID NO: 935 - DNA, 31 bp, Artificial Sequence
  synthetic circulating small noncoding RNA (sncRNA) 5' transfer RNA (tRNA) half
gcgagaattctaccactgaaccaccaatgct

SEQ ID NO: 936 - DNA, 29 bp, Artificial Sequence
  synthetic circulating small noncoding RNA (sncRNA) 5' transfer RNA (tRNA) half
ggcggtgagagcgccgaatcctaaccact

SEQ ID NO: 937 - DNA, 23 bp, Artificial Sequence
  synthetic circulating small noncoding RNA (sncRNA) 5' transfer RNA (tRNA) half
ttcccacaccgggagtcgaaccc

SEQ ID NO: 938 - DNA, 31 bp, Artificial Sequence
  synthetic circulating small noncoding RNA (sncRNA) 5' transfer RNA (tRNA) half
tccctggtggtctagtggctaggattcggcg

SEQ ID NO: 939 - DNA, 27 bp, Artificial Sequence
  synthetic circulating small noncoding RNA (sncRNA) 5' transfer RNA (tRNA) half
gctcgttggtctaggggtatgattctc

SEQ ID NO: 940 - DNA, 32 bp, Artificial Sequence
  synthetic circulating small noncoding RNA (sncRNA) 5' transfer RNA (tRNA) half
gcctggatagctcaattggtagagcatcagac

SEQ ID NO: 941 - DNA, 20 bp, Artificial Sequence
  synthetic circulating small noncoding RNA (sncRNA) 5' transfer RNA (tRNA) half
gcgaacgtgataaccactac

SEQ ID NO: 942 - DNA, 21 bp, Artificial Sequence
  synthetic circulating small noncoding RNA (sncRNA) 5' transfer RNA (tRNA) half
taacgtgtttccgcccggttt

SEQ ID NO: 943 - DNA, 21 bp, Artificial Sequence
  synthetic circulating small noncoding RNA (sncRNA) 5' transfer RNA (tRNA) half
tcgattccggctcgaaggact

SEQ ID NO: 944 - DNA, 16 bp, Artificial Sequence
  synthetic circulating small noncoding RNA (sncRNA) 5' transfer RNA (tRNA) half
atcccccgaccgctcc

SEQ ID NO: 945 - DNA, 25 bp, Artificial Sequence
  synthetic circulating small noncoding RNA (sncRNA) 5' transfer RNA (tRNA) half
tgctctaccactgagctacatcccc

SEQ ID NO: 946 - DNA, 20 bp, Artificial Sequence
  synthetic circulating small noncoding RNA (sncRNA) 5' transfer RNA (tRNA) half
aagcgagaatcataccccta

SEQ ID NO: 947 - DNA, 24 bp, Artificial Sequence
  synthetic circulating small noncoding RNA (sncRNA) 5' transfer RNA (tRNA) half
cttccctgaccgggaatcgaaccc

SEQ ID NO: 948 - DNA, 27 bp, Artificial Sequence
  synthetic circulating small noncoding RNA (sncRNA) 5' transfer RNA (tRNA) half
gggattaagagtcccatgctctaccga

SEQ ID NO: 949 - DNA, 37 bp, Artificial Sequence
  synthetic circulating small noncoding RNA (sncRNA) 5' transfer RNA (tRNA) half
ccgagaggtcccgggttcaaatcccggacgagcccca

SEQ ID NO: 950 - DNA, 28 bp, Artificial Sequence
  synthetic circulating small noncoding RNA (sncRNA) 5' transfer RNA (tRNA) half
ggcgaacgtgataaccactacactacgg

SEQ ID NO: 951 - DNA, 13 bp, Artificial Sequence
  synthetic circulating small noncoding RNA (sncRNA) 5' transfer RNA (tRNA) half
gccgtgactcgga

SEQ ID NO: 952 - DNA, 24 bp, Artificial Sequence
  synthetic circulating small noncoding RNA (sncRNA) 5' transfer RNA (tRNA) half
gcgtggcaggcgagaattctacca

SEQ ID NO: 953 - DNA, 17 bp, Artificial Sequence
  synthetic circulating small noncoding RNA (sncRNA) 5' transfer RNA (tRNA) half
tcggtagagcatgagac

SEQ ID NO: 954 - DNA, 15 bp, Artificial Sequence
  synthetic circulating small noncoding RNA (sncRNA) 5' transfer RNA (tRNA) half
gcattggtggttcag

SEQ ID NO: 955 - DNA, 22 bp, Artificial Sequence
  synthetic circulating small noncoding RNA (sncRNA) 5' transfer RNA (tRNA) half
gtctgatgctctaccgactgag

SEQ ID NO: 956 - DNA, 20 bp, Artificial Sequence
  synthetic circulating small noncoding RNA (sncRNA) 5' transfer RNA (tRNA) half
ataacgtgtttccgcccggt

SEQ ID NO: 957 - DNA, 31 bp, Artificial Sequence
  synthetic circulating small noncoding RNA (sncRNA) 5' transfer RNA (tRNA) half
agtctgatgctctaccgactgagctatccgg

SEQ ID NO: 958 - DNA, 32 bp, Artificial Sequence
  synthetic circulating small noncoding RNA (sncRNA) 5' transfer RNA (tRNA) half
gggggtgtagctcagtggtagagcgcgtgctt

SEQ ID NO: 959 - DNA, 29 bp, Artificial Sequence
  synthetic circulating small noncoding RNA (sncRNA) 5' transfer RNA (tRNA) half
agtctcatgctctaccgactgagctagcc

SEQ ID NO: 960 - DNA, 22 bp, Artificial Sequence
  synthetic circulating small noncoding RNA (sncRNA) 5' transfer RNA (tRNA) half
cgcagagtactaaccactatac

SEQ ID NO: 961 - DNA, 23 bp, Artificial Sequence
  synthetic circulating small noncoding RNA (sncRNA) 5' transfer RNA (tRNA) half
aactcggatcgctggattcaaag

SEQ ID NO: 962 - DNA, 32 bp, Artificial Sequence
  synthetic circulating small noncoding RNA (sncRNA) 5' transfer RNA (tRNA) half
cgcagagtactaaccactatacgatcacggcg

SEQ ID NO: 963 - DNA, 17 bp, Artificial Sequence
  synthetic circulating small noncoding RNA (sncRNA) 5' transfer RNA (tRNA) half
ggtggagatgccgggga

SEQ ID NO: 964 - DNA, 28 bp, Artificial Sequence
  synthetic circulating small noncoding RNA (sncRNA) 5' transfer RNA (tRNA) half
caggaatcctaaccgctagaccatgtgg

SEQ ID NO: 965 - DNA, 22 bp, Artificial Sequence
  synthetic circulating small noncoding RNA (sncRNA) 5' transfer RNA (tRNA) half
tagaccgctcggccatcctgac

SEQ ID NO: 966 - DNA, 21 bp, Artificial Sequence
  synthetic circulating small noncoding RNA (sncRNA) 5' transfer RNA (tRNA) half
cgcagagtactaaccactata

SEQ ID NO: 967 - DNA, 27 bp, Artificial Sequence
  synthetic circulating small noncoding RNA (sncRNA) 5' transfer RNA (tRNA) half
agtctgatgctctaccgactgagctat

SEQ ID NO: 968 - DNA, 26 bp, Artificial Sequence
  synthetic circulating small noncoding RNA (sncRNA) 5' transfer RNA (tRNA) half
aatcctaaccgctagaccatgtggga

SEQ ID NO: 969 - DNA, 37 bp, Artificial Sequence
  synthetic circulating small noncoding RNA (sncRNA) 5' transfer RNA (tRNA) half
gccccctctgaggttcgaactcaggaccttcagatta

SEQ ID NO: 970 - DNA, 26 bp, Artificial Sequence
  synthetic circulating small noncoding RNA (sncRNA) 5' transfer RNA (tRNA) half
gggccgcggcggtgagagcgccgaat

SEQ ID NO: 971 - DNA, 34 bp, Artificial Sequence
  synthetic circulating small noncoding RNA (sncRNA) 5' transfer RNA (tRNA) half
ggtagtgtggccgagcggtctaaggcgctggatt

SEQ ID NO: 972 - DNA, 37 bp, Artificial Sequence
  synthetic circulating small noncoding RNA (sncRNA) 5' transfer RNA (tRNA) half
taaacaggagatcctgggttcgaatcccagcggggcc

SEQ ID NO: 973 - DNA, 32 bp, Artificial Sequence
  synthetic circulating small noncoding RNA (sncRNA) 5' transfer RNA (tRNA) half
tccctggtggtctagtggctaggattcggcgc

SEQ ID NO: 974 - DNA, 16 bp, Artificial Sequence
  synthetic circulating small noncoding RNA (sncRNA) 5' transfer RNA (tRNA) half
gccgaatcctaaccac

SEQ ID NO: 975 - DNA, 30 bp, Artificial Sequence
  synthetic circulating small noncoding RNA (sncRNA) 5' transfer RNA (tRNA) half
aggcgaatgtgataaccactacactacgga

SEQ ID NO: 976 - DNA, 27 bp, Artificial Sequence
  synthetic circulating small noncoding RNA (sncRNA) 5' transfer RNA (tRNA) half
gtgatcgtatagtggttagtactctgc

SEQ ID NO: 977 - DNA, 30 bp, Artificial Sequence
  synthetic circulating small noncoding RNA (sncRNA) 5' transfer RNA (tRNA) half
ggctcgttggtctaggggtatgattctcgg

SEQ ID NO: 978 - DNA, 16 bp, Artificial Sequence
  synthetic circulating small noncoding RNA (sncRNA) 5' transfer RNA (tRNA) half
tctccccgtcggggaa

SEQ ID NO: 979 - DNA, 15 bp, Artificial Sequence
  synthetic circulating small noncoding RNA (sncRNA) 5' transfer RNA (tRNA) half
tctcccgcgtgacag

SEQ ID NO: 980 - DNA, 18 bp, Artificial Sequence
  synthetic circulating small noncoding RNA (sncRNA) 5' transfer RNA (tRNA) half
agctgaccccgacgtgat

SEQ ID NO: 981 - DNA, 23 bp, Artificial Sequence
  synthetic circulating small noncoding RNA (sncRNA) 5' transfer RNA (tRNA) half
tgaactcggatcgctggattcag

SEQ ID NO: 982 - DNA, 18 bp, Artificial Sequence
  synthetic circulating small noncoding RNA (sncRNA) 5' transfer RNA (tRNA) half
ccactcggccacgactac

SEQ ID NO: 983 - DNA, 34 bp, Artificial Sequence
  synthetic circulating small noncoding RNA (sncRNA) 5' transfer RNA (tRNA) half
gtttccgtagtgtagtggtcatcacgctcgcctc

SEQ ID NO: 984 - DNA, 28 bp, Artificial Sequence
  synthetic circulating small noncoding RNA (sncRNA) 5' transfer RNA (tRNA) half
agagtactaaccactatacgatcacggc

SEQ ID NO: 985 - DNA, 20 bp, Artificial Sequence
  synthetic circulating small noncoding RNA (sncRNA) 5' transfer RNA (tRNA) half
accgggcggaaacaactttt

SEQ ID NO: 986 - DNA, 38 bp, Artificial Sequence
  synthetic circulating small noncoding RNA (sncRNA) 5' transfer RNA (tRNA) half
tagcgcccgaacagggacttgaaccctggaccctcaga

SEQ ID NO: 987 - DNA, 18 bp, Artificial Sequence
  synthetic circulating small noncoding RNA (sncRNA) 5' transfer RNA (tRNA) half
tcggtagagcatgagact

SEQ ID NO: 988 - DNA, 20 bp, Artificial Sequence
  synthetic circulating small noncoding RNA (sncRNA) 5' transfer RNA (tRNA) half
ggcgaacgtgataaccacta

SEQ ID NO: 989 - DNA, 24 bp, Artificial Sequence
  synthetic circulating small noncoding RNA (sncRNA) 5' transfer RNA (tRNA) half
gcagagtactaaccactatacgat

SEQ ID NO: 990 - DNA, 26 bp, Artificial Sequence
  synthetic circulating small noncoding RNA (sncRNA) 5' transfer RNA (tRNA) half
ctagctcagtcggtagagcatgagac

SEQ ID NO: 991 - DNA, 25 bp, Artificial Sequence
  synthetic circulating small noncoding RNA (sncRNA) 5' transfer RNA (tRNA) half
ggtggttcagtggtagaattctcgc

SEQ ID NO: 992 - DNA, 26 bp, Artificial Sequence
  synthetic circulating small noncoding RNA (sncRNA) 5' transfer RNA (tRNA) half
gcgctctaccactgagctacatcccc

SEQ ID NO: 993 - DNA, 21 bp, Artificial Sequence
  synthetic circulating small noncoding RNA (sncRNA) 5' transfer RNA (tRNA) half
taaccactagaccaccaggga

SEQ ID NO: 994 - DNA, 33 bp, Artificial Sequence
  synthetic circulating small noncoding RNA (sncRNA) 5' transfer RNA (tRNA) half
aggcgagaattctaccactgaaccaccaatgct

SEQ ID NO: 995 - DNA, 15 bp, Artificial Sequence
  synthetic circulating small noncoding RNA (sncRNA) 5' transfer RNA (tRNA) half
tggtagaattctcgc

SEQ ID NO: 996 - DNA, 14 bp, Artificial Sequence
  synthetic circulating small noncoding RNA (sncRNA) 5' transfer RNA (tRNA) half
gcgccgaatcctaa

SEQ ID NO: 997 - DNA, 20 bp, Artificial Sequence
  synthetic circulating small noncoding RNA (sncRNA) 5' transfer RNA (tRNA) half
gaccgctcggccatcctgac

SEQ ID NO: 998 - DNA, 27 bp, Artificial Sequence
  synthetic circulating small noncoding RNA (sncRNA) 5' transfer RNA (tRNA) half
ttggtggttcagtggtagaattctcgc

SEQ ID NO: 999 - DNA, 31 bp, Artificial Sequence
  synthetic circulating small noncoding RNA (sncRNA) 5' transfer RNA (tRNA) half
ccgtgatcgtatagtggttagtactctgcgt

SEQ ID NO: 1000 - DNA, 26 bp, Artificial Sequence
  synthetic circulating small noncoding RNA (sncRNA) 5' transfer RNA (tRNA) half
ggtagcgtggccgagcggtctaaggc

SEQ ID NO: 1001 - DNA, 32 bp, Artificial Sequence
  synthetic circulating small noncoding RNA (sncRNA) 5' transfer RNA (tRNA) half
gggggattagctcaaatggtagagcgctcgct

SEQ ID NO: 1002 - DNA, 26 bp, Artificial Sequence
  synthetic circulating small noncoding RNA (sncRNA) 5' transfer RNA (tRNA) half
cgccgctggtgtagtggtatcatgca

SEQ ID NO: 1003 - DNA, 14 bp, Artificial Sequence
  synthetic circulating small noncoding RNA (sncRNA) 5' transfer RNA (tRNA) half
aagcgagaatcata

SEQ ID NO: 1004 - DNA, 35 bp, Artificial Sequence
  synthetic circulating small noncoding RNA (sncRNA) 5' transfer RNA (tRNA) half
ggcaggcgagaattctaccactgaaccaccaatgc

SEQ ID NO: 1005 - DNA, 30 bp, Artificial Sequence
  synthetic circulating small noncoding RNA (sncRNA) 5' transfer RNA (tRNA) half
cgtgatcgtatagtggttagtactctgcgt

SEQ ID NO: 1006 - DNA, 27 bp, Artificial Sequence
  synthetic circulating small noncoding RNA (sncRNA) 5' transfer RNA (tRNA) half
ggggatgtagctcagtggtagagcgcg

SEQ ID NO: 1007 - DNA, 29 bp, Artificial Sequence
  synthetic circulating small noncoding RNA (sncRNA) 5' transfer RNA (tRNA) half
cccatatggtctagcggttaggattcctg

SEQ ID NO: 1008 - DNA, 19 bp, Artificial Sequence
  synthetic circulating small noncoding RNA (sncRNA) 5' transfer RNA (tRNA) half
acgcagagtactaaccact

SEQ ID NO: 1009 - DNA, 17 bp, Artificial Sequence
  synthetic circulating small noncoding RNA (sncRNA) 5' transfer RNA (tRNA) half
gcggaagcgtgctgggc

SEQ ID NO: 1010 - DNA, 29 bp, Artificial Sequence
  synthetic circulating small noncoding RNA (sncRNA) 5' transfer RNA (tRNA) half
gttccatagtgtagcggttatcacgtctg

SEQ ID NO: 1011 - DNA, 13 bp, Artificial Sequence
  synthetic circulating small noncoding RNA (sncRNA) 5' transfer RNA (tRNA) half
gtagaattctcgc

SEQ ID NO: 1012 - DNA, 26 bp, Artificial Sequence
  synthetic circulating small noncoding RNA (sncRNA) 5' transfer RNA (tRNA) half
gaatcatacccctagaccaacgagcc

SEQ ID NO: 1013 - DNA, 19 bp, Artificial Sequence
  synthetic circulating small noncoding RNA (sncRNA) 5' transfer RNA (tRNA) half
aaactgtttccgcccggtt

SEQ ID NO: 1014 - DNA, 14 bp, Artificial Sequence
  synthetic circulating small noncoding RNA (sncRNA) 5' transfer RNA (tRNA) half
tcggccatcctgac

SEQ ID NO: 1015 - DNA, 33 bp, Artificial Sequence
  synthetic circulating small noncoding RNA (sncRNA) 5' transfer RNA (tRNA) half
agtctgatgctctaccgactgagctatccaggc

SEQ ID NO: 1016 - DNA, 16 bp, Artificial Sequence
  synthetic circulating small noncoding RNA (sncRNA) 5' transfer RNA (tRNA) half
ggtatgattctcgctt

SEQ ID NO: 1017 - DNA, 33 bp, Artificial Sequence
  synthetic circulating small noncoding RNA (sncRNA) 5' transfer RNA (tRNA) half
gcgagaggtcccgggttcaaatcccggacgagc

SEQ ID NO: 1018 - DNA, 20 bp, Artificial Sequence
  synthetic circulating small noncoding RNA (sncRNA) 5' transfer RNA (tRNA) half
tctcatgctctaccgactga

SEQ ID NO: 1019 - DNA, 34 bp, Artificial Sequence
  synthetic circulating small noncoding RNA (sncRNA) 5' transfer RNA (tRNA) half
tgttcccacaccgggagtcgaacccgggccgcct

SEQ ID NO: 1020 - DNA, 36 bp, Artificial Sequence
  synthetic circulating small noncoding RNA (sncRNA) 5' transfer RNA (tRNA) half
tgttcccacaccgggagtcgaacccgggccgcctgg

SEQ ID NO: 1021 - DNA, 35 bp, Artificial Sequence
  synthetic circulating small noncoding RNA (sncRNA) 5' transfer RNA (tRNA) half
accgaccacgaagggactcgaaccctcaatcttct

SEQ ID NO: 1022 - DNA, 25 bp, Artificial Sequence
  synthetic circulating small noncoding RNA (sncRNA) 5' transfer RNA (tRNA) half
atcctaaccactagaccaccaggga

SEQ ID NO: 1023 - DNA, 18 bp, Artificial Sequence
  synthetic circulating small noncoding RNA (sncRNA) 5' transfer RNA (tRNA) half
gtggtagaattctcgcct

SEQ ID NO: 1024 - DNA, 14 bp, Artificial Sequence
  synthetic circulating small noncoding RNA (sncRNA) 5' transfer RNA (tRNA) half
cgagccagccagga

SEQ ID NO: 1025 - DNA, 23 bp, Artificial Sequence
  synthetic circulating small noncoding RNA (sncRNA) 5' transfer RNA (tRNA) half
tcgtatagtggttagtactctgc

SEQ ID NO: 1026 - DNA, 25 bp, Artificial Sequence
  synthetic circulating small noncoding RNA (sncRNA) 5' transfer RNA (tRNA) half
gcttccctgaccgggaatcgaaccc

SEQ ID NO: 1027 - DNA, 15 bp, Artificial Sequence
  synthetic circulating small noncoding RNA (sncRNA) 5' transfer RNA (tRNA) half
gatgctctaccgact

SEQ ID NO: 1028 - DNA, 19 bp, Artificial Sequence
  synthetic circulating small noncoding RNA (sncRNA) 5' transfer RNA (tRNA) half
ctagcggttaggattcctg

SEQ ID NO: 1029 - DNA, 22 bp, Artificial Sequence
  synthetic circulating small noncoding RNA (sncRNA) 5' transfer RNA (tRNA) half
tcgaaaccgggcggaaacagca

SEQ ID NO: 1030 - DNA, 33 bp, Artificial Sequence
  synthetic circulating small noncoding RNA (sncRNA) 5' transfer RNA (tRNA) half
agaccagtgctctaacccctgagctatggagcc

SEQ ID NO: 1031 - DNA, 36 bp, Artificial Sequence
  synthetic circulating small noncoding RNA (sncRNA) 5' transfer RNA (tRNA) half
tctgagggtccagggttcaagtccctgttcgggcgc

SEQ ID NO: 1032 - DNA, 13 bp, Artificial Sequence
  synthetic circulating small noncoding RNA (sncRNA) 5' transfer RNA (tRNA) half
gcccagcacgctt

SEQ ID NO: 1033 - DNA, 12 bp, Artificial Sequence
  synthetic circulating small noncoding RNA (sncRNA) 5' transfer RNA (tRNA) half
gtagtcgtggcc

SEQ ID NO: 1034 - DNA, 29 bp, Artificial Sequence
  synthetic circulating small noncoding RNA (sncRNA) 5' transfer RNA (tRNA) half
aggattcggcgctctcaccgccgcggccc

SEQ ID NO: 1035 - DNA, 14 bp, Artificial Sequence
  synthetic circulating small noncoding RNA (sncRNA) 5' transfer RNA (tRNA) half
gtgtttccgcccgg

SEQ ID NO: 1036 - DNA, 25 bp, Artificial Sequence
  synthetic circulating small noncoding RNA (sncRNA) 5' transfer RNA (tRNA) half
tgttcccacaccgggagtcgaaccc

SEQ ID NO: 1037 - DNA, 11 bp, Artificial Sequence
  synthetic circulating small noncoding RNA (sncRNA) 5' transfer RNA (tRNA) half
cgaaaccgggc

SEQ ID NO: 1038 - DNA, 34 bp, Artificial Sequence
  synthetic circulating small noncoding RNA (sncRNA) 5' transfer RNA (tRNA) half
aagcgccgaatcctagccactagaccaccaggga

SEQ ID NO: 1039 - DNA, 21 bp, Artificial Sequence
  synthetic circulating small noncoding RNA (sncRNA) 5' transfer RNA (tRNA) half
ggcgaacgtgataaccactac

SEQ ID NO: 1040 - DNA, 35 bp, Artificial Sequence
  synthetic circulating small noncoding RNA (sncRNA) 5' transfer RNA (tRNA) half
gactccgccgggactcgaacccggaacctttgaat

SEQ ID NO: 1041 - DNA, 19 bp, Artificial Sequence
  synthetic circulating small noncoding RNA (sncRNA) 5' transfer RNA (tRNA) half
cgagccagccaggagtcga

SEQ ID NO: 1042 - DNA, 33 bp, Artificial Sequence
  synthetic circulating small noncoding RNA (sncRNA) 5' transfer RNA (tRNA) half
acgcagcgccttagaccgctcggccatcctgac

SEQ ID NO: 1043 - DNA, 24 bp, Artificial Sequence
  synthetic circulating small noncoding RNA (sncRNA) 5' transfer RNA (tRNA) half
gtagtcgtggccgagtggttaagg

SEQ ID NO: 1044 - DNA, 30 bp, Artificial Sequence
  synthetic circulating small noncoding RNA (sncRNA) 5' transfer RNA (tRNA) half
agcgagaatcatacccctagaccaacgagc

SEQ ID NO: 1045 - DNA, 13 bp, Artificial Sequence
  synthetic circulating small noncoding RNA (sncRNA) 5' transfer RNA (tRNA) half
gatgctctaccga

SEQ ID NO: 1046 - DNA, 19 bp, Artificial Sequence
  synthetic circulating small noncoding RNA (sncRNA) 5' transfer RNA (tRNA) half
agtcggtagagcatgagac

SEQ ID NO: 1047 - DNA, 20 bp, Artificial Sequence
  synthetic circulating small noncoding RNA (sncRNA) 5' transfer RNA (tRNA) half
gtgtaatggttagcactctg

SEQ ID NO: 1048 - DNA, 28 bp, Artificial Sequence
  synthetic circulating small noncoding RNA (sncRNA) 5' transfer RNA (tRNA) half
gccgaatcctaaccactagaccaccagg

SEQ ID NO: 1049 - DNA, 23 bp, Artificial Sequence
  synthetic circulating small noncoding RNA (sncRNA) 5' transfer RNA (tRNA) half
gggggattagctcaaatggtaga

SEQ ID NO: 1050 - DNA, 14 bp, Artificial Sequence
  synthetic circulating small noncoding RNA (sncRNA) 5' transfer RNA (tRNA) half
cgtcggggaatcga

SEQ ID NO: 1051 - DNA, 34 bp, Artificial Sequence
  synthetic circulating small noncoding RNA (sncRNA) 5' transfer RNA (tRNA) half
caggcggggatactcaccactatactaacgagga

SEQ ID NO: 1052 - DNA, 16 bp, Artificial Sequence
  synthetic circulating small noncoding RNA (sncRNA) 5' transfer RNA (tRNA) half
agcgccgaatcctaac

SEQ ID NO: 1053 - DNA, 28 bp, Artificial Sequence
  synthetic circulating small noncoding RNA (sncRNA) 5' transfer RNA (tRNA) half
agtctcatgctctaccgactgagctagc

SEQ ID NO: 1054 - DNA, 31 bp, Artificial Sequence
  synthetic circulating small noncoding RNA (sncRNA) 5' transfer RNA (tRNA) half
ggcgaatgtgataaccactacactacggaaa

SEQ ID NO: 1055 - DNA, 34 bp, Artificial Sequence
  synthetic circulating small noncoding RNA (sncRNA) 5' transfer RNA (tRNA) half
cggatgatcctcagtggtctggggtgcaggcttc

SEQ ID NO: 1056 - DNA, 15 bp, Artificial Sequence
  synthetic circulating small noncoding RNA (sncRNA) 5' transfer RNA (tRNA) half
agtctcttcgggggc

SEQ ID NO: 1057 - DNA, 33 bp, Artificial Sequence
  synthetic circulating small noncoding RNA (sncRNA) 5' transfer RNA (tRNA) half
ggcatgggtggttcagtggtagaattctcgcct

SEQ ID NO: 1058 - DNA, 13 bp, Artificial Sequence
  synthetic circulating small noncoding RNA (sncRNA) 5' transfer RNA (tRNA) half
gcccggctagctc

SEQ ID NO: 1059 - DNA, 32 bp, Artificial Sequence
  synthetic circulating small noncoding RNA (sncRNA) 5' transfer RNA (tRNA) half
ggcgagaattctaccactgaaccaccaatgcg

SEQ ID NO: 1060 - DNA, 17 bp, Artificial Sequence
  synthetic circulating small noncoding RNA (sncRNA) 5' transfer RNA (tRNA) half
aacgcagagtactaacc

SEQ ID NO: 1061 - DNA, 33 bp, Artificial Sequence
  synthetic circulating small noncoding RNA (sncRNA) 5' transfer RNA (tRNA) half
tccctggtagtctagtggttaggattcggtgct

SEQ ID NO: 1062 - DNA, 15 bp, Artificial Sequence
  synthetic circulating small noncoding RNA (sncRNA) 5' transfer RNA (tRNA) half
tggttagtactctgc

SEQ ID NO: 1063 - DNA, 15 bp, Artificial Sequence
  synthetic circulating small noncoding RNA (sncRNA) 5' transfer RNA (tRNA) half
gtatgattctcgctt

SEQ ID NO: 1064 - DNA, 15 bp, Artificial Sequence
  synthetic circulating small noncoding RNA (sncRNA) 5' transfer RNA (tRNA) half
cagagtactaaccac

SEQ ID NO: 1065 - DNA, 26 bp, Artificial Sequence
  synthetic circulating small noncoding RNA (sncRNA) 5' transfer RNA (tRNA) half
catgctctaccgactgagctagccgg

SEQ ID NO: 1066 - DNA, 24 bp, Artificial Sequence
  synthetic circulating small noncoding RNA (sncRNA) 5' transfer RNA (tRNA) half
gaccgggaatcgaacccgggccgc

SEQ ID NO: 1067 - DNA, 20 bp, Artificial Sequence
  synthetic circulating small noncoding RNA (sncRNA) 5' transfer RNA (tRNA) half
ggtagcgtggccgagcggtc

SEQ ID NO: 1068 - DNA, 33 bp, Artificial Sequence
  synthetic circulating small noncoding RNA (sncRNA) 5' transfer RNA (tRNA) half
caacgcagagtactaaccactatacgatcacgg

SEQ ID NO: 1069 - DNA, 19 bp, Artificial Sequence
  synthetic circulating small noncoding RNA (sncRNA) 5' transfer RNA (tRNA) half
cagcggaagcgtgctgggc

SEQ ID NO: 1070 - DNA, 30 bp, Artificial Sequence
  synthetic circulating small noncoding RNA (sncRNA) 5' transfer RNA (tRNA) half
gtttccgtagtgtagtggttatcacgctcg

SEQ ID NO: 1071 - DNA, 30 bp, Artificial Sequence
  synthetic circulating small noncoding RNA (sncRNA) 5' transfer RNA (tRNA) half
ccagtgctctaacccctgagctatggagcc

SEQ ID NO: 1072 - DNA, 33 bp, Artificial Sequence
  synthetic circulating small noncoding RNA (sncRNA) 5' transfer RNA (tRNA) half
agtccagagtgctagccattacaccatggaacc

SEQ ID NO: 1073 - DNA, 26 bp, Artificial Sequence
  synthetic circulating small noncoding RNA (sncRNA) 5' transfer RNA (tRNA) half
gtggttcagtggtagaattctcgcct

SEQ ID NO: 1074 - DNA, 33 bp, Artificial Sequence
  synthetic circulating small noncoding RNA (sncRNA) 5' transfer RNA (tRNA) half
gcaccacgctctaaccaactgagctaaccggcc

SEQ ID NO: 1075 - DNA, 37 bp, Artificial Sequence
  synthetic circulating small noncoding RNA (sncRNA) 5' transfer RNA (tRNA) half
gccgcccgaacagggacttgaaccctggaccctcaga

SEQ ID NO: 1076 - DNA, 15 bp, Artificial Sequence
  synthetic circulating small noncoding RNA (sncRNA) 5' transfer RNA (tRNA) half
gccgaatcctaacca

SEQ ID NO: 1077 - DNA, 19 bp, Artificial Sequence
  synthetic circulating small noncoding RNA (sncRNA) 5' transfer RNA (tRNA) half
gagtctcatgctctaccga

SEQ ID NO: 1078 - DNA, 19 bp, Artificial Sequence
  synthetic circulating small noncoding RNA (sncRNA) 5' transfer RNA (tRNA) half
gtcccatgctctaccgact

SEQ ID NO: 1079 - DNA, 15 bp, Artificial Sequence
  synthetic circulating small noncoding RNA (sncRNA) 5' transfer RNA (tRNA) half
ctcggccacgctacc

SEQ ID NO: 1080 - DNA, 16 bp, Artificial Sequence
  synthetic circulating small noncoding RNA (sncRNA) 5' transfer RNA (tRNA) half
gctcggccacgctacc

SEQ ID NO: 1081 - DNA, 16 bp, Artificial Sequence
  synthetic circulating small noncoding RNA (sncRNA) 5' transfer RNA (tRNA) half
ggttcgattcccggcc

SEQ ID NO: 1082 - DNA, 37 bp, Artificial Sequence
  synthetic circulating small noncoding RNA (sncRNA) 5' transfer RNA (tRNA) half
tctgagggtccagggttcaagtccctgttcgggcgct

SEQ ID NO: 1083 - DNA, 27 bp, Artificial Sequence
  synthetic circulating small noncoding RNA (sncRNA) 5' transfer RNA (tRNA) half
ggctcgttggtctaggggtatgattct

SEQ ID NO: 1084 - DNA, 33 bp, Artificial Sequence
  synthetic circulating small noncoding RNA (sncRNA) 5' transfer RNA (tRNA) half
agtcaaatgctctaccactgagctatacccccg

SEQ ID NO: 1085 - DNA, 27 bp, Artificial Sequence
  synthetic circulating small noncoding RNA (sncRNA) 5' transfer RNA (tRNA) half
ggaatcctaaccgctagaccatatggg

SEQ ID NO: 1086 - DNA, 35 bp, Artificial Sequence
  synthetic circulating small noncoding RNA (sncRNA) 5' transfer RNA (tRNA) half
ccgagaggtcccgggttcaaatcccggacgagccc

SEQ ID NO: 1087 - DNA, 16 bp, Artificial Sequence
  synthetic circulating small noncoding RNA (sncRNA) 5' transfer RNA (tRNA) half
actcggccatcgctgc

SEQ ID NO: 1088 - DNA, 25 bp, Artificial Sequence
  synthetic circulating small noncoding RNA (sncRNA) 5' transfer RNA (tRNA) half
cctccccgtcggggaattgaacccc

SEQ ID NO: 1089 - DNA, 21 bp, Artificial Sequence
  synthetic circulating small noncoding RNA (sncRNA) 5' transfer RNA (tRNA) half
gtcgagccagccaggagtcga

SEQ ID NO: 1090 - DNA, 15 bp, Artificial Sequence
  synthetic circulating small noncoding RNA (sncRNA) 5' transfer RNA (tRNA) half
ctcggccacctcgtc

SEQ ID NO: 1091 - DNA, 32 bp, Artificial Sequence
  synthetic circulating small noncoding RNA (sncRNA) 5' transfer RNA (tRNA) half
ggcggggatactcaccactatactaacgagga

SEQ ID NO: 1092 - DNA, 23 bp, Artificial Sequence
  synthetic circulating small noncoding RNA (sncRNA) 5' transfer RNA (tRNA) half
gtctgatgctctaccgactgagc

SEQ ID NO: 1093 - DNA, 12 bp, Artificial Sequence
  synthetic circulating small noncoding RNA (sncRNA) 5' transfer RNA (tRNA) half
tcgaaaccgggc

SEQ ID NO: 1094 - DNA, 29 bp, Artificial Sequence
  synthetic circulating small noncoding RNA (sncRNA) 5' transfer RNA (tRNA) half
ctcatgctctaccgactgagctagccggg

SEQ ID NO: 1095 - DNA, 37 bp, Artificial Sequence
  synthetic circulating small noncoding RNA (sncRNA) 5' transfer RNA (tRNA) half
tatgaccccgacgtgattcgaacacgcagccttctga

SEQ ID NO: 1096 - DNA, 16 bp, Artificial Sequence
  synthetic circulating small noncoding RNA (sncRNA) 5' transfer RNA (tRNA) half
gtcccatgctctaccg

SEQ ID NO: 1097 - DNA, 18 bp, Artificial Sequence
  synthetic circulating small noncoding RNA (sncRNA) 5' transfer RNA (tRNA) half
tggagggggcacccggat

SEQ ID NO: 1098 - DNA, 31 bp, Artificial Sequence
  synthetic circulating small noncoding RNA (sncRNA) 5' transfer RNA (tRNA) half
gttcccataccgggagtcgaacccgggccgc

SEQ ID NO: 1099 - DNA, 28 bp, Artificial Sequence
  synthetic circulating small noncoding RNA (sncRNA) 5' transfer RNA (tRNA) half
aggaatcctaaccgctagaccatgtggg

SEQ ID NO: 1100 - DNA, 17 bp, Artificial Sequence
  synthetic circulating small noncoding RNA (sncRNA) 5' transfer RNA (tRNA) half
ggttaggattcggcgct

SEQ ID NO: 1101 - DNA, 17 bp, Artificial Sequence
  synthetic circulating small noncoding RNA (sncRNA) 5' transfer RNA (tRNA) half
ggttatcacgtctgctt

SEQ ID NO: 1102 - DNA, 18 bp, Artificial Sequence
  synthetic circulating small noncoding RNA (sncRNA) 5' transfer RNA (tRNA) half
aacgcagagtactaacca

SEQ ID NO: 1103 - DNA, 34 bp, Artificial Sequence
  synthetic circulating small noncoding RNA (sncRNA) 5' transfer RNA (tRNA) half
gctggggattgtgggttcgagtcccatctgggtc

SEQ ID NO: 1104 - DNA, 29 bp, Artificial Sequence
  synthetic circulating small noncoding RNA (sncRNA) 5' transfer RNA (tRNA) half
catgggtggttcagtggtagaattctcgc

SEQ ID NO: 1105 - DNA, 35 bp, Artificial Sequence
  synthetic circulating small noncoding RNA (sncRNA) 5' transfer RNA (tRNA) half
tctgatgctctaccgactgagctatccgggctctt

SEQ ID NO: 1106 - DNA, 15 bp, Artificial Sequence
  synthetic circulating small noncoding RNA (sncRNA) 5' transfer RNA (tRNA) half
gggtatgattctcgc

SEQ ID NO: 1107 - DNA, 37 bp, Artificial Sequence
  synthetic circulating small noncoding RNA (sncRNA) 5' transfer RNA (tRNA) half
ggcaccgctgggattcgaacccaggatctcctgttta

SEQ ID NO: 1108 - DNA, 31 bp, Artificial Sequence
  synthetic circulating small noncoding RNA (sncRNA) 5' transfer RNA (tRNA) half
cattggccgggaatcgaacccgggcctcccg

SEQ ID NO: 1109 - DNA, 22 bp, Artificial Sequence
  synthetic circulating small noncoding RNA (sncRNA) 5' transfer RNA (tRNA) half
cccataccgggagtcgaacccg

SEQ ID NO: 1110 - DNA, 34 bp, Artificial Sequence
  synthetic circulating small noncoding RNA (sncRNA) 5' transfer RNA (tRNA) half
acaggagatcctgggttcgaatcccagcggggcc

SEQ ID NO: 1111 - DNA, 21 bp, Artificial Sequence
  synthetic circulating small noncoding RNA (sncRNA) 5' transfer RNA (tRNA) half
cttagaccgctcggccatcct

SEQ ID NO: 1112 - DNA, 19 bp, Artificial Sequence
  synthetic circulating small noncoding RNA (sncRNA) 5' transfer RNA (tRNA) half
atagtggttagtactctgc

SEQ ID NO: 1113 - DNA, 16 bp, Artificial Sequence
  synthetic circulating small noncoding RNA (sncRNA) 5' transfer RNA (tRNA) half
ggcgagaattctacca

SEQ ID NO: 1114 - DNA, 18 bp, Artificial Sequence
  synthetic circulating small noncoding RNA (sncRNA) 5' transfer RNA (tRNA) half
ccgctcggccacactacc

SEQ ID NO: 1115 - DNA, 22 bp, Artificial Sequence
  synthetic circulating small noncoding RNA (sncRNA) 5' transfer RNA (tRNA) half
gtgtagtggttatcacgttcgc

SEQ ID NO: 1116 - DNA, 30 bp, Artificial Sequence
  synthetic circulating small noncoding RNA (sncRNA) 5' transfer RNA (tRNA) half
cggggatactaaccactatactaacgagga

SEQ ID NO: 1117 - DNA, 35 bp, Artificial Sequence
  synthetic circulating small noncoding RNA (sncRNA) 5' transfer RNA (tRNA) half
acgcgggaggcccgggttcgattcccggccaatgc

SEQ ID NO: 1118 - DNA, 31 bp, Artificial Sequence
  synthetic circulating small noncoding RNA (sncRNA) 5' transfer RNA (tRNA) half
gccgaatcctaaccactagaccaccagggag

SEQ ID NO: 1119 - DNA, 20 bp, Artificial Sequence
  synthetic circulating small noncoding RNA (sncRNA) 5' transfer RNA (tRNA) half
gtagtggttatcacgttcgc

SEQ ID NO: 1120 - DNA, 24 bp, Artificial Sequence
  synthetic circulating small noncoding RNA (sncRNA) 5' transfer RNA (tRNA) half
tgataaccactacactacggaaac

SEQ ID NO: 1121 - DNA, 22 bp, Artificial Sequence
  synthetic circulating small noncoding RNA (sncRNA) 5' transfer RNA (tRNA) half
tggtggagatgccggggatcga

SEQ ID NO: 1122 - DNA, 35 bp, Artificial Sequence
  synthetic circulating small noncoding RNA (sncRNA) 5' transfer RNA (tRNA) half
gtctccccgtcggggaatcgaaccccggtctcccg

SEQ ID NO: 1123 - DNA, 29 bp, Artificial Sequence
  synthetic circulating small noncoding RNA (sncRNA) 5' transfer RNA (tRNA) half
gcccggctagctcagtcggtagagcatga

SEQ ID NO: 1124 - DNA, 13 bp, Artificial Sequence
  synthetic circulating small noncoding RNA (sncRNA) 5' transfer RNA (tRNA) half
gcgagaatcatac

SEQ ID NO: 1125 - DNA, 15 bp, Artificial Sequence
  synthetic circulating small noncoding RNA (sncRNA) 5' transfer RNA (tRNA) half
ctacactacggaaac

SEQ ID NO: 1126 - DNA, 19 bp, Artificial Sequence
  synthetic circulating small noncoding RNA (sncRNA) 5' transfer RNA (tRNA) half
atggttagcactctggact

SEQ ID NO: 1127 - DNA, 15 bp, Artificial Sequence
  synthetic circulating small noncoding RNA (sncRNA) 5' transfer RNA (tRNA) half
ggtatgattctcgct

SEQ ID NO: 1128 - DNA, 28 bp, Artificial Sequence
  synthetic circulating small noncoding RNA (sncRNA) 5' transfer RNA (tRNA) half
gtcccaccgagatttgaactcggatcgc

SEQ ID NO: 1129 - DNA, 18 bp, Artificial Sequence
  synthetic circulating small noncoding RNA (sncRNA) 5' transfer RNA (tRNA) half
agacgacgaggatgggat

SEQ ID NO: 1130 - DNA, 23 bp, Artificial Sequence
  synthetic circulating small noncoding RNA (sncRNA) 5' transfer RNA (tRNA) half
ggggaattagctcaaatggtaga

SEQ ID NO: 1131 - DNA, 16 bp, Artificial Sequence
  synthetic circulating small noncoding RNA (sncRNA) 5' transfer RNA (tRNA) half
gggccgcggcggtgag

SEQ ID NO: 1132 - DNA, 28 bp, Artificial Sequence
  synthetic circulating small noncoding RNA (sncRNA) 5' transfer RNA (tRNA) half
ccgtagtgtagtggttatcacgttcgcc

SEQ ID NO: 1133 - DNA, 33 bp, Artificial Sequence
  synthetic circulating small noncoding RNA (sncRNA) 5' transfer RNA (tRNA) half
acgcagagtactaaccactatacgatcacggcg

SEQ ID NO: 1134 - DNA, 22 bp, Artificial Sequence
  synthetic circulating small noncoding RNA (sncRNA) 5' transfer RNA (tRNA) half
agttgtcaggagtgggattcga

SEQ ID NO: 1135 - DNA, 32 bp, Artificial Sequence
  synthetic circulating small noncoding RNA (sncRNA) 5' transfer RNA (tRNA) half
ggctccatagctcaggggttagagcactggtc

SEQ ID NO: 1136 - DNA, 16 bp, Artificial Sequence
  synthetic circulating small noncoding RNA (sncRNA) 5' transfer RNA (tRNA) half
gagggggcacccggat

SEQ ID NO: 1137 - DNA, 22 bp, Artificial Sequence
  synthetic circulating small noncoding RNA (sncRNA) 5' transfer RNA (tRNA) half
actcggatcgctggattcaaag

SEQ ID NO: 1138 - DNA, 29 bp, Artificial Sequence
  synthetic circulating small noncoding RNA (sncRNA) 5' transfer RNA (tRNA) half
gcccaacgtggggctcgaacccacgaccc

SEQ ID NO: 1139 - DNA, 30 bp, Artificial Sequence
  synthetic circulating small noncoding RNA (sncRNA) 5' transfer RNA (tRNA) half
cattggtggttcagtggtagaattctcgcc

SEQ ID NO: 1140 - DNA, 33 bp, Artificial Sequence
  synthetic circulating small noncoding RNA (sncRNA) 5' transfer RNA (tRNA) half
ggcaccgctgggattcgaacccaggatctcctg

SEQ ID NO: 1141 - DNA, 21 bp, Artificial Sequence
  synthetic circulating small noncoding RNA (sncRNA) 5' transfer RNA (tRNA) half
ggcaggcgagaattctaccac

SEQ ID NO: 1142 - DNA, 19 bp, Artificial Sequence
  synthetic circulating small noncoding RNA (sncRNA) 5' transfer RNA (tRNA) half
ctcggatcgctggattcag

SEQ ID NO: 1143 - DNA, 23 bp, Artificial Sequence
  synthetic circulating small noncoding RNA (sncRNA) 5' transfer RNA (tRNA) half
gtctcatgctctaccgactgagc

SEQ ID NO: 1144 - DNA, 35 bp, Artificial Sequence
  synthetic circulating small noncoding RNA (sncRNA) 5' transfer RNA (tRNA) half
ggctcgtccgggatttgaacccgggacctctcgca

SEQ ID NO: 1145 - DNA, 32 bp, Artificial Sequence
  synthetic circulating small noncoding RNA (sncRNA) 5' transfer RNA (tRNA) half
ccggctagctcagtcggtagagcatgagactc

SEQ ID NO: 1146 - DNA, 24 bp, Artificial Sequence
  synthetic circulating small noncoding RNA (sncRNA) 5' transfer RNA (tRNA) half
gctcagtcggtagagcatgagact

SEQ ID NO: 1147 - DNA, 37 bp, Artificial Sequence
  synthetic circulating small noncoding RNA (sncRNA) 5' transfer RNA (tRNA) half
gcccgtacggggatcgaacccgcgaccttggcgttat

SEQ ID NO: 1148 - DNA, 31 bp, Artificial Sequence
  synthetic circulating small noncoding RNA (sncRNA) 5' transfer RNA (tRNA) half
catgggtggttcagtggtagaattctcgcct

SEQ ID NO: 1149 - DNA, 29 bp, Artificial Sequence
  synthetic circulating small noncoding RNA (sncRNA) 5' transfer RNA (tRNA) half
gtttccgtagtgtagtggttatcacgctc

SEQ ID NO: 1150 - DNA, 25 bp, Artificial Sequence
  synthetic circulating small noncoding RNA (sncRNA) 5' transfer RNA (tRNA) half
aggcgaacgtgataaccactacact

SEQ ID NO: 1151 - DNA, 14 bp, Artificial Sequence
  synthetic circulating small noncoding RNA (sncRNA) 5' transfer RNA (tRNA) half
ctcccgcgtgacag

SEQ ID NO: 1152 - DNA, 36 bp, Artificial Sequence
  synthetic circulating small noncoding RNA (sncRNA) 5' transfer RNA (tRNA) half
ccgctggtgtagtggtatcatgcaagattcccattc

SEQ ID NO: 1153 - DNA, 18 bp, Artificial Sequence
  synthetic circulating small noncoding RNA (sncRNA) 5' transfer RNA (tRNA) half
agcgagaatcatacccct

SEQ ID NO: 1154 - DNA, 29 bp, Artificial Sequence
  synthetic circulating small noncoding RNA (sncRNA) 5' transfer RNA (tRNA) half
gtttctgtagtgtagtggttatcacgctc

SEQ ID NO: 1155 - DNA, 30 bp, Artificial Sequence
  synthetic circulating small noncoding RNA (sncRNA) 5' transfer RNA (tRNA) half
gcgccgaatcctaaccactagaccaccagg

SEQ ID NO: 1156 - DNA, 15 bp, Artificial Sequence
  synthetic circulating small noncoding RNA (sncRNA) 5' transfer RNA (tRNA) half
gaccgggaatcgaac

SEQ ID NO: 1157 - DNA, 11 bp, Artificial Sequence
  synthetic circulating small noncoding RNA (sncRNA) 5' transfer RNA (tRNA) half
gccgtgactcg

SEQ ID NO: 1158 - DNA, 21 bp, Artificial Sequence
  synthetic circulating small noncoding RNA (sncRNA) 5' transfer RNA (tRNA) half
gtagtggttatcacgttcgcc

SEQ ID NO: 1159 - DNA, 33 bp, Artificial Sequence
  synthetic circulating small noncoding RNA (sncRNA) 5' transfer RNA (tRNA) half
ccgagaggtcccgggttcaaatcccggacgagc

SEQ ID NO: 1160 - DNA, 29 bp, Artificial Sequence
  synthetic circulating small noncoding RNA (sncRNA) 5' transfer RNA (tRNA) half
gagcgtgatgaccactacactacggaaac

SEQ ID NO: 1161 - DNA, 18 bp, Artificial Sequence
  synthetic circulating small noncoding RNA (sncRNA) 5' transfer RNA (tRNA) half
gtcggtagagcatgagac

SEQ ID NO: 1162 - DNA, 20 bp, Artificial Sequence
  synthetic circulating small noncoding RNA (sncRNA) 5' transfer RNA (tRNA) half
tagtggttatcacgttcgcc

SEQ ID NO: 1163 - DNA, 32 bp, Artificial Sequence
  synthetic circulating small noncoding RNA (sncRNA) 5' transfer RNA (tRNA) half
gtcaggatggccgagcggtctaaggcgctgcg

SEQ ID NO: 1164 - DNA, 37 bp, Artificial Sequence
  synthetic circulating small noncoding RNA (sncRNA) 5' transfer RNA (tRNA) half
agtctgatgctctaccgactgagctatccgggctctt

SEQ ID NO: 1165 - DNA, 32 bp, Artificial Sequence
  synthetic circulating small noncoding RNA (sncRNA) 5' transfer RNA (tRNA) half
agtctgatgctctaccgactgagctatccggg

SEQ ID NO: 1166 - DNA, 28 bp, Artificial Sequence
  synthetic circulating small noncoding RNA (sncRNA) 5' transfer RNA (tRNA) half
catgctctaccgactgagctagccgggc

SEQ ID NO: 1167 - DNA, 31 bp, Artificial Sequence
  synthetic circulating small noncoding RNA (sncRNA) 5' transfer RNA (tRNA) half
gccgtgatcgtataggggttagtactctgcg

SEQ ID NO: 1168 - DNA, 23 bp, Artificial Sequence
  synthetic circulating small noncoding RNA (sncRNA) 5' transfer RNA (tRNA) half
tcccataccgggagtcgaacccg

SEQ ID NO: 1169 - DNA, 35 bp, Artificial Sequence
  synthetic circulating small noncoding RNA (sncRNA) 5' transfer RNA (tRNA) half
agagtctcatgctctaccgactgagctagccgggc

SEQ ID NO: 1170 - DNA, 18 bp, Artificial Sequence
  synthetic circulating small noncoding RNA (sncRNA) 5' transfer RNA (tRNA) half
tagtggttaggattcggc

SEQ ID NO: 1171 - DNA, 14 bp, Artificial Sequence
  synthetic circulating small noncoding RNA (sncRNA) 5' transfer RNA (tRNA) half
ggttagtactctgc

SEQ ID NO: 1172 - DNA, 18 bp, Artificial Sequence
  synthetic circulating small noncoding RNA (sncRNA) 5' transfer RNA (tRNA) half
cagtgccttatccattag

SEQ ID NO: 1173 - DNA, 12 bp, Artificial Sequence
  synthetic circulating small noncoding RNA (sncRNA) 5' transfer RNA (tRNA) half
aacccgggccgc

SEQ ID NO: 1174 - DNA, 22 bp, Artificial Sequence
  synthetic circulating small noncoding RNA (sncRNA) 5' transfer RNA (tRNA) half
tgttcccacaccgggagtcgaa

SEQ ID NO: 1175 - DNA, 14 bp, Artificial Sequence
  synthetic circulating small noncoding RNA (sncRNA) 5' transfer RNA (tRNA) half
ttcgattcccggcc

SEQ ID NO: 1176 - DNA, 33 bp, Artificial Sequence
  synthetic circulating small noncoding RNA (sncRNA) 5' transfer RNA (tRNA) half
gcgccgaatcctaaccactagaccaccagggag

SEQ ID NO: 1177 - DNA, 35 bp, Artificial Sequence
  synthetic circulating small noncoding RNA (sncRNA) 5' transfer RNA (tRNA) half
cgcagaaggtcctgggttcgagccccagtggaacc

SEQ ID NO: 1178 - DNA, 21 bp, Artificial Sequence
  synthetic circulating small noncoding RNA (sncRNA) 5' transfer RNA (tRNA) half
gtgtagcggttatcacgtctg

SEQ ID NO: 1179 - DNA, 23 bp, Artificial Sequence
  synthetic circulating small noncoding RNA (sncRNA) 5' transfer RNA (tRNA) half
agtcaaatgctctaccactgagc

SEQ ID NO: 1180 - DNA, 32 bp, Artificial Sequence
  synthetic circulating small noncoding RNA (sncRNA) 5' transfer RNA (tRNA) half
ccctggtggtctagtggttaggattcggcgct

SEQ ID NO: 1181 - DNA, 28 bp, Artificial Sequence
  synthetic circulating small noncoding RNA (sncRNA) 5' transfer RNA (tRNA) half
tcccatgctctaccgactgagctagccg

SEQ ID NO: 1182 - DNA, 20 bp, Artificial Sequence
  synthetic circulating small noncoding RNA (sncRNA) 5' transfer RNA (tRNA) half
tagaattctcgcctgccacg

SEQ ID NO: 1183 - DNA, 21 bp, Artificial Sequence
  synthetic circulating small noncoding RNA (sncRNA) 5' transfer RNA (tRNA) half
atggttagcactctggactct

SEQ ID NO: 1184 - DNA, 26 bp, Artificial Sequence
  synthetic circulating small noncoding RNA (sncRNA) 5' transfer RNA (tRNA) half
gccttagaccgctcggccacactacc

SEQ ID NO: 1185 - DNA, 34 bp, Artificial Sequence
  synthetic circulating small noncoding RNA (sncRNA) 5' transfer RNA (tRNA) half
ggtagcgtggccgagcggtctaaggcgctggatt

SEQ ID NO: 1186 - DNA, 34 bp, Artificial Sequence
  synthetic circulating small noncoding RNA (sncRNA) 5' transfer RNA (tRNA) half
gaccacgaagggactcgaaccctcaatcttctga

SEQ ID NO: 1187 - DNA, 13 bp, Artificial Sequence
  synthetic circulating small noncoding RNA (sncRNA) 5' transfer RNA (tRNA) half
cggccatcctgac

SEQ ID NO: 1188 - DNA, 21 bp, Artificial Sequence
  synthetic circulating small noncoding RNA (sncRNA) 5' transfer RNA (tRNA) half
ccagagtgctaaccattacac

SEQ ID NO: 1189 - DNA, 39 bp, Artificial Sequence
  synthetic circulating small noncoding RNA (sncRNA) 5' transfer RNA (tRNA) half
gccccctctgaggttcgaactcaggaccttcagattatg

SEQ ID NO: 1190 - DNA, 32 bp, Artificial Sequence
  synthetic circulating small noncoding RNA (sncRNA) 5' transfer RNA (tRNA) half
agcattggtggttcagtggtagaattctcgcc

SEQ ID NO: 1191 - DNA, 32 bp, Artificial Sequence
  synthetic circulating small noncoding RNA (sncRNA) 5' transfer RNA (tRNA) half
aacgcagagtactaaccactatacgatcacgg

SEQ ID NO: 1192 - DNA, 18 bp, Artificial Sequence
  synthetic circulating small noncoding RNA (sncRNA) 5' transfer RNA (tRNA) half
gagcgccgaatcctaacc

SEQ ID NO: 1193 - DNA, 17 bp, Artificial Sequence
  synthetic circulating small noncoding RNA (sncRNA) 5' transfer RNA (tRNA) half
gacgacgaggatgggat

SEQ ID NO: 1194 - DNA, 37 bp, Artificial Sequence
  synthetic circulating small noncoding RNA (sncRNA) 5' transfer RNA (tRNA) half
gaccccgacgtgacttgaacacgcaaccttctgatct

SEQ ID NO: 1195 - DNA, 37 bp, Artificial Sequence
  synthetic circulating small noncoding RNA (sncRNA) 5' transfer RNA (tRNA) half
ggtggagatgccggggatcgaacccggggcctcatac

SEQ ID NO: 1196 - DNA, 30 bp, Artificial Sequence
  synthetic circulating small noncoding RNA (sncRNA) 5' transfer RNA (tRNA) half
tccctggtggtctagtggctaggattcggc

SEQ ID NO: 1197 - DNA, 27 bp, Artificial Sequence
  synthetic circulating small noncoding RNA (sncRNA) 5' transfer RNA (tRNA) half
gccgaatcctaaccactagaccaccag

SEQ ID NO: 1198 - DNA, 29 bp, Artificial Sequence
  synthetic circulating small noncoding RNA (sncRNA) 5' transfer RNA (tRNA) half
ccgtgatcgtataggggttagtactctgc

SEQ ID NO: 1199 - DNA, 14 bp, Artificial Sequence
  synthetic circulating small noncoding RNA (sncRNA) 5' transfer RNA (tRNA) half
gtggcaggcgagaa

SEQ ID NO: 1200 - DNA, 34 bp, Artificial Sequence
  synthetic circulating small noncoding RNA (sncRNA) 5' transfer RNA (tRNA) half
ccccgtcggggaatcgaaccccggtctcccgcgt

SEQ ID NO: 1201 - DNA, 32 bp, Artificial Sequence
  synthetic circulating small noncoding RNA (sncRNA) 5' transfer RNA (tRNA) half
ccgtgactcggattcgaaccgaggttgctgcg

SEQ ID NO: 1202 - DNA, 33 bp, Artificial Sequence
  synthetic circulating small noncoding RNA (sncRNA) 5' transfer RNA (tRNA) half
gtcaggatggccgagtggtctaaggcgccagac

SEQ ID NO: 1203 - DNA, 21 bp, Artificial Sequence
  synthetic circulating small noncoding RNA (sncRNA) 5' transfer RNA (tRNA) half
gtccagagtgctaaccattac

SEQ ID NO: 1204 - DNA, 22 bp, Artificial Sequence
  synthetic circulating small noncoding RNA (sncRNA) 5' transfer RNA (tRNA) half
tatagtggttagtactctgcgt

SEQ ID NO: 1205 - DNA, 15 bp, Artificial Sequence
  synthetic circulating small noncoding RNA (sncRNA) 5' transfer RNA (tRNA) half
tcccggtatgggaac

SEQ ID NO: 1206 - DNA, 39 bp, Artificial Sequence
  synthetic circulating small noncoding RNA (sncRNA) 5' transfer RNA (tRNA) half
acgcagaaggtcctgggttcgagccccagtggaaccacg

SEQ ID NO: 1207 - DNA, 14 bp, Artificial Sequence
  synthetic circulating small noncoding RNA (sncRNA) 5' transfer RNA (tRNA) half
gccgggaatcgaac

SEQ ID NO: 1208 - DNA, 25 bp, Artificial Sequence
  synthetic circulating small noncoding RNA (sncRNA) 5' transfer RNA (tRNA) half
gtggttcagtggtagaattctcgcc

SEQ ID NO: 1209 - DNA, 22 bp, Artificial Sequence
  synthetic circulating small noncoding RNA (sncRNA) 5' transfer RNA (tRNA) half
tctaccactgagctacatcccc

SEQ ID NO: 1210 - DNA, 30 bp, Artificial Sequence
  synthetic circulating small noncoding RNA (sncRNA) 5' transfer RNA (tRNA) half
ttgcgacccgggttcgattcccgggcggcg

SEQ ID NO: 1211 - DNA, 34 bp, Artificial Sequence
  synthetic circulating small noncoding RNA (sncRNA) 5' transfer RNA (tRNA) half
gaccccgacgtgattcgaacacgcagccttctga

SEQ ID NO: 1212 - DNA, 37 bp, Artificial Sequence
  synthetic circulating small noncoding RNA (sncRNA) 5' transfer RNA (tRNA) half
tggtagaattctcgcctgccacgcgggaggcccgggt

SEQ ID NO: 1213 - DNA, 26 bp, Artificial Sequence
  synthetic circulating small noncoding RNA (sncRNA) 5' transfer RNA (tRNA) half
acctccccgtcggggaattgaacccc

SEQ ID NO: 1214 - DNA, 27 bp, Artificial Sequence
  synthetic circulating small noncoding RNA (sncRNA) 5' transfer RNA (tRNA) half
gagaattctaccactgaaccaccaatg

SEQ ID NO: 1215 - DNA, 20 bp, Artificial Sequence
  synthetic circulating small noncoding RNA (sncRNA) 5' transfer RNA (tRNA) half
gggaatcgaacccgggccgc

SEQ ID NO: 1216 - DNA, 28 bp, Artificial Sequence
  synthetic circulating small noncoding RNA (sncRNA) 5' transfer RNA (tRNA) half
ccacatggtctagcggttaggattcctg

SEQ ID NO: 1217 - DNA, 19 bp, Artificial Sequence
  synthetic circulating small noncoding RNA (sncRNA) 5' transfer RNA (tRNA) half
ccgactgagctatccgggc

SEQ ID NO: 1218 - DNA, 18 bp, Artificial Sequence
  synthetic circulating small noncoding RNA (sncRNA) 5' transfer RNA (tRNA) half
agtcccatgctctaccga

SEQ ID NO: 1219 - DNA, 23 bp, Artificial Sequence
  synthetic circulating small noncoding RNA (sncRNA) 5' transfer RNA (tRNA) half
gggttcgactcccggtgtgggaa

SEQ ID NO: 1220 - DNA, 21 bp, Artificial Sequence
  synthetic circulating small noncoding RNA (sncRNA) 5' transfer RNA (tRNA) half
gttcccacaccgggagtcgaa

SEQ ID NO: 1221 - DNA, 34 bp, Artificial Sequence
  synthetic circulating small noncoding RNA (sncRNA) 5' transfer RNA (tRNA) half
cccacaccgggagtcgaacccgggccgcctgggt

SEQ ID NO: 1222 - DNA, 35 bp, Artificial Sequence
  synthetic circulating small noncoding RNA (sncRNA) 5' transfer RNA (tRNA) half
gtttccgtagtgtagtggttatcacgttcgcctca

SEQ ID NO: 1223 - DNA, 37 bp, Artificial Sequence
  synthetic circulating small noncoding RNA (sncRNA) 5' transfer RNA (tRNA) half
ttccgactccgccgggactcgaacccggaacctttga

SEQ ID NO: 1224 - DNA, 22 bp, Artificial Sequence
  synthetic circulating small noncoding RNA (sncRNA) 5' transfer RNA (tRNA) half
ctgaatccagcgatccgagttc

SEQ ID NO: 1225 - DNA, 18 bp, Artificial Sequence
  synthetic circulating small noncoding RNA (sncRNA) 5' transfer RNA (tRNA) half
tcgagccccagtggaacc

SEQ ID NO: 1226 - DNA, 13 bp, Artificial Sequence
  synthetic circulating small noncoding RNA (sncRNA) 5' transfer RNA (tRNA) half
gcccggtttcgaa

SEQ ID NO: 1227 - DNA, 31 bp, Artificial Sequence
  synthetic circulating small noncoding RNA (sncRNA) 5' transfer RNA (tRNA) half
gttcccacaccgggagtcgaacccgggccgc

SEQ ID NO: 1228 - DNA, 11 bp, Artificial Sequence
  synthetic circulating small noncoding RNA (sncRNA) 5' transfer RNA (tRNA) half
gtttccgcccg

SEQ ID NO: 1229 - DNA, 22 bp, Artificial Sequence
  synthetic circulating small noncoding RNA (sncRNA) 5' transfer RNA (tRNA) half
ggcggtgagagcgccgaatcct

SEQ ID NO: 1230 - DNA, 25 bp, Artificial Sequence
  synthetic circulating small noncoding RNA (sncRNA) 5' transfer RNA (tRNA) half
agtgtagtggttatcacgttcgcct

SEQ ID NO: 1231 - DNA, 27 bp, Artificial Sequence
  synthetic circulating small noncoding RNA (sncRNA) 5' transfer RNA (tRNA) half
gcgccgaatcctaaccactagaccacc

SEQ ID NO: 1232 - DNA, 32 bp, Artificial Sequence
  synthetic circulating small noncoding RNA (sncRNA) 5' transfer RNA (tRNA) half
gccgtgatcgtataggggttagtactctgcgt

SEQ ID NO: 1233 - DNA, 22 bp, Artificial Sequence
  synthetic circulating small noncoding RNA (sncRNA) 5' transfer RNA (tRNA) half
ataacgtgtttccgcccggttt

SEQ ID NO: 1234 - DNA, 17 bp, Artificial Sequence
  synthetic circulating small noncoding RNA (sncRNA) 5' transfer RNA (tRNA) half
ctaggggtatgattctc

SEQ ID NO: 1235 - DNA, 15 bp, Artificial Sequence
  synthetic circulating small noncoding RNA (sncRNA) 5' transfer RNA (tRNA) half
ctgagctagccgggc

SEQ ID NO: 1236 - DNA, 33 bp, Artificial Sequence
  synthetic circulating small noncoding RNA (sncRNA) 5' transfer RNA (tRNA) half
gggccgcggcggtgagagcgccgaatcctaacc

SEQ ID NO: 1237 - DNA, 12 bp, Artificial Sequence
  synthetic circulating small noncoding RNA (sncRNA) 5' transfer RNA (tRNA) half
gccgtgactcgg

SEQ ID NO: 1238 - DNA, 20 bp, Artificial Sequence
  synthetic circulating small noncoding RNA (sncRNA) 5' transfer RNA (tRNA) half
agtctgatgctctaccgact

SEQ ID NO: 1239 - DNA, 21 bp, Artificial Sequence
  synthetic circulating small noncoding RNA (sncRNA) 5' transfer RNA (tRNA) half
caggaatcctaaccgctagac

SEQ ID NO: 1240 - DNA, 21 bp, Artificial Sequence
  synthetic circulating small noncoding RNA (sncRNA) 5' transfer RNA (tRNA) half
atagtggttagtactctgcgt

SEQ ID NO: 1241 - DNA, 22 bp, Artificial Sequence
  synthetic circulating small noncoding RNA (sncRNA) 5' transfer RNA (tRNA) half
tctgaatccagcgatccgagtt

SEQ ID NO: 1242 - DNA, 31 bp, Artificial Sequence
  synthetic circulating small noncoding RNA (sncRNA) 5' transfer RNA (tRNA) half
cccacaccgggagtcgaacccgggccgcctg

SEQ ID NO: 1243 - DNA, 34 bp, Artificial Sequence
  synthetic circulating small noncoding RNA (sncRNA) 5' transfer RNA (tRNA) half
caggagatcctgggttcgaatcccagcggtgcct

SEQ ID NO: 1244 - DNA, 12 bp, Artificial Sequence
  synthetic circulating small noncoding RNA (sncRNA) 5' transfer RNA (tRNA) half
tgtttccgcccg

SEQ ID NO: 1245 - DNA, 34 bp, Artificial Sequence
  synthetic circulating small noncoding RNA (sncRNA) 5' transfer RNA (tRNA) half
caggcggcccgggttcgactcccggtgtgggaac

SEQ ID NO: 1246 - DNA, 21 bp, Artificial Sequence
  synthetic circulating small noncoding RNA (sncRNA) 5' transfer RNA (tRNA) half
caaactgtttccgcccggttt

SEQ ID NO: 1247 - DNA, 30 bp, Artificial Sequence
  synthetic circulating small noncoding RNA (sncRNA) 5' transfer RNA (tRNA) half
ggggatgtagctcagtggtagagcgcatgc

SEQ ID NO: 1248 - DNA, 25 bp, Artificial Sequence
  synthetic circulating small noncoding RNA (sncRNA) 5' transfer RNA (tRNA) half
tgaccgggaatcgaacccgggccgc

SEQ ID NO: 1249 - DNA, 32 bp, Artificial Sequence
  synthetic circulating small noncoding RNA (sncRNA) 5' transfer RNA (tRNA) half
gaccccgacgtgacttgaacacgcaaccttct

SEQ ID NO: 1250 - DNA, 28 bp, Artificial Sequence
  synthetic circulating small noncoding RNA (sncRNA) 5' transfer RNA (tRNA) half
ccgaatcctaaccactagaccaccaggg

SEQ ID NO: 1251 - DNA, 25 bp, Artificial Sequence
  synthetic circulating small noncoding RNA (sncRNA) 5' transfer RNA (tRNA) half
caggaatcctaaccgctagaccatg

SEQ ID NO: 1252 - DNA, 15 bp, Artificial Sequence
  synthetic circulating small noncoding RNA (sncRNA) 5' transfer RNA (tRNA) half
cccggtatgggaaca

SEQ ID NO: 1253 - DNA, 21 bp, Artificial Sequence
  synthetic circulating small noncoding RNA (sncRNA) 5' transfer RNA (tRNA) half
tgttcccacaccgggagtcga

SEQ ID NO: 1254 - DNA, 15 bp, Artificial Sequence
  synthetic circulating small noncoding RNA (sncRNA) 5' transfer RNA (tRNA) half
aaccgggcggaaaca

SEQ ID NO: 1255 - DNA, 16 bp, Artificial Sequence
  synthetic circulating small noncoding RNA (sncRNA) 5' transfer RNA (tRNA) half
cgccgaatcctaacca

SEQ ID NO: 1256 - DNA, 19 bp, Artificial Sequence
  synthetic circulating small noncoding RNA (sncRNA) 5' transfer RNA (tRNA) half
ccatttgagctaatccccc

SEQ ID NO: 1257 - DNA, 25 bp, Artificial Sequence
  synthetic circulating small noncoding RNA (sncRNA) 5' transfer RNA (tRNA) half
ccttagaccgctcggccatcctgac

SEQ ID NO: 1258 - DNA, 20 bp, Artificial Sequence
  synthetic circulating small noncoding RNA (sncRNA) 5' transfer RNA (tRNA) half
taggggttagtactctgcgt

SEQ ID NO: 1259 - DNA, 34 bp, Artificial Sequence
  synthetic circulating small noncoding RNA (sncRNA) 5' transfer RNA (tRNA) half
acaggagatcctgggttcgaatcccagcggtgcc

SEQ ID NO: 1260 - DNA, 20 bp, Artificial Sequence
  synthetic circulating small noncoding RNA (sncRNA) 5' transfer RNA (tRNA) half
ggcaggcgagaattctacca

SEQ ID NO: 1261 - DNA, 18 bp, Artificial Sequence
  synthetic circulating small noncoding RNA (sncRNA) 5' transfer RNA (tRNA) half
caggaatcctaaccgcta

SEQ ID NO: 1262 - DNA, 35 bp, Artificial Sequence
  synthetic circulating small noncoding RNA (sncRNA) 5' transfer RNA (tRNA) half
caggcggcccgggttcgactcccggtgtgggaaac

SEQ ID NO: 1263 - DNA, 20 bp, Artificial Sequence
  synthetic circulating small noncoding RNA (sncRNA) 5' transfer RNA (tRNA) half
gcagagtactaaccactata

SEQ ID NO: 1264 - DNA, 33 bp, Artificial Sequence
  synthetic circulating small noncoding RNA (sncRNA) 5' transfer RNA (tRNA) half
tcagaagattgcaggttcgagtcctgccgcggt

SEQ ID NO: 1265 - DNA, 31 bp, Artificial Sequence
  synthetic circulating small noncoding RNA (sncRNA) 5' transfer RNA (tRNA) half
gaccccgacgtgattcgaacacgcagccttc

SEQ ID NO: 1266 - DNA, 33 bp, Artificial Sequence
  synthetic circulating small noncoding RNA (sncRNA) 5' transfer RNA (tRNA) half
ggggaattagctcaaatggtagagcgctcgctt

SEQ ID NO: 1267 - DNA, 27 bp, Artificial Sequence
  synthetic circulating small noncoding RNA (sncRNA) 5' transfer RNA (tRNA) half
gggggtatagctcagtggtagagcatt

SEQ ID NO: 1268 - DNA, 16 bp, Artificial Sequence
  synthetic circulating small noncoding RNA (sncRNA) 5' transfer RNA (tRNA) half
gggtatgattctcggt

SEQ ID NO: 1269 - DNA, 15 bp, Artificial Sequence
  synthetic circulating small noncoding RNA (sncRNA) 5' transfer RNA (tRNA) half
tgttcccataccggg

SEQ ID NO: 1270 - DNA, 24 bp, Artificial Sequence
  synthetic circulating small noncoding RNA (sncRNA) 5' transfer RNA (tRNA) half
tggttcagtggtagaattctcgcc

SEQ ID NO: 1271 - DNA, 29 bp, Artificial Sequence
  synthetic circulating small noncoding RNA (sncRNA) 5' transfer RNA (tRNA) half
aggcgaacgtgataaccactacactacgg

SEQ ID NO: 1272 - DNA, 35 bp, Artificial Sequence
  synthetic circulating small noncoding RNA (sncRNA) 5' transfer RNA (tRNA) half
gtggttaggattcggcgctctcaccgccgcggccc

SEQ ID NO: 1273 - DNA, 14 bp, Artificial Sequence
  synthetic circulating small noncoding RNA (sncRNA) 5' transfer RNA (tRNA) half
gcgagaattctacc

SEQ ID NO: 1274 - DNA, 12 bp, Artificial Sequence
  synthetic circulating small noncoding RNA (sncRNA) 5' transfer RNA (tRNA) half
gccggggatcga

SEQ ID NO: 1275 - DNA, 18 bp, Artificial Sequence
  synthetic circulating small noncoding RNA (sncRNA) 5' transfer RNA (tRNA) half
cccctagaccaacgagcc

SEQ ID NO: 1276 - DNA, 24 bp, Artificial Sequence
  synthetic circulating small noncoding RNA (sncRNA) 5' transfer RNA (tRNA) half
agagtccagagtgctaaccattac

SEQ ID NO: 1277 - DNA, 36 bp, Artificial Sequence
  synthetic circulating small noncoding RNA (sncRNA) 5' transfer RNA (tRNA) half
gcgcccaacgtggggctcgaacccacgaccctgaga

SEQ ID NO: 1278 - DNA, 35 bp, Artificial Sequence
  synthetic circulating small noncoding RNA (sncRNA) 5' transfer RNA (tRNA) half
acaggagatcctgggttcaaatcccagcggggcct

SEQ ID NO: 1279 - DNA, 20 bp, Artificial Sequence
  synthetic circulating small noncoding RNA (sncRNA) 5' transfer RNA (tRNA) half
aacgtgtttccgcccggttt

SEQ ID NO: 1280 - DNA, 19 bp, Artificial Sequence
  synthetic circulating small noncoding RNA (sncRNA) 5' transfer RNA (tRNA) half
gtgagtatccccgcctgtc

SEQ ID NO: 1281 - DNA, 14 bp, Artificial Sequence
  synthetic circulating small noncoding RNA (sncRNA) 5' transfer RNA (tRNA) half
tcggccacctcgtc

SEQ ID NO: 1282 - DNA, 26 bp, Artificial Sequence
  synthetic circulating small noncoding RNA (sncRNA) 5' transfer RNA (tRNA) half
tagctcagtcggtagagcatgagact

SEQ ID NO: 1283 - DNA, 34 bp, Artificial Sequence
  synthetic circulating small noncoding RNA (sncRNA) 5' transfer RNA (tRNA) half
gagtccagagtgctagccattacaccatggaacc

SEQ ID NO: 1284 - DNA, 26 bp, Artificial Sequence
  synthetic circulating small noncoding RNA (sncRNA) 5' transfer RNA (tRNA) half
gcctccccgtcggggaatcgaacccc

SEQ ID NO: 1285 - DNA, 14 bp, Artificial Sequence
  synthetic circulating small noncoding RNA (sncRNA) 5' transfer RNA (tRNA) half
gccggggatcgaac

SEQ ID NO: 1286 - DNA, 33 bp, Artificial Sequence
  synthetic circulating small noncoding RNA (sncRNA) 5' transfer RNA (tRNA) half
cccgaacagggacttgaaccctggaccctcaga

SEQ ID NO: 1287 - DNA, 24 bp, Artificial Sequence
  synthetic circulating small noncoding RNA (sncRNA) 5' transfer RNA (tRNA) half
gggttcgactcccggtatgggaac

SEQ ID NO: 1288 - DNA, 33 bp, Artificial Sequence
  synthetic circulating small noncoding RNA (sncRNA) 5' transfer RNA (tRNA) half
ccgccgcggcccgggttcgattcccggtcaggg

SEQ ID NO: 1289 - DNA, 37 bp, Artificial Sequence
  synthetic circulating small noncoding RNA (sncRNA) 5' transfer RNA (tRNA) half
ggcgtccctgggtgggctcgaaccaccaacctttcgg

SEQ ID NO: 1290 - DNA, 12 bp, Artificial Sequence
  synthetic circulating small noncoding RNA (sncRNA) 5' transfer RNA (tRNA) half
gcgccgaatcct

SEQ ID NO: 1291 - DNA, 36 bp, Artificial Sequence
  synthetic circulating small noncoding RNA (sncRNA) 5' transfer RNA (tRNA) half
aacccgggcctcccgcgtggcaggcgagaattctac

SEQ ID NO: 1292 - DNA, 16 bp, Artificial Sequence
  synthetic circulating small noncoding RNA (sncRNA) 5' transfer RNA (tRNA) half
aacccgggcctcccgc

SEQ ID NO: 1293 - DNA, 20 bp, Artificial Sequence
  synthetic circulating small noncoding RNA (sncRNA) 5' transfer RNA (tRNA) half
atggttagcactctggactc

SEQ ID NO: 1294 - DNA, 16 bp, Artificial Sequence
  synthetic circulating small noncoding RNA (sncRNA) 5' transfer RNA (tRNA) half
gagaatcataccccta

SEQ ID NO: 1295 - DNA, 21 bp, Artificial Sequence
  synthetic circulating small noncoding RNA (sncRNA) 5' transfer RNA (tRNA) half
gcgaccttggcgttattagca

SEQ ID NO: 1296 - DNA, 33 bp, Artificial Sequence
  synthetic circulating small noncoding RNA (sncRNA) 5' transfer RNA (tRNA) half
aggcggggatactcaccactatactaacgagga

SEQ ID NO: 1297 - DNA, 27 bp, Artificial Sequence
  synthetic circulating small noncoding RNA (sncRNA) 5' transfer RNA (tRNA) half
gagtgctaaccattacaccatggaacc

SEQ ID NO: 1298 - DNA, 16 bp, Artificial Sequence
  synthetic circulating small noncoding RNA (sncRNA) 5' transfer RNA (tRNA) half
gcttccctgaccggga

SEQ ID NO: 1299 - DNA, 32 bp, Artificial Sequence
  synthetic circulating small noncoding RNA (sncRNA) 5' transfer RNA (tRNA) half
cgccgaatcctaaccactagaccaccagggag

SEQ ID NO: 1300 - DNA, 31 bp, Artificial Sequence
  synthetic circulating small noncoding RNA (sncRNA) 5' transfer RNA (tRNA) half
gttccatagtgtagcggttatcacgtctgct

SEQ ID NO: 1301 - DNA, 32 bp, Artificial Sequence
  synthetic circulating small noncoding RNA (sncRNA) 5' transfer RNA (tRNA) half
cctgaccgggaatcgaacccgggccgcggcgg

SEQ ID NO: 1302 - DNA, 34 bp, Artificial Sequence
  synthetic circulating small noncoding RNA (sncRNA) 5' transfer RNA (tRNA) half
gggggcacccggatttgaaccggggacctcttga

SEQ ID NO: 1303 - DNA, 15 bp, Artificial Sequence
  synthetic circulating small noncoding RNA (sncRNA) 5' transfer RNA (tRNA) half
tagtggttagtactc

SEQ ID NO: 1304 - DNA, 36 bp, Artificial Sequence
  synthetic circulating small noncoding RNA (sncRNA) 5' transfer RNA (tRNA) half
taaacaggagatcctgggttcgaatcccagcggggc

SEQ ID NO: 1305 - DNA, 26 bp, Artificial Sequence
  synthetic circulating small noncoding RNA (sncRNA) 5' transfer RNA (tRNA) half
tcccacatggtctagcggttaggatt

SEQ ID NO: 1306 - DNA, 35 bp, Artificial Sequence
  synthetic circulating small noncoding RNA (sncRNA) 5' transfer RNA (tRNA) half
caggcggcccgggttcgactcccggtgtgggaacg

SEQ ID NO: 1307 - DNA, 34 bp, Artificial Sequence
  synthetic circulating small noncoding RNA (sncRNA) 5' transfer RNA (tRNA) half
tcagaaggttgcgtgttcaaatcacgtcggggtc

SEQ ID NO: 1308 - DNA, 24 bp, Artificial Sequence
  synthetic circulating small noncoding RNA (sncRNA) 5' transfer RNA (tRNA) half
gtttccgtagtgtagtggttatca

SEQ ID NO: 1309 - DNA, 16 bp, Artificial Sequence
  synthetic circulating small noncoding RNA (sncRNA) 5' transfer RNA (tRNA) half
cctccccgtcggggaa

SEQ ID NO: 1310 - DNA, 22 bp, Artificial Sequence
  synthetic circulating small noncoding RNA (sncRNA) 5' transfer RNA (tRNA) half
tgaactcggatcgctggattca

SEQ ID NO: 1311 - DNA, 30 bp, Artificial Sequence
  synthetic circulating small noncoding RNA (sncRNA) 5' transfer RNA (tRNA) half
ccagagtgctaaccattacaccatggaacc

SEQ ID NO: 1312 - DNA, 27 bp, Artificial Sequence
  synthetic circulating small noncoding RNA (sncRNA) 5' transfer RNA (tRNA) half
gatagctcagtcggtagagcatcagac

SEQ ID NO: 1313 - DNA, 23 bp, Artificial Sequence
  synthetic circulating small noncoding RNA (sncRNA) 5' transfer RNA (tRNA) half
ggttccatagtgtagcggttatc

SEQ ID NO: 1314 - DNA, 34 bp, Artificial Sequence
  synthetic circulating small noncoding RNA (sncRNA) 5' transfer RNA (tRNA) half
gccgaaacccgggatcgaaccagggacctttaga

SEQ ID NO: 1315 - DNA, 23 bp, Artificial Sequence
  synthetic circulating small noncoding RNA (sncRNA) 5' transfer RNA (tRNA) half
agtctcatgctctaccgactgag

SEQ ID NO: 1316 - DNA, 32 bp, Artificial Sequence
  synthetic circulating small noncoding RNA (sncRNA) 5' transfer RNA (tRNA) half
cccacaccgggagtcgaacccgggccgcctgg

SEQ ID NO: 1317 - DNA, 29 bp, Artificial Sequence
  synthetic circulating small noncoding RNA (sncRNA) 5' transfer RNA (tRNA) half
gcgccgaatcctaaccactagaccaccag

SEQ ID NO: 1318 - DNA, 21 bp, Artificial Sequence
  synthetic circulating small noncoding RNA (sncRNA) 5' transfer RNA (tRNA) half
actcggatcgctggattcaga

SEQ ID NO: 1319 - DNA, 35 bp, Artificial Sequence
  synthetic circulating small noncoding RNA (sncRNA) 5' transfer RNA (tRNA) half
gagccagccaggagtcgaacctagaatcttctgat

SEQ ID NO: 1320 - DNA, 28 bp, Artificial Sequence
  synthetic circulating small noncoding RNA (sncRNA) 5' transfer RNA (tRNA) half
atgggtggttcagtggtagaattctcgc

SEQ ID NO: 1321 - DNA, 33 bp, Artificial Sequence
  synthetic circulating small noncoding RNA (sncRNA) 5' transfer RNA (tRNA) half
gcccggatgatcctcagtggtctggggtgcagg

SEQ ID NO: 1322 - DNA, 36 bp, Artificial Sequence
  synthetic circulating small noncoding RNA (sncRNA) 5' transfer RNA (tRNA) half
gggctcgtccgggatttgaacccgggacctctcgca

SEQ ID NO: 1323 - DNA, 16 bp, Artificial Sequence
  synthetic circulating small noncoding RNA (sncRNA) 5' transfer RNA (tRNA) half
gcgagaatcatacccc

SEQ ID NO: 1324 - DNA, 15 bp, Artificial Sequence
  synthetic circulating small noncoding RNA (sncRNA) 5' transfer RNA (tRNA) half
ggaagcgtgctgggc

SEQ ID NO: 1325 - DNA, 30 bp, Artificial Sequence
  synthetic circulating small noncoding RNA (sncRNA) 5' transfer RNA (tRNA) half
catgggtggttcagtggtagaattctcgcc

SEQ ID NO: 1326 - DNA, 33 bp, Artificial Sequence
  synthetic circulating small noncoding RNA (sncRNA) 5' transfer RNA (tRNA) half
tcttgcgacccgggttcgattcccgggcggcgc

SEQ ID NO: 1327 - DNA, 23 bp, Artificial Sequence
  synthetic circulating small noncoding RNA (sncRNA) 5' transfer RNA (tRNA) half
ctttgaatccagcgatccgagtt

SEQ ID NO: 1328 - DNA, 25 bp, Artificial Sequence
  synthetic circulating small noncoding RNA (sncRNA) 5' transfer RNA (tRNA) half
acgcagagtactaaccactatacga

SEQ ID NO: 1329 - DNA, 18 bp, Artificial Sequence
  synthetic circulating small noncoding RNA (sncRNA) 5' transfer RNA (tRNA) half
ccgttgcgccacgaggtc

SEQ ID NO: 1330 - DNA, 16 bp, Artificial Sequence
  synthetic circulating small noncoding RNA (sncRNA) 5' transfer RNA (tRNA) half
ggtagcgtggccgagc

SEQ ID NO: 1331 - DNA, 26 bp, Artificial Sequence
  synthetic circulating small noncoding RNA (sncRNA) 5' transfer RNA (tRNA) half
atgctctaccactgagctataccccc

SEQ ID NO: 1332 - DNA, 13 bp, Artificial Sequence
  synthetic circulating small noncoding RNA (sncRNA) 5' transfer RNA (tRNA) half
gagcgccgaatcc

SEQ ID NO: 1333 - DNA, 31 bp, Artificial Sequence
  synthetic circulating small noncoding RNA (sncRNA) 5' transfer RNA (tRNA) half
cgccgcggcccgggttcgattcccggtcagg

SEQ ID NO: 1334 - DNA, 17 bp, Artificial Sequence
  synthetic circulating small noncoding RNA (sncRNA) 5' transfer RNA (tRNA) half
gcattggtggttcagtg

SEQ ID NO: 1335 - DNA, 36 bp, Artificial Sequence
  synthetic circulating small noncoding RNA (sncRNA) 5' transfer RNA (tRNA) half
ctggggattgtgggttcgagtcccatctgggtcgca

SEQ ID NO: 1336 - DNA, 37 bp, Artificial Sequence
  synthetic circulating small noncoding RNA (sncRNA) 5' transfer RNA (tRNA) half
tcagaaggttgcgtgttcaaatcacgtcggggtcatc

SEQ ID NO: 1337 - DNA, 13 bp, Artificial Sequence
  synthetic circulating small noncoding RNA (sncRNA) 5' transfer RNA (tRNA) half
ctgagctagccgg

SEQ ID NO: 1338 - DNA, 16 bp, Artificial Sequence
  synthetic circulating small noncoding RNA (sncRNA) 5' transfer RNA (tRNA) half
ggtatgattctcggtt

SEQ ID NO: 1339 - DNA, 31 bp, Artificial Sequence
  synthetic circulating small noncoding RNA (sncRNA) 5' transfer RNA (tRNA) half
agcattggtggttcagtggtagaattctcgc

SEQ ID NO: 1340 - DNA, 34 bp, Artificial Sequence
  synthetic circulating small noncoding RNA (sncRNA) 5' transfer RNA (tRNA) half
gctcgtccgggatttgaacccgggacctctcgca

SEQ ID NO: 1341 - DNA, 21 bp, Artificial Sequence
  synthetic circulating small noncoding RNA (sncRNA) 5' transfer RNA (tRNA) half
gggttcgattcccggtcaggg

SEQ ID NO: 1342 - DNA, 12 bp, Artificial Sequence
  synthetic circulating small noncoding RNA (sncRNA) 5' transfer RNA (tRNA) half
agaattctcgcc

SEQ ID NO: 1343 - DNA, 21 bp, Artificial Sequence
  synthetic circulating small noncoding RNA (sncRNA) 5' transfer RNA (tRNA) half
aaaccgggcggaaacaacttt

SEQ ID NO: 1344 - DNA, 31 bp, Artificial Sequence
  synthetic circulating small noncoding RNA (sncRNA) 5' transfer RNA (tRNA) half
gcgaccacgaagggactcgaacccccaatct

SEQ ID NO: 1345 - DNA, 35 bp, Artificial Sequence
  synthetic circulating small noncoding RNA (sncRNA) 5' transfer RNA (tRNA) half
gcgagaggtcccgggttcaaatcccggacgagccc

SEQ ID NO: 1346 - DNA, 23 bp, Artificial Sequence
  synthetic circulating small noncoding RNA (sncRNA) 5' transfer RNA (tRNA) half
gtagtcgtggccgagtggttaag

SEQ ID NO: 1347 - DNA, 33 bp, Artificial Sequence
  synthetic circulating small noncoding RNA (sncRNA) 5' transfer RNA (tRNA) half
agtccatcgccttaaccactcggccacctcgtc

SEQ ID NO: 1348 - DNA, 20 bp, Artificial Sequence
  synthetic circulating small noncoding RNA (sncRNA) 5' transfer RNA (tRNA) half
agtcggtagagcatgagact

SEQ ID NO: 1349 - DNA, 15 bp, Artificial Sequence
  synthetic circulating small noncoding RNA (sncRNA) 5' transfer RNA (tRNA) half
gccttagaccgctcg

SEQ ID NO: 1350 - DNA, 14 bp, Artificial Sequence
  synthetic circulating small noncoding RNA (sncRNA) 5' transfer RNA (tRNA) half
gagaatcatacccc

SEQ ID NO: 1351 - DNA, 28 bp, Artificial Sequence
  synthetic circulating small noncoding RNA (sncRNA) 5' transfer RNA (tRNA) half
ggctagctcagtcggtagagcatgagac

SEQ ID NO: 1352 - DNA, 14 bp, Artificial Sequence
  synthetic circulating small noncoding RNA (sncRNA) 5' transfer RNA (tRNA) half
accccgtccgtgcc

SEQ ID NO: 1353 - DNA, 34 bp, Artificial Sequence
  synthetic circulating small noncoding RNA (sncRNA) 5' transfer RNA (tRNA) half
taggcgagcgtgatgaccactacactacggaaac

SEQ ID NO: 1354 - DNA, 27 bp, Artificial Sequence
  synthetic circulating small noncoding RNA (sncRNA) 5' transfer RNA (tRNA) half
agtcccatgctctaccgactgagctag

SEQ ID NO: 1355 - DNA, 31 bp, Artificial Sequence
  synthetic circulating small noncoding RNA (sncRNA) 5' transfer RNA (tRNA) half
gaccccgacgtgacttgaacacgcaaccttc

SEQ ID NO: 1356 - DNA, 14 bp, Artificial Sequence
  synthetic circulating small noncoding RNA (sncRNA) 5' transfer RNA (tRNA) half
gcggggatactcac

SEQ ID NO: 1357 - DNA, 20 bp, Artificial Sequence
  synthetic circulating small noncoding RNA (sncRNA) 5' transfer RNA (tRNA) half
gagtcccatgctctaccgac

SEQ ID NO: 1358 - DNA, 20 bp, Artificial Sequence
  synthetic circulating small noncoding RNA (sncRNA) 5' transfer RNA (tRNA) half
aaccgggcggaaacagcaac

SEQ ID NO: 1359 - DNA, 32 bp, Artificial Sequence
  synthetic circulating small noncoding RNA (sncRNA) 5' transfer RNA (tRNA) half
aagcatgcgctctaccactgagctacatcccc

SEQ ID NO: 1360 - DNA, 33 bp, Artificial Sequence
  synthetic circulating small noncoding RNA (sncRNA) 5' transfer RNA (tRNA) half
atggaggcgtgggttcgaatcccacttctgaca

SEQ ID NO: 1361 - DNA, 17 bp, Artificial Sequence
  synthetic circulating small noncoding RNA (sncRNA) 5' transfer RNA (tRNA) half
cggttatcacgtctgct

SEQ ID NO: 1362 - DNA, 27 bp, Artificial Sequence
  synthetic circulating small noncoding RNA (sncRNA) 5' transfer RNA (tRNA) half
gcccagcacgcttccgctgcgccactc

SEQ ID NO: 1363 - DNA, 28 bp, Artificial Sequence
  synthetic circulating small noncoding RNA (sncRNA) 5' transfer RNA (tRNA) half
cgccgaatcctaaccactagaccaccag

SEQ ID NO: 1364 - DNA, 17 bp, Artificial Sequence
  synthetic circulating small noncoding RNA (sncRNA) 5' transfer RNA (tRNA) half
ggggtatgattctcggt

SEQ ID NO: 1365 - DNA, 22 bp, Artificial Sequence
  synthetic circulating small noncoding RNA (sncRNA) 5' transfer RNA (tRNA) half
tcctgccgtgactcggattcga

SEQ ID NO: 1366 - DNA, 22 bp, Artificial Sequence
  synthetic circulating small noncoding RNA (sncRNA) 5' transfer RNA (tRNA) half
tcccataccgggagtcgaaccc

SEQ ID NO: 1367 - DNA, 19 bp, Artificial Sequence
  synthetic circulating small noncoding RNA (sncRNA) 5' transfer RNA (tRNA) half
cagtcggtagagcatgaga

SEQ ID NO: 1368 - DNA, 38 bp, Artificial Sequence
  synthetic circulating small noncoding RNA (sncRNA) 5' transfer RNA (tRNA) half
aactcggatcgctggattcagagtccagagtgctaacc

SEQ ID NO: 1369 - DNA, 37 bp, Artificial Sequence
  synthetic circulating small noncoding RNA (sncRNA) 5' transfer RNA (tRNA) half
gcaccgctgggattcgaacccaggatctcctgtttac

SEQ ID NO: 1370 - DNA, 23 bp, Artificial Sequence
  synthetic circulating small noncoding RNA (sncRNA) 5' transfer RNA (tRNA) half
ggttcgactcccggtgtgggaac

SEQ ID NO: 1371 - DNA, 33 bp, Artificial Sequence
  synthetic circulating small noncoding RNA (sncRNA) 5' transfer RNA (tRNA) half
agcattggtggttcagtggtagaattctcgcct

SEQ ID NO: 1372 - DNA, 16 bp, Artificial Sequence
  synthetic circulating small noncoding RNA (sncRNA) 5' transfer RNA (tRNA) half
gtctcatgctctaccg

SEQ ID NO: 1373 - DNA, 16 bp, Artificial Sequence
  synthetic circulating small noncoding RNA (sncRNA) 5' transfer RNA (tRNA) half
gtggcaggcgagaatt

SEQ ID NO: 1374 - DNA, 33 bp, Artificial Sequence
  synthetic circulating small noncoding RNA (sncRNA) 5' transfer RNA (tRNA) half
accccgacgtgacttgaacacgcaaccttctga

SEQ ID NO: 1375 - DNA, 11 bp, Artificial Sequence
  synthetic circulating small noncoding RNA (sncRNA) 5' transfer RNA (tRNA) half
ggccgggaatc

SEQ ID NO: 1376 - DNA, 24 bp, Artificial Sequence
  synthetic circulating small noncoding RNA (sncRNA) 5' transfer RNA (tRNA) half
ggttcagtggtagaattctcgcct

SEQ ID NO: 1377 - DNA, 13 bp, Artificial Sequence
  synthetic circulating small noncoding RNA (sncRNA) 5' transfer RNA (tRNA) half
tgtttccgcccgg

SEQ ID NO: 1378 - DNA, 27 bp, Artificial Sequence
  synthetic circulating small noncoding RNA (sncRNA) 5' transfer RNA (tRNA) half
gctggtgtagtggtatcatgcaagatt

SEQ ID NO: 1379 - DNA, 32 bp, Artificial Sequence
  synthetic circulating small noncoding RNA (sncRNA) 5' transfer RNA (tRNA) half
gagccagccaggagtcgaacctagaatcttct

SEQ ID NO: 1380 - DNA, 15 bp, Artificial Sequence
  synthetic circulating small noncoding RNA (sncRNA) 5' transfer RNA (tRNA) half
cgtggcaggcgagaa

SEQ ID NO: 1381 - DNA, 23 bp, Artificial Sequence
  synthetic circulating small noncoding RNA (sncRNA) 5' transfer RNA (tRNA) half
tgttcccacaccgggagtcgaac

SEQ ID NO: 1382 - DNA, 36 bp, Artificial Sequence
  synthetic circulating small noncoding RNA (sncRNA) 5' transfer RNA (tRNA) half
gaaaaccaggaatcctaaccgctagaccatgtggga

SEQ ID NO: 1383 - DNA, 31 bp, Artificial Sequence
  synthetic circulating small noncoding RNA (sncRNA) 5' transfer RNA (tRNA) half
accaggaatcctaaccgctagaccatgtggg

SEQ ID NO: 1384 - DNA, 28 bp, Artificial Sequence
  synthetic circulating small noncoding RNA (sncRNA) 5' transfer RNA (tRNA) half
ccgtgatcgtatagtggttagtactctg

SEQ ID NO: 1385 - DNA, 21 bp, Artificial Sequence
  synthetic circulating small noncoding RNA (sncRNA) 5' transfer RNA (tRNA) half
gggcccagcacgcttccgctg

SEQ ID NO: 1386 - DNA, 15 bp, Artificial Sequence
  synthetic circulating small noncoding RNA (sncRNA) 5' transfer RNA (tRNA) half
tctccccgtcgggga

SEQ ID NO: 1387 - DNA, 18 bp, Artificial Sequence
  synthetic circulating small noncoding RNA (sncRNA) 5' transfer RNA (tRNA) half
cgccgaatcctaaccact

SEQ ID NO: 1388 - DNA, 34 bp, Artificial Sequence
  synthetic circulating small noncoding RNA (sncRNA) 5' transfer RNA (tRNA) half
gcattggccgggaatcgaacccgggcctcccgcg

SEQ ID NO: 1389 - DNA, 30 bp, Artificial Sequence
  synthetic circulating small noncoding RNA (sncRNA) 5' transfer RNA (tRNA) half
gggattaagagtcccatgctctaccgactg

SEQ ID NO: 1390 - DNA, 22 bp, Artificial Sequence
  synthetic circulating small noncoding RNA (sncRNA) 5' transfer RNA (tRNA) half
ctaatggataaggcatcagcct

SEQ ID NO: 1391 - DNA, 17 bp, Artificial Sequence
  synthetic circulating small noncoding RNA (sncRNA) 5' transfer RNA (tRNA) half
cagagtactaaccacta

SEQ ID NO: 1392 - DNA, 35 bp, Artificial Sequence
  synthetic circulating small noncoding RNA (sncRNA) 5' transfer RNA (tRNA) half
acaggcggggatactcaccactatactaacgagga

SEQ ID NO: 1393 - DNA, 32 bp, Artificial Sequence
  synthetic circulating small noncoding RNA (sncRNA) 5' transfer RNA (tRNA) half
gccgtgactcggattcgaaccgaggttgctgc

SEQ ID NO: 1394 - DNA, 26 bp, Artificial Sequence
  synthetic circulating small noncoding RNA (sncRNA) 5' transfer RNA (tRNA) half
attggtggttcagtggtagaattctc

SEQ ID NO: 1395 - DNA, 24 bp, Artificial Sequence
  synthetic circulating small noncoding RNA (sncRNA) 5' transfer RNA (tRNA) half
ggcgaacgtgataaccactacact

SEQ ID NO: 1396 - DNA, 31 bp, Artificial Sequence
  synthetic circulating small noncoding RNA (sncRNA) 5' transfer RNA (tRNA) half
gcgagaattctaccactgaaccaccaatgca

SEQ ID NO: 1397 - DNA, 36 bp, Artificial Sequence
  synthetic circulating small noncoding RNA (sncRNA) 5' transfer RNA (tRNA) half
gtcgagccagccaggagtcgaacctagaatcttctg

SEQ ID NO: 1398 - DNA, 33 bp, Artificial Sequence
  synthetic circulating small noncoding RNA (sncRNA) 5' transfer RNA (tRNA) half
ggccccagcgagatttgaactcgcgacccctgg

SEQ ID NO: 1399 - DNA, 19 bp, Artificial Sequence
  synthetic circulating small noncoding RNA (sncRNA) 5' transfer RNA (tRNA) half
taggggtatgattctcgct

SEQ ID NO: 1400 - DNA, 20 bp, Artificial Sequence
  synthetic circulating small noncoding RNA (sncRNA) 5' transfer RNA (tRNA) half
atgccgtgactcggattcga

SEQ ID NO: 1401 - DNA, 15 bp, Artificial Sequence
  synthetic circulating small noncoding RNA (sncRNA) 5' transfer RNA (tRNA) half
gagggggcacccgga

SEQ ID NO: 1402 - DNA, 24 bp, Artificial Sequence
  synthetic circulating small noncoding RNA (sncRNA) 5' transfer RNA (tRNA) half
cctccccgtcggggaattgaaccc

SEQ ID NO: 1403 - DNA, 23 bp, Artificial Sequence
  synthetic circulating small noncoding RNA (sncRNA) 5' transfer RNA (tRNA) half
cgggttcgattcccgggcggcgc

SEQ ID NO: 1404 - DNA, 23 bp, Artificial Sequence
  synthetic circulating small noncoding RNA (sncRNA) 5' transfer RNA (tRNA) half
ggcgaatgtgataaccactacac

SEQ ID NO: 1405 - DNA, 23 bp, Artificial Sequence
  synthetic circulating small noncoding RNA (sncRNA) 5' transfer RNA (tRNA) half
acaacgcagagtactaaccacta

SEQ ID NO: 1406 - DNA, 29 bp, Artificial Sequence
  synthetic circulating small noncoding RNA (sncRNA) 5' transfer RNA (tRNA) half
gcccagcacgcttccgctgcgccactctg

SEQ ID NO: 1407 - DNA, 22 bp, Artificial Sequence
  synthetic circulating small noncoding RNA (sncRNA) 5' transfer RNA (tRNA) half
gttcccacaccgggagtcgaac

SEQ ID NO: 1408 - DNA, 30 bp, Artificial Sequence
  synthetic circulating small noncoding RNA (sncRNA) 5' transfer RNA (tRNA) half
ccaggaatcctaaccgctagaccatgtggg

SEQ ID NO: 1409 - DNA, 17 bp, Artificial Sequence
  synthetic circulating small noncoding RNA (sncRNA) 5' transfer RNA (tRNA) half
gcagagtactaaccact

SEQ ID NO: 1410 - DNA, 20 bp, Artificial Sequence
  synthetic circulating small noncoding RNA (sncRNA) 5' transfer RNA (tRNA) half
taggggtatgattctcgctt

SEQ ID NO: 1411 - DNA, 31 bp, Artificial Sequence
  synthetic circulating small noncoding RNA (sncRNA) 5' transfer RNA (tRNA) half
gtttccgtagtgtagtggtcatcacgctcgc

SEQ ID NO: 1412 - DNA, 29 bp, Artificial Sequence
  synthetic circulating small noncoding RNA (sncRNA) 5' transfer RNA (tRNA) half
cccatgctctaccgactgagctagccggg

SEQ ID NO: 1413 - DNA, 17 bp, Artificial Sequence
  synthetic circulating small noncoding RNA (sncRNA) 5' transfer RNA (tRNA) half
cgctcggccatcctgac

SEQ ID NO: 1414 - DNA, 17 bp, Artificial Sequence
  synthetic circulating small noncoding RNA (sncRNA) 5' transfer RNA (tRNA) half
agctgaccccgacgtga

SEQ ID NO: 1415 - DNA, 32 bp, Artificial Sequence
  synthetic circulating small noncoding RNA (sncRNA) 5' transfer RNA (tRNA) half
gaccccgacgtgattcgaacacgcagccttct

SEQ ID NO: 1416 - DNA, 34 bp, Artificial Sequence
  synthetic circulating small noncoding RNA (sncRNA) 5' transfer RNA (tRNA) half
gtttccctagtgtagtggttatcacgttcgcctc

SEQ ID NO: 1417 - DNA, 38 bp, Artificial Sequence
  synthetic circulating small noncoding RNA (sncRNA) 5' transfer RNA (tRNA) half
gtaaacaggagatcctgggttcgaatcccagcggtgcc

SEQ ID NO: 1418 - DNA, 15 bp, Artificial Sequence
  synthetic circulating small noncoding RNA (sncRNA) 5' transfer RNA (tRNA) half
gtctgatgctctacc

SEQ ID NO: 1419 - DNA, 11 bp, Artificial Sequence
  synthetic circulating small noncoding RNA (sncRNA) 5' transfer RNA (tRNA) half
cgggcggaaac

SEQ ID NO: 1420 - DNA, 23 bp, Artificial Sequence
  synthetic circulating small noncoding RNA (sncRNA) 5' transfer RNA (tRNA) half
gaactcggatcgctggattcaga

SEQ ID NO: 1421 - DNA, 22 bp, Artificial Sequence
  synthetic circulating small noncoding RNA (sncRNA) 5' transfer RNA (tRNA) half
cccacaccgggagtcgaacccg

SEQ ID NO: 1422 - DNA, 13 bp, Artificial Sequence
  synthetic circulating small noncoding RNA (sncRNA) 5' transfer RNA (tRNA) half
gaaccaccaatgc

SEQ ID NO: 1423 - DNA, 24 bp, Artificial Sequence
  synthetic circulating small noncoding RNA (sncRNA) 5' transfer RNA (tRNA) half
agcgagaatcatacccctagacca

SEQ ID NO: 1424 - DNA, 18 bp, Artificial Sequence
  synthetic circulating small noncoding RNA (sncRNA) 5' transfer RNA (tRNA) half
caacgcagagtactaacc

SEQ ID NO: 1425 - DNA, 35 bp, Artificial Sequence
  synthetic circulating small noncoding RNA (sncRNA) 5' transfer RNA (tRNA) half
gcccggatagctcagtcggtagagcatcagacttt

SEQ ID NO: 1426 - DNA, 32 bp, Artificial Sequence
  synthetic circulating small noncoding RNA (sncRNA) 5' transfer RNA (tRNA) half
cccggctagctcagtcggtagagcatgagact

SEQ ID NO: 1427 - DNA, 25 bp, Artificial Sequence
  synthetic circulating small noncoding RNA (sncRNA) 5' transfer RNA (tRNA) half
gttcccataccgggagtcgaacccg

SEQ ID NO: 1428 - DNA, 24 bp, Artificial Sequence
  synthetic circulating small noncoding RNA (sncRNA) 5' transfer RNA (tRNA) half
acgcagagtactaaccactatacg

SEQ ID NO: 1429 - DNA, 26 bp, Artificial Sequence
  synthetic circulating small noncoding RNA (sncRNA) 5' transfer RNA (tRNA) half
ggcggtgagagcgccgaatcctaacc

SEQ ID NO: 1430 - DNA, 26 bp, Artificial Sequence
  synthetic circulating small noncoding RNA (sncRNA) 5' transfer RNA (tRNA) half
tcccatatggtctagcggttaggatt

SEQ ID NO: 1431 - DNA, 13 bp, Artificial Sequence
  synthetic circulating small noncoding RNA (sncRNA) 5' transfer RNA (tRNA) half
gagctaaccggcc

SEQ ID NO: 1432 - DNA, 31 bp, Artificial Sequence
  synthetic circulating small noncoding RNA (sncRNA) 5' transfer RNA (tRNA) half
agcgccgaatcctaaccactagaccaccagg

SEQ ID NO: 1433 - DNA, 11 bp, Artificial Sequence
  synthetic circulating small noncoding RNA (sncRNA) 5' transfer RNA (tRNA) half
acccgggccgc

SEQ ID NO: 1434 - DNA, 21 bp, Artificial Sequence
  synthetic circulating small noncoding RNA (sncRNA) 5' transfer RNA (tRNA) half
gagtcccatgctctaccgact

SEQ ID NO: 1435 - DNA, 31 bp, Artificial Sequence
  synthetic circulating small noncoding RNA (sncRNA) 5' transfer RNA (tRNA) half
gtcaaatgctctacccctgagctataccccc

SEQ ID NO: 1436 - DNA, 20 bp, Artificial Sequence
  synthetic circulating small noncoding RNA (sncRNA) 5' transfer RNA (tRNA) half
gttcccacaccgggagtcga

SEQ ID NO: 1437 - DNA, 21 bp, Artificial Sequence
  synthetic circulating small noncoding RNA (sncRNA) 5' transfer RNA (tRNA) half
agcgagaatcatacccctaga

SEQ ID NO: 1438 - DNA, 12 bp, Artificial Sequence
  synthetic circulating small noncoding RNA (sncRNA) 5' transfer RNA (tRNA) half
gtcggggaatcg

SEQ ID NO: 1439 - DNA, 17 bp, Artificial Sequence
  synthetic circulating small noncoding RNA (sncRNA) 5' transfer RNA (tRNA) half
gcttccctgaccgggaa

SEQ ID NO: 1440 - DNA, 15 bp, Artificial Sequence
  synthetic circulating small noncoding RNA (sncRNA) 5' transfer RNA (tRNA) half
gtcccatgctctacc

SEQ ID NO: 1441 - DNA, 13 bp, Artificial Sequence
  synthetic circulating small noncoding RNA (sncRNA) 5' transfer RNA (tRNA) half
gtcggggaatcga

SEQ ID NO: 1442 - DNA, 36 bp, Artificial Sequence
  synthetic circulating small noncoding RNA (sncRNA) 5' transfer RNA (tRNA) half
gcccgtacggggatcgaacccgcgaccttggcgtta

SEQ ID NO: 1443 - DNA, 33 bp, Artificial Sequence
  synthetic circulating small noncoding RNA (sncRNA) 5' transfer RNA (tRNA) half
caggagatcctgggttcgaatcccagcggggcc

SEQ ID NO: 1444 - DNA, 28 bp, Artificial Sequence
  synthetic circulating small noncoding RNA (sncRNA) 5' transfer RNA (tRNA) half
ccatatggtctagcggttaggattcctg

SEQ ID NO: 1445 - DNA, 19 bp, Artificial Sequence
  synthetic circulating small noncoding RNA (sncRNA) 5' transfer RNA (tRNA) half
gggggattagctcaaatgg

SEQ ID NO: 1446 - DNA, 22 bp, Artificial Sequence
  synthetic circulating small noncoding RNA (sncRNA) 5' transfer RNA (tRNA) half
gtcaggatggccgagcggtcta

SEQ ID NO: 1447 - DNA, 31 bp, Artificial Sequence
  synthetic circulating small noncoding RNA (sncRNA) 5' transfer RNA (tRNA) half
gactccgccgggactcgaacccggaaccttt

SEQ ID NO: 1448 - DNA, 36 bp, Artificial Sequence
  synthetic circulating small noncoding RNA (sncRNA) 5' transfer RNA (tRNA) half
tgcattggccgggaatcgaacccgggcctcccgcgt

SEQ ID NO: 1449 - DNA, 14 bp, Artificial Sequence
  synthetic circulating small noncoding RNA (sncRNA) 5' transfer RNA (tRNA) half
gtctgatgctctac

SEQ ID NO: 1450 - DNA, 34 bp, Artificial Sequence
  synthetic circulating small noncoding RNA (sncRNA) 5' transfer RNA (tRNA) half
gttcccataccgggagtcgaacccgggccgcctg

SEQ ID NO: 1451 - DNA, 25 bp, Artificial Sequence
  synthetic circulating small noncoding RNA (sncRNA) 5' transfer RNA (tRNA) half
cctccccgtcggggaatcgaacccc

SEQ ID NO: 1452 - DNA, 22 bp, Artificial Sequence
  synthetic circulating small noncoding RNA (sncRNA) 5' transfer RNA (tRNA) half
gggttcgattcccggtcaggga

SEQ ID NO: 1453 - DNA, 20 bp, Artificial Sequence
  synthetic circulating small noncoding RNA (sncRNA) 5' transfer RNA (tRNA) half
gccgaatcctaaccactaga

SEQ ID NO: 1454 - DNA, 29 bp, Artificial Sequence
  synthetic circulating small noncoding RNA (sncRNA) 5' transfer RNA (tRNA) half
ccgtagtgtagtggttatcacgttcgcct

SEQ ID NO: 1455 - DNA, 18 bp, Artificial Sequence
  synthetic circulating small noncoding RNA (sncRNA) 5' transfer RNA (tRNA) half
gcccagcacgcttccgct

SEQ ID NO: 1456 - DNA, 21 bp, Artificial Sequence
  synthetic circulating small noncoding RNA (sncRNA) 5' transfer RNA (tRNA) half
gttccttcgagccggattcga

SEQ ID NO: 1457 - DNA, 31 bp, Artificial Sequence
  synthetic circulating small noncoding RNA (sncRNA) 5' transfer RNA (tRNA) half
ggccccatggtgtaatggttagcactctgga

SEQ ID NO: 1458 - DNA, 31 bp, Artificial Sequence
  synthetic circulating small noncoding RNA (sncRNA) 5' transfer RNA (tRNA) half
aggcgaatgtgataaccactacactacggaa

SEQ ID NO: 1459 - DNA, 14 bp, Artificial Sequence
  synthetic circulating small noncoding RNA (sncRNA) 5' transfer RNA (tRNA) half
gtatgattctcgct

SEQ ID NO: 1460 - DNA, 22 bp, Artificial Sequence
  synthetic circulating small noncoding RNA (sncRNA) 5' transfer RNA (tRNA) half
tcgagccccagtggaaccacgt

SEQ ID NO: 1461 - DNA, 28 bp, Artificial Sequence
  synthetic circulating small noncoding RNA (sncRNA) 5' transfer RNA (tRNA) half
aggaatcctaaccgctagaccatatggg

SEQ ID NO: 1462 - DNA, 28 bp, Artificial Sequence
  synthetic circulating small noncoding RNA (sncRNA) 5' transfer RNA (tRNA) half
tctcatgctctaccgactgagctagccg

SEQ ID NO: 1463 - DNA, 30 bp, Artificial Sequence
  synthetic circulating small noncoding RNA (sncRNA) 5' transfer RNA (tRNA) half
ttcccataccgggagtcgaacccgggccgc

SEQ ID NO: 1464 - DNA, 19 bp, Artificial Sequence
  synthetic circulating small noncoding RNA (sncRNA) 5' transfer RNA (tRNA) half
accactcggccacgactac

SEQ ID NO: 1465 - DNA, 35 bp, Artificial Sequence
  synthetic circulating small noncoding RNA (sncRNA) 5' transfer RNA (tRNA) half
accgccgcggcccgggttcgattcccggtcaggga

SEQ ID NO: 1466 - DNA, 12 bp, Artificial Sequence
  synthetic circulating small noncoding RNA (sncRNA) 5' transfer RNA (tRNA) half
ggccacctcgtc

SEQ ID NO: 1467 - DNA, 23 bp, Artificial Sequence
  synthetic circulating small noncoding RNA (sncRNA) 5' transfer RNA (tRNA) half
cgcagagtactaaccactatacg

SEQ ID NO: 1468 - DNA, 16 bp, Artificial Sequence
  synthetic circulating small noncoding RNA (sncRNA) 5' transfer RNA (tRNA) half
cggtagagcatcagac

SEQ ID NO: 1469 - DNA, 38 bp, Artificial Sequence
  synthetic circulating small noncoding RNA (sncRNA) 5' transfer RNA (tRNA) half
acgcgggaggcccgggttcgattcccggccaatgcact

SEQ ID NO: 1470 - DNA, 24 bp, Artificial Sequence
  synthetic circulating small noncoding RNA (sncRNA) 5' transfer RNA (tRNA) half
gtcggggaatcgaaccccggtctc

SEQ ID NO: 1471 - DNA, 13 bp, Artificial Sequence
  synthetic circulating small noncoding RNA (sncRNA) 5' transfer RNA (tRNA) half
gaacccgggccgc

SEQ ID NO: 1472 - DNA, 37 bp, Artificial Sequence
  synthetic circulating small noncoding RNA (sncRNA) 5' transfer RNA (tRNA) half
gcatgaggtcctgggttcgatccccagcatctccagg

SEQ ID NO: 1473 - DNA, 37 bp, Artificial Sequence
  synthetic circulating small noncoding RNA (sncRNA) 5' transfer RNA (tRNA) half
gtaaacaggagatcctgggttcgaatcccagcggggc

SEQ ID NO: 1474 - DNA, 15 bp, Artificial Sequence
  synthetic circulating small noncoding RNA (sncRNA) 5' transfer RNA (tRNA) half
cgtagtcggcaggat

SEQ ID NO: 1475 - DNA, 14 bp, Artificial Sequence
  synthetic circulating small noncoding RNA (sncRNA) 5' transfer RNA (tRNA) half
cgtagtcggcagga

SEQ ID NO: 1476 - DNA, 28 bp, Artificial Sequence
  synthetic circulating small noncoding RNA (sncRNA) 5' transfer RNA (tRNA) half
ggattcggcgctctcaccgccgcggccc

SEQ ID NO: 1477 - DNA, 22 bp, Artificial Sequence
  synthetic circulating small noncoding RNA (sncRNA) 5' transfer RNA (tRNA) half
agtccagagtgctaaccattac

SEQ ID NO: 1478 - DNA, 14 bp, Artificial Sequence
  synthetic circulating small noncoding RNA (sncRNA) 5' transfer RNA (tRNA) half
gtcaggatggccga

SEQ ID NO: 1479 - DNA, 20 bp, Artificial Sequence
  synthetic circulating small noncoding RNA (sncRNA) 5' transfer RNA (tRNA) half
ggagatgccggggatcgaac

SEQ ID NO: 1480 - DNA, 35 bp, Artificial Sequence
  synthetic circulating small noncoding RNA (sncRNA) 5' transfer RNA (tRNA) half
agggggcacccggatttgaaccggggacctcttga

SEQ ID NO: 1481 - DNA, 19 bp, Artificial Sequence
  synthetic circulating small noncoding RNA (sncRNA) 5' transfer RNA (tRNA) half
tgaatccagcgatccgagt

SEQ ID NO: 1482 - DNA, 15 bp, Artificial Sequence
  synthetic circulating small noncoding RNA (sncRNA) 5' transfer RNA (tRNA) half
ccggggacctttcgc

SEQ ID NO: 1483 - DNA, 35 bp, Artificial Sequence
  synthetic circulating small noncoding RNA (sncRNA) 5' transfer RNA (tRNA) half
gttcccacaccgggagtcgaacccgggccgcctgg

SEQ ID NO: 1484 - DNA, 15 bp, Artificial Sequence
  synthetic circulating small noncoding RNA (sncRNA) 5' transfer RNA (tRNA) half
gtcggggaatcgaac

SEQ ID NO: 1485 - DNA, 28 bp, Artificial Sequence
  synthetic circulating small noncoding RNA (sncRNA) 5' transfer RNA (tRNA) half
ttggtggttcagtggtagaattctcgcc

SEQ ID NO: 1486 - DNA, 26 bp, Artificial Sequence
  synthetic circulating small noncoding RNA (sncRNA) 5' transfer RNA (tRNA) half
gccttagaccactcggccatcctgac

SEQ ID NO: 1487 - DNA, 17 bp, Artificial Sequence
  synthetic circulating small noncoding RNA (sncRNA) 5' transfer RNA (tRNA) half
tcggtagagcatcagac

SEQ ID NO: 1488 - DNA, 17 bp, Artificial Sequence
  synthetic circulating small noncoding RNA (sncRNA) 5' transfer RNA (tRNA) half
acgtgtttccgcccggt

SEQ ID NO: 1489 - DNA, 23 bp, Artificial Sequence
  synthetic circulating small noncoding RNA (sncRNA) 5' transfer RNA (tRNA) half
tgttcccataccgggagtcgaac

SEQ ID NO: 1490 - DNA, 37 bp, Artificial Sequence
  synthetic circulating small noncoding RNA (sncRNA) 5' transfer RNA (tRNA) half
tgcgagaggtcccgggttcaaatcccggacgagcccc

SEQ ID NO: 1491 - DNA, 31 bp, Artificial Sequence
  synthetic circulating small noncoding RNA (sncRNA) 5' transfer RNA (tRNA) half
cccataccgggagtcgaacccgggccgcctg

SEQ ID NO: 1492 - DNA, 35 bp, Artificial Sequence
  synthetic circulating small noncoding RNA (sncRNA) 5' transfer RNA (tRNA) half
gtctgatgctctaccgactgagctatccgggctct

SEQ ID NO: 1493 - DNA, 25 bp, Artificial Sequence
  synthetic circulating small noncoding RNA (sncRNA) 5' transfer RNA (tRNA) half
tggttcagtggtagaattctcgcct

SEQ ID NO: 1494 - DNA, 19 bp, Artificial Sequence
  synthetic circulating small noncoding RNA (sncRNA) 5' transfer RNA (tRNA) half
ggggaattagctcaaatgg

SEQ ID NO: 1495 - DNA, 16 bp, Artificial Sequence
  synthetic circulating small noncoding RNA (sncRNA) 5' transfer RNA (tRNA) half
cccataccgggagtcg

SEQ ID NO: 1496 - DNA, 22 bp, Artificial Sequence
  synthetic circulating small noncoding RNA (sncRNA) 5' transfer RNA (tRNA) half
aggcgaacgtgataaccactac

SEQ ID NO: 1497 - DNA, 19 bp, Artificial Sequence
  synthetic circulating small noncoding RNA (sncRNA) 5' transfer RNA (tRNA) half
cagtcggtagagcatcaga

SEQ ID NO: 1498 - DNA, 38 bp, Artificial Sequence
  synthetic circulating small noncoding RNA (sncRNA) 5' transfer RNA (tRNA) half
ttccgactccgccgggactcgaacccggaacctttgaa

SEQ ID NO: 1499 - DNA, 36 bp, Artificial Sequence
  synthetic circulating small noncoding RNA (sncRNA) 5' transfer RNA (tRNA) half
ttgaccccgacgtgacttgaacacgcaaccttctga

SEQ ID NO: 1500 - DNA, 13 bp, Artificial Sequence
  synthetic circulating small noncoding RNA (sncRNA) 5' transfer RNA (tRNA) half
aagcgtgctgggc

SEQ ID NO: 1501 - DNA, 16 bp, Artificial Sequence
  synthetic circulating small noncoding RNA (sncRNA) 5' transfer RNA (tRNA) half
gggtatgattctcgct

SEQ ID NO: 1502 - DNA, 22 bp, Artificial Sequence
  synthetic circulating small noncoding RNA (sncRNA) 5' transfer RNA (tRNA) half
aagtctgatgctctaccgactg

SEQ ID NO: 1503 - DNA, 32 bp, Artificial Sequence
  synthetic circulating small noncoding RNA (sncRNA) 5' transfer RNA (tRNA) half
agtcagacgcgctaccattgcgccacgaggtc

SEQ ID NO: 1504 - DNA, 19 bp, Artificial Sequence
  synthetic circulating small noncoding RNA (sncRNA) 5' transfer RNA (tRNA) half
agtctgatgctctaccgac

SEQ ID NO: 1505 - DNA, 13 bp, Artificial Sequence
  synthetic circulating small noncoding RNA (sncRNA) 5' transfer RNA (tRNA) half
ctccccgtcgggg

SEQ ID NO: 1506 - DNA, 34 bp, Artificial Sequence
  synthetic circulating small noncoding RNA (sncRNA) 5' transfer RNA (tRNA) half
acgcgggaggcccgggttcgattcccggccaatg

SEQ ID NO: 1507 - DNA, 19 bp, Artificial Sequence
  synthetic circulating small noncoding RNA (sncRNA) 5' transfer RNA (tRNA) half
tgcattggccgggaatcga

SEQ ID NO: 1508 - DNA, 28 bp, Artificial Sequence
  synthetic circulating small noncoding RNA (sncRNA) 5' transfer RNA (tRNA) half
cccacatggtctagcggttaggattcct

SEQ ID NO: 1509 - DNA, 24 bp, Artificial Sequence
  synthetic circulating small noncoding RNA (sncRNA) 5' transfer RNA (tRNA) half
ttcccacaccgggagtcgaacccg

SEQ ID NO: 1510 - DNA, 20 bp, Artificial Sequence
  synthetic circulating small noncoding RNA (sncRNA) 5' transfer RNA (tRNA) half
ctagtggttaggattcggcg

SEQ ID NO: 1511 - DNA, 11 bp, Artificial Sequence
  synthetic circulating small noncoding RNA (sncRNA) 5' transfer RNA (tRNA) half
cgattcccggc

SEQ ID NO: 1512 - DNA, 33 bp, Artificial Sequence
  synthetic circulating small noncoding RNA (sncRNA) 5' transfer RNA (tRNA) half
cccacaccgggagtcgaacccgggccgcctggg

SEQ ID NO: 1513 - DNA, 13 bp, Artificial Sequence
  synthetic circulating small noncoding RNA (sncRNA) 5' transfer RNA (tRNA) half
tcgattcccgggc

SEQ ID NO: 1514 - DNA, 19 bp, Artificial Sequence
  synthetic circulating small noncoding RNA (sncRNA) 5' transfer RNA (tRNA) half
gcattggtggttcagtggt

SEQ ID NO: 1515 - DNA, 23 bp, Artificial Sequence
  synthetic circulating small noncoding RNA (sncRNA) 5' transfer RNA (tRNA) half
attcagagtccagagtgctaacc

SEQ ID NO: 1516 - DNA, 19 bp, Artificial Sequence
  synthetic circulating small noncoding RNA (sncRNA) 5' transfer RNA (tRNA) half
tagaattctcgcctgccac

SEQ ID NO: 1517 - DNA, 13 bp, Artificial Sequence
  synthetic circulating small noncoding RNA (sncRNA) 5' transfer RNA (tRNA) half
gcccggatagctc

SEQ ID NO: 1518 - DNA, 18 bp, Artificial Sequence
  synthetic circulating small noncoding RNA (sncRNA) 5' transfer RNA (tRNA) half
gcattggtggttcaatgg

SEQ ID NO: 1519 - DNA, 13 bp, Artificial Sequence
  synthetic circulating small noncoding RNA (sncRNA) 5' transfer RNA (tRNA) half
gtatgattctcgc

SEQ ID NO: 1520 - DNA, 32 bp, Artificial Sequence
  synthetic circulating small noncoding RNA (sncRNA) 5' transfer RNA (tRNA) half
agattgagggttcgagtcccttcgtggtcgaa

SEQ ID NO: 1521 - DNA, 31 bp, Artificial Sequence
  synthetic circulating small noncoding RNA (sncRNA) 5' transfer RNA (tRNA) half
aagtctgatgctctaccgactgagctatccg

SEQ ID NO: 1522 - DNA, 21 bp, Artificial Sequence
  synthetic circulating small noncoding RNA (sncRNA) 5' transfer RNA (tRNA) half
gttcccataccgggagtcgaa

SEQ ID NO: 1523 - DNA, 37 bp, Artificial Sequence
  synthetic circulating small noncoding RNA (sncRNA) 5' transfer RNA (tRNA) half
gcagaaggtcctgggttcgagccccagtggaaccacg

SEQ ID NO: 1524 - DNA, 33 bp, Artificial Sequence
  synthetic circulating small noncoding RNA (sncRNA) 5' transfer RNA (tRNA) half
accccgacgtgatttgaacacgcaaccttctga

SEQ ID NO: 1525 - DNA, 36 bp, Artificial Sequence
  synthetic circulating small noncoding RNA (sncRNA) 5' transfer RNA (tRNA) half
cgcagcaacctcggttcgaatccgagtcacggcagt

SEQ ID NO: 1526 - DNA, 27 bp, Artificial Sequence
  synthetic circulating small noncoding RNA (sncRNA) 5' transfer RNA (tRNA) half
gaatcctaaccgctagaccatgtggga

SEQ ID NO: 1527 - DNA, 32 bp, Artificial Sequence
  synthetic circulating small noncoding RNA (sncRNA) 5' transfer RNA (tRNA) half
tgttcccataccgggagtcgaacccgggccgc

SEQ ID NO: 1528 - DNA, 22 bp, Artificial Sequence
  synthetic circulating small noncoding RNA (sncRNA) 5' transfer RNA (tRNA) half
gagtcccatgctctaccgactg

SEQ ID NO: 1529 - DNA, 32 bp, Artificial Sequence
  synthetic circulating small noncoding RNA (sncRNA) 5' transfer RNA (tRNA) half
gcgagaattctaccattgaaccaccaatgcac

SEQ ID NO: 1530 - DNA, 19 bp, Artificial Sequence
  synthetic circulating small noncoding RNA (sncRNA) 5' transfer RNA (tRNA) half
gagcgccgaatcctaacca

SEQ ID NO: 1531 - DNA, 32 bp, Artificial Sequence
  synthetic circulating small noncoding RNA (sncRNA) 5' transfer RNA (tRNA) half
agaagattgcaggttcgagtcctgccgcggtc

SEQ ID NO: 1532 - DNA, 19 bp, Artificial Sequence
  synthetic circulating small noncoding RNA (sncRNA) 5' transfer RNA (tRNA) half
tccctggtggtctagtggt

SEQ ID NO: 1533 - DNA, 37 bp, Artificial Sequence
  synthetic circulating small noncoding RNA (sncRNA) 5' transfer RNA (tRNA) half
cttgaccccgacgtgacttgaacacgcaaccttctga

SEQ ID NO: 1534 - DNA, 38 bp, Artificial Sequence
  synthetic circulating small noncoding RNA (sncRNA) 5' transfer RNA (tRNA) half
gccccctctgaggttcgaactcaggaccttcagattat

SEQ ID NO: 1535 - DNA, 28 bp, Artificial Sequence
  synthetic circulating small noncoding RNA (sncRNA) 5' transfer RNA (tRNA) half
aagaattctaccactgaaccaccaatgc

SEQ ID NO: 1536 - DNA, 20 bp, Artificial Sequence
  synthetic circulating small noncoding RNA (sncRNA) 5' transfer RNA (tRNA) half
atagtggttagtactctgcg

SEQ ID NO: 1537 - DNA, 19 bp, Artificial Sequence
  synthetic circulating small noncoding RNA (sncRNA) 5' transfer RNA (tRNA) half
cccattcttgcgacccggg

SEQ ID NO: 1538 - DNA, 15 bp, Artificial Sequence
  synthetic circulating small noncoding RNA (sncRNA) 5' transfer RNA (tRNA) half
acgcagagtactaac

SEQ ID NO: 1539 - DNA, 33 bp, Artificial Sequence
  synthetic circulating small noncoding RNA (sncRNA) 5' transfer RNA (tRNA) half
gaggcgagaattctaccattgaactaccaatgc

SEQ ID NO: 1540 - DNA, 34 bp, Artificial Sequence
  synthetic circulating small noncoding RNA (sncRNA) 5' transfer RNA (tRNA) half
accgccgcggcccgggttcgattcccggtcaggg

SEQ ID NO: 1541 - DNA, 35 bp, Artificial Sequence
  synthetic circulating small noncoding RNA (sncRNA) 5' transfer RNA (tRNA) half
caggcggcccgggttcgactcccggtatgggaaca

SEQ ID NO: 1542 - DNA, 19 bp, Artificial Sequence
  synthetic circulating small noncoding RNA (sncRNA) 5' transfer RNA (tRNA) half
acgtgtttccgcccggttt

SEQ ID NO: 1543 - DNA, 13 bp, Artificial Sequence
  synthetic circulating small noncoding RNA (sncRNA) 5' transfer RNA (tRNA) half
ttccctgaccggg

SEQ ID NO: 1544 - DNA, 18 bp, Artificial Sequence
  synthetic circulating small noncoding RNA (sncRNA) 5' transfer RNA (tRNA) half
ttgtgtcagaagtgggat

SEQ ID NO: 1545 - DNA, 29 bp, Artificial Sequence
  synthetic circulating small noncoding RNA (sncRNA) 5' transfer RNA (tRNA) half
ttggtggttcagtggtagaattctcgcct

SEQ ID NO: 1546 - DNA, 23 bp, Artificial Sequence
  synthetic circulating small noncoding RNA (sncRNA) 5' transfer RNA (tRNA) half
ggttcagtggtagaattctcgcc

SEQ ID NO: 1547 - DNA, 19 bp, Artificial Sequence
  synthetic circulating small noncoding RNA (sncRNA) 5' transfer RNA (tRNA) half
ctagtggttaggattcggc

SEQ ID NO: 1548 - DNA, 21 bp, Artificial Sequence
  synthetic circulating small noncoding RNA (sncRNA) 5' transfer RNA (tRNA) half
aagcgagaatcatacccctag

SEQ ID NO: 1549 - DNA, 33 bp, Artificial Sequence
  synthetic circulating small noncoding RNA (sncRNA) 5' transfer RNA (tRNA) half
ccgactccgccgggactcgaacccggaaccttt

SEQ ID NO: 1550 - DNA, 26 bp, Artificial Sequence
  synthetic circulating small noncoding RNA (sncRNA) 5' transfer RNA (tRNA) half
tagctcagtcggtagagcatcagact

SEQ ID NO: 1551 - DNA, 13 bp, Artificial Sequence
  synthetic circulating small noncoding RNA (sncRNA) 5' transfer RNA (tRNA) half
gctctaccgactg

SEQ ID NO: 1552 - DNA, 25 bp, Artificial Sequence
  synthetic circulating small noncoding RNA (sncRNA) 5' transfer RNA (tRNA) half
ggggatgtagctcagtggtagagca

SEQ ID NO: 1553 - DNA, 22 bp, Artificial Sequence
  synthetic circulating small noncoding RNA (sncRNA) 5' transfer RNA (tRNA) half
ctttgaatccagcgatccgagt

SEQ ID NO: 1554 - DNA, 34 bp, Artificial Sequence
  synthetic circulating small noncoding RNA (sncRNA) 5' transfer RNA (tRNA) half
ccgcagcaacctcggttcgaatccgagtcacggc

SEQ ID NO: 1555 - DNA, 29 bp, Artificial Sequence
  synthetic circulating small noncoding RNA (sncRNA) 5' transfer RNA (tRNA) half
ggctagctcagtcggtagagcatgagact

SEQ ID NO: 1556 - DNA, 19 bp, Artificial Sequence
  synthetic circulating small noncoding RNA (sncRNA) 5' transfer RNA (tRNA) half
gtcggtagagcatgagact

SEQ ID NO: 1557 - DNA, 16 bp, Artificial Sequence
  synthetic circulating small noncoding RNA (sncRNA) 5' transfer RNA (tRNA) half
gacgacgaggatggga

SEQ ID NO: 1558 - DNA, 15 bp, Artificial Sequence
  synthetic circulating small noncoding RNA (sncRNA) 5' transfer RNA (tRNA) half
gtctcatgctctacc

SEQ ID NO: 1559 - DNA, 34 bp, Artificial Sequence
  synthetic circulating small noncoding RNA (sncRNA) 5' transfer RNA (tRNA) half
gaccacgaagggactcgaacccccaatcttctga

SEQ ID NO: 1560 - DNA, 33 bp, Artificial Sequence
  synthetic circulating small noncoding RNA (sncRNA) 5' transfer RNA (tRNA) half
gggggtatagctcagtggtagagcatttgactg

SEQ ID NO: 1561 - DNA, 29 bp, Artificial Sequence
  synthetic circulating small noncoding RNA (sncRNA) 5' transfer RNA (tRNA) half
tctgatgctctaccgactgagctatccgg

SEQ ID NO: 1562 - DNA, 32 bp, Artificial Sequence
  synthetic circulating small noncoding RNA (sncRNA) 5' transfer RNA (tRNA) half
gtagtcgtggccgagtggttaaggcgatggac

SEQ ID NO: 1563 - DNA, 13 bp, Artificial Sequence
  synthetic circulating small noncoding RNA (sncRNA) 5' transfer RNA (tRNA) half
gggggtatagctc

SEQ ID NO: 1564 - DNA, 33 bp, Artificial Sequence
  synthetic circulating small noncoding RNA (sncRNA) 5' transfer RNA (tRNA) half
gcattggccgggaatcgaacccgggcctcccgc

SEQ ID NO: 1565 - DNA, 15 bp, Artificial Sequence
  synthetic circulating small noncoding RNA (sncRNA) 5' transfer RNA (tRNA) half
accggggacctttcg

SEQ ID NO: 1566 - DNA, 10 bp, Artificial Sequence
  synthetic circulating small noncoding RNA (sncRNA) 5' transfer RNA (tRNA) half
gccgtgactc

SEQ ID NO: 1567 - DNA, 28 bp, Artificial Sequence
  synthetic circulating small noncoding RNA (sncRNA) 5' transfer RNA (tRNA) half
cggatagctcagtcggtagagcatcaga

SEQ ID NO: 1568 - DNA, 18 bp, Artificial Sequence
  synthetic circulating small noncoding RNA (sncRNA) 5' transfer RNA (tRNA) half
gtagtcgtggccgagtgg

SEQ ID NO: 1569 - DNA, 31 bp, Artificial Sequence
  synthetic circulating small noncoding RNA (sncRNA) 5' transfer RNA (tRNA) half
tgcagagtactaaccactatacgatctcggc

SEQ ID NO: 1570 - DNA, 26 bp, Artificial Sequence
  synthetic circulating small noncoding RNA (sncRNA) 5' transfer RNA (tRNA) half
gcagagtactaaccactatacgatca

SEQ ID NO: 1571 - DNA, 36 bp, Artificial Sequence
  synthetic circulating small noncoding RNA (sncRNA) 5' transfer RNA (tRNA) half
agtctgatgctctaccgactgagctatccgggctct

SEQ ID NO: 1572 - DNA, 25 bp, Artificial Sequence
  synthetic circulating small noncoding RNA (sncRNA) 5' transfer RNA (tRNA) half
cgcagagtactaaccactatacgat

SEQ ID NO: 1573 - DNA, 36 bp, Artificial Sequence
  synthetic circulating small noncoding RNA (sncRNA) 5' transfer RNA (tRNA) half
gcaccgctgggattcgaacccaggatctcctgttta

SEQ ID NO: 1574 - DNA, 36 bp, Artificial Sequence
  synthetic circulating small noncoding RNA (sncRNA) 5' transfer RNA (tRNA) half
cgcagcaacctcggttcgaatccgagtcacggcatg

SEQ ID NO: 1575 - DNA, 21 bp, Artificial Sequence
  synthetic circulating small noncoding RNA (sncRNA) 5' transfer RNA (tRNA) half
tcgagccccagtggaaccacg

SEQ ID NO: 1576 - DNA, 34 bp, Artificial Sequence
  synthetic circulating small noncoding RNA (sncRNA) 5' transfer RNA (tRNA) half
gcagaaggtcctgggttcgagccccagtggaacc

SEQ ID NO: 1577 - DNA, 21 bp, Artificial Sequence
  synthetic circulating small noncoding RNA (sncRNA) 5' transfer RNA (tRNA) half
tgaatccagcgatccgagttc

SEQ ID NO: 1578 - DNA, 34 bp, Artificial Sequence
  synthetic circulating small noncoding RNA (sncRNA) 5' transfer RNA (tRNA) half
gtttccgtagtgtagtggttatcacgctcgcctc

SEQ ID NO: 1579 - DNA, 12 bp, Artificial Sequence
  synthetic circulating small noncoding RNA (sncRNA) 5' transfer RNA (tRNA) half
cgggcggaaaca

SEQ ID NO: 1580 - DNA, 41 bp, Artificial Sequence
  synthetic circulating small noncoding RNA (sncRNA) 5' transfer RNA (tRNA) half
ggattaagagtcccatgctctaccgactgagctagccgggc

SEQ ID NO: 1581 - DNA, 17 bp, Artificial Sequence
  synthetic circulating small noncoding RNA (sncRNA) 5' transfer RNA (tRNA) half
tctcatgctctaccgac

SEQ ID NO: 1582 - DNA, 22 bp, Artificial Sequence
  synthetic circulating small noncoding RNA (sncRNA) 5' transfer RNA (tRNA) half
agcgccgaatcctaaccactag

SEQ ID NO: 1583 - DNA, 34 bp, Artificial Sequence
  synthetic circulating small noncoding RNA (sncRNA) 5' transfer RNA (tRNA) half
tgccgtgactcggattcgaaccgaggttgctgcg

SEQ ID NO: 1584 - DNA, 27 bp, Artificial Sequence
  synthetic circulating small noncoding RNA (sncRNA) 5' transfer RNA (tRNA) half
tccctggtggtctagtggttaggattc

SEQ ID NO: 1585 - DNA, 27 bp, Artificial Sequence
  synthetic circulating small noncoding RNA (sncRNA) 5' transfer RNA (tRNA) half
gccgtgatcgtatagtggttagtactc

SEQ ID NO: 1586 - DNA, 31 bp, Artificial Sequence
  synthetic circulating small noncoding RNA (sncRNA) 5' transfer RNA (tRNA) half
tccagagtgctagccattacaccatggaacc

SEQ ID NO: 1587 - DNA, 18 bp, Artificial Sequence
  synthetic circulating small noncoding RNA (sncRNA) 5' transfer RNA (tRNA) half
gagatgccggggatcgaa

SEQ ID NO: 1588 - DNA, 26 bp, Artificial Sequence
  synthetic circulating small noncoding RNA (sncRNA) 5' transfer RNA (tRNA) half
ggctcgttggtctaggggtatgattc

SEQ ID NO: 1589 - DNA, 38 bp, Artificial Sequence
  synthetic circulating small noncoding RNA (sncRNA) 5' transfer RNA (tRNA) half
ggtggagatgccggggatcgaacccggggcctcataca

SEQ ID NO: 1590 - DNA, 34 bp, Artificial Sequence
  synthetic circulating small noncoding RNA (sncRNA) 5' transfer RNA (tRNA) half
cccataccgggagtcgaacccgggccgcctgggt

SEQ ID NO: 1591 - DNA, 16 bp, Artificial Sequence
  synthetic circulating small noncoding RNA (sncRNA) 5' transfer RNA (tRNA) half
actcggccatcctgac

SEQ ID NO: 1592 - DNA, 31 bp, Artificial Sequence
  synthetic circulating small noncoding RNA (sncRNA) 5' transfer RNA (tRNA) half
caggcggcccgggttcgactcccggtgtggg

SEQ ID NO: 1593 - DNA, 22 bp, Artificial Sequence
  synthetic circulating small noncoding RNA (sncRNA) 5' transfer RNA (tRNA) half
gtagtggttatcacgttcgcct

SEQ ID NO: 1594 - DNA, 16 bp, Artificial Sequence
  synthetic circulating small noncoding RNA (sncRNA) 5' transfer RNA (tRNA) half
accgggcggaaacaac

SEQ ID NO: 1595 - DNA, 31 bp, Artificial Sequence
  synthetic circulating small noncoding RNA (sncRNA) 5' transfer RNA (tRNA) half
gcccgaacagggacttgaaccctggaccctc

SEQ ID NO: 1596 - DNA, 37 bp, Artificial Sequence
  synthetic circulating small noncoding RNA (sncRNA) 5' transfer RNA (tRNA) half
gttcccacaccgggagtcgaacccgggccgcctgggt

SEQ ID NO: 1597 - DNA, 30 bp, Artificial Sequence
  synthetic circulating small noncoding RNA (sncRNA) 5' transfer RNA (tRNA) half
ttcccacaccgggagtcgaacccgggccgc

SEQ ID NO: 1598 - DNA, 28 bp, Artificial Sequence
  synthetic circulating small noncoding RNA (sncRNA) 5' transfer RNA (tRNA) half
gtgatcgtatagtggttagtactctgcg

SEQ ID NO: 1599 - DNA, 22 bp, Artificial Sequence
  synthetic circulating small noncoding RNA (sncRNA) 5' transfer RNA (tRNA) half
tgttcccataccgggagtcgaa

SEQ ID NO: 1600 - DNA, 20 bp, Artificial Sequence
  synthetic circulating small noncoding RNA (sncRNA) 5' transfer RNA (tRNA) half
aaccgctagaccatgtggga

SEQ ID NO: 1601 - DNA, 28 bp, Artificial Sequence
  synthetic circulating small noncoding RNA (sncRNA) 5' transfer RNA (tRNA) half
accaggaatcctaaccgctagaccatgt

SEQ ID NO: 1602 - DNA, 28 bp, Artificial Sequence
  synthetic circulating small noncoding RNA (sncRNA) 5' transfer RNA (tRNA) half
gcggcccgggttcgattcccggtcaggg

SEQ ID NO: 1603 - DNA, 17 bp, Artificial Sequence
  synthetic circulating small noncoding RNA (sncRNA) 5' transfer RNA (tRNA) half
gagtcccatgctctacc

SEQ ID NO: 1604 - DNA, 26 bp, Artificial Sequence
  synthetic circulating small noncoding RNA (sncRNA) 5' transfer RNA (tRNA) half
gcgccgaatcctaaccactagaccac

SEQ ID NO: 1605 - DNA, 33 bp, Artificial Sequence
  synthetic circulating small noncoding RNA (sncRNA) 5' transfer RNA (tRNA) half
gtcaggatggccgagcggtctaaggcgctgcgt

SEQ ID NO: 1606 - DNA, 33 bp, Artificial Sequence
  synthetic circulating small noncoding RNA (sncRNA) 5' transfer RNA (tRNA) half
ttcccacaccgggagtcgaacccgggccgcctg

SEQ ID NO: 1607 - DNA, 24 bp, Artificial Sequence
  synthetic circulating small noncoding RNA (sncRNA) 5' transfer RNA (tRNA) half
agtccagagtgctaaccattacac

SEQ ID NO: 1608 - DNA, 26 bp, Artificial Sequence
  synthetic circulating small noncoding RNA (sncRNA) 5' transfer RNA (tRNA) half
ggggatgtagctcagtggtagagcgc

SEQ ID NO: 1609 - DNA, 15 bp, Artificial Sequence
  synthetic circulating small noncoding RNA (sncRNA) 5' transfer RNA (tRNA) half
gtttccgtagtgtag

SEQ ID NO: 1610 - DNA, 19 bp, Artificial Sequence
  synthetic circulating small noncoding RNA (sncRNA) 5' transfer RNA (tRNA) half
ggcgaacgtgataaccact

SEQ ID NO: 1611 - DNA, 34 bp, Artificial Sequence
  synthetic circulating small noncoding RNA (sncRNA) 5' transfer RNA (tRNA) half
acccaggcggcccgggttcgactcccggtgtggg

SEQ ID NO: 1612 - DNA, 24 bp, Artificial Sequence
  synthetic circulating small noncoding RNA (sncRNA) 5' transfer RNA (tRNA) half
tctccccgtcggggaatcgaaccc

SEQ ID NO: 1613 - DNA, 36 bp, Artificial Sequence
  synthetic circulating small noncoding RNA (sncRNA) 5' transfer RNA (tRNA) half
accgccgcggcccgggttcgattcccggtcagggaa

SEQ ID NO: 1614 - DNA, 20 bp, Artificial Sequence
  synthetic circulating small noncoding RNA (sncRNA) 5' transfer RNA (tRNA) half
tcagtcggtagagcatgaga

SEQ ID NO: 1615 - DNA, 32 bp, Artificial Sequence
  synthetic circulating small noncoding RNA (sncRNA) 5' transfer RNA (tRNA) half
ccccgacgtgacttgaacacgcaaccttctga

SEQ ID NO: 1616 - DNA, 17 bp, Artificial Sequence
  synthetic circulating small noncoding RNA (sncRNA) 5' transfer RNA (tRNA) half
gaagcgagaatcatacc

SEQ ID NO: 1617 - DNA, 23 bp, Artificial Sequence
  synthetic circulating small noncoding RNA (sncRNA) 5' transfer RNA (tRNA) half
gtcccatgctctaccgactgagc

SEQ ID NO: 1618 - DNA, 36 bp, Artificial Sequence
  synthetic circulating small noncoding RNA (sncRNA) 5' transfer RNA (tRNA) half
tcagaagattgcaggttcgagtcctgccgcggtcga

SEQ ID NO: 1619 - DNA, 33 bp, Artificial Sequence
  synthetic circulating small noncoding RNA (sncRNA) 5' transfer RNA (tRNA) half
atccagcgccttagaccactcggccacgctacc

SEQ ID NO: 1620 - DNA, 33 bp, Artificial Sequence
  synthetic circulating small noncoding RNA (sncRNA) 5' transfer RNA (tRNA) half
cccgtcggggaattgaaccccggtctcccgcgt

SEQ ID NO: 1621 - DNA, 34 bp, Artificial Sequence
  synthetic circulating small noncoding RNA (sncRNA) 5' transfer RNA (tRNA) half
gggggcacccggatttgaaccagggacctcttga

SEQ ID NO: 1622 - DNA, 14 bp, Artificial Sequence
  synthetic circulating small noncoding RNA (sncRNA) 5' transfer RNA (tRNA) half
tatgattctcgctt

SEQ ID NO: 1623 - DNA, 34 bp, Artificial Sequence
  synthetic circulating small noncoding RNA (sncRNA) 5' transfer RNA (tRNA) half
agtctcatgctctaccgactgagctagccgggcg

SEQ ID NO: 1624 - DNA, 23 bp, Artificial Sequence
  synthetic circulating small noncoding RNA (sncRNA) 5' transfer RNA (tRNA) half
gttcccataccgggagtcgaacc

SEQ ID NO: 1625 - DNA, 39 bp, Artificial Sequence
  synthetic circulating small noncoding RNA (sncRNA) 5' transfer RNA (tRNA) half
gccccgtgtgaggatcgaactcacgaccttcagattatg

SEQ ID NO: 1626 - DNA, 23 bp, Artificial Sequence
  synthetic circulating small noncoding RNA (sncRNA) 5' transfer RNA (tRNA) half
gtctccccgtcggggaatcgaac

SEQ ID NO: 1627 - DNA, 33 bp, Artificial Sequence
  synthetic circulating small noncoding RNA (sncRNA) 5' transfer RNA (tRNA) half
attcttgcgacccgggttcgattcccgggcggc

SEQ ID NO: 1628 - DNA, 18 bp, Artificial Sequence
  synthetic circulating small noncoding RNA (sncRNA) 5' transfer RNA (tRNA) half
ctctaccgactgagctat

SEQ ID NO: 1629 - DNA, 30 bp, Artificial Sequence
  synthetic circulating small noncoding RNA (sncRNA) 5' transfer RNA (tRNA) half
ggcgaatgtgataaccactacactacggaa

SEQ ID NO: 1630 - DNA, 11 bp, Artificial Sequence
  synthetic circulating small noncoding RNA (sncRNA) 5' transfer RNA (tRNA) half
cggtgagagcg

SEQ ID NO: 1631 - DNA, 18 bp, Artificial Sequence
  synthetic circulating small noncoding RNA (sncRNA) 5' transfer RNA (tRNA) half
ggtagtgtggccgagcgg

SEQ ID NO: 1632 - DNA, 32 bp, Artificial Sequence
  synthetic circulating small noncoding RNA (sncRNA) 5' transfer RNA (tRNA) half
ttgcgacccgggttcgattcccgggcggcgca

SEQ ID NO: 1633 - DNA, 21 bp, Artificial Sequence
  synthetic circulating small noncoding RNA (sncRNA) 5' transfer RNA (tRNA) half
agcgccgaatcctaaccacta

SEQ ID NO: 1634 - DNA, 36 bp, Artificial Sequence
  synthetic circulating small noncoding RNA (sncRNA) 5' transfer RNA (tRNA) half
gtttccgcccggtttcgaaccggggacctttcgcgt

SEQ ID NO: 1635 - DNA, 18 bp, Artificial Sequence
  synthetic circulating small noncoding RNA (sncRNA) 5' transfer RNA (tRNA) half
atcacgtcggggtcatct

SEQ ID NO: 1636 - DNA, 19 bp, Artificial Sequence
  synthetic circulating small noncoding RNA (sncRNA) 5' transfer RNA (tRNA) half
gggctcgtccgggatttga

SEQ ID NO: 1637 - DNA, 20 bp, Artificial Sequence
  synthetic circulating small noncoding RNA (sncRNA) 5' transfer RNA (tRNA) half
gtcaggatggccgagcggtc

SEQ ID NO: 1638 - DNA, 29 bp, Artificial Sequence
  synthetic circulating small noncoding RNA (sncRNA) 5' transfer RNA (tRNA) half
gccgtgactcggattcgaaccgaggttgc

SEQ ID NO: 1639 - DNA, 19 bp, Artificial Sequence
  synthetic circulating small noncoding RNA (sncRNA) 5' transfer RNA (tRNA) half
tccattgcgccactggccc

SEQ ID NO: 1640 - DNA, 17 bp, Artificial Sequence
  synthetic circulating small noncoding RNA (sncRNA) 5' transfer RNA (tRNA) half
gggccgcggcggtgaga

SEQ ID NO: 1641 - DNA, 19 bp, Artificial Sequence
  synthetic circulating small noncoding RNA (sncRNA) 5' transfer RNA (tRNA) half
caacgcagagtactaacca

SEQ ID NO: 1642 - DNA, 35 bp, Artificial Sequence
  synthetic circulating small noncoding RNA (sncRNA) 5' transfer RNA (tRNA) half
ccgactccgccgggactcgaacccggaacctttga

SEQ ID NO: 1643 - DNA, 25 bp, Artificial Sequence
  synthetic circulating small noncoding RNA (sncRNA) 5' transfer RNA (tRNA) half
catggtctagcggttaggattcctg

SEQ ID NO: 1644 - DNA, 22 bp, Artificial Sequence
  synthetic circulating small noncoding RNA (sncRNA) 5' transfer RNA (tRNA) half
cggttcgaatccgagtcacggc

SEQ ID NO: 1645 - DNA, 25 bp, Artificial Sequence
  synthetic circulating small noncoding RNA (sncRNA) 5' transfer RNA (tRNA) half
gctctaccatttgagctaatccccc

SEQ ID NO: 1646 - DNA, 16 bp, Artificial Sequence
  synthetic circulating small noncoding RNA (sncRNA) 5' transfer RNA (tRNA) half
tccggctcgaaggact

SEQ ID NO: 1647 - DNA, 23 bp, Artificial Sequence
  synthetic circulating small noncoding RNA (sncRNA) 5' transfer RNA (tRNA) half
gctctaccgactgagctagccgg

SEQ ID NO: 1648 - DNA, 13 bp, Artificial Sequence
  synthetic circulating small noncoding RNA (sncRNA) 5' transfer RNA (tRNA) half
gaccccgacgtga

SEQ ID NO: 1649 - DNA, 28 bp, Artificial Sequence
  synthetic circulating small noncoding RNA (sncRNA) 5' transfer RNA (tRNA) half
tgcgacccgggttcgattcccgggcggc

SEQ ID NO: 1650 - DNA, 22 bp, Artificial Sequence
  synthetic circulating small noncoding RNA (sncRNA) 5' transfer RNA (tRNA) half
ggggatgtagctcagtggtaga

SEQ ID NO: 1651 - DNA, 16 bp, Artificial Sequence
  synthetic circulating small noncoding RNA (sncRNA) 5' transfer RNA (tRNA) half
cccacaccgggagtcg

SEQ ID NO: 1652 - DNA, 15 bp, Artificial Sequence
  synthetic circulating small noncoding RNA (sncRNA) 5' transfer RNA (tRNA) half
ctcggccatcctggt

SEQ ID NO: 1653 - DNA, 34 bp, Artificial Sequence
  synthetic circulating small noncoding RNA (sncRNA) 5' transfer RNA (tRNA) half
gagccagccaggagtcgaacctggaatcttctga

SEQ ID NO: 1654 - DNA, 22 bp, Artificial Sequence
  synthetic circulating small noncoding RNA (sncRNA) 5' transfer RNA (tRNA) half
tcgatgcccgcatcctccactt

SEQ ID NO: 1655 - DNA, 19 bp, Artificial Sequence
  synthetic circulating small noncoding RNA (sncRNA) 5' transfer RNA (tRNA) half
gcgaacgtgataaccacta

SEQ ID NO: 1656 - DNA, 16 bp, Artificial Sequence
  synthetic circulating small noncoding RNA (sncRNA) 5' transfer RNA (tRNA) half
accccgtccgtgcctg

SEQ ID NO: 1657 - DNA, 20 bp, Artificial Sequence
  synthetic circulating small noncoding RNA (sncRNA) 5' transfer RNA (tRNA) half
aaactgtttccgcccggttt

SEQ ID NO: 1658 - DNA, 15 bp, Artificial Sequence
  synthetic circulating small noncoding RNA (sncRNA) 5' transfer RNA (tRNA) half
ggcgaacgtgataac

SEQ ID NO: 1659 - DNA, 32 bp, Artificial Sequence
  synthetic circulating small noncoding RNA (sncRNA) 5' transfer RNA (tRNA) half
aaccaggaatcctaaccgctagaccatgtggg

SEQ ID NO: 1660 - DNA, 10 bp, Artificial Sequence
  synthetic circulating small noncoding RNA (sncRNA) 5' transfer RNA (tRNA) half
gcgccgaatc

SEQ ID NO: 1661 - DNA, 28 bp, Artificial Sequence
  synthetic circulating small noncoding RNA (sncRNA) 5' transfer RNA (tRNA) half
ggttccatagtgtagcggttatcacgtc

SEQ ID NO: 1662 - DNA, 13 bp, Artificial Sequence
  synthetic circulating small noncoding RNA (sncRNA) 5' transfer RNA (tRNA) half
ttcgaaaccgggc

SEQ ID NO: 1663 - DNA, 14 bp, Artificial Sequence
  synthetic circulating small noncoding RNA (sncRNA) 5' transfer RNA (tRNA) half
ttcccgggcggcgc

SEQ ID NO: 1664 - DNA, 24 bp, Artificial Sequence
  synthetic circulating small noncoding RNA (sncRNA) 5' transfer RNA (tRNA) half
agtgtagtggttatcacgttcgcc

SEQ ID NO: 1665 - DNA, 20 bp, Artificial Sequence
  synthetic circulating small noncoding RNA (sncRNA) 5' transfer RNA (tRNA) half
aaccgctagaccatatggga

SEQ ID NO: 1666 - DNA, 19 bp, Artificial Sequence
  synthetic circulating small noncoding RNA (sncRNA) 5' transfer RNA (tRNA) half
accactgagctacatcccc

SEQ ID NO: 1667 - DNA, 30 bp, Artificial Sequence
  synthetic circulating small noncoding RNA (sncRNA) 5' transfer RNA (tRNA) half
gcccaacgtggggctcgaacccacgaccct

SEQ ID NO: 1668 - DNA, 29 bp, Artificial Sequence
  synthetic circulating small noncoding RNA (sncRNA) 5' transfer RNA (tRNA) half
ggcgaatgtgataaccactacactacgga

SEQ ID NO: 1669 - DNA, 32 bp, Artificial Sequence
  synthetic circulating small noncoding RNA (sncRNA) 5' transfer RNA (tRNA) half
gcaagaattctaccactgaaccaccaatgctt

SEQ ID NO: 1670 - DNA, 35 bp, Artificial Sequence
  synthetic circulating small noncoding RNA (sncRNA) 5' transfer RNA (tRNA) half
tccccgtcggggaattgaaccccggtctcccgcgt

SEQ ID NO: 1671 - DNA, 36 bp, Artificial Sequence
  synthetic circulating small noncoding RNA (sncRNA) 5' transfer RNA (tRNA) half
gagggggcacccggatttgaaccggggacctcttga

SEQ ID NO: 1672 - DNA, 25 bp, Artificial Sequence
  synthetic circulating small noncoding RNA (sncRNA) 5' transfer RNA (tRNA) half
ggcggtgagagcgccgaatcctaac

SEQ ID NO: 1673 - DNA, 38 bp, Artificial Sequence
  synthetic circulating small noncoding RNA (sncRNA) 5' transfer RNA (tRNA) half
acccgggccgcggcggtgagagcgccgaatcctaacca

SEQ ID NO: 1674 - DNA, 35 bp, Artificial Sequence
  synthetic circulating small noncoding RNA (sncRNA) 5' transfer RNA (tRNA) half
tgaccccgacgtgacttgaacacgcaaccttctga

SEQ ID NO: 1675 - DNA, 18 bp, Artificial Sequence
  synthetic circulating small noncoding RNA (sncRNA) 5' transfer RNA (tRNA) half
aggggtatgattctcgct

SEQ ID NO: 1676 - DNA, 12 bp, Artificial Sequence
  synthetic circulating small noncoding RNA (sncRNA) 5' transfer RNA (tRNA) half
tttccgcccggt

SEQ ID NO: 1677 - DNA, 29 bp, Artificial Sequence
  synthetic circulating small noncoding RNA (sncRNA) 5' transfer RNA (tRNA) half
gcgagaatcatacccctagaccaacgagc

SEQ ID NO: 1678 - DNA, 18 bp, Artificial Sequence
  synthetic circulating small noncoding RNA (sncRNA) 5' transfer RNA (tRNA) half
gcattggtagttcaatgg

SEQ ID NO: 1679 - DNA, 13 bp, Artificial Sequence
  synthetic circulating small noncoding RNA (sncRNA) 5' transfer RNA (tRNA) half
ttcgatccccggc

SEQ ID NO: 1680 - DNA, 30 bp, Artificial Sequence
  synthetic circulating small noncoding RNA (sncRNA) 5' transfer RNA (tRNA) half
gctcgttggtctaggggtatgattctcgct

SEQ ID NO: 1681 - DNA, 26 bp, Artificial Sequence
  synthetic circulating small noncoding RNA (sncRNA) 5' transfer RNA (tRNA) half
ggtagtgtggccgagcggtctaaggc

SEQ ID NO: 1682 - DNA, 12 bp, Artificial Sequence
  synthetic circulating small noncoding RNA (sncRNA) 5' transfer RNA (tRNA) half
ggccatcctgac

SEQ ID NO: 1683 - DNA, 21 bp, Artificial Sequence
  synthetic circulating small noncoding RNA (sncRNA) 5' transfer RNA (tRNA) half
ggcggtgagagcgccgaatcc

SEQ ID NO: 1684 - DNA, 20 bp, Artificial Sequence
  synthetic circulating small noncoding RNA (sncRNA) 5' transfer RNA (tRNA) half
agcgagaatcatacccctag

SEQ ID NO: 1685 - DNA, 36 bp, Artificial Sequence
  synthetic circulating small noncoding RNA (sncRNA) 5' transfer RNA (tRNA) half
gaaggccccagcgagatttgaactcgcgacccctgg

SEQ ID NO: 1686 - DNA, 14 bp, Artificial Sequence
  synthetic circulating small noncoding RNA (sncRNA) 5' transfer RNA (tRNA) half
cgaacccgggccgc

SEQ ID NO: 1687 - DNA, 12 bp, Artificial Sequence
  synthetic circulating small noncoding RNA (sncRNA) 5' transfer RNA (tRNA) half
aacccgggacct

SEQ ID NO: 1688 - DNA, 36 bp, Artificial Sequence
  synthetic circulating small noncoding RNA (sncRNA) 5' transfer RNA (tRNA) half
gtgccccgtgtgaggatcgaactcacgaccttcaga

SEQ ID NO: 1689 - DNA, 17 bp, Artificial Sequence
  synthetic circulating small noncoding RNA (sncRNA) 5' transfer RNA (tRNA) half
ggaatcctaaccgctag

SEQ ID NO: 1690 - DNA, 36 bp, Artificial Sequence
  synthetic circulating small noncoding RNA (sncRNA) 5' transfer RNA (tRNA) half
tcccacatggtctagcggttaggattcctggttttc

SEQ ID NO: 1691 - DNA, 31 bp, Artificial Sequence
  synthetic circulating small noncoding RNA (sncRNA) 5' transfer RNA (tRNA) half
caccaaagcctaaccactagaccaccaggga

SEQ ID NO: 1692 - DNA, 19 bp, Artificial Sequence
  synthetic circulating small noncoding RNA (sncRNA) 5' transfer RNA (tRNA) half
accgggcggaaacaacttt

SEQ ID NO: 1693 - DNA, 14 bp, Artificial Sequence
  synthetic circulating small noncoding RNA (sncRNA) 5' transfer RNA (tRNA) half
gaccccgacgtgac

SEQ ID NO: 1694 - DNA, 20 bp, Artificial Sequence
  synthetic circulating small noncoding RNA (sncRNA) 5' transfer RNA (tRNA) half
tcagtcggtagagcatcaga

SEQ ID NO: 1695 - DNA, 25 bp, Artificial Sequence
  synthetic circulating small noncoding RNA (sncRNA) 5' transfer RNA (tRNA) half
ggggttcgattccccgacggggaga

SEQ ID NO: 1696 - DNA, 29 bp, Artificial Sequence
  synthetic circulating small noncoding RNA (sncRNA) 5' transfer RNA (tRNA) half
cagagtgctaaccattacaccatgggacc

SEQ ID NO: 1697 - DNA, 31 bp, Artificial Sequence
  synthetic circulating small noncoding RNA (sncRNA) 5' transfer RNA (tRNA) half
cattggtggttcagtggtagaattctcgcct

SEQ ID NO: 1698 - DNA, 16 bp, Artificial Sequence
  synthetic circulating small noncoding RNA (sncRNA) 5' transfer RNA (tRNA) half
tggtagaattctcgcc

SEQ ID NO: 1699 - DNA, 27 bp, Artificial Sequence
  synthetic circulating small noncoding RNA (sncRNA) 5' transfer RNA (tRNA) half
ccatgctctaccgactgagctagccgg

SEQ ID NO: 1700 - DNA, 37 bp, Artificial Sequence
  synthetic circulating small noncoding RNA (sncRNA) 5' transfer RNA (tRNA) half
ctcgagccaggtaggagtcgaacctacaatcttctga

SEQ ID NO: 1701 - DNA, 21 bp, Artificial Sequence
  synthetic circulating small noncoding RNA (sncRNA) 5' transfer RNA (tRNA) half
agtcaaatgctctaccactga

SEQ ID NO: 1702 - DNA, 23 bp, Artificial Sequence
  synthetic circulating small noncoding RNA (sncRNA) 5' transfer RNA (tRNA) half
agtcccatgctctaccgactgag

SEQ ID NO: 1703 - DNA, 17 bp, Artificial Sequence
  synthetic circulating small noncoding RNA (sncRNA) 5' transfer RNA (tRNA) half
tctgatgctctaccgac

SEQ ID NO: 1704 - DNA, 29 bp, Artificial Sequence
  synthetic circulating small noncoding RNA (sncRNA) 5' transfer RNA (tRNA) half
gtgatcgtatagtggttagtactctgcgt

SEQ ID NO: 1705 - DNA, 20 bp, Artificial Sequence
  synthetic circulating small noncoding RNA (sncRNA) 5' transfer RNA (tRNA) half
ggcccagcacgcttccgctg

SEQ ID NO: 1706 - DNA, 30 bp, Artificial Sequence
  synthetic circulating small noncoding RNA (sncRNA) 5' transfer RNA (tRNA) half
tagtggttaggattcggcgctctcaccgcc

SEQ ID NO: 1707 - DNA, 33 bp, Artificial Sequence
  synthetic circulating small noncoding RNA (sncRNA) 5' transfer RNA (tRNA) half
acccgggccgcggcggtgagagcgccgaatcct

SEQ ID NO: 1708 - DNA, 33 bp, Artificial Sequence
  synthetic circulating small noncoding RNA (sncRNA) 5' transfer RNA (tRNA) half
gcctggatagctcagtcggtagagcatcagact

SEQ ID NO: 1709 - DNA, 14 bp, Artificial Sequence
  synthetic circulating small noncoding RNA (sncRNA) 5' transfer RNA (tRNA) half
gatgctctaccgac

SEQ ID NO: 1710 - DNA, 19 bp, Artificial Sequence
  synthetic circulating small noncoding RNA (sncRNA) 5' transfer RNA (tRNA) half
aaccgggcggaaacagcaa

SEQ ID NO: 1711 - DNA, 23 bp, Artificial Sequence
  synthetic circulating small noncoding RNA (sncRNA) 5' transfer RNA (tRNA) half
tgctctaccgactgagctagccg

SEQ ID NO: 1712 - DNA, 25 bp, Artificial Sequence
  synthetic circulating small noncoding RNA (sncRNA) 5' transfer RNA (tRNA) half
accgggaatcgaacccgggccgcgg

SEQ ID NO: 1713 - DNA, 23 bp, Artificial Sequence
  synthetic circulating small noncoding RNA (sncRNA) 5' transfer RNA (tRNA) half
cgccgaatcctaaccactagacc

SEQ ID NO: 1714 - DNA, 35 bp, Artificial Sequence
  synthetic circulating small noncoding RNA (sncRNA) 5' transfer RNA (tRNA) half
agggggcacccggatttgaaccagggacctcttga

SEQ ID NO: 1715 - DNA, 24 bp, Artificial Sequence
  synthetic circulating small noncoding RNA (sncRNA) 5' transfer RNA (tRNA) half
tggtagaattctcgcctgccacgc

SEQ ID NO: 1716 - DNA, 28 bp, Artificial Sequence
  synthetic circulating small noncoding RNA (sncRNA) 5' transfer RNA (tRNA) half
ggatagctcagtcggtagagcatcagac

SEQ ID NO: 1717 - DNA, 37 bp, Artificial Sequence
  synthetic circulating small noncoding RNA (sncRNA) 5' transfer RNA (tRNA) half
taatctgaaggtcctgagttcgaacctcagagggggc

SEQ ID NO: 1718 - DNA, 23 bp, Artificial Sequence
  synthetic circulating small noncoding RNA (sncRNA) 5' transfer RNA (tRNA) half
tccctgaccgggaatcgaacccg

SEQ ID NO: 1719 - DNA, 30 bp, Artificial Sequence
  synthetic circulating small noncoding RNA (sncRNA) 5' transfer RNA (tRNA) half
cccacaccgggagtcgaacccgggccgcct

SEQ ID NO: 1720 - DNA, 29 bp, Artificial Sequence
  synthetic circulating small noncoding RNA (sncRNA) 5' transfer RNA (tRNA) half
caaatgctctaccactgagctataccccc

SEQ ID NO: 1721 - DNA, 17 bp, Artificial Sequence
  synthetic circulating small noncoding RNA (sncRNA) 5' transfer RNA (tRNA) half
aggcgagaattctacca

SEQ ID NO: 1722 - DNA, 12 bp, Artificial Sequence
  synthetic circulating small noncoding RNA (sncRNA) 5' transfer RNA (tRNA) half
cgaaccggggac

SEQ ID NO: 1723 - DNA, 36 bp, Artificial Sequence
  synthetic circulating small noncoding RNA (sncRNA) 5' transfer RNA (tRNA) half
gaaaaccaggaatcctaaccgctagaccatatggga

SEQ ID NO: 1724 - DNA, 15 bp, Artificial Sequence
  synthetic circulating small noncoding RNA (sncRNA) 5' transfer RNA (tRNA) half
ctgagctatccgggc

SEQ ID NO: 1725 - DNA, 28 bp, Artificial Sequence
  synthetic circulating small noncoding RNA (sncRNA) 5' transfer RNA (tRNA) half
ctgatgctctaccgactgagctatccgg

SEQ ID NO: 1726 - DNA, 16 bp, Artificial Sequence
  synthetic circulating small noncoding RNA (sncRNA) 5' transfer RNA (tRNA) half
ccttcgatagctcagc

SEQ ID NO: 1727 - DNA, 31 bp, Artificial Sequence
  synthetic circulating small noncoding RNA (sncRNA) 5' transfer RNA (tRNA) half
cccacatggtctagcggttaggattcctggt

SEQ ID NO: 1728 - DNA, 33 bp, Artificial Sequence
  synthetic circulating small noncoding RNA (sncRNA) 5' transfer RNA (tRNA) half
gtctgatgctctaccgactgagctatccgggcg

SEQ ID NO: 1729 - DNA, 32 bp, Artificial Sequence
  synthetic circulating small noncoding RNA (sncRNA) 5' transfer RNA (tRNA) half
ccaggcggcccgggttcgactcccggtgtggg

SEQ ID NO: 1730 - DNA, 13 bp, Artificial Sequence
  synthetic circulating small noncoding RNA (sncRNA) 5' transfer RNA (tRNA) half
tctcttcgggggc

SEQ ID NO: 1731 - DNA, 18 bp, Artificial Sequence
  synthetic circulating small noncoding RNA (sncRNA) 5' transfer RNA (tRNA) half
cgcagagtactaaccact

SEQ ID NO: 1732 - DNA, 33 bp, Artificial Sequence
  synthetic circulating small noncoding RNA (sncRNA) 5' transfer RNA (tRNA) half
aggcgagaattctaccactgaaccaccaatgcg

SEQ ID NO: 1733 - DNA, 30 bp, Artificial Sequence
  synthetic circulating small noncoding RNA (sncRNA) 5' transfer RNA (tRNA) half
gtttccgtagtgtagtggtcatcacgctcg

SEQ ID NO: 1734 - DNA, 32 bp, Artificial Sequence
  synthetic circulating small noncoding RNA (sncRNA) 5' transfer RNA (tRNA) half
ggccctatagctcaggggttagagcactggtc

SEQ ID NO: 1735 - DNA, 18 bp, Artificial Sequence
  synthetic circulating small noncoding RNA (sncRNA) 5' transfer RNA (tRNA) half
gggcccagcacgcttccg

SEQ ID NO: 1736 - DNA, 32 bp, Artificial Sequence
  synthetic circulating small noncoding RNA (sncRNA) 5' transfer RNA (tRNA) half
tgttcccacaccgggagtcgaacccgggccgc

SEQ ID NO: 1737 - DNA, 34 bp, Artificial Sequence
  synthetic circulating small noncoding RNA (sncRNA) 5' transfer RNA (tRNA) half
ggagatgccggggatcgaacccggggcctcatac

SEQ ID NO: 1738 - DNA, 31 bp, Artificial Sequence
  synthetic circulating small noncoding RNA (sncRNA) 5' transfer RNA (tRNA) half
gagccagccaggagtcgaacctagaatcttc

SEQ ID NO: 1739 - DNA, 24 bp, Artificial Sequence
  synthetic circulating small noncoding RNA (sncRNA) 5' transfer RNA (tRNA) half
tcgtatagtggttagtactctgcg

SEQ ID NO: 1740 - DNA, 19 bp, Artificial Sequence
  synthetic circulating small noncoding RNA (sncRNA) 5' transfer RNA (tRNA) half
ggcaggcgagaattctacc

SEQ ID NO: 1741 - DNA, 16 bp, Artificial Sequence
  synthetic circulating small noncoding RNA (sncRNA) 5' transfer RNA (tRNA) half
cagtcggtagagcatc

SEQ ID NO: 1742 - DNA, 28 bp, Artificial Sequence
  synthetic circulating small noncoding RNA (sncRNA) 5' transfer RNA (tRNA) half
gggattaagagtcccatgctctaccgac

SEQ ID NO: 1743 - DNA, 19 bp, Artificial Sequence
  synthetic circulating small noncoding RNA (sncRNA) 5' transfer RNA (tRNA) half
ccgactgagctagccgggc

SEQ ID NO: 1744 - DNA, 25 bp, Artificial Sequence
  synthetic circulating small noncoding RNA (sncRNA) 5' transfer RNA (tRNA) half
gctggtgtagtggtatcatgcaaga

SEQ ID NO: 1745 - DNA, 25 bp, Artificial Sequence
  synthetic circulating small noncoding RNA (sncRNA) 5' transfer RNA (tRNA) half
gtcaggatggccgagcggtctaagg

SEQ ID NO: 1746 - DNA, 34 bp, Artificial Sequence
  synthetic circulating small noncoding RNA (sncRNA) 5' transfer RNA (tRNA) half
aatccagcgccttagaccactcggccacgctacc

SEQ ID NO: 1747 - DNA, 23 bp, Artificial Sequence
  synthetic circulating small noncoding RNA (sncRNA) 5' transfer RNA (tRNA) half
gtatagtggttagtactctgcgt

SEQ ID NO: 1748 - DNA, 21 bp, Artificial Sequence
  synthetic circulating small noncoding RNA (sncRNA) 5' transfer RNA (tRNA) half
tagaattctcgcctgccacgc

SEQ ID NO: 1749 - DNA, 37 bp, Artificial Sequence
  synthetic circulating small noncoding RNA (sncRNA) 5' transfer RNA (tRNA) half
tccgagccagccaggagtcgaacctggaatcttctga

SEQ ID NO: 1750 - DNA, 18 bp, Artificial Sequence
  synthetic circulating small noncoding RNA (sncRNA) 5' transfer RNA (tRNA) half
ccactcggccatcctgac

SEQ ID NO: 1751 - DNA, 25 bp, Artificial Sequence
  synthetic circulating small noncoding RNA (sncRNA) 5' transfer RNA (tRNA) half
attcagagtccagagtgctaaccat

SEQ ID NO: 1752 - DNA, 22 bp, Artificial Sequence
  synthetic circulating small noncoding RNA (sncRNA) 5' transfer RNA (tRNA) half
gttcccataccgggagtcgaac

SEQ ID NO: 1753 - DNA, 13 bp, Artificial Sequence
  synthetic circulating small noncoding RNA (sncRNA) 5' transfer RNA (tRNA) half
gggcctcccgcgt

SEQ ID NO: 1754 - DNA, 30 bp, Artificial Sequence
  synthetic circulating small noncoding RNA (sncRNA) 5' transfer RNA (tRNA) half
gcccagcacgcttccgctgcgccactctgc

SEQ ID NO: 1755 - DNA, 18 bp, Artificial Sequence
  synthetic circulating small noncoding RNA (sncRNA) 5' transfer RNA (tRNA) half
ctaatggataaggcactg

SEQ ID NO: 1756 - DNA, 33 bp, Artificial Sequence
  synthetic circulating small noncoding RNA (sncRNA) 5' transfer RNA (tRNA) half
ggctccatagctcaggggttagagcactggtct

SEQ ID NO: 1757 - DNA, 21 bp, Artificial Sequence
  synthetic circulating small noncoding RNA (sncRNA) 5' transfer RNA (tRNA) half
taaccactacactacggaaac

SEQ ID NO: 1758 - DNA, 13 bp, Artificial Sequence
  synthetic circulating small noncoding RNA (sncRNA) 5' transfer RNA (tRNA) half
gttaggattcggc

SEQ ID NO: 1759 - DNA, 28 bp, Artificial Sequence
  synthetic circulating small noncoding RNA (sncRNA) 5' transfer RNA (tRNA) half
ccatagtgtagcggttatcacgtctgct

SEQ ID NO: 1760 - DNA, 28 bp, Artificial Sequence
  synthetic circulating small noncoding RNA (sncRNA) 5' transfer RNA (tRNA) half
gctagctcagtcggtagagcatgagact

SEQ ID NO: 1761 - DNA, 21 bp, Artificial Sequence
  synthetic circulating small noncoding RNA (sncRNA) 5' transfer RNA (tRNA) half
aggatggccgagcggtctaag

SEQ ID NO: 1762 - DNA, 23 bp, Artificial Sequence
  synthetic circulating small noncoding RNA (sncRNA) 5' transfer RNA (tRNA) half
gctcagtcggtagagcatgagac

SEQ ID NO: 1763 - DNA, 22 bp, Artificial Sequence
  synthetic circulating small noncoding RNA (sncRNA) 5' transfer RNA (tRNA) half
tcgaatcccactcctgacagcc

SEQ ID NO: 1764 - DNA, 21 bp, Artificial Sequence
  synthetic circulating small noncoding RNA (sncRNA) 5' transfer RNA (tRNA) half
cgggaatcgaacccgggccgc

SEQ ID NO: 1765 - DNA, 18 bp, Artificial Sequence
  synthetic circulating small noncoding RNA (sncRNA) 5' transfer RNA (tRNA) half
cccataccgggagtcgaa

SEQ ID NO: 1766 - DNA, 16 bp, Artificial Sequence
  synthetic circulating small noncoding RNA (sncRNA) 5' transfer RNA (tRNA) half
gctgaccccgacgtga

SEQ ID NO: 1767 - DNA, 26 bp, Artificial Sequence
  synthetic circulating small noncoding RNA (sncRNA) 5' transfer RNA (tRNA) half
cgccgaatcctaaccactagaccacc

SEQ ID NO: 1768 - DNA, 9 bp, Artificial Sequence
  synthetic circulating small noncoding RNA (sncRNA) 5' transfer RNA (tRNA) half
gcgccgaat

SEQ ID NO: 1769 - DNA, 33 bp, Artificial Sequence
  synthetic circulating small noncoding RNA (sncRNA) 5' transfer RNA (tRNA) half
gagccagccaggagtcgaacctagaatcttctg

SEQ ID NO: 1770 - DNA, 36 bp, Artificial Sequence
  synthetic circulating small noncoding RNA (sncRNA) 5' transfer RNA (tRNA) half
ggtggagatgccggggatcgaacccggggcctcata

SEQ ID NO: 1771 - DNA, 33 bp, Artificial Sequence
  synthetic circulating small noncoding RNA (sncRNA) 5' transfer RNA (tRNA) half
tccctggtggtctagtggctaggattcggcgct

SEQ ID NO: 1772 - DNA, 30 bp, Artificial Sequence
  synthetic circulating small noncoding RNA (sncRNA) 5' transfer RNA (tRNA) half
gtttctgtagtgtagtggttatcacgctcg

SEQ ID NO: 1773 - DNA, 37 bp, Artificial Sequence
  synthetic circulating small noncoding RNA (sncRNA) 5' transfer RNA (tRNA) half
gcgagaggtcccgggttcaaatcccggacgagcccca

SEQ ID NO: 1774 - DNA, 37 bp, Artificial Sequence
  synthetic circulating small noncoding RNA (sncRNA) 5' transfer RNA (tRNA) half
taaccgaaaggttggtggttcgagcccacccagggac

SEQ ID NO: 1775 - DNA, 20 bp, Artificial Sequence
  synthetic circulating small noncoding RNA (sncRNA) 5' transfer RNA (tRNA) half
tcgattcccggccaatgcac

SEQ ID NO: 1776 - DNA, 37 bp, Artificial Sequence
  synthetic circulating small noncoding RNA (sncRNA) 5' transfer RNA (tRNA) half
gcccaacgtggggctcgaacccacgaccctgagatta

SEQ ID NO: 1777 - DNA, 30 bp, Artificial Sequence
  synthetic circulating small noncoding RNA (sncRNA) 5' transfer RNA (tRNA) half
ggctccatagctcaggggttagagcactgg

SEQ ID NO: 1778 - DNA, 16 bp, Artificial Sequence
  synthetic circulating small noncoding RNA (sncRNA) 5' transfer RNA (tRNA) half
ccagagtgctaaccat

SEQ ID NO: 1779 - DNA, 14 bp, Artificial Sequence
  synthetic circulating small noncoding RNA (sncRNA) 5' transfer RNA (tRNA) half
accccggtctcccg

SEQ ID NO: 1780 - DNA, 26 bp, Artificial Sequence
  synthetic circulating small noncoding RNA (sncRNA) 5' transfer RNA (tRNA) half
atcgtatagtggttagtactctgcgt

SEQ ID NO: 1781 - DNA, 16 bp, Artificial Sequence
  synthetic circulating small noncoding RNA (sncRNA) 5' transfer RNA (tRNA) half
ggagggggcacccgga

SEQ ID NO: 1782 - DNA, 32 bp, Artificial Sequence
  synthetic circulating small noncoding RNA (sncRNA) 5' transfer RNA (tRNA) half
ggggaattagctcaaatggtagagcgctcgct

SEQ ID NO: 1783 - DNA, 31 bp, Artificial Sequence
  synthetic circulating small noncoding RNA (sncRNA) 5' transfer RNA (tRNA) half
gagtctcatgctctaccgactgagctagccg

SEQ ID NO: 1784 - DNA, 13 bp, Artificial Sequence
  synthetic circulating small noncoding RNA (sncRNA) 5' transfer RNA (tRNA) half
gaaccggggacct

SEQ ID NO: 1785 - DNA, 35 bp, Artificial Sequence
  synthetic circulating small noncoding RNA (sncRNA) 5' transfer RNA (tRNA) half
atgccgtgactcggattcgaaccgaggttgctgcg

SEQ ID NO: 1786 - DNA, 16 bp, Artificial Sequence
  synthetic circulating small noncoding RNA (sncRNA) 5' transfer RNA (tRNA) half
ttccccgacggggaga

SEQ ID NO: 1787 - DNA, 35 bp, Artificial Sequence
  synthetic circulating small noncoding RNA (sncRNA) 5' transfer RNA (tRNA) half
gcccggctagctcagtcggtagagcatgagactct

SEQ ID NO: 1788 - DNA, 23 bp, Artificial Sequence
  synthetic circulating small noncoding RNA (sncRNA) 5' transfer RNA (tRNA) half
gctcagtggtagagcatttgact

SEQ ID NO: 1789 - DNA, 21 bp, Artificial Sequence
  synthetic circulating small noncoding RNA (sncRNA) 5' transfer RNA (tRNA) half
gtaatggttagcactctggac

SEQ ID NO: 1790 - DNA, 36 bp, Artificial Sequence
  synthetic circulating small noncoding RNA (sncRNA) 5' transfer RNA (tRNA) half
tgttcccataccgggagtcgaacccgggccgcctgg

SEQ ID NO: 1791 - DNA, 35 bp, Artificial Sequence
  synthetic circulating small noncoding RNA (sncRNA) 5' transfer RNA (tRNA) half
cgagccagccaggagtcgaacctagaatcttctga

SEQ ID NO: 1792 - DNA, 27 bp, Artificial Sequence
  synthetic circulating small noncoding RNA (sncRNA) 5' transfer RNA (tRNA) half
tctcatgctctaccgactgagctagcc

SEQ ID NO: 1793 - DNA, 30 bp, Artificial Sequence
  synthetic circulating small noncoding RNA (sncRNA) 5' transfer RNA (tRNA) half
cccacatggtctagcggttaggattcctgg

SEQ ID NO: 1794 - DNA, 18 bp, Artificial Sequence
  synthetic circulating small noncoding RNA (sncRNA) 5' transfer RNA (tRNA) half
tagcggttaggattcctg

SEQ ID NO: 1795 - DNA, 14 bp, Artificial Sequence
  synthetic circulating small noncoding RNA (sncRNA) 5' transfer RNA (tRNA) half
ggggtatgattctc

SEQ ID NO: 1796 - DNA, 36 bp, Artificial Sequence
  synthetic circulating small noncoding RNA (sncRNA) 5' transfer RNA (tRNA) half
atgaccccgacgtgattcgaacacgcagccttctga

SEQ ID NO: 1797 - DNA, 14 bp, Artificial Sequence
  synthetic circulating small noncoding RNA (sncRNA) 5' transfer RNA (tRNA) half
gaccccgacgtgat

SEQ ID NO: 1798 - DNA, 34 bp, Artificial Sequence
  synthetic circulating small noncoding RNA (sncRNA) 5' transfer RNA (tRNA) half
gccccgtgtgaggatcgaactcacgaccttcaga

SEQ ID NO: 1799 - DNA, 11 bp, Artificial Sequence
  synthetic circulating small noncoding RNA (sncRNA) 5' transfer RNA (tRNA) half
cgtagtcggca

SEQ ID NO: 1800 - DNA, 34 bp, Artificial Sequence
  synthetic circulating small noncoding RNA (sncRNA) 5' transfer RNA (tRNA) half
aggccccagcgagatttgaactcgcgacccctgg

SEQ ID NO: 1801 - DNA, 27 bp, Artificial Sequence
  synthetic circulating small noncoding RNA (sncRNA) 5' transfer RNA (tRNA) half
cggatagctcagtcggtagagcatcag

SEQ ID NO: 1802 - DNA, 12 bp, Artificial Sequence
  synthetic circulating small noncoding RNA (sncRNA) 5' transfer RNA (tRNA) half
tcgattcccggc

SEQ ID NO: 1803 - DNA, 17 bp, Artificial Sequence
  synthetic circulating small noncoding RNA (sncRNA) 5' transfer RNA (tRNA) half
gatgctctaccgactga

SEQ ID NO: 1804 - DNA, 33 bp, Artificial Sequence
  synthetic circulating small noncoding RNA (sncRNA) 5' transfer RNA (tRNA) half
agtcagacgcgttatccattgcgccactggccc

SEQ ID NO: 1805 - DNA, 32 bp, Artificial Sequence
  synthetic circulating small noncoding RNA (sncRNA) 5' transfer RNA (tRNA) half
tcttgcgacccgggttcgattcccgggcggcg

SEQ ID NO: 1806 - DNA, 14 bp, Artificial Sequence
  synthetic circulating small noncoding RNA (sncRNA) 5' transfer RNA (tRNA) half
ttctcgcctgccac

SEQ ID NO: 1807 - DNA, 14 bp, Artificial Sequence
  synthetic circulating small noncoding RNA (sncRNA) 5' transfer RNA (tRNA) half
ccggggacctttcg

SEQ ID NO: 1808 - DNA, 28 bp, Artificial Sequence
  synthetic circulating small noncoding RNA (sncRNA) 5' transfer RNA (tRNA) half
cgagaattctaccactgaaccaccaatg

SEQ ID NO: 1809 - DNA, 17 bp, Artificial Sequence
  synthetic circulating small noncoding RNA (sncRNA) 5' transfer RNA (tRNA) half
gtggttaggattcggcg

SEQ ID NO: 1810 - DNA, 39 bp, Artificial Sequence
  synthetic circulating small noncoding RNA (sncRNA) 5' transfer RNA (tRNA) half
acgcgggaggcccgggttcgattcccggccaatgcacga

SEQ ID NO: 1811 - DNA, 23 bp, Artificial Sequence
  synthetic circulating small noncoding RNA (sncRNA) 5' transfer RNA (tRNA) half
gagtccagagtgctaaccattac

SEQ ID NO: 1812 - DNA, 13 bp, Artificial Sequence
  synthetic circulating small noncoding RNA (sncRNA) 5' transfer RNA (tRNA) half
gagctatcgaagg

SEQ ID NO: 1813 - DNA, 28 bp, Artificial Sequence
  synthetic circulating small noncoding RNA (sncRNA) 5' transfer RNA (tRNA) half
gcgatccgagttcaaatctcggtgggac

SEQ ID NO: 1814 - DNA, 36 bp, Artificial Sequence
  synthetic circulating small noncoding RNA (sncRNA) 5' transfer RNA (tRNA) half
tgtgcattggccgggaatcgaacccgggcctcccgc

SEQ ID NO: 1815 - DNA, 27 bp, Artificial Sequence
  synthetic circulating small noncoding RNA (sncRNA) 5' transfer RNA (tRNA) half
tgtgctctaccactgagctacatcccc

SEQ ID NO: 1816 - DNA, 22 bp, Artificial Sequence
  synthetic circulating small noncoding RNA (sncRNA) 5' transfer RNA (tRNA) half
gtctcatgctctaccgactgag

SEQ ID NO: 1817 - DNA, 38 bp, Artificial Sequence
  synthetic circulating small noncoding RNA (sncRNA) 5' transfer RNA (tRNA) half
acgcgggaggcccgggttcgattcccggccaatgcacg

SEQ ID NO: 1818 - DNA, 20 bp, Artificial Sequence
  synthetic circulating small noncoding RNA (sncRNA) 5' transfer RNA (tRNA) half
agtcaaatgctctaccactg

SEQ ID NO: 1819 - DNA, 27 bp, Artificial Sequence
  synthetic circulating small noncoding RNA (sncRNA) 5' transfer RNA (tRNA) half
agtctcatgctctaccgactgagctag

SEQ ID NO: 1820 - DNA, 16 bp, Artificial Sequence
  synthetic circulating small noncoding RNA (sncRNA) 5' transfer RNA (tRNA) half
gtggcagcggtgggat

SEQ ID NO: 1821 - DNA, 16 bp, Artificial Sequence
  synthetic circulating small noncoding RNA (sncRNA) 5' transfer RNA (tRNA) half
gctagaccatgtggga

SEQ ID NO: 1822 - DNA, 22 bp, Artificial Sequence
  synthetic circulating small noncoding RNA (sncRNA) 5' transfer RNA (tRNA) half
cgggttcgactcccggtatggg

SEQ ID NO: 1823 - DNA, 34 bp, Artificial Sequence
  synthetic circulating small noncoding RNA (sncRNA) 5' transfer RNA (tRNA) half
tgttcccataccgggagtcgaacccgggccgcct

SEQ ID NO: 1824 - DNA, 38 bp, Artificial Sequence
  synthetic circulating small noncoding RNA (sncRNA) 5' transfer RNA (tRNA) half
gattaagagtctcatgctctaccgactgagctagccgg

SEQ ID NO: 1825 - DNA, 19 bp, Artificial Sequence
  synthetic circulating small noncoding RNA (sncRNA) 5' transfer RNA (tRNA) half
gagtactaaccactatacg

SEQ ID NO: 1826 - DNA, 17 bp, Artificial Sequence
  synthetic circulating small noncoding RNA (sncRNA) 5' transfer RNA (tRNA) half
gagtactaaccactata

SEQ ID NO: 1827 - DNA, 12 bp, Artificial Sequence
  synthetic circulating small noncoding RNA (sncRNA) 5' transfer RNA (tRNA) half
gtccccggttcg

SEQ ID NO: 1828 - DNA, 33 bp, Artificial Sequence
  synthetic circulating small noncoding RNA (sncRNA) 5' transfer RNA (tRNA) half
ttcccataccgggagtcgaacccgggccgcctg

SEQ ID NO: 1829 - DNA, 30 bp, Artificial Sequence
  synthetic circulating small noncoding RNA (sncRNA) 5' transfer RNA (tRNA) half
tcaaatgctctacccctgagctataccccc

SEQ ID NO: 1830 - DNA, 31 bp, Artificial Sequence
  synthetic circulating small noncoding RNA (sncRNA) 5' transfer RNA (tRNA) half
cggatgatcctcagtggtctggggtgcaggc

SEQ ID NO: 1831 - DNA, 29 bp, Artificial Sequence
  synthetic circulating small noncoding RNA (sncRNA) 5' transfer RNA (tRNA) half
cccggctagctcagtcggtagagcatgag

SEQ ID NO: 1832 - DNA, 32 bp, Artificial Sequence
  synthetic circulating small noncoding RNA (sncRNA) 5' transfer RNA (tRNA) half
ggccggttagctcagttggttagagcgtggtg

SEQ ID NO: 1833 - DNA, 14 bp, Artificial Sequence
  synthetic circulating small noncoding RNA (sncRNA) 5' transfer RNA (tRNA) half
gctctaccgactga

SEQ ID NO: 1834 - DNA, 16 bp, Artificial Sequence
  synthetic circulating small noncoding RNA (sncRNA) 5' transfer RNA (tRNA) half
caggaatcctaaccgc

SEQ ID NO: 1835 - DNA, 23 bp, Artificial Sequence
  synthetic circulating small noncoding RNA (sncRNA) 5' transfer RNA (tRNA) half
gatgaccactacactacggaaac

SEQ ID NO: 1836 - DNA, 28 bp, Artificial Sequence
  synthetic circulating small noncoding RNA (sncRNA) 5' transfer RNA (tRNA) half
gtggttaggattcggcgctctcaccgcc

SEQ ID NO: 1837 - DNA, 22 bp, Artificial Sequence
  synthetic circulating small noncoding RNA (sncRNA) 5' transfer RNA (tRNA) half
ggtcgagccagccaggagtcga

SEQ ID NO: 1838 - DNA, 13 bp, Artificial Sequence
  synthetic circulating small noncoding RNA (sncRNA) 5' transfer RNA (tRNA) half
accccggtctccc

SEQ ID NO: 1839 - DNA, 19 bp, Artificial Sequence
  synthetic circulating small noncoding RNA (sncRNA) 5' transfer RNA (tRNA) half
agtggttatcacgttcgcc

SEQ ID NO: 1840 - DNA, 16 bp, Artificial Sequence
  synthetic circulating small noncoding RNA (sncRNA) 5' transfer RNA (tRNA) half
gagaattctaccactg

SEQ ID NO: 1841 - DNA, 28 bp, Artificial Sequence
  synthetic circulating small noncoding RNA (sncRNA) 5' transfer RNA (tRNA) half
cacaccgggagtcgaacccgggccgcct

SEQ ID NO: 1842 - DNA, 17 bp, Artificial Sequence
  synthetic circulating small noncoding RNA (sncRNA) 5' transfer RNA (tRNA) half
gctgaccccgacgtgat

SEQ ID NO: 1843 - DNA, 17 bp, Artificial Sequence
  synthetic circulating small noncoding RNA (sncRNA) 5' transfer RNA (tRNA) half
agcgagaatcatacccc

SEQ ID NO: 1844 - DNA, 25 bp, Artificial Sequence
  synthetic circulating small noncoding RNA (sncRNA) 5' transfer RNA (tRNA) half
gggttatgggcccagcacgcttccg

SEQ ID NO: 1845 - DNA, 21 bp, Artificial Sequence
  synthetic circulating small noncoding RNA (sncRNA) 5' transfer RNA (tRNA) half
ttcgactcccggtgtgggaac

SEQ ID NO: 1846 - DNA, 41 bp, Artificial Sequence
  synthetic circulating small noncoding RNA (sncRNA) 5' transfer RNA (tRNA) half
agattaagagtctcatgctctaccgactgagctagccgggc

SEQ ID NO: 1847 - DNA, 35 bp, Artificial Sequence
  synthetic circulating small noncoding RNA (sncRNA) 5' transfer RNA (tRNA) half
tgtgtcagaagtgggattcgaacccacgcctccat

SEQ ID NO: 1848 - DNA, 34 bp, Artificial Sequence
  synthetic circulating small noncoding RNA (sncRNA) 5' transfer RNA (tRNA) half
gcccaacgtggggctcgaacccacgaccctgaga

SEQ ID NO: 1849 - DNA, 31 bp, Artificial Sequence
  synthetic circulating small noncoding RNA (sncRNA) 5' transfer RNA (tRNA) half
gcggcccgggttcgactcccggtgtgggaac

SEQ ID NO: 1850 - DNA, 23 bp, Artificial Sequence
  synthetic circulating small noncoding RNA (sncRNA) 5' transfer RNA (tRNA) half
aggcgaacgtgataaccactaca

SEQ ID NO: 1851 - DNA, 13 bp, Artificial Sequence
  synthetic circulating small noncoding RNA (sncRNA) 5' transfer RNA (tRNA) half
cgccgaatcctaa

SEQ ID NO: 1852 - DNA, 22 bp, Artificial Sequence
  synthetic circulating small noncoding RNA (sncRNA) 5' transfer RNA (tRNA) half
gcgagaattctaccactgaacc

SEQ ID NO: 1853 - DNA, 32 bp, Artificial Sequence
  synthetic circulating small noncoding RNA (sncRNA) 5' transfer RNA (tRNA) half
cccataccgggagtcgaacccgggccgcctgg

SEQ ID NO: 1854 - DNA, 36 bp, Artificial Sequence
  synthetic circulating small noncoding RNA (sncRNA) 5' transfer RNA (tRNA) half
ttgccccctctgaggttcgaactcaggaccttcaga

SEQ ID NO: 1855 - DNA, 37 bp, Artificial Sequence
  synthetic circulating small noncoding RNA (sncRNA) 5' transfer RNA (tRNA) half
gtcgactctggcgggactcgaacccgcaacctttgaa

SEQ ID NO: 1856 - DNA, 21 bp, Artificial Sequence
  synthetic circulating small noncoding RNA (sncRNA) 5' transfer RNA (tRNA) half
cagcggaagcgtgctgggccc

SEQ ID NO: 1857 - DNA, 16 bp, Artificial Sequence
  synthetic circulating small noncoding RNA (sncRNA) 5' transfer RNA (tRNA) half
ggcgaacgtgataacc

SEQ ID NO: 1858 - DNA, 30 bp, Artificial Sequence
  synthetic circulating small noncoding RNA (sncRNA) 5' transfer RNA (tRNA) half
ctgaccgggaatcgaacccgggccgcggcg

SEQ ID NO: 1859 - DNA, 30 bp, Artificial Sequence
  synthetic circulating small noncoding RNA (sncRNA) 5' transfer RNA (tRNA) half
ccaggaatcctaaccgctagaccatatggg

SEQ ID NO: 1860 - DNA, 36 bp, Artificial Sequence
  synthetic circulating small noncoding RNA (sncRNA) 5' transfer RNA (tRNA) half
catgaggtcctgggttcgatccccagcatctccagg

SEQ ID NO: 1861 - DNA, 21 bp, Artificial Sequence
  synthetic circulating small noncoding RNA (sncRNA) 5' transfer RNA (tRNA) half
cttgaaccctggaccctcaga

SEQ ID NO: 1862 - DNA, 28 bp, Artificial Sequence
  synthetic circulating small noncoding RNA (sncRNA) 5' transfer RNA (tRNA) half
acgcagagtactaaccactatacgatca

SEQ ID NO: 1863 - DNA, 25 bp, Artificial Sequence
  synthetic circulating small noncoding RNA (sncRNA) 5' transfer RNA (tRNA) half
cgcgtggcaggcgagaattctacca

SEQ ID NO: 1864 - DNA, 14 bp, Artificial Sequence
  synthetic circulating small noncoding RNA (sncRNA) 5' transfer RNA (tRNA) half
cttagaccgctcgg

SEQ ID NO: 1865 - DNA, 23 bp, Artificial Sequence
  synthetic circulating small noncoding RNA (sncRNA) 5' transfer RNA (tRNA) half
tgtagtggttatcacgttcgcct

SEQ ID NO: 1866 - DNA, 18 bp, Artificial Sequence
  synthetic circulating small noncoding RNA (sncRNA) 5' transfer RNA (tRNA) half
acgtgtttccgcccggtt

SEQ ID NO: 1867 - DNA, 31 bp, Artificial Sequence
  synthetic circulating small noncoding RNA (sncRNA) 5' transfer RNA (tRNA) half
aacgcagagtactaaccactatacgatcacg

SEQ ID NO: 1868 - DNA, 18 bp, Artificial Sequence
  synthetic circulating small noncoding RNA (sncRNA) 5' transfer RNA (tRNA) half
gggccgcggcggtgagag

SEQ ID NO: 1869 - DNA, 17 bp, Artificial Sequence
  synthetic circulating small noncoding RNA (sncRNA) 5' transfer RNA (tRNA) half
tccagagtgctaaccat

SEQ ID NO: 1870 - DNA, 16 bp, Artificial Sequence
  synthetic circulating small noncoding RNA (sncRNA) 5' transfer RNA (tRNA) half
tgttcccataccggga

SEQ ID NO: 1871 - DNA, 25 bp, Artificial Sequence
  synthetic circulating small noncoding RNA (sncRNA) 5' transfer RNA (tRNA) half
gcattggtggttcagtggtagaatt

SEQ ID NO: 1872 - DNA, 18 bp, Artificial Sequence
  synthetic circulating small noncoding RNA (sncRNA) 5' transfer RNA (tRNA) half
ggggtatgattctcggtt

SEQ ID NO: 1873 - DNA, 19 bp, Artificial Sequence
  synthetic circulating small noncoding RNA (sncRNA) 5' transfer RNA (tRNA) half
agtcccatgctctaccgac

SEQ ID NO: 1874 - DNA, 24 bp, Artificial Sequence
  synthetic circulating small noncoding RNA (sncRNA) 5' transfer RNA (tRNA) half
gtactaaccactatacgatcacgg

SEQ ID NO: 1875 - DNA, 23 bp, Artificial Sequence
  synthetic circulating small noncoding RNA (sncRNA) 5' transfer RNA (tRNA) half
aagtctgatgctctaccgactga

SEQ ID NO: 1876 - DNA, 19 bp, Artificial Sequence
  synthetic circulating small noncoding RNA (sncRNA) 5' transfer RNA (tRNA) half
tcgagccccagtggaacca

SEQ ID NO: 1877 - DNA, 25 bp, Artificial Sequence
  synthetic circulating small noncoding RNA (sncRNA) 5' transfer RNA (tRNA) half
agtctgatgctctaccgactgagct

SEQ ID NO: 1878 - DNA, 28 bp, Artificial Sequence
  synthetic circulating small noncoding RNA (sncRNA) 5' transfer RNA (tRNA) half
aagtctgatgctctaccgactgagctat

SEQ ID NO: 1879 - DNA, 18 bp, Artificial Sequence
  synthetic circulating small noncoding RNA (sncRNA) 5' transfer RNA (tRNA) half
ccactcggccatcctggt

SEQ ID NO: 1880 - DNA, 25 bp, Artificial Sequence
  synthetic circulating small noncoding RNA (sncRNA) 5' transfer RNA (tRNA) half
cgctctaccactgagctacatcccc

SEQ ID NO: 1881 - DNA, 37 bp, Artificial Sequence
  synthetic circulating small noncoding RNA (sncRNA) 5' transfer RNA (tRNA) half
taaacaggagatcctgggttcgaatcccagcggtgcc

SEQ ID NO: 1882 - DNA, 22 bp, Artificial Sequence
  synthetic circulating small noncoding RNA (sncRNA) 5' transfer RNA (tRNA) half
cgatccatcgacctctgggtta

SEQ ID NO: 1883 - DNA, 20 bp, Artificial Sequence
  synthetic circulating small noncoding RNA (sncRNA) 5' transfer RNA (tRNA) half
caggcggggatactaaccac

SEQ ID NO: 1884 - DNA, 19 bp, Artificial Sequence
  synthetic circulating small noncoding RNA (sncRNA) 5' transfer RNA (tRNA) half
tcggtagagcatgagactc

SEQ ID NO: 1885 - DNA, 16 bp, Artificial Sequence
  synthetic circulating small noncoding RNA (sncRNA) 5' transfer RNA (tRNA) half
gagtgctaaccattac

SEQ ID NO: 1886 - DNA, 38 bp, Artificial Sequence
  synthetic circulating small noncoding RNA (sncRNA) 5' transfer RNA (tRNA) half
gccccgtgtgaggatcgaactcacgaccttcagattat

SEQ ID NO: 1887 - DNA, 19 bp, Artificial Sequence
  synthetic circulating small noncoding RNA (sncRNA) 5' transfer RNA (tRNA) half
ggctcgtccgggatttgaa

SEQ ID NO: 1888 - DNA, 37 bp, Artificial Sequence
  synthetic circulating small noncoding RNA (sncRNA) 5' transfer RNA (tRNA) half
cccattcttgcgacccgggttcgattcccgggcggcg

SEQ ID NO: 1889 - DNA, 20 bp, Artificial Sequence
  synthetic circulating small noncoding RNA (sncRNA) 5' transfer RNA (tRNA) half
tcgattcccggcccatgcag

SEQ ID NO: 1890 - DNA, 35 bp, Artificial Sequence
  synthetic circulating small noncoding RNA (sncRNA) 5' transfer RNA (tRNA) half
tgcgagaggtcccgggttcaaatcccggacgagcc

SEQ ID NO: 1891 - DNA, 12 bp, Artificial Sequence
  synthetic circulating small noncoding RNA (sncRNA) 5' transfer RNA (tRNA) half
aacccgcgacct

SEQ ID NO: 1892 - DNA, 19 bp, Artificial Sequence
  synthetic circulating small noncoding RNA (sncRNA) 5' transfer RNA (tRNA) half
gtggttagtactctgcgtt

SEQ ID NO: 1893 - DNA, 17 bp, Artificial Sequence
  synthetic circulating small noncoding RNA (sncRNA) 5' transfer RNA (tRNA) half
gccgaatcctaaccact

SEQ ID NO: 1894 - DNA, 14 bp, Artificial Sequence
  synthetic circulating small noncoding RNA (sncRNA) 5' transfer RNA (tRNA) half
aacccgggcctccc

SEQ ID NO: 1895 - DNA, 19 bp, Artificial Sequence
  synthetic circulating small noncoding RNA (sncRNA) 5' transfer RNA (tRNA) half
tgccgtgactcggattcga

SEQ ID NO: 1896 - DNA, 13 bp, Artificial Sequence
  synthetic circulating small noncoding RNA (sncRNA) 5' transfer RNA (tRNA) half
ccgggcggaaaca

SEQ ID NO: 1897 - DNA, 22 bp, Artificial Sequence
  synthetic circulating small noncoding RNA (sncRNA) 5' transfer RNA (tRNA) half
cgggttcgactcccggtgtggg

SEQ ID NO: 1898 - DNA, 21 bp, Artificial Sequence
  synthetic circulating small noncoding RNA (sncRNA) 5' transfer RNA (tRNA) half
gtctagcggttaggattcctg

SEQ ID NO: 1899 - DNA, 25 bp, Artificial Sequence
  synthetic circulating small noncoding RNA (sncRNA) 5' transfer RNA (tRNA) half
gccgaatcctaaccactagaccacc

SEQ ID NO: 1900 - DNA, 30 bp, Artificial Sequence
  synthetic circulating small noncoding RNA (sncRNA) 5' transfer RNA (tRNA) half
cggatagctcagtcggtagagcatcagact

SEQ ID NO: 1901 - DNA, 14 bp, Artificial Sequence
  synthetic circulating small noncoding RNA (sncRNA) 5' transfer RNA (tRNA) half
cggatgatcctcag

SEQ ID NO: 1902 - DNA, 34 bp, Artificial Sequence
  synthetic circulating small noncoding RNA (sncRNA) 5' transfer RNA (tRNA) half
tctgatgctctaccgactgagctatccgggctct

SEQ ID NO: 1903 - DNA, 13 bp, Artificial Sequence
  synthetic circulating small noncoding RNA (sncRNA) 5' transfer RNA (tRNA) half
gtgtttccgcccg

SEQ ID NO: 1904 - DNA, 27 bp, Artificial Sequence
  synthetic circulating small noncoding RNA (sncRNA) 5' transfer RNA (tRNA) half
atagctcagtcggtagagcatcagact

SEQ ID NO: 1905 - DNA, 35 bp, Artificial Sequence
  synthetic circulating small noncoding RNA (sncRNA) 5' transfer RNA (tRNA) half
gacccagtggcctaatggataaggcatcagcctcc

SEQ ID NO: 1906 - DNA, 21 bp, Artificial Sequence
  synthetic circulating small noncoding RNA (sncRNA) 5' transfer RNA (tRNA) half
gagtctcatgctctaccgact

SEQ ID NO: 1907 - DNA, 22 bp, Artificial Sequence
  synthetic circulating small noncoding RNA (sncRNA) 5' transfer RNA (tRNA) half
tctgagggtccagggttcaagt

SEQ ID NO: 1908 - DNA, 20 bp, Artificial Sequence
  synthetic circulating small noncoding RNA (sncRNA) 5' transfer RNA (tRNA) half
tagtggttaggattcggcgc

SEQ ID NO: 1909 - DNA, 16 bp, Artificial Sequence
  synthetic circulating small noncoding RNA (sncRNA) 5' transfer RNA (tRNA) half
ggggtatgattctcgc

SEQ ID NO: 1910 - DNA, 29 bp, Artificial Sequence
  synthetic circulating small noncoding RNA (sncRNA) 5' transfer RNA (tRNA) half
gcgaacgtgataaccactacactacggaa

SEQ ID NO: 1911 - DNA, 20 bp, Artificial Sequence
  synthetic circulating small noncoding RNA (sncRNA) 5' transfer RNA (tRNA) half
tccctggtggtctagtggtt

SEQ ID NO: 1912 - DNA, 34 bp, Artificial Sequence
  synthetic circulating small noncoding RNA (sncRNA) 5' transfer RNA (tRNA) half
agggattgtgggttcgagtcccatctggggtggt

SEQ ID NO: 1913 - DNA, 27 bp, Artificial Sequence
  synthetic circulating small noncoding RNA (sncRNA) 5' transfer RNA (tRNA) half
tcccacatggtctagcggttaggattc

SEQ ID NO: 1914 - DNA, 18 bp, Artificial Sequence
  synthetic circulating small noncoding RNA (sncRNA) 5' transfer RNA (tRNA) half
gtggttaggattcggcgc

SEQ ID NO: 1915 - DNA, 34 bp, Artificial Sequence
  synthetic circulating small noncoding RNA (sncRNA) 5' transfer RNA (tRNA) half
cagaaggtcctgggttcgagccccagtggaacca

SEQ ID NO: 1916 - DNA, 19 bp, Artificial Sequence
  synthetic circulating small noncoding RNA (sncRNA) 5' transfer RNA (tRNA) half
atcccaccgctgccatctt

SEQ ID NO: 1917 - DNA, 16 bp, Artificial Sequence
  synthetic circulating small noncoding RNA (sncRNA) 5' transfer RNA (tRNA) half
taggggtatgattctc

SEQ ID NO: 1918 - DNA, 26 bp, Artificial Sequence
  synthetic circulating small noncoding RNA (sncRNA) 5' transfer RNA (tRNA) half
gtcccatgctctaccgactgagctag

SEQ ID NO: 1919 - DNA, 11 bp, Artificial Sequence
  synthetic circulating small noncoding RNA (sncRNA) 5' transfer RNA (tRNA) half
gaccccgacgt

SEQ ID NO: 1920 - DNA, 34 bp, Artificial Sequence
  synthetic circulating small noncoding RNA (sncRNA) 5' transfer RNA (tRNA) half
gcatgggtggttcagtggtagaattctcgcctgc

SEQ ID NO: 1921 - DNA, 15 bp, Artificial Sequence
  synthetic circulating small noncoding RNA (sncRNA) 5' transfer RNA (tRNA) half
cctccccgtcgggga

SEQ ID NO: 1922 - DNA, 25 bp, Artificial Sequence
  synthetic circulating small noncoding RNA (sncRNA) 5' transfer RNA (tRNA) half
aatcatacccctagaccaacgagcc

SEQ ID NO: 1923 - DNA, 29 bp, Artificial Sequence
  synthetic circulating small noncoding RNA (sncRNA) 5' transfer RNA (tRNA) half
gtcccaccgagatttgaactcggatcgct

SEQ ID NO: 1924 - DNA, 31 bp, Artificial Sequence
  synthetic circulating small noncoding RNA (sncRNA) 5' transfer RNA (tRNA) half
ggccccagcgagatttgaactcgcgacccct

SEQ ID NO: 1925 - DNA, 22 bp, Artificial Sequence
  synthetic circulating small noncoding RNA (sncRNA) 5' transfer RNA (tRNA) half
gtcccatgctctaccgactgag

SEQ ID NO: 1926 - DNA, 33 bp, Artificial Sequence
  synthetic circulating small noncoding RNA (sncRNA) 5' transfer RNA (tRNA) half
agtccatcgccttaaccactcggccacgactac

SEQ ID NO: 1927 - DNA, 22 bp, Artificial Sequence
  synthetic circulating small noncoding RNA (sncRNA) 5' transfer RNA (tRNA) half
cgtatagtggttagtactctgc

SEQ ID NO: 1928 - DNA, 28 bp, Artificial Sequence
  synthetic circulating small noncoding RNA (sncRNA) 5' transfer RNA (tRNA) half
agcgccgaatcctaaccactagaccacc

SEQ ID NO: 1929 - DNA, 22 bp, Artificial Sequence
  synthetic circulating small noncoding RNA (sncRNA) 5' transfer RNA (tRNA) half
ctcagtcggtagagcatcagac

SEQ ID NO: 1930 - DNA, 18 bp, Artificial Sequence
  synthetic circulating small noncoding RNA (sncRNA) 5' transfer RNA (tRNA) half
gacgacgaggatgggatt

SEQ ID NO: 1931 - DNA, 37 bp, Artificial Sequence
  synthetic circulating small noncoding RNA (sncRNA) 5' transfer RNA (tRNA) half
accgagccagccaggagtcgaacctggaatcttctga

SEQ ID NO: 1932 - DNA, 22 bp, Artificial Sequence
  synthetic circulating small noncoding RNA (sncRNA) 5' transfer RNA (tRNA) half
gtctagtggttaggattcggcg

SEQ ID NO: 1933 - DNA, 35 bp, Artificial Sequence
  synthetic circulating small noncoding RNA (sncRNA) 5' transfer RNA (tRNA) half
cagaaggtcctgggttcgagccccagtggaaccac

SEQ ID NO: 1934 - DNA, 20 bp, Artificial Sequence
  synthetic circulating small noncoding RNA (sncRNA) 5' transfer RNA (tRNA) half
ctcggatcgctggattcaga

SEQ ID NO: 1935 - DNA, 19 bp, Artificial Sequence
  synthetic circulating small noncoding RNA (sncRNA) 5' transfer RNA (tRNA) half
ggaatcgaacccgggccgc

SEQ ID NO: 1936 - DNA, 33 bp, Artificial Sequence
  synthetic circulating small noncoding RNA (sncRNA) 5' transfer RNA (tRNA) half
caggcggcccgggttcgactcccggtgtgggaa

SEQ ID NO: 1937 - DNA, 12 bp, Artificial Sequence
  synthetic circulating small noncoding RNA (sncRNA) 5' transfer RNA (tRNA) half
cgccgaatccta

SEQ ID NO: 1938 - DNA, 33 bp, Artificial Sequence
  synthetic circulating small noncoding RNA (sncRNA) 5' transfer RNA (tRNA) half
ggctcgttggtctaggggtatgattctcggttt

SEQ ID NO: 1939 - DNA, 32 bp, Artificial Sequence
  synthetic circulating small noncoding RNA (sncRNA) 5' transfer RNA (tRNA) half
ggcgagaattctaccactgaaccaccaatgca

SEQ ID NO: 1940 - DNA, 12 bp, Artificial Sequence
  synthetic circulating small noncoding RNA (sncRNA) 5' transfer RNA (tRNA) half
gaccgggaatcg

SEQ ID NO: 1941 - DNA, 29 bp, Artificial Sequence
  synthetic circulating small noncoding RNA (sncRNA) 5' transfer RNA (tRNA) half
tgatgctctaccgactgagctatccgggc

SEQ ID NO: 1942 - DNA, 29 bp, Artificial Sequence
  synthetic circulating small noncoding RNA (sncRNA) 5' transfer RNA (tRNA) half
gggggtgtagctcagtggtagagcgcgtg

SEQ ID NO: 1943 - DNA, 32 bp, Artificial Sequence
  synthetic circulating small noncoding RNA (sncRNA) 5' transfer RNA (tRNA) half
agtcaaatgctctacccctgagctatacgccc

SEQ ID NO: 1944 - DNA, 16 bp, Artificial Sequence
  synthetic circulating small noncoding RNA (sncRNA) 5' transfer RNA (tRNA) half
agtctcatgctctacc

SEQ ID NO: 1945 - DNA, 14 bp, Artificial Sequence
  synthetic circulating small noncoding RNA (sncRNA) 5' transfer RNA (tRNA) half
aggattcggcgctc

SEQ ID NO: 1946 - DNA, 29 bp, Artificial Sequence
  synthetic circulating small noncoding RNA (sncRNA) 5' transfer RNA (tRNA) half
caagaattctaccactgaaccaccaatgc

SEQ ID NO: 1947 - DNA, 13 bp, Artificial Sequence
  synthetic circulating small noncoding RNA (sncRNA) 5' transfer RNA (tRNA) half
gcgccgaatccta

SEQ ID NO: 1948 - DNA, 28 bp, Artificial Sequence
  synthetic circulating small noncoding RNA (sncRNA) 5' transfer RNA (tRNA) half
gctggtgtagtggtatcatgcaagattc

SEQ ID NO: 1949 - DNA, 22 bp, Artificial Sequence
  synthetic circulating small noncoding RNA (sncRNA) 5' transfer RNA (tRNA) half
gcgaatgtgataaccactacac

SEQ ID NO: 1950 - DNA, 28 bp, Artificial Sequence
  synthetic circulating small noncoding RNA (sncRNA) 5' transfer RNA (tRNA) half
gggggtgtagctcagtggtagagcgcgt

SEQ ID NO: 1951 - DNA, 22 bp, Artificial Sequence
  synthetic circulating small noncoding RNA (sncRNA) 5' transfer RNA (tRNA) half
tcgattccggctcgaaggactt

SEQ ID NO: 1952 - DNA, 25 bp, Artificial Sequence
  synthetic circulating small noncoding RNA (sncRNA) 5' transfer RNA (tRNA) half
ggcgaacgtgataaccactacacta

SEQ ID NO: 1953 - DNA, 15 bp, Artificial Sequence
  synthetic circulating small noncoding RNA (sncRNA) 5' transfer RNA (tRNA) half
gcgaaaggtccccgg

SEQ ID NO: 1954 - DNA, 16 bp, Artificial Sequence
  synthetic circulating small noncoding RNA (sncRNA) 5' transfer RNA (tRNA) half
ggaatcctaaccgcta

SEQ ID NO: 1955 - DNA, 34 bp, Artificial Sequence
  synthetic circulating small noncoding RNA (sncRNA) 5' transfer RNA (tRNA) half
ttcccacaccgggagtcgaacccgggccgcctgg

SEQ ID NO: 1956 - DNA, 21 bp, Artificial Sequence
  synthetic circulating small noncoding RNA (sncRNA) 5' transfer RNA (tRNA) half
gtttccgtagtgtagtggtta

SEQ ID NO: 1957 - DNA, 33 bp, Artificial Sequence
  synthetic circulating small noncoding RNA (sncRNA) 5' transfer RNA (tRNA) half
caggagatcctgggttcgaatcccagcggtgcc

SEQ ID NO: 1958 - DNA, 22 bp, Artificial Sequence
  synthetic circulating small noncoding RNA (sncRNA) 5' transfer RNA (tRNA) half
aaaatggtggagatgccgggga

SEQ ID NO: 1959 - DNA, 21 bp, Artificial Sequence
  synthetic circulating small noncoding RNA (sncRNA) 5' transfer RNA (tRNA) half
gccgtgactcggattcgaacc

SEQ ID NO: 1960 - DNA, 27 bp, Artificial Sequence
  synthetic circulating small noncoding RNA (sncRNA) 5' transfer RNA (tRNA) half
gagtggcgcagcggaagcgtgctgggc

SEQ ID NO: 1961 - DNA, 37 bp, Artificial Sequence
  synthetic circulating small noncoding RNA (sncRNA) 5' transfer RNA (tRNA) half
cctccccgtcggggaattgaaccccggtctcccgcgt

SEQ ID NO: 1962 - DNA, 17 bp, Artificial Sequence
  synthetic circulating small noncoding RNA (sncRNA) 5' transfer RNA (tRNA) half
gtcaggatggccgagcg

SEQ ID NO: 1963 - DNA, 26 bp, Artificial Sequence
  synthetic circulating small noncoding RNA (sncRNA) 5' transfer RNA (tRNA) half
caggaatcctaaccgctagaccatgt

SEQ ID NO: 1964 - DNA, 36 bp, Artificial Sequence
  synthetic circulating small noncoding RNA (sncRNA) 5' transfer RNA (tRNA) half
gagggggcacccggatttgaaccagggacctcttga

SEQ ID NO: 1965 - DNA, 32 bp, Artificial Sequence
  synthetic circulating small noncoding RNA (sncRNA) 5' transfer RNA (tRNA) half
gcccgaacagggacttgaaccctggaccctca

SEQ ID NO: 1966 - DNA, 23 bp, Artificial Sequence
  synthetic circulating small noncoding RNA (sncRNA) 5' transfer RNA (tRNA) half
gcgccgctggtgtagtggtatca

SEQ ID NO: 1967 - DNA, 37 bp, Artificial Sequence
  synthetic circulating small noncoding RNA (sncRNA) 5' transfer RNA (tRNA) half
cgcagcaacctcggttcgaatccgagtcacggcatta

SEQ ID NO: 1968 - DNA, 21 bp, Artificial Sequence
  synthetic circulating small noncoding RNA (sncRNA) 5' transfer RNA (tRNA) half
gtggtagaattctcgcctgcc

SEQ ID NO: 1969 - DNA, 19 bp, Artificial Sequence
  synthetic circulating small noncoding RNA (sncRNA) 5' transfer RNA (tRNA) half
gggccgcggcggtgagagc

SEQ ID NO: 1970 - DNA, 40 bp, Artificial Sequence
  synthetic circulating small noncoding RNA (sncRNA) 5' transfer RNA (tRNA) half
acccgggccgcggcggtgagagcgccgaatcctaaccact

SEQ ID NO: 1971 - DNA, 34 bp, Artificial Sequence
  synthetic circulating small noncoding RNA (sncRNA) 5' transfer RNA (tRNA) half
acaggagatcctgggttcaaatcccagcggggcc

SEQ ID NO: 1972 - DNA, 14 bp, Artificial Sequence
  synthetic circulating small noncoding RNA (sncRNA) 5' transfer RNA (tRNA) half
acccgggcctcccg

SEQ ID NO: 1973 - DNA, 33 bp, Artificial Sequence
  synthetic circulating small noncoding RNA (sncRNA) 5' transfer RNA (tRNA) half
gaggcgagaattctaccattgaaccaccaatgc

SEQ ID NO: 1974 - DNA, 31 bp, Artificial Sequence
  synthetic circulating small noncoding RNA (sncRNA) 5' transfer RNA (tRNA) half
cgccgtgatcgtatagtggttagtactctgc

SEQ ID NO: 1975 - DNA, 36 bp, Artificial Sequence
  synthetic circulating small noncoding RNA (sncRNA) 5' transfer RNA (tRNA) half
gtctccccgtcggggaatcgaaccccggtctcccgc

SEQ ID NO: 1976 - DNA, 37 bp, Artificial Sequence
  synthetic circulating small noncoding RNA (sncRNA) 5' transfer RNA (tRNA) half
accgccgcggcccgggttcgattcccggtcagggaag

SEQ ID NO: 1977 - DNA, 22 bp, Artificial Sequence
  synthetic circulating small noncoding RNA (sncRNA) 5' transfer RNA (tRNA) half
ccctgaccgggaatcgaacccg

SEQ ID NO: 1978 - DNA, 33 bp, Artificial Sequence
  synthetic circulating small noncoding RNA (sncRNA) 5' transfer RNA (tRNA) half
tgcattggccgggaatcgaacccgggcctcccg

SEQ ID NO: 1979 - DNA, 23 bp, Artificial Sequence
  synthetic circulating small noncoding RNA (sncRNA) 5' transfer RNA (tRNA) half
aacgcagagtactaaccactata

SEQ ID NO: 1980 - DNA, 26 bp, Artificial Sequence
  synthetic circulating small noncoding RNA (sncRNA) 5' transfer RNA (tRNA) half
gagtactaaccactatacgatcacgg

SEQ ID NO: 1981 - DNA, 35 bp, Artificial Sequence
  synthetic circulating small noncoding RNA (sncRNA) 5' transfer RNA (tRNA) half
gaccccgacgtgatttgaacacgcaaccttctgat

SEQ ID NO: 1982 - DNA, 25 bp, Artificial Sequence
  synthetic circulating small noncoding RNA (sncRNA) 5' transfer RNA (tRNA) half
cttccctgaccgggaatcgaacccg

SEQ ID NO: 1983 - DNA, 11 bp, Artificial Sequence
  synthetic circulating small noncoding RNA (sncRNA) 5' transfer RNA (tRNA) half
gccacctcgtc

SEQ ID NO: 1984 - DNA, 15 bp, Artificial Sequence
  synthetic circulating small noncoding RNA (sncRNA) 5' transfer RNA (tRNA) half
gggctcgtccgggat

SEQ ID NO: 1985 - DNA, 38 bp, Artificial Sequence
  synthetic circulating small noncoding RNA (sncRNA) 5' transfer RNA (tRNA) half
tgttcccacaccgggagtcgaacccgggccgcctgggt

SEQ ID NO: 1986 - DNA, 29 bp, Artificial Sequence
  synthetic circulating small noncoding RNA (sncRNA) 5' transfer RNA (tRNA) half
gggtcgtgggttcgagccccacgttgggc

SEQ ID NO: 1987 - DNA, 27 bp, Artificial Sequence
  synthetic circulating small noncoding RNA (sncRNA) 5' transfer RNA (tRNA) half
cggatgatcctcagtggtctggggtgc

SEQ ID NO: 1988 - DNA, 27 bp, Artificial Sequence
  synthetic circulating small noncoding RNA (sncRNA) 5' transfer RNA (tRNA) half
cccatatggtctagcggttaggattcc

SEQ ID NO: 1989 - DNA, 24 bp, Artificial Sequence
  synthetic circulating small noncoding RNA (sncRNA) 5' transfer RNA (tRNA) half
cgggttcgattcccgggcggcgca

SEQ ID NO: 1990 - DNA, 11 bp, Artificial Sequence
  synthetic circulating small noncoding RNA (sncRNA) 5' transfer RNA (tRNA) half
cgccgaatcct

SEQ ID NO: 1991 - DNA, 29 bp, Artificial Sequence
  synthetic circulating small noncoding RNA (sncRNA) 5' transfer RNA (tRNA) half
tgaccgggaatcgaacccgggccgcggcg

SEQ ID NO: 1992 - DNA, 13 bp, Artificial Sequence
  synthetic circulating small noncoding RNA (sncRNA) 5' transfer RNA (tRNA) half
gagtgctaaccat

SEQ ID NO: 1993 - DNA, 37 bp, Artificial Sequence
  synthetic circulating small noncoding RNA (sncRNA) 5' transfer RNA (tRNA) half
tctccccgtcggggaatcgaaccccggtctcccgcgt

SEQ ID NO: 1994 - DNA, 33 bp, Artificial Sequence
  synthetic circulating small noncoding RNA (sncRNA) 5' transfer RNA (tRNA) half
cccaggcggcccgggttcgactcccggtgtggg

SEQ ID NO: 1995 - DNA, 30 bp, Artificial Sequence
  synthetic circulating small noncoding RNA (sncRNA) 5' transfer RNA (tRNA) half
gactccgccgggactcgaacccggaacctt

SEQ ID NO: 1996 - DNA, 23 bp, Artificial Sequence
  synthetic circulating small noncoding RNA (sncRNA) 5' transfer RNA (tRNA) half
gtccagagtgctaaccattacac

SEQ ID NO: 1997 - DNA, 19 bp, Artificial Sequence
  synthetic circulating small noncoding RNA (sncRNA) 5' transfer RNA (tRNA) half
agcgccgaatcctaaccac

SEQ ID NO: 1998 - DNA, 24 bp, Artificial Sequence
  synthetic circulating small noncoding RNA (sncRNA) 5' transfer RNA (tRNA) half
tttccctgaccgggaatcgaaccc

SEQ ID NO: 1999 - DNA, 29 bp, Artificial Sequence
  synthetic circulating small noncoding RNA (sncRNA) 5' transfer RNA (tRNA) half
tgcgacccgggttcgattcccgggcggcg

SEQ ID NO: 2000 - DNA, 17 bp, Artificial Sequence
  synthetic circulating small noncoding RNA (sncRNA) 5' transfer RNA (tRNA) half
actgtttccgcccggtt

SEQ ID NO: 2001 - DNA, 32 bp, Artificial Sequence
  synthetic circulating small noncoding RNA (sncRNA) 5' transfer RNA (tRNA) half
ggggatgtagctcagtggtagagcgcatgctt

SEQ ID NO: 2002 - DNA, 15 bp, Artificial Sequence
  synthetic circulating small noncoding RNA (sncRNA) 5' transfer RNA (tRNA) half
ggtagcgtggccgag

SEQ ID NO: 2003 - DNA, 15 bp, Artificial Sequence
  synthetic circulating small noncoding RNA (sncRNA) 5' transfer RNA (tRNA) half
gaagcgagaatcata

SEQ ID NO: 2004 - DNA, 17 bp, Artificial Sequence
  synthetic circulating small noncoding RNA (sncRNA) 5' transfer RNA (tRNA) half
cattcttgcgacccggg

SEQ ID NO: 2005 - DNA, 35 bp, Artificial Sequence
  synthetic circulating small noncoding RNA (sncRNA) 5' transfer RNA (tRNA) half
agaagattgagggttcgagtcccttcgtggtcgaa

SEQ ID NO: 2006 - DNA, 14 bp, Artificial Sequence
  synthetic circulating small noncoding RNA (sncRNA) 5' transfer RNA (tRNA) half
atccgagtcacggc

SEQ ID NO: 2007 - DNA, 12 bp, Artificial Sequence
  synthetic circulating small noncoding RNA (sncRNA) 5' transfer RNA (tRNA) half
gcggcccgggtt

SEQ ID NO: 2008 - DNA, 33 bp, Artificial Sequence
  synthetic circulating small noncoding RNA (sncRNA) 5' transfer RNA (tRNA) half
cgggggtatagctcagtggtagagcatttgact

SEQ ID NO: 2009 - DNA, 30 bp, Artificial Sequence
  synthetic circulating small noncoding RNA (sncRNA) 5' transfer RNA (tRNA) half
aggcgagcgtgatgaccactacactacgga

SEQ ID NO: 2010 - DNA, 29 bp, Artificial Sequence
  synthetic circulating small noncoding RNA (sncRNA) 5' transfer RNA (tRNA) half
gtttccgtagtgtagtggtcatcacgctc

SEQ ID NO: 2011 - DNA, 29 bp, Artificial Sequence
  synthetic circulating small noncoding RNA (sncRNA) 5' transfer RNA (tRNA) half
ttccgtagtgtagtggttatcacgttcgc

SEQ ID NO: 2012 - DNA, 32 bp, Artificial Sequence
  synthetic circulating small noncoding RNA (sncRNA) 5' transfer RNA (tRNA) half
gttaggattcggcgctctcaccgccgcggccc

SEQ ID NO: 2013 - DNA, 27 bp, Artificial Sequence
  synthetic circulating small noncoding RNA (sncRNA) 5' transfer RNA (tRNA) half
ggttccatggtgtaatggttagcactc

SEQ ID NO: 2014 - DNA, 34 bp, Artificial Sequence
  synthetic circulating small noncoding RNA (sncRNA) 5' transfer RNA (tRNA) half
tcagaagattgagggttcgagtcccttcgtggtc

SEQ ID NO: 2015 - DNA, 35 bp, Artificial Sequence
  synthetic circulating small noncoding RNA (sncRNA) 5' transfer RNA (tRNA) half
tgaccccgacgtgatttgaacacgcaaccttctga

SEQ ID NO: 2016 - DNA, 29 bp, Artificial Sequence
  synthetic circulating small noncoding RNA (sncRNA) 5' transfer RNA (tRNA) half
gcagagtactaaccactatacgatctcgg

SEQ ID NO: 2017 - DNA, 37 bp, Artificial Sequence
  synthetic circulating small noncoding RNA (sncRNA) 5' transfer RNA (tRNA) half
accgaccacgaagggactcgaaccctcaatcttctga

SEQ ID NO: 2018 - DNA, 27 bp, Artificial Sequence
  synthetic circulating small noncoding RNA (sncRNA) 5' transfer RNA (tRNA) half
ccaggaatcctaaccgctagaccatgt

SEQ ID NO: 2019 - DNA, 29 bp, Artificial Sequence
  synthetic circulating small noncoding RNA (sncRNA) 5' transfer RNA (tRNA) half
ggttccatagtgtagcggttatcacgtct

SEQ ID NO: 2020 - DNA, 32 bp, Artificial Sequence
  synthetic circulating small noncoding RNA (sncRNA) 5' transfer RNA (tRNA) half
cattggccgggaatcgaacccgggcctcccgc

SEQ ID NO: 2021 - DNA, 39 bp, Artificial Sequence
  synthetic circulating small noncoding RNA (sncRNA) 5' transfer RNA (tRNA) half
cataatctgaaggtcctgagttcgaacctcagagggggc

SEQ ID NO: 2022 - DNA, 24 bp, Artificial Sequence
  synthetic circulating small noncoding RNA (sncRNA) 5' transfer RNA (tRNA) half
tgctctaccgactgagctagccgg

SEQ ID NO: 2023 - DNA, 13 bp, Artificial Sequence
  synthetic circulating small noncoding RNA (sncRNA) 5' transfer RNA (tRNA) half
gcccccgaagaga

SEQ ID NO: 2024 - DNA, 17 bp, Artificial Sequence
  synthetic circulating small noncoding RNA (sncRNA) 5' transfer RNA (tRNA) half
tctccccgtcggggaat

SEQ ID NO: 2025 - DNA, 11 bp, Artificial Sequence
  synthetic circulating small noncoding RNA (sncRNA) 5' transfer RNA (tRNA) half
acccgggacct

SEQ ID NO: 2026 - DNA, 33 bp, Artificial Sequence
  synthetic circulating small noncoding RNA (sncRNA) 5' transfer RNA (tRNA) half
actccgccgggactcgaacccggaacctttgaa

SEQ ID NO: 2027 - DNA, 20 bp, Artificial Sequence
  synthetic circulating small noncoding RNA (sncRNA) 5' transfer RNA (tRNA) half
ccgacgaggatgggattcga

SEQ ID NO: 2028 - DNA, 14 bp, Artificial Sequence
  synthetic circulating small noncoding RNA (sncRNA) 5' transfer RNA (tRNA) half
gtctcatgctctac

SEQ ID NO: 2029 - DNA, 26 bp, Artificial Sequence
  synthetic circulating small noncoding RNA (sncRNA) 5' transfer RNA (tRNA) half
ggggttcgattccccgacggggagtc

SEQ ID NO: 2030 - DNA, 19 bp, Artificial Sequence
  synthetic circulating small noncoding RNA (sncRNA) 5' transfer RNA (tRNA) half
ggggatgtagctcagtggt

SEQ ID NO: 2031 - DNA, 23 bp, Artificial Sequence
  synthetic circulating small noncoding RNA (sncRNA) 5' transfer RNA (tRNA) half
gctctaccgactgagctatccgg

SEQ ID NO: 2032 - DNA, 20 bp, Artificial Sequence
  synthetic circulating small noncoding RNA (sncRNA) 5' transfer RNA (tRNA) half
agtcccatgctctaccgact

SEQ ID NO: 2033 - DNA, 25 bp, Artificial Sequence
  synthetic circulating small noncoding RNA (sncRNA) 5' transfer RNA (tRNA) half
gtgataaccactacactacggaaac

SEQ ID NO: 2034 - DNA, 25 bp, Artificial Sequence
  synthetic circulating small noncoding RNA (sncRNA) 5' transfer RNA (tRNA) half
gtcggggaatcgaaccccggtctcc

SEQ ID NO: 2035 - DNA, 12 bp, Artificial Sequence
  synthetic circulating small noncoding RNA (sncRNA) 5' transfer RNA (tRNA) half
gcccagcacgct

SEQ ID NO: 2036 - DNA, 19 bp, Artificial Sequence
  synthetic circulating small noncoding RNA (sncRNA) 5' transfer RNA (tRNA) half
taacgtgtttccgcccggt

SEQ ID NO: 2037 - DNA, 14 bp, Artificial Sequence
  synthetic circulating small noncoding RNA (sncRNA) 5' transfer RNA (tRNA) half
gcccccgaagagac

SEQ ID NO: 2038 - DNA, 18 bp, Artificial Sequence
  synthetic circulating small noncoding RNA (sncRNA) 5' transfer RNA (tRNA) half
ggctcgttggtctagggg

SEQ ID NO: 2039 - DNA, 16 bp, Artificial Sequence
  synthetic circulating small noncoding RNA (sncRNA) 5' transfer RNA (tRNA) half
accggggacctttcgc

SEQ ID NO: 2040 - DNA, 37 bp, Artificial Sequence
  synthetic circulating small noncoding RNA (sncRNA) 5' transfer RNA (tRNA) half
ggagggggcacccggatttgaaccagggacctcttga

SEQ ID NO: 2041 - DNA, 22 bp, Artificial Sequence
  synthetic circulating small noncoding RNA (sncRNA) 5' transfer RNA (tRNA) half
ttaaccactcggccacgactac

SEQ ID NO: 2042 - DNA, 23 bp, Artificial Sequence
  synthetic circulating small noncoding RNA (sncRNA) 5' transfer RNA (tRNA) half
cgggttcgactcccggtatggga

SEQ ID NO: 2043 - DNA, 27 bp, Artificial Sequence
  synthetic circulating small noncoding RNA (sncRNA) 5' transfer RNA (tRNA) half
gggggtgtagctcagtggtagagcgcg

SEQ ID NO: 2044 - DNA, 36 bp, Artificial Sequence
  synthetic circulating small noncoding RNA (sncRNA) 5' transfer RNA (tRNA) half
ccgactccgccgggactcgaacccggaacctttgaa

SEQ ID NO: 2045 - DNA, 35 bp, Artificial Sequence
  synthetic circulating small noncoding RNA (sncRNA) 5' transfer RNA (tRNA) half
tgccgaaacccgggatcgaaccagggacctttaga

SEQ ID NO: 2046 - DNA, 15 bp, Artificial Sequence
  synthetic circulating small noncoding RNA (sncRNA) 5' transfer RNA (tRNA) half
gttatcacgttcgcc

SEQ ID NO: 2047 - DNA, 12 bp, Artificial Sequence
  synthetic circulating small noncoding RNA (sncRNA) 5' transfer RNA (tRNA) half
tgccgtgactcg

SEQ ID NO: 2048 - DNA, 27 bp, Artificial Sequence
  synthetic circulating small noncoding RNA (sncRNA) 5' transfer RNA (tRNA) half
gaatcctaaccgctagaccatatggga

SEQ ID NO: 2049 - DNA, 31 bp, Artificial Sequence
  synthetic circulating small noncoding RNA (sncRNA) 5' transfer RNA (tRNA) half
gcgagcgctctaccatttgagctaatccccc

SEQ ID NO: 2050 - DNA, 19 bp, Artificial Sequence
  synthetic circulating small noncoding RNA (sncRNA) 5' transfer RNA (tRNA) half
aactgtttccgcccggttt

SEQ ID NO: 2051 - DNA, 31 bp, Artificial Sequence
  synthetic circulating small noncoding RNA (sncRNA) 5' transfer RNA (tRNA) half
gtttctgtagtgtagtggttatcacgttcgc

SEQ ID NO: 2052 - DNA, 32 bp, Artificial Sequence
  synthetic circulating small noncoding RNA (sncRNA) 5' transfer RNA (tRNA) half
gcaccaaagcctaaccactagaccaccaggga

SEQ ID NO: 2053 - DNA, 11 bp, Artificial Sequence
  synthetic circulating small noncoding RNA (sncRNA) 5' transfer RNA (tRNA) half
gcgcccgaaca

SEQ ID NO: 2054 - DNA, 19 bp, Artificial Sequence
  synthetic circulating small noncoding RNA (sncRNA) 5' transfer RNA (tRNA) half
tagtggttatcacgttcgc

SEQ ID NO: 2055 - DNA, 20 bp, Artificial Sequence
  synthetic circulating small noncoding RNA (sncRNA) 5' transfer RNA (tRNA) half
gaggcgaacgtgataaccac

SEQ ID NO: 2056 - DNA, 18 bp, Artificial Sequence
  synthetic circulating small noncoding RNA (sncRNA) 5' transfer RNA (tRNA) half
agtctgatgctctaccga

SEQ ID NO: 2057 - DNA, 32 bp, Artificial Sequence
  synthetic circulating small noncoding RNA (sncRNA) 5' transfer RNA (tRNA) half
cgggaggcccgggttcgattcccggccaatgc

SEQ ID NO: 2058 - DNA, 30 bp, Artificial Sequence
  synthetic circulating small noncoding RNA (sncRNA) 5' transfer RNA (tRNA) half
ccccgtcggggaatcgaaccccggtctccc

SEQ ID NO: 2059 - DNA, 19 bp, Artificial Sequence
  synthetic circulating small noncoding RNA (sncRNA) 5' transfer RNA (tRNA) half
accgctcggccatcctgac

SEQ ID NO: 2060 - DNA, 31 bp, Artificial Sequence
  synthetic circulating small noncoding RNA (sncRNA) 5' transfer RNA (tRNA) half
ggcatgggtggttcagtggtagaattctcgc

SEQ ID NO: 2061 - DNA, 13 bp, Artificial Sequence
  synthetic circulating small noncoding RNA (sncRNA) 5' transfer RNA (tRNA) half
gtcaggatggccg

SEQ ID NO: 2062 - DNA, 16 bp, Artificial Sequence
  synthetic circulating small noncoding RNA (sncRNA) 5' transfer RNA (tRNA) half
cggtagagcatgagac

SEQ ID NO: 2063 - DNA, 20 bp, Artificial Sequence
  synthetic circulating small noncoding RNA (sncRNA) 5' transfer RNA (tRNA) half
agttgtgtcagaagtgggat

SEQ ID NO: 2064 - DNA, 19 bp, Artificial Sequence
  synthetic circulating small noncoding RNA (sncRNA) 5' transfer RNA (tRNA) half
acccctagaccaacgagcc

SEQ ID NO: 2065 - DNA, 16 bp, Artificial Sequence
  synthetic circulating small noncoding RNA (sncRNA) 5' transfer RNA (tRNA) half
ctgtcacgcgggagac

SEQ ID NO: 2066 - DNA, 16 bp, Artificial Sequence
  synthetic circulating small noncoding RNA (sncRNA) 5' transfer RNA (tRNA) half
gcgtggcaggcgagaa

SEQ ID NO: 2067 - DNA, 22 bp, Artificial Sequence
  synthetic circulating small noncoding RNA (sncRNA) 5' transfer RNA (tRNA) half
ctaccgactgagctagccgggc

SEQ ID NO: 2068 - DNA, 19 bp, Artificial Sequence
  synthetic circulating small noncoding RNA (sncRNA) 5' transfer RNA (tRNA) half
tccattgcgccacggagcc

SEQ ID NO: 2069 - DNA, 23 bp, Artificial Sequence
  synthetic circulating small noncoding RNA (sncRNA) 5' transfer RNA (tRNA) half
aaagtctgatgctctaccgactg

SEQ ID NO: 2070 - DNA, 24 bp, Artificial Sequence
  synthetic circulating small noncoding RNA (sncRNA) 5' transfer RNA (tRNA) half
tgttcccataccgggagtcgaacc

SEQ ID NO: 2071 - DNA, 17 bp, Artificial Sequence
  synthetic circulating small noncoding RNA (sncRNA) 5' transfer RNA (tRNA) half
agtctcatgctctaccg

SEQ ID NO: 2072 - DNA, 22 bp, Artificial Sequence
  synthetic circulating small noncoding RNA (sncRNA) 5' transfer RNA (tRNA) half
ggcgaacgtgataaccactaca

SEQ ID NO: 2073 - DNA, 36 bp, Artificial Sequence
  synthetic circulating small noncoding RNA (sncRNA) 5' transfer RNA (tRNA) half
cagaagattgcaggttcgagtcctgccgcggtcgac

SEQ ID NO: 2074 - DNA, 36 bp, Artificial Sequence
  synthetic circulating small noncoding RNA (sncRNA) 5' transfer RNA (tRNA) half
ggcgtccctgggtgggctcgaaccaccaacctttcg

SEQ ID NO: 2075 - DNA, 13 bp, Artificial Sequence
  synthetic circulating small noncoding RNA (sncRNA) 5' transfer RNA (tRNA) half
tccgagtcacggc

SEQ ID NO: 2076 - DNA, 20 bp, Artificial Sequence
  synthetic circulating small noncoding RNA (sncRNA) 5' transfer RNA (tRNA) half
gtggttagtactctgcgttg

SEQ ID NO: 2077 - DNA, 36 bp, Artificial Sequence
  synthetic circulating small noncoding RNA (sncRNA) 5' transfer RNA (tRNA) half
attcttgcgacccgggttcgattcccgggcggcgca

SEQ ID NO: 2078 - DNA, 35 bp, Artificial Sequence
  synthetic circulating small noncoding RNA (sncRNA) 5' transfer RNA (tRNA) half
gcctccccgtcggggaatcgaaccccggtctcccg

SEQ ID NO: 2079 - DNA, 30 bp, Artificial Sequence
  synthetic circulating small noncoding RNA (sncRNA) 5' transfer RNA (tRNA) half
aggcggcccgggttcgactcccggtgtggg

SEQ ID NO: 2080 - DNA, 20 bp, Artificial Sequence
  synthetic circulating small noncoding RNA (sncRNA) 5' transfer RNA (tRNA) half
gagcgccgaatcctaaccac

SEQ ID NO: 2081 - DNA, 13 bp, Artificial Sequence
  synthetic circulating small noncoding RNA (sncRNA) 5' transfer RNA (tRNA) half
tgccgtgactcgg

SEQ ID NO: 2082 - DNA, 16 bp, Artificial Sequence
  synthetic circulating small noncoding RNA (sncRNA) 5' transfer RNA (tRNA) half
tctcatgctctaccga

SEQ ID NO: 2083 - DNA, 34 bp, Artificial Sequence
  synthetic circulating small noncoding RNA (sncRNA) 5' transfer RNA (tRNA) half
gccccctctgaggttcgaactcaggaccttcaga

SEQ ID NO: 2084 - DNA, 22 bp, Artificial Sequence
  synthetic circulating small noncoding RNA (sncRNA) 5' transfer RNA (tRNA) half
gttcgactcccggtgtgggaac

SEQ ID NO: 2085 - DNA, 33 bp, Artificial Sequence
  synthetic circulating small noncoding RNA (sncRNA) 5' transfer RNA (tRNA) half
cattggccgggaatcgaacccgggcctcccgcg

SEQ ID NO: 2086 - DNA, 18 bp, Artificial Sequence
  synthetic circulating small noncoding RNA (sncRNA) 5' transfer RNA (tRNA) half
gctcgtccgggatttgaa

SEQ ID NO: 2087 - DNA, 30 bp, Artificial Sequence
  synthetic circulating small noncoding RNA (sncRNA) 5' transfer RNA (tRNA) half
gcggcccgggttcgactcccggtgtgggaa

SEQ ID NO: 2088 - DNA, 17 bp, Artificial Sequence
  synthetic circulating small noncoding RNA (sncRNA) 5' transfer RNA (tRNA) half
gttcccacaccgggagt

SEQ ID NO: 2089 - DNA, 27 bp, Artificial Sequence
  synthetic circulating small noncoding RNA (sncRNA) 5' transfer RNA (tRNA) half
aactcggatcgctggattcagagtcca

SEQ ID NO: 2090 - DNA, 35 bp, Artificial Sequence
  synthetic circulating small noncoding RNA (sncRNA) 5' transfer RNA (tRNA) half
tgtgcattggccgggaatcgaacccgggcctcccg

SEQ ID NO: 2091 - DNA, 27 bp, Artificial Sequence
  synthetic circulating small noncoding RNA (sncRNA) 5' transfer RNA (tRNA) half
aagtctgatgctctaccgactgagcta

SEQ ID NO: 2092 - DNA, 10 bp, Artificial Sequence
  synthetic circulating small noncoding RNA (sncRNA) 5' transfer RNA (tRNA) half
agcgccgaat

SEQ ID NO: 2093 - DNA, 25 bp, Artificial Sequence
  synthetic circulating small noncoding RNA (sncRNA) 5' transfer RNA (tRNA) half
gggggattagctcaaatggtagagc

SEQ ID NO: 2094 - DNA, 20 bp, Artificial Sequence
  synthetic circulating small noncoding RNA (sncRNA) 5' transfer RNA (tRNA) half
tgttcccacaccgggagtcg

SEQ ID NO: 2095 - DNA, 24 bp, Artificial Sequence
  synthetic circulating small noncoding RNA (sncRNA) 5' transfer RNA (tRNA) half
cgccgaatcctaaccactagacca

SEQ ID NO: 2096 - DNA, 24 bp, Artificial Sequence
  synthetic circulating small noncoding RNA (sncRNA) 5' transfer RNA (tRNA) half
agctcagtcggtagagcatcagac

SEQ ID NO: 2097 - DNA, 19 bp, Artificial Sequence
  synthetic circulating small noncoding RNA (sncRNA) 5' transfer RNA (tRNA) half
tccattgcgccacagagcc

SEQ ID NO: 2098 - DNA, 24 bp, Artificial Sequence
  synthetic circulating small noncoding RNA (sncRNA) 5' transfer RNA (tRNA) half
gccgaatcctaaccactagaccac

SEQ ID NO: 2099 - DNA, 20 bp, Artificial Sequence
  synthetic circulating small noncoding RNA (sncRNA) 5' transfer RNA (tRNA) half
gggctcgtccgggatttgaa

SEQ ID NO: 2100 - DNA, 14 bp, Artificial Sequence
  synthetic circulating small noncoding RNA (sncRNA) 5' transfer RNA (tRNA) half
gagccagccaggag

SEQ ID NO: 2101 - DNA, 13 bp, Artificial Sequence
  synthetic circulating small noncoding RNA (sncRNA) 5' transfer RNA (tRNA) half
gggggcacccgga

SEQ ID NO: 2102 - DNA, 32 bp, Artificial Sequence
  synthetic circulating small noncoding RNA (sncRNA) 5' transfer RNA (tRNA) half
gcttccctgaccgggaatcgaacccgggccgc

SEQ ID NO: 2103 - DNA, 34 bp, Artificial Sequence
  synthetic circulating small noncoding RNA (sncRNA) 5' transfer RNA (tRNA) half
gactctggcgggactcgaacccgcaacctttgaa

SEQ ID NO: 2104 - DNA, 32 bp, Artificial Sequence
  synthetic circulating small noncoding RNA (sncRNA) 5' transfer RNA (tRNA) half
atgcagagtactaaccactatacgatctcggc

SEQ ID NO: 2105 - DNA, 35 bp, Artificial Sequence
  synthetic circulating small noncoding RNA (sncRNA) 5' transfer RNA (tRNA) half
gcccgaacagggacttgaaccctggaccctcagat

SEQ ID NO: 2106 - DNA, 14 bp, Artificial Sequence
  synthetic circulating small noncoding RNA (sncRNA) 5' transfer RNA (tRNA) half
gttaggattcggcg

SEQ ID NO: 2107 - DNA, 16 bp, Artificial Sequence
  synthetic circulating small noncoding RNA (sncRNA) 5' transfer RNA (tRNA) half
gaccgggaatcgaacc

SEQ ID NO: 2108 - DNA, 26 bp, Artificial Sequence
  synthetic circulating small noncoding RNA (sncRNA) 5' transfer RNA (tRNA) half
agtactaaccactatacgatcacggc

SEQ ID NO: 2109 - DNA, 23 bp, Artificial Sequence
  synthetic circulating small noncoding RNA (sncRNA) 5' transfer RNA (tRNA) half
ctcagtcggtagagcatgagact

SEQ ID NO: 2110 - DNA, 26 bp, Artificial Sequence
  synthetic circulating small noncoding RNA (sncRNA) 5' transfer RNA (tRNA) half
aggcgaacgtgataaccactacacta

SEQ ID NO: 2111 - DNA, 27 bp, Artificial Sequence
  synthetic circulating small noncoding RNA (sncRNA) 5' transfer RNA (tRNA) half
gagattaagagtctcatgctctaccga

SEQ ID NO: 2112 - DNA, 17 bp, Artificial Sequence
  synthetic circulating small noncoding RNA (sncRNA) 5' transfer RNA (tRNA) half
ttcccgggcggcgcatg

SEQ ID NO: 2113 - DNA, 24 bp, Artificial Sequence
  synthetic circulating small noncoding RNA (sncRNA) 5' transfer RNA (tRNA) half
cctccccgtcggggaatcgaaccc

SEQ ID NO: 2114 - DNA, 30 bp, Artificial Sequence
  synthetic circulating small noncoding RNA (sncRNA) 5' transfer RNA (tRNA) half
agcgccgaatcctaaccactagaccaccag

SEQ ID NO: 2115 - DNA, 13 bp, Artificial Sequence
  synthetic circulating small noncoding RNA (sncRNA) 5' transfer RNA (tRNA) half
cgtagtcggcagg

SEQ ID NO: 2116 - DNA, 33 bp, Artificial Sequence
  synthetic circulating small noncoding RNA (sncRNA) 5' transfer RNA (tRNA) half
ccaggggtcgcgagttcaaatctcgctggggcc

SEQ ID NO: 2117 - DNA, 11 bp, Artificial Sequence
  synthetic circulating small noncoding RNA (sncRNA) 5' transfer RNA (tRNA) half
cgagtcacggc

SEQ ID NO: 2118 - DNA, 35 bp, Artificial Sequence
  synthetic circulating small noncoding RNA (sncRNA) 5' transfer RNA (tRNA) half
tctgagggtccagggttcaagtccctgttcgggcg

SEQ ID NO: 2119 - DNA, 37 bp, Artificial Sequence
  synthetic circulating small noncoding RNA (sncRNA) 5' transfer RNA (tRNA) half
gaccccgacgtgatttgaacacgcaaccttctgatct

SEQ ID NO: 2120 - DNA, 15 bp, Artificial Sequence
  synthetic circulating small noncoding RNA (sncRNA) 5' transfer RNA (tRNA) half
ttctcgcctgccacg

SEQ ID NO: 2121 - DNA, 15 bp, Artificial Sequence
  synthetic circulating small noncoding RNA (sncRNA) 5' transfer RNA (tRNA) half
cgagcggtctaaggc

SEQ ID NO: 2122 - DNA, 18 bp, Artificial Sequence
  synthetic circulating small noncoding RNA (sncRNA) 5' transfer RNA (tRNA) half
agcagaggatggtttcga

SEQ ID NO: 2123 - DNA, 32 bp, Artificial Sequence
  synthetic circulating small noncoding RNA (sncRNA) 5' transfer RNA (tRNA) half
ggcaggcgagaattctaccactgaaccaccaa

SEQ ID NO: 2124 - DNA, 21 bp, Artificial Sequence
  synthetic circulating small noncoding RNA (sncRNA) 5' transfer RNA (tRNA) half
gtgtaatggttagcactctgg

SEQ ID NO: 2125 - DNA, 31 bp, Artificial Sequence
  synthetic circulating small noncoding RNA (sncRNA) 5' transfer RNA (tRNA) half
accaggaatcctaaccgctagaccatatggg

SEQ ID NO: 2126 - DNA, 15 bp, Artificial Sequence
  synthetic circulating small noncoding RNA (sncRNA) 5' transfer RNA (tRNA) half
tcccgggcggcgcat

SEQ ID NO: 2127 - DNA, 26 bp, Artificial Sequence
  synthetic circulating small noncoding RNA (sncRNA) 5' transfer RNA (tRNA) half
actcggatcgctggattcagagtcca

SEQ ID NO: 2128 - DNA, 23 bp, Artificial Sequence
  synthetic circulating small noncoding RNA (sncRNA) 5' transfer RNA (tRNA) half
gctcagtcggtagagcatcagac

SEQ ID NO: 2129 - DNA, 29 bp, Artificial Sequence
  synthetic circulating small noncoding RNA (sncRNA) 5' transfer RNA (tRNA) half
accaggaatcctaaccgctagaccatatg

SEQ ID NO: 2130 - DNA, 20 bp, Artificial Sequence
  synthetic circulating small noncoding RNA (sncRNA) 5' transfer RNA (tRNA) half
gttcgagccccagtggaacc

SEQ ID NO: 2131 - DNA, 29 bp, Artificial Sequence
  synthetic circulating small noncoding RNA (sncRNA) 5' transfer RNA (tRNA) half
cctggtggtctagtggttaggattcggcg

SEQ ID NO: 2132 - DNA, 21 bp, Artificial Sequence
  synthetic circulating small noncoding RNA (sncRNA) 5' transfer RNA (tRNA) half
aaccgggcggaaacagcaact

SEQ ID NO: 2133 - DNA, 27 bp, Artificial Sequence
  synthetic circulating small noncoding RNA (sncRNA) 5' transfer RNA (tRNA) half
gattcggcgctctcaccgccgcggccc

SEQ ID NO: 2134 - DNA, 27 bp, Artificial Sequence
  synthetic circulating small noncoding RNA (sncRNA) 5' transfer RNA (tRNA) half
caggaatcctaaccgctagaccatgtg

SEQ ID NO: 2135 - DNA, 34 bp, Artificial Sequence
  synthetic circulating small noncoding RNA (sncRNA) 5' transfer RNA (tRNA) half
tctgagggtccagggttcaagtccctgttcgggc

SEQ ID NO: 2136 - DNA, 38 bp, Artificial Sequence
  synthetic circulating small noncoding RNA (sncRNA) 5' transfer RNA (tRNA) half
accgccgcggcccgggttcgattcccggtcagggaagc

SEQ ID NO: 2137 - DNA, 28 bp, Artificial Sequence
  synthetic circulating small noncoding RNA (sncRNA) 5' transfer RNA (tRNA) half
gatgctctaccgactgagctatccgggc

SEQ ID NO: 2138 - DNA, 20 bp, Artificial Sequence
  synthetic circulating small noncoding RNA (sncRNA) 5' transfer RNA (tRNA) half
tcgactcccggtgtgggaac

SEQ ID NO: 2139 - DNA, 30 bp, Artificial Sequence
  synthetic circulating small noncoding RNA (sncRNA) 5' transfer RNA (tRNA) half
cgcccaacgtggggctcgaacccacgaccc

SEQ ID NO: 2140 - DNA, 35 bp, Artificial Sequence
  synthetic circulating small noncoding RNA (sncRNA) 5' transfer RNA (tRNA) half
gcattggtggttcagtggtagaattctcgcctgcc

SEQ ID NO: 2141 - DNA, 21 bp, Artificial Sequence
  synthetic circulating small noncoding RNA (sncRNA) 5' transfer RNA (tRNA) half
agaccactcggccatcctgac

SEQ ID NO: 2142 - DNA, 36 bp, Artificial Sequence
  synthetic circulating small noncoding RNA (sncRNA) 5' transfer RNA (tRNA) half
atgaccccgacgtgatttgaacacgcaaccttctga

SEQ ID NO: 2143 - DNA, 38 bp, Artificial Sequence
  synthetic circulating small noncoding RNA (sncRNA) 5' transfer RNA (tRNA) half
ggcccgtacggggatcgaacccgcgaccttggcgttat

SEQ ID NO: 2144 - DNA, 23 bp, Artificial Sequence
  synthetic circulating small noncoding RNA (sncRNA) 5' transfer RNA (tRNA) half
gcggcccgggttcgattcccggt

SEQ ID NO: 2145 - DNA, 16 bp, Artificial Sequence
  synthetic circulating small noncoding RNA (sncRNA) 5' transfer RNA (tRNA) half
gtcaggatggccgagt

SEQ ID NO: 2146 - DNA, 38 bp, Artificial Sequence
  synthetic circulating small noncoding RNA (sncRNA) 5' transfer RNA (tRNA) half
gtctccccgtcggggaatcgaaccccggtctcccgcgt

SEQ ID NO: 2147 - DNA, 32 bp, Artificial Sequence
  synthetic circulating small noncoding RNA (sncRNA) 5' transfer RNA (tRNA) half
cagaaggtcctgggttcgagccccagtggaac

SEQ ID NO: 2148 - DNA, 36 bp, Artificial Sequence
  synthetic circulating small noncoding RNA (sncRNA) 5' transfer RNA (tRNA) half
acgcgaaaggtccccggttcgaaaccgggcggaaac

SEQ ID NO: 2149 - DNA, 28 bp, Artificial Sequence
  synthetic circulating small noncoding RNA (sncRNA) 5' transfer RNA (tRNA) half
cagagtgctaaccattacaccatgggac

SEQ ID NO: 2150 - DNA, 32 bp, Artificial Sequence
  synthetic circulating small noncoding RNA (sncRNA) 5' transfer RNA (tRNA) half
gggggtatagctcagaggtagagcatttgact

SEQ ID NO: 2151 - DNA, 38 bp, Artificial Sequence
  synthetic circulating small noncoding RNA (sncRNA) 5' transfer RNA (tRNA) half
acgcagaaggtcctgggttcgagccccagtggaaccac

SEQ ID NO: 2152 - DNA, 27 bp, Artificial Sequence
  synthetic circulating small noncoding RNA (sncRNA) 5' transfer RNA (tRNA) half
aggaatcctaaccgctagaccatgtgg

SEQ ID NO: 2153 - DNA, 34 bp, Artificial Sequence
  synthetic circulating small noncoding RNA (sncRNA) 5' transfer RNA (tRNA) half
ggccggttagctcagttggttagagcgtggtgct

SEQ ID NO: 2154 - DNA, 22 bp, Artificial Sequence
  synthetic circulating small noncoding RNA (sncRNA) 5' transfer RNA (tRNA) half
aaaccgggcggaaacaactttt

SEQ ID NO: 2155 - DNA, 25 bp, Artificial Sequence
  synthetic circulating small noncoding RNA (sncRNA) 5' transfer RNA (tRNA) half
gcgaacgtgataaccactacactac

SEQ ID NO: 2156 - DNA, 27 bp, Artificial Sequence
  synthetic circulating small noncoding RNA (sncRNA) 5' transfer RNA (tRNA) half
ggcgaacgtgataaccactacactacg

SEQ ID NO: 2157 - DNA, 35 bp, Artificial Sequence
  synthetic circulating small noncoding RNA (sncRNA) 5' transfer RNA (tRNA) half
cgagaggtcccgggttcaaatcccggacgagcccc

SEQ ID NO: 2158 - DNA, 18 bp, Artificial Sequence
  synthetic circulating small noncoding RNA (sncRNA) 5' transfer RNA (tRNA) half
gacctcgtggcgcaacgg

SEQ ID NO: 2159 - DNA, 30 bp, Artificial Sequence
  synthetic circulating small noncoding RNA (sncRNA) 5' transfer RNA (tRNA) half
tctcatgctctaccgactgagctagccggg

SEQ ID NO: 2160 - DNA, 34 bp, Artificial Sequence
  synthetic circulating small noncoding RNA (sncRNA) 5' transfer RNA (tRNA) half
tgcgagaggtcccgggttcaaatcccggacgagc

SEQ ID NO: 2161 - DNA, 36 bp, Artificial Sequence
  synthetic circulating small noncoding RNA (sncRNA) 5' transfer RNA (tRNA) half
gctcgtccgggatttgaacccgggacctctcgcacc

SEQ ID NO: 2162 - DNA, 36 bp, Artificial Sequence
  synthetic circulating small noncoding RNA (sncRNA) 5' transfer RNA (tRNA) half
gtgaggcgaacgtgataaccactacactacggaaac

SEQ ID NO: 2163 - DNA, 19 bp, Artificial Sequence
  synthetic circulating small noncoding RNA (sncRNA) 5' transfer RNA (tRNA) half
cccacaccgggagtcgaac

SEQ ID NO: 2164 - DNA, 22 bp, Artificial Sequence
  synthetic circulating small noncoding RNA (sncRNA) 5' transfer RNA (tRNA) half
ctcagtggtctggggtgcaggc

SEQ ID NO: 2165 - DNA, 37 bp, Artificial Sequence
  synthetic circulating small noncoding RNA (sncRNA) 5' transfer RNA (tRNA) half
tgtgcattggccgggaatcgaacccgggcctcccgcg

SEQ ID NO: 2166 - DNA, 16 bp, Artificial Sequence
  synthetic circulating small noncoding RNA (sncRNA) 5' transfer RNA (tRNA) half
ttccggctcgaaggac

SEQ ID NO: 2167 - DNA, 37 bp, Artificial Sequence
  synthetic circulating small noncoding RNA (sncRNA) 5' transfer RNA (tRNA) half
tcagaagattccaggttcgactcctggctggctcgtt

SEQ ID NO: 2168 - DNA, 18 bp, Artificial Sequence
  synthetic circulating small noncoding RNA (sncRNA) 5' transfer RNA (tRNA) half
agcggaagcgtgctgggc

SEQ ID NO: 2169 - DNA, 32 bp, Artificial Sequence
  synthetic circulating small noncoding RNA (sncRNA) 5' transfer RNA (tRNA) half
gtcagaagtgggattcgaacccacgcctccat

SEQ ID NO: 2170 - DNA, 16 bp, Artificial Sequence
  synthetic circulating small noncoding RNA (sncRNA) 5' transfer RNA (tRNA) half
gctcggccacactacc

SEQ ID NO: 2171 - DNA, 34 bp, Artificial Sequence
  synthetic circulating small noncoding RNA (sncRNA) 5' transfer RNA (tRNA) half
ttcttgcgacccgggttcgattcccgggcggcgc

SEQ ID NO: 2172 - DNA, 13 bp, Artificial Sequence
  synthetic circulating small noncoding RNA (sncRNA) 5' transfer RNA (tRNA) half
ccttcgatagctc

SEQ ID NO: 2173 - DNA, 24 bp, Artificial Sequence
  synthetic circulating small noncoding RNA (sncRNA) 5' transfer RNA (tRNA) half
attctaccactgaaccaccaatgc

SEQ ID NO: 2174 - DNA, 29 bp, Artificial Sequence
  synthetic circulating small noncoding RNA (sncRNA) 5' transfer RNA (tRNA) half
cagagtggcgcagcggaagcgtgctgggc

SEQ ID NO: 2175 - DNA, 16 bp, Artificial Sequence
  synthetic circulating small noncoding RNA (sncRNA) 5' transfer RNA (tRNA) half
cgactcccggtgtggg

SEQ ID NO: 2176 - DNA, 29 bp, Artificial Sequence
  synthetic circulating small noncoding RNA (sncRNA) 5' transfer RNA (tRNA) half
agtggttaggattcggcgctctcaccgcc

SEQ ID NO: 2177 - DNA, 16 bp, Artificial Sequence
  synthetic circulating small noncoding RNA (sncRNA) 5' transfer RNA (tRNA) half
ggttatcacgttcgcc

SEQ ID NO: 2178 - DNA, 19 bp, Artificial Sequence
  synthetic circulating small noncoding RNA (sncRNA) 5' transfer RNA (tRNA) half
accgctcggccacgctacc

SEQ ID NO: 2179 - DNA, 20 bp, Artificial Sequence
  synthetic circulating small noncoding RNA (sncRNA) 5' transfer RNA (tRNA) half
tcccacatggtctagcggtt

SEQ ID NO: 2180 - DNA, 36 bp, Artificial Sequence
  synthetic circulating small noncoding RNA (sncRNA) 5' transfer RNA (tRNA) half
cgtgtttccgcccggtttcgaaccggggacctttcg

SEQ ID NO: 2181 - DNA, 27 bp, Artificial Sequence
  synthetic circulating small noncoding RNA (sncRNA) 5' transfer RNA (tRNA) half
tcccgcgtggcaggcgagaattctacc

SEQ ID NO: 2182 - DNA, 37 bp, Artificial Sequence
  synthetic circulating small noncoding RNA (sncRNA) 5' transfer RNA (tRNA) half
gagccagccaggagtcgaacctagaatcttctgatcc

SEQ ID NO: 2183 - DNA, 26 bp, Artificial Sequence
  synthetic circulating small noncoding RNA (sncRNA) 5' transfer RNA (tRNA) half
gcgccgctggtgtagtggtatcatgc

SEQ ID NO: 2184 - DNA, 34 bp, Artificial Sequence
  synthetic circulating small noncoding RNA (sncRNA) 5' transfer RNA (tRNA) half
gagcgccaaatcctaaccactagaccaccaggga

SEQ ID NO: 2185 - DNA, 37 bp, Artificial Sequence
  synthetic circulating small noncoding RNA (sncRNA) 5' transfer RNA (tRNA) half
ataacgccaaggtcgcgggttcgatccccgtacgggc

SEQ ID NO: 2186 - DNA, 14 bp, Artificial Sequence
  synthetic circulating small noncoding RNA (sncRNA) 5' transfer RNA (tRNA) half
tatacgatcacggc

SEQ ID NO: 2187 - DNA, 34 bp, Artificial Sequence
  synthetic circulating small noncoding RNA (sncRNA) 5' transfer RNA (tRNA) half
tccctggtggtctagtggctaggattcggcgctt

SEQ ID NO: 2188 - DNA, 23 bp, Artificial Sequence
  synthetic circulating small noncoding RNA (sncRNA) 5' transfer RNA (tRNA) half
gtcggggaatcgaaccccggtct

SEQ ID NO: 2189 - DNA, 21 bp, Artificial Sequence
  synthetic circulating small noncoding RNA (sncRNA) 5' transfer RNA (tRNA) half
gacgacgaaggtgggattcga

SEQ ID NO: 2190 - DNA, 35 bp, Artificial Sequence
  synthetic circulating small noncoding RNA (sncRNA) 5' transfer RNA (tRNA) half
gtcgagccagccaggagtcgaacctagaatcttct

SEQ ID NO: 2191 - DNA, 30 bp, Artificial Sequence
  synthetic circulating small noncoding RNA (sncRNA) 5' transfer RNA (tRNA) half
ggttccatggtgtaatggttagcactctgg

SEQ ID NO: 2192 - DNA, 34 bp, Artificial Sequence
  synthetic circulating small noncoding RNA (sncRNA) 5' transfer RNA (tRNA) half
ttgcgacccgggttcgattcccgggcggcgcatg

SEQ ID NO: 2193 - DNA, 28 bp, Artificial Sequence
  synthetic circulating small noncoding RNA (sncRNA) 5' transfer RNA (tRNA) half
gaccgggaatcgaacccgggccgcggcg

SEQ ID NO: 2194 - DNA, 37 bp, Artificial Sequence
  synthetic circulating small noncoding RNA (sncRNA) 5' transfer RNA (tRNA) half
gggccgcctgggtgaaaaccaggaatcctaaccgcta

SEQ ID NO: 2195 - DNA, 38 bp, Artificial Sequence
  synthetic circulating small noncoding RNA (sncRNA) 5' transfer RNA (tRNA) half
tgttcccataccgggagtcgaacccgggccgcctgggt

SEQ ID NO: 2196 - DNA, 18 bp, Artificial Sequence
  synthetic circulating small noncoding RNA (sncRNA) 5' transfer RNA (tRNA) half
cgactgagctagccgggc

SEQ ID NO: 2197 - DNA, 23 bp, Artificial Sequence
  synthetic circulating small noncoding RNA (sncRNA) 5' transfer RNA (tRNA) half
ctgaatccagcgatccgagttca

SEQ ID NO: 2198 - DNA, 34 bp, Artificial Sequence
  synthetic circulating small noncoding RNA (sncRNA) 5' transfer RNA (tRNA) half
gagaggtcccgggttcaaatcccggacgagcccc

SEQ ID NO: 2199 - DNA, 24 bp, Artificial Sequence
  synthetic circulating small noncoding RNA (sncRNA) 5' transfer RNA (tRNA) half
cgggttcgactcccggtgtgggaa

SEQ ID NO: 2200 - DNA, 21 bp, Artificial Sequence
  synthetic circulating small noncoding RNA (sncRNA) 5' transfer RNA (tRNA) half
tatagtggttagtactctgcg

SEQ ID NO: 2201 - DNA, 35 bp, Artificial Sequence
  synthetic circulating small noncoding RNA (sncRNA) 5' transfer RNA (tRNA) half
gactctggtgggactcgaacccacaacctttgaat

SEQ ID NO: 2202 - DNA, 15 bp, Artificial Sequence
  synthetic circulating small noncoding RNA (sncRNA) 5' transfer RNA (tRNA) half
ggcggggatactcac

SEQ ID NO: 2203 - DNA, 25 bp, Artificial Sequence
  synthetic circulating small noncoding RNA (sncRNA) 5' transfer RNA (tRNA) half
cgccgaatcctaaccactagaccac

SEQ ID NO: 2204 - DNA, 24 bp, Artificial Sequence
  synthetic circulating small noncoding RNA (sncRNA) 5' transfer RNA (tRNA) half
tggtctaggggtatgattctcgct

SEQ ID NO: 2205 - DNA, 21 bp, Artificial Sequence
  synthetic circulating small noncoding RNA (sncRNA) 5' transfer RNA (tRNA) half
accaggaatcctaaccgctag

SEQ ID NO: 2206 - DNA, 35 bp, Artificial Sequence
  synthetic circulating small noncoding RNA (sncRNA) 5' transfer RNA (tRNA) half
gtttccgtagtgtagtggttatcacgttcgcctaa

SEQ ID NO: 2207 - DNA, 31 bp, Artificial Sequence
  synthetic circulating small noncoding RNA (sncRNA) 5' transfer RNA (tRNA) half
gcggcccgggttcgactcccggtatgggaac

SEQ ID NO: 2208 - DNA, 20 bp, Artificial Sequence
  synthetic circulating small noncoding RNA (sncRNA) 5' transfer RNA (tRNA) half
atcctgccgactacgtcatg

SEQ ID NO: 2209 - DNA, 27 bp, Artificial Sequence
  synthetic circulating small noncoding RNA (sncRNA) 5' transfer RNA (tRNA) half
cgtagtgtagtggttatcacgttcgcc

SEQ ID NO: 2210 - DNA, 24 bp, Artificial Sequence
  synthetic circulating small noncoding RNA (sncRNA) 5' transfer RNA (tRNA) half
accgactgagctatccgggctctt

SEQ ID NO: 2211 - DNA, 13 bp, Artificial Sequence
  synthetic circulating small noncoding RNA (sncRNA) 5' transfer RNA (tRNA) half
agtcaaatgctct

SEQ ID NO: 2212 - DNA, 17 bp, Artificial Sequence
  synthetic circulating small noncoding RNA (sncRNA) 5' transfer RNA (tRNA) half
cactcggccacgactac

SEQ ID NO: 2213 - DNA, 37 bp, Artificial Sequence
  synthetic circulating small noncoding RNA (sncRNA) 5' transfer RNA (tRNA) half
gccccgtgtgaggatcgaactcacgaccttcagatta

SEQ ID NO: 2214 - DNA, 20 bp, Artificial Sequence
  synthetic circulating small noncoding RNA (sncRNA) 5' transfer RNA (tRNA) half
cctgaccgggaatcgaaccc

SEQ ID NO: 2215 - DNA, 22 bp, Artificial Sequence
  synthetic circulating small noncoding RNA (sncRNA) 5' transfer RNA (tRNA) half
ctaaccactagaccaccaggga

SEQ ID NO: 2216 - DNA, 36 bp, Artificial Sequence
  synthetic circulating small noncoding RNA (sncRNA) 5' transfer RNA (tRNA) half
ctccccgtcggggaatcgaaccccggtctcccgcgt

SEQ ID NO: 2217 - DNA, 35 bp, Artificial Sequence
  synthetic circulating small noncoding RNA (sncRNA) 5' transfer RNA (tRNA) half
caggcggcccgggttcgactcccggtgtgggaaca

SEQ ID NO: 2218 - DNA, 37 bp, Artificial Sequence
  synthetic circulating small noncoding RNA (sncRNA) 5' transfer RNA (tRNA) half
tccgagaggtcccgggttcaaatcccggacgagcccc

SEQ ID NO: 2219 - DNA, 26 bp, Artificial Sequence
  synthetic circulating small noncoding RNA (sncRNA) 5' transfer RNA (tRNA) half
attcggcgctctcaccgccgcggccc

SEQ ID NO: 2220 - DNA, 32 bp, Artificial Sequence
  synthetic circulating small noncoding RNA (sncRNA) 5' transfer RNA (tRNA) half
tcccacaccgggagtcgaacccgggccgcctg

SEQ ID NO: 2221 - DNA, 15 bp, Artificial Sequence
  synthetic circulating small noncoding RNA (sncRNA) 5' transfer RNA (tRNA) half
acccgggcctcccgc

SEQ ID NO: 2222 - DNA, 13 bp, Artificial Sequence
  synthetic circulating small noncoding RNA (sncRNA) 5' transfer RNA (tRNA) half
ccggctagctcag

SEQ ID NO: 2223 - DNA, 37 bp, Artificial Sequence
  synthetic circulating small noncoding RNA (sncRNA) 5' transfer RNA (tRNA) half
gtagggggcacccggatttgaaccggggacctcttga

SEQ ID NO: 2224 - DNA, 19 bp, Artificial Sequence
  synthetic circulating small noncoding RNA (sncRNA) 5' transfer RNA (tRNA) half
accgctagaccatgtggga

SEQ ID NO: 2225 - DNA, 16 bp, Artificial Sequence
  synthetic circulating small noncoding RNA (sncRNA) 5' transfer RNA (tRNA) half
actagaccaccaggga

SEQ ID NO: 2226 - DNA, 14 bp, Artificial Sequence
  synthetic circulating small noncoding RNA (sncRNA) 5' transfer RNA (tRNA) half
gccttagaccgctc

SEQ ID NO: 2227 - DNA, 33 bp, Artificial Sequence
  synthetic circulating small noncoding RNA (sncRNA) 5' transfer RNA (tRNA) half
gtctcatgctctaccgactgagctagccgggcg

SEQ ID NO: 2228 - DNA, 35 bp, Artificial Sequence
  synthetic circulating small noncoding RNA (sncRNA) 5' transfer RNA (tRNA) half
cgggagaccggggttcgattccccgacggggagtc

SEQ ID NO: 2229 - DNA, 17 bp, Artificial Sequence
  synthetic circulating small noncoding RNA (sncRNA) 5' transfer RNA (tRNA) half
cgagaattctaccactg

SEQ ID NO: 2230 - DNA, 39 bp, Artificial Sequence
  synthetic circulating small noncoding RNA (sncRNA) 5' transfer RNA (tRNA) half
gtctgatgctctaccgactgagctatccgggctcttagc

SEQ ID NO: 2231 - DNA, 31 bp, Artificial Sequence
  synthetic circulating small noncoding RNA (sncRNA) 5' transfer RNA (tRNA) half
gaagattgcaggttcgagtcctgccgcggtc

SEQ ID NO: 2232 - DNA, 22 bp, Artificial Sequence
  synthetic circulating small noncoding RNA (sncRNA) 5' transfer RNA (tRNA) half
cgtcgagccagccaggagtcga

SEQ ID NO: 2233 - DNA, 13 bp, Artificial Sequence
  synthetic circulating small noncoding RNA (sncRNA) 5' transfer RNA (tRNA) half
acccgggcctccc

SEQ ID NO: 2234 - DNA, 36 bp, Artificial Sequence
  synthetic circulating small noncoding RNA (sncRNA) 5' transfer RNA (tRNA) half
tctcagggtcgtgggttcgagccccacgttgggcgc

SEQ ID NO: 2235 - DNA, 32 bp, Artificial Sequence
  synthetic circulating small noncoding RNA (sncRNA) 5' transfer RNA (tRNA) half
gacgaggtggccgagtggttaaggcgatggac

SEQ ID NO: 2236 - DNA, 18 bp, Artificial Sequence
  synthetic circulating small noncoding RNA (sncRNA) 5' transfer RNA (tRNA) half
agcgccgaatcctaacca

SEQ ID NO: 2237 - DNA, 19 bp, Artificial Sequence
  synthetic circulating small noncoding RNA (sncRNA) 5' transfer RNA (tRNA) half
ctgaatccagcgatccgag

SEQ ID NO: 2238 - DNA, 19 bp, Artificial Sequence
  synthetic circulating small noncoding RNA (sncRNA) 5' transfer RNA (tRNA) half
aaaccgggcggaaacagca

SEQ ID NO: 2239 - DNA, 17 bp, Artificial Sequence
  synthetic circulating small noncoding RNA (sncRNA) 5' transfer RNA (tRNA) half
aacccgggccgcggcgg

SEQ ID NO: 2240 - DNA, 27 bp, Artificial Sequence
  synthetic circulating small noncoding RNA (sncRNA) 5' transfer RNA (tRNA) half
agcgccgaatcctaaccactagaccac

SEQ ID NO: 2241 - DNA, 19 bp, Artificial Sequence
  synthetic circulating small noncoding RNA (sncRNA) 5' transfer RNA (tRNA) half
gaactcggatcgctggatt

SEQ ID NO: 2242 - DNA, 13 bp, Artificial Sequence
  synthetic circulating small noncoding RNA (sncRNA) 5' transfer RNA (tRNA) half
tcccgcgtgacag

SEQ ID NO: 2243 - DNA, 28 bp, Artificial Sequence
  synthetic circulating small noncoding RNA (sncRNA) 5' transfer RNA (tRNA) half
gcccggctagctcagtcggtagagcatg

SEQ ID NO: 2244 - DNA, 28 bp, Artificial Sequence
  synthetic circulating small noncoding RNA (sncRNA) 5' transfer RNA (tRNA) half
acatggtctagcggttaggattcctggt

SEQ ID NO: 2245 - DNA, 17 bp, Artificial Sequence
  synthetic circulating small noncoding RNA (sncRNA) 5' transfer RNA (tRNA) half
cgtggcaggcgagaatt

SEQ ID NO: 2246 - DNA, 19 bp, Artificial Sequence
  synthetic circulating small noncoding RNA (sncRNA) 5' transfer RNA (tRNA) half
ggagatgccggggatcgaa

SEQ ID NO: 2247 - DNA, 14 bp, Artificial Sequence
  synthetic circulating small noncoding RNA (sncRNA) 5' transfer RNA (tRNA) half
ggtagaattctcgc

SEQ ID NO: 2248 - DNA, 15 bp, Artificial Sequence
  synthetic circulating small noncoding RNA (sncRNA) 5' transfer RNA (tRNA) half
ctcggccacactacc

SEQ ID NO: 2249 - DNA, 36 bp, Artificial Sequence
  synthetic circulating small noncoding RNA (sncRNA) 5' transfer RNA (tRNA) half
gcttccctgaccgggaatcgaacccgggccgcggcg

SEQ ID NO: 2250 - DNA, 23 bp, Artificial Sequence
  synthetic circulating small noncoding RNA (sncRNA) 5' transfer RNA (tRNA) half
ttagaccgctcggccatcctgac

SEQ ID NO: 2251 - DNA, 13 bp, Artificial Sequence
  synthetic circulating small noncoding RNA (sncRNA) 5' transfer RNA (tRNA) half
agcgagaatcata

SEQ ID NO: 2252 - DNA, 15 bp, Artificial Sequence
  synthetic circulating small noncoding RNA (sncRNA) 5' transfer RNA (tRNA) half
gcccggctagctcag

SEQ ID NO: 2253 - DNA, 19 bp, Artificial Sequence
  synthetic circulating small noncoding RNA (sncRNA) 5' transfer RNA (tRNA) half
gttgtgtcagaagtgggat

SEQ ID NO: 2254 - DNA, 32 bp, Artificial Sequence
  synthetic circulating small noncoding RNA (sncRNA) 5' transfer RNA (tRNA) half
actccgccgggactcgaacccggaacctttga

SEQ ID NO: 2255 - DNA, 11 bp, Artificial Sequence
  synthetic circulating small noncoding RNA (sncRNA) 5' transfer RNA (tRNA) half
cggggaatcga

SEQ ID NO: 2256 - DNA, 20 bp, Artificial Sequence
  synthetic circulating small noncoding RNA (sncRNA) 5' transfer RNA (tRNA) half
tcgagccccagtggaaccac

SEQ ID NO: 2257 - DNA, 20 bp, Artificial Sequence
  synthetic circulating small noncoding RNA (sncRNA) 5' transfer RNA (tRNA) half
gtggttatcacgttcgcctc

SEQ ID NO: 2258 - DNA, 31 bp, Artificial Sequence
  synthetic circulating small noncoding RNA (sncRNA) 5' transfer RNA (tRNA) half
ctccctggtggtctagtggttaggattcggc

SEQ ID NO: 2259 - DNA, 28 bp, Artificial Sequence
  synthetic circulating small noncoding RNA (sncRNA) 5' transfer RNA (tRNA) half
gccgtgatcgtatagtggttagtactct

SEQ ID NO: 2260 - DNA, 39 bp, Artificial Sequence
  synthetic circulating small noncoding RNA (sncRNA) 5' transfer RNA (tRNA) half
ggattaagagtcccatgctctaccgactgagctagccgg

SEQ ID NO: 2261 - DNA, 19 bp, Artificial Sequence
  synthetic circulating small noncoding RNA (sncRNA) 5' transfer RNA (tRNA) half
ctctaccgactgagctatc

SEQ ID NO: 2262 - DNA, 36 bp, Artificial Sequence
  synthetic circulating small noncoding RNA (sncRNA) 5' transfer RNA (tRNA) half
tcgagccagccaggagtcgaacctagaatcttctga

SEQ ID NO: 2263 - DNA, 37 bp, Artificial Sequence
  synthetic circulating small noncoding RNA (sncRNA) 5' transfer RNA (tRNA) half
tgagggggcacccggatttgaaccggggacctcttga

SEQ ID NO: 2264 - DNA, 27 bp, Artificial Sequence
  synthetic circulating small noncoding RNA (sncRNA) 5' transfer RNA (tRNA) half
cgcagagtactaaccactatacgatca

SEQ ID NO: 2265 - DNA, 26 bp, Artificial Sequence
  synthetic circulating small noncoding RNA (sncRNA) 5' transfer RNA (tRNA) half
gtcggggaatcgaaccccggtctccc

SEQ ID NO: 2266 - DNA, 32 bp, Artificial Sequence
  synthetic circulating small noncoding RNA (sncRNA) 5' transfer RNA (tRNA) half
ccccgtcggggaatcgaaccccggtctcccgc

SEQ ID NO: 2267 - DNA, 24 bp, Artificial Sequence
  synthetic circulating small noncoding RNA (sncRNA) 5' transfer RNA (tRNA) half
atcgtatagtggttagtactctgc

SEQ ID NO: 2268 - DNA, 20 bp, Artificial Sequence
  synthetic circulating small noncoding RNA (sncRNA) 5' transfer RNA (tRNA) half
cagcggaagcgtgctgggcc

SEQ ID NO: 2269 - DNA, 30 bp, Artificial Sequence
  synthetic circulating small noncoding RNA (sncRNA) 5' transfer RNA (tRNA) half
accaggaatcctaaccgctagaccatgtgg

SEQ ID NO: 2270 - DNA, 37 bp, Artificial Sequence
  synthetic circulating small noncoding RNA (sncRNA) 5' transfer RNA (tRNA) half
agcgaccacgaagggactcgaacccccaatcttctga

SEQ ID NO: 2271 - DNA, 20 bp, Artificial Sequence
  synthetic circulating small noncoding RNA (sncRNA) 5' transfer RNA (tRNA) half
tggtagaattctcgcctgcc

SEQ ID NO: 2272 - DNA, 27 bp, Artificial Sequence
  synthetic circulating small noncoding RNA (sncRNA) 5' transfer RNA (tRNA) half
cattggtggttcagtggtagaattctc

SEQ ID NO: 2273 - DNA, 15 bp, Artificial Sequence
  synthetic circulating small noncoding RNA (sncRNA) 5' transfer RNA (tRNA) half
gtggcaggcgagaat

SEQ ID NO: 2274 - DNA, 30 bp, Artificial Sequence
  synthetic circulating small noncoding RNA (sncRNA) 5' transfer RNA (tRNA) half
accaaagcctaaccactagaccaccaggga

SEQ ID NO: 2275 - DNA, 35 bp, Artificial Sequence
  synthetic circulating small noncoding RNA (sncRNA) 5' transfer RNA (tRNA) half
cgtccctgggtgggctcgaaccaccaacctttcgg

SEQ ID NO: 2276 - DNA, 26 bp, Artificial Sequence
  synthetic circulating small noncoding RNA (sncRNA) 5' transfer RNA (tRNA) half
ggaatcctaaccgctagaccatgtgg

SEQ ID NO: 2277 - DNA, 36 bp, Artificial Sequence
  synthetic circulating small noncoding RNA (sncRNA) 5' transfer RNA (tRNA) half
tgcgagaggtcccgggttcaaatcccggacgagccc

SEQ ID NO: 2278 - DNA, 29 bp, Artificial Sequence
  synthetic circulating small noncoding RNA (sncRNA) 5' transfer RNA (tRNA) half
tagcgcccgaacagggacttgaaccctgg

SEQ ID NO: 2279 - DNA, 36 bp, Artificial Sequence
  synthetic circulating small noncoding RNA (sncRNA) 5' transfer RNA (tRNA) half
agtctcatgctctaccgactgagctagccgggcctt

SEQ ID NO: 2280 - DNA, 32 bp, Artificial Sequence
  synthetic circulating small noncoding RNA (sncRNA) 5' transfer RNA (tRNA) half
aggcgagcgtgatgaccactacactacggaaa

SEQ ID NO: 2281 - DNA, 13 bp, Artificial Sequence
  synthetic circulating small noncoding RNA (sncRNA) 5' transfer RNA (tRNA) half
gagtactaaccac

SEQ ID NO: 2282 - DNA, 28 bp, Artificial Sequence
  synthetic circulating small noncoding RNA (sncRNA) 5' transfer RNA (tRNA) half
aggcgaacgtgataaccactacactacg

SEQ ID NO: 2283 - DNA, 34 bp, Artificial Sequence
  synthetic circulating small noncoding RNA (sncRNA) 5' transfer RNA (tRNA) half
caatgcagagtactaaccactatacgatctcggc

SEQ ID NO: 2284 - DNA, 21 bp, Artificial Sequence
  synthetic circulating small noncoding RNA (sncRNA) 5' transfer RNA (tRNA) half
ctagtggttaggattcggcgc

SEQ ID NO: 2285 - DNA, 36 bp, Artificial Sequence
  synthetic circulating small noncoding RNA (sncRNA) 5' transfer RNA (tRNA) half
gtagaattctcgcctgccacgcgggaggcccgggtt

SEQ ID NO: 2286 - DNA, 24 bp, Artificial Sequence
  synthetic circulating small noncoding RNA (sncRNA) 5' transfer RNA (tRNA) half
gtaatggttagcactctggactct

SEQ ID NO: 2287 - DNA, 23 bp, Artificial Sequence
  synthetic circulating small noncoding RNA (sncRNA) 5' transfer RNA (tRNA) half
acccgggtcaactgcttggaagg

SEQ ID NO: 2288 - DNA, 37 bp, Artificial Sequence
  synthetic circulating small noncoding RNA (sncRNA) 5' transfer RNA (tRNA) half
gttgccccctctgaggttcgaactcaggaccttcaga

SEQ ID NO: 2289 - DNA, 34 bp, Artificial Sequence
  synthetic circulating small noncoding RNA (sncRNA) 5' transfer RNA (tRNA) half
ggaggcgagaattctaccattgaactaccaatgc

SEQ ID NO: 2290 - DNA, 33 bp, Artificial Sequence
  synthetic circulating small noncoding RNA (sncRNA) 5' transfer RNA (tRNA) half
cccataccgggagtcgaacccgggccgcctggg

SEQ ID NO: 2291 - DNA, 22 bp, Artificial Sequence
  synthetic circulating small noncoding RNA (sncRNA) 5' transfer RNA (tRNA) half
gtaatggttagcactctggact

SEQ ID NO: 2292 - DNA, 34 bp, Artificial Sequence
  synthetic circulating small noncoding RNA (sncRNA) 5' transfer RNA (tRNA) half
ccgaccacgaagggactcgaaccctcaatcttct

SEQ ID NO: 2293 - DNA, 15 bp, Artificial Sequence
  synthetic circulating small noncoding RNA (sncRNA) 5' transfer RNA (tRNA) half
ctagaccatgtggga

SEQ ID NO: 2294 - DNA, 14 bp, Artificial Sequence
  synthetic circulating small noncoding RNA (sncRNA) 5' transfer RNA (tRNA) half
cgaaaggtccccgg

SEQ ID NO: 2295 - DNA, 11 bp, Artificial Sequence
  synthetic circulating small noncoding RNA (sncRNA) 5' transfer RNA (tRNA) half
cgaaccgggga

SEQ ID NO: 2296 - DNA, 17 bp, Artificial Sequence
  synthetic circulating small noncoding RNA (sncRNA) 5' transfer RNA (tRNA) half
ggttagtactctgcgtt

SEQ ID NO: 2297 - DNA, 18 bp, Artificial Sequence
  synthetic circulating small noncoding RNA (sncRNA) 5' transfer RNA (tRNA) half
cccacaccgggagtcgaa

SEQ ID NO: 2298 - DNA, 12 bp, Artificial Sequence
  synthetic circulating small noncoding RNA (sncRNA) 5' transfer RNA (tRNA) half
agctataccccc

SEQ ID NO: 2299 - DNA, 38 bp, Artificial Sequence
  synthetic circulating small noncoding RNA (sncRNA) 5' transfer RNA (tRNA) half
tcagaagattgcaggttcgagtcctgccgcggtcgact

SEQ ID NO: 2300 - DNA, 21 bp, Artificial Sequence
  synthetic circulating small noncoding RNA (sncRNA) 5' transfer RNA (tRNA) half
tctagtggttaggattcggcg

SEQ ID NO: 2301 - DNA, 34 bp, Artificial Sequence
  synthetic circulating small noncoding RNA (sncRNA) 5' transfer RNA (tRNA) half
gcgaccacgaagggactcgaacccccaatcttct

SEQ ID NO: 2302 - DNA, 18 bp, Artificial Sequence
  synthetic circulating small noncoding RNA (sncRNA) 5' transfer RNA (tRNA) half
cattcttgcgacccgggt

SEQ ID NO: 2303 - DNA, 15 bp, Artificial Sequence
  synthetic circulating small noncoding RNA (sncRNA) 5' transfer RNA (tRNA) half
gacgaggtggccgag

SEQ ID NO: 2304 - DNA, 12 bp, Artificial Sequence
  synthetic circulating small noncoding RNA (sncRNA) 5' transfer RNA (tRNA) half
ccgagtcacggc

SEQ ID NO: 2305 - DNA, 20 bp, Artificial Sequence
  synthetic circulating small noncoding RNA (sncRNA) 5' transfer RNA (tRNA) half
caggaatcctaaccgctaga

SEQ ID NO: 2306 - DNA, 15 bp, Artificial Sequence
  synthetic circulating small noncoding RNA (sncRNA) 5' transfer RNA (tRNA) half
gtggttagtactctg

SEQ ID NO: 2307 - DNA, 29 bp, Artificial Sequence
  synthetic circulating small noncoding RNA (sncRNA) 5' transfer RNA (tRNA) half
ccaaatcctaaccactagaccaccaggga

SEQ ID NO: 2308 - DNA, 18 bp, Artificial Sequence
  synthetic circulating small noncoding RNA (sncRNA) 5' transfer RNA (tRNA) half
ccttcgatagctcagctg

SEQ ID NO: 2309 - DNA, 29 bp, Artificial Sequence
  synthetic circulating small noncoding RNA (sncRNA) 5' transfer RNA (tRNA) half
cacaccgggagtcgaacccgggccgcctg

SEQ ID NO: 2310 - DNA, 18 bp, Artificial Sequence
  synthetic circulating small noncoding RNA (sncRNA) 5' transfer RNA (tRNA) half
aactgtttccgcccggtt

SEQ ID NO: 2311 - DNA, 33 bp, Artificial Sequence
  synthetic circulating small noncoding RNA (sncRNA) 5' transfer RNA (tRNA) half
agtctcatgctctacccactgagctatctgggc

SEQ ID NO: 2312 - DNA, 35 bp, Artificial Sequence
  synthetic circulating small noncoding RNA (sncRNA) 5' transfer RNA (tRNA) half
ccaggcggcccgggttcgactcccggtgtgggaac

SEQ ID NO: 2313 - DNA, 35 bp, Artificial Sequence
  synthetic circulating small noncoding RNA (sncRNA) 5' transfer RNA (tRNA) half
tccccgtcggggaatcgaaccccggtctcccgcgt

SEQ ID NO: 2314 - DNA, 32 bp, Artificial Sequence
  synthetic circulating small noncoding RNA (sncRNA) 5' transfer RNA (tRNA) half
tcagaagattgcaggttcgagtcctgccgcgg

SEQ ID NO: 2315 - DNA, 17 bp, Artificial Sequence
  synthetic circulating small noncoding RNA (sncRNA) 5' transfer RNA (tRNA) half
agggctcgtccgggatt

SEQ ID NO: 2316 - DNA, 23 bp, Artificial Sequence
  synthetic circulating small noncoding RNA (sncRNA) 5' transfer RNA (tRNA) half
gacttgaaccctggaccctcaga

SEQ ID NO: 2317 - DNA, 31 bp, Artificial Sequence
  synthetic circulating small noncoding RNA (sncRNA) 5' transfer RNA (tRNA) half
cgcccaacgtggggctcgaacccacgaccct

SEQ ID NO: 2318 - DNA, 17 bp, Artificial Sequence
  synthetic circulating small noncoding RNA (sncRNA) 5' transfer RNA (tRNA) half
gtcggtagagcatgaga

SEQ ID NO: 2319 - DNA, 39 bp, Artificial Sequence
  synthetic circulating small noncoding RNA (sncRNA) 5' transfer RNA (tRNA) half
agattaagagtctcatgctctaccgactgagctagccgg

SEQ ID NO: 2320 - DNA, 20 bp, Artificial Sequence
  synthetic circulating small noncoding RNA (sncRNA) 5' transfer RNA (tRNA) half
aaccactatacgatcacggc

SEQ ID NO: 2321 - DNA, 23 bp, Artificial Sequence
  synthetic circulating small noncoding RNA (sncRNA) 5' transfer RNA (tRNA) half
gcgccgaatcctaaccactagac

SEQ ID NO: 2322 - DNA, 30 bp, Artificial Sequence
  synthetic circulating small noncoding RNA (sncRNA) 5' transfer RNA (tRNA) half
cacaccgggagtcgaacccgggccgcctgg

SEQ ID NO: 2323 - DNA, 14 bp, Artificial Sequence
  synthetic circulating small noncoding RNA (sncRNA) 5' transfer RNA (tRNA) half
ttcgattcccgggc

SEQ ID NO: 2324 - DNA, 35 bp, Artificial Sequence
  synthetic circulating small noncoding RNA (sncRNA) 5' transfer RNA (tRNA) half
agagtccagagtgctagccattacaccatggaacc

SEQ ID NO: 2325 - DNA, 21 bp, Artificial Sequence
  synthetic circulating small noncoding RNA (sncRNA) 5' transfer RNA (tRNA) half
tcagtggtagagcatttgact

SEQ ID NO: 2326 - DNA, 27 bp, Artificial Sequence
  synthetic circulating small noncoding RNA (sncRNA) 5' transfer RNA (tRNA) half
cctgaccgggaatcgaacccgggccgc

SEQ ID NO: 2327 - DNA, 36 bp, Artificial Sequence
  synthetic circulating small noncoding RNA (sncRNA) 5' transfer RNA (tRNA) half
gccccctctgaggttcgaactcaggaccttcagatt

SEQ ID NO: 2328 - DNA, 22 bp, Artificial Sequence
  synthetic circulating small noncoding RNA (sncRNA) 5' transfer RNA (tRNA) half
tgaatccagcgatccgagttca

SEQ ID NO: 2329 - DNA, 32 bp, Artificial Sequence
  synthetic circulating small noncoding RNA (sncRNA) 5' transfer RNA (tRNA) half
gtccctgggtgggctcgaaccaccaacctttc

SEQ ID NO: 2330 - DNA, 21 bp, Artificial Sequence
  synthetic circulating small noncoding RNA (sncRNA) 5' transfer RNA (tRNA) half
aaccgggcggaaacattactt

SEQ ID NO: 2331 - DNA, 31 bp, Artificial Sequence
  synthetic circulating small noncoding RNA (sncRNA) 5' transfer RNA (tRNA) half
gaggtcccaccgagatttgaactcggatcgc

SEQ ID NO: 2332 - DNA, 17 bp, Artificial Sequence
  synthetic circulating small noncoding RNA (sncRNA) 5' transfer RNA (tRNA) half
gagcgccgaatcctaac

SEQ ID NO: 2333 - DNA, 16 bp, Artificial Sequence
  synthetic circulating small noncoding RNA (sncRNA) 5' transfer RNA (tRNA) half
tagcggttaggattcc

SEQ ID NO: 2334 - DNA, 31 bp, Artificial Sequence
  synthetic circulating small noncoding RNA (sncRNA) 5' transfer RNA (tRNA) half
gcattggccgggaatcgaacccgggcctccc

SEQ ID NO: 2335 - DNA, 26 bp, Artificial Sequence
  synthetic circulating small noncoding RNA (sncRNA) 5' transfer RNA (tRNA) half
ccggctagctcagtcggtagagcatg

SEQ ID NO: 2336 - DNA, 34 bp, Artificial Sequence
  synthetic circulating small noncoding RNA (sncRNA) 5' transfer RNA (tRNA) half
aaccacgaagggattcgaaccctcaatcttctga

SEQ ID NO: 2337 - DNA, 29 bp, Artificial Sequence
  synthetic circulating small noncoding RNA (sncRNA) 5' transfer RNA (tRNA) half
gctggtgtagtggtatcatgcaagattcc

SEQ ID NO: 2338 - DNA, 33 bp, Artificial Sequence
  synthetic circulating small noncoding RNA (sncRNA) 5' transfer RNA (tRNA) half
gttcccacaccgggagtcgaacccgggccgcct

SEQ ID NO: 2339 - DNA, 24 bp, Artificial Sequence
  synthetic circulating small noncoding RNA (sncRNA) 5' transfer RNA (tRNA) half
tgttcccacaccgggagtcgaacc

SEQ ID NO: 2340 - DNA, 31 bp, Artificial Sequence
  synthetic circulating small noncoding RNA (sncRNA) 5' transfer RNA (tRNA) half
cgtgactcggattcgaaccgaggttgctgcg

SEQ ID NO: 2341 - DNA, 39 bp, Artificial Sequence
  synthetic circulating small noncoding RNA (sncRNA) 5' transfer RNA (tRNA) half
ggtgagagcgccgaatcctaaccactagaccaccaggga

SEQ ID NO: 2342 - DNA, 20 bp, Artificial Sequence
  synthetic circulating small noncoding RNA (sncRNA) 5' transfer RNA (tRNA) half
gtgtttccgcccggtttcga

SEQ ID NO: 2343 - DNA, 25 bp, Artificial Sequence
  synthetic circulating small noncoding RNA (sncRNA) 5' transfer RNA (tRNA) half
tagtgtagtggttatcacgttcgcc

SEQ ID NO: 2344 - DNA, 13 bp, Artificial Sequence
  synthetic circulating small noncoding RNA (sncRNA) 5' transfer RNA (tRNA) half
ggccggttagctc

SEQ ID NO: 2345 - DNA, 37 bp, Artificial Sequence
  synthetic circulating small noncoding RNA (sncRNA) 5' transfer RNA (tRNA) half
tgtggcccgtacggggatcgaacccgcgaccttggcg

SEQ ID NO: 2346 - DNA, 26 bp, Artificial Sequence
  synthetic circulating small noncoding RNA (sncRNA) 5' transfer RNA (tRNA) half
agagtccagagtgctaaccattacac

SEQ ID NO: 2347 - DNA, 32 bp, Artificial Sequence
  synthetic circulating small noncoding RNA (sncRNA) 5' transfer RNA (tRNA) half
cgccgtgatcgtatagtggttagtactctgcg

SEQ ID NO: 2348 - DNA, 16 bp, Artificial Sequence
  synthetic circulating small noncoding RNA (sncRNA) 5' transfer RNA (tRNA) half
agtagtcgtggccgag

SEQ ID NO: 2349 - DNA, 29 bp, Artificial Sequence
  synthetic circulating small noncoding RNA (sncRNA) 5' transfer RNA (tRNA) half
cgagaattctaccattgaactaccaatgc

SEQ ID NO: 2350 - DNA, 28 bp, Artificial Sequence
  synthetic circulating small noncoding RNA (sncRNA) 5' transfer RNA (tRNA) half
cggctagctcagtcggtagagcatgaga

SEQ ID NO: 2351 - DNA, 21 bp, Artificial Sequence
  synthetic circulating small noncoding RNA (sncRNA) 5' transfer RNA (tRNA) half
cccattcttgcgacccgggtt

SEQ ID NO: 2352 - DNA, 36 bp, Artificial Sequence
  synthetic circulating small noncoding RNA (sncRNA) 5' transfer RNA (tRNA) half
gtggagatgccggggatcgaacccggggcctcatac

SEQ ID NO: 2353 - DNA, 33 bp, Artificial Sequence
  synthetic circulating small noncoding RNA (sncRNA) 5' transfer RNA (tRNA) half
agccagccaggagtcgaacctagaatcttctga

SEQ ID NO: 2354 - DNA, 25 bp, Artificial Sequence
  synthetic circulating small noncoding RNA (sncRNA) 5' transfer RNA (tRNA) half
agtactaaccactatacgatcacgg

SEQ ID NO: 2355 - DNA, 23 bp, Artificial Sequence
  synthetic circulating small noncoding RNA (sncRNA) 5' transfer RNA (tRNA) half
gcctccccgtcggggaatcgaac

SEQ ID NO: 2356 - DNA, 12 bp, Artificial Sequence
  synthetic circulating small noncoding RNA (sncRNA) 5' transfer RNA (tRNA) half
aggtcccgggtt

SEQ ID NO: 2357 - DNA, 16 bp, Artificial Sequence
  synthetic circulating small noncoding RNA (sncRNA) 5' transfer RNA (tRNA) half
ttcccggtcagggaag

SEQ ID NO: 2358 - DNA, 30 bp, Artificial Sequence
  synthetic circulating small noncoding RNA (sncRNA) 5' transfer RNA (tRNA) half
cgaccacgaagggactcgaacccccaatct

SEQ ID NO: 2359 - DNA, 21 bp, Artificial Sequence
  synthetic circulating small noncoding RNA (sncRNA) 5' transfer RNA (tRNA) half
gggctcgtccgggatttgaac

SEQ ID NO: 2360 - DNA, 25 bp, Artificial Sequence
  synthetic circulating small noncoding RNA (sncRNA) 5' transfer RNA (tRNA) half
tgttcccataccgggagtcgaaccc

SEQ ID NO: 2361 - DNA, 17 bp, Artificial Sequence
  synthetic circulating small noncoding RNA (sncRNA) 5' transfer RNA (tRNA) half
atcctgccgactacgtc

SEQ ID NO: 2362 - DNA, 27 bp, Artificial Sequence
  synthetic circulating small noncoding RNA (sncRNA) 5' transfer RNA (tRNA) half
tcatgctctaccgactgagctagccgg

SEQ ID NO: 2363 - DNA, 19 bp, Artificial Sequence
  synthetic circulating small noncoding RNA (sncRNA) 5' transfer RNA (tRNA) half
tcaaatcccggacgagccc

SEQ ID NO: 2364 - DNA, 24 bp, Artificial Sequence
  synthetic circulating small noncoding RNA (sncRNA) 5' transfer RNA (tRNA) half
agtcccatgctctaccgactgagc

SEQ ID NO: 2365 - DNA, 20 bp, Artificial Sequence
  synthetic circulating small noncoding RNA (sncRNA) 5' transfer RNA (tRNA) half
gagatgccggggatcgaacc

SEQ ID NO: 2366 - DNA, 16 bp, Artificial Sequence
  synthetic circulating small noncoding RNA (sncRNA) 5' transfer RNA (tRNA) half
aattctcgcctgccac

SEQ ID NO: 2367 - DNA, 36 bp, Artificial Sequence
  synthetic circulating small noncoding RNA (sncRNA) 5' transfer RNA (tRNA) half
gacaggcggggatactcaccactatactaacgagga

SEQ ID NO: 2368 - DNA, 26 bp, Artificial Sequence
  synthetic circulating small noncoding RNA (sncRNA) 5' transfer RNA (tRNA) half
tagtgtagtggttatcacgttcgcct

SEQ ID NO: 2369 - DNA, 14 bp, Artificial Sequence
  synthetic circulating small noncoding RNA (sncRNA) 5' transfer RNA (tRNA) half
gggcctcccgcgtg

SEQ ID NO: 2370 - DNA, 13 bp, Artificial Sequence
  synthetic circulating small noncoding RNA (sncRNA) 5' transfer RNA (tRNA) half
tggccgggaatcg

SEQ ID NO: 2371 - DNA, 37 bp, Artificial Sequence
  synthetic circulating small noncoding RNA (sncRNA) 5' transfer RNA (tRNA) half
tttccctgaccgggaatcgaacccgggccgcggcggt

SEQ ID NO: 2372 - DNA, 19 bp, Artificial Sequence
  synthetic circulating small noncoding RNA (sncRNA) 5' transfer RNA (tRNA) half
accgctagaccatatggga

SEQ ID NO: 2373 - DNA, 13 bp, Artificial Sequence
  synthetic circulating small noncoding RNA (sncRNA) 5' transfer RNA (tRNA) half
cgactccgccggg

SEQ ID NO: 2374 - DNA, 34 bp, Artificial Sequence
  synthetic circulating small noncoding RNA (sncRNA) 5' transfer RNA (tRNA) half
cgactccgccgggactcgaacccggaacctttga

SEQ ID NO: 2375 - DNA, 24 bp, Artificial Sequence
  synthetic circulating small noncoding RNA (sncRNA) 5' transfer RNA (tRNA) half
gggttcgattcccggtcagggaag

SEQ ID NO: 2376 - DNA, 21 bp, Artificial Sequence
  synthetic circulating small noncoding RNA (sncRNA) 5' transfer RNA (tRNA) half
ctaggggtatgattctcgctt

SEQ ID NO: 2377 - DNA, 17 bp, Artificial Sequence
  synthetic circulating small noncoding RNA (sncRNA) 5' transfer RNA (tRNA) half
cgctagaccatgtggga

SEQ ID NO: 2378 - DNA, 36 bp, Artificial Sequence
  synthetic circulating small noncoding RNA (sncRNA) 5' transfer RNA (tRNA) half
tcccatatggtctagcggttaggattcctggttttc

SEQ ID NO: 2379 - DNA, 11 bp, Artificial Sequence
  synthetic circulating small noncoding RNA (sncRNA) 5' transfer RNA (tRNA) half
gggctcgtccg

SEQ ID NO: 2380 - DNA, 21 bp, Artificial Sequence
  synthetic circulating small noncoding RNA (sncRNA) 5' transfer RNA (tRNA) half
gtatagtggttagtactctgc

SEQ ID NO: 2381 - DNA, 19 bp, Artificial Sequence
  synthetic circulating small noncoding RNA (sncRNA) 5' transfer RNA (tRNA) half
atcctgccgactacgtcat

SEQ ID NO: 2382 - DNA, 14 bp, Artificial Sequence
  synthetic circulating small noncoding RNA (sncRNA) 5' transfer RNA (tRNA) half
tggccgggaatcga

SEQ ID NO: 2383 - DNA, 18 bp, Artificial Sequence
  synthetic circulating small noncoding RNA (sncRNA) 5' transfer RNA (tRNA) half
gtggtatcatgcaagatt

SEQ ID NO: 2384 - DNA, 16 bp, Artificial Sequence
  synthetic circulating small noncoding RNA (sncRNA) 5' transfer RNA (tRNA) half
tgttcccacaccggga

SEQ ID NO: 2385 - DNA, 33 bp, Artificial Sequence
  synthetic circulating small noncoding RNA (sncRNA) 5' transfer RNA (tRNA) half
gaaggtcctgggttcgagccccagtggaaccac

SEQ ID NO: 2386 - DNA, 31 bp, Artificial Sequence
  synthetic circulating small noncoding RNA (sncRNA) 5' transfer RNA (tRNA) half
ccataccgggagtcgaacccgggccgcctgg

SEQ ID NO: 2387 - DNA, 41 bp, Artificial Sequence
  synthetic circulating small noncoding RNA (sncRNA) 5' transfer RNA (tRNA) half
acccgggccgcggcggtgagagcgccgaatcctaaccacta

SEQ ID NO: 2388 - DNA, 23 bp, Artificial Sequence
  synthetic circulating small noncoding RNA (sncRNA) 5' transfer RNA (tRNA) half
gccgtgactcggattcgaaccga

SEQ ID NO: 2389 - DNA, 23 bp, Artificial Sequence
  synthetic circulating small noncoding RNA (sncRNA) 5' transfer RNA (tRNA) half
ttcccataccgggagtcgaaccc

SEQ ID NO: 2390 - DNA, 15 bp, Artificial Sequence
  synthetic circulating small noncoding RNA (sncRNA) 5' transfer RNA (tRNA) half
tggttaggattcggc

SEQ ID NO: 2391 - DNA, 23 bp, Artificial Sequence
  synthetic circulating small noncoding RNA (sncRNA) 5' transfer RNA (tRNA) half
gccgaatcctaaccactagacca

SEQ ID NO: 2392 - DNA, 22 bp, Artificial Sequence
  synthetic circulating small noncoding RNA (sncRNA) 5' transfer RNA (tRNA) half
gtatagtggttagtactctgcg

SEQ ID NO: 2393 - DNA, 16 bp, Artificial Sequence
  synthetic circulating small noncoding RNA (sncRNA) 5' transfer RNA (tRNA) half
tcccacatggtctagc

SEQ ID NO: 2394 - DNA, 15 bp, Artificial Sequence
  synthetic circulating small noncoding RNA (sncRNA) 5' transfer RNA (tRNA) half
atcctgccgactacg

SEQ ID NO: 2395 - DNA, 33 bp, Artificial Sequence
  synthetic circulating small noncoding RNA (sncRNA) 5' transfer RNA (tRNA) half
agtctaacgctctcccaactgagctatttcggc

SEQ ID NO: 2396 - DNA, 31 bp, Artificial Sequence
  synthetic circulating small noncoding RNA (sncRNA) 5' transfer RNA (tRNA) half
gcccagcatgcttccgctgcgccactctgct

SEQ ID NO: 2397 - DNA, 19 bp, Artificial Sequence
  synthetic circulating small noncoding RNA (sncRNA) 5' transfer RNA (tRNA) half
gttcccacaccgggagtcg

SEQ ID NO: 2398 - DNA, 35 bp, Artificial Sequence
  synthetic circulating small noncoding RNA (sncRNA) 5' transfer RNA (tRNA) half
tctccccgtcggggaatcgaaccccggtctcccgc

SEQ ID NO: 2399 - DNA, 19 bp, Artificial Sequence
  synthetic circulating small noncoding RNA (sncRNA) 5' transfer RNA (tRNA) half
gggcccagcacgcttccgc

SEQ ID NO: 2400 - DNA, 34 bp, Artificial Sequence
  synthetic circulating small noncoding RNA (sncRNA) 5' transfer RNA (tRNA) half
gcagtcaaatgctctaccactgagctataccccc

SEQ ID NO: 2401 - DNA, 14 bp, Artificial Sequence
  synthetic circulating small noncoding RNA (sncRNA) 5' transfer RNA (tRNA) half
gccttaaccactcg

SEQ ID NO: 2402 - DNA, 26 bp, Artificial Sequence
  synthetic circulating small noncoding RNA (sncRNA) 5' transfer RNA (tRNA) half
gggttcgattcccggtcagggaagca

SEQ ID NO: 2403 - DNA, 30 bp, Artificial Sequence
  synthetic circulating small noncoding RNA (sncRNA) 5' transfer RNA (tRNA) half
gttcccacaccgggagtcgaacccgggccg

SEQ ID NO: 2404 - DNA, 31 bp, Artificial Sequence
  synthetic circulating small noncoding RNA (sncRNA) 5' transfer RNA (tRNA) half
gtcaaatgctctacccctgagctataccacc

SEQ ID NO: 2405 - DNA, 17 bp, Artificial Sequence
  synthetic circulating small noncoding RNA (sncRNA) 5' transfer RNA (tRNA) half
tggttaggattcggcgc

SEQ ID NO: 2406 - DNA, 11 bp, Artificial Sequence
  synthetic circulating small noncoding RNA (sncRNA) 5' transfer RNA (tRNA) half
ctccccgtcgg

SEQ ID NO: 2407 - DNA, 33 bp, Artificial Sequence
  synthetic circulating small noncoding RNA (sncRNA) 5' transfer RNA (tRNA) half
ctccctggtggtctagtggttaggattcggcgc

SEQ ID NO: 2408 - DNA, 14 bp, Artificial Sequence
  synthetic circulating small noncoding RNA (sncRNA) 5' transfer RNA (tRNA) half
gggggcacccggat

SEQ ID NO: 2409 - DNA, 16 bp, Artificial Sequence
  synthetic circulating small noncoding RNA (sncRNA) 5' transfer RNA (tRNA) half
tttccctgaccgggaa

SEQ ID NO: 2410 - DNA, 23 bp, Artificial Sequence
  synthetic circulating small noncoding RNA (sncRNA) 5' transfer RNA (tRNA) half
acgggccaaagctgaagcgtttt

SEQ ID NO: 2411 - DNA, 22 bp, Artificial Sequence
  synthetic circulating small noncoding RNA (sncRNA) 5' transfer RNA (tRNA) half
tctagtggtatgattctcagtt

SEQ ID NO: 2412 - DNA, 34 bp, Artificial Sequence
  synthetic circulating small noncoding RNA (sncRNA) 5' transfer RNA (tRNA) half
gactctggtgggattcgaacccacaacctttgaa

SEQ ID NO: 2413 - DNA, 25 bp, Artificial Sequence
  synthetic circulating small noncoding RNA (sncRNA) 5' transfer RNA (tRNA) half
gtagtgtagtggttatcacgttcgc

SEQ ID NO: 2414 - DNA, 31 bp, Artificial Sequence
  synthetic circulating small noncoding RNA (sncRNA) 5' transfer RNA (tRNA) half
gggggtgtagctcagtggtagagcgcatgct

SEQ ID NO: 2415 - DNA, 20 bp, Artificial Sequence
  synthetic circulating small noncoding RNA (sncRNA) 5' transfer RNA (tRNA) half
ttgaaccctggaccctcaga

SEQ ID NO: 2416 - DNA, 35 bp, Artificial Sequence
  synthetic circulating small noncoding RNA (sncRNA) 5' transfer RNA (tRNA) half
tatgaccccgacgtgattcgaacacgcagccttct

SEQ ID NO: 2417 - DNA, 32 bp, Artificial Sequence
  synthetic circulating small noncoding RNA (sncRNA) 5' transfer RNA (tRNA) half
ctcggatcgctggattcagagtccagagtgct

SEQ ID NO: 2418 - DNA, 35 bp, Artificial Sequence
  synthetic circulating small noncoding RNA (sncRNA) 5' transfer RNA (tRNA) half
acaacgcagagtactaaccactatacgatcacggc

SEQ ID NO: 2419 - DNA, 36 bp, Artificial Sequence
  synthetic circulating small noncoding RNA (sncRNA) 5' transfer RNA (tRNA) half
gacaggcggggatactaaccactatactaacgagga

SEQ ID NO: 2420 - DNA, 14 bp, Artificial Sequence
  synthetic circulating small noncoding RNA (sncRNA) 5' transfer RNA (tRNA) half
gttcgattcccggc

SEQ ID NO: 2421 - DNA, 22 bp, Artificial Sequence
  synthetic circulating small noncoding RNA (sncRNA) 5' transfer RNA (tRNA) half
gggttcgactcccggtatggga

SEQ ID NO: 2422 - DNA, 21 bp, Artificial Sequence
  synthetic circulating small noncoding RNA (sncRNA) 5' transfer RNA (tRNA) half
aggcgaacgtgataaccacta

SEQ ID NO: 2423 - DNA, 35 bp, Artificial Sequence
  synthetic circulating small noncoding RNA (sncRNA) 5' transfer RNA (tRNA) half
gaccccgacgtgattcgaacacgcagccttctgat

SEQ ID NO: 2424 - DNA, 15 bp, Artificial Sequence
  synthetic circulating small noncoding RNA (sncRNA) 5' transfer RNA (tRNA) half
cgaaaggtccccggt

SEQ ID NO: 2425 - DNA, 22 bp, Artificial Sequence
  synthetic circulating small noncoding RNA (sncRNA) 5' transfer RNA (tRNA) half
gctggtgtagtggtatcatgca

SEQ ID NO: 2426 - DNA, 15 bp, Artificial Sequence
  synthetic circulating small noncoding RNA (sncRNA) 5' transfer RNA (tRNA) half
ggtagagcatgagac

SEQ ID NO: 2427 - DNA, 25 bp, Artificial Sequence
  synthetic circulating small noncoding RNA (sncRNA) 5' transfer RNA (tRNA) half
gggccgcggcggtgagagcgccgaa

SEQ ID NO: 2428 - DNA, 33 bp, Artificial Sequence
  synthetic circulating small noncoding RNA (sncRNA) 5' transfer RNA (tRNA) half
aaaccaggaatcctaaccgctagaccatgtggg

SEQ ID NO: 2429 - DNA, 32 bp, Artificial Sequence
  synthetic circulating small noncoding RNA (sncRNA) 5' transfer RNA (tRNA) half
ccgtgatcgtatagtggttagtactctgcgtt

SEQ ID NO: 2430 - DNA, 36 bp, Artificial Sequence
  synthetic circulating small noncoding RNA (sncRNA) 5' transfer RNA (tRNA) half
ccagggattgtgggttcgagtcccatctggggtggt

SEQ ID NO: 2431 - DNA, 23 bp, Artificial Sequence
  synthetic circulating small noncoding RNA (sncRNA) 5' transfer RNA (tRNA) half
ggtggagatgccggggatcgaac

SEQ ID NO: 2432 - DNA, 18 bp, Artificial Sequence
  synthetic circulating small noncoding RNA (sncRNA) 5' transfer RNA (tRNA) half
gcgccgctggtgtagtgg

SEQ ID NO: 2433 - DNA, 21 bp, Artificial Sequence
  synthetic circulating small noncoding RNA (sncRNA) 5' transfer RNA (tRNA) half
ggtggagatgccggggatcga

SEQ ID NO: 2434 - DNA, 23 bp, Artificial Sequence
  synthetic circulating small noncoding RNA (sncRNA) 5' transfer RNA (tRNA) half
ctctaccactgagctacatcccc

SEQ ID NO: 2435 - DNA, 18 bp, Artificial Sequence
  synthetic circulating small noncoding RNA (sncRNA) 5' transfer RNA (tRNA) half
ggttagtactctgcgttg

SEQ ID NO: 2436 - DNA, 18 bp, Artificial Sequence
  synthetic circulating small noncoding RNA (sncRNA) 5' transfer RNA (tRNA) half
ccaaagcgagaatcatac

SEQ ID NO: 2437 - DNA, 14 bp, Artificial Sequence
  synthetic circulating small noncoding RNA (sncRNA) 5' transfer RNA (tRNA) half
gaccgggaatcgaa

SEQ ID NO: 2438 - DNA, 19 bp, Artificial Sequence
  synthetic circulating small noncoding RNA (sncRNA) 5' transfer RNA (tRNA) half
tgtttccgcccggtttcga

SEQ ID NO: 2439 - DNA, 19 bp, Artificial Sequence
  synthetic circulating small noncoding RNA (sncRNA) 5' transfer RNA (tRNA) half
accgctcggccacactacc

SEQ ID NO: 2440 - DNA, 21 bp, Artificial Sequence
  synthetic circulating small noncoding RNA (sncRNA) 5' transfer RNA (tRNA) half
ctcggatcgctggattcaaag

SEQ ID NO: 2441 - DNA, 15 bp, Artificial Sequence
  synthetic circulating small noncoding RNA (sncRNA) 5' transfer RNA (tRNA) half
agtcggtagagcatc

SEQ ID NO: 2442 - DNA, 17 bp, Artificial Sequence
  synthetic circulating small noncoding RNA (sncRNA) 5' transfer RNA (tRNA) half
ggagggggcacccggat

SEQ ID NO: 2443 - DNA, 26 bp, Artificial Sequence
  synthetic circulating small noncoding RNA (sncRNA) 5' transfer RNA (tRNA) half
gggggtatagctcagtggtagagcat

SEQ ID NO: 2444 - DNA, 35 bp, Artificial Sequence
  synthetic circulating small noncoding RNA (sncRNA) 5' transfer RNA (tRNA) half
agcctccctggtggtctagtggttaggattcggcg

SEQ ID NO: 2445 - DNA, 27 bp, Artificial Sequence
  synthetic circulating small noncoding RNA (sncRNA) 5' transfer RNA (tRNA) half
tgaccgggaatcgaacccgggccgcgg

SEQ ID NO: 2446 - DNA, 32 bp, Artificial Sequence
  synthetic circulating small noncoding RNA (sncRNA) 5' transfer RNA (tRNA) half
cgcagcaacctcggttcgaatccgagtcacgg

SEQ ID NO: 2447 - DNA, 33 bp, Artificial Sequence
  synthetic circulating small noncoding RNA (sncRNA) 5' transfer RNA (tRNA) half
gcaccgctgggattcgaacccaggatctcctgt

SEQ ID NO: 2448 - DNA, 34 bp, Artificial Sequence
  synthetic circulating small noncoding RNA (sncRNA) 5' transfer RNA (tRNA) half
ggccccagcgagatttgaactcgcgacccctggt

SEQ ID NO: 2449 - DNA, 32 bp, Artificial Sequence
  synthetic circulating small noncoding RNA (sncRNA) 5' transfer RNA (tRNA) half
gaccccgacgtgatttgaacacgcaaccttct

SEQ ID NO: 2450 - DNA, 12 bp, Artificial Sequence
  synthetic circulating small noncoding RNA (sncRNA) 5' transfer RNA (tRNA) half
gaccccgacgtg

SEQ ID NO: 2451 - DNA, 28 bp, Artificial Sequence
  synthetic circulating small noncoding RNA (sncRNA) 5' transfer RNA (tRNA) half
caccgggagtcgaacccgggccgcctgg

SEQ ID NO: 2452 - DNA, 35 bp, Artificial Sequence
  synthetic circulating small noncoding RNA (sncRNA) 5' transfer RNA (tRNA) half
cgagccagccaggagtcgaacctggaatcttctga

SEQ ID NO: 2453 - DNA, 15 bp, Artificial Sequence
  synthetic circulating small noncoding RNA (sncRNA) 5' transfer RNA (tRNA) half
gccgggaatcgaacc

SEQ ID NO: 2454 - DNA, 16 bp, Artificial Sequence
  synthetic circulating small noncoding RNA (sncRNA) 5' transfer RNA (tRNA) half
tccccggcacctccac

SEQ ID NO: 2455 - DNA, 35 bp, Artificial Sequence
  synthetic circulating small noncoding RNA (sncRNA) 5' transfer RNA (tRNA) half
gggtttccgtagtgtagtggttatcacgctcgcct

SEQ ID NO: 2456 - DNA, 19 bp, Artificial Sequence
  synthetic circulating small noncoding RNA (sncRNA) 5' transfer RNA (tRNA) half
tagcagaggatggtttcga

SEQ ID NO: 2457 - DNA, 19 bp, Artificial Sequence
  synthetic circulating small noncoding RNA (sncRNA) 5' transfer RNA (tRNA) half
cccataccgggagtcgaac

SEQ ID NO: 2458 - DNA, 31 bp, Artificial Sequence
  synthetic circulating small noncoding RNA (sncRNA) 5' transfer RNA (tRNA) half
ccggatagctcagtcggtagagcatcagact

SEQ ID NO: 2459 - DNA, 32 bp, Artificial Sequence
  synthetic circulating small noncoding RNA (sncRNA) 5' transfer RNA (tRNA) half
caacgcagagtactaaccactatacgatcacg

SEQ ID NO: 2460 - DNA, 32 bp, Artificial Sequence
  synthetic circulating small noncoding RNA (sncRNA) 5' transfer RNA (tRNA) half
gcgagaattctaccactgaaccaccaatgcag

SEQ ID NO: 2461 - DNA, 32 bp, Artificial Sequence
  synthetic circulating small noncoding RNA (sncRNA) 5' transfer RNA (tRNA) half
aaagtctgatgctctaccgactgagctatccg

SEQ ID NO: 2462 - DNA, 11 bp, Artificial Sequence
  synthetic circulating small noncoding RNA (sncRNA) 5' transfer RNA (tRNA) half
aggtcccaccg

SEQ ID NO: 2463 - DNA, 34 bp, Artificial Sequence
  synthetic circulating small noncoding RNA (sncRNA) 5' transfer RNA (tRNA) half
tcctcgttagtatagtggtgagtatccccgcctg

SEQ ID NO: 2464 - DNA, 33 bp, Artificial Sequence
  synthetic circulating small noncoding RNA (sncRNA) 5' transfer RNA (tRNA) half
ttgcgacccgggttcgattcccgggcggcgcat

SEQ ID NO: 2465 - DNA, 16 bp, Artificial Sequence
  synthetic circulating small noncoding RNA (sncRNA) 5' transfer RNA (tRNA) half
gcgggaggcccgggtt

SEQ ID NO: 2466 - DNA, 20 bp, Artificial Sequence
  synthetic circulating small noncoding RNA (sncRNA) 5' transfer RNA (tRNA) half
cagtggtagagcatttgact

SEQ ID NO: 2467 - DNA, 29 bp, Artificial Sequence
  synthetic circulating small noncoding RNA (sncRNA) 5' transfer RNA (tRNA) half
accaggaatcctaaccgctagaccatgtg

SEQ ID NO: 2468 - DNA, 14 bp, Artificial Sequence
  synthetic circulating small noncoding RNA (sncRNA) 5' transfer RNA (tRNA) half
ccgagcggtctaag

SEQ ID NO: 2469 - DNA, 20 bp, Artificial Sequence
  synthetic circulating small noncoding RNA (sncRNA) 5' transfer RNA (tRNA) half
gggagtcgaacccgggccgc

SEQ ID NO: 2470 - DNA, 13 bp, Artificial Sequence
  synthetic circulating small noncoding RNA (sncRNA) 5' transfer RNA (tRNA) half
ggttaacagccga

SEQ ID NO: 2471 - DNA, 25 bp, Artificial Sequence
  synthetic circulating small noncoding RNA (sncRNA) 5' transfer RNA (tRNA) half
gggttcgactcccggtgtgggaaac

SEQ ID NO: 2472 - DNA, 14 bp, Artificial Sequence
  synthetic circulating small noncoding RNA (sncRNA) 5' transfer RNA (tRNA) half
ggctcgtccgggat

SEQ ID NO: 2473 - DNA, 16 bp, Artificial Sequence
  synthetic circulating small noncoding RNA (sncRNA) 5' transfer RNA (tRNA) half
gttcccacaccgggag

SEQ ID NO: 2474 - DNA, 24 bp, Artificial Sequence
  synthetic circulating small noncoding RNA (sncRNA) 5' transfer RNA (tRNA) half
ccgggttcgattcccgggcggcgc

SEQ ID NO: 2475 - DNA, 11 bp, Artificial Sequence
  synthetic circulating small noncoding RNA (sncRNA) 5' transfer RNA (tRNA) half
gcggcccgggt

SEQ ID NO: 2476 - DNA, 20 bp, Artificial Sequence
  synthetic circulating small noncoding RNA (sncRNA) 5' transfer RNA (tRNA) half
gttcccataccgggagtcga

SEQ ID NO: 2477 - DNA, 18 bp, Artificial Sequence
  synthetic circulating small noncoding RNA (sncRNA) 5' transfer RNA (tRNA) half
cagagtgctaaccattac

SEQ ID NO: 2478 - DNA, 27 bp, Artificial Sequence
  synthetic circulating small noncoding RNA (sncRNA) 5' transfer RNA (tRNA) half
atgctctaccgactgagctagccgggc

SEQ ID NO: 2479 - DNA, 28 bp, Artificial Sequence
  synthetic circulating small noncoding RNA (sncRNA) 5' transfer RNA (tRNA) half
gcgccgaatcctaaccactagaccacca

SEQ ID NO: 2480 - DNA, 28 bp, Artificial Sequence
  synthetic circulating small noncoding RNA (sncRNA) 5' transfer RNA (tRNA) half
cccacaccgggagtcgaacccgggccgc

SEQ ID NO: 2481 - DNA, 26 bp, Artificial Sequence
  synthetic circulating small noncoding RNA (sncRNA) 5' transfer RNA (tRNA) half
tcatgctctaccgactgagctagccg

SEQ ID NO: 2482 - DNA, 24 bp, Artificial Sequence
  synthetic circulating small noncoding RNA (sncRNA) 5' transfer RNA (tRNA) half
gaccccgacgtgattcgaacacgc

SEQ ID NO: 2483 - DNA, 19 bp, Artificial Sequence
  synthetic circulating small noncoding RNA (sncRNA) 5' transfer RNA (tRNA) half
agttgtcaggagtgggatt

SEQ ID NO: 2484 - DNA, 28 bp, Artificial Sequence
  synthetic circulating small noncoding RNA (sncRNA) 5' transfer RNA (tRNA) half
cctggtggtctagtggttaggattcggc

SEQ ID NO: 2485 - DNA, 34 bp, Artificial Sequence
  synthetic circulating small noncoding RNA (sncRNA) 5' transfer RNA (tRNA) half
caccgagatttgaactcggatcgctggattcaga

SEQ ID NO: 2486 - DNA, 28 bp, Artificial Sequence
  synthetic circulating small noncoding RNA (sncRNA) 5' transfer RNA (tRNA) half
cgtagtgtagtggttatcacgttcgcct

SEQ ID NO: 2487 - DNA, 33 bp, Artificial Sequence
  synthetic circulating small noncoding RNA (sncRNA) 5' transfer RNA (tRNA) half
ccataccgggagtcgaacccgggccgcctgggt

SEQ ID NO: 2488 - DNA, 34 bp, Artificial Sequence
  synthetic circulating small noncoding RNA (sncRNA) 5' transfer RNA (tRNA) half
ggtttccgtagtgtagtggttatcacgttcgcct

SEQ ID NO: 2489 - DNA, 33 bp, Artificial Sequence
  synthetic circulating small noncoding RNA (sncRNA) 5' transfer RNA (tRNA) half
gcattggtagttcaatggtagaattctcgcctc

SEQ ID NO: 2490 - DNA, 18 bp, Artificial Sequence
  synthetic circulating small noncoding RNA (sncRNA) 5' transfer RNA (tRNA) half
tctgatgctctaccgact

SEQ ID NO: 2491 - DNA, 13 bp, Artificial Sequence
  synthetic circulating small noncoding RNA (sncRNA) 5' transfer RNA (tRNA) half
tcggtagagcatc

SEQ ID NO: 2492 - DNA, 31 bp, Artificial Sequence
  synthetic circulating small noncoding RNA (sncRNA) 5' transfer RNA (tRNA) half
cgccgctggtgtagtggtatcatgcaagatt

SEQ ID NO: 2493 - DNA, 30 bp, Artificial Sequence
  synthetic circulating small noncoding RNA (sncRNA) 5' transfer RNA (tRNA) half
cggggatactcaccactatactaacgagga

SEQ ID NO: 2494 - DNA, 30 bp, Artificial Sequence
  synthetic circulating small noncoding RNA (sncRNA) 5' transfer RNA (tRNA) half
ccgtgatcgtataggggttagtactctgcg

SEQ ID NO: 2495 - DNA, 20 bp, Artificial Sequence
  synthetic circulating small noncoding RNA (sncRNA) 5' transfer RNA (tRNA) half
tccagagtgctaaccattac

SEQ ID NO: 2496 - DNA, 13 bp, Artificial Sequence
  synthetic circulating small noncoding RNA (sncRNA) 5' transfer RNA (tRNA) half
ggcgaacgtgata

SEQ ID NO: 2497 - DNA, 25 bp, Artificial Sequence
  synthetic circulating small noncoding RNA (sncRNA) 5' transfer RNA (tRNA) half
gcccagcacgcttccgctgcgccac

SEQ ID NO: 2498 - DNA, 22 bp, Artificial Sequence
  synthetic circulating small noncoding RNA (sncRNA) 5' transfer RNA (tRNA) half
tctaccactgaaccaccaatgc

SEQ ID NO: 2499 - DNA, 20 bp, Artificial Sequence
  synthetic circulating small noncoding RNA (sncRNA) 5' transfer RNA (tRNA) half
ctaggggtatgattctcgct

SEQ ID NO: 2500 - DNA, 33 bp, Artificial Sequence
  synthetic circulating small noncoding RNA (sncRNA) 5' transfer RNA (tRNA) half
tgttcccacaccgggagtcgaacccgggccgcc

SEQ ID NO: 2501 - DNA, 21 bp, Artificial Sequence
  synthetic circulating small noncoding RNA (sncRNA) 5' transfer RNA (tRNA) half
tctaggggtatgattctcgct

SEQ ID NO: 2502 - DNA, 19 bp, Artificial Sequence
  synthetic circulating small noncoding RNA (sncRNA) 5' transfer RNA (tRNA) half
taggggttagtactctgcg

SEQ ID NO: 2503 - DNA, 36 bp, Artificial Sequence
  synthetic circulating small noncoding RNA (sncRNA) 5' transfer RNA (tRNA) half
ctcggatcgctggattcagagtccagagtgctaacc

SEQ ID NO: 2504 - DNA, 22 bp, Artificial Sequence
  synthetic circulating small noncoding RNA (sncRNA) 5' transfer RNA (tRNA) half
aagcgagaatcatacccctaga

SEQ ID NO: 2505 - DNA, 22 bp, Artificial Sequence
  synthetic circulating small noncoding RNA (sncRNA) 5' transfer RNA (tRNA) half
gtggagatgccggggatcgaac

SEQ ID NO: 2506 - DNA, 17 bp, Artificial Sequence
  synthetic circulating small noncoding RNA (sncRNA) 5' transfer RNA (tRNA) half
gtcgagccagccaggag

SEQ ID NO: 2507 - DNA, 36 bp, Artificial Sequence
  synthetic circulating small noncoding RNA (sncRNA) 5' transfer RNA (tRNA) half
aaaagtctgatgctctaccgactgagctatccgggc

SEQ ID NO: 2508 - DNA, 14 bp, Artificial Sequence
  synthetic circulating small noncoding RNA (sncRNA) 5' transfer RNA (tRNA) half
gttatcacgtctgc

SEQ ID NO: 2509 - DNA, 35 bp, Artificial Sequence
  synthetic circulating small noncoding RNA (sncRNA) 5' transfer RNA (tRNA) half
cccattcttgcgacccgggttcgattcccgggcgg

SEQ ID NO: 2510 - DNA, 33 bp, Artificial Sequence
  synthetic circulating small noncoding RNA (sncRNA) 5' transfer RNA (tRNA) half
tcccacaccgggagtcgaacccgggccgcctgg

SEQ ID NO: 2511 - DNA, 37 bp, Artificial Sequence
  synthetic circulating small noncoding RNA (sncRNA) 5' transfer RNA (tRNA) half
taatctcagggtcgtgggttcgagccccacgttgggc

SEQ ID NO: 2512 - DNA, 35 bp, Artificial Sequence
  synthetic circulating small noncoding RNA (sncRNA) 5' transfer RNA (tRNA) half
gtccctgggtgggctcgaaccaccaacctttcggt

SEQ ID NO: 2513 - DNA, 37 bp, Artificial Sequence
  synthetic circulating small noncoding RNA (sncRNA) 5' transfer RNA (tRNA) half
gttcccataccgggagtcgaacccgggccgcctgggt

SEQ ID NO: 2514 - DNA, 35 bp, Artificial Sequence
  synthetic circulating small noncoding RNA (sncRNA) 5' transfer RNA (tRNA) half
acctccccgtcggggaattgaaccccggtctcccg

SEQ ID NO: 2515 - DNA, 31 bp, Artificial Sequence
  synthetic circulating small noncoding RNA (sncRNA) 5' transfer RNA (tRNA) half
caatgactcctaaccactagaccaccaggga

SEQ ID NO: 2516 - DNA, 20 bp, Artificial Sequence
  synthetic circulating small noncoding RNA (sncRNA) 5' transfer RNA (tRNA) half
tagcggttatcacgtctgct

SEQ ID NO: 2517 - DNA, 24 bp, Artificial Sequence
  synthetic circulating small noncoding RNA (sncRNA) 5' transfer RNA (tRNA) half
gtgtaatggttagcactctggact

SEQ ID NO: 2518 - DNA, 30 bp, Artificial Sequence
  synthetic circulating small noncoding RNA (sncRNA) 5' transfer RNA (tRNA) half
gtttccctagtgtagtggttatcacgttcg

SEQ ID NO: 2519 - DNA, 24 bp, Artificial Sequence
  synthetic circulating small noncoding RNA (sncRNA) 5' transfer RNA (tRNA) half
gctggtgtagtggtatcatgcaag

SEQ ID NO: 2520 - DNA, 28 bp, Artificial Sequence
  synthetic circulating small noncoding RNA (sncRNA) 5' transfer RNA (tRNA) half
aggcggcccgggttcgactcccggtgtg

SEQ ID NO: 2521 - DNA, 27 bp, Artificial Sequence
  synthetic circulating small noncoding RNA (sncRNA) 5' transfer RNA (tRNA) half
cacatggtctagcggttaggattcctg

SEQ ID NO: 2522 - DNA, 30 bp, Artificial Sequence
  synthetic circulating small noncoding RNA (sncRNA) 5' transfer RNA (tRNA) half
cagaagtgggattcgaacccacgcctccat

SEQ ID NO: 2523 - DNA, 16 bp, Artificial Sequence
  synthetic circulating small noncoding RNA (sncRNA) 5' transfer RNA (tRNA) half
cacgcagaaggtcctg

SEQ ID NO: 2524 - DNA, 42 bp, Artificial Sequence
  synthetic circulating small noncoding RNA (sncRNA) 5' transfer RNA (tRNA) half
ggcggtgagagcgccgaatcctaaccactagaccaccaggga

SEQ ID NO: 2525 - DNA, 18 bp, Artificial Sequence
  synthetic circulating small noncoding RNA (sncRNA) 5' transfer RNA (tRNA) half
tgatgctctaccgactga

SEQ ID NO: 2526 - DNA, 37 bp, Artificial Sequence
  synthetic circulating small noncoding RNA (sncRNA) 5' transfer RNA (tRNA) half
attaagagtctcatgctctaccgactgagctagccgg

SEQ ID NO: 2527 - DNA, 30 bp, Artificial Sequence
  synthetic circulating small noncoding RNA (sncRNA) 5' transfer RNA (tRNA) half
gcagagtggcgcagcggaagcgtgctgggc

SEQ ID NO: 2528 - DNA, 29 bp, Artificial Sequence
  synthetic circulating small noncoding RNA (sncRNA) 5' transfer RNA (tRNA) half
ggtcccaccgagatttgaactcggatcgc

SEQ ID NO: 2529 - DNA, 15 bp, Artificial Sequence
  synthetic circulating small noncoding RNA (sncRNA) 5' transfer RNA (tRNA) half
aacccgggcctcccg

SEQ ID NO: 2530 - DNA, 25 bp, Artificial Sequence
  synthetic circulating small noncoding RNA (sncRNA) 5' transfer RNA (tRNA) half
aggaatcctaaccgctagaccatgt

SEQ ID NO: 2531 - DNA, 19 bp, Artificial Sequence
  synthetic circulating small noncoding RNA (sncRNA) 5' transfer RNA (tRNA) half
gacccagtggcctaatgga

SEQ ID NO: 2532 - DNA, 18 bp, Artificial Sequence
  synthetic circulating small noncoding RNA (sncRNA) 5' transfer RNA (tRNA) half
caggcggggatactaacc

SEQ ID NO: 2533 - DNA, 24 bp, Artificial Sequence
  synthetic circulating small noncoding RNA (sncRNA) 5' transfer RNA (tRNA) half
gcccggatgatcctcagtggtctg

SEQ ID NO: 2534 - DNA, 13 bp, Artificial Sequence
  synthetic circulating small noncoding RNA (sncRNA) 5' transfer RNA (tRNA) half
aaccggggacctc

SEQ ID NO: 2535 - DNA, 28 bp, Artificial Sequence
  synthetic circulating small noncoding RNA (sncRNA) 5' transfer RNA (tRNA) half
tggattcagagtccagagtgctaaccat

SEQ ID NO: 2536 - DNA, 11 bp, Artificial Sequence
  synthetic circulating small noncoding RNA (sncRNA) 5' transfer RNA (tRNA) half
gcgccgaatcc

SEQ ID NO: 2537 - DNA, 32 bp, Artificial Sequence
  synthetic circulating small noncoding RNA (sncRNA) 5' transfer RNA (tRNA) half
gactgacgcgctacctactgcgctaacgaggc

SEQ ID NO: 2538 - DNA, 24 bp, Artificial Sequence
  synthetic circulating small noncoding RNA (sncRNA) 5' transfer RNA (tRNA) half
gaactcggatcgctggattcaaag

SEQ ID NO: 2539 - DNA, 22 bp, Artificial Sequence
  synthetic circulating small noncoding RNA (sncRNA) 5' transfer RNA (tRNA) half
gggttcgattcccgggcggcgc

SEQ ID NO: 2540 - DNA, 22 bp, Artificial Sequence
  synthetic circulating small noncoding RNA (sncRNA) 5' transfer RNA (tRNA) half
tagaccgctcggccacgctacc

SEQ ID NO: 2541 - DNA, 36 bp, Artificial Sequence
  synthetic circulating small noncoding RNA (sncRNA) 5' transfer RNA (tRNA) half
gcccggatgatcctcagtggtctggggtgcaggctt

SEQ ID NO: 2542 - DNA, 29 bp, Artificial Sequence
  synthetic circulating small noncoding RNA (sncRNA) 5' transfer RNA (tRNA) half
cgagaattctaccattgaaccaccaatgc

SEQ ID NO: 2543 - DNA, 18 bp, Artificial Sequence
  synthetic circulating small noncoding RNA (sncRNA) 5' transfer RNA (tRNA) half
cggaagcgtgctgggccc

SEQ ID NO: 2544 - DNA, 14 bp, Artificial Sequence
  synthetic circulating small noncoding RNA (sncRNA) 5' transfer RNA (tRNA) half
gtctcttcgggggc

SEQ ID NO: 2545 - DNA, 34 bp, Artificial Sequence
  synthetic circulating small noncoding RNA (sncRNA) 5' transfer RNA (tRNA) half
actccgccgggactcgaacccggaacctttgaat

SEQ ID NO: 2546 - DNA, 38 bp, Artificial Sequence
  synthetic circulating small noncoding RNA (sncRNA) 5' transfer RNA (tRNA) half
tgcatgaggtcctgggttcgatccccagcatctccagg

SEQ ID NO: 2547 - DNA, 24 bp, Artificial Sequence
  synthetic circulating small noncoding RNA (sncRNA) 5' transfer RNA (tRNA) half
gcggcccgggttcgattcccggtc

SEQ ID NO: 2548 - DNA, 25 bp, Artificial Sequence
  synthetic circulating small noncoding RNA (sncRNA) 5' transfer RNA (tRNA) half
cgggttcgactcccggtatgggaac

SEQ ID NO: 2549 - DNA, 17 bp, Artificial Sequence
  synthetic circulating small noncoding RNA (sncRNA) 5' transfer RNA (tRNA) half
ggcaggcgagaattcta

SEQ ID NO: 2550 - DNA, 33 bp, Artificial Sequence
  synthetic circulating small noncoding RNA (sncRNA) 5' transfer RNA (tRNA) half
gaccgcgtggcctaatggataaggcgtctgact

SEQ ID NO: 2551 - DNA, 22 bp, Artificial Sequence
  synthetic circulating small noncoding RNA (sncRNA) 5' transfer RNA (tRNA) half
aaaccaggaatcctaaccgcta

SEQ ID NO: 2552 - DNA, 18 bp, Artificial Sequence
  synthetic circulating small noncoding RNA (sncRNA) 5' transfer RNA (tRNA) half
cctaagcgagaatcatac

SEQ ID NO: 2553 - DNA, 18 bp, Artificial Sequence
  synthetic circulating small noncoding RNA (sncRNA) 5' transfer RNA (tRNA) half
accccgtccgtgcctgcg

SEQ ID NO: 2554 - DNA, 17 bp, Artificial Sequence
  synthetic circulating small noncoding RNA (sncRNA) 5' transfer RNA (tRNA) half
tcctgccgactacgtca

SEQ ID NO: 2555 - DNA, 23 bp, Artificial Sequence
  synthetic circulating small noncoding RNA (sncRNA) 5' transfer RNA (tRNA) half
cgatccatcgacctctgggttat

SEQ ID NO: 2556 - DNA, 21 bp, Artificial Sequence
  synthetic circulating small noncoding RNA (sncRNA) 5' transfer RNA (tRNA) half
taaccgctagaccatgtggga

SEQ ID NO: 2557 - DNA, 33 bp, Artificial Sequence
  synthetic circulating small noncoding RNA (sncRNA) 5' transfer RNA (tRNA) half
gcccgaacagggacttgaaccctggaccctcag

SEQ ID NO: 2558 - DNA, 36 bp, Artificial Sequence
  synthetic circulating small noncoding RNA (sncRNA) 5' transfer RNA (tRNA) half
taaacaggagatcctgggttcgaatcccagcggtgc

SEQ ID NO: 2559 - DNA, 22 bp, Artificial Sequence
  synthetic circulating small noncoding RNA (sncRNA) 5' transfer RNA (tRNA) half
tgtagtggttatcacgttcgcc

SEQ ID NO: 2560 - DNA, 12 bp, Artificial Sequence
  synthetic circulating small noncoding RNA (sncRNA) 5' transfer RNA (tRNA) half
gccgaatcctaa

SEQ ID NO: 2561 - DNA, 17 bp, Artificial Sequence
  synthetic circulating small noncoding RNA (sncRNA) 5' transfer RNA (tRNA) half
ggtatgattctcgcttc

SEQ ID NO: 2562 - DNA, 12 bp, Artificial Sequence
  synthetic circulating small noncoding RNA (sncRNA) 5' transfer RNA (tRNA) half
aggtcccaccga

SEQ ID NO: 2563 - DNA, 22 bp, Artificial Sequence
  synthetic circulating small noncoding RNA (sncRNA) 5' transfer RNA (tRNA) half
cgctgcgttggccgggaatcga

SEQ ID NO: 2564 - DNA, 32 bp, Artificial Sequence
  synthetic circulating small noncoding RNA (sncRNA) 5' transfer RNA (tRNA) half
acccgggccgcggcggtgagagcgccgaatcc

SEQ ID NO: 2565 - DNA, 25 bp, Artificial Sequence
  synthetic circulating small noncoding RNA (sncRNA) 5' transfer RNA (tRNA) half
ggtgagagcgccgaatcctaaccac

SEQ ID NO: 2566 - DNA, 30 bp, Artificial Sequence
  synthetic circulating small noncoding RNA (sncRNA) 5' transfer RNA (tRNA) half
gcggcccgggttcgactcccggtatgggaa

SEQ ID NO: 2567 - DNA, 13 bp, Artificial Sequence
  synthetic circulating small noncoding RNA (sncRNA) 5' transfer RNA (tRNA) half
gttcccataccgg

SEQ ID NO: 2568 - DNA, 36 bp, Artificial Sequence
  synthetic circulating small noncoding RNA (sncRNA) 5' transfer RNA (tRNA) half
cccattcttgcgacccgggttcgattcccgggcggc

SEQ ID NO: 2569 - DNA, 18 bp, Artificial Sequence
  synthetic circulating small noncoding RNA (sncRNA) 5' transfer RNA (tRNA) half
gtcaggatggccgagtgg

SEQ ID NO: 2570 - DNA, 30 bp, Artificial Sequence
  synthetic circulating small noncoding RNA (sncRNA) 5' transfer RNA (tRNA) half
ccacgctctaaccaactgagctaaccggcc

SEQ ID NO: 2571 - DNA, 14 bp, Artificial Sequence
  synthetic circulating small noncoding RNA (sncRNA) 5' transfer RNA (tRNA) half
ggcgaacgtgataa

SEQ ID NO: 2572 - DNA, 37 bp, Artificial Sequence
  synthetic circulating small noncoding RNA (sncRNA) 5' transfer RNA (tRNA) half
acccaggcggcccgggttcgactcccggtgtgggaac

SEQ ID NO: 2573 - DNA, 17 bp, Artificial Sequence
  synthetic circulating small noncoding RNA (sncRNA) 5' transfer RNA (tRNA) half
tgatgctctaccgactg

SEQ ID NO: 2574 - DNA, 12 bp, Artificial Sequence
  synthetic circulating small noncoding RNA (sncRNA) 5' transfer RNA (tRNA) half
gcgcccaacgtg

SEQ ID NO: 2575 - DNA, 34 bp, Artificial Sequence
  synthetic circulating small noncoding RNA (sncRNA) 5' transfer RNA (tRNA) half
gcatgaggtcctgggttcgatccccagcatctcc

SEQ ID NO: 2576 - DNA, 13 bp, Artificial Sequence
  synthetic circulating small noncoding RNA (sncRNA) 5' transfer RNA (tRNA) half
gcccaacgtgggg

SEQ ID NO: 2577 - DNA, 19 bp, Artificial Sequence
  synthetic circulating small noncoding RNA (sncRNA) 5' transfer RNA (tRNA) half
atgtggcagcggtgggatt

SEQ ID NO: 2578 - DNA, 12 bp, Artificial Sequence
  synthetic circulating small noncoding RNA (sncRNA) 5' transfer RNA (tRNA) half
accgggcggaaa

SEQ ID NO: 2579 - DNA, 14 bp, Artificial Sequence
  synthetic circulating small noncoding RNA (sncRNA) 5' transfer RNA (tRNA) half
tgctctaccgactg

SEQ ID NO: 2580 - DNA, 34 bp, Artificial Sequence
  synthetic circulating small noncoding RNA (sncRNA) 5' transfer RNA (tRNA) half
tctccccgtcggggaatcgaaccccggtctcccg

SEQ ID NO: 2581 - DNA, 22 bp, Artificial Sequence
  synthetic circulating small noncoding RNA (sncRNA) 5' transfer RNA (tRNA) half
ctaccgactgagctatccgggc

SEQ ID NO: 2582 - DNA, 26 bp, Artificial Sequence
  synthetic circulating small noncoding RNA (sncRNA) 5' transfer RNA (tRNA) half
gccgaatcctaaccactagaccacca

SEQ ID NO: 2583 - DNA, 18 bp, Artificial Sequence
  synthetic circulating small noncoding RNA (sncRNA) 5' transfer RNA (tRNA) half
cgggccgcggcggtgaga

SEQ ID NO: 2584 - DNA, 34 bp, Artificial Sequence
  synthetic circulating small noncoding RNA (sncRNA) 5' transfer RNA (tRNA) half
ccaggggtcgcgagttcaaatctcgctggggcct

SEQ ID NO: 2585 - DNA, 21 bp, Artificial Sequence
  synthetic circulating small noncoding RNA (sncRNA) 5' transfer RNA (tRNA) half
gcccagcacgcttccgctgcg

SEQ ID NO: 2586 - DNA, 18 bp, Artificial Sequence
  synthetic circulating small noncoding RNA (sncRNA) 5' transfer RNA (tRNA) half
aatcccggacgagcccca

SEQ ID NO: 2587 - DNA, 34 bp, Artificial Sequence
  synthetic circulating small noncoding RNA (sncRNA) 5' transfer RNA (tRNA) half
acccaggcggcccgggttcgactcccggtatggg

SEQ ID NO: 2588 - DNA, 32 bp, Artificial Sequence
  synthetic circulating small noncoding RNA (sncRNA) 5' transfer RNA (tRNA) half
tttccctagtgtagtggttatcacgttcgcct

SEQ ID NO: 2589 - DNA, 26 bp, Artificial Sequence
  synthetic circulating small noncoding RNA (sncRNA) 5' transfer RNA (tRNA) half
gtcaggatggccgagtggtctaaggc

SEQ ID NO: 2590 - DNA, 33 bp, Artificial Sequence
  synthetic circulating small noncoding RNA (sncRNA) 5' transfer RNA (tRNA) half
tccccgtcggggaatcgaaccccggtctcccgc

SEQ ID NO: 2591 - DNA, 29 bp, Artificial Sequence
  synthetic circulating small noncoding RNA (sncRNA) 5' transfer RNA (tRNA) half
ccagcacgcttccgctgcgccactctgct

SEQ ID NO: 2592 - DNA, 32 bp, Artificial Sequence
  synthetic circulating small noncoding RNA (sncRNA) 5' transfer RNA (tRNA) half
gactccgccgggactcgaacccggaacctttg

SEQ ID NO: 2593 - DNA, 27 bp, Artificial Sequence
  synthetic circulating small noncoding RNA (sncRNA) 5' transfer RNA (tRNA) half
acatggtctagcggttaggattcctgg

SEQ ID NO: 2594 - DNA, 34 bp, Artificial Sequence
  synthetic circulating small noncoding RNA (sncRNA) 5' transfer RNA (tRNA) half
agaagattgcaggttcgagtcctgccgcggtcga

SEQ ID NO: 2595 - DNA, 17 bp, Artificial Sequence
  synthetic circulating small noncoding RNA (sncRNA) 5' transfer RNA (tRNA) half
aaccgggcggaaacaac

SEQ ID NO: 2596 - DNA, 25 bp, Artificial Sequence
  synthetic circulating small noncoding RNA (sncRNA) 5' transfer RNA (tRNA) half
ctcggatcgctggattcagagtcca

SEQ ID NO: 2597 - DNA, 13 bp, Artificial Sequence
  synthetic circulating small noncoding RNA (sncRNA) 5' transfer RNA (tRNA) half
gggcccagcacgc

SEQ ID NO: 2598 - DNA, 15 bp, Artificial Sequence
  synthetic circulating small noncoding RNA (sncRNA) 5' transfer RNA (tRNA) half
ctgtcacgcgggaga

SEQ ID NO: 2599 - DNA, 21 bp, Artificial Sequence
  synthetic circulating small noncoding RNA (sncRNA) 5' transfer RNA (tRNA) half
gtctagtggttaggattcggc

SEQ ID NO: 2600 - DNA, 16 bp, Artificial Sequence
  synthetic circulating small noncoding RNA (sncRNA) 5' transfer RNA (tRNA) half
gttaggattcggcgct

SEQ ID NO: 2601 - DNA, 22 bp, Artificial Sequence
  synthetic circulating small noncoding RNA (sncRNA) 5' transfer RNA (tRNA) half
ggtggagatgccggggatcgaa

SEQ ID NO: 2602 - DNA, 30 bp, Artificial Sequence
  synthetic circulating small noncoding RNA (sncRNA) 5' transfer RNA (tRNA) half
tctgtagtgtagtggttatcacgttcgcct

SEQ ID NO: 2603 - DNA, 15 bp, Artificial Sequence
  synthetic circulating small noncoding RNA (sncRNA) 5' transfer RNA (tRNA) half
atcccggacgagccc

SEQ ID NO: 2604 - DNA, 30 bp, Artificial Sequence
  synthetic circulating small noncoding RNA (sncRNA) 5' transfer RNA (tRNA) half
cctggtggtctagtggttaggattcggcgc

SEQ ID NO: 2605 - DNA, 20 bp, Artificial Sequence
  synthetic circulating small noncoding RNA (sncRNA) 5' transfer RNA (tRNA) half
ccctgaccgggaatcgaacc

SEQ ID NO: 2606 - DNA, 33 bp, Artificial Sequence
  synthetic circulating small noncoding RNA (sncRNA) 5' transfer RNA (tRNA) half
tcagaaggttgcgtgttcaaatcacgtcggggt

SEQ ID NO: 2607 - DNA, 20 bp, Artificial Sequence
  synthetic circulating small noncoding RNA (sncRNA) 5' transfer RNA (tRNA) half
tccccggcatctccaacttt

SEQ ID NO: 2608 - DNA, 37 bp, Artificial Sequence
  synthetic circulating small noncoding RNA (sncRNA) 5' transfer RNA (tRNA) half
cgtctccccgtcggggaatcgaaccccggtctcccgc

SEQ ID NO: 2609 - DNA, 29 bp, Artificial Sequence
  synthetic circulating small noncoding RNA (sncRNA) 5' transfer RNA (tRNA) half
gggggtatagctcagtggtagagcatttg

SEQ ID NO: 2610 - DNA, 33 bp, Artificial Sequence
  synthetic circulating small noncoding RNA (sncRNA) 5' transfer RNA (tRNA) half
ggagatgccggggatcgaacccggggcctcata

SEQ ID NO: 2611 - DNA, 15 bp, Artificial Sequence
  synthetic circulating small noncoding RNA (sncRNA) 5' transfer RNA (tRNA) half
cgaaccggggacctt

SEQ ID NO: 2612 - DNA, 15 bp, Artificial Sequence
  synthetic circulating small noncoding RNA (sncRNA) 5' transfer RNA (tRNA) half
gcgaacgtgataacc

SEQ ID NO: 2613 - DNA, 32 bp, Artificial Sequence
  synthetic circulating small noncoding RNA (sncRNA) 5' transfer RNA (tRNA) half
agtcccatgctctaccgactgagctagccggg

SEQ ID NO: 2614 - DNA, 31 bp, Artificial Sequence
  synthetic circulating small noncoding RNA (sncRNA) 5' transfer RNA (tRNA) half
gggggattagctcaaatggtagagcgctcgc

SEQ ID NO: 2615 - DNA, 16 bp, Artificial Sequence
  synthetic circulating small noncoding RNA (sncRNA) 5' transfer RNA (tRNA) half
gtggagatgccgggga

SEQ ID NO: 2616 - DNA, 14 bp, Artificial Sequence
  synthetic circulating small noncoding RNA (sncRNA) 5' transfer RNA (tRNA) half
cgcagagtactaac

SEQ ID NO: 2617 - DNA, 30 bp, Artificial Sequence
  synthetic circulating small noncoding RNA (sncRNA) 5' transfer RNA (tRNA) half
ccagagtgctaaccattacaccatgggacc

SEQ ID NO: 2618 - DNA, 36 bp, Artificial Sequence
  synthetic circulating small noncoding RNA (sncRNA) 5' transfer RNA (tRNA) half
gtcccatgctctaccgactgagctagccgggcagat

SEQ ID NO: 2619 - DNA, 18 bp, Artificial Sequence
  synthetic circulating small noncoding RNA (sncRNA) 5' transfer RNA (tRNA) half
tggttagtactctgcgtt

SEQ ID NO: 2620 - DNA, 25 bp, Artificial Sequence
  synthetic circulating small noncoding RNA (sncRNA) 5' transfer RNA (tRNA) half
gcatgggtggttcagtggtagaatt

SEQ ID NO: 2621 - DNA, 18 bp, Artificial Sequence
  synthetic circulating small noncoding RNA (sncRNA) 5' transfer RNA (tRNA) half
gtatgattctcgctttgg

SEQ ID NO: 2622 - DNA, 23 bp, Artificial Sequence
  synthetic circulating small noncoding RNA (sncRNA) 5' transfer RNA (tRNA) half
ggagatgccggggatcgaacccg

SEQ ID NO: 2623 - DNA, 27 bp, Artificial Sequence
  synthetic circulating small noncoding RNA (sncRNA) 5' transfer RNA (tRNA) half
ccgaatcctaaccactagaccaccagg

SEQ ID NO: 2624 - DNA, 18 bp, Artificial Sequence
  synthetic circulating small noncoding RNA (sncRNA) 5' transfer RNA (tRNA) half
gggagactgcgacctgaa

SEQ ID NO: 2625 - DNA, 17 bp, Artificial Sequence
  synthetic circulating small noncoding RNA (sncRNA) 5' transfer RNA (tRNA) half
aggaatcctaaccgcta

SEQ ID NO: 2626 - DNA, 36 bp, Artificial Sequence
  synthetic circulating small noncoding RNA (sncRNA) 5' transfer RNA (tRNA) half
ctccccgtcggggaattgaaccccggtctcccgcgt

SEQ ID NO: 2627 - DNA, 12 bp, Artificial Sequence
  synthetic circulating small noncoding RNA (sncRNA) 5' transfer RNA (tRNA) half
cgcccaacgtgg

SEQ ID NO: 2628 - DNA, 32 bp, Artificial Sequence
  synthetic circulating small noncoding RNA (sncRNA) 5' transfer RNA (tRNA) half
cccacatggtctagcggttaggattcctggtt

SEQ ID NO: 2629 - DNA, 33 bp, Artificial Sequence
  synthetic circulating small noncoding RNA (sncRNA) 5' transfer RNA (tRNA) half
ccgaaacccgggatcgaaccagggacctttaga

SEQ ID NO: 2630 - DNA, 14 bp, Artificial Sequence
  synthetic circulating small noncoding RNA (sncRNA) 5' transfer RNA (tRNA) half
gacgaggatgggat

SEQ ID NO: 2631 - DNA, 16 bp, Artificial Sequence
  synthetic circulating small noncoding RNA (sncRNA) 5' transfer RNA (tRNA) half
tttgagctaatccccc

SEQ ID NO: 2632 - DNA, 14 bp, Artificial Sequence
  synthetic circulating small noncoding RNA (sncRNA) 5' transfer RNA (tRNA) half
ttccctgaccggga

SEQ ID NO: 2633 - DNA, 16 bp, Artificial Sequence
  synthetic circulating small noncoding RNA (sncRNA) 5' transfer RNA (tRNA) half
tcgagccagccaggag

SEQ ID NO: 2634 - DNA, 34 bp, Artificial Sequence
  synthetic circulating small noncoding RNA (sncRNA) 5' transfer RNA (tRNA) half
gagatgccggggatcgaacccggggcctcataca

SEQ ID NO: 2635 - DNA, 19 bp, Artificial Sequence
  synthetic circulating small noncoding RNA (sncRNA) 5' transfer RNA (tRNA) half
tcccacaccgggagtcgaa

SEQ ID NO: 2636 - DNA, 29 bp, Artificial Sequence
  synthetic circulating small noncoding RNA (sncRNA) 5' transfer RNA (tRNA) half
gctcgttggtctaggggtatgattctcgc

SEQ ID NO: 2637 - DNA, 16 bp, Artificial Sequence
  synthetic circulating small noncoding RNA (sncRNA) 5' transfer RNA (tRNA) half
agtctgatgctctacc

SEQ ID NO: 2638 - DNA, 33 bp, Artificial Sequence
  synthetic circulating small noncoding RNA (sncRNA) 5' transfer RNA (tRNA) half
gccccgtgtgaggatcgaactcacgaccttcag

SEQ ID NO: 2639 - DNA, 29 bp, Artificial Sequence
  synthetic circulating small noncoding RNA (sncRNA) 5' transfer RNA (tRNA) half
gcccgaacagggacttgaaccctggaccc

SEQ ID NO: 2640 - DNA, 35 bp, Artificial Sequence
  synthetic circulating small noncoding RNA (sncRNA) 5' transfer RNA (tRNA) half
gcgcccgaacagggacttgaaccctggaccctcag

SEQ ID NO: 2641 - DNA, 30 bp, Artificial Sequence
  synthetic circulating small noncoding RNA (sncRNA) 5' transfer RNA (tRNA) half
gaggttgtgagttcgatcctcacctggagc

SEQ ID NO: 2642 - DNA, 32 bp, Artificial Sequence
  synthetic circulating small noncoding RNA (sncRNA) 5' transfer RNA (tRNA) half
cgccgaatcctaaccactagaccaccagggaa

SEQ ID NO: 2643 - DNA, 16 bp, Artificial Sequence
  synthetic circulating small noncoding RNA (sncRNA) 5' transfer RNA (tRNA) half
gtcgagccagccagga

SEQ ID NO: 2644 - DNA, 14 bp, Artificial Sequence
  synthetic circulating small noncoding RNA (sncRNA) 5' transfer RNA (tRNA) half
gttcgatccccggc

SEQ ID NO: 2645 - DNA, 33 bp, Artificial Sequence
  synthetic circulating small noncoding RNA (sncRNA) 5' transfer RNA (tRNA) half
tgtgcattggccgggaatcgaacccgggcctcc

SEQ ID NO: 2646 - DNA, 19 bp, Artificial Sequence
  synthetic circulating small noncoding RNA (sncRNA) 5' transfer RNA (tRNA) half
gatggagggggcacccgga

SEQ ID NO: 2647 - DNA, 20 bp, Artificial Sequence
  synthetic circulating small noncoding RNA (sncRNA) 5' transfer RNA (tRNA) half
tcgaatccgagtcacggcat

SEQ ID NO: 2648 - DNA, 33 bp, Artificial Sequence
  synthetic circulating small noncoding RNA (sncRNA) 5' transfer RNA (tRNA) half
catgaggtcctgggttcgatccccagcatctcc

SEQ ID NO: 2649 - DNA, 24 bp, Artificial Sequence
  synthetic circulating small noncoding RNA (sncRNA) 5' transfer RNA (tRNA) half
ggtgagagcgccgaatcctaacca

SEQ ID NO: 2650 - DNA, 17 bp, Artificial Sequence
  synthetic circulating small noncoding RNA (sncRNA) 5' transfer RNA (tRNA) half
ggcccagcacgcttccg

SEQ ID NO: 2651 - DNA, 23 bp, Artificial Sequence
  synthetic circulating small noncoding RNA (sncRNA) 5' transfer RNA (tRNA) half
gaccccgacgtgattcgaacacg

SEQ ID NO: 2652 - DNA, 13 bp, Artificial Sequence
  synthetic circulating small noncoding RNA (sncRNA) 5' transfer RNA (tRNA) half
cgcccaacgtggg

SEQ ID NO: 2653 - DNA, 15 bp, Artificial Sequence
  synthetic circulating small noncoding RNA (sncRNA) 5' transfer RNA (tRNA) half
acccgggacctctcg

SEQ ID NO: 2654 - DNA, 21 bp, Artificial Sequence
  synthetic circulating small noncoding RNA (sncRNA) 5' transfer RNA (tRNA) half
ccaaactgtttccgcccggtt

SEQ ID NO: 2655 - DNA, 33 bp, Artificial Sequence
  synthetic circulating small noncoding RNA (sncRNA) 5' transfer RNA (tRNA) half
gcagaaggtcctgggttcgagccccagtggaac

SEQ ID NO: 2656 - DNA, 32 bp, Artificial Sequence
  synthetic circulating small noncoding RNA (sncRNA) 5' transfer RNA (tRNA) half
gtccaatgcgctatccattgcgccacagagcc

SEQ ID NO: 2657 - DNA, 18 bp, Artificial Sequence
  synthetic circulating small noncoding RNA (sncRNA) 5' transfer RNA (tRNA) half
ccgttgcgccacgaggcc

SEQ ID NO: 2658 - DNA, 32 bp, Artificial Sequence
  synthetic circulating small noncoding RNA (sncRNA) 5' transfer RNA (tRNA) half
cggatgatcctcagtggtctggggtgcaggct

SEQ ID NO: 2659 - DNA, 23 bp, Artificial Sequence
  synthetic circulating small noncoding RNA (sncRNA) 5' transfer RNA (tRNA) half
gtctagtggtatgattctcagtt

SEQ ID NO: 2660 - DNA, 15 bp, Artificial Sequence
  synthetic circulating small noncoding RNA (sncRNA) 5' transfer RNA (tRNA) half
aaccggggacctctt

SEQ ID NO: 2661 - DNA, 22 bp, Artificial Sequence
  synthetic circulating small noncoding RNA (sncRNA) 5' transfer RNA (tRNA) half
aacgcagagtactaaccactat

SEQ ID NO: 2662 - DNA, 17 bp, Artificial Sequence
  synthetic circulating small noncoding RNA (sncRNA) 5' transfer RNA (tRNA) half
ggggtatgattctcgct

SEQ ID NO: 2663 - DNA, 33 bp, Artificial Sequence
  synthetic circulating small noncoding RNA (sncRNA) 5' transfer RNA (tRNA) half
gggggcacccggatttgaaccggggacctcttg

SEQ ID NO: 2664 - DNA, 28 bp, Artificial Sequence
  synthetic circulating small noncoding RNA (sncRNA) 5' transfer RNA (tRNA) half
ggcaggcgagaattctaccactgaacca

SEQ ID NO: 2665 - DNA, 21 bp, Artificial Sequence
  synthetic circulating small noncoding RNA (sncRNA) 5' transfer RNA (tRNA) half
tgttcccataccgggagtcga

SEQ ID NO: 2666 - DNA, 35 bp, Artificial Sequence
  synthetic circulating small noncoding RNA (sncRNA) 5' transfer RNA (tRNA) half
aacaggagatcctgggttcgaatcccagcggggcc

SEQ ID NO: 2667 - DNA, 24 bp, Artificial Sequence
  synthetic circulating small noncoding RNA (sncRNA) 5' transfer RNA (tRNA) half
cttagaccgctcggccatcctgac

SEQ ID NO: 2668 - DNA, 17 bp, Artificial Sequence
  synthetic circulating small noncoding RNA (sncRNA) 5' transfer RNA (tRNA) half
ctagcggttaggattcc

SEQ ID NO: 2669 - DNA, 14 bp, Artificial Sequence
  synthetic circulating small noncoding RNA (sncRNA) 5' transfer RNA (tRNA) half
acccgggacctctc

SEQ ID NO: 2670 - DNA, 27 bp, Artificial Sequence
  synthetic circulating small noncoding RNA (sncRNA) 5' transfer RNA (tRNA) half
ggtggtctagtggttaggattcggcgc

SEQ ID NO: 2671 - DNA, 13 bp, Artificial Sequence
  synthetic circulating small noncoding RNA (sncRNA) 5' transfer RNA (tRNA) half
gcggcccgggttc

SEQ ID NO: 2672 - DNA, 19 bp, Artificial Sequence
  synthetic circulating small noncoding RNA (sncRNA) 5' transfer RNA (tRNA) half
cggttatcacgtctgcttt

SEQ ID NO: 2673 - DNA, 31 bp, Artificial Sequence
  synthetic circulating small noncoding RNA (sncRNA) 5' transfer RNA (tRNA) half
gagtcccatgctctaccgactgagctagccg

SEQ ID NO: 2674 - DNA, 28 bp, Artificial Sequence
  synthetic circulating small noncoding RNA (sncRNA) 5' transfer RNA (tRNA) half
accaggaatcctaaccgctagaccatat

SEQ ID NO: 2675 - DNA, 17 bp, Artificial Sequence
  synthetic circulating small noncoding RNA (sncRNA) 5' transfer RNA (tRNA) half
gttcccataccgggagt

SEQ ID NO: 2676 - DNA, 34 bp, Artificial Sequence
  synthetic circulating small noncoding RNA (sncRNA) 5' transfer RNA (tRNA) half
agcgccgaatcctaaccactagaccaccagggag

SEQ ID NO: 2677 - DNA, 37 bp, Artificial Sequence
  synthetic circulating small noncoding RNA (sncRNA) 5' transfer RNA (tRNA) half
attaagagtcccatgctctaccgactgagctagccgg

SEQ ID NO: 2678 - DNA, 29 bp, Artificial Sequence
  synthetic circulating small noncoding RNA (sncRNA) 5' transfer RNA (tRNA) half
cagagtgctaaccattacaccatggaacc

SEQ ID NO: 2679 - DNA, 43 bp, Artificial Sequence
  synthetic circulating small noncoding RNA (sncRNA) 5' transfer RNA (tRNA) half
ttgtgccccgtgtgaggatcgaactcacgaccttcagattatg

SEQ ID NO: 2680 - DNA, 16 bp, Artificial Sequence
  synthetic circulating small noncoding RNA (sncRNA) 5' transfer RNA (tRNA) half
gttcccataccgggag

SEQ ID NO: 2681 - DNA, 33 bp, Artificial Sequence
  synthetic circulating small noncoding RNA (sncRNA) 5' transfer RNA (tRNA) half
cgagccagccaggagtcgaacctagaatcttct

SEQ ID NO: 2682 - DNA, 25 bp, Artificial Sequence
  synthetic circulating small noncoding RNA (sncRNA) 5' transfer RNA (tRNA) half
catgctctaccgactgagctagccg

SEQ ID NO: 2683 - DNA, 28 bp, Artificial Sequence
  synthetic circulating small noncoding RNA (sncRNA) 5' transfer RNA (tRNA) half
cagcacgcttccgctgcgccactctgct

SEQ ID NO: 2684 - DNA, 33 bp, Artificial Sequence
  synthetic circulating small noncoding RNA (sncRNA) 5' transfer RNA (tRNA) half
accacgaagggactcgaaccctcaatcttctga

SEQ ID NO: 2685 - DNA, 35 bp, Artificial Sequence
  synthetic circulating small noncoding RNA (sncRNA) 5' transfer RNA (tRNA) half
acaggagatcctgggttcgaatcccagtggggcct

SEQ ID NO: 2686 - DNA, 19 bp, Artificial Sequence
  synthetic circulating small noncoding RNA (sncRNA) 5' transfer RNA (tRNA) half
accgggcggaaacagcaac

SEQ ID NO: 2687 - DNA, 15 bp, Artificial Sequence
  synthetic circulating small noncoding RNA (sncRNA) 5' transfer RNA (tRNA) half
tccctggtggtctag

SEQ ID NO: 2688 - DNA, 29 bp, Artificial Sequence
  synthetic circulating small noncoding RNA (sncRNA) 5' transfer RNA (tRNA) half
gagaattctaccactgaaccaccaatgcc

SEQ ID NO: 2689 - DNA, 35 bp, Artificial Sequence
  synthetic circulating small noncoding RNA (sncRNA) 5' transfer RNA (tRNA) half
tccgagaggtcccgggttcaaatcccggacgagcc

SEQ ID NO: 2690 - DNA, 23 bp, Artificial Sequence
  synthetic circulating small noncoding RNA (sncRNA) 5' transfer RNA (tRNA) half
tctgaatccagcgatccgagttc

SEQ ID NO: 2691 - DNA, 18 bp, Artificial Sequence
  synthetic circulating small noncoding RNA (sncRNA) 5' transfer RNA (tRNA) half
ctcggatcgctggattca

SEQ ID NO: 2692 - DNA, 32 bp, Artificial Sequence
  synthetic circulating small noncoding RNA (sncRNA) 5' transfer RNA (tRNA) half
tcctcgttagtatagtggtgagtatccccgcc

SEQ ID NO: 2693 - DNA, 19 bp, Artificial Sequence
  synthetic circulating small noncoding RNA (sncRNA) 5' transfer RNA (tRNA) half
ccgattgcgccacagagac

SEQ ID NO: 2694 - DNA, 15 bp, Artificial Sequence
  synthetic circulating small noncoding RNA (sncRNA) 5' transfer RNA (tRNA) half
tatgattctcgcttc

SEQ ID NO: 2695 - DNA, 20 bp, Artificial Sequence
  synthetic circulating small noncoding RNA (sncRNA) 5' transfer RNA (tRNA) half
tcccatgctctaccgactga

SEQ ID NO: 2696 - DNA, 21 bp, Artificial Sequence
  synthetic circulating small noncoding RNA (sncRNA) 5' transfer RNA (tRNA) half
cggtttcgaaccggggacctt

SEQ ID NO: 2697 - DNA, 17 bp, Artificial Sequence
  synthetic circulating small noncoding RNA (sncRNA) 5' transfer RNA (tRNA) half
tggtggagatgccgggg

SEQ ID NO: 2698 - DNA, 33 bp, Artificial Sequence
  synthetic circulating small noncoding RNA (sncRNA) 5' transfer RNA (tRNA) half
ccgtgatcgtatagtggttagtactctgcgttg

SEQ ID NO: 2699 - DNA, 17 bp, Artificial Sequence
  synthetic circulating small noncoding RNA (sncRNA) 5' transfer RNA (tRNA) half
atggttagcactctgga

SEQ ID NO: 2700 - DNA, 18 bp, Artificial Sequence
  synthetic circulating small noncoding RNA (sncRNA) 5' transfer RNA (tRNA) half
cccatgctctaccgactg

SEQ ID NO: 2701 - DNA, 27 bp, Artificial Sequence
  synthetic circulating small noncoding RNA (sncRNA) 5' transfer RNA (tRNA) half
cagagtactaaccactatacgatcacg

SEQ ID NO: 2702 - DNA, 31 bp, Artificial Sequence
  synthetic circulating small noncoding RNA (sncRNA) 5' transfer RNA (tRNA) half
caggcggcccgggttcgactcccggtatggg

SEQ ID NO: 2703 - DNA, 15 bp, Artificial Sequence
  synthetic circulating small noncoding RNA (sncRNA) 5' transfer RNA (tRNA) half
ggttatcacgtctgc

SEQ ID NO: 2704 - DNA, 33 bp, Artificial Sequence
  synthetic circulating small noncoding RNA (sncRNA) 5' transfer RNA (tRNA) half
cgccgtgatcgtatagtggttagtactctgcgt

SEQ ID NO: 2705 - DNA, 21 bp, Artificial Sequence
  synthetic circulating small noncoding RNA (sncRNA) 5' transfer RNA (tRNA) half
ttcgactcccggtatgggaac

SEQ ID NO: 2706 - DNA, 19 bp, Artificial Sequence
  synthetic circulating small noncoding RNA (sncRNA) 5' transfer RNA (tRNA) half
gcccggatagctcagtcgg

SEQ ID NO: 2707 - DNA, 20 bp, Artificial Sequence
  synthetic circulating small noncoding RNA (sncRNA) 5' transfer RNA (tRNA) half
taccactgaaccaccaatgc

SEQ ID NO: 2708 - DNA, 21 bp, Artificial Sequence
  synthetic circulating small noncoding RNA (sncRNA) 5' transfer RNA (tRNA) half
gagccagccaggagtcgaacc

SEQ ID NO: 2709 - DNA, 30 bp, Artificial Sequence
  synthetic circulating small noncoding RNA (sncRNA) 5' transfer RNA (tRNA) half
ttccctgaccgggaatcgaacccgggccgc

SEQ ID NO: 2710 - DNA, 16 bp, Artificial Sequence
  synthetic circulating small noncoding RNA (sncRNA) 5' transfer RNA (tRNA) half
ccgacgaggatgggat

SEQ ID NO: 2711 - DNA, 29 bp, Artificial Sequence
  synthetic circulating small noncoding RNA (sncRNA) 5' transfer RNA (tRNA) half
gaccccgacgtgacttgaacacgcaacct

SEQ ID NO: 2712 - DNA, 18 bp, Artificial Sequence
  synthetic circulating small noncoding RNA (sncRNA) 5' transfer RNA (tRNA) half
cccattcttgcgacccgg

SEQ ID NO: 2713 - DNA, 21 bp, Artificial Sequence
  synthetic circulating small noncoding RNA (sncRNA) 5' transfer RNA (tRNA) half
gggccgcggcggtgagagcgc

SEQ ID NO: 2714 - DNA, 17 bp, Artificial Sequence
  synthetic circulating small noncoding RNA (sncRNA) 5' transfer RNA (tRNA) half
aaccgggcggaaacaat

SEQ ID NO: 2715 - DNA, 17 bp, Artificial Sequence
  synthetic circulating small noncoding RNA (sncRNA) 5' transfer RNA (tRNA) half
gtggcaggcgagaattc

SEQ ID NO: 2716 - DNA, 28 bp, Artificial Sequence
  synthetic circulating small noncoding RNA (sncRNA) 5' transfer RNA (tRNA) half
cccatatggtctagcggttaggattcct

SEQ ID NO: 2717 - DNA, 32 bp, Artificial Sequence
  synthetic circulating small noncoding RNA (sncRNA) 5' transfer RNA (tRNA) half
tggggtatagctcaggggtagagcatttgact

SEQ ID NO: 2718 - DNA, 16 bp, Artificial Sequence
  synthetic circulating small noncoding RNA (sncRNA) 5' transfer RNA (tRNA) half
actgtttccgcccggt

SEQ ID NO: 2719 - DNA, 23 bp, Artificial Sequence
  synthetic circulating small noncoding RNA (sncRNA) 5' transfer RNA (tRNA) half
aacccgggacctctcgcacccaa

SEQ ID NO: 2720 - DNA, 31 bp, Artificial Sequence
  synthetic circulating small noncoding RNA (sncRNA) 5' transfer RNA (tRNA) half
gggggtatagctcaggggtagagcatttgac

SEQ ID NO: 2721 - DNA, 17 bp, Artificial Sequence
  synthetic circulating small noncoding RNA (sncRNA) 5' transfer RNA (tRNA) half
gatgccggggatcgaac

SEQ ID NO: 2722 - DNA, 15 bp, Artificial Sequence
  synthetic circulating small noncoding RNA (sncRNA) 5' transfer RNA (tRNA) half
ctgagctatcgaagg

SEQ ID NO: 2723 - DNA, 36 bp, Artificial Sequence
  synthetic circulating small noncoding RNA (sncRNA) 5' transfer RNA (tRNA) half
aggcaccgctgggattcgaacccaggatctcctgtt

SEQ ID NO: 2724 - DNA, 18 bp, Artificial Sequence
  synthetic circulating small noncoding RNA (sncRNA) 5' transfer RNA (tRNA) half
ggttaggattcggcgctc

SEQ ID NO: 2725 - DNA, 18 bp, Artificial Sequence
  synthetic circulating small noncoding RNA (sncRNA) 5' transfer RNA (tRNA) half
aggggtatgattctcggt

SEQ ID NO: 2726 - DNA, 35 bp, Artificial Sequence
  synthetic circulating small noncoding RNA (sncRNA) 5' transfer RNA (tRNA) half
acgcgggaggcccgggttcgattcccggcccatgc

SEQ ID NO: 2727 - DNA, 33 bp, Artificial Sequence
  synthetic circulating small noncoding RNA (sncRNA) 5' transfer RNA (tRNA) half
gcgactctggtgggactcgaacccacaaccttt

SEQ ID NO: 2728 - DNA, 21 bp, Artificial Sequence
  synthetic circulating small noncoding RNA (sncRNA) 5' transfer RNA (tRNA) half
agtcggtagagcatgagactc

SEQ ID NO: 2729 - DNA, 20 bp, Artificial Sequence
  synthetic circulating small noncoding RNA (sncRNA) 5' transfer RNA (tRNA) half
tcccatatggtctagcggtt

SEQ ID NO: 2730 - DNA, 14 bp, Artificial Sequence
  synthetic circulating small noncoding RNA (sncRNA) 5' transfer RNA (tRNA) half
cgaaccaccaacct

SEQ ID NO: 2731 - DNA, 16 bp, Artificial Sequence
  synthetic circulating small noncoding RNA (sncRNA) 5' transfer RNA (tRNA) half
gtaatggttagcactc

SEQ ID NO: 2732 - DNA, 21 bp, Artificial Sequence
  synthetic circulating small noncoding RNA (sncRNA) 5' transfer RNA (tRNA) half
tgctaataacgccaaggtcgc

SEQ ID NO: 2733 - DNA, 12 bp, Artificial Sequence
  synthetic circulating small noncoding RNA (sncRNA) 5' transfer RNA (tRNA) half
tccctgaccggg

SEQ ID NO: 2734 - DNA, 21 bp, Artificial Sequence
  synthetic circulating small noncoding RNA (sncRNA) 5' transfer RNA (tRNA) half
cccacaccgggagtcgaaccc

SEQ ID NO: 2735 - DNA, 36 bp, Artificial Sequence
  synthetic circulating small noncoding RNA (sncRNA) 5' transfer RNA (tRNA) half
tccgagccagccaggagtcgaacctggaatcttctg

SEQ ID NO: 2736 - DNA, 33 bp, Artificial Sequence
  synthetic circulating small noncoding RNA (sncRNA) 5' transfer RNA (tRNA) half
gtccctgggtgggctcgaaccaccaacctttcg

SEQ ID NO: 2737 - DNA, 30 bp, Artificial Sequence
  synthetic circulating small noncoding RNA (sncRNA) 5' transfer RNA (tRNA) half
ccccgtcggggaattgaaccccggtctccc

SEQ ID NO: 2738 - DNA, 19 bp, Artificial Sequence
  synthetic circulating small noncoding RNA (sncRNA) 5' transfer RNA (tRNA) half
caaactgtttccgcccggt

SEQ ID NO: 2739 - DNA, 11 bp, Artificial Sequence
  synthetic circulating small noncoding RNA (sncRNA) 5' transfer RNA (tRNA) half
acccgcgacct

SEQ ID NO: 2740 - DNA, 31 bp, Artificial Sequence
  synthetic circulating small noncoding RNA (sncRNA) 5' transfer RNA (tRNA) half
gaccccgacgtgatttgaacacgcaaccttc

SEQ ID NO: 2741 - DNA, 27 bp, Artificial Sequence
  synthetic circulating small noncoding RNA (sncRNA) 5' transfer RNA (tRNA) half
catagtgtagcggttatcacgtctgct

SEQ ID NO: 2742 - DNA, 34 bp, Artificial Sequence
  synthetic circulating small noncoding RNA (sncRNA) 5' transfer RNA (tRNA) half
agcctccctggtggtctagtggttaggattcggc

SEQ ID NO: 2743 - DNA, 27 bp, Artificial Sequence
  synthetic circulating small noncoding RNA (sncRNA) 5' transfer RNA (tRNA) half
caccgggagtcgaacccgggccgcctg

SEQ ID NO: 2744 - DNA, 32 bp, Artificial Sequence
  synthetic circulating small noncoding RNA (sncRNA) 5' transfer RNA (tRNA) half
gtcagacgcgttatccattgcgccactggccc

SEQ ID NO: 2745 - DNA, 23 bp, Artificial Sequence
  synthetic circulating small noncoding RNA (sncRNA) 5' transfer RNA (tRNA) half
cttccctgaccgggaatcgaacc

SEQ ID NO: 2746 - DNA, 15 bp, Artificial Sequence
  synthetic circulating small noncoding RNA (sncRNA) 5' transfer RNA (tRNA) half
agtctgatgctctac

SEQ ID NO: 2747 - DNA, 31 bp, Artificial Sequence
  synthetic circulating small noncoding RNA (sncRNA) 5' transfer RNA (tRNA) half
ccgaccacgaagggactcgaaccctcaatct

SEQ ID NO: 2748 - DNA, 22 bp, Artificial Sequence
  synthetic circulating small noncoding RNA (sncRNA) 5' transfer RNA (tRNA) half
tcgaatccgagtcacggcatta

SEQ ID NO: 2749 - DNA, 40 bp, Artificial Sequence
  synthetic circulating small noncoding RNA (sncRNA) 5' transfer RNA (tRNA) half
taagccagggattgtgggttcgagtcccatctggggtggt

SEQ ID NO: 2750 - DNA, 28 bp, Artificial Sequence
  synthetic circulating small noncoding RNA (sncRNA) 5' transfer RNA (tRNA) half
ccatgctctaccgactgagctagccggg

SEQ ID NO: 2751 - DNA, 16 bp, Artificial Sequence
  synthetic circulating small noncoding RNA (sncRNA) 5' transfer RNA (tRNA) half
gaagcgagaatcatac

SEQ ID NO: 2752 - DNA, 25 bp, Artificial Sequence
  synthetic circulating small noncoding RNA (sncRNA) 5' transfer RNA (tRNA) half
tccctggtggtctagtggttaggat

SEQ ID NO: 2753 - DNA, 18 bp, Artificial Sequence
  synthetic circulating small noncoding RNA (sncRNA) 5' transfer RNA (tRNA) half
ccactcggccaccgtgac

SEQ ID NO: 2754 - DNA, 33 bp, Artificial Sequence
  synthetic circulating small noncoding RNA (sncRNA) 5' transfer RNA (tRNA) half
accacgaagggactcgaacccccaatcttctga

SEQ ID NO: 2755 - DNA, 29 bp, Artificial Sequence
  synthetic circulating small noncoding RNA (sncRNA) 5' transfer RNA (tRNA) half
tgggtggttcagtggtagaattctcgcct

SEQ ID NO: 2756 - DNA, 25 bp, Artificial Sequence
  synthetic circulating small noncoding RNA (sncRNA) 5' transfer RNA (tRNA) half
gcggcccgggttcgattcccggtca

SEQ ID NO: 2757 - DNA, 37 bp, Artificial Sequence
  synthetic circulating small noncoding RNA (sncRNA) 5' transfer RNA (tRNA) half
gtgcattggccgggaatcgaacccgggcctcccgcgt

SEQ ID NO: 2758 - DNA, 25 bp, Artificial Sequence
  synthetic circulating small noncoding RNA (sncRNA) 5' transfer RNA (tRNA) half
gcgccgaatcctaaccactagacca

SEQ ID NO: 2759 - DNA, 15 bp, Artificial Sequence
  synthetic circulating small noncoding RNA (sncRNA) 5' transfer RNA (tRNA) half
gactgcgacctgaac

SEQ ID NO: 2760 - DNA, 20 bp, Artificial Sequence
  synthetic circulating small noncoding RNA (sncRNA) 5' transfer RNA (tRNA) half
gaacccgggccgcggcggtg

SEQ ID NO: 2761 - DNA, 28 bp, Artificial Sequence
  synthetic circulating small noncoding RNA (sncRNA) 5' transfer RNA (tRNA) half
ctgaccgggaatcgaacccgggccgcgg

SEQ ID NO: 2762 - DNA, 35 bp, Artificial Sequence
  synthetic circulating small noncoding RNA (sncRNA) 5' transfer RNA (tRNA) half
aggccccagcgagatttgaactcgcgacccctggt

SEQ ID NO: 2763 - DNA, 21 bp, Artificial Sequence
  synthetic circulating small noncoding RNA (sncRNA) 5' transfer RNA (tRNA) half
ctagtggtatgattctcagtt

SEQ ID NO: 2764 - DNA, 32 bp, Artificial Sequence
  synthetic circulating small noncoding RNA (sncRNA) 5' transfer RNA (tRNA) half
tttctgtagtgtagtggttatcacgctcgcct

SEQ ID NO: 2765 - DNA, 38 bp, Artificial Sequence
  synthetic circulating small noncoding RNA (sncRNA) 5' transfer RNA (tRNA) half
agcgactctggtgggactcgaacccacaacctttgaat

SEQ ID NO: 2766 - DNA, 22 bp, Artificial Sequence
  synthetic circulating small noncoding RNA (sncRNA) 5' transfer RNA (tRNA) half
gccgaatcctaaccactagacc

SEQ ID NO: 2767 - DNA, 22 bp, Artificial Sequence
  synthetic circulating small noncoding RNA (sncRNA) 5' transfer RNA (tRNA) half
gctctaccgactgagctatccg

SEQ ID NO: 2768 - DNA, 14 bp, Artificial Sequence
  synthetic circulating small noncoding RNA (sncRNA) 5' transfer RNA (tRNA) half
aaccccggtctccc

SEQ ID NO: 2769 - DNA, 36 bp, Artificial Sequence
  synthetic circulating small noncoding RNA (sncRNA) 5' transfer RNA (tRNA) half
gtcgactctggcgggactcgaacccgcaacctttga

SEQ ID NO: 2770 - DNA, 21 bp, Artificial Sequence
  synthetic circulating small noncoding RNA (sncRNA) 5' transfer RNA (tRNA) half
tcgattcccggcccatgcaga

SEQ ID NO: 2771 - DNA, 25 bp, Artificial Sequence
  synthetic circulating small noncoding RNA (sncRNA) 5' transfer RNA (tRNA) half
gggttcgactcccggtgtgggaacg

SEQ ID NO: 2772 - DNA, 35 bp, Artificial Sequence
  synthetic circulating small noncoding RNA (sncRNA) 5' transfer RNA (tRNA) half
tggagatgccggggatcgaacccggggcctcatac

SEQ ID NO: 2773 - DNA, 12 bp, Artificial Sequence
  synthetic circulating small noncoding RNA (sncRNA) 5' transfer RNA (tRNA) half
cggccacctcgt

SEQ ID NO: 2774 - DNA, 21 bp, Artificial Sequence
  synthetic circulating small noncoding RNA (sncRNA) 5' transfer RNA (tRNA) half
aggttccaccgagatttgaac

SEQ ID NO: 2775 - DNA, 32 bp, Artificial Sequence
  synthetic circulating small noncoding RNA (sncRNA) 5' transfer RNA (tRNA) half
ggcctcccgcgtggcaggcgagaattctacca

SEQ ID NO: 2776 - DNA, 33 bp, Artificial Sequence
  synthetic circulating small noncoding RNA (sncRNA) 5' transfer RNA (tRNA) half
atccagcgccttagaccgctcggccacactacc

SEQ ID NO: 2777 - DNA, 26 bp, Artificial Sequence
  synthetic circulating small noncoding RNA (sncRNA) 5' transfer RNA (tRNA) half
aggaatcctaaccgctagaccatgtg

SEQ ID NO: 2778 - DNA, 27 bp, Artificial Sequence
  synthetic circulating small noncoding RNA (sncRNA) 5' transfer RNA (tRNA) half
ggggatgtagctcagtggtagagcaca

SEQ ID NO: 2779 - DNA, 16 bp, Artificial Sequence
  synthetic circulating small noncoding RNA (sncRNA) 5' transfer RNA (tRNA) half
ccgagccagccaggag

SEQ ID NO: 2780 - DNA, 13 bp, Artificial Sequence
  synthetic circulating small noncoding RNA (sncRNA) 5' transfer RNA (tRNA) half
cgtcggggaatcg

SEQ ID NO: 2781 - DNA, 34 bp, Artificial Sequence
  synthetic circulating small noncoding RNA (sncRNA) 5' transfer RNA (tRNA) half
caggcggcccgggttcgactcccggtatgggaac

SEQ ID NO: 2782 - DNA, 17 bp, Artificial Sequence
  synthetic circulating small noncoding RNA (sncRNA) 5' transfer RNA (tRNA) half
gcgaatgtgataaccac

SEQ ID NO: 2783 - DNA, 17 bp, Artificial Sequence
  synthetic circulating small noncoding RNA (sncRNA) 5' transfer RNA (tRNA) half
ttccggctcgaaggact

SEQ ID NO: 2784 - DNA, 26 bp, Artificial Sequence
  synthetic circulating small noncoding RNA (sncRNA) 5' transfer RNA (tRNA) half
acatggtctagcggttaggattcctg

SEQ ID NO: 2785 - DNA, 31 bp, Artificial Sequence
  synthetic circulating small noncoding RNA (sncRNA) 5' transfer RNA (tRNA) half
aggcgagcgtgatgaccactacactacggaa

SEQ ID NO: 2786 - DNA, 18 bp, Artificial Sequence
  synthetic circulating small noncoding RNA (sncRNA) 5' transfer RNA (tRNA) half
ggggttagtactctgcgt

SEQ ID NO: 2787 - DNA, 20 bp, Artificial Sequence
  synthetic circulating small noncoding RNA (sncRNA) 5' transfer RNA (tRNA) half
acgacgaggatgggattcga

SEQ ID NO: 2788 - DNA, 33 bp, Artificial Sequence
  synthetic circulating small noncoding RNA (sncRNA) 5' transfer RNA (tRNA) half
agcaccaaagcctaaccactagaccaccaggga

SEQ ID NO: 2789 - DNA, 19 bp, Artificial Sequence
  synthetic circulating small noncoding RNA (sncRNA) 5' transfer RNA (tRNA) half
ggctcgttggtctaggggt

SEQ ID NO: 2790 - DNA, 33 bp, Artificial Sequence
  synthetic circulating small noncoding RNA (sncRNA) 5' transfer RNA (tRNA) half
cgcccgaacagggacttgaaccctggaccctca

SEQ ID NO: 2791 - DNA, 32 bp, Artificial Sequence
  synthetic circulating small noncoding RNA (sncRNA) 5' transfer RNA (tRNA) half
tccccgtcggggaatcgaaccccggtctcccg

SEQ ID NO: 2792 - DNA, 36 bp, Artificial Sequence
  synthetic circulating small noncoding RNA (sncRNA) 5' transfer RNA (tRNA) half
agtgcattggccgggaatcgaacccgggcctcccgc

SEQ ID NO: 2793 - DNA, 36 bp, Artificial Sequence
  synthetic circulating small noncoding RNA (sncRNA) 5' transfer RNA (tRNA) half
cagaagattccaggttcgactcctggctggctcgtt

SEQ ID NO: 2794 - DNA, 32 bp, Artificial Sequence
  synthetic circulating small noncoding RNA (sncRNA) 5' transfer RNA (tRNA) half
cacaccgggagtcgaacccgggccgcctgggt

SEQ ID NO: 2795 - DNA, 20 bp, Artificial Sequence
  synthetic circulating small noncoding RNA (sncRNA) 5' transfer RNA (tRNA) half
tcgacgaggatgggattcga

SEQ ID NO: 2796 - DNA, 19 bp, Artificial Sequence
  synthetic circulating small noncoding RNA (sncRNA) 5' transfer RNA (tRNA) half
gaagcgagaatcatacccc

SEQ ID NO: 2797 - DNA, 26 bp, Artificial Sequence
  synthetic circulating small noncoding RNA (sncRNA) 5' transfer RNA (tRNA) half
tctcatgctctaccgactgagctagc

SEQ ID NO: 2798 - DNA, 32 bp, Artificial Sequence
  synthetic circulating small noncoding RNA (sncRNA) 5' transfer RNA (tRNA) half
gaggtcccaccgagatttgaactcggatcgct

SEQ ID NO: 2799 - DNA, 27 bp, Artificial Sequence
  synthetic circulating small noncoding RNA (sncRNA) 5' transfer RNA (tRNA) half
ctagctcagtcggtagagcatgagact

SEQ ID NO: 2800 - DNA, 20 bp, Artificial Sequence
  synthetic circulating small noncoding RNA (sncRNA) 5' transfer RNA (tRNA) half
gcggcccgggttcgattccc

SEQ ID NO: 2801 - DNA, 13 bp, Artificial Sequence
  synthetic circulating small noncoding RNA (sncRNA) 5' transfer RNA (tRNA) half
ggtcccaccgaga

SEQ ID NO: 2802 - DNA, 20 bp, Artificial Sequence
  synthetic circulating small noncoding RNA (sncRNA) 5' transfer RNA (tRNA) half
accaggaatcctaaccgcta

SEQ ID NO: 2803 - DNA, 15 bp, Artificial Sequence
  synthetic circulating small noncoding RNA (sncRNA) 5' transfer RNA (tRNA) half
cagagtgctaaccat

SEQ ID NO: 2804 - DNA, 36 bp, Artificial Sequence
  synthetic circulating small noncoding RNA (sncRNA) 5' transfer RNA (tRNA) half
ccaggcggcccgggttcgactcccggtgtgggaacg

SEQ ID NO: 2805 - DNA, 12 bp, Artificial Sequence
  synthetic circulating small noncoding RNA (sncRNA) 5' transfer RNA (tRNA) half
cgtagtcggcag

SEQ ID NO: 2806 - DNA, 34 bp, Artificial Sequence
  synthetic circulating small noncoding RNA (sncRNA) 5' transfer RNA (tRNA) half
gtttctgtagtgtagtggttatcacgctcgccta

SEQ ID NO: 2807 - DNA, 17 bp, Artificial Sequence
  synthetic circulating small noncoding RNA (sncRNA) 5' transfer RNA (tRNA) half
cagtggtagaattctcg

SEQ ID NO: 2808 - DNA, 11 bp, Artificial Sequence
  synthetic circulating small noncoding RNA (sncRNA) 5' transfer RNA (tRNA) half
aggtcccgggt

SEQ ID NO: 2809 - DNA, 26 bp, Artificial Sequence
  synthetic circulating small noncoding RNA (sncRNA) 5' transfer RNA (tRNA) half
ccatgctctaccgactgagctagccg

SEQ ID NO: 2810 - DNA, 13 bp, Artificial Sequence
  synthetic circulating small noncoding RNA (sncRNA) 5' transfer RNA (tRNA) half
tatgattctcgct

SEQ ID NO: 2811 - DNA, 32 bp, Artificial Sequence
  synthetic circulating small noncoding RNA (sncRNA) 5' transfer RNA (tRNA) half
ttcccacaccgggagtcgaacccgggccgcct

SEQ ID NO: 2812 - DNA, 31 bp, Artificial Sequence
  synthetic circulating small noncoding RNA (sncRNA) 5' transfer RNA (tRNA) half
ccacaccgggagtcgaacccgggccgcctgg

SEQ ID NO: 2813 - DNA, 34 bp, Artificial Sequence
  synthetic circulating small noncoding RNA (sncRNA) 5' transfer RNA (tRNA) half
ggaggcgagaattctaccattgaaccaccaatgc

SEQ ID NO: 2814 - DNA, 20 bp, Artificial Sequence
  synthetic circulating small noncoding RNA (sncRNA) 5' transfer RNA (tRNA) half
tctaccgactgagctatccg

SEQ ID NO: 2815 - DNA, 20 bp, Artificial Sequence
  synthetic circulating small noncoding RNA (sncRNA) 5' transfer RNA (tRNA) half
gagtctcatgctctaccgac

SEQ ID NO: 2816 - DNA, 23 bp, Artificial Sequence
  synthetic circulating small noncoding RNA (sncRNA) 5' transfer RNA (tRNA) half
aaaccaggaatcctaaccgctag

SEQ ID NO: 2817 - DNA, 34 bp, Artificial Sequence
  synthetic circulating small noncoding RNA (sncRNA) 5' transfer RNA (tRNA) half
aggcggcccgggttcgactcccggtgtgggaaac

SEQ ID NO: 2818 - DNA, 38 bp, Artificial Sequence
  synthetic circulating small noncoding RNA (sncRNA) 5' transfer RNA (tRNA) half
gtaaacaggagatcctgggttcaaatcccagcggggcc

SEQ ID NO: 2819 - DNA, 16 bp, Artificial Sequence
  synthetic circulating small noncoding RNA (sncRNA) 5' transfer RNA (tRNA) half
gtggttaggattcggc

SEQ ID NO: 2820 - DNA, 35 bp, Artificial Sequence
  synthetic circulating small noncoding RNA (sncRNA) 5' transfer RNA (tRNA) half
cgcccaacgtggggctcgaacccacgaccctgaga

SEQ ID NO: 2821 - DNA, 36 bp, Artificial Sequence
  synthetic circulating small noncoding RNA (sncRNA) 5' transfer RNA (tRNA) half
gcctccccgtcggggaatcgaaccccggtctcccgc

SEQ ID NO: 2822 - DNA, 11 bp, Artificial Sequence
  synthetic circulating small noncoding RNA (sncRNA) 5' transfer RNA (tRNA) half
cggacgagccc

SEQ ID NO: 2823 - DNA, 16 bp, Artificial Sequence
  synthetic circulating small noncoding RNA (sncRNA) 5' transfer RNA (tRNA) half
tggttaggattcggcg

SEQ ID NO: 2824 - DNA, 22 bp, Artificial Sequence
  synthetic circulating small noncoding RNA (sncRNA) 5' transfer RNA (tRNA) half
ttcgactcccggtatgggaaca

SEQ ID NO: 2825 - DNA, 20 bp, Artificial Sequence
  synthetic circulating small noncoding RNA (sncRNA) 5' transfer RNA (tRNA) half
tccccggcacctccagtttt

SEQ ID NO: 2826 - DNA, 32 bp, Artificial Sequence
  synthetic circulating small noncoding RNA (sncRNA) 5' transfer RNA (tRNA) half
cccggatagctcagtcggtagagcatcagact

SEQ ID NO: 2827 - DNA, 36 bp, Artificial Sequence
  synthetic circulating small noncoding RNA (sncRNA) 5' transfer RNA (tRNA) half
gagagcgccgaatcctaaccactagaccaccaggga

SEQ ID NO: 2828 - DNA, 21 bp, Artificial Sequence
  synthetic circulating small noncoding RNA (sncRNA) 5' transfer RNA (tRNA) half
cgaatgtgataaccactacac

SEQ ID NO: 2829 - DNA, 22 bp, Artificial Sequence
  synthetic circulating small noncoding RNA (sncRNA) 5' transfer RNA (tRNA) half
tcgtaaaccgaagatcgcgggt

SEQ ID NO: 2830 - DNA, 13 bp, Artificial Sequence
  synthetic circulating small noncoding RNA (sncRNA) 5' transfer RNA (tRNA) half
gagatgccgggga

SEQ ID NO: 2831 - DNA, 20 bp, Artificial Sequence
  synthetic circulating small noncoding RNA (sncRNA) 5' transfer RNA (tRNA) half
gccgtgactcggattcgaac

SEQ ID NO: 2832 - DNA, 33 bp, Artificial Sequence
  synthetic circulating small noncoding RNA (sncRNA) 5' transfer RNA (tRNA) half
ggcgagaattctaccattgaaccaccaatgcac

SEQ ID NO: 2833 - DNA, 32 bp, Artificial Sequence
  synthetic circulating small noncoding RNA (sncRNA) 5' transfer RNA (tRNA) half
aaccaggaatcctaaccgctagaccatatggg

SEQ ID NO: 2834 - DNA, 17 bp, Artificial Sequence
  synthetic circulating small noncoding RNA (sncRNA) 5' transfer RNA (tRNA) half
tccaatgcgctatccat

SEQ ID NO: 2835 - DNA, 24 bp, Artificial Sequence
  synthetic circulating small noncoding RNA (sncRNA) 5' transfer RNA (tRNA) half
gattcagagtccagagtgctaacc

SEQ ID NO: 2836 - DNA, 31 bp, Artificial Sequence
  synthetic circulating small noncoding RNA (sncRNA) 5' transfer RNA (tRNA) half
aggggtcgcgagttcaaatctcgctggggcc

SEQ ID NO: 2837 - DNA, 20 bp, Artificial Sequence
  synthetic circulating small noncoding RNA (sncRNA) 5' transfer RNA (tRNA) half
ctctaccgactgagctatcc

SEQ ID NO: 2838 - DNA, 23 bp, Artificial Sequence
  synthetic circulating small noncoding RNA (sncRNA) 5' transfer RNA (tRNA) half
accgactgagctatccgggctct

SEQ ID NO: 2839 - DNA, 31 bp, Artificial Sequence
  synthetic circulating small noncoding RNA (sncRNA) 5' transfer RNA (tRNA) half
cgggaggcccgggttcgattcccggccaatg

SEQ ID NO: 2840 - DNA, 22 bp, Artificial Sequence
  synthetic circulating small noncoding RNA (sncRNA) 5' transfer RNA (tRNA) half
ttcgactcccggtgtgggaaac

SEQ ID NO: 2841 - DNA, 34 bp, Artificial Sequence
  synthetic circulating small noncoding RNA (sncRNA) 5' transfer RNA (tRNA) half
tctaaaggtccctggttcgatcccgggtttcggc

SEQ ID NO: 2842 - DNA, 34 bp, Artificial Sequence
  synthetic circulating small noncoding RNA (sncRNA) 5' transfer RNA (tRNA) half
ccaggcggcccgggttcgactcccggtgtgggaa

SEQ ID NO: 2843 - DNA, 16 bp, Artificial Sequence
  synthetic circulating small noncoding RNA (sncRNA) 5' transfer RNA (tRNA) half
actgaaccaccaatgc

SEQ ID NO: 2844 - DNA, 35 bp, Artificial Sequence
  synthetic circulating small noncoding RNA (sncRNA) 5' transfer RNA (tRNA) half
cgactccgccgggactcgaacccggaacctttgaa

SEQ ID NO: 2845 - DNA, 25 bp, Artificial Sequence
  synthetic circulating small noncoding RNA (sncRNA) 5' transfer RNA (tRNA) half
gatgctctaccgactgagctatccg

SEQ ID NO: 2846 - DNA, 13 bp, Artificial Sequence
  synthetic circulating small noncoding RNA (sncRNA) 5' transfer RNA (tRNA) half
acgcgggaggccc

SEQ ID NO: 2847 - DNA, 19 bp, Artificial Sequence
  synthetic circulating small noncoding RNA (sncRNA) 5' transfer RNA (tRNA) half
ttcgagccccagtggaacc

SEQ ID NO: 2848 - DNA, 22 bp, Artificial Sequence
  synthetic circulating small noncoding RNA (sncRNA) 5' transfer RNA (tRNA) half
ggttcagtggtagaattctcgc

SEQ ID NO: 2849 - DNA, 15 bp, Artificial Sequence
  synthetic circulating small noncoding RNA (sncRNA) 5' transfer RNA (tRNA) half
tgctctaccgactga

SEQ ID NO: 2850 - DNA, 39 bp, Artificial Sequence
  synthetic circulating small noncoding RNA (sncRNA) 5' transfer RNA (tRNA) half
acccgggccgcggcggtgagagcgccgaatcctaaccac

SEQ ID NO: 2851 - DNA, 22 bp, Artificial Sequence
  synthetic circulating small noncoding RNA (sncRNA) 5' transfer RNA (tRNA) half
ggcaggcgagaattctaccact

SEQ ID NO: 2852 - DNA, 35 bp, Artificial Sequence
  synthetic circulating small noncoding RNA (sncRNA) 5' transfer RNA (tRNA) half
aagcctccctggtggtctagtggttaggattcggc

SEQ ID NO: 2853 - DNA, 22 bp, Artificial Sequence
  synthetic circulating small noncoding RNA (sncRNA) 5' transfer RNA (tRNA) half
aggattcggcgctctcaccgcc

SEQ ID NO: 2854 - DNA, 16 bp, Artificial Sequence
  synthetic circulating small noncoding RNA (sncRNA) 5' transfer RNA (tRNA) half
atggttagcactctgg

SEQ ID NO: 2855 - DNA, 33 bp, Artificial Sequence
  synthetic circulating small noncoding RNA (sncRNA) 5' transfer RNA (tRNA) half
gactctggcgggactcgaacccgcaacctttga

SEQ ID NO: 2856 - DNA, 36 bp, Artificial Sequence
  synthetic circulating small noncoding RNA (sncRNA) 5' transfer RNA (tRNA) half
cgagccagccaggagtcgaacctagaatcttctgat

SEQ ID NO: 2857 - DNA, 15 bp, Artificial Sequence
  synthetic circulating small noncoding RNA (sncRNA) 5' transfer RNA (tRNA) half
tccccgacggggaga

SEQ ID NO: 2858 - DNA, 17 bp, Artificial Sequence
  synthetic circulating small noncoding RNA (sncRNA) 5' transfer RNA (tRNA) half
agtctgatgctctaccg

SEQ ID NO: 2859 - DNA, 23 bp, Artificial Sequence
  synthetic circulating small noncoding RNA (sncRNA) 5' transfer RNA (tRNA) half
gtgtaatggttagcactctggac

SEQ ID NO: 2860 - DNA, 25 bp, Artificial Sequence
  synthetic circulating small noncoding RNA (sncRNA) 5' transfer RNA (tRNA) half
tagtgtagcggttatcacgtctgct

SEQ ID NO: 2861 - DNA, 19 bp, Artificial Sequence
  synthetic circulating small noncoding RNA (sncRNA) 5' transfer RNA (tRNA) half
cgacgaggatgggattcga

SEQ ID NO: 2862 - DNA, 21 bp, Artificial Sequence
  synthetic circulating small noncoding RNA (sncRNA) 5' transfer RNA (tRNA) half
tagtggttatcacgttcgcct

SEQ ID NO: 2863 - DNA, 19 bp, Artificial Sequence
  synthetic circulating small noncoding RNA (sncRNA) 5' transfer RNA (tRNA) half
tcccatgctctaccgactg

SEQ ID NO: 2864 - DNA, 24 bp, Artificial Sequence
  synthetic circulating small noncoding RNA (sncRNA) 5' transfer RNA (tRNA) half
gggttcgattccccgacggggaga

SEQ ID NO: 2865 - DNA, 14 bp, Artificial Sequence
  synthetic circulating small noncoding RNA (sncRNA) 5' transfer RNA (tRNA) half
ttaggattcggcgc

SEQ ID NO: 2866 - DNA, 34 bp, Artificial Sequence
  synthetic circulating small noncoding RNA (sncRNA) 5' transfer RNA (tRNA) half
cctccccgtcggggaattgaaccccggtctcccg

SEQ ID NO: 2867 - DNA, 27 bp, Artificial Sequence
  synthetic circulating small noncoding RNA (sncRNA) 5' transfer RNA (tRNA) half
gggggtgtagctcagtggtagagcgca

SEQ ID NO: 2868 - DNA, 36 bp, Artificial Sequence
  synthetic circulating small noncoding RNA (sncRNA) 5' transfer RNA (tRNA) half
taacgccaaggtcgcgggttcgatccccgtacgggc

SEQ ID NO: 2869 - DNA, 25 bp, Artificial Sequence
  synthetic circulating small noncoding RNA (sncRNA) 5' transfer RNA (tRNA) half
ggctcgttggtctaggggtatgatt

SEQ ID NO: 2870 - DNA, 32 bp, Artificial Sequence
  synthetic circulating small noncoding RNA (sncRNA) 5' transfer RNA (tRNA) half
gcagcaacctcggttcgaatccgagtcacggc

SEQ ID NO: 2871 - DNA, 24 bp, Artificial Sequence
  synthetic circulating small noncoding RNA (sncRNA) 5' transfer RNA (tRNA) half
ggtggagatgccggggatcgaacc

SEQ ID NO: 2872 - DNA, 26 bp, Artificial Sequence
  synthetic circulating small noncoding RNA (sncRNA) 5' transfer RNA (tRNA) half
gtgacaggcggggatactcaccacta

SEQ ID NO: 2873 - DNA, 30 bp, Artificial Sequence
  synthetic circulating small noncoding RNA (sncRNA) 5' transfer RNA (tRNA) half
tcgctggttcgattccggctcgaaggactt

SEQ ID NO: 2874 - DNA, 17 bp, Artificial Sequence
  synthetic circulating small noncoding RNA (sncRNA) 5' transfer RNA (tRNA) half
cactcggccatcctgac

SEQ ID NO: 2875 - DNA, 15 bp, Artificial Sequence
  synthetic circulating small noncoding RNA (sncRNA) 5' transfer RNA (tRNA) half
ttcccgggcggcgca

SEQ ID NO: 2876 - DNA, 21 bp, Artificial Sequence
  synthetic circulating small noncoding RNA (sncRNA) 5' transfer RNA (tRNA) half
taaccgctagaccatatggga

SEQ ID NO: 2877 - DNA, 31 bp, Artificial Sequence
  synthetic circulating small noncoding RNA (sncRNA) 5' transfer RNA (tRNA) half
tttccgtagtgtagtggttatcacgctcgcc

SEQ ID NO: 2878 - DNA, 14 bp, Artificial Sequence
  synthetic circulating small noncoding RNA (sncRNA) 5' transfer RNA (tRNA) half
cgaacctggaatct

SEQ ID NO: 2879 - DNA, 14 bp, Artificial Sequence
  synthetic circulating small noncoding RNA (sncRNA) 5' transfer RNA (tRNA) half
tgccgtgactcgga

SEQ ID NO: 2880 - DNA, 18 bp, Artificial Sequence
  synthetic circulating small noncoding RNA (sncRNA) 5' transfer RNA (tRNA) half
acccacgcctccattcgg

SEQ ID NO: 2881 - DNA, 21 bp, Artificial Sequence
  synthetic circulating small noncoding RNA (sncRNA) 5' transfer RNA (tRNA) half
aatcccaccgctgccatcttt

SEQ ID NO: 2882 - DNA, 22 bp, Artificial Sequence
  synthetic circulating small noncoding RNA (sncRNA) 5' transfer RNA (tRNA) half
ctaaccgctagaccatgtggga

SEQ ID NO: 2883 - DNA, 40 bp, Artificial Sequence
  synthetic circulating small noncoding RNA (sncRNA) 5' transfer RNA (tRNA) half
aactcggatcgctggattcagagtccagagtgctaaccat

SEQ ID NO: 2884 - DNA, 14 bp, Artificial Sequence
  synthetic circulating small noncoding RNA (sncRNA) 5' transfer RNA (tRNA) half
cgacgaggatggga

SEQ ID NO: 2885 - DNA, 22 bp, Artificial Sequence
  synthetic circulating small noncoding RNA (sncRNA) 5' transfer RNA (tRNA) half
gcgccgaatcctaaccactaga

SEQ ID NO: 2886 - DNA, 32 bp, Artificial Sequence
  synthetic circulating small noncoding RNA (sncRNA) 5' transfer RNA (tRNA) half
tcccataccgggagtcgaacccgggccgcctg

SEQ ID NO: 2887 - DNA, 31 bp, Artificial Sequence
  synthetic circulating small noncoding RNA (sncRNA) 5' transfer RNA (tRNA) half
tcttgcgacccgggttcgattcccgggcggc

SEQ ID NO: 2888 - DNA, 27 bp, Artificial Sequence
  synthetic circulating small noncoding RNA (sncRNA) 5' transfer RNA (tRNA) half
ccacatggtctagcggttaggattcct

SEQ ID NO: 2889 - DNA, 34 bp, Artificial Sequence
  synthetic circulating small noncoding RNA (sncRNA) 5' transfer RNA (tRNA) half
agggggcacccggatttgaaccggggacctcttg

SEQ ID NO: 2890 - DNA, 29 bp, Artificial Sequence
  synthetic circulating small noncoding RNA (sncRNA) 5' transfer RNA (tRNA) half
gcaacctcggttcgaatccgagtcacggc

SEQ ID NO: 2891 - DNA, 19 bp, Artificial Sequence
  synthetic circulating small noncoding RNA (sncRNA) 5' transfer RNA (tRNA) half
gtcggtagagcatcagact

SEQ ID NO: 2892 - DNA, 16 bp, Artificial Sequence
  synthetic circulating small noncoding RNA (sncRNA) 5' transfer RNA (tRNA) half
ctcccggtgtgggaac

SEQ ID NO: 2893 - DNA, 28 bp, Artificial Sequence
  synthetic circulating small noncoding RNA (sncRNA) 5' transfer RNA (tRNA) half
tgggtggttcagtggtagaattctcgcc

SEQ ID NO: 2894 - DNA, 34 bp, Artificial Sequence
  synthetic circulating small noncoding RNA (sncRNA) 5' transfer RNA (tRNA) half
acgcgggagaccggggttcgattccccgacgggg

SEQ ID NO: 2895 - DNA, 24 bp, Artificial Sequence
  synthetic circulating small noncoding RNA (sncRNA) 5' transfer RNA (tRNA) half
gggccgcggcggtgagagcgccga

SEQ ID NO: 2896 - DNA, 13 bp, Artificial Sequence
  synthetic circulating small noncoding RNA (sncRNA) 5' transfer RNA (tRNA) half
tcttcgggggcgt

SEQ ID NO: 2897 - DNA, 33 bp, Artificial Sequence
  synthetic circulating small noncoding RNA (sncRNA) 5' transfer RNA (tRNA) half
cagaagattgcaggttcgagtcctgccgcggtc

SEQ ID NO: 2898 - DNA, 28 bp, Artificial Sequence
  synthetic circulating small noncoding RNA (sncRNA) 5' transfer RNA (tRNA) half
ccaggcggcccgggttcgactcccggtg

SEQ ID NO: 2899 - DNA, 26 bp, Artificial Sequence
  synthetic circulating small noncoding RNA (sncRNA) 5' transfer RNA (tRNA) half
gcccagcacgcttccgctgcgccact

SEQ ID NO: 2900 - DNA, 31 bp, Artificial Sequence
  synthetic circulating small noncoding RNA (sncRNA) 5' transfer RNA (tRNA) half
gtcaaatgctctacccctgagctatgccccc

SEQ ID NO: 2901 - DNA, 14 bp, Artificial Sequence
  synthetic circulating small noncoding RNA (sncRNA) 5' transfer RNA (tRNA) half
gtagagcatgagac

SEQ ID NO: 2902 - DNA, 35 bp, Artificial Sequence
  synthetic circulating small noncoding RNA (sncRNA) 5' transfer RNA (tRNA) half
tgccccgtgtgaggatcgaactcacgaccttcaga

SEQ ID NO: 2903 - DNA, 37 bp, Artificial Sequence
  synthetic circulating small noncoding RNA (sncRNA) 5' transfer RNA (tRNA) half
gaccccgacgtgattcgaacacgcagccttctgatct

SEQ ID NO: 2904 - DNA, 36 bp, Artificial Sequence
  synthetic circulating small noncoding RNA (sncRNA) 5' transfer RNA (tRNA) half
gcgactctggtgggactcgaacccacaacctttgaa

SEQ ID NO: 2905 - DNA, 14 bp, Artificial Sequence
  synthetic circulating small noncoding RNA (sncRNA) 5' transfer RNA (tRNA) half
tcctgccgactacg

SEQ ID NO: 2906 - DNA, 14 bp, Artificial Sequence
  synthetic circulating small noncoding RNA (sncRNA) 5' transfer RNA (tRNA) half
ggcccagcacgctt

SEQ ID NO: 2907 - DNA, 13 bp, Artificial Sequence
  synthetic circulating small noncoding RNA (sncRNA) 5' transfer RNA (tRNA) half
cgagccagccagg

SEQ ID NO: 2908 - DNA, 37 bp, Artificial Sequence
  synthetic circulating small noncoding RNA (sncRNA) 5' transfer RNA (tRNA) half
gaaggccccagcgagatttgaactcgcgacccctggt

SEQ ID NO: 2909 - DNA, 12 bp, Artificial Sequence
  synthetic circulating small noncoding RNA (sncRNA) 5' transfer RNA (tRNA) half
gtcaggatggcc

SEQ ID NO: 2910 - DNA, 35 bp, Artificial Sequence
  synthetic circulating small noncoding RNA (sncRNA) 5' transfer RNA (tRNA) half
tgccccctctgaggttcgaactcaggaccttcaga

SEQ ID NO: 2911 - DNA, 28 bp, Artificial Sequence
  synthetic circulating small noncoding RNA (sncRNA) 5' transfer RNA (tRNA) half
cccataccgggagtcgaacccgggccgc

SEQ ID NO: 2912 - DNA, 19 bp, Artificial Sequence
  synthetic circulating small noncoding RNA (sncRNA) 5' transfer RNA (tRNA) half
ggtagcgtggccgagcggt

SEQ ID NO: 2913 - DNA, 16 bp, Artificial Sequence
  synthetic circulating small noncoding RNA (sncRNA) 5' transfer RNA (tRNA) half
ggtggagatgccgggg

SEQ ID NO: 2914 - DNA, 17 bp, Artificial Sequence
  synthetic circulating small noncoding RNA (sncRNA) 5' transfer RNA (tRNA) half
tcccacatggtctagcg

SEQ ID NO: 2915 - DNA, 19 bp, Artificial Sequence
  synthetic circulating small noncoding RNA (sncRNA) 5' transfer RNA (tRNA) half
gttcgactcccggtgtggg

SEQ ID NO: 2916 - DNA, 30 bp, Artificial Sequence
  synthetic circulating small noncoding RNA (sncRNA) 5' transfer RNA (tRNA) half
gcattggccgggaatcgaacccgggcctcc

SEQ ID NO: 2917 - DNA, 32 bp, Artificial Sequence
  synthetic circulating small noncoding RNA (sncRNA) 5' transfer RNA (tRNA) half
ccgccgcggcccgggttcgattcccggtcagg

SEQ ID NO: 2918 - DNA, 25 bp, Artificial Sequence
  synthetic circulating small noncoding RNA (sncRNA) 5' transfer RNA (tRNA) half
cggaagcgtgctgggcccataaccc

SEQ ID NO: 2919 - DNA, 33 bp, Artificial Sequence
  synthetic circulating small noncoding RNA (sncRNA) 5' transfer RNA (tRNA) half
ggtttccgtagtgtagtggttatcacgttcgcc

SEQ ID NO: 2920 - DNA, 34 bp, Artificial Sequence
  synthetic circulating small noncoding RNA (sncRNA) 5' transfer RNA (tRNA) half
cgcccggctagctcagtcggtagagcatgagact

SEQ ID NO: 2921 - DNA, 38 bp, Artificial Sequence
  synthetic circulating small noncoding RNA (sncRNA) 5' transfer RNA (tRNA) half
ggttagcactctggactctgaatccagcgatccgagtt

SEQ ID NO: 2922 - DNA, 27 bp, Artificial Sequence
  synthetic circulating small noncoding RNA (sncRNA) 5' transfer RNA (tRNA) half
aggaatcctaaccgctagaccatatgg

SEQ ID NO: 2923 - DNA, 33 bp, Artificial Sequence
  synthetic circulating small noncoding RNA (sncRNA) 5' transfer RNA (tRNA) half
aaaccaggaatcctaaccgctagaccatatggg

SEQ ID NO: 2924 - DNA, 28 bp, Artificial Sequence
  synthetic circulating small noncoding RNA (sncRNA) 5' transfer RNA (tRNA) half
ccggatgatcctcagtggtctggggtgc

SEQ ID NO: 2925 - DNA, 22 bp, Artificial Sequence
  synthetic circulating small noncoding RNA (sncRNA) 5' transfer RNA (tRNA) half
tccagagtgctaaccattacac

SEQ ID NO: 2926 - DNA, 14 bp, Artificial Sequence
  synthetic circulating small noncoding RNA (sncRNA) 5' transfer RNA (tRNA) half
gtcccatgctctac

SEQ ID NO: 2927 - DNA, 34 bp, Artificial Sequence
  synthetic circulating small noncoding RNA (sncRNA) 5' transfer RNA (tRNA) half
gtgcattggccgggaatcgaacccgggcctcccg

SEQ ID NO: 2928 - DNA, 19 bp, Artificial Sequence
  synthetic circulating small noncoding RNA (sncRNA) 5' transfer RNA (tRNA) half
cgactcccggtgtgggaac

SEQ ID NO: 2929 - DNA, 30 bp, Artificial Sequence
  synthetic circulating small noncoding RNA (sncRNA) 5' transfer RNA (tRNA) half
ccataccgggagtcgaacccgggccgcctg

SEQ ID NO: 2930 - DNA, 26 bp, Artificial Sequence
  synthetic circulating small noncoding RNA (sncRNA) 5' transfer RNA (tRNA) half
ggtggagatgccggggatcgaacccg

SEQ ID NO: 2931 - DNA, 19 bp, Artificial Sequence
  synthetic circulating small noncoding RNA (sncRNA) 5' transfer RNA (tRNA) half
gtagtcgtggccgagtggt

SEQ ID NO: 2932 - DNA, 13 bp, Artificial Sequence
  synthetic circulating small noncoding RNA (sncRNA) 5' transfer RNA (tRNA) half
ggctcgtccggga

SEQ ID NO: 2933 - DNA, 22 bp, Artificial Sequence
  synthetic circulating small noncoding RNA (sncRNA) 5' transfer RNA (tRNA) half
ctcagtcggtagagcatgagac

SEQ ID NO: 2934 - DNA, 18 bp, Artificial Sequence
  synthetic circulating small noncoding RNA (sncRNA) 5' transfer RNA (tRNA) half
gatgctctaccgactgag

SEQ ID NO: 2935 - DNA, 20 bp, Artificial Sequence
  synthetic circulating small noncoding RNA (sncRNA) 5' transfer RNA (tRNA) half
ctaggggtatgattctcggt

SEQ ID NO: 2936 - DNA, 29 bp, Artificial Sequence
  synthetic circulating small noncoding RNA (sncRNA) 5' transfer RNA (tRNA) half
gcccggatgatcctcagtggtctggggtg

SEQ ID NO: 2937 - DNA, 38 bp, Artificial Sequence
  synthetic circulating small noncoding RNA (sncRNA) 5' transfer RNA (tRNA) half
gtcgagccagccaggagtcgaacctagaatcttctgat

SEQ ID NO: 2938 - DNA, 21 bp, Artificial Sequence
  synthetic circulating small noncoding RNA (sncRNA) 5' transfer RNA (tRNA) half
ttcccacaccgggagtcgaac

SEQ ID NO: 2939 - DNA, 9 bp, Artificial Sequence
  synthetic circulating small noncoding RNA (sncRNA) 5' transfer RNA (tRNA) half
gccgtgact

SEQ ID NO: 2940 - DNA, 19 bp, Artificial Sequence
  synthetic circulating small noncoding RNA (sncRNA) 5' transfer RNA (tRNA) half
ccagagtgctaaccattac

SEQ ID NO: 2941 - DNA, 29 bp, Artificial Sequence
  synthetic circulating small noncoding RNA (sncRNA) 5' transfer RNA (tRNA) half
ccacaccgggagtcgaacccgggccgcct

SEQ ID NO: 2942 - DNA, 15 bp, Artificial Sequence
  synthetic circulating small noncoding RNA (sncRNA) 5' transfer RNA (tRNA) half
ctatactaacgagga

SEQ ID NO: 2943 - DNA, 19 bp, Artificial Sequence
  synthetic circulating small noncoding RNA (sncRNA) 5' transfer RNA (tRNA) half
gtcaggatggccgagcggt

SEQ ID NO: 2944 - DNA, 18 bp, Artificial Sequence
  synthetic circulating small noncoding RNA (sncRNA) 5' transfer RNA (tRNA) half
tagcggttatcacgtctg

SEQ ID NO: 2945 - DNA, 28 bp, Artificial Sequence
  synthetic circulating small noncoding RNA (sncRNA) 5' transfer RNA (tRNA) half
aatgtgataaccactacactacggaaac

SEQ ID NO: 2946 - DNA, 20 bp, Artificial Sequence
  synthetic circulating small noncoding RNA (sncRNA) 5' transfer RNA (tRNA) half
tcgaatcccatcctcgtcgt

SEQ ID NO: 2947 - DNA, 34 bp, Artificial Sequence
  synthetic circulating small noncoding RNA (sncRNA) 5' transfer RNA (tRNA) half
tctcagggtcgtgggttcgagccccacgttgggc

SEQ ID NO: 2948 - DNA, 15 bp, Artificial Sequence
  synthetic circulating small noncoding RNA (sncRNA) 5' transfer RNA (tRNA) half
ctctaccgactgagc

SEQ ID NO: 2949 - DNA, 21 bp, Artificial Sequence
  synthetic circulating small noncoding RNA (sncRNA) 5' transfer RNA (tRNA) half
acaacgcagagtactaaccac

SEQ ID NO: 2950 - DNA, 16 bp, Artificial Sequence
  synthetic circulating small noncoding RNA (sncRNA) 5' transfer RNA (tRNA) half
gatgccggggatcgaa

SEQ ID NO: 2951 - DNA, 25 bp, Artificial Sequence
  synthetic circulating small noncoding RNA (sncRNA) 5' transfer RNA (tRNA) half
tcccgcgtggcaggcgagaattcta

SEQ ID NO: 2952 - DNA, 12 bp, Artificial Sequence
  synthetic circulating small noncoding RNA (sncRNA) 5' transfer RNA (tRNA) half
gcgcccgaacag

SEQ ID NO: 2953 - DNA, 17 bp, Artificial Sequence
  synthetic circulating small noncoding RNA (sncRNA) 5' transfer RNA (tRNA) half
cactagaccaccaggga

SEQ ID NO: 2954 - DNA, 31 bp, Artificial Sequence
  synthetic circulating small noncoding RNA (sncRNA) 5' transfer RNA (tRNA) half
ccccgtcggggaatcgaaccccggtctcccg

SEQ ID NO: 2955 - DNA, 12 bp, Artificial Sequence
  synthetic circulating small noncoding RNA (sncRNA) 5' transfer RNA (tRNA) half
gcccgggttcga

SEQ ID NO: 2956 - DNA, 16 bp, Artificial Sequence
  synthetic circulating small noncoding RNA (sncRNA) 5' transfer RNA (tRNA) half
actcggccacctcgtc

SEQ ID NO: 2957 - DNA, 41 bp, Artificial Sequence
  synthetic circulating small noncoding RNA (sncRNA) 5' transfer RNA (tRNA) half
gcccggctagctcagtcggtagagcatgagactcttaatct

SEQ ID NO: 2958 - DNA, 13 bp, Artificial Sequence
  synthetic circulating small noncoding RNA (sncRNA) 5' transfer RNA (tRNA) half
cgacgaggatggg

SEQ ID NO: 2959 - DNA, 34 bp, Artificial Sequence
  synthetic circulating small noncoding RNA (sncRNA) 5' transfer RNA (tRNA) half
tcttgcgacccgggttcgattcccgggcggcgca

SEQ ID NO: 2960 - DNA, 28 bp, Artificial Sequence
  synthetic circulating small noncoding RNA (sncRNA) 5' transfer RNA (tRNA) half
tcccgcgtggcaggcgagaattctacca

SEQ ID NO: 2961 - DNA, 34 bp, Artificial Sequence
  synthetic circulating small noncoding RNA (sncRNA) 5' transfer RNA (tRNA) half
gaagattgcaggttcgagtcctgccgcggtcgac

SEQ ID NO: 2962 - DNA, 16 bp, Artificial Sequence
  synthetic circulating small noncoding RNA (sncRNA) 5' transfer RNA (tRNA) half
gctagaccatatggga

SEQ ID NO: 2963 - DNA, 10 bp, Artificial Sequence
  synthetic circulating small noncoding RNA (sncRNA) 5' transfer RNA (tRNA) half
ctccccgtcg

SEQ ID NO: 2964 - DNA, 14 bp, Artificial Sequence
  synthetic circulating small noncoding RNA (sncRNA) 5' transfer RNA (tRNA) half
ctccccgtcgggga

SEQ ID NO: 2965 - DNA, 12 bp, Artificial Sequence
  synthetic circulating small noncoding RNA (sncRNA) 5' transfer RNA (tRNA) half
ggcccagcacgc

SEQ ID NO: 2966 - DNA, 42 bp, Artificial Sequence
  synthetic circulating small noncoding RNA (sncRNA) 5' transfer RNA (tRNA) half
gggattaagagtcccatgctctaccgactgagctagccgggc

SEQ ID NO: 2967 - DNA, 15 bp, Artificial Sequence
  synthetic circulating small noncoding RNA (sncRNA) 5' transfer RNA (tRNA) half
cacccggatttgaac

SEQ ID NO: 2968 - DNA, 12 bp, Artificial Sequence
  synthetic circulating small noncoding RNA (sncRNA) 5' transfer RNA (tRNA) half
gggacctcttga

SEQ ID NO: 2969 - DNA, 23 bp, Artificial Sequence
  synthetic circulating small noncoding RNA (sncRNA) 5' transfer RNA (tRNA) half
cgtggcaggcgagaattctacca

SEQ ID NO: 2970 - DNA, 30 bp, Artificial Sequence
  synthetic circulating small noncoding RNA (sncRNA) 5' transfer RNA (tRNA) half
tctgatgctctaccgactgagctatccggg

SEQ ID NO: 2971 - DNA, 24 bp, Artificial Sequence
  synthetic circulating small noncoding RNA (sncRNA) 5' transfer RNA (tRNA) half
gcgcccgaacagggacttgaaccc

SEQ ID NO: 2972 - DNA, 17 bp, Artificial Sequence
  synthetic circulating small noncoding RNA (sncRNA) 5' transfer RNA (tRNA) half
tccccggcacctccact

SEQ ID NO: 2973 - DNA, 12 bp, Artificial Sequence
  synthetic circulating small noncoding RNA (sncRNA) 5' transfer RNA (tRNA) half
gggctcgtccgg

SEQ ID NO: 2974 - DNA, 37 bp, Artificial Sequence
  synthetic circulating small noncoding RNA (sncRNA) 5' transfer RNA (tRNA) half
gtggagatgccggggatcgaacccggggcctcataca

SEQ ID NO: 2975 - DNA, 16 bp, Artificial Sequence
  synthetic circulating small noncoding RNA (sncRNA) 5' transfer RNA (tRNA) half
ttcccgggcggcgcat

SEQ ID NO: 2976 - DNA, 26 bp, Artificial Sequence
  synthetic circulating small noncoding RNA (sncRNA) 5' transfer RNA (tRNA) half
atagtgtagcggttatcacgtctgct

SEQ ID NO: 2977 - DNA, 31 bp, Artificial Sequence
  synthetic circulating small noncoding RNA (sncRNA) 5' transfer RNA (tRNA) half
caacgcagagtactaaccactatacgatcac

SEQ ID NO: 2978 - DNA, 37 bp, Artificial Sequence
  synthetic circulating small noncoding RNA (sncRNA) 5' transfer RNA (tRNA) half
acgcagaaggtcctgggttcgagccccagtggaacca

SEQ ID NO: 2979 - DNA, 34 bp, Artificial Sequence
  synthetic circulating small noncoding RNA (sncRNA) 5' transfer RNA (tRNA) half
gcgcccgaacagggacttgaaccctggaccctca

SEQ ID NO: 2980 - DNA, 11 bp, Artificial Sequence
  synthetic circulating small noncoding RNA (sncRNA) 5' transfer RNA (tRNA) half
gcccagcacgc

SEQ ID NO: 2981 - DNA, 13 bp, Artificial Sequence
  synthetic circulating small noncoding RNA (sncRNA) 5' transfer RNA (tRNA) half
aggtccccggttc

SEQ ID NO: 2982 - DNA, 37 bp, Artificial Sequence
  synthetic circulating small noncoding RNA (sncRNA) 5' transfer RNA (tRNA) half
gtaaacaggagatcctgggttcgaatcccagcggtgc

SEQ ID NO: 2983 - DNA, 29 bp, Artificial Sequence
  synthetic circulating small noncoding RNA (sncRNA) 5' transfer RNA (tRNA) half
cagacgcgctaccattgcgccacgaggtc

SEQ ID NO: 2984 - DNA, 43 bp, Artificial Sequence
  synthetic circulating small noncoding RNA (sncRNA) 5' transfer RNA (tRNA) half
ggcagcggtgggattcgaacccacgcccccgaagagactggag

SEQ ID NO: 2985 - DNA, 32 bp, Artificial Sequence
  synthetic circulating small noncoding RNA (sncRNA) 5' transfer RNA (tRNA) half
ctccctggtggtctagtggttaggattcggcg

SEQ ID NO: 2986 - DNA, 27 bp, Artificial Sequence
  synthetic circulating small noncoding RNA (sncRNA) 5' transfer RNA (tRNA) half
ccatagtgtagcggttatcacgtctgc

SEQ ID NO: 2987 - DNA, 20 bp, Artificial Sequence
  synthetic circulating small noncoding RNA (sncRNA) 5' transfer RNA (tRNA) half
aaccactcggccacgactac

SEQ ID NO: 2988 - DNA, 9 bp, Artificial Sequence
  synthetic circulating small noncoding RNA (sncRNA) 5' transfer RNA (tRNA) half
ggcgagaat

SEQ ID NO: 2989 - DNA, 43 bp, Artificial Sequence
  synthetic circulating small noncoding RNA (sncRNA) 5' transfer RNA (tRNA) half
ggttgccccctctgaggttcgaactcaggaccttcagattatg

SEQ ID NO: 2990 - DNA, 14 bp, Artificial Sequence
  synthetic circulating small noncoding RNA (sncRNA) 5' transfer RNA (tRNA) half
ttatcacgttcgcc

SEQ ID NO: 2991 - DNA, 20 bp, Artificial Sequence
  synthetic circulating small noncoding RNA (sncRNA) 5' transfer RNA (tRNA) half
gtccagagtgctaaccatta

SEQ ID NO: 2992 - DNA, 20 bp, Artificial Sequence
  synthetic circulating small noncoding RNA (sncRNA) 5' transfer RNA (tRNA) half
tatagtggttagtactctgc

SEQ ID NO: 2993 - DNA, 36 bp, Artificial Sequence
  synthetic circulating small noncoding RNA (sncRNA) 5' transfer RNA (tRNA) half
gcgtccctgggtgggctcgaaccaccaacctttcgg

SEQ ID NO: 2994 - DNA, 32 bp, Artificial Sequence
  synthetic circulating small noncoding RNA (sncRNA) 5' transfer RNA (tRNA) half
ggctcgtccgggatttgaacccgggacctctc

SEQ ID NO: 2995 - DNA, 25 bp, Artificial Sequence
  synthetic circulating small noncoding RNA (sncRNA) 5' transfer RNA (tRNA) half
tgctctaccactgagctataccccc

SEQ ID NO: 2996 - DNA, 33 bp, Artificial Sequence
  synthetic circulating small noncoding RNA (sncRNA) 5' transfer RNA (tRNA) half
ccccgtcggggaattgaaccccggtctcccgcg

SEQ ID NO: 2997 - DNA, 25 bp, Artificial Sequence
  synthetic circulating small noncoding RNA (sncRNA) 5' transfer RNA (tRNA) half
tctgatgctctaccgactgagctat

SEQ ID NO: 2998 - DNA, 16 bp, Artificial Sequence
  synthetic circulating small noncoding RNA (sncRNA) 5' transfer RNA (tRNA) half
tcccgggcggcgcatg

SEQ ID NO: 2999 - DNA, 34 bp, Artificial Sequence
  synthetic circulating small noncoding RNA (sncRNA) 5' transfer RNA (tRNA) half
accgaagatcacgggttcgaaccccgtccgtgcc

SEQ ID NO: 3000 - DNA, 35 bp, Artificial Sequence
  synthetic circulating small noncoding RNA (sncRNA) 5' transfer RNA (tRNA) half
ggcaccgctgggattcgaacccaggatctcctgtt

SEQ ID NO: 3001 - DNA, 33 bp, Artificial Sequence
  synthetic circulating small noncoding RNA (sncRNA) 5' transfer RNA (tRNA) half
caatgcagagtactaaccactatacgatctcgg

SEQ ID NO: 3002 - DNA, 34 bp, Artificial Sequence
  synthetic circulating small noncoding RNA (sncRNA) 5' transfer RNA (tRNA) half
caggagatcctgggttcaaatcccagcggggcct

SEQ ID NO: 3003 - DNA, 20 bp, Artificial Sequence
  synthetic circulating small noncoding RNA (sncRNA) 5' transfer RNA (tRNA) half
ggttccaccgagatttgaac

SEQ ID NO: 3004 - DNA, 29 bp, Artificial Sequence
  synthetic circulating small noncoding RNA (sncRNA) 5' transfer RNA (tRNA) half
tcccacaccgggagtcgaacccgggccgc

SEQ ID NO: 3005 - DNA, 35 bp, Artificial Sequence
  synthetic circulating small noncoding RNA (sncRNA) 5' transfer RNA (tRNA) half
ggagatgccggggatcgaacccggggcctcataca

SEQ ID NO: 3006 - DNA, 13 bp, Artificial Sequence
  synthetic circulating small noncoding RNA (sncRNA) 5' transfer RNA (tRNA) half
gtctcccgcgtga

SEQ ID NO: 3007 - DNA, 23 bp, Artificial Sequence
  synthetic circulating small noncoding RNA (sncRNA) 5' transfer RNA (tRNA) half
tgccgtgactcggattcgaaccg

SEQ ID NO: 3008 - DNA, 30 bp, Artificial Sequence
  synthetic circulating small noncoding RNA (sncRNA) 5' transfer RNA (tRNA) half
gcccgaacagggacttgaaccctggaccct

SEQ ID NO: 3009 - DNA, 26 bp, Artificial Sequence
  synthetic circulating small noncoding RNA (sncRNA) 5' transfer RNA (tRNA) half
ctcggatcgctggattcagagtccag

SEQ ID NO: 3010 - DNA, 31 bp, Artificial Sequence
  synthetic circulating small noncoding RNA (sncRNA) 5' transfer RNA (tRNA) half
gctcgtccgggatttgaacccgggacctctc

SEQ ID NO: 3011 - DNA, 21 bp, Artificial Sequence
  synthetic circulating small noncoding RNA (sncRNA) 5' transfer RNA (tRNA) half
gacaggcggggatactcacca

SEQ ID NO: 3012 - DNA, 32 bp, Artificial Sequence
  synthetic circulating small noncoding RNA (sncRNA) 5' transfer RNA (tRNA) half
cgcccgaacagggacttgaaccctggaccctc

SEQ ID NO: 3013 - DNA, 30 bp, Artificial Sequence
  synthetic circulating small noncoding RNA (sncRNA) 5' transfer RNA (tRNA) half
cataccgggagtcgaacccgggccgcctgg

SEQ ID NO: 3014 - DNA, 24 bp, Artificial Sequence
  synthetic circulating small noncoding RNA (sncRNA) 5' transfer RNA (tRNA) half
cgtatagtggttagtactctgcgt

SEQ ID NO: 3015 - DNA, 29 bp, Artificial Sequence
  synthetic circulating small noncoding RNA (sncRNA) 5' transfer RNA (tRNA) half
caggcggcccgggttcgactcccggtgtg

SEQ ID NO: 3016 - DNA, 26 bp, Artificial Sequence
  synthetic circulating small noncoding RNA (sncRNA) 5' transfer RNA (tRNA) half
gcccaacgtggggctcgaacccacga

SEQ ID NO: 3017 - DNA, 20 bp, Artificial Sequence
  synthetic circulating small noncoding RNA (sncRNA) 5' transfer RNA (tRNA) half
cccataccgggagtcgaacc

SEQ ID NO: 3018 - DNA, 39 bp, Artificial Sequence
  synthetic circulating small noncoding RNA (sncRNA) 5' transfer RNA (tRNA) half
tagcgcccgaacagggacttgaaccctggaccctcagat

SEQ ID NO: 3019 - DNA, 28 bp, Artificial Sequence
  synthetic circulating small noncoding RNA (sncRNA) 5' transfer RNA (tRNA) half
gttccaccgagatttgaactcggatcgc

SEQ ID NO: 3020 - DNA, 39 bp, Artificial Sequence
  synthetic circulating small noncoding RNA (sncRNA) 5' transfer RNA (tRNA) half
gggattaagagtcccatgctctaccgactgagctagccg

SEQ ID NO: 3021 - DNA, 20 bp, Artificial Sequence
  synthetic circulating small noncoding RNA (sncRNA) 5' transfer RNA (tRNA) half
tcgagccagccaggagtcga

SEQ ID NO: 3022 - DNA, 12 bp, Artificial Sequence
  synthetic circulating small noncoding RNA (sncRNA) 5' transfer RNA (tRNA) half
agctatcgaagg

SEQ ID NO: 3023 - DNA, 33 bp, Artificial Sequence
  synthetic circulating small noncoding RNA (sncRNA) 5' transfer RNA (tRNA) half
agtccaatgcgctatccattgcgccacagagcc

SEQ ID NO: 3024 - DNA, 35 bp, Artificial Sequence
  synthetic circulating small noncoding RNA (sncRNA) 5' transfer RNA (tRNA) half
agtgcattggccgggaatcgaacccgggcctcccg

SEQ ID NO: 3025 - DNA, 31 bp, Artificial Sequence
  synthetic circulating small noncoding RNA (sncRNA) 5' transfer RNA (tRNA) half
aagcgagaatcatacccctagaccaacgagc

SEQ ID NO: 3026 - DNA, 21 bp, Artificial Sequence
  synthetic circulating small noncoding RNA (sncRNA) 5' transfer RNA (tRNA) half
cgtgtttccgcccggtttcga

SEQ ID NO: 3027 - DNA, 16 bp, Artificial Sequence
  synthetic circulating small noncoding RNA (sncRNA) 5' transfer RNA (tRNA) half
ggtagtgtggccgagc

SEQ ID NO: 3028 - DNA, 20 bp, Artificial Sequence
  synthetic circulating small noncoding RNA (sncRNA) 5' transfer RNA (tRNA) half
gtaatggttagcactctgga

SEQ ID NO: 3029 - DNA, 13 bp, Artificial Sequence
  synthetic circulating small noncoding RNA (sncRNA) 5' transfer RNA (tRNA) half
agcgccgaatcct

SEQ ID NO: 3030 - DNA, 33 bp, Artificial Sequence
  synthetic circulating small noncoding RNA (sncRNA) 5' transfer RNA (tRNA) half
cgcccggctagctcagtcggtagagcatgagac

SEQ ID NO: 3031 - DNA, 14 bp, Artificial Sequence
  synthetic circulating small noncoding RNA (sncRNA) 5' transfer RNA (tRNA) half
gagcggtctaaggc

SEQ ID NO: 3032 - DNA, 23 bp, Artificial Sequence
  synthetic circulating small noncoding RNA (sncRNA) 5' transfer RNA (tRNA) half
tcggggaatcgaaccccggtctc

SEQ ID NO: 3033 - DNA, 27 bp, Artificial Sequence
  synthetic circulating small noncoding RNA (sncRNA) 5' transfer RNA (tRNA) half
ctggtggtctagtggttaggattcggc

SEQ ID NO: 3034 - DNA, 23 bp, Artificial Sequence
  synthetic circulating small noncoding RNA (sncRNA) 5' transfer RNA (tRNA) half
gttcgactcccggtgtgggaaac

SEQ ID NO: 3035 - DNA, 20 bp, Artificial Sequence
  synthetic circulating small noncoding RNA (sncRNA) 5' transfer RNA (tRNA) half
gtctcatgctctacccactg

SEQ ID NO: 3036 - DNA, 15 bp, Artificial Sequence
  synthetic circulating small noncoding RNA (sncRNA) 5' transfer RNA (tRNA) half
agcgccgaatcctaa

SEQ ID NO: 3037 - DNA, 10 bp, Artificial Sequence
  synthetic circulating small noncoding RNA (sncRNA) 5' transfer RNA (tRNA) half
ggctcgtccg

SEQ ID NO: 3038 - DNA, 36 bp, Artificial Sequence
  synthetic circulating small noncoding RNA (sncRNA) 5' transfer RNA (tRNA) half
gctggggattgtgggttcgagtcccatctgggtcgc

SEQ ID NO: 3039 - DNA, 22 bp, Artificial Sequence
  synthetic circulating small noncoding RNA (sncRNA) 5' transfer RNA (tRNA) half
gagtctcatgctctaccgactg

SEQ ID NO: 3040 - DNA, 22 bp, Artificial Sequence
  synthetic circulating small noncoding RNA (sncRNA) 5' transfer RNA (tRNA) half
ctctaccgactgagctatccgg

SEQ ID NO: 3041 - DNA, 14 bp, Artificial Sequence
  synthetic circulating small noncoding RNA (sncRNA) 5' transfer RNA (tRNA) half
gggctcgtccggga

SEQ ID NO: 3042 - DNA, 25 bp, Artificial Sequence
  synthetic circulating small noncoding RNA (sncRNA) 5' transfer RNA (tRNA) half
gagtccagagtgctaaccattacac

SEQ ID NO: 3043 - DNA, 34 bp, Artificial Sequence
  synthetic circulating small noncoding RNA (sncRNA) 5' transfer RNA (tRNA) half
cgtccctgggtgggctcgaaccaccaacctttcg

SEQ ID NO: 3044 - DNA, 14 bp, Artificial Sequence
  synthetic circulating small noncoding RNA (sncRNA) 5' transfer RNA (tRNA) half
gggaggcccgggtt

SEQ ID NO: 3045 - DNA, 34 bp, Artificial Sequence
  synthetic circulating small noncoding RNA (sncRNA) 5' transfer RNA (tRNA) half
ctccccgtcggggaatcgaaccccggtctcccgc

SEQ ID NO: 3046 - DNA, 17 bp, Artificial Sequence
  synthetic circulating small noncoding RNA (sncRNA) 5' transfer RNA (tRNA) half
gcgagaatcatacccct

SEQ ID NO: 3047 - DNA, 28 bp, Artificial Sequence
  synthetic circulating small noncoding RNA (sncRNA) 5' transfer RNA (tRNA) half
ctggtggtctagtggttaggattcggcg

SEQ ID NO: 3048 - DNA, 14 bp, Artificial Sequence
  synthetic circulating small noncoding RNA (sncRNA) 5' transfer RNA (tRNA) half
gtcagaagtgggat

SEQ ID NO: 3049 - DNA, 36 bp, Artificial Sequence
  synthetic circulating small noncoding RNA (sncRNA) 5' transfer RNA (tRNA) half
taaacaggagatcctgggttcgaatcccagtggggc

SEQ ID NO: 3050 - DNA, 35 bp, Artificial Sequence
  synthetic circulating small noncoding RNA (sncRNA) 5' transfer RNA (tRNA) half
gccccgtgtgaggatcgaactcacgaccttcagat

SEQ ID NO: 3051 - DNA, 19 bp, Artificial Sequence
  synthetic circulating small noncoding RNA (sncRNA) 5' transfer RNA (tRNA) half
tgaaccctggaccctcaga

SEQ ID NO: 3052 - DNA, 14 bp, Artificial Sequence
  synthetic circulating small noncoding RNA (sncRNA) 5' transfer RNA (tRNA) half
tagaccaccaggga

SEQ ID NO: 3053 - DNA, 12 bp, Artificial Sequence
  synthetic circulating small noncoding RNA (sncRNA) 5' transfer RNA (tRNA) half
cgacgaggatgg

SEQ ID NO: 3054 - DNA, 36 bp, Artificial Sequence
  synthetic circulating small noncoding RNA (sncRNA) 5' transfer RNA (tRNA) half
ctgttcccataccgggagtcgaacccgggccgcctg

SEQ ID NO: 3055 - DNA, 34 bp, Artificial Sequence
  synthetic circulating small noncoding RNA (sncRNA) 5' transfer RNA (tRNA) half
cgcagcaacctcggttcgaatccgagtcacggca

SEQ ID NO: 3056 - DNA, 38 bp, Artificial Sequence
  synthetic circulating small noncoding RNA (sncRNA) 5' transfer RNA (tRNA) half
ttgtgccccgtgtgaggatcgaactcacgaccttcaga

SEQ ID NO: 3057 - DNA, 30 bp, Artificial Sequence
  synthetic circulating small noncoding RNA (sncRNA) 5' transfer RNA (tRNA) half
agggtcgtgggttcgagccccacgttgggc

SEQ ID NO: 3058 - DNA, 33 bp, Artificial Sequence
  synthetic circulating small noncoding RNA (sncRNA) 5' transfer RNA (tRNA) half
cccacatggtctagcggttaggattcctggttt

SEQ ID NO: 3059 - DNA, 27 bp, Artificial Sequence
  synthetic circulating small noncoding RNA (sncRNA) 5' transfer RNA (tRNA) half
cgccgaatcctaaccactagaccacca

SEQ ID NO: 3060 - DNA, 20 bp, Artificial Sequence
  synthetic circulating small noncoding RNA (sncRNA) 5' transfer RNA (tRNA) half
cgggaatcgaacccgggccg

SEQ ID NO: 3061 - DNA, 17 bp, Artificial Sequence
  synthetic circulating small noncoding RNA (sncRNA) 5' transfer RNA (tRNA) half
atcccggacgagcccca

SEQ ID NO: 3062 - DNA, 24 bp, Artificial Sequence
  synthetic circulating small noncoding RNA (sncRNA) 5' transfer RNA (tRNA) half
ttcccataccgggagtcgaacccg

SEQ ID NO: 3063 - DNA, 18 bp, Artificial Sequence
  synthetic circulating small noncoding RNA (sncRNA) 5' transfer RNA (tRNA) half
tgttcccacaccgggagt

SEQ ID NO: 3064 - DNA, 28 bp, Artificial Sequence
  synthetic circulating small noncoding RNA (sncRNA) 5' transfer RNA (tRNA) half
atgtgctctaccactgagctacatcccc

SEQ ID NO: 3065 - DNA, 11 bp, Artificial Sequence
  synthetic circulating small noncoding RNA (sncRNA) 5' transfer RNA (tRNA) half
agcgccgaatc

SEQ ID NO: 3066 - DNA, 33 bp, Artificial Sequence
  synthetic circulating small noncoding RNA (sncRNA) 5' transfer RNA (tRNA) half
cctgaccgggaatcgaacccgggccgcggcggt

SEQ ID NO: 3067 - DNA, 21 bp, Artificial Sequence
  synthetic circulating small noncoding RNA (sncRNA) 5' transfer RNA (tRNA) half
gggttcgactcccggtgtggg

SEQ ID NO: 3068 - DNA, 29 bp, Artificial Sequence
  synthetic circulating small noncoding RNA (sncRNA) 5' transfer RNA (tRNA) half
ggggatactaaccactatactaacgagga

SEQ ID NO: 3069 - DNA, 31 bp, Artificial Sequence
  synthetic circulating small noncoding RNA (sncRNA) 5' transfer RNA (tRNA) half
cccatatggtctagcggttaggattcctggt

SEQ ID NO: 3070 - DNA, 33 bp, Artificial Sequence
  synthetic circulating small noncoding RNA (sncRNA) 5' transfer RNA (tRNA) half
gcccaacgtggggctcgaacccacgaccctgag

SEQ ID NO: 3071 - DNA, 21 bp, Artificial Sequence
  synthetic circulating small noncoding RNA (sncRNA) 5' transfer RNA (tRNA) half
cccataccgggagtcgaaccc

SEQ ID NO: 3072 - DNA, 16 bp, Artificial Sequence
  synthetic circulating small noncoding RNA (sncRNA) 5' transfer RNA (tRNA) half
gtcggggaatcgaacc

SEQ ID NO: 3073 - DNA, 32 bp, Artificial Sequence
  synthetic circulating small noncoding RNA (sncRNA) 5' transfer RNA (tRNA) half
ccgggcctcccgcgtggcaggcgagaattcta

SEQ ID NO: 3074 - DNA, 32 bp, Artificial Sequence
  synthetic circulating small noncoding RNA (sncRNA) 5' transfer RNA (tRNA) half
ccccgacgtgatttgaacacgcaaccttctga

SEQ ID NO: 3075 - DNA, 16 bp, Artificial Sequence
  synthetic circulating small noncoding RNA (sncRNA) 5' transfer RNA (tRNA) half
cgtcggggaatcgaac

SEQ ID NO: 3076 - DNA, 15 bp, Artificial Sequence
  synthetic circulating small noncoding RNA (sncRNA) 5' transfer RNA (tRNA) half
ctcctggctggctcg

SEQ ID NO: 3077 - DNA, 34 bp, Artificial Sequence
  synthetic circulating small noncoding RNA (sncRNA) 5' transfer RNA (tRNA) half
cgcccgaacagggacttgaaccctggaccctcag

SEQ ID NO: 3078 - DNA, 29 bp, Artificial Sequence
  synthetic circulating small noncoding RNA (sncRNA) 5' transfer RNA (tRNA) half
gagtcccatgctctaccgactgagctagc

SEQ ID NO: 3079 - DNA, 16 bp, Artificial Sequence
  synthetic circulating small noncoding RNA (sncRNA) 5' transfer RNA (tRNA) half
ccgcagcgagcagggt

SEQ ID NO: 3080 - DNA, 23 bp, Artificial Sequence
  synthetic circulating small noncoding RNA (sncRNA) 5' transfer RNA (tRNA) half
ggggatgtagctcagtggtagag

SEQ ID NO: 3081 - DNA, 33 bp, Artificial Sequence
  synthetic circulating small noncoding RNA (sncRNA) 5' transfer RNA (tRNA) half
tccctgaccgggaatcgaacccgggccgcggcg

SEQ ID NO: 3082 - DNA, 24 bp, Artificial Sequence
  synthetic circulating small noncoding RNA (sncRNA) 5' transfer RNA (tRNA) half
ggaatcctaaccgctagaccatgt

SEQ ID NO: 3083 - DNA, 23 bp, Artificial Sequence
  synthetic circulating small noncoding RNA (sncRNA) 5' transfer RNA (tRNA) half
ggcaggcgagaattctaccactg

SEQ ID NO: 3084 - DNA, 31 bp, Artificial Sequence
  synthetic circulating small noncoding RNA (sncRNA) 5' transfer RNA (tRNA) half
gggcctcccgcgtggcaggcgagaattctac

SEQ ID NO: 3085 - DNA, 35 bp, Artificial Sequence
  synthetic circulating small noncoding RNA (sncRNA) 5' transfer RNA (tRNA) half
aagtttccgtagtgtagtggttatcacgttcgcct

SEQ ID NO: 3086 - DNA, 19 bp, Artificial Sequence
  synthetic circulating small noncoding RNA (sncRNA) 5' transfer RNA (tRNA) half
gcgccgaatcctaaccact

SEQ ID NO: 3087 - DNA, 30 bp, Artificial Sequence
  synthetic circulating small noncoding RNA (sncRNA) 5' transfer RNA (tRNA) half
ttggccgggaatcgaacccgggcctcccgc

SEQ ID NO: 3088 - DNA, 31 bp, Artificial Sequence
  synthetic circulating small noncoding RNA (sncRNA) 5' transfer RNA (tRNA) half
aaccaggaatcctaaccgctagaccatgtgg

SEQ ID NO: 3089 - DNA, 16 bp, Artificial Sequence
  synthetic circulating small noncoding RNA (sncRNA) 5' transfer RNA (tRNA) half
gcggttaggattcctg

SEQ ID NO: 3090 - DNA, 38 bp, Artificial Sequence
  synthetic circulating small noncoding RNA (sncRNA) 5' transfer RNA (tRNA) half
cgtccctgggtgggctcgaaccaccaacctttcggtta

SEQ ID NO: 3091 - DNA, 31 bp, Artificial Sequence
  synthetic circulating small noncoding RNA (sncRNA) 5' transfer RNA (tRNA) half
acccgggccgcggcggtgagagcgccgaatc

SEQ ID NO: 3092 - DNA, 28 bp, Artificial Sequence
  synthetic circulating small noncoding RNA (sncRNA) 5' transfer RNA (tRNA) half
aaagtctgatgctctaccgactgagcta

SEQ ID NO: 3093 - DNA, 14 bp, Artificial Sequence
  synthetic circulating small noncoding RNA (sncRNA) 5' transfer RNA (tRNA) half
tcgattccccgacg

SEQ ID NO: 3094 - DNA, 19 bp, Artificial Sequence
  synthetic circulating small noncoding RNA (sncRNA) 5' transfer RNA (tRNA) half
gtctccccgtcggggaatc

SEQ ID NO: 3095 - DNA, 19 bp, Artificial Sequence
  synthetic circulating small noncoding RNA (sncRNA) 5' transfer RNA (tRNA) half
ttcaaatcccggacgagcc

SEQ ID NO: 3096 - DNA, 26 bp, Artificial Sequence
  synthetic circulating small noncoding RNA (sncRNA) 5' transfer RNA (tRNA) half
gtgacaggcggggatactaaccacta

SEQ ID NO: 3097 - DNA, 34 bp, Artificial Sequence
  synthetic circulating small noncoding RNA (sncRNA) 5' transfer RNA (tRNA) half
tccctgaccgggaatcgaacccgggccgcggcgg

SEQ ID NO: 3098 - DNA, 37 bp, Artificial Sequence
  synthetic circulating small noncoding RNA (sncRNA) 5' transfer RNA (tRNA) half
tagcggttaggattcctggttttcacccaggcggccc

SEQ ID NO: 3099 - DNA, 12 bp, Artificial Sequence
  synthetic circulating small noncoding RNA (sncRNA) 5' transfer RNA (tRNA) half
ggctcgtccggg

SEQ ID NO: 3100 - DNA, 34 bp, Artificial Sequence
  synthetic circulating small noncoding RNA (sncRNA) 5' transfer RNA (tRNA) half
gggccgcctgggtgaaaaccaggaatcctaaccg

SEQ ID NO: 3101 - DNA, 31 bp, Artificial Sequence
  synthetic circulating small noncoding RNA (sncRNA) 5' transfer RNA (tRNA) half
agtcaaatgctctaccactgagctatacccc

SEQ ID NO: 3102 - DNA, 25 bp, Artificial Sequence
  synthetic circulating small noncoding RNA (sncRNA) 5' transfer RNA (tRNA) half
cggtgagagcgccgaatcctaacca

SEQ ID NO: 3103 - DNA, 17 bp, Artificial Sequence
  synthetic circulating small noncoding RNA (sncRNA) 5' transfer RNA (tRNA) half
gtcaggatggccgagtg

SEQ ID NO: 3104 - DNA, 19 bp, Artificial Sequence
  synthetic circulating small noncoding RNA (sncRNA) 5' transfer RNA (tRNA) half
taggggtatgattctcggt

SEQ ID NO: 3105 - DNA, 18 bp, Artificial Sequence
  synthetic circulating small noncoding RNA (sncRNA) 5' transfer RNA (tRNA) half
aaccccggtctcccgcgt

SEQ ID NO: 3106 - DNA, 20 bp, Artificial Sequence
  synthetic circulating small noncoding RNA (sncRNA) 5' transfer RNA (tRNA) half
ccgagccagccaggagtcga

SEQ ID NO: 3107 - DNA, 36 bp, Artificial Sequence
  synthetic circulating small noncoding RNA (sncRNA) 5' transfer RNA (tRNA) half
aagcctccctggtggtctagtggttaggattcggcg

SEQ ID NO: 3108 - DNA, 30 bp, Artificial Sequence
  synthetic circulating small noncoding RNA (sncRNA) 5' transfer RNA (tRNA) half
cctgaccgggaatcgaacccgggccgcggc

SEQ ID NO: 3109 - DNA, 18 bp, Artificial Sequence
  synthetic circulating small noncoding RNA (sncRNA) 5' transfer RNA (tRNA) half
tcggatcgctggattcag

SEQ ID NO: 3110 - DNA, 18 bp, Artificial Sequence
  synthetic circulating small noncoding RNA (sncRNA) 5' transfer RNA (tRNA) half
gagtgctaaccattacac

SEQ ID NO: 3111 - DNA, 36 bp, Artificial Sequence
  synthetic circulating small noncoding RNA (sncRNA) 5' transfer RNA (tRNA) half
accgagccagccaggagtcgaacctggaatcttctg

SEQ ID NO: 3112 - DNA, 19 bp, Artificial Sequence
  synthetic circulating small noncoding RNA (sncRNA) 5' transfer RNA (tRNA) half
acccacgcctccattcgga

SEQ ID NO: 3113 - DNA, 32 bp, Artificial Sequence
  synthetic circulating small noncoding RNA (sncRNA) 5' transfer RNA (tRNA) half
gcaatgactcctaaccactagaccaccaggga

SEQ ID NO: 3114 - DNA, 27 bp, Artificial Sequence
  synthetic circulating small noncoding RNA (sncRNA) 5' transfer RNA (tRNA) half
ggtgagagcgccgaatcctaaccacta

SEQ ID NO: 3115 - DNA, 17 bp, Artificial Sequence
  synthetic circulating small noncoding RNA (sncRNA) 5' transfer RNA (tRNA) half
cctccccgtcggggaat

SEQ ID NO: 3116 - DNA, 34 bp, Artificial Sequence
  synthetic circulating small noncoding RNA (sncRNA) 5' transfer RNA (tRNA) half
tccgagaggtcccgggttcaaatcccggacgagc

SEQ ID NO: 3117 - DNA, 35 bp, Artificial Sequence
  synthetic circulating small noncoding RNA (sncRNA) 5' transfer RNA (tRNA) half
gcatgggtggttcagtggtagaattctcgcctgcc

SEQ ID NO: 3118 - DNA, 23 bp, Artificial Sequence
  synthetic circulating small noncoding RNA (sncRNA) 5' transfer RNA (tRNA) half
tctaccgactgagctatccgggc

SEQ ID NO: 3119 - DNA, 15 bp, Artificial Sequence
  synthetic circulating small noncoding RNA (sncRNA) 5' transfer RNA (tRNA) half
ggccgcggcggtgag

SEQ ID NO: 3120 - DNA, 33 bp, Artificial Sequence
  synthetic circulating small noncoding RNA (sncRNA) 5' transfer RNA (tRNA) half
cgagccagccaggagtcgaacctggaatcttct

SEQ ID NO: 3121 - DNA, 22 bp, Artificial Sequence
  synthetic circulating small noncoding RNA (sncRNA) 5' transfer RNA (tRNA) half
ataaccactacactacggaaac

SEQ ID NO: 3122 - DNA, 23 bp, Artificial Sequence
  synthetic circulating small noncoding RNA (sncRNA) 5' transfer RNA (tRNA) half
tctcatgctctaccgactgagct

SEQ ID NO: 3123 - DNA, 19 bp, Artificial Sequence
  synthetic circulating small noncoding RNA (sncRNA) 5' transfer RNA (tRNA) half
gttcccataccgggagtcg

SEQ ID NO: 3124 - DNA, 22 bp, Artificial Sequence
  synthetic circulating small noncoding RNA (sncRNA) 5' transfer RNA (tRNA) half
tgagagcgccgaatcctaacca

SEQ ID NO: 3125 - DNA, 32 bp, Artificial Sequence
  synthetic circulating small noncoding RNA (sncRNA) 5' transfer RNA (tRNA) half
gcggcccgggttcgactcccggtatgggaaca

SEQ ID NO: 3126 - DNA, 21 bp, Artificial Sequence
  synthetic circulating small noncoding RNA (sncRNA) 5' transfer RNA (tRNA) half
acccacgcagacatatgtcca

SEQ ID NO: 3127 - DNA, 22 bp, Artificial Sequence
  synthetic circulating small noncoding RNA (sncRNA) 5' transfer RNA (tRNA) half
gaacccgggccgcggcggtgag

SEQ ID NO: 3128 - DNA, 14 bp, Artificial Sequence
  synthetic circulating small noncoding RNA (sncRNA) 5' transfer RNA (tRNA) half
gtcctgccgcggtc

SEQ ID NO: 3129 - DNA, 22 bp, Artificial Sequence
  synthetic circulating small noncoding RNA (sncRNA) 5' transfer RNA (tRNA) half
accccggtctcccgcgtgacag

SEQ ID NO: 3130 - DNA, 32 bp, Artificial Sequence
  synthetic circulating small noncoding RNA (sncRNA) 5' transfer RNA (tRNA) half
gtccagagtgctagccattacaccatggaacc

SEQ ID NO: 3131 - DNA, 17 bp, Artificial Sequence
  synthetic circulating small noncoding RNA (sncRNA) 5' transfer RNA (tRNA) half
cagagtgctaaccatta

SEQ ID NO: 3132 - DNA, 13 bp, Artificial Sequence
  synthetic circulating small noncoding RNA (sncRNA) 5' transfer RNA (tRNA) half
tcgaaccggggac

SEQ ID NO: 3133 - DNA, 25 bp, Artificial Sequence
  synthetic circulating small noncoding RNA (sncRNA) 5' transfer RNA (tRNA) half
tcgtatagtggttagtactctgcgt

SEQ ID NO: 3134 - DNA, 26 bp, Artificial Sequence
  synthetic circulating small noncoding RNA (sncRNA) 5' transfer RNA (tRNA) half
gaccgggaatcgaacccgggccgcgg

SEQ ID NO: 3135 - DNA, 17 bp, Artificial Sequence
  synthetic circulating small noncoding RNA (sncRNA) 5' transfer RNA (tRNA) half
ccaaagcgagaatcata

SEQ ID NO: 3136 - DNA, 30 bp, Artificial Sequence
  synthetic circulating small noncoding RNA (sncRNA) 5' transfer RNA (tRNA) half
gtcccaccgagatttgaactcggatcgctg

SEQ ID NO: 3137 - DNA, 17 bp, Artificial Sequence
  synthetic circulating small noncoding RNA (sncRNA) 5' transfer RNA (tRNA) half
cgggccgcggcggtgag

SEQ ID NO: 3138 - DNA, 20 bp, Artificial Sequence
  synthetic circulating small noncoding RNA (sncRNA) 5' transfer RNA (tRNA) half
agtcggtagagcatcagact

SEQ ID NO: 3139 - DNA, 17 bp, Artificial Sequence
  synthetic circulating small noncoding RNA (sncRNA) 5' transfer RNA (tRNA) half
agtggttagtactctgc

SEQ ID NO: 3140 - DNA, 34 bp, Artificial Sequence
  synthetic circulating small noncoding RNA (sncRNA) 5' transfer RNA (tRNA) half
tcaagaggtccccggttcaaatccgggtgccccc

SEQ ID NO: 3141 - DNA, 15 bp, Artificial Sequence
  synthetic circulating small noncoding RNA (sncRNA) 5' transfer RNA (tRNA) half
agtctcatgctctac

SEQ ID NO: 3142 - DNA, 34 bp, Artificial Sequence
  synthetic circulating small noncoding RNA (sncRNA) 5' transfer RNA (tRNA) half
acgcgggaggcccgggttcgattcccggcccatg

SEQ ID NO: 3143 - DNA, 17 bp, Artificial Sequence
  synthetic circulating small noncoding RNA (sncRNA) 5' transfer RNA (tRNA) half
gggtatgattctcggtt

SEQ ID NO: 3144 - DNA, 30 bp, Artificial Sequence
  synthetic circulating small noncoding RNA (sncRNA) 5' transfer RNA (tRNA) half
ggtcccaccgagatttgaactcggatcgct

SEQ ID NO: 3145 - DNA, 37 bp, Artificial Sequence
  synthetic circulating small noncoding RNA (sncRNA) 5' transfer RNA (tRNA) half
gctggcccgtacggggatcgaacccgcgaccttggcg

SEQ ID NO: 3146 - DNA, 16 bp, Artificial Sequence
  synthetic circulating small noncoding RNA (sncRNA) 5' transfer RNA (tRNA) half
tcacgtcggggtcatc

SEQ ID NO: 3147 - DNA, 37 bp, Artificial Sequence
  synthetic circulating small noncoding RNA (sncRNA) 5' transfer RNA (tRNA) half
cgcagcaacctcggttcgaatccgagtcacggcagta

SEQ ID NO: 3148 - DNA, 16 bp, Artificial Sequence
  synthetic circulating small noncoding RNA (sncRNA) 5' transfer RNA (tRNA) half
cagtggtagaattctc

SEQ ID NO: 3149 - DNA, 15 bp, Artificial Sequence
  synthetic circulating small noncoding RNA (sncRNA) 5' transfer RNA (tRNA) half
gttagtactctgcgt

SEQ ID NO: 3150 - DNA, 21 bp, Artificial Sequence
  synthetic circulating small noncoding RNA (sncRNA) 5' transfer RNA (tRNA) half
ctaggggtatgattctcggtt

SEQ ID NO: 3151 - DNA, 34 bp, Artificial Sequence
  synthetic circulating small noncoding RNA (sncRNA) 5' transfer RNA (tRNA) half
aagtttccgtagtgtagtggttatcacgttcgcc

SEQ ID NO: 3152 - DNA, 32 bp, Artificial Sequence
  synthetic circulating small noncoding RNA (sncRNA) 5' transfer RNA (tRNA) half
gtccaacgccttaaccactcggccatcctggt

SEQ ID NO: 3153 - DNA, 27 bp, Artificial Sequence
  synthetic circulating small noncoding RNA (sncRNA) 5' transfer RNA (tRNA) half
catgggtggttcagtggtagaattctc

SEQ ID NO: 3154 - DNA, 23 bp, Artificial Sequence
  synthetic circulating small noncoding RNA (sncRNA) 5' transfer RNA (tRNA) half
tactaaccactatacgatcacgg

SEQ ID NO: 3155 - DNA, 21 bp, Artificial Sequence
  synthetic circulating small noncoding RNA (sncRNA) 5' transfer RNA (tRNA) half
cgcccgaacagggacttgaac

SEQ ID NO: 3156 - DNA, 32 bp, Artificial Sequence
  synthetic circulating small noncoding RNA (sncRNA) 5' transfer RNA (tRNA) half
gcccagcacgcttccgctgcgccactctgctg

SEQ ID NO: 3157 - DNA, 13 bp, Artificial Sequence
  synthetic circulating small noncoding RNA (sncRNA) 5' transfer RNA (tRNA) half
gccttagaccgct

SEQ ID NO: 3158 - DNA, 39 bp, Artificial Sequence
  synthetic circulating small noncoding RNA (sncRNA) 5' transfer RNA (tRNA) half
actcggatcgctggattcagagtccagagtgctaaccat

SEQ ID NO: 3159 - DNA, 14 bp, Artificial Sequence
  synthetic circulating small noncoding RNA (sncRNA) 5' transfer RNA (tRNA) half
tgagctagccgggc

SEQ ID NO: 3160 - DNA, 36 bp, Artificial Sequence
  synthetic circulating small noncoding RNA (sncRNA) 5' transfer RNA (tRNA) half
ggtgcgagaggtcccgggttcaaatcccggacgagc

SEQ ID NO: 3161 - DNA, 13 bp, Artificial Sequence
  synthetic circulating small noncoding RNA (sncRNA) 5' transfer RNA (tRNA) half
cagtcggtagagc

SEQ ID NO: 3162 - DNA, 14 bp, Artificial Sequence
  synthetic circulating small noncoding RNA (sncRNA) 5' transfer RNA (tRNA) half
cgggacctctcgca

SEQ ID NO: 3163 - DNA, 25 bp, Artificial Sequence
  synthetic circulating small noncoding RNA (sncRNA) 5' transfer RNA (tRNA) half
gagaattctaccactgaaccaccaa

SEQ ID NO: 3164 - DNA, 29 bp, Artificial Sequence
  synthetic circulating small noncoding RNA (sncRNA) 5' transfer RNA (tRNA) half
ccaggaatcctaaccgctagaccatgtgg

SEQ ID NO: 3165 - DNA, 33 bp, Artificial Sequence
  synthetic circulating small noncoding RNA (sncRNA) 5' transfer RNA (tRNA) half
aggcgagaattctaccactgaaccaccaatgca

SEQ ID NO: 3166 - DNA, 38 bp, Artificial Sequence
  synthetic circulating small noncoding RNA (sncRNA) 5' transfer RNA (tRNA) half
gtccctgggtgggctcgaaccaccaacctttcggttaa

SEQ ID NO: 3167 - DNA, 21 bp, Artificial Sequence
  synthetic circulating small noncoding RNA (sncRNA) 5' transfer RNA (tRNA) half
agagtccagagtgctagccat

SEQ ID NO: 3168 - DNA, 17 bp, Artificial Sequence
  synthetic circulating small noncoding RNA (sncRNA) 5' transfer RNA (tRNA) half
cgagccccagtggaacc

SEQ ID NO: 3169 - DNA, 18 bp, Artificial Sequence
  synthetic circulating small noncoding RNA (sncRNA) 5' transfer RNA (tRNA) half
ttccgactccgccgggac

SEQ ID NO: 3170 - DNA, 20 bp, Artificial Sequence
  synthetic circulating small noncoding RNA (sncRNA) 5' transfer RNA (tRNA) half
accgggcggaaacagcaact

SEQ ID NO: 3171 - DNA, 37 bp, Artificial Sequence
  synthetic circulating small noncoding RNA (sncRNA) 5' transfer RNA (tRNA) half
agtgcattggccgggaatcgaacccgggcctcccgcg

SEQ ID NO: 3172 - DNA, 22 bp, Artificial Sequence
  synthetic circulating small noncoding RNA (sncRNA) 5' transfer RNA (tRNA) half
caggcggggatactaaccacta

SEQ ID NO: 3173 - DNA, 17 bp, Artificial Sequence
  synthetic circulating small noncoding RNA (sncRNA) 5' transfer RNA (tRNA) half
tggtagaattctcgcct

SEQ ID NO: 3174 - DNA, 38 bp, Artificial Sequence
  synthetic circulating small noncoding RNA (sncRNA) 5' transfer RNA (tRNA) half
tccgactccgccgggactcgaacccggaacctttgaat

SEQ ID NO: 3175 - DNA, 17 bp, Artificial Sequence
  synthetic circulating small noncoding RNA (sncRNA) 5' transfer RNA (tRNA) half
gagaattctaccactga

SEQ ID NO: 3176 - DNA, 12 bp, Artificial Sequence
  synthetic circulating small noncoding RNA (sncRNA) 5' transfer RNA (tRNA) half
gcgagaattcta

SEQ ID NO: 3177 - DNA, 36 bp, Artificial Sequence
  synthetic circulating small noncoding RNA (sncRNA) 5' transfer RNA (tRNA) half
ccgagccagccaggagtcgaacctggaatcttctga

SEQ ID NO: 3178 - DNA, 19 bp, Artificial Sequence
  synthetic circulating small noncoding RNA (sncRNA) 5' transfer RNA (tRNA) half
cattcttgcgacccgggtt

SEQ ID NO: 3179 - DNA, 32 bp, Artificial Sequence
  synthetic circulating small noncoding RNA (sncRNA) 5' transfer RNA (tRNA) half
cataccgggagtcgaacccgggccgcctgggt

SEQ ID NO: 3180 - DNA, 16 bp, Artificial Sequence
  synthetic circulating small noncoding RNA (sncRNA) 5' transfer RNA (tRNA) half
tcccatgctctaccga

SEQ ID NO: 3181 - DNA, 20 bp, Artificial Sequence
  synthetic circulating small noncoding RNA (sncRNA) 5' transfer RNA (tRNA) half
ctctaccgactgagctagcc

SEQ ID NO: 3182 - DNA, 18 bp, Artificial Sequence
  synthetic circulating small noncoding RNA (sncRNA) 5' transfer RNA (tRNA) half
aacccgggccgcggcggt

SEQ ID NO: 3183 - DNA, 32 bp, Artificial Sequence
  synthetic circulating small noncoding RNA (sncRNA) 5' transfer RNA (tRNA) half
ggccccagcgagatttgaactcgcgacccctg

SEQ ID NO: 3184 - DNA, 17 bp, Artificial Sequence
  synthetic circulating small noncoding RNA (sncRNA) 5' transfer RNA (tRNA) half
gactgagctatccgggc

SEQ ID NO: 3185 - DNA, 21 bp, Artificial Sequence
  synthetic circulating small noncoding RNA (sncRNA) 5' transfer RNA (tRNA) half
gtctccccgtcggggaatcga

SEQ ID NO: 3186 - DNA, 31 bp, Artificial Sequence
  synthetic circulating small noncoding RNA (sncRNA) 5' transfer RNA (tRNA) half
gtcaaatgctctacccctgagttataccccc

SEQ ID NO: 3187 - DNA, 19 bp, Artificial Sequence
  synthetic circulating small noncoding RNA (sncRNA) 5' transfer RNA (tRNA) half
gcatgggtggttcagtggt

SEQ ID NO: 3188 - DNA, 28 bp, Artificial Sequence
  synthetic circulating small noncoding RNA (sncRNA) 5' transfer RNA (tRNA) half
cgggccgcggcggtgagagcgccgaatc

SEQ ID NO: 3189 - DNA, 20 bp, Artificial Sequence
  synthetic circulating small noncoding RNA (sncRNA) 5' transfer RNA (tRNA) half
ttcaaatcccggacgagccc

SEQ ID NO: 3190 - DNA, 32 bp, Artificial Sequence
  synthetic circulating small noncoding RNA (sncRNA) 5' transfer RNA (tRNA) half
ccccgtcggggaattgaaccccggtctcccgc

SEQ ID NO: 3191 - DNA, 33 bp, Artificial Sequence
  synthetic circulating small noncoding RNA (sncRNA) 5' transfer RNA (tRNA) half
gaggtcccaccgagatttgaactcggatcgctg

SEQ ID NO: 3192 - DNA, 35 bp, Artificial Sequence
  synthetic circulating small noncoding RNA (sncRNA) 5' transfer RNA (tRNA) half
tggattcagagtccagagtgctaaccattacacca

SEQ ID NO: 3193 - DNA, 19 bp, Artificial Sequence
  synthetic circulating small noncoding RNA (sncRNA) 5' transfer RNA (tRNA) half
cccatgctctaccgactga

SEQ ID NO: 3194 - DNA, 19 bp, Artificial Sequence
  synthetic circulating small noncoding RNA (sncRNA) 5' transfer RNA (tRNA) half
taatggataaggcatcagc

SEQ ID NO: 3195 - DNA, 33 bp, Artificial Sequence
  synthetic circulating small noncoding RNA (sncRNA) 5' transfer RNA (tRNA) half
gttcccataccgggagtcgaacccgggccgcct

SEQ ID NO: 3196 - DNA, 34 bp, Artificial Sequence
  synthetic circulating small noncoding RNA (sncRNA) 5' transfer RNA (tRNA) half
gggtttccgtagtgtagtggttatcacgctcgcc

SEQ ID NO: 3197 - DNA, 15 bp, Artificial Sequence
  synthetic circulating small noncoding RNA (sncRNA) 5' transfer RNA (tRNA) half
gcgccgctggtgtag

SEQ ID NO: 3198 - DNA, 34 bp, Artificial Sequence
  synthetic circulating small noncoding RNA (sncRNA) 5' transfer RNA (tRNA) half
tctgaaggtcctgagttcgaacctcagagggggc

SEQ ID NO: 3199 - DNA, 29 bp, Artificial Sequence
  synthetic circulating small noncoding RNA (sncRNA) 5' transfer RNA (tRNA) half
ccataccgggagtcgaacccgggccgcct

SEQ ID NO: 3200 - DNA, 34 bp, Artificial Sequence
  synthetic circulating small noncoding RNA (sncRNA) 5' transfer RNA (tRNA) half
aacaggagatcctgggttcgaatcccagcggggc

SEQ ID NO: 3201 - DNA, 34 bp, Artificial Sequence
  synthetic circulating small noncoding RNA (sncRNA) 5' transfer RNA (tRNA) half
cctccccgtcggggaatcgaaccccggtctcccg

SEQ ID NO: 3202 - DNA, 23 bp, Artificial Sequence
  synthetic circulating small noncoding RNA (sncRNA) 5' transfer RNA (tRNA) half
gtaatggttagcactctggactc

SEQ ID NO: 3203 - DNA, 17 bp, Artificial Sequence
  synthetic circulating small noncoding RNA (sncRNA) 5' transfer RNA (tRNA) half
tatagtggttagtactc

SEQ ID NO: 3204 - DNA, 18 bp, Artificial Sequence
  synthetic circulating small noncoding RNA (sncRNA) 5' transfer RNA (tRNA) half
agttgtcaggagtgggat

SEQ ID NO: 3205 - DNA, 23 bp, Artificial Sequence
  synthetic circulating small noncoding RNA (sncRNA) 5' transfer RNA (tRNA) half
ggttagcactctggactctgaat

SEQ ID NO: 3206 - DNA, 11 bp, Artificial Sequence
  synthetic circulating small noncoding RNA (sncRNA) 5' transfer RNA (tRNA) half
ggctcgtccgg

SEQ ID NO: 3207 - DNA, 11 bp, Artificial Sequence
  synthetic circulating small noncoding RNA (sncRNA) 5' transfer RNA (tRNA) half
cgcccaacgtg

SEQ ID NO: 3208 - DNA, 10 bp, Artificial Sequence
  synthetic circulating small noncoding RNA (sncRNA) 5' transfer RNA (tRNA) half
gagtcacggc

SEQ ID NO: 3209 - DNA, 17 bp, Artificial Sequence
  synthetic circulating small noncoding RNA (sncRNA) 5' transfer RNA (tRNA) half
cggtagagcatgagact

SEQ ID NO: 3210 - DNA, 22 bp, Artificial Sequence
  synthetic circulating small noncoding RNA (sncRNA) 5' transfer RNA (tRNA) half
aaccaggaatcctaaccgctag

SEQ ID NO: 3211 - DNA, 13 bp, Artificial Sequence
  synthetic circulating small noncoding RNA (sncRNA) 5' transfer RNA (tRNA) half
tttccgcccggtt

SEQ ID NO: 3212 - DNA, 16 bp, Artificial Sequence
  synthetic circulating small noncoding RNA (sncRNA) 5' transfer RNA (tRNA) half
gccttagaccgctcgg

SEQ ID NO: 3213 - DNA, 36 bp, Artificial Sequence
  synthetic circulating small noncoding RNA (sncRNA) 5' transfer RNA (tRNA) half
ccaggcggcccgggttcgactcccggtgtgggaaac

SEQ ID NO: 3214 - DNA, 35 bp, Artificial Sequence
  synthetic circulating small noncoding RNA (sncRNA) 5' transfer RNA (tRNA) half
tcaagaggtccccggttcaaatccgggtgccccct

SEQ ID NO: 3215 - DNA, 14 bp, Artificial Sequence
  synthetic circulating small noncoding RNA (sncRNA) 5' transfer RNA (tRNA) half
cgcccaacgtgggg

SEQ ID NO: 3216 - DNA, 30 bp, Artificial Sequence
  synthetic circulating small noncoding RNA (sncRNA) 5' transfer RNA (tRNA) half
gggggtatagctcaggggtagagcatttga

SEQ ID NO: 3217 - DNA, 37 bp, Artificial Sequence
  synthetic circulating small noncoding RNA (sncRNA) 5' transfer RNA (tRNA) half
tgtttccgcccggtttcgaaccggggacctttcgcgt

SEQ ID NO: 3218 - DNA, 21 bp, Artificial Sequence
  synthetic circulating small noncoding RNA (sncRNA) 5' transfer RNA (tRNA) half
tggagatgccggggatcgaac

SEQ ID NO: 3219 - DNA, 33 bp, Artificial Sequence
  synthetic circulating small noncoding RNA (sncRNA) 5' transfer RNA (tRNA) half
gcccgtacggggatcgaacccgcgaccttggcg

SEQ ID NO: 3220 - DNA, 34 bp, Artificial Sequence
  synthetic circulating small noncoding RNA (sncRNA) 5' transfer RNA (tRNA) half
ctgatgctctaccgactgagctatccgggctctt

SEQ ID NO: 3221 - DNA, 15 bp, Artificial Sequence
  synthetic circulating small noncoding RNA (sncRNA) 5' transfer RNA (tRNA) half
ggcccagcacgcttc

SEQ ID NO: 3222 - DNA, 23 bp, Artificial Sequence
  synthetic circulating small noncoding RNA (sncRNA) 5' transfer RNA (tRNA) half
gttcgactcccggtatgggaaca

SEQ ID NO: 3223 - DNA, 15 bp, Artificial Sequence
  synthetic circulating small noncoding RNA (sncRNA) 5' transfer RNA (tRNA) half
tccgcccggtttcga

SEQ ID NO: 3224 - DNA, 14 bp, Artificial Sequence
  synthetic circulating small noncoding RNA (sncRNA) 5' transfer RNA (tRNA) half
cgaaccggggacct

SEQ ID NO: 3225 - DNA, 25 bp, Artificial Sequence
  synthetic circulating small noncoding RNA (sncRNA) 5' transfer RNA (tRNA) half
tctcatgctctaccgactgagctag

SEQ ID NO: 3226 - DNA, 19 bp, Artificial Sequence
  synthetic circulating small noncoding RNA (sncRNA) 5' transfer RNA (tRNA) half
gcccggctagctcagtcgg

SEQ ID NO: 3227 - DNA, 29 bp, Artificial Sequence
  synthetic circulating small noncoding RNA (sncRNA) 5' transfer RNA (tRNA) half
ctggtggtctagtggttaggattcggcgc

SEQ ID NO: 3228 - DNA, 26 bp, Artificial Sequence
  synthetic circulating small noncoding RNA (sncRNA) 5' transfer RNA (tRNA) half
gcggtgagagcgccgaatcctaacca

SEQ ID NO: 3229 - DNA, 32 bp, Artificial Sequence
  synthetic circulating small noncoding RNA (sncRNA) 5' transfer RNA (tRNA) half
cgccgaatcctagccactagaccaccagggac

SEQ ID NO: 3230 - DNA, 15 bp, Artificial Sequence
  synthetic circulating small noncoding RNA (sncRNA) 5' transfer RNA (tRNA) half
gttcgattcccggtc

SEQ ID NO: 3231 - DNA, 23 bp, Artificial Sequence
  synthetic circulating small noncoding RNA (sncRNA) 5' transfer RNA (tRNA) half
gtcaggatggccgagcggtctaa

SEQ ID NO: 3232 - DNA, 15 bp, Artificial Sequence
  synthetic circulating small noncoding RNA (sncRNA) 5' transfer RNA (tRNA) half
aaccccggtctcccg

SEQ ID NO: 3233 - DNA, 39 bp, Artificial Sequence
  synthetic circulating small noncoding RNA (sncRNA) 5' transfer RNA (tRNA) half
cgtgtttccgcccggtttcgaaccggggacctttcgcgt

SEQ ID NO: 3234 - DNA, 30 bp, Artificial Sequence
  synthetic circulating small noncoding RNA (sncRNA) 5' transfer RNA (tRNA) half
cccataccgggagtcgaacccgggccgcct

SEQ ID NO: 3235 - DNA, 34 bp, Artificial Sequence
  synthetic circulating small noncoding RNA (sncRNA) 5' transfer RNA (tRNA) half
cgcccaacgtggggctcgaacccacgaccctgag

SEQ ID NO: 3236 - DNA, 13 bp, Artificial Sequence
  synthetic circulating small noncoding RNA (sncRNA) 5' transfer RNA (tRNA) half
ggttccaccgaga

SEQ ID NO: 3237 - DNA, 33 bp, Artificial Sequence
  synthetic circulating small noncoding RNA (sncRNA) 5' transfer RNA (tRNA) half
ggccggttagctcagttggttagagcgtggtgc

SEQ ID NO: 3238 - DNA, 19 bp, Artificial Sequence
  synthetic circulating small noncoding RNA (sncRNA) 5' transfer RNA (tRNA) half
agtggttagtactctgcgt

SEQ ID NO: 3239 - DNA, 35 bp, Artificial Sequence
  synthetic circulating small noncoding RNA (sncRNA) 5' transfer RNA (tRNA) half
cttccctgaccgggaatcgaacccgggccgcggcg

SEQ ID NO: 3240 - DNA, 37 bp, Artificial Sequence
  synthetic circulating small noncoding RNA (sncRNA) 5' transfer RNA (tRNA) half
ggccccagcgagatttgaactcgcgacccctggttta

SEQ ID NO: 3241 - DNA, 32 bp, Artificial Sequence
  synthetic circulating small noncoding RNA (sncRNA) 5' transfer RNA (tRNA) half
gccccctctgaggttcgaactcaggaccttca

SEQ ID NO: 3242 - DNA, 22 bp, Artificial Sequence
  synthetic circulating small noncoding RNA (sncRNA) 5' transfer RNA (tRNA) half
agacgacgaaggtgggattcga

SEQ ID NO: 3243 - DNA, 34 bp, Artificial Sequence
  synthetic circulating small noncoding RNA (sncRNA) 5' transfer RNA (tRNA) half
ggggattgtgggttcgagtcccatctgggtcgca

SEQ ID NO: 3244 - DNA, 20 bp, Artificial Sequence
  synthetic circulating small noncoding RNA (sncRNA) 5' transfer RNA (tRNA) half
taggggtatgattctcggtt

SEQ ID NO: 3245 - DNA, 34 bp, Artificial Sequence
  synthetic circulating small noncoding RNA (sncRNA) 5' transfer RNA (tRNA) half
cgcgggaggcccgggttcgattcccggccaatgc

SEQ ID NO: 3246 - DNA, 28 bp, Artificial Sequence
  synthetic circulating small noncoding RNA (sncRNA) 5' transfer RNA (tRNA) half
aaatgctctaccactgagctataccccc

SEQ ID NO: 3247 - DNA, 17 bp, Artificial Sequence
  synthetic circulating small noncoding RNA (sncRNA) 5' transfer RNA (tRNA) half
cccataccgggagtcga

SEQ ID NO: 3248 - DNA, 17 bp, Artificial Sequence
  synthetic circulating small noncoding RNA (sncRNA) 5' transfer RNA (tRNA) half
caggattcgaacctgcg

SEQ ID NO: 3249 - DNA, 26 bp, Artificial Sequence
  synthetic circulating small noncoding RNA (sncRNA) 5' transfer RNA (tRNA) half
ggcgaacgtgataaccactacactac

SEQ ID NO: 3250 - DNA, 15 bp, Artificial Sequence
  synthetic circulating small noncoding RNA (sncRNA) 5' transfer RNA (tRNA) half
caggcgagaattcta

SEQ ID NO: 3251 - DNA, 30 bp, Artificial Sequence
  synthetic circulating small noncoding RNA (sncRNA) 5' transfer RNA (tRNA) half
accaggaatcctaaccgctagaccatatgg

SEQ ID NO: 3252 - DNA, 20 bp, Artificial Sequence
  synthetic circulating small noncoding RNA (sncRNA) 5' transfer RNA (tRNA) half
atcccacttctgacacagtt

SEQ ID NO: 3253 - DNA, 14 bp, Artificial Sequence
  synthetic circulating small noncoding RNA (sncRNA) 5' transfer RNA (tRNA) half
gcccaacgtggggc

SEQ ID NO: 3254 - DNA, 18 bp, Artificial Sequence
  synthetic circulating small noncoding RNA (sncRNA) 5' transfer RNA (tRNA) half
accccgtccgtgcctgcc

SEQ ID NO: 3255 - DNA, 22 bp, Artificial Sequence
  synthetic circulating small noncoding RNA (sncRNA) 5' transfer RNA (tRNA) half
ggtagcgtggccgagcggtcta

SEQ ID NO: 3256 - DNA, 18 bp, Artificial Sequence
  synthetic circulating small noncoding RNA (sncRNA) 5' transfer RNA (tRNA) half
agtggttaggattcggcg

SEQ ID NO: 3257 - DNA, 13 bp, Artificial Sequence
  synthetic circulating small noncoding RNA (sncRNA) 5' transfer RNA (tRNA) half
gcattggtggttc

SEQ ID NO: 3258 - DNA, 23 bp, Artificial Sequence
  synthetic circulating small noncoding RNA (sncRNA) 5' transfer RNA (tRNA) half
gtttccctagtgtagtggttatc

SEQ ID NO: 3259 - DNA, 34 bp, Artificial Sequence
  synthetic circulating small noncoding RNA (sncRNA) 5' transfer RNA (tRNA) half
accccgacgtgacttgaacacgcaaccttctgat

SEQ ID NO: 3260 - DNA, 22 bp, Artificial Sequence
  synthetic circulating small noncoding RNA (sncRNA) 5' transfer RNA (tRNA) half
gttcgactcccggtatgggaac

SEQ ID NO: 3261 - DNA, 32 bp, Artificial Sequence
  synthetic circulating small noncoding RNA (sncRNA) 5' transfer RNA (tRNA) half
gcccaacgtggggctcgaacccacgaccctgg

SEQ ID NO: 3262 - DNA, 26 bp, Artificial Sequence
  synthetic circulating small noncoding RNA (sncRNA) 5' transfer RNA (tRNA) half
tcccgcgtggcaggcgagaattctac

SEQ ID NO: 3263 - DNA, 29 bp, Artificial Sequence
  synthetic circulating small noncoding RNA (sncRNA) 5' transfer RNA (tRNA) half
agcgatccgagttcaaatctcggtgggac

SEQ ID NO: 3264 - DNA, 33 bp, Artificial Sequence
  synthetic circulating small noncoding RNA (sncRNA) 5' transfer RNA (tRNA) half
ttcttgcgacccgggttcgattcccgggcggcg

SEQ ID NO: 3265 - DNA, 27 bp, Artificial Sequence
  synthetic circulating small noncoding RNA (sncRNA) 5' transfer RNA (tRNA) half
ctgaccgggaatcgaacccgggccgcg

SEQ ID NO: 3266 - DNA, 24 bp, Artificial Sequence
  synthetic circulating small noncoding RNA (sncRNA) 5' transfer RNA (tRNA) half
aacccgggacctctcgcacccaaa

SEQ ID NO: 3267 - DNA, 32 bp, Artificial Sequence
  synthetic circulating small noncoding RNA (sncRNA) 5' transfer RNA (tRNA) half
gctcgtccgggatttgaacccgggacctctcg

SEQ ID NO: 3268 - DNA, 29 bp, Artificial Sequence
  synthetic circulating small noncoding RNA (sncRNA) 5' transfer RNA (tRNA) half
tcccataccgggagtcgaacccgggccgc

SEQ ID NO: 3269 - DNA, 26 bp, Artificial Sequence
  synthetic circulating small noncoding RNA (sncRNA) 5' transfer RNA (tRNA) half
agcgccgaatcctaaccactagacca

SEQ ID NO: 3270 - DNA, 16 bp, Artificial Sequence
  synthetic circulating small noncoding RNA (sncRNA) 5' transfer RNA (tRNA) half
gttccttcgagccgga

SEQ ID NO: 3271 - DNA, 13 bp, Artificial Sequence
  synthetic circulating small noncoding RNA (sncRNA) 5' transfer RNA (tRNA) half
gggctcgtccggg

SEQ ID NO: 3272 - DNA, 12 bp, Artificial Sequence
  synthetic circulating small noncoding RNA (sncRNA) 5' transfer RNA (tRNA) half
gccttagaccgc

SEQ ID NO: 3273 - DNA, 25 bp, Artificial Sequence
  synthetic circulating small noncoding RNA (sncRNA) 5' transfer RNA (tRNA) half
agcgagaatcatacccctagaccaa

SEQ ID NO: 3274 - DNA, 23 bp, Artificial Sequence
  synthetic circulating small noncoding RNA (sncRNA) 5' transfer RNA (tRNA) half
agtctgatgctctaccgactgag

SEQ ID NO: 3275 - DNA, 34 bp, Artificial Sequence
  synthetic circulating small noncoding RNA (sncRNA) 5' transfer RNA (tRNA) half
accaggggtcgcgagttcaaatctcgctggggcc

SEQ ID NO: 3276 - DNA, 13 bp, Artificial Sequence
  synthetic circulating small noncoding RNA (sncRNA) 5' transfer RNA (tRNA) half
cgaaccggggacc

SEQ ID NO: 3277 - DNA, 21 bp, Artificial Sequence
  synthetic circulating small noncoding RNA (sncRNA) 5' transfer RNA (tRNA) half
gaacccgggccgcggcggtga

SEQ ID NO: 3278 - DNA, 29 bp, Artificial Sequence
  synthetic circulating small noncoding RNA (sncRNA) 5' transfer RNA (tRNA) half
ctgatgctctaccgactgagctatccggg

SEQ ID NO: 3279 - DNA, 25 bp, Artificial Sequence
  synthetic circulating small noncoding RNA (sncRNA) 5' transfer RNA (tRNA) half
ggggatgtagctcagtggtagagcg

SEQ ID NO: 3280 - DNA, 17 bp, Artificial Sequence
  synthetic circulating small noncoding RNA (sncRNA) 5' transfer RNA (tRNA) half
acccgggcctcccgcgt

SEQ ID NO: 3281 - DNA, 14 bp, Artificial Sequence
  synthetic circulating small noncoding RNA (sncRNA) 5' transfer RNA (tRNA) half
aaccggggacctct

SEQ ID NO: 3282 - DNA, 28 bp, Artificial Sequence
  synthetic circulating small noncoding RNA (sncRNA) 5' transfer RNA (tRNA) half
ggtggtctagtggttaggattcggcgct

SEQ ID NO: 3283 - DNA, 24 bp, Artificial Sequence
  synthetic circulating small noncoding RNA (sncRNA) 5' transfer RNA (tRNA) half
tactaaccactatacgatcacggc

SEQ ID NO: 3284 - DNA, 33 bp, Artificial Sequence
  synthetic circulating small noncoding RNA (sncRNA) 5' transfer RNA (tRNA) half
ccaggcggcccgggttcgactcccggtgtggga

SEQ ID NO: 3285 - DNA, 16 bp, Artificial Sequence
  synthetic circulating small noncoding RNA (sncRNA) 5' transfer RNA (tRNA) half
cgactcccggtatggg

SEQ ID NO: 3286 - DNA, 26 bp, Artificial Sequence
  synthetic circulating small noncoding RNA (sncRNA) 5' transfer RNA (tRNA) half
acccgggcctcccgcgtggcaggcga

SEQ ID NO: 3287 - DNA, 14 bp, Artificial Sequence
  synthetic circulating small noncoding RNA (sncRNA) 5' transfer RNA (tRNA) half
ggtgagagcgccga

SEQ ID NO: 3288 - DNA, 14 bp, Artificial Sequence
  synthetic circulating small noncoding RNA (sncRNA) 5' transfer RNA (tRNA) half
ggtcccaccgagat

SEQ ID NO: 3289 - DNA, 36 bp, Artificial Sequence
  synthetic circulating small noncoding RNA (sncRNA) 5' transfer RNA (tRNA) half
ctcgagccaggtaggagtcgaacctacaatcttctg

SEQ ID NO: 3290 - DNA, 31 bp, Artificial Sequence
  synthetic circulating small noncoding RNA (sncRNA) 5' transfer RNA (tRNA) half
agtgagaatcatacccctagaccaacgagcc

SEQ ID NO: 3291 - DNA, 32 bp, Artificial Sequence
  synthetic circulating small noncoding RNA (sncRNA) 5' transfer RNA (tRNA) half
tccagcgccttagaccgctcggccacactacc

SEQ ID NO: 3292 - DNA, 15 bp, Artificial Sequence
  synthetic circulating small noncoding RNA (sncRNA) 5' transfer RNA (tRNA) half
tccagagtgctaacc

SEQ ID NO: 3293 - DNA, 21 bp, Artificial Sequence
  synthetic circulating small noncoding RNA (sncRNA) 5' transfer RNA (tRNA) half
acccgggccgcggcggtgaga

SEQ ID NO: 3294 - DNA, 12 bp, Artificial Sequence
  synthetic circulating small noncoding RNA (sncRNA) 5' transfer RNA (tRNA) half
atcacgttcgcc

SEQ ID NO: 3295 - DNA, 20 bp, Artificial Sequence
  synthetic circulating small noncoding RNA (sncRNA) 5' transfer RNA (tRNA) half
aatggataaggcatcagcct

SEQ ID NO: 3296 - DNA, 23 bp, Artificial Sequence
  synthetic circulating small noncoding RNA (sncRNA) 5' transfer RNA (tRNA) half
ttctaccactgaaccaccaatgc

SEQ ID NO: 3297 - DNA, 16 bp, Artificial Sequence
  synthetic circulating small noncoding RNA (sncRNA) 5' transfer RNA (tRNA) half
accgggcggaaacagc

SEQ ID NO: 3298 - DNA, 29 bp, Artificial Sequence
  synthetic circulating small noncoding RNA (sncRNA) 5' transfer RNA (tRNA) half
cataccgggagtcgaacccgggccgcctg

SEQ ID NO: 3299 - DNA, 29 bp, Artificial Sequence
  synthetic circulating small noncoding RNA (sncRNA) 5' transfer RNA (tRNA) half
aaagtctgatgctctaccgactgagctat

SEQ ID NO: 3300 - DNA, 13 bp, Artificial Sequence
  synthetic circulating small noncoding RNA (sncRNA) 5' transfer RNA (tRNA) half
gagccagccagga

SEQ ID NO: 3301 - DNA, 20 bp, Artificial Sequence
  synthetic circulating small noncoding RNA (sncRNA) 5' transfer RNA (tRNA) half
aaactgggctcgtccgggat

SEQ ID NO: 3302 - DNA, 27 bp, Artificial Sequence
  synthetic circulating small noncoding RNA (sncRNA) 5' transfer RNA (tRNA) half
agagtactaaccactatacgatcacgg

SEQ ID NO: 3303 - DNA, 22 bp, Artificial Sequence
  synthetic circulating small noncoding RNA (sncRNA) 5' transfer RNA (tRNA) half
atgtggcagcggtgggattcga

SEQ ID NO: 3304 - DNA, 12 bp, Artificial Sequence
  synthetic circulating small noncoding RNA (sncRNA) 5' transfer RNA (tRNA) half
ccggacgagccc

SEQ ID NO: 3305 - DNA, 35 bp, Artificial Sequence
  synthetic circulating small noncoding RNA (sncRNA) 5' transfer RNA (tRNA) half
acccgggcctcccgcgtggcaggcgagaattctac

SEQ ID NO: 3306 - DNA, 15 bp, Artificial Sequence
  synthetic circulating small noncoding RNA (sncRNA) 5' transfer RNA (tRNA) half
tcccacatggtctag

SEQ ID NO: 3307 - DNA, 27 bp, Artificial Sequence
  synthetic circulating small noncoding RNA (sncRNA) 5' transfer RNA (tRNA) half
gcgagaatcatacccctagaccaacga

SEQ ID NO: 3308 - DNA, 20 bp, Artificial Sequence
  synthetic circulating small noncoding RNA (sncRNA) 5' transfer RNA (tRNA) half
tctgaatccagcgatccgag

SEQ ID NO: 3309 - DNA, 28 bp, Artificial Sequence
  synthetic circulating small noncoding RNA (sncRNA) 5' transfer RNA (tRNA) half
ggccgcggcggtgagagcgccgaatcct

SEQ ID NO: 3310 - DNA, 16 bp, Artificial Sequence
  synthetic circulating small noncoding RNA (sncRNA) 5' transfer RNA (tRNA) half
aaccctcaatcttctg

SEQ ID NO: 3311 - DNA, 21 bp, Artificial Sequence
  synthetic circulating small noncoding RNA (sncRNA) 5' transfer RNA (tRNA) half
tctagtggtatgattctcagt

SEQ ID NO: 3312 - DNA, 32 bp, Artificial Sequence
  synthetic circulating small noncoding RNA (sncRNA) 5' transfer RNA (tRNA) half
gtgcattggtggttcaatggtagaattctcgc

SEQ ID NO: 3313 - DNA, 19 bp, Artificial Sequence
  synthetic circulating small noncoding RNA (sncRNA) 5' transfer RNA (tRNA) half
gtggtatcatgcaagattc

SEQ ID NO: 3314 - DNA, 16 bp, Artificial Sequence
  synthetic circulating small noncoding RNA (sncRNA) 5' transfer RNA (tRNA) half
tcggtagagcatgaga

SEQ ID NO: 3315 - DNA, 30 bp, Artificial Sequence
  synthetic circulating small noncoding RNA (sncRNA) 5' transfer RNA (tRNA) half
ccaggcggcccgggttcgactcccggtgtg

SEQ ID NO: 3316 - DNA, 18 bp, Artificial Sequence
  synthetic circulating small noncoding RNA (sncRNA) 5' transfer RNA (tRNA) half
ttcgactcccggtatggg

SEQ ID NO: 3317 - DNA, 13 bp, Artificial Sequence
  synthetic circulating small noncoding RNA (sncRNA) 5' transfer RNA (tRNA) half
gtggcaggcgaga

SEQ ID NO: 3318 - DNA, 32 bp, Artificial Sequence
  synthetic circulating small noncoding RNA (sncRNA) 5' transfer RNA (tRNA) half
gtctaacgctctcccaactgagctatttcggc

SEQ ID NO: 3319 - DNA, 34 bp, Artificial Sequence
  synthetic circulating small noncoding RNA (sncRNA) 5' transfer RNA (tRNA) half
gccgtgatcgtataggggttagtactctgcgttg

SEQ ID NO: 3320 - DNA, 24 bp, Artificial Sequence
  synthetic circulating small noncoding RNA (sncRNA) 5' transfer RNA (tRNA) half
gacgacgaggatgggattcgaacc

SEQ ID NO: 3321 - DNA, 16 bp, Artificial Sequence
  synthetic circulating small noncoding RNA (sncRNA) 5' transfer RNA (tRNA) half
ctcaccgccgcggccc

SEQ ID NO: 3322 - DNA, 36 bp, Artificial Sequence
  synthetic circulating small noncoding RNA (sncRNA) 5' transfer RNA (tRNA) half
gtcccatgctctaccgactgagctagccgggcagct

SEQ ID NO: 3323 - DNA, 39 bp, Artificial Sequence
  synthetic circulating small noncoding RNA (sncRNA) 5' transfer RNA (tRNA) half
cgtgtgaggcgaacgtgataaccactacactacggaaac

SEQ ID NO: 3324 - DNA, 31 bp, Artificial Sequence
  synthetic circulating small noncoding RNA (sncRNA) 5' transfer RNA (tRNA) half
cggatagctcagtcggtagagcatcagactt

SEQ ID NO: 3325 - DNA, 28 bp, Artificial Sequence
  synthetic circulating small noncoding RNA (sncRNA) 5' transfer RNA (tRNA) half
gagaattctaccattgaaccaccaatgc

SEQ ID NO: 3326 - DNA, 27 bp, Artificial Sequence
  synthetic circulating small noncoding RNA (sncRNA) 5' transfer RNA (tRNA) half
cgaatcctaaccactagaccaccaggg

SEQ ID NO: 3327 - DNA, 30 bp, Artificial Sequence
  synthetic circulating small noncoding RNA (sncRNA) 5' transfer RNA (tRNA) half
cgggccgcggcggtgagagcgccgaatcct

SEQ ID NO: 3328 - DNA, 31 bp, Artificial Sequence
  synthetic circulating small noncoding RNA (sncRNA) 5' transfer RNA (tRNA) half
ggccgggaatcgaacccgggtcaactgcttg

SEQ ID NO: 3329 - DNA, 33 bp, Artificial Sequence
  synthetic circulating small noncoding RNA (sncRNA) 5' transfer RNA (tRNA) half
caggcaagaattctaccactgaaccaccaatgc

SEQ ID NO: 3330 - DNA, 36 bp, Artificial Sequence
  synthetic circulating small noncoding RNA (sncRNA) 5' transfer RNA (tRNA) half
tccaccgagatttgaactcggatcgctggattcaga

SEQ ID NO: 3331 - DNA, 16 bp, Artificial Sequence
  synthetic circulating small noncoding RNA (sncRNA) 5' transfer RNA (tRNA) half
cccatgctctaccgac

SEQ ID NO: 3332 - DNA, 13 bp, Artificial Sequence
  synthetic circulating small noncoding RNA (sncRNA) 5' transfer RNA (tRNA) half
cctgccgactacg

SEQ ID NO: 3333 - DNA, 15 bp, Artificial Sequence
  synthetic circulating small noncoding RNA (sncRNA) 5' transfer RNA (tRNA) half
ccgaagatcgcgggt

SEQ ID NO: 3334 - DNA, 29 bp, Artificial Sequence
  synthetic circulating small noncoding RNA (sncRNA) 5' transfer RNA (tRNA) half
tctgtagtgtagtggttatcacgttcgcc

SEQ ID NO: 3335 - DNA, 11 bp, Artificial Sequence
  synthetic circulating small noncoding RNA (sncRNA) 5' transfer RNA (tRNA) half
tccccggttcg

SEQ ID NO: 3336 - DNA, 15 bp, Artificial Sequence
  synthetic circulating small noncoding RNA (sncRNA) 5' transfer RNA (tRNA) half
gtagagcatgagact

SEQ ID NO: 3337 - DNA, 33 bp, Artificial Sequence
  synthetic circulating small noncoding RNA (sncRNA) 5' transfer RNA (tRNA) half
gtttccgcccggtttcgaaccggggacctttcg

SEQ ID NO: 3338 - DNA, 20 bp, Artificial Sequence
  synthetic circulating small noncoding RNA (sncRNA) 5' transfer RNA (tRNA) half
tagcggttaggattcctggt

SEQ ID NO: 3339 - DNA, 16 bp, Artificial Sequence
  synthetic circulating small noncoding RNA (sncRNA) 5' transfer RNA (tRNA) half
gcgaaaggtccccggt

SEQ ID NO: 3340 - DNA, 26 bp, Artificial Sequence
  synthetic circulating small noncoding RNA (sncRNA) 5' transfer RNA (tRNA) half
gtggagatgccggggatcgaacccgg

SEQ ID NO: 3341 - DNA, 15 bp, Artificial Sequence
  synthetic circulating small noncoding RNA (sncRNA) 5' transfer RNA (tRNA) half
aaggtccccggttcg

SEQ ID NO: 3342 - DNA, 18 bp, Artificial Sequence
  synthetic circulating small noncoding RNA (sncRNA) 5' transfer RNA (tRNA) half
ggctcgtccgggatttga

SEQ ID NO: 3343 - DNA, 19 bp, Artificial Sequence
  synthetic circulating small noncoding RNA (sncRNA) 5' transfer RNA (tRNA) half
ggagtcgaacccgggccgc

SEQ ID NO: 3344 - DNA, 17 bp, Artificial Sequence
  synthetic circulating small noncoding RNA (sncRNA) 5' transfer RNA (tRNA) half
tgttcccataccgggag

SEQ ID NO: 3345 - DNA, 19 bp, Artificial Sequence
  synthetic circulating small noncoding RNA (sncRNA) 5' transfer RNA (tRNA) half
aagcgagaatcatacccct

SEQ ID NO: 3346 - DNA, 17 bp, Artificial Sequence
  synthetic circulating small noncoding RNA (sncRNA) 5' transfer RNA (tRNA) half
tgagagcgccgaatcct

SEQ ID NO: 3347 - DNA, 23 bp, Artificial Sequence
  synthetic circulating small noncoding RNA (sncRNA) 5' transfer RNA (tRNA) half
tgctctaccgactgagctatccg

SEQ ID NO: 3348 - DNA, 13 bp, Artificial Sequence
  synthetic circulating small noncoding RNA (sncRNA) 5' transfer RNA (tRNA) half
tatcacgttcgcc

SEQ ID NO: 3349 - DNA, 37 bp, Artificial Sequence
  synthetic circulating small noncoding RNA (sncRNA) 5' transfer RNA (tRNA) half
cgccaaggtcgcgggttcgatccccgtacgggccaca

SEQ ID NO: 3350 - DNA, 20 bp, Artificial Sequence
  synthetic circulating small noncoding RNA (sncRNA) 5' transfer RNA (tRNA) half
tgttcccataccgggagtcg

SEQ ID NO: 3351 - DNA, 31 bp, Artificial Sequence
  synthetic circulating small noncoding RNA (sncRNA) 5' transfer RNA (tRNA) half
ccgtgactcggattcgaaccgaggttgctgc

SEQ ID NO: 3352 - DNA, 17 bp, Artificial Sequence
  synthetic circulating small noncoding RNA (sncRNA) 5' transfer RNA (tRNA) half
gagtctcatgctctacc

SEQ ID NO: 3353 - DNA, 23 bp, Artificial Sequence
  synthetic circulating small noncoding RNA (sncRNA) 5' transfer RNA (tRNA) half
tcgatccatcgacctctgggtta

SEQ ID NO: 3354 - DNA, 19 bp, Artificial Sequence
  synthetic circulating small noncoding RNA (sncRNA) 5' transfer RNA (tRNA) half
ccaggaatcctaaccgcta

SEQ ID NO: 3355 - DNA, 15 bp, Artificial Sequence
  synthetic circulating small noncoding RNA (sncRNA) 5' transfer RNA (tRNA) half
gaacccgggccgcgg

SEQ ID NO: 3356 - DNA, 18 bp, Artificial Sequence
  synthetic circulating small noncoding RNA (sncRNA) 5' transfer RNA (tRNA) half
ttcaaatcccggacgagc

SEQ ID NO: 3357 - DNA, 16 bp, Artificial Sequence
  synthetic circulating small noncoding RNA (sncRNA) 5' transfer RNA (tRNA) half
tctgagctacatcccc

SEQ ID NO: 3358 - DNA, 21 bp, Artificial Sequence
  synthetic circulating small noncoding RNA (sncRNA) 5' transfer RNA (tRNA) half
tctaccgactgagctatccgg

SEQ ID NO: 3359 - DNA, 22 bp, Artificial Sequence
  synthetic circulating small noncoding RNA (sncRNA) 5' transfer RNA (tRNA) half
tctaggggtatgattctcgctt

SEQ ID NO: 3360 - DNA, 36 bp, Artificial Sequence
  synthetic circulating small noncoding RNA (sncRNA) 5' transfer RNA (tRNA) half
agcctccctggtggtctagtggttaggattcggcgc

SEQ ID NO: 3361 - DNA, 33 bp, Artificial Sequence
  synthetic circulating small noncoding RNA (sncRNA) 5' transfer RNA (tRNA) half
ggttaggattcggcgctctcaccgccgcggccc

SEQ ID NO: 3362 - DNA, 33 bp, Artificial Sequence
  synthetic circulating small noncoding RNA (sncRNA) 5' transfer RNA (tRNA) half
gcattggtggttcaatggtagaattctcgcctc

SEQ ID NO: 3363 - DNA, 27 bp, Artificial Sequence
  synthetic circulating small noncoding RNA (sncRNA) 5' transfer RNA (tRNA) half
tcggtagagcatgagactcttaatctc

SEQ ID NO: 3364 - DNA, 29 bp, Artificial Sequence
  synthetic circulating small noncoding RNA (sncRNA) 5' transfer RNA (tRNA) half
ccggatagctcagtcggtagagcatcaga

SEQ ID NO: 3365 - DNA, 27 bp, Artificial Sequence
  synthetic circulating small noncoding RNA (sncRNA) 5' transfer RNA (tRNA) half
ggctagctcagtcggtagagcatgaga

SEQ ID NO: 3366 - DNA, 12 bp, Artificial Sequence
  synthetic circulating small noncoding RNA (sncRNA) 5' transfer RNA (tRNA) half
ttccctgaccgg

SEQ ID NO: 3367 - DNA, 18 bp, Artificial Sequence
  synthetic circulating small noncoding RNA (sncRNA) 5' transfer RNA (tRNA) half
gcattggccgggaatcga

SEQ ID NO: 3368 - DNA, 29 bp, Artificial Sequence
  synthetic circulating small noncoding RNA (sncRNA) 5' transfer RNA (tRNA) half
cacatggtctagcggttaggattcctggt

SEQ ID NO: 3369 - DNA, 21 bp, Artificial Sequence
  synthetic circulating small noncoding RNA (sncRNA) 5' transfer RNA (tRNA) half
tcgactcccggtgtgggaaac

SEQ ID NO: 3370 - DNA, 20 bp, Artificial Sequence
  synthetic circulating small noncoding RNA (sncRNA) 5' transfer RNA (tRNA) half
cccattcttgcgacccgggt

SEQ ID NO: 3371 - DNA, 35 bp, Artificial Sequence
  synthetic circulating small noncoding RNA (sncRNA) 5' transfer RNA (tRNA) half
gcatgaggtcctgggttcgatccccagcatctcca

SEQ ID NO: 3372 - DNA, 20 bp, Artificial Sequence
  synthetic circulating small noncoding RNA (sncRNA) 5' transfer RNA (tRNA) half
ctgccgtgactcggattcga

SEQ ID NO: 3373 - DNA, 15 bp, Artificial Sequence
  synthetic circulating small noncoding RNA (sncRNA) 5' transfer RNA (tRNA) half
agggggcacccggat

SEQ ID NO: 3374 - DNA, 14 bp, Artificial Sequence
  synthetic circulating small noncoding RNA (sncRNA) 5' transfer RNA (tRNA) half
cccgggcctcccgc

SEQ ID NO: 3375 - DNA, 16 bp, Artificial Sequence
  synthetic circulating small noncoding RNA (sncRNA) 5' transfer RNA (tRNA) half
ggttcgattcccgggc

SEQ ID NO: 3376 - DNA, 22 bp, Artificial Sequence
  synthetic circulating small noncoding RNA (sncRNA) 5' transfer RNA (tRNA) half
ccccgtcggggaattgaacccc

SEQ ID NO: 3377 - DNA, 10 bp, Artificial Sequence
  synthetic circulating small noncoding RNA (sncRNA) 5' transfer RNA (tRNA) half
cgaaccgggg

SEQ ID NO: 3378 - DNA, 23 bp, Artificial Sequence
  synthetic circulating small noncoding RNA (sncRNA) 5' transfer RNA (tRNA) half
ttgggtgcgagaggtcccgggtt

SEQ ID NO: 3379 - DNA, 33 bp, Artificial Sequence
  synthetic circulating small noncoding RNA (sncRNA) 5' transfer RNA (tRNA) half
ggccctatagctcaggggttagagcactggtct

SEQ ID NO: 3380 - DNA, 22 bp, Artificial Sequence
  synthetic circulating small noncoding RNA (sncRNA) 5' transfer RNA (tRNA) half
cagtcggtagagcatcagactt

SEQ ID NO: 3381 - DNA, 10 bp, Artificial Sequence
  synthetic circulating small noncoding RNA (sncRNA) 5' transfer RNA (tRNA) half
cgtagtcggc

SEQ ID NO: 3382 - DNA, 27 bp, Artificial Sequence
  synthetic circulating small noncoding RNA (sncRNA) 5' transfer RNA (tRNA) half
ccgctggtgtagtggtatcatgcaaga

SEQ ID NO: 3383 - DNA, 36 bp, Artificial Sequence
  synthetic circulating small noncoding RNA (sncRNA) 5' transfer RNA (tRNA) half
acgcgggaggcccgggttcgattcccggccaatgca

SEQ ID NO: 3384 - DNA, 14 bp, Artificial Sequence
  synthetic circulating small noncoding RNA (sncRNA) 5' transfer RNA (tRNA) half
gacgaggtggccga

SEQ ID NO: 3385 - DNA, 21 bp, Artificial Sequence
  synthetic circulating small noncoding RNA (sncRNA) 5' transfer RNA (tRNA) half
tccctggtggtctagtggtta

SEQ ID NO: 3386 - DNA, 15 bp, Artificial Sequence
  synthetic circulating small noncoding RNA (sncRNA) 5' transfer RNA (tRNA) half
gctctaccgactgag

SEQ ID NO: 3387 - DNA, 31 bp, Artificial Sequence
  synthetic circulating small noncoding RNA (sncRNA) 5' transfer RNA (tRNA) half
agcatgtgctctaccactgagctacatcccc

SEQ ID NO: 3388 - DNA, 19 bp, Artificial Sequence
  synthetic circulating small noncoding RNA (sncRNA) 5' transfer RNA (tRNA) half
aggcgaacgtgataaccac

SEQ ID NO: 3389 - DNA, 27 bp, Artificial Sequence
  synthetic circulating small noncoding RNA (sncRNA) 5' transfer RNA (tRNA) half
acgcagagtactaaccactatacgatc

SEQ ID NO: 3390 - DNA, 15 bp, Artificial Sequence
  synthetic circulating small noncoding RNA (sncRNA) 5' transfer RNA (tRNA) half
ggtagagcatcagac

SEQ ID NO: 3391 - DNA, 34 bp, Artificial Sequence
  synthetic circulating small noncoding RNA (sncRNA) 5' transfer RNA (tRNA) half
aagtccagagtgctaaccattacaccatgggacc

SEQ ID NO: 3392 - DNA, 13 bp, Artificial Sequence
  synthetic circulating small noncoding RNA (sncRNA) 5' transfer RNA (tRNA) half
atggttagcactc

SEQ ID NO: 3393 - DNA, 30 bp, Artificial Sequence
  synthetic circulating small noncoding RNA (sncRNA) 5' transfer RNA (tRNA) half
ccacatggtctagcggttaggattcctggt

SEQ ID NO: 3394 - DNA, 32 bp, Artificial Sequence
  synthetic circulating small noncoding RNA (sncRNA) 5' transfer RNA (tRNA) half
aaggtcctgggttcgagccccagtggaaccac

SEQ ID NO: 3395 - DNA, 37 bp, Artificial Sequence
  synthetic circulating small noncoding RNA (sncRNA) 5' transfer RNA (tRNA) half
attcttgcgacccgggttcgattcccgggcggcgcat

SEQ ID NO: 3396 - DNA, 19 bp, Artificial Sequence
  synthetic circulating small noncoding RNA (sncRNA) 5' transfer RNA (tRNA) half
tggttagtactctgcgttg

SEQ ID NO: 3397 - DNA, 21 bp, Artificial Sequence
  synthetic circulating small noncoding RNA (sncRNA) 5' transfer RNA (tRNA) half
tcccacaccgggagtcgaacc

SEQ ID NO: 3398 - DNA, 19 bp, Artificial Sequence
  synthetic circulating small noncoding RNA (sncRNA) 5' transfer RNA (tRNA) half
gaccgcgtggcctaatgga

SEQ ID NO: 3399 - DNA, 24 bp, Artificial Sequence
  synthetic circulating small noncoding RNA (sncRNA) 5' transfer RNA (tRNA) half
aaagtctgatgctctaccgactga

SEQ ID NO: 3400 - DNA, 32 bp, Artificial Sequence
  synthetic circulating small noncoding RNA (sncRNA) 5' transfer RNA (tRNA) half
gccccagcgagatttgaactcgcgacccctgg

SEQ ID NO: 3401 - DNA, 28 bp, Artificial Sequence
  synthetic circulating small noncoding RNA (sncRNA) 5' transfer RNA (tRNA) half
ccctggtggtctagtggttaggattcgg

SEQ ID NO: 3402 - DNA, 25 bp, Artificial Sequence
  synthetic circulating small noncoding RNA (sncRNA) 5' transfer RNA (tRNA) half
ccttcgatagctcagctggtagagc

SEQ ID NO: 3403 - DNA, 12 bp, Artificial Sequence
  synthetic circulating small noncoding RNA (sncRNA) 5' transfer RNA (tRNA) half
gactccgccggg

SEQ ID NO: 3404 - DNA, 33 bp, Artificial Sequence
  synthetic circulating small noncoding RNA (sncRNA) 5' transfer RNA (tRNA) half
ggcaagaattctaccactgaaccaccaatgctt

SEQ ID NO: 3405 - DNA, 16 bp, Artificial Sequence
  synthetic circulating small noncoding RNA (sncRNA) 5' transfer RNA (tRNA) half
ccccggtctcccgcgt

SEQ ID NO: 3406 - DNA, 19 bp, Artificial Sequence
  synthetic circulating small noncoding RNA (sncRNA) 5' transfer RNA (tRNA) half
gacaggcggggatactaac

SEQ ID NO: 3407 - DNA, 15 bp, Artificial Sequence
  synthetic circulating small noncoding RNA (sncRNA) 5' transfer RNA (tRNA) half
tggtagagcgctcgc

SEQ ID NO: 3408 - DNA, 15 bp, Artificial Sequence
  synthetic circulating small noncoding RNA (sncRNA) 5' transfer RNA (tRNA) half
gggccgcggcggtga

SEQ ID NO: 3409 - DNA, 18 bp, Artificial Sequence
  synthetic circulating small noncoding RNA (sncRNA) 5' transfer RNA (tRNA) half
tcgaaccccgtccgtgcc

SEQ ID NO: 3410 - DNA, 12 bp, Artificial Sequence
  synthetic circulating small noncoding RNA (sncRNA) 5' transfer RNA (tRNA) half
tcgatccccggc

SEQ ID NO: 3411 - DNA, 16 bp, Artificial Sequence
  synthetic circulating small noncoding RNA (sncRNA) 5' transfer RNA (tRNA) half
gagtactaaccactat

SEQ ID NO: 3412 - DNA, 17 bp, Artificial Sequence
  synthetic circulating small noncoding RNA (sncRNA) 5' transfer RNA (tRNA) half
atcacgtcggggtcatc

SEQ ID NO: 3413 - DNA, 10 bp, Artificial Sequence
  synthetic circulating small noncoding RNA (sncRNA) 5' transfer RNA (tRNA) half
ggtcccaccg

SEQ ID NO: 3414 - DNA, 25 bp, Artificial Sequence
  synthetic circulating small noncoding RNA (sncRNA) 5' transfer RNA (tRNA) half
tggtagaattctcgcctgccacgcg

SEQ ID NO: 3415 - DNA, 34 bp, Artificial Sequence
  synthetic circulating small noncoding RNA (sncRNA) 5' transfer RNA (tRNA) half
atccttaggtcgctggttcgattccggctcgaag

SEQ ID NO: 3416 - DNA, 17 bp, Artificial Sequence
  synthetic circulating small noncoding RNA (sncRNA) 5' transfer RNA (tRNA) half
accccggtctcccgcgt

SEQ ID NO: 3417 - DNA, 18 bp, Artificial Sequence
  synthetic circulating small noncoding RNA (sncRNA) 5' transfer RNA (tRNA) half
ccactcggccacctcgtc

SEQ ID NO: 3418 - DNA, 28 bp, Artificial Sequence
  synthetic circulating small noncoding RNA (sncRNA) 5' transfer RNA (tRNA) half
cgctggattcagagtccagagtgctaac

SEQ ID NO: 3419 - DNA, 22 bp, Artificial Sequence
  synthetic circulating small noncoding RNA (sncRNA) 5' transfer RNA (tRNA) half
gtagtcgtggccgagtggttaa

SEQ ID NO: 3420 - DNA, 23 bp, Artificial Sequence
  synthetic circulating small noncoding RNA (sncRNA) 5' transfer RNA (tRNA) half
tagtggttagtactctgcgttgt

SEQ ID NO: 3421 - DNA, 35 bp, Artificial Sequence
  synthetic circulating small noncoding RNA (sncRNA) 5' transfer RNA (tRNA) half
cgcagcaacctcggttcgaatccgagtcacggcat

SEQ ID NO: 3422 - DNA, 32 bp, Artificial Sequence
  synthetic circulating small noncoding RNA (sncRNA) 5' transfer RNA (tRNA) half
gttcccataccgggagtcgaacccgggccgcc

SEQ ID NO: 3423 - DNA, 17 bp, Artificial Sequence
  synthetic circulating small noncoding RNA (sncRNA) 5' transfer RNA (tRNA) half
agtcccatgctctaccg

SEQ ID NO: 3424 - DNA, 15 bp, Artificial Sequence
  synthetic circulating small noncoding RNA (sncRNA) 5' transfer RNA (tRNA) half
tccggctcgaaggac

SEQ ID NO: 3425 - DNA, 23 bp, Artificial Sequence
  synthetic circulating small noncoding RNA (sncRNA) 5' transfer RNA (tRNA) half
cggctagctcagtcggtagagca

SEQ ID NO: 3426 - DNA, 22 bp, Artificial Sequence
  synthetic circulating small noncoding RNA (sncRNA) 5' transfer RNA (tRNA) half
taatggataaggcatcagcctc

SEQ ID NO: 3427 - DNA, 27 bp, Artificial Sequence
  synthetic circulating small noncoding RNA (sncRNA) 5' transfer RNA (tRNA) half
tatggaggcgtgggttcgaatcccact

SEQ ID NO: 3428 - DNA, 25 bp, Artificial Sequence
  synthetic circulating small noncoding RNA (sncRNA) 5' transfer RNA (tRNA) half
gagtcccatgctctaccgactgagc

SEQ ID NO: 3429 - DNA, 20 bp, Artificial Sequence
  synthetic circulating small noncoding RNA (sncRNA) 5' transfer RNA (tRNA) half
tcgattccggctcgaaggac

SEQ ID NO: 3430 - DNA, 38 bp, Artificial Sequence
  synthetic circulating small noncoding RNA (sncRNA) 5' transfer RNA (tRNA) half
ccggctagctcagtcggtagagcatgagactcttaatc

SEQ ID NO: 3431 - DNA, 14 bp, Artificial Sequence
  synthetic circulating small noncoding RNA (sncRNA) 5' transfer RNA (tRNA) half
atcacgtcggggtc

SEQ ID NO: 3432 - DNA, 16 bp, Artificial Sequence
  synthetic circulating small noncoding RNA (sncRNA) 5' transfer RNA (tRNA) half
gcgccgaatcctagcc

SEQ ID NO: 3433 - DNA, 23 bp, Artificial Sequence
  synthetic circulating small noncoding RNA (sncRNA) 5' transfer RNA (tRNA) half
ggttcgactcccggtatgggaac

SEQ ID NO: 3434 - DNA, 34 bp, Artificial Sequence
  synthetic circulating small noncoding RNA (sncRNA) 5' transfer RNA (tRNA) half
aggcggcccgggttcgactcccggtatgggaaca

SEQ ID NO: 3435 - DNA, 28 bp, Artificial Sequence
  synthetic circulating small noncoding RNA (sncRNA) 5' transfer RNA (tRNA) half
gcgccgctggtgtagtggtatcatgcaa

SEQ ID NO: 3436 - DNA, 31 bp, Artificial Sequence
  synthetic circulating small noncoding RNA (sncRNA) 5' transfer RNA (tRNA) half
ctggcgccttagaccactcggccatcctgac

SEQ ID NO: 3437 - DNA, 37 bp, Artificial Sequence
  synthetic circulating small noncoding RNA (sncRNA) 5' transfer RNA (tRNA) half
tcagaagattgagggttcgagtcccttcgtggtcgaa

SEQ ID NO: 3438 - DNA, 27 bp, Artificial Sequence
  synthetic circulating small noncoding RNA (sncRNA) 5' transfer RNA (tRNA) half
gtgctctaacccctgagctatggagcc

SEQ ID NO: 3439 - DNA, 14 bp, Artificial Sequence
  synthetic circulating small noncoding RNA (sncRNA) 5' transfer RNA (tRNA) half
aggtccccggttcg

SEQ ID NO: 3440 - DNA, 36 bp, Artificial Sequence
  synthetic circulating small noncoding RNA (sncRNA) 5' transfer RNA (tRNA) half
ccgaccacgaagggactcgaaccctcaatcttctga

SEQ ID NO: 3441 - DNA, 36 bp, Artificial Sequence
  synthetic circulating small noncoding RNA (sncRNA) 5' transfer RNA (tRNA) half
gtttccgtagtgtagtggttatcacgttcgcctcac

SEQ ID NO: 3442 - DNA, 13 bp, Artificial Sequence
  synthetic circulating small noncoding RNA (sncRNA) 5' transfer RNA (tRNA) half
cggctcgaaggac

SEQ ID NO: 3443 - DNA, 25 bp, Artificial Sequence
  synthetic circulating small noncoding RNA (sncRNA) 5' transfer RNA (tRNA) half
atcgtatagtggttagtactctgcg

SEQ ID NO: 3444 - DNA, 26 bp, Artificial Sequence
  synthetic circulating small noncoding RNA (sncRNA) 5' transfer RNA (tRNA) half
tgatcgtatagtggttagtactctgc

SEQ ID NO: 3445 - DNA, 27 bp, Artificial Sequence
  synthetic circulating small noncoding RNA (sncRNA) 5' transfer RNA (tRNA) half
cgagaattctaccactgaaccaccaat

SEQ ID NO: 3446 - DNA, 36 bp, Artificial Sequence
  synthetic circulating small noncoding RNA (sncRNA) 5' transfer RNA (tRNA) half
agcgcccgaacagggacttgaaccctggaccctcag

SEQ ID NO: 3447 - DNA, 37 bp, Artificial Sequence
  synthetic circulating small noncoding RNA (sncRNA) 5' transfer RNA (tRNA) half
tgtgccccgtgtgaggatcgaactcacgaccttcaga

SEQ ID NO: 3448 - DNA, 18 bp, Artificial Sequence
  synthetic circulating small noncoding RNA (sncRNA) 5' transfer RNA (tRNA) half
agacgacgaaggtgggat

SEQ ID NO: 3449 - DNA, 34 bp, Artificial Sequence
  synthetic circulating small noncoding RNA (sncRNA) 5' transfer RNA (tRNA) half
aggcgagaattctaccattgaaccaccaatgcac

SEQ ID NO: 3450 - DNA, 34 bp, Artificial Sequence
  synthetic circulating small noncoding RNA (sncRNA) 5' transfer RNA (tRNA) half
cgggcctcccgcgtggcaggcgagaattctacca

SEQ ID NO: 3451 - DNA, 31 bp, Artificial Sequence
  synthetic circulating small noncoding RNA (sncRNA) 5' transfer RNA (tRNA) half
taggttccaccgagatttgaactcggatcgc

SEQ ID NO: 3452 - DNA, 25 bp, Artificial Sequence
  synthetic circulating small noncoding RNA (sncRNA) 5' transfer RNA (tRNA) half
gcagagtactaaccactatacgatc

SEQ ID NO: 3453 - DNA, 34 bp, Artificial Sequence
  synthetic circulating small noncoding RNA (sncRNA) 5' transfer RNA (tRNA) half
tgtcagaagtgggattcgaacccacgcctccatt

SEQ ID NO: 3454 - DNA, 23 bp, Artificial Sequence
  synthetic circulating small noncoding RNA (sncRNA) 5' transfer RNA (tRNA) half
ccggctagctcagtcggtagagc

SEQ ID NO: 3455 - DNA, 21 bp, Artificial Sequence
  synthetic circulating small noncoding RNA (sncRNA) 5' transfer RNA (tRNA) half
tccgcagcgagcagggttcga

SEQ ID NO: 3456 - DNA, 20 bp, Artificial Sequence
  synthetic circulating small noncoding RNA (sncRNA) 5' transfer RNA (tRNA) half
tctagtggttaggattcggc

SEQ ID NO: 3457 - DNA, 35 bp, Artificial Sequence
  synthetic circulating small noncoding RNA (sncRNA) 5' transfer RNA (tRNA) half
ctgttcccataccgggagtcgaacccgggccgcct

SEQ ID NO: 3458 - DNA, 19 bp, Artificial Sequence
  synthetic circulating small noncoding RNA (sncRNA) 5' transfer RNA (tRNA) half
ctctaccgactgagctagc

SEQ ID NO: 3459 - DNA, 16 bp, Artificial Sequence
  synthetic circulating small noncoding RNA (sncRNA) 5' transfer RNA (tRNA) half
ttctcgcctgccacgc

SEQ ID NO: 3460 - DNA, 34 bp, Artificial Sequence
  synthetic circulating small noncoding RNA (sncRNA) 5' transfer RNA (tRNA) half
gtccctgggtgggctcgaaccaccaacctttcgg

SEQ ID NO: 3461 - DNA, 33 bp, Artificial Sequence
  synthetic circulating small noncoding RNA (sncRNA) 5' transfer RNA (tRNA) half
gagccagccaggagtcgaacctggaatcttctg

SEQ ID NO: 3462 - DNA, 26 bp, Artificial Sequence
  synthetic circulating small noncoding RNA (sncRNA) 5' transfer RNA (tRNA) half
gtggtctagtggttaggattcggcgc

SEQ ID NO: 3463 - DNA, 30 bp, Artificial Sequence
  synthetic circulating small noncoding RNA (sncRNA) 5' transfer RNA (tRNA) half
cggcccgggttcgactcccggtgtgggaac

SEQ ID NO: 3464 - DNA, 15 bp, Artificial Sequence
  synthetic circulating small noncoding RNA (sncRNA) 5' transfer RNA (tRNA) half
cgagaggtcccgggt

SEQ ID NO: 3465 - DNA, 14 bp, Artificial Sequence
  synthetic circulating small noncoding RNA (sncRNA) 5' transfer RNA (tRNA) half
cacgcgggaggccc

SEQ ID NO: 3466 - DNA, 19 bp, Artificial Sequence
  synthetic circulating small noncoding RNA (sncRNA) 5' transfer RNA (tRNA) half
tcccacatggtctagcggt

SEQ ID NO: 3467 - DNA, 35 bp, Artificial Sequence
  synthetic circulating small noncoding RNA (sncRNA) 5' transfer RNA (tRNA) half
gagtctcatgctctaccgactgagctagccgggcg

SEQ ID NO: 3468 - DNA, 19 bp, Artificial Sequence
  synthetic circulating small noncoding RNA (sncRNA) 5' transfer RNA (tRNA) half
gcggaagcgtgctgggccc

SEQ ID NO: 3469 - DNA, 11 bp, Artificial Sequence
  synthetic circulating small noncoding RNA (sncRNA) 5' transfer RNA (tRNA) half
tgccgactacg

SEQ ID NO: 3470 - DNA, 19 bp, Artificial Sequence
  synthetic circulating small noncoding RNA (sncRNA) 5' transfer RNA (tRNA) half
gagatgccggggatcgaac

SEQ ID NO: 3471 - DNA, 14 bp, Artificial Sequence
  synthetic circulating small noncoding RNA (sncRNA) 5' transfer RNA (tRNA) half
atcccggacgagcc

SEQ ID NO: 3472 - DNA, 36 bp, Artificial Sequence
  synthetic circulating small noncoding RNA (sncRNA) 5' transfer RNA (tRNA) half
agaagattgcaggttcgagtcctgccgcggtcgact

SEQ ID NO: 3473 - DNA, 18 bp, Artificial Sequence
  synthetic circulating small noncoding RNA (sncRNA) 5' transfer RNA (tRNA) half
accaggaatcctaaccgc

SEQ ID NO: 3474 - DNA, 15 bp, Artificial Sequence
  synthetic circulating small noncoding RNA (sncRNA) 5' transfer RNA (tRNA) half
gaaccgaggttgctg

SEQ ID NO: 3475 - DNA, 27 bp, Artificial Sequence
  synthetic circulating small noncoding RNA (sncRNA) 5' transfer RNA (tRNA) half
gtagtgtagtggttatcacgttcgcct

SEQ ID NO: 3476 - DNA, 19 bp, Artificial Sequence
  synthetic circulating small noncoding RNA (sncRNA) 5' transfer RNA (tRNA) half
cgtggcaggcgagaattct

SEQ ID NO: 3477 - DNA, 13 bp, Artificial Sequence
  synthetic circulating small noncoding RNA (sncRNA) 5' transfer RNA (tRNA) half
gggaggcccgggt

SEQ ID NO: 3478 - DNA, 29 bp, Artificial Sequence
  synthetic circulating small noncoding RNA (sncRNA) 5' transfer RNA (tRNA) half
agcagagtggcgcagcggaagcgtgctgg

SEQ ID NO: 3479 - DNA, 34 bp, Artificial Sequence
  synthetic circulating small noncoding RNA (sncRNA) 5' transfer RNA (tRNA) half
cgagccagccaggagtcgaacctagaatcttctg

SEQ ID NO: 3480 - DNA, 34 bp, Artificial Sequence
  synthetic circulating small noncoding RNA (sncRNA) 5' transfer RNA (tRNA) half
gaaggtcctgggttcgagccccagtggaaccacg

SEQ ID NO: 3481 - DNA, 35 bp, Artificial Sequence
  synthetic circulating small noncoding RNA (sncRNA) 5' transfer RNA (tRNA) half
acaggagatcctgggttcgactcccagtggggcct

SEQ ID NO: 3482 - DNA, 38 bp, Artificial Sequence
  synthetic circulating small noncoding RNA (sncRNA) 5' transfer RNA (tRNA) half
cgcagaaggtcctgggttcgagccccagtggaaccacg

SEQ ID NO: 3483 - DNA, 25 bp, Artificial Sequence
  synthetic circulating small noncoding RNA (sncRNA) 5' transfer RNA (tRNA) half
gctcgaaccaccaacctttcggtta

SEQ ID NO: 3484 - DNA, 35 bp, Artificial Sequence
  synthetic circulating small noncoding RNA (sncRNA) 5' transfer RNA (tRNA) half
gttcccataccgggagtcgaacccgggccgcctgg

SEQ ID NO: 3485 - DNA, 16 bp, Artificial Sequence
  synthetic circulating small noncoding RNA (sncRNA) 5' transfer RNA (tRNA) half
gcgccgctggtgtagt

SEQ ID NO: 3486 - DNA, 12 bp, Artificial Sequence
  synthetic circulating small noncoding RNA (sncRNA) 5' transfer RNA (tRNA) half
cccggacgagcc

SEQ ID NO: 3487 - DNA, 21 bp, Artificial Sequence
  synthetic circulating small noncoding RNA (sncRNA) 5' transfer RNA (tRNA) half
gtcaggatggccgagtggtct

SEQ ID NO: 3488 - DNA, 20 bp, Artificial Sequence
  synthetic circulating small noncoding RNA (sncRNA) 5' transfer RNA (tRNA) half
gcggcccgggttcgactccc

SEQ ID NO: 3489 - DNA, 21 bp, Artificial Sequence
  synthetic circulating small noncoding RNA (sncRNA) 5' transfer RNA (tRNA) half
cgcagcggaagcgtgctgggc

SEQ ID NO: 3490 - DNA, 28 bp, Artificial Sequence
  synthetic circulating small noncoding RNA (sncRNA) 5' transfer RNA (tRNA) half
gcggcccgggttcgactcccggtgtggg

SEQ ID NO: 3491 - DNA, 25 bp, Artificial Sequence
  synthetic circulating small noncoding RNA (sncRNA) 5' transfer RNA (tRNA) half
ctccagtctcttcgggggcgtgggt

SEQ ID NO: 3492 - DNA, 27 bp, Artificial Sequence
  synthetic circulating small noncoding RNA (sncRNA) 5' transfer RNA (tRNA) half
gccgcggcggtgagagcgccgaatcct

SEQ ID NO: 3493 - DNA, 34 bp, Artificial Sequence
  synthetic circulating small noncoding RNA (sncRNA) 5' transfer RNA (tRNA) half
aggcggcccgggttcgactcccggtgtgggaacg

SEQ ID NO: 3494 - DNA, 21 bp, Artificial Sequence
  synthetic circulating small noncoding RNA (sncRNA) 5' transfer RNA (tRNA) half
cttccgctgcgccactctgct

SEQ ID NO: 3495 - DNA, 22 bp, Artificial Sequence
  synthetic circulating small noncoding RNA (sncRNA) 5' transfer RNA (tRNA) half
aactcggatcgctggattcaaa

SEQ ID NO: 3496 - DNA, 24 bp, Artificial Sequence
  synthetic circulating small noncoding RNA (sncRNA) 5' transfer RNA (tRNA) half
ctttgaatccagcgatccgagttc

SEQ ID NO: 3497 - DNA, 27 bp, Artificial Sequence
  synthetic circulating small noncoding RNA (sncRNA) 5' transfer RNA (tRNA) half
gcccggctagctcagtcggtagagcat

SEQ ID NO: 3498 - DNA, 14 bp, Artificial Sequence
  synthetic circulating small noncoding RNA (sncRNA) 5' transfer RNA (tRNA) half
acgcagagtactaa

SEQ ID NO: 3499 - DNA, 16 bp, Artificial Sequence
  synthetic circulating small noncoding RNA (sncRNA) 5' transfer RNA (tRNA) half
ccactgaaccaccaat

SEQ ID NO: 3500 - DNA, 28 bp, Artificial Sequence
  synthetic circulating small noncoding RNA (sncRNA) 5' transfer RNA (tRNA) half
cgcccgaacagggacttgaaccctggac

SEQ ID NO: 3501 - DNA, 15 bp, Artificial Sequence
  synthetic circulating small noncoding RNA (sncRNA) 5' transfer RNA (tRNA) half
gcgggaggcccgggt

SEQ ID NO: 3502 - DNA, 18 bp, Artificial Sequence
  synthetic circulating small noncoding RNA (sncRNA) 5' transfer RNA (tRNA) half
ttcgactcccggtgtggg

SEQ ID NO: 3503 - DNA, 18 bp, Artificial Sequence
  synthetic circulating small noncoding RNA (sncRNA) 5' transfer RNA (tRNA) half
ccactcggccattctggt

SEQ ID NO: 3504 - DNA, 31 bp, Artificial Sequence
  synthetic circulating small noncoding RNA (sncRNA) 5' transfer RNA (tRNA) half
ccctgaccgggaatcgaacccgggccgcggc

SEQ ID NO: 3505 - DNA, 35 bp, Artificial Sequence
  synthetic circulating small noncoding RNA (sncRNA) 5' transfer RNA (tRNA) half
gtgttcccacaccgggagtcgaacccgggccgcct

SEQ ID NO: 3506 - DNA, 17 bp, Artificial Sequence
  synthetic circulating small noncoding RNA (sncRNA) 5' transfer RNA (tRNA) half
cttgaccccgacgtgac

SEQ ID NO: 3507 - DNA, 19 bp, Artificial Sequence
  synthetic circulating small noncoding RNA (sncRNA) 5' transfer RNA (tRNA) half
cgggccgcctgggtgaaaa

SEQ ID NO: 3508 - DNA, 32 bp, Artificial Sequence
  synthetic circulating small noncoding RNA (sncRNA) 5' transfer RNA (tRNA) half
ccataccgggagtcgaacccgggccgcctggg

SEQ ID NO: 3509 - DNA, 18 bp, Artificial Sequence
  synthetic circulating small noncoding RNA (sncRNA) 5' transfer RNA (tRNA) half
gagccagccaggagtcga

SEQ ID NO: 3510 - DNA, 42 bp, Artificial Sequence
  synthetic circulating small noncoding RNA (sncRNA) 5' transfer RNA (tRNA) half
gggccgcggcggtgagagcgccgaatcctaaccactagacca

SEQ ID NO: 3511 - DNA, 16 bp, Artificial Sequence
  synthetic circulating small noncoding RNA (sncRNA) 5' transfer RNA (tRNA) half
gcgagcgctctaccat

SEQ ID NO: 3512 - DNA, 36 bp, Artificial Sequence
  synthetic circulating small noncoding RNA (sncRNA) 5' transfer RNA (tRNA) half
ccaggcggcccgggttcgactcccggtatgggaaca

SEQ ID NO: 3513 - DNA, 15 bp, Artificial Sequence
  synthetic circulating small noncoding RNA (sncRNA) 5' transfer RNA (tRNA) half
ggttatcacgttcgc

SEQ ID NO: 3514 - DNA, 31 bp, Artificial Sequence
  synthetic circulating small noncoding RNA (sncRNA) 5' transfer RNA (tRNA) half
cgcagcgccttagaccgctcggccatcctga

SEQ ID NO: 3515 - DNA, 31 bp, Artificial Sequence
  synthetic circulating small noncoding RNA (sncRNA) 5' transfer RNA (tRNA) half
cggctagctcagtcggtagagcatgagactc

SEQ ID NO: 3516 - DNA, 22 bp, Artificial Sequence
  synthetic circulating small noncoding RNA (sncRNA) 5' transfer RNA (tRNA) half
gaccccgacgtgattcgaacac

SEQ ID NO: 3517 - DNA, 21 bp, Artificial Sequence
  synthetic circulating small noncoding RNA (sncRNA) 5' transfer RNA (tRNA) half
ttcccataccgggagtcgaac

SEQ ID NO: 3518 - DNA, 21 bp, Artificial Sequence
  synthetic circulating small noncoding RNA (sncRNA) 5' transfer RNA (tRNA) half
tgtgtcagaagtgggattcga

SEQ ID NO: 3519 - DNA, 22 bp, Artificial Sequence
  synthetic circulating small noncoding RNA (sncRNA) 5' transfer RNA (tRNA) half
tcgattcccggccaacgcataa

SEQ ID NO: 3520 - DNA, 29 bp, Artificial Sequence
  synthetic circulating small noncoding RNA (sncRNA) 5' transfer RNA (tRNA) half
acccgggccgcggcggtgagagcgccgaa

SEQ ID NO: 3521 - DNA, 36 bp, Artificial Sequence
  synthetic circulating small noncoding RNA (sncRNA) 5' transfer RNA (tRNA) half
cccgggcctcccgcgtggcaggcgagaattctacca

SEQ ID NO: 3522 - DNA, 37 bp, Artificial Sequence
  synthetic circulating small noncoding RNA (sncRNA) 5' transfer RNA (tRNA) half
gtaaacaggagatcctgggttcaaatcccagcggggc

SEQ ID NO: 3523 - DNA, 23 bp, Artificial Sequence
  synthetic circulating small noncoding RNA (sncRNA) 5' transfer RNA (tRNA) half
caacgcagagtactaaccactat

SEQ ID NO: 3524 - DNA, 36 bp, Artificial Sequence
  synthetic circulating small noncoding RNA (sncRNA) 5' transfer RNA (tRNA) half
cgggaggcccgggttcgattcccggccaatgcacga

SEQ ID NO: 3525 - DNA, 21 bp, Artificial Sequence
  synthetic circulating small noncoding RNA (sncRNA) 5' transfer RNA (tRNA) half
gttcaaatcccggacgagccc

SEQ ID NO: 3526 - DNA, 32 bp, Artificial Sequence
  synthetic circulating small noncoding RNA (sncRNA) 5' transfer RNA (tRNA) half
caggcggcccgggttcgactcccggtgtggga

SEQ ID NO: 3527 - DNA, 35 bp, Artificial Sequence
  synthetic circulating small noncoding RNA (sncRNA) 5' transfer RNA (tRNA) half
tcctcgttagtatagtggtgagtatccccgcctgt

SEQ ID NO: 3528 - DNA, 32 bp, Artificial Sequence
  synthetic circulating small noncoding RNA (sncRNA) 5' transfer RNA (tRNA) half
agaaggttgcgtgttcaaatcacgtcggggtc

SEQ ID NO: 3529 - DNA, 26 bp, Artificial Sequence
  synthetic circulating small noncoding RNA (sncRNA) 5' transfer RNA (tRNA) half
aacgcagagtactaaccactatacga

SEQ ID NO: 3530 - DNA, 34 bp, Artificial Sequence
  synthetic circulating small noncoding RNA (sncRNA) 5' transfer RNA (tRNA) half
tgtttccgcccggtttcgaaccggggacctttcg

SEQ ID NO: 3531 - DNA, 25 bp, Artificial Sequence
  synthetic circulating small noncoding RNA (sncRNA) 5' transfer RNA (tRNA) half
gaggcgaacgtgataaccactacac

SEQ ID NO: 3532 - DNA, 36 bp, Artificial Sequence
  synthetic circulating small noncoding RNA (sncRNA) 5' transfer RNA (tRNA) half
aacaggagatcctgggttcgaatcccagcggggcct

SEQ ID NO: 3533 - DNA, 13 bp, Artificial Sequence
  synthetic circulating small noncoding RNA (sncRNA) 5' transfer RNA (tRNA) half
ggtccccggttcg

SEQ ID NO: 3534 - DNA, 29 bp, Artificial Sequence
  synthetic circulating small noncoding RNA (sncRNA) 5' transfer RNA (tRNA) half
ttgcgacccgggttcgattcccgggcggc

SEQ ID NO: 3535 - DNA, 28 bp, Artificial Sequence
  synthetic circulating small noncoding RNA (sncRNA) 5' transfer RNA (tRNA) half
cattggtggttcagtggtagaattctcg

SEQ ID NO: 3536 - DNA, 29 bp, Artificial Sequence
  synthetic circulating small noncoding RNA (sncRNA) 5' transfer RNA (tRNA) half
gactccgccgggactcgaacccggaacct

SEQ ID NO: 3537 - DNA, 18 bp, Artificial Sequence
  synthetic circulating small noncoding RNA (sncRNA) 5' transfer RNA (tRNA) half
ggaatcctaaccgctaga

SEQ ID NO: 3538 - DNA, 17 bp, Artificial Sequence
  synthetic circulating small noncoding RNA (sncRNA) 5' transfer RNA (tRNA) half
tcagtcggtagagcatc

SEQ ID NO: 3539 - DNA, 17 bp, Artificial Sequence
  synthetic circulating small noncoding RNA (sncRNA) 5' transfer RNA (tRNA) half
tagcggttaggattcct

SEQ ID NO: 3540 - DNA, 12 bp, Artificial Sequence
  synthetic circulating small noncoding RNA (sncRNA) 5' transfer RNA (tRNA) half
aaccggggacct

SEQ ID NO: 3541 - DNA, 34 bp, Artificial Sequence
  synthetic circulating small noncoding RNA (sncRNA) 5' transfer RNA (tRNA) half
agggggcacccggatttgaaccagggacctcttg

SEQ ID NO: 3542 - DNA, 31 bp, Artificial Sequence
  synthetic circulating small noncoding RNA (sncRNA) 5' transfer RNA (tRNA) half
cgcccgaacagggacttgaaccctggaccct

SEQ ID NO: 3543 - DNA, 20 bp, Artificial Sequence
  synthetic circulating small noncoding RNA (sncRNA) 5' transfer RNA (tRNA) half
gagtccagagtgctagccat

SEQ ID NO: 3544 - DNA, 10 bp, Artificial Sequence
  synthetic circulating small noncoding RNA (sncRNA) 5' transfer RNA (tRNA) half
ctacggaaac

SEQ ID NO: 3545 - DNA, 30 bp, Artificial Sequence
  synthetic circulating small noncoding RNA (sncRNA) 5' transfer RNA (tRNA) half
tccagagtgctaaccattacaccatgggac

SEQ ID NO: 3546 - DNA, 26 bp, Artificial Sequence
  synthetic circulating small noncoding RNA (sncRNA) 5' transfer RNA (tRNA) half
gctggtgtagtggtatcatgcaagat

SEQ ID NO: 3547 - DNA, 19 bp, Artificial Sequence
  synthetic circulating small noncoding RNA (sncRNA) 5' transfer RNA (tRNA) half
cccagcacgcttccgctgc

SEQ ID NO: 3548 - DNA, 16 bp, Artificial Sequence
  synthetic circulating small noncoding RNA (sncRNA) 5' transfer RNA (tRNA) half
atggtagagcgctcgc

SEQ ID NO: 3549 - DNA, 35 bp, Artificial Sequence
  synthetic circulating small noncoding RNA (sncRNA) 5' transfer RNA (tRNA) half
ttaggtcgctggttcgattccggctcgaaggactt

SEQ ID NO: 3550 - DNA, 33 bp, Artificial Sequence
  synthetic circulating small noncoding RNA (sncRNA) 5' transfer RNA (tRNA) half
cgccgctggtgtagtggtatcatgcaagattcc

SEQ ID NO: 3551 - DNA, 17 bp, Artificial Sequence
  synthetic circulating small noncoding RNA (sncRNA) 5' transfer RNA (tRNA) half
gtagtcgtggccgagtg

SEQ ID NO: 3552 - DNA, 14 bp, Artificial Sequence
  synthetic circulating small noncoding RNA (sncRNA) 5' transfer RNA (tRNA) half
ctgtcacgcgggag

SEQ ID NO: 3553 - DNA, 26 bp, Artificial Sequence
  synthetic circulating small noncoding RNA (sncRNA) 5' transfer RNA (tRNA) half
cacatggtctagcggttaggattcct

SEQ ID NO: 3554 - DNA, 19 bp, Artificial Sequence
  synthetic circulating small noncoding RNA (sncRNA) 5' transfer RNA (tRNA) half
tccgttaggccacgtggtc

SEQ ID NO: 3555 - DNA, 21 bp, Artificial Sequence
  synthetic circulating small noncoding RNA (sncRNA) 5' transfer RNA (tRNA) half
tccagagtgctaaccattaca

SEQ ID NO: 3556 - DNA, 20 bp, Artificial Sequence
  synthetic circulating small noncoding RNA (sncRNA) 5' transfer RNA (tRNA) half
aaccgggcggaaacagtact

SEQ ID NO: 3557 - DNA, 38 bp, Artificial Sequence
  synthetic circulating small noncoding RNA (sncRNA) 5' transfer RNA (tRNA) half
ataatctgaaggtcctgagttcgaacctcagagggggc

SEQ ID NO: 3558 - DNA, 25 bp, Artificial Sequence
  synthetic circulating small noncoding RNA (sncRNA) 5' transfer RNA (tRNA) half
taccgactgagctatccgggctctt

SEQ ID NO: 3559 - DNA, 32 bp, Artificial Sequence
  synthetic circulating small noncoding RNA (sncRNA) 5' transfer RNA (tRNA) half
tttccgtagtgtagtggttatcacgctcgcct

SEQ ID NO: 3560 - DNA, 12 bp, Artificial Sequence
  synthetic circulating small noncoding RNA (sncRNA) 5' transfer RNA (tRNA) half
agcgtgctgggc

SEQ ID NO: 3561 - DNA, 37 bp, Artificial Sequence
  synthetic circulating small noncoding RNA (sncRNA) 5' transfer RNA (tRNA) half
aatgccgtgactcggattcgaaccgaggttgctgcgg

SEQ ID NO: 3562 - DNA, 35 bp, Artificial Sequence
  synthetic circulating small noncoding RNA (sncRNA) 5' transfer RNA (tRNA) half
gtggagatgccggggatcgaacccggggcctcata

SEQ ID NO: 3563 - DNA, 17 bp, Artificial Sequence
  synthetic circulating small noncoding RNA (sncRNA) 5' transfer RNA (tRNA) half
cgaaccccgtccgtgcc

SEQ ID NO: 3564 - DNA, 21 bp, Artificial Sequence
  synthetic circulating small noncoding RNA (sncRNA) 5' transfer RNA (tRNA) half
ctagcggttaggattcctggt

SEQ ID NO: 3565 - DNA, 34 bp, Artificial Sequence
  synthetic circulating small noncoding RNA (sncRNA) 5' transfer RNA (tRNA) half
ttcccataccgggagtcgaacccgggccgcctgg

SEQ ID NO: 3566 - DNA, 15 bp, Artificial Sequence
  synthetic circulating small noncoding RNA (sncRNA) 5' transfer RNA (tRNA) half
ccttcgatagctcag

SEQ ID NO: 3567 - DNA, 17 bp, Artificial Sequence
  synthetic circulating small noncoding RNA (sncRNA) 5' transfer RNA (tRNA) half
tatgattctcgctttgg

SEQ ID NO: 3568 - DNA, 32 bp, Artificial Sequence
  synthetic circulating small noncoding RNA (sncRNA) 5' transfer RNA (tRNA) half
cgctgggattcgaacccaggatctcctgttta

SEQ ID NO: 3569 - DNA, 29 bp, Artificial Sequence
  synthetic circulating small noncoding RNA (sncRNA) 5' transfer RNA (tRNA) half
ccccgtcggggaattgaaccccggtctcc

SEQ ID NO: 3570 - DNA, 30 bp, Artificial Sequence
  synthetic circulating small noncoding RNA (sncRNA) 5' transfer RNA (tRNA) half
gggtcgtgggttcgagccccacgttgggcg

SEQ ID NO: 3571 - DNA, 30 bp, Artificial Sequence
  synthetic circulating small noncoding RNA (sncRNA) 5' transfer RNA (tRNA) half
gcgaatgtgataaccactacactacggaaa

SEQ ID NO: 3572 - DNA, 21 bp, Artificial Sequence
  synthetic circulating small noncoding RNA (sncRNA) 5' transfer RNA (tRNA) half
ctttgaatccagcgatccgag

SEQ ID NO: 3573 - DNA, 23 bp, Artificial Sequence
  synthetic circulating small noncoding RNA (sncRNA) 5' transfer RNA (tRNA) half
ccgactgagctatccgggctctt

SEQ ID NO: 3574 - DNA, 25 bp, Artificial Sequence
  synthetic circulating small noncoding RNA (sncRNA) 5' transfer RNA (tRNA) half
gtttccgtagtgtagtggttatcac

SEQ ID NO: 3575 - DNA, 32 bp, Artificial Sequence
  synthetic circulating small noncoding RNA (sncRNA) 5' transfer RNA (tRNA) half
tccagcgccttagaccactcggccacgctacc

SEQ ID NO: 3576 - DNA, 22 bp, Artificial Sequence
  synthetic circulating small noncoding RNA (sncRNA) 5' transfer RNA (tRNA) half
gggcccagcacgcttccgctgc

SEQ ID NO: 3577 - DNA, 16 bp, Artificial Sequence
  synthetic circulating small noncoding RNA (sncRNA) 5' transfer RNA (tRNA) half
gtatgattctcgcttc

SEQ ID NO: 3578 - DNA, 38 bp, Artificial Sequence
  synthetic circulating small noncoding RNA (sncRNA) 5' transfer RNA (tRNA) half
cgggccgcctgggtgaaaaccaggaatcctaaccgcta

SEQ ID NO: 3579 - DNA, 34 bp, Artificial Sequence
  synthetic circulating small noncoding RNA (sncRNA) 5' transfer RNA (tRNA) half
tgtgcattggccgggaatcgaacccgggcctccc

SEQ ID NO: 3580 - DNA, 29 bp, Artificial Sequence
  synthetic circulating small noncoding RNA (sncRNA) 5' transfer RNA (tRNA) half
cccacaccgggagtcgaacccgggccgcc

SEQ ID NO: 3581 - DNA, 12 bp, Artificial Sequence
  synthetic circulating small noncoding RNA (sncRNA) 5' transfer RNA (tRNA) half
accccggtctcc

SEQ ID NO: 3582 - DNA, 14 bp, Artificial Sequence
  synthetic circulating small noncoding RNA (sncRNA) 5' transfer RNA (tRNA) half
gtcggtagagcatc

SEQ ID NO: 3583 - DNA, 26 bp, Artificial Sequence
  synthetic circulating small noncoding RNA (sncRNA) 5' transfer RNA (tRNA) half
ccgctggtgtagtggtatcatgcaag

SEQ ID NO: 3584 - DNA, 36 bp, Artificial Sequence
  synthetic circulating small noncoding RNA (sncRNA) 5' transfer RNA (tRNA) half
cgagccagccaggagtcgaacctggaatcttctgat

SEQ ID NO: 3585 - DNA, 14 bp, Artificial Sequence
  synthetic circulating small noncoding RNA (sncRNA) 5' transfer RNA (tRNA) half
tgagctatccgggc

SEQ ID NO: 3586 - DNA, 25 bp, Artificial Sequence
  synthetic circulating small noncoding RNA (sncRNA) 5' transfer RNA (tRNA) half
agctcagtcggtagagcatcagact

SEQ ID NO: 3587 - DNA, 34 bp, Artificial Sequence
  synthetic circulating small noncoding RNA (sncRNA) 5' transfer RNA (tRNA) half
catgaggtcctgggttcgatccccagcatctcca

SEQ ID NO: 3588 - DNA, 35 bp, Artificial Sequence
  synthetic circulating small noncoding RNA (sncRNA) 5' transfer RNA (tRNA) half
gccccctctgaggttcgaactcaggaccttcagat

SEQ ID NO: 3589 - DNA, 22 bp, Artificial Sequence
  synthetic circulating small noncoding RNA (sncRNA) 5' transfer RNA (tRNA) half
gtttccgtagtgtagtggttat

SEQ ID NO: 3590 - DNA, 32 bp, Artificial Sequence
  synthetic circulating small noncoding RNA (sncRNA) 5' transfer RNA (tRNA) half
ttggtggttcagtggtagaattctcgcctgcc

SEQ ID NO: 3591 - DNA, 14 bp, Artificial Sequence
  synthetic circulating small noncoding RNA (sncRNA) 5' transfer RNA (tRNA) half
gagaggtcccgggt

SEQ ID NO: 3592 - DNA, 35 bp, Artificial Sequence
  synthetic circulating small noncoding RNA (sncRNA) 5' transfer RNA (tRNA) half
tgaccccgacgtgattcgaacacgcagccttctga

SEQ ID NO: 3593 - DNA, 14 bp, Artificial Sequence
  synthetic circulating small noncoding RNA (sncRNA) 5' transfer RNA (tRNA) half
tcctggctggctcg

SEQ ID NO: 3594 - DNA, 33 bp, Artificial Sequence
  synthetic circulating small noncoding RNA (sncRNA) 5' transfer RNA (tRNA) half
ccacaccgggagtcgaacccgggccgcctgggt

SEQ ID NO: 3595 - DNA, 29 bp, Artificial Sequence
  synthetic circulating small noncoding RNA (sncRNA) 5' transfer RNA (tRNA) half
cagtgctctaacccctgagctatggagcc

SEQ ID NO: 3596 - DNA, 34 bp, Artificial Sequence
  synthetic circulating small noncoding RNA (sncRNA) 5' transfer RNA (tRNA) half
tgtttccgtagtgtagtggttatcacgttcgcct

SEQ ID NO: 3597 - DNA, 13 bp, Artificial Sequence
  synthetic circulating small noncoding RNA (sncRNA) 5' transfer RNA (tRNA) half
acgcagagtacta

SEQ ID NO: 3598 - DNA, 38 bp, Artificial Sequence
  synthetic circulating small noncoding RNA (sncRNA) 5' transfer RNA (tRNA) half
gtaaaccgaagatcgcgggttcgaaccccgtccgtgcc

SEQ ID NO: 3599 - DNA, 20 bp, Artificial Sequence
  synthetic circulating small noncoding RNA (sncRNA) 5' transfer RNA (tRNA) half
gtagcagaggatggtttcga

SEQ ID NO: 3600 - DNA, 14 bp, Artificial Sequence
  synthetic circulating small noncoding RNA (sncRNA) 5' transfer RNA (tRNA) half
cgtggcaggcgaga

SEQ ID NO: 3601 - DNA, 35 bp, Artificial Sequence
  synthetic circulating small noncoding RNA (sncRNA) 5' transfer RNA (tRNA) half
atggaggcgtgggttcgaatcccacttctgacaca

SEQ ID NO: 3602 - DNA, 21 bp, Artificial Sequence
  synthetic circulating small noncoding RNA (sncRNA) 5' transfer RNA (tRNA) half
aaccaggaatcctaaccgcta

SEQ ID NO: 3603 - DNA, 22 bp, Artificial Sequence
  synthetic circulating small noncoding RNA (sncRNA) 5' transfer RNA (tRNA) half
gtccagagtgctaaccattaca

SEQ ID NO: 3604 - DNA, 13 bp, Artificial Sequence
  synthetic circulating small noncoding RNA (sncRNA) 5' transfer RNA (tRNA) half
ggattcggcgctc

SEQ ID NO: 3605 - DNA, 19 bp, Artificial Sequence
  synthetic circulating small noncoding RNA (sncRNA) 5' transfer RNA (tRNA) half
tcgactcctggctggctcg

SEQ ID NO: 3606 - DNA, 29 bp, Artificial Sequence
  synthetic circulating small noncoding RNA (sncRNA) 5' transfer RNA (tRNA) half
ccagagtgctaaccattacaccatgggac

SEQ ID NO: 3607 - DNA, 14 bp, Artificial Sequence
  synthetic circulating small noncoding RNA (sncRNA) 5' transfer RNA (tRNA) half
gagggggcacccgg

SEQ ID NO: 3608 - DNA, 13 bp, Artificial Sequence
  synthetic circulating small noncoding RNA (sncRNA) 5' transfer RNA (tRNA) half
cggggatactcac

SEQ ID NO: 3609 - DNA, 12 bp, Artificial Sequence
  synthetic circulating small noncoding RNA (sncRNA) 5' transfer RNA (tRNA) half
acccgggacctc

SEQ ID NO: 3610 - DNA, 29 bp, Artificial Sequence
  synthetic circulating small noncoding RNA (sncRNA) 5' transfer RNA (tRNA) half
aggcggcccgggttcgactcccggtgtgg

SEQ ID NO: 3611 - DNA, 26 bp, Artificial Sequence
  synthetic circulating small noncoding RNA (sncRNA) 5' transfer RNA (tRNA) half
ggaatcctaaccgctagaccatatgg

SEQ ID NO: 3612 - DNA, 31 bp, Artificial Sequence
  synthetic circulating small noncoding RNA (sncRNA) 5' transfer RNA (tRNA) half
cttccctgaccgggaatcgaacccgggccgc

SEQ ID NO: 3613 - DNA, 25 bp, Artificial Sequence
  synthetic circulating small noncoding RNA (sncRNA) 5' transfer RNA (tRNA) half
atgctctaccgactgagctatccgg

SEQ ID NO: 3614 - DNA, 11 bp, Artificial Sequence
  synthetic circulating small noncoding RNA (sncRNA) 5' transfer RNA (tRNA) half
cggtgggacct

SEQ ID NO: 3615 - DNA, 35 bp, Artificial Sequence
  synthetic circulating small noncoding RNA (sncRNA) 5' transfer RNA (tRNA) half
ccgggcctcccgcgtggcaggcgagaattctacca

SEQ ID NO: 3616 - DNA, 36 bp, Artificial Sequence
  synthetic circulating small noncoding RNA (sncRNA) 5' transfer RNA (tRNA) half
aatctgaaggtcctgagttcgaacctcagagggggc

SEQ ID NO: 3617 - DNA, 11 bp, Artificial Sequence
  synthetic circulating small noncoding RNA (sncRNA) 5' transfer RNA (tRNA) half
gctcgtccggg

SEQ ID NO: 3618 - DNA, 15 bp, Artificial Sequence
  synthetic circulating small noncoding RNA (sncRNA) 5' transfer RNA (tRNA) half
ggtggagatgccggg

SEQ ID NO: 3619 - DNA, 17 bp, Artificial Sequence
  synthetic circulating small noncoding RNA (sncRNA) 5' transfer RNA (tRNA) half
cggaagcgtgctgggcc

SEQ ID NO: 3620 - DNA, 23 bp, Artificial Sequence
  synthetic circulating small noncoding RNA (sncRNA) 5' transfer RNA (tRNA) half
ttccctgaccgggaatcgaaccc

SEQ ID NO: 3621 - DNA, 39 bp, Artificial Sequence
  synthetic circulating small noncoding RNA (sncRNA) 5' transfer RNA (tRNA) half
ccggctagctcagtcggtagagcatgagactcttaatct

SEQ ID NO: 3622 - DNA, 19 bp, Artificial Sequence
  synthetic circulating small noncoding RNA (sncRNA) 5' transfer RNA (tRNA) half
cgtatagtggttagtactc

SEQ ID NO: 3623 - DNA, 33 bp, Artificial Sequence
  synthetic circulating small noncoding RNA (sncRNA) 5' transfer RNA (tRNA) half
gggctcgtccgggatttgaacccgggacctctc

SEQ ID NO: 3624 - DNA, 16 bp, Artificial Sequence
  synthetic circulating small noncoding RNA (sncRNA) 5' transfer RNA (tRNA) half
gcgccaaatcctaacc

SEQ ID NO: 3625 - DNA, 21 bp, Artificial Sequence
  synthetic circulating small noncoding RNA (sncRNA) 5' transfer RNA (tRNA) half
agtctcatgctctacccactg

SEQ ID NO: 3626 - DNA, 32 bp, Artificial Sequence
  synthetic circulating small noncoding RNA (sncRNA) 5' transfer RNA (tRNA) half
acccaggcggcccgggttcgactcccggtgtg

SEQ ID NO: 3627 - DNA, 23 bp, Artificial Sequence
  synthetic circulating small noncoding RNA (sncRNA) 5' transfer RNA (tRNA) half
tccccgtcggggaatcgaacccc

SEQ ID NO: 3628 - DNA, 25 bp, Artificial Sequence
  synthetic circulating small noncoding RNA (sncRNA) 5' transfer RNA (tRNA) half
gccttaaccactcggccacgactac

SEQ ID NO: 3629 - DNA, 21 bp, Artificial Sequence
  synthetic circulating small noncoding RNA (sncRNA) 5' transfer RNA (tRNA) half
aaccgggcggaaacatatctt

SEQ ID NO: 3630 - DNA, 13 bp, Artificial Sequence
  synthetic circulating small noncoding RNA (sncRNA) 5' transfer RNA (tRNA) half
tcctgccgcggtc

SEQ ID NO: 3631 - DNA, 35 bp, Artificial Sequence
  synthetic circulating small noncoding RNA (sncRNA) 5' transfer RNA (tRNA) half
gtctcatgctctaccgactgagctagccgggcctt

SEQ ID NO: 3632 - DNA, 17 bp, Artificial Sequence
  synthetic circulating small noncoding RNA (sncRNA) 5' transfer RNA (tRNA) half
aattctcgcctgccacg

SEQ ID NO: 3633 - DNA, 23 bp, Artificial Sequence
  synthetic circulating small noncoding RNA (sncRNA) 5' transfer RNA (tRNA) half
gttcgattccccgacggggagtc

SEQ ID NO: 3634 - DNA, 13 bp, Artificial Sequence
  synthetic circulating small noncoding RNA (sncRNA) 5' transfer RNA (tRNA) half
ccggtatgggaac

SEQ ID NO: 3635 - DNA, 35 bp, Artificial Sequence
  synthetic circulating small noncoding RNA (sncRNA) 5' transfer RNA (tRNA) half
aaggccccagcgagatttgaactcgcgacccctgg

SEQ ID NO: 3636 - DNA, 26 bp, Artificial Sequence
  synthetic circulating small noncoding RNA (sncRNA) 5' transfer RNA (tRNA) half
agtcaaatgctctaccactgagctat

SEQ ID NO: 3637 - DNA, 21 bp, Artificial Sequence
  synthetic circulating small noncoding RNA (sncRNA) 5' transfer RNA (tRNA) half
tcgactccggctcgaaggaga

SEQ ID NO: 3638 - DNA, 33 bp, Artificial Sequence
  synthetic circulating small noncoding RNA (sncRNA) 5' transfer RNA (tRNA) half
caggcggcccgggttcgactcccggtatgggaa

SEQ ID NO: 3639 - DNA, 22 bp, Artificial Sequence
  synthetic circulating small noncoding RNA (sncRNA) 5' transfer RNA (tRNA) half
tagaccgctcggccacactacc

SEQ ID NO: 3640 - DNA, 36 bp, Artificial Sequence
  synthetic circulating small noncoding RNA (sncRNA) 5' transfer RNA (tRNA) half
acccgggccgcggcggtgagagcgccgaatcctaac

SEQ ID NO: 3641 - DNA, 18 bp, Artificial Sequence
  synthetic circulating small noncoding RNA (sncRNA) 5' transfer RNA (tRNA) half
ggtgagagcgccgaatcc

SEQ ID NO: 3642 - DNA, 21 bp, Artificial Sequence
  synthetic circulating small noncoding RNA (sncRNA) 5' transfer RNA (tRNA) half
tctgaatccagcgatccgagt

SEQ ID NO: 3643 - DNA, 15 bp, Artificial Sequence
  synthetic circulating small noncoding RNA (sncRNA) 5' transfer RNA (tRNA) half
ccggggacctctcgc

SEQ ID NO: 3644 - DNA, 36 bp, Artificial Sequence
  synthetic circulating small noncoding RNA (sncRNA) 5' transfer RNA (tRNA) half
ttcccataccgggagtcgaacccgggccgcctgggt

SEQ ID NO: 3645 - DNA, 33 bp, Artificial Sequence
  synthetic circulating small noncoding RNA (sncRNA) 5' transfer RNA (tRNA) half
gccccctctgaggttcgaactcaggaccttcag

SEQ ID NO: 3646 - DNA, 27 bp, Artificial Sequence
  synthetic circulating small noncoding RNA (sncRNA) 5' transfer RNA (tRNA) half
caggcggcccgggttcgactcccggtg

SEQ ID NO: 3647 - DNA, 23 bp, Artificial Sequence
  synthetic circulating small noncoding RNA (sncRNA) 5' transfer RNA (tRNA) half
cgtatagtggttagtactctgcg

SEQ ID NO: 3648 - DNA, 25 bp, Artificial Sequence
  synthetic circulating small noncoding RNA (sncRNA) 5' transfer RNA (tRNA) half
agtcaaatgctctaccactgagcta

SEQ ID NO: 3649 - DNA, 12 bp, Artificial Sequence
  synthetic circulating small noncoding RNA (sncRNA) 5' transfer RNA (tRNA) half
agtcaaatgctc

SEQ ID NO: 3650 - DNA, 17 bp, Artificial Sequence
  synthetic circulating small noncoding RNA (sncRNA) 5' transfer RNA (tRNA) half
tagtggttagtactctg

SEQ ID NO: 3651 - DNA, 24 bp, Artificial Sequence
  synthetic circulating small noncoding RNA (sncRNA) 5' transfer RNA (tRNA) half
caccgggagtcgaacccgggccgc

SEQ ID NO: 3652 - DNA, 13 bp, Artificial Sequence
  synthetic circulating small noncoding RNA (sncRNA) 5' transfer RNA (tRNA) half
ttaggattcggcg

SEQ ID NO: 3653 - DNA, 19 bp, Artificial Sequence
  synthetic circulating small noncoding RNA (sncRNA) 5' transfer RNA (tRNA) half
tgtcaggagtgggattcga

SEQ ID NO: 3654 - DNA, 25 bp, Artificial Sequence
  synthetic circulating small noncoding RNA (sncRNA) 5' transfer RNA (tRNA) half
ggattaagagtcccatgctctaccg

SEQ ID NO: 3655 - DNA, 17 bp, Artificial Sequence
  synthetic circulating small noncoding RNA (sncRNA) 5' transfer RNA (tRNA) half
accgggcgggaacaaca

SEQ ID NO: 3656 - DNA, 23 bp, Artificial Sequence
  synthetic circulating small noncoding RNA (sncRNA) 5' transfer RNA (tRNA) half
tcagtcggtagagcatcagactt

SEQ ID NO: 3657 - DNA, 33 bp, Artificial Sequence
  synthetic circulating small noncoding RNA (sncRNA) 5' transfer RNA (tRNA) half
cgaccacgaagggactcgaacccccaatcttct

SEQ ID NO: 3658 - DNA, 14 bp, Artificial Sequence
  synthetic circulating small noncoding RNA (sncRNA) 5' transfer RNA (tRNA) half
caggaatcctaacc

SEQ ID NO: 3659 - DNA, 18 bp, Artificial Sequence
  synthetic circulating small noncoding RNA (sncRNA) 5' transfer RNA (tRNA) half
cgtgtttccgcccggttt

SEQ ID NO: 3660 - DNA, 20 bp, Artificial Sequence
  synthetic circulating small noncoding RNA (sncRNA) 5' transfer RNA (tRNA) half
ggctcgtccgggatttgaac

SEQ ID NO: 3661 - DNA, 13 bp, Artificial Sequence
  synthetic circulating small noncoding RNA (sncRNA) 5' transfer RNA (tRNA) half
gagctatttcggc

SEQ ID NO: 3662 - DNA, 18 bp, Artificial Sequence
  synthetic circulating small noncoding RNA (sncRNA) 5' transfer RNA (tRNA) half
gagtactaaccactatac

SEQ ID NO: 3663 - DNA, 26 bp, Artificial Sequence
  synthetic circulating small noncoding RNA (sncRNA) 5' transfer RNA (tRNA) half
aggaatcctaaccgctagaccatatg

SEQ ID NO: 3664 - DNA, 33 bp, Artificial Sequence
  synthetic circulating small noncoding RNA (sncRNA) 5' transfer RNA (tRNA) half
aggcgagcgtgataaccgctacactacaaaaac

SEQ ID NO: 3665 - DNA, 31 bp, Artificial Sequence
  synthetic circulating small noncoding RNA (sncRNA) 5' transfer RNA (tRNA) half
gaaggtcctgggttcgagccccagtggaacc

SEQ ID NO: 3666 - DNA, 32 bp, Artificial Sequence
  synthetic circulating small noncoding RNA (sncRNA) 5' transfer RNA (tRNA) half
gggggtaaagctcaggggtagagcatttgact

SEQ ID NO: 3667 - DNA, 14 bp, Artificial Sequence
  synthetic circulating small noncoding RNA (sncRNA) 5' transfer RNA (tRNA) half
tcccgggcggcgca

SEQ ID NO: 3668 - DNA, 21 bp, Artificial Sequence
  synthetic circulating small noncoding RNA (sncRNA) 5' transfer RNA (tRNA) half
gaccccgacgtgattcgaaca

SEQ ID NO: 3669 - DNA, 36 bp, Artificial Sequence
  synthetic circulating small noncoding RNA (sncRNA) 5' transfer RNA (tRNA) half
gcgccgaatcctaaccactagaccaccagggaagtt

SEQ ID NO: 3670 - DNA, 31 bp, Artificial Sequence
  synthetic circulating small noncoding RNA (sncRNA) 5' transfer RNA (tRNA) half
ttcccataccgggagtcgaacccgggccgcc

SEQ ID NO: 3671 - DNA, 38 bp, Artificial Sequence
  synthetic circulating small noncoding RNA (sncRNA) 5' transfer RNA (tRNA) half
tggttaggattcggcgctctcaccgccgcggcccgggt

SEQ ID NO: 3672 - DNA, 21 bp, Artificial Sequence
  synthetic circulating small noncoding RNA (sncRNA) 5' transfer RNA (tRNA) half
ggcccagcacgcttccgctgc

SEQ ID NO: 3673 - DNA, 22 bp, Artificial Sequence
  synthetic circulating small noncoding RNA (sncRNA) 5' transfer RNA (tRNA) half
acccgggtcaactgcttggaag

SEQ ID NO: 3674 - DNA, 34 bp, Artificial Sequence
  synthetic circulating small noncoding RNA (sncRNA) 5' transfer RNA (tRNA) half
cgaaaggtccccggttcgaaaccgggcggaaaca

SEQ ID NO: 3675 - DNA, 29 bp, Artificial Sequence
  synthetic circulating small noncoding RNA (sncRNA) 5' transfer RNA (tRNA) half
cgaacgtgataaccactacactacggaaa

SEQ ID NO: 3676 - DNA, 15 bp, Artificial Sequence
  synthetic circulating small noncoding RNA (sncRNA) 5' transfer RNA (tRNA) half
gttcgattccccgac

SEQ ID NO: 3677 - DNA, 18 bp, Artificial Sequence
  synthetic circulating small noncoding RNA (sncRNA) 5' transfer RNA (tRNA) half
gagaatcatacccctaga

SEQ ID NO: 3678 - DNA, 26 bp, Artificial Sequence
  synthetic circulating small noncoding RNA (sncRNA) 5' transfer RNA (tRNA) half
gccttagaccactcggccacgctacc

SEQ ID NO: 3679 - DNA, 24 bp, Artificial Sequence
  synthetic circulating small noncoding RNA (sncRNA) 5' transfer RNA (tRNA) half
ctccccgtcggggaatcgaacccc

SEQ ID NO: 3680 - DNA, 21 bp, Artificial Sequence
  synthetic circulating small noncoding RNA (sncRNA) 5' transfer RNA (tRNA) half
tcgattcccgggcggcgcatg

SEQ ID NO: 3681 - DNA, 10 bp, Artificial Sequence
  synthetic circulating small noncoding RNA (sncRNA) 5' transfer RNA (tRNA) half
aggcgagaat

SEQ ID NO: 3682 - DNA, 37 bp, Artificial Sequence
  synthetic circulating small noncoding RNA (sncRNA) 5' transfer RNA (tRNA) half
gtaaacaggagatcctgggttcgaatcccagtggggc

SEQ ID NO: 3683 - DNA, 20 bp, Artificial Sequence
  synthetic circulating small noncoding RNA (sncRNA) 5' transfer RNA (tRNA) half
gtcgagccagccaggagtcg

SEQ ID NO: 3684 - DNA, 30 bp, Artificial Sequence
  synthetic circulating small noncoding RNA (sncRNA) 5' transfer RNA (tRNA) half
cccggctagctcagtcggtagagcatgaga

SEQ ID NO: 3685 - DNA, 33 bp, Artificial Sequence
  synthetic circulating small noncoding RNA (sncRNA) 5' transfer RNA (tRNA) half
gctggggattgtgggttcgagtcccatctgggt

SEQ ID NO: 3686 - DNA, 29 bp, Artificial Sequence
  synthetic circulating small noncoding RNA (sncRNA) 5' transfer RNA (tRNA) half
aactcggatcgctggattcagagtccaga

SEQ ID NO: 3687 - DNA, 17 bp, Artificial Sequence
  synthetic circulating small noncoding RNA (sncRNA) 5' transfer RNA (tRNA) half
ggtctcccgcgtgacag

SEQ ID NO: 3688 - DNA, 26 bp, Artificial Sequence
  synthetic circulating small noncoding RNA (sncRNA) 5' transfer RNA (tRNA) half
tgatgctctaccgactgagctatccg

SEQ ID NO: 3689 - DNA, 17 bp, Artificial Sequence
  synthetic circulating small noncoding RNA (sncRNA) 5' transfer RNA (tRNA) half
ttcgaaccggggacctt

SEQ ID NO: 3690 - DNA, 15 bp, Artificial Sequence
  synthetic circulating small noncoding RNA (sncRNA) 5' transfer RNA (tRNA) half
gtatgattctcggtt

SEQ ID NO: 3691 - DNA, 24 bp, Artificial Sequence
  synthetic circulating small noncoding RNA (sncRNA) 5' transfer RNA (tRNA) half
atgctctaccgactgagctatccg

SEQ ID NO: 3692 - DNA, 32 bp, Artificial Sequence
  synthetic circulating small noncoding RNA (sncRNA) 5' transfer RNA (tRNA) half
atggaggcgtgggttcgaatcccacttctgac

SEQ ID NO: 3693 - DNA, 19 bp, Artificial Sequence
  synthetic circulating small noncoding RNA (sncRNA) 5' transfer RNA (tRNA) half
tcggatcgctggattcaga

SEQ ID NO: 3694 - DNA, 14 bp, Artificial Sequence
  synthetic circulating small noncoding RNA (sncRNA) 5' transfer RNA (tRNA) half
gtagagcatcagac

SEQ ID NO: 3695 - DNA, 23 bp, Artificial Sequence
  synthetic circulating small noncoding RNA (sncRNA) 5' transfer RNA (tRNA) half
gtttccgtagtgtagtggtcatc

SEQ ID NO: 3696 - DNA, 22 bp, Artificial Sequence
  synthetic circulating small noncoding RNA (sncRNA) 5' transfer RNA (tRNA) half
ttaaccactcggccatcctggt

SEQ ID NO: 3697 - DNA, 16 bp, Artificial Sequence
  synthetic circulating small noncoding RNA (sncRNA) 5' transfer RNA (tRNA) half
acccgggacctctcgc

SEQ ID NO: 3698 - DNA, 30 bp, Artificial Sequence
  synthetic circulating small noncoding RNA (sncRNA) 5' transfer RNA (tRNA) half
tccctagtgtagtggttatcacgttcgcct

SEQ ID NO: 3699 - DNA, 19 bp, Artificial Sequence
  synthetic circulating small noncoding RNA (sncRNA) 5' transfer RNA (tRNA) half
ccctgaccgggaatcgaac

SEQ ID NO: 3700 - DNA, 21 bp, Artificial Sequence
  synthetic circulating small noncoding RNA (sncRNA) 5' transfer RNA (tRNA) half
tagccactagaccaccaggga

SEQ ID NO: 3701 - DNA, 19 bp, Artificial Sequence
  synthetic circulating small noncoding RNA (sncRNA) 5' transfer RNA (tRNA) half
cgaacgtgataaccactac

SEQ ID NO: 3702 - DNA, 22 bp, Artificial Sequence
  synthetic circulating small noncoding RNA (sncRNA) 5' transfer RNA (tRNA) half
cccattcttgcgacccgggttc

SEQ ID NO: 3703 - DNA, 35 bp, Artificial Sequence
  synthetic circulating small noncoding RNA (sncRNA) 5' transfer RNA (tRNA) half
cgggaggcccgggttcgattcccggccaatgcact

SEQ ID NO: 3704 - DNA, 32 bp, Artificial Sequence
  synthetic circulating small noncoding RNA (sncRNA) 5' transfer RNA (tRNA) half
ccaggcggcccgggttcgactcccggtatggg

SEQ ID NO: 3705 - DNA, 40 bp, Artificial Sequence
  synthetic circulating small noncoding RNA (sncRNA) 5' transfer RNA (tRNA) half
agtctgatgctctaccgactgagctatccgggctcttagc

SEQ ID NO: 3706 - DNA, 24 bp, Artificial Sequence
  synthetic circulating small noncoding RNA (sncRNA) 5' transfer RNA (tRNA) half
ccggctagctcagtcggtagagca

SEQ ID NO: 3707 - DNA, 12 bp, Artificial Sequence
  synthetic circulating small noncoding RNA (sncRNA) 5' transfer RNA (tRNA) half
aggtcgcgggtt

SEQ ID NO: 3708 - DNA, 36 bp, Artificial Sequence
  synthetic circulating small noncoding RNA (sncRNA) 5' transfer RNA (tRNA) half
gtgttcccacaccgggagtcgaacccgggccgcctg

SEQ ID NO: 3709 - DNA, 18 bp, Artificial Sequence
  synthetic circulating small noncoding RNA (sncRNA) 5' transfer RNA (tRNA) half
tcccacaccgggagtcga

SEQ ID NO: 3710 - DNA, 27 bp, Artificial Sequence
  synthetic circulating small noncoding RNA (sncRNA) 5' transfer RNA (tRNA) half
gaattctaccactgaaccaccaatgcc

SEQ ID NO: 3711 - DNA, 18 bp, Artificial Sequence
  synthetic circulating small noncoding RNA (sncRNA) 5' transfer RNA (tRNA) half
tgccgtcacgaacaggat

SEQ ID NO: 3712 - DNA, 29 bp, Artificial Sequence
  synthetic circulating small noncoding RNA (sncRNA) 5' transfer RNA (tRNA) half
ccccgtcggggaatcgaaccccggtctcc

SEQ ID NO: 3713 - DNA, 18 bp, Artificial Sequence
  synthetic circulating small noncoding RNA (sncRNA) 5' transfer RNA (tRNA) half
gtctgatgctctaccaac

SEQ ID NO: 3714 - DNA, 26 bp, Artificial Sequence
  synthetic circulating small noncoding RNA (sncRNA) 5' transfer RNA (tRNA) half
ccgcgtggcaggcgagaattctacca

SEQ ID NO: 3715 - DNA, 32 bp, Artificial Sequence
  synthetic circulating small noncoding RNA (sncRNA) 5' transfer RNA (tRNA) half
ccgaacagggacttgaaccctggaccctcaga

SEQ ID NO: 3716 - DNA, 41 bp, Artificial Sequence
  synthetic circulating small noncoding RNA (sncRNA) 5' transfer RNA (tRNA) half
tccgtatggaggcgtgggttcgaatcccacttctgacacag

SEQ ID NO: 3717 - DNA, 31 bp, Artificial Sequence
  synthetic circulating small noncoding RNA (sncRNA) 5' transfer RNA (tRNA) half
gcggggatactcaccactatactaacgagga

SEQ ID NO: 3718 - DNA, 20 bp, Artificial Sequence
  synthetic circulating small noncoding RNA (sncRNA) 5' transfer RNA (tRNA) half
cccacaccgggagtcgaacc

SEQ ID NO: 3719 - DNA, 23 bp, Artificial Sequence
  synthetic circulating small noncoding RNA (sncRNA) 5' transfer RNA (tRNA) half
agtcaaatgctctacccctgagc

SEQ ID NO: 3720 - DNA, 18 bp, Artificial Sequence
  synthetic circulating small noncoding RNA (sncRNA) 5' transfer RNA (tRNA) half
gagaattctaccactgaa

SEQ ID NO: 3721 - DNA, 35 bp, Artificial Sequence
  synthetic circulating small noncoding RNA (sncRNA) 5' transfer RNA (tRNA) half
cctccccgtcggggaattgaaccccggtctcccgc

SEQ ID NO: 3722 - DNA, 19 bp, Artificial Sequence
  synthetic circulating small noncoding RNA (sncRNA) 5' transfer RNA (tRNA) half
agtagtcgtggccgagtgg

SEQ ID NO: 3723 - DNA, 27 bp, Artificial Sequence
  synthetic circulating small noncoding RNA (sncRNA) 5' transfer RNA (tRNA) half
gtcggggaatcgaaccccggtctcccg

SEQ ID NO: 3724 - DNA, 26 bp, Artificial Sequence
  synthetic circulating small noncoding RNA (sncRNA) 5' transfer RNA (tRNA) half
tgttcccacaccgggagtcgaacccg

SEQ ID NO: 3725 - DNA, 19 bp, Artificial Sequence
  synthetic circulating small noncoding RNA (sncRNA) 5' transfer RNA (tRNA) half
gtggttatcacgttcgcct

SEQ ID NO: 3726 - DNA, 13 bp, Artificial Sequence
  synthetic circulating small noncoding RNA (sncRNA) 5' transfer RNA (tRNA) half
tatacgatcacgg

SEQ ID NO: 3727 - DNA, 13 bp, Artificial Sequence
  synthetic circulating small noncoding RNA (sncRNA) 5' transfer RNA (tRNA) half
gtctgatgctcta

SEQ ID NO: 3728 - DNA, 13 bp, Artificial Sequence
  synthetic circulating small noncoding RNA (sncRNA) 5' transfer RNA (tRNA) half
ccgagtcacggca

SEQ ID NO: 3729 - DNA, 13 bp, Artificial Sequence
  synthetic circulating small noncoding RNA (sncRNA) 5' transfer RNA (tRNA) half
ggcccagcacgct

SEQ ID NO: 3730 - DNA, 18 bp, Artificial Sequence
  synthetic circulating small noncoding RNA (sncRNA) 5' transfer RNA (tRNA) half
gaacacgcagccttctga

SEQ ID NO: 3731 - DNA, 13 bp, Artificial Sequence
  synthetic circulating small noncoding RNA (sncRNA) 5' transfer RNA (tRNA) half
ccccggtctcccg

SEQ ID NO: 3732 - DNA, 19 bp, Artificial Sequence
  synthetic circulating small noncoding RNA (sncRNA) 5' transfer RNA (tRNA) half
ttcgactcccggtgtggga

SEQ ID NO: 3733 - DNA, 21 bp, Artificial Sequence
  synthetic circulating small noncoding RNA (sncRNA) 5' transfer RNA (tRNA) half
tcaaatcccggacgagcccca

SEQ ID NO: 3734 - DNA, 27 bp, Artificial Sequence
  synthetic circulating small noncoding RNA (sncRNA) 5' transfer RNA (tRNA) half
aggcgaacgtgataaccactacactac

SEQ ID NO: 3735 - DNA, 16 bp, Artificial Sequence
  synthetic circulating small noncoding RNA (sncRNA) 5' transfer RNA (tRNA) half
gggggattagctcaaa

SEQ ID NO: 3736 - DNA, 20 bp, Artificial Sequence
  synthetic circulating small noncoding RNA (sncRNA) 5' transfer RNA (tRNA) half
ctaccgactgagctatccgg

SEQ ID NO: 3737 - DNA, 21 bp, Artificial Sequence
  synthetic circulating small noncoding RNA (sncRNA) 5' transfer RNA (tRNA) half
tgtggcagcggtgggattcga

SEQ ID NO: 3738 - DNA, 24 bp, Artificial Sequence
  synthetic circulating small noncoding RNA (sncRNA) 5' transfer RNA (tRNA) half
acatggtctagcggttaggattcc

SEQ ID NO: 3739 - DNA, 16 bp, Artificial Sequence
  synthetic circulating small noncoding RNA (sncRNA) 5' transfer RNA (tRNA) half
gtttccgtagtgtagt

SEQ ID NO: 3740 - DNA, 33 bp, Artificial Sequence
  synthetic circulating small noncoding RNA (sncRNA) 5' transfer RNA (tRNA) half
gcgggaggcccgggttcgattcccggccaatgc

SEQ ID NO: 3741 - DNA, 25 bp, Artificial Sequence
  synthetic circulating small noncoding RNA (sncRNA) 5' transfer RNA (tRNA) half
gctctaccgactgagctatccgggc

SEQ ID NO: 3742 - DNA, 18 bp, Artificial Sequence
  synthetic circulating small noncoding RNA (sncRNA) 5' transfer RNA (tRNA) half
ggcgaatgtgataaccac

SEQ ID NO: 3743 - DNA, 20 bp, Artificial Sequence
  synthetic circulating small noncoding RNA (sncRNA) 5' transfer RNA (tRNA) half
tctagcggttaggattcctg

SEQ ID NO: 3744 - DNA, 33 bp, Artificial Sequence
  synthetic circulating small noncoding RNA (sncRNA) 5' transfer RNA (tRNA) half
acaggagatcctgggttcgaatcccagcggggc

SEQ ID NO: 3745 - DNA, 19 bp, Artificial Sequence
  synthetic circulating small noncoding RNA (sncRNA) 5' transfer RNA (tRNA) half
tgttcccacaccgggagtc

SEQ ID NO: 3746 - DNA, 15 bp, Artificial Sequence
  synthetic circulating small noncoding RNA (sncRNA) 5' transfer RNA (tRNA) half
gcgtggcaggcgaga

SEQ ID NO: 3747 - DNA, 37 bp, Artificial Sequence
  synthetic circulating small noncoding RNA (sncRNA) 5' transfer RNA (tRNA) half
cctccccgtcggggaatcgaaccccggtctcccgcgt

SEQ ID NO: 3748 - DNA, 27 bp, Artificial Sequence
  synthetic circulating small noncoding RNA (sncRNA) 5' transfer RNA (tRNA) half
ctggttcgattccggctcgaaggactt

SEQ ID NO: 3749 - DNA, 22 bp, Artificial Sequence
  synthetic circulating small noncoding RNA (sncRNA) 5' transfer RNA (tRNA) half
tagcggttaggattcctggttt

SEQ ID NO: 3750 - DNA, 28 bp, Artificial Sequence
  synthetic circulating small noncoding RNA (sncRNA) 5' transfer RNA (tRNA) half
taccgggagtcgaacccgggccgcctgg

SEQ ID NO: 3751 - DNA, 22 bp, Artificial Sequence
  synthetic circulating small noncoding RNA (sncRNA) 5' transfer RNA (tRNA) half
gagcgccgaatcctaaccacta

SEQ ID NO: 3752 - DNA, 20 bp, Artificial Sequence
  synthetic circulating small noncoding RNA (sncRNA) 5' transfer RNA (tRNA) half
accgactgagctatccgggc

SEQ ID NO: 3753 - DNA, 20 bp, Artificial Sequence
  synthetic circulating small noncoding RNA (sncRNA) 5' transfer RNA (tRNA) half
tcgattcccgggcggcgcat

SEQ ID NO: 3754 - DNA, 13 bp, Artificial Sequence
  synthetic circulating small noncoding RNA (sncRNA) 5' transfer RNA (tRNA) half
gcagagtactaac

SEQ ID NO: 3755 - DNA, 17 bp, Artificial Sequence
  synthetic circulating small noncoding RNA (sncRNA) 5' transfer RNA (tRNA) half
aaccgggcggaaacagt

SEQ ID NO: 3756 - DNA, 18 bp, Artificial Sequence
  synthetic circulating small noncoding RNA (sncRNA) 5' transfer RNA (tRNA) half
gacaggcggggatactca

SEQ ID NO: 3757 - DNA, 35 bp, Artificial Sequence
  synthetic circulating small noncoding RNA (sncRNA) 5' transfer RNA (tRNA) half
gctggggattgtgggttcgagtcccatctgggtcg

SEQ ID NO: 3758 - DNA, 31 bp, Artificial Sequence
  synthetic circulating small noncoding RNA (sncRNA) 5' transfer RNA (tRNA) half
ggggattgtgggttcgagtcccatctgggtc

SEQ ID NO: 3759 - DNA, 35 bp, Artificial Sequence
  synthetic circulating small noncoding RNA (sncRNA) 5' transfer RNA (tRNA) half
tcagaaggttgcgtgttcaaatcacgtcggggtca

SEQ ID NO: 3760 - DNA, 32 bp, Artificial Sequence
  synthetic circulating small noncoding RNA (sncRNA) 5' transfer RNA (tRNA) half
gaaggtcctgggttcgagccccagtggaacca

SEQ ID NO: 3761 - DNA, 32 bp, Artificial Sequence
  synthetic circulating small noncoding RNA (sncRNA) 5' transfer RNA (tRNA) half
tccccgtcggggaattgaaccccggtctcccg

SEQ ID NO: 3762 - DNA, 28 bp, Artificial Sequence
  synthetic circulating small noncoding RNA (sncRNA) 5' transfer RNA (tRNA) half
ccggatagctcagtcggtagagcatcag

SEQ ID NO: 3763 - DNA, 31 bp, Artificial Sequence
  synthetic circulating small noncoding RNA (sncRNA) 5' transfer RNA (tRNA) half
gagggtccagggttcaagtccctgttcgggc

SEQ ID NO: 3764 - DNA, 21 bp, Artificial Sequence
  synthetic circulating small noncoding RNA (sncRNA) 5' transfer RNA (tRNA) half
agacgacgaggatgggattcg

SEQ ID NO: 3765 - DNA, 20 bp, Artificial Sequence
  synthetic circulating small noncoding RNA (sncRNA) 5' transfer RNA (tRNA) half
tcccacaccgggagtcgaac

SEQ ID NO: 3766 - DNA, 34 bp, Artificial Sequence
  synthetic circulating small noncoding RNA (sncRNA) 5' transfer RNA (tRNA) half
gcgccgaatcctaaccactagaccaccagggaag

SEQ ID NO: 3767 - DNA, 32 bp, Artificial Sequence
  synthetic circulating small noncoding RNA (sncRNA) 5' transfer RNA (tRNA) half
gttcccacaccgggagtcgaacccgggccgcc

SEQ ID NO: 3768 - DNA, 33 bp, Artificial Sequence
  synthetic circulating small noncoding RNA (sncRNA) 5' transfer RNA (tRNA) half
aggattcggcgctctcaccgccgcggcccgggt

SEQ ID NO: 3769 - DNA, 17 bp, Artificial Sequence
  synthetic circulating small noncoding RNA (sncRNA) 5' transfer RNA (tRNA) half
accgggcggaaacaact

SEQ ID NO: 3770 - DNA, 15 bp, Artificial Sequence
  synthetic circulating small noncoding RNA (sncRNA) 5' transfer RNA (tRNA) half
gagaatcatacccct

SEQ ID NO: 3771 - DNA, 25 bp, Artificial Sequence
  synthetic circulating small noncoding RNA (sncRNA) 5' transfer RNA (tRNA) half
gtcaaatgctctaccactgagctat

SEQ ID NO: 3772 - DNA, 33 bp, Artificial Sequence
  synthetic circulating small noncoding RNA (sncRNA) 5' transfer RNA (tRNA) half
gaccacgaagggactcgaaccctcaatcttctg

SEQ ID NO: 3773 - DNA, 18 bp, Artificial Sequence
  synthetic circulating small noncoding RNA (sncRNA) 5' transfer RNA (tRNA) half
gtgcattggccgggaatc

SEQ ID NO: 3774 - DNA, 31 bp, Artificial Sequence
  synthetic circulating small noncoding RNA (sncRNA) 5' transfer RNA (tRNA) half
ccccgtcggggaattgaaccccggtctcccg

SEQ ID NO: 3775 - DNA, 12 bp, Artificial Sequence
  synthetic circulating small noncoding RNA (sncRNA) 5' transfer RNA (tRNA) half
gcggtctaaggc

SEQ ID NO: 3776 - DNA, 13 bp, Artificial Sequence
  synthetic circulating small noncoding RNA (sncRNA) 5' transfer RNA (tRNA) half
tcccggacgagcc

SEQ ID NO: 3777 - DNA, 19 bp, Artificial Sequence
  synthetic circulating small noncoding RNA (sncRNA) 5' transfer RNA (tRNA) half
tcgattcccggcccatgca

SEQ ID NO: 3778 - DNA, 39 bp, Artificial Sequence
  synthetic circulating small noncoding RNA (sncRNA) 5' transfer RNA (tRNA) half
gggccgcggcggtgagagcgccgaatcctaaccactaga

SEQ ID NO: 3779 - DNA, 26 bp, Artificial Sequence
  synthetic circulating small noncoding RNA (sncRNA) 5' transfer RNA (tRNA) half
accggggacctcttgatctgcagtca

SEQ ID NO: 3780 - DNA, 35 bp, Artificial Sequence
  synthetic circulating small noncoding RNA (sncRNA) 5' transfer RNA (tRNA) half
atcagaagattgcaggttcgagtcctgccgcggtc

SEQ ID NO: 3781 - DNA, 18 bp, Artificial Sequence
  synthetic circulating small noncoding RNA (sncRNA) 5' transfer RNA (tRNA) half
tcgactcccggtgtggga

SEQ ID NO: 3782 - DNA, 19 bp, Artificial Sequence
  synthetic circulating small noncoding RNA (sncRNA) 5' transfer RNA (tRNA) half
tcgattcccggccaatgca

SEQ ID NO: 3783 - DNA, 11 bp, Artificial Sequence
  synthetic circulating small noncoding RNA (sncRNA) 5' transfer RNA (tRNA) half
gccggggatcg

SEQ ID NO: 3784 - DNA, 28 bp, Artificial Sequence
  synthetic circulating small noncoding RNA (sncRNA) 5' transfer RNA (tRNA) half
agcagagtggcgcagcggaagcgtgctg

SEQ ID NO: 3785 - DNA, 19 bp, Artificial Sequence
  synthetic circulating small noncoding RNA (sncRNA) 5' transfer RNA (tRNA) half
gtgcattggccgggaatcg

SEQ ID NO: 3786 - DNA, 24 bp, Artificial Sequence
  synthetic circulating small noncoding RNA (sncRNA) 5' transfer RNA (tRNA) half
gcattggtggttcagtggtagaat

SEQ ID NO: 3787 - DNA, 33 bp, Artificial Sequence
  synthetic circulating small noncoding RNA (sncRNA) 5' transfer RNA (tRNA) half
atcagaagattgcaggttcgagtcctgccgcgg

SEQ ID NO: 3788 - DNA, 22 bp, Artificial Sequence
  synthetic circulating small noncoding RNA (sncRNA) 5' transfer RNA (tRNA) half
taacccagaggtcgatggatcg

SEQ ID NO: 3789 - DNA, 19 bp, Artificial Sequence
  synthetic circulating small noncoding RNA (sncRNA) 5' transfer RNA (tRNA) half
tggttaggattcggcgctc

SEQ ID NO: 3790 - DNA, 34 bp, Artificial Sequence
  synthetic circulating small noncoding RNA (sncRNA) 5' transfer RNA (tRNA) half
ttgaccccgacgtgacttgaacacgcaaccttct

SEQ ID NO: 3791 - DNA, 21 bp, Artificial Sequence
  synthetic circulating small noncoding RNA (sncRNA) 5' transfer RNA (tRNA) half
ttcaaatcccggacgagcccc

SEQ ID NO: 3792 - DNA, 31 bp, Artificial Sequence
  synthetic circulating small noncoding RNA (sncRNA) 5' transfer RNA (tRNA) half
ttctgtagtgtagtggttatcacgttcgcct

SEQ ID NO: 3793 - DNA, 19 bp, Artificial Sequence
  synthetic circulating small noncoding RNA (sncRNA) 5' transfer RNA (tRNA) half
ggaatcctaaccgctagac

SEQ ID NO: 3794 - DNA, 26 bp, Artificial Sequence
  synthetic circulating small noncoding RNA (sncRNA) 5' transfer RNA (tRNA) half
ccacatggtctagcggttaggattcc

SEQ ID NO: 3795 - DNA, 36 bp, Artificial Sequence
  synthetic circulating small noncoding RNA (sncRNA) 5' transfer RNA (tRNA) half
cgagaggtcccgggttcaaatcccggacgagcccca

SEQ ID NO: 3796 - DNA, 18 bp, Artificial Sequence
  synthetic circulating small noncoding RNA (sncRNA) 5' transfer RNA (tRNA) half
tccagagtgctaaccatt

SEQ ID NO: 3797 - DNA, 18 bp, Artificial Sequence
  synthetic circulating small noncoding RNA (sncRNA) 5' transfer RNA (tRNA) half
gggccgcctgggtgaaaa

SEQ ID NO: 3798 - DNA, 19 bp, Artificial Sequence
  synthetic circulating small noncoding RNA (sncRNA) 5' transfer RNA (tRNA) half
accactatacgatcacggc

SEQ ID NO: 3799 - DNA, 12 bp, Artificial Sequence
  synthetic circulating small noncoding RNA (sncRNA) 5' transfer RNA (tRNA) half
cgattcccgggc

SEQ ID NO: 3800 - DNA, 14 bp, Artificial Sequence
  synthetic circulating small noncoding RNA (sncRNA) 5' transfer RNA (tRNA) half
gcggcccgggttcg

SEQ ID NO: 3801 - DNA, 26 bp, Artificial Sequence
  synthetic circulating small noncoding RNA (sncRNA) 5' transfer RNA (tRNA) half
cgcagagtactaaccactatacgatc

SEQ ID NO: 3802 - DNA, 26 bp, Artificial Sequence
  synthetic circulating small noncoding RNA (sncRNA) 5' transfer RNA (tRNA) half
cgtgataaccactacactacggaaac

SEQ ID NO: 3803 - DNA, 24 bp, Artificial Sequence
  synthetic circulating small noncoding RNA (sncRNA) 5' transfer RNA (tRNA) half
aaggccccagcgagatttgaactc

SEQ ID NO: 3804 - DNA, 15 bp, Artificial Sequence
  synthetic circulating small noncoding RNA (sncRNA) 5' transfer RNA (tRNA) half
ccgacgaggatggga

SEQ ID NO: 3805 - DNA, 20 bp, Artificial Sequence
  synthetic circulating small noncoding RNA (sncRNA) 5' transfer RNA (tRNA) half
agatggagggggcacccgga

SEQ ID NO: 3806 - DNA, 25 bp, Artificial Sequence
  synthetic circulating small noncoding RNA (sncRNA) 5' transfer RNA (tRNA) half
atggttagcactctggactctgaat

SEQ ID NO: 3807 - DNA, 43 bp, Artificial Sequence
  synthetic circulating small noncoding RNA (sncRNA) 5' transfer RNA (tRNA) half
ttcgcgtgtgaggcgaacgtgataaccactacactacggaaac

SEQ ID NO: 3808 - DNA, 18 bp, Artificial Sequence
  synthetic circulating small noncoding RNA (sncRNA) 5' transfer RNA (tRNA) half
gcgaacgtgataaccact

SEQ ID NO: 3809 - DNA, 15 bp, Artificial Sequence
  synthetic circulating small noncoding RNA (sncRNA) 5' transfer RNA (tRNA) half
tgccggggatcgaac

SEQ ID NO: 3810 - DNA, 14 bp, Artificial Sequence
  synthetic circulating small noncoding RNA (sncRNA) 5' transfer RNA (tRNA) half
gctctaaccaactg

SEQ ID NO: 3811 - DNA, 24 bp, Artificial Sequence
  synthetic circulating small noncoding RNA (sncRNA) 5' transfer RNA (tRNA) half
gagccagccaggagtcgaacctag

SEQ ID NO: 3812 - DNA, 34 bp, Artificial Sequence
  synthetic circulating small noncoding RNA (sncRNA) 5' transfer RNA (tRNA) half
atgaccccgacgtgattcgaacacgcagccttct

SEQ ID NO: 3813 - DNA, 16 bp, Artificial Sequence
  synthetic circulating small noncoding RNA (sncRNA) 5' transfer RNA (tRNA) half
cctagaccaacgagcc

SEQ ID NO: 3814 - DNA, 16 bp, Artificial Sequence
  synthetic circulating small noncoding RNA (sncRNA) 5' transfer RNA (tRNA) half
aacccggaacctttga

SEQ ID NO: 3815 - DNA, 17 bp, Artificial Sequence
  synthetic circulating small noncoding RNA (sncRNA) 5' transfer RNA (tRNA) half
accccgtccgtgcctgc

SEQ ID NO: 3816 - DNA, 14 bp, Artificial Sequence
  synthetic circulating small noncoding RNA (sncRNA) 5' transfer RNA (tRNA) half
agtcaaatgctcta

SEQ ID NO: 3817 - DNA, 14 bp, Artificial Sequence
  synthetic circulating small noncoding RNA (sncRNA) 5' transfer RNA (tRNA) half
gccgtgatcgtata

SEQ ID NO: 3818 - DNA, 32 bp, Artificial Sequence
  synthetic circulating small noncoding RNA (sncRNA) 5' transfer RNA (tRNA) half
ccgctggtgtagtggtatcatgcaagattccc

SEQ ID NO: 3819 - DNA, 27 bp, Artificial Sequence
  synthetic circulating small noncoding RNA (sncRNA) 5' transfer RNA (tRNA) half
cccgcgtggcaggcgagaattctacca

SEQ ID NO: 3820 - DNA, 27 bp, Artificial Sequence
  synthetic circulating small noncoding RNA (sncRNA) 5' transfer RNA (tRNA) half
agtcaaatgctctaccactgagctata

SEQ ID NO: 3821 - DNA, 20 bp, Artificial Sequence
  synthetic circulating small noncoding RNA (sncRNA) 5' transfer RNA (tRNA) half
aacccgggccgcggcggtga

SEQ ID NO: 3822 - DNA, 38 bp, Artificial Sequence
  synthetic circulating small noncoding RNA (sncRNA) 5' transfer RNA (tRNA) half
tccgagaggtcccgggttcaaatcccggacgagcccca

SEQ ID NO: 3823 - DNA, 18 bp, Artificial Sequence
  synthetic circulating small noncoding RNA (sncRNA) 5' transfer RNA (tRNA) half
atggagggggcacccgga

SEQ ID NO: 3824 - DNA, 30 bp, Artificial Sequence
  synthetic circulating small noncoding RNA (sncRNA) 5' transfer RNA (tRNA) half
caacgcagagtactaaccactatacgatca

SEQ ID NO: 3825 - DNA, 25 bp, Artificial Sequence
  synthetic circulating small noncoding RNA (sncRNA) 5' transfer RNA (tRNA) half
cgggttcgattcccggtcagggaag

SEQ ID NO: 3826 - DNA, 24 bp, Artificial Sequence
  synthetic circulating small noncoding RNA (sncRNA) 5' transfer RNA (tRNA) half
caacgcagagtactaaccactata

SEQ ID NO: 3827 - DNA, 35 bp, Artificial Sequence
  synthetic circulating small noncoding RNA (sncRNA) 5' transfer RNA (tRNA) half
gagggggcacccggatttgaaccggggacctcttg

SEQ ID NO: 3828 - DNA, 17 bp, Artificial Sequence
  synthetic circulating small noncoding RNA (sncRNA) 5' transfer RNA (tRNA) half
aatcccggacgagcccc

SEQ ID NO: 3829 - DNA, 33 bp, Artificial Sequence
  synthetic circulating small noncoding RNA (sncRNA) 5' transfer RNA (tRNA) half
tccccgtcggggaattgaaccccggtctcccgc

SEQ ID NO: 3830 - DNA, 24 bp, Artificial Sequence
  synthetic circulating small noncoding RNA (sncRNA) 5' transfer RNA (tRNA) half
aactcggatcgctggattcaaagt

SEQ ID NO: 3831 - DNA, 20 bp, Artificial Sequence
  synthetic circulating small noncoding RNA (sncRNA) 5' transfer RNA (tRNA) half
gcgagctaccagggacctgt

SEQ ID NO: 3832 - DNA, 26 bp, Artificial Sequence
  synthetic circulating small noncoding RNA (sncRNA) 5' transfer RNA (tRNA) half
accccggtctcccgcgtgacaggcgg

SEQ ID NO: 3833 - DNA, 33 bp, Artificial Sequence
  synthetic circulating small noncoding RNA (sncRNA) 5' transfer RNA (tRNA) half
ggtagtgtggccgagcggtctaaggcgctggat

SEQ ID NO: 3834 - DNA, 38 bp, Artificial Sequence
  synthetic circulating small noncoding RNA (sncRNA) 5' transfer RNA (tRNA) half
acgcgggagaccggggttcgattccccgacggggagtc

SEQ ID NO: 3835 - DNA, 38 bp, Artificial Sequence
  synthetic circulating small noncoding RNA (sncRNA) 5' transfer RNA (tRNA) half
agctgaccccgacgtgatttgaacacgcaaccttctga

SEQ ID NO: 3836 - DNA, 18 bp, Artificial Sequence
  synthetic circulating small noncoding RNA (sncRNA) 5' transfer RNA (tRNA) half
gaagcgagaatcataccc

SEQ ID NO: 3837 - DNA, 27 bp, Artificial Sequence
  synthetic circulating small noncoding RNA (sncRNA) 5' transfer RNA (tRNA) half
gagtcccatgctctaccgactgagcta

SEQ ID NO: 3838 - DNA, 17 bp, Artificial Sequence
  synthetic circulating small noncoding RNA (sncRNA) 5' transfer RNA (tRNA) half
tgttcccacaccgggag

SEQ ID NO: 3839 - DNA, 24 bp, Artificial Sequence
  synthetic circulating small noncoding RNA (sncRNA) 5' transfer RNA (tRNA) half
gtggagatgccggggatcgaaccc

SEQ ID NO: 3840 - DNA, 17 bp, Artificial Sequence
  synthetic circulating small noncoding RNA (sncRNA) 5' transfer RNA (tRNA) half
tcgagccccagtggaac

SEQ ID NO: 3841 - DNA, 13 bp, Artificial Sequence
  synthetic circulating small noncoding RNA (sncRNA) 5' transfer RNA (tRNA) half
agagcatttgact

SEQ ID NO: 3842 - DNA, 17 bp, Artificial Sequence
  synthetic circulating small noncoding RNA (sncRNA) 5' transfer RNA (tRNA) half
ccctagaccaacgagcc

SEQ ID NO: 3843 - DNA, 21 bp, Artificial Sequence
  synthetic circulating small noncoding RNA (sncRNA) 5' transfer RNA (tRNA) half
gttcgactcccggtgtgggaa

SEQ ID NO: 3844 - DNA, 26 bp, Artificial Sequence
  synthetic circulating small noncoding RNA (sncRNA) 5' transfer RNA (tRNA) half
gcacgcttccgctgcgccactctgct

SEQ ID NO: 3845 - DNA, 35 bp, Artificial Sequence
  synthetic circulating small noncoding RNA (sncRNA) 5' transfer RNA (tRNA) half
agctggggattgtgggttcgagtcccatctgggtc

SEQ ID NO: 3846 - DNA, 21 bp, Artificial Sequence
  synthetic circulating small noncoding RNA (sncRNA) 5' transfer RNA (tRNA) half
cgaacgtgataaccactacac

SEQ ID NO: 3847 - DNA, 34 bp, Artificial Sequence
  synthetic circulating small noncoding RNA (sncRNA) 5' transfer RNA (tRNA) half
cgagccagccaggagtcgaacctggaatcttctg

SEQ ID NO: 3848 - DNA, 22 bp, Artificial Sequence
  synthetic circulating small noncoding RNA (sncRNA) 5' transfer RNA (tRNA) half
cgcgaccttggcgttattagca

SEQ ID NO: 3849 - DNA, 27 bp, Artificial Sequence
  synthetic circulating small noncoding RNA (sncRNA) 5' transfer RNA (tRNA) half
ggattaagagtcccatgctctaccgac

SEQ ID NO: 3850 - DNA, 17 bp, Artificial Sequence
  synthetic circulating small noncoding RNA (sncRNA) 5' transfer RNA (tRNA) half
gtcggtagagcatcaga

SEQ ID NO: 3851 - DNA, 21 bp, Artificial Sequence
  synthetic circulating small noncoding RNA (sncRNA) 5' transfer RNA (tRNA) half
ggttccaccgagatttgaact

SEQ ID NO: 3852 - DNA, 30 bp, Artificial Sequence
  synthetic circulating small noncoding RNA (sncRNA) 5' transfer RNA (tRNA) half
aatgactcctaaccactagaccaccaggga

SEQ ID NO: 3853 - DNA, 13 bp, Artificial Sequence
  synthetic circulating small noncoding RNA (sncRNA) 5' transfer RNA (tRNA) half
aggtcccaccgag

SEQ ID NO: 3854 - DNA, 21 bp, Artificial Sequence
  synthetic circulating small noncoding RNA (sncRNA) 5' transfer RNA (tRNA) half
tccctgaccgggaatcgaacc

SEQ ID NO: 3855 - DNA, 33 bp, Artificial Sequence
  synthetic circulating small noncoding RNA (sncRNA) 5' transfer RNA (tRNA) half
gtagtcgtggccgagtggttaaggcgatggact

SEQ ID NO: 3856 - DNA, 14 bp, Artificial Sequence
  synthetic circulating small noncoding RNA (sncRNA) 5' transfer RNA (tRNA) half
tgaccccgacgtga

SEQ ID NO: 3857 - DNA, 33 bp, Artificial Sequence
  synthetic circulating small noncoding RNA (sncRNA) 5' transfer RNA (tRNA) half
ggctcgtccgggatttgaacccgggacctctcg

SEQ ID NO: 3858 - DNA, 19 bp, Artificial Sequence
  synthetic circulating small noncoding RNA (sncRNA) 5' transfer RNA (tRNA) half
cctgaccgggaatcgaacc

SEQ ID NO: 3859 - DNA, 13 bp, Artificial Sequence
  synthetic circulating small noncoding RNA (sncRNA) 5' transfer RNA (tRNA) half
aaccgggcggaaa

SEQ ID NO: 3860 - DNA, 20 bp, Artificial Sequence
  synthetic circulating small noncoding RNA (sncRNA) 5' transfer RNA (tRNA) half
taatggataaggcatcagcc

SEQ ID NO: 3861 - DNA, 17 bp, Artificial Sequence
  synthetic circulating small noncoding RNA (sncRNA) 5' transfer RNA (tRNA) half
gagatgccggggatcga

SEQ ID NO: 3862 - DNA, 15 bp, Artificial Sequence
  synthetic circulating small noncoding RNA (sncRNA) 5' transfer RNA (tRNA) half
ggttcgattcccggc

SEQ ID NO: 3863 - DNA, 15 bp, Artificial Sequence
  synthetic circulating small noncoding RNA (sncRNA) 5' transfer RNA (tRNA) half
gccttaaccactcgg

SEQ ID NO: 3864 - DNA, 25 bp, Artificial Sequence
  synthetic circulating small noncoding RNA (sncRNA) 5' transfer RNA (tRNA) half
gggggtatagctcagtggtagagca

SEQ ID NO: 3865 - DNA, 33 bp, Artificial Sequence
  synthetic circulating small noncoding RNA (sncRNA) 5' transfer RNA (tRNA) half
gaccccgacgtgacttgaacacgcaaccttctg

SEQ ID NO: 3866 - DNA, 13 bp, Artificial Sequence
  synthetic circulating small noncoding RNA (sncRNA) 5' transfer RNA (tRNA) half
aggttccaccgag

SEQ ID NO: 3867 - DNA, 15 bp, Artificial Sequence
  synthetic circulating small noncoding RNA (sncRNA) 5' transfer RNA (tRNA) half
gaactcggatcgctg

SEQ ID NO: 3868 - DNA, 38 bp, Artificial Sequence
  synthetic circulating small noncoding RNA (sncRNA) 5' transfer RNA (tRNA) half
gtaaaccgaagatcacgggttcgaaccccgtccgtgcc

SEQ ID NO: 3869 - DNA, 24 bp, Artificial Sequence
  synthetic circulating small noncoding RNA (sncRNA) 5' transfer RNA (tRNA) half
tctgatgctctaccgactgagcta

SEQ ID NO: 3870 - DNA, 30 bp, Artificial Sequence
  synthetic circulating small noncoding RNA (sncRNA) 5' transfer RNA (tRNA) half
aaccaggaatcctaaccgctagaccatgtg

SEQ ID NO: 3871 - DNA, 30 bp, Artificial Sequence
  synthetic circulating small noncoding RNA (sncRNA) 5' transfer RNA (tRNA) half
ccacaccgggagtcgaacccgggccgcctg

SEQ ID NO: 3872 - DNA, 22 bp, Artificial Sequence
  synthetic circulating small noncoding RNA (sncRNA) 5' transfer RNA (tRNA) half
ccgggaatcgaacccgggccgc

SEQ ID NO: 3873 - DNA, 12 bp, Artificial Sequence
  synthetic circulating small noncoding RNA (sncRNA) 5' transfer RNA (tRNA) half
gctcgtccggga

SEQ ID NO: 3874 - DNA, 16 bp, Artificial Sequence
  synthetic circulating small noncoding RNA (sncRNA) 5' transfer RNA (tRNA) half
gtccagagtgctaacc

SEQ ID NO: 3875 - DNA, 24 bp, Artificial Sequence
  synthetic circulating small noncoding RNA (sncRNA) 5' transfer RNA (tRNA) half
agcgccgaatcctaaccactagac

SEQ ID NO: 3876 - DNA, 35 bp, Artificial Sequence
  synthetic circulating small noncoding RNA (sncRNA) 5' transfer RNA (tRNA) half
ctgagggtccagggttcaagtccctgttcgggcgc

SEQ ID NO: 3877 - DNA, 17 bp, Artificial Sequence
  synthetic circulating small noncoding RNA (sncRNA) 5' transfer RNA (tRNA) half
aagcgagaatcataccc

SEQ ID NO: 3878 - DNA, 16 bp, Artificial Sequence
  synthetic circulating small noncoding RNA (sncRNA) 5' transfer RNA (tRNA) half
gcggggatactcacca

SEQ ID NO: 3879 - DNA, 19 bp, Artificial Sequence
  synthetic circulating small noncoding RNA (sncRNA) 5' transfer RNA (tRNA) half
gagccagccaggagtcgaa

SEQ ID NO: 3880 - DNA, 15 bp, Artificial Sequence
  synthetic circulating small noncoding RNA (sncRNA) 5' transfer RNA (tRNA) half
ccggatgatcctcag

SEQ ID NO: 3881 - DNA, 30 bp, Artificial Sequence
  synthetic circulating small noncoding RNA (sncRNA) 5' transfer RNA (tRNA) half
cccatatggtctagcggttaggattcctgg

SEQ ID NO: 3882 - DNA, 25 bp, Artificial Sequence
  synthetic circulating small noncoding RNA (sncRNA) 5' transfer RNA (tRNA) half
tttccctgaccgggaatcgaacccg

SEQ ID NO: 3883 - DNA, 12 bp, Artificial Sequence
  synthetic circulating small noncoding RNA (sncRNA) 5' transfer RNA (tRNA) half
ggtcccaccgag

SEQ ID NO: 3884 - DNA, 32 bp, Artificial Sequence
  synthetic circulating small noncoding RNA (sncRNA) 5' transfer RNA (tRNA) half
agccagccaggagtcgaacctagaatcttctg

SEQ ID NO: 3885 - DNA, 35 bp, Artificial Sequence
  synthetic circulating small noncoding RNA (sncRNA) 5' transfer RNA (tRNA) half
tcagaagattgcaggttcgagtcctgccgcggtcg

SEQ ID NO: 3886 - DNA, 22 bp, Artificial Sequence
  synthetic circulating small noncoding RNA (sncRNA) 5' transfer RNA (tRNA) half
ctaaccgctagaccatatggga

SEQ ID NO: 3887 - DNA, 14 bp, Artificial Sequence
  synthetic circulating small noncoding RNA (sncRNA) 5' transfer RNA (tRNA) half
ctgagctatccggg

SEQ ID NO: 3888 - DNA, 38 bp, Artificial Sequence
  synthetic circulating small noncoding RNA (sncRNA) 5' transfer RNA (tRNA) half
ctaagccagggattgtgggttcgagtcccatctggggt

SEQ ID NO: 3889 - DNA, 15 bp, Artificial Sequence
  synthetic circulating small noncoding RNA (sncRNA) 5' transfer RNA (tRNA) half
atcccaccgctgcca

SEQ ID NO: 3890 - DNA, 11 bp, Artificial Sequence
  synthetic circulating small noncoding RNA (sncRNA) 5' transfer RNA (tRNA) half
tccctgaccgg

SEQ ID NO: 3891 - DNA, 36 bp, Artificial Sequence
  synthetic circulating small noncoding RNA (sncRNA) 5' transfer RNA (tRNA) half
tctgaaggtcctgagttcgaacctcagagggggcag

SEQ ID NO: 3892 - DNA, 38 bp, Artificial Sequence
  synthetic circulating small noncoding RNA (sncRNA) 5' transfer RNA (tRNA) half
gcctccccgtcggggaatcgaaccccggtctcccgcgt

SEQ ID NO: 3893 - DNA, 17 bp, Artificial Sequence
  synthetic circulating small noncoding RNA (sncRNA) 5' transfer RNA (tRNA) half
aatcccggacgagccct

SEQ ID NO: 3894 - DNA, 18 bp, Artificial Sequence
  synthetic circulating small noncoding RNA (sncRNA) 5' transfer RNA (tRNA) half
ttcaggtcgcagtctccc

SEQ ID NO: 3895 - DNA, 9 bp, Artificial Sequence
  synthetic circulating small noncoding RNA (sncRNA) 5' transfer RNA (tRNA) half
cgccgaatc

SEQ ID NO: 3896 - DNA, 14 bp, Artificial Sequence
  synthetic circulating small noncoding RNA (sncRNA) 5' transfer RNA (tRNA) half
gagtcgaacccggg

SEQ ID NO: 3897 - DNA, 33 bp, Artificial Sequence
  synthetic circulating small noncoding RNA (sncRNA) 5' transfer RNA (tRNA) half
cccaggcggcccgggttcgactcccggtatggg

SEQ ID NO: 3898 - DNA, 28 bp, Artificial Sequence
  synthetic circulating small noncoding RNA (sncRNA) 5' transfer RNA (tRNA) half
gcgcccaacgtggggctcgaacccacga

SEQ ID NO: 3899 - DNA, 14 bp, Artificial Sequence
  synthetic circulating small noncoding RNA (sncRNA) 5' transfer RNA (tRNA) half
gccgcggcggtgag

SEQ ID NO: 3900 - DNA, 36 bp, Artificial Sequence
  synthetic circulating small noncoding RNA (sncRNA) 5' transfer RNA (tRNA) half
gcagaaggtcctgggttcgagccccagtggaaccac

SEQ ID NO: 3901 - DNA, 16 bp, Artificial Sequence
  synthetic circulating small noncoding RNA (sncRNA) 5' transfer RNA (tRNA) half
tccaatgcgctatcca

SEQ ID NO: 3902 - DNA, 29 bp, Artificial Sequence
  synthetic circulating small noncoding RNA (sncRNA) 5' transfer RNA (tRNA) half
gcattggtggttcaatggtagaattctcg

SEQ ID NO: 3903 - DNA, 15 bp, Artificial Sequence
  synthetic circulating small noncoding RNA (sncRNA) 5' transfer RNA (tRNA) half
gggaatcgaaccccg

SEQ ID NO: 3904 - DNA, 15 bp, Artificial Sequence
  synthetic circulating small noncoding RNA (sncRNA) 5' transfer RNA (tRNA) half
gtctcccgcgtgaca

SEQ ID NO: 3905 - DNA, 32 bp, Artificial Sequence
  synthetic circulating small noncoding RNA (sncRNA) 5' transfer RNA (tRNA) half
ccacaccgggagtcgaacccgggccgcctggg

SEQ ID NO: 3906 - DNA, 17 bp, Artificial Sequence
  synthetic circulating small noncoding RNA (sncRNA) 5' transfer RNA (tRNA) half
tagaattctcgcctgcc

SEQ ID NO: 3907 - DNA, 20 bp, Artificial Sequence
  synthetic circulating small noncoding RNA (sncRNA) 5' transfer RNA (tRNA) half
gggccgcggcggtgagagcg

SEQ ID NO: 3908 - DNA, 17 bp, Artificial Sequence
  synthetic circulating small noncoding RNA (sncRNA) 5' transfer RNA (tRNA) half
gtggtatcatgcaagat

SEQ ID NO: 3909 - DNA, 31 bp, Artificial Sequence
  synthetic circulating small noncoding RNA (sncRNA) 5' transfer RNA (tRNA) half
cctggtggtctagtggttaggattcggcgct

SEQ ID NO: 3910 - DNA, 11 bp, Artificial Sequence
  synthetic circulating small noncoding RNA (sncRNA) 5' transfer RNA (tRNA) half
gaaccggggac

SEQ ID NO: 3911 - DNA, 21 bp, Artificial Sequence
  synthetic circulating small noncoding RNA (sncRNA) 5' transfer RNA (tRNA) half
aaacaaagcctccgatagcag

SEQ ID NO: 3912 - DNA, 18 bp, Artificial Sequence
  synthetic circulating small noncoding RNA (sncRNA) 5' transfer RNA (tRNA) half
gattcagagtccagagtg

SEQ ID NO: 3913 - DNA, 23 bp, Artificial Sequence
  synthetic circulating small noncoding RNA (sncRNA) 5' transfer RNA (tRNA) half
accgggagtcgaacccgggccgc

SEQ ID NO: 3914 - DNA, 28 bp, Artificial Sequence
  synthetic circulating small noncoding RNA (sncRNA) 5' transfer RNA (tRNA) half
agcgagaatcatacccctagaccaacga

SEQ ID NO: 3915 - DNA, 11 bp, Artificial Sequence
  synthetic circulating small noncoding RNA (sncRNA) 5' transfer RNA (tRNA) half
ccggacgagcc

SEQ ID NO: 3916 - DNA, 37 bp, Artificial Sequence
  synthetic circulating small noncoding RNA (sncRNA) 5' transfer RNA (tRNA) half
acccgggccgcggcggtgagagcgccgaatcctaacc

SEQ ID NO: 3917 - DNA, 20 bp, Artificial Sequence
  synthetic circulating small noncoding RNA (sncRNA) 5' transfer RNA (tRNA) half
gggcccagcacgcttccgct

SEQ ID NO: 3918 - DNA, 25 bp, Artificial Sequence
  synthetic circulating small noncoding RNA (sncRNA) 5' transfer RNA (tRNA) half
cgggccgcggcggtgagagcgccga

SEQ ID NO: 3919 - DNA, 31 bp, Artificial Sequence
  synthetic circulating small noncoding RNA (sncRNA) 5' transfer RNA (tRNA) half
atgcagagtactaaccactatacgatctcgg

SEQ ID NO: 3920 - DNA, 14 bp, Artificial Sequence
  synthetic circulating small noncoding RNA (sncRNA) 5' transfer RNA (tRNA) half
ggccgcggcggtga

SEQ ID NO: 3921 - DNA, 35 bp, Artificial Sequence
  synthetic circulating small noncoding RNA (sncRNA) 5' transfer RNA (tRNA) half
cctccccgtcggggaatcgaaccccggtctcccgc

SEQ ID NO: 3922 - DNA, 20 bp, Artificial Sequence
  synthetic circulating small noncoding RNA (sncRNA) 5' transfer RNA (tRNA) half
gacgacgaggatgggattcg

SEQ ID NO: 3923 - DNA, 18 bp, Artificial Sequence
  synthetic circulating small noncoding RNA (sncRNA) 5' transfer RNA (tRNA) half
aacccgggcctcccgcgt

SEQ ID NO: 3924 - DNA, 26 bp, Artificial Sequence
  synthetic circulating small noncoding RNA (sncRNA) 5' transfer RNA (tRNA) half
tggactctgaatccagcgatccgagt

SEQ ID NO: 3925 - DNA, 17 bp, Artificial Sequence
  synthetic circulating small noncoding RNA (sncRNA) 5' transfer RNA (tRNA) half
actcccggtgtgggaac

SEQ ID NO: 3926 - DNA, 35 bp, Artificial Sequence
  synthetic circulating small noncoding RNA (sncRNA) 5' transfer RNA (tRNA) half
gcgactctggtgggactcgaacccacaacctttga

SEQ ID NO: 3927 - DNA, 35 bp, Artificial Sequence
  synthetic circulating small noncoding RNA (sncRNA) 5' transfer RNA (tRNA) half
cgggccgcggcggtgagagcgccgaatcctaacca

SEQ ID NO: 3928 - DNA, 35 bp, Artificial Sequence
  synthetic circulating small noncoding RNA (sncRNA) 5' transfer RNA (tRNA) half
tggggattgtgggttcgagtcccatctgggtcgca

SEQ ID NO: 3929 - DNA, 26 bp, Artificial Sequence
  synthetic circulating small noncoding RNA (sncRNA) 5' transfer RNA (tRNA) half
agattaagagtctcatgctctaccga

SEQ ID NO: 3930 - DNA, 26 bp, Artificial Sequence
  synthetic circulating small noncoding RNA (sncRNA) 5' transfer RNA (tRNA) half
gtttcgatccatcgacctctgggtta

SEQ ID NO: 3931 - DNA, 33 bp, Artificial Sequence
  synthetic circulating small noncoding RNA (sncRNA) 5' transfer RNA (tRNA) half
cgcgggaggcccgggttcgattcccggccaatg

SEQ ID NO: 3932 - DNA, 24 bp, Artificial Sequence
  synthetic circulating small noncoding RNA (sncRNA) 5' transfer RNA (tRNA) half
ggttcgactcccggtatgggaaca

SEQ ID NO: 3933 - DNA, 16 bp, Artificial Sequence
  synthetic circulating small noncoding RNA (sncRNA) 5' transfer RNA (tRNA) half
ttccacctttcgggcg

SEQ ID NO: 3934 - DNA, 15 bp, Artificial Sequence
  synthetic circulating small noncoding RNA (sncRNA) 5' transfer RNA (tRNA) half
tggccgggaatcgaa

SEQ ID NO: 3935 - DNA, 13 bp, Artificial Sequence
  synthetic circulating small noncoding RNA (sncRNA) 5' transfer RNA (tRNA) half
ccgaatcctaacc

SEQ ID NO: 3936 - DNA, 18 bp, Artificial Sequence
  synthetic circulating small noncoding RNA (sncRNA) 5' transfer RNA (tRNA) half
tcccacatggtctagcgg

SEQ ID NO: 3937 - DNA, 16 bp, Artificial Sequence
  synthetic circulating small noncoding RNA (sncRNA) 5' transfer RNA (tRNA) half
ccgaagatcgcgggtt

SEQ ID NO: 3938 - DNA, 35 bp, Artificial Sequence
  synthetic circulating small noncoding RNA (sncRNA) 5' transfer RNA (tRNA) half
accaggggtcgcgagttcaaatctcgctggggcct

SEQ ID NO: 3939 - DNA, 38 bp, Artificial Sequence
  synthetic circulating small noncoding RNA (sncRNA) 5' transfer RNA (tRNA) half
ccgagaggtcccgggttcaaatcccggacgagccccac

SEQ ID NO: 3940 - DNA, 33 bp, Artificial Sequence
  synthetic circulating small noncoding RNA (sncRNA) 5' transfer RNA (tRNA) half
atgaccccgacgtgattcgaacacgcagccttc

SEQ ID NO: 3941 - DNA, 29 bp, Artificial Sequence
  synthetic circulating small noncoding RNA (sncRNA) 5' transfer RNA (tRNA) half
ggttccatggtgtaatggttagcactctg

SEQ ID NO: 3942 - DNA, 11 bp, Artificial Sequence
  synthetic circulating small noncoding RNA (sncRNA) 5' transfer RNA (tRNA) half
gattcccggcc

SEQ ID NO: 3943 - DNA, 25 bp, Artificial Sequence
  synthetic circulating small noncoding RNA (sncRNA) 5' transfer RNA (tRNA) half
ccgggttcgattcccgggcggcgca

SEQ ID NO: 3944 - DNA, 22 bp, Artificial Sequence
  synthetic circulating small noncoding RNA (sncRNA) 5' transfer RNA (tRNA) half
gcccggctagctcagtcggtag

SEQ ID NO: 3945 - DNA, 33 bp, Artificial Sequence
  synthetic circulating small noncoding RNA (sncRNA) 5' transfer RNA (tRNA) half
aggcggcccgggttcgactcccggtgtgggaac

SEQ ID NO: 3946 - DNA, 42 bp, Artificial Sequence
  synthetic circulating small noncoding RNA (sncRNA) 5' transfer RNA (tRNA) half
cgtctccccgtcggggaatcgaaccccggtctcccgcgtgac

SEQ ID NO: 3947 - DNA, 15 bp, Artificial Sequence
  synthetic circulating small noncoding RNA (sncRNA) 5' transfer RNA (tRNA) half
gccgcggcggtgaga

SEQ ID NO: 3948 - DNA, 17 bp, Artificial Sequence
  synthetic circulating small noncoding RNA (sncRNA) 5' transfer RNA (tRNA) half
cagggttcgaacctgcg

SEQ ID NO: 3949 - DNA, 18 bp, Artificial Sequence
  synthetic circulating small noncoding RNA (sncRNA) 5' transfer RNA (tRNA) half
aagcgagaatcatacccc

SEQ ID NO: 3950 - DNA, 16 bp, Artificial Sequence
  synthetic circulating small noncoding RNA (sncRNA) 5' transfer RNA (tRNA) half
gcacccggatttgaac

SEQ ID NO: 3951 - DNA, 21 bp, Artificial Sequence
  synthetic circulating small noncoding RNA (sncRNA) 5' transfer RNA (tRNA) half
gttgtcaggagtgggattcga

SEQ ID NO: 3952 - DNA, 16 bp, Artificial Sequence
  synthetic circulating small noncoding RNA (sncRNA) 5' transfer RNA (tRNA) half
agtcccatgctctacc

SEQ ID NO: 3953 - DNA, 17 bp, Artificial Sequence
  synthetic circulating small noncoding RNA (sncRNA) 5' transfer RNA (tRNA) half
gacgacgaaggtgggat

SEQ ID NO: 3954 - DNA, 35 bp, Artificial Sequence
  synthetic circulating small noncoding RNA (sncRNA) 5' transfer RNA (tRNA) half
tctcagggtcgtgggttcgagccccacgttgggcg

SEQ ID NO: 3955 - DNA, 20 bp, Artificial Sequence
  synthetic circulating small noncoding RNA (sncRNA) 5' transfer RNA (tRNA) half
ttcgacgaggatgggattcg

SEQ ID NO: 3956 - DNA, 25 bp, Artificial Sequence
  synthetic circulating small noncoding RNA (sncRNA) 5' transfer RNA (tRNA) half
gagtactaaccactatacgatcacg

SEQ ID NO: 3957 - DNA, 11 bp, Artificial Sequence
  synthetic circulating small noncoding RNA (sncRNA) 5' transfer RNA (tRNA) half
tgttcgggcgc

SEQ ID NO: 3958 - DNA, 35 bp, Artificial Sequence
  synthetic circulating small noncoding RNA (sncRNA) 5' transfer RNA (tRNA) half
tctaaaggtccctggttcgatcccgggtttcggca

SEQ ID NO: 3959 - DNA, 13 bp, Artificial Sequence
  synthetic circulating small noncoding RNA (sncRNA) 5' transfer RNA (tRNA) half
cgcccgaacaggg

SEQ ID NO: 3960 - DNA, 31 bp, Artificial Sequence
  synthetic circulating small noncoding RNA (sncRNA) 5' transfer RNA (tRNA) half
agggtcgtgggttcgagccccacgttgggcg

SEQ ID NO: 3961 - DNA, 38 bp, Artificial Sequence
  synthetic circulating small noncoding RNA (sncRNA) 5' transfer RNA (tRNA) half
accccgggtgggactcgaacccacaatccctggcttag

SEQ ID NO: 3962 - DNA, 20 bp, Artificial Sequence
  synthetic circulating small noncoding RNA (sncRNA) 5' transfer RNA (tRNA) half
aaccatgtttccgcccggtt

SEQ ID NO: 3963 - DNA, 14 bp, Artificial Sequence
  synthetic circulating small noncoding RNA (sncRNA) 5' transfer RNA (tRNA) half
ggttccaccgagat

SEQ ID NO: 3964 - DNA, 18 bp, Artificial Sequence
  synthetic circulating small noncoding RNA (sncRNA) 5' transfer RNA (tRNA) half
ccactcggccatcgctgc

SEQ ID NO: 3965 - DNA, 24 bp, Artificial Sequence
  synthetic circulating small noncoding RNA (sncRNA) 5' transfer RNA (tRNA) half
gcccagcacgcttccgctgcgcca

SEQ ID NO: 3966 - DNA, 40 bp, Artificial Sequence
  synthetic circulating small noncoding RNA (sncRNA) 5' transfer RNA (tRNA) half
cgtctccccgtcggggaatcgaaccccggtctcccgcgtg

SEQ ID NO: 3967 - DNA, 34 bp, Artificial Sequence
  synthetic circulating small noncoding RNA (sncRNA) 5' transfer RNA (tRNA) half
acccgggcctcccgcgtggcaggcgagaattcta

SEQ ID NO: 3968 - DNA, 12 bp, Artificial Sequence
  synthetic circulating small noncoding RNA (sncRNA) 5' transfer RNA (tRNA) half
gaaccggggacc

SEQ ID NO: 3969 - DNA, 37 bp, Artificial Sequence
  synthetic circulating small noncoding RNA (sncRNA) 5' transfer RNA (tRNA) half
tcaggcaccgctgggattcgaacccaggatctcctgt

SEQ ID NO: 3970 - DNA, 27 bp, Artificial Sequence
  synthetic circulating small noncoding RNA (sncRNA) 5' transfer RNA (tRNA) half
tcccatatggtctagcggttaggattc

SEQ ID NO: 3971 - DNA, 24 bp, Artificial Sequence
  synthetic circulating small noncoding RNA (sncRNA) 5' transfer RNA (tRNA) half
gacaggcggggatactaaccacta

SEQ ID NO: 3972 - DNA, 29 bp, Artificial Sequence
  synthetic circulating small noncoding RNA (sncRNA) 5' transfer RNA (tRNA) half
aaccaggaatcctaaccgctagaccatgt

SEQ ID NO: 3973 - DNA, 35 bp, Artificial Sequence
  synthetic circulating small noncoding RNA (sncRNA) 5' transfer RNA (tRNA) half
gcccaacgtggggctcgaacccacgaccctgagat

SEQ ID NO: 3974 - DNA, 31 bp, Artificial Sequence
  synthetic circulating small noncoding RNA (sncRNA) 5' transfer RNA (tRNA) half
ttccgtagtgtagtggtcatcacgctcgcct

SEQ ID NO: 3975 - DNA, 32 bp, Artificial Sequence
  synthetic circulating small noncoding RNA (sncRNA) 5' transfer RNA (tRNA) half
cgactccgccgggactcgaacccggaaccttt

SEQ ID NO: 3976 - DNA, 20 bp, Artificial Sequence
  synthetic circulating small noncoding RNA (sncRNA) 5' transfer RNA (tRNA) half
accatttgagctaatccccc

SEQ ID NO: 3977 - DNA, 17 bp, Artificial Sequence
  synthetic circulating small noncoding RNA (sncRNA) 5' transfer RNA (tRNA) half
gagccagccaggagtcg

SEQ ID NO: 3978 - DNA, 14 bp, Artificial Sequence
  synthetic circulating small noncoding RNA (sncRNA) 5' transfer RNA (tRNA) half
atccgggtgccccc

SEQ ID NO: 3979 - DNA, 34 bp, Artificial Sequence
  synthetic circulating small noncoding RNA (sncRNA) 5' transfer RNA (tRNA) half
gggcatgggtggttcagtggtagaattctcgcct

SEQ ID NO: 3980 - DNA, 29 bp, Artificial Sequence
  synthetic circulating small noncoding RNA (sncRNA) 5' transfer RNA (tRNA) half
gcggcccgggttcgactcccggtatggga

SEQ ID NO: 3981 - DNA, 43 bp, Artificial Sequence
  synthetic circulating small noncoding RNA (sncRNA) 5' transfer RNA (tRNA) half
gtttccgtagtgtagtggttatcacgttcgcctcacacgcgaa

SEQ ID NO: 3982 - DNA, 37 bp, Artificial Sequence
  synthetic circulating small noncoding RNA (sncRNA) 5' transfer RNA (tRNA) half
agtctccccgtcggggaatcgaaccccggtctcccgc

SEQ ID NO: 3983 - DNA, 32 bp, Artificial Sequence
  synthetic circulating small noncoding RNA (sncRNA) 5' transfer RNA (tRNA) half
gagaggtcccgggttcaaatcccggacgagcc

SEQ ID NO: 3984 - DNA, 19 bp, Artificial Sequence
  synthetic circulating small noncoding RNA (sncRNA) 5' transfer RNA (tRNA) half
ggtagtgtggccgagcggt

SEQ ID NO: 3985 - DNA, 27 bp, Artificial Sequence
  synthetic circulating small noncoding RNA (sncRNA) 5' transfer RNA (tRNA) half
ccaggaatcctaaccgctagaccatat

SEQ ID NO: 3986 - DNA, 17 bp, Artificial Sequence
  synthetic circulating small noncoding RNA (sncRNA) 5' transfer RNA (tRNA) half
tccagcgccttagaccg

SEQ ID NO: 3987 - DNA, 13 bp, Artificial Sequence
  synthetic circulating small noncoding RNA (sncRNA) 5' transfer RNA (tRNA) half
acccacgcctcca

SEQ ID NO: 3988 - DNA, 19 bp, Artificial Sequence
  synthetic circulating small noncoding RNA (sncRNA) 5' transfer RNA (tRNA) half
gtagtggttatcacgttcg

SEQ ID NO: 3989 - DNA, 26 bp, Artificial Sequence
  synthetic circulating small noncoding RNA (sncRNA) 5' transfer RNA (tRNA) half
tagcgcccgaacagggacttgaaccc

SEQ ID NO: 3990 - DNA, 22 bp, Artificial Sequence
  synthetic circulating small noncoding RNA (sncRNA) 5' transfer RNA (tRNA) half
cgttgcgttggccgggaatcga

SEQ ID NO: 3991 - DNA, 13 bp, Artificial Sequence
  synthetic circulating small noncoding RNA (sncRNA) 5' transfer RNA (tRNA) half
tccctgaccggga

SEQ ID NO: 3992 - DNA, 31 bp, Artificial Sequence
  synthetic circulating small noncoding RNA (sncRNA) 5' transfer RNA (tRNA) half
tcagaagtgggattcgaacccacgcctccat

SEQ ID NO: 3993 - DNA, 37 bp, Artificial Sequence
  synthetic circulating small noncoding RNA (sncRNA) 5' transfer RNA (tRNA) half
actcggatcgctggattcagagtccagagtgctaacc

SEQ ID NO: 3994 - DNA, 15 bp, Artificial Sequence
  synthetic circulating small noncoding RNA (sncRNA) 5' transfer RNA (tRNA) half
cgtcacgaacaggat

SEQ ID NO: 3995 - DNA, 30 bp, Artificial Sequence
  synthetic circulating small noncoding RNA (sncRNA) 5' transfer RNA (tRNA) half
tccgtagtgtagtggtcatcacgctcgcct

SEQ ID NO: 3996 - DNA, 17 bp, Artificial Sequence
  synthetic circulating small noncoding RNA (sncRNA) 5' transfer RNA (tRNA) half
cctaagcgagaatcata

SEQ ID NO: 3997 - DNA, 21 bp, Artificial Sequence
  synthetic circulating small noncoding RNA (sncRNA) 5' transfer RNA (tRNA) half
agaccactcggccacgctacc

SEQ ID NO: 3998 - DNA, 15 bp, Artificial Sequence
  synthetic circulating small noncoding RNA (sncRNA) 5' transfer RNA (tRNA) half
ggtagtgtggccgag

SEQ ID NO: 3999 - DNA, 23 bp, Artificial Sequence
  synthetic circulating small noncoding RNA (sncRNA) 5' transfer RNA (tRNA) half
ggtctagtggttaggattcggcg

SEQ ID NO: 4000 - DNA, 15 bp, Artificial Sequence
  synthetic circulating small noncoding RNA (sncRNA) 5' transfer RNA (tRNA) half
cgacgaggatgggat

SEQ ID NO: 4001 - DNA, 19 bp, Artificial Sequence
  synthetic circulating small noncoding RNA (sncRNA) 5' transfer RNA (tRNA) half
tcgaaaccgggcggaaaca

SEQ ID NO: 4002 - DNA, 37 bp, Artificial Sequence
  synthetic circulating small noncoding RNA (sncRNA) 5' transfer RNA (tRNA) half
taaacaggagatcctgggttcaaatcccagcggggcc

SEQ ID NO: 4003 - DNA, 36 bp, Artificial Sequence
  synthetic circulating small noncoding RNA (sncRNA) 5' transfer RNA (tRNA) half
taaacaggagatcctgggttcaaatcccagcggggc

SEQ ID NO: 4004 - DNA, 33 bp, Artificial Sequence
  synthetic circulating small noncoding RNA (sncRNA) 5' transfer RNA (tRNA) half
gcgcccgaacagggacttgaaccctggaccctc

SEQ ID NO: 4005 - DNA, 18 bp, Artificial Sequence
  synthetic circulating small noncoding RNA (sncRNA) 5' transfer RNA (tRNA) half
aacgtgtttccgcccggt

SEQ ID NO: 4006 - DNA, 10 bp, Artificial Sequence
  synthetic circulating small noncoding RNA (sncRNA) 5' transfer RNA (tRNA) half
acgttcgcct

SEQ ID NO: 4007 - DNA, 10 bp, Artificial Sequence
  synthetic circulating small noncoding RNA (sncRNA) 5' transfer RNA (tRNA) half
gcgcccgaac

SEQ ID NO: 4008 - DNA, 35 bp, Artificial Sequence
  synthetic circulating small noncoding RNA (sncRNA) 5' transfer RNA (tRNA) half
gccgaaacccgggatcgaaccagggacctttagat

SEQ ID NO: 4009 - DNA, 17 bp, Artificial Sequence
  synthetic circulating small noncoding RNA (sncRNA) 5' transfer RNA (tRNA) half
tcacgtcggggtcatct

SEQ ID NO: 4010 - DNA, 32 bp, Artificial Sequence
  synthetic circulating small noncoding RNA (sncRNA) 5' transfer RNA (tRNA) half
gcggcccgggttcgactcccggtgtgggaaac

SEQ ID NO: 4011 - DNA, 37 bp, Artificial Sequence
  synthetic circulating small noncoding RNA (sncRNA) 5' transfer RNA (tRNA) half
aagcctccctggtggtctagtggttaggattcggcgc

SEQ ID NO: 4012 - DNA, 26 bp, Artificial Sequence
  synthetic circulating small noncoding RNA (sncRNA) 5' transfer RNA (tRNA) half
ggtgagagcgccgaatcctaaccact

SEQ ID NO: 4013 - DNA, 22 bp, Artificial Sequence
  synthetic circulating small noncoding RNA (sncRNA) 5' transfer RNA (tRNA) half
ttcgattccggctcgaaggact

SEQ ID NO: 4014 - DNA, 33 bp, Artificial Sequence
  synthetic circulating small noncoding RNA (sncRNA) 5' transfer RNA (tRNA) half
acaggagatcctgggttcgaatcccagcggtgc

SEQ ID NO: 4015 - DNA, 13 bp, Artificial Sequence
  synthetic circulating small noncoding RNA (sncRNA) 5' transfer RNA (tRNA) half
ggagtcgaacctg

SEQ ID NO: 4016 - DNA, 38 bp, Artificial Sequence
  synthetic circulating small noncoding RNA (sncRNA) 5' transfer RNA (tRNA) half
acctccccgtcggggaattgaaccccggtctcccgcgt

SEQ ID NO: 4017 - DNA, 20 bp, Artificial Sequence
  synthetic circulating small noncoding RNA (sncRNA) 5' transfer RNA (tRNA) half
aaccgggcggaaacattact

SEQ ID NO: 4018 - DNA, 18 bp, Artificial Sequence
  synthetic circulating small noncoding RNA (sncRNA) 5' transfer RNA (tRNA) half
gccgtgactcggattcga

SEQ ID NO: 4019 - DNA, 31 bp, Artificial Sequence
  synthetic circulating small noncoding RNA (sncRNA) 5' transfer RNA (tRNA) half
ggttccaccgagatttgaactcggatcgctg

SEQ ID NO: 4020 - DNA, 14 bp, Artificial Sequence
  synthetic circulating small noncoding RNA (sncRNA) 5' transfer RNA (tRNA) half
aacccacgcctcca

SEQ ID NO: 4021 - DNA, 12 bp, Artificial Sequence
  synthetic circulating small noncoding RNA (sncRNA) 5' transfer RNA (tRNA) half
gagcgccgaatc

SEQ ID NO: 4022 - DNA, 31 bp, Artificial Sequence
  synthetic circulating small noncoding RNA (sncRNA) 5' transfer RNA (tRNA) half
ggggtatagctcagtggtagagcatttgact

SEQ ID NO: 4023 - DNA, 20 bp, Artificial Sequence
  synthetic circulating small noncoding RNA (sncRNA) 5' transfer RNA (tRNA) half
aacgcagagtactaaccact

SEQ ID NO: 4024 - DNA, 32 bp, Artificial Sequence
  synthetic circulating small noncoding RNA (sncRNA) 5' transfer RNA (tRNA) half
ccaggggtcgcgagttcaaatctcgctggggc

SEQ ID NO: 4025 - DNA, 33 bp, Artificial Sequence
  synthetic circulating small noncoding RNA (sncRNA) 5' transfer RNA (tRNA) half
tcctcgttagtatagtggtgagtatccccgcct

SEQ ID NO: 4026 - DNA, 8 bp, Artificial Sequence
  synthetic circulating small noncoding RNA (sncRNA) 5' transfer RNA (tRNA) half
gcgagaat

SEQ ID NO: 4027 - DNA, 19 bp, Artificial Sequence
  synthetic circulating small noncoding RNA (sncRNA) 5' transfer RNA (tRNA) half
tgatgctctaccgactgag

SEQ ID NO: 4028 - DNA, 14 bp, Artificial Sequence
  synthetic circulating small noncoding RNA (sncRNA) 5' transfer RNA (tRNA) half
cgattccggctcga

SEQ ID NO: 4029 - DNA, 23 bp, Artificial Sequence
  synthetic circulating small noncoding RNA (sncRNA) 5' transfer RNA (tRNA) half
gaacccgggccgcggcggtgaga

SEQ ID NO: 4030 - DNA, 16 bp, Artificial Sequence
  synthetic circulating small noncoding RNA (sncRNA) 5' transfer RNA (tRNA) half
atgaccccgacgtgat

SEQ ID NO: 4031 - DNA, 38 bp, Artificial Sequence
  synthetic circulating small noncoding RNA (sncRNA) 5' transfer RNA (tRNA) half
ggttgccccctctgaggttcgaactcaggaccttcaga

SEQ ID NO: 4032 - DNA, 30 bp, Artificial Sequence
  synthetic circulating small noncoding RNA (sncRNA) 5' transfer RNA (tRNA) half
actccgccgggactcgaacccggaaccttt

SEQ ID NO: 4033 - DNA, 24 bp, Artificial Sequence
  synthetic circulating small noncoding RNA (sncRNA) 5' transfer RNA (tRNA) half
agtactaaccactatacgatcacg

SEQ ID NO: 4034 - DNA, 14 bp, Artificial Sequence
  synthetic circulating small noncoding RNA (sncRNA) 5' transfer RNA (tRNA) half
gcgccgctggtgta

SEQ ID NO: 4035 - DNA, 21 bp, Artificial Sequence
  synthetic circulating small noncoding RNA (sncRNA) 5' transfer RNA (tRNA) half
ggccccagcgagatttgaact

SEQ ID NO: 4036 - DNA, 34 bp, Artificial Sequence
  synthetic circulating small noncoding RNA (sncRNA) 5' transfer RNA (tRNA) half
aacgcagtgccttagactgctcggccatcctgac

SEQ ID NO: 4037 - DNA, 31 bp, Artificial Sequence
  synthetic circulating small noncoding RNA (sncRNA) 5' transfer RNA (tRNA) half
accagtgctctaacccctgagctatggagcc

SEQ ID NO: 4038 - DNA, 19 bp, Artificial Sequence
  synthetic circulating small noncoding RNA (sncRNA) 5' transfer RNA (tRNA) half
aatcctgccgactacgtca

SEQ ID NO: 4039 - DNA, 34 bp, Artificial Sequence
  synthetic circulating small noncoding RNA (sncRNA) 5' transfer RNA (tRNA) half
ggccccatggtgtaatggttagcactctggactt

SEQ ID NO: 4040 - DNA, 25 bp, Artificial Sequence
  synthetic circulating small noncoding RNA (sncRNA) 5' transfer RNA (tRNA) half
ccgcggcccgggttcgattcccggt

SEQ ID NO: 4041 - DNA, 21 bp, Artificial Sequence
  synthetic circulating small noncoding RNA (sncRNA) 5' transfer RNA (tRNA) half
caggagtcgaacctggaatct

SEQ ID NO: 4042 - DNA, 21 bp, Artificial Sequence
  synthetic circulating small noncoding RNA (sncRNA) 5' transfer RNA (tRNA) half
tagtggttaggattcggcgct

SEQ ID NO: 4043 - DNA, 14 bp, Artificial Sequence
  synthetic circulating small noncoding RNA (sncRNA) 5' transfer RNA (tRNA) half
gtgagtatccccgc

SEQ ID NO: 4044 - DNA, 18 bp, Artificial Sequence
  synthetic circulating small noncoding RNA (sncRNA) 5' transfer RNA (tRNA) half
cgagaattctaccactga

SEQ ID NO: 4045 - DNA, 29 bp, Artificial Sequence
  synthetic circulating small noncoding RNA (sncRNA) 5' transfer RNA (tRNA) half
tttccgtagtgtagtggttatcacgttcg

SEQ ID NO: 4046 - DNA, 19 bp, Artificial Sequence
  synthetic circulating small noncoding RNA (sncRNA) 5' transfer RNA (tRNA) half
ggtagaattctcgcctgcc

SEQ ID NO: 4047 - DNA, 11 bp, Artificial Sequence
  synthetic circulating small noncoding RNA (sncRNA) 5' transfer RNA (tRNA) half
gctcgaacagg

SEQ ID NO: 4048 - DNA, 18 bp, Artificial Sequence
  synthetic circulating small noncoding RNA (sncRNA) 5' transfer RNA (tRNA) half
ccgtatggaggcgtgggt

SEQ ID NO: 4049 - DNA, 33 bp, Artificial Sequence
  synthetic circulating small noncoding RNA (sncRNA) 5' transfer RNA (tRNA) half
agccagccaggagtcgaacctggaatcttctga

SEQ ID NO: 4050 - DNA, 23 bp, Artificial Sequence
  synthetic circulating small noncoding RNA (sncRNA) 5' transfer RNA (tRNA) half
agtccagagtgctaaccattaca

SEQ ID NO: 4051 - DNA, 19 bp, Artificial Sequence
  synthetic circulating small noncoding RNA (sncRNA) 5' transfer RNA (tRNA) half
ccactgaaccaccaatgcc

SEQ ID NO: 4052 - DNA, 15 bp, Artificial Sequence
  synthetic circulating small noncoding RNA (sncRNA) 5' transfer RNA (tRNA) half
ccgtcggggaatcga

SEQ ID NO: 4053 - DNA, 23 bp, Artificial Sequence
  synthetic circulating small noncoding RNA (sncRNA) 5' transfer RNA (tRNA) half
ccgcgaccttggcgttattagca

SEQ ID NO: 4054 - DNA, 24 bp, Artificial Sequence
  synthetic circulating small noncoding RNA (sncRNA) 5' transfer RNA (tRNA) half
ggattaagagtcccatgctctacc

SEQ ID NO: 4055 - DNA, 35 bp, Artificial Sequence
  synthetic circulating small noncoding RNA (sncRNA) 5' transfer RNA (tRNA) half
atcagaaggttgcgtgttcaaatcacgtcggggtc

SEQ ID NO: 4056 - DNA, 20 bp, Artificial Sequence
  synthetic circulating small noncoding RNA (sncRNA) 5' transfer RNA (tRNA) half
ttgtcaggagtgggattcga

SEQ ID NO: 4057 - DNA, 36 bp, Artificial Sequence
  synthetic circulating small noncoding RNA (sncRNA) 5' transfer RNA (tRNA) half
ctgagggtccagggttcaagtccctgttcgggcgct

SEQ ID NO: 4058 - DNA, 21 bp, Artificial Sequence
  synthetic circulating small noncoding RNA (sncRNA) 5' transfer RNA (tRNA) half
taaccactcggccacgactac

SEQ ID NO: 4059 - DNA, 16 bp, Artificial Sequence
  synthetic circulating small noncoding RNA (sncRNA) 5' transfer RNA (tRNA) half
ctccccgtcggggaat

SEQ ID NO: 4060 - DNA, 35 bp, Artificial Sequence
  synthetic circulating small noncoding RNA (sncRNA) 5' transfer RNA (tRNA) half
cgccgaatcctaaccactagaccaccagggaagtt

SEQ ID NO: 4061 - DNA, 15 bp, Artificial Sequence
  synthetic circulating small noncoding RNA (sncRNA) 5' transfer RNA (tRNA) half
aggggtatgattctc

SEQ ID NO: 4062 - DNA, 36 bp, Artificial Sequence
  synthetic circulating small noncoding RNA (sncRNA) 5' transfer RNA (tRNA) half
accgaccacgaagggactcgaaccctcaatcttctg

SEQ ID NO: 4063 - DNA, 33 bp, Artificial Sequence
  synthetic circulating small noncoding RNA (sncRNA) 5' transfer RNA (tRNA) half
gtctccccgtcggggaatcgaaccccggtctcc

SEQ ID NO: 4064 - DNA, 34 bp, Artificial Sequence
  synthetic circulating small noncoding RNA (sncRNA) 5' transfer RNA (tRNA) half
agtctggcgccttagaccactcggccatcctgac

SEQ ID NO: 4065 - DNA, 21 bp, Artificial Sequence
  synthetic circulating small noncoding RNA (sncRNA) 5' transfer RNA (tRNA) half
tcgaatcccacttctgacaca

SEQ ID NO: 4066 - DNA, 37 bp, Artificial Sequence
  synthetic circulating small noncoding RNA (sncRNA) 5' transfer RNA (tRNA) half
accgactctggtgggattcgaacccacaacctttgaa

SEQ ID NO: 4067 - DNA, 17 bp, Artificial Sequence
  synthetic circulating small noncoding RNA (sncRNA) 5' transfer RNA (tRNA) half
tctcaccgccgcggccc

SEQ ID NO: 4068 - DNA, 21 bp, Artificial Sequence
  synthetic circulating small noncoding RNA (sncRNA) 5' transfer RNA (tRNA) half
gagtccagagtgctaaccatt

SEQ ID NO: 4069 - DNA, 36 bp, Artificial Sequence
  synthetic circulating small noncoding RNA (sncRNA) 5' transfer RNA (tRNA) half
ctgaccccgacgtgatttgaacacgcaaccttctga

SEQ ID NO: 4070 - DNA, 32 bp, Artificial Sequence
  synthetic circulating small noncoding RNA (sncRNA) 5' transfer RNA (tRNA) half
attcagagtccagagtgctaaccattacacca

SEQ ID NO: 4071 - DNA, 38 bp, Artificial Sequence
  synthetic circulating small noncoding RNA (sncRNA) 5' transfer RNA (tRNA) half
agctggggattgtgggttcgagtcccatctgggtcgca

SEQ ID NO: 4072 - DNA, 16 bp, Artificial Sequence
  synthetic circulating small noncoding RNA (sncRNA) 5' transfer RNA (tRNA) half
gccgcggcggtgagag

SEQ ID NO: 4073 - DNA, 36 bp, Artificial Sequence
  synthetic circulating small noncoding RNA (sncRNA) 5' transfer RNA (tRNA) half
acccaggcggcccgggttcgactcccggtgtgggaa

SEQ ID NO: 4074 - DNA, 30 bp, Artificial Sequence
  synthetic circulating small noncoding RNA (sncRNA) 5' transfer RNA (tRNA) half
gctggtgtagtggtatcatgcaagattccc

SEQ ID NO: 4075 - DNA, 37 bp, Artificial Sequence
  synthetic circulating small noncoding RNA (sncRNA) 5' transfer RNA (tRNA) half
gccagggattgtgggttcgagtcccatctggggtggt

SEQ ID NO: 4076 - DNA, 31 bp, Artificial Sequence
  synthetic circulating small noncoding RNA (sncRNA) 5' transfer RNA (tRNA) half
ccgctggtgtagtggtatcatgcaagattcc

SEQ ID NO: 4077 - DNA, 15 bp, Artificial Sequence
  synthetic circulating small noncoding RNA (sncRNA) 5' transfer RNA (tRNA) half
gccggggatcgaacc

SEQ ID NO: 4078 - DNA, 28 bp, Artificial Sequence
  synthetic circulating small noncoding RNA (sncRNA) 5' transfer RNA (tRNA) half
cgcccaacgtggggctcgaacccacgac

SEQ ID NO: 4079 - DNA, 25 bp, Artificial Sequence
  synthetic circulating small noncoding RNA (sncRNA) 5' transfer RNA (tRNA) half
caggagtcgaacctggaatcttctg

SEQ ID NO: 4080 - DNA, 22 bp, Artificial Sequence
  synthetic circulating small noncoding RNA (sncRNA) 5' transfer RNA (tRNA) half
gcccgaacagggacttgaaccc

SEQ ID NO: 4081 - DNA, 12 bp, Artificial Sequence
  synthetic circulating small noncoding RNA (sncRNA) 5' transfer RNA (tRNA) half
ccttcgatagct

SEQ ID NO: 4082 - DNA, 36 bp, Artificial Sequence
  synthetic circulating small noncoding RNA (sncRNA) 5' transfer RNA (tRNA) half
acctccccgtcggggaattgaaccccggtctcccgc

SEQ ID NO: 4083 - DNA, 35 bp, Artificial Sequence
  synthetic circulating small noncoding RNA (sncRNA) 5' transfer RNA (tRNA) half
ctgccgtgactcggattcgaaccgaggttgctgcg

SEQ ID NO: 4084 - DNA, 33 bp, Artificial Sequence
  synthetic circulating small noncoding RNA (sncRNA) 5' transfer RNA (tRNA) half
tcccataccgggagtcgaacccgggccgcctgg

SEQ ID NO: 4085 - DNA, 33 bp, Artificial Sequence
  synthetic circulating small noncoding RNA (sncRNA) 5' transfer RNA (tRNA) half
acccaggcggcccgggttcgactcccggtatgg

SEQ ID NO: 4086 - DNA, 23 bp, Artificial Sequence
  synthetic circulating small noncoding RNA (sncRNA) 5' transfer RNA (tRNA) half
gtgagagcgccgaatcctaacca

SEQ ID NO: 4087 - DNA, 17 bp, Artificial Sequence
  synthetic circulating small noncoding RNA (sncRNA) 5' transfer RNA (tRNA) half
tcccatgctctaccgac

SEQ ID NO: 4088 - DNA, 30 bp, Artificial Sequence
  synthetic circulating small noncoding RNA (sncRNA) 5' transfer RNA (tRNA) half
aacgcagagtactaaccactatacgatcac

SEQ ID NO: 4089 - DNA, 18 bp, Artificial Sequence
  synthetic circulating small noncoding RNA (sncRNA) 5' transfer RNA (tRNA) half
ccgctagaccatatggga

SEQ ID NO: 4090 - DNA, 38 bp, Artificial Sequence
  synthetic circulating small noncoding RNA (sncRNA) 5' transfer RNA (tRNA) half
aggcaccgctgggattcgaacccaggatctcctgttta

SEQ ID NO: 4091 - DNA, 26 bp, Artificial Sequence
  synthetic circulating small noncoding RNA (sncRNA) 5' transfer RNA (tRNA) half
ggtggtctagtggttaggattcggcg

SEQ ID NO: 4092 - DNA, 13 bp, Artificial Sequence
  synthetic circulating small noncoding RNA (sncRNA) 5' transfer RNA (tRNA) half
tcacgtcggggtc

SEQ ID NO: 4093 - DNA, 13 bp, Artificial Sequence
  synthetic circulating small noncoding RNA (sncRNA) 5' transfer RNA (tRNA) half
gccttaaccactc

SEQ ID NO: 4094 - DNA, 20 bp, Artificial Sequence
  synthetic circulating small noncoding RNA (sncRNA) 5' transfer RNA (tRNA) half
gccgtgatcgtatagtggtt

SEQ ID NO: 4095 - DNA, 21 bp, Artificial Sequence
  synthetic circulating small noncoding RNA (sncRNA) 5' transfer RNA (tRNA) half
gtgacaggcggggatactcac

SEQ ID NO: 4096 - DNA, 23 bp, Artificial Sequence
  synthetic circulating small noncoding RNA (sncRNA) 5' transfer RNA (tRNA) half
gtgacaggcggggatactcacca

SEQ ID NO: 4097 - DNA, 15 bp, Artificial Sequence
  synthetic circulating small noncoding RNA (sncRNA) 5' transfer RNA (tRNA) half
gaaccccggtctccc

SEQ ID NO: 4098 - DNA, 32 bp, Artificial Sequence
  synthetic circulating small noncoding RNA (sncRNA) 5' transfer RNA (tRNA) half
cccatatggtctagcggttaggattcctggtt

SEQ ID NO: 4099 - DNA, 41 bp, Artificial Sequence
  synthetic circulating small noncoding RNA (sncRNA) 5' transfer RNA (tRNA) half
aactcggatcgctggattcagagtccagagtgctaaccatt

SEQ ID NO: 4100 - DNA, 27 bp, Artificial Sequence
  synthetic circulating small noncoding RNA (sncRNA) 5' transfer RNA (tRNA) half
gagtgctaaccattacaccatgggacc

SEQ ID NO: 4101 - DNA, 14 bp, Artificial Sequence
  synthetic circulating small noncoding RNA (sncRNA) 5' transfer RNA (tRNA) half
gccgaatcctagcc

SEQ ID NO: 4102 - DNA, 23 bp, Artificial Sequence
  synthetic circulating small noncoding RNA (sncRNA) 5' transfer RNA (tRNA) half
gcgagaatcatacccctagacca

SEQ ID NO: 4103 - DNA, 35 bp, Artificial Sequence
  synthetic circulating small noncoding RNA (sncRNA) 5' transfer RNA (tRNA) half
cgccgaatcctaaccactagaccaccagggaaact

SEQ ID NO: 4104 - DNA, 31 bp, Artificial Sequence
  synthetic circulating small noncoding RNA (sncRNA) 5' transfer RNA (tRNA) half
gccgaatcctagccactagaccaccagggac

SEQ ID NO: 4105 - DNA, 18 bp, Artificial Sequence
  synthetic circulating small noncoding RNA (sncRNA) 5' transfer RNA (tRNA) half
gcgagaatcataccccta

SEQ ID NO: 4106 - DNA, 39 bp, Artificial Sequence
  synthetic circulating small noncoding RNA (sncRNA) 5' transfer RNA (tRNA) half
gaccagtgctctaacccctgagctatggagccctcacct

SEQ ID NO: 4107 - DNA, 20 bp, Artificial Sequence
  synthetic circulating small noncoding RNA (sncRNA) 5' transfer RNA (tRNA) half
ggccccagcgagatttgaac

SEQ ID NO: 4108 - DNA, 39 bp, Artificial Sequence
  synthetic circulating small noncoding RNA (sncRNA) 5' transfer RNA (tRNA) half
accgccgcggcccgggttcgattcccggtcagggaagca

SEQ ID NO: 4109 - DNA, 37 bp, Artificial Sequence
  synthetic circulating small noncoding RNA (sncRNA) 5' transfer RNA (tRNA) half
tagcgcccgaacagggacttgaaccctggaccctcag

SEQ ID NO: 4110 - DNA, 23 bp, Artificial Sequence
  synthetic circulating small noncoding RNA (sncRNA) 5' transfer RNA (tRNA) half
ggtcgagccagccaggagtcgaa

SEQ ID NO: 4111 - DNA, 15 bp, Artificial Sequence
  synthetic circulating small noncoding RNA (sncRNA) 5' transfer RNA (tRNA) half
acgacgaggatggga

SEQ ID NO: 4112 - DNA, 38 bp, Artificial Sequence
  synthetic circulating small noncoding RNA (sncRNA) 5' transfer RNA (tRNA) half
taagccagggattgtgggttcgagtcccatctggggtg

SEQ ID NO: 4113 - DNA, 22 bp, Artificial Sequence
  synthetic circulating small noncoding RNA (sncRNA) 5' transfer RNA (tRNA) half
agctgaccccgacgtgatttga

SEQ ID NO: 4114 - DNA, 26 bp, Artificial Sequence
  synthetic circulating small noncoding RNA (sncRNA) 5' transfer RNA (tRNA) half
cggctagctcagtcggtagagcatga

SEQ ID NO: 4115 - DNA, 26 bp, Artificial Sequence
  synthetic circulating small noncoding RNA (sncRNA) 5' transfer RNA (tRNA) half
cgggccgcggcggtgagagcgccgaa

SEQ ID NO: 4116 - DNA, 36 bp, Artificial Sequence
  synthetic circulating small noncoding RNA (sncRNA) 5' transfer RNA (tRNA) half
agcgaccacgaagggactcgaacccccaatcttctg

SEQ ID NO: 4117 - DNA, 29 bp, Artificial Sequence
  synthetic circulating small noncoding RNA (sncRNA) 5' transfer RNA (tRNA) half
agcgccgaatcctaaccactagaccacca

SEQ ID NO: 4118 - DNA, 32 bp, Artificial Sequence
  synthetic circulating small noncoding RNA (sncRNA) 5' transfer RNA (tRNA) half
tccagcgccttagaccgctcggccacgctacc

SEQ ID NO: 4119 - DNA, 35 bp, Artificial Sequence
  synthetic circulating small noncoding RNA (sncRNA) 5' transfer RNA (tRNA) half
tcccacaccgggagtcgaacccgggccgcctgggt

SEQ ID NO: 4120 - DNA, 18 bp, Artificial Sequence
  synthetic circulating small noncoding RNA (sncRNA) 5' transfer RNA (tRNA) half
gagtcccatgctctaccg

SEQ ID NO: 4121 - DNA, 11 bp, Artificial Sequence
  synthetic circulating small noncoding RNA (sncRNA) 5' transfer RNA (tRNA) half
aacccgcgacc

SEQ ID NO: 4122 - DNA, 26 bp, Artificial Sequence
  synthetic circulating small noncoding RNA (sncRNA) 5' transfer RNA (tRNA) half
ggttaggattcggcgctctcaccgcc

SEQ ID NO: 4123 - DNA, 36 bp, Artificial Sequence
  synthetic circulating small noncoding RNA (sncRNA) 5' transfer RNA (tRNA) half
cgaaaggtccccggttcgaaaccgggcggaaacaac

SEQ ID NO: 4124 - DNA, 22 bp, Artificial Sequence
  synthetic circulating small noncoding RNA (sncRNA) 5' transfer RNA (tRNA) half
acccgggccgcggcggtgagag

SEQ ID NO: 4125 - DNA, 15 bp, Artificial Sequence
  synthetic circulating small noncoding RNA (sncRNA) 5' transfer RNA (tRNA) half
caggagtcgaacctg

SEQ ID NO: 4126 - DNA, 13 bp, Artificial Sequence
  synthetic circulating small noncoding RNA (sncRNA) 5' transfer RNA (tRNA) half
cggccacgctacc

SEQ ID NO: 4127 - DNA, 20 bp, Artificial Sequence
  synthetic circulating small noncoding RNA (sncRNA) 5' transfer RNA (tRNA) half
aatcccaccgctgccatctt

SEQ ID NO: 4128 - DNA, 14 bp, Artificial Sequence
  synthetic circulating small noncoding RNA (sncRNA) 5' transfer RNA (tRNA) half
ggtatgattctcgg

SEQ ID NO: 4129 - DNA, 16 bp, Artificial Sequence
  synthetic circulating small noncoding RNA (sncRNA) 5' transfer RNA (tRNA) half
actgagctatccgggc

SEQ ID NO: 4130 - DNA, 17 bp, Artificial Sequence
  synthetic circulating small noncoding RNA (sncRNA) 5' transfer RNA (tRNA) half
tcctgccgcggtcgact

SEQ ID NO: 4131 - DNA, 26 bp, Artificial Sequence
  synthetic circulating small noncoding RNA (sncRNA) 5' transfer RNA (tRNA) half
gtagtgtagtggttatcacgttcgcc

SEQ ID NO: 4132 - DNA, 20 bp, Artificial Sequence
  synthetic circulating small noncoding RNA (sncRNA) 5' transfer RNA (tRNA) half
tcgactcctggctggctcgt

SEQ ID NO: 4133 - DNA, 13 bp, Artificial Sequence
  synthetic circulating small noncoding RNA (sncRNA) 5' transfer RNA (tRNA) half
gaggtccccggtt

SEQ ID NO: 4134 - DNA, 20 bp, Artificial Sequence
  synthetic circulating small noncoding RNA (sncRNA) 5' transfer RNA (tRNA) half
cgggccgcggcggtgagagc

SEQ ID NO: 4135 - DNA, 29 bp, Artificial Sequence
  synthetic circulating small noncoding RNA (sncRNA) 5' transfer RNA (tRNA) half
catatggtctagcggttaggattcctggt

SEQ ID NO: 4136 - DNA, 16 bp, Artificial Sequence
  synthetic circulating small noncoding RNA (sncRNA) 5' transfer RNA (tRNA) half
tggagggggcacccgg

SEQ ID NO: 4137 - DNA, 38 bp, Artificial Sequence
  synthetic circulating small noncoding RNA (sncRNA) 5' transfer RNA (tRNA) half
attcttgcgacccgggttcgattcccgggcggcgcatg

SEQ ID NO: 4138 - DNA, 20 bp, Artificial Sequence
  synthetic circulating small noncoding RNA (sncRNA) 5' transfer RNA (tRNA) half
gattcagagtccagagtgct

SEQ ID NO: 4139 - DNA, 27 bp, Artificial Sequence
  synthetic circulating small noncoding RNA (sncRNA) 5' transfer RNA (tRNA) half
ggctccatagctcaggggttagagcac

SEQ ID NO: 4140 - DNA, 28 bp, Artificial Sequence
  synthetic circulating small noncoding RNA (sncRNA) 5' transfer RNA (tRNA) half
catgggtggttcagtggtagaattctcg

SEQ ID NO: 4141 - DNA, 16 bp, Artificial Sequence
  synthetic circulating small noncoding RNA (sncRNA) 5' transfer RNA (tRNA) half
actacactacggaaac

SEQ ID NO: 4142 - DNA, 19 bp, Artificial Sequence
  synthetic circulating small noncoding RNA (sncRNA) 5' transfer RNA (tRNA) half
aggttccaccgagatttga

SEQ ID NO: 4143 - DNA, 22 bp, Artificial Sequence
  synthetic circulating small noncoding RNA (sncRNA) 5' transfer RNA (tRNA) half
gagccagccaggagtcgaacct

SEQ ID NO: 4144 - DNA, 14 bp, Artificial Sequence
  synthetic circulating small noncoding RNA (sncRNA) 5' transfer RNA (tRNA) half
accggggacctctt

SEQ ID NO: 4145 - DNA, 28 bp, Artificial Sequence
  synthetic circulating small noncoding RNA (sncRNA) 5' transfer RNA (tRNA) half
aacgtgataaccactacactacggaaac

SEQ ID NO: 4146 - DNA, 29 bp, Artificial Sequence
  synthetic circulating small noncoding RNA (sncRNA) 5' transfer RNA (tRNA) half
cccataccgggagtcgaacccgggccgcc

SEQ ID NO: 4147 - DNA, 35 bp, Artificial Sequence
  synthetic circulating small noncoding RNA (sncRNA) 5' transfer RNA (tRNA) half
ggcgtccctgggtgggctcgaaccaccaacctttc

SEQ ID NO: 4148 - DNA, 33 bp, Artificial Sequence
  synthetic circulating small noncoding RNA (sncRNA) 5' transfer RNA (tRNA) half
ctgttcccataccgggagtcgaacccgggccgc

SEQ ID NO: 4149 - DNA, 20 bp, Artificial Sequence
  synthetic circulating small noncoding RNA (sncRNA) 5' transfer RNA (tRNA) half
gatggagggggcacccggat

SEQ ID NO: 4150 - DNA, 28 bp, Artificial Sequence
  synthetic circulating small noncoding RNA (sncRNA) 5' transfer RNA (tRNA) half
atatggtctagcggttaggattcctggt

SEQ ID NO: 4151 - DNA, 28 bp, Artificial Sequence
  synthetic circulating small noncoding RNA (sncRNA) 5' transfer RNA (tRNA) half
caacgcagagtactaaccactatacgat

SEQ ID NO: 4152 - DNA, 27 bp, Artificial Sequence
  synthetic circulating small noncoding RNA (sncRNA) 5' transfer RNA (tRNA) half
tagctcagtcggtagagcatcagactt

SEQ ID NO: 4153 - DNA, 16 bp, Artificial Sequence
  synthetic circulating small noncoding RNA (sncRNA) 5' transfer RNA (tRNA) half
atcccatcctcgtcgt

SEQ ID NO: 4154 - DNA, 20 bp, Artificial Sequence
  synthetic circulating small noncoding RNA (sncRNA) 5' transfer RNA (tRNA) half
gcattggccgggaatcgaac

SEQ ID NO: 4155 - DNA, 17 bp, Artificial Sequence
  synthetic circulating small noncoding RNA (sncRNA) 5' transfer RNA (tRNA) half
ccagagtgctaaccatt

SEQ ID NO: 4156 - DNA, 16 bp, Artificial Sequence
  synthetic circulating small noncoding RNA (sncRNA) 5' transfer RNA (tRNA) half
gacaggcggggatact

SEQ ID NO: 4157 - DNA, 16 bp, Artificial Sequence
  synthetic circulating small noncoding RNA (sncRNA) 5' transfer RNA (tRNA) half
ggtagagcatgagact

SEQ ID NO: 4158 - DNA, 13 bp, Artificial Sequence
  synthetic circulating small noncoding RNA (sncRNA) 5' transfer RNA (tRNA) half
gcgtgctgggccc

SEQ ID NO: 4159 - DNA, 14 bp, Artificial Sequence
  synthetic circulating small noncoding RNA (sncRNA) 5' transfer RNA (tRNA) half
aagcgtgctgggcc

SEQ ID NO: 4160 - DNA, 43 bp, Artificial Sequence
  synthetic circulating small noncoding RNA (sncRNA) 5' transfer RNA (tRNA) half
ctccagtctcttcgggggcgtgggttcgaatcccaccgctgcc

SEQ ID NO: 4161 - DNA, 17 bp, Artificial Sequence
  synthetic circulating small noncoding RNA (sncRNA) 5' transfer RNA (tRNA) half
cctgaccgggaatcgaa

SEQ ID NO: 4162 - DNA, 17 bp, Artificial Sequence
  synthetic circulating small noncoding RNA (sncRNA) 5' transfer RNA (tRNA) half
aggggtatgattctcgc

SEQ ID NO: 4163 - DNA, 12 bp, Artificial Sequence
  synthetic circulating small noncoding RNA (sncRNA) 5' transfer RNA (tRNA) half
ggttaacagccg

SEQ ID NO: 4164 - DNA, 29 bp, Artificial Sequence
  synthetic circulating small noncoding RNA (sncRNA) 5' transfer RNA (tRNA) half
cgctggttcgattccggctcgaaggactt

SEQ ID NO: 4165 - DNA, 34 bp, Artificial Sequence
  synthetic circulating small noncoding RNA (sncRNA) 5' transfer RNA (tRNA) half
ggctgggggatgtagctcagtggtagagcgcgcg

SEQ ID NO: 4166 - DNA, 32 bp, Artificial Sequence
  synthetic circulating small noncoding RNA (sncRNA) 5' transfer RNA (tRNA) half
tggattcagagtccagagtgctaaccattaca

SEQ ID NO: 4167 - DNA, 27 bp, Artificial Sequence
  synthetic circulating small noncoding RNA (sncRNA) 5' transfer RNA (tRNA) half
ggtagaattctcgcctgccacgcggga

SEQ ID NO: 4168 - DNA, 14 bp, Artificial Sequence
  synthetic circulating small noncoding RNA (sncRNA) 5' transfer RNA (tRNA) half
gaacccacgaccct

SEQ ID NO: 4169 - DNA, 16 bp, Artificial Sequence
  synthetic circulating small noncoding RNA (sncRNA) 5' transfer RNA (tRNA) half
gaacacgcagccttct

SEQ ID NO: 4170 - DNA, 43 bp, Artificial Sequence
  synthetic circulating small noncoding RNA (sncRNA) 5' transfer RNA (tRNA) half
ttcgcgtgttaggcgaatgtgataaccactacactacggaaac

SEQ ID NO: 4171 - DNA, 16 bp, Artificial Sequence
  synthetic circulating small noncoding RNA (sncRNA) 5' transfer RNA (tRNA) half
tggtggagatgccggg

SEQ ID NO: 4172 - DNA, 31 bp, Artificial Sequence
  synthetic circulating small noncoding RNA (sncRNA) 5' transfer RNA (tRNA) half
gagaggtcccgggttcaaatcccggacgagc

SEQ ID NO: 4173 - DNA, 13 bp, Artificial Sequence
  synthetic circulating small noncoding RNA (sncRNA) 5' transfer RNA (tRNA) half
acgcccccgaaga

SEQ ID NO: 4174 - DNA, 28 bp, Artificial Sequence
  synthetic circulating small noncoding RNA (sncRNA) 5' transfer RNA (tRNA) half
actcggatcgctggattcagagtccaga

SEQ ID NO: 4175 - DNA, 32 bp, Artificial Sequence
  synthetic circulating small noncoding RNA (sncRNA) 5' transfer RNA (tRNA) half
aggccccagcgagatttgaactcgcgacccct

SEQ ID NO: 4176 - DNA, 18 bp, Artificial Sequence
  synthetic circulating small noncoding RNA (sncRNA) 5' transfer RNA (tRNA) half
gtttccgcccggtttcga

SEQ ID NO: 4177 - DNA, 10 bp, Artificial Sequence
  synthetic circulating small noncoding RNA (sncRNA) 5' transfer RNA (tRNA) half
ccccggttcg

SEQ ID NO: 4178 - DNA, 23 bp, Artificial Sequence
  synthetic circulating small noncoding RNA (sncRNA) 5' transfer RNA (tRNA) half
gggttcgactcccggtatgggaa

SEQ ID NO: 4179 - DNA, 20 bp, Artificial Sequence
  synthetic circulating small noncoding RNA (sncRNA) 5' transfer RNA (tRNA) half
gagtactaaccactatacga

SEQ ID NO: 4180 - DNA, 19 bp, Artificial Sequence
  synthetic circulating small noncoding RNA (sncRNA) 5' transfer RNA (tRNA) half
agtcaaatgctctaccact

SEQ ID NO: 4181 - DNA, 15 bp, Artificial Sequence
  synthetic circulating small noncoding RNA (sncRNA) 5' transfer RNA (tRNA) half
accccggtctcccgc

SEQ ID NO: 4182 - DNA, 20 bp, Artificial Sequence
  synthetic circulating small noncoding RNA (sncRNA) 5' transfer RNA (tRNA) half
aaaccaggaatcctaaccgc

SEQ ID NO: 4183 - DNA, 27 bp, Artificial Sequence
  synthetic circulating small noncoding RNA (sncRNA) 5' transfer RNA (tRNA) half
gaccccgacgtgattcgaacacgcagc

SEQ ID NO: 4184 - DNA, 26 bp, Artificial Sequence
  synthetic circulating small noncoding RNA (sncRNA) 5' transfer RNA (tRNA) half
ctgaccgggaatcgaacccgggccgc

SEQ ID NO: 4185 - DNA, 36 bp, Artificial Sequence
  synthetic circulating small noncoding RNA (sncRNA) 5' transfer RNA (tRNA) half
gccgcccgaacagggacttgaaccctggaccctcag

SEQ ID NO: 4186 - DNA, 31 bp, Artificial Sequence
  synthetic circulating small noncoding RNA (sncRNA) 5' transfer RNA (tRNA) half
tcccacaccgggagtcgaacccgggccgcct

SEQ ID NO: 4187 - DNA, 21 bp, Artificial Sequence
  synthetic circulating small noncoding RNA (sncRNA) 5' transfer RNA (tRNA) half
tcgactcccggtgtgggaaca

SEQ ID NO: 4188 - DNA, 36 bp, Artificial Sequence
  synthetic circulating small noncoding RNA (sncRNA) 5' transfer RNA (tRNA) half
ttcccacaccgggagtcgaacccgggccgcctgggt

SEQ ID NO: 4189 - DNA, 23 bp, Artificial Sequence
  synthetic circulating small noncoding RNA (sncRNA) 5' transfer RNA (tRNA) half
ctcagtggtctggggtgcaggct

SEQ ID NO: 4190 - DNA, 33 bp, Artificial Sequence
  synthetic circulating small noncoding RNA (sncRNA) 5' transfer RNA (tRNA) half
ccgggcctcccgcgtggcaggcgagaattctac

SEQ ID NO: 4191 - DNA, 34 bp, Artificial Sequence
  synthetic circulating small noncoding RNA (sncRNA) 5' transfer RNA (tRNA) half
gcaccgctgggattcgaacccaggatctcctgtt

SEQ ID NO: 4192 - DNA, 13 bp, Artificial Sequence
  synthetic circulating small noncoding RNA (sncRNA) 5' transfer RNA (tRNA) half
ggcccgtacgggg

SEQ ID NO: 4193 - DNA, 12 bp, Artificial Sequence
  synthetic circulating small noncoding RNA (sncRNA) 5' transfer RNA (tRNA) half
cgattccccgac

SEQ ID NO: 4194 - DNA, 24 bp, Artificial Sequence
  synthetic circulating small noncoding RNA (sncRNA) 5' transfer RNA (tRNA) half
acgggccaaagctgaagcgttttt

SEQ ID NO: 4195 - DNA, 13 bp, Artificial Sequence
  synthetic circulating small noncoding RNA (sncRNA) 5' transfer RNA (tRNA) half
aaccccggtctcc

SEQ ID NO: 4196 - DNA, 17 bp, Artificial Sequence
  synthetic circulating small noncoding RNA (sncRNA) 5' transfer RNA (tRNA) half
aaacccgggcctcccgc

SEQ ID NO: 4197 - DNA, 25 bp, Artificial Sequence
  synthetic circulating small noncoding RNA (sncRNA) 5' transfer RNA (tRNA) half
gtggcgcagcggaagcgtgctgggc

SEQ ID NO: 4198 - DNA, 25 bp, Artificial Sequence
  synthetic circulating small noncoding RNA (sncRNA) 5' transfer RNA (tRNA) half
ttggtggttcagtggtagaattctc

SEQ ID NO: 4199 - DNA, 20 bp, Artificial Sequence
  synthetic circulating small noncoding RNA (sncRNA) 5' transfer RNA (tRNA) half
gttcgactcccggtgtggga

SEQ ID NO: 4200 - DNA, 18 bp, Artificial Sequence
  synthetic circulating small noncoding RNA (sncRNA) 5' transfer RNA (tRNA) half
gtaatggttagcactctg

SEQ ID NO: 4201 - DNA, 24 bp, Artificial Sequence
  synthetic circulating small noncoding RNA (sncRNA) 5' transfer RNA (tRNA) half
gcttccctgaccgggaatcgaacc

SEQ ID NO: 4202 - DNA, 25 bp, Artificial Sequence
  synthetic circulating small noncoding RNA (sncRNA) 5' transfer RNA (tRNA) half
gaacccgggtcaactgcttggaagg

SEQ ID NO: 4203 - DNA, 12 bp, Artificial Sequence
  synthetic circulating small noncoding RNA (sncRNA) 5' transfer RNA (tRNA) half
cactacggaaac

SEQ ID NO: 4204 - DNA, 13 bp, Artificial Sequence
  synthetic circulating small noncoding RNA (sncRNA) 5' transfer RNA (tRNA) half
actccgccgggac

SEQ ID NO: 4205 - DNA, 34 bp, Artificial Sequence
  synthetic circulating small noncoding RNA (sncRNA) 5' transfer RNA (tRNA) half
tgcattggccgggaatcgaacccgggcctcccgc

SEQ ID NO: 4206 - DNA, 27 bp, Artificial Sequence
  synthetic circulating small noncoding RNA (sncRNA) 5' transfer RNA (tRNA) half
ggggatgtagctcagcggtagagcaca

SEQ ID NO: 4207 - DNA, 20 bp, Artificial Sequence
  synthetic circulating small noncoding RNA (sncRNA) 5' transfer RNA (tRNA) half
caggattcgaacctgcgcgg

SEQ ID NO: 4208 - DNA, 22 bp, Artificial Sequence
  synthetic circulating small noncoding RNA (sncRNA) 5' transfer RNA (tRNA) half
tcccacatggtctagcggttag

SEQ ID NO: 4209 - DNA, 13 bp, Artificial Sequence
  synthetic circulating small noncoding RNA (sncRNA) 5' transfer RNA (tRNA) half
gctcgtccgggat

SEQ ID NO: 4210 - DNA, 13 bp, Artificial Sequence
  synthetic circulating small noncoding RNA (sncRNA) 5' transfer RNA (tRNA) half
gagtcgaacccgg

SEQ ID NO: 4211 - DNA, 19 bp, Artificial Sequence
  synthetic circulating small noncoding RNA (sncRNA) 5' transfer RNA (tRNA) half
gggggtgtagctcagtggt

SEQ ID NO: 4212 - DNA, 35 bp, Artificial Sequence
  synthetic circulating small noncoding RNA (sncRNA) 5' transfer RNA (tRNA) half
tcgagccagccaggagtcgaacctagaatcttctg

SEQ ID NO: 4213 - DNA, 21 bp, Artificial Sequence
  synthetic circulating small noncoding RNA (sncRNA) 5' transfer RNA (tRNA) half
gagaattctaccactgaacca

SEQ ID NO: 4214 - DNA, 12 bp, Artificial Sequence
  synthetic circulating small noncoding RNA (sncRNA) 5' transfer RNA (tRNA) half
ctcttcgggggc

SEQ ID NO: 4215 - DNA, 25 bp, Artificial Sequence
  synthetic circulating small noncoding RNA (sncRNA) 5' transfer RNA (tRNA) half
gtactaaccactatacgatcacggc

SEQ ID NO: 4216 - DNA, 13 bp, Artificial Sequence
  synthetic circulating small noncoding RNA (sncRNA) 5' transfer RNA (tRNA) half
ttagaccgctcgg

SEQ ID NO: 4217 - DNA, 23 bp, Artificial Sequence
  synthetic circulating small noncoding RNA (sncRNA) 5' transfer RNA (tRNA) half
tggtagaattctcgcctgccacg

SEQ ID NO: 4218 - DNA, 28 bp, Artificial Sequence
  synthetic circulating small noncoding RNA (sncRNA) 5' transfer RNA (tRNA) half
cggcggtgagagcgccgaatcctaacca

SEQ ID NO: 4219 - DNA, 11 bp, Artificial Sequence
  synthetic circulating small noncoding RNA (sncRNA) 5' transfer RNA (tRNA) half
accggggacct

SEQ ID NO: 4220 - DNA, 12 bp, Artificial Sequence
  synthetic circulating small noncoding RNA (sncRNA) 5' transfer RNA (tRNA) half
gaggtcccgggt

SEQ ID NO: 4221 - DNA, 33 bp, Artificial Sequence
  synthetic circulating small noncoding RNA (sncRNA) 5' transfer RNA (tRNA) half
gactctggtgggattcgaacccacaacctttga

SEQ ID NO: 4222 - DNA, 27 bp, Artificial Sequence
  synthetic circulating small noncoding RNA (sncRNA) 5' transfer RNA (tRNA) half
catgctctaccgactgagctagccggg

SEQ ID NO: 4223 - DNA, 20 bp, Artificial Sequence
  synthetic circulating small noncoding RNA (sncRNA) 5' transfer RNA (tRNA) half
aaccgggcggaaacatatct

SEQ ID NO: 4224 - DNA, 20 bp, Artificial Sequence
  synthetic circulating small noncoding RNA (sncRNA) 5' transfer RNA (tRNA) half
cagtgggtagagcatgagac

SEQ ID NO: 4225 - DNA, 38 bp, Artificial Sequence
  synthetic circulating small noncoding RNA (sncRNA) 5' transfer RNA (tRNA) half
taaacaggagatcctgggttcgaatcccagcggggcct

SEQ ID NO: 4226 - DNA, 14 bp, Artificial Sequence
  synthetic circulating small noncoding RNA (sncRNA) 5' transfer RNA (tRNA) half
cgggaggcccgggt

SEQ ID NO: 4227 - DNA, 15 bp, Artificial Sequence
  synthetic circulating small noncoding RNA (sncRNA) 5' transfer RNA (tRNA) half
tctcatgctctaccg

SEQ ID NO: 4228 - DNA, 12 bp, Artificial Sequence
  synthetic circulating small noncoding RNA (sncRNA) 5' transfer RNA (tRNA) half
gctctaccgact

SEQ ID NO: 4229 - DNA, 11 bp, Artificial Sequence
  synthetic circulating small noncoding RNA (sncRNA) 5' transfer RNA (tRNA) half
gacgaggtggc

SEQ ID NO: 4230 - DNA, 14 bp, Artificial Sequence
  synthetic circulating small noncoding RNA (sncRNA) 5' transfer RNA (tRNA) half
atcccacttctgac

SEQ ID NO: 4231 - DNA, 19 bp, Artificial Sequence
  synthetic circulating small noncoding RNA (sncRNA) 5' transfer RNA (tRNA) half
gcggcccgggttcgattcc

SEQ ID NO: 4232 - DNA, 25 bp, Artificial Sequence
  synthetic circulating small noncoding RNA (sncRNA) 5' transfer RNA (tRNA) half
caacgcagagtactaaccactatac

SEQ ID NO: 4233 - DNA, 22 bp, Artificial Sequence
  synthetic circulating small noncoding RNA (sncRNA) 5' transfer RNA (tRNA) half
accgggaatcgaacccgggccg

SEQ ID NO: 4234 - DNA, 13 bp, Artificial Sequence
  synthetic circulating small noncoding RNA (sncRNA) 5' transfer RNA (tRNA) half
gacgaggatggga

SEQ ID NO: 4235 - DNA, 31 bp, Artificial Sequence
  synthetic circulating small noncoding RNA (sncRNA) 5' transfer RNA (tRNA) half
tctccccgtcggggaatcgaaccccggtctc

SEQ ID NO: 4236 - DNA, 39 bp, Artificial Sequence
  synthetic circulating small noncoding RNA (sncRNA) 5' transfer RNA (tRNA) half
cgtccctgggtgggctcgaaccaccaacctttcggttaa

SEQ ID NO: 4237 - DNA, 23 bp, Artificial Sequence
  synthetic circulating small noncoding RNA (sncRNA) 5' transfer RNA (tRNA) half
gcggcccgggttcgactcccggt

SEQ ID NO: 4238 - DNA, 12 bp, Artificial Sequence
  synthetic circulating small noncoding RNA (sncRNA) 5' transfer RNA (tRNA) half
cgagtcacggca

SEQ ID NO: 4239 - DNA, 24 bp, Artificial Sequence
  synthetic circulating small noncoding RNA (sncRNA) 5' transfer RNA (tRNA) half
ggacttgaaccctggaccctcaga

SEQ ID NO: 4240 - DNA, 32 bp, Artificial Sequence
  synthetic circulating small noncoding RNA (sncRNA) 5' transfer RNA (tRNA) half
cgtgactcggattcgaaccgaggttgctgcgg

SEQ ID NO: 4241 - DNA, 36 bp, Artificial Sequence
  synthetic circulating small noncoding RNA (sncRNA) 5' transfer RNA (tRNA) half
gcgggagaccggggttcgattccccgacggggagtc

SEQ ID NO: 4242 - DNA, 21 bp, Artificial Sequence
  synthetic circulating small noncoding RNA (sncRNA) 5' transfer RNA (tRNA) half
gcagtcaaatgctctaccact

SEQ ID NO: 4243 - DNA, 12 bp, Artificial Sequence
  synthetic circulating small noncoding RNA (sncRNA) 5' transfer RNA (tRNA) half
accccgacgtga

SEQ ID NO: 4244 - DNA, 17 bp, Artificial Sequence
  synthetic circulating small noncoding RNA (sncRNA) 5' transfer RNA (tRNA) half
caggcggggatactaac

SEQ ID NO: 4245 - DNA, 36 bp, Artificial Sequence
  synthetic circulating small noncoding RNA (sncRNA) 5' transfer RNA (tRNA) half
aaggcaccgctgggattcgaacccaggatctcctgt

SEQ ID NO: 4246 - DNA, 32 bp, Artificial Sequence
  synthetic circulating small noncoding RNA (sncRNA) 5' transfer RNA (tRNA) half
cgagaggtcccgggttcaaatcccggacgagc

SEQ ID NO: 4247 - DNA, 19 bp, Artificial Sequence
  synthetic circulating small noncoding RNA (sncRNA) 5' transfer RNA (tRNA) half
gggccagtggcgcaatgga

SEQ ID NO: 4248 - DNA, 30 bp, Artificial Sequence
  synthetic circulating small noncoding RNA (sncRNA) 5' transfer RNA (tRNA) half
gagattaagagtctcatgctctaccgactg

SEQ ID NO: 4249 - DNA, 13 bp, Artificial Sequence
  synthetic circulating small noncoding RNA (sncRNA) 5' transfer RNA (tRNA) half
ctcccgcgtgaca

SEQ ID NO: 4250 - DNA, 15 bp, Artificial Sequence
  synthetic circulating small noncoding RNA (sncRNA) 5' transfer RNA (tRNA) half
ctagaccatatggga

SEQ ID NO: 4251 - DNA, 18 bp, Artificial Sequence
  synthetic circulating small noncoding RNA (sncRNA) 5' transfer RNA (tRNA) half
ccactgagctacatcccc

SEQ ID NO: 4252 - DNA, 41 bp, Artificial Sequence
  synthetic circulating small noncoding RNA (sncRNA) 5' transfer RNA (tRNA) half
ttgccccctctgaggttcgaactcaggaccttcagattatg

SEQ ID NO: 4253 - DNA, 18 bp, Artificial Sequence
  synthetic circulating small noncoding RNA (sncRNA) 5' transfer RNA (tRNA) half
ggcaggcgagaattctac

SEQ ID NO: 4254 - DNA, 16 bp, Artificial Sequence
  synthetic circulating small noncoding RNA (sncRNA) 5' transfer RNA (tRNA) half
ccgagcggtctaaggc

SEQ ID NO: 4255 - DNA, 8 bp, Artificial Sequence
  synthetic circulating small noncoding RNA (sncRNA) 5' transfer RNA (tRNA) half
gcgccgaa

SEQ ID NO: 4256 - DNA, 19 bp, Artificial Sequence
  synthetic circulating small noncoding RNA (sncRNA) 5' transfer RNA (tRNA) half
gttcgactcccggtatggg

SEQ ID NO: 4257 - DNA, 27 bp, Artificial Sequence
  synthetic circulating small noncoding RNA (sncRNA) 5' transfer RNA (tRNA) half
aatgctctacccctgagctataccccc

SEQ ID NO: 4258 - DNA, 38 bp, Artificial Sequence
  synthetic circulating small noncoding RNA (sncRNA) 5' transfer RNA (tRNA) half
ggccccagcgagatttgaactcgcgacccctggtttac

SEQ ID NO: 4259 - DNA, 27 bp, Artificial Sequence
  synthetic circulating small noncoding RNA (sncRNA) 5' transfer RNA (tRNA) half
cgtgacaggcggggatactcaccacta

SEQ ID NO: 4260 - DNA, 36 bp, Artificial Sequence
  synthetic circulating small noncoding RNA (sncRNA) 5' transfer RNA (tRNA) half
tccgagaggtcccgggttcaaatcccggacgagccc

SEQ ID NO: 4261 - DNA, 37 bp, Artificial Sequence
  synthetic circulating small noncoding RNA (sncRNA) 5' transfer RNA (tRNA) half
aacccgggcctcccgcgtggcaggcgagaattctacc

SEQ ID NO: 4262 - DNA, 19 bp, Artificial Sequence
  synthetic circulating small noncoding RNA (sncRNA) 5' transfer RNA (tRNA) half
cttccgcagcgagcagggt

SEQ ID NO: 4263 - DNA, 18 bp, Artificial Sequence
  synthetic circulating small noncoding RNA (sncRNA) 5' transfer RNA (tRNA) half
ccgctagaccatgtggga

SEQ ID NO: 4264 - DNA, 29 bp, Artificial Sequence
  synthetic circulating small noncoding RNA (sncRNA) 5' transfer RNA (tRNA) half
cgccgcggcccgggttcgattcccggtca

SEQ ID NO: 4265 - DNA, 10 bp, Artificial Sequence
  synthetic circulating small noncoding RNA (sncRNA) 5' transfer RNA (tRNA) half
gggcggaaac

SEQ ID NO: 4266 - DNA, 18 bp, Artificial Sequence
  synthetic circulating small noncoding RNA (sncRNA) 5' transfer RNA (tRNA) half
ttcgatccccggcatctc

SEQ ID NO: 4267 - DNA, 15 bp, Artificial Sequence
  synthetic circulating small noncoding RNA (sncRNA) 5' transfer RNA (tRNA) half
gctcggccatcctga

SEQ ID NO: 4268 - DNA, 18 bp, Artificial Sequence
  synthetic circulating small noncoding RNA (sncRNA) 5' transfer RNA (tRNA) half
aggaatcctaaccgctag

SEQ ID NO: 4269 - DNA, 23 bp, Artificial Sequence
  synthetic circulating small noncoding RNA (sncRNA) 5' transfer RNA (tRNA) half
gcttccctgaccgggaatcgaac

SEQ ID NO: 4270 - DNA, 14 bp, Artificial Sequence
  synthetic circulating small noncoding RNA (sncRNA) 5' transfer RNA (tRNA) half
cacccggatttgaa

SEQ ID NO: 4271 - DNA, 32 bp, Artificial Sequence
  synthetic circulating small noncoding RNA (sncRNA) 5' transfer RNA (tRNA) half
aaggttccaccgagatttgaactcggatcgct

SEQ ID NO: 4272 - DNA, 22 bp, Artificial Sequence
  synthetic circulating small noncoding RNA (sncRNA) 5' transfer RNA (tRNA) half
ctagtggttaggattcggcgct

SEQ ID NO: 4273 - DNA, 15 bp, Artificial Sequence
  synthetic circulating small noncoding RNA (sncRNA) 5' transfer RNA (tRNA) half
gactgagctagccgg

SEQ ID NO: 4274 - DNA, 32 bp, Artificial Sequence
  synthetic circulating small noncoding RNA (sncRNA) 5' transfer RNA (tRNA) half
ggccggttagctcagttggttagagcatggtg

SEQ ID NO: 4275 - DNA, 17 bp, Artificial Sequence
  synthetic circulating small noncoding RNA (sncRNA) 5' transfer RNA (tRNA) half
cgctagaccatatggga

SEQ ID NO: 4276 - DNA, 17 bp, Artificial Sequence
  synthetic circulating small noncoding RNA (sncRNA) 5' transfer RNA (tRNA) half
tctaccgactgagctat

SEQ ID NO: 4277 - DNA, 15 bp, Artificial Sequence
  synthetic circulating small noncoding RNA (sncRNA) 5' transfer RNA (tRNA) half
tgccgtgactcggat

SEQ ID NO: 4278 - DNA, 32 bp, Artificial Sequence
  synthetic circulating small noncoding RNA (sncRNA) 5' transfer RNA (tRNA) half
agtcagacgcgctaccgttgcgccacgaggcc

SEQ ID NO: 4279 - DNA, 18 bp, Artificial Sequence
  synthetic circulating small noncoding RNA (sncRNA) 5' transfer RNA (tRNA) half
tcccataccgggagtcga

SEQ ID NO: 4280 - DNA, 34 bp, Artificial Sequence
  synthetic circulating small noncoding RNA (sncRNA) 5' transfer RNA (tRNA) half
gtctccccgtcggggaatcgaaccccggtctccc

SEQ ID NO: 4281 - DNA, 34 bp, Artificial Sequence
  synthetic circulating small noncoding RNA (sncRNA) 5' transfer RNA (tRNA) half
gtttctgtagtgtagtggttatcacgttcgcctc

SEQ ID NO: 4282 - DNA, 23 bp, Artificial Sequence
  synthetic circulating small noncoding RNA (sncRNA) 5' transfer RNA (tRNA) half
gggttcgattcccgggcggcgca

SEQ ID NO: 4283 - DNA, 24 bp, Artificial Sequence
  synthetic circulating small noncoding RNA (sncRNA) 5' transfer RNA (tRNA) half
gtcaggatggccgagcggtctaag

SEQ ID NO: 4284 - DNA, 12 bp, Artificial Sequence
  synthetic circulating small noncoding RNA (sncRNA) 5' transfer RNA (tRNA) half
gatgctctaccg

SEQ ID NO: 4285 - DNA, 22 bp, Artificial Sequence
  synthetic circulating small noncoding RNA (sncRNA) 5' transfer RNA (tRNA) half
cgggttcgattcccggtcaggg

SEQ ID NO: 4286 - DNA, 13 bp, Artificial Sequence
  synthetic circulating small noncoding RNA (sncRNA) 5' transfer RNA (tRNA) half
gtcccatgctcta

SEQ ID NO: 4287 - DNA, 19 bp, Artificial Sequence
  synthetic circulating small noncoding RNA (sncRNA) 5' transfer RNA (tRNA) half
aggcaccgctgggattcga

SEQ ID NO: 4288 - DNA, 19 bp, Artificial Sequence
  synthetic circulating small noncoding RNA (sncRNA) 5' transfer RNA (tRNA) half
accattgaaccaccaatgc

SEQ ID NO: 4289 - DNA, 15 bp, Artificial Sequence
  synthetic circulating small noncoding RNA (sncRNA) 5' transfer RNA (tRNA) half
gccttagaccactcg

SEQ ID NO: 4290 - DNA, 12 bp, Artificial Sequence
  synthetic circulating small noncoding RNA (sncRNA) 5' transfer RNA (tRNA) half
aggattcggcgc

SEQ ID NO: 4291 - DNA, 22 bp, Artificial Sequence
  synthetic circulating small noncoding RNA (sncRNA) 5' transfer RNA (tRNA) half
cagagtactaaccactatacga

SEQ ID NO: 4292 - DNA, 18 bp, Artificial Sequence
  synthetic circulating small noncoding RNA (sncRNA) 5' transfer RNA (tRNA) half
atcctgccgactacgtct

SEQ ID NO: 4293 - DNA, 28 bp, Artificial Sequence
  synthetic circulating small noncoding RNA (sncRNA) 5' transfer RNA (tRNA) half
tggttcagtggtagaattctcgcctgcc

SEQ ID NO: 4294 - DNA, 16 bp, Artificial Sequence
  synthetic circulating small noncoding RNA (sncRNA) 5' transfer RNA (tRNA) half
atcccggacgagcccc

SEQ ID NO: 4295 - DNA, 33 bp, Artificial Sequence
  synthetic circulating small noncoding RNA (sncRNA) 5' transfer RNA (tRNA) half
actctggtgggactcgaacccacaacctttgaa

SEQ ID NO: 4296 - DNA, 23 bp, Artificial Sequence
  synthetic circulating small noncoding RNA (sncRNA) 5' transfer RNA (tRNA) half
tatagtggttagtactctgcgtt

SEQ ID NO: 4297 - DNA, 38 bp, Artificial Sequence
  synthetic circulating small noncoding RNA (sncRNA) 5' transfer RNA (tRNA) half
gtaaaccaggggtcgcgagttcaaatctcgctggggcc

SEQ ID NO: 4298 - DNA, 37 bp, Artificial Sequence
  synthetic circulating small noncoding RNA (sncRNA) 5' transfer RNA (tRNA) half
agatcagaaggttgcgtgttcaaatcacgtcggggtc

SEQ ID NO: 4299 - DNA, 29 bp, Artificial Sequence
  synthetic circulating small noncoding RNA (sncRNA) 5' transfer RNA (tRNA) half
ctcggatcgctggattcagagtccagagt

SEQ ID NO: 4300 - DNA, 15 bp, Artificial Sequence
  synthetic circulating small noncoding RNA (sncRNA) 5' transfer RNA (tRNA) half
atgaccccgacgtga

SEQ ID NO: 4301 - DNA, 22 bp, Artificial Sequence
  synthetic circulating small noncoding RNA (sncRNA) 5' transfer RNA (tRNA) half
ggtgagagcgccgaatcctaac

SEQ ID NO: 4302 - DNA, 35 bp, Artificial Sequence
  synthetic circulating small noncoding RNA (sncRNA) 5' transfer RNA (tRNA) half
ccgagccagccaggagtcgaacctggaatcttctg

SEQ ID NO: 4303 - DNA, 30 bp, Artificial Sequence
  synthetic circulating small noncoding RNA (sncRNA) 5' transfer RNA (tRNA) half
atggaggcgtgggttcgaatcccacttctg

SEQ ID NO: 4304 - DNA, 38 bp, Artificial Sequence
  synthetic circulating small noncoding RNA (sncRNA) 5' transfer RNA (tRNA) half
ataacgccaaggtcgcgggttcgatccccgtacgggcc

SEQ ID NO: 4305 - DNA, 28 bp, Artificial Sequence
  synthetic circulating small noncoding RNA (sncRNA) 5' transfer RNA (tRNA) half
gagaattctaccattgaactaccaatgc

SEQ ID NO: 4306 - DNA, 19 bp, Artificial Sequence
  synthetic circulating small noncoding RNA (sncRNA) 5' transfer RNA (tRNA) half
gataaccactacactacgg

SEQ ID NO: 4307 - DNA, 34 bp, Artificial Sequence
  synthetic circulating small noncoding RNA (sncRNA) 5' transfer RNA (tRNA) half
tctgaatccagcgatccgagttcaaatctcggtg

SEQ ID NO: 4308 - DNA, 32 bp, Artificial Sequence
  synthetic circulating small noncoding RNA (sncRNA) 5' transfer RNA (tRNA) half
ggcggcccgggttcgactcccggtgtgggaac

SEQ ID NO: 4309 - DNA, 33 bp, Artificial Sequence
  synthetic circulating small noncoding RNA (sncRNA) 5' transfer RNA (tRNA) half
agtgcattggccgggaatcgaacccgggcctcc

SEQ ID NO: 4310 - DNA, 32 bp, Artificial Sequence
  synthetic circulating small noncoding RNA (sncRNA) 5' transfer RNA (tRNA) half
gcccaacgtggggctcgaacccacgaccctga

SEQ ID NO: 4311 - DNA, 35 bp, Artificial Sequence
  synthetic circulating small noncoding RNA (sncRNA) 5' transfer RNA (tRNA) half
cttgaccccgacgtgacttgaacacgcaaccttct

SEQ ID NO: 4312 - DNA, 33 bp, Artificial Sequence
  synthetic circulating small noncoding RNA (sncRNA) 5' transfer RNA (tRNA) half
tcagaagattgagggttcgagtcccttcgtggt

SEQ ID NO: 4313 - DNA, 30 bp, Artificial Sequence
  synthetic circulating small noncoding RNA (sncRNA) 5' transfer RNA (tRNA) half
aaggtcctgggttcgagccccagtggaacc

SEQ ID NO: 4314 - DNA, 35 bp, Artificial Sequence
  synthetic circulating small noncoding RNA (sncRNA) 5' transfer RNA (tRNA) half
gaagattgcaggttcgagtcctgccgcggtcgact

SEQ ID NO: 4315 - DNA, 34 bp, Artificial Sequence
  synthetic circulating small noncoding RNA (sncRNA) 5' transfer RNA (tRNA) half
agaagattgagggttcgagtcccttcgtggtcga

SEQ ID NO: 4316 - DNA, 21 bp, Artificial Sequence
  synthetic circulating small noncoding RNA (sncRNA) 5' transfer RNA (tRNA) half
tggtggagatgccggggatcg

SEQ ID NO: 4317 - DNA, 35 bp, Artificial Sequence
  synthetic circulating small noncoding RNA (sncRNA) 5' transfer RNA (tRNA) half
acccacgaccctgagattaagagtctcatgctcta

SEQ ID NO: 4318 - DNA, 20 bp, Artificial Sequence
  synthetic circulating small noncoding RNA (sncRNA) 5' transfer RNA (tRNA) half
caccgccgcggcccgggttc

SEQ ID NO: 4319 - DNA, 19 bp, Artificial Sequence
  synthetic circulating small noncoding RNA (sncRNA) 5' transfer RNA (tRNA) half
gggtcaactgcttggaagg

SEQ ID NO: 4320 - DNA, 30 bp, Artificial Sequence
  synthetic circulating small noncoding RNA (sncRNA) 5' transfer RNA (tRNA) half
gttcccataccgggagtcgaacccgggccg

SEQ ID NO: 4321 - DNA, 11 bp, Artificial Sequence
  synthetic circulating small noncoding RNA (sncRNA) 5' transfer RNA (tRNA) half
gcgcccaacgt

SEQ ID NO: 4322 - DNA, 32 bp, Artificial Sequence
  synthetic circulating small noncoding RNA (sncRNA) 5' transfer RNA (tRNA) half
gcgcccgaacagggacttgaaccctggaccct

SEQ ID NO: 4323 - DNA, 14 bp, Artificial Sequence
  synthetic circulating small noncoding RNA (sncRNA) 5' transfer RNA (tRNA) half
aggagtcgaacctg

SEQ ID NO: 4324 - DNA, 30 bp, Artificial Sequence
  synthetic circulating small noncoding RNA (sncRNA) 5' transfer RNA (tRNA) half
gctccaggtgaggctcgaactcacaacctc

SEQ ID NO: 4325 - DNA, 10 bp, Artificial Sequence
  synthetic circulating small noncoding RNA (sncRNA) 5' transfer RNA (tRNA) half
gtttccgtag

SEQ ID NO: 4326 - DNA, 29 bp, Artificial Sequence
  synthetic circulating small noncoding RNA (sncRNA) 5' transfer RNA (tRNA) half
gcggcccgggttcgactcccggtgtggga

SEQ ID NO: 4327 - DNA, 10 bp, Artificial Sequence
  synthetic circulating small noncoding RNA (sncRNA) 5' transfer RNA (tRNA) half
gtcgaacccg

SEQ ID NO: 4328 - DNA, 21 bp, Artificial Sequence
  synthetic circulating small noncoding RNA (sncRNA) 5' transfer RNA (tRNA) half
gcagcggaagcgtgctgggcc

SEQ ID NO: 4329 - DNA, 17 bp, Artificial Sequence
  synthetic circulating small noncoding RNA (sncRNA) 5' transfer RNA (tRNA) half
gccgcggcggtgagagc

SEQ ID NO: 4330 - DNA, 39 bp, Artificial Sequence
  synthetic circulating small noncoding RNA (sncRNA) 5' transfer RNA (tRNA) half
aggcaccgctgggattcgaacccaggatctcctgtttac

SEQ ID NO: 4331 - DNA, 29 bp, Artificial Sequence
  synthetic circulating small noncoding RNA (sncRNA) 5' transfer RNA (tRNA) half
gcgatccgagttcaaatctcggtgggacc

SEQ ID NO: 4332 - DNA, 21 bp, Artificial Sequence
  synthetic circulating small noncoding RNA (sncRNA) 5' transfer RNA (tRNA) half
ggttcgactcccggtgtggga

SEQ ID NO: 4333 - DNA, 20 bp, Artificial Sequence
  synthetic circulating small noncoding RNA (sncRNA) 5' transfer RNA (tRNA) half
atccgttaggccacgtggtc

SEQ ID NO: 4334 - DNA, 37 bp, Artificial Sequence
  synthetic circulating small noncoding RNA (sncRNA) 5' transfer RNA (tRNA) half
aaaggcaccgctgggattcgaacccaggatctcctgt

SEQ ID NO: 4335 - DNA, 23 bp, Artificial Sequence
  synthetic circulating small noncoding RNA (sncRNA) 5' transfer RNA (tRNA) half
cgggttcgattcccggtcaggga

SEQ ID NO: 4336 - DNA, 21 bp, Artificial Sequence
  synthetic circulating small noncoding RNA (sncRNA) 5' transfer RNA (tRNA) half
taaccactcggccatcctggt

SEQ ID NO: 4337 - DNA, 23 bp, Artificial Sequence
  synthetic circulating small noncoding RNA (sncRNA) 5' transfer RNA (tRNA) half
tcgaatccgagtcacggcattat

SEQ ID NO: 4338 - DNA, 26 bp, Artificial Sequence
  synthetic circulating small noncoding RNA (sncRNA) 5' transfer RNA (tRNA) half
atgggtggttcagtggtagaattctc

SEQ ID NO: 4339 - DNA, 20 bp, Artificial Sequence
  synthetic circulating small noncoding RNA (sncRNA) 5' transfer RNA (tRNA) half
gctcgtccgggatttgaacc

SEQ ID NO: 4340 - DNA, 13 bp, Artificial Sequence
  synthetic circulating small noncoding RNA (sncRNA) 5' transfer RNA (tRNA) half
cggggaatcgaac

SEQ ID NO: 4341 - DNA, 19 bp, Artificial Sequence
  synthetic circulating small noncoding RNA (sncRNA) 5' transfer RNA (tRNA) half
gctcgtccgggatttgaac

SEQ ID NO: 4342 - DNA, 18 bp, Artificial Sequence
  synthetic circulating small noncoding RNA (sncRNA) 5' transfer RNA (tRNA) half
tcgaaaccatcctctgct

SEQ ID NO: 4343 - DNA, 31 bp, Artificial Sequence
  synthetic circulating small noncoding RNA (sncRNA) 5' transfer RNA (tRNA) half
aggtcctgggttcgagccccagtggaaccac

SEQ ID NO: 4344 - DNA, 14 bp, Artificial Sequence
  synthetic circulating small noncoding RNA (sncRNA) 5' transfer RNA (tRNA) half
ggcaggcgagaatt

SEQ ID NO: 4345 - DNA, 15 bp, Artificial Sequence
  synthetic circulating small noncoding RNA (sncRNA) 5' transfer RNA (tRNA) half
gcgagaggtccccgg

SEQ ID NO: 4346 - DNA, 37 bp, Artificial Sequence
  synthetic circulating small noncoding RNA (sncRNA) 5' transfer RNA (tRNA) half
cgtgtttccgcccggtttcgaaccggggacctttcgc

SEQ ID NO: 4347 - DNA, 28 bp, Artificial Sequence
  synthetic circulating small noncoding RNA (sncRNA) 5' transfer RNA (tRNA) half
gcgtgacaggcggggatactcaccacta

SEQ ID NO: 4348 - DNA, 30 bp, Artificial Sequence
  synthetic circulating small noncoding RNA (sncRNA) 5' transfer RNA (tRNA) half
acccgggccgcggcggtgagagcgccgaat

SEQ ID NO: 4349 - DNA, 12 bp, Artificial Sequence
  synthetic circulating small noncoding RNA (sncRNA) 5' transfer RNA (tRNA) half
tcgaaccgggga

SEQ ID NO: 4350 - DNA, 37 bp, Artificial Sequence
  synthetic circulating small noncoding RNA (sncRNA) 5' transfer RNA (tRNA) half
tacctccccgtcggggaatcgaaccccggtctcccgc

SEQ ID NO: 4351 - DNA, 30 bp, Artificial Sequence
  synthetic circulating small noncoding RNA (sncRNA) 5' transfer RNA (tRNA) half
gggcctcccgcgtggcaggcgagaattcta

SEQ ID NO: 4352 - DNA, 18 bp, Artificial Sequence
  synthetic circulating small noncoding RNA (sncRNA) 5' transfer RNA (tRNA) half
cggttatcacgtctgctt

SEQ ID NO: 4353 - DNA, 33 bp, Artificial Sequence
  synthetic circulating small noncoding RNA (sncRNA) 5' transfer RNA (tRNA) half
cgaaaggtccccggttcgaaaccgggcggaaac

SEQ ID NO: 4354 - DNA, 21 bp, Artificial Sequence
  synthetic circulating small noncoding RNA (sncRNA) 5' transfer RNA (tRNA) half
aaggtccccggttcgaaaccg

SEQ ID NO: 4355 - DNA, 19 bp, Artificial Sequence
  synthetic circulating small noncoding RNA (sncRNA) 5' transfer RNA (tRNA) half
gcggcccgggttcgactcc

SEQ ID NO: 4356 - DNA, 29 bp, Artificial Sequence
  synthetic circulating small noncoding RNA (sncRNA) 5' transfer RNA (tRNA) half
tccctgaccgggaatcgaacccgggccgc

SEQ ID NO: 4357 - DNA, 10 bp, Artificial Sequence
  synthetic circulating small noncoding RNA (sncRNA) 5' transfer RNA (tRNA) half
gtttccgccc

SEQ ID NO: 4358 - DNA, 37 bp, Artificial Sequence
  synthetic circulating small noncoding RNA (sncRNA) 5' transfer RNA (tRNA) half
gccctctctgaggttcgaactcaggaccttcagatta

SEQ ID NO: 4359 - DNA, 14 bp, Artificial Sequence
  synthetic circulating small noncoding RNA (sncRNA) 5' transfer RNA (tRNA) half
atctcgctggggcc

SEQ ID NO: 4360 - DNA, 34 bp, Artificial Sequence
  synthetic circulating small noncoding RNA (sncRNA) 5' transfer RNA (tRNA) half
aacgcagagtactaaccactatacgatcacggcg

SEQ ID NO: 4361 - DNA, 14 bp, Artificial Sequence
  synthetic circulating small noncoding RNA (sncRNA) 5' transfer RNA (tRNA) half
tgagctaaccggcc

SEQ ID NO: 4362 - DNA, 42 bp, Artificial Sequence
  synthetic circulating small noncoding RNA (sncRNA) 5' transfer RNA (tRNA) half
tgccgtccctgggtgggctcgaaccaccaacctttcggttaa

SEQ ID NO: 4363 - DNA, 23 bp, Artificial Sequence
  synthetic circulating small noncoding RNA (sncRNA) 5' transfer RNA (tRNA) half
ccggatagctcagtcggtagagc

SEQ ID NO: 4364 - DNA, 16 bp, Artificial Sequence
  synthetic circulating small noncoding RNA (sncRNA) 5' transfer RNA (tRNA) half
actatacgatcacggc

SEQ ID NO: 4365 - DNA, 36 bp, Artificial Sequence
  synthetic circulating small noncoding RNA (sncRNA) 5' transfer RNA (tRNA) half
cgcccgaacagggacttgaaccctggaccctcagat

SEQ ID NO: 4366 - DNA, 21 bp, Artificial Sequence
  synthetic circulating small noncoding RNA (sncRNA) 5' transfer RNA (tRNA) half
tctgatgctctaccgactgag

SEQ ID NO: 4367 - DNA, 28 bp, Artificial Sequence
  synthetic circulating small noncoding RNA (sncRNA) 5' transfer RNA (tRNA) half
ccaggaatcctaaccgctagaccatgtg

SEQ ID NO: 4368 - DNA, 11 bp, Artificial Sequence
  synthetic circulating small noncoding RNA (sncRNA) 5' transfer RNA (tRNA) half
cgggatcgaac

SEQ ID NO: 4369 - DNA, 21 bp, Artificial Sequence
  synthetic circulating small noncoding RNA (sncRNA) 5' transfer RNA (tRNA) half
tcgactcccggtgtgggaacg

SEQ ID NO: 4370 - DNA, 14 bp, Artificial Sequence
  synthetic circulating small noncoding RNA (sncRNA) 5' transfer RNA (tRNA) half
ccggggacctctcg

SEQ ID NO: 4371 - DNA, 29 bp, Artificial Sequence
  synthetic circulating small noncoding RNA (sncRNA) 5' transfer RNA (tRNA) half
gcccggatagctcagtcggtagagcatca

SEQ ID NO: 4372 - DNA, 33 bp, Artificial Sequence
  synthetic circulating small noncoding RNA (sncRNA) 5' transfer RNA (tRNA) half
tctaaaggtccctggttcgatcccgggtttcgg

SEQ ID NO: 4373 - DNA, 25 bp, Artificial Sequence
  synthetic circulating small noncoding RNA (sncRNA) 5' transfer RNA (tRNA) half
gttaggattcggcgctctcaccgcc

SEQ ID NO: 4374 - DNA, 22 bp, Artificial Sequence
  synthetic circulating small noncoding RNA (sncRNA) 5' transfer RNA (tRNA) half
ttcccacaccgggagtcgaacc

SEQ ID NO: 4375 - DNA, 11 bp, Artificial Sequence
  synthetic circulating small noncoding RNA (sncRNA) 5' transfer RNA (tRNA) half
ggtcccaccga

SEQ ID NO: 4376 - DNA, 14 bp, Artificial Sequence
  synthetic circulating small noncoding RNA (sncRNA) 5' transfer RNA (tRNA) half
tgcgagaggtcccg

SEQ ID NO: 4377 - DNA, 24 bp, Artificial Sequence
  synthetic circulating small noncoding RNA (sncRNA) 5' transfer RNA (tRNA) half
tgaactcggatcgctggattcaga

SEQ ID NO: 4378 - DNA, 16 bp, Artificial Sequence
  synthetic circulating small noncoding RNA (sncRNA) 5' transfer RNA (tRNA) half
gccagccaggagtcga

SEQ ID NO: 4379 - DNA, 29 bp, Artificial Sequence
  synthetic circulating small noncoding RNA (sncRNA) 5' transfer RNA (tRNA) half
gcgtggcaggcgagaattctaccactgaa

SEQ ID NO: 4380 - DNA, 18 bp, Artificial Sequence
  synthetic circulating small noncoding RNA (sncRNA) 5' transfer RNA (tRNA) half
gcccggctagctcagtcg

SEQ ID NO: 4381 - DNA, 37 bp, Artificial Sequence
  synthetic circulating small noncoding RNA (sncRNA) 5' transfer RNA (tRNA) half
gcacgaggccccgggttcaatccccggcacctccagt

SEQ ID NO: 4382 - DNA, 17 bp, Artificial Sequence
  synthetic circulating small noncoding RNA (sncRNA) 5' transfer RNA (tRNA) half
ctctaccgactgagcta

SEQ ID NO: 4383 - DNA, 28 bp, Artificial Sequence
  synthetic circulating small noncoding RNA (sncRNA) 5' transfer RNA (tRNA) half
gtttctgtagtgtagtggttatcacgct

SEQ ID NO: 4384 - DNA, 22 bp, Artificial Sequence
  synthetic circulating small noncoding RNA (sncRNA) 5' transfer RNA (tRNA) half
cgtctccccgtcggggaatcga

SEQ ID NO: 4385 - DNA, 11 bp, Artificial Sequence
  synthetic circulating small noncoding RNA (sncRNA) 5' transfer RNA (tRNA) half
gcgagaattct

SEQ ID NO: 4386 - DNA, 25 bp, Artificial Sequence
  synthetic circulating small noncoding RNA (sncRNA) 5' transfer RNA (tRNA) half
ggaatcctaaccgctagaccatgtg

SEQ ID NO: 4387 - DNA, 31 bp, Artificial Sequence
  synthetic circulating small noncoding RNA (sncRNA) 5' transfer RNA (tRNA) half
agattgagggttcgagtcccttcgtggtcga

SEQ ID NO: 4388 - DNA, 17 bp, Artificial Sequence
  synthetic circulating small noncoding RNA (sncRNA) 5' transfer RNA (tRNA) half
gaacctagaatcttctg

SEQ ID NO: 4389 - DNA, 25 bp, Artificial Sequence
  synthetic circulating small noncoding RNA (sncRNA) 5' transfer RNA (tRNA) half
gggttcgattcccggtcagggaagc

SEQ ID NO: 4390 - DNA, 15 bp, Artificial Sequence
  synthetic circulating small noncoding RNA (sncRNA) 5' transfer RNA (tRNA) half
tggcagcggtgggat

SEQ ID NO: 4391 - DNA, 29 bp, Artificial Sequence
  synthetic circulating small noncoding RNA (sncRNA) 5' transfer RNA (tRNA) half
gccccctctgaggttcgaactcaggacct

SEQ ID NO: 4392 - DNA, 15 bp, Artificial Sequence
  synthetic circulating small noncoding RNA (sncRNA) 5' transfer RNA (tRNA) half
gctctaaccaactga

SEQ ID NO: 4393 - DNA, 22 bp, Artificial Sequence
  synthetic circulating small noncoding RNA (sncRNA) 5' transfer RNA (tRNA) half
ggtcccaccgagatttgaactc

SEQ ID NO: 4394 - DNA, 33 bp, Artificial Sequence
  synthetic circulating small noncoding RNA (sncRNA) 5' transfer RNA (tRNA) half
gacgaggtggccgagtggttaaggcgatggact

SEQ ID NO: 4395 - DNA, 42 bp, Artificial Sequence
  synthetic circulating small noncoding RNA (sncRNA) 5' transfer RNA (tRNA) half
aggcgtccctgggtgggctcgaaccaccaacctttcggttaa

SEQ ID NO: 4396 - DNA, 24 bp, Artificial Sequence
  synthetic circulating small noncoding RNA (sncRNA) 5' transfer RNA (tRNA) half
aacgcagagtactaaccactatac

SEQ ID NO: 4397 - DNA, 13 bp, Artificial Sequence
  synthetic circulating small noncoding RNA (sncRNA) 5' transfer RNA (tRNA) half
accgggaatcgaa

SEQ ID NO: 4398 - DNA, 13 bp, Artificial Sequence
  synthetic circulating small noncoding RNA (sncRNA) 5' transfer RNA (tRNA) half
gcccgaacaggga

SEQ ID NO: 4399 - DNA, 23 bp, Artificial Sequence
  synthetic circulating small noncoding RNA (sncRNA) 5' transfer RNA (tRNA) half
atccatcgacctctgggttatgg

SEQ ID NO: 4400 - DNA, 35 bp, Artificial Sequence
  synthetic circulating small noncoding RNA (sncRNA) 5' transfer RNA (tRNA) half
cgactctggtgggactcgaacccacaacctttgaa

SEQ ID NO: 4401 - DNA, 36 bp, Artificial Sequence
  synthetic circulating small noncoding RNA (sncRNA) 5' transfer RNA (tRNA) half
tgagggggcacccggatttgaaccggggacctcttg

SEQ ID NO: 4402 - DNA, 31 bp, Artificial Sequence
  synthetic circulating small noncoding RNA (sncRNA) 5' transfer RNA (tRNA) half
cgcagcaacctcggttcgaatccgagtcacg

SEQ ID NO: 4403 - DNA, 25 bp, Artificial Sequence
  synthetic circulating small noncoding RNA (sncRNA) 5' transfer RNA (tRNA) half
acccacgcccccgaagagactggag

SEQ ID NO: 4404 - DNA, 14 bp, Artificial Sequence
  synthetic circulating small noncoding RNA (sncRNA) 5' transfer RNA (tRNA) half
gaaccggggacctc

SEQ ID NO: 4405 - DNA, 10 bp, Artificial Sequence
  synthetic circulating small noncoding RNA (sncRNA) 5' transfer RNA (tRNA) half
attcggcgct

SEQ ID NO: 4406 - DNA, 33 bp, Artificial Sequence
  synthetic circulating small noncoding RNA (sncRNA) 5' transfer RNA (tRNA) half
gtgttcccacaccgggagtcgaacccgggccgc

SEQ ID NO: 4407 - DNA, 14 bp, Artificial Sequence
  synthetic circulating small noncoding RNA (sncRNA) 5' transfer RNA (tRNA) half
ctcggccacgacta

SEQ ID NO: 4408 - DNA, 39 bp, Artificial Sequence
  synthetic circulating small noncoding RNA (sncRNA) 5' transfer RNA (tRNA) half
ctaagccagggattgtgggttcgagtcccatctggggtg

SEQ ID NO: 4409 - DNA, 31 bp, Artificial Sequence
  synthetic circulating small noncoding RNA (sncRNA) 5' transfer RNA (tRNA) half
aaccaggaatcctaaccgctagaccatatgg

SEQ ID NO: 4410 - DNA, 20 bp, Artificial Sequence
  synthetic circulating small noncoding RNA (sncRNA) 5' transfer RNA (tRNA) half
tctagtggtatgattctcag

SEQ ID NO: 4411 - DNA, 25 bp, Artificial Sequence
  synthetic circulating small noncoding RNA (sncRNA) 5' transfer RNA (tRNA) half
gggttcgactcccggtgtgggaaca

SEQ ID NO: 4412 - DNA, 12 bp, Artificial Sequence
  synthetic circulating small noncoding RNA (sncRNA) 5' transfer RNA (tRNA) half
tcggtgggacct

SEQ ID NO: 4413 - DNA, 15 bp, Artificial Sequence
  synthetic circulating small noncoding RNA (sncRNA) 5' transfer RNA (tRNA) half
accccgtccgtgcct

SEQ ID NO: 4414 - DNA, 29 bp, Artificial Sequence
  synthetic circulating small noncoding RNA (sncRNA) 5' transfer RNA (tRNA) half
ggttccaccgagatttgaactcggatcgc

SEQ ID NO: 4415 - DNA, 33 bp, Artificial Sequence
  synthetic circulating small noncoding RNA (sncRNA) 5' transfer RNA (tRNA) half
gagtctcatgctctaccgactgagctagccggg

SEQ ID NO: 4416 - DNA, 27 bp, Artificial Sequence
  synthetic circulating small noncoding RNA (sncRNA) 5' transfer RNA (tRNA) half
cgtctccccgtcggggaatcgaacccc

SEQ ID NO: 4417 - DNA, 8 bp, Artificial Sequence
  synthetic circulating small noncoding RNA (sncRNA) 5' transfer RNA (tRNA) half
cggtctaa

SEQ ID NO: 4418 - DNA, 22 bp, Artificial Sequence
  synthetic circulating small noncoding RNA (sncRNA) 5' transfer RNA (tRNA) half
acccgggcctcccgcgtggcag

SEQ ID NO: 4419 - DNA, 35 bp, Artificial Sequence
  synthetic circulating small noncoding RNA (sncRNA) 5' transfer RNA (tRNA) half
acccacgaccctgggattaagagtcccatgctcta

SEQ ID NO: 4420 - DNA, 15 bp, Artificial Sequence
  synthetic circulating small noncoding RNA (sncRNA) 5' transfer RNA (tRNA) half
ccgtagtcggcagga

SEQ ID NO: 4421 - DNA, 13 bp, Artificial Sequence
  synthetic circulating small noncoding RNA (sncRNA) 5' transfer RNA (tRNA) half
ccccgtccgtgcc

SEQ ID NO: 4422 - DNA, 21 bp, Artificial Sequence
  synthetic circulating small noncoding RNA (sncRNA) 5' transfer RNA (tRNA) half
gcggcccgggttcgattcccg

SEQ ID NO: 4423 - DNA, 34 bp, Artificial Sequence
  synthetic circulating small noncoding RNA (sncRNA) 5' transfer RNA (tRNA) half
tggagatgccggggatcgaacccggggcctcata

SEQ ID NO: 4424 - DNA, 17 bp, Artificial Sequence
  synthetic circulating small noncoding RNA (sncRNA) 5' transfer RNA (tRNA) half
acgcgggaggcccgggt

SEQ ID NO: 4425 - DNA, 22 bp, Artificial Sequence
  synthetic circulating small noncoding RNA (sncRNA) 5' transfer RNA (tRNA) half
ggcgagaattctaccattgaac

SEQ ID NO: 4426 - DNA, 18 bp, Artificial Sequence
  synthetic circulating small noncoding RNA (sncRNA) 5' transfer RNA (tRNA) half
ggttccaccgagatttga

SEQ ID NO: 4427 - DNA, 26 bp, Artificial Sequence
  synthetic circulating small noncoding RNA (sncRNA) 5' transfer RNA (tRNA) half
aggcggcccgggttcgactcccggtg

SEQ ID NO: 4428 - DNA, 36 bp, Artificial Sequence
  synthetic circulating small noncoding RNA (sncRNA) 5' transfer RNA (tRNA) half
gttaggcgaatgtgataaccactacactacggaaac

SEQ ID NO: 4429 - DNA, 16 bp, Artificial Sequence
  synthetic circulating small noncoding RNA (sncRNA) 5' transfer RNA (tRNA) half
gcccggatgatcctca

SEQ ID NO: 4430 - DNA, 37 bp, Artificial Sequence
  synthetic circulating small noncoding RNA (sncRNA) 5' transfer RNA (tRNA) half
acgcgggaggcccgggttcgattcccggccaatgcac

SEQ ID NO: 4431 - DNA, 22 bp, Artificial Sequence
  synthetic circulating small noncoding RNA (sncRNA) 5' transfer RNA (tRNA) half
aaagatggagggggcacccgga

SEQ ID NO: 4432 - DNA, 19 bp, Artificial Sequence
  synthetic circulating small noncoding RNA (sncRNA) 5' transfer RNA (tRNA) half
tcgaatccgagtcacggca

SEQ ID NO: 4433 - DNA, 21 bp, Artificial Sequence
  synthetic circulating small noncoding RNA (sncRNA) 5' transfer RNA (tRNA) half
tcaattccacctttcgggcgg

SEQ ID NO: 4434 - DNA, 18 bp, Artificial Sequence
  synthetic circulating small noncoding RNA (sncRNA) 5' transfer RNA (tRNA) half
ccactacactacggaaac

SEQ ID NO: 4435 - DNA, 32 bp, Artificial Sequence
  synthetic circulating small noncoding RNA (sncRNA) 5' transfer RNA (tRNA) half
cccgtcggggaattgaaccccggtctcccgcg

SEQ ID NO: 4436 - DNA, 31 bp, Artificial Sequence
  synthetic circulating small noncoding RNA (sncRNA) 5' transfer RNA (tRNA) half
tttccctagtgtagtggttatcacgttcgcc

SEQ ID NO: 4437 - DNA, 18 bp, Artificial Sequence
  synthetic circulating small noncoding RNA (sncRNA) 5' transfer RNA (tRNA) half
gcggttaggattcctggt

SEQ ID NO: 4438 - DNA, 20 bp, Artificial Sequence
  synthetic circulating small noncoding RNA (sncRNA) 5' transfer RNA (tRNA) half
tcccggccaatgcactctct

SEQ ID NO: 4439 - DNA, 25 bp, Artificial Sequence
  synthetic circulating small noncoding RNA (sncRNA) 5' transfer RNA (tRNA) half
gcgccgctggtgtagtggtatcatg

SEQ ID NO: 4440 - DNA, 23 bp, Artificial Sequence
  synthetic circulating small noncoding RNA (sncRNA) 5' transfer RNA (tRNA) half
tggtctagtggttaggattcggc

SEQ ID NO: 4441 - DNA, 18 bp, Artificial Sequence
  synthetic circulating small noncoding RNA (sncRNA) 5' transfer RNA (tRNA) half
tggttaggattcggcgct

SEQ ID NO: 4442 - DNA, 35 bp, Artificial Sequence
  synthetic circulating small noncoding RNA (sncRNA) 5' transfer RNA (tRNA) half
gcgtccctgggtgggctcgaaccaccaacctttcg

SEQ ID NO: 4443 - DNA, 36 bp, Artificial Sequence
  synthetic circulating small noncoding RNA (sncRNA) 5' transfer RNA (tRNA) half
accgactctggtgggattcgaacccacaacctttga

SEQ ID NO: 4444 - DNA, 22 bp, Artificial Sequence
  synthetic circulating small noncoding RNA (sncRNA) 5' transfer RNA (tRNA) half
ttcgactcccggtgtgggaacg

SEQ ID NO: 4445 - DNA, 30 bp, Artificial Sequence
  synthetic circulating small noncoding RNA (sncRNA) 5' transfer RNA (tRNA) half
gacagagtggttcaattccacctttcgggc

SEQ ID NO: 4446 - DNA, 18 bp, Artificial Sequence
  synthetic circulating small noncoding RNA (sncRNA) 5' transfer RNA (tRNA) half
tctccccgtcggggaatc

SEQ ID NO: 4447 - DNA, 12 bp, Artificial Sequence
  synthetic circulating small noncoding RNA (sncRNA) 5' transfer RNA (tRNA) half
ggtctcccgcgt

SEQ ID NO: 4448 - DNA, 32 bp, Artificial Sequence
  synthetic circulating small noncoding RNA (sncRNA) 5' transfer RNA (tRNA) half
tttccgtagtgtagtggtcatcacgctcgcct

SEQ ID NO: 4449 - DNA, 21 bp, Artificial Sequence
  synthetic circulating small noncoding RNA (sncRNA) 5' transfer RNA (tRNA) half
ggagatgccggggatcgaacc

SEQ ID NO: 4450 - DNA, 13 bp, Artificial Sequence
  synthetic circulating small noncoding RNA (sncRNA) 5' transfer RNA (tRNA) half
ggagtcgaacccg

SEQ ID NO: 4451 - DNA, 17 bp, Artificial Sequence
  synthetic circulating small noncoding RNA (sncRNA) 5' transfer RNA (tRNA) half
gggtatgattctcgctt

SEQ ID NO: 4452 - DNA, 15 bp, Artificial Sequence
  synthetic circulating small noncoding RNA (sncRNA) 5' transfer RNA (tRNA) half
tcgaaaccgggcgga

SEQ ID NO: 4453 - DNA, 28 bp, Artificial Sequence
  synthetic circulating small noncoding RNA (sncRNA) 5' transfer RNA (tRNA) half
ggattaagagtcccatgctctaccgact

SEQ ID NO: 4454 - DNA, 13 bp, Artificial Sequence
  synthetic circulating small noncoding RNA (sncRNA) 5' transfer RNA (tRNA) half
ccccgacggggag

SEQ ID NO: 4455 - DNA, 27 bp, Artificial Sequence
  synthetic circulating small noncoding RNA (sncRNA) 5' transfer RNA (tRNA) half
gacgacgaggatgggattcgaacccac

SEQ ID NO: 4456 - DNA, 21 bp, Artificial Sequence
  synthetic circulating small noncoding RNA (sncRNA) 5' transfer RNA (tRNA) half
gtggagatgccggggatcgaa

SEQ ID NO: 4457 - DNA, 29 bp, Artificial Sequence
  synthetic circulating small noncoding RNA (sncRNA) 5' transfer RNA (tRNA) half
gccccgtgtgaggatcgaactcacgacct

SEQ ID NO: 4458 - DNA, 27 bp, Artificial Sequence
  synthetic circulating small noncoding RNA (sncRNA) 5' transfer RNA (tRNA) half
gcccgaacagggacttgaaccctggac

SEQ ID NO: 4459 - DNA, 20 bp, Artificial Sequence
  synthetic circulating small noncoding RNA (sncRNA) 5' transfer RNA (tRNA) half
gaccactcggccatcctgac

SEQ ID NO: 4460 - DNA, 12 bp, Artificial Sequence
  synthetic circulating small noncoding RNA (sncRNA) 5' transfer RNA (tRNA) half
gcccccgaagag

SEQ ID NO: 4461 - DNA, 14 bp, Artificial Sequence
  synthetic circulating small noncoding RNA (sncRNA) 5' transfer RNA (tRNA) half
gcggggatactaac

SEQ ID NO: 4462 - DNA, 21 bp, Artificial Sequence
  synthetic circulating small noncoding RNA (sncRNA) 5' transfer RNA (tRNA) half
tcgatgcccgcatcctccact

SEQ ID NO: 4463 - DNA, 27 bp, Artificial Sequence
  synthetic circulating small noncoding RNA (sncRNA) 5' transfer RNA (tRNA) half
cgggccgcggcggtgagagcgccgaat

SEQ ID NO: 4464 - DNA, 17 bp, Artificial Sequence
  synthetic circulating small noncoding RNA (sncRNA) 5' transfer RNA (tRNA) half
cttccctgaccgggaat

SEQ ID NO: 4465 - DNA, 14 bp, Artificial Sequence
  synthetic circulating small noncoding RNA (sncRNA) 5' transfer RNA (tRNA) half
tcagtcggtagagc

SEQ ID NO: 4466 - DNA, 21 bp, Artificial Sequence
  synthetic circulating small noncoding RNA (sncRNA) 5' transfer RNA (tRNA) half
gctgtcagaagtgggattcga

SEQ ID NO: 4467 - DNA, 15 bp, Artificial Sequence
  synthetic circulating small noncoding RNA (sncRNA) 5' transfer RNA (tRNA) half
tccttcgagccggat

SEQ ID NO: 4468 - DNA, 31 bp, Artificial Sequence
  synthetic circulating small noncoding RNA (sncRNA) 5' transfer RNA (tRNA) half
tctgatgctctaccgactgagctatccaggc

SEQ ID NO: 4469 - DNA, 27 bp, Artificial Sequence
  synthetic circulating small noncoding RNA (sncRNA) 5' transfer RNA (tRNA) half
ggcgagaattctaccactgaaccacca

SEQ ID NO: 4470 - DNA, 15 bp, Artificial Sequence
  synthetic circulating small noncoding RNA (sncRNA) 5' transfer RNA (tRNA) half
tcccatgctctaccg

SEQ ID NO: 4471 - DNA, 23 bp, Artificial Sequence
  synthetic circulating small noncoding RNA (sncRNA) 5' transfer RNA (tRNA) half
cgtcgagccagccaggagtcgaa

SEQ ID NO: 4472 - DNA, 20 bp, Artificial Sequence
  synthetic circulating small noncoding RNA (sncRNA) 5' transfer RNA (tRNA) half
tgagagcgccgaatcctaac

SEQ ID NO: 4473 - DNA, 12 bp, Artificial Sequence
  synthetic circulating small noncoding RNA (sncRNA) 5' transfer RNA (tRNA) half
tgagctagccgg

SEQ ID NO: 4474 - DNA, 18 bp, Artificial Sequence
  synthetic circulating small noncoding RNA (sncRNA) 5' transfer RNA (tRNA) half
gtatgattctcgcttagg

SEQ ID NO: 4475 - DNA, 18 bp, Artificial Sequence
  synthetic circulating small noncoding RNA (sncRNA) 5' transfer RNA (tRNA) half
tctagtggtatgattctc

SEQ ID NO: 4476 - DNA, 38 bp, Artificial Sequence
  synthetic circulating small noncoding RNA (sncRNA) 5' transfer RNA (tRNA) half
cgtctccccgtcggggaatcgaaccccggtctcccgcg

SEQ ID NO: 4477 - DNA, 13 bp, Artificial Sequence
  synthetic circulating small noncoding RNA (sncRNA) 5' transfer RNA (tRNA) half
ccggtgtgggaac

SEQ ID NO: 4478 - DNA, 21 bp, Artificial Sequence
  synthetic circulating small noncoding RNA (sncRNA) 5' transfer RNA (tRNA) half
agattgcaggttcgagtcctg

SEQ ID NO: 4479 - DNA, 29 bp, Artificial Sequence
  synthetic circulating small noncoding RNA (sncRNA) 5' transfer RNA (tRNA) half
gcctgggtgaaaaccaggaatcctaaccg

SEQ ID NO: 4480 - DNA, 36 bp, Artificial Sequence
  synthetic circulating small noncoding RNA (sncRNA) 5' transfer RNA (tRNA) half
caggcaccgctgggattcgaacccaggatctcctgt

SEQ ID NO: 4481 - DNA, 13 bp, Artificial Sequence
  synthetic circulating small noncoding RNA (sncRNA) 5' transfer RNA (tRNA) half
tctcggtgggacc

SEQ ID NO: 4482 - DNA, 23 bp, Artificial Sequence
  synthetic circulating small noncoding RNA (sncRNA) 5' transfer RNA (tRNA) half
tctgagggtccagggttcaagtc

SEQ ID NO: 4483 - DNA, 22 bp, Artificial Sequence
  synthetic circulating small noncoding RNA (sncRNA) 5' transfer RNA (tRNA) half
ttcagagtccagagtgctaacc

SEQ ID NO: 4484 - DNA, 18 bp, Artificial Sequence
  synthetic circulating small noncoding RNA (sncRNA) 5' transfer RNA (tRNA) half
gttcccacaccgggagtc

SEQ ID NO: 4485 - DNA, 34 bp, Artificial Sequence
  synthetic circulating small noncoding RNA (sncRNA) 5' transfer RNA (tRNA) half
aggcaagaattctaccactgaaccaccaatgctt

SEQ ID NO: 4486 - DNA, 14 bp, Artificial Sequence
  synthetic circulating small noncoding RNA (sncRNA) 5' transfer RNA (tRNA) half
cgagtggttaaggc

SEQ ID NO: 4487 - DNA, 32 bp, Artificial Sequence
  synthetic circulating small noncoding RNA (sncRNA) 5' transfer RNA (tRNA) half
gcgagaattctaccactgaaccaccaatgcga

SEQ ID NO: 4488 - DNA, 19 bp, Artificial Sequence
  synthetic circulating small noncoding RNA (sncRNA) 5' transfer RNA (tRNA) half
tgcgttggccgggaatcga

SEQ ID NO: 4489 - DNA, 26 bp, Artificial Sequence
  synthetic circulating small noncoding RNA (sncRNA) 5' transfer RNA (tRNA) half
ccggatgatcctcagtggtctggggt

SEQ ID NO: 4490 - DNA, 15 bp, Artificial Sequence
  synthetic circulating small noncoding RNA (sncRNA) 5' transfer RNA (tRNA) half
attctcgcctgccac

SEQ ID NO: 4491 - DNA, 30 bp, Artificial Sequence
  synthetic circulating small noncoding RNA (sncRNA) 5' transfer RNA (tRNA) half
gagtcccatgctctaccgactgagctagcc

SEQ ID NO: 4492 - DNA, 21 bp, Artificial Sequence
  synthetic circulating small noncoding RNA (sncRNA) 5' transfer RNA (tRNA) half
tcccataccgggagtcgaacc

SEQ ID NO: 4493 - DNA, 29 bp, Artificial Sequence
  synthetic circulating small noncoding RNA (sncRNA) 5' transfer RNA (tRNA) half
aaccaggaatcctaaccgctagaccatat

SEQ ID NO: 4494 - DNA, 29 bp, Artificial Sequence
  synthetic circulating small noncoding RNA (sncRNA) 5' transfer RNA (tRNA) half
actccgccgggactcgaacccggaacctt

SEQ ID NO: 4495 - DNA, 27 bp, Artificial Sequence
  synthetic circulating small noncoding RNA (sncRNA) 5' transfer RNA (tRNA) half
taccgggagtcgaacccgggccgcctg

SEQ ID NO: 4496 - DNA, 24 bp, Artificial Sequence
  synthetic circulating small noncoding RNA (sncRNA) 5' transfer RNA (tRNA) half
cgggttcgactcccggtatgggaa

SEQ ID NO: 4497 - DNA, 17 bp, Artificial Sequence
  synthetic circulating small noncoding RNA (sncRNA) 5' transfer RNA (tRNA) half
agtccagagtgctaacc

SEQ ID NO: 4498 - DNA, 21 bp, Artificial Sequence
  synthetic circulating small noncoding RNA (sncRNA) 5' transfer RNA (tRNA) half
ggttcgaatccgagtcacggc

SEQ ID NO: 4499 - DNA, 18 bp, Artificial Sequence
  synthetic circulating small noncoding RNA (sncRNA) 5' transfer RNA (tRNA) half
gaactcggatcgctggat

SEQ ID NO: 4500 - DNA, 20 bp, Artificial Sequence
  synthetic circulating small noncoding RNA (sncRNA) 5' transfer RNA (tRNA) half
ttcccacaccgggagtcgaa

SEQ ID NO: 4501 - DNA, 14 bp, Artificial Sequence
  synthetic circulating small noncoding RNA (sncRNA) 5' transfer RNA (tRNA) half
ggaatcgaaccccg

SEQ ID NO: 4502 - DNA, 31 bp, Artificial Sequence
  synthetic circulating small noncoding RNA (sncRNA) 5' transfer RNA (tRNA) half
ccgtgatcgtataggggttagtactctgcgt

SEQ ID NO: 4503 - DNA, 29 bp, Artificial Sequence
  synthetic circulating small noncoding RNA (sncRNA) 5' transfer RNA (tRNA) half
gagcgctctaccatttgagctaatccccc

SEQ ID NO: 4504 - DNA, 10 bp, Artificial Sequence
  synthetic circulating small noncoding RNA (sncRNA) 5' transfer RNA (tRNA) half
cgcccgaaca

SEQ ID NO: 4505 - DNA, 16 bp, Artificial Sequence
  synthetic circulating small noncoding RNA (sncRNA) 5' transfer RNA (tRNA) half
actcggccatcctggt

SEQ ID NO: 4506 - DNA, 26 bp, Artificial Sequence
  synthetic circulating small noncoding RNA (sncRNA) 5' transfer RNA (tRNA) half
cagagtactaaccactatacgatcac

SEQ ID NO: 4507 - DNA, 38 bp, Artificial Sequence
  synthetic circulating small noncoding RNA (sncRNA) 5' transfer RNA (tRNA) half
agcgaccacgaagggactcgaacccccaatcttctgat

SEQ ID NO: 4508 - DNA, 23 bp, Artificial Sequence
  synthetic circulating small noncoding RNA (sncRNA) 5' transfer RNA (tRNA) half
ataacccagaggtcgatggatcg

SEQ ID NO: 4509 - DNA, 32 bp, Artificial Sequence
  synthetic circulating small noncoding RNA (sncRNA) 5' transfer RNA (tRNA) half
ggacccatggtgtaatggttagcactctggac

SEQ ID NO: 4510 - DNA, 27 bp, Artificial Sequence
  synthetic circulating small noncoding RNA (sncRNA) 5' transfer RNA (tRNA) half
tcagagtccagagtgctaaccattaca

SEQ ID NO: 4511 - DNA, 19 bp, Artificial Sequence
  synthetic circulating small noncoding RNA (sncRNA) 5' transfer RNA (tRNA) half
tcgaaaccatcctctgcta

SEQ ID NO: 4512 - DNA, 17 bp, Artificial Sequence
  synthetic circulating small noncoding RNA (sncRNA) 5' transfer RNA (tRNA) half
cactacactacggaaac

SEQ ID NO: 4513 - DNA, 14 bp, Artificial Sequence
  synthetic circulating small noncoding RNA (sncRNA) 5' transfer RNA (tRNA) half
agggggcacccgga

SEQ ID NO: 4514 - DNA, 20 bp, Artificial Sequence
  synthetic circulating small noncoding RNA (sncRNA) 5' transfer RNA (tRNA) half
ggttcgactcccggtgtggg

SEQ ID NO: 4515 - DNA, 33 bp, Artificial Sequence
  synthetic circulating small noncoding RNA (sncRNA) 5' transfer RNA (tRNA) half
ctcagggtcgtgggttcgagccccacgttgggc

SEQ ID NO: 4516 - DNA, 36 bp, Artificial Sequence
  synthetic circulating small noncoding RNA (sncRNA) 5' transfer RNA (tRNA) half
gtccctgggtgggctcgaaccaccaacctttcggtt

SEQ ID NO: 4517 - DNA, 12 bp, Artificial Sequence
  synthetic circulating small noncoding RNA (sncRNA) 5' transfer RNA (tRNA) half
gcccaacgtggg

SEQ ID NO: 4518 - DNA, 30 bp, Artificial Sequence
  synthetic circulating small noncoding RNA (sncRNA) 5' transfer RNA (tRNA) half
ggcggggatactaaccactatactaacgag

SEQ ID NO: 4519 - DNA, 32 bp, Artificial Sequence
  synthetic circulating small noncoding RNA (sncRNA) 5' transfer RNA (tRNA) half
gccgaaacccgggatcgaaccagggaccttta

SEQ ID NO: 4520 - DNA, 23 bp, Artificial Sequence
  synthetic circulating small noncoding RNA (sncRNA) 5' transfer RNA (tRNA) half
agcgccgaatcctaaccactaga

SEQ ID NO: 4521 - DNA, 17 bp, Artificial Sequence
  synthetic circulating small noncoding RNA (sncRNA) 5' transfer RNA (tRNA) half
ggcgagaattctaccat

SEQ ID NO: 4522 - DNA, 13 bp, Artificial Sequence
  synthetic circulating small noncoding RNA (sncRNA) 5' transfer RNA (tRNA) half
gttcccacaccgg

SEQ ID NO: 4523 - DNA, 19 bp, Artificial Sequence
  synthetic circulating small noncoding RNA (sncRNA) 5' transfer RNA (tRNA) half
tccagagtgctaaccatta

SEQ ID NO: 4524 - DNA, 16 bp, Artificial Sequence
  synthetic circulating small noncoding RNA (sncRNA) 5' transfer RNA (tRNA) half
aaccccggtctcccgc

SEQ ID NO: 4525 - DNA, 21 bp, Artificial Sequence
  synthetic circulating small noncoding RNA (sncRNA) 5' transfer RNA (tRNA) half
gtgtagtggttatcacgttcg

SEQ ID NO: 4526 - DNA, 22 bp, Artificial Sequence
  synthetic circulating small noncoding RNA (sncRNA) 5' transfer RNA (tRNA) half
gcaggcgagaattctaccactg

SEQ ID NO: 4527 - DNA, 28 bp, Artificial Sequence
  synthetic circulating small noncoding RNA (sncRNA) 5' transfer RNA (tRNA) half
cgagaatcatacccctagaccaacgagc

SEQ ID NO: 4528 - DNA, 16 bp, Artificial Sequence
  synthetic circulating small noncoding RNA (sncRNA) 5' transfer RNA (tRNA) half
gggagactgcgacctg

SEQ ID NO: 4529 - DNA, 17 bp, Artificial Sequence
  synthetic circulating small noncoding RNA (sncRNA) 5' transfer RNA (tRNA) half
tcagtggtagaattctc

SEQ ID NO: 4530 - DNA, 30 bp, Artificial Sequence
  synthetic circulating small noncoding RNA (sncRNA) 5' transfer RNA (tRNA) half
tgcagagtactaaccactatacgatctcgg

SEQ ID NO: 4531 - DNA, 31 bp, Artificial Sequence
  synthetic circulating small noncoding RNA (sncRNA) 5' transfer RNA (tRNA) half
tagcgcccgaacagggacttgaaccctggac

SEQ ID NO: 4532 - DNA, 13 bp, Artificial Sequence
  synthetic circulating small noncoding RNA (sncRNA) 5' transfer RNA (tRNA) half
tcgattccccgac

SEQ ID NO: 4533 - DNA, 17 bp, Artificial Sequence
  synthetic circulating small noncoding RNA (sncRNA) 5' transfer RNA (tRNA) half
agtggttaggattcggc

SEQ ID NO: 4534 - DNA, 17 bp, Artificial Sequence
  synthetic circulating small noncoding RNA (sncRNA) 5' transfer RNA (tRNA) half
aaccgggcggaaacagc

SEQ ID NO: 4535 - DNA, 22 bp, Artificial Sequence
  synthetic circulating small noncoding RNA (sncRNA) 5' transfer RNA (tRNA) half
agattaagagtctcatgctcta

SEQ ID NO: 4536 - DNA, 26 bp, Artificial Sequence
  synthetic circulating small noncoding RNA (sncRNA) 5' transfer RNA (tRNA) half
agtggcgcagcggaagcgtgctgggc

SEQ ID NO: 4537 - DNA, 13 bp, Artificial Sequence
  synthetic circulating small noncoding RNA (sncRNA) 5' transfer RNA (tRNA) half
tccccggcatctc

SEQ ID NO: 4538 - DNA, 38 bp, Artificial Sequence
  synthetic circulating small noncoding RNA (sncRNA) 5' transfer RNA (tRNA) half
aagcgactctggtgggactcgaacccacaacctttgaa

SEQ ID NO: 4539 - DNA, 19 bp, Artificial Sequence
  synthetic circulating small noncoding RNA (sncRNA) 5' transfer RNA (tRNA) half
tctaccgactgagctatcc

SEQ ID NO: 4540 - DNA, 36 bp, Artificial Sequence
  synthetic circulating small noncoding RNA (sncRNA) 5' transfer RNA (tRNA) half
ggttagcactctggactctgaatccagcgatccgag

SEQ ID NO: 4541 - DNA, 19 bp, Artificial Sequence
  synthetic circulating small noncoding RNA (sncRNA) 5' transfer RNA (tRNA) half
gagaattctaccactgaac

SEQ ID NO: 4542 - DNA, 36 bp, Artificial Sequence
  synthetic circulating small noncoding RNA (sncRNA) 5' transfer RNA (tRNA) half
gcgggaggcccgggttcgattcccggccaatgcact

SEQ ID NO: 4543 - DNA, 16 bp, Artificial Sequence
  synthetic circulating small noncoding RNA (sncRNA) 5' transfer RNA (tRNA) half
cgttggccgggaatcg

SEQ ID NO: 4544 - DNA, 19 bp, Artificial Sequence
  synthetic circulating small noncoding RNA (sncRNA) 5' transfer RNA (tRNA) half
tcccatatggtctagcggt

SEQ ID NO: 4545 - DNA, 38 bp, Artificial Sequence
  synthetic circulating small noncoding RNA (sncRNA) 5' transfer RNA (tRNA) half
gggccgcggcggtgagagcgccgaatcctaaccactag

SEQ ID NO: 4546 - DNA, 33 bp, Artificial Sequence
  synthetic circulating small noncoding RNA (sncRNA) 5' transfer RNA (tRNA) half
ccccgacgtgacttgaacacgcaaccttctgat

SEQ ID NO: 4547 - DNA, 25 bp, Artificial Sequence
  synthetic circulating small noncoding RNA (sncRNA) 5' transfer RNA (tRNA) half
aggcaccgctgggattcgaacccag

SEQ ID NO: 4548 - DNA, 30 bp, Artificial Sequence
  synthetic circulating small noncoding RNA (sncRNA) 5' transfer RNA (tRNA) half
cgagaattctaccactgaaccaccaatgcc

SEQ ID NO: 4549 - DNA, 34 bp, Artificial Sequence
  synthetic circulating small noncoding RNA (sncRNA) 5' transfer RNA (tRNA) half
cgactctggtgggactcgaacccacaacctttga

SEQ ID NO: 4550 - DNA, 15 bp, Artificial Sequence
  synthetic circulating small noncoding RNA (sncRNA) 5' transfer RNA (tRNA) half
gggcctcccgcgtgg

SEQ ID NO: 4551 - DNA, 25 bp, Artificial Sequence
  synthetic circulating small noncoding RNA (sncRNA) 5' transfer RNA (tRNA) half
acctgcgcggggaaaccccaatgga

SEQ ID NO: 4552 - DNA, 40 bp, Artificial Sequence
  synthetic circulating small noncoding RNA (sncRNA) 5' transfer RNA (tRNA) half
agtggttaggattcggcgctctcaccgccgcggcccgggt

SEQ ID NO: 4553 - DNA, 25 bp, Artificial Sequence
  synthetic circulating small noncoding RNA (sncRNA) 5' transfer RNA (tRNA) half
ggtggtctagtggttaggattcggc

SEQ ID NO: 4554 - DNA, 18 bp, Artificial Sequence
  synthetic circulating small noncoding RNA (sncRNA) 5' transfer RNA (tRNA) half
ctctcaccgccgcggccc

SEQ ID NO: 4555 - DNA, 27 bp, Artificial Sequence
  synthetic circulating small noncoding RNA (sncRNA) 5' transfer RNA (tRNA) half
caggaatcctaaccgctagaccatatg

SEQ ID NO: 4556 - DNA, 23 bp, Artificial Sequence
  synthetic circulating small noncoding RNA (sncRNA) 5' transfer RNA (tRNA) half
agagtccagagtgctaaccatta

SEQ ID NO: 4557 - DNA, 26 bp, Artificial Sequence
  synthetic circulating small noncoding RNA (sncRNA) 5' transfer RNA (tRNA) half
agagtactaaccactatacgatcacg

SEQ ID NO: 4558 - DNA, 35 bp, Artificial Sequence
  synthetic circulating small noncoding RNA (sncRNA) 5' transfer RNA (tRNA) half
ccgaaaggttggtggttcgagcccacccagggacg

SEQ ID NO: 4559 - DNA, 37 bp, Artificial Sequence
  synthetic circulating small noncoding RNA (sncRNA) 5' transfer RNA (tRNA) half
gcgcccgaacagggacttgaaccctggaccctcagat

SEQ ID NO: 4560 - DNA, 12 bp, Artificial Sequence
  synthetic circulating small noncoding RNA (sncRNA) 5' transfer RNA (tRNA) half
aggtccccggtt

SEQ ID NO: 4561 - DNA, 19 bp, Artificial Sequence
  synthetic circulating small noncoding RNA (sncRNA) 5' transfer RNA (tRNA) half
accactcggccatcctggt

SEQ ID NO: 4562 - DNA, 12 bp, Artificial Sequence
  synthetic circulating small noncoding RNA (sncRNA) 5' transfer RNA (tRNA) half
cgaacctggaat

SEQ ID NO: 4563 - DNA, 25 bp, Artificial Sequence
  synthetic circulating small noncoding RNA (sncRNA) 5' transfer RNA (tRNA) half
acatggtctagcggttaggattcct

SEQ ID NO: 4564 - DNA, 22 bp, Artificial Sequence
  synthetic circulating small noncoding RNA (sncRNA) 5' transfer RNA (tRNA) half
cgttccttcgagccggattcga

SEQ ID NO: 4565 - DNA, 10 bp, Artificial Sequence
  synthetic circulating small noncoding RNA (sncRNA) 5' transfer RNA (tRNA) half
gattcggcgc

SEQ ID NO: 4566 - DNA, 18 bp, Artificial Sequence
  synthetic circulating small noncoding RNA (sncRNA) 5' transfer RNA (tRNA) half
ccgaagcgagaatcatac

SEQ ID NO: 4567 - DNA, 30 bp, Artificial Sequence
  synthetic circulating small noncoding RNA (sncRNA) 5' transfer RNA (tRNA) half
ggccccatggtgtaatggttagcactctgg

SEQ ID NO: 4568 - DNA, 29 bp, Artificial Sequence
  synthetic circulating small noncoding RNA (sncRNA) 5' transfer RNA (tRNA) half
ccacatggtctagcggttaggattcctgg

SEQ ID NO: 4569 - DNA, 35 bp, Artificial Sequence
  synthetic circulating small noncoding RNA (sncRNA) 5' transfer RNA (tRNA) half
gccgtgatcgtatagtggttagtactctgcgttgt

SEQ ID NO: 4570 - DNA, 33 bp, Artificial Sequence
  synthetic circulating small noncoding RNA (sncRNA) 5' transfer RNA (tRNA) half
ccgtgactcggattcgaaccgaggttgctgcgg

SEQ ID NO: 4571 - DNA, 11 bp, Artificial Sequence
  synthetic circulating small noncoding RNA (sncRNA) 5' transfer RNA (tRNA) half
ggccccagcga

SEQ ID NO: 4572 - DNA, 38 bp, Artificial Sequence
  synthetic circulating small noncoding RNA (sncRNA) 5' transfer RNA (tRNA) half
tgcacgaggccccgggttcaatccccggcacctccagt

SEQ ID NO: 4573 - DNA, 22 bp, Artificial Sequence
  synthetic circulating small noncoding RNA (sncRNA) 5' transfer RNA (tRNA) half
aaccgggcggaaacattacttt

SEQ ID NO: 4574 - DNA, 20 bp, Artificial Sequence
  synthetic circulating small noncoding RNA (sncRNA) 5' transfer RNA (tRNA) half
gttcaaatcccggacgagcc

SEQ ID NO: 4575 - DNA, 32 bp, Artificial Sequence
  synthetic circulating small noncoding RNA (sncRNA) 5' transfer RNA (tRNA) half
aggcggcccgggttcgactcccggtgtgggaa

SEQ ID NO: 4576 - DNA, 41 bp, Artificial Sequence
  synthetic circulating small noncoding RNA (sncRNA) 5' transfer RNA (tRNA) half
ggcgtccctgggtgggctcgaaccaccaacctttcggttaa

SEQ ID NO: 4577 - DNA, 20 bp, Artificial Sequence
  synthetic circulating small noncoding RNA (sncRNA) 5' transfer RNA (tRNA) half
tctgagggtccagggttcaa

SEQ ID NO: 4578 - DNA, 36 bp, Artificial Sequence
  synthetic circulating small noncoding RNA (sncRNA) 5' transfer RNA (tRNA) half
cgtctccccgtcggggaatcgaaccccggtctcccg

SEQ ID NO: 4579 - DNA, 15 bp, Artificial Sequence
  synthetic circulating small noncoding RNA (sncRNA) 5' transfer RNA (tRNA) half
agtcccatgctctac

SEQ ID NO: 4580 - DNA, 24 bp, Artificial Sequence
  synthetic circulating small noncoding RNA (sncRNA) 5' transfer RNA (tRNA) half
tccagagtgctaaccattacacca

SEQ ID NO: 4581 - DNA, 20 bp, Artificial Sequence
  synthetic circulating small noncoding RNA (sncRNA) 5' transfer RNA (tRNA) half
gttcgatccccggcatctcc

SEQ ID NO: 4582 - DNA, 23 bp, Artificial Sequence
  synthetic circulating small noncoding RNA (sncRNA) 5' transfer RNA (tRNA) half
tcagagtccagagtgctaaccat

SEQ ID NO: 4583 - DNA, 44 bp, Artificial Sequence
  synthetic circulating small noncoding RNA (sncRNA) 5' transfer RNA (tRNA) half
ttgtgccccgtgtgaggatcgaactcacgaccttcagattatga

SEQ ID NO: 4584 - DNA, 43 bp, Artificial Sequence
  synthetic circulating small noncoding RNA (sncRNA) 5' transfer RNA (tRNA) half
ggcagcggtgggattcgaacccacgccatcgaaatgactggag

SEQ ID NO: 4585 - DNA, 16 bp, Artificial Sequence
  synthetic circulating small noncoding RNA (sncRNA) 5' transfer RNA (tRNA) half
ctctaccgactgagct

SEQ ID NO: 4586 - DNA, 14 bp, Artificial Sequence
  synthetic circulating small noncoding RNA (sncRNA) 5' transfer RNA (tRNA) half
tcccggacgagccc

SEQ ID NO: 4587 - DNA, 11 bp, Artificial Sequence
  synthetic circulating small noncoding RNA (sncRNA) 5' transfer RNA (tRNA) half
gtctcccgcgt

SEQ ID NO: 4588 - DNA, 16 bp, Artificial Sequence
  synthetic circulating small noncoding RNA (sncRNA) 5' transfer RNA (tRNA) half
gggcccagcacgcttc

SEQ ID NO: 4589 - DNA, 20 bp, Artificial Sequence
  synthetic circulating small noncoding RNA (sncRNA) 5' transfer RNA (tRNA) half
cgagccagccaggagtcgaa

SEQ ID NO: 4590 - DNA, 21 bp, Artificial Sequence
  synthetic circulating small noncoding RNA (sncRNA) 5' transfer RNA (tRNA) half
tccccgtcggggaatcgaacc

SEQ ID NO: 4591 - DNA, 24 bp, Artificial Sequence
  synthetic circulating small noncoding RNA (sncRNA) 5' transfer RNA (tRNA) half
gaggtcccaccgagatttgaactc

SEQ ID NO: 4592 - DNA, 11 bp, Artificial Sequence
  synthetic circulating small noncoding RNA (sncRNA) 5' transfer RNA (tRNA) half
aggtccccggt

SEQ ID NO: 4593 - DNA, 39 bp, Artificial Sequence
  synthetic circulating small noncoding RNA (sncRNA) 5' transfer RNA (tRNA) half
gaactcggatcgctggattcagagtccagagtgctaacc

SEQ ID NO: 4594 - DNA, 19 bp, Artificial Sequence
  synthetic circulating small noncoding RNA (sncRNA) 5' transfer RNA (tRNA) half
tcgattcccgggcggcgca

SEQ ID NO: 4595 - DNA, 36 bp, Artificial Sequence
  synthetic circulating small noncoding RNA (sncRNA) 5' transfer RNA (tRNA) half
gcgggaggcccgggttcgattcccggccaatgcacg

SEQ ID NO: 4596 - DNA, 30 bp, Artificial Sequence
  synthetic circulating small noncoding RNA (sncRNA) 5' transfer RNA (tRNA) half
aactcggatcgctggattcagagtccagag

SEQ ID NO: 4597 - DNA, 29 bp, Artificial Sequence
  synthetic circulating small noncoding RNA (sncRNA) 5' transfer RNA (tRNA) half
gggattaagagtcccatgctctaccgact

SEQ ID NO: 4598 - DNA, 25 bp, Artificial Sequence
  synthetic circulating small noncoding RNA (sncRNA) 5' transfer RNA (tRNA) half
ctcagtggtctggggtgcaggcttc

SEQ ID NO: 4599 - DNA, 19 bp, Artificial Sequence
  synthetic circulating small noncoding RNA (sncRNA) 5' transfer RNA (tRNA) half
cgggccgcggcggtgagag

SEQ ID NO: 4600 - DNA, 31 bp, Artificial Sequence
  synthetic circulating small noncoding RNA (sncRNA) 5' transfer RNA (tRNA) half
ggtcccaccgagatttgaactcggatcgctg

SEQ ID NO: 4601 - DNA, 22 bp, Artificial Sequence
  synthetic circulating small noncoding RNA (sncRNA) 5' transfer RNA (tRNA) half
agcgagaatcatacccctagac

SEQ ID NO: 4602 - DNA, 9 bp, Artificial Sequence
  synthetic circulating small noncoding RNA (sncRNA) 5' transfer RNA (tRNA) half
tagcgcgcg

SEQ ID NO: 4603 - DNA, 16 bp, Artificial Sequence
  synthetic circulating small noncoding RNA (sncRNA) 5' transfer RNA (tRNA) half
cgactccgccgggact

SEQ ID NO: 4604 - DNA, 20 bp, Artificial Sequence
  synthetic circulating small noncoding RNA (sncRNA) 5' transfer RNA (tRNA) half
gtcggtagagcatgagactc

SEQ ID NO: 4605 - DNA, 18 bp, Artificial Sequence
  synthetic circulating small noncoding RNA (sncRNA) 5' transfer RNA (tRNA) half
acaggcggggatactcac

SEQ ID NO: 4606 - DNA, 16 bp, Artificial Sequence
  synthetic circulating small noncoding RNA (sncRNA) 5' transfer RNA (tRNA) half
tcctgccgactacgtc

SEQ ID NO: 4607 - DNA, 24 bp, Artificial Sequence
  synthetic circulating small noncoding RNA (sncRNA) 5' transfer RNA (tRNA) half
gctctaccactgagctacatcccc

SEQ ID NO: 4608 - DNA, 15 bp, Artificial Sequence
  synthetic circulating small noncoding RNA (sncRNA) 5' transfer RNA (tRNA) half
gccgggagtcgaacc

SEQ ID NO: 4609 - DNA, 13 bp, Artificial Sequence
  synthetic circulating small noncoding RNA (sncRNA) 5' transfer RNA (tRNA) half
gtccccggttcga

SEQ ID NO: 4610 - DNA, 16 bp, Artificial Sequence
  synthetic circulating small noncoding RNA (sncRNA) 5' transfer RNA (tRNA) half
ggttcgattcccggtc

SEQ ID NO: 4611 - DNA, 11 bp, Artificial Sequence
  synthetic circulating small noncoding RNA (sncRNA) 5' transfer RNA (tRNA) half
cgctctcaccg

SEQ ID NO: 4612 - DNA, 23 bp, Artificial Sequence
  synthetic circulating small noncoding RNA (sncRNA) 5' transfer RNA (tRNA) half
cagagtactaaccactatacgat

SEQ ID NO: 4613 - DNA, 36 bp, Artificial Sequence
  synthetic circulating small noncoding RNA (sncRNA) 5' transfer RNA (tRNA) half
ggagggggcacccggatttgaaccagggacctcttg

SEQ ID NO: 4614 - DNA, 16 bp, Artificial Sequence
  synthetic circulating small noncoding RNA (sncRNA) 5' transfer RNA (tRNA) half
acgacgaggatgggat

SEQ ID NO: 4615 - DNA, 31 bp, Artificial Sequence
  synthetic circulating small noncoding RNA (sncRNA) 5' transfer RNA (tRNA) half
gtcagacgcgctaccattgcgccacgaggtc

SEQ ID NO: 4616 - DNA, 20 bp, Artificial Sequence
  synthetic circulating small noncoding RNA (sncRNA) 5' transfer RNA (tRNA) half
gttcaaatctcggtggaacc

SEQ ID NO: 4617 - DNA, 15 bp, Artificial Sequence
  synthetic circulating small noncoding RNA (sncRNA) 5' transfer RNA (tRNA) half
gagtccagagtgcta

SEQ ID NO: 4618 - DNA, 17 bp, Artificial Sequence
  synthetic circulating small noncoding RNA (sncRNA) 5' transfer RNA (tRNA) half
ccacctttcgggcggga

SEQ ID NO: 4619 - DNA, 24 bp, Artificial Sequence
  synthetic circulating small noncoding RNA (sncRNA) 5' transfer RNA (tRNA) half
tttgggtgcgagaggtcccgggtt

SEQ ID NO: 4620 - DNA, 34 bp, Artificial Sequence
  synthetic circulating small noncoding RNA (sncRNA) 5' transfer RNA (tRNA) half
aggcggcccgggttcgactcccggtgtgggaaca

SEQ ID NO: 4621 - DNA, 13 bp, Artificial Sequence
  synthetic circulating small noncoding RNA (sncRNA) 5' transfer RNA (tRNA) half
ggggcacccggat

SEQ ID NO: 4622 - DNA, 37 bp, Artificial Sequence
  synthetic circulating small noncoding RNA (sncRNA) 5' transfer RNA (tRNA) half
cgcgggaggcccgggttcgattcccggccaatgcact

SEQ ID NO: 4623 - DNA, 36 bp, Artificial Sequence
  synthetic circulating small noncoding RNA (sncRNA) 5' transfer RNA (tRNA) half
tcagaagattgagggttcgagtcccttcgtggtcga

SEQ ID NO: 4624 - DNA, 25 bp, Artificial Sequence
  synthetic circulating small noncoding RNA (sncRNA) 5' transfer RNA (tRNA) half
gtttctgtagtgtagtggttatcac

SEQ ID NO: 4625 - DNA, 21 bp, Artificial Sequence
  synthetic circulating small noncoding RNA (sncRNA) 5' transfer RNA (tRNA) half
gattcagagtccagagtgcta

SEQ ID NO: 4626 - DNA, 35 bp, Artificial Sequence
  synthetic circulating small noncoding RNA (sncRNA) 5' transfer RNA (tRNA) half
accgaagatcacgggttcgaaccccgtccgtgcct

SEQ ID NO: 4627 - DNA, 5 bp, Artificial Sequence
  synthetic circulating small noncoding RNA (sncRNA) 5' transfer RNA (tRNA) half
ccacg

SEQ ID NO: 4628 - DNA, 17 bp, Artificial Sequence
  synthetic circulating small noncoding RNA (sncRNA) 5' transfer RNA (tRNA) half
ccgaatcctaaccacta

SEQ ID NO: 4629 - DNA, 13 bp, Artificial Sequence
  synthetic circulating small noncoding RNA (sncRNA) 5' transfer RNA (tRNA) half
ggcgcccaacgtg

SEQ ID NO: 4630 - DNA, 20 bp, Artificial Sequence
  synthetic circulating small noncoding RNA (sncRNA) 5' transfer RNA (tRNA) half
gtggttaggattcggcgctc

SEQ ID NO: 4631 - DNA, 12 bp, Artificial Sequence
  synthetic circulating small noncoding RNA (sncRNA) 5' transfer RNA (tRNA) half
cccgcgtgacag

SEQ ID NO: 4632 - DNA, 21 bp, Artificial Sequence
  synthetic circulating small noncoding RNA (sncRNA) 5' transfer RNA (tRNA) half
ctctaccgactgagctatccg

SEQ ID NO: 4633 - DNA, 17 bp, Artificial Sequence
  synthetic circulating small noncoding RNA (sncRNA) 5' transfer RNA (tRNA) half
gaattctcgcctgccac

SEQ ID NO: 4634 - DNA, 13 bp, Artificial Sequence
  synthetic circulating small noncoding RNA (sncRNA) 5' transfer RNA (tRNA) half
tcccgcgtggcag

SEQ ID NO: 4635 - DNA, 34 bp, Artificial Sequence
  synthetic circulating small noncoding RNA (sncRNA) 5' transfer RNA (tRNA) half
cggttaggattcctggttttcacccaggcggccc

SEQ ID NO: 4636 - DNA, 41 bp, Artificial Sequence
  synthetic circulating small noncoding RNA (sncRNA) 5' transfer RNA (tRNA) half
cgtctccccgtcggggaatcgaaccccggtctcccgcgtga

SEQ ID NO: 4637 - DNA, 33 bp, Artificial Sequence
  synthetic circulating small noncoding RNA (sncRNA) 5' transfer RNA (tRNA) half
cgggaggcccgggttcgattcccggccaatgca

SEQ ID NO: 4638 - DNA, 13 bp, Artificial Sequence
  synthetic circulating small noncoding RNA (sncRNA) 5' transfer RNA (tRNA) half
ggccgggaatcaa

SEQ ID NO: 4639 - DNA, 45 bp, Artificial Sequence
  synthetic circulating small noncoding RNA (sncRNA) 5' transfer RNA (tRNA) half
aactcggatcgctggattcagagtccagagtgctaaccattacac

SEQ ID NO: 4640 - DNA, 29 bp, Artificial Sequence
  synthetic circulating small noncoding RNA (sncRNA) 5' transfer RNA (tRNA) half
gttccaccgagatttgaactcggatcgct

SEQ ID NO: 4641 - DNA, 13 bp, Artificial Sequence
  synthetic circulating small noncoding RNA (sncRNA) 5' transfer RNA (tRNA) half
ctgagctatccgg

SEQ ID NO: 4642 - DNA, 23 bp, Artificial Sequence
  synthetic circulating small noncoding RNA (sncRNA) 5' transfer RNA (tRNA) half
tcgattcccggccaatgcacgat

SEQ ID NO: 4643 - DNA, 29 bp, Artificial Sequence
  synthetic circulating small noncoding RNA (sncRNA) 5' transfer RNA (tRNA) half
gagccagccaggagtcgaacctagaatct

SEQ ID NO: 4644 - DNA, 31 bp, Artificial Sequence
  synthetic circulating small noncoding RNA (sncRNA) 5' transfer RNA (tRNA) half
gatgctctaccgactgagctatccgggctct

SEQ ID NO: 4645 - DNA, 41 bp, Artificial Sequence
  synthetic circulating small noncoding RNA (sncRNA) 5' transfer RNA (tRNA) half
ggttgctgcggccacaacgcagagtactaaccactatacga

SEQ ID NO: 4646 - DNA, 38 bp, Artificial Sequence
  synthetic circulating small noncoding RNA (sncRNA) 5' transfer RNA (tRNA) half
cgcgggagaccggggttcgattccccgacggggagtct

SEQ ID NO: 4647 - DNA, 9 bp, Artificial Sequence
  synthetic circulating small noncoding RNA (sncRNA) 5' transfer RNA (tRNA) half
ggtctcccg

SEQ ID NO: 4648 - DNA, 18 bp, Artificial Sequence
  synthetic circulating small noncoding RNA (sncRNA) 5' transfer RNA (tRNA) half
cgactgagctatccgggc

SEQ ID NO: 4649 - DNA, 15 bp, Artificial Sequence
  synthetic circulating small noncoding RNA (sncRNA) 5' transfer RNA (tRNA) half
atggttagcactctg

SEQ ID NO: 4650 - DNA, 14 bp, Artificial Sequence
  synthetic circulating small noncoding RNA (sncRNA) 5' transfer RNA (tRNA) half
cggttaacagccga

SEQ ID NO: 4651 - DNA, 12 bp, Artificial Sequence
  synthetic circulating small noncoding RNA (sncRNA) 5' transfer RNA (tRNA) half
ttcccgggcggc

SEQ ID NO: 4652 - DNA, 22 bp, Artificial Sequence
  synthetic circulating small noncoding RNA (sncRNA) 5' transfer RNA (tRNA) half
ggttccatagtgtagcggttat

SEQ ID NO: 4653 - DNA, 37 bp, Artificial Sequence
  synthetic circulating small noncoding RNA (sncRNA) 5' transfer RNA (tRNA) half
aaacccgggcctcccgcgtggcaggcgagaattctac

SEQ ID NO: 4654 - DNA, 19 bp, Artificial Sequence
  synthetic circulating small noncoding RNA (sncRNA) 5' transfer RNA (tRNA) half
aatccagcgatccgagttc

SEQ ID NO: 4655 - DNA, 31 bp, Artificial Sequence
  synthetic circulating small noncoding RNA (sncRNA) 5' transfer RNA (tRNA) half
ccaggcggcccgggttcgactcccggtgtgg

SEQ ID NO: 4656 - DNA, 35 bp, Artificial Sequence
  synthetic circulating small noncoding RNA (sncRNA) 5' transfer RNA (tRNA) half
gcgggagaccggggttcgattccccgacggggaga

SEQ ID NO: 4657 - DNA, 23 bp, Artificial Sequence
  synthetic circulating small noncoding RNA (sncRNA) 5' transfer RNA (tRNA) half
aggcgagaattctaccattgaac

SEQ ID NO: 4658 - DNA, 31 bp, Artificial Sequence
  synthetic circulating small noncoding RNA (sncRNA) 5' transfer RNA (tRNA) half
ttccctagtgtagtggttatcacgttcgcct

SEQ ID NO: 4659 - DNA, 16 bp, Artificial Sequence
  synthetic circulating small noncoding RNA (sncRNA) 5' transfer RNA (tRNA) half
ggtagagcatcagact

SEQ ID NO: 4660 - DNA, 18 bp, Artificial Sequence
  synthetic circulating small noncoding RNA (sncRNA) 5' transfer RNA (tRNA) half
tcaaatcccggacgagcc

SEQ ID NO: 4661 - DNA, 17 bp, Artificial Sequence
  synthetic circulating small noncoding RNA (sncRNA) 5' transfer RNA (tRNA) half
attccccgacggggaga

SEQ ID NO: 4662 - DNA, 12 bp, Artificial Sequence
  synthetic circulating small noncoding RNA (sncRNA) 5' transfer RNA (tRNA) half
cgggagtcgaac

SEQ ID NO: 4663 - DNA, 30 bp, Artificial Sequence
  synthetic circulating small noncoding RNA (sncRNA) 5' transfer RNA (tRNA) half
ccaatgcgctatccattgcgccacggagcc

SEQ ID NO: 4664 - DNA, 27 bp, Artificial Sequence
  synthetic circulating small noncoding RNA (sncRNA) 5' transfer RNA (tRNA) half
tggactctgaatccagcgatccgagtt

SEQ ID NO: 4665 - DNA, 22 bp, Artificial Sequence
  synthetic circulating small noncoding RNA (sncRNA) 5' transfer RNA (tRNA) half
ggttccaccgagatttgaactc

SEQ ID NO: 4666 - DNA, 12 bp, Artificial Sequence
  synthetic circulating small noncoding RNA (sncRNA) 5' transfer RNA (tRNA) half
ctccccgtcggg

SEQ ID NO: 4667 - DNA, 12 bp, Artificial Sequence
  synthetic circulating small noncoding RNA (sncRNA) 5' transfer RNA (tRNA) half
cgggacctctcg

SEQ ID NO: 4668 - DNA, 13 bp, Artificial Sequence
  synthetic circulating small noncoding RNA (sncRNA) 5' transfer RNA (tRNA) half
accggggacctct

SEQ ID NO: 4669 - DNA, 15 bp, Artificial Sequence
  synthetic circulating small noncoding RNA (sncRNA) 5' transfer RNA (tRNA) half
ccactgaaccaccaa

SEQ ID NO: 4670 - DNA, 23 bp, Artificial Sequence
  synthetic circulating small noncoding RNA (sncRNA) 5' transfer RNA (tRNA) half
gggggtgtagctcagtggtagag

SEQ ID NO: 4671 - DNA, 22 bp, Artificial Sequence
  synthetic circulating small noncoding RNA (sncRNA) 5' transfer RNA (tRNA) half
gttcaaatcccggacgagcccc

SEQ ID NO: 4672 - DNA, 37 bp, Artificial Sequence
  synthetic circulating small noncoding RNA (sncRNA) 5' transfer RNA (tRNA) half
tgtgaggcgaacgtgataaccactacactacggaaac

SEQ ID NO: 4673 - DNA, 28 bp, Artificial Sequence
  synthetic circulating small noncoding RNA (sncRNA) 5' transfer RNA (tRNA) half
gagattaagagtctcatgctctaccgac

SEQ ID NO: 4674 - DNA, 30 bp, Artificial Sequence
  synthetic circulating small noncoding RNA (sncRNA) 5' transfer RNA (tRNA) half
aaccaggaatcctaaccgctagaccatatg

SEQ ID NO: 4675 - DNA, 17 bp, Artificial Sequence
  synthetic circulating small noncoding RNA (sncRNA) 5' transfer RNA (tRNA) half
actcccggtatgggaac

SEQ ID NO: 4676 - DNA, 10 bp, Artificial Sequence
  synthetic circulating small noncoding RNA (sncRNA) 5' transfer RNA (tRNA) half
gccgactacg

SEQ ID NO: 4677 - DNA, 32 bp, Artificial Sequence
  synthetic circulating small noncoding RNA (sncRNA) 5' transfer RNA (tRNA) half
gaggcgaacgtgataaccactacactacggaa

SEQ ID NO: 4678 - DNA, 20 bp, Artificial Sequence
  synthetic circulating small noncoding RNA (sncRNA) 5' transfer RNA (tRNA) half
gattccggctcgaaggactt

SEQ ID NO: 4679 - DNA, 21 bp, Artificial Sequence
  synthetic circulating small noncoding RNA (sncRNA) 5' transfer RNA (tRNA) half
gtcagacgcgttatccattgc

SEQ ID NO: 4680 - DNA, 36 bp, Artificial Sequence
  synthetic circulating small noncoding RNA (sncRNA) 5' transfer RNA (tRNA) half
gaccccgacgtgacttgaacacgcaaccttctgatc

SEQ ID NO: 4681 - DNA, 11 bp, Artificial Sequence
  synthetic circulating small noncoding RNA (sncRNA) 5' transfer RNA (tRNA) half
aggattcggcg

SEQ ID NO: 4682 - DNA, 30 bp, Artificial Sequence
  synthetic circulating small noncoding RNA (sncRNA) 5' transfer RNA (tRNA) half
gtttccgcccggtttcgaaccggggacctt

SEQ ID NO: 4683 - DNA, 16 bp, Artificial Sequence
  synthetic circulating small noncoding RNA (sncRNA) 5' transfer RNA (tRNA) half
gccagtgccttatcca

SEQ ID NO: 4684 - DNA, 24 bp, Artificial Sequence
  synthetic circulating small noncoding RNA (sncRNA) 5' transfer RNA (tRNA) half
gcgccgaatcctaaccactagacc

SEQ ID NO: 4685 - DNA, 26 bp, Artificial Sequence
  synthetic circulating small noncoding RNA (sncRNA) 5' transfer RNA (tRNA) half
caggaatcctaaccgctagaccatat

SEQ ID NO: 4686 - DNA, 33 bp, Artificial Sequence
  synthetic circulating small noncoding RNA (sncRNA) 5' transfer RNA (tRNA) half
gccccagcgagatttgaactcgcgacccctggt

SEQ ID NO: 4687 - DNA, 23 bp, Artificial Sequence
  synthetic circulating small noncoding RNA (sncRNA) 5' transfer RNA (tRNA) half
aacccgggacctctcgcacccga

SEQ ID NO: 4688 - DNA, 27 bp, Artificial Sequence
  synthetic circulating small noncoding RNA (sncRNA) 5' transfer RNA (tRNA) half
cccacaccgggagtcgaacccgggccg

SEQ ID NO: 4689 - DNA, 18 bp, Artificial Sequence
  synthetic circulating small noncoding RNA (sncRNA) 5' transfer RNA (tRNA) half
tgttcccataccgggagt

SEQ ID NO: 4690 - DNA, 30 bp, Artificial Sequence
  synthetic circulating small noncoding RNA (sncRNA) 5' transfer RNA (tRNA) half
gcggcccgggttcgattcccggtcagggaa

SEQ ID NO: 4691 - DNA, 19 bp, Artificial Sequence
  synthetic circulating small noncoding RNA (sncRNA) 5' transfer RNA (tRNA) half
ggcgagaattctaccattg

SEQ ID NO: 4692 - DNA, 28 bp, Artificial Sequence
  synthetic circulating small noncoding RNA (sncRNA) 5' transfer RNA (tRNA) half
gcccggatagctcagtcggtagagcatc

SEQ ID NO: 4693 - DNA, 20 bp, Artificial Sequence
  synthetic circulating small noncoding RNA (sncRNA) 5' transfer RNA (tRNA) half
gcccgaacagggacttgaac

SEQ ID NO: 4694 - DNA, 15 bp, Artificial Sequence
  synthetic circulating small noncoding RNA (sncRNA) 5' transfer RNA (tRNA) half
ccccgtccgtgcctg

SEQ ID NO: 4695 - DNA, 19 bp, Artificial Sequence
  synthetic circulating small noncoding RNA (sncRNA) 5' transfer RNA (tRNA) half
acaacgcagagtactaacc

SEQ ID NO: 4696 - DNA, 23 bp, Artificial Sequence
  synthetic circulating small noncoding RNA (sncRNA) 5' transfer RNA (tRNA) half
aggtcccaccgagatttgaactc

SEQ ID NO: 4697 - DNA, 15 bp, Artificial Sequence
  synthetic circulating small noncoding RNA (sncRNA) 5' transfer RNA (tRNA) half
caggaatcctaaccg

SEQ ID NO: 4698 - DNA, 26 bp, Artificial Sequence
  synthetic circulating small noncoding RNA (sncRNA) 5' transfer RNA (tRNA) half
caccgggagtcgaacccgggccgcct

SEQ ID NO: 4699 - DNA, 23 bp, Artificial Sequence
  synthetic circulating small noncoding RNA (sncRNA) 5' transfer RNA (tRNA) half
aagcgagaatcatacccctagac

SEQ ID NO: 4700 - DNA, 24 bp, Artificial Sequence
  synthetic circulating small noncoding RNA (sncRNA) 5' transfer RNA (tRNA) half
ttgaactcggatcgctggattcag

SEQ ID NO: 4701 - DNA, 15 bp, Artificial Sequence
  synthetic circulating small noncoding RNA (sncRNA) 5' transfer RNA (tRNA) half
accgaggttgctgcg

SEQ ID NO: 4702 - DNA, 32 bp, Artificial Sequence
  synthetic circulating small noncoding RNA (sncRNA) 5' transfer RNA (tRNA) half
ttcccataccgggagtcgaacccgggccgcct

SEQ ID NO: 4703 - DNA, 17 bp, Artificial Sequence
  synthetic circulating small noncoding RNA (sncRNA) 5' transfer RNA (tRNA) half
cgctcggccacgctacc

SEQ ID NO: 4704 - DNA, 19 bp, Artificial Sequence
  synthetic circulating small noncoding RNA (sncRNA) 5' transfer RNA (tRNA) half
ccaaagcgagaatcatacc

SEQ ID NO: 4705 - DNA, 22 bp, Artificial Sequence
  synthetic circulating small noncoding RNA (sncRNA) 5' transfer RNA (tRNA) half
gtcgagccagccaggagtcgaa

SEQ ID NO: 4706 - DNA, 30 bp, Artificial Sequence
  synthetic circulating small noncoding RNA (sncRNA) 5' transfer RNA (tRNA) half
ttccgtagtgtagtggttatcacgctcgcc

SEQ ID NO: 4707 - DNA, 15 bp, Artificial Sequence
  synthetic circulating small noncoding RNA (sncRNA) 5' transfer RNA (tRNA) half
cgcagcgagcagggt

SEQ ID NO: 4708 - DNA, 22 bp, Artificial Sequence
  synthetic circulating small noncoding RNA (sncRNA) 5' transfer RNA (tRNA) half
aaccgggcggaaacaactttta

SEQ ID NO: 4709 - DNA, 37 bp, Artificial Sequence
  synthetic circulating small noncoding RNA (sncRNA) 5' transfer RNA (tRNA) half
gtgttcccacaccgggagtcgaacccgggccgcctgg

SEQ ID NO: 4710 - DNA, 32 bp, Artificial Sequence
  synthetic circulating small noncoding RNA (sncRNA) 5' transfer RNA (tRNA) half
ggattaagagtcccatgctctaccgactgagc

SEQ ID NO: 4711 - DNA, 24 bp, Artificial Sequence
  synthetic circulating small noncoding RNA (sncRNA) 5' transfer RNA (tRNA) half
gttcgattcccggccaatgcacga

SEQ ID NO: 4712 - DNA, 37 bp, Artificial Sequence
  synthetic circulating small noncoding RNA (sncRNA) 5' transfer RNA (tRNA) half
acgcgggagaccggggttcgattccccgacggggaga

SEQ ID NO: 4713 - DNA, 29 bp, Artificial Sequence
  synthetic circulating small noncoding RNA (sncRNA) 5' transfer RNA (tRNA) half
cgctggattcagagtccagagtgctaacc

SEQ ID NO: 4714 - DNA, 19 bp, Artificial Sequence
  synthetic circulating small noncoding RNA (sncRNA) 5' transfer RNA (tRNA) half
gtggttaggattcggcgct

SEQ ID NO: 4715 - DNA, 14 bp, Artificial Sequence
  synthetic circulating small noncoding RNA (sncRNA) 5' transfer RNA (tRNA) half
tagaccaacgagcc

SEQ ID NO: 4716 - DNA, 18 bp, Artificial Sequence
  synthetic circulating small noncoding RNA (sncRNA) 5' transfer RNA (tRNA) half
gagtccagagtgctaacc

SEQ ID NO: 4717 - DNA, 11 bp, Artificial Sequence
  synthetic circulating small noncoding RNA (sncRNA) 5' transfer RNA (tRNA) half
accgggcggaa

SEQ ID NO: 4718 - DNA, 38 bp, Artificial Sequence
  synthetic circulating small noncoding RNA (sncRNA) 5' transfer RNA (tRNA) half
acccaggcggcccgggttcgactcccggtgtgggaaac

SEQ ID NO: 4719 - DNA, 20 bp, Artificial Sequence
  synthetic circulating small noncoding RNA (sncRNA) 5' transfer RNA (tRNA) half
cagagtgctagccattacac

SEQ ID NO: 4720 - DNA, 22 bp, Artificial Sequence
  synthetic circulating small noncoding RNA (sncRNA) 5' transfer RNA (tRNA) half
ttcgactcccggtgtgggaaca

SEQ ID NO: 4721 - DNA, 16 bp, Artificial Sequence
  synthetic circulating small noncoding RNA (sncRNA) 5' transfer RNA (tRNA) half
gaagcgtgctgggccc

SEQ ID NO: 4722 - DNA, 32 bp, Artificial Sequence
  synthetic circulating small noncoding RNA (sncRNA) 5' transfer RNA (tRNA) half
gccagccaggagtcgaacctagaatcttctga

SEQ ID NO: 4723 - DNA, 24 bp, Artificial Sequence
  synthetic circulating small noncoding RNA (sncRNA) 5' transfer RNA (tRNA) half
gcggcccgggttcgactcccggtg

SEQ ID NO: 4724 - DNA, 25 bp, Artificial Sequence
  synthetic circulating small noncoding RNA (sncRNA) 5' transfer RNA (tRNA) half
ttggtctaggggtatgattctcgct

SEQ ID NO: 4725 - DNA, 37 bp, Artificial Sequence
  synthetic circulating small noncoding RNA (sncRNA) 5' transfer RNA (tRNA) half
ccggctagctcagtcggtagagcatgagactcttaat

SEQ ID NO: 4726 - DNA, 12 bp, Artificial Sequence
  synthetic circulating small noncoding RNA (sncRNA) 5' transfer RNA (tRNA) half
acccgcgacctt

SEQ ID NO: 4727 - DNA, 20 bp, Artificial Sequence
  synthetic circulating small noncoding RNA (sncRNA) 5' transfer RNA (tRNA) half
ggggaattagctcaaatggt

SEQ ID NO: 4728 - DNA, 18 bp, Artificial Sequence
  synthetic circulating small noncoding RNA (sncRNA) 5' transfer RNA (tRNA) half
atccccggcacctccact

SEQ ID NO: 4729 - DNA, 20 bp, Artificial Sequence
  synthetic circulating small noncoding RNA (sncRNA) 5' transfer RNA (tRNA) half
gcaggcgagaattctaccac

SEQ ID NO: 4730 - DNA, 24 bp, Artificial Sequence
  synthetic circulating small noncoding RNA (sncRNA) 5' transfer RNA (tRNA) half
gtgagagcgccgaatcctaaccac

SEQ ID NO: 4731 - DNA, 33 bp, Artificial Sequence
  synthetic circulating small noncoding RNA (sncRNA) 5' transfer RNA (tRNA) half
agaagattgcaggttcgagtcctgccgcggtcg

SEQ ID NO: 4732 - DNA, 20 bp, Artificial Sequence
  synthetic circulating small noncoding RNA (sncRNA) 5' transfer RNA (tRNA) half
ggttcgatccccggcatctc

SEQ ID NO: 4733 - DNA, 33 bp, Artificial Sequence
  synthetic circulating small noncoding RNA (sncRNA) 5' transfer RNA (tRNA) half
gggggcacccggatttgaaccagggacctcttg

SEQ ID NO: 4734 - DNA, 26 bp, Artificial Sequence
  synthetic circulating small noncoding RNA (sncRNA) 5' transfer RNA (tRNA) half
tgtgataaccactacactacggaaac

SEQ ID NO: 4735 - DNA, 10 bp, Artificial Sequence
  synthetic circulating small noncoding RNA (sncRNA) 5' transfer RNA (tRNA) half
ggccgggaat

SEQ ID NO: 4736 - DNA, 27 bp, Artificial Sequence
  synthetic circulating small noncoding RNA (sncRNA) 5' transfer RNA (tRNA) half
tatagctcagtggtagagcatttgact

SEQ ID NO: 4737 - DNA, 11 bp, Artificial Sequence
  synthetic circulating small noncoding RNA (sncRNA) 5' transfer RNA (tRNA) half
gggcctcccgc

SEQ ID NO: 4738 - DNA, 30 bp, Artificial Sequence
  synthetic circulating small noncoding RNA (sncRNA) 5' transfer RNA (tRNA) half
ttccctagtgtagtggttatcacgttcgcc

SEQ ID NO: 4739 - DNA, 27 bp, Artificial Sequence
  synthetic circulating small noncoding RNA (sncRNA) 5' transfer RNA (tRNA) half
cgtgatcgtatagtggttagtactctg

SEQ ID NO: 4740 - DNA, 33 bp, Artificial Sequence
  synthetic circulating small noncoding RNA (sncRNA) 5' transfer RNA (tRNA) half
acagagtggttcaattccacctttcgggcggga

SEQ ID NO: 4741 - DNA, 36 bp, Artificial Sequence
  synthetic circulating small noncoding RNA (sncRNA) 5' transfer RNA (tRNA) half
ccccctctgaggttcgaactcaggaccttcagatta

SEQ ID NO: 4742 - DNA, 34 bp, Artificial Sequence
  synthetic circulating small noncoding RNA (sncRNA) 5' transfer RNA (tRNA) half
caagaggtccccggttcaaatccgggtgccccct

SEQ ID NO: 4743 - DNA, 11 bp, Artificial Sequence
  synthetic circulating small noncoding RNA (sncRNA) 5' transfer RNA (tRNA) half
cgcccgaacag

SEQ ID NO: 4744 - DNA, 27 bp, Artificial Sequence
  synthetic circulating small noncoding RNA (sncRNA) 5' transfer RNA (tRNA) half
ctcggatcgctggattcagagtccaga

SEQ ID NO: 4745 - DNA, 16 bp, Artificial Sequence
  synthetic circulating small noncoding RNA (sncRNA) 5' transfer RNA (tRNA) half
caggcggggatactaa

SEQ ID NO: 4746 - DNA, 26 bp, Artificial Sequence
  synthetic circulating small noncoding RNA (sncRNA) 5' transfer RNA (tRNA) half
gagtcccatgctctaccgactgagct

SEQ ID NO: 4747 - DNA, 14 bp, Artificial Sequence
  synthetic circulating small noncoding RNA (sncRNA) 5' transfer RNA (tRNA) half
gcagtcaaatgctc

SEQ ID NO: 4748 - DNA, 28 bp, Artificial Sequence
  synthetic circulating small noncoding RNA (sncRNA) 5' transfer RNA (tRNA) half
gggggtatagctcagtggtagagcattt

SEQ ID NO: 4749 - DNA, 17 bp, Artificial Sequence
  synthetic circulating small noncoding RNA (sncRNA) 5' transfer RNA (tRNA) half
ggtatgattctcggttt

SEQ ID NO: 4750 - DNA, 14 bp, Artificial Sequence
  synthetic circulating small noncoding RNA (sncRNA) 5' transfer RNA (tRNA) half
acccgcgaccttgg

SEQ ID NO: 4751 - DNA, 36 bp, Artificial Sequence
  synthetic circulating small noncoding RNA (sncRNA) 5' transfer RNA (tRNA) half
accccgacgtgacttgaacacgcaaccttctgatct

SEQ ID NO: 4752 - DNA, 31 bp, Artificial Sequence
  synthetic circulating small noncoding RNA (sncRNA) 5' transfer RNA (tRNA) half
tccatcgccttaaccactcggccacgactac

SEQ ID NO: 4753 - DNA, 20 bp, Artificial Sequence
  synthetic circulating small noncoding RNA (sncRNA) 5' transfer RNA (tRNA) half
tcaaatcccggacgagcccc

SEQ ID NO: 4754 - DNA, 20 bp, Artificial Sequence
  synthetic circulating small noncoding RNA (sncRNA) 5' transfer RNA (tRNA) half
tcccataccgggagtcgaac

SEQ ID NO: 4755 - DNA, 36 bp, Artificial Sequence
  synthetic circulating small noncoding RNA (sncRNA) 5' transfer RNA (tRNA) half
tcttgcgacccgggttcgattcccgggcggcgcatg

SEQ ID NO: 4756 - DNA, 35 bp, Artificial Sequence
  synthetic circulating small noncoding RNA (sncRNA) 5' transfer RNA (tRNA) half
tcccataccgggagtcgaacccgggccgcctgggt

SEQ ID NO: 4757 - DNA, 18 bp, Artificial Sequence
  synthetic circulating small noncoding RNA (sncRNA) 5' transfer RNA (tRNA) half
tctcatgctctaccgact

SEQ ID NO: 4758 - DNA, 31 bp, Artificial Sequence
  synthetic circulating small noncoding RNA (sncRNA) 5' transfer RNA (tRNA) half
gtcaggatggccgagtggtctaaggcgccag

SEQ ID NO: 4759 - DNA, 14 bp, Artificial Sequence
  synthetic circulating small noncoding RNA (sncRNA) 5' transfer RNA (tRNA) half
gaatcgaaccccgg

SEQ ID NO: 4760 - DNA, 29 bp, Artificial Sequence
  synthetic circulating small noncoding RNA (sncRNA) 5' transfer RNA (tRNA) half
caggcggcccgggttcgactcccggtatg

SEQ ID NO: 4761 - DNA, 16 bp, Artificial Sequence
  synthetic circulating small noncoding RNA (sncRNA) 5' transfer RNA (tRNA) half
ggggaattagctcaaa

SEQ ID NO: 4762 - DNA, 26 bp, Artificial Sequence
  synthetic circulating small noncoding RNA (sncRNA) 5' transfer RNA (tRNA) half
gccgtgatcgtatagtggttagtact

SEQ ID NO: 4763 - DNA, 31 bp, Artificial Sequence
  synthetic circulating small noncoding RNA (sncRNA) 5' transfer RNA (tRNA) half
gcgatccgagttcaaatctcggtgggacctc

SEQ ID NO: 4764 - DNA, 26 bp, Artificial Sequence
  synthetic circulating small noncoding RNA (sncRNA) 5' transfer RNA (tRNA) half
gtgtaatggttagcactctggactct

SEQ ID NO: 4765 - DNA, 38 bp, Artificial Sequence
  synthetic circulating small noncoding RNA (sncRNA) 5' transfer RNA (tRNA) half
ctcggatcgctggattcagagtccagagtgctaaccat

SEQ ID NO: 4766 - DNA, 28 bp, Artificial Sequence
  synthetic circulating small noncoding RNA (sncRNA) 5' transfer RNA (tRNA) half
gggatactaaccactatactaacgagga

SEQ ID NO: 4767 - DNA, 12 bp, Artificial Sequence
  synthetic circulating small noncoding RNA (sncRNA) 5' transfer RNA (tRNA) half
gggggcacccgg

SEQ ID NO: 4768 - DNA, 14 bp, Artificial Sequence
  synthetic circulating small noncoding RNA (sncRNA) 5' transfer RNA (tRNA) half
aggtcccaccgaga

SEQ ID NO: 4769 - DNA, 14 bp, Artificial Sequence
  synthetic circulating small noncoding RNA (sncRNA) 5' transfer RNA (tRNA) half
gggccgcggcggtg

SEQ ID NO: 4770 - DNA, 35 bp, Artificial Sequence
  synthetic circulating small noncoding RNA (sncRNA) 5' transfer RNA (tRNA) half
tgcattggccgggaatcgaacccgggcctcccgcg

SEQ ID NO: 4771 - DNA, 37 bp, Artificial Sequence
  synthetic circulating small noncoding RNA (sncRNA) 5' transfer RNA (tRNA) half
cgggccgcggcggtgagagcgccgaatcctaaccact

SEQ ID NO: 4772 - DNA, 35 bp, Artificial Sequence
  synthetic circulating small noncoding RNA (sncRNA) 5' transfer RNA (tRNA) half
tgccgtgactcggattcgaaccgaggttgctgcgg

SEQ ID NO: 4773 - DNA, 23 bp, Artificial Sequence
  synthetic circulating small noncoding RNA (sncRNA) 5' transfer RNA (tRNA) half
ctagcggttaggattcctggttt

SEQ ID NO: 4774 - DNA, 20 bp, Artificial Sequence
  synthetic circulating small noncoding RNA (sncRNA) 5' transfer RNA (tRNA) half
agccactagaccaccaggga

SEQ ID NO: 4775 - DNA, 35 bp, Artificial Sequence
  synthetic circulating small noncoding RNA (sncRNA) 5' transfer RNA (tRNA) half
cgggaggcccgggttcgattcccggccaatgcacg

SEQ ID NO: 4776 - DNA, 13 bp, Artificial Sequence
  synthetic circulating small noncoding RNA (sncRNA) 5' transfer RNA (tRNA) half
gcgcccgaacagg

SEQ ID NO: 4777 - DNA, 18 bp, Artificial Sequence
  synthetic circulating small noncoding RNA (sncRNA) 5' transfer RNA (tRNA) half
ggccccagcgagatttga

SEQ ID NO: 4778 - DNA, 27 bp, Artificial Sequence
  synthetic circulating small noncoding RNA (sncRNA) 5' transfer RNA (tRNA) half
tgggtggttcagtggtagaattctcgc

SEQ ID NO: 4779 - DNA, 28 bp, Artificial Sequence
  synthetic circulating small noncoding RNA (sncRNA) 5' transfer RNA (tRNA) half
cgctggtgtagtggtatcatgcaagatt

SEQ ID NO: 4780 - DNA, 33 bp, Artificial Sequence
  synthetic circulating small noncoding RNA (sncRNA) 5' transfer RNA (tRNA) half
aacgcagcgccttagaccgctcggccatcctga

SEQ ID NO: 4781 - DNA, 20 bp, Artificial Sequence
  synthetic circulating small noncoding RNA (sncRNA) 5' transfer RNA (tRNA) half
ggttcaaatcccggacgagc

SEQ ID NO: 4782 - DNA, 15 bp, Artificial Sequence
  synthetic circulating small noncoding RNA (sncRNA) 5' transfer RNA (tRNA) half
cccagcacgcttccg

SEQ ID NO: 4783 - DNA, 31 bp, Artificial Sequence
  synthetic circulating small noncoding RNA (sncRNA) 5' transfer RNA (tRNA) half
gcccaacgtggggctcgaacccacgaccctg

SEQ ID NO: 4784 - DNA, 30 bp, Artificial Sequence
  synthetic circulating small noncoding RNA (sncRNA) 5' transfer RNA (tRNA) half
aaaccaggaatcctaaccgctagaccatgt

SEQ ID NO: 4785 - DNA, 14 bp, Artificial Sequence
  synthetic circulating small noncoding RNA (sncRNA) 5' transfer RNA (tRNA) half
tctcgcctgccacg

SEQ ID NO: 4786 - DNA, 33 bp, Artificial Sequence
  synthetic circulating small noncoding RNA (sncRNA) 5' transfer RNA (tRNA) half
tccctgggtgggctcgaaccaccaacctttcgg

SEQ ID NO: 4787 - DNA, 30 bp, Artificial Sequence
  synthetic circulating small noncoding RNA (sncRNA) 5' transfer RNA (tRNA) half
tcccataccgggagtcgaacccgggccgcc

SEQ ID NO: 4788 - DNA, 32 bp, Artificial Sequence
  synthetic circulating small noncoding RNA (sncRNA) 5' transfer RNA (tRNA) half
tagaattctcgcctgccacgcgggaggcccgg

SEQ ID NO: 4789 - DNA, 15 bp, Artificial Sequence
  synthetic circulating small noncoding RNA (sncRNA) 5' transfer RNA (tRNA) half
gggcccagcacgctt

SEQ ID NO: 4790 - DNA, 18 bp, Artificial Sequence
  synthetic circulating small noncoding RNA (sncRNA) 5' transfer RNA (tRNA) half
aacccggaacctttgaat

SEQ ID NO: 4791 - DNA, 17 bp, Artificial Sequence
  synthetic circulating small noncoding RNA (sncRNA) 5' transfer RNA (tRNA) half
aaccgggcggaaacatt

SEQ ID NO: 4792 - DNA, 21 bp, Artificial Sequence
  synthetic circulating small noncoding RNA (sncRNA) 5' transfer RNA (tRNA) half
gcctccccgtcggggaatcga

SEQ ID NO: 4793 - DNA, 21 bp, Artificial Sequence
  synthetic circulating small noncoding RNA (sncRNA) 5' transfer RNA (tRNA) half
acagacgacgaggatgggatt

SEQ ID NO: 4794 - DNA, 33 bp, Artificial Sequence
  synthetic circulating small noncoding RNA (sncRNA) 5' transfer RNA (tRNA) half
gtgcattggtggttcaatggtagaattctcgcc

SEQ ID NO: 4795 - DNA, 25 bp, Artificial Sequence
  synthetic circulating small noncoding RNA (sncRNA) 5' transfer RNA (tRNA) half
tgctctaccgactgagctagccggg

SEQ ID NO: 4796 - DNA, 19 bp, Artificial Sequence
  synthetic circulating small noncoding RNA (sncRNA) 5' transfer RNA (tRNA) half
tcgaaccccgtccgtgcct

SEQ ID NO: 4797 - DNA, 22 bp, Artificial Sequence
  synthetic circulating small noncoding RNA (sncRNA) 5' transfer RNA (tRNA) half
ctgtagcagaggatggtttcga

SEQ ID NO: 4798 - DNA, 17 bp, Artificial Sequence
  synthetic circulating small noncoding RNA (sncRNA) 5' transfer RNA (tRNA) half
tgtgtcagaagtgggat

SEQ ID NO: 4799 - DNA, 34 bp, Artificial Sequence
  synthetic circulating small noncoding RNA (sncRNA) 5' transfer RNA (tRNA) half
ggcgaatgtgataaccactacactacggaaacac

SEQ ID NO: 4800 - DNA, 24 bp, Artificial Sequence
  synthetic circulating small noncoding RNA (sncRNA) 5' transfer RNA (tRNA) half
gtggtctagtggttaggattcggc

SEQ ID NO: 4801 - DNA, 19 bp, Artificial Sequence
  synthetic circulating small noncoding RNA (sncRNA) 5' transfer RNA (tRNA) half
agaccgctcggccacgcta

SEQ ID NO: 4802 - DNA, 30 bp, Artificial Sequence
  synthetic circulating small noncoding RNA (sncRNA) 5' transfer RNA (tRNA) half
cgcccgaacagggacttgaaccctggaccc

SEQ ID NO: 4803 - DNA, 27 bp, Artificial Sequence
  synthetic circulating small noncoding RNA (sncRNA) 5' transfer RNA (tRNA) half
cgtcggggaatcgaaccccggtctccc

SEQ ID NO: 4804 - DNA, 13 bp, Artificial Sequence
  synthetic circulating small noncoding RNA (sncRNA) 5' transfer RNA (tRNA) half
gaaccagggacct

SEQ ID NO: 4805 - DNA, 37 bp, Artificial Sequence
  synthetic circulating small noncoding RNA (sncRNA) 5' transfer RNA (tRNA) half
gcgggagaccggggttcgattccccgacggggagtct

SEQ ID NO: 4806 - DNA, 14 bp, Artificial Sequence
  synthetic circulating small noncoding RNA (sncRNA) 5' transfer RNA (tRNA) half
tccctgaccgggaa

SEQ ID NO: 4807 - DNA, 34 bp, Artificial Sequence
  synthetic circulating small noncoding RNA (sncRNA) 5' transfer RNA (tRNA) half
acgcgggaggcccgggttcggttcccggccaatg

SEQ ID NO: 4808 - DNA, 10 bp, Artificial Sequence
  synthetic circulating small noncoding RNA (sncRNA) 5' transfer RNA (tRNA) half
cggacgagcc

SEQ ID NO: 4809 - DNA, 26 bp, Artificial Sequence
  synthetic circulating small noncoding RNA (sncRNA) 5' transfer RNA (tRNA) half
tgggttatgggcccagcacgcttccg

SEQ ID NO: 4810 - DNA, 12 bp, Artificial Sequence
  synthetic circulating small noncoding RNA (sncRNA) 5' transfer RNA (tRNA) half
tctcccgcgtga

SEQ ID NO: 4811 - DNA, 32 bp, Artificial Sequence
  synthetic circulating small noncoding RNA (sncRNA) 5' transfer RNA (tRNA) half
aaaccaggaatcctaaccgctagaccatgtgg

SEQ ID NO: 4812 - DNA, 15 bp, Artificial Sequence
  synthetic circulating small noncoding RNA (sncRNA) 5' transfer RNA (tRNA) half
cgggaggcccgggtt

SEQ ID NO: 4813 - DNA, 24 bp, Artificial Sequence
  synthetic circulating small noncoding RNA (sncRNA) 5' transfer RNA (tRNA) half
gggttcgattcccggtcagggaaa

SEQ ID NO: 4814 - DNA, 25 bp, Artificial Sequence
  synthetic circulating small noncoding RNA (sncRNA) 5' transfer RNA (tRNA) half
aacgcagagtactaaccactatacg

SEQ ID NO: 4815 - DNA, 34 bp, Artificial Sequence
  synthetic circulating small noncoding RNA (sncRNA) 5' transfer RNA (tRNA) half
gtcaaatgctctaccactgagctataccccctct

SEQ ID NO: 4816 - DNA, 34 bp, Artificial Sequence
  synthetic circulating small noncoding RNA (sncRNA) 5' transfer RNA (tRNA) half
gcattggtagttcaatggtagaattctcgcctcc

SEQ ID NO: 4817 - DNA, 15 bp, Artificial Sequence
  synthetic circulating small noncoding RNA (sncRNA) 5' transfer RNA (tRNA) half
tcgacgaggatggga

SEQ ID NO: 4818 - DNA, 10 bp, Artificial Sequence
  synthetic circulating small noncoding RNA (sncRNA) 5' transfer RNA (tRNA) half
gctcgtccgg

SEQ ID NO: 4819 - DNA, 27 bp, Artificial Sequence
  synthetic circulating small noncoding RNA (sncRNA) 5' transfer RNA (tRNA) half
gcaggcgagaattctaccactgaacca

SEQ ID NO: 4820 - DNA, 13 bp, Artificial Sequence
  synthetic circulating small noncoding RNA (sncRNA) 5' transfer RNA (tRNA) half
aagatcgcgggtt

SEQ ID NO: 4821 - DNA, 37 bp, Artificial Sequence
  synthetic circulating small noncoding RNA (sncRNA) 5' transfer RNA (tRNA) half
ctcaaccacgaagggattcgaaccctcaatcttctga

SEQ ID NO: 4822 - DNA, 17 bp, Artificial Sequence
  synthetic circulating small noncoding RNA (sncRNA) 5' transfer RNA (tRNA) half
ccaggaatcctaaccgc

SEQ ID NO: 4823 - DNA, 37 bp, Artificial Sequence
  synthetic circulating small noncoding RNA (sncRNA) 5' transfer RNA (tRNA) half
tgttcccataccgggagtcgaacccgggccgcctggg

SEQ ID NO: 4824 - DNA, 19 bp, Artificial Sequence
  synthetic circulating small noncoding RNA (sncRNA) 5' transfer RNA (tRNA) half
gggacctctcgcacccaaa

SEQ ID NO: 4825 - DNA, 16 bp, Artificial Sequence
  synthetic circulating small noncoding RNA (sncRNA) 5' transfer RNA (tRNA) half
ttccctgaccgggaat

SEQ ID NO: 4826 - DNA, 27 bp, Artificial Sequence
  synthetic circulating small noncoding RNA (sncRNA) 5' transfer RNA (tRNA) half
gcccaacgtggggctcgaacccacgac

SEQ ID NO: 4827 - DNA, 28 bp, Artificial Sequence
  synthetic circulating small noncoding RNA (sncRNA) 5' transfer RNA (tRNA) half
gggggtgtagctcagtggtagagcgcat

SEQ ID NO: 4828 - DNA, 22 bp, Artificial Sequence
  synthetic circulating small noncoding RNA (sncRNA) 5' transfer RNA (tRNA) half
actcggatcgctggattcagag

SEQ ID NO: 4829 - DNA, 13 bp, Artificial Sequence
  synthetic circulating small noncoding RNA (sncRNA) 5' transfer RNA (tRNA) half
tcggccacgacta

SEQ ID NO: 4830 - DNA, 20 bp, Artificial Sequence
  synthetic circulating small noncoding RNA (sncRNA) 5' transfer RNA (tRNA) half
cattcttgcgacccgggttc

SEQ ID NO: 4831 - DNA, 28 bp, Artificial Sequence
  synthetic circulating small noncoding RNA (sncRNA) 5' transfer RNA (tRNA) half
ggggatgtagctcagtggtagagcacat

SEQ ID NO: 4832 - DNA, 13 bp, Artificial Sequence
  synthetic circulating small noncoding RNA (sncRNA) 5' transfer RNA (tRNA) half
tctcgcctgccac

SEQ ID NO: 4833 - DNA, 14 bp, Artificial Sequence
  synthetic circulating small noncoding RNA (sncRNA) 5' transfer RNA (tRNA) half
cgggagaccggggt

SEQ ID NO: 4834 - DNA, 18 bp, Artificial Sequence
  synthetic circulating small noncoding RNA (sncRNA) 5' transfer RNA (tRNA) half
agtggttagtactctgcg

SEQ ID NO: 4835 - DNA, 32 bp, Artificial Sequence
  synthetic circulating small noncoding RNA (sncRNA) 5' transfer RNA (tRNA) half
tccctgggtgggctcgaaccaccaacctttcg

SEQ ID NO: 4836 - DNA, 10 bp, Artificial Sequence
  synthetic circulating small noncoding RNA (sncRNA) 5' transfer RNA (tRNA) half
ggcccgtacg

SEQ ID NO: 4837 - DNA, 30 bp, Artificial Sequence
  synthetic circulating small noncoding RNA (sncRNA) 5' transfer RNA (tRNA) half
ggttccaccgagatttgaactcggatcgct

SEQ ID NO: 4838 - DNA, 17 bp, Artificial Sequence
  synthetic circulating small noncoding RNA (sncRNA) 5' transfer RNA (tRNA) half
gtttccgtagtgtagtg

SEQ ID NO: 4839 - DNA, 17 bp, Artificial Sequence
  synthetic circulating small noncoding RNA (sncRNA) 5' transfer RNA (tRNA) half
ggcgaacgtgataacca

SEQ ID NO: 4840 - DNA, 22 bp, Artificial Sequence
  synthetic circulating small noncoding RNA (sncRNA) 5' transfer RNA (tRNA) half
ctacccactgagctatctgggc

SEQ ID NO: 4841 - DNA, 31 bp, Artificial Sequence
  synthetic circulating small noncoding RNA (sncRNA) 5' transfer RNA (tRNA) half
ccaggcggcccgggttcgactcccggtatgg

SEQ ID NO: 4842 - DNA, 26 bp, Artificial Sequence
  synthetic circulating small noncoding RNA (sncRNA) 5' transfer RNA (tRNA) half
gatgctctaccgactgagctatccgg

SEQ ID NO: 4843 - DNA, 31 bp, Artificial Sequence
  synthetic circulating small noncoding RNA (sncRNA) 5' transfer RNA (tRNA) half
tgttcccataccgggagtcgaacccgggccg

SEQ ID NO: 4844 - DNA, 18 bp, Artificial Sequence
  synthetic circulating small noncoding RNA (sncRNA) 5' transfer RNA (tRNA) half
cggtctcccgcgtgacag

SEQ ID NO: 4845 - DNA, 36 bp, Artificial Sequence
  synthetic circulating small noncoding RNA (sncRNA) 5' transfer RNA (tRNA) half
acaggagatcctgggttcgaatcccagcggggcctt

SEQ ID NO: 4846 - DNA, 33 bp, Artificial Sequence
  synthetic circulating small noncoding RNA (sncRNA) 5' transfer RNA (tRNA) half
tctgagggtccagggttcaagtccctgttcggg

SEQ ID NO: 4847 - DNA, 13 bp, Artificial Sequence
  synthetic circulating small noncoding RNA (sncRNA) 5' transfer RNA (tRNA) half
cccggtcagggaa

SEQ ID NO: 4848 - DNA, 17 bp, Artificial Sequence
  synthetic circulating small noncoding RNA (sncRNA) 5' transfer RNA (tRNA) half
cgtatggaggcgtgggt

SEQ ID NO: 4849 - DNA, 16 bp, Artificial Sequence
  synthetic circulating small noncoding RNA (sncRNA) 5' transfer RNA (tRNA) half
accaggaatcctaacc

SEQ ID NO: 4850 - DNA, 30 bp, Artificial Sequence
  synthetic circulating small noncoding RNA (sncRNA) 5' transfer RNA (tRNA) half
ctgatgctctaccgactgagctatccaggc

SEQ ID NO: 4851 - DNA, 26 bp, Artificial Sequence
  synthetic circulating small noncoding RNA (sncRNA) 5' transfer RNA (tRNA) half
gctagctcagtcggtagagcatgaga

SEQ ID NO: 4852 - DNA, 12 bp, Artificial Sequence
  synthetic circulating small noncoding RNA (sncRNA) 5' transfer RNA (tRNA) half
ctcggccatcct

SEQ ID NO: 4853 - DNA, 25 bp, Artificial Sequence
  synthetic circulating small noncoding RNA (sncRNA) 5' transfer RNA (tRNA) half
gtggtctagtggttaggattcggcg

SEQ ID NO: 4854 - DNA, 31 bp, Artificial Sequence
  synthetic circulating small noncoding RNA (sncRNA) 5' transfer RNA (tRNA) half
gtcagacgcgctaccgttgcgccacgaggcc

SEQ ID NO: 4855 - DNA, 18 bp, Artificial Sequence
  synthetic circulating small noncoding RNA (sncRNA) 5' transfer RNA (tRNA) half
gacgaggatgggattcga

SEQ ID NO: 4856 - DNA, 26 bp, Artificial Sequence
  synthetic circulating small noncoding RNA (sncRNA) 5' transfer RNA (tRNA) half
agaatcatacccctagaccaacgagc

SEQ ID NO: 4857 - DNA, 33 bp, Artificial Sequence
  synthetic circulating small noncoding RNA (sncRNA) 5' transfer RNA (tRNA) half
gcgccgaatcctagccactagaccaccagggac

SEQ ID NO: 4858 - DNA, 33 bp, Artificial Sequence
  synthetic circulating small noncoding RNA (sncRNA) 5' transfer RNA (tRNA) half
cccgtcggggaatcgaaccccggtctcccgcgt

SEQ ID NO: 4859 - DNA, 23 bp, Artificial Sequence
  synthetic circulating small noncoding RNA (sncRNA) 5' transfer RNA (tRNA) half
tggtctaggggtatgattctcgc

SEQ ID NO: 4860 - DNA, 21 bp, Artificial Sequence
  synthetic circulating small noncoding RNA (sncRNA) 5' transfer RNA (tRNA) half
cgggttcgattcccgggcggc

SEQ ID NO: 4861 - DNA, 16 bp, Artificial Sequence
  synthetic circulating small noncoding RNA (sncRNA) 5' transfer RNA (tRNA) half
agggctcgtccgggat

SEQ ID NO: 4862 - DNA, 18 bp, Artificial Sequence
  synthetic circulating small noncoding RNA (sncRNA) 5' transfer RNA (tRNA) half
aggcgagaattctaccat

SEQ ID NO: 4863 - DNA, 33 bp, Artificial Sequence
  synthetic circulating small noncoding RNA (sncRNA) 5' transfer RNA (tRNA) half
ggcgagaattctaccactgaaccaccaatgcga

SEQ ID NO: 4864 - DNA, 31 bp, Artificial Sequence
  synthetic circulating small noncoding RNA (sncRNA) 5' transfer RNA (tRNA) half
gaaggttgcgtgttcaaatcacgtcggggtc

SEQ ID NO: 4865 - DNA, 22 bp, Artificial Sequence
  synthetic circulating small noncoding RNA (sncRNA) 5' transfer RNA (tRNA) half
cttagaccgctcggccatcctg

SEQ ID NO: 4866 - DNA, 27 bp, Artificial Sequence
  synthetic circulating small noncoding RNA (sncRNA) 5' transfer RNA (tRNA) half
ccggctagctcagtcggtagagcatga

SEQ ID NO: 4867 - DNA, 16 bp, Artificial Sequence
  synthetic circulating small noncoding RNA (sncRNA) 5' transfer RNA (tRNA) half
accggggacctctcgc

SEQ ID NO: 4868 - DNA, 24 bp, Artificial Sequence
  synthetic circulating small noncoding RNA (sncRNA) 5' transfer RNA (tRNA) half
tgctctaccgactgagctatccgg

SEQ ID NO: 4869 - DNA, 19 bp, Artificial Sequence
  synthetic circulating small noncoding RNA (sncRNA) 5' transfer RNA (tRNA) half
tagcggttaggattcctgg

SEQ ID NO: 4870 - DNA, 22 bp, Artificial Sequence
  synthetic circulating small noncoding RNA (sncRNA) 5' transfer RNA (tRNA) half
agtggtagaattctcgcctgcc

SEQ ID NO: 4871 - DNA, 32 bp, Artificial Sequence
  synthetic circulating small noncoding RNA (sncRNA) 5' transfer RNA (tRNA) half
ttggccgggaatcgaacccgggcctcccgcgt

SEQ ID NO: 4872 - DNA, 22 bp, Artificial Sequence
  synthetic circulating small noncoding RNA (sncRNA) 5' transfer RNA (tRNA) half
tagaccactcggccatcctgac

SEQ ID NO: 4873 - DNA, 37 bp, Artificial Sequence
  synthetic circulating small noncoding RNA (sncRNA) 5' transfer RNA (tRNA) half
gatgccccgtgtgaggatcgaactcacgaccttcaga

SEQ ID NO: 4874 - DNA, 17 bp, Artificial Sequence
  synthetic circulating small noncoding RNA (sncRNA) 5' transfer RNA (tRNA) half
ggggttagtactctgcg

SEQ ID NO: 4875 - DNA, 17 bp, Artificial Sequence
  synthetic circulating small noncoding RNA (sncRNA) 5' transfer RNA (tRNA) half
agatgccggggatcgaa

SEQ ID NO: 4876 - DNA, 34 bp, Artificial Sequence
  synthetic circulating small noncoding RNA (sncRNA) 5' transfer RNA (tRNA) half
tcagaagattccaggttcgactcctggctggctc

SEQ ID NO: 4877 - DNA, 20 bp, Artificial Sequence
  synthetic circulating small noncoding RNA (sncRNA) 5' transfer RNA (tRNA) half
gttcaaatctcgctggggcc

SEQ ID NO: 4878 - DNA, 37 bp, Artificial Sequence
  synthetic circulating small noncoding RNA (sncRNA) 5' transfer RNA (tRNA) half
gtggcaggcgagaattctaccactgaaccaccaatgc

SEQ ID NO: 4879 - DNA, 19 bp, Artificial Sequence
  synthetic circulating small noncoding RNA (sncRNA) 5' transfer RNA (tRNA) half
cagagtactaaccactata

SEQ ID NO: 4880 - DNA, 32 bp, Artificial Sequence
  synthetic circulating small noncoding RNA (sncRNA) 5' transfer RNA (tRNA) half
aagtgagaatcatacccctagaccaacgagcc

SEQ ID NO: 4881 - DNA, 14 bp, Artificial Sequence
  synthetic circulating small noncoding RNA (sncRNA) 5' transfer RNA (tRNA) half
atctcggtgggacc

SEQ ID NO: 4882 - DNA, 18 bp, Artificial Sequence
  synthetic circulating small noncoding RNA (sncRNA) 5' transfer RNA (tRNA) half
gactcccggtgtgggaac

SEQ ID NO: 4883 - DNA, 40 bp, Artificial Sequence
  synthetic circulating small noncoding RNA (sncRNA) 5' transfer RNA (tRNA) half
caccgccgcggcccgggttcgattcccggtcagggaagca

SEQ ID NO: 4884 - DNA, 24 bp, Artificial Sequence
  synthetic circulating small noncoding RNA (sncRNA) 5' transfer RNA (tRNA) half
gcgagaatcatacccctagaccaa

SEQ ID NO: 4885 - DNA, 20 bp, Artificial Sequence
  synthetic circulating small noncoding RNA (sncRNA) 5' transfer RNA (tRNA) half
accgggcggaaacattactt

SEQ ID NO: 4886 - DNA, 37 bp, Artificial Sequence
  synthetic circulating small noncoding RNA (sncRNA) 5' transfer RNA (tRNA) half
aagcgactctggtgggactcgaacccacaacctttga

SEQ ID NO: 4887 - DNA, 11 bp, Artificial Sequence
  synthetic circulating small noncoding RNA (sncRNA) 5' transfer RNA (tRNA) half
tcacgttcgcc

SEQ ID NO: 4888 - DNA, 30 bp, Artificial Sequence
  synthetic circulating small noncoding RNA (sncRNA) 5' transfer RNA (tRNA) half
tgcgacccgggttcgattcccgggcggcgc

SEQ ID NO: 4889 - DNA, 33 bp, Artificial Sequence
  synthetic circulating small noncoding RNA (sncRNA) 5' transfer RNA (tRNA) half
aaggtcctgggttcgagccccagtggaaccacg

SEQ ID NO: 4890 - DNA, 28 bp, Artificial Sequence
  synthetic circulating small noncoding RNA (sncRNA) 5' transfer RNA (tRNA) half
tagcgcccgaacagggacttgaaccctg

SEQ ID NO: 4891 - DNA, 22 bp, Artificial Sequence
  synthetic circulating small noncoding RNA (sncRNA) 5' transfer RNA (tRNA) half
tccctggtggtctagtggttag

SEQ ID NO: 4892 - DNA, 32 bp, Artificial Sequence
  synthetic circulating small noncoding RNA (sncRNA) 5' transfer RNA (tRNA) half
ggtagcgtggccgagcggtctaaggcgctgga

SEQ ID NO: 4893 - DNA, 25 bp, Artificial Sequence
  synthetic circulating small noncoding RNA (sncRNA) 5' transfer RNA (tRNA) half
gggttcgactcccggtatgggaaca

SEQ ID NO: 4894 - DNA, 9 bp, Artificial Sequence
  synthetic circulating small noncoding RNA (sncRNA) 5' transfer RNA (tRNA) half
agtcacggc

SEQ ID NO: 4895 - DNA, 31 bp, Artificial Sequence
  synthetic circulating small noncoding RNA (sncRNA) 5' transfer RNA (tRNA) half
gggattaagagtcccatgctctaccgactga

SEQ ID NO: 4896 - DNA, 11 bp, Artificial Sequence
  synthetic circulating small noncoding RNA (sncRNA) 5' transfer RNA (tRNA) half
cgagccagcca

SEQ ID NO: 4897 - DNA, 32 bp, Artificial Sequence
  synthetic circulating small noncoding RNA (sncRNA) 5' transfer RNA (tRNA) half
ggtagtgtggccgagcggtctaaggcgctgga

SEQ ID NO: 4898 - DNA, 27 bp, Artificial Sequence
  synthetic circulating small noncoding RNA (sncRNA) 5' transfer RNA (tRNA) half
gtttccgtagtgtagtggttatcacgt

SEQ ID NO: 4899 - DNA, 32 bp, Artificial Sequence
  synthetic circulating small noncoding RNA (sncRNA) 5' transfer RNA (tRNA) half
ctcgtccgggatttgaacccgggacctctcgc

SEQ ID NO: 4900 - DNA, 18 bp, Artificial Sequence
  synthetic circulating small noncoding RNA (sncRNA) 5' transfer RNA (tRNA) half
atagctcagtcggtagag

SEQ ID NO: 4901 - DNA, 38 bp, Artificial Sequence
  synthetic circulating small noncoding RNA (sncRNA) 5' transfer RNA (tRNA) half
ctgttcccataccgggagtcgaacccgggccgcctggg

SEQ ID NO: 4902 - DNA, 19 bp, Artificial Sequence
  synthetic circulating small noncoding RNA (sncRNA) 5' transfer RNA (tRNA) half
cgactcccggtatgggaac

SEQ ID NO: 4903 - DNA, 11 bp, Artificial Sequence
  synthetic circulating small noncoding RNA (sncRNA) 5' transfer RNA (tRNA) half
gagtcgaaccc

SEQ ID NO: 4904 - DNA, 31 bp, Artificial Sequence
  synthetic circulating small noncoding RNA (sncRNA) 5' transfer RNA (tRNA) half
ccacatggtctagcggttaggattcctggtt

SEQ ID NO: 4905 - DNA, 30 bp, Artificial Sequence
  synthetic circulating small noncoding RNA (sncRNA) 5' transfer RNA (tRNA) half
tcccatgctctaccgactgagctagccggg

SEQ ID NO: 4906 - DNA, 39 bp, Artificial Sequence
  synthetic circulating small noncoding RNA (sncRNA) 5' transfer RNA (tRNA) half
gtttccgtagtgtagtggttatcacgttcgcctcacacg

SEQ ID NO: 4907 - DNA, 24 bp, Artificial Sequence
  synthetic circulating small noncoding RNA (sncRNA) 5' transfer RNA (tRNA) half
ctctaccatttgagctaatccccc

SEQ ID NO: 4908 - DNA, 34 bp, Artificial Sequence
  synthetic circulating small noncoding RNA (sncRNA) 5' transfer RNA (tRNA) half
accgaagatcgcgggttcgaaccccgtccgtgcc

SEQ ID NO: 4909 - DNA, 31 bp, Artificial Sequence
  synthetic circulating small noncoding RNA (sncRNA) 5' transfer RNA (tRNA) half
gccgtgactcggattcgaaccgaggttgctg

SEQ ID NO: 4910 - DNA, 20 bp, Artificial Sequence
  synthetic circulating small noncoding RNA (sncRNA) 5' transfer RNA (tRNA) half
ggcggtgagagcgccgaatc

SEQ ID NO: 4911 - DNA, 27 bp, Artificial Sequence
  synthetic circulating small noncoding RNA (sncRNA) 5' transfer RNA (tRNA) half
cgcccaacgtggggctcgaacccacga

SEQ ID NO: 4912 - DNA, 21 bp, Artificial Sequence
  synthetic circulating small noncoding RNA (sncRNA) 5' transfer RNA (tRNA) half
agtccagagtgctaaccatta

SEQ ID NO: 4913 - DNA, 16 bp, Artificial Sequence
  synthetic circulating small noncoding RNA (sncRNA) 5' transfer RNA (tRNA) half
ggcggggatactaacc

SEQ ID NO: 4914 - DNA, 32 bp, Artificial Sequence
  synthetic circulating small noncoding RNA (sncRNA) 5' transfer RNA (tRNA) half
tgagggtccagggttcaagtccctgttcgggc

SEQ ID NO: 4915 - DNA, 12 bp, Artificial Sequence
  synthetic circulating small noncoding RNA (sncRNA) 5' transfer RNA (tRNA) half
tagaccgctcgg

SEQ ID NO: 4916 - DNA, 15 bp, Artificial Sequence
  synthetic circulating small noncoding RNA (sncRNA) 5' transfer RNA (tRNA) half
aggtcccaccgagat

SEQ ID NO: 4917 - DNA, 13 bp, Artificial Sequence
  synthetic circulating small noncoding RNA (sncRNA) 5' transfer RNA (tRNA) half
ggggaattagctc

SEQ ID NO: 4918 - DNA, 31 bp, Artificial Sequence
  synthetic circulating small noncoding RNA (sncRNA) 5' transfer RNA (tRNA) half
ggggaattagctcaaatggtagagcgctcgc

SEQ ID NO: 4919 - DNA, 19 bp, Artificial Sequence
  synthetic circulating small noncoding RNA (sncRNA) 5' transfer RNA (tRNA) half
cggatcgctggattcagag

SEQ ID NO: 4920 - DNA, 16 bp, Artificial Sequence
  synthetic circulating small noncoding RNA (sncRNA) 5' transfer RNA (tRNA) half
tcccggtatgggaaca

SEQ ID NO: 4921 - DNA, 29 bp, Artificial Sequence
  synthetic circulating small noncoding RNA (sncRNA) 5' transfer RNA (tRNA) half
ggccgggaatcgaacccgggtcaactgct

SEQ ID NO: 4922 - DNA, 33 bp, Artificial Sequence
  synthetic circulating small noncoding RNA (sncRNA) 5' transfer RNA (tRNA) half
ggatgatcctcagtggtctggggtgcaggcttc

SEQ ID NO: 4923 - DNA, 29 bp, Artificial Sequence
  synthetic circulating small noncoding RNA (sncRNA) 5' transfer RNA (tRNA) half
gcattggtagttcaatggtagaattctcg

SEQ ID NO: 4924 - DNA, 33 bp, Artificial Sequence
  synthetic circulating small noncoding RNA (sncRNA) 5' transfer RNA (tRNA) half
ctccccgtcggggaatcgaaccccggtctcccg

SEQ ID NO: 4925 - DNA, 23 bp, Artificial Sequence
  synthetic circulating small noncoding RNA (sncRNA) 5' transfer RNA (tRNA) half
aaaaatggtggagatgccgggga

SEQ ID NO: 4926 - DNA, 31 bp, Artificial Sequence
  synthetic circulating small noncoding RNA (sncRNA) 5' transfer RNA (tRNA) half
actccgccgggactcgaacccggaacctttg

SEQ ID NO: 4927 - DNA, 32 bp, Artificial Sequence
  synthetic circulating small noncoding RNA (sncRNA) 5' transfer RNA (tRNA) half
gggggtgtagctcagtggtagagcgcatgctt

SEQ ID NO: 4928 - DNA, 14 bp, Artificial Sequence
  synthetic circulating small noncoding RNA (sncRNA) 5' transfer RNA (tRNA) half
atctcggtggaacc

SEQ ID NO: 4929 - DNA, 18 bp, Artificial Sequence
  synthetic circulating small noncoding RNA (sncRNA) 5' transfer RNA (tRNA) half
gcaggcgagaattctacc

SEQ ID NO: 4930 - DNA, 13 bp, Artificial Sequence
  synthetic circulating small noncoding RNA (sncRNA) 5' transfer RNA (tRNA) half
catgctctaccga

SEQ ID NO: 4931 - DNA, 33 bp, Artificial Sequence
  synthetic circulating small noncoding RNA (sncRNA) 5' transfer RNA (tRNA) half
gccgtgatcgtataggggttagtactctgcgtt

SEQ ID NO: 4932 - DNA, 15 bp, Artificial Sequence
  synthetic circulating small noncoding RNA (sncRNA) 5' transfer RNA (tRNA) half
actatacgatcacgg

SEQ ID NO: 4933 - DNA, 14 bp, Artificial Sequence
  synthetic circulating small noncoding RNA (sncRNA) 5' transfer RNA (tRNA) half
ggcaccgctgggat

SEQ ID NO: 4934 - DNA, 22 bp, Artificial Sequence
  synthetic circulating small noncoding RNA (sncRNA) 5' transfer RNA (tRNA) half
acgggccaaagctgaagcgttt

SEQ ID NO: 4935 - DNA, 15 bp, Artificial Sequence
  synthetic circulating small noncoding RNA (sncRNA) 5' transfer RNA (tRNA) half
gttcggttcccggcc

SEQ ID NO: 4936 - DNA, 25 bp, Artificial Sequence
  synthetic circulating small noncoding RNA (sncRNA) 5' transfer RNA (tRNA) half
aagcgagaatcatacccctagacca

SEQ ID NO: 4937 - DNA, 38 bp, Artificial Sequence
  synthetic circulating small noncoding RNA (sncRNA) 5' transfer RNA (tRNA) half
tgcgagaggtcccgggttcaaatcccggacgagcccca

SEQ ID NO: 4938 - DNA, 16 bp, Artificial Sequence
  synthetic circulating small noncoding RNA (sncRNA) 5' transfer RNA (tRNA) half
gagtcccatgctctac

SEQ ID NO: 4939 - DNA, 10 bp, Artificial Sequence
  synthetic circulating small noncoding RNA (sncRNA) 5' transfer RNA (tRNA) half
cgggccgcgg

SEQ ID NO: 4940 - DNA, 21 bp, Artificial Sequence
  synthetic circulating small noncoding RNA (sncRNA) 5' transfer RNA (tRNA) half
gggagactgcgacctgaacgc

SEQ ID NO: 4941 - DNA, 22 bp, Artificial Sequence
  synthetic circulating small noncoding RNA (sncRNA) 5' transfer RNA (tRNA) half
tctagtggttaggattcggcgc

SEQ ID NO: 4942 - DNA, 31 bp, Artificial Sequence
  synthetic circulating small noncoding RNA (sncRNA) 5' transfer RNA (tRNA) half
agggattgtgggttcgagtcccatctggggt

SEQ ID NO: 4943 - DNA, 31 bp, Artificial Sequence
  synthetic circulating small noncoding RNA (sncRNA) 5' transfer RNA (tRNA) half
ggggatgtagctcagtggtagagcacatgct

SEQ ID NO: 4944 - DNA, 28 bp, Artificial Sequence
  synthetic circulating small noncoding RNA (sncRNA) 5' transfer RNA (tRNA) half
gcccgaacagggacttgaaccctggacc

SEQ ID NO: 4945 - DNA, 16 bp, Artificial Sequence
  synthetic circulating small noncoding RNA (sncRNA) 5' transfer RNA (tRNA) half
aaagtattgtgccccg

SEQ ID NO: 4946 - DNA, 31 bp, Artificial Sequence
  synthetic circulating small noncoding RNA (sncRNA) 5' transfer RNA (tRNA) half
cccgtcggggaatcgaaccccggtctcccgc

SEQ ID NO: 4947 - DNA, 12 bp, Artificial Sequence
  synthetic circulating small noncoding RNA (sncRNA) 5' transfer RNA (tRNA) half
gcccgaacaggg

SEQ ID NO: 4948 - DNA, 12 bp, Artificial Sequence
  synthetic circulating small noncoding RNA (sncRNA) 5' transfer RNA (tRNA) half
cggtgagagcgc

SEQ ID NO: 4949 - DNA, 15 bp, Artificial Sequence
  synthetic circulating small noncoding RNA (sncRNA) 5' transfer RNA (tRNA) half
gggtatgattctcgg

SEQ ID NO: 4950 - DNA, 18 bp, Artificial Sequence
  synthetic circulating small noncoding RNA (sncRNA) 5' transfer RNA (tRNA) half
tggcaggcgagaattcta

SEQ ID NO: 4951 - DNA, 15 bp, Artificial Sequence
  synthetic circulating small noncoding RNA (sncRNA) 5' transfer RNA (tRNA) half
cgtcggggaatcgaa

SEQ ID NO: 4952 - DNA, 29 bp, Artificial Sequence
  synthetic circulating small noncoding RNA (sncRNA) 5' transfer RNA (tRNA) half
gagtctcatgctctaccgactgagctagc

SEQ ID NO: 4953 - DNA, 14 bp, Artificial Sequence
  synthetic circulating small noncoding RNA (sncRNA) 5' transfer RNA (tRNA) half
tccgagtcacggca

SEQ ID NO: 4954 - DNA, 34 bp, Artificial Sequence
  synthetic circulating small noncoding RNA (sncRNA) 5' transfer RNA (tRNA) half
gtttccgcccggtttcgaaccggggacctttcgc

SEQ ID NO: 4955 - DNA, 19 bp, Artificial Sequence
  synthetic circulating small noncoding RNA (sncRNA) 5' transfer RNA (tRNA) half
aggggtatgattctcgctt

SEQ ID NO: 4956 - DNA, 30 bp, Artificial Sequence
  synthetic circulating small noncoding RNA (sncRNA) 5' transfer RNA (tRNA) half
gggagaccggggttcgattccccgacgggg

SEQ ID NO: 4957 - DNA, 16 bp, Artificial Sequence
  synthetic circulating small noncoding RNA (sncRNA) 5' transfer RNA (tRNA) half
gaaccggggacctctt

SEQ ID NO: 4958 - DNA, 16 bp, Artificial Sequence
  synthetic circulating small noncoding RNA (sncRNA) 5' transfer RNA (tRNA) half
aacccgggacctctcg

SEQ ID NO: 4959 - DNA, 20 bp, Artificial Sequence
  synthetic circulating small noncoding RNA (sncRNA) 5' transfer RNA (tRNA) half
ctagtggtatgattctcagt

SEQ ID NO: 4960 - DNA, 18 bp, Artificial Sequence
  synthetic circulating small noncoding RNA (sncRNA) 5' transfer RNA (tRNA) half
ccagagtgctaaccatta

SEQ ID NO: 4961 - DNA, 12 bp, Artificial Sequence
  synthetic circulating small noncoding RNA (sncRNA) 5' transfer RNA (tRNA) half
cgactccgccgg

SEQ ID NO: 4962 - DNA, 39 bp, Artificial Sequence
  synthetic circulating small noncoding RNA (sncRNA) 5' transfer RNA (tRNA) half
gccctctctgaggttcgaactcaggaccttcagattatg

SEQ ID NO: 4963 - DNA, 19 bp, Artificial Sequence
  synthetic circulating small noncoding RNA (sncRNA) 5' transfer RNA (tRNA) half
cggatcgctggattcaaag

SEQ ID NO: 4964 - DNA, 33 bp, Artificial Sequence
  synthetic circulating small noncoding RNA (sncRNA) 5' transfer RNA (tRNA) half
gttccatagtgtagcggttatcacgtctgcttt

SEQ ID NO: 4965 - DNA, 42 bp, Artificial Sequence
  synthetic circulating small noncoding RNA (sncRNA) 5' transfer RNA (tRNA) half
ggcagcggtgggattcgaacccacgcccccgaagagactgga

SEQ ID NO: 4966 - DNA, 21 bp, Artificial Sequence
  synthetic circulating small noncoding RNA (sncRNA) 5' transfer RNA (tRNA) half
tcccatatggtctagcggtta

SEQ ID NO: 4967 - DNA, 20 bp, Artificial Sequence
  synthetic circulating small noncoding RNA (sncRNA) 5' transfer RNA (tRNA) half
atgcagagtactaaccacta

SEQ ID NO: 4968 - DNA, 30 bp, Artificial Sequence
  synthetic circulating small noncoding RNA (sncRNA) 5' transfer RNA (tRNA) half
ggccccagcgagatttgaactcgcgacccc

SEQ ID NO: 4969 - DNA, 38 bp, Artificial Sequence
  synthetic circulating small noncoding RNA (sncRNA) 5' transfer RNA (tRNA) half
tagcggttaggattcctggttttcacccaggcggcccg

SEQ ID NO: 4970 - DNA, 30 bp, Artificial Sequence
  synthetic circulating small noncoding RNA (sncRNA) 5' transfer RNA (tRNA) half
gtccctgggtgggctcgaaccaccaacctt

SEQ ID NO: 4971 - DNA, 33 bp, Artificial Sequence
  synthetic circulating small noncoding RNA (sncRNA) 5' transfer RNA (tRNA) half
acccaggcggcccgggttcgactcccggtgtgg

SEQ ID NO: 4972 - DNA, 19 bp, Artificial Sequence
  synthetic circulating small noncoding RNA (sncRNA) 5' transfer RNA (tRNA) half
ggcccagcacgcttccgct

SEQ ID NO: 4973 - DNA, 39 bp, Artificial Sequence
  synthetic circulating small noncoding RNA (sncRNA) 5' transfer RNA (tRNA) half
aactcggatcgctggattcagagtccagagtgctaacca

SEQ ID NO: 4974 - DNA, 21 bp, Artificial Sequence
  synthetic circulating small noncoding RNA (sncRNA) 5' transfer RNA (tRNA) half
gccgtcacgaacaggattcga

SEQ ID NO: 4975 - DNA, 24 bp, Artificial Sequence
  synthetic circulating small noncoding RNA (sncRNA) 5' transfer RNA (tRNA) half
tcccatgctctaccgactgagcta

SEQ ID NO: 4976 - DNA, 23 bp, Artificial Sequence
  synthetic circulating small noncoding RNA (sncRNA) 5' transfer RNA (tRNA) half
acccgggccgcggcggtgagagc

SEQ ID NO: 4977 - DNA, 26 bp, Artificial Sequence
  synthetic circulating small noncoding RNA (sncRNA) 5' transfer RNA (tRNA) half
ccgtgatcgtatagtggttagtactc

SEQ ID NO: 4978 - DNA, 21 bp, Artificial Sequence
  synthetic circulating small noncoding RNA (sncRNA) 5' transfer RNA (tRNA) half
gagcgccgaatcctaaccact

SEQ ID NO: 4979 - DNA, 20 bp, Artificial Sequence
  synthetic circulating small noncoding RNA (sncRNA) 5' transfer RNA (tRNA) half
gcattggtggttcagtggta

SEQ ID NO: 4980 - DNA, 19 bp, Artificial Sequence
  synthetic circulating small noncoding RNA (sncRNA) 5' transfer RNA (tRNA) half
cgagaattctaccactgaa

SEQ ID NO: 4981 - DNA, 14 bp, Artificial Sequence
  synthetic circulating small noncoding RNA (sncRNA) 5' transfer RNA (tRNA) half
gcccggctagctca

SEQ ID NO: 4982 - DNA, 14 bp, Artificial Sequence
  synthetic circulating small noncoding RNA (sncRNA) 5' transfer RNA (tRNA) half
agtctgatgctcta

SEQ ID NO: 4983 - DNA, 25 bp, Artificial Sequence
  synthetic circulating small noncoding RNA (sncRNA) 5' transfer RNA (tRNA) half
tgaactcggatcgctggattcaaag

SEQ ID NO: 4984 - DNA, 32 bp, Artificial Sequence
  synthetic circulating small noncoding RNA (sncRNA) 5' transfer RNA (tRNA) half
cgtgatcgtatagtggttagtactctgcgttg

SEQ ID NO: 4985 - DNA, 30 bp, Artificial Sequence
  synthetic circulating small noncoding RNA (sncRNA) 5' transfer RNA (tRNA) half
tccagagtgctaaccattacaccatggaac

SEQ ID NO: 4986 - DNA, 32 bp, Artificial Sequence
  synthetic circulating small noncoding RNA (sncRNA) 5' transfer RNA (tRNA) half
caggggtcgcgagttcaaatctcgctggggcc

SEQ ID NO: 4987 - DNA, 14 bp, Artificial Sequence
  synthetic circulating small noncoding RNA (sncRNA) 5' transfer RNA (tRNA) half
tggaggcgtgggtt

SEQ ID NO: 4988 - DNA, 29 bp, Artificial Sequence
  synthetic circulating small noncoding RNA (sncRNA) 5' transfer RNA (tRNA) half
tccccgtcggggaatcgaaccccggtctc

SEQ ID NO: 4989 - DNA, 27 bp, Artificial Sequence
  synthetic circulating small noncoding RNA (sncRNA) 5' transfer RNA (tRNA) half
cgttccttcgagccggattcgaaccag

SEQ ID NO: 4990 - DNA, 22 bp, Artificial Sequence
  synthetic circulating small noncoding RNA (sncRNA) 5' transfer RNA (tRNA) half
ggtagtgtggccgagcggtcta

SEQ ID NO: 4991 - DNA, 35 bp, Artificial Sequence
  synthetic circulating small noncoding RNA (sncRNA) 5' transfer RNA (tRNA) half
acgcgggaggcccgggttcggttcccggccaatgc

SEQ ID NO: 4992 - DNA, 30 bp, Artificial Sequence
  synthetic circulating small noncoding RNA (sncRNA) 5' transfer RNA (tRNA) half
tccccgtcggggaattgaaccccggtctcc

SEQ ID NO: 4993 - DNA, 28 bp, Artificial Sequence
  synthetic circulating small noncoding RNA (sncRNA) 5' transfer RNA (tRNA) half
gtccagagtgctaaccattacaccatgg

SEQ ID NO: 4994 - DNA, 19 bp, Artificial Sequence
  synthetic circulating small noncoding RNA (sncRNA) 5' transfer RNA (tRNA) half
aacccgggccgcggcggtg

SEQ ID NO: 4995 - DNA, 33 bp, Artificial Sequence
  synthetic circulating small noncoding RNA (sncRNA) 5' transfer RNA (tRNA) half
cgtccctgggtgggctcgaaccaccaacctttc

SEQ ID NO: 4996 - DNA, 16 bp, Artificial Sequence
  synthetic circulating small noncoding RNA (sncRNA) 5' transfer RNA (tRNA) half
tccctggtggtctagt

SEQ ID NO: 4997 - DNA, 34 bp, Artificial Sequence
  synthetic circulating small noncoding RNA (sncRNA) 5' transfer RNA (tRNA) half
gccgaatcctaaccactagaccaccagggaagtt

SEQ ID NO: 4998 - DNA, 42 bp, Artificial Sequence
  synthetic circulating small noncoding RNA (sncRNA) 5' transfer RNA (tRNA) half
aggttgctgcggccacaacgcagagtactaaccactatacga

SEQ ID NO: 4999 - DNA, 37 bp, Artificial Sequence
  synthetic circulating small noncoding RNA (sncRNA) 5' transfer RNA (tRNA) half
gcttccctgaccgggaatcgaacccgggccgcggcgg

SEQ ID NO: 5000 - DNA, 14 bp, Artificial Sequence
  synthetic circulating small noncoding RNA (sncRNA) 5' transfer RNA (tRNA) half
tctcccgcgtgaca

SEQ ID NO: 5001 - DNA, 26 bp, Artificial Sequence
  synthetic circulating small noncoding RNA (sncRNA) 5' transfer RNA (tRNA) half
gtttccgtagtgtagtggttatcacg

SEQ ID NO: 5002 - DNA, 14 bp, Artificial Sequence
  synthetic circulating small noncoding RNA (sncRNA) 5' transfer RNA (tRNA) half
ttcgattcccggtc

SEQ ID NO: 5003 - DNA, 34 bp, Artificial Sequence
  synthetic circulating small noncoding RNA (sncRNA) 5' transfer RNA (tRNA) half
aacaggagatcctgggttcgaatcccagcggtgc

SEQ ID NO: 5004 - DNA, 21 bp, Artificial Sequence
  synthetic circulating small noncoding RNA (sncRNA) 5' transfer RNA (tRNA) half
ggattcggcgctctcaccgcc

SEQ ID NO: 5005 - DNA, 13 bp, Artificial Sequence
  synthetic circulating small noncoding RNA (sncRNA) 5' transfer RNA (tRNA) half
gccgcggcggtga

SEQ ID NO: 5006 - DNA, 30 bp, Artificial Sequence
  synthetic circulating small noncoding RNA (sncRNA) 5' transfer RNA (tRNA) half
cgttccttcgagccggattcgaaccagcga

SEQ ID NO: 5007 - DNA, 23 bp, Artificial Sequence
  synthetic circulating small noncoding RNA (sncRNA) 5' transfer RNA (tRNA) half
gcccgaacagggacttgaaccct

SEQ ID NO: 5008 - DNA, 23 bp, Artificial Sequence
  synthetic circulating small noncoding RNA (sncRNA) 5' transfer RNA (tRNA) half
ggtgagagcgccgaatcctaacc

SEQ ID NO: 5009 - DNA, 25 bp, Artificial Sequence
  synthetic circulating small noncoding RNA (sncRNA) 5' transfer RNA (tRNA) half
tagaattctcgcctgccacgcggga

SEQ ID NO: 5010 - DNA, 15 bp, Artificial Sequence
  synthetic circulating small noncoding RNA (sncRNA) 5' transfer RNA (tRNA) half
tagaattctcgcctg

SEQ ID NO: 5011 - DNA, 16 bp, Artificial Sequence
  synthetic circulating small noncoding RNA (sncRNA) 5' transfer RNA (tRNA) half
tcgacgaggatgggat

SEQ ID NO: 5012 - DNA, 22 bp, Artificial Sequence
  synthetic circulating small noncoding RNA (sncRNA) 5' transfer RNA (tRNA) half
aaccgggcggaaacatatcttt

SEQ ID NO: 5013 - DNA, 37 bp, Artificial Sequence
  synthetic circulating small noncoding RNA (sncRNA) 5' transfer RNA (tRNA) half
acccaggcggcccgggttcgactcccggtatgggaac

SEQ ID NO: 5014 - DNA, 35 bp, Artificial Sequence
  synthetic circulating small noncoding RNA (sncRNA) 5' transfer RNA (tRNA) half
gcagaaggtcctgggttcgagccccagtggaacca

SEQ ID NO: 5015 - DNA, 13 bp, Artificial Sequence
  synthetic circulating small noncoding RNA (sncRNA) 5' transfer RNA (tRNA) half
agcggtctaaggc

SEQ ID NO: 5016 - DNA, 21 bp, Artificial Sequence
  synthetic circulating small noncoding RNA (sncRNA) 5' transfer RNA (tRNA) half
acgggccaaagctgaagcgtt

SEQ ID NO: 5017 - DNA, 26 bp, Artificial Sequence
  synthetic circulating small noncoding RNA (sncRNA) 5' transfer RNA (tRNA) half
accgggagtcgaacccgggccgcctg

SEQ ID NO: 5018 - DNA, 18 bp, Artificial Sequence
  synthetic circulating small noncoding RNA (sncRNA) 5' transfer RNA (tRNA) half
agtggttatcacgttcgc

SEQ ID NO: 5019 - DNA, 34 bp, Artificial Sequence
  synthetic circulating small noncoding RNA (sncRNA) 5' transfer RNA (tRNA) half
tgagggtccagggttcaagtccctgttcgggcgc

SEQ ID NO: 5020 - DNA, 21 bp, Artificial Sequence
  synthetic circulating small noncoding RNA (sncRNA) 5' transfer RNA (tRNA) half
tcgaatcccactcctgacagc

SEQ ID NO: 5021 - DNA, 17 bp, Artificial Sequence
  synthetic circulating small noncoding RNA (sncRNA) 5' transfer RNA (tRNA) half
tggtatcatgcaagatt

SEQ ID NO: 5022 - DNA, 22 bp, Artificial Sequence
  synthetic circulating small noncoding RNA (sncRNA) 5' transfer RNA (tRNA) half
tgccgtcacgaacaggattcga

SEQ ID NO: 5023 - DNA, 14 bp, Artificial Sequence
  synthetic circulating small noncoding RNA (sncRNA) 5' transfer RNA (tRNA) half
ggttaggattcctg

SEQ ID NO: 5024 - DNA, 19 bp, Artificial Sequence
  synthetic circulating small noncoding RNA (sncRNA) 5' transfer RNA (tRNA) half
gtagcggttatcacgtctg

SEQ ID NO: 5025 - DNA, 27 bp, Artificial Sequence
  synthetic circulating small noncoding RNA (sncRNA) 5' transfer RNA (tRNA) half
cccataccgggagtcgaacccgggccg

SEQ ID NO: 5026 - DNA, 31 bp, Artificial Sequence
  synthetic circulating small noncoding RNA (sncRNA) 5' transfer RNA (tRNA) half
gtagaattctcgcctgccacgcgggaggccc

SEQ ID NO: 5027 - DNA, 36 bp, Artificial Sequence
  synthetic circulating small noncoding RNA (sncRNA) 5' transfer RNA (tRNA) half
cttccctgaccgggaatcgaacccgggccgcggcgg

SEQ ID NO: 5028 - DNA, 32 bp, Artificial Sequence
  synthetic circulating small noncoding RNA (sncRNA) 5' transfer RNA (tRNA) half
aggtcccaccgagatttgaactcggatcgctg

SEQ ID NO: 5029 - DNA, 33 bp, Artificial Sequence
  synthetic circulating small noncoding RNA (sncRNA) 5' transfer RNA (tRNA) half
gcctccccgtcggggaatcgaaccccggtctcc

SEQ ID NO: 5030 - DNA, 17 bp, Artificial Sequence
  synthetic circulating small noncoding RNA (sncRNA) 5' transfer RNA (tRNA) half
cgttggccgggaatcga

SEQ ID NO: 5031 - DNA, 15 bp, Artificial Sequence
  synthetic circulating small noncoding RNA (sncRNA) 5' transfer RNA (tRNA) half
gcccggatgatcctc

SEQ ID NO: 5032 - DNA, 35 bp, Artificial Sequence
  synthetic circulating small noncoding RNA (sncRNA) 5' transfer RNA (tRNA) half
gagaggtcccgggttcaaatcccggacgagcccca

SEQ ID NO: 5033 - DNA, 31 bp, Artificial Sequence
  synthetic circulating small noncoding RNA (sncRNA) 5' transfer RNA (tRNA) half
cgtgatcgtatagtggttagtactctgcgtt

SEQ ID NO: 5034 - DNA, 15 bp, Artificial Sequence
  synthetic circulating small noncoding RNA (sncRNA) 5' transfer RNA (tRNA) half
gcgagcgctctacca

SEQ ID NO: 5035 - DNA, 31 bp, Artificial Sequence
  synthetic circulating small noncoding RNA (sncRNA) 5' transfer RNA (tRNA) half
gaggcgaacgtgataaccactacactacgga

SEQ ID NO: 5036 - DNA, 32 bp, Artificial Sequence
  synthetic circulating small noncoding RNA (sncRNA) 5' transfer RNA (tRNA) half
aggggtcgcgagttcaaatctcgctggggcct

SEQ ID NO: 5037 - DNA, 32 bp, Artificial Sequence
  synthetic circulating small noncoding RNA (sncRNA) 5' transfer RNA (tRNA) half
ttcttgcgacccgggttcgattcccgggcggc

SEQ ID NO: 5038 - DNA, 24 bp, Artificial Sequence
  synthetic circulating small noncoding RNA (sncRNA) 5' transfer RNA (tRNA) half
gacaggcggggatactcaccacta

SEQ ID NO: 5039 - DNA, 23 bp, Artificial Sequence
  synthetic circulating small noncoding RNA (sncRNA) 5' transfer RNA (tRNA) half
tcacacgcgagaggtccccggtt

SEQ ID NO: 5040 - DNA, 29 bp, Artificial Sequence
  synthetic circulating small noncoding RNA (sncRNA) 5' transfer RNA (tRNA) half
ccagagtgctaaccattacaccatggaac

SEQ ID NO: 5041 - DNA, 13 bp, Artificial Sequence
  synthetic circulating small noncoding RNA (sncRNA) 5' transfer RNA (tRNA) half
tccttcgagccgg

SEQ ID NO: 5042 - DNA, 23 bp, Artificial Sequence
  synthetic circulating small noncoding RNA (sncRNA) 5' transfer RNA (tRNA) half
agggcccggatagctcagtcggt

SEQ ID NO: 5043 - DNA, 29 bp, Artificial Sequence
  synthetic circulating small noncoding RNA (sncRNA) 5' transfer RNA (tRNA) half
catgcgctctaccactgagctacatcccc

SEQ ID NO: 5044 - DNA, 35 bp, Artificial Sequence
  synthetic circulating small noncoding RNA (sncRNA) 5' transfer RNA (tRNA) half
gcccgtacggggatcgaacccgcgaccttggcgtt

SEQ ID NO: 5045 - DNA, 33 bp, Artificial Sequence
  synthetic circulating small noncoding RNA (sncRNA) 5' transfer RNA (tRNA) half
ggccggttagctcagttggttagagcatggtgc

SEQ ID NO: 5046 - DNA, 41 bp, Artificial Sequence
  synthetic circulating small noncoding RNA (sncRNA) 5' transfer RNA (tRNA) half
ctaagccagggattgtgggttcgagtcccatctggggtggt

SEQ ID NO: 5047 - DNA, 15 bp, Artificial Sequence
  synthetic circulating small noncoding RNA (sncRNA) 5' transfer RNA (tRNA) half
ccgggacctctcgca

SEQ ID NO: 5048 - DNA, 15 bp, Artificial Sequence
  synthetic circulating small noncoding RNA (sncRNA) 5' transfer RNA (tRNA) half
gcccggatagctcag

SEQ ID NO: 5049 - DNA, 21 bp, Artificial Sequence
  synthetic circulating small noncoding RNA (sncRNA) 5' transfer RNA (tRNA) half
accgggcggaaacattacttt

SEQ ID NO: 5050 - DNA, 27 bp, Artificial Sequence
  synthetic circulating small noncoding RNA (sncRNA) 5' transfer RNA (tRNA) half
gccgggaatcgaacccgggcctcccgc

SEQ ID NO: 5051 - DNA, 13 bp, Artificial Sequence
  synthetic circulating small noncoding RNA (sncRNA) 5' transfer RNA (tRNA) half
ccccacgttgggc

SEQ ID NO: 5052 - DNA, 14 bp, Artificial Sequence
  synthetic circulating small noncoding RNA (sncRNA) 5' transfer RNA (tRNA) half
cccccgaccgctcc

SEQ ID NO: 5053 - DNA, 14 bp, Artificial Sequence
  synthetic circulating small noncoding RNA (sncRNA) 5' transfer RNA (tRNA) half
gtcggggaatcgaa

SEQ ID NO: 5054 - DNA, 20 bp, Artificial Sequence
  synthetic circulating small noncoding RNA (sncRNA) 5' transfer RNA (tRNA) half
tacccctagaccaacgagcc

SEQ ID NO: 5055 - DNA, 30 bp, Artificial Sequence
  synthetic circulating small noncoding RNA (sncRNA) 5' transfer RNA (tRNA) half
ggatgatcctcagtggtctggggtgcaggc

SEQ ID NO: 5056 - DNA, 23 bp, Artificial Sequence
  synthetic circulating small noncoding RNA (sncRNA) 5' transfer RNA (tRNA) half
gcgaacgtgataaccactacact

SEQ ID NO: 5057 - DNA, 32 bp, Artificial Sequence
  synthetic circulating small noncoding RNA (sncRNA) 5' transfer RNA (tRNA) half
ccgactccgccgggactcgaacccggaacctt

SEQ ID NO: 5058 - DNA, 37 bp, Artificial Sequence
  synthetic circulating small noncoding RNA (sncRNA) 5' transfer RNA (tRNA) half
cgccgcggcccgggttcgattcccggtcagggaagca

SEQ ID NO: 5059 - DNA, 35 bp, Artificial Sequence
  synthetic circulating small noncoding RNA (sncRNA) 5' transfer RNA (tRNA) half
ggccgcggcggtgagagcgccgaatcctaaccact

SEQ ID NO: 5060 - DNA, 34 bp, Artificial Sequence
  synthetic circulating small noncoding RNA (sncRNA) 5' transfer RNA (tRNA) half
gggctcgtccgggatttgaacccgggacctctcg

SEQ ID NO: 5061 - DNA, 13 bp, Artificial Sequence
  synthetic circulating small noncoding RNA (sncRNA) 5' transfer RNA (tRNA) half
gcggcggtgagag

SEQ ID NO: 5062 - DNA, 22 bp, Artificial Sequence
  synthetic circulating small noncoding RNA (sncRNA) 5' transfer RNA (tRNA) half
aacccgggacctctcgcaccca

SEQ ID NO: 5063 - DNA, 11 bp, Artificial Sequence
  synthetic circulating small noncoding RNA (sncRNA) 5' transfer RNA (tRNA) half
ggcacccggat

SEQ ID NO: 5064 - DNA, 11 bp, Artificial Sequence
  synthetic circulating small noncoding RNA (sncRNA) 5' transfer RNA (tRNA) half
gagctatccgg

SEQ ID NO: 5065 - DNA, 19 bp, Artificial Sequence
  synthetic circulating small noncoding RNA (sncRNA) 5' transfer RNA (tRNA) half
ggtttcgaaccggggacct

SEQ ID NO: 5066 - DNA, 32 bp, Artificial Sequence
  synthetic circulating small noncoding RNA (sncRNA) 5' transfer RNA (tRNA) half
cccgtcggggaatcgaaccccggtctcccgcg

SEQ ID NO: 5067 - DNA, 16 bp, Artificial Sequence
  synthetic circulating small noncoding RNA (sncRNA) 5' transfer RNA (tRNA) half
acccgggcctcccgcg

SEQ ID NO: 5068 - DNA, 28 bp, Artificial Sequence
  synthetic circulating small noncoding RNA (sncRNA) 5' transfer RNA (tRNA) half
atggttagcactctggactctgaatcca

SEQ ID NO: 5069 - DNA, 17 bp, Artificial Sequence
  synthetic circulating small noncoding RNA (sncRNA) 5' transfer RNA (tRNA) half
ccttcgatagctcagct

SEQ ID NO: 5070 - DNA, 16 bp, Artificial Sequence
  synthetic circulating small noncoding RNA (sncRNA) 5' transfer RNA (tRNA) half
gagtccagagtgctaa

SEQ ID NO: 5071 - DNA, 25 bp, Artificial Sequence
  synthetic circulating small noncoding RNA (sncRNA) 5' transfer RNA (tRNA) half
cgtgtgaggcgaacgtgataaccac

SEQ ID NO: 5072 - DNA, 30 bp, Artificial Sequence
  synthetic circulating small noncoding RNA (sncRNA) 5' transfer RNA (tRNA) half
aggtcctgggttcgagccccagtggaacca

SEQ ID NO: 5073 - DNA, 33 bp, Artificial Sequence
  synthetic circulating small noncoding RNA (sncRNA) 5' transfer RNA (tRNA) half
caagaggtccccggttcaaatccgggtgccccc

SEQ ID NO: 5074 - DNA, 20 bp, Artificial Sequence
  synthetic circulating small noncoding RNA (sncRNA) 5' transfer RNA (tRNA) half
gcgagaatcatacccctaga

SEQ ID NO: 5075 - DNA, 33 bp, Artificial Sequence
  synthetic circulating small noncoding RNA (sncRNA) 5' transfer RNA (tRNA) half
agcaatgactcctaaccactagaccaccaggga

SEQ ID NO: 5076 - DNA, 14 bp, Artificial Sequence
  synthetic circulating small noncoding RNA (sncRNA) 5' transfer RNA (tRNA) half
ccggctcgaaggac

SEQ ID NO: 5077 - DNA, 15 bp, Artificial Sequence
  synthetic circulating small noncoding RNA (sncRNA) 5' transfer RNA (tRNA) half
ggttcgattccggct

SEQ ID NO: 5078 - DNA, 17 bp, Artificial Sequence
  synthetic circulating small noncoding RNA (sncRNA) 5' transfer RNA (tRNA) half
ccgactccgccgggact

SEQ ID NO: 5079 - DNA, 18 bp, Artificial Sequence
  synthetic circulating small noncoding RNA (sncRNA) 5' transfer RNA (tRNA) half
atgtggcagcggtgggat

SEQ ID NO: 5080 - DNA, 14 bp, Artificial Sequence
  synthetic circulating small noncoding RNA (sncRNA) 5' transfer RNA (tRNA) half
tcctgccgcggtcg

SEQ ID NO: 5081 - DNA, 21 bp, Artificial Sequence
  synthetic circulating small noncoding RNA (sncRNA) 5' transfer RNA (tRNA) half
tcccacatggtctagcggtta

SEQ ID NO: 5082 - DNA, 32 bp, Artificial Sequence
  synthetic circulating small noncoding RNA (sncRNA) 5' transfer RNA (tRNA) half
gtccaacgccttaaccactcggccatcgctgc

SEQ ID NO: 5083 - DNA, 29 bp, Artificial Sequence
  synthetic circulating small noncoding RNA (sncRNA) 5' transfer RNA (tRNA) half
caccgggagtcgaacccgggccgcctggg

SEQ ID NO: 5084 - DNA, 12 bp, Artificial Sequence
  synthetic circulating small noncoding RNA (sncRNA) 5' transfer RNA (tRNA) half
aggtagcgggat

SEQ ID NO: 5085 - DNA, 32 bp, Artificial Sequence
  synthetic circulating small noncoding RNA (sncRNA) 5' transfer RNA (tRNA) half
gaaaggttggtggttcgagcccacccagggac

SEQ ID NO: 5086 - DNA, 25 bp, Artificial Sequence
  synthetic circulating small noncoding RNA (sncRNA) 5' transfer RNA (tRNA) half
taaccgaaaggttggtggttcgagc

SEQ ID NO: 5087 - DNA, 32 bp, Artificial Sequence
  synthetic circulating small noncoding RNA (sncRNA) 5' transfer RNA (tRNA) half
tgcattggccgggaatcgaacccgggcctccc

SEQ ID NO: 5088 - DNA, 15 bp, Artificial Sequence
  synthetic circulating small noncoding RNA (sncRNA) 5' transfer RNA (tRNA) half
tagcactctggactc

SEQ ID NO: 5089 - DNA, 12 bp, Artificial Sequence
  synthetic circulating small noncoding RNA (sncRNA) 5' transfer RNA (tRNA) half
ctcggtgggacc

SEQ ID NO: 5090 - DNA, 29 bp, Artificial Sequence
  synthetic circulating small noncoding RNA (sncRNA) 5' transfer RNA (tRNA) half
agtcaaatgctctaccactgagctatacc

SEQ ID NO: 5091 - DNA, 29 bp, Artificial Sequence
  synthetic circulating small noncoding RNA (sncRNA) 5' transfer RNA (tRNA) half
tccctggtagtctagtggttaggattcgg

SEQ ID NO: 5092 - DNA, 28 bp, Artificial Sequence
  synthetic circulating small noncoding RNA (sncRNA) 5' transfer RNA (tRNA) half
tcccacaccgggagtcgaacccgggccg

SEQ ID NO: 5093 - DNA, 12 bp, Artificial Sequence
  synthetic circulating small noncoding RNA (sncRNA) 5' transfer RNA (tRNA) half
cgagaggtcccg

SEQ ID NO: 5094 - DNA, 28 bp, Artificial Sequence
  synthetic circulating small noncoding RNA (sncRNA) 5' transfer RNA (tRNA) half
cataccgggagtcgaacccgggccgcct

SEQ ID NO: 5095 - DNA, 15 bp, Artificial Sequence
  synthetic circulating small noncoding RNA (sncRNA) 5' transfer RNA (tRNA) half
tccccggcacctcca

SEQ ID NO: 5096 - DNA, 27 bp, Artificial Sequence
  synthetic circulating small noncoding RNA (sncRNA) 5' transfer RNA (tRNA) half
ggccccatggtgtaatggttagcactc

SEQ ID NO: 5097 - DNA, 18 bp, Artificial Sequence
  synthetic circulating small noncoding RNA (sncRNA) 5' transfer RNA (tRNA) half
caatgccttatccattag

SEQ ID NO: 5098 - DNA, 28 bp, Artificial Sequence
  synthetic circulating small noncoding RNA (sncRNA) 5' transfer RNA (tRNA) half
gcggcccgggttcgactcccggtatggg

SEQ ID NO: 5099 - DNA, 37 bp, Artificial Sequence
  synthetic circulating small noncoding RNA (sncRNA) 5' transfer RNA (tRNA) half
taaaccgaagatcgcgggttcgaaccccgtccgtgcc

SEQ ID NO: 5100 - DNA, 13 bp, Artificial Sequence
  synthetic circulating small noncoding RNA (sncRNA) 5' transfer RNA (tRNA) half
atcccggacgagc

SEQ ID NO: 5101 - DNA, 12 bp, Artificial Sequence
  synthetic circulating small noncoding RNA (sncRNA) 5' transfer RNA (tRNA) half
gcgtgctgggcc

SEQ ID NO: 5102 - DNA, 16 bp, Artificial Sequence
  synthetic circulating small noncoding RNA (sncRNA) 5' transfer RNA (tRNA) half
ggccgcggcggtgaga

SEQ ID NO: 5103 - DNA, 18 bp, Artificial Sequence
  synthetic circulating small noncoding RNA (sncRNA) 5' transfer RNA (tRNA) half
gtgagagcgccgaatcct

SEQ ID NO: 5104 - DNA, 20 bp, Artificial Sequence
  synthetic circulating small noncoding RNA (sncRNA) 5' transfer RNA (tRNA) half
ggatagctcagtcggtagag

SEQ ID NO: 5105 - DNA, 32 bp, Artificial Sequence
  synthetic circulating small noncoding RNA (sncRNA) 5' transfer RNA (tRNA) half
gcgggaggcccgggttcgattcccggccaatg

SEQ ID NO: 5106 - DNA, 14 bp, Artificial Sequence
  synthetic circulating small noncoding RNA (sncRNA) 5' transfer RNA (tRNA) half
tcgattcccggcca

SEQ ID NO: 5107 - DNA, 17 bp, Artificial Sequence
  synthetic circulating small noncoding RNA (sncRNA) 5' transfer RNA (tRNA) half
agaccgctcggccacgc

SEQ ID NO: 5108 - DNA, 32 bp, Artificial Sequence
  synthetic circulating small noncoding RNA (sncRNA) 5' transfer RNA (tRNA) half
gcaccgctgggattcgaacccaggatctcctg

SEQ ID NO: 5109 - DNA, 20 bp, Artificial Sequence
  synthetic circulating small noncoding RNA (sncRNA) 5' transfer RNA (tRNA) half
cgagaattctaccactgaac

SEQ ID NO: 5110 - DNA, 15 bp, Artificial Sequence
  synthetic circulating small noncoding RNA (sncRNA) 5' transfer RNA (tRNA) half
tctgatgctctaccg

SEQ ID NO: 5111 - DNA, 33 bp, Artificial Sequence
  synthetic circulating small noncoding RNA (sncRNA) 5' transfer RNA (tRNA) half
atccagcgccttagaccgctcggccacgctacc

SEQ ID NO: 5112 - DNA, 9 bp, Artificial Sequence
  synthetic circulating small noncoding RNA (sncRNA) 5' transfer RNA (tRNA) half
gccgggaat

SEQ ID NO: 5113 - DNA, 12 bp, Artificial Sequence
  synthetic circulating small noncoding RNA (sncRNA) 5' transfer RNA (tRNA) half
gggcacccggat

SEQ ID NO: 5114 - DNA, 38 bp, Artificial Sequence
  synthetic circulating small noncoding RNA (sncRNA) 5' transfer RNA (tRNA) half
agccagggattgtgggttcgagtcccatctggggtggt

SEQ ID NO: 5115 - DNA, 19 bp, Artificial Sequence
  synthetic circulating small noncoding RNA (sncRNA) 5' transfer RNA (tRNA) half
ctaccgactgagctatccg

SEQ ID NO: 5116 - DNA, 12 bp, Artificial Sequence
  synthetic circulating small noncoding RNA (sncRNA) 5' transfer RNA (tRNA) half
gagctatttcgg

SEQ ID NO: 5117 - DNA, 12 bp, Artificial Sequence
  synthetic circulating small noncoding RNA (sncRNA) 5' transfer RNA (tRNA) half
gtttccgtagtg

SEQ ID NO: 5118 - DNA, 22 bp, Artificial Sequence
  synthetic circulating small noncoding RNA (sncRNA) 5' transfer RNA (tRNA) half
aggttccaccgagatttgaact

SEQ ID NO: 5119 - DNA, 22 bp, Artificial Sequence
  synthetic circulating small noncoding RNA (sncRNA) 5' transfer RNA (tRNA) half
tctgaatccagcgacccgagtt

SEQ ID NO: 5120 - DNA, 23 bp, Artificial Sequence
  synthetic circulating small noncoding RNA (sncRNA) 5' transfer RNA (tRNA) half
gtgacaggcggggatactaacca

SEQ ID NO: 5121 - DNA, 17 bp, Artificial Sequence
  synthetic circulating small noncoding RNA (sncRNA) 5' transfer RNA (tRNA) half
aaagtattgtgccccgt

SEQ ID NO: 5122 - DNA, 15 bp, Artificial Sequence
  synthetic circulating small noncoding RNA (sncRNA) 5' transfer RNA (tRNA) half
ggagggggcacccgg

SEQ ID NO: 5123 - DNA, 42 bp, Artificial Sequence
  synthetic circulating small noncoding RNA (sncRNA) 5' transfer RNA (tRNA) half
ttgtgccccgtgtgaggatcgaactcacgaccttcagattat

SEQ ID NO: 5124 - DNA, 21 bp, Artificial Sequence
  synthetic circulating small noncoding RNA (sncRNA) 5' transfer RNA (tRNA) half
tccccggcacctccagtgttt

SEQ ID NO: 5125 - DNA, 17 bp, Artificial Sequence
  synthetic circulating small noncoding RNA (sncRNA) 5' transfer RNA (tRNA) half
ggtagagcatgagactc

SEQ ID NO: 5126 - DNA, 14 bp, Artificial Sequence
  synthetic circulating small noncoding RNA (sncRNA) 5' transfer RNA (tRNA) half
cagtcggtagagca

SEQ ID NO: 5127 - DNA, 23 bp, Artificial Sequence
  synthetic circulating small noncoding RNA (sncRNA) 5' transfer RNA (tRNA) half
ctcagtcggtagagcatcagact

SEQ ID NO: 5128 - DNA, 36 bp, Artificial Sequence
  synthetic circulating small noncoding RNA (sncRNA) 5' transfer RNA (tRNA) half
aaaggcaccgctgggattcgaacccaggatctcctg

SEQ ID NO: 5129 - DNA, 16 bp, Artificial Sequence
  synthetic circulating small noncoding RNA (sncRNA) 5' transfer RNA (tRNA) half
accgggcggaaacaat

SEQ ID NO: 5130 - DNA, 21 bp, Artificial Sequence
  synthetic circulating small noncoding RNA (sncRNA) 5' transfer RNA (tRNA) half
gtagtcgtggccgagtggtta

SEQ ID NO: 5131 - DNA, 12 bp, Artificial Sequence
  synthetic circulating small noncoding RNA (sncRNA) 5' transfer RNA (tRNA) half
cgattcccggtc

SEQ ID NO: 5132 - DNA, 28 bp, Artificial Sequence
  synthetic circulating small noncoding RNA (sncRNA) 5' transfer RNA (tRNA) half
gtttccgtagtgtagtggttatcacgtt

SEQ ID NO: 5133 - DNA, 13 bp, Artificial Sequence
  synthetic circulating small noncoding RNA (sncRNA) 5' transfer RNA (tRNA) half
agcgacctaagga

SEQ ID NO: 5134 - DNA, 33 bp, Artificial Sequence
  synthetic circulating small noncoding RNA (sncRNA) 5' transfer RNA (tRNA) half
gcgccgaatcctaaccactagaccaccagggaa

SEQ ID NO: 5135 - DNA, 20 bp, Artificial Sequence
  synthetic circulating small noncoding RNA (sncRNA) 5' transfer RNA (tRNA) half
ccagagtgctaaccattaca

SEQ ID NO: 5136 - DNA, 20 bp, Artificial Sequence
  synthetic circulating small noncoding RNA (sncRNA) 5' transfer RNA (tRNA) half
cgattcccgggcggcgcatg

SEQ ID NO: 5137 - DNA, 34 bp, Artificial Sequence
  synthetic circulating small noncoding RNA (sncRNA) 5' transfer RNA (tRNA) half
gtgcattggtggttcaatggtagaattctcgcct

SEQ ID NO: 5138 - DNA, 30 bp, Artificial Sequence
  synthetic circulating small noncoding RNA (sncRNA) 5' transfer RNA (tRNA) half
gagtctcatgctctaccgactgagctagcc

SEQ ID NO: 5139 - DNA, 20 bp, Artificial Sequence
  synthetic circulating small noncoding RNA (sncRNA) 5' transfer RNA (tRNA) half
gaccccgacgtgattcgaac

SEQ ID NO: 5140 - DNA, 14 bp, Artificial Sequence
  synthetic circulating small noncoding RNA (sncRNA) 5' transfer RNA (tRNA) half
gattcgaacctgcg

SEQ ID NO: 5141 - DNA, 17 bp, Artificial Sequence
  synthetic circulating small noncoding RNA (sncRNA) 5' transfer RNA (tRNA) half
tgggctcgtccgggatt

SEQ ID NO: 5142 - DNA, 13 bp, Artificial Sequence
  synthetic circulating small noncoding RNA (sncRNA) 5' transfer RNA (tRNA) half
accccgacgtgat

SEQ ID NO: 5143 - DNA, 30 bp, Artificial Sequence
  synthetic circulating small noncoding RNA (sncRNA) 5' transfer RNA (tRNA) half
cgccgcggcccgggttcgattcccggtcag

SEQ ID NO: 5144 - DNA, 24 bp, Artificial Sequence
  synthetic circulating small noncoding RNA (sncRNA) 5' transfer RNA (tRNA) half
gggttcgattcccgggcggcgcat

SEQ ID NO: 5145 - DNA, 35 bp, Artificial Sequence
  synthetic circulating small noncoding RNA (sncRNA) 5' transfer RNA (tRNA) half
agagcgccaaatcctaaccactagaccaccaggga

SEQ ID NO: 5146 - DNA, 11 bp, Artificial Sequence
  synthetic circulating small noncoding RNA (sncRNA) 5' transfer RNA (tRNA) half
gctctaccgac

SEQ ID NO: 5147 - DNA, 12 bp, Artificial Sequence
  synthetic circulating small noncoding RNA (sncRNA) 5' transfer RNA (tRNA) half
ggcaggcgagaa

SEQ ID NO: 5148 - DNA, 16 bp, Artificial Sequence
  synthetic circulating small noncoding RNA (sncRNA) 5' transfer RNA (tRNA) half
tcccatatggtctagc

SEQ ID NO: 5149 - DNA, 24 bp, Artificial Sequence
  synthetic circulating small noncoding RNA (sncRNA) 5' transfer RNA (tRNA) half
ggttcgactcccggtgtgggaaac

SEQ ID NO: 5150 - DNA, 34 bp, Artificial Sequence
  synthetic circulating small noncoding RNA (sncRNA) 5' transfer RNA (tRNA) half
ttccctgaccgggaatcgaacccgggccgcggcg

SEQ ID NO: 5151 - DNA, 25 bp, Artificial Sequence
  synthetic circulating small noncoding RNA (sncRNA) 5' transfer RNA (tRNA) half
gtcgagccagccaggagtcgaacct

SEQ ID NO: 5152 - DNA, 8 bp, Artificial Sequence
  synthetic circulating small noncoding RNA (sncRNA) 5' transfer RNA (tRNA) half
cgccgaat

SEQ ID NO: 5153 - DNA, 22 bp, Artificial Sequence
  synthetic circulating small noncoding RNA (sncRNA) 5' transfer RNA (tRNA) half
agtcaaatgctctaccactgag

SEQ ID NO: 5154 - DNA, 28 bp, Artificial Sequence
  synthetic circulating small noncoding RNA (sncRNA) 5' transfer RNA (tRNA) half
ccccgtcggggaatcgaaccccggtctc

SEQ ID NO: 5155 - DNA, 17 bp, Artificial Sequence
  synthetic circulating small noncoding RNA (sncRNA) 5' transfer RNA (tRNA) half
gccttagaccgctcggc

SEQ ID NO: 5156 - DNA, 34 bp, Artificial Sequence
  synthetic circulating small noncoding RNA (sncRNA) 5' transfer RNA (tRNA) half
tggtagaattctcgcctgccacgcgggaggcccg

SEQ ID NO: 5157 - DNA, 27 bp, Artificial Sequence
  synthetic circulating small noncoding RNA (sncRNA) 5' transfer RNA (tRNA) half
aacgcagagtactaaccactatacgat

SEQ ID NO: 5158 - DNA, 15 bp, Artificial Sequence
  synthetic circulating small noncoding RNA (sncRNA) 5' transfer RNA (tRNA) half
ctgagctaaccggcc

SEQ ID NO: 5159 - DNA, 18 bp, Artificial Sequence
  synthetic circulating small noncoding RNA (sncRNA) 5' transfer RNA (tRNA) half
ggcccagcacgcttccgc

SEQ ID NO: 5160 - DNA, 35 bp, Artificial Sequence
  synthetic circulating small noncoding RNA (sncRNA) 5' transfer RNA (tRNA) half
accgaaaggttggtggttcgagcccacccagggac

SEQ ID NO: 5161 - DNA, 37 bp, Artificial Sequence
  synthetic circulating small noncoding RNA (sncRNA) 5' transfer RNA (tRNA) half
tgttcccacaccgggagtcgaacccgggccgcctggg

SEQ ID NO: 5162 - DNA, 11 bp, Artificial Sequence
  synthetic circulating small noncoding RNA (sncRNA) 5' transfer RNA (tRNA) half
tcgaaccgggg

SEQ ID NO: 5163 - DNA, 14 bp, Artificial Sequence
  synthetic circulating small noncoding RNA (sncRNA) 5' transfer RNA (tRNA) half
ctgagctagccggg

SEQ ID NO: 5164 - DNA, 33 bp, Artificial Sequence
  synthetic circulating small noncoding RNA (sncRNA) 5' transfer RNA (tRNA) half
ggtagcgtggccgagcggtctaaggcgctggat

SEQ ID NO: 5165 - DNA, 15 bp, Artificial Sequence
  synthetic circulating small noncoding RNA (sncRNA) 5' transfer RNA (tRNA) half
gggcccggatagctc

SEQ ID NO: 5166 - DNA, 29 bp, Artificial Sequence
  synthetic circulating small noncoding RNA (sncRNA) 5' transfer RNA (tRNA) half
ccgaatcctagccactagaccaccaggga

SEQ ID NO: 5167 - DNA, 36 bp, Artificial Sequence
  synthetic circulating small noncoding RNA (sncRNA) 5' transfer RNA (tRNA) half
ccaggcggcccgggttcgactcccggtgtgggaaca

SEQ ID NO: 5168 - DNA, 15 bp, Artificial Sequence
  synthetic circulating small noncoding RNA (sncRNA) 5' transfer RNA (tRNA) half
cgagccaggtaggag

SEQ ID NO: 5169 - DNA, 31 bp, Artificial Sequence
  synthetic circulating small noncoding RNA (sncRNA) 5' transfer RNA (tRNA) half
tccccgtcggggaatcgaaccccggtctccc

SEQ ID NO: 5170 - DNA, 21 bp, Artificial Sequence
  synthetic circulating small noncoding RNA (sncRNA) 5' transfer RNA (tRNA) half
tccccggcacctccagttttc

SEQ ID NO: 5171 - DNA, 13 bp, Artificial Sequence
  synthetic circulating small noncoding RNA (sncRNA) 5' transfer RNA (tRNA) half
aaccagcgaccta

SEQ ID NO: 5172 - DNA, 24 bp, Artificial Sequence
  synthetic circulating small noncoding RNA (sncRNA) 5' transfer RNA (tRNA) half
gagtccagagtgctaaccattaca

SEQ ID NO: 5173 - DNA, 29 bp, Artificial Sequence
  synthetic circulating small noncoding RNA (sncRNA) 5' transfer RNA (tRNA) half
gaccccgacgtgattcgaacacgcagcct

SEQ ID NO: 5174 - DNA, 15 bp, Artificial Sequence
  synthetic circulating small noncoding RNA (sncRNA) 5' transfer RNA (tRNA) half
tcagtcggtagagca

SEQ ID NO: 5175 - DNA, 20 bp, Artificial Sequence
  synthetic circulating small noncoding RNA (sncRNA) 5' transfer RNA (tRNA) half
ttgcgttggccgggaatcga

SEQ ID NO: 5176 - DNA, 23 bp, Artificial Sequence
  synthetic circulating small noncoding RNA (sncRNA) 5' transfer RNA (tRNA) half
cgcccgaacagggacttgaaccc

SEQ ID NO: 5177 - DNA, 13 bp, Artificial Sequence
  synthetic circulating small noncoding RNA (sncRNA) 5' transfer RNA (tRNA) half
tcggctgttaacc

SEQ ID NO: 5178 - DNA, 27 bp, Artificial Sequence
  synthetic circulating small noncoding RNA (sncRNA) 5' transfer RNA (tRNA) half
ctgggtgaaaaccaggaatcctaaccg

SEQ ID NO: 5179 - DNA, 16 bp, Artificial Sequence
  synthetic circulating small noncoding RNA (sncRNA) 5' transfer RNA (tRNA) half
ttcccggtcagggaaa

SEQ ID NO: 5180 - DNA, 35 bp, Artificial Sequence
  synthetic circulating small noncoding RNA (sncRNA) 5' transfer RNA (tRNA) half
ttaggcgaatgtgataaccactacactacggaaac

SEQ ID NO: 5181 - DNA, 35 bp, Artificial Sequence
  synthetic circulating small noncoding RNA (sncRNA) 5' transfer RNA (tRNA) half
gtgccccgtgtgaggatcgaactcacgaccttcag

SEQ ID NO: 5182 - DNA, 23 bp, Artificial Sequence
  synthetic circulating small noncoding RNA (sncRNA) 5' transfer RNA (tRNA) half
accccggtctcccgcgtgacagg

SEQ ID NO: 5183 - DNA, 25 bp, Artificial Sequence
  synthetic circulating small noncoding RNA (sncRNA) 5' transfer RNA (tRNA) half
gtctccccgtcggggaatcgaaccc

SEQ ID NO: 5184 - DNA, 35 bp, Artificial Sequence
  synthetic circulating small noncoding RNA (sncRNA) 5' transfer RNA (tRNA) half
gctgaccccgacgtgatttgaacacgcaaccttct

SEQ ID NO: 5185 - DNA, 19 bp, Artificial Sequence
  synthetic circulating small noncoding RNA (sncRNA) 5' transfer RNA (tRNA) half
gcgaatgtgataaccacta

SEQ ID NO: 5186 - DNA, 29 bp, Artificial Sequence
  synthetic circulating small noncoding RNA (sncRNA) 5' transfer RNA (tRNA) half
tttcgacgaggatgggattcgaacccatg

SEQ ID NO: 5187 - DNA, 42 bp, Artificial Sequence
  synthetic circulating small noncoding RNA (sncRNA) 5' transfer RNA (tRNA) half
ttaaccgaaaggttggtggttcgagcccacccagggacgaca

SEQ ID NO: 5188 - DNA, 32 bp, Artificial Sequence
  synthetic circulating small noncoding RNA (sncRNA) 5' transfer RNA (tRNA) half
cagaagattgcaggttcgagtcctgccgcggt

SEQ ID NO: 5189 - DNA, 26 bp, Artificial Sequence
  synthetic circulating small noncoding RNA (sncRNA) 5' transfer RNA (tRNA) half
catggtctagcggttaggattcctgg

SEQ ID NO: 5190 - DNA, 36 bp, Artificial Sequence
  synthetic circulating small noncoding RNA (sncRNA) 5' transfer RNA (tRNA) half
acgcgggagaccggggttcgattccccgacggggag

SEQ ID NO: 5191 - DNA, 43 bp, Artificial Sequence
  synthetic circulating small noncoding RNA (sncRNA) 5' transfer RNA (tRNA) half
tggcagcggtgggattcgaacccacgcccccgaagagactgga

SEQ ID NO: 5192 - DNA, 13 bp, Artificial Sequence
  synthetic circulating small noncoding RNA (sncRNA) 5' transfer RNA (tRNA) half
gggagaccggggt

SEQ ID NO: 5193 - DNA, 24 bp, Artificial Sequence
  synthetic circulating small noncoding RNA (sncRNA) 5' transfer RNA (tRNA) half
actttgaatccagcgatccgagtt

SEQ ID NO: 5194 - DNA, 12 bp, Artificial Sequence
  synthetic circulating small noncoding RNA (sncRNA) 5' transfer RNA (tRNA) half
cttcgagccgga

SEQ ID NO: 5195 - DNA, 33 bp, Artificial Sequence
  synthetic circulating small noncoding RNA (sncRNA) 5' transfer RNA (tRNA) half
tggcccgtacggggatcgaacccgcgaccttgg

SEQ ID NO: 5196 - DNA, 27 bp, Artificial Sequence
  synthetic circulating small noncoding RNA (sncRNA) 5' transfer RNA (tRNA) half
ccatatggtctagcggttaggattcct

SEQ ID NO: 5197 - DNA, 36 bp, Artificial Sequence
  synthetic circulating small noncoding RNA (sncRNA) 5' transfer RNA (tRNA) half
gcatgaggtcctgggttcgatccccagcatctccag

SEQ ID NO: 5198 - DNA, 11 bp, Artificial Sequence
  synthetic circulating small noncoding RNA (sncRNA) 5' transfer RNA (tRNA) half
cggtctcccgc

SEQ ID NO: 5199 - DNA, 17 bp, Artificial Sequence
  synthetic circulating small noncoding RNA (sncRNA) 5' transfer RNA (tRNA) half
tccagcgccttagacca

SEQ ID NO: 5200 - DNA, 35 bp, Artificial Sequence
  synthetic circulating small noncoding RNA (sncRNA) 5' transfer RNA (tRNA) half
gagggggcacccggatttgaaccagggacctcttg

SEQ ID NO: 5201 - DNA, 9 bp, Artificial Sequence
  synthetic circulating small noncoding RNA (sncRNA) 5' transfer RNA (tRNA) half
gctcgtccg

SEQ ID NO: 5202 - DNA, 19 bp, Artificial Sequence
  synthetic circulating small noncoding RNA (sncRNA) 5' transfer RNA (tRNA) half
tccattaggccacgtggtc

SEQ ID NO: 5203 - DNA, 16 bp, Artificial Sequence
  synthetic circulating small noncoding RNA (sncRNA) 5' transfer RNA (tRNA) half
gagtctcatgctctac

SEQ ID NO: 5204 - DNA, 35 bp, Artificial Sequence
  synthetic circulating small noncoding RNA (sncRNA) 5' transfer RNA (tRNA) half
ttccctgaccgggaatcgaacccgggccgcggcgg

SEQ ID NO: 5205 - DNA, 36 bp, Artificial Sequence
  synthetic circulating small noncoding RNA (sncRNA) 5' transfer RNA (tRNA) half
aacaggagatcctgggttcgaatcccagcggtgcct

SEQ ID NO: 5206 - DNA, 14 bp, Artificial Sequence
  synthetic circulating small noncoding RNA (sncRNA) 5' transfer RNA (tRNA) half
cgggccgcggcggt

SEQ ID NO: 5207 - DNA, 10 bp, Artificial Sequence
  synthetic circulating small noncoding RNA (sncRNA) 5' transfer RNA (tRNA) half
agtcaaatgc

SEQ ID NO: 5208 - DNA, 15 bp, Artificial Sequence
  synthetic circulating small noncoding RNA (sncRNA) 5' transfer RNA (tRNA) half
ctccccgtcggggaa

SEQ ID NO: 5209 - DNA, 11 bp, Artificial Sequence
  synthetic circulating small noncoding RNA (sncRNA) 5' transfer RNA (tRNA) half
gagctagccgg

SEQ ID NO: 5210 - DNA, 16 bp, Artificial Sequence
  synthetic circulating small noncoding RNA (sncRNA) 5' transfer RNA (tRNA) half
ggcccagcacgcttcc

SEQ ID NO: 5211 - DNA, 34 bp, Artificial Sequence
  synthetic circulating small noncoding RNA (sncRNA) 5' transfer RNA (tRNA) half
acaggagatcctgggttcgaatcccagtggggcc

SEQ ID NO: 5212 - DNA, 21 bp, Artificial Sequence
  synthetic circulating small noncoding RNA (sncRNA) 5' transfer RNA (tRNA) half
gtcacgaacaggattcgaacc

SEQ ID NO: 5213 - DNA, 25 bp, Artificial Sequence
  synthetic circulating small noncoding RNA (sncRNA) 5' transfer RNA (tRNA) half
gcccaacgtggggctcgaacccacg

SEQ ID NO: 5214 - DNA, 17 bp, Artificial Sequence
  synthetic circulating small noncoding RNA (sncRNA) 5' transfer RNA (tRNA) half
cccacaccgggagtcga

SEQ ID NO: 5215 - DNA, 12 bp, Artificial Sequence
  synthetic circulating small noncoding RNA (sncRNA) 5' transfer RNA (tRNA) half
cgaacccacgac

SEQ ID NO: 5216 - DNA, 30 bp, Artificial Sequence
  synthetic circulating small noncoding RNA (sncRNA) 5' transfer RNA (tRNA) half
gtggcaggcgagaattctaccactgaacca

SEQ ID NO: 5217 - DNA, 31 bp, Artificial Sequence
  synthetic circulating small noncoding RNA (sncRNA) 5' transfer RNA (tRNA) half
aaggttccaccgagatttgaactcggatcgc

SEQ ID NO: 5218 - DNA, 16 bp, Artificial Sequence
  synthetic circulating small noncoding RNA (sncRNA) 5' transfer RNA (tRNA) half
gcaggcgagaattcta

SEQ ID NO: 5219 - DNA, 16 bp, Artificial Sequence
  synthetic circulating small noncoding RNA (sncRNA) 5' transfer RNA (tRNA) half
gaacccgggacctctc

SEQ ID NO: 5220 - DNA, 19 bp, Artificial Sequence
  synthetic circulating small noncoding RNA (sncRNA) 5' transfer RNA (tRNA) half
ttttcacccaggcggcccg

SEQ ID NO: 5221 - DNA, 26 bp, Artificial Sequence
  synthetic circulating small noncoding RNA (sncRNA) 5' transfer RNA (tRNA) half
tggttcgattccggctcgaaggactt

SEQ ID NO: 5222 - DNA, 11 bp, Artificial Sequence
  synthetic circulating small noncoding RNA (sncRNA) 5' transfer RNA (tRNA) half
ggttagcgcgt

SEQ ID NO: 5223 - DNA, 24 bp, Artificial Sequence
  synthetic circulating small noncoding RNA (sncRNA) 5' transfer RNA (tRNA) half
ggggatgtagctcagtggtagagc

SEQ ID NO: 5224 - DNA, 22 bp, Artificial Sequence
  synthetic circulating small noncoding RNA (sncRNA) 5' transfer RNA (tRNA) half
tgaaccctggaccctcagatta

SEQ ID NO: 5225 - DNA, 28 bp, Artificial Sequence
  synthetic circulating small noncoding RNA (sncRNA) 5' transfer RNA (tRNA) half
tttcgacgaggatgggattcgaacccat

SEQ ID NO: 5226 - DNA, 32 bp, Artificial Sequence
  synthetic circulating small noncoding RNA (sncRNA) 5' transfer RNA (tRNA) half
cctccccgtcggggaattgaaccccggtctcc

SEQ ID NO: 5227 - DNA, 17 bp, Artificial Sequence
  synthetic circulating small noncoding RNA (sncRNA) 5' transfer RNA (tRNA) half
cgcaggttcgaatcctg

SEQ ID NO: 5228 - DNA, 18 bp, Artificial Sequence
  synthetic circulating small noncoding RNA (sncRNA) 5' transfer RNA (tRNA) half
tcgaaaccgggcggaaac

SEQ ID NO: 5229 - DNA, 9 bp, Artificial Sequence
  synthetic circulating small noncoding RNA (sncRNA) 5' transfer RNA (tRNA) half
attcggcgc

SEQ ID NO: 5230 - DNA, 33 bp, Artificial Sequence
  synthetic circulating small noncoding RNA (sncRNA) 5' transfer RNA (tRNA) half
tgttcccataccgggagtcgaacccgggccgcc

SEQ ID NO: 5231 - DNA, 14 bp, Artificial Sequence
  synthetic circulating small noncoding RNA (sncRNA) 5' transfer RNA (tRNA) half
gaaccggggacctt

SEQ ID NO: 5232 - DNA, 36 bp, Artificial Sequence
  synthetic circulating small noncoding RNA (sncRNA) 5' transfer RNA (tRNA) half
tggagatgccggggatcgaacccggggcctcataca

SEQ ID NO: 5233 - DNA, 25 bp, Artificial Sequence
  synthetic circulating small noncoding RNA (sncRNA) 5' transfer RNA (tRNA) half
cgggttcgattcccgggcggcgcat

SEQ ID NO: 5234 - DNA, 27 bp, Artificial Sequence
  synthetic circulating small noncoding RNA (sncRNA) 5' transfer RNA (tRNA) half
tagtgtagcggttatcacgtctgcttt

SEQ ID NO: 5235 - DNA, 16 bp, Artificial Sequence
  synthetic circulating small noncoding RNA (sncRNA) 5' transfer RNA (tRNA) half
ttatcacgtctgcttt

SEQ ID NO: 5236 - DNA, 29 bp, Artificial Sequence
  synthetic circulating small noncoding RNA (sncRNA) 5' transfer RNA (tRNA) half
catagtgtagcggttatcacgtctgcttt

SEQ ID NO: 5237 - DNA, 18 bp, Artificial Sequence
  synthetic circulating small noncoding RNA (sncRNA) 5' transfer RNA (tRNA) half
tccccggcatctccaact

SEQ ID NO: 5238 - DNA, 22 bp, Artificial Sequence
  synthetic circulating small noncoding RNA (sncRNA) 5' transfer RNA (tRNA) half
cagtcggtagagcatgagactc

SEQ ID NO: 5239 - DNA, 33 bp, Artificial Sequence
  synthetic circulating small noncoding RNA (sncRNA) 5' transfer RNA (tRNA) half
taggttccaccgagatttgaactcggatcgctg

SEQ ID NO: 5240 - DNA, 19 bp, Artificial Sequence
  synthetic circulating small noncoding RNA (sncRNA) 5' transfer RNA (tRNA) half
caggcggggatactaacca

SEQ ID NO: 5241 - DNA, 17 bp, Artificial Sequence
  synthetic circulating small noncoding RNA (sncRNA) 5' transfer RNA (tRNA) half
gccgtcacgaacaggat

SEQ ID NO: 5242 - DNA, 15 bp, Artificial Sequence
  synthetic circulating small noncoding RNA (sncRNA) 5' transfer RNA (tRNA) half
gagtgctaaccatta

SEQ ID NO: 5243 - DNA, 40 bp, Artificial Sequence
  synthetic circulating small noncoding RNA (sncRNA) 5' transfer RNA (tRNA) half
atggttagcactctggactctgaatccagcgatccgagtt

SEQ ID NO: 5244 - DNA, 19 bp, Artificial Sequence
  synthetic circulating small noncoding RNA (sncRNA) 5' transfer RNA (tRNA) half
ggttccaccgagatttgaa

SEQ ID NO: 5245 - DNA, 17 bp, Artificial Sequence
  synthetic circulating small noncoding RNA (sncRNA) 5' transfer RNA (tRNA) half
aaggtccccggttcgaa

SEQ ID NO: 5246 - DNA, 16 bp, Artificial Sequence
  synthetic circulating small noncoding RNA (sncRNA) 5' transfer RNA (tRNA) half
aacgcagagtactaac

SEQ ID NO: 5247 - DNA, 17 bp, Artificial Sequence
  synthetic circulating small noncoding RNA (sncRNA) 5' transfer RNA (tRNA) half
ctaagcgagaatcatac

SEQ ID NO: 5248 - DNA, 30 bp, Artificial Sequence
  synthetic circulating small noncoding RNA (sncRNA) 5' transfer RNA (tRNA) half
agggtccagggttcaagtccctgttcgggc

SEQ ID NO: 5249 - DNA, 24 bp, Artificial Sequence
  synthetic circulating small noncoding RNA (sncRNA) 5' transfer RNA (tRNA) half
cgcccgaacagggacttgaaccct

SEQ ID NO: 5250 - DNA, 22 bp, Artificial Sequence
  synthetic circulating small noncoding RNA (sncRNA) 5' transfer RNA (tRNA) half
ggagatgccggggatcgaaccc

SEQ ID NO: 5251 - DNA, 12 bp, Artificial Sequence
  synthetic circulating small noncoding RNA (sncRNA) 5' transfer RNA (tRNA) half
gaacccgcgacc

SEQ ID NO: 5252 - DNA, 38 bp, Artificial Sequence
  synthetic circulating small noncoding RNA (sncRNA) 5' transfer RNA (tRNA) half
acccaggcggcccgggttcgactcccggtatgggaaca

SEQ ID NO: 5253 - DNA, 40 bp, Artificial Sequence
  synthetic circulating small noncoding RNA (sncRNA) 5' transfer RNA (tRNA) half
ggcggtgagagcgccgaatcctaaccactagaccaccagg

SEQ ID NO: 5254 - DNA, 16 bp, Artificial Sequence
  synthetic circulating small noncoding RNA (sncRNA) 5' transfer RNA (tRNA) half
gggagtcgaacccggg

SEQ ID NO: 5255 - DNA, 15 bp, Artificial Sequence
  synthetic circulating small noncoding RNA (sncRNA) 5' transfer RNA (tRNA) half
gttcaggtcgcagtc

SEQ ID NO: 5256 - DNA, 19 bp, Artificial Sequence
  synthetic circulating small noncoding RNA (sncRNA) 5' transfer RNA (tRNA) half
gcagcggaagcgtgctggg

SEQ ID NO: 5257 - DNA, 19 bp, Artificial Sequence
  synthetic circulating small noncoding RNA (sncRNA) 5' transfer RNA (tRNA) half
gaactggagatgccgggga

SEQ ID NO: 5258 - DNA, 29 bp, Artificial Sequence
  synthetic circulating small noncoding RNA (sncRNA) 5' transfer RNA (tRNA) half
agagtggttcaattccacctttcgggcgg

SEQ ID NO: 5259 - DNA, 27 bp, Artificial Sequence
  synthetic circulating small noncoding RNA (sncRNA) 5' transfer RNA (tRNA) half
accgggagtcgaacccgggccgcctgg

SEQ ID NO: 5260 - DNA, 16 bp, Artificial Sequence
  synthetic circulating small noncoding RNA (sncRNA) 5' transfer RNA (tRNA) half
tccgactccgccggga

SEQ ID NO: 5261 - DNA, 35 bp, Artificial Sequence
  synthetic circulating small noncoding RNA (sncRNA) 5' transfer RNA (tRNA) half
tggtagaattctcgcctgccacgcgggaggcccgg

SEQ ID NO: 5262 - DNA, 22 bp, Artificial Sequence
  synthetic circulating small noncoding RNA (sncRNA) 5' transfer RNA (tRNA) half
gtctaggggtatgattctcgct

SEQ ID NO: 5263 - DNA, 27 bp, Artificial Sequence
  synthetic circulating small noncoding RNA (sncRNA) 5' transfer RNA (tRNA) half
aaatcctaaccactagaccaccaggga

SEQ ID NO: 5264 - DNA, 14 bp, Artificial Sequence
  synthetic circulating small noncoding RNA (sncRNA) 5' transfer RNA (tRNA) half
gtagtcggcaggat

SEQ ID NO: 5265 - DNA, 14 bp, Artificial Sequence
  synthetic circulating small noncoding RNA (sncRNA) 5' transfer RNA (tRNA) half
tatactaacgagga

SEQ ID NO: 5266 - DNA, 36 bp, Artificial Sequence
  synthetic circulating small noncoding RNA (sncRNA) 5' transfer RNA (tRNA) half
tagcgcccgaacagggacttgaaccctggaccctca

SEQ ID NO: 5267 - DNA, 19 bp, Artificial Sequence
  synthetic circulating small noncoding RNA (sncRNA) 5' transfer RNA (tRNA) half
agtggttaggattcggcgc

SEQ ID NO: 5268 - DNA, 18 bp, Artificial Sequence
  synthetic circulating small noncoding RNA (sncRNA) 5' transfer RNA (tRNA) half
cctgaccgggaatcgaac

SEQ ID NO: 5269 - DNA, 21 bp, Artificial Sequence
  synthetic circulating small noncoding RNA (sncRNA) 5' transfer RNA (tRNA) half
ctaccactgagctacatcccc

SEQ ID NO: 5270 - DNA, 26 bp, Artificial Sequence
  synthetic circulating small noncoding RNA (sncRNA) 5' transfer RNA (tRNA) half
attcagagtccagagtgctaaccatt

SEQ ID NO: 5271 - DNA, 22 bp, Artificial Sequence
  synthetic circulating small noncoding RNA (sncRNA) 5' transfer RNA (tRNA) half
caggaatcctaaccgctagacc

SEQ ID NO: 5272 - DNA, 31 bp, Artificial Sequence
  synthetic circulating small noncoding RNA (sncRNA) 5' transfer RNA (tRNA) half
gccccgtgtgaggatcgaactcacgaccttc

SEQ ID NO: 5273 - DNA, 36 bp, Artificial Sequence
  synthetic circulating small noncoding RNA (sncRNA) 5' transfer RNA (tRNA) half
caggagatcctgggttcgaatcccagcggggccttt

SEQ ID NO: 5274 - DNA, 20 bp, Artificial Sequence
  synthetic circulating small noncoding RNA (sncRNA) 5' transfer RNA (tRNA) half
ccaggaatcctaaccgctag

SEQ ID NO: 5275 - DNA, 21 bp, Artificial Sequence
  synthetic circulating small noncoding RNA (sncRNA) 5' transfer RNA (tRNA) half
tccccggcatctccaactttt

SEQ ID NO: 5276 - DNA, 34 bp, Artificial Sequence
  synthetic circulating small noncoding RNA (sncRNA) 5' transfer RNA (tRNA) half
gtatgaggccccgggttcgatccccggcatctcc

SEQ ID NO: 5277 - DNA, 11 bp, Artificial Sequence
  synthetic circulating small noncoding RNA (sncRNA) 5' transfer RNA (tRNA) half
gcccaacgtgg

SEQ ID NO: 5278 - DNA, 39 bp, Artificial Sequence
  synthetic circulating small noncoding RNA (sncRNA) 5' transfer RNA (tRNA) half
atggttagcactctggactctgaatccagcgatccgagt

SEQ ID NO: 5279 - DNA, 20 bp, Artificial Sequence
  synthetic circulating small noncoding RNA (sncRNA) 5' transfer RNA (tRNA) half
cggtttcgaaccggggacct

SEQ ID NO: 5280 - DNA, 30 bp, Artificial Sequence
  synthetic circulating small noncoding RNA (sncRNA) 5' transfer RNA (tRNA) half
ttctgtagtgtagtggttatcacgttcgcc

SEQ ID NO: 5281 - DNA, 39 bp, Artificial Sequence
  synthetic circulating small noncoding RNA (sncRNA) 5' transfer RNA (tRNA) half
ttgtgccccgtgtgaggatcgaactcacgaccttcagat

SEQ ID NO: 5282 - DNA, 22 bp, Artificial Sequence
  synthetic circulating small noncoding RNA (sncRNA) 5' transfer RNA (tRNA) half
accaggaatcctaaccgctaga

SEQ ID NO: 5283 - DNA, 31 bp, Artificial Sequence
  synthetic circulating small noncoding RNA (sncRNA) 5' transfer RNA (tRNA) half
aacgcagcgccttagaccgctcggccatcct

SEQ ID NO: 5284 - DNA, 30 bp, Artificial Sequence
  synthetic circulating small noncoding RNA (sncRNA) 5' transfer RNA (tRNA) half
tttgggctcgtccgggatttgaacccggga

SEQ ID NO: 5285 - DNA, 23 bp, Artificial Sequence
  synthetic circulating small noncoding RNA (sncRNA) 5' transfer RNA (tRNA) half
agctcagtcggtagagcatgaga

SEQ ID NO: 5286 - DNA, 23 bp, Artificial Sequence
  synthetic circulating small noncoding RNA (sncRNA) 5' transfer RNA (tRNA) half
cagtcggtagagcatcagacttt

SEQ ID NO: 5287 - DNA, 27 bp, Artificial Sequence
  synthetic circulating small noncoding RNA (sncRNA) 5' transfer RNA (tRNA) half
gcgaacgtgataaccactacactacgg

SEQ ID NO: 5288 - DNA, 13 bp, Artificial Sequence
  synthetic circulating small noncoding RNA (sncRNA) 5' transfer RNA (tRNA) half
cccggacgagccc

SEQ ID NO: 5289 - DNA, 14 bp, Artificial Sequence
  synthetic circulating small noncoding RNA (sncRNA) 5' transfer RNA (tRNA) half
caggcggggatact

SEQ ID NO: 5290 - DNA, 18 bp, Artificial Sequence
  synthetic circulating small noncoding RNA (sncRNA) 5' transfer RNA (tRNA) half
gggctcgtccgggatttg

SEQ ID NO: 5291 - DNA, 32 bp, Artificial Sequence
  synthetic circulating small noncoding RNA (sncRNA) 5' transfer RNA (tRNA) half
cgccgctggtgtagtggtatcatgcaagattc

SEQ ID NO: 5292 - DNA, 16 bp, Artificial Sequence
  synthetic circulating small noncoding RNA (sncRNA) 5' transfer RNA (tRNA) half
gcgagaggtcccgggt

SEQ ID NO: 5293 - DNA, 21 bp, Artificial Sequence
  synthetic circulating small noncoding RNA (sncRNA) 5' transfer RNA (tRNA) half
gcattggccgggaatcgaacc

SEQ ID NO: 5294 - DNA, 17 bp, Artificial Sequence
  synthetic circulating small noncoding RNA (sncRNA) 5' transfer RNA (tRNA) half
ttcccggtcagggaagc

SEQ ID NO: 5295 - DNA, 27 bp, Artificial Sequence
  synthetic circulating small noncoding RNA (sncRNA) 5' transfer RNA (tRNA) half
ggcattggtggttcagtggtagaattc

SEQ ID NO: 5296 - DNA, 31 bp, Artificial Sequence
  synthetic circulating small noncoding RNA (sncRNA) 5' transfer RNA (tRNA) half
gtccagagtgctaaccattacaccatgggac

SEQ ID NO: 5297 - DNA, 34 bp, Artificial Sequence
  synthetic circulating small noncoding RNA (sncRNA) 5' transfer RNA (tRNA) half
ctcagggtcgtgggttcgagccccacgttgggcg

SEQ ID NO: 5298 - DNA, 12 bp, Artificial Sequence
  synthetic circulating small noncoding RNA (sncRNA) 5' transfer RNA (tRNA) half
ccgggaatcgaa

SEQ ID NO: 5299 - DNA, 15 bp, Artificial Sequence
  synthetic circulating small noncoding RNA (sncRNA) 5' transfer RNA (tRNA) half
ggttagcactctgga

SEQ ID NO: 5300 - DNA, 26 bp, Artificial Sequence
  synthetic circulating small noncoding RNA (sncRNA) 5' transfer RNA (tRNA) half
accaggaatcctaaccgctagaccat

SEQ ID NO: 5301 - DNA, 20 bp, Artificial Sequence
  synthetic circulating small noncoding RNA (sncRNA) 5' transfer RNA (tRNA) half
tcgactcccggtatgggaac

SEQ ID NO: 5302 - DNA, 22 bp, Artificial Sequence
  synthetic circulating small noncoding RNA (sncRNA) 5' transfer RNA (tRNA) half
ctagcggttaggattcctggtt

SEQ ID NO: 5303 - DNA, 19 bp, Artificial Sequence
  synthetic circulating small noncoding RNA (sncRNA) 5' transfer RNA (tRNA) half
gttcagtggtagaattctc

SEQ ID NO: 5304 - DNA, 28 bp, Artificial Sequence
  synthetic circulating small noncoding RNA (sncRNA) 5' transfer RNA (tRNA) half
tccgtagtgtagtggttatcacgttcgc

SEQ ID NO: 5305 - DNA, 24 bp, Artificial Sequence
  synthetic circulating small noncoding RNA (sncRNA) 5' transfer RNA (tRNA) half
gcccgaacagggacttgaaccctg

SEQ ID NO: 5306 - DNA, 23 bp, Artificial Sequence
  synthetic circulating small noncoding RNA (sncRNA) 5' transfer RNA (tRNA) half
caggaatcctaaccgctagacca

SEQ ID NO: 5307 - DNA, 18 bp, Artificial Sequence
  synthetic circulating small noncoding RNA (sncRNA) 5' transfer RNA (tRNA) half
ctgatgctctaccgactg

SEQ ID NO: 5308 - DNA, 21 bp, Artificial Sequence
  synthetic circulating small noncoding RNA (sncRNA) 5' transfer RNA (tRNA) half
cgaaaccgggcggaaacagca

SEQ ID NO: 5309 - DNA, 18 bp, Artificial Sequence
  synthetic circulating small noncoding RNA (sncRNA) 5' transfer RNA (tRNA) half
gtgtaatggttagcactc

SEQ ID NO: 5310 - DNA, 25 bp, Artificial Sequence
  synthetic circulating small noncoding RNA (sncRNA) 5' transfer RNA (tRNA) half
tggactctgaatccagcgatccgag

SEQ ID NO: 5311 - DNA, 35 bp, Artificial Sequence
  synthetic circulating small noncoding RNA (sncRNA) 5' transfer RNA (tRNA) half
ctccccgtcggggaatcgaaccccggtctcccgcg

SEQ ID NO: 5312 - DNA, 34 bp, Artificial Sequence
  synthetic circulating small noncoding RNA (sncRNA) 5' transfer RNA (tRNA) half
gcattggtggttcaatggtagaattctcgcctcc

SEQ ID NO: 5313 - DNA, 25 bp, Artificial Sequence
  synthetic circulating small noncoding RNA (sncRNA) 5' transfer RNA (tRNA) half
tcccacaccgggagtcgaacccggg

SEQ ID NO: 5314 - DNA, 19 bp, Artificial Sequence
  synthetic circulating small noncoding RNA (sncRNA) 5' transfer RNA (tRNA) half
agcatgcgctctaccactg

SEQ ID NO: 5315 - DNA, 17 bp, Artificial Sequence
  synthetic circulating small noncoding RNA (sncRNA) 5' transfer RNA (tRNA) half
gctctcaccgccgcggc

SEQ ID NO: 5316 - DNA, 22 bp, Artificial Sequence
  synthetic circulating small noncoding RNA (sncRNA) 5' transfer RNA (tRNA) half
gcgccgctggtgtagtggtatc

SEQ ID NO: 5317 - DNA, 31 bp, Artificial Sequence
  synthetic circulating small noncoding RNA (sncRNA) 5' transfer RNA (tRNA) half
ttccgtagtgtagtggttatcacgctcgcct

SEQ ID NO: 5318 - DNA, 18 bp, Artificial Sequence
  synthetic circulating small noncoding RNA (sncRNA) 5' transfer RNA (tRNA) half
ctctaccgactgagctag

SEQ ID NO: 5319 - DNA, 30 bp, Artificial Sequence
  synthetic circulating small noncoding RNA (sncRNA) 5' transfer RNA (tRNA) half
gggggtgtagctcagtggtagagcgcatgc

SEQ ID NO: 5320 - DNA, 24 bp, Artificial Sequence
  synthetic circulating small noncoding RNA (sncRNA) 5' transfer RNA (tRNA) half
tcctaaccactagaccaccaggga

SEQ ID NO: 5321 - DNA, 18 bp, Artificial Sequence
  synthetic circulating small noncoding RNA (sncRNA) 5' transfer RNA (tRNA) half
gtggttatcacgctcgcc

SEQ ID NO: 5322 - DNA, 32 bp, Artificial Sequence
  synthetic circulating small noncoding RNA (sncRNA) 5' transfer RNA (tRNA) half
taggttccaccgagatttgaactcggatcgct

SEQ ID NO: 5323 - DNA, 7 bp, Artificial Sequence
  synthetic circulating small noncoding RNA (sncRNA) 5' transfer RNA (tRNA) half
cggcccg

SEQ ID NO: 5324 - DNA, 18 bp, Artificial Sequence
  synthetic circulating small noncoding RNA (sncRNA) 5' transfer RNA (tRNA) half
gttcccataccgggagtc

SEQ ID NO: 5325 - DNA, 25 bp, Artificial Sequence
  synthetic circulating small noncoding RNA (sncRNA) 5' transfer RNA (tRNA) half
gagccagccaggagtcgaacctaga

SEQ ID NO: 5326 - DNA, 19 bp, Artificial Sequence
  synthetic circulating small noncoding RNA (sncRNA) 5' transfer RNA (tRNA) half
tctagtggtatgattctca

SEQ ID NO: 5327 - DNA, 34 bp, Artificial Sequence
  synthetic circulating small noncoding RNA (sncRNA) 5' transfer RNA (tRNA) half
acccgggccgcggcggtgagagcgccgaatccta

SEQ ID NO: 5328 - DNA, 15 bp, Artificial Sequence
  synthetic circulating small noncoding RNA (sncRNA) 5' transfer RNA (tRNA) half
ccataccgggagtcg

SEQ ID NO: 5329 - DNA, 19 bp, Artificial Sequence
  synthetic circulating small noncoding RNA (sncRNA) 5' transfer RNA (tRNA) half
agcggaagcgtgctgggcc

SEQ ID NO: 5330 - DNA, 24 bp, Artificial Sequence
  synthetic circulating small noncoding RNA (sncRNA) 5' transfer RNA (tRNA) half
ccgtgatcgtatagtggttagtac

SEQ ID NO: 5331 - DNA, 31 bp, Artificial Sequence
  synthetic circulating small noncoding RNA (sncRNA) 5' transfer RNA (tRNA) half
gggaggcccgggttcgattcccggccaatgc

SEQ ID NO: 5332 - DNA, 14 bp, Artificial Sequence
  synthetic circulating small noncoding RNA (sncRNA) 5' transfer RNA (tRNA) half
cgcccgaacaggga

SEQ ID NO: 5333 - DNA, 13 bp, Artificial Sequence
  synthetic circulating small noncoding RNA (sncRNA) 5' transfer RNA (tRNA) half
ctgtcacgcggga

SEQ ID NO: 5334 - DNA, 14 bp, Artificial Sequence
  synthetic circulating small noncoding RNA (sncRNA) 5' transfer RNA (tRNA) half
tcccggtcagggaa

SEQ ID NO: 5335 - DNA, 17 bp, Artificial Sequence
  synthetic circulating small noncoding RNA (sncRNA) 5' transfer RNA (tRNA) half
taatggttagcactctg

SEQ ID NO: 5336 - DNA, 31 bp, Artificial Sequence
  synthetic circulating small noncoding RNA (sncRNA) 5' transfer RNA (tRNA) half
ggctccatagctcaggggttagagcactggt

SEQ ID NO: 5337 - DNA, 34 bp, Artificial Sequence
  synthetic circulating small noncoding RNA (sncRNA) 5' transfer RNA (tRNA) half
gtcaggatggccgagtggtctaaggcgccagact

SEQ ID NO: 5338 - DNA, 36 bp, Artificial Sequence
  synthetic circulating small noncoding RNA (sncRNA) 5' transfer RNA (tRNA) half
ccccgtgtgaggatcgaactcacgaccttcagatta

SEQ ID NO: 5339 - DNA, 16 bp, Artificial Sequence
  synthetic circulating small noncoding RNA (sncRNA) 5' transfer RNA (tRNA) half
gcagtcaaatgctcta

SEQ ID NO: 5340 - DNA, 13 bp, Artificial Sequence
  synthetic circulating small noncoding RNA (sncRNA) 5' transfer RNA (tRNA) half
attcgaacctgcg

SEQ ID NO: 5341 - DNA, 30 bp, Artificial Sequence
  synthetic circulating small noncoding RNA (sncRNA) 5' transfer RNA (tRNA) half
tccccgtcggggaatcgaaccccggtctcc

SEQ ID NO: 5342 - DNA, 23 bp, Artificial Sequence
  synthetic circulating small noncoding RNA (sncRNA) 5' transfer RNA (tRNA) half
tcaattccacctttcgggcggga

SEQ ID NO: 5343 - DNA, 30 bp, Artificial Sequence
  synthetic circulating small noncoding RNA (sncRNA) 5' transfer RNA (tRNA) half
gccccagcgagatttgaactcgcgacccct

SEQ ID NO: 5344 - DNA, 22 bp, Artificial Sequence
  synthetic circulating small noncoding RNA (sncRNA) 5' transfer RNA (tRNA) half
tgggtgcgagaggtcccgggtt

SEQ ID NO: 5345 - DNA, 16 bp, Artificial Sequence
  synthetic circulating small noncoding RNA (sncRNA) 5' transfer RNA (tRNA) half
gcattggtggttcagt

SEQ ID NO: 5346 - DNA, 24 bp, Artificial Sequence
  synthetic circulating small noncoding RNA (sncRNA) 5' transfer RNA (tRNA) half
taccgactgagctatccgggctct

SEQ ID NO: 5347 - DNA, 9 bp, Artificial Sequence
  synthetic circulating small noncoding RNA (sncRNA) 5' transfer RNA (tRNA) half
agtcgaacc

SEQ ID NO: 5348 - DNA, 10 bp, Artificial Sequence
  synthetic circulating small noncoding RNA (sncRNA) 5' transfer RNA (tRNA) half
gggctcgaac

SEQ ID NO: 5349 - DNA, 37 bp, Artificial Sequence
  synthetic circulating small noncoding RNA (sncRNA) 5' transfer RNA (tRNA) half
accgcccaacgtggggctcgaacccacgaccctggga

SEQ ID NO: 5350 - DNA, 33 bp, Artificial Sequence
  synthetic circulating small noncoding RNA (sncRNA) 5' transfer RNA (tRNA) half
accccgacgtgattcgaacacgcagccttctga

SEQ ID NO: 5351 - DNA, 27 bp, Artificial Sequence
  synthetic circulating small noncoding RNA (sncRNA) 5' transfer RNA (tRNA) half
accaccaacctttcggttaacagccga

SEQ ID NO: 5352 - DNA, 20 bp, Artificial Sequence
  synthetic circulating small noncoding RNA (sncRNA) 5' transfer RNA (tRNA) half
aggcgagaattctaccattg

SEQ ID NO: 5353 - DNA, 29 bp, Artificial Sequence
  synthetic circulating small noncoding RNA (sncRNA) 5' transfer RNA (tRNA) half
cccgtcggggaatcgaaccccggtctccc

SEQ ID NO: 5354 - DNA, 26 bp, Artificial Sequence
  synthetic circulating small noncoding RNA (sncRNA) 5' transfer RNA (tRNA) half
agtccagagtgctaaccattacacca

SEQ ID NO: 5355 - DNA, 20 bp, Artificial Sequence
  synthetic circulating small noncoding RNA (sncRNA) 5' transfer RNA (tRNA) half
gacaggcggggatactaacc

SEQ ID NO: 5356 - DNA, 34 bp, Artificial Sequence
  synthetic circulating small noncoding RNA (sncRNA) 5' transfer RNA (tRNA) half
tcagaagattgagggttcgaatcccttcgtggtt

SEQ ID NO: 5357 - DNA, 34 bp, Artificial Sequence
  synthetic circulating small noncoding RNA (sncRNA) 5' transfer RNA (tRNA) half
gggggtatagctcagtggtagagcatttgactgc

SEQ ID NO: 5358 - DNA, 33 bp, Artificial Sequence
  synthetic circulating small noncoding RNA (sncRNA) 5' transfer RNA (tRNA) half
tgtttccgtagtgtagtggttatcacgttcgcc

SEQ ID NO: 5359 - DNA, 27 bp, Artificial Sequence
  synthetic circulating small noncoding RNA (sncRNA) 5' transfer RNA (tRNA) half
tgatcgtatagtggttagtactctgcg

SEQ ID NO: 5360 - DNA, 36 bp, Artificial Sequence
  synthetic circulating small noncoding RNA (sncRNA) 5' transfer RNA (tRNA) half
gttcccataccgggagtcgaacccgggccgcctggg

SEQ ID NO: 5361 - DNA, 14 bp, Artificial Sequence
  synthetic circulating small noncoding RNA (sncRNA) 5' transfer RNA (tRNA) half
gggcccagcacgct

SEQ ID NO: 5362 - DNA, 14 bp, Artificial Sequence
  synthetic circulating small noncoding RNA (sncRNA) 5' transfer RNA (tRNA) half
tccccgtcggggaa

SEQ ID NO: 5363 - DNA, 34 bp, Artificial Sequence
  synthetic circulating small noncoding RNA (sncRNA) 5' transfer RNA (tRNA) half
gtatgaggccccgggttcaatccccggcatctcc

SEQ ID NO: 5364 - DNA, 12 bp, Artificial Sequence
  synthetic circulating small noncoding RNA (sncRNA) 5' transfer RNA (tRNA) half
ggttccaccgag

SEQ ID NO: 5365 - DNA, 20 bp, Artificial Sequence
  synthetic circulating small noncoding RNA (sncRNA) 5' transfer RNA (tRNA) half
taatggttagcactctggac

SEQ ID NO: 5366 - DNA, 29 bp, Artificial Sequence
  synthetic circulating small noncoding RNA (sncRNA) 5' transfer RNA (tRNA) half
attcagagtccagagtgctaaccattaca

SEQ ID NO: 5367 - DNA, 17 bp, Artificial Sequence
  synthetic circulating small noncoding RNA (sncRNA) 5' transfer RNA (tRNA) half
gagtcgaacccgggccg

SEQ ID NO: 5368 - DNA, 32 bp, Artificial Sequence
  synthetic circulating small noncoding RNA (sncRNA) 5' transfer RNA (tRNA) half
agaaggtcctgggttcgagccccagtggaacc

SEQ ID NO: 5369 - DNA, 23 bp, Artificial Sequence
  synthetic circulating small noncoding RNA (sncRNA) 5' transfer RNA (tRNA) half
tcgggtgcgagaggtcccgggtt

SEQ ID NO: 5370 - DNA, 25 bp, Artificial Sequence
  synthetic circulating small noncoding RNA (sncRNA) 5' transfer RNA (tRNA) half
gtagtcgtggccgagtggttaaggc

SEQ ID NO: 5371 - DNA, 29 bp, Artificial Sequence
  synthetic circulating small noncoding RNA (sncRNA) 5' transfer RNA (tRNA) half
gcgcccgaacagggacttgaaccctggac

SEQ ID NO: 5372 - DNA, 21 bp, Artificial Sequence
  synthetic circulating small noncoding RNA (sncRNA) 5' transfer RNA (tRNA) half
cagagtactaaccactatacg

SEQ ID NO: 5373 - DNA, 18 bp, Artificial Sequence
  synthetic circulating small noncoding RNA (sncRNA) 5' transfer RNA (tRNA) half
gattccggctcgaaggac

SEQ ID NO: 5374 - DNA, 23 bp, Artificial Sequence
  synthetic circulating small noncoding RNA (sncRNA) 5' transfer RNA (tRNA) half
gtctagtggttaggattcggcgc

SEQ ID NO: 5375 - DNA, 15 bp, Artificial Sequence
  synthetic circulating small noncoding RNA (sncRNA) 5' transfer RNA (tRNA) half
tccacctttcgggcg

SEQ ID NO: 5376 - DNA, 16 bp, Artificial Sequence
  synthetic circulating small noncoding RNA (sncRNA) 5' transfer RNA (tRNA) half
gcgagaggtagcggga

SEQ ID NO: 5377 - DNA, 28 bp, Artificial Sequence
  synthetic circulating small noncoding RNA (sncRNA) 5' transfer RNA (tRNA) half
gcagagtactaaccactatacgatctcg

SEQ ID NO: 5378 - DNA, 23 bp, Artificial Sequence
  synthetic circulating small noncoding RNA (sncRNA) 5' transfer RNA (tRNA) half
aactcggatcgctggattcagag

SEQ ID NO: 5379 - DNA, 21 bp, Artificial Sequence
  synthetic circulating small noncoding RNA (sncRNA) 5' transfer RNA (tRNA) half
aagatggagggggcacccgga

SEQ ID NO: 5380 - DNA, 42 bp, Artificial Sequence
  synthetic circulating small noncoding RNA (sncRNA) 5' transfer RNA (tRNA) half
tcgcgtgtgaggcgaacgtgataaccactacactacggaaac

SEQ ID NO: 5381 - DNA, 12 bp, Artificial Sequence
  synthetic circulating small noncoding RNA (sncRNA) 5' transfer RNA (tRNA) half
gagctatccggg

SEQ ID NO: 5382 - DNA, 17 bp, Artificial Sequence
  synthetic circulating small noncoding RNA (sncRNA) 5' transfer RNA (tRNA) half
cgcagcgccttagaccg

SEQ ID NO: 5383 - DNA, 26 bp, Artificial Sequence
  synthetic circulating small noncoding RNA (sncRNA) 5' transfer RNA (tRNA) half
gtagaattctcgcctgccacgcggga

SEQ ID NO: 5384 - DNA, 31 bp, Artificial Sequence
  synthetic circulating small noncoding RNA (sncRNA) 5' transfer RNA (tRNA) half
cgtggcaggcgagaattctaccactgaacca

SEQ ID NO: 5385 - DNA, 32 bp, Artificial Sequence
  synthetic circulating small noncoding RNA (sncRNA) 5' transfer RNA (tRNA) half
cggatagctcagtcggtagagcatcagacttt

SEQ ID NO: 5386 - DNA, 17 bp, Artificial Sequence
  synthetic circulating small noncoding RNA (sncRNA) 5' transfer RNA (tRNA) half
gaatcgaaccccggtct

SEQ ID NO: 5387 - DNA, 31 bp, Artificial Sequence
  synthetic circulating small noncoding RNA (sncRNA) 5' transfer RNA (tRNA) half
ggcccgtacggggatcgaacccgcgaccttg

SEQ ID NO: 5388 - DNA, 28 bp, Artificial Sequence
  synthetic circulating small noncoding RNA (sncRNA) 5' transfer RNA (tRNA) half
gcgaacgtgataaccactacactacgga

SEQ ID NO: 5389 - DNA, 34 bp, Artificial Sequence
  synthetic circulating small noncoding RNA (sncRNA) 5' transfer RNA (tRNA) half
gcattggtggttcagtggtagaattctcgcctcc

SEQ ID NO: 5390 - DNA, 35 bp, Artificial Sequence
  synthetic circulating small noncoding RNA (sncRNA) 5' transfer RNA (tRNA) half
aggcggcccgggttcgactcccggtatgggaacag

SEQ ID NO: 5391 - DNA, 28 bp, Artificial Sequence
  synthetic circulating small noncoding RNA (sncRNA) 5' transfer RNA (tRNA) half
gtatagctcagtggtagagcatttgact

SEQ ID NO: 5392 - DNA, 6 bp, Artificial Sequence
  synthetic circulating small noncoding RNA (sncRNA) 5' transfer RNA (tRNA) half
ggcccg

SEQ ID NO: 5393 - DNA, 30 bp, Artificial Sequence
  synthetic circulating small noncoding RNA (sncRNA) 5' transfer RNA (tRNA) half
gccccgtgtgaggatcgaactcacgacctt

SEQ ID NO: 5394 - DNA, 13 bp, Artificial Sequence
  synthetic circulating small noncoding RNA (sncRNA) 5' transfer RNA (tRNA) half
gattccggctcga

SEQ ID NO: 5395 - DNA, 22 bp, Artificial Sequence
  synthetic circulating small noncoding RNA (sncRNA) 5' transfer RNA (tRNA) half
atagtggttagtactctgcgtt

SEQ ID NO: 5396 - DNA, 28 bp, Artificial Sequence
  synthetic circulating small noncoding RNA (sncRNA) 5' transfer RNA (tRNA) half
atagctcagtcggtagagcatcagactt

SEQ ID NO: 5397 - DNA, 31 bp, Artificial Sequence
  synthetic circulating small noncoding RNA (sncRNA) 5' transfer RNA (tRNA) half
cccgtcggggaattgaaccccggtctcccgc

SEQ ID NO: 5398 - DNA, 36 bp, Artificial Sequence
  synthetic circulating small noncoding RNA (sncRNA) 5' transfer RNA (tRNA) half
tcaggcaccgctgggattcgaacccaggatctcctg

SEQ ID NO: 5399 - DNA, 21 bp, Artificial Sequence
  synthetic circulating small noncoding RNA (sncRNA) 5' transfer RNA (tRNA) half
tctcatgctctaccgactgag

SEQ ID NO: 5400 - DNA, 15 bp, Artificial Sequence
  synthetic circulating small noncoding RNA (sncRNA) 5' transfer RNA (tRNA) half
ctcagtcggtagagc

SEQ ID NO: 5401 - DNA, 34 bp, Artificial Sequence
  synthetic circulating small noncoding RNA (sncRNA) 5' transfer RNA (tRNA) half
aggcgagaattctaccactgaaccaccaatgcga

SEQ ID NO: 5402 - DNA, 39 bp, Artificial Sequence
  synthetic circulating small noncoding RNA (sncRNA) 5' transfer RNA (tRNA) half
ttcgcgtgtgaggcgaacgtgataaccactacactacgg

SEQ ID NO: 5403 - DNA, 13 bp, Artificial Sequence
  synthetic circulating small noncoding RNA (sncRNA) 5' transfer RNA (tRNA) half
ggccccagcgaga

SEQ ID NO: 5404 - DNA, 19 bp, Artificial Sequence
  synthetic circulating small noncoding RNA (sncRNA) 5' transfer RNA (tRNA) half
cggtttcgaaccggggacc

SEQ ID NO: 5405 - DNA, 22 bp, Artificial Sequence
  synthetic circulating small noncoding RNA (sncRNA) 5' transfer RNA (tRNA) half
gcattggtggttcagtggtaga

SEQ ID NO: 5406 - DNA, 30 bp, Artificial Sequence
  synthetic circulating small noncoding RNA (sncRNA) 5' transfer RNA (tRNA) half
aacccgggccgcggcggtgagagcgccgaa

SEQ ID NO: 5407 - DNA, 10 bp, Artificial Sequence
  synthetic circulating small noncoding RNA (sncRNA) 5' transfer RNA (tRNA) half
cgaacctgcg

SEQ ID NO: 5408 - DNA, 11 bp, Artificial Sequence
  synthetic circulating small noncoding RNA (sncRNA) 5' transfer RNA (tRNA) half
agtcgaacctg

SEQ ID NO: 5409 - DNA, 37 bp, Artificial Sequence
  synthetic circulating small noncoding RNA (sncRNA) 5' transfer RNA (tRNA) half
cgcgggaggcccgggttcgattcccggccaatgcacg

SEQ ID NO: 5410 - DNA, 17 bp, Artificial Sequence
  synthetic circulating small noncoding RNA (sncRNA) 5' transfer RNA (tRNA) half
ccgccgcggcccgggtt

SEQ ID NO: 5411 - DNA, 18 bp, Artificial Sequence
  synthetic circulating small noncoding RNA (sncRNA) 5' transfer RNA (tRNA) half
attcagagtccagagtgc

SEQ ID NO: 5412 - DNA, 40 bp, Artificial Sequence
  synthetic circulating small noncoding RNA (sncRNA) 5' transfer RNA (tRNA) half
agtctccccgtcggggaatcgaaccccggtctcccgcgtg

SEQ ID NO: 5413 - DNA, 32 bp, Artificial Sequence
  synthetic circulating small noncoding RNA (sncRNA) 5' transfer RNA (tRNA) half
tcagaaggttgcgtgttcaaatcacgtcgggg

SEQ ID NO: 5414 - DNA, 27 bp, Artificial Sequence
  synthetic circulating small noncoding RNA (sncRNA) 5' transfer RNA (tRNA) half
attggtggttcagtggtagaattctcg

SEQ ID NO: 5415 - DNA, 21 bp, Artificial Sequence
  synthetic circulating small noncoding RNA (sncRNA) 5' transfer RNA (tRNA) half
cgatccatcgacctctgggtt

SEQ ID NO: 5416 - DNA, 12 bp, Artificial Sequence
  synthetic circulating small noncoding RNA (sncRNA) 5' transfer RNA (tRNA) half
tcttcgggggcg

SEQ ID NO: 5417 - DNA, 14 bp, Artificial Sequence
  synthetic circulating small noncoding RNA (sncRNA) 5' transfer RNA (tRNA) half
ggccccagcgagat

SEQ ID NO: 5418 - DNA, 37 bp, Artificial Sequence
  synthetic circulating small noncoding RNA (sncRNA) 5' transfer RNA (tRNA) half
aactcggatcgctggattcagagtccagagtgctaac

SEQ ID NO: 5419 - DNA, 35 bp, Artificial Sequence
  synthetic circulating small noncoding RNA (sncRNA) 5' transfer RNA (tRNA) half
tctgaaggtcctgagttcgaacctcagagggggca

SEQ ID NO: 5420 - DNA, 30 bp, Artificial Sequence
  synthetic circulating small noncoding RNA (sncRNA) 5' transfer RNA (tRNA) half
tcccacaccgggagtcgaacccgggccgcc

SEQ ID NO: 5421 - DNA, 34 bp, Artificial Sequence
  synthetic circulating small noncoding RNA (sncRNA) 5' transfer RNA (tRNA) half
tagaattctcgcctgccacgcgggaggcccgggt

SEQ ID NO: 5422 - DNA, 35 bp, Artificial Sequence
  synthetic circulating small noncoding RNA (sncRNA) 5' transfer RNA (tRNA) half
tgcatgaggtcctgggttcgatccccagcatctcc

SEQ ID NO: 5423 - DNA, 21 bp, Artificial Sequence
  synthetic circulating small noncoding RNA (sncRNA) 5' transfer RNA (tRNA) half
accgggcggaaacaactttta

SEQ ID NO: 5424 - DNA, 37 bp, Artificial Sequence
  synthetic circulating small noncoding RNA (sncRNA) 5' transfer RNA (tRNA) half
ctgttcccataccgggagtcgaacccgggccgcctgg

SEQ ID NO: 5425 - DNA, 24 bp, Artificial Sequence
  synthetic circulating small noncoding RNA (sncRNA) 5' transfer RNA (tRNA) half
atcatacccctagaccaacgagcc

SEQ ID NO: 5426 - DNA, 14 bp, Artificial Sequence
  synthetic circulating small noncoding RNA (sncRNA) 5' transfer RNA (tRNA) half
ggaatcctaaccgc

SEQ ID NO: 5427 - DNA, 28 bp, Artificial Sequence
  synthetic circulating small noncoding RNA (sncRNA) 5' transfer RNA (tRNA) half
atccatcgacctctgggttatgggccca

SEQ ID NO: 5428 - DNA, 37 bp, Artificial Sequence
  synthetic circulating small noncoding RNA (sncRNA) 5' transfer RNA (tRNA) half
taaaccaggggtcgcgagttcaaatctcgctggggcc

SEQ ID NO: 5429 - DNA, 19 bp, Artificial Sequence
  synthetic circulating small noncoding RNA (sncRNA) 5' transfer RNA (tRNA) half
ggtgagagcgccgaatcct

SEQ ID NO: 5430 - DNA, 27 bp, Artificial Sequence
  synthetic circulating small noncoding RNA (sncRNA) 5' transfer RNA (tRNA) half
tcccgcgtgacaggcggggatactcac

SEQ ID NO: 5431 - DNA, 14 bp, Artificial Sequence
  synthetic circulating small noncoding RNA (sncRNA) 5' transfer RNA (tRNA) half
ggagatgccgggga

SEQ ID NO: 5432 - DNA, 34 bp, Artificial Sequence
  synthetic circulating small noncoding RNA (sncRNA) 5' transfer RNA (tRNA) half
caggagatcctgggttcgaatcccagtggggcct

SEQ ID NO: 5433 - DNA, 18 bp, Artificial Sequence
  synthetic circulating small noncoding RNA (sncRNA) 5' transfer RNA (tRNA) half
tctaggggtatgattctc

SEQ ID NO: 5434 - DNA, 12 bp, Artificial Sequence
  synthetic circulating small noncoding RNA (sncRNA) 5' transfer RNA (tRNA) half
gaccaccaggga

SEQ ID NO: 5435 - DNA, 16 bp, Artificial Sequence
  synthetic circulating small noncoding RNA (sncRNA) 5' transfer RNA (tRNA) half
ggctaggattcggcgc

SEQ ID NO: 5436 - DNA, 26 bp, Artificial Sequence
  synthetic circulating small noncoding RNA (sncRNA) 5' transfer RNA (tRNA) half
ccaggaatcctaaccgctagaccatg

SEQ ID NO: 5437 - DNA, 35 bp, Artificial Sequence
  synthetic circulating small noncoding RNA (sncRNA) 5' transfer RNA (tRNA) half
gagccagccaggagtcgaacctggaatcttctgat

SEQ ID NO: 5438 - DNA, 13 bp, Artificial Sequence
  synthetic circulating small noncoding RNA (sncRNA) 5' transfer RNA (tRNA) half
cgattccccgacg

SEQ ID NO: 5439 - DNA, 22 bp, Artificial Sequence
  synthetic circulating small noncoding RNA (sncRNA) 5' transfer RNA (tRNA) half
gcccggatagctcagtcggtag

SEQ ID NO: 5440 - DNA, 37 bp, Artificial Sequence
  synthetic circulating small noncoding RNA (sncRNA) 5' transfer RNA (tRNA) half
acaggagatcctgggttcgaatcccagcggggccttt

SEQ ID NO: 5441 - DNA, 14 bp, Artificial Sequence
  synthetic circulating small noncoding RNA (sncRNA) 5' transfer RNA (tRNA) half
ggccggttagctca

SEQ ID NO: 5442 - DNA, 29 bp, Artificial Sequence
  synthetic circulating small noncoding RNA (sncRNA) 5' transfer RNA (tRNA) half
gggggattagctcaaatggtagagcgctc

SEQ ID NO: 5443 - DNA, 11 bp, Artificial Sequence
  synthetic circulating small noncoding RNA (sncRNA) 5' transfer RNA (tRNA) half
gccgaatccta

SEQ ID NO: 5444 - DNA, 29 bp, Artificial Sequence
  synthetic circulating small noncoding RNA (sncRNA) 5' transfer RNA (tRNA) half
ctcccgcgtggcaggcgagaattctacca

SEQ ID NO: 5445 - DNA, 32 bp, Artificial Sequence
  synthetic circulating small noncoding RNA (sncRNA) 5' transfer RNA (tRNA) half
ttccgtagtgtagtggttatcacgttcgcctc

SEQ ID NO: 5446 - DNA, 22 bp, Artificial Sequence
  synthetic circulating small noncoding RNA (sncRNA) 5' transfer RNA (tRNA) half
cggatagctcagtcggtagagc

SEQ ID NO: 5447 - DNA, 17 bp, Artificial Sequence
  synthetic circulating small noncoding RNA (sncRNA) 5' transfer RNA (tRNA) half
cggttaggattcctggt

SEQ ID NO: 5448 - DNA, 40 bp, Artificial Sequence
  synthetic circulating small noncoding RNA (sncRNA) 5' transfer RNA (tRNA) half
tgccccgtgtgaggatcgaactcacgaccttcagattatg

SEQ ID NO: 5449 - DNA, 37 bp, Artificial Sequence
  synthetic circulating small noncoding RNA (sncRNA) 5' transfer RNA (tRNA) half
acgcgaaaggtccccggttcgaaaccgggcggaaaca

SEQ ID NO: 5450 - DNA, 33 bp, Artificial Sequence
  synthetic circulating small noncoding RNA (sncRNA) 5' transfer RNA (tRNA) half
cccggctagctcagtcggtagagcatgagactc

SEQ ID NO: 5451 - DNA, 14 bp, Artificial Sequence
  synthetic circulating small noncoding RNA (sncRNA) 5' transfer RNA (tRNA) half
acccgggtcaactg

SEQ ID NO: 5452 - DNA, 32 bp, Artificial Sequence
  synthetic circulating small noncoding RNA (sncRNA) 5' transfer RNA (tRNA) half
gcgggagaccggggttcgattccccgacgggg

SEQ ID NO: 5453 - DNA, 35 bp, Artificial Sequence
  synthetic circulating small noncoding RNA (sncRNA) 5' transfer RNA (tRNA) half
tggttaggattcggcgctctcaccgccgcggcccg

SEQ ID NO: 5454 - DNA, 16 bp, Artificial Sequence
  synthetic circulating small noncoding RNA (sncRNA) 5' transfer RNA (tRNA) half
actatactaacgagga

SEQ ID NO: 5455 - DNA, 35 bp, Artificial Sequence
  synthetic circulating small noncoding RNA (sncRNA) 5' transfer RNA (tRNA) half
aggccctgctgggatttgaacccaggatctcctgt

SEQ ID NO: 5456 - DNA, 13 bp, Artificial Sequence
  synthetic circulating small noncoding RNA (sncRNA) 5' transfer RNA (tRNA) half
gttcgaacctgcg

SEQ ID NO: 5457 - DNA, 38 bp, Artificial Sequence
  synthetic circulating small noncoding RNA (sncRNA) 5' transfer RNA (tRNA) half
tacctccccgtcggggaatcgaaccccggtctcccgcg

SEQ ID NO: 5458 - DNA, 16 bp, Artificial Sequence
  synthetic circulating small noncoding RNA (sncRNA) 5' transfer RNA (tRNA) half
cgaacccgggcctccc

SEQ ID NO: 5459 - DNA, 27 bp, Artificial Sequence
  synthetic circulating small noncoding RNA (sncRNA) 5' transfer RNA (tRNA) half
tctccccgtcggggaatcgaaccccgg

SEQ ID NO: 5460 - DNA, 18 bp, Artificial Sequence
  synthetic circulating small noncoding RNA (sncRNA) 5' transfer RNA (tRNA) half
ggcagcggtgggattcga

SEQ ID NO: 5461 - DNA, 14 bp, Artificial Sequence
  synthetic circulating small noncoding RNA (sncRNA) 5' transfer RNA (tRNA) half
accgggaatcgaac

SEQ ID NO: 5462 - DNA, 16 bp, Artificial Sequence
  synthetic circulating small noncoding RNA (sncRNA) 5' transfer RNA (tRNA) half
gggctcgtccgggatt

SEQ ID NO: 5463 - DNA, 39 bp, Artificial Sequence
  synthetic circulating small noncoding RNA (sncRNA) 5' transfer RNA (tRNA) half
cgtctccccgtcggggaatcgaaccccggtctcccgcgt

SEQ ID NO: 5464 - DNA, 36 bp, Artificial Sequence
  synthetic circulating small noncoding RNA (sncRNA) 5' transfer RNA (tRNA) half
ggccgcggcggtgagagcgccgaatcctaaccacta

SEQ ID NO: 5465 - DNA, 29 bp, Artificial Sequence
  synthetic circulating small noncoding RNA (sncRNA) 5' transfer RNA (tRNA) half
ccgctggtgtagtggtatcatgcaagatt

SEQ ID NO: 5466 - DNA, 11 bp, Artificial Sequence
  synthetic circulating small noncoding RNA (sncRNA) 5' transfer RNA (tRNA) half
gtccccggttc

SEQ ID NO: 5467 - DNA, 20 bp, Artificial Sequence
  synthetic circulating small noncoding RNA (sncRNA) 5' transfer RNA (tRNA) half
gggggattagctcaaatggt

SEQ ID NO: 5468 - DNA, 14 bp, Artificial Sequence
  synthetic circulating small noncoding RNA (sncRNA) 5' transfer RNA (tRNA) half
gagtgctaaccatt

SEQ ID NO: 5469 - DNA, 33 bp, Artificial Sequence
  synthetic circulating small noncoding RNA (sncRNA) 5' transfer RNA (tRNA) half
tgccgtgactcggattcgaaccgaggttgctgc

SEQ ID NO: 5470 - DNA, 30 bp, Artificial Sequence
  synthetic circulating small noncoding RNA (sncRNA) 5' transfer RNA (tRNA) half
cctccccgtcggggaattgaaccccggtct

SEQ ID NO: 5471 - DNA, 23 bp, Artificial Sequence
  synthetic circulating small noncoding RNA (sncRNA) 5' transfer RNA (tRNA) half
acccgggacctctcgcacccaaa

SEQ ID NO: 5472 - DNA, 35 bp, Artificial Sequence
  synthetic circulating small noncoding RNA (sncRNA) 5' transfer RNA (tRNA) half
acccaggcggcccgggttcgactcccggtgtggga

SEQ ID NO: 5473 - DNA, 18 bp, Artificial Sequence
  synthetic circulating small noncoding RNA (sncRNA) 5' transfer RNA (tRNA) half
tcagtggtagaattctcg

SEQ ID NO: 5474 - DNA, 31 bp, Artificial Sequence
  synthetic circulating small noncoding RNA (sncRNA) 5' transfer RNA (tRNA) half
aaaccaggaatcctaaccgctagaccatatg

SEQ ID NO: 5475 - DNA, 28 bp, Artificial Sequence
  synthetic circulating small noncoding RNA (sncRNA) 5' transfer RNA (tRNA) half
gcattggtggttcaatggtagaattctc

SEQ ID NO: 5476 - DNA, 18 bp, Artificial Sequence
  synthetic circulating small noncoding RNA (sncRNA) 5' transfer RNA (tRNA) half
accgggcggaaacagcaa

SEQ ID NO: 5477 - DNA, 25 bp, Artificial Sequence
  synthetic circulating small noncoding RNA (sncRNA) 5' transfer RNA (tRNA) half
tagctcagtggtagagcatttgact

SEQ ID NO: 5478 - DNA, 14 bp, Artificial Sequence
  synthetic circulating small noncoding RNA (sncRNA) 5' transfer RNA (tRNA) half
gtatgattctcggt

SEQ ID NO: 5479 - DNA, 34 bp, Artificial Sequence
  synthetic circulating small noncoding RNA (sncRNA) 5' transfer RNA (tRNA) half
gtttccgtagtgtagtggtcatcacgctcgccta

SEQ ID NO: 5480 - DNA, 19 bp, Artificial Sequence
  synthetic circulating small noncoding RNA (sncRNA) 5' transfer RNA (tRNA) half
cgagctaccagggacctgt

SEQ ID NO: 5481 - DNA, 17 bp, Artificial Sequence
  synthetic circulating small noncoding RNA (sncRNA) 5' transfer RNA (tRNA) half
cgtcgactctggcggga

SEQ ID NO: 5482 - DNA, 33 bp, Artificial Sequence
  synthetic circulating small noncoding RNA (sncRNA) 5' transfer RNA (tRNA) half
ccccgtcggggaatcgaaccccggtctcccgcg

SEQ ID NO: 5483 - DNA, 28 bp, Artificial Sequence
  synthetic circulating small noncoding RNA (sncRNA) 5' transfer RNA (tRNA) half
tggtggtctagtggttaggattcggcgc

SEQ ID NO: 5484 - DNA, 17 bp, Artificial Sequence
  synthetic circulating small noncoding RNA (sncRNA) 5' transfer RNA (tRNA) half
gctgtcagaagtgggat

SEQ ID NO: 5485 - DNA, 21 bp, Artificial Sequence
  synthetic circulating small noncoding RNA (sncRNA) 5' transfer RNA (tRNA) half
tctgagggtccagggttcaag

SEQ ID NO: 5486 - DNA, 18 bp, Artificial Sequence
  synthetic circulating small noncoding RNA (sncRNA) 5' transfer RNA (tRNA) half
ccactcggccatcacagc

SEQ ID NO: 5487 - DNA, 19 bp, Artificial Sequence
  synthetic circulating small noncoding RNA (sncRNA) 5' transfer RNA (tRNA) half
gtttccgcccggtttcgaa

SEQ ID NO: 5488 - DNA, 17 bp, Artificial Sequence
  synthetic circulating small noncoding RNA (sncRNA) 5' transfer RNA (tRNA) half
ccgaagcgagaatcata

SEQ ID NO: 5489 - DNA, 35 bp, Artificial Sequence
  synthetic circulating small noncoding RNA (sncRNA) 5' transfer RNA (tRNA) half
tccgactccgccgggactcgaacccggaacctttg

SEQ ID NO: 5490 - DNA, 17 bp, Artificial Sequence
  synthetic circulating small noncoding RNA (sncRNA) 5' transfer RNA (tRNA) half
cgactgagctatccggg

SEQ ID NO: 5491 - DNA, 34 bp, Artificial Sequence
  synthetic circulating small noncoding RNA (sncRNA) 5' transfer RNA (tRNA) half
ccaggcggcccgggttcgactcccggtatgggaa

SEQ ID NO: 5492 - DNA, 15 bp, Artificial Sequence
  synthetic circulating small noncoding RNA (sncRNA) 5' transfer RNA (tRNA) half
gtgagtatccccgcc

SEQ ID NO: 5493 - DNA, 18 bp, Artificial Sequence
  synthetic circulating small noncoding RNA (sncRNA) 5' transfer RNA (tRNA) half
cagagtactaaccactat

SEQ ID NO: 5494 - DNA, 33 bp, Artificial Sequence
  synthetic circulating small noncoding RNA (sncRNA) 5' transfer RNA (tRNA) half
gaccacgaagggactcgaacccccaatcttctg

SEQ ID NO: 5495 - DNA, 17 bp, Artificial Sequence
  synthetic circulating small noncoding RNA (sncRNA) 5' transfer RNA (tRNA) half
tcgactcccggtgtggg

SEQ ID NO: 5496 - DNA, 13 bp, Artificial Sequence
  synthetic circulating small noncoding RNA (sncRNA) 5' transfer RNA (tRNA) half
aacccgggacctc

SEQ ID NO: 5497 - DNA, 37 bp, Artificial Sequence
  synthetic circulating small noncoding RNA (sncRNA) 5' transfer RNA (tRNA) half
ggcccgtacggggatcgaacccgcgaccttggcgtta

SEQ ID NO: 5498 - DNA, 13 bp, Artificial Sequence
  synthetic circulating small noncoding RNA (sncRNA) 5' transfer RNA (tRNA) half
cgaacctggaatc

SEQ ID NO: 5499 - DNA, 17 bp, Artificial Sequence
  synthetic circulating small noncoding RNA (sncRNA) 5' transfer RNA (tRNA) half
gaaccctcaatcttctg

SEQ ID NO: 5500 - DNA, 30 bp, Artificial Sequence
  synthetic circulating small noncoding RNA (sncRNA) 5' transfer RNA (tRNA) half
cgaccacgaagggactcgaaccctcaatct

SEQ ID NO: 5501 - DNA, 14 bp, Artificial Sequence
  synthetic circulating small noncoding RNA (sncRNA) 5' transfer RNA (tRNA) half
gaactcggatcgct

SEQ ID NO: 5502 - DNA, 13 bp, Artificial Sequence
  synthetic circulating small noncoding RNA (sncRNA) 5' transfer RNA (tRNA) half
cgaacccgggccg

SEQ ID NO: 5503 - DNA, 16 bp, Artificial Sequence
  synthetic circulating small noncoding RNA (sncRNA) 5' transfer RNA (tRNA) half
gcgagaggtccccggt

SEQ ID NO: 5504 - DNA, 23 bp, Artificial Sequence
  synthetic circulating small noncoding RNA (sncRNA) 5' transfer RNA (tRNA) half
ggttcgattcccggtcagggaag

SEQ ID NO: 5505 - DNA, 13 bp, Artificial Sequence
  synthetic circulating small noncoding RNA (sncRNA) 5' transfer RNA (tRNA) half
cgcccggtttcga

SEQ ID NO: 5506 - DNA, 14 bp, Artificial Sequence
  synthetic circulating small noncoding RNA (sncRNA) 5' transfer RNA (tRNA) half
gttagtactctgcg

SEQ ID NO: 5507 - DNA, 14 bp, Artificial Sequence
  synthetic circulating small noncoding RNA (sncRNA) 5' transfer RNA (tRNA) half
cagcgacctaagga

SEQ ID NO: 5508 - DNA, 20 bp, Artificial Sequence
  synthetic circulating small noncoding RNA (sncRNA) 5' transfer RNA (tRNA) half
acaacgcagagtactaacca

SEQ ID NO: 5509 - DNA, 21 bp, Artificial Sequence
  synthetic circulating small noncoding RNA (sncRNA) 5' transfer RNA (tRNA) half
cgattccggctcgaaggactt

SEQ ID NO: 5510 - DNA, 28 bp, Artificial Sequence
  synthetic circulating small noncoding RNA (sncRNA) 5' transfer RNA (tRNA) half
gggtggttcagtggtagaattctcgcct

SEQ ID NO: 5511 - DNA, 12 bp, Artificial Sequence
  synthetic circulating small noncoding RNA (sncRNA) 5' transfer RNA (tRNA) half
ggagtcgaaccc

SEQ ID NO: 5512 - DNA, 27 bp, Artificial Sequence
  synthetic circulating small noncoding RNA (sncRNA) 5' transfer RNA (tRNA) half
caacgcagagtactaaccactatacga

SEQ ID NO: 5513 - DNA, 31 bp, Artificial Sequence
  synthetic circulating small noncoding RNA (sncRNA) 5' transfer RNA (tRNA) half
gacagagtggttcaattccacctttcgggcg

SEQ ID NO: 5514 - DNA, 24 bp, Artificial Sequence
  synthetic circulating small noncoding RNA (sncRNA) 5' transfer RNA (tRNA) half
aacccgggtcaactgcttggaagg

SEQ ID NO: 5515 - DNA, 17 bp, Artificial Sequence
  synthetic circulating small noncoding RNA (sncRNA) 5' transfer RNA (tRNA) half
agtagtcgtggccgagt

SEQ ID NO: 5516 - DNA, 37 bp, Artificial Sequence
  synthetic circulating small noncoding RNA (sncRNA) 5' transfer RNA (tRNA) half
gtgccccgtgtgaggatcgaactcacgaccttcagat

SEQ ID NO: 5517 - DNA, 32 bp, Artificial Sequence
  synthetic circulating small noncoding RNA (sncRNA) 5' transfer RNA (tRNA) half
agattgcaggttcgagtcctgccgcggtcgac

SEQ ID NO: 5518 - DNA, 19 bp, Artificial Sequence
  synthetic circulating small noncoding RNA (sncRNA) 5' transfer RNA (tRNA) half
tcctgccgtgactcggatt

SEQ ID NO: 5519 - DNA, 41 bp, Artificial Sequence
  synthetic circulating small noncoding RNA (sncRNA) 5' transfer RNA (tRNA) half
gtgccccgtgtgaggatcgaactcacgaccttcagattatg

SEQ ID NO: 5520 - DNA, 17 bp, Artificial Sequence
  synthetic circulating small noncoding RNA (sncRNA) 5' transfer RNA (tRNA) half
gggcctcccgcgtggca

SEQ ID NO: 5521 - DNA, 20 bp, Artificial Sequence
  synthetic circulating small noncoding RNA (sncRNA) 5' transfer RNA (tRNA) half
tggagatgccggggatcgaa

SEQ ID NO: 5522 - DNA, 34 bp, Artificial Sequence
  synthetic circulating small noncoding RNA (sncRNA) 5' transfer RNA (tRNA) half
gtcgagccagccaggagtcgaacctagaatcttc

SEQ ID NO: 5523 - DNA, 10 bp, Artificial Sequence
  synthetic circulating small noncoding RNA (sncRNA) 5' transfer RNA (tRNA) half
cgacgaggat

SEQ ID NO: 5524 - DNA, 26 bp, Artificial Sequence
  synthetic circulating small noncoding RNA (sncRNA) 5' transfer RNA (tRNA) half
gcccgaacagggacttgaaccctgga

SEQ ID NO: 5525 - DNA, 35 bp, Artificial Sequence
  synthetic circulating small noncoding RNA (sncRNA) 5' transfer RNA (tRNA) half
ttgccccctctgaggttcgaactcaggaccttcag

SEQ ID NO: 5526 - DNA, 36 bp, Artificial Sequence
  synthetic circulating small noncoding RNA (sncRNA) 5' transfer RNA (tRNA) half
gccccgtgtgaggatcgaactcacgaccttcagatt

SEQ ID NO: 5527 - DNA, 21 bp, Artificial Sequence
  synthetic circulating small noncoding RNA (sncRNA) 5' transfer RNA (tRNA) half
tagcggttaggattcctggtt

SEQ ID NO: 5528 - DNA, 19 bp, Artificial Sequence
  synthetic circulating small noncoding RNA (sncRNA) 5' transfer RNA (tRNA) half
gctagctcagtcggtagag

SEQ ID NO: 5529 - DNA, 35 bp, Artificial Sequence
  synthetic circulating small noncoding RNA (sncRNA) 5' transfer RNA (tRNA) half
aacttccctggtggtctagtggttaggattcggcg

SEQ ID NO: 5530 - DNA, 16 bp, Artificial Sequence
  synthetic circulating small noncoding RNA (sncRNA) 5' transfer RNA (tRNA) half
gtggtatcatgcaaga

SEQ ID NO: 5531 - DNA, 30 bp, Artificial Sequence
  synthetic circulating small noncoding RNA (sncRNA) 5' transfer RNA (tRNA) half
aggattcggcgctctcaccgccgcggcccg

SEQ ID NO: 5532 - DNA, 14 bp, Artificial Sequence
  synthetic circulating small noncoding RNA (sncRNA) 5' transfer RNA (tRNA) half
tcggcgctctcacc

SEQ ID NO: 5533 - DNA, 20 bp, Artificial Sequence
  synthetic circulating small noncoding RNA (sncRNA) 5' transfer RNA (tRNA) half
ggttcgactcccggtatggg

SEQ ID NO: 5534 - DNA, 22 bp, Artificial Sequence
  synthetic circulating small noncoding RNA (sncRNA) 5' transfer RNA (tRNA) half
caggatggccgagcggtctaag

SEQ ID NO: 5535 - DNA, 19 bp, Artificial Sequence
  synthetic circulating small noncoding RNA (sncRNA) 5' transfer RNA (tRNA) half
ccgtagtgtagtggttatc

SEQ ID NO: 5536 - DNA, 24 bp, Artificial Sequence
  synthetic circulating small noncoding RNA (sncRNA) 5' transfer RNA (tRNA) half
aggcgaatgtgataaccactacac

SEQ ID NO: 5537 - DNA, 26 bp, Artificial Sequence
  synthetic circulating small noncoding RNA (sncRNA) 5' transfer RNA (tRNA) half
tcgcctgccacgcgggaggcccgggt

SEQ ID NO: 5538 - DNA, 21 bp, Artificial Sequence
  synthetic circulating small noncoding RNA (sncRNA) 5' transfer RNA (tRNA) half
gttccaccgagatttgaactc

SEQ ID NO: 5539 - DNA, 31 bp, Artificial Sequence
  synthetic circulating small noncoding RNA (sncRNA) 5' transfer RNA (tRNA) half
gccagccaggagtcgaacctagaatcttctg

SEQ ID NO: 5540 - DNA, 19 bp, Artificial Sequence
  synthetic circulating small noncoding RNA (sncRNA) 5' transfer RNA (tRNA) half
gtttcgaaccggggacctt

SEQ ID NO: 5541 - DNA, 12 bp, Artificial Sequence
  synthetic circulating small noncoding RNA (sncRNA) 5' transfer RNA (tRNA) half
ccgtcggggaat

SEQ ID NO: 5542 - DNA, 29 bp, Artificial Sequence
  synthetic circulating small noncoding RNA (sncRNA) 5' transfer RNA (tRNA) half
gggtccagggttcaagtccctgttcgggc

SEQ ID NO: 5543 - DNA, 22 bp, Artificial Sequence
  synthetic circulating small noncoding RNA (sncRNA) 5' transfer RNA (tRNA) half
ggattcagagtccagagtgcta

SEQ ID NO: 5544 - DNA, 15 bp, Artificial Sequence
  synthetic circulating small noncoding RNA (sncRNA) 5' transfer RNA (tRNA) half
atcccacttctgaca

SEQ ID NO: 5545 - DNA, 31 bp, Artificial Sequence
  synthetic circulating small noncoding RNA (sncRNA) 5' transfer RNA (tRNA) half
gccgaaacccgggatcgaaccagggaccttt

SEQ ID NO: 5546 - DNA, 27 bp, Artificial Sequence
  synthetic circulating small noncoding RNA (sncRNA) 5' transfer RNA (tRNA) half
ggccgggaatcgaacccgggcctcccg

SEQ ID NO: 5547 - DNA, 37 bp, Artificial Sequence
  synthetic circulating small noncoding RNA (sncRNA) 5' transfer RNA (tRNA) half
ttgccccctctgaggttcgaactcaggaccttcagat

SEQ ID NO: 5548 - DNA, 31 bp, Artificial Sequence
  synthetic circulating small noncoding RNA (sncRNA) 5' transfer RNA (tRNA) half
ctccccgtcggggaattgaaccccggtctcc

SEQ ID NO: 5549 - DNA, 19 bp, Artificial Sequence
  synthetic circulating small noncoding RNA (sncRNA) 5' transfer RNA (tRNA) half
atccccggcacctccactt

SEQ ID NO: 5550 - DNA, 18 bp, Artificial Sequence
  synthetic circulating small noncoding RNA (sncRNA) 5' transfer RNA (tRNA) half
actgtttccgcccggttt

SEQ ID NO: 5551 - DNA, 34 bp, Artificial Sequence
  synthetic circulating small noncoding RNA (sncRNA) 5' transfer RNA (tRNA) half
caggagatcctgggttcgactcccagtggggcct

SEQ ID NO: 5552 - DNA, 14 bp, Artificial Sequence
  synthetic circulating small noncoding RNA (sncRNA) 5' transfer RNA (tRNA) half
ctgaccgggaatcg

SEQ ID NO: 5553 - DNA, 29 bp, Artificial Sequence
  synthetic circulating small noncoding RNA (sncRNA) 5' transfer RNA (tRNA) half
gccgaaacccgggatcgaaccagggacct

SEQ ID NO: 5554 - DNA, 20 bp, Artificial Sequence
  synthetic circulating small noncoding RNA (sncRNA) 5' transfer RNA (tRNA) half
ggtttcgaaccggggacctt

SEQ ID NO: 5555 - DNA, 35 bp, Artificial Sequence
  synthetic circulating small noncoding RNA (sncRNA) 5' transfer RNA (tRNA) half
gtagaattctcgcctgccacgcgggaggcccgggt

SEQ ID NO: 5556 - DNA, 19 bp, Artificial Sequence
  synthetic circulating small noncoding RNA (sncRNA) 5' transfer RNA (tRNA) half
gtctctgtggcgcaatcgg

SEQ ID NO: 5557 - DNA, 35 bp, Artificial Sequence
  synthetic circulating small noncoding RNA (sncRNA) 5' transfer RNA (tRNA) half
tggtgtaatggttagcactctggactctgaatcca

SEQ ID NO: 5558 - DNA, 36 bp, Artificial Sequence
  synthetic circulating small noncoding RNA (sncRNA) 5' transfer RNA (tRNA) half
acccgggcctcccgcgtggcaggcgagaattctacc

SEQ ID NO: 5559 - DNA, 33 bp, Artificial Sequence
  synthetic circulating small noncoding RNA (sncRNA) 5' transfer RNA (tRNA) half
agcgaccacgaagggactcgaacccccaatctt

SEQ ID NO: 5560 - DNA, 22 bp, Artificial Sequence
  synthetic circulating small noncoding RNA (sncRNA) 5' transfer RNA (tRNA) half
ttgggtgcgagaggtcccgggt

SEQ ID NO: 5561 - DNA, 15 bp, Artificial Sequence
  synthetic circulating small noncoding RNA (sncRNA) 5' transfer RNA (tRNA) half
gtagagcatcagact

SEQ ID NO: 5562 - DNA, 30 bp, Artificial Sequence
  synthetic circulating small noncoding RNA (sncRNA) 5' transfer RNA (tRNA) half
cccggatagctcagtcggtagagcatcaga

SEQ ID NO: 5563 - DNA, 27 bp, Artificial Sequence
  synthetic circulating small noncoding RNA (sncRNA) 5' transfer RNA (tRNA) half
accggggacctcttgatctgcagtcaa

SEQ ID NO: 5564 - DNA, 9 bp, Artificial Sequence
  synthetic circulating small noncoding RNA (sncRNA) 5' transfer RNA (tRNA) half
cgtagtcgg

SEQ ID NO: 5565 - DNA, 21 bp, Artificial Sequence
  synthetic circulating small noncoding RNA (sncRNA) 5' transfer RNA (tRNA) half
ggttcgattcccgggcggcgc

SEQ ID NO: 5566 - DNA, 22 bp, Artificial Sequence
  synthetic circulating small noncoding RNA (sncRNA) 5' transfer RNA (tRNA) half
tcgaatccgagtcacggcagta

SEQ ID NO: 5567 - DNA, 15 bp, Artificial Sequence
  synthetic circulating small noncoding RNA (sncRNA) 5' transfer RNA (tRNA) half
gagatgccggggatc

SEQ ID NO: 5568 - DNA, 11 bp, Artificial Sequence
  synthetic circulating small noncoding RNA (sncRNA) 5' transfer RNA (tRNA) half
gcccgaacagg

SEQ ID NO: 5569 - DNA, 13 bp, Artificial Sequence
  synthetic circulating small noncoding RNA (sncRNA) 5' transfer RNA (tRNA) half
cccacgttgggcg

SEQ ID NO: 5570 - DNA, 24 bp, Artificial Sequence
  synthetic circulating small noncoding RNA (sncRNA) 5' transfer RNA (tRNA) half
gagaccggggttcgattccccgac

SEQ ID NO: 5571 - DNA, 27 bp, Artificial Sequence
  synthetic circulating small noncoding RNA (sncRNA) 5' transfer RNA (tRNA) half
ccataccgggagtcgaacccgggccgc

SEQ ID NO: 5572 - DNA, 20 bp, Artificial Sequence
  synthetic circulating small noncoding RNA (sncRNA) 5' transfer RNA (tRNA) half
accccgtccgtgcctgcgtt

SEQ ID NO: 5573 - DNA, 15 bp, Artificial Sequence
  synthetic circulating small noncoding RNA (sncRNA) 5' transfer RNA (tRNA) half
tctcgcctgccacgc

SEQ ID NO: 5574 - DNA, 20 bp, Artificial Sequence
  synthetic circulating small noncoding RNA (sncRNA) 5' transfer RNA (tRNA) half
tctccccgtcggggaatcga

SEQ ID NO: 5575 - DNA, 26 bp, Artificial Sequence
  synthetic circulating small noncoding RNA (sncRNA) 5' transfer RNA (tRNA) half
cgggcctcccgcgtggcaggcgagaa

SEQ ID NO: 5576 - DNA, 17 bp, Artificial Sequence
  synthetic circulating small noncoding RNA (sncRNA) 5' transfer RNA (tRNA) half
accaggaatcctaaccg

SEQ ID NO: 5577 - DNA, 29 bp, Artificial Sequence
  synthetic circulating small noncoding RNA (sncRNA) 5' transfer RNA (tRNA) half
caatgcgctatccattgcgccacggagcc

SEQ ID NO: 5578 - DNA, 16 bp, Artificial Sequence
  synthetic circulating small noncoding RNA (sncRNA) 5' transfer RNA (tRNA) half
gaaccgaggttgctgc

SEQ ID NO: 5579 - DNA, 40 bp, Artificial Sequence
  synthetic circulating small noncoding RNA (sncRNA) 5' transfer RNA (tRNA) half
cacgcgggagaccggggttcgattccccgacggggagtct

SEQ ID NO: 5580 - DNA, 19 bp, Artificial Sequence
  synthetic circulating small noncoding RNA (sncRNA) 5' transfer RNA (tRNA) half
tgcagagtactaaccacta

SEQ ID NO: 5581 - DNA, 25 bp, Artificial Sequence
  synthetic circulating small noncoding RNA (sncRNA) 5' transfer RNA (tRNA) half
cacatggtctagcggttaggattcc

SEQ ID NO: 5582 - DNA, 19 bp, Artificial Sequence
  synthetic circulating small noncoding RNA (sncRNA) 5' transfer RNA (tRNA) half
accactcggccacctcgtc

SEQ ID NO: 5583 - DNA, 17 bp, Artificial Sequence
  synthetic circulating small noncoding RNA (sncRNA) 5' transfer RNA (tRNA) half
gaactcggatcgctgga

SEQ ID NO: 5584 - DNA, 17 bp, Artificial Sequence
  synthetic circulating small noncoding RNA (sncRNA) 5' transfer RNA (tRNA) half
aaccggggacctttcgc

SEQ ID NO: 5585 - DNA, 20 bp, Artificial Sequence
  synthetic circulating small noncoding RNA (sncRNA) 5' transfer RNA (tRNA) half
ctaatggataaggcatcagc

SEQ ID NO: 5586 - DNA, 16 bp, Artificial Sequence
  synthetic circulating small noncoding RNA (sncRNA) 5' transfer RNA (tRNA) half
ttcgaaccggggacct

SEQ ID NO: 5587 - DNA, 23 bp, Artificial Sequence
  synthetic circulating small noncoding RNA (sncRNA) 5' transfer RNA (tRNA) half
gagccagccaggagtcgaaccta

SEQ ID NO: 5588 - DNA, 35 bp, Artificial Sequence
  synthetic circulating small noncoding RNA (sncRNA) 5' transfer RNA (tRNA) half
ccggatgatcctcagtggtctggggtgcaggcttc

SEQ ID NO: 5589 - DNA, 15 bp, Artificial Sequence
  synthetic circulating small noncoding RNA (sncRNA) 5' transfer RNA (tRNA) half
tctaccgactgagct

SEQ ID NO: 5590 - DNA, 33 bp, Artificial Sequence
  synthetic circulating small noncoding RNA (sncRNA) 5' transfer RNA (tRNA) half
caggagatcctgggttcgaatcccagtggggcc

SEQ ID NO: 5591 - DNA, 41 bp, Artificial Sequence
  synthetic circulating small noncoding RNA (sncRNA) 5' transfer RNA (tRNA) half
tgggattaagagtcccatgctctaccgactgagctagccgg

SEQ ID NO: 5592 - DNA, 15 bp, Artificial Sequence
  synthetic circulating small noncoding RNA (sncRNA) 5' transfer RNA (tRNA) half
tcgattccggctcga

SEQ ID NO: 5593 - DNA, 12 bp, Artificial Sequence
  synthetic circulating small noncoding RNA (sncRNA) 5' transfer RNA (tRNA) half
gcgagaatcata

SEQ ID NO: 5594 - DNA, 23 bp, Artificial Sequence
  synthetic circulating small noncoding RNA (sncRNA) 5' transfer RNA (tRNA) half
gctcaggggtagagcatttgact

SEQ ID NO: 5595 - DNA, 35 bp, Artificial Sequence
  synthetic circulating small noncoding RNA (sncRNA) 5' transfer RNA (tRNA) half
agaaggtcctgggttcgagccccagtggaaccacg

SEQ ID NO: 5596 - DNA, 15 bp, Artificial Sequence
  synthetic circulating small noncoding RNA (sncRNA) 5' transfer RNA (tRNA) half
gactccgccgggact

SEQ ID NO: 5597 - DNA, 17 bp, Artificial Sequence
  synthetic circulating small noncoding RNA (sncRNA) 5' transfer RNA (tRNA) half
gagtgctaaccattaca

SEQ ID NO: 5598 - DNA, 19 bp, Artificial Sequence
  synthetic circulating small noncoding RNA (sncRNA) 5' transfer RNA (tRNA) half
gtctagtggtatgattctc

SEQ ID NO: 5599 - DNA, 19 bp, Artificial Sequence
  synthetic circulating small noncoding RNA (sncRNA) 5' transfer RNA (tRNA) half
gggaatcgaaccccggtct

SEQ ID NO: 5600 - DNA, 17 bp, Artificial Sequence
  synthetic circulating small noncoding RNA (sncRNA) 5' transfer RNA (tRNA) half
taatggataaggcactg

SEQ ID NO: 5601 - DNA, 12 bp, Artificial Sequence
  synthetic circulating small noncoding RNA (sncRNA) 5' transfer RNA (tRNA) half
cgagccagccag

SEQ ID NO: 5602 - DNA, 28 bp, Artificial Sequence
  synthetic circulating small noncoding RNA (sncRNA) 5' transfer RNA (tRNA) half
gctcgttggtctaggggtatgattctcg

SEQ ID NO: 5603 - DNA, 21 bp, Artificial Sequence
  synthetic circulating small noncoding RNA (sncRNA) 5' transfer RNA (tRNA) half
atcccaccgctgccatctttg

SEQ ID NO: 5604 - DNA, 19 bp, Artificial Sequence
  synthetic circulating small noncoding RNA (sncRNA) 5' transfer RNA (tRNA) half
gtccagagtgctaaccatt

SEQ ID NO: 5605 - DNA, 30 bp, Artificial Sequence
  synthetic circulating small noncoding RNA (sncRNA) 5' transfer RNA (tRNA) half
ggcccgtacggggatcgaacccgcgacctt

SEQ ID NO: 5606 - DNA, 31 bp, Artificial Sequence
  synthetic circulating small noncoding RNA (sncRNA) 5' transfer RNA (tRNA) half
tccccgtcggggaattgaaccccggtctccc

SEQ ID NO: 5607 - DNA, 36 bp, Artificial Sequence
  synthetic circulating small noncoding RNA (sncRNA) 5' transfer RNA (tRNA) half
agggcccggatagctcagtcggtagagcatcagact

SEQ ID NO: 5608 - DNA, 37 bp, Artificial Sequence
  synthetic circulating small noncoding RNA (sncRNA) 5' transfer RNA (tRNA) half
accgccgcggcccgggttcgattcccggtcagggaaa

SEQ ID NO: 5609 - DNA, 19 bp, Artificial Sequence
  synthetic circulating small noncoding RNA (sncRNA) 5' transfer RNA (tRNA) half
ttcgactcccggtatggga

SEQ ID NO: 5610 - DNA, 33 bp, Artificial Sequence
  synthetic circulating small noncoding RNA (sncRNA) 5' transfer RNA (tRNA) half
accacgaagggattcgaaccctcaatcttctga

SEQ ID NO: 5611 - DNA, 19 bp, Artificial Sequence
  synthetic circulating small noncoding RNA (sncRNA) 5' transfer RNA (tRNA) half
aaactgggctcgtccggga

SEQ ID NO: 5612 - DNA, 20 bp, Artificial Sequence
  synthetic circulating small noncoding RNA (sncRNA) 5' transfer RNA (tRNA) half
gtcggggaatcgaaccccgg

SEQ ID NO: 5613 - DNA, 26 bp, Artificial Sequence
  synthetic circulating small noncoding RNA (sncRNA) 5' transfer RNA (tRNA) half
acctgcgcggggaaaccccaatggat

SEQ ID NO: 5614 - DNA, 21 bp, Artificial Sequence
  synthetic circulating small noncoding RNA (sncRNA) 5' transfer RNA (tRNA) half
ctaccactgaaccaccaatgc

SEQ ID NO: 5615 - DNA, 28 bp, Artificial Sequence
  synthetic circulating small noncoding RNA (sncRNA) 5' transfer RNA (tRNA) half
ccccgtcggggaattgaaccccggtctc

SEQ ID NO: 5616 - DNA, 18 bp, Artificial Sequence
  synthetic circulating small noncoding RNA (sncRNA) 5' transfer RNA (tRNA) half
gcgagaattctaccattg

SEQ ID NO: 5617 - DNA, 14 bp, Artificial Sequence
  synthetic circulating small noncoding RNA (sncRNA) 5' transfer RNA (tRNA) half
gttcgattccggct

SEQ ID NO: 5618 - DNA, 30 bp, Artificial Sequence
  synthetic circulating small noncoding RNA (sncRNA) 5' transfer RNA (tRNA) half
caccgggagtcgaacccgggccgcctgggt

SEQ ID NO: 5619 - DNA, 23 bp, Artificial Sequence
  synthetic circulating small noncoding RNA (sncRNA) 5' transfer RNA (tRNA) half
acccgggcctcccgcgtggcagg

SEQ ID NO: 5620 - DNA, 26 bp, Artificial Sequence
  synthetic circulating small noncoding RNA (sncRNA) 5' transfer RNA (tRNA) half
atggtctagcggttaggattcctggt

SEQ ID NO: 5621 - DNA, 33 bp, Artificial Sequence
  synthetic circulating small noncoding RNA (sncRNA) 5' transfer RNA (tRNA) half
agtccaacgccttaaccactcggccatcgctgc

SEQ ID NO: 5622 - DNA, 12 bp, Artificial Sequence
  synthetic circulating small noncoding RNA (sncRNA) 5' transfer RNA (tRNA) half
aggcaccgctgg

SEQ ID NO: 5623 - DNA, 27 bp, Artificial Sequence
  synthetic circulating small noncoding RNA (sncRNA) 5' transfer RNA (tRNA) half
gcggcccgggttcgattcccggtcagg

SEQ ID NO: 5624 - DNA, 18 bp, Artificial Sequence
  synthetic circulating small noncoding RNA (sncRNA) 5' transfer RNA (tRNA) half
ggcctcgtggcgcaacgg

SEQ ID NO: 5625 - DNA, 18 bp, Artificial Sequence
  synthetic circulating small noncoding RNA (sncRNA) 5' transfer RNA (tRNA) half
ccttaaccactcggccat

SEQ ID NO: 5626 - DNA, 20 bp, Artificial Sequence
  synthetic circulating small noncoding RNA (sncRNA) 5' transfer RNA (tRNA) half
ccgaatcctaaccactagac

SEQ ID NO: 5627 - DNA, 18 bp, Artificial Sequence
  synthetic circulating small noncoding RNA (sncRNA) 5' transfer RNA (tRNA) half
taggggtatgattctcgc

SEQ ID NO: 5628 - DNA, 12 bp, Artificial Sequence
  synthetic circulating small noncoding RNA (sncRNA) 5' transfer RNA (tRNA) half
ggcccgtacggg

SEQ ID NO: 5629 - DNA, 22 bp, Artificial Sequence
  synthetic circulating small noncoding RNA (sncRNA) 5' transfer RNA (tRNA) half
actggagatgccggggatcgaa

SEQ ID NO: 5630 - DNA, 31 bp, Artificial Sequence
  synthetic circulating small noncoding RNA (sncRNA) 5' transfer RNA (tRNA) half
caccacgctctaaccaactgagctaaccggc

SEQ ID NO: 5631 - DNA, 31 bp, Artificial Sequence
  synthetic circulating small noncoding RNA (sncRNA) 5' transfer RNA (tRNA) half
gtttccgcccggtttcgaaccggggaccttt

SEQ ID NO: 5632 - DNA, 16 bp, Artificial Sequence
  synthetic circulating small noncoding RNA (sncRNA) 5' transfer RNA (tRNA) half
ttccccgacggggagt

SEQ ID NO: 5633 - DNA, 30 bp, Artificial Sequence
  synthetic circulating small noncoding RNA (sncRNA) 5' transfer RNA (tRNA) half
ctggtggtctagtggttaggattcggcgct

SEQ ID NO: 5634 - DNA, 32 bp, Artificial Sequence
  synthetic circulating small noncoding RNA (sncRNA) 5' transfer RNA (tRNA) half
ccacatggtctagcggttaggattcctggttt

SEQ ID NO: 5635 - DNA, 15 bp, Artificial Sequence
  synthetic circulating small noncoding RNA (sncRNA) 5' transfer RNA (tRNA) half
aacccgggacctctc

SEQ ID NO: 5636 - DNA, 19 bp, Artificial Sequence
  synthetic circulating small noncoding RNA (sncRNA) 5' transfer RNA (tRNA) half
gctctcaccgccgcggccc

SEQ ID NO: 5637 - DNA, 37 bp, Artificial Sequence
  synthetic circulating small noncoding RNA (sncRNA) 5' transfer RNA (tRNA) half
ccgactccgccgggactcgaacccggaacctttgaat

SEQ ID NO: 5638 - DNA, 23 bp, Artificial Sequence
  synthetic circulating small noncoding RNA (sncRNA) 5' transfer RNA (tRNA) half
tttgggctcgtccgggatttgaa

SEQ ID NO: 5639 - DNA, 23 bp, Artificial Sequence
  synthetic circulating small noncoding RNA (sncRNA) 5' transfer RNA (tRNA) half
gagaattctaccactgaaccacc

SEQ ID NO: 5640 - DNA, 23 bp, Artificial Sequence
  synthetic circulating small noncoding RNA (sncRNA) 5' transfer RNA (tRNA) half
gttcgactcccggtgtgggaaca

SEQ ID NO: 5641 - DNA, 19 bp, Artificial Sequence
  synthetic circulating small noncoding RNA (sncRNA) 5' transfer RNA (tRNA) half
cagttgtcaggagtgggat

SEQ ID NO: 5642 - DNA, 17 bp, Artificial Sequence
  synthetic circulating small noncoding RNA (sncRNA) 5' transfer RNA (tRNA) half
cccattcttgcgacccg

SEQ ID NO: 5643 - DNA, 15 bp, Artificial Sequence
  synthetic circulating small noncoding RNA (sncRNA) 5' transfer RNA (tRNA) half
ttaggattcggcgct

SEQ ID NO: 5644 - DNA, 14 bp, Artificial Sequence
  synthetic circulating small noncoding RNA (sncRNA) 5' transfer RNA (tRNA) half
cgggcctcccgcgt

SEQ ID NO: 5645 - DNA, 26 bp, Artificial Sequence
  synthetic circulating small noncoding RNA (sncRNA) 5' transfer RNA (tRNA) half
cgctggtgtagtggtatcatgcaaga

SEQ ID NO: 5646 - DNA, 33 bp, Artificial Sequence
  synthetic circulating small noncoding RNA (sncRNA) 5' transfer RNA (tRNA) half
cagtcaaatgctctacccctgagctataccccc

SEQ ID NO: 5647 - DNA, 23 bp, Artificial Sequence
  synthetic circulating small noncoding RNA (sncRNA) 5' transfer RNA (tRNA) half
tcggttcgaatccgagtcacggc

SEQ ID NO: 5648 - DNA, 17 bp, Artificial Sequence
  synthetic circulating small noncoding RNA (sncRNA) 5' transfer RNA (tRNA) half
ggccccagcgagatttg

SEQ ID NO: 5649 - DNA, 42 bp, Artificial Sequence
  synthetic circulating small noncoding RNA (sncRNA) 5' transfer RNA (tRNA) half
agtctccccgtcggggaatcgaaccccggtctcccgcgtgac

SEQ ID NO: 5650 - DNA, 14 bp, Artificial Sequence
  synthetic circulating small noncoding RNA (sncRNA) 5' transfer RNA (tRNA) half
atcccatcctcgtc

SEQ ID NO: 5651 - DNA, 31 bp, Artificial Sequence
  synthetic circulating small noncoding RNA (sncRNA) 5' transfer RNA (tRNA) half
tccaatgcgctatccattgcgccacggagcc

SEQ ID NO: 5652 - DNA, 27 bp, Artificial Sequence
  synthetic circulating small noncoding RNA (sncRNA) 5' transfer RNA (tRNA) half
gatcgtatagtggttagtactctgcgt

SEQ ID NO: 5653 - DNA, 20 bp, Artificial Sequence
  synthetic circulating small noncoding RNA (sncRNA) 5' transfer RNA (tRNA) half
gcgaatgtgataaccactac

SEQ ID NO: 5654 - DNA, 18 bp, Artificial Sequence
  synthetic circulating small noncoding RNA (sncRNA) 5' transfer RNA (tRNA) half
gcttccctgaccgggaat

SEQ ID NO: 5655 - DNA, 35 bp, Artificial Sequence
  synthetic circulating small noncoding RNA (sncRNA) 5' transfer RNA (tRNA) half
ccaccgagatttgaactcggatcgctggattcaga

SEQ ID NO: 5656 - DNA, 22 bp, Artificial Sequence
  synthetic circulating small noncoding RNA (sncRNA) 5' transfer RNA (tRNA) half
taatggttagcactctggactc

SEQ ID NO: 5657 - DNA, 12 bp, Artificial Sequence
  synthetic circulating small noncoding RNA (sncRNA) 5' transfer RNA (tRNA) half
accggggacctc

SEQ ID NO: 5658 - DNA, 16 bp, Artificial Sequence
  synthetic circulating small noncoding RNA (sncRNA) 5' transfer RNA (tRNA) half
cccgggcctcccgcgt

SEQ ID NO: 5659 - DNA, 21 bp, Artificial Sequence
  synthetic circulating small noncoding RNA (sncRNA) 5' transfer RNA (tRNA) half
atccatcgacctctgggttat

SEQ ID NO: 5660 - DNA, 34 bp, Artificial Sequence
  synthetic circulating small noncoding RNA (sncRNA) 5' transfer RNA (tRNA) half
cccgggcctcccgcgtggcaggcgagaattctac

SEQ ID NO: 5661 - DNA, 12 bp, Artificial Sequence
  synthetic circulating small noncoding RNA (sncRNA) 5' transfer RNA (tRNA) half
ccccggtctccc

SEQ ID NO: 5662 - DNA, 19 bp, Artificial Sequence
  synthetic circulating small noncoding RNA (sncRNA) 5' transfer RNA (tRNA) half
gcctccccgtcggggaatc

SEQ ID NO: 5663 - DNA, 34 bp, Artificial Sequence
  synthetic circulating small noncoding RNA (sncRNA) 5' transfer RNA (tRNA) half
gcccgtacggggatcgaacccgcgaccttggcgt

SEQ ID NO: 5664 - DNA, 29 bp, Artificial Sequence
  synthetic circulating small noncoding RNA (sncRNA) 5' transfer RNA (tRNA) half
gccgtgatcgtataggggttagtactctg

SEQ ID NO: 5665 - DNA, 33 bp, Artificial Sequence
  synthetic circulating small noncoding RNA (sncRNA) 5' transfer RNA (tRNA) half
gcacgaggccccgggttcaatccccggcacctc

SEQ ID NO: 5666 - DNA, 14 bp, Artificial Sequence
  synthetic circulating small noncoding RNA (sncRNA) 5' transfer RNA (tRNA) half
cgcctccgaagaga

SEQ ID NO: 5667 - DNA, 20 bp, Artificial Sequence
  synthetic circulating small noncoding RNA (sncRNA) 5' transfer RNA (tRNA) half
ggcgaatgtgataaccacta

SEQ ID NO: 5668 - DNA, 15 bp, Artificial Sequence
  synthetic circulating small noncoding RNA (sncRNA) 5' transfer RNA (tRNA) half
cgactgagctatccg

SEQ ID NO: 5669 - DNA, 22 bp, Artificial Sequence
  synthetic circulating small noncoding RNA (sncRNA) 5' transfer RNA (tRNA) half
tcggggaatcgaaccccggtct

SEQ ID NO: 5670 - DNA, 16 bp, Artificial Sequence
  synthetic circulating small noncoding RNA (sncRNA) 5' transfer RNA (tRNA) half
aacccgggccgcggcg

SEQ ID NO: 5671 - DNA, 25 bp, Artificial Sequence
  synthetic circulating small noncoding RNA (sncRNA) 5' transfer RNA (tRNA) half
atagctcagtcggtagagcatcaga

SEQ ID NO: 5672 - DNA, 22 bp, Artificial Sequence
  synthetic circulating small noncoding RNA (sncRNA) 5' transfer RNA (tRNA) half
tagagcatgagactcttaatct

SEQ ID NO: 5673 - DNA, 23 bp, Artificial Sequence
  synthetic circulating small noncoding RNA (sncRNA) 5' transfer RNA (tRNA) half
cagtggtagaattctcgcctgcc

SEQ ID NO: 5674 - DNA, 15 bp, Artificial Sequence
  synthetic circulating small noncoding RNA (sncRNA) 5' transfer RNA (tRNA) half
tgtcagaagtgggat

SEQ ID NO: 5675 - DNA, 17 bp, Artificial Sequence
  synthetic circulating small noncoding RNA (sncRNA) 5' transfer RNA (tRNA) half
gcggttaggattcctgg

SEQ ID NO: 5676 - DNA, 18 bp, Artificial Sequence
  synthetic circulating small noncoding RNA (sncRNA) 5' transfer RNA (tRNA) half
gtggtatgattctcagtt

SEQ ID NO: 5677 - DNA, 14 bp, Artificial Sequence
  synthetic circulating small noncoding RNA (sncRNA) 5' transfer RNA (tRNA) half
gcccggtttcgaac

SEQ ID NO: 5678 - DNA, 30 bp, Artificial Sequence
  synthetic circulating small noncoding RNA (sncRNA) 5' transfer RNA (tRNA) half
tgatcctcagtggtctggggtgcaggcttc

SEQ ID NO: 5679 - DNA, 19 bp, Artificial Sequence
  synthetic circulating small noncoding RNA (sncRNA) 5' transfer RNA (tRNA) half
aactgggctcgtccgggat

SEQ ID NO: 5680 - DNA, 30 bp, Artificial Sequence
  synthetic circulating small noncoding RNA (sncRNA) 5' transfer RNA (tRNA) half
tccgtagtgtagtggttatcacgctcgcct

SEQ ID NO: 5681 - DNA, 15 bp, Artificial Sequence
  synthetic circulating small noncoding RNA (sncRNA) 5' transfer RNA (tRNA) half
gcgcccgaacaggga

SEQ ID NO: 5682 - DNA, 31 bp, Artificial Sequence
  synthetic circulating small noncoding RNA (sncRNA) 5' transfer RNA (tRNA) half
gtcccaccgagatttgaactcggatcgctgg

SEQ ID NO: 5683 - DNA, 26 bp, Artificial Sequence
  synthetic circulating small noncoding RNA (sncRNA) 5' transfer RNA (tRNA) half
agaattctaccactgaaccaccaatg

SEQ ID NO: 5684 - DNA, 19 bp, Artificial Sequence
  synthetic circulating small noncoding RNA (sncRNA) 5' transfer RNA (tRNA) half
agggttccttcgagccgga

SEQ ID NO: 5685 - DNA, 18 bp, Artificial Sequence
  synthetic circulating small noncoding RNA (sncRNA) 5' transfer RNA (tRNA) half
ggcccgtacggggatcga

SEQ ID NO: 5686 - DNA, 14 bp, Artificial Sequence
  synthetic circulating small noncoding RNA (sncRNA) 5' transfer RNA (tRNA) half
ccccgtccgtgcct

SEQ ID NO: 5687 - DNA, 27 bp, Artificial Sequence
  synthetic circulating small noncoding RNA (sncRNA) 5' transfer RNA (tRNA) half
gggtggttcagtggtagaattctcgcc

SEQ ID NO: 5688 - DNA, 24 bp, Artificial Sequence
  synthetic circulating small noncoding RNA (sncRNA) 5' transfer RNA (tRNA) half
ctccccgtcggggaattgaacccc

SEQ ID NO: 5689 - DNA, 18 bp, Artificial Sequence
  synthetic circulating small noncoding RNA (sncRNA) 5' transfer RNA (tRNA) half
gtcctgccgcggtcgact

SEQ ID NO: 5690 - DNA, 40 bp, Artificial Sequence
  synthetic circulating small noncoding RNA (sncRNA) 5' transfer RNA (tRNA) half
gtcgagccagccaggagtcgaacctagaatcttctgatcc

SEQ ID NO: 5691 - DNA, 21 bp, Artificial Sequence
  synthetic circulating small noncoding RNA (sncRNA) 5' transfer RNA (tRNA) half
ccggatagctcagtcggtaga

SEQ ID NO: 5692 - DNA, 34 bp, Artificial Sequence
  synthetic circulating small noncoding RNA (sncRNA) 5' transfer RNA (tRNA) half
taggtcgctggttcgattccggctcgaaggactt

SEQ ID NO: 5693 - DNA, 35 bp, Artificial Sequence
  synthetic circulating small noncoding RNA (sncRNA) 5' transfer RNA (tRNA) half
catgaggtcctgggttcgatccccagcatctccag

SEQ ID NO: 5694 - DNA, 17 bp, Artificial Sequence
  synthetic circulating small noncoding RNA (sncRNA) 5' transfer RNA (tRNA) half
gcgagaggtagcgggat

SEQ ID NO: 5695 - DNA, 24 bp, Artificial Sequence
  synthetic circulating small noncoding RNA (sncRNA) 5' transfer RNA (tRNA) half
tttgaactcggatcgctggattca

SEQ ID NO: 5696 - DNA, 30 bp, Artificial Sequence
  synthetic circulating small noncoding RNA (sncRNA) 5' transfer RNA (tRNA) half
ccatatggtctagcggttaggattcctggt

SEQ ID NO: 5697 - DNA, 20 bp, Artificial Sequence
  synthetic circulating small noncoding RNA (sncRNA) 5' transfer RNA (tRNA) half
cggtgagagcgccgaatcct

SEQ ID NO: 5698 - DNA, 15 bp, Artificial Sequence
  synthetic circulating small noncoding RNA (sncRNA) 5' transfer RNA (tRNA) half
acccggaacctttga

SEQ ID NO: 5699 - DNA, 34 bp, Artificial Sequence
  synthetic circulating small noncoding RNA (sncRNA) 5' transfer RNA (tRNA) half
aggttccaccgagatttgaactcggatcgctgga

SEQ ID NO: 5700 - DNA, 25 bp, Artificial Sequence
  synthetic circulating small noncoding RNA (sncRNA) 5' transfer RNA (tRNA) half
ggggttcgattccccgacggggagt

SEQ ID NO: 5701 - DNA, 30 bp, Artificial Sequence
  synthetic circulating small noncoding RNA (sncRNA) 5' transfer RNA (tRNA) half
ctccccgtcggggaattgaaccccggtctc

SEQ ID NO: 5702 - DNA, 30 bp, Artificial Sequence
  synthetic circulating small noncoding RNA (sncRNA) 5' transfer RNA (tRNA) half
ttccatagtgtagcggttatcacgtctgct

SEQ ID NO: 5703 - DNA, 15 bp, Artificial Sequence
  synthetic circulating small noncoding RNA (sncRNA) 5' transfer RNA (tRNA) half
cggggatactcacca

SEQ ID NO: 5704 - DNA, 29 bp, Artificial Sequence
  synthetic circulating small noncoding RNA (sncRNA) 5' transfer RNA (tRNA) half
agcgagaatcatacccctagaccaacgag

SEQ ID NO: 5705 - DNA, 36 bp, Artificial Sequence
  synthetic circulating small noncoding RNA (sncRNA) 5' transfer RNA (tRNA) half
gcccggatagctcagtcggtagagcatcagactttt

SEQ ID NO: 5706 - DNA, 32 bp, Artificial Sequence
  synthetic circulating small noncoding RNA (sncRNA) 5' transfer RNA (tRNA) half
ggcgagcgtgataaccgctacactacaaaaac

SEQ ID NO: 5707 - DNA, 31 bp, Artificial Sequence
  synthetic circulating small noncoding RNA (sncRNA) 5' transfer RNA (tRNA) half
accccgacgtgacttgaacacgcaaccttct

SEQ ID NO: 5708 - DNA, 21 bp, Artificial Sequence
  synthetic circulating small noncoding RNA (sncRNA) 5' transfer RNA (tRNA) half
tcgactcccggtatgggaaca

SEQ ID NO: 5709 - DNA, 20 bp, Artificial Sequence
  synthetic circulating small noncoding RNA (sncRNA) 5' transfer RNA (tRNA) half
gacaggcggggatactcacc

SEQ ID NO: 5710 - DNA, 12 bp, Artificial Sequence
  synthetic circulating small noncoding RNA (sncRNA) 5' transfer RNA (tRNA) half
gaccaacgagcc

SEQ ID NO: 5711 - DNA, 15 bp, Artificial Sequence
  synthetic circulating small noncoding RNA (sncRNA) 5' transfer RNA (tRNA) half
gaagcgtgctgggcc

SEQ ID NO: 5712 - DNA, 16 bp, Artificial Sequence
  synthetic circulating small noncoding RNA (sncRNA) 5' transfer RNA (tRNA) half
aggtccccggttcgaa

SEQ ID NO: 5713 - DNA, 19 bp, Artificial Sequence
  synthetic circulating small noncoding RNA (sncRNA) 5' transfer RNA (tRNA) half
tgaccccgacgtgattcga

SEQ ID NO: 5714 - DNA, 12 bp, Artificial Sequence
  synthetic circulating small noncoding RNA (sncRNA) 5' transfer RNA (tRNA) half
gagctagccggg

SEQ ID NO: 5715 - DNA, 22 bp, Artificial Sequence
  synthetic circulating small noncoding RNA (sncRNA) 5' transfer RNA (tRNA) half
gccgcggcggtgagagcgccga

SEQ ID NO: 5716 - DNA, 16 bp, Artificial Sequence
  synthetic circulating small noncoding RNA (sncRNA) 5' transfer RNA (tRNA) half
cattggccgggaatcg

SEQ ID NO: 5717 - DNA, 32 bp, Artificial Sequence
  synthetic circulating small noncoding RNA (sncRNA) 5' transfer RNA (tRNA) half
acccaggcggcccgggttcgactcccggtatg

SEQ ID NO: 5718 - DNA, 20 bp, Artificial Sequence
  synthetic circulating small noncoding RNA (sncRNA) 5' transfer RNA (tRNA) half
aggcgaacgtgataaccact

SEQ ID NO: 5719 - DNA, 24 bp, Artificial Sequence
  synthetic circulating small noncoding RNA (sncRNA) 5' transfer RNA (tRNA) half
cgaacgtgataaccactacactac

SEQ ID NO: 5720 - DNA, 16 bp, Artificial Sequence
  synthetic circulating small noncoding RNA (sncRNA) 5' transfer RNA (tRNA) half
gatccatcgacctctg

SEQ ID NO: 5721 - DNA, 22 bp, Artificial Sequence
  synthetic circulating small noncoding RNA (sncRNA) 5' transfer RNA (tRNA) half
aaacaaagcctccgatagcaga

SEQ ID NO: 5722 - DNA, 16 bp, Artificial Sequence
  synthetic circulating small noncoding RNA (sncRNA) 5' transfer RNA (tRNA) half
gtcgaacccgggccgc

SEQ ID NO: 5723 - DNA, 27 bp, Artificial Sequence
  synthetic circulating small noncoding RNA (sncRNA) 5' transfer RNA (tRNA) half
acctgcgcggggaaaccccaatggatt

SEQ ID NO: 5724 - DNA, 31 bp, Artificial Sequence
  synthetic circulating small noncoding RNA (sncRNA) 5' transfer RNA (tRNA) half
aggcggcccgggttcgactcccggtgtggga

SEQ ID NO: 5725 - DNA, 29 bp, Artificial Sequence
  synthetic circulating small noncoding RNA (sncRNA) 5' transfer RNA (tRNA) half
gaccccgacgtgatttgaacacgcaacct

SEQ ID NO: 5726 - DNA, 29 bp, Artificial Sequence
  synthetic circulating small noncoding RNA (sncRNA) 5' transfer RNA (tRNA) half
cgcccgaacagggacttgaaccctggacc

SEQ ID NO: 5727 - DNA, 21 bp, Artificial Sequence
  synthetic circulating small noncoding RNA (sncRNA) 5' transfer RNA (tRNA) half
aggattcgaacctgcgcgggg

SEQ ID NO: 5728 - DNA, 13 bp, Artificial Sequence
  synthetic circulating small noncoding RNA (sncRNA) 5' transfer RNA (tRNA) half
cggccatcctggt

SEQ ID NO: 5729 - DNA, 29 bp, Artificial Sequence
  synthetic circulating small noncoding RNA (sncRNA) 5' transfer RNA (tRNA) half
ggtatagctcagtggtagagcatttgact

SEQ ID NO: 5730 - DNA, 23 bp, Artificial Sequence
  synthetic circulating small noncoding RNA (sncRNA) 5' transfer RNA (tRNA) half
gccttagaccgctcggccatcct

SEQ ID NO: 5731 - DNA, 15 bp, Artificial Sequence
  synthetic circulating small noncoding RNA (sncRNA) 5' transfer RNA (tRNA) half
tcgaacccgggccgc

SEQ ID NO: 5732 - DNA, 12 bp, Artificial Sequence
  synthetic circulating small noncoding RNA (sncRNA) 5' transfer RNA (tRNA) half
gaggtcccaccg

SEQ ID NO: 5733 - DNA, 30 bp, Artificial Sequence
  synthetic circulating small noncoding RNA (sncRNA) 5' transfer RNA (tRNA) half
gaggttgtgagttcgagcctcacctggagc

SEQ ID NO: 5734 - DNA, 15 bp, Artificial Sequence
  synthetic circulating small noncoding RNA (sncRNA) 5' transfer RNA (tRNA) half
tgaccccgacgtgac

SEQ ID NO: 5735 - DNA, 18 bp, Artificial Sequence
  synthetic circulating small noncoding RNA (sncRNA) 5' transfer RNA (tRNA) half
cgtggcaggcgagaattc

SEQ ID NO: 5736 - DNA, 14 bp, Artificial Sequence
  synthetic circulating small noncoding RNA (sncRNA) 5' transfer RNA (tRNA) half
gagtactaaccact

SEQ ID NO: 5737 - DNA, 22 bp, Artificial Sequence
  synthetic circulating small noncoding RNA (sncRNA) 5' transfer RNA (tRNA) half
gagtccagagtgctaaccatta

SEQ ID NO: 5738 - DNA, 13 bp, Artificial Sequence
  synthetic circulating small noncoding RNA (sncRNA) 5' transfer RNA (tRNA) half
ggaatcctaaccg

SEQ ID NO: 5739 - DNA, 13 bp, Artificial Sequence
  synthetic circulating small noncoding RNA (sncRNA) 5' transfer RNA (tRNA) half
tgccggggatcga

SEQ ID NO: 5740 - DNA, 35 bp, Artificial Sequence
  synthetic circulating small noncoding RNA (sncRNA) 5' transfer RNA (tRNA) half
gggaggcccgggttcgattcccggccaatgcacga

SEQ ID NO: 5741 - DNA, 20 bp, Artificial Sequence
  synthetic circulating small noncoding RNA (sncRNA) 5' transfer RNA (tRNA) half
gcccggatgatcctcagtgg

SEQ ID NO: 5742 - DNA, 20 bp, Artificial Sequence
  synthetic circulating small noncoding RNA (sncRNA) 5' transfer RNA (tRNA) half
ggcgagaattctaccattga

SEQ ID NO: 5743 - DNA, 19 bp, Artificial Sequence
  synthetic circulating small noncoding RNA (sncRNA) 5' transfer RNA (tRNA) half
gcccgaacagggacttgaa

SEQ ID NO: 5744 - DNA, 15 bp, Artificial Sequence
  synthetic circulating small noncoding RNA (sncRNA) 5' transfer RNA (tRNA) half
gaaccggggaccttt

SEQ ID NO: 5745 - DNA, 18 bp, Artificial Sequence
  synthetic circulating small noncoding RNA (sncRNA) 5' transfer RNA (tRNA) half
agtcggtagagcatcaga

SEQ ID NO: 5746 - DNA, 32 bp, Artificial Sequence
  synthetic circulating small noncoding RNA (sncRNA) 5' transfer RNA (tRNA) half
cccaggcggcccgggttcgactcccggtgtgg

SEQ ID NO: 5747 - DNA, 29 bp, Artificial Sequence
  synthetic circulating small noncoding RNA (sncRNA) 5' transfer RNA (tRNA) half
aggtcctgggttcgagccccagtggaacc

SEQ ID NO: 5748 - DNA, 13 bp, Artificial Sequence
  synthetic circulating small noncoding RNA (sncRNA) 5' transfer RNA (tRNA) half
ccccgtacgggcc

SEQ ID NO: 5749 - DNA, 35 bp, Artificial Sequence
  synthetic circulating small noncoding RNA (sncRNA) 5' transfer RNA (tRNA) half
cgcccggctagctcagtcggtagagcatgagactc

SEQ ID NO: 5750 - DNA, 31 bp, Artificial Sequence
  synthetic circulating small noncoding RNA (sncRNA) 5' transfer RNA (tRNA) half
cctccccgtcggggaattgaaccccggtctc

SEQ ID NO: 5751 - DNA, 12 bp, Artificial Sequence
  synthetic circulating small noncoding RNA (sncRNA) 5' transfer RNA (tRNA) half
cgcccccgaaga

SEQ ID NO: 5752 - DNA, 23 bp, Artificial Sequence
  synthetic circulating small noncoding RNA (sncRNA) 5' transfer RNA (tRNA) half
aggatggccgagcggtctaaggc

SEQ ID NO: 5753 - DNA, 33 bp, Artificial Sequence
  synthetic circulating small noncoding RNA (sncRNA) 5' transfer RNA (tRNA) half
ctgaaggtcctgagttcgaacctcagagggggc

SEQ ID NO: 5754 - DNA, 12 bp, Artificial Sequence
  synthetic circulating small noncoding RNA (sncRNA) 5' transfer RNA (tRNA) half
agcgccgaatcc

SEQ ID NO: 5755 - DNA, 26 bp, Artificial Sequence
  synthetic circulating small noncoding RNA (sncRNA) 5' transfer RNA (tRNA) half
cgtcggggaatcgaaccccggtctcc

SEQ ID NO: 5756 - DNA, 28 bp, Artificial Sequence
  synthetic circulating small noncoding RNA (sncRNA) 5' transfer RNA (tRNA) half
tgatcgtatagtggttagtactctgcgt

SEQ ID NO: 5757 - DNA, 28 bp, Artificial Sequence
  synthetic circulating small noncoding RNA (sncRNA) 5' transfer RNA (tRNA) half
aggcggcccgggttcgactcccggtatg

SEQ ID NO: 5758 - DNA, 27 bp, Artificial Sequence
  synthetic circulating small noncoding RNA (sncRNA) 5' transfer RNA (tRNA) half
accaggaatcctaaccgctagaccatg

SEQ ID NO: 5759 - DNA, 21 bp, Artificial Sequence
  synthetic circulating small noncoding RNA (sncRNA) 5' transfer RNA (tRNA) half
ctcggatcgctggattcagag

SEQ ID NO: 5760 - DNA, 22 bp, Artificial Sequence
  synthetic circulating small noncoding RNA (sncRNA) 5' transfer RNA (tRNA) half
agttcaaatctcggtggaacct

SEQ ID NO: 5761 - DNA, 15 bp, Artificial Sequence
  synthetic circulating small noncoding RNA (sncRNA) 5' transfer RNA (tRNA) half
gagtcccatgctcta

SEQ ID NO: 5762 - DNA, 26 bp, Artificial Sequence
  synthetic circulating small noncoding RNA (sncRNA) 5' transfer RNA (tRNA) half
ccgaatcctaaccactagaccaccag

SEQ ID NO: 5763 - DNA, 25 bp, Artificial Sequence
  synthetic circulating small noncoding RNA (sncRNA) 5' transfer RNA (tRNA) half
ggagaccggggttcgattccccgac

SEQ ID NO: 5764 - DNA, 11 bp, Artificial Sequence
  synthetic circulating small noncoding RNA (sncRNA) 5' transfer RNA (tRNA) half
tttccgcccgg

SEQ ID NO: 5765 - DNA, 13 bp, Artificial Sequence
  synthetic circulating small noncoding RNA (sncRNA) 5' transfer RNA (tRNA) half
gaccgggaatcga

SEQ ID NO: 5766 - DNA, 35 bp, Artificial Sequence
  synthetic circulating small noncoding RNA (sncRNA) 5' transfer RNA (tRNA) half
agttcccacatggtctagcggttaggattcctggt

SEQ ID NO: 5767 - DNA, 22 bp, Artificial Sequence
  synthetic circulating small noncoding RNA (sncRNA) 5' transfer RNA (tRNA) half
gaccccgacgtgatttgaacac

SEQ ID NO: 5768 - DNA, 39 bp, Artificial Sequence
  synthetic circulating small noncoding RNA (sncRNA) 5' transfer RNA (tRNA) half
ttgccccctctgaggttcgaactcaggaccttcagatta

SEQ ID NO: 5769 - DNA, 22 bp, Artificial Sequence
  synthetic circulating small noncoding RNA (sncRNA) 5' transfer RNA (tRNA) half
cgagaattctaccactgaacca

SEQ ID NO: 5770 - DNA, 20 bp, Artificial Sequence
  synthetic circulating small noncoding RNA (sncRNA) 5' transfer RNA (tRNA) half
cgactcccggtgtgggaacg

SEQ ID NO: 5771 - DNA, 35 bp, Artificial Sequence
  synthetic circulating small noncoding RNA (sncRNA) 5' transfer RNA (tRNA) half
ctggggattgtgggttcgagtcccatctgggtcgc

SEQ ID NO: 5772 - DNA, 32 bp, Artificial Sequence
  synthetic circulating small noncoding RNA (sncRNA) 5' transfer RNA (tRNA) half
gggcctcccgcgtggcaggcgagaattctacc

SEQ ID NO: 5773 - DNA, 34 bp, Artificial Sequence
  synthetic circulating small noncoding RNA (sncRNA) 5' transfer RNA (tRNA) half
gggcctcccgcgtggcaggcgagaattctaccac

SEQ ID NO: 5774 - DNA, 16 bp, Artificial Sequence
  synthetic circulating small noncoding RNA (sncRNA) 5' transfer RNA (tRNA) half
cgggccgcggcggtga

SEQ ID NO: 5775 - DNA, 16 bp, Artificial Sequence
  synthetic circulating small noncoding RNA (sncRNA) 5' transfer RNA (tRNA) half
ttccgcccggtttcga

SEQ ID NO: 5776 - DNA, 19 bp, Artificial Sequence
  synthetic circulating small noncoding RNA (sncRNA) 5' transfer RNA (tRNA) half
gagaatcatacccctagac

SEQ ID NO: 5777 - DNA, 14 bp, Artificial Sequence
  synthetic circulating small noncoding RNA (sncRNA) 5' transfer RNA (tRNA) half
ggcggggatactca

SEQ ID NO: 5778 - DNA, 19 bp, Artificial Sequence
  synthetic circulating small noncoding RNA (sncRNA) 5' transfer RNA (tRNA) half
gaatcgaaccccggtctcc

SEQ ID NO: 5779 - DNA, 37 bp, Artificial Sequence
  synthetic circulating small noncoding RNA (sncRNA) 5' transfer RNA (tRNA) half
gtttccgtagtgtagtggttatcacgttcgcctcaca

SEQ ID NO: 5780 - DNA, 38 bp, Artificial Sequence
  synthetic circulating small noncoding RNA (sncRNA) 5' transfer RNA (tRNA) half
acgcgggaggcccgggttcgattcccggcccatgcaga

SEQ ID NO: 5781 - DNA, 23 bp, Artificial Sequence
  synthetic circulating small noncoding RNA (sncRNA) 5' transfer RNA (tRNA) half
agtgtagtggttatcacgttcgc

SEQ ID NO: 5782 - DNA, 29 bp, Artificial Sequence
  synthetic circulating small noncoding RNA (sncRNA) 5' transfer RNA (tRNA) half
cgaatgtgataaccactacactacggaaa

SEQ ID NO: 5783 - DNA, 31 bp, Artificial Sequence
  synthetic circulating small noncoding RNA (sncRNA) 5' transfer RNA (tRNA) half
gctcgttggtctaggggtatgattctcgctt

SEQ ID NO: 5784 - DNA, 17 bp, Artificial Sequence
  synthetic circulating small noncoding RNA (sncRNA) 5' transfer RNA (tRNA) half
ccactgaaccaccaatg

SEQ ID NO: 5785 - DNA, 20 bp, Artificial Sequence
  synthetic circulating small noncoding RNA (sncRNA) 5' transfer RNA (tRNA) half
gtaaaccgaagatcgcgggt

SEQ ID NO: 5786 - DNA, 26 bp, Artificial Sequence
  synthetic circulating small noncoding RNA (sncRNA) 5' transfer RNA (tRNA) half
gattcagagtccagagtgctaaccat

SEQ ID NO: 5787 - DNA, 19 bp, Artificial Sequence
  synthetic circulating small noncoding RNA (sncRNA) 5' transfer RNA (tRNA) half
tcgaatcccagcggggcct

SEQ ID NO: 5788 - DNA, 14 bp, Artificial Sequence
  synthetic circulating small noncoding RNA (sncRNA) 5' transfer RNA (tRNA) half
gcgaacgtgataac

SEQ ID NO: 5789 - DNA, 13 bp, Artificial Sequence
  synthetic circulating small noncoding RNA (sncRNA) 5' transfer RNA (tRNA) half
cgagaatcatacc

SEQ ID NO: 5790 - DNA, 11 bp, Artificial Sequence
  synthetic circulating small noncoding RNA (sncRNA) 5' transfer RNA (tRNA) half
gcgggaggccc

SEQ ID NO: 5791 - DNA, 25 bp, Artificial Sequence
  synthetic circulating small noncoding RNA (sncRNA) 5' transfer RNA (tRNA) half
gtgtagtggttatcacgttcgcctc

SEQ ID NO: 5792 - DNA, 35 bp, Artificial Sequence
  synthetic circulating small noncoding RNA (sncRNA) 5' transfer RNA (tRNA) half
accccgggtgggactcgaacccacaatccctggct

SEQ ID NO: 5793 - DNA, 31 bp, Artificial Sequence
  synthetic circulating small noncoding RNA (sncRNA) 5' transfer RNA (tRNA) half
ctccgccgggactcgaacccggaacctttga

SEQ ID NO: 5794 - DNA, 28 bp, Artificial Sequence
  synthetic circulating small noncoding RNA (sncRNA) 5' transfer RNA (tRNA) half
gcgcccgaacagggacttgaaccctgga

SEQ ID NO: 5795 - DNA, 20 bp, Artificial Sequence
  synthetic circulating small noncoding RNA (sncRNA) 5' transfer RNA (tRNA) half
aaaagtagggggcacccgga

SEQ ID NO: 5796 - DNA, 20 bp, Artificial Sequence
  synthetic circulating small noncoding RNA (sncRNA) 5' transfer RNA (tRNA) half
ggtggagatgccggggatcg

SEQ ID NO: 5797 - DNA, 25 bp, Artificial Sequence
  synthetic circulating small noncoding RNA (sncRNA) 5' transfer RNA (tRNA) half
ggtggagatgccggggatcgaaccc

SEQ ID NO: 5798 - DNA, 37 bp, Artificial Sequence
  synthetic circulating small noncoding RNA (sncRNA) 5' transfer RNA (tRNA) half
accccgggtgggactcgaacccacaatccctggctta

SEQ ID NO: 5799 - DNA, 38 bp, Artificial Sequence
  synthetic circulating small noncoding RNA (sncRNA) 5' transfer RNA (tRNA) half
cgggccgcggcggtgagagcgccgaatcctaaccacta

SEQ ID NO: 5800 - DNA, 13 bp, Artificial Sequence
  synthetic circulating small noncoding RNA (sncRNA) 5' transfer RNA (tRNA) half
taggtcgctggtt

SEQ ID NO: 5801 - DNA, 22 bp, Artificial Sequence
  synthetic circulating small noncoding RNA (sncRNA) 5' transfer RNA (tRNA) half
ctcggatcgctggattcaaagt

SEQ ID NO: 5802 - DNA, 8 bp, Artificial Sequence
  synthetic circulating small noncoding RNA (sncRNA) 5' transfer RNA (tRNA) half
aggcccgg

SEQ ID NO: 5803 - DNA, 29 bp, Artificial Sequence
  synthetic circulating small noncoding RNA (sncRNA) 5' transfer RNA (tRNA) half
cggttaggattcctggttttcacccaggc

SEQ ID NO: 5804 - DNA, 14 bp, Artificial Sequence
  synthetic circulating small noncoding RNA (sncRNA) 5' transfer RNA (tRNA) half
gcccgaacagggac

SEQ ID NO: 5805 - DNA, 6 bp, Artificial Sequence
  synthetic circulating small noncoding RNA (sncRNA) 5' transfer RNA (tRNA) half
ggccgg

SEQ ID NO: 5806 - DNA, 36 bp, Artificial Sequence
  synthetic circulating small noncoding RNA (sncRNA) 5' transfer RNA (tRNA) half
gtagggggcacccggatttgaaccggggacctcttg

SEQ ID NO: 5807 - DNA, 14 bp, Artificial Sequence
  synthetic circulating small noncoding RNA (sncRNA) 5' transfer RNA (tRNA) half
tgaaccaccaatgc

SEQ ID NO: 5808 - DNA, 15 bp, Artificial Sequence
  synthetic circulating small noncoding RNA (sncRNA) 5' transfer RNA (tRNA) half
aggaatcctaaccgc

SEQ ID NO: 5809 - DNA, 26 bp, Artificial Sequence
  synthetic circulating small noncoding RNA (sncRNA) 5' transfer RNA (tRNA) half
tcggtagagcatgagactcttaatct

SEQ ID NO: 5810 - DNA, 10 bp, Artificial Sequence
  synthetic circulating small noncoding RNA (sncRNA) 5' transfer RNA (tRNA) half
gggagtcgaa

SEQ ID NO: 5811 - DNA, 33 bp, Artificial Sequence
  synthetic circulating small noncoding RNA (sncRNA) 5' transfer RNA (tRNA) half
aaggccccagcgagatttgaactcgcgacccct

SEQ ID NO: 5812 - DNA, 15 bp, Artificial Sequence
  synthetic circulating small noncoding RNA (sncRNA) 5' transfer RNA (tRNA) half
atccatcgacctctg

SEQ ID NO: 5813 - DNA, 28 bp, Artificial Sequence
  synthetic circulating small noncoding RNA (sncRNA) 5' transfer RNA (tRNA) half
ccaggaatcctaaccgctagaccatatg

SEQ ID NO: 5814 - DNA, 22 bp, Artificial Sequence
  synthetic circulating small noncoding RNA (sncRNA) 5' transfer RNA (tRNA) half
ggttagcactctggactctgaa

SEQ ID NO: 5815 - DNA, 12 bp, Artificial Sequence
  synthetic circulating small noncoding RNA (sncRNA) 5' transfer RNA (tRNA) half
ctgccgactacg

SEQ ID NO: 5816 - DNA, 13 bp, Artificial Sequence
  synthetic circulating small noncoding RNA (sncRNA) 5' transfer RNA (tRNA) half
tccgggtgccccc

SEQ ID NO: 5817 - DNA, 35 bp, Artificial Sequence
  synthetic circulating small noncoding RNA (sncRNA) 5' transfer RNA (tRNA) half
tcttgcgacccgggttcgattcccgggcggcgcat

SEQ ID NO: 5818 - DNA, 35 bp, Artificial Sequence
  synthetic circulating small noncoding RNA (sncRNA) 5' transfer RNA (tRNA) half
ccagggattgtgggttcgagtcccatctggggtgg

SEQ ID NO: 5819 - DNA, 16 bp, Artificial Sequence
  synthetic circulating small noncoding RNA (sncRNA) 5' transfer RNA (tRNA) half
ctcccggtatgggaac

SEQ ID NO: 5820 - DNA, 38 bp, Artificial Sequence
  synthetic circulating small noncoding RNA (sncRNA) 5' transfer RNA (tRNA) half
acccaggcggcccgggttcgactcccggtgtgggaacg

SEQ ID NO: 5821 - DNA, 27 bp, Artificial Sequence
  synthetic circulating small noncoding RNA (sncRNA) 5' transfer RNA (tRNA) half
acgtgataaccactacactacggaaac

SEQ ID NO: 5822 - DNA, 40 bp, Artificial Sequence
  synthetic circulating small noncoding RNA (sncRNA) 5' transfer RNA (tRNA) half
gattaagagtcccatgctctaccgactgagctagccgggc

SEQ ID NO: 5823 - DNA, 18 bp, Artificial Sequence
  synthetic circulating small noncoding RNA (sncRNA) 5' transfer RNA (tRNA) half
tcagtcggtagagcatca

SEQ ID NO: 5824 - DNA, 10 bp, Artificial Sequence
  synthetic circulating small noncoding RNA (sncRNA) 5' transfer RNA (tRNA) half
cggtgggacc

SEQ ID NO: 5825 - DNA, 24 bp, Artificial Sequence
  synthetic circulating small noncoding RNA (sncRNA) 5' transfer RNA (tRNA) half
tctcatgctctaccgactgagcta

SEQ ID NO: 5826 - DNA, 24 bp, Artificial Sequence
  synthetic circulating small noncoding RNA (sncRNA) 5' transfer RNA (tRNA) half
aaccaggaatcctaaccgctagac

SEQ ID NO: 5827 - DNA, 16 bp, Artificial Sequence
  synthetic circulating small noncoding RNA (sncRNA) 5' transfer RNA (tRNA) half
cagagtgctaaccatt

SEQ ID NO: 5828 - DNA, 23 bp, Artificial Sequence
  synthetic circulating small noncoding RNA (sncRNA) 5' transfer RNA (tRNA) half
ggcggtgagagcgccgaatccta

SEQ ID NO: 5829 - DNA, 34 bp, Artificial Sequence
  synthetic circulating small noncoding RNA (sncRNA) 5' transfer RNA (tRNA) half
atcagaagattgcaggttcgagtcctgccgcggt

SEQ ID NO: 5830 - DNA, 30 bp, Artificial Sequence
  synthetic circulating small noncoding RNA (sncRNA) 5' transfer RNA (tRNA) half
gtttctgtagtgtagtggttatcacgttcg

SEQ ID NO: 5831 - DNA, 35 bp, Artificial Sequence
  synthetic circulating small noncoding RNA (sncRNA) 5' transfer RNA (tRNA) half
ttcttgcgacccgggttcgattcccgggcggcgca

SEQ ID NO: 5832 - DNA, 18 bp, Artificial Sequence
  synthetic circulating small noncoding RNA (sncRNA) 5' transfer RNA (tRNA) half
actcccggtgtgggaaac

SEQ ID NO: 5833 - DNA, 12 bp, Artificial Sequence
  synthetic circulating small noncoding RNA (sncRNA) 5' transfer RNA (tRNA) half
tgaccccgacgt

SEQ ID NO: 5834 - DNA, 13 bp, Artificial Sequence
  synthetic circulating small noncoding RNA (sncRNA) 5' transfer RNA (tRNA) half
accccgacgtgac

SEQ ID NO: 5835 - DNA, 26 bp, Artificial Sequence
  synthetic circulating small noncoding RNA (sncRNA) 5' transfer RNA (tRNA) half
aagcgagaatcatacccctagaccaa

SEQ ID NO: 5836 - DNA, 14 bp, Artificial Sequence
  synthetic circulating small noncoding RNA (sncRNA) 5' transfer RNA (tRNA) half
gcgcccaacgtggg

SEQ ID NO: 5837 - DNA, 24 bp, Artificial Sequence
  synthetic circulating small noncoding RNA (sncRNA) 5' transfer RNA (tRNA) half
caggatggccgagcggtctaaggc

SEQ ID NO: 5838 - DNA, 7 bp, Artificial Sequence
  synthetic circulating small noncoding RNA (sncRNA) 5' transfer RNA (tRNA) half
cggtcta

SEQ ID NO: 5839 - DNA, 21 bp, Artificial Sequence
  synthetic circulating small noncoding RNA (sncRNA) 5' transfer RNA (tRNA) half
accgggcggaaacatatcttt

SEQ ID NO: 5840 - DNA, 27 bp, Artificial Sequence
  synthetic circulating small noncoding RNA (sncRNA) 5' transfer RNA (tRNA) half
tggtggttcagtggtagaattctcgcc

SEQ ID NO: 5841 - DNA, 35 bp, Artificial Sequence
  synthetic circulating small noncoding RNA (sncRNA) 5' transfer RNA (tRNA) half
aaggcaccgctgggattcgaacccaggatctcctg

SEQ ID NO: 5842 - DNA, 15 bp, Artificial Sequence
  synthetic circulating small noncoding RNA (sncRNA) 5' transfer RNA (tRNA) half
gcccgaacagggact

SEQ ID NO: 5843 - DNA, 18 bp, Artificial Sequence
  synthetic circulating small noncoding RNA (sncRNA) 5' transfer RNA (tRNA) half
ggggatgtagctcagtgg

SEQ ID NO: 5844 - DNA, 16 bp, Artificial Sequence
  synthetic circulating small noncoding RNA (sncRNA) 5' transfer RNA (tRNA) half
cgtggcaggcgagaat

SEQ ID NO: 5845 - DNA, 18 bp, Artificial Sequence
  synthetic circulating small noncoding RNA (sncRNA) 5' transfer RNA (tRNA) half
ttcagtggtagaattctc

SEQ ID NO: 5846 - DNA, 45 bp, Artificial Sequence
  synthetic circulating small noncoding RNA (sncRNA) 5' transfer RNA (tRNA) half
ctggcagcggtgggattcgaacccacgcccccgaagagactggag

SEQ ID NO: 5847 - DNA, 33 bp, Artificial Sequence
  synthetic circulating small noncoding RNA (sncRNA) 5' transfer RNA (tRNA) half
tgaccccgacgtgacttgaacacgcaaccttct

SEQ ID NO: 5848 - DNA, 35 bp, Artificial Sequence
  synthetic circulating small noncoding RNA (sncRNA) 5' transfer RNA (tRNA) half
atctgagggtccagggttcaagtccctgttcgggc

SEQ ID NO: 5849 - DNA, 20 bp, Artificial Sequence
  synthetic circulating small noncoding RNA (sncRNA) 5' transfer RNA (tRNA) half
ggcccgtacggggatcgaac

SEQ ID NO: 5850 - DNA, 35 bp, Artificial Sequence
  synthetic circulating small noncoding RNA (sncRNA) 5' transfer RNA (tRNA) half
aatgccgtgactcggattcgaaccgaggttgctgc

SEQ ID NO: 5851 - DNA, 32 bp, Artificial Sequence
  synthetic circulating small noncoding RNA (sncRNA) 5' transfer RNA (tRNA) half
gagccagccaggagtcgaacctggaatcttct

SEQ ID NO: 5852 - DNA, 23 bp, Artificial Sequence
  synthetic circulating small noncoding RNA (sncRNA) 5' transfer RNA (tRNA) half
taacccagaggtcgatggatcga

SEQ ID NO: 5853 - DNA, 13 bp, Artificial Sequence
  synthetic circulating small noncoding RNA (sncRNA) 5' transfer RNA (tRNA) half
ggggagactgcga

SEQ ID NO: 5854 - DNA, 23 bp, Artificial Sequence
  synthetic circulating small noncoding RNA (sncRNA) 5' transfer RNA (tRNA) half
tcgaatccgagtcacggcagtat

SEQ ID NO: 5855 - DNA, 26 bp, Artificial Sequence
  synthetic circulating small noncoding RNA (sncRNA) 5' transfer RNA (tRNA) half
tggtagaattctcgcctgccacgcgg

SEQ ID NO: 5856 - DNA, 20 bp, Artificial Sequence
  synthetic circulating small noncoding RNA (sncRNA) 5' transfer RNA (tRNA) half
ggttcgattcccggtcaggg

SEQ ID NO: 5857 - DNA, 34 bp, Artificial Sequence
  synthetic circulating small noncoding RNA (sncRNA) 5' transfer RNA (tRNA) half
agtgcattggccgggaatcgaacccgggcctccc

SEQ ID NO: 5858 - DNA, 34 bp, Artificial Sequence
  synthetic circulating small noncoding RNA (sncRNA) 5' transfer RNA (tRNA) half
gtctcatgctctaccgactgagctagccgggcga

SEQ ID NO: 5859 - DNA, 23 bp, Artificial Sequence
  synthetic circulating small noncoding RNA (sncRNA) 5' transfer RNA (tRNA) half
ttgaactcggatcgctggattca

SEQ ID NO: 5860 - DNA, 15 bp, Artificial Sequence
  synthetic circulating small noncoding RNA (sncRNA) 5' transfer RNA (tRNA) half
ccccggcacctccac

SEQ ID NO: 5861 - DNA, 23 bp, Artificial Sequence
  synthetic circulating small noncoding RNA (sncRNA) 5' transfer RNA (tRNA) half
tcccatgctctaccgactgagct

SEQ ID NO: 5862 - DNA, 32 bp, Artificial Sequence
  synthetic circulating small noncoding RNA (sncRNA) 5' transfer RNA (tRNA) half
aggagatcctgggttcgaatcccagcggggcc

SEQ ID NO: 5863 - DNA, 33 bp, Artificial Sequence
  synthetic circulating small noncoding RNA (sncRNA) 5' transfer RNA (tRNA) half
cgccgcggcccgggttcgattcccggtcaggga

SEQ ID NO: 5864 - DNA, 13 bp, Artificial Sequence
  synthetic circulating small noncoding RNA (sncRNA) 5' transfer RNA (tRNA) half
gttcgattccggc

SEQ ID NO: 5865 - DNA, 28 bp, Artificial Sequence
  synthetic circulating small noncoding RNA (sncRNA) 5' transfer RNA (tRNA) half
gcccaacgtggggctcgaacccacgacc

SEQ ID NO: 5866 - DNA, 15 bp, Artificial Sequence
  synthetic circulating small noncoding RNA (sncRNA) 5' transfer RNA (tRNA) half
cggtagagcatgaga

SEQ ID NO: 5867 - DNA, 14 bp, Artificial Sequence
  synthetic circulating small noncoding RNA (sncRNA) 5' transfer RNA (tRNA) half
gcgtgctgggccca

SEQ ID NO: 5868 - DNA, 32 bp, Artificial Sequence
  synthetic circulating small noncoding RNA (sncRNA) 5' transfer RNA (tRNA) half
tggtagaattctcgcctgccacgcgggaggcc

SEQ ID NO: 5869 - DNA, 19 bp, Artificial Sequence
  synthetic circulating small noncoding RNA (sncRNA) 5' transfer RNA (tRNA) half
ggggtatgattctcgcttc

SEQ ID NO: 5870 - DNA, 33 bp, Artificial Sequence
  synthetic circulating small noncoding RNA (sncRNA) 5' transfer RNA (tRNA) half
accgccgcggcccgggttcgattcccggtcagg

SEQ ID NO: 5871 - DNA, 13 bp, Artificial Sequence
  synthetic circulating small noncoding RNA (sncRNA) 5' transfer RNA (tRNA) half
cggccatcgctgc

SEQ ID NO: 5872 - DNA, 38 bp, Artificial Sequence
  synthetic circulating small noncoding RNA (sncRNA) 5' transfer RNA (tRNA) half
aagtctgatgctctaccgactgagctatccgggctctt

SEQ ID NO: 5873 - DNA, 13 bp, Artificial Sequence
  synthetic circulating small noncoding RNA (sncRNA) 5' transfer RNA (tRNA) half
cgggccgcggcgg

SEQ ID NO: 5874 - DNA, 21 bp, Artificial Sequence
  synthetic circulating small noncoding RNA (sncRNA) 5' transfer RNA (tRNA) half
gagagcgccgaatcctaacca

SEQ ID NO: 5875 - DNA, 14 bp, Artificial Sequence
  synthetic circulating small noncoding RNA (sncRNA) 5' transfer RNA (tRNA) half
aggattcgaacctg

SEQ ID NO: 5876 - DNA, 36 bp, Artificial Sequence
  synthetic circulating small noncoding RNA (sncRNA) 5' transfer RNA (tRNA) half
aaggccccagcgagatttgaactcgcgacccctggt

SEQ ID NO: 5877 - DNA, 22 bp, Artificial Sequence
  synthetic circulating small noncoding RNA (sncRNA) 5' transfer RNA (tRNA) half
tttgaatccagcgatccgagtt

SEQ ID NO: 5878 - DNA, 23 bp, Artificial Sequence
  synthetic circulating small noncoding RNA (sncRNA) 5' transfer RNA (tRNA) half
cctaaccactagaccaccaggga

SEQ ID NO: 5879 - DNA, 22 bp, Artificial Sequence
  synthetic circulating small noncoding RNA (sncRNA) 5' transfer RNA (tRNA) half
gaggtcccaccgagatttgaac

SEQ ID NO: 5880 - DNA, 37 bp, Artificial Sequence
  synthetic circulating small noncoding RNA (sncRNA) 5' transfer RNA (tRNA) half
agccagggattgtgggttcgagtcccatctggggtgg

SEQ ID NO: 5881 - DNA, 13 bp, Artificial Sequence
  synthetic circulating small noncoding RNA (sncRNA) 5' transfer RNA (tRNA) half
cggccaccgtgac

SEQ ID NO: 5882 - DNA, 14 bp, Artificial Sequence
  synthetic circulating small noncoding RNA (sncRNA) 5' transfer RNA (tRNA) half
gtggagatgccggg

SEQ ID NO: 5883 - DNA, 16 bp, Artificial Sequence
  synthetic circulating small noncoding RNA (sncRNA) 5' transfer RNA (tRNA) half
gagcgccgaatcctaa

SEQ ID NO: 5884 - DNA, 31 bp, Artificial Sequence
  synthetic circulating small noncoding RNA (sncRNA) 5' transfer RNA (tRNA) half
gccccctctgaggttcgaactcaggaccttc

SEQ ID NO: 5885 - DNA, 20 bp, Artificial Sequence
  synthetic circulating small noncoding RNA (sncRNA) 5' transfer RNA (tRNA) half
gttcgaatccgagtcacggc

SEQ ID NO: 5886 - DNA, 34 bp, Artificial Sequence
  synthetic circulating small noncoding RNA (sncRNA) 5' transfer RNA (tRNA) half
ctcggatcgctggattcagagtccagagtgctaa

SEQ ID NO: 5887 - DNA, 25 bp, Artificial Sequence
  synthetic circulating small noncoding RNA (sncRNA) 5' transfer RNA (tRNA) half
gggattaagagtcccatgctctacc

SEQ ID NO: 5888 - DNA, 23 bp, Artificial Sequence
  synthetic circulating small noncoding RNA (sncRNA) 5' transfer RNA (tRNA) half
tgtgcattggccgggaatcgaac

SEQ ID NO: 5889 - DNA, 29 bp, Artificial Sequence
  synthetic circulating small noncoding RNA (sncRNA) 5' transfer RNA (tRNA) half
cccaggcggcccgggttcgactcccggtg

SEQ ID NO: 5890 - DNA, 21 bp, Artificial Sequence
  synthetic circulating small noncoding RNA (sncRNA) 5' transfer RNA (tRNA) half
ttcccggccaatgcactctct

SEQ ID NO: 5891 - DNA, 27 bp, Artificial Sequence
  synthetic circulating small noncoding RNA (sncRNA) 5' transfer RNA (tRNA) half
gccccctctgaggttcgaactcaggac

SEQ ID NO: 5892 - DNA, 22 bp, Artificial Sequence
  synthetic circulating small noncoding RNA (sncRNA) 5' transfer RNA (tRNA) half
tcccggccaatgcactctctca

SEQ ID NO: 5893 - DNA, 19 bp, Artificial Sequence
  synthetic circulating small noncoding RNA (sncRNA) 5' transfer RNA (tRNA) half
tagaccgctcggccatcct

SEQ ID NO: 5894 - DNA, 33 bp, Artificial Sequence
  synthetic circulating small noncoding RNA (sncRNA) 5' transfer RNA (tRNA) half
aatgcagagtactaaccactatacgatctcggc

SEQ ID NO: 5895 - DNA, 28 bp, Artificial Sequence
  synthetic circulating small noncoding RNA (sncRNA) 5' transfer RNA (tRNA) half
gcgacccgggttcgattcccgggcggcg

SEQ ID NO: 5896 - DNA, 33 bp, Artificial Sequence
  synthetic circulating small noncoding RNA (sncRNA) 5' transfer RNA (tRNA) half
acaggagatcctgggttcaaatcccagcggggc

SEQ ID NO: 5897 - DNA, 38 bp, Artificial Sequence
  synthetic circulating small noncoding RNA (sncRNA) 5' transfer RNA (tRNA) half
cgcgggaggcccgggttcgattcccggccaatgcacga

SEQ ID NO: 5898 - DNA, 21 bp, Artificial Sequence
  synthetic circulating small noncoding RNA (sncRNA) 5' transfer RNA (tRNA) half
gaagcgagaatcataccccta

SEQ ID NO: 5899 - DNA, 12 bp, Artificial Sequence
  synthetic circulating small noncoding RNA (sncRNA) 5' transfer RNA (tRNA) half
cgcccgaacagg

SEQ ID NO: 5900 - DNA, 21 bp, Artificial Sequence
  synthetic circulating small noncoding RNA (sncRNA) 5' transfer RNA (tRNA) half
aacccacaatcgtagtcggca

SEQ ID NO: 5901 - DNA, 19 bp, Artificial Sequence
  synthetic circulating small noncoding RNA (sncRNA) 5' transfer RNA (tRNA) half
tcccggacgagccccactt

SEQ ID NO: 5902 - DNA, 21 bp, Artificial Sequence
  synthetic circulating small noncoding RNA (sncRNA) 5' transfer RNA (tRNA) half
ttgtgtcagaagtgggattcg

SEQ ID NO: 5903 - DNA, 31 bp, Artificial Sequence
  synthetic circulating small noncoding RNA (sncRNA) 5' transfer RNA (tRNA) half
gtgatcgtatagtggttagtactctgcgttg

SEQ ID NO: 5904 - DNA, 15 bp, Artificial Sequence
  synthetic circulating small noncoding RNA (sncRNA) 5' transfer RNA (tRNA) half
agtccagagtgctaa

SEQ ID NO: 5905 - DNA, 29 bp, Artificial Sequence
  synthetic circulating small noncoding RNA (sncRNA) 5' transfer RNA (tRNA) half
gtttccctagtgtagtggttatcacgttc

SEQ ID NO: 5906 - DNA, 20 bp, Artificial Sequence
  synthetic circulating small noncoding RNA (sncRNA) 5' transfer RNA (tRNA) half
gttcgattcccgggcggcgc

SEQ ID NO: 5907 - DNA, 33 bp, Artificial Sequence
  synthetic circulating small noncoding RNA (sncRNA) 5' transfer RNA (tRNA) half
tcgactctggcgggactcgaacccgcaaccttt

SEQ ID NO: 5908 - DNA, 31 bp, Artificial Sequence
  synthetic circulating small noncoding RNA (sncRNA) 5' transfer RNA (tRNA) half
ttctgtagtgtagtggttatcacgctcgcct

SEQ ID NO: 5909 - DNA, 32 bp, Artificial Sequence
  synthetic circulating small noncoding RNA (sncRNA) 5' transfer RNA (tRNA) half
cccaggcggcccgggttcgactcccggtatgg

SEQ ID NO: 5910 - DNA, 42 bp, Artificial Sequence
  synthetic circulating small noncoding RNA (sncRNA) 5' transfer RNA (tRNA) half
gtcacgcgggagaccggggttcgattccccgacggggagtct

SEQ ID NO: 5911 - DNA, 16 bp, Artificial Sequence
  synthetic circulating small noncoding RNA (sncRNA) 5' transfer RNA (tRNA) half
tctaccgactgagcta

SEQ ID NO: 5912 - DNA, 35 bp, Artificial Sequence
  synthetic circulating small noncoding RNA (sncRNA) 5' transfer RNA (tRNA) half
cgaccacgaagggactcgaacccccaatcttctga

SEQ ID NO: 5913 - DNA, 22 bp, Artificial Sequence
  synthetic circulating small noncoding RNA (sncRNA) 5' transfer RNA (tRNA) half
tctaccgactgagctatccggg

SEQ ID NO: 5914 - DNA, 12 bp, Artificial Sequence
  synthetic circulating small noncoding RNA (sncRNA) 5' transfer RNA (tRNA) half
gacgaggtggcc

SEQ ID NO: 5915 - DNA, 27 bp, Artificial Sequence
  synthetic circulating small noncoding RNA (sncRNA) 5' transfer RNA (tRNA) half
accgggaatcgaacccgggccgcggcg

SEQ ID NO: 5916 - DNA, 28 bp, Artificial Sequence
  synthetic circulating small noncoding RNA (sncRNA) 5' transfer RNA (tRNA) half
gccgtgactcggattcgaaccgaggttg

SEQ ID NO: 5917 - DNA, 15 bp, Artificial Sequence
  synthetic circulating small noncoding RNA (sncRNA) 5' transfer RNA (tRNA) half
aacccgggtcaactg

SEQ ID NO: 5918 - DNA, 25 bp, Artificial Sequence
  synthetic circulating small noncoding RNA (sncRNA) 5' transfer RNA (tRNA) half
ttcggcgctctcaccgccgcggccc

SEQ ID NO: 5919 - DNA, 23 bp, Artificial Sequence
  synthetic circulating small noncoding RNA (sncRNA) 5' transfer RNA (tRNA) half
tttccctgaccgggaatcgaacc

SEQ ID NO: 5920 - DNA, 18 bp, Artificial Sequence
  synthetic circulating small noncoding RNA (sncRNA) 5' transfer RNA (tRNA) half
gtttccgtagtgtagtgg

SEQ ID NO: 5921 - DNA, 35 bp, Artificial Sequence
  synthetic circulating small noncoding RNA (sncRNA) 5' transfer RNA (tRNA) half
cagaagattgcaggttcgagtcctgccgcggtcga

SEQ ID NO: 5922 - DNA, 33 bp, Artificial Sequence
  synthetic circulating small noncoding RNA (sncRNA) 5' transfer RNA (tRNA) half
agggattgtgggttcgagtcccatctggggtgg

SEQ ID NO: 5923 - DNA, 30 bp, Artificial Sequence
  synthetic circulating small noncoding RNA (sncRNA) 5' transfer RNA (tRNA) half
agcgatccgagttcaaatctcggtgggacc

SEQ ID NO: 5924 - DNA, 32 bp, Artificial Sequence
  synthetic circulating small noncoding RNA (sncRNA) 5' transfer RNA (tRNA) half
gccagccaggagtcgaacctggaatcttctga

SEQ ID NO: 5925 - DNA, 21 bp, Artificial Sequence
  synthetic circulating small noncoding RNA (sncRNA) 5' transfer RNA (tRNA) half
gagaatcatacccctagacca

SEQ ID NO: 5926 - DNA, 23 bp, Artificial Sequence
  synthetic circulating small noncoding RNA (sncRNA) 5' transfer RNA (tRNA) half
atgaccccgacgtgattcgaaca

SEQ ID NO: 5927 - DNA, 12 bp, Artificial Sequence
  synthetic circulating small noncoding RNA (sncRNA) 5' transfer RNA (tRNA) half
ccgagcggtcta

SEQ ID NO: 5928 - DNA, 18 bp, Artificial Sequence
  synthetic circulating small noncoding RNA (sncRNA) 5' transfer RNA (tRNA) half
gggcctcccgcgtggcag

SEQ ID NO: 5929 - DNA, 14 bp, Artificial Sequence
  synthetic circulating small noncoding RNA (sncRNA) 5' transfer RNA (tRNA) half
tcggccatcctggt

SEQ ID NO: 5930 - DNA, 22 bp, Artificial Sequence
  synthetic circulating small noncoding RNA (sncRNA) 5' transfer RNA (tRNA) half
tcgaatcccaccgctgccaacc

SEQ ID NO: 5931 - DNA, 27 bp, Artificial Sequence
  synthetic circulating small noncoding RNA (sncRNA) 5' transfer RNA (tRNA) half
ccgcggcccgggttcgattcccggtca

SEQ ID NO: 5932 - DNA, 19 bp, Artificial Sequence
  synthetic circulating small noncoding RNA (sncRNA) 5' transfer RNA (tRNA) half
agtccagagtgctagccat

SEQ ID NO: 5933 - DNA, 23 bp, Artificial Sequence
  synthetic circulating small noncoding RNA (sncRNA) 5' transfer RNA (tRNA) half
ggtggttcagtggtagaattctc

SEQ ID NO: 5934 - DNA, 15 bp, Artificial Sequence
  synthetic circulating small noncoding RNA (sncRNA) 5' transfer RNA (tRNA) half
cgaacccacgaccct

SEQ ID NO: 5935 - DNA, 30 bp, Artificial Sequence
  synthetic circulating small noncoding RNA (sncRNA) 5' transfer RNA (tRNA) half
cggcccgggttcgactcccggtatgggaac

SEQ ID NO: 5936 - DNA, 22 bp, Artificial Sequence
  synthetic circulating small noncoding RNA (sncRNA) 5' transfer RNA (tRNA) half
ctaccatttgagctaatccccc

SEQ ID NO: 5937 - DNA, 19 bp, Artificial Sequence
  synthetic circulating small noncoding RNA (sncRNA) 5' transfer RNA (tRNA) half
ttcatgaccccgacgtgat

SEQ ID NO: 5938 - DNA, 11 bp, Artificial Sequence
  synthetic circulating small noncoding RNA (sncRNA) 5' transfer RNA (tRNA) half
ggttccaccga

SEQ ID NO: 5939 - DNA, 33 bp, Artificial Sequence
  synthetic circulating small noncoding RNA (sncRNA) 5' transfer RNA (tRNA) half
agtccaacgccttaaccactcggccatcctggt

SEQ ID NO: 5940 - DNA, 19 bp, Artificial Sequence
  synthetic circulating small noncoding RNA (sncRNA) 5' transfer RNA (tRNA) half
aaccaggaatcctaaccgc

SEQ ID NO: 5941 - DNA, 28 bp, Artificial Sequence
  synthetic circulating small noncoding RNA (sncRNA) 5' transfer RNA (tRNA) half
cgtgatcgtataggggttagtactctgc

SEQ ID NO: 5942 - DNA, 9 bp, Artificial Sequence
  synthetic circulating small noncoding RNA (sncRNA) 5' transfer RNA (tRNA) half
ggttcgatt

SEQ ID NO: 5943 - DNA, 36 bp, Artificial Sequence
  synthetic circulating small noncoding RNA (sncRNA) 5' transfer RNA (tRNA) half
tgccgaaacccgggatcgaaccagggacctttagat

SEQ ID NO: 5944 - DNA, 34 bp, Artificial Sequence
  synthetic circulating small noncoding RNA (sncRNA) 5' transfer RNA (tRNA) half
gaggtcccaccgagatttgaactcggatcgctgg

SEQ ID NO: 5945 - DNA, 36 bp, Artificial Sequence
  synthetic circulating small noncoding RNA (sncRNA) 5' transfer RNA (tRNA) half
accgaagatcgcgggttcgaaccccgtccgtgcctg

SEQ ID NO: 5946 - DNA, 12 bp, Artificial Sequence
  synthetic circulating small noncoding RNA (sncRNA) 5' transfer RNA (tRNA) half
gtcgaacccggg

SEQ ID NO: 5947 - DNA, 35 bp, Artificial Sequence
  synthetic circulating small noncoding RNA (sncRNA) 5' transfer RNA (tRNA) half
gtgtttccgcccggtttcgaaccggggacctttcg

SEQ ID NO: 5948 - DNA, 7 bp, Artificial Sequence
  synthetic circulating small noncoding RNA (sncRNA) 5' transfer RNA (tRNA) half
gcgccga

SEQ ID NO: 5949 - DNA, 14 bp, Artificial Sequence
  synthetic circulating small noncoding RNA (sncRNA) 5' transfer RNA (tRNA) half
gcggttaggattcc

SEQ ID NO: 5950 - DNA, 18 bp, Artificial Sequence
  synthetic circulating small noncoding RNA (sncRNA) 5' transfer RNA (tRNA) half
gtggcaggcgagaattct

SEQ ID NO: 5951 - DNA, 35 bp, Artificial Sequence
  synthetic circulating small noncoding RNA (sncRNA) 5' transfer RNA (tRNA) half
tgtttccgcccggtttcgaaccggggacctttcgc

SEQ ID NO: 5952 - DNA, 11 bp, Artificial Sequence
  synthetic circulating small noncoding RNA (sncRNA) 5' transfer RNA (tRNA) half
agaccgctcgg

SEQ ID NO: 5953 - DNA, 23 bp, Artificial Sequence
  synthetic circulating small noncoding RNA (sncRNA) 5' transfer RNA (tRNA) half
gtttctgtagtgtagtggttatc

SEQ ID NO: 5954 - DNA, 32 bp, Artificial Sequence
  synthetic circulating small noncoding RNA (sncRNA) 5' transfer RNA (tRNA) half
agcgatccgagttcaaatctcggtggaaccta

SEQ ID NO: 5955 - DNA, 13 bp, Artificial Sequence
  synthetic circulating small noncoding RNA (sncRNA) 5' transfer RNA (tRNA) half
gtgagagcgccga

SEQ ID NO: 5956 - DNA, 31 bp, Artificial Sequence
  synthetic circulating small noncoding RNA (sncRNA) 5' transfer RNA (tRNA) half
agggtccagggttcaagtccctgttcgggcg

SEQ ID NO: 5957 - DNA, 29 bp, Artificial Sequence
  synthetic circulating small noncoding RNA (sncRNA) 5' transfer RNA (tRNA) half
gtctgatgctctaccgactgagctatcca

SEQ ID NO: 5958 - DNA, 19 bp, Artificial Sequence
  synthetic circulating small noncoding RNA (sncRNA) 5' transfer RNA (tRNA) half
gcattggccgggaatcgaa

SEQ ID NO: 5959 - DNA, 18 bp, Artificial Sequence
  synthetic circulating small noncoding RNA (sncRNA) 5' transfer RNA (tRNA) half
ttttcacccaggcggccc

SEQ ID NO: 5960 - DNA, 10 bp, Artificial Sequence
  synthetic circulating small noncoding RNA (sncRNA) 5' transfer RNA (tRNA) half
gctctaccga

SEQ ID NO: 5961 - DNA, 39 bp, Artificial Sequence
  synthetic circulating small noncoding RNA (sncRNA) 5' transfer RNA (tRNA) half
gtgttcccacaccgggagtcgaacccgggccgcctgggt

SEQ ID NO: 5962 - DNA, 15 bp, Artificial Sequence
  synthetic circulating small noncoding RNA (sncRNA) 5' transfer RNA (tRNA) half
gttcgatccccggca

SEQ ID NO: 5963 - DNA, 22 bp, Artificial Sequence
  synthetic circulating small noncoding RNA (sncRNA) 5' transfer RNA (tRNA) half
gaccccgacgtgacttgaacac

SEQ ID NO: 5964 - DNA, 36 bp, Artificial Sequence
  synthetic circulating small noncoding RNA (sncRNA) 5' transfer RNA (tRNA) half
acaggagatcctgggttcgaatcccagcggtgcctt

SEQ ID NO: 5965 - DNA, 38 bp, Artificial Sequence
  synthetic circulating small noncoding RNA (sncRNA) 5' transfer RNA (tRNA) half
agtctccccgtcggggaatcgaaccccggtctcccgcg

SEQ ID NO: 5966 - DNA, 18 bp, Artificial Sequence
  synthetic circulating small noncoding RNA (sncRNA) 5' transfer RNA (tRNA) half
tcggtagagcatcagact

SEQ ID NO: 5967 - DNA, 25 bp, Artificial Sequence
  synthetic circulating small noncoding RNA (sncRNA) 5' transfer RNA (tRNA) half
gagtctcatgctctaccgactgagc

SEQ ID NO: 5968 - DNA, 35 bp, Artificial Sequence
  synthetic circulating small noncoding RNA (sncRNA) 5' transfer RNA (tRNA) half
atctcagggtcgtgggttcgagccccacgttgggc

SEQ ID NO: 5969 - DNA, 14 bp, Artificial Sequence
  synthetic circulating small noncoding RNA (sncRNA) 5' transfer RNA (tRNA) half
tgccggggatcgaa

SEQ ID NO: 5970 - DNA, 31 bp, Artificial Sequence
  synthetic circulating small noncoding RNA (sncRNA) 5' transfer RNA (tRNA) half
gtttccgtagtgtagtggttagcgcgttcgc

SEQ ID NO: 5971 - DNA, 25 bp, Artificial Sequence
  synthetic circulating small noncoding RNA (sncRNA) 5' transfer RNA (tRNA) half
gattaagagtctcatgctctaccga

SEQ ID NO: 5972 - DNA, 9 bp, Artificial Sequence
  synthetic circulating small noncoding RNA (sncRNA) 5' transfer RNA (tRNA) half
ggcggaaac

SEQ ID NO: 5973 - DNA, 35 bp, Artificial Sequence
  synthetic circulating small noncoding RNA (sncRNA) 5' transfer RNA (tRNA) half
gcgaaaggtccccggttcgaaaccgggcggaaaca

SEQ ID NO: 5974 - DNA, 12 bp, Artificial Sequence
  synthetic circulating small noncoding RNA (sncRNA) 5' transfer RNA (tRNA) half
tcccggacgagc

SEQ ID NO: 5975 - DNA, 17 bp, Artificial Sequence
  synthetic circulating small noncoding RNA (sncRNA) 5' transfer RNA (tRNA) half
cacaccgggagtcgaac

SEQ ID NO: 5976 - DNA, 18 bp, Artificial Sequence
  synthetic circulating small noncoding RNA (sncRNA) 5' transfer RNA (tRNA) half
ctagcggttaggattcct

SEQ ID NO: 5977 - DNA, 20 bp, Artificial Sequence
  synthetic circulating small noncoding RNA (sncRNA) 5' transfer RNA (tRNA) half
tcgaatccgagtcacggcag

SEQ ID NO: 5978 - DNA, 21 bp, Artificial Sequence
  synthetic circulating small noncoding RNA (sncRNA) 5' transfer RNA (tRNA) half
ccacaccgggagtcgaacccg

SEQ ID NO: 5979 - DNA, 23 bp, Artificial Sequence
  synthetic circulating small noncoding RNA (sncRNA) 5' transfer RNA (tRNA) half
caggcggggatactaaccactat

SEQ ID NO: 5980 - DNA, 20 bp, Artificial Sequence
  synthetic circulating small noncoding RNA (sncRNA) 5' transfer RNA (tRNA) half
aggtccccggttcgaaaccg

SEQ ID NO: 5981 - DNA, 20 bp, Artificial Sequence
  synthetic circulating small noncoding RNA (sncRNA) 5' transfer RNA (tRNA) half
cagagtactaaccactatac

SEQ ID NO: 5982 - DNA, 17 bp, Artificial Sequence
  synthetic circulating small noncoding RNA (sncRNA) 5' transfer RNA (tRNA) half
atcccacttctgacaca

SEQ ID NO: 5983 - DNA, 33 bp, Artificial Sequence
  synthetic circulating small noncoding RNA (sncRNA) 5' transfer RNA (tRNA) half
gaggcgaacgtgataaccactacactacggaaa

SEQ ID NO: 5984 - DNA, 39 bp, Artificial Sequence
  synthetic circulating small noncoding RNA (sncRNA) 5' transfer RNA (tRNA) half
gtgccccgtgtgaggatcgaactcacgaccttcagatta

SEQ ID NO: 5985 - DNA, 6 bp, Artificial Sequence
  synthetic circulating small noncoding RNA (sncRNA) 5' transfer RNA (tRNA) half
cgggaa

SEQ ID NO: 5986 - DNA, 36 bp, Artificial Sequence
  synthetic circulating small noncoding RNA (sncRNA) 5' transfer RNA (tRNA) half
cagaagattgagggttcgagtcccttcgtggtcgaa

SEQ ID NO: 5987 - DNA, 12 bp, Artificial Sequence
  synthetic circulating small noncoding RNA (sncRNA) 5' transfer RNA (tRNA) half
ctcgctggggcc

SEQ ID NO: 5988 - DNA, 37 bp, Artificial Sequence
  synthetic circulating small noncoding RNA (sncRNA) 5' transfer RNA (tRNA) half
tatggaggcgtgggttcgaatcccacttctgacacag

SEQ ID NO: 5989 - DNA, 37 bp, Artificial Sequence
  synthetic circulating small noncoding RNA (sncRNA) 5' transfer RNA (tRNA) half
cgcctccccgtcggggaatcgaaccccggtctcccgc

SEQ ID NO: 5990 - DNA, 13 bp, Artificial Sequence
  synthetic circulating small noncoding RNA (sncRNA) 5' transfer RNA (tRNA) half
ggtagcgtggccg

SEQ ID NO: 5991 - DNA, 28 bp, Artificial Sequence
  synthetic circulating small noncoding RNA (sncRNA) 5' transfer RNA (tRNA) half
cgtcggggaatcgaaccccggtctcccg

SEQ ID NO: 5992 - DNA, 17 bp, Artificial Sequence
  synthetic circulating small noncoding RNA (sncRNA) 5' transfer RNA (tRNA) half
ggctcgttggtctaggg

SEQ ID NO: 5993 - DNA, 18 bp, Artificial Sequence
  synthetic circulating small noncoding RNA (sncRNA) 5' transfer RNA (tRNA) half
cgcccgaacagggacttg

SEQ ID NO: 5994 - DNA, 31 bp, Artificial Sequence
  synthetic circulating small noncoding RNA (sncRNA) 5' transfer RNA (tRNA) half
cagcaacctcggttcgaatccgagtcacggc

SEQ ID NO: 5995 - DNA, 11 bp, Artificial Sequence
  synthetic circulating small noncoding RNA (sncRNA) 5' transfer RNA (tRNA) half
cggattcgaac

SEQ ID NO: 5996 - DNA, 31 bp, Artificial Sequence
  synthetic circulating small noncoding RNA (sncRNA) 5' transfer RNA (tRNA) half
tcccgcgtggcaggcgagaattctaccactg

SEQ ID NO: 5997 - DNA, 15 bp, Artificial Sequence
  synthetic circulating small noncoding RNA (sncRNA) 5' transfer RNA (tRNA) half
gagaattctaccact

SEQ ID NO: 5998 - DNA, 19 bp, Artificial Sequence
  synthetic circulating small noncoding RNA (sncRNA) 5' transfer RNA (tRNA) half
accccgtccgtgcctgcgt

SEQ ID NO: 5999 - DNA, 39 bp, Artificial Sequence
  synthetic circulating small noncoding RNA (sncRNA) 5' transfer RNA (tRNA) half
ttccgactccgccgggactcgaacccggaacctttgaat

SEQ ID NO: 6000 - DNA, 34 bp, Artificial Sequence
  synthetic circulating small noncoding RNA (sncRNA) 5' transfer RNA (tRNA) half
cgaaaggttggtggttcgagcccacccagggacg

SEQ ID NO: 6001 - DNA, 33 bp, Artificial Sequence
  synthetic circulating small noncoding RNA (sncRNA) 5' transfer RNA (tRNA) half
ggggatgtagctcagtggtagagcgcgcgcttc

SEQ ID NO: 6002 - DNA, 20 bp, Artificial Sequence
  synthetic circulating small noncoding RNA (sncRNA) 5' transfer RNA (tRNA) half
cggatagctcagtcggtaga

SEQ ID NO: 6003 - DNA, 24 bp, Artificial Sequence
  synthetic circulating small noncoding RNA (sncRNA) 5' transfer RNA (tRNA) half
gccttagaccgctcggccatcctg

SEQ ID NO: 6004 - DNA, 38 bp, Artificial Sequence
  synthetic circulating small noncoding RNA (sncRNA) 5' transfer RNA (tRNA) half
agtctgatgctctaccgactgagctatccgggcgctct

SEQ ID NO: 6005 - DNA, 18 bp, Artificial Sequence
  synthetic circulating small noncoding RNA (sncRNA) 5' transfer RNA (tRNA) half
acgcgggaggcccgggtt

SEQ ID NO: 6006 - DNA, 33 bp, Artificial Sequence
  synthetic circulating small noncoding RNA (sncRNA) 5' transfer RNA (tRNA) half
aggtcgctggttcgattccggctcgaaggactt

SEQ ID NO: 6007 - DNA, 15 bp, Artificial Sequence
  synthetic circulating small noncoding RNA (sncRNA) 5' transfer RNA (tRNA) half
ttccggctcgaagga

SEQ ID NO: 6008 - DNA, 30 bp, Artificial Sequence
  synthetic circulating small noncoding RNA (sncRNA) 5' transfer RNA (tRNA) half
ctcggatcgctggattcagagtccagagtg

SEQ ID NO: 6009 - DNA, 28 bp, Artificial Sequence
  synthetic circulating small noncoding RNA (sncRNA) 5' transfer RNA (tRNA) half
cggatgatcctcagtggtctggggtgca

SEQ ID NO: 6010 - DNA, 12 bp, Artificial Sequence
  synthetic circulating small noncoding RNA (sncRNA) 5' transfer RNA (tRNA) half
ccggggatcgaa

SEQ ID NO: 6011 - DNA, 31 bp, Artificial Sequence
  synthetic circulating small noncoding RNA (sncRNA) 5' transfer RNA (tRNA) half
agccagccaggagtcgaacctagaatcttct

SEQ ID NO: 6012 - DNA, 31 bp, Artificial Sequence
  synthetic circulating small noncoding RNA (sncRNA) 5' transfer RNA (tRNA) half
accacgctctaaccaactgagctaaccggcc

SEQ ID NO: 6013 - DNA, 23 bp, Artificial Sequence
  synthetic circulating small noncoding RNA (sncRNA) 5' transfer RNA (tRNA) half
cgagaattctaccactgaaccac

SEQ ID NO: 6014 - DNA, 23 bp, Artificial Sequence
  synthetic circulating small noncoding RNA (sncRNA) 5' transfer RNA (tRNA) half
gacgacgaggatgggattcgaac

SEQ ID NO: 6015 - DNA, 21 bp, Artificial Sequence
  synthetic circulating small noncoding RNA (sncRNA) 5' transfer RNA (tRNA) half
actcaggaccttcagattatg

SEQ ID NO: 6016 - DNA, 14 bp, Artificial Sequence
  synthetic circulating small noncoding RNA (sncRNA) 5' transfer RNA (tRNA) half
tgggcccagcacgc

SEQ ID NO: 6017 - DNA, 12 bp, Artificial Sequence
  synthetic circulating small noncoding RNA (sncRNA) 5' transfer RNA (tRNA) half
gggggtatagct

SEQ ID NO: 6018 - DNA, 15 bp, Artificial Sequence
  synthetic circulating small noncoding RNA (sncRNA) 5' transfer RNA (tRNA) half
ctagaccaacgagcc

SEQ ID NO: 6019 - DNA, 30 bp, Artificial Sequence
  synthetic circulating small noncoding RNA (sncRNA) 5' transfer RNA (tRNA) half
cagcgatccgagttcaaatctcggtgggac

SEQ ID NO: 6020 - DNA, 29 bp, Artificial Sequence
  synthetic circulating small noncoding RNA (sncRNA) 5' transfer RNA (tRNA) half
ggcattggtggttcagtggtagaattctc

SEQ ID NO: 6021 - DNA, 29 bp, Artificial Sequence
  synthetic circulating small noncoding RNA (sncRNA) 5' transfer RNA (tRNA) half
acatggtctagcggttaggattcctggtt

SEQ ID NO: 6022 - DNA, 16 bp, Artificial Sequence
  synthetic circulating small noncoding RNA (sncRNA) 5' transfer RNA (tRNA) half
ctgaccgggaatcgaa

SEQ ID NO: 6023 - DNA, 38 bp, Artificial Sequence
  synthetic circulating small noncoding RNA (sncRNA) 5' transfer RNA (tRNA) half
ggcggtgagagcgccgaatcctaaccactagaccacca

SEQ ID NO: 6024 - DNA, 21 bp, Artificial Sequence
  synthetic circulating small noncoding RNA (sncRNA) 5' transfer RNA (tRNA) half
tgtagtggttatcacgttcgc

SEQ ID NO: 6025 - DNA, 34 bp, Artificial Sequence
  synthetic circulating small noncoding RNA (sncRNA) 5' transfer RNA (tRNA) half
ctccctggtggtctagtggttaggattcggcgct

SEQ ID NO: 6026 - DNA, 27 bp, Artificial Sequence
  synthetic circulating small noncoding RNA (sncRNA) 5' transfer RNA (tRNA) half
tcgttggtctaggggtatgattctcgc

SEQ ID NO: 6027 - DNA, 30 bp, Artificial Sequence
  synthetic circulating small noncoding RNA (sncRNA) 5' transfer RNA (tRNA) half
cccgtcggggaatcgaaccccggtctcccg

SEQ ID NO: 6028 - DNA, 19 bp, Artificial Sequence
  synthetic circulating small noncoding RNA (sncRNA) 5' transfer RNA (tRNA) half
atggataaggcatcagcct

SEQ ID NO: 6029 - DNA, 21 bp, Artificial Sequence
  synthetic circulating small noncoding RNA (sncRNA) 5' transfer RNA (tRNA) half
ggtcgagccagccaggagtcg

SEQ ID NO: 6030 - DNA, 11 bp, Artificial Sequence
  synthetic circulating small noncoding RNA (sncRNA) 5' transfer RNA (tRNA) half
cgatccccggc

SEQ ID NO: 6031 - DNA, 32 bp, Artificial Sequence
  synthetic circulating small noncoding RNA (sncRNA) 5' transfer RNA (tRNA) half
cagcagagtggcgcagcggaagcgtgctgggc

SEQ ID NO: 6032 - DNA, 35 bp, Artificial Sequence
  synthetic circulating small noncoding RNA (sncRNA) 5' transfer RNA (tRNA) half
gcaggcgagaattctaccactgaaccaccaatgcc

SEQ ID NO: 6033 - DNA, 21 bp, Artificial Sequence
  synthetic circulating small noncoding RNA (sncRNA) 5' transfer RNA (tRNA) half
cgtcgagccagccaggagtcg

SEQ ID NO: 6034 - DNA, 34 bp, Artificial Sequence
  synthetic circulating small noncoding RNA (sncRNA) 5' transfer RNA (tRNA) half
ttaggtcgctggttcgattccggctcgaaggact

SEQ ID NO: 6035 - DNA, 23 bp, Artificial Sequence
  synthetic circulating small noncoding RNA (sncRNA) 5' transfer RNA (tRNA) half
gccccctctgaggttcgaactca

SEQ ID NO: 6036 - DNA, 23 bp, Artificial Sequence
  synthetic circulating small noncoding RNA (sncRNA) 5' transfer RNA (tRNA) half
accaggaatcctaaccgctagac

SEQ ID NO: 6037 - DNA, 22 bp, Artificial Sequence
  synthetic circulating small noncoding RNA (sncRNA) 5' transfer RNA (tRNA) half
ggttcgactcccggtgtgggaa

SEQ ID NO: 6038 - DNA, 32 bp, Artificial Sequence
  synthetic circulating small noncoding RNA (sncRNA) 5' transfer RNA (tRNA) half
ctaagccagggattgtgggttcgagtcccatc

SEQ ID NO: 6039 - DNA, 33 bp, Artificial Sequence
  synthetic circulating small noncoding RNA (sncRNA) 5' transfer RNA (tRNA) half
ggcgaacgtgataaccactacactacggaaact

SEQ ID NO: 6040 - DNA, 37 bp, Artificial Sequence
  synthetic circulating small noncoding RNA (sncRNA) 5' transfer RNA (tRNA) half
agcgccgaatcctaaccactagaccaccagggaagtt

SEQ ID NO: 6041 - DNA, 16 bp, Artificial Sequence
  synthetic circulating small noncoding RNA (sncRNA) 5' transfer RNA (tRNA) half
ggctcgttggtctagg

SEQ ID NO: 6042 - DNA, 19 bp, Artificial Sequence
  synthetic circulating small noncoding RNA (sncRNA) 5' transfer RNA (tRNA) half
agattaagagtctcatgct

SEQ ID NO: 6043 - DNA, 29 bp, Artificial Sequence
  synthetic circulating small noncoding RNA (sncRNA) 5' transfer RNA (tRNA) half
tggcaggcgagaattctaccactgaacca

SEQ ID NO: 6044 - DNA, 28 bp, Artificial Sequence
  synthetic circulating small noncoding RNA (sncRNA) 5' transfer RNA (tRNA) half
agtcaaatgctctaccactgagctatac

SEQ ID NO: 6045 - DNA, 37 bp, Artificial Sequence
  synthetic circulating small noncoding RNA (sncRNA) 5' transfer RNA (tRNA) half
agtaaccacgaagggattcgaaccctcaatcttctga

SEQ ID NO: 6046 - DNA, 15 bp, Artificial Sequence
  synthetic circulating small noncoding RNA (sncRNA) 5' transfer RNA (tRNA) half
ggcggggatactaac

SEQ ID NO: 6047 - DNA, 14 bp, Artificial Sequence
  synthetic circulating small noncoding RNA (sncRNA) 5' transfer RNA (tRNA) half
tgagctaatccccc

SEQ ID NO: 6048 - DNA, 15 bp, Artificial Sequence
  synthetic circulating small noncoding RNA (sncRNA) 5' transfer RNA (tRNA) half
cgccgaatcctagcc

SEQ ID NO: 6049 - DNA, 22 bp, Artificial Sequence
  synthetic circulating small noncoding RNA (sncRNA) 5' transfer RNA (tRNA) half
ccccgtcggggaatcgaacccc

SEQ ID NO: 6050 - DNA, 35 bp, Artificial Sequence
  synthetic circulating small noncoding RNA (sncRNA) 5' transfer RNA (tRNA) half
ctccccgtcggggaattgaaccccggtctcccgcg

SEQ ID NO: 6051 - DNA, 31 bp, Artificial Sequence
  synthetic circulating small noncoding RNA (sncRNA) 5' transfer RNA (tRNA) half
ctcccacatggtctagcggttaggattcctg

SEQ ID NO: 6052 - DNA, 12 bp, Artificial Sequence
  synthetic circulating small noncoding RNA (sncRNA) 5' transfer RNA (tRNA) half
cgaaccgaggtt

SEQ ID NO: 6053 - DNA, 19 bp, Artificial Sequence
  synthetic circulating small noncoding RNA (sncRNA) 5' transfer RNA (tRNA) half
gccgtgactcggattcgaa

SEQ ID NO: 6054 - DNA, 36 bp, Artificial Sequence
  synthetic circulating small noncoding RNA (sncRNA) 5' transfer RNA (tRNA) half
gagccagccaggagtcgaacctagaatcttctgatc

SEQ ID NO: 6055 - DNA, 45 bp, Artificial Sequence
  synthetic circulating small noncoding RNA (sncRNA) 5' transfer RNA (tRNA) half
gggccgcggcggtgagagcgccgaatcctaaccactagaccacca

SEQ ID NO: 6056 - DNA, 29 bp, Artificial Sequence
  synthetic circulating small noncoding RNA (sncRNA) 5' transfer RNA (tRNA) half
gattgtgggttcgagtcccatctggggtg

SEQ ID NO: 6057 - DNA, 9 bp, Artificial Sequence
  synthetic circulating small noncoding RNA (sncRNA) 5' transfer RNA (tRNA) half
attctcgcc

SEQ ID NO: 6058 - DNA, 24 bp, Artificial Sequence
  synthetic circulating small noncoding RNA (sncRNA) 5' transfer RNA (tRNA) half
ccgggagtcgaacccgggccgcct

SEQ ID NO: 6059 - DNA, 28 bp, Artificial Sequence
  synthetic circulating small noncoding RNA (sncRNA) 5' transfer RNA (tRNA) half
cgaacgtgataaccactacactacggaa

SEQ ID NO: 6060 - DNA, 31 bp, Artificial Sequence
  synthetic circulating small noncoding RNA (sncRNA) 5' transfer RNA (tRNA) half
gcagcaacctcggttcgaatccgagtcacgg

SEQ ID NO: 6061 - DNA, 21 bp, Artificial Sequence
  synthetic circulating small noncoding RNA (sncRNA) 5' transfer RNA (tRNA) half
aactcggatcgctggattcaa

SEQ ID NO: 6062 - DNA, 28 bp, Artificial Sequence
  synthetic circulating small noncoding RNA (sncRNA) 5' transfer RNA (tRNA) half
ggccccagcgagatttgaactcgcgacc

SEQ ID NO: 6063 - DNA, 22 bp, Artificial Sequence
  synthetic circulating small noncoding RNA (sncRNA) 5' transfer RNA (tRNA) half
tggcaggcgagaattctaccac

SEQ ID NO: 6064 - DNA, 13 bp, Artificial Sequence
  synthetic circulating small noncoding RNA (sncRNA) 5' transfer RNA (tRNA) half
cggccacctcatc

SEQ ID NO: 6065 - DNA, 15 bp, Artificial Sequence
  synthetic circulating small noncoding RNA (sncRNA) 5' transfer RNA (tRNA) half
gcatgggtggttcag

SEQ ID NO: 6066 - DNA, 30 bp, Artificial Sequence
  synthetic circulating small noncoding RNA (sncRNA) 5' transfer RNA (tRNA) half
ggcggcccgggttcgactcccggtgtggga

SEQ ID NO: 6067 - DNA, 32 bp, Artificial Sequence
  synthetic circulating small noncoding RNA (sncRNA) 5' transfer RNA (tRNA) half
ggccgggaatcgaacccgggtcaactgcttgg

SEQ ID NO: 6068 - DNA, 23 bp, Artificial Sequence
  synthetic circulating small noncoding RNA (sncRNA) 5' transfer RNA (tRNA) half
gccgcggcggtgagagcgccgaa

SEQ ID NO: 6069 - DNA, 32 bp, Artificial Sequence
  synthetic circulating small noncoding RNA (sncRNA) 5' transfer RNA (tRNA) half
agcactctggactctgaatccagcgatccgag

SEQ ID NO: 6070 - DNA, 11 bp, Artificial Sequence
  synthetic circulating small noncoding RNA (sncRNA) 5' transfer RNA (tRNA) half
tgccgtgactc

SEQ ID NO: 6071 - DNA, 16 bp, Artificial Sequence
  synthetic circulating small noncoding RNA (sncRNA) 5' transfer RNA (tRNA) half
tccctgaccgggaatc

SEQ ID NO: 6072 - DNA, 15 bp, Artificial Sequence
  synthetic circulating small noncoding RNA (sncRNA) 5' transfer RNA (tRNA) half
gatgccggggatcga

SEQ ID NO: 6073 - DNA, 31 bp, Artificial Sequence
  synthetic circulating small noncoding RNA (sncRNA) 5' transfer RNA (tRNA) half
cacaccgggagtcgaacccgggccgcctggg

SEQ ID NO: 6074 - DNA, 34 bp, Artificial Sequence
  synthetic circulating small noncoding RNA (sncRNA) 5' transfer RNA (tRNA) half
aggcgaacgtgataaccactacactacggaaact

SEQ ID NO: 6075 - DNA, 19 bp, Artificial Sequence
  synthetic circulating small noncoding RNA (sncRNA) 5' transfer RNA (tRNA) half
gcgcccgaacagggacttg

SEQ ID NO: 6076 - DNA, 25 bp, Artificial Sequence
  synthetic circulating small noncoding RNA (sncRNA) 5' transfer RNA (tRNA) half
ggttcgattccggctcgaaggactt

SEQ ID NO: 6077 - DNA, 14 bp, Artificial Sequence
  synthetic circulating small noncoding RNA (sncRNA) 5' transfer RNA (tRNA) half
gaaccagggacctc

SEQ ID NO: 6078 - DNA, 34 bp, Artificial Sequence
  synthetic circulating small noncoding RNA (sncRNA) 5' transfer RNA (tRNA) half
agcgaccacgaagggactcgaacccccaatcttc

SEQ ID NO: 6079 - DNA, 23 bp, Artificial Sequence
  synthetic circulating small noncoding RNA (sncRNA) 5' transfer RNA (tRNA) half
cttaaccactcggccatcctggt

SEQ ID NO: 6080 - DNA, 15 bp, Artificial Sequence
  synthetic circulating small noncoding RNA (sncRNA) 5' transfer RNA (tRNA) half
ctcggccattctggt

SEQ ID NO: 6081 - DNA, 36 bp, Artificial Sequence
  synthetic circulating small noncoding RNA (sncRNA) 5' transfer RNA (tRNA) half
tccctggtggtctagtggttaggattcggcgctctc

SEQ ID NO: 6082 - DNA, 32 bp, Artificial Sequence
  synthetic circulating small noncoding RNA (sncRNA) 5' transfer RNA (tRNA) half
gagcgccgaatcctaaccactagaccaccagg

SEQ ID NO: 6083 - DNA, 31 bp, Artificial Sequence
  synthetic circulating small noncoding RNA (sncRNA) 5' transfer RNA (tRNA) half
gagccagccaggagtcgaacctggaatcttc

SEQ ID NO: 6084 - DNA, 26 bp, Artificial Sequence
  synthetic circulating small noncoding RNA (sncRNA) 5' transfer RNA (tRNA) half
gatcgtatagtggttagtactctgcg

SEQ ID NO: 6085 - DNA, 14 bp, Artificial Sequence
  synthetic circulating small noncoding RNA (sncRNA) 5' transfer RNA (tRNA) half
ccgtcggggaatcg

SEQ ID NO: 6086 - DNA, 25 bp, Artificial Sequence
  synthetic circulating small noncoding RNA (sncRNA) 5' transfer RNA (tRNA) half
acccgggccgcggcggtgagagcgc

SEQ ID NO: 6087 - DNA, 14 bp, Artificial Sequence
  synthetic circulating small noncoding RNA (sncRNA) 5' transfer RNA (tRNA) half
cgaacccacgaccc

SEQ ID NO: 6088 - DNA, 15 bp, Artificial Sequence
  synthetic circulating small noncoding RNA (sncRNA) 5' transfer RNA (tRNA) half
cagcgccttagaccg

SEQ ID NO: 6089 - DNA, 11 bp, Artificial Sequence
  synthetic circulating small noncoding RNA (sncRNA) 5' transfer RNA (tRNA) half
ggcccgtacgg

SEQ ID NO: 6090 - DNA, 21 bp, Artificial Sequence
  synthetic circulating small noncoding RNA (sncRNA) 5' transfer RNA (tRNA) half
ctcagtcggtagagcatgaga

SEQ ID NO: 6091 - DNA, 17 bp, Artificial Sequence
  synthetic circulating small noncoding RNA (sncRNA) 5' transfer RNA (tRNA) half
cttaaccactcggccat

SEQ ID NO: 6092 - DNA, 12 bp, Artificial Sequence
  synthetic circulating small noncoding RNA (sncRNA) 5' transfer RNA (tRNA) half
ggcgaacgtgat

SEQ ID NO: 6093 - DNA, 9 bp, Artificial Sequence
  synthetic circulating small noncoding RNA (sncRNA) 5' transfer RNA (tRNA) half
gtttccgcc

SEQ ID NO: 6094 - DNA, 33 bp, Artificial Sequence
  synthetic circulating small noncoding RNA (sncRNA) 5' transfer RNA (tRNA) half
gccctctctgaggttcgaactcaggaccttcag

SEQ ID NO: 6095 - DNA, 38 bp, Artificial Sequence
  synthetic circulating small noncoding RNA (sncRNA) 5' transfer RNA (tRNA) half
taaccgaaaggttggtggttcgagcccacccagggacg

SEQ ID NO: 6096 - DNA, 17 bp, Artificial Sequence
  synthetic circulating small noncoding RNA (sncRNA) 5' transfer RNA (tRNA) half
acacgcagaaggtcctg

SEQ ID NO: 6097 - DNA, 27 bp, Artificial Sequence
  synthetic circulating small noncoding RNA (sncRNA) 5' transfer RNA (tRNA) half
gtcgtgggttcgagccccacgttgggc

SEQ ID NO: 6098 - DNA, 31 bp, Artificial Sequence
  synthetic circulating small noncoding RNA (sncRNA) 5' transfer RNA (tRNA) half
cataccgggagtcgaacccgggccgcctggg

SEQ ID NO: 6099 - DNA, 33 bp, Artificial Sequence
  synthetic circulating small noncoding RNA (sncRNA) 5' transfer RNA (tRNA) half
cgcgggaggcccgggttcgattcccggcccatg

SEQ ID NO: 6100 - DNA, 18 bp, Artificial Sequence
  synthetic circulating small noncoding RNA (sncRNA) 5' transfer RNA (tRNA) half
acgcgggagaccggggtt

SEQ ID NO: 6101 - DNA, 22 bp, Artificial Sequence
  synthetic circulating small noncoding RNA (sncRNA) 5' transfer RNA (tRNA) half
ccaaactgtttccgcccggttt

SEQ ID NO: 6102 - DNA, 26 bp, Artificial Sequence
  synthetic circulating small noncoding RNA (sncRNA) 5' transfer RNA (tRNA) half
gctcgaaccaccaacctttcggttaa

SEQ ID NO: 6103 - DNA, 16 bp, Artificial Sequence
  synthetic circulating small noncoding RNA (sncRNA) 5' transfer RNA (tRNA) half
cgactgagctagccgg

SEQ ID NO: 6104 - DNA, 14 bp, Artificial Sequence
  synthetic circulating small noncoding RNA (sncRNA) 5' transfer RNA (tRNA) half
gaaccccggtctcc

SEQ ID NO: 6105 - DNA, 11 bp, Artificial Sequence
  synthetic circulating small noncoding RNA (sncRNA) 5' transfer RNA (tRNA) half
acccggaacct

SEQ ID NO: 6106 - DNA, 20 bp, Artificial Sequence
  synthetic circulating small noncoding RNA (sncRNA) 5' transfer RNA (tRNA) half
gagccagccaggagtcgaac

SEQ ID NO: 6107 - DNA, 24 bp, Artificial Sequence
  synthetic circulating small noncoding RNA (sncRNA) 5' transfer RNA (tRNA) half
gtttctgtagtgtagtggttatca

SEQ ID NO: 6108 - DNA, 32 bp, Artificial Sequence
  synthetic circulating small noncoding RNA (sncRNA) 5' transfer RNA (tRNA) half
agtcaaatgctcttcctctgagctataccccc

SEQ ID NO: 6109 - DNA, 10 bp, Artificial Sequence
  synthetic circulating small noncoding RNA (sncRNA) 5' transfer RNA (tRNA) half
ggttccaccg

SEQ ID NO: 6110 - DNA, 17 bp, Artificial Sequence
  synthetic circulating small noncoding RNA (sncRNA) 5' transfer RNA (tRNA) half
gaacccggaacctttga

SEQ ID NO: 6111 - DNA, 41 bp, Artificial Sequence
  synthetic circulating small noncoding RNA (sncRNA) 5' transfer RNA (tRNA) half
gaactcggatcgctggattcagagtccagagtgctaaccat

SEQ ID NO: 6112 - DNA, 17 bp, Artificial Sequence
  synthetic circulating small noncoding RNA (sncRNA) 5' transfer RNA (tRNA) half
ggccgcggcggtgagag

SEQ ID NO: 6113 - DNA, 34 bp, Artificial Sequence
  synthetic circulating small noncoding RNA (sncRNA) 5' transfer RNA (tRNA) half
gcgccgaatcctagccactagaccaccagggacg

SEQ ID NO: 6114 - DNA, 19 bp, Artificial Sequence
  synthetic circulating small noncoding RNA (sncRNA) 5' transfer RNA (tRNA) half
gatgtggcagcggtgggat

SEQ ID NO: 6115 - DNA, 38 bp, Artificial Sequence
  synthetic circulating small noncoding RNA (sncRNA) 5' transfer RNA (tRNA) half
atcagaagattgcaggttcgagtcctgccgcggtcgac

SEQ ID NO: 6116 - DNA, 20 bp, Artificial Sequence
  synthetic circulating small noncoding RNA (sncRNA) 5' transfer RNA (tRNA) half
atcctgccgactacgtgaat

SEQ ID NO: 6117 - DNA, 20 bp, Artificial Sequence
  synthetic circulating small noncoding RNA (sncRNA) 5' transfer RNA (tRNA) half
ggccgagaccgtccctgggt

SEQ ID NO: 6118 - DNA, 34 bp, Artificial Sequence
  synthetic circulating small noncoding RNA (sncRNA) 5' transfer RNA (tRNA) half
ccgaaacccgggatcgaaccagggacctttagat

SEQ ID NO: 6119 - DNA, 17 bp, Artificial Sequence
  synthetic circulating small noncoding RNA (sncRNA) 5' transfer RNA (tRNA) half
aatcccggacgagccca

SEQ ID NO: 6120 - DNA, 33 bp, Artificial Sequence
  synthetic circulating small noncoding RNA (sncRNA) 5' transfer RNA (tRNA) half
agtttccgtagtgtagtggttatcacgttcgcc

SEQ ID NO: 6121 - DNA, 19 bp, Artificial Sequence
  synthetic circulating small noncoding RNA (sncRNA) 5' transfer RNA (tRNA) half
agtggtatcatgcaagatt

SEQ ID NO: 6122 - DNA, 17 bp, Artificial Sequence
  synthetic circulating small noncoding RNA (sncRNA) 5' transfer RNA (tRNA) half
gttaggattcggcgctc

SEQ ID NO: 6123 - DNA, 30 bp, Artificial Sequence
  synthetic circulating small noncoding RNA (sncRNA) 5' transfer RNA (tRNA) half
tgagagcgccgaatcctaaccactagacca

SEQ ID NO: 6124 - DNA, 27 bp, Artificial Sequence
  synthetic circulating small noncoding RNA (sncRNA) 5' transfer RNA (tRNA) half
aacccgggcctcccgcgtggcaggcga

SEQ ID NO: 6125 - DNA, 14 bp, Artificial Sequence
  synthetic circulating small noncoding RNA (sncRNA) 5' transfer RNA (tRNA) half
gttcgaacctgcgc

SEQ ID NO: 6126 - DNA, 13 bp, Artificial Sequence
  synthetic circulating small noncoding RNA (sncRNA) 5' transfer RNA (tRNA) half
cgcagagtactaa

SEQ ID NO: 6127 - DNA, 19 bp, Artificial Sequence
  synthetic circulating small noncoding RNA (sncRNA) 5' transfer RNA (tRNA) half
ctagtggtatgattctcag

SEQ ID NO: 6128 - DNA, 9 bp, Artificial Sequence
  synthetic circulating small noncoding RNA (sncRNA) 5' transfer RNA (tRNA) half
acgttcgcc

SEQ ID NO: 6129 - DNA, 19 bp, Artificial Sequence
  synthetic circulating small noncoding RNA (sncRNA) 5' transfer RNA (tRNA) half
ttcccacaccgggagtcga

SEQ ID NO: 6130 - DNA, 13 bp, Artificial Sequence
  synthetic circulating small noncoding RNA (sncRNA) 5' transfer RNA (tRNA) half
cgattcccggcca

SEQ ID NO: 6131 - DNA, 33 bp, Artificial Sequence
  synthetic circulating small noncoding RNA (sncRNA) 5' transfer RNA (tRNA) half
agtccaacgccttaaccactcggccatcacagc

SEQ ID NO: 6132 - DNA, 20 bp, Artificial Sequence
  synthetic circulating small noncoding RNA (sncRNA) 5' transfer RNA (tRNA) half
gcccggatagctcagtcggt

SEQ ID NO: 6133 - DNA, 14 bp, Artificial Sequence
  synthetic circulating small noncoding RNA (sncRNA) 5' transfer RNA (tRNA) half
gccggactcgaacc

SEQ ID NO: 6134 - DNA, 22 bp, Artificial Sequence
  synthetic circulating small noncoding RNA (sncRNA) 5' transfer RNA (tRNA) half
gcttccctgaccgggaatcgaa

SEQ ID NO: 6135 - DNA, 33 bp, Artificial Sequence
  synthetic circulating small noncoding RNA (sncRNA) 5' transfer RNA (tRNA) half
cgcccaacgtggggctcgaacccacgaccctgg

SEQ ID NO: 6136 - DNA, 39 bp, Artificial Sequence
  synthetic circulating small noncoding RNA (sncRNA) 5' transfer RNA (tRNA) half
taagccagggattgtgggttcgagtcccatctggggtgg

SEQ ID NO: 6137 - DNA, 30 bp, Artificial Sequence
  synthetic circulating small noncoding RNA (sncRNA) 5' transfer RNA (tRNA) half
cacatggtctagcggttaggattcctggtt

SEQ ID NO: 6138 - DNA, 11 bp, Artificial Sequence
  synthetic circulating small noncoding RNA (sncRNA) 5' transfer RNA (tRNA) half
tgcccggctag

SEQ ID NO: 6139 - DNA, 20 bp, Artificial Sequence
  synthetic circulating small noncoding RNA (sncRNA) 5' transfer RNA (tRNA) half
gactccgccgggactcgaac

SEQ ID NO: 6140 - DNA, 24 bp, Artificial Sequence
  synthetic circulating small noncoding RNA (sncRNA) 5' transfer RNA (tRNA) half
gggggattagctcaaatggtagag

SEQ ID NO: 6141 - DNA, 36 bp, Artificial Sequence
  synthetic circulating small noncoding RNA (sncRNA) 5' transfer RNA (tRNA) half
cgccgcggcccgggttcgattcccggtcagggaagc

SEQ ID NO: 6142 - DNA, 34 bp, Artificial Sequence
  synthetic circulating small noncoding RNA (sncRNA) 5' transfer RNA (tRNA) half
agccagccaggagtcgaacctagaatcttctgat

SEQ ID NO: 6143 - DNA, 16 bp, Artificial Sequence
  synthetic circulating small noncoding RNA (sncRNA) 5' transfer RNA (tRNA) half
tcgaaccggggacctt

SEQ ID NO: 6144 - DNA, 31 bp, Artificial Sequence
  synthetic circulating small noncoding RNA (sncRNA) 5' transfer RNA (tRNA) half
atgatcctcagtggtctggggtgcaggcttc

SEQ ID NO: 6145 - DNA, 19 bp, Artificial Sequence
  synthetic circulating small noncoding RNA (sncRNA) 5' transfer RNA (tRNA) half
agtggtagagcatttgact

SEQ ID NO: 6146 - DNA, 13 bp, Artificial Sequence
  synthetic circulating small noncoding RNA (sncRNA) 5' transfer RNA (tRNA) half
ccgggacctctcg

SEQ ID NO: 6147 - DNA, 30 bp, Artificial Sequence
  synthetic circulating small noncoding RNA (sncRNA) 5' transfer RNA (tRNA) half
acatggtctagcggttaggattcctggttt

SEQ ID NO: 6148 - DNA, 12 bp, Artificial Sequence
  synthetic circulating small noncoding RNA (sncRNA) 5' transfer RNA (tRNA) half
ggtccccggttc

SEQ ID NO: 6149 - DNA, 8 bp, Artificial Sequence
  synthetic circulating small noncoding RNA (sncRNA) 5' transfer RNA (tRNA) half
ttcggcgc

SEQ ID NO: 6150 - DNA, 21 bp, Artificial Sequence
  synthetic circulating small noncoding RNA (sncRNA) 5' transfer RNA (tRNA) half
tggattcagagtccagagtgc

SEQ ID NO: 6151 - DNA, 29 bp, Artificial Sequence
  synthetic circulating small noncoding RNA (sncRNA) 5' transfer RNA (tRNA) half
tgcagagtactaaccactatacgatctcg

SEQ ID NO: 6152 - DNA, 19 bp, Artificial Sequence
  synthetic circulating small noncoding RNA (sncRNA) 5' transfer RNA (tRNA) half
gatagctcagtcggtagag

SEQ ID NO: 6153 - DNA, 16 bp, Artificial Sequence
  synthetic circulating small noncoding RNA (sncRNA) 5' transfer RNA (tRNA) half
gagaggtcccgggttc

SEQ ID NO: 6154 - DNA, 14 bp, Artificial Sequence
  synthetic circulating small noncoding RNA (sncRNA) 5' transfer RNA (tRNA) half
acccaggatctcct

SEQ ID NO: 6155 - DNA, 19 bp, Artificial Sequence
  synthetic circulating small noncoding RNA (sncRNA) 5' transfer RNA (tRNA) half
ggcattggtggttcagtgg

SEQ ID NO: 6156 - DNA, 14 bp, Artificial Sequence
  synthetic circulating small noncoding RNA (sncRNA) 5' transfer RNA (tRNA) half
tccttcgagccgga

SEQ ID NO: 6157 - DNA, 30 bp, Artificial Sequence
  synthetic circulating small noncoding RNA (sncRNA) 5' transfer RNA (tRNA) half
ccaggcggcccgggttcgactcccggtatg

SEQ ID NO: 6158 - DNA, 14 bp, Artificial Sequence
  synthetic circulating small noncoding RNA (sncRNA) 5' transfer RNA (tRNA) half
ttcccataccggga

SEQ ID NO: 6159 - DNA, 35 bp, Artificial Sequence
  synthetic circulating small noncoding RNA (sncRNA) 5' transfer RNA (tRNA) half
tcagaagattccaggttcgactcctggctggctcg

SEQ ID NO: 6160 - DNA, 19 bp, Artificial Sequence
  synthetic circulating small noncoding RNA (sncRNA) 5' transfer RNA (tRNA) half
cgttggccgggaatcgaac

SEQ ID NO: 6161 - DNA, 23 bp, Artificial Sequence
  synthetic circulating small noncoding RNA (sncRNA) 5' transfer RNA (tRNA) half
gcattggtggttcagtggtagaa

SEQ ID NO: 6162 - DNA, 40 bp, Artificial Sequence
  synthetic circulating small noncoding RNA (sncRNA) 5' transfer RNA (tRNA) half
gggccgcggcggtgagagcgccgaatcctaaccactagac

SEQ ID NO: 6163 - DNA, 20 bp, Artificial Sequence
  synthetic circulating small noncoding RNA (sncRNA) 5' transfer RNA (tRNA) half
aaccactcggccatcctggt

SEQ ID NO: 6164 - DNA, 26 bp, Artificial Sequence
  synthetic circulating small noncoding RNA (sncRNA) 5' transfer RNA (tRNA) half
atatggtctagcggttaggattcctg

SEQ ID NO: 6165 - DNA, 24 bp, Artificial Sequence
  synthetic circulating small noncoding RNA (sncRNA) 5' transfer RNA (tRNA) half
agtctgatgctctaccgactgagc

SEQ ID NO: 6166 - DNA, 20 bp, Artificial Sequence
  synthetic circulating small noncoding RNA (sncRNA) 5' transfer RNA (tRNA) half
cagcgccttagaccgctcgg

SEQ ID NO: 6167 - DNA, 31 bp, Artificial Sequence
  synthetic circulating small noncoding RNA (sncRNA) 5' transfer RNA (tRNA) half
cccaggcggcccgggttcgactcccggtgtg

SEQ ID NO: 6168 - DNA, 12 bp, Artificial Sequence
  synthetic circulating small noncoding RNA (sncRNA) 5' transfer RNA (tRNA) half
aaccagggacct

SEQ ID NO: 6169 - DNA, 41 bp, Artificial Sequence
  synthetic circulating small noncoding RNA (sncRNA) 5' transfer RNA (tRNA) half
tgagattaagagtctcatgctctaccgactgagctagccgg

SEQ ID NO: 6170 - DNA, 17 bp, Artificial Sequence
  synthetic circulating small noncoding RNA (sncRNA) 5' transfer RNA (tRNA) half
aacccgggcctcccgcg

SEQ ID NO: 6171 - DNA, 31 bp, Artificial Sequence
  synthetic circulating small noncoding RNA (sncRNA) 5' transfer RNA (tRNA) half
gggccgcggcggtgagagcgccgaatcctaa

SEQ ID NO: 6172 - DNA, 27 bp, Artificial Sequence
  synthetic circulating small noncoding RNA (sncRNA) 5' transfer RNA (tRNA) half
cgcggcccgggttcgattcccggtcag

SEQ ID NO: 6173 - DNA, 14 bp, Artificial Sequence
  synthetic circulating small noncoding RNA (sncRNA) 5' transfer RNA (tRNA) half
gcgcccgaacaggg

SEQ ID NO: 6174 - DNA, 23 bp, Artificial Sequence
  synthetic circulating small noncoding RNA (sncRNA) 5' transfer RNA (tRNA) half
actcggatcgctggattcaaagt

SEQ ID NO: 6175 - DNA, 21 bp, Artificial Sequence
  synthetic circulating small noncoding RNA (sncRNA) 5' transfer RNA (tRNA) half
gaccccgacgtgatttgaaca

SEQ ID NO: 6176 - DNA, 17 bp, Artificial Sequence
  synthetic circulating small noncoding RNA (sncRNA) 5' transfer RNA (tRNA) half
aggcgaacgtgataacc

SEQ ID NO: 6177 - DNA, 21 bp, Artificial Sequence
  synthetic circulating small noncoding RNA (sncRNA) 5' transfer RNA (tRNA) half
ccaggaatcctaaccgctaga

SEQ ID NO: 6178 - DNA, 34 bp, Artificial Sequence
  synthetic circulating small noncoding RNA (sncRNA) 5' transfer RNA (tRNA) half
cgggagaccggggttcgattccccgacggggaga

SEQ ID NO: 6179 - DNA, 26 bp, Artificial Sequence
  synthetic circulating small noncoding RNA (sncRNA) 5' transfer RNA (tRNA) half
acccacgcgtgcaaagcacaatggat

SEQ ID NO: 6180 - DNA, 30 bp, Artificial Sequence
  synthetic circulating small noncoding RNA (sncRNA) 5' transfer RNA (tRNA) half
ggttccttcgagccggattcgaaccagcga

SEQ ID NO: 6181 - DNA, 29 bp, Artificial Sequence
  synthetic circulating small noncoding RNA (sncRNA) 5' transfer RNA (tRNA) half
tccatagtgtagcggttatcacgtctgct

SEQ ID NO: 6182 - DNA, 23 bp, Artificial Sequence
  synthetic circulating small noncoding RNA (sncRNA) 5' transfer RNA (tRNA) half
gcccggatagctcagtcggtaga

SEQ ID NO: 6183 - DNA, 19 bp, Artificial Sequence
  synthetic circulating small noncoding RNA (sncRNA) 5' transfer RNA (tRNA) half
atggagggggcacccggat

SEQ ID NO: 6184 - DNA, 21 bp, Artificial Sequence
  synthetic circulating small noncoding RNA (sncRNA) 5' transfer RNA (tRNA) half
tcagagtccagagtgctaacc

SEQ ID NO: 6185 - DNA, 41 bp, Artificial Sequence
  synthetic circulating small noncoding RNA (sncRNA) 5' transfer RNA (tRNA) half
ttgtgtcagaagtgggattcgaacccacgcctccattcgga

SEQ ID NO: 6186 - DNA, 39 bp, Artificial Sequence
  synthetic circulating small noncoding RNA (sncRNA) 5' transfer RNA (tRNA) half
ccccgtcggggaatcgaaccccggtctcccgcgtgacag

SEQ ID NO: 6187 - DNA, 26 bp, Artificial Sequence
  synthetic circulating small noncoding RNA (sncRNA) 5' transfer RNA (tRNA) half
tagctcagctggtagagcggaggact

SEQ ID NO: 6188 - DNA, 38 bp, Artificial Sequence
  synthetic circulating small noncoding RNA (sncRNA) 5' transfer RNA (tRNA) half
gtgtttccgcccggtttcgaaccggggacctttcgcgt

SEQ ID NO: 6189 - DNA, 18 bp, Artificial Sequence
  synthetic circulating small noncoding RNA (sncRNA) 5' transfer RNA (tRNA) half
agaattctcgcctgccac

SEQ ID NO: 6190 - DNA, 18 bp, Artificial Sequence
  synthetic circulating small noncoding RNA (sncRNA) 5' transfer RNA (tRNA) half
tccaatgcgctatccatt

SEQ ID NO: 6191 - DNA, 19 bp, Artificial Sequence
  synthetic circulating small noncoding RNA (sncRNA) 5' transfer RNA (tRNA) half
aggggtatgattctcggtt

SEQ ID NO: 6192 - DNA, 18 bp, Artificial Sequence
  synthetic circulating small noncoding RNA (sncRNA) 5' transfer RNA (tRNA) half
gtatgattctcgcttcgg

SEQ ID NO: 6193 - DNA, 36 bp, Artificial Sequence
  synthetic circulating small noncoding RNA (sncRNA) 5' transfer RNA (tRNA) half
tgtggcccgtacggggatcgaacccgcgaccttggc

SEQ ID NO: 6194 - DNA, 14 bp, Artificial Sequence
  synthetic circulating small noncoding RNA (sncRNA) 5' transfer RNA (tRNA) half
ccagagtgctaacc

SEQ ID NO: 6195 - DNA, 42 bp, Artificial Sequence
  synthetic circulating small noncoding RNA (sncRNA) 5' transfer RNA (tRNA) half
gttgccccctctgaggttcgaactcaggaccttcagattatg

SEQ ID NO: 6196 - DNA, 17 bp, Artificial Sequence
  synthetic circulating small noncoding RNA (sncRNA) 5' transfer RNA (tRNA) half
ggtgagagcgccgaatc

SEQ ID NO: 6197 - DNA, 13 bp, Artificial Sequence
  synthetic circulating small noncoding RNA (sncRNA) 5' transfer RNA (tRNA) half
aagcgagaatcat

SEQ ID NO: 6198 - DNA, 30 bp, Artificial Sequence
  synthetic circulating small noncoding RNA (sncRNA) 5' transfer RNA (tRNA) half
cattggccgggaatcgaacccgggcctccc

SEQ ID NO: 6199 - DNA, 15 bp, Artificial Sequence
  synthetic circulating small noncoding RNA (sncRNA) 5' transfer RNA (tRNA) half
caccgggagtcgaac

SEQ ID NO: 6200 - DNA, 32 bp, Artificial Sequence
  synthetic circulating small noncoding RNA (sncRNA) 5' transfer RNA (tRNA) half
aggcattggtggttcagtggtagaattctcgc

SEQ ID NO: 6201 - DNA, 16 bp, Artificial Sequence
  synthetic circulating small noncoding RNA (sncRNA) 5' transfer RNA (tRNA) half
ctaagcgagaatcata

SEQ ID NO: 6202 - DNA, 11 bp, Artificial Sequence
  synthetic circulating small noncoding RNA (sncRNA) 5' transfer RNA (tRNA) half
gggcggaaaca

SEQ ID NO: 6203 - DNA, 23 bp, Artificial Sequence
  synthetic circulating small noncoding RNA (sncRNA) 5' transfer RNA (tRNA) half
cgggaatcgaacccgggccgcgg

SEQ ID NO: 6204 - DNA, 35 bp, Artificial Sequence
  synthetic circulating small noncoding RNA (sncRNA) 5' transfer RNA (tRNA) half
gaacgcagtgccttagactgctcggccatcctgac

SEQ ID NO: 6205 - DNA, 12 bp, Artificial Sequence
  synthetic circulating small noncoding RNA (sncRNA) 5' transfer RNA (tRNA) half
cgcagagtacta

SEQ ID NO: 6206 - DNA, 25 bp, Artificial Sequence
  synthetic circulating small noncoding RNA (sncRNA) 5' transfer RNA (tRNA) half
tcggtagagcatgagactcttaatc

SEQ ID NO: 6207 - DNA, 29 bp, Artificial Sequence
  synthetic circulating small noncoding RNA (sncRNA) 5' transfer RNA (tRNA) half
gcccgtacggggatcgaacccgcgacctt

SEQ ID NO: 6208 - DNA, 22 bp, Artificial Sequence
  synthetic circulating small noncoding RNA (sncRNA) 5' transfer RNA (tRNA) half
tcgaaccccgtccgtgcctgcc

SEQ ID NO: 6209 - DNA, 24 bp, Artificial Sequence
  synthetic circulating small noncoding RNA (sncRNA) 5' transfer RNA (tRNA) half
ctggtgtagtggtatcatgcaaga

SEQ ID NO: 6210 - DNA, 37 bp, Artificial Sequence
  synthetic circulating small noncoding RNA (sncRNA) 5' transfer RNA (tRNA) half
ccagtgctctaacccctgagctatggagccctcacct

SEQ ID NO: 6211 - DNA, 36 bp, Artificial Sequence
  synthetic circulating small noncoding RNA (sncRNA) 5' transfer RNA (tRNA) half
gccagggattgtgggttcgagtcccatctggggtgg

SEQ ID NO: 6212 - DNA, 25 bp, Artificial Sequence
  synthetic circulating small noncoding RNA (sncRNA) 5' transfer RNA (tRNA) half
atgctctaccgactgagctagccgg

SEQ ID NO: 6213 - DNA, 23 bp, Artificial Sequence
  synthetic circulating small noncoding RNA (sncRNA) 5' transfer RNA (tRNA) half
cgaaccaccaacctttcggttaa

SEQ ID NO: 6214 - DNA, 25 bp, Artificial Sequence
  synthetic circulating small noncoding RNA (sncRNA) 5' transfer RNA (tRNA) half
agagtccagagtgctaaccattaca

SEQ ID NO: 6215 - DNA, 21 bp, Artificial Sequence
  synthetic circulating small noncoding RNA (sncRNA) 5' transfer RNA (tRNA) half
tcaatccccggcacctccagt

SEQ ID NO: 6216 - DNA, 36 bp, Artificial Sequence
  synthetic circulating small noncoding RNA (sncRNA) 5' transfer RNA (tRNA) half
gaccccgacgtgattcgaacacgcagccttctgatc

SEQ ID NO: 6217 - DNA, 13 bp, Artificial Sequence
  synthetic circulating small noncoding RNA (sncRNA) 5' transfer RNA (tRNA) half
cggtctcccgcgt

SEQ ID NO: 6218 - DNA, 32 bp, Artificial Sequence
  synthetic circulating small noncoding RNA (sncRNA) 5' transfer RNA (tRNA) half
aaagcgagaatcatacccctagaccaacgagc

SEQ ID NO: 6219 - DNA, 11 bp, Artificial Sequence
  synthetic circulating small noncoding RNA (sncRNA) 5' transfer RNA (tRNA) half
cgacgaggatg

SEQ ID NO: 6220 - DNA, 28 bp, Artificial Sequence
  synthetic circulating small noncoding RNA (sncRNA) 5' transfer RNA (tRNA) half
gccccctctgaggttcgaactcaggacc

SEQ ID NO: 6221 - DNA, 25 bp, Artificial Sequence
  synthetic circulating small noncoding RNA (sncRNA) 5' transfer RNA (tRNA) half
tcggggaatcgaaccccggtctccc

SEQ ID NO: 6222 - DNA, 29 bp, Artificial Sequence
  synthetic circulating small noncoding RNA (sncRNA) 5' transfer RNA (tRNA) half
agacgacgaggatgggattcgaacccacg

SEQ ID NO: 6223 - DNA, 25 bp, Artificial Sequence
  synthetic circulating small noncoding RNA (sncRNA) 5' transfer RNA (tRNA) half
cgcccaacgtggggctcgaacccac

SEQ ID NO: 6224 - DNA, 24 bp, Artificial Sequence
  synthetic circulating small noncoding RNA (sncRNA) 5' transfer RNA (tRNA) half
accgggaatcgaacccgggccgcg

SEQ ID NO: 6225 - DNA, 17 bp, Artificial Sequence
  synthetic circulating small noncoding RNA (sncRNA) 5' transfer RNA (tRNA) half
cattggtggttcagtgg

SEQ ID NO: 6226 - DNA, 23 bp, Artificial Sequence
  synthetic circulating small noncoding RNA (sncRNA) 5' transfer RNA (tRNA) half
gagttcaaatctcggtgggacct

SEQ ID NO: 6227 - DNA, 18 bp, Artificial Sequence
  synthetic circulating small noncoding RNA (sncRNA) 5' transfer RNA (tRNA) half
gtttcgaaccggggacct

SEQ ID NO: 6228 - DNA, 28 bp, Artificial Sequence
  synthetic circulating small noncoding RNA (sncRNA) 5' transfer RNA (tRNA) half
ccccgacgtgattcgaacacgcagcctt

SEQ ID NO: 6229 - DNA, 17 bp, Artificial Sequence
  synthetic circulating small noncoding RNA (sncRNA) 5' transfer RNA (tRNA) half
aggattcggcgctctca

SEQ ID NO: 6230 - DNA, 43 bp, Artificial Sequence
  synthetic circulating small noncoding RNA (sncRNA) 5' transfer RNA (tRNA) half
cgtctccccgtcggggaatcgaaccccggtctcccgcgtgaca

SEQ ID NO: 6231 - DNA, 10 bp, Artificial Sequence
  synthetic circulating small noncoding RNA (sncRNA) 5' transfer RNA (tRNA) half
tgccgaaacc

SEQ ID NO: 6232 - DNA, 20 bp, Artificial Sequence
  synthetic circulating small noncoding RNA (sncRNA) 5' transfer RNA (tRNA) half
aaaaaatgttcccgcccggt

SEQ ID NO: 6233 - DNA, 5 bp, Artificial Sequence
  synthetic circulating small noncoding RNA (sncRNA) 5' transfer RNA (tRNA) half
ggccg

SEQ ID NO: 6234 - DNA, 17 bp, Artificial Sequence
  synthetic circulating small noncoding RNA (sncRNA) 5' transfer RNA (tRNA) half
acccacgcctccattcg

SEQ ID NO: 6235 - DNA, 14 bp, Artificial Sequence
  synthetic circulating small noncoding RNA (sncRNA) 5' transfer RNA (tRNA) half
cgcagaaggtcctg

SEQ ID NO: 6236 - DNA, 31 bp, Artificial Sequence
  synthetic circulating small noncoding RNA (sncRNA) 5' transfer RNA (tRNA) half
gccgaatcctaaccactagaccaccagggaa

SEQ ID NO: 6237 - DNA, 38 bp, Artificial Sequence
  synthetic circulating small noncoding RNA (sncRNA) 5' transfer RNA (tRNA) half
gcccagcacgcttccgctgcgccactctgctacccact

SEQ ID NO: 6238 - DNA, 29 bp, Artificial Sequence
  synthetic circulating small noncoding RNA (sncRNA) 5' transfer RNA (tRNA) half
tccctagtgtagtggttatcacgttcgcc

SEQ ID NO: 6239 - DNA, 8 bp, Artificial Sequence
  synthetic circulating small noncoding RNA (sncRNA) 5' transfer RNA (tRNA) half
ggttcgat

SEQ ID NO: 6240 - DNA, 27 bp, Artificial Sequence
  synthetic circulating small noncoding RNA (sncRNA) 5' transfer RNA (tRNA) half
tggttcagtggtagaattctcgcctgc

SEQ ID NO: 6241 - DNA, 11 bp, Artificial Sequence
  synthetic circulating small noncoding RNA (sncRNA) 5' transfer RNA (tRNA) half
ccccggttcga

SEQ ID NO: 6242 - DNA, 24 bp, Artificial Sequence
  synthetic circulating small noncoding RNA (sncRNA) 5' transfer RNA (tRNA) half
tggtctagtggttaggattcggcg

SEQ ID NO: 6243 - DNA, 36 bp, Artificial Sequence
  synthetic circulating small noncoding RNA (sncRNA) 5' transfer RNA (tRNA) half
gcgccgaatcctaaccactagaccaccagggaaact

SEQ ID NO: 6244 - DNA, 14 bp, Artificial Sequence
  synthetic circulating small noncoding RNA (sncRNA) 5' transfer RNA (tRNA) half
cgaaaccgggcgga

SEQ ID NO: 6245 - DNA, 29 bp, Artificial Sequence
  synthetic circulating small noncoding RNA (sncRNA) 5' transfer RNA (tRNA) half
ccaggaatcctaaccgctagaccatatgg

SEQ ID NO: 6246 - DNA, 11 bp, Artificial Sequence
  synthetic circulating small noncoding RNA (sncRNA) 5' transfer RNA (tRNA) half
cacgttgggcg

SEQ ID NO: 6247 - DNA, 28 bp, Artificial Sequence
  synthetic circulating small noncoding RNA (sncRNA) 5' transfer RNA (tRNA) half
cgccgcggcccgggttcgattcccggtc

SEQ ID NO: 6248 - DNA, 16 bp, Artificial Sequence
  synthetic circulating small noncoding RNA (sncRNA) 5' transfer RNA (tRNA) half
tcgaaaccgggcggaa

SEQ ID NO: 6249 - DNA, 22 bp, Artificial Sequence
  synthetic circulating small noncoding RNA (sncRNA) 5' transfer RNA (tRNA) half
cgcgtggcaggcgagaattcta

SEQ ID NO: 6250 - DNA, 21 bp, Artificial Sequence
  synthetic circulating small noncoding RNA (sncRNA) 5' transfer RNA (tRNA) half
taaccactatacgatcacggc

SEQ ID NO: 6251 - DNA, 33 bp, Artificial Sequence
  synthetic circulating small noncoding RNA (sncRNA) 5' transfer RNA (tRNA) half
aacagggacttgaaccctggaccctcagattaa

SEQ ID NO: 6252 - DNA, 19 bp, Artificial Sequence
  synthetic circulating small noncoding RNA (sncRNA) 5' transfer RNA (tRNA) half
gattccccgacggggagtc

SEQ ID NO: 6253 - DNA, 20 bp, Artificial Sequence
  synthetic circulating small noncoding RNA (sncRNA) 5' transfer RNA (tRNA) half
atcctgccgactacgtctag

SEQ ID NO: 6254 - DNA, 32 bp, Artificial Sequence
  synthetic circulating small noncoding RNA (sncRNA) 5' transfer RNA (tRNA) half
tctccccgtcggggaatcgaaccccggtctcc

SEQ ID NO: 6255 - DNA, 17 bp, Artificial Sequence
  synthetic circulating small noncoding RNA (sncRNA) 5' transfer RNA (tRNA) half
tgtaatggttagcactc

SEQ ID NO: 6256 - DNA, 19 bp, Artificial Sequence
  synthetic circulating small noncoding RNA (sncRNA) 5' transfer RNA (tRNA) half
gaccacgtggcctaatgga

SEQ ID NO: 6257 - DNA, 15 bp, Artificial Sequence
  synthetic circulating small noncoding RNA (sncRNA) 5' transfer RNA (tRNA) half
tgaccccgacgtgat

SEQ ID NO: 6258 - DNA, 21 bp, Artificial Sequence
  synthetic circulating small noncoding RNA (sncRNA) 5' transfer RNA (tRNA) half
tccccgtcggggaattgaacc

SEQ ID NO: 6259 - DNA, 14 bp, Artificial Sequence
  synthetic circulating small noncoding RNA (sncRNA) 5' transfer RNA (tRNA) half
cagttggttagagc

SEQ ID NO: 6260 - DNA, 28 bp, Artificial Sequence
  synthetic circulating small noncoding RNA (sncRNA) 5' transfer RNA (tRNA) half
cggcccgggttcgactcccggtgtggga

SEQ ID NO: 6261 - DNA, 17 bp, Artificial Sequence
  synthetic circulating small noncoding RNA (sncRNA) 5' transfer RNA (tRNA) half
gtttcgaaccggggacc

SEQ ID NO: 6262 - DNA, 22 bp, Artificial Sequence
  synthetic circulating small noncoding RNA (sncRNA) 5' transfer RNA (tRNA) half
gctctaccgactgagctagccg

SEQ ID NO: 6263 - DNA, 16 bp, Artificial Sequence
  synthetic circulating small noncoding RNA (sncRNA) 5' transfer RNA (tRNA) half
tgccggggatcgaacc

SEQ ID NO: 6264 - DNA, 21 bp, Artificial Sequence
  synthetic circulating small noncoding RNA (sncRNA) 5' transfer RNA (tRNA) half
ggaatcctaaccgctagacca

SEQ ID NO: 6265 - DNA, 11 bp, Artificial Sequence
  synthetic circulating small noncoding RNA (sncRNA) 5' transfer RNA (tRNA) half
ggcaccgctgg

SEQ ID NO: 6266 - DNA, 13 bp, Artificial Sequence
  synthetic circulating small noncoding RNA (sncRNA) 5' transfer RNA (tRNA) half
gaatcgaaccccg

SEQ ID NO: 6267 - DNA, 33 bp, Artificial Sequence
  synthetic circulating small noncoding RNA (sncRNA) 5' transfer RNA (tRNA) half
ttccctgaccgggaatcgaacccgggccgcggc

SEQ ID NO: 6268 - DNA, 23 bp, Artificial Sequence
  synthetic circulating small noncoding RNA (sncRNA) 5' transfer RNA (tRNA) half
atggttagcactctggactctga

SEQ ID NO: 6269 - DNA, 28 bp, Artificial Sequence
  synthetic circulating small noncoding RNA (sncRNA) 5' transfer RNA (tRNA) half
cagagtgctaaccattacaccatggaac

SEQ ID NO: 6270 - DNA, 18 bp, Artificial Sequence
  synthetic circulating small noncoding RNA (sncRNA) 5' transfer RNA (tRNA) half
gacgacgaaggtgggatt

SEQ ID NO: 6271 - DNA, 28 bp, Artificial Sequence
  synthetic circulating small noncoding RNA (sncRNA) 5' transfer RNA (tRNA) half
aactcggatcgctggattcagagtccag

SEQ ID NO: 6272 - DNA, 34 bp, Artificial Sequence
  synthetic circulating small noncoding RNA (sncRNA) 5' transfer RNA (tRNA) half
agggcatgggtggttcagtggtagaattctcgcc

SEQ ID NO: 6273 - DNA, 22 bp, Artificial Sequence
  synthetic circulating small noncoding RNA (sncRNA) 5' transfer RNA (tRNA) half
tccccgtcggggaatcgaaccc

SEQ ID NO: 6274 - DNA, 22 bp, Artificial Sequence
  synthetic circulating small noncoding RNA (sncRNA) 5' transfer RNA (tRNA) half
gagaattctaccactgaaccac

SEQ ID NO: 6275 - DNA, 22 bp, Artificial Sequence
  synthetic circulating small noncoding RNA (sncRNA) 5' transfer RNA (tRNA) half
gcgcagcggaagcgtgctgggc

SEQ ID NO: 6276 - DNA, 16 bp, Artificial Sequence
  synthetic circulating small noncoding RNA (sncRNA) 5' transfer RNA (tRNA) half
accgggcggaaacatt

SEQ ID NO: 6277 - DNA, 20 bp, Artificial Sequence
  synthetic circulating small noncoding RNA (sncRNA) 5' transfer RNA (tRNA) half
aacccgcgaccttggcgtta

SEQ ID NO: 6278 - DNA, 15 bp, Artificial Sequence
  synthetic circulating small noncoding RNA (sncRNA) 5' transfer RNA (tRNA) half
ggccgggaatcaaac

SEQ ID NO: 6279 - DNA, 14 bp, Artificial Sequence
  synthetic circulating small noncoding RNA (sncRNA) 5' transfer RNA (tRNA) half
acccggggcctcat

SEQ ID NO: 6280 - DNA, 18 bp, Artificial Sequence
  synthetic circulating small noncoding RNA (sncRNA) 5' transfer RNA (tRNA) half
gagtcgaacccgggccgc

SEQ ID NO: 6281 - DNA, 15 bp, Artificial Sequence
  synthetic circulating small noncoding RNA (sncRNA) 5' transfer RNA (tRNA) half
agagcgccgaatcct

SEQ ID NO: 6282 - DNA, 36 bp, Artificial Sequence
  synthetic circulating small noncoding RNA (sncRNA) 5' transfer RNA (tRNA) half
gttcccacaccgggagtcgaacccgggccgcctggg

SEQ ID NO: 6283 - DNA, 37 bp, Artificial Sequence
  synthetic circulating small noncoding RNA (sncRNA) 5' transfer RNA (tRNA) half
accgaagatcacgggttcgaaccccgtccgtgcctgc

SEQ ID NO: 6284 - DNA, 27 bp, Artificial Sequence
  synthetic circulating small noncoding RNA (sncRNA) 5' transfer RNA (tRNA) half
cccgggttcgactcccggtgtgggaac

SEQ ID NO: 6285 - DNA, 25 bp, Artificial Sequence
  synthetic circulating small noncoding RNA (sncRNA) 5' transfer RNA (tRNA) half
gacgacgaggatgggattcgaaccc

SEQ ID NO: 6286 - DNA, 19 bp, Artificial Sequence
  synthetic circulating small noncoding RNA (sncRNA) 5' transfer RNA (tRNA) half
tcccataccgggagtcgaa

SEQ ID NO: 6287 - DNA, 28 bp, Artificial Sequence
  synthetic circulating small noncoding RNA (sncRNA) 5' transfer RNA (tRNA) half
cccgggccgcggcggtgagagcgccgaa

SEQ ID NO: 6288 - DNA, 24 bp, Artificial Sequence
  synthetic circulating small noncoding RNA (sncRNA) 5' transfer RNA (tRNA) half
ggttagcactctggactctgaatc

SEQ ID NO: 6289 - DNA, 33 bp, Artificial Sequence
  synthetic circulating small noncoding RNA (sncRNA) 5' transfer RNA (tRNA) half
ggaggcccgggttcgattcccggccaatgcact

SEQ ID NO: 6290 - DNA, 21 bp, Artificial Sequence
  synthetic circulating small noncoding RNA (sncRNA) 5' transfer RNA (tRNA) half
aagtctgatgctctaccgact

SEQ ID NO: 6291 - DNA, 15 bp, Artificial Sequence
  synthetic circulating small noncoding RNA (sncRNA) 5' transfer RNA (tRNA) half
tccccgtcggggaat

SEQ ID NO: 6292 - DNA, 25 bp, Artificial Sequence
  synthetic circulating small noncoding RNA (sncRNA) 5' transfer RNA (tRNA) half
gtggcaggcgagaattctaccactg

SEQ ID NO: 6293 - DNA, 11 bp, Artificial Sequence
  synthetic circulating small noncoding RNA (sncRNA) 5' transfer RNA (tRNA) half
gcgtgctgggc

SEQ ID NO: 6294 - DNA, 22 bp, Artificial Sequence
  synthetic circulating small noncoding RNA (sncRNA) 5' transfer RNA (tRNA) half
gccttagaccgctcggccacgc

SEQ ID NO: 6295 - DNA, 36 bp, Artificial Sequence
  synthetic circulating small noncoding RNA (sncRNA) 5' transfer RNA (tRNA) half
tcagaaggttgcgtgttcaaatcacgtcggggtcat

SEQ ID NO: 6296 - DNA, 15 bp, Artificial Sequence
  synthetic circulating small noncoding RNA (sncRNA) 5' transfer RNA (tRNA) half
tggagatgccgggga

SEQ ID NO: 6297 - DNA, 19 bp, Artificial Sequence
  synthetic circulating small noncoding RNA (sncRNA) 5' transfer RNA (tRNA) half
agagcgccgaatcctaacc

SEQ ID NO: 6298 - DNA, 19 bp, Artificial Sequence
  synthetic circulating small noncoding RNA (sncRNA) 5' transfer RNA (tRNA) half
gaacccggaacctttgaat

SEQ ID NO: 6299 - DNA, 27 bp, Artificial Sequence
  synthetic circulating small noncoding RNA (sncRNA) 5' transfer RNA (tRNA) half
aaccaggaatcctaaccgctagaccat

SEQ ID NO: 6300 - DNA, 15 bp, Artificial Sequence
  synthetic circulating small noncoding RNA (sncRNA) 5' transfer RNA (tRNA) half
gagagcgccgaatcc

SEQ ID NO: 6301 - DNA, 24 bp, Artificial Sequence
  synthetic circulating small noncoding RNA (sncRNA) 5' transfer RNA (tRNA) half
agtcccacgctctaccaactgagc

SEQ ID NO: 6302 - DNA, 23 bp, Artificial Sequence
  synthetic circulating small noncoding RNA (sncRNA) 5' transfer RNA (tRNA) half
cgcttccgctgcgccactctgct

SEQ ID NO: 6303 - DNA, 30 bp, Artificial Sequence
  synthetic circulating small noncoding RNA (sncRNA) 5' transfer RNA (tRNA) half
acccaggcggcccgggttcgactcccggtg

SEQ ID NO: 6304 - DNA, 12 bp, Artificial Sequence
  synthetic circulating small noncoding RNA (sncRNA) 5' transfer RNA (tRNA) half
taggattcggcg

SEQ ID NO: 6305 - DNA, 17 bp, Artificial Sequence
  synthetic circulating small noncoding RNA (sncRNA) 5' transfer RNA (tRNA) half
cggtctaaggcgctgga

SEQ ID NO: 6306 - DNA, 26 bp, Artificial Sequence
  synthetic circulating small noncoding RNA (sncRNA) 5' transfer RNA (tRNA) half
gctcgttggtctaggggtatgattct

SEQ ID NO: 6307 - DNA, 27 bp, Artificial Sequence
  synthetic circulating small noncoding RNA (sncRNA) 5' transfer RNA (tRNA) half
gtggtctagtggttaggattcggcgct

SEQ ID NO: 6308 - DNA, 28 bp, Artificial Sequence
  synthetic circulating small noncoding RNA (sncRNA) 5' transfer RNA (tRNA) half
tcgttggtctaggggtatgattctcgct

SEQ ID NO: 6309 - DNA, 15 bp, Artificial Sequence
  synthetic circulating small noncoding RNA (sncRNA) 5' transfer RNA (tRNA) half
gaatcatacccctag

SEQ ID NO: 6310 - DNA, 12 bp, Artificial Sequence
  synthetic circulating small noncoding RNA (sncRNA) 5' transfer RNA (tRNA) half
cgtcggggaatc

SEQ ID NO: 6311 - DNA, 13 bp, Artificial Sequence
  synthetic circulating small noncoding RNA (sncRNA) 5' transfer RNA (tRNA) half
gcgtggcaggcga

SEQ ID NO: 6312 - DNA, 15 bp, Artificial Sequence
  synthetic circulating small noncoding RNA (sncRNA) 5' transfer RNA (tRNA) half
aaccagggacctctt

SEQ ID NO: 6313 - DNA, 11 bp, Artificial Sequence
  synthetic circulating small noncoding RNA (sncRNA) 5' transfer RNA (tRNA) half
cgcgtgacagg

SEQ ID NO: 6314 - DNA, 28 bp, Artificial Sequence
  synthetic circulating small noncoding RNA (sncRNA) 5' transfer RNA (tRNA) half
agacgacgaggatgggattcgaacccac

SEQ ID NO: 6315 - DNA, 19 bp, Artificial Sequence
  synthetic circulating small noncoding RNA (sncRNA) 5' transfer RNA (tRNA) half
ggattcagagtccagagtg

SEQ ID NO: 6316 - DNA, 20 bp, Artificial Sequence
  synthetic circulating small noncoding RNA (sncRNA) 5' transfer RNA (tRNA) half
cgactcccggtgtgggaaac

SEQ ID NO: 6317 - DNA, 19 bp, Artificial Sequence
  synthetic circulating small noncoding RNA (sncRNA) 5' transfer RNA (tRNA) half
gtctagcggttaggattcc

SEQ ID NO: 6318 - DNA, 21 bp, Artificial Sequence
  synthetic circulating small noncoding RNA (sncRNA) 5' transfer RNA (tRNA) half
gttcaaatctcggtggaacct

SEQ ID NO: 6319 - DNA, 34 bp, Artificial Sequence
  synthetic circulating small noncoding RNA (sncRNA) 5' transfer RNA (tRNA) half
ctgagggtccagggttcaagtccctgttcgggcg

SEQ ID NO: 6320 - DNA, 22 bp, Artificial Sequence
  synthetic circulating small noncoding RNA (sncRNA) 5' transfer RNA (tRNA) half
tctaccatttgagctaatcccc

SEQ ID NO: 6321 - DNA, 26 bp, Artificial Sequence
  synthetic circulating small noncoding RNA (sncRNA) 5' transfer RNA (tRNA) half
gcgagaattctaccactgaaccacca

SEQ ID NO: 6322 - DNA, 19 bp, Artificial Sequence
  synthetic circulating small noncoding RNA (sncRNA) 5' transfer RNA (tRNA) half
accgttgcgccacgaggcc

SEQ ID NO: 6323 - DNA, 31 bp, Artificial Sequence
  synthetic circulating small noncoding RNA (sncRNA) 5' transfer RNA (tRNA) half
cttgcgacccgggttcgattcccgggcggcg

SEQ ID NO: 6324 - DNA, 36 bp, Artificial Sequence
  synthetic circulating small noncoding RNA (sncRNA) 5' transfer RNA (tRNA) half
caggcggcccgggttcgactcccggtgtgggaaact

SEQ ID NO: 6325 - DNA, 14 bp, Artificial Sequence
  synthetic circulating small noncoding RNA (sncRNA) 5' transfer RNA (tRNA) half
gcgggaggcccggg

SEQ ID NO: 6326 - DNA, 14 bp, Artificial Sequence
  synthetic circulating small noncoding RNA (sncRNA) 5' transfer RNA (tRNA) half
gagtccagagtgct

SEQ ID NO: 6327 - DNA, 35 bp, Artificial Sequence
  synthetic circulating small noncoding RNA (sncRNA) 5' transfer RNA (tRNA) half
ctcggatcgctggattcagagtccagagtgctaac

SEQ ID NO: 6328 - DNA, 36 bp, Artificial Sequence
  synthetic circulating small noncoding RNA (sncRNA) 5' transfer RNA (tRNA) half
tcctcgttagtatagtggtgagtatccccgcctgtc

SEQ ID NO: 6329 - DNA, 29 bp, Artificial Sequence
  synthetic circulating small noncoding RNA (sncRNA) 5' transfer RNA (tRNA) half
gagattaagagtctcatgctctaccgact

SEQ ID NO: 6330 - DNA, 14 bp, Artificial Sequence
  synthetic circulating small noncoding RNA (sncRNA) 5' transfer RNA (tRNA) half
tccgcccggtttcg

SEQ ID NO: 6331 - DNA, 21 bp, Artificial Sequence
  synthetic circulating small noncoding RNA (sncRNA) 5' transfer RNA (tRNA) half
tcccatgctctaccgactgag

SEQ ID NO: 6332 - DNA, 21 bp, Artificial Sequence
  synthetic circulating small noncoding RNA (sncRNA) 5' transfer RNA (tRNA) half
aatgccgtgactcggattcga

SEQ ID NO: 6333 - DNA, 17 bp, Artificial Sequence
  synthetic circulating small noncoding RNA (sncRNA) 5' transfer RNA (tRNA) half
gttcgattccggctcga

SEQ ID NO: 6334 - DNA, 20 bp, Artificial Sequence
  synthetic circulating small noncoding RNA (sncRNA) 5' transfer RNA (tRNA) half
cgaccttggcgttattagca

SEQ ID NO: 6335 - DNA, 43 bp, Artificial Sequence
  synthetic circulating small noncoding RNA (sncRNA) 5' transfer RNA (tRNA) half
agtcggcaggattcgaacctgcgcggggaaaccccaatggatt

SEQ ID NO: 6336 - DNA, 36 bp, Artificial Sequence
  synthetic circulating small noncoding RNA (sncRNA) 5' transfer RNA (tRNA) half
gccccagcgagatttgaactcgcgacccctggttta

SEQ ID NO: 6337 - DNA, 12 bp, Artificial Sequence
  synthetic circulating small noncoding RNA (sncRNA) 5' transfer RNA (tRNA) half
cacgttgggcgc

SEQ ID NO: 6338 - DNA, 14 bp, Artificial Sequence
  synthetic circulating small noncoding RNA (sncRNA) 5' transfer RNA (tRNA) half
aaggtccccggttc

SEQ ID NO: 6339 - DNA, 17 bp, Artificial Sequence
  synthetic circulating small noncoding RNA (sncRNA) 5' transfer RNA (tRNA) half
caacgcagagtactaac

SEQ ID NO: 6340 - DNA, 17 bp, Artificial Sequence
  synthetic circulating small noncoding RNA (sncRNA) 5' transfer RNA (tRNA) half
cagtgccttatccatta

SEQ ID NO: 6341 - DNA, 30 bp, Artificial Sequence
  synthetic circulating small noncoding RNA (sncRNA) 5' transfer RNA (tRNA) half
ccagagtgctagccattacaccatggaacc

SEQ ID NO: 6342 - DNA, 31 bp, Artificial Sequence
  synthetic circulating small noncoding RNA (sncRNA) 5' transfer RNA (tRNA) half
ctgaccgggaatcgaacccgggccgcggcgg

SEQ ID NO: 6343 - DNA, 30 bp, Artificial Sequence
  synthetic circulating small noncoding RNA (sncRNA) 5' transfer RNA (tRNA) half
gaaggtcctgggttcgagccccagtggaac

SEQ ID NO: 6344 - DNA, 27 bp, Artificial Sequence
  synthetic circulating small noncoding RNA (sncRNA) 5' transfer RNA (tRNA) half
tcggggaatcgaaccccggtctcccgc

SEQ ID NO: 6345 - DNA, 29 bp, Artificial Sequence
  synthetic circulating small noncoding RNA (sncRNA) 5' transfer RNA (tRNA) half
ggcgagaattctaccattgaactaccaat

SEQ ID NO: 6346 - DNA, 8 bp, Artificial Sequence
  synthetic circulating small noncoding RNA (sncRNA) 5' transfer RNA (tRNA) half
ttagaccg

SEQ ID NO: 6347 - DNA, 24 bp, Artificial Sequence
  synthetic circulating small noncoding RNA (sncRNA) 5' transfer RNA (tRNA) half
gagttcaaatctcgctggggcctt

SEQ ID NO: 6348 - DNA, 12 bp, Artificial Sequence
  synthetic circulating small noncoding RNA (sncRNA) 5' transfer RNA (tRNA) half
cccgtccgtgcc

SEQ ID NO: 6349 - DNA, 22 bp, Artificial Sequence
  synthetic circulating small noncoding RNA (sncRNA) 5' transfer RNA (tRNA) half
tgctaataacgccaaggtcgcg

SEQ ID NO: 6350 - DNA, 14 bp, Artificial Sequence
  synthetic circulating small noncoding RNA (sncRNA) 5' transfer RNA (tRNA) half
acccacgcctccat

SEQ ID NO: 6351 - DNA, 17 bp, Artificial Sequence
  synthetic circulating small noncoding RNA (sncRNA) 5' transfer RNA (tRNA) half
caaatctcgctggggcc

SEQ ID NO: 6352 - DNA, 33 bp, Artificial Sequence
  synthetic circulating small noncoding RNA (sncRNA) 5' transfer RNA (tRNA) half
ctggggattgtgggttcgagtcccatctgggtc

SEQ ID NO: 6353 - DNA, 34 bp, Artificial Sequence
  synthetic circulating small noncoding RNA (sncRNA) 5' transfer RNA (tRNA) half
gggagaccggggttcgattccccgacggggagtc

SEQ ID NO: 6354 - DNA, 36 bp, Artificial Sequence
  synthetic circulating small noncoding RNA (sncRNA) 5' transfer RNA (tRNA) half
atgccgtgactcggattcgaaccgaggttgctgcgg

SEQ ID NO: 6355 - DNA, 14 bp, Artificial Sequence
  synthetic circulating small noncoding RNA (sncRNA) 5' transfer RNA (tRNA) half
gaacccgggccgcg

SEQ ID NO: 6356 - DNA, 18 bp, Artificial Sequence
  synthetic circulating small noncoding RNA (sncRNA) 5' transfer RNA (tRNA) half
cagggttcgaacctgcgc

SEQ ID NO: 6357 - DNA, 18 bp, Artificial Sequence
  synthetic circulating small noncoding RNA (sncRNA) 5' transfer RNA (tRNA) half
tgcccgcatcctccactt

SEQ ID NO: 6358 - DNA, 22 bp, Artificial Sequence
  synthetic circulating small noncoding RNA (sncRNA) 5' transfer RNA (tRNA) half
ttcgaaccccgtccgtgcctgc

SEQ ID NO: 6359 - DNA, 13 bp, Artificial Sequence
  synthetic circulating small noncoding RNA (sncRNA) 5' transfer RNA (tRNA) half
agggggcacccgg

SEQ ID NO: 6360 - DNA, 13 bp, Artificial Sequence
  synthetic circulating small noncoding RNA (sncRNA) 5' transfer RNA (tRNA) half
cttaaccactcgg

SEQ ID NO: 6361 - DNA, 13 bp, Artificial Sequence
  synthetic circulating small noncoding RNA (sncRNA) 5' transfer RNA (tRNA) half
gccgggactcgaa

SEQ ID NO: 6362 - DNA, 12 bp, Artificial Sequence
  synthetic circulating small noncoding RNA (sncRNA) 5' transfer RNA (tRNA) half
ttaggattcggc

SEQ ID NO: 6363 - DNA, 13 bp, Artificial Sequence
  synthetic circulating small noncoding RNA (sncRNA) 5' transfer RNA (tRNA) half
ccggacgagcccc

SEQ ID NO: 6364 - DNA, 17 bp, Artificial Sequence
  synthetic circulating small noncoding RNA (sncRNA) 5' transfer RNA (tRNA) half
gtgagggggcacccgga

SEQ ID NO: 6365 - DNA, 15 bp, Artificial Sequence
  synthetic circulating small noncoding RNA (sncRNA) 5' transfer RNA (tRNA) half
agtcaaatgctctac

SEQ ID NO: 6366 - DNA, 20 bp, Artificial Sequence
  synthetic circulating small noncoding RNA (sncRNA) 5' transfer RNA (tRNA) half
ccgcagcgagcagggttcga

SEQ ID NO: 6367 - DNA, 32 bp, Artificial Sequence
  synthetic circulating small noncoding RNA (sncRNA) 5' transfer RNA (tRNA) half
aggcggcccgggttcgactcccggtatgggaa

SEQ ID NO: 6368 - DNA, 32 bp, Artificial Sequence
  synthetic circulating small noncoding RNA (sncRNA) 5' transfer RNA (tRNA) half
gcacgaggccccgggttcaatccccggcacct

SEQ ID NO: 6369 - DNA, 19 bp, Artificial Sequence
  synthetic circulating small noncoding RNA (sncRNA) 5' transfer RNA (tRNA) half
tagcgtggccgagcggtct

SEQ ID NO: 6370 - DNA, 24 bp, Artificial Sequence
  synthetic circulating small noncoding RNA (sncRNA) 5' transfer RNA (tRNA) half
attcagagtccagagtgctaacca

SEQ ID NO: 6371 - DNA, 12 bp, Artificial Sequence
  synthetic circulating small noncoding RNA (sncRNA) 5' transfer RNA (tRNA) half
ttctcgcctgcc

SEQ ID NO: 6372 - DNA, 28 bp, Artificial Sequence
  synthetic circulating small noncoding RNA (sncRNA) 5' transfer RNA (tRNA) half
actccgccgggactcgaacccggaacct

SEQ ID NO: 6373 - DNA, 38 bp, Artificial Sequence
  synthetic circulating small noncoding RNA (sncRNA) 5' transfer RNA (tRNA) half
ccccctctgaggttcgaactcaggaccttcagattatg

SEQ ID NO: 6374 - DNA, 20 bp, Artificial Sequence
  synthetic circulating small noncoding RNA (sncRNA) 5' transfer RNA (tRNA) half
ctgcgttggccgggaatcga

SEQ ID NO: 6375 - DNA, 8 bp, Artificial Sequence
  synthetic circulating small noncoding RNA (sncRNA) 5' transfer RNA (tRNA) half
cgaacccg

SEQ ID NO: 6376 - DNA, 23 bp, Artificial Sequence
  synthetic circulating small noncoding RNA (sncRNA) 5' transfer RNA (tRNA) half
gtggagatgccggggatcgaacc

SEQ ID NO: 6377 - DNA, 23 bp, Artificial Sequence
  synthetic circulating small noncoding RNA (sncRNA) 5' transfer RNA (tRNA) half
gttcgactcccggtgtgggaacg

SEQ ID NO: 6378 - DNA, 21 bp, Artificial Sequence
  synthetic circulating small noncoding RNA (sncRNA) 5' transfer RNA (tRNA) half
aaaactgggctcgtccgggat

SEQ ID NO: 6379 - DNA, 20 bp, Artificial Sequence
  synthetic circulating small noncoding RNA (sncRNA) 5' transfer RNA (tRNA) half
gtagtcgtggccgagtggtt

SEQ ID NO: 6380 - DNA, 26 bp, Artificial Sequence
  synthetic circulating small noncoding RNA (sncRNA) 5' transfer RNA (tRNA) half
ggcccgtacggggatcgaacccgcga

SEQ ID NO: 6381 - DNA, 16 bp, Artificial Sequence
  synthetic circulating small noncoding RNA (sncRNA) 5' transfer RNA (tRNA) half
gccttagaccactcgg

SEQ ID NO: 6382 - DNA, 32 bp, Artificial Sequence
  synthetic circulating small noncoding RNA (sncRNA) 5' transfer RNA (tRNA) half
gtccctggtggtctagtggctaggattcggcg

SEQ ID NO: 6383 - DNA, 25 bp, Artificial Sequence
  synthetic circulating small noncoding RNA (sncRNA) 5' transfer RNA (tRNA) half
ggattcagagtccagagtgctaacc

SEQ ID NO: 6384 - DNA, 33 bp, Artificial Sequence
  synthetic circulating small noncoding RNA (sncRNA) 5' transfer RNA (tRNA) half
cccatatggtctagcggttaggattcctggttt

SEQ ID NO: 6385 - DNA, 43 bp, Artificial Sequence
  synthetic circulating small noncoding RNA (sncRNA) 5' transfer RNA (tRNA) half
gctgcggccacaacgcagagtactaaccactatacgatcacgg

SEQ ID NO: 6386 - DNA, 21 bp, Artificial Sequence
  synthetic circulating small noncoding RNA (sncRNA) 5' transfer RNA (tRNA) half
tcgagtcccatctgggtcgca

SEQ ID NO: 6387 - DNA, 32 bp, Artificial Sequence
  synthetic circulating small noncoding RNA (sncRNA) 5' transfer RNA (tRNA) half
gcggcccgggttcgactcccggtgtgggaacg

SEQ ID NO: 6388 - DNA, 31 bp, Artificial Sequence
  synthetic circulating small noncoding RNA (sncRNA) 5' transfer RNA (tRNA) half
gggcccagcacgcttccgctgcgccactctg

SEQ ID NO: 6389 - DNA, 15 bp, Artificial Sequence
  synthetic circulating small noncoding RNA (sncRNA) 5' transfer RNA (tRNA) half
agtggtagaattctc

SEQ ID NO: 6390 - DNA, 13 bp, Artificial Sequence
  synthetic circulating small noncoding RNA (sncRNA) 5' transfer RNA (tRNA) half
ggcaggcgagaat

SEQ ID NO: 6391 - DNA, 35 bp, Artificial Sequence
  synthetic circulating small noncoding RNA (sncRNA) 5' transfer RNA (tRNA) half
acgcgggagaccggggttcgattccccgacgggga

SEQ ID NO: 6392 - DNA, 24 bp, Artificial Sequence
  synthetic circulating small noncoding RNA (sncRNA) 5' transfer RNA (tRNA) half
gtcgagccagccaggagtcgaacc

SEQ ID NO: 6393 - DNA, 32 bp, Artificial Sequence
  synthetic circulating small noncoding RNA (sncRNA) 5' transfer RNA (tRNA) half
gaccacgaagggactcgaacccccaatcttct

SEQ ID NO: 6394 - DNA, 16 bp, Artificial Sequence
  synthetic circulating small noncoding RNA (sncRNA) 5' transfer RNA (tRNA) half
gagagcgccgaatcct

SEQ ID NO: 6395 - DNA, 13 bp, Artificial Sequence
  synthetic circulating small noncoding RNA (sncRNA) 5' transfer RNA (tRNA) half
aacccgcgacctt

SEQ ID NO: 6396 - DNA, 31 bp, Artificial Sequence
  synthetic circulating small noncoding RNA (sncRNA) 5' transfer RNA (tRNA) half
ggcggggatactaaccactatactaacgagg

SEQ ID NO: 6397 - DNA, 20 bp, Artificial Sequence
  synthetic circulating small noncoding RNA (sncRNA) 5' transfer RNA (tRNA) half
gcgccgctggtgtagtggta

SEQ ID NO: 6398 - DNA, 37 bp, Artificial Sequence
  synthetic circulating small noncoding RNA (sncRNA) 5' transfer RNA (tRNA) half
cctgccgtgactcggattcgaaccgaggttgctgcgg

SEQ ID NO: 6399 - DNA, 21 bp, Artificial Sequence
  synthetic circulating small noncoding RNA (sncRNA) 5' transfer RNA (tRNA) half
agatggagggggcacccggat

SEQ ID NO: 6400 - DNA, 24 bp, Artificial Sequence
  synthetic circulating small noncoding RNA (sncRNA) 5' transfer RNA (tRNA) half
cgggaatcgaacccgggtcaactg

SEQ ID NO: 6401 - DNA, 29 bp, Artificial Sequence
  synthetic circulating small noncoding RNA (sncRNA) 5' transfer RNA (tRNA) half
ggcggcccgggttcgactcccggtgtggg

SEQ ID NO: 6402 - DNA, 32 bp, Artificial Sequence
  synthetic circulating small noncoding RNA (sncRNA) 5' transfer RNA (tRNA) half
ccggatgatcctcagtggtctggggtgcaggc

SEQ ID NO: 6403 - DNA, 16 bp, Artificial Sequence
  synthetic circulating small noncoding RNA (sncRNA) 5' transfer RNA (tRNA) half
tttcgaaccggggacc

SEQ ID NO: 6404 - DNA, 31 bp, Artificial Sequence
  synthetic circulating small noncoding RNA (sncRNA) 5' transfer RNA (tRNA) half
gcggcccgggttcgattcccggtcagggaag

SEQ ID NO: 6405 - DNA, 35 bp, Artificial Sequence
  synthetic circulating small noncoding RNA (sncRNA) 5' transfer RNA (tRNA) half
caggagatcctgggttcgaatcccagcggggcctt

SEQ ID NO: 6406 - DNA, 17 bp, Artificial Sequence
  synthetic circulating small noncoding RNA (sncRNA) 5' transfer RNA (tRNA) half
ctagtggtatgattctc

SEQ ID NO: 6407 - DNA, 10 bp, Artificial Sequence
  synthetic circulating small noncoding RNA (sncRNA) 5' transfer RNA (tRNA) half
gaccccgacg

SEQ ID NO: 6408 - DNA, 25 bp, Artificial Sequence
  synthetic circulating small noncoding RNA (sncRNA) 5' transfer RNA (tRNA) half
tggttcgattccggctcgaaggact

SEQ ID NO: 6409 - DNA, 12 bp, Artificial Sequence
  synthetic circulating small noncoding RNA (sncRNA) 5' transfer RNA (tRNA) half
gtgtttccgccc

SEQ ID NO: 6410 - DNA, 25 bp, Artificial Sequence
  synthetic circulating small noncoding RNA (sncRNA) 5' transfer RNA (tRNA) half
ctttgaatccagcgatccgagttca

SEQ ID NO: 6411 - DNA, 17 bp, Artificial Sequence
  synthetic circulating small noncoding RNA (sncRNA) 5' transfer RNA (tRNA) half
accgactgagctatccg

SEQ ID NO: 6412 - DNA, 25 bp, Artificial Sequence
  synthetic circulating small noncoding RNA (sncRNA) 5' transfer RNA (tRNA) half
atagtgtagcggttatcacgtctgc

SEQ ID NO: 6413 - DNA, 30 bp, Artificial Sequence
  synthetic circulating small noncoding RNA (sncRNA) 5' transfer RNA (tRNA) half
cgccgctggtgtagtggtatcatgcaagat

SEQ ID NO: 6414 - DNA, 33 bp, Artificial Sequence
  synthetic circulating small noncoding RNA (sncRNA) 5' transfer RNA (tRNA) half
ggccgcggcggtgagagcgccgaatcctaacca

SEQ ID NO: 6415 - DNA, 23 bp, Artificial Sequence
  synthetic circulating small noncoding RNA (sncRNA) 5' transfer RNA (tRNA) half
cggtgagagcgccgaatcctaac

SEQ ID NO: 6416 - DNA, 14 bp, Artificial Sequence
  synthetic circulating small noncoding RNA (sncRNA) 5' transfer RNA (tRNA) half
ttagtactctgcgt

SEQ ID NO: 6417 - DNA, 18 bp, Artificial Sequence
  synthetic circulating small noncoding RNA (sncRNA) 5' transfer RNA (tRNA) half
gggacctctcgcacccaa

SEQ ID NO: 6418 - DNA, 29 bp, Artificial Sequence
  synthetic circulating small noncoding RNA (sncRNA) 5' transfer RNA (tRNA) half
gcggcggtgagagcgccgaatcctaacca

SEQ ID NO: 6419 - DNA, 23 bp, Artificial Sequence
  synthetic circulating small noncoding RNA (sncRNA) 5' transfer RNA (tRNA) half
aacccgggtcaactgcttggaag

SEQ ID NO: 6420 - DNA, 11 bp, Artificial Sequence
  synthetic circulating small noncoding RNA (sncRNA) 5' transfer RNA (tRNA) half
aggagtcgaac

SEQ ID NO: 6421 - DNA, 25 bp, Artificial Sequence
  synthetic circulating small noncoding RNA (sncRNA) 5' transfer RNA (tRNA) half
atcctaaccgctagaccatgtggga

SEQ ID NO: 6422 - DNA, 27 bp, Artificial Sequence
  synthetic circulating small noncoding RNA (sncRNA) 5' transfer RNA (tRNA) half
cggcccgggttcgactcccggtgtggg

SEQ ID NO: 6423 - DNA, 32 bp, Artificial Sequence
  synthetic circulating small noncoding RNA (sncRNA) 5' transfer RNA (tRNA) half
aggtcctgggttcgagccccagtggaaccacg

SEQ ID NO: 6424 - DNA, 36 bp, Artificial Sequence
  synthetic circulating small noncoding RNA (sncRNA) 5' transfer RNA (tRNA) half
aagagtctcatgctctaccgactgagctagccgggc

SEQ ID NO: 6425 - DNA, 23 bp, Artificial Sequence
  synthetic circulating small noncoding RNA (sncRNA) 5' transfer RNA (tRNA) half
acctccccgtcggggaattgaac

SEQ ID NO: 6426 - DNA, 26 bp, Artificial Sequence
  synthetic circulating small noncoding RNA (sncRNA) 5' transfer RNA (tRNA) half
gagaatcatacccctagaccaacgag

SEQ ID NO: 6427 - DNA, 27 bp, Artificial Sequence
  synthetic circulating small noncoding RNA (sncRNA) 5' transfer RNA (tRNA) half
catggtctagcggttaggattcctggt

SEQ ID NO: 6428 - DNA, 16 bp, Artificial Sequence
  synthetic circulating small noncoding RNA (sncRNA) 5' transfer RNA (tRNA) half
ttcgattccggctcga

SEQ ID NO: 6429 - DNA, 18 bp, Artificial Sequence
  synthetic circulating small noncoding RNA (sncRNA) 5' transfer RNA (tRNA) half
gcggaagcgtgctgggcc

SEQ ID NO: 6430 - DNA, 16 bp, Artificial Sequence
  synthetic circulating small noncoding RNA (sncRNA) 5' transfer RNA (tRNA) half
cggttatcacgtctgc

SEQ ID NO: 6431 - DNA, 22 bp, Artificial Sequence
  synthetic circulating small noncoding RNA (sncRNA) 5' transfer RNA (tRNA) half
tgccgtgactcggattcgaacc

SEQ ID NO: 6432 - DNA, 15 bp, Artificial Sequence
  synthetic circulating small noncoding RNA (sncRNA) 5' transfer RNA (tRNA) half
acccgcgaccttggc

SEQ ID NO: 6433 - DNA, 20 bp, Artificial Sequence
  synthetic circulating small noncoding RNA (sncRNA) 5' transfer RNA (tRNA) half
cgggaatcgaacccgggcct

SEQ ID NO: 6434 - DNA, 15 bp, Artificial Sequence
  synthetic circulating small noncoding RNA (sncRNA) 5' transfer RNA (tRNA) half
ggagactgcgacctg

SEQ ID NO: 6435 - DNA, 33 bp, Artificial Sequence
  synthetic circulating small noncoding RNA (sncRNA) 5' transfer RNA (tRNA) half
gcggcccgggttcgattcccggtcagggaagca

SEQ ID NO: 6436 - DNA, 11 bp, Artificial Sequence
  synthetic circulating small noncoding RNA (sncRNA) 5' transfer RNA (tRNA) half
gattcggcgct

SEQ ID NO: 6437 - DNA, 28 bp, Artificial Sequence
  synthetic circulating small noncoding RNA (sncRNA) 5' transfer RNA (tRNA) half
gcggtgagagcgccgaatcctaaccact

SEQ ID NO: 6438 - DNA, 17 bp, Artificial Sequence
  synthetic circulating small noncoding RNA (sncRNA) 5' transfer RNA (tRNA) half
gaaccgaggttgctgcg

SEQ ID NO: 6439 - DNA, 32 bp, Artificial Sequence
  synthetic circulating small noncoding RNA (sncRNA) 5' transfer RNA (tRNA) half
gacagagtggttcaattccacctttcgggcgg

SEQ ID NO: 6440 - DNA, 17 bp, Artificial Sequence
  synthetic circulating small noncoding RNA (sncRNA) 5' transfer RNA (tRNA) half
gaacccgggacctctcg

SEQ ID NO: 6441 - DNA, 31 bp, Artificial Sequence
  synthetic circulating small noncoding RNA (sncRNA) 5' transfer RNA (tRNA) half
tcaggatggccgagcggtctaaggcgctgcg

SEQ ID NO: 6442 - DNA, 17 bp, Artificial Sequence
  synthetic circulating small noncoding RNA (sncRNA) 5' transfer RNA (tRNA) half
gccgtgactcggattcg

SEQ ID NO: 6443 - DNA, 26 bp, Artificial Sequence
  synthetic circulating small noncoding RNA (sncRNA) 5' transfer RNA (tRNA) half
gcaggcgagaattctaccactgaacc

SEQ ID NO: 6444 - DNA, 22 bp, Artificial Sequence
  synthetic circulating small noncoding RNA (sncRNA) 5' transfer RNA (tRNA) half
tccccggcacctccagtgtttt

SEQ ID NO: 6445 - DNA, 24 bp, Artificial Sequence
  synthetic circulating small noncoding RNA (sncRNA) 5' transfer RNA (tRNA) half
tctgaatccagcgatccgagttca

SEQ ID NO: 6446 - DNA, 32 bp, Artificial Sequence
  synthetic circulating small noncoding RNA (sncRNA) 5' transfer RNA (tRNA) half
ggcggcccgggttcgactcccggtatgggaac

SEQ ID NO: 6447 - DNA, 31 bp, Artificial Sequence
  synthetic circulating small noncoding RNA (sncRNA) 5' transfer RNA (tRNA) half
cgttccttcgagccggattcgaaccagcgac

SEQ ID NO: 6448 - DNA, 23 bp, Artificial Sequence
  synthetic circulating small noncoding RNA (sncRNA) 5' transfer RNA (tRNA) half
cgggttcgatccccggcatctcc

SEQ ID NO: 6449 - DNA, 22 bp, Artificial Sequence
  synthetic circulating small noncoding RNA (sncRNA) 5' transfer RNA (tRNA) half
aaagtctgatgctctaccgact

SEQ ID NO: 6450 - DNA, 22 bp, Artificial Sequence
  synthetic circulating small noncoding RNA (sncRNA) 5' transfer RNA (tRNA) half
gcagcggaagcgtgctgggccc

SEQ ID NO: 6451 - DNA, 14 bp, Artificial Sequence
  synthetic circulating small noncoding RNA (sncRNA) 5' transfer RNA (tRNA) half
cccgggttcgactc

SEQ ID NO: 6452 - DNA, 23 bp, Artificial Sequence
  synthetic circulating small noncoding RNA (sncRNA) 5' transfer RNA (tRNA) half
ctccccgtcggggaatcgaaccc

SEQ ID NO: 6453 - DNA, 31 bp, Artificial Sequence
  synthetic circulating small noncoding RNA (sncRNA) 5' transfer RNA (tRNA) half
ttggccgggaatcgaacccgggcctcccgcg

SEQ ID NO: 6454 - DNA, 28 bp, Artificial Sequence
  synthetic circulating small noncoding RNA (sncRNA) 5' transfer RNA (tRNA) half
ccgcggcccgggttcgattcccggtcag

SEQ ID NO: 6455 - DNA, 21 bp, Artificial Sequence
  synthetic circulating small noncoding RNA (sncRNA) 5' transfer RNA (tRNA) half
gcgctctcaccgccgcggccc

SEQ ID NO: 6456 - DNA, 22 bp, Artificial Sequence
  synthetic circulating small noncoding RNA (sncRNA) 5' transfer RNA (tRNA) half
gtagaattctcgcctgccacgc

SEQ ID NO: 6457 - DNA, 30 bp, Artificial Sequence
  synthetic circulating small noncoding RNA (sncRNA) 5' transfer RNA (tRNA) half
cgccgaatcctagccactagaccaccaggg

SEQ ID NO: 6458 - DNA, 19 bp, Artificial Sequence
  synthetic circulating small noncoding RNA (sncRNA) 5' transfer RNA (tRNA) half
gggaatcgaacccgggccg

SEQ ID NO: 6459 - DNA, 21 bp, Artificial Sequence
  synthetic circulating small noncoding RNA (sncRNA) 5' transfer RNA (tRNA) half
ggggatgtagctcagtggtag

SEQ ID NO: 6460 - DNA, 15 bp, Artificial Sequence
  synthetic circulating small noncoding RNA (sncRNA) 5' transfer RNA (tRNA) half
ttccacctttcgggc

SEQ ID NO: 6461 - DNA, 19 bp, Artificial Sequence
  synthetic circulating small noncoding RNA (sncRNA) 5' transfer RNA (tRNA) half
tcgaatcccacttctgaca

SEQ ID NO: 6462 - DNA, 13 bp, Artificial Sequence
  synthetic circulating small noncoding RNA (sncRNA) 5' transfer RNA (tRNA) half
cagagtactaacc

SEQ ID NO: 6463 - DNA, 15 bp, Artificial Sequence
  synthetic circulating small noncoding RNA (sncRNA) 5' transfer RNA (tRNA) half
gcctccgatagcaga

SEQ ID NO: 6464 - DNA, 18 bp, Artificial Sequence
  synthetic circulating small noncoding RNA (sncRNA) 5' transfer RNA (tRNA) half
ccattgcgccacgaggtc

SEQ ID NO: 6465 - DNA, 22 bp, Artificial Sequence
  synthetic circulating small noncoding RNA (sncRNA) 5' transfer RNA (tRNA) half
gatgaccactacactacggaaa

SEQ ID NO: 6466 - DNA, 38 bp, Artificial Sequence
  synthetic circulating small noncoding RNA (sncRNA) 5' transfer RNA (tRNA) half
cccattcttgcgacccgggttcgattcccgggcggcgc

SEQ ID NO: 6467 - DNA, 25 bp, Artificial Sequence
  synthetic circulating small noncoding RNA (sncRNA) 5' transfer RNA (tRNA) half
aggaatcctaaccgctagaccatat

SEQ ID NO: 6468 - DNA, 18 bp, Artificial Sequence
  synthetic circulating small noncoding RNA (sncRNA) 5' transfer RNA (tRNA) half
gcgttggccgggaatcga

SEQ ID NO: 6469 - DNA, 13 bp, Artificial Sequence
  synthetic circulating small noncoding RNA (sncRNA) 5' transfer RNA (tRNA) half
acactacggaaac

SEQ ID NO: 6470 - DNA, 24 bp, Artificial Sequence
  synthetic circulating small noncoding RNA (sncRNA) 5' transfer RNA (tRNA) half
ctgaatccagcgatccgagttcaa

SEQ ID NO: 6471 - DNA, 33 bp, Artificial Sequence
  synthetic circulating small noncoding RNA (sncRNA) 5' transfer RNA (tRNA) half
gcctggatagctcaattggtagagcatcagact

SEQ ID NO: 6472 - DNA, 18 bp, Artificial Sequence
  synthetic circulating small noncoding RNA (sncRNA) 5' transfer RNA (tRNA) half
agccagccaggagtcgaa

SEQ ID NO: 6473 - DNA, 30 bp, Artificial Sequence
  synthetic circulating small noncoding RNA (sncRNA) 5' transfer RNA (tRNA) half
cgtgatcgtataggggttagtactctgcgt

SEQ ID NO: 6474 - DNA, 15 bp, Artificial Sequence
  synthetic circulating small noncoding RNA (sncRNA) 5' transfer RNA (tRNA) half
gctcagtcggtagag

SEQ ID NO: 6475 - DNA, 28 bp, Artificial Sequence
  synthetic circulating small noncoding RNA (sncRNA) 5' transfer RNA (tRNA) half
aggattcggcgctctcaccgccgcggcc

SEQ ID NO: 6476 - DNA, 17 bp, Artificial Sequence
  synthetic circulating small noncoding RNA (sncRNA) 5' transfer RNA (tRNA) half
gtccctgggtgggctcg

SEQ ID NO: 6477 - DNA, 18 bp, Artificial Sequence
  synthetic circulating small noncoding RNA (sncRNA) 5' transfer RNA (tRNA) half
gcccgaacagggacttga

SEQ ID NO: 6478 - DNA, 15 bp, Artificial Sequence
  synthetic circulating small noncoding RNA (sncRNA) 5' transfer RNA (tRNA) half
ttgagctaatccccc

SEQ ID NO: 6479 - DNA, 10 bp, Artificial Sequence
  synthetic circulating small noncoding RNA (sncRNA) 5' transfer RNA (tRNA) half
cgggcctccc

SEQ ID NO: 6480 - DNA, 34 bp, Artificial Sequence
  synthetic circulating small noncoding RNA (sncRNA) 5' transfer RNA (tRNA) half
cgccgctggtgtagtggtatcatgcaagattccc

SEQ ID NO: 6481 - DNA, 30 bp, Artificial Sequence
  synthetic circulating small noncoding RNA (sncRNA) 5' transfer RNA (tRNA) half
caggcggcccgggttcgactcccggtgtgg

SEQ ID NO: 6482 - DNA, 33 bp, Artificial Sequence
  synthetic circulating small noncoding RNA (sncRNA) 5' transfer RNA (tRNA) half
gcgagaatcatacccctagaccaacgagccgct

SEQ ID NO: 6483 - DNA, 34 bp, Artificial Sequence
  synthetic circulating small noncoding RNA (sncRNA) 5' transfer RNA (tRNA) half
tgcacgaggccccgggttcaatccccggcacctc

SEQ ID NO: 6484 - DNA, 31 bp, Artificial Sequence
  synthetic circulating small noncoding RNA (sncRNA) 5' transfer RNA (tRNA) half
aggcggggatactaaccactatactaacgag

SEQ ID NO: 6485 - DNA, 31 bp, Artificial Sequence
  synthetic circulating small noncoding RNA (sncRNA) 5' transfer RNA (tRNA) half
tcccataccgggagtcgaacccgggccgcct

SEQ ID NO: 6486 - DNA, 35 bp, Artificial Sequence
  synthetic circulating small noncoding RNA (sncRNA) 5' transfer RNA (tRNA) half
agcgccgaatcctaaccactagaccaccagggaag

SEQ ID NO: 6487 - DNA, 35 bp, Artificial Sequence
  synthetic circulating small noncoding RNA (sncRNA) 5' transfer RNA (tRNA) half
atctgaaggtcctgagttcgaacctcagagggggc

SEQ ID NO: 6488 - DNA, 20 bp, Artificial Sequence
  synthetic circulating small noncoding RNA (sncRNA) 5' transfer RNA (tRNA) half
tccgtagtgtagtggttatc

SEQ ID NO: 6489 - DNA, 15 bp, Artificial Sequence
  synthetic circulating small noncoding RNA (sncRNA) 5' transfer RNA (tRNA) half
gaactcgcgacccct

SEQ ID NO: 6490 - DNA, 36 bp, Artificial Sequence
  synthetic circulating small noncoding RNA (sncRNA) 5' transfer RNA (tRNA) half
gtttccgtagtgtagtggttatcacgttcgcctaac

SEQ ID NO: 6491 - DNA, 15 bp, Artificial Sequence
  synthetic circulating small noncoding RNA (sncRNA) 5' transfer RNA (tRNA) half
gtttccgcccggttt

SEQ ID NO: 6492 - DNA, 22 bp, Artificial Sequence
  synthetic circulating small noncoding RNA (sncRNA) 5' transfer RNA (tRNA) half
gccttagaccgctcggccatcc

SEQ ID NO: 6493 - DNA, 33 bp, Artificial Sequence
  synthetic circulating small noncoding RNA (sncRNA) 5' transfer RNA (tRNA) half
ggcggcccgggttcgactcccggtgtgggaacg

SEQ ID NO: 6494 - DNA, 18 bp, Artificial Sequence
  synthetic circulating small noncoding RNA (sncRNA) 5' transfer RNA (tRNA) half
taggggttagtactctgc

SEQ ID NO: 6495 - DNA, 18 bp, Artificial Sequence
  synthetic circulating small noncoding RNA (sncRNA) 5' transfer RNA (tRNA) half
atcctgctcacagcgcta

SEQ ID NO: 6496 - DNA, 11 bp, Artificial Sequence
  synthetic circulating small noncoding RNA (sncRNA) 5' transfer RNA (tRNA) half
gctataccccc

SEQ ID NO: 6497 - DNA, 19 bp, Artificial Sequence
  synthetic circulating small noncoding RNA (sncRNA) 5' transfer RNA (tRNA) half
gccgtgatcgtatagtggt

SEQ ID NO: 6498 - DNA, 26 bp, Artificial Sequence
  synthetic circulating small noncoding RNA (sncRNA) 5' transfer RNA (tRNA) half
gacgacgaggatgggattcgaaccca

SEQ ID NO: 6499 - DNA, 21 bp, Artificial Sequence
  synthetic circulating small noncoding RNA (sncRNA) 5' transfer RNA (tRNA) half
gaccccgacgtgacttgaaca

SEQ ID NO: 6500 - DNA, 21 bp, Artificial Sequence
  synthetic circulating small noncoding RNA (sncRNA) 5' transfer RNA (tRNA) half
ctcgagccaggtaggagtcga

SEQ ID NO: 6501 - DNA, 34 bp, Artificial Sequence
  synthetic circulating small noncoding RNA (sncRNA) 5' transfer RNA (tRNA) half
agcgccgaatcctagccactagaccaccagggac

SEQ ID NO: 6502 - DNA, 35 bp, Artificial Sequence
  synthetic circulating small noncoding RNA (sncRNA) 5' transfer RNA (tRNA) half
tagagcatgagactcttaatctcagggtcgtgggt

SEQ ID NO: 6503 - DNA, 25 bp, Artificial Sequence
  synthetic circulating small noncoding RNA (sncRNA) 5' transfer RNA (tRNA) half
gcattggccgggaatcgaacccggg

SEQ ID NO: 6504 - DNA, 15 bp, Artificial Sequence
  synthetic circulating small noncoding RNA (sncRNA) 5' transfer RNA (tRNA) half
ccgcggcccgggttc

SEQ ID NO: 6505 - DNA, 36 bp, Artificial Sequence
  synthetic circulating small noncoding RNA (sncRNA) 5' transfer RNA (tRNA) half
acgcgggaggcccgggttcgattcccggcccatgca

SEQ ID NO: 6506 - DNA, 12 bp, Artificial Sequence
  synthetic circulating small noncoding RNA (sncRNA) 5' transfer RNA (tRNA) half
cggccacgacta

SEQ ID NO: 6507 - DNA, 15 bp, Artificial Sequence
  synthetic circulating small noncoding RNA (sncRNA) 5' transfer RNA (tRNA) half
agtggtctggggtgc

SEQ ID NO: 6508 - DNA, 21 bp, Artificial Sequence
  synthetic circulating small noncoding RNA (sncRNA) 5' transfer RNA (tRNA) half
taccgactgagctagccgggc

SEQ ID NO: 6509 - DNA, 24 bp, Artificial Sequence
  synthetic circulating small noncoding RNA (sncRNA) 5' transfer RNA (tRNA) half
tggcgcagcggaagcgtgctgggc

SEQ ID NO: 6510 - DNA, 29 bp, Artificial Sequence
  synthetic circulating small noncoding RNA (sncRNA) 5' transfer RNA (tRNA) half
cgagccagccaggagtcgaacctggaatc

SEQ ID NO: 6511 - DNA, 33 bp, Artificial Sequence
  synthetic circulating small noncoding RNA (sncRNA) 5' transfer RNA (tRNA) half
cgaaaggttggtggttcgagcccacccagggac

SEQ ID NO: 6512 - DNA, 27 bp, Artificial Sequence
  synthetic circulating small noncoding RNA (sncRNA) 5' transfer RNA (tRNA) half
gcgcccgaacagggacttgaaccctgg

SEQ ID NO: 6513 - DNA, 34 bp, Artificial Sequence
  synthetic circulating small noncoding RNA (sncRNA) 5' transfer RNA (tRNA) half
agagggggtatagctcagtggtagagcatttgac

SEQ ID NO: 6514 - DNA, 22 bp, Artificial Sequence
  synthetic circulating small noncoding RNA (sncRNA) 5' transfer RNA (tRNA) half
ggagtcgaacccgggccgcctg

SEQ ID NO: 6515 - DNA, 10 bp, Artificial Sequence
  synthetic circulating small noncoding RNA (sncRNA) 5' transfer RNA (tRNA) half
aggcgaacgt

SEQ ID NO: 6516 - DNA, 20 bp, Artificial Sequence
  synthetic circulating small noncoding RNA (sncRNA) 5' transfer RNA (tRNA) half
agcactctggactctgaatc

SEQ ID NO: 6517 - DNA, 35 bp, Artificial Sequence
  synthetic circulating small noncoding RNA (sncRNA) 5' transfer RNA (tRNA) half
agtctcatgctctaccgactgagctagccgggcga

SEQ ID NO: 6518 - DNA, 19 bp, Artificial Sequence
  synthetic circulating small noncoding RNA (sncRNA) 5' transfer RNA (tRNA) half
atcctgccgactacgtcta

SEQ ID NO: 6519 - DNA, 33 bp, Artificial Sequence
  synthetic circulating small noncoding RNA (sncRNA) 5' transfer RNA (tRNA) half
tgaccccgacgtgatttgaacacgcaaccttct

SEQ ID NO: 6520 - DNA, 35 bp, Artificial Sequence
  synthetic circulating small noncoding RNA (sncRNA) 5' transfer RNA (tRNA) half
aaagtccagagtgctaaccattacaccatgggacc

SEQ ID NO: 6521 - DNA, 33 bp, Artificial Sequence
  synthetic circulating small noncoding RNA (sncRNA) 5' transfer RNA (tRNA) half
agcgacagagtggttcaattccacctttcgggc

SEQ ID NO: 6522 - DNA, 39 bp, Artificial Sequence
  synthetic circulating small noncoding RNA (sncRNA) 5' transfer RNA (tRNA) half
acgcgaaaggtccccggttcgaaaccgggcggaaacaac

SEQ ID NO: 6523 - DNA, 20 bp, Artificial Sequence
  synthetic circulating small noncoding RNA (sncRNA) 5' transfer RNA (tRNA) half
actcggatcgctggattcaa

SEQ ID NO: 6524 - DNA, 34 bp, Artificial Sequence
  synthetic circulating small noncoding RNA (sncRNA) 5' transfer RNA (tRNA) half
aagtctgatgctctaccgactgagctatccaggc

SEQ ID NO: 6525 - DNA, 25 bp, Artificial Sequence
  synthetic circulating small noncoding RNA (sncRNA) 5' transfer RNA (tRNA) half
gttccttcgagccggattcgaacca

SEQ ID NO: 6526 - DNA, 14 bp, Artificial Sequence
  synthetic circulating small noncoding RNA (sncRNA) 5' transfer RNA (tRNA) half
tagtcgtggccgag

SEQ ID NO: 6527 - DNA, 20 bp, Artificial Sequence
  synthetic circulating small noncoding RNA (sncRNA) 5' transfer RNA (tRNA) half
ggcagcggtgggattcgaac

SEQ ID NO: 6528 - DNA, 16 bp, Artificial Sequence
  synthetic circulating small noncoding RNA (sncRNA) 5' transfer RNA (tRNA) half
ccgtcacgaacaggat

SEQ ID NO: 6529 - DNA, 9 bp, Artificial Sequence
  synthetic circulating small noncoding RNA (sncRNA) 5' transfer RNA (tRNA) half
ccgggccgc

SEQ ID NO: 6530 - DNA, 27 bp, Artificial Sequence
  synthetic circulating small noncoding RNA (sncRNA) 5' transfer RNA (tRNA) half
ccccgtcggggaattgaaccccggtct

SEQ ID NO: 6531 - DNA, 36 bp, Artificial Sequence
  synthetic circulating small noncoding RNA (sncRNA) 5' transfer RNA (tRNA) half
ttaagagtctcatgctctaccgactgagctagccgg

SEQ ID NO: 6532 - DNA, 21 bp, Artificial Sequence
  synthetic circulating small noncoding RNA (sncRNA) 5' transfer RNA (tRNA) half
agtggtagagcatttgactgc

SEQ ID NO: 6533 - DNA, 27 bp, Artificial Sequence
  synthetic circulating small noncoding RNA (sncRNA) 5' transfer RNA (tRNA) half
tccatcgacctctgggttatgggccca

SEQ ID NO: 6534 - DNA, 34 bp, Artificial Sequence
  synthetic circulating small noncoding RNA (sncRNA) 5' transfer RNA (tRNA) half
ggaggcccgggttcgattcccggccaatgcacga

SEQ ID NO: 6535 - DNA, 31 bp, Artificial Sequence
  synthetic circulating small noncoding RNA (sncRNA) 5' transfer RNA (tRNA) half
gccccagtggcctaatggataaggcattggc

SEQ ID NO: 6536 - DNA, 21 bp, Artificial Sequence
  synthetic circulating small noncoding RNA (sncRNA) 5' transfer RNA (tRNA) half
tatgaccccgacgtgattcga

SEQ ID NO: 6537 - DNA, 27 bp, Artificial Sequence
  synthetic circulating small noncoding RNA (sncRNA) 5' transfer RNA (tRNA) half
ctccgccgggactcgaacccggaacct

SEQ ID NO: 6538 - DNA, 33 bp, Artificial Sequence
  synthetic circulating small noncoding RNA (sncRNA) 5' transfer RNA (tRNA) half
atgcagagtactaaccactatacgatctcggca

SEQ ID NO: 6539 - DNA, 22 bp, Artificial Sequence
  synthetic circulating small noncoding RNA (sncRNA) 5' transfer RNA (tRNA) half
gtctagtggtatgattctcagt

SEQ ID NO: 6540 - DNA, 22 bp, Artificial Sequence
  synthetic circulating small noncoding RNA (sncRNA) 5' transfer RNA (tRNA) half
agcagagtggcgcagcggaagc

SEQ ID NO: 6541 - DNA, 16 bp, Artificial Sequence
  synthetic circulating small noncoding RNA (sncRNA) 5' transfer RNA (tRNA) half
gcggcccgggttcgac

SEQ ID NO: 6542 - DNA, 31 bp, Artificial Sequence
  synthetic circulating small noncoding RNA (sncRNA) 5' transfer RNA (tRNA) half
ttcccacaccgggagtcgaacccgggccgcc

SEQ ID NO: 6543 - DNA, 14 bp, Artificial Sequence
  synthetic circulating small noncoding RNA (sncRNA) 5' transfer RNA (tRNA) half
gagattaagagtct

SEQ ID NO: 6544 - DNA, 27 bp, Artificial Sequence
  synthetic circulating small noncoding RNA (sncRNA) 5' transfer RNA (tRNA) half
ccacaccgggagtcgaacccgggccgc

SEQ ID NO: 6545 - DNA, 20 bp, Artificial Sequence
  synthetic circulating small noncoding RNA (sncRNA) 5' transfer RNA (tRNA) half
gataaccactacactacgga

SEQ ID NO: 6546 - DNA, 25 bp, Artificial Sequence
  synthetic circulating small noncoding RNA (sncRNA) 5' transfer RNA (tRNA) half
cgggttcaatccccggcatctccaa

SEQ ID NO: 6547 - DNA, 10 bp, Artificial Sequence
  synthetic circulating small noncoding RNA (sncRNA) 5' transfer RNA (tRNA) half
tgccgtgact

SEQ ID NO: 6548 - DNA, 16 bp, Artificial Sequence
  synthetic circulating small noncoding RNA (sncRNA) 5' transfer RNA (tRNA) half
gaactcggatcgctgg

SEQ ID NO: 6549 - DNA, 35 bp, Artificial Sequence
  synthetic circulating small noncoding RNA (sncRNA) 5' transfer RNA (tRNA) half
gcttccctgaccgggaatcgaacccgggccgcggc

SEQ ID NO: 6550 - DNA, 12 bp, Artificial Sequence
  synthetic circulating small noncoding RNA (sncRNA) 5' transfer RNA (tRNA) half
agtcggcaggat

SEQ ID NO: 6551 - DNA, 14 bp, Artificial Sequence
  synthetic circulating small noncoding RNA (sncRNA) 5' transfer RNA (tRNA) half
gattcccgggcggc

SEQ ID NO: 6552 - DNA, 17 bp, Artificial Sequence
  synthetic circulating small noncoding RNA (sncRNA) 5' transfer RNA (tRNA) half
aaccaggaatcctaacc

SEQ ID NO: 6553 - DNA, 22 bp, Artificial Sequence
  synthetic circulating small noncoding RNA (sncRNA) 5' transfer RNA (tRNA) half
agtcagacgcgttatccattgc

SEQ ID NO: 6554 - DNA, 32 bp, Artificial Sequence
  synthetic circulating small noncoding RNA (sncRNA) 5' transfer RNA (tRNA) half
gccccgtgtgaggatcgaactcacgaccttca

SEQ ID NO: 6555 - DNA, 45 bp, Artificial Sequence
  synthetic circulating small noncoding RNA (sncRNA) 5' transfer RNA (tRNA) half
ttgtgccccgtgtgaggatcgaactcacgaccttcagattatgag

SEQ ID NO: 6556 - DNA, 25 bp, Artificial Sequence
  synthetic circulating small noncoding RNA (sncRNA) 5' transfer RNA (tRNA) half
cgcccggtttcgaaccggggacctt

SEQ ID NO: 6557 - DNA, 16 bp, Artificial Sequence
  synthetic circulating small noncoding RNA (sncRNA) 5' transfer RNA (tRNA) half
tcccggtgtgggaacg

SEQ ID NO: 6558 - DNA, 15 bp, Artificial Sequence
  synthetic circulating small noncoding RNA (sncRNA) 5' transfer RNA (tRNA) half
tccccgacggggagt

SEQ ID NO: 6559 - DNA, 21 bp, Artificial Sequence
  synthetic circulating small noncoding RNA (sncRNA) 5' transfer RNA (tRNA) half
cgttgcgttggccgggaatcg

SEQ ID NO: 6560 - DNA, 13 bp, Artificial Sequence
  synthetic circulating small noncoding RNA (sncRNA) 5' transfer RNA (tRNA) half
gttccttcgagcc

SEQ ID NO: 6561 - DNA, 15 bp, Artificial Sequence
  synthetic circulating small noncoding RNA (sncRNA) 5' transfer RNA (tRNA) half
gttcaaatccgggtg

SEQ ID NO: 6562 - DNA, 17 bp, Artificial Sequence
  synthetic circulating small noncoding RNA (sncRNA) 5' transfer RNA (tRNA) half
tcgaaaccgggcggaaa

SEQ ID NO: 6563 - DNA, 36 bp, Artificial Sequence
  synthetic circulating small noncoding RNA (sncRNA) 5' transfer RNA (tRNA) half
gatcagaagattgcaggttcgagtcctgccgcggtc

SEQ ID NO: 6564 - DNA, 20 bp, Artificial Sequence
  synthetic circulating small noncoding RNA (sncRNA) 5' transfer RNA (tRNA) half
agcggaagcgtgctgggccc

SEQ ID NO: 6565 - DNA, 16 bp, Artificial Sequence
  synthetic circulating small noncoding RNA (sncRNA) 5' transfer RNA (tRNA) half
atcccggacgagccct

SEQ ID NO: 6566 - DNA, 22 bp, Artificial Sequence
  synthetic circulating small noncoding RNA (sncRNA) 5' transfer RNA (tRNA) half
gagggggcacccggatttgaac

SEQ ID NO: 6567 - DNA, 30 bp, Artificial Sequence
  synthetic circulating small noncoding RNA (sncRNA) 5' transfer RNA (tRNA) half
ggcccagcacgcttccgctgcgccactctg

SEQ ID NO: 6568 - DNA, 12 bp, Artificial Sequence
  synthetic circulating small noncoding RNA (sncRNA) 5' transfer RNA (tRNA) half
tcacgtcggggt

SEQ ID NO: 6569 - DNA, 15 bp, Artificial Sequence
  synthetic circulating small noncoding RNA (sncRNA) 5' transfer RNA (tRNA) half
gagcgccgaatccta

SEQ ID NO: 6570 - DNA, 14 bp, Artificial Sequence
  synthetic circulating small noncoding RNA (sncRNA) 5' transfer RNA (tRNA) half
agaggtccccggtt

SEQ ID NO: 6571 - DNA, 13 bp, Artificial Sequence
  synthetic circulating small noncoding RNA (sncRNA) 5' transfer RNA (tRNA) half
tcggttcccggcc

SEQ ID NO: 6572 - DNA, 13 bp, Artificial Sequence
  synthetic circulating small noncoding RNA (sncRNA) 5' transfer RNA (tRNA) half
ccgctcggccatc

SEQ ID NO: 6573 - DNA, 16 bp, Artificial Sequence
  synthetic circulating small noncoding RNA (sncRNA) 5' transfer RNA (tRNA) half
cgggacctctcgcacc

SEQ ID NO: 6574 - DNA, 11 bp, Artificial Sequence
  synthetic circulating small noncoding RNA (sncRNA) 5' transfer RNA (tRNA) half
ccggccaatgc

SEQ ID NO: 6575 - DNA, 31 bp, Artificial Sequence
  synthetic circulating small noncoding RNA (sncRNA) 5' transfer RNA (tRNA) half
tgagcccggatagctcagtcggtagagcatc

SEQ ID NO: 6576 - DNA, 11 bp, Artificial Sequence
  synthetic circulating small noncoding RNA (sncRNA) 5' transfer RNA (tRNA) half
gggaatcgaac

SEQ ID NO: 6577 - DNA, 12 bp, Artificial Sequence
  synthetic circulating small noncoding RNA (sncRNA) 5' transfer RNA (tRNA) half
ctgttcgggcgc

SEQ ID NO: 6578 - DNA, 14 bp, Artificial Sequence
  synthetic circulating small noncoding RNA (sncRNA) 5' transfer RNA (tRNA) half
ggctcgttggtcta

SEQ ID NO: 6579 - DNA, 12 bp, Artificial Sequence
  synthetic circulating small noncoding RNA (sncRNA) 5' transfer RNA (tRNA) half
ccacgttgggcg

SEQ ID NO: 6580 - DNA, 27 bp, Artificial Sequence
  synthetic circulating small noncoding RNA (sncRNA) 5' transfer RNA (tRNA) half
gtgttcccacaccgggagtcgaacccg

SEQ ID NO: 6581 - DNA, 14 bp, Artificial Sequence
  synthetic circulating small noncoding RNA (sncRNA) 5' transfer RNA (tRNA) half
aacccgggccgcgg

SEQ ID NO: 6582 - DNA, 12 bp, Artificial Sequence
  synthetic circulating small noncoding RNA (sncRNA) 5' transfer RNA (tRNA) half
agggctcgtccg

SEQ ID NO: 6583 - DNA, 30 bp, Artificial Sequence
  synthetic circulating small noncoding RNA (sncRNA) 5' transfer RNA (tRNA) half
cagtcggtagagcatgagactcttaatctc

SEQ ID NO: 6584 - DNA, 30 bp, Artificial Sequence
  synthetic circulating small noncoding RNA (sncRNA) 5' transfer RNA (tRNA) half
ggcgagcgtgatgaccactacactacggaa

SEQ ID NO: 6585 - DNA, 12 bp, Artificial Sequence
  synthetic circulating small noncoding RNA (sncRNA) 5' transfer RNA (tRNA) half
gaacccgcaacc

SEQ ID NO: 6586 - DNA, 18 bp, Artificial Sequence
  synthetic circulating small noncoding RNA (sncRNA) 5' transfer RNA (tRNA) half
tgaacccgggacctctcg

SEQ ID NO: 6587 - DNA, 37 bp, Artificial Sequence
  synthetic circulating small noncoding RNA (sncRNA) 5' transfer RNA (tRNA) half
tgcatgaggtcctgggttcgatccccagcatctccag

SEQ ID NO: 6588 - DNA, 32 bp, Artificial Sequence
  synthetic circulating small noncoding RNA (sncRNA) 5' transfer RNA (tRNA) half
tctgagggtccagggttcaagtccctgttcgg

SEQ ID NO: 6589 - DNA, 16 bp, Artificial Sequence
  synthetic circulating small noncoding RNA (sncRNA) 5' transfer RNA (tRNA) half
ggttcggttcccggcc

SEQ ID NO: 6590 - DNA, 12 bp, Artificial Sequence
  synthetic circulating small noncoding RNA (sncRNA) 5' transfer RNA (tRNA) half
cacgtcggggtc

SEQ ID NO: 6591 - DNA, 19 bp, Artificial Sequence
  synthetic circulating small noncoding RNA (sncRNA) 5' transfer RNA (tRNA) half
ccaactgagctaaccggcc

SEQ ID NO: 6592 - DNA, 13 bp, Artificial Sequence
  synthetic circulating small noncoding RNA (sncRNA) 5' transfer RNA (tRNA) half
taggattcggcgc

SEQ ID NO: 6593 - DNA, 24 bp, Artificial Sequence
  synthetic circulating small noncoding RNA (sncRNA) 5' transfer RNA (tRNA) half
gctctaccactgagctataccccc

SEQ ID NO: 6594 - DNA, 20 bp, Artificial Sequence
  synthetic circulating small noncoding RNA (sncRNA) 5' transfer RNA (tRNA) half
aggttccaccgagatttgaa

SEQ ID NO: 6595 - DNA, 26 bp, Artificial Sequence
  synthetic circulating small noncoding RNA (sncRNA) 5' transfer RNA (tRNA) half
agcagagtggcgcagcggaagcgtgc

SEQ ID NO: 6596 - DNA, 38 bp, Artificial Sequence
  synthetic circulating small noncoding RNA (sncRNA) 5' transfer RNA (tRNA) half
tccgagccagccaggagtcgaacctggaatcttctgat

SEQ ID NO: 6597 - DNA, 12 bp, Artificial Sequence
  synthetic circulating small noncoding RNA (sncRNA) 5' transfer RNA (tRNA) half
ggggcacccgga

SEQ ID NO: 6598 - DNA, 42 bp, Artificial Sequence
  synthetic circulating small noncoding RNA (sncRNA) 5' transfer RNA (tRNA) half
tacctccccgtcggggaatcgaaccccggtctcccgcgtgac

SEQ ID NO: 6599 - DNA, 13 bp, Artificial Sequence
  synthetic circulating small noncoding RNA (sncRNA) 5' transfer RNA (tRNA) half
cgaacctgcgcgg

SEQ ID NO: 6600 - DNA, 29 bp, Artificial Sequence
  synthetic circulating small noncoding RNA (sncRNA) 5' transfer RNA (tRNA) half
ttcagtggtagaattctcgcctgccacgc

SEQ ID NO: 6601 - DNA, 13 bp, Artificial Sequence
  synthetic circulating small noncoding RNA (sncRNA) 5' transfer RNA (tRNA) half
gaactcgcgaccc

SEQ ID NO: 6602 - DNA, 23 bp, Artificial Sequence
  synthetic circulating small noncoding RNA (sncRNA) 5' transfer RNA (tRNA) half
ttcgaaaccgggcggaaacagca

SEQ ID NO: 6603 - DNA, 12 bp, Artificial Sequence
  synthetic circulating small noncoding RNA (sncRNA) 5' transfer RNA (tRNA) half
actccgccggga

SEQ ID NO: 6604 - DNA, 18 bp, Artificial Sequence
  synthetic circulating small noncoding RNA (sncRNA) 5' transfer RNA (tRNA) half
aaactgtttccgcccggt

SEQ ID NO: 6605 - DNA, 13 bp, Artificial Sequence
  synthetic circulating small noncoding RNA (sncRNA) 5' transfer RNA (tRNA) half
gccggactcgaac

SEQ ID NO: 6606 - DNA, 36 bp, Artificial Sequence
  synthetic circulating small noncoding RNA (sncRNA) 5' transfer RNA (tRNA) half
acaggagatcctgggttcaaatcccagcggggcctt

SEQ ID NO: 6607 - DNA, 37 bp, Artificial Sequence
  synthetic circulating small noncoding RNA (sncRNA) 5' transfer RNA (tRNA) half
gtaaacaggagatcctgggttcgactcccagtggggc

SEQ ID NO: 6608 - DNA, 16 bp, Artificial Sequence
  synthetic circulating small noncoding RNA (sncRNA) 5' transfer RNA (tRNA) half
tggataaggcactggc

SEQ ID NO: 6609 - DNA, 16 bp, Artificial Sequence
  synthetic circulating small noncoding RNA (sncRNA) 5' transfer RNA (tRNA) half
caccgggagtcgaacc

SEQ ID NO: 6610 - DNA, 26 bp, Artificial Sequence
  synthetic circulating small noncoding RNA (sncRNA) 5' transfer RNA (tRNA) half
tcgtgggttcgagccccacgttgggc

SEQ ID NO: 6611 - DNA, 7 bp, Artificial Sequence
  synthetic circulating small noncoding RNA (sncRNA) 5' transfer RNA (tRNA) half
ggtcgcg

SEQ ID NO: 6612 - DNA, 28 bp, Artificial Sequence
  synthetic circulating small noncoding RNA (sncRNA) 5' transfer RNA (tRNA) half
ttccgtagtgtagtggttatcacgttcg

SEQ ID NO: 6613 - DNA, 30 bp, Artificial Sequence
  synthetic circulating small noncoding RNA (sncRNA) 5' transfer RNA (tRNA) half
tcccgcgtggcaggcgagaattctaccact

SEQ ID NO: 6614 - DNA, 17 bp, Artificial Sequence
  synthetic circulating small noncoding RNA (sncRNA) 5' transfer RNA (tRNA) half
ggcggggatactcacca

SEQ ID NO: 6615 - DNA, 40 bp, Artificial Sequence
  synthetic circulating small noncoding RNA (sncRNA) 5' transfer RNA (tRNA) half
agaccagtgctctaacccctgagctatggagccctcacct

SEQ ID NO: 6616 - DNA, 18 bp, Artificial Sequence
  synthetic circulating small noncoding RNA (sncRNA) 5' transfer RNA (tRNA) half
gaatcgaacccgggccgc

SEQ ID NO: 6617 - DNA, 18 bp, Artificial Sequence
  synthetic circulating small noncoding RNA (sncRNA) 5' transfer RNA (tRNA) half
tcgattcccggcccatgc

SEQ ID NO: 6618 - DNA, 19 bp, Artificial Sequence
  synthetic circulating small noncoding RNA (sncRNA) 5' transfer RNA (tRNA) half
cggtctcccgcgtgacagg

SEQ ID NO: 6619 - DNA, 10 bp, Artificial Sequence
  synthetic circulating small noncoding RNA (sncRNA) 5' transfer RNA (tRNA) half
ggcgagaatt

SEQ ID NO: 6620 - DNA, 20 bp, Artificial Sequence
  synthetic circulating small noncoding RNA (sncRNA) 5' transfer RNA (tRNA) half
ccaaactgtttccgcccggt

SEQ ID NO: 6621 - DNA, 23 bp, Artificial Sequence
  synthetic circulating small noncoding RNA (sncRNA) 5' transfer RNA (tRNA) half
cggttcgaatccgagtcacggca

SEQ ID NO: 6622 - DNA, 27 bp, Artificial Sequence
  synthetic circulating small noncoding RNA (sncRNA) 5' transfer RNA (tRNA) half
atgctctaccgactgagctatccgggc

SEQ ID NO: 6623 - DNA, 41 bp, Artificial Sequence
  synthetic circulating small noncoding RNA (sncRNA) 5' transfer RNA (tRNA) half
tcaccgccgcggcccgggttcgattcccggtcagggaagca

SEQ ID NO: 6624 - DNA, 15 bp, Artificial Sequence
  synthetic circulating small noncoding RNA (sncRNA) 5' transfer RNA (tRNA) half
gccgtgactcggatt

SEQ ID NO: 6625 - DNA, 24 bp, Artificial Sequence
  synthetic circulating small noncoding RNA (sncRNA) 5' transfer RNA (tRNA) half
ccgggaatcgaacccgggccgcgg

SEQ ID NO: 6626 - DNA, 13 bp, Artificial Sequence
  synthetic circulating small noncoding RNA (sncRNA) 5' transfer RNA (tRNA) half
ctgccacgcggga

SEQ ID NO: 6627 - DNA, 20 bp, Artificial Sequence
  synthetic circulating small noncoding RNA (sncRNA) 5' transfer RNA (tRNA) half
caatggtagaattctcgcct

SEQ ID NO: 6628 - DNA, 19 bp, Artificial Sequence
  synthetic circulating small noncoding RNA (sncRNA) 5' transfer RNA (tRNA) half
tgtcagaagtgggattcga

SEQ ID NO: 6629 - DNA, 30 bp, Artificial Sequence
  synthetic circulating small noncoding RNA (sncRNA) 5' transfer RNA (tRNA) half
ggccggttagctcagttggttagagcgtgg

SEQ ID NO: 6630 - DNA, 14 bp, Artificial Sequence
  synthetic circulating small noncoding RNA (sncRNA) 5' transfer RNA (tRNA) half
ctatacgatcacgg

SEQ ID NO: 6631 - DNA, 30 bp, Artificial Sequence
  synthetic circulating small noncoding RNA (sncRNA) 5' transfer RNA (tRNA) half
tcaaatgctctacccctgagttataccccc

SEQ ID NO: 6632 - DNA, 26 bp, Artificial Sequence
  synthetic circulating small noncoding RNA (sncRNA) 5' transfer RNA (tRNA) half
gaggcgaacgtgataaccactacact

SEQ ID NO: 6633 - DNA, 15 bp, Artificial Sequence
  synthetic circulating small noncoding RNA (sncRNA) 5' transfer RNA (tRNA) half
ctcaccgccgcggcc

SEQ ID NO: 6634 - DNA, 29 bp, Artificial Sequence
  synthetic circulating small noncoding RNA (sncRNA) 5' transfer RNA (tRNA) half
taccgggagtcgaacccgggccgcctggg

SEQ ID NO: 6635 - DNA, 29 bp, Artificial Sequence
  synthetic circulating small noncoding RNA (sncRNA) 5' transfer RNA (tRNA) half
ggcccagcacgcttccgctgcgccactct

SEQ ID NO: 6636 - DNA, 14 bp, Artificial Sequence
  synthetic circulating small noncoding RNA (sncRNA) 5' transfer RNA (tRNA) half
ggcagcggtgggat

SEQ ID NO: 6637 - DNA, 22 bp, Artificial Sequence
  synthetic circulating small noncoding RNA (sncRNA) 5' transfer RNA (tRNA) half
tcgatccatcgacctctgggtt

SEQ ID NO: 6638 - DNA, 27 bp, Artificial Sequence
  synthetic circulating small noncoding RNA (sncRNA) 5' transfer RNA (tRNA) half
ccgtagtgtagtggttatcacgttcgc

SEQ ID NO: 6639 - DNA, 14 bp, Artificial Sequence
  synthetic circulating small noncoding RNA (sncRNA) 5' transfer RNA (tRNA) half
tcgggggcgtgggt

SEQ ID NO: 6640 - DNA, 31 bp, Artificial Sequence
  synthetic circulating small noncoding RNA (sncRNA) 5' transfer RNA (tRNA) half
aaaccaggaatcctaaccgctagaccatgtg

SEQ ID NO: 6641 - DNA, 37 bp, Artificial Sequence
  synthetic circulating small noncoding RNA (sncRNA) 5' transfer RNA (tRNA) half
ggctcgtccgggatttgaacccgggacctctcgcacc

SEQ ID NO: 6642 - DNA, 21 bp, Artificial Sequence
  synthetic circulating small noncoding RNA (sncRNA) 5' transfer RNA (tRNA) half
gtgagagcgccgaatcctaac

SEQ ID NO: 6643 - DNA, 31 bp, Artificial Sequence
  synthetic circulating small noncoding RNA (sncRNA) 5' transfer RNA (tRNA) half
gattgtgggttcgagtcccatctgggtcgca

SEQ ID NO: 6644 - DNA, 24 bp, Artificial Sequence
  synthetic circulating small noncoding RNA (sncRNA) 5' transfer RNA (tRNA) half
ggggttcgattccccgacggggag

SEQ ID NO: 6645 - DNA, 38 bp, Artificial Sequence
  synthetic circulating small noncoding RNA (sncRNA) 5' transfer RNA (tRNA) half
ttgccccctctgaggttcgaactcaggaccttcagatt

SEQ ID NO: 6646 - DNA, 38 bp, Artificial Sequence
  synthetic circulating small noncoding RNA (sncRNA) 5' transfer RNA (tRNA) half
gtgccccgtgtgaggatcgaactcacgaccttcagatt

SEQ ID NO: 6647 - DNA, 34 bp, Artificial Sequence
  synthetic circulating small noncoding RNA (sncRNA) 5' transfer RNA (tRNA) half
tgccccgtgtgaggatcgaactcacgaccttcag

SEQ ID NO: 6648 - DNA, 14 bp, Artificial Sequence
  synthetic circulating small noncoding RNA (sncRNA) 5' transfer RNA (tRNA) half
tctcggtgggacct

SEQ ID NO: 6649 - DNA, 35 bp, Artificial Sequence
  synthetic circulating small noncoding RNA (sncRNA) 5' transfer RNA (tRNA) half
cgcgggaggcccgggttcgattcccggccaatgca

SEQ ID NO: 6650 - DNA, 19 bp, Artificial Sequence
  synthetic circulating small noncoding RNA (sncRNA) 5' transfer RNA (tRNA) half
ggtccccggttcgaaaccg

SEQ ID NO: 6651 - DNA, 31 bp, Artificial Sequence
  synthetic circulating small noncoding RNA (sncRNA) 5' transfer RNA (tRNA) half
agtcaaatgctctacccctgagctatacccc

SEQ ID NO: 6652 - DNA, 21 bp, Artificial Sequence
  synthetic circulating small noncoding RNA (sncRNA) 5' transfer RNA (tRNA) half
gcgaacgtgataaccactaca

SEQ ID NO: 6653 - DNA, 37 bp, Artificial Sequence
  synthetic circulating small noncoding RNA (sncRNA) 5' transfer RNA (tRNA) half
gtatgaggccccgggttcaatccccggcatctccaac

SEQ ID NO: 6654 - DNA, 11 bp, Artificial Sequence
  synthetic circulating small noncoding RNA (sncRNA) 5' transfer RNA (tRNA) half
ggattcggcgc

SEQ ID NO: 6655 - DNA, 32 bp, Artificial Sequence
  synthetic circulating small noncoding RNA (sncRNA) 5' transfer RNA (tRNA) half
ggcaccgctgggattcgaacccaggatctcct

SEQ ID NO: 6656 - DNA, 33 bp, Artificial Sequence
  synthetic circulating small noncoding RNA (sncRNA) 5' transfer RNA (tRNA) half
cgcccaacgtggggctcgaacccacgaccctga

SEQ ID NO: 6657 - DNA, 31 bp, Artificial Sequence
  synthetic circulating small noncoding RNA (sncRNA) 5' transfer RNA (tRNA) half
agagtggttcaattccacctttcgggcggga

SEQ ID NO: 6658 - DNA, 15 bp, Artificial Sequence
  synthetic circulating small noncoding RNA (sncRNA) 5' transfer RNA (tRNA) half
aagcgtgctgggccc

SEQ ID NO: 6659 - DNA, 18 bp, Artificial Sequence
  synthetic circulating small noncoding RNA (sncRNA) 5' transfer RNA (tRNA) half
agaccgctcggccatcct

SEQ ID NO: 6660 - DNA, 32 bp, Artificial Sequence
  synthetic circulating small noncoding RNA (sncRNA) 5' transfer RNA (tRNA) half
cttgcgacccgggttcgattcccgggcggcgc

SEQ ID NO: 6661 - DNA, 30 bp, Artificial Sequence
  synthetic circulating small noncoding RNA (sncRNA) 5' transfer RNA (tRNA) half
agtcaaatgctctaccactgagctataccc

SEQ ID NO: 6662 - DNA, 36 bp, Artificial Sequence
  synthetic circulating small noncoding RNA (sncRNA) 5' transfer RNA (tRNA) half
gcgaccacgaagggactcgaacccccaatcttctga

SEQ ID NO: 6663 - DNA, 23 bp, Artificial Sequence
  synthetic circulating small noncoding RNA (sncRNA) 5' transfer RNA (tRNA) half
tagcgcccgaacagggacttgaa

SEQ ID NO: 6664 - DNA, 18 bp, Artificial Sequence
  synthetic circulating small noncoding RNA (sncRNA) 5' transfer RNA (tRNA) half
gcgaaaggtccccggttc

SEQ ID NO: 6665 - DNA, 22 bp, Artificial Sequence
  synthetic circulating small noncoding RNA (sncRNA) 5' transfer RNA (tRNA) half
ctgccacgcgggaggcccgggt

SEQ ID NO: 6666 - DNA, 13 bp, Artificial Sequence
  synthetic circulating small noncoding RNA (sncRNA) 5' transfer RNA (tRNA) half
gctctaccaactg

SEQ ID NO: 6667 - DNA, 17 bp, Artificial Sequence
  synthetic circulating small noncoding RNA (sncRNA) 5' transfer RNA (tRNA) half
cggatcgctggattcag

SEQ ID NO: 6668 - DNA, 27 bp, Artificial Sequence
  synthetic circulating small noncoding RNA (sncRNA) 5' transfer RNA (tRNA) half
gagcgccgaatcctaaccactagacca

SEQ ID NO: 6669 - DNA, 38 bp, Artificial Sequence
  synthetic circulating small noncoding RNA (sncRNA) 5' transfer RNA (tRNA) half
tcctgccgtgactcggattcgaaccgaggttgctgcgg

SEQ ID NO: 6670 - DNA, 17 bp, Artificial Sequence
  synthetic circulating small noncoding RNA (sncRNA) 5' transfer RNA (tRNA) half
tctaccgactgagctag

SEQ ID NO: 6671 - DNA, 32 bp, Artificial Sequence
  synthetic circulating small noncoding RNA (sncRNA) 5' transfer RNA (tRNA) half
cgcagaaggtcctgggttcgagccccagtgga

SEQ ID NO: 6672 - DNA, 13 bp, Artificial Sequence
  synthetic circulating small noncoding RNA (sncRNA) 5' transfer RNA (tRNA) half
tgaccccgacgtg

SEQ ID NO: 6673 - DNA, 33 bp, Artificial Sequence
  synthetic circulating small noncoding RNA (sncRNA) 5' transfer RNA (tRNA) half
cgaccacgaagggactcgaaccctcaatcttct

SEQ ID NO: 6674 - DNA, 18 bp, Artificial Sequence
  synthetic circulating small noncoding RNA (sncRNA) 5' transfer RNA (tRNA) half
tgaatccagcgatccgag

SEQ ID NO: 6675 - DNA, 36 bp, Artificial Sequence
  synthetic circulating small noncoding RNA (sncRNA) 5' transfer RNA (tRNA) half
tcagaagattccaggttcgactcctggctggctcgt

SEQ ID NO: 6676 - DNA, 14 bp, Artificial Sequence
  synthetic circulating small noncoding RNA (sncRNA) 5' transfer RNA (tRNA) half
cgttatccattgcg

SEQ ID NO: 6677 - DNA, 17 bp, Artificial Sequence
  synthetic circulating small noncoding RNA (sncRNA) 5' transfer RNA (tRNA) half
gcgaaaggtccccggtt

SEQ ID NO: 6678 - DNA, 33 bp, Artificial Sequence
  synthetic circulating small noncoding RNA (sncRNA) 5' transfer RNA (tRNA) half
cccgggcctcccgcgtggcaggcgagaattcta

SEQ ID NO: 6679 - DNA, 37 bp, Artificial Sequence
  synthetic circulating small noncoding RNA (sncRNA) 5' transfer RNA (tRNA) half
acaggagatcctgggttcaaatcccagcggggccttt

SEQ ID NO: 6680 - DNA, 24 bp, Artificial Sequence
  synthetic circulating small noncoding RNA (sncRNA) 5' transfer RNA (tRNA) half
gaggcgaacgtgataaccactaca

SEQ ID NO: 6681 - DNA, 33 bp, Artificial Sequence
  synthetic circulating small noncoding RNA (sncRNA) 5' transfer RNA (tRNA) half
ggcgagaattctaccactgaaccaccaatgctc

SEQ ID NO: 6682 - DNA, 13 bp, Artificial Sequence
  synthetic circulating small noncoding RNA (sncRNA) 5' transfer RNA (tRNA) half
aggattcggcgct

SEQ ID NO: 6683 - DNA, 26 bp, Artificial Sequence
  synthetic circulating small noncoding RNA (sncRNA) 5' transfer RNA (tRNA) half
atgctctacccctgagctataccccc

SEQ ID NO: 6684 - DNA, 15 bp, Artificial Sequence
  synthetic circulating small noncoding RNA (sncRNA) 5' transfer RNA (tRNA) half
cagcaacctcggttc

SEQ ID NO: 6685 - DNA, 39 bp, Artificial Sequence
  synthetic circulating small noncoding RNA (sncRNA) 5' transfer RNA (tRNA) half
aagccagggattgtgggttcgagtcccatctggggtggt

SEQ ID NO: 6686 - DNA, 12 bp, Artificial Sequence
  synthetic circulating small noncoding RNA (sncRNA) 5' transfer RNA (tRNA) half
gcggtgagagcg

SEQ ID NO: 6687 - DNA, 13 bp, Artificial Sequence
  synthetic circulating small noncoding RNA (sncRNA) 5' transfer RNA (tRNA) half
cgtggcaggcgag

SEQ ID NO: 6688 - DNA, 30 bp, Artificial Sequence
  synthetic circulating small noncoding RNA (sncRNA) 5' transfer RNA (tRNA) half
caggcggcccgggttcgactcccggtatgg

SEQ ID NO: 6689 - DNA, 20 bp, Artificial Sequence
  synthetic circulating small noncoding RNA (sncRNA) 5' transfer RNA (tRNA) half
ggggaatcgaaccccggtct

SEQ ID NO: 6690 - DNA, 23 bp, Artificial Sequence
  synthetic circulating small noncoding RNA (sncRNA) 5' transfer RNA (tRNA) half
tgctaataacgccaaggtcgcgg

SEQ ID NO: 6691 - DNA, 35 bp, Artificial Sequence
  synthetic circulating small noncoding RNA (sncRNA) 5' transfer RNA (tRNA) half
ggctgggggatgtagctcagtggtagagcgcgcgc

SEQ ID NO: 6692 - DNA, 10 bp, Artificial Sequence
  synthetic circulating small noncoding RNA (sncRNA) 5' transfer RNA (tRNA) half
cgacggggag

SEQ ID NO: 6693 - DNA, 25 bp, Artificial Sequence
  synthetic circulating small noncoding RNA (sncRNA) 5' transfer RNA (tRNA) half
cggctagctcagtcggtagagcatg

SEQ ID NO: 6694 - DNA, 31 bp, Artificial Sequence
  synthetic circulating small noncoding RNA (sncRNA) 5' transfer RNA (tRNA) half
gtcgctggttcgattccggctcgaaggactt

SEQ ID NO: 6695 - DNA, 27 bp, Artificial Sequence
  synthetic circulating small noncoding RNA (sncRNA) 5' transfer RNA (tRNA) half
cgagccagccaggagtcgaacctggaa

SEQ ID NO: 6696 - DNA, 21 bp, Artificial Sequence
  synthetic circulating small noncoding RNA (sncRNA) 5' transfer RNA (tRNA) half
cgggttcgactcccggtgtgg

SEQ ID NO: 6697 - DNA, 23 bp, Artificial Sequence
  synthetic circulating small noncoding RNA (sncRNA) 5' transfer RNA (tRNA) half
tgagagcgccgaatcctaaccac

SEQ ID NO: 6698 - DNA, 19 bp, Artificial Sequence
  synthetic circulating small noncoding RNA (sncRNA) 5' transfer RNA (tRNA) half
tcgagccagccaggagtcg

SEQ ID NO: 6699 - DNA, 25 bp, Artificial Sequence
  synthetic circulating small noncoding RNA (sncRNA) 5' transfer RNA (tRNA) half
ccgtgatcgtatagtggttagtact

SEQ ID NO: 6700 - DNA, 15 bp, Artificial Sequence
  synthetic circulating small noncoding RNA (sncRNA) 5' transfer RNA (tRNA) half
aagaggtccccggtt

SEQ ID NO: 6701 - DNA, 28 bp, Artificial Sequence
  synthetic circulating small noncoding RNA (sncRNA) 5' transfer RNA (tRNA) half
gtccagggttcaagtccctgttcgggcg

SEQ ID NO: 6702 - DNA, 15 bp, Artificial Sequence
  synthetic circulating small noncoding RNA (sncRNA) 5' transfer RNA (tRNA) half
gggagactgcgacct

SEQ ID NO: 6703 - DNA, 10 bp, Artificial Sequence
  synthetic circulating small noncoding RNA (sncRNA) 5' transfer RNA (tRNA) half
gcccaacgtg

SEQ ID NO: 6704 - DNA, 20 bp, Artificial Sequence
  synthetic circulating small noncoding RNA (sncRNA) 5' transfer RNA (tRNA) half
ggctagctcagtcggtagag

SEQ ID NO: 6705 - DNA, 22 bp, Artificial Sequence
  synthetic circulating small noncoding RNA (sncRNA) 5' transfer RNA (tRNA) half
gcttccgctgcgccactctgct

SEQ ID NO: 6706 - DNA, 19 bp, Artificial Sequence
  synthetic circulating small noncoding RNA (sncRNA) 5' transfer RNA (tRNA) half
tcgactcccggtgtgggaa

SEQ ID NO: 6707 - DNA, 29 bp, Artificial Sequence
  synthetic circulating small noncoding RNA (sncRNA) 5' transfer RNA (tRNA) half
cgcccaacgtggggctcgaacccacgacc

SEQ ID NO: 6708 - DNA, 20 bp, Artificial Sequence
  synthetic circulating small noncoding RNA (sncRNA) 5' transfer RNA (tRNA) half
caattggtagagcatcagac

SEQ ID NO: 6709 - DNA, 30 bp, Artificial Sequence
  synthetic circulating small noncoding RNA (sncRNA) 5' transfer RNA (tRNA) half
ccgctggtgtagtggtatcatgcaagattc

SEQ ID NO: 6710 - DNA, 21 bp, Artificial Sequence
  synthetic circulating small noncoding RNA (sncRNA) 5' transfer RNA (tRNA) half
tggtgagtatccccgcctgtc

SEQ ID NO: 6711 - DNA, 19 bp, Artificial Sequence
  synthetic circulating small noncoding RNA (sncRNA) 5' transfer RNA (tRNA) half
ggtcccaccgagatttgaa

SEQ ID NO: 6712 - DNA, 21 bp, Artificial Sequence
  synthetic circulating small noncoding RNA (sncRNA) 5' transfer RNA (tRNA) half
cagtgggtagagcatgagact

SEQ ID NO: 6713 - DNA, 40 bp, Artificial Sequence
  synthetic circulating small noncoding RNA (sncRNA) 5' transfer RNA (tRNA) half
gattaagagtctcatgctctaccgactgagctagccgggc

SEQ ID NO: 6714 - DNA, 17 bp, Artificial Sequence
  synthetic circulating small noncoding RNA (sncRNA) 5' transfer RNA (tRNA) half
caaagcgagaatcatac

SEQ ID NO: 6715 - DNA, 21 bp, Artificial Sequence
  synthetic circulating small noncoding RNA (sncRNA) 5' transfer RNA (tRNA) half
tggtctagcggttaggattcc

SEQ ID NO: 6716 - DNA, 36 bp, Artificial Sequence
  synthetic circulating small noncoding RNA (sncRNA) 5' transfer RNA (tRNA) half
tgtgtcagaagtgggattcgaacccacgcctccatt

SEQ ID NO: 6717 - DNA, 22 bp, Artificial Sequence
  synthetic circulating small noncoding RNA (sncRNA) 5' transfer RNA (tRNA) half
ggattaagagtcccatgctcta

SEQ ID NO: 6718 - DNA, 32 bp, Artificial Sequence
  synthetic circulating small noncoding RNA (sncRNA) 5' transfer RNA (tRNA) half
ccttcgatagctcagctggtagagcggaggac

SEQ ID NO: 6719 - DNA, 20 bp, Artificial Sequence
  synthetic circulating small noncoding RNA (sncRNA) 5' transfer RNA (tRNA) half
agtggttagtactctgcgtt

SEQ ID NO: 6720 - DNA, 33 bp, Artificial Sequence
  synthetic circulating small noncoding RNA (sncRNA) 5' transfer RNA (tRNA) half
aggagatcctgggttcgaatcccagcggggcct

SEQ ID NO: 6721 - DNA, 16 bp, Artificial Sequence
  synthetic circulating small noncoding RNA (sncRNA) 5' transfer RNA (tRNA) half
cggtgagagcgccaaa

SEQ ID NO: 6722 - DNA, 26 bp, Artificial Sequence
  synthetic circulating small noncoding RNA (sncRNA) 5' transfer RNA (tRNA) half
atagctcagtggtagagcatttgact

SEQ ID NO: 6723 - DNA, 20 bp, Artificial Sequence
  synthetic circulating small noncoding RNA (sncRNA) 5' transfer RNA (tRNA) half
tgaatccagcgacccgagtt

SEQ ID NO: 6724 - DNA, 32 bp, Artificial Sequence
  synthetic circulating small noncoding RNA (sncRNA) 5' transfer RNA (tRNA) half
caggagatcctgggttcgaatcccagcggtgc

SEQ ID NO: 6725 - DNA, 32 bp, Artificial Sequence
  synthetic circulating small noncoding RNA (sncRNA) 5' transfer RNA (tRNA) half
cgggcctcccgcgtggcaggcgagaattctac

SEQ ID NO: 6726 - DNA, 25 bp, Artificial Sequence
  synthetic circulating small noncoding RNA (sncRNA) 5' transfer RNA (tRNA) half
agaattctaccactgaaccaccaat

SEQ ID NO: 6727 - DNA, 33 bp, Artificial Sequence
  synthetic circulating small noncoding RNA (sncRNA) 5' transfer RNA (tRNA) half
ggcggcccgggttcgactcccggtgtgggaaac

SEQ ID NO: 6728 - DNA, 25 bp, Artificial Sequence
  synthetic circulating small noncoding RNA (sncRNA) 5' transfer RNA (tRNA) half
atagctcagtggtagagcatttgac

SEQ ID NO: 6729 - DNA, 18 bp, Artificial Sequence
  synthetic circulating small noncoding RNA (sncRNA) 5' transfer RNA (tRNA) half
gtagaattctcgcctgcc

SEQ ID NO: 6730 - DNA, 28 bp, Artificial Sequence
  synthetic circulating small noncoding RNA (sncRNA) 5' transfer RNA (tRNA) half
aggcgagaattctaccactgaaccacca

SEQ ID NO: 6731 - DNA, 18 bp, Artificial Sequence
  synthetic circulating small noncoding RNA (sncRNA) 5' transfer RNA (tRNA) half
tcgattcccggccaatgc

SEQ ID NO: 6732 - DNA, 22 bp, Artificial Sequence
  synthetic circulating small noncoding RNA (sncRNA) 5' transfer RNA (tRNA) half
gcagtcaaatgctctaccactg

SEQ ID NO: 6733 - DNA, 16 bp, Artificial Sequence
  synthetic circulating small noncoding RNA (sncRNA) 5' transfer RNA (tRNA) half
tgctctaccgactgag

SEQ ID NO: 6734 - DNA, 21 bp, Artificial Sequence
  synthetic circulating small noncoding RNA (sncRNA) 5' transfer RNA (tRNA) half
taatggttagcactctggact

SEQ ID NO: 6735 - DNA, 35 bp, Artificial Sequence
  synthetic circulating small noncoding RNA (sncRNA) 5' transfer RNA (tRNA) half
agtgccgagactcggattcgaaccgaggttgctgc

SEQ ID NO: 6736 - DNA, 29 bp, Artificial Sequence
  synthetic circulating small noncoding RNA (sncRNA) 5' transfer RNA (tRNA) half
ttggccgggaatcgaacccgggcctcccg

SEQ ID NO: 6737 - DNA, 27 bp, Artificial Sequence
  synthetic circulating small noncoding RNA (sncRNA) 5' transfer RNA (tRNA) half
gccgtgactcggattcgaaccgaggtt

SEQ ID NO: 6738 - DNA, 20 bp, Artificial Sequence
  synthetic circulating small noncoding RNA (sncRNA) 5' transfer RNA (tRNA) half
cattggccgggaatcgaacc

SEQ ID NO: 6739 - DNA, 33 bp, Artificial Sequence
  synthetic circulating small noncoding RNA (sncRNA) 5' transfer RNA (tRNA) half
aactcggatcgctggattcagagtccagagtgc

SEQ ID NO: 6740 - DNA, 24 bp, Artificial Sequence
  synthetic circulating small noncoding RNA (sncRNA) 5' transfer RNA (tRNA) half
ccgaatcctaaccactagaccacc

SEQ ID NO: 6741 - DNA, 13 bp, Artificial Sequence
  synthetic circulating small noncoding RNA (sncRNA) 5' transfer RNA (tRNA) half
gaacctgcgcggg

SEQ ID NO: 6742 - DNA, 15 bp, Artificial Sequence
  synthetic circulating small noncoding RNA (sncRNA) 5' transfer RNA (tRNA) half
ttccgcccggtttcg

SEQ ID NO: 6743 - DNA, 21 bp, Artificial Sequence
  synthetic circulating small noncoding RNA (sncRNA) 5' transfer RNA (tRNA) half
gggttcgactcccggtatggg

SEQ ID NO: 6744 - DNA, 35 bp, Artificial Sequence
  synthetic circulating small noncoding RNA (sncRNA) 5' transfer RNA (tRNA) half
gtatgaggccccgggttcaatccccggcatctcca

SEQ ID NO: 6745 - DNA, 30 bp, Artificial Sequence
  synthetic circulating small noncoding RNA (sncRNA) 5' transfer RNA (tRNA) half
cgggccgcctgggtgaaaaccaggaatcct

SEQ ID NO: 6746 - DNA, 21 bp, Artificial Sequence
  synthetic circulating small noncoding RNA (sncRNA) 5' transfer RNA (tRNA) half
tgagagcgccgaatcctaacc

SEQ ID NO: 6747 - DNA, 17 bp, Artificial Sequence
  synthetic circulating small noncoding RNA (sncRNA) 5' transfer RNA (tRNA) half
gtgtttccgcccggttt

SEQ ID NO: 6748 - DNA, 18 bp, Artificial Sequence
  synthetic circulating small noncoding RNA (sncRNA) 5' transfer RNA (tRNA) half
tggtatcatgcaagattc

SEQ ID NO: 6749 - DNA, 12 bp, Artificial Sequence
  synthetic circulating small noncoding RNA (sncRNA) 5' transfer RNA (tRNA) half
gtctcccgcgtg

SEQ ID NO: 6750 - DNA, 16 bp, Artificial Sequence
  synthetic circulating small noncoding RNA (sncRNA) 5' transfer RNA (tRNA) half
tgaccgggaatcgaac

SEQ ID NO: 6751 - DNA, 14 bp, Artificial Sequence
  synthetic circulating small noncoding RNA (sncRNA) 5' transfer RNA (tRNA) half
ttatcacgtctgct

SEQ ID NO: 6752 - DNA, 29 bp, Artificial Sequence
  synthetic circulating small noncoding RNA (sncRNA) 5' transfer RNA (tRNA) half
aagcgagaatcatacccctagaccaacga

SEQ ID NO: 6753 - DNA, 16 bp, Artificial Sequence
  synthetic circulating small noncoding RNA (sncRNA) 5' transfer RNA (tRNA) half
agagtactaaccacta

SEQ ID NO: 6754 - DNA, 21 bp, Artificial Sequence
  synthetic circulating small noncoding RNA (sncRNA) 5' transfer RNA (tRNA) half
tcgattccccgacggggagtc

SEQ ID NO: 6755 - DNA, 24 bp, Artificial Sequence
  synthetic circulating small noncoding RNA (sncRNA) 5' transfer RNA (tRNA) half
cgatccatcgacctctgggttatg

SEQ ID NO: 6756 - DNA, 24 bp, Artificial Sequence
  synthetic circulating small noncoding RNA (sncRNA) 5' transfer RNA (tRNA) half
cgtctccccgtcggggaatcgaac

SEQ ID NO: 6757 - DNA, 15 bp, Artificial Sequence
  synthetic circulating small noncoding RNA (sncRNA) 5' transfer RNA (tRNA) half
ttgaccccgacgtga

SEQ ID NO: 6758 - DNA, 17 bp, Artificial Sequence
  synthetic circulating small noncoding RNA (sncRNA) 5' transfer RNA (tRNA) half
ggcggtgagagcgccga

SEQ ID NO: 6759 - DNA, 19 bp, Artificial Sequence
  synthetic circulating small noncoding RNA (sncRNA) 5' transfer RNA (tRNA) half
aggaatcctaaccgctaga

SEQ ID NO: 6760 - DNA, 17 bp, Artificial Sequence
  synthetic circulating small noncoding RNA (sncRNA) 5' transfer RNA (tRNA) half
ggagactgcgacctgaa

SEQ ID NO: 6761 - DNA, 31 bp, Artificial Sequence
  synthetic circulating small noncoding RNA (sncRNA) 5' transfer RNA (tRNA) half
tttctgtagtgtagtggttatcacgctcgcc

SEQ ID NO: 6762 - DNA, 36 bp, Artificial Sequence
  synthetic circulating small noncoding RNA (sncRNA) 5' transfer RNA (tRNA) half
ctcggatcgctggattcaaagtccagagtgctaacc

SEQ ID NO: 6763 - DNA, 26 bp, Artificial Sequence
  synthetic circulating small noncoding RNA (sncRNA) 5' transfer RNA (tRNA) half
caggcggcccgggttcgactcccggt

SEQ ID NO: 6764 - DNA, 15 bp, Artificial Sequence
  synthetic circulating small noncoding RNA (sncRNA) 5' transfer RNA (tRNA) half
tcccatatggtctag

SEQ ID NO: 6765 - DNA, 29 bp, Artificial Sequence
  synthetic circulating small noncoding RNA (sncRNA) 5' transfer RNA (tRNA) half
cagagtactaaccactatacgatctcggc

SEQ ID NO: 6766 - DNA, 27 bp, Artificial Sequence
  synthetic circulating small noncoding RNA (sncRNA) 5' transfer RNA (tRNA) half
ccgggcctcccgcgtggcaggcgagaa

SEQ ID NO: 6767 - DNA, 15 bp, Artificial Sequence
  synthetic circulating small noncoding RNA (sncRNA) 5' transfer RNA (tRNA) half
gcggggatactcacc

SEQ ID NO: 6768 - DNA, 33 bp, Artificial Sequence
  synthetic circulating small noncoding RNA (sncRNA) 5' transfer RNA (tRNA) half
caggagatcctgggttcaaatcccagcggggcc

SEQ ID NO: 6769 - DNA, 39 bp, Artificial Sequence
  synthetic circulating small noncoding RNA (sncRNA) 5' transfer RNA (tRNA) half
gcaccacgctctaaccaactgagctaaccggccagacct

SEQ ID NO: 6770 - DNA, 20 bp, Artificial Sequence
  synthetic circulating small noncoding RNA (sncRNA) 5' transfer RNA (tRNA) half
gttcagtggtagaattctcg

SEQ ID NO: 6771 - DNA, 12 bp, Artificial Sequence
  synthetic circulating small noncoding RNA (sncRNA) 5' transfer RNA (tRNA) half
cgaacccgcaac

SEQ ID NO: 6772 - DNA, 38 bp, Artificial Sequence
  synthetic circulating small noncoding RNA (sncRNA) 5' transfer RNA (tRNA) half
ttaaccgaaaggttggtggttcgagcccacccagggac

SEQ ID NO: 6773 - DNA, 37 bp, Artificial Sequence
  synthetic circulating small noncoding RNA (sncRNA) 5' transfer RNA (tRNA) half
gcgaaaggtccccggttcgaaaccgggcggaaacaac

SEQ ID NO: 6774 - DNA, 15 bp, Artificial Sequence
  synthetic circulating small noncoding RNA (sncRNA) 5' transfer RNA (tRNA) half
cgctcggccatcctg

SEQ ID NO: 6775 - DNA, 16 bp, Artificial Sequence
  synthetic circulating small noncoding RNA (sncRNA) 5' transfer RNA (tRNA) half
cacccggatttgaacc

SEQ ID NO: 6776 - DNA, 25 bp, Artificial Sequence
  synthetic circulating small noncoding RNA (sncRNA) 5' transfer RNA (tRNA) half
gctctaccaactgagctatcgaagg

SEQ ID NO: 6777 - DNA, 23 bp, Artificial Sequence
  synthetic circulating small noncoding RNA (sncRNA) 5' transfer RNA (tRNA) half
ttcgattccggctcgaaggactt

SEQ ID NO: 6778 - DNA, 20 bp, Artificial Sequence
  synthetic circulating small noncoding RNA (sncRNA) 5' transfer RNA (tRNA) half
tcggttcccggccaatgcat

SEQ ID NO: 6779 - DNA, 22 bp, Artificial Sequence
  synthetic circulating small noncoding RNA (sncRNA) 5' transfer RNA (tRNA) half
ggtctagtggttaggattcggc

SEQ ID NO: 6780 - DNA, 16 bp, Artificial Sequence
  synthetic circulating small noncoding RNA (sncRNA) 5' transfer RNA (tRNA) half
aggcgaacgtgataac

SEQ ID NO: 6781 - DNA, 29 bp, Artificial Sequence
  synthetic circulating small noncoding RNA (sncRNA) 5' transfer RNA (tRNA) half
ggctccatagctcaggggttagagcactg

SEQ ID NO: 6782 - DNA, 19 bp, Artificial Sequence
  synthetic circulating small noncoding RNA (sncRNA) 5' transfer RNA (tRNA) half
tggcagcggtgggattcga

SEQ ID NO: 6783 - DNA, 36 bp, Artificial Sequence
  synthetic circulating small noncoding RNA (sncRNA) 5' transfer RNA (tRNA) half
aaccaggaatcctaaccgctagaccatatgggagct

SEQ ID NO: 6784 - DNA, 16 bp, Artificial Sequence
  synthetic circulating small noncoding RNA (sncRNA) 5' transfer RNA (tRNA) half
aaggtccccggttcga

SEQ ID NO: 6785 - DNA, 16 bp, Artificial Sequence
  synthetic circulating small noncoding RNA (sncRNA) 5' transfer RNA (tRNA) half
tctgatgctctaccga

SEQ ID NO: 6786 - DNA, 15 bp, Artificial Sequence
  synthetic circulating small noncoding RNA (sncRNA) 5' transfer RNA (tRNA) half
tcaccgccgcggccc

SEQ ID NO: 6787 - DNA, 23 bp, Artificial Sequence
  synthetic circulating small noncoding RNA (sncRNA) 5' transfer RNA (tRNA) half
gttcgattcccggtcagggaagc

SEQ ID NO: 6788 - DNA, 34 bp, Artificial Sequence
  synthetic circulating small noncoding RNA (sncRNA) 5' transfer RNA (tRNA) half
gccccagcgagatttgaactcgcgacccctggtt

SEQ ID NO: 6789 - DNA, 37 bp, Artificial Sequence
  synthetic circulating small noncoding RNA (sncRNA) 5' transfer RNA (tRNA) half
gcgggaggcccgggttcgattcccggccaatgcacga

SEQ ID NO: 6790 - DNA, 18 bp, Artificial Sequence
  synthetic circulating small noncoding RNA (sncRNA) 5' transfer RNA (tRNA) half
cttccctgaccgggaatc

SEQ ID NO: 6791 - DNA, 23 bp, Artificial Sequence
  synthetic circulating small noncoding RNA (sncRNA) 5' transfer RNA (tRNA) half
aaccggggacctttcgcgtgtga

SEQ ID NO: 6792 - DNA, 26 bp, Artificial Sequence
  synthetic circulating small noncoding RNA (sncRNA) 5' transfer RNA (tRNA) half
ccgggagtcgaacccgggccgcctgg

SEQ ID NO: 6793 - DNA, 27 bp, Artificial Sequence
  synthetic circulating small noncoding RNA (sncRNA) 5' transfer RNA (tRNA) half
accaggaatcctaaccgctagaccata

SEQ ID NO: 6794 - DNA, 25 bp, Artificial Sequence
  synthetic circulating small noncoding RNA (sncRNA) 5' transfer RNA (tRNA) half
gtggttaggattcggcgctctcacc

SEQ ID NO: 6795 - DNA, 32 bp, Artificial Sequence
  synthetic circulating small noncoding RNA (sncRNA) 5' transfer RNA (tRNA) half
gcggcccgggttcgactcccggtgtgggaaca

SEQ ID NO: 6796 - DNA, 20 bp, Artificial Sequence
  synthetic circulating small noncoding RNA (sncRNA) 5' transfer RNA (tRNA) half
tagtggtatgattctcagtt

SEQ ID NO: 6797 - DNA, 12 bp, Artificial Sequence
  synthetic circulating small noncoding RNA (sncRNA) 5' transfer RNA (tRNA) half
ggcggggatact

SEQ ID NO: 6798 - DNA, 30 bp, Artificial Sequence
  synthetic circulating small noncoding RNA (sncRNA) 5' transfer RNA (tRNA) half
ttccgactccgccgggactcgaacccggaa

SEQ ID NO: 6799 - DNA, 17 bp, Artificial Sequence
  synthetic circulating small noncoding RNA (sncRNA) 5' transfer RNA (tRNA) half
tttccgcccggtttcga

SEQ ID NO: 6800 - DNA, 21 bp, Artificial Sequence
  synthetic circulating small noncoding RNA (sncRNA) 5' transfer RNA (tRNA) half
gttcaaatctcgctggggcct

SEQ ID NO: 6801 - DNA, 16 bp, Artificial Sequence
  synthetic circulating small noncoding RNA (sncRNA) 5' transfer RNA (tRNA) half
agtccagagtgctaac

SEQ ID NO: 6802 - DNA, 13 bp, Artificial Sequence
  synthetic circulating small noncoding RNA (sncRNA) 5' transfer RNA (tRNA) half
cccagcacgcttc

SEQ ID NO: 6803 - DNA, 14 bp, Artificial Sequence
  synthetic circulating small noncoding RNA (sncRNA) 5' transfer RNA (tRNA) half
gtccagagtgctaa

SEQ ID NO: 6804 - DNA, 32 bp, Artificial Sequence
  synthetic circulating small noncoding RNA (sncRNA) 5' transfer RNA (tRNA) half
gtctgatgctctaccaactgagctatccaggt

SEQ ID NO: 6805 - DNA, 32 bp, Artificial Sequence
  synthetic circulating small noncoding RNA (sncRNA) 5' transfer RNA (tRNA) half
ctcaaccacgaagggattcgaaccctcaatct

SEQ ID NO: 6806 - DNA, 13 bp, Artificial Sequence
  synthetic circulating small noncoding RNA (sncRNA) 5' transfer RNA (tRNA) half
aaccagggacctc

SEQ ID NO: 6807 - DNA, 19 bp, Artificial Sequence
  synthetic circulating small noncoding RNA (sncRNA) 5' transfer RNA (tRNA) half
gtctaggggtatgattctc

SEQ ID NO: 6808 - DNA, 41 bp, Artificial Sequence
  synthetic circulating small noncoding RNA (sncRNA) 5' transfer RNA (tRNA) half
agtctccccgtcggggaatcgaaccccggtctcccgcgtga

SEQ ID NO: 6809 - DNA, 32 bp, Artificial Sequence
  synthetic circulating small noncoding RNA (sncRNA) 5' transfer RNA (tRNA) half
cctccccgtcggggaatcgaaccccggtctcc

SEQ ID NO: 6810 - DNA, 17 bp, Artificial Sequence
  synthetic circulating small noncoding RNA (sncRNA) 5' transfer RNA (tRNA) half
agccagccaggagtcga

SEQ ID NO: 6811 - DNA, 29 bp, Artificial Sequence
  synthetic circulating small noncoding RNA (sncRNA) 5' transfer RNA (tRNA) half
cgtcggggaatcgaaccccggtctcccgc

SEQ ID NO: 6812 - DNA, 35 bp, Artificial Sequence
  synthetic circulating small noncoding RNA (sncRNA) 5' transfer RNA (tRNA) half
aaagcgccgaatcctagccactagaccaccaggga

SEQ ID NO: 6813 - DNA, 29 bp, Artificial Sequence
  synthetic circulating small noncoding RNA (sncRNA) 5' transfer RNA (tRNA) half
ggcccgtacggggatcgaacccgcgacct

SEQ ID NO: 6814 - DNA, 17 bp, Artificial Sequence
  synthetic circulating small noncoding RNA (sncRNA) 5' transfer RNA (tRNA) half
cagtcggtagagcatca

SEQ ID NO: 6815 - DNA, 16 bp, Artificial Sequence
  synthetic circulating small noncoding RNA (sncRNA) 5' transfer RNA (tRNA) half
accgggcgggaacaac

SEQ ID NO: 6816 - DNA, 32 bp, Artificial Sequence
  synthetic circulating small noncoding RNA (sncRNA) 5' transfer RNA (tRNA) half
cgagccagccaggagtcgaacctggaatcttc

SEQ ID NO: 6817 - DNA, 39 bp, Artificial Sequence
  synthetic circulating small noncoding RNA (sncRNA) 5' transfer RNA (tRNA) half
gagattaagagtctcatgctctaccgactgagctagccg

SEQ ID NO: 6818 - DNA, 13 bp, Artificial Sequence
  synthetic circulating small noncoding RNA (sncRNA) 5' transfer RNA (tRNA) half
cttagaccgctcg

SEQ ID NO: 6819 - DNA, 24 bp, Artificial Sequence
  synthetic circulating small noncoding RNA (sncRNA) 5' transfer RNA (tRNA) half
agtcaaatgctctaccactgagct

SEQ ID NO: 6820 - DNA, 38 bp, Artificial Sequence
  synthetic circulating small noncoding RNA (sncRNA) 5' transfer RNA (tRNA) half
tcagaagattgagggttcgaatcccttcgtggttggta

SEQ ID NO: 6821 - DNA, 16 bp, Artificial Sequence
  synthetic circulating small noncoding RNA (sncRNA) 5' transfer RNA (tRNA) half
gcgaacgtgataacca

SEQ ID NO: 6822 - DNA, 25 bp, Artificial Sequence
  synthetic circulating small noncoding RNA (sncRNA) 5' transfer RNA (tRNA) half
ccggatagctcagtcggtagagcat

SEQ ID NO: 6823 - DNA, 37 bp, Artificial Sequence
  synthetic circulating small noncoding RNA (sncRNA) 5' transfer RNA (tRNA) half
agtcccatgctctaccgactgagctagccgggcagat

SEQ ID NO: 6824 - DNA, 17 bp, Artificial Sequence
  synthetic circulating small noncoding RNA (sncRNA) 5' transfer RNA (tRNA) half
attccggctcgaaggac

SEQ ID NO: 6825 - DNA, 12 bp, Artificial Sequence
  synthetic circulating small noncoding RNA (sncRNA) 5' transfer RNA (tRNA) half
ggccgcggcggt

SEQ ID NO: 6826 - DNA, 25 bp, Artificial Sequence
  synthetic circulating small noncoding RNA (sncRNA) 5' transfer RNA (tRNA) half
aggcgaatgtgataaccactacact

SEQ ID NO: 6827 - DNA, 22 bp, Artificial Sequence
  synthetic circulating small noncoding RNA (sncRNA) 5' transfer RNA (tRNA) half
gtgtaatggttagcactctgga

SEQ ID NO: 6828 - DNA, 20 bp, Artificial Sequence
  synthetic circulating small noncoding RNA (sncRNA) 5' transfer RNA (tRNA) half
tcccggacgagccccacttt

SEQ ID NO: 6829 - DNA, 12 bp, Artificial Sequence
  synthetic circulating small noncoding RNA (sncRNA) 5' transfer RNA (tRNA) half
ccccgtcgggga

SEQ ID NO: 6830 - DNA, 13 bp, Artificial Sequence
  synthetic circulating small noncoding RNA (sncRNA) 5' transfer RNA (tRNA) half
tctcgctggggcc

SEQ ID NO: 6831 - DNA, 24 bp, Artificial Sequence
  synthetic circulating small noncoding RNA (sncRNA) 5' transfer RNA (tRNA) half
gcatgggtggttcagtggtagaat

SEQ ID NO: 6832 - DNA, 28 bp, Artificial Sequence
  synthetic circulating small noncoding RNA (sncRNA) 5' transfer RNA (tRNA) half
acccgggccgcggcggtgagagcgccga

SEQ ID NO: 6833 - DNA, 10 bp, Artificial Sequence
  synthetic circulating small noncoding RNA (sncRNA) 5' transfer RNA (tRNA) half
ccggacgagc

SEQ ID NO: 6834 - DNA, 20 bp, Artificial Sequence
  synthetic circulating small noncoding RNA (sncRNA) 5' transfer RNA (tRNA) half
ctagcggttaggattcctgg

SEQ ID NO: 6835 - DNA, 11 bp, Artificial Sequence
  synthetic circulating small noncoding RNA (sncRNA) 5' transfer RNA (tRNA) half
ccgacggggag

SEQ ID NO: 6836 - DNA, 24 bp, Artificial Sequence
  synthetic circulating small noncoding RNA (sncRNA) 5' transfer RNA (tRNA) half
tgtagtggttatcacgttcgcctc

SEQ ID NO: 6837 - DNA, 37 bp, Artificial Sequence
  synthetic circulating small noncoding RNA (sncRNA) 5' transfer RNA (tRNA) half
ccgcagcaacctcggttcgaatccgagtcacggcatt

SEQ ID NO: 6838 - DNA, 16 bp, Artificial Sequence
  synthetic circulating small noncoding RNA (sncRNA) 5' transfer RNA (tRNA) half
gcccgaacagggactt

SEQ ID NO: 6839 - DNA, 18 bp, Artificial Sequence
  synthetic circulating small noncoding RNA (sncRNA) 5' transfer RNA (tRNA) half
gtgacaggcggggatact

SEQ ID NO: 6840 - DNA, 23 bp, Artificial Sequence
  synthetic circulating small noncoding RNA (sncRNA) 5' transfer RNA (tRNA) half
tggtggagatgccggggatcgaa

SEQ ID NO: 6841 - DNA, 14 bp, Artificial Sequence
  synthetic circulating small noncoding RNA (sncRNA) 5' transfer RNA (tRNA) half
cagagtactaacca

SEQ ID NO: 6842 - DNA, 20 bp, Artificial Sequence
  synthetic circulating small noncoding RNA (sncRNA) 5' transfer RNA (tRNA) half
tggtctggggtgcaggcttc

SEQ ID NO: 6843 - DNA, 28 bp, Artificial Sequence
  synthetic circulating small noncoding RNA (sncRNA) 5' transfer RNA (tRNA) half
gcaagaattctaccactgaaccaccaat

SEQ ID NO: 6844 - DNA, 18 bp, Artificial Sequence
  synthetic circulating small noncoding RNA (sncRNA) 5' transfer RNA (tRNA) half
ccattcttgcgacccggg

SEQ ID NO: 6845 - DNA, 12 bp, Artificial Sequence
  synthetic circulating small noncoding RNA (sncRNA) 5' transfer RNA (tRNA) half
ccttcgagccgg

SEQ ID NO: 6846 - DNA, 35 bp, Artificial Sequence
  synthetic circulating small noncoding RNA (sncRNA) 5' transfer RNA (tRNA) half
acccgggccgcggcggtgagagcgccgaatcctaa

SEQ ID NO: 6847 - DNA, 37 bp, Artificial Sequence
  synthetic circulating small noncoding RNA (sncRNA) 5' transfer RNA (tRNA) half
atgaccccgacgtgattcgaacacgcagccttctgat

SEQ ID NO: 6848 - DNA, 17 bp, Artificial Sequence
  synthetic circulating small noncoding RNA (sncRNA) 5' transfer RNA (tRNA) half
tatgattctcgcttagg

SEQ ID NO: 6849 - DNA, 29 bp, Artificial Sequence
  synthetic circulating small noncoding RNA (sncRNA) 5' transfer RNA (tRNA) half
tggtggtctagtggttaggattcggcgct

SEQ ID NO: 6850 - DNA, 29 bp, Artificial Sequence
  synthetic circulating small noncoding RNA (sncRNA) 5' transfer RNA (tRNA) half
actctggactctgaatccagcgatccgag

SEQ ID NO: 6851 - DNA, 23 bp, Artificial Sequence
  synthetic circulating small noncoding RNA (sncRNA) 5' transfer RNA (tRNA) half
cccataccgggagtcgaacccgg

SEQ ID NO: 6852 - DNA, 22 bp, Artificial Sequence
  synthetic circulating small noncoding RNA (sncRNA) 5' transfer RNA (tRNA) half
taggttccaccgagatttgaac

SEQ ID NO: 6853 - DNA, 19 bp, Artificial Sequence
  synthetic circulating small noncoding RNA (sncRNA) 5' transfer RNA (tRNA) half
aggtccccggttcgaaacc

SEQ ID NO: 6854 - DNA, 12 bp, Artificial Sequence
  synthetic circulating small noncoding RNA (sncRNA) 5' transfer RNA (tRNA) half
gaacccacgacc

SEQ ID NO: 6855 - DNA, 24 bp, Artificial Sequence
  synthetic circulating small noncoding RNA (sncRNA) 5' transfer RNA (tRNA) half
agggcccggatagctcagtcggta

SEQ ID NO: 6856 - DNA, 16 bp, Artificial Sequence
  synthetic circulating small noncoding RNA (sncRNA) 5' transfer RNA (tRNA) half
agggttcgaacctgcg

SEQ ID NO: 6857 - DNA, 23 bp, Artificial Sequence
  synthetic circulating small noncoding RNA (sncRNA) 5' transfer RNA (tRNA) half
gagtcccatgctctaccgactga

SEQ ID NO: 6858 - DNA, 15 bp, Artificial Sequence
  synthetic circulating small noncoding RNA (sncRNA) 5' transfer RNA (tRNA) half
ccggctagctcagtc

SEQ ID NO: 6859 - DNA, 13 bp, Artificial Sequence
  synthetic circulating small noncoding RNA (sncRNA) 5' transfer RNA (tRNA) half
atgattctcgctt

SEQ ID NO: 6860 - DNA, 28 bp, Artificial Sequence
  synthetic circulating small noncoding RNA (sncRNA) 5' transfer RNA (tRNA) half
ctcggatcgctggattcagagtccagag

SEQ ID NO: 6861 - DNA, 27 bp, Artificial Sequence
  synthetic circulating small noncoding RNA (sncRNA) 5' transfer RNA (tRNA) half
ccggatgatcctcagtggtctggggtg

SEQ ID NO: 6862 - DNA, 22 bp, Artificial Sequence
  synthetic circulating small noncoding RNA (sncRNA) 5' transfer RNA (tRNA) half
tcgaacccgggccgcggcggtg

SEQ ID NO: 6863 - DNA, 19 bp, Artificial Sequence
  synthetic circulating small noncoding RNA (sncRNA) 5' transfer RNA (tRNA) half
agcggttatcacgtctgct

SEQ ID NO: 6864 - DNA, 16 bp, Artificial Sequence
  synthetic circulating small noncoding RNA (sncRNA) 5' transfer RNA (tRNA) half
gttgcgccacgaggtc

SEQ ID NO: 6865 - DNA, 22 bp, Artificial Sequence
  synthetic circulating small noncoding RNA (sncRNA) 5' transfer RNA (tRNA) half
gtgagagcgccgaatcctaacc

SEQ ID NO: 6866 - DNA, 33 bp, Artificial Sequence
  synthetic circulating small noncoding RNA (sncRNA) 5' transfer RNA (tRNA) half
ccccgtgtgaggatcgaactcacgaccttcaga

SEQ ID NO: 6867 - DNA, 22 bp, Artificial Sequence
  synthetic circulating small noncoding RNA (sncRNA) 5' transfer RNA (tRNA) half
ttcccataccgggagtcgaacc

SEQ ID NO: 6868 - DNA, 13 bp, Artificial Sequence
  synthetic circulating small noncoding RNA (sncRNA) 5' transfer RNA (tRNA) half
tcgaaaccgggcg

SEQ ID NO: 6869 - DNA, 16 bp, Artificial Sequence
  synthetic circulating small noncoding RNA (sncRNA) 5' transfer RNA (tRNA) half
tgtttccgcccggttt

SEQ ID NO: 6870 - DNA, 22 bp, Artificial Sequence
  synthetic circulating small noncoding RNA (sncRNA) 5' transfer RNA (tRNA) half
attcccggccaatgcactctct

SEQ ID NO: 6871 - DNA, 21 bp, Artificial Sequence
  synthetic circulating small noncoding RNA (sncRNA) 5' transfer RNA (tRNA) half
aggcgagaattctaccattga

SEQ ID NO: 6872 - DNA, 26 bp, Artificial Sequence
  synthetic circulating small noncoding RNA (sncRNA) 5' transfer RNA (tRNA) half
tggtggtctagtggttaggattcggc

SEQ ID NO: 6873 - DNA, 34 bp, Artificial Sequence
  synthetic circulating small noncoding RNA (sncRNA) 5' transfer RNA (tRNA) half
tcgagccagccaggagtcgaacctagaatcttct

SEQ ID NO: 6874 - DNA, 14 bp, Artificial Sequence
  synthetic circulating small noncoding RNA (sncRNA) 5' transfer RNA (tRNA) half
acccacgcctccag

SEQ ID NO: 6875 - DNA, 15 bp, Artificial Sequence
  synthetic circulating small noncoding RNA (sncRNA) 5' transfer RNA (tRNA) half
agaggtcccgggttc

SEQ ID NO: 6876 - DNA, 13 bp, Artificial Sequence
  synthetic circulating small noncoding RNA (sncRNA) 5' transfer RNA (tRNA) half
aatcgaaccccgg

SEQ ID NO: 6877 - DNA, 29 bp, Artificial Sequence
  synthetic circulating small noncoding RNA (sncRNA) 5' transfer RNA (tRNA) half
ccgggcctcccgcgtggcaggcgagaatt

SEQ ID NO: 6878 - DNA, 35 bp, Artificial Sequence
  synthetic circulating small noncoding RNA (sncRNA) 5' transfer RNA (tRNA) half
atcagaagattccaggttcgactcctggctggctc

SEQ ID NO: 6879 - DNA, 17 bp, Artificial Sequence
  synthetic circulating small noncoding RNA (sncRNA) 5' transfer RNA (tRNA) half
gtgagagcgccgaatcc

SEQ ID NO: 6880 - DNA, 39 bp, Artificial Sequence
  synthetic circulating small noncoding RNA (sncRNA) 5' transfer RNA (tRNA) half
gtggttaggattcggcgctctcaccgccgcggcccgggt

SEQ ID NO: 6881 - DNA, 19 bp, Artificial Sequence
  synthetic circulating small noncoding RNA (sncRNA) 5' transfer RNA (tRNA) half
cggtgagagcgccgaatcc

SEQ ID NO: 6882 - DNA, 14 bp, Artificial Sequence
  synthetic circulating small noncoding RNA (sncRNA) 5' transfer RNA (tRNA) half
gaaccagcgaccta

SEQ ID NO: 6883 - DNA, 11 bp, Artificial Sequence
  synthetic circulating small noncoding RNA (sncRNA) 5' transfer RNA (tRNA) half
accccgacgtg

SEQ ID NO: 6884 - DNA, 13 bp, Artificial Sequence
  synthetic circulating small noncoding RNA (sncRNA) 5' transfer RNA (tRNA) half
gaaccagcgacct

SEQ ID NO: 6885 - DNA, 27 bp, Artificial Sequence
  synthetic circulating small noncoding RNA (sncRNA) 5' transfer RNA (tRNA) half
tggtggtctagtggttaggattcggcg

SEQ ID NO: 6886 - DNA, 33 bp, Artificial Sequence
  synthetic circulating small noncoding RNA (sncRNA) 5' transfer RNA (tRNA) half
cagaagattccaggttcgactcctggctggctc

SEQ ID NO: 6887 - DNA, 24 bp, Artificial Sequence
  synthetic circulating small noncoding RNA (sncRNA) 5' transfer RNA (tRNA) half
tctgagggtccagggttcaagtcc

SEQ ID NO: 6888 - DNA, 12 bp, Artificial Sequence
  synthetic circulating small noncoding RNA (sncRNA) 5' transfer RNA (tRNA) half
cggggaatcgaa

SEQ ID NO: 6889 - DNA, 12 bp, Artificial Sequence
  synthetic circulating small noncoding RNA (sncRNA) 5' transfer RNA (tRNA) half
agctaaccggcc

SEQ ID NO: 6890 - DNA, 15 bp, Artificial Sequence
  synthetic circulating small noncoding RNA (sncRNA) 5' transfer RNA (tRNA) half
cgaacccacaacctt

SEQ ID NO: 6891 - DNA, 22 bp, Artificial Sequence
  synthetic circulating small noncoding RNA (sncRNA) 5' transfer RNA (tRNA) half
tggttaggattcggcgctctca

SEQ ID NO: 6892 - DNA, 16 bp, Artificial Sequence
  synthetic circulating small noncoding RNA (sncRNA) 5' transfer RNA (tRNA) half
ggggttagtactctgc

SEQ ID NO: 6893 - DNA, 32 bp, Artificial Sequence
  synthetic circulating small noncoding RNA (sncRNA) 5' transfer RNA (tRNA) half
agcgatccgagttcaaatctcggtgggacctc

SEQ ID NO: 6894 - DNA, 32 bp, Artificial Sequence
  synthetic circulating small noncoding RNA (sncRNA) 5' transfer RNA (tRNA) half
cgcagtgccttagactgctcggccatcctgac

SEQ ID NO: 6895 - DNA, 29 bp, Artificial Sequence
  synthetic circulating small noncoding RNA (sncRNA) 5' transfer RNA (tRNA) half
gttcccataccgggagtcgaacccgggcc

SEQ ID NO: 6896 - DNA, 28 bp, Artificial Sequence
  synthetic circulating small noncoding RNA (sncRNA) 5' transfer RNA (tRNA) half
gccccgtgtgaggatcgaactcacgacc

SEQ ID NO: 6897 - DNA, 32 bp, Artificial Sequence
  synthetic circulating small noncoding RNA (sncRNA) 5' transfer RNA (tRNA) half
tgtgcattggccgggaatcgaacccgggcctc

SEQ ID NO: 6898 - DNA, 17 bp, Artificial Sequence
  synthetic circulating small noncoding RNA (sncRNA) 5' transfer RNA (tRNA) half
gactgagctagccgggc

SEQ ID NO: 6899 - DNA, 16 bp, Artificial Sequence
  synthetic circulating small noncoding RNA (sncRNA) 5' transfer RNA (tRNA) half
tagaattctcgcctgc

SEQ ID NO: 6900 - DNA, 18 bp, Artificial Sequence
  synthetic circulating small noncoding RNA (sncRNA) 5' transfer RNA (tRNA) half
tctcaccgccgcggcccg

SEQ ID NO: 6901 - DNA, 23 bp, Artificial Sequence
  synthetic circulating small noncoding RNA (sncRNA) 5' transfer RNA (tRNA) half
ccgggttcgattcccgggcggcg

SEQ ID NO: 6902 - DNA, 28 bp, Artificial Sequence
  synthetic circulating small noncoding RNA (sncRNA) 5' transfer RNA (tRNA) half
gatgctctaccgactgagctatccaggc

SEQ ID NO: 6903 - DNA, 32 bp, Artificial Sequence
  synthetic circulating small noncoding RNA (sncRNA) 5' transfer RNA (tRNA) half
accaggagtggggttcgaacccacgcagacat

SEQ ID NO: 6904 - DNA, 21 bp, Artificial Sequence
  synthetic circulating small noncoding RNA (sncRNA) 5' transfer RNA (tRNA) half
ccagagtgctagccattacac

SEQ ID NO: 6905 - DNA, 10 bp, Artificial Sequence
  synthetic circulating small noncoding RNA (sncRNA) 5' transfer RNA (tRNA) half
acccgcgacc

SEQ ID NO: 6906 - DNA, 32 bp, Artificial Sequence
  synthetic circulating small noncoding RNA (sncRNA) 5' transfer RNA (tRNA) half
ggcctcgtggcgcaacggtagcgcgtctgact

SEQ ID NO: 6907 - DNA, 31 bp, Artificial Sequence
  synthetic circulating small noncoding RNA (sncRNA) 5' transfer RNA (tRNA) half
ccaggagtggggttcgaacccacgcagacat

SEQ ID NO: 6908 - DNA, 24 bp, Artificial Sequence
  synthetic circulating small noncoding RNA (sncRNA) 5' transfer RNA (tRNA) half
cgtgacaggcggggatactcacca

SEQ ID NO: 6909 - DNA, 15 bp, Artificial Sequence
  synthetic circulating small noncoding RNA (sncRNA) 5' transfer RNA (tRNA) half
gtggcagcggtggga

SEQ ID NO: 6910 - DNA, 14 bp, Artificial Sequence
  synthetic circulating small noncoding RNA (sncRNA) 5' transfer RNA (tRNA) half
tgtcagaagtggga

SEQ ID NO: 6911 - DNA, 12 bp, Artificial Sequence
  synthetic circulating small noncoding RNA (sncRNA) 5' transfer RNA (tRNA) half
tagaattctcgc

SEQ ID NO: 6912 - DNA, 19 bp, Artificial Sequence
  synthetic circulating small noncoding RNA (sncRNA) 5' transfer RNA (tRNA) half
tgccgtcacgaacaggatt

SEQ ID NO: 6913 - DNA, 32 bp, Artificial Sequence
  synthetic circulating small noncoding RNA (sncRNA) 5' transfer RNA (tRNA) half
ggattgtgggttcgagtcccatctgggtcgca

SEQ ID NO: 6914 - DNA, 11 bp, Artificial Sequence
  synthetic circulating small noncoding RNA (sncRNA) 5' transfer RNA (tRNA) half
aggttccaccg

SEQ ID NO: 6915 - DNA, 27 bp, Artificial Sequence
  synthetic circulating small noncoding RNA (sncRNA) 5' transfer RNA (tRNA) half
tggtagaattctcgcctgccacgcggg

SEQ ID NO: 6916 - DNA, 17 bp, Artificial Sequence
  synthetic circulating small noncoding RNA (sncRNA) 5' transfer RNA (tRNA) half
cgattcccgggcggcgc

SEQ ID NO: 6917 - DNA, 39 bp, Artificial Sequence
  synthetic circulating small noncoding RNA (sncRNA) 5' transfer RNA (tRNA) half
tgccccctctgaggttcgaactcaggaccttcagattat

SEQ ID NO: 6918 - DNA, 19 bp, Artificial Sequence
  synthetic circulating small noncoding RNA (sncRNA) 5' transfer RNA (tRNA) half
gttcgattcccggtcaggg

SEQ ID NO: 6919 - DNA, 35 bp, Artificial Sequence
  synthetic circulating small noncoding RNA (sncRNA) 5' transfer RNA (tRNA) half
aggcggcccgggttcgactcccggtgtgggaaact

SEQ ID NO: 6920 - DNA, 20 bp, Artificial Sequence
  synthetic circulating small noncoding RNA (sncRNA) 5' transfer RNA (tRNA) half
gaactcggatcgctggattc

SEQ ID NO: 6921 - DNA, 18 bp, Artificial Sequence
  synthetic circulating small noncoding RNA (sncRNA) 5' transfer RNA (tRNA) half
accggggacctttcgcgt

SEQ ID NO: 6922 - DNA, 24 bp, Artificial Sequence
  synthetic circulating small noncoding RNA (sncRNA) 5' transfer RNA (tRNA) half
ccaggaatcctaaccgctagacca

SEQ ID NO: 6923 - DNA, 20 bp, Artificial Sequence
  synthetic circulating small noncoding RNA (sncRNA) 5' transfer RNA (tRNA) half
tgctaataacgccaaggtcg

SEQ ID NO: 6924 - DNA, 20 bp, Artificial Sequence
  synthetic circulating small noncoding RNA (sncRNA) 5' transfer RNA (tRNA) half
aatggttagcactctggact

SEQ ID NO: 6925 - DNA, 34 bp, Artificial Sequence
  synthetic circulating small noncoding RNA (sncRNA) 5' transfer RNA (tRNA) half
cgccgtgatcgtatagtggttagtactctgcgtt

SEQ ID NO: 6926 - DNA, 26 bp, Artificial Sequence
  synthetic circulating small noncoding RNA (sncRNA) 5' transfer RNA (tRNA) half
tcgtatagtggttagtactctgcgtt

SEQ ID NO: 6927 - DNA, 21 bp, Artificial Sequence
  synthetic circulating small noncoding RNA (sncRNA) 5' transfer RNA (tRNA) half
ttggagatgccggggatcgaa

SEQ ID NO: 6928 - DNA, 14 bp, Artificial Sequence
  synthetic circulating small noncoding RNA (sncRNA) 5' transfer RNA (tRNA) half
ccgcccggtttcga

SEQ ID NO: 6929 - DNA, 19 bp, Artificial Sequence
  synthetic circulating small noncoding RNA (sncRNA) 5' transfer RNA (tRNA) half
gcactctggactctgaatc

SEQ ID NO: 6930 - DNA, 15 bp, Artificial Sequence
  synthetic circulating small noncoding RNA (sncRNA) 5' transfer RNA (tRNA) half
taatggttagcactc

SEQ ID NO: 6931 - DNA, 32 bp, Artificial Sequence
  synthetic circulating small noncoding RNA (sncRNA) 5' transfer RNA (tRNA) half
gtccaacgccttaaccactcggccatcacagc

SEQ ID NO: 6932 - DNA, 17 bp, Artificial Sequence
  synthetic circulating small noncoding RNA (sncRNA) 5' transfer RNA (tRNA) half
cagaagattgcaggttc

SEQ ID NO: 6933 - DNA, 17 bp, Artificial Sequence
  synthetic circulating small noncoding RNA (sncRNA) 5' transfer RNA (tRNA) half
tcccacaccgggagtcg

SEQ ID NO: 6934 - DNA, 21 bp, Artificial Sequence
  synthetic circulating small noncoding RNA (sncRNA) 5' transfer RNA (tRNA) half
ctggtgtagtggtatcatgca

SEQ ID NO: 6935 - DNA, 24 bp, Artificial Sequence
  synthetic circulating small noncoding RNA (sncRNA) 5' transfer RNA (tRNA) half
ttggtctaggggtatgattctcgc

SEQ ID NO: 6936 - DNA, 18 bp, Artificial Sequence
  synthetic circulating small noncoding RNA (sncRNA) 5' transfer RNA (tRNA) half
attcttgcgacccgggtt

SEQ ID NO: 6937 - DNA, 25 bp, Artificial Sequence
  synthetic circulating small noncoding RNA (sncRNA) 5' transfer RNA (tRNA) half
tggttaggattcggcgctctcaccg

SEQ ID NO: 6938 - DNA, 22 bp, Artificial Sequence
  synthetic circulating small noncoding RNA (sncRNA) 5' transfer RNA (tRNA) half
gggggattagctcaaatggtag

SEQ ID NO: 6939 - DNA, 11 bp, Artificial Sequence
  synthetic circulating small noncoding RNA (sncRNA) 5' transfer RNA (tRNA) half
ggagtcgaacc

SEQ ID NO: 6940 - DNA, 20 bp, Artificial Sequence
  synthetic circulating small noncoding RNA (sncRNA) 5' transfer RNA (tRNA) half
ttcccataccgggagtcgaa

SEQ ID NO: 6941 - DNA, 19 bp, Artificial Sequence
  synthetic circulating small noncoding RNA (sncRNA) 5' transfer RNA (tRNA) half
cagacgacgaggatgggat

SEQ ID NO: 6942 - DNA, 13 bp, Artificial Sequence
  synthetic circulating small noncoding RNA (sncRNA) 5' transfer RNA (tRNA) half
caggcggggatac

SEQ ID NO: 6943 - DNA, 12 bp, Artificial Sequence
  synthetic circulating small noncoding RNA (sncRNA) 5' transfer RNA (tRNA) half
cctgccgcggtc

SEQ ID NO: 6944 - DNA, 18 bp, Artificial Sequence
  synthetic circulating small noncoding RNA (sncRNA) 5' transfer RNA (tRNA) half
tcgatccccgtacgggcc

SEQ ID NO: 6945 - DNA, 32 bp, Artificial Sequence
  synthetic circulating small noncoding RNA (sncRNA) 5' transfer RNA (tRNA) half
cgagccagccaggagtcgaacctagaatcttc

SEQ ID NO: 6946 - DNA, 34 bp, Artificial Sequence
  synthetic circulating small noncoding RNA (sncRNA) 5' transfer RNA (tRNA) half
cttccctggtggtctagtggttaggattcggcgc

SEQ ID NO: 6947 - DNA, 25 bp, Artificial Sequence
  synthetic circulating small noncoding RNA (sncRNA) 5' transfer RNA (tRNA) half
cagagtactaaccactatacgatca

SEQ ID NO: 6948 - DNA, 18 bp, Artificial Sequence
  synthetic circulating small noncoding RNA (sncRNA) 5' transfer RNA (tRNA) half
ggcgagaattctaccatt

SEQ ID NO: 6949 - DNA, 31 bp, Artificial Sequence
  synthetic circulating small noncoding RNA (sncRNA) 5' transfer RNA (tRNA) half
ctcatgctctaccgactgagctagccgggcg

SEQ ID NO: 6950 - DNA, 29 bp, Artificial Sequence
  synthetic circulating small noncoding RNA (sncRNA) 5' transfer RNA (tRNA) half
ttgtgggttcgagtcccatctgggtcgca

SEQ ID NO: 6951 - DNA, 28 bp, Artificial Sequence
  synthetic circulating small noncoding RNA (sncRNA) 5' transfer RNA (tRNA) half
tggtagaattctcgcctgccacgcggga

SEQ ID NO: 6952 - DNA, 30 bp, Artificial Sequence
  synthetic circulating small noncoding RNA (sncRNA) 5' transfer RNA (tRNA) half
ggcggcccgggttcgactcccggtatggga

SEQ ID NO: 6953 - DNA, 28 bp, Artificial Sequence
  synthetic circulating small noncoding RNA (sncRNA) 5' transfer RNA (tRNA) half
ccaggcggcccgggttcgactcccggta

SEQ ID NO: 6954 - DNA, 32 bp, Artificial Sequence
  synthetic circulating small noncoding RNA (sncRNA) 5' transfer RNA (tRNA) half
tcagggtcgtgggttcgagccccacgttgggc

SEQ ID NO: 6955 - DNA, 25 bp, Artificial Sequence
  synthetic circulating small noncoding RNA (sncRNA) 5' transfer RNA (tRNA) half
ggtagtgtggccgagcggtctaagg

SEQ ID NO: 6956 - DNA, 37 bp, Artificial Sequence
  synthetic circulating small noncoding RNA (sncRNA) 5' transfer RNA (tRNA) half
aaacaggagatcctgggttcgaatcccagcggggcct

SEQ ID NO: 6957 - DNA, 21 bp, Artificial Sequence
  synthetic circulating small noncoding RNA (sncRNA) 5' transfer RNA (tRNA) half
agttcaaatctcggtggaacc

SEQ ID NO: 6958 - DNA, 31 bp, Artificial Sequence
  synthetic circulating small noncoding RNA (sncRNA) 5' transfer RNA (tRNA) half
cggcccgggttcgactcccggtatgggaaca

SEQ ID NO: 6959 - DNA, 18 bp, Artificial Sequence
  synthetic circulating small noncoding RNA (sncRNA) 5' transfer RNA (tRNA) half
gaaccggggacctttcgc

SEQ ID NO: 6960 - DNA, 23 bp, Artificial Sequence
  synthetic circulating small noncoding RNA (sncRNA) 5' transfer RNA (tRNA) half
aaacaaagcctccgatagcagag

SEQ ID NO: 6961 - DNA, 23 bp, Artificial Sequence
  synthetic circulating small noncoding RNA (sncRNA) 5' transfer RNA (tRNA) half
aaaaccaggaatcctaaccgcta

SEQ ID NO: 6962 - DNA, 22 bp, Artificial Sequence
  synthetic circulating small noncoding RNA (sncRNA) 5' transfer RNA (tRNA) half
ctctcaccgccgcggcccgggt

SEQ ID NO: 6963 - DNA, 20 bp, Artificial Sequence
  synthetic circulating small noncoding RNA (sncRNA) 5' transfer RNA (tRNA) half
ttcgatccccggcatctcca

SEQ ID NO: 6964 - DNA, 32 bp, Artificial Sequence
  synthetic circulating small noncoding RNA (sncRNA) 5' transfer RNA (tRNA) half
aaaccaggaatcctaaccgctagaccatatgg

SEQ ID NO: 6965 - DNA, 10 bp, Artificial Sequence
  synthetic circulating small noncoding RNA (sncRNA) 5' transfer RNA (tRNA) half
cccggttcga

SEQ ID NO: 6966 - DNA, 12 bp, Artificial Sequence
  synthetic circulating small noncoding RNA (sncRNA) 5' transfer RNA (tRNA) half
ggccccagcgag

SEQ ID NO: 6967 - DNA, 37 bp, Artificial Sequence
  synthetic circulating small noncoding RNA (sncRNA) 5' transfer RNA (tRNA) half
ggttagcactctggactctgaatccagcgatccgagt

SEQ ID NO: 6968 - DNA, 18 bp, Artificial Sequence
  synthetic circulating small noncoding RNA (sncRNA) 5' transfer RNA (tRNA) half
tctaccgactgagctatc

SEQ ID NO: 6969 - DNA, 15 bp, Artificial Sequence
  synthetic circulating small noncoding RNA (sncRNA) 5' transfer RNA (tRNA) half
cggtctaaggcgctg

SEQ ID NO: 6970 - DNA, 30 bp, Artificial Sequence
  synthetic circulating small noncoding RNA (sncRNA) 5' transfer RNA (tRNA) half
cagagtggcgcagcggaagcgtgctgggcc

SEQ ID NO: 6971 - DNA, 25 bp, Artificial Sequence
  synthetic circulating small noncoding RNA (sncRNA) 5' transfer RNA (tRNA) half
ccccggtctcccgcgtgacaggcgg

SEQ ID NO: 6972 - DNA, 38 bp, Artificial Sequence
  synthetic circulating small noncoding RNA (sncRNA) 5' transfer RNA (tRNA) half
gtgtgaggcgaacgtgataaccactacactacggaaac

SEQ ID NO: 6973 - DNA, 27 bp, Artificial Sequence
  synthetic circulating small noncoding RNA (sncRNA) 5' transfer RNA (tRNA) half
tcccatgctctaccgactgagctagcc

SEQ ID NO: 6974 - DNA, 19 bp, Artificial Sequence
  synthetic circulating small noncoding RNA (sncRNA) 5' transfer RNA (tRNA) half
gttcgagccccagtggaac

SEQ ID NO: 6975 - DNA, 23 bp, Artificial Sequence
  synthetic circulating small noncoding RNA (sncRNA) 5' transfer RNA (tRNA) half
tggtctagcggttaggattcctg

SEQ ID NO: 6976 - DNA, 31 bp, Artificial Sequence
  synthetic circulating small noncoding RNA (sncRNA) 5' transfer RNA (tRNA) half
gcgatccgagttcaaatctcggtggaacctg

SEQ ID NO: 6977 - DNA, 27 bp, Artificial Sequence
  synthetic circulating small noncoding RNA (sncRNA) 5' transfer RNA (tRNA) half
gagccagccaggagtcgaacctagaat

SEQ ID NO: 6978 - DNA, 25 bp, Artificial Sequence
  synthetic circulating small noncoding RNA (sncRNA) 5' transfer RNA (tRNA) half
ccttagaccgctcggccacgctacc

SEQ ID NO: 6979 - DNA, 16 bp, Artificial Sequence
  synthetic circulating small noncoding RNA (sncRNA) 5' transfer RNA (tRNA) half
ccaggaatcctaaccg

SEQ ID NO: 6980 - DNA, 20 bp, Artificial Sequence
  synthetic circulating small noncoding RNA (sncRNA) 5' transfer RNA (tRNA) half
accgggcggaaacatatctt

SEQ ID NO: 6981 - DNA, 25 bp, Artificial Sequence
  synthetic circulating small noncoding RNA (sncRNA) 5' transfer RNA (tRNA) half
gtatagtggttagtactctgcgttg

SEQ ID NO: 6982 - DNA, 33 bp, Artificial Sequence
  synthetic circulating small noncoding RNA (sncRNA) 5' transfer RNA (tRNA) half
gccgaaacccgggatcgaaccagggacctttag

SEQ ID NO: 6983 - DNA, 30 bp, Artificial Sequence
  synthetic circulating small noncoding RNA (sncRNA) 5' transfer RNA (tRNA) half
ccccgacgtgattcgaacacgcagccttct

SEQ ID NO: 6984 - DNA, 33 bp, Artificial Sequence
  synthetic circulating small noncoding RNA (sncRNA) 5' transfer RNA (tRNA) half
gcggcccgggttcgactcccggtatgggaacag

SEQ ID NO: 6985 - DNA, 20 bp, Artificial Sequence
  synthetic circulating small noncoding RNA (sncRNA) 5' transfer RNA (tRNA) half
atcccggacgagccccatct

SEQ ID NO: 6986 - DNA, 11 bp, Artificial Sequence
  synthetic circulating small noncoding RNA (sncRNA) 5' transfer RNA (tRNA) half
cccggacgagc

SEQ ID NO: 6987 - DNA, 32 bp, Artificial Sequence
  synthetic circulating small noncoding RNA (sncRNA) 5' transfer RNA (tRNA) half
tgggtggttcagtggtagaattctcgcctgcc

SEQ ID NO: 6988 - DNA, 21 bp, Artificial Sequence
  synthetic circulating small noncoding RNA (sncRNA) 5' transfer RNA (tRNA) half
caaatggtagagcgctcgctt

SEQ ID NO: 6989 - DNA, 15 bp, Artificial Sequence
  synthetic circulating small noncoding RNA (sncRNA) 5' transfer RNA (tRNA) half
caatgccttatccat

SEQ ID NO: 6990 - DNA, 18 bp, Artificial Sequence
  synthetic circulating small noncoding RNA (sncRNA) 5' transfer RNA (tRNA) half
cactctggactctgaatc

SEQ ID NO: 6991 - DNA, 22 bp, Artificial Sequence
  synthetic circulating small noncoding RNA (sncRNA) 5' transfer RNA (tRNA) half
tcccatatggtctagcggttag

SEQ ID NO: 6992 - DNA, 22 bp, Artificial Sequence
  synthetic circulating small noncoding RNA (sncRNA) 5' transfer RNA (tRNA) half
aacccacgcagacatatgtcca

SEQ ID NO: 6993 - DNA, 27 bp, Artificial Sequence
  synthetic circulating small noncoding RNA (sncRNA) 5' transfer RNA (tRNA) half
ccaggcggcccgggttcgactcccggt

SEQ ID NO: 6994 - DNA, 33 bp, Artificial Sequence
  synthetic circulating small noncoding RNA (sncRNA) 5' transfer RNA (tRNA) half
aggcggcccgggttcgactcccggtatgggaac

SEQ ID NO: 6995 - DNA, 34 bp, Artificial Sequence
  synthetic circulating small noncoding RNA (sncRNA) 5' transfer RNA (tRNA) half
gcctggatagctcagtcggtagagcatcagactt

SEQ ID NO: 6996 - DNA, 18 bp, Artificial Sequence
  synthetic circulating small noncoding RNA (sncRNA) 5' transfer RNA (tRNA) half
agtccagagtgctaacca

SEQ ID NO: 6997 - DNA, 20 bp, Artificial Sequence
  synthetic circulating small noncoding RNA (sncRNA) 5' transfer RNA (tRNA) half
caggatggccgagcggtcta

SEQ ID NO: 6998 - DNA, 30 bp, Artificial Sequence
  synthetic circulating small noncoding RNA (sncRNA) 5' transfer RNA (tRNA) half
acccacgcgtgcaaagcacaatggattagc

SEQ ID NO: 6999 - DNA, 19 bp, Artificial Sequence
  synthetic circulating small noncoding RNA (sncRNA) 5' transfer RNA (tRNA) half
aggatggccgagcggtcta

SEQ ID NO: 7000 - DNA, 22 bp, Artificial Sequence
  synthetic circulating small noncoding RNA (sncRNA) 5' transfer RNA (tRNA) half
tataggggttagtactctgcgt

SEQ ID NO: 7001 - DNA, 30 bp, Artificial Sequence
  synthetic circulating small noncoding RNA (sncRNA) 5' transfer RNA (tRNA) half
gtctgatgctctaccgactgagctatccag

SEQ ID NO: 7002 - DNA, 19 bp, Artificial Sequence
  synthetic circulating small noncoding RNA (sncRNA) 5' transfer RNA (tRNA) half
acccgggccgcggcggtga

SEQ ID NO: 7003 - DNA, 14 bp, Artificial Sequence
  synthetic circulating small noncoding RNA (sncRNA) 5' transfer RNA (tRNA) half
gaacacgcagcctt

SEQ ID NO: 7004 - DNA, 13 bp, Artificial Sequence
  synthetic circulating small noncoding RNA (sncRNA) 5' transfer RNA (tRNA) half
ctcggccacgcta

SEQ ID NO: 7005 - DNA, 17 bp, Artificial Sequence
  synthetic circulating small noncoding RNA (sncRNA) 5' transfer RNA (tRNA) half
gtttccgcccggtttcg

SEQ ID NO: 7006 - DNA, 35 bp, Artificial Sequence
  synthetic circulating small noncoding RNA (sncRNA) 5' transfer RNA (tRNA) half
tgtatgaggccccgggttcgatccccggcatctcc

SEQ ID NO: 7007 - DNA, 21 bp, Artificial Sequence
  synthetic circulating small noncoding RNA (sncRNA) 5' transfer RNA (tRNA) half
gaaccggggacctttcgcgtg

SEQ ID NO: 7008 - DNA, 22 bp, Artificial Sequence
  synthetic circulating small noncoding RNA (sncRNA) 5' transfer RNA (tRNA) half
gtagtggtatcatgcaagattc

SEQ ID NO: 7009 - DNA, 19 bp, Artificial Sequence
  synthetic circulating small noncoding RNA (sncRNA) 5' transfer RNA (tRNA) half
ggccccagcgagatttgaa

SEQ ID NO: 7010 - DNA, 15 bp, Artificial Sequence
  synthetic circulating small noncoding RNA (sncRNA) 5' transfer RNA (tRNA) half
tcaggatggccgagc

SEQ ID NO: 7011 - DNA, 10 bp, Artificial Sequence
  synthetic circulating small noncoding RNA (sncRNA) 5' transfer RNA (tRNA) half
cgggttcgac

SEQ ID NO: 7012 - DNA, 27 bp, Artificial Sequence
  synthetic circulating small noncoding RNA (sncRNA) 5' transfer RNA (tRNA) half
ggcaggcgagaattctaccactgaacc

SEQ ID NO: 7013 - DNA, 38 bp, Artificial Sequence
  synthetic circulating small noncoding RNA (sncRNA) 5' transfer RNA (tRNA) half
tcagaaggttgcgtgttcaaatcacgtcggggtcatct

SEQ ID NO: 7014 - DNA, 32 bp, Artificial Sequence
  synthetic circulating small noncoding RNA (sncRNA) 5' transfer RNA (tRNA) half
taaacaggagatcctgggttcgaatcccagcg

SEQ ID NO: 7015 - DNA, 25 bp, Artificial Sequence
  synthetic circulating small noncoding RNA (sncRNA) 5' transfer RNA (tRNA) half
gatcgtatagtggttagtactctgc

SEQ ID NO: 7016 - DNA, 19 bp, Artificial Sequence
  synthetic circulating small noncoding RNA (sncRNA) 5' transfer RNA (tRNA) half
ggatagctcagtcggtaga

SEQ ID NO: 7017 - DNA, 26 bp, Artificial Sequence
  synthetic circulating small noncoding RNA (sncRNA) 5' transfer RNA (tRNA) half
tagtggtgagtatccccgcctgtcac

SEQ ID NO: 7018 - DNA, 23 bp, Artificial Sequence
  synthetic circulating small noncoding RNA (sncRNA) 5' transfer RNA (tRNA) half
taatggttagcactctggactct

SEQ ID NO: 7019 - DNA, 24 bp, Artificial Sequence
  synthetic circulating small noncoding RNA (sncRNA) 5' transfer RNA (tRNA) half
tcagtcggtagagcatcagacttt

SEQ ID NO: 7020 - DNA, 26 bp, Artificial Sequence
  synthetic circulating small noncoding RNA (sncRNA) 5' transfer RNA (tRNA) half
taccgggagtcgaacccgggccgcct

SEQ ID NO: 7021 - DNA, 19 bp, Artificial Sequence
  synthetic circulating small noncoding RNA (sncRNA) 5' transfer RNA (tRNA) half
ccggtctcccgcgtgacag

SEQ ID NO: 7022 - DNA, 21 bp, Artificial Sequence
  synthetic circulating small noncoding RNA (sncRNA) 5' transfer RNA (tRNA) half
cgggagtcgaacccgggccgc

SEQ ID NO: 7023 - DNA, 28 bp, Artificial Sequence
  synthetic circulating small noncoding RNA (sncRNA) 5' transfer RNA (tRNA) half
ggccgcctgggtgaaaaccaggaatcct

SEQ ID NO: 7024 - DNA, 15 bp, Artificial Sequence
  synthetic circulating small noncoding RNA (sncRNA) 5' transfer RNA (tRNA) half
cggaagcgtgctggg

SEQ ID NO: 7025 - DNA, 22 bp, Artificial Sequence
  synthetic circulating small noncoding RNA (sncRNA) 5' transfer RNA (tRNA) half
atcccaccgctgccatctttgt

SEQ ID NO: 7026 - DNA, 18 bp, Artificial Sequence
  synthetic circulating small noncoding RNA (sncRNA) 5' transfer RNA (tRNA) half
gattcgaacacgcagcct

SEQ ID NO: 7027 - DNA, 10 bp, Artificial Sequence
  synthetic circulating small noncoding RNA (sncRNA) 5' transfer RNA (tRNA) half
aggcaccgct

SEQ ID NO: 7028 - DNA, 20 bp, Artificial Sequence
  synthetic circulating small noncoding RNA (sncRNA) 5' transfer RNA (tRNA) half
cgagccccagtggaaccacg

SEQ ID NO: 7029 - DNA, 30 bp, Artificial Sequence
  synthetic circulating small noncoding RNA (sncRNA) 5' transfer RNA (tRNA) half
gcatgtgctctaccactgagctacatcccc

SEQ ID NO: 7030 - DNA, 38 bp, Artificial Sequence
  synthetic circulating small noncoding RNA (sncRNA) 5' transfer RNA (tRNA) half
tgtggcccgtacggggatcgaacccgcgaccttggcgt

SEQ ID NO: 7031 - DNA, 17 bp, Artificial Sequence
  synthetic circulating small noncoding RNA (sncRNA) 5' transfer RNA (tRNA) half
ctcccggtatgggaaca

SEQ ID NO: 7032 - DNA, 34 bp, Artificial Sequence
  synthetic circulating small noncoding RNA (sncRNA) 5' transfer RNA (tRNA) half
acaacgcagagtactaaccactatacgatcacgg

SEQ ID NO: 7033 - DNA, 36 bp, Artificial Sequence
  synthetic circulating small noncoding RNA (sncRNA) 5' transfer RNA (tRNA) half
cctccccgtcggggaattgaaccccggtctcccgcg

SEQ ID NO: 7034 - DNA, 30 bp, Artificial Sequence
  synthetic circulating small noncoding RNA (sncRNA) 5' transfer RNA (tRNA) half
ccccggctagctcagtcagtagagcttgag

SEQ ID NO: 7035 - DNA, 22 bp, Artificial Sequence
  synthetic circulating small noncoding RNA (sncRNA) 5' transfer RNA (tRNA) half
gatccatcgacctctgggttat

SEQ ID NO: 7036 - DNA, 15 bp, Artificial Sequence
  synthetic circulating small noncoding RNA (sncRNA) 5' transfer RNA (tRNA) half
cggttaggattcctg

SEQ ID NO: 7037 - DNA, 13 bp, Artificial Sequence
  synthetic circulating small noncoding RNA (sncRNA) 5' transfer RNA (tRNA) half
ggtatgattctcg

SEQ ID NO: 7038 - DNA, 30 bp, Artificial Sequence
  synthetic circulating small noncoding RNA (sncRNA) 5' transfer RNA (tRNA) half
tcctcgttagtatagtggtgagtatccccg

SEQ ID NO: 7039 - DNA, 14 bp, Artificial Sequence
  synthetic circulating small noncoding RNA (sncRNA) 5' transfer RNA (tRNA) half
tctaccgactgagc

SEQ ID NO: 7040 - DNA, 34 bp, Artificial Sequence
  synthetic circulating small noncoding RNA (sncRNA) 5' transfer RNA (tRNA) half
ccgctggtgtagtggtatcatgcaagattcccat

SEQ ID NO: 7041 - DNA, 22 bp, Artificial Sequence
  synthetic circulating small noncoding RNA (sncRNA) 5' transfer RNA (tRNA) half
gacgacgaggatgggattcgaa

SEQ ID NO: 7042 - DNA, 19 bp, Artificial Sequence
  synthetic circulating small noncoding RNA (sncRNA) 5' transfer RNA (tRNA) half
gtaatggttagcactctgg

SEQ ID NO: 7043 - DNA, 14 bp, Artificial Sequence
  synthetic circulating small noncoding RNA (sncRNA) 5' transfer RNA (tRNA) half
gggggattagctca

SEQ ID NO: 7044 - DNA, 22 bp, Artificial Sequence
  synthetic circulating small noncoding RNA (sncRNA) 5' transfer RNA (tRNA) half
ttcgatccccggcacctccact

SEQ ID NO: 7045 - DNA, 15 bp, Artificial Sequence
  synthetic circulating small noncoding RNA (sncRNA) 5' transfer RNA (tRNA) half
cagcgccttagacca

SEQ ID NO: 7046 - DNA, 30 bp, Artificial Sequence
  synthetic circulating small noncoding RNA (sncRNA) 5' transfer RNA (tRNA) half
aggcggcccgggttcgactcccggtatggg

SEQ ID NO: 7047 - DNA, 29 bp, Artificial Sequence
  synthetic circulating small noncoding RNA (sncRNA) 5' transfer RNA (tRNA) half
tccccgtcggggaattgaaccccggtctc

SEQ ID NO: 7048 - DNA, 38 bp, Artificial Sequence
  synthetic circulating small noncoding RNA (sncRNA) 5' transfer RNA (tRNA) half
gttgccccctctgaggttcgaactcaggaccttcagat

SEQ ID NO: 7049 - DNA, 21 bp, Artificial Sequence
  synthetic circulating small noncoding RNA (sncRNA) 5' transfer RNA (tRNA) half
ctaccactgagctataccccc

SEQ ID NO: 7050 - DNA, 19 bp, Artificial Sequence
  synthetic circulating small noncoding RNA (sncRNA) 5' transfer RNA (tRNA) half
ggagactgcgacctgaacg

SEQ ID NO: 7051 - DNA, 14 bp, Artificial Sequence
  synthetic circulating small noncoding RNA (sncRNA) 5' transfer RNA (tRNA) half
ctctaccgactgag

SEQ ID NO: 7052 - DNA, 16 bp, Artificial Sequence
  synthetic circulating small noncoding RNA (sncRNA) 5' transfer RNA (tRNA) half
tgggctcgtccgggat

SEQ ID NO: 7053 - DNA, 12 bp, Artificial Sequence
  synthetic circulating small noncoding RNA (sncRNA) 5' transfer RNA (tRNA) half
ggctcgttggtc

SEQ ID NO: 7054 - DNA, 34 bp, Artificial Sequence
  synthetic circulating small noncoding RNA (sncRNA) 5' transfer RNA (tRNA) half
agtctgatgctctaccgactgagctatccgggcg

SEQ ID NO: 7055 - DNA, 25 bp, Artificial Sequence
  synthetic circulating small noncoding RNA (sncRNA) 5' transfer RNA (tRNA) half
accaggaatcctaaccgctagacca

SEQ ID NO: 7056 - DNA, 34 bp, Artificial Sequence
  synthetic circulating small noncoding RNA (sncRNA) 5' transfer RNA (tRNA) half
ccgactccgccgggactcgaacccggaacctttg

SEQ ID NO: 7057 - DNA, 25 bp, Artificial Sequence
  synthetic circulating small noncoding RNA (sncRNA) 5' transfer RNA (tRNA) half
gtgtaatggttagcactctggactc

SEQ ID NO: 7058 - DNA, 18 bp, Artificial Sequence
  synthetic circulating small noncoding RNA (sncRNA) 5' transfer RNA (tRNA) half
aggtccccggttcgaaac

SEQ ID NO: 7059 - DNA, 16 bp, Artificial Sequence
  synthetic circulating small noncoding RNA (sncRNA) 5' transfer RNA (tRNA) half
ccgactgagctatccg

SEQ ID NO: 7060 - DNA, 13 bp, Artificial Sequence
  synthetic circulating small noncoding RNA (sncRNA) 5' transfer RNA (tRNA) half
tctcggtggaacc

SEQ ID NO: 7061 - DNA, 18 bp, Artificial Sequence
  synthetic circulating small noncoding RNA (sncRNA) 5' transfer RNA (tRNA) half
gggacctctcgcacccga

SEQ ID NO: 7062 - DNA, 25 bp, Artificial Sequence
  synthetic circulating small noncoding RNA (sncRNA) 5' transfer RNA (tRNA) half
ctagctcagtcggtagagcatgaga

SEQ ID NO: 7063 - DNA, 33 bp, Artificial Sequence
  synthetic circulating small noncoding RNA (sncRNA) 5' transfer RNA (tRNA) half
ctgatgctctaccgactgagctatccgggctct

SEQ ID NO: 7064 - DNA, 30 bp, Artificial Sequence
  synthetic circulating small noncoding RNA (sncRNA) 5' transfer RNA (tRNA) half
tctccccgtcggggaatcgaaccccggtct

SEQ ID NO: 7065 - DNA, 33 bp, Artificial Sequence
  synthetic circulating small noncoding RNA (sncRNA) 5' transfer RNA (tRNA) half
aaggttccaccgagatttgaactcggatcgctg

SEQ ID NO: 7066 - DNA, 14 bp, Artificial Sequence
  synthetic circulating small noncoding RNA (sncRNA) 5' transfer RNA (tRNA) half
aggttccaccgaga

SEQ ID NO: 7067 - DNA, 8 bp, Artificial Sequence
  synthetic circulating small noncoding RNA (sncRNA) 5' transfer RNA (tRNA) half
cgggccgc

SEQ ID NO: 7068 - DNA, 30 bp, Artificial Sequence
  synthetic circulating small noncoding RNA (sncRNA) 5' transfer RNA (tRNA) half
gggccgcggcggtgagagcgccgaatccta

SEQ ID NO: 7069 - DNA, 18 bp, Artificial Sequence
  synthetic circulating small noncoding RNA (sncRNA) 5' transfer RNA (tRNA) half
gttatgggcccagcacgc

SEQ ID NO: 7070 - DNA, 11 bp, Artificial Sequence
  synthetic circulating small noncoding RNA (sncRNA) 5' transfer RNA (tRNA) half
aggtcgcgggt

SEQ ID NO: 7071 - DNA, 20 bp, Artificial Sequence
  synthetic circulating small noncoding RNA (sncRNA) 5' transfer RNA (tRNA) half
ggtcccaccgagatttgaac

SEQ ID NO: 7072 - DNA, 18 bp, Artificial Sequence
  synthetic circulating small noncoding RNA (sncRNA) 5' transfer RNA (tRNA) half
gaattctcgcctgccacg

SEQ ID NO: 7073 - DNA, 11 bp, Artificial Sequence
  synthetic circulating small noncoding RNA (sncRNA) 5' transfer RNA (tRNA) half
gacctctcgca

SEQ ID NO: 7074 - DNA, 26 bp, Artificial Sequence
  synthetic circulating small noncoding RNA (sncRNA) 5' transfer RNA (tRNA) half
gactccgccgggactcgaacccggaa

SEQ ID NO: 7075 - DNA, 17 bp, Artificial Sequence
  synthetic circulating small noncoding RNA (sncRNA) 5' transfer RNA (tRNA) half
cactatactaacgagga

SEQ ID NO: 7076 - DNA, 28 bp, Artificial Sequence
  synthetic circulating small noncoding RNA (sncRNA) 5' transfer RNA (tRNA) half
agatcctgggttcaaatcccagcggggc

SEQ ID NO: 7077 - DNA, 27 bp, Artificial Sequence
  synthetic circulating small noncoding RNA (sncRNA) 5' transfer RNA (tRNA) half
ccctggtggtctagtggttaggattcg

SEQ ID NO: 7078 - DNA, 31 bp, Artificial Sequence
  synthetic circulating small noncoding RNA (sncRNA) 5' transfer RNA (tRNA) half
tgaccgggaatcgaacccgggccgcggcggt

SEQ ID NO: 7079 - DNA, 19 bp, Artificial Sequence
  synthetic circulating small noncoding RNA (sncRNA) 5' transfer RNA (tRNA) half
tggcaggcgagaattctac

SEQ ID NO: 7080 - DNA, 11 bp, Artificial Sequence
  synthetic circulating small noncoding RNA (sncRNA) 5' transfer RNA (tRNA) half
gggagtcgaac

SEQ ID NO: 7081 - DNA, 19 bp, Artificial Sequence
  synthetic circulating small noncoding RNA (sncRNA) 5' transfer RNA (tRNA) half
accgttgcgccacgaggtc

SEQ ID NO: 7082 - DNA, 14 bp, Artificial Sequence
  synthetic circulating small noncoding RNA (sncRNA) 5' transfer RNA (tRNA) half
aaccggggaccttt

SEQ ID NO: 7083 - DNA, 21 bp, Artificial Sequence
  synthetic circulating small noncoding RNA (sncRNA) 5' transfer RNA (tRNA) half
gacgaggatgggattcgaacc

SEQ ID NO: 7084 - DNA, 31 bp, Artificial Sequence
  synthetic circulating small noncoding RNA (sncRNA) 5' transfer RNA (tRNA) half
tccatcgccttaaccactcggccacctcgtc

SEQ ID NO: 7085 - DNA, 33 bp, Artificial Sequence
  synthetic circulating small noncoding RNA (sncRNA) 5' transfer RNA (tRNA) half
cgagaggtcccgggttcaaatcccggacgagcc

SEQ ID NO: 7086 - DNA, 15 bp, Artificial Sequence
  synthetic circulating small noncoding RNA (sncRNA) 5' transfer RNA (tRNA) half
gcagtcaaatgctct

SEQ ID NO: 7087 - DNA, 15 bp, Artificial Sequence
  synthetic circulating small noncoding RNA (sncRNA) 5' transfer RNA (tRNA) half
atccgggtgccccct

SEQ ID NO: 7088 - DNA, 16 bp, Artificial Sequence
  synthetic circulating small noncoding RNA (sncRNA) 5' transfer RNA (tRNA) half
acgcgggagaccgggg

SEQ ID NO: 7089 - DNA, 20 bp, Artificial Sequence
  synthetic circulating small noncoding RNA (sncRNA) 5' transfer RNA (tRNA) half
tgtaatggttagcactctgg

SEQ ID NO: 7090 - DNA, 13 bp, Artificial Sequence
  synthetic circulating small noncoding RNA (sncRNA) 5' transfer RNA (tRNA) half
gtcagaagtggga

SEQ ID NO: 7091 - DNA, 14 bp, Artificial Sequence
  synthetic circulating small noncoding RNA (sncRNA) 5' transfer RNA (tRNA) half
gctcggccatcctg

SEQ ID NO: 7092 - DNA, 22 bp, Artificial Sequence
  synthetic circulating small noncoding RNA (sncRNA) 5' transfer RNA (tRNA) half
cagcgaccacgaagggactcga

SEQ ID NO: 7093 - DNA, 31 bp, Artificial Sequence
  synthetic circulating small noncoding RNA (sncRNA) 5' transfer RNA (tRNA) half
gcagctatgctcaccactataccaccaacgc

SEQ ID NO: 7094 - DNA, 24 bp, Artificial Sequence
  synthetic circulating small noncoding RNA (sncRNA) 5' transfer RNA (tRNA) half
cccgcgaccttggcgttattagca

SEQ ID NO: 7095 - DNA, 31 bp, Artificial Sequence
  synthetic circulating small noncoding RNA (sncRNA) 5' transfer RNA (tRNA) half
cgggagaccggggttcgattccccgacgggg

SEQ ID NO: 7096 - DNA, 31 bp, Artificial Sequence
  synthetic circulating small noncoding RNA (sncRNA) 5' transfer RNA (tRNA) half
gtctgatgctctaccgactgagctatccagg

SEQ ID NO: 7097 - DNA, 34 bp, Artificial Sequence
  synthetic circulating small noncoding RNA (sncRNA) 5' transfer RNA (tRNA) half
gagccaggtaggagtcgaacctacaatcttctga

SEQ ID NO: 7098 - DNA, 14 bp, Artificial Sequence
  synthetic circulating small noncoding RNA (sncRNA) 5' transfer RNA (tRNA) half
ccccacgttgggcg

SEQ ID NO: 7099 - DNA, 20 bp, Artificial Sequence
  synthetic circulating small noncoding RNA (sncRNA) 5' transfer RNA (tRNA) half
acagacgacgaggatgggat

SEQ ID NO: 7100 - DNA, 34 bp, Artificial Sequence
  synthetic circulating small noncoding RNA (sncRNA) 5' transfer RNA (tRNA) half
ctccccgtcggggaattgaaccccggtctcccgc

SEQ ID NO: 7101 - DNA, 21 bp, Artificial Sequence
  synthetic circulating small noncoding RNA (sncRNA) 5' transfer RNA (tRNA) half
gtggttagtactctgcgttgt

SEQ ID NO: 7102 - DNA, 32 bp, Artificial Sequence
  synthetic circulating small noncoding RNA (sncRNA) 5' transfer RNA (tRNA) half
gggggtatagctcaggggtggagcatttgact

SEQ ID NO: 7103 - DNA, 18 bp, Artificial Sequence
  synthetic circulating small noncoding RNA (sncRNA) 5' transfer RNA (tRNA) half
gcactctggactctgaat

SEQ ID NO: 7104 - DNA, 32 bp, Artificial Sequence
  synthetic circulating small noncoding RNA (sncRNA) 5' transfer RNA (tRNA) half
ggtagaattctcgcctgccacgcgggaggccc

SEQ ID NO: 7105 - DNA, 20 bp, Artificial Sequence
  synthetic circulating small noncoding RNA (sncRNA) 5' transfer RNA (tRNA) half
atgaccccgacgtgattcga

SEQ ID NO: 7106 - DNA, 36 bp, Artificial Sequence
  synthetic circulating small noncoding RNA (sncRNA) 5' transfer RNA (tRNA) half
tggtagaattctcgcctgccacgcgggaggcccggg

SEQ ID NO: 7107 - DNA, 21 bp, Artificial Sequence
  synthetic circulating small noncoding RNA (sncRNA) 5' transfer RNA (tRNA) half
aaaccgggcggaaacatatct

SEQ ID NO: 7108 - DNA, 17 bp, Artificial Sequence
  synthetic circulating small noncoding RNA (sncRNA) 5' transfer RNA (tRNA) half
gcccggatagctcagtc

SEQ ID NO: 7109 - DNA, 16 bp, Artificial Sequence
  synthetic circulating small noncoding RNA (sncRNA) 5' transfer RNA (tRNA) half
acccgggccgcggcgg

SEQ ID NO: 7110 - DNA, 25 bp, Artificial Sequence
  synthetic circulating small noncoding RNA (sncRNA) 5' transfer RNA (tRNA) half
gtggttatcacgttcgcctcacacg

SEQ ID NO: 7111 - DNA, 24 bp, Artificial Sequence
  synthetic circulating small noncoding RNA (sncRNA) 5' transfer RNA (tRNA) half
tcggggaatcgaaccccggtctcc

SEQ ID NO: 7112 - DNA, 13 bp, Artificial Sequence
  synthetic circulating small noncoding RNA (sncRNA) 5' transfer RNA (tRNA) half
cgagaattctacc

SEQ ID NO: 7113 - DNA, 32 bp, Artificial Sequence
  synthetic circulating small noncoding RNA (sncRNA) 5' transfer RNA (tRNA) half
caggcggcccgggttcgactcccggtatggga

SEQ ID NO: 7114 - DNA, 17 bp, Artificial Sequence
  synthetic circulating small noncoding RNA (sncRNA) 5' transfer RNA (tRNA) half
ggagatgccggggatcg

SEQ ID NO: 7115 - DNA, 31 bp, Artificial Sequence
  synthetic circulating small noncoding RNA (sncRNA) 5' transfer RNA (tRNA) half
gccgcggcccgggttcgattcccggtcaggg

SEQ ID NO: 7116 - DNA, 22 bp, Artificial Sequence
  synthetic circulating small noncoding RNA (sncRNA) 5' transfer RNA (tRNA) half
tccccggcatctccaacttttt

SEQ ID NO: 7117 - DNA, 20 bp, Artificial Sequence
  synthetic circulating small noncoding RNA (sncRNA) 5' transfer RNA (tRNA) half
gaccccgacgtgatttgaac

SEQ ID NO: 7118 - DNA, 16 bp, Artificial Sequence
  synthetic circulating small noncoding RNA (sncRNA) 5' transfer RNA (tRNA) half
gccgtcacgaacagga

SEQ ID NO: 7119 - DNA, 22 bp, Artificial Sequence
  synthetic circulating small noncoding RNA (sncRNA) 5' transfer RNA (tRNA) half
gtggtagaattctcgcctgcca

SEQ ID NO: 7120 - DNA, 17 bp, Artificial Sequence
  synthetic circulating small noncoding RNA (sncRNA) 5' transfer RNA (tRNA) half
tggttatcacgttcgcc

SEQ ID NO: 7121 - DNA, 35 bp, Artificial Sequence
  synthetic circulating small noncoding RNA (sncRNA) 5' transfer RNA (tRNA) half
ccaggggtcgcgagttcaaatctcgctggggcctt

SEQ ID NO: 7122 - DNA, 34 bp, Artificial Sequence
  synthetic circulating small noncoding RNA (sncRNA) 5' transfer RNA (tRNA) half
gtgtgaggcgaacgtgataaccactacactacgg

SEQ ID NO: 7123 - DNA, 21 bp, Artificial Sequence
  synthetic circulating small noncoding RNA (sncRNA) 5' transfer RNA (tRNA) half
gggggtatagctcagtggtag

SEQ ID NO: 7124 - DNA, 34 bp, Artificial Sequence
  synthetic circulating small noncoding RNA (sncRNA) 5' transfer RNA (tRNA) half
cttccctgaccgggaatcgaacccgggccgcggc

SEQ ID NO: 7125 - DNA, 35 bp, Artificial Sequence
  synthetic circulating small noncoding RNA (sncRNA) 5' transfer RNA (tRNA) half
cgaccacgaagggactcgaaccctcaatcttctga

SEQ ID NO: 7126 - DNA, 42 bp, Artificial Sequence
  synthetic circulating small noncoding RNA (sncRNA) 5' transfer RNA (tRNA) half
tagcgcccgaacagggacttgaaccctggaccctcagattaa

SEQ ID NO: 7127 - DNA, 25 bp, Artificial Sequence
  synthetic circulating small noncoding RNA (sncRNA) 5' transfer RNA (tRNA) half
gtccctgggtgggctcgaaccacca

SEQ ID NO: 7128 - DNA, 17 bp, Artificial Sequence
  synthetic circulating small noncoding RNA (sncRNA) 5' transfer RNA (tRNA) half
ggcacccggatttgaac

SEQ ID NO: 7129 - DNA, 20 bp, Artificial Sequence
  synthetic circulating small noncoding RNA (sncRNA) 5' transfer RNA (tRNA) half
ggctcgttggtctaggggta

SEQ ID NO: 7130 - DNA, 20 bp, Artificial Sequence
  synthetic circulating small noncoding RNA (sncRNA) 5' transfer RNA (tRNA) half
gttcgattcccggccaatgc

SEQ ID NO: 7131 - DNA, 22 bp, Artificial Sequence
  synthetic circulating small noncoding RNA (sncRNA) 5' transfer RNA (tRNA) half
agatagcagaggatggtttcga

SEQ ID NO: 7132 - DNA, 20 bp, Artificial Sequence
  synthetic circulating small noncoding RNA (sncRNA) 5' transfer RNA (tRNA) half
cggcccgggttcgattcccg

SEQ ID NO: 7133 - DNA, 16 bp, Artificial Sequence
  synthetic circulating small noncoding RNA (sncRNA) 5' transfer RNA (tRNA) half
gttatcacgttcgcct

SEQ ID NO: 7134 - DNA, 18 bp, Artificial Sequence
  synthetic circulating small noncoding RNA (sncRNA) 5' transfer RNA (tRNA) half
ccgccgcggcccgggttc

SEQ ID NO: 7135 - DNA, 26 bp, Artificial Sequence
  synthetic circulating small noncoding RNA (sncRNA) 5' transfer RNA (tRNA) half
tcggggaatcgaaccccggtctcccg

SEQ ID NO: 7136 - DNA, 31 bp, Artificial Sequence
  synthetic circulating small noncoding RNA (sncRNA) 5' transfer RNA (tRNA) half
gagaatcatacccctagaccaacgagccgct

SEQ ID NO: 7137 - DNA, 16 bp, Artificial Sequence
  synthetic circulating small noncoding RNA (sncRNA) 5' transfer RNA (tRNA) half
cgcccccgaagagact

SEQ ID NO: 7138 - DNA, 18 bp, Artificial Sequence
  synthetic circulating small noncoding RNA (sncRNA) 5' transfer RNA (tRNA) half
ggtctcccgcgtgacagg

SEQ ID NO: 7139 - DNA, 16 bp, Artificial Sequence
  synthetic circulating small noncoding RNA (sncRNA) 5' transfer RNA (tRNA) half
tgccgggagtcgaacc

SEQ ID NO: 7140 - DNA, 12 bp, Artificial Sequence
  synthetic circulating small noncoding RNA (sncRNA) 5' transfer RNA (tRNA) half
cgcccggtttcg

SEQ ID NO: 7141 - DNA, 24 bp, Artificial Sequence
  synthetic circulating small noncoding RNA (sncRNA) 5' transfer RNA (tRNA) half
aaaagtctgatgctctaccgactg

SEQ ID NO: 7142 - DNA, 24 bp, Artificial Sequence
  synthetic circulating small noncoding RNA (sncRNA) 5' transfer RNA (tRNA) half
acccgggccgcggcggtgagagcg

SEQ ID NO: 7143 - DNA, 32 bp, Artificial Sequence
  synthetic circulating small noncoding RNA (sncRNA) 5' transfer RNA (tRNA) half
gtctccccgtcggggaatcgaaccccggtctc

SEQ ID NO: 7144 - DNA, 28 bp, Artificial Sequence
  synthetic circulating small noncoding RNA (sncRNA) 5' transfer RNA (tRNA) half
aggtcctgggttcgagccccagtggaac

SEQ ID NO: 7145 - DNA, 31 bp, Artificial Sequence
  synthetic circulating small noncoding RNA (sncRNA) 5' transfer RNA (tRNA) half
ctccccgtcggggaatcgaaccccggtctcc

SEQ ID NO: 7146 - DNA, 28 bp, Artificial Sequence
  synthetic circulating small noncoding RNA (sncRNA) 5' transfer RNA (tRNA) half
gagccagccaggagtcgaacctagaatc

SEQ ID NO: 7147 - DNA, 16 bp, Artificial Sequence
  synthetic circulating small noncoding RNA (sncRNA) 5' transfer RNA (tRNA) half
ctagtggtatgattct

SEQ ID NO: 7148 - DNA, 33 bp, Artificial Sequence
  synthetic circulating small noncoding RNA (sncRNA) 5' transfer RNA (tRNA) half
cgccgaatcctaaccactagaccaccagggaag

SEQ ID NO: 7149 - DNA, 24 bp, Artificial Sequence
  synthetic circulating small noncoding RNA (sncRNA) 5' transfer RNA (tRNA) half
aggtcccaccgagatttgaactcg

SEQ ID NO: 7150 - DNA, 32 bp, Artificial Sequence
  synthetic circulating small noncoding RNA (sncRNA) 5' transfer RNA (tRNA) half
caggagatcctgggttcgaatcccagcggggc

SEQ ID NO: 7151 - DNA, 27 bp, Artificial Sequence
  synthetic circulating small noncoding RNA (sncRNA) 5' transfer RNA (tRNA) half
cctggtggtctagtggttaggattcgg

SEQ ID NO: 7152 - DNA, 13 bp, Artificial Sequence
  synthetic circulating small noncoding RNA (sncRNA) 5' transfer RNA (tRNA) half
ccgtgatcgtata

SEQ ID NO: 7153 - DNA, 19 bp, Artificial Sequence
  synthetic circulating small noncoding RNA (sncRNA) 5' transfer RNA (tRNA) half
tccattaggccactggggc

SEQ ID NO: 7154 - DNA, 29 bp, Artificial Sequence
  synthetic circulating small noncoding RNA (sncRNA) 5' transfer RNA (tRNA) half
gagaattctaccactgaaccaccaatgct

SEQ ID NO: 7155 - DNA, 12 bp, Artificial Sequence
  synthetic circulating small noncoding RNA (sncRNA) 5' transfer RNA (tRNA) half
cgaaccagcgac

SEQ ID NO: 7156 - DNA, 19 bp, Artificial Sequence
  synthetic circulating small noncoding RNA (sncRNA) 5' transfer RNA (tRNA) half
gcggttaggattcctggtt

SEQ ID NO: 7157 - DNA, 38 bp, Artificial Sequence
  synthetic circulating small noncoding RNA (sncRNA) 5' transfer RNA (tRNA) half
tatgaccccgacgtgattcgaacacgcagccttctgat

SEQ ID NO: 7158 - DNA, 19 bp, Artificial Sequence
  synthetic circulating small noncoding RNA (sncRNA) 5' transfer RNA (tRNA) half
aatcccaccgctgccaacc

SEQ ID NO: 7159 - DNA, 12 bp, Artificial Sequence
  synthetic circulating small noncoding RNA (sncRNA) 5' transfer RNA (tRNA) half
tcgaacccgggc

SEQ ID NO: 7160 - DNA, 22 bp, Artificial Sequence
  synthetic circulating small noncoding RNA (sncRNA) 5' transfer RNA (tRNA) half
tcgaaaccatcctctgctaact

SEQ ID NO: 7161 - DNA, 21 bp, Artificial Sequence
  synthetic circulating small noncoding RNA (sncRNA) 5' transfer RNA (tRNA) half
gttcgatccccggcatctcca

SEQ ID NO: 7162 - DNA, 32 bp, Artificial Sequence
  synthetic circulating small noncoding RNA (sncRNA) 5' transfer RNA (tRNA) half
actctggtgggactcgaacccacaacctttga

SEQ ID NO: 7163 - DNA, 34 bp, Artificial Sequence
  synthetic circulating small noncoding RNA (sncRNA) 5' transfer RNA (tRNA) half
ggagtcagacgcgctaccgttgcgccacgaggcc

SEQ ID NO: 7164 - DNA, 38 bp, Artificial Sequence
  synthetic circulating small noncoding RNA (sncRNA) 5' transfer RNA (tRNA) half
gctggcccgtacggggatcgaacccgcgaccttggcgt

SEQ ID NO: 7165 - DNA, 23 bp, Artificial Sequence
  synthetic circulating small noncoding RNA (sncRNA) 5' transfer RNA (tRNA) half
gagtccagagtgctagccattac

SEQ ID NO: 7166 - DNA, 34 bp, Artificial Sequence
  synthetic circulating small noncoding RNA (sncRNA) 5' transfer RNA (tRNA) half
ccgaaaggttggtggttcgagcccacccagggac

SEQ ID NO: 7167 - DNA, 33 bp, Artificial Sequence
  synthetic circulating small noncoding RNA (sncRNA) 5' transfer RNA (tRNA) half
taagcgagaatcatacccctagaccaacgagcc

SEQ ID NO: 7168 - DNA, 18 bp, Artificial Sequence
  synthetic circulating small noncoding RNA (sncRNA) 5' transfer RNA (tRNA) half
ggggtatgattctcgctt

SEQ ID NO: 7169 - DNA, 36 bp, Artificial Sequence
  synthetic circulating small noncoding RNA (sncRNA) 5' transfer RNA (tRNA) half
accgaagatcacgggttcgaaccccgtccgtgcctg

SEQ ID NO: 7170 - DNA, 23 bp, Artificial Sequence
  synthetic circulating small noncoding RNA (sncRNA) 5' transfer RNA (tRNA) half
atcctaaccactagaccaccagg

SEQ ID NO: 7171 - DNA, 13 bp, Artificial Sequence
  synthetic circulating small noncoding RNA (sncRNA) 5' transfer RNA (tRNA) half
ctcggtgggacct

SEQ ID NO: 7172 - DNA, 20 bp, Artificial Sequence
  synthetic circulating small noncoding RNA (sncRNA) 5' transfer RNA (tRNA) half
ggaatcgaaccccggtctcc

SEQ ID NO: 7173 - DNA, 23 bp, Artificial Sequence
  synthetic circulating small noncoding RNA (sncRNA) 5' transfer RNA (tRNA) half
tctcaccgccgcggcccgggttc

SEQ ID NO: 7174 - DNA, 19 bp, Artificial Sequence
  synthetic circulating small noncoding RNA (sncRNA) 5' transfer RNA (tRNA) half
gcagtcaaatgctctacca

SEQ ID NO: 7175 - DNA, 27 bp, Artificial Sequence
  synthetic circulating small noncoding RNA (sncRNA) 5' transfer RNA (tRNA) half
tggattcagagtccagagtgctaacca

SEQ ID NO: 7176 - DNA, 13 bp, Artificial Sequence
  synthetic circulating small noncoding RNA (sncRNA) 5' transfer RNA (tRNA) half
ccgagcggtctaa

SEQ ID NO: 7177 - DNA, 24 bp, Artificial Sequence
  synthetic circulating small noncoding RNA (sncRNA) 5' transfer RNA (tRNA) half
tgtaatggttagcactctggactc

SEQ ID NO: 7178 - DNA, 13 bp, Artificial Sequence
  synthetic circulating small noncoding RNA (sncRNA) 5' transfer RNA (tRNA) half
gaacccgggacct

SEQ ID NO: 7179 - DNA, 12 bp, Artificial Sequence
  synthetic circulating small noncoding RNA (sncRNA) 5' transfer RNA (tRNA) half
tacgatcacggc

SEQ ID NO: 7180 - DNA, 23 bp, Artificial Sequence
  synthetic circulating small noncoding RNA (sncRNA) 5' transfer RNA (tRNA) half
agttgtcaggagtgggattcgaa

SEQ ID NO: 7181 - DNA, 17 bp, Artificial Sequence
  synthetic circulating small noncoding RNA (sncRNA) 5' transfer RNA (tRNA) half
tcccatatggtctagcg

SEQ ID NO: 7182 - DNA, 20 bp, Artificial Sequence
  synthetic circulating small noncoding RNA (sncRNA) 5' transfer RNA (tRNA) half
aagtctgatgctctaccgac

SEQ ID NO: 7183 - DNA, 32 bp, Artificial Sequence
  synthetic circulating small noncoding RNA (sncRNA) 5' transfer RNA (tRNA) half
gttccatggtgtaatggttagcactctggact

SEQ ID NO: 7184 - DNA, 17 bp, Artificial Sequence
  synthetic circulating small noncoding RNA (sncRNA) 5' transfer RNA (tRNA) half
agagtccagagtgctaa

SEQ ID NO: 7185 - DNA, 15 bp, Artificial Sequence
  synthetic circulating small noncoding RNA (sncRNA) 5' transfer RNA (tRNA) half
cgaaaccgggcggaa

SEQ ID NO: 7186 - DNA, 37 bp, Artificial Sequence
  synthetic circulating small noncoding RNA (sncRNA) 5' transfer RNA (tRNA) half
taagccagggattgtgggttcgagtcccatctggggt

SEQ ID NO: 7187 - DNA, 14 bp, Artificial Sequence
  synthetic circulating small noncoding RNA (sncRNA) 5' transfer RNA (tRNA) half
gacaggcggggata

SEQ ID NO: 7188 - DNA, 35 bp, Artificial Sequence
  synthetic circulating small noncoding RNA (sncRNA) 5' transfer RNA (tRNA) half
ccgaccacgaagggactcgaaccctcaatcttctg

SEQ ID NO: 7189 - DNA, 21 bp, Artificial Sequence
  synthetic circulating small noncoding RNA (sncRNA) 5' transfer RNA (tRNA) half
tagcggttatcacgtctgctt

SEQ ID NO: 7190 - DNA, 22 bp, Artificial Sequence
  synthetic circulating small noncoding RNA (sncRNA) 5' transfer RNA (tRNA) half
gcctaatggataaggcatcagc

SEQ ID NO: 7191 - DNA, 20 bp, Artificial Sequence
  synthetic circulating small noncoding RNA (sncRNA) 5' transfer RNA (tRNA) half
tcgaaccccgtccgtgcctg

SEQ ID NO: 7192 - DNA, 39 bp, Artificial Sequence
  synthetic circulating small noncoding RNA (sncRNA) 5' transfer RNA (tRNA) half
agcggggccttcgatagctcagttggtagagcggaggac

SEQ ID NO: 7193 - DNA, 18 bp, Artificial Sequence
  synthetic circulating small noncoding RNA (sncRNA) 5' transfer RNA (tRNA) half
ccattgcgccacggagcc

SEQ ID NO: 7194 - DNA, 18 bp, Artificial Sequence
  synthetic circulating small noncoding RNA (sncRNA) 5' transfer RNA (tRNA) half
tcgaacctcagagggggc

SEQ ID NO: 7195 - DNA, 33 bp, Artificial Sequence
  synthetic circulating small noncoding RNA (sncRNA) 5' transfer RNA (tRNA) half
gccgagactcggattcgaaccgaggttgctgca

SEQ ID NO: 7196 - DNA, 13 bp, Artificial Sequence
  synthetic circulating small noncoding RNA (sncRNA) 5' transfer RNA (tRNA) half
atcacgtcggggt

SEQ ID NO: 7197 - DNA, 22 bp, Artificial Sequence
  synthetic circulating small noncoding RNA (sncRNA) 5' transfer RNA (tRNA) half
tcaaatcccggacgagccccat

SEQ ID NO: 7198 - DNA, 17 bp, Artificial Sequence
  synthetic circulating small noncoding RNA (sncRNA) 5' transfer RNA (tRNA) half
gattcagagtccagagt

SEQ ID NO: 7199 - DNA, 24 bp, Artificial Sequence
  synthetic circulating small noncoding RNA (sncRNA) 5' transfer RNA (tRNA) half
gagcgccgaatcctaaccactaga

SEQ ID NO: 7200 - DNA, 33 bp, Artificial Sequence
  synthetic circulating small noncoding RNA (sncRNA) 5' transfer RNA (tRNA) half
gattcagagtccagagtgctaaccattacacca

SEQ ID NO: 7201 - DNA, 32 bp, Artificial Sequence
  synthetic circulating small noncoding RNA (sncRNA) 5' transfer RNA (tRNA) half
tttctgtagtgtagtggttatcacgttcgcct

SEQ ID NO: 7202 - DNA, 23 bp, Artificial Sequence
  synthetic circulating small noncoding RNA (sncRNA) 5' transfer RNA (tRNA) half
agcagagtggcgcagcggaagcg

SEQ ID NO: 7203 - DNA, 38 bp, Artificial Sequence
  synthetic circulating small noncoding RNA (sncRNA) 5' transfer RNA (tRNA) half
tagtggttaggattcggcgctctcaccgccgcggcccg

SEQ ID NO: 7204 - DNA, 21 bp, Artificial Sequence
  synthetic circulating small noncoding RNA (sncRNA) 5' transfer RNA (tRNA) half
cccgggtcaactgcttggaag

SEQ ID NO: 7205 - DNA, 12 bp, Artificial Sequence
  synthetic circulating small noncoding RNA (sncRNA) 5' transfer RNA (tRNA) half
acgaggtggccg

SEQ ID NO: 7206 - DNA, 20 bp, Artificial Sequence
  synthetic circulating small noncoding RNA (sncRNA) 5' transfer RNA (tRNA) half
tttacacgcagaaggtcctg

SEQ ID NO: 7207 - DNA, 24 bp, Artificial Sequence
  synthetic circulating small noncoding RNA (sncRNA) 5' transfer RNA (tRNA) half
gggttcgattccccgacggggagt

SEQ ID NO: 7208 - DNA, 37 bp, Artificial Sequence
  synthetic circulating small noncoding RNA (sncRNA) 5' transfer RNA (tRNA) half
gcattggtggttcagtggtagaattctcgcctgccac

SEQ ID NO: 7209 - DNA, 7 bp, Artificial Sequence
  synthetic circulating small noncoding RNA (sncRNA) 5' transfer RNA (tRNA) half
gaacccg

SEQ ID NO: 7210 - DNA, 30 bp, Artificial Sequence
  synthetic circulating small noncoding RNA (sncRNA) 5' transfer RNA (tRNA) half
gcgggaggcccgggttcgattcccggccaa

SEQ ID NO: 7211 - DNA, 21 bp, Artificial Sequence
  synthetic circulating small noncoding RNA (sncRNA) 5' transfer RNA (tRNA) half
aaatcccggacgagccccact

SEQ ID NO: 7212 - DNA, 28 bp, Artificial Sequence
  synthetic circulating small noncoding RNA (sncRNA) 5' transfer RNA (tRNA) half
gcgatccgagttcaaatctcggtggaac

SEQ ID NO: 7213 - DNA, 20 bp, Artificial Sequence
  synthetic circulating small noncoding RNA (sncRNA) 5' transfer RNA (tRNA) half
tctaggggtatgattctcgc

SEQ ID NO: 7214 - DNA, 33 bp, Artificial Sequence
  synthetic circulating small noncoding RNA (sncRNA) 5' transfer RNA (tRNA) half
ctgagggtccagggttcaagtccctgttcgggc

SEQ ID NO: 7215 - DNA, 32 bp, Artificial Sequence
  synthetic circulating small noncoding RNA (sncRNA) 5' transfer RNA (tRNA) half
tggtgtaatggttagcactctggactctgaat

SEQ ID NO: 7216 - DNA, 29 bp, Artificial Sequence
  synthetic circulating small noncoding RNA (sncRNA) 5' transfer RNA (tRNA) half
aacgcagagtactaaccactatacgatca

SEQ ID NO: 7217 - DNA, 39 bp, Artificial Sequence
  synthetic circulating small noncoding RNA (sncRNA) 5' transfer RNA (tRNA) half
gtcgagccagccaggagtcgaacctagaatcttctgatc

SEQ ID NO: 7218 - DNA, 14 bp, Artificial Sequence
  synthetic circulating small noncoding RNA (sncRNA) 5' transfer RNA (tRNA) half
ggcccgtacgggga

SEQ ID NO: 7219 - DNA, 17 bp, Artificial Sequence
  synthetic circulating small noncoding RNA (sncRNA) 5' transfer RNA (tRNA) half
tatgattctcgcttcgg

SEQ ID NO: 7220 - DNA, 21 bp, Artificial Sequence
  synthetic circulating small noncoding RNA (sncRNA) 5' transfer RNA (tRNA) half
gcgagaatcatacccctagac

SEQ ID NO: 7221 - DNA, 33 bp, Artificial Sequence
  synthetic circulating small noncoding RNA (sncRNA) 5' transfer RNA (tRNA) half
tatgaggccccgggttcgatccccggcatctcc

SEQ ID NO: 7222 - DNA, 31 bp, Artificial Sequence
  synthetic circulating small noncoding RNA (sncRNA) 5' transfer RNA (tRNA) half
tggcccgtacggggatcgaacccgcgacctt

SEQ ID NO: 7223 - DNA, 10 bp, Artificial Sequence
  synthetic circulating small noncoding RNA (sncRNA) 5' transfer RNA (tRNA) half
gcacccggat

SEQ ID NO: 7224 - DNA, 16 bp, Artificial Sequence
  synthetic circulating small noncoding RNA (sncRNA) 5' transfer RNA (tRNA) half
agctcagtcggtagag

SEQ ID NO: 7225 - DNA, 9 bp, Artificial Sequence
  synthetic circulating small noncoding RNA (sncRNA) 5' transfer RNA (tRNA) half
cggacgagc

SEQ ID NO: 7226 - DNA, 17 bp, Artificial Sequence
  synthetic circulating small noncoding RNA (sncRNA) 5' transfer RNA (tRNA) half
ctcaccgccgcggcccg

SEQ ID NO: 7227 - DNA, 21 bp, Artificial Sequence
  synthetic circulating small noncoding RNA (sncRNA) 5' transfer RNA (tRNA) half
aagcgagcgctctaccatttg

SEQ ID NO: 7228 - DNA, 36 bp, Artificial Sequence
  synthetic circulating small noncoding RNA (sncRNA) 5' transfer RNA (tRNA) half
acccaggcggcccgggttcgactcccggtatgggaa

SEQ ID NO: 7229 - DNA, 31 bp, Artificial Sequence
  synthetic circulating small noncoding RNA (sncRNA) 5' transfer RNA (tRNA) half
ctcggatcgctggattcagagtccagagtgc

SEQ ID NO: 7230 - DNA, 36 bp, Artificial Sequence
  synthetic circulating small noncoding RNA (sncRNA) 5' transfer RNA (tRNA) half
tctgaatccagcgatccgagttcaaatctcggtgga

SEQ ID NO: 7231 - DNA, 18 bp, Artificial Sequence
  synthetic circulating small noncoding RNA (sncRNA) 5' transfer RNA (tRNA) half
ggcggggatactaaccac

SEQ ID NO: 7232 - DNA, 21 bp, Artificial Sequence
  synthetic circulating small noncoding RNA (sncRNA) 5' transfer RNA (tRNA) half
ccgagccagccaggagtcgaa

SEQ ID NO: 7233 - DNA, 11 bp, Artificial Sequence
  synthetic circulating small noncoding RNA (sncRNA) 5' transfer RNA (tRNA) half
cggccacctcg

SEQ ID NO: 7234 - DNA, 16 bp, Artificial Sequence
  synthetic circulating small noncoding RNA (sncRNA) 5' transfer RNA (tRNA) half
gccgtgactcggattc

SEQ ID NO: 7235 - DNA, 22 bp, Artificial Sequence
  synthetic circulating small noncoding RNA (sncRNA) 5' transfer RNA (tRNA) half
tttgaactcggatcgctggatt

SEQ ID NO: 7236 - DNA, 38 bp, Artificial Sequence
  synthetic circulating small noncoding RNA (sncRNA) 5' transfer RNA (tRNA) half
aactcggatcgctggattcaaagtccagagtgctaacc

SEQ ID NO: 7237 - DNA, 27 bp, Artificial Sequence
  synthetic circulating small noncoding RNA (sncRNA) 5' transfer RNA (tRNA) half
catatggtctagcggttaggattcctg

SEQ ID NO: 7238 - DNA, 13 bp, Artificial Sequence
  synthetic circulating small noncoding RNA (sncRNA) 5' transfer RNA (tRNA) half
gcgaacgtgataa

SEQ ID NO: 7239 - DNA, 19 bp, Artificial Sequence
  synthetic circulating small noncoding RNA (sncRNA) 5' transfer RNA (tRNA) half
ctgaccgggaatcgaaccc

SEQ ID NO: 7240 - DNA, 33 bp, Artificial Sequence
  synthetic circulating small noncoding RNA (sncRNA) 5' transfer RNA (tRNA) half
gcgggagaccggggttcgattccccgacgggga

SEQ ID NO: 7241 - DNA, 24 bp, Artificial Sequence
  synthetic circulating small noncoding RNA (sncRNA) 5' transfer RNA (tRNA) half
tctccccgcgcaggttcgaatcct

SEQ ID NO: 7242 - DNA, 21 bp, Artificial Sequence
  synthetic circulating small noncoding RNA (sncRNA) 5' transfer RNA (tRNA) half
ctaatggataaggcatcagcc

SEQ ID NO: 7243 - DNA, 10 bp, Artificial Sequence
  synthetic circulating small noncoding RNA (sncRNA) 5' transfer RNA (tRNA) half
gaaccgggga

SEQ ID NO: 7244 - DNA, 22 bp, Artificial Sequence
  synthetic circulating small noncoding RNA (sncRNA) 5' transfer RNA (tRNA) half
tctaccactgagctataccccc

SEQ ID NO: 7245 - DNA, 32 bp, Artificial Sequence
  synthetic circulating small noncoding RNA (sncRNA) 5' transfer RNA (tRNA) half
gccgaaatagctcagttgggagagcgttagac

SEQ ID NO: 7246 - DNA, 23 bp, Artificial Sequence
  synthetic circulating small noncoding RNA (sncRNA) 5' transfer RNA (tRNA) half
tagtgtagcggttatcacgtctg

SEQ ID NO: 7247 - DNA, 13 bp, Artificial Sequence
  synthetic circulating small noncoding RNA (sncRNA) 5' transfer RNA (tRNA) half
ggggttcgattcc

SEQ ID NO: 7248 - DNA, 21 bp, Artificial Sequence
  synthetic circulating small noncoding RNA (sncRNA) 5' transfer RNA (tRNA) half
tcgaaaccgggcggaaacaac

SEQ ID NO: 7249 - DNA, 36 bp, Artificial Sequence
  synthetic circulating small noncoding RNA (sncRNA) 5' transfer RNA (tRNA) half
gtgcattggccgggaatcgaacccgggcctcccgcg

SEQ ID NO: 7250 - DNA, 27 bp, Artificial Sequence
  synthetic circulating small noncoding RNA (sncRNA) 5' transfer RNA (tRNA) half
agacgacgaggatgggattcgaaccca

SEQ ID NO: 7251 - DNA, 37 bp, Artificial Sequence
  synthetic circulating small noncoding RNA (sncRNA) 5' transfer RNA (tRNA) half
tccctgggtgggctcgaaccaccaacctttcggttaa

SEQ ID NO: 7252 - DNA, 32 bp, Artificial Sequence
  synthetic circulating small noncoding RNA (sncRNA) 5' transfer RNA (tRNA) half
gtcaaatgctctaccactgagctatacccccg

SEQ ID NO: 7253 - DNA, 37 bp, Artificial Sequence
  synthetic circulating small noncoding RNA (sncRNA) 5' transfer RNA (tRNA) half
gcccgaacagggacttgaaccctggaccctcagatta

SEQ ID NO: 7254 - DNA, 37 bp, Artificial Sequence
  synthetic circulating small noncoding RNA (sncRNA) 5' transfer RNA (tRNA) half
gtctccccgtcggggaatcgaaccccggtctcccgcg

SEQ ID NO: 7255 - DNA, 40 bp, Artificial Sequence
  synthetic circulating small noncoding RNA (sncRNA) 5' transfer RNA (tRNA) half
gtgccccgtgtgaggatcgaactcacgaccttcagattat

SEQ ID NO: 7256 - DNA, 21 bp, Artificial Sequence
  synthetic circulating small noncoding RNA (sncRNA) 5' transfer RNA (tRNA) half
gataaccactacactacggaa

SEQ ID NO: 7257 - DNA, 24 bp, Artificial Sequence
  synthetic circulating small noncoding RNA (sncRNA) 5' transfer RNA (tRNA) half
cgttatccattgcgccactggccc

SEQ ID NO: 7258 - DNA, 13 bp, Artificial Sequence
  synthetic circulating small noncoding RNA (sncRNA) 5' transfer RNA (tRNA) half
tcgaacccgcaac

SEQ ID NO: 7259 - DNA, 13 bp, Artificial Sequence
  synthetic circulating small noncoding RNA (sncRNA) 5' transfer RNA (tRNA) half
gcgcccaacgtgg

SEQ ID NO: 7260 - DNA, 27 bp, Artificial Sequence
  synthetic circulating small noncoding RNA (sncRNA) 5' transfer RNA (tRNA) half
ttcgacgaggatgggattcgaacccat

SEQ ID NO: 7261 - DNA, 23 bp, Artificial Sequence
  synthetic circulating small noncoding RNA (sncRNA) 5' transfer RNA (tRNA) half
ttccggctcgaaggacttcgtgc

SEQ ID NO: 7262 - DNA, 22 bp, Artificial Sequence
  synthetic circulating small noncoding RNA (sncRNA) 5' transfer RNA (tRNA) half
ggtctagcggttaggattcctg

SEQ ID NO: 7263 - DNA, 18 bp, Artificial Sequence
  synthetic circulating small noncoding RNA (sncRNA) 5' transfer RNA (tRNA) half
aaaccgggcggaaacaat

SEQ ID NO: 7264 - DNA, 13 bp, Artificial Sequence
  synthetic circulating small noncoding RNA (sncRNA) 5' transfer RNA (tRNA) half
gttagtactctgc

SEQ ID NO: 7265 - DNA, 40 bp, Artificial Sequence
  synthetic circulating small noncoding RNA (sncRNA) 5' transfer RNA (tRNA) half
tgaactcggatcgctggattcagagtccagagtgctaacc

SEQ ID NO: 7266 - DNA, 31 bp, Artificial Sequence
  synthetic circulating small noncoding RNA (sncRNA) 5' transfer RNA (tRNA) half
caggaatcctaaccgctagaccatatgggag

SEQ ID NO: 7267 - DNA, 27 bp, Artificial Sequence
  synthetic circulating small noncoding RNA (sncRNA) 5' transfer RNA (tRNA) half
aaccggggacctcttgatctgcagtca

SEQ ID NO: 7268 - DNA, 34 bp, Artificial Sequence
  synthetic circulating small noncoding RNA (sncRNA) 5' transfer RNA (tRNA) half
acaggagatcctgggttcgactcccagtggggcc

SEQ ID NO: 7269 - DNA, 23 bp, Artificial Sequence
  synthetic circulating small noncoding RNA (sncRNA) 5' transfer RNA (tRNA) half
tttgggtgcgagaggtcccgggt

SEQ ID NO: 7270 - DNA, 12 bp, Artificial Sequence
  synthetic circulating small noncoding RNA (sncRNA) 5' transfer RNA (tRNA) half
gggagactgcga

SEQ ID NO: 7271 - DNA, 16 bp, Artificial Sequence
  synthetic circulating small noncoding RNA (sncRNA) 5' transfer RNA (tRNA) half
actgagctagccgggc

SEQ ID NO: 7272 - DNA, 25 bp, Artificial Sequence
  synthetic circulating small noncoding RNA (sncRNA) 5' transfer RNA (tRNA) half
ggcaggcgagaattctaccactgaa

SEQ ID NO: 7273 - DNA, 20 bp, Artificial Sequence
  synthetic circulating small noncoding RNA (sncRNA) 5' transfer RNA (tRNA) half
aaggtccccggttcgaaacc

SEQ ID NO: 7274 - DNA, 11 bp, Artificial Sequence
  synthetic circulating small noncoding RNA (sncRNA) 5' transfer RNA (tRNA) half
acgtcggggtc

SEQ ID NO: 7275 - DNA, 30 bp, Artificial Sequence
  synthetic circulating small noncoding RNA (sncRNA) 5' transfer RNA (tRNA) half
tggcgccttagaccactcggccatcctgac

SEQ ID NO: 7276 - DNA, 28 bp, Artificial Sequence
  synthetic circulating small noncoding RNA (sncRNA) 5' transfer RNA (tRNA) half
gctggattcagagtccagagtgctaacc

SEQ ID NO: 7277 - DNA, 26 bp, Artificial Sequence
  synthetic circulating small noncoding RNA (sncRNA) 5' transfer RNA (tRNA) half
tggttaggattcggcgctctcaccgc

SEQ ID NO: 7278 - DNA, 20 bp, Artificial Sequence
  synthetic circulating small noncoding RNA (sncRNA) 5' transfer RNA (tRNA) half
gccccctctgaggttcgaac

SEQ ID NO: 7279 - DNA, 29 bp, Artificial Sequence
  synthetic circulating small noncoding RNA (sncRNA) 5' transfer RNA (tRNA) half
agagtggcgcagcggaagcgtgctgggcc

SEQ ID NO: 7280 - DNA, 12 bp, Artificial Sequence
  synthetic circulating small noncoding RNA (sncRNA) 5' transfer RNA (tRNA) half
gtcccatgctct

SEQ ID NO: 7281 - DNA, 26 bp, Artificial Sequence
  synthetic circulating small noncoding RNA (sncRNA) 5' transfer RNA (tRNA) half
catatggtctagcggttaggattcct

SEQ ID NO: 7282 - DNA, 9 bp, Artificial Sequence
  synthetic circulating small noncoding RNA (sncRNA) 5' transfer RNA (tRNA) half
gcgcccgaa

SEQ ID NO: 7283 - DNA, 22 bp, Artificial Sequence
  synthetic circulating small noncoding RNA (sncRNA) 5' transfer RNA (tRNA) half
aaaacaaagcctccgatagcag

SEQ ID NO: 7284 - DNA, 8 bp, Artificial Sequence
  synthetic circulating small noncoding RNA (sncRNA) 5' transfer RNA (tRNA) half
cgtagtcg

SEQ ID NO: 7285 - DNA, 10 bp, Artificial Sequence
  synthetic circulating small noncoding RNA (sncRNA) 5' transfer RNA (tRNA) half
agggacgtcg

SEQ ID NO: 7286 - DNA, 20 bp, Artificial Sequence
  synthetic circulating small noncoding RNA (sncRNA) 5' transfer RNA (tRNA) half
tcaccgccgcggcccgggtt

SEQ ID NO: 7287 - DNA, 18 bp, Artificial Sequence
  synthetic circulating small noncoding RNA (sncRNA) 5' transfer RNA (tRNA) half
ccgactgagctatccggg

SEQ ID NO: 7288 - DNA, 17 bp, Artificial Sequence
  synthetic circulating small noncoding RNA (sncRNA) 5' transfer RNA (tRNA) half
ctgaccgggaatcgaac

SEQ ID NO: 7289 - DNA, 32 bp, Artificial Sequence
  synthetic circulating small noncoding RNA (sncRNA) 5' transfer RNA (tRNA) half
aagtctgatgctctaccgactgagctatccgg

SEQ ID NO: 7290 - DNA, 36 bp, Artificial Sequence
  synthetic circulating small noncoding RNA (sncRNA) 5' transfer RNA (tRNA) half
ttgtgtcagaagtgggattcgaacccacgcctccat

SEQ ID NO: 7291 - DNA, 12 bp, Artificial Sequence
  synthetic circulating small noncoding RNA (sncRNA) 5' transfer RNA (tRNA) half
gcgccgctggtg

SEQ ID NO: 7292 - DNA, 36 bp, Artificial Sequence
  synthetic circulating small noncoding RNA (sncRNA) 5' transfer RNA (tRNA) half
tcagaaggttgcgtgttcaaatcacgtcggggtcaa

SEQ ID NO: 7293 - DNA, 20 bp, Artificial Sequence
  synthetic circulating small noncoding RNA (sncRNA) 5' transfer RNA (tRNA) half
cccgggccgcggcggtgaga

SEQ ID NO: 7294 - DNA, 15 bp, Artificial Sequence
  synthetic circulating small noncoding RNA (sncRNA) 5' transfer RNA (tRNA) half
tcgaaccggggacct

SEQ ID NO: 7295 - DNA, 20 bp, Artificial Sequence
  synthetic circulating small noncoding RNA (sncRNA) 5' transfer RNA (tRNA) half
ttcgactcccggtgtgggaa

SEQ ID NO: 7296 - DNA, 13 bp, Artificial Sequence
  synthetic circulating small noncoding RNA (sncRNA) 5' transfer RNA (tRNA) half
cagcgccttagac

SEQ ID NO: 7297 - DNA, 33 bp, Artificial Sequence
  synthetic circulating small noncoding RNA (sncRNA) 5' transfer RNA (tRNA) half
gagaggtcccgggttcaaatcccggacgagccc

SEQ ID NO: 7298 - DNA, 36 bp, Artificial Sequence
  synthetic circulating small noncoding RNA (sncRNA) 5' transfer RNA (tRNA) half
ggtagaattctcgcctgccacgcgggaggcccgggt

SEQ ID NO: 7299 - DNA, 18 bp, Artificial Sequence
  synthetic circulating small noncoding RNA (sncRNA) 5' transfer RNA (tRNA) half
tccccggcacctccactt

SEQ ID NO: 7300 - DNA, 16 bp, Artificial Sequence
  synthetic circulating small noncoding RNA (sncRNA) 5' transfer RNA (tRNA) half
tggttatcacgttcgc

SEQ ID NO: 7301 - DNA, 33 bp, Artificial Sequence
  synthetic circulating small noncoding RNA (sncRNA) 5' transfer RNA (tRNA) half
cttaggtcgctggttcgattccggctcgaagga

SEQ ID NO: 7302 - DNA, 23 bp, Artificial Sequence
  synthetic circulating small noncoding RNA (sncRNA) 5' transfer RNA (tRNA) half
ctaatggataaggcatcagcctc

SEQ ID NO: 7303 - DNA, 26 bp, Artificial Sequence
  synthetic circulating small noncoding RNA (sncRNA) 5' transfer RNA (tRNA) half
ttccgcagcgagcagggttcgaacct

SEQ ID NO: 7304 - DNA, 13 bp, Artificial Sequence
  synthetic circulating small noncoding RNA (sncRNA) 5' transfer RNA (tRNA) half
ggaatcgaacccc

SEQ ID NO: 7305 - DNA, 23 bp, Artificial Sequence
  synthetic circulating small noncoding RNA (sncRNA) 5' transfer RNA (tRNA) half
ggaatcctaaccgctagaccatg

SEQ ID NO: 7306 - DNA, 34 bp, Artificial Sequence
  synthetic circulating small noncoding RNA (sncRNA) 5' transfer RNA (tRNA) half
attaagagtcccatgctctaccgactgagctagc

SEQ ID NO: 7307 - DNA, 12 bp, Artificial Sequence
  synthetic circulating small noncoding RNA (sncRNA) 5' transfer RNA (tRNA) half
gacgaggatggg

SEQ ID NO: 7308 - DNA, 20 bp, Artificial Sequence
  synthetic circulating small noncoding RNA (sncRNA) 5' transfer RNA (tRNA) half
aaccctggaccctcagatta

SEQ ID NO: 7309 - DNA, 22 bp, Artificial Sequence
  synthetic circulating small noncoding RNA (sncRNA) 5' transfer RNA (tRNA) half
agaccggggttcgattccccga

SEQ ID NO: 7310 - DNA, 37 bp, Artificial Sequence
  synthetic circulating small noncoding RNA (sncRNA) 5' transfer RNA (tRNA) half
agctggggattgtgggttcgagtcccatctgggtcgc

SEQ ID NO: 7311 - DNA, 42 bp, Artificial Sequence
  synthetic circulating small noncoding RNA (sncRNA) 5' transfer RNA (tRNA) half
tccctggtggtctagtggttaggattcggcgctctcaccgcc

SEQ ID NO: 7312 - DNA, 17 bp, Artificial Sequence
  synthetic circulating small noncoding RNA (sncRNA) 5' transfer RNA (tRNA) half
gccgaacgcgctaaccg

SEQ ID NO: 7313 - DNA, 20 bp, Artificial Sequence
  synthetic circulating small noncoding RNA (sncRNA) 5' transfer RNA (tRNA) half
cgaactcacgaccttcagat

SEQ ID NO: 7314 - DNA, 31 bp, Artificial Sequence
  synthetic circulating small noncoding RNA (sncRNA) 5' transfer RNA (tRNA) half
gattcggcgctctcaccgccgcggcccgggt

SEQ ID NO: 7315 - DNA, 34 bp, Artificial Sequence
  synthetic circulating small noncoding RNA (sncRNA) 5' transfer RNA (tRNA) half
tatgaggccccgggttcaatccccggcatctcca

SEQ ID NO: 7316 - DNA, 12 bp, Artificial Sequence
  synthetic circulating small noncoding RNA (sncRNA) 5' transfer RNA (tRNA) half
gcggcggtgaga

SEQ ID NO: 7317 - DNA, 41 bp, Artificial Sequence
  synthetic circulating small noncoding RNA (sncRNA) 5' transfer RNA (tRNA) half
ccggctagctcagtcggtagagcatgagactcttaatctca

SEQ ID NO: 7318 - DNA, 15 bp, Artificial Sequence
  synthetic circulating small noncoding RNA (sncRNA) 5' transfer RNA (tRNA) half
gggagtcgaacccgg

SEQ ID NO: 7319 - DNA, 16 bp, Artificial Sequence
  synthetic circulating small noncoding RNA (sncRNA) 5' transfer RNA (tRNA) half
ctcctggctggctcgt

SEQ ID NO: 7320 - DNA, 13 bp, Artificial Sequence
  synthetic circulating small noncoding RNA (sncRNA) 5' transfer RNA (tRNA) half
ctcggccatcctg

SEQ ID NO: 7321 - DNA, 31 bp, Artificial Sequence
  synthetic circulating small noncoding RNA (sncRNA) 5' transfer RNA (tRNA) half
ggccctatagctcaggggttagagcactggt

SEQ ID NO: 7322 - DNA, 29 bp, Artificial Sequence
  synthetic circulating small noncoding RNA (sncRNA) 5' transfer RNA (tRNA) half
gggccgcctgggtgaaaaccaggaatcct

SEQ ID NO: 7323 - DNA, 19 bp, Artificial Sequence
  synthetic circulating small noncoding RNA (sncRNA) 5' transfer RNA (tRNA) half
gattcgaacacgcagcctt

SEQ ID NO: 7324 - DNA, 13 bp, Artificial Sequence
  synthetic circulating small noncoding RNA (sncRNA) 5' transfer RNA (tRNA) half
acccggggcctca

SEQ ID NO: 7325 - DNA, 17 bp, Artificial Sequence
  synthetic circulating small noncoding RNA (sncRNA) 5' transfer RNA (tRNA) half
gagggggcacccggatt

SEQ ID NO: 7326 - DNA, 37 bp, Artificial Sequence
  synthetic circulating small noncoding RNA (sncRNA) 5' transfer RNA (tRNA) half
gcatgaggccccgggttcgatccccggcacctccact

SEQ ID NO: 7327 - DNA, 31 bp, Artificial Sequence
  synthetic circulating small noncoding RNA (sncRNA) 5' transfer RNA (tRNA) half
tgcgacccgggttcgattcccgggcggcgca

SEQ ID NO: 7328 - DNA, 35 bp, Artificial Sequence
  synthetic circulating small noncoding RNA (sncRNA) 5' transfer RNA (tRNA) half
aggcgaacgtgataaccactacactacggaaactc

SEQ ID NO: 7329 - DNA, 17 bp, Artificial Sequence
  synthetic circulating small noncoding RNA (sncRNA) 5' transfer RNA (tRNA) half
cattggccgggaatcga

SEQ ID NO: 7330 - DNA, 13 bp, Artificial Sequence
  synthetic circulating small noncoding RNA (sncRNA) 5' transfer RNA (tRNA) half
agtctgatgctct

SEQ ID NO: 7331 - DNA, 10 bp, Artificial Sequence
  synthetic circulating small noncoding RNA (sncRNA) 5' transfer RNA (tRNA) half
accccgacgt

SEQ ID NO: 7332 - DNA, 15 bp, Artificial Sequence
  synthetic circulating small noncoding RNA (sncRNA) 5' transfer RNA (tRNA) half
ttggtggttcagtgg

SEQ ID NO: 7333 - DNA, 32 bp, Artificial Sequence
  synthetic circulating small noncoding RNA (sncRNA) 5' transfer RNA (tRNA) half
ccatatggtctagcggttaggattcctggttt

SEQ ID NO: 7334 - DNA, 35 bp, Artificial Sequence
  synthetic circulating small noncoding RNA (sncRNA) 5' transfer RNA (tRNA) half
ctcagggtcgtgggttcgagccccacgttgggcgc

SEQ ID NO: 7335 - DNA, 27 bp, Artificial Sequence
  synthetic circulating small noncoding RNA (sncRNA) 5' transfer RNA (tRNA) half
ggggttcgattccccgacggggagtct

SEQ ID NO: 7336 - DNA, 15 bp, Artificial Sequence
  synthetic circulating small noncoding RNA (sncRNA) 5' transfer RNA (tRNA) half
ggttcgatccccggc

SEQ ID NO: 7337 - DNA, 8 bp, Artificial Sequence
  synthetic circulating small noncoding RNA (sncRNA) 5' transfer RNA (tRNA) half
gcccggct

SEQ ID NO: 7338 - DNA, 32 bp, Artificial Sequence
  synthetic circulating small noncoding RNA (sncRNA) 5' transfer RNA (tRNA) half
gggcccagcacgcttccgctgcgccactctgc

SEQ ID NO: 7339 - DNA, 14 bp, Artificial Sequence
  synthetic circulating small noncoding RNA (sncRNA) 5' transfer RNA (tRNA) half
acccacgcgtgcaa

SEQ ID NO: 7340 - DNA, 10 bp, Artificial Sequence
  synthetic circulating small noncoding RNA (sncRNA) 5' transfer RNA (tRNA) half
cccgggccgc

SEQ ID NO: 7341 - DNA, 35 bp, Artificial Sequence
  synthetic circulating small noncoding RNA (sncRNA) 5' transfer RNA (tRNA) half
gtttccgcccggtttcgaaccggggacctttcgcg

SEQ ID NO: 7342 - DNA, 22 bp, Artificial Sequence
  synthetic circulating small noncoding RNA (sncRNA) 5' transfer RNA (tRNA) half
tacctccccgtcggggaatcga

SEQ ID NO: 7343 - DNA, 17 bp, Artificial Sequence
  synthetic circulating small noncoding RNA (sncRNA) 5' transfer RNA (tRNA) half
gtatgattctcgctttg

SEQ ID NO: 7344 - DNA, 15 bp, Artificial Sequence
  synthetic circulating small noncoding RNA (sncRNA) 5' transfer RNA (tRNA) half
tccaatgcgctatcc

SEQ ID NO: 7345 - DNA, 35 bp, Artificial Sequence
  synthetic circulating small noncoding RNA (sncRNA) 5' transfer RNA (tRNA) half
tgtatgaggccccgggttcaatccccggcatctcc

SEQ ID NO: 7346 - DNA, 27 bp, Artificial Sequence
  synthetic circulating small noncoding RNA (sncRNA) 5' transfer RNA (tRNA) half
atggttagcactctggactctgaatcc

SEQ ID NO: 7347 - DNA, 33 bp, Artificial Sequence
  synthetic circulating small noncoding RNA (sncRNA) 5' transfer RNA (tRNA) half
ccgcagcaacctcggttcgaatccgagtcacgg

SEQ ID NO: 7348 - DNA, 34 bp, Artificial Sequence
  synthetic circulating small noncoding RNA (sncRNA) 5' transfer RNA (tRNA) half
cattggccgggaatcaaacccgggcctcccgcgt

SEQ ID NO: 7349 - DNA, 14 bp, Artificial Sequence
  synthetic circulating small noncoding RNA (sncRNA) 5' transfer RNA (tRNA) half
tagagcatttgact

SEQ ID NO: 7350 - DNA, 18 bp, Artificial Sequence
  synthetic circulating small noncoding RNA (sncRNA) 5' transfer RNA (tRNA) half
gattcccggccaatgcac

SEQ ID NO: 7351 - DNA, 21 bp, Artificial Sequence
  synthetic circulating small noncoding RNA (sncRNA) 5' transfer RNA (tRNA) half
ggttcaaatcccggacgagcc

SEQ ID NO: 7352 - DNA, 14 bp, Artificial Sequence
  synthetic circulating small noncoding RNA (sncRNA) 5' transfer RNA (tRNA) half
gttatcacgttcgc

SEQ ID NO: 7353 - DNA, 12 bp, Artificial Sequence
  synthetic circulating small noncoding RNA (sncRNA) 5' transfer RNA (tRNA) half
ctcggtggaacc

SEQ ID NO: 7354 - DNA, 14 bp, Artificial Sequence
  synthetic circulating small noncoding RNA (sncRNA) 5' transfer RNA (tRNA) half
cagagtgctaacca

SEQ ID NO: 7355 - DNA, 11 bp, Artificial Sequence
  synthetic circulating small noncoding RNA (sncRNA) 5' transfer RNA (tRNA) half
gctaaccggcc

SEQ ID NO: 7356 - DNA, 29 bp, Artificial Sequence
  synthetic circulating small noncoding RNA (sncRNA) 5' transfer RNA (tRNA) half
ccggatgatcctcagtggtctggggtgca

SEQ ID NO: 7357 - DNA, 28 bp, Artificial Sequence
  synthetic circulating small noncoding RNA (sncRNA) 5' transfer RNA (tRNA) half
gcgtgacaggcggggatactaaccacta

SEQ ID NO: 7358 - DNA, 21 bp, Artificial Sequence
  synthetic circulating small noncoding RNA (sncRNA) 5' transfer RNA (tRNA) half
acccgggcctcccgcgtggca

SEQ ID NO: 7359 - DNA, 11 bp, Artificial Sequence
  synthetic circulating small noncoding RNA (sncRNA) 5' transfer RNA (tRNA) half
cgaacctgcgc

SEQ ID NO: 7360 - DNA, 21 bp, Artificial Sequence
  synthetic circulating small noncoding RNA (sncRNA) 5' transfer RNA (tRNA) half
tgggtgcgagaggtcccgggt

SEQ ID NO: 7361 - DNA, 26 bp, Artificial Sequence
  synthetic circulating small noncoding RNA (sncRNA) 5' transfer RNA (tRNA) half
ccatagtgtagcggttatcacgtctg

SEQ ID NO: 7362 - DNA, 22 bp, Artificial Sequence
  synthetic circulating small noncoding RNA (sncRNA) 5' transfer RNA (tRNA) half
gtggttcagtggtagaattctc

SEQ ID NO: 7363 - DNA, 22 bp, Artificial Sequence
  synthetic circulating small noncoding RNA (sncRNA) 5' transfer RNA (tRNA) half
agtccagagtgctagccattac

SEQ ID NO: 7364 - DNA, 23 bp, Artificial Sequence
  synthetic circulating small noncoding RNA (sncRNA) 5' transfer RNA (tRNA) half
ccttccaagcagttgacccgggt

SEQ ID NO: 7365 - DNA, 17 bp, Artificial Sequence
  synthetic circulating small noncoding RNA (sncRNA) 5' transfer RNA (tRNA) half
caaatcccggacgagcc

SEQ ID NO: 7366 - DNA, 14 bp, Artificial Sequence
  synthetic circulating small noncoding RNA (sncRNA) 5' transfer RNA (tRNA) half
tggcagcggtggga

SEQ ID NO: 7367 - DNA, 30 bp, Artificial Sequence
  synthetic circulating small noncoding RNA (sncRNA) 5' transfer RNA (tRNA) half
gttccatggtgtaatggttagcactctgga

SEQ ID NO: 7368 - DNA, 15 bp, Artificial Sequence
  synthetic circulating small noncoding RNA (sncRNA) 5' transfer RNA (tRNA) half
tgaccgggaatcgaa

SEQ ID NO: 7369 - DNA, 31 bp, Artificial Sequence
  synthetic circulating small noncoding RNA (sncRNA) 5' transfer RNA (tRNA) half
cagcgatccgagttcaaatctcggtggaacc

SEQ ID NO: 7370 - DNA, 19 bp, Artificial Sequence
  synthetic circulating small noncoding RNA (sncRNA) 5' transfer RNA (tRNA) half
ttcgatccccggcatctcc

SEQ ID NO: 7371 - DNA, 23 bp, Artificial Sequence
  synthetic circulating small noncoding RNA (sncRNA) 5' transfer RNA (tRNA) half
ttcgagcctcacctggagcacga

SEQ ID NO: 7372 - DNA, 23 bp, Artificial Sequence
  synthetic circulating small noncoding RNA (sncRNA) 5' transfer RNA (tRNA) half
acgctgcgttggccgggaatcga

SEQ ID NO: 7373 - DNA, 16 bp, Artificial Sequence
  synthetic circulating small noncoding RNA (sncRNA) 5' transfer RNA (tRNA) half
tggtgagtatccccgc

SEQ ID NO: 7374 - DNA, 17 bp, Artificial Sequence
  synthetic circulating small noncoding RNA (sncRNA) 5' transfer RNA (tRNA) half
gcaggcgagaattctac

SEQ ID NO: 7375 - DNA, 36 bp, Artificial Sequence
  synthetic circulating small noncoding RNA (sncRNA) 5' transfer RNA (tRNA) half
tctccccgtcggggaatcgaaccccggtctcccgcg

SEQ ID NO: 7376 - DNA, 11 bp, Artificial Sequence
  synthetic circulating small noncoding RNA (sncRNA) 5' transfer RNA (tRNA) half
actacggaaac

SEQ ID NO: 7377 - DNA, 33 bp, Artificial Sequence
  synthetic circulating small noncoding RNA (sncRNA) 5' transfer RNA (tRNA) half
cccaacgtggggctcgaacccacgaccctgaga

SEQ ID NO: 7378 - DNA, 21 bp, Artificial Sequence
  synthetic circulating small noncoding RNA (sncRNA) 5' transfer RNA (tRNA) half
tggtcatcacgctcgcctcac

SEQ ID NO: 7379 - DNA, 19 bp, Artificial Sequence
  synthetic circulating small noncoding RNA (sncRNA) 5' transfer RNA (tRNA) half
accactacactacggaaac

SEQ ID NO: 7380 - DNA, 14 bp, Artificial Sequence
  synthetic circulating small noncoding RNA (sncRNA) 5' transfer RNA (tRNA) half
tcttcgggggcgtg

SEQ ID NO: 7381 - DNA, 36 bp, Artificial Sequence
  synthetic circulating small noncoding RNA (sncRNA) 5' transfer RNA (tRNA) half
agtgccgagactcggattcgaaccgaggttgctgca

SEQ ID NO: 7382 - DNA, 14 bp, Artificial Sequence
  synthetic circulating small noncoding RNA (sncRNA) 5' transfer RNA (tRNA) half
tccccggcatctcc

SEQ ID NO: 7383 - DNA, 22 bp, Artificial Sequence
  synthetic circulating small noncoding RNA (sncRNA) 5' transfer RNA (tRNA) half
gttccaccgagatttgaactcg

SEQ ID NO: 7384 - DNA, 22 bp, Artificial Sequence
  synthetic circulating small noncoding RNA (sncRNA) 5' transfer RNA (tRNA) half
ggaatcctaaccgctagaccat

SEQ ID NO: 7385 - DNA, 28 bp, Artificial Sequence
  synthetic circulating small noncoding RNA (sncRNA) 5' transfer RNA (tRNA) half
cacatggtctagcggttaggattcctgg

SEQ ID NO: 7386 - DNA, 11 bp, Artificial Sequence
  synthetic circulating small noncoding RNA (sncRNA) 5' transfer RNA (tRNA) half
gtagtcgtggc

SEQ ID NO: 7387 - DNA, 12 bp, Artificial Sequence
  synthetic circulating small noncoding RNA (sncRNA) 5' transfer RNA (tRNA) half
gcgaacgtgata

SEQ ID NO: 7388 - DNA, 23 bp, Artificial Sequence
  synthetic circulating small noncoding RNA (sncRNA) 5' transfer RNA (tRNA) half
gacaggcggggatactcaccact

SEQ ID NO: 7389 - DNA, 17 bp, Artificial Sequence
  synthetic circulating small noncoding RNA (sncRNA) 5' transfer RNA (tRNA) half
ccgactgagctatccgg

SEQ ID NO: 7390 - DNA, 12 bp, Artificial Sequence
  synthetic circulating small noncoding RNA (sncRNA) 5' transfer RNA (tRNA) half
gagtcgaacctg

SEQ ID NO: 7391 - DNA, 14 bp, Artificial Sequence
  synthetic circulating small noncoding RNA (sncRNA) 5' transfer RNA (tRNA) half
aacccgggacctct

SEQ ID NO: 7392 - DNA, 10 bp, Artificial Sequence
  synthetic circulating small noncoding RNA (sncRNA) 5' transfer RNA (tRNA) half
gagtcgaacc

SEQ ID NO: 7393 - DNA, 20 bp, Artificial Sequence
  synthetic circulating small noncoding RNA (sncRNA) 5' transfer RNA (tRNA) half
caggagtcgaacctggaatc

SEQ ID NO: 7394 - DNA, 38 bp, Artificial Sequence
  synthetic circulating small noncoding RNA (sncRNA) 5' transfer RNA (tRNA) half
acacgcagaaggtcctgggttcgagccccagtggaacc

SEQ ID NO: 7395 - DNA, 35 bp, Artificial Sequence
  synthetic circulating small noncoding RNA (sncRNA) 5' transfer RNA (tRNA) half
tagcgcccgaacagggacttgaaccctggaccctc

SEQ ID NO: 7396 - DNA, 29 bp, Artificial Sequence
  synthetic circulating small noncoding RNA (sncRNA) 5' transfer RNA (tRNA) half
aatcgaaccccggtctcccgcgtgacagg

SEQ ID NO: 7397 - DNA, 28 bp, Artificial Sequence
  synthetic circulating small noncoding RNA (sncRNA) 5' transfer RNA (tRNA) half
gacgacgaggatgggattcgaacccacg

SEQ ID NO: 7398 - DNA, 44 bp, Artificial Sequence
  synthetic circulating small noncoding RNA (sncRNA) 5' transfer RNA (tRNA) half
cgtctccccgtcggggaatcgaaccccggtctcccgcgtgacag

SEQ ID NO: 7399 - DNA, 20 bp, Artificial Sequence
  synthetic circulating small noncoding RNA (sncRNA) 5' transfer RNA (tRNA) half
cgggtcaactgcttggaagg

SEQ ID NO: 7400 - DNA, 21 bp, Artificial Sequence
  synthetic circulating small noncoding RNA (sncRNA) 5' transfer RNA (tRNA) half
agttcaaatctcgctggggcc

SEQ ID NO: 7401 - DNA, 31 bp, Artificial Sequence
  synthetic circulating small noncoding RNA (sncRNA) 5' transfer RNA (tRNA) half
aaggtcctgggttcgagccccagtggaacca

SEQ ID NO: 7402 - DNA, 24 bp, Artificial Sequence
  synthetic circulating small noncoding RNA (sncRNA) 5' transfer RNA (tRNA) half
gccgtgactcggattcgaaccgag

SEQ ID NO: 7403 - DNA, 21 bp, Artificial Sequence
  synthetic circulating small noncoding RNA (sncRNA) 5' transfer RNA (tRNA) half
taggggttagtactctgcgtt

SEQ ID NO: 7404 - DNA, 11 bp, Artificial Sequence
  synthetic circulating small noncoding RNA (sncRNA) 5' transfer RNA (tRNA) half
cttcgagccgg

SEQ ID NO: 7405 - DNA, 11 bp, Artificial Sequence
  synthetic circulating small noncoding RNA (sncRNA) 5' transfer RNA (tRNA) half
gccacgactac

SEQ ID NO: 7406 - DNA, 28 bp, Artificial Sequence
  synthetic circulating small noncoding RNA (sncRNA) 5' transfer RNA (tRNA) half
gtcggtagagcatgagactcttaatctc

SEQ ID NO: 7407 - DNA, 33 bp, Artificial Sequence
  synthetic circulating small noncoding RNA (sncRNA) 5' transfer RNA (tRNA) half
caggcggggatactaaccactatactaacgagg

SEQ ID NO: 7408 - DNA, 32 bp, Artificial Sequence
  synthetic circulating small noncoding RNA (sncRNA) 5' transfer RNA (tRNA) half
cgcccaacgtggggctcgaacccacgaccctg

SEQ ID NO: 7409 - DNA, 13 bp, Artificial Sequence
  synthetic circulating small noncoding RNA (sncRNA) 5' transfer RNA (tRNA) half
gcaggcgagaatt

SEQ ID NO: 7410 - DNA, 35 bp, Artificial Sequence
  synthetic circulating small noncoding RNA (sncRNA) 5' transfer RNA (tRNA) half
tttccgcccggtttcgaaccggggacctttcgcgt

SEQ ID NO: 7411 - DNA, 19 bp, Artificial Sequence
  synthetic circulating small noncoding RNA (sncRNA) 5' transfer RNA (tRNA) half
acccctgagctatggagcc

SEQ ID NO: 7412 - DNA, 15 bp, Artificial Sequence
  synthetic circulating small noncoding RNA (sncRNA) 5' transfer RNA (tRNA) half
tttccctgaccggga

SEQ ID NO: 7413 - DNA, 26 bp, Artificial Sequence
  synthetic circulating small noncoding RNA (sncRNA) 5' transfer RNA (tRNA) half
cggatagctcagtcggtagagcatca

SEQ ID NO: 7414 - DNA, 18 bp, Artificial Sequence
  synthetic circulating small noncoding RNA (sncRNA) 5' transfer RNA (tRNA) half
gcgcccgaacagggactt

SEQ ID NO: 7415 - DNA, 22 bp, Artificial Sequence
  synthetic circulating small noncoding RNA (sncRNA) 5' transfer RNA (tRNA) half
cgcccgaacagggacttgaacc

SEQ ID NO: 7416 - DNA, 21 bp, Artificial Sequence
  synthetic circulating small noncoding RNA (sncRNA) 5' transfer RNA (tRNA) half
gcaggcgagaattctaccact

SEQ ID NO: 7417 - DNA, 37 bp, Artificial Sequence
  synthetic circulating small noncoding RNA (sncRNA) 5' transfer RNA (tRNA) half
tgagagcgccgaatcctaaccactagaccaccaggga

SEQ ID NO: 7418 - DNA, 22 bp, Artificial Sequence
  synthetic circulating small noncoding RNA (sncRNA) 5' transfer RNA (tRNA) half
gtcaaatgctctaccactgagc

SEQ ID NO: 7419 - DNA, 25 bp, Artificial Sequence
  synthetic circulating small noncoding RNA (sncRNA) 5' transfer RNA (tRNA) half
gaccgggaatcgaacccgggccgcg

SEQ ID NO: 7420 - DNA, 35 bp, Artificial Sequence
  synthetic circulating small noncoding RNA (sncRNA) 5' transfer RNA (tRNA) half
agcgactctggtgggactcgaacccacaacctttg

SEQ ID NO: 7421 - DNA, 18 bp, Artificial Sequence
  synthetic circulating small noncoding RNA (sncRNA) 5' transfer RNA (tRNA) half
agagcgccgaatcctaac

SEQ ID NO: 7422 - DNA, 33 bp, Artificial Sequence
  synthetic circulating small noncoding RNA (sncRNA) 5' transfer RNA (tRNA) half
aaaaccaggaatcctaaccgctagaccatgtgg

SEQ ID NO: 7423 - DNA, 24 bp, Artificial Sequence
  synthetic circulating small noncoding RNA (sncRNA) 5' transfer RNA (tRNA) half
tggagatgccggggatcgaacccg

SEQ ID NO: 7424 - DNA, 34 bp, Artificial Sequence
  synthetic circulating small noncoding RNA (sncRNA) 5' transfer RNA (tRNA) half
aacttccctggtggtctagtggttaggattcggc

SEQ ID NO: 7425 - DNA, 18 bp, Artificial Sequence
  synthetic circulating small noncoding RNA (sncRNA) 5' transfer RNA (tRNA) half
cgaacgtgataaccacta

SEQ ID NO: 7426 - DNA, 28 bp, Artificial Sequence
  synthetic circulating small noncoding RNA (sncRNA) 5' transfer RNA (tRNA) half
gattcggcgctctcaccgccgcggcccg

SEQ ID NO: 7427 - DNA, 38 bp, Artificial Sequence
  synthetic circulating small noncoding RNA (sncRNA) 5' transfer RNA (tRNA) half
caccacgctctaaccaactgagctaaccggccagacct

SEQ ID NO: 7428 - DNA, 32 bp, Artificial Sequence
  synthetic circulating small noncoding RNA (sncRNA) 5' transfer RNA (tRNA) half
gcctccccgtcggggaatcgaaccccggtctc

SEQ ID NO: 7429 - DNA, 11 bp, Artificial Sequence
  synthetic circulating small noncoding RNA (sncRNA) 5' transfer RNA (tRNA) half
agtcgaacccg

SEQ ID NO: 7430 - DNA, 22 bp, Artificial Sequence
  synthetic circulating small noncoding RNA (sncRNA) 5' transfer RNA (tRNA) half
gggaatcgaacccgggccgcgg

SEQ ID NO: 7431 - DNA, 12 bp, Artificial Sequence
  synthetic circulating small noncoding RNA (sncRNA) 5' transfer RNA (tRNA) half
tgagagcgccga

SEQ ID NO: 7432 - DNA, 11 bp, Artificial Sequence
  synthetic circulating small noncoding RNA (sncRNA) 5' transfer RNA (tRNA) half
ccggctagctc

SEQ ID NO: 7433 - DNA, 19 bp, Artificial Sequence
  synthetic circulating small noncoding RNA (sncRNA) 5' transfer RNA (tRNA) half
cgaaccccgtccgtgcctg

SEQ ID NO: 7434 - DNA, 14 bp, Artificial Sequence
  synthetic circulating small noncoding RNA (sncRNA) 5' transfer RNA (tRNA) half
gccttagaccactc

SEQ ID NO: 7435 - DNA, 36 bp, Artificial Sequence
  synthetic circulating small noncoding RNA (sncRNA) 5' transfer RNA (tRNA) half
caggcggcccgggttcgactcccggtatgggaacag

SEQ ID NO: 7436 - DNA, 14 bp, Artificial Sequence
  synthetic circulating small noncoding RNA (sncRNA) 5' transfer RNA (tRNA) half
gctgccgaaacccg

SEQ ID NO: 7437 - DNA, 23 bp, Artificial Sequence
  synthetic circulating small noncoding RNA (sncRNA) 5' transfer RNA (tRNA) half
caccgggagtcgaacccgggccg

SEQ ID NO: 7438 - DNA, 34 bp, Artificial Sequence
  synthetic circulating small noncoding RNA (sncRNA) 5' transfer RNA (tRNA) half
cgggaggcccgggttcgattcccggccaatgcac

SEQ ID NO: 7439 - DNA, 32 bp, Artificial Sequence
  synthetic circulating small noncoding RNA (sncRNA) 5' transfer RNA (tRNA) half
agggtccagggttcaagtccctgttcgggcgc

SEQ ID NO: 7440 - DNA, 17 bp, Artificial Sequence
  synthetic circulating small noncoding RNA (sncRNA) 5' transfer RNA (tRNA) half
ggttccatagtgtagcg

SEQ ID NO: 7441 - DNA, 27 bp, Artificial Sequence
  synthetic circulating small noncoding RNA (sncRNA) 5' transfer RNA (tRNA) half
cgggagaccggggttcgattccccgac

SEQ ID NO: 7442 - DNA, 30 bp, Artificial Sequence
  synthetic circulating small noncoding RNA (sncRNA) 5' transfer RNA (tRNA) half
gccgtgactcggattcgaaccgaggttgct

SEQ ID NO: 7443 - DNA, 29 bp, Artificial Sequence
  synthetic circulating small noncoding RNA (sncRNA) 5' transfer RNA (tRNA) half
cgggccgcggcggtgagagcgccgaatcc

SEQ ID NO: 7444 - DNA, 17 bp, Artificial Sequence
  synthetic circulating small noncoding RNA (sncRNA) 5' transfer RNA (tRNA) half
gagtccagagtgctaac

SEQ ID NO: 7445 - DNA, 21 bp, Artificial Sequence
  synthetic circulating small noncoding RNA (sncRNA) 5' transfer RNA (tRNA) half
ctcagtcggtagagcatcaga

SEQ ID NO: 7446 - DNA, 34 bp, Artificial Sequence
  synthetic circulating small noncoding RNA (sncRNA) 5' transfer RNA (tRNA) half
gggaggcccgggttcgattcccggccaatgcacg

SEQ ID NO: 7447 - DNA, 19 bp, Artificial Sequence
  synthetic circulating small noncoding RNA (sncRNA) 5' transfer RNA (tRNA) half
aaaccaggaatcctaaccg

SEQ ID NO: 7448 - DNA, 36 bp, Artificial Sequence
  synthetic circulating small noncoding RNA (sncRNA) 5' transfer RNA (tRNA) half
cgaaaggtccccggttcgaaaccgggcggaaacagc

SEQ ID NO: 7449 - DNA, 27 bp, Artificial Sequence
  synthetic circulating small noncoding RNA (sncRNA) 5' transfer RNA (tRNA) half
gcggcggtgagagcgccgaatcctaac

SEQ ID NO: 7450 - DNA, 26 bp, Artificial Sequence
  synthetic circulating small noncoding RNA (sncRNA) 5' transfer RNA (tRNA) half
ctccccgtcggggaatcgaaccccgg

SEQ ID NO: 7451 - DNA, 22 bp, Artificial Sequence
  synthetic circulating small noncoding RNA (sncRNA) 5' transfer RNA (tRNA) half
tcgaaccccgtccgtgcctgcg

SEQ ID NO: 7452 - DNA, 12 bp, Artificial Sequence
  synthetic circulating small noncoding RNA (sncRNA) 5' transfer RNA (tRNA) half
gagtcgaacccg

SEQ ID NO: 7453 - DNA, 33 bp, Artificial Sequence
  synthetic circulating small noncoding RNA (sncRNA) 5' transfer RNA (tRNA) half
actccctggtggtctagtggttaggattcggcg

SEQ ID NO: 7454 - DNA, 26 bp, Artificial Sequence
  synthetic circulating small noncoding RNA (sncRNA) 5' transfer RNA (tRNA) half
tcccatgctctaccgactgagctagc

SEQ ID NO: 7455 - DNA, 20 bp, Artificial Sequence
  synthetic circulating small noncoding RNA (sncRNA) 5' transfer RNA (tRNA) half
gcagtcaaatgctctaccac

SEQ ID NO: 7456 - DNA, 35 bp, Artificial Sequence
  synthetic circulating small noncoding RNA (sncRNA) 5' transfer RNA (tRNA) half
ccaggcggcccgggttcgactcccggtatgggaac

SEQ ID NO: 7457 - DNA, 13 bp, Artificial Sequence
  synthetic circulating small noncoding RNA (sncRNA) 5' transfer RNA (tRNA) half
ggttaggattcgg

SEQ ID NO: 7458 - DNA, 11 bp, Artificial Sequence
  synthetic circulating small noncoding RNA (sncRNA) 5' transfer RNA (tRNA) half
gaacctgcgcg

SEQ ID NO: 7459 - DNA, 33 bp, Artificial Sequence
  synthetic circulating small noncoding RNA (sncRNA) 5' transfer RNA (tRNA) half
tgaggcgaacgtgataaccactacactacggaa

SEQ ID NO: 7460 - DNA, 18 bp, Artificial Sequence
  synthetic circulating small noncoding RNA (sncRNA) 5' transfer RNA (tRNA) half
gaaccgaggttgctgcgg

SEQ ID NO: 7461 - DNA, 23 bp, Artificial Sequence
  synthetic circulating small noncoding RNA (sncRNA) 5' transfer RNA (tRNA) half
aaccccggtctcccgcgtgacag

SEQ ID NO: 7462 - DNA, 9 bp, Artificial Sequence
  synthetic circulating small noncoding RNA (sncRNA) 5' transfer RNA (tRNA) half
ggttcgact

SEQ ID NO: 7463 - DNA, 29 bp, Artificial Sequence
  synthetic circulating small noncoding RNA (sncRNA) 5' transfer RNA (tRNA) half
gtctccccgtcggggaatcgaaccccggt

SEQ ID NO: 7464 - DNA, 15 bp, Artificial Sequence
  synthetic circulating small noncoding RNA (sncRNA) 5' transfer RNA (tRNA) half
gtccagagtgctaac

SEQ ID NO: 7465 - DNA, 39 bp, Artificial Sequence
  synthetic circulating small noncoding RNA (sncRNA) 5' transfer RNA (tRNA) half
acgcgggagaccggggttcgattccccgacggggagtct

SEQ ID NO: 7466 - DNA, 18 bp, Artificial Sequence
  synthetic circulating small noncoding RNA (sncRNA) 5' transfer RNA (tRNA) half
tcagaagattctaggttc

SEQ ID NO: 7467 - DNA, 33 bp, Artificial Sequence
  synthetic circulating small noncoding RNA (sncRNA) 5' transfer RNA (tRNA) half
gccccagtggcctaatggataaggcattggcct

SEQ ID NO: 7468 - DNA, 12 bp, Artificial Sequence
  synthetic circulating small noncoding RNA (sncRNA) 5' transfer RNA (tRNA) half
tcggggaatcga

SEQ ID NO: 7469 - DNA, 17 bp, Artificial Sequence
  synthetic circulating small noncoding RNA (sncRNA) 5' transfer RNA (tRNA) half
gcccaacgtggggctcg

SEQ ID NO: 7470 - DNA, 37 bp, Artificial Sequence
  synthetic circulating small noncoding RNA (sncRNA) 5' transfer RNA (tRNA) half
ccaggcggcccgggttcgactcccggtatgggaacag

SEQ ID NO: 7471 - DNA, 15 bp, Artificial Sequence
  synthetic circulating small noncoding RNA (sncRNA) 5' transfer RNA (tRNA) half
tccccggcatctcca

SEQ ID NO: 7472 - DNA, 32 bp, Artificial Sequence
  synthetic circulating small noncoding RNA (sncRNA) 5' transfer RNA (tRNA) half
gggggcacccggatttgaaccggggacctctt

SEQ ID NO: 7473 - DNA, 39 bp, Artificial Sequence
  synthetic circulating small noncoding RNA (sncRNA) 5' transfer RNA (tRNA) half
gttgccccctctgaggttcgaactcaggaccttcagatt

SEQ ID NO: 7474 - DNA, 35 bp, Artificial Sequence
  synthetic circulating small noncoding RNA (sncRNA) 5' transfer RNA (tRNA) half
caacgcagagtactaaccactatacgatcacggcg

SEQ ID NO: 7475 - DNA, 18 bp, Artificial Sequence
  synthetic circulating small noncoding RNA (sncRNA) 5' transfer RNA (tRNA) half
ctcagtcggtagagcatc

SEQ ID NO: 7476 - DNA, 8 bp, Artificial Sequence
  synthetic circulating small noncoding RNA (sncRNA) 5' transfer RNA (tRNA) half
agtcgaac

SEQ ID NO: 7477 - DNA, 29 bp, Artificial Sequence
  synthetic circulating small noncoding RNA (sncRNA) 5' transfer RNA (tRNA) half
ttcggcgctctcaccgccgcggcccgggt

SEQ ID NO: 7478 - DNA, 14 bp, Artificial Sequence
  synthetic circulating small noncoding RNA (sncRNA) 5' transfer RNA (tRNA) half
aggaatcctaaccg

SEQ ID NO: 7479 - DNA, 21 bp, Artificial Sequence
  synthetic circulating small noncoding RNA (sncRNA) 5' transfer RNA (tRNA) half
attcgaacctgcgcggggaga

SEQ ID NO: 7480 - DNA, 23 bp, Artificial Sequence
  synthetic circulating small noncoding RNA (sncRNA) 5' transfer RNA (tRNA) half
tccccgtcggggaattgaacccc

SEQ ID NO: 7481 - DNA, 16 bp, Artificial Sequence
  synthetic circulating small noncoding RNA (sncRNA) 5' transfer RNA (tRNA) half
tgcccgcatcctccac

SEQ ID NO: 7482 - DNA, 22 bp, Artificial Sequence
  synthetic circulating small noncoding RNA (sncRNA) 5' transfer RNA (tRNA) half
agcactctggactctgaatcca

SEQ ID NO: 7483 - DNA, 12 bp, Artificial Sequence
  synthetic circulating small noncoding RNA (sncRNA) 5' transfer RNA (tRNA) half
caggcggggata

SEQ ID NO: 7484 - DNA, 22 bp, Artificial Sequence
  synthetic circulating small noncoding RNA (sncRNA) 5' transfer RNA (tRNA) half
tcgaatcccaccactgccaaca

SEQ ID NO: 7485 - DNA, 23 bp, Artificial Sequence
  synthetic circulating small noncoding RNA (sncRNA) 5' transfer RNA (tRNA) half
taccgggagtcgaacccgggccg

SEQ ID NO: 7486 - DNA, 33 bp, Artificial Sequence
  synthetic circulating small noncoding RNA (sncRNA) 5' transfer RNA (tRNA) half
tcagggtcgtgggttcgagccccacgttgggcg

SEQ ID NO: 7487 - DNA, 37 bp, Artificial Sequence
  synthetic circulating small noncoding RNA (sncRNA) 5' transfer RNA (tRNA) half
aagtctgatgctctaccgactgagctatccgggctct

SEQ ID NO: 7488 - DNA, 24 bp, Artificial Sequence
  synthetic circulating small noncoding RNA (sncRNA) 5' transfer RNA (tRNA) half
gtagtgtagtggttatcacgttcg

SEQ ID NO: 7489 - DNA, 15 bp, Artificial Sequence
  synthetic circulating small noncoding RNA (sncRNA) 5' transfer RNA (tRNA) half
atcacgtcggggtca

SEQ ID NO: 7490 - DNA, 28 bp, Artificial Sequence
  synthetic circulating small noncoding RNA (sncRNA) 5' transfer RNA (tRNA) half
cgctggttcgattccggctcgaaggact

SEQ ID NO: 7491 - DNA, 35 bp, Artificial Sequence
  synthetic circulating small noncoding RNA (sncRNA) 5' transfer RNA (tRNA) half
accaggaatcctaaccgctagaccatatgggagct

SEQ ID NO: 7492 - DNA, 41 bp, Artificial Sequence
  synthetic circulating small noncoding RNA (sncRNA) 5' transfer RNA (tRNA) half
cgcgtgtgaggcgaacgtgataaccactacactacggaaac

SEQ ID NO: 7493 - DNA, 18 bp, Artificial Sequence
  synthetic circulating small noncoding RNA (sncRNA) 5' transfer RNA (tRNA) half
tggagatgccggggatcg

SEQ ID NO: 7494 - DNA, 23 bp, Artificial Sequence
  synthetic circulating small noncoding RNA (sncRNA) 5' transfer RNA (tRNA) half
agtgcattggccgggaatcgaac

SEQ ID NO: 7495 - DNA, 16 bp, Artificial Sequence
  synthetic circulating small noncoding RNA (sncRNA) 5' transfer RNA (tRNA) half
tctcccgcgtgacagg

SEQ ID NO: 7496 - DNA, 14 bp, Artificial Sequence
  synthetic circulating small noncoding RNA (sncRNA) 5' transfer RNA (tRNA) half
tcgaacccgcaacc

SEQ ID NO: 7497 - DNA, 20 bp, Artificial Sequence
  synthetic circulating small noncoding RNA (sncRNA) 5' transfer RNA (tRNA) half
gttcaatccccggcacctcc

SEQ ID NO: 7498 - DNA, 36 bp, Artificial Sequence
  synthetic circulating small noncoding RNA (sncRNA) 5' transfer RNA (tRNA) half
gtggcccgtacggggatcgaacccgcgaccttggcg

SEQ ID NO: 7499 - DNA, 33 bp, Artificial Sequence
  synthetic circulating small noncoding RNA (sncRNA) 5' transfer RNA (tRNA) half
tctccccgtcggggaatcgaaccccggtctccc

SEQ ID NO: 7500 - DNA, 32 bp, Artificial Sequence
  synthetic circulating small noncoding RNA (sncRNA) 5' transfer RNA (tRNA) half
gagggtccagggttcaagtccctgttcgggcg

SEQ ID NO: 7501 - DNA, 26 bp, Artificial Sequence
  synthetic circulating small noncoding RNA (sncRNA) 5' transfer RNA (tRNA) half
aggcgaatgtgataaccactacacta

SEQ ID NO: 7502 - DNA, 17 bp, Artificial Sequence
  synthetic circulating small noncoding RNA (sncRNA) 5' transfer RNA (tRNA) half
gccggggatcgaacccg

SEQ ID NO: 7503 - DNA, 18 bp, Artificial Sequence
  synthetic circulating small noncoding RNA (sncRNA) 5' transfer RNA (tRNA) half
atcccggacgagccccat

SEQ ID NO: 7504 - DNA, 27 bp, Artificial Sequence
  synthetic circulating small noncoding RNA (sncRNA) 5' transfer RNA (tRNA) half
gagtgctagccattacaccatggaacc

SEQ ID NO: 7505 - DNA, 14 bp, Artificial Sequence
  synthetic circulating small noncoding RNA (sncRNA) 5' transfer RNA (tRNA) half
aacccgcgaccttg

SEQ ID NO: 7506 - DNA, 13 bp, Artificial Sequence
  synthetic circulating small noncoding RNA (sncRNA) 5' transfer RNA (tRNA) half
gaggtcccgggtt

SEQ ID NO: 7507 - DNA, 29 bp, Artificial Sequence
  synthetic circulating small noncoding RNA (sncRNA) 5' transfer RNA (tRNA) half
aggcggcccgggttcgactcccggtatgg

SEQ ID NO: 7508 - DNA, 21 bp, Artificial Sequence
  synthetic circulating small noncoding RNA (sncRNA) 5' transfer RNA (tRNA) half
atcctaaccactagaccacca

SEQ ID NO: 7509 - DNA, 25 bp, Artificial Sequence
  synthetic circulating small noncoding RNA (sncRNA) 5' transfer RNA (tRNA) half
ccttagaccactcggccatcctgac

SEQ ID NO: 7510 - DNA, 17 bp, Artificial Sequence
  synthetic circulating small noncoding RNA (sncRNA) 5' transfer RNA (tRNA) half
ggtcgagccagccagga

SEQ ID NO: 7511 - DNA, 21 bp, Artificial Sequence
  synthetic circulating small noncoding RNA (sncRNA) 5' transfer RNA (tRNA) half
gacaggcggggatactaacca

SEQ ID NO: 7512 - DNA, 24 bp, Artificial Sequence
  synthetic circulating small noncoding RNA (sncRNA) 5' transfer RNA (tRNA) half
aggattcgaacctgcgcggggaaa

SEQ ID NO: 7513 - DNA, 13 bp, Artificial Sequence
  synthetic circulating small noncoding RNA (sncRNA) 5' transfer RNA (tRNA) half
ttcccataccggg

SEQ ID NO: 7514 - DNA, 34 bp, Artificial Sequence
  synthetic circulating small noncoding RNA (sncRNA) 5' transfer RNA (tRNA) half
atccttaggtcgctggttcgactccggctcgaag

SEQ ID NO: 7515 - DNA, 19 bp, Artificial Sequence
  synthetic circulating small noncoding RNA (sncRNA) 5' transfer RNA (tRNA) half
gacctcgtggcgcaacggt

SEQ ID NO: 7516 - DNA, 26 bp, Artificial Sequence
  synthetic circulating small noncoding RNA (sncRNA) 5' transfer RNA (tRNA) half
tggtgtaatggttagcactctggact

SEQ ID NO: 7517 - DNA, 23 bp, Artificial Sequence
  synthetic circulating small noncoding RNA (sncRNA) 5' transfer RNA (tRNA) half
ctccccgtcggggaattgaaccc

SEQ ID NO: 7518 - DNA, 13 bp, Artificial Sequence
  synthetic circulating small noncoding RNA (sncRNA) 5' transfer RNA (tRNA) half
cggttaacagccg

SEQ ID NO: 7519 - DNA, 19 bp, Artificial Sequence
  synthetic circulating small noncoding RNA (sncRNA) 5' transfer RNA (tRNA) half
tggagatgccggggatcga

SEQ ID NO: 7520 - DNA, 24 bp, Artificial Sequence
  synthetic circulating small noncoding RNA (sncRNA) 5' transfer RNA (tRNA) half
gggttcaagtccctgttcgggcgc

SEQ ID NO: 7521 - DNA, 14 bp, Artificial Sequence
  synthetic circulating small noncoding RNA (sncRNA) 5' transfer RNA (tRNA) half
agtctcatgctcta

SEQ ID NO: 7522 - DNA, 30 bp, Artificial Sequence
  synthetic circulating small noncoding RNA (sncRNA) 5' transfer RNA (tRNA) half
gggtccagggttcaagtccctgttcgggcg

SEQ ID NO: 7523 - DNA, 42 bp, Artificial Sequence
  synthetic circulating small noncoding RNA (sncRNA) 5' transfer RNA (tRNA) half
gatgccccgtgtgaggatcgaactcacgaccttcagattatg

SEQ ID NO: 7524 - DNA, 32 bp, Artificial Sequence
  synthetic circulating small noncoding RNA (sncRNA) 5' transfer RNA (tRNA) half
gcgcccaacgtggggctcgaacccacgaccct

SEQ ID NO: 7525 - DNA, 11 bp, Artificial Sequence
  synthetic circulating small noncoding RNA (sncRNA) 5' transfer RNA (tRNA) half
gtttccgtagt

SEQ ID NO: 7526 - DNA, 29 bp, Artificial Sequence
  synthetic circulating small noncoding RNA (sncRNA) 5' transfer RNA (tRNA) half
gtccagggttcaagtccctgttcgggcgc

SEQ ID NO: 7527 - DNA, 12 bp, Artificial Sequence
  synthetic circulating small noncoding RNA (sncRNA) 5' transfer RNA (tRNA) half
ccgggagtcgaa

SEQ ID NO: 7528 - DNA, 11 bp, Artificial Sequence
  synthetic circulating small noncoding RNA (sncRNA) 5' transfer RNA (tRNA) half
tcgagccggat

SEQ ID NO: 7529 - DNA, 35 bp, Artificial Sequence
  synthetic circulating small noncoding RNA (sncRNA) 5' transfer RNA (tRNA) half
gcccagcacgcttccgctgcgccactctgctactt

SEQ ID NO: 7530 - DNA, 34 bp, Artificial Sequence
  synthetic circulating small noncoding RNA (sncRNA) 5' transfer RNA (tRNA) half
aaggttccaccgagatttgaactcggatcgctgg

SEQ ID NO: 7531 - DNA, 24 bp, Artificial Sequence
  synthetic circulating small noncoding RNA (sncRNA) 5' transfer RNA (tRNA) half
gagtcccatgctctaccgactgag

SEQ ID NO: 7532 - DNA, 6 bp, Artificial Sequence
  synthetic circulating small noncoding RNA (sncRNA) 5' transfer RNA (tRNA) half
ccgggc

SEQ ID NO: 7533 - DNA, 31 bp, Artificial Sequence
  synthetic circulating small noncoding RNA (sncRNA) 5' transfer RNA (tRNA) half
cgtcggggaattgaaccccggtctcccgcgt

SEQ ID NO: 7534 - DNA, 18 bp, Artificial Sequence
  synthetic circulating small noncoding RNA (sncRNA) 5' transfer RNA (tRNA) half
cccagcacgcttccgctg

SEQ ID NO: 7535 - DNA, 30 bp, Artificial Sequence
  synthetic circulating small noncoding RNA (sncRNA) 5' transfer RNA (tRNA) half
tcccgggttcaaatcccggacgagccccat

SEQ ID NO: 7536 - DNA, 29 bp, Artificial Sequence
  synthetic circulating small noncoding RNA (sncRNA) 5' transfer RNA (tRNA) half
tcccgcgtggcaggcgagaattctaccac

SEQ ID NO: 7537 - DNA, 17 bp, Artificial Sequence
  synthetic circulating small noncoding RNA (sncRNA) 5' transfer RNA (tRNA) half
aactgtttccgcccggt

SEQ ID NO: 7538 - DNA, 32 bp, Artificial Sequence
  synthetic circulating small noncoding RNA (sncRNA) 5' transfer RNA (tRNA) half
aaggccccagcgagatttgaactcgcgacccc

SEQ ID NO: 7539 - DNA, 35 bp, Artificial Sequence
  synthetic circulating small noncoding RNA (sncRNA) 5' transfer RNA (tRNA) half
tggcccgtacggggatcgaacccgcgaccttggcg

SEQ ID NO: 7540 - DNA, 32 bp, Artificial Sequence
  synthetic circulating small noncoding RNA (sncRNA) 5' transfer RNA (tRNA) half
ggcggtgagagcgccgaatcctaaccactaga

SEQ ID NO: 7541 - DNA, 25 bp, Artificial Sequence
  synthetic circulating small noncoding RNA (sncRNA) 5' transfer RNA (tRNA) half
cggatgatcctcagtggtctggggt

SEQ ID NO: 7542 - DNA, 20 bp, Artificial Sequence
  synthetic circulating small noncoding RNA (sncRNA) 5' transfer RNA (tRNA) half
agtggttatcacgttcgcct

SEQ ID NO: 7543 - DNA, 13 bp, Artificial Sequence
  synthetic circulating small noncoding RNA (sncRNA) 5' transfer RNA (tRNA) half
gttcccgcccggt

SEQ ID NO: 7544 - DNA, 17 bp, Artificial Sequence
  synthetic circulating small noncoding RNA (sncRNA) 5' transfer RNA (tRNA) half
ggccgggaatcgaaccc

SEQ ID NO: 7545 - DNA, 19 bp, Artificial Sequence
  synthetic circulating small noncoding RNA (sncRNA) 5' transfer RNA (tRNA) half
gccccagtggcctaatgga

SEQ ID NO: 7546 - DNA, 17 bp, Artificial Sequence
  synthetic circulating small noncoding RNA (sncRNA) 5' transfer RNA (tRNA) half
gccgagcggtctaaggc

SEQ ID NO: 7547 - DNA, 20 bp, Artificial Sequence
  synthetic circulating small noncoding RNA (sncRNA) 5' transfer RNA (tRNA) half
gcgagaattctaccattgaa

SEQ ID NO: 7548 - DNA, 20 bp, Artificial Sequence
  synthetic circulating small noncoding RNA (sncRNA) 5' transfer RNA (tRNA) half
accggggacctttcgcgtgt

SEQ ID NO: 7549 - DNA, 16 bp, Artificial Sequence
  synthetic circulating small noncoding RNA (sncRNA) 5' transfer RNA (tRNA) half
cttaaccactcggcca

SEQ ID NO: 7550 - DNA, 20 bp, Artificial Sequence
  synthetic circulating small noncoding RNA (sncRNA) 5' transfer RNA (tRNA) half
acccgggccgcggcggtgag

SEQ ID NO: 7551 - DNA, 19 bp, Artificial Sequence
  synthetic circulating small noncoding RNA (sncRNA) 5' transfer RNA (tRNA) half
tctgagggtccagggttca

SEQ ID NO: 7552 - DNA, 21 bp, Artificial Sequence
  synthetic circulating small noncoding RNA (sncRNA) 5' transfer RNA (tRNA) half
aacccgggccgcggcggtgag

SEQ ID NO: 7553 - DNA, 25 bp, Artificial Sequence
  synthetic circulating small noncoding RNA (sncRNA) 5' transfer RNA (tRNA) half
agggattgtgggttcgagtcccatc

SEQ ID NO: 7554 - DNA, 29 bp, Artificial Sequence
  synthetic circulating small noncoding RNA (sncRNA) 5' transfer RNA (tRNA) half
gacgacgaggatgggattcgaacccacgc

SEQ ID NO: 7555 - DNA, 32 bp, Artificial Sequence
  synthetic circulating small noncoding RNA (sncRNA) 5' transfer RNA (tRNA) half
gccgaatcctaaccactagaccaccagggaag

SEQ ID NO: 7556 - DNA, 15 bp, Artificial Sequence
  synthetic circulating small noncoding RNA (sncRNA) 5' transfer RNA (tRNA) half
ggtccccggttcgaa

SEQ ID NO: 7557 - DNA, 35 bp, Artificial Sequence
  synthetic circulating small noncoding RNA (sncRNA) 5' transfer RNA (tRNA) half
ggccccagcgagatttgaactcgcgacccctggtt

SEQ ID NO: 7558 - DNA, 17 bp, Artificial Sequence
  synthetic circulating small noncoding RNA (sncRNA) 5' transfer RNA (tRNA) half
caggaatcctaaccgct

SEQ ID NO: 7559 - DNA, 21 bp, Artificial Sequence
  synthetic circulating small noncoding RNA (sncRNA) 5' transfer RNA (tRNA) half
gagatgccggggatcgaaccc

SEQ ID NO: 7560 - DNA, 41 bp, Artificial Sequence
  synthetic circulating small noncoding RNA (sncRNA) 5' transfer RNA (tRNA) half
tcggcaggattcgaacctgcgcggggaaaccccaatggatt

SEQ ID NO: 7561 - DNA, 21 bp, Artificial Sequence
  synthetic circulating small noncoding RNA (sncRNA) 5' transfer RNA (tRNA) half
tgcattggccgggaatcgaac

SEQ ID NO: 7562 - DNA, 11 bp, Artificial Sequence
  synthetic circulating small noncoding RNA (sncRNA) 5' transfer RNA (tRNA) half
gccttagaccg

SEQ ID NO: 7563 - DNA, 30 bp, Artificial Sequence
  synthetic circulating small noncoding RNA (sncRNA) 5' transfer RNA (tRNA) half
actcggatcgctggattcagagtccagagt

SEQ ID NO: 7564 - DNA, 24 bp, Artificial Sequence
  synthetic circulating small noncoding RNA (sncRNA) 5' transfer RNA (tRNA) half
ccccgtcggggaatcgaaccccgg

SEQ ID NO: 7565 - DNA, 13 bp, Artificial Sequence
  synthetic circulating small noncoding RNA (sncRNA) 5' transfer RNA (tRNA) half
tcgactccggctc

SEQ ID NO: 7566 - DNA, 15 bp, Artificial Sequence
  synthetic circulating small noncoding RNA (sncRNA) 5' transfer RNA (tRNA) half
gaacccgggcctccc

SEQ ID NO: 7567 - DNA, 14 bp, Artificial Sequence
  synthetic circulating small noncoding RNA (sncRNA) 5' transfer RNA (tRNA) half
cccatctgggtcgc

SEQ ID NO: 7568 - DNA, 5 bp, Artificial Sequence
  synthetic circulating small noncoding RNA (sncRNA) 5' transfer RNA (tRNA) half
agccg

SEQ ID NO: 7569 - DNA, 29 bp, Artificial Sequence
  synthetic circulating small noncoding RNA (sncRNA) 5' transfer RNA (tRNA) half
agcgatccgagttcaaatctcggtggaac

SEQ ID NO: 7570 - DNA, 27 bp, Artificial Sequence
  synthetic circulating small noncoding RNA (sncRNA) 5' transfer RNA (tRNA) half
atatggtctagcggttaggattcctgg

SEQ ID NO: 7571 - DNA, 10 bp, Artificial Sequence
  synthetic circulating small noncoding RNA (sncRNA) 5' transfer RNA (tRNA) half
cgagccagcc

SEQ ID NO: 7572 - DNA, 20 bp, Artificial Sequence
  synthetic circulating small noncoding RNA (sncRNA) 5' transfer RNA (tRNA) half
gaccccgacgtgacttgaac

SEQ ID NO: 7573 - DNA, 19 bp, Artificial Sequence
  synthetic circulating small noncoding RNA (sncRNA) 5' transfer RNA (tRNA) half
agaattctcgcctgccacg

SEQ ID NO: 7574 - DNA, 25 bp, Artificial Sequence
  synthetic circulating small noncoding RNA (sncRNA) 5' transfer RNA (tRNA) half
gagaatcatacccctagaccaacga

SEQ ID NO: 7575 - DNA, 20 bp, Artificial Sequence
  synthetic circulating small noncoding RNA (sncRNA) 5' transfer RNA (tRNA) half
cctccccgtcggggaatcga

SEQ ID NO: 7576 - DNA, 25 bp, Artificial Sequence
  synthetic circulating small noncoding RNA (sncRNA) 5' transfer RNA (tRNA) half
gtgagagcgccgaatcctaaccact

SEQ ID NO: 7577 - DNA, 21 bp, Artificial Sequence
  synthetic circulating small noncoding RNA (sncRNA) 5' transfer RNA (tRNA) half
gttcgactcccggtatgggaa

SEQ ID NO: 7578 - DNA, 26 bp, Artificial Sequence
  synthetic circulating small noncoding RNA (sncRNA) 5' transfer RNA (tRNA) half
ttggtctaggggtatgattctcgctt

SEQ ID NO: 7579 - DNA, 29 bp, Artificial Sequence
  synthetic circulating small noncoding RNA (sncRNA) 5' transfer RNA (tRNA) half
atagctcagtcggtagagcatcagacttt

SEQ ID NO: 7580 - DNA, 37 bp, Artificial Sequence
  synthetic circulating small noncoding RNA (sncRNA) 5' transfer RNA (tRNA) half
ggatcagaagattgcaggttcgagtcctgccgcggtc

SEQ ID NO: 7581 - DNA, 14 bp, Artificial Sequence
  synthetic circulating small noncoding RNA (sncRNA) 5' transfer RNA (tRNA) half
acctcagagggggc

SEQ ID NO: 7582 - DNA, 39 bp, Artificial Sequence
  synthetic circulating small noncoding RNA (sncRNA) 5' transfer RNA (tRNA) half
gtaaacaggagatcctgggttcgaatcccagcggggcct

SEQ ID NO: 7583 - DNA, 23 bp, Artificial Sequence
  synthetic circulating small noncoding RNA (sncRNA) 5' transfer RNA (tRNA) half
tgtaatggttagcactctggact

SEQ ID NO: 7584 - DNA, 31 bp, Artificial Sequence
  synthetic circulating small noncoding RNA (sncRNA) 5' transfer RNA (tRNA) half
agccagccaggagtcgaacctggaatcttct

SEQ ID NO: 7585 - DNA, 20 bp, Artificial Sequence
  synthetic circulating small noncoding RNA (sncRNA) 5' transfer RNA (tRNA) half
cagacgacgaggatgggatt

SEQ ID NO: 7586 - DNA, 24 bp, Artificial Sequence
  synthetic circulating small noncoding RNA (sncRNA) 5' transfer RNA (tRNA) half
gccggggatcgaacccggggcctc

SEQ ID NO: 7587 - DNA, 25 bp, Artificial Sequence
  synthetic circulating small noncoding RNA (sncRNA) 5' transfer RNA (tRNA) half
gcgtgacaggcggggatactcacca

SEQ ID NO: 7588 - DNA, 43 bp, Artificial Sequence
  synthetic circulating small noncoding RNA (sncRNA) 5' transfer RNA (tRNA) half
tctgaatccagcgatccgagttcaaatctcggtggaacctgct

SEQ ID NO: 7589 - DNA, 20 bp, Artificial Sequence
  synthetic circulating small noncoding RNA (sncRNA) 5' transfer RNA (tRNA) half
ggcaccgctgggattcgaac

SEQ ID NO: 7590 - DNA, 26 bp, Artificial Sequence
  synthetic circulating small noncoding RNA (sncRNA) 5' transfer RNA (tRNA) half
agcgcccgaacagggacttgaaccct

SEQ ID NO: 7591 - DNA, 20 bp, Artificial Sequence
  synthetic circulating small noncoding RNA (sncRNA) 5' transfer RNA (tRNA) half
aagcatgcgctctaccactg

SEQ ID NO: 7592 - DNA, 19 bp, Artificial Sequence
  synthetic circulating small noncoding RNA (sncRNA) 5' transfer RNA (tRNA) half
cagcgccttagaccgctcg

SEQ ID NO: 7593 - DNA, 23 bp, Artificial Sequence
  synthetic circulating small noncoding RNA (sncRNA) 5' transfer RNA (tRNA) half
atataacgtgtttccgcccggtt

SEQ ID NO: 7594 - DNA, 17 bp, Artificial Sequence
  synthetic circulating small noncoding RNA (sncRNA) 5' transfer RNA (tRNA) half
atagctcagtcggtaga

SEQ ID NO: 7595 - DNA, 27 bp, Artificial Sequence
  synthetic circulating small noncoding RNA (sncRNA) 5' transfer RNA (tRNA) half
actcggatcgctggattcagagtccag

SEQ ID NO: 7596 - DNA, 30 bp, Artificial Sequence
  synthetic circulating small noncoding RNA (sncRNA) 5' transfer RNA (tRNA) half
cgtggcaggcgagaattctaccactgaacc

SEQ ID NO: 7597 - DNA, 22 bp, Artificial Sequence
  synthetic circulating small noncoding RNA (sncRNA) 5' transfer RNA (tRNA) half
ggctcgtccgggatttgaaccc

SEQ ID NO: 7598 - DNA, 25 bp, Artificial Sequence
  synthetic circulating small noncoding RNA (sncRNA) 5' transfer RNA (tRNA) half
cgccgctggtgtagtggtatcatgc

SEQ ID NO: 7599 - DNA, 13 bp, Artificial Sequence
  synthetic circulating small noncoding RNA (sncRNA) 5' transfer RNA (tRNA) half
ccgggaatcgaac

SEQ ID NO: 7600 - DNA, 16 bp, Artificial Sequence
  synthetic circulating small noncoding RNA (sncRNA) 5' transfer RNA (tRNA) half
ctctaaccaactgagc

SEQ ID NO: 7601 - DNA, 39 bp, Artificial Sequence
  synthetic circulating small noncoding RNA (sncRNA) 5' transfer RNA (tRNA) half
tctagtggttaggattcggcgctctcaccgccgcggccc

SEQ ID NO: 7602 - DNA, 26 bp, Artificial Sequence
  synthetic circulating small noncoding RNA (sncRNA) 5' transfer RNA (tRNA) half
tgttcccataccgggagtcgaacccg

SEQ ID NO: 7603 - DNA, 15 bp, Artificial Sequence
  synthetic circulating small noncoding RNA (sncRNA) 5' transfer RNA (tRNA) half
caggattcgaacctg

SEQ ID NO: 7604 - DNA, 26 bp, Artificial Sequence
  synthetic circulating small noncoding RNA (sncRNA) 5' transfer RNA (tRNA) half
gttcccacaccgggagtcgaacccgg

SEQ ID NO: 7605 - DNA, 32 bp, Artificial Sequence
  synthetic circulating small noncoding RNA (sncRNA) 5' transfer RNA (tRNA) half
gggccagtggcgcaatggataacgcgtctgac

SEQ ID NO: 7606 - DNA, 35 bp, Artificial Sequence
  synthetic circulating small noncoding RNA (sncRNA) 5' transfer RNA (tRNA) half
aacaggagatcctgggttcgaatcccagcggtgcc

SEQ ID NO: 7607 - DNA, 15 bp, Artificial Sequence
  synthetic circulating small noncoding RNA (sncRNA) 5' transfer RNA (tRNA) half
ttcgaaccggggacc

SEQ ID NO: 7608 - DNA, 28 bp, Artificial Sequence
  synthetic circulating small noncoding RNA (sncRNA) 5' transfer RNA (tRNA) half
tggttaggattcggcgctctcaccgccg

SEQ ID NO: 7609 - DNA, 16 bp, Artificial Sequence
  synthetic circulating small noncoding RNA (sncRNA) 5' transfer RNA (tRNA) half
aaagcgagaatcatac

SEQ ID NO: 7610 - DNA, 33 bp, Artificial Sequence
  synthetic circulating small noncoding RNA (sncRNA) 5' transfer RNA (tRNA) half
gccgaaatagctcagttgggagagcgttagact

SEQ ID NO: 7611 - DNA, 29 bp, Artificial Sequence
  synthetic circulating small noncoding RNA (sncRNA) 5' transfer RNA (tRNA) half
gattcagagtccagagtgctaaccattac

SEQ ID NO: 7612 - DNA, 37 bp, Artificial Sequence
  synthetic circulating small noncoding RNA (sncRNA) 5' transfer RNA (tRNA) half
tgaaaaccaggaatcctaaccgctagaccatgtggga

SEQ ID NO: 7613 - DNA, 24 bp, Artificial Sequence
  synthetic circulating small noncoding RNA (sncRNA) 5' transfer RNA (tRNA) half
gaacccgggtcaactgcttggaag

SEQ ID NO: 7614 - DNA, 19 bp, Artificial Sequence
  synthetic circulating small noncoding RNA (sncRNA) 5' transfer RNA (tRNA) half
tggattcagagtccagagt

SEQ ID NO: 7615 - DNA, 35 bp, Artificial Sequence
  synthetic circulating small noncoding RNA (sncRNA) 5' transfer RNA (tRNA) half
gtgcattggccgggaatcgaacccgggcctcccgc

SEQ ID NO: 7616 - DNA, 42 bp, Artificial Sequence
  synthetic circulating small noncoding RNA (sncRNA) 5' transfer RNA (tRNA) half
gtcggcaggattcgaacctgcgcggggaaaccccaatggatt

SEQ ID NO: 7617 - DNA, 23 bp, Artificial Sequence
  synthetic circulating small noncoding RNA (sncRNA) 5' transfer RNA (tRNA) half
gagtctcatgctctaccgactga

SEQ ID NO: 7618 - DNA, 16 bp, Artificial Sequence
  synthetic circulating small noncoding RNA (sncRNA) 5' transfer RNA (tRNA) half
cgagaattctaccact

SEQ ID NO: 7619 - DNA, 23 bp, Artificial Sequence
  synthetic circulating small noncoding RNA (sncRNA) 5' transfer RNA (tRNA) half
aatcccggacgagccccactttt

SEQ ID NO: 7620 - DNA, 32 bp, Artificial Sequence
  synthetic circulating small noncoding RNA (sncRNA) 5' transfer RNA (tRNA) half
tgaaggtcctgagttcgaacctcagagggggc

SEQ ID NO: 7621 - DNA, 30 bp, Artificial Sequence
  synthetic circulating small noncoding RNA (sncRNA) 5' transfer RNA (tRNA) half
gccgaaacccgggatcgaaccagggacctt

SEQ ID NO: 7622 - DNA, 18 bp, Artificial Sequence
  synthetic circulating small noncoding RNA (sncRNA) 5' transfer RNA (tRNA) half
actcccggtgtgggaacg

SEQ ID NO: 7623 - DNA, 31 bp, Artificial Sequence
  synthetic circulating small noncoding RNA (sncRNA) 5' transfer RNA (tRNA) half
cgccgtgatcgtataggggttagtactctgc

SEQ ID NO: 7624 - DNA, 22 bp, Artificial Sequence
  synthetic circulating small noncoding RNA (sncRNA) 5' transfer RNA (tRNA) half
caggagtcgaacctggaatctt

SEQ ID NO: 7625 - DNA, 31 bp, Artificial Sequence
  synthetic circulating small noncoding RNA (sncRNA) 5' transfer RNA (tRNA) half
agagtcccatgctctaccgactgagctagcc

SEQ ID NO: 7626 - DNA, 17 bp, Artificial Sequence
  synthetic circulating small noncoding RNA (sncRNA) 5' transfer RNA (tRNA) half
aatggttagcactctgg

SEQ ID NO: 7627 - DNA, 37 bp, Artificial Sequence
  synthetic circulating small noncoding RNA (sncRNA) 5' transfer RNA (tRNA) half
tgccccctctgaggttcgaactcaggaccttcagatt

SEQ ID NO: 7628 - DNA, 26 bp, Artificial Sequence
  synthetic circulating small noncoding RNA (sncRNA) 5' transfer RNA (tRNA) half
ctggtgtagtggtatcatgcaagatt

SEQ ID NO: 7629 - DNA, 13 bp, Artificial Sequence
  synthetic circulating small noncoding RNA (sncRNA) 5' transfer RNA (tRNA) half
tagtcgtggccga

SEQ ID NO: 7630 - DNA, 16 bp, Artificial Sequence
  synthetic circulating small noncoding RNA (sncRNA) 5' transfer RNA (tRNA) half
gttcgattccccgacg

SEQ ID NO: 7631 - DNA, 20 bp, Artificial Sequence
  synthetic circulating small noncoding RNA (sncRNA) 5' transfer RNA (tRNA) half
gttccttcgagccggattcg

SEQ ID NO: 7632 - DNA, 20 bp, Artificial Sequence
  synthetic circulating small noncoding RNA (sncRNA) 5' transfer RNA (tRNA) half
gaaaccgggcggaaacagca

SEQ ID NO: 7633 - DNA, 30 bp, Artificial Sequence
  synthetic circulating small noncoding RNA (sncRNA) 5' transfer RNA (tRNA) half
tccttaggtcgctggttcgattccggctcg

SEQ ID NO: 7634 - DNA, 14 bp, Artificial Sequence
  synthetic circulating small noncoding RNA (sncRNA) 5' transfer RNA (tRNA) half
gctctaccaactga

SEQ ID NO: 7635 - DNA, 29 bp, Artificial Sequence
  synthetic circulating small noncoding RNA (sncRNA) 5' transfer RNA (tRNA) half
ggcgagaattctaccattgaaccaccaat

SEQ ID NO: 7636 - DNA, 26 bp, Artificial Sequence
  synthetic circulating small noncoding RNA (sncRNA) 5' transfer RNA (tRNA) half
cagaaggtcctgggttcgagccccag

SEQ ID NO: 7637 - DNA, 20 bp, Artificial Sequence
  synthetic circulating small noncoding RNA (sncRNA) 5' transfer RNA (tRNA) half
ccgcgcaggttcgaatcctg

SEQ ID NO: 7638 - DNA, 15 bp, Artificial Sequence
  synthetic circulating small noncoding RNA (sncRNA) 5' transfer RNA (tRNA) half
aggggtcgcgagttc

SEQ ID NO: 7639 - DNA, 15 bp, Artificial Sequence
  synthetic circulating small noncoding RNA (sncRNA) 5' transfer RNA (tRNA) half
atccttaggtcgctg

SEQ ID NO: 7640 - DNA, 15 bp, Artificial Sequence
  synthetic circulating small noncoding RNA (sncRNA) 5' transfer RNA (tRNA) half
gggagaccggggttc

SEQ ID NO: 7641 - DNA, 30 bp, Artificial Sequence
  synthetic circulating small noncoding RNA (sncRNA) 5' transfer RNA (tRNA) half
cgctggtgtagtggtatcatgcaagattcc

SEQ ID NO: 7642 - DNA, 27 bp, Artificial Sequence
  synthetic circulating small noncoding RNA (sncRNA) 5' transfer RNA (tRNA) half
gccccagcgagatttgaactcgcgacc

SEQ ID NO: 7643 - DNA, 31 bp, Artificial Sequence
  synthetic circulating small noncoding RNA (sncRNA) 5' transfer RNA (tRNA) half
gccagccaggagtcgaacctggaatcttctg

SEQ ID NO: 7644 - DNA, 13 bp, Artificial Sequence
  synthetic circulating small noncoding RNA (sncRNA) 5' transfer RNA (tRNA) half
gaaccgaggttgc

SEQ ID NO: 7645 - DNA, 20 bp, Artificial Sequence
  synthetic circulating small noncoding RNA (sncRNA) 5' transfer RNA (tRNA) half
cgactcccggtgtgggaaca

SEQ ID NO: 7646 - DNA, 13 bp, Artificial Sequence
  synthetic circulating small noncoding RNA (sncRNA) 5' transfer RNA (tRNA) half
gcggggatactca

SEQ ID NO: 7647 - DNA, 25 bp, Artificial Sequence
  synthetic circulating small noncoding RNA (sncRNA) 5' transfer RNA (tRNA) half
cgctggtgtagtggtatcatgcaag

SEQ ID NO: 7648 - DNA, 34 bp, Artificial Sequence
  synthetic circulating small noncoding RNA (sncRNA) 5' transfer RNA (tRNA) half
agcgccgaatcctaaccactagaccaccagggaa

SEQ ID NO: 7649 - DNA, 17 bp, Artificial Sequence
  synthetic circulating small noncoding RNA (sncRNA) 5' transfer RNA (tRNA) half
ttccgactccgccggga

SEQ ID NO: 7650 - DNA, 23 bp, Artificial Sequence
  synthetic circulating small noncoding RNA (sncRNA) 5' transfer RNA (tRNA) half
cgagccagccaggagtcgaacct

SEQ ID NO: 7651 - DNA, 21 bp, Artificial Sequence
  synthetic circulating small noncoding RNA (sncRNA) 5' transfer RNA (tRNA) half
tgaccactacactacggaaac

SEQ ID NO: 7652 - DNA, 7 bp, Artificial Sequence
  synthetic circulating small noncoding RNA (sncRNA) 5' transfer RNA (tRNA) half
acccgcg

SEQ ID NO: 7653 - DNA, 16 bp, Artificial Sequence
  synthetic circulating small noncoding RNA (sncRNA) 5' transfer RNA (tRNA) half
ccggctagctcagtcg

SEQ ID NO: 7654 - DNA, 18 bp, Artificial Sequence
  synthetic circulating small noncoding RNA (sncRNA) 5' transfer RNA (tRNA) half
gattcaaagtccagagtg

SEQ ID NO: 7655 - DNA, 14 bp, Artificial Sequence
  synthetic circulating small noncoding RNA (sncRNA) 5' transfer RNA (tRNA) half
ggccgggaatcaaa

SEQ ID NO: 7656 - DNA, 19 bp, Artificial Sequence
  synthetic circulating small noncoding RNA (sncRNA) 5' transfer RNA (tRNA) half
gattcagagtccagagtgc

SEQ ID NO: 7657 - DNA, 25 bp, Artificial Sequence
  synthetic circulating small noncoding RNA (sncRNA) 5' transfer RNA (tRNA) half
ccttagaccgctcggccacactacc

SEQ ID NO: 7658 - DNA, 34 bp, Artificial Sequence
  synthetic circulating small noncoding RNA (sncRNA) 5' transfer RNA (tRNA) half
agtttccgtagtgtagtggttatcacgttcgcct

SEQ ID NO: 7659 - DNA, 21 bp, Artificial Sequence
  synthetic circulating small noncoding RNA (sncRNA) 5' transfer RNA (tRNA) half
aaccatgtttccgcccggttt

SEQ ID NO: 7660 - DNA, 20 bp, Artificial Sequence
  synthetic circulating small noncoding RNA (sncRNA) 5' transfer RNA (tRNA) half
ctgaatccagcgacccgagt

SEQ ID NO: 7661 - DNA, 17 bp, Artificial Sequence
  synthetic circulating small noncoding RNA (sncRNA) 5' transfer RNA (tRNA) half
ctcccggtgtgggaaac

SEQ ID NO: 7662 - DNA, 27 bp, Artificial Sequence
  synthetic circulating small noncoding RNA (sncRNA) 5' transfer RNA (tRNA) half
gattcagagtccagagtgctaaccatt

SEQ ID NO: 7663 - DNA, 21 bp, Artificial Sequence
  synthetic circulating small noncoding RNA (sncRNA) 5' transfer RNA (tRNA) half
tcgatccccagcatctccagg

SEQ ID NO: 7664 - DNA, 22 bp, Artificial Sequence
  synthetic circulating small noncoding RNA (sncRNA) 5' transfer RNA (tRNA) half
tcgaatcctgccgactacgtca

SEQ ID NO: 7665 - DNA, 30 bp, Artificial Sequence
  synthetic circulating small noncoding RNA (sncRNA) 5' transfer RNA (tRNA) half
ggcctcccgcgtggcaggcgagaattctac

SEQ ID NO: 7666 - DNA, 24 bp, Artificial Sequence
  synthetic circulating small noncoding RNA (sncRNA) 5' transfer RNA (tRNA) half
atagtgtagcggttatcacgtctg

SEQ ID NO: 7667 - DNA, 18 bp, Artificial Sequence
  synthetic circulating small noncoding RNA (sncRNA) 5' transfer RNA (tRNA) half
gcgtggcaggcgagaatt

SEQ ID NO: 7668 - DNA, 18 bp, Artificial Sequence
  synthetic circulating small noncoding RNA (sncRNA) 5' transfer RNA (tRNA) half
ggtccccggttcgaaacc

SEQ ID NO: 7669 - DNA, 13 bp, Artificial Sequence
  synthetic circulating small noncoding RNA (sncRNA) 5' transfer RNA (tRNA) half
aacccgggccgcg

SEQ ID NO: 7670 - DNA, 31 bp, Artificial Sequence
  synthetic circulating small noncoding RNA (sncRNA) 5' transfer RNA (tRNA) half
ccgggccgcggcggtgagagcgccgaatcct

SEQ ID NO: 7671 - DNA, 30 bp, Artificial Sequence
  synthetic circulating small noncoding RNA (sncRNA) 5' transfer RNA (tRNA) half
tttctgtagtgtagtggttatcacgctcgc

SEQ ID NO: 7672 - DNA, 28 bp, Artificial Sequence
  synthetic circulating small noncoding RNA (sncRNA) 5' transfer RNA (tRNA) half
ctccgccgggactcgaacccggaacctt

SEQ ID NO: 7673 - DNA, 27 bp, Artificial Sequence
  synthetic circulating small noncoding RNA (sncRNA) 5' transfer RNA (tRNA) half
cgccgctggtgtagtggtatcatgcaa

SEQ ID NO: 7674 - DNA, 33 bp, Artificial Sequence
  synthetic circulating small noncoding RNA (sncRNA) 5' transfer RNA (tRNA) half
ctccgccgggactcgaacccggaacctttgaat

SEQ ID NO: 7675 - DNA, 35 bp, Artificial Sequence
  synthetic circulating small noncoding RNA (sncRNA) 5' transfer RNA (tRNA) half
caatgcagagtactaaccactatacgatctcggca

SEQ ID NO: 7676 - DNA, 24 bp, Artificial Sequence
  synthetic circulating small noncoding RNA (sncRNA) 5' transfer RNA (tRNA) half
ggcaccgctgggattcgaacccag

SEQ ID NO: 7677 - DNA, 27 bp, Artificial Sequence
  synthetic circulating small noncoding RNA (sncRNA) 5' transfer RNA (tRNA) half
gtcccatgctgtaccgactgagccagc

SEQ ID NO: 7678 - DNA, 14 bp, Artificial Sequence
  synthetic circulating small noncoding RNA (sncRNA) 5' transfer RNA (tRNA) half
ccttcgatagctca

SEQ ID NO: 7679 - DNA, 23 bp, Artificial Sequence
  synthetic circulating small noncoding RNA (sncRNA) 5' transfer RNA (tRNA) half
gggttcgattcccggtcagggaa

SEQ ID NO: 7680 - DNA, 28 bp, Artificial Sequence
  synthetic circulating small noncoding RNA (sncRNA) 5' transfer RNA (tRNA) half
tagctcagtcggtagagcatcagacttt

SEQ ID NO: 7681 - DNA, 32 bp, Artificial Sequence
  synthetic circulating small noncoding RNA (sncRNA) 5' transfer RNA (tRNA) half
agtaaccacgaagggattcgaaccctcaatct

SEQ ID NO: 7682 - DNA, 34 bp, Artificial Sequence
  synthetic circulating small noncoding RNA (sncRNA) 5' transfer RNA (tRNA) half
aactcggatcgctggattcagagtccagagtgct

SEQ ID NO: 7683 - DNA, 23 bp, Artificial Sequence
  synthetic circulating small noncoding RNA (sncRNA) 5' transfer RNA (tRNA) half
gttcgagccccagtggaaccacg

SEQ ID NO: 7684 - DNA, 27 bp, Artificial Sequence
  synthetic circulating small noncoding RNA (sncRNA) 5' transfer RNA (tRNA) half
ccgtgatcgtatagtggttagtactct

SEQ ID NO: 7685 - DNA, 28 bp, Artificial Sequence
  synthetic circulating small noncoding RNA (sncRNA) 5' transfer RNA (tRNA) half
gccgaaacccgggatcgaaccagggacc

SEQ ID NO: 7686 - DNA, 21 bp, Artificial Sequence
  synthetic circulating small noncoding RNA (sncRNA) 5' transfer RNA (tRNA) half
ggaatcgaacccgggccgcgg

SEQ ID NO: 7687 - DNA, 36 bp, Artificial Sequence
  synthetic circulating small noncoding RNA (sncRNA) 5' transfer RNA (tRNA) half
gcccggctagctcagtcggtagagcatgagactctt

SEQ ID NO: 7688 - DNA, 23 bp, Artificial Sequence
  synthetic circulating small noncoding RNA (sncRNA) 5' transfer RNA (tRNA) half
tatgaccccgacgtgattcgaac

SEQ ID NO: 7689 - DNA, 24 bp, Artificial Sequence
  synthetic circulating small noncoding RNA (sncRNA) 5' transfer RNA (tRNA) half
tcagagtccagagtgctaaccatt

SEQ ID NO: 7690 - DNA, 19 bp, Artificial Sequence
  synthetic circulating small noncoding RNA (sncRNA) 5' transfer RNA (tRNA) half
tagcggttatcacgtctgc

SEQ ID NO: 7691 - DNA, 12 bp, Artificial Sequence
  synthetic circulating small noncoding RNA (sncRNA) 5' transfer RNA (tRNA) half
cccggatagctc

SEQ ID NO: 7692 - DNA, 29 bp, Artificial Sequence
  synthetic circulating small noncoding RNA (sncRNA) 5' transfer RNA (tRNA) half
ttcccacaccgggagtcgaacccgggccg

SEQ ID NO: 7693 - DNA, 29 bp, Artificial Sequence
  synthetic circulating small noncoding RNA (sncRNA) 5' transfer RNA (tRNA) half
ccctgaccgggaatcgaacccgggccgcg

SEQ ID NO: 7694 - DNA, 29 bp, Artificial Sequence
  synthetic circulating small noncoding RNA (sncRNA) 5' transfer RNA (tRNA) half
aaggtcctgggttcgagccccagtggaac

SEQ ID NO: 7695 - DNA, 10 bp, Artificial Sequence
  synthetic circulating small noncoding RNA (sncRNA) 5' transfer RNA (tRNA) half
cgccgaatcc

SEQ ID NO: 7696 - DNA, 26 bp, Artificial Sequence
  synthetic circulating small noncoding RNA (sncRNA) 5' transfer RNA (tRNA) half
agctcagtcggtagagcatgagactc

SEQ ID NO: 7697 - DNA, 25 bp, Artificial Sequence
  synthetic circulating small noncoding RNA (sncRNA) 5' transfer RNA (tRNA) half
tggtctagtggttaggattcggcgc

SEQ ID NO: 7698 - DNA, 19 bp, Artificial Sequence
  synthetic circulating small noncoding RNA (sncRNA) 5' transfer RNA (tRNA) half
agacgacgaaggtgggatt

SEQ ID NO: 7699 - DNA, 29 bp, Artificial Sequence
  synthetic circulating small noncoding RNA (sncRNA) 5' transfer RNA (tRNA) half
gagccggattcgaaccagcgacctaagga

SEQ ID NO: 7700 - DNA, 15 bp, Artificial Sequence
  synthetic circulating small noncoding RNA (sncRNA) 5' transfer RNA (tRNA) half
ctgcgctaacgaggc

SEQ ID NO: 7701 - DNA, 29 bp, Artificial Sequence
  synthetic circulating small noncoding RNA (sncRNA) 5' transfer RNA (tRNA) half
gcgaatgtgataaccactacactacggaa

SEQ ID NO: 7702 - DNA, 22 bp, Artificial Sequence
  synthetic circulating small noncoding RNA (sncRNA) 5' transfer RNA (tRNA) half
ctgtcacgcgggagaccggggt

SEQ ID NO: 7703 - DNA, 30 bp, Artificial Sequence
  synthetic circulating small noncoding RNA (sncRNA) 5' transfer RNA (tRNA) half
tggttcagtggtagaattctcgcctgccac

SEQ ID NO: 7704 - DNA, 29 bp, Artificial Sequence
  synthetic circulating small noncoding RNA (sncRNA) 5' transfer RNA (tRNA) half
cattggccgggaatcgaacccgggcctcc

SEQ ID NO: 7705 - DNA, 22 bp, Artificial Sequence
  synthetic circulating small noncoding RNA (sncRNA) 5' transfer RNA (tRNA) half
caggcgagaattctaccactga

SEQ ID NO: 7706 - DNA, 22 bp, Artificial Sequence
  synthetic circulating small noncoding RNA (sncRNA) 5' transfer RNA (tRNA) half
cgaaccgaggttgctgcggcca

SEQ ID NO: 7707 - DNA, 30 bp, Artificial Sequence
  synthetic circulating small noncoding RNA (sncRNA) 5' transfer RNA (tRNA) half
gattgtgggttcgagtcccatctgggtcgc

SEQ ID NO: 7708 - DNA, 19 bp, Artificial Sequence
  synthetic circulating small noncoding RNA (sncRNA) 5' transfer RNA (tRNA) half
ttcccataccgggagtcga

SEQ ID NO: 7709 - DNA, 24 bp, Artificial Sequence
  synthetic circulating small noncoding RNA (sncRNA) 5' transfer RNA (tRNA) half
tcgggtgcgagaggtcccgggttc

SEQ ID NO: 7710 - DNA, 18 bp, Artificial Sequence
  synthetic circulating small noncoding RNA (sncRNA) 5' transfer RNA (tRNA) half
gggtatgattctcgcttc

SEQ ID NO: 7711 - DNA, 29 bp, Artificial Sequence
  synthetic circulating small noncoding RNA (sncRNA) 5' transfer RNA (tRNA) half
aaaccaggaatcctaaccgctagaccata

SEQ ID NO: 7712 - DNA, 30 bp, Artificial Sequence
  synthetic circulating small noncoding RNA (sncRNA) 5' transfer RNA (tRNA) half
ggcttaggaggccagtgccttatccattag

SEQ ID NO: 7713 - DNA, 38 bp, Artificial Sequence
  synthetic circulating small noncoding RNA (sncRNA) 5' transfer RNA (tRNA) half
gtttccgtagtgtagtggttatcacgttcgcctcacac

SEQ ID NO: 7714 - DNA, 30 bp, Artificial Sequence
  synthetic circulating small noncoding RNA (sncRNA) 5' transfer RNA (tRNA) half
ggcgagaattctaccattgaactaccaatg

SEQ ID NO: 7715 - DNA, 11 bp, Artificial Sequence
  synthetic circulating small noncoding RNA (sncRNA) 5' transfer RNA (tRNA) half
ccgggccgcgg

SEQ ID NO: 7716 - DNA, 12 bp, Artificial Sequence
  synthetic circulating small noncoding RNA (sncRNA) 5' transfer RNA (tRNA) half
gggcctcccgcg

SEQ ID NO: 7717 - DNA, 11 bp, Artificial Sequence
  synthetic circulating small noncoding RNA (sncRNA) 5' transfer RNA (tRNA) half
ggtcgcgggtt

SEQ ID NO: 7718 - DNA, 35 bp, Artificial Sequence
  synthetic circulating small noncoding RNA (sncRNA) 5' transfer RNA (tRNA) half
accaggaatcctaaccgctagaccatgtgggaact

SEQ ID NO: 7719 - DNA, 28 bp, Artificial Sequence
  synthetic circulating small noncoding RNA (sncRNA) 5' transfer RNA (tRNA) half
ggtcctgagttcgaacctcagagggggc

SEQ ID NO: 7720 - DNA, 36 bp, Artificial Sequence
  synthetic circulating small noncoding RNA (sncRNA) 5' transfer RNA (tRNA) half
acaatgcagagtactaaccactatacgatctcggca

SEQ ID NO: 7721 - DNA, 14 bp, Artificial Sequence
  synthetic circulating small noncoding RNA (sncRNA) 5' transfer RNA (tRNA) half
ccccggtctcccgc

SEQ ID NO: 7722 - DNA, 13 bp, Artificial Sequence
  synthetic circulating small noncoding RNA (sncRNA) 5' transfer RNA (tRNA) half
ctagaccaccagg

SEQ ID NO: 7723 - DNA, 23 bp, Artificial Sequence
  synthetic circulating small noncoding RNA (sncRNA) 5' transfer RNA (tRNA) half
tcgagccagccaggagtcgaacc

SEQ ID NO: 7724 - DNA, 19 bp, Artificial Sequence
  synthetic circulating small noncoding RNA (sncRNA) 5' transfer RNA (tRNA) half
cctaagcgagaatcatacc

SEQ ID NO: 7725 - DNA, 23 bp, Artificial Sequence
  synthetic circulating small noncoding RNA (sncRNA) 5' transfer RNA (tRNA) half
gttcgattccggctcgaaggact

SEQ ID NO: 7726 - DNA, 26 bp, Artificial Sequence
  synthetic circulating small noncoding RNA (sncRNA) 5' transfer RNA (tRNA) half
gggagaccggggttcgattccccgac

SEQ ID NO: 7727 - DNA, 14 bp, Artificial Sequence
  synthetic circulating small noncoding RNA (sncRNA) 5' transfer RNA (tRNA) half
ccggggttcgattc

SEQ ID NO: 7728 - DNA, 20 bp, Artificial Sequence
  synthetic circulating small noncoding RNA (sncRNA) 5' transfer RNA (tRNA) half
gtctccccgtcggggaatcg

SEQ ID NO: 7729 - DNA, 15 bp, Artificial Sequence
  synthetic circulating small noncoding RNA (sncRNA) 5' transfer RNA (tRNA) half
ttccctgaccgggaa

SEQ ID NO: 7730 - DNA, 36 bp, Artificial Sequence
  synthetic circulating small noncoding RNA (sncRNA) 5' transfer RNA (tRNA) half
tacctccccgtcggggaatcgaaccccggtctcccg

SEQ ID NO: 7731 - DNA, 23 bp, Artificial Sequence
  synthetic circulating small noncoding RNA (sncRNA) 5' transfer RNA (tRNA) half
aggaatcctaaccgctagaccat

SEQ ID NO: 7732 - DNA, 19 bp, Artificial Sequence
  synthetic circulating small noncoding RNA (sncRNA) 5' transfer RNA (tRNA) half
aaaactccagctggcccgt

SEQ ID NO: 7733 - DNA, 24 bp, Artificial Sequence
  synthetic circulating small noncoding RNA (sncRNA) 5' transfer RNA (tRNA) half
catggtctagcggttaggattcct

SEQ ID NO: 7734 - DNA, 32 bp, Artificial Sequence
  synthetic circulating small noncoding RNA (sncRNA) 5' transfer RNA (tRNA) half
cccgggccgcggcggtgagagcgccgaatcct

SEQ ID NO: 7735 - DNA, 33 bp, Artificial Sequence
  synthetic circulating small noncoding RNA (sncRNA) 5' transfer RNA (tRNA) half
ctcggatcgctggattcagagtccagagtgcta

SEQ ID NO: 7736 - DNA, 43 bp, Artificial Sequence
  synthetic circulating small noncoding RNA (sncRNA) 5' transfer RNA (tRNA) half
ctccagtctcttcggaggcgtgggttcgaatcccaccgctgcc

SEQ ID NO: 7737 - DNA, 28 bp, Artificial Sequence
  synthetic circulating small noncoding RNA (sncRNA) 5' transfer RNA (tRNA) half
ggtcgcgagttcaaatctcgctggggcc

SEQ ID NO: 7738 - DNA, 14 bp, Artificial Sequence
  synthetic circulating small noncoding RNA (sncRNA) 5' transfer RNA (tRNA) half
atgccggggatcga

SEQ ID NO: 7739 - DNA, 17 bp, Artificial Sequence
  synthetic circulating small noncoding RNA (sncRNA) 5' transfer RNA (tRNA) half
tcgactcccggtatggg

SEQ ID NO: 7740 - DNA, 27 bp, Artificial Sequence
  synthetic circulating small noncoding RNA (sncRNA) 5' transfer RNA (tRNA) half
ggccgcggcggtgagagcgccgaatcc

SEQ ID NO: 7741 - DNA, 17 bp, Artificial Sequence
  synthetic circulating small noncoding RNA (sncRNA) 5' transfer RNA (tRNA) half
ggttagcactctggact

SEQ ID NO: 7742 - DNA, 25 bp, Artificial Sequence
  synthetic circulating small noncoding RNA (sncRNA) 5' transfer RNA (tRNA) half
ggtgtagtggtatcatgcaagattc

SEQ ID NO: 7743 - DNA, 13 bp, Artificial Sequence
  synthetic circulating small noncoding RNA (sncRNA) 5' transfer RNA (tRNA) half
gcctccgaagaga

SEQ ID NO: 7744 - DNA, 13 bp, Artificial Sequence
  synthetic circulating small noncoding RNA (sncRNA) 5' transfer RNA (tRNA) half
cgaacccgcaacc

SEQ ID NO: 7745 - DNA, 33 bp, Artificial Sequence
  synthetic circulating small noncoding RNA (sncRNA) 5' transfer RNA (tRNA) half
acgcagtgccttagactgctcggccatcctgac

SEQ ID NO: 7746 - DNA, 26 bp, Artificial Sequence
  synthetic circulating small noncoding RNA (sncRNA) 5' transfer RNA (tRNA) half
gcttccctgaccgggaatcgaacccg

SEQ ID NO: 7747 - DNA, 30 bp, Artificial Sequence
  synthetic circulating small noncoding RNA (sncRNA) 5' transfer RNA (tRNA) half
tcaaatgctctacccctgagctataccacc

SEQ ID NO: 7748 - DNA, 31 bp, Artificial Sequence
  synthetic circulating small noncoding RNA (sncRNA) 5' transfer RNA (tRNA) half
cacatggtctagcggttaggattcctggttt

SEQ ID NO: 7749 - DNA, 21 bp, Artificial Sequence
  synthetic circulating small noncoding RNA (sncRNA) 5' transfer RNA (tRNA) half
caggcgagaattctaccactg

SEQ ID NO: 7750 - DNA, 29 bp, Artificial Sequence
  synthetic circulating small noncoding RNA (sncRNA) 5' transfer RNA (tRNA) half
gggcccagcacgcttccgctgcgccactc

SEQ ID NO: 7751 - DNA, 17 bp, Artificial Sequence
  synthetic circulating small noncoding RNA (sncRNA) 5' transfer RNA (tRNA) half
gccaatgccttatccat

SEQ ID NO: 7752 - DNA, 13 bp, Artificial Sequence
  synthetic circulating small noncoding RNA (sncRNA) 5' transfer RNA (tRNA) half
cgaacccacgacc

SEQ ID NO: 7753 - DNA, 24 bp, Artificial Sequence
  synthetic circulating small noncoding RNA (sncRNA) 5' transfer RNA (tRNA) half
aagcgagaatcatacccctagacc

SEQ ID NO: 7754 - DNA, 33 bp, Artificial Sequence
  synthetic circulating small noncoding RNA (sncRNA) 5' transfer RNA (tRNA) half
tgagggtccagggttcaagtccctgttcgggcg

SEQ ID NO: 7755 - DNA, 12 bp, Artificial Sequence
  synthetic circulating small noncoding RNA (sncRNA) 5' transfer RNA (tRNA) half
catgctctaccg

SEQ ID NO: 7756 - DNA, 29 bp, Artificial Sequence
  synthetic circulating small noncoding RNA (sncRNA) 5' transfer RNA (tRNA) half
cgccaaatcctaaccactagaccaccagg

SEQ ID NO: 7757 - DNA, 29 bp, Artificial Sequence
  synthetic circulating small noncoding RNA (sncRNA) 5' transfer RNA (tRNA) half
agattgcaggttcgagtcctgccgcggtc

SEQ ID NO: 7758 - DNA, 15 bp, Artificial Sequence
  synthetic circulating small noncoding RNA (sncRNA) 5' transfer RNA (tRNA) half
ctatacgatcacggc

SEQ ID NO: 7759 - DNA, 23 bp, Artificial Sequence
  synthetic circulating small noncoding RNA (sncRNA) 5' transfer RNA (tRNA) half
atttgaactcggatcgctggatt

SEQ ID NO: 7760 - DNA, 16 bp, Artificial Sequence
  synthetic circulating small noncoding RNA (sncRNA) 5' transfer RNA (tRNA) half
ccgctcggccatcctg

SEQ ID NO: 7761 - DNA, 12 bp, Artificial Sequence
  synthetic circulating small noncoding RNA (sncRNA) 5' transfer RNA (tRNA) half
tatacgatcacg

SEQ ID NO: 7762 - DNA, 16 bp, Artificial Sequence
  synthetic circulating small noncoding RNA (sncRNA) 5' transfer RNA (tRNA) half
agtcaaatgctctacc

SEQ ID NO: 7763 - DNA, 15 bp, Artificial Sequence
  synthetic circulating small noncoding RNA (sncRNA) 5' transfer RNA (tRNA) half
gcttccctgaccggg

SEQ ID NO: 7764 - DNA, 19 bp, Artificial Sequence
  synthetic circulating small noncoding RNA (sncRNA) 5' transfer RNA (tRNA) half
caatggtagaattctcgcc

SEQ ID NO: 7765 - DNA, 14 bp, Artificial Sequence
  synthetic circulating small noncoding RNA (sncRNA) 5' transfer RNA (tRNA) half
gttcgactcccggt

SEQ ID NO: 7766 - DNA, 31 bp, Artificial Sequence
  synthetic circulating small noncoding RNA (sncRNA) 5' transfer RNA (tRNA) half
atggaggcgtgggttcgaatcccacttctga

SEQ ID NO: 7767 - DNA, 14 bp, Artificial Sequence
  synthetic circulating small noncoding RNA (sncRNA) 5' transfer RNA (tRNA) half
ggttaacagccgaa

SEQ ID NO: 7768 - DNA, 14 bp, Artificial Sequence
  synthetic circulating small noncoding RNA (sncRNA) 5' transfer RNA (tRNA) half
gagcatttgactgc

SEQ ID NO: 7769 - DNA, 32 bp, Artificial Sequence
  synthetic circulating small noncoding RNA (sncRNA) 5' transfer RNA (tRNA) half
gcgtggcaggcgagaattctaccactgaacca

SEQ ID NO: 7770 - DNA, 20 bp, Artificial Sequence
  synthetic circulating small noncoding RNA (sncRNA) 5' transfer RNA (tRNA) half
tcccgcgtggcaggcgagaa

SEQ ID NO: 7771 - DNA, 21 bp, Artificial Sequence
  synthetic circulating small noncoding RNA (sncRNA) 5' transfer RNA (tRNA) half
atgaccccgacgtgattcgaa

SEQ ID NO: 7772 - DNA, 37 bp, Artificial Sequence
  synthetic circulating small noncoding RNA (sncRNA) 5' transfer RNA (tRNA) half
aacccgggccgcggcggtgagagcgccgaatcctaac

SEQ ID NO: 7773 - DNA, 17 bp, Artificial Sequence
  synthetic circulating small noncoding RNA (sncRNA) 5' transfer RNA (tRNA) half
ccccgtccgtgcctgcc

SEQ ID NO: 7774 - DNA, 19 bp, Artificial Sequence
  synthetic circulating small noncoding RNA (sncRNA) 5' transfer RNA (tRNA) half
ttgtgtcagaagtgggatt

SEQ ID NO: 7775 - DNA, 18 bp, Artificial Sequence
  synthetic circulating small noncoding RNA (sncRNA) 5' transfer RNA (tRNA) half
ggagatgccggggatcga

SEQ ID NO: 7776 - DNA, 11 bp, Artificial Sequence
  synthetic circulating small noncoding RNA (sncRNA) 5' transfer RNA (tRNA) half
ggcccagcacg

SEQ ID NO: 7777 - DNA, 19 bp, Artificial Sequence
  synthetic circulating small noncoding RNA (sncRNA) 5' transfer RNA (tRNA) half
ttcgagtcctgccgcggtc

SEQ ID NO: 7778 - DNA, 22 bp, Artificial Sequence
  synthetic circulating small noncoding RNA (sncRNA) 5' transfer RNA (tRNA) half
acccgggacctctcgcacccaa

SEQ ID NO: 7779 - DNA, 34 bp, Artificial Sequence
  synthetic circulating small noncoding RNA (sncRNA) 5' transfer RNA (tRNA) half
tccccgtcggggaatcgaaccccggtctcccgcg

SEQ ID NO: 7780 - DNA, 10 bp, Artificial Sequence
  synthetic circulating small noncoding RNA (sncRNA) 5' transfer RNA (tRNA) half
gcccggctag

SEQ ID NO: 7781 - DNA, 20 bp, Artificial Sequence
  synthetic circulating small noncoding RNA (sncRNA) 5' transfer RNA (tRNA) half
agcgccgaatcctaaccact

SEQ ID NO: 7782 - DNA, 22 bp, Artificial Sequence
  synthetic circulating small noncoding RNA (sncRNA) 5' transfer RNA (tRNA) half
actttgaatccagcgatccgag

SEQ ID NO: 7783 - DNA, 19 bp, Artificial Sequence
  synthetic circulating small noncoding RNA (sncRNA) 5' transfer RNA (tRNA) half
gcgagaatcatacccctag

SEQ ID NO: 7784 - DNA, 12 bp, Artificial Sequence
  synthetic circulating small noncoding RNA (sncRNA) 5' transfer RNA (tRNA) half
tccttcgagccg

SEQ ID NO: 7785 - DNA, 16 bp, Artificial Sequence
  synthetic circulating small noncoding RNA (sncRNA) 5' transfer RNA (tRNA) half
gaaccagggacctctt

SEQ ID NO: 7786 - DNA, 14 bp, Artificial Sequence
  synthetic circulating small noncoding RNA (sncRNA) 5' transfer RNA (tRNA) half
agtccagagtgcta

SEQ ID NO: 7787 - DNA, 20 bp, Artificial Sequence
  synthetic circulating small noncoding RNA (sncRNA) 5' transfer RNA (tRNA) half
agagcgccgaatcctaacca

SEQ ID NO: 7788 - DNA, 31 bp, Artificial Sequence
  synthetic circulating small noncoding RNA (sncRNA) 5' transfer RNA (tRNA) half
ggtcctgggttcgagccccagtggaaccacg

SEQ ID NO: 7789 - DNA, 15 bp, Artificial Sequence
  synthetic circulating small noncoding RNA (sncRNA) 5' transfer RNA (tRNA) half
gactgagctatccgg

SEQ ID NO: 7790 - DNA, 14 bp, Artificial Sequence
  synthetic circulating small noncoding RNA (sncRNA) 5' transfer RNA (tRNA) half
agggtcgtgggttc

SEQ ID NO: 7791 - DNA, 13 bp, Artificial Sequence
  synthetic circulating small noncoding RNA (sncRNA) 5' transfer RNA (tRNA) half
gagggggcacccg

SEQ ID NO: 7792 - DNA, 11 bp, Artificial Sequence
  synthetic circulating small noncoding RNA (sncRNA) 5' transfer RNA (tRNA) half
gactccgccgg

SEQ ID NO: 7793 - DNA, 18 bp, Artificial Sequence
  synthetic circulating small noncoding RNA (sncRNA) 5' transfer RNA (tRNA) half
ctaccgactgagctatcc

SEQ ID NO: 7794 - DNA, 26 bp, Artificial Sequence
  synthetic circulating small noncoding RNA (sncRNA) 5' transfer RNA (tRNA) half
cgcccaacgtggggctcgaacccacg

SEQ ID NO: 7795 - DNA, 30 bp, Artificial Sequence
  synthetic circulating small noncoding RNA (sncRNA) 5' transfer RNA (tRNA) half
gacgacgaggatgggattcgaacccacgcg

SEQ ID NO: 7796 - DNA, 31 bp, Artificial Sequence
  synthetic circulating small noncoding RNA (sncRNA) 5' transfer RNA (tRNA) half
ccatatggtctagcggttaggattcctggtt

SEQ ID NO: 7797 - DNA, 16 bp, Artificial Sequence
  synthetic circulating small noncoding RNA (sncRNA) 5' transfer RNA (tRNA) half
cgcccgaacagggact

SEQ ID NO: 7798 - DNA, 25 bp, Artificial Sequence
  synthetic circulating small noncoding RNA (sncRNA) 5' transfer RNA (tRNA) half
aaaagtctgatgctctaccgactga

SEQ ID NO: 7799 - DNA, 11 bp, Artificial Sequence
  synthetic circulating small noncoding RNA (sncRNA) 5' transfer RNA (tRNA) half
tagaccgctcg

SEQ ID NO: 7800 - DNA, 21 bp, Artificial Sequence
  synthetic circulating small noncoding RNA (sncRNA) 5' transfer RNA (tRNA) half
gaccacgaagggactcgaacc

SEQ ID NO: 7801 - DNA, 15 bp, Artificial Sequence
  synthetic circulating small noncoding RNA (sncRNA) 5' transfer RNA (tRNA) half
agagtactaaccact

SEQ ID NO: 7802 - DNA, 20 bp, Artificial Sequence
  synthetic circulating small noncoding RNA (sncRNA) 5' transfer RNA (tRNA) half
gctctcaccgccgcggcccg

SEQ ID NO: 7803 - DNA, 26 bp, Artificial Sequence
  synthetic circulating small noncoding RNA (sncRNA) 5' transfer RNA (tRNA) half
ttgcaggttcgagtcctgccgcggtc

SEQ ID NO: 7804 - DNA, 21 bp, Artificial Sequence
  synthetic circulating small noncoding RNA (sncRNA) 5' transfer RNA (tRNA) half
aaaccgggcggaaacattact

SEQ ID NO: 7805 - DNA, 33 bp, Artificial Sequence
  synthetic circulating small noncoding RNA (sncRNA) 5' transfer RNA (tRNA) half
agacgacgaggatgggattcgaacccacgcgtg

SEQ ID NO: 7806 - DNA, 23 bp, Artificial Sequence
  synthetic circulating small noncoding RNA (sncRNA) 5' transfer RNA (tRNA) half
ttcaaatcccggacgagccccac

SEQ ID NO: 7807 - DNA, 20 bp, Artificial Sequence
  synthetic circulating small noncoding RNA (sncRNA) 5' transfer RNA (tRNA) half
agccagccaggagtcgaacc

SEQ ID NO: 7808 - DNA, 21 bp, Artificial Sequence
  synthetic circulating small noncoding RNA (sncRNA) 5' transfer RNA (tRNA) half
cgggccgcggcggtgagagcg

SEQ ID NO: 7809 - DNA, 29 bp, Artificial Sequence
  synthetic circulating small noncoding RNA (sncRNA) 5' transfer RNA (tRNA) half
acccacgcgtgcaaagcacaatggattag

SEQ ID NO: 7810 - DNA, 25 bp, Artificial Sequence
  synthetic circulating small noncoding RNA (sncRNA) 5' transfer RNA (tRNA) half
cgtgatcgtatagtggttagtactc

SEQ ID NO: 7811 - DNA, 21 bp, Artificial Sequence
  synthetic circulating small noncoding RNA (sncRNA) 5' transfer RNA (tRNA) half
actggtagcgtggccgagcgg

SEQ ID NO: 7812 - DNA, 15 bp, Artificial Sequence
  synthetic circulating small noncoding RNA (sncRNA) 5' transfer RNA (tRNA) half
ccacgcgggaggccc

SEQ ID NO: 7813 - DNA, 11 bp, Artificial Sequence
  synthetic circulating small noncoding RNA (sncRNA) 5' transfer RNA (tRNA) half
gaacccgcaac

SEQ ID NO: 7814 - DNA, 22 bp, Artificial Sequence
  synthetic circulating small noncoding RNA (sncRNA) 5' transfer RNA (tRNA) half
gagaatcatacccctagaccaa

SEQ ID NO: 7815 - DNA, 22 bp, Artificial Sequence
  synthetic circulating small noncoding RNA (sncRNA) 5' transfer RNA (tRNA) half
cgaacccgggccgcggcggtga

SEQ ID NO: 7816 - DNA, 31 bp, Artificial Sequence
  synthetic circulating small noncoding RNA (sncRNA) 5' transfer RNA (tRNA) half
gtcaaatgctctacccctgagctatacgccc

SEQ ID NO: 7817 - DNA, 19 bp, Artificial Sequence
  synthetic circulating small noncoding RNA (sncRNA) 5' transfer RNA (tRNA) half
cagagtgctaaccattaca

SEQ ID NO: 7818 - DNA, 19 bp, Artificial Sequence
  synthetic circulating small noncoding RNA (sncRNA) 5' transfer RNA (tRNA) half
ccttcgatagctcagctgg

SEQ ID NO: 7819 - DNA, 14 bp, Artificial Sequence
  synthetic circulating small noncoding RNA (sncRNA) 5' transfer RNA (tRNA) half
agaccgctcggcca

SEQ ID NO: 7820 - DNA, 21 bp, Artificial Sequence
  synthetic circulating small noncoding RNA (sncRNA) 5' transfer RNA (tRNA) half
accaaactgtttccgcccggt

SEQ ID NO: 7821 - DNA, 18 bp, Artificial Sequence
  synthetic circulating small noncoding RNA (sncRNA) 5' transfer RNA (tRNA) half
ccactagaccaccaggga

SEQ ID NO: 7822 - DNA, 31 bp, Artificial Sequence
  synthetic circulating small noncoding RNA (sncRNA) 5' transfer RNA (tRNA) half
cagagtggcgcagcggaagcgtgctgggccc

SEQ ID NO: 7823 - DNA, 12 bp, Artificial Sequence
  synthetic circulating small noncoding RNA (sncRNA) 5' transfer RNA (tRNA) half
ccgtccgtgcct

SEQ ID NO: 7824 - DNA, 33 bp, Artificial Sequence
  synthetic circulating small noncoding RNA (sncRNA) 5' transfer RNA (tRNA) half
gacaggcggggatactcaccactatactaacga

SEQ ID NO: 7825 - DNA, 14 bp, Artificial Sequence
  synthetic circulating small noncoding RNA (sncRNA) 5' transfer RNA (tRNA) half
tcggccacgctacc

SEQ ID NO: 7826 - DNA, 31 bp, Artificial Sequence
  synthetic circulating small noncoding RNA (sncRNA) 5' transfer RNA (tRNA) half
gcgcccaacgtggggctcgaacccacgaccc

SEQ ID NO: 7827 - DNA, 18 bp, Artificial Sequence
  synthetic circulating small noncoding RNA (sncRNA) 5' transfer RNA (tRNA) half
gccccctctgaggttcga

SEQ ID NO: 7828 - DNA, 18 bp, Artificial Sequence
  synthetic circulating small noncoding RNA (sncRNA) 5' transfer RNA (tRNA) half
ggccgagcggtctaaggc

SEQ ID NO: 7829 - DNA, 16 bp, Artificial Sequence
  synthetic circulating small noncoding RNA (sncRNA) 5' transfer RNA (tRNA) half
gcaggttcgagtcctg

SEQ ID NO: 7830 - DNA, 23 bp, Artificial Sequence
  synthetic circulating small noncoding RNA (sncRNA) 5' transfer RNA (tRNA) half
ggttaggattcggcgctctcacc

SEQ ID NO: 7831 - DNA, 21 bp, Artificial Sequence
  synthetic circulating small noncoding RNA (sncRNA) 5' transfer RNA (tRNA) half
aatggtggagatgccggggat

SEQ ID NO: 7832 - DNA, 18 bp, Artificial Sequence
  synthetic circulating small noncoding RNA (sncRNA) 5' transfer RNA (tRNA) half
tacacgcagaaggtcctg

SEQ ID NO: 7833 - DNA, 11 bp, Artificial Sequence
  synthetic circulating small noncoding RNA (sncRNA) 5' transfer RNA (tRNA) half
tccgcccggtt

SEQ ID NO: 7834 - DNA, 36 bp, Artificial Sequence
  synthetic circulating small noncoding RNA (sncRNA) 5' transfer RNA (tRNA) half
tgcatgaggtcctgggttcgatccccagcatctcca

SEQ ID NO: 7835 - DNA, 19 bp, Artificial Sequence
  synthetic circulating small noncoding RNA (sncRNA) 5' transfer RNA (tRNA) half
ttccgcagcgagcagggtt

SEQ ID NO: 7836 - DNA, 12 bp, Artificial Sequence
  synthetic circulating small noncoding RNA (sncRNA) 5' transfer RNA (tRNA) half
gagctaatcccc

SEQ ID NO: 7837 - DNA, 43 bp, Artificial Sequence
  synthetic circulating small noncoding RNA (sncRNA) 5' transfer RNA (tRNA) half
tgtcacgcgggagaccggggttcgattccccgacggggagtct

SEQ ID NO: 7838 - DNA, 32 bp, Artificial Sequence
  synthetic circulating small noncoding RNA (sncRNA) 5' transfer RNA (tRNA) half
tagcattggtggttcagtggtagaattctcgc

SEQ ID NO: 7839 - DNA, 36 bp, Artificial Sequence
  synthetic circulating small noncoding RNA (sncRNA) 5' transfer RNA (tRNA) half
ggctgggggatgtagctcagtggtagagcgcgcgct

SEQ ID NO: 7840 - DNA, 22 bp, Artificial Sequence
  synthetic circulating small noncoding RNA (sncRNA) 5' transfer RNA (tRNA) half
ttaaccactcggccattctggt

SEQ ID NO: 7841 - DNA, 36 bp, Artificial Sequence
  synthetic circulating small noncoding RNA (sncRNA) 5' transfer RNA (tRNA) half
aacttccctggtggtctagtggttaggattcggcgc

SEQ ID NO: 7842 - DNA, 26 bp, Artificial Sequence
  synthetic circulating small noncoding RNA (sncRNA) 5' transfer RNA (tRNA) half
caacgcagagtactaaccactatacg

SEQ ID NO: 7843 - DNA, 16 bp, Artificial Sequence
  synthetic circulating small noncoding RNA (sncRNA) 5' transfer RNA (tRNA) half
ggttcgactcccggtg

SEQ ID NO: 7844 - DNA, 32 bp, Artificial Sequence
  synthetic circulating small noncoding RNA (sncRNA) 5' transfer RNA (tRNA) half
ggggattgtgggttcgagtcccatctgggtcg

SEQ ID NO: 7845 - DNA, 21 bp, Artificial Sequence
  synthetic circulating small noncoding RNA (sncRNA) 5' transfer RNA (tRNA) half
ggctcgtccgggatttgaacc

SEQ ID NO: 7846 - DNA, 22 bp, Artificial Sequence
  synthetic circulating small noncoding RNA (sncRNA) 5' transfer RNA (tRNA) half
ttccgcagcgagcagggttcga

SEQ ID NO: 7847 - DNA, 23 bp, Artificial Sequence
  synthetic circulating small noncoding RNA (sncRNA) 5' transfer RNA (tRNA) half
gcatgggtggttcagtggtagaa

SEQ ID NO: 7848 - DNA, 25 bp, Artificial Sequence
  synthetic circulating small noncoding RNA (sncRNA) 5' transfer RNA (tRNA) half
acccacgccatcgaaatgactggag

SEQ ID NO: 7849 - DNA, 21 bp, Artificial Sequence
  synthetic circulating small noncoding RNA (sncRNA) 5' transfer RNA (tRNA) half
aaaccaggaatcctaaccgct

SEQ ID NO: 7850 - DNA, 34 bp, Artificial Sequence
  synthetic circulating small noncoding RNA (sncRNA) 5' transfer RNA (tRNA) half
ggccggttagctcagttggttagagcatggtgct

SEQ ID NO: 7851 - DNA, 20 bp, Artificial Sequence
  synthetic circulating small noncoding RNA (sncRNA) 5' transfer RNA (tRNA) half
cgtccctgggtgggctcgaa

SEQ ID NO: 7852 - DNA, 33 bp, Artificial Sequence
  synthetic circulating small noncoding RNA (sncRNA) 5' transfer RNA (tRNA) half
gagcgccgaatcctaaccactagaccaccaggg

SEQ ID NO: 7853 - DNA, 21 bp, Artificial Sequence
  synthetic circulating small noncoding RNA (sncRNA) 5' transfer RNA (tRNA) half
gtctagtggtatgattctcag

SEQ ID NO: 7854 - DNA, 19 bp, Artificial Sequence
  synthetic circulating small noncoding RNA (sncRNA) 5' transfer RNA (tRNA) half
cagtggtagagcgcatgct

SEQ ID NO: 7855 - DNA, 10 bp, Artificial Sequence
  synthetic circulating small noncoding RNA (sncRNA) 5' transfer RNA (tRNA) half
gccgaatcct

SEQ ID NO: 7856 - DNA, 19 bp, Artificial Sequence
  synthetic circulating small noncoding RNA (sncRNA) 5' transfer RNA (tRNA) half
gaccccgacgtgattcgaa

SEQ ID NO: 7857 - DNA, 21 bp, Artificial Sequence
  synthetic circulating small noncoding RNA (sncRNA) 5' transfer RNA (tRNA) half
gtagtggttatcacatctgct

SEQ ID NO: 7858 - DNA, 22 bp, Artificial Sequence
  synthetic circulating small noncoding RNA (sncRNA) 5' transfer RNA (tRNA) half
ggcccagcacgcttccgctgcg

SEQ ID NO: 7859 - DNA, 37 bp, Artificial Sequence
  synthetic circulating small noncoding RNA (sncRNA) 5' transfer RNA (tRNA) half
acaggagatcctgggttcgaatcccagcggtgcctgg

SEQ ID NO: 7860 - DNA, 25 bp, Artificial Sequence
  synthetic circulating small noncoding RNA (sncRNA) 5' transfer RNA (tRNA) half
tcccacatggtctagcggttaggat

SEQ ID NO: 7861 - DNA, 15 bp, Artificial Sequence
  synthetic circulating small noncoding RNA (sncRNA) 5' transfer RNA (tRNA) half
tgtcacgcgggagac

SEQ ID NO: 7862 - DNA, 26 bp, Artificial Sequence
  synthetic circulating small noncoding RNA (sncRNA) 5' transfer RNA (tRNA) half
aagtctgatgctctaccgactgagct

SEQ ID NO: 7863 - DNA, 32 bp, Artificial Sequence
  synthetic circulating small noncoding RNA (sncRNA) 5' transfer RNA (tRNA) half
ggattcggcgctctcaccgccgcggcccgggt

SEQ ID NO: 7864 - DNA, 11 bp, Artificial Sequence
  synthetic circulating small noncoding RNA (sncRNA) 5' transfer RNA (tRNA) half
gttcgatcccg

SEQ ID NO: 7865 - DNA, 12 bp, Artificial Sequence
  synthetic circulating small noncoding RNA (sncRNA) 5' transfer RNA (tRNA) half
gactgcgacctg

SEQ ID NO: 7866 - DNA, 11 bp, Artificial Sequence
  synthetic circulating small noncoding RNA (sncRNA) 5' transfer RNA (tRNA) half
ccggttagctc

SEQ ID NO: 7867 - DNA, 18 bp, Artificial Sequence
  synthetic circulating small noncoding RNA (sncRNA) 5' transfer RNA (tRNA) half
agggctcgtccgggattt

SEQ ID NO: 7868 - DNA, 15 bp, Artificial Sequence
  synthetic circulating small noncoding RNA (sncRNA) 5' transfer RNA (tRNA) half
tggtagagcgcgtgc

SEQ ID NO: 7869 - DNA, 14 bp, Artificial Sequence
  synthetic circulating small noncoding RNA (sncRNA) 5' transfer RNA (tRNA) half
gttcgattcccggg

SEQ ID NO: 7870 - DNA, 11 bp, Artificial Sequence
  synthetic circulating small noncoding RNA (sncRNA) 5' transfer RNA (tRNA) half
cgactccgccg

SEQ ID NO: 7871 - DNA, 19 bp, Artificial Sequence
  synthetic circulating small noncoding RNA (sncRNA) 5' transfer RNA (tRNA) half
cgggtcaactgcttggaag

SEQ ID NO: 7872 - DNA, 37 bp, Artificial Sequence
  synthetic circulating small noncoding RNA (sncRNA) 5' transfer RNA (tRNA) half
cccaggcggcccgggttcgactcccggtatgggaaca

SEQ ID NO: 7873 - DNA, 33 bp, Artificial Sequence
  synthetic circulating small noncoding RNA (sncRNA) 5' transfer RNA (tRNA) half
cgcagaaggtcctgggttcgagccccagtggaa

SEQ ID NO: 7874 - DNA, 36 bp, Artificial Sequence
  synthetic circulating small noncoding RNA (sncRNA) 5' transfer RNA (tRNA) half
gggcctcccgcgtggcaggcgagaattctaccactg

SEQ ID NO: 7875 - DNA, 19 bp, Artificial Sequence
  synthetic circulating small noncoding RNA (sncRNA) 5' transfer RNA (tRNA) half
tcgaatcccactcctgaca

SEQ ID NO: 7876 - DNA, 19 bp, Artificial Sequence
  synthetic circulating small noncoding RNA (sncRNA) 5' transfer RNA (tRNA) half
cggttaggattcctggttt

SEQ ID NO: 7877 - DNA, 20 bp, Artificial Sequence
  synthetic circulating small noncoding RNA (sncRNA) 5' transfer RNA (tRNA) half
agagtcccatgctctaccga

SEQ ID NO: 7878 - DNA, 16 bp, Artificial Sequence
  synthetic circulating small noncoding RNA (sncRNA) 5' transfer RNA (tRNA) half
ttcccattcttgcgac

SEQ ID NO: 7879 - DNA, 19 bp, Artificial Sequence
  synthetic circulating small noncoding RNA (sncRNA) 5' transfer RNA (tRNA) half
aaccactatacgatcacgg

SEQ ID NO: 7880 - DNA, 25 bp, Artificial Sequence
  synthetic circulating small noncoding RNA (sncRNA) 5' transfer RNA (tRNA) half
ctgggttcgaatcccagcggtgcct

SEQ ID NO: 7881 - DNA, 33 bp, Artificial Sequence
  synthetic circulating small noncoding RNA (sncRNA) 5' transfer RNA (tRNA) half
aagtctgatgctctaccgactgagctatccggg

SEQ ID NO: 7882 - DNA, 38 bp, Artificial Sequence
  synthetic circulating small noncoding RNA (sncRNA) 5' transfer RNA (tRNA) half
gccctctctgaggttcgaactcaggaccttcagattat

SEQ ID NO: 7883 - DNA, 36 bp, Artificial Sequence
  synthetic circulating small noncoding RNA (sncRNA) 5' transfer RNA (tRNA) half
tccctgggtgggctcgaaccaccaacctttcggtta

SEQ ID NO: 7884 - DNA, 13 bp, Artificial Sequence
  synthetic circulating small noncoding RNA (sncRNA) 5' transfer RNA (tRNA) half
acccgggacctct

SEQ ID NO: 7885 - DNA, 33 bp, Artificial Sequence
  synthetic circulating small noncoding RNA (sncRNA) 5' transfer RNA (tRNA) half
tgcccggctagctcagtcggtagagcatgagac

SEQ ID NO: 7886 - DNA, 22 bp, Artificial Sequence
  synthetic circulating small noncoding RNA (sncRNA) 5' transfer RNA (tRNA) half
gcgtggcaggcgagaattctac

SEQ ID NO: 7887 - DNA, 26 bp, Artificial Sequence
  synthetic circulating small noncoding RNA (sncRNA) 5' transfer RNA (tRNA) half
ggatgatcctcagtggtctggggtgc

SEQ ID NO: 7888 - DNA, 42 bp, Artificial Sequence
  synthetic circulating small noncoding RNA (sncRNA) 5' transfer RNA (tRNA) half
ctcaccgccgcggcccgggttcgattcccggtcagggaagca

SEQ ID NO: 7889 - DNA, 23 bp, Artificial Sequence
  synthetic circulating small noncoding RNA (sncRNA) 5' transfer RNA (tRNA) half
gtactaaccactatacgatcacg

SEQ ID NO: 7890 - DNA, 23 bp, Artificial Sequence
  synthetic circulating small noncoding RNA (sncRNA) 5' transfer RNA (tRNA) half
actcaccactatactaacgagga

SEQ ID NO: 7891 - DNA, 14 bp, Artificial Sequence
  synthetic circulating small noncoding RNA (sncRNA) 5' transfer RNA (tRNA) half
actgagctagccgg

SEQ ID NO: 7892 - DNA, 19 bp, Artificial Sequence
  synthetic circulating small noncoding RNA (sncRNA) 5' transfer RNA (tRNA) half
ctgatgctctaccgactga

SEQ ID NO: 7893 - DNA, 16 bp, Artificial Sequence
  synthetic circulating small noncoding RNA (sncRNA) 5' transfer RNA (tRNA) half
caggattcgaacctgc

SEQ ID NO: 7894 - DNA, 23 bp, Artificial Sequence
  synthetic circulating small noncoding RNA (sncRNA) 5' transfer RNA (tRNA) half
gtctaggggtatgattctcgctt

SEQ ID NO: 7895 - DNA, 14 bp, Artificial Sequence
  synthetic circulating small noncoding RNA (sncRNA) 5' transfer RNA (tRNA) half
tttgagctaatccc

SEQ ID NO: 7896 - DNA, 35 bp, Artificial Sequence
  synthetic circulating small noncoding RNA (sncRNA) 5' transfer RNA (tRNA) half
ccaggggtcgcgagttcaaatctcgctggggcctg

SEQ ID NO: 7897 - DNA, 20 bp, Artificial Sequence
  synthetic circulating small noncoding RNA (sncRNA) 5' transfer RNA (tRNA) half
gttcaaatcacgtcggggtc

SEQ ID NO: 7898 - DNA, 16 bp, Artificial Sequence
  synthetic circulating small noncoding RNA (sncRNA) 5' transfer RNA (tRNA) half
ccgtcggggaatcgaa

SEQ ID NO: 7899 - DNA, 11 bp, Artificial Sequence
  synthetic circulating small noncoding RNA (sncRNA) 5' transfer RNA (tRNA) half
gggacctcttg

SEQ ID NO: 7900 - DNA, 12 bp, Artificial Sequence
  synthetic circulating small noncoding RNA (sncRNA) 5' transfer RNA (tRNA) half
tccccgtcgggg

SEQ ID NO: 7901 - DNA, 29 bp, Artificial Sequence
  synthetic circulating small noncoding RNA (sncRNA) 5' transfer RNA (tRNA) half
cggatgatcctcagtggtctggggtgcag

SEQ ID NO: 7902 - DNA, 12 bp, Artificial Sequence
  synthetic circulating small noncoding RNA (sncRNA) 5' transfer RNA (tRNA) half
tatgattctcgc

SEQ ID NO: 7903 - DNA, 19 bp, Artificial Sequence
  synthetic circulating small noncoding RNA (sncRNA) 5' transfer RNA (tRNA) half
aacccacgcctccattcgg

SEQ ID NO: 7904 - DNA, 24 bp, Artificial Sequence
  synthetic circulating small noncoding RNA (sncRNA) 5' transfer RNA (tRNA) half
tcgatccatcgacctctgggttat

SEQ ID NO: 7905 - DNA, 42 bp, Artificial Sequence
  synthetic circulating small noncoding RNA (sncRNA) 5' transfer RNA (tRNA) half
gtttccgtagtgtagtggttatcacgttcgcctcacacgcga

SEQ ID NO: 7906 - DNA, 16 bp, Artificial Sequence
  synthetic circulating small noncoding RNA (sncRNA) 5' transfer RNA (tRNA) half
attggtggttcagtgg

SEQ ID NO: 7907 - DNA, 29 bp, Artificial Sequence
  synthetic circulating small noncoding RNA (sncRNA) 5' transfer RNA (tRNA) half
tctggactctgaatccagcgatccgagtt

SEQ ID NO: 7908 - DNA, 33 bp, Artificial Sequence
  synthetic circulating small noncoding RNA (sncRNA) 5' transfer RNA (tRNA) half
ccgactctggtgggattcgaacccacaaccttt

SEQ ID NO: 7909 - DNA, 18 bp, Artificial Sequence
  synthetic circulating small noncoding RNA (sncRNA) 5' transfer RNA (tRNA) half
tcgggtgcgagaggtccc

SEQ ID NO: 7910 - DNA, 35 bp, Artificial Sequence
  synthetic circulating small noncoding RNA (sncRNA) 5' transfer RNA (tRNA) half
aaatccagcgccttagaccactcggccacgctacc

SEQ ID NO: 7911 - DNA, 17 bp, Artificial Sequence
  synthetic circulating small noncoding RNA (sncRNA) 5' transfer RNA (tRNA) half
tccctggtggtctagtg

SEQ ID NO: 7912 - DNA, 27 bp, Artificial Sequence
  synthetic circulating small noncoding RNA (sncRNA) 5' transfer RNA (tRNA) half
agagtggttcaattccacctttcgggc

SEQ ID NO: 7913 - DNA, 19 bp, Artificial Sequence
  synthetic circulating small noncoding RNA (sncRNA) 5' transfer RNA (tRNA) half
aggtcccaccgagatttga

SEQ ID NO: 7914 - DNA, 27 bp, Artificial Sequence
  synthetic circulating small noncoding RNA (sncRNA) 5' transfer RNA (tRNA) half
ggcggtgagagcgccaaatcctaacca

SEQ ID NO: 7915 - DNA, 18 bp, Artificial Sequence
  synthetic circulating small noncoding RNA (sncRNA) 5' transfer RNA (tRNA) half
aactcggatcgctggatt

SEQ ID NO: 7916 - DNA, 24 bp, Artificial Sequence
  synthetic circulating small noncoding RNA (sncRNA) 5' transfer RNA (tRNA) half
tcctaaccgctagaccatgtggga

SEQ ID NO: 7917 - DNA, 26 bp, Artificial Sequence
  synthetic circulating small noncoding RNA (sncRNA) 5' transfer RNA (tRNA) half
tagtgtagcggttatcacgtctgctt

SEQ ID NO: 7918 - DNA, 35 bp, Artificial Sequence
  synthetic circulating small noncoding RNA (sncRNA) 5' transfer RNA (tRNA) half
ttcccataccgggagtcgaacccgggccgcctggg

SEQ ID NO: 7919 - DNA, 34 bp, Artificial Sequence
  synthetic circulating small noncoding RNA (sncRNA) 5' transfer RNA (tRNA) half
tccccgtcggggaattgaaccccggtctcccgcg

SEQ ID NO: 7920 - DNA, 39 bp, Artificial Sequence
  synthetic circulating small noncoding RNA (sncRNA) 5' transfer RNA (tRNA) half
tccctggtggtctagtggttaggattcggcgctctcacc

SEQ ID NO: 7921 - DNA, 23 bp, Artificial Sequence
  synthetic circulating small noncoding RNA (sncRNA) 5' transfer RNA (tRNA) half
gacgaggatgggattcgaaccca

SEQ ID NO: 7922 - DNA, 19 bp, Artificial Sequence
  synthetic circulating small noncoding RNA (sncRNA) 5' transfer RNA (tRNA) half
tcgagtcccatctggggtg

SEQ ID NO: 7923 - DNA, 11 bp, Artificial Sequence
  synthetic circulating small noncoding RNA (sncRNA) 5' transfer RNA (tRNA) half
ttccgcccggt

SEQ ID NO: 7924 - DNA, 15 bp, Artificial Sequence
  synthetic circulating small noncoding RNA (sncRNA) 5' transfer RNA (tRNA) half
gcacccggatttgaa

SEQ ID NO: 7925 - DNA, 13 bp, Artificial Sequence
  synthetic circulating small noncoding RNA (sncRNA) 5' transfer RNA (tRNA) half
aggtcgcgggttc

SEQ ID NO: 7926 - DNA, 38 bp, Artificial Sequence
  synthetic circulating small noncoding RNA (sncRNA) 5' transfer RNA (tRNA) half
taaacaggagatcctgggttcgaatcccagcggtgcct

SEQ ID NO: 7927 - DNA, 18 bp, Artificial Sequence
  synthetic circulating small noncoding RNA (sncRNA) 5' transfer RNA (tRNA) half
caaatcccggacgagccc

SEQ ID NO: 7928 - DNA, 17 bp, Artificial Sequence
  synthetic circulating small noncoding RNA (sncRNA) 5' transfer RNA (tRNA) half
cactcggccatcgctgc

SEQ ID NO: 7929 - DNA, 17 bp, Artificial Sequence
  synthetic circulating small noncoding RNA (sncRNA) 5' transfer RNA (tRNA) half
agtggtatcatgcaaga

SEQ ID NO: 7930 - DNA, 15 bp, Artificial Sequence
  synthetic circulating small noncoding RNA (sncRNA) 5' transfer RNA (tRNA) half
gaaccggggacctct

SEQ ID NO: 7931 - DNA, 19 bp, Artificial Sequence
  synthetic circulating small noncoding RNA (sncRNA) 5' transfer RNA (tRNA) half
tcgaatcccatcctcgtcg

SEQ ID NO: 7932 - DNA, 14 bp, Artificial Sequence
  synthetic circulating small noncoding RNA (sncRNA) 5' transfer RNA (tRNA) half
agcgccgaatccta

SEQ ID NO: 7933 - DNA, 39 bp, Artificial Sequence
  synthetic circulating small noncoding RNA (sncRNA) 5' transfer RNA (tRNA) half
tttgaactcggatcgctggattcagagtccagagtgcta

SEQ ID NO: 7934 - DNA, 11 bp, Artificial Sequence
  synthetic circulating small noncoding RNA (sncRNA) 5' transfer RNA (tRNA) half
ccggtcaggga

SEQ ID NO: 7935 - DNA, 38 bp, Artificial Sequence
  synthetic circulating small noncoding RNA (sncRNA) 5' transfer RNA (tRNA) half
agcctccccgtcggggaatcgaaccccggtctcccgcg

SEQ ID NO: 7936 - DNA, 27 bp, Artificial Sequence
  synthetic circulating small noncoding RNA (sncRNA) 5' transfer RNA (tRNA) half
ggcggtgaaagcgccgaatcctagcca

SEQ ID NO: 7937 - DNA, 12 bp, Artificial Sequence
  synthetic circulating small noncoding RNA (sncRNA) 5' transfer RNA (tRNA) half
gaggtccccggt

SEQ ID NO: 7938 - DNA, 17 bp, Artificial Sequence
  synthetic circulating small noncoding RNA (sncRNA) 5' transfer RNA (tRNA) half
gcgggaggcccgggttc

SEQ ID NO: 7939 - DNA, 25 bp, Artificial Sequence
  synthetic circulating small noncoding RNA (sncRNA) 5' transfer RNA (tRNA) half
agtccagagtgctaaccattacacc

SEQ ID NO: 7940 - DNA, 30 bp, Artificial Sequence
  synthetic circulating small noncoding RNA (sncRNA) 5' transfer RNA (tRNA) half
ggccctatagctcaggggttagagcactgg

SEQ ID NO: 7941 - DNA, 19 bp, Artificial Sequence
  synthetic circulating small noncoding RNA (sncRNA) 5' transfer RNA (tRNA) half
gcttccctgaccgggaatc

SEQ ID NO: 7942 - DNA, 17 bp, Artificial Sequence
  synthetic circulating small noncoding RNA (sncRNA) 5' transfer RNA (tRNA) half
ctcccggtgtgggaaca

SEQ ID NO: 7943 - DNA, 28 bp, Artificial Sequence
  synthetic circulating small noncoding RNA (sncRNA) 5' transfer RNA (tRNA) half
gattgcaggttcgagtcctgccgcggtc

SEQ ID NO: 7944 - DNA, 14 bp, Artificial Sequence
  synthetic circulating small noncoding RNA (sncRNA) 5' transfer RNA (tRNA) half
gaaccgaggttgct

SEQ ID NO: 7945 - DNA, 21 bp, Artificial Sequence
  synthetic circulating small noncoding RNA (sncRNA) 5' transfer RNA (tRNA) half
aggcaagtgcattggccggga

SEQ ID NO: 7946 - DNA, 36 bp, Artificial Sequence
  synthetic circulating small noncoding RNA (sncRNA) 5' transfer RNA (tRNA) half
aactcggatcgctggattcagagtccagagtgctaa

SEQ ID NO: 7947 - DNA, 29 bp, Artificial Sequence
  synthetic circulating small noncoding RNA (sncRNA) 5' transfer RNA (tRNA) half
ccaaagcctaaccactagaccaccaggga

SEQ ID NO: 7948 - DNA, 28 bp, Artificial Sequence
  synthetic circulating small noncoding RNA (sncRNA) 5' transfer RNA (tRNA) half
tccagggttcaagtccctgttcgggcgc

SEQ ID NO: 7949 - DNA, 31 bp, Artificial Sequence
  synthetic circulating small noncoding RNA (sncRNA) 5' transfer RNA (tRNA) half
cgggaggcccgggttcgattcccggcccatg

SEQ ID NO: 7950 - DNA, 35 bp, Artificial Sequence
  synthetic circulating small noncoding RNA (sncRNA) 5' transfer RNA (tRNA) half
agggcatgggtggttcagtggtagaattctcgcct

SEQ ID NO: 7951 - DNA, 18 bp, Artificial Sequence
  synthetic circulating small noncoding RNA (sncRNA) 5' transfer RNA (tRNA) half
gtgtttccgcccggtttc

SEQ ID NO: 7952 - DNA, 24 bp, Artificial Sequence
  synthetic circulating small noncoding RNA (sncRNA) 5' transfer RNA (tRNA) half
cgagccagccaggagtcgaaccta

SEQ ID NO: 7953 - DNA, 28 bp, Artificial Sequence
  synthetic circulating small noncoding RNA (sncRNA) 5' transfer RNA (tRNA) half
aagcgagaatcatacccctagaccaacg

SEQ ID NO: 7954 - DNA, 28 bp, Artificial Sequence
  synthetic circulating small noncoding RNA (sncRNA) 5' transfer RNA (tRNA) half
cgggagaccggggttcgattccccgacg

SEQ ID NO: 7955 - DNA, 15 bp, Artificial Sequence
  synthetic circulating small noncoding RNA (sncRNA) 5' transfer RNA (tRNA) half
aaaggtccccggttc

SEQ ID NO: 7956 - DNA, 29 bp, Artificial Sequence
  synthetic circulating small noncoding RNA (sncRNA) 5' transfer RNA (tRNA) half
gcgatccgagttcaaatctcggtggaacc

SEQ ID NO: 7957 - DNA, 18 bp, Artificial Sequence
  synthetic circulating small noncoding RNA (sncRNA) 5' transfer RNA (tRNA) half
ttgggtgcgagaggtccc

SEQ ID NO: 7958 - DNA, 19 bp, Artificial Sequence
  synthetic circulating small noncoding RNA (sncRNA) 5' transfer RNA (tRNA) half
accaggaatcctaaccgct

SEQ ID NO: 7959 - DNA, 17 bp, Artificial Sequence
  synthetic circulating small noncoding RNA (sncRNA) 5' transfer RNA (tRNA) half
aatcctaaccactagac

SEQ ID NO: 7960 - DNA, 15 bp, Artificial Sequence
  synthetic circulating small noncoding RNA (sncRNA) 5' transfer RNA (tRNA) half
gccgagcggtctaag

SEQ ID NO: 7961 - DNA, 36 bp, Artificial Sequence
  synthetic circulating small noncoding RNA (sncRNA) 5' transfer RNA (tRNA) half
cgggagaccggggttcgattccccgacggggagtct

SEQ ID NO: 7962 - DNA, 21 bp, Artificial Sequence
  synthetic circulating small noncoding RNA (sncRNA) 5' transfer RNA (tRNA) half
tcgaatcccaccactgccaac

SEQ ID NO: 7963 - DNA, 16 bp, Artificial Sequence
  synthetic circulating small noncoding RNA (sncRNA) 5' transfer RNA (tRNA) half
tgagagcgccgaatcc

SEQ ID NO: 7964 - DNA, 18 bp, Artificial Sequence
  synthetic circulating small noncoding RNA (sncRNA) 5' transfer RNA (tRNA) half
ggtagaattctcgcctgc

SEQ ID NO: 7965 - DNA, 16 bp, Artificial Sequence
  synthetic circulating small noncoding RNA (sncRNA) 5' transfer RNA (tRNA) half
gggagaccggggttcg

SEQ ID NO: 7966 - DNA, 25 bp, Artificial Sequence
  synthetic circulating small noncoding RNA (sncRNA) 5' transfer RNA (tRNA) half
catagtgtagcggttatcacgtctg

SEQ ID NO: 7967 - DNA, 36 bp, Artificial Sequence
  synthetic circulating small noncoding RNA (sncRNA) 5' transfer RNA (tRNA) half
gaccccgacgtgatttgaacacgcaaccttctgatc

SEQ ID NO: 7968 - DNA, 25 bp, Artificial Sequence
  synthetic circulating small noncoding RNA (sncRNA) 5' transfer RNA (tRNA) half
ggtagcgtggccgagcggtctaagg

SEQ ID NO: 7969 - DNA, 20 bp, Artificial Sequence
  synthetic circulating small noncoding RNA (sncRNA) 5' transfer RNA (tRNA) half
gggagactgcgacctgaacg

SEQ ID NO: 7970 - DNA, 21 bp, Artificial Sequence
  synthetic circulating small noncoding RNA (sncRNA) 5' transfer RNA (tRNA) half
gaaccctggaccctcagatta

SEQ ID NO: 7971 - DNA, 15 bp, Artificial Sequence
  synthetic circulating small noncoding RNA (sncRNA) 5' transfer RNA (tRNA) half
agactgcgacctgaa

SEQ ID NO: 7972 - DNA, 20 bp, Artificial Sequence
  synthetic circulating small noncoding RNA (sncRNA) 5' transfer RNA (tRNA) half
tgtttgggctcgtccgggat

SEQ ID NO: 7973 - DNA, 33 bp, Artificial Sequence
  synthetic circulating small noncoding RNA (sncRNA) 5' transfer RNA (tRNA) half
ctccccgtcggggaattgaaccccggtctcccg

SEQ ID NO: 7974 - DNA, 12 bp, Artificial Sequence
  synthetic circulating small noncoding RNA (sncRNA) 5' transfer RNA (tRNA) half
gagcatttgact

SEQ ID NO: 7975 - DNA, 23 bp, Artificial Sequence
  synthetic circulating small noncoding RNA (sncRNA) 5' transfer RNA (tRNA) half
ttcgattcccggccaatgcacga

SEQ ID NO: 7976 - DNA, 22 bp, Artificial Sequence
  synthetic circulating small noncoding RNA (sncRNA) 5' transfer RNA (tRNA) half
tgtaatggttagcactctggac

SEQ ID NO: 7977 - DNA, 15 bp, Artificial Sequence
  synthetic circulating small noncoding RNA (sncRNA) 5' transfer RNA (tRNA) half
gcccggtttcgaacc

SEQ ID NO: 7978 - DNA, 22 bp, Artificial Sequence
  synthetic circulating small noncoding RNA (sncRNA) 5' transfer RNA (tRNA) half
tagaattctcgcctgccacgcg

SEQ ID NO: 7979 - DNA, 14 bp, Artificial Sequence
  synthetic circulating small noncoding RNA (sncRNA) 5' transfer RNA (tRNA) half
tccagagtgctaac

SEQ ID NO: 7980 - DNA, 19 bp, Artificial Sequence
  synthetic circulating small noncoding RNA (sncRNA) 5' transfer RNA (tRNA) half
tctagcggttaggattcct

SEQ ID NO: 7981 - DNA, 26 bp, Artificial Sequence
  synthetic circulating small noncoding RNA (sncRNA) 5' transfer RNA (tRNA) half
taacccagaggtcgatggatcgaaac

SEQ ID NO: 7982 - DNA, 22 bp, Artificial Sequence
  synthetic circulating small noncoding RNA (sncRNA) 5' transfer RNA (tRNA) half
cgtagtcggcaggattcgaacc

SEQ ID NO: 7983 - DNA, 17 bp, Artificial Sequence
  synthetic circulating small noncoding RNA (sncRNA) 5' transfer RNA (tRNA) half
atggtagaattctcgcc

SEQ ID NO: 7984 - DNA, 27 bp, Artificial Sequence
  synthetic circulating small noncoding RNA (sncRNA) 5' transfer RNA (tRNA) half
tctggactctgaatccagcgatccgag

SEQ ID NO: 7985 - DNA, 32 bp, Artificial Sequence
  synthetic circulating small noncoding RNA (sncRNA) 5' transfer RNA (tRNA) half
agggattgtgggttcgagtcccatctggggtg

SEQ ID NO: 7986 - DNA, 12 bp, Artificial Sequence
  synthetic circulating small noncoding RNA (sncRNA) 5' transfer RNA (tRNA) half
cccgggcctccc

SEQ ID NO: 7987 - DNA, 33 bp, Artificial Sequence
  synthetic circulating small noncoding RNA (sncRNA) 5' transfer RNA (tRNA) half
agaagattccaggttcgactcctggctggctcg

SEQ ID NO: 7988 - DNA, 16 bp, Artificial Sequence
  synthetic circulating small noncoding RNA (sncRNA) 5' transfer RNA (tRNA) half
ggttagcactctggac

SEQ ID NO: 7989 - DNA, 26 bp, Artificial Sequence
  synthetic circulating small noncoding RNA (sncRNA) 5' transfer RNA (tRNA) half
ctggactctgaatccagcgatccgag

SEQ ID NO: 7990 - DNA, 21 bp, Artificial Sequence
  synthetic circulating small noncoding RNA (sncRNA) 5' transfer RNA (tRNA) half
ggggaatcgaaccccggtctc

SEQ ID NO: 7991 - DNA, 12 bp, Artificial Sequence
  synthetic circulating small noncoding RNA (sncRNA) 5' transfer RNA (tRNA) half
atccatcgacct

SEQ ID NO: 7992 - DNA, 22 bp, Artificial Sequence
  synthetic circulating small noncoding RNA (sncRNA) 5' transfer RNA (tRNA) half
agctggaggatgtgggcatcga

SEQ ID NO: 7993 - DNA, 18 bp, Artificial Sequence
  synthetic circulating small noncoding RNA (sncRNA) 5' transfer RNA (tRNA) half
atgcagagtactaaccac

SEQ ID NO: 7994 - DNA, 12 bp, Artificial Sequence
  synthetic circulating small noncoding RNA (sncRNA) 5' transfer RNA (tRNA) half
ggcctcccgcgt

SEQ ID NO: 7995 - DNA, 22 bp, Artificial Sequence
  synthetic circulating small noncoding RNA (sncRNA) 5' transfer RNA (tRNA) half
gagttcaaatctcggtgggacc

SEQ ID NO: 7996 - DNA, 6 bp, Artificial Sequence
  synthetic circulating small noncoding RNA (sncRNA) 5' transfer RNA (tRNA) half
tgccga

SEQ ID NO: 7997 - DNA, 32 bp, Artificial Sequence
  synthetic circulating small noncoding RNA (sncRNA) 5' transfer RNA (tRNA) half
cccgaacagggacttgaaccctggaccctcag

SEQ ID NO: 7998 - DNA, 25 bp, Artificial Sequence
  synthetic circulating small noncoding RNA (sncRNA) 5' transfer RNA (tRNA) half
gcctccccgtcggggaatcgaaccc

SEQ ID NO: 7999 - DNA, 38 bp, Artificial Sequence
  synthetic circulating small noncoding RNA (sncRNA) 5' transfer RNA (tRNA) half
acccaggcggcccgggttcgactcccggtgtgggaaca

SEQ ID NO: 8000 - DNA, 20 bp, Artificial Sequence
  synthetic circulating small noncoding RNA (sncRNA) 5' transfer RNA (tRNA) half
aggtcccaccgagatttgaa

SEQ ID NO: 8001 - DNA, 26 bp, Artificial Sequence
  synthetic circulating small noncoding RNA (sncRNA) 5' transfer RNA (tRNA) half
cgtcgagccagccaggagtcgaacct

SEQ ID NO: 8002 - DNA, 12 bp, Artificial Sequence
  synthetic circulating small noncoding RNA (sncRNA) 5' transfer RNA (tRNA) half
ctgagctagccg

SEQ ID NO: 8003 - DNA, 15 bp, Artificial Sequence
  synthetic circulating small noncoding RNA (sncRNA) 5' transfer RNA (tRNA) half
cttggccacgactac

SEQ ID NO: 8004 - DNA, 18 bp, Artificial Sequence
  synthetic circulating small noncoding RNA (sncRNA) 5' transfer RNA (tRNA) half
acgcgaaaggtccccggt

SEQ ID NO: 8005 - DNA, 32 bp, Artificial Sequence
  synthetic circulating small noncoding RNA (sncRNA) 5' transfer RNA (tRNA) half
ccacgaagggactcgaaccctcaatcttctga

SEQ ID NO: 8006 - DNA, 17 bp, Artificial Sequence
  synthetic circulating small noncoding RNA (sncRNA) 5' transfer RNA (tRNA) half
gcgtggcaggcgagaat

SEQ ID NO: 8007 - DNA, 32 bp, Artificial Sequence
  synthetic circulating small noncoding RNA (sncRNA) 5' transfer RNA (tRNA) half
tccctgaccgggaatcgaacccgggccgcggc

SEQ ID NO: 8008 - DNA, 9 bp, Artificial Sequence
  synthetic circulating small noncoding RNA (sncRNA) 5' transfer RNA (tRNA) half
agcgccgaa

SEQ ID NO: 8009 - DNA, 29 bp, Artificial Sequence
  synthetic circulating small noncoding RNA (sncRNA) 5' transfer RNA (tRNA) half
tccgtagtgtagtggttatcacgctcgcc

SEQ ID NO: 8010 - DNA, 30 bp, Artificial Sequence
  synthetic circulating small noncoding RNA (sncRNA) 5' transfer RNA (tRNA) half
gagatttgaactcggatcgctggattcaga

SEQ ID NO: 8011 - DNA, 22 bp, Artificial Sequence
  synthetic circulating small noncoding RNA (sncRNA) 5' transfer RNA (tRNA) half
tccgcagcgagcagggttcgaa

SEQ ID NO: 8012 - DNA, 15 bp, Artificial Sequence
  synthetic circulating small noncoding RNA (sncRNA) 5' transfer RNA (tRNA) half
gataaccactacact

SEQ ID NO: 8013 - DNA, 17 bp, Artificial Sequence
  synthetic circulating small noncoding RNA (sncRNA) 5' transfer RNA (tRNA) half
cggtctcccgcgtgaca

SEQ ID NO: 8014 - DNA, 15 bp, Artificial Sequence
  synthetic circulating small noncoding RNA (sncRNA) 5' transfer RNA (tRNA) half
cccctagaccaacga

SEQ ID NO: 8015 - DNA, 23 bp, Artificial Sequence
  synthetic circulating small noncoding RNA (sncRNA) 5' transfer RNA (tRNA) half
ggggttcgattccccgacgggga

SEQ ID NO: 8016 - DNA, 17 bp, Artificial Sequence
  synthetic circulating small noncoding RNA (sncRNA) 5' transfer RNA (tRNA) half
gggttagtactctgcgt

SEQ ID NO: 8017 - DNA, 24 bp, Artificial Sequence
  synthetic circulating small noncoding RNA (sncRNA) 5' transfer RNA (tRNA) half
gcccaacgtggggctcgaacccac

SEQ ID NO: 8018 - DNA, 33 bp, Artificial Sequence
  synthetic circulating small noncoding RNA (sncRNA) 5' transfer RNA (tRNA) half
ctcccacatggtctagcggttaggattcctggt

SEQ ID NO: 8019 - DNA, 25 bp, Artificial Sequence
  synthetic circulating small noncoding RNA (sncRNA) 5' transfer RNA (tRNA) half
tcggcgctctcaccgccgcggcccg

SEQ ID NO: 8020 - DNA, 22 bp, Artificial Sequence
  synthetic circulating small noncoding RNA (sncRNA) 5' transfer RNA (tRNA) half
gataaccactacactacggaaa

SEQ ID NO: 8021 - DNA, 20 bp, Artificial Sequence
  synthetic circulating small noncoding RNA (sncRNA) 5' transfer RNA (tRNA) half
aggaatcctaaccgctagac

SEQ ID NO: 8022 - DNA, 24 bp, Artificial Sequence
  synthetic circulating small noncoding RNA (sncRNA) 5' transfer RNA (tRNA) half
ggttcgactcccggtgtgggaacg

SEQ ID NO: 8023 - DNA, 21 bp, Artificial Sequence
  synthetic circulating small noncoding RNA (sncRNA) 5' transfer RNA (tRNA) half
ttccgagccagccaggagtcg

SEQ ID NO: 8024 - DNA, 19 bp, Artificial Sequence
  synthetic circulating small noncoding RNA (sncRNA) 5' transfer RNA (tRNA) half
ttcgaaaccgggcggaaac

SEQ ID NO: 8025 - DNA, 15 bp, Artificial Sequence
  synthetic circulating small noncoding RNA (sncRNA) 5' transfer RNA (tRNA) half
gagaggtcccgggtt

SEQ ID NO: 8026 - DNA, 16 bp, Artificial Sequence
  synthetic circulating small noncoding RNA (sncRNA) 5' transfer RNA (tRNA) half
gttggccgggaatcga

SEQ ID NO: 8027 - DNA, 14 bp, Artificial Sequence
  synthetic circulating small noncoding RNA (sncRNA) 5' transfer RNA (tRNA) half
agattccaggttcg

SEQ ID NO: 8028 - DNA, 35 bp, Artificial Sequence
  synthetic circulating small noncoding RNA (sncRNA) 5' transfer RNA (tRNA) half
aggagcattggtggttcagtggtagaattctcgcc

SEQ ID NO: 8029 - DNA, 26 bp, Artificial Sequence
  synthetic circulating small noncoding RNA (sncRNA) 5' transfer RNA (tRNA) half
ggcccagcacgcttccgctgcgccac

SEQ ID NO: 8030 - DNA, 15 bp, Artificial Sequence
  synthetic circulating small noncoding RNA (sncRNA) 5' transfer RNA (tRNA) half
cccggtctcccgcgt

SEQ ID NO: 8031 - DNA, 27 bp, Artificial Sequence
  synthetic circulating small noncoding RNA (sncRNA) 5' transfer RNA (tRNA) half
ggattcagagtccagagtgctaaccat

SEQ ID NO: 8032 - DNA, 32 bp, Artificial Sequence
  synthetic circulating small noncoding RNA (sncRNA) 5' transfer RNA (tRNA) half
tgcagagtactaaccactatacgatctcggca

SEQ ID NO: 8033 - DNA, 39 bp, Artificial Sequence
  synthetic circulating small noncoding RNA (sncRNA) 5' transfer RNA (tRNA) half
tgaactcggatcgctggattcaaagtccagagtgctaac

SEQ ID NO: 8034 - DNA, 35 bp, Artificial Sequence
  synthetic circulating small noncoding RNA (sncRNA) 5' transfer RNA (tRNA) half
ggtgagagcgccgaatcctaaccactagaccacca

SEQ ID NO: 8035 - DNA, 19 bp, Artificial Sequence
  synthetic circulating small noncoding RNA (sncRNA) 5' transfer RNA (tRNA) half
ggcggtgagagcgccgaat

SEQ ID NO: 8036 - DNA, 33 bp, Artificial Sequence
  synthetic circulating small noncoding RNA (sncRNA) 5' transfer RNA (tRNA) half
ttaatctgagggtccagggttcaagtccctgtt

SEQ ID NO: 8037 - DNA, 37 bp, Artificial Sequence
  synthetic circulating small noncoding RNA (sncRNA) 5' transfer RNA (tRNA) half
aacttccctggtggtctagtggttaggattcggcgct

SEQ ID NO: 8038 - DNA, 43 bp, Artificial Sequence
  synthetic circulating small noncoding RNA (sncRNA) 5' transfer RNA (tRNA) half
tgttcccataccgggagtcgaacccgggccgcctgggtgaaaa

SEQ ID NO: 8039 - DNA, 15 bp, Artificial Sequence
  synthetic circulating small noncoding RNA (sncRNA) 5' transfer RNA (tRNA) half
ccacctttcgggcgg

SEQ ID NO: 8040 - DNA, 28 bp, Artificial Sequence
  synthetic circulating small noncoding RNA (sncRNA) 5' transfer RNA (tRNA) half
ggccgggaatcgaacccgggcctcccgc

SEQ ID NO: 8041 - DNA, 35 bp, Artificial Sequence
  synthetic circulating small noncoding RNA (sncRNA) 5' transfer RNA (tRNA) half
acaatgcagagtactaaccactatacgatctcggc

SEQ ID NO: 8042 - DNA, 22 bp, Artificial Sequence
  synthetic circulating small noncoding RNA (sncRNA) 5' transfer RNA (tRNA) half
tacgggccaaagctgaagcgtt

SEQ ID NO: 8043 - DNA, 24 bp, Artificial Sequence
  synthetic circulating small noncoding RNA (sncRNA) 5' transfer RNA (tRNA) half
taacccagaggtcgatggatcgaa

SEQ ID NO: 8044 - DNA, 22 bp, Artificial Sequence
  synthetic circulating small noncoding RNA (sncRNA) 5' transfer RNA (tRNA) half
agttcaaatctcgctggggcct

SEQ ID NO: 8045 - DNA, 25 bp, Artificial Sequence
  synthetic circulating small noncoding RNA (sncRNA) 5' transfer RNA (tRNA) half
cccgggcctcccgcgtggcaggcga

SEQ ID NO: 8046 - DNA, 20 bp, Artificial Sequence
  synthetic circulating small noncoding RNA (sncRNA) 5' transfer RNA (tRNA) half
tagcgtggccgagcggtcta

SEQ ID NO: 8047 - DNA, 18 bp, Artificial Sequence
  synthetic circulating small noncoding RNA (sncRNA) 5' transfer RNA (tRNA) half
ggcggggatactcaccac

SEQ ID NO: 8048 - DNA, 13 bp, Artificial Sequence
  synthetic circulating small noncoding RNA (sncRNA) 5' transfer RNA (tRNA) half
tcccatcctcgtc

SEQ ID NO: 8049 - DNA, 17 bp, Artificial Sequence
  synthetic circulating small noncoding RNA (sncRNA) 5' transfer RNA (tRNA) half
cggtagagcatcagact

SEQ ID NO: 8050 - DNA, 28 bp, Artificial Sequence
  synthetic circulating small noncoding RNA (sncRNA) 5' transfer RNA (tRNA) half
gccgggaatcgaacccgggtcaactgct

SEQ ID NO: 8051 - DNA, 12 bp, Artificial Sequence
  synthetic circulating small noncoding RNA (sncRNA) 5' transfer RNA (tRNA) half
tatcacgttcgc

SEQ ID NO: 8052 - DNA, 17 bp, Artificial Sequence
  synthetic circulating small noncoding RNA (sncRNA) 5' transfer RNA (tRNA) half
ggccgcctgggtgaaaa

SEQ ID NO: 8053 - DNA, 22 bp, Artificial Sequence
  synthetic circulating small noncoding RNA (sncRNA) 5' transfer RNA (tRNA) half
tggattcagagtccagagtgct

SEQ ID NO: 8054 - DNA, 13 bp, Artificial Sequence
  synthetic circulating small noncoding RNA (sncRNA) 5' transfer RNA (tRNA) half
gaacccgcgacct

SEQ ID NO: 8055 - DNA, 24 bp, Artificial Sequence
  synthetic circulating small noncoding RNA (sncRNA) 5' transfer RNA (tRNA) half
ggtctagtggttaggattcggcgc

SEQ ID NO: 8056 - DNA, 18 bp, Artificial Sequence
  synthetic circulating small noncoding RNA (sncRNA) 5' transfer RNA (tRNA) half
ggggttcgaacccacgac

SEQ ID NO: 8057 - DNA, 15 bp, Artificial Sequence
  synthetic circulating small noncoding RNA (sncRNA) 5' transfer RNA (tRNA) half
tccctgaccgggaat

SEQ ID NO: 8058 - DNA, 35 bp, Artificial Sequence
  synthetic circulating small noncoding RNA (sncRNA) 5' transfer RNA (tRNA) half
cgccgcggcccgggttcgattcccggtcagggaag

SEQ ID NO: 8059 - DNA, 24 bp, Artificial Sequence
  synthetic circulating small noncoding RNA (sncRNA) 5' transfer RNA (tRNA) half
aggaatcctaaccgctagaccatg

SEQ ID NO: 8060 - DNA, 22 bp, Artificial Sequence
  synthetic circulating small noncoding RNA (sncRNA) 5' transfer RNA (tRNA) half
accgggcggaaacagcaacttt

SEQ ID NO: 8061 - DNA, 16 bp, Artificial Sequence
  synthetic circulating small noncoding RNA (sncRNA) 5' transfer RNA (tRNA) half
acaccgggagtcgaac

SEQ ID NO: 8062 - DNA, 14 bp, Artificial Sequence
  synthetic circulating small noncoding RNA (sncRNA) 5' transfer RNA (tRNA) half
aggtccctggttcg

SEQ ID NO: 8063 - DNA, 22 bp, Artificial Sequence
  synthetic circulating small noncoding RNA (sncRNA) 5' transfer RNA (tRNA) half
gttcgattccggctcgaaggac

SEQ ID NO: 8064 - DNA, 16 bp, Artificial Sequence
  synthetic circulating small noncoding RNA (sncRNA) 5' transfer RNA (tRNA) half
agaatcatacccctag

SEQ ID NO: 8065 - DNA, 17 bp, Artificial Sequence
  synthetic circulating small noncoding RNA (sncRNA) 5' transfer RNA (tRNA) half
tcggatcgctggattca

SEQ ID NO: 8066 - DNA, 24 bp, Artificial Sequence
  synthetic circulating small noncoding RNA (sncRNA) 5' transfer RNA (tRNA) half
ggcgaatgtgataaccactacact

SEQ ID NO: 8067 - DNA, 18 bp, Artificial Sequence
  synthetic circulating small noncoding RNA (sncRNA) 5' transfer RNA (tRNA) half
attcccgggcggcgcatg

SEQ ID NO: 8068 - DNA, 12 bp, Artificial Sequence
  synthetic circulating small noncoding RNA (sncRNA) 5' transfer RNA (tRNA) half
gttcccacaccg

SEQ ID NO: 8069 - DNA, 10 bp, Artificial Sequence
  synthetic circulating small noncoding RNA (sncRNA) 5' transfer RNA (tRNA) half
gcgttggccg

SEQ ID NO: 8070 - DNA, 31 bp, Artificial Sequence
  synthetic circulating small noncoding RNA (sncRNA) 5' transfer RNA (tRNA) half
ccccggctagctcagtcagtagagcttgaga

SEQ ID NO: 8071 - DNA, 12 bp, Artificial Sequence
  synthetic circulating small noncoding RNA (sncRNA) 5' transfer RNA (tRNA) half
gcattggccggg

SEQ ID NO: 8072 - DNA, 23 bp, Artificial Sequence
  synthetic circulating small noncoding RNA (sncRNA) 5' transfer RNA (tRNA) half
gaactcggatcgctggattcaaa

SEQ ID NO: 8073 - DNA, 13 bp, Artificial Sequence
  synthetic circulating small noncoding RNA (sncRNA) 5' transfer RNA (tRNA) half
ggtctcccgcgtg

SEQ ID NO: 8074 - DNA, 13 bp, Artificial Sequence
  synthetic circulating small noncoding RNA (sncRNA) 5' transfer RNA (tRNA) half
gtggttagtactc

SEQ ID NO: 8075 - DNA, 21 bp, Artificial Sequence
  synthetic circulating small noncoding RNA (sncRNA) 5' transfer RNA (tRNA) half
ttccgtagtgtagtggttatc

SEQ ID NO: 8076 - DNA, 24 bp, Artificial Sequence
  synthetic circulating small noncoding RNA (sncRNA) 5' transfer RNA (tRNA) half
cataacccagaggtcgatggatcg

SEQ ID NO: 8077 - DNA, 22 bp, Artificial Sequence
  synthetic circulating small noncoding RNA (sncRNA) 5' transfer RNA (tRNA) half
ggttccttcgagccggattcga

SEQ ID NO: 8078 - DNA, 15 bp, Artificial Sequence
  synthetic circulating small noncoding RNA (sncRNA) 5' transfer RNA (tRNA) half
ccgaatcctaaccac

SEQ ID NO: 8079 - DNA, 17 bp, Artificial Sequence
  synthetic circulating small noncoding RNA (sncRNA) 5' transfer RNA (tRNA) half
gaaccccggtctcccgc

SEQ ID NO: 8080 - DNA, 19 bp, Artificial Sequence
  synthetic circulating small noncoding RNA (sncRNA) 5' transfer RNA (tRNA) half
aatggttagcactctggac

SEQ ID NO: 8081 - DNA, 13 bp, Artificial Sequence
  synthetic circulating small noncoding RNA (sncRNA) 5' transfer RNA (tRNA) half
gttatccattgcg

SEQ ID NO: 8082 - DNA, 23 bp, Artificial Sequence
  synthetic circulating small noncoding RNA (sncRNA) 5' transfer RNA (tRNA) half
gcaggcgagaattctaccactga

SEQ ID NO: 8083 - DNA, 16 bp, Artificial Sequence
  synthetic circulating small noncoding RNA (sncRNA) 5' transfer RNA (tRNA) half
tcaccgccgcggcccg

SEQ ID NO: 8084 - DNA, 15 bp, Artificial Sequence
  synthetic circulating small noncoding RNA (sncRNA) 5' transfer RNA (tRNA) half
tctcaccgccgcggc

SEQ ID NO: 8085 - DNA, 32 bp, Artificial Sequence
  synthetic circulating small noncoding RNA (sncRNA) 5' transfer RNA (tRNA) half
gctggggattgtgggttcgagtcccatctggg

SEQ ID NO: 8086 - DNA, 29 bp, Artificial Sequence
  synthetic circulating small noncoding RNA (sncRNA) 5' transfer RNA (tRNA) half
cgaagggactcgaaccctcaatcttctga

SEQ ID NO: 8087 - DNA, 15 bp, Artificial Sequence
  synthetic circulating small noncoding RNA (sncRNA) 5' transfer RNA (tRNA) half
cgagtggtctaaggc

SEQ ID NO: 8088 - DNA, 26 bp, Artificial Sequence
  synthetic circulating small noncoding RNA (sncRNA) 5' transfer RNA (tRNA) half
cgggttcgactcccggtgtgggaaca

SEQ ID NO: 8089 - DNA, 34 bp, Artificial Sequence
  synthetic circulating small noncoding RNA (sncRNA) 5' transfer RNA (tRNA) half
agggcccggatagctcagtcggtagagcatcaga

SEQ ID NO: 8090 - DNA, 20 bp, Artificial Sequence
  synthetic circulating small noncoding RNA (sncRNA) 5' transfer RNA (tRNA) half
agtggtatcatgcaagattc

SEQ ID NO: 8091 - DNA, 11 bp, Artificial Sequence
  synthetic circulating small noncoding RNA (sncRNA) 5' transfer RNA (tRNA) half
gttaacagccg

SEQ ID NO: 8092 - DNA, 30 bp, Artificial Sequence
  synthetic circulating small noncoding RNA (sncRNA) 5' transfer RNA (tRNA) half
aggcgagaattctaccattgaaccaccaat

SEQ ID NO: 8093 - DNA, 34 bp, Artificial Sequence
  synthetic circulating small noncoding RNA (sncRNA) 5' transfer RNA (tRNA) half
agagcgccgaatcctaaccactagaccaccaggg

SEQ ID NO: 8094 - DNA, 22 bp, Artificial Sequence
  synthetic circulating small noncoding RNA (sncRNA) 5' transfer RNA (tRNA) half
gctcagtcggtagagcatgaga

SEQ ID NO: 8095 - DNA, 33 bp, Artificial Sequence
  synthetic circulating small noncoding RNA (sncRNA) 5' transfer RNA (tRNA) half
cagcgatccgagttcaaatctcggtgggacctc

SEQ ID NO: 8096 - DNA, 11 bp, Artificial Sequence
  synthetic circulating small noncoding RNA (sncRNA) 5' transfer RNA (tRNA) half
tgcgttggccg

SEQ ID NO: 8097 - DNA, 16 bp, Artificial Sequence
  synthetic circulating small noncoding RNA (sncRNA) 5' transfer RNA (tRNA) half
tggttcgattccggct

SEQ ID NO: 8098 - DNA, 14 bp, Artificial Sequence
  synthetic circulating small noncoding RNA (sncRNA) 5' transfer RNA (tRNA) half
tcgattcccggccc

SEQ ID NO: 8099 - DNA, 15 bp, Artificial Sequence
  synthetic circulating small noncoding RNA (sncRNA) 5' transfer RNA (tRNA) half
atctcggtgggacct

SEQ ID NO: 8100 - DNA, 19 bp, Artificial Sequence
  synthetic circulating small noncoding RNA (sncRNA) 5' transfer RNA (tRNA) half
agtggtctggggtgcaggc

SEQ ID NO: 8101 - DNA, 9 bp, Artificial Sequence
  synthetic circulating small noncoding RNA (sncRNA) 5' transfer RNA (tRNA) half
ggctcgaac

SEQ ID NO: 8102 - DNA, 20 bp, Artificial Sequence
  synthetic circulating small noncoding RNA (sncRNA) 5' transfer RNA (tRNA) half
aaccactcggccaccgtgac

SEQ ID NO: 8103 - DNA, 28 bp, Artificial Sequence
  synthetic circulating small noncoding RNA (sncRNA) 5' transfer RNA (tRNA) half
gccagccaggagtcgaacctggaatctt

SEQ ID NO: 8104 - DNA, 31 bp, Artificial Sequence
  synthetic circulating small noncoding RNA (sncRNA) 5' transfer RNA (tRNA) half
tttccctgaccgggaatcgaacccgggccgc

SEQ ID NO: 8105 - DNA, 24 bp, Artificial Sequence
  synthetic circulating small noncoding RNA (sncRNA) 5' transfer RNA (tRNA) half
gtgtagcggttatcacgtctgctt

SEQ ID NO: 8106 - DNA, 22 bp, Artificial Sequence
  synthetic circulating small noncoding RNA (sncRNA) 5' transfer RNA (tRNA) half
cccagggacgaccacagcgact

SEQ ID NO: 8107 - DNA, 17 bp, Artificial Sequence
  synthetic circulating small noncoding RNA (sncRNA) 5' transfer RNA (tRNA) half
gggctcgtccgggattt

SEQ ID NO: 8108 - DNA, 14 bp, Artificial Sequence
  synthetic circulating small noncoding RNA (sncRNA) 5' transfer RNA (tRNA) half
gatccatcgacctc

SEQ ID NO: 8109 - DNA, 13 bp, Artificial Sequence
  synthetic circulating small noncoding RNA (sncRNA) 5' transfer RNA (tRNA) half
gaatcatacccct

SEQ ID NO: 8110 - DNA, 37 bp, Artificial Sequence
  synthetic circulating small noncoding RNA (sncRNA) 5' transfer RNA (tRNA) half
atctgagggtccagggttcaagtccctgttcgggcgc

SEQ ID NO: 8111 - DNA, 33 bp, Artificial Sequence
  synthetic circulating small noncoding RNA (sncRNA) 5' transfer RNA (tRNA) half
gagtcccatgctctaccgactgagctagccggg

SEQ ID NO: 8112 - DNA, 21 bp, Artificial Sequence
  synthetic circulating small noncoding RNA (sncRNA) 5' transfer RNA (tRNA) half
ccgggtcaactgcttggaagg

SEQ ID NO: 8113 - DNA, 13 bp, Artificial Sequence
  synthetic circulating small noncoding RNA (sncRNA) 5' transfer RNA (tRNA) half
gttccaccgagat

SEQ ID NO: 8114 - DNA, 14 bp, Artificial Sequence
  synthetic circulating small noncoding RNA (sncRNA) 5' transfer RNA (tRNA) half
ttcgactccggctc

SEQ ID NO: 8115 - DNA, 26 bp, Artificial Sequence
  synthetic circulating small noncoding RNA (sncRNA) 5' transfer RNA (tRNA) half
ggattcagagtccagagtgctaacca

SEQ ID NO: 8116 - DNA, 36 bp, Artificial Sequence
  synthetic circulating small noncoding RNA (sncRNA) 5' transfer RNA (tRNA) half
aacaggagatcctgggttcaaatcccagcggggcct

SEQ ID NO: 8117 - DNA, 19 bp, Artificial Sequence
  synthetic circulating small noncoding RNA (sncRNA) 5' transfer RNA (tRNA) half
gccttagaccgctcggcca

SEQ ID NO: 8118 - DNA, 14 bp, Artificial Sequence
  synthetic circulating small noncoding RNA (sncRNA) 5' transfer RNA (tRNA) half
cttccctgaccggg

SEQ ID NO: 8119 - DNA, 19 bp, Artificial Sequence
  synthetic circulating small noncoding RNA (sncRNA) 5' transfer RNA (tRNA) half
ctggtgtagtggtatcatg

SEQ ID NO: 8120 - DNA, 16 bp, Artificial Sequence
  synthetic circulating small noncoding RNA (sncRNA) 5' transfer RNA (tRNA) half
actcggccaccgtgac

SEQ ID NO: 8121 - DNA, 26 bp, Artificial Sequence
  synthetic circulating small noncoding RNA (sncRNA) 5' transfer RNA (tRNA) half
cccatgctctaccgactgagctagcc

SEQ ID NO: 8122 - DNA, 16 bp, Artificial Sequence
  synthetic circulating small noncoding RNA (sncRNA) 5' transfer RNA (tRNA) half
ttcccacaccgggagt

SEQ ID NO: 8123 - DNA, 15 bp, Artificial Sequence
  synthetic circulating small noncoding RNA (sncRNA) 5' transfer RNA (tRNA) half
gccttatccattagg

SEQ ID NO: 8124 - DNA, 22 bp, Artificial Sequence
  synthetic circulating small noncoding RNA (sncRNA) 5' transfer RNA (tRNA) half
gggggtgtagctcagtggtaga

SEQ ID NO: 8125 - DNA, 39 bp, Artificial Sequence
  synthetic circulating small noncoding RNA (sncRNA) 5' transfer RNA (tRNA) half
acccacgaccctgagattaagagtctcatgctctaccga

SEQ ID NO: 8126 - DNA, 19 bp, Artificial Sequence
  synthetic circulating small noncoding RNA (sncRNA) 5' transfer RNA (tRNA) half
caccgccgcggcccgggtt

SEQ ID NO: 8127 - DNA, 21 bp, Artificial Sequence
  synthetic circulating small noncoding RNA (sncRNA) 5' transfer RNA (tRNA) half
tatggaggcgtgggttcgaat

SEQ ID NO: 8128 - DNA, 17 bp, Artificial Sequence
  synthetic circulating small noncoding RNA (sncRNA) 5' transfer RNA (tRNA) half
agtcggcaggattcgaa

SEQ ID NO: 8129 - DNA, 33 bp, Artificial Sequence
  synthetic circulating small noncoding RNA (sncRNA) 5' transfer RNA (tRNA) half
accaggggtcgcgagttcaaatctcgctggggc

SEQ ID NO: 8130 - DNA, 12 bp, Artificial Sequence
  synthetic circulating small noncoding RNA (sncRNA) 5' transfer RNA (tRNA) half
accagcgaccta

SEQ ID NO: 8131 - DNA, 16 bp, Artificial Sequence
  synthetic circulating small noncoding RNA (sncRNA) 5' transfer RNA (tRNA) half
gtatcatgcaagattc

SEQ ID NO: 8132 - DNA, 12 bp, Artificial Sequence
  synthetic circulating small noncoding RNA (sncRNA) 5' transfer RNA (tRNA) half
cgggactcgaac

SEQ ID NO: 8133 - DNA, 23 bp, Artificial Sequence
  synthetic circulating small noncoding RNA (sncRNA) 5' transfer RNA (tRNA) half
ttcctgccgtgactcggattcga

SEQ ID NO: 8134 - DNA, 26 bp, Artificial Sequence
  synthetic circulating small noncoding RNA (sncRNA) 5' transfer RNA (tRNA) half
tgactgcagatcaagaggtccccggt

SEQ ID NO: 8135 - DNA, 28 bp, Artificial Sequence
  synthetic circulating small noncoding RNA (sncRNA) 5' transfer RNA (tRNA) half
tcgtgggttcgagccccacgttgggcgc

SEQ ID NO: 8136 - DNA, 21 bp, Artificial Sequence
  synthetic circulating small noncoding RNA (sncRNA) 5' transfer RNA (tRNA) half
gactccgccgggactcgaacc

SEQ ID NO: 8137 - DNA, 22 bp, Artificial Sequence
  synthetic circulating small noncoding RNA (sncRNA) 5' transfer RNA (tRNA) half
aggcgaatgtgataaccactac

SEQ ID NO: 8138 - DNA, 17 bp, Artificial Sequence
  synthetic circulating small noncoding RNA (sncRNA) 5' transfer RNA (tRNA) half
tgaccgggaatcgaacc

SEQ ID NO: 8139 - DNA, 34 bp, Artificial Sequence
  synthetic circulating small noncoding RNA (sncRNA) 5' transfer RNA (tRNA) half
gccctctctgaggttcgaactcaggaccttcaga

SEQ ID NO: 8140 - DNA, 41 bp, Artificial Sequence
  synthetic circulating small noncoding RNA (sncRNA) 5' transfer RNA (tRNA) half
gtttccgtagtgtagtggttatcacgttcgcctcacacgcg

SEQ ID NO: 8141 - DNA, 31 bp, Artificial Sequence
  synthetic circulating small noncoding RNA (sncRNA) 5' transfer RNA (tRNA) half
ggattgtgggttcgagtcccatctgggtcgc

SEQ ID NO: 8142 - DNA, 16 bp, Artificial Sequence
  synthetic circulating small noncoding RNA (sncRNA) 5' transfer RNA (tRNA) half
ggttcgatccccggca

SEQ ID NO: 8143 - DNA, 14 bp, Artificial Sequence
  synthetic circulating small noncoding RNA (sncRNA) 5' transfer RNA (tRNA) half
tcaggatggccgag

SEQ ID NO: 8144 - DNA, 24 bp, Artificial Sequence
  synthetic circulating small noncoding RNA (sncRNA) 5' transfer RNA (tRNA) half
atcggggaatcgaaccccggtctc

SEQ ID NO: 8145 - DNA, 16 bp, Artificial Sequence
  synthetic circulating small noncoding RNA (sncRNA) 5' transfer RNA (tRNA) half
cgattcccgggcggcg

SEQ ID NO: 8146 - DNA, 17 bp, Artificial Sequence
  synthetic circulating small noncoding RNA (sncRNA) 5' transfer RNA (tRNA) half
gtgaggtcccaccgaga

SEQ ID NO: 8147 - DNA, 33 bp, Artificial Sequence
  synthetic circulating small noncoding RNA (sncRNA) 5' transfer RNA (tRNA) half
gagatgccggggatcgaacccggggcctcatac

SEQ ID NO: 8148 - DNA, 30 bp, Artificial Sequence
  synthetic circulating small noncoding RNA (sncRNA) 5' transfer RNA (tRNA) half
cctcccgcgtggcaggcgagaattctacca

SEQ ID NO: 8149 - DNA, 35 bp, Artificial Sequence
  synthetic circulating small noncoding RNA (sncRNA) 5' transfer RNA (tRNA) half
gggcctcccgcgtggcaggcgagaattctaccact

SEQ ID NO: 8150 - DNA, 10 bp, Artificial Sequence
  synthetic circulating small noncoding RNA (sncRNA) 5' transfer RNA (tRNA) half
ccggggacct

SEQ ID NO: 8151 - DNA, 34 bp, Artificial Sequence
  synthetic circulating small noncoding RNA (sncRNA) 5' transfer RNA (tRNA) half
aaaaccaggaatcctaaccgctagaccatatggg

SEQ ID NO: 8152 - DNA, 17 bp, Artificial Sequence
  synthetic circulating small noncoding RNA (sncRNA) 5' transfer RNA (tRNA) half
cgaatccgagtcacggc

SEQ ID NO: 8153 - DNA, 11 bp, Artificial Sequence
  synthetic circulating small noncoding RNA (sncRNA) 5' transfer RNA (tRNA) half
tcccgggcggc

SEQ ID NO: 8154 - DNA, 16 bp, Artificial Sequence
  synthetic circulating small noncoding RNA (sncRNA) 5' transfer RNA (tRNA) half
ccaatgcgctatccat

SEQ ID NO: 8155 - DNA, 34 bp, Artificial Sequence
  synthetic circulating small noncoding RNA (sncRNA) 5' transfer RNA (tRNA) half
cggatcgctggattcagagtccagagtgctaacc

SEQ ID NO: 8156 - DNA, 30 bp, Artificial Sequence
  synthetic circulating small noncoding RNA (sncRNA) 5' transfer RNA (tRNA) half
ggctagctcagtcggtagagcatgagactc

SEQ ID NO: 8157 - DNA, 24 bp, Artificial Sequence
  synthetic circulating small noncoding RNA (sncRNA) 5' transfer RNA (tRNA) half
ttcagagtccagagtgctaaccat

SEQ ID NO: 8158 - DNA, 40 bp, Artificial Sequence
  synthetic circulating small noncoding RNA (sncRNA) 5' transfer RNA (tRNA) half
tacctccccgtcggggaatcgaaccccggtctcccgcgtg

SEQ ID NO: 8159 - DNA, 29 bp, Artificial Sequence
  synthetic circulating small noncoding RNA (sncRNA) 5' transfer RNA (tRNA) half
ggggatgtagctcagtggtagagcgcatg

SEQ ID NO: 8160 - DNA, 42 bp, Artificial Sequence
  synthetic circulating small noncoding RNA (sncRNA) 5' transfer RNA (tRNA) half
tcgcgtgttaggcgaatgtgataaccactacactacggaaac

SEQ ID NO: 8161 - DNA, 16 bp, Artificial Sequence
  synthetic circulating small noncoding RNA (sncRNA) 5' transfer RNA (tRNA) half
ttcgatccccggcatc

SEQ ID NO: 8162 - DNA, 13 bp, Artificial Sequence
  synthetic circulating small noncoding RNA (sncRNA) 5' transfer RNA (tRNA) half
tgtcacgcgggag

SEQ ID NO: 8163 - DNA, 35 bp, Artificial Sequence
  synthetic circulating small noncoding RNA (sncRNA) 5' transfer RNA (tRNA) half
ggcggtgagagcgccgaatcctaaccactagacca

SEQ ID NO: 8164 - DNA, 22 bp, Artificial Sequence
  synthetic circulating small noncoding RNA (sncRNA) 5' transfer RNA (tRNA) half
gggctcgtccgggatttgaacc

SEQ ID NO: 8165 - DNA, 14 bp, Artificial Sequence
  synthetic circulating small noncoding RNA (sncRNA) 5' transfer RNA (tRNA) half
gttgcgccacgagg

SEQ ID NO: 8166 - DNA, 12 bp, Artificial Sequence
  synthetic circulating small noncoding RNA (sncRNA) 5' transfer RNA (tRNA) half
gcgtgacaggcg

SEQ ID NO: 8167 - DNA, 23 bp, Artificial Sequence
  synthetic circulating small noncoding RNA (sncRNA) 5' transfer RNA (tRNA) half
tcgtaaaccgaagatcgcgggtt

SEQ ID NO: 8168 - DNA, 22 bp, Artificial Sequence
  synthetic circulating small noncoding RNA (sncRNA) 5' transfer RNA (tRNA) half
tggtctagcggttaggattcct

SEQ ID NO: 8169 - DNA, 30 bp, Artificial Sequence
  synthetic circulating small noncoding RNA (sncRNA) 5' transfer RNA (tRNA) half
tcaaatgctctacccctgagctatgccccc

SEQ ID NO: 8170 - DNA, 16 bp, Artificial Sequence
  synthetic circulating small noncoding RNA (sncRNA) 5' transfer RNA (tRNA) half
aagaggtccccggttc

SEQ ID NO: 8171 - DNA, 33 bp, Artificial Sequence
  synthetic circulating small noncoding RNA (sncRNA) 5' transfer RNA (tRNA) half
acgcagaaggtcctgggttcgagccccagtgga

SEQ ID NO: 8172 - DNA, 26 bp, Artificial Sequence
  synthetic circulating small noncoding RNA (sncRNA) 5' transfer RNA (tRNA) half
cgcccgaacagggacttgaaccctgg

SEQ ID NO: 8173 - DNA, 24 bp, Artificial Sequence
  synthetic circulating small noncoding RNA (sncRNA) 5' transfer RNA (tRNA) half
tagcgcccgaacagggacttgaac

SEQ ID NO: 8174 - DNA, 21 bp, Artificial Sequence
  synthetic circulating small noncoding RNA (sncRNA) 5' transfer RNA (tRNA) half
gctgaccccgacgtgatttga

SEQ ID NO: 8175 - DNA, 32 bp, Artificial Sequence
  synthetic circulating small noncoding RNA (sncRNA) 5' transfer RNA (tRNA) half
agccagccaggagtcgaacctggaatcttctg

SEQ ID NO: 8176 - DNA, 11 bp, Artificial Sequence
  synthetic circulating small noncoding RNA (sncRNA) 5' transfer RNA (tRNA) half
aacccgggccg

SEQ ID NO: 8177 - DNA, 15 bp, Artificial Sequence
  synthetic circulating small noncoding RNA (sncRNA) 5' transfer RNA (tRNA) half
cgcccgaacagggac

SEQ ID NO: 8178 - DNA, 41 bp, Artificial Sequence
  synthetic circulating small noncoding RNA (sncRNA) 5' transfer RNA (tRNA) half
tcgtatagtggttagtactctgcgttgtggccgcagcaacc

SEQ ID NO: 8179 - DNA, 22 bp, Artificial Sequence
  synthetic circulating small noncoding RNA (sncRNA) 5' transfer RNA (tRNA) half
aaggttccaccgagatttgaac

SEQ ID NO: 8180 - DNA, 13 bp, Artificial Sequence
  synthetic circulating small noncoding RNA (sncRNA) 5' transfer RNA (tRNA) half
gctcggccatcct

SEQ ID NO: 8181 - DNA, 19 bp, Artificial Sequence
  synthetic circulating small noncoding RNA (sncRNA) 5' transfer RNA (tRNA) half
gaacccgggacctctcgca

SEQ ID NO: 8182 - DNA, 34 bp, Artificial Sequence
  synthetic circulating small noncoding RNA (sncRNA) 5' transfer RNA (tRNA) half
accgactctggtgggattcgaacccacaaccttt

SEQ ID NO: 8183 - DNA, 24 bp, Artificial Sequence
  synthetic circulating small noncoding RNA (sncRNA) 5' transfer RNA (tRNA) half
gcctccccgtcggggaatcgaacc

SEQ ID NO: 8184 - DNA, 34 bp, Artificial Sequence
  synthetic circulating small noncoding RNA (sncRNA) 5' transfer RNA (tRNA) half
acgccaaggtcgcgggttcgatccccgtacgggc

SEQ ID NO: 8185 - DNA, 21 bp, Artificial Sequence
  synthetic circulating small noncoding RNA (sncRNA) 5' transfer RNA (tRNA) half
aacccgcgaccttggcgttat

SEQ ID NO: 8186 - DNA, 32 bp, Artificial Sequence
  synthetic circulating small noncoding RNA (sncRNA) 5' transfer RNA (tRNA) half
tggcccgtacggggatcgaacccgcgaccttg

SEQ ID NO: 8187 - DNA, 28 bp, Artificial Sequence
  synthetic circulating small noncoding RNA (sncRNA) 5' transfer RNA (tRNA) half
agatcctgggttcgaatcccagcggggc

SEQ ID NO: 8188 - DNA, 30 bp, Artificial Sequence
  synthetic circulating small noncoding RNA (sncRNA) 5' transfer RNA (tRNA) half
gtgagaatcatacccctagaccaacgagcc

SEQ ID NO: 8189 - DNA, 33 bp, Artificial Sequence
  synthetic circulating small noncoding RNA (sncRNA) 5' transfer RNA (tRNA) half
ggaggcccgggttcgattcccggccaatgcacg

SEQ ID NO: 8190 - DNA, 32 bp, Artificial Sequence
  synthetic circulating small noncoding RNA (sncRNA) 5' transfer RNA (tRNA) half
gcggcccgggttcgattcccggtcagggaagc

SEQ ID NO: 8191 - DNA, 25 bp, Artificial Sequence
  synthetic circulating small noncoding RNA (sncRNA) 5' transfer RNA (tRNA) half
aaaccaggaatcctaaccgctagac

SEQ ID NO: 8192 - DNA, 27 bp, Artificial Sequence
  synthetic circulating small noncoding RNA (sncRNA) 5' transfer RNA (tRNA) half
tcgcgggttcgatccccgtacgggcca

SEQ ID NO: 8193 - DNA, 25 bp, Artificial Sequence
  synthetic circulating small noncoding RNA (sncRNA) 5' transfer RNA (tRNA) half
cgcccgaacagggacttgaaccctg

SEQ ID NO: 8194 - DNA, 8 bp, Artificial Sequence
  synthetic circulating small noncoding RNA (sncRNA) 5' transfer RNA (tRNA) half
attctcgc

SEQ ID NO: 8195 - DNA, 24 bp, Artificial Sequence
  synthetic circulating small noncoding RNA (sncRNA) 5' transfer RNA (tRNA) half
agcgaccacgaagggactcgaacc

SEQ ID NO: 8196 - DNA, 11 bp, Artificial Sequence
  synthetic circulating small noncoding RNA (sncRNA) 5' transfer RNA (tRNA) half
tgtttccgccc

SEQ ID NO: 8197 - DNA, 36 bp, Artificial Sequence
  synthetic circulating small noncoding RNA (sncRNA) 5' transfer RNA (tRNA) half
aaccccggtctcccgcgtgacaggcggggatactca

SEQ ID NO: 8198 - DNA, 10 bp, Artificial Sequence
  synthetic circulating small noncoding RNA (sncRNA) 5' transfer RNA (tRNA) half
cgggcggaaa

SEQ ID NO: 8199 - DNA, 25 bp, Artificial Sequence
  synthetic circulating small noncoding RNA (sncRNA) 5' transfer RNA (tRNA) half
acccacgcgtgcaaagcacaatgga

SEQ ID NO: 8200 - DNA, 13 bp, Artificial Sequence
  synthetic circulating small noncoding RNA (sncRNA) 5' transfer RNA (tRNA) half
ttcgattccggct

SEQ ID NO: 8201 - DNA, 18 bp, Artificial Sequence
  synthetic circulating small noncoding RNA (sncRNA) 5' transfer RNA (tRNA) half
ggtcccaccgagatttga

SEQ ID NO: 8202 - DNA, 37 bp, Artificial Sequence
  synthetic circulating small noncoding RNA (sncRNA) 5' transfer RNA (tRNA) half
tcgagccagccaggagtcgaacctagaatcttctgat

SEQ ID NO: 8203 - DNA, 29 bp, Artificial Sequence
  synthetic circulating small noncoding RNA (sncRNA) 5' transfer RNA (tRNA) half
tggtagaattctcgcctgccacgcgggag

SEQ ID NO: 8204 - DNA, 21 bp, Artificial Sequence
  synthetic circulating small noncoding RNA (sncRNA) 5' transfer RNA (tRNA) half
gattaagagtctcatgctcta

SEQ ID NO: 8205 - DNA, 25 bp, Artificial Sequence
  synthetic circulating small noncoding RNA (sncRNA) 5' transfer RNA (tRNA) half
gcgcccgaacagggacttgaaccct

SEQ ID NO: 8206 - DNA, 18 bp, Artificial Sequence
  synthetic circulating small noncoding RNA (sncRNA) 5' transfer RNA (tRNA) half
gcccggatagctcagtcg

SEQ ID NO: 8207 - DNA, 16 bp, Artificial Sequence
  synthetic circulating small noncoding RNA (sncRNA) 5' transfer RNA (tRNA) half
attctcgcctgccacg

SEQ ID NO: 8208 - DNA, 30 bp, Artificial Sequence
  synthetic circulating small noncoding RNA (sncRNA) 5' transfer RNA (tRNA) half
cccgtcggggaattgaaccccggtctcccg

SEQ ID NO: 8209 - DNA, 12 bp, Artificial Sequence
  synthetic circulating small noncoding RNA (sncRNA) 5' transfer RNA (tRNA) half
gcgggaggcccg

SEQ ID NO: 8210 - DNA, 22 bp, Artificial Sequence
  synthetic circulating small noncoding RNA (sncRNA) 5' transfer RNA (tRNA) half
gcccggtttcgaaccggggacc

SEQ ID NO: 8211 - DNA, 17 bp, Artificial Sequence
  synthetic circulating small noncoding RNA (sncRNA) 5' transfer RNA (tRNA) half
cgcgggaggcccgggtt

SEQ ID NO: 8212 - DNA, 18 bp, Artificial Sequence
  synthetic circulating small noncoding RNA (sncRNA) 5' transfer RNA (tRNA) half
gaacgtgataaccactac

SEQ ID NO: 8213 - DNA, 38 bp, Artificial Sequence
  synthetic circulating small noncoding RNA (sncRNA) 5' transfer RNA (tRNA) half
gcgaaaggtccccggttcgaaaccgggcggaaacagca

SEQ ID NO: 8214 - DNA, 32 bp, Artificial Sequence
  synthetic circulating small noncoding RNA (sncRNA) 5' transfer RNA (tRNA) half
gatgatcctcagtggtctggggtgcaggcttc

SEQ ID NO: 8215 - DNA, 23 bp, Artificial Sequence
  synthetic circulating small noncoding RNA (sncRNA) 5' transfer RNA (tRNA) half
aaccaggaatcctaaccgctaga

SEQ ID NO: 8216 - DNA, 16 bp, Artificial Sequence
  synthetic circulating small noncoding RNA (sncRNA) 5' transfer RNA (tRNA) half
aagtctgatgctctac

SEQ ID NO: 8217 - DNA, 17 bp, Artificial Sequence
  synthetic circulating small noncoding RNA (sncRNA) 5' transfer RNA (tRNA) half
gtggtatgattctcagt

SEQ ID NO: 8218 - DNA, 8 bp, Artificial Sequence
  synthetic circulating small noncoding RNA (sncRNA) 5' transfer RNA (tRNA) half
cgggttcg

SEQ ID NO: 8219 - DNA, 19 bp, Artificial Sequence
  synthetic circulating small noncoding RNA (sncRNA) 5' transfer RNA (tRNA) half
caggcgagaattctaccac

SEQ ID NO: 8220 - DNA, 23 bp, Artificial Sequence
  synthetic circulating small noncoding RNA (sncRNA) 5' transfer RNA (tRNA) half
agaccggggttcgattccccgac

SEQ ID NO: 8221 - DNA, 24 bp, Artificial Sequence
  synthetic circulating small noncoding RNA (sncRNA) 5' transfer RNA (tRNA) half
ggaatcctaaccgctagaccatat

SEQ ID NO: 8222 - DNA, 22 bp, Artificial Sequence
  synthetic circulating small noncoding RNA (sncRNA) 5' transfer RNA (tRNA) half
atcgctggattcagagtccaga

SEQ ID NO: 8223 - DNA, 15 bp, Artificial Sequence
  synthetic circulating small noncoding RNA (sncRNA) 5' transfer RNA (tRNA) half
ggttcgactccggct

SEQ ID NO: 8224 - DNA, 32 bp, Artificial Sequence
  synthetic circulating small noncoding RNA (sncRNA) 5' transfer RNA (tRNA) half
aggagatcctgggttcaaatcccagcggggcc

SEQ ID NO: 8225 - DNA, 19 bp, Artificial Sequence
  synthetic circulating small noncoding RNA (sncRNA) 5' transfer RNA (tRNA) half
agagtccagagtgctaacc

SEQ ID NO: 8226 - DNA, 21 bp, Artificial Sequence
  synthetic circulating small noncoding RNA (sncRNA) 5' transfer RNA (tRNA) half
cgctgcgttggccgggaatcg

SEQ ID NO: 8227 - DNA, 21 bp, Artificial Sequence
  synthetic circulating small noncoding RNA (sncRNA) 5' transfer RNA (tRNA) half
cctgccgtgactcggattcga

SEQ ID NO: 8228 - DNA, 12 bp, Artificial Sequence
  synthetic circulating small noncoding RNA (sncRNA) 5' transfer RNA (tRNA) half
acgtcggggtca

SEQ ID NO: 8229 - DNA, 12 bp, Artificial Sequence
  synthetic circulating small noncoding RNA (sncRNA) 5' transfer RNA (tRNA) half
cgggcctcccgc

SEQ ID NO: 8230 - DNA, 11 bp, Artificial Sequence
  synthetic circulating small noncoding RNA (sncRNA) 5' transfer RNA (tRNA) half
gggggcacccg

SEQ ID NO: 8231 - DNA, 34 bp, Artificial Sequence
  synthetic circulating small noncoding RNA (sncRNA) 5' transfer RNA (tRNA) half
tccgactccgccgggactcgaacccggaaccttt

SEQ ID NO: 8232 - DNA, 20 bp, Artificial Sequence
  synthetic circulating small noncoding RNA (sncRNA) 5' transfer RNA (tRNA) half
tcgattcccggccaacgcat

SEQ ID NO: 8233 - DNA, 43 bp, Artificial Sequence
  synthetic circulating small noncoding RNA (sncRNA) 5' transfer RNA (tRNA) half
tgtaatggttagcactctggactctgaatccagcgatccgagt

SEQ ID NO: 8234 - DNA, 9 bp, Artificial Sequence
  synthetic circulating small noncoding RNA (sncRNA) 5' transfer RNA (tRNA) half
ggcccgtac

SEQ ID NO: 8235 - DNA, 17 bp, Artificial Sequence
  synthetic circulating small noncoding RNA (sncRNA) 5' transfer RNA (tRNA) half
acaggcggggatactaa

SEQ ID NO: 8236 - DNA, 14 bp, Artificial Sequence
  synthetic circulating small noncoding RNA (sncRNA) 5' transfer RNA (tRNA) half
gaactcgcgacccc

SEQ ID NO: 8237 - DNA, 23 bp, Artificial Sequence
  synthetic circulating small noncoding RNA (sncRNA) 5' transfer RNA (tRNA) half
ggcccgtacggggatcgaacccg

SEQ ID NO: 8238 - DNA, 20 bp, Artificial Sequence
  synthetic circulating small noncoding RNA (sncRNA) 5' transfer RNA (tRNA) half
agtaaccacgaagggattcg

SEQ ID NO: 8239 - DNA, 14 bp, Artificial Sequence
  synthetic circulating small noncoding RNA (sncRNA) 5' transfer RNA (tRNA) half
cgaacccgcaacct

SEQ ID NO: 8240 - DNA, 32 bp, Artificial Sequence
  synthetic circulating small noncoding RNA (sncRNA) 5' transfer RNA (tRNA) half
cgggaggcccgggttcggttcccggccaatgc

SEQ ID NO: 8241 - DNA, 22 bp, Artificial Sequence
  synthetic circulating small noncoding RNA (sncRNA) 5' transfer RNA (tRNA) half
accgggcggaaacattactttt

SEQ ID NO: 8242 - DNA, 33 bp, Artificial Sequence
  synthetic circulating small noncoding RNA (sncRNA) 5' transfer RNA (tRNA) half
aggcaccgctgggattcgaacccaggatctcct

SEQ ID NO: 8243 - DNA, 14 bp, Artificial Sequence
  synthetic circulating small noncoding RNA (sncRNA) 5' transfer RNA (tRNA) half
gggagtcgaacccg

SEQ ID NO: 8244 - DNA, 22 bp, Artificial Sequence
  synthetic circulating small noncoding RNA (sncRNA) 5' transfer RNA (tRNA) half
tagcgcccgaacagggacttga

SEQ ID NO: 8245 - DNA, 22 bp, Artificial Sequence
  synthetic circulating small noncoding RNA (sncRNA) 5' transfer RNA (tRNA) half
tagcgtggccgagcggtctaag

SEQ ID NO: 8246 - DNA, 36 bp, Artificial Sequence
  synthetic circulating small noncoding RNA (sncRNA) 5' transfer RNA (tRNA) half
agctggggattgtgggttcgagtcccatctgggtcg

SEQ ID NO: 8247 - DNA, 17 bp, Artificial Sequence
  synthetic circulating small noncoding RNA (sncRNA) 5' transfer RNA (tRNA) half
actccgccgggactcga

SEQ ID NO: 8248 - DNA, 38 bp, Artificial Sequence
  synthetic circulating small noncoding RNA (sncRNA) 5' transfer RNA (tRNA) half
gtcgactctggcgggactcgaacccgcaacctttgaat

SEQ ID NO: 8249 - DNA, 18 bp, Artificial Sequence
  synthetic circulating small noncoding RNA (sncRNA) 5' transfer RNA (tRNA) half
ggttaggattcctggttt

SEQ ID NO: 8250 - DNA, 35 bp, Artificial Sequence
  synthetic circulating small noncoding RNA (sncRNA) 5' transfer RNA (tRNA) half
gtcagacgcgctaccgttgcgccacgaggccggcc

SEQ ID NO: 8251 - DNA, 35 bp, Artificial Sequence
  synthetic circulating small noncoding RNA (sncRNA) 5' transfer RNA (tRNA) half
gcagcaacctcggttcgaatccgagtcacggcatt

SEQ ID NO: 8252 - DNA, 25 bp, Artificial Sequence
  synthetic circulating small noncoding RNA (sncRNA) 5' transfer RNA (tRNA) half
tgaacccgggacctctcgcacccaa

SEQ ID NO: 8253 - DNA, 11 bp, Artificial Sequence
  synthetic circulating small noncoding RNA (sncRNA) 5' transfer RNA (tRNA) half
cggatcgctgg

SEQ ID NO: 8254 - DNA, 32 bp, Artificial Sequence
  synthetic circulating small noncoding RNA (sncRNA) 5' transfer RNA (tRNA) half
ccgaaacccgggatcgaaccagggacctttag

SEQ ID NO: 8255 - DNA, 19 bp, Artificial Sequence
  synthetic circulating small noncoding RNA (sncRNA) 5' transfer RNA (tRNA) half
gggagtcgaacccgggccg

SEQ ID NO: 8256 - DNA, 23 bp, Artificial Sequence
  synthetic circulating small noncoding RNA (sncRNA) 5' transfer RNA (tRNA) half
ccgggtcaactgcttggaaggca

SEQ ID NO: 8257 - DNA, 13 bp, Artificial Sequence
  synthetic circulating small noncoding RNA (sncRNA) 5' transfer RNA (tRNA) half
cggattcgaaccg

SEQ ID NO: 8258 - DNA, 18 bp, Artificial Sequence
  synthetic circulating small noncoding RNA (sncRNA) 5' transfer RNA (tRNA) half
tcgattcccgggcggcgc

SEQ ID NO: 8259 - DNA, 26 bp, Artificial Sequence
  synthetic circulating small noncoding RNA (sncRNA) 5' transfer RNA (tRNA) half
gcgaacgtgataaccactacactacg

SEQ ID NO: 8260 - DNA, 33 bp, Artificial Sequence
  synthetic circulating small noncoding RNA (sncRNA) 5' transfer RNA (tRNA) half
aagattgcaggttcgagtcctgccgcggtcgac

SEQ ID NO: 8261 - DNA, 19 bp, Artificial Sequence
  synthetic circulating small noncoding RNA (sncRNA) 5' transfer RNA (tRNA) half
acaggcggggatactaacc

SEQ ID NO: 8262 - DNA, 31 bp, Artificial Sequence
  synthetic circulating small noncoding RNA (sncRNA) 5' transfer RNA (tRNA) half
ttcgacgaggatgggattcgaacccatgcgt

SEQ ID NO: 8263 - DNA, 17 bp, Artificial Sequence
  synthetic circulating small noncoding RNA (sncRNA) 5' transfer RNA (tRNA) half
gttatcacatctgcttt

SEQ ID NO: 8264 - DNA, 22 bp, Artificial Sequence
  synthetic circulating small noncoding RNA (sncRNA) 5' transfer RNA (tRNA) half
agttagcagaggatggtttcga

SEQ ID NO: 8265 - DNA, 10 bp, Artificial Sequence
  synthetic circulating small noncoding RNA (sncRNA) 5' transfer RNA (tRNA) half
gcccgaacag

SEQ ID NO: 8266 - DNA, 16 bp, Artificial Sequence
  synthetic circulating small noncoding RNA (sncRNA) 5' transfer RNA (tRNA) half
tggtatcatgcaagat

SEQ ID NO: 8267 - DNA, 10 bp, Artificial Sequence
  synthetic circulating small noncoding RNA (sncRNA) 5' transfer RNA (tRNA) half
gccgaaaccc

SEQ ID NO: 8268 - DNA, 26 bp, Artificial Sequence
  synthetic circulating small noncoding RNA (sncRNA) 5' transfer RNA (tRNA) half
gggttatgggcccagcacgcttccgc

SEQ ID NO: 8269 - DNA, 35 bp, Artificial Sequence
  synthetic circulating small noncoding RNA (sncRNA) 5' transfer RNA (tRNA) half
gactctggcgggactcgaacccgcaacctttgaat

SEQ ID NO: 8270 - DNA, 39 bp, Artificial Sequence
  synthetic circulating small noncoding RNA (sncRNA) 5' transfer RNA (tRNA) half
tacctccccgtcggggaatcgaaccccggtctcccgcgt

SEQ ID NO: 8271 - DNA, 33 bp, Artificial Sequence
  synthetic circulating small noncoding RNA (sncRNA) 5' transfer RNA (tRNA) half
gcgagaattctaccactgaaccaccaatgcaag

SEQ ID NO: 8272 - DNA, 25 bp, Artificial Sequence
  synthetic circulating small noncoding RNA (sncRNA) 5' transfer RNA (tRNA) half
gaattctaccactgaaccaccaatg

SEQ ID NO: 8273 - DNA, 29 bp, Artificial Sequence
  synthetic circulating small noncoding RNA (sncRNA) 5' transfer RNA (tRNA) half
ccaggcggcccgggttcgactcccggtgt

SEQ ID NO: 8274 - DNA, 37 bp, Artificial Sequence
  synthetic circulating small noncoding RNA (sncRNA) 5' transfer RNA (tRNA) half
gctcgtccgggatttgaacccgggacctctcgcaccc

SEQ ID NO: 8275 - DNA, 14 bp, Artificial Sequence
  synthetic circulating small noncoding RNA (sncRNA) 5' transfer RNA (tRNA) half
gactgagctatccg

SEQ ID NO: 8276 - DNA, 15 bp, Artificial Sequence
  synthetic circulating small noncoding RNA (sncRNA) 5' transfer RNA (tRNA) half
tcgattccccgacgg

SEQ ID NO: 8277 - DNA, 33 bp, Artificial Sequence
  synthetic circulating small noncoding RNA (sncRNA) 5' transfer RNA (tRNA) half
tgccgaaacccgggatcgaaccagggaccttta

SEQ ID NO: 8278 - DNA, 31 bp, Artificial Sequence
  synthetic circulating small noncoding RNA (sncRNA) 5' transfer RNA (tRNA) half
gtccagagtgctaaccattacaccatggaac

SEQ ID NO: 8279 - DNA, 13 bp, Artificial Sequence
  synthetic circulating small noncoding RNA (sncRNA) 5' transfer RNA (tRNA) half
gaacccacgaccc

SEQ ID NO: 8280 - DNA, 33 bp, Artificial Sequence
  synthetic circulating small noncoding RNA (sncRNA) 5' transfer RNA (tRNA) half
cctccctggtggtctagtggttaggattcggcg

SEQ ID NO: 8281 - DNA, 21 bp, Artificial Sequence
  synthetic circulating small noncoding RNA (sncRNA) 5' transfer RNA (tRNA) half
gtctaggggtatgattctcgc

SEQ ID NO: 8282 - DNA, 14 bp, Artificial Sequence
  synthetic circulating small noncoding RNA (sncRNA) 5' transfer RNA (tRNA) half
atcccaccgctgcc

SEQ ID NO: 8283 - DNA, 12 bp, Artificial Sequence
  synthetic circulating small noncoding RNA (sncRNA) 5' transfer RNA (tRNA) half
atcgaaccccgg

SEQ ID NO: 8284 - DNA, 29 bp, Artificial Sequence
  synthetic circulating small noncoding RNA (sncRNA) 5' transfer RNA (tRNA) half
tcgctggttcgattccggctcgaaggact

SEQ ID NO: 8285 - DNA, 38 bp, Artificial Sequence
  synthetic circulating small noncoding RNA (sncRNA) 5' transfer RNA (tRNA) half
gtaaacaggagatcctgggttcgaatcccagtggggcc

SEQ ID NO: 8286 - DNA, 41 bp, Artificial Sequence
  synthetic circulating small noncoding RNA (sncRNA) 5' transfer RNA (tRNA) half
ccacgcgggaggcccgggttcgattcccggccaatgcacga

SEQ ID NO: 8287 - DNA, 13 bp, Artificial Sequence
  synthetic circulating small noncoding RNA (sncRNA) 5' transfer RNA (tRNA) half
gtctcatgctcta

SEQ ID NO: 8288 - DNA, 37 bp, Artificial Sequence
  synthetic circulating small noncoding RNA (sncRNA) 5' transfer RNA (tRNA) half
cgcccgaacagggacttgaaccctggaccctcagatt

SEQ ID NO: 8289 - DNA, 12 bp, Artificial Sequence
  synthetic circulating small noncoding RNA (sncRNA) 5' transfer RNA (tRNA) half
cccggtctcccg

SEQ ID NO: 8290 - DNA, 39 bp, Artificial Sequence
  synthetic circulating small noncoding RNA (sncRNA) 5' transfer RNA (tRNA) half
taatctgaaggtcctgagttcgaacctcagagggggcag

SEQ ID NO: 8291 - DNA, 16 bp, Artificial Sequence
  synthetic circulating small noncoding RNA (sncRNA) 5' transfer RNA (tRNA) half
gataaccgctacacta

SEQ ID NO: 8292 - DNA, 34 bp, Artificial Sequence
  synthetic circulating small noncoding RNA (sncRNA) 5' transfer RNA (tRNA) half
gcgggagaccggggttcgattccccgacggggag

SEQ ID NO: 8293 - DNA, 24 bp, Artificial Sequence
  synthetic circulating small noncoding RNA (sncRNA) 5' transfer RNA (tRNA) half
aggttcagtgaggtcccaccgaga

SEQ ID NO: 8294 - DNA, 20 bp, Artificial Sequence
  synthetic circulating small noncoding RNA (sncRNA) 5' transfer RNA (tRNA) half
tggtggagatgccggggatc

SEQ ID NO: 8295 - DNA, 17 bp, Artificial Sequence
  synthetic circulating small noncoding RNA (sncRNA) 5' transfer RNA (tRNA) half
gccagtgccttatccat

SEQ ID NO: 8296 - DNA, 30 bp, Artificial Sequence
  synthetic circulating small noncoding RNA (sncRNA) 5' transfer RNA (tRNA) half
gcctggatagctcagtcggtagagcatcag

SEQ ID NO: 8297 - DNA, 33 bp, Artificial Sequence
  synthetic circulating small noncoding RNA (sncRNA) 5' transfer RNA (tRNA) half
ccgaaaggttggtggttcgagcccacccaggga

SEQ ID NO: 8298 - DNA, 16 bp, Artificial Sequence
  synthetic circulating small noncoding RNA (sncRNA) 5' transfer RNA (tRNA) half
gagccagccaggagtc

SEQ ID NO: 8299 - DNA, 38 bp, Artificial Sequence
  synthetic circulating small noncoding RNA (sncRNA) 5' transfer RNA (tRNA) half
tgccccctctgaggttcgaactcaggaccttcagatta

SEQ ID NO: 8300 - DNA, 19 bp, Artificial Sequence
  synthetic circulating small noncoding RNA (sncRNA) 5' transfer RNA (tRNA) half
tttgggtgcgagaggtccc

SEQ ID NO: 8301 - DNA, 21 bp, Artificial Sequence
  synthetic circulating small noncoding RNA (sncRNA) 5' transfer RNA (tRNA) half
gttcaagtccctgttcgggcg

SEQ ID NO: 8302 - DNA, 35 bp, Artificial Sequence
  synthetic circulating small noncoding RNA (sncRNA) 5' transfer RNA (tRNA) half
atcagaagattgagggttcgagtcccttcgtggtc

SEQ ID NO: 8303 - DNA, 31 bp, Artificial Sequence
  synthetic circulating small noncoding RNA (sncRNA) 5' transfer RNA (tRNA) half
gtagtcgtggccgagtggttaaggcgatgga

SEQ ID NO: 8304 - DNA, 26 bp, Artificial Sequence
  synthetic circulating small noncoding RNA (sncRNA) 5' transfer RNA (tRNA) half
ctcatgctctaccgactgagctagcc

SEQ ID NO: 8305 - DNA, 28 bp, Artificial Sequence
  synthetic circulating small noncoding RNA (sncRNA) 5' transfer RNA (tRNA) half
atgtgctctacctctgagctacatcccc

SEQ ID NO: 8306 - DNA, 32 bp, Artificial Sequence
  synthetic circulating small noncoding RNA (sncRNA) 5' transfer RNA (tRNA) half
agagtctcatgctctaccgactgagctagccg

SEQ ID NO: 8307 - DNA, 38 bp, Artificial Sequence
  synthetic circulating small noncoding RNA (sncRNA) 5' transfer RNA (tRNA) half
tggtggagatgccggggatcgaacccggggcctcatac

SEQ ID NO: 8308 - DNA, 23 bp, Artificial Sequence
  synthetic circulating small noncoding RNA (sncRNA) 5' transfer RNA (tRNA) half
tgatgaccactacactacggaaa

SEQ ID NO: 8309 - DNA, 21 bp, Artificial Sequence
  synthetic circulating small noncoding RNA (sncRNA) 5' transfer RNA (tRNA) half
aggtcccaccgagatttgaac

SEQ ID NO: 8310 - DNA, 23 bp, Artificial Sequence
  synthetic circulating small noncoding RNA (sncRNA) 5' transfer RNA (tRNA) half
gtttccgtagtgtagtggttagc

SEQ ID NO: 8311 - DNA, 21 bp, Artificial Sequence
  synthetic circulating small noncoding RNA (sncRNA) 5' transfer RNA (tRNA) half
agtggttaggattcggcgctc

SEQ ID NO: 8312 - DNA, 16 bp, Artificial Sequence
  synthetic circulating small noncoding RNA (sncRNA) 5' transfer RNA (tRNA) half
ggttcgattccggctc

SEQ ID NO: 8313 - DNA, 39 bp, Artificial Sequence
  synthetic circulating small noncoding RNA (sncRNA) 5' transfer RNA (tRNA) half
atcagaagattgcaggttcgagtcctgccgcggtcgact

SEQ ID NO: 8314 - DNA, 17 bp, Artificial Sequence
  synthetic circulating small noncoding RNA (sncRNA) 5' transfer RNA (tRNA) half
tgcgagaggtcccgggt

SEQ ID NO: 8315 - DNA, 22 bp, Artificial Sequence
  synthetic circulating small noncoding RNA (sncRNA) 5' transfer RNA (tRNA) half
tcagtggtctggggtgcaggct

SEQ ID NO: 8316 - DNA, 26 bp, Artificial Sequence
  synthetic circulating small noncoding RNA (sncRNA) 5' transfer RNA (tRNA) half
ggtcgagccagccaggagtcgaacct

SEQ ID NO: 8317 - DNA, 16 bp, Artificial Sequence
  synthetic circulating small noncoding RNA (sncRNA) 5' transfer RNA (tRNA) half
gcgggagaccggggtt

SEQ ID NO: 8318 - DNA, 18 bp, Artificial Sequence
  synthetic circulating small noncoding RNA (sncRNA) 5' transfer RNA (tRNA) half
accgccgcggcccgggtt

SEQ ID NO: 8319 - DNA, 14 bp, Artificial Sequence
  synthetic circulating small noncoding RNA (sncRNA) 5' transfer RNA (tRNA) half
gcccggatagctca

SEQ ID NO: 8320 - DNA, 17 bp, Artificial Sequence
  synthetic circulating small noncoding RNA (sncRNA) 5' transfer RNA (tRNA) half
aaagcgagaatcatacc

SEQ ID NO: 8321 - DNA, 36 bp, Artificial Sequence
  synthetic circulating small noncoding RNA (sncRNA) 5' transfer RNA (tRNA) half
ctcaaccacgaagggattcgaaccctcaatcttctg

SEQ ID NO: 8322 - DNA, 16 bp, Artificial Sequence
  synthetic circulating small noncoding RNA (sncRNA) 5' transfer RNA (tRNA) half
tctagtggtatgattc

SEQ ID NO: 8323 - DNA, 10 bp, Artificial Sequence
  synthetic circulating small noncoding RNA (sncRNA) 5' transfer RNA (tRNA) half
gcattggccg

SEQ ID NO: 8324 - DNA, 11 bp, Artificial Sequence
  synthetic circulating small noncoding RNA (sncRNA) 5' transfer RNA (tRNA) half
gccgcggcggt

SEQ ID NO: 8325 - DNA, 26 bp, Artificial Sequence
  synthetic circulating small noncoding RNA (sncRNA) 5' transfer RNA (tRNA) half
agcgagaatcatacccctagaccaac

SEQ ID NO: 8326 - DNA, 19 bp, Artificial Sequence
  synthetic circulating small noncoding RNA (sncRNA) 5' transfer RNA (tRNA) half
aaccagggctcgtccggga

SEQ ID NO: 8327 - DNA, 22 bp, Artificial Sequence
  synthetic circulating small noncoding RNA (sncRNA) 5' transfer RNA (tRNA) half
gtgttcaaatcacgtcggggtc

SEQ ID NO: 8328 - DNA, 22 bp, Artificial Sequence
  synthetic circulating small noncoding RNA (sncRNA) 5' transfer RNA (tRNA) half
cgagccagccaggagtcgaacc

SEQ ID NO: 8329 - DNA, 15 bp, Artificial Sequence
  synthetic circulating small noncoding RNA (sncRNA) 5' transfer RNA (tRNA) half
gcgccacagagccac

SEQ ID NO: 8330 - DNA, 27 bp, Artificial Sequence
  synthetic circulating small noncoding RNA (sncRNA) 5' transfer RNA (tRNA) half
atcgtatagtggttagtactctgcgtt

SEQ ID NO: 8331 - DNA, 18 bp, Artificial Sequence
  synthetic circulating small noncoding RNA (sncRNA) 5' transfer RNA (tRNA) half
gaacccggaacctttgaa

SEQ ID NO: 8332 - DNA, 16 bp, Artificial Sequence
  synthetic circulating small noncoding RNA (sncRNA) 5' transfer RNA (tRNA) half
tggccgggaatcgaac

SEQ ID NO: 8333 - DNA, 14 bp, Artificial Sequence
  synthetic circulating small noncoding RNA (sncRNA) 5' transfer RNA (tRNA) half
tcggggaatcgaac

SEQ ID NO: 8334 - DNA, 18 bp, Artificial Sequence
  synthetic circulating small noncoding RNA (sncRNA) 5' transfer RNA (tRNA) half
ggtttcgaaccggggacc

SEQ ID NO: 8335 - DNA, 26 bp, Artificial Sequence
  synthetic circulating small noncoding RNA (sncRNA) 5' transfer RNA (tRNA) half
gagtgctaaccattacaccatggaac

SEQ ID NO: 8336 - DNA, 15 bp, Artificial Sequence
  synthetic circulating small noncoding RNA (sncRNA) 5' transfer RNA (tRNA) half
aggattcgaacctgc

SEQ ID NO: 8337 - DNA, 33 bp, Artificial Sequence
  synthetic circulating small noncoding RNA (sncRNA) 5' transfer RNA (tRNA) half
cgccgtgatcgtataggggttagtactctgcgt

SEQ ID NO: 8338 - DNA, 21 bp, Artificial Sequence
  synthetic circulating small noncoding RNA (sncRNA) 5' transfer RNA (tRNA) half
cttgaccccgacgtgacttga

SEQ ID NO: 8339 - DNA, 10 bp, Artificial Sequence
  synthetic circulating small noncoding RNA (sncRNA) 5' transfer RNA (tRNA) half
gggaggcccg

SEQ ID NO: 8340 - DNA, 35 bp, Artificial Sequence
  synthetic circulating small noncoding RNA (sncRNA) 5' transfer RNA (tRNA) half
agggcccggatagctcagtcggtagagcatcagac

SEQ ID NO: 8341 - DNA, 22 bp, Artificial Sequence
  synthetic circulating small noncoding RNA (sncRNA) 5' transfer RNA (tRNA) half
tctcatgctctaccgactgagc

SEQ ID NO: 8342 - DNA, 24 bp, Artificial Sequence
  synthetic circulating small noncoding RNA (sncRNA) 5' transfer RNA (tRNA) half
ccagagtgctaaccattacaccat

SEQ ID NO: 8343 - DNA, 22 bp, Artificial Sequence
  synthetic circulating small noncoding RNA (sncRNA) 5' transfer RNA (tRNA) half
cagtggtagaattctcgcctgc

SEQ ID NO: 8344 - DNA, 14 bp, Artificial Sequence
  synthetic circulating small noncoding RNA (sncRNA) 5' transfer RNA (tRNA) half
gttcgaatcctgcc

SEQ ID NO: 8345 - DNA, 19 bp, Artificial Sequence
  synthetic circulating small noncoding RNA (sncRNA) 5' transfer RNA (tRNA) half
accactcggccatcctgac

SEQ ID NO: 8346 - DNA, 23 bp, Artificial Sequence
  synthetic circulating small noncoding RNA (sncRNA) 5' transfer RNA (tRNA) half
gaccgggaatcgaacccgggccg

SEQ ID NO: 8347 - DNA, 31 bp, Artificial Sequence
  synthetic circulating small noncoding RNA (sncRNA) 5' transfer RNA (tRNA) half
ggcggtgagagcgccgaatcctaaccactag

SEQ ID NO: 8348 - DNA, 16 bp, Artificial Sequence
  synthetic circulating small noncoding RNA (sncRNA) 5' transfer RNA (tRNA) half
cgaatcctaaccacta

SEQ ID NO: 8349 - DNA, 20 bp, Artificial Sequence
  synthetic circulating small noncoding RNA (sncRNA) 5' transfer RNA (tRNA) half
ttcagagtccagagtgctaa

SEQ ID NO: 8350 - DNA, 26 bp, Artificial Sequence
  synthetic circulating small noncoding RNA (sncRNA) 5' transfer RNA (tRNA) half
gtccctgggtgggctcgaaccaccaa

SEQ ID NO: 8351 - DNA, 38 bp, Artificial Sequence
  synthetic circulating small noncoding RNA (sncRNA) 5' transfer RNA (tRNA) half
cgtcgagccagccaggagtcgaacctagaatcttctga

SEQ ID NO: 8352 - DNA, 19 bp, Artificial Sequence
  synthetic circulating small noncoding RNA (sncRNA) 5' transfer RNA (tRNA) half
ctccccgtcggggaattga

SEQ ID NO: 8353 - DNA, 21 bp, Artificial Sequence
  synthetic circulating small noncoding RNA (sncRNA) 5' transfer RNA (tRNA) half
tccctggtggtctagtggcta

SEQ ID NO: 8354 - DNA, 16 bp, Artificial Sequence
  synthetic circulating small noncoding RNA (sncRNA) 5' transfer RNA (tRNA) half
acgctctaaccaactg

SEQ ID NO: 8355 - DNA, 13 bp, Artificial Sequence
  synthetic circulating small noncoding RNA (sncRNA) 5' transfer RNA (tRNA) half
cccgtccgtgcct

SEQ ID NO: 8356 - DNA, 16 bp, Artificial Sequence
  synthetic circulating small noncoding RNA (sncRNA) 5' transfer RNA (tRNA) half
gcctccgatagcagag

SEQ ID NO: 8357 - DNA, 17 bp, Artificial Sequence
  synthetic circulating small noncoding RNA (sncRNA) 5' transfer RNA (tRNA) half
ctcccggtgtgggaacg

SEQ ID NO: 8358 - DNA, 23 bp, Artificial Sequence
  synthetic circulating small noncoding RNA (sncRNA) 5' transfer RNA (tRNA) half
tcagtcggtagagcatgagactc

SEQ ID NO: 8359 - DNA, 23 bp, Artificial Sequence
  synthetic circulating small noncoding RNA (sncRNA) 5' transfer RNA (tRNA) half
accaacctttcggttaacagccg

SEQ ID NO: 8360 - DNA, 39 bp, Artificial Sequence
  synthetic circulating small noncoding RNA (sncRNA) 5' transfer RNA (tRNA) half
agtctccccgtcggggaatcgaaccccggtctcccgcgt

SEQ ID NO: 8361 - DNA, 33 bp, Artificial Sequence
  synthetic circulating small noncoding RNA (sncRNA) 5' transfer RNA (tRNA) half
gcggcccgggttcgactcccggtgtgggaacgc

SEQ ID NO: 8362 - DNA, 17 bp, Artificial Sequence
  synthetic circulating small noncoding RNA (sncRNA) 5' transfer RNA (tRNA) half
ccacaccgggagtcgaa

SEQ ID NO: 8363 - DNA, 22 bp, Artificial Sequence
  synthetic circulating small noncoding RNA (sncRNA) 5' transfer RNA (tRNA) half
agggttcgaacctgcgcgggga

SEQ ID NO: 8364 - DNA, 26 bp, Artificial Sequence
  synthetic circulating small noncoding RNA (sncRNA) 5' transfer RNA (tRNA) half
gccgggaatcgaacccgggcctcccg

SEQ ID NO: 8365 - DNA, 18 bp, Artificial Sequence
  synthetic circulating small noncoding RNA (sncRNA) 5' transfer RNA (tRNA) half
gtttcgatccatcgacct

SEQ ID NO: 8366 - DNA, 33 bp, Artificial Sequence
  synthetic circulating small noncoding RNA (sncRNA) 5' transfer RNA (tRNA) half
cgccaaggtcgcgggttcgatccccgtacgggc

SEQ ID NO: 8367 - DNA, 31 bp, Artificial Sequence
  synthetic circulating small noncoding RNA (sncRNA) 5' transfer RNA (tRNA) half
ggcggcccgggttcgactcccggtgtgggaa

SEQ ID NO: 8368 - DNA, 23 bp, Artificial Sequence
  synthetic circulating small noncoding RNA (sncRNA) 5' transfer RNA (tRNA) half
gacgtgattcgaacacgcagcct

SEQ ID NO: 8369 - DNA, 20 bp, Artificial Sequence
  synthetic circulating small noncoding RNA (sncRNA) 5' transfer RNA (tRNA) half
tcgatgcccgcatcctccac

SEQ ID NO: 8370 - DNA, 27 bp, Artificial Sequence
  synthetic circulating small noncoding RNA (sncRNA) 5' transfer RNA (tRNA) half
cccggctagctcagtcggtagagcatg

SEQ ID NO: 8371 - DNA, 19 bp, Artificial Sequence
  synthetic circulating small noncoding RNA (sncRNA) 5' transfer RNA (tRNA) half
tcgttccttcgagccggat

SEQ ID NO: 8372 - DNA, 29 bp, Artificial Sequence
  synthetic circulating small noncoding RNA (sncRNA) 5' transfer RNA (tRNA) half
cccgtcggggaattgaaccccggtctccc

SEQ ID NO: 8373 - DNA, 23 bp, Artificial Sequence
  synthetic circulating small noncoding RNA (sncRNA) 5' transfer RNA (tRNA) half
catggtctagcggttaggattcc

SEQ ID NO: 8374 - DNA, 16 bp, Artificial Sequence
  synthetic circulating small noncoding RNA (sncRNA) 5' transfer RNA (tRNA) half
tatgattctcgctttg

SEQ ID NO: 8375 - DNA, 30 bp, Artificial Sequence
  synthetic circulating small noncoding RNA (sncRNA) 5' transfer RNA (tRNA) half
actctggactctgaatccagcgatccgagt

SEQ ID NO: 8376 - DNA, 18 bp, Artificial Sequence
  synthetic circulating small noncoding RNA (sncRNA) 5' transfer RNA (tRNA) half
ccttagaccgctcggcca

SEQ ID NO: 8377 - DNA, 40 bp, Artificial Sequence
  synthetic circulating small noncoding RNA (sncRNA) 5' transfer RNA (tRNA) half
ttgaactcggatcgctggattcagagtccagagtgctaac

SEQ ID NO: 8378 - DNA, 26 bp, Artificial Sequence
  synthetic circulating small noncoding RNA (sncRNA) 5' transfer RNA (tRNA) half
gagccagccaggagtcgaacctagaa

SEQ ID NO: 8379 - DNA, 32 bp, Artificial Sequence
  synthetic circulating small noncoding RNA (sncRNA) 5' transfer RNA (tRNA) half
gacctcgtggcgcaacggtagcgcgtctgact

SEQ ID NO: 8380 - DNA, 24 bp, Artificial Sequence
  synthetic circulating small noncoding RNA (sncRNA) 5' transfer RNA (tRNA) half
gctgaccccgacgtgatttgaaca

SEQ ID NO: 8381 - DNA, 20 bp, Artificial Sequence
  synthetic circulating small noncoding RNA (sncRNA) 5' transfer RNA (tRNA) half
aaccaggaatcctaaccgct

SEQ ID NO: 8382 - DNA, 20 bp, Artificial Sequence
  synthetic circulating small noncoding RNA (sncRNA) 5' transfer RNA (tRNA) half
gtttccgtagtgtagtggtt

SEQ ID NO: 8383 - DNA, 31 bp, Artificial Sequence
  synthetic circulating small noncoding RNA (sncRNA) 5' transfer RNA (tRNA) half
tgttcccacaccgggagtcgaacccgggccg

SEQ ID NO: 8384 - DNA, 32 bp, Artificial Sequence
  synthetic circulating small noncoding RNA (sncRNA) 5' transfer RNA (tRNA) half
acccagtggcctaatggataaggcatcagcct

SEQ ID NO: 8385 - DNA, 31 bp, Artificial Sequence
  synthetic circulating small noncoding RNA (sncRNA) 5' transfer RNA (tRNA) half
cgggaggcccgggttcggttcccggccaatg

SEQ ID NO: 8386 - DNA, 23 bp, Artificial Sequence
  synthetic circulating small noncoding RNA (sncRNA) 5' transfer RNA (tRNA) half
agcgagaatcatacccctagacc

SEQ ID NO: 8387 - DNA, 31 bp, Artificial Sequence
  synthetic circulating small noncoding RNA (sncRNA) 5' transfer RNA (tRNA) half
ggcggcccgggttcgactcccggtatgggaa

SEQ ID NO: 8388 - DNA, 18 bp, Artificial Sequence
  synthetic circulating small noncoding RNA (sncRNA) 5' transfer RNA (tRNA) half
acaggcggggatactaac

SEQ ID NO: 8389 - DNA, 9 bp, Artificial Sequence
  synthetic circulating small noncoding RNA (sncRNA) 5' transfer RNA (tRNA) half
cgggatcga

SEQ ID NO: 8390 - DNA, 15 bp, Artificial Sequence
  synthetic circulating small noncoding RNA (sncRNA) 5' transfer RNA (tRNA) half
cagcgatccgagttc

SEQ ID NO: 8391 - DNA, 34 bp, Artificial Sequence
  synthetic circulating small noncoding RNA (sncRNA) 5' transfer RNA (tRNA) half
ctgaccccgacgtgatttgaacacgcaaccttct

SEQ ID NO: 8392 - DNA, 20 bp, Artificial Sequence
  synthetic circulating small noncoding RNA (sncRNA) 5' transfer RNA (tRNA) half
cgctctcaccgccgcggccc

SEQ ID NO: 8393 - DNA, 36 bp, Artificial Sequence
  synthetic circulating small noncoding RNA (sncRNA) 5' transfer RNA (tRNA) half
cccaccgagatttgaactcggatcgctggattcaga

SEQ ID NO: 8394 - DNA, 24 bp, Artificial Sequence
  synthetic circulating small noncoding RNA (sncRNA) 5' transfer RNA (tRNA) half
attaagagtcccatgctctaccga

SEQ ID NO: 8395 - DNA, 30 bp, Artificial Sequence
  synthetic circulating small noncoding RNA (sncRNA) 5' transfer RNA (tRNA) half
gtcaaatgctctaccactgagctatacccc

SEQ ID NO: 8396 - DNA, 16 bp, Artificial Sequence
  synthetic circulating small noncoding RNA (sncRNA) 5' transfer RNA (tRNA) half
cccgggacctctcgca

SEQ ID NO: 8397 - DNA, 17 bp, Artificial Sequence
  synthetic circulating small noncoding RNA (sncRNA) 5' transfer RNA (tRNA) half
tccctgttcgggcgctt

SEQ ID NO: 8398 - DNA, 24 bp, Artificial Sequence
  synthetic circulating small noncoding RNA (sncRNA) 5' transfer RNA (tRNA) half
ttcagtggtagaattctcgcctgc

SEQ ID NO: 8399 - DNA, 35 bp, Artificial Sequence
  synthetic circulating small noncoding RNA (sncRNA) 5' transfer RNA (tRNA) half
gcctccctggtggtctagtggttaggattcggcgc

SEQ ID NO: 8400 - DNA, 43 bp, Artificial Sequence
  synthetic circulating small noncoding RNA (sncRNA) 5' transfer RNA (tRNA) half
aactcggatcgctggattcagagtccagagtgctaaccattac

SEQ ID NO: 8401 - DNA, 26 bp, Artificial Sequence
  synthetic circulating small noncoding RNA (sncRNA) 5' transfer RNA (tRNA) half
cgaacccgggtcaactgcttggaagg

SEQ ID NO: 8402 - DNA, 19 bp, Artificial Sequence
  synthetic circulating small noncoding RNA (sncRNA) 5' transfer RNA (tRNA) half
ctcggccatcctgacactt

SEQ ID NO: 8403 - DNA, 22 bp, Artificial Sequence
  synthetic circulating small noncoding RNA (sncRNA) 5' transfer RNA (tRNA) half
ctaccgactgagctatccaggc

SEQ ID NO: 8404 - DNA, 24 bp, Artificial Sequence
  synthetic circulating small noncoding RNA (sncRNA) 5' transfer RNA (tRNA) half
tagtgtagcggttatcacgtctgc

SEQ ID NO: 8405 - DNA, 30 bp, Artificial Sequence
  synthetic circulating small noncoding RNA (sncRNA) 5' transfer RNA (tRNA) half
ctccccgtcggggaatcgaaccccggtctc

SEQ ID NO: 8406 - DNA, 35 bp, Artificial Sequence
  synthetic circulating small noncoding RNA (sncRNA) 5' transfer RNA (tRNA) half
cgcgaaaggtccccggttcgaaaccgggcggaaac

SEQ ID NO: 8407 - DNA, 16 bp, Artificial Sequence
  synthetic circulating small noncoding RNA (sncRNA) 5' transfer RNA (tRNA) half
agtactaaccactata

SEQ ID NO: 8408 - DNA, 13 bp, Artificial Sequence
  synthetic circulating small noncoding RNA (sncRNA) 5' transfer RNA (tRNA) half
cgaaccgaggttg

SEQ ID NO: 8409 - DNA, 32 bp, Artificial Sequence
  synthetic circulating small noncoding RNA (sncRNA) 5' transfer RNA (tRNA) half
aactcggatcgctggattcagagtccagagtg

SEQ ID NO: 8410 - DNA, 24 bp, Artificial Sequence
  synthetic circulating small noncoding RNA (sncRNA) 5' transfer RNA (tRNA) half
gccgtgatcgtatagtggttagta

SEQ ID NO: 8411 - DNA, 25 bp, Artificial Sequence
  synthetic circulating small noncoding RNA (sncRNA) 5' transfer RNA (tRNA) half
gggttcgattcccgggcggcgcatg

SEQ ID NO: 8412 - DNA, 20 bp, Artificial Sequence
  synthetic circulating small noncoding RNA (sncRNA) 5' transfer RNA (tRNA) half
cgattccggctcgaaggact

SEQ ID NO: 8413 - DNA, 18 bp, Artificial Sequence
  synthetic circulating small noncoding RNA (sncRNA) 5' transfer RNA (tRNA) half
tcaaatctcggtgggacc

SEQ ID NO: 8414 - DNA, 34 bp, Artificial Sequence
  synthetic circulating small noncoding RNA (sncRNA) 5' transfer RNA (tRNA) half
ccccgggtgggactcgaacccacaatccctggct

SEQ ID NO: 8415 - DNA, 29 bp, Artificial Sequence
  synthetic circulating small noncoding RNA (sncRNA) 5' transfer RNA (tRNA) half
cccggatagctcagtcggtagagcatcag

SEQ ID NO: 8416 - DNA, 37 bp, Artificial Sequence
  synthetic circulating small noncoding RNA (sncRNA) 5' transfer RNA (tRNA) half
catgccgtgactcggattcgaaccgaggttgctgcgg

SEQ ID NO: 8417 - DNA, 23 bp, Artificial Sequence
  synthetic circulating small noncoding RNA (sncRNA) 5' transfer RNA (tRNA) half
cggatagctcagtcggtagagca

SEQ ID NO: 8418 - DNA, 23 bp, Artificial Sequence
  synthetic circulating small noncoding RNA (sncRNA) 5' transfer RNA (tRNA) half
gttcaatggtagaattctcgcct

SEQ ID NO: 8419 - DNA, 20 bp, Artificial Sequence
  synthetic circulating small noncoding RNA (sncRNA) 5' transfer RNA (tRNA) half
gaccgcgtggcctaatggat

SEQ ID NO: 8420 - DNA, 8 bp, Artificial Sequence
  synthetic circulating small noncoding RNA (sncRNA) 5' transfer RNA (tRNA) half
gaacccgg

SEQ ID NO: 8421 - DNA, 5 bp, Artificial Sequence
  synthetic circulating small noncoding RNA (sncRNA) 5' transfer RNA (tRNA) half
gccgc

SEQ ID NO: 8422 - DNA, 10 bp, Artificial Sequence
  synthetic circulating small noncoding RNA (sncRNA) 5' transfer RNA (tRNA) half
attctcgcct

SEQ ID NO: 8423 - DNA, 18 bp, Artificial Sequence
  synthetic circulating small noncoding RNA (sncRNA) 5' transfer RNA (tRNA) half
ggttatcacatctgcttt

SEQ ID NO: 8424 - DNA, 33 bp, Artificial Sequence
  synthetic circulating small noncoding RNA (sncRNA) 5' transfer RNA (tRNA) half
gggcatgggtggttcagtggtagaattctcgcc

SEQ ID NO: 8425 - DNA, 13 bp, Artificial Sequence
  synthetic circulating small noncoding RNA (sncRNA) 5' transfer RNA (tRNA) half
tgtcagaagtggg

SEQ ID NO: 8426 - DNA, 16 bp, Artificial Sequence
  synthetic circulating small noncoding RNA (sncRNA) 5' transfer RNA (tRNA) half
cgagccagccaggagt

SEQ ID NO: 8427 - DNA, 12 bp, Artificial Sequence
  synthetic circulating small noncoding RNA (sncRNA) 5' transfer RNA (tRNA) half
aggttccaccga

SEQ ID NO: 8428 - DNA, 31 bp, Artificial Sequence
  synthetic circulating small noncoding RNA (sncRNA) 5' transfer RNA (tRNA) half
ttccctggtggtctagtggttaggattcggc

SEQ ID NO: 8429 - DNA, 16 bp, Artificial Sequence
  synthetic circulating small noncoding RNA (sncRNA) 5' transfer RNA (tRNA) half
ggagatgccggggatc

SEQ ID NO: 8430 - DNA, 13 bp, Artificial Sequence
  synthetic circulating small noncoding RNA (sncRNA) 5' transfer RNA (tRNA) half
ctcggccacacta

SEQ ID NO: 8431 - DNA, 33 bp, Artificial Sequence
  synthetic circulating small noncoding RNA (sncRNA) 5' transfer RNA (tRNA) half
cggatgatcctcagtggtctggggtgcaggctt

SEQ ID NO: 8432 - DNA, 13 bp, Artificial Sequence
  synthetic circulating small noncoding RNA (sncRNA) 5' transfer RNA (tRNA) half
gcagtcaaatgct

SEQ ID NO: 8433 - DNA, 23 bp, Artificial Sequence
  synthetic circulating small noncoding RNA (sncRNA) 5' transfer RNA (tRNA) half
aggattcgaacctgcgcggggaa

SEQ ID NO: 8434 - DNA, 22 bp, Artificial Sequence
  synthetic circulating small noncoding RNA (sncRNA) 5' transfer RNA (tRNA) half
cgtggcaggcgagaattctacc

SEQ ID NO: 8435 - DNA, 13 bp, Artificial Sequence
  synthetic circulating small noncoding RNA (sncRNA) 5' transfer RNA (tRNA) half
cttcgagccggat

SEQ ID NO: 8436 - DNA, 28 bp, Artificial Sequence
  synthetic circulating small noncoding RNA (sncRNA) 5' transfer RNA (tRNA) half
gtcggggaatcgaaccccggtctcccgc

SEQ ID NO: 8437 - DNA, 32 bp, Artificial Sequence
  synthetic circulating small noncoding RNA (sncRNA) 5' transfer RNA (tRNA) half
cgccgtgatcgtataggggttagtactctgcg

SEQ ID NO: 8438 - DNA, 6 bp, Artificial Sequence
  synthetic circulating small noncoding RNA (sncRNA) 5' transfer RNA (tRNA) half
tggccg

SEQ ID NO: 8439 - DNA, 33 bp, Artificial Sequence
  synthetic circulating small noncoding RNA (sncRNA) 5' transfer RNA (tRNA) half
gcgggaggcccgggttcgattcccggcccatgc

SEQ ID NO: 8440 - DNA, 24 bp, Artificial Sequence
  synthetic circulating small noncoding RNA (sncRNA) 5' transfer RNA (tRNA) half
cgcttccgctgcgccactctgcta

SEQ ID NO: 8441 - DNA, 41 bp, Artificial Sequence
  synthetic circulating small noncoding RNA (sncRNA) 5' transfer RNA (tRNA) half
tttgaactcggatcgctggattcagagtccagagtgctaac

SEQ ID NO: 8442 - DNA, 23 bp, Artificial Sequence
  synthetic circulating small noncoding RNA (sncRNA) 5' transfer RNA (tRNA) half
ggtttcgatccatcgacctctgg

SEQ ID NO: 8443 - DNA, 16 bp, Artificial Sequence
  synthetic circulating small noncoding RNA (sncRNA) 5' transfer RNA (tRNA) half
gagatgccggggatcg

SEQ ID NO: 8444 - DNA, 31 bp, Artificial Sequence
  synthetic circulating small noncoding RNA (sncRNA) 5' transfer RNA (tRNA) half
tttcgacgaggatgggattcgaacccatgcg

SEQ ID NO: 8445 - DNA, 31 bp, Artificial Sequence
  synthetic circulating small noncoding RNA (sncRNA) 5' transfer RNA (tRNA) half
gaaggtcctgagttcgaacctcagagggggc

SEQ ID NO: 8446 - DNA, 25 bp, Artificial Sequence
  synthetic circulating small noncoding RNA (sncRNA) 5' transfer RNA (tRNA) half
tccagagtgctaaccattacaccat

SEQ ID NO: 8447 - DNA, 27 bp, Artificial Sequence
  synthetic circulating small noncoding RNA (sncRNA) 5' transfer RNA (tRNA) half
cagtggcctaatggataaggcatcagc

SEQ ID NO: 8448 - DNA, 18 bp, Artificial Sequence
  synthetic circulating small noncoding RNA (sncRNA) 5' transfer RNA (tRNA) half
atggtagaattctcgcct

SEQ ID NO: 8449 - DNA, 21 bp, Artificial Sequence
  synthetic circulating small noncoding RNA (sncRNA) 5' transfer RNA (tRNA) half
ccccgtcggggaattgaaccc

SEQ ID NO: 8450 - DNA, 29 bp, Artificial Sequence
  synthetic circulating small noncoding RNA (sncRNA) 5' transfer RNA (tRNA) half
acccatgcgtgcagagcacaatggattag

SEQ ID NO: 8451 - DNA, 37 bp, Artificial Sequence
  synthetic circulating small noncoding RNA (sncRNA) 5' transfer RNA (tRNA) half
gccccagcgagatttgaactcgcgacccctggtttac

SEQ ID NO: 8452 - DNA, 16 bp, Artificial Sequence
  synthetic circulating small noncoding RNA (sncRNA) 5' transfer RNA (tRNA) half
gtggttatcacgttcg

SEQ ID NO: 8453 - DNA, 21 bp, Artificial Sequence
  synthetic circulating small noncoding RNA (sncRNA) 5' transfer RNA (tRNA) half
aaaaaaatgttcccgcccggt

SEQ ID NO: 8454 - DNA, 21 bp, Artificial Sequence
  synthetic circulating small noncoding RNA (sncRNA) 5' transfer RNA (tRNA) half
cttagaccactcggccatcct

SEQ ID NO: 8455 - DNA, 32 bp, Artificial Sequence
  synthetic circulating small noncoding RNA (sncRNA) 5' transfer RNA (tRNA) half
tgcacgaggccccgggttcaatccccggcacc

SEQ ID NO: 8456 - DNA, 16 bp, Artificial Sequence
  synthetic circulating small noncoding RNA (sncRNA) 5' transfer RNA (tRNA) half
ggggatgtagctcaga

SEQ ID NO: 8457 - DNA, 18 bp, Artificial Sequence
  synthetic circulating small noncoding RNA (sncRNA) 5' transfer RNA (tRNA) half
tctagcggttaggattcc

SEQ ID NO: 8458 - DNA, 15 bp, Artificial Sequence
  synthetic circulating small noncoding RNA (sncRNA) 5' transfer RNA (tRNA) half
cccgggttcgactcc

SEQ ID NO: 8459 - DNA, 19 bp, Artificial Sequence
  synthetic circulating small noncoding RNA (sncRNA) 5' transfer RNA (tRNA) half
tctccccgtcggggaatcg

SEQ ID NO: 8460 - DNA, 32 bp, Artificial Sequence
  synthetic circulating small noncoding RNA (sncRNA) 5' transfer RNA (tRNA) half
attcttgcgacccgggttcgattcccgggcgg

SEQ ID NO: 8461 - DNA, 17 bp, Artificial Sequence
  synthetic circulating small noncoding RNA (sncRNA) 5' transfer RNA (tRNA) half
actctggactctgaatc

SEQ ID NO: 8462 - DNA, 20 bp, Artificial Sequence
  synthetic circulating small noncoding RNA (sncRNA) 5' transfer RNA (tRNA) half
gatgcccgcatcctccactt

SEQ ID NO: 8463 - DNA, 33 bp, Artificial Sequence
  synthetic circulating small noncoding RNA (sncRNA) 5' transfer RNA (tRNA) half
tgcacgaggccccgggttcaatccccggcacct

SEQ ID NO: 8464 - DNA, 14 bp, Artificial Sequence
  synthetic circulating small noncoding RNA (sncRNA) 5' transfer RNA (tRNA) half
ttcgactcccggtg

SEQ ID NO: 8465 - DNA, 25 bp, Artificial Sequence
  synthetic circulating small noncoding RNA (sncRNA) 5' transfer RNA (tRNA) half
tatggaggcgtgggttcgaatccca

SEQ ID NO: 8466 - DNA, 16 bp, Artificial Sequence
  synthetic circulating small noncoding RNA (sncRNA) 5' transfer RNA (tRNA) half
gaaaggtccccggttc

SEQ ID NO: 8467 - DNA, 33 bp, Artificial Sequence
  synthetic circulating small noncoding RNA (sncRNA) 5' transfer RNA (tRNA) half
gtcagaagtgggattcgaacccacgcctccatt

SEQ ID NO: 8468 - DNA, 35 bp, Artificial Sequence
  synthetic circulating small noncoding RNA (sncRNA) 5' transfer RNA (tRNA) half
ggcattggtggttcagtggtagaattctcgcctgc

SEQ ID NO: 8469 - DNA, 37 bp, Artificial Sequence
  synthetic circulating small noncoding RNA (sncRNA) 5' transfer RNA (tRNA) half
accacgctctaaccaactgagctaaccggccagacct

SEQ ID NO: 8470 - DNA, 21 bp, Artificial Sequence
  synthetic circulating small noncoding RNA (sncRNA) 5' transfer RNA (tRNA) half
tagcgcccgaacagggacttg

SEQ ID NO: 8471 - DNA, 22 bp, Artificial Sequence
  synthetic circulating small noncoding RNA (sncRNA) 5' transfer RNA (tRNA) half
aacgcagcgccttagaccgctc

SEQ ID NO: 8472 - DNA, 32 bp, Artificial Sequence
  synthetic circulating small noncoding RNA (sncRNA) 5' transfer RNA (tRNA) half
agacgacgaggatgggattcgaacccacgcgt

SEQ ID NO: 8473 - DNA, 25 bp, Artificial Sequence
  synthetic circulating small noncoding RNA (sncRNA) 5' transfer RNA (tRNA) half
acctccccgtcggggaattgaaccc

SEQ ID NO: 8474 - DNA, 13 bp, Artificial Sequence
  synthetic circulating small noncoding RNA (sncRNA) 5' transfer RNA (tRNA) half
ctggttcgattcc

SEQ ID NO: 8475 - DNA, 41 bp, Artificial Sequence
  synthetic circulating small noncoding RNA (sncRNA) 5' transfer RNA (tRNA) half
cataatctgaaggtcctgagttcgaacctcagagggggcag

SEQ ID NO: 8476 - DNA, 7 bp, Artificial Sequence
  synthetic circulating small noncoding RNA (sncRNA) 5' transfer RNA (tRNA) half
tggcccg

SEQ ID NO: 8477 - DNA, 21 bp, Artificial Sequence
  synthetic circulating small noncoding RNA (sncRNA) 5' transfer RNA (tRNA) half
tgtagcagaggatggtttcga

SEQ ID NO: 8478 - DNA, 22 bp, Artificial Sequence
  synthetic circulating small noncoding RNA (sncRNA) 5' transfer RNA (tRNA) half
atataacgtgtttccgcccggt

SEQ ID NO: 8479 - DNA, 18 bp, Artificial Sequence
  synthetic circulating small noncoding RNA (sncRNA) 5' transfer RNA (tRNA) half
gctctaccgactgagcta

SEQ ID NO: 8480 - DNA, 21 bp, Artificial Sequence
  synthetic circulating small noncoding RNA (sncRNA) 5' transfer RNA (tRNA) half
tgtggcccgtacggggatcga

SEQ ID NO: 8481 - DNA, 10 bp, Artificial Sequence
  synthetic circulating small noncoding RNA (sncRNA) 5' transfer RNA (tRNA) half
cacgttcgcc

SEQ ID NO: 8482 - DNA, 36 bp, Artificial Sequence
  synthetic circulating small noncoding RNA (sncRNA) 5' transfer RNA (tRNA) half
aaacaggagatcctgggttcgaatcccagcggggcc

SEQ ID NO: 8483 - DNA, 26 bp, Artificial Sequence
  synthetic circulating small noncoding RNA (sncRNA) 5' transfer RNA (tRNA) half
ctcccgcgtggcaggcgagaattcta

SEQ ID NO: 8484 - DNA, 14 bp, Artificial Sequence
  synthetic circulating small noncoding RNA (sncRNA) 5' transfer RNA (tRNA) half
gactgcgacctgaa

SEQ ID NO: 8485 - DNA, 17 bp, Artificial Sequence
  synthetic circulating small noncoding RNA (sncRNA) 5' transfer RNA (tRNA) half
cataccgggagtcgaac

SEQ ID NO: 8486 - DNA, 36 bp, Artificial Sequence
  synthetic circulating small noncoding RNA (sncRNA) 5' transfer RNA (tRNA) half
cgactctggtgggactcgaacccacaacctttgaat

SEQ ID NO: 8487 - DNA, 14 bp, Artificial Sequence
  synthetic circulating small noncoding RNA (sncRNA) 5' transfer RNA (tRNA) half
gatgccggggatcg

SEQ ID NO: 8488 - DNA, 13 bp, Artificial Sequence
  synthetic circulating small noncoding RNA (sncRNA) 5' transfer RNA (tRNA) half
tagcgtggccgag

SEQ ID NO: 8489 - DNA, 12 bp, Artificial Sequence
  synthetic circulating small noncoding RNA (sncRNA) 5' transfer RNA (tRNA) half
ggtcgcgggttc

SEQ ID NO: 8490 - DNA, 34 bp, Artificial Sequence
  synthetic circulating small noncoding RNA (sncRNA) 5' transfer RNA (tRNA) half
gcgttggccgggaatcgaacccgggtcaactgct

SEQ ID NO: 8491 - DNA, 32 bp, Artificial Sequence
  synthetic circulating small noncoding RNA (sncRNA) 5' transfer RNA (tRNA) half
gattgcaggttcgagtcctgccgcggtcgact

SEQ ID NO: 8492 - DNA, 27 bp, Artificial Sequence
  synthetic circulating small noncoding RNA (sncRNA) 5' transfer RNA (tRNA) half
aaagtctgatgctctaccgactgagct

SEQ ID NO: 8493 - DNA, 18 bp, Artificial Sequence
  synthetic circulating small noncoding RNA (sncRNA) 5' transfer RNA (tRNA) half
gaacctagaatcttctga

SEQ ID NO: 8494 - DNA, 31 bp, Artificial Sequence
  synthetic circulating small noncoding RNA (sncRNA) 5' transfer RNA (tRNA) half
cagggtcgtgggttcgagccccacgttgggc

SEQ ID NO: 8495 - DNA, 14 bp, Artificial Sequence
  synthetic circulating small noncoding RNA (sncRNA) 5' transfer RNA (tRNA) half
tagcgtggccgagc

SEQ ID NO: 8496 - DNA, 14 bp, Artificial Sequence
  synthetic circulating small noncoding RNA (sncRNA) 5' transfer RNA (tRNA) half
ctcctggctggctc

SEQ ID NO: 8497 - DNA, 21 bp, Artificial Sequence
  synthetic circulating small noncoding RNA (sncRNA) 5' transfer RNA (tRNA) half
tcggttcccggccaatgcata

SEQ ID NO: 8498 - DNA, 18 bp, Artificial Sequence
  synthetic circulating small noncoding RNA (sncRNA) 5' transfer RNA (tRNA) half
tcaaatctcggtggaacc

SEQ ID NO: 8499 - DNA, 14 bp, Artificial Sequence
  synthetic circulating small noncoding RNA (sncRNA) 5' transfer RNA (tRNA) half
gattcgaacccacg

SEQ ID NO: 8500 - DNA, 21 bp, Artificial Sequence
  synthetic circulating small noncoding RNA (sncRNA) 5' transfer RNA (tRNA) half
ggtgagagcgccgaatcctaa

SEQ ID NO: 8501 - DNA, 18 bp, Artificial Sequence
  synthetic circulating small noncoding RNA (sncRNA) 5' transfer RNA (tRNA) half
ggattcggcgctctcacc

SEQ ID NO: 8502 - DNA, 36 bp, Artificial Sequence
  synthetic circulating small noncoding RNA (sncRNA) 5' transfer RNA (tRNA) half
agtcgcccggctagctcagtcggtagagcatgagac

SEQ ID NO: 8503 - DNA, 29 bp, Artificial Sequence
  synthetic circulating small noncoding RNA (sncRNA) 5' transfer RNA (tRNA) half
ggcgagcgtgatgaccactacactacgga

SEQ ID NO: 8504 - DNA, 10 bp, Artificial Sequence
  synthetic circulating small noncoding RNA (sncRNA) 5' transfer RNA (tRNA) half
cgaaccagcg

SEQ ID NO: 8505 - DNA, 15 bp, Artificial Sequence
  synthetic circulating small noncoding RNA (sncRNA) 5' transfer RNA (tRNA) half
gttcgactcccggtg

SEQ ID NO: 8506 - DNA, 25 bp, Artificial Sequence
  synthetic circulating small noncoding RNA (sncRNA) 5' transfer RNA (tRNA) half
gcccgaacagggacttgaaccctgg

SEQ ID NO: 8507 - DNA, 31 bp, Artificial Sequence
  synthetic circulating small noncoding RNA (sncRNA) 5' transfer RNA (tRNA) half
gcagtgccttagactgctcggccatcctgac

SEQ ID NO: 8508 - DNA, 30 bp, Artificial Sequence
  synthetic circulating small noncoding RNA (sncRNA) 5' transfer RNA (tRNA) half
ccctgaccgggaatcgaacccgggccgcgg

SEQ ID NO: 8509 - DNA, 20 bp, Artificial Sequence
  synthetic circulating small noncoding RNA (sncRNA) 5' transfer RNA (tRNA) half
atccattgcgccacagagcc

SEQ ID NO: 8510 - DNA, 23 bp, Artificial Sequence
  synthetic circulating small noncoding RNA (sncRNA) 5' transfer RNA (tRNA) half
gtgttcccacaccgggagtcgaa

SEQ ID NO: 8511 - DNA, 9 bp, Artificial Sequence
  synthetic circulating small noncoding RNA (sncRNA) 5' transfer RNA (tRNA) half
gcggcccgg

SEQ ID NO: 8512 - DNA, 15 bp, Artificial Sequence
  synthetic circulating small noncoding RNA (sncRNA) 5' transfer RNA (tRNA) half
gatccccggcatctc

SEQ ID NO: 8513 - DNA, 10 bp, Artificial Sequence
  synthetic circulating small noncoding RNA (sncRNA) 5' transfer RNA (tRNA) half
cgctggggcc

SEQ ID NO: 8514 - DNA, 12 bp, Artificial Sequence
  synthetic circulating small noncoding RNA (sncRNA) 5' transfer RNA (tRNA) half
ccgggatcgaac

SEQ ID NO: 8515 - DNA, 28 bp, Artificial Sequence
  synthetic circulating small noncoding RNA (sncRNA) 5' transfer RNA (tRNA) half
caaatcctaaccactagaccaccaggga

SEQ ID NO: 8516 - DNA, 15 bp, Artificial Sequence
  synthetic circulating small noncoding RNA (sncRNA) 5' transfer RNA (tRNA) half
accgggcggaaacaa

SEQ ID NO: 8517 - DNA, 31 bp, Artificial Sequence
  synthetic circulating small noncoding RNA (sncRNA) 5' transfer RNA (tRNA) half
cagcgatccgagttcaaatctcggtgggacc

SEQ ID NO: 8518 - DNA, 23 bp, Artificial Sequence
  synthetic circulating small noncoding RNA (sncRNA) 5' transfer RNA (tRNA) half
gcgtggcaggcgagaattctacc

SEQ ID NO: 8519 - DNA, 40 bp, Artificial Sequence
  synthetic circulating small noncoding RNA (sncRNA) 5' transfer RNA (tRNA) half
tgagattaagagtctcatgctctaccgactgagctagccg

SEQ ID NO: 8520 - DNA, 21 bp, Artificial Sequence
  synthetic circulating small noncoding RNA (sncRNA) 5' transfer RNA (tRNA) half
aggccccagcgagatttgaac

SEQ ID NO: 8521 - DNA, 10 bp, Artificial Sequence
  synthetic circulating small noncoding RNA (sncRNA) 5' transfer RNA (tRNA) half
cgaacccggg

SEQ ID NO: 8522 - DNA, 24 bp, Artificial Sequence
  synthetic circulating small noncoding RNA (sncRNA) 5' transfer RNA (tRNA) half
ccttaaccactcggccacctcgtc

SEQ ID NO: 8523 - DNA, 38 bp, Artificial Sequence
  synthetic circulating small noncoding RNA (sncRNA) 5' transfer RNA (tRNA) half
cataatctgaaggtcctgagttcgaacctcagaggggg

SEQ ID NO: 8524 - DNA, 35 bp, Artificial Sequence
  synthetic circulating small noncoding RNA (sncRNA) 5' transfer RNA (tRNA) half
tgcacgaggccccgggttcaatccccggcacctcc

SEQ ID NO: 8525 - DNA, 22 bp, Artificial Sequence
  synthetic circulating small noncoding RNA (sncRNA) 5' transfer RNA (tRNA) half
ctgaacgcagcgccttagaccg

SEQ ID NO: 8526 - DNA, 20 bp, Artificial Sequence
  synthetic circulating small noncoding RNA (sncRNA) 5' transfer RNA (tRNA) half
ttccttcgagccggattcga

SEQ ID NO: 8527 - DNA, 22 bp, Artificial Sequence
  synthetic circulating small noncoding RNA (sncRNA) 5' transfer RNA (tRNA) half
gggttcaagtccctgttcgggc

SEQ ID NO: 8528 - DNA, 20 bp, Artificial Sequence
  synthetic circulating small noncoding RNA (sncRNA) 5' transfer RNA (tRNA) half
acacgcgaaaggtccccggt

SEQ ID NO: 8529 - DNA, 13 bp, Artificial Sequence
  synthetic circulating small noncoding RNA (sncRNA) 5' transfer RNA (tRNA) half
ccgggttcgactc

SEQ ID NO: 8530 - DNA, 14 bp, Artificial Sequence
  synthetic circulating small noncoding RNA (sncRNA) 5' transfer RNA (tRNA) half
cgaactcacgacct

SEQ ID NO: 8531 - DNA, 30 bp, Artificial Sequence
  synthetic circulating small noncoding RNA (sncRNA) 5' transfer RNA (tRNA) half
tctgtagtgtagtggttatcacgctcgcct

SEQ ID NO: 8532 - DNA, 14 bp, Artificial Sequence
  synthetic circulating small noncoding RNA (sncRNA) 5' transfer RNA (tRNA) half
acccacgccatcga

SEQ ID NO: 8533 - DNA, 22 bp, Artificial Sequence
  synthetic circulating small noncoding RNA (sncRNA) 5' transfer RNA (tRNA) half
ttccggctcgaaggacttcgtg

SEQ ID NO: 8534 - DNA, 30 bp, Artificial Sequence
  synthetic circulating small noncoding RNA (sncRNA) 5' transfer RNA (tRNA) half
gccgcggcccgggttcgattcccggtcagg

SEQ ID NO: 8535 - DNA, 13 bp, Artificial Sequence
  synthetic circulating small noncoding RNA (sncRNA) 5' transfer RNA (tRNA) half
tcccgggcggcgc

SEQ ID NO: 8536 - DNA, 13 bp, Artificial Sequence
  synthetic circulating small noncoding RNA (sncRNA) 5' transfer RNA (tRNA) half
atcctaaccacta

SEQ ID NO: 8537 - DNA, 20 bp, Artificial Sequence
  synthetic circulating small noncoding RNA (sncRNA) 5' transfer RNA (tRNA) half
gttcgaatcccagcggggcc

SEQ ID NO: 8538 - DNA, 21 bp, Artificial Sequence
  synthetic circulating small noncoding RNA (sncRNA) 5' transfer RNA (tRNA) half
taccgactgagctatccgggc

SEQ ID NO: 8539 - DNA, 24 bp, Artificial Sequence
  synthetic circulating small noncoding RNA (sncRNA) 5' transfer RNA (tRNA) half
cttagaccgctcggccacgctacc

SEQ ID NO: 8540 - DNA, 20 bp, Artificial Sequence
  synthetic circulating small noncoding RNA (sncRNA) 5' transfer RNA (tRNA) half
agacgacgaggatgggattc

SEQ ID NO: 8541 - DNA, 21 bp, Artificial Sequence
  synthetic circulating small noncoding RNA (sncRNA) 5' transfer RNA (tRNA) half
gttcgagtcccatctggggtg

SEQ ID NO: 8542 - DNA, 23 bp, Artificial Sequence
  synthetic circulating small noncoding RNA (sncRNA) 5' transfer RNA (tRNA) half
ccttcgatagctcagctggtaga

SEQ ID NO: 8543 - DNA, 21 bp, Artificial Sequence
  synthetic circulating small noncoding RNA (sncRNA) 5' transfer RNA (tRNA) half
cggatagctcagtcggtagag

SEQ ID NO: 8544 - DNA, 31 bp, Artificial Sequence
  synthetic circulating small noncoding RNA (sncRNA) 5' transfer RNA (tRNA) half
tccgtagtgtagtggttatcacgttcgcctc

SEQ ID NO: 8545 - DNA, 17 bp, Artificial Sequence
  synthetic circulating small noncoding RNA (sncRNA) 5' transfer RNA (tRNA) half
tgtggcagcggtgggat

SEQ ID NO: 8546 - DNA, 25 bp, Artificial Sequence
  synthetic circulating small noncoding RNA (sncRNA) 5' transfer RNA (tRNA) half
gggggtgtagctcagtggtagagcg

SEQ ID NO: 8547 - DNA, 27 bp, Artificial Sequence
  synthetic circulating small noncoding RNA (sncRNA) 5' transfer RNA (tRNA) half
aatcctaaccactagaccaccagggag

SEQ ID NO: 8548 - DNA, 10 bp, Artificial Sequence
  synthetic circulating small noncoding RNA (sncRNA) 5' transfer RNA (tRNA) half
ggtcccgggt

SEQ ID NO: 8549 - DNA, 17 bp, Artificial Sequence
  synthetic circulating small noncoding RNA (sncRNA) 5' transfer RNA (tRNA) half
accgggcggaaacaagc

SEQ ID NO: 8550 - DNA, 25 bp, Artificial Sequence
  synthetic circulating small noncoding RNA (sncRNA) 5' transfer RNA (tRNA) half
aatcctaaccactagaccaccaggg

SEQ ID NO: 8551 - DNA, 18 bp, Artificial Sequence
  synthetic circulating small noncoding RNA (sncRNA) 5' transfer RNA (tRNA) half
tcgagtcctgccgcggtc

SEQ ID NO: 8552 - DNA, 18 bp, Artificial Sequence
  synthetic circulating small noncoding RNA (sncRNA) 5' transfer RNA (tRNA) half
aaccgggcggaaacaact

SEQ ID NO: 8553 - DNA, 13 bp, Artificial Sequence
  synthetic circulating small noncoding RNA (sncRNA) 5' transfer RNA (tRNA) half
cagcacgcttccg

SEQ ID NO: 8554 - DNA, 11 bp, Artificial Sequence
  synthetic circulating small noncoding RNA (sncRNA) 5' transfer RNA (tRNA) half
cactccaccaa

SEQ ID NO: 8555 - DNA, 18 bp, Artificial Sequence
  synthetic circulating small noncoding RNA (sncRNA) 5' transfer RNA (tRNA) half
ggttagcactctggactc

SEQ ID NO: 8556 - DNA, 15 bp, Artificial Sequence
  synthetic circulating small noncoding RNA (sncRNA) 5' transfer RNA (tRNA) half
ggctcgttggtctag

SEQ ID NO: 8557 - DNA, 23 bp, Artificial Sequence
  synthetic circulating small noncoding RNA (sncRNA) 5' transfer RNA (tRNA) half
ggattaagagtcccatgctctac

SEQ ID NO: 8558 - DNA, 32 bp, Artificial Sequence
  synthetic circulating small noncoding RNA (sncRNA) 5' transfer RNA (tRNA) half
gcgagaattctaccactgaaccaccaatgcca

SEQ ID NO: 8559 - DNA, 35 bp, Artificial Sequence
  synthetic circulating small noncoding RNA (sncRNA) 5' transfer RNA (tRNA) half
tgtcagaagtgggattcgaacccacgcctccattc

SEQ ID NO: 8560 - DNA, 16 bp, Artificial Sequence
  synthetic circulating small noncoding RNA (sncRNA) 5' transfer RNA (tRNA) half
caaagcgagaatcata

SEQ ID NO: 8561 - DNA, 37 bp, Artificial Sequence
  synthetic circulating small noncoding RNA (sncRNA) 5' transfer RNA (tRNA) half
ccgaccacgaagggactcgaaccctcaatcttctgat

SEQ ID NO: 8562 - DNA, 22 bp, Artificial Sequence
  synthetic circulating small noncoding RNA (sncRNA) 5' transfer RNA (tRNA) half
tctaggggtatgattctcggtt

SEQ ID NO: 8563 - DNA, 21 bp, Artificial Sequence
  synthetic circulating small noncoding RNA (sncRNA) 5' transfer RNA (tRNA) half
ggaatcgaacccgggcctccc

SEQ ID NO: 8564 - DNA, 18 bp, Artificial Sequence
  synthetic circulating small noncoding RNA (sncRNA) 5' transfer RNA (tRNA) half
gacgaggtggccgagtgg

SEQ ID NO: 8565 - DNA, 31 bp, Artificial Sequence
  synthetic circulating small noncoding RNA (sncRNA) 5' transfer RNA (tRNA) half
gcgcccgaacagggacttgaaccctggaccc

SEQ ID NO: 8566 - DNA, 34 bp, Artificial Sequence
  synthetic circulating small noncoding RNA (sncRNA) 5' transfer RNA (tRNA) half
cgccgcggcccgggttcgattcccggtcagggaa

SEQ ID NO: 8567 - DNA, 12 bp, Artificial Sequence
  synthetic circulating small noncoding RNA (sncRNA) 5' transfer RNA (tRNA) half
cgaacctgcgcg

SEQ ID NO: 8568 - DNA, 36 bp, Artificial Sequence
  synthetic circulating small noncoding RNA (sncRNA) 5' transfer RNA (tRNA) half
gttaggattcggcgctctcaccgccgcggcccgggt

SEQ ID NO: 8569 - DNA, 22 bp, Artificial Sequence
  synthetic circulating small noncoding RNA (sncRNA) 5' transfer RNA (tRNA) half
aggattcgaacctgcgcgggga

SEQ ID NO: 8570 - DNA, 30 bp, Artificial Sequence
  synthetic circulating small noncoding RNA (sncRNA) 5' transfer RNA (tRNA) half
tgatcgtatagtggttagtactctgcgttg

SEQ ID NO: 8571 - DNA, 29 bp, Artificial Sequence
  synthetic circulating small noncoding RNA (sncRNA) 5' transfer RNA (tRNA) half
ggcaagaattctaccactgaaccaccaat

SEQ ID NO: 8572 - DNA, 34 bp, Artificial Sequence
  synthetic circulating small noncoding RNA (sncRNA) 5' transfer RNA (tRNA) half
agcgacagagtggttcaattccacctttcgggcg

SEQ ID NO: 8573 - DNA, 17 bp, Artificial Sequence
  synthetic circulating small noncoding RNA (sncRNA) 5' transfer RNA (tRNA) half
ttttcacccaggcggcc

SEQ ID NO: 8574 - DNA, 26 bp, Artificial Sequence
  synthetic circulating small noncoding RNA (sncRNA) 5' transfer RNA (tRNA) half
gaatcctaaccgctagaccatgtggg

SEQ ID NO: 8575 - DNA, 20 bp, Artificial Sequence
  synthetic circulating small noncoding RNA (sncRNA) 5' transfer RNA (tRNA) half
taccactgagctacatcccc

SEQ ID NO: 8576 - DNA, 13 bp, Artificial Sequence
  synthetic circulating small noncoding RNA (sncRNA) 5' transfer RNA (tRNA) half
gcgaaaggtcccc

SEQ ID NO: 8577 - DNA, 24 bp, Artificial Sequence
  synthetic circulating small noncoding RNA (sncRNA) 5' transfer RNA (tRNA) half
caggaatcctaaccgctagaccat

SEQ ID NO: 8578 - DNA, 22 bp, Artificial Sequence
  synthetic circulating small noncoding RNA (sncRNA) 5' transfer RNA (tRNA) half
aagatggagggggcacccggat

SEQ ID NO: 8579 - DNA, 35 bp, Artificial Sequence
  synthetic circulating small noncoding RNA (sncRNA) 5' transfer RNA (tRNA) half
gggcccggatagctcagtcggtagagcatcagact

SEQ ID NO: 8580 - DNA, 27 bp, Artificial Sequence
  synthetic circulating small noncoding RNA (sncRNA) 5' transfer RNA (tRNA) half
ggttccttcgagccggattcgaaccag

SEQ ID NO: 8581 - DNA, 44 bp, Artificial Sequence
  synthetic circulating small noncoding RNA (sncRNA) 5' transfer RNA (tRNA) half
tagcgcccgaacagggacttgaaccctggaccctcagattaaaa

SEQ ID NO: 8582 - DNA, 28 bp, Artificial Sequence
  synthetic circulating small noncoding RNA (sncRNA) 5' transfer RNA (tRNA) half
tcatgctctaccgactgagctagccggg

SEQ ID NO: 8583 - DNA, 26 bp, Artificial Sequence
  synthetic circulating small noncoding RNA (sncRNA) 5' transfer RNA (tRNA) half
cgttccttcgagccggattcgaacca

SEQ ID NO: 8584 - DNA, 22 bp, Artificial Sequence
  synthetic circulating small noncoding RNA (sncRNA) 5' transfer RNA (tRNA) half
ccgactgagctatccgggctct

SEQ ID NO: 8585 - DNA, 18 bp, Artificial Sequence
  synthetic circulating small noncoding RNA (sncRNA) 5' transfer RNA (tRNA) half
agtcaaatgctctaccac

SEQ ID NO: 8586 - DNA, 20 bp, Artificial Sequence
  synthetic circulating small noncoding RNA (sncRNA) 5' transfer RNA (tRNA) half
tcagtgaggtcccaccgaga

SEQ ID NO: 8587 - DNA, 27 bp, Artificial Sequence
  synthetic circulating small noncoding RNA (sncRNA) 5' transfer RNA (tRNA) half
gggggtatagctcaggggtagagcatt

SEQ ID NO: 8588 - DNA, 29 bp, Artificial Sequence
  synthetic circulating small noncoding RNA (sncRNA) 5' transfer RNA (tRNA) half
actcggatcgctggattcagagtccagag

SEQ ID NO: 8589 - DNA, 25 bp, Artificial Sequence
  synthetic circulating small noncoding RNA (sncRNA) 5' transfer RNA (tRNA) half
acaacgcagagtactaaccactata

SEQ ID NO: 8590 - DNA, 16 bp, Artificial Sequence
  synthetic circulating small noncoding RNA (sncRNA) 5' transfer RNA (tRNA) half
caggtcgcagtctccc

SEQ ID NO: 8591 - DNA, 16 bp, Artificial Sequence
  synthetic circulating small noncoding RNA (sncRNA) 5' transfer RNA (tRNA) half
cagaagattgagggtt

SEQ ID NO: 8592 - DNA, 17 bp, Artificial Sequence
  synthetic circulating small noncoding RNA (sncRNA) 5' transfer RNA (tRNA) half
ctaccgactgagctatc

SEQ ID NO: 8593 - DNA, 15 bp, Artificial Sequence
  synthetic circulating small noncoding RNA (sncRNA) 5' transfer RNA (tRNA) half
tcctcgttagtatag

SEQ ID NO: 8594 - DNA, 27 bp, Artificial Sequence
  synthetic circulating small noncoding RNA (sncRNA) 5' transfer RNA (tRNA) half
gaccccgacgtgatttgaacacgcaac

SEQ ID NO: 8595 - DNA, 19 bp, Artificial Sequence
  synthetic circulating small noncoding RNA (sncRNA) 5' transfer RNA (tRNA) half
tcgatgcccgcatcctcca

SEQ ID NO: 8596 - DNA, 45 bp, Artificial Sequence
  synthetic circulating small noncoding RNA (sncRNA) 5' transfer RNA (tRNA) half
tacctccccgtcggggaatcgaaccccggtctcccgcgtgacagg

SEQ ID NO: 8597 - DNA, 24 bp, Artificial Sequence
  synthetic circulating small noncoding RNA (sncRNA) 5' transfer RNA (tRNA) half
acgcgtgcagagcacaatggatta

SEQ ID NO: 8598 - DNA, 13 bp, Artificial Sequence
  synthetic circulating small noncoding RNA (sncRNA) 5' transfer RNA (tRNA) half
ggcaccgctggga

SEQ ID NO: 8599 - DNA, 11 bp, Artificial Sequence
  synthetic circulating small noncoding RNA (sncRNA) 5' transfer RNA (tRNA) half
tcggggaatcg

SEQ ID NO: 8600 - DNA, 17 bp, Artificial Sequence
  synthetic circulating small noncoding RNA (sncRNA) 5' transfer RNA (tRNA) half
gcgttggccgggaatcg

SEQ ID NO: 8601 - DNA, 18 bp, Artificial Sequence
  synthetic circulating small noncoding RNA (sncRNA) 5' transfer RNA (tRNA) half
cgagccagccaggagtcg

SEQ ID NO: 8602 - DNA, 18 bp, Artificial Sequence
  synthetic circulating small noncoding RNA (sncRNA) 5' transfer RNA (tRNA) half
ggatcgctggattcagag

SEQ ID NO: 8603 - DNA, 16 bp, Artificial Sequence
  synthetic circulating small noncoding RNA (sncRNA) 5' transfer RNA (tRNA) half
aaaccgggcggaaaca

SEQ ID NO: 8604 - DNA, 13 bp, Artificial Sequence
  synthetic circulating small noncoding RNA (sncRNA) 5' transfer RNA (tRNA) half
cgagaggtcccgg

SEQ ID NO: 8605 - DNA, 21 bp, Artificial Sequence
  synthetic circulating small noncoding RNA (sncRNA) 5' transfer RNA (tRNA) half
attcgaacccacgcctccatt

SEQ ID NO: 8606 - DNA, 34 bp, Artificial Sequence
  synthetic circulating small noncoding RNA (sncRNA) 5' transfer RNA (tRNA) half
agaaggtcctgggttcgagccccagtggaaccac

SEQ ID NO: 8607 - DNA, 22 bp, Artificial Sequence
  synthetic circulating small noncoding RNA (sncRNA) 5' transfer RNA (tRNA) half
ccggtttcgaaccggggacctt

SEQ ID NO: 8608 - DNA, 26 bp, Artificial Sequence
  synthetic circulating small noncoding RNA (sncRNA) 5' transfer RNA (tRNA) half
gatactaaccactatactaacgagga

SEQ ID NO: 8609 - DNA, 30 bp, Artificial Sequence
  synthetic circulating small noncoding RNA (sncRNA) 5' transfer RNA (tRNA) half
tcccgggttcaaatcccggacgagccccac

SEQ ID NO: 8610 - DNA, 14 bp, Artificial Sequence
  synthetic circulating small noncoding RNA (sncRNA) 5' transfer RNA (tRNA) half
aggaggcacccgtt

SEQ ID NO: 8611 - DNA, 40 bp, Artificial Sequence
  synthetic circulating small noncoding RNA (sncRNA) 5' transfer RNA (tRNA) half
ggcagcggtgggattcgaacccacgcccccgaagagactg

SEQ ID NO: 8612 - DNA, 21 bp, Artificial Sequence
  synthetic circulating small noncoding RNA (sncRNA) 5' transfer RNA (tRNA) half
cggggaatcgaaccccggtct

SEQ ID NO: 8613 - DNA, 14 bp, Artificial Sequence
  synthetic circulating small noncoding RNA (sncRNA) 5' transfer RNA (tRNA) half
tcgagccggattcg

SEQ ID NO: 8614 - DNA, 19 bp, Artificial Sequence
  synthetic circulating small noncoding RNA (sncRNA) 5' transfer RNA (tRNA) half
gattccggctcgaaggact

SEQ ID NO: 8615 - DNA, 22 bp, Artificial Sequence
  synthetic circulating small noncoding RNA (sncRNA) 5' transfer RNA (tRNA) half
cgggtcaactgcttggaaggca

SEQ ID NO: 8616 - DNA, 28 bp, Artificial Sequence
  synthetic circulating small noncoding RNA (sncRNA) 5' transfer RNA (tRNA) half
cgagccagccaggagtcgaacctagaat

SEQ ID NO: 8617 - DNA, 40 bp, Artificial Sequence
  synthetic circulating small noncoding RNA (sncRNA) 5' transfer RNA (tRNA) half
ctgttcccataccgggagtcgaacccgggccgcctgggtg

SEQ ID NO: 8618 - DNA, 40 bp, Artificial Sequence
  synthetic circulating small noncoding RNA (sncRNA) 5' transfer RNA (tRNA) half
agacttaaaaccttgttcccagaggttcaaatcctctccc

SEQ ID NO: 8619 - DNA, 28 bp, Artificial Sequence
  synthetic circulating small noncoding RNA (sncRNA) 5' transfer RNA (tRNA) half
ccatggtgtaatggttagcactctggac

SEQ ID NO: 8620 - DNA, 17 bp, Artificial Sequence
  synthetic circulating small noncoding RNA (sncRNA) 5' transfer RNA (tRNA) half
aaccctggaccctcaga

SEQ ID NO: 8621 - DNA, 19 bp, Artificial Sequence
  synthetic circulating small noncoding RNA (sncRNA) 5' transfer RNA (tRNA) half
acccgggcctcccgcgtgg

SEQ ID NO: 8622 - DNA, 32 bp, Artificial Sequence
  synthetic circulating small noncoding RNA (sncRNA) 5' transfer RNA (tRNA) half
cgcgggagaccggggttcgattccccgacggg

SEQ ID NO: 8623 - DNA, 34 bp, Artificial Sequence
  synthetic circulating small noncoding RNA (sncRNA) 5' transfer RNA (tRNA) half
aacaggagatcctgggttcgaatcccagtggggc

SEQ ID NO: 8624 - DNA, 17 bp, Artificial Sequence
  synthetic circulating small noncoding RNA (sncRNA) 5' transfer RNA (tRNA) half
gaattctaccactgaac

SEQ ID NO: 8625 - DNA, 31 bp, Artificial Sequence
  synthetic circulating small noncoding RNA (sncRNA) 5' transfer RNA (tRNA) half
cctccccgtcggggaatcgaaccccggtctc

SEQ ID NO: 8626 - DNA, 15 bp, Artificial Sequence
  synthetic circulating small noncoding RNA (sncRNA) 5' transfer RNA (tRNA) half
cctgaccgggaatcg

SEQ ID NO: 8627 - DNA, 13 bp, Artificial Sequence
  synthetic circulating small noncoding RNA (sncRNA) 5' transfer RNA (tRNA) half
caggagtcgaacc

SEQ ID NO: 8628 - DNA, 14 bp, Artificial Sequence
  synthetic circulating small noncoding RNA (sncRNA) 5' transfer RNA (tRNA) half
gccgggagtcgaac

SEQ ID NO: 8629 - DNA, 16 bp, Artificial Sequence
  synthetic circulating small noncoding RNA (sncRNA) 5' transfer RNA (tRNA) half
tagtgtagtggttatc

SEQ ID NO: 8630 - DNA, 17 bp, Artificial Sequence
  synthetic circulating small noncoding RNA (sncRNA) 5' transfer RNA (tRNA) half
ccggatagctcagtcgg

SEQ ID NO: 8631 - DNA, 34 bp, Artificial Sequence
  synthetic circulating small noncoding RNA (sncRNA) 5' transfer RNA (tRNA) half
gtgccgagactcggattcgaaccgaggttgctgc

SEQ ID NO: 8632 - DNA, 18 bp, Artificial Sequence
  synthetic circulating small noncoding RNA (sncRNA) 5' transfer RNA (tRNA) half
agatgccggggatcgaac

SEQ ID NO: 8633 - DNA, 34 bp, Artificial Sequence
  synthetic circulating small noncoding RNA (sncRNA) 5' transfer RNA (tRNA) half
ggcgtccctgggtgggctcgaaccaccaaccttt

SEQ ID NO: 8634 - DNA, 32 bp, Artificial Sequence
  synthetic circulating small noncoding RNA (sncRNA) 5' transfer RNA (tRNA) half
gtcctccgctctaccaactgagctatcgaagg

SEQ ID NO: 8635 - DNA, 38 bp, Artificial Sequence
  synthetic circulating small noncoding RNA (sncRNA) 5' transfer RNA (tRNA) half
ccgctggtgtagtggtatcatgcaagattcccattctt

SEQ ID NO: 8636 - DNA, 29 bp, Artificial Sequence
  synthetic circulating small noncoding RNA (sncRNA) 5' transfer RNA (tRNA) half
aatggttagcactctggactctgaatcca

SEQ ID NO: 8637 - DNA, 11 bp, Artificial Sequence
  synthetic circulating small noncoding RNA (sncRNA) 5' transfer RNA (tRNA) half
ccgggcggaaa

SEQ ID NO: 8638 - DNA, 14 bp, Artificial Sequence
  synthetic circulating small noncoding RNA (sncRNA) 5' transfer RNA (tRNA) half
gccccacgttgggc

SEQ ID NO: 8639 - DNA, 16 bp, Artificial Sequence
  synthetic circulating small noncoding RNA (sncRNA) 5' transfer RNA (tRNA) half
actcggccacgctacc

SEQ ID NO: 8640 - DNA, 23 bp, Artificial Sequence
  synthetic circulating small noncoding RNA (sncRNA) 5' transfer RNA (tRNA) half
gttggccgggaatcgaacccggg

SEQ ID NO: 8641 - DNA, 20 bp, Artificial Sequence
  synthetic circulating small noncoding RNA (sncRNA) 5' transfer RNA (tRNA) half
gtggtagaattctcgcctgc

SEQ ID NO: 8642 - DNA, 26 bp, Artificial Sequence
  synthetic circulating small noncoding RNA (sncRNA) 5' transfer RNA (tRNA) half
tctcgcctgccacgcgggaggcccgg

SEQ ID NO: 8643 - DNA, 20 bp, Artificial Sequence
  synthetic circulating small noncoding RNA (sncRNA) 5' transfer RNA (tRNA) half
cgagtcctgccgcggtcgac

SEQ ID NO: 8644 - DNA, 20 bp, Artificial Sequence
  synthetic circulating small noncoding RNA (sncRNA) 5' transfer RNA (tRNA) half
tagaccgctcggccatcctg

SEQ ID NO: 8645 - DNA, 36 bp, Artificial Sequence; identical to SEQ ID NO: 6
  synthetic circulating small noncoding RNA (sncRNA) 5' transfer RNA (tRNA) half

SEQ ID NO: 8646 - DNA, 31 bp, Artificial Sequence
  synthetic circulating small noncoding RNA (sncRNA) 5' transfer RNA (tRNA) half
aacccgggccgcggcggtgagagcgccgaat

SEQ ID NO: 8647 - DNA, 13 bp, Artificial Sequence
  synthetic circulating small noncoding RNA (sncRNA) 5' transfer RNA (tRNA) half
ccgcgcaggttcg

SEQ ID NO: 8648 - DNA, 31 bp, Artificial Sequence
  synthetic circulating small noncoding RNA (sncRNA) 5' transfer RNA (tRNA) half
aggcggcccgggttcgactcccggtatggga

SEQ ID NO: 8649 - DNA, 33 bp, Artificial Sequence
  synthetic circulating small noncoding RNA (sncRNA) 5' transfer RNA (tRNA) half
ggcgagaattctaccactgaaccaccaatgcag

SEQ ID NO: 8650 - DNA, 14 bp, Artificial Sequence
  synthetic circulating small noncoding RNA (sncRNA) 5' transfer RNA (tRNA) half
atcctgccgactac

SEQ ID NO: 8651 - DNA, 13 bp, Artificial Sequence
  synthetic circulating small noncoding RNA (sncRNA) 5' transfer RNA (tRNA) half
aggccccagcgag

SEQ ID NO: 8652 - DNA, 13 bp, Artificial Sequence
  synthetic circulating small noncoding RNA (sncRNA) 5' transfer RNA (tRNA) half
tggaggcgtgggt

SEQ ID NO: 8653 - DNA, 15 bp, Artificial Sequence
  synthetic circulating small noncoding RNA (sncRNA) 5' transfer RNA (tRNA) half
gagaggtagcgggat

SEQ ID NO: 8654 - DNA, 5 bp, Artificial Sequence
  synthetic circulating small noncoding RNA (sncRNA) 5' transfer RNA (tRNA) half
gcccg

SEQ ID NO: 8655 - DNA, 31 bp, Artificial Sequence
  synthetic circulating small noncoding RNA (sncRNA) 5' transfer RNA (tRNA) half
gtccctgggtgggctcgaaccaccaaccttt

SEQ ID NO: 8656 - DNA, 24 bp, Artificial Sequence
  synthetic circulating small noncoding RNA (sncRNA) 5' transfer RNA (tRNA) half
tggttaggattcggcgctctcacc

SEQ ID NO: 8657 - DNA, 18 bp, Artificial Sequence
  synthetic circulating small noncoding RNA (sncRNA) 5' transfer RNA (tRNA) half
gaacctacaatcttctga

SEQ ID NO: 8658 - DNA, 21 bp, Artificial Sequence
  synthetic circulating small noncoding RNA (sncRNA) 5' transfer RNA (tRNA) half
tgtaatggttagcactctgga

SEQ ID NO: 8659 - DNA, 13 bp, Artificial Sequence
  synthetic circulating small noncoding RNA (sncRNA) 5' transfer RNA (tRNA) half
taccgggagtcga

SEQ ID NO: 8660 - DNA, 22 bp, Artificial Sequence
  synthetic circulating small noncoding RNA (sncRNA) 5' transfer RNA (tRNA) half
cccggacgagcccaagcatttt

SEQ ID NO: 8661 - DNA, 21 bp, Artificial Sequence
  synthetic circulating small noncoding RNA (sncRNA) 5' transfer RNA (tRNA) half
aaaaactgggctcgtccggga

SEQ ID NO: 8662 - DNA, 20 bp, Artificial Sequence
  synthetic circulating small noncoding RNA (sncRNA) 5' transfer RNA (tRNA) half
tgaactcggatcgctggatt

SEQ ID NO: 8663 - DNA, 28 bp, Artificial Sequence
  synthetic circulating small noncoding RNA (sncRNA) 5' transfer RNA (tRNA) half
tctcgcctgccacgcgggaggcccgggt

SEQ ID NO: 8664 - DNA, 10 bp, Artificial Sequence
  synthetic circulating small noncoding RNA (sncRNA) 5' transfer RNA (tRNA) half
ggcggaaaca

SEQ ID NO: 8665 - DNA, 13 bp, Artificial Sequence
  synthetic circulating small noncoding RNA (sncRNA) 5' transfer RNA (tRNA) half
ggcgtccctgggt

SEQ ID NO: 8666 - DNA, 26 bp, Artificial Sequence
  synthetic circulating small noncoding RNA (sncRNA) 5' transfer RNA (tRNA) half
gtttctgtagtgtagtggttatcacg

SEQ ID NO: 8667 - DNA, 25 bp, Artificial Sequence
  synthetic circulating small noncoding RNA (sncRNA) 5' transfer RNA (tRNA) half
gctctaccgactgagctagccgggc

SEQ ID NO: 8668 - DNA, 31 bp, Artificial Sequence
  synthetic circulating small noncoding RNA (sncRNA) 5' transfer RNA (tRNA) half
cgactccgccgggactcgaacccggaacctt

SEQ ID NO: 8669 - DNA, 25 bp, Artificial Sequence
  synthetic circulating small noncoding RNA (sncRNA) 5' transfer RNA (tRNA) half
cgatccatcgacctctgggttatgg

SEQ ID NO: 8670 - DNA, 37 bp, Artificial Sequence
  synthetic circulating small noncoding RNA (sncRNA) 5' transfer RNA (tRNA) half
gttagcactctggactctgaatccagcgatccgagtt

SEQ ID NO: 8671 - DNA, 31 bp, Artificial Sequence
  synthetic circulating small noncoding RNA (sncRNA) 5' transfer RNA (tRNA) half
tccaatgcgctatccattgcgccacagagcc

SEQ ID NO: 8672 - DNA, 24 bp, Artificial Sequence
  synthetic circulating small noncoding RNA (sncRNA) 5' transfer RNA (tRNA) half
cgacgaggatgggattcgaaccca

SEQ ID NO: 8673 - DNA, 14 bp, Artificial Sequence
  synthetic circulating small noncoding RNA (sncRNA) 5' transfer RNA (tRNA) half
cgaacccgcgacct

SEQ ID NO: 8674 - DNA, 14 bp, Artificial Sequence
  synthetic circulating small noncoding RNA (sncRNA) 5' transfer RNA (tRNA) half
acccggatttgaac

SEQ ID NO: 8675 - DNA, 15 bp, Artificial Sequence
  synthetic circulating small noncoding RNA (sncRNA) 5' transfer RNA (tRNA) half
cagcgacctaaggat

SEQ ID NO: 8676 - DNA, 23 bp, Artificial Sequence
  synthetic circulating small noncoding RNA (sncRNA) 5' transfer RNA (tRNA) half
aactcgcgacccctggtttacaa

SEQ ID NO: 8677 - DNA, 24 bp, Artificial Sequence
  synthetic circulating small noncoding RNA (sncRNA) 5' transfer RNA (tRNA) half
tttgggtccgagaggtcccgggtt

SEQ ID NO: 8678 - DNA, 17 bp, Artificial Sequence
  synthetic circulating small noncoding RNA (sncRNA) 5' transfer RNA (tRNA) half
aacccgggacctctcgc

SEQ ID NO: 8679 - DNA, 18 bp, Artificial Sequence
  synthetic circulating small noncoding RNA (sncRNA) 5' transfer RNA (tRNA) half
aaaccaggaatcctaacc

SEQ ID NO: 8680 - DNA, 35 bp, Artificial Sequence
  synthetic circulating small noncoding RNA (sncRNA) 5' transfer RNA (tRNA) half
gcgcccaacgtggggctcgaacccacgaccctgag

SEQ ID NO: 8681 - DNA, 33 bp, Artificial Sequence
  synthetic circulating small noncoding RNA (sncRNA) 5' transfer RNA (tRNA) half
cccggatgatcctcagtggtctggggtgcaggc

SEQ ID NO: 8682 - DNA, 33 bp, Artificial Sequence
  synthetic circulating small noncoding RNA (sncRNA) 5' transfer RNA (tRNA) half
ggggattgtgggttcgagtcccatctgggtcgc

SEQ ID NO: 8683 - DNA, 27 bp, Artificial Sequence
  synthetic circulating small noncoding RNA (sncRNA) 5' transfer RNA (tRNA) half
tggcccgtacggggatcgaacccgcga

SEQ ID NO: 8684 - DNA, 37 bp, Artificial Sequence
  synthetic circulating small noncoding RNA (sncRNA) 5' transfer RNA (tRNA) half
gcgaccacgaagggactcgaacccccaatcttctgat

SEQ ID NO: 8685 - DNA, 23 bp, Artificial Sequence
  synthetic circulating small noncoding RNA (sncRNA) 5' transfer RNA (tRNA) half
ccgagccagccaggagtcgaacc

SEQ ID NO: 8686 - DNA, 36 bp, Artificial Sequence
  synthetic circulating small noncoding RNA (sncRNA) 5' transfer RNA (tRNA) half
atctaaaggtccctggttcgatcccgggtttcggca

SEQ ID NO: 8687 - DNA, 12 bp, Artificial Sequence
  synthetic circulating small noncoding RNA (sncRNA) 5' transfer RNA (tRNA) half
cggtagagcatc

SEQ ID NO: 8688 - DNA, 19 bp, Artificial Sequence
  synthetic circulating small noncoding RNA (sncRNA) 5' transfer RNA (tRNA) half
cgccaaatcctaaccacta

SEQ ID NO: 8689 - DNA, 15 bp, Artificial Sequence
  synthetic circulating small noncoding RNA (sncRNA) 5' transfer RNA (tRNA) half
agccggactcgaacc

SEQ ID NO: 8690 - DNA, 16 bp, Artificial Sequence
  synthetic circulating small noncoding RNA (sncRNA) 5' transfer RNA (tRNA) half
ccctgaccgggaatcg

SEQ ID NO: 8691 - DNA, 35 bp, Artificial Sequence
  synthetic circulating small noncoding RNA (sncRNA) 5' transfer RNA (tRNA) half
ggttccttcgagccggattcgaaccagcgacctaa

SEQ ID NO: 8692 - DNA, 16 bp, Artificial Sequence
  synthetic circulating small noncoding RNA (sncRNA) 5' transfer RNA (tRNA) half
tggtagagcgcgcgct

SEQ ID NO: 8693 - DNA, 34 bp, Artificial Sequence
  synthetic circulating small noncoding RNA (sncRNA) 5' transfer RNA (tRNA) half
aaaaccaggaatcctaaccgctagaccatgtggg

SEQ ID NO: 8694 - DNA, 22 bp, Artificial Sequence
  synthetic circulating small noncoding RNA (sncRNA) 5' transfer RNA (tRNA) half
gcctccccgtcggggaatcgaa

SEQ ID NO: 8695 - DNA, 16 bp, Artificial Sequence
  synthetic circulating small noncoding RNA (sncRNA) 5' transfer RNA (tRNA) half
taatggataaggcatc

SEQ ID NO: 8696 - DNA, 14 bp, Artificial Sequence
  synthetic circulating small noncoding RNA (sncRNA) 5' transfer RNA (tRNA) half
gtgcattggccggg

SEQ ID NO: 8697 - DNA, 30 bp, Artificial Sequence
  synthetic circulating small noncoding RNA (sncRNA) 5' transfer RNA (tRNA) half
aaaccaggaatcctaaccgctagaccatat

SEQ ID NO: 8698 - DNA, 20 bp, Artificial Sequence
  synthetic circulating small noncoding RNA (sncRNA) 5' transfer RNA (tRNA) half
agcgagcgctctaccatttg

SEQ ID NO: 8699 - DNA, 16 bp, Artificial Sequence
  synthetic circulating small noncoding RNA (sncRNA) 5' transfer RNA (tRNA) half
atagtggttagtactc

SEQ ID NO: 8700 - DNA, 18 bp, Artificial Sequence
  synthetic circulating small noncoding RNA (sncRNA) 5' transfer RNA (tRNA) half
gataaccactacactacg

SEQ ID NO: 8701 - DNA, 37 bp, Artificial Sequence
  synthetic circulating small noncoding RNA (sncRNA) 5' transfer RNA (tRNA) half
agcctccctggtggtctagtggttaggattcggcgct

SEQ ID NO: 8702 - DNA, 37 bp, Artificial Sequence
  synthetic circulating small noncoding RNA (sncRNA) 5' transfer RNA (tRNA) half
aggcaccgctgggattcgaacccaggatctcctgttt

SEQ ID NO: 8703 - DNA, 17 bp, Artificial Sequence
  synthetic circulating small noncoding RNA (sncRNA) 5' transfer RNA (tRNA) half
cactctggactctgaat

SEQ ID NO: 8704 - DNA, 36 bp, Artificial Sequence
  synthetic circulating small noncoding RNA (sncRNA) 5' transfer RNA (tRNA) half
gccctctctgaggttcgaactcaggaccttcagatt

SEQ ID NO: 8705 - DNA, 31 bp, Artificial Sequence
  synthetic circulating small noncoding RNA (sncRNA) 5' transfer RNA (tRNA) half
accccgacgtgatttgaacacgcaaccttct

SEQ ID NO: 8706 - DNA, 31 bp, Artificial Sequence
  synthetic circulating small noncoding RNA (sncRNA) 5' transfer RNA (tRNA) half
cgagccagccaggagtcgaacctggaatctt

SEQ ID NO: 8707 - DNA, 11 bp, Artificial Sequence
  synthetic circulating small noncoding RNA (sncRNA) 5' transfer RNA (tRNA) half
ttccctgaccg

SEQ ID NO: 8708 - DNA, 20 bp, Artificial Sequence
  synthetic circulating small noncoding RNA (sncRNA) 5' transfer RNA (tRNA) half
agtcaaatgctctacccctg

SEQ ID NO: 8709 - DNA, 20 bp, Artificial Sequence
  synthetic circulating small noncoding RNA (sncRNA) 5' transfer RNA (tRNA) half
ggtgagagcgccgaatccta

SEQ ID NO: 8710 - DNA, 14 bp, Artificial Sequence
  synthetic circulating small noncoding RNA (sncRNA) 5' transfer RNA (tRNA) half
atgcgctatccatt

SEQ ID NO: 8711 - DNA, 33 bp, Artificial Sequence
  synthetic circulating small noncoding RNA (sncRNA) 5' transfer RNA (tRNA) half
tatgaggccccgggttcaatccccggcatctcc

SEQ ID NO: 8712 - DNA, 40 bp, Artificial Sequence
  synthetic circulating small noncoding RNA (sncRNA) 5' transfer RNA (tRNA) half
ggcgtccctgggtgggctcgaaccaccaacctttcggtta

SEQ ID NO: 8713 - DNA, 19 bp, Artificial Sequence
  synthetic circulating small noncoding RNA (sncRNA) 5' transfer RNA (tRNA) half
ctcatgctctaccgactga

SEQ ID NO: 8714 - DNA, 33 bp, Artificial Sequence
  synthetic circulating small noncoding RNA (sncRNA) 5' transfer RNA (tRNA) half
cgccgaatcctagccactagaccaccagggacg

SEQ ID NO: 8715 - DNA, 21 bp, Artificial Sequence
  synthetic circulating small noncoding RNA (sncRNA) 5' transfer RNA (tRNA) half
agttcaaatctcggtgggacc

SEQ ID NO: 8716 - DNA, 39 bp, Artificial Sequence
  synthetic circulating small noncoding RNA (sncRNA) 5' transfer RNA (tRNA) half
cccgggccgcggcggtgagagcgccgaatcctaaccact

SEQ ID NO: 8717 - DNA, 29 bp, Artificial Sequence
  synthetic circulating small noncoding RNA (sncRNA) 5' transfer RNA (tRNA) half
gtccagagtgctaaccattacaccatggg

SEQ ID NO: 8718 - DNA, 20 bp, Artificial Sequence
  synthetic circulating small noncoding RNA (sncRNA) 5' transfer RNA (tRNA) half
tcggatcgctggattcagag

SEQ ID NO: 8719 - DNA, 18 bp, Artificial Sequence
  synthetic circulating small noncoding RNA (sncRNA) 5' transfer RNA (tRNA) half
ctaatggataaggcattg

SEQ ID NO: 8720 - DNA, 35 bp, Artificial Sequence
  synthetic circulating small noncoding RNA (sncRNA) 5' transfer RNA (tRNA) half
gccctctctgaggttcgaactcaggaccttcagat

SEQ ID NO: 8721 - DNA, 11 bp, Artificial Sequence
  synthetic circulating small noncoding RNA (sncRNA) 5' transfer RNA (tRNA) half
ggttcgactcc

SEQ ID NO: 8722 - DNA, 14 bp, Artificial Sequence
  synthetic circulating small noncoding RNA (sncRNA) 5' transfer RNA (tRNA) half
agtcccatgctcta

SEQ ID NO: 8723 - DNA, 36 bp, Artificial Sequence
  synthetic circulating small noncoding RNA (sncRNA) 5' transfer RNA (tRNA) half
tgccccgtgtgaggatcgaactcacgaccttcagat

SEQ ID NO: 8724 - DNA, 27 bp, Artificial Sequence
  synthetic circulating small noncoding RNA (sncRNA) 5' transfer RNA (tRNA) half
gcggcccgggttcgactcccggtgtgg

SEQ ID NO: 8725 - DNA, 18 bp, Artificial Sequence
  synthetic circulating small noncoding RNA (sncRNA) 5' transfer RNA (tRNA) half
ctgaatccagcgatccga

SEQ ID NO: 8726 - DNA, 8 bp, Artificial Sequence
  synthetic circulating small noncoding RNA (sncRNA) 5' transfer RNA (tRNA) half
ccgggcct

SEQ ID NO: 8727 - DNA, 22 bp, Artificial Sequence
  synthetic circulating small noncoding RNA (sncRNA) 5' transfer RNA (tRNA) half
agctggcccgtacggggatcga

SEQ ID NO: 8728 - DNA, 9 bp, Artificial Sequence
  synthetic circulating small noncoding RNA (sncRNA) 5' transfer RNA (tRNA) half
ccgactacg

SEQ ID NO: 8729 - DNA, 41 bp, Artificial Sequence
  synthetic circulating small noncoding RNA (sncRNA) 5' transfer RNA (tRNA) half
tacctccccgtcggggaatcgaaccccggtctcccgcgtga

SEQ ID NO: 8730 - DNA, 21 bp, Artificial Sequence
  synthetic circulating small noncoding RNA (sncRNA) 5' transfer RNA (tRNA) half
ggttcgattcccggccaatgc

SEQ ID NO: 8731 - DNA, 36 bp, Artificial Sequence
  synthetic circulating small noncoding RNA (sncRNA) 5' transfer RNA (tRNA) half
gcccgaacagggacttgaaccctggaccctcagatt

SEQ ID NO: 8732 - DNA, 41 bp, Artificial Sequence
  synthetic circulating small noncoding RNA (sncRNA) 5' transfer RNA (tRNA) half
acccacgaccctgagattaagagtctcatgctctaccgact

SEQ ID NO: 8733 - DNA, 28 bp, Artificial Sequence
  synthetic circulating small noncoding RNA (sncRNA) 5' transfer RNA (tRNA) half
gaagtgggattcgaacccacgcctccat

SEQ ID NO: 8734 - DNA, 20 bp, Artificial Sequence
  synthetic circulating small noncoding RNA (sncRNA) 5' transfer RNA (tRNA) half
cgatccatcgacctctgggt

SEQ ID NO: 8735 - DNA, 30 bp, Artificial Sequence
  synthetic circulating small noncoding RNA (sncRNA) 5' transfer RNA (tRNA) half
catatggtctagcggttaggattcctggtt

SEQ ID NO: 8736 - DNA, 17 bp, Artificial Sequence
  synthetic circulating small noncoding RNA (sncRNA) 5' transfer RNA (tRNA) half
ctaccgactgagctagc

SEQ ID NO: 8737 - DNA, 19 bp, Artificial Sequence
  synthetic circulating small noncoding RNA (sncRNA) 5' transfer RNA (tRNA) half
gacgacgaggatgggattc

SEQ ID NO: 8738 - DNA, 44 bp, Artificial Sequence
  synthetic circulating small noncoding RNA (sncRNA) 5' transfer RNA (tRNA) half
cgtagtcggcaggattcgaacctgcgcggggaaaccccaatgga

SEQ ID NO: 8739 - DNA, 25 bp, Artificial Sequence
  synthetic circulating small noncoding RNA (sncRNA) 5' transfer RNA (tRNA) half
gccgtcacgaacaggattcgaacct

SEQ ID NO: 8740 - DNA, 24 bp, Artificial Sequence
  synthetic circulating small noncoding RNA (sncRNA) 5' transfer RNA (tRNA) half
cgtgatcgtatagtggttagtact

SEQ ID NO: 8741 - DNA, 26 bp, Artificial Sequence
  synthetic circulating small noncoding RNA (sncRNA) 5' transfer RNA (tRNA) half
agacgacgaggatgggattcgaaccc

SEQ ID NO: 8742 - DNA, 31 bp, Artificial Sequence
  synthetic circulating small noncoding RNA (sncRNA) 5' transfer RNA (tRNA) half
aactcggatcgctggattcagagtccagagt

SEQ ID NO: 8743 - DNA, 20 bp, Artificial Sequence
  synthetic circulating small noncoding RNA (sncRNA) 5' transfer RNA (tRNA) half
gggttatgggcccagcacgc

SEQ ID NO: 8744 - DNA, 17 bp, Artificial Sequence
  synthetic circulating small noncoding RNA (sncRNA) 5' transfer RNA (tRNA) half
gaacccgggcctcccgc

SEQ ID NO: 8745 - DNA, 32 bp, Artificial Sequence
  synthetic circulating small noncoding RNA (sncRNA) 5' transfer RNA (tRNA) half
gtcgagccagccaggagtcgaacctagaatct

SEQ ID NO: 8746 - DNA, 34 bp, Artificial Sequence
  synthetic circulating small noncoding RNA (sncRNA) 5' transfer RNA (tRNA) half
tagcgcccgaacagggacttgaaccctggaccct

SEQ ID NO: 8747 - DNA, 34 bp, Artificial Sequence
  synthetic circulating small noncoding RNA (sncRNA) 5' transfer RNA (tRNA) half
aggcgagaattctaccactgaaccaccaatgcag

SEQ ID NO: 8748 - DNA, 42 bp, Artificial Sequence
  synthetic circulating small noncoding RNA (sncRNA) 5' transfer RNA (tRNA) half
tggattcagagtccagagtgctaaccattacaccatggaacc

SEQ ID NO: 8749 - DNA, 32 bp, Artificial Sequence
  synthetic circulating small noncoding RNA (sncRNA) 5' transfer RNA (tRNA) half
gccgcggcggtgagagcgccgaatcctaacca

SEQ ID NO: 8750 - DNA, 22 bp, Artificial Sequence
  synthetic circulating small noncoding RNA (sncRNA) 5' transfer RNA (tRNA) half
tctccccgtcggggaatcgaac

SEQ ID NO: 8751 - DNA, 25 bp, Artificial Sequence
  synthetic circulating small noncoding RNA (sncRNA) 5' transfer RNA (tRNA) half
gaggtcccaccgagatttgaactcg

SEQ ID NO: 8752 - DNA, 27 bp, Artificial Sequence
  synthetic circulating small noncoding RNA (sncRNA) 5' transfer RNA (tRNA) half
aaccccggtctcccgcgtgacaggcgg

SEQ ID NO: 8753 - DNA, 30 bp, Artificial Sequence
  synthetic circulating small noncoding RNA (sncRNA) 5' transfer RNA (tRNA) half
aaggtcgcgggttcgatccccgtacgggcc

SEQ ID NO: 8754 - DNA, 40 bp, Artificial Sequence
  synthetic circulating small noncoding RNA (sncRNA) 5' transfer RNA (tRNA) half
gcccggctagctcagtcggtagagcatgagactcttaatc

SEQ ID NO: 8755 - DNA, 18 bp, Artificial Sequence
  synthetic circulating small noncoding RNA (sncRNA) 5' transfer RNA (tRNA) half
aatggttagcactctgga

SEQ ID NO: 8756 - DNA, 16 bp, Artificial Sequence
  synthetic circulating small noncoding RNA (sncRNA) 5' transfer RNA (tRNA) half
cagagtactaaccact

SEQ ID NO: 8757 - DNA, 33 bp, Artificial Sequence
  synthetic circulating small noncoding RNA (sncRNA) 5' transfer RNA (tRNA) half
cgggagaccggggttcgattccccgacggggag

SEQ ID NO: 8758 - DNA, 15 bp, Artificial Sequence
  synthetic circulating small noncoding RNA (sncRNA) 5' transfer RNA (tRNA) half
acgcagaaggtcctg

SEQ ID NO: 8759 - DNA, 11 bp, Artificial Sequence
  synthetic circulating small noncoding RNA (sncRNA) 5' transfer RNA (tRNA) half
cgtccctgggt

SEQ ID NO: 8760 - DNA, 36 bp, Artificial Sequence
  synthetic circulating small noncoding RNA (sncRNA) 5' transfer RNA (tRNA) half
atcagaagattccaggttcgactcctggctggctcg

SEQ ID NO: 8761 - DNA, 29 bp, Artificial Sequence
  synthetic circulating small noncoding RNA (sncRNA) 5' transfer RNA (tRNA) half
agtctgatgctctaccgactgagctatcc

SEQ ID NO: 8762 - DNA, 35 bp, Artificial Sequence
  synthetic circulating small noncoding RNA (sncRNA) 5' transfer RNA (tRNA) half
cgccgaatcctaaccactagaccaccagggaagag

SEQ ID NO: 8763 - DNA, 20 bp, Artificial Sequence
  synthetic circulating small noncoding RNA (sncRNA) 5' transfer RNA (tRNA) half
gtggcaggcgagaattctac

SEQ ID NO: 8764 - DNA, 21 bp, Artificial Sequence
  synthetic circulating small noncoding RNA (sncRNA) 5' transfer RNA (tRNA) half
gaattctaccactgaaccacc

SEQ ID NO: 8765 - DNA, 27 bp, Artificial Sequence
  synthetic circulating small noncoding RNA (sncRNA) 5' transfer RNA (tRNA) half
ttctcgcctgccacgcgggaggcccgg

SEQ ID NO: 8766 - DNA, 20 bp, Artificial Sequence
  synthetic circulating small noncoding RNA (sncRNA) 5' transfer RNA (tRNA) half
ccgagcggtctaaggcgctg

SEQ ID NO: 8767 - DNA, 12 bp, Artificial Sequence
  synthetic circulating small noncoding RNA (sncRNA) 5' transfer RNA (tRNA) half
gttccaccgaga

SEQ ID NO: 8768 - DNA, 18 bp, Artificial Sequence
  synthetic circulating small noncoding RNA (sncRNA) 5' transfer RNA (tRNA) half
gagtctcatgctctaccg

SEQ ID NO: 8769 - DNA, 27 bp, Artificial Sequence
  synthetic circulating small noncoding RNA (sncRNA) 5' transfer RNA (tRNA) half
atgggtggttcagtggtagaattctcg

SEQ ID NO: 8770 - DNA, 22 bp, Artificial Sequence
  synthetic circulating small noncoding RNA (sncRNA) 5' transfer RNA (tRNA) half
gtcaggatggccgagtggtcta

SEQ ID NO: 8771 - DNA, 25 bp, Artificial Sequence
  synthetic circulating small noncoding RNA (sncRNA) 5' transfer RNA (tRNA) half
acctgtgcggggaaaccccattgga

SEQ ID NO: 8772 - DNA, 16 bp, Artificial Sequence
  synthetic circulating small noncoding RNA (sncRNA) 5' transfer RNA (tRNA) half
actgagctatcgaagg

SEQ ID NO: 8773 - DNA, 13 bp, Artificial Sequence
  synthetic circulating small noncoding RNA (sncRNA) 5' transfer RNA (tRNA) half
gaagcgagaatca

SEQ ID NO: 8774 - DNA, 21 bp, Artificial Sequence
  synthetic circulating small noncoding RNA (sncRNA) 5' transfer RNA (tRNA) half
acccgggacctctcgcaccca

SEQ ID NO: 8775 - DNA, 22 bp, Artificial Sequence
  synthetic circulating small noncoding RNA (sncRNA) 5' transfer RNA (tRNA) half
tcaatccccggcatctccaact

SEQ ID NO: 8776 - DNA, 27 bp, Artificial Sequence
  synthetic circulating small noncoding RNA (sncRNA) 5' transfer RNA (tRNA) half
agtactaaccactatacgatcacggcg

SEQ ID NO: 8777 - DNA, 20 bp, Artificial Sequence
  synthetic circulating small noncoding RNA (sncRNA) 5' transfer RNA (tRNA) half
gttcaagtccctgttcgggc

SEQ ID NO: 8778 - DNA, 31 bp, Artificial Sequence
  synthetic circulating small noncoding RNA (sncRNA) 5' transfer RNA (tRNA) half
agattgcaggttcgagtcctgccgcggtcga

SEQ ID NO: 8779 - DNA, 12 bp, Artificial Sequence
  synthetic circulating small noncoding RNA (sncRNA) 5' transfer RNA (tRNA) half
cgagctaccagg

SEQ ID NO: 8780 - DNA, 18 bp, Artificial Sequence
  synthetic circulating small noncoding RNA (sncRNA) 5' transfer RNA (tRNA) half
atccagcgatccgagttc

SEQ ID NO: 8781 - DNA, 27 bp, Artificial Sequence
  synthetic circulating small noncoding RNA (sncRNA) 5' transfer RNA (tRNA) half
cgggatcgatgcccgcatcctccactt

SEQ ID NO: 8782 - DNA, 20 bp, Artificial Sequence
  synthetic circulating small noncoding RNA (sncRNA) 5' transfer RNA (tRNA) half
gcccgtacggggatcgaacc

SEQ ID NO: 8783 - DNA, 19 bp, Artificial Sequence
  synthetic circulating small noncoding RNA (sncRNA) 5' transfer RNA (tRNA) half
tcaaatctcggtggaacct

SEQ ID NO: 8784 - DNA, 17 bp, Artificial Sequence
  synthetic circulating small noncoding RNA (sncRNA) 5' transfer RNA (tRNA) half
agcggttaggattcctg

SEQ ID NO: 8785 - DNA, 15 bp, Artificial Sequence
  synthetic circulating small noncoding RNA (sncRNA) 5' transfer RNA (tRNA) half
ttagcactctggact

SEQ ID NO: 8786 - DNA, 32 bp, Artificial Sequence
  synthetic circulating small noncoding RNA (sncRNA) 5' transfer RNA (tRNA) half
gagcattggtggttcagtggtagaattctcgc

SEQ ID NO: 8787 - DNA, 31 bp, Artificial Sequence
  synthetic circulating small noncoding RNA (sncRNA) 5' transfer RNA (tRNA) half
tccaacgccttaaccactcggccaccgtgac

SEQ ID NO: 8788 - DNA, 20 bp, Artificial Sequence
  synthetic circulating small noncoding RNA (sncRNA) 5' transfer RNA (tRNA) half
tcctgccgtgactcggattc

SEQ ID NO: 8789 - DNA, 23 bp, Artificial Sequence
  synthetic circulating small noncoding RNA (sncRNA) 5' transfer RNA (tRNA) half
gggagtcgaacccgggccgcctg

SEQ ID NO: 8790 - DNA, 14 bp, Artificial Sequence
  synthetic circulating small noncoding RNA (sncRNA) 5' transfer RNA (tRNA) half
cagcgccttagacc

SEQ ID NO: 8791 - DNA, 12 bp, Artificial Sequence
  synthetic circulating small noncoding RNA (sncRNA) 5' transfer RNA (tRNA) half
aaggtccccggt

SEQ ID NO: 8792 - DNA, 14 bp, Artificial Sequence
  synthetic circulating small noncoding RNA (sncRNA) 5' transfer RNA (tRNA) half
gattaagagtctca

SEQ ID NO: 8793 - DNA, 9 bp, Artificial Sequence
  synthetic circulating small noncoding RNA (sncRNA) 5' transfer RNA (tRNA) half
cggaccagt

SEQ ID NO: 8794 - DNA, 15 bp, Artificial Sequence
  synthetic circulating small noncoding RNA (sncRNA) 5' transfer RNA (tRNA) half
ttccttcgagccgga

SEQ ID NO: 8795 - DNA, 21 bp, Artificial Sequence
  synthetic circulating small noncoding RNA (sncRNA) 5' transfer RNA (tRNA) half
gggaatcgaacccgggccgcg

SEQ ID NO: 8796 - DNA, 29 bp, Artificial Sequence
  synthetic circulating small noncoding RNA (sncRNA) 5' transfer RNA (tRNA) half
tgaggatcgaactcacgaccttcagatta

SEQ ID NO: 8797 - DNA, 19 bp, Artificial Sequence
  synthetic circulating small noncoding RNA (sncRNA) 5' transfer RNA (tRNA) half
gttcaaatcccggacgagc

SEQ ID NO: 8798 - DNA, 23 bp, Artificial Sequence
  synthetic circulating small noncoding RNA (sncRNA) 5' transfer RNA (tRNA) half
tggtgtagtggtatcatgcaaga

SEQ ID NO: 8799 - DNA, 12 bp, Artificial Sequence
  synthetic circulating small noncoding RNA (sncRNA) 5' transfer RNA (tRNA) half
tccccggttcga

SEQ ID NO: 8800 - DNA, 16 bp, Artificial Sequence
  synthetic circulating small noncoding RNA (sncRNA) 5' transfer RNA (tRNA) half
ctcagtcggtagagca

SEQ ID NO: 8801 - DNA, 21 bp, Artificial Sequence
  synthetic circulating small noncoding RNA (sncRNA) 5' transfer RNA (tRNA) half
caacgcagagtactaaccact

SEQ ID NO: 8802 - DNA, 39 bp, Artificial Sequence
  synthetic circulating small noncoding RNA (sncRNA) 5' transfer RNA (tRNA) half
gtaaaccgaagatcacgggttcgaaccccgtccgtgcct

SEQ ID NO: 8803 - DNA, 20 bp, Artificial Sequence
  synthetic circulating small noncoding RNA (sncRNA) 5' transfer RNA (tRNA) half
agtccagagtgctaaccatt

SEQ ID NO: 8804 - DNA, 32 bp, Artificial Sequence
  synthetic circulating small noncoding RNA (sncRNA) 5' transfer RNA (tRNA) half
ggtcgctggttcgattccggctcgaaggactt

SEQ ID NO: 8805 - DNA, 20 bp, Artificial Sequence
  synthetic circulating small noncoding RNA (sncRNA) 5' transfer RNA (tRNA) half
agggctcgtccgggatttga

SEQ ID NO: 8806 - DNA, 14 bp, Artificial Sequence
  synthetic circulating small noncoding RNA (sncRNA) 5' transfer RNA (tRNA) half
tcccacttctgaca

SEQ ID NO: 8807 - DNA, 26 bp, Artificial Sequence
  synthetic circulating small noncoding RNA (sncRNA) 5' transfer RNA (tRNA) half
cgagaattctaccactgaaccaccaa

SEQ ID NO: 8808 - DNA, 39 bp, Artificial Sequence
  synthetic circulating small noncoding RNA (sncRNA) 5' transfer RNA (tRNA) half
ggcccagcacgcttccgctgcgccactctgctacccact

SEQ ID NO: 8809 - DNA, 25 bp, Artificial Sequence
  synthetic circulating small noncoding RNA (sncRNA) 5' transfer RNA (tRNA) half
attaagagtcccatgctctaccgac

SEQ ID NO: 8810 - DNA, 25 bp, Artificial Sequence
  synthetic circulating small noncoding RNA (sncRNA) 5' transfer RNA (tRNA) half
attcagagtccagagtgctagccat

SEQ ID NO: 8811 - DNA, 16 bp, Artificial Sequence
  synthetic circulating small noncoding RNA (sncRNA) 5' transfer RNA (tRNA) half
cgagaggtcccgggtt

SEQ ID NO: 8812 - DNA, 18 bp, Artificial Sequence
  synthetic circulating small noncoding RNA (sncRNA) 5' transfer RNA (tRNA) half
aaatcccggacgagccct

SEQ ID NO: 8813 - DNA, 16 bp, Artificial Sequence
  synthetic circulating small noncoding RNA (sncRNA) 5' transfer RNA (tRNA) half
ccagagtgctagccat

SEQ ID NO: 8814 - DNA, 36 bp, Artificial Sequence
  synthetic circulating small noncoding RNA (sncRNA) 5' transfer RNA (tRNA) half
cgggccgcggcggtgagagcgccgaatcctaaccac

SEQ ID NO: 8815 - DNA, 32 bp, Artificial Sequence
  synthetic circulating small noncoding RNA (sncRNA) 5' transfer RNA (tRNA) half
gggccgcctgggtgaaaaccaggaatcctaac

SEQ ID NO: 8816 - DNA, 14 bp, Artificial Sequence
  synthetic circulating small noncoding RNA (sncRNA) 5' transfer RNA (tRNA) half
ccgccgggactcga

SEQ ID NO: 8817 - DNA, 16 bp, Artificial Sequence
  synthetic circulating small noncoding RNA (sncRNA) 5' transfer RNA (tRNA) half
gtcgactctggcggga

SEQ ID NO: 8818 - DNA, 31 bp, Artificial Sequence
  synthetic circulating small noncoding RNA (sncRNA) 5' transfer RNA (tRNA) half
gaactcggatcgctggattcagagtccagag

SEQ ID NO: 8819 - DNA, 14 bp, Artificial Sequence
  synthetic circulating small noncoding RNA (sncRNA) 5' transfer RNA (tRNA) half
cgaaccagggacct

SEQ ID NO: 8820 - DNA, 31 bp, Artificial Sequence
  synthetic circulating small noncoding RNA (sncRNA) 5' transfer RNA (tRNA) half
gtctcatgctctacccactgagctatctggg

SEQ ID NO: 8821 - DNA, 17 bp, Artificial Sequence
  synthetic circulating small noncoding RNA (sncRNA) 5' transfer RNA (tRNA) half
gggcccagcacgcttcc

SEQ ID NO: 8822 - DNA, 31 bp, Artificial Sequence
  synthetic circulating small noncoding RNA (sncRNA) 5' transfer RNA (tRNA) half
tcctcgttagtatagtggtgagtatccccgc

SEQ ID NO: 8823 - DNA, 16 bp, Artificial Sequence
  synthetic circulating small noncoding RNA (sncRNA) 5' transfer RNA (tRNA) half
tccagcgccttagacc

SEQ ID NO: 8824 - DNA, 14 bp, Artificial Sequence
  synthetic circulating small noncoding RNA (sncRNA) 5' transfer RNA (tRNA) half
ggttagcactctgg

SEQ ID NO: 8825 - DNA, 22 bp, Artificial Sequence
  synthetic circulating small noncoding RNA (sncRNA) 5' transfer RNA (tRNA) half
cttagaccgctcggccacgcta

SEQ ID NO: 8826 - DNA, 14 bp, Artificial Sequence
  synthetic circulating small noncoding RNA (sncRNA) 5' transfer RNA (tRNA) half
ttcccacaccggga

SEQ ID NO: 8827 - DNA, 13 bp, Artificial Sequence
  synthetic circulating small noncoding RNA (sncRNA) 5' transfer RNA (tRNA) half
tgccacgcgggag

SEQ ID NO: 8828 - DNA, 18 bp, Artificial Sequence
  synthetic circulating small noncoding RNA (sncRNA) 5' transfer RNA (tRNA) half
ccataccgggagtcgaac

SEQ ID NO: 8829 - DNA, 34 bp, Artificial Sequence
  synthetic circulating small noncoding RNA (sncRNA) 5' transfer RNA (tRNA) half
cagaagattccaggttcgactcctggctggctcg

SEQ ID NO: 8830 - DNA, 12 bp, Artificial Sequence
  synthetic circulating small noncoding RNA (sncRNA) 5' transfer RNA (tRNA) half
gccgaacgcgct

SEQ ID NO: 8831 - DNA, 14 bp, Artificial Sequence
  synthetic circulating small noncoding RNA (sncRNA) 5' transfer RNA (tRNA) half
tccctggtggtcta

SEQ ID NO: 8832 - DNA, 12 bp, Artificial Sequence
  synthetic circulating small noncoding RNA (sncRNA) 5' transfer RNA (tRNA) half
gagctaaccggc

SEQ ID NO: 8833 - DNA, 9 bp, Artificial Sequence
  synthetic circulating small noncoding RNA (sncRNA) 5' transfer RNA (tRNA) half
cgacccggg

SEQ ID NO: 8834 - DNA, 33 bp, Artificial Sequence
  synthetic circulating small noncoding RNA (sncRNA) 5' transfer RNA (tRNA) half
agattgagggttcgagtcccttcgtggtcgaaa

SEQ ID NO: 8835 - DNA, 29 bp, Artificial Sequence
  synthetic circulating small noncoding RNA (sncRNA) 5' transfer RNA (tRNA) half
cgagccagccaggagtcgaacctagaatc

SEQ ID NO: 8836 - DNA, 19 bp, Artificial Sequence
  synthetic circulating small noncoding RNA (sncRNA) 5' transfer RNA (tRNA) half
agtggtatgattctcagtt

SEQ ID NO: 8837 - DNA, 20 bp, Artificial Sequence
  synthetic circulating small noncoding RNA (sncRNA) 5' transfer RNA (tRNA) half
atggtggagatgccggggat

SEQ ID NO: 8838 - DNA, 29 bp, Artificial Sequence
  synthetic circulating small noncoding RNA (sncRNA) 5' transfer RNA (tRNA) half
gagaattctaccactgaaccaccaatgcg

SEQ ID NO: 8839 - DNA, 15 bp, Artificial Sequence
  synthetic circulating small noncoding RNA (sncRNA) 5' transfer RNA (tRNA) half
ctgaccccgacgtga

SEQ ID NO: 8840 - DNA, 14 bp, Artificial Sequence
  synthetic circulating small noncoding RNA (sncRNA) 5' transfer RNA (tRNA) half
tggcgcccaacgtg

SEQ ID NO: 8841 - DNA, 20 bp, Artificial Sequence
  synthetic circulating small noncoding RNA (sncRNA) 5' transfer RNA (tRNA) half
gtggcagcggtgggattcga

SEQ ID NO: 8842 - DNA, 30 bp, Artificial Sequence
  synthetic circulating small noncoding RNA (sncRNA) 5' transfer RNA (tRNA) half
gttccaccgagatttgaactcggatcgctg

SEQ ID NO: 8843 - DNA, 38 bp, Artificial Sequence
  synthetic circulating small noncoding RNA (sncRNA) 5' transfer RNA (tRNA) half
gtgttcccacaccgggagtcgaacccgggccgcctggg

SEQ ID NO: 8844 - DNA, 24 bp, Artificial Sequence
  synthetic circulating small noncoding RNA (sncRNA) 5' transfer RNA (tRNA) half
tatgaccccgacgtgattcgaaca

SEQ ID NO: 8845 - DNA, 33 bp, Artificial Sequence
  synthetic circulating small noncoding RNA (sncRNA) 5' transfer RNA (tRNA) half
gcgagaattctaccactgaaccaccaatgccac

SEQ ID NO: 8846 - DNA, 14 bp, Artificial Sequence
  synthetic circulating small noncoding RNA (sncRNA) 5' transfer RNA (tRNA) half
tgagctataccccc

SEQ ID NO: 8847 - DNA, 18 bp, Artificial Sequence
  synthetic circulating small noncoding RNA (sncRNA) 5' transfer RNA (tRNA) half
tcccggacgagccccact

SEQ ID NO: 8848 - DNA, 17 bp, Artificial Sequence
  synthetic circulating small noncoding RNA (sncRNA) 5' transfer RNA (tRNA) half
ccgggccgcggcggtga

SEQ ID NO: 8849 - DNA, 28 bp, Artificial Sequence
  synthetic circulating small noncoding RNA (sncRNA) 5' transfer RNA (tRNA) half
ttccatagtgtagcggttatcacgtctg

SEQ ID NO: 8850 - DNA, 23 bp, Artificial Sequence
  synthetic circulating small noncoding RNA (sncRNA) 5' transfer RNA (tRNA) half
ttgaaccctggaccctcagatta

SEQ ID NO: 8851 - DNA, 15 bp, Artificial Sequence
  synthetic circulating small noncoding RNA (sncRNA) 5' transfer RNA (tRNA) half
ggaatcctaaccgct

SEQ ID NO: 8852 - DNA, 33 bp, Artificial Sequence
  synthetic circulating small noncoding RNA (sncRNA) 5' transfer RNA (tRNA) half
gattcaaagtccagagtgctaaccattacacca

SEQ ID NO: 8853 - DNA, 36 bp, Artificial Sequence
  synthetic circulating small noncoding RNA (sncRNA) 5' transfer RNA (tRNA) half
acccacgaccctgggattaagagtcccatgctctac

SEQ ID NO: 8854 - DNA, 9 bp, Artificial Sequence
  synthetic circulating small noncoding RNA (sncRNA) 5' transfer RNA (tRNA) half
cgaaccccg

SEQ ID NO: 8855 - DNA, 20 bp, Artificial Sequence
  synthetic circulating small noncoding RNA (sncRNA) 5' transfer RNA (tRNA) half
caatgcagagtactaaccac

SEQ ID NO: 8856 - DNA, 16 bp, Artificial Sequence
  synthetic circulating small noncoding RNA (sncRNA) 5' transfer RNA (tRNA) half
ttgaccccgacgtgac

SEQ ID NO: 8857 - DNA, 27 bp, Artificial Sequence
  synthetic circulating small noncoding RNA (sncRNA) 5' transfer RNA (tRNA) half
atgtgataaccactacactacggaaac

SEQ ID NO: 8858 - DNA, 31 bp, Artificial Sequence
  synthetic circulating small noncoding RNA (sncRNA) 5' transfer RNA (tRNA) half
agcggctcgttggtctaggggtatgattctc

SEQ ID NO: 8859 - DNA, 20 bp, Artificial Sequence
  synthetic circulating small noncoding RNA (sncRNA) 5' transfer RNA (tRNA) half
ccacaccgggagtcgaaccc

SEQ ID NO: 8860 - DNA, 37 bp, Artificial Sequence
  synthetic circulating small noncoding RNA (sncRNA) 5' transfer RNA (tRNA) half
gcgactctggtgggactcgaacccacaacctttgaat

SEQ ID NO: 8861 - DNA, 25 bp, Artificial Sequence
  synthetic circulating small noncoding RNA (sncRNA) 5' transfer RNA (tRNA) half
ccaggaatcctaaccgctagaccat

SEQ ID NO: 8862 - DNA, 27 bp, Artificial Sequence
  synthetic circulating small noncoding RNA (sncRNA) 5' transfer RNA (tRNA) half
gccgctggtgtagtggtatcatgcaag

SEQ ID NO: 8863 - DNA, 26 bp, Artificial Sequence
  synthetic circulating small noncoding RNA (sncRNA) 5' transfer RNA (tRNA) half
atggtgtaatggttagcactctggac

SEQ ID NO: 8864 - DNA, 16 bp, Artificial Sequence
  synthetic circulating small noncoding RNA (sncRNA) 5' transfer RNA (tRNA) half
gaagagactggagcct

SEQ ID NO: 8865 - DNA, 29 bp, Artificial Sequence
  synthetic circulating small noncoding RNA (sncRNA) 5' transfer RNA (tRNA) half
cgtgatcgtataggggttagtactctgcg

SEQ ID NO: 8866 - DNA, 15 bp, Artificial Sequence
  synthetic circulating small noncoding RNA (sncRNA) 5' transfer RNA (tRNA) half
attcccgggcggcgc

SEQ ID NO: 8867 - DNA, 34 bp, Artificial Sequence
  synthetic circulating small noncoding RNA (sncRNA) 5' transfer RNA (tRNA) half
cgggagaccggggttcgattccccgacggggagt

SEQ ID NO: 8868 - DNA, 41 bp, Artificial Sequence
  synthetic circulating small noncoding RNA (sncRNA) 5' transfer RNA (tRNA) half
gttgccccctctgaggttcgaactcaggaccttcagattat

SEQ ID NO: 8869 - DNA, 12 bp, Artificial Sequence
  synthetic circulating small noncoding RNA (sncRNA) 5' transfer RNA (tRNA) half
gggcccagcacg

SEQ ID NO: 8870 - DNA, 16 bp, Artificial Sequence
  synthetic circulating small noncoding RNA (sncRNA) 5' transfer RNA (tRNA) half
tcggtagagcatcaga

SEQ ID NO: 8871 - DNA, 25 bp, Artificial Sequence
  synthetic circulating small noncoding RNA (sncRNA) 5' transfer RNA (tRNA) half
gccttaaccactcggccatcacagc

SEQ ID NO: 8872 - DNA, 30 bp, Artificial Sequence
  synthetic circulating small noncoding RNA (sncRNA) 5' transfer RNA (tRNA) half
aaggtccccggttcgaaaccgggcggaaac

SEQ ID NO: 8873 - DNA, 18 bp, Artificial Sequence
  synthetic circulating small noncoding RNA (sncRNA) 5' transfer RNA (tRNA) half
gccttagaccgctcggcc

SEQ ID NO: 8874 - DNA, 22 bp, Artificial Sequence
  synthetic circulating small noncoding RNA (sncRNA) 5' transfer RNA (tRNA) half
agtccaatgcgctatccattgc

SEQ ID NO: 8875 - DNA, 12 bp, Artificial Sequence
  synthetic circulating small noncoding RNA (sncRNA) 5' transfer RNA (tRNA) half
cccggtcaggga

SEQ ID NO: 8876 - DNA, 32 bp, Artificial Sequence
  synthetic circulating small noncoding RNA (sncRNA) 5' transfer RNA (tRNA) half
ggtcccaccgagatttgaactcggatcgctgg

SEQ ID NO: 8877 - DNA, 24 bp, Artificial Sequence
  synthetic circulating small noncoding RNA (sncRNA) 5' transfer RNA (tRNA) half
ggttatgggcccagcacgcttccg

SEQ ID NO: 8878 - DNA, 37 bp, Artificial Sequence
  synthetic circulating small noncoding RNA (sncRNA) 5' transfer RNA (tRNA) half
agcctccccgtcggggaatcgaaccccggtctcccgc

SEQ ID NO: 8879 - DNA, 37 bp, Artificial Sequence
  synthetic circulating small noncoding RNA (sncRNA) 5' transfer RNA (tRNA) half
gggtgcgagaggtcccgggttcaaatcccggacgagc

SEQ ID NO: 8880 - DNA, 20 bp, Artificial Sequence
  synthetic circulating small noncoding RNA (sncRNA) 5' transfer RNA (tRNA) half
aactcgcgacccctggttta

SEQ ID NO: 8881 - DNA, 13 bp, Artificial Sequence
  synthetic circulating small noncoding RNA (sncRNA) 5' transfer RNA (tRNA) half
atactaacgagga

SEQ ID NO: 8882 - DNA, 22 bp, Artificial Sequence
  synthetic circulating small noncoding RNA (sncRNA) 5' transfer RNA (tRNA) half
gcggcccgggttcgattcccgg

SEQ ID NO: 8883 - DNA, 36 bp, Artificial Sequence
  synthetic circulating small noncoding RNA (sncRNA) 5' transfer RNA (tRNA) half
agtaaccacgaagggattcgaaccctcaatcttctg

SEQ ID NO: 8884 - DNA, 27 bp, Artificial Sequence
  synthetic circulating small noncoding RNA (sncRNA) 5' transfer RNA (tRNA) half
aaggtccccggttcgaaaccgggcgga

SEQ ID NO: 8885 - DNA, 42 bp, Artificial Sequence
  synthetic circulating small noncoding RNA (sncRNA) 5' transfer RNA (tRNA) half
acccacgaccctgagattaagagtctcatgctctaccgactg

SEQ ID NO: 8886 - DNA, 18 bp, Artificial Sequence
  synthetic circulating small noncoding RNA (sncRNA) 5' transfer RNA (tRNA) half
caggcgagaattctacca

SEQ ID NO: 8887 - DNA, 14 bp, Artificial Sequence
  synthetic circulating small noncoding RNA (sncRNA) 5' transfer RNA (tRNA) half
aacccaggatctcc

SEQ ID NO: 8888 - DNA, 24 bp, Artificial Sequence
  synthetic circulating small noncoding RNA (sncRNA) 5' transfer RNA (tRNA) half
tggagggggcacccggatttgaac

SEQ ID NO: 8889 - DNA, 15 bp, Artificial Sequence
  synthetic circulating small noncoding RNA (sncRNA) 5' transfer RNA (tRNA) half
cgggccgcggcggtg

SEQ ID NO: 8890 - DNA, 9 bp, Artificial Sequence
  synthetic circulating small noncoding RNA (sncRNA) 5' transfer RNA (tRNA) half
ggccccggg

SEQ ID NO: 8891 - DNA, 22 bp, Artificial Sequence
  synthetic circulating small noncoding RNA (sncRNA) 5' transfer RNA (tRNA) half
tcgatcctcacctggagcactt

SEQ ID NO: 8892 - DNA, 17 bp, Artificial Sequence
  synthetic circulating small noncoding RNA (sncRNA) 5' transfer RNA (tRNA) half
gaactcgcgacccctgg

SEQ ID NO: 8893 - DNA, 22 bp, Artificial Sequence
  synthetic circulating small noncoding RNA (sncRNA) 5' transfer RNA (tRNA) half
ggatggccgagcggtctaaggc

SEQ ID NO: 8894 - DNA, 17 bp, Artificial Sequence
  synthetic circulating small noncoding RNA (sncRNA) 5' transfer RNA (tRNA) half
gcctccccgtcggggaa

SEQ ID NO: 8895 - DNA, 18 bp, Artificial Sequence
  synthetic circulating small noncoding RNA (sncRNA) 5' transfer RNA (tRNA) half
tcgagtcccatctgggtc

SEQ ID NO: 8896 - DNA, 18 bp, Artificial Sequence
  synthetic circulating small noncoding RNA (sncRNA) 5' transfer RNA (tRNA) half
ctagctcagtcggtagag

SEQ ID NO: 8897 - DNA, 33 bp, Artificial Sequence
  synthetic circulating small noncoding RNA (sncRNA) 5' transfer RNA (tRNA) half
ctcgtccgggatttgaacccgggacctctcgca

SEQ ID NO: 8898 - DNA, 22 bp, Artificial Sequence
  synthetic circulating small noncoding RNA (sncRNA) 5' transfer RNA (tRNA) half
ttccctgaccgggaatcgaacc

SEQ ID NO: 8899 - DNA, 22 bp, Artificial Sequence
  synthetic circulating small noncoding RNA (sncRNA) 5' transfer RNA (tRNA) half
tccccgtcggggaattgaaccc

SEQ ID NO: 8900 - DNA, 21 bp, Artificial Sequence
  synthetic circulating small noncoding RNA (sncRNA) 5' transfer RNA (tRNA) half
aggcggggatactaaccacta

SEQ ID NO: 8901 - DNA, 21 bp, Artificial Sequence
  synthetic circulating small noncoding RNA (sncRNA) 5' transfer RNA (tRNA) half
aacccacgcctccaggggaga

SEQ ID NO: 8902 - DNA, 20 bp, Artificial Sequence
  synthetic circulating small noncoding RNA (sncRNA) 5' transfer RNA (tRNA) half
ctctgaatccagcgatccga

SEQ ID NO: 8903 - DNA, 22 bp, Artificial Sequence
  synthetic circulating small noncoding RNA (sncRNA) 5' transfer RNA (tRNA) half
ccgggttcgattcccgggcggc

SEQ ID NO: 8904 - DNA, 13 bp, Artificial Sequence
  synthetic circulating small noncoding RNA (sncRNA) 5' transfer RNA (tRNA) half
tggccgagcggtc

SEQ ID NO: 8905 - DNA, 31 bp, Artificial Sequence
  synthetic circulating small noncoding RNA (sncRNA) 5' transfer RNA (tRNA) half
cccatgctctaccgactgagctagccgggca

SEQ ID NO: 8906 - DNA, 23 bp, Artificial Sequence
  synthetic circulating small noncoding RNA (sncRNA) 5' transfer RNA (tRNA) half
tcgaacccgcgaccttggcgtta

SEQ ID NO: 8907 - DNA, 13 bp, Artificial Sequence
  synthetic circulating small noncoding RNA (sncRNA) 5' transfer RNA (tRNA) half
gaacccggaacct

SEQ ID NO: 8908 - DNA, 29 bp, Artificial Sequence
  synthetic circulating small noncoding RNA (sncRNA) 5' transfer RNA (tRNA) half
gcgagaattctaccattgaactaccaatg

SEQ ID NO: 8909 - DNA, 27 bp, Artificial Sequence
  synthetic circulating small noncoding RNA (sncRNA) 5' transfer RNA (tRNA) half
tccgtagtgtagtggttatcacgttcg

SEQ ID NO: 8910 - DNA, 32 bp, Artificial Sequence
  synthetic circulating small noncoding RNA (sncRNA) 5' transfer RNA (tRNA) half
aggttccaccgagatttgaactcggatcgctg

SEQ ID NO: 8911 - DNA, 33 bp, Artificial Sequence
  synthetic circulating small noncoding RNA (sncRNA) 5' transfer RNA (tRNA) half
ggagaccggggttcgattccccgacggggagtc

SEQ ID NO: 8912 - DNA, 25 bp, Artificial Sequence
  synthetic circulating small noncoding RNA (sncRNA) 5' transfer RNA (tRNA) half
cccacaccgggagtcgaacccgggc

SEQ ID NO: 8913 - DNA, 14 bp, Artificial Sequence
  synthetic circulating small noncoding RNA (sncRNA) 5' transfer RNA (tRNA) half
tcccatatggtcta

SEQ ID NO: 8914 - DNA, 33 bp, Artificial Sequence
  synthetic circulating small noncoding RNA (sncRNA) 5' transfer RNA (tRNA) half
cagcgatccgagttcaaatctcggtggaaccta

SEQ ID NO: 8915 - DNA, 13 bp, Artificial Sequence
  synthetic circulating small noncoding RNA (sncRNA) 5' transfer RNA (tRNA) half
ggcctcccgcgtg

SEQ ID NO: 8916 - DNA, 35 bp, Artificial Sequence
  synthetic circulating small noncoding RNA (sncRNA) 5' transfer RNA (tRNA) half
ccccgtgtgaggatcgaactcacgaccttcagatt

SEQ ID NO: 8917 - DNA, 13 bp, Artificial Sequence
  synthetic circulating small noncoding RNA (sncRNA) 5' transfer RNA (tRNA) half
tgggcccagcacg

SEQ ID NO: 8918 - DNA, 15 bp, Artificial Sequence
  synthetic circulating small noncoding RNA (sncRNA) 5' transfer RNA (tRNA) half
gttagcactctggac

SEQ ID NO: 8919 - DNA, 17 bp, Artificial Sequence
  synthetic circulating small noncoding RNA (sncRNA) 5' transfer RNA (tRNA) half
caatgccttatccatta

SEQ ID NO: 8920 - DNA, 25 bp, Artificial Sequence
  synthetic circulating small noncoding RNA (sncRNA) 5' transfer RNA (tRNA) half
cccggctagctcagtcggtagagca

SEQ ID NO: 8921 - DNA, 32 bp, Artificial Sequence
  synthetic circulating small noncoding RNA (sncRNA) 5' transfer RNA (tRNA) half
gcgagaggtcccgggttcaaatcccggacgag

SEQ ID NO: 8922 - DNA, 32 bp, Artificial Sequence
  synthetic circulating small noncoding RNA (sncRNA) 5' transfer RNA (tRNA) half
gcgacagagtggttcaattccacctttcgggc

SEQ ID NO: 8923 - DNA, 35 bp, Artificial Sequence
  synthetic circulating small noncoding RNA (sncRNA) 5' transfer RNA (tRNA) half
gcgaccacgaagggactcgaacccccaatcttctg

SEQ ID NO: 8924 - DNA, 31 bp, Artificial Sequence
  synthetic circulating small noncoding RNA (sncRNA) 5' transfer RNA (tRNA) half
tgggattaagagtcccatgctctaccgactg

SEQ ID NO: 8925 - DNA, 15 bp, Artificial Sequence
  synthetic circulating small noncoding RNA (sncRNA) 5' transfer RNA (tRNA) half
aggttccaccgagat

SEQ ID NO: 8926 - DNA, 22 bp, Artificial Sequence
  synthetic circulating small noncoding RNA (sncRNA) 5' transfer RNA (tRNA) half
gattcagagtccagagtgctaa

SEQ ID NO: 8927 - DNA, 33 bp, Artificial Sequence
  synthetic circulating small noncoding RNA (sncRNA) 5' transfer RNA (tRNA) half
ccagggattgtgggttcgagtcccatctggggt

SEQ ID NO: 8928 - DNA, 30 bp, Artificial Sequence
  synthetic circulating small noncoding RNA (sncRNA) 5' transfer RNA (tRNA) half
tcagacgcgctaccattgcgccacgaggtc

SEQ ID NO: 8929 - DNA, 31 bp, Artificial Sequence
  synthetic circulating small noncoding RNA (sncRNA) 5' transfer RNA (tRNA) half
gcaggcgagaattctaccactgaaccaccaa

SEQ ID NO: 8930 - DNA, 38 bp, Artificial Sequence
  synthetic circulating small noncoding RNA (sncRNA) 5' transfer RNA (tRNA) half
accccaggtgggactcgaacccacaatccctggcttag

SEQ ID NO: 8931 - DNA, 23 bp, Artificial Sequence
  synthetic circulating small noncoding RNA (sncRNA) 5' transfer RNA (tRNA) half
actttgaatccagcgatccgagt

SEQ ID NO: 8932 - DNA, 21 bp, Artificial Sequence
  synthetic circulating small noncoding RNA (sncRNA) 5' transfer RNA (tRNA) half
ccgggaatcgaacccgggcct

SEQ ID NO: 8933 - DNA, 22 bp, Artificial Sequence
  synthetic circulating small noncoding RNA (sncRNA) 5' transfer RNA (tRNA) half
cttccaagcagttgacccgggt

SEQ ID NO: 8934 - DNA, 14 bp, Artificial Sequence
  synthetic circulating small noncoding RNA (sncRNA) 5' transfer RNA (tRNA) half
cgaacctgcgcggg

SEQ ID NO: 8935 - DNA, 30 bp, Artificial Sequence
  synthetic circulating small noncoding RNA (sncRNA) 5' transfer RNA (tRNA) half
cagcgagcagggttcgaacctgcgcgggga

SEQ ID NO: 8936 - DNA, 20 bp, Artificial Sequence
  synthetic circulating small noncoding RNA (sncRNA) 5' transfer RNA (tRNA) half
aatccagcgatccgagttca

SEQ ID NO: 8937 - DNA, 17 bp, Artificial Sequence
  synthetic circulating small noncoding RNA (sncRNA) 5' transfer RNA (tRNA) half
aatcctaaccgctagac

SEQ ID NO: 8938 - DNA, 30 bp, Artificial Sequence
  synthetic circulating small noncoding RNA (sncRNA) 5' transfer RNA (tRNA) half
gtttccgcccggtttcgaaccggggacctc

SEQ ID NO: 8939 - DNA, 34 bp, Artificial Sequence
  synthetic circulating small noncoding RNA (sncRNA) 5' transfer RNA (tRNA) half
tctcatgctctaccgactgagctagccgggcctt

SEQ ID NO: 8940 - DNA, 20 bp, Artificial Sequence
  synthetic circulating small noncoding RNA (sncRNA) 5' transfer RNA (tRNA) half
tggtgtagtggtatcatgca

SEQ ID NO: 8941 - DNA, 33 bp, Artificial Sequence
  synthetic circulating small noncoding RNA (sncRNA) 5' transfer RNA (tRNA) half
gggccagtggcgcaatggataacgcgtctgact

SEQ ID NO: 8942 - DNA, 31 bp, Artificial Sequence
  synthetic circulating small noncoding RNA (sncRNA) 5' transfer RNA (tRNA) half
aaaggtccccggttcgaaaccgggcggaaac

SEQ ID NO: 8943 - DNA, 11 bp, Artificial Sequence
  synthetic circulating small noncoding RNA (sncRNA) 5' transfer RNA (tRNA) half
atcacgttcgc

SEQ ID NO: 8944 - DNA, 29 bp, Artificial Sequence
  synthetic circulating small noncoding RNA (sncRNA) 5' transfer RNA (tRNA) half
attggtagttcaatggtagaattctcgcc

SEQ ID NO: 8945 - DNA, 33 bp, Artificial Sequence
  synthetic circulating small noncoding RNA (sncRNA) 5' transfer RNA (tRNA) half
gaagattgcaggttcgagtcctgccgcggtcga

SEQ ID NO: 8946 - DNA, 13 bp, Artificial Sequence
  synthetic circulating small noncoding RNA (sncRNA) 5' transfer RNA (tRNA) half
ccgtcggggaatc

SEQ ID NO: 8947 - DNA, 22 bp, Artificial Sequence
  synthetic circulating small noncoding RNA (sncRNA) 5' transfer RNA (tRNA) half
tggagggggcacccggatttga

SEQ ID NO: 8948 - DNA, 36 bp, Artificial Sequence
  synthetic circulating small noncoding RNA (sncRNA) 5' transfer RNA (tRNA) half
agccagggattgtgggttcgagtcccatctggggtg

SEQ ID NO: 8949 - DNA, 10 bp, Artificial Sequence
  synthetic circulating small noncoding RNA (sncRNA) 5' transfer RNA (tRNA) half
ggccccagcg

SEQ ID NO: 8950 - DNA, 13 bp, Artificial Sequence
  synthetic circulating small noncoding RNA (sncRNA) 5' transfer RNA (tRNA) half
tagtactctgcgt

SEQ ID NO: 8951 - DNA, 20 bp, Artificial Sequence
  synthetic circulating small noncoding RNA (sncRNA) 5' transfer RNA (tRNA) half
ccgggccgcggcggtgagag

SEQ ID NO: 8952 - DNA, 15 bp, Artificial Sequence
  synthetic circulating small noncoding RNA (sncRNA) 5' transfer RNA (tRNA) half
aacccacgcccccga

SEQ ID NO: 8953 - DNA, 38 bp, Artificial Sequence
  synthetic circulating small noncoding RNA (sncRNA) 5' transfer RNA (tRNA) half
gagtcccatgctctaccgactgagctagccgggcagat

SEQ ID NO: 8954 - DNA, 33 bp, Artificial Sequence
  synthetic circulating small noncoding RNA (sncRNA) 5' transfer RNA (tRNA) half
gtagaattctcgcctgccacgcgggaggcccgg

SEQ ID NO: 8955 - DNA, 25 bp, Artificial Sequence
  synthetic circulating small noncoding RNA (sncRNA) 5' transfer RNA (tRNA) half
tccattggggtttccccgcgcaggt

SEQ ID NO: 8956 - DNA, 21 bp, Artificial Sequence
  synthetic circulating small noncoding RNA (sncRNA) 5' transfer RNA (tRNA) half
tcaatccccggcatctccaac

SEQ ID NO: 8957 - DNA, 14 bp, Artificial Sequence
  synthetic circulating small noncoding RNA (sncRNA) 5' transfer RNA (tRNA) half
aggttggtggttcg

SEQ ID NO: 8958 - DNA, 13 bp, Artificial Sequence
  synthetic circulating small noncoding RNA (sncRNA) 5' transfer RNA (tRNA) half
tggcaggcgagaa

SEQ ID NO: 8959 - DNA, 32 bp, Artificial Sequence
  synthetic circulating small noncoding RNA (sncRNA) 5' transfer RNA (tRNA) half
accacgaagggactcgaacccccaatcttctg

SEQ ID NO: 8960 - DNA, 21 bp, Artificial Sequence
  synthetic circulating small noncoding RNA (sncRNA) 5' transfer RNA (tRNA) half
gggattcgaacccacgccatc

SEQ ID NO: 8961 - DNA, 25 bp, Artificial Sequence
  synthetic circulating small noncoding RNA (sncRNA) 5' transfer RNA (tRNA) half
aggcgagcgtgatgaccactacact

SEQ ID NO: 8962 - DNA, 12 bp, Artificial Sequence
  synthetic circulating small noncoding RNA (sncRNA) 5' transfer RNA (tRNA) half
cgaacccgcgac

SEQ ID NO: 8963 - DNA, 9 bp, Artificial Sequence
  synthetic circulating small noncoding RNA (sncRNA) 5' transfer RNA (tRNA) half
ttcgggcgc

SEQ ID NO: 8964 - DNA, 23 bp, Artificial Sequence
  synthetic circulating small noncoding RNA (sncRNA) 5' transfer RNA (tRNA) half
ggtcccaccgagatttgaactcg

SEQ ID NO: 8965 - DNA, 21 bp, Artificial Sequence
  synthetic circulating small noncoding RNA (sncRNA) 5' transfer RNA (tRNA) half
gcccggatgatcctcagtggt

SEQ ID NO: 8966 - DNA, 14 bp, Artificial Sequence
  synthetic circulating small noncoding RNA (sncRNA) 5' transfer RNA (tRNA) half
tcccggtatgggaa

SEQ ID NO: 8967 - DNA, 15 bp, Artificial Sequence
  synthetic circulating small noncoding RNA (sncRNA) 5' transfer RNA (tRNA) half
tttgagctaatcccc

SEQ ID NO: 8968 - DNA, 33 bp, Artificial Sequence
  synthetic circulating small noncoding RNA (sncRNA) 5' transfer RNA (tRNA) half
tcaggatggccgagcggtctaaggcgctgcgtt

SEQ ID NO: 8969 - DNA, 32 bp, Artificial Sequence
  synthetic circulating small noncoding RNA (sncRNA) 5' transfer RNA (tRNA) half
gggattgtgggttcgagtcccatctgggtcgc

SEQ ID NO: 8970 - DNA, 19 bp, Artificial Sequence
  synthetic circulating small noncoding RNA (sncRNA) 5' transfer RNA (tRNA) half
gtggagatgccggggatcg

SEQ ID NO: 8971 - DNA, 17 bp, Artificial Sequence
  synthetic circulating small noncoding RNA (sncRNA) 5' transfer RNA (tRNA) half
gtagtgtagtggttatc

SEQ ID NO: 8972 - DNA, 15 bp, Artificial Sequence
  synthetic circulating small noncoding RNA (sncRNA) 5' transfer RNA (tRNA) half
gagccagccaggagt

SEQ ID NO: 8973 - DNA, 11 bp, Artificial Sequence
  synthetic circulating small noncoding RNA (sncRNA) 5' transfer RNA (tRNA) half
gagtcgaacct

SEQ ID NO: 8974 - DNA, 16 bp, Artificial Sequence
  synthetic circulating small noncoding RNA (sncRNA) 5' transfer RNA (tRNA) half
ggtctcccgcgtgaca

SEQ ID NO: 8975 - DNA, 20 bp, Artificial Sequence
  synthetic circulating small noncoding RNA (sncRNA) 5' transfer RNA (tRNA) half
gtcaaatgctctaccactga

SEQ ID NO: 8976 - DNA, 14 bp, Artificial Sequence
  synthetic circulating small noncoding RNA (sncRNA) 5' transfer RNA (tRNA) half
tcggccaccgtgac

SEQ ID NO: 8977 - DNA, 22 bp, Artificial Sequence
  synthetic circulating small noncoding RNA (sncRNA) 5' transfer RNA (tRNA) half
tagcggttatcacgtctgcttt

SEQ ID NO: 8978 - DNA, 21 bp, Artificial Sequence
  synthetic circulating small noncoding RNA (sncRNA) 5' transfer RNA (tRNA) half
ctacccctgagctataccccc

SEQ ID NO: 8979 - DNA, 11 bp, Artificial Sequence
  synthetic circulating small noncoding RNA (sncRNA) 5' transfer RNA (tRNA) half
gcgttggccgg

SEQ ID NO: 8980 - DNA, 14 bp, Artificial Sequence
  synthetic circulating small noncoding RNA (sncRNA) 5' transfer RNA (tRNA) half
tccccgacggggag

SEQ ID NO: 8981 - DNA, 36 bp, Artificial Sequence
  synthetic circulating small noncoding RNA (sncRNA) 5' transfer RNA (tRNA) half
aatctcagggtcgtgggttcgagccccacgttgggc

SEQ ID NO: 8982 - DNA, 18 bp, Artificial Sequence
  synthetic circulating small noncoding RNA (sncRNA) 5' transfer RNA (tRNA) half
gccgcggcggtgagagcg

SEQ ID NO: 8983 - DNA, 32 bp, Artificial Sequence
  synthetic circulating small noncoding RNA (sncRNA) 5' transfer RNA (tRNA) half
aaccacgaagggattcgaaccctcaatcttct

SEQ ID NO: 8984 - DNA, 33 bp, Artificial Sequence
  synthetic circulating small noncoding RNA (sncRNA) 5' transfer RNA (tRNA) half
ccggatgatcctcagtggtctggggtgcaggct

SEQ ID NO: 8985 - DNA, 16 bp, Artificial Sequence
  synthetic circulating small noncoding RNA (sncRNA) 5' transfer RNA (tRNA) half
attccccgacggggag

SEQ ID NO: 8986 - DNA, 41 bp, Artificial Sequence
  synthetic circulating small noncoding RNA (sncRNA) 5' transfer RNA (tRNA) half
tagtggttaggattcggcgctctcaccgccgcggcccgggt

SEQ ID NO: 8987 - DNA, 13 bp, Artificial Sequence
  synthetic circulating small noncoding RNA (sncRNA) 5' transfer RNA (tRNA) half
ccggatgatcctc

SEQ ID NO: 8988 - DNA, 34 bp, Artificial Sequence
  synthetic circulating small noncoding RNA (sncRNA) 5' transfer RNA (tRNA) half
agtctcatgctctaccgactgagctagccgggcc

SEQ ID NO: 8989 - DNA, 18 bp, Artificial Sequence
  synthetic circulating small noncoding RNA (sncRNA) 5' transfer RNA (tRNA) half
tcgaatcccaccgctgcc

SEQ ID NO: 8990 - DNA, 34 bp, Artificial Sequence
  synthetic circulating small noncoding RNA (sncRNA) 5' transfer RNA (tRNA) half
gcttccctgaccgggaatcgaacccgggccgcgg

SEQ ID NO: 8991 - DNA, 32 bp, Artificial Sequence
  synthetic circulating small noncoding RNA (sncRNA) 5' transfer RNA (tRNA) half
ggtgagagcgccgaatcctaaccactagacca

SEQ ID NO: 8992 - DNA, 31 bp, Artificial Sequence
  synthetic circulating small noncoding RNA (sncRNA) 5' transfer RNA (tRNA) half
tctcatgctctacccactgagctatctgggc

SEQ ID NO: 8993 - DNA, 12 bp, Artificial Sequence
  synthetic circulating small noncoding RNA (sncRNA) 5' transfer RNA (tRNA) half
cggatcgctgga

SEQ ID NO: 8994 - DNA, 20 bp, Artificial Sequence
  synthetic circulating small noncoding RNA (sncRNA) 5' transfer RNA (tRNA) half
gtctagtggtatgattctca

SEQ ID NO: 8995 - DNA, 25 bp, Artificial Sequence
  synthetic circulating small noncoding RNA (sncRNA) 5' transfer RNA (tRNA) half
gagcgccgaatcctaaccactagac

SEQ ID NO: 8996 - DNA, 23 bp, Artificial Sequence
  synthetic circulating small noncoding RNA (sncRNA) 5' transfer RNA (tRNA) half
aaagatggagggggcacccggat

SEQ ID NO: 8997 - DNA, 18 bp, Artificial Sequence
  synthetic circulating small noncoding RNA (sncRNA) 5' transfer RNA (tRNA) half
agtcggtagagcatgaga

SEQ ID NO: 8998 - DNA, 25 bp, Artificial Sequence
  synthetic circulating small noncoding RNA (sncRNA) 5' transfer RNA (tRNA) half
ggcccgtacggggatcgaacccgcg

SEQ ID NO: 8999 - DNA, 20 bp, Artificial Sequence
  synthetic circulating small noncoding RNA (sncRNA) 5' transfer RNA (tRNA) half
ggattcagagtccagagtgc

SEQ ID NO: 9000 - DNA, 21 bp, Artificial Sequence
  synthetic circulating small noncoding RNA (sncRNA) 5' transfer RNA (tRNA) half
tggggattgtgggttcgagtc

SEQ ID NO: 9001 - DNA, 20 bp, Artificial Sequence
  synthetic circulating small noncoding RNA (sncRNA) 5' transfer RNA (tRNA) half
gttcgatccccgtacgggcc

SEQ ID NO: 9002 - DNA, 24 bp, Artificial Sequence
  synthetic circulating small noncoding RNA (sncRNA) 5' transfer RNA (tRNA) half
cattggccgggaatcgaacccggg

SEQ ID NO: 9003 - DNA, 37 bp, Artificial Sequence
  synthetic circulating small noncoding RNA (sncRNA) 5' transfer RNA (tRNA) half
taacgccaaggtcgcgggttcgatccccgtacgggcc

SEQ ID NO: 9004 - DNA, 16 bp, Artificial Sequence
  synthetic circulating small noncoding RNA (sncRNA) 5' transfer RNA (tRNA) half
catgctctaccgactg

SEQ ID NO: 9005 - DNA, 11 bp, Artificial Sequence
  synthetic circulating small noncoding RNA (sncRNA) 5' transfer RNA (tRNA) half
cgtcggggaat

SEQ ID NO: 9006 - DNA, 33 bp, Artificial Sequence
  synthetic circulating small noncoding RNA (sncRNA) 5' transfer RNA (tRNA) half
ggcgagaattctaccactgaaccaccaatgcca

SEQ ID NO: 9007 - DNA, 13 bp, Artificial Sequence
  synthetic circulating small noncoding RNA (sncRNA) 5' transfer RNA (tRNA) half
cctggctggctcg

SEQ ID NO: 9008 - DNA, 23 bp, Artificial Sequence
  synthetic circulating small noncoding RNA (sncRNA) 5' transfer RNA (tRNA) half
aaccgggcggaaacattactttt

SEQ ID NO: 9009 - DNA, 11 bp, Artificial Sequence
  synthetic circulating small noncoding RNA (sncRNA) 5' transfer RNA (tRNA) half
cgggagtcgaa

SEQ ID NO: 9010 - DNA, 30 bp, Artificial Sequence
  synthetic circulating small noncoding RNA (sncRNA) 5' transfer RNA (tRNA) half
cggatgatcctcagtggtctggggtgcagg

SEQ ID NO: 9011 - DNA, 31 bp, Artificial Sequence
  synthetic circulating small noncoding RNA (sncRNA) 5' transfer RNA (tRNA) half
ggcgagcgtgatgaccactacactacggaaa

SEQ ID NO: 9012 - DNA, 11 bp, Artificial Sequence
  synthetic circulating small noncoding RNA (sncRNA) 5' transfer RNA (tRNA) half
tcgctggggcc

SEQ ID NO: 9013 - DNA, 16 bp, Artificial Sequence
  synthetic circulating small noncoding RNA (sncRNA) 5' transfer RNA (tRNA) half
ttcagagtccagagtg

SEQ ID NO: 9014 - DNA, 14 bp, Artificial Sequence
  synthetic circulating small noncoding RNA (sncRNA) 5' transfer RNA (tRNA) half
tgagctatcgaagg

SEQ ID NO: 9015 - DNA, 29 bp, Artificial Sequence
  synthetic circulating small noncoding RNA (sncRNA) 5' transfer RNA (tRNA) half
gctccaggtgaggctcgaactcacaacct

SEQ ID NO: 9016 - DNA, 32 bp, Artificial Sequence
  synthetic circulating small noncoding RNA (sncRNA) 5' transfer RNA (tRNA) half
gaactcggatcgctggattcagagtccagagt

SEQ ID NO: 9017 - DNA, 13 bp, Artificial Sequence
  synthetic circulating small noncoding RNA (sncRNA) 5' transfer RNA (tRNA) half
agggctcgtccgg

SEQ ID NO: 9018 - DNA, 7 bp, Artificial Sequence
  synthetic circulating small noncoding RNA (sncRNA) 5' transfer RNA (tRNA) half
cgcgacc

SEQ ID NO: 9019 - DNA, 27 bp, Artificial Sequence
  synthetic circulating small noncoding RNA (sncRNA) 5' transfer RNA (tRNA) half
ggccctatagctcaggggttagagcac

SEQ ID NO: 9020 - DNA, 24 bp, Artificial Sequence
  synthetic circulating small noncoding RNA (sncRNA) 5' transfer RNA (tRNA) half
gacgaggatgggattcgaacccat

SEQ ID NO: 9021 - DNA, 28 bp, Artificial Sequence
  synthetic circulating small noncoding RNA (sncRNA) 5' transfer RNA (tRNA) half
ggtatagctcagtggtagagcatttgac

SEQ ID NO: 9022 - DNA, 22 bp, Artificial Sequence
  synthetic circulating small noncoding RNA (sncRNA) 5' transfer RNA (tRNA) half
ctcggatcgctggattcagagt

SEQ ID NO: 9023 - DNA, 25 bp, Artificial Sequence
  synthetic circulating small noncoding RNA (sncRNA) 5' transfer RNA (tRNA) half
tcgtataggggttagtactctgcgt

SEQ ID NO: 9024 - DNA, 17 bp, Artificial Sequence
  synthetic circulating small noncoding RNA (sncRNA) 5' transfer RNA (tRNA) half
ttcaggtcgcagtctcc

SEQ ID NO: 9025 - DNA, 15 bp, Artificial Sequence
  synthetic circulating small noncoding RNA (sncRNA) 5' transfer RNA (tRNA) half
acccacgcctccagg

SEQ ID NO: 9026 - DNA, 22 bp, Artificial Sequence
  synthetic circulating small noncoding RNA (sncRNA) 5' transfer RNA (tRNA) half
gtctccccgtcggggaatcgaa

SEQ ID NO: 9027 - DNA, 29 bp, Artificial Sequence
  synthetic circulating small noncoding RNA (sncRNA) 5' transfer RNA (tRNA) half
gattgtgggttcgagtcccatctgggtcg

SEQ ID NO: 9028 - DNA, 20 bp, Artificial Sequence
  synthetic circulating small noncoding RNA (sncRNA) 5' transfer RNA (tRNA) half
gccccagcgagatttgaact

SEQ ID NO: 9029 - DNA, 13 bp, Artificial Sequence
  synthetic circulating small noncoding RNA (sncRNA) 5' transfer RNA (tRNA) half
tagagcatcagac

SEQ ID NO: 9030 - DNA, 36 bp, Artificial Sequence
  synthetic circulating small noncoding RNA (sncRNA) 5' transfer RNA (tRNA) half
taatctgaaggtcctgagttcgaacctcagaggggg

SEQ ID NO: 9031 - DNA, 11 bp, Artificial Sequence
  synthetic circulating small noncoding RNA (sncRNA) 5' transfer RNA (tRNA) half
cgagcggtcta

SEQ ID NO: 9032 - DNA, 23 bp, Artificial Sequence
  synthetic circulating small noncoding RNA (sncRNA) 5' transfer RNA (tRNA) half
cgtctccccgtcggggaatcgaa

SEQ ID NO: 9033 - DNA, 23 bp, Artificial Sequence
  synthetic circulating small noncoding RNA (sncRNA) 5' transfer RNA (tRNA) half
gtctagcggttaggattcctggt

SEQ ID NO: 9034 - DNA, 33 bp, Artificial Sequence
  synthetic circulating small noncoding RNA (sncRNA) 5' transfer RNA (tRNA) half
ctgaccgggaatcgaacccgggccgcggcggtg

SEQ ID NO: 9035 - DNA, 35 bp, Artificial Sequence
  synthetic circulating small noncoding RNA (sncRNA) 5' transfer RNA (tRNA) half
gcagcaacctcggttcgaatccgagtcacggcatg

SEQ ID NO: 9036 - DNA, 19 bp, Artificial Sequence
  synthetic circulating small noncoding RNA (sncRNA) 5' transfer RNA (tRNA) half
aaatgtttgggctcgtccg

SEQ ID NO: 9037 - DNA, 14 bp, Artificial Sequence
  synthetic circulating small noncoding RNA (sncRNA) 5' transfer RNA (tRNA) half
gcgtggcaggcgag

SEQ ID NO: 9038 - DNA, 22 bp, Artificial Sequence
  synthetic circulating small noncoding RNA (sncRNA) 5' transfer RNA (tRNA) half
gttcaatggtagaattctcgcc

SEQ ID NO: 9039 - DNA, 16 bp, Artificial Sequence
  synthetic circulating small noncoding RNA (sncRNA) 5' transfer RNA (tRNA) half
caggatggccgagcgg

SEQ ID NO: 9040 - DNA, 17 bp, Artificial Sequence
  synthetic circulating small noncoding RNA (sncRNA) 5' transfer RNA (tRNA) half
atggataaggcactggc

SEQ ID NO: 9041 - DNA, 14 bp, Artificial Sequence
  synthetic circulating small noncoding RNA (sncRNA) 5' transfer RNA (tRNA) half
tccatcgacctctg

SEQ ID NO: 9042 - DNA, 21 bp, Artificial Sequence
  synthetic circulating small noncoding RNA (sncRNA) 5' transfer RNA (tRNA) half
agcagagtggcgcagcggaag

SEQ ID NO: 9043 - DNA, 17 bp, Artificial Sequence
  synthetic circulating small noncoding RNA (sncRNA) 5' transfer RNA (tRNA) half
ttccacctttcgggcgg

SEQ ID NO: 9044 - DNA, 23 bp, Artificial Sequence
  synthetic circulating small noncoding RNA (sncRNA) 5' transfer RNA (tRNA) half
ccgcgtggcaggcgagaattcta

SEQ ID NO: 9045 - DNA, 22 bp, Artificial Sequence
  synthetic circulating small noncoding RNA (sncRNA) 5' transfer RNA (tRNA) half
gcctggatagctcagtcggtag

SEQ ID NO: 9046 - DNA, 9 bp, Artificial Sequence
  synthetic circulating small noncoding RNA (sncRNA) 5' transfer RNA (tRNA) half
gaacccggg

SEQ ID NO: 9047 - DNA, 36 bp, Artificial Sequence
  synthetic circulating small noncoding RNA (sncRNA) 5' transfer RNA (tRNA) half
ggcccgtacggggatcgaacccgcgaccttggcgtt

SEQ ID NO: 9048 - DNA, 15 bp, Artificial Sequence
  synthetic circulating small noncoding RNA (sncRNA) 5' transfer RNA (tRNA) half
gaaccagggacctct

SEQ ID NO: 9049 - DNA, 19 bp, Artificial Sequence
  synthetic circulating small noncoding RNA (sncRNA) 5' transfer RNA (tRNA) half
gctctaccgactgagctat

SEQ ID NO: 9050 - DNA, 28 bp, Artificial Sequence
  synthetic circulating small noncoding RNA (sncRNA) 5' transfer RNA (tRNA) half
acccgggcctcccgcgtggcaggcgaga

SEQ ID NO: 9051 - DNA, 19 bp, Artificial Sequence
  synthetic circulating small noncoding RNA (sncRNA) 5' transfer RNA (tRNA) half
tccccggcatctccaactt

SEQ ID NO: 9052 - DNA, 20 bp, Artificial Sequence
  synthetic circulating small noncoding RNA (sncRNA) 5' transfer RNA (tRNA) half
atccattaggccacgtggtc

SEQ ID NO: 9053 - DNA, 29 bp, Artificial Sequence
  synthetic circulating small noncoding RNA (sncRNA) 5' transfer RNA (tRNA) half
gaaccggggacctcttgatctgcagtcaa

SEQ ID NO: 9054 - DNA, 16 bp, Artificial Sequence
  synthetic circulating small noncoding RNA (sncRNA) 5' transfer RNA (tRNA) half
agccagccaggagtcg

SEQ ID NO: 9055 - DNA, 21 bp, Artificial Sequence
  synthetic circulating small noncoding RNA (sncRNA) 5' transfer RNA (tRNA) half
aacccgggacctctcgcaccc

SEQ ID NO: 9056 - DNA, 18 bp, Artificial Sequence
  synthetic circulating small noncoding RNA (sncRNA) 5' transfer RNA (tRNA) half
aaccaggaatcctaaccg

SEQ ID NO: 9057 - DNA, 31 bp, Artificial Sequence
  synthetic circulating small noncoding RNA (sncRNA) 5' transfer RNA (tRNA) half
agtgagaatcatacccctagaccaacaagcc

SEQ ID NO: 9058 - DNA, 14 bp, Artificial Sequence
  synthetic circulating small noncoding RNA (sncRNA) 5' transfer RNA (tRNA) half
caccaacctttcgg

SEQ ID NO: 9059 - DNA, 24 bp, Artificial Sequence
  synthetic circulating small noncoding RNA (sncRNA) 5' transfer RNA (tRNA) half
taggttccaccgagatttgaactc

SEQ ID NO: 9060 - DNA, 29 bp, Artificial Sequence
  synthetic circulating small noncoding RNA (sncRNA) 5' transfer RNA (tRNA) half
ttcccataccgggagtcgaacccgggccg

SEQ ID NO: 9061 - DNA, 17 bp, Artificial Sequence
  synthetic circulating small noncoding RNA (sncRNA) 5' transfer RNA (tRNA) half
tctagtggtatgattct

SEQ ID NO: 9062 - DNA, 39 bp, Artificial Sequence
  synthetic circulating small noncoding RNA (sncRNA) 5' transfer RNA (tRNA) half
aagacttaaaaccttgttcccagaggttcaaatcctctc

SEQ ID NO: 9063 - DNA, 25 bp, Artificial Sequence
  synthetic circulating small noncoding RNA (sncRNA) 5' transfer RNA (tRNA) half
cccgggttcgactcccggtgtggga

SEQ ID NO: 9064 - DNA, 44 bp, Artificial Sequence
  synthetic circulating small noncoding RNA (sncRNA) 5' transfer RNA (tRNA) half
tggcagcggtgggattcgaacccacgcccccgaagagactggag

SEQ ID NO: 9065 - DNA, 16 bp, Artificial Sequence
  synthetic circulating small noncoding RNA (sncRNA) 5' transfer RNA (tRNA) half
agtggtagaattctcg

SEQ ID NO: 9066 - DNA, 20 bp, Artificial Sequence
  synthetic circulating small noncoding RNA (sncRNA) 5' transfer RNA (tRNA) half
gtcccatgctgtaccgactg

SEQ ID NO: 9067 - DNA, 20 bp, Artificial Sequence
  synthetic circulating small noncoding RNA (sncRNA) 5' transfer RNA (tRNA) half
actccgccgggactcgaacc

SEQ ID NO: 9068 - DNA, 12 bp, Artificial Sequence
  synthetic circulating small noncoding RNA (sncRNA) 5' transfer RNA (tRNA) half
ttccgcccggtt

SEQ ID NO: 9069 - DNA, 17 bp, Artificial Sequence
  synthetic circulating small noncoding RNA (sncRNA) 5' transfer RNA (tRNA) half
gcccgaacagggacttg

SEQ ID NO: 9070 - DNA, 19 bp, Artificial Sequence
  synthetic circulating small noncoding RNA (sncRNA) 5' transfer RNA (tRNA) half
gaggttgtgagttcgagcc

SEQ ID NO: 9071 - DNA, 17 bp, Artificial Sequence
  synthetic circulating small noncoding RNA (sncRNA) 5' transfer RNA (tRNA) half
caccgggagtcgaaccc

SEQ ID NO: 9072 - DNA, 16 bp, Artificial Sequence
  synthetic circulating small noncoding RNA (sncRNA) 5' transfer RNA (tRNA) half
gtgagagcgccgaatc

SEQ ID NO: 9073 - DNA, 21 bp, Artificial Sequence
  synthetic circulating small noncoding RNA (sncRNA) 5' transfer RNA (tRNA) half
ggtgtagtggtatcatgcaag

SEQ ID NO: 9074 - DNA, 32 bp, Artificial Sequence
  synthetic circulating small noncoding RNA (sncRNA) 5' transfer RNA (tRNA) half
gttccttcgagccggattcgaaccagcgacct

SEQ ID NO: 9075 - DNA, 25 bp, Artificial Sequence
  synthetic circulating small noncoding RNA (sncRNA) 5' transfer RNA (tRNA) half
atcctaaccgctagaccatatggga

SEQ ID NO: 9076 - DNA, 8 bp, Artificial Sequence
  synthetic circulating small noncoding RNA (sncRNA) 5' transfer RNA (tRNA) half
ggccggga

SEQ ID NO: 9077 - DNA, 16 bp, Artificial Sequence
  synthetic circulating small noncoding RNA (sncRNA) 5' transfer RNA (tRNA) half
ccgggcctcccgcgtg

SEQ ID NO: 9078 - DNA, 16 bp, Artificial Sequence
  synthetic circulating small noncoding RNA (sncRNA) 5' transfer RNA (tRNA) half
caggcgagaattctac

SEQ ID NO: 9079 - DNA, 14 bp, Artificial Sequence
  synthetic circulating small noncoding RNA (sncRNA) 5' transfer RNA (tRNA) half
gcgaccacgaaggg

SEQ ID NO: 9080 - DNA, 17 bp, Artificial Sequence
  synthetic circulating small noncoding RNA (sncRNA) 5' transfer RNA (tRNA) half
ggttatcacgttcgcct

SEQ ID NO: 9081 - DNA, 27 bp, Artificial Sequence
  synthetic circulating small noncoding RNA (sncRNA) 5' transfer RNA (tRNA) half
attgcaggttcgagtcctgccgcggtc

SEQ ID NO: 9082 - DNA, 19 bp, Artificial Sequence
  synthetic circulating small noncoding RNA (sncRNA) 5' transfer RNA (tRNA) half
attggccgggaatcgaacc

SEQ ID NO: 9083 - DNA, 11 bp, Artificial Sequence
  synthetic circulating small noncoding RNA (sncRNA) 5' transfer RNA (tRNA) half
agaattctcgc

SEQ ID NO: 9084 - DNA, 37 bp, Artificial Sequence
  synthetic circulating small noncoding RNA (sncRNA) 5' transfer RNA (tRNA) half
gggacctcttgatctgcagtcaaatgctctaccactg

SEQ ID NO: 9085 - DNA, 32 bp, Artificial Sequence
  synthetic circulating small noncoding RNA (sncRNA) 5' transfer RNA (tRNA) half
gcccggatgatcctcagtggtctggggtgcag

SEQ ID NO: 9086 - DNA, 36 bp, Artificial Sequence
  synthetic circulating small noncoding RNA (sncRNA) 5' transfer RNA (tRNA) half
ctcttcgggggcgtgggttcgaatcccaccgctgcc

SEQ ID NO: 9087 - DNA, 30 bp, Artificial Sequence
  synthetic circulating small noncoding RNA (sncRNA) 5' transfer RNA (tRNA) half
tggattcagagtccagagtgctaaccatta

SEQ ID NO: 9088 - DNA, 21 bp, Artificial Sequence
  synthetic circulating small noncoding RNA (sncRNA) 5' transfer RNA (tRNA) half
ttagaccgctcggccatcctg

SEQ ID NO: 9089 - DNA, 18 bp, Artificial Sequence
  synthetic circulating small noncoding RNA (sncRNA) 5' transfer RNA (tRNA) half
tcccatatggtctagcgg

SEQ ID NO: 9090 - DNA, 32 bp, Artificial Sequence
  synthetic circulating small noncoding RNA (sncRNA) 5' transfer RNA (tRNA) half
aggagatcctgggttcgaatcccagtggggcc

SEQ ID NO: 9091 - DNA, 19 bp, Artificial Sequence
  synthetic circulating small noncoding RNA (sncRNA) 5' transfer RNA (tRNA) half
aaggtccccggttcgaaac

SEQ ID NO: 9092 - DNA, 22 bp, Artificial Sequence
  synthetic circulating small noncoding RNA (sncRNA) 5' transfer RNA (tRNA) half
ccgactccgccgggactcgaac

SEQ ID NO: 9093 - DNA, 37 bp, Artificial Sequence
  synthetic circulating small noncoding RNA (sncRNA) 5' transfer RNA (tRNA) half
tcagaagattgagggttcgaatcccttcgtggttggt

SEQ ID NO: 9094 - DNA, 18 bp, Artificial Sequence
  synthetic circulating small noncoding RNA (sncRNA) 5' transfer RNA (tRNA) half
gaacccgggccgcggcgg

SEQ ID NO: 9095 - DNA, 14 bp, Artificial Sequence
  synthetic circulating small noncoding RNA (sncRNA) 5' transfer RNA (tRNA) half
tgtcacgcgggaga

SEQ ID NO: 9096 - DNA, 13 bp, Artificial Sequence
  synthetic circulating small noncoding RNA (sncRNA) 5' transfer RNA (tRNA) half
ccggctcgaagga

SEQ ID NO: 9097 - DNA, 23 bp, Artificial Sequence
  synthetic circulating small noncoding RNA (sncRNA) 5' transfer RNA (tRNA) half
ctgtcacgcgggagaccggggtt

SEQ ID NO: 9098 - DNA, 20 bp, Artificial Sequence
  synthetic circulating small noncoding RNA (sncRNA) 5' transfer RNA (tRNA) half
ccgggtcaactgcttggaag

SEQ ID NO: 9099 - DNA, 36 bp, Artificial Sequence
  synthetic circulating small noncoding RNA (sncRNA) 5' transfer RNA (tRNA) half
ccgggccgcggcggtgagagcgccgaatcctaacca

SEQ ID NO: 9100 - DNA, 25 bp, Artificial Sequence
  synthetic circulating small noncoding RNA (sncRNA) 5' transfer RNA (tRNA) half
acctgcgcggggagaccccaatgga

SEQ ID NO: 9101 - DNA, 22 bp, Artificial Sequence
  synthetic circulating small noncoding RNA (sncRNA) 5' transfer RNA (tRNA) half
taatctgagggtccagggttca

SEQ ID NO: 9102 - DNA, 13 bp, Artificial Sequence
  synthetic circulating small noncoding RNA (sncRNA) 5' transfer RNA (tRNA) half
ttcgattcccggt

SEQ ID NO: 9103 - DNA, 24 bp, Artificial Sequence
  synthetic circulating small noncoding RNA (sncRNA) 5' transfer RNA (tRNA) half
tggtggagatgccggggatcgaac

SEQ ID NO: 9104 - DNA, 13 bp, Artificial Sequence
  synthetic circulating small noncoding RNA (sncRNA) 5' transfer RNA (tRNA) half
atcacgttcgcct

SEQ ID NO: 9105 - DNA, 17 bp, Artificial Sequence
  synthetic circulating small noncoding RNA (sncRNA) 5' transfer RNA (tRNA) half
acccgggacctctcgca

SEQ ID NO: 9106 - DNA, 31 bp, Artificial Sequence
  synthetic circulating small noncoding RNA (sncRNA) 5' transfer RNA (tRNA) half
tttctgtagtgtagtggttatcacgttcgcc

SEQ ID NO: 9107 - DNA, 19 bp, Artificial Sequence
  synthetic circulating small noncoding RNA (sncRNA) 5' transfer RNA (tRNA) half
cgattcccggccaatgcac

SEQ ID NO: 9108 - DNA, 36 bp, Artificial Sequence
  synthetic circulating small noncoding RNA (sncRNA) 5' transfer RNA (tRNA) half
taaacaggagatcctgggttcgactcccagtggggc

SEQ ID NO: 9109 - DNA, 13 bp, Artificial Sequence
  synthetic circulating small noncoding RNA (sncRNA) 5' transfer RNA (tRNA) half
cgttatccattgc

SEQ ID NO: 9110 - DNA, 30 bp, Artificial Sequence
  synthetic circulating small noncoding RNA (sncRNA) 5' transfer RNA (tRNA) half
gagccagccaggagtcgaacctagaatctt

SEQ ID NO: 9111 - DNA, 39 bp, Artificial Sequence
  synthetic circulating small noncoding RNA (sncRNA) 5' transfer RNA (tRNA) half
tggcccgtacggggatcgaacccgcgaccttggcgttat

SEQ ID NO: 9112 - DNA, 30 bp, Artificial Sequence
  synthetic circulating small noncoding RNA (sncRNA) 5' transfer RNA (tRNA) half
gccagccaggagtcgaacctagaatcttct

SEQ ID NO: 9113 - DNA, 24 bp, Artificial Sequence
  synthetic circulating small noncoding RNA (sncRNA) 5' transfer RNA (tRNA) half
gaattctaccactgaaccaccaat

SEQ ID NO: 9114 - DNA, 16 bp, Artificial Sequence
  synthetic circulating small noncoding RNA (sncRNA) 5' transfer RNA (tRNA) half
gttcgattccggctcg

SEQ ID NO: 9115 - DNA, 16 bp, Artificial Sequence
  synthetic circulating small noncoding RNA (sncRNA) 5' transfer RNA (tRNA) half
gtctccccgtcgggga

SEQ ID NO: 9116 - DNA, 24 bp, Artificial Sequence
  synthetic circulating small noncoding RNA (sncRNA) 5' transfer RNA (tRNA) half
cttagaccgctcggccacactacc

SEQ ID NO: 9117 - DNA, 30 bp, Artificial Sequence
  synthetic circulating small noncoding RNA (sncRNA) 5' transfer RNA (tRNA) half
ggcattggtggttcagtggtagaattctcg

SEQ ID NO: 9118 - DNA, 27 bp, Artificial Sequence
  synthetic circulating small noncoding RNA (sncRNA) 5' transfer RNA (tRNA) half
gttggtctaggggtatgattctcgctt

SEQ ID NO: 9119 - DNA, 12 bp, Artificial Sequence
  synthetic circulating small noncoding RNA (sncRNA) 5' transfer RNA (tRNA) half
aggatggccgag

SEQ ID NO: 9120 - DNA, 20 bp, Artificial Sequence
  synthetic circulating small noncoding RNA (sncRNA) 5' transfer RNA (tRNA) half
gtcaggatggccgagtggtc

SEQ ID NO: 9121 - DNA, 26 bp, Artificial Sequence
  synthetic circulating small noncoding RNA (sncRNA) 5' transfer RNA (tRNA) half
cggatgatcctcagtggtctggggtg

SEQ ID NO: 9122 - DNA, 19 bp, Artificial Sequence
  synthetic circulating small noncoding RNA (sncRNA) 5' transfer RNA (tRNA) half
ccaactgagctatcgaagg

SEQ ID NO: 9123 - DNA, 19 bp, Artificial Sequence
  synthetic circulating small noncoding RNA (sncRNA) 5' transfer RNA (tRNA) half
ggttcgattcccggtcagg

SEQ ID NO: 9124 - DNA, 20 bp, Artificial Sequence
  synthetic circulating small noncoding RNA (sncRNA) 5' transfer RNA (tRNA) half
ggactcgaacccgcaacctt

SEQ ID NO: 9125 - DNA, 21 bp, Artificial Sequence
  synthetic circulating small noncoding RNA (sncRNA) 5' transfer RNA (tRNA) half
gcgacccgggttcgattcccg

SEQ ID NO: 9126 - DNA, 35 bp, Artificial Sequence
  synthetic circulating small noncoding RNA (sncRNA) 5' transfer RNA (tRNA) half
accgaagatcgcgggttcgaaccccgtccgtgcct

SEQ ID NO: 9127 - DNA, 21 bp, Artificial Sequence
  synthetic circulating small noncoding RNA (sncRNA) 5' transfer RNA (tRNA) half
tcgagccagccaggagtcgaa

SEQ ID NO: 9128 - DNA, 9 bp, Artificial Sequence
  synthetic circulating small noncoding RNA (sncRNA) 5' transfer RNA (tRNA) half
gtcccaccg

SEQ ID NO: 9129 - DNA, 13 bp, Artificial Sequence
  synthetic circulating small noncoding RNA (sncRNA) 5' transfer RNA (tRNA) half
acccggatttgaa

SEQ ID NO: 9130 - DNA, 44 bp, Artificial Sequence
  synthetic circulating small noncoding RNA (sncRNA) 5' transfer RNA (tRNA) half
accgtagtcggcaggattcgaacctgcgcggggaaaccccaatg

SEQ ID NO: 9131 - DNA, 15 bp, Artificial Sequence
  synthetic circulating small noncoding RNA (sncRNA) 5' transfer RNA (tRNA) half
gccgtgatcgtatag

SEQ ID NO: 9132 - DNA, 21 bp, Artificial Sequence
  synthetic circulating small noncoding RNA (sncRNA) 5' transfer RNA (tRNA) half
ccccgtcggggaatcgaaccc

SEQ ID NO: 9133 - DNA, 16 bp, Artificial Sequence
  synthetic circulating small noncoding RNA (sncRNA) 5' transfer RNA (tRNA) half
gcggggatactaacca

SEQ ID NO: 9134 - DNA, 34 bp, Artificial Sequence
  synthetic circulating small noncoding RNA (sncRNA) 5' transfer RNA (tRNA) half
gcctccccgtcggggaatcgaaccccggtctccc

SEQ ID NO: 9135 - DNA, 18 bp, Artificial Sequence
  synthetic circulating small noncoding RNA (sncRNA) 5' transfer RNA (tRNA) half
ccactatacgatcacggc

SEQ ID NO: 9136 - DNA, 8 bp, Artificial Sequence
  synthetic circulating small noncoding RNA (sncRNA) 5' transfer RNA (tRNA) half
cgaaccgg

SEQ ID NO: 9137 - DNA, 20 bp, Artificial Sequence
  synthetic circulating small noncoding RNA (sncRNA) 5' transfer RNA (tRNA) half
aggcgaatgtgataaccact

SEQ ID NO: 9138 - DNA, 22 bp, Artificial Sequence
  synthetic circulating small noncoding RNA (sncRNA) 5' transfer RNA (tRNA) half
tcgattcccggccaatgcaata

SEQ ID NO: 9139 - DNA, 33 bp, Artificial Sequence
  synthetic circulating small noncoding RNA (sncRNA) 5' transfer RNA (tRNA) half
gaagatcgcgggttcgaaccccgtccgtgcctg

SEQ ID NO: 9140 - DNA, 13 bp, Artificial Sequence
  synthetic circulating small noncoding RNA (sncRNA) 5' transfer RNA (tRNA) half
tctcttcggaggc

SEQ ID NO: 9141 - DNA, 35 bp, Artificial Sequence
  synthetic circulating small noncoding RNA (sncRNA) 5' transfer RNA (tRNA) half
cgactctggcgggactcgaacccgcaacctttgaa

SEQ ID NO: 9142 - DNA, 16 bp, Artificial Sequence
  synthetic circulating small noncoding RNA (sncRNA) 5' transfer RNA (tRNA) half
aggtcccaccgagatt

SEQ ID NO: 9143 - DNA, 32 bp, Artificial Sequence
  synthetic circulating small noncoding RNA (sncRNA) 5' transfer RNA (tRNA) half
cgactctggtgggactcgaacccacaaccttt

SEQ ID NO: 9144 - DNA, 14 bp, Artificial Sequence
  synthetic circulating small noncoding RNA (sncRNA) 5' transfer RNA (tRNA) half
aaccgaggttgctg

SEQ ID NO: 9145 - DNA, 21 bp, Artificial Sequence
  synthetic circulating small noncoding RNA (sncRNA) 5' transfer RNA (tRNA) half
gcaatggataacgcgtctgac

SEQ ID NO: 9146 - DNA, 15 bp, Artificial Sequence
  synthetic circulating small noncoding RNA (sncRNA) 5' transfer RNA (tRNA) half
ttgcgccacgaggtc

SEQ ID NO: 9147 - DNA, 26 bp, Artificial Sequence
  synthetic circulating small noncoding RNA (sncRNA) 5' transfer RNA (tRNA) half
gagtctcatgctctaccgactgagct

SEQ ID NO: 9148 - DNA, 14 bp, Artificial Sequence
  synthetic circulating small noncoding RNA (sncRNA) 5' transfer RNA (tRNA) half
gggattagctcaaa

SEQ ID NO: 9149 - DNA, 19 bp, Artificial Sequence
  synthetic circulating small noncoding RNA (sncRNA) 5' transfer RNA (tRNA) half
gaccccgacgtgatttgaa

SEQ ID NO: 9150 - DNA, 12 bp, Artificial Sequence
  synthetic circulating small noncoding RNA (sncRNA) 5' transfer RNA (tRNA) half
atcctgccgact

SEQ ID NO: 9151 - DNA, 13 bp, Artificial Sequence
  synthetic circulating small noncoding RNA (sncRNA) 5' transfer RNA (tRNA) half
gagctacatcccc

SEQ ID NO: 9152 - DNA, 19 bp, Artificial Sequence
  synthetic circulating small noncoding RNA (sncRNA) 5' transfer RNA (tRNA) half
tggtggagatgccggggat

SEQ ID NO: 9153 - DNA, 21 bp, Artificial Sequence
  synthetic circulating small noncoding RNA (sncRNA) 5' transfer RNA (tRNA) half
cccggacgagcccaagcattt

SEQ ID NO: 9154 - DNA, 10 bp, Artificial Sequence
  synthetic circulating small noncoding RNA (sncRNA) 5' transfer RNA (tRNA) half
tccccggttc

SEQ ID NO: 9155 - DNA, 34 bp, Artificial Sequence
  synthetic circulating small noncoding RNA (sncRNA) 5' transfer RNA (tRNA) half
aaccaggggtcgcgagttcaaatctcgctggggc

SEQ ID NO: 9156 - DNA, 24 bp, Artificial Sequence
  synthetic circulating small noncoding RNA (sncRNA) 5' transfer RNA (tRNA) half
cacgccatcgaaatgactggagcc

SEQ ID NO: 9157 - DNA, 12 bp, Artificial Sequence
  synthetic circulating small noncoding RNA (sncRNA) 5' transfer RNA (tRNA) half
cccacgttgggc

SEQ ID NO: 9158 - DNA, 22 bp, Artificial Sequence
  synthetic circulating small noncoding RNA (sncRNA) 5' transfer RNA (tRNA) half
tcagctggtagagcggaggact

SEQ ID NO: 9159 - DNA, 18 bp, Artificial Sequence
  synthetic circulating small noncoding RNA (sncRNA) 5' transfer RNA (tRNA) half
gttcgactcccggtgtgg

SEQ ID NO: 9160 - DNA, 22 bp, Artificial Sequence
  synthetic circulating small noncoding RNA (sncRNA) 5' transfer RNA (tRNA) half
aagtgcattggccgggaatcga

SEQ ID NO: 9161 - DNA, 27 bp, Artificial Sequence
  synthetic circulating small noncoding RNA (sncRNA) 5' transfer RNA (tRNA) half
tcgacgaggatgggattcgaacccatg

SEQ ID NO: 9162 - DNA, 13 bp, Artificial Sequence
  synthetic circulating small noncoding RNA (sncRNA) 5' transfer RNA (tRNA) half
atgcgctatccat

SEQ ID NO: 9163 - DNA, 24 bp, Artificial Sequence
  synthetic circulating small noncoding RNA (sncRNA) 5' transfer RNA (tRNA) half
cgagaattctaccactgaaccacc

SEQ ID NO: 9164 - DNA, 22 bp, Artificial Sequence
  synthetic circulating small noncoding RNA (sncRNA) 5' transfer RNA (tRNA) half
gagttcaaatctcggtggaacc

SEQ ID NO: 9165 - DNA, 31 bp, Artificial Sequence
  synthetic circulating small noncoding RNA (sncRNA) 5' transfer RNA (tRNA) half
ggttccttcgagccggattcgaaccagcgac

SEQ ID NO: 9166 - DNA, 23 bp, Artificial Sequence
  synthetic circulating small noncoding RNA (sncRNA) 5' transfer RNA (tRNA) half
ggttcgattccggctcgaaggac

SEQ ID NO: 9167 - DNA, 17 bp, Artificial Sequence
  synthetic circulating small noncoding RNA (sncRNA) 5' transfer RNA (tRNA) half
agcgccaaatcctaacc

SEQ ID NO: 9168 - DNA, 35 bp, Artificial Sequence
  synthetic circulating small noncoding RNA (sncRNA) 5' transfer RNA (tRNA) half
cgagccaggtaggagtcgaacctacaatcttctga

SEQ ID NO: 9169 - DNA, 12 bp, Artificial Sequence
  synthetic circulating small noncoding RNA (sncRNA) 5' transfer RNA (tRNA) half
ccggctagctca

SEQ ID NO: 9170 - DNA, 25 bp, Artificial Sequence
  synthetic circulating small noncoding RNA (sncRNA) 5' transfer RNA (tRNA) half
ggaatcctaaccgctagaccatatg

SEQ ID NO: 9171 - DNA, 13 bp, Artificial Sequence
  synthetic circulating small noncoding RNA (sncRNA) 5' transfer RNA (tRNA) half
cgacgaaggtggg

SEQ ID NO: 9172 - DNA, 19 bp, Artificial Sequence
  synthetic circulating small noncoding RNA (sncRNA) 5' transfer RNA (tRNA) half
gtcaaatgctctaccactg

SEQ ID NO: 9173 - DNA, 21 bp, Artificial Sequence
  synthetic circulating small noncoding RNA (sncRNA) 5' transfer RNA (tRNA) half
gtttccctagtgtagtggtta

SEQ ID NO: 9174 - DNA, 16 bp, Artificial Sequence
  synthetic circulating small noncoding RNA (sncRNA) 5' transfer RNA (tRNA) half
aaatcccggacgagcc

SEQ ID NO: 9175 - DNA, 32 bp, Artificial Sequence
  synthetic circulating small noncoding RNA (sncRNA) 5' transfer RNA (tRNA) half
gcgactctggtgggactcgaacccacaacctt

SEQ ID NO: 9176 - DNA, 16 bp, Artificial Sequence
  synthetic circulating small noncoding RNA (sncRNA) 5' transfer RNA (tRNA) half
ggttcgattccccgac

SEQ ID NO: 9177 - DNA, 23 bp, Artificial Sequence
  synthetic circulating small noncoding RNA (sncRNA) 5' transfer RNA (tRNA) half
gcggcggtgagagcgccgaatcc

SEQ ID NO: 9178 - DNA, 25 bp, Artificial Sequence
  synthetic circulating small noncoding RNA (sncRNA) 5' transfer RNA (tRNA) half
agctcagttggtagagcggaggact

SEQ ID NO: 9179 - DNA, 17 bp, Artificial Sequence
  synthetic circulating small noncoding RNA (sncRNA) 5' transfer RNA (tRNA) half
aaccccggtctcccgcg

SEQ ID NO: 9180 - DNA, 25 bp, Artificial Sequence
  synthetic circulating small noncoding RNA (sncRNA) 5' transfer RNA (tRNA) half
ggcgagaattctaccattgaactac

SEQ ID NO: 9181 - DNA, 30 bp, Artificial Sequence
  synthetic circulating small noncoding RNA (sncRNA) 5' transfer RNA (tRNA) half
gaccgggaatcgaacccgggccgcggcggt

SEQ ID NO: 9182 - DNA, 17 bp, Artificial Sequence
  synthetic circulating small noncoding RNA (sncRNA) 5' transfer RNA (tRNA) half
acgacgaggatgggatt

SEQ ID NO: 9183 - DNA, 25 bp, Artificial Sequence
  synthetic circulating small noncoding RNA (sncRNA) 5' transfer RNA (tRNA) half
gcccggatagctcagtcggtagagc

SEQ ID NO: 9184 - DNA, 45 bp, Artificial Sequence
  synthetic circulating small noncoding RNA (sncRNA) 5' transfer RNA (tRNA) half
ctccagtctcttcgggggcgtgggttcgaatcccaccgctgccaa

SEQ ID NO: 9185 - DNA, 36 bp, Artificial Sequence
  synthetic circulating small noncoding RNA (sncRNA) 5' transfer RNA (tRNA) half
cacgaggccccgggttcaatccccggcacctccagt

SEQ ID NO: 9186 - DNA, 22 bp, Artificial Sequence
  synthetic circulating small noncoding RNA (sncRNA) 5' transfer RNA (tRNA) half
ggttcgattcccgggcggcgca

SEQ ID NO: 9187 - DNA, 27 bp, Artificial Sequence
  synthetic circulating small noncoding RNA (sncRNA) 5' transfer RNA (tRNA) half
atagtgtagcggttatcacgtctgctt

SEQ ID NO: 9188 - DNA, 32 bp, Artificial Sequence
  synthetic circulating small noncoding RNA (sncRNA) 5' transfer RNA (tRNA) half
cgttccttcgagccggattcgaaccagcgacc

SEQ ID NO: 9189 - DNA, 18 bp, Artificial Sequence
  synthetic circulating small noncoding RNA (sncRNA) 5' transfer RNA (tRNA) half
ctcatgctctaccgactg

SEQ ID NO: 9190 - DNA, 18 bp, Artificial Sequence
  synthetic circulating small noncoding RNA (sncRNA) 5' transfer RNA (tRNA) half
ggatcgctggattcaaag

SEQ ID NO: 9191 - DNA, 17 bp, Artificial Sequence
  synthetic circulating small noncoding RNA (sncRNA) 5' transfer RNA (tRNA) half
ggtagcgtggccgagcg

SEQ ID NO: 9192 - DNA, 22 bp, Artificial Sequence
  synthetic circulating small noncoding RNA (sncRNA) 5' transfer RNA (tRNA) half
cggctagctcagtcggtagagc

SEQ ID NO: 9193 - DNA, 22 bp, Artificial Sequence
  synthetic circulating small noncoding RNA (sncRNA) 5' transfer RNA (tRNA) half
tcaaatcacgtcggggtcatct

SEQ ID NO: 9194 - DNA, 13 bp, Artificial Sequence
  synthetic circulating small noncoding RNA (sncRNA) 5' transfer RNA (tRNA) half
agagcatcagact

SEQ ID NO: 9195 - DNA, 19 bp, Artificial Sequence
  synthetic circulating small noncoding RNA (sncRNA) 5' transfer RNA (tRNA) half
agcggttaggattcctggt

SEQ ID NO: 9196 - DNA, 28 bp, Artificial Sequence
  synthetic circulating small noncoding RNA (sncRNA) 5' transfer RNA (tRNA) half
agtctgatgctctaccgactgagctatc

SEQ ID NO: 9197 - DNA, 28 bp, Artificial Sequence
  synthetic circulating small noncoding RNA (sncRNA) 5' transfer RNA (tRNA) half
tctccccgtcggggaatcgaaccccggt

SEQ ID NO: 9198 - DNA, 22 bp, Artificial Sequence
  synthetic circulating small noncoding RNA (sncRNA) 5' transfer RNA (tRNA) half
gccccctctgaggttcgaactc

SEQ ID NO: 9199 - DNA, 11 bp, Artificial Sequence
  synthetic circulating small noncoding RNA (sncRNA) 5' transfer RNA (tRNA) half
ggggctcgaac

SEQ ID NO: 9200 - DNA, 31 bp, Artificial Sequence
  synthetic circulating small noncoding RNA (sncRNA) 5' transfer RNA (tRNA) half
ggcttgttggtctaggggtatgattctcact

SEQ ID NO: 9201 - DNA, 33 bp, Artificial Sequence
  synthetic circulating small noncoding RNA (sncRNA) 5' transfer RNA (tRNA) half
acctccccgtcggggaattgaaccccggtctcc

SEQ ID NO: 9202 - DNA, 16 bp, Artificial Sequence
  synthetic circulating small noncoding RNA (sncRNA) 5' transfer RNA (tRNA) half
atccatcgacctctgg

SEQ ID NO: 9203 - DNA, 14 bp, Artificial Sequence
  synthetic circulating small noncoding RNA (sncRNA) 5' transfer RNA (tRNA) half
gctcggccacacta

SEQ ID NO: 9204 - DNA, 13 bp, Artificial Sequence
  synthetic circulating small noncoding RNA (sncRNA) 5' transfer RNA (tRNA) half
cgaaccagcgacc

SEQ ID NO: 9205 - DNA, 29 bp, Artificial Sequence
  synthetic circulating small noncoding RNA (sncRNA) 5' transfer RNA (tRNA) half
ggttagcactctggactctgaatccagcg

SEQ ID NO: 9206 - DNA, 24 bp, Artificial Sequence
  synthetic circulating small noncoding RNA (sncRNA) 5' transfer RNA (tRNA) half
ccgggaatcgaacccgggcctccc

SEQ ID NO: 9207 - DNA, 26 bp, Artificial Sequence
  synthetic circulating small noncoding RNA (sncRNA) 5' transfer RNA (tRNA) half
tggtgtagtggtatcatgcaagattc

SEQ ID NO: 9208 - DNA, 17 bp, Artificial Sequence
  synthetic circulating small noncoding RNA (sncRNA) 5' transfer RNA (tRNA) half
acgcgggagaccggggt

SEQ ID NO: 9209 - DNA, 19 bp, Artificial Sequence
  synthetic circulating small noncoding RNA (sncRNA) 5' transfer RNA (tRNA) half
tcgagtcccatctgggtcg

SEQ ID NO: 9210 - DNA, 10 bp, Artificial Sequence
  synthetic circulating small noncoding RNA (sncRNA) 5' transfer RNA (tRNA) half
gggaatcgaa

SEQ ID NO: 9211 - DNA, 21 bp, Artificial Sequence
  synthetic circulating small noncoding RNA (sncRNA) 5' transfer RNA (tRNA) half
tcgagcctcacctggagcacg

SEQ ID NO: 9212 - DNA, 18 bp, Artificial Sequence
  synthetic circulating small noncoding RNA (sncRNA) 5' transfer RNA (tRNA) half
tcgaatcccatcctcgtc

SEQ ID NO: 9213 - DNA, 13 bp, Artificial Sequence
  synthetic circulating small noncoding RNA (sncRNA) 5' transfer RNA (tRNA) half
gtttccgtagtgt

SEQ ID NO: 9214 - DNA, 35 bp, Artificial Sequence
  synthetic circulating small noncoding RNA (sncRNA) 5' transfer RNA (tRNA) half
acgcgaaaggtccccggttcgaaaccgggcggaaa

SEQ ID NO: 9215 - DNA, 15 bp, Artificial Sequence
  synthetic circulating small noncoding RNA (sncRNA) 5' transfer RNA (tRNA) half
aaaccgggcggaaac

SEQ ID NO: 9216 - DNA, 26 bp, Artificial Sequence
  synthetic circulating small noncoding RNA (sncRNA) 5' transfer RNA (tRNA) half
cggctgttaaccgaaaggttggtggt

SEQ ID NO: 9217 - DNA, 24 bp, Artificial Sequence
  synthetic circulating small noncoding RNA (sncRNA) 5' transfer RNA (tRNA) half
gtatagtggttagtactctgcgtt

SEQ ID NO: 9218 - DNA, 23 bp, Artificial Sequence
  synthetic circulating small noncoding RNA (sncRNA) 5' transfer RNA (tRNA) half
gatccatcgacctctgggttatg

SEQ ID NO: 9219 - DNA, 20 bp, Artificial Sequence
  synthetic circulating small noncoding RNA (sncRNA) 5' transfer RNA (tRNA) half
taacgccaaggtcgcgggtt

SEQ ID NO: 9220 - DNA, 30 bp, Artificial Sequence
  synthetic circulating small noncoding RNA (sncRNA) 5' transfer RNA (tRNA) half
cccgggccgcggcggtgagagcgccgaatc

SEQ ID NO: 9221 - DNA, 34 bp, Artificial Sequence
  synthetic circulating small noncoding RNA (sncRNA) 5' transfer RNA (tRNA) half
tgcgctctaccactgagctacatccccagccgct

SEQ ID NO: 9222 - DNA, 26 bp, Artificial Sequence
  synthetic circulating small noncoding RNA (sncRNA) 5' transfer RNA (tRNA) half
ccatatggtctagcggttaggattcc

SEQ ID NO: 9223 - DNA, 33 bp, Artificial Sequence
  synthetic circulating small noncoding RNA (sncRNA) 5' transfer RNA (tRNA) half
ccctggtggtctagtggttaggattcggcgctc

SEQ ID NO: 9224 - DNA, 19 bp, Artificial Sequence
  synthetic circulating small noncoding RNA (sncRNA) 5' transfer RNA (tRNA) half
gcaggcgagaattctacca

SEQ ID NO: 9225 - DNA, 33 bp, Artificial Sequence
  synthetic circulating small noncoding RNA (sncRNA) 5' transfer RNA (tRNA) half
gccagccaggagtcgaacctagaatcttctgat

SEQ ID NO: 9226 - DNA, 32 bp, Artificial Sequence
  synthetic circulating small noncoding RNA (sncRNA) 5' transfer RNA (tRNA) half
gctgtgatggccgagtggttaaggcgttggac

SEQ ID NO: 9227 - DNA, 37 bp, Artificial Sequence
  synthetic circulating small noncoding RNA (sncRNA) 5' transfer RNA (tRNA) half
cgcagaaggtcctgggttcgagccccagtggaaccac

SEQ ID NO: 9228 - DNA, 14 bp, Artificial Sequence
  synthetic circulating small noncoding RNA (sncRNA) 5' transfer RNA (tRNA) half
cgattcccggtcag

SEQ ID NO: 9229 - DNA, 21 bp, Artificial Sequence
  synthetic circulating small noncoding RNA (sncRNA) 5' transfer RNA (tRNA) half
tcagtggtctggggtgcaggc

SEQ ID NO: 9230 - DNA, 17 bp, Artificial Sequence
  synthetic circulating small noncoding RNA (sncRNA) 5' transfer RNA (tRNA) half
ctccccgtcggggaatc

SEQ ID NO: 9231 - DNA, 29 bp, Artificial Sequence
  synthetic circulating small noncoding RNA (sncRNA) 5' transfer RNA (tRNA) half
taggtcgctggttcgattccggctcgaag

SEQ ID NO: 9232 - DNA, 21 bp, Artificial Sequence
  synthetic circulating small noncoding RNA (sncRNA) 5' transfer RNA (tRNA) half
gaggtcccaccgagatttgaa

SEQ ID NO: 9233 - DNA, 22 bp, Artificial Sequence
  synthetic circulating small noncoding RNA (sncRNA) 5' transfer RNA (tRNA) half
gtcccaccgagatttgaactcg

SEQ ID NO: 9234 - DNA, 19 bp, Artificial Sequence
  synthetic circulating small noncoding RNA (sncRNA) 5' transfer RNA (tRNA) half
gattcaaagtccagagtgc

SEQ ID NO: 9235 - DNA, 34 bp, Artificial Sequence
  synthetic circulating small noncoding RNA (sncRNA) 5' transfer RNA (tRNA) half
acctccccgtcggggaattgaaccccggtctccc

SEQ ID NO: 9236 - DNA, 15 bp, Artificial Sequence
  synthetic circulating small noncoding RNA (sncRNA) 5' transfer RNA (tRNA) half
cttagaccgctcggc

SEQ ID NO: 9237 - DNA, 20 bp, Artificial Sequence
  synthetic circulating small noncoding RNA (sncRNA) 5' transfer RNA (tRNA) half
gtccaatgcgctatccattg

SEQ ID NO: 9238 - DNA, 18 bp, Artificial Sequence
  synthetic circulating small noncoding RNA (sncRNA) 5' transfer RNA (tRNA) half
ggaatcgaacccgggccg

SEQ ID NO: 9239 - DNA, 20 bp, Artificial Sequence
  synthetic circulating small noncoding RNA (sncRNA) 5' transfer RNA (tRNA) half
aaggccccagcgagatttga

SEQ ID NO: 9240 - DNA, 21 bp, Artificial Sequence
  synthetic circulating small noncoding RNA (sncRNA) 5' transfer RNA (tRNA) half
taaccactcggccattctggt

SEQ ID NO: 9241 - DNA, 25 bp, Artificial Sequence
  synthetic circulating small noncoding RNA (sncRNA) 5' transfer RNA (tRNA) half
cccgggttcgattcccgggcggcgc

SEQ ID NO: 9242 - DNA, 43 bp, Artificial Sequence
  synthetic circulating small noncoding RNA (sncRNA) 5' transfer RNA (tRNA) half
tccagtctcttcgggggcgtgggttcgaatcccaccgctgcca

SEQ ID NO: 9243 - DNA, 27 bp, Artificial Sequence
  synthetic circulating small noncoding RNA (sncRNA) 5' transfer RNA (tRNA) half
acccacgcgtgcaaagcacaatggatt

SEQ ID NO: 9244 - DNA, 17 bp, Artificial Sequence
  synthetic circulating small noncoding RNA (sncRNA) 5' transfer RNA (tRNA) half
acttgaccccgacgtga

SEQ ID NO: 9245 - DNA, 43 bp, Artificial Sequence
  synthetic circulating small noncoding RNA (sncRNA) 5' transfer RNA (tRNA) half
tctcaccgccgcggcccgggttcgattcccggtcagggaagca

SEQ ID NO: 9246 - DNA, 12 bp, Artificial Sequence
  synthetic circulating small noncoding RNA (sncRNA) 5' transfer RNA (tRNA) half
gccgtgatcgta

SEQ ID NO: 9247 - DNA, 22 bp, Artificial Sequence
  synthetic circulating small noncoding RNA (sncRNA) 5' transfer RNA (tRNA) half
tagcactctggactctgaatcc

SEQ ID NO: 9248 - DNA, 15 bp, Artificial Sequence
  synthetic circulating small noncoding RNA (sncRNA) 5' transfer RNA (tRNA) half
gcaggcgagaattct

SEQ ID NO: 9249 - DNA, 21 bp, Artificial Sequence
  synthetic circulating small noncoding RNA (sncRNA) 5' transfer RNA (tRNA) half
ttcgattccggctcgaaggac

SEQ ID NO: 9250 - DNA, 6 bp, Artificial Sequence
  synthetic circulating small noncoding RNA (sncRNA) 5' transfer RNA (tRNA) half
gccgcg

SEQ ID NO: 9251 - DNA, 21 bp, Artificial Sequence
  synthetic circulating small noncoding RNA (sncRNA) 5' transfer RNA (tRNA) half
tcgatccccagcacctccatt

SEQ ID NO: 9252 - DNA, 24 bp, Artificial Sequence
  synthetic circulating small noncoding RNA (sncRNA) 5' transfer RNA (tRNA) half
gtcagaagtgggattcgaacccac

SEQ ID NO: 9253 - DNA, 20 bp, Artificial Sequence
  synthetic circulating small noncoding RNA (sncRNA) 5' transfer RNA (tRNA) half
accgggcgggaacaacactt

SEQ ID NO: 9254 - DNA, 42 bp, Artificial Sequence
  synthetic circulating small noncoding RNA (sncRNA) 5' transfer RNA (tRNA) half
tccagtctcttcgggggcgtgggttcgaatcccaccgctgcc

SEQ ID NO: 9255 - DNA, 18 bp, Artificial Sequence
  synthetic circulating small noncoding RNA (sncRNA) 5' transfer RNA (tRNA) half
ttcgattcccgggcggcg

SEQ ID NO: 9256 - DNA, 22 bp, Artificial Sequence
  synthetic circulating small noncoding RNA (sncRNA) 5' transfer RNA (tRNA) half
aaaccagggctcgtccgggatt

SEQ ID NO: 9257 - DNA, 14 bp, Artificial Sequence
  synthetic circulating small noncoding RNA (sncRNA) 5' transfer RNA (tRNA) half
aattctcgcctgcc

SEQ ID NO: 9258 - DNA, 17 bp, Artificial Sequence
  synthetic circulating small noncoding RNA (sncRNA) 5' transfer RNA (tRNA) half
gcatgggtggttcagtg

SEQ ID NO: 9259 - DNA, 23 bp, Artificial Sequence
  synthetic circulating small noncoding RNA (sncRNA) 5' transfer RNA (tRNA) half
tcatacccctagaccaacgagcc

SEQ ID NO: 9260 - DNA, 15 bp, Artificial Sequence
  synthetic circulating small noncoding RNA (sncRNA) 5' transfer RNA (tRNA) half
cgctagaccatgtgg

SEQ ID NO: 9261 - DNA, 16 bp, Artificial Sequence
  synthetic circulating small noncoding RNA (sncRNA) 5' transfer RNA (tRNA) half
gggcctcccgcgtggc

SEQ ID NO: 9262 - DNA, 31 bp, Artificial Sequence
  synthetic circulating small noncoding RNA (sncRNA) 5' transfer RNA (tRNA) half
ccagcgatccgagttcaaatctcggtgggac

SEQ ID NO: 9263 - DNA, 14 bp, Artificial Sequence
  synthetic circulating small noncoding RNA (sncRNA) 5' transfer RNA (tRNA) half
aaccagggacctct

SEQ ID NO: 9264 - DNA, 26 bp, Artificial Sequence
  synthetic circulating small noncoding RNA (sncRNA) 5' transfer RNA (tRNA) half
ggccgcggcggtgagagcgccgaatc

SEQ ID NO: 9265 - DNA, 34 bp, Artificial Sequence
  synthetic circulating small noncoding RNA (sncRNA) 5' transfer RNA (tRNA) half
gaagatcacgggttcgaaccccgtccgtgcctgc

SEQ ID NO: 9266 - DNA, 13 bp, Artificial Sequence
  synthetic circulating small noncoding RNA (sncRNA) 5' transfer RNA (tRNA) half
cccgggcggcgca

SEQ ID NO: 9267 - DNA, 39 bp, Artificial Sequence
  synthetic circulating small noncoding RNA (sncRNA) 5' transfer RNA (tRNA) half
tgaactcggatcgctggattcagagtccagagtgctaac

SEQ ID NO: 9268 - DNA, 20 bp, Artificial Sequence
  synthetic circulating small noncoding RNA (sncRNA) 5' transfer RNA (tRNA) half
gtctcatgctctaccaactg

SEQ ID NO: 9269 - DNA, 33 bp, Artificial Sequence
  synthetic circulating small noncoding RNA (sncRNA) 5' transfer RNA (tRNA) half
ggggcacccggatttgaaccagggacctcttga

SEQ ID NO: 9270 - DNA, 30 bp, Artificial Sequence
  synthetic circulating small noncoding RNA (sncRNA) 5' transfer RNA (tRNA) half
cgggagaccggggttcgattccccgacggg

SEQ ID NO: 9271 - DNA, 37 bp, Artificial Sequence
  synthetic circulating small noncoding RNA (sncRNA) 5' transfer RNA (tRNA) half
ggcctcccgcgtggcaggcgagaattctaccactgaa

SEQ ID NO: 9272 - DNA, 19 bp, Artificial Sequence
  synthetic circulating small noncoding RNA (sncRNA) 5' transfer RNA (tRNA) half
ctaggggtatgattctcgc

SEQ ID NO: 9273 - DNA, 31 bp, Artificial Sequence
  synthetic circulating small noncoding RNA (sncRNA) 5' transfer RNA (tRNA) half
gcccgtacggggatcgaacccgcgaccttgg

SEQ ID NO: 9274 - DNA, 18 bp, Artificial Sequence
  synthetic circulating small noncoding RNA (sncRNA) 5' transfer RNA (tRNA) half
tagaccgctcggccacgc

SEQ ID NO: 9275 - DNA, 35 bp, Artificial Sequence
  synthetic circulating small noncoding RNA (sncRNA) 5' transfer RNA (tRNA) half
ggtagcgtggccgagcggtctaaggcgctggattt

SEQ ID NO: 9276 - DNA, 18 bp, Artificial Sequence
  synthetic circulating small noncoding RNA (sncRNA) 5' transfer RNA (tRNA) half
gatgccgggaatcgaacc

SEQ ID NO: 9277 - DNA, 39 bp, Artificial Sequence
  synthetic circulating small noncoding RNA (sncRNA) 5' transfer RNA (tRNA) half
cggctagctcagtcggtagagcatgagactcttaatctc

SEQ ID NO: 9278 - DNA, 15 bp, Artificial Sequence
  synthetic circulating small noncoding RNA (sncRNA) 5' transfer RNA (tRNA) half
tgcgagaggtcccgg

SEQ ID NO: 9279 - DNA, 13 bp, Artificial Sequence
  synthetic circulating small noncoding RNA (sncRNA) 5' transfer RNA (tRNA) half
gggccgcggcggt

SEQ ID NO: 9280 - DNA, 27 bp, Artificial Sequence
  synthetic circulating small noncoding RNA (sncRNA) 5' transfer RNA (tRNA) half
gagtctcatgctctaccgactgagcta

SEQ ID NO: 9281 - DNA, 20 bp, Artificial Sequence
  synthetic circulating small noncoding RNA (sncRNA) 5' transfer RNA (tRNA) half
tggattcagagtccagagtg

SEQ ID NO: 9282 - DNA, 14 bp, Artificial Sequence
  synthetic circulating small noncoding RNA (sncRNA) 5' transfer RNA (tRNA) half
aggttgtgggttcg

SEQ ID NO: 9283 - DNA, 25 bp, Artificial Sequence
  synthetic circulating small noncoding RNA (sncRNA) 5' transfer RNA (tRNA) half
cccgggttcgattcccggccaatgc

SEQ ID NO: 9284 - DNA, 7 bp, Artificial Sequence
  synthetic circulating small noncoding RNA (sncRNA) 5' transfer RNA (tRNA) half
ggcccgg

SEQ ID NO: 9285 - DNA, 15 bp, Artificial Sequence
  synthetic circulating small noncoding RNA (sncRNA) 5' transfer RNA (tRNA) half
caggcggggatacta

SEQ ID NO: 9286 - DNA, 36 bp, Artificial Sequence
  synthetic circulating small noncoding RNA (sncRNA) 5' transfer RNA (tRNA) half
caggagatcctgggttcgaatcccagcggtgccttt

SEQ ID NO: 9287 - DNA, 16 bp, Artificial Sequence
  synthetic circulating small noncoding RNA (sncRNA) 5' transfer RNA (tRNA) half
ggcaggcgagaattct

SEQ ID NO: 9288 - DNA, 11 bp, Artificial Sequence
  synthetic circulating small noncoding RNA (sncRNA) 5' transfer RNA (tRNA) half
gtcgaacccgg

SEQ ID NO: 9289 - DNA, 14 bp, Artificial Sequence
  synthetic circulating small noncoding RNA (sncRNA) 5' transfer RNA (tRNA) half
aacccggaaccttt

SEQ ID NO: 9290 - DNA, 20 bp, Artificial Sequence
  synthetic circulating small noncoding RNA (sncRNA) 5' transfer RNA (tRNA) half
ccggatagctcagtcggtag

SEQ ID NO: 9291 - DNA, 20 bp, Artificial Sequence
  synthetic circulating small noncoding RNA (sncRNA) 5' transfer RNA (tRNA) half
ttactggcagcggtgggatt

SEQ ID NO: 9292 - DNA, 20 bp, Artificial Sequence
  synthetic circulating small noncoding RNA (sncRNA) 5' transfer RNA (tRNA) half
gcttccctgaccgggaatcg

SEQ ID NO: 9293 - DNA, 38 bp, Artificial Sequence
  synthetic circulating small noncoding RNA (sncRNA) 5' transfer RNA (tRNA) half
ttccgcccggtttcgaaccggggacctttcgcgtgtga

SEQ ID NO: 9294 - DNA, 24 bp, Artificial Sequence
  synthetic circulating small noncoding RNA (sncRNA) 5' transfer RNA (tRNA) half
gcaggcgagaattctaccactgaa

SEQ ID NO: 9295 - DNA, 23 bp, Artificial Sequence
  synthetic circulating small noncoding RNA (sncRNA) 5' transfer RNA (tRNA) half
agacgacgaggatgggattcgaa

SEQ ID NO: 9296 - DNA, 22 bp, Artificial Sequence
  synthetic circulating small noncoding RNA (sncRNA) 5' transfer RNA (tRNA) half
cggcccgggttcgattcccggt

SEQ ID NO: 9297 - DNA, 24 bp, Artificial Sequence
  synthetic circulating small noncoding RNA (sncRNA) 5' transfer RNA (tRNA) half
gctcgaaccaccaacctttcggtt

SEQ ID NO: 9298 - DNA, 22 bp, Artificial Sequence
  synthetic circulating small noncoding RNA (sncRNA) 5' transfer RNA (tRNA) half
accaaactgtttccgcccggtt

SEQ ID NO: 9299 - DNA, 16 bp, Artificial Sequence
  synthetic circulating small noncoding RNA (sncRNA) 5' transfer RNA (tRNA) half
cccagcacgcttccgc

SEQ ID NO: 9300 - DNA, 16 bp, Artificial Sequence
  synthetic circulating small noncoding RNA (sncRNA) 5' transfer RNA (tRNA) half
ggcccgtacggggatc

SEQ ID NO: 9301 - DNA, 16 bp, Artificial Sequence
  synthetic circulating small noncoding RNA (sncRNA) 5' transfer RNA (tRNA) half
gaaccccggtctcccg

SEQ ID NO: 9302 - DNA, 19 bp, Artificial Sequence
  synthetic circulating small noncoding RNA (sncRNA) 5' transfer RNA (tRNA) half
atcgttccttcgagccgga

SEQ ID NO: 9303 - DNA, 14 bp, Artificial Sequence
  synthetic circulating small noncoding RNA (sncRNA) 5' transfer RNA (tRNA) half
ccttaaccactcgg

SEQ ID NO: 9304 - DNA, 22 bp, Artificial Sequence
  synthetic circulating small noncoding RNA (sncRNA) 5' transfer RNA (tRNA) half
cgtcacgaacaggattcgaacc

SEQ ID NO: 9305 - DNA, 18 bp, Artificial Sequence
  synthetic circulating small noncoding RNA (sncRNA) 5' transfer RNA (tRNA) half
gttcgactcctgtctggc

SEQ ID NO: 9306 - DNA, 35 bp, Artificial Sequence
  synthetic circulating small noncoding RNA (sncRNA) 5' transfer RNA (tRNA) half
cagtttccgtagtgtagtggttatcacgttcgcct

SEQ ID NO: 9307 - DNA, 16 bp, Artificial Sequence
  synthetic circulating small noncoding RNA (sncRNA) 5' transfer RNA (tRNA) half
ggtatcatgcaagatt

SEQ ID NO: 9308 - DNA, 21 bp, Artificial Sequence
  synthetic circulating small noncoding RNA (sncRNA) 5' transfer RNA (tRNA) half
gtctcatgctctaccaactga

SEQ ID NO: 9309 - DNA, 23 bp, Artificial Sequence
  synthetic circulating small noncoding RNA (sncRNA) 5' transfer RNA (tRNA) half
aaaggcaagtgcattggccggga

SEQ ID NO: 9310 - DNA, 20 bp, Artificial Sequence
  synthetic circulating small noncoding RNA (sncRNA) 5' transfer RNA (tRNA) half
cgactcccggtatgggaaca

SEQ ID NO: 9311 - DNA, 12 bp, Artificial Sequence
  synthetic circulating small noncoding RNA (sncRNA) 5' transfer RNA (tRNA) half
ggaatcgaaccc

SEQ ID NO: 9312 - DNA, 14 bp, Artificial Sequence
  synthetic circulating small noncoding RNA (sncRNA) 5' transfer RNA (tRNA) half
tcccatcctcgtcg

SEQ ID NO: 9313 - DNA, 18 bp, Artificial Sequence
  synthetic circulating small noncoding RNA (sncRNA) 5' transfer RNA (tRNA) half
ggtatgattctcgctttg

SEQ ID NO: 9314 - DNA, 27 bp, Artificial Sequence
  synthetic circulating small noncoding RNA (sncRNA) 5' transfer RNA (tRNA) half
tcgtgggttcgagccccacgttgggcg

SEQ ID NO: 9315 - DNA, 41 bp, Artificial Sequence
  synthetic circulating small noncoding RNA (sncRNA) 5' transfer RNA (tRNA) half
ggattcagagtccagagtgctaaccattacaccatggaacc

SEQ ID NO: 9316 - DNA, 37 bp, Artificial Sequence
  synthetic circulating small noncoding RNA (sncRNA) 5' transfer RNA (tRNA) half
ggtagaattctcgcctgccacgcgggaggcccgggtt

SEQ ID NO: 9317 - DNA, 13 bp, Artificial Sequence
  synthetic circulating small noncoding RNA (sncRNA) 5' transfer RNA (tRNA) half
tcgagccggattc

SEQ ID NO: 9318 - DNA, 33 bp, Artificial Sequence
  synthetic circulating small noncoding RNA (sncRNA) 5' transfer RNA (tRNA) half
ggccgcgtggcctaatggataaggcgtctgact

SEQ ID NO: 9319 - DNA, 24 bp, Artificial Sequence
  synthetic circulating small noncoding RNA (sncRNA) 5' transfer RNA (tRNA) half
agagtccagagtgctagccattac

SEQ ID NO: 9320 - DNA, 14 bp, Artificial Sequence
  synthetic circulating small noncoding RNA (sncRNA) 5' transfer RNA (tRNA) half
cgaacccacaacct

SEQ ID NO: 9321 - DNA, 30 bp, Artificial Sequence
  synthetic circulating small noncoding RNA (sncRNA) 5' transfer RNA (tRNA) half
ggtccagggttcaagtccctgttcgggcgc

SEQ ID NO: 9322 - DNA, 38 bp, Artificial Sequence
  synthetic circulating small noncoding RNA (sncRNA) 5' transfer RNA (tRNA) half
acgccaaggtcgcgggttcgatccccgtacgggccaca

SEQ ID NO: 9323 - DNA, 33 bp, Artificial Sequence
  synthetic circulating small noncoding RNA (sncRNA) 5' transfer RNA (tRNA) half
ggcccagcacgcttccgctgcgccactctgctg

SEQ ID NO: 9324 - DNA, 15 bp, Artificial Sequence
  synthetic circulating small noncoding RNA (sncRNA) 5' transfer RNA (tRNA) half
atggataaggcattg

SEQ ID NO: 9325 - DNA, 21 bp, Artificial Sequence
  synthetic circulating small noncoding RNA (sncRNA) 5' transfer RNA (tRNA) half
ttaggtcgctggttcgattcc

SEQ ID NO: 9326 - DNA, 16 bp, Artificial Sequence
  synthetic circulating small noncoding RNA (sncRNA) 5' transfer RNA (tRNA) half
ccgtagtcggcaggat

SEQ ID NO: 9327 - DNA, 20 bp, Artificial Sequence
  synthetic circulating small noncoding RNA (sncRNA) 5' transfer RNA (tRNA) half
gaggtcccaccgagatttga

SEQ ID NO: 9328 - DNA, 28 bp, Artificial Sequence
  synthetic circulating small noncoding RNA (sncRNA) 5' transfer RNA (tRNA) half
gcgagaatcatacccctagaccaacgag

SEQ ID NO: 9329 - DNA, 13 bp, Artificial Sequence
  synthetic circulating small noncoding RNA (sncRNA) 5' transfer RNA (tRNA) half
tctaccgactgag

SEQ ID NO: 9330 - DNA, 22 bp, Artificial Sequence
  synthetic circulating small noncoding RNA (sncRNA) 5' transfer RNA (tRNA) half
gcgcccgaacagggacttgaac

SEQ ID NO: 9331 - DNA, 14 bp, Artificial Sequence
  synthetic circulating small noncoding RNA (sncRNA) 5' transfer RNA (tRNA) half
caggagtcgaacct

SEQ ID NO: 9332 - DNA, 19 bp, Artificial Sequence
  synthetic circulating small noncoding RNA (sncRNA) 5' transfer RNA (tRNA) half
cgtttggagatgccgggga

SEQ ID NO: 9333 - DNA, 38 bp, Artificial Sequence
  synthetic circulating small noncoding RNA (sncRNA) 5' transfer RNA (tRNA) half
accgagccagccaggagtcgaacctggaatcttctgat

SEQ ID NO: 9334 - DNA, 22 bp, Artificial Sequence
  synthetic circulating small noncoding RNA (sncRNA) 5' transfer RNA (tRNA) half
ggttgccccctctgaggttcga

SEQ ID NO: 9335 - DNA, 22 bp, Artificial Sequence
  synthetic circulating small noncoding RNA (sncRNA) 5' transfer RNA (tRNA) half
gttaggattcggcgctctcacc

SEQ ID NO: 9336 - DNA, 22 bp, Artificial Sequence
  synthetic circulating small noncoding RNA (sncRNA) 5' transfer RNA (tRNA) half
ggggattagctcaaatggtaga

SEQ ID NO: 9337 - DNA, 19 bp, Artificial Sequence
  synthetic circulating small noncoding RNA (sncRNA) 5' transfer RNA (tRNA) half
gggccgcctgggtgaaaac

SEQ ID NO: 9338 - DNA, 16 bp, Artificial Sequence
  synthetic circulating small noncoding RNA (sncRNA) 5' transfer RNA (tRNA) half
ggcgtccctgggtggg

SEQ ID NO: 9339 - DNA, 28 bp, Artificial Sequence
  synthetic circulating small noncoding RNA (sncRNA) 5' transfer RNA (tRNA) half
ggcgagaattctaccattgaaccaccaa

SEQ ID NO: 9340 - DNA, 18 bp, Artificial Sequence
  synthetic circulating small noncoding RNA (sncRNA) 5' transfer RNA (tRNA) half
actccggctcgaaggaga

SEQ ID NO: 9341 - DNA, 23 bp, Artificial Sequence
  synthetic circulating small noncoding RNA (sncRNA) 5' transfer RNA (tRNA) half
tggtcatcacgctcgcctcacac

SEQ ID NO: 9342 - DNA, 10 bp, Artificial Sequence
  synthetic circulating small noncoding RNA (sncRNA) 5' transfer RNA (tRNA) half
tccgcccggt

SEQ ID NO: 9343 - DNA, 28 bp, Artificial Sequence
  synthetic circulating small noncoding RNA (sncRNA) 5' transfer RNA (tRNA) half
gaactcggatcgctggattcagagtcca

SEQ ID NO: 9344 - DNA, 18 bp, Artificial Sequence
  synthetic circulating small noncoding RNA (sncRNA) 5' transfer RNA (tRNA) half
tttcacccaggcggcccg

SEQ ID NO: 9345 - DNA, 27 bp, Artificial Sequence
  synthetic circulating small noncoding RNA (sncRNA) 5' transfer RNA (tRNA) half
gacgacgaaggtgggattcgaacccac

SEQ ID NO: 9346 - DNA, 32 bp, Artificial Sequence
  synthetic circulating small noncoding RNA (sncRNA) 5' transfer RNA (tRNA) half
tgcacgaggccctgggttcgatccccagcacc

SEQ ID NO: 9347 - DNA, 14 bp, Artificial Sequence
  synthetic circulating small noncoding RNA (sncRNA) 5' transfer RNA (tRNA) half
gggggtatagctca

SEQ ID NO: 9348 - DNA, 19 bp, Artificial Sequence
  synthetic circulating small noncoding RNA (sncRNA) 5' transfer RNA (tRNA) half
gtttccgtagtgtagtggt

SEQ ID NO: 9349 - DNA, 34 bp, Artificial Sequence
  synthetic circulating small noncoding RNA (sncRNA) 5' transfer RNA (tRNA) half
tatgaggccccgggttcgatccccggcatctcca

SEQ ID NO: 9350 - DNA, 13 bp, Artificial Sequence
  synthetic circulating small noncoding RNA (sncRNA) 5' transfer RNA (tRNA) half
caccaacctttcg

SEQ ID NO: 9351 - DNA, 27 bp, Artificial Sequence
  synthetic circulating small noncoding RNA (sncRNA) 5' transfer RNA (tRNA) half
aggccccgggttcaatccccggcacct

SEQ ID NO: 9352 - DNA, 26 bp, Artificial Sequence
  synthetic circulating small noncoding RNA (sncRNA) 5' transfer RNA (tRNA) half
ccataccgggagtcgaacccgggccg

SEQ ID NO: 9353 - DNA, 16 bp, Artificial Sequence
  synthetic circulating small noncoding RNA (sncRNA) 5' transfer RNA (tRNA) half
cgaacccgggccgcgg

SEQ ID NO: 9354 - DNA, 17 bp, Artificial Sequence
  synthetic circulating small noncoding RNA (sncRNA) 5' transfer RNA (tRNA) half
ccatgctctaccgactg

SEQ ID NO: 9355 - DNA, 18 bp, Artificial Sequence
  synthetic circulating small noncoding RNA (sncRNA) 5' transfer RNA (tRNA) half
cattggccgggaatcgaa

SEQ ID NO: 9356 - DNA, 41 bp, Artificial Sequence
  synthetic circulating small noncoding RNA (sncRNA) 5' transfer RNA (tRNA) half
tcacgcgggagaccggggttcgattccccgacggggagtct

SEQ ID NO: 9357 - DNA, 35 bp, Artificial Sequence
  synthetic circulating small noncoding RNA (sncRNA) 5' transfer RNA (tRNA) half
cgtccctggtggtctagtggctaggattcggcgct

SEQ ID NO: 9358 - DNA, 30 bp, Artificial Sequence
  synthetic circulating small noncoding RNA (sncRNA) 5' transfer RNA (tRNA) half
gctcgtccgggatttgaacccgggacctct

SEQ ID NO: 9359 - DNA, 26 bp, Artificial Sequence
  synthetic circulating small noncoding RNA (sncRNA) 5' transfer RNA (tRNA) half
ggagaccggggttcgattccccgacg

SEQ ID NO: 9360 - DNA, 14 bp, Artificial Sequence
  synthetic circulating small noncoding RNA (sncRNA) 5' transfer RNA (tRNA) half
tcccggtgtgggaa

SEQ ID NO: 9361 - DNA, 30 bp, Artificial Sequence
  synthetic circulating small noncoding RNA (sncRNA) 5' transfer RNA (tRNA) half
tttccctagtgtagtggttatcacgttcgc

SEQ ID NO: 9362 - DNA, 28 bp, Artificial Sequence
  synthetic circulating small noncoding RNA (sncRNA) 5' transfer RNA (tRNA) half
cgtcggggaattgaaccccggtctcccg

SEQ ID NO: 9363 - DNA, 17 bp, Artificial Sequence
  synthetic circulating small noncoding RNA (sncRNA) 5' transfer RNA (tRNA) half
caatccccggcacctcc

SEQ ID NO: 9364 - DNA, 21 bp, Artificial Sequence
  synthetic circulating small noncoding RNA (sncRNA) 5' transfer RNA (tRNA) half
gcaccacgctctaaccaactg

SEQ ID NO: 9365 - DNA, 29 bp, Artificial Sequence
  synthetic circulating small noncoding RNA (sncRNA) 5' transfer RNA (tRNA) half
cctccccgtcggggaattgaaccccggtc

SEQ ID NO: 9366 - DNA, 35 bp, Artificial Sequence
  synthetic circulating small noncoding RNA (sncRNA) 5' transfer RNA (tRNA) half
actccctggtggtctagtggttaggattcggcgct

SEQ ID NO: 9367 - DNA, 15 bp, Artificial Sequence
  synthetic circulating small noncoding RNA (sncRNA) 5' transfer RNA (tRNA) half
cggtctcccgcgtga

SEQ ID NO: 9368 - DNA, 31 bp, Artificial Sequence
  synthetic circulating small noncoding RNA (sncRNA) 5' transfer RNA (tRNA) half
tacggggatcgaacccgcgaccttggcgtta

SEQ ID NO: 9369 - DNA, 21 bp, Artificial Sequence
  synthetic circulating small noncoding RNA (sncRNA) 5' transfer RNA (tRNA) half
gagtactaaccactatacgat

SEQ ID NO: 9370 - DNA, 14 bp, Artificial Sequence
  synthetic circulating small noncoding RNA (sncRNA) 5' transfer RNA (tRNA) half
tggccgagcggtct

SEQ ID NO: 9371 - DNA, 36 bp, Artificial Sequence
  synthetic circulating small noncoding RNA (sncRNA) 5' transfer RNA (tRNA) half
aaccgaaaggttggtggttcgagcccacccagggac

SEQ ID NO: 9372 - DNA, 28 bp, Artificial Sequence
  synthetic circulating small noncoding RNA (sncRNA) 5' transfer RNA (tRNA) half
ggtcgtgggttcgagccccacgttgggc

SEQ ID NO: 9373 - DNA, 32 bp, Artificial Sequence
  synthetic circulating small noncoding RNA (sncRNA) 5' transfer RNA (tRNA) half
gactctggtgggactcgaacccacaacctttg

SEQ ID NO: 9374 - DNA, 17 bp, Artificial Sequence
  synthetic circulating small noncoding RNA (sncRNA) 5' transfer RNA (tRNA) half
ggatcgctggattcaga

SEQ ID NO: 9375 - DNA, 31 bp, Artificial Sequence
  synthetic circulating small noncoding RNA (sncRNA) 5' transfer RNA (tRNA) half
cccaggcggcccgggttcgactcccggtatg

SEQ ID NO: 9376 - DNA, 16 bp, Artificial Sequence
  synthetic circulating small noncoding RNA (sncRNA) 5' transfer RNA (tRNA) half
ggttccatagtgtagc

SEQ ID NO: 9377 - DNA, 40 bp, Artificial Sequence
  synthetic circulating small noncoding RNA (sncRNA) 5' transfer RNA (tRNA) half
gttgccccctctgaggttcgaactcaggaccttcagatta

SEQ ID NO: 9378 - DNA, 19 bp, Artificial Sequence
  synthetic circulating small noncoding RNA (sncRNA) 5' transfer RNA (tRNA) half
tcgaatcccagcggtgcct

SEQ ID NO: 9379 - DNA, 21 bp, Artificial Sequence
  synthetic circulating small noncoding RNA (sncRNA) 5' transfer RNA (tRNA) half
gcttccctgaccgggaatcga

SEQ ID NO: 9380 - DNA, 24 bp, Artificial Sequence
  synthetic circulating small noncoding RNA (sncRNA) 5' transfer RNA (tRNA) half
aggattcgaacctgcgcggggaga

SEQ ID NO: 9381 - DNA, 23 bp, Artificial Sequence
  synthetic circulating small noncoding RNA (sncRNA) 5' transfer RNA (tRNA) half
gaggtcccaccgagatttgaact

SEQ ID NO: 9382 - DNA, 19 bp, Artificial Sequence
  synthetic circulating small noncoding RNA (sncRNA) 5' transfer RNA (tRNA) half
ctaggggtatgattctcgg

SEQ ID NO: 9383 - DNA, 21 bp, Artificial Sequence
  synthetic circulating small noncoding RNA (sncRNA) 5' transfer RNA (tRNA) half
agagcgccgaatcctaaccac

SEQ ID NO: 9384 - DNA, 20 bp, Artificial Sequence
  synthetic circulating small noncoding RNA (sncRNA) 5' transfer RNA (tRNA) half
gctctaccgactgagctatc

SEQ ID NO: 9385 - DNA, 18 bp, Artificial Sequence
  synthetic circulating small noncoding RNA (sncRNA) 5' transfer RNA (tRNA) half
aggatggccgagcggtct

SEQ ID NO: 9386 - DNA, 22 bp, Artificial Sequence
  synthetic circulating small noncoding RNA (sncRNA) 5' transfer RNA (tRNA) half
gcggcccgggttcgactcccgg

SEQ ID NO: 9387 - DNA, 17 bp, Artificial Sequence
  synthetic circulating small noncoding RNA (sncRNA) 5' transfer RNA (tRNA) half
tagctcagtcggtagag

SEQ ID NO: 9388 - DNA, 15 bp, Artificial Sequence
  synthetic circulating small noncoding RNA (sncRNA) 5' transfer RNA (tRNA) half
gcggcccgggttcga

SEQ ID NO: 9389 - DNA, 19 bp, Artificial Sequence
  synthetic circulating small noncoding RNA (sncRNA) 5' transfer RNA (tRNA) half
aacccgggcctcccgcgtg

SEQ ID NO: 9390 - DNA, 20 bp, Artificial Sequence
  synthetic circulating small noncoding RNA (sncRNA) 5' transfer RNA (tRNA) half
gtcccaccgagatttgaact

SEQ ID NO: 9391 - DNA, 25 bp, Artificial Sequence
  synthetic circulating small noncoding RNA (sncRNA) 5' transfer RNA (tRNA) half
accgactgagctatccgggcgctct

SEQ ID NO: 9392 - DNA, 14 bp, Artificial Sequence
  synthetic circulating small noncoding RNA (sncRNA) 5' transfer RNA (tRNA) half
tgagctacatcccc

SEQ ID NO: 9393 - DNA, 35 bp, Artificial Sequence
  synthetic circulating small noncoding RNA (sncRNA) 5' transfer RNA (tRNA) half
gccagggattgtgggttcgagtcccatctggggtg

SEQ ID NO: 9394 - DNA, 14 bp, Artificial Sequence
  synthetic circulating small noncoding RNA (sncRNA) 5' transfer RNA (tRNA) half
agcgtgctgggccc

SEQ ID NO: 9395 - DNA, 20 bp, Artificial Sequence
  synthetic circulating small noncoding RNA (sncRNA) 5' transfer RNA (tRNA) half
cctccccgtcggggaattga

SEQ ID NO: 9396 - DNA, 16 bp, Artificial Sequence
  synthetic circulating small noncoding RNA (sncRNA) 5' transfer RNA (tRNA) half
ggtccccggttcgaaa

SEQ ID NO: 9397 - DNA, 27 bp, Artificial Sequence
  synthetic circulating small noncoding RNA (sncRNA) 5' transfer RNA (tRNA) half
tcgcctgccacgcgggaggcccgggtt

SEQ ID NO: 9398 - DNA, 15 bp, Artificial Sequence
  synthetic circulating small noncoding RNA (sncRNA) 5' transfer RNA (tRNA) half
ccgggcctcccgcgt

SEQ ID NO: 9399 - DNA, 29 bp, Artificial Sequence
  synthetic circulating small noncoding RNA (sncRNA) 5' transfer RNA (tRNA) half
ggcttaggaggccagtgccttatccatta

SEQ ID NO: 9400 - DNA, 28 bp, Artificial Sequence
  synthetic circulating small noncoding RNA (sncRNA) 5' transfer RNA (tRNA) half
gaggcgaacgtgataaccactacactac

SEQ ID NO: 9401 - DNA, 42 bp, Artificial Sequence
  synthetic circulating small noncoding RNA (sncRNA) 5' transfer RNA (tRNA) half
agtcggcaggattcgaacctgcgcggggaaaccccaatggat

SEQ ID NO: 9402 - DNA, 16 bp, Artificial Sequence
  synthetic circulating small noncoding RNA (sncRNA) 5' transfer RNA (tRNA) half
gtatggaggcgtgggt

SEQ ID NO: 9403 - DNA, 12 bp, Artificial Sequence
  synthetic circulating small noncoding RNA (sncRNA) 5' transfer RNA (tRNA) half
aggcgagaattc

SEQ ID NO: 9404 - DNA, 34 bp, Artificial Sequence
  synthetic circulating small noncoding RNA (sncRNA) 5' transfer RNA (tRNA) half
ggccgcggcggtgagagcgccgaatcctaaccac

SEQ ID NO: 9405 - DNA, 19 bp, Artificial Sequence
  synthetic circulating small noncoding RNA (sncRNA) 5' transfer RNA (tRNA) half
tccccggcacctccacttc

SEQ ID NO: 9406 - DNA, 24 bp, Artificial Sequence
  synthetic circulating small noncoding RNA (sncRNA) 5' transfer RNA (tRNA) half
acaacgcagagtactaaccactat

SEQ ID NO: 9407 - DNA, 13 bp, Artificial Sequence
  synthetic circulating small noncoding RNA (sncRNA) 5' transfer RNA (tRNA) half
ttatcacgttcgc

SEQ ID NO: 9408 - DNA, 42 bp, Artificial Sequence
  synthetic circulating small noncoding RNA (sncRNA) 5' transfer RNA (tRNA) half
tgtgccccgtgtgaggatcgaactcacgaccttcagattatg

SEQ ID NO: 9409 - DNA, 26 bp, Artificial Sequence
  synthetic circulating small noncoding RNA (sncRNA) 5' transfer RNA (tRNA) half
gaccccgacgtgacttgaacacgcaa

SEQ ID NO: 9410 - DNA, 12 bp, Artificial Sequence
  synthetic circulating small noncoding RNA (sncRNA) 5' transfer RNA (tRNA) half
gaaccagcgacc

SEQ ID NO: 9411 - DNA, 38 bp, Artificial Sequence
  synthetic circulating small noncoding RNA (sncRNA) 5' transfer RNA (tRNA) half
ctagtggttaggattcggcgctctcaccgccgcggccc

SEQ ID NO: 9412 - DNA, 13 bp, Artificial Sequence
  synthetic circulating small noncoding RNA (sncRNA) 5' transfer RNA (tRNA) half
tgccgaaacccgg

SEQ ID NO: 9413 - DNA, 28 bp, Artificial Sequence
  synthetic circulating small noncoding RNA (sncRNA) 5' transfer RNA (tRNA) half
aaccaggaatcctaaccgctagaccatg

SEQ ID NO: 9414 - DNA, 11 bp, Artificial Sequence
  synthetic circulating small noncoding RNA (sncRNA) 5' transfer RNA (tRNA) half
gaacccgcgac

SEQ ID NO: 9415 - DNA, 18 bp, Artificial Sequence
  synthetic circulating small noncoding RNA (sncRNA) 5' transfer RNA (tRNA) half
cagtcggtagagcatgag

SEQ ID NO: 9416 - DNA, 25 bp, Artificial Sequence
  synthetic circulating small noncoding RNA (sncRNA) 5' transfer RNA (tRNA) half
cagaagattccaggttcgactcctg

SEQ ID NO: 9417 - DNA, 18 bp, Artificial Sequence
  synthetic circulating small noncoding RNA (sncRNA) 5' transfer RNA (tRNA) half
actcccggtatgggaaca

SEQ ID NO: 9418 - DNA, 22 bp, Artificial Sequence
  synthetic circulating small noncoding RNA (sncRNA) 5' transfer RNA (tRNA) half
cagtggtagagcatttgactgc

SEQ ID NO: 9419 - DNA, 35 bp, Artificial Sequence
  synthetic circulating small noncoding RNA (sncRNA) 5' transfer RNA (tRNA) half
gagcgccgaatcctaaccactagaccaccagggag

SEQ ID NO: 9420 - DNA, 19 bp, Artificial Sequence
  synthetic circulating small noncoding RNA (sncRNA) 5' transfer RNA (tRNA) half
ggccgcggcggtgagagcg

SEQ ID NO: 9421 - DNA, 29 bp, Artificial Sequence
  synthetic circulating small noncoding RNA (sncRNA) 5' transfer RNA (tRNA) half
gaccacgaagggactcgaaccctcaatct

SEQ ID NO: 9422 - DNA, 15 bp, Artificial Sequence
  synthetic circulating small noncoding RNA (sncRNA) 5' transfer RNA (tRNA) half
aacccgggatcgaac

SEQ ID NO: 9423 - DNA, 28 bp, Artificial Sequence
  synthetic circulating small noncoding RNA (sncRNA) 5' transfer RNA (tRNA) half
aaccggggacctcttgatctgcagtcaa

SEQ ID NO: 9424 - DNA, 28 bp, Artificial Sequence
  synthetic circulating small noncoding RNA (sncRNA) 5' transfer RNA (tRNA) half
ggggatgtagctcaatggtagagcacat

SEQ ID NO: 9425 - DNA, 33 bp, Artificial Sequence
  synthetic circulating small noncoding RNA (sncRNA) 5' transfer RNA (tRNA) half
gcttccctgaccgggaatcgaacccgggccgcg

SEQ ID NO: 9426 - DNA, 29 bp, Artificial Sequence
  synthetic circulating small noncoding RNA (sncRNA) 5' transfer RNA (tRNA) half
aggttgcgtgttcaaatcacgtcggggtc

SEQ ID NO: 9427 - DNA, 14 bp, Artificial Sequence
  synthetic circulating small noncoding RNA (sncRNA) 5' transfer RNA (tRNA) half
tagaccatatggga

SEQ ID NO: 9428 - DNA, 15 bp, Artificial Sequence
  synthetic circulating small noncoding RNA (sncRNA) 5' transfer RNA (tRNA) half
cgggacctctcgcac

SEQ ID NO: 9429 - DNA, 33 bp, Artificial Sequence
  synthetic circulating small noncoding RNA (sncRNA) 5' transfer RNA (tRNA) half
cagaagattgagggttcgagtcccttcgtggtc

SEQ ID NO: 9430 - DNA, 19 bp, Artificial Sequence
  synthetic circulating small noncoding RNA (sncRNA) 5' transfer RNA (tRNA) half
gactccgccgggactcgaa

SEQ ID NO: 9431 - DNA, 15 bp, Artificial Sequence
  synthetic circulating small noncoding RNA (sncRNA) 5' transfer RNA (tRNA) half
gcggggatactaacc

SEQ ID NO: 9432 - DNA, 14 bp, Artificial Sequence
  synthetic circulating small noncoding RNA (sncRNA) 5' transfer RNA (tRNA) half
cgcggcccgggttc

SEQ ID NO: 9433 - DNA, 12 bp, Artificial Sequence
  synthetic circulating small noncoding RNA (sncRNA) 5' transfer RNA (tRNA) half
caggagtcgaac

SEQ ID NO: 9434 - DNA, 23 bp, Artificial Sequence
  synthetic circulating small noncoding RNA (sncRNA) 5' transfer RNA (tRNA) half
cgggagtcgaacccgggccgcct

SEQ ID NO: 9435 - DNA, 27 bp, Artificial Sequence
  synthetic circulating small noncoding RNA (sncRNA) 5' transfer RNA (tRNA) half
agtccagagtgctaaccattacaccat

SEQ ID NO: 9436 - DNA, 19 bp, Artificial Sequence
  synthetic circulating small noncoding RNA (sncRNA) 5' transfer RNA (tRNA) half
ggttccatagtgtagcggt

SEQ ID NO: 9437 - DNA, 30 bp, Artificial Sequence
  synthetic circulating small noncoding RNA (sncRNA) 5' transfer RNA (tRNA) half
ttctgtagtgtagtggttatcacgctcgcc

SEQ ID NO: 9438 - DNA, 22 bp, Artificial Sequence
  synthetic circulating small noncoding RNA (sncRNA) 5' transfer RNA (tRNA) half
gcccagcacgcttccgctgcgc

SEQ ID NO: 9439 - DNA, 16 bp, Artificial Sequence
  synthetic circulating small noncoding RNA (sncRNA) 5' transfer RNA (tRNA) half
gggaggcccgggttcg

SEQ ID NO: 9440 - DNA, 35 bp, Artificial Sequence
  synthetic circulating small noncoding RNA (sncRNA) 5' transfer RNA (tRNA) half
cagaagattccaggttcgactcctggctggctcgt

SEQ ID NO: 9441 - DNA, 14 bp, Artificial Sequence
  synthetic circulating small noncoding RNA (sncRNA) 5' transfer RNA (tRNA) half
gcggcggtgagagc

SEQ ID NO: 9442 - DNA, 34 bp, Artificial Sequence
  synthetic circulating small noncoding RNA (sncRNA) 5' transfer RNA (tRNA) half
cccatgctctaccgactgagctagccgggcagat

SEQ ID NO: 9443 - DNA, 32 bp, Artificial Sequence
  synthetic circulating small noncoding RNA (sncRNA) 5' transfer RNA (tRNA) half
gccgctggtgtagtggtatcatgcaagattcc

SEQ ID NO: 9444 - DNA, 17 bp, Artificial Sequence
  synthetic circulating small noncoding RNA (sncRNA) 5' transfer RNA (tRNA) half
tcaaatcccggacgagc

SEQ ID NO: 9445 - DNA, 13 bp, Artificial Sequence
  synthetic circulating small noncoding RNA (sncRNA) 5' transfer RNA (tRNA) half
ctcccgcgtggca

SEQ ID NO: 9446 - DNA, 16 bp, Artificial Sequence
  synthetic circulating small noncoding RNA (sncRNA) 5' transfer RNA (tRNA) half
tcaaagtccagagtgc

SEQ ID NO: 9447 - DNA, 23 bp, Artificial Sequence
  synthetic circulating small noncoding RNA (sncRNA) 5' transfer RNA (tRNA) half
gttcgattcccgggcggcgcatg

SEQ ID NO: 9448 - DNA, 23 bp, Artificial Sequence
  synthetic circulating small noncoding RNA (sncRNA) 5' transfer RNA (tRNA) half
cctgtcacgcgggagaccggggt

SEQ ID NO: 9449 - DNA, 23 bp, Artificial Sequence
  synthetic circulating small noncoding RNA (sncRNA) 5' transfer RNA (tRNA) half
gttcgaatcccacttctgacaca

SEQ ID NO: 9450 - DNA, 21 bp, Artificial Sequence
  synthetic circulating small noncoding RNA (sncRNA) 5' transfer RNA (tRNA) half
gaactcgcgacccctggttta

SEQ ID NO: 9451 - DNA, 11 bp, Artificial Sequence
  synthetic circulating small noncoding RNA (sncRNA) 5' transfer RNA (tRNA) half
gaaccgaggtt

SEQ ID NO: 9452 - DNA, 13 bp, Artificial Sequence
  synthetic circulating small noncoding RNA (sncRNA) 5' transfer RNA (tRNA) half
gtctaaggcgctg

SEQ ID NO: 9453 - DNA, 13 bp, Artificial Sequence
  synthetic circulating small noncoding RNA (sncRNA) 5' transfer RNA (tRNA) half
cccgggcctcccg

SEQ ID NO: 9454 - DNA, 24 bp, Artificial Sequence
  synthetic circulating small noncoding RNA (sncRNA) 5' transfer RNA (tRNA) half
ccccgtcggggaattgaaccccgg

SEQ ID NO: 9455 - DNA, 16 bp, Artificial Sequence
  synthetic circulating small noncoding RNA (sncRNA) 5' transfer RNA (tRNA) half
ctctcaccgccgcggc

SEQ ID NO: 9456 - DNA, 19 bp, Artificial Sequence
  synthetic circulating small noncoding RNA (sncRNA) 5' transfer RNA (tRNA) half
attcagagtccagagtgct

SEQ ID NO: 9457 - DNA, 18 bp, Artificial Sequence
  synthetic circulating small noncoding RNA (sncRNA) 5' transfer RNA (tRNA) half
ttcgattcccggccaatg

SEQ ID NO: 9458 - DNA, 19 bp, Artificial Sequence
  synthetic circulating small noncoding RNA (sncRNA) 5' transfer RNA (tRNA) half
gccgagaccgtccctgggt

SEQ ID NO: 9459 - DNA, 18 bp, Artificial Sequence
  synthetic circulating small noncoding RNA (sncRNA) 5' transfer RNA (tRNA) half
ggccgcggcggtgagagc

SEQ ID NO: 9460 - DNA, 14 bp, Artificial Sequence
  synthetic circulating small noncoding RNA (sncRNA) 5' transfer RNA (tRNA) half
tagaccatgtggga

SEQ ID NO: 9461 - DNA, 36 bp, Artificial Sequence
  synthetic circulating small noncoding RNA (sncRNA) 5' transfer RNA (tRNA) half
tagtgccgagactcggattcgaaccgaggttgctgc

SEQ ID NO: 9462 - DNA, 26 bp, Artificial Sequence
  synthetic circulating small noncoding RNA (sncRNA) 5' transfer RNA (tRNA) half
cgtagtgtagtggttatcacgttcgc

SEQ ID NO: 9463 - DNA, 16 bp, Artificial Sequence
  synthetic circulating small noncoding RNA (sncRNA) 5' transfer RNA (tRNA) half
cgaagcgagaatcata

SEQ ID NO: 9464 - DNA, 29 bp, Artificial Sequence
  synthetic circulating small noncoding RNA (sncRNA) 5' transfer RNA (tRNA) half
gcaagaattctaccactgaaccaccaatg

SEQ ID NO: 9465 - DNA, 11 bp, Artificial Sequence
  synthetic circulating small noncoding RNA (sncRNA) 5' transfer RNA (tRNA) half
ccgtccgtgcc

SEQ ID NO: 9466 - DNA, 15 bp, Artificial Sequence
  synthetic circulating small noncoding RNA (sncRNA) 5' transfer RNA (tRNA) half
cgttatccattgcgc

SEQ ID NO: 9467 - DNA, 16 bp, Artificial Sequence
  synthetic circulating small noncoding RNA (sncRNA) 5' transfer RNA (tRNA) half
atcccacttctgacac

SEQ ID NO: 9468 - DNA, 13 bp, Artificial Sequence
  synthetic circulating small noncoding RNA (sncRNA) 5' transfer RNA (tRNA) half
aggtcccgggttc

SEQ ID NO: 9469 - DNA, 15 bp, Artificial Sequence
  synthetic circulating small noncoding RNA (sncRNA) 5' transfer RNA (tRNA) half
gtctcttcgggggcg

SEQ ID NO: 9470 - DNA, 22 bp, Artificial Sequence
  synthetic circulating small noncoding RNA (sncRNA) 5' transfer RNA (tRNA) half
cgtgtttccgcccggtttcgaa

SEQ ID NO: 9471 - DNA, 32 bp, Artificial Sequence
  synthetic circulating small noncoding RNA (sncRNA) 5' transfer RNA (tRNA) half
agcgagaatcatacccctagaccaacgagccg

SEQ ID NO: 9472 - DNA, 21 bp, Artificial Sequence
  synthetic circulating small noncoding RNA (sncRNA) 5' transfer RNA (tRNA) half
cgattcccggccaacgcataa

SEQ ID NO: 9473 - DNA, 29 bp, Artificial Sequence
  synthetic circulating small noncoding RNA (sncRNA) 5' transfer RNA (tRNA) half
caaatgctctacccctgagctataccccc

SEQ ID NO: 9474 - DNA, 31 bp, Artificial Sequence
  synthetic circulating small noncoding RNA (sncRNA) 5' transfer RNA (tRNA) half
ggacccatggtgtaatggttagcactctgga

SEQ ID NO: 9475 - DNA, 20 bp, Artificial Sequence
  synthetic circulating small noncoding RNA (sncRNA) 5' transfer RNA (tRNA) half
gaatccagcgatccgagttc

SEQ ID NO: 9476 - DNA, 20 bp, Artificial Sequence
  synthetic circulating small noncoding RNA (sncRNA) 5' transfer RNA (tRNA) half
accgtccctgggtgggctcg

SEQ ID NO: 9477 - DNA, 22 bp, Artificial Sequence
  synthetic circulating small noncoding RNA (sncRNA) 5' transfer RNA (tRNA) half
aggaatcctaaccgctagacca

SEQ ID NO: 9478 - DNA, 14 bp, Artificial Sequence
  synthetic circulating small noncoding RNA (sncRNA) 5' transfer RNA (tRNA) half
cgatccatcgacct

SEQ ID NO: 9479 - DNA, 31 bp, Artificial Sequence
  synthetic circulating small noncoding RNA (sncRNA) 5' transfer RNA (tRNA) half
gtctccccgtcggggaatcgaaccccggtct

SEQ ID NO: 9480 - DNA, 35 bp, Artificial Sequence
  synthetic circulating small noncoding RNA (sncRNA) 5' transfer RNA (tRNA) half
caggcggggatactaaccactatactaacgaggag

SEQ ID NO: 9481 - DNA, 32 bp, Artificial Sequence
  synthetic circulating small noncoding RNA (sncRNA) 5' transfer RNA (tRNA) half
gctcgttggtctaggggtatgattctcgcttt

SEQ ID NO: 9482 - DNA, 18 bp, Artificial Sequence
  synthetic circulating small noncoding RNA (sncRNA) 5' transfer RNA (tRNA) half
tagaattctcgcctgcca

SEQ ID NO: 9483 - DNA, 10 bp, Artificial Sequence
  synthetic circulating small noncoding RNA (sncRNA) 5' transfer RNA (tRNA) half
tcgaaccggg

SEQ ID NO: 9484 - DNA, 14 bp, Artificial Sequence
  synthetic circulating small noncoding RNA (sncRNA) 5' transfer RNA (tRNA) half
atccccggcatctc

SEQ ID NO: 9485 - DNA, 37 bp, Artificial Sequence
  synthetic circulating small noncoding RNA (sncRNA) 5' transfer RNA (tRNA) half
accgaagatcgcgggttcgaaccccgtccgtgcctgc

SEQ ID NO: 9486 - DNA, 17 bp, Artificial Sequence
  synthetic circulating small noncoding RNA (sncRNA) 5' transfer RNA (tRNA) half
agcgactctggtgggac

SEQ ID NO: 9487 - DNA, 20 bp, Artificial Sequence
  synthetic circulating small noncoding RNA (sncRNA) 5' transfer RNA (tRNA) half
gtagaattctcgcctgccac

SEQ ID NO: 9488 - DNA, 42 bp, Artificial Sequence
  synthetic circulating small noncoding RNA (sncRNA) 5' transfer RNA (tRNA) half
aaagtctgatgctctaccgactgagctatccgggctcttagc

SEQ ID NO: 9489 - DNA, 34 bp, Artificial Sequence
  synthetic circulating small noncoding RNA (sncRNA) 5' transfer RNA (tRNA) half
atgaccccgacgtgatttgaacacgcaaccttct

SEQ ID NO: 9490 - DNA, 14 bp, Artificial Sequence
  synthetic circulating small noncoding RNA (sncRNA) 5' transfer RNA (tRNA) half
agggttcgaacctg

SEQ ID NO: 9491 - DNA, 16 bp, Artificial Sequence
  synthetic circulating small noncoding RNA (sncRNA) 5' transfer RNA (tRNA) half
cattcttgcgacccgg

SEQ ID NO: 9492 - DNA, 29 bp, Artificial Sequence
  synthetic circulating small noncoding RNA (sncRNA) 5' transfer RNA (tRNA) half
ggattgtgggttcgagtcccatctgggtc

SEQ ID NO: 9493 - DNA, 34 bp, Artificial Sequence
  synthetic circulating small noncoding RNA (sncRNA) 5' transfer RNA (tRNA) half
atgccgtgactcggattcgaaccgaggttgctgc

SEQ ID NO: 9494 - DNA, 16 bp, Artificial Sequence
  synthetic circulating small noncoding RNA (sncRNA) 5' transfer RNA (tRNA) half
atcgaacccgggccgc

SEQ ID NO: 9495 - DNA, 19 bp, Artificial Sequence
  synthetic circulating small noncoding RNA (sncRNA) 5' transfer RNA (tRNA) half
aggcgaatgtgataaccac

SEQ ID NO: 9496 - DNA, 14 bp, Artificial Sequence
  synthetic circulating small noncoding RNA (sncRNA) 5' transfer RNA (tRNA) half
tgcagtcaaatgct

SEQ ID NO: 9497 - DNA, 15 bp, Artificial Sequence
  synthetic circulating small noncoding RNA (sncRNA) 5' transfer RNA (tRNA) half
cccatgctctaccga

SEQ ID NO: 9498 - DNA, 18 bp, Artificial Sequence
  synthetic circulating small noncoding RNA (sncRNA) 5' transfer RNA (tRNA) half
gtagtggttatcacgttc

SEQ ID NO: 9499 - DNA, 19 bp, Artificial Sequence
  synthetic circulating small noncoding RNA (sncRNA) 5' transfer RNA (tRNA) half
cgtgactcggattcgaacc

SEQ ID NO: 9500 - DNA, 32 bp, Artificial Sequence
  synthetic circulating small noncoding RNA (sncRNA) 5' transfer RNA (tRNA) half
acaacgcagagtactaaccactatacgatcac

SEQ ID NO: 9501 - DNA, 18 bp, Artificial Sequence
  synthetic circulating small noncoding RNA (sncRNA) 5' transfer RNA (tRNA) half
gaacccgggacctctcgc

SEQ ID NO: 9502 - DNA, 17 bp, Artificial Sequence
  synthetic circulating small noncoding RNA (sncRNA) 5' transfer RNA (tRNA) half
acccacgcctccgaaga

SEQ ID NO: 9503 - DNA, 23 bp, Artificial Sequence
  synthetic circulating small noncoding RNA (sncRNA) 5' transfer RNA (tRNA) half
cctccccgtcggggaatcgaacc

SEQ ID NO: 9504 - DNA, 21 bp, Artificial Sequence
  synthetic circulating small noncoding RNA (sncRNA) 5' transfer RNA (tRNA) half
tgaatccagcgacccgagttc

SEQ ID NO: 9505 - DNA, 19 bp, Artificial Sequence
  synthetic circulating small noncoding RNA (sncRNA) 5' transfer RNA (tRNA) half
tgtgcattggccgggaatc

SEQ ID NO: 9506 - DNA, 18 bp, Artificial Sequence
  synthetic circulating small noncoding RNA (sncRNA) 5' transfer RNA (tRNA) half
gtgagtatccccgcctgt

SEQ ID NO: 9507 - DNA, 23 bp, Artificial Sequence
  synthetic circulating small noncoding RNA (sncRNA) 5' transfer RNA (tRNA) half
ggctcgttggtctaggggtatga

SEQ ID NO: 9508 - DNA, 23 bp, Artificial Sequence
  synthetic circulating small noncoding RNA (sncRNA) 5' transfer RNA (tRNA) half
tgataaccactacactacggaaa

SEQ ID NO: 9509 - DNA, 18 bp, Artificial Sequence
  synthetic circulating small noncoding RNA (sncRNA) 5' transfer RNA (tRNA) half
gtaaaccaggggtcgcga

SEQ ID NO: 9510 - DNA, 27 bp, Artificial Sequence
  synthetic circulating small noncoding RNA (sncRNA) 5' transfer RNA (tRNA) half
gtcgagccagccaggagtcgaacctag

SEQ ID NO: 9511 - DNA, 20 bp, Artificial Sequence
  synthetic circulating small noncoding RNA (sncRNA) 5' transfer RNA (tRNA) half
tcgaatcccacttctgacac

SEQ ID NO: 9512 - DNA, 25 bp, Artificial Sequence
  synthetic circulating small noncoding RNA (sncRNA) 5' transfer RNA (tRNA) half
gcgagaatcatacccctagaccaac

SEQ ID NO: 9513 - DNA, 33 bp, Artificial Sequence
  synthetic circulating small noncoding RNA (sncRNA) 5' transfer RNA (tRNA) half
cgcagagtactaaccactatacgatcacggcga

SEQ ID NO: 9514 - DNA, 21 bp, Artificial Sequence
  synthetic circulating small noncoding RNA (sncRNA) 5' transfer RNA (tRNA) half
cgtgattcgaacacgcagcct

SEQ ID NO: 9515 - DNA, 9 bp, Artificial Sequence
  synthetic circulating small noncoding RNA (sncRNA) 5' transfer RNA (tRNA) half
gattcggcg

SEQ ID NO: 9516 - DNA, 21 bp, Artificial Sequence
  synthetic circulating small noncoding RNA (sncRNA) 5' transfer RNA (tRNA) half
tataacgtgtttccgcccggt

SEQ ID NO: 9517 - DNA, 20 bp, Artificial Sequence
  synthetic circulating small noncoding RNA (sncRNA) 5' transfer RNA (tRNA) half
ttcgagccccagtggaacca

SEQ ID NO: 9518 - DNA, 23 bp, Artificial Sequence
  synthetic circulating small noncoding RNA (sncRNA) 5' transfer RNA (tRNA) half
cctaatggataaggcatcagcct

SEQ ID NO: 9519 - DNA, 29 bp, Artificial Sequence
  synthetic circulating small noncoding RNA (sncRNA) 5' transfer RNA (tRNA) half
gcggcccgggttcgattcccggtcaggga

SEQ ID NO: 9520 - DNA, 15 bp, Artificial Sequence
  synthetic circulating small noncoding RNA (sncRNA) 5' transfer RNA (tRNA) half
atgctctaccgactg

SEQ ID NO: 9521 - DNA, 12 bp, Artificial Sequence
  synthetic circulating small noncoding RNA (sncRNA) 5' transfer RNA (tRNA) half
tcggccacgcta

SEQ ID NO: 9522 - DNA, 19 bp, Artificial Sequence
  synthetic circulating small noncoding RNA (sncRNA) 5' transfer RNA (tRNA) half
attccggctcgaaggactt

SEQ ID NO: 9523 - DNA, 15 bp, Artificial Sequence
  synthetic circulating small noncoding RNA (sncRNA) 5' transfer RNA (tRNA) half
agattaagagtctca

SEQ ID NO: 9524 - DNA, 26 bp, Artificial Sequence
  synthetic circulating small noncoding RNA (sncRNA) 5' transfer RNA (tRNA) half
ccccgtcggggaattgaaccccggtc

SEQ ID NO: 9525 - DNA, 18 bp, Artificial Sequence
  synthetic circulating small noncoding RNA (sncRNA) 5' transfer RNA (tRNA) half
actcccggtgtgggaaca

SEQ ID NO: 9526 - DNA, 35 bp, Artificial Sequence
  synthetic circulating small noncoding RNA (sncRNA) 5' transfer RNA (tRNA) half
tctgaatccagcgatccgagttcaaatctcggtgg

SEQ ID NO: 9527 - DNA, 30 bp, Artificial Sequence
  synthetic circulating small noncoding RNA (sncRNA) 5' transfer RNA (tRNA) half
ggggtcgcgagttcaaatctcgctggggcc

SEQ ID NO: 9528 - DNA, 16 bp, Artificial Sequence
  synthetic circulating small noncoding RNA (sncRNA) 5' transfer RNA (tRNA) half
gtccaacgccttaacc

SEQ ID NO: 9529 - DNA, 9 bp, Artificial Sequence
  synthetic circulating small noncoding RNA (sncRNA) 5' transfer RNA (tRNA) half
tataccccc

SEQ ID NO: 9530 - DNA, 18 bp, Artificial Sequence
  synthetic circulating small noncoding RNA (sncRNA) 5' transfer RNA (tRNA) half
gaccccgacgtgattcga

SEQ ID NO: 9531 - DNA, 33 bp, Artificial Sequence
  synthetic circulating small noncoding RNA (sncRNA) 5' transfer RNA (tRNA) half
cacaccgggagtcgaacccgggccgcctgggtg

SEQ ID NO: 9532 - DNA, 29 bp, Artificial Sequence
  synthetic circulating small noncoding RNA (sncRNA) 5' transfer RNA (tRNA) half
ggagaccggggttcgattccccgacgggg

SEQ ID NO: 9533 - DNA, 20 bp, Artificial Sequence
  synthetic circulating small noncoding RNA (sncRNA) 5' transfer RNA (tRNA) half
gaccactacactacggaaac

SEQ ID NO: 9534 - DNA, 17 bp, Artificial Sequence
  synthetic circulating small noncoding RNA (sncRNA) 5' transfer RNA (tRNA) half
gttagcactctggactc

SEQ ID NO: 9535 - DNA, 33 bp, Artificial Sequence
  synthetic circulating small noncoding RNA (sncRNA) 5' transfer RNA (tRNA) half
aagaggtccccggttcaaatccgggtgccccct

SEQ ID NO: 9536 - DNA, 33 bp, Artificial Sequence
  synthetic circulating small noncoding RNA (sncRNA) 5' transfer RNA (tRNA) half
ggcggggatactaaccactatactaacgaggag

SEQ ID NO: 9537 - DNA, 13 bp, Artificial Sequence
  synthetic circulating small noncoding RNA (sncRNA) 5' transfer RNA (tRNA) half
cccgggtcaactg

SEQ ID NO: 9538 - DNA, 16 bp, Artificial Sequence
  synthetic circulating small noncoding RNA (sncRNA) 5' transfer RNA (tRNA) half
tgtttgggctcgtccg

SEQ ID NO: 9539 - DNA, 35 bp, Artificial Sequence
  synthetic circulating small noncoding RNA (sncRNA) 5' transfer RNA (tRNA) half
tcgagccaggtaggagtcgaacctacaatcttctg

SEQ ID NO: 9540 - DNA, 38 bp, Artificial Sequence
  synthetic circulating small noncoding RNA (sncRNA) 5' transfer RNA (tRNA) half
cccaggcggcccgggttcgactcccggtatgggaacag

SEQ ID NO: 9541 - DNA, 37 bp, Artificial Sequence
  synthetic circulating small noncoding RNA (sncRNA) 5' transfer RNA (tRNA) half
ggagctggggattgtgggttcgagtcccatctgggtc

SEQ ID NO: 9542 - DNA, 17 bp, Artificial Sequence
  synthetic circulating small noncoding RNA (sncRNA) 5' transfer RNA (tRNA) half
cgactgagctagccggg

SEQ ID NO: 9543 - DNA, 40 bp, Artificial Sequence
  synthetic circulating small noncoding RNA (sncRNA) 5' transfer RNA (tRNA) half
tgccccctctgaggttcgaactcaggaccttcagattatg

SEQ ID NO: 9544 - DNA, 18 bp, Artificial Sequence
  synthetic circulating small noncoding RNA (sncRNA) 5' transfer RNA (tRNA) half
acccacgcgtgcagagca

SEQ ID NO: 9545 - DNA, 13 bp, Artificial Sequence
  synthetic circulating small noncoding RNA (sncRNA) 5' transfer RNA (tRNA) half
tcgcctgccacgc

SEQ ID NO: 9546 - DNA, 19 bp, Artificial Sequence
  synthetic circulating small noncoding RNA (sncRNA) 5' transfer RNA (tRNA) half
ccaatgcgctatccattgc

SEQ ID NO: 9547 - DNA, 22 bp, Artificial Sequence
  synthetic circulating small noncoding RNA (sncRNA) 5' transfer RNA (tRNA) half
tataacgtgtttccgcccggtt

SEQ ID NO: 9548 - DNA, 21 bp, Artificial Sequence
  synthetic circulating small noncoding RNA (sncRNA) 5' transfer RNA (tRNA) half
aggccgagaccgtccctgggt

SEQ ID NO: 9549 - DNA, 17 bp, Artificial Sequence
  synthetic circulating small noncoding RNA (sncRNA) 5' transfer RNA (tRNA) half
accactagaccaccagg

SEQ ID NO: 9550 - DNA, 14 bp, Artificial Sequence
  synthetic circulating small noncoding RNA (sncRNA) 5' transfer RNA (tRNA) half
ctgccgaaacccgg

SEQ ID NO: 9551 - DNA, 39 bp, Artificial Sequence
  synthetic circulating small noncoding RNA (sncRNA) 5' transfer RNA (tRNA) half
gcttccctgaccgggaatcgaacccgggccgcggcggtg

SEQ ID NO: 9552 - DNA, 11 bp, Artificial Sequence
  synthetic circulating small noncoding RNA (sncRNA) 5' transfer RNA (tRNA) half
gcgcaggttcg

SEQ ID NO: 9553 - DNA, 24 bp, Artificial Sequence
  synthetic circulating small noncoding RNA (sncRNA) 5' transfer RNA (tRNA) half
tcgaaccaccaacctttcggttaa

SEQ ID NO: 9554 - DNA, 20 bp, Artificial Sequence
  synthetic circulating small noncoding RNA (sncRNA) 5' transfer RNA (tRNA) half
gtggttatcacgctcgcctc

SEQ ID NO: 9555 - DNA, 25 bp, Artificial Sequence
  synthetic circulating small noncoding RNA (sncRNA) 5' transfer RNA (tRNA) half
agctcagctggtagagcggaggact

SEQ ID NO: 9556 - DNA, 40 bp, Artificial Sequence
  synthetic circulating small noncoding RNA (sncRNA) 5' transfer RNA (tRNA) half
tcgaacccgggccgcggcggtgagagcgccgaatcctaac

SEQ ID NO: 9557 - DNA, 23 bp, Artificial Sequence
  synthetic circulating small noncoding RNA (sncRNA) 5' transfer RNA (tRNA) half
caggcttcaaacctgtagctgtt

SEQ ID NO: 9558 - DNA, 14 bp, Artificial Sequence
  synthetic circulating small noncoding RNA (sncRNA) 5' transfer RNA (tRNA) half
ggttcgactccggc

SEQ ID NO: 9559 - DNA, 32 bp, Artificial Sequence
  synthetic circulating small noncoding RNA (sncRNA) 5' transfer RNA (tRNA) half
gcccgtacggggatcgaacccgcgaccttggc

SEQ ID NO: 9560 - DNA, 29 bp, Artificial Sequence
  synthetic circulating small noncoding RNA (sncRNA) 5' transfer RNA (tRNA) half
ttccatagtgtagcggttatcacgtctgc

SEQ ID NO: 9561 - DNA, 26 bp, Artificial Sequence
  synthetic circulating small noncoding RNA (sncRNA) 5' transfer RNA (tRNA) half
ccgggcctcccgcgtggcaggcgaga

SEQ ID NO: 9562 - DNA, 32 bp, Artificial Sequence
  synthetic circulating small noncoding RNA (sncRNA) 5' transfer RNA (tRNA) half
gcagagtactaaccactatacgatcacggcga

SEQ ID NO: 9563 - DNA, 33 bp, Artificial Sequence
  synthetic circulating small noncoding RNA (sncRNA) 5' transfer RNA (tRNA) half
cttaggtcgctggttcgactccggctcgaagga

SEQ ID NO: 9564 - DNA, 16 bp, Artificial Sequence
  synthetic circulating small noncoding RNA (sncRNA) 5' transfer RNA (tRNA) half
gaggtcccaccgagat

SEQ ID NO: 9565 - DNA, 11 bp, Artificial Sequence
  synthetic circulating small noncoding RNA (sncRNA) 5' transfer RNA (tRNA) half
ccgagcggtct

SEQ ID NO: 9566 - DNA, 33 bp, Artificial Sequence
  synthetic circulating small noncoding RNA (sncRNA) 5' transfer RNA (tRNA) half
ggttccatggtgtaatggtgagcactctggact

SEQ ID NO: 9567 - DNA, 15 bp, Artificial Sequence
  synthetic circulating small noncoding RNA (sncRNA) 5' transfer RNA (tRNA) half
agctcagtcggtaga

SEQ ID NO: 9568 - DNA, 32 bp, Artificial Sequence
  synthetic circulating small noncoding RNA (sncRNA) 5' transfer RNA (tRNA) half
ggcagctatgctcaccactataccaccaacgc

SEQ ID NO: 9569 - DNA, 22 bp, Artificial Sequence
  synthetic circulating small noncoding RNA (sncRNA) 5' transfer RNA (tRNA) half
gcatgggtggttcagtggtaga

SEQ ID NO: 9570 - DNA, 16 bp, Artificial Sequence
  synthetic circulating small noncoding RNA (sncRNA) 5' transfer RNA (tRNA) half
ggggagactgcgacct

SEQ ID NO: 9571 - DNA, 14 bp, Artificial Sequence
  synthetic circulating small noncoding RNA (sncRNA) 5' transfer RNA (tRNA) half
ggtagcgtggccga

SEQ ID NO: 9572 - DNA, 30 bp, Artificial Sequence
  synthetic circulating small noncoding RNA (sncRNA) 5' transfer RNA (tRNA) half
ggattgtgggttcgagtcccatctgggtcg

SEQ ID NO: 9573 - DNA, 20 bp, Artificial Sequence
  synthetic circulating small noncoding RNA (sncRNA) 5' transfer RNA (tRNA) half
ccgtatggaggcgtgggttc

SEQ ID NO: 9574 - DNA, 21 bp, Artificial Sequence
  synthetic circulating small noncoding RNA (sncRNA) 5' transfer RNA (tRNA) half
cgggaatcgaacccgggcctc

SEQ ID NO: 9575 - DNA, 38 bp, Artificial Sequence
  synthetic circulating small noncoding RNA (sncRNA) 5' transfer RNA (tRNA) half
taccgagccagccaggagtcgaacctggaatcttctga

SEQ ID NO: 9576 - DNA, 28 bp, Artificial Sequence
  synthetic circulating small noncoding RNA (sncRNA) 5' transfer RNA (tRNA) half
gcgggaggcccgggttcgattcccggcc

SEQ ID NO: 9577 - DNA, 14 bp, Artificial Sequence
  synthetic circulating small noncoding RNA (sncRNA) 5' transfer RNA (tRNA) half
cggggacctttcgc

SEQ ID NO: 9578 - DNA, 24 bp, Artificial Sequence
  synthetic circulating small noncoding RNA (sncRNA) 5' transfer RNA (tRNA) half
aatgccgaggttgtgagttcgagc

SEQ ID NO: 9579 - DNA, 22 bp, Artificial Sequence
  synthetic circulating small noncoding RNA (sncRNA) 5' transfer RNA (tRNA) half
tgaaggccccagcgagatttga

SEQ ID NO: 9580 - DNA, 22 bp, Artificial Sequence
  synthetic circulating small noncoding RNA (sncRNA) 5' transfer RNA (tRNA) half
atcccggacgagccccactttt

SEQ ID NO: 9581 - DNA, 45 bp, Artificial Sequence
  synthetic circulating small noncoding RNA (sncRNA) 5' transfer RNA (tRNA) half
gaactcggatcgctggattcagagtccagagtgctaaccattaca

SEQ ID NO: 9582 - DNA, 13 bp, Artificial Sequence
  synthetic circulating small noncoding RNA (sncRNA) 5' transfer RNA (tRNA) half
cggttaggattcc

SEQ ID NO: 9583 - DNA, 33 bp, Artificial Sequence
  synthetic circulating small noncoding RNA (sncRNA) 5' transfer RNA (tRNA) half
gctgtgatggccgagtggttaaggcgttggact

SEQ ID NO: 9584 - DNA, 34 bp, Artificial Sequence
  synthetic circulating small noncoding RNA (sncRNA) 5' transfer RNA (tRNA) half
atcagaaggttgcgtgttcaaatcacgtcggggt

SEQ ID NO: 9585 - DNA, 27 bp, Artificial Sequence
  synthetic circulating small noncoding RNA (sncRNA) 5' transfer RNA (tRNA) half
gtcaaatgctctaccactgagctatac

SEQ ID NO: 9586 - DNA, 28 bp, Artificial Sequence
  synthetic circulating small noncoding RNA (sncRNA) 5' transfer RNA (tRNA) half
aggctccagtctcttcgggggcgtgggt

SEQ ID NO: 9587 - DNA, 16 bp, Artificial Sequence
  synthetic circulating small noncoding RNA (sncRNA) 5' transfer RNA (tRNA) half
ggttaggattcctggt

SEQ ID NO: 9588 - DNA, 23 bp, Artificial Sequence
  synthetic circulating small noncoding RNA (sncRNA) 5' transfer RNA (tRNA) half
attcgaaccagcgacctaaggat

SEQ ID NO: 9589 - DNA, 16 bp, Artificial Sequence
  synthetic circulating small noncoding RNA (sncRNA) 5' transfer RNA (tRNA) half
attccacctttcgggc

SEQ ID NO: 9590 - DNA, 7 bp, Artificial Sequence
  synthetic circulating small noncoding RNA (sncRNA) 5' transfer RNA (tRNA) half
ggttcga

SEQ ID NO: 9591 - DNA, 13 bp, Artificial Sequence
  synthetic circulating small noncoding RNA (sncRNA) 5' transfer RNA (tRNA) half
gcgccacgaggtc

SEQ ID NO: 9592 - DNA, 18 bp, Artificial Sequence
  synthetic circulating small noncoding RNA (sncRNA) 5' transfer RNA (tRNA) half
ttcgattcccggtcaggg

SEQ ID NO: 9593 - DNA, 19 bp, Artificial Sequence
  synthetic circulating small noncoding RNA (sncRNA) 5' transfer RNA (tRNA) half
cattggccgggaatcgaac

SEQ ID NO: 9594 - DNA, 31 bp, Artificial Sequence
  synthetic circulating small noncoding RNA (sncRNA) 5' transfer RNA (tRNA) half
ggccgggaatcgaacccgggcctcccgcgtg

SEQ ID NO: 9595 - DNA, 26 bp, Artificial Sequence
  synthetic circulating small noncoding RNA (sncRNA) 5' transfer RNA (tRNA) half
gtcctccgctctaccaactgagctat

SEQ ID NO: 9596 - DNA, 26 bp, Artificial Sequence
  synthetic circulating small noncoding RNA (sncRNA) 5' transfer RNA (tRNA) half
ccgacgtgattcgaacacgcagcctt

SEQ ID NO: 9597 - DNA, 18 bp, Artificial Sequence
  synthetic circulating small noncoding RNA (sncRNA) 5' transfer RNA (tRNA) half
ccgaatcctaaccactag

SEQ ID NO: 9598 - DNA, 33 bp, Artificial Sequence
  synthetic circulating small noncoding RNA (sncRNA) 5' transfer RNA (tRNA) half
tgatgctctaccgactgagctatccgggctctt

SEQ ID NO: 9599 - DNA, 35 bp, Artificial Sequence
  synthetic circulating small noncoding RNA (sncRNA) 5' transfer RNA (tRNA) half
gcattggccgggaatcaaacccgggcctcccgcgt

SEQ ID NO: 9600 - DNA, 34 bp, Artificial Sequence
  synthetic circulating small noncoding RNA (sncRNA) 5' transfer RNA (tRNA) half
cgggccgcggcggtgagagcgccgaatcctaacc

SEQ ID NO: 9601 - DNA, 13 bp, Artificial Sequence
  synthetic circulating small noncoding RNA (sncRNA) 5' transfer RNA (tRNA) half
cgcggcggtgaga

SEQ ID NO: 9602 - DNA, 31 bp, Artificial Sequence
  synthetic circulating small noncoding RNA (sncRNA) 5' transfer RNA (tRNA) half
tttccgtagtgtagtggtcatcacgctcgcc

SEQ ID NO: 9603 - DNA, 14 bp, Artificial Sequence
  synthetic circulating small noncoding RNA (sncRNA) 5' transfer RNA (tRNA) half
ctcaccgccgcggc

SEQ ID NO: 9604 - DNA, 46 bp, Artificial Sequence
  synthetic circulating small noncoding RNA (sncRNA) 5' transfer RNA (tRNA) half
aaagtattgtgccccgtgtgaggatcgaactcacgaccttcagatt

SEQ ID NO: 9605 - DNA, 18 bp, Artificial Sequence
  synthetic circulating small noncoding RNA (sncRNA) 5' transfer RNA (tRNA) half
tccctgaccgggaatcga

SEQ ID NO: 9606 - DNA, 19 bp, Artificial Sequence
  synthetic circulating small noncoding RNA (sncRNA) 5' transfer RNA (tRNA) half
cgattccggctcgaaggac

SEQ ID NO: 9607 - DNA, 34 bp, Artificial Sequence
  synthetic circulating small noncoding RNA (sncRNA) 5' transfer RNA (tRNA) half
actccctggtggtctagtggttaggattcggcgc

SEQ ID NO: 9608 - DNA, 19 bp, Artificial Sequence
  synthetic circulating small noncoding RNA (sncRNA) 5' transfer RNA (tRNA) half
agaccactcggccacgcta

SEQ ID NO: 9609 - DNA, 19 bp, Artificial Sequence
  synthetic circulating small noncoding RNA (sncRNA) 5' transfer RNA (tRNA) half
ttcgaaccccgtccgtgcc

SEQ ID NO: 9610 - DNA, 33 bp, Artificial Sequence
  synthetic circulating small noncoding RNA (sncRNA) 5' transfer RNA (tRNA) half
gtctcatgctctaccgactgagctagccgggcc

SEQ ID NO: 9611 - DNA, 37 bp, Artificial Sequence
  synthetic circulating small noncoding RNA (sncRNA) 5' transfer RNA (tRNA) half
aaacaggagatcctgggttcgactcccagtggggcct

SEQ ID NO: 9612 - DNA, 36 bp, Artificial Sequence
  synthetic circulating small noncoding RNA (sncRNA) 5' transfer RNA (tRNA) half
tgggtttccgtagtgtagtggttagcgcgttcgcct

SEQ ID NO: 9613 - DNA, 27 bp, Artificial Sequence
  synthetic circulating small noncoding RNA (sncRNA) 5' transfer RNA (tRNA) half
gaccccgacgtgacttgaacacgcaac

SEQ ID NO: 9614 - DNA, 15 bp, Artificial Sequence
  synthetic circulating small noncoding RNA (sncRNA) 5' transfer RNA (tRNA) half
catacccctagacca

SEQ ID NO: 9615 - DNA, 31 bp, Artificial Sequence
  synthetic circulating small noncoding RNA (sncRNA) 5' transfer RNA (tRNA) half
tggggtatagctcaggggtagagcatttgac

SEQ ID NO: 9616 - DNA, 23 bp, Artificial Sequence
  synthetic circulating small noncoding RNA (sncRNA) 5' transfer RNA (tRNA) half
ttagaccgctcggccacgctacc

SEQ ID NO: 9617 - DNA, 20 bp, Artificial Sequence
  synthetic circulating small noncoding RNA (sncRNA) 5' transfer RNA (tRNA) half
tcgattccccgacggggaga

SEQ ID NO: 9618 - DNA, 19 bp, Artificial Sequence
  synthetic circulating small noncoding RNA (sncRNA) 5' transfer RNA (tRNA) half
ccgggccgcggcggtgaga

SEQ ID NO: 9619 - DNA, 28 bp, Artificial Sequence
  synthetic circulating small noncoding RNA (sncRNA) 5' transfer RNA (tRNA) half
gttccatagtgtagcggttatcacgtct

SEQ ID NO: 9620 - DNA, 15 bp, Artificial Sequence
  synthetic circulating small noncoding RNA (sncRNA) 5' transfer RNA (tRNA) half
caggttcgagtcctg

SEQ ID NO: 9621 - DNA, 24 bp, Artificial Sequence
  synthetic circulating small noncoding RNA (sncRNA) 5' transfer RNA (tRNA) half
atcgaacccgcgaccttggcgtta

SEQ ID NO: 9622 - DNA, 24 bp, Artificial Sequence
  synthetic circulating small noncoding RNA (sncRNA) 5' transfer RNA (tRNA) half
ggtgtaatggttagcactctggac

SEQ ID NO: 9623 - DNA, 23 bp, Artificial Sequence
  synthetic circulating small noncoding RNA (sncRNA) 5' transfer RNA (tRNA) half
acctgtgcggggaaaccccattg

SEQ ID NO: 9624 - DNA, 46 bp, Artificial Sequence
  synthetic circulating small noncoding RNA (sncRNA) 5' transfer RNA (tRNA) half
ggcagcggtgggattcgaacccacgcccccgaagagactggagcct

SEQ ID NO: 9625 - DNA, 38 bp, Artificial Sequence
  synthetic circulating small noncoding RNA (sncRNA) 5' transfer RNA (tRNA) half
tgaactcggatcgctggattcagagtccagagtgctaa

SEQ ID NO: 9626 - DNA, 16 bp, Artificial Sequence
  synthetic circulating small noncoding RNA (sncRNA) 5' transfer RNA (tRNA) half
gcactctggactttga

SEQ ID NO: 9627 - DNA, 35 bp, Artificial Sequence
  synthetic circulating small noncoding RNA (sncRNA) 5' transfer RNA (tRNA) half
agggggcacctggatttgaaccagggacctcttga

SEQ ID NO: 9628 - DNA, 14 bp, Artificial Sequence
  synthetic circulating small noncoding RNA (sncRNA) 5' transfer RNA (tRNA) half
cccggatagctcag

SEQ ID NO: 9629 - DNA, 22 bp, Artificial Sequence
  synthetic circulating small noncoding RNA (sncRNA) 5' transfer RNA (tRNA) half
tcgagtcccttcgtggtcgaaa

SEQ ID NO: 9630 - DNA, 11 bp, Artificial Sequence
  synthetic circulating small noncoding RNA (sncRNA) 5' transfer RNA (tRNA) half
gcattggccgg

SEQ ID NO: 9631 - DNA, 22 bp, Artificial Sequence
  synthetic circulating small noncoding RNA (sncRNA) 5' transfer RNA (tRNA) half
aaggccgagaccgtccctgggt

SEQ ID NO: 9632 - DNA, 22 bp, Artificial Sequence
  synthetic circulating small noncoding RNA (sncRNA) 5' transfer RNA (tRNA) half
cgtgattcgaacacgcagcctt

SEQ ID NO: 9633 - DNA, 22 bp, Artificial Sequence
  synthetic circulating small noncoding RNA (sncRNA) 5' transfer RNA (tRNA) half
catacccctagaccaacgagcc

SEQ ID NO: 9634 - DNA, 22 bp, Artificial Sequence
  synthetic circulating small noncoding RNA (sncRNA) 5' transfer RNA (tRNA) half
acccacgcgtgcagagcacaat

SEQ ID NO: 9635 - DNA, 17 bp, Artificial Sequence
  synthetic circulating small noncoding RNA (sncRNA) 5' transfer RNA (tRNA) half
acccggaacctttgaat

SEQ ID NO: 9636 - DNA, 28 bp, Artificial Sequence
  synthetic circulating small noncoding RNA (sncRNA) 5' transfer RNA (tRNA) half
gagaatcatacccctagaccaacaagcc

SEQ ID NO: 9637 - DNA, 23 bp, Artificial Sequence
  synthetic circulating small noncoding RNA (sncRNA) 5' transfer RNA (tRNA) half
ggccgcggcggtgagagcgccga

SEQ ID NO: 9638 - DNA, 31 bp, Artificial Sequence
  synthetic circulating small noncoding RNA (sncRNA) 5' transfer RNA (tRNA) half
ggatgatcctcagtggtctggggtgcaggct

SEQ ID NO: 9639 - DNA, 31 bp, Artificial Sequence
  synthetic circulating small noncoding RNA (sncRNA) 5' transfer RNA (tRNA) half
gtagcgggatcgatgcccgcatcctccactt

SEQ ID NO: 9640 - DNA, 17 bp, Artificial Sequence
  synthetic circulating small noncoding RNA (sncRNA) 5' transfer RNA (tRNA) half
tgtagtggtatcatgca

SEQ ID NO: 9641 - DNA, 22 bp, Artificial Sequence
  synthetic circulating small noncoding RNA (sncRNA) 5' transfer RNA (tRNA) half
gtctaggggtatgattctcggt

SEQ ID NO: 9642 - DNA, 19 bp, Artificial Sequence
  synthetic circulating small noncoding RNA (sncRNA) 5' transfer RNA (tRNA) half
ttcaaatctcggtggaacc

SEQ ID NO: 9643 - DNA, 20 bp, Artificial Sequence
  synthetic circulating small noncoding RNA (sncRNA) 5' transfer RNA (tRNA) half
tcccaccgctgccatctttg

SEQ ID NO: 9644 - DNA, 28 bp, Artificial Sequence
  synthetic circulating small noncoding RNA (sncRNA) 5' transfer RNA (tRNA) half
tctgggttatgggcccagcacgcttccg

SEQ ID NO: 9645 - DNA, 21 bp, Artificial Sequence
  synthetic circulating small noncoding RNA (sncRNA) 5' transfer RNA (tRNA) half
tggttatcacgctcgcctcac

SEQ ID NO: 9646 - DNA, 18 bp, Artificial Sequence
  synthetic circulating small noncoding RNA (sncRNA) 5' transfer RNA (tRNA) half
ctctgaatccagcgatcc

SEQ ID NO: 9647 - DNA, 32 bp, Artificial Sequence
  synthetic circulating small noncoding RNA (sncRNA) 5' transfer RNA (tRNA) half
gcgagaattctaccactgaaccaccaatgctc

SEQ ID NO: 9648 - DNA, 15 bp, Artificial Sequence
  synthetic circulating small noncoding RNA (sncRNA) 5' transfer RNA (tRNA) half
cgaacacgcagcctt

SEQ ID NO: 9649 - DNA, 44 bp, Artificial Sequence
  synthetic circulating small noncoding RNA (sncRNA) 5' transfer RNA (tRNA) half
agtcgaacccgggccgcctgggtgaaaaccaggaatcctaaccg

SEQ ID NO: 9650 - DNA, 36 bp, Artificial Sequence
  synthetic circulating small noncoding RNA (sncRNA) 5' transfer RNA (tRNA) half
atctgagggtccagggttcaagtccctgttcgggcg

SEQ ID NO: 9651 - DNA, 36 bp, Artificial Sequence
  synthetic circulating small noncoding RNA (sncRNA) 5' transfer RNA (tRNA) half
cgtcggggaatcgaaccccggtctcccgcgtgacag

SEQ ID NO: 9652 - DNA, 37 bp, Artificial Sequence
  synthetic circulating small noncoding RNA (sncRNA) 5' transfer RNA (tRNA) half
ccccctctgaggttcgaactcaggaccttcagattat

SEQ ID NO: 9653 - DNA, 12 bp, Artificial Sequence
  synthetic circulating small noncoding RNA (sncRNA) 5' transfer RNA (tRNA) half
aaggtcgcgggt

SEQ ID NO: 9654 - DNA, 17 bp, Artificial Sequence
  synthetic circulating small noncoding RNA (sncRNA) 5' transfer RNA (tRNA) half
attcagagtccagagtg

SEQ ID NO: 9655 - DNA, 21 bp, Artificial Sequence
  synthetic circulating small noncoding RNA (sncRNA) 5' transfer RNA (tRNA) half
agcgaccacgaagggactcga

SEQ ID NO: 9656 - DNA, 34 bp, Artificial Sequence
  synthetic circulating small noncoding RNA (sncRNA) 5' transfer RNA (tRNA) half
gcgggaggcccgggttcgattcccggccaatgca

SEQ ID NO: 9657 - DNA, 19 bp, Artificial Sequence
  synthetic circulating small noncoding RNA (sncRNA) 5' transfer RNA (tRNA) half
gcgagaattctaccattga

SEQ ID NO: 9658 - DNA, 31 bp, Artificial Sequence
  synthetic circulating small noncoding RNA (sncRNA) 5' transfer RNA (tRNA) half
gtcagacgcgctaccgttgcgccacgaggtc

SEQ ID NO: 9659 - DNA, 14 bp, Artificial Sequence
  synthetic circulating small noncoding RNA (sncRNA) 5' transfer RNA (tRNA) half
cggtgggattcgaa

SEQ ID NO: 9660 - DNA, 23 bp, Artificial Sequence
  synthetic circulating small noncoding RNA (sncRNA) 5' transfer RNA (tRNA) half
gtgttaggcgagcgtgatgacca

SEQ ID NO: 9661 - DNA, 12 bp, Artificial Sequence
  synthetic circulating small noncoding RNA (sncRNA) 5' transfer RNA (tRNA) half
aggtcgatggat

SEQ ID NO: 9662 - DNA, 25 bp, Artificial Sequence
  synthetic circulating small noncoding RNA (sncRNA) 5' transfer RNA (tRNA) half
acccgcgaccttggcgttattagca

SEQ ID NO: 9663 - DNA, 33 bp, Artificial Sequence
  synthetic circulating small noncoding RNA (sncRNA) 5' transfer RNA (tRNA) half
gctgaaatagctcagttgggagagcgttagact

SEQ ID NO: 9664 - DNA, 27 bp, Artificial Sequence
  synthetic circulating small noncoding RNA (sncRNA) 5' transfer RNA (tRNA) half
acgccttaaccactcggccatcctggt

SEQ ID NO: 9665 - DNA, 30 bp, Artificial Sequence
  synthetic circulating small noncoding RNA (sncRNA) 5' transfer RNA (tRNA) half
ggtggttcagtggtagaattctcgcctgcc

SEQ ID NO: 9666 - DNA, 17 bp, Artificial Sequence
  synthetic circulating small noncoding RNA (sncRNA) 5' transfer RNA (tRNA) half
cgctcggccacactacc

SEQ ID NO: 9667 - DNA, 16 bp, Artificial Sequence
  synthetic circulating small noncoding RNA (sncRNA) 5' transfer RNA (tRNA) half
tcctgccgcggtcgac

SEQ ID NO: 9668 - DNA, 16 bp, Artificial Sequence
  synthetic circulating small noncoding RNA (sncRNA) 5' transfer RNA (tRNA) half
gcgaccacgaagggac

SEQ ID NO: 9669 - DNA, 21 bp, Artificial Sequence
  synthetic circulating small noncoding RNA (sncRNA) 5' transfer RNA (tRNA) half
cgagccagccaggagtcgaac

SEQ ID NO: 9670 - DNA, 9 bp, Artificial Sequence
  synthetic circulating small noncoding RNA (sncRNA) 5' transfer RNA (tRNA) half
gctctaccg

SEQ ID NO: 9671 - DNA, 42 bp, Artificial Sequence
  synthetic circulating small noncoding RNA (sncRNA) 5' transfer RNA (tRNA) half
acccgggccgcggcggtgagagcgccgaatcctaaccactag

SEQ ID NO: 9672 - DNA, 27 bp, Artificial Sequence
  synthetic circulating small noncoding RNA (sncRNA) 5' transfer RNA (tRNA) half
cggcccgggttcgactcccggtatggg

SEQ ID NO: 9673 - DNA, 17 bp, Artificial Sequence
  synthetic circulating small noncoding RNA (sncRNA) 5' transfer RNA (tRNA) half
ggtatgattctcgcttt

SEQ ID NO: 9674 - DNA, 17 bp, Artificial Sequence
  synthetic circulating small noncoding RNA (sncRNA) 5' transfer RNA (tRNA) half
cagaagattgagggttc

SEQ ID NO: 9675 - DNA, 26 bp, Artificial Sequence
  synthetic circulating small noncoding RNA (sncRNA) 5' transfer RNA (tRNA) half
actcctaaccactagaccaccaggga

SEQ ID NO: 9676 - DNA, 24 bp, Artificial Sequence
  synthetic circulating small noncoding RNA (sncRNA) 5' transfer RNA (tRNA) half
caggattcgaacctgcgcggggaa

SEQ ID NO: 9677 - DNA, 23 bp, Artificial Sequence
  synthetic circulating small noncoding RNA (sncRNA) 5' transfer RNA (tRNA) half
tggattcagagtccagagtgcta

SEQ ID NO: 9678 - DNA, 20 bp, Artificial Sequence
  synthetic circulating small noncoding RNA (sncRNA) 5' transfer RNA (tRNA) half
tcaattccacctttcgggcg

SEQ ID NO: 9679 - DNA, 10 bp, Artificial Sequence
  synthetic circulating small noncoding RNA (sncRNA) 5' transfer RNA (tRNA) half
accgggcgga

SEQ ID NO: 9680 - DNA, 10 bp, Artificial Sequence
  synthetic circulating small noncoding RNA (sncRNA) 5' transfer RNA (tRNA) half
cccgggttcg

SEQ ID NO: 9681 - DNA, 23 bp, Artificial Sequence
  synthetic circulating small noncoding RNA (sncRNA) 5' transfer RNA (tRNA) half
gttcgatccccagcatctccagg

SEQ ID NO: 9682 - DNA, 15 bp, Artificial Sequence
  synthetic circulating small noncoding RNA (sncRNA) 5' transfer RNA (tRNA) half
agggctcgtccggga

SEQ ID NO: 9683 - DNA, 26 bp, Artificial Sequence
  synthetic circulating small noncoding RNA (sncRNA) 5' transfer RNA (tRNA) half
tggtggttcagtggtagaattctcgc

SEQ ID NO: 9684 - DNA, 20 bp, Artificial Sequence
  synthetic circulating small noncoding RNA (sncRNA) 5' transfer RNA (tRNA) half
ttgaactcggatcgctggat

SEQ ID NO: 9685 - DNA, 11 bp, Artificial Sequence
  synthetic circulating small noncoding RNA (sncRNA) 5' transfer RNA (tRNA) half
gaattctcgcc

SEQ ID NO: 9686 - DNA, 19 bp, Artificial Sequence
  synthetic circulating small noncoding RNA (sncRNA) 5' transfer RNA (tRNA) half
gggatcgaaccagggacct

SEQ ID NO: 9687 - DNA, 38 bp, Artificial Sequence
  synthetic circulating small noncoding RNA (sncRNA) 5' transfer RNA (tRNA) half
gtaaacaggagatcctgggttcgactcccagtggggcc

SEQ ID NO: 9688 - DNA, 11 bp, Artificial Sequence
  synthetic circulating small noncoding RNA (sncRNA) 5' transfer RNA (tRNA) half
gtggcagcggt

SEQ ID NO: 9689 - DNA, 13 bp, Artificial Sequence
  synthetic circulating small noncoding RNA (sncRNA) 5' transfer RNA (tRNA) half
acccgcgaccttg

SEQ ID NO: 9690 - DNA, 17 bp, Artificial Sequence
  synthetic circulating small noncoding RNA (sncRNA) 5' transfer RNA (tRNA) half
ggctcgtccgggatttg

SEQ ID NO: 9691 - DNA, 20 bp, Artificial Sequence
  synthetic circulating small noncoding RNA (sncRNA) 5' transfer RNA (tRNA) half
gattgcaggttcgagtcctg

SEQ ID NO: 9692 - DNA, 15 bp, Artificial Sequence
  synthetic circulating small noncoding RNA (sncRNA) 5' transfer RNA (tRNA) half
aacccgcgaccttgg

SEQ ID NO: 9693 - DNA, 25 bp, Artificial Sequence
  synthetic circulating small noncoding RNA (sncRNA) 5' transfer RNA (tRNA) half
atttgaactcggatcgctggattca

SEQ ID NO: 9694 - DNA, 31 bp, Artificial Sequence
  synthetic circulating small noncoding RNA (sncRNA) 5' transfer RNA (tRNA) half
aggtcccaccgagatttgaactcggatcgct

SEQ ID NO: 9695 - DNA, 22 bp, Artificial Sequence
  synthetic circulating small noncoding RNA (sncRNA) 5' transfer RNA (tRNA) half
aaaaactgggctcgtccgggat

SEQ ID NO: 9696 - DNA, 28 bp, Artificial Sequence
  synthetic circulating small noncoding RNA (sncRNA) 5' transfer RNA (tRNA) half
ggtcctgggttcgagccccagtggaacc

SEQ ID NO: 9697 - DNA, 29 bp, Artificial Sequence
  synthetic circulating small noncoding RNA (sncRNA) 5' transfer RNA (tRNA) half
tccgactccgccgggactcgaacccggaa

SEQ ID NO: 9698 - DNA, 14 bp, Artificial Sequence
  synthetic circulating small noncoding RNA (sncRNA) 5' transfer RNA (tRNA) half
cgaatccggctcga

SEQ ID NO: 9699 - DNA, 32 bp, Artificial Sequence
  synthetic circulating small noncoding RNA (sncRNA) 5' transfer RNA (tRNA) half
ggccggttagctcagttggttagagtgtggtg

SEQ ID NO: 9700 - DNA, 20 bp, Artificial Sequence
  synthetic circulating small noncoding RNA (sncRNA) 5' transfer RNA (tRNA) half
aaggttccaccgagatttga

SEQ ID NO: 9701 - DNA, 12 bp, Artificial Sequence
  synthetic circulating small noncoding RNA (sncRNA) 5' transfer RNA (tRNA) half
gattccccgacg

SEQ ID NO: 9702 - DNA, 30 bp, Artificial Sequence
  synthetic circulating small noncoding RNA (sncRNA) 5' transfer RNA (tRNA) half
gaccccgacgtgacttgaacacgcaacctt

SEQ ID NO: 9703 - DNA, 15 bp, Artificial Sequence
  synthetic circulating small noncoding RNA (sncRNA) 5' transfer RNA (tRNA) half
caggtcgcagtctcc

SEQ ID NO: 9704 - DNA, 16 bp, Artificial Sequence
  synthetic circulating small noncoding RNA (sncRNA) 5' transfer RNA (tRNA) half
ccccgtccgtgcctgc

SEQ ID NO: 9705 - DNA, 19 bp, Artificial Sequence
  synthetic circulating small noncoding RNA (sncRNA) 5' transfer RNA (tRNA) half
ttcgactcctggctggctc

SEQ ID NO: 9706 - DNA, 10 bp, Artificial Sequence
  synthetic circulating small noncoding RNA (sncRNA) 5' transfer RNA (tRNA) half
gttcgggcgc

SEQ ID NO: 9707 - DNA, 13 bp, Artificial Sequence
  synthetic circulating small noncoding RNA (sncRNA) 5' transfer RNA (tRNA) half
ggcggtgagagcg

SEQ ID NO: 9708 - DNA, 16 bp, Artificial Sequence
  synthetic circulating small noncoding RNA (sncRNA) 5' transfer RNA (tRNA) half
gccgcctgggtgaaaa

SEQ ID NO: 9709 - DNA, 14 bp, Artificial Sequence
  synthetic circulating small noncoding RNA (sncRNA) 5' transfer RNA (tRNA) half
ggagtcgaacccgg

SEQ ID NO: 9710 - DNA, 9 bp, Artificial Sequence
  synthetic circulating small noncoding RNA (sncRNA) 5' transfer RNA (tRNA) half
cgcccgaac

SEQ ID NO: 9711 - DNA, 45 bp, Artificial Sequence
  synthetic circulating small noncoding RNA (sncRNA) 5' transfer RNA (tRNA) half
tgtcagaagtgggattcgaacccacgcctccattcggagaccaga

SEQ ID NO: 9712 - DNA, 18 bp, Artificial Sequence
  synthetic circulating small noncoding RNA (sncRNA) 5' transfer RNA (tRNA) half
gaatcgaaccccggtctc

SEQ ID NO: 9713 - DNA, 10 bp, Artificial Sequence
  synthetic circulating small noncoding RNA (sncRNA) 5' transfer RNA (tRNA) half
cgcccaacgt

SEQ ID NO: 9714 - DNA, 29 bp, Artificial Sequence
  synthetic circulating small noncoding RNA (sncRNA) 5' transfer RNA (tRNA) half
cggggatactaaccactatactaacgagg

SEQ ID NO: 9715 - DNA, 33 bp, Artificial Sequence
  synthetic circulating small noncoding RNA (sncRNA) 5' transfer RNA (tRNA) half
tttccgtagtgtagtggttatcacgttcgcctc

SEQ ID NO: 9716 - DNA, 36 bp, Artificial Sequence
  synthetic circulating small noncoding RNA (sncRNA) 5' transfer RNA (tRNA) half
attaagagtcccatgctctaccgactgagctagccg

SEQ ID NO: 9717 - DNA, 27 bp, Artificial Sequence
  synthetic circulating small noncoding RNA (sncRNA) 5' transfer RNA (tRNA) half
ggtcgagccagccaggagtcgaaccta

SEQ ID NO: 9718 - DNA, 33 bp, Artificial Sequence
  synthetic circulating small noncoding RNA (sncRNA) 5' transfer RNA (tRNA) half
acgcgggagaccggggttcgattccccgacggg

SEQ ID NO: 9719 - DNA, 40 bp, Artificial Sequence
  synthetic circulating small noncoding RNA (sncRNA) 5' transfer RNA (tRNA) half
aactcggatcgctggattcagagtccagagtgctagccat

SEQ ID NO: 9720 - DNA, 12 bp, Artificial Sequence
  synthetic circulating small noncoding RNA (sncRNA) 5' transfer RNA (tRNA) half
aaccgggcggaa

SEQ ID NO: 9721 - DNA, 31 bp, Artificial Sequence
  synthetic circulating small noncoding RNA (sncRNA) 5' transfer RNA (tRNA) half
gcgccaaatcctaaccactagaccaccaggg

SEQ ID NO: 9722 - DNA, 40 bp, Artificial Sequence
  synthetic circulating small noncoding RNA (sncRNA) 5' transfer RNA (tRNA) half
agcctccccgtcggggaatcgaaccccggtctcccgcgtg

SEQ ID NO: 9723 - DNA, 21 bp, Artificial Sequence
  synthetic circulating small noncoding RNA (sncRNA) 5' transfer RNA (tRNA) half
agtcagacgcgttatccattg

SEQ ID NO: 9724 - DNA, 13 bp, Artificial Sequence
  synthetic circulating small noncoding RNA (sncRNA) 5' transfer RNA (tRNA) half
tcacgcgggagac

SEQ ID NO: 9725 - DNA, 17 bp, Artificial Sequence
  synthetic circulating small noncoding RNA (sncRNA) 5' transfer RNA (tRNA) half
tcagtggtctggggtgc

SEQ ID NO: 9726 - DNA, 27 bp, Artificial Sequence
  synthetic circulating small noncoding RNA (sncRNA) 5' transfer RNA (tRNA) half
aatgctctacccctgagctatgccccc

SEQ ID NO: 9727 - DNA, 33 bp, Artificial Sequence
  synthetic circulating small noncoding RNA (sncRNA) 5' transfer RNA (tRNA) half
gggattgtgggttcgagtcccatctgggtcgca

SEQ ID NO: 9728 - DNA, 16 bp, Artificial Sequence
  synthetic circulating small noncoding RNA (sncRNA) 5' transfer RNA (tRNA) half
gcggaagcgtgctggg

SEQ ID NO: 9729 - DNA, 18 bp, Artificial Sequence
  synthetic circulating small noncoding RNA (sncRNA) 5' transfer RNA (tRNA) half
tcaaatctcgctggggcc

SEQ ID NO: 9730 - DNA, 33 bp, Artificial Sequence
  synthetic circulating small noncoding RNA (sncRNA) 5' transfer RNA (tRNA) half
aggccccagcgagatttgaactcgcgacccctg

SEQ ID NO: 9731 - DNA, 34 bp, Artificial Sequence
  synthetic circulating small noncoding RNA (sncRNA) 5' transfer RNA (tRNA) half
tccttaggtcgctggttcgactccggctcgaagg

SEQ ID NO: 9732 - DNA, 28 bp, Artificial Sequence
  synthetic circulating small noncoding RNA (sncRNA) 5' transfer RNA (tRNA) half
cgggccgcctgggtgaaaaccaggaatc

SEQ ID NO: 9733 - DNA, 33 bp, Artificial Sequence
  synthetic circulating small noncoding RNA (sncRNA) 5' transfer RNA (tRNA) half
taggtcgctggttcgattccggctcgaaggact

SEQ ID NO: 9734 - DNA, 19 bp, Artificial Sequence
  synthetic circulating small noncoding RNA (sncRNA) 5' transfer RNA (tRNA) half
cgcagcgagcagggttcga

SEQ ID NO: 9735 - DNA, 12 bp, Artificial Sequence
  synthetic circulating small noncoding RNA (sncRNA) 5' transfer RNA (tRNA) half
cggtgtgggaac

SEQ ID NO: 9736 - DNA, 22 bp, Artificial Sequence
  synthetic circulating small noncoding RNA (sncRNA) 5' transfer RNA (tRNA) half
ggccgcggcggtgagagcgccg

SEQ ID NO: 9737 - DNA, 35 bp, Artificial Sequence
  synthetic circulating small noncoding RNA (sncRNA) 5' transfer RNA (tRNA) half
cgttccttcgagccggattcgaaccagcgacctaa

SEQ ID NO: 9738 - DNA, 17 bp, Artificial Sequence
  synthetic circulating small noncoding RNA (sncRNA) 5' transfer RNA (tRNA) half
gccccctctgaggttcg

SEQ ID NO: 9739 - DNA, 30 bp, Artificial Sequence
  synthetic circulating small noncoding RNA (sncRNA) 5' transfer RNA (tRNA) half
agccagccaggagtcgaacctagaatcttc

SEQ ID NO: 9740 - DNA, 23 bp, Artificial Sequence
  synthetic circulating small noncoding RNA (sncRNA) 5' transfer RNA (tRNA) half
tttgaatccagcgatccgagttc

SEQ ID NO: 9741 - DNA, 26 bp, Artificial Sequence
  synthetic circulating small noncoding RNA (sncRNA) 5' transfer RNA (tRNA) half
ctccccgtcggggaattgaaccccgg

SEQ ID NO: 9742 - DNA, 22 bp, Artificial Sequence
  synthetic circulating small noncoding RNA (sncRNA) 5' transfer RNA (tRNA) half
tcgagcctcacctggagcacga

SEQ ID NO: 9743 - DNA, 31 bp, Artificial Sequence
  synthetic circulating small noncoding RNA (sncRNA) 5' transfer RNA (tRNA) half
agggcccggatagctcagtcggtagagcatc

SEQ ID NO: 9744 - DNA, 21 bp, Artificial Sequence
  synthetic circulating small noncoding RNA (sncRNA) 5' transfer RNA (tRNA) half
tcccggacgagccccactttt

SEQ ID NO: 9745 - DNA, 25 bp, Artificial Sequence
  synthetic circulating small noncoding RNA (sncRNA) 5' transfer RNA (tRNA) half
ctgcttggaaggcagctatgctcac

SEQ ID NO: 9746 - DNA, 19 bp, Artificial Sequence
  synthetic circulating small noncoding RNA (sncRNA) 5' transfer RNA (tRNA) half
ccattcttgcgacccgggt

SEQ ID NO: 9747 - DNA, 30 bp, Artificial Sequence
  synthetic circulating small noncoding RNA (sncRNA) 5' transfer RNA (tRNA) half
cctccccgtcggggaatcgaaccccggtct

SEQ ID NO: 9748 - DNA, 36 bp, Artificial Sequence
  synthetic circulating small noncoding RNA (sncRNA) 5' transfer RNA (tRNA) half
ggttgctgcggccacaacgcagagtactaaccacta

SEQ ID NO: 9749 - DNA, 32 bp, Artificial Sequence
  synthetic circulating small noncoding RNA (sncRNA) 5' transfer RNA (tRNA) half
cgggagaccggggttcgattccccgacgggga

SEQ ID NO: 9750 - DNA, 21 bp, Artificial Sequence
  synthetic circulating small noncoding RNA (sncRNA) 5' transfer RNA (tRNA) half
tgttcaaatcacgtcggggtc

SEQ ID NO: 9751 - DNA, 36 bp, Artificial Sequence
  synthetic circulating small noncoding RNA (sncRNA) 5' transfer RNA (tRNA) half
ggattaagagtcccatgctctaccgactgagctagc

SEQ ID NO: 9752 - DNA, 32 bp, Artificial Sequence
  synthetic circulating small noncoding RNA (sncRNA) 5' transfer RNA (tRNA) half
ttccctggtggtctagtggttaggattcggcg

SEQ ID NO: 9753 - DNA, 19 bp, Artificial Sequence
  synthetic circulating small noncoding RNA (sncRNA) 5' transfer RNA (tRNA) half
tccgctgcgccactctgct

SEQ ID NO: 9754 - DNA, 26 bp, Artificial Sequence
  synthetic circulating small noncoding RNA (sncRNA) 5' transfer RNA (tRNA) half
cgggaggcccgggttcgattcccggc

SEQ ID NO: 9755 - DNA, 15 bp, Artificial Sequence
  synthetic circulating small noncoding RNA (sncRNA) 5' transfer RNA (tRNA) half
ggcccgtacggggat

SEQ ID NO: 9756 - DNA, 23 bp, Artificial Sequence
  synthetic circulating small noncoding RNA (sncRNA) 5' transfer RNA (tRNA) half
gtcgagccagccaggagtcgaac

SEQ ID NO: 9757 - DNA, 37 bp, Artificial Sequence
  synthetic circulating small noncoding RNA (sncRNA) 5' transfer RNA (tRNA) half
ggtcgagccagccaggagtcgaacctagaatcttctg

SEQ ID NO: 9758 - DNA, 33 bp, Artificial Sequence
  synthetic circulating small noncoding RNA (sncRNA) 5' transfer RNA (tRNA) half
cactccctggtggtctagtggttaggattcggc

SEQ ID NO: 9759 - DNA, 17 bp, Artificial Sequence
  synthetic circulating small noncoding RNA (sncRNA) 5' transfer RNA (tRNA) half
caggcgagaattctacc

SEQ ID NO: 9760 - DNA, 15 bp, Artificial Sequence
  synthetic circulating small noncoding RNA (sncRNA) 5' transfer RNA (tRNA) half
tggcaggcgagaatt

SEQ ID NO: 9761 - DNA, 36 bp, Artificial Sequence
  synthetic circulating small noncoding RNA (sncRNA) 5' transfer RNA (tRNA) half
tgccccctctgaggttcgaactcaggaccttcagat

SEQ ID NO: 9762 - DNA, 10 bp, Artificial Sequence
  synthetic circulating small noncoding RNA (sncRNA) 5' transfer RNA (tRNA) half
cggccaatgc

SEQ ID NO: 9763 - DNA, 22 bp, Artificial Sequence
  synthetic circulating small noncoding RNA (sncRNA) 5' transfer RNA (tRNA) half
taggggttagtactctgcgttg

SEQ ID NO: 9764 - DNA, 36 bp, Artificial Sequence
  synthetic circulating small noncoding RNA (sncRNA) 5' transfer RNA (tRNA) half
aggccgcggcggtgagagcgccaaatcctaaccact

SEQ ID NO: 9765 - DNA, 29 bp, Artificial Sequence
  synthetic circulating small noncoding RNA (sncRNA) 5' transfer RNA (tRNA) half
gaccacgaagggactcgaacccccaatct

SEQ ID NO: 9766 - DNA, 10 bp, Artificial Sequence
  synthetic circulating small noncoding RNA (sncRNA) 5' transfer RNA (tRNA) half
agaggtcccg

SEQ ID NO: 9767 - DNA, 27 bp, Artificial Sequence
  synthetic circulating small noncoding RNA (sncRNA) 5' transfer RNA (tRNA) half
acccacgcccccgaagagactggagcc

SEQ ID NO: 9768 - DNA, 19 bp, Artificial Sequence
  synthetic circulating small noncoding RNA (sncRNA) 5' transfer RNA (tRNA) half
ggttagtactctgcgttgt

SEQ ID NO: 9769 - DNA, 36 bp, Artificial Sequence
  synthetic circulating small noncoding RNA (sncRNA) 5' transfer RNA (tRNA) half
accagtagtcgtggccgagtggttaaggcgatggac

SEQ ID NO: 9770 - DNA, 38 bp, Artificial Sequence
  synthetic circulating small noncoding RNA (sncRNA) 5' transfer RNA (tRNA) half
cccaggcggcccgggttcgactcccggtgtgggaacag

SEQ ID NO: 9771 - DNA, 33 bp, Artificial Sequence
  synthetic circulating small noncoding RNA (sncRNA) 5' transfer RNA (tRNA) half
cctccccgtcggggaatcgaaccccggtctccc

SEQ ID NO: 9772 - DNA, 35 bp, Artificial Sequence
  synthetic circulating small noncoding RNA (sncRNA) 5' transfer RNA (tRNA) half
agaaggttgcgtgttcaaatcacgtcggggtcatc

SEQ ID NO: 9773 - DNA, 33 bp, Artificial Sequence
  synthetic circulating small noncoding RNA (sncRNA) 5' transfer RNA (tRNA) half
aggcagctatgctcaccactataccaccaacgc

SEQ ID NO: 9774 - DNA, 20 bp, Artificial Sequence
  synthetic circulating small noncoding RNA (sncRNA) 5' transfer RNA (tRNA) half
tgccacgcgggaggcccggg

SEQ ID NO: 9775 - DNA, 27 bp, Artificial Sequence
  synthetic circulating small noncoding RNA (sncRNA) 5' transfer RNA (tRNA) half
tccagagtgctaaccattacaccatgg

SEQ ID NO: 9776 - DNA, 29 bp, Artificial Sequence
  synthetic circulating small noncoding RNA (sncRNA) 5' transfer RNA (tRNA) half
tggattcagagtccagagtgctaaccatt

SEQ ID NO: 9777 - DNA, 31 bp, Artificial Sequence
  synthetic circulating small noncoding RNA (sncRNA) 5' transfer RNA (tRNA) half
cctggatagctcagtcggtagagcatcagac

SEQ ID NO: 9778 - DNA, 22 bp, Artificial Sequence
  synthetic circulating small noncoding RNA (sncRNA) 5' transfer RNA (tRNA) half
aagattgcaggttcgagtcctg

SEQ ID NO: 9779 - DNA, 32 bp, Artificial Sequence
  synthetic circulating small noncoding RNA (sncRNA) 5' transfer RNA (tRNA) half
ccgcagcaacctcggttcgaatccgagtcacg

SEQ ID NO: 9780 - DNA, 6 bp, Artificial Sequence
  synthetic circulating small noncoding RNA (sncRNA) 5' transfer RNA (tRNA) half
agccga

SEQ ID NO: 9781 - DNA, 31 bp, Artificial Sequence
  synthetic circulating small noncoding RNA (sncRNA) 5' transfer RNA (tRNA) half
accccgacgtgattcgaacacgcagccttct

SEQ ID NO: 9782 - DNA, 36 bp, Artificial Sequence
  synthetic circulating small noncoding RNA (sncRNA) 5' transfer RNA (tRNA) half
gttgtttccgtagtgtagtggttatcacgttcgcct

SEQ ID NO: 9783 - DNA, 13 bp, Artificial Sequence
  synthetic circulating small noncoding RNA (sncRNA) 5' transfer RNA (tRNA) half
cgcaggttcgaat

SEQ ID NO: 9784 - DNA, 29 bp, Artificial Sequence
  synthetic circulating small noncoding RNA (sncRNA) 5' transfer RNA (tRNA) half
gaccggggttcgattccccgacggggaga

SEQ ID NO: 9785 - DNA, 19 bp, Artificial Sequence
  synthetic circulating small noncoding RNA (sncRNA) 5' transfer RNA (tRNA) half
gcgttggccgggaatcgaa

SEQ ID NO: 9786 - DNA, 24 bp, Artificial Sequence
  synthetic circulating small noncoding RNA (sncRNA) 5' transfer RNA (tRNA) half
aaccccggtctcccgcgtgacagg

SEQ ID NO: 9787 - DNA, 21 bp, Artificial Sequence
  synthetic circulating small noncoding RNA (sncRNA) 5' transfer RNA (tRNA) half
ggttcgatccccggcatctcc

SEQ ID NO: 9788 - DNA, 29 bp, Artificial Sequence
  synthetic circulating small noncoding RNA (sncRNA) 5' transfer RNA (tRNA) half
ggggatactcaccactatactaacgagga

SEQ ID NO: 9789 - DNA, 21 bp, Artificial Sequence
  synthetic circulating small noncoding RNA (sncRNA) 5' transfer RNA (tRNA) half
gatgctctaccgactgagcta

SEQ ID NO: 9790 - DNA, 21 bp, Artificial Sequence
  synthetic circulating small noncoding RNA (sncRNA) 5' transfer RNA (tRNA) half
accgggcggaaacagcaactt

SEQ ID NO: 9791 - DNA, 14 bp, Artificial Sequence
  synthetic circulating small noncoding RNA (sncRNA) 5' transfer RNA (tRNA) half
tccctgttcgggcg

SEQ ID NO: 9792 - DNA, 22 bp, Artificial Sequence
  synthetic circulating small noncoding RNA (sncRNA) 5' transfer RNA (tRNA) half
caggattcgaacctgcgcgggg

SEQ ID NO: 9793 - DNA, 13 bp, Artificial Sequence
  synthetic circulating small noncoding RNA (sncRNA) 5' transfer RNA (tRNA) half
gcgagaggtcccg

SEQ ID NO: 9794 - DNA, 21 bp, Artificial Sequence
  synthetic circulating small noncoding RNA (sncRNA) 5' transfer RNA (tRNA) half
atgtggcagcggtgggattcg

SEQ ID NO: 9795 - DNA, 11 bp, Artificial Sequence
  synthetic circulating small noncoding RNA (sncRNA) 5' transfer RNA (tRNA) half
gagcgccgaat

SEQ ID NO: 9796 - DNA, 12 bp, Artificial Sequence
  synthetic circulating small noncoding RNA (sncRNA) 5' transfer RNA (tRNA) half
gggacctttaga

SEQ ID NO: 9797 - DNA, 19 bp, Artificial Sequence
  synthetic circulating small noncoding RNA (sncRNA) 5' transfer RNA (tRNA) half
aatcctgccgactacgtct

SEQ ID NO: 9798 - DNA, 19 bp, Artificial Sequence
  synthetic circulating small noncoding RNA (sncRNA) 5' transfer RNA (tRNA) half
tggtagagcatttgactgc

SEQ ID NO: 9799 - DNA, 19 bp, Artificial Sequence
  synthetic circulating small noncoding RNA (sncRNA) 5' transfer RNA (tRNA) half
ggtatgattctcgctttgg

SEQ ID NO: 9800 - DNA, 24 bp, Artificial Sequence
  synthetic circulating small noncoding RNA (sncRNA) 5' transfer RNA (tRNA) half
caggagtcgaacctggaatcttct

SEQ ID NO: 9801 - DNA, 17 bp, Artificial Sequence
  synthetic circulating small noncoding RNA (sncRNA) 5' transfer RNA (tRNA) half
ctggtgtagtggtatca

SEQ ID NO: 9802 - DNA, 25 bp, Artificial Sequence
  synthetic circulating small noncoding RNA (sncRNA) 5' transfer RNA (tRNA) half
cttccgctgcgccactctgctactt

SEQ ID NO: 9803 - DNA, 20 bp, Artificial Sequence
  synthetic circulating small noncoding RNA (sncRNA) 5' transfer RNA (tRNA) half
gctggtgtagtggtatcatg

SEQ ID NO: 9804 - DNA, 19 bp, Artificial Sequence
  synthetic circulating small noncoding RNA (sncRNA) 5' transfer RNA (tRNA) half
cgttcaggtcgcagtctcc

SEQ ID NO: 9805 - DNA, 26 bp, Artificial Sequence
  synthetic circulating small noncoding RNA (sncRNA) 5' transfer RNA (tRNA) half
cggaagcgtgctgggcccataaccca

SEQ ID NO: 9806 - DNA, 21 bp, Artificial Sequence
  synthetic circulating small noncoding RNA (sncRNA) 5' transfer RNA (tRNA) half
tcgaaaccatcctctgctaac

SEQ ID NO: 9807 - DNA, 41 bp, Artificial Sequence
  synthetic circulating small noncoding RNA (sncRNA) 5' transfer RNA (tRNA) half
aggcgtccctgggtgggctcgaaccaccaacctttcggtta

SEQ ID NO: 9808 - DNA, 27 bp, Artificial Sequence
  synthetic circulating small noncoding RNA (sncRNA) 5' transfer RNA (tRNA) half
ccgggccgcggcggtgagagcgccgaa

SEQ ID NO: 9809 - DNA, 14 bp, Artificial Sequence
  synthetic circulating small noncoding RNA (sncRNA) 5' transfer RNA (tRNA) half
aatggttagcactc

SEQ ID NO: 9810 - DNA, 15 bp, Artificial Sequence
  synthetic circulating small noncoding RNA (sncRNA) 5' transfer RNA (tRNA) half
atgttcccgcccggt

SEQ ID NO: 9811 - DNA, 25 bp, Artificial Sequence
  synthetic circulating small noncoding RNA (sncRNA) 5' transfer RNA (tRNA) half
tgtaatggttagcactctggactct

SEQ ID NO: 9812 - DNA, 18 bp, Artificial Sequence
  synthetic circulating small noncoding RNA (sncRNA) 5' transfer RNA (tRNA) half
catttgagctaatccccc

SEQ ID NO: 9813 - DNA, 30 bp, Artificial Sequence
  synthetic circulating small noncoding RNA (sncRNA) 5' transfer RNA (tRNA) half
gggtatagctcagtggtagagcatttgact

SEQ ID NO: 9814 - DNA, 35 bp, Artificial Sequence
  synthetic circulating small noncoding RNA (sncRNA) 5' transfer RNA (tRNA) half
agcctccccgtcggggaatcgaaccccggtctccc

SEQ ID NO: 9815 - DNA, 14 bp, Artificial Sequence
  synthetic circulating small noncoding RNA (sncRNA) 5' transfer RNA (tRNA) half
tatgattctcggtt

SEQ ID NO: 9816 - DNA, 16 bp, Artificial Sequence
  synthetic circulating small noncoding RNA (sncRNA) 5' transfer RNA (tRNA) half
tccagagtgctaacca

SEQ ID NO: 9817 - DNA, 25 bp, Artificial Sequence
  synthetic circulating small noncoding RNA (sncRNA) 5' transfer RNA (tRNA) half
gtgggttcgagccccacgttgggcg

SEQ ID NO: 9818 - DNA, 16 bp, Artificial Sequence
  synthetic circulating small noncoding RNA (sncRNA) 5' transfer RNA (tRNA) half
accccggtctcccgcg

SEQ ID NO: 9819 - DNA, 13 bp, Artificial Sequence
  synthetic circulating small noncoding RNA (sncRNA) 5' transfer RNA (tRNA) half
ttgcgacccgggt

SEQ ID NO: 9820 - DNA, 18 bp, Artificial Sequence
  synthetic circulating small noncoding RNA (sncRNA) 5' transfer RNA (tRNA) half
cgactcccggtgtgggaa

SEQ ID NO: 9821 - DNA, 6 bp, Artificial Sequence
  synthetic circulating small noncoding RNA (sncRNA) 5' transfer RNA (tRNA) half
cgggcc

SEQ ID NO: 9822 - DNA, 16 bp, Artificial Sequence
  synthetic circulating small noncoding RNA (sncRNA) 5' transfer RNA (tRNA) half
gtagagcatgagactc

SEQ ID NO: 9823 - DNA, 16 bp, Artificial Sequence
  synthetic circulating small noncoding RNA (sncRNA) 5' transfer RNA (tRNA) half
aggattcgaacctgcg

SEQ ID NO: 9824 - DNA, 22 bp, Artificial Sequence
  synthetic circulating small noncoding RNA (sncRNA) 5' transfer RNA (tRNA) half
gtgtagtggttatcacgctcgc

SEQ ID NO: 9825 - DNA, 13 bp, Artificial Sequence
  synthetic circulating small noncoding RNA (sncRNA) 5' transfer RNA (tRNA) half
ggggatgtagctc

SEQ ID NO: 9826 - DNA, 19 bp, Artificial Sequence
  synthetic circulating small noncoding RNA (sncRNA) 5' transfer RNA (tRNA) half
acctccccgtcggggaatt

SEQ ID NO: 9827 - DNA, 20 bp, Artificial Sequence
  synthetic circulating small noncoding RNA (sncRNA) 5' transfer RNA (tRNA) half
gtggagatgccggggatcga

SEQ ID NO: 9828 - DNA, 41 bp, Artificial Sequence
  synthetic circulating small noncoding RNA (sncRNA) 5' transfer RNA (tRNA) half
gttagcactctggactctgaatccagcgatccgagttcaaa

SEQ ID NO: 9829 - DNA, 38 bp, Artificial Sequence
  synthetic circulating small noncoding RNA (sncRNA) 5' transfer RNA (tRNA) half
actcggatcgctggattcagagtccagagtgctaacca

SEQ ID NO: 9830 - DNA, 11 bp, Artificial Sequence
  synthetic circulating small noncoding RNA (sncRNA) 5' transfer RNA (tRNA) half
gagctaaccgg

SEQ ID NO: 9831 - DNA, 31 bp, Artificial Sequence
  synthetic circulating small noncoding RNA (sncRNA) 5' transfer RNA (tRNA) half
gaagatcgcgggttcgaaccccgtccgtgcc

SEQ ID NO: 9832 - DNA, 33 bp, Artificial Sequence
  synthetic circulating small noncoding RNA (sncRNA) 5' transfer RNA (tRNA) half
agagcgccgaatcctaaccactagaccaccagg

SEQ ID NO: 9833 - DNA, 18 bp, Artificial Sequence
  synthetic circulating small noncoding RNA (sncRNA) 5' transfer RNA (tRNA) half
aagtctgatgctctaccg

SEQ ID NO: 9834 - DNA, 35 bp, Artificial Sequence
  synthetic circulating small noncoding RNA (sncRNA) 5' transfer RNA (tRNA) half
aaagtctgatgctctaccgactgagctatccaggc

SEQ ID NO: 9835 - DNA, 36 bp, Artificial Sequence
  synthetic circulating small noncoding RNA (sncRNA) 5' transfer RNA (tRNA) half
gcccaacgtggggctcgaacccacgaccctgagatt

SEQ ID NO: 9836 - DNA, 26 bp, Artificial Sequence
  synthetic circulating small noncoding RNA (sncRNA) 5' transfer RNA (tRNA) half
tgctctaccgactgagctatccgggc

SEQ ID NO: 9837 - DNA, 22 bp, Artificial Sequence
  synthetic circulating small noncoding RNA (sncRNA) 5' transfer RNA (tRNA) half
atccttaggtcgctggttcgat

SEQ ID NO: 9838 - DNA, 32 bp, Artificial Sequence
  synthetic circulating small noncoding RNA (sncRNA) 5' transfer RNA (tRNA) half
gaccacgaagggactcgaaccctcaatcttct

SEQ ID NO: 9839 - DNA, 17 bp, Artificial Sequence
  synthetic circulating small noncoding RNA (sncRNA) 5' transfer RNA (tRNA) half
agcgagcgctctaccat

SEQ ID NO: 9840 - DNA, 11 bp, Artificial Sequence
  synthetic circulating small noncoding RNA (sncRNA) 5' transfer RNA (tRNA) half
gtcggcaggat

SEQ ID NO: 9841 - DNA, 42 bp, Artificial Sequence
  synthetic circulating small noncoding RNA (sncRNA) 5' transfer RNA (tRNA) half
gcctgggtgaaaaccaggaatcctaaccgctagaccatatgg

SEQ ID NO: 9842 - DNA, 21 bp, Artificial Sequence
  synthetic circulating small noncoding RNA (sncRNA) 5' transfer RNA (tRNA) half
ggttcgactcctggctggctc

SEQ ID NO: 9843 - DNA, 23 bp, Artificial Sequence
  synthetic circulating small noncoding RNA (sncRNA) 5' transfer RNA (tRNA) half
tccgctgcgccactctgctactt

SEQ ID NO: 9844 - DNA, 21 bp, Artificial Sequence
  synthetic circulating small noncoding RNA (sncRNA) 5' transfer RNA (tRNA) half
cgtggcaggcgagaattctac

SEQ ID NO: 9845 - DNA, 15 bp, Artificial Sequence
  synthetic circulating small noncoding RNA (sncRNA) 5' transfer RNA (tRNA) half
cgaacccgcaacctt

SEQ ID NO: 9846 - DNA, 14 bp, Artificial Sequence
  synthetic circulating small noncoding RNA (sncRNA) 5' transfer RNA (tRNA) half
cacaccgggagtcg

SEQ ID NO: 9847 - DNA, 36 bp, Artificial Sequence
  synthetic circulating small noncoding RNA (sncRNA) 5' transfer RNA (tRNA) half
aagagtcccatgctctaccgactgagctagccgggc

SEQ ID NO: 9848 - DNA, 27 bp, Artificial Sequence
  synthetic circulating small noncoding RNA (sncRNA) 5' transfer RNA (tRNA) half
cctccccgtcggggaattgaaccccgg

SEQ ID NO: 9849 - DNA, 17 bp, Artificial Sequence
  synthetic circulating small noncoding RNA (sncRNA) 5' transfer RNA (tRNA) half
gttcgatccccggcatc

SEQ ID NO: 9850 - DNA, 14 bp, Artificial Sequence
  synthetic circulating small noncoding RNA (sncRNA) 5' transfer RNA (tRNA) half
gtgtcagaagtggg

SEQ ID NO: 9851 - DNA, 14 bp, Artificial Sequence
  synthetic circulating small noncoding RNA (sncRNA) 5' transfer RNA (tRNA) half
caggatggccgagc

SEQ ID NO: 9852 - DNA, 17 bp, Artificial Sequence
  synthetic circulating small noncoding RNA (sncRNA) 5' transfer RNA (tRNA) half
tagtggttaggattcgg

SEQ ID NO: 9853 - DNA, 21 bp, Artificial Sequence
  synthetic circulating small noncoding RNA (sncRNA) 5' transfer RNA (tRNA) half
agagtactaaccactatacga

SEQ ID NO: 9854 - DNA, 32 bp, Artificial Sequence
  synthetic circulating small noncoding RNA (sncRNA) 5' transfer RNA (tRNA) half
agtgcattggccgggaatcgaacccgggcctc

SEQ ID NO: 9855 - DNA, 15 bp, Artificial Sequence
  synthetic circulating small noncoding RNA (sncRNA) 5' transfer RNA (tRNA) half
caccgagatttgaac

SEQ ID NO: 9856 - DNA, 32 bp, Artificial Sequence
  synthetic circulating small noncoding RNA (sncRNA) 5' transfer RNA (tRNA) half
actccctggtggtctagtggttaggattcggc

SEQ ID NO: 9857 - DNA, 14 bp, Artificial Sequence
  synthetic circulating small noncoding RNA (sncRNA) 5' transfer RNA (tRNA) half
gttggccgggaatc

SEQ ID NO: 9858 - DNA, 28 bp, Artificial Sequence
  synthetic circulating small noncoding RNA (sncRNA) 5' transfer RNA (tRNA) half
caggcggggatactaaccactatactaa

SEQ ID NO: 9859 - DNA, 22 bp, Artificial Sequence
  synthetic circulating small noncoding RNA (sncRNA) 5' transfer RNA (tRNA) half
cttagaccactcggccatcctg

SEQ ID NO: 9860 - DNA, 15 bp, Artificial Sequence
  synthetic circulating small noncoding RNA (sncRNA) 5' transfer RNA (tRNA) half
tgcagtcaaatgctc

SEQ ID NO: 9861 - DNA, 35 bp, Artificial Sequence
  synthetic circulating small noncoding RNA (sncRNA) 5' transfer RNA (tRNA) half
gcaccgctgggattcgaacccaggatctcctgttt

SEQ ID NO: 9862 - DNA, 18 bp, Artificial Sequence
  synthetic circulating small noncoding RNA (sncRNA) 5' transfer RNA (tRNA) half
gggggtgtagctcagtgg

SEQ ID NO: 9863 - DNA, 9 bp, Artificial Sequence
  synthetic circulating small noncoding RNA (sncRNA) 5' transfer RNA (tRNA) half
ctccgccgg

SEQ ID NO: 9864 - DNA, 19 bp, Artificial Sequence
  synthetic circulating small noncoding RNA (sncRNA) 5' transfer RNA (tRNA) half
ttccacctttcgggcggga

SEQ ID NO: 9865 - DNA, 14 bp, Artificial Sequence
  synthetic circulating small noncoding RNA (sncRNA) 5' transfer RNA (tRNA) half
ggcaggattcgaac

SEQ ID NO: 9866 - DNA, 13 bp, Artificial Sequence
  synthetic circulating small noncoding RNA (sncRNA) 5' transfer RNA (tRNA) half
acccaggatctcc

SEQ ID NO: 9867 - DNA, 14 bp, Artificial Sequence
  synthetic circulating small noncoding RNA (sncRNA) 5' transfer RNA (tRNA) half
gtcacgaacaggat

SEQ ID NO: 9868 - DNA, 26 bp, Artificial Sequence
  synthetic circulating small noncoding RNA (sncRNA) 5' transfer RNA (tRNA) half
cggcccgggttcgactcccggtgtgg

SEQ ID NO: 9869 - DNA, 20 bp, Artificial Sequence
  synthetic circulating small noncoding RNA (sncRNA) 5' transfer RNA (tRNA) half
gaattctaccactgaaccac

SEQ ID NO: 9870 - DNA, 16 bp, Artificial Sequence
  synthetic circulating small noncoding RNA (sncRNA) 5' transfer RNA (tRNA) half
cgactgagctatccgg

SEQ ID NO: 9871 - DNA, 26 bp, Artificial Sequence
  synthetic circulating small noncoding RNA (sncRNA) 5' transfer RNA (tRNA) half
gccttagactgctcggccatcctgac

SEQ ID NO: 9872 - DNA, 36 bp, Artificial Sequence
  synthetic circulating small noncoding RNA (sncRNA) 5' transfer RNA (tRNA) half
agcctccccgtcggggaatcgaaccccggtctcccg

SEQ ID NO: 9873 - DNA, 12 bp, Artificial Sequence
  synthetic circulating small noncoding RNA (sncRNA) 5' transfer RNA (tRNA) half
gaacctgcgcgg

SEQ ID NO: 9874 - DNA, 36 bp, Artificial Sequence
  synthetic circulating small noncoding RNA (sncRNA) 5' transfer RNA (tRNA) half
tcgagccaggtaggagtcgaacctacaatcttctga

SEQ ID NO: 9875 - DNA, 16 bp, Artificial Sequence
  synthetic circulating small noncoding RNA (sncRNA) 5' transfer RNA (tRNA) half
cctgagctataccccc

SEQ ID NO: 9876 - DNA, 36 bp, Artificial Sequence
  synthetic circulating small noncoding RNA (sncRNA) 5' transfer RNA (tRNA) half
gtctcatgctctaccgactgagctagccgggcgact

SEQ ID NO: 9877 - DNA, 14 bp, Artificial Sequence
  synthetic circulating small noncoding RNA (sncRNA) 5' transfer RNA (tRNA) half
cgggttcgactccc

SEQ ID NO: 9878 - DNA, 23 bp, Artificial Sequence
  synthetic circulating small noncoding RNA (sncRNA) 5' transfer RNA (tRNA) half
ggcgagcgtgatgaccactacac

SEQ ID NO: 9879 - DNA, 13 bp, Artificial Sequence
  synthetic circulating small noncoding RNA (sncRNA) 5' transfer RNA (tRNA) half
ccctgaccgggaa

SEQ ID NO: 9880 - DNA, 34 bp, Artificial Sequence
  synthetic circulating small noncoding RNA (sncRNA) 5' transfer RNA (tRNA) half
aggcgagaattctaccactgaaccaccaatgctc

SEQ ID NO: 9881 - DNA, 17 bp, Artificial Sequence
  synthetic circulating small noncoding RNA (sncRNA) 5' transfer RNA (tRNA) half
gtcgactctggcgggac

SEQ ID NO: 9882 - DNA, 24 bp, Artificial Sequence
  synthetic circulating small noncoding RNA (sncRNA) 5' transfer RNA (tRNA) half
cccattcttgcgacccgggttcga

SEQ ID NO: 9883 - DNA, 22 bp, Artificial Sequence
  synthetic circulating small noncoding RNA (sncRNA) 5' transfer RNA (tRNA) half
ggttcgactcccggtatgggaa

SEQ ID NO: 9884 - DNA, 17 bp, Artificial Sequence
  synthetic circulating small noncoding RNA (sncRNA) 5' transfer RNA (tRNA) half
cggtctaaggcgctgcg

SEQ ID NO: 9885 - DNA, 37 bp, Artificial Sequence
  synthetic circulating small noncoding RNA (sncRNA) 5' transfer RNA (tRNA) half
gcccaacgtggggctcgaacccacgaccctgggatta

SEQ ID NO: 9886 - DNA, 23 bp, Artificial Sequence
  synthetic circulating small noncoding RNA (sncRNA) 5' transfer RNA (tRNA) half
gggccgcggcggtgagagcgccg

SEQ ID NO: 9887 - DNA, 35 bp, Artificial Sequence
  synthetic circulating small noncoding RNA (sncRNA) 5' transfer RNA (tRNA) half
caggcaccgctgggattcgaacccaggatctcctg

SEQ ID NO: 9888 - DNA, 20 bp, Artificial Sequence
  synthetic circulating small noncoding RNA (sncRNA) 5' transfer RNA (tRNA) half
aggtcctgggttcgagcccc

SEQ ID NO: 9889 - DNA, 21 bp, Artificial Sequence
  synthetic circulating small noncoding RNA (sncRNA) 5' transfer RNA (tRNA) half
gaaccgaggttgctgcggcca

SEQ ID NO: 9890 - DNA, 33 bp, Artificial Sequence
  synthetic circulating small noncoding RNA (sncRNA) 5' transfer RNA (tRNA) half
ctcatgctctaccgactgagctagccgggcctt

SEQ ID NO: 9891 - DNA, 20 bp, Artificial Sequence
  synthetic circulating small noncoding RNA (sncRNA) 5' transfer RNA (tRNA) half
gaacccgggtcaactgcttg

SEQ ID NO: 9892 - DNA, 23 bp, Artificial Sequence
  synthetic circulating small noncoding RNA (sncRNA) 5' transfer RNA (tRNA) half
gggcctcccgcgtggcaggcgag

SEQ ID NO: 9893 - DNA, 18 bp, Artificial Sequence
  synthetic circulating small noncoding RNA (sncRNA) 5' transfer RNA (tRNA) half
gttccttcgagccggatt

SEQ ID NO: 9894 - DNA, 20 bp, Artificial Sequence
  synthetic circulating small noncoding RNA (sncRNA) 5' transfer RNA (tRNA) half
tcgtatagtggttagtactc

SEQ ID NO: 9895 - DNA, 12 bp, Artificial Sequence
  synthetic circulating small noncoding RNA (sncRNA) 5' transfer RNA (tRNA) half
gtgcattggccg

SEQ ID NO: 9896 - DNA, 30 bp, Artificial Sequence
  synthetic circulating small noncoding RNA (sncRNA) 5' transfer RNA (tRNA) half
cagacgcgttatccattgcgccactggccc

SEQ ID NO: 9897 - DNA, 23 bp, Artificial Sequence
  synthetic circulating small noncoding RNA (sncRNA) 5' transfer RNA (tRNA) half
gtagtggttatcacgttcgcctc

SEQ ID NO: 9898 - DNA, 26 bp, Artificial Sequence
  synthetic circulating small noncoding RNA (sncRNA) 5' transfer RNA (tRNA) half
ccatggtgtaatggttagcactctgg

SEQ ID NO: 9899 - DNA, 37 bp, Artificial Sequence
  synthetic circulating small noncoding RNA (sncRNA) 5' transfer RNA (tRNA) half
cccgggccgcggcggtgagagcgccgaatcctaacca

SEQ ID NO: 9900 - DNA, 22 bp, Artificial Sequence
  synthetic circulating small noncoding RNA (sncRNA) 5' transfer RNA (tRNA) half
aggccccagcgagatttgaact

SEQ ID NO: 9901 - DNA, 13 bp, Artificial Sequence
  synthetic circulating small noncoding RNA (sncRNA) 5' transfer RNA (tRNA) half
agcgtgctgggcc

SEQ ID NO: 9902 - DNA, 21 bp, Artificial Sequence
  synthetic circulating small noncoding RNA (sncRNA) 5' transfer RNA (tRNA) half
agattccaggttcgactcctg

SEQ ID NO: 9903 - DNA, 13 bp, Artificial Sequence
  synthetic circulating small noncoding RNA (sncRNA) 5' transfer RNA (tRNA) half
ccgggagtcgaac

SEQ ID NO: 9904 - DNA, 35 bp, Artificial Sequence
  synthetic circulating small noncoding RNA (sncRNA) 5' transfer RNA (tRNA) half
tttccctgaccgggaatcgaacccgggccgcggcg

SEQ ID NO: 9905 - DNA, 10 bp, Artificial Sequence
  synthetic circulating small noncoding RNA (sncRNA) 5' transfer RNA (tRNA) half
aacccgcgac

SEQ ID NO: 9906 - DNA, 23 bp, Artificial Sequence
  synthetic circulating small noncoding RNA (sncRNA) 5' transfer RNA (tRNA) half
gtggcagcggtgggattcgaacc

SEQ ID NO: 9907 - DNA, 15 bp, Artificial Sequence
  synthetic circulating small noncoding RNA (sncRNA) 5' transfer RNA (tRNA) half
ctcatgctctaccga

SEQ ID NO: 9908 - DNA, 37 bp, Artificial Sequence
  synthetic circulating small noncoding RNA (sncRNA) 5' transfer RNA (tRNA) half
ggttaggattcggcgctctcaccgccgcggcccgggt

SEQ ID NO: 9909 - DNA, 31 bp, Artificial Sequence
  synthetic circulating small noncoding RNA (sncRNA) 5' transfer RNA (tRNA) half
agcgaccacgaagggactcgaacccccaatc

SEQ ID NO: 9910 - DNA, 24 bp, Artificial Sequence
  synthetic circulating small noncoding RNA (sncRNA) 5' transfer RNA (tRNA) half
gggctcgtccgggatttgaacccg

SEQ ID NO: 9911 - DNA, 33 bp, Artificial Sequence
  synthetic circulating small noncoding RNA (sncRNA) 5' transfer RNA (tRNA) half
acccgggcctcccgcgtggcaggcgagaattct

SEQ ID NO: 9912 - DNA, 9 bp, Artificial Sequence
  synthetic circulating small noncoding RNA (sncRNA) 5' transfer RNA (tRNA) half
ggccgggaa

SEQ ID NO: 9913 - DNA, 14 bp, Artificial Sequence
  synthetic circulating small noncoding RNA (sncRNA) 5' transfer RNA (tRNA) half
cggcggtgagagcg

SEQ ID NO: 9914 - DNA, 23 bp, Artificial Sequence
  synthetic circulating small noncoding RNA (sncRNA) 5' transfer RNA (tRNA) half
gtgtgaggcgaacgtgataacca

SEQ ID NO: 9915 - DNA, 25 bp, Artificial Sequence
  synthetic circulating small noncoding RNA (sncRNA) 5' transfer RNA (tRNA) half
cggatagctcagtcggtagagcatc

SEQ ID NO: 9916 - DNA, 13 bp, Artificial Sequence
  synthetic circulating small noncoding RNA (sncRNA) 5' transfer RNA (tRNA) half
cgcagcgagcagg

SEQ ID NO: 9917 - DNA, 28 bp, Artificial Sequence
  synthetic circulating small noncoding RNA (sncRNA) 5' transfer RNA (tRNA) half
ctggactctgaatccagcgatccgagtt

SEQ ID NO: 9918 - DNA, 25 bp, Artificial Sequence
  synthetic circulating small noncoding RNA (sncRNA) 5' transfer RNA (tRNA) half
catatggtctagcggttaggattcc

SEQ ID NO: 9919 - DNA, 19 bp, Artificial Sequence
  synthetic circulating small noncoding RNA (sncRNA) 5' transfer RNA (tRNA) half
ttcaaatctcggtgggacc

SEQ ID NO: 9920 - DNA, 30 bp, Artificial Sequence
  synthetic circulating small noncoding RNA (sncRNA) 5' transfer RNA (tRNA) half
atgcagagtactaaccactatacgatctcg

SEQ ID NO: 9921 - DNA, 30 bp, Artificial Sequence
  synthetic circulating small noncoding RNA (sncRNA) 5' transfer RNA (tRNA) half
gacccagtggcctaatggataaggcatcag

SEQ ID NO: 9922 - DNA, 26 bp, Artificial Sequence
  synthetic circulating small noncoding RNA (sncRNA) 5' transfer RNA (tRNA) half
aatggttagcactctggactctgaat

SEQ ID NO: 9923 - DNA, 28 bp, Artificial Sequence
  synthetic circulating small noncoding RNA (sncRNA) 5' transfer RNA (tRNA) half
cgagccagccaggagtcgaacctggaat

SEQ ID NO: 9924 - DNA, 30 bp, Artificial Sequence
  synthetic circulating small noncoding RNA (sncRNA) 5' transfer RNA (tRNA) half
ggaggcccgggttcgattcccggccaatgc

SEQ ID NO: 9925 - DNA, 19 bp, Artificial Sequence
  synthetic circulating small noncoding RNA (sncRNA) 5' transfer RNA (tRNA) half
ataggggttagtactctgc

SEQ ID NO: 9926 - DNA, 21 bp, Artificial Sequence
  synthetic circulating small noncoding RNA (sncRNA) 5' transfer RNA (tRNA) half
tcgaaaccgggcggaaacagc

SEQ ID NO: 9927 - DNA, 19 bp, Artificial Sequence
  synthetic circulating small noncoding RNA (sncRNA) 5' transfer RNA (tRNA) half
gaacccgggccgcggcggt

SEQ ID NO: 9928 - DNA, 38 bp, Artificial Sequence
  synthetic circulating small noncoding RNA (sncRNA) 5' transfer RNA (tRNA) half
gatgccccgtgtgaggatcgaactcacgaccttcagat

SEQ ID NO: 9929 - DNA, 21 bp, Artificial Sequence
  synthetic circulating small noncoding RNA (sncRNA) 5' transfer RNA (tRNA) half
tcctgccgtgactcggattcg

SEQ ID NO: 9930 - DNA, 19 bp, Artificial Sequence
  synthetic circulating small noncoding RNA (sncRNA) 5' transfer RNA (tRNA) half
cgattcccgggcggcgcat

SEQ ID NO: 9931 - DNA, 33 bp, Artificial Sequence
  synthetic circulating small noncoding RNA (sncRNA) 5' transfer RNA (tRNA) half
ccaggcggcccgggttcgactcccggtatggga

SEQ ID NO: 9932 - DNA, 32 bp, Artificial Sequence
  synthetic circulating small noncoding RNA (sncRNA) 5' transfer RNA (tRNA) half
gggcatgggtggttcagtggtagaattctcgc

SEQ ID NO: 9933 - DNA, 16 bp, Artificial Sequence
  synthetic circulating small noncoding RNA (sncRNA) 5' transfer RNA (tRNA) half
gagattaagagtctca

SEQ ID NO: 9934 - DNA, 25 bp, Artificial Sequence
  synthetic circulating small noncoding RNA (sncRNA) 5' transfer RNA (tRNA) half
gtctagcggttaggattcctggttt

SEQ ID NO: 9935 - DNA, 33 bp, Artificial Sequence
  synthetic circulating small noncoding RNA (sncRNA) 5' transfer RNA (tRNA) half
ccgtgatcgtataggggttagtactctgcgttg

SEQ ID NO: 9936 - DNA, 29 bp, Artificial Sequence
  synthetic circulating small noncoding RNA (sncRNA) 5' transfer RNA (tRNA) half
aattctcgcctgccacgcgggaggcccgg

SEQ ID NO: 9937 - DNA, 44 bp, Artificial Sequence
  synthetic circulating small noncoding RNA (sncRNA) 5' transfer RNA (tRNA) half
actcggatcgctggattcagagtccagagtgctaaccattacac

SEQ ID NO: 9938 - DNA, 24 bp, Artificial Sequence
  synthetic circulating small noncoding RNA (sncRNA) 5' transfer RNA (tRNA) half
tatagtggttagtactctgcgttg

SEQ ID NO: 9939 - DNA, 27 bp, Artificial Sequence
  synthetic circulating small noncoding RNA (sncRNA) 5' transfer RNA (tRNA) half
gccgtcacgaacaggattcgaacctgt

SEQ ID NO: 9940 - DNA, 14 bp, Artificial Sequence
  synthetic circulating small noncoding RNA (sncRNA) 5' transfer RNA (tRNA) half
cacgcccccgaaga

SEQ ID NO: 9941 - DNA, 29 bp, Artificial Sequence
  synthetic circulating small noncoding RNA (sncRNA) 5' transfer RNA (tRNA) half
agccagccaggagtcgaacctggaatctt

SEQ ID NO: 9942 - DNA, 20 bp, Artificial Sequence
  synthetic circulating small noncoding RNA (sncRNA) 5' transfer RNA (tRNA) half
gccgtgatcgtataggggtt

SEQ ID NO: 9943 - DNA, 8 bp, Artificial Sequence
  synthetic circulating small noncoding RNA (sncRNA) 5' transfer RNA (tRNA) half
cgggatcg

SEQ ID NO: 9944 - DNA, 26 bp, Artificial Sequence
  synthetic circulating small noncoding RNA (sncRNA) 5' transfer RNA (tRNA) half
cggcccgggttcgactcccggtatgg

SEQ ID NO: 9945 - DNA, 15 bp, Artificial Sequence
  synthetic circulating small noncoding RNA (sncRNA) 5' transfer RNA (tRNA) half
aaccgaggttgctgc

SEQ ID NO: 9946 - DNA, 24 bp, Artificial Sequence
  synthetic circulating small noncoding RNA (sncRNA) 5' transfer RNA (tRNA) half
ggtagcgtggccgagcggtctaag

SEQ ID NO: 9947 - DNA, 22 bp, Artificial Sequence
  synthetic circulating small noncoding RNA (sncRNA) 5' transfer RNA (tRNA) half
tcgattccccgacggggagtct

SEQ ID NO: 9948 - DNA, 18 bp, Artificial Sequence
  synthetic circulating small noncoding RNA (sncRNA) 5' transfer RNA (tRNA) half
gcctccgatagcagagga

SEQ ID NO: 9949 - DNA, 19 bp, Artificial Sequence
  synthetic circulating small noncoding RNA (sncRNA) 5' transfer RNA (tRNA) half
cgtgtttccgcccggtttc

SEQ ID NO: 9950 - DNA, 38 bp, Artificial Sequence
  synthetic circulating small noncoding RNA (sncRNA) 5' transfer RNA (tRNA) half
accagtgctctaacccctgagctatggagccctcacct

SEQ ID NO: 9951 - DNA, 30 bp, Artificial Sequence
  synthetic circulating small noncoding RNA (sncRNA) 5' transfer RNA (tRNA) half
gcaccacgctctaaccaactgagctaaccg

SEQ ID NO: 9952 - DNA, 27 bp, Artificial Sequence
  synthetic circulating small noncoding RNA (sncRNA) 5' transfer RNA (tRNA) half
tgtaatggttagcactctggactctga

SEQ ID NO: 9953 - DNA, 17 bp, Artificial Sequence
  synthetic circulating small noncoding RNA (sncRNA) 5' transfer RNA (tRNA) half
atccatcgacctctggg

SEQ ID NO: 9954 - DNA, 21 bp, Artificial Sequence
  synthetic circulating small noncoding RNA (sncRNA) 5' transfer RNA (tRNA) half
cgatgcccgcatcctccactt

SEQ ID NO: 9955 - DNA, 26 bp, Artificial Sequence
  synthetic circulating small noncoding RNA (sncRNA) 5' transfer RNA (tRNA) half
cataccgggagtcgaacccgggccgc

SEQ ID NO: 9956 - DNA, 25 bp, Artificial Sequence
  synthetic circulating small noncoding RNA (sncRNA) 5' transfer RNA (tRNA) half
cgggttcgaaccccgtccgtgcctg

SEQ ID NO: 9957 - DNA, 19 bp, Artificial Sequence
  synthetic circulating small noncoding RNA (sncRNA) 5' transfer RNA (tRNA) half
caggagtcgaacctggaat

SEQ ID NO: 9958 - DNA, 16 bp, Artificial Sequence
  synthetic circulating small noncoding RNA (sncRNA) 5' transfer RNA (tRNA) half
ggccatcctgacactt

SEQ ID NO: 9959 - DNA, 20 bp, Artificial Sequence
  synthetic circulating small noncoding RNA (sncRNA) 5' transfer RNA (tRNA) half
cgggagtcgaacccgggccg

SEQ ID NO: 9960 - DNA, 20 bp, Artificial Sequence
  synthetic circulating small noncoding RNA (sncRNA) 5' transfer RNA (tRNA) half
gcggttaggattcctggttt

SEQ ID NO: 9961 - DNA, 29 bp, Artificial Sequence
  synthetic circulating small noncoding RNA (sncRNA) 5' transfer RNA (tRNA) half
gaactcggatcgctggattcagagtccag

SEQ ID NO: 9962 - DNA, 11 bp, Artificial Sequence
  synthetic circulating small noncoding RNA (sncRNA) 5' transfer RNA (tRNA) half
ccgtcggggaa

SEQ ID NO: 9963 - DNA, 33 bp, Artificial Sequence
  synthetic circulating small noncoding RNA (sncRNA) 5' transfer RNA (tRNA) half
ggggcacccggatttgaaccggggacctcttga

SEQ ID NO: 9964 - DNA, 18 bp, Artificial Sequence
  synthetic circulating small noncoding RNA (sncRNA) 5' transfer RNA (tRNA) half
gtccctgggtgggctcga

SEQ ID NO: 9965 - DNA, 33 bp, Artificial Sequence
  synthetic circulating small noncoding RNA (sncRNA) 5' transfer RNA (tRNA) half
agattgcaggttcgagtcctgccgcggtcgact

SEQ ID NO: 9966 - DNA, 17 bp, Artificial Sequence
  synthetic circulating small noncoding RNA (sncRNA) 5' transfer RNA (tRNA) half
ccccgtcggggaattga

SEQ ID NO: 9967 - DNA, 36 bp, Artificial Sequence
  synthetic circulating small noncoding RNA (sncRNA) 5' transfer RNA (tRNA) half
tcgactctggcgggactcgaacccgcaacctttgaa

SEQ ID NO: 9968 - DNA, 16 bp, Artificial Sequence
  synthetic circulating small noncoding RNA (sncRNA) 5' transfer RNA (tRNA) half
cgaaccccggtctccc

SEQ ID NO: 9969 - DNA, 15 bp, Artificial Sequence
  synthetic circulating small noncoding RNA (sncRNA) 5' transfer RNA (tRNA) half
tcgatccccggcatc

SEQ ID NO: 9970 - DNA, 14 bp, Artificial Sequence
  synthetic circulating small noncoding RNA (sncRNA) 5' transfer RNA (tRNA) half
ggtctcccgcgtga

SEQ ID NO: 9971 - DNA, 14 bp, Artificial Sequence
  synthetic circulating small noncoding RNA (sncRNA) 5' transfer RNA (tRNA) half
cggggttcgattcc

SEQ ID NO: 9972 - DNA, 19 bp, Artificial Sequence
  synthetic circulating small noncoding RNA (sncRNA) 5' transfer RNA (tRNA) half
tgttcccataccgggagtc

SEQ ID NO: 9973 - DNA, 26 bp, Artificial Sequence
  synthetic circulating small noncoding RNA (sncRNA) 5' transfer RNA (tRNA) half
ccgcggcccgggttcgattcccggtc

SEQ ID NO: 9974 - DNA, 20 bp, Artificial Sequence
  synthetic circulating small noncoding RNA (sncRNA) 5' transfer RNA (tRNA) half
ctcggatcgctggattcaaa

SEQ ID NO: 9975 - DNA, 16 bp, Artificial Sequence
  synthetic circulating small noncoding RNA (sncRNA) 5' transfer RNA (tRNA) half
ggccccagcgagattt

SEQ ID NO: 9976 - DNA, 13 bp, Artificial Sequence
  synthetic circulating small noncoding RNA (sncRNA) 5' transfer RNA (tRNA) half
gctctaaccaact

SEQ ID NO: 9977 - DNA, 21 bp, Artificial Sequence
  synthetic circulating small noncoding RNA (sncRNA) 5' transfer RNA (tRNA) half
acctccccgtcggggaattga

SEQ ID NO: 9978 - DNA, 20 bp, Artificial Sequence
  synthetic circulating small noncoding RNA (sncRNA) 5' transfer RNA (tRNA) half
gtggtatcatgcaagattcc

SEQ ID NO: 9979 - DNA, 34 bp, Artificial Sequence
  synthetic circulating small noncoding RNA (sncRNA) 5' transfer RNA (tRNA) half
cgagaggtcccgggttcaaatcccggacgagccc

SEQ ID NO: 9980 - DNA, 26 bp, Artificial Sequence
  synthetic circulating small noncoding RNA (sncRNA) 5' transfer RNA (tRNA) half
cgtgtgaggcgaacgtgataaccact

SEQ ID NO: 9981 - DNA, 25 bp, Artificial Sequence
  synthetic circulating small noncoding RNA (sncRNA) 5' transfer RNA (tRNA) half
ggcgagaattctaccattgaaccac

SEQ ID NO: 9982 - DNA, 16 bp, Artificial Sequence
  synthetic circulating small noncoding RNA (sncRNA) 5' transfer RNA (tRNA) half
agaagattgcaggttc

SEQ ID NO: 9983 - DNA, 29 bp, Artificial Sequence
  synthetic circulating small noncoding RNA (sncRNA) 5' transfer RNA (tRNA) half
ggcaggcgagaattctaccactgaaccac

SEQ ID NO: 9984 - DNA, 12 bp, Artificial Sequence
  synthetic circulating small noncoding RNA (sncRNA) 5' transfer RNA (tRNA) half
cgggaatcgaac

SEQ ID NO: 9985 - DNA, 14 bp, Artificial Sequence
  synthetic circulating small noncoding RNA (sncRNA) 5' transfer RNA (tRNA) half
ggttcgattccggc

SEQ ID NO: 9986 - DNA, 28 bp, Artificial Sequence
  synthetic circulating small noncoding RNA (sncRNA) 5' transfer RNA (tRNA) half
catagtgtagcggttatcacgtctgctt

SEQ ID NO: 9987 - DNA, 23 bp, Artificial Sequence
  synthetic circulating small noncoding RNA (sncRNA) 5' transfer RNA (tRNA) half
gtggttcagtggtagaattctcg

SEQ ID NO: 9988 - DNA, 13 bp, Artificial Sequence
  synthetic circulating small noncoding RNA (sncRNA) 5' transfer RNA (tRNA) half
gctctacccctga

SEQ ID NO: 9989 - DNA, 26 bp, Artificial Sequence
  synthetic circulating small noncoding RNA (sncRNA) 5' transfer RNA (tRNA) half
ggttagcactctggactctgaatcca

SEQ ID NO: 9990 - DNA, 16 bp, Artificial Sequence
  synthetic circulating small noncoding RNA (sncRNA) 5' transfer RNA (tRNA) half
tcccggtcagggaagc

SEQ ID NO: 9991 - DNA, 21 bp, Artificial Sequence
  synthetic circulating small noncoding RNA (sncRNA) 5' transfer RNA (tRNA) half
gaagtccaatgcgctatccat

SEQ ID NO: 9992 - DNA, 30 bp, Artificial Sequence
  synthetic circulating small noncoding RNA (sncRNA) 5' transfer RNA (tRNA) half
cagagtactaaccactatacgatcacggcg

SEQ ID NO: 9993 - DNA, 17 bp, Artificial Sequence
  synthetic circulating small noncoding RNA (sncRNA) 5' transfer RNA (tRNA) half
cgagccagccaggagtc

SEQ ID NO: 9994 - DNA, 32 bp, Artificial Sequence
  synthetic circulating small noncoding RNA (sncRNA) 5' transfer RNA (tRNA) half
gattgagggttcgagtcccttcgtggtcgaaa

SEQ ID NO: 9995 - DNA, 33 bp, Artificial Sequence
  synthetic circulating small noncoding RNA (sncRNA) 5' transfer RNA (tRNA) half
attggccgggaatcgaacccgggcctcccgcgt

SEQ ID NO: 9996 - DNA, 20 bp, Artificial Sequence
  synthetic circulating small noncoding RNA (sncRNA) 5' transfer RNA (tRNA) half
gggttcgattcccggtcagg

SEQ ID NO: 9997 - DNA, 29 bp, Artificial Sequence
  synthetic circulating small noncoding RNA (sncRNA) 5' transfer RNA (tRNA) half
tgagaatcatacccctagaccaacgagcc

SEQ ID NO: 9998 - DNA, 13 bp, Artificial Sequence
  synthetic circulating small noncoding RNA (sncRNA) 5' transfer RNA (tRNA) half
tcaccgccgcggc

SEQ ID NO: 9999 - DNA, 24 bp, Artificial Sequence
  synthetic circulating small noncoding RNA (sncRNA) 5' transfer RNA (tRNA) half
atgaccccgacgtgattcgaacac

SEQ ID NO: 10000 - DNA, 29 bp, Artificial Sequence
  synthetic circulating small noncoding RNA (sncRNA) 5' transfer RNA (tRNA) half
aggtcctgagttcgaacctcagagggggc

SEQ ID NO: 10001 - DNA, 20 bp, Artificial Sequence
  synthetic circulating small noncoding RNA (sncRNA) 5' transfer RNA (tRNA) half
tggtttcgatccatcgacct

SEQ ID NO: 10002 - DNA, 33 bp, Artificial Sequence
  synthetic circulating small noncoding RNA (sncRNA) 5' transfer RNA (tRNA) half
cgactccgccgggactcgaacccggaacctttg

SEQ ID NO: 10003 - DNA, 12 bp, Artificial Sequence
  synthetic circulating small noncoding RNA (sncRNA) 5' transfer RNA (tRNA) half
gtcgtgggttcg

SEQ ID NO: 10004 - DNA, 28 bp, Artificial Sequence
  synthetic circulating small noncoding RNA (sncRNA) 5' transfer RNA (tRNA) half
atagtgtagcggttatcacgtctgcttt

SEQ ID NO: 10005 - DNA, 23 bp, Artificial Sequence
  synthetic circulating small noncoding RNA (sncRNA) 5' transfer RNA (tRNA) half
tgtgaggcgaacgtgataaccac

SEQ ID NO: 10006 - DNA, 20 bp, Artificial Sequence
  synthetic circulating small noncoding RNA (sncRNA) 5' transfer RNA (tRNA) half
ttgaatccagcgatccgagt

SEQ ID NO: 10007 - DNA, 21 bp, Artificial Sequence
  synthetic circulating small noncoding RNA (sncRNA) 5' transfer RNA (tRNA) half
cgattccccgacggggagtct

SEQ ID NO: 10008 - DNA, 20 bp, Artificial Sequence
  synthetic circulating small noncoding RNA (sncRNA) 5' transfer RNA (tRNA) half
gcgccaaatcctaaccacta

SEQ ID NO: 10009 - DNA, 33 bp, Artificial Sequence
  synthetic circulating small noncoding RNA (sncRNA) 5' transfer RNA (tRNA) half
caggggtcgcgagttcaaatctcgctggggcct

SEQ ID NO: 10010 - DNA, 30 bp, Artificial Sequence
  synthetic circulating small noncoding RNA (sncRNA) 5' transfer RNA (tRNA) half
acccacgcgtgcagagcacaatggattagc

SEQ ID NO: 10011 - DNA, 20 bp, Artificial Sequence
  synthetic circulating small noncoding RNA (sncRNA) 5' transfer RNA (tRNA) half
ggggttagtactctgcgttg

SEQ ID NO: 10012 - DNA, 13 bp, Artificial Sequence
  synthetic circulating small noncoding RNA (sncRNA) 5' transfer RNA (tRNA) half
gccccctctgagg

SEQ ID NO: 10013 - DNA, 17 bp, Artificial Sequence
  synthetic circulating small noncoding RNA (sncRNA) 5' transfer RNA (tRNA) half
accgggcggaaacagta

SEQ ID NO: 10014 - DNA, 22 bp, Artificial Sequence
  synthetic circulating small noncoding RNA (sncRNA) 5' transfer RNA (tRNA) half
aatggttagcactctggactct

SEQ ID NO: 10015 - DNA, 22 bp, Artificial Sequence
  synthetic circulating small noncoding RNA (sncRNA) 5' transfer RNA (tRNA) half
cccgggtcaactgcttggaagg

SEQ ID NO: 10016 - DNA, 14 bp, Artificial Sequence
  synthetic circulating small noncoding RNA (sncRNA) 5' transfer RNA (tRNA) half
ctcgcctgccacgc

SEQ ID NO: 10017 - DNA, 10 bp, Artificial Sequence
  synthetic circulating small noncoding RNA (sncRNA) 5' transfer RNA (tRNA) half
gattcccggc

SEQ ID NO: 10018 - DNA, 36 bp, Artificial Sequence
  synthetic circulating small noncoding RNA (sncRNA) 5' transfer RNA (tRNA) half
atctgaaggtcctgagttcgaacctcagagggggca

SEQ ID NO: 10019 - DNA, 13 bp, Artificial Sequence
  synthetic circulating small noncoding RNA (sncRNA) 5' transfer RNA (tRNA) half
cccggctagctca

SEQ ID NO: 10020 - DNA, 28 bp, Artificial Sequence
  synthetic circulating small noncoding RNA (sncRNA) 5' transfer RNA (tRNA) half
acccacgcccccgaagagactggagcct

SEQ ID NO: 10021 - DNA, 36 bp, Artificial Sequence
  synthetic circulating small noncoding RNA (sncRNA) 5' transfer RNA (tRNA) half
ggtgtttctgtagtgtagtggttatcacgctcgcct

SEQ ID NO: 10022 - DNA, 25 bp, Artificial Sequence
  synthetic circulating small noncoding RNA (sncRNA) 5' transfer RNA (tRNA) half
ggtgggactcgaacccacaatccct

SEQ ID NO: 10023 - DNA, 35 bp, Artificial Sequence
  synthetic circulating small noncoding RNA (sncRNA) 5' transfer RNA (tRNA) half
atctaaaggtccctggttcgatcccgggtttcggc

SEQ ID NO: 10024 - DNA, 20 bp, Artificial Sequence
  synthetic circulating small noncoding RNA (sncRNA) 5' transfer RNA (tRNA) half
tgacaggcggggatactcac

SEQ ID NO: 10025 - DNA, 12 bp, Artificial Sequence
  synthetic circulating small noncoding RNA (sncRNA) 5' transfer RNA (tRNA) half
ggtcccgggttc

SEQ ID NO: 10026 - DNA, 19 bp, Artificial Sequence
  synthetic circulating small noncoding RNA (sncRNA) 5' transfer RNA (tRNA) half
ccataccgggagtcgaacc

SEQ ID NO: 10027 - DNA, 19 bp, Artificial Sequence
  synthetic circulating small noncoding RNA (sncRNA) 5' transfer RNA (tRNA) half
cagtgccttatccattagg

SEQ ID NO: 10028 - DNA, 33 bp, Artificial Sequence
  synthetic circulating small noncoding RNA (sncRNA) 5' transfer RNA (tRNA) half
cacgaggccccgggttcaatccccggcacctcc

SEQ ID NO: 10029 - DNA, 26 bp, Artificial Sequence
  synthetic circulating small noncoding RNA (sncRNA) 5' transfer RNA (tRNA) half
ggccgggaatcgaacccgggcctccc

SEQ ID NO: 10030 - DNA, 23 bp, Artificial Sequence
  synthetic circulating small noncoding RNA (sncRNA) 5' transfer RNA (tRNA) half
tggtgagtatccccgcctgtcac

SEQ ID NO: 10031 - DNA, 22 bp, Artificial Sequence
  synthetic circulating small noncoding RNA (sncRNA) 5' transfer RNA (tRNA) half
ctaaccactatacgatcacggc

SEQ ID NO: 10032 - DNA, 24 bp, Artificial Sequence
  synthetic circulating small noncoding RNA (sncRNA) 5' transfer RNA (tRNA) half
tggggttcgaacccacgcagacat

SEQ ID NO: 10033 - DNA, 30 bp, Artificial Sequence
  synthetic circulating small noncoding RNA (sncRNA) 5' transfer RNA (tRNA) half
aggaatcctaaccgctagaccatatgggag

SEQ ID NO: 10034 - DNA, 24 bp, Artificial Sequence
  synthetic circulating small noncoding RNA (sncRNA) 5' transfer RNA (tRNA) half
tcctaaccgctagaccatatggga

SEQ ID NO: 10035 - DNA, 23 bp, Artificial Sequence
  synthetic circulating small noncoding RNA (sncRNA) 5' transfer RNA (tRNA) half
catgctctaccgactgagctagc

SEQ ID NO: 10036 - DNA, 20 bp, Artificial Sequence
  synthetic circulating small noncoding RNA (sncRNA) 5' transfer RNA (tRNA) half
cggcccgggttcgactcccg

SEQ ID NO: 10037 - DNA, 29 bp, Artificial Sequence
  synthetic circulating small noncoding RNA (sncRNA) 5' transfer RNA (tRNA) half
cgaatcctaaccactagaccaccagggag

SEQ ID NO: 10038 - DNA, 24 bp, Artificial Sequence
  synthetic circulating small noncoding RNA (sncRNA) 5' transfer RNA (tRNA) half
gaccccgacgtgatttgaacacgc

SEQ ID NO: 10039 - DNA, 29 bp, Artificial Sequence
  synthetic circulating small noncoding RNA (sncRNA) 5' transfer RNA (tRNA) half
cctgaccgggaatcgaacccgggccgcgg

SEQ ID NO: 10040 - DNA, 14 bp, Artificial Sequence
  synthetic circulating small noncoding RNA (sncRNA) 5' transfer RNA (tRNA) half
acgcctccattcgg

SEQ ID NO: 10041 - DNA, 15 bp, Artificial Sequence
  synthetic circulating small noncoding RNA (sncRNA) 5' transfer RNA (tRNA) half
ttcgattcccggccc

SEQ ID NO: 10042 - DNA, 28 bp, Artificial Sequence
  synthetic circulating small noncoding RNA (sncRNA) 5' transfer RNA (tRNA) half
tatggaggcgtgggttcgaatcccactt

SEQ ID NO: 10043 - DNA, 13 bp, Artificial Sequence
  synthetic circulating small noncoding RNA (sncRNA) 5' transfer RNA (tRNA) half
gggtgggctcgaa

SEQ ID NO: 10044 - DNA, 30 bp, Artificial Sequence
  synthetic circulating small noncoding RNA (sncRNA) 5' transfer RNA (tRNA) half
gccagccaggagtcgaacctggaatcttct

SEQ ID NO: 10045 - DNA, 18 bp, Artificial Sequence
  synthetic circulating small noncoding RNA (sncRNA) 5' transfer RNA (tRNA) half
tgagtatccccgcctgtc

SEQ ID NO: 10046 - DNA, 28 bp, Artificial Sequence
  synthetic circulating small noncoding RNA (sncRNA) 5' transfer RNA (tRNA) half
gttccttcgagccggattcgaaccagcg

SEQ ID NO: 10047 - DNA, 33 bp, Artificial Sequence
  synthetic circulating small noncoding RNA (sncRNA) 5' transfer RNA (tRNA) half
ggatcgctggattcagagtccagagtgctaacc

SEQ ID NO: 10048 - DNA, 17 bp, Artificial Sequence
  synthetic circulating small noncoding RNA (sncRNA) 5' transfer RNA (tRNA) half
gtaccgcgcgctaaccg

SEQ ID NO: 10049 - DNA, 15 bp, Artificial Sequence
  synthetic circulating small noncoding RNA (sncRNA) 5' transfer RNA (tRNA) half
tgagactcttaatct

SEQ ID NO: 10050 - DNA, 35 bp, Artificial Sequence
  synthetic circulating small noncoding RNA (sncRNA) 5' transfer RNA (tRNA) half
aacaggagatcctgggttcaaatcccagcggggcc

SEQ ID NO: 10051 - DNA, 17 bp, Artificial Sequence
  synthetic circulating small noncoding RNA (sncRNA) 5' transfer RNA (tRNA) half
gtgacaggcggggatac

SEQ ID NO: 10052 - DNA, 31 bp, Artificial Sequence
  synthetic circulating small noncoding RNA (sncRNA) 5' transfer RNA (tRNA) half
tggttcagtggtagaattctcgcctgccacg

SEQ ID NO: 10053 - DNA, 20 bp, Artificial Sequence
  synthetic circulating small noncoding RNA (sncRNA) 5' transfer RNA (tRNA) half
acctccccgtcggggaattg

SEQ ID NO: 10054 - DNA, 16 bp, Artificial Sequence
  synthetic circulating small noncoding RNA (sncRNA) 5' transfer RNA (tRNA) half
agagtccagagtgcta

SEQ ID NO: 10055 - DNA, 36 bp, Artificial Sequence
  synthetic circulating small noncoding RNA (sncRNA) 5' transfer RNA (tRNA) half
acccacgaccctgagattaagagtctcatgctctac

SEQ ID NO: 10056 - DNA, 16 bp, Artificial Sequence
  synthetic circulating small noncoding RNA (sncRNA) 5' transfer RNA (tRNA) half
ggctcgtccgggattt

SEQ ID NO: 10057 - DNA, 22 bp, Artificial Sequence
  synthetic circulating small noncoding RNA (sncRNA) 5' transfer RNA (tRNA) half
ccggatagctcagtcggtagag

SEQ ID NO: 10058 - DNA, 22 bp, Artificial Sequence
  synthetic circulating small noncoding RNA (sncRNA) 5' transfer RNA (tRNA) half
ctatccattgcgccacggagcc

SEQ ID NO: 10059 - DNA, 15 bp, Artificial Sequence
  synthetic circulating small noncoding RNA (sncRNA) 5' transfer RNA (tRNA) half
cgaaccctcaatctt

SEQ ID NO: 10060 - DNA, 27 bp, Artificial Sequence
  synthetic circulating small noncoding RNA (sncRNA) 5' transfer RNA (tRNA) half
actcacgaccttcagattatgagactg

SEQ ID NO: 10061 - DNA, 13 bp, Artificial Sequence
  synthetic circulating small noncoding RNA (sncRNA) 5' transfer RNA (tRNA) half
ttccttcgagccg

SEQ ID NO: 10062 - DNA, 13 bp, Artificial Sequence
  synthetic circulating small noncoding RNA (sncRNA) 5' transfer RNA (tRNA) half
tggcagcggtggg

SEQ ID NO: 10063 - DNA, 29 bp, Artificial Sequence
  synthetic circulating small noncoding RNA (sncRNA) 5' transfer RNA (tRNA) half
tgtaatggttagcactctggactctgaat

SEQ ID NO: 10064 - DNA, 32 bp, Artificial Sequence
  synthetic circulating small noncoding RNA (sncRNA) 5' transfer RNA (tRNA) half
ccggatagctcagtcggtagagcatcagactt

SEQ ID NO: 10065 - DNA, 35 bp, Artificial Sequence
  synthetic circulating small noncoding RNA (sncRNA) 5' transfer RNA (tRNA) half
ccgcagcaacctcggttcgaatccgagtcacggca

SEQ ID NO: 10066 - DNA, 30 bp, Artificial Sequence
  synthetic circulating small noncoding RNA (sncRNA) 5' transfer RNA (tRNA) half
gccgctggtgtagtggtatcatgcaagatt

SEQ ID NO: 10067 - DNA, 13 bp, Artificial Sequence
  synthetic circulating small noncoding RNA (sncRNA) 5' transfer RNA (tRNA) half
cgggttcgactcc

SEQ ID NO: 10068 - DNA, 27 bp, Artificial Sequence
  synthetic circulating small noncoding RNA (sncRNA) 5' transfer RNA (tRNA) half
cgccttagaccgctcggccatcctgac

SEQ ID NO: 10069 - DNA, 16 bp, Artificial Sequence
  synthetic circulating small noncoding RNA (sncRNA) 5' transfer RNA (tRNA) half
cacaccgggagtcgaa

SEQ ID NO: 10070 - DNA, 29 bp, Artificial Sequence
  synthetic circulating small noncoding RNA (sncRNA) 5' transfer RNA (tRNA) half
aaaccaggaatcctaaccgctagaccatg

SEQ ID NO: 10071 - DNA, 24 bp, Artificial Sequence
  synthetic circulating small noncoding RNA (sncRNA) 5' transfer RNA (tRNA) half
gtctagcggttaggattcctggtt

SEQ ID NO: 10072 - DNA, 43 bp, Artificial Sequence
  synthetic circulating small noncoding RNA (sncRNA) 5' transfer RNA (tRNA) half
ctccagtctcttcgggggcgtgggttcgaatcccaccactgcc

SEQ ID NO: 10073 - DNA, 30 bp, Artificial Sequence
  synthetic circulating small noncoding RNA (sncRNA) 5' transfer RNA (tRNA) half
gtcaggatggccgagtggtctaaggcgcca

SEQ ID NO: 10074 - DNA, 15 bp, Artificial Sequence
  synthetic circulating small noncoding RNA (sncRNA) 5' transfer RNA (tRNA) half
ttggccgggaatcga

SEQ ID NO: 10075 - DNA, 26 bp, Artificial Sequence
  synthetic circulating small noncoding RNA (sncRNA) 5' transfer RNA (tRNA) half
tagctcagttggtagagcggaggact

SEQ ID NO: 10076 - DNA, 26 bp, Artificial Sequence
  synthetic circulating small noncoding RNA (sncRNA) 5' transfer RNA (tRNA) half
agagtccagagtgctagccattacac

SEQ ID NO: 10077 - DNA, 33 bp, Artificial Sequence
  synthetic circulating small noncoding RNA (sncRNA) 5' transfer RNA (tRNA) half
gcgaatgtgataaccactacactacggaaacac

SEQ ID NO: 10078 - DNA, 17 bp, Artificial Sequence
  synthetic circulating small noncoding RNA (sncRNA) 5' transfer RNA (tRNA) half
agacgacgaggatggga

SEQ ID NO: 10079 - DNA, 27 bp, Artificial Sequence
  synthetic circulating small noncoding RNA (sncRNA) 5' transfer RNA (tRNA) half
gcgggaggcccgggttcgattcccggc

SEQ ID NO: 10080 - DNA, 33 bp, Artificial Sequence
  synthetic circulating small noncoding RNA (sncRNA) 5' transfer RNA (tRNA) half
cgagccaggtaggagtcgaacctacaatcttct

SEQ ID NO: 10081 - DNA, 32 bp, Artificial Sequence
  synthetic circulating small noncoding RNA (sncRNA) 5' transfer RNA (tRNA) half
agtccagagtgctaaccattacaccatgggac

SEQ ID NO: 10082 - DNA, 26 bp, Artificial Sequence
  synthetic circulating small noncoding RNA (sncRNA) 5' transfer RNA (tRNA) half
acctcggttcgaatccgagtcacggc

SEQ ID NO: 10083 - DNA, 24 bp, Artificial Sequence
  synthetic circulating small noncoding RNA (sncRNA) 5' transfer RNA (tRNA) half
tcgtataggggttagtactctgcg

SEQ ID NO: 10084 - DNA, 15 bp, Artificial Sequence
  synthetic circulating small noncoding RNA (sncRNA) 5' transfer RNA (tRNA) half
atccggctcgaagga

SEQ ID NO: 10085 - DNA, 16 bp, Artificial Sequence
  synthetic circulating small noncoding RNA (sncRNA) 5' transfer RNA (tRNA) half
gtttccgcccggtttc

SEQ ID NO: 10086 - DNA, 40 bp, Artificial Sequence
  synthetic circulating small noncoding RNA (sncRNA) 5' transfer RNA (tRNA) half
ttgccccctctgaggttcgaactcaggaccttcagattat

SEQ ID NO: 10087 - DNA, 18 bp, Artificial Sequence
  synthetic circulating small noncoding RNA (sncRNA) 5' transfer RNA (tRNA) half
cccggctagctcagtcgg

SEQ ID NO: 10088 - DNA, 22 bp, Artificial Sequence
  synthetic circulating small noncoding RNA (sncRNA) 5' transfer RNA (tRNA) half
tctcaccgccgcggcccgggtt

SEQ ID NO: 10089 - DNA, 13 bp, Artificial Sequence
  synthetic circulating small noncoding RNA (sncRNA) 5' transfer RNA (tRNA) half
tacactacggaaa

SEQ ID NO: 10090 - DNA, 21 bp, Artificial Sequence
  synthetic circulating small noncoding RNA (sncRNA) 5' transfer RNA (tRNA) half
tggttatcacgttcgcctcac

SEQ ID NO: 10091 - DNA, 36 bp, Artificial Sequence
  synthetic circulating small noncoding RNA (sncRNA) 5' transfer RNA (tRNA) half
gcgccgaatcctaaccactagaccaccagggaagag

SEQ ID NO: 10092 - DNA, 27 bp, Artificial Sequence
  synthetic circulating small noncoding RNA (sncRNA) 5' transfer RNA (tRNA) half
atggtctagcggttaggattcctggtt

SEQ ID NO: 10093 - DNA, 15 bp, Artificial Sequence
  synthetic circulating small noncoding RNA (sncRNA) 5' transfer RNA (tRNA) half
tatcacgtctgcttt

SEQ ID NO: 10094 - DNA, 24 bp, Artificial Sequence
  synthetic circulating small noncoding RNA (sncRNA) 5' transfer RNA (tRNA) half
gttcgaaaccgggcggaaacagca

SEQ ID NO: 10095 - DNA, 13 bp, Artificial Sequence
  synthetic circulating small noncoding RNA (sncRNA) 5' transfer RNA (tRNA) half
tcctggctggctc

SEQ ID NO: 10096 - DNA, 36 bp, Artificial Sequence
  synthetic circulating small noncoding RNA (sncRNA) 5' transfer RNA (tRNA) half
ccgcccaacgtggggctcgaacccacgaccctggga

SEQ ID NO: 10097 - DNA, 14 bp, Artificial Sequence
  synthetic circulating small noncoding RNA (sncRNA) 5' transfer RNA (tRNA) half
cccacgttgggcgc

SEQ ID NO: 10098 - DNA, 17 bp, Artificial Sequence
  synthetic circulating small noncoding RNA (sncRNA) 5' transfer RNA (tRNA) half
attggtagagcatcaga

SEQ ID NO: 10099 - DNA, 33 bp, Artificial Sequence
  synthetic circulating small noncoding RNA (sncRNA) 5' transfer RNA (tRNA) half
cagcgatccgagttcaaatctcggtggaacctg

SEQ ID NO: 10100 - DNA, 14 bp, Artificial Sequence
  synthetic circulating small noncoding RNA (sncRNA) 5' transfer RNA (tRNA) half
agactcttaatctc

SEQ ID NO: 10101 - DNA, 26 bp, Artificial Sequence
  synthetic circulating small noncoding RNA (sncRNA) 5' transfer RNA (tRNA) half
aggcgagaattctaccattgaaccac

SEQ ID NO: 10102 - DNA, 26 bp, Artificial Sequence
  synthetic circulating small noncoding RNA (sncRNA) 5' transfer RNA (tRNA) half
gccgcccgaacagggacttgaaccct

SEQ ID NO: 10103 - DNA, 19 bp, Artificial Sequence
  synthetic circulating small noncoding RNA (sncRNA) 5' transfer RNA (tRNA) half
atgccgtgactcggattcg

SEQ ID NO: 10104 - DNA, 29 bp, Artificial Sequence
  synthetic circulating small noncoding RNA (sncRNA) 5' transfer RNA (tRNA) half
ggaggcccgggttcgattcccggccaatg

SEQ ID NO: 10105 - DNA, 23 bp, Artificial Sequence
  synthetic circulating small noncoding RNA (sncRNA) 5' transfer RNA (tRNA) half
ttcaaatcccggacgagccccat

SEQ ID NO: 10106 - DNA, 13 bp, Artificial Sequence
  synthetic circulating small noncoding RNA (sncRNA) 5' transfer RNA (tRNA) half
ggattcgaacctg

SEQ ID NO: 10107 - DNA, 10 bp, Artificial Sequence
  synthetic circulating small noncoding RNA (sncRNA) 5' transfer RNA (tRNA) half
cgggacctct

SEQ ID NO: 10108 - DNA, 18 bp, Artificial Sequence
  synthetic circulating small noncoding RNA (sncRNA) 5' transfer RNA (tRNA) half
caaacccgggcctcccgc

SEQ ID NO: 10109 - DNA, 19 bp, Artificial Sequence
  synthetic circulating small noncoding RNA (sncRNA) 5' transfer RNA (tRNA) half
tggagggggcacccggatt

SEQ ID NO: 10110 - DNA, 14 bp, Artificial Sequence
  synthetic circulating small noncoding RNA (sncRNA) 5' transfer RNA (tRNA) half
aggatggccgagcg

SEQ ID NO: 10111 - DNA, 40 bp, Artificial Sequence
  synthetic circulating small noncoding RNA (sncRNA) 5' transfer RNA (tRNA) half
caggcaccgctgggattcgaacccaggatctcctgtttac

SEQ ID NO: 10112 - DNA, 20 bp, Artificial Sequence
  synthetic circulating small noncoding RNA (sncRNA) 5' transfer RNA (tRNA) half
tagaccgctcggccacgcta

SEQ ID NO: 10113 - DNA, 46 bp, Artificial Sequence
  synthetic circulating small noncoding RNA (sncRNA) 5' transfer RNA (tRNA) half
agtctcatgctctaccgactgagctagccgggcgactgtcacttct

SEQ ID NO: 10114 - DNA, 31 bp, Artificial Sequence
  synthetic circulating small noncoding RNA (sncRNA) 5' transfer RNA (tRNA) half
cggcccgggttcgactcccggtgtgggaaac

SEQ ID NO: 10115 - DNA, 36 bp, Artificial Sequence
  synthetic circulating small noncoding RNA (sncRNA) 5' transfer RNA (tRNA) half
gatgccccgtgtgaggatcgaactcacgaccttcag

SEQ ID NO: 10116 - DNA, 31 bp, Artificial Sequence
  synthetic circulating small noncoding RNA (sncRNA) 5' transfer RNA (tRNA) half
atccatcgacctctgggttatgggcccagca

SEQ ID NO: 10117 - DNA, 5 bp, Artificial Sequence
  synthetic circulating small noncoding RNA (sncRNA) 5' transfer RNA (tRNA) half
gccgg

SEQ ID NO: 10118 - DNA, 10 bp, Artificial Sequence
  synthetic circulating small noncoding RNA (sncRNA) 5' transfer RNA (tRNA) half
cggggacctt

SEQ ID NO: 10119 - DNA, 20 bp, Artificial Sequence
  synthetic circulating small noncoding RNA (sncRNA) 5' transfer RNA (tRNA) half
ctcgagccaggtaggagtcg

SEQ ID NO: 10120 - DNA, 23 bp, Artificial Sequence
  synthetic circulating small noncoding RNA (sncRNA) 5' transfer RNA (tRNA) half
ccgaatcctaaccactagaccac

SEQ ID NO: 10121 - DNA, 39 bp, Artificial Sequence
  synthetic circulating small noncoding RNA (sncRNA) 5' transfer RNA (tRNA) half
atgaccccgacgtgattcgaacacgcagccttctgatct

SEQ ID NO: 10122 - DNA, 19 bp, Artificial Sequence
  synthetic circulating small noncoding RNA (sncRNA) 5' transfer RNA (tRNA) half
tgctctaccgactgagcta

SEQ ID NO: 10123 - DNA, 17 bp, Artificial Sequence
  synthetic circulating small noncoding RNA (sncRNA) 5' transfer RNA (tRNA) half
ggatcgaacccgcgacc

SEQ ID NO: 10124 - DNA, 15 bp, Artificial Sequence
  synthetic circulating small noncoding RNA (sncRNA) 5' transfer RNA (tRNA) half
gagtctcatgctcta

SEQ ID NO: 10125 - DNA, 32 bp, Artificial Sequence
  synthetic circulating small noncoding RNA (sncRNA) 5' transfer RNA (tRNA) half
ggggttatagctcaggtgtagagcatttgact

SEQ ID NO: 10126 - DNA, 36 bp, Artificial Sequence
  synthetic circulating small noncoding RNA (sncRNA) 5' transfer RNA (tRNA) half
tgtgtgaggtcccgggttcaatccccggcatctcca

SEQ ID NO: 10127 - DNA, 15 bp, Artificial Sequence
  synthetic circulating small noncoding RNA (sncRNA) 5' transfer RNA (tRNA) half
aatcccacttctgac

SEQ ID NO: 10128 - DNA, 27 bp, Artificial Sequence
  synthetic circulating small noncoding RNA (sncRNA) 5' transfer RNA (tRNA) half
agaggtagcgggatcgatgcccgcatc

SEQ ID NO: 10129 - DNA, 35 bp, Artificial Sequence
  synthetic circulating small noncoding RNA (sncRNA) 5' transfer RNA (tRNA) half
tccgagccagccaggagtcgaacctggaatcttct

SEQ ID NO: 10130 - DNA, 34 bp, Artificial Sequence
  synthetic circulating small noncoding RNA (sncRNA) 5' transfer RNA (tRNA) half
gcgactctggtgggactcgaacccacaacctttg

SEQ ID NO: 10131 - DNA, 40 bp, Artificial Sequence
  synthetic circulating small noncoding RNA (sncRNA) 5' transfer RNA (tRNA) half
ggcagcggtgggattcgaacccacgccatcgaaatgactg

SEQ ID NO: 10132 - DNA, 27 bp, Artificial Sequence
  synthetic circulating small noncoding RNA (sncRNA) 5' transfer RNA (tRNA) half
gtttctgtagtgtagtggttatcacgc

SEQ ID NO: 10133 - DNA, 16 bp, Artificial Sequence
  synthetic circulating small noncoding RNA (sncRNA) 5' transfer RNA (tRNA) half
gaccccgacgtgattt

SEQ ID NO: 10134 - DNA, 10 bp, Artificial Sequence
  synthetic circulating small noncoding RNA (sncRNA) 5' transfer RNA (tRNA) half
gcccgtacgg

SEQ ID NO: 10135 - DNA, 33 bp, Artificial Sequence
  synthetic circulating small noncoding RNA (sncRNA) 5' transfer RNA (tRNA) half
cagcgaccacgaagggactcgaacccccaatct

SEQ ID NO: 10136 - DNA, 16 bp, Artificial Sequence
  synthetic circulating small noncoding RNA (sncRNA) 5' transfer RNA (tRNA) half
atgattctcgctttgg

SEQ ID NO: 10137 - DNA, 25 bp, Artificial Sequence
  synthetic circulating small noncoding RNA (sncRNA) 5' transfer RNA (tRNA) half
aaagtctgatgctctaccgactgag

SEQ ID NO: 10138 - DNA, 21 bp, Artificial Sequence
  synthetic circulating small noncoding RNA (sncRNA) 5' transfer RNA (tRNA) half
cataatctgaaggtcctgagt

SEQ ID NO: 10139 - DNA, 13 bp, Artificial Sequence
  synthetic circulating small noncoding RNA (sncRNA) 5' transfer RNA (tRNA) half
cccggatagctca

SEQ ID NO: 10140 - DNA, 23 bp, Artificial Sequence
  synthetic circulating small noncoding RNA (sncRNA) 5' transfer RNA (tRNA) half
aggttccaccgagatttgaactc

SEQ ID NO: 10141 - DNA, 35 bp, Artificial Sequence
  synthetic circulating small noncoding RNA (sncRNA) 5' transfer RNA (tRNA) half
cctccctggtggtctagtggttaggattcggcgct

SEQ ID NO: 10142 - DNA, 17 bp, Artificial Sequence
  synthetic circulating small noncoding RNA (sncRNA) 5' transfer RNA (tRNA) half
ccccgtccgtgcctgcg

SEQ ID NO: 10143 - DNA, 34 bp, Artificial Sequence
  synthetic circulating small noncoding RNA (sncRNA) 5' transfer RNA (tRNA) half
cccggatgatcctcagtggtctggggtgcaggct

SEQ ID NO: 10144 - DNA, 21 bp, Artificial Sequence
  synthetic circulating small noncoding RNA (sncRNA) 5' transfer RNA (tRNA) half
ttgaactcggatcgctggatt

SEQ ID NO: 10145 - DNA, 13 bp, Artificial Sequence
  synthetic circulating small noncoding RNA (sncRNA) 5' transfer RNA (tRNA) half
tgagctagccggg

SEQ ID NO: 10146 - DNA, 21 bp, Artificial Sequence
  synthetic circulating small noncoding RNA (sncRNA) 5' transfer RNA (tRNA) half
tgtgtcaggatggccgagcgg

SEQ ID NO: 10147 - DNA, 10 bp, Artificial Sequence
  synthetic circulating small noncoding RNA (sncRNA) 5' transfer RNA (tRNA) half
ggaatcgaac

SEQ ID NO: 10148 - DNA, 35 bp, Artificial Sequence
  synthetic circulating small noncoding RNA (sncRNA) 5' transfer RNA (tRNA) half
tgggtttccgtagtgtagtggttagcgcgttcgcc

SEQ ID NO: 10149 - DNA, 44 bp, Artificial Sequence
  synthetic circulating small noncoding RNA (sncRNA) 5' transfer RNA (tRNA) half
cctccgatagcagaggatggtttcgatccatcgacctctgggtt

SEQ ID NO: 10150 - DNA, 19 bp, Artificial Sequence
  synthetic circulating small noncoding RNA (sncRNA) 5' transfer RNA (tRNA) half
tggtagaattctcgcctgc

SEQ ID NO: 10151 - DNA, 24 bp, Artificial Sequence
  synthetic circulating small noncoding RNA (sncRNA) 5' transfer RNA (tRNA) half
aaggttccaccgagatttgaactc

SEQ ID NO: 10152 - DNA, 14 bp, Artificial Sequence
  synthetic circulating small noncoding RNA (sncRNA) 5' transfer RNA (tRNA) half
atacccctagacca

SEQ ID NO: 10153 - DNA, 30 bp, Artificial Sequence
  synthetic circulating small noncoding RNA (sncRNA) 5' transfer RNA (tRNA) half
ttgagggttcgagtcccttcgtggtcgaaa

SEQ ID NO: 10154 - DNA, 16 bp, Artificial Sequence
  synthetic circulating small noncoding RNA (sncRNA) 5' transfer RNA (tRNA) half
atgcagagtactaacc

SEQ ID NO: 10155 - DNA, 12 bp, Artificial Sequence
  synthetic circulating small noncoding RNA (sncRNA) 5' transfer RNA (tRNA) half
cctgaccgggaa

SEQ ID NO: 10156 - DNA, 25 bp, Artificial Sequence
  synthetic circulating small noncoding RNA (sncRNA) 5' transfer RNA (tRNA) half
ccccgggttcaatccccggcacctc

SEQ ID NO: 10157 - DNA, 15 bp, Artificial Sequence
  synthetic circulating small noncoding RNA (sncRNA) 5' transfer RNA (tRNA) half
gttcgaacccacgac

SEQ ID NO: 10158 - DNA, 29 bp, Artificial Sequence
  synthetic circulating small noncoding RNA (sncRNA) 5' transfer RNA (tRNA) half
tctccccgtcggggaatcgaaccccggtc

SEQ ID NO: 10159 - DNA, 19 bp, Artificial Sequence
  synthetic circulating small noncoding RNA (sncRNA) 5' transfer RNA (tRNA) half
tgaaccgaggacctctcgc

SEQ ID NO: 10160 - DNA, 21 bp, Artificial Sequence
  synthetic circulating small noncoding RNA (sncRNA) 5' transfer RNA (tRNA) half
tggcaggcgagaattctacca

SEQ ID NO: 10161 - DNA, 24 bp, Artificial Sequence
  synthetic circulating small noncoding RNA (sncRNA) 5' transfer RNA (tRNA) half
tcggcgctctcaccgccgcggccc

SEQ ID NO: 10162 - DNA, 22 bp, Artificial Sequence
  synthetic circulating small noncoding RNA (sncRNA) 5' transfer RNA (tRNA) half
acgaccttcagattatgagact

SEQ ID NO: 10163 - DNA, 15 bp, Artificial Sequence
  synthetic circulating small noncoding RNA (sncRNA) 5' transfer RNA (tRNA) half
cagaggtcgatggat

SEQ ID NO: 10164 - DNA, 21 bp, Artificial Sequence
  synthetic circulating small noncoding RNA (sncRNA) 5' transfer RNA (tRNA) half
actctggactctgaatccagc

SEQ ID NO: 10165 - DNA, 25 bp, Artificial Sequence
  synthetic circulating small noncoding RNA (sncRNA) 5' transfer RNA (tRNA) half
ctggtgtagtggtatcatgcaagat

SEQ ID NO: 10166 - DNA, 45 bp, Artificial Sequence
  synthetic circulating small noncoding RNA (sncRNA) 5' transfer RNA (tRNA) half
ctgttcccataccgggagtcgaacccgggccgcctgggtgaaaac

SEQ ID NO: 10167 - DNA, 17 bp, Artificial Sequence
  synthetic circulating small noncoding RNA (sncRNA) 5' transfer RNA (tRNA) half
cactcggccatcctggt

SEQ ID NO: 10168 - DNA, 15 bp, Artificial Sequence
  synthetic circulating small noncoding RNA (sncRNA) 5' transfer RNA (tRNA) half
cgaacccaggatctc

SEQ ID NO: 10169 - DNA, 24 bp, Artificial Sequence
  synthetic circulating small noncoding RNA (sncRNA) 5' transfer RNA (tRNA) half
cgagttcaaatctcggtgggacct

SEQ ID NO: 10170 - DNA, 15 bp, Artificial Sequence
  synthetic circulating small noncoding RNA (sncRNA) 5' transfer RNA (tRNA) half
gtggagatgccgggg

SEQ ID NO: 10171 - DNA, 44 bp, Artificial Sequence
  synthetic circulating small noncoding RNA (sncRNA) 5' transfer RNA (tRNA) half
acgaggatgggattcgaacccacgcgtgcaaagcacaatggatt

SEQ ID NO: 10172 - DNA, 36 bp, Artificial Sequence
  synthetic circulating small noncoding RNA (sncRNA) 5' transfer RNA (tRNA) half
aggcgagaattctaccactgaaccaccaatgcaagc

SEQ ID NO: 10173 - DNA, 25 bp, Artificial Sequence
  synthetic circulating small noncoding RNA (sncRNA) 5' transfer RNA (tRNA) half
gattaagagtcccatgctctaccga

SEQ ID NO: 10174 - DNA, 27 bp, Artificial Sequence
  synthetic circulating small noncoding RNA (sncRNA) 5' transfer RNA (tRNA) half
gtttcgatccatcgacctctgggttat

SEQ ID NO: 10175 - DNA, 16 bp, Artificial Sequence
  synthetic circulating small noncoding RNA (sncRNA) 5' transfer RNA (tRNA) half
cggttcccggccaatg

SEQ ID NO: 10176 - DNA, 21 bp, Artificial Sequence
  synthetic circulating small noncoding RNA (sncRNA) 5' transfer RNA (tRNA) half
tgctctaccgactgagctagc

SEQ ID NO: 10177 - DNA, 23 bp, Artificial Sequence
  synthetic circulating small noncoding RNA (sncRNA) 5' transfer RNA (tRNA) half
attcaaagtccagagtgctaacc

SEQ ID NO: 10178 - DNA, 23 bp, Artificial Sequence
  synthetic circulating small noncoding RNA (sncRNA) 5' transfer RNA (tRNA) half
ctggtgtagtggtatcatgcaag

SEQ ID NO: 10179 - DNA, 24 bp, Artificial Sequence
  synthetic circulating small noncoding RNA (sncRNA) 5' transfer RNA (tRNA) half
gctggattcagagtccagagtgct

SEQ ID NO: 10180 - DNA, 34 bp, Artificial Sequence
  synthetic circulating small noncoding RNA (sncRNA) 5' transfer RNA (tRNA) half
gcctccctggtggtctagtggttaggattcggcg

SEQ ID NO: 10181 - DNA, 12 bp, Artificial Sequence
  synthetic circulating small noncoding RNA (sncRNA) 5' transfer RNA (tRNA) half
ggttcgactccg

SEQ ID NO: 10182 - DNA, 27 bp, Artificial Sequence
  synthetic circulating small noncoding RNA (sncRNA) 5' transfer RNA (tRNA) half
ctggtgtagtggtatcatgcaagattc

SEQ ID NO: 10183 - DNA, 28 bp, Artificial Sequence
  synthetic circulating small noncoding RNA (sncRNA) 5' transfer RNA (tRNA) half
agtcctccgctctaccaactgagctatc

SEQ ID NO: 10184 - DNA, 39 bp, Artificial Sequence
  synthetic circulating small noncoding RNA (sncRNA) 5' transfer RNA (tRNA) half
acgcgaaaggtccccggttcgaaaccgggcggaaacagc

SEQ ID NO: 10185 - DNA, 30 bp, Artificial Sequence
  synthetic circulating small noncoding RNA (sncRNA) 5' transfer RNA (tRNA) half
gtcgctggttcgattccggctcgaaggact

SEQ ID NO: 10186 - DNA, 14 bp, Artificial Sequence
  synthetic circulating small noncoding RNA (sncRNA) 5' transfer RNA (tRNA) half
ctacactacggaaa

SEQ ID NO: 10187 - DNA, 23 bp, Artificial Sequence
  synthetic circulating small noncoding RNA (sncRNA) 5' transfer RNA (tRNA) half
cctgccacgcgggaggcccgggt

SEQ ID NO: 10188 - DNA, 17 bp, Artificial Sequence
  synthetic circulating small noncoding RNA (sncRNA) 5' transfer RNA (tRNA) half
aaacaaagcctccgata

SEQ ID NO: 10189 - DNA, 11 bp, Artificial Sequence
  synthetic circulating small noncoding RNA (sncRNA) 5' transfer RNA (tRNA) half
tgccgaaaccc

SEQ ID NO: 10190 - DNA, 25 bp, Artificial Sequence
  synthetic circulating small noncoding RNA (sncRNA) 5' transfer RNA (tRNA) half
aatcctaaccgctagaccatgtggg

SEQ ID NO: 10191 - DNA, 26 bp, Artificial Sequence
  synthetic circulating small noncoding RNA (sncRNA) 5' transfer RNA (tRNA) half
tgaactcggatcgctggattcaaagt

SEQ ID NO: 10192 - DNA, 29 bp, Artificial Sequence
  synthetic circulating small noncoding RNA (sncRNA) 5' transfer RNA (tRNA) half
cccaggcggcccgggttcgactcccggta

SEQ ID NO: 10193 - DNA, 16 bp, Artificial Sequence
  synthetic circulating small noncoding RNA (sncRNA) 5' transfer RNA (tRNA) half
tcttcgggggcgtggg

SEQ ID NO: 10194 - DNA, 16 bp, Artificial Sequence
  synthetic circulating small noncoding RNA (sncRNA) 5' transfer RNA (tRNA) half
aatggataaggcactg

SEQ ID NO: 10195 - DNA, 17 bp, Artificial Sequence
  synthetic circulating small noncoding RNA (sncRNA) 5' transfer RNA (tRNA) half
gaacccacaatccctgg

SEQ ID NO: 10196 - DNA, 35 bp, Artificial Sequence
  synthetic circulating small noncoding RNA (sncRNA) 5' transfer RNA (tRNA) half
tggtctagcggttaggattcctggttttcacccag

SEQ ID NO: 10197 - DNA, 27 bp, Artificial Sequence
  synthetic circulating small noncoding RNA (sncRNA) 5' transfer RNA (tRNA) half
gggcccagcacgcttccgctgcgccac

SEQ ID NO: 10198 - DNA, 16 bp, Artificial Sequence
  synthetic circulating small noncoding RNA (sncRNA) 5' transfer RNA (tRNA) half
gaccagtgctctaacc

SEQ ID NO: 10199 - DNA, 33 bp, Artificial Sequence
  synthetic circulating small noncoding RNA (sncRNA) 5' transfer RNA (tRNA) half
gaactcggatcgctggattcagagtccagagtg

SEQ ID NO: 10200 - DNA, 22 bp, Artificial Sequence
  synthetic circulating small noncoding RNA (sncRNA) 5' transfer RNA (tRNA) half
ctcagtggtagagcatttgact

SEQ ID NO: 10201 - DNA, 29 bp, Artificial Sequence
  synthetic circulating small noncoding RNA (sncRNA) 5' transfer RNA (tRNA) half
ttccgactccgccgggactcgaacccgga

SEQ ID NO: 10202 - DNA, 30 bp, Artificial Sequence
  synthetic circulating small noncoding RNA (sncRNA) 5' transfer RNA (tRNA) half
ttgcaggttcgagtcctgccgcggtcgact

SEQ ID NO: 10203 - DNA, 14 bp, Artificial Sequence
  synthetic circulating small noncoding RNA (sncRNA) 5' transfer RNA (tRNA) half
cgggccgcctgggt

SEQ ID NO: 10204 - DNA, 27 bp, Artificial Sequence
  synthetic circulating small noncoding RNA (sncRNA) 5' transfer RNA (tRNA) half
tgatgctctaccgactgagctatccgg

SEQ ID NO: 10205 - DNA, 18 bp, Artificial Sequence
  synthetic circulating small noncoding RNA (sncRNA) 5' transfer RNA (tRNA) half
ggagtcgaacccgggccg

SEQ ID NO: 10206 - DNA, 8 bp, Artificial Sequence
  synthetic circulating small noncoding RNA (sncRNA) 5' transfer RNA (tRNA) half
gtggcccg

SEQ ID NO: 10207 - DNA, 20 bp, Artificial Sequence
  synthetic circulating small noncoding RNA (sncRNA) 5' transfer RNA (tRNA) half
gctggcccgtacggggatcg

SEQ ID NO: 10208 - DNA, 28 bp, Artificial Sequence
  synthetic circulating small noncoding RNA (sncRNA) 5' transfer RNA (tRNA) half
gttagcactctggactctgaatccagcg

SEQ ID NO: 10209 - DNA, 45 bp, Artificial Sequence
  synthetic circulating small noncoding RNA (sncRNA) 5' transfer RNA (tRNA) half
ctggcagtggtgggattcgaacccacgcctccgaagagactggag

SEQ ID NO: 10210 - DNA, 19 bp, Artificial Sequence
  synthetic circulating small noncoding RNA (sncRNA) 5' transfer RNA (tRNA) half
tcctgccgactacgtcatg

SEQ ID NO: 10211 - DNA, 21 bp, Artificial Sequence
  synthetic circulating small noncoding RNA (sncRNA) 5' transfer RNA (tRNA) half
attcagagtccagagtgctaa

SEQ ID NO: 10212 - DNA, 15 bp, Artificial Sequence
  synthetic circulating small noncoding RNA (sncRNA) 5' transfer RNA (tRNA) half
tcccatcctcgtcgt

SEQ ID NO: 10213 - DNA, 16 bp, Artificial Sequence
  synthetic circulating small noncoding RNA (sncRNA) 5' transfer RNA (tRNA) half
caacgcagagtactaa

SEQ ID NO: 10214 - DNA, 16 bp, Artificial Sequence
  synthetic circulating small noncoding RNA (sncRNA) 5' transfer RNA (tRNA) half
atcacgtcggggtcat

SEQ ID NO: 10215 - DNA, 28 bp, Artificial Sequence
  synthetic circulating small noncoding RNA (sncRNA) 5' transfer RNA (tRNA) half
agattaagagtctcatgctctaccgact

SEQ ID NO: 10216 - DNA, 29 bp, Artificial Sequence
  synthetic circulating small noncoding RNA (sncRNA) 5' transfer RNA (tRNA) half
ctccccgtcggggaatcgaaccccggtct

SEQ ID NO: 10217 - DNA, 14 bp, Artificial Sequence
  synthetic circulating small noncoding RNA (sncRNA) 5' transfer RNA (tRNA) half
tctcgctggggcct

SEQ ID NO: 10218 - DNA, 13 bp, Artificial Sequence
  synthetic circulating small noncoding RNA (sncRNA) 5' transfer RNA (tRNA) half
accgccgcggccc

SEQ ID NO: 10219 - DNA, 17 bp, Artificial Sequence
  synthetic circulating small noncoding RNA (sncRNA) 5' transfer RNA (tRNA) half
agtactaaccactatac

SEQ ID NO: 10220 - DNA, 13 bp, Artificial Sequence
  synthetic circulating small noncoding RNA (sncRNA) 5' transfer RNA (tRNA) half
acgcctccgaaga

SEQ ID NO: 10221 - DNA, 35 bp, Artificial Sequence
  synthetic circulating small noncoding RNA (sncRNA) 5' transfer RNA (tRNA) half
cgcagcaacctcggttcgaatccgagtcacggcag

SEQ ID NO: 10222 - DNA, 20 bp, Artificial Sequence
  synthetic circulating small noncoding RNA (sncRNA) 5' transfer RNA (tRNA) half
tctcccctggaggcgtgggt

SEQ ID NO: 10223 - DNA, 32 bp, Artificial Sequence
  synthetic circulating small noncoding RNA (sncRNA) 5' transfer RNA (tRNA) half
acgcgggaggcccgggttcgattcccggccaa

SEQ ID NO: 10224 - DNA, 19 bp, Artificial Sequence
  synthetic circulating small noncoding RNA (sncRNA) 5' transfer RNA (tRNA) half
cggcccgggttcgactccc

SEQ ID NO: 10225 - DNA, 11 bp, Artificial Sequence
  synthetic circulating small noncoding RNA (sncRNA) 5' transfer RNA (tRNA) half
atccggctcga

SEQ ID NO: 10226 - DNA, 22 bp, Artificial Sequence
  synthetic circulating small noncoding RNA (sncRNA) 5' transfer RNA (tRNA) half
tcgagtcctgccgcggtcgact

SEQ ID NO: 10227 - DNA, 18 bp, Artificial Sequence
  synthetic circulating small noncoding RNA (sncRNA) 5' transfer RNA (tRNA) half
ggggaattagctcaaatg

SEQ ID NO: 10228 - DNA, 16 bp, Artificial Sequence
  synthetic circulating small noncoding RNA (sncRNA) 5' transfer RNA (tRNA) half
ggaagcgtgctgggcc

SEQ ID NO: 10229 - DNA, 27 bp, Artificial Sequence
  synthetic circulating small noncoding RNA (sncRNA) 5' transfer RNA (tRNA) half
tatgcgttggccgggaatcgaacccgg

SEQ ID NO: 10230 - DNA, 14 bp, Artificial Sequence
  synthetic circulating small noncoding RNA (sncRNA) 5' transfer RNA (tRNA) half
cgaacccggaacct

SEQ ID NO: 10231 - DNA, 18 bp, Artificial Sequence
  synthetic circulating small noncoding RNA (sncRNA) 5' transfer RNA (tRNA) half
aggattcgaacctgtgcg

SEQ ID NO: 10232 - DNA, 17 bp, Artificial Sequence
  synthetic circulating small noncoding RNA (sncRNA) 5' transfer RNA (tRNA) half
aaccgggcgggaacaac

SEQ ID NO: 10233 - DNA, 17 bp, Artificial Sequence
  synthetic circulating small noncoding RNA (sncRNA) 5' transfer RNA (tRNA) half
tgccgtcacgaacagga

SEQ ID NO: 10234 - DNA, 18 bp, Artificial Sequence
  synthetic circulating small noncoding RNA (sncRNA) 5' transfer RNA (tRNA) half
tctgtagagcatgagact

SEQ ID NO: 10235 - DNA, 34 bp, Artificial Sequence
  synthetic circulating small noncoding RNA (sncRNA) 5' transfer RNA (tRNA) half
tccctggtagtctagtggttaggattcggtgctc

SEQ ID NO: 10236 - DNA, 15 bp, Artificial Sequence
  synthetic circulating small noncoding RNA (sncRNA) 5' transfer RNA (tRNA) half
aacccggaacctttg

SEQ ID NO: 10237 - DNA, 26 bp, Artificial Sequence
  synthetic circulating small noncoding RNA (sncRNA) 5' transfer RNA (tRNA) half
accaccaacctttcggttaacagccg

SEQ ID NO: 10238 - DNA, 12 bp, Artificial Sequence
  synthetic circulating small noncoding RNA (sncRNA) 5' transfer RNA (tRNA) half
gccaggagtcga

SEQ ID NO: 10239 - DNA, 24 bp, Artificial Sequence
  synthetic circulating small noncoding RNA (sncRNA) 5' transfer RNA (tRNA) half
accaggaatcctaaccgctagacc

SEQ ID NO: 10240 - DNA, 23 bp, Artificial Sequence
  synthetic circulating small noncoding RNA (sncRNA) 5' transfer RNA (tRNA) half
atagtggttagtactctgcgttg

SEQ ID NO: 10241 - DNA, 15 bp, Artificial Sequence
  synthetic circulating small noncoding RNA (sncRNA) 5' transfer RNA (tRNA) half
tcgttggtctagggg

SEQ ID NO: 10242 - DNA, 16 bp, Artificial Sequence
  synthetic circulating small noncoding RNA (sncRNA) 5' transfer RNA (tRNA) half
ccaaagcgagaatcat

SEQ ID NO: 10243 - DNA, 19 bp, Artificial Sequence
  synthetic circulating small noncoding RNA (sncRNA) 5' transfer RNA (tRNA) half
agcatgagactcttaatct

SEQ ID NO: 10244 - DNA, 15 bp, Artificial Sequence
  synthetic circulating small noncoding RNA (sncRNA) 5' transfer RNA (tRNA) half
ggattcgaaccagcg

SEQ ID NO: 10245 - DNA, 17 bp, Artificial Sequence
  synthetic circulating small noncoding RNA (sncRNA) 5' transfer RNA (tRNA) half
atgcgttggccgggaat

SEQ ID NO: 10246 - DNA, 21 bp, Artificial Sequence
  synthetic circulating small noncoding RNA (sncRNA) 5' transfer RNA (tRNA) half
aacccacgcgtgcagagcaca

SEQ ID NO: 10247 - DNA, 35 bp, Artificial Sequence
  synthetic circulating small noncoding RNA (sncRNA) 5' transfer RNA (tRNA) half
aggagatcctgggttcgaatcccagcggtgccttt

SEQ ID NO: 10248 - DNA, 21 bp, Artificial Sequence
  synthetic circulating small noncoding RNA (sncRNA) 5' transfer RNA (tRNA) half
gggggtatagctcaggggtgg

SEQ ID NO: 10249 - DNA, 31 bp, Artificial Sequence
  synthetic circulating small noncoding RNA (sncRNA) 5' transfer RNA (tRNA) half
ggtcgagccagccaggagtcgaacctagaat

SEQ ID NO: 10250 - DNA, 17 bp, Artificial Sequence
  synthetic circulating small noncoding RNA (sncRNA) 5' transfer RNA (tRNA) half
accgggcggaaacatta

SEQ ID NO: 10251 - DNA, 19 bp, Artificial Sequence
  synthetic circulating small noncoding RNA (sncRNA) 5' transfer RNA (tRNA) half
tcgaatcccaccgctgcca

SEQ ID NO: 10252 - DNA, 19 bp, Artificial Sequence
  synthetic circulating small noncoding RNA (sncRNA) 5' transfer RNA (tRNA) half
tggcccgtacggggatcga

SEQ ID NO: 10253 - DNA, 21 bp, Artificial Sequence
  synthetic circulating small noncoding RNA (sncRNA) 5' transfer RNA (tRNA) half
cccatgctctaccgactgagc

SEQ ID NO: 10254 - DNA, 15 bp, Artificial Sequence
  synthetic circulating small noncoding RNA (sncRNA) 5' transfer RNA (tRNA) half
cgcccaacgtggggc

SEQ ID NO: 10255 - DNA, 13 bp, Artificial Sequence
  synthetic circulating small noncoding RNA (sncRNA) 5' transfer RNA (tRNA) half
gcattggccggga

SEQ ID NO: 10256 - DNA, 13 bp, Artificial Sequence
  synthetic circulating small noncoding RNA (sncRNA) 5' transfer RNA (tRNA) half
tgcgagaggtccc

SEQ ID NO: 10257 - DNA, 9 bp, Artificial Sequence
  synthetic circulating small noncoding RNA (sncRNA) 5' transfer RNA (tRNA) half
gccggccgg

SEQ ID NO: 10258 - DNA, 25 bp, Artificial Sequence
  synthetic circulating small noncoding RNA (sncRNA) 5' transfer RNA (tRNA) half
ggccgcggcggtgagagcgccgaat

SEQ ID NO: 10259 - DNA, 35 bp, Artificial Sequence
  synthetic circulating small noncoding RNA (sncRNA) 5' transfer RNA (tRNA) half
cgccgtgatcgtatagtggttagtactctgcgttg

SEQ ID NO: 10260 - DNA, 20 bp, Artificial Sequence
  synthetic circulating small noncoding RNA (sncRNA) 5' transfer RNA (tRNA) half
attcagagtccagagtgcta

SEQ ID NO: 10261 - DNA, 37 bp, Artificial Sequence
  synthetic circulating small noncoding RNA (sncRNA) 5' transfer RNA (tRNA) half
ctccccgtcggggaattgaaccccggtctcccgcgtg

SEQ ID NO: 10262 - DNA, 21 bp, Artificial Sequence
  synthetic circulating small noncoding RNA (sncRNA) 5' transfer RNA (tRNA) half
ggttcgagtcctgccgcggtc

SEQ ID NO: 10263 - DNA, 19 bp, Artificial Sequence
  synthetic circulating small noncoding RNA (sncRNA) 5' transfer RNA (tRNA) half
ccgggcgactgtcacttct

SEQ ID NO: 10264 - DNA, 35 bp, Artificial Sequence
  synthetic circulating small noncoding RNA (sncRNA) 5' transfer RNA (tRNA) half
gcgccgaatcctagccactagaccaccagggacgg

SEQ ID NO: 10265 - DNA, 31 bp, Artificial Sequence
  synthetic circulating small noncoding RNA (sncRNA) 5' transfer RNA (tRNA) half
cttaggtcgctggttcgactccggctcgaag

SEQ ID NO: 10266 - DNA, 34 bp, Artificial Sequence
  synthetic circulating small noncoding RNA (sncRNA) 5' transfer RNA (tRNA) half
gtagaattctcgcctgccacgcgggaggcccggg

SEQ ID NO: 10267 - DNA, 18 bp, Artificial Sequence
  synthetic circulating small noncoding RNA (sncRNA) 5' transfer RNA (tRNA) half
cgagaggtcccgggttca

SEQ ID NO: 10268 - DNA, 14 bp, Artificial Sequence
  synthetic circulating small noncoding RNA (sncRNA) 5' transfer RNA (tRNA) half
acgcgggaggcccg

SEQ ID NO: 10269 - DNA, 19 bp, Artificial Sequence
  synthetic circulating small noncoding RNA (sncRNA) 5' transfer RNA (tRNA) half
aaacaacttccgcccgaac

SEQ ID NO: 10270 - DNA, 20 bp, Artificial Sequence
  synthetic circulating small noncoding RNA (sncRNA) 5' transfer RNA (tRNA) half
tcgaatcccactcctgacag

SEQ ID NO: 10271 - DNA, 16 bp, Artificial Sequence
  synthetic circulating small noncoding RNA (sncRNA) 5' transfer RNA (tRNA) half
gacgacgaaggtggga

SEQ ID NO: 10272 - DNA, 28 bp, Artificial Sequence
  synthetic circulating small noncoding RNA (sncRNA) 5' transfer RNA (tRNA) half
gagtccagagtgctaaccattacaccat

SEQ ID NO: 10273 - DNA, 23 bp, Artificial Sequence
  synthetic circulating small noncoding RNA (sncRNA) 5' transfer RNA (tRNA) half
gaggcgaacgtgataaccactac

SEQ ID NO: 10274 - DNA, 32 bp, Artificial Sequence
  synthetic circulating small noncoding RNA (sncRNA) 5' transfer RNA (tRNA) half
tgtaatggttagcactctggactctgaatcca

SEQ ID NO: 10275 - DNA, 25 bp, Artificial Sequence
  synthetic circulating small noncoding RNA (sncRNA) 5' transfer RNA (tRNA) half
cccacatggtctagcggttaggatt

SEQ ID NO: 10276 - DNA, 16 bp, Artificial Sequence
  synthetic circulating small noncoding RNA (sncRNA) 5' transfer RNA (tRNA) half
ccggacgagcccaagc

SEQ ID NO: 10277 - DNA, 30 bp, Artificial Sequence
  synthetic circulating small noncoding RNA (sncRNA) 5' transfer RNA (tRNA) half
aggcaagaattctaccactgaaccaccaat

SEQ ID NO: 10278 - DNA, 41 bp, Artificial Sequence
  synthetic circulating small noncoding RNA (sncRNA) 5' transfer RNA (tRNA) half
gggattaagagtcccatgctctaccgactgagctagccggg

SEQ ID NO: 10279 - DNA, 22 bp, Artificial Sequence
  synthetic circulating small noncoding RNA (sncRNA) 5' transfer RNA (tRNA) half
aggcgagcgtgatgaccactac

SEQ ID NO: 10280 - DNA, 44 bp, Artificial Sequence
  synthetic circulating small noncoding RNA (sncRNA) 5' transfer RNA (tRNA) half
gtttccgtagtgtagtggttatcacgttcgcctcacacgcgaaa

SEQ ID NO: 10281 - DNA, 31 bp, Artificial Sequence
  synthetic circulating small noncoding RNA (sncRNA) 5' transfer RNA (tRNA) half
gccccagcgagatttgaactcgcgacccctg

SEQ ID NO: 10282 - DNA, 15 bp, Artificial Sequence
  synthetic circulating small noncoding RNA (sncRNA) 5' transfer RNA (tRNA) half
gccaaggtcgcgggt

SEQ ID NO: 10283 - DNA, 31 bp, Artificial Sequence
  synthetic circulating small noncoding RNA (sncRNA) 5' transfer RNA (tRNA) half
ttccctgaccgggaatcgaacccgggccgcg

SEQ ID NO: 10284 - DNA, 12 bp, Artificial Sequence
  synthetic circulating small noncoding RNA (sncRNA) 5' transfer RNA (tRNA) half
gcgactctggtg

SEQ ID NO: 10285 - DNA, 38 bp, Artificial Sequence
  synthetic circulating small noncoding RNA (sncRNA) 5' transfer RNA (tRNA) half
ggtcgagccagccaggagtcgaacctagaatcttctga

SEQ ID NO: 10286 - DNA, 12 bp, Artificial Sequence
  synthetic circulating small noncoding RNA (sncRNA) 5' transfer RNA (tRNA) half
gtcccaccgaga

SEQ ID NO: 10287 - DNA, 11 bp, Artificial Sequence
  synthetic circulating small noncoding RNA (sncRNA) 5' transfer RNA (tRNA) half
gaccgggaatc

SEQ ID NO: 10288 - DNA, 21 bp, Artificial Sequence
  synthetic circulating small noncoding RNA (sncRNA) 5' transfer RNA (tRNA) half
aatcctaaccgctagaccatg

SEQ ID NO: 10289 - DNA, 20 bp, Artificial Sequence
  synthetic circulating small noncoding RNA (sncRNA) 5' transfer RNA (tRNA) half
gttgcgttggccgggaatcg

SEQ ID NO: 10290 - DNA, 26 bp, Artificial Sequence
  synthetic circulating small noncoding RNA (sncRNA) 5' transfer RNA (tRNA) half
gcgcccgaacagggacttgaaccctg

SEQ ID NO: 10291 - DNA, 20 bp, Artificial Sequence
  synthetic circulating small noncoding RNA (sncRNA) 5' transfer RNA (tRNA) half
aatccccggcatctccaact

SEQ ID NO: 10292 - DNA, 33 bp, Artificial Sequence
  synthetic circulating small noncoding RNA (sncRNA) 5' transfer RNA (tRNA) half
gtgcattggccgggaatcgaacccgggcctccc

SEQ ID NO: 10293 - DNA, 18 bp, Artificial Sequence
  synthetic circulating small noncoding RNA (sncRNA) 5' transfer RNA (tRNA) half
attccggctcgaaggact

SEQ ID NO: 10294 - DNA, 31 bp, Artificial Sequence
  synthetic circulating small noncoding RNA (sncRNA) 5' transfer RNA (tRNA) half
cgtccctgggtgggctcgaaccaccaacctt

SEQ ID NO: 10295 - DNA, 23 bp, Artificial Sequence
  synthetic circulating small noncoding RNA (sncRNA) 5' transfer RNA (tRNA) half
cctaaccgctagaccatgtggga

SEQ ID NO: 10296 - DNA, 36 bp, Artificial Sequence
  synthetic circulating small noncoding RNA (sncRNA) 5' transfer RNA (tRNA) half
ccccgggtgggactcgaacccacaatccctggctta

SEQ ID NO: 10297 - DNA, 27 bp, Artificial Sequence
  synthetic circulating small noncoding RNA (sncRNA) 5' transfer RNA (tRNA) half
ggggatgtagctcaatggtagagcaca

SEQ ID NO: 10298 - DNA, 34 bp, Artificial Sequence
  synthetic circulating small noncoding RNA (sncRNA) 5' transfer RNA (tRNA) half
accaccccaggtgggactcgaacccacaatccct

SEQ ID NO: 10299 - DNA, 33 bp, Artificial Sequence
  synthetic circulating small noncoding RNA (sncRNA) 5' transfer RNA (tRNA) half
cgtacggggatcgaacccgcgaccttggcgtta

SEQ ID NO: 10300 - DNA, 11 bp, Artificial Sequence
  synthetic circulating small noncoding RNA (sncRNA) 5' transfer RNA (tRNA) half
tcggtgggacc

SEQ ID NO: 10301 - DNA, 19 bp, Artificial Sequence
  synthetic circulating small noncoding RNA (sncRNA) 5' transfer RNA (tRNA) half
agaagtgacagtcgcccgg

SEQ ID NO: 10302 - DNA, 34 bp, Artificial Sequence
  synthetic circulating small noncoding RNA (sncRNA) 5' transfer RNA (tRNA) half
cgccaaggtcgcgggttcgatccccgtacgggcc

SEQ ID NO: 10303 - DNA, 35 bp, Artificial Sequence
  synthetic circulating small noncoding RNA (sncRNA) 5' transfer RNA (tRNA) half
gcaccacgctctaaccaactgagctaaccggccag

SEQ ID NO: 10304 - DNA, 25 bp, Artificial Sequence
  synthetic circulating small noncoding RNA (sncRNA) 5' transfer RNA (tRNA) half
aaccaggaatcctaaccgctagacc

SEQ ID NO: 10305 - DNA, 19 bp, Artificial Sequence
  synthetic circulating small noncoding RNA (sncRNA) 5' transfer RNA (tRNA) half
ccgtccctgggtgggctcg

SEQ ID NO: 10306 - DNA, 33 bp, Artificial Sequence
  synthetic circulating small noncoding RNA (sncRNA) 5' transfer RNA (tRNA) half
tcagcagagtggcgcagcggaagcgtgctgggc

SEQ ID NO: 10307 - DNA, 17 bp, Artificial Sequence
  synthetic circulating small noncoding RNA (sncRNA) 5' transfer RNA (tRNA) half
tgctctaccgactgagc

SEQ ID NO: 10308 - DNA, 34 bp, Artificial Sequence
  synthetic circulating small noncoding RNA (sncRNA) 5' transfer RNA (tRNA) half
cagaagattgcaggttcgagtcctgccgcggtcg

SEQ ID NO: 10309 - DNA, 16 bp, Artificial Sequence
  synthetic circulating small noncoding RNA (sncRNA) 5' transfer RNA (tRNA) half
gacgaggtggccgagt

SEQ ID NO: 10310 - DNA, 28 bp, Artificial Sequence
  synthetic circulating small noncoding RNA (sncRNA) 5' transfer RNA (tRNA) half
cggtgagagcgccgaatcctaaccacta

SEQ ID NO: 10311 - DNA, 18 bp, Artificial Sequence
  synthetic circulating small noncoding RNA (sncRNA) 5' transfer RNA (tRNA) half
cgcagcgccttagaccgc

SEQ ID NO: 10312 - DNA, 15 bp, Artificial Sequence
  synthetic circulating small noncoding RNA (sncRNA) 5' transfer RNA (tRNA) half
agcacaatggattag

SEQ ID NO: 10313 - DNA, 23 bp, Artificial Sequence
  synthetic circulating small noncoding RNA (sncRNA) 5' transfer RNA (tRNA) half
aacccgggcctcccgcgtggcag

SEQ ID NO: 10314 - DNA, 19 bp, Artificial Sequence
  synthetic circulating small noncoding RNA (sncRNA) 5' transfer RNA (tRNA) half
aatggtggagatgccgggg

SEQ ID NO: 10315 - DNA, 17 bp, Artificial Sequence
  synthetic circulating small noncoding RNA (sncRNA) 5' transfer RNA (tRNA) half
accgggcggaaacaaaa

SEQ ID NO: 10316 - DNA, 8 bp, Artificial Sequence
  synthetic circulating small noncoding RNA (sncRNA) 5' transfer RNA (tRNA) half
gttcgact

SEQ ID NO: 10317 - DNA, 18 bp, Artificial Sequence
  synthetic circulating small noncoding RNA (sncRNA) 5' transfer RNA (tRNA) half
tgtggcagcggtgggatt

SEQ ID NO: 10318 - DNA, 24 bp, Artificial Sequence
  synthetic circulating small noncoding RNA (sncRNA) 5' transfer RNA (tRNA) half
ccggatagctcagtcggtagagca

SEQ ID NO: 10319 - DNA, 19 bp, Artificial Sequence
  synthetic circulating small noncoding RNA (sncRNA) 5' transfer RNA (tRNA) half
ggcccgtacggggatcgaa

SEQ ID NO: 10320 - DNA, 11 bp, Artificial Sequence
  synthetic circulating small noncoding RNA (sncRNA) 5' transfer RNA (tRNA) half
gaaaccgggcg

SEQ ID NO: 10321 - DNA, 25 bp, Artificial Sequence
  synthetic circulating small noncoding RNA (sncRNA) 5' transfer RNA (tRNA) half
tcccatgctctaccgactgagctag

SEQ ID NO: 10322 - DNA, 22 bp, Artificial Sequence
  synthetic circulating small noncoding RNA (sncRNA) 5' transfer RNA (tRNA) half
cttccctgaccgggaatcgaac

SEQ ID NO: 10323 - DNA, 23 bp, Artificial Sequence
  synthetic circulating small noncoding RNA (sncRNA) 5' transfer RNA (tRNA) half
gaatcatacccctagaccaacga

SEQ ID NO: 10324 - DNA, 13 bp, Artificial Sequence
  synthetic circulating small noncoding RNA (sncRNA) 5' transfer RNA (tRNA) half
cgaacccacgcct

SEQ ID NO: 10325 - DNA, 22 bp, Artificial Sequence
  synthetic circulating small noncoding RNA (sncRNA) 5' transfer RNA (tRNA) half
gggttcgagccccagtggaacc

SEQ ID NO: 10326 - DNA, 16 bp, Artificial Sequence
  synthetic circulating small noncoding RNA (sncRNA) 5' transfer RNA (tRNA) half
acgcgggaggcccggg

SEQ ID NO: 10327 - DNA, 20 bp, Artificial Sequence
  synthetic circulating small noncoding RNA (sncRNA) 5' transfer RNA (tRNA) half
ttcaaatctcggtggaacct

SEQ ID NO: 10328 - DNA, 29 bp, Artificial Sequence
  synthetic circulating small noncoding RNA (sncRNA) 5' transfer RNA (tRNA) half
gagaccggggttcgattccccgacgggga

SEQ ID NO: 10329 - DNA, 27 bp, Artificial Sequence
  synthetic circulating small noncoding RNA (sncRNA) 5' transfer RNA (tRNA) half
gagtccagagtgctaaccattacacca

SEQ ID NO: 10330 - DNA, 16 bp, Artificial Sequence
  synthetic circulating small noncoding RNA (sncRNA) 5' transfer RNA (tRNA) half
ttcccataccgggagt

SEQ ID NO: 10331 - DNA, 12 bp, Artificial Sequence
  synthetic circulating small noncoding RNA (sncRNA) 5' transfer RNA (tRNA) half
ccatcctcgtcg

SEQ ID NO: 10332 - DNA, 17 bp, Artificial Sequence
  synthetic circulating small noncoding RNA (sncRNA) 5' transfer RNA (tRNA) half
cagtggtctggggtgca

SEQ ID NO: 10333 - DNA, 21 bp, Artificial Sequence
  synthetic circulating small noncoding RNA (sncRNA) 5' transfer RNA (tRNA) half
ggcagcggtgggattcgaacc

SEQ ID NO: 10334 - DNA, 14 bp, Artificial Sequence
  synthetic circulating small noncoding RNA (sncRNA) 5' transfer RNA (tRNA) half
acccgggatcgaac

SEQ ID NO: 10335 - DNA, 6 bp, Artificial Sequence
  synthetic circulating small noncoding RNA (sncRNA) 5' transfer RNA (tRNA) half
cacctg

SEQ ID NO: 10336 - DNA, 14 bp, Artificial Sequence
  synthetic circulating small noncoding RNA (sncRNA) 5' transfer RNA (tRNA) half
cggatcgctggatt

SEQ ID NO: 10337 - DNA, 21 bp, Artificial Sequence
  synthetic circulating small noncoding RNA (sncRNA) 5' transfer RNA (tRNA) half
gctgcgttggccgggaatcga

SEQ ID NO: 10338 - DNA, 27 bp, Artificial Sequence
  synthetic circulating small noncoding RNA (sncRNA) 5' transfer RNA (tRNA) half
ctggggattgtgggttcgagtcccatc

SEQ ID NO: 10339 - DNA, 11 bp, Artificial Sequence
  synthetic circulating small noncoding RNA (sncRNA) 5' transfer RNA (tRNA) half
attcgaacctg

SEQ ID NO: 10340 - DNA, 15 bp, Artificial Sequence
  synthetic circulating small noncoding RNA (sncRNA) 5' transfer RNA (tRNA) half
tgcccgcatcctcca

SEQ ID NO: 10341 - DNA, 30 bp, Artificial Sequence
  synthetic circulating small noncoding RNA (sncRNA) 5' transfer RNA (tRNA) half
ggccgggaatcgaacccgggcctcccgcgt

SEQ ID NO: 10342 - DNA, 28 bp, Artificial Sequence
  synthetic circulating small noncoding RNA (sncRNA) 5' transfer RNA (tRNA) half
cctccccgtcggggaattgaaccccggt

SEQ ID NO: 10343 - DNA, 11 bp, Artificial Sequence
  synthetic circulating small noncoding RNA (sncRNA) 5' transfer RNA (tRNA) half
ctagccgggca

SEQ ID NO: 10344 - DNA, 21 bp, Artificial Sequence
  synthetic circulating small noncoding RNA (sncRNA) 5' transfer RNA (tRNA) half
cgtaaaccgaagatcgcgggt

SEQ ID NO: 10345 - DNA, 22 bp, Artificial Sequence
  synthetic circulating small noncoding RNA (sncRNA) 5' transfer RNA (tRNA) half
attcagagtccagagtgctaac

SEQ ID NO: 10346 - DNA, 14 bp, Artificial Sequence
  synthetic circulating small noncoding RNA (sncRNA) 5' transfer RNA (tRNA) half
cttaaccactcggc

SEQ ID NO: 10347 - DNA, 17 bp, Artificial Sequence
  synthetic circulating small noncoding RNA (sncRNA) 5' transfer RNA (tRNA) half
ggtgtagtggtatcatg

SEQ ID NO: 10348 - DNA, 11 bp, Artificial Sequence
  synthetic circulating small noncoding RNA (sncRNA) 5' transfer RNA (tRNA) half
cgggcctcccg

SEQ ID NO: 10349 - DNA, 20 bp, Artificial Sequence
  synthetic circulating small noncoding RNA (sncRNA) 5' transfer RNA (tRNA) half
cgaaccggggacctttcgcg

SEQ ID NO: 10350 - DNA, 23 bp, Artificial Sequence
  synthetic circulating small noncoding RNA (sncRNA) 5' transfer RNA (tRNA) half
ttcgatccatcgacctctgggtt

SEQ ID NO: 10351 - DNA, 24 bp, Artificial Sequence
  synthetic circulating small noncoding RNA (sncRNA) 5' transfer RNA (tRNA) half
gggaggcccgggttcgattcccgg

SEQ ID NO: 10352 - DNA, 19 bp, Artificial Sequence
  synthetic circulating small noncoding RNA (sncRNA) 5' transfer RNA (tRNA) half
tcaaacccgggcctcccgc

SEQ ID NO: 10353 - DNA, 29 bp, Artificial Sequence
  synthetic circulating small noncoding RNA (sncRNA) 5' transfer RNA (tRNA) half
acgaggccccgggttcaatccccggcacc

SEQ ID NO: 10354 - DNA, 23 bp, Artificial Sequence
  synthetic circulating small noncoding RNA (sncRNA) 5' transfer RNA (tRNA) half
attcagagtccagagtgctagcc

SEQ ID NO: 10355 - DNA, 23 bp, Artificial Sequence
  synthetic circulating small noncoding RNA (sncRNA) 5' transfer RNA (tRNA) half
aagatcgttccttcgagccggat

SEQ ID NO: 10356 - DNA, 31 bp, Artificial Sequence
  synthetic circulating small noncoding RNA (sncRNA) 5' transfer RNA (tRNA) half
ggattcaaagtccagagtgctaaccattaca

SEQ ID NO: 10357 - DNA, 30 bp, Artificial Sequence
  synthetic circulating small noncoding RNA (sncRNA) 5' transfer RNA (tRNA) half
tagaattctcgcctgccacgcgggaggccc

SEQ ID NO: 10358 - DNA, 13 bp, Artificial Sequence
  synthetic circulating small noncoding RNA (sncRNA) 5' transfer RNA (tRNA) half
tttcggttaacag

SEQ ID NO: 10359 - DNA, 41 bp, Artificial Sequence
  synthetic circulating small noncoding RNA (sncRNA) 5' transfer RNA (tRNA) half
ttgtgccccgtgtgaggatcgaactcacgaccttcagatta

SEQ ID NO: 10360 - DNA, 20 bp, Artificial Sequence
  synthetic circulating small noncoding RNA (sncRNA) 5' transfer RNA (tRNA) half
tccctgaccgggaatcgaac

SEQ ID NO: 10361 - DNA, 23 bp, Artificial Sequence
  synthetic circulating small noncoding RNA (sncRNA) 5' transfer RNA (tRNA) half
ttccgcagcgagcagggttcgaa

SEQ ID NO: 10362 - DNA, 19 bp, Artificial Sequence
  synthetic circulating small noncoding RNA (sncRNA) 5' transfer RNA (tRNA) half
ggcaccgctgggattcgaa

SEQ ID NO: 10363 - DNA, 26 bp, Artificial Sequence
  synthetic circulating small noncoding RNA (sncRNA) 5' transfer RNA (tRNA) half
cccacatggtctagcggttaggattc

SEQ ID NO: 10364 - DNA, 22 bp, Artificial Sequence
  synthetic circulating small noncoding RNA (sncRNA) 5' transfer RNA (tRNA) half
aaggtccccggttcgaaaccgg

SEQ ID NO: 10365 - DNA, 25 bp, Artificial Sequence
  synthetic circulating small noncoding RNA (sncRNA) 5' transfer RNA (tRNA) half
gcgctctcaccgccgcggcccgggt

SEQ ID NO: 10366 - DNA, 19 bp, Artificial Sequence
  synthetic circulating small noncoding RNA (sncRNA) 5' transfer RNA (tRNA) half
agaccgctcggccatcctg

SEQ ID NO: 10367 - DNA, 17 bp, Artificial Sequence
  synthetic circulating small noncoding RNA (sncRNA) 5' transfer RNA (tRNA) half
taatggataaggcattg

SEQ ID NO: 10368 - DNA, 17 bp, Artificial Sequence
  synthetic circulating small noncoding RNA (sncRNA) 5' transfer RNA (tRNA) half
cgcagcaacctcggttc

SEQ ID NO: 10369 - DNA, 21 bp, Artificial Sequence
  synthetic circulating small noncoding RNA (sncRNA) 5' transfer RNA (tRNA) half
aagagtcccatgctctaccga

SEQ ID NO: 10370 - DNA, 22 bp, Artificial Sequence
  synthetic circulating small noncoding RNA (sncRNA) 5' transfer RNA (tRNA) half
tctaccattgaactaccaatgc

SEQ ID NO: 10371 - DNA, 21 bp, Artificial Sequence
  synthetic circulating small noncoding RNA (sncRNA) 5' transfer RNA (tRNA) half
cccgggccgcggcggtgagag

SEQ ID NO: 10372 - DNA, 24 bp, Artificial Sequence
  synthetic circulating small noncoding RNA (sncRNA) 5' transfer RNA (tRNA) half
gacgtgattcgaacacgcagcctt

SEQ ID NO: 10373 - DNA, 20 bp, Artificial Sequence
  synthetic circulating small noncoding RNA (sncRNA) 5' transfer RNA (tRNA) half
cgaacccgggccgcggcggt

SEQ ID NO: 10374 - DNA, 24 bp, Artificial Sequence
  synthetic circulating small noncoding RNA (sncRNA) 5' transfer RNA (tRNA) half
gagtactaaccactatacgatcac

SEQ ID NO: 10375 - DNA, 20 bp, Artificial Sequence
  synthetic circulating small noncoding RNA (sncRNA) 5' transfer RNA (tRNA) half
acccagaggtcgatggatcg

SEQ ID NO: 10376 - DNA, 26 bp, Artificial Sequence
  synthetic circulating small noncoding RNA (sncRNA) 5' transfer RNA (tRNA) half
cggtgagagcgccgaatcctaaccac

SEQ ID NO: 10377 - DNA, 34 bp, Artificial Sequence
  synthetic circulating small noncoding RNA (sncRNA) 5' transfer RNA (tRNA) half
ccctggtggtctagtggttaggattcggcgctct

SEQ ID NO: 10378 - DNA, 21 bp, Artificial Sequence
  synthetic circulating small noncoding RNA (sncRNA) 5' transfer RNA (tRNA) half
gaacccgcgaccttggcgtta

SEQ ID NO: 10379 - DNA, 12 bp, Artificial Sequence
  synthetic circulating small noncoding RNA (sncRNA) 5' transfer RNA (tRNA) half
atggccgagcgg

SEQ ID NO: 10380 - DNA, 30 bp, Artificial Sequence
  synthetic circulating small noncoding RNA (sncRNA) 5' transfer RNA (tRNA) half
attggccgggaatcgaacccgggcctcccg

SEQ ID NO: 10381 - DNA, 18 bp, Artificial Sequence
  synthetic circulating small noncoding RNA (sncRNA) 5' transfer RNA (tRNA) half
cgttggccgggaatcgaa

SEQ ID NO: 10382 - DNA, 14 bp, Artificial Sequence
  synthetic circulating small noncoding RNA (sncRNA) 5' transfer RNA (tRNA) half
agccggactcgaac

SEQ ID NO: 10383 - DNA, 29 bp, Artificial Sequence
  synthetic circulating small noncoding RNA (sncRNA) 5' transfer RNA (tRNA) half
gcattggccgggaatcgaacccgggcctc

SEQ ID NO: 10384 - DNA, 17 bp, Artificial Sequence
  synthetic circulating small noncoding RNA (sncRNA) 5' transfer RNA (tRNA) half
cgttgcgccacgaggtc

SEQ ID NO: 10385 - DNA, 22 bp, Artificial Sequence
  synthetic circulating small noncoding RNA (sncRNA) 5' transfer RNA (tRNA) half
cggtgagagcgccgaatcctaa

SEQ ID NO: 10386 - DNA, 22 bp, Artificial Sequence
  synthetic circulating small noncoding RNA (sncRNA) 5' transfer RNA (tRNA) half
actaaccactatacgatcacgg

SEQ ID NO: 10387 - DNA, 14 bp, Artificial Sequence
  synthetic circulating small noncoding RNA (sncRNA) 5' transfer RNA (tRNA) half
cgtgggttcgaatc

SEQ ID NO: 10388 - DNA, 12 bp, Artificial Sequence
  synthetic circulating small noncoding RNA (sncRNA) 5' transfer RNA (tRNA) half
cggacgagcccc

SEQ ID NO: 10389 - DNA, 13 bp, Artificial Sequence
  synthetic circulating small noncoding RNA (sncRNA) 5' transfer RNA (tRNA) half
ctcgctggggcct

SEQ ID NO: 10390 - DNA, 42 bp, Artificial Sequence
  synthetic circulating small noncoding RNA (sncRNA) 5' transfer RNA (tRNA) half
cagtcggtagagcatgagactcttaatctcagggtcgtgggt

SEQ ID NO: 10391 - DNA, 30 bp, Artificial Sequence
  synthetic circulating small noncoding RNA (sncRNA) 5' transfer RNA (tRNA) half
gcccggatgatcctcagtggtctggggtgc

SEQ ID NO: 10392 - DNA, 27 bp, Artificial Sequence
  synthetic circulating small noncoding RNA (sncRNA) 5' transfer RNA (tRNA) half
tgggcccataacccagaggtcgatgga

SEQ ID NO: 10393 - DNA, 13 bp, Artificial Sequence
  synthetic circulating small noncoding RNA (sncRNA) 5' transfer RNA (tRNA) half
gcgggaggcccgg

SEQ ID NO: 10394 - DNA, 11 bp, Artificial Sequence
  synthetic circulating small noncoding RNA (sncRNA) 5' transfer RNA (tRNA) half
tgccgcggtcg

SEQ ID NO: 10395 - DNA, 22 bp, Artificial Sequence
  synthetic circulating small noncoding RNA (sncRNA) 5' transfer RNA (tRNA) half
acacgcgaaaggtccccggttc

SEQ ID NO: 10396 - DNA, 13 bp, Artificial Sequence
  synthetic circulating small noncoding RNA (sncRNA) 5' transfer RNA (tRNA) half
gtgagtatccccg

SEQ ID NO: 10397 - DNA, 12 bp, Artificial Sequence
  synthetic circulating small noncoding RNA (sncRNA) 5' transfer RNA (tRNA) half
ctgtcacgcggg

SEQ ID NO: 10398 - DNA, 29 bp, Artificial Sequence
  synthetic circulating small noncoding RNA (sncRNA) 5' transfer RNA (tRNA) half
ccatatggtctagcggttaggattcctgg

SEQ ID NO: 10399 - DNA, 45 bp, Artificial Sequence
  synthetic circulating small noncoding RNA (sncRNA) 5' transfer RNA (tRNA) half
ctccagtctcttcggaggcgtgggttcgaatcccaccgctgccag

SEQ ID NO: 10400 - DNA, 11 bp, Artificial Sequence
  synthetic circulating small noncoding RNA (sncRNA) 5' transfer RNA (tRNA) half
caggcggggat

SEQ ID NO: 10401 - DNA, 19 bp, Artificial Sequence
  synthetic circulating small noncoding RNA (sncRNA) 5' transfer RNA (tRNA) half
ctctgaatccagcgatccg

SEQ ID NO: 10402 - DNA, 34 bp, Artificial Sequence
  synthetic circulating small noncoding RNA (sncRNA) 5' transfer RNA (tRNA) half
actctggtgggactcgaacccacaacctttgaat

SEQ ID NO: 10403 - DNA, 22 bp, Artificial Sequence
  synthetic circulating small noncoding RNA (sncRNA) 5' transfer RNA (tRNA) half
cccgggccgcggcggtgagagc

SEQ ID NO: 10404 - DNA, 21 bp, Artificial Sequence
  synthetic circulating small noncoding RNA (sncRNA) 5' transfer RNA (tRNA) half
tctaggggtatgattctcggt

SEQ ID NO: 10405 - DNA, 20 bp, Artificial Sequence
  synthetic circulating small noncoding RNA (sncRNA) 5' transfer RNA (tRNA) half
cgtctccccgtcggggaatc

SEQ ID NO: 10406 - DNA, 10 bp, Artificial Sequence
  synthetic circulating small noncoding RNA (sncRNA) 5' transfer RNA (tRNA) half
ttcgactccc

SEQ ID NO: 10407 - DNA, 25 bp, Artificial Sequence
  synthetic circulating small noncoding RNA (sncRNA) 5' transfer RNA (tRNA) half
gaccccgacgtgattcgaacacgca

SEQ ID NO: 10408 - DNA, 16 bp, Artificial Sequence
  synthetic circulating small noncoding RNA (sncRNA) 5' transfer RNA (tRNA) half
gaaccggggacctttc

SEQ ID NO: 10409 - DNA, 14 bp, Artificial Sequence
  synthetic circulating small noncoding RNA (sncRNA) 5' transfer RNA (tRNA) half
cgaagatcgcgggt

SEQ ID NO: 10410 - DNA, 42 bp, Artificial Sequence
  synthetic circulating small noncoding RNA (sncRNA) 5' transfer RNA (tRNA) half
ctagtggttaggattcggcgctctcaccgccgcggcccgggt

SEQ ID NO: 10411 - DNA, 12 bp, Artificial Sequence
  synthetic circulating small noncoding RNA (sncRNA) 5' transfer RNA (tRNA) half
tcggatcgctgg

SEQ ID NO: 10412 - DNA, 36 bp, Artificial Sequence
  synthetic circulating small noncoding RNA (sncRNA) 5' transfer RNA (tRNA) half
acaggagatcctgggttcgactcccagtggggcctt

SEQ ID NO: 10413 - DNA, 23 bp, Artificial Sequence
  synthetic circulating small noncoding RNA (sncRNA) 5' transfer RNA (tRNA) half
agtccatcgccttaaccactcgg

SEQ ID NO: 10414 - DNA, 20 bp, Artificial Sequence
  synthetic circulating small noncoding RNA (sncRNA) 5' transfer RNA (tRNA) half
agtctccccgtcggggaatc

SEQ ID NO: 10415 - DNA, 15 bp, Artificial Sequence
  synthetic circulating small noncoding RNA (sncRNA) 5' transfer RNA (tRNA) half
tggttagcactctgg

SEQ ID NO: 10416 - DNA, 22 bp, Artificial Sequence
  synthetic circulating small noncoding RNA (sncRNA) 5' transfer RNA (tRNA) half
ggggaatcgaaccccggtctcc

SEQ ID NO: 10417 - DNA, 20 bp, Artificial Sequence
  synthetic circulating small noncoding RNA (sncRNA) 5' transfer RNA (tRNA) half
atcccggacgagccctgaat

SEQ ID NO: 10418 - DNA, 32 bp, Artificial Sequence
  synthetic circulating small noncoding RNA (sncRNA) 5' transfer RNA (tRNA) half
cctccctggtggtctagtggttaggattcggc

SEQ ID NO: 10419 - DNA, 18 bp, Artificial Sequence
  synthetic circulating small noncoding RNA (sncRNA) 5' transfer RNA (tRNA) half
accgactgagctatccgg

SEQ ID NO: 10420 - DNA, 25 bp, Artificial Sequence
  synthetic circulating small noncoding RNA (sncRNA) 5' transfer RNA (tRNA) half
tcgaactcaggaccttcagattatg

SEQ ID NO: 10421 - DNA, 21 bp, Artificial Sequence
  synthetic circulating small noncoding RNA (sncRNA) 5' transfer RNA (tRNA) half
gggaggcccgggttcgattcc

SEQ ID NO: 10422 - DNA, 11 bp, Artificial Sequence
  synthetic circulating small noncoding RNA (sncRNA) 5' transfer RNA (tRNA) half
gcgggagaccg

SEQ ID NO: 10423 - DNA, 17 bp, Artificial Sequence
  synthetic circulating small noncoding RNA (sncRNA) 5' transfer RNA (tRNA) half
gaaccagggacctcttg

SEQ ID NO: 10424 - DNA, 22 bp, Artificial Sequence
  synthetic circulating small noncoding RNA (sncRNA) 5' transfer RNA (tRNA) half
gttatcacgtctgctttacacg

SEQ ID NO: 10425 - DNA, 32 bp, Artificial Sequence
  synthetic circulating small noncoding RNA (sncRNA) 5' transfer RNA (tRNA) half
cgaccacgaagggactcgaacccccaatcttc

SEQ ID NO: 10426 - DNA, 13 bp, Artificial Sequence
  synthetic circulating small noncoding RNA (sncRNA) 5' transfer RNA (tRNA) half
agtctcatgctct

SEQ ID NO: 10427 - DNA, 13 bp, Artificial Sequence
  synthetic circulating small noncoding RNA (sncRNA) 5' transfer RNA (tRNA) half
cggggttcgattc

SEQ ID NO: 10428 - DNA, 9 bp, Artificial Sequence
  synthetic circulating small noncoding RNA (sncRNA) 5' transfer RNA (tRNA) half
gggctcgaa

SEQ ID NO: 10429 - DNA, 24 bp, Artificial Sequence
  synthetic circulating small noncoding RNA (sncRNA) 5' transfer RNA (tRNA) half
gaacccgggacctctcgcacccaa

SEQ ID NO: 10430 - DNA, 11 bp, Artificial Sequence
  synthetic circulating small noncoding RNA (sncRNA) 5' transfer RNA (tRNA) half
gggattcgaac

SEQ ID NO: 10431 - DNA, 15 bp, Artificial Sequence
  synthetic circulating small noncoding RNA (sncRNA) 5' transfer RNA (tRNA) half
aacccacgcctccga

SEQ ID NO: 10432 - DNA, 27 bp, Artificial Sequence
  synthetic circulating small noncoding RNA (sncRNA) 5' transfer RNA (tRNA) half
gttgcgtgttcaaatcacgtcggggtc

SEQ ID NO: 10433 - DNA, 36 bp, Artificial Sequence
  synthetic circulating small noncoding RNA (sncRNA) 5' transfer RNA (tRNA) half
tatgaggccccgggttcaatccccggcatctccaac

SEQ ID NO: 10434 - DNA, 23 bp, Artificial Sequence
  synthetic circulating small noncoding RNA (sncRNA) 5' transfer RNA (tRNA) half
tgaccccgacgtgattcgaacac

SEQ ID NO: 10435 - DNA, 9 bp, Artificial Sequence
  synthetic circulating small noncoding RNA (sncRNA) 5' transfer RNA (tRNA) half
gttcgagcc

SEQ ID NO: 10436 - DNA, 31 bp, Artificial Sequence
  synthetic circulating small noncoding RNA (sncRNA) 5' transfer RNA (tRNA) half
caagcagttgacccgggttcgattcccggcc

SEQ ID NO: 10437 - DNA, 15 bp, Artificial Sequence
  synthetic circulating small noncoding RNA (sncRNA) 5' transfer RNA (tRNA) half
cacgcctccattcgg

SEQ ID NO: 10438 - DNA, 12 bp, Artificial Sequence
  synthetic circulating small noncoding RNA (sncRNA) 5' transfer RNA (tRNA) half
cggggttcgatt

SEQ ID NO: 10439 - DNA, 16 bp, Artificial Sequence
  synthetic circulating small noncoding RNA (sncRNA) 5' transfer RNA (tRNA) half
accactagaccaccag

SEQ ID NO: 10440 - DNA, 25 bp, Artificial Sequence
  synthetic circulating small noncoding RNA (sncRNA) 5' transfer RNA (tRNA) half
gtcggggaattgaaccccggtctcc

SEQ ID NO: 10441 - DNA, 17 bp, Artificial Sequence
  synthetic circulating small noncoding RNA (sncRNA) 5' transfer RNA (tRNA) half
gaccgggaatcgaaccc

SEQ ID NO: 10442 - DNA, 32 bp, Artificial Sequence
  synthetic circulating small noncoding RNA (sncRNA) 5' transfer RNA (tRNA) half
tcagaagattgagggttcgagtcccttcgtgg

SEQ ID NO: 10443 - DNA, 34 bp, Artificial Sequence
  synthetic circulating small noncoding RNA (sncRNA) 5' transfer RNA (tRNA) half
ccgcccggctagctcagtcggtagagcatgagac

SEQ ID NO: 10444 - DNA, 35 bp, Artificial Sequence
  synthetic circulating small noncoding RNA (sncRNA) 5' transfer RNA (tRNA) half
aggttgctgcggccacaacgcagagtactaaccac

SEQ ID NO: 10445 - DNA, 17 bp, Artificial Sequence
  synthetic circulating small noncoding RNA (sncRNA) 5' transfer RNA (tRNA) half
atagtgtagcggttatc

SEQ ID NO: 10446 - DNA, 36 bp, Artificial Sequence
  synthetic circulating small noncoding RNA (sncRNA) 5' transfer RNA (tRNA) half
ctgccctctctgaggttcgaactcaggaccttcaga

SEQ ID NO: 10447 - DNA, 30 bp, Artificial Sequence
  synthetic circulating small noncoding RNA (sncRNA) 5' transfer RNA (tRNA) half
atgctctaccgactgagctatccgggctct

SEQ ID NO: 10448 - DNA, 6 bp, Artificial Sequence
  synthetic circulating small noncoding RNA (sncRNA) 5' transfer RNA (tRNA) half
gcgaga

SEQ ID NO: 10449 - DNA, 19 bp, Artificial Sequence
  synthetic circulating small noncoding RNA (sncRNA) 5' transfer RNA (tRNA) half
ttcgatccccgtacgggcc

SEQ ID NO: 10450 - DNA, 5 bp, Artificial Sequence
  synthetic circulating small noncoding RNA (sncRNA) 5' transfer RNA (tRNA) half
tgccg

SEQ ID NO: 10451 - DNA, 16 bp, Artificial Sequence
  synthetic circulating small noncoding RNA (sncRNA) 5' transfer RNA (tRNA) half
cttgaccccgacgtga

SEQ ID NO: 10452 - DNA, 16 bp, Artificial Sequence
  synthetic circulating small noncoding RNA (sncRNA) 5' transfer RNA (tRNA) half
agtcagacgcgttatc

SEQ ID NO: 10453 - DNA, 36 bp, Artificial Sequence
  synthetic circulating small noncoding RNA (sncRNA) 5' transfer RNA (tRNA) half
aacaggagatcctgggttcgaatcccagtggggcct

SEQ ID NO: 10454 - DNA, 15 bp, Artificial Sequence
  synthetic circulating small noncoding RNA (sncRNA) 5' transfer RNA (tRNA) half
ggctaggattcggcg

SEQ ID NO: 10455 - DNA, 34 bp, Artificial Sequence
  synthetic circulating small noncoding RNA (sncRNA) 5' transfer RNA (tRNA) half
tcccacaccgggagtcgaacccgggccgcctggg

SEQ ID NO: 10456 - DNA, 27 bp, Artificial Sequence
  synthetic circulating small noncoding RNA (sncRNA) 5' transfer RNA (tRNA) half
gttcccacaccgggagtcgaacccggg

SEQ ID NO: 10457 - DNA, 21 bp, Artificial Sequence
  synthetic circulating small noncoding RNA (sncRNA) 5' transfer RNA (tRNA) half
cgaaccccgtccgtgcctgcc

SEQ ID NO: 10458 - DNA, 16 bp, Artificial Sequence
  synthetic circulating small noncoding RNA (sncRNA) 5' transfer RNA (tRNA) half
gcaggttcgaatcctg

SEQ ID NO: 10459 - DNA, 28 bp, Artificial Sequence
  synthetic circulating small noncoding RNA (sncRNA) 5' transfer RNA (tRNA) half
aggccccagcgagatttgaactcgcgac

SEQ ID NO: 10460 - DNA, 14 bp, Artificial Sequence
  synthetic circulating small noncoding RNA (sncRNA) 5' transfer RNA (tRNA) half
gctcagtcggtaga

SEQ ID NO: 10461 - DNA, 15 bp, Artificial Sequence
  synthetic circulating small noncoding RNA (sncRNA) 5' transfer RNA (tRNA) half
gccatcgaaatgact

SEQ ID NO: 10462 - DNA, 35 bp, Artificial Sequence
  synthetic circulating small noncoding RNA (sncRNA) 5' transfer RNA (tRNA) half
aacgccaaggtcgcgggttcgatccccgtacgggc

SEQ ID NO: 10463 - DNA, 13 bp, Artificial Sequence
  synthetic circulating small noncoding RNA (sncRNA) 5' transfer RNA (tRNA) half
ctctcaccgccgc

SEQ ID NO: 10464 - DNA, 25 bp, Artificial Sequence
  synthetic circulating small noncoding RNA (sncRNA) 5' transfer RNA (tRNA) half
tccgcagcgagcagggttcgaacct

SEQ ID NO: 10465 - DNA, 14 bp, Artificial Sequence
  synthetic circulating small noncoding RNA (sncRNA) 5' transfer RNA (tRNA) half
cagcacgcttccgc

SEQ ID NO: 10466 - DNA, 16 bp, Artificial Sequence
  synthetic circulating small noncoding RNA (sncRNA) 5' transfer RNA (tRNA) half
aacccgcgaccttggc

SEQ ID NO: 10467 - DNA, 13 bp, Artificial Sequence
  synthetic circulating small noncoding RNA (sncRNA) 5' transfer RNA (tRNA) half
attctcgctttgg

SEQ ID NO: 10468 - DNA, 13 bp, Artificial Sequence
  synthetic circulating small noncoding RNA (sncRNA) 5' transfer RNA (tRNA) half
gattcgaaccctc

SEQ ID NO: 10469 - DNA, 16 bp, Artificial Sequence
  synthetic circulating small noncoding RNA (sncRNA) 5' transfer RNA (tRNA) half
gacctcgtggcgcaac

SEQ ID NO: 10470 - DNA, 28 bp, Artificial Sequence
  synthetic circulating small noncoding RNA (sncRNA) 5' transfer RNA (tRNA) half
aaggccccagcgagatttgaactcgcga

SEQ ID NO: 10471 - DNA, 23 bp, Artificial Sequence
  synthetic circulating small noncoding RNA (sncRNA) 5' transfer RNA (tRNA) half
tctaccgactgagctagccgggc

SEQ ID NO: 10472 - DNA, 37 bp, Artificial Sequence
  synthetic circulating small noncoding RNA (sncRNA) 5' transfer RNA (tRNA) half
ccaggcggcccgggttcgactcccggtgtgggaacgc

SEQ ID NO: 10473 - DNA, 38 bp, Artificial Sequence
  synthetic circulating small noncoding RNA (sncRNA) 5' transfer RNA (tRNA) half
tgccccgtgtgaggatcgaactcacgaccttcagatta

SEQ ID NO: 10474 - DNA, 15 bp, Artificial Sequence
  synthetic circulating small noncoding RNA (sncRNA) 5' transfer RNA (tRNA) half
tactaaccactatac

SEQ ID NO: 10475 - DNA, 25 bp, Artificial Sequence
  synthetic circulating small noncoding RNA (sncRNA) 5' transfer RNA (tRNA) half
acccacgcctccgaagagactggag

SEQ ID NO: 10476 - DNA, 18 bp, Artificial Sequence
  synthetic circulating small noncoding RNA (sncRNA) 5' transfer RNA (tRNA) half
ccaggaatcctaaccgct

SEQ ID NO: 10477 - DNA, 18 bp, Artificial Sequence
  synthetic circulating small noncoding RNA (sncRNA) 5' transfer RNA (tRNA) half
ttcggcgctctcaccgcc

SEQ ID NO: 10478 - DNA, 12 bp, Artificial Sequence
  synthetic circulating small noncoding RNA (sncRNA) 5' transfer RNA (tRNA) half
tagtcgtggccg

SEQ ID NO: 10479 - DNA, 17 bp, Artificial Sequence
  synthetic circulating small noncoding RNA (sncRNA) 5' transfer RNA (tRNA) half
cgaaaccgggcggaaac

SEQ ID NO: 10480 - DNA, 18 bp, Artificial Sequence
  synthetic circulating small noncoding RNA (sncRNA) 5' transfer RNA (tRNA) half
gccagccaggagtcgaac

SEQ ID NO: 10481 - DNA, 26 bp, Artificial Sequence
  synthetic circulating small noncoding RNA (sncRNA) 5' transfer RNA (tRNA) half
gcggcccgggttcgattcccggtcag

SEQ ID NO: 10482 - DNA, 18 bp, Artificial Sequence
  synthetic circulating small noncoding RNA (sncRNA) 5' transfer RNA (tRNA) half
tactaaccactatacgat

SEQ ID NO: 10483 - DNA, 21 bp, Artificial Sequence
  synthetic circulating small noncoding RNA (sncRNA) 5' transfer RNA (tRNA) half
gtcccaccgagatttgaactc

SEQ ID NO: 10484 - DNA, 14 bp, Artificial Sequence
  synthetic circulating small noncoding RNA (sncRNA) 5' transfer RNA (tRNA) half
cacgcctccattcg

SEQ ID NO: 10485 - DNA, 21 bp, Artificial Sequence
  synthetic circulating small noncoding RNA (sncRNA) 5' transfer RNA (tRNA) half
aaaccgggcggaaacagtact

SEQ ID NO: 10486 - DNA, 33 bp, Artificial Sequence
  synthetic circulating small noncoding RNA (sncRNA) 5' transfer RNA (tRNA) half
tgggtgggctcgaaccaccaacctttcggttaa

SEQ ID NO: 10487 - DNA, 23 bp, Artificial Sequence
  synthetic circulating small noncoding RNA (sncRNA) 5' transfer RNA (tRNA) half
atcccggacgagcccaagcattt

SEQ ID NO: 10488 - DNA, 18 bp, Artificial Sequence
  synthetic circulating small noncoding RNA (sncRNA) 5' transfer RNA (tRNA) half
atcgaacccgggccgcgg

SEQ ID NO: 10489 - DNA, 35 bp, Artificial Sequence
  synthetic circulating small noncoding RNA (sncRNA) 5' transfer RNA (tRNA) half
cgggccgcctgggtgaaaaccaggaatcctaaccg

SEQ ID NO: 10490 - DNA, 21 bp, Artificial Sequence
  synthetic circulating small noncoding RNA (sncRNA) 5' transfer RNA (tRNA) half
taggggtatgattctcgcttc

SEQ ID NO: 10491 - DNA, 19 bp, Artificial Sequence
  synthetic circulating small noncoding RNA (sncRNA) 5' transfer RNA (tRNA) half
gttcgatccccggcacctc

SEQ ID NO: 10492 - DNA, 34 bp, Artificial Sequence
  synthetic circulating small noncoding RNA (sncRNA) 5' transfer RNA (tRNA) half
gtggtagaattctcgcctgccacgcgggaggccc

SEQ ID NO: 10493 - DNA, 35 bp, Artificial Sequence
  synthetic circulating small noncoding RNA (sncRNA) 5' transfer RNA (tRNA) half
gggccgcctgggtgaaaaccaggaatcctaaccgc

SEQ ID NO: 10494 - DNA, 27 bp, Artificial Sequence
  synthetic circulating small noncoding RNA (sncRNA) 5' transfer RNA (tRNA) half
attcggcgctctcaccgccgcggcccg

SEQ ID NO: 10495 - DNA, 29 bp, Artificial Sequence
  synthetic circulating small noncoding RNA (sncRNA) 5' transfer RNA (tRNA) half
agtcggtagagcatgagactcttaatctc

SEQ ID NO: 10496 - DNA, 21 bp, Artificial Sequence
  synthetic circulating small noncoding RNA (sncRNA) 5' transfer RNA (tRNA) half
aaactgggctcgtccgggatt

SEQ ID NO: 10497 - DNA, 13 bp, Artificial Sequence
  synthetic circulating small noncoding RNA (sncRNA) 5' transfer RNA (tRNA) half
atccatcgacctc

SEQ ID NO: 10498 - DNA, 14 bp, Artificial Sequence
  synthetic circulating small noncoding RNA (sncRNA) 5' transfer RNA (tRNA) half
aatcctaaccacta

SEQ ID NO: 10499 - DNA, 22 bp, Artificial Sequence
  synthetic circulating small noncoding RNA (sncRNA) 5' transfer RNA (tRNA) half
gggggtatagctcagtggtaga

SEQ ID NO: 10500 - DNA, 17 bp, Artificial Sequence
  synthetic circulating small noncoding RNA (sncRNA) 5' transfer RNA (tRNA) half
actggcagcggtgggat

SEQ ID NO: 10501 - DNA, 16 bp, Artificial Sequence
  synthetic circulating small noncoding RNA (sncRNA) 5' transfer RNA (tRNA) half
gaacccgggccgcggc

SEQ ID NO: 10502 - DNA, 15 bp, Artificial Sequence
  synthetic circulating small noncoding RNA (sncRNA) 5' transfer RNA (tRNA) half
cgccgctggtgtagt

SEQ ID NO: 10503 - DNA, 15 bp, Artificial Sequence
  synthetic circulating small noncoding RNA (sncRNA) 5' transfer RNA (tRNA) half
cgttggccgggaatc

SEQ ID NO: 10504 - DNA, 35 bp, Artificial Sequence
  synthetic circulating small noncoding RNA (sncRNA) 5' transfer RNA (tRNA) half
gctcgtccgggatttgaacccgggacctctcgcac

SEQ ID NO: 10505 - DNA, 21 bp, Artificial Sequence
  synthetic circulating small noncoding RNA (sncRNA) 5' transfer RNA (tRNA) half
gtgcattggccgggaatcgaa

SEQ ID NO: 10506 - DNA, 19 bp, Artificial Sequence
  synthetic circulating small noncoding RNA (sncRNA) 5' transfer RNA (tRNA) half
ggttaggattcggcgctct

SEQ ID NO: 10507 - DNA, 27 bp, Artificial Sequence
  synthetic circulating small noncoding RNA (sncRNA) 5' transfer RNA (tRNA) half
accgattgcgccacagagaccggtgat

SEQ ID NO: 10508 - DNA, 17 bp, Artificial Sequence
  synthetic circulating small noncoding RNA (sncRNA) 5' transfer RNA (tRNA) half
agcgccgaatcctagcc

SEQ ID NO: 10509 - DNA, 44 bp, Artificial Sequence
  synthetic circulating small noncoding RNA (sncRNA) 5' transfer RNA (tRNA) half
accgacgaggatgggattcgaacccacgcgtgcaaagcacaatg

SEQ ID NO: 10510 - DNA, 12 bp, Artificial Sequence
  synthetic circulating small noncoding RNA (sncRNA) 5' transfer RNA (tRNA) half
ttagaccgctcg

SEQ ID NO: 10511 - DNA, 32 bp, Artificial Sequence
  synthetic circulating small noncoding RNA (sncRNA) 5' transfer RNA (tRNA) half
atgaccccgacgtgattcgaacacgcagcctt

SEQ ID NO: 10512 - DNA, 22 bp, Artificial Sequence
  synthetic circulating small noncoding RNA (sncRNA) 5' transfer RNA (tRNA) half
gcgtggccgagcggtctaaggc

SEQ ID NO: 10513 - DNA, 18 bp, Artificial Sequence
  synthetic circulating small noncoding RNA (sncRNA) 5' transfer RNA (tRNA) half
gccaatgccttatccatt

SEQ ID NO: 10514 - DNA, 23 bp, Artificial Sequence
  synthetic circulating small noncoding RNA (sncRNA) 5' transfer RNA (tRNA) half
aggatggccgagtggtctaaggc

SEQ ID NO: 10515 - DNA, 16 bp, Artificial Sequence
  synthetic circulating small noncoding RNA (sncRNA) 5' transfer RNA (tRNA) half
aggcggggatactaac

SEQ ID NO: 10516 - DNA, 22 bp, Artificial Sequence
  synthetic circulating small noncoding RNA (sncRNA) 5' transfer RNA (tRNA) half
agagtctcatgctctaccgact

SEQ ID NO: 10517 - DNA, 39 bp, Artificial Sequence
  synthetic circulating small noncoding RNA (sncRNA) 5' transfer RNA (tRNA) half
tgccccgtgtgaggatcgaactcacgaccttcagattat

SEQ ID NO: 10518 - DNA, 15 bp, Artificial Sequence
  synthetic circulating small noncoding RNA (sncRNA) 5' transfer RNA (tRNA) half
ggctccagtctcttc

SEQ ID NO: 10519 - DNA, 14 bp, Artificial Sequence
  synthetic circulating small noncoding RNA (sncRNA) 5' transfer RNA (tRNA) half
cctccgatagcaga

SEQ ID NO: 10520 - DNA, 15 bp, Artificial Sequence
  synthetic circulating small noncoding RNA (sncRNA) 5' transfer RNA (tRNA) half
gcgccgaatcctagc

SEQ ID NO: 10521 - DNA, 28 bp, Artificial Sequence
  synthetic circulating small noncoding RNA (sncRNA) 5' transfer RNA (tRNA) half
ggatgatcctcagtggtctggggtgcag

SEQ ID NO: 10522 - DNA, 11 bp, Artificial Sequence
  synthetic circulating small noncoding RNA (sncRNA) 5' transfer RNA (tRNA) half
atctgggtcgc

SEQ ID NO: 10523 - DNA, 32 bp, Artificial Sequence
  synthetic circulating small noncoding RNA (sncRNA) 5' transfer RNA (tRNA) half
attaagagtcccatgctctaccgactgagcta

SEQ ID NO: 10524 - DNA, 34 bp, Artificial Sequence
  synthetic circulating small noncoding RNA (sncRNA) 5' transfer RNA (tRNA) half
aaggccccagcgagatttgaactcgcgacccctg

SEQ ID NO: 10525 - DNA, 24 bp, Artificial Sequence
  synthetic circulating small noncoding RNA (sncRNA) 5' transfer RNA (tRNA) half
aaaccaggaatcctaaccgctaga

SEQ ID NO: 10526 - DNA, 16 bp, Artificial Sequence
  synthetic circulating small noncoding RNA (sncRNA) 5' transfer RNA (tRNA) half
gtagaattctcgcctg

SEQ ID NO: 10527 - DNA, 14 bp, Artificial Sequence
  synthetic circulating small noncoding RNA (sncRNA) 5' transfer RNA (tRNA) half
gaagcgagaatcat

SEQ ID NO: 10528 - DNA, 10 bp, Artificial Sequence
  synthetic circulating small noncoding RNA (sncRNA) 5' transfer RNA (tRNA) half
tcggtagagc

SEQ ID NO: 10529 - DNA, 10 bp, Artificial Sequence
  synthetic circulating small noncoding RNA (sncRNA) 5' transfer RNA (tRNA) half
cacgttgggc

SEQ ID NO: 10530 - DNA, 17 bp, Artificial Sequence
  synthetic circulating small noncoding RNA (sncRNA) 5' transfer RNA (tRNA) half
ccggggacctttcgcgt

SEQ ID NO: 10531 - DNA, 13 bp, Artificial Sequence
  synthetic circulating small noncoding RNA (sncRNA) 5' transfer RNA (tRNA) half
ggaggcacccgtt

SEQ ID NO: 10532 - DNA, 41 bp, Artificial Sequence
  synthetic circulating small noncoding RNA (sncRNA) 5' transfer RNA (tRNA) half
cgggccgcggcggtgagagcgccgaatcctaaccactagac

SEQ ID NO: 10533 - DNA, 22 bp, Artificial Sequence
  synthetic circulating small noncoding RNA (sncRNA) 5' transfer RNA (tRNA) half
gttcgagccccagtggaaccac

SEQ ID NO: 10534 - DNA, 36 bp, Artificial Sequence
  synthetic circulating small noncoding RNA (sncRNA) 5' transfer RNA (tRNA) half
atcactccctggtggtctagtggttaggattcggcg

SEQ ID NO: 10535 - DNA, 45 bp, Artificial Sequence
  synthetic circulating small noncoding RNA (sncRNA) 5' transfer RNA (tRNA) half
gtggcagcggtgggattcgaacccacgccatcgaaatgactggag

SEQ ID NO: 10536 - DNA, 20 bp, Artificial Sequence
  synthetic circulating small noncoding RNA (sncRNA) 5' transfer RNA (tRNA) half
gggggtgtagctcagtggta

SEQ ID NO: 10537 - DNA, 34 bp, Artificial Sequence
  synthetic circulating small noncoding RNA (sncRNA) 5' transfer RNA (tRNA) half
taggattcggcgctctcaccgccgcggcccgggt

SEQ ID NO: 10538 - DNA, 32 bp, Artificial Sequence
  synthetic circulating small noncoding RNA (sncRNA) 5' transfer RNA (tRNA) half
gccctctctgaggttcgaactcaggaccttca

SEQ ID NO: 10539 - DNA, 33 bp, Artificial Sequence
  synthetic circulating small noncoding RNA (sncRNA) 5' transfer RNA (tRNA) half
gaaaggttggtggttcgagcccacccagggacg

SEQ ID NO: 10540 - DNA, 20 bp, Artificial Sequence
  synthetic circulating small noncoding RNA (sncRNA) 5' transfer RNA (tRNA) half
ataggggttagtactctgcg

SEQ ID NO: 10541 - DNA, 7 bp, Artificial Sequence
  synthetic circulating small noncoding RNA (sncRNA) 5' transfer RNA (tRNA) half
accgggc

SEQ ID NO: 10542 - DNA, 23 bp, Artificial Sequence
  synthetic circulating small noncoding RNA (sncRNA) 5' transfer RNA (tRNA) half
gccttagaccactcggccatcct

SEQ ID NO: 10543 - DNA, 17 bp, Artificial Sequence
  synthetic circulating small noncoding RNA (sncRNA) 5' transfer RNA (tRNA) half
gggttcgattcccggcc

SEQ ID NO: 10544 - DNA, 32 bp, Artificial Sequence
  synthetic circulating small noncoding RNA (sncRNA) 5' transfer RNA (tRNA) half
cttccctgaccgggaatcgaacccgggccgcg

SEQ ID NO: 10545 - DNA, 12 bp, Artificial Sequence
  synthetic circulating small noncoding RNA (sncRNA) 5' transfer RNA (tRNA) half
atgattctcgct

SEQ ID NO: 10546 - DNA, 18 bp, Artificial Sequence
  synthetic circulating small noncoding RNA (sncRNA) 5' transfer RNA (tRNA) half
gcggcccgggttcgactc

SEQ ID NO: 10547 - DNA, 28 bp, Artificial Sequence
  synthetic circulating small noncoding RNA (sncRNA) 5' transfer RNA (tRNA) half
gcaccgctgggattcgaacccaggatct

SEQ ID NO: 10548 - DNA, 23 bp, Artificial Sequence
  synthetic circulating small noncoding RNA (sncRNA) 5' transfer RNA (tRNA) half
actcaggaccttcagattatgag

SEQ ID NO: 10549 - DNA, 37 bp, Artificial Sequence
  synthetic circulating small noncoding RNA (sncRNA) 5' transfer RNA (tRNA) half
agggtgtttctgtagtgtagtggttatcacgctcgcc

SEQ ID NO: 10550 - DNA, 17 bp, Artificial Sequence
  synthetic circulating small noncoding RNA (sncRNA) 5' transfer RNA (tRNA) half
atggataaggcatcagc

SEQ ID NO: 10551 - DNA, 38 bp, Artificial Sequence
  synthetic circulating small noncoding RNA (sncRNA) 5' transfer RNA (tRNA) half
cgtcgactctggcgggactcgaacccgcaacctttgaa

SEQ ID NO: 10552 - DNA, 26 bp, Artificial Sequence
  synthetic circulating small noncoding RNA (sncRNA) 5' transfer RNA (tRNA) half
ggcaagaattctaccactgaaccacc

SEQ ID NO: 10553 - DNA, 35 bp, Artificial Sequence
  synthetic circulating small noncoding RNA (sncRNA) 5' transfer RNA (tRNA) half
actcggatcgctggattcagagtccagagtgctaa

SEQ ID NO: 10554 - DNA, 14 bp, Artificial Sequence
  synthetic circulating small noncoding RNA (sncRNA) 5' transfer RNA (tRNA) half
agctaagcgcccga

SEQ ID NO: 10555 - DNA, 25 bp, Artificial Sequence
  synthetic circulating small noncoding RNA (sncRNA) 5' transfer RNA (tRNA) half
tttcgatccatcgacctctgggtta

SEQ ID NO: 10556 - DNA, 36 bp, Artificial Sequence
  synthetic circulating small noncoding RNA (sncRNA) 5' transfer RNA (tRNA) half
gaacccgggccgcggcggtgagagcgccgaatccta

SEQ ID NO: 10557 - DNA, 21 bp, Artificial Sequence
  synthetic circulating small noncoding RNA (sncRNA) 5' transfer RNA (tRNA) half
cgattcccggccaatgcacga

SEQ ID NO: 10558 - DNA, 27 bp, Artificial Sequence
  synthetic circulating small noncoding RNA (sncRNA) 5' transfer RNA (tRNA) half
tttagatcttcagtctaacgctctccc

SEQ ID NO: 10559 - DNA, 31 bp, Artificial Sequence
  synthetic circulating small noncoding RNA (sncRNA) 5' transfer RNA (tRNA) half
gtgtttccgcccggtttcgaaccggggacct

SEQ ID NO: 10560 - DNA, 17 bp, Artificial Sequence
  synthetic circulating small noncoding RNA (sncRNA) 5' transfer RNA (tRNA) half
gccagccaggagtcgaa

SEQ ID NO: 10561 - DNA, 29 bp, Artificial Sequence
  synthetic circulating small noncoding RNA (sncRNA) 5' transfer RNA (tRNA) half
aggattcctggttttcacccaggcggccc

SEQ ID NO: 10562 - DNA, 25 bp, Artificial Sequence
  synthetic circulating small noncoding RNA (sncRNA) 5' transfer RNA (tRNA) half
gggcctcccgcgtggcaggcgagaa

SEQ ID NO: 10563 - DNA, 24 bp, Artificial Sequence
  synthetic circulating small noncoding RNA (sncRNA) 5' transfer RNA (tRNA) half
gtgttcccacaccgggagtcgaac

SEQ ID NO: 10564 - DNA, 26 bp, Artificial Sequence
  synthetic circulating small noncoding RNA (sncRNA) 5' transfer RNA (tRNA) half
gccccagcgagatttgaactcgcgac

SEQ ID NO: 10565 - DNA, 35 bp, Artificial Sequence
  synthetic circulating small noncoding RNA (sncRNA) 5' transfer RNA (tRNA) half
gggggcacccggatttgaaccggggacctcttgat

SEQ ID NO: 10566 - DNA, 27 bp, Artificial Sequence
  synthetic circulating small noncoding RNA (sncRNA) 5' transfer RNA (tRNA) half
gcggcccgggttcgactcccggtatgg

SEQ ID NO: 10567 - DNA, 18 bp, Artificial Sequence
  synthetic circulating small noncoding RNA (sncRNA) 5' transfer RNA (tRNA) half
tcgactcccggtatggga

SEQ ID NO: 10568 - DNA, 15 bp, Artificial Sequence
  synthetic circulating small noncoding RNA (sncRNA) 5' transfer RNA (tRNA) half
ggccggttagctcag

SEQ ID NO: 10569 - DNA, 22 bp, Artificial Sequence
  synthetic circulating small noncoding RNA (sncRNA) 5' transfer RNA (tRNA) half
cagagtccagagtgctaaccat

SEQ ID NO: 10570 - DNA, 19 bp, Artificial Sequence
  synthetic circulating small noncoding RNA (sncRNA) 5' transfer RNA (tRNA) half
aacgtgataaccactacac

SEQ ID NO: 10571 - DNA, 12 bp, Artificial Sequence
  synthetic circulating small noncoding RNA (sncRNA) 5' transfer RNA (tRNA) half
gggttcgattcc

SEQ ID NO: 10572 - DNA, 21 bp, Artificial Sequence
  synthetic circulating small noncoding RNA (sncRNA) 5' transfer RNA (tRNA) half
aatccagcgccttagaccact

SEQ ID NO: 10573 - DNA, 21 bp, Artificial Sequence
  synthetic circulating small noncoding RNA (sncRNA) 5' transfer RNA (tRNA) half
cgaacccgggccgcggcggtg

SEQ ID NO: 10574 - DNA, 22 bp, Artificial Sequence
  synthetic circulating small noncoding RNA (sncRNA) 5' transfer RNA (tRNA) half
agaccagtgctctaacccctga

SEQ ID NO: 10575 - DNA, 26 bp, Artificial Sequence
  synthetic circulating small noncoding RNA (sncRNA) 5' transfer RNA (tRNA) half
agtgtagtggttatcacgttcgcctc

SEQ ID NO: 10576 - DNA, 11 bp, Artificial Sequence
  synthetic circulating small noncoding RNA (sncRNA) 5' transfer RNA (tRNA) half
aggtccctggt

SEQ ID NO: 10577 - DNA, 23 bp, Artificial Sequence
  synthetic circulating small noncoding RNA (sncRNA) 5' transfer RNA (tRNA) half
cccggatgatcctcagtggtctg

SEQ ID NO: 10578 - DNA, 17 bp, Artificial Sequence
  synthetic circulating small noncoding RNA (sncRNA) 5' transfer RNA (tRNA) half
aagcgcccgaacaggga

SEQ ID NO: 10579 - DNA, 39 bp, Artificial Sequence
  synthetic circulating small noncoding RNA (sncRNA) 5' transfer RNA (tRNA) half
gtttccgtagtgtagtggttatcacgttcgcctaacacg

SEQ ID NO: 10580 - DNA, 15 bp, Artificial Sequence
  synthetic circulating small noncoding RNA (sncRNA) 5' transfer RNA (tRNA) half
aacccggggcctcat

SEQ ID NO: 10581 - DNA, 29 bp, Artificial Sequence
  synthetic circulating small noncoding RNA (sncRNA) 5' transfer RNA (tRNA) half
ggccctatagctcaggggttagagcactg

SEQ ID NO: 10582 - DNA, 32 bp, Artificial Sequence
  synthetic circulating small noncoding RNA (sncRNA) 5' transfer RNA (tRNA) half
gaccgcgtggcctaatggataaggcgtctgac

SEQ ID NO: 10583 - DNA, 41 bp, Artificial Sequence
  synthetic circulating small noncoding RNA (sncRNA) 5' transfer RNA (tRNA) half
gtcacgaacaggattcgaacctgtgcggggaaaccccattg

SEQ ID NO: 10584 - DNA, 21 bp, Artificial Sequence
  synthetic circulating small noncoding RNA (sncRNA) 5' transfer RNA (tRNA) half
gttcgaatcccactcctgaca

SEQ ID NO: 10585 - DNA, 30 bp, Artificial Sequence
  synthetic circulating small noncoding RNA (sncRNA) 5' transfer RNA (tRNA) half
gctggattcagagtccagagtgctaaccat

SEQ ID NO: 10586 - DNA, 23 bp, Artificial Sequence
  synthetic circulating small noncoding RNA (sncRNA) 5' transfer RNA (tRNA) half
ggctcgtccgggatttgaacccg

SEQ ID NO: 10587 - DNA, 21 bp, Artificial Sequence
  synthetic circulating small noncoding RNA (sncRNA) 5' transfer RNA (tRNA) half
aaaaaatgttcccgcccggtt

SEQ ID NO: 10588 - DNA, 15 bp, Artificial Sequence
  synthetic circulating small noncoding RNA (sncRNA) 5' transfer RNA (tRNA) half
aaagcgagaatcata

SEQ ID NO: 10589 - DNA, 12 bp, Artificial Sequence
  synthetic circulating small noncoding RNA (sncRNA) 5' transfer RNA (tRNA) half
agggggcacccg

SEQ ID NO: 10590 - DNA, 19 bp, Artificial Sequence
  synthetic circulating small noncoding RNA (sncRNA) 5' transfer RNA (tRNA) half
gccaaatcctaaccactag

SEQ ID NO: 10591 - DNA, 14 bp, Artificial Sequence
  synthetic circulating small noncoding RNA (sncRNA) 5' transfer RNA (tRNA) half
ttccccgacgggga

SEQ ID NO: 10592 - DNA, 23 bp, Artificial Sequence
  synthetic circulating small noncoding RNA (sncRNA) 5' transfer RNA (tRNA) half
ccagagtgctaaccattacacca

SEQ ID NO: 10593 - DNA, 25 bp, Artificial Sequence
  synthetic circulating small noncoding RNA (sncRNA) 5' transfer RNA (tRNA) half
acccgggcctcccgcgtggcaggcg

SEQ ID NO: 10594 - DNA, 14 bp, Artificial Sequence
  synthetic circulating small noncoding RNA (sncRNA) 5' transfer RNA (tRNA) half
cccagcacgcttcc

SEQ ID NO: 10595 - DNA, 19 bp, Artificial Sequence
  synthetic circulating small noncoding RNA (sncRNA) 5' transfer RNA (tRNA) half
ccactcggccatcgctgct

SEQ ID NO: 10596 - DNA, 15 bp, Artificial Sequence
  synthetic circulating small noncoding RNA (sncRNA) 5' transfer RNA (tRNA) half
acgcctccgaagaga

SEQ ID NO: 10597 - DNA, 32 bp, Artificial Sequence
  synthetic circulating small noncoding RNA (sncRNA) 5' transfer RNA (tRNA) half
ccttaggtcgctggttcgattccggctcgaag

SEQ ID NO: 10598 - DNA, 14 bp, Artificial Sequence
  synthetic circulating small noncoding RNA (sncRNA) 5' transfer RNA (tRNA) half
gaggtccccggttc

SEQ ID NO: 10599 - DNA, 18 bp, Artificial Sequence
  synthetic circulating small noncoding RNA (sncRNA) 5' transfer RNA (tRNA) half
tagaccgctcggccacac

SEQ ID NO: 10600 - DNA, 38 bp, Artificial Sequence
  synthetic circulating small noncoding RNA (sncRNA) 5' transfer RNA (tRNA) half
tgtgccccgtgtgaggatcgaactcacgaccttcagat

SEQ ID NO: 10601 - DNA, 33 bp, Artificial Sequence
  synthetic circulating small noncoding RNA (sncRNA) 5' transfer RNA (tRNA) half
cagggattgtgggttcgagtcccatctggggtg

SEQ ID NO: 10602 - DNA, 22 bp, Artificial Sequence
  synthetic circulating small noncoding RNA (sncRNA) 5' transfer RNA (tRNA) half
tcgagtcccatctgggtcgcat

SEQ ID NO: 10603 - DNA, 17 bp, Artificial Sequence
  synthetic circulating small noncoding RNA (sncRNA) 5' transfer RNA (tRNA) half
gatgctctaccaactga

SEQ ID NO: 10604 - DNA, 12 bp, Artificial Sequence
  synthetic circulating small noncoding RNA (sncRNA) 5' transfer RNA (tRNA) half
taggtcgctggt

SEQ ID NO: 10605 - DNA, 33 bp, Artificial Sequence
  synthetic circulating small noncoding RNA (sncRNA) 5' transfer RNA (tRNA) half
aaccacgaagggattcgaaccctcaatcttctg

SEQ ID NO: 10606 - DNA, 23 bp, Artificial Sequence
  synthetic circulating small noncoding RNA (sncRNA) 5' transfer RNA (tRNA) half
ctcatgctctaccgactgagcta

SEQ ID NO: 10607 - DNA, 32 bp, Artificial Sequence
  synthetic circulating small noncoding RNA (sncRNA) 5' transfer RNA (tRNA) half
ggcgtccctgggtgggctcgaaccaccaacct

SEQ ID NO: 10608 - DNA, 35 bp, Artificial Sequence
  synthetic circulating small noncoding RNA (sncRNA) 5' transfer RNA (tRNA) half
caggagatcctgggttcgaatcccagcggtgcctt

SEQ ID NO: 10609 - DNA, 23 bp, Artificial Sequence
  synthetic circulating small noncoding RNA (sncRNA) 5' transfer RNA (tRNA) half
ggttccttcgagccggattcgaa

SEQ ID NO: 10610 - DNA, 12 bp, Artificial Sequence
  synthetic circulating small noncoding RNA (sncRNA) 5' transfer RNA (tRNA) half
ccgggtcaactg

SEQ ID NO: 10611 - DNA, 22 bp, Artificial Sequence
  synthetic circulating small noncoding RNA (sncRNA) 5' transfer RNA (tRNA) half
tcgaatcccaccgctgccatct

SEQ ID NO: 10612 - DNA, 21 bp, Artificial Sequence
  synthetic circulating small noncoding RNA (sncRNA) 5' transfer RNA (tRNA) half
gttgcgttggccgggaatcga

SEQ ID NO: 10613 - DNA, 26 bp, Artificial Sequence
  synthetic circulating small noncoding RNA (sncRNA) 5' transfer RNA (tRNA) half
ccacaccgggagtcgaacccgggccg

SEQ ID NO: 10614 - DNA, 14 bp, Artificial Sequence
  synthetic circulating small noncoding RNA (sncRNA) 5' transfer RNA (tRNA) half
tctagcggttagga

SEQ ID NO: 10615 - DNA, 40 bp, Artificial Sequence
  synthetic circulating small noncoding RNA (sncRNA) 5' transfer RNA (tRNA) half
ttgtgccccgtgtgaggatcgaactcacgaccttcagatt

SEQ ID NO: 10616 - DNA, 39 bp, Artificial Sequence
  synthetic circulating small noncoding RNA (sncRNA) 5' transfer RNA (tRNA) half
ttaaccgaaaggttggtggttcgagcccacccagggacg

SEQ ID NO: 10617 - DNA, 17 bp, Artificial Sequence
  synthetic circulating small noncoding RNA (sncRNA) 5' transfer RNA (tRNA) half
gtatgattctcgcttag

SEQ ID NO: 10618 - DNA, 23 bp, Artificial Sequence
  synthetic circulating small noncoding RNA (sncRNA) 5' transfer RNA (tRNA) half
agcggctgggggatgtagctcag

SEQ ID NO: 10619 - DNA, 13 bp, Artificial Sequence
  synthetic circulating small noncoding RNA (sncRNA) 5' transfer RNA (tRNA) half
ccgggcctcccgc

SEQ ID NO: 10620 - DNA, 23 bp, Artificial Sequence
  synthetic circulating small noncoding RNA (sncRNA) 5' transfer RNA (tRNA) half
ttcgatcctcacctggagcactt

SEQ ID NO: 10621 - DNA, 14 bp, Artificial Sequence
  synthetic circulating small noncoding RNA (sncRNA) 5' transfer RNA (tRNA) half
agggctcgtccggg

SEQ ID NO: 10622 - DNA, 15 bp, Artificial Sequence
  synthetic circulating small noncoding RNA (sncRNA) 5' transfer RNA (tRNA) half
gggaggcccgggttc

SEQ ID NO: 10623 - DNA, 23 bp, Artificial Sequence
  synthetic circulating small noncoding RNA (sncRNA) 5' transfer RNA (tRNA) half
gaaggccccagcgagatttgaac

SEQ ID NO: 10624 - DNA, 28 bp, Artificial Sequence
  synthetic circulating small noncoding RNA (sncRNA) 5' transfer RNA (tRNA) half
ataccgggagtcgaacccgggccgcctg

SEQ ID NO: 10625 - DNA, 31 bp, Artificial Sequence
  synthetic circulating small noncoding RNA (sncRNA) 5' transfer RNA (tRNA) half
gcctggatagctcagtcggtagagcatcaga

SEQ ID NO: 10626 - DNA, 13 bp, Artificial Sequence
  synthetic circulating small noncoding RNA (sncRNA) 5' transfer RNA (tRNA) half
agccggattcgaa

SEQ ID NO: 10627 - DNA, 14 bp, Artificial Sequence
  synthetic circulating small noncoding RNA (sncRNA) 5' transfer RNA (tRNA) half
cccgggacctctcg

SEQ ID NO: 10628 - DNA, 19 bp, Artificial Sequence
  synthetic circulating small noncoding RNA (sncRNA) 5' transfer RNA (tRNA) half
atgcccgcatcctccactt

SEQ ID NO: 10629 - DNA, 37 bp, Artificial Sequence
  synthetic circulating small noncoding RNA (sncRNA) 5' transfer RNA (tRNA) half
tgaactcggatcgctggattcagagtccagagtgcta

SEQ ID NO: 10630 - DNA, 33 bp, Artificial Sequence
  synthetic circulating small noncoding RNA (sncRNA) 5' transfer RNA (tRNA) half
caggagatcctgggttcgactcccagtggggcc

SEQ ID NO: 10631 - DNA, 25 bp, Artificial Sequence
  synthetic circulating small noncoding RNA (sncRNA) 5' transfer RNA (tRNA) half
tggtgtaatggttagcactctggac

SEQ ID NO: 10632 - DNA, 21 bp, Artificial Sequence
  synthetic circulating small noncoding RNA (sncRNA) 5' transfer RNA (tRNA) half
gcgttcaggtcgcagtctccc

SEQ ID NO: 10633 - DNA, 12 bp, Artificial Sequence
  synthetic circulating small noncoding RNA (sncRNA) 5' transfer RNA (tRNA) half
gattcgaacctg

SEQ ID NO: 10634 - DNA, 33 bp, Artificial Sequence
  synthetic circulating small noncoding RNA (sncRNA) 5' transfer RNA (tRNA) half
gcggcccgggttcgactcccggtgtgggaacag

SEQ ID NO: 10635 - DNA, 29 bp, Artificial Sequence
  synthetic circulating small noncoding RNA (sncRNA) 5' transfer RNA (tRNA) half
ttcgacgaggatgggattcgaacccatgc

SEQ ID NO: 10636 - DNA, 33 bp, Artificial Sequence
  synthetic circulating small noncoding RNA (sncRNA) 5' transfer RNA (tRNA) half
tgcacgaggccctgggttcgatccccagcacct

SEQ ID NO: 10637 - DNA, 26 bp, Artificial Sequence
  synthetic circulating small noncoding RNA (sncRNA) 5' transfer RNA (tRNA) half
gagagcgccgaatcctaaccactaga

SEQ ID NO: 10638 - DNA, 15 bp, Artificial Sequence
  synthetic circulating small noncoding RNA (sncRNA) 5' transfer RNA (tRNA) half
gtgtcagaagtggga

SEQ ID NO: 10639 - DNA, 16 bp, Artificial Sequence
  synthetic circulating small noncoding RNA (sncRNA) 5' transfer RNA (tRNA) half
accgaagatcgcgggt

SEQ ID NO: 10640 - DNA, 16 bp, Artificial Sequence
  synthetic circulating small noncoding RNA (sncRNA) 5' transfer RNA (tRNA) half
acccctagaccaacga

SEQ ID NO: 10641 - DNA, 17 bp, Artificial Sequence
  synthetic circulating small noncoding RNA (sncRNA) 5' transfer RNA (tRNA) half
gggacctctcgcaccca

SEQ ID NO: 10642 - DNA, 28 bp, Artificial Sequence
  synthetic circulating small noncoding RNA (sncRNA) 5' transfer RNA (tRNA) half
gcgagaattctaccattgaaccaccaat

SEQ ID NO: 10643 - DNA, 20 bp, Artificial Sequence
  synthetic circulating small noncoding RNA (sncRNA) 5' transfer RNA (tRNA) half
caggggttagagcactggtc

SEQ ID NO: 10644 - DNA, 15 bp, Artificial Sequence
  synthetic circulating small noncoding RNA (sncRNA) 5' transfer RNA (tRNA) half
tccggctcgaaggaa

SEQ ID NO: 10645 - DNA, 17 bp, Artificial Sequence
  synthetic circulating small noncoding RNA (sncRNA) 5' transfer RNA (tRNA) half
gaccgctcggccatcct

SEQ ID NO: 10646 - DNA, 18 bp, Artificial Sequence
  synthetic circulating small noncoding RNA (sncRNA) 5' transfer RNA (tRNA) half
tttccgcccggtttcgaa

SEQ ID NO: 10647 - DNA, 8 bp, Artificial Sequence
  synthetic circulating small noncoding RNA (sncRNA) 5' transfer RNA (tRNA) half
agtcggca

SEQ ID NO: 10648 - DNA, 22 bp, Artificial Sequence
  synthetic circulating small noncoding RNA (sncRNA) 5' transfer RNA (tRNA) half
ctgaatccagcgacccgagttc

SEQ ID NO: 10649 - DNA, 23 bp, Artificial Sequence
  synthetic circulating small noncoding RNA (sncRNA) 5' transfer RNA (tRNA) half
ctagaactgtgcattggccggga

SEQ ID NO: 10650 - DNA, 20 bp, Artificial Sequence
  synthetic circulating small noncoding RNA (sncRNA) 5' transfer RNA (tRNA) half
aaaaccaggaatcctaaccg

SEQ ID NO: 10651 - DNA, 38 bp, Artificial Sequence
  synthetic circulating small noncoding RNA (sncRNA) 5' transfer RNA (tRNA) half
tggtggtctagtggttaggattcggcgctctcaccgcc

SEQ ID NO: 10652 - DNA, 28 bp, Artificial Sequence
  synthetic circulating small noncoding RNA (sncRNA) 5' transfer RNA (tRNA) half
tggactctgaatccagcgatccgagttc

SEQ ID NO: 10653 - DNA, 32 bp, Artificial Sequence
  synthetic circulating small noncoding RNA (sncRNA) 5' transfer RNA (tRNA) half
tcagaagtgggattcgaacccacgcctccatt

SEQ ID NO: 10654 - DNA, 28 bp, Artificial Sequence
  synthetic circulating small noncoding RNA (sncRNA) 5' transfer RNA (tRNA) half
gtctccccgtcggggaatcgaaccccgg

SEQ ID NO: 10655 - DNA, 26 bp, Artificial Sequence
  synthetic circulating small noncoding RNA (sncRNA) 5' transfer RNA (tRNA) half
aagcctaaccactagaccaccaggga

SEQ ID NO: 10656 - DNA, 29 bp, Artificial Sequence
  synthetic circulating small noncoding RNA (sncRNA) 5' transfer RNA (tRNA) half
gcgagaattctaccattgaaccaccaatg

SEQ ID NO: 10657 - DNA, 17 bp, Artificial Sequence
  synthetic circulating small noncoding RNA (sncRNA) 5' transfer RNA (tRNA) half
aaggtcccaccgagatt

SEQ ID NO: 10658 - DNA, 22 bp, Artificial Sequence
  synthetic circulating small noncoding RNA (sncRNA) 5' transfer RNA (tRNA) half
cttgaccccgacgtgacttgaa

SEQ ID NO: 10659 - DNA, 26 bp, Artificial Sequence
  synthetic circulating small noncoding RNA (sncRNA) 5' transfer RNA (tRNA) half
tgcgctctaccactgagctacatccc

SEQ ID NO: 10660 - DNA, 12 bp, Artificial Sequence
  synthetic circulating small noncoding RNA (sncRNA) 5' transfer RNA (tRNA) half
gaattctcgcct

SEQ ID NO: 10661 - DNA, 36 bp, Artificial Sequence
  synthetic circulating small noncoding RNA (sncRNA) 5' transfer RNA (tRNA) half
gctggcccgtacggggatcgaacccgcgaccttggc

SEQ ID NO: 10662 - DNA, 29 bp, Artificial Sequence
  synthetic circulating small noncoding RNA (sncRNA) 5' transfer RNA (tRNA) half
accccggtctcccgcgtgacaggcgggga

SEQ ID NO: 10663 - DNA, 12 bp, Artificial Sequence
  synthetic circulating small noncoding RNA (sncRNA) 5' transfer RNA (tRNA) half
gggccgcctggg

SEQ ID NO: 10664 - DNA, 31 bp, Artificial Sequence
  synthetic circulating small noncoding RNA (sncRNA) 5' transfer RNA (tRNA) half
agagtctcatgctctaccgactgagctagcc

SEQ ID NO: 10665 - DNA, 20 bp, Artificial Sequence
  synthetic circulating small noncoding RNA (sncRNA) 5' transfer RNA (tRNA) half
cgaaccccgtccgtgcctgc

SEQ ID NO: 10666 - DNA, 15 bp, Artificial Sequence
  synthetic circulating small noncoding RNA (sncRNA) 5' transfer RNA (tRNA) half
agtcgaacctggaat

SEQ ID NO: 10667 - DNA, 18 bp, Artificial Sequence
  synthetic circulating small noncoding RNA (sncRNA) 5' transfer RNA (tRNA) half
atagtggttagtactctg

SEQ ID NO: 10668 - DNA, 27 bp, Artificial Sequence
  synthetic circulating small noncoding RNA (sncRNA) 5' transfer RNA (tRNA) half
gccaggagtcgaacctagaatcttctg

SEQ ID NO: 10669 - DNA, 25 bp, Artificial Sequence
  synthetic circulating small noncoding RNA (sncRNA) 5' transfer RNA (tRNA) half
ccgggagtcgaacccgggccgcctg

SEQ ID NO: 10670 - DNA, 23 bp, Artificial Sequence
  synthetic circulating small noncoding RNA (sncRNA) 5' transfer RNA (tRNA) half
ccggatgatcctcagtggtctgg

SEQ ID NO: 10671 - DNA, 15 bp, Artificial Sequence
  synthetic circulating small noncoding RNA (sncRNA) 5' transfer RNA (tRNA) half
cggatagctcagtcg

SEQ ID NO: 10672 - DNA, 22 bp, Artificial Sequence
  synthetic circulating small noncoding RNA (sncRNA) 5' transfer RNA (tRNA) half
gaaccggggacctttcgcgtgt

SEQ ID NO: 10673 - DNA, 32 bp, Artificial Sequence
  synthetic circulating small noncoding RNA (sncRNA) 5' transfer RNA (tRNA) half
gaagattgcaggttcgagtcctgccgcggtcg

SEQ ID NO: 10674 - DNA, 14 bp, Artificial Sequence
  synthetic circulating small noncoding RNA (sncRNA) 5' transfer RNA (tRNA) half
acccacgcccccga

SEQ ID NO: 10675 - DNA, 22 bp, Artificial Sequence
  synthetic circulating small noncoding RNA (sncRNA) 5' transfer RNA (tRNA) half
gatgctctaccgactgagctat

SEQ ID NO: 10676 - DNA, 13 bp, Artificial Sequence
  synthetic circulating small noncoding RNA (sncRNA) 5' transfer RNA (tRNA) half
gcgatccgagttc

SEQ ID NO: 10677 - DNA, 9 bp, Artificial Sequence
  synthetic circulating small noncoding RNA (sncRNA) 5' transfer RNA (tRNA) half
agcggggcc

SEQ ID NO: 10678 - DNA, 42 bp, Artificial Sequence
  synthetic circulating small noncoding RNA (sncRNA) 5' transfer RNA (tRNA) half
cgcctccccgtcggggaatcgaaccccggtctcccgcgtgac

SEQ ID NO: 10679 - DNA, 35 bp, Artificial Sequence
  synthetic circulating small noncoding RNA (sncRNA) 5' transfer RNA (tRNA) half
tcgactctggcgggactcgaacccgcaacctttga

SEQ ID NO: 10680 - DNA, 20 bp, Artificial Sequence
  synthetic circulating small noncoding RNA (sncRNA) 5' transfer RNA (tRNA) half
tcgactccggctcgaaggag

SEQ ID NO: 10681 - DNA, 20 bp, Artificial Sequence
  synthetic circulating small noncoding RNA (sncRNA) 5' transfer RNA (tRNA) half
accggggacctcttgatctg

SEQ ID NO: 10682 - DNA, 13 bp, Artificial Sequence
  synthetic circulating small noncoding RNA (sncRNA) 5' transfer RNA (tRNA) half
aggtccctggttc

SEQ ID NO: 10683 - DNA, 38 bp, Artificial Sequence
  synthetic circulating small noncoding RNA (sncRNA) 5' transfer RNA (tRNA) half
ttgaactcggatcgctggattcagagtccagagtgcta

SEQ ID NO: 10684 - DNA, 24 bp, Artificial Sequence
  synthetic circulating small noncoding RNA (sncRNA) 5' transfer RNA (tRNA) half
gaacccgggacctctcgcacccga

SEQ ID NO: 10685 - DNA, 19 bp, Artificial Sequence
  synthetic circulating small noncoding RNA (sncRNA) 5' transfer RNA (tRNA) half
gccaatgccttatccatta

SEQ ID NO: 10686 - DNA, 25 bp, Artificial Sequence
  synthetic circulating small noncoding RNA (sncRNA) 5' transfer RNA (tRNA) half
gccgcccgaacagggacttgaaccc

SEQ ID NO: 10687 - DNA, 14 bp, Artificial Sequence
  synthetic circulating small noncoding RNA (sncRNA) 5' transfer RNA (tRNA) half
tgaaccggggacct

SEQ ID NO: 10688 - DNA, 27 bp, Artificial Sequence
  synthetic circulating small noncoding RNA (sncRNA) 5' transfer RNA (tRNA) half
gtgggttcgagtcccatctgggtcgca

SEQ ID NO: 10689 - DNA, 26 bp, Artificial Sequence
  synthetic circulating small noncoding RNA (sncRNA) 5' transfer RNA (tRNA) half
gttcagtggtagaattctcgcctgcc

SEQ ID NO: 10690 - DNA, 19 bp, Artificial Sequence
  synthetic circulating small noncoding RNA (sncRNA) 5' transfer RNA (tRNA) half
ggttatgggcccagcacgc

SEQ ID NO: 10691 - DNA, 27 bp, Artificial Sequence
  synthetic circulating small noncoding RNA (sncRNA) 5' transfer RNA (tRNA) half
tggtctagcggttaggattcctggttt

SEQ ID NO: 10692 - DNA, 28 bp, Artificial Sequence
  synthetic circulating small noncoding RNA (sncRNA) 5' transfer RNA (tRNA) half
ccgtgatcgtataggggttagtactctg

SEQ ID NO: 10693 - DNA, 21 bp, Artificial Sequence
  synthetic circulating small noncoding RNA (sncRNA) 5' transfer RNA (tRNA) half
ggttcgagccccagtggaacc

SEQ ID NO: 10694 - DNA, 14 bp, Artificial Sequence
  synthetic circulating small noncoding RNA (sncRNA) 5' transfer RNA (tRNA) half
tgcgacccgggttc

SEQ ID NO: 10695 - DNA, 15 bp, Artificial Sequence
  synthetic circulating small noncoding RNA (sncRNA) 5' transfer RNA (tRNA) half
ggcgtccctgggtgg

SEQ ID NO: 10696 - DNA, 16 bp, Artificial Sequence
  synthetic circulating small noncoding RNA (sncRNA) 5' transfer RNA (tRNA) half
gtgtcagaagtgggat

SEQ ID NO: 10697 - DNA, 12 bp, Artificial Sequence
  synthetic circulating small noncoding RNA (sncRNA) 5' transfer RNA (tRNA) half
tcaagaggtccc

SEQ ID NO: 10698 - DNA, 12 bp, Artificial Sequence
  synthetic circulating small noncoding RNA (sncRNA) 5' transfer RNA (tRNA) half
cggggatcgaac

SEQ ID NO: 10699 - DNA, 35 bp, Artificial Sequence
  synthetic circulating small noncoding RNA (sncRNA) 5' transfer RNA (tRNA) half
agtggtagaattctcgcctgccacgcgggaggccc

SEQ ID NO: 10700 - DNA, 34 bp, Artificial Sequence
  synthetic circulating small noncoding RNA (sncRNA) 5' transfer RNA (tRNA) half
agtctgatgctctaccgactgagctatccgggct

SEQ ID NO: 10701 - DNA, 26 bp, Artificial Sequence
  synthetic circulating small noncoding RNA (sncRNA) 5' transfer RNA (tRNA) half
gcccggatagctcagtcggtagagca

SEQ ID NO: 10702 - DNA, 22 bp, Artificial Sequence
  synthetic circulating small noncoding RNA (sncRNA) 5' transfer RNA (tRNA) half
ctcgcacccgaagcgagaatca

SEQ ID NO: 10703 - DNA, 14 bp, Artificial Sequence
  synthetic circulating small noncoding RNA (sncRNA) 5' transfer RNA (tRNA) half
cccattcttgcgac

SEQ ID NO: 10704 - DNA, 18 bp, Artificial Sequence
  synthetic circulating small noncoding RNA (sncRNA) 5' transfer RNA (tRNA) half
gtagcggttatcacgtct

SEQ ID NO: 10705 - DNA, 32 bp, Artificial Sequence
  synthetic circulating small noncoding RNA (sncRNA) 5' transfer RNA (tRNA) half
aaaggttggtggttcaagcccacccagggacg

SEQ ID NO: 10706 - DNA, 10 bp, Artificial Sequence
  synthetic circulating small noncoding RNA (sncRNA) 5' transfer RNA (tRNA) half
gaccgctcgg

SEQ ID NO: 10707 - DNA, 12 bp, Artificial Sequence
  synthetic circulating small noncoding RNA (sncRNA) 5' transfer RNA (tRNA) half
cttaaccactcg

SEQ ID NO: 10708 - DNA, 15 bp, Artificial Sequence
  synthetic circulating small noncoding RNA (sncRNA) 5' transfer RNA (tRNA) half
ctgcgccactctgct

SEQ ID NO: 10709 - DNA, 21 bp, Artificial Sequence
  synthetic circulating small noncoding RNA (sncRNA) 5' transfer RNA (tRNA) half
aatggttagcactctggactc

SEQ ID NO: 10710 - DNA, 24 bp, Artificial Sequence
  synthetic circulating small noncoding RNA (sncRNA) 5' transfer RNA (tRNA) half
ttcgatccatcgacctctgggtta

SEQ ID NO: 10711 - DNA, 21 bp, Artificial Sequence
  synthetic circulating small noncoding RNA (sncRNA) 5' transfer RNA (tRNA) half
cgagaattctaccactgaacc

SEQ ID NO: 10712 - DNA, 42 bp, Artificial Sequence
  synthetic circulating small noncoding RNA (sncRNA) 5' transfer RNA (tRNA) half
gcctgggtgaaaaccaggaatcctaaccgctagaccatgtgg

SEQ ID NO: 10713 - DNA, 8 bp, Artificial Sequence
  synthetic circulating small noncoding RNA (sncRNA) 5' transfer RNA (tRNA) half
cgagccag

SEQ ID NO: 10714 - DNA, 24 bp, Artificial Sequence
  synthetic circulating small noncoding RNA (sncRNA) 5' transfer RNA (tRNA) half
gaactcggatcgctggattcagag

SEQ ID NO: 10715 - DNA, 16 bp, Artificial Sequence
  synthetic circulating small noncoding RNA (sncRNA) 5' transfer RNA (tRNA) half
tcaggatggccgagcg

SEQ ID NO: 10716 - DNA, 24 bp, Artificial Sequence
  synthetic circulating small noncoding RNA (sncRNA) 5' transfer RNA (tRNA) half
agtctccccgtcggggaatcgaac

SEQ ID NO: 10717 - DNA, 22 bp, Artificial Sequence
  synthetic circulating small noncoding RNA (sncRNA) 5' transfer RNA (tRNA) half
ggggaattagctcaaatggtag

SEQ ID NO: 10718 - DNA, 14 bp, Artificial Sequence
  synthetic circulating small noncoding RNA (sncRNA) 5' transfer RNA (tRNA) half
aggcgaacgtgata

SEQ ID NO: 10719 - DNA, 32 bp, Artificial Sequence
  synthetic circulating small noncoding RNA (sncRNA) 5' transfer RNA (tRNA) half
cagcgatccgagttcaaatctcggtgggacct

SEQ ID NO: 10720 - DNA, 22 bp, Artificial Sequence
  synthetic circulating small noncoding RNA (sncRNA) 5' transfer RNA (tRNA) half
ctcaccgccgcggcccgggttc

SEQ ID NO: 10721 - DNA, 31 bp, Artificial Sequence
  synthetic circulating small noncoding RNA (sncRNA) 5' transfer RNA (tRNA) half
caaggtcgcgggttcgatccccgtacgggcc

SEQ ID NO: 10722 - DNA, 29 bp, Artificial Sequence
  synthetic circulating small noncoding RNA (sncRNA) 5' transfer RNA (tRNA) half
attggtggttcaatggtagaattctcgcc

SEQ ID NO: 10723 - DNA, 23 bp, Artificial Sequence
  synthetic circulating small noncoding RNA (sncRNA) 5' transfer RNA (tRNA) half
gattcagagtccagagtgctaac

SEQ ID NO: 10724 - DNA, 29 bp, Artificial Sequence
  synthetic circulating small noncoding RNA (sncRNA) 5' transfer RNA (tRNA) half
attgtgggttcgagtcccatctgggtcgc

SEQ ID NO: 10725 - DNA, 33 bp, Artificial Sequence
  synthetic circulating small noncoding RNA (sncRNA) 5' transfer RNA (tRNA) half
tccttaggtcgctggttcgattccggctcgaag

SEQ ID NO: 10726 - DNA, 8 bp, Artificial Sequence
  synthetic circulating small noncoding RNA (sncRNA) 5' transfer RNA (tRNA) half
gaaccccg

SEQ ID NO: 10727 - DNA, 22 bp, Artificial Sequence
  synthetic circulating small noncoding RNA (sncRNA) 5' transfer RNA (tRNA) half
ccgcggcggtgagagcgccgaa

SEQ ID NO: 10728 - DNA, 36 bp, Artificial Sequence
  synthetic circulating small noncoding RNA (sncRNA) 5' transfer RNA (tRNA) half
ggtccgagaggtcccgggttcaaatcccggacgagc

SEQ ID NO: 10729 - DNA, 28 bp, Artificial Sequence
  synthetic circulating small noncoding RNA (sncRNA) 5' transfer RNA (tRNA) half
ggcttgttggtctaggggtatgattctc

SEQ ID NO: 10730 - DNA, 23 bp, Artificial Sequence
  synthetic circulating small noncoding RNA (sncRNA) 5' transfer RNA (tRNA) half
aaaggccgagaccgtccctgggt

SEQ ID NO: 10731 - DNA, 23 bp, Artificial Sequence
  synthetic circulating small noncoding RNA (sncRNA) 5' transfer RNA (tRNA) half
gccggggatcgaacccggggcct

SEQ ID NO: 10732 - DNA, 11 bp, Artificial Sequence
  synthetic circulating small noncoding RNA (sncRNA) 5' transfer RNA (tRNA) half
gttcgactccc

SEQ ID NO: 10733 - DNA, 43 bp, Artificial Sequence
  synthetic circulating small noncoding RNA (sncRNA) 5' transfer RNA (tRNA) half
tctgaatccagcgatccgagttcaaatctcggtggaacctact

SEQ ID NO: 10734 - DNA, 23 bp, Artificial Sequence
  synthetic circulating small noncoding RNA (sncRNA) 5' transfer RNA (tRNA) half
tgggttcgagccccagtggaacc

SEQ ID NO: 10735 - DNA, 19 bp, Artificial Sequence
  synthetic circulating small noncoding RNA (sncRNA) 5' transfer RNA (tRNA) half
tctaccgactgagctagcc

SEQ ID NO: 10736 - DNA, 14 bp, Artificial Sequence
  synthetic circulating small noncoding RNA (sncRNA) 5' transfer RNA (tRNA) half
cgcggcggtgagag

SEQ ID NO: 10737 - DNA, 43 bp, Artificial Sequence
  synthetic circulating small noncoding RNA (sncRNA) 5' transfer RNA (tRNA) half
agtctccccgtcggggaatcgaaccccggtctcccgcgtgaca

SEQ ID NO: 10738 - DNA, 13 bp, Artificial Sequence
  synthetic circulating small noncoding RNA (sncRNA) 5' transfer RNA (tRNA) half
agaccaccaggga

SEQ ID NO: 10739 - DNA, 24 bp, Artificial Sequence
  synthetic circulating small noncoding RNA (sncRNA) 5' transfer RNA (tRNA) half
caggcggggatactaaccactata

SEQ ID NO: 10740 - DNA, 22 bp, Artificial Sequence
  synthetic circulating small noncoding RNA (sncRNA) 5' transfer RNA (tRNA) half
cgcagcggaagcgtgctgggcc

SEQ ID NO: 10741 - DNA, 13 bp, Artificial Sequence
  synthetic circulating small noncoding RNA (sncRNA) 5' transfer RNA (tRNA) half
gaaccccggtctc

SEQ ID NO: 10742 - DNA, 11 bp, Artificial Sequence
  synthetic circulating small noncoding RNA (sncRNA) 5' transfer RNA (tRNA) half
ccatcctcgtc

SEQ ID NO: 10743 - DNA, 29 bp, Artificial Sequence
  synthetic circulating small noncoding RNA (sncRNA) 5' transfer RNA (tRNA) half
tgactcggattcgaaccgaggttgctgcg

SEQ ID NO: 10744 - DNA, 27 bp, Artificial Sequence
  synthetic circulating small noncoding RNA (sncRNA) 5' transfer RNA (tRNA) half
agtcctccgctctaccaactgagctat

SEQ ID NO: 10745 - DNA, 24 bp, Artificial Sequence
  synthetic circulating small noncoding RNA (sncRNA) 5' transfer RNA (tRNA) half
atggttagcactctggactctgaa

SEQ ID NO: 10746 - DNA, 16 bp, Artificial Sequence
  synthetic circulating small noncoding RNA (sncRNA) 5' transfer RNA (tRNA) half
gtctagtggtatgatt

SEQ ID NO: 10747 - DNA, 13 bp, Artificial Sequence
  synthetic circulating small noncoding RNA (sncRNA) 5' transfer RNA (tRNA) half
ccggggacctctt

SEQ ID NO: 10748 - DNA, 10 bp, Artificial Sequence
  synthetic circulating small noncoding RNA (sncRNA) 5' transfer RNA (tRNA) half
cggtggaacc

SEQ ID NO: 10749 - DNA, 25 bp, Artificial Sequence
  synthetic circulating small noncoding RNA (sncRNA) 5' transfer RNA (tRNA) half
tggagggggcacccggatttgaacc

SEQ ID NO: 10750 - DNA, 15 bp, Artificial Sequence
  synthetic circulating small noncoding RNA (sncRNA) 5' transfer RNA (tRNA) half
gatgctctaccaact

SEQ ID NO: 10751 - DNA, 19 bp, Artificial Sequence
  synthetic circulating small noncoding RNA (sncRNA) 5' transfer RNA (tRNA) half
gccgcggcggtgagagcgc

SEQ ID NO: 10752 - DNA, 37 bp, Artificial Sequence
  synthetic circulating small noncoding RNA (sncRNA) 5' transfer RNA (tRNA) half
gttagcactctggactttgaatccagcgatccgagtt

SEQ ID NO: 10753 - DNA, 11 bp, Artificial Sequence
  synthetic circulating small noncoding RNA (sncRNA) 5' transfer RNA (tRNA) half
cctgtcacgcg

SEQ ID NO: 10754 - DNA, 19 bp, Artificial Sequence
  synthetic circulating small noncoding RNA (sncRNA) 5' transfer RNA (tRNA) half
accactcggccatcgctgc

SEQ ID NO: 10755 - DNA, 15 bp, Artificial Sequence
  synthetic circulating small noncoding RNA (sncRNA) 5' transfer RNA (tRNA) half
caggatggccgagcg

SEQ ID NO: 10756 - DNA, 21 bp, Artificial Sequence
  synthetic circulating small noncoding RNA (sncRNA) 5' transfer RNA (tRNA) half
gatagcagaggatggtttcga

SEQ ID NO: 10757 - DNA, 9 bp, Artificial Sequence
  synthetic circulating small noncoding RNA (sncRNA) 5' transfer RNA (tRNA) half
cgaacccgg

SEQ ID NO: 10758 - DNA, 21 bp, Artificial Sequence
  synthetic circulating small noncoding RNA (sncRNA) 5' transfer RNA (tRNA) half
atcgaacccgggccgcggcgg

SEQ ID NO: 10759 - DNA, 35 bp, Artificial Sequence
  synthetic circulating small noncoding RNA (sncRNA) 5' transfer RNA (tRNA) half
gttccttcgagccggattcgaaccagcgacctaag

SEQ ID NO: 10760 - DNA, 27 bp, Artificial Sequence
  synthetic circulating small noncoding RNA (sncRNA) 5' transfer RNA (tRNA) half
gcctgggtgaaaaccaggaatcctaac

SEQ ID NO: 10761 - DNA, 26 bp, Artificial Sequence
  synthetic circulating small noncoding RNA (sncRNA) 5' transfer RNA (tRNA) half
gaccccgacgtgatttgaacacgcaa

SEQ ID NO: 10762 - DNA, 21 bp, Artificial Sequence
  synthetic circulating small noncoding RNA (sncRNA) 5' transfer RNA (tRNA) half
tcggatcgctggattcaaagt

SEQ ID NO: 10763 - DNA, 29 bp, Artificial Sequence
  synthetic circulating small noncoding RNA (sncRNA) 5' transfer RNA (tRNA) half
gtcgagccagccaggagtcgaacctagaa

SEQ ID NO: 10764 - DNA, 21 bp, Artificial Sequence
  synthetic circulating small noncoding RNA (sncRNA) 5' transfer RNA (tRNA) half
agttgtcaggagtgggattcg

SEQ ID NO: 10765 - DNA, 23 bp, Artificial Sequence
  synthetic circulating small noncoding RNA (sncRNA) 5' transfer RNA (tRNA) half
aggattcgaacctgtgcggggaa

SEQ ID NO: 10766 - DNA, 27 bp, Artificial Sequence
  synthetic circulating small noncoding RNA (sncRNA) 5' transfer RNA (tRNA) half
gggagaccggggttcgattccccgacg

SEQ ID NO: 10767 - DNA, 30 bp, Artificial Sequence
  synthetic circulating small noncoding RNA (sncRNA) 5' transfer RNA (tRNA) half
ctcgtccgggatttgaacccgggacctctc

SEQ ID NO: 10768 - DNA, 36 bp, Artificial Sequence
  synthetic circulating small noncoding RNA (sncRNA) 5' transfer RNA (tRNA) half
tcttcggaggcgtgggttcgaatcccaccgctgcca

SEQ ID NO: 10769 - DNA, 21 bp, Artificial Sequence
  synthetic circulating small noncoding RNA (sncRNA) 5' transfer RNA (tRNA) half
gagtcgaacccgggccgcctg

SEQ ID NO: 10770 - DNA, 23 bp, Artificial Sequence
  synthetic circulating small noncoding RNA (sncRNA) 5' transfer RNA (tRNA) half
gggttcaagtccctgttcgggcg

SEQ ID NO: 10771 - DNA, 21 bp, Artificial Sequence
  synthetic circulating small noncoding RNA (sncRNA) 5' transfer RNA (tRNA) half
agtccaatgcgctatccattg

SEQ ID NO: 10772 - DNA, 12 bp, Artificial Sequence
  synthetic circulating small noncoding RNA (sncRNA) 5' transfer RNA (tRNA) half
ccgccgcggccc

SEQ ID NO: 10773 - DNA, 30 bp, Artificial Sequence
  synthetic circulating small noncoding RNA (sncRNA) 5' transfer RNA (tRNA) half
ttaggtcgctggttcgattccggctcgaag

SEQ ID NO: 10774 - DNA, 32 bp, Artificial Sequence
  synthetic circulating small noncoding RNA (sncRNA) 5' transfer RNA (tRNA) half
accccgggtgggactcgaacccacaatccctg

SEQ ID NO: 10775 - DNA, 22 bp, Artificial Sequence
  synthetic circulating small noncoding RNA (sncRNA) 5' transfer RNA (tRNA) half
gggttcaaatcccggacgagcc

SEQ ID NO: 10776 - DNA, 32 bp, Artificial Sequence
  synthetic circulating small noncoding RNA (sncRNA) 5' transfer RNA (tRNA) half
tacggggatcgaacccgcgaccttggcgttat

SEQ ID NO: 10777 - DNA, 38 bp, Artificial Sequence
  synthetic circulating small noncoding RNA (sncRNA) 5' transfer RNA (tRNA) half
tgtatgaggccccgggttcaatccccggcatctccaac

SEQ ID NO: 10778 - DNA, 18 bp, Artificial Sequence
  synthetic circulating small noncoding RNA (sncRNA) 5' transfer RNA (tRNA) half
cgacgaggatgggattcg

SEQ ID NO: 10779 - DNA, 16 bp, Artificial Sequence
  synthetic circulating small noncoding RNA (sncRNA) 5' transfer RNA (tRNA) half
ctcatgctctaccgac

SEQ ID NO: 10780 - DNA, 20 bp, Artificial Sequence
  synthetic circulating small noncoding RNA (sncRNA) 5' transfer RNA (tRNA) half
gcatgggtggttcagtggta

SEQ ID NO: 10781 - DNA, 20 bp, Artificial Sequence
  synthetic circulating small noncoding RNA (sncRNA) 5' transfer RNA (tRNA) half
aagtccagagtgctaaccat

SEQ ID NO: 10782 - DNA, 12 bp, Artificial Sequence
  synthetic circulating small noncoding RNA (sncRNA) 5' transfer RNA (tRNA) half
acgcgggagacc

SEQ ID NO: 10783 - DNA, 21 bp, Artificial Sequence
  synthetic circulating small noncoding RNA (sncRNA) 5' transfer RNA (tRNA) half
gcggcccgggttcgactcccg

SEQ ID NO: 10784 - DNA, 25 bp, Artificial Sequence
  synthetic circulating small noncoding RNA (sncRNA) 5' transfer RNA (tRNA) half
gaacgtgataaccactacactacgg

SEQ ID NO: 10785 - DNA, 26 bp, Artificial Sequence
  synthetic circulating small noncoding RNA (sncRNA) 5' transfer RNA (tRNA) half
tcgcgggttcgatccccgtacgggcc

SEQ ID NO: 10786 - DNA, 15 bp, Artificial Sequence
  synthetic circulating small noncoding RNA (sncRNA) 5' transfer RNA (tRNA) half
cgagaattctaccac

SEQ ID NO: 10787 - DNA, 15 bp, Artificial Sequence
  synthetic circulating small noncoding RNA (sncRNA) 5' transfer RNA (tRNA) half
ccgtgatcgtatagt

SEQ ID NO: 10788 - DNA, 18 bp, Artificial Sequence
  synthetic circulating small noncoding RNA (sncRNA) 5' transfer RNA (tRNA) half
gattcgaacccacaacct

SEQ ID NO: 10789 - DNA, 30 bp, Artificial Sequence
  synthetic circulating small noncoding RNA (sncRNA) 5' transfer RNA (tRNA) half
cgagccagccaggagtcgaacctagaatct

SEQ ID NO: 10790 - DNA, 33 bp, Artificial Sequence
  synthetic circulating small noncoding RNA (sncRNA) 5' transfer RNA (tRNA) half
cttccctggtggtctagtggttaggattcggcg

SEQ ID NO: 10791 - DNA, 23 bp, Artificial Sequence
  synthetic circulating small noncoding RNA (sncRNA) 5' transfer RNA (tRNA) half
tccgcagcgagcagggttcgaac

SEQ ID NO: 10792 - DNA, 22 bp, Artificial Sequence
  synthetic circulating small noncoding RNA (sncRNA) 5' transfer RNA (tRNA) half
cagcgccttagaccgctcggcc

SEQ ID NO: 10793 - DNA, 15 bp, Artificial Sequence
  synthetic circulating small noncoding RNA (sncRNA) 5' transfer RNA (tRNA) half
ccagagtgctaacca

SEQ ID NO: 10794 - DNA, 21 bp, Artificial Sequence
  synthetic circulating small noncoding RNA (sncRNA) 5' transfer RNA (tRNA) half
ttccatagtgtagcggttatc

SEQ ID NO: 10795 - DNA, 42 bp, Artificial Sequence
  synthetic circulating small noncoding RNA (sncRNA) 5' transfer RNA (tRNA) half
ggcagcggtgggattcgaacccacgccatcgaaatgactgga

SEQ ID NO: 10796 - DNA, 20 bp, Artificial Sequence
  synthetic circulating small noncoding RNA (sncRNA) 5' transfer RNA (tRNA) half
acccgggacctctcgcaccc

SEQ ID NO: 10797 - DNA, 13 bp, Artificial Sequence
  synthetic circulating small noncoding RNA (sncRNA) 5' transfer RNA (tRNA) half
ccttaaccactcg

SEQ ID NO: 10798 - DNA, 23 bp, Artificial Sequence
  synthetic circulating small noncoding RNA (sncRNA) 5' transfer RNA (tRNA) half
cctccccgtcggggaattgaacc

SEQ ID NO: 10799 - DNA, 11 bp, Artificial Sequence
  synthetic circulating small noncoding RNA (sncRNA) 5' transfer RNA (tRNA) half
ttcgagtcccg

SEQ ID NO: 10800 - DNA, 14 bp, Artificial Sequence
  synthetic circulating small noncoding RNA (sncRNA) 5' transfer RNA (tRNA) half
aacccggggcctca

SEQ ID NO: 10801 - DNA, 15 bp, Artificial Sequence
  synthetic circulating small noncoding RNA (sncRNA) 5' transfer RNA (tRNA) half
aaccctcaatcttct

SEQ ID NO: 10802 - DNA, 33 bp, Artificial Sequence
  synthetic circulating small noncoding RNA (sncRNA) 5' transfer RNA (tRNA) half
aacccgggccgcggcggtgagagcgccgaatcc

SEQ ID NO: 10803 - DNA, 18 bp, Artificial Sequence
  synthetic circulating small noncoding RNA (sncRNA) 5' transfer RNA (tRNA) half
ccactcggccacgctacc

SEQ ID NO: 10804 - DNA, 39 bp, Artificial Sequence
  synthetic circulating small noncoding RNA (sncRNA) 5' transfer RNA (tRNA) half
tggttagcactctggactctgaatccagcgatccgagtt

SEQ ID NO: 10805 - DNA, 34 bp, Artificial Sequence
  synthetic circulating small noncoding RNA (sncRNA) 5' transfer RNA (tRNA) half
tgtatgaggccccgggttcgatccccggcatctc

SEQ ID NO: 10806 - DNA, 20 bp, Artificial Sequence
  synthetic circulating small noncoding RNA (sncRNA) 5' transfer RNA (tRNA) half
ccggatgatcctcagtggtc

SEQ ID NO: 10807 - DNA, 24 bp, Artificial Sequence
  synthetic circulating small noncoding RNA (sncRNA) 5' transfer RNA (tRNA) half
ggttcaattccacctttcgggcgg

SEQ ID NO: 10808 - DNA, 21 bp, Artificial Sequence
  synthetic circulating small noncoding RNA (sncRNA) 5' transfer RNA (tRNA) half
ggcgaatgtgataaccactac

SEQ ID NO: 10809 - DNA, 20 bp, Artificial Sequence
  synthetic circulating small noncoding RNA (sncRNA) 5' transfer RNA (tRNA) half
ggaatcgaacccgggccgcg

SEQ ID NO: 10810 - DNA, 7 bp, Artificial Sequence
  synthetic circulating small noncoding RNA (sncRNA) 5' transfer RNA (tRNA) half
ctcgccg

SEQ ID NO: 10811 - DNA, 40 bp, Artificial Sequence
  synthetic circulating small noncoding RNA (sncRNA) 5' transfer RNA (tRNA) half
gtgttcccacaccgggagtcgaacccgggccgcctgggtg

SEQ ID NO: 10812 - DNA, 16 bp, Artificial Sequence
  synthetic circulating small noncoding RNA (sncRNA) 5' transfer RNA (tRNA) half
gggaatcgaaccccgg

SEQ ID NO: 10813 - DNA, 23 bp, Artificial Sequence
  synthetic circulating small noncoding RNA (sncRNA) 5' transfer RNA (tRNA) half
tctgaatccagcgacccgagttc

SEQ ID NO: 10814 - DNA, 21 bp, Artificial Sequence
  synthetic circulating small noncoding RNA (sncRNA) 5' transfer RNA (tRNA) half
ggttagcactctggactctga

SEQ ID NO: 10815 - DNA, 19 bp, Artificial Sequence
  synthetic circulating small noncoding RNA (sncRNA) 5' transfer RNA (tRNA) half
gttcaggtcgcagtctccc

SEQ ID NO: 10816 - DNA, 17 bp, Artificial Sequence
  synthetic circulating small noncoding RNA (sncRNA) 5' transfer RNA (tRNA) half
cgagaggtcccgggttc

SEQ ID NO: 10817 - DNA, 11 bp, Artificial Sequence
  synthetic circulating small noncoding RNA (sncRNA) 5' transfer RNA (tRNA) half
agcggtctaag

SEQ ID NO: 10818 - DNA, 15 bp, Artificial Sequence
  synthetic circulating small noncoding RNA (sncRNA) 5' transfer RNA (tRNA) half
accctcaatcttctg

SEQ ID NO: 10819 - DNA, 20 bp, Artificial Sequence
  synthetic circulating small noncoding RNA (sncRNA) 5' transfer RNA (tRNA) half
aaaaccgtagtcggcaggat

SEQ ID NO: 10820 - DNA, 18 bp, Artificial Sequence
  synthetic circulating small noncoding RNA (sncRNA) 5' transfer RNA (tRNA) half
tagctcagctggtagagc

SEQ ID NO: 10821 - DNA, 21 bp, Artificial Sequence
  synthetic circulating small noncoding RNA (sncRNA) 5' transfer RNA (tRNA) half
gtggtctggggtgcaggcttc

SEQ ID NO: 10822 - DNA, 26 bp, Artificial Sequence
  synthetic circulating small noncoding RNA (sncRNA) 5' transfer RNA (tRNA) half
ccggatagctcagtcggtagagcatc

SEQ ID NO: 10823 - DNA, 32 bp, Artificial Sequence
  synthetic circulating small noncoding RNA (sncRNA) 5' transfer RNA (tRNA) half
ctggggattgtgggttcgagtcccatctgggt

SEQ ID NO: 10824 - DNA, 25 bp, Artificial Sequence
  synthetic circulating small noncoding RNA (sncRNA) 5' transfer RNA (tRNA) half
ctccttcgagccggattcgaaccag

SEQ ID NO: 10825 - DNA, 14 bp, Artificial Sequence
  synthetic circulating small noncoding RNA (sncRNA) 5' transfer RNA (tRNA) half
tctcggtggaacct

SEQ ID NO: 10826 - DNA, 20 bp, Artificial Sequence
  synthetic circulating small noncoding RNA (sncRNA) 5' transfer RNA (tRNA) half
aaatggtggagatgccgggg

SEQ ID NO: 10827 - DNA, 16 bp, Artificial Sequence
  synthetic circulating small noncoding RNA (sncRNA) 5' transfer RNA (tRNA) half
attcccggtcagggaa

SEQ ID NO: 10828 - DNA, 38 bp, Artificial Sequence
  synthetic circulating small noncoding RNA (sncRNA) 5' transfer RNA (tRNA) half
atcagaagattccaggttcgactcctggctggctcgtt

SEQ ID NO: 10829 - DNA, 18 bp, Artificial Sequence
  synthetic circulating small noncoding RNA (sncRNA) 5' transfer RNA (tRNA) half
gccaaatcctaaccacta

SEQ ID NO: 10830 - DNA, 12 bp, Artificial Sequence
  synthetic circulating small noncoding RNA (sncRNA) 5' transfer RNA (tRNA) half
cgggaggcccgg

SEQ ID NO: 10831 - DNA, 16 bp, Artificial Sequence
  synthetic circulating small noncoding RNA (sncRNA) 5' transfer RNA (tRNA) half
gtatgattctcggttt

SEQ ID NO: 10832 - DNA, 24 bp, Artificial Sequence
  synthetic circulating small noncoding RNA (sncRNA) 5' transfer RNA (tRNA) half
tggtgtaatggttagcactctgga

SEQ ID NO: 10833 - DNA, 14 bp, Artificial Sequence
  synthetic circulating small noncoding RNA (sncRNA) 5' transfer RNA (tRNA) half
ccccggcacctcca

SEQ ID NO: 10834 - DNA, 32 bp, Artificial Sequence
  synthetic circulating small noncoding RNA (sncRNA) 5' transfer RNA (tRNA) half
ggcccagcatgcttccgctgcgccactctgct

SEQ ID NO: 10835 - DNA, 19 bp, Artificial Sequence
  synthetic circulating small noncoding RNA (sncRNA) 5' transfer RNA (tRNA) half
cagtgaggtcccaccgaga

SEQ ID NO: 10836 - DNA, 14 bp, Artificial Sequence
  synthetic circulating small noncoding RNA (sncRNA) 5' transfer RNA (tRNA) half
ttcccggtcaggga

SEQ ID NO: 10837 - DNA, 30 bp, Artificial Sequence
  synthetic circulating small noncoding RNA (sncRNA) 5' transfer RNA (tRNA) half
accaggagtggggttcgaacccacgcagac

SEQ ID NO: 10838 - DNA, 24 bp, Artificial Sequence
  synthetic circulating small noncoding RNA (sncRNA) 5' transfer RNA (tRNA) half
ggcgagaattctaccattgaacta

SEQ ID NO: 10839 - DNA, 20 bp, Artificial Sequence
  synthetic circulating small noncoding RNA (sncRNA) 5' transfer RNA (tRNA) half
cttaaccactcggccacctc

SEQ ID NO: 10840 - DNA, 15 bp, Artificial Sequence
  synthetic circulating small noncoding RNA (sncRNA) 5' transfer RNA (tRNA) half
agtgtagtggttatc

SEQ ID NO: 10841 - DNA, 16 bp, Artificial Sequence
  synthetic circulating small noncoding RNA (sncRNA) 5' transfer RNA (tRNA) half
ggttatcacatctgct

SEQ ID NO: 10842 - DNA, 20 bp, Artificial Sequence
  synthetic circulating small noncoding RNA (sncRNA) 5' transfer RNA (tRNA) half
tccggctcgaaggagacagt

SEQ ID NO: 10843 - DNA, 24 bp, Artificial Sequence
  synthetic circulating small noncoding RNA (sncRNA) 5' transfer RNA (tRNA) half
taccgggagtcgaacccgggccgc

SEQ ID NO: 10844 - DNA, 21 bp, Artificial Sequence
  synthetic circulating small noncoding RNA (sncRNA) 5' transfer RNA (tRNA) half
gatccatcgacctctgggtta

SEQ ID NO: 10845 - DNA, 18 bp, Artificial Sequence
  synthetic circulating small noncoding RNA (sncRNA) 5' transfer RNA (tRNA) half
tcaatccccggcatctcc

SEQ ID NO: 10846 - DNA, 18 bp, Artificial Sequence
  synthetic circulating small noncoding RNA (sncRNA) 5' transfer RNA (tRNA) half
cgtcgactctggcgggac

SEQ ID NO: 10847 - DNA, 23 bp, Artificial Sequence
  synthetic circulating small noncoding RNA (sncRNA) 5' transfer RNA (tRNA) half
acgacgaggatgggattcgaacc

SEQ ID NO: 10848 - DNA, 29 bp, Artificial Sequence
  synthetic circulating small noncoding RNA (sncRNA) 5' transfer RNA (tRNA) half
acaggagatcctgggttcgaatcccagcg

SEQ ID NO: 10849 - DNA, 18 bp, Artificial Sequence
  synthetic circulating small noncoding RNA (sncRNA) 5' transfer RNA (tRNA) half
ctaagcgagaatcatacc

SEQ ID NO: 10850 - DNA, 19 bp, Artificial Sequence
  synthetic circulating small noncoding RNA (sncRNA) 5' transfer RNA (tRNA) half
ccgaagcgagaatcatacc

SEQ ID NO: 10851 - DNA, 25 bp, Artificial Sequence
  synthetic circulating small noncoding RNA (sncRNA) 5' transfer RNA (tRNA) half
agcgcccgaacagggacttgaaccc

SEQ ID NO: 10852 - DNA, 37 bp, Artificial Sequence
  synthetic circulating small noncoding RNA (sncRNA) 5' transfer RNA (tRNA) half
tggtggagatgccggggatcgaacccggggcctcata

SEQ ID NO: 10853 - DNA, 35 bp, Artificial Sequence
  synthetic circulating small noncoding RNA (sncRNA) 5' transfer RNA (tRNA) half
agccagggattgtgggttcgagtcccatctggggt

SEQ ID NO: 10854 - DNA, 13 bp, Artificial Sequence
  synthetic circulating small noncoding RNA (sncRNA) 5' transfer RNA (tRNA) half
ggtgcgagaggtc

SEQ ID NO: 10855 - DNA, 25 bp, Artificial Sequence
  synthetic circulating small noncoding RNA (sncRNA) 5' transfer RNA (tRNA) half
tgcaggttcgagtcctgccgcggtc

SEQ ID NO: 10856 - DNA, 15 bp, Artificial Sequence
  synthetic circulating small noncoding RNA (sncRNA) 5' transfer RNA (tRNA) half
aaccccgtccgtgcc

SEQ ID NO: 10857 - DNA, 21 bp, Artificial Sequence
  synthetic circulating small noncoding RNA (sncRNA) 5' transfer RNA (tRNA) half
ctaccgactgagctatccggg

SEQ ID NO: 10858 - DNA, 16 bp, Artificial Sequence
  synthetic circulating small noncoding RNA (sncRNA) 5' transfer RNA (tRNA) half
gccgtgatcgtatagt

SEQ ID NO: 10859 - DNA, 14 bp, Artificial Sequence
  synthetic circulating small noncoding RNA (sncRNA) 5' transfer RNA (tRNA) half
gattcagagtccag

SEQ ID NO: 10860 - DNA, 24 bp, Artificial Sequence
  synthetic circulating small noncoding RNA (sncRNA) 5' transfer RNA (tRNA) half
ggttcgattcccggtcagggaagc

SEQ ID NO: 10861 - DNA, 21 bp, Artificial Sequence
  synthetic circulating small noncoding RNA (sncRNA) 5' transfer RNA (tRNA) half
ggagggggcacccggatttga

SEQ ID NO: 10862 - DNA, 9 bp, Artificial Sequence
  synthetic circulating small noncoding RNA (sncRNA) 5' transfer RNA (tRNA) half
cccggctag

SEQ ID NO: 10863 - DNA, 22 bp, Artificial Sequence
  synthetic circulating small noncoding RNA (sncRNA) 5' transfer RNA (tRNA) half
gcgaccacgaagggactcgaac

SEQ ID NO: 10864 - DNA, 43 bp, Artificial Sequence
  synthetic circulating small noncoding RNA (sncRNA) 5' transfer RNA (tRNA) half
tacctccccgtcggggaatcgaaccccggtctcccgcgtgaca

SEQ ID NO: 10865 - DNA, 30 bp, Artificial Sequence
  synthetic circulating small noncoding RNA (sncRNA) 5' transfer RNA (tRNA) half
attcggcgctctcaccgccgcggcccgggt

SEQ ID NO: 10866 - DNA, 19 bp, Artificial Sequence
  synthetic circulating small noncoding RNA (sncRNA) 5' transfer RNA (tRNA) half
tcgactcccggtatgggaa

SEQ ID NO: 10867 - DNA, 20 bp, Artificial Sequence
  synthetic circulating small noncoding RNA (sncRNA) 5' transfer RNA (tRNA) half
ttcgactcccggtatgggaa

SEQ ID NO: 10868 - DNA, 24 bp, Artificial Sequence
  synthetic circulating small noncoding RNA (sncRNA) 5' transfer RNA (tRNA) half
ggctcgttggtctaggggtatgat

SEQ ID NO: 10869 - DNA, 20 bp, Artificial Sequence
  synthetic circulating small noncoding RNA (sncRNA) 5' transfer RNA (tRNA) half
agagtccagagtgctaacca

SEQ ID NO: 10870 - DNA, 13 bp, Artificial Sequence
  synthetic circulating small noncoding RNA (sncRNA) 5' transfer RNA (tRNA) half
tcggatcgctgga

SEQ ID NO: 10871 - DNA, 20 bp, Artificial Sequence
  synthetic circulating small noncoding RNA (sncRNA) 5' transfer RNA (tRNA) half
ttctcgcctgccacgcggga

SEQ ID NO: 10872 - DNA, 15 bp, Artificial Sequence
  synthetic circulating small noncoding RNA (sncRNA) 5' transfer RNA (tRNA) half
cggggttcgattccc

SEQ ID NO: 10873 - DNA, 24 bp, Artificial Sequence
  synthetic circulating small noncoding RNA (sncRNA) 5' transfer RNA (tRNA) half
agattaagagtctcatgctctacc

SEQ ID NO: 10874 - DNA, 34 bp, Artificial Sequence
  synthetic circulating small noncoding RNA (sncRNA) 5' transfer RNA (tRNA) half
gcgaaaggtccccggttcgaaaccgggcggaaac

SEQ ID NO: 10875 - DNA, 30 bp, Artificial Sequence
  synthetic circulating small noncoding RNA (sncRNA) 5' transfer RNA (tRNA) half
agtggtagaattctcgcctgccacgcggga

SEQ ID NO: 10876 - DNA, 29 bp, Artificial Sequence
  synthetic circulating small noncoding RNA (sncRNA) 5' transfer RNA (tRNA) half
agcattggtggttcagtggtagaattctc

SEQ ID NO: 10877 - DNA, 20 bp, Artificial Sequence
  synthetic circulating small noncoding RNA (sncRNA) 5' transfer RNA (tRNA) half
cggttaggattcctggtttt

SEQ ID NO: 10878 - DNA, 19 bp, Artificial Sequence
  synthetic circulating small noncoding RNA (sncRNA) 5' transfer RNA (tRNA) half
cgatccatcgacctctggg

SEQ ID NO: 10879 - DNA, 14 bp, Artificial Sequence
  synthetic circulating small noncoding RNA (sncRNA) 5' transfer RNA (tRNA) half
agagtactaaccac

SEQ ID NO: 10880 - DNA, 13 bp, Artificial Sequence
  synthetic circulating small noncoding RNA (sncRNA) 5' transfer RNA (tRNA) half
ctcggtggaacct

SEQ ID NO: 10881 - DNA, 28 bp, Artificial Sequence
  synthetic circulating small noncoding RNA (sncRNA) 5' transfer RNA (tRNA) half
attcagagtccagagtgctaaccattac

SEQ ID NO: 10882 - DNA, 31 bp, Artificial Sequence
  synthetic circulating small noncoding RNA (sncRNA) 5' transfer RNA (tRNA) half
tagtgtagtggttatcacgttcgcctcacac

SEQ ID NO: 10883 - DNA, 28 bp, Artificial Sequence
  synthetic circulating small noncoding RNA (sncRNA) 5' transfer RNA (tRNA) half
acaccgggagtcgaacccgggccgcctg

SEQ ID NO: 10884 - DNA, 40 bp, Artificial Sequence
  synthetic circulating small noncoding RNA (sncRNA) 5' transfer RNA (tRNA) half
accgacgaggatgggattcgaacccacgcgtgcaaagcac

SEQ ID NO: 10885 - DNA, 19 bp, Artificial Sequence
  synthetic circulating small noncoding RNA (sncRNA) 5' transfer RNA (tRNA) half
ctaccgactgagctagccg

SEQ ID NO: 10886 - DNA, 13 bp, Artificial Sequence
  synthetic circulating small noncoding RNA (sncRNA) 5' transfer RNA (tRNA) half
gagtccagagtgc

SEQ ID NO: 10887 - DNA, 15 bp, Artificial Sequence
  synthetic circulating small noncoding RNA (sncRNA) 5' transfer RNA (tRNA) half
aacccgggccgcggc

SEQ ID NO: 10888 - DNA, 33 bp, Artificial Sequence
  synthetic circulating small noncoding RNA (sncRNA) 5' transfer RNA (tRNA) half
ggctgggggatgtagctcagtggtagagcgcgc

SEQ ID NO: 10889 - DNA, 29 bp, Artificial Sequence
  synthetic circulating small noncoding RNA (sncRNA) 5' transfer RNA (tRNA) half
tccagggttcaagtccctgttcgggcgct

SEQ ID NO: 10890 - DNA, 19 bp, Artificial Sequence
  synthetic circulating small noncoding RNA (sncRNA) 5' transfer RNA (tRNA) half
tcagtcggtagagcatgag

SEQ ID NO: 10891 - DNA, 23 bp, Artificial Sequence
  synthetic circulating small noncoding RNA (sncRNA) 5' transfer RNA (tRNA) half
aggcaagaattctaccactgaac

SEQ ID NO: 10892 - DNA, 20 bp, Artificial Sequence
  synthetic circulating small noncoding RNA (sncRNA) 5' transfer RNA (tRNA) half
acccgggcctcccgcgtggc

SEQ ID NO: 10893 - DNA, 20 bp, Artificial Sequence
  synthetic circulating small noncoding RNA (sncRNA) 5' transfer RNA (tRNA) half
attcaaagtccagagtgcta

SEQ ID NO: 10894 - DNA, 31 bp, Artificial Sequence
  synthetic circulating small noncoding RNA (sncRNA) 5' transfer RNA (tRNA) half
cccagtggcctaatggataaggcatcagcct

SEQ ID NO: 10895 - DNA, 16 bp, Artificial Sequence
  synthetic circulating small noncoding RNA (sncRNA) 5' transfer RNA (tRNA) half
agaccgctcggccacg

SEQ ID NO: 10896 - DNA, 25 bp, Artificial Sequence
  synthetic circulating small noncoding RNA (sncRNA) 5' transfer RNA (tRNA) half
tggtgtagtggtatcatgcaagatt

SEQ ID NO: 10897 - DNA, 20 bp, Artificial Sequence
  synthetic circulating small noncoding RNA (sncRNA) 5' transfer RNA (tRNA) half
tctgaatccagcgacccgag

SEQ ID NO: 10898 - DNA, 16 bp, Artificial Sequence
  synthetic circulating small noncoding RNA (sncRNA) 5' transfer RNA (tRNA) half
agcggttaggattcct

SEQ ID NO: 10899 - DNA, 45 bp, Artificial Sequence
  synthetic circulating small noncoding RNA (sncRNA) 5' transfer RNA (tRNA) half
ctcggatcgctggattcagagtccagagtgctaaccattacacca

SEQ ID NO: 10900 - DNA, 22 bp, Artificial Sequence
  synthetic circulating small noncoding RNA (sncRNA) 5' transfer RNA (tRNA) half
gttcgattccccgacggggaga

SEQ ID NO: 10901 - DNA, 18 bp, Artificial Sequence
  synthetic circulating small noncoding RNA (sncRNA) 5' transfer RNA (tRNA) half
ggatagctcagtcggtag

SEQ ID NO: 10902 - DNA, 18 bp, Artificial Sequence
  synthetic circulating small noncoding RNA (sncRNA) 5' transfer RNA (tRNA) half
catgctctaaccaactga

SEQ ID NO: 10903 - DNA, 20 bp, Artificial Sequence
  synthetic circulating small noncoding RNA (sncRNA) 5' transfer RNA (tRNA) half
ttccgctgcgccactctgct

SEQ ID NO: 10904 - DNA, 20 bp, Artificial Sequence
  synthetic circulating small noncoding RNA (sncRNA) 5' transfer RNA (tRNA) half
caaatggtagagcgctcgct

SEQ ID NO: 10905 - DNA, 15 bp, Artificial Sequence
  synthetic circulating small noncoding RNA (sncRNA) 5' transfer RNA (tRNA) half
ctcggccaccgtgac

SEQ ID NO: 10906 - DNA, 24 bp, Artificial Sequence
  synthetic circulating small noncoding RNA (sncRNA) 5' transfer RNA (tRNA) half
attccggctcgaaggacttcgtgc

SEQ ID NO: 10907 - DNA, 29 bp, Artificial Sequence
  synthetic circulating small noncoding RNA (sncRNA) 5' transfer RNA (tRNA) half
tggttcagtggtagaattctcgcctgcca

SEQ ID NO: 10908 - DNA, 37 bp, Artificial Sequence
  synthetic circulating small noncoding RNA (sncRNA) 5' transfer RNA (tRNA) half
acccgggacctctcgcacccaaagcgagaatcatacc

SEQ ID NO: 10909 - DNA, 32 bp, Artificial Sequence
  synthetic circulating small noncoding RNA (sncRNA) 5' transfer RNA (tRNA) half
cagagtggttcaattccacctttcgggcggga

SEQ ID NO: 10910 - DNA, 15 bp, Artificial Sequence
  synthetic circulating small noncoding RNA (sncRNA) 5' transfer RNA (tRNA) half
cccgggcctcccgcg

SEQ ID NO: 10911 - DNA, 14 bp, Artificial Sequence
  synthetic circulating small noncoding RNA (sncRNA) 5' transfer RNA (tRNA) half
gtcaggagtgggat

SEQ ID NO: 10912 - DNA, 21 bp, Artificial Sequence
  synthetic circulating small noncoding RNA (sncRNA) 5' transfer RNA (tRNA) half
gttcgattcccggccaatgca

SEQ ID NO: 10913 - DNA, 15 bp, Artificial Sequence
  synthetic circulating small noncoding RNA (sncRNA) 5' transfer RNA (tRNA) half
ccggggacctcttga

SEQ ID NO: 10914 - DNA, 38 bp, Artificial Sequence
  synthetic circulating small noncoding RNA (sncRNA) 5' transfer RNA (tRNA) half
tgcatgaggccccgggttcgatccccggcacctccact

SEQ ID NO: 10915 - DNA, 17 bp, Artificial Sequence
  synthetic circulating small noncoding RNA (sncRNA) 5' transfer RNA (tRNA) half
agccgcccgaacaggga

SEQ ID NO: 10916 - DNA, 20 bp, Artificial Sequence
  synthetic circulating small noncoding RNA (sncRNA) 5' transfer RNA (tRNA) half
ctttgaatccagcgatccga

SEQ ID NO: 10917 - DNA, 15 bp, Artificial Sequence
  synthetic circulating small noncoding RNA (sncRNA) 5' transfer RNA (tRNA) half
ttaaccactcggcca

SEQ ID NO: 10918 - DNA, 11 bp, Artificial Sequence
  synthetic circulating small noncoding RNA (sncRNA) 5' transfer RNA (tRNA) half
cgaaccagcga

SEQ ID NO: 10919 - DNA, 14 bp, Artificial Sequence
  synthetic circulating small noncoding RNA (sncRNA) 5' transfer RNA (tRNA) half
aagaggtccccggt

SEQ ID NO: 10920 - DNA, 20 bp, Artificial Sequence
  synthetic circulating small noncoding RNA (sncRNA) 5' transfer RNA (tRNA) half
ccataccgggagtcgaaccc

SEQ ID NO: 10921 - DNA, 20 bp, Artificial Sequence
  synthetic circulating small noncoding RNA (sncRNA) 5' transfer RNA (tRNA) half
gcctccccgtcggggaatcg

SEQ ID NO: 10922 - DNA, 43 bp, Artificial Sequence
  synthetic circulating small noncoding RNA (sncRNA) 5' transfer RNA (tRNA) half
aaagtattgtgccccgtgtgaggatcgaactcacgaccttcag

SEQ ID NO: 10923 - DNA, 26 bp, Artificial Sequence
  synthetic circulating small noncoding RNA (sncRNA) 5' transfer RNA (tRNA) half
gtccagagtgctaaccattacaccat

SEQ ID NO: 10924 - DNA, 13 bp, Artificial Sequence
  synthetic circulating small noncoding RNA (sncRNA) 5' transfer RNA (tRNA) half
cacgtcggggtca

SEQ ID NO: 10925 - DNA, 34 bp, Artificial Sequence
  synthetic circulating small noncoding RNA (sncRNA) 5' transfer RNA (tRNA) half
tttccgcccggtttcgaaccggggacctttcgcg

SEQ ID NO: 10926 - DNA, 28 bp, Artificial Sequence
  synthetic circulating small noncoding RNA (sncRNA) 5' transfer RNA (tRNA) half
ggtagcgtggccgagcggtctaaggcgc

SEQ ID NO: 10927 - DNA, 25 bp, Artificial Sequence
  synthetic circulating small noncoding RNA (sncRNA) 5' transfer RNA (tRNA) half
gcaggcgagaattctaccactgaac

SEQ ID NO: 10928 - DNA, 18 bp, Artificial Sequence
  synthetic circulating small noncoding RNA (sncRNA) 5' transfer RNA (tRNA) half
tcgaatccgagtcacggc

SEQ ID NO: 10929 - DNA, 19 bp, Artificial Sequence
  synthetic circulating small noncoding RNA (sncRNA) 5' transfer RNA (tRNA) half
ggtgtagtggtatcatgca

SEQ ID NO: 10930 - DNA, 35 bp, Artificial Sequence
  synthetic circulating small noncoding RNA (sncRNA) 5' transfer RNA (tRNA) half
gtggtttccgtagtgtagtggttatcacgttcgcc

SEQ ID NO: 10931 - DNA, 14 bp, Artificial Sequence
  synthetic circulating small noncoding RNA (sncRNA) 5' transfer RNA (tRNA) half
gattcgaaccagcg

SEQ ID NO: 10932 - DNA, 32 bp, Artificial Sequence
  synthetic circulating small noncoding RNA (sncRNA) 5' transfer RNA (tRNA) half
ggagaccggggttcgattccccgacggggaga

SEQ ID NO: 10933 - DNA, 37 bp, Artificial Sequence
  synthetic circulating small noncoding RNA (sncRNA) 5' transfer RNA (tRNA) half
taatctgagggtccagggttcaagtccctgttcgggc

SEQ ID NO: 10934 - DNA, 13 bp, Artificial Sequence
  synthetic circulating small noncoding RNA (sncRNA) 5' transfer RNA (tRNA) half
tgaggccccgggt

SEQ ID NO: 10935 - DNA, 28 bp, Artificial Sequence
  synthetic circulating small noncoding RNA (sncRNA) 5' transfer RNA (tRNA) half
catatggtctagcggttaggattcctgg

SEQ ID NO: 10936 - DNA, 31 bp, Artificial Sequence
  synthetic circulating small noncoding RNA (sncRNA) 5' transfer RNA (tRNA) half
aggatggccgagcggtctaaggcgctgcgtt

SEQ ID NO: 10937 - DNA, 28 bp, Artificial Sequence
  synthetic circulating small noncoding RNA (sncRNA) 5' transfer RNA (tRNA) half
acctccccgtcggggaattgaaccccgg

SEQ ID NO: 10938 - DNA, 11 bp, Artificial Sequence
  synthetic circulating small noncoding RNA (sncRNA) 5' transfer RNA (tRNA) half
aggcaccgctg

SEQ ID NO: 10939 - DNA, 25 bp, Artificial Sequence
  synthetic circulating small noncoding RNA (sncRNA) 5' transfer RNA (tRNA) half
tatgaccccgacgtgattcgaacac

SEQ ID NO: 10940 - DNA, 33 bp, Artificial Sequence
  synthetic circulating small noncoding RNA (sncRNA) 5' transfer RNA (tRNA) half
gagggtccagggttcaagtccctgttcgggcgc

SEQ ID NO: 10941 - DNA, 36 bp, Artificial Sequence
  synthetic circulating small noncoding RNA (sncRNA) 5' transfer RNA (tRNA) half
accaggggtcgcgagttcaaatctcgctggggcctg

SEQ ID NO: 10942 - DNA, 12 bp, Artificial Sequence
  synthetic circulating small noncoding RNA (sncRNA) 5' transfer RNA (tRNA) half
ccgaaatagctc

SEQ ID NO: 10943 - DNA, 20 bp, Artificial Sequence
  synthetic circulating small noncoding RNA (sncRNA) 5' transfer RNA (tRNA) half
aaccgggcggaaacaagaca

SEQ ID NO: 10944 - DNA, 34 bp, Artificial Sequence
  synthetic circulating small noncoding RNA (sncRNA) 5' transfer RNA (tRNA) half
gtgtcagaagtgggattcgaacccacgcctccat

SEQ ID NO: 10945 - DNA, 17 bp, Artificial Sequence
  synthetic circulating small noncoding RNA (sncRNA) 5' transfer RNA (tRNA) half
ttccgcagcgagcaggg

SEQ ID NO: 10946 - DNA, 24 bp, Artificial Sequence
  synthetic circulating small noncoding RNA (sncRNA) 5' transfer RNA (tRNA) half
cggtgagagcgccgaatcctaacc

SEQ ID NO: 10947 - DNA, 24 bp, Artificial Sequence
  synthetic circulating small noncoding RNA (sncRNA) 5' transfer RNA (tRNA) half
ggttccatagtgtagcggttatca

SEQ ID NO: 10948 - DNA, 18 bp, Artificial Sequence
  synthetic circulating small noncoding RNA (sncRNA) 5' transfer RNA (tRNA) half
agaccgctcggccacgct

SEQ ID NO: 10949 - DNA, 31 bp, Artificial Sequence
  synthetic circulating small noncoding RNA (sncRNA) 5' transfer RNA (tRNA) half
ccagcgccttagaccactcggccacgctacc

SEQ ID NO: 10950 - DNA, 20 bp, Artificial Sequence
  synthetic circulating small noncoding RNA (sncRNA) 5' transfer RNA (tRNA) half
gtgacaggcggggatactca

SEQ ID NO: 10951 - DNA, 30 bp, Artificial Sequence
  synthetic circulating small noncoding RNA (sncRNA) 5' transfer RNA (tRNA) half
gtctccccgtcggggaatcgaaccccggtc

SEQ ID NO: 10952 - DNA, 35 bp, Artificial Sequence
  synthetic circulating small noncoding RNA (sncRNA) 5' transfer RNA (tRNA) half
gcaggcgagaattctaccactgaaccaccaatgct

SEQ ID NO: 10953 - DNA, 32 bp, Artificial Sequence
  synthetic circulating small noncoding RNA (sncRNA) 5' transfer RNA (tRNA) half
agtcagacgcgctaccgttgcgccacgaggtc

SEQ ID NO: 10954 - DNA, 13 bp, Artificial Sequence
  synthetic circulating small noncoding RNA (sncRNA) 5' transfer RNA (tRNA) half
gtgcattggccgg

SEQ ID NO: 10955 - DNA, 17 bp, Artificial Sequence
  synthetic circulating small noncoding RNA (sncRNA) 5' transfer RNA (tRNA) half
gcccgcatcctccactt

SEQ ID NO: 10956 - DNA, 37 bp, Artificial Sequence
  synthetic circulating small noncoding RNA (sncRNA) 5' transfer RNA (tRNA) half
ttcgattccggctcgaaggacttcgtgcactactttt

SEQ ID NO: 10957 - DNA, 14 bp, Artificial Sequence
  synthetic circulating small noncoding RNA (sncRNA) 5' transfer RNA (tRNA) half
accgaggttgctgc

SEQ ID NO: 10958 - DNA, 26 bp, Artificial Sequence
  synthetic circulating small noncoding RNA (sncRNA) 5' transfer RNA (tRNA) half
gagtgctaaccattacaccatgggac

SEQ ID NO: 10959 - DNA, 31 bp, Artificial Sequence
  synthetic circulating small noncoding RNA (sncRNA) 5' transfer RNA (tRNA) half
cccgggccgcggcggtgagagcgccgaatcc

SEQ ID NO: 10960 - DNA, 31 bp, Artificial Sequence
  synthetic circulating small noncoding RNA (sncRNA) 5' transfer RNA (tRNA) half
gtccctggtggtctagtggctaggattcggc

SEQ ID NO: 10961 - DNA, 11 bp, Artificial Sequence
  synthetic circulating small noncoding RNA (sncRNA) 5' transfer RNA (tRNA) half
cgaaccgaggt

SEQ ID NO: 10962 - DNA, 6 bp, Artificial Sequence
  synthetic circulating small noncoding RNA (sncRNA) 5' transfer RNA (tRNA) half
gcccgg

SEQ ID NO: 10963 - DNA, 19 bp, Artificial Sequence
  synthetic circulating small noncoding RNA (sncRNA) 5' transfer RNA (tRNA) half
aagtagggctcgtccggga

SEQ ID NO: 10964 - DNA, 21 bp, Artificial Sequence
  synthetic circulating small noncoding RNA (sncRNA) 5' transfer RNA (tRNA) half
ctgaatccagcgacccgagtt

SEQ ID NO: 10965 - DNA, 12 bp, Artificial Sequence
  synthetic circulating small noncoding RNA (sncRNA) 5' transfer RNA (tRNA) half
agtcgaacccgg

SEQ ID NO: 10966 - DNA, 10 bp, Artificial Sequence
  synthetic circulating small noncoding RNA (sncRNA) 5' transfer RNA (tRNA) half
agtcgaacct

SEQ ID NO: 10967 - DNA, 29 bp, Artificial Sequence
  synthetic circulating small noncoding RNA (sncRNA) 5' transfer RNA (tRNA) half
tccgtagtgtagtggtcatcacgctcgcc

SEQ ID NO: 10968 - DNA, 33 bp, Artificial Sequence
  synthetic circulating small noncoding RNA (sncRNA) 5' transfer RNA (tRNA) half
ttcccatatggtctagcggttaggattcctggt

SEQ ID NO: 10969 - DNA, 45 bp, Artificial Sequence
  synthetic circulating small noncoding RNA (sncRNA) 5' transfer RNA (tRNA) half
gtgtaatggttagcactctggactctgaatccagcgatccgagtt

SEQ ID NO: 10970 - DNA, 21 bp, Artificial Sequence
  synthetic circulating small noncoding RNA (sncRNA) 5' transfer RNA (tRNA) half
ccgggagtcgaacccgggccg

SEQ ID NO: 10971 - DNA, 30 bp, Artificial Sequence
  synthetic circulating small noncoding RNA (sncRNA) 5' transfer RNA (tRNA) half
ttccgtagtgtagtggtcatcacgctcgcc

SEQ ID NO: 10972 - DNA, 17 bp, Artificial Sequence
  synthetic circulating small noncoding RNA (sncRNA) 5' transfer RNA (tRNA) half
cgaagcgagaatcatac

SEQ ID NO: 10973 - DNA, 28 bp, Artificial Sequence
  synthetic circulating small noncoding RNA (sncRNA) 5' transfer RNA (tRNA) half
ttcagagtccagagtgctaaccattaca

SEQ ID NO: 10974 - DNA, 19 bp, Artificial Sequence
  synthetic circulating small noncoding RNA (sncRNA) 5' transfer RNA (tRNA) half
accgggcgggaacaacact

SEQ ID NO: 10975 - DNA, 23 bp, Artificial Sequence
  synthetic circulating small noncoding RNA (sncRNA) 5' transfer RNA (tRNA) half
aaggccccagcgagatttgaact

SEQ ID NO: 10976 - DNA, 24 bp, Artificial Sequence
  synthetic circulating small noncoding RNA (sncRNA) 5' transfer RNA (tRNA) half
gtgggttcgagccccacgttgggc

SEQ ID NO: 10977 - DNA, 9 bp, Artificial Sequence
  synthetic circulating small noncoding RNA (sncRNA) 5' transfer RNA (tRNA) half
gaacctgcg

SEQ ID NO: 10978 - DNA, 41 bp, Artificial Sequence
  synthetic circulating small noncoding RNA (sncRNA) 5' transfer RNA (tRNA) half
cccgtcggggaatcgaaccccggtctcccgcgtgacaggcg

SEQ ID NO: 10979 - DNA, 31 bp, Artificial Sequence
  synthetic circulating small noncoding RNA (sncRNA) 5' transfer RNA (tRNA) half
gggtccagggttcaagtccctgttcgggcgc

SEQ ID NO: 10980 - DNA, 39 bp, Artificial Sequence
  synthetic circulating small noncoding RNA (sncRNA) 5' transfer RNA (tRNA) half
tgtgccccgtgtgaggatcgaactcacgaccttcagatt

SEQ ID NO: 10981 - DNA, 15 bp, Artificial Sequence
  synthetic circulating small noncoding RNA (sncRNA) 5' transfer RNA (tRNA) half
ggcagcggtgggatt

SEQ ID NO: 10982 - DNA, 33 bp, Artificial Sequence
  synthetic circulating small noncoding RNA (sncRNA) 5' transfer RNA (tRNA) half
ccccctctgaggttcgaactcaggaccttcaga

SEQ ID NO: 10983 - DNA, 22 bp, Artificial Sequence
  synthetic circulating small noncoding RNA (sncRNA) 5' transfer RNA (tRNA) half
aatcctaaccactagaccacca

SEQ ID NO: 10984 - DNA, 21 bp, Artificial Sequence
  synthetic circulating small noncoding RNA (sncRNA) 5' transfer RNA (tRNA) half
gccgtgatcgtataggggtta

SEQ ID NO: 10985 - DNA, 36 bp, Artificial Sequence
  synthetic circulating small noncoding RNA (sncRNA) 5' transfer RNA (tRNA) half
gttgccccctctgaggttcgaactcaggaccttcag

SEQ ID NO: 10986 - DNA, 20 bp, Artificial Sequence
  synthetic circulating small noncoding RNA (sncRNA) 5' transfer RNA (tRNA) half
gtcggtagagcatcagactt

SEQ ID NO: 10987 - DNA, 16 bp, Artificial Sequence
  synthetic circulating small noncoding RNA (sncRNA) 5' transfer RNA (tRNA) half
agtggtctggggtgca

SEQ ID NO: 10988 - DNA, 35 bp, Artificial Sequence
  synthetic circulating small noncoding RNA (sncRNA) 5' transfer RNA (tRNA) half
acccaggcggcccgggttcgactcccggtatggga

SEQ ID NO: 10989 - DNA, 9 bp, Artificial Sequence
  synthetic circulating small noncoding RNA (sncRNA) 5' transfer RNA (tRNA) half
tcgaacccg

SEQ ID NO: 10990 - DNA, 32 bp, Artificial Sequence
  synthetic circulating small noncoding RNA (sncRNA) 5' transfer RNA (tRNA) half
gattgtgggttcgagtcccatctgggtcgcat

SEQ ID NO: 10991 - DNA, 31 bp, Artificial Sequence
  synthetic circulating small noncoding RNA (sncRNA) 5' transfer RNA (tRNA) half
tgagattaagagtctcatgctctaccgactg

SEQ ID NO: 10992 - DNA, 29 bp, Artificial Sequence
  synthetic circulating small noncoding RNA (sncRNA) 5' transfer RNA (tRNA) half
gctagctcagtcggtagagcatgagactc

SEQ ID NO: 10993 - DNA, 11 bp, Artificial Sequence
  synthetic circulating small noncoding RNA (sncRNA) 5' transfer RNA (tRNA) half
caggcggcccg

SEQ ID NO: 10994 - DNA, 28 bp, Artificial Sequence
  synthetic circulating small noncoding RNA (sncRNA) 5' transfer RNA (tRNA) half
gcgagaattctaccattgaactaccaat

SEQ ID NO: 10995 - DNA, 16 bp, Artificial Sequence
  synthetic circulating small noncoding RNA (sncRNA) 5' transfer RNA (tRNA) half
ctaccgactgagctat

SEQ ID NO: 10996 - DNA, 23 bp, Artificial Sequence
  synthetic circulating small noncoding RNA (sncRNA) 5' transfer RNA (tRNA) half
ctctgaatccagcgatccgagtt

SEQ ID NO: 10997 - DNA, 14 bp, Artificial Sequence
  synthetic circulating small noncoding RNA (sncRNA) 5' transfer RNA (tRNA) half
ggtccccggttcga

SEQ ID NO: 10998 - DNA, 11 bp, Artificial Sequence
  synthetic circulating small noncoding RNA (sncRNA) 5' transfer RNA (tRNA) half
gggctcgaacc

SEQ ID NO: 10999 - DNA, 27 bp, Artificial Sequence
  synthetic circulating small noncoding RNA (sncRNA) 5' transfer RNA (tRNA) half
acctgcgcggggagaccccaatggatt

SEQ ID NO: 11000 - DNA, 20 bp, Artificial Sequence
  synthetic circulating small noncoding RNA (sncRNA) 5' transfer RNA (tRNA) half
cgcccgaacagggacttgaa

SEQ ID NO: 11001 - DNA, 36 bp, Artificial Sequence
  synthetic circulating small noncoding RNA (sncRNA) 5' transfer RNA (tRNA) half
ggcaccgctgggattcgaacccaggatctcctgttt

SEQ ID NO: 11002 - DNA, 8 bp, Artificial Sequence
  synthetic circulating small noncoding RNA (sncRNA) 5' transfer RNA (tRNA) half
ggcccggg

SEQ ID NO: 11003 - DNA, 12 bp, Artificial Sequence
  synthetic circulating small noncoding RNA (sncRNA) 5' transfer RNA (tRNA) half
cgaaaccgggcg

SEQ ID NO: 11004 - DNA, 22 bp, Artificial Sequence
  synthetic circulating small noncoding RNA (sncRNA) 5' transfer RNA (tRNA) half
attaaaagtctgatgctctacc

SEQ ID NO: 11005 - DNA, 8 bp, Artificial Sequence
  synthetic circulating small noncoding RNA (sncRNA) 5' transfer RNA (tRNA) half
gagcgccg

SEQ ID NO: 11006 - DNA, 19 bp, Artificial Sequence
  synthetic circulating small noncoding RNA (sncRNA) 5' transfer RNA (tRNA) half
accactataccaccaacgc

SEQ ID NO: 11007 - DNA, 15 bp, Artificial Sequence
  synthetic circulating small noncoding RNA (sncRNA) 5' transfer RNA (tRNA) half
tcccggacgagcccc

SEQ ID NO: 11008 - DNA, 31 bp, Artificial Sequence
  synthetic circulating small noncoding RNA (sncRNA) 5' transfer RNA (tRNA) half
ggcaccgctgggattcgaacccaggatctcc

SEQ ID NO: 11009 - DNA, 33 bp, Artificial Sequence
  synthetic circulating small noncoding RNA (sncRNA) 5' transfer RNA (tRNA) half
agggggcacccggatttgaaccggggacctctt

SEQ ID NO: 11010 - DNA, 32 bp, Artificial Sequence
  synthetic circulating small noncoding RNA (sncRNA) 5' transfer RNA (tRNA) half
gacgacgaggatgggattcgaacccacgcgtg

SEQ ID NO: 11011 - DNA, 17 bp, Artificial Sequence
  synthetic circulating small noncoding RNA (sncRNA) 5' transfer RNA (tRNA) half
tctgtagagcatgagac

SEQ ID NO: 11012 - DNA, 18 bp, Artificial Sequence
  synthetic circulating small noncoding RNA (sncRNA) 5' transfer RNA (tRNA) half
gctgtgatggccgagtgg

SEQ ID NO: 11013 - DNA, 17 bp, Artificial Sequence
  synthetic circulating small noncoding RNA (sncRNA) 5' transfer RNA (tRNA) half
tccaccgagatttgaac

SEQ ID NO: 11014 - DNA, 16 bp, Artificial Sequence
  synthetic circulating small noncoding RNA (sncRNA) 5' transfer RNA (tRNA) half
agttggttagagcgtg

SEQ ID NO: 11015 - DNA, 25 bp, Artificial Sequence
  synthetic circulating small noncoding RNA (sncRNA) 5' transfer RNA (tRNA) half
ggcccagcacgcttccgctgcgcca

SEQ ID NO: 11016 - DNA, 33 bp, Artificial Sequence
  synthetic circulating small noncoding RNA (sncRNA) 5' transfer RNA (tRNA) half
tccagcgatccgagttcaaatctcggtgggacc

SEQ ID NO: 11017 - DNA, 20 bp, Artificial Sequence
  synthetic circulating small noncoding RNA (sncRNA) 5' transfer RNA (tRNA) half
tatgaccccgacgtgattcg

SEQ ID NO: 11018 - DNA, 11 bp, Artificial Sequence
  synthetic circulating small noncoding RNA (sncRNA) 5' transfer RNA (tRNA) half
ccgggcctccc

SEQ ID NO: 11019 - DNA, 15 bp, Artificial Sequence
  synthetic circulating small noncoding RNA (sncRNA) 5' transfer RNA (tRNA) half
atcccatcctcgtcg

SEQ ID NO: 11020 - DNA, 15 bp, Artificial Sequence
  synthetic circulating small noncoding RNA (sncRNA) 5' transfer RNA (tRNA) half
tcacgtcggggtcaa

SEQ ID NO: 11021 - DNA, 17 bp, Artificial Sequence
  synthetic circulating small noncoding RNA (sncRNA) 5' transfer RNA (tRNA) half
ccccgacgtgattcgaa

SEQ ID NO: 11022 - DNA, 16 bp, Artificial Sequence
  synthetic circulating small noncoding RNA (sncRNA) 5' transfer RNA (tRNA) half
ctcggccacgactaca

SEQ ID NO: 11023 - DNA, 12 bp, Artificial Sequence
  synthetic circulating small noncoding RNA (sncRNA) 5' transfer RNA (tRNA) half
acaggcggggat

SEQ ID NO: 11024 - DNA, 30 bp, Artificial Sequence
  synthetic circulating small noncoding RNA (sncRNA) 5' transfer RNA (tRNA) half
agcgatccgagttcaaatctcggtggaacc

SEQ ID NO: 11025 - DNA, 30 bp, Artificial Sequence
  synthetic circulating small noncoding RNA (sncRNA) 5' transfer RNA (tRNA) half
ttcggcgctctcaccgccgcggcccgggtt

SEQ ID NO: 11026 - DNA, 16 bp, Artificial Sequence
  synthetic circulating small noncoding RNA (sncRNA) 5' transfer RNA (tRNA) half
gttcgactcccggtgt

SEQ ID NO: 11027 - DNA, 29 bp, Artificial Sequence
  synthetic circulating small noncoding RNA (sncRNA) 5' transfer RNA (tRNA) half
gtgaggcgaacgtgataaccactacacta

SEQ ID NO: 11028 - DNA, 12 bp, Artificial Sequence
  synthetic circulating small noncoding RNA (sncRNA) 5' transfer RNA (tRNA) half
ccggctcgaagg

SEQ ID NO: 11029 - DNA, 26 bp, Artificial Sequence
  synthetic circulating small noncoding RNA (sncRNA) 5' transfer RNA (tRNA) half
cgggtgggactcgaacccacaatccc

SEQ ID NO: 11030 - DNA, 36 bp, Artificial Sequence
  synthetic circulating small noncoding RNA (sncRNA) 5' transfer RNA (tRNA) half
cccaggcggcccgggttcgactcccggtgtgggaac

SEQ ID NO: 11031 - DNA, 14 bp, Artificial Sequence
  synthetic circulating small noncoding RNA (sncRNA) 5' transfer RNA (tRNA) half
cccggacgagcccc

SEQ ID NO: 11032 - DNA, 34 bp, Artificial Sequence
  synthetic circulating small noncoding RNA (sncRNA) 5' transfer RNA (tRNA) half
aggagcattggtggttcagtggtagaattctcgc

SEQ ID NO: 11033 - DNA, 31 bp, Artificial Sequence
  synthetic circulating small noncoding RNA (sncRNA) 5' transfer RNA (tRNA) half
ccgccgcggcccgggttcgattcccggtcag

SEQ ID NO: 11034 - DNA, 45 bp, Artificial Sequence
  synthetic circulating small noncoding RNA (sncRNA) 5' transfer RNA (tRNA) half
tccctggtggtctagtggttaggattcggcgctctcaccgccgcg

SEQ ID NO: 11035 - DNA, 19 bp, Artificial Sequence
  synthetic circulating small noncoding RNA (sncRNA) 5' transfer RNA (tRNA) half
aatcccaccgctgccatct

SEQ ID NO: 11036 - DNA, 24 bp, Artificial Sequence
  synthetic circulating small noncoding RNA (sncRNA) 5' transfer RNA (tRNA) half
ctcagtggtctggggtgcaggctt

SEQ ID NO: 11037 - DNA, 16 bp, Artificial Sequence
  synthetic circulating small noncoding RNA (sncRNA) 5' transfer RNA (tRNA) half
caggatctcctgttta

SEQ ID NO: 11038 - DNA, 30 bp, Artificial Sequence
  synthetic circulating small noncoding RNA (sncRNA) 5' transfer RNA (tRNA) half
gtaatggttagcactctggactctgaatcc

SEQ ID NO: 11039 - DNA, 38 bp, Artificial Sequence
  synthetic circulating small noncoding RNA (sncRNA) 5' transfer RNA (tRNA) half
ccccgtgtgaggatcgaactcacgaccttcagattatg

SEQ ID NO: 11040 - DNA, 11 bp, Artificial Sequence
  synthetic circulating small noncoding RNA (sncRNA) 5' transfer RNA (tRNA) half
cgaacccagga

SEQ ID NO: 11041 - DNA, 15 bp, Artificial Sequence
  synthetic circulating small noncoding RNA (sncRNA) 5' transfer RNA (tRNA) half
acgcccccgaagaga

SEQ ID NO: 11042 - DNA, 20 bp, Artificial Sequence
  synthetic circulating small noncoding RNA (sncRNA) 5' transfer RNA (tRNA) half
tcggatcgctggattcaaag

SEQ ID NO: 11043 - DNA, 26 bp, Artificial Sequence
  synthetic circulating small noncoding RNA (sncRNA) 5' transfer RNA (tRNA) half
cccgggcctcccgcgtggcaggcgag

SEQ ID NO: 11044 - DNA, 34 bp, Artificial Sequence
  synthetic circulating small noncoding RNA (sncRNA) 5' transfer RNA (tRNA) half
caaagcgagaatcatacccctagaccaacgagcc

SEQ ID NO: 11045 - DNA, 19 bp, Artificial Sequence
  synthetic circulating small noncoding RNA (sncRNA) 5' transfer RNA (tRNA) half
ggtggagatgccggggatc

SEQ ID NO: 11046 - DNA, 18 bp, Artificial Sequence
  synthetic circulating small noncoding RNA (sncRNA) 5' transfer RNA (tRNA) half
ccctgaccgggaatcgaa

SEQ ID NO: 11047 - DNA, 34 bp, Artificial Sequence
  synthetic circulating small noncoding RNA (sncRNA) 5' transfer RNA (tRNA) half
cccacatggtctagcggttaggattcctggtttt

SEQ ID NO: 11048 - DNA, 18 bp, Artificial Sequence
  synthetic circulating small noncoding RNA (sncRNA) 5' transfer RNA (tRNA) half
gtatagtggttagtactc

SEQ ID NO: 11049 - DNA, 13 bp, Artificial Sequence
  synthetic circulating small noncoding RNA (sncRNA) 5' transfer RNA (tRNA) half
aggcgtgggttcg

SEQ ID NO: 11050 - DNA, 19 bp, Artificial Sequence
  synthetic circulating small noncoding RNA (sncRNA) 5' transfer RNA (tRNA) half
tatagtggttagtactctg

SEQ ID NO: 11051 - DNA, 18 bp, Artificial Sequence
  synthetic circulating small noncoding RNA (sncRNA) 5' transfer RNA (tRNA) half
gggtcaactgcttggaag

SEQ ID NO: 11052 - DNA, 7 bp, Artificial Sequence
  synthetic circulating small noncoding RNA (sncRNA) 5' transfer RNA (tRNA) half
acccgga

SEQ ID NO: 11053 - DNA, 26 bp, Artificial Sequence
  synthetic circulating small noncoding RNA (sncRNA) 5' transfer RNA (tRNA) half
acccgggtcaactgcttggaaggcag

SEQ ID NO: 11054 - DNA, 18 bp, Artificial Sequence
  synthetic circulating small noncoding RNA (sncRNA) 5' transfer RNA (tRNA) half
ctctaaccaactgagcta

SEQ ID NO: 11055 - DNA, 33 bp, Artificial Sequence
  synthetic circulating small noncoding RNA (sncRNA) 5' transfer RNA (tRNA) half
gcaccatgctctaaccaactgagctaactggcc

SEQ ID NO: 11056 - DNA, 22 bp, Artificial Sequence
  synthetic circulating small noncoding RNA (sncRNA) 5' transfer RNA (tRNA) half
cgaactcaggaccttcagatta

SEQ ID NO: 11057 - DNA, 21 bp, Artificial Sequence
  synthetic circulating small noncoding RNA (sncRNA) 5' transfer RNA (tRNA) half
tgccacgcgggaggcccgggt

SEQ ID NO: 11058 - DNA, 31 bp, Artificial Sequence
  synthetic circulating small noncoding RNA (sncRNA) 5' transfer RNA (tRNA) half
acagagtggttcaattccacctttcgggcgg

SEQ ID NO: 11059 - DNA, 24 bp, Artificial Sequence
  synthetic circulating small noncoding RNA (sncRNA) 5' transfer RNA (tRNA) half
gtggttaggattcggcgctctcac

SEQ ID NO: 11060 - DNA, 36 bp, Artificial Sequence
  synthetic circulating small noncoding RNA (sncRNA) 5' transfer RNA (tRNA) half
ccgcagcaacctcggttcgaatccgagtcacggcat

SEQ ID NO: 11061 - DNA, 18 bp, Artificial Sequence
  synthetic circulating small noncoding RNA (sncRNA) 5' transfer RNA (tRNA) half
cacaccgggagtcgaacc

SEQ ID NO: 11062 - DNA, 38 bp, Artificial Sequence
  synthetic circulating small noncoding RNA (sncRNA) 5' transfer RNA (tRNA) half
aagcctccctggtggtctagtggttaggattcggcgct

SEQ ID NO: 11063 - DNA, 31 bp, Artificial Sequence
  synthetic circulating small noncoding RNA (sncRNA) 5' transfer RNA (tRNA) half
cttaggtcgctggttcgattccggctcgaag

SEQ ID NO: 11064 - DNA, 33 bp, Artificial Sequence
  synthetic circulating small noncoding RNA (sncRNA) 5' transfer RNA (tRNA) half
gaagattgagggttcgagtcccttcgtggtcga

SEQ ID NO: 11065 - DNA, 15 bp, Artificial Sequence
  synthetic circulating small noncoding RNA (sncRNA) 5' transfer RNA (tRNA) half
ttatcacgtctgctt

SEQ ID NO: 11066 - DNA, 19 bp, Artificial Sequence
  synthetic circulating small noncoding RNA (sncRNA) 5' transfer RNA (tRNA) half
ggcgaatgtgataaccact

SEQ ID NO: 11067 - DNA, 33 bp, Artificial Sequence
  synthetic circulating small noncoding RNA (sncRNA) 5' transfer RNA (tRNA) half
agaagattgagggttcgagtcccttcgtggtcg

SEQ ID NO: 11068 - DNA, 24 bp, Artificial Sequence
  synthetic circulating small noncoding RNA (sncRNA) 5' transfer RNA (tRNA) half
gattcaaagtccagagtgctaacc

SEQ ID NO: 11069 - DNA, 24 bp, Artificial Sequence
  synthetic circulating small noncoding RNA (sncRNA) 5' transfer RNA (tRNA) half
attaagagtctcatgctctaccga

SEQ ID NO: 11070 - DNA, 17 bp, Artificial Sequence
  synthetic circulating small noncoding RNA (sncRNA) 5' transfer RNA (tRNA) half
atggtagagcgctcgct

SEQ ID NO: 11071 - DNA, 25 bp, Artificial Sequence
  synthetic circulating small noncoding RNA (sncRNA) 5' transfer RNA (tRNA) half
gcccgtacggggatcgaacccgcga

SEQ ID NO: 11072 - DNA, 17 bp, Artificial Sequence
  synthetic circulating small noncoding RNA (sncRNA) 5' transfer RNA (tRNA) half
catgctctaaccaactg

SEQ ID NO: 11073 - DNA, 34 bp, Artificial Sequence
  synthetic circulating small noncoding RNA (sncRNA) 5' transfer RNA (tRNA) half
ggcgagaattctaccactgaaccaccaatgctcc

SEQ ID NO: 11074 - DNA, 13 bp, Artificial Sequence
  synthetic circulating small noncoding RNA (sncRNA) 5' transfer RNA (tRNA) half
gcaccgctgggat

SEQ ID NO: 11075 - DNA, 13 bp, Artificial Sequence
  synthetic circulating small noncoding RNA (sncRNA) 5' transfer RNA (tRNA) half
tgaccgggaatcg

SEQ ID NO: 11076 - DNA, 11 bp, Artificial Sequence
  synthetic circulating small noncoding RNA (sncRNA) 5' transfer RNA (tRNA) half
ctcccgcgtga

SEQ ID NO: 11077 - DNA, 29 bp, Artificial Sequence
  synthetic circulating small noncoding RNA (sncRNA) 5' transfer RNA (tRNA) half
ttggtagttcaatggtagaattctcgcct

SEQ ID NO: 11078 - DNA, 13 bp, Artificial Sequence
  synthetic circulating small noncoding RNA (sncRNA) 5' transfer RNA (tRNA) half
aacccgggcctcc

SEQ ID NO: 11079 - DNA, 28 bp, Artificial Sequence
  synthetic circulating small noncoding RNA (sncRNA) 5' transfer RNA (tRNA) half
agcgtgatgaccactacactacggaaac

SEQ ID NO: 11080 - DNA, 21 bp, Artificial Sequence
  synthetic circulating small noncoding RNA (sncRNA) 5' transfer RNA (tRNA) half
gccgtgatcgtatagtggtta

SEQ ID NO: 11081 - DNA, 19 bp, Artificial Sequence
  synthetic circulating small noncoding RNA (sncRNA) 5' transfer RNA (tRNA) half
ccaactgagctatttcggc

SEQ ID NO: 11082 - DNA, 21 bp, Artificial Sequence
  synthetic circulating small noncoding RNA (sncRNA) 5' transfer RNA (tRNA) half
tcgaatcccaccgctgccatc

SEQ ID NO: 11083 - DNA, 22 bp, Artificial Sequence
  synthetic circulating small noncoding RNA (sncRNA) 5' transfer RNA (tRNA) half
acgccatcgaaatgactggagc

SEQ ID NO: 11084 - DNA, 27 bp, Artificial Sequence
  synthetic circulating small noncoding RNA (sncRNA) 5' transfer RNA (tRNA) half
gcgacccgggttcgattcccgggcggc

SEQ ID NO: 11085 - DNA, 19 bp, Artificial Sequence
  synthetic circulating small noncoding RNA (sncRNA) 5' transfer RNA (tRNA) half
aaaccgggcggaaacaact

SEQ ID NO: 11086 - DNA, 14 bp, Artificial Sequence
  synthetic circulating small noncoding RNA (sncRNA) 5' transfer RNA (tRNA) half
gggagactgcgacc

SEQ ID NO: 11087 - DNA, 24 bp, Artificial Sequence
  synthetic circulating small noncoding RNA (sncRNA) 5' transfer RNA (tRNA) half
ccgggttcgactcccggtgtggga

SEQ ID NO: 11088 - DNA, 13 bp, Artificial Sequence
  synthetic circulating small noncoding RNA (sncRNA) 5' transfer RNA (tRNA) half
ccatctgggtcgc

SEQ ID NO: 11089 - DNA, 14 bp, Artificial Sequence
  synthetic circulating small noncoding RNA (sncRNA) 5' transfer RNA (tRNA) half
gtggtctggggtgc

SEQ ID NO: 11090 - DNA, 36 bp, Artificial Sequence
  synthetic circulating small noncoding RNA (sncRNA) 5' transfer RNA (tRNA) half
accgcccggctagctcagtcggtagagcatgagact

SEQ ID NO: 11091 - DNA, 32 bp, Artificial Sequence
  synthetic circulating small noncoding RNA (sncRNA) 5' transfer RNA (tRNA) half
tcccaccgagatttgaactcggatcgctggat

SEQ ID NO: 11092 - DNA, 12 bp, Artificial Sequence
  synthetic circulating small noncoding RNA (sncRNA) 5' transfer RNA (tRNA) half
atcccggacgag

SEQ ID NO: 11093 - DNA, 21 bp, Artificial Sequence
  synthetic circulating small noncoding RNA (sncRNA) 5' transfer RNA (tRNA) half
taccatttgagctaatccccc

SEQ ID NO: 11094 - DNA, 24 bp, Artificial Sequence
  synthetic circulating small noncoding RNA (sncRNA) 5' transfer RNA (tRNA) half
cgggagtcgaacccgggccgcctg

SEQ ID NO: 11095 - DNA, 39 bp, Artificial Sequence
  synthetic circulating small noncoding RNA (sncRNA) 5' transfer RNA (tRNA) half
tcgtgggttcgagccccacgttgggcgcaaattaacttt

SEQ ID NO: 11096 - DNA, 35 bp, Artificial Sequence
  synthetic circulating small noncoding RNA (sncRNA) 5' transfer RNA (tRNA) half
tctgaaggtcctgagttcgagcctcagagaaggca

SEQ ID NO: 11097 - DNA, 40 bp, Artificial Sequence
  synthetic circulating small noncoding RNA (sncRNA) 5' transfer RNA (tRNA) half
cggtgagagcgccgaatcctaaccactagaccaccaggga

SEQ ID NO: 11098 - DNA, 12 bp, Artificial Sequence
  synthetic circulating small noncoding RNA (sncRNA) 5' transfer RNA (tRNA) half
tccggctcgaag

SEQ ID NO: 11099 - DNA, 24 bp, Artificial Sequence
  synthetic circulating small noncoding RNA (sncRNA) 5' transfer RNA (tRNA) half
gtccagagtgctaaccattacacc

SEQ ID NO: 11100 - DNA, 13 bp, Artificial Sequence
  synthetic circulating small noncoding RNA (sncRNA) 5' transfer RNA (tRNA) half
ccggggatcgaac

SEQ ID NO: 11101 - DNA, 21 bp, Artificial Sequence
  synthetic circulating small noncoding RNA (sncRNA) 5' transfer RNA (tRNA) half
aaccgggcggaaacaatgact

SEQ ID NO: 11102 - DNA, 14 bp, Artificial Sequence
  synthetic circulating small noncoding RNA (sncRNA) 5' transfer RNA (tRNA) half
ttggccgggaatcg

SEQ ID NO: 11103 - DNA, 19 bp, Artificial Sequence
  synthetic circulating small noncoding RNA (sncRNA) 5' transfer RNA (tRNA) half
tctcttcgggggcgtgggt

SEQ ID NO: 11104 - DNA, 11 bp, Artificial Sequence
  synthetic circulating small noncoding RNA (sncRNA) 5' transfer RNA (tRNA) half
ccggctcgaag

SEQ ID NO: 11105 - DNA, 9 bp, Artificial Sequence
  synthetic circulating small noncoding RNA (sncRNA) 5' transfer RNA (tRNA) half
ttcccggcc

SEQ ID NO: 11106 - DNA, 32 bp, Artificial Sequence
  synthetic circulating small noncoding RNA (sncRNA) 5' transfer RNA (tRNA) half
cggctagctcagtcggtagagcatgagactct

SEQ ID NO: 11107 - DNA, 21 bp, Artificial Sequence
  synthetic circulating small noncoding RNA (sncRNA) 5' transfer RNA (tRNA) half
gccaggagtcgaacctagaat

SEQ ID NO: 11108 - DNA, 39 bp, Artificial Sequence
  synthetic circulating small noncoding RNA (sncRNA) 5' transfer RNA (tRNA) half
gtaaaccgaagatcgcgggttcgaaccccgtccgtgcct

SEQ ID NO: 11109 - DNA, 46 bp, Artificial Sequence
  synthetic circulating small noncoding RNA (sncRNA) 5' transfer RNA (tRNA) half
gcgtccctgggtgggctcgaaccaccaacctttcggttaacagccg

SEQ ID NO: 11110 - DNA, 23 bp, Artificial Sequence
  synthetic circulating small noncoding RNA (sncRNA) 5' transfer RNA (tRNA) half
aactcagattgctggattcaaag

SEQ ID NO: 11111 - DNA, 13 bp, Artificial Sequence
  synthetic circulating small noncoding RNA (sncRNA) 5' transfer RNA (tRNA) half
cacgaccttcaga

SEQ ID NO: 11112 - DNA, 30 bp, Artificial Sequence
  synthetic circulating small noncoding RNA (sncRNA) 5' transfer RNA (tRNA) half
aggggtcgcgagttcaaatctcgctggggc

SEQ ID NO: 11113 - DNA, 25 bp, Artificial Sequence
  synthetic circulating small noncoding RNA (sncRNA) 5' transfer RNA (tRNA) half
agttcgagcctcacctggagcacga

SEQ ID NO: 11114 - DNA, 32 bp, Artificial Sequence
  synthetic circulating small noncoding RNA (sncRNA) 5' transfer RNA (tRNA) half
gcgatccgagttcaaatctcggtggaacctac

SEQ ID NO: 11115 - DNA, 43 bp, Artificial Sequence
  synthetic circulating small noncoding RNA (sncRNA) 5' transfer RNA (tRNA) half
ggagtcgaacccgggccgcctgggtgaaaaccaggaatcctaa

SEQ ID NO: 11116 - DNA, 38 bp, Artificial Sequence
  synthetic circulating small noncoding RNA (sncRNA) 5' transfer RNA (tRNA) half
gtggttaggattcggcgctctcaccgccgcggcccggg

SEQ ID NO: 11117 - DNA, 13 bp, Artificial Sequence
  synthetic circulating small noncoding RNA (sncRNA) 5' transfer RNA (tRNA) half
cccgggccgcctg

SEQ ID NO: 11118 - DNA, 22 bp, Artificial Sequence
  synthetic circulating small noncoding RNA (sncRNA) 5' transfer RNA (tRNA) half
aactcaggaccttcagattatg

SEQ ID NO: 11119 - DNA, 21 bp, Artificial Sequence
  synthetic circulating small noncoding RNA (sncRNA) 5' transfer RNA (tRNA) half
agcggttatcacgtctgcttt

SEQ ID NO: 11120 - DNA, 15 bp, Artificial Sequence
  synthetic circulating small noncoding RNA (sncRNA) 5' transfer RNA (tRNA) half
agagcatttgactgc

SEQ ID NO: 11121 - DNA, 14 bp, Artificial Sequence
  synthetic circulating small noncoding RNA (sncRNA) 5' transfer RNA (tRNA) half
ggtagtgtggccga

SEQ ID NO: 11122 - DNA, 28 bp, Artificial Sequence
  synthetic circulating small noncoding RNA (sncRNA) 5' transfer RNA (tRNA) half
atcgtatagtggttagtactctgcgttg

SEQ ID NO: 11123 - DNA, 11 bp, Artificial Sequence
  synthetic circulating small noncoding RNA (sncRNA) 5' transfer RNA (tRNA) half
cgaacccacgc

SEQ ID NO: 11124 - DNA, 21 bp, Artificial Sequence
  synthetic circulating small noncoding RNA (sncRNA) 5' transfer RNA (tRNA) half
gtcggggaatcgaaccccggt

SEQ ID NO: 11125 - DNA, 24 bp, Artificial Sequence
  synthetic circulating small noncoding RNA (sncRNA) 5' transfer RNA (tRNA) half
tctagcggttaggattcctggttt

SEQ ID NO: 11126 - DNA, 13 bp, Artificial Sequence
  synthetic circulating small noncoding RNA (sncRNA) 5' transfer RNA (tRNA) half
tccccgtcgggga

SEQ ID NO: 11127 - DNA, 10 bp, Artificial Sequence
  synthetic circulating small noncoding RNA (sncRNA) 5' transfer RNA (tRNA) half
gggcctcccg

SEQ ID NO: 11128 - DNA, 14 bp, Artificial Sequence
  synthetic circulating small noncoding RNA (sncRNA) 5' transfer RNA (tRNA) half
gagactgcgacctg

SEQ ID NO: 11129 - DNA, 12 bp, Artificial Sequence
  synthetic circulating small noncoding RNA (sncRNA) 5' transfer RNA (tRNA) half
tcgattccggct

SEQ ID NO: 11130 - DNA, 33 bp, Artificial Sequence
  synthetic circulating small noncoding RNA (sncRNA) 5' transfer RNA (tRNA) half
gtcgagccagccaggagtcgaacctagaatctt

SEQ ID NO: 11131 - DNA, 7 bp, Artificial Sequence
  synthetic circulating small noncoding RNA (sncRNA) 5' transfer RNA (tRNA) half
ccgggca

SEQ ID NO: 11132 - DNA, 27 bp, Artificial Sequence
  synthetic circulating small noncoding RNA (sncRNA) 5' transfer RNA (tRNA) half
tagtggttaggattcggcgctctcacc

SEQ ID NO: 11133 - DNA, 23 bp, Artificial Sequence
  synthetic circulating small noncoding RNA (sncRNA) 5' transfer RNA (tRNA) half
cgcccggtttcgaaccggggacc

SEQ ID NO: 11134 - DNA, 24 bp, Artificial Sequence
  synthetic circulating small noncoding RNA (sncRNA) 5' transfer RNA (tRNA) half
tggttagcactctggactctgaat

SEQ ID NO: 11135 - DNA, 14 bp, Artificial Sequence
  synthetic circulating small noncoding RNA (sncRNA) 5' transfer RNA (tRNA) half
ggtggagatgccgg

SEQ ID NO: 11136 - DNA, 25 bp, Artificial Sequence
  synthetic circulating small noncoding RNA (sncRNA) 5' transfer RNA (tRNA) half
gggttcaagtccctgttcgggcgct

SEQ ID NO: 11137 - DNA, 15 bp, Artificial Sequence
  synthetic circulating small noncoding RNA (sncRNA) 5' transfer RNA (tRNA) half
accggggacctctcg

SEQ ID NO: 11138 - DNA, 24 bp, Artificial Sequence
  synthetic circulating small noncoding RNA (sncRNA) 5' transfer RNA (tRNA) half
gaaggccccagcgagatttgaact

SEQ ID NO: 11139 - DNA, 15 bp, Artificial Sequence
  synthetic circulating small noncoding RNA (sncRNA) 5' transfer RNA (tRNA) half
ggttcgatcccgggt

SEQ ID NO: 11140 - DNA, 16 bp, Artificial Sequence
  synthetic circulating small noncoding RNA (sncRNA) 5' transfer RNA (tRNA) half
gctcagttggttagag

SEQ ID NO: 11141 - DNA, 17 bp, Artificial Sequence
  synthetic circulating small noncoding RNA (sncRNA) 5' transfer RNA (tRNA) half
ttcaaagtccagagtgc

SEQ ID NO: 11142 - DNA, 35 bp, Artificial Sequence
  synthetic circulating small noncoding RNA (sncRNA) 5' transfer RNA (tRNA) half
agctggctcgttggtctaggggtatgattctcgct

SEQ ID NO: 11143 - DNA, 29 bp, Artificial Sequence
  synthetic circulating small noncoding RNA (sncRNA) 5' transfer RNA (tRNA) half
gtgagaatcatacccctagaccaacaagc

SEQ ID NO: 11144 - DNA, 14 bp, Artificial Sequence
  synthetic circulating small noncoding RNA (sncRNA) 5' transfer RNA (tRNA) half
gctaaccattacac

SEQ ID NO: 11145 - DNA, 13 bp, Artificial Sequence
  synthetic circulating small noncoding RNA (sncRNA) 5' transfer RNA (tRNA) half
cgattcccggccc

SEQ ID NO: 11146 - DNA, 24 bp, Artificial Sequence
  synthetic circulating small noncoding RNA (sncRNA) 5' transfer RNA (tRNA) half
gggtggcagagccaggaaattgcg

SEQ ID NO: 11147 - DNA, 27 bp, Artificial Sequence
  synthetic circulating small noncoding RNA (sncRNA) 5' transfer RNA (tRNA) half
tggctaggattcggcgctttcaccgcc

SEQ ID NO: 11148 - DNA, 26 bp, Artificial Sequence
  synthetic circulating small noncoding RNA (sncRNA) 5' transfer RNA (tRNA) half
gctctaaccaactgagctaaccggcc

SEQ ID NO: 11149 - DNA, 36 bp, Artificial Sequence
  synthetic circulating small noncoding RNA (sncRNA) 5' transfer RNA (tRNA) half
aatctgagggtccagggttcaagtccctgttcgggc

SEQ ID NO: 11150 - DNA, 19 bp, Artificial Sequence
  synthetic circulating small noncoding RNA (sncRNA) 5' transfer RNA (tRNA) half
ggggtatgattctcggttt

SEQ ID NO: 11151 - DNA, 32 bp, Artificial Sequence
  synthetic circulating small noncoding RNA (sncRNA) 5' transfer RNA (tRNA) half
ccagcgatccgagttcaaatctcggtgggacc

SEQ ID NO: 11152 - DNA, 15 bp, Artificial Sequence
  synthetic circulating small noncoding RNA (sncRNA) 5' transfer RNA (tRNA) half
atgggcccagcacgc

SEQ ID NO: 11153 - DNA, 15 bp, Artificial Sequence
  synthetic circulating small noncoding RNA (sncRNA) 5' transfer RNA (tRNA) half
ctcgaacccgcaacc

SEQ ID NO: 11154 - DNA, 30 bp, Artificial Sequence
  synthetic circulating small noncoding RNA (sncRNA) 5' transfer RNA (tRNA) half
taccgggagtcgaacccgggccgcctgggt

SEQ ID NO: 11155 - DNA, 17 bp, Artificial Sequence
  synthetic circulating small noncoding RNA (sncRNA) 5' transfer RNA (tRNA) half
gacctctcgcacccaaa

SEQ ID NO: 11156 - DNA, 21 bp, Artificial Sequence
  synthetic circulating small noncoding RNA (sncRNA) 5' transfer RNA (tRNA) half
cagtcaaatgctctaccactg

SEQ ID NO: 11157 - DNA, 39 bp, Artificial Sequence
  synthetic circulating small noncoding RNA (sncRNA) 5' transfer RNA (tRNA) half
tcggtagagcatgagactcttaatctcagggtcgtgggt

SEQ ID NO: 11158 - DNA, 30 bp, Artificial Sequence
  synthetic circulating small noncoding RNA (sncRNA) 5' transfer RNA (tRNA) half
agaggtcccgggttcaaatcccggacgagc

SEQ ID NO: 11159 - DNA, 16 bp, Artificial Sequence
  synthetic circulating small noncoding RNA (sncRNA) 5' transfer RNA (tRNA) half
tccgcccggtttcgaa

SEQ ID NO: 11160 - DNA, 11 bp, Artificial Sequence
  synthetic circulating small noncoding RNA (sncRNA) 5' transfer RNA (tRNA) half
gggttcgactc

SEQ ID NO: 11161 - DNA, 15 bp, Artificial Sequence
  synthetic circulating small noncoding RNA (sncRNA) 5' transfer RNA (tRNA) half
cgaacccgggccgcg

SEQ ID NO: 11162 - DNA, 36 bp, Artificial Sequence
  synthetic circulating small noncoding RNA (sncRNA) 5' transfer RNA (tRNA) half
acaggagatcctgggttcgaatcccagtggggcctg

SEQ ID NO: 11163 - DNA, 10 bp, Artificial Sequence
  synthetic circulating small noncoding RNA (sncRNA) 5' transfer RNA (tRNA) half
ggattcgaac

SEQ ID NO: 11164 - DNA, 15 bp, Artificial Sequence
  synthetic circulating small noncoding RNA (sncRNA) 5' transfer RNA (tRNA) half
gtcgtggccgagtgg

SEQ ID NO: 11165 - DNA, 26 bp, Artificial Sequence
  synthetic circulating small noncoding RNA (sncRNA) 5' transfer RNA (tRNA) half
cagagtccagagtgctaaccattaca

SEQ ID NO: 11166 - DNA, 13 bp, Artificial Sequence
  synthetic circulating small noncoding RNA (sncRNA) 5' transfer RNA (tRNA) half
tggtctggggtgc

SEQ ID NO: 11167 - DNA, 21 bp, Artificial Sequence
  synthetic circulating small noncoding RNA (sncRNA) 5' transfer RNA (tRNA) half
gcccggctagctcagtcggta

SEQ ID NO: 11168 - DNA, 23 bp, Artificial Sequence
  synthetic circulating small noncoding RNA (sncRNA) 5' transfer RNA (tRNA) half
gcgtgacaggcggggatactcac

SEQ ID NO: 11169 - DNA, 7 bp, Artificial Sequence
  synthetic circulating small noncoding RNA (sncRNA) 5' transfer RNA (tRNA) half
atccccc

SEQ ID NO: 11170 - DNA, 30 bp, Artificial Sequence
  synthetic circulating small noncoding RNA (sncRNA) 5' transfer RNA (tRNA) half
aggcgtccctgggtgggctcgaaccaccaa

SEQ ID NO: 11171 - DNA, 26 bp, Artificial Sequence
  synthetic circulating small noncoding RNA (sncRNA) 5' transfer RNA (tRNA) half
gttccatggtgtaatggttagcactc

SEQ ID NO: 11172 - DNA, 18 bp, Artificial Sequence
  synthetic circulating small noncoding RNA (sncRNA) 5' transfer RNA (tRNA) half
cactctggactttgaatc

SEQ ID NO: 11173 - DNA, 12 bp, Artificial Sequence
  synthetic circulating small noncoding RNA (sncRNA) 5' transfer RNA (tRNA) half
gcaggcgagaat

SEQ ID NO: 11174 - DNA, 26 bp, Artificial Sequence
  synthetic circulating small noncoding RNA (sncRNA) 5' transfer RNA (tRNA) half
ggcgagaattctaccattgaactacc

SEQ ID NO: 11175 - DNA, 21 bp, Artificial Sequence
  synthetic circulating small noncoding RNA (sncRNA) 5' transfer RNA (tRNA) half
tcgaaccccgtccgtgcctgc

SEQ ID NO: 11176 - DNA, 22 bp, Artificial Sequence
  synthetic circulating small noncoding RNA (sncRNA) 5' transfer RNA (tRNA) half
agagtcccatgctctaccgact

SEQ ID NO: 11177 - DNA, 31 bp, Artificial Sequence
  synthetic circulating small noncoding RNA (sncRNA) 5' transfer RNA (tRNA) half
accccaggtgggactcgaacccacaatccct

SEQ ID NO: 11178 - DNA, 18 bp, Artificial Sequence
  synthetic circulating small noncoding RNA (sncRNA) 5' transfer RNA (tRNA) half
ggattaagagtcccatgc

SEQ ID NO: 11179 - DNA, 25 bp, Artificial Sequence
  synthetic circulating small noncoding RNA (sncRNA) 5' transfer RNA (tRNA) half
gcccggatgatcctcagtggtctgg

SEQ ID NO: 11180 - DNA, 37 bp, Artificial Sequence
  synthetic circulating small noncoding RNA (sncRNA) 5' transfer RNA (tRNA) half
cgtcgagccagccaggagtcgaacctagaatcttctg

SEQ ID NO: 11181 - DNA, 17 bp, Artificial Sequence
  synthetic circulating small noncoding RNA (sncRNA) 5' transfer RNA (tRNA) half
aaccccgtccgtgcctg

SEQ ID NO: 11182 - DNA, 15 bp, Artificial Sequence
  synthetic circulating small noncoding RNA (sncRNA) 5' transfer RNA (tRNA) half
ttaggtcgctggttc

SEQ ID NO: 11183 - DNA, 34 bp, Artificial Sequence
  synthetic circulating small noncoding RNA (sncRNA) 5' transfer RNA (tRNA) half
cttcgagccggattcgaaccagcgacctaaggat

SEQ ID NO: 11184 - DNA, 20 bp, Artificial Sequence
  synthetic circulating small noncoding RNA (sncRNA) 5' transfer RNA (tRNA) half
cgaatcccatcctcgtcgtt

SEQ ID NO: 11185 - DNA, 33 bp, Artificial Sequence
  synthetic circulating small noncoding RNA (sncRNA) 5' transfer RNA (tRNA) half
accaggaatcctaaccgctagaccatgtgggaa

SEQ ID NO: 11186 - DNA, 31 bp, Artificial Sequence
  synthetic circulating small noncoding RNA (sncRNA) 5' transfer RNA (tRNA) half
aggagatcctgggttcgaatcccagcggggc

SEQ ID NO: 11187 - DNA, 26 bp, Artificial Sequence
  synthetic circulating small noncoding RNA (sncRNA) 5' transfer RNA (tRNA) half
cgtcggggaattgaaccccggtctcc

SEQ ID NO: 11188 - DNA, 28 bp, Artificial Sequence
  synthetic circulating small noncoding RNA (sncRNA) 5' transfer RNA (tRNA) half
ccgtagtgtagtggttatcacgctcgcc

SEQ ID NO: 11189 - DNA, 26 bp, Artificial Sequence
  synthetic circulating small noncoding RNA (sncRNA) 5' transfer RNA (tRNA) half
aaccaggaatcctaaccgctagacca

SEQ ID NO: 11190 - DNA, 19 bp, Artificial Sequence
  synthetic circulating small noncoding RNA (sncRNA) 5' transfer RNA (tRNA) half
tcgattccggctcgaagga

SEQ ID NO: 11191 - DNA, 21 bp, Artificial Sequence
  synthetic circulating small noncoding RNA (sncRNA) 5' transfer RNA (tRNA) half
agttcgaacctcagagggggc

SEQ ID NO: 11192 - DNA, 30 bp, Artificial Sequence
  synthetic circulating small noncoding RNA (sncRNA) 5' transfer RNA (tRNA) half
gaggtccccggttcgaaaccgggcggaaac

SEQ ID NO: 11193 - DNA, 40 bp, Artificial Sequence
  synthetic circulating small noncoding RNA (sncRNA) 5' transfer RNA (tRNA) half
actcggatcgctggattcagagtccagagtgctaaccatt

SEQ ID NO: 11194 - DNA, 11 bp, Artificial Sequence
  synthetic circulating small noncoding RNA (sncRNA) 5' transfer RNA (tRNA) half
ttccggctcga

SEQ ID NO: 11195 - DNA, 12 bp, Artificial Sequence
  synthetic circulating small noncoding RNA (sncRNA) 5' transfer RNA (tRNA) half
ccgggtgccccc

SEQ ID NO: 11196 - DNA, 15 bp, Artificial Sequence
  synthetic circulating small noncoding RNA (sncRNA) 5' transfer RNA (tRNA) half
tcccggacgagccct

SEQ ID NO: 11197 - DNA, 26 bp, Artificial Sequence
  synthetic circulating small noncoding RNA (sncRNA) 5' transfer RNA (tRNA) half
gtgttcccacaccgggagtcgaaccc

SEQ ID NO: 11198 - DNA, 32 bp, Artificial Sequence
  synthetic circulating small noncoding RNA (sncRNA) 5' transfer RNA (tRNA) half
ccgggccgcggcggtgagagcgccgaatccta

SEQ ID NO: 11199 - DNA, 21 bp, Artificial Sequence
  synthetic circulating small noncoding RNA (sncRNA) 5' transfer RNA (tRNA) half
aacccagaggtcgatggatcg

SEQ ID NO: 11200 - DNA, 13 bp, Artificial Sequence
  synthetic circulating small noncoding RNA (sncRNA) 5' transfer RNA (tRNA) half
accggggaccttt

SEQ ID NO: 11201 - DNA, 36 bp, Artificial Sequence
  synthetic circulating small noncoding RNA (sncRNA) 5' transfer RNA (tRNA) half
cgcgggagaccggggttcgattccccgacggggaga

SEQ ID NO: 11202 - DNA, 21 bp, Artificial Sequence
  synthetic circulating small noncoding RNA (sncRNA) 5' transfer RNA (tRNA) half
gggtgcgagaggtcccgggtt

SEQ ID NO: 11203 - DNA, 20 bp, Artificial Sequence
  synthetic circulating small noncoding RNA (sncRNA) 5' transfer RNA (tRNA) half
taaaccaggggtcgcgagtt

SEQ ID NO: 11204 - DNA, 14 bp, Artificial Sequence
  synthetic circulating small noncoding RNA (sncRNA) 5' transfer RNA (tRNA) half
taggtcgctggttc

SEQ ID NO: 11205 - DNA, 34 bp, Artificial Sequence
  synthetic circulating small noncoding RNA (sncRNA) 5' transfer RNA (tRNA) half
tggggattgtgggttcgagtcccatctgggtcgc

SEQ ID NO: 11206 - DNA, 46 bp, Artificial Sequence
  synthetic circulating small noncoding RNA (sncRNA) 5' transfer RNA (tRNA) half
agaagtgacagtcgcccggctagctcagtcggtagagcatgagact

SEQ ID NO: 11207 - DNA, 25 bp, Artificial Sequence
  synthetic circulating small noncoding RNA (sncRNA) 5' transfer RNA (tRNA) half
attagggtggcagagccaggaaatt

SEQ ID NO: 11208 - DNA, 16 bp, Artificial Sequence
  synthetic circulating small noncoding RNA (sncRNA) 5' transfer RNA (tRNA) half
gcccggatagctcagt

SEQ ID NO: 11209 - DNA, 12 bp, Artificial Sequence
  synthetic circulating small noncoding RNA (sncRNA) 5' transfer RNA (tRNA) half
gtcggtagagca

SEQ ID NO: 11210 - DNA, 18 bp, Artificial Sequence
  synthetic circulating small noncoding RNA (sncRNA) 5' transfer RNA (tRNA) half
tcccatgctctaccgact

SEQ ID NO: 11211 - DNA, 34 bp, Artificial Sequence
  synthetic circulating small noncoding RNA (sncRNA) 5' transfer RNA (tRNA) half
tccagcgatccgagttcaaatctcggtggaacct

SEQ ID NO: 11212 - DNA, 21 bp, Artificial Sequence
  synthetic circulating small noncoding RNA (sncRNA) 5' transfer RNA (tRNA) half
gggatcgaacccggggcctca

SEQ ID NO: 11213 - DNA, 17 bp, Artificial Sequence
  synthetic circulating small noncoding RNA (sncRNA) 5' transfer RNA (tRNA) half
cgtcggggaatcgaacc

SEQ ID NO: 11214 - DNA, 34 bp, Artificial Sequence
  synthetic circulating small noncoding RNA (sncRNA) 5' transfer RNA (tRNA) half
cgtccctggtggtctagtggctaggattcggcgc

SEQ ID NO: 11215 - DNA, 31 bp, Artificial Sequence
  synthetic circulating small noncoding RNA (sncRNA) 5' transfer RNA (tRNA) half
aggattcggcgctctcaccgccgcggcccgg

SEQ ID NO: 11216 - DNA, 17 bp, Artificial Sequence
  synthetic circulating small noncoding RNA (sncRNA) 5' transfer RNA (tRNA) half
ttcagtggtagaattct

SEQ ID NO: 11217 - DNA, 13 bp, Artificial Sequence
  synthetic circulating small noncoding RNA (sncRNA) 5' transfer RNA (tRNA) half
cgaacccacaacc

SEQ ID NO: 11218 - DNA, 25 bp, Artificial Sequence
  synthetic circulating small noncoding RNA (sncRNA) 5' transfer RNA (tRNA) half
agggcccggatagctcagtcggtag

SEQ ID NO: 11219 - DNA, 10 bp, Artificial Sequence
  synthetic circulating small noncoding RNA (sncRNA) 5' transfer RNA (tRNA) half
cgggaatcga

SEQ ID NO: 11220 - DNA, 33 bp, Artificial Sequence
  synthetic circulating small noncoding RNA (sncRNA) 5' transfer RNA (tRNA) half
ccatgctctaccgactgagctagccgggcagat

SEQ ID NO: 11221 - DNA, 34 bp, Artificial Sequence
  synthetic circulating small noncoding RNA (sncRNA) 5' transfer RNA (tRNA) half
gcacgaggccccgggttcaatccccggcacctcc

SEQ ID NO: 11222 - DNA, 15 bp, Artificial Sequence
  synthetic circulating small noncoding RNA (sncRNA) 5' transfer RNA (tRNA) half
cggttaacagccgaa

SEQ ID NO: 11223 - DNA, 33 bp, Artificial Sequence
  synthetic circulating small noncoding RNA (sncRNA) 5' transfer RNA (tRNA) half
agtcagacgccttatccattaggccacgtggtc

SEQ ID NO: 11224 - DNA, 35 bp, Artificial Sequence
  synthetic circulating small noncoding RNA (sncRNA) 5' transfer RNA (tRNA) half
cgcgggagaccggggttcgattccccgacggggag

SEQ ID NO: 11225 - DNA, 25 bp, Artificial Sequence
  synthetic circulating small noncoding RNA (sncRNA) 5' transfer RNA (tRNA) half
gtcaggatggccgagtggtctaagg

SEQ ID NO: 11226 - DNA, 13 bp, Artificial Sequence
  synthetic circulating small noncoding RNA (sncRNA) 5' transfer RNA (tRNA) half
tcggtgggacctc

SEQ ID NO: 11227 - DNA, 12 bp, Artificial Sequence
  synthetic circulating small noncoding RNA (sncRNA) 5' transfer RNA (tRNA) half
aacccggaacct

SEQ ID NO: 11228 - DNA, 13 bp, Artificial Sequence
  synthetic circulating small noncoding RNA (sncRNA) 5' transfer RNA (tRNA) half
ggagatcctgggt

SEQ ID NO: 11229 - DNA, 29 bp, Artificial Sequence
  synthetic circulating small noncoding RNA (sncRNA) 5' transfer RNA (tRNA) half
acgaggccctgggttcgatccccagcacc

SEQ ID NO: 11230 - DNA, 23 bp, Artificial Sequence
  synthetic circulating small noncoding RNA (sncRNA) 5' transfer RNA (tRNA) half
ctgtagcagaggatggtttcgat

SEQ ID NO: 11231 - DNA, 15 bp, Artificial Sequence
  synthetic circulating small noncoding RNA (sncRNA) 5' transfer RNA (tRNA) half
ggccgagaccgtccc

SEQ ID NO: 11232 - DNA, 15 bp, Artificial Sequence
  synthetic circulating small noncoding RNA (sncRNA) 5' transfer RNA (tRNA) half
agaatcataccccta

SEQ ID NO: 11233 - DNA, 32 bp, Artificial Sequence
  synthetic circulating small noncoding RNA (sncRNA) 5' transfer RNA (tRNA) half
cgggaggcccgggttcgattcccggcccatgc

SEQ ID NO: 11234 - DNA, 27 bp, Artificial Sequence
  synthetic circulating small noncoding RNA (sncRNA) 5' transfer RNA (tRNA) half
agtgggattcgaacccacgcctccatt

SEQ ID NO: 11235 - DNA, 24 bp, Artificial Sequence
  synthetic circulating small noncoding RNA (sncRNA) 5' transfer RNA (tRNA) half
gagttcaaatctcggtgggacctc

SEQ ID NO: 11236 - DNA, 19 bp, Artificial Sequence
  synthetic circulating small noncoding RNA (sncRNA) 5' transfer RNA (tRNA) half
aaaccgggcggaaacaatg

SEQ ID NO: 11237 - DNA, 16 bp, Artificial Sequence
  synthetic circulating small noncoding RNA (sncRNA) 5' transfer RNA (tRNA) half
cgccgcggcccgggtt

SEQ ID NO: 11238 - DNA, 37 bp, Artificial Sequence
  synthetic circulating small noncoding RNA (sncRNA) 5' transfer RNA (tRNA) half
ccccgggtgggactcgaacccacaatccctggcttag

SEQ ID NO: 11239 - DNA, 34 bp, Artificial Sequence
  synthetic circulating small noncoding RNA (sncRNA) 5' transfer RNA (tRNA) half
acaggcggggatactaaccactatactaacgagg

SEQ ID NO: 11240 - DNA, 47 bp, Artificial Sequence
  synthetic circulating small noncoding RNA (sncRNA) 5' transfer RNA (tRNA) half
ttgtgccccgtgtgaggatcgaactcacgaccttcagattatgagac

SEQ ID NO: 11241 - DNA, 21 bp, Artificial Sequence
  synthetic circulating small noncoding RNA (sncRNA) 5' transfer RNA (tRNA) half
ctctaccgactgagctagccg

SEQ ID NO: 11242 - DNA, 17 bp, Artificial Sequence
  synthetic circulating small noncoding RNA (sncRNA) 5' transfer RNA (tRNA) half
cggcccgggttcgactc

SEQ ID NO: 11243 - DNA, 12 bp, Artificial Sequence
  synthetic circulating small noncoding RNA (sncRNA) 5' transfer RNA (tRNA) half
tcccgcgtgaca

SEQ ID NO: 11244 - DNA, 17 bp, Artificial Sequence
  synthetic circulating small noncoding RNA (sncRNA) 5' transfer RNA (tRNA) half
caccgctgggattcgaa

SEQ ID NO: 11245 - DNA, 21 bp, Artificial Sequence
  synthetic circulating small noncoding RNA (sncRNA) 5' transfer RNA (tRNA) half
ggattcagagtccagagtgct

SEQ ID NO: 11246 - DNA, 14 bp, Artificial Sequence
  synthetic circulating small noncoding RNA (sncRNA) 5' transfer RNA (tRNA) half
aggcggggatactc

SEQ ID NO: 11247 - DNA, 23 bp, Artificial Sequence
  synthetic circulating small noncoding RNA (sncRNA) 5' transfer RNA (tRNA) half
gaacgcagcgccttagaccgctc

SEQ ID NO: 11248 - DNA, 18 bp, Artificial Sequence
  synthetic circulating small noncoding RNA (sncRNA) 5' transfer RNA (tRNA) half
taatggttagcactctgg

SEQ ID NO: 11249 - DNA, 14 bp, Artificial Sequence
  synthetic circulating small noncoding RNA (sncRNA) 5' transfer RNA (tRNA) half
cggttaggattcct

SEQ ID NO: 11250 - DNA, 30 bp, Artificial Sequence
  synthetic circulating small noncoding RNA (sncRNA) 5' transfer RNA (tRNA) half
acgacgaggatgggattcgaacccacgcgt

SEQ ID NO: 11251 - DNA, 30 bp, Artificial Sequence
  synthetic circulating small noncoding RNA (sncRNA) 5' transfer RNA (tRNA) half
tgctctaccgactgagctatccgggctctt

SEQ ID NO: 11252 - DNA, 15 bp, Artificial Sequence
  synthetic circulating small noncoding RNA (sncRNA) 5' transfer RNA (tRNA) half
gaacctagaatcttc

SEQ ID NO: 11253 - DNA, 17 bp, Artificial Sequence
  synthetic circulating small noncoding RNA (sncRNA) 5' transfer RNA (tRNA) half
aatctcggtgggacctt

SEQ ID NO: 11254 - DNA, 28 bp, Artificial Sequence
  synthetic circulating small noncoding RNA (sncRNA) 5' transfer RNA (tRNA) half
ggcgaatgtgataaccactacactacgg

SEQ ID NO: 11255 - DNA, 23 bp, Artificial Sequence
  synthetic circulating small noncoding RNA (sncRNA) 5' transfer RNA (tRNA) half
gcccagcacgcttccgctgcgcc

SEQ ID NO: 11256 - DNA, 31 bp, Artificial Sequence
  synthetic circulating small noncoding RNA (sncRNA) 5' transfer RNA (tRNA) half
attgcaggttcgagtcctgccgcggtcgact

SEQ ID NO: 11257 - DNA, 21 bp, Artificial Sequence
  synthetic circulating small noncoding RNA (sncRNA) 5' transfer RNA (tRNA) half
aatggataaggcatcagcctc

SEQ ID NO: 11258 - DNA, 18 bp, Artificial Sequence
  synthetic circulating small noncoding RNA (sncRNA) 5' transfer RNA (tRNA) half
actccgccgggactcgaa

SEQ ID NO: 11259 - DNA, 31 bp, Artificial Sequence
  synthetic circulating small noncoding RNA (sncRNA) 5' transfer RNA (tRNA) half
agacgacgaggatgggattcgaacccacgcg

SEQ ID NO: 11260 - DNA, 34 bp, Artificial Sequence
  synthetic circulating small noncoding RNA (sncRNA) 5' transfer RNA (tRNA) half
gtgtttctgtagtgtagtggttatcacgctcgcc

SEQ ID NO: 11261 - DNA, 11 bp, Artificial Sequence
  synthetic circulating small noncoding RNA (sncRNA) 5' transfer RNA (tRNA) half
ctgttcgggcg

SEQ ID NO: 11262 - DNA, 32 bp, Artificial Sequence
  synthetic circulating small noncoding RNA (sncRNA) 5' transfer RNA (tRNA) half
tcagaagattccaggttcgactcctggctggc

SEQ ID NO: 11263 - DNA, 11 bp, Artificial Sequence
  synthetic circulating small noncoding RNA (sncRNA) 5' transfer RNA (tRNA) half
cgggactcgaa

SEQ ID NO: 11264 - DNA, 8 bp, Artificial Sequence
  synthetic circulating small noncoding RNA (sncRNA) 5' transfer RNA (tRNA) half
ggtcgatg

SEQ ID NO: 11265 - DNA, 12 bp, Artificial Sequence
  synthetic circulating small noncoding RNA (sncRNA) 5' transfer RNA (tRNA) half
tagtactctgcg

SEQ ID NO: 11266 - DNA, 17 bp, Artificial Sequence
  synthetic circulating small noncoding RNA (sncRNA) 5' transfer RNA (tRNA) half
ggggatcgaacccgggg

SEQ ID NO: 11267 - DNA, 16 bp, Artificial Sequence
  synthetic circulating small noncoding RNA (sncRNA) 5' transfer RNA (tRNA) half
gcggttatcacgtctg

SEQ ID NO: 11268 - DNA, 16 bp, Artificial Sequence
  synthetic circulating small noncoding RNA (sncRNA) 5' transfer RNA (tRNA) half
tcccggtgtgggaaac

SEQ ID NO: 11269 - DNA, 30 bp, Artificial Sequence
  synthetic circulating small noncoding RNA (sncRNA) 5' transfer RNA (tRNA) half
ccaatgcgctatccattgcgccacagagcc

SEQ ID NO: 11270 - DNA, 12 bp, Artificial Sequence
  synthetic circulating small noncoding RNA (sncRNA) 5' transfer RNA (tRNA) half
cggttcccggcc

SEQ ID NO: 11271 - DNA, 36 bp, Artificial Sequence
  synthetic circulating small noncoding RNA (sncRNA) 5' transfer RNA (tRNA) half
gtgtggcccgtacggggatcgaacccgcgaccttgg

SEQ ID NO: 11272 - DNA, 15 bp, Artificial Sequence
  synthetic circulating small noncoding RNA (sncRNA) 5' transfer RNA (tRNA) half
gatccatcgacctct

SEQ ID NO: 11273 - DNA, 30 bp, Artificial Sequence
  synthetic circulating small noncoding RNA (sncRNA) 5' transfer RNA (tRNA) half
tggagggggcacccggatttgaaccaggga

SEQ ID NO: 11274 - DNA, 19 bp, Artificial Sequence
  synthetic circulating small noncoding RNA (sncRNA) 5' transfer RNA (tRNA) half
tcaaagtccagagtgctaa

SEQ ID NO: 11275 - DNA, 17 bp, Artificial Sequence
  synthetic circulating small noncoding RNA (sncRNA) 5' transfer RNA (tRNA) half
ccactcggccacctcgt

SEQ ID NO: 11276 - DNA, 20 bp, Artificial Sequence
  synthetic circulating small noncoding RNA (sncRNA) 5' transfer RNA (tRNA) half
aatcccactcctgacagcct

SEQ ID NO: 11277 - DNA, 35 bp, Artificial Sequence
  synthetic circulating small noncoding RNA (sncRNA) 5' transfer RNA (tRNA) half
cagggattgtgggttcgagtcccatctggggtggt

SEQ ID NO: 11278 - DNA, 8 bp, Artificial Sequence
  synthetic circulating small noncoding RNA (sncRNA) 5' transfer RNA (tRNA) half
acgcgaaa

SEQ ID NO: 11279 - DNA, 14 bp, Artificial Sequence
  synthetic circulating small noncoding RNA (sncRNA) 5' transfer RNA (tRNA) half
caggttcgactcct

SEQ ID NO: 11280 - DNA, 19 bp, Artificial Sequence
  synthetic circulating small noncoding RNA (sncRNA) 5' transfer RNA (tRNA) half
gaactcgcgacccctggtt

SEQ ID NO: 11281 - DNA, 11 bp, Artificial Sequence
  synthetic circulating small noncoding RNA (sncRNA) 5' transfer RNA (tRNA) half
tgcgagaggtc

SEQ ID NO: 11282 - DNA, 11 bp, Artificial Sequence
  synthetic circulating small noncoding RNA (sncRNA) 5' transfer RNA (tRNA) half
ctcggccacgc

SEQ ID NO: 11283 - DNA, 24 bp, Artificial Sequence
  synthetic circulating small noncoding RNA (sncRNA) 5' transfer RNA (tRNA) half
gatgctctaccgactgagctatcc

SEQ ID NO: 11284 - DNA, 16 bp, Artificial Sequence
  synthetic circulating small noncoding RNA (sncRNA) 5' transfer RNA (tRNA) half
cgaacccgcgaccttg

SEQ ID NO: 11285 - DNA, 43 bp, Artificial Sequence
  synthetic circulating small noncoding RNA (sncRNA) 5' transfer RNA (tRNA) half
ccggctagctcagtcggtagagcatgagactcttaatctcagg

SEQ ID NO: 11286 - DNA, 12 bp, Artificial Sequence
  synthetic circulating small noncoding RNA (sncRNA) 5' transfer RNA (tRNA) half
cgagaatcatac

SEQ ID NO: 11287 - DNA, 33 bp, Artificial Sequence
  synthetic circulating small noncoding RNA (sncRNA) 5' transfer RNA (tRNA) half
ttccgtagtgtagtggttatcacgttcgcctca

SEQ ID NO: 11288 - DNA, 21 bp, Artificial Sequence
  synthetic circulating small noncoding RNA (sncRNA) 5' transfer RNA (tRNA) half
tcgatcccactacctcttgca

SEQ ID NO: 11289 - DNA, 12 bp, Artificial Sequence
  synthetic circulating small noncoding RNA (sncRNA) 5' transfer RNA (tRNA) half
ctcgtccgggat

SEQ ID NO: 11290 - DNA, 22 bp, Artificial Sequence
  synthetic circulating small noncoding RNA (sncRNA) 5' transfer RNA (tRNA) half
aatcctaaccgctagaccatgt

SEQ ID NO: 11291 - DNA, 24 bp, Artificial Sequence
  synthetic circulating small noncoding RNA (sncRNA) 5' transfer RNA (tRNA) half
gttcgaactcaggaccttcagatt

SEQ ID NO: 11292 - DNA, 42 bp, Artificial Sequence
  synthetic circulating small noncoding RNA (sncRNA) 5' transfer RNA (tRNA) half
gccacgcgggaggcccgggttcgattcccggccaatgcacga

SEQ ID NO: 11293 - DNA, 17 bp, Artificial Sequence
  synthetic circulating small noncoding RNA (sncRNA) 5' transfer RNA (tRNA) half
ctgtcacgcgggagacc

SEQ ID NO: 11294 - DNA, 26 bp, Artificial Sequence
  synthetic circulating small noncoding RNA (sncRNA) 5' transfer RNA (tRNA) half
gtgaggcgaacgtgataaccactaca

SEQ ID NO: 11295 - DNA, 15 bp, Artificial Sequence
  synthetic circulating small noncoding RNA (sncRNA) 5' transfer RNA (tRNA) half
gcgggagaccggggt

SEQ ID NO: 11296 - DNA, 22 bp, Artificial Sequence
  synthetic circulating small noncoding RNA (sncRNA) 5' transfer RNA (tRNA) half
cgggaatcgaacccgggcctcc

SEQ ID NO: 11297 - DNA, 28 bp, Artificial Sequence
  synthetic circulating small noncoding RNA (sncRNA) 5' transfer RNA (tRNA) half
aaaccaggaatcctaaccgctagaccat

SEQ ID NO: 11298 - DNA, 21 bp, Artificial Sequence
  synthetic circulating small noncoding RNA (sncRNA) 5' transfer RNA (tRNA) half
aactcgcgacccctggtttac

SEQ ID NO: 11299 - DNA, 14 bp, Artificial Sequence
  synthetic circulating small noncoding RNA (sncRNA) 5' transfer RNA (tRNA) half
catgctctaccgac

SEQ ID NO: 11300 - DNA, 35 bp, Artificial Sequence
  synthetic circulating small noncoding RNA (sncRNA) 5' transfer RNA (tRNA) half
tgaactcggatcgctggattcagagtccagagtgc

SEQ ID NO: 11301 - DNA, 34 bp, Artificial Sequence
  synthetic circulating small noncoding RNA (sncRNA) 5' transfer RNA (tRNA) half
gggcccggatagctcagtcggtagagcatcagac

SEQ ID NO: 11302 - DNA, 24 bp, Artificial Sequence
  synthetic circulating small noncoding RNA (sncRNA) 5' transfer RNA (tRNA) half
tagctcagtcggtagagcatgaga

SEQ ID NO: 11303 - DNA, 21 bp, Artificial Sequence
  synthetic circulating small noncoding RNA (sncRNA) 5' transfer RNA (tRNA) half
ggtcccaccgagatttgaact

SEQ ID NO: 11304 - DNA, 35 bp, Artificial Sequence
  synthetic circulating small noncoding RNA (sncRNA) 5' transfer RNA (tRNA) half
cttaggtcgctggttcgattccggctcgaaggact

SEQ ID NO: 11305 - DNA, 33 bp, Artificial Sequence
  synthetic circulating small noncoding RNA (sncRNA) 5' transfer RNA (tRNA) half
ccgaccacgaagggactcgaaccctcaatcttc

SEQ ID NO: 11306 - DNA, 14 bp, Artificial Sequence
  synthetic circulating small noncoding RNA (sncRNA) 5' transfer RNA (tRNA) half
cgaacccgggcctc

SEQ ID NO: 11307 - DNA, 32 bp, Artificial Sequence
  synthetic circulating small noncoding RNA (sncRNA) 5' transfer RNA (tRNA) half
attcagagtccagagtgctagccattacacca

SEQ ID NO: 11308 - DNA, 29 bp, Artificial Sequence
  synthetic circulating small noncoding RNA (sncRNA) 5' transfer RNA (tRNA) half
cgttccttcgagccggattcgaaccagcg

SEQ ID NO: 11309 - DNA, 17 bp, Artificial Sequence
  synthetic circulating small noncoding RNA (sncRNA) 5' transfer RNA (tRNA) half
tgcagtcaaatgctcta

SEQ ID NO: 11310 - DNA, 32 bp, Artificial Sequence
  synthetic circulating small noncoding RNA (sncRNA) 5' transfer RNA (tRNA) half
gcccagctagcttagttggtagagcatgagac

SEQ ID NO: 11311 - DNA, 31 bp, Artificial Sequence
  synthetic circulating small noncoding RNA (sncRNA) 5' transfer RNA (tRNA) half
aaaggttggtggttcgagcccacccagggac

SEQ ID NO: 11312 - DNA, 32 bp, Artificial Sequence
  synthetic circulating small noncoding RNA (sncRNA) 5' transfer RNA (tRNA) half
ccgagaggtcccgggttcaaatcccggacgag

SEQ ID NO: 11313 - DNA, 23 bp, Artificial Sequence
  synthetic circulating small noncoding RNA (sncRNA) 5' transfer RNA (tRNA) half
gcccggctagctcagtcggtaga

SEQ ID NO: 11314 - DNA, 42 bp, Artificial Sequence
  synthetic circulating small noncoding RNA (sncRNA) 5' transfer RNA (tRNA) half
agcctccccgtcggggaatcgaaccccggtctcccgcgtgac

SEQ ID NO: 11315 - DNA, 31 bp, Artificial Sequence
  synthetic circulating small noncoding RNA (sncRNA) 5' transfer RNA (tRNA) half
ggctccgtggcttagctggttaaagcgcctg

SEQ ID NO: 11316 - DNA, 37 bp, Artificial Sequence
  synthetic circulating small noncoding RNA (sncRNA) 5' transfer RNA (tRNA) half
ttgaccccgacgtgacttgaacacgcaaccttctgat

SEQ ID NO: 11317 - DNA, 33 bp, Artificial Sequence
  synthetic circulating small noncoding RNA (sncRNA) 5' transfer RNA (tRNA) half
acgcgaaaggtccccggttcgaaaccgggcgga

SEQ ID NO: 11318 - DNA, 10 bp, Artificial Sequence
  synthetic circulating small noncoding RNA (sncRNA) 5' transfer RNA (tRNA) half
tgaacccggg

SEQ ID NO: 11319 - DNA, 28 bp, Artificial Sequence
  synthetic circulating small noncoding RNA (sncRNA) 5' transfer RNA (tRNA) half
gagaccggggttcgattccccgacgggg

SEQ ID NO: 11320 - DNA, 21 bp, Artificial Sequence
  synthetic circulating small noncoding RNA (sncRNA) 5' transfer RNA (tRNA) half
gtataggggttagtactctgc

SEQ ID NO: 11321 - DNA, 20 bp, Artificial Sequence
  synthetic circulating small noncoding RNA (sncRNA) 5' transfer RNA (tRNA) half
gctaagcgcccgaacaggga

SEQ ID NO: 11322 - DNA, 15 bp, Artificial Sequence
  synthetic circulating small noncoding RNA (sncRNA) 5' transfer RNA (tRNA) half
gcgttatccattgcg

SEQ ID NO: 11323 - DNA, 25 bp, Artificial Sequence
  synthetic circulating small noncoding RNA (sncRNA) 5' transfer RNA (tRNA) half
tcgcctgccacgcgggaggcccggg

SEQ ID NO: 11324 - DNA, 27 bp, Artificial Sequence
  synthetic circulating small noncoding RNA (sncRNA) 5' transfer RNA (tRNA) half
cctgggttcgagccccagtggaaccac

SEQ ID NO: 11325 - DNA, 14 bp, Artificial Sequence
  synthetic circulating small noncoding RNA (sncRNA) 5' transfer RNA (tRNA) half
gctctaccatttga

SEQ ID NO: 11326 - DNA, 19 bp, Artificial Sequence
  synthetic circulating small noncoding RNA (sncRNA) 5' transfer RNA (tRNA) half
ttccgactccgccgggact

SEQ ID NO: 11327 - DNA, 30 bp, Artificial Sequence
  synthetic circulating small noncoding RNA (sncRNA) 5' transfer RNA (tRNA) half
attcagagtccagagtgctaaccattacac

SEQ ID NO: 11328 - DNA, 15 bp, Artificial Sequence
  synthetic circulating small noncoding RNA (sncRNA) 5' transfer RNA (tRNA) half
aatcccggacgagcc

SEQ ID NO: 11329 - DNA, 26 bp, Artificial Sequence
  synthetic circulating small noncoding RNA (sncRNA) 5' transfer RNA (tRNA) half
tcggatcgctggattcagagtccaga

SEQ ID NO: 11330 - DNA, 23 bp, Artificial Sequence
  synthetic circulating small noncoding RNA (sncRNA) 5' transfer RNA (tRNA) half
cgcaccctaagcgagaatcatac

SEQ ID NO: 11331 - DNA, 36 bp, Artificial Sequence
  synthetic circulating small noncoding RNA (sncRNA) 5' transfer RNA (tRNA) half
agaagattgagggttcgagtcccttcgtggtcgaaa

SEQ ID NO: 11332 - DNA, 18 bp, Artificial Sequence
  synthetic circulating small noncoding RNA (sncRNA) 5' transfer RNA (tRNA) half
ggttcgactcccggtgtg

SEQ ID NO: 11333 - DNA, 40 bp, Artificial Sequence
  synthetic circulating small noncoding RNA (sncRNA) 5' transfer RNA (tRNA) half
ataatctgaaggtcctgagttcgaacctcagagggggcag

SEQ ID NO: 11334 - DNA, 31 bp, Artificial Sequence
  synthetic circulating small noncoding RNA (sncRNA) 5' transfer RNA (tRNA) half
ctcatgctctaccgactgagctagccgggcc

SEQ ID NO: 11335 - DNA, 12 bp, Artificial Sequence
  synthetic circulating small noncoding RNA (sncRNA) 5' transfer RNA (tRNA) half
cccggctagctc

SEQ ID NO: 11336 - DNA, 18 bp, Artificial Sequence
  synthetic circulating small noncoding RNA (sncRNA) 5' transfer RNA (tRNA) half
acccgggcctcccgcgtg

SEQ ID NO: 11337 - DNA, 19 bp, Artificial Sequence
  synthetic circulating small noncoding RNA (sncRNA) 5' transfer RNA (tRNA) half
tctgaatccagcgatccga

SEQ ID NO: 11338 - DNA, 24 bp, Artificial Sequence
  synthetic circulating small noncoding RNA (sncRNA) 5' transfer RNA (tRNA) half
cgaacccacgcagacatatgtcca

SEQ ID NO: 11339 - DNA, 19 bp, Artificial Sequence
  synthetic circulating small noncoding RNA (sncRNA) 5' transfer RNA (tRNA) half
tgagagcgccgaatcctaa

SEQ ID NO: 11340 - DNA, 29 bp, Artificial Sequence
  synthetic circulating small noncoding RNA (sncRNA) 5' transfer RNA (tRNA) half
tttccgtagtgtagtggttatcacgctcg

SEQ ID NO: 11341 - DNA, 14 bp, Artificial Sequence
  synthetic circulating small noncoding RNA (sncRNA) 5' transfer RNA (tRNA) half
ggcctcccgcgtgg

SEQ ID NO: 11342 - DNA, 18 bp, Artificial Sequence
  synthetic circulating small noncoding RNA (sncRNA) 5' transfer RNA (tRNA) half
gccctctctgaggttcga

SEQ ID NO: 11343 - DNA, 38 bp, Artificial Sequence
  synthetic circulating small noncoding RNA (sncRNA) 5' transfer RNA (tRNA) half
gtcgaacccgggccgcctgggtgaaaaccaggaatcct

SEQ ID NO: 11344 - DNA, 26 bp, Artificial Sequence
  synthetic circulating small noncoding RNA (sncRNA) 5' transfer RNA (tRNA) half
gaatcctaaccactagaccaccaggg

SEQ ID NO: 11345 - DNA, 17 bp, Artificial Sequence
  synthetic circulating small noncoding RNA (sncRNA) 5' transfer RNA (tRNA) half
tcttcgggggcgtgggt

SEQ ID NO: 11346 - DNA, 27 bp, Artificial Sequence
  synthetic circulating small noncoding RNA (sncRNA) 5' transfer RNA (tRNA) half
tcgaacccacgcgtgcagagcacaatg

SEQ ID NO: 11347 - DNA, 34 bp, Artificial Sequence
  synthetic circulating small noncoding RNA (sncRNA) 5' transfer RNA (tRNA) half
tgggcccagcacgcttccgctgcgccactctgct

SEQ ID NO: 11348 - DNA, 10 bp, Artificial Sequence
  synthetic circulating small noncoding RNA (sncRNA) 5' transfer RNA (tRNA) half
gcatttgact

SEQ ID NO: 11349 - DNA, 20 bp, Artificial Sequence
  synthetic circulating small noncoding RNA (sncRNA) 5' transfer RNA (tRNA) half
cgttcaggtcgcagtctccc

SEQ ID NO: 11350 - DNA, 36 bp, Artificial Sequence
  synthetic circulating small noncoding RNA (sncRNA) 5' transfer RNA (tRNA) half
gttaggcgagcgtgatgaccactacactacggaaac

SEQ ID NO: 11351 - DNA, 25 bp, Artificial Sequence
  synthetic circulating small noncoding RNA (sncRNA) 5' transfer RNA (tRNA) half
ttcagagtccagagtgctaaccatt

SEQ ID NO: 11352 - DNA, 14 bp, Artificial Sequence
  synthetic circulating small noncoding RNA (sncRNA) 5' transfer RNA (tRNA) half
ccctgttcgggcgc

SEQ ID NO: 11353 - DNA, 25 bp, Artificial Sequence
  synthetic circulating small noncoding RNA (sncRNA) 5' transfer RNA (tRNA) half
agcgccgaatcctaaccactagacc

SEQ ID NO: 11354 - DNA, 10 bp, Artificial Sequence
  synthetic circulating small noncoding RNA (sncRNA) 5' transfer RNA (tRNA) half
cgggatcgaa

SEQ ID NO: 11355 - DNA, 17 bp, Artificial Sequence
  synthetic circulating small noncoding RNA (sncRNA) 5' transfer RNA (tRNA) half
gccgaaacccgggatcg

SEQ ID NO: 11356 - DNA, 23 bp, Artificial Sequence
  synthetic circulating small noncoding RNA (sncRNA) 5' transfer RNA (tRNA) half
agggttcaagtccctgttcgggc

SEQ ID NO: 11357 - DNA, 19 bp, Artificial Sequence
  synthetic circulating small noncoding RNA (sncRNA) 5' transfer RNA (tRNA) half
gggagactgcgacctgaac

SEQ ID NO: 11358 - DNA, 20 bp, Artificial Sequence
  synthetic circulating small noncoding RNA (sncRNA) 5' transfer RNA (tRNA) half
cactcctgacagcctcgcct

SEQ ID NO: 11359 - DNA, 23 bp, Artificial Sequence
  synthetic circulating small noncoding RNA (sncRNA) 5' transfer RNA (tRNA) half
ctggactctgaatccagcgaccc

SEQ ID NO: 11360 - DNA, 13 bp, Artificial Sequence
  synthetic circulating small noncoding RNA (sncRNA) 5' transfer RNA (tRNA) half
cggatcgctggat

SEQ ID NO: 11361 - DNA, 24 bp, Artificial Sequence
  synthetic circulating small noncoding RNA (sncRNA) 5' transfer RNA (tRNA) half
ggtgtagtggtatcatgcaagatt

SEQ ID NO: 11362 - DNA, 26 bp, Artificial Sequence
  synthetic circulating small noncoding RNA (sncRNA) 5' transfer RNA (tRNA) half
tgaccgggaatcgaacccgggccgcg

SEQ ID NO: 11363 - DNA, 20 bp, Artificial Sequence
  synthetic circulating small noncoding RNA (sncRNA) 5' transfer RNA (tRNA) half
gggaatcgaacccgggcctc

SEQ ID NO: 11364 - DNA, 17 bp, Artificial Sequence
  synthetic circulating small noncoding RNA (sncRNA) 5' transfer RNA (tRNA) half
aggattcgaacctgcgc

SEQ ID NO: 11365 - DNA, 9 bp, Artificial Sequence
  synthetic circulating small noncoding RNA (sncRNA) 5' transfer RNA (tRNA) half
aatcgaacc

SEQ ID NO: 11366 - DNA, 30 bp, Artificial Sequence
  synthetic circulating small noncoding RNA (sncRNA) 5' transfer RNA (tRNA) half
gtgatcgtatagtggttagtactctgcgtt

SEQ ID NO: 11367 - DNA, 30 bp, Artificial Sequence
  synthetic circulating small noncoding RNA (sncRNA) 5' transfer RNA (tRNA) half
gaccccgacgtgattcgaacacgcagcctt

SEQ ID NO: 11368 - DNA, 30 bp, Artificial Sequence
  synthetic circulating small noncoding RNA (sncRNA) 5' transfer RNA (tRNA) half
ttcgacgaggatgggattcgaacccatgcg

SEQ ID NO: 11369 - DNA, 14 bp, Artificial Sequence
  synthetic circulating small noncoding RNA (sncRNA) 5' transfer RNA (tRNA) half
tttccctgaccggg

SEQ ID NO: 11370 - DNA, 18 bp, Artificial Sequence
  synthetic circulating small noncoding RNA (sncRNA) 5' transfer RNA (tRNA) half
aactggagatgccgggga

SEQ ID NO: 11371 - DNA, 17 bp, Artificial Sequence
  synthetic circulating small noncoding RNA (sncRNA) 5' transfer RNA (tRNA) half
ccccgtcggggaatcga

SEQ ID NO: 11372 - DNA, 13 bp, Artificial Sequence
  synthetic circulating small noncoding RNA (sncRNA) 5' transfer RNA (tRNA) half
caggcggcccggg

SEQ ID NO: 11373 - DNA, 9 bp, Artificial Sequence
  synthetic circulating small noncoding RNA (sncRNA) 5' transfer RNA (tRNA) half
ggcgaacgt

SEQ ID NO: 11374 - DNA, 19 bp, Artificial Sequence
  synthetic circulating small noncoding RNA (sncRNA) 5' transfer RNA (tRNA) half
ggctccatagctcaggggt

SEQ ID NO: 11375 - DNA, 18 bp, Artificial Sequence
  synthetic circulating small noncoding RNA (sncRNA) 5' transfer RNA (tRNA) half
cggtagagcatgagactc

SEQ ID NO: 11376 - DNA, 16 bp, Artificial Sequence
  synthetic circulating small noncoding RNA (sncRNA) 5' transfer RNA (tRNA) half
cggtctaaggcgctgc

SEQ ID NO: 11377 - DNA, 20 bp, Artificial Sequence
  synthetic circulating small noncoding RNA (sncRNA) 5' transfer RNA (tRNA) half
tcccggacgagccccatctt

SEQ ID NO: 11378 - DNA, 35 bp, Artificial Sequence
  synthetic circulating small noncoding RNA (sncRNA) 5' transfer RNA (tRNA) half
gcgggagaccggggttcgattccccgacggggagt

SEQ ID NO: 11379 - DNA, 17 bp, Artificial Sequence
  synthetic circulating small noncoding RNA (sncRNA) 5' transfer RNA (tRNA) half
ctgaatccagcgatccg

SEQ ID NO: 11380 - DNA, 27 bp, Artificial Sequence
  synthetic circulating small noncoding RNA (sncRNA) 5' transfer RNA (tRNA) half
agtcggtagagcatgagactcttaatc

SEQ ID NO: 11381 - DNA, 14 bp, Artificial Sequence
  synthetic circulating small noncoding RNA (sncRNA) 5' transfer RNA (tRNA) half
ttagcactctggac

SEQ ID NO: 11382 - DNA, 19 bp, Artificial Sequence
  synthetic circulating small noncoding RNA (sncRNA) 5' transfer RNA (tRNA) half
taaaccgaagatcgcgggt

SEQ ID NO: 11383 - DNA, 23 bp, Artificial Sequence
  synthetic circulating small noncoding RNA (sncRNA) 5' transfer RNA (tRNA) half
cgctggtgtagtggtatcatgca

SEQ ID NO: 11384 - DNA, 32 bp, Artificial Sequence
  synthetic circulating small noncoding RNA (sncRNA) 5' transfer RNA (tRNA) half
gcgggaggcccgggttcgattcccggcccatg

SEQ ID NO: 11385 - DNA, 31 bp, Artificial Sequence
  synthetic circulating small noncoding RNA (sncRNA) 5' transfer RNA (tRNA) half
gccgctggtgtagtggtatcatgcaagattc

SEQ ID NO: 11386 - DNA, 17 bp, Artificial Sequence
  synthetic circulating small noncoding RNA (sncRNA) 5' transfer RNA (tRNA) half
tagtggtatcatgcaag

SEQ ID NO: 11387 - DNA, 13 bp, Artificial Sequence
  synthetic circulating small noncoding RNA (sncRNA) 5' transfer RNA (tRNA) half
aaggtccccggtt

SEQ ID NO: 11388 - DNA, 31 bp, Artificial Sequence
  synthetic circulating small noncoding RNA (sncRNA) 5' transfer RNA (tRNA) half
agtcagacgcgctaccattgcgccacgaggt

SEQ ID NO: 11389 - DNA, 21 bp, Artificial Sequence
  synthetic circulating small noncoding RNA (sncRNA) 5' transfer RNA (tRNA) half
gaacccaggatctcctgttta

SEQ ID NO: 11390 - DNA, 12 bp, Artificial Sequence
  synthetic circulating small noncoding RNA (sncRNA) 5' transfer RNA (tRNA) half
agccagccagga

SEQ ID NO: 11391 - DNA, 12 bp, Artificial Sequence
  synthetic circulating small noncoding RNA (sncRNA) 5' transfer RNA (tRNA) half
ggctcgaaggac

SEQ ID NO: 11392 - DNA, 38 bp, Artificial Sequence
  synthetic circulating small noncoding RNA (sncRNA) 5' transfer RNA (tRNA) half
accgaccacgaagggactcgaaccctcaatcttctgat

SEQ ID NO: 11393 - DNA, 29 bp, Artificial Sequence
  synthetic circulating small noncoding RNA (sncRNA) 5' transfer RNA (tRNA) half
ggccccagcgagatttgaactcgcgaccc

SEQ ID NO: 11394 - DNA, 25 bp, Artificial Sequence
  synthetic circulating small noncoding RNA (sncRNA) 5' transfer RNA (tRNA) half
ctcatgctctaccgactgagctagc

SEQ ID NO: 11395 - DNA, 36 bp, Artificial Sequence
  synthetic circulating small noncoding RNA (sncRNA) 5' transfer RNA (tRNA) half
ccccgtcggggaattgaaccccggtctcccgcgtga

SEQ ID NO: 11396 - DNA, 24 bp, Artificial Sequence
  synthetic circulating small noncoding RNA (sncRNA) 5' transfer RNA (tRNA) half
gtcacgaacaggattcgaacctgt

SEQ ID NO: 11397 - DNA, 36 bp, Artificial Sequence
  synthetic circulating small noncoding RNA (sncRNA) 5' transfer RNA (tRNA) half
ccagggattgtgggttcgagtcccacctggggtaaa

SEQ ID NO: 11398 - DNA, 15 bp, Artificial Sequence
  synthetic circulating small noncoding RNA (sncRNA) 5' transfer RNA (tRNA) half
ttcaggtcgcagtct

SEQ ID NO: 11399 - DNA, 15 bp, Artificial Sequence
  synthetic circulating small noncoding RNA (sncRNA) 5' transfer RNA (tRNA) half
ttcgagcccacccag

SEQ ID NO: 11400 - DNA, 21 bp, Artificial Sequence
  synthetic circulating small noncoding RNA (sncRNA) 5' transfer RNA (tRNA) half
caggcggcccgggttcgactc

SEQ ID NO: 11401 - DNA, 17 bp, Artificial Sequence
  synthetic circulating small noncoding RNA (sncRNA) 5' transfer RNA (tRNA) half
tagtcgtggccgagtgg

SEQ ID NO: 11402 - DNA, 17 bp, Artificial Sequence
  synthetic circulating small noncoding RNA (sncRNA) 5' transfer RNA (tRNA) half
ggtatcatgcaagattc

SEQ ID NO: 11403 - DNA, 21 bp, Artificial Sequence
  synthetic circulating small noncoding RNA (sncRNA) 5' transfer RNA (tRNA) half
gatcctcagtggtctggggtg

SEQ ID NO: 11404 - DNA, 23 bp, Artificial Sequence
  synthetic circulating small noncoding RNA (sncRNA) 5' transfer RNA (tRNA) half
ccgtgatcgtatagtggttagta

SEQ ID NO: 11405 - DNA, 13 bp, Artificial Sequence
  synthetic circulating small noncoding RNA (sncRNA) 5' transfer RNA (tRNA) half
aggtcgctggttc

SEQ ID NO: 11406 - DNA, 12 bp, Artificial Sequence
  synthetic circulating small noncoding RNA (sncRNA) 5' transfer RNA (tRNA) half
tctaccgactga

SEQ ID NO: 11407 - DNA, 39 bp, Artificial Sequence
  synthetic circulating small noncoding RNA (sncRNA) 5' transfer RNA (tRNA) half
gatcagaagattgcaggttcgagtcctgccgcggtcgac

SEQ ID NO: 11408 - DNA, 21 bp, Artificial Sequence
  synthetic circulating small noncoding RNA (sncRNA) 5' transfer RNA (tRNA) half
cgtgttaggcgaatgtgataa

SEQ ID NO: 11409 - DNA, 20 bp, Artificial Sequence
  synthetic circulating small noncoding RNA (sncRNA) 5' transfer RNA (tRNA) half
cccggtctcccgcgtgacag

SEQ ID NO: 11410 - DNA, 34 bp, Artificial Sequence
  synthetic circulating small noncoding RNA (sncRNA) 5' transfer RNA (tRNA) half
gtttccgtagtgtagtggttagcgcgttcgccta

SEQ ID NO: 11411 - DNA, 18 bp, Artificial Sequence
  synthetic circulating small noncoding RNA (sncRNA) 5' transfer RNA (tRNA) half
accccgacgtgacttgaa

SEQ ID NO: 11412 - DNA, 30 bp, Artificial Sequence
  synthetic circulating small noncoding RNA (sncRNA) 5' transfer RNA (tRNA) half
acccatgcgtgcagagcacaatggattagc

SEQ ID NO: 11413 - DNA, 24 bp, Artificial Sequence
  synthetic circulating small noncoding RNA (sncRNA) 5' transfer RNA (tRNA) half
ggtagtgtggccgagcggtctaag

SEQ ID NO: 11414 - DNA, 33 bp, Artificial Sequence
  synthetic circulating small noncoding RNA (sncRNA) 5' transfer RNA (tRNA) half
gcccagctagcttagttggtagagcatgagact

SEQ ID NO: 11415 - DNA, 36 bp, Artificial Sequence
  synthetic circulating small noncoding RNA (sncRNA) 5' transfer RNA (tRNA) half
acaggagatcctgggttcgaatcccagcggtgcctg

SEQ ID NO: 11416 - DNA, 12 bp, Artificial Sequence
  synthetic circulating small noncoding RNA (sncRNA) 5' transfer RNA (tRNA) half
gggagtcgaacc

SEQ ID NO: 11417 - DNA, 36 bp, Artificial Sequence
  synthetic circulating small noncoding RNA (sncRNA) 5' transfer RNA (tRNA) half
tgaccccgacgtgacttgaacacgcaaccttctgat

SEQ ID NO: 11418 - DNA, 31 bp, Artificial Sequence
  synthetic circulating small noncoding RNA (sncRNA) 5' transfer RNA (tRNA) half
cgcccggctagctcagtcggtagagcatgag

SEQ ID NO: 11419 - DNA, 13 bp, Artificial Sequence
  synthetic circulating small noncoding RNA (sncRNA) 5' transfer RNA (tRNA) half
tgtaatggttagc

SEQ ID NO: 11420 - DNA, 22 bp, Artificial Sequence
  synthetic circulating small noncoding RNA (sncRNA) 5' transfer RNA (tRNA) half
cgccgctggtgtagtggtatca

SEQ ID NO: 11421 - DNA, 10 bp, Artificial Sequence
  synthetic circulating small noncoding RNA (sncRNA) 5' transfer RNA (tRNA) half
tccctgaccg

SEQ ID NO: 11422 - DNA, 33 bp, Artificial Sequence
  synthetic circulating small noncoding RNA (sncRNA) 5' transfer RNA (tRNA) half
cctccccgtcggggaattgaaccccggtctccc

SEQ ID NO: 11423 - DNA, 21 bp, Artificial Sequence
  synthetic circulating small noncoding RNA (sncRNA) 5' transfer RNA (tRNA) half
gctagctcagtcggtagagca

SEQ ID NO: 11424 - DNA, 17 bp, Artificial Sequence
  synthetic circulating small noncoding RNA (sncRNA) 5' transfer RNA (tRNA) half
gtggttatcacgctcgc

SEQ ID NO: 11425 - DNA, 28 bp, Artificial Sequence
  synthetic circulating small noncoding RNA (sncRNA) 5' transfer RNA (tRNA) half
agaattctaccactgaaccaccaatgcc

SEQ ID NO: 11426 - DNA, 22 bp, Artificial Sequence
  synthetic circulating small noncoding RNA (sncRNA) 5' transfer RNA (tRNA) half
ctagccactagaccaccaggga

SEQ ID NO: 11427 - DNA, 15 bp, Artificial Sequence
  synthetic circulating small noncoding RNA (sncRNA) 5' transfer RNA (tRNA) half
ccacaccgggagtcg

SEQ ID NO: 11428 - DNA, 21 bp, Artificial Sequence
  synthetic circulating small noncoding RNA (sncRNA) 5' transfer RNA (tRNA) half
gcccaacgtggggctcgaacc

SEQ ID NO: 11429 - DNA, 16 bp, Artificial Sequence
  synthetic circulating small noncoding RNA (sncRNA) 5' transfer RNA (tRNA) half
accgactgagctatcc

SEQ ID NO: 11430 - DNA, 16 bp, Artificial Sequence
  synthetic circulating small noncoding RNA (sncRNA) 5' transfer RNA (tRNA) half
actgagctaaccggcc

SEQ ID NO: 11431 - DNA, 19 bp, Artificial Sequence
  synthetic circulating small noncoding RNA (sncRNA) 5' transfer RNA (tRNA) half
cacccaaagcgagaatcat

SEQ ID NO: 11432 - DNA, 12 bp, Artificial Sequence
  synthetic circulating small noncoding RNA (sncRNA) 5' transfer RNA (tRNA) half
agtcggtagagc

SEQ ID NO: 11433 - DNA, 22 bp, Artificial Sequence
  synthetic circulating small noncoding RNA (sncRNA) 5' transfer RNA (tRNA) half
gtggcagcggtgggattcgaac

SEQ ID NO: 11434 - DNA, 9 bp, Artificial Sequence
  synthetic circulating small noncoding RNA (sncRNA) 5' transfer RNA (tRNA) half
cccggttcg

SEQ ID NO: 11435 - DNA, 13 bp, Artificial Sequence
  synthetic circulating small noncoding RNA (sncRNA) 5' transfer RNA (tRNA) half
tgattctcgcttc

SEQ ID NO: 11436 - DNA, 22 bp, Artificial Sequence
  synthetic circulating small noncoding RNA (sncRNA) 5' transfer RNA (tRNA) half
gtttccgcccggtttcgaaccg

SEQ ID NO: 11437 - DNA, 27 bp, Artificial Sequence
  synthetic circulating small noncoding RNA (sncRNA) 5' transfer RNA (tRNA) half
tcccaccgagatttgaactcggatcgc

SEQ ID NO: 11438 - DNA, 8 bp, Artificial Sequence
  synthetic circulating small noncoding RNA (sncRNA) 5' transfer RNA (tRNA) half
gccgtgac

SEQ ID NO: 11439 - DNA, 16 bp, Artificial Sequence
  synthetic circulating small noncoding RNA (sncRNA) 5' transfer RNA (tRNA) half
tggattcagagtccag

SEQ ID NO: 11440 - DNA, 12 bp, Artificial Sequence
  synthetic circulating small noncoding RNA (sncRNA) 5' transfer RNA (tRNA) half
gtctgatgctct

SEQ ID NO: 11441 - DNA, 22 bp, Artificial Sequence
  synthetic circulating small noncoding RNA (sncRNA) 5' transfer RNA (tRNA) half
agtcggtagagcatgagactct

SEQ ID NO: 11442 - DNA, 14 bp, Artificial Sequence
  synthetic circulating small noncoding RNA (sncRNA) 5' transfer RNA (tRNA) half
tcagctggtagagc

SEQ ID NO: 11443 - DNA, 36 bp, Artificial Sequence
  synthetic circulating small noncoding RNA (sncRNA) 5' transfer RNA (tRNA) half
agtctccccgtcggggaatcgaaccccggtctcccg

SEQ ID NO: 11444 - DNA, 20 bp, Artificial Sequence
  synthetic circulating small noncoding RNA (sncRNA) 5' transfer RNA (tRNA) half
agtctcatgctctacccact

SEQ ID NO: 11445 - DNA, 28 bp, Artificial Sequence
  synthetic circulating small noncoding RNA (sncRNA) 5' transfer RNA (tRNA) half
cgacgaggatgggattcgaacccacgcg

SEQ ID NO: 11446 - DNA, 36 bp, Artificial Sequence
  synthetic circulating small noncoding RNA (sncRNA) 5' transfer RNA (tRNA) half
ggcagcggtgggattcgaacccacgcccccgaagag

SEQ ID NO: 11447 - DNA, 25 bp, Artificial Sequence
  synthetic circulating small noncoding RNA (sncRNA) 5' transfer RNA (tRNA) half
tgaggcgaacgtgataaccactaca

SEQ ID NO: 11448 - DNA, 7 bp, Artificial Sequence
  synthetic circulating small noncoding RNA (sncRNA) 5' transfer RNA (tRNA) half
ccggccg

SEQ ID NO: 11449 - DNA, 31 bp, Artificial Sequence
  synthetic circulating small noncoding RNA (sncRNA) 5' transfer RNA (tRNA) half
cagtcggtagagcatgagactcttaatctca

SEQ ID NO: 11450 - DNA, 19 bp, Artificial Sequence
  synthetic circulating small noncoding RNA (sncRNA) 5' transfer RNA (tRNA) half
tccattaggccacgcggcc

SEQ ID NO: 11451 - DNA, 35 bp, Artificial Sequence
  synthetic circulating small noncoding RNA (sncRNA) 5' transfer RNA (tRNA) half
agctggctcgttggtctaggggtatgattctcggt

SEQ ID NO: 11452 - DNA, 17 bp, Artificial Sequence
  synthetic circulating small noncoding RNA (sncRNA) 5' transfer RNA (tRNA) half
tccctgaccgggaatcg

SEQ ID NO: 11453 - DNA, 17 bp, Artificial Sequence
  synthetic circulating small noncoding RNA (sncRNA) 5' transfer RNA (tRNA) half
gcccggctagctcagtc

SEQ ID NO: 11454 - DNA, 15 bp, Artificial Sequence
  synthetic circulating small noncoding RNA (sncRNA) 5' transfer RNA (tRNA) half
taggattcggcgctc

SEQ ID NO: 11455 - DNA, 27 bp, Artificial Sequence
  synthetic circulating small noncoding RNA (sncRNA) 5' transfer RNA (tRNA) half
ctgttcccataccgggagtcgaacccg

SEQ ID NO: 11456 - DNA, 24 bp, Artificial Sequence
  synthetic circulating small noncoding RNA (sncRNA) 5' transfer RNA (tRNA) half
attcctggttttcacccaggcggc

SEQ ID NO: 11457 - DNA, 29 bp, Artificial Sequence
  synthetic circulating small noncoding RNA (sncRNA) 5' transfer RNA (tRNA) half
ggtcgtgggttcgagccccacgttgggcg

SEQ ID NO: 11458 - DNA, 41 bp, Artificial Sequence
  synthetic circulating small noncoding RNA (sncRNA) 5' transfer RNA (tRNA) half
aggttgctgcggccacaacgcagagtactaaccactatacg

SEQ ID NO: 11459 - DNA, 25 bp, Artificial Sequence
  synthetic circulating small noncoding RNA (sncRNA) 5' transfer RNA (tRNA) half
accccggtctcccgcgtgacaggcg

SEQ ID NO: 11460 - DNA, 30 bp, Artificial Sequence
  synthetic circulating small noncoding RNA (sncRNA) 5' transfer RNA (tRNA) half
ggcttaggaggccaatgccttatccattag

SEQ ID NO: 11461 - DNA, 15 bp, Artificial Sequence
  synthetic circulating small noncoding RNA (sncRNA) 5' transfer RNA (tRNA) half
agcggttaggattcc

SEQ ID NO: 11462 - DNA, 22 bp, Artificial Sequence
  synthetic circulating small noncoding RNA (sncRNA) 5' transfer RNA (tRNA) half
cggggacctcttgatctgcagt

SEQ ID NO: 11463 - DNA, 15 bp, Artificial Sequence
  synthetic circulating small noncoding RNA (sncRNA) 5' transfer RNA (tRNA) half
ggtcccaccgagatt

SEQ ID NO: 11464 - DNA, 32 bp, Artificial Sequence
  synthetic circulating small noncoding RNA (sncRNA) 5' transfer RNA (tRNA) half
agagtcccatgctctaccgactgagctagccg

SEQ ID NO: 11465 - DNA, 17 bp, Artificial Sequence
  synthetic circulating small noncoding RNA (sncRNA) 5' transfer RNA (tRNA) half
tgcccgcatcctccact

SEQ ID NO: 11466 - DNA, 12 bp, Artificial Sequence
  synthetic circulating small noncoding RNA (sncRNA) 5' transfer RNA (tRNA) half
caatgcgctatc

SEQ ID NO: 11467 - DNA, 33 bp, Artificial Sequence
  synthetic circulating small noncoding RNA (sncRNA) 5' transfer RNA (tRNA) half
ttccctggtggtctagtggttaggattcggcgc

SEQ ID NO: 11468 - DNA, 15 bp, Artificial Sequence
  synthetic circulating small noncoding RNA (sncRNA) 5' transfer RNA (tRNA) half
tggaggcgtgggttc

SEQ ID NO: 11469 - DNA, 32 bp, Artificial Sequence
  synthetic circulating small noncoding RNA (sncRNA) 5' transfer RNA (tRNA) half
caggcggggatactaaccactatactaacgag

SEQ ID NO: 11470 - DNA, 28 bp, Artificial Sequence
  synthetic circulating small noncoding RNA (sncRNA) 5' transfer RNA (tRNA) half
tccgtagtgtagtggttatcacgctcgc

SEQ ID NO: 11471 - DNA, 16 bp, Artificial Sequence
  synthetic circulating small noncoding RNA (sncRNA) 5' transfer RNA (tRNA) half
gctaaccattacacca

SEQ ID NO: 11472 - DNA, 21 bp, Artificial Sequence
  synthetic circulating small noncoding RNA (sncRNA) 5' transfer RNA (tRNA) half
tctcaccgccgcggcccgggt

SEQ ID NO: 11473 - DNA, 22 bp, Artificial Sequence
  synthetic circulating small noncoding RNA (sncRNA) 5' transfer RNA (tRNA) half
cgcagcgccttagaccgctcgg

SEQ ID NO: 11474 - DNA, 20 bp, Artificial Sequence
  synthetic circulating small noncoding RNA (sncRNA) 5' transfer RNA (tRNA) half
tcaatggtagaattctcgcc

SEQ ID NO: 11475 - DNA, 22 bp, Artificial Sequence
  synthetic circulating small noncoding RNA (sncRNA) 5' transfer RNA (tRNA) half
aaatggtggagatgccggggat

SEQ ID NO: 11476 - DNA, 30 bp, Artificial Sequence
  synthetic circulating small noncoding RNA (sncRNA) 5' transfer RNA (tRNA) half
gtcgagccagccaggagtcgaacctagaat

SEQ ID NO: 11477 - DNA, 32 bp, Artificial Sequence
  synthetic circulating small noncoding RNA (sncRNA) 5' transfer RNA (tRNA) half
cgtccctggtggtctagtggctaggattcggc

SEQ ID NO: 11478 - DNA, 20 bp, Artificial Sequence
  synthetic circulating small noncoding RNA (sncRNA) 5' transfer RNA (tRNA) half
cgctggattcagagtccaga

SEQ ID NO: 11479 - DNA, 14 bp, Artificial Sequence
  synthetic circulating small noncoding RNA (sncRNA) 5' transfer RNA (tRNA) half
cggggacctctcgc

SEQ ID NO: 11480 - DNA, 20 bp, Artificial Sequence
  synthetic circulating small noncoding RNA (sncRNA) 5' transfer RNA (tRNA) half
tcccggacgagcccaatttt

SEQ ID NO: 11481 - DNA, 11 bp, Artificial Sequence
  synthetic circulating small noncoding RNA (sncRNA) 5' transfer RNA (tRNA) half
gcccgggttcg

SEQ ID NO: 11482 - DNA, 34 bp, Artificial Sequence
  synthetic circulating small noncoding RNA (sncRNA) 5' transfer RNA (tRNA) half
agccagccaggagtcgaacctggaatcttctgat

SEQ ID NO: 11483 - DNA, 32 bp, Artificial Sequence
  synthetic circulating small noncoding RNA (sncRNA) 5' transfer RNA (tRNA) half
actcggatcgctggattcagagtccagagtgc

SEQ ID NO: 11484 - DNA, 35 bp, Artificial Sequence
  synthetic circulating small noncoding RNA (sncRNA) 5' transfer RNA (tRNA) half
aggccttgctgggattcgaacccaggatctcctgt

SEQ ID NO: 11485 - DNA, 16 bp, Artificial Sequence
  synthetic circulating small noncoding RNA (sncRNA) 5' transfer RNA (tRNA) half
ggttcgactcccggca

SEQ ID NO: 11486 - DNA, 15 bp, Artificial Sequence
  synthetic circulating small noncoding RNA (sncRNA) 5' transfer RNA (tRNA) half
gaattctaccactga

SEQ ID NO: 11487 - DNA, 17 bp, Artificial Sequence
  synthetic circulating small noncoding RNA (sncRNA) 5' transfer RNA (tRNA) half
ccataccgggagtcgaa

SEQ ID NO: 11488 - DNA, 21 bp, Artificial Sequence
  synthetic circulating small noncoding RNA (sncRNA) 5' transfer RNA (tRNA) half
tcaatggtagaattctcgcct

SEQ ID NO: 11489 - DNA, 18 bp, Artificial Sequence
  synthetic circulating small noncoding RNA (sncRNA) 5' transfer RNA (tRNA) half
cggcccgggttcgactcc

SEQ ID NO: 11490 - DNA, 22 bp, Artificial Sequence
  synthetic circulating small noncoding RNA (sncRNA) 5' transfer RNA (tRNA) half
ggccgggaatcgaacccgggtc

SEQ ID NO: 11491 - DNA, 27 bp, Artificial Sequence
  synthetic circulating small noncoding RNA (sncRNA) 5' transfer RNA (tRNA) half
tcggctgttaaccgaaaggttggtggt

SEQ ID NO: 11492 - DNA, 37 bp, Artificial Sequence
  synthetic circulating small noncoding RNA (sncRNA) 5' transfer RNA (tRNA) half
ccaggcggcccgggttcgactcccggtgtgggaaact

SEQ ID NO: 11493 - DNA, 23 bp, Artificial Sequence
  synthetic circulating small noncoding RNA (sncRNA) 5' transfer RNA (tRNA) half
gctctcaccgccgcggcccgggt

SEQ ID NO: 11494 - DNA, 20 bp, Artificial Sequence
  synthetic circulating small noncoding RNA (sncRNA) 5' transfer RNA (tRNA) half
attcgaacctgcgcggggaa

SEQ ID NO: 11495 - DNA, 31 bp, Artificial Sequence
  synthetic circulating small noncoding RNA (sncRNA) 5' transfer RNA (tRNA) half
ggccgcggcggtgagagcgccgaatcctaac

SEQ ID NO: 11496 - DNA, 17 bp, Artificial Sequence
  synthetic circulating small noncoding RNA (sncRNA) 5' transfer RNA (tRNA) half
tccagagtgctagccat

SEQ ID NO: 11497 - DNA, 38 bp, Artificial Sequence
  synthetic circulating small noncoding RNA (sncRNA) 5' transfer RNA (tRNA) half
aactcggatcgctggattcagagtccagagtgctagcc

SEQ ID NO: 11498 - DNA, 9 bp, Artificial Sequence
  synthetic circulating small noncoding RNA (sncRNA) 5' transfer RNA (tRNA) half
acgagcccc

SEQ ID NO: 11499 - DNA, 24 bp, Artificial Sequence
  synthetic circulating small noncoding RNA (sncRNA) 5' transfer RNA (tRNA) half
cgtataggggttagtactctgcgt

SEQ ID NO: 11500 - DNA, 13 bp, Artificial Sequence
  synthetic circulating small noncoding RNA (sncRNA) 5' transfer RNA (tRNA) half
gtccagagtgcta

SEQ ID NO: 11501 - DNA, 13 bp, Artificial Sequence
  synthetic circulating small noncoding RNA (sncRNA) 5' transfer RNA (tRNA) half
gagaatcataccc

SEQ ID NO: 11502 - DNA, 29 bp, Artificial Sequence
  synthetic circulating small noncoding RNA (sncRNA) 5' transfer RNA (tRNA) half
agattaagagtctcatgctctaccgactg

SEQ ID NO: 11503 - DNA, 8 bp, Artificial Sequence
  synthetic circulating small noncoding RNA (sncRNA) 5' transfer RNA (tRNA) half
agtcaaat

SEQ ID NO: 11504 - DNA, 19 bp, Artificial Sequence
  synthetic circulating small noncoding RNA (sncRNA) 5' transfer RNA (tRNA) half
atcccggacgagccccatc

SEQ ID NO: 11505 - DNA, 28 bp, Artificial Sequence
  synthetic circulating small noncoding RNA (sncRNA) 5' transfer RNA (tRNA) half
cgacgaggatgggattcgaacccatgcg

SEQ ID NO: 11506 - DNA, 12 bp, Artificial Sequence
  synthetic circulating small noncoding RNA (sncRNA) 5' transfer RNA (tRNA) half
caggattcgaac

SEQ ID NO: 11507 - DNA, 22 bp, Artificial Sequence
  synthetic circulating small noncoding RNA (sncRNA) 5' transfer RNA (tRNA) half
ggggttcgattccccgacgggg

SEQ ID NO: 11508 - DNA, 17 bp, Artificial Sequence
  synthetic circulating small noncoding RNA (sncRNA) 5' transfer RNA (tRNA) half
gtcggggaatcgaaccc

SEQ ID NO: 11509 - DNA, 12 bp, Artificial Sequence
  synthetic circulating small noncoding RNA (sncRNA) 5' transfer RNA (tRNA) half
cactccaccaac

SEQ ID NO: 11510 - DNA, 26 bp, Artificial Sequence
  synthetic circulating small noncoding RNA (sncRNA) 5' transfer RNA (tRNA) half
gtcccaccgagatttgaactcggatc

SEQ ID NO: 11511 - DNA, 28 bp, Artificial Sequence
  synthetic circulating small noncoding RNA (sncRNA) 5' transfer RNA (tRNA) half
ggcccgtacggggatcgaacccgcgacc

SEQ ID NO: 11512 - DNA, 24 bp, Artificial Sequence
  synthetic circulating small noncoding RNA (sncRNA) 5' transfer RNA (tRNA) half
tctaaccaactgagctaaccggcc

SEQ ID NO: 11513 - DNA, 40 bp, Artificial Sequence
  synthetic circulating small noncoding RNA (sncRNA) 5' transfer RNA (tRNA) half
cagtctcttcgggggcgtgggttcgaatcccaccgctgcc

SEQ ID NO: 11514 - DNA, 22 bp, Artificial Sequence
  synthetic circulating small noncoding RNA (sncRNA) 5' transfer RNA (tRNA) half
tggagatgccggggatcgaacc

SEQ ID NO: 11515 - DNA, 22 bp, Artificial Sequence
  synthetic circulating small noncoding RNA (sncRNA) 5' transfer RNA (tRNA) half
aacccccaatcttctgatccgg

SEQ ID NO: 11516 - DNA, 13 bp, Artificial Sequence
  synthetic circulating small noncoding RNA (sncRNA) 5' transfer RNA (tRNA) half
gagtggttaaggc

SEQ ID NO: 11517 - DNA, 10 bp, Artificial Sequence
  synthetic circulating small noncoding RNA (sncRNA) 5' transfer RNA (tRNA) half
gaattctcgc

SEQ ID NO: 11518 - DNA, 22 bp, Artificial Sequence
  synthetic circulating small noncoding RNA (sncRNA) 5' transfer RNA (tRNA) half
agtctccccgtcggggaatcga

SEQ ID NO: 11519 - DNA, 24 bp, Artificial Sequence
  synthetic circulating small noncoding RNA (sncRNA) 5' transfer RNA (tRNA) half
ggttcgactcccggtgtgggaaca

SEQ ID NO: 11520 - DNA, 23 bp, Artificial Sequence
  synthetic circulating small noncoding RNA (sncRNA) 5' transfer RNA (tRNA) half
taatctgagggtccagggttcaa

SEQ ID NO: 11521 - DNA, 13 bp, Artificial Sequence
  synthetic circulating small noncoding RNA (sncRNA) 5' transfer RNA (tRNA) half
tgctctaccgact

SEQ ID NO: 11522 - DNA, 19 bp, Artificial Sequence
  synthetic circulating small noncoding RNA (sncRNA) 5' transfer RNA (tRNA) half
ggcaagaattctaccactg

SEQ ID NO: 11523 - DNA, 10 bp, Artificial Sequence
  synthetic circulating small noncoding RNA (sncRNA) 5' transfer RNA (tRNA) half
acccgggacc

SEQ ID NO: 11524 - DNA, 16 bp, Artificial Sequence
  synthetic circulating small noncoding RNA (sncRNA) 5' transfer RNA (tRNA) half
cagaggtcgatggatc

SEQ ID NO: 11525 - DNA, 15 bp, Artificial Sequence
  synthetic circulating small noncoding RNA (sncRNA) 5' transfer RNA (tRNA) half
cgggagaccggggtt

SEQ ID NO: 11526 - DNA, 16 bp, Artificial Sequence
  synthetic circulating small noncoding RNA (sncRNA) 5' transfer RNA (tRNA) half
ggtctaaggcgctgga

SEQ ID NO: 11527 - DNA, 18 bp, Artificial Sequence
  synthetic circulating small noncoding RNA (sncRNA) 5' transfer RNA (tRNA) half
aacaaagcctccgatagc

SEQ ID NO: 11528 - DNA, 17 bp, Artificial Sequence
  synthetic circulating small noncoding RNA (sncRNA) 5' transfer RNA (tRNA) half
gacgaggatgggattcg

SEQ ID NO: 11529 - DNA, 26 bp, Artificial Sequence
  synthetic circulating small noncoding RNA (sncRNA) 5' transfer RNA (tRNA) half
cgctggattcagagtccagagtgcta

SEQ ID NO: 11530 - DNA, 17 bp, Artificial Sequence
  synthetic circulating small noncoding RNA (sncRNA) 5' transfer RNA (tRNA) half
ccgactgagctagccgg

SEQ ID NO: 11531 - DNA, 20 bp, Artificial Sequence
  synthetic circulating small noncoding RNA (sncRNA) 5' transfer RNA (tRNA) half
cgtgactcggattcgaaccg

SEQ ID NO: 11532 - DNA, 17 bp, Artificial Sequence
  synthetic circulating small noncoding RNA (sncRNA) 5' transfer RNA (tRNA) half
gggttcgactcccggtg

SEQ ID NO: 11533 - DNA, 33 bp, Artificial Sequence
  synthetic circulating small noncoding RNA (sncRNA) 5' transfer RNA (tRNA) half
ggttccttcgagccggattcgaaccagcgacct

SEQ ID NO: 11534 - DNA, 21 bp, Artificial Sequence
  synthetic circulating small noncoding RNA (sncRNA) 5' transfer RNA (tRNA) half
gttcgagccccagtggaacca

SEQ ID NO: 11535 - DNA, 27 bp, Artificial Sequence
  synthetic circulating small noncoding RNA (sncRNA) 5' transfer RNA (tRNA) half
aaccctcaatcttctgatccgaagtca

SEQ ID NO: 11536 - DNA, 17 bp, Artificial Sequence
  synthetic circulating small noncoding RNA (sncRNA) 5' transfer RNA (tRNA) half
gattgcgccacagagac

SEQ ID NO: 11537 - DNA, 27 bp, Artificial Sequence
  synthetic circulating small noncoding RNA (sncRNA) 5' transfer RNA (tRNA) half
gacgaggatgggattcgaacccacgcg

SEQ ID NO: 11538 - DNA, 31 bp, Artificial Sequence
  synthetic circulating small noncoding RNA (sncRNA) 5' transfer RNA (tRNA) half
ttaggtcgctggttcgattccggctcgaagg

SEQ ID NO: 11539 - DNA, 32 bp, Artificial Sequence
  synthetic circulating small noncoding RNA (sncRNA) 5' transfer RNA (tRNA) half
agcgatccgagttcaaatctcggtggaacctg

SEQ ID NO: 11540 - DNA, 26 bp, Artificial Sequence
  synthetic circulating small noncoding RNA (sncRNA) 5' transfer RNA (tRNA) half
aggcgagaattctaccattgaactac

SEQ ID NO: 11541 - DNA, 17 bp, Artificial Sequence
  synthetic circulating small noncoding RNA (sncRNA) 5' transfer RNA (tRNA) half
gttcgagtcccttcgtg

SEQ ID NO: 11542 - DNA, 18 bp, Artificial Sequence
  synthetic circulating small noncoding RNA (sncRNA) 5' transfer RNA (tRNA) half
tcggttcccggccaatgc

SEQ ID NO: 11543 - DNA, 17 bp, Artificial Sequence
  synthetic circulating small noncoding RNA (sncRNA) 5' transfer RNA (tRNA) half
tgtcacgcgggagaccg

SEQ ID NO: 11544 - DNA, 17 bp, Artificial Sequence
  synthetic circulating small noncoding RNA (sncRNA) 5' transfer RNA (tRNA) half
tcgatccccggcatctc

SEQ ID NO: 11545 - DNA, 41 bp, Artificial Sequence
  synthetic circulating small noncoding RNA (sncRNA) 5' transfer RNA (tRNA) half
cctaagccagggattgtgggttcgagtcccatctggggtgg

SEQ ID NO: 11546 - DNA, 23 bp, Artificial Sequence
  synthetic circulating small noncoding RNA (sncRNA) 5' transfer RNA (tRNA) half
agggggcacccggatttgaaccg

SEQ ID NO: 11547 - DNA, 14 bp, Artificial Sequence
  synthetic circulating small noncoding RNA (sncRNA) 5' transfer RNA (tRNA) half
ccgggccgcggcgg

SEQ ID NO: 11548 - DNA, 14 bp, Artificial Sequence
  synthetic circulating small noncoding RNA (sncRNA) 5' transfer RNA (tRNA) half
tccgggtgccccct

SEQ ID NO: 11549 - DNA, 21 bp, Artificial Sequence
  synthetic circulating small noncoding RNA (sncRNA) 5' transfer RNA (tRNA) half
accaacctttcggttaacagc

SEQ ID NO: 11550 - DNA, 21 bp, Artificial Sequence
  synthetic circulating small noncoding RNA (sncRNA) 5' transfer RNA (tRNA) half
ggcgagaattctaccattgaa

SEQ ID NO: 11551 - DNA, 27 bp, Artificial Sequence
  synthetic circulating small noncoding RNA (sncRNA) 5' transfer RNA (tRNA) half
cgaacgtgataaccactacactacgga

SEQ ID NO: 11552 - DNA, 22 bp, Artificial Sequence
  synthetic circulating small noncoding RNA (sncRNA) 5' transfer RNA (tRNA) half
aggcgagaattctaccattgaa

SEQ ID NO: 11553 - DNA, 11 bp, Artificial Sequence
  synthetic circulating small noncoding RNA (sncRNA) 5' transfer RNA (tRNA) half
cgcttcgcatg

SEQ ID NO: 11554 - DNA, 15 bp, Artificial Sequence
  synthetic circulating small noncoding RNA (sncRNA) 5' transfer RNA (tRNA) half
aacccacgcctccat

SEQ ID NO: 11555 - DNA, 35 bp, Artificial Sequence
  synthetic circulating small noncoding RNA (sncRNA) 5' transfer RNA (tRNA) half
ttaggcgagcgtgatgaccactacactacggaaac

SEQ ID NO: 11556 - DNA, 16 bp, Artificial Sequence
  synthetic circulating small noncoding RNA (sncRNA) 5' transfer RNA (tRNA) half
cgaacgtgataaccac

SEQ ID NO: 11557 - DNA, 37 bp, Artificial Sequence
  synthetic circulating small noncoding RNA (sncRNA) 5' transfer RNA (tRNA) half
aatctgagggtccagggttcaagtccctgttcgggcg

SEQ ID NO: 11558 - DNA, 22 bp, Artificial Sequence
  synthetic circulating small noncoding RNA (sncRNA) 5' transfer RNA (tRNA) half
tccctggtagtctagtggttag

SEQ ID NO: 11559 - DNA, 11 bp, Artificial Sequence
  synthetic circulating small noncoding RNA (sncRNA) 5' transfer RNA (tRNA) half
cccggcatctc

SEQ ID NO: 11560 - DNA, 42 bp, Artificial Sequence
  synthetic circulating small noncoding RNA (sncRNA) 5' transfer RNA (tRNA) half
acccacgaccctgggattaagagtcccatgctctaccgactg

SEQ ID NO: 11561 - DNA, 13 bp, Artificial Sequence
  synthetic circulating small noncoding RNA (sncRNA) 5' transfer RNA (tRNA) half
ggtagaattctcg

SEQ ID NO: 11562 - DNA, 15 bp, Artificial Sequence
  synthetic circulating small noncoding RNA (sncRNA) 5' transfer RNA (tRNA) half
caggttcgactcctg

SEQ ID NO: 11563 - DNA, 27 bp, Artificial Sequence
  synthetic circulating small noncoding RNA (sncRNA) 5' transfer RNA (tRNA) half
gcagtcaaatgctctaccactgagcta

SEQ ID NO: 11564 - DNA, 17 bp, Artificial Sequence
  synthetic circulating small noncoding RNA (sncRNA) 5' transfer RNA (tRNA) half
gattctcgctttgggtg

SEQ ID NO: 11565 - DNA, 25 bp, Artificial Sequence
  synthetic circulating small noncoding RNA (sncRNA) 5' transfer RNA (tRNA) half
ccggatgatcctcagtggtctgggg

SEQ ID NO: 11566 - DNA, 21 bp, Artificial Sequence
  synthetic circulating small noncoding RNA (sncRNA) 5' transfer RNA (tRNA) half
cgtctccccgtcggggaatcg

SEQ ID NO: 11567 - DNA, 36 bp, Artificial Sequence
  synthetic circulating small noncoding RNA (sncRNA) 5' transfer RNA (tRNA) half
tgaccccgacgtgatttgaacacgcaaccttctgat

SEQ ID NO: 11568 - DNA, 30 bp, Artificial Sequence
  synthetic circulating small noncoding RNA (sncRNA) 5' transfer RNA (tRNA) half
tcgagccagccaggagtcgaacctagaatc

SEQ ID NO: 11569 - DNA, 13 bp, Artificial Sequence
  synthetic circulating small noncoding RNA (sncRNA) 5' transfer RNA (tRNA) half
cccggtatgggaa

SEQ ID NO: 11570 - DNA, 18 bp, Artificial Sequence
  synthetic circulating small noncoding RNA (sncRNA) 5' transfer RNA (tRNA) half
gattaagagtcccatgct

SEQ ID NO: 11571 - DNA, 13 bp, Artificial Sequence
  synthetic circulating small noncoding RNA (sncRNA) 5' transfer RNA (tRNA) half
agaccaacgagcc

SEQ ID NO: 11572 - DNA, 11 bp, Artificial Sequence
  synthetic circulating small noncoding RNA (sncRNA) 5' transfer RNA (tRNA) half
tcgcgggttcg

SEQ ID NO: 11573 - DNA, 23 bp, Artificial Sequence
  synthetic circulating small noncoding RNA (sncRNA) 5' transfer RNA (tRNA) half
gaattctaccactgaaccaccaa

SEQ ID NO: 11574 - DNA, 35 bp, Artificial Sequence
  synthetic circulating small noncoding RNA (sncRNA) 5' transfer RNA (tRNA) half
ttccgactccgccgggactcgaacccggaaccttt

SEQ ID NO: 11575 - DNA, 24 bp, Artificial Sequence
  synthetic circulating small noncoding RNA (sncRNA) 5' transfer RNA (tRNA) half
gaaccccggtctcccgcgtgacag

SEQ ID NO: 11576 - DNA, 21 bp, Artificial Sequence
  synthetic circulating small noncoding RNA (sncRNA) 5' transfer RNA (tRNA) half
aaagcgagaatcataccccta

SEQ ID NO: 11577 - DNA, 40 bp, Artificial Sequence
  synthetic circulating small noncoding RNA (sncRNA) 5' transfer RNA (tRNA) half
agcggtgggattcgaacccacgcccccgaagagactggag

SEQ ID NO: 11578 - DNA, 14 bp, Artificial Sequence
  synthetic circulating small noncoding RNA (sncRNA) 5' transfer RNA (tRNA) half
ccaaggtcgcgggt

SEQ ID NO: 11579 - DNA, 12 bp, Artificial Sequence
  synthetic circulating small noncoding RNA (sncRNA) 5' transfer RNA (tRNA) half
acgcagagtact

SEQ ID NO: 11580 - DNA, 15 bp, Artificial Sequence
  synthetic circulating small noncoding RNA (sncRNA) 5' transfer RNA (tRNA) half
accagggacctcttg

SEQ ID NO: 11581 - DNA, 16 bp, Artificial Sequence
  synthetic circulating small noncoding RNA (sncRNA) 5' transfer RNA (tRNA) half
tagctcagtcggtaga

SEQ ID NO: 11582 - DNA, 23 bp, Artificial Sequence
  synthetic circulating small noncoding RNA (sncRNA) 5' transfer RNA (tRNA) half
gagcgccgaatcctaaccactag

SEQ ID NO: 11583 - DNA, 22 bp, Artificial Sequence
  synthetic circulating small noncoding RNA (sncRNA) 5' transfer RNA (tRNA) half
ccagggacgaccacagcgactt

SEQ ID NO: 11584 - DNA, 14 bp, Artificial Sequence
  synthetic circulating small noncoding RNA (sncRNA) 5' transfer RNA (tRNA) half
cccgcgcaggttcg

SEQ ID NO: 11585 - DNA, 17 bp, Artificial Sequence
  synthetic circulating small noncoding RNA (sncRNA) 5' transfer RNA (tRNA) half
ttcccataccgggagtc

SEQ ID NO: 11586 - DNA, 35 bp, Artificial Sequence
  synthetic circulating small noncoding RNA (sncRNA) 5' transfer RNA (tRNA) half
gtatgaggccccgggttcgatccccggcatctcca

SEQ ID NO: 11587 - DNA, 11 bp, Artificial Sequence
  synthetic circulating small noncoding RNA (sncRNA) 5' transfer RNA (tRNA) half
cggtctaaggc

SEQ ID NO: 11588 - DNA, 36 bp, Artificial Sequence
  synthetic circulating small noncoding RNA (sncRNA) 5' transfer RNA (tRNA) half
gccctgctgggatttgaacccaggatctcctgttta

SEQ ID NO: 11589 - DNA, 22 bp, Artificial Sequence
  synthetic circulating small noncoding RNA (sncRNA) 5' transfer RNA (tRNA) half
agccagccaggagtcgaaccta

SEQ ID NO: 11590 - DNA, 14 bp, Artificial Sequence
  synthetic circulating small noncoding RNA (sncRNA) 5' transfer RNA (tRNA) half
gccccctctgaggt

SEQ ID NO: 11591 - DNA, 25 bp, Artificial Sequence
  synthetic circulating small noncoding RNA (sncRNA) 5' transfer RNA (tRNA) half
attggtggttcagtggtagaattct

SEQ ID NO: 11592 - DNA, 18 bp, Artificial Sequence
  synthetic circulating small noncoding RNA (sncRNA) 5' transfer RNA (tRNA) half
tccagagtgctagccatt

SEQ ID NO: 11593 - DNA, 7 bp, Artificial Sequence
  synthetic circulating small noncoding RNA (sncRNA) 5' transfer RNA (tRNA) half
gtctcat

SEQ ID NO: 11594 - DNA, 13 bp, Artificial Sequence
  synthetic circulating small noncoding RNA (sncRNA) 5' transfer RNA (tRNA) half
atccgggtgcccc

SEQ ID NO: 11595 - DNA, 34 bp, Artificial Sequence
  synthetic circulating small noncoding RNA (sncRNA) 5' transfer RNA (tRNA) half
tgtatgaggccccgggttcaatccccggcatctc

SEQ ID NO: 11596 - DNA, 14 bp, Artificial Sequence
  synthetic circulating small noncoding RNA (sncRNA) 5' transfer RNA (tRNA) half
atcccagcggtgcc

SEQ ID NO: 11597 - DNA, 25 bp, Artificial Sequence
  synthetic circulating small noncoding RNA (sncRNA) 5' transfer RNA (tRNA) half
gaacccgggacctctcgcacccaaa

SEQ ID NO: 11598 - DNA, 15 bp, Artificial Sequence
  synthetic circulating small noncoding RNA (sncRNA) 5' transfer RNA (tRNA) half
aggtcgcagtctccc

SEQ ID NO: 11599 - DNA, 24 bp, Artificial Sequence
  synthetic circulating small noncoding RNA (sncRNA) 5' transfer RNA (tRNA) half
tctagtggttaggattcggcgctc

SEQ ID NO: 11600 - DNA, 21 bp, Artificial Sequence
  synthetic circulating small noncoding RNA (sncRNA) 5' transfer RNA (tRNA) half
cgctggtgtagtggtatcatg

SEQ ID NO: 11601 - DNA, 18 bp, Artificial Sequence
  synthetic circulating small noncoding RNA (sncRNA) 5' transfer RNA (tRNA) half
gattccccgacggggaga

SEQ ID NO: 11602 - DNA, 27 bp, Artificial Sequence
  synthetic circulating small noncoding RNA (sncRNA) 5' transfer RNA (tRNA) half
tccgcccggtttcgaaccggggacctt

SEQ ID NO: 11603 - DNA, 17 bp, Artificial Sequence
  synthetic circulating small noncoding RNA (sncRNA) 5' transfer RNA (tRNA) half
ccctgaccgggaatcga

SEQ ID NO: 11604 - DNA, 13 bp, Artificial Sequence
  synthetic circulating small noncoding RNA (sncRNA) 5' transfer RNA (tRNA) half
agccagccaggag

SEQ ID NO: 11605 - DNA, 18 bp, Artificial Sequence
  synthetic circulating small noncoding RNA (sncRNA) 5' transfer RNA (tRNA) half
aatcctaaccactagacc

SEQ ID NO: 11606 - DNA, 19 bp, Artificial Sequence
  synthetic circulating small noncoding RNA (sncRNA) 5' transfer RNA (tRNA) half
gagtgctaaccattacacc

SEQ ID NO: 11607 - DNA, 23 bp, Artificial Sequence
  synthetic circulating small noncoding RNA (sncRNA) 5' transfer RNA (tRNA) half
cccatgctctaccgactgagcta

SEQ ID NO: 11608 - DNA, 20 bp, Artificial Sequence
  synthetic circulating small noncoding RNA (sncRNA) 5' transfer RNA (tRNA) half
atcccggacgagccccactt

SEQ ID NO: 11609 - DNA, 19 bp, Artificial Sequence
  synthetic circulating small noncoding RNA (sncRNA) 5' transfer RNA (tRNA) half
aggccccagcgagatttga

SEQ ID NO: 11610 - DNA, 17 bp, Artificial Sequence
  synthetic circulating small noncoding RNA (sncRNA) 5' transfer RNA (tRNA) half
catgctctaccgactga

SEQ ID NO: 11611 - DNA, 32 bp, Artificial Sequence
  synthetic circulating small noncoding RNA (sncRNA) 5' transfer RNA (tRNA) half
gtgctgggcccataacccagaggtcgatggat

SEQ ID NO: 11612 - DNA, 31 bp, Artificial Sequence
  synthetic circulating small noncoding RNA (sncRNA) 5' transfer RNA (tRNA) half
gcagagtggcgcagcggaagcgtgctgggcc

SEQ ID NO: 11613 - DNA, 12 bp, Artificial Sequence
  synthetic circulating small noncoding RNA (sncRNA) 5' transfer RNA (tRNA) half
gttcgactcccg

SEQ ID NO: 11614 - DNA, 22 bp, Artificial Sequence
  synthetic circulating small noncoding RNA (sncRNA) 5' transfer RNA (tRNA) half
gttccttcgagccggattcgaa

SEQ ID NO: 11615 - DNA, 26 bp, Artificial Sequence
  synthetic circulating small noncoding RNA (sncRNA) 5' transfer RNA (tRNA) half
gaccccgacgtgattcgaacacgcag

SEQ ID NO: 11616 - DNA, 17 bp, Artificial Sequence
  synthetic circulating small noncoding RNA (sncRNA) 5' transfer RNA (tRNA) half
taagcgagaatcatacc

SEQ ID NO: 11617 - DNA, 19 bp, Artificial Sequence
  synthetic circulating small noncoding RNA (sncRNA) 5' transfer RNA (tRNA) half
tcccggacgagccccatct

SEQ ID NO: 11618 - DNA, 17 bp, Artificial Sequence
  synthetic circulating small noncoding RNA (sncRNA) 5' transfer RNA (tRNA) half
cgaaccccggtctcccg

SEQ ID NO: 11619 - DNA, 31 bp, Artificial Sequence
  synthetic circulating small noncoding RNA (sncRNA) 5' transfer RNA (tRNA) half
ggggatgtagctcaatggtagagcacatgct

SEQ ID NO: 11620 - DNA, 27 bp, Artificial Sequence
  synthetic circulating small noncoding RNA (sncRNA) 5' transfer RNA (tRNA) half
gattaagagtctcatgctctaccgact

SEQ ID NO: 11621 - DNA, 22 bp, Artificial Sequence
  synthetic circulating small noncoding RNA (sncRNA) 5' transfer RNA (tRNA) half
aatccagcgatccgagttcaaa

SEQ ID NO: 11622 - DNA, 19 bp, Artificial Sequence
  synthetic circulating small noncoding RNA (sncRNA) 5' transfer RNA (tRNA) half
cactcctgacagcctcgcc

SEQ ID NO: 11623 - DNA, 18 bp, Artificial Sequence
  synthetic circulating small noncoding RNA (sncRNA) 5' transfer RNA (tRNA) half
gcgccttagaccgctcgg

SEQ ID NO: 11624 - DNA, 28 bp, Artificial Sequence
  synthetic circulating small noncoding RNA (sncRNA) 5' transfer RNA (tRNA) half
tccatagtgtagcggttatcacgtctgc

SEQ ID NO: 11625 - DNA, 22 bp, Artificial Sequence
  synthetic circulating small noncoding RNA (sncRNA) 5' transfer RNA (tRNA) half
tttccgtagtgtagtggttatc

SEQ ID NO: 11626 - DNA, 42 bp, Artificial Sequence
  synthetic circulating small noncoding RNA (sncRNA) 5' transfer RNA (tRNA) half
tccagtctcttcggaggcgtgggttcgaatcccaccgctgcc

SEQ ID NO: 11627 - DNA, 24 bp, Artificial Sequence
  synthetic circulating small noncoding RNA (sncRNA) 5' transfer RNA (tRNA) half
atgcgtgcagagcacaatggatta

SEQ ID NO: 11628 - DNA, 13 bp, Artificial Sequence
  synthetic circulating small noncoding RNA (sncRNA) 5' transfer RNA (tRNA) half
aggcaccgctggg

SEQ ID NO: 11629 - DNA, 25 bp, Artificial Sequence
  synthetic circulating small noncoding RNA (sncRNA) 5' transfer RNA (tRNA) half
caggcggggatactaaccactatac

SEQ ID NO: 11630 - DNA, 26 bp, Artificial Sequence
  synthetic circulating small noncoding RNA (sncRNA) 5' transfer RNA (tRNA) half
atgtagctcagtggtagagcgcgcgc

SEQ ID NO: 11631 - DNA, 15 bp, Artificial Sequence
  synthetic circulating small noncoding RNA (sncRNA) 5' transfer RNA (tRNA) half
ccgagtggttaaggc

SEQ ID NO: 11632 - DNA, 42 bp, Artificial Sequence
  synthetic circulating small noncoding RNA (sncRNA) 5' transfer RNA (tRNA) half
tgtcgtccctgggtgggctcgaaccaccaacctttcggttaa

SEQ ID NO: 11633 - DNA, 22 bp, Artificial Sequence
  synthetic circulating small noncoding RNA (sncRNA) 5' transfer RNA (tRNA) half
cgactgagctatccgggctctt

SEQ ID NO: 11634 - DNA, 20 bp, Artificial Sequence
  synthetic circulating small noncoding RNA (sncRNA) 5' transfer RNA (tRNA) half
cgagcctcacctggagcacg

SEQ ID NO: 11635 - DNA, 24 bp, Artificial Sequence
  synthetic circulating small noncoding RNA (sncRNA) 5' transfer RNA (tRNA) half
aaaacaaagcctccgatagcagag

SEQ ID NO: 11636 - DNA, 32 bp, Artificial Sequence
  synthetic circulating small noncoding RNA (sncRNA) 5' transfer RNA (tRNA) half
ttaggtcgctggttcgattccggctcgaagga

SEQ ID NO: 11637 - DNA, 45 bp, Artificial Sequence
  synthetic circulating small noncoding RNA (sncRNA) 5' transfer RNA (tRNA) half
ggttgccccctctgaggttcgaactcaggaccttcagattatgag

SEQ ID NO: 11638 - DNA, 36 bp, Artificial Sequence
  synthetic circulating small noncoding RNA (sncRNA) 5' transfer RNA (tRNA) half
gtgtttccgcccggtttcgaaccggggacctttcgc

SEQ ID NO: 11639 - DNA, 14 bp, Artificial Sequence
  synthetic circulating small noncoding RNA (sncRNA) 5' transfer RNA (tRNA) half
ggctaggattcggc

SEQ ID NO: 11640 - DNA, 24 bp, Artificial Sequence
  synthetic circulating small noncoding RNA (sncRNA) 5' transfer RNA (tRNA) half
aggcgagaattctaccattgaact

SEQ ID NO: 11641 - DNA, 26 bp, Artificial Sequence
  synthetic circulating small noncoding RNA (sncRNA) 5' transfer RNA (tRNA) half
gggattaagagtcccatgctctaccg

SEQ ID NO: 11642 - DNA, 30 bp, Artificial Sequence
  synthetic circulating small noncoding RNA (sncRNA) 5' transfer RNA (tRNA) half
aagaattctaccactgaaccaccaatgctt

SEQ ID NO: 11643 - DNA, 31 bp, Artificial Sequence
  synthetic circulating small noncoding RNA (sncRNA) 5' transfer RNA (tRNA) half
ccgctgggattcgaacccaggatctcctgtt

SEQ ID NO: 11644 - DNA, 13 bp, Artificial Sequence
  synthetic circulating small noncoding RNA (sncRNA) 5' transfer RNA (tRNA) half
acccgggtcaact

SEQ ID NO: 11645 - DNA, 35 bp, Artificial Sequence
  synthetic circulating small noncoding RNA (sncRNA) 5' transfer RNA (tRNA) half
aagtctgatgctctaccgactgagctatccgggcg

SEQ ID NO: 11646 - DNA, 22 bp, Artificial Sequence
  synthetic circulating small noncoding RNA (sncRNA) 5' transfer RNA (tRNA) half
aaggccccagcgagatttgaac

SEQ ID NO: 11647 - DNA, 32 bp, Artificial Sequence
  synthetic circulating small noncoding RNA (sncRNA) 5' transfer RNA (tRNA) half
tcgactctggcgggactcgaacccgcaacctt

SEQ ID NO: 11648 - DNA, 12 bp, Artificial Sequence
  synthetic circulating small noncoding RNA (sncRNA) 5' transfer RNA (tRNA) half
agagcatcagac

SEQ ID NO: 11649 - DNA, 41 bp, Artificial Sequence
  synthetic circulating small noncoding RNA (sncRNA) 5' transfer RNA (tRNA) half
cccattcttgcgacccgggttcgattcccgggcggcgcatg

SEQ ID NO: 11650 - DNA, 16 bp, Artificial Sequence
  synthetic circulating small noncoding RNA (sncRNA) 5' transfer RNA (tRNA) half
gtatgattctcgcttt

SEQ ID NO: 11651 - DNA, 16 bp, Artificial Sequence
  synthetic circulating small noncoding RNA (sncRNA) 5' transfer RNA (tRNA) half
aatctcggtgggacct

SEQ ID NO: 11652 - DNA, 12 bp, Artificial Sequence
  synthetic circulating small noncoding RNA (sncRNA) 5' transfer RNA (tRNA) half
ccctgaccggga

SEQ ID NO: 11653 - DNA, 17 bp, Artificial Sequence
  synthetic circulating small noncoding RNA (sncRNA) 5' transfer RNA (tRNA) half
gctcgtccgggatttga

SEQ ID NO: 11654 - DNA, 19 bp, Artificial Sequence
  synthetic circulating small noncoding RNA (sncRNA) 5' transfer RNA (tRNA) half
agtgcattggccgggaatc

SEQ ID NO: 11655 - DNA, 25 bp, Artificial Sequence
  synthetic circulating small noncoding RNA (sncRNA) 5' transfer RNA (tRNA) half
cgtatagtggttagtactctgcgtt

SEQ ID NO: 11656 - DNA, 15 bp, Artificial Sequence
  synthetic circulating small noncoding RNA (sncRNA) 5' transfer RNA (tRNA) half
caggcggggatactc

SEQ ID NO: 11657 - DNA, 13 bp, Artificial Sequence
  synthetic circulating small noncoding RNA (sncRNA) 5' transfer RNA (tRNA) half
gtctccccgtcgg

SEQ ID NO: 11658 - DNA, 32 bp, Artificial Sequence
  synthetic circulating small noncoding RNA (sncRNA) 5' transfer RNA (tRNA) half
gcactctggactctgaatccagcgatccgagt

SEQ ID NO: 11659 - DNA, 23 bp, Artificial Sequence
  synthetic circulating small noncoding RNA (sncRNA) 5' transfer RNA (tRNA) half
gagaatcatacccctagaccaac

SEQ ID NO: 11660 - DNA, 21 bp, Artificial Sequence
  synthetic circulating small noncoding RNA (sncRNA) 5' transfer RNA (tRNA) half
gtctgatgctctaccaactga

SEQ ID NO: 11661 - DNA, 13 bp, Artificial Sequence
  synthetic circulating small noncoding RNA (sncRNA) 5' transfer RNA (tRNA) half
tccttaggtcgct

SEQ ID NO: 11662 - DNA, 33 bp, Artificial Sequence
  synthetic circulating small noncoding RNA (sncRNA) 5' transfer RNA (tRNA) half
gattaagagtcccatgctctaccgactgagcta

SEQ ID NO: 11663 - DNA, 26 bp, Artificial Sequence
  synthetic circulating small noncoding RNA (sncRNA) 5' transfer RNA (tRNA) half
ggggatgtagctcagcggtagagcac

SEQ ID NO: 11664 - DNA, 15 bp, Artificial Sequence
  synthetic circulating small noncoding RNA (sncRNA) 5' transfer RNA (tRNA) half
gggattgtgggttcg

SEQ ID NO: 11665 - DNA, 32 bp, Artificial Sequence
  synthetic circulating small noncoding RNA (sncRNA) 5' transfer RNA (tRNA) half
acaggagatcctgggttcaaatcccagcgggg

SEQ ID NO: 11666 - DNA, 10 bp, Artificial Sequence
  synthetic circulating small noncoding RNA (sncRNA) 5' transfer RNA (tRNA) half
ctggttcgat

SEQ ID NO: 11667 - DNA, 14 bp, Artificial Sequence
  synthetic circulating small noncoding RNA (sncRNA) 5' transfer RNA (tRNA) half
gcagcgagcagggt

SEQ ID NO: 11668 - DNA, 22 bp, Artificial Sequence
  synthetic circulating small noncoding RNA (sncRNA) 5' transfer RNA (tRNA) half
gcgagcgtgatgaccactacac

SEQ ID NO: 11669 - DNA, 13 bp, Artificial Sequence
  synthetic circulating small noncoding RNA (sncRNA) 5' transfer RNA (tRNA) half
gaacccgcaacct

SEQ ID NO: 11670 - DNA, 38 bp, Artificial Sequence
  synthetic circulating small noncoding RNA (sncRNA) 5' transfer RNA (tRNA) half
aatctgagggtccagggttcaagtccctgttcgggcgc

SEQ ID NO: 11671 - DNA, 30 bp, Artificial Sequence
  synthetic circulating small noncoding RNA (sncRNA) 5' transfer RNA (tRNA) half
gaccgcgtggcctaatggataaggcgtctg

SEQ ID NO: 11672 - DNA, 19 bp, Artificial Sequence
  synthetic circulating small noncoding RNA (sncRNA) 5' transfer RNA (tRNA) half
gcctccgatagcagaggat

SEQ ID NO: 11673 - DNA, 17 bp, Artificial Sequence
  synthetic circulating small noncoding RNA (sncRNA) 5' transfer RNA (tRNA) half
cgggttcgatccccggc

SEQ ID NO: 11674 - DNA, 39 bp, Artificial Sequence
  synthetic circulating small noncoding RNA (sncRNA) 5' transfer RNA (tRNA) half
ctgtcacgcgggagaccggggttcgattccccgacgggg

SEQ ID NO: 11675 - DNA, 13 bp, Artificial Sequence
  synthetic circulating small noncoding RNA (sncRNA) 5' transfer RNA (tRNA) half
ggagatgccgggg

SEQ ID NO: 11676 - DNA, 23 bp, Artificial Sequence
  synthetic circulating small noncoding RNA (sncRNA) 5' transfer RNA (tRNA) half
gaacccacgcagacatatgtcca

SEQ ID NO: 11677 - DNA, 27 bp, Artificial Sequence
  synthetic circulating small noncoding RNA (sncRNA) 5' transfer RNA (tRNA) half
ggcccgtacggggatcgaacccgcgac

SEQ ID NO: 11678 - DNA, 15 bp, Artificial Sequence
  synthetic circulating small noncoding RNA (sncRNA) 5' transfer RNA (tRNA) half
gcccaacgtggggct

SEQ ID NO: 11679 - DNA, 7 bp, Artificial Sequence
  synthetic circulating small noncoding RNA (sncRNA) 5' transfer RNA (tRNA) half
cgctgcg

SEQ ID NO: 11680 - DNA, 23 bp, Artificial Sequence
  synthetic circulating small noncoding RNA (sncRNA) 5' transfer RNA (tRNA) half
tcagagtccagagtgctagccat

SEQ ID NO: 11681 - DNA, 34 bp, Artificial Sequence
  synthetic circulating small noncoding RNA (sncRNA) 5' transfer RNA (tRNA) half
gggaggcccgggttcgattcccggccaatgcact

SEQ ID NO: 11682 - DNA, 22 bp, Artificial Sequence
  synthetic circulating small noncoding RNA (sncRNA) 5' transfer RNA (tRNA) half
aaaagtctgatgctctaccgac

SEQ ID NO: 11683 - DNA, 36 bp, Artificial Sequence
  synthetic circulating small noncoding RNA (sncRNA) 5' transfer RNA (tRNA) half
gcgccgctggtgtagtggtatcatgcaagattccca

SEQ ID NO: 11684 - DNA, 21 bp, Artificial Sequence
  synthetic circulating small noncoding RNA (sncRNA) 5' transfer RNA (tRNA) half
gtttccgcccggtttcgaacc

SEQ ID NO: 11685 - DNA, 21 bp, Artificial Sequence
  synthetic circulating small noncoding RNA (sncRNA) 5' transfer RNA (tRNA) half
tcgaatcccaccgctgccaac

SEQ ID NO: 11686 - DNA, 33 bp, Artificial Sequence
  synthetic circulating small noncoding RNA (sncRNA) 5' transfer RNA (tRNA) half
tggggattgtgggttcgagtcccatctgggtcg

SEQ ID NO: 11687 - DNA, 33 bp, Artificial Sequence
  synthetic circulating small noncoding RNA (sncRNA) 5' transfer RNA (tRNA) half
agccaggtaggagtcgaacctacaatcttctga

SEQ ID NO: 11688 - DNA, 16 bp, Artificial Sequence
  synthetic circulating small noncoding RNA (sncRNA) 5' transfer RNA (tRNA) half
agcgcccgaacaggga

SEQ ID NO: 11689 - DNA, 39 bp, Artificial Sequence
  synthetic circulating small noncoding RNA (sncRNA) 5' transfer RNA (tRNA) half
tccgagaggtcccgggttcaaatcccggacgagccccac

SEQ ID NO: 11690 - DNA, 19 bp, Artificial Sequence
  synthetic circulating small noncoding RNA (sncRNA) 5' transfer RNA (tRNA) half
gtcagacgcgctaccattg

SEQ ID NO: 11691 - DNA, 43 bp, Artificial Sequence
  synthetic circulating small noncoding RNA (sncRNA) 5' transfer RNA (tRNA) half
tggcagtggtgggattcgaacccacgcctccgaagagactgga

SEQ ID NO: 11692 - DNA, 7 bp, Artificial Sequence
  synthetic circulating small noncoding RNA (sncRNA) 5' transfer RNA (tRNA) half
tcgaacc

SEQ ID NO: 11693 - DNA, 18 bp, Artificial Sequence
  synthetic circulating small noncoding RNA (sncRNA) 5' transfer RNA (tRNA) half
aaccggggacctcttgat

SEQ ID NO: 11694 - DNA, 7 bp, Artificial Sequence
  synthetic circulating small noncoding RNA (sncRNA) 5' transfer RNA (tRNA) half
tagcgcg

SEQ ID NO: 11695 - DNA, 29 bp, Artificial Sequence
  synthetic circulating small noncoding RNA (sncRNA) 5' transfer RNA (tRNA) half
atatggtctagcggttaggattcctggtt

SEQ ID NO: 11696 - DNA, 13 bp, Artificial Sequence
  synthetic circulating small noncoding RNA (sncRNA) 5' transfer RNA (tRNA) half
agaggtccccggt

SEQ ID NO: 11697 - DNA, 20 bp, Artificial Sequence
  synthetic circulating small noncoding RNA (sncRNA) 5' transfer RNA (tRNA) half
gcccaacgtggggctcgaac

SEQ ID NO: 11698 - DNA, 21 bp, Artificial Sequence
  synthetic circulating small noncoding RNA (sncRNA) 5' transfer RNA (tRNA) half
aaaccagggctcgtccgggat

SEQ ID NO: 11699 - DNA, 12 bp, Artificial Sequence
  synthetic circulating small noncoding RNA (sncRNA) 5' transfer RNA (tRNA) half
tgctctaccgac

SEQ ID NO: 11700 - DNA, 23 bp, Artificial Sequence
  synthetic circulating small noncoding RNA (sncRNA) 5' transfer RNA (tRNA) half
aaaacaaagcctccgatagcaga

SEQ ID NO: 11701 - DNA, 35 bp, Artificial Sequence
  synthetic circulating small noncoding RNA (sncRNA) 5' transfer RNA (tRNA) half
atccttaggtcgctggttcgactccggctcgaagg

SEQ ID NO: 11702 - DNA, 30 bp, Artificial Sequence
  synthetic circulating small noncoding RNA (sncRNA) 5' transfer RNA (tRNA) half
aagattgcaggttcgagtcctgccgcggtc

SEQ ID NO: 11703 - DNA, 14 bp, Artificial Sequence
  synthetic circulating small noncoding RNA (sncRNA) 5' transfer RNA (tRNA) half
gagtggtctaaggc

SEQ ID NO: 11704 - DNA, 30 bp, Artificial Sequence
  synthetic circulating small noncoding RNA (sncRNA) 5' transfer RNA (tRNA) half
ggactcaaagtccagtgtgctaaccattac

SEQ ID NO: 11705 - DNA, 28 bp, Artificial Sequence
  synthetic circulating small noncoding RNA (sncRNA) 5' transfer RNA (tRNA) half
gtcaggatggccgagcggtctaaggcgc

SEQ ID NO: 11706 - DNA, 22 bp, Artificial Sequence
  synthetic circulating small noncoding RNA (sncRNA) 5' transfer RNA (tRNA) half
aggtcccaccgagatttgaact

SEQ ID NO: 11707 - DNA, 13 bp, Artificial Sequence
  synthetic circulating small noncoding RNA (sncRNA) 5' transfer RNA (tRNA) half
agtcggtagagca

SEQ ID NO: 11708 - DNA, 23 bp, Artificial Sequence
  synthetic circulating small noncoding RNA (sncRNA) 5' transfer RNA (tRNA) half
caggcggcccgggttcgactccc

SEQ ID NO: 11709 - DNA, 16 bp, Artificial Sequence
  synthetic circulating small noncoding RNA (sncRNA) 5' transfer RNA (tRNA) half
gagtcgaacctggaat

SEQ ID NO: 11710 - DNA, 38 bp, Artificial Sequence
  synthetic circulating small noncoding RNA (sncRNA) 5' transfer RNA (tRNA) half
cttccctgaccgggaatcgaacccgggccgcggcggtg

SEQ ID NO: 11711 - DNA, 27 bp, Artificial Sequence
  synthetic circulating small noncoding RNA (sncRNA) 5' transfer RNA (tRNA) half
cggttaggattcctggttttcacccag

SEQ ID NO: 11712 - DNA, 8 bp, Artificial Sequence
  synthetic circulating small noncoding RNA (sncRNA) 5' transfer RNA (tRNA) half
aggtcgcg

SEQ ID NO: 11713 - DNA, 24 bp, Artificial Sequence
  synthetic circulating small noncoding RNA (sncRNA) 5' transfer RNA (tRNA) half
cgtggggctcgaacccacgaccct

SEQ ID NO: 11714 - DNA, 31 bp, Artificial Sequence
  synthetic circulating small noncoding RNA (sncRNA) 5' transfer RNA (tRNA) half
ggagatcctgggttcgaatcccagcggggcc

SEQ ID NO: 11715 - DNA, 43 bp, Artificial Sequence
  synthetic circulating small noncoding RNA (sncRNA) 5' transfer RNA (tRNA) half
aatccattggggtttccccgcgcaggttcgaatcctgccgact

SEQ ID NO: 11716 - DNA, 26 bp, Artificial Sequence
  synthetic circulating small noncoding RNA (sncRNA) 5' transfer RNA (tRNA) half
aggcggcccgggttcgactcccggta

SEQ ID NO: 11717 - DNA, 30 bp, Artificial Sequence
  synthetic circulating small noncoding RNA (sncRNA) 5' transfer RNA (tRNA) half
cactctggactctgaatccagcgatccgag

SEQ ID NO: 11718 - DNA, 21 bp, Artificial Sequence
  synthetic circulating small noncoding RNA (sncRNA) 5' transfer RNA (tRNA) half
cccggatagctcagtcggtag

SEQ ID NO: 11719 - DNA, 22 bp, Artificial Sequence
  synthetic circulating small noncoding RNA (sncRNA) 5' transfer RNA (tRNA) half
cacccaaagcgagaatcatacc

SEQ ID NO: 11720 - DNA, 8 bp, Artificial Sequence
  synthetic circulating small noncoding RNA (sncRNA) 5' transfer RNA (tRNA) half
gccgaacg

SEQ ID NO: 11721 - DNA, 32 bp, Artificial Sequence
  synthetic circulating small noncoding RNA (sncRNA) 5' transfer RNA (tRNA) half
gttccatagtgtagcggttatcacgtctgctt

SEQ ID NO: 11722 - DNA, 16 bp, Artificial Sequence
  synthetic circulating small noncoding RNA (sncRNA) 5' transfer RNA (tRNA) half
cagtgccttatccatt

SEQ ID NO: 11723 - DNA, 21 bp, Artificial Sequence
  synthetic circulating small noncoding RNA (sncRNA) 5' transfer RNA (tRNA) half
ggttcgattcccggtcaggga

SEQ ID NO: 11724 - DNA, 29 bp, Artificial Sequence
  synthetic circulating small noncoding RNA (sncRNA) 5' transfer RNA (tRNA) half
gccccagcgagatttgaactcgcgacccc

SEQ ID NO: 11725 - DNA, 17 bp, Artificial Sequence
  synthetic circulating small noncoding RNA (sncRNA) 5' transfer RNA (tRNA) half
aaccggggacctcttga

SEQ ID NO: 11726 - DNA, 23 bp, Artificial Sequence
  synthetic circulating small noncoding RNA (sncRNA) 5' transfer RNA (tRNA) half
cgctggattcagagtccagagtg

SEQ ID NO: 11727 - DNA, 30 bp, Artificial Sequence
  synthetic circulating small noncoding RNA (sncRNA) 5' transfer RNA (tRNA) half
attgtgggttcgagtcccatctgggtcgca

SEQ ID NO: 11728 - DNA, 9 bp, Artificial Sequence
  synthetic circulating small noncoding RNA (sncRNA) 5' transfer RNA (tRNA) half
cgacgcgct

SEQ ID NO: 11729 - DNA, 35 bp, Artificial Sequence
  synthetic circulating small noncoding RNA (sncRNA) 5' transfer RNA (tRNA) half
gcagcaacctcggttcgaatccgagtcacggcagt

SEQ ID NO: 11730 - DNA, 38 bp, Artificial Sequence
  synthetic circulating small noncoding RNA (sncRNA) 5' transfer RNA (tRNA) half
gcagcggtgggattcgaacccacgccatcgaaatgact

SEQ ID NO: 11731 - DNA, 12 bp, Artificial Sequence
  synthetic circulating small noncoding RNA (sncRNA) 5' transfer RNA (tRNA) half
accggggacctt

SEQ ID NO: 11732 - DNA, 23 bp, Artificial Sequence
  synthetic circulating small noncoding RNA (sncRNA) 5' transfer RNA (tRNA) half
tgtagtggtatcatgcaagattc

SEQ ID NO: 11733 - DNA, 34 bp, Artificial Sequence
  synthetic circulating small noncoding RNA (sncRNA) 5' transfer RNA (tRNA) half
gtggttaggattcggcgctctcaccgccgcggcc

SEQ ID NO: 11734 - DNA, 21 bp, Artificial Sequence
  synthetic circulating small noncoding RNA (sncRNA) 5' transfer RNA (tRNA) half
tctagcggttaggattcctgg

SEQ ID NO: 11735 - DNA, 41 bp, Artificial Sequence
  synthetic circulating small noncoding RNA (sncRNA) 5' transfer RNA (tRNA) half
tgccgtccctgggtgggctcgaaccaccaacctttcggtta

SEQ ID NO: 11736 - DNA, 14 bp, Artificial Sequence
  synthetic circulating small noncoding RNA (sncRNA) 5' transfer RNA (tRNA) half
gaatcataccccta

SEQ ID NO: 11737 - DNA, 10 bp, Artificial Sequence
  synthetic circulating small noncoding RNA (sncRNA) 5' transfer RNA (tRNA) half
aggtctcgtt

SEQ ID NO: 11738 - DNA, 38 bp, Artificial Sequence
  synthetic circulating small noncoding RNA (sncRNA) 5' transfer RNA (tRNA) half
tgccgtccctgggtgggctcgaaccaccaacctttcgg

SEQ ID NO: 11739 - DNA, 36 bp, Artificial Sequence
  synthetic circulating small noncoding RNA (sncRNA) 5' transfer RNA (tRNA) half
acccgggtcaactgcttggaaggcagctatgctcac

SEQ ID NO: 11740 - DNA, 9 bp, Artificial Sequence
  synthetic circulating small noncoding RNA (sncRNA) 5' transfer RNA (tRNA) half
gtctcatgc

SEQ ID NO: 11741 - DNA, 19 bp, Artificial Sequence
  synthetic circulating small noncoding RNA (sncRNA) 5' transfer RNA (tRNA) half
cccgggcctcccgcgtggc

SEQ ID NO: 11742 - DNA, 32 bp, Artificial Sequence
  synthetic circulating small noncoding RNA (sncRNA) 5' transfer RNA (tRNA) half
ggctgggggatgtagctcagtggtagagcgcg

SEQ ID NO: 11743 - DNA, 12 bp, Artificial Sequence
  synthetic circulating small noncoding RNA (sncRNA) 5' transfer RNA (tRNA) half
tcccgcgtggca

SEQ ID NO: 11744 - DNA, 21 bp, Artificial Sequence
  synthetic circulating small noncoding RNA (sncRNA) 5' transfer RNA (tRNA) half
gagttcaaatctcgctggggc

SEQ ID NO: 11745 - DNA, 39 bp, Artificial Sequence
  synthetic circulating small noncoding RNA (sncRNA) 5' transfer RNA (tRNA) half
gcctccccgtcggggaatcgaaccccggtctcccgcgtg

SEQ ID NO: 11746 - DNA, 19 bp, Artificial Sequence
  synthetic circulating small noncoding RNA (sncRNA) 5' transfer RNA (tRNA) half
ctaccatttgagctaatcc

SEQ ID NO: 11747 - DNA, 19 bp, Artificial Sequence
  synthetic circulating small noncoding RNA (sncRNA) 5' transfer RNA (tRNA) half
gcccaacgtggggctcgaa

SEQ ID NO: 11748 - DNA, 29 bp, Artificial Sequence
  synthetic circulating small noncoding RNA (sncRNA) 5' transfer RNA (tRNA) half
ctgggtgggctcgaaccaccaacctttcg

SEQ ID NO: 11749 - DNA, 24 bp, Artificial Sequence
  synthetic circulating small noncoding RNA (sncRNA) 5' transfer RNA (tRNA) half
taggcgaatgtgataaccactaca

SEQ ID NO: 11750 - DNA, 14 bp, Artificial Sequence
  synthetic circulating small noncoding RNA (sncRNA) 5' transfer RNA (tRNA) half
cctccccgtcgggg

SEQ ID NO: 11751 - DNA, 37 bp, Artificial Sequence
  synthetic circulating small noncoding RNA (sncRNA) 5' transfer RNA (tRNA) half
ctggggattgtgggttcgagtcccatctgggtcgcat

SEQ ID NO: 11752 - DNA, 33 bp, Artificial Sequence
  synthetic circulating small noncoding RNA (sncRNA) 5' transfer RNA (tRNA) half
cgggccgcggcggtgagagcgccgaatcctaac

SEQ ID NO: 11753 - DNA, 13 bp, Artificial Sequence
  synthetic circulating small noncoding RNA (sncRNA) 5' transfer RNA (tRNA) half
ctacactacggaa

SEQ ID NO: 11754 - DNA, 38 bp, Artificial Sequence
  synthetic circulating small noncoding RNA (sncRNA) 5' transfer RNA (tRNA) half
cgagccagccaggagtcgaacctagaatcttctgatcc

SEQ ID NO: 11755 - DNA, 12 bp, Artificial Sequence
  synthetic circulating small noncoding RNA (sncRNA) 5' transfer RNA (tRNA) half
tctaaaggtccc

SEQ ID NO: 11756 - DNA, 27 bp, Artificial Sequence
  synthetic circulating small noncoding RNA (sncRNA) 5' transfer RNA (tRNA) half
cgccgtgatcgtatagtggttagtact

SEQ ID NO: 11757 - DNA, 17 bp, Artificial Sequence
  synthetic circulating small noncoding RNA (sncRNA) 5' transfer RNA (tRNA) half
gcgccaaatcctaacca

SEQ ID NO: 11758 - DNA, 31 bp, Artificial Sequence
  synthetic circulating small noncoding RNA (sncRNA) 5' transfer RNA (tRNA) half
ggcgccttagaccactcggccatcctgacat

SEQ ID NO: 11759 - DNA, 20 bp, Artificial Sequence
  synthetic circulating small noncoding RNA (sncRNA) 5' transfer RNA (tRNA) half
cgggactcgaacccgcaacc

SEQ ID NO: 11760 - DNA, 14 bp, Artificial Sequence
  synthetic circulating small noncoding RNA (sncRNA) 5' transfer RNA (tRNA) half
gctcggccacgcta

SEQ ID NO: 11761 - DNA, 34 bp, Artificial Sequence
  synthetic circulating small noncoding RNA (sncRNA) 5' transfer RNA (tRNA) half
atccatcgacctctgggttatgggcccagcacgc

SEQ ID NO: 11762 - DNA, 25 bp, Artificial Sequence
  synthetic circulating small noncoding RNA (sncRNA) 5' transfer RNA (tRNA) half
aatcctaaccgctagaccatatggg

SEQ ID NO: 11763 - DNA, 21 bp, Artificial Sequence
  synthetic circulating small noncoding RNA (sncRNA) 5' transfer RNA (tRNA) half
atcgtatagtggttagtactc

SEQ ID NO: 11764 - DNA, 34 bp, Artificial Sequence
  synthetic circulating small noncoding RNA (sncRNA) 5' transfer RNA (tRNA) half
gcgcccaacgtggggctcgaacccacgaccctga

SEQ ID NO: 11765 - DNA, 14 bp, Artificial Sequence
  synthetic circulating small noncoding RNA (sncRNA) 5' transfer RNA (tRNA) half
tggtagaattctcg

SEQ ID NO: 11766 - DNA, 14 bp, Artificial Sequence
  synthetic circulating small noncoding RNA (sncRNA) 5' transfer RNA (tRNA) half
tcgcgacccctggt

SEQ ID NO: 11767 - DNA, 28 bp, Artificial Sequence
  synthetic circulating small noncoding RNA (sncRNA) 5' transfer RNA (tRNA) half
gatagctcagtcggtagagcatcagact

SEQ ID NO: 11768 - DNA, 35 bp, Artificial Sequence
  synthetic circulating small noncoding RNA (sncRNA) 5' transfer RNA (tRNA) half
aactcggatcgctggattcagagtccagagtgcta

SEQ ID NO: 11769 - DNA, 22 bp, Artificial Sequence
  synthetic circulating small noncoding RNA (sncRNA) 5' transfer RNA (tRNA) half
aaccgggcggaaacagcaactt

SEQ ID NO: 11770 - DNA, 17 bp, Artificial Sequence
  synthetic circulating small noncoding RNA (sncRNA) 5' transfer RNA (tRNA) half
caaatctcggtggaacc

SEQ ID NO: 11771 - DNA, 12 bp, Artificial Sequence
  synthetic circulating small noncoding RNA (sncRNA) 5' transfer RNA (tRNA) half
aacctcggttcg

SEQ ID NO: 11772 - DNA, 13 bp, Artificial Sequence
  synthetic circulating small noncoding RNA (sncRNA) 5' transfer RNA (tRNA) half
caggttcgactcc

SEQ ID NO: 11773 - DNA, 21 bp, Artificial Sequence
  synthetic circulating small noncoding RNA (sncRNA) 5' transfer RNA (tRNA) half
ggcccgtacggggatcgaacc

SEQ ID NO: 11774 - DNA, 12 bp, Artificial Sequence
  synthetic circulating small noncoding RNA (sncRNA) 5' transfer RNA (tRNA) half
cccgtacgggcc

SEQ ID NO: 11775 - DNA, 31 bp, Artificial Sequence
  synthetic circulating small noncoding RNA (sncRNA) 5' transfer RNA (tRNA) half
cgtcggggaatcgaaccccggtctcccgcgt

SEQ ID NO: 11776 - DNA, 20 bp, Artificial Sequence
  synthetic circulating small noncoding RNA (sncRNA) 5' transfer RNA (tRNA) half
tccagagtgctagccattac

SEQ ID NO: 11777 - DNA, 27 bp, Artificial Sequence
  synthetic circulating small noncoding RNA (sncRNA) 5' transfer RNA (tRNA) half
agtggttaggattcggcgctctcaccg

SEQ ID NO: 11778 - DNA, 38 bp, Artificial Sequence
  synthetic circulating small noncoding RNA (sncRNA) 5' transfer RNA (tRNA) half
cccgggccgcggcggtgagagcgccgaatcctaaccac

SEQ ID NO: 11779 - DNA, 45 bp, Artificial Sequence
  synthetic circulating small noncoding RNA (sncRNA) 5' transfer RNA (tRNA) half
cgtctccccgtcggggaatcgaaccccggtctcccgcgtgacagg

SEQ ID NO: 11780 - DNA, 7 bp, Artificial Sequence
  synthetic circulating small noncoding RNA (sncRNA) 5' transfer RNA (tRNA) half
gcggtct

SEQ ID NO: 11781 - DNA, 24 bp, Artificial Sequence
  synthetic circulating small noncoding RNA (sncRNA) 5' transfer RNA (tRNA) half
gaatcctaaccactagaccaccag

SEQ ID NO: 11782 - DNA, 13 bp, Artificial Sequence
  synthetic circulating small noncoding RNA (sncRNA) 5' transfer RNA (tRNA) half
ccctgttcgggcg

SEQ ID NO: 11783 - DNA, 29 bp, Artificial Sequence
  synthetic circulating small noncoding RNA (sncRNA) 5' transfer RNA (tRNA) half
tggatagctcagtcggtagagcatcagac

SEQ ID NO: 11784 - DNA, 40 bp, Artificial Sequence
  synthetic circulating small noncoding RNA (sncRNA) 5' transfer RNA (tRNA) half
gtaaacaggagatcctgggttcgaatcccagcggggcctt

SEQ ID NO: 11785 - DNA, 9 bp, Artificial Sequence
  synthetic circulating small noncoding RNA (sncRNA) 5' transfer RNA (tRNA) half
caggcgggg

SEQ ID NO: 11786 - DNA, 22 bp, Artificial Sequence
  synthetic circulating small noncoding RNA (sncRNA) 5' transfer RNA (tRNA) half
atagtgtagcggttatcacgtc

SEQ ID NO: 11787 - DNA, 13 bp, Artificial Sequence
  synthetic circulating small noncoding RNA (sncRNA) 5' transfer RNA (tRNA) half
ggttgcgtgttca

SEQ ID NO: 11788 - DNA, 36 bp, Artificial Sequence
  synthetic circulating small noncoding RNA (sncRNA) 5' transfer RNA (tRNA) half
atgttcccgcccggtttcgaaccggggacctctcgc

SEQ ID NO: 11789 - DNA, 20 bp, Artificial Sequence
  synthetic circulating small noncoding RNA (sncRNA) 5' transfer RNA (tRNA) half
aacaaagcctccgatagcag

SEQ ID NO: 11790 - DNA, 32 bp, Artificial Sequence
  synthetic circulating small noncoding RNA (sncRNA) 5' transfer RNA (tRNA) half
tggttcagtggtagaattctcgcctgccacgc

SEQ ID NO: 11791 - DNA, 16 bp, Artificial Sequence
  synthetic circulating small noncoding RNA (sncRNA) 5' transfer RNA (tRNA) half
acaggcggggatacta

SEQ ID NO: 11792 - DNA, 21 bp, Artificial Sequence
  synthetic circulating small noncoding RNA (sncRNA) 5' transfer RNA (tRNA) half
gttcaattccacctttcgggc

SEQ ID NO: 11793 - DNA, 22 bp, Artificial Sequence
  synthetic circulating small noncoding RNA (sncRNA) 5' transfer RNA (tRNA) half
ccgagccagccaggagtcgaac

SEQ ID NO: 11794 - DNA, 10 bp, Artificial Sequence
  synthetic circulating small noncoding RNA (sncRNA) 5' transfer RNA (tRNA) half
cagcgatccg

SEQ ID NO: 11795 - DNA, 27 bp, Artificial Sequence
  synthetic circulating small noncoding RNA (sncRNA) 5' transfer RNA (tRNA) half
tgatcctcagtggtctggggtgcaggc

SEQ ID NO: 11796 - DNA, 23 bp, Artificial Sequence
  synthetic circulating small noncoding RNA (sncRNA) 5' transfer RNA (tRNA) half
taggtcgctggttcgattccggc

SEQ ID NO: 11797 - DNA, 29 bp, Artificial Sequence
  synthetic circulating small noncoding RNA (sncRNA) 5' transfer RNA (tRNA) half
tagtggttaggattcggcgctctcaccgc

SEQ ID NO: 11798 - DNA, 22 bp, Artificial Sequence
  synthetic circulating small noncoding RNA (sncRNA) 5' transfer RNA (tRNA) half
tccccgcgcaggttcgaatcct

SEQ ID NO: 11799 - DNA, 34 bp, Artificial Sequence
  synthetic circulating small noncoding RNA (sncRNA) 5' transfer RNA (tRNA) half
tgtggcccgtacggggatcgaacccgcgaccttg

SEQ ID NO: 11800 - DNA, 17 bp, Artificial Sequence
  synthetic circulating small noncoding RNA (sncRNA) 5' transfer RNA (tRNA) half
tcccggacgagccccat

SEQ ID NO: 11801 - DNA, 23 bp, Artificial Sequence
  synthetic circulating small noncoding RNA (sncRNA) 5' transfer RNA (tRNA) half
ccttcgatagctcagttggtaga

SEQ ID NO: 11802 - DNA, 27 bp, Artificial Sequence
  synthetic circulating small noncoding RNA (sncRNA) 5' transfer RNA (tRNA) half
agcacgcttccgctgcgccactctgct

SEQ ID NO: 11803 - DNA, 24 bp, Artificial Sequence
  synthetic circulating small noncoding RNA (sncRNA) 5' transfer RNA (tRNA) half
atgctctaccgactgagctagccg

SEQ ID NO: 11804 - DNA, 10 bp, Artificial Sequence
  synthetic circulating small noncoding RNA (sncRNA) 5' transfer RNA (tRNA) half
agcggtgcct

SEQ ID NO: 11805 - DNA, 17 bp, Artificial Sequence
  synthetic circulating small noncoding RNA (sncRNA) 5' transfer RNA (tRNA) half
tcgaatccggctcgaag

SEQ ID NO: 11806 - DNA, 22 bp, Artificial Sequence
  synthetic circulating small noncoding RNA (sncRNA) 5' transfer RNA (tRNA) half
tgggcccagcacgcttccgctg

SEQ ID NO: 11807 - DNA, 36 bp, Artificial Sequence
  synthetic circulating small noncoding RNA (sncRNA) 5' transfer RNA (tRNA) half
gtccaatgcgctatccattgcgccacggagccacct

SEQ ID NO: 11808 - DNA, 13 bp, Artificial Sequence
  synthetic circulating small noncoding RNA (sncRNA) 5' transfer RNA (tRNA) half
gaactcggatcgc

SEQ ID NO: 11809 - DNA, 29 bp, Artificial Sequence
  synthetic circulating small noncoding RNA (sncRNA) 5' transfer RNA (tRNA) half
tccagagtgctaaccattacaccatggga

SEQ ID NO: 11810 - DNA, 19 bp, Artificial Sequence
  synthetic circulating small noncoding RNA (sncRNA) 5' transfer RNA (tRNA) half
cttccctgaccgggaatcg

SEQ ID NO: 11811 - DNA, 11 bp, Artificial Sequence
  synthetic circulating small noncoding RNA (sncRNA) 5' transfer RNA (tRNA) half
gccccctctga

SEQ ID NO: 11812 - DNA, 14 bp, Artificial Sequence
  synthetic circulating small noncoding RNA (sncRNA) 5' transfer RNA (tRNA) half
tagagcatgagact

SEQ ID NO: 11813 - DNA, 21 bp, Artificial Sequence
  synthetic circulating small noncoding RNA (sncRNA) 5' transfer RNA (tRNA) half
aagttactggcagcggtggga

SEQ ID NO: 11814 - DNA, 16 bp, Artificial Sequence
  synthetic circulating small noncoding RNA (sncRNA) 5' transfer RNA (tRNA) half
cgtggccgagcggtct

SEQ ID NO: 11815 - DNA, 6 bp, Artificial Sequence
  synthetic circulating small noncoding RNA (sncRNA) 5' transfer RNA (tRNA) half
gaccgc

SEQ ID NO: 11816 - DNA, 35 bp, Artificial Sequence
  synthetic circulating small noncoding RNA (sncRNA) 5' transfer RNA (tRNA) half
caggagatcctgggttcgaatcccagtggggccta

SEQ ID NO: 11817 - DNA, 33 bp, Artificial Sequence
  synthetic circulating small noncoding RNA (sncRNA) 5' transfer RNA (tRNA) half
agtcaaatgctctaccactgagctataccccct

SEQ ID NO: 11818 - DNA, 35 bp, Artificial Sequence
  synthetic circulating small noncoding RNA (sncRNA) 5' transfer RNA (tRNA) half
cccgtgtgaggatcgaactcacgaccttcagatta

SEQ ID NO: 11819 - DNA, 19 bp, Artificial Sequence
  synthetic circulating small noncoding RNA (sncRNA) 5' transfer RNA (tRNA) half
ggattaagagtcccatgct

SEQ ID NO: 11820 - DNA, 41 bp, Artificial Sequence
  synthetic circulating small noncoding RNA (sncRNA) 5' transfer RNA (tRNA) half
tgtgccccgtgtgaggatcgaactcacgaccttcagattat

SEQ ID NO: 11821 - DNA, 17 bp, Artificial Sequence
  synthetic circulating small noncoding RNA (sncRNA) 5' transfer RNA (tRNA) half
acgggccaaagctgaag

SEQ ID NO: 11822 - DNA, 18 bp, Artificial Sequence
  synthetic circulating small noncoding RNA (sncRNA) 5' transfer RNA (tRNA) half
ggctccatagctcagggg

SEQ ID NO: 11823 - DNA, 20 bp, Artificial Sequence
  synthetic circulating small noncoding RNA (sncRNA) 5' transfer RNA (tRNA) half
gtcaggagtgggattcgaac

SEQ ID NO: 11824 - DNA, 21 bp, Artificial Sequence
  synthetic circulating small noncoding RNA (sncRNA) 5' transfer RNA (tRNA) half
agtactaaccactatacgatc

SEQ ID NO: 11825 - DNA, 15 bp, Artificial Sequence
  synthetic circulating small noncoding RNA (sncRNA) 5' transfer RNA (tRNA) half
cgaagatcgcgggtt

SEQ ID NO: 11826 - DNA, 16 bp, Artificial Sequence
  synthetic circulating small noncoding RNA (sncRNA) 5' transfer RNA (tRNA) half
tgatgctctaccgact

SEQ ID NO: 11827 - DNA, 26 bp, Artificial Sequence
  synthetic circulating small noncoding RNA (sncRNA) 5' transfer RNA (tRNA) half
gccgtgactcggattcgaaccgaggt

SEQ ID NO: 11828 - DNA, 13 bp, Artificial Sequence
  synthetic circulating small noncoding RNA (sncRNA) 5' transfer RNA (tRNA) half
tcgaaccagcgac

SEQ ID NO: 11829 - DNA, 13 bp, Artificial Sequence
  synthetic circulating small noncoding RNA (sncRNA) 5' transfer RNA (tRNA) half
cgaccacgaaggg

SEQ ID NO: 11830 - DNA, 17 bp, Artificial Sequence
  synthetic circulating small noncoding RNA (sncRNA) 5' transfer RNA (tRNA) half
tttcgaaccggggacct

SEQ ID NO: 11831 - DNA, 9 bp, Artificial Sequence
  synthetic circulating small noncoding RNA (sncRNA) 5' transfer RNA (tRNA) half
aggcaccgc

SEQ ID NO: 11832 - DNA, 35 bp, Artificial Sequence
  synthetic circulating small noncoding RNA (sncRNA) 5' transfer RNA (tRNA) half
tgcagtcaaatgctctaccactgagctataccccc

SEQ ID NO: 11833 - DNA, 18 bp, Artificial Sequence
  synthetic circulating small noncoding RNA (sncRNA) 5' transfer RNA (tRNA) half
tgcattggccgggaatcg

SEQ ID NO: 11834 - DNA, 37 bp, Artificial Sequence
  synthetic circulating small noncoding RNA (sncRNA) 5' transfer RNA (tRNA) half
cgcgggaggcccgggttcgattcccggcccatgcaga

SEQ ID NO: 11835 - DNA, 38 bp, Artificial Sequence
  synthetic circulating small noncoding RNA (sncRNA) 5' transfer RNA (tRNA) half
aagacttaaaaccttgttcccagaggttcaaatcctct

SEQ ID NO: 11836 - DNA, 39 bp, Artificial Sequence
  synthetic circulating small noncoding RNA (sncRNA) 5' transfer RNA (tRNA) half
cttaaaaccttgttcccagaggttcaaatcctctcccta

SEQ ID NO: 11837 - DNA, 42 bp, Artificial Sequence
  synthetic circulating small noncoding RNA (sncRNA) 5' transfer RNA (tRNA) half
cccgggccgcggcggtgagagcgccgaatcctaaccactaga

SEQ ID NO: 11838 - DNA, 13 bp, Artificial Sequence
  synthetic circulating small noncoding RNA (sncRNA) 5' transfer RNA (tRNA) half
gaggtagcgggat

SEQ ID NO: 11839 - DNA, 13 bp, Artificial Sequence
  synthetic circulating small noncoding RNA (sncRNA) 5' transfer RNA (tRNA) half
gacctctcgcacc

SEQ ID NO: 11840 - DNA, 15 bp, Artificial Sequence
  synthetic circulating small noncoding RNA (sncRNA) 5' transfer RNA (tRNA) half
tagtggtatcatgca

SEQ ID NO: 11841 - DNA, 20 bp, Artificial Sequence
  synthetic circulating small noncoding RNA (sncRNA) 5' transfer RNA (tRNA) half
actcacgaccttcagattat

SEQ ID NO: 11842 - DNA, 30 bp, Artificial Sequence
  synthetic circulating small noncoding RNA (sncRNA) 5' transfer RNA (tRNA) half
cgactccgccgggactcgaacccggaacct

SEQ ID NO: 11843 - DNA, 19 bp, Artificial Sequence
  synthetic circulating small noncoding RNA (sncRNA) 5' transfer RNA (tRNA) half
caggatggccgagcggtct

SEQ ID NO: 11844 - DNA, 36 bp, Artificial Sequence
  synthetic circulating small noncoding RNA (sncRNA) 5' transfer RNA (tRNA) half
gggacctctcgcacccaaagcgagaatcatacccct

SEQ ID NO: 11845 - DNA, 38 bp, Artificial Sequence
  synthetic circulating small noncoding RNA (sncRNA) 5' transfer RNA (tRNA) half
cacgcagaaggtcctgggttcgagccccagtggaacca

SEQ ID NO: 11846 - DNA, 41 bp, Artificial Sequence
  synthetic circulating small noncoding RNA (sncRNA) 5' transfer RNA (tRNA) half
gtgttcccacaccgggagtcgaacccgggccgcctgggtga

SEQ ID NO: 11847 - DNA, 17 bp, Artificial Sequence
  synthetic circulating small noncoding RNA (sncRNA) 5' transfer RNA (tRNA) half
ccccggtctcccgcgtg

SEQ ID NO: 11848 - DNA, 15 bp, Artificial Sequence
  synthetic circulating small noncoding RNA (sncRNA) 5' transfer RNA (tRNA) half
agtggtatgattctc

SEQ ID NO: 11849 - DNA, 17 bp, Artificial Sequence
  synthetic circulating small noncoding RNA (sncRNA) 5' transfer RNA (tRNA) half
cactcggccacctcgtc

SEQ ID NO: 11850 - DNA, 36 bp, Artificial Sequence
  synthetic circulating small noncoding RNA (sncRNA) 5' transfer RNA (tRNA) half
tcagaaggttgcgtgttcaaatcacgtcggggtcag

SEQ ID NO: 11851 - DNA, 23 bp, Artificial Sequence
  synthetic circulating small noncoding RNA (sncRNA) 5' transfer RNA (tRNA) half
agtccaatgcgctatccattgcg

SEQ ID NO: 11852 - DNA, 21 bp, Artificial Sequence
  synthetic circulating small noncoding RNA (sncRNA) 5' transfer RNA (tRNA) half
tggtctaggggtatgattctc

SEQ ID NO: 11853 - DNA, 11 bp, Artificial Sequence
  synthetic circulating small noncoding RNA (sncRNA) 5' transfer RNA (tRNA) half
attcgaaccga

SEQ ID NO: 11854 - DNA, 39 bp, Artificial Sequence
  synthetic circulating small noncoding RNA (sncRNA) 5' transfer RNA (tRNA) half
cataatctgaaggtcctgagttcgagcctcagagaaggc

SEQ ID NO: 11855 - DNA, 13 bp, Artificial Sequence
  synthetic circulating small noncoding RNA (sncRNA) 5' transfer RNA (tRNA) half
ggggacctttcgc

SEQ ID NO: 11856 - DNA, 11 bp, Artificial Sequence
  synthetic circulating small noncoding RNA (sncRNA) 5' transfer RNA (tRNA) half
accaccaatgc

SEQ ID NO: 11857 - DNA, 12 bp, Artificial Sequence
  synthetic circulating small noncoding RNA (sncRNA) 5' transfer RNA (tRNA) half
gccgggactcga

SEQ ID NO: 11858 - DNA, 35 bp, Artificial Sequence
  synthetic circulating small noncoding RNA (sncRNA) 5' transfer RNA (tRNA) half
ccttaggtcgctggttcgattccggctcgaaggac

SEQ ID NO: 11859 - DNA, 16 bp, Artificial Sequence
  synthetic circulating small noncoding RNA (sncRNA) 5' transfer RNA (tRNA) half
gttagtactctgcgtt

SEQ ID NO: 11860 - DNA, 29 bp, Artificial Sequence
  synthetic circulating small noncoding RNA (sncRNA) 5' transfer RNA (tRNA) half
gccgaatcctagccactagaccaccaggg

SEQ ID NO: 11861 - DNA, 11 bp, Artificial Sequence
  synthetic circulating small noncoding RNA (sncRNA) 5' transfer RNA (tRNA) half
ccggggatcga

SEQ ID NO: 11862 - DNA, 22 bp, Artificial Sequence
  synthetic circulating small noncoding RNA (sncRNA) 5' transfer RNA (tRNA) half
actcacgaccttcagattatga

SEQ ID NO: 11863 - DNA, 22 bp, Artificial Sequence
  synthetic circulating small noncoding RNA (sncRNA) 5' transfer RNA (tRNA) half
gtataggggttagtactctgcg

SEQ ID NO: 11864 - DNA, 25 bp, Artificial Sequence
  synthetic circulating small noncoding RNA (sncRNA) 5' transfer RNA (tRNA) half
attcaaagtccagagtgctaaccat

SEQ ID NO: 11865 - DNA, 43 bp, Artificial Sequence
  synthetic circulating small noncoding RNA (sncRNA) 5' transfer RNA (tRNA) half
cggcggtgagagcgccgaatcctaaccactagaccaccaggga

SEQ ID NO: 11866 - DNA, 24 bp, Artificial Sequence
  synthetic circulating small noncoding RNA (sncRNA) 5' transfer RNA (tRNA) half
cccgggccgcggcggtgagagcgc

SEQ ID NO: 11867 - DNA, 24 bp, Artificial Sequence
  synthetic circulating small noncoding RNA (sncRNA) 5' transfer RNA (tRNA) half
ttccctgaccgggaatcgaacccg

SEQ ID NO: 11868 - DNA, 15 bp, Artificial Sequence
  synthetic circulating small noncoding RNA (sncRNA) 5' transfer RNA (tRNA) half
ctcccaactgagcta

SEQ ID NO: 11869 - DNA, 19 bp, Artificial Sequence
  synthetic circulating small noncoding RNA (sncRNA) 5' transfer RNA (tRNA) half
ccactgaaccaccaatgcg

SEQ ID NO: 11870 - DNA, 33 bp, Artificial Sequence
  synthetic circulating small noncoding RNA (sncRNA) 5' transfer RNA (tRNA) half
agactgacgcgctacctactgcgctaacgaggc

SEQ ID NO: 11871 - DNA, 36 bp, Artificial Sequence
  synthetic circulating small noncoding RNA (sncRNA) 5' transfer RNA (tRNA) half
ccgactctggtgggattcgaacccacaacctttgaa

SEQ ID NO: 11872 - DNA, 29 bp, Artificial Sequence
  synthetic circulating small noncoding RNA (sncRNA) 5' transfer RNA (tRNA) half
ggcggcccgggttcgactcccggtatggg

SEQ ID NO: 11873 - DNA, 40 bp, Artificial Sequence
  synthetic circulating small noncoding RNA (sncRNA) 5' transfer RNA (tRNA) half
cctggtggtctagtggttaggattcggcgctctcaccgcc

SEQ ID NO: 11874 - DNA, 18 bp, Artificial Sequence
  synthetic circulating small noncoding RNA (sncRNA) 5' transfer RNA (tRNA) half
aaatcccggacgagcccc

SEQ ID NO: 11875 - DNA, 17 bp, Artificial Sequence
  synthetic circulating small noncoding RNA (sncRNA) 5' transfer RNA (tRNA) half
attcccattcttgcgac

SEQ ID NO: 11876 - DNA, 28 bp, Artificial Sequence
  synthetic circulating small noncoding RNA (sncRNA) 5' transfer RNA (tRNA) half
gccgcggcggtgagagcgccgaatccta

SEQ ID NO: 11877 - DNA, 13 bp, Artificial Sequence
  synthetic circulating small noncoding RNA (sncRNA) 5' transfer RNA (tRNA) half
ttcgactcccggt

SEQ ID NO: 11878 - DNA, 21 bp, Artificial Sequence
  synthetic circulating small noncoding RNA (sncRNA) 5' transfer RNA (tRNA) half
tcgattccggctcgaaggaaa

SEQ ID NO: 11879 - DNA, 30 bp, Artificial Sequence
  synthetic circulating small noncoding RNA (sncRNA) 5' transfer RNA (tRNA) half
tgccccctctgaggttcgaactcaggacct

SEQ ID NO: 11880 - DNA, 27 bp, Artificial Sequence
  synthetic circulating small noncoding RNA (sncRNA) 5' transfer RNA (tRNA) half
agtggtctggggtgcaggcttcaaacc

SEQ ID NO: 11881 - DNA, 23 bp, Artificial Sequence
  synthetic circulating small noncoding RNA (sncRNA) 5' transfer RNA (tRNA) half
tagaattctcgcctgccacgcgg

SEQ ID NO: 11882 - DNA, 19 bp, Artificial Sequence
  synthetic circulating small noncoding RNA (sncRNA) 5' transfer RNA (tRNA) half
ttcaagtccctgttcgggc

SEQ ID NO: 11883 - DNA, 16 bp, Artificial Sequence
  synthetic circulating small noncoding RNA (sncRNA) 5' transfer RNA (tRNA) half
gttcgattcccggccc

SEQ ID NO: 11884 - DNA, 16 bp, Artificial Sequence
  synthetic circulating small noncoding RNA (sncRNA) 5' transfer RNA (tRNA) half
gacgaggatgggattc

SEQ ID NO: 11885 - DNA, 19 bp, Artificial Sequence
  synthetic circulating small noncoding RNA (sncRNA) 5' transfer RNA (tRNA) half
tatggaggcgtgggttcga

SEQ ID NO: 11886 - DNA, 33 bp, Artificial Sequence
  synthetic circulating small noncoding RNA (sncRNA) 5' transfer RNA (tRNA) half
tgaactcggatcgctggattcagagtccagagt

SEQ ID NO: 11887 - DNA, 15 bp, Artificial Sequence
  synthetic circulating small noncoding RNA (sncRNA) 5' transfer RNA (tRNA) half
ccgagcggtctaagg

SEQ ID NO: 11888 - DNA, 40 bp, Artificial Sequence
  synthetic circulating small noncoding RNA (sncRNA) 5' transfer RNA (tRNA) half
cagactcaagcttagcttccctgtctggggattctggtct

SEQ ID NO: 11889 - DNA, 9 bp, Artificial Sequence
  synthetic circulating small noncoding RNA (sncRNA) 5' transfer RNA (tRNA) half
tcgaaccag

SEQ ID NO: 11890 - DNA, 17 bp, Artificial Sequence
  synthetic circulating small noncoding RNA (sncRNA) 5' transfer RNA (tRNA) half
tcgagccggattcgaac

SEQ ID NO: 11891 - DNA, 25 bp, Artificial Sequence
  synthetic circulating small noncoding RNA (sncRNA) 5' transfer RNA (tRNA) half
gctgtgatggccgagtggttaaggc

SEQ ID NO: 11892 - DNA, 22 bp, Artificial Sequence
  synthetic circulating small noncoding RNA (sncRNA) 5' transfer RNA (tRNA) half
tatgaccccgacgtgattcgaa

SEQ ID NO: 11893 - DNA, 23 bp, Artificial Sequence
  synthetic circulating small noncoding RNA (sncRNA) 5' transfer RNA (tRNA) half
gttcgattcccggccaatgcacg

SEQ ID NO: 11894 - DNA, 19 bp, Artificial Sequence
  synthetic circulating small noncoding RNA (sncRNA) 5' transfer RNA (tRNA) half
cgcccaacgtggggctcga

SEQ ID NO: 11895 - DNA, 20 bp, Artificial Sequence
  synthetic circulating small noncoding RNA (sncRNA) 5' transfer RNA (tRNA) half
accgattgcgccacagagac

SEQ ID NO: 11896 - DNA, 13 bp, Artificial Sequence
  synthetic circulating small noncoding RNA (sncRNA) 5' transfer RNA (tRNA) half
ttcaatccccggc

SEQ ID NO: 11897 - DNA, 15 bp, Artificial Sequence
  synthetic circulating small noncoding RNA (sncRNA) 5' transfer RNA (tRNA) half
aaacccgggcctccc

SEQ ID NO: 11898 - DNA, 34 bp, Artificial Sequence
  synthetic circulating small noncoding RNA (sncRNA) 5' transfer RNA (tRNA) half
ggctcgttggtctaggggtatgattctcgcttcg

SEQ ID NO: 11899 - DNA, 7 bp, Artificial Sequence
  synthetic circulating small noncoding RNA (sncRNA) 5' transfer RNA (tRNA) half
tgcccgc

SEQ ID NO: 11900 - DNA, 14 bp, Artificial Sequence
  synthetic circulating small noncoding RNA (sncRNA) 5' transfer RNA (tRNA) half
actgagctatccgg

SEQ ID NO: 11901 - DNA, 25 bp, Artificial Sequence
  synthetic circulating small noncoding RNA (sncRNA) 5' transfer RNA (tRNA) half
tctccccgcgcaggttcgaatcctg

SEQ ID NO: 11902 - DNA, 21 bp, Artificial Sequence
  synthetic circulating small noncoding RNA (sncRNA) 5' transfer RNA (tRNA) half
tctaccatttgagctaatccc

SEQ ID NO: 11903 - DNA, 16 bp, Artificial Sequence
  synthetic circulating small noncoding RNA (sncRNA) 5' transfer RNA (tRNA) half
gctcgaacccacgacc

SEQ ID NO: 11904 - DNA, 24 bp, Artificial Sequence
  synthetic circulating small noncoding RNA (sncRNA) 5' transfer RNA (tRNA) half
aacccacgcccccgaagagactgg

SEQ ID NO: 11905 - DNA, 17 bp, Artificial Sequence
  synthetic circulating small noncoding RNA (sncRNA) 5' transfer RNA (tRNA) half
tctggggtgcaggcttc

SEQ ID NO: 11906 - DNA, 20 bp, Artificial Sequence
  synthetic circulating small noncoding RNA (sncRNA) 5' transfer RNA (tRNA) half
tcaggatggccgagcggtct

SEQ ID NO: 11907 - DNA, 24 bp, Artificial Sequence
  synthetic circulating small noncoding RNA (sncRNA) 5' transfer RNA (tRNA) half
acccgggtcaactgcttggaaggc

SEQ ID NO: 11908 - DNA, 30 bp, Artificial Sequence
  synthetic circulating small noncoding RNA (sncRNA) 5' transfer RNA (tRNA) half
catcgacctctgggttatgggcccagcacg

SEQ ID NO: 11909 - DNA, 30 bp, Artificial Sequence
  synthetic circulating small noncoding RNA (sncRNA) 5' transfer RNA (tRNA) half
acgaggccccgggttcaatccccggcacct

SEQ ID NO: 11910 - DNA, 17 bp, Artificial Sequence
  synthetic circulating small noncoding RNA (sncRNA) 5' transfer RNA (tRNA) half
cctgggttcgaatccca

SEQ ID NO: 11911 - DNA, 35 bp, Artificial Sequence
  synthetic circulating small noncoding RNA (sncRNA) 5' transfer RNA (tRNA) half
aaccaggaatcctaaccgctagaccatatgggagc

SEQ ID NO: 11912 - DNA, 21 bp, Artificial Sequence
  synthetic circulating small noncoding RNA (sncRNA) 5' transfer RNA (tRNA) half
tagcactctggactctgaatc

SEQ ID NO: 11913 - DNA, 12 bp, Artificial Sequence
  synthetic circulating small noncoding RNA (sncRNA) 5' transfer RNA (tRNA) half
gttaacagccga

SEQ ID NO: 11914 - DNA, 25 bp, Artificial Sequence
  synthetic circulating small noncoding RNA (sncRNA) 5' transfer RNA (tRNA) half
cccgcgtggcaggcgagaattctac

SEQ ID NO: 11915 - DNA, 24 bp, Artificial Sequence
  synthetic circulating small noncoding RNA (sncRNA) 5' transfer RNA (tRNA) half
gggattaagagtcccatgctctac

SEQ ID NO: 11916 - DNA, 19 bp, Artificial Sequence
  synthetic circulating small noncoding RNA (sncRNA) 5' transfer RNA (tRNA) half
ccactgaaccaccaatgct

SEQ ID NO: 11917 - DNA, 28 bp, Artificial Sequence
  synthetic circulating small noncoding RNA (sncRNA) 5' transfer RNA (tRNA) half
tgatcgtataggggttagtactctgcgt

SEQ ID NO: 11918 - DNA, 32 bp, Artificial Sequence
  synthetic circulating small noncoding RNA (sncRNA) 5' transfer RNA (tRNA) half
gtggcccgtacggggatcgaacccgcgacctt

SEQ ID NO: 11919 - DNA, 25 bp, Artificial Sequence
  synthetic circulating small noncoding RNA (sncRNA) 5' transfer RNA (tRNA) half
accaccaacctttcggttaacagcc

SEQ ID NO: 11920 - DNA, 39 bp, Artificial Sequence
  synthetic circulating small noncoding RNA (sncRNA) 5' transfer RNA (tRNA) half
gcgccgctggtgtagtggtatcatgcaagattcccattc

SEQ ID NO: 11921 - DNA, 19 bp, Artificial Sequence
  synthetic circulating small noncoding RNA (sncRNA) 5' transfer RNA (tRNA) half
taccgactgagctatccgg

SEQ ID NO: 11922 - DNA, 9 bp, Artificial Sequence
  synthetic circulating small noncoding RNA (sncRNA) 5' transfer RNA (tRNA) half
gtacgggcc

SEQ ID NO: 11923 - DNA, 15 bp, Artificial Sequence
  synthetic circulating small noncoding RNA (sncRNA) 5' transfer RNA (tRNA) half
tccagcgccttagac

SEQ ID NO: 11924 - DNA, 22 bp, Artificial Sequence
  synthetic circulating small noncoding RNA (sncRNA) 5' transfer RNA (tRNA) half
ggttcaaatcccggacgagccc

SEQ ID NO: 11925 - DNA, 25 bp, Artificial Sequence
  synthetic circulating small noncoding RNA (sncRNA) 5' transfer RNA (tRNA) half
tgagggggcacccggatttgaaccg

SEQ ID NO: 11926 - DNA, 13 bp, Artificial Sequence
  synthetic circulating small noncoding RNA (sncRNA) 5' transfer RNA (tRNA) half
ccgtgactcggat

SEQ ID NO: 11927 - DNA, 17 bp, Artificial Sequence
  synthetic circulating small noncoding RNA (sncRNA) 5' transfer RNA (tRNA) half
agcatgcgctctaccac

SEQ ID NO: 11928 - DNA, 37 bp, Artificial Sequence
  synthetic circulating small noncoding RNA (sncRNA) 5' transfer RNA (tRNA) half
acgcgggaggcccgggttcgattcccggcccatgcag

SEQ ID NO: 11929 - DNA, 36 bp, Artificial Sequence
  synthetic circulating small noncoding RNA (sncRNA) 5' transfer RNA (tRNA) half
agctggcccgtacggggatcgaacccgcgaccttgg

SEQ ID NO: 11930 - DNA, 19 bp, Artificial Sequence
  synthetic circulating small noncoding RNA (sncRNA) 5' transfer RNA (tRNA) half
aacccgggtcaactgcttg

SEQ ID NO: 11931 - DNA, 33 bp, Artificial Sequence
  synthetic circulating small noncoding RNA (sncRNA) 5' transfer RNA (tRNA) half
cccgggccgcggcggtgagagcgccgaatccta

SEQ ID NO: 11932 - DNA, 8 bp, Artificial Sequence
  synthetic circulating small noncoding RNA (sncRNA) 5' transfer RNA (tRNA) half
gcgaccac

SEQ ID NO: 11933 - DNA, 20 bp, Artificial Sequence
  synthetic circulating small noncoding RNA (sncRNA) 5' transfer RNA (tRNA) half
atcgttccttcgagccggat

SEQ ID NO: 11934 - DNA, 32 bp, Artificial Sequence
  synthetic circulating small noncoding RNA (sncRNA) 5' transfer RNA (tRNA) half
gtgcattggccgggaatcgaacccgggcctcc

SEQ ID NO: 11935 - DNA, 26 bp, Artificial Sequence
  synthetic circulating small noncoding RNA (sncRNA) 5' transfer RNA (tRNA) half
ggcgagaattctaccattgaaccacc

SEQ ID NO: 11936 - DNA, 15 bp, Artificial Sequence
  synthetic circulating small noncoding RNA (sncRNA) 5' transfer RNA (tRNA) half
ctaatccattgtgct

SEQ ID NO: 11937 - DNA, 7 bp, Artificial Sequence
  synthetic circulating small noncoding RNA (sncRNA) 5' transfer RNA (tRNA) half
ctggccg

SEQ ID NO: 11938 - DNA, 7 bp, Artificial Sequence
  synthetic circulating small noncoding RNA (sncRNA) 5' transfer RNA (tRNA) half
cgaaccg

SEQ ID NO: 11939 - DNA, 23 bp, Artificial Sequence
  synthetic circulating small noncoding RNA (sncRNA) 5' transfer RNA (tRNA) half
cgaacccgggccgcggcggtgag

SEQ ID NO: 11940 - DNA, 16 bp, Artificial Sequence
  synthetic circulating small noncoding RNA (sncRNA) 5' transfer RNA (tRNA) half
gcgcccgaacagggac

SEQ ID NO: 11941 - DNA, 30 bp, Artificial Sequence
  synthetic circulating small noncoding RNA (sncRNA) 5' transfer RNA (tRNA) half
tgagcccggatagctcagtcggtagagcat

SEQ ID NO: 11942 - DNA, 17 bp, Artificial Sequence
  synthetic circulating small noncoding RNA (sncRNA) 5' transfer RNA (tRNA) half
tcgagccagccaggagt

SEQ ID NO: 11943 - DNA, 15 bp, Artificial Sequence
  synthetic circulating small noncoding RNA (sncRNA) 5' transfer RNA (tRNA) half
ttcgattccccgacg

SEQ ID NO: 11944 - DNA, 15 bp, Artificial Sequence
  synthetic circulating small noncoding RNA (sncRNA) 5' transfer RNA (tRNA) half
agctgccgaaacccg

SEQ ID NO: 11945 - DNA, 33 bp, Artificial Sequence
  synthetic circulating small noncoding RNA (sncRNA) 5' transfer RNA (tRNA) half
gaccacgtggcctaatggataaggcgtctgact

SEQ ID NO: 11946 - DNA, 19 bp, Artificial Sequence
  synthetic circulating small noncoding RNA (sncRNA) 5' transfer RNA (tRNA) half
aatccgagtcacggcatta

SEQ ID NO: 11947 - DNA, 11 bp, Artificial Sequence
  synthetic circulating small noncoding RNA (sncRNA) 5' transfer RNA (tRNA) half
aggtagcggga

SEQ ID NO: 11948 - DNA, 25 bp, Artificial Sequence
  synthetic circulating small noncoding RNA (sncRNA) 5' transfer RNA (tRNA) half
atccatcgacctctgggttatgggc

SEQ ID NO: 11949 - DNA, 26 bp, Artificial Sequence
  synthetic circulating small noncoding RNA (sncRNA) 5' transfer RNA (tRNA) half
aggtccccggttcgaaaccgggcgga

SEQ ID NO: 11950 - DNA, 16 bp, Artificial Sequence
  synthetic circulating small noncoding RNA (sncRNA) 5' transfer RNA (tRNA) half
tcgagccccagtggaa

SEQ ID NO: 11951 - DNA, 34 bp, Artificial Sequence
  synthetic circulating small noncoding RNA (sncRNA) 5' transfer RNA (tRNA) half
cccacgaccctgggattaagagtcccatgctcta

SEQ ID NO: 11952 - DNA, 34 bp, Artificial Sequence
  synthetic circulating small noncoding RNA (sncRNA) 5' transfer RNA (tRNA) half
aagattgcaggttcgagtcctgccgcggtcgact

SEQ ID NO: 11953 - DNA, 17 bp, Artificial Sequence
  synthetic circulating small noncoding RNA (sncRNA) 5' transfer RNA (tRNA) half
gaacctggaatcttctg

SEQ ID NO: 11954 - DNA, 22 bp, Artificial Sequence
  synthetic circulating small noncoding RNA (sncRNA) 5' transfer RNA (tRNA) half
acccgcgaccttggcgttatta

SEQ ID NO: 11955 - DNA, 33 bp, Artificial Sequence
  synthetic circulating small noncoding RNA (sncRNA) 5' transfer RNA (tRNA) half
agaaggttgcgtgttcaaatcacgtcggggtca

SEQ ID NO: 11956 - DNA, 21 bp, Artificial Sequence
  synthetic circulating small noncoding RNA (sncRNA) 5' transfer RNA (tRNA) half
tcgaacccggggcctcataca

SEQ ID NO: 11957 - DNA, 34 bp, Artificial Sequence
  synthetic circulating small noncoding RNA (sncRNA) 5' transfer RNA (tRNA) half
agcgagaatcatacccctagaccaacgagccgat

SEQ ID NO: 11958 - DNA, 34 bp, Artificial Sequence
  synthetic circulating small noncoding RNA (sncRNA) 5' transfer RNA (tRNA) half
cgaacccgggcctcccgcgtggcaggcgagaatt

SEQ ID NO: 11959 - DNA, 12 bp, Artificial Sequence
  synthetic circulating small noncoding RNA (sncRNA) 5' transfer RNA (tRNA) half
acccggaacctt

SEQ ID NO: 11960 - DNA, 10 bp, Artificial Sequence
  synthetic circulating small noncoding RNA (sncRNA) 5' transfer RNA (tRNA) half
gttcgactcc

SEQ ID NO: 11961 - DNA, 11 bp, Artificial Sequence
  synthetic circulating small noncoding RNA (sncRNA) 5' transfer RNA (tRNA) half
tgaccccgacg

SEQ ID NO: 11962 - DNA, 33 bp, Artificial Sequence
  synthetic circulating small noncoding RNA (sncRNA) 5' transfer RNA (tRNA) half
cccagtggcctaatggataaggcatcagcctcc

SEQ ID NO: 11963 - DNA, 10 bp, Artificial Sequence
  synthetic circulating small noncoding RNA (sncRNA) 5' transfer RNA (tRNA) half
ccgcggcccg

SEQ ID NO: 11964 - DNA, 17 bp, Artificial Sequence
  synthetic circulating small noncoding RNA (sncRNA) 5' transfer RNA (tRNA) half
ggccggttagctcagtt

SEQ ID NO: 11965 - DNA, 15 bp, Artificial Sequence
  synthetic circulating small noncoding RNA (sncRNA) 5' transfer RNA (tRNA) half
acctacagtcctccg

SEQ ID NO: 11966 - DNA, 30 bp, Artificial Sequence
  synthetic circulating small noncoding RNA (sncRNA) 5' transfer RNA (tRNA) half
gaactcggatcgctggattcagagtccaga

SEQ ID NO: 11967 - DNA, 20 bp, Artificial Sequence
  synthetic circulating small noncoding RNA (sncRNA) 5' transfer RNA (tRNA) half
gcgacccgggttcgattccc

SEQ ID NO: 11968 - DNA, 24 bp, Artificial Sequence
  synthetic circulating small noncoding RNA (sncRNA) 5' transfer RNA (tRNA) half
ctgatgctctaccgactgagctat

SEQ ID NO: 11969 - DNA, 23 bp, Artificial Sequence
  synthetic circulating small noncoding RNA (sncRNA) 5' transfer RNA (tRNA) half
gttcaaatctcggtggaacctgc

SEQ ID NO: 11970 - DNA, 16 bp, Artificial Sequence
  synthetic circulating small noncoding RNA (sncRNA) 5' transfer RNA (tRNA) half
gtccaatgcgctatcc

SEQ ID NO: 11971 - DNA, 24 bp, Artificial Sequence
  synthetic circulating small noncoding RNA (sncRNA) 5' transfer RNA (tRNA) half
gggcctcccgcgtggcaggcgaga

SEQ ID NO: 11972 - DNA, 24 bp, Artificial Sequence
  synthetic circulating small noncoding RNA (sncRNA) 5' transfer RNA (tRNA) half
tagctcagtcggtagagcatcaga

SEQ ID NO: 11973 - DNA, 30 bp, Artificial Sequence
  synthetic circulating small noncoding RNA (sncRNA) 5' transfer RNA (tRNA) half
accccgacgtgatttgaacacgcaaccttc

SEQ ID NO: 11974 - DNA, 17 bp, Artificial Sequence
  synthetic circulating small noncoding RNA (sncRNA) 5' transfer RNA (tRNA) half
gaacccccaatcttctg

SEQ ID NO: 11975 - DNA, 20 bp, Artificial Sequence
  synthetic circulating small noncoding RNA (sncRNA) 5' transfer RNA (tRNA) half
agcggttatcacgtctgctt

SEQ ID NO: 11976 - DNA, 30 bp, Artificial Sequence
  synthetic circulating small noncoding RNA (sncRNA) 5' transfer RNA (tRNA) half
gtcacgaacaggattcgaacctgtgcgggg

SEQ ID NO: 11977 - DNA, 8 bp, Artificial Sequence
  synthetic circulating small noncoding RNA (sncRNA) 5' transfer RNA (tRNA) half
tcgggcgc

SEQ ID NO: 11978 - DNA, 11 bp, Artificial Sequence
  synthetic circulating small noncoding RNA (sncRNA) 5' transfer RNA (tRNA) half
tcagagggggc

SEQ ID NO: 11979 - DNA, 22 bp, Artificial Sequence
  synthetic circulating small noncoding RNA (sncRNA) 5' transfer RNA (tRNA) half
cggggatcgaacccggggcctc

SEQ ID NO: 11980 - DNA, 22 bp, Artificial Sequence
  synthetic circulating small noncoding RNA (sncRNA) 5' transfer RNA (tRNA) half
ctttcgacgaggatgggattcg

SEQ ID NO: 11981 - DNA, 10 bp, Artificial Sequence
  synthetic circulating small noncoding RNA (sncRNA) 5' transfer RNA (tRNA) half
attcccggcc

SEQ ID NO: 11982 - DNA, 17 bp, Artificial Sequence
  synthetic circulating small noncoding RNA (sncRNA) 5' transfer RNA (tRNA) half
gattccccgacggggag

SEQ ID NO: 11983 - DNA, 17 bp, Artificial Sequence
  synthetic circulating small noncoding RNA (sncRNA) 5' transfer RNA (tRNA) half
attagctcaaatggtag

SEQ ID NO: 11984 - DNA, 6 bp, Artificial Sequence
  synthetic circulating small noncoding RNA (sncRNA) 5' transfer RNA (tRNA) half
cggcca

SEQ ID NO: 11985 - DNA, 28 bp, Artificial Sequence
  synthetic circulating small noncoding RNA (sncRNA) 5' transfer RNA (tRNA) half
gagtctcatgctctaccgactgagctag

SEQ ID NO: 11986 - DNA, 17 bp, Artificial Sequence
  synthetic circulating small noncoding RNA (sncRNA) 5' transfer RNA (tRNA) half
aagtctgatgctctacc

SEQ ID NO: 11987 - DNA, 17 bp, Artificial Sequence
  synthetic circulating small noncoding RNA (sncRNA) 5' transfer RNA (tRNA) half
gttcgactcccggtgtg

SEQ ID NO: 11988 - DNA, 19 bp, Artificial Sequence
  synthetic circulating small noncoding RNA (sncRNA) 5' transfer RNA (tRNA) half
gttccttcgagccggattc

SEQ ID NO: 11989 - DNA, 18 bp, Artificial Sequence
  synthetic circulating small noncoding RNA (sncRNA) 5' transfer RNA (tRNA) half
tctaccgactgagctagc

SEQ ID NO: 11990 - DNA, 23 bp, Artificial Sequence
  synthetic circulating small noncoding RNA (sncRNA) 5' transfer RNA (tRNA) half
gtctcatgctctaccaactgagc

SEQ ID NO: 11991 - DNA, 13 bp, Artificial Sequence
  synthetic circulating small noncoding RNA (sncRNA) 5' transfer RNA (tRNA) half
cgatccatcgacc

SEQ ID NO: 11992 - DNA, 14 bp, Artificial Sequence
  synthetic circulating small noncoding RNA (sncRNA) 5' transfer RNA (tRNA) half
taccgggagtcgaa

SEQ ID NO: 11993 - DNA, 12 bp, Artificial Sequence
  synthetic circulating small noncoding RNA (sncRNA) 5' transfer RNA (tRNA) half
ttgccgaaaccc

SEQ ID NO: 11994 - DNA, 22 bp, Artificial Sequence
  synthetic circulating small noncoding RNA (sncRNA) 5' transfer RNA (tRNA) half
tcggatcagaagattgcaggtt

SEQ ID NO: 11995 - DNA, 26 bp, Artificial Sequence
  synthetic circulating small noncoding RNA (sncRNA) 5' transfer RNA (tRNA) half
gcgagaatcatacccctagaccaacg

SEQ ID NO: 11996 - DNA, 12 bp, Artificial Sequence
  synthetic circulating small noncoding RNA (sncRNA) 5' transfer RNA (tRNA) half
gttcgattcccg

SEQ ID NO: 11997 - DNA, 14 bp, Artificial Sequence
  synthetic circulating small noncoding RNA (sncRNA) 5' transfer RNA (tRNA) half
gcgttggccgggaa

SEQ ID NO: 11998 - DNA, 15 bp, Artificial Sequence
  synthetic circulating small noncoding RNA (sncRNA) 5' transfer RNA (tRNA) half
cggtgagagcgccga

SEQ ID NO: 11999 - DNA, 31 bp, Artificial Sequence
  synthetic circulating small noncoding RNA (sncRNA) 5' transfer RNA (tRNA) half
agcaccacgctctaaccaactgagctaaccg

SEQ ID NO: 12000 - DNA, 33 bp, Artificial Sequence
  synthetic circulating small noncoding RNA (sncRNA) 5' transfer RNA (tRNA) half
acccgggacctctcgcacccaaagcgagaatca

SEQ ID NO: 12001 - DNA, 33 bp, Artificial Sequence
  synthetic circulating small noncoding RNA (sncRNA) 5' transfer RNA (tRNA) half
gttatcacgtctgctttacacgcagaaggtcct

SEQ ID NO: 12002 - DNA, 13 bp, Artificial Sequence
  synthetic circulating small noncoding RNA (sncRNA) 5' transfer RNA (tRNA) half
aacccgggtcaac

SEQ ID NO: 12003 - DNA, 38 bp, Artificial Sequence
  synthetic circulating small noncoding RNA (sncRNA) 5' transfer RNA (tRNA) half
ttccgcccgaacagggacttgaaccctggaccctcaga

SEQ ID NO: 12004 - DNA, 19 bp, Artificial Sequence
  synthetic circulating small noncoding RNA (sncRNA) 5' transfer RNA (tRNA) half
gttcgattcccggccaacg

SEQ ID NO: 12005 - DNA, 32 bp, Artificial Sequence
  synthetic circulating small noncoding RNA (sncRNA) 5' transfer RNA (tRNA) half
tgaggcgaacgtgataaccactacactacgga

SEQ ID NO: 12006 - DNA, 24 bp, Artificial Sequence
  synthetic circulating small noncoding RNA (sncRNA) 5' transfer RNA (tRNA) half
tgttcaaatcacgtcggggtcatc

SEQ ID NO: 12007 - DNA, 21 bp, Artificial Sequence
  synthetic circulating small noncoding RNA (sncRNA) 5' transfer RNA (tRNA) half
gagggggcacccggatttgaa

SEQ ID NO: 12008 - DNA, 13 bp, Artificial Sequence
  synthetic circulating small noncoding RNA (sncRNA) 5' transfer RNA (tRNA) half
ttcgagtcccggc

SEQ ID NO: 12009 - DNA, 17 bp, Artificial Sequence
  synthetic circulating small noncoding RNA (sncRNA) 5' transfer RNA (tRNA) half
attccccgacggggagt

SEQ ID NO: 12010 - DNA, 31 bp, Artificial Sequence
  synthetic circulating small noncoding RNA (sncRNA) 5' transfer RNA (tRNA) half
tttccgcccggtttcgaaccggggacctttc

SEQ ID NO: 12011 - DNA, 26 bp, Artificial Sequence
  synthetic circulating small noncoding RNA (sncRNA) 5' transfer RNA (tRNA) half
gcgtgtgaggcgaacgtgataaccac

SEQ ID NO: 12012 - DNA, 31 bp, Artificial Sequence
  synthetic circulating small noncoding RNA (sncRNA) 5' transfer RNA (tRNA) half
cgtctccccgtcggggaatcgaaccccggtc

SEQ ID NO: 12013 - DNA, 35 bp, Artificial Sequence
  synthetic circulating small noncoding RNA (sncRNA) 5' transfer RNA (tRNA) half
tgagggggcacccggatttgaaccggggacctctt

SEQ ID NO: 12014 - DNA, 33 bp, Artificial Sequence
  synthetic circulating small noncoding RNA (sncRNA) 5' transfer RNA (tRNA) half
gacgacgaggatgggattcgaacccacgcgtgc

SEQ ID NO: 12015 - DNA, 25 bp, Artificial Sequence
  synthetic circulating small noncoding RNA (sncRNA) 5' transfer RNA (tRNA) half
atgggtggttcagtggtagaattct

SEQ ID NO: 12016 - DNA, 35 bp, Artificial Sequence
  synthetic circulating small noncoding RNA (sncRNA) 5' transfer RNA (tRNA) half
gagtttccgtagtgtagtggttatcacgttcgcct

SEQ ID NO: 12017 - DNA, 20 bp, Artificial Sequence
  synthetic circulating small noncoding RNA (sncRNA) 5' transfer RNA (tRNA) half
gttaggattcggcgctctca

SEQ ID NO: 12018 - DNA, 8 bp, Artificial Sequence
  synthetic circulating small noncoding RNA (sncRNA) 5' transfer RNA (tRNA) half
caggcgcg

SEQ ID NO: 12019 - DNA, 10 bp, Artificial Sequence
  synthetic circulating small noncoding RNA (sncRNA) 5' transfer RNA (tRNA) half
gcgccgcccg

SEQ ID NO: 12020 - DNA, 14 bp, Artificial Sequence
  synthetic circulating small noncoding RNA (sncRNA) 5' transfer RNA (tRNA) half
agattgagggttcg

SEQ ID NO: 12021 - DNA, 10 bp, Artificial Sequence
  synthetic circulating small noncoding RNA (sncRNA) 5' transfer RNA (tRNA) half
gaacccggga

SEQ ID NO: 12022 - DNA, 26 bp, Artificial Sequence
  synthetic circulating small noncoding RNA (sncRNA) 5' transfer RNA (tRNA) half
gggtggttcagtggtagaattctcgc

SEQ ID NO: 12023 - DNA, 30 bp, Artificial Sequence
  synthetic circulating small noncoding RNA (sncRNA) 5' transfer RNA (tRNA) half
cgcccggctagctcagtcggtagagcatga

SEQ ID NO: 12024 - DNA, 35 bp, Artificial Sequence
  synthetic circulating small noncoding RNA (sncRNA) 5' transfer RNA (tRNA) half
ccccgacgtgacttgaacacgcaaccttctgatct

SEQ ID NO: 12025 - DNA, 13 bp, Artificial Sequence
  synthetic circulating small noncoding RNA (sncRNA) 5' transfer RNA (tRNA) half
tgagagcgccgaa

SEQ ID NO: 12026 - DNA, 12 bp, Artificial Sequence
  synthetic circulating small noncoding RNA (sncRNA) 5' transfer RNA (tRNA) half
ttcccataccgg

SEQ ID NO: 12027 - DNA, 32 bp, Artificial Sequence
  synthetic circulating small noncoding RNA (sncRNA) 5' transfer RNA (tRNA) half
taggcgaatgtgataaccactacactacggaa

SEQ ID NO: 12028 - DNA, 14 bp, Artificial Sequence
  synthetic circulating small noncoding RNA (sncRNA) 5' transfer RNA (tRNA) half
cggtgagagcgccg

SEQ ID NO: 12029 - DNA, 22 bp, Artificial Sequence
  synthetic circulating small noncoding RNA (sncRNA) 5' transfer RNA (tRNA) half
gttccatagtgtagcggttatc

SEQ ID NO: 12030 - DNA, 12 bp, Artificial Sequence
  synthetic circulating small noncoding RNA (sncRNA) 5' transfer RNA (tRNA) half
aaccaccaatgc

SEQ ID NO: 12031 - DNA, 12 bp, Artificial Sequence
  synthetic circulating small noncoding RNA (sncRNA) 5' transfer RNA (tRNA) half
gaccatatggga

SEQ ID NO: 12032 - DNA, 18 bp, Artificial Sequence
  synthetic circulating small noncoding RNA (sncRNA) 5' transfer RNA (tRNA) half
tgctctaccgactgagct

SEQ ID NO: 12033 - DNA, 28 bp, Artificial Sequence
  synthetic circulating small noncoding RNA (sncRNA) 5' transfer RNA (tRNA) half
gaaccggggacctcttgatctgcagtca

SEQ ID NO: 12034 - DNA, 31 bp, Artificial Sequence
  synthetic circulating small noncoding RNA (sncRNA) 5' transfer RNA (tRNA) half
ccgcgtggcaggcgagaattctaccactgaa

SEQ ID NO: 12035 - DNA, 41 bp, Artificial Sequence
  synthetic circulating small noncoding RNA (sncRNA) 5' transfer RNA (tRNA) half
ggaatcgaacccgggccgcggcggtgagagcgccgaatcct

SEQ ID NO: 12036 - DNA, 40 bp, Artificial Sequence
  synthetic circulating small noncoding RNA (sncRNA) 5' transfer RNA (tRNA) half
cctaagccagggattgtgggttcgagtcccatctggggtg

SEQ ID NO: 12037 - DNA, 31 bp, Artificial Sequence
  synthetic circulating small noncoding RNA (sncRNA) 5' transfer RNA (tRNA) half
ttcagagtccagagtgctagccattacacca

SEQ ID NO: 12038 - DNA, 22 bp, Artificial Sequence
  synthetic circulating small noncoding RNA (sncRNA) 5' transfer RNA (tRNA) half
ctaggggtatgattctcgcttc

SEQ ID NO: 12039 - DNA, 20 bp, Artificial Sequence
  synthetic circulating small noncoding RNA (sncRNA) 5' transfer RNA (tRNA) half
tccccggcatctccaagact

SEQ ID NO: 12040 - DNA, 14 bp, Artificial Sequence
  synthetic circulating small noncoding RNA (sncRNA) 5' transfer RNA (tRNA) half
caccgccgcggccc

SEQ ID NO: 12041 - DNA, 14 bp, Artificial Sequence
  synthetic circulating small noncoding RNA (sncRNA) 5' transfer RNA (tRNA) half
gcgaaaggtccccg

SEQ ID NO: 12042 - DNA, 14 bp, Artificial Sequence
  synthetic circulating small noncoding RNA (sncRNA) 5' transfer RNA (tRNA) half
tgttcccgcccggt

SEQ ID NO: 12043 - DNA, 31 bp, Artificial Sequence
  synthetic circulating small noncoding RNA (sncRNA) 5' transfer RNA (tRNA) half
tcagacgccttatccattaggccacgcggcc

SEQ ID NO: 12044 - DNA, 15 bp, Artificial Sequence
  synthetic circulating small noncoding RNA (sncRNA) 5' transfer RNA (tRNA) half
gttatcacatctgct

SEQ ID NO: 12045 - DNA, 11 bp, Artificial Sequence
  synthetic circulating small noncoding RNA (sncRNA) 5' transfer RNA (tRNA) half
cggttaacagc

SEQ ID NO: 12046 - DNA, 17 bp, Artificial Sequence
  synthetic circulating small noncoding RNA (sncRNA) 5' transfer RNA (tRNA) half
ccactcggccacgacta

SEQ ID NO: 12047 - DNA, 20 bp, Artificial Sequence
  synthetic circulating small noncoding RNA (sncRNA) 5' transfer RNA (tRNA) half
gttcgactcccggtatggga

SEQ ID NO: 12048 - DNA, 39 bp, Artificial Sequence
  synthetic circulating small noncoding RNA (sncRNA) 5' transfer RNA (tRNA) half
tcccatatggtctagcggttaggattcctggttttcacc

SEQ ID NO: 12049 - DNA, 13 bp, Artificial Sequence
  synthetic circulating small noncoding RNA (sncRNA) 5' transfer RNA (tRNA) half
cccgaagagactg

SEQ ID NO: 12050 - DNA, 31 bp, Artificial Sequence
  synthetic circulating small noncoding RNA (sncRNA) 5' transfer RNA (tRNA) half
ctctggactctgaatccagcgatccgagttc

SEQ ID NO: 12051 - DNA, 14 bp, Artificial Sequence
  synthetic circulating small noncoding RNA (sncRNA) 5' transfer RNA (tRNA) half
cggctcgaaggact

SEQ ID NO: 12052 - DNA, 11 bp, Artificial Sequence
  synthetic circulating small noncoding RNA (sncRNA) 5' transfer RNA (tRNA) half
cctgttcgggc

SEQ ID NO: 12053 - DNA, 35 bp, Artificial Sequence
  synthetic circulating small noncoding RNA (sncRNA) 5' transfer RNA (tRNA) half
tagaattctcgcctgccacgcgggaggcccgggtt

SEQ ID NO: 12054 - DNA, 14 bp, Artificial Sequence
  synthetic circulating small noncoding RNA (sncRNA) 5' transfer RNA (tRNA) half
tcccatctgggtcg

SEQ ID NO: 12055 - DNA, 27 bp, Artificial Sequence
  synthetic circulating small noncoding RNA (sncRNA) 5' transfer RNA (tRNA) half
tgccgaaacccgggatcgaaccaggga

SEQ ID NO: 12056 - DNA, 14 bp, Artificial Sequence
  synthetic circulating small noncoding RNA (sncRNA) 5' transfer RNA (tRNA) half
tagagcatcagact

SEQ ID NO: 12057 - DNA, 37 bp, Artificial Sequence
  synthetic circulating small noncoding RNA (sncRNA) 5' transfer RNA (tRNA) half
gacgaggatgggattcgaacccacgcgtgcaaagcac

SEQ ID NO: 12058 - DNA, 17 bp, Artificial Sequence
  synthetic circulating small noncoding RNA (sncRNA) 5' transfer RNA (tRNA) half
gcgagaattctaccatt

SEQ ID NO: 12059 - DNA, 37 bp, Artificial Sequence
  synthetic circulating small noncoding RNA (sncRNA) 5' transfer RNA (tRNA) half
ccgcagcaacctcggttcgaatccgagtcacggcatg

SEQ ID NO: 12060 - DNA, 13 bp, Artificial Sequence
  synthetic circulating small noncoding RNA (sncRNA) 5' transfer RNA (tRNA) half
acgcgggagaccg

SEQ ID NO: 12061 - DNA, 13 bp, Artificial Sequence
  synthetic circulating small noncoding RNA (sncRNA) 5' transfer RNA (tRNA) half
aacccacaatccc

SEQ ID NO: 12062 - DNA, 26 bp, Artificial Sequence
  synthetic circulating small noncoding RNA (sncRNA) 5' transfer RNA (tRNA) half
gtcaaatgctctaccactgagctata

SEQ ID NO: 12063 - DNA, 19 bp, Artificial Sequence
  synthetic circulating small noncoding RNA (sncRNA) 5' transfer RNA (tRNA) half
ccggccaatgcatatatct

SEQ ID NO: 12064 - DNA, 16 bp, Artificial Sequence
  synthetic circulating small noncoding RNA (sncRNA) 5' transfer RNA (tRNA) half
gataaccactacacta

SEQ ID NO: 12065 - DNA, 25 bp, Artificial Sequence
  synthetic circulating small noncoding RNA (sncRNA) 5' transfer RNA (tRNA) half
gtcccaccgagatttgaactcggat

SEQ ID NO: 12066 - DNA, 24 bp, Artificial Sequence
  synthetic circulating small noncoding RNA (sncRNA) 5' transfer RNA (tRNA) half
ccgcggcccgggttcgattcccgg

SEQ ID NO: 12067 - DNA, 14 bp, Artificial Sequence
  synthetic circulating small noncoding RNA (sncRNA) 5' transfer RNA (tRNA) half
aggccccagcgaga

SEQ ID NO: 12068 - DNA, 27 bp, Artificial Sequence
  synthetic circulating small noncoding RNA (sncRNA) 5' transfer RNA (tRNA) half
tggactttgaatccagcgatccgagtt

SEQ ID NO: 12069 - DNA, 30 bp, Artificial Sequence
  synthetic circulating small noncoding RNA (sncRNA) 5' transfer RNA (tRNA) half
ccccgacgtgatttgaacacgcaaccttct

SEQ ID NO: 12070 - DNA, 32 bp, Artificial Sequence
  synthetic circulating small noncoding RNA (sncRNA) 5' transfer RNA (tRNA) half
gggccgcggcggtgaaagcgccgaatcctagc

SEQ ID NO: 12071 - DNA, 21 bp, Artificial Sequence
  synthetic circulating small noncoding RNA (sncRNA) 5' transfer RNA (tRNA) half
ctaaccactatacgatcacgg

SEQ ID NO: 12072 - DNA, 30 bp, Artificial Sequence
  synthetic circulating small noncoding RNA (sncRNA) 5' transfer RNA (tRNA) half
cgtgactcggattcgaaccgaggttgctgc

SEQ ID NO: 12073 - DNA, 36 bp, Artificial Sequence
  synthetic circulating small noncoding RNA (sncRNA) 5' transfer RNA (tRNA) half
accgcccaacgtggggctcgaacccacgaccctggg

SEQ ID NO: 12074 - DNA, 14 bp, Artificial Sequence
  synthetic circulating small noncoding RNA (sncRNA) 5' transfer RNA (tRNA) half
aacagcgccgctgg

SEQ ID NO: 12075 - DNA, 33 bp, Artificial Sequence
  synthetic circulating small noncoding RNA (sncRNA) 5' transfer RNA (tRNA) half
gggggtatagctcaggggtagagcatttgactg

SEQ ID NO: 12076 - DNA, 23 bp, Artificial Sequence
  synthetic circulating small noncoding RNA (sncRNA) 5' transfer RNA (tRNA) half
tcgaaccggggacctttcgcgtg

SEQ ID NO: 12077 - DNA, 35 bp, Artificial Sequence
  synthetic circulating small noncoding RNA (sncRNA) 5' transfer RNA (tRNA) half
ccgcccggctagctcagtcggtagagcatgagact

SEQ ID NO: 12078 - DNA, 33 bp, Artificial Sequence
  synthetic circulating small noncoding RNA (sncRNA) 5' transfer RNA (tRNA) half
actctggtgggattcgaacccacaacctttgaa

SEQ ID NO: 12079 - DNA, 32 bp, Artificial Sequence
  synthetic circulating small noncoding RNA (sncRNA) 5' transfer RNA (tRNA) half
ctccccgtcggggaatcgaaccccggtctccc

SEQ ID NO: 12080 - DNA, 22 bp, Artificial Sequence
  synthetic circulating small noncoding RNA (sncRNA) 5' transfer RNA (tRNA) half
gtgcattggccgggaatcgaac

SEQ ID NO: 12081 - DNA, 26 bp, Artificial Sequence
  synthetic circulating small noncoding RNA (sncRNA) 5' transfer RNA (tRNA) half
ccaggcggcccgggttcgactcccgg

SEQ ID NO: 12082 - DNA, 16 bp, Artificial Sequence
  synthetic circulating small noncoding RNA (sncRNA) 5' transfer RNA (tRNA) half
atgcgctctaccactg

SEQ ID NO: 12083 - DNA, 25 bp, Artificial Sequence
  synthetic circulating small noncoding RNA (sncRNA) 5' transfer RNA (tRNA) half
ctcgcctgccacgcgggaggcccgg

SEQ ID NO: 12084 - DNA, 22 bp, Artificial Sequence
  synthetic circulating small noncoding RNA (sncRNA) 5' transfer RNA (tRNA) half
tggtttcgatccatcgacctct

SEQ ID NO: 12085 - DNA, 19 bp, Artificial Sequence
  synthetic circulating small noncoding RNA (sncRNA) 5' transfer RNA (tRNA) half
tgaacccgggacctctcgc

SEQ ID NO: 12086 - DNA, 19 bp, Artificial Sequence
  synthetic circulating small noncoding RNA (sncRNA) 5' transfer RNA (tRNA) half
ctctgagggggcacccgga

SEQ ID NO: 12087 - DNA, 40 bp, Artificial Sequence
  synthetic circulating small noncoding RNA (sncRNA) 5' transfer RNA (tRNA) half
cagtctcttcggaggcgtgggttcgaatcccaccgctgcc

SEQ ID NO: 12088 - DNA, 29 bp, Artificial Sequence
  synthetic circulating small noncoding RNA (sncRNA) 5' transfer RNA (tRNA) half
cgaagggactcgaacccccaatcttctga

SEQ ID NO: 12089 - DNA, 37 bp, Artificial Sequence
  synthetic circulating small noncoding RNA (sncRNA) 5' transfer RNA (tRNA) half
gtaaaccaggggtcgcgagttcaaatctcgctggggc

SEQ ID NO: 12090 - DNA, 20 bp, Artificial Sequence
  synthetic circulating small noncoding RNA (sncRNA) 5' transfer RNA (tRNA) half
cgaatcctgccgactacgtc

SEQ ID NO: 12091 - DNA, 33 bp, Artificial Sequence
  synthetic circulating small noncoding RNA (sncRNA) 5' transfer RNA (tRNA) half
agcggctcgttggtctaggggtatgattctcgc

SEQ ID NO: 12092 - DNA, 34 bp, Artificial Sequence
  synthetic circulating small noncoding RNA (sncRNA) 5' transfer RNA (tRNA) half
agcgactctggtgggactcgaacccacaaccttt

SEQ ID NO: 12093 - DNA, 10 bp, Artificial Sequence
  synthetic circulating small noncoding RNA (sncRNA) 5' transfer RNA (tRNA) half
cgactccgcc

SEQ ID NO: 12094 - DNA, 16 bp, Artificial Sequence
  synthetic circulating small noncoding RNA (sncRNA) 5' transfer RNA (tRNA) half
gtcctgccgcggtcga

SEQ ID NO: 12095 - DNA, 17 bp, Artificial Sequence
  synthetic circulating small noncoding RNA (sncRNA) 5' transfer RNA (tRNA) half
ccgagcggtctaaggcg

SEQ ID NO: 12096 - DNA, 23 bp, Artificial Sequence
  synthetic circulating small noncoding RNA (sncRNA) 5' transfer RNA (tRNA) half
ccgggttcgactcccggtgtggg

SEQ ID NO: 12097 - DNA, 17 bp, Artificial Sequence
  synthetic circulating small noncoding RNA (sncRNA) 5' transfer RNA (tRNA) half
cgtgtgaggcgaacgtg

SEQ ID NO: 12098 - DNA, 13 bp, Artificial Sequence
  synthetic circulating small noncoding RNA (sncRNA) 5' transfer RNA (tRNA) half
gatggccgagcgg

SEQ ID NO: 12099 - DNA, 26 bp, Artificial Sequence
  synthetic circulating small noncoding RNA (sncRNA) 5' transfer RNA (tRNA) half
ctgggttcgaatcccagcggggcctt

SEQ ID NO: 12100 - DNA, 12 bp, Artificial Sequence
  synthetic circulating small noncoding RNA (sncRNA) 5' transfer RNA (tRNA) half
gaatcgaacccc

SEQ ID NO: 12101 - DNA, 18 bp, Artificial Sequence
  synthetic circulating small noncoding RNA (sncRNA) 5' transfer RNA (tRNA) half
gctagctcagtcggtaga

SEQ ID NO: 12102 - DNA, 12 bp, Artificial Sequence
  synthetic circulating small noncoding RNA (sncRNA) 5' transfer RNA (tRNA) half
tcgactcccggt

SEQ ID NO: 12103 - DNA, 35 bp, Artificial Sequence
  synthetic circulating small noncoding RNA (sncRNA) 5' transfer RNA (tRNA) half
aacccgggcctcccgcgtggcaggcgagaattcta

SEQ ID NO: 12104 - DNA, 30 bp, Artificial Sequence
  synthetic circulating small noncoding RNA (sncRNA) 5' transfer RNA (tRNA) half
gttcgaaccccgtccgtgcctgccctcttt

SEQ ID NO: 12105 - DNA, 26 bp, Artificial Sequence
  synthetic circulating small noncoding RNA (sncRNA) 5' transfer RNA (tRNA) half
ggtgtagtggtatcatgcaagattcc

SEQ ID NO: 12106 - DNA, 33 bp, Artificial Sequence
  synthetic circulating small noncoding RNA (sncRNA) 5' transfer RNA (tRNA) half
aggagatcctgggttcaaatcccagcggggcct

SEQ ID NO: 12107 - DNA, 26 bp, Artificial Sequence
  synthetic circulating small noncoding RNA (sncRNA) 5' transfer RNA (tRNA) half
ctggttcgattccggctcgaaggact

SEQ ID NO: 12108 - DNA, 27 bp, Artificial Sequence
  synthetic circulating small noncoding RNA (sncRNA) 5' transfer RNA (tRNA) half
gttccatagtgtagcggttatcacgtc

SEQ ID NO: 12109 - DNA, 16 bp, Artificial Sequence
  synthetic circulating small noncoding RNA (sncRNA) 5' transfer RNA (tRNA) half
gaacccgggccgcctg

SEQ ID NO: 12110 - DNA, 18 bp, Artificial Sequence
  synthetic circulating small noncoding RNA (sncRNA) 5' transfer RNA (tRNA) half
cgtgagggggcacccgga

SEQ ID NO: 12111 - DNA, 28 bp, Artificial Sequence
  synthetic circulating small noncoding RNA (sncRNA) 5' transfer RNA (tRNA) half
ctctggactctgaatccagcgatccgag

SEQ ID NO: 12112 - DNA, 24 bp, Artificial Sequence
  synthetic circulating small noncoding RNA (sncRNA) 5' transfer RNA (tRNA) half
tgaatccagcgatccgagttcaaa

SEQ ID NO: 12113 - DNA, 8 bp, Artificial Sequence
  synthetic circulating small noncoding RNA (sncRNA) 5' transfer RNA (tRNA) half
gctcgaac

SEQ ID NO: 12114 - DNA, 16 bp, Artificial Sequence
  synthetic circulating small noncoding RNA (sncRNA) 5' transfer RNA (tRNA) half
acccgggtcaactgct

SEQ ID NO: 12115 - DNA, 32 bp, Artificial Sequence
  synthetic circulating small noncoding RNA (sncRNA) 5' transfer RNA (tRNA) half
acccagctagctcagtgggtagagcatgagac

SEQ ID NO: 12116 - DNA, 22 bp, Artificial Sequence
  synthetic circulating small noncoding RNA (sncRNA) 5' transfer RNA (tRNA) half
ttagcactctggactttgaatc

SEQ ID NO: 12117 - DNA, 17 bp, Artificial Sequence
  synthetic circulating small noncoding RNA (sncRNA) 5' transfer RNA (tRNA) half
ccacgcgggaggcccgg

SEQ ID NO: 12118 - DNA, 24 bp, Artificial Sequence
  synthetic circulating small noncoding RNA (sncRNA) 5' transfer RNA (tRNA) half
cggatagctcagtcggtagagcat

SEQ ID NO: 12119 - DNA, 21 bp, Artificial Sequence
  synthetic circulating small noncoding RNA (sncRNA) 5' transfer RNA (tRNA) half
aaccagggctcgtccgggatt

SEQ ID NO: 12120 - DNA, 17 bp, Artificial Sequence
  synthetic circulating small noncoding RNA (sncRNA) 5' transfer RNA (tRNA) half
ccattcggagaccagaa

SEQ ID NO: 12121 - DNA, 15 bp, Artificial Sequence
  synthetic circulating small noncoding RNA (sncRNA) 5' transfer RNA (tRNA) half
accactagaccacca

SEQ ID NO: 12122 - DNA, 17 bp, Artificial Sequence
  synthetic circulating small noncoding RNA (sncRNA) 5' transfer RNA (tRNA) half
ccgctcggccatcctga

SEQ ID NO: 12123 - DNA, 21 bp, Artificial Sequence
  synthetic circulating small noncoding RNA (sncRNA) 5' transfer RNA (tRNA) half
acccgggtcaactgcttggaa

SEQ ID NO: 12124 - DNA, 9 bp, Artificial Sequence
  synthetic circulating small noncoding RNA (sncRNA) 5' transfer RNA (tRNA) half
gctcgaacc

SEQ ID NO: 12125 - DNA, 29 bp, Artificial Sequence
  synthetic circulating small noncoding RNA (sncRNA) 5' transfer RNA (tRNA) half
caggagatcctgggttcgaatcccagcgg

SEQ ID NO: 12126 - DNA, 24 bp, Artificial Sequence
  synthetic circulating small noncoding RNA (sncRNA) 5' transfer RNA (tRNA) half
ttgggtgcgagaggtcccgggttc

SEQ ID NO: 12127 - DNA, 12 bp, Artificial Sequence
  synthetic circulating small noncoding RNA (sncRNA) 5' transfer RNA (tRNA) half
gagctatacccc

SEQ ID NO: 12128 - DNA, 20 bp, Artificial Sequence
  synthetic circulating small noncoding RNA (sncRNA) 5' transfer RNA (tRNA) half
atccccggcacctccagttt

SEQ ID NO: 12129 - DNA, 10 bp, Artificial Sequence
  synthetic circulating small noncoding RNA (sncRNA) 5' transfer RNA (tRNA) half
ctcggccacg

SEQ ID NO: 12130 - DNA, 7 bp, Artificial Sequence
  synthetic circulating small noncoding RNA (sncRNA) 5' transfer RNA (tRNA) half
gtttccg

SEQ ID NO: 12131 - DNA, 15 bp, Artificial Sequence
  synthetic circulating small noncoding RNA (sncRNA) 5' transfer RNA (tRNA) half
acccaggcggcccgg

SEQ ID NO: 12132 - DNA, 27 bp, Artificial Sequence
  synthetic circulating small noncoding RNA (sncRNA) 5' transfer RNA (tRNA) half
acaacgcagagtactaaccactatacg

SEQ ID NO: 12133 - DNA, 22 bp, Artificial Sequence
  synthetic circulating small noncoding RNA (sncRNA) 5' transfer RNA (tRNA) half
acccgggacctctcgcacccga

SEQ ID NO: 12134 - DNA, 23 bp, Artificial Sequence
  synthetic circulating small noncoding RNA (sncRNA) 5' transfer RNA (tRNA) half
cccacaccgggagtcgaacccgg

SEQ ID NO: 12135 - DNA, 26 bp, Artificial Sequence
  synthetic circulating small noncoding RNA (sncRNA) 5' transfer RNA (tRNA) half
ggggatgtagctcaatggtagagcac

SEQ ID NO: 12136 - DNA, 19 bp, Artificial Sequence
  synthetic circulating small noncoding RNA (sncRNA) 5' transfer RNA (tRNA) half
gcattggtagttcaatggt

SEQ ID NO: 12137 - DNA, 23 bp, Artificial Sequence
  synthetic circulating small noncoding RNA (sncRNA) 5' transfer RNA (tRNA) half
ttcgagccccagtggaaccacgt

SEQ ID NO: 12138 - DNA, 22 bp, Artificial Sequence
  synthetic circulating small noncoding RNA (sncRNA) 5' transfer RNA (tRNA) half
atgtgcattggccgggaatcga

SEQ ID NO: 12139 - DNA, 25 bp, Artificial Sequence
  synthetic circulating small noncoding RNA (sncRNA) 5' transfer RNA (tRNA) half
ggatgatcctcagtggtctggggtg

SEQ ID NO: 12140 - DNA, 17 bp, Artificial Sequence
  synthetic circulating small noncoding RNA (sncRNA) 5' transfer RNA (tRNA) half
gttaggattcctggttt

SEQ ID NO: 12141 - DNA, 34 bp, Artificial Sequence
  synthetic circulating small noncoding RNA (sncRNA) 5' transfer RNA (tRNA) half
ccgtagtgtagtggttatcacgttcgcctcacac

SEQ ID NO: 12142 - DNA, 21 bp, Artificial Sequence
  synthetic circulating small noncoding RNA (sncRNA) 5' transfer RNA (tRNA) half
cttatccattaggccacgcgg

SEQ ID NO: 12143 - DNA, 27 bp, Artificial Sequence
  synthetic circulating small noncoding RNA (sncRNA) 5' transfer RNA (tRNA) half
gccccgtgtgaggatcgaactcacgac

SEQ ID NO: 12144 - DNA, 23 bp, Artificial Sequence
  synthetic circulating small noncoding RNA (sncRNA) 5' transfer RNA (tRNA) half
accggggacctcttgatctgcag

SEQ ID NO: 12145 - DNA, 6 bp, Artificial Sequence
  synthetic circulating small noncoding RNA (sncRNA) 5' transfer RNA (tRNA) half
ggccgc

SEQ ID NO: 12146 - DNA, 39 bp, Artificial Sequence
  synthetic circulating small noncoding RNA (sncRNA) 5' transfer RNA (tRNA) half
acttaaaaccttgttcccagaggttcaaatcctctccct

SEQ ID NO: 12147 - DNA, 26 bp, Artificial Sequence
  synthetic circulating small noncoding RNA (sncRNA) 5' transfer RNA (tRNA) half
ccacgcgtgcagagcacaatggatta

SEQ ID NO: 12148 - DNA, 28 bp, Artificial Sequence
  synthetic circulating small noncoding RNA (sncRNA) 5' transfer RNA (tRNA) half
ctggtgtagtggtatcatgcaagattcc

SEQ ID NO: 12149 - DNA, 31 bp, Artificial Sequence
  synthetic circulating small noncoding RNA (sncRNA) 5' transfer RNA (tRNA) half
ccagcgccttagaccgctcggccacactacc

SEQ ID NO: 12150 - DNA, 9 bp, Artificial Sequence
  synthetic circulating small noncoding RNA (sncRNA) 5' transfer RNA (tRNA) half
ttcggcgct

SEQ ID NO: 12151 - DNA, 12 bp, Artificial Sequence
  synthetic circulating small noncoding RNA (sncRNA) 5' transfer RNA (tRNA) half
ttcgattccggc

SEQ ID NO: 12152 - DNA, 40 bp, Artificial Sequence
  synthetic circulating small noncoding RNA (sncRNA) 5' transfer RNA (tRNA) half
cgaacccacaatccctggcttaggaggccaatgccttatc

SEQ ID NO: 12153 - DNA, 23 bp, Artificial Sequence
  synthetic circulating small noncoding RNA (sncRNA) 5' transfer RNA (tRNA) half
acaggcggggatactaaccacta

SEQ ID NO: 12154 - DNA, 15 bp, Artificial Sequence
  synthetic circulating small noncoding RNA (sncRNA) 5' transfer RNA (tRNA) half
ccgtatggaggcgtg

SEQ ID NO: 12155 - DNA, 20 bp, Artificial Sequence
  synthetic circulating small noncoding RNA (sncRNA) 5' transfer RNA (tRNA) half
tagagcggaggactgtagtc

SEQ ID NO: 12156 - DNA, 29 bp, Artificial Sequence
  synthetic circulating small noncoding RNA (sncRNA) 5' transfer RNA (tRNA) half
gagaattctaccactgaaccaccaatgca

SEQ ID NO: 12157 - DNA, 39 bp, Artificial Sequence
  synthetic circulating small noncoding RNA (sncRNA) 5' transfer RNA (tRNA) half
aagcgactctggtgggactcgaacccacaacctttgaat

SEQ ID NO: 12158 - DNA, 24 bp, Artificial Sequence
  synthetic circulating small noncoding RNA (sncRNA) 5' transfer RNA (tRNA) half
agctcagtggtagagcatttgact

SEQ ID NO: 12159 - DNA, 26 bp, Artificial Sequence
  synthetic circulating small noncoding RNA (sncRNA) 5' transfer RNA (tRNA) half
cgaccacgaagggactcgaaccctca

SEQ ID NO: 12160 - DNA, 23 bp, Artificial Sequence
  synthetic circulating small noncoding RNA (sncRNA) 5' transfer RNA (tRNA) half
tgcgctctaccactgagctacat

SEQ ID NO: 12161 - DNA, 17 bp, Artificial Sequence
  synthetic circulating small noncoding RNA (sncRNA) 5' transfer RNA (tRNA) half
tggttatcacgctcgcc

SEQ ID NO: 12162 - DNA, 33 bp, Artificial Sequence
  synthetic circulating small noncoding RNA (sncRNA) 5' transfer RNA (tRNA) half
cggtgagagcgccgaatcctaaccactagacca

SEQ ID NO: 12163 - DNA, 29 bp, Artificial Sequence
  synthetic circulating small noncoding RNA (sncRNA) 5' transfer RNA (tRNA) half
gtaatggttagcactctggactctgaatc

SEQ ID NO: 12164 - DNA, 8 bp, Artificial Sequence
  synthetic circulating small noncoding RNA (sncRNA) 5' transfer RNA (tRNA) half
agcgccga

SEQ ID NO: 12165 - DNA, 37 bp, Artificial Sequence
  synthetic circulating small noncoding RNA (sncRNA) 5' transfer RNA (tRNA) half
ccgccgcggcccgggttcgattcccggtcagggaagc

SEQ ID NO: 12166 - DNA, 29 bp, Artificial Sequence
  synthetic circulating small noncoding RNA (sncRNA) 5' transfer RNA (tRNA) half
acccgggcctcccgcgtggcaggcgagaa

SEQ ID NO: 12167 - DNA, 34 bp, Artificial Sequence
  synthetic circulating small noncoding RNA (sncRNA) 5' transfer RNA (tRNA) half
accgggggtatagctcagtggtagagcatttgac

SEQ ID NO: 12168 - DNA, 23 bp, Artificial Sequence
  synthetic circulating small noncoding RNA (sncRNA) 5' transfer RNA (tRNA) half
aatccagcgatccgagttcaaat

SEQ ID NO: 12169 - DNA, 13 bp, Artificial Sequence
  synthetic circulating small noncoding RNA (sncRNA) 5' transfer RNA (tRNA) half
gatccatcgacct

SEQ ID NO: 12170 - DNA, 21 bp, Artificial Sequence
  synthetic circulating small noncoding RNA (sncRNA) 5' transfer RNA (tRNA) half
cgggactcgaacccgcaacct

SEQ ID NO: 12171 - DNA, 30 bp, Artificial Sequence
  synthetic circulating small noncoding RNA (sncRNA) 5' transfer RNA (tRNA) half
caccgagatttgaactcggatcgctggatt

SEQ ID NO: 12172 - DNA, 19 bp, Artificial Sequence
  synthetic circulating small noncoding RNA (sncRNA) 5' transfer RNA (tRNA) half
tgctaataacgccaaggtc

SEQ ID NO: 12173 - DNA, 7 bp, Artificial Sequence
  synthetic circulating small noncoding RNA (sncRNA) 5' transfer RNA (tRNA) half
gcgccgt

SEQ ID NO: 12174 - DNA, 34 bp, Artificial Sequence
  synthetic circulating small noncoding RNA (sncRNA) 5' transfer RNA (tRNA) half
cagtttccgtagtgtagtggttatcacgttcgcc

SEQ ID NO: 12175 - DNA, 23 bp, Artificial Sequence
  synthetic circulating small noncoding RNA (sncRNA) 5' transfer RNA (tRNA) half
ccaacctttcggttaacagccga

SEQ ID NO: 12176 - DNA, 19 bp, Artificial Sequence
  synthetic circulating small noncoding RNA (sncRNA) 5' transfer RNA (tRNA) half
aaagtattgtgccccgtgt

SEQ ID NO: 12177 - DNA, 27 bp, Artificial Sequence
  synthetic circulating small noncoding RNA (sncRNA) 5' transfer RNA (tRNA) half
agattaagagtctcatgctctaccgac

SEQ ID NO: 12178 - DNA, 32 bp, Artificial Sequence
  synthetic circulating small noncoding RNA (sncRNA) 5' transfer RNA (tRNA) half
gccaggtaggagtcgaacctacaatcttctga

SEQ ID NO: 12179 - DNA, 20 bp, Artificial Sequence
  synthetic circulating small noncoding RNA (sncRNA) 5' transfer RNA (tRNA) half
gaacccacgcctccattcgg

SEQ ID NO: 12180 - DNA, 24 bp, Artificial Sequence
  synthetic circulating small noncoding RNA (sncRNA) 5' transfer RNA (tRNA) half
ctggttcgactccggctcgaagga

SEQ ID NO: 12181 - DNA, 24 bp, Artificial Sequence
  synthetic circulating small noncoding RNA (sncRNA) 5' transfer RNA (tRNA) half
cccagggacgaccacagcgacttt

SEQ ID NO: 12182 - DNA, 13 bp, Artificial Sequence
  synthetic circulating small noncoding RNA (sncRNA) 5' transfer RNA (tRNA) half
tccctgttcgggc

SEQ ID NO: 12183 - DNA, 16 bp, Artificial Sequence
  synthetic circulating small noncoding RNA (sncRNA) 5' transfer RNA (tRNA) half
aaccggggacctcttg

SEQ ID NO: 12184 - DNA, 22 bp, Artificial Sequence
  synthetic circulating small noncoding RNA (sncRNA) 5' transfer RNA (tRNA) half
gaggatcgaactcacgaccttc

SEQ ID NO: 12185 - DNA, 25 bp, Artificial Sequence
  synthetic circulating small noncoding RNA (sncRNA) 5' transfer RNA (tRNA) half
tgctctacctctgagctacatcccc

SEQ ID NO: 12186 - DNA, 26 bp, Artificial Sequence
  synthetic circulating small noncoding RNA (sncRNA) 5' transfer RNA (tRNA) half
agcgaccacgaagggactcgaacccc

SEQ ID NO: 12187 - DNA, 10 bp, Artificial Sequence
  synthetic circulating small noncoding RNA (sncRNA) 5' transfer RNA (tRNA) half
ctataccccc

SEQ ID NO: 12188 - DNA, 15 bp, Artificial Sequence
  synthetic circulating small noncoding RNA (sncRNA) 5' transfer RNA (tRNA) half
cgctgcgccactctg

SEQ ID NO: 12189 - DNA, 14 bp, Artificial Sequence
  synthetic circulating small noncoding RNA (sncRNA) 5' transfer RNA (tRNA) half
cggtctcccgcgtg

SEQ ID NO: 12190 - DNA, 15 bp, Artificial Sequence
  synthetic circulating small noncoding RNA (sncRNA) 5' transfer RNA (tRNA) half
ccccggtctcccgcg

SEQ ID NO: 12191 - DNA, 14 bp, Artificial Sequence
  synthetic circulating small noncoding RNA (sncRNA) 5' transfer RNA (tRNA) half
ctagaccaccaggg

SEQ ID NO: 12192 - DNA, 10 bp, Artificial Sequence
  synthetic circulating small noncoding RNA (sncRNA) 5' transfer RNA (tRNA) half
cgaaccccgg

SEQ ID NO: 12193 - DNA, 17 bp, Artificial Sequence
  synthetic circulating small noncoding RNA (sncRNA) 5' transfer RNA (tRNA) half
ttcccggccaatgcacg

SEQ ID NO: 12194 - DNA, 28 bp, Artificial Sequence
  synthetic circulating small noncoding RNA (sncRNA) 5' transfer RNA (tRNA) half
tcggatcgctggattcagagtccagagt

SEQ ID NO: 12195 - DNA, 34 bp, Artificial Sequence
  synthetic circulating small noncoding RNA (sncRNA) 5' transfer RNA (tRNA) half
tcaagaggtccctggttcaaatccaggtgccccc

SEQ ID NO: 12196 - DNA, 22 bp, Artificial Sequence
  synthetic circulating small noncoding RNA (sncRNA) 5' transfer RNA (tRNA) half
tcaattccacctttcgggcggg

SEQ ID NO: 12197 - DNA, 14 bp, Artificial Sequence
  synthetic circulating small noncoding RNA (sncRNA) 5' transfer RNA (tRNA) half
tccccggcacctcc

SEQ ID NO: 12198 - DNA, 27 bp, Artificial Sequence
  synthetic circulating small noncoding RNA (sncRNA) 5' transfer RNA (tRNA) half
tggttagcactctggactctgaatcca

SEQ ID NO: 12199 - DNA, 21 bp, Artificial Sequence
  synthetic circulating small noncoding RNA (sncRNA) 5' transfer RNA (tRNA) half
cagtggtctggggtgcaggct

SEQ ID NO: 12200 - DNA, 28 bp, Artificial Sequence
  synthetic circulating small noncoding RNA (sncRNA) 5' transfer RNA (tRNA) half
caaagcctaaccactagaccaccaggga

SEQ ID NO: 12201 - DNA, 19 bp, Artificial Sequence
  synthetic circulating small noncoding RNA (sncRNA) 5' transfer RNA (tRNA) half
acagacgacgaggatggga

SEQ ID NO: 12202 - DNA, 23 bp, Artificial Sequence
  synthetic circulating small noncoding RNA (sncRNA) 5' transfer RNA (tRNA) half
gttaggattcggcgctctcaccg

SEQ ID NO: 12203 - DNA, 20 bp, Artificial Sequence
  synthetic circulating small noncoding RNA (sncRNA) 5' transfer RNA (tRNA) half
aaggtcctgggttcgagccc

SEQ ID NO: 12204 - DNA, 12 bp, Artificial Sequence
  synthetic circulating small noncoding RNA (sncRNA) 5' transfer RNA (tRNA) half
agagcatgagac

SEQ ID NO: 12205 - DNA, 24 bp, Artificial Sequence
  synthetic circulating small noncoding RNA (sncRNA) 5' transfer RNA (tRNA) half
cgaacccgggccgcggcggtgaga

SEQ ID NO: 12206 - DNA, 17 bp, Artificial Sequence
  synthetic circulating small noncoding RNA (sncRNA) 5' transfer RNA (tRNA) half
tcgacgaggatgggatt

SEQ ID NO: 12207 - DNA, 31 bp, Artificial Sequence
  synthetic circulating small noncoding RNA (sncRNA) 5' transfer RNA (tRNA) half
gctcgttggtctaggggtatgattctcggtt

SEQ ID NO: 12208 - DNA, 34 bp, Artificial Sequence
  synthetic circulating small noncoding RNA (sncRNA) 5' transfer RNA (tRNA) half
tccatcgacctctgggttatgggcccagcacgct

SEQ ID NO: 12209 - DNA, 11 bp, Artificial Sequence
  synthetic circulating small noncoding RNA (sncRNA) 5' transfer RNA (tRNA) half
gctatcgaagg

SEQ ID NO: 12210 - DNA, 23 bp, Artificial Sequence
  synthetic circulating small noncoding RNA (sncRNA) 5' transfer RNA (tRNA) half
aggattcgaacctgcgcggggag

SEQ ID NO: 12211 - DNA, 20 bp, Artificial Sequence
  synthetic circulating small noncoding RNA (sncRNA) 5' transfer RNA (tRNA) half
aatcctgccgactacgtcat

SEQ ID NO: 12212 - DNA, 22 bp, Artificial Sequence
  synthetic circulating small noncoding RNA (sncRNA) 5' transfer RNA (tRNA) half
cgggactcgaacccgcaacctt

SEQ ID NO: 12213 - DNA, 33 bp, Artificial Sequence
  synthetic circulating small noncoding RNA (sncRNA) 5' transfer RNA (tRNA) half
gcactctggactctgaatccagcgatccgagtt

SEQ ID NO: 12214 - DNA, 21 bp, Artificial Sequence
  synthetic circulating small noncoding RNA (sncRNA) 5' transfer RNA (tRNA) half
acaggcggggatactaaccac

SEQ ID NO: 12215 - DNA, 29 bp, Artificial Sequence
  synthetic circulating small noncoding RNA (sncRNA) 5' transfer RNA (tRNA) half
gccaaatcctaaccactagaccaccaggg

SEQ ID NO: 12216 - DNA, 12 bp, Artificial Sequence
  synthetic circulating small noncoding RNA (sncRNA) 5' transfer RNA (tRNA) half
gaacccgggccg

SEQ ID NO: 12217 - DNA, 17 bp, Artificial Sequence
  synthetic circulating small noncoding RNA (sncRNA) 5' transfer RNA (tRNA) half
caggccgcggcggtgag

SEQ ID NO: 12218 - DNA, 38 bp, Artificial Sequence
  synthetic circulating small noncoding RNA (sncRNA) 5' transfer RNA (tRNA) half
gcccggatgatcctcagtggtctggggtgcaggcttca

SEQ ID NO: 12219 - DNA, 17 bp, Artificial Sequence
  synthetic circulating small noncoding RNA (sncRNA) 5' transfer RNA (tRNA) half
agtcaaatgctctacca

SEQ ID NO: 12220 - DNA, 14 bp, Artificial Sequence
  synthetic circulating small noncoding RNA (sncRNA) 5' transfer RNA (tRNA) half
ccggggacctcttg

SEQ ID NO: 12221 - DNA, 21 bp, Artificial Sequence
  synthetic circulating small noncoding RNA (sncRNA) 5' transfer RNA (tRNA) half
ttagcactctggactctgaat

SEQ ID NO: 12222 - DNA, 21 bp, Artificial Sequence
  synthetic circulating small noncoding RNA (sncRNA) 5' transfer RNA (tRNA) half
aaccggggacctttcgcgtgt

SEQ ID NO: 12223 - DNA, 35 bp, Artificial Sequence
  synthetic circulating small noncoding RNA (sncRNA) 5' transfer RNA (tRNA) half
aggcgagaattctaccactgaaccaccaatgctcc

SEQ ID NO: 12224 - DNA, 32 bp, Artificial Sequence
  synthetic circulating small noncoding RNA (sncRNA) 5' transfer RNA (tRNA) half
ccgtcggggaattgaaccccggtctcccgcgt

SEQ ID NO: 12225 - DNA, 41 bp, Artificial Sequence
  synthetic circulating small noncoding RNA (sncRNA) 5' transfer RNA (tRNA) half
tggcagcggtgggattcgaacccacgcccccgaagagactg

SEQ ID NO: 12226 - DNA, 22 bp, Artificial Sequence
  synthetic circulating small noncoding RNA (sncRNA) 5' transfer RNA (tRNA) half
tgataaccactacactacggaa

SEQ ID NO: 12227 - DNA, 29 bp, Artificial Sequence
  synthetic circulating small noncoding RNA (sncRNA) 5' transfer RNA (tRNA) half
ggttccttcgagccggattcgaaccagcg

SEQ ID NO: 12228 - DNA, 28 bp, Artificial Sequence
  synthetic circulating small noncoding RNA (sncRNA) 5' transfer RNA (tRNA) half
ggggatgtagctcagcggtagagcacat

SEQ ID NO: 12229 - DNA, 17 bp, Artificial Sequence
  synthetic circulating small noncoding RNA (sncRNA) 5' transfer RNA (tRNA) half
ggttatcacatctgctt

SEQ ID NO: 12230 - DNA, 16 bp, Artificial Sequence
  synthetic circulating small noncoding RNA (sncRNA) 5' transfer RNA (tRNA) half
tcatgaccccgacgtg

SEQ ID NO: 12231 - DNA, 18 bp, Artificial Sequence
  synthetic circulating small noncoding RNA (sncRNA) 5' transfer RNA (tRNA) half
tcgaacccacgcctccag

SEQ ID NO: 12232 - DNA, 23 bp, Artificial Sequence
  synthetic circulating small noncoding RNA (sncRNA) 5' transfer RNA (tRNA) half
tggttatcacgttcgcctcacac

SEQ ID NO: 12233 - DNA, 11 bp, Artificial Sequence
  synthetic circulating small noncoding RNA (sncRNA) 5' transfer RNA (tRNA) half
tcgaaccgagg

SEQ ID NO: 12234 - DNA, 21 bp, Artificial Sequence
  synthetic circulating small noncoding RNA (sncRNA) 5' transfer RNA (tRNA) half
tcaattggtagagcatcagac

SEQ ID NO: 12235 - DNA, 20 bp, Artificial Sequence
  synthetic circulating small noncoding RNA (sncRNA) 5' transfer RNA (tRNA) half
tcccattcttgcgacccggg

SEQ ID NO: 12236 - DNA, 18 bp, Artificial Sequence
  synthetic circulating small noncoding RNA (sncRNA) 5' transfer RNA (tRNA) half
ctgccacgcgggaggccc

SEQ ID NO: 12237 - DNA, 39 bp, Artificial Sequence
  synthetic circulating small noncoding RNA (sncRNA) 5' transfer RNA (tRNA) half
ccccgtcggggaattgaaccccggtctcccgcgtgacag

SEQ ID NO: 12238 - DNA, 13 bp, Artificial Sequence
  synthetic circulating small noncoding RNA (sncRNA) 5' transfer RNA (tRNA) half
cagagtgctaacc

SEQ ID NO: 12239 - DNA, 18 bp, Artificial Sequence
  synthetic circulating small noncoding RNA (sncRNA) 5' transfer RNA (tRNA) half
ccactatactaacgagga

SEQ ID NO: 12240 - DNA, 17 bp, Artificial Sequence
  synthetic circulating small noncoding RNA (sncRNA) 5' transfer RNA (tRNA) half
tgaatccagcgatccga

SEQ ID NO: 12241 - DNA, 19 bp, Artificial Sequence
  synthetic circulating small noncoding RNA (sncRNA) 5' transfer RNA (tRNA) half
tcaaatctcgctggggcct

SEQ ID NO: 12242 - DNA, 22 bp, Artificial Sequence
  synthetic circulating small noncoding RNA (sncRNA) 5' transfer RNA (tRNA) half
aatcccggacgagccccatctt

SEQ ID NO: 12243 - DNA, 25 bp, Artificial Sequence
  synthetic circulating small noncoding RNA (sncRNA) 5' transfer RNA (tRNA) half
gttcaattccacctttcgggcggga

SEQ ID NO: 12244 - DNA, 21 bp, Artificial Sequence
  synthetic circulating small noncoding RNA (sncRNA) 5' transfer RNA (tRNA) half
ttcccattcttgcgacccggg

SEQ ID NO: 12245 - DNA, 43 bp, Artificial Sequence
  synthetic circulating small noncoding RNA (sncRNA) 5' transfer RNA (tRNA) half
gttaaccgaaaggttggtggttcgagcccacccagggacgaca

SEQ ID NO: 12246 - DNA, 13 bp, Artificial Sequence
  synthetic circulating small noncoding RNA (sncRNA) 5' transfer RNA (tRNA) half
cgggagaccgggg

SEQ ID NO: 12247 - DNA, 22 bp, Artificial Sequence
  synthetic circulating small noncoding RNA (sncRNA) 5' transfer RNA (tRNA) half
cgggccaaagctgaagcgtttt

SEQ ID NO: 12248 - DNA, 16 bp, Artificial Sequence
  synthetic circulating small noncoding RNA (sncRNA) 5' transfer RNA (tRNA) half
taccgggagtcgaacc

SEQ ID NO: 12249 - DNA, 21 bp, Artificial Sequence
  synthetic circulating small noncoding RNA (sncRNA) 5' transfer RNA (tRNA) half
gtgtttccgcccggtttcgaa

SEQ ID NO: 12250 - DNA, 18 bp, Artificial Sequence
  synthetic circulating small noncoding RNA (sncRNA) 5' transfer RNA (tRNA) half
cgaaccccggtctcccgc

SEQ ID NO: 12251 - DNA, 17 bp, Artificial Sequence
  synthetic circulating small noncoding RNA (sncRNA) 5' transfer RNA (tRNA) half
gggactcgaacccgcaa

SEQ ID NO: 12252 - DNA, 31 bp, Artificial Sequence
  synthetic circulating small noncoding RNA (sncRNA) 5' transfer RNA (tRNA) half
gccaggagtcgaacctagaatcttctgatcc

SEQ ID NO: 12253 - DNA, 17 bp, Artificial Sequence
  synthetic circulating small noncoding RNA (sncRNA) 5' transfer RNA (tRNA) half
ctgatgctctaccgact

SEQ ID NO: 12254 - DNA, 18 bp, Artificial Sequence
  synthetic circulating small noncoding RNA (sncRNA) 5' transfer RNA (tRNA) half
ggttcgaacccacgcaga

SEQ ID NO: 12255 - DNA, 22 bp, Artificial Sequence
  synthetic circulating small noncoding RNA (sncRNA) 5' transfer RNA (tRNA) half
ccggatgatcctcagtggtctg

SEQ ID NO: 12256 - DNA, 18 bp, Artificial Sequence
  synthetic circulating small noncoding RNA (sncRNA) 5' transfer RNA (tRNA) half
cccggatagctcagtcgg

SEQ ID NO: 12257 - DNA, 20 bp, Artificial Sequence
  synthetic circulating small noncoding RNA (sncRNA) 5' transfer RNA (tRNA) half
tcgaatccggctcgaaggag

SEQ ID NO: 12258 - DNA, 20 bp, Artificial Sequence
  synthetic circulating small noncoding RNA (sncRNA) 5' transfer RNA (tRNA) half
tccccgtcggggaattgaac

SEQ ID NO: 12259 - DNA, 19 bp, Artificial Sequence
  synthetic circulating small noncoding RNA (sncRNA) 5' transfer RNA (tRNA) half
gatcccactacctcttgca

SEQ ID NO: 12260 - DNA, 13 bp, Artificial Sequence
  synthetic circulating small noncoding RNA (sncRNA) 5' transfer RNA (tRNA) half
atacgatcacggc

SEQ ID NO: 12261 - DNA, 28 bp, Artificial Sequence
  synthetic circulating small noncoding RNA (sncRNA) 5' transfer RNA (tRNA) half
aggcgaatgtgataaccactacactacg

SEQ ID NO: 12262 - DNA, 18 bp, Artificial Sequence
  synthetic circulating small noncoding RNA (sncRNA) 5' transfer RNA (tRNA) half
cgtagtgtagtggttatc

SEQ ID NO: 12263 - DNA, 21 bp, Artificial Sequence
  synthetic circulating small noncoding RNA (sncRNA) 5' transfer RNA (tRNA) half
caccgccgcggcccgggttcg

SEQ ID NO: 12264 - DNA, 44 bp, Artificial Sequence
  synthetic circulating small noncoding RNA (sncRNA) 5' transfer RNA (tRNA) half
ctccagtctcttcgggggcgtgggttcgaatcccaccgctgcca

SEQ ID NO: 12265 - DNA, 34 bp, Artificial Sequence
  synthetic circulating small noncoding RNA (sncRNA) 5' transfer RNA (tRNA) half
caggcgagaattctaccactgaaccaccaatgcc

SEQ ID NO: 12266 - DNA, 25 bp, Artificial Sequence
  synthetic circulating small noncoding RNA (sncRNA) 5' transfer RNA (tRNA) half
gtcaaatgctctacccctgagctat

SEQ ID NO: 12267 - DNA, 35 bp, Artificial Sequence
  synthetic circulating small noncoding RNA (sncRNA) 5' transfer RNA (tRNA) half
gaccacgaagggactcgaacccccaatcttctgat

SEQ ID NO: 12268 - DNA, 26 bp, Artificial Sequence
  synthetic circulating small noncoding RNA (sncRNA) 5' transfer RNA (tRNA) half
agtcggtagagcatcagacttttaat

SEQ ID NO: 12269 - DNA, 28 bp, Artificial Sequence
  synthetic circulating small noncoding RNA (sncRNA) 5' transfer RNA (tRNA) half
accccgacgtgatttgaacacgcaacct

SEQ ID NO: 12270 - DNA, 27 bp, Artificial Sequence
  synthetic circulating small noncoding RNA (sncRNA) 5' transfer RNA (tRNA) half
cacaccgggagtcgaacccgggccgcc

SEQ ID NO: 12271 - DNA, 15 bp, Artificial Sequence
  synthetic circulating small noncoding RNA (sncRNA) 5' transfer RNA (tRNA) half
tatggaggcgtgggt

SEQ ID NO: 12272 - DNA, 15 bp, Artificial Sequence
  synthetic circulating small noncoding RNA (sncRNA) 5' transfer RNA (tRNA) half
gaacctgcgcgggga

SEQ ID NO: 12273 - DNA, 20 bp, Artificial Sequence
  synthetic circulating small noncoding RNA (sncRNA) 5' transfer RNA (tRNA) half
gtggttcagtggtagaattc

SEQ ID NO: 12274 - DNA, 38 bp, Artificial Sequence
  synthetic circulating small noncoding RNA (sncRNA) 5' transfer RNA (tRNA) half
tgaccccgacgtgatttgaacacgcaaccttctgatct

SEQ ID NO: 12275 - DNA, 20 bp, Artificial Sequence
  synthetic circulating small noncoding RNA (sncRNA) 5' transfer RNA (tRNA) half
tcgatccccagcacctccat

SEQ ID NO: 12276 - DNA, 35 bp, Artificial Sequence
  synthetic circulating small noncoding RNA (sncRNA) 5' transfer RNA (tRNA) half
gaccacgaagggactcgaaccctcaatcttctgat

SEQ ID NO: 12277 - DNA, 34 bp, Artificial Sequence
  synthetic circulating small noncoding RNA (sncRNA) 5' transfer RNA (tRNA) half
ggcccggatagctcagtcggtagagcatcagact

SEQ ID NO: 12278 - DNA, 32 bp, Artificial Sequence
  synthetic circulating small noncoding RNA (sncRNA) 5' transfer RNA (tRNA) half
acctccccgtcggggaattgaaccccggtctc

SEQ ID NO: 12279 - DNA, 21 bp, Artificial Sequence
  synthetic circulating small noncoding RNA (sncRNA) 5' transfer RNA (tRNA) half
cggcccgggttcgactcccgg

SEQ ID NO: 12280 - DNA, 34 bp, Artificial Sequence
  synthetic circulating small noncoding RNA (sncRNA) 5' transfer RNA (tRNA) half
ggattcagagtccagagtgctaaccattacacca

SEQ ID NO: 12281 - DNA, 27 bp, Artificial Sequence
  synthetic circulating small noncoding RNA (sncRNA) 5' transfer RNA (tRNA) half
tggcaggcgagaattctaccactgaac

SEQ ID NO: 12282 - DNA, 20 bp, Artificial Sequence
  synthetic circulating small noncoding RNA (sncRNA) 5' transfer RNA (tRNA) half
tttgaatccagcgatccgag

SEQ ID NO: 12283 - DNA, 20 bp, Artificial Sequence
  synthetic circulating small noncoding RNA (sncRNA) 5' transfer RNA (tRNA) half
atccattgcgccactggccc

SEQ ID NO: 12284 - DNA, 12 bp, Artificial Sequence
  synthetic circulating small noncoding RNA (sncRNA) 5' transfer RNA (tRNA) half
tcgctggggcct

SEQ ID NO: 12285 - DNA, 27 bp, Artificial Sequence
  synthetic circulating small noncoding RNA (sncRNA) 5' transfer RNA (tRNA) half
gttggtctaggggtatgattctcggtt

SEQ ID NO: 12286 - DNA, 15 bp, Artificial Sequence
  synthetic circulating small noncoding RNA (sncRNA) 5' transfer RNA (tRNA) half
cggcaggattcgaac

SEQ ID NO: 12287 - DNA, 33 bp, Artificial Sequence
  synthetic circulating small noncoding RNA (sncRNA) 5' transfer RNA (tRNA) half
tcctcgttagtatagtggtgagtatccctgcct

SEQ ID NO: 12288 - DNA, 24 bp, Artificial Sequence
  synthetic circulating small noncoding RNA (sncRNA) 5' transfer RNA (tRNA) half
cccgggttcgattcccggccaatg

SEQ ID NO: 12289 - DNA, 31 bp, Artificial Sequence
  synthetic circulating small noncoding RNA (sncRNA) 5' transfer RNA (tRNA) half
caggggtcgcgagttcaaatctcgctggggc

SEQ ID NO: 12290 - DNA, 28 bp, Artificial Sequence
  synthetic circulating small noncoding RNA (sncRNA) 5' transfer RNA (tRNA) half
ggcgagcgtgatgaccactacactacgg

SEQ ID NO: 12291 - DNA, 23 bp, Artificial Sequence
  synthetic circulating small noncoding RNA (sncRNA) 5' transfer RNA (tRNA) half
tcgtataggggttagtactctgc

SEQ ID NO: 12292 - DNA, 19 bp, Artificial Sequence
  synthetic circulating small noncoding RNA (sncRNA) 5' transfer RNA (tRNA) half
ccgaatcctaaccactaga

SEQ ID NO: 12293 - DNA, 18 bp, Artificial Sequence
  synthetic circulating small noncoding RNA (sncRNA) 5' transfer RNA (tRNA) half
cagtcggtagagcatcag

SEQ ID NO: 12294 - DNA, 11 bp, Artificial Sequence
  synthetic circulating small noncoding RNA (sncRNA) 5' transfer RNA (tRNA) half
ggccgcggcgg

SEQ ID NO: 12295 - DNA, 29 bp, Artificial Sequence
  synthetic circulating small noncoding RNA (sncRNA) 5' transfer RNA (tRNA) half
cggttagctcagttggttagagcatggtg

SEQ ID NO: 12296 - DNA, 14 bp, Artificial Sequence
  synthetic circulating small noncoding RNA (sncRNA) 5' transfer RNA (tRNA) half
ccgcggcccgggtt

SEQ ID NO: 12297 - DNA, 36 bp, Artificial Sequence
  synthetic circulating small noncoding RNA (sncRNA) 5' transfer RNA (tRNA) half
cgcccaacgtggggctcgaacccacgaccctgagat

SEQ ID NO: 12298 - DNA, 24 bp, Artificial Sequence
  synthetic circulating small noncoding RNA (sncRNA) 5' transfer RNA (tRNA) half
gtgtgaggcgaacgtgataaccac

SEQ ID NO: 12299 - DNA, 19 bp, Artificial Sequence
  synthetic circulating small noncoding RNA (sncRNA) 5' transfer RNA (tRNA) half
tccctgttcgggcgcttgt

SEQ ID NO: 12300 - DNA, 16 bp, Artificial Sequence
  synthetic circulating small noncoding RNA (sncRNA) 5' transfer RNA (tRNA) half
acccggggcctcatac

SEQ ID NO: 12301 - DNA, 36 bp, Artificial Sequence
  synthetic circulating small noncoding RNA (sncRNA) 5' transfer RNA (tRNA) half
gcgtggcaggcgagaattctaccactgaaccaccaa

SEQ ID NO: 12302 - DNA, 9 bp, Artificial Sequence
  synthetic circulating small noncoding RNA (sncRNA) 5' transfer RNA (tRNA) half
cgggagacc

SEQ ID NO: 12303 - DNA, 18 bp, Artificial Sequence
  synthetic circulating small noncoding RNA (sncRNA) 5' transfer RNA (tRNA) half
tgcgttggccgggaatcg

SEQ ID NO: 12304 - DNA, 30 bp, Artificial Sequence
  synthetic circulating small noncoding RNA (sncRNA) 5' transfer RNA (tRNA) half
ggttcagtggtagaattctcgcctgccacg

SEQ ID NO: 12305 - DNA, 24 bp, Artificial Sequence
  synthetic circulating small noncoding RNA (sncRNA) 5' transfer RNA (tRNA) half
tggtctagcggttaggattcctgg

SEQ ID NO: 12306 - DNA, 15 bp, Artificial Sequence
  synthetic circulating small noncoding RNA (sncRNA) 5' transfer RNA (tRNA) half
gaccgcgtggcctaa

SEQ ID NO: 12307 - DNA, 37 bp, Artificial Sequence
  synthetic circulating small noncoding RNA (sncRNA) 5' transfer RNA (tRNA) half
cgagccagccaggagtcgaacctagaatcttctgatc

SEQ ID NO: 12308 - DNA, 33 bp, Artificial Sequence
  synthetic circulating small noncoding RNA (sncRNA) 5' transfer RNA (tRNA) half
cgaagatcacgggttcgaaccccgtccgtgcct

SEQ ID NO: 12309 - DNA, 6 bp, Artificial Sequence
  synthetic circulating small noncoding RNA (sncRNA) 5' transfer RNA (tRNA) half
cgcccg

SEQ ID NO: 12310 - DNA, 12 bp, Artificial Sequence
  synthetic circulating small noncoding RNA (sncRNA) 5' transfer RNA (tRNA) half
gcttccgctgcg

SEQ ID NO: 12311 - DNA, 43 bp, Artificial Sequence
  synthetic circulating small noncoding RNA (sncRNA) 5' transfer RNA (tRNA) half
gaggttgctgcggccacaacgcagagtactaaccactatacga

SEQ ID NO: 12312 - DNA, 20 bp, Artificial Sequence
  synthetic circulating small noncoding RNA (sncRNA) 5' transfer RNA (tRNA) half
aagtccaatgcgctatccat

SEQ ID NO: 12313 - DNA, 43 bp, Artificial Sequence
  synthetic circulating small noncoding RNA (sncRNA) 5' transfer RNA (tRNA) half
agtcggcaggattcgaacctgcgcggggagaccccaatggatt

SEQ ID NO: 12314 - DNA, 32 bp, Artificial Sequence
  synthetic circulating small noncoding RNA (sncRNA) 5' transfer RNA (tRNA) half
agattgagggttcgaatcccttcgtggttggt

SEQ ID NO: 12315 - DNA, 12 bp, Artificial Sequence
  synthetic circulating small noncoding RNA (sncRNA) 5' transfer RNA (tRNA) half
gctctacccctg

SEQ ID NO: 12316 - DNA, 15 bp, Artificial Sequence
  synthetic circulating small noncoding RNA (sncRNA) 5' transfer RNA (tRNA) half
agcgagcgctctacc

SEQ ID NO: 12317 - DNA, 14 bp, Artificial Sequence
  synthetic circulating small noncoding RNA (sncRNA) 5' transfer RNA (tRNA) half
tcccacatggtcta

SEQ ID NO: 12318 - DNA, 18 bp, Artificial Sequence
  synthetic circulating small noncoding RNA (sncRNA) 5' transfer RNA (tRNA) half
tcccctggaggcgtgggt

SEQ ID NO: 12319 - DNA, 21 bp, Artificial Sequence
  synthetic circulating small noncoding RNA (sncRNA) 5' transfer RNA (tRNA) half
aggatggccgagtggtctaag

SEQ ID NO: 12320 - DNA, 15 bp, Artificial Sequence
  synthetic circulating small noncoding RNA (sncRNA) 5' transfer RNA (tRNA) half
ctgagctacatcccc

SEQ ID NO: 12321 - DNA, 24 bp, Artificial Sequence
  synthetic circulating small noncoding RNA (sncRNA) 5' transfer RNA (tRNA) half
ggttagcactctggactttgaatc

SEQ ID NO: 12322 - DNA, 23 bp, Artificial Sequence
  synthetic circulating small noncoding RNA (sncRNA) 5' transfer RNA (tRNA) half
cttaaccactcggccacctcgtc

SEQ ID NO: 12323 - DNA, 23 bp, Artificial Sequence
  synthetic circulating small noncoding RNA (sncRNA) 5' transfer RNA (tRNA) half
gttcaaatctcggtggaacctac

SEQ ID NO: 12324 - DNA, 25 bp, Artificial Sequence
  synthetic circulating small noncoding RNA (sncRNA) 5' transfer RNA (tRNA) half
ggttatgggcccagcacgcttccgc

SEQ ID NO: 12325 - DNA, 20 bp, Artificial Sequence
  synthetic circulating small noncoding RNA (sncRNA) 5' transfer RNA (tRNA) half
ttgtgtcagaagtgggattc

SEQ ID NO: 12326 - DNA, 16 bp, Artificial Sequence
  synthetic circulating small noncoding RNA (sncRNA) 5' transfer RNA (tRNA) half
gctctaaccaactgag

SEQ ID NO: 12327 - DNA, 15 bp, Artificial Sequence
  synthetic circulating small noncoding RNA (sncRNA) 5' transfer RNA (tRNA) half
acaggcggggatact

SEQ ID NO: 12328 - DNA, 36 bp, Artificial Sequence
  synthetic circulating small noncoding RNA (sncRNA) 5' transfer RNA (tRNA) half
gccaaggtcgcgggttcgatccccgtacgggccaca

SEQ ID NO: 12329 - DNA, 24 bp, Artificial Sequence
  synthetic circulating small noncoding RNA (sncRNA) 5' transfer RNA (tRNA) half
ggtggtctagtggttaggattcgg

SEQ ID NO: 12330 - DNA, 29 bp, Artificial Sequence
  synthetic circulating small noncoding RNA (sncRNA) 5' transfer RNA (tRNA) half
cgcggcggtgagagcgccgaatcctaacc

SEQ ID NO: 12331 - DNA, 12 bp, Artificial Sequence
  synthetic circulating small noncoding RNA (sncRNA) 5' transfer RNA (tRNA) half
acctttcgggcg

SEQ ID NO: 12332 - DNA, 14 bp, Artificial Sequence
  synthetic circulating small noncoding RNA (sncRNA) 5' transfer RNA (tRNA) half
tctcttcgggggcg

SEQ ID NO: 12333 - DNA, 6 bp, Artificial Sequence
  synthetic circulating small noncoding RNA (sncRNA) 5' transfer RNA (tRNA) half
cggacg

SEQ ID NO: 12334 - DNA, 30 bp, Artificial Sequence
  synthetic circulating small noncoding RNA (sncRNA) 5' transfer RNA (tRNA) half
ggcaagaattctaccactgaaccaccaatg

SEQ ID NO: 12335 - DNA, 23 bp, Artificial Sequence
  synthetic circulating small noncoding RNA (sncRNA) 5' transfer RNA (tRNA) half
ggtctaggggtatgattctcgct

SEQ ID NO: 12336 - DNA, 12 bp, Artificial Sequence
  synthetic circulating small noncoding RNA (sncRNA) 5' transfer RNA (tRNA) half
gaggccccgggt

SEQ ID NO: 12337 - DNA, 28 bp, Artificial Sequence
  synthetic circulating small noncoding RNA (sncRNA) 5' transfer RNA (tRNA) half
cccggctagctcagtcggtagagcatga

SEQ ID NO: 12338 - DNA, 32 bp, Artificial Sequence
  synthetic circulating small noncoding RNA (sncRNA) 5' transfer RNA (tRNA) half
cttaggtcgctggttcgattccggctcgaagg

SEQ ID NO: 12339 - DNA, 19 bp, Artificial Sequence
  synthetic circulating small noncoding RNA (sncRNA) 5' transfer RNA (tRNA) half
aggattcgaacctgcgcgg

SEQ ID NO: 12340 - DNA, 18 bp, Artificial Sequence
  synthetic circulating small noncoding RNA (sncRNA) 5' transfer RNA (tRNA) half
agtggtagagcatttgac

SEQ ID NO: 12341 - DNA, 24 bp, Artificial Sequence
  synthetic circulating small noncoding RNA (sncRNA) 5' transfer RNA (tRNA) half
agtgcattggccgggaatcgaacc

SEQ ID NO: 12342 - DNA, 16 bp, Artificial Sequence
  synthetic circulating small noncoding RNA (sncRNA) 5' transfer RNA (tRNA) half
atgctctaccgactga

SEQ ID NO: 12343 - DNA, 16 bp, Artificial Sequence
  synthetic circulating small noncoding RNA (sncRNA) 5' transfer RNA (tRNA) half
ccagcgatccgagttc

SEQ ID NO: 12344 - DNA, 33 bp, Artificial Sequence
  synthetic circulating small noncoding RNA (sncRNA) 5' transfer RNA (tRNA) half
tcgccgtgatcgtatagtggttagtactctgcg

SEQ ID NO: 12345 - DNA, 33 bp, Artificial Sequence
  synthetic circulating small noncoding RNA (sncRNA) 5' transfer RNA (tRNA) half
ccccgcgcaggttcgaatcctgctcacagcgct

SEQ ID NO: 12346 - DNA, 26 bp, Artificial Sequence
  synthetic circulating small noncoding RNA (sncRNA) 5' transfer RNA (tRNA) half
gagattaagagtctcatgctctaccg

SEQ ID NO: 12347 - DNA, 16 bp, Artificial Sequence
  synthetic circulating small noncoding RNA (sncRNA) 5' transfer RNA (tRNA) half
tagtggtatgattctc

SEQ ID NO: 12348 - DNA, 19 bp, Artificial Sequence
  synthetic circulating small noncoding RNA (sncRNA) 5' transfer RNA (tRNA) half
accctggaccctcagatta

SEQ ID NO: 12349 - DNA, 18 bp, Artificial Sequence
  synthetic circulating small noncoding RNA (sncRNA) 5' transfer RNA (tRNA) half
gaacccccaatcttctga

SEQ ID NO: 12350 - DNA, 14 bp, Artificial Sequence
  synthetic circulating small noncoding RNA (sncRNA) 5' transfer RNA (tRNA) half
tccttaggtcgctg

SEQ ID NO: 12351 - DNA, 36 bp, Artificial Sequence
  synthetic circulating small noncoding RNA (sncRNA) 5' transfer RNA (tRNA) half
cccgaacagggacttgaaccctggaccctcagatta

SEQ ID NO: 12352 - DNA, 21 bp, Artificial Sequence
  synthetic circulating small noncoding RNA (sncRNA) 5' transfer RNA (tRNA) half
aaccctggaccctcagattaa

SEQ ID NO: 12353 - DNA, 23 bp, Artificial Sequence
  synthetic circulating small noncoding RNA (sncRNA) 5' transfer RNA (tRNA) half
tttccgtagtgtagtggtcatca

SEQ ID NO: 12354 - DNA, 14 bp, Artificial Sequence
  synthetic circulating small noncoding RNA (sncRNA) 5' transfer RNA (tRNA) half
atgaggccccgggt

SEQ ID NO: 12355 - DNA, 29 bp, Artificial Sequence
  synthetic circulating small noncoding RNA (sncRNA) 5' transfer RNA (tRNA) half
ccatagtgtagcggttatcacgtctgctt

SEQ ID NO: 12356 - DNA, 33 bp, Artificial Sequence
  synthetic circulating small noncoding RNA (sncRNA) 5' transfer RNA (tRNA) half
gggtttccgtagtgtagtggttatcacgctcgc

SEQ ID NO: 12357 - DNA, 13 bp, Artificial Sequence
  synthetic circulating small noncoding RNA (sncRNA) 5' transfer RNA (tRNA) half
aaggcgctgcgtt

SEQ ID NO: 12358 - DNA, 20 bp, Artificial Sequence
  synthetic circulating small noncoding RNA (sncRNA) 5' transfer RNA (tRNA) half
ggcgtccctgggtgggctcg

SEQ ID NO: 12359 - DNA, 18 bp, Artificial Sequence
  synthetic circulating small noncoding RNA (sncRNA) 5' transfer RNA (tRNA) half
ggttcgaactcaggacct

SEQ ID NO: 12360 - DNA, 22 bp, Artificial Sequence
  synthetic circulating small noncoding RNA (sncRNA) 5' transfer RNA (tRNA) half
gtggtcatcacgctcgcctcac

SEQ ID NO: 12361 - DNA, 23 bp, Artificial Sequence
  synthetic circulating small noncoding RNA (sncRNA) 5' transfer RNA (tRNA) half
ccggccaatgcactctctcactt

SEQ ID NO: 12362 - DNA, 26 bp, Artificial Sequence
  synthetic circulating small noncoding RNA (sncRNA) 5' transfer RNA (tRNA) half
atttgaactcggatcgctggattcag

SEQ ID NO: 12363 - DNA, 9 bp, Artificial Sequence
  synthetic circulating small noncoding RNA (sncRNA) 5' transfer RNA (tRNA) half
cgcggcccg

SEQ ID NO: 12364 - DNA, 30 bp, Artificial Sequence
  synthetic circulating small noncoding RNA (sncRNA) 5' transfer RNA (tRNA) half
gggaggcccgggttcgattcccggcccatg

SEQ ID NO: 12365 - DNA, 35 bp, Artificial Sequence
  synthetic circulating small noncoding RNA (sncRNA) 5' transfer RNA (tRNA) half
aaccgaagatcacgggttcgaaccccgtccgtgcc

SEQ ID NO: 12366 - DNA, 12 bp, Artificial Sequence
  synthetic circulating small noncoding RNA (sncRNA) 5' transfer RNA (tRNA) half
ttcgattcccgg

SEQ ID NO: 12367 - DNA, 17 bp, Artificial Sequence
  synthetic circulating small noncoding RNA (sncRNA) 5' transfer RNA (tRNA) half
tcgaacccacgcagaca

SEQ ID NO: 12368 - DNA, 36 bp, Artificial Sequence
  synthetic circulating small noncoding RNA (sncRNA) 5' transfer RNA (tRNA) half
atccttaggtcgctggttcgattccggctcgaagga

SEQ ID NO: 12369 - DNA, 12 bp, Artificial Sequence
  synthetic circulating small noncoding RNA (sncRNA) 5' transfer RNA (tRNA) half
ccgcggtcgact

SEQ ID NO: 12370 - DNA, 10 bp, Artificial Sequence
  synthetic circulating small noncoding RNA (sncRNA) 5' transfer RNA (tRNA) half
ctagccgggc

SEQ ID NO: 12371 - DNA, 16 bp, Artificial Sequence
  synthetic circulating small noncoding RNA (sncRNA) 5' transfer RNA (tRNA) half
taaccgctacactaca

SEQ ID NO: 12372 - DNA, 39 bp, Artificial Sequence
  synthetic circulating small noncoding RNA (sncRNA) 5' transfer RNA (tRNA) half
ttttcacccaggcggcccgggttcgactcccggtgtggg

SEQ ID NO: 12373 - DNA, 22 bp, Artificial Sequence
  synthetic circulating small noncoding RNA (sncRNA) 5' transfer RNA (tRNA) half
aaacttgggctcgtccgggatt

SEQ ID NO: 12374 - DNA, 26 bp, Artificial Sequence
  synthetic circulating small noncoding RNA (sncRNA) 5' transfer RNA (tRNA) half
gtcggtagagcatgagactcttaatc

SEQ ID NO: 12375 - DNA, 33 bp, Artificial Sequence
  synthetic circulating small noncoding RNA (sncRNA) 5' transfer RNA (tRNA) half
gagccaggtaggagtcgaacctacaatcttctg

SEQ ID NO: 12376 - DNA, 21 bp, Artificial Sequence
  synthetic circulating small noncoding RNA (sncRNA) 5' transfer RNA (tRNA) half
cgcagcgccttagaccgctcg

SEQ ID NO: 12377 - DNA, 34 bp, Artificial Sequence
  synthetic circulating small noncoding RNA (sncRNA) 5' transfer RNA (tRNA) half
cgggccgcctgggtgaaaaccaggaatcctaacc

SEQ ID NO: 12378 - DNA, 34 bp, Artificial Sequence
  synthetic circulating small noncoding RNA (sncRNA) 5' transfer RNA (tRNA) half
ctgaaggtcctgagttcgaacctcagagggggca

SEQ ID NO: 12379 - DNA, 19 bp, Artificial Sequence
  synthetic circulating small noncoding RNA (sncRNA) 5' transfer RNA (tRNA) half
ctagagaaggttattaggg

SEQ ID NO: 12380 - DNA, 23 bp, Artificial Sequence
  synthetic circulating small noncoding RNA (sncRNA) 5' transfer RNA (tRNA) half
tcgttggtctaggggtatgattc

SEQ ID NO: 12381 - DNA, 14 bp, Artificial Sequence
  synthetic circulating small noncoding RNA (sncRNA) 5' transfer RNA (tRNA) half
gtctagtggtatga

SEQ ID NO: 12382 - DNA, 12 bp, Artificial Sequence
  synthetic circulating small noncoding RNA (sncRNA) 5' transfer RNA (tRNA) half
ccgggacctctc

SEQ ID NO: 12383 - DNA, 21 bp, Artificial Sequence
  synthetic circulating small noncoding RNA (sncRNA) 5' transfer RNA (tRNA) half
gcaggattcgaacctgcgcgg

SEQ ID NO: 12384 - DNA, 14 bp, Artificial Sequence
  synthetic circulating small noncoding RNA (sncRNA) 5' transfer RNA (tRNA) half
aggggtcgcgagtt

SEQ ID NO: 12385 - DNA, 21 bp, Artificial Sequence
  synthetic circulating small noncoding RNA (sncRNA) 5' transfer RNA (tRNA) half
gtatgattctcgctttgggtg

SEQ ID NO: 12386 - DNA, 25 bp, Artificial Sequence
  synthetic circulating small noncoding RNA (sncRNA) 5' transfer RNA (tRNA) half
cgtcggggaatcgaaccccggtctc

SEQ ID NO: 12387 - DNA, 31 bp, Artificial Sequence
  synthetic circulating small noncoding RNA (sncRNA) 5' transfer RNA (tRNA) half
gcctccccgtcggggaatcgaaccccggtct

SEQ ID NO: 12388 - DNA, 14 bp, Artificial Sequence
  synthetic circulating small noncoding RNA (sncRNA) 5' transfer RNA (tRNA) half
cgagaattctacca

SEQ ID NO: 12389 - DNA, 17 bp, Artificial Sequence
  synthetic circulating small noncoding RNA (sncRNA) 5' transfer RNA (tRNA) half
ggatggccgagcggtct

SEQ ID NO: 12390 - DNA, 35 bp, Artificial Sequence
  synthetic circulating small noncoding RNA (sncRNA) 5' transfer RNA (tRNA) half
cggttaggattcctggttttcacccaggcggcccg

SEQ ID NO: 12391 - DNA, 19 bp, Artificial Sequence
  synthetic circulating small noncoding RNA (sncRNA) 5' transfer RNA (tRNA) half
tcaatggtagaattctcgc

SEQ ID NO: 12392 - DNA, 19 bp, Artificial Sequence
  synthetic circulating small noncoding RNA (sncRNA) 5' transfer RNA (tRNA) half
agcattggtggttcagtgg

SEQ ID NO: 12393 - DNA, 15 bp, Artificial Sequence
  synthetic circulating small noncoding RNA (sncRNA) 5' transfer RNA (tRNA) half
accgctcggccatcc

SEQ ID NO: 12394 - DNA, 7 bp, Artificial Sequence
  synthetic circulating small noncoding RNA (sncRNA) 5' transfer RNA (tRNA) half
acccggg

SEQ ID NO: 12395 - DNA, 16 bp, Artificial Sequence
  synthetic circulating small noncoding RNA (sncRNA) 5' transfer RNA (tRNA) half
gaaccaccaacctttc

SEQ ID NO: 12396 - DNA, 19 bp, Artificial Sequence
  synthetic circulating small noncoding RNA (sncRNA) 5' transfer RNA (tRNA) half
ctctcaccgccgcggcccg

SEQ ID NO: 12397 - DNA, 37 bp, Artificial Sequence
  synthetic circulating small noncoding RNA (sncRNA) 5' transfer RNA (tRNA) half
cgagccagccaggagtcgaacctggaatcttctgatc

SEQ ID NO: 12398 - DNA, 37 bp, Artificial Sequence
  synthetic circulating small noncoding RNA (sncRNA) 5' transfer RNA (tRNA) half
tctgccctctctgaggttcgaactcaggaccttcaga

SEQ ID NO: 12399 - DNA, 26 bp, Artificial Sequence
  synthetic circulating small noncoding RNA (sncRNA) 5' transfer RNA (tRNA) half
cctccccgtcggggaatcgaaccccg

SEQ ID NO: 12400 - DNA, 40 bp, Artificial Sequence
  synthetic circulating small noncoding RNA (sncRNA) 5' transfer RNA (tRNA) half
ggattaagagtcccatgctctaccgactgagctagccggg

SEQ ID NO: 12401 - DNA, 24 bp, Artificial Sequence
  synthetic circulating small noncoding RNA (sncRNA) 5' transfer RNA (tRNA) half
gcggcggtgagagcgccgaatcct

SEQ ID NO: 12402 - DNA, 28 bp, Artificial Sequence
  synthetic circulating small noncoding RNA (sncRNA) 5' transfer RNA (tRNA) half
tcctcgttagtatagtggtgagtatccc

SEQ ID NO: 12403 - DNA, 31 bp, Artificial Sequence
  synthetic circulating small noncoding RNA (sncRNA) 5' transfer RNA (tRNA) half
gccctctctgaggttcgaactcaggaccttc

SEQ ID NO: 12404 - DNA, 29 bp, Artificial Sequence
  synthetic circulating small noncoding RNA (sncRNA) 5' transfer RNA (tRNA) half
cccatggtgtaatggttagcactctggac

SEQ ID NO: 12405 - DNA, 6 bp, Artificial Sequence
  synthetic circulating small noncoding RNA (sncRNA) 5' transfer RNA (tRNA) half
cgccgg

SEQ ID NO: 12406 - DNA, 32 bp, Artificial Sequence
  synthetic circulating small noncoding RNA (sncRNA) 5' transfer RNA (tRNA) half
agtccagagtgctaaccattacaccatggaac

SEQ ID NO: 12407 - DNA, 26 bp, Artificial Sequence
  synthetic circulating small noncoding RNA (sncRNA) 5' transfer RNA (tRNA) half
tggtctggggtgcaggcttcaaacct

SEQ ID NO: 12408 - DNA, 19 bp, Artificial Sequence
  synthetic circulating small noncoding RNA (sncRNA) 5' transfer RNA (tRNA) half
ggtatgattctcgcttcgg

SEQ ID NO: 12409 - DNA, 11 bp, Artificial Sequence
  synthetic circulating small noncoding RNA (sncRNA) 5' transfer RNA (tRNA) half
gctaatccccc

SEQ ID NO: 12410 - DNA, 39 bp, Artificial Sequence
  synthetic circulating small noncoding RNA (sncRNA) 5' transfer RNA (tRNA) half
ctgccctctctgaggttcgaactcaggaccttcagatta

SEQ ID NO: 12411 - DNA, 19 bp, Artificial Sequence
  synthetic circulating small noncoding RNA (sncRNA) 5' transfer RNA (tRNA) half
aatggtagaattctcgcct

SEQ ID NO: 12412 - DNA, 43 bp, Artificial Sequence
  synthetic circulating small noncoding RNA (sncRNA) 5' transfer RNA (tRNA) half
tgggattaagagtcccatgctctaccgactgagctagccgggc

SEQ ID NO: 12413 - DNA, 14 bp, Artificial Sequence
  synthetic circulating small noncoding RNA (sncRNA) 5' transfer RNA (tRNA) half
tcgaaccggggacc

SEQ ID NO: 12414 - DNA, 15 bp, Artificial Sequence
  synthetic circulating small noncoding RNA (sncRNA) 5' transfer RNA (tRNA) half
gaacccgggacctct

SEQ ID NO: 12415 - DNA, 38 bp, Artificial Sequence
  synthetic circulating small noncoding RNA (sncRNA) 5' transfer RNA (tRNA) half
gtgagagcgccgaatcctaaccactagaccaccaggga

SEQ ID NO: 12416 - DNA, 31 bp, Artificial Sequence
  synthetic circulating small noncoding RNA (sncRNA) 5' transfer RNA (tRNA) half
gagaccggggttcgattccccgacggggaga

SEQ ID NO: 12417 - DNA, 16 bp, Artificial Sequence
  synthetic circulating small noncoding RNA (sncRNA) 5' transfer RNA (tRNA) half
tagcactctggactct

SEQ ID NO: 12418 - DNA, 36 bp, Artificial Sequence
  synthetic circulating small noncoding RNA (sncRNA) 5' transfer RNA (tRNA) half
agcgccgaatcctagccactagaccaccagggacgg

SEQ ID NO: 12419 - DNA, 16 bp, Artificial Sequence
  synthetic circulating small noncoding RNA (sncRNA) 5' transfer RNA (tRNA) half
gaaaccgggcggaaac

SEQ ID NO: 12420 - DNA, 28 bp, Artificial Sequence
  synthetic circulating small noncoding RNA (sncRNA) 5' transfer RNA (tRNA) half
tgatcctcagtggtctggggtgcaggct

SEQ ID NO: 12421 - DNA, 23 bp, Artificial Sequence
  synthetic circulating small noncoding RNA (sncRNA) 5' transfer RNA (tRNA) half
ccgacgaggatgggattcgaacc

SEQ ID NO: 12422 - DNA, 14 bp, Artificial Sequence
  synthetic circulating small noncoding RNA (sncRNA) 5' transfer RNA (tRNA) half
cgcccggctagctc

SEQ ID NO: 12423 - DNA, 33 bp, Artificial Sequence
  synthetic circulating small noncoding RNA (sncRNA) 5' transfer RNA (tRNA) half
tggtgtaatggttagcactctggactttgaatc

SEQ ID NO: 12424 - DNA, 17 bp, Artificial Sequence
  synthetic circulating small noncoding RNA (sncRNA) 5' transfer RNA (tRNA) half
agacgcgttatccattg

SEQ ID NO: 12425 - DNA, 13 bp, Artificial Sequence
  synthetic circulating small noncoding RNA (sncRNA) 5' transfer RNA (tRNA) half
cggttcgaatccg

SEQ ID NO: 12426 - DNA, 8 bp, Artificial Sequence
  synthetic circulating small noncoding RNA (sncRNA) 5' transfer RNA (tRNA) half
ggtctcgt

SEQ ID NO: 12427 - DNA, 12 bp, Artificial Sequence
  synthetic circulating small noncoding RNA (sncRNA) 5' transfer RNA (tRNA) half
ttccttcgagcc

SEQ ID NO: 12428 - DNA, 16 bp, Artificial Sequence
  synthetic circulating small noncoding RNA (sncRNA) 5' transfer RNA (tRNA) half
ctggtgtagtggtatc

SEQ ID NO: 12429 - DNA, 22 bp, Artificial Sequence
  synthetic circulating small noncoding RNA (sncRNA) 5' transfer RNA (tRNA) half
aaaggcaagtgcattggccggg

SEQ ID NO: 12430 - DNA, 17 bp, Artificial Sequence
  synthetic circulating small noncoding RNA (sncRNA) 5' transfer RNA (tRNA) half
cgcccgaacagggactt

SEQ ID NO: 12431 - DNA, 26 bp, Artificial Sequence
  synthetic circulating small noncoding RNA (sncRNA) 5' transfer RNA (tRNA) half
tgcagtcaaatgctctaccactgagc

SEQ ID NO: 12432 - DNA, 19 bp, Artificial Sequence
  synthetic circulating small noncoding RNA (sncRNA) 5' transfer RNA (tRNA) half
accgggcggaaacaaaagg

SEQ ID NO: 12433 - DNA, 21 bp, Artificial Sequence
  synthetic circulating small noncoding RNA (sncRNA) 5' transfer RNA (tRNA) half
ggttaggattcggcgctctca

SEQ ID NO: 12434 - DNA, 25 bp, Artificial Sequence
  synthetic circulating small noncoding RNA (sncRNA) 5' transfer RNA (tRNA) half
tgctctacccctgagctataccccc

SEQ ID NO: 12435 - DNA, 22 bp, Artificial Sequence
  synthetic circulating small noncoding RNA (sncRNA) 5' transfer RNA (tRNA) half
tggttcagtggtagaattctcg

SEQ ID NO: 12436 - DNA, 40 bp, Artificial Sequence
  synthetic circulating small noncoding RNA (sncRNA) 5' transfer RNA (tRNA) half
gtaaacaggagatcctgggttcaaatcccagcggggcctt

SEQ ID NO: 12437 - DNA, 35 bp, Artificial Sequence
  synthetic circulating small noncoding RNA (sncRNA) 5' transfer RNA (tRNA) half
gggaggcgagaattctaccattgaaccaccaatgc

SEQ ID NO: 12438 - DNA, 19 bp, Artificial Sequence
  synthetic circulating small noncoding RNA (sncRNA) 5' transfer RNA (tRNA) half
ctaagcgcccgaacaggga

SEQ ID NO: 12439 - DNA, 26 bp, Artificial Sequence
  synthetic circulating small noncoding RNA (sncRNA) 5' transfer RNA (tRNA) half
agtggttaggattcggcgctctcacc

SEQ ID NO: 12440 - DNA, 15 bp, Artificial Sequence
  synthetic circulating small noncoding RNA (sncRNA) 5' transfer RNA (tRNA) half
attcagagtccagag

SEQ ID NO: 12441 - DNA, 14 bp, Artificial Sequence
  synthetic circulating small noncoding RNA (sncRNA) 5' transfer RNA (tRNA) half
cgctatccattgcg

SEQ ID NO: 12442 - DNA, 13 bp, Artificial Sequence
  synthetic circulating small noncoding RNA (sncRNA) 5' transfer RNA (tRNA) half
cagtcaaatgctc

SEQ ID NO: 12443 - DNA, 21 bp, Artificial Sequence
  synthetic circulating small noncoding RNA (sncRNA) 5' transfer RNA (tRNA) half
cacgcgaaaggtccccggttc

SEQ ID NO: 12444 - DNA, 15 bp, Artificial Sequence
  synthetic circulating small noncoding RNA (sncRNA) 5' transfer RNA (tRNA) half
caccgccgcggcccg

SEQ ID NO: 12445 - DNA, 17 bp, Artificial Sequence
  synthetic circulating small noncoding RNA (sncRNA) 5' transfer RNA (tRNA) half
ccgcagcaacctcggtt

SEQ ID NO: 12446 - DNA, 18 bp, Artificial Sequence
  synthetic circulating small noncoding RNA (sncRNA) 5' transfer RNA (tRNA) half
aaccgaagatcgcgggtt

SEQ ID NO: 12447 - DNA, 17 bp, Artificial Sequence
  synthetic circulating small noncoding RNA (sncRNA) 5' transfer RNA (tRNA) half
gtggcccgtacggggat

SEQ ID NO: 12448 - DNA, 17 bp, Artificial Sequence
  synthetic circulating small noncoding RNA (sncRNA) 5' transfer RNA (tRNA) half
cgttgcgccacgaggcc

SEQ ID NO: 12449 - DNA, 29 bp, Artificial Sequence
  synthetic circulating small noncoding RNA (sncRNA) 5' transfer RNA (tRNA) half
gattccaggttcgactcctggctggctcg

SEQ ID NO: 12450 - DNA, 27 bp, Artificial Sequence
  synthetic circulating small noncoding RNA (sncRNA) 5' transfer RNA (tRNA) half
cagtcaaatgctctaccactgagctat

SEQ ID NO: 12451 - DNA, 43 bp, Artificial Sequence
  synthetic circulating small noncoding RNA (sncRNA) 5' transfer RNA (tRNA) half
cctgggtgaaaaccaggaatcctaaccgctagaccatgtggga

SEQ ID NO: 12452 - DNA, 9 bp, Artificial Sequence
  synthetic circulating small noncoding RNA (sncRNA) 5' transfer RNA (tRNA) half
ctctaccga

SEQ ID NO: 12453 - DNA, 18 bp, Artificial Sequence
  synthetic circulating small noncoding RNA (sncRNA) 5' transfer RNA (tRNA) half
cacgcgggaggcccgggt

SEQ ID NO: 12454 - DNA, 15 bp, Artificial Sequence
  synthetic circulating small noncoding RNA (sncRNA) 5' transfer RNA (tRNA) half
taggtcgctggttcg

SEQ ID NO: 12455 - DNA, 28 bp, Artificial Sequence
  synthetic circulating small noncoding RNA (sncRNA) 5' transfer RNA (tRNA) half
attccaggttcgactcctggctggctcg

SEQ ID NO: 12456 - DNA, 35 bp, Artificial Sequence
  synthetic circulating small noncoding RNA (sncRNA) 5' transfer RNA (tRNA) half
atgaggtcctgggttcgatccccagcatctccagg

SEQ ID NO: 12457 - DNA, 32 bp, Artificial Sequence
  synthetic circulating small noncoding RNA (sncRNA) 5' transfer RNA (tRNA) half
cttcgagccggattcgaaccagcgacctaagg

SEQ ID NO: 12458 - DNA, 14 bp, Artificial Sequence
  synthetic circulating small noncoding RNA (sncRNA) 5' transfer RNA (tRNA) half
aaccctcaatcttc

SEQ ID NO: 12459 - DNA, 23 bp, Artificial Sequence
  synthetic circulating small noncoding RNA (sncRNA) 5' transfer RNA (tRNA) half
ttagaccactcggccatcctgac

SEQ ID NO: 12460 - DNA, 42 bp, Artificial Sequence
  synthetic circulating small noncoding RNA (sncRNA) 5' transfer RNA (tRNA) half
gtgtggcccgtacggggatcgaacccgcgaccttggcgttat

SEQ ID NO: 12461 - DNA, 23 bp, Artificial Sequence
  synthetic circulating small noncoding RNA (sncRNA) 5' transfer RNA (tRNA) half
tctccccgtcggggaatcgaacc

SEQ ID NO: 12462 - DNA, 21 bp, Artificial Sequence
  synthetic circulating small noncoding RNA (sncRNA) 5' transfer RNA (tRNA) half
actcacgaccttcagattatg

SEQ ID NO: 12463 - DNA, 17 bp, Artificial Sequence
  synthetic circulating small noncoding RNA (sncRNA) 5' transfer RNA (tRNA) half
gacctgaacgcagcgcc

SEQ ID NO: 12464 - DNA, 24 bp, Artificial Sequence
  synthetic circulating small noncoding RNA (sncRNA) 5' transfer RNA (tRNA) half
gctctacccctgagctataccccc

SEQ ID NO: 12465 - DNA, 13 bp, Artificial Sequence
  synthetic circulating small noncoding RNA (sncRNA) 5' transfer RNA (tRNA) half
aacccgcaacctt

SEQ ID NO: 12466 - DNA, 38 bp, Artificial Sequence
  synthetic circulating small noncoding RNA (sncRNA) 5' transfer RNA (tRNA) half
cggaagcgtgctgggcccataacccagaggtcgatgga

SEQ ID NO: 12467 - DNA, 25 bp, Artificial Sequence
  synthetic circulating small noncoding RNA (sncRNA) 5' transfer RNA (tRNA) half
tccccgtcggggaattgaaccccgg

SEQ ID NO: 12468 - DNA, 22 bp, Artificial Sequence
  synthetic circulating small noncoding RNA (sncRNA) 5' transfer RNA (tRNA) half
cctccccgtcggggaattgaac

SEQ ID NO: 12469 - DNA, 15 bp, Artificial Sequence
  synthetic circulating small noncoding RNA (sncRNA) 5' transfer RNA (tRNA) half
atccgagtcacggca

SEQ ID NO: 12470 - DNA, 35 bp, Artificial Sequence
  synthetic circulating small noncoding RNA (sncRNA) 5' transfer RNA (tRNA) half
tgaccgggaatcgaacccgggccgcggcggtgaga

SEQ ID NO: 12471 - DNA, 15 bp, Artificial Sequence
  synthetic circulating small noncoding RNA (sncRNA) 5' transfer RNA (tRNA) half
gatggccgagcggtc

SEQ ID NO: 12472 - DNA, 21 bp, Artificial Sequence
  synthetic circulating small noncoding RNA (sncRNA) 5' transfer RNA (tRNA) half
gagttgtgtcagaagtgggat

SEQ ID NO: 12473 - DNA, 24 bp, Artificial Sequence
  synthetic circulating small noncoding RNA (sncRNA) 5' transfer RNA (tRNA) half
cagtcggtagagcatcagactttt

SEQ ID NO: 12474 - DNA, 11 bp, Artificial Sequence
  synthetic circulating small noncoding RNA (sncRNA) 5' transfer RNA (tRNA) half
agtcgaaccta

SEQ ID NO: 12475 - DNA, 9 bp, Artificial Sequence
  synthetic circulating small noncoding RNA (sncRNA) 5' transfer RNA (tRNA) half
ccgaacgcg

SEQ ID NO: 12476 - DNA, 13 bp, Artificial Sequence
  synthetic circulating small noncoding RNA (sncRNA) 5' transfer RNA (tRNA) half
agcaacctcggtt

SEQ ID NO: 12477 - DNA, 21 bp, Artificial Sequence
  synthetic circulating small noncoding RNA (sncRNA) 5' transfer RNA (tRNA) half
acgcagcgccttagaccgctc

SEQ ID NO: 12478 - DNA, 28 bp, Artificial Sequence
  synthetic circulating small noncoding RNA (sncRNA) 5' transfer RNA (tRNA) half
cctgaccgggaatcgaacccgggccgcg

SEQ ID NO: 12479 - DNA, 28 bp, Artificial Sequence
  synthetic circulating small noncoding RNA (sncRNA) 5' transfer RNA (tRNA) half
ttcgcgtgtgaggcgaacgtgataacca

SEQ ID NO: 12480 - DNA, 23 bp, Artificial Sequence
  synthetic circulating small noncoding RNA (sncRNA) 5' transfer RNA (tRNA) half
cgggttcgaaccccgtccgtgcc

SEQ ID NO: 12481 - DNA, 20 bp, Artificial Sequence
  synthetic circulating small noncoding RNA (sncRNA) 5' transfer RNA (tRNA) half
aaccattacaccatggaacc

SEQ ID NO: 12482 - DNA, 15 bp, Artificial Sequence
  synthetic circulating small noncoding RNA (sncRNA) 5' transfer RNA (tRNA) half
aaggtcgcgggttcg

SEQ ID NO: 12483 - DNA, 17 bp, Artificial Sequence
  synthetic circulating small noncoding RNA (sncRNA) 5' transfer RNA (tRNA) half
agtaaccacgaagggat

SEQ ID NO: 12484 - DNA, 20 bp, Artificial Sequence
  synthetic circulating small noncoding RNA (sncRNA) 5' transfer RNA (tRNA) half
agagcggaggactgtaggag

SEQ ID NO: 12485 - DNA, 36 bp, Artificial Sequence
  synthetic circulating small noncoding RNA (sncRNA) 5' transfer RNA (tRNA) half
tccagcgatccgagttcaaatctcggtggaacctgc

SEQ ID NO: 12486 - DNA, 27 bp, Artificial Sequence
  synthetic circulating small noncoding RNA (sncRNA) 5' transfer RNA (tRNA) half
atttgaactcggatcgctggattcaga

SEQ ID NO: 12487 - DNA, 17 bp, Artificial Sequence
  synthetic circulating small noncoding RNA (sncRNA) 5' transfer RNA (tRNA) half
ttcgagtccaacgcctt

SEQ ID NO: 12488 - DNA, 23 bp, Artificial Sequence
  synthetic circulating small noncoding RNA (sncRNA) 5' transfer RNA (tRNA) half
gctagctcagtcggtagagcatg

SEQ ID NO: 12489 - DNA, 23 bp, Artificial Sequence
  synthetic circulating small noncoding RNA (sncRNA) 5' transfer RNA (tRNA) half
ttagcgacagagtggttcaattc

SEQ ID NO: 12490 - DNA, 17 bp, Artificial Sequence
  synthetic circulating small noncoding RNA (sncRNA) 5' transfer RNA (tRNA) half
gtcctgccgcggtcgac

SEQ ID NO: 12491 - DNA, 22 bp, Artificial Sequence
  synthetic circulating small noncoding RNA (sncRNA) 5' transfer RNA (tRNA) half
aaaccgggcggaaacattactt

SEQ ID NO: 12492 - DNA, 27 bp, Artificial Sequence
  synthetic circulating small noncoding RNA (sncRNA) 5' transfer RNA (tRNA) half
agtctccccgtcggggaatcgaacccc

SEQ ID NO: 12493 - DNA, 28 bp, Artificial Sequence
  synthetic circulating small noncoding RNA (sncRNA) 5' transfer RNA (tRNA) half
accggggacctttcgcgtgtgaggcgaa

SEQ ID NO: 12494 - DNA, 22 bp, Artificial Sequence
  synthetic circulating small noncoding RNA (sncRNA) 5' transfer RNA (tRNA) half
agtctcatgctctaccaactga

SEQ ID NO: 12495 - DNA, 8 bp, Artificial Sequence
  synthetic circulating small noncoding RNA (sncRNA) 5' transfer RNA (tRNA) half
gacgcgct

SEQ ID NO: 12496 - DNA, 17 bp, Artificial Sequence
  synthetic circulating small noncoding RNA (sncRNA) 5' transfer RNA (tRNA) half
gtcaactgcttggaagg

SEQ ID NO: 12497 - DNA, 17 bp, Artificial Sequence
  synthetic circulating small noncoding RNA (sncRNA) 5' transfer RNA (tRNA) half
ggaagcgtgctgggccc

SEQ ID NO: 12498 - DNA, 19 bp, Artificial Sequence
  synthetic circulating small noncoding RNA (sncRNA) 5' transfer RNA (tRNA) half
tcagtggtagagcatttga

SEQ ID NO: 12499 - DNA, 21 bp, Artificial Sequence
  synthetic circulating small noncoding RNA (sncRNA) 5' transfer RNA (tRNA) half
ttccttcgagccggattcgaa

SEQ ID NO: 12500 - DNA, 15 bp, Artificial Sequence
  synthetic circulating small noncoding RNA (sncRNA) 5' transfer RNA (tRNA) half
cgcccccgaagagac

SEQ ID NO: 12501 - DNA, 17 bp, Artificial Sequence
  synthetic circulating small noncoding RNA (sncRNA) 5' transfer RNA (tRNA) half
cgagcccacccagggac

SEQ ID NO: 12502 - DNA, 25 bp, Artificial Sequence
  synthetic circulating small noncoding RNA (sncRNA) 5' transfer RNA (tRNA) half
acgacgaggatgggattcgaaccca

SEQ ID NO: 12503 - DNA, 17 bp, Artificial Sequence
  synthetic circulating small noncoding RNA (sncRNA) 5' transfer RNA (tRNA) half
aaaccaggaatcctaac

SEQ ID NO: 12504 - DNA, 27 bp, Artificial Sequence
  synthetic circulating small noncoding RNA (sncRNA) 5' transfer RNA (tRNA) half
gtggcgcagcggaagcgtgctgggccc

SEQ ID NO: 12505 - DNA, 20 bp, Artificial Sequence
  synthetic circulating small noncoding RNA (sncRNA) 5' transfer RNA (tRNA) half
atcaaacccgggcctcccgc

SEQ ID NO: 12506 - DNA, 17 bp, Artificial Sequence
  synthetic circulating small noncoding RNA (sncRNA) 5' transfer RNA (tRNA) half
gttcagtggtagaattc

SEQ ID NO: 12507 - DNA, 14 bp, Artificial Sequence
  synthetic circulating small noncoding RNA (sncRNA) 5' transfer RNA (tRNA) half
accggggacctctc

SEQ ID NO: 12508 - DNA, 23 bp, Artificial Sequence
  synthetic circulating small noncoding RNA (sncRNA) 5' transfer RNA (tRNA) half
atgtggcagcggtgggattcgaa

SEQ ID NO: 12509 - DNA, 42 bp, Artificial Sequence
  synthetic circulating small noncoding RNA (sncRNA) 5' transfer RNA (tRNA) half
cgtagtcggcaggattcgaacctgcgcggggaaaccccaatg

SEQ ID NO: 12510 - DNA, 10 bp, Artificial Sequence
  synthetic circulating small noncoding RNA (sncRNA) 5' transfer RNA (tRNA) half
cgtccgtgcc

SEQ ID NO: 12511 - DNA, 25 bp, Artificial Sequence
  synthetic circulating small noncoding RNA (sncRNA) 5' transfer RNA (tRNA) half
gccgaaacccgggatcgaaccaggg

SEQ ID NO: 12512 - DNA, 17 bp, Artificial Sequence
  synthetic circulating small noncoding RNA (sncRNA) 5' transfer RNA (tRNA) half
ggcgaatgtgataacca

SEQ ID NO: 12513 - DNA, 16 bp, Artificial Sequence
  synthetic circulating small noncoding RNA (sncRNA) 5' transfer RNA (tRNA) half
gtatgattctcgctta

SEQ ID NO: 12514 - DNA, 12 bp, Artificial Sequence
  synthetic circulating small noncoding RNA (sncRNA) 5' transfer RNA (tRNA) half
cggtagagcatg

SEQ ID NO: 12515 - DNA, 19 bp, Artificial Sequence
  synthetic circulating small noncoding RNA (sncRNA) 5' transfer RNA (tRNA) half
aggggttagtactctgcgt

SEQ ID NO: 12516 - DNA, 15 bp, Artificial Sequence
  synthetic circulating small noncoding RNA (sncRNA) 5' transfer RNA (tRNA) half
tcccatctgggtcgc

SEQ ID NO: 12517 - DNA, 19 bp, Artificial Sequence
  synthetic circulating small noncoding RNA (sncRNA) 5' transfer RNA (tRNA) half
tcaaatgctctaccactga

SEQ ID NO: 12518 - DNA, 14 bp, Artificial Sequence
  synthetic circulating small noncoding RNA (sncRNA) 5' transfer RNA (tRNA) half
ggacctctcgcacc

SEQ ID NO: 12519 - DNA, 14 bp, Artificial Sequence
  synthetic circulating small noncoding RNA (sncRNA) 5' transfer RNA (tRNA) half
gagcgttagactga

SEQ ID NO: 12520 - DNA, 15 bp, Artificial Sequence
  synthetic circulating small noncoding RNA (sncRNA) 5' transfer RNA (tRNA) half
tcacgtcggggtcag

SEQ ID NO: 12521 - DNA, 25 bp, Artificial Sequence
  synthetic circulating small noncoding RNA (sncRNA) 5' transfer RNA (tRNA) half
ccgaatcctaaccactagaccacca

SEQ ID NO: 12522 - DNA, 21 bp, Artificial Sequence
  synthetic circulating small noncoding RNA (sncRNA) 5' transfer RNA (tRNA) half
aatcccggacgagccctgtac

SEQ ID NO: 12523 - DNA, 16 bp, Artificial Sequence
  synthetic circulating small noncoding RNA (sncRNA) 5' transfer RNA (tRNA) half
gattcagagtccagag

SEQ ID NO: 12524 - DNA, 16 bp, Artificial Sequence
  synthetic circulating small noncoding RNA (sncRNA) 5' transfer RNA (tRNA) half
gcagcaacctcggttc

SEQ ID NO: 12525 - DNA, 13 bp, Artificial Sequence
  synthetic circulating small noncoding RNA (sncRNA) 5' transfer RNA (tRNA) half
agaggtcccgggt

SEQ ID NO: 12526 - DNA, 23 bp, Artificial Sequence
  synthetic circulating small noncoding RNA (sncRNA) 5' transfer RNA (tRNA) half
agcgaccacgaagggactcgaac

SEQ ID NO: 12527 - DNA, 14 bp, Artificial Sequence
  synthetic circulating small noncoding RNA (sncRNA) 5' transfer RNA (tRNA) half
aggggagactgcga

SEQ ID NO: 12528 - DNA, 13 bp, Artificial Sequence
  synthetic circulating small noncoding RNA (sncRNA) 5' transfer RNA (tRNA) half
atccgggcgctct

SEQ ID NO: 12529 - DNA, 15 bp, Artificial Sequence
  synthetic circulating small noncoding RNA (sncRNA) 5' transfer RNA (tRNA) half
ctaggggtatgattc

SEQ ID NO: 12530 - DNA, 35 bp, Artificial Sequence
  synthetic circulating small noncoding RNA (sncRNA) 5' transfer RNA (tRNA) half
cggatgatcctcagtggtctggggtgcaggcttca

SEQ ID NO: 12531 - DNA, 18 bp, Artificial Sequence
  synthetic circulating small noncoding RNA (sncRNA) 5' transfer RNA (tRNA) half
ctgaccgggaatcgaacc

SEQ ID NO: 12532 - DNA, 17 bp, Artificial Sequence
  synthetic circulating small noncoding RNA (sncRNA) 5' transfer RNA (tRNA) half
cgctggttcgactccgg

SEQ ID NO: 12533 - DNA, 18 bp, Artificial Sequence
  synthetic circulating small noncoding RNA (sncRNA) 5' transfer RNA (tRNA) half
acgccaaggtcgcgggtt

SEQ ID NO: 12534 - DNA, 16 bp, Artificial Sequence
  synthetic circulating small noncoding RNA (sncRNA) 5' transfer RNA (tRNA) half
atccccggcacctcca

SEQ ID NO: 12535 - DNA, 28 bp, Artificial Sequence
  synthetic circulating small noncoding RNA (sncRNA) 5' transfer RNA (tRNA) half
gagtactaaccactatacgatcacggcg

SEQ ID NO: 12536 - DNA, 20 bp, Artificial Sequence
  synthetic circulating small noncoding RNA (sncRNA) 5' transfer RNA (tRNA) half
ttctaccactgaaccaccaa

SEQ ID NO: 12537 - DNA, 12 bp, Artificial Sequence
  synthetic circulating small noncoding RNA (sncRNA) 5' transfer RNA (tRNA) half
gataaccgctac

SEQ ID NO: 12538 - DNA, 30 bp, Artificial Sequence
  synthetic circulating small noncoding RNA (sncRNA) 5' transfer RNA (tRNA) half
gaagattccaggttcgactcctggctggct

SEQ ID NO: 12539 - DNA, 36 bp, Artificial Sequence
  synthetic circulating small noncoding RNA (sncRNA) 5' transfer RNA (tRNA) half
aacccgggccgcggcggtgagagcgccgaatcctaa

SEQ ID NO: 12540 - DNA, 36 bp, Artificial Sequence
  synthetic circulating small noncoding RNA (sncRNA) 5' transfer RNA (tRNA) half
gccgtgactcggattcgaaccgaggttgctgcggcc

SEQ ID NO: 12541 - DNA, 31 bp, Artificial Sequence
  synthetic circulating small noncoding RNA (sncRNA) 5' transfer RNA (tRNA) half
tccgactccgccgggactcgaacccggaacc

SEQ ID NO: 12542 - DNA, 27 bp, Artificial Sequence
  synthetic circulating small noncoding RNA (sncRNA) 5' transfer RNA (tRNA) half
ttcagagtccagagtgctaaccattac

SEQ ID NO: 12543 - DNA, 20 bp, Artificial Sequence
  synthetic circulating small noncoding RNA (sncRNA) 5' transfer RNA (tRNA) half
ttcgattcccgggcggcgca

SEQ ID NO: 12544 - DNA, 12 bp, Artificial Sequence
  synthetic circulating small noncoding RNA (sncRNA) 5' transfer RNA (tRNA) half
ccgcgcaggttc

SEQ ID NO: 12545 - DNA, 27 bp, Artificial Sequence
  synthetic circulating small noncoding RNA (sncRNA) 5' transfer RNA (tRNA) half
gagccagccaggagtcgaacctggaat

SEQ ID NO: 12546 - DNA, 24 bp, Artificial Sequence
  synthetic circulating small noncoding RNA (sncRNA) 5' transfer RNA (tRNA) half
tatggtctagcggttaggattcct

SEQ ID NO: 12547 - DNA, 6 bp, Artificial Sequence
  synthetic circulating small noncoding RNA (sncRNA) 5' transfer RNA (tRNA) half
ttcccg

SEQ ID NO: 12548 - DNA, 17 bp, Artificial Sequence
  synthetic circulating small noncoding RNA (sncRNA) 5' transfer RNA (tRNA) half
acgaggatgggattcga

SEQ ID NO: 12549 - DNA, 22 bp, Artificial Sequence
  synthetic circulating small noncoding RNA (sncRNA) 5' transfer RNA (tRNA) half
ttcaaatcacgtcggggtcatc

SEQ ID NO: 12550 - DNA, 23 bp, Artificial Sequence
  synthetic circulating small noncoding RNA (sncRNA) 5' transfer RNA (tRNA) half
tgagcccggatagctcagtcggt

SEQ ID NO: 12551 - DNA, 6 bp, Artificial Sequence
  synthetic circulating small noncoding RNA (sncRNA) 5' transfer RNA (tRNA) half
tcggcc

SEQ ID NO: 12552 - DNA, 35 bp, Artificial Sequence
  synthetic circulating small noncoding RNA (sncRNA) 5' transfer RNA (tRNA) half
cgactctggtgggattcgaacccacaacctttgaa

SEQ ID NO: 12553 - DNA, 26 bp, Artificial Sequence
  synthetic circulating small noncoding RNA (sncRNA) 5' transfer RNA (tRNA) half
gagcgccgaatcctaaccactagacc

SEQ ID NO: 12554 - DNA, 17 bp, Artificial Sequence
  synthetic circulating small noncoding RNA (sncRNA) 5' transfer RNA (tRNA) half
tttccctgaccgggaat

SEQ ID NO: 12555 - DNA, 18 bp, Artificial Sequence
  synthetic circulating small noncoding RNA (sncRNA) 5' transfer RNA (tRNA) half
gccacagagaccggtgat

SEQ ID NO: 12556 - DNA, 19 bp, Artificial Sequence
  synthetic circulating small noncoding RNA (sncRNA) 5' transfer RNA (tRNA) half
tcaagtccctgttcgggcg

SEQ ID NO: 12557 - DNA, 34 bp, Artificial Sequence
  synthetic circulating small noncoding RNA (sncRNA) 5' transfer RNA (tRNA) half
ctgttcccataccgggagtcgaacccgggccgcc

SEQ ID NO: 12558 - DNA, 32 bp, Artificial Sequence
  synthetic circulating small noncoding RNA (sncRNA) 5' transfer RNA (tRNA) half
gccgaatcctagccactagaccaccagggacg

SEQ ID NO: 12559 - DNA, 35 bp, Artificial Sequence
  synthetic circulating small noncoding RNA (sncRNA) 5' transfer RNA (tRNA) half
atgagcccggatagctcagtcggtagagcatcaga

SEQ ID NO: 12560 - DNA, 16 bp, Artificial Sequence
  synthetic circulating small noncoding RNA (sncRNA) 5' transfer RNA (tRNA) half
acgcgaaaggtccccg

SEQ ID NO: 12561 - DNA, 21 bp, Artificial Sequence
  synthetic circulating small noncoding RNA (sncRNA) 5' transfer RNA (tRNA) half
actcctgacagcctcgccttt

SEQ ID NO: 12562 - DNA, 26 bp, Artificial Sequence
  synthetic circulating small noncoding RNA (sncRNA) 5' transfer RNA (tRNA) half
agtctcatgctctaccaactgagcta

SEQ ID NO: 12563 - DNA, 14 bp, Artificial Sequence
  synthetic circulating small noncoding RNA (sncRNA) 5' transfer RNA (tRNA) half
ccgaaaggttggtg

SEQ ID NO: 12564 - DNA, 26 bp, Artificial Sequence
  synthetic circulating small noncoding RNA (sncRNA) 5' transfer RNA (tRNA) half
gccgcggcggtgagagcgccgaatcc

SEQ ID NO: 12565 - DNA, 15 bp, Artificial Sequence
  synthetic circulating small noncoding RNA (sncRNA) 5' transfer RNA (tRNA) half
tagcggttaggattc

SEQ ID NO: 12566 - DNA, 18 bp, Artificial Sequence
  synthetic circulating small noncoding RNA (sncRNA) 5' transfer RNA (tRNA) half
caatgcagagtactaacc

SEQ ID NO: 12567 - DNA, 20 bp, Artificial Sequence
  synthetic circulating small noncoding RNA (sncRNA) 5' transfer RNA (tRNA) half
gccgggcgactgtcacttct

SEQ ID NO: 12568 - DNA, 31 bp, Artificial Sequence
  synthetic circulating small noncoding RNA (sncRNA) 5' transfer RNA (tRNA) half
gaagattccaggttcgactcctggctggctc

SEQ ID NO: 12569 - DNA, 17 bp, Artificial Sequence
  synthetic circulating small noncoding RNA (sncRNA) 5' transfer RNA (tRNA) half
gaatcctaaccgctaga

SEQ ID NO: 12570 - DNA, 16 bp, Artificial Sequence
  synthetic circulating small noncoding RNA (sncRNA) 5' transfer RNA (tRNA) half
agtctcttcgggggcg

SEQ ID NO: 12571 - DNA, 28 bp, Artificial Sequence
  synthetic circulating small noncoding RNA (sncRNA) 5' transfer RNA (tRNA) half
tgatgctctaccgactgagctatccggg

SEQ ID NO: 12572 - DNA, 33 bp, Artificial Sequence
  synthetic circulating small noncoding RNA (sncRNA) 5' transfer RNA (tRNA) half
aaaaccaggaatcctaaccgctagaccatatgg

SEQ ID NO: 12573 - DNA, 6 bp, Artificial Sequence
  synthetic circulating small noncoding RNA (sncRNA) 5' transfer RNA (tRNA) half
agcccc

SEQ ID NO: 12574 - DNA, 23 bp, Artificial Sequence
  synthetic circulating small noncoding RNA (sncRNA) 5' transfer RNA (tRNA) half
cgtgatcgtatagtggttagtac

SEQ ID NO: 12575 - DNA, 26 bp, Artificial Sequence
  synthetic circulating small noncoding RNA (sncRNA) 5' transfer RNA (tRNA) half
aacccgcgaccttggcgttattagca

SEQ ID NO: 12576 - DNA, 19 bp, Artificial Sequence
  synthetic circulating small noncoding RNA (sncRNA) 5' transfer RNA (tRNA) half
cccggacgagccccacttt

SEQ ID NO: 12577 - DNA, 10 bp, Artificial Sequence
  synthetic circulating small noncoding RNA (sncRNA) 5' transfer RNA (tRNA) half
agctagccgg

SEQ ID NO: 12578 - DNA, 22 bp, Artificial Sequence
  synthetic circulating small noncoding RNA (sncRNA) 5' transfer RNA (tRNA) half
ccaacctttcggttaacagccg

SEQ ID NO: 12579 - DNA, 37 bp, Artificial Sequence
  synthetic circulating small noncoding RNA (sncRNA) 5' transfer RNA (tRNA) half
ggttgccccctctgaggttcgaactcaggaccttcag

SEQ ID NO: 12580 - DNA, 21 bp, Artificial Sequence
  synthetic circulating small noncoding RNA (sncRNA) 5' transfer RNA (tRNA) half
gcccggatagctcagtcggta

SEQ ID NO: 12581 - DNA, 15 bp, Artificial Sequence
  synthetic circulating small noncoding RNA (sncRNA) 5' transfer RNA (tRNA) half
ggagatgccggggat

SEQ ID NO: 12582 - DNA, 25 bp, Artificial Sequence
  synthetic circulating small noncoding RNA (sncRNA) 5' transfer RNA (tRNA) half
tgagagcgccgaatcctaaccacta

SEQ ID NO: 12583 - DNA, 12 bp, Artificial Sequence
  synthetic circulating small noncoding RNA (sncRNA) 5' transfer RNA (tRNA) half
cgagccggattc

SEQ ID NO: 12584 - DNA, 23 bp, Artificial Sequence
  synthetic circulating small noncoding RNA (sncRNA) 5' transfer RNA (tRNA) half
ccgggaatcgaacccgggcctcc

SEQ ID NO: 12585 - DNA, 27 bp, Artificial Sequence
  synthetic circulating small noncoding RNA (sncRNA) 5' transfer RNA (tRNA) half
acaccgggagtcgaacccgggccgcct

SEQ ID NO: 12586 - DNA, 41 bp, Artificial Sequence
  synthetic circulating small noncoding RNA (sncRNA) 5' transfer RNA (tRNA) half
gtcggcaggattcgaacctgcgcggggaaaccccaatggat

SEQ ID NO: 12587 - DNA, 20 bp, Artificial Sequence
  synthetic circulating small noncoding RNA (sncRNA) 5' transfer RNA (tRNA) half
atcctgctcacagcgctagt

SEQ ID NO: 12588 - DNA, 28 bp, Artificial Sequence
  synthetic circulating small noncoding RNA (sncRNA) 5' transfer RNA (tRNA) half
gagtggggttcgaacccacgcagacata

SEQ ID NO: 12589 - DNA, 19 bp, Artificial Sequence
  synthetic circulating small noncoding RNA (sncRNA) 5' transfer RNA (tRNA) half
gcattggtggttcaatggt

SEQ ID NO: 12590 - DNA, 18 bp, Artificial Sequence
  synthetic circulating small noncoding RNA (sncRNA) 5' transfer RNA (tRNA) half
aggcggggatactaacca

SEQ ID NO: 12591 - DNA, 18 bp, Artificial Sequence
  synthetic circulating small noncoding RNA (sncRNA) 5' transfer RNA (tRNA) half
ctgtcacgcgggagaccg

SEQ ID NO: 12592 - DNA, 11 bp, Artificial Sequence
  synthetic circulating small noncoding RNA (sncRNA) 5' transfer RNA (tRNA) half
tcgaaccagcg

SEQ ID NO: 12593 - DNA, 13 bp, Artificial Sequence
  synthetic circulating small noncoding RNA (sncRNA) 5' transfer RNA (tRNA) half
tcggcgctctcac

SEQ ID NO: 12594 - DNA, 17 bp, Artificial Sequence
  synthetic circulating small noncoding RNA (sncRNA) 5' transfer RNA (tRNA) half
cgaacccgggcctcccg

SEQ ID NO: 12595 - DNA, 27 bp, Artificial Sequence
  synthetic circulating small noncoding RNA (sncRNA) 5' transfer RNA (tRNA) half
gggcctcccgcgtggcaggcgagaatt

SEQ ID NO: 12596 - DNA, 30 bp, Artificial Sequence
  synthetic circulating small noncoding RNA (sncRNA) 5' transfer RNA (tRNA) half
ctcatgctctacccactgagctatctgggc

SEQ ID NO: 12597 - DNA, 18 bp, Artificial Sequence
  synthetic circulating small noncoding RNA (sncRNA) 5' transfer RNA (tRNA) half
ggactcgaacccgcaacc

SEQ ID NO: 12598 - DNA, 26 bp, Artificial Sequence
  synthetic circulating small noncoding RNA (sncRNA) 5' transfer RNA (tRNA) half
gattaagagtcccatgctctaccgac

SEQ ID NO: 12599 - DNA, 26 bp, Artificial Sequence
  synthetic circulating small noncoding RNA (sncRNA) 5' transfer RNA (tRNA) half
cattggtggttcagtggtagaattct

SEQ ID NO: 12600 - DNA, 14 bp, Artificial Sequence
  synthetic circulating small noncoding RNA (sncRNA) 5' transfer RNA (tRNA) half
agtcgaacctggaa

SEQ ID NO: 12601 - DNA, 12 bp, Artificial Sequence
  synthetic circulating small noncoding RNA (sncRNA) 5' transfer RNA (tRNA) half
gcagcgagcagg

SEQ ID NO: 12602 - DNA, 22 bp, Artificial Sequence
  synthetic circulating small noncoding RNA (sncRNA) 5' transfer RNA (tRNA) half
gtttccctagtgtagtggttat

SEQ ID NO: 12603 - DNA, 41 bp, Artificial Sequence
  synthetic circulating small noncoding RNA (sncRNA) 5' transfer RNA (tRNA) half
aatggttagcactctggactctgaatccagcgatccgagtt

SEQ ID NO: 12604 - DNA, 34 bp, Artificial Sequence
  synthetic circulating small noncoding RNA (sncRNA) 5' transfer RNA (tRNA) half
aacaggagatcctgggttcgactcccagtggggc

SEQ ID NO: 12605 - DNA, 7 bp, Artificial Sequence
  synthetic circulating small noncoding RNA (sncRNA) 5' transfer RNA (tRNA) half
tgccgtg

SEQ ID NO: 12606 - DNA, 19 bp, Artificial Sequence
  synthetic circulating small noncoding RNA (sncRNA) 5' transfer RNA (tRNA) half
tccttaggtcgctggttcg

SEQ ID NO: 12607 - DNA, 28 bp, Artificial Sequence
  synthetic circulating small noncoding RNA (sncRNA) 5' transfer RNA (tRNA) half
accgaccacgaagggactcgaaccctca

SEQ ID NO: 12608 - DNA, 35 bp, Artificial Sequence
  synthetic circulating small noncoding RNA (sncRNA) 5' transfer RNA (tRNA) half
tagtttccgtagtgtagtggttatcacgttcgcct

SEQ ID NO: 12609 - DNA, 10 bp, Artificial Sequence
  synthetic circulating small noncoding RNA (sncRNA) 5' transfer RNA (tRNA) half
gcgagaattc

SEQ ID NO: 12610 - DNA, 14 bp, Artificial Sequence
  synthetic circulating small noncoding RNA (sncRNA) 5' transfer RNA (tRNA) half
gcgttatccattgc

SEQ ID NO: 12611 - DNA, 30 bp, Artificial Sequence
  synthetic circulating small noncoding RNA (sncRNA) 5' transfer RNA (tRNA) half
gagcgccaaatcctaaccactagaccacca

SEQ ID NO: 12612 - DNA, 16 bp, Artificial Sequence
  synthetic circulating small noncoding RNA (sncRNA) 5' transfer RNA (tRNA) half
tgaatccagcgacccg

SEQ ID NO: 12613 - DNA, 30 bp, Artificial Sequence
  synthetic circulating small noncoding RNA (sncRNA) 5' transfer RNA (tRNA) half
aggtcgcgggttcgatccccgtacgggcca

SEQ ID NO: 12614 - DNA, 27 bp, Artificial Sequence
  synthetic circulating small noncoding RNA (sncRNA) 5' transfer RNA (tRNA) half
aggcaccgctgggattcgaacccagga

SEQ ID NO: 12615 - DNA, 20 bp, Artificial Sequence
  synthetic circulating small noncoding RNA (sncRNA) 5' transfer RNA (tRNA) half
tcacgaacaggattcgaacc

SEQ ID NO: 12616 - DNA, 21 bp, Artificial Sequence
  synthetic circulating small noncoding RNA (sncRNA) 5' transfer RNA (tRNA) half
aggccaatgccttatccatta

SEQ ID NO: 12617 - DNA, 19 bp, Artificial Sequence
  synthetic circulating small noncoding RNA (sncRNA) 5' transfer RNA (tRNA) half
tggtcatcacgctcgcctc

SEQ ID NO: 12618 - DNA, 39 bp, Artificial Sequence
  synthetic circulating small noncoding RNA (sncRNA) 5' transfer RNA (tRNA) half
ttcgcgtgttaggcgaatgtgataaccactacactacgg

SEQ ID NO: 12619 - DNA, 22 bp, Artificial Sequence
  synthetic circulating small noncoding RNA (sncRNA) 5' transfer RNA (tRNA) half
gtggcaggcgagaattctacca

SEQ ID NO: 12620 - DNA, 33 bp, Artificial Sequence
  synthetic circulating small noncoding RNA (sncRNA) 5' transfer RNA (tRNA) half
gaccccgacgtgatttgaacacgcaaccttctg

SEQ ID NO: 12621 - DNA, 43 bp, Artificial Sequence
  synthetic circulating small noncoding RNA (sncRNA) 5' transfer RNA (tRNA) half
tgagggtccagggttcaagtccctgttcgggcgcttgtctttt

SEQ ID NO: 12622 - DNA, 25 bp, Artificial Sequence
  synthetic circulating small noncoding RNA (sncRNA) 5' transfer RNA (tRNA) half
tcaaatgctctaccactgagctata

SEQ ID NO: 12623 - DNA, 12 bp, Artificial Sequence
  synthetic circulating small noncoding RNA (sncRNA) 5' transfer RNA (tRNA) half
gcgctctcaccg

SEQ ID NO: 12624 - DNA, 30 bp, Artificial Sequence
  synthetic circulating small noncoding RNA (sncRNA) 5' transfer RNA (tRNA) half
cattggtagttcaatggtagaattctcgcc

SEQ ID NO: 12625 - DNA, 19 bp, Artificial Sequence
  synthetic circulating small noncoding RNA (sncRNA) 5' transfer RNA (tRNA) half
ggccggttagctcagttgg

SEQ ID NO: 12626 - DNA, 35 bp, Artificial Sequence
  synthetic circulating small noncoding RNA (sncRNA) 5' transfer RNA (tRNA) half
tcgccgtgatcgtatagtggttagtactctgcgtt

SEQ ID NO: 12627 - DNA, 19 bp, Artificial Sequence
  synthetic circulating small noncoding RNA (sncRNA) 5' transfer RNA (tRNA) half
attcttgcgacccgggttc

SEQ ID NO: 12628 - DNA, 17 bp, Artificial Sequence
  synthetic circulating small noncoding RNA (sncRNA) 5' transfer RNA (tRNA) half
ttcggttcccggccaat

SEQ ID NO: 12629 - DNA, 19 bp, Artificial Sequence
  synthetic circulating small noncoding RNA (sncRNA) 5' transfer RNA (tRNA) half
tcaaatctcggtgggacct

SEQ ID NO: 12630 - DNA, 13 bp, Artificial Sequence
  synthetic circulating small noncoding RNA (sncRNA) 5' transfer RNA (tRNA) half
acccgggatcgaa

SEQ ID NO: 12631 - DNA, 23 bp, Artificial Sequence
  synthetic circulating small noncoding RNA (sncRNA) 5' transfer RNA (tRNA) half
tggccgcagcaacctcggttcga

SEQ ID NO: 12632 - DNA, 15 bp, Artificial Sequence
  synthetic circulating small noncoding RNA (sncRNA) 5' transfer RNA (tRNA) half
ccttagaccgctcgg

SEQ ID NO: 12633 - DNA, 12 bp, Artificial Sequence
  synthetic circulating small noncoding RNA (sncRNA) 5' transfer RNA (tRNA) half
tcccccgaccgc

SEQ ID NO: 12634 - DNA, 17 bp, Artificial Sequence
  synthetic circulating small noncoding RNA (sncRNA) 5' transfer RNA (tRNA) half
ggattcagagtccagag

SEQ ID NO: 12635 - DNA, 33 bp, Artificial Sequence
  synthetic circulating small noncoding RNA (sncRNA) 5' transfer RNA (tRNA) half
tggttaggattcggcgctctcaccgccgcggcc

SEQ ID NO: 12636 - DNA, 11 bp, Artificial Sequence
  synthetic circulating small noncoding RNA (sncRNA) 5' transfer RNA (tRNA) half
cgggttcgact

SEQ ID NO: 12637 - DNA, 16 bp, Artificial Sequence
  synthetic circulating small noncoding RNA (sncRNA) 5' transfer RNA (tRNA) half
cgagccccagtggaac

SEQ ID NO: 12638 - DNA, 15 bp, Artificial Sequence
  synthetic circulating small noncoding RNA (sncRNA) 5' transfer RNA (tRNA) half
atgaggccccgggtt

SEQ ID NO: 12639 - DNA, 14 bp, Artificial Sequence
  synthetic circulating small noncoding RNA (sncRNA) 5' transfer RNA (tRNA) half
agtctcttcggggg

SEQ ID NO: 12640 - DNA, 44 bp, Artificial Sequence
  synthetic circulating small noncoding RNA (sncRNA) 5' transfer RNA (tRNA) half
gcgccgctggtgtagtggtatcatgcaagattcccattcttgcg

SEQ ID NO: 12641 - DNA, 15 bp, Artificial Sequence
  synthetic circulating small noncoding RNA (sncRNA) 5' transfer RNA (tRNA) half
caaagtccagagtgc

SEQ ID NO: 12642 - DNA, 19 bp, Artificial Sequence
  synthetic circulating small noncoding RNA (sncRNA) 5' transfer RNA (tRNA) half
agtcggcaggattcgaacc

SEQ ID NO: 12643 - DNA, 21 bp, Artificial Sequence
  synthetic circulating small noncoding RNA (sncRNA) 5' transfer RNA (tRNA) half
catcgacctctgggttatggg

SEQ ID NO: 12644 - DNA, 34 bp, Artificial Sequence
  synthetic circulating small noncoding RNA (sncRNA) 5' transfer RNA (tRNA) half
gagcattggtggttcagtggtagaattctcgcct

SEQ ID NO: 12645 - DNA, 11 bp, Artificial Sequence
  synthetic circulating small noncoding RNA (sncRNA) 5' transfer RNA (tRNA) half
gcggggatact

SEQ ID NO: 12646 - DNA, 28 bp, Artificial Sequence
  synthetic circulating small noncoding RNA (sncRNA) 5' transfer RNA (tRNA) half
cgttggtctaggggtatgattctcgctt

SEQ ID NO: 12647 - DNA, 24 bp, Artificial Sequence
  synthetic circulating small noncoding RNA (sncRNA) 5' transfer RNA (tRNA) half
tcccatatggtctagcggttagga

SEQ ID NO: 12648 - DNA, 30 bp, Artificial Sequence
  synthetic circulating small noncoding RNA (sncRNA) 5' transfer RNA (tRNA) half
atatggtctagcggttaggattcctggttt

SEQ ID NO: 12649 - DNA, 38 bp, Artificial Sequence
  synthetic circulating small noncoding RNA (sncRNA) 5' transfer RNA (tRNA) half
acccgggccgcctgggtgaaaaccaggaatcctaaccg

SEQ ID NO: 12650 - DNA, 7 bp, Artificial Sequence
  synthetic circulating small noncoding RNA (sncRNA) 5' transfer RNA (tRNA) half
atccccg

SEQ ID NO: 12651 - DNA, 18 bp, Artificial Sequence
  synthetic circulating small noncoding RNA (sncRNA) 5' transfer RNA (tRNA) half
agtcgaacctggaatctt

SEQ ID NO: 12652 - DNA, 19 bp, Artificial Sequence
  synthetic circulating small noncoding RNA (sncRNA) 5' transfer RNA (tRNA) half
gttcgattccggctcgaag

SEQ ID NO: 12653 - DNA, 25 bp, Artificial Sequence
  synthetic circulating small noncoding RNA (sncRNA) 5' transfer RNA (tRNA) half
cgaatcctaaccactagaccaccag

SEQ ID NO: 12654 - DNA, 12 bp, Artificial Sequence
  synthetic circulating small noncoding RNA (sncRNA) 5' transfer RNA (tRNA) half
cgctcggccatc

SEQ ID NO: 12655 - DNA, 11 bp, Artificial Sequence
  synthetic circulating small noncoding RNA (sncRNA) 5' transfer RNA (tRNA) half
gtcccaccgag

SEQ ID NO: 12656 - DNA, 32 bp, Artificial Sequence
  synthetic circulating small noncoding RNA (sncRNA) 5' transfer RNA (tRNA) half
agggattgtgggttcgagtcccacctggggta

SEQ ID NO: 12657 - DNA, 20 bp, Artificial Sequence
  synthetic circulating small noncoding RNA (sncRNA) 5' transfer RNA (tRNA) half
cttccctgaccgggaatcga

SEQ ID NO: 12658 - DNA, 31 bp, Artificial Sequence
  synthetic circulating small noncoding RNA (sncRNA) 5' transfer RNA (tRNA) half
tgtaatggttagcactctggactctgaatcc

SEQ ID NO: 12659 - DNA, 13 bp, Artificial Sequence
  synthetic circulating small noncoding RNA (sncRNA) 5' transfer RNA (tRNA) half
ggccgcggcggtg

SEQ ID NO: 12660 - DNA, 16 bp, Artificial Sequence
  synthetic circulating small noncoding RNA (sncRNA) 5' transfer RNA (tRNA) half
gaacccggggcctcat

SEQ ID NO: 12661 - DNA, 24 bp, Artificial Sequence
  synthetic circulating small noncoding RNA (sncRNA) 5' transfer RNA (tRNA) half
aaaaccaggaatcctaaccgctag

SEQ ID NO: 12662 - DNA, 11 bp, Artificial Sequence
  synthetic circulating small noncoding RNA (sncRNA) 5' transfer RNA (tRNA) half
gcagagtacta

SEQ ID NO: 12663 - DNA, 26 bp, Artificial Sequence
  synthetic circulating small noncoding RNA (sncRNA) 5' transfer RNA (tRNA) half
gcattggtggttcaatggtagaattc

SEQ ID NO: 12664 - DNA, 37 bp, Artificial Sequence
  synthetic circulating small noncoding RNA (sncRNA) 5' transfer RNA (tRNA) half
ttgtgtcagaagtgggattcgaacccacgcctccatt

SEQ ID NO: 12665 - DNA, 15 bp, Artificial Sequence
  synthetic circulating small noncoding RNA (sncRNA) 5' transfer RNA (tRNA) half
accgctagaccatgt

SEQ ID NO: 12666 - DNA, 29 bp, Artificial Sequence
  synthetic circulating small noncoding RNA (sncRNA) 5' transfer RNA (tRNA) half
tgctctaccgactgagctatccgggctct

SEQ ID NO: 12667 - DNA, 11 bp, Artificial Sequence
  synthetic circulating small noncoding RNA (sncRNA) 5' transfer RNA (tRNA) half
cccgtcgggga

SEQ ID NO: 12668 - DNA, 20 bp, Artificial Sequence
  synthetic circulating small noncoding RNA (sncRNA) 5' transfer RNA (tRNA) half
actgccgtcacgaacaggat

SEQ ID NO: 12669 - DNA, 22 bp, Artificial Sequence
  synthetic circulating small noncoding RNA (sncRNA) 5' transfer RNA (tRNA) half
cggtctaaggcgctgcgttcag

SEQ ID NO: 12670 - DNA, 38 bp, Artificial Sequence
  synthetic circulating small noncoding RNA (sncRNA) 5' transfer RNA (tRNA) half
gaactcggatcgctggattcaaagtccagagtgctaac

SEQ ID NO: 12671 - DNA, 25 bp, Artificial Sequence
  synthetic circulating small noncoding RNA (sncRNA) 5' transfer RNA (tRNA) half
actggtagcgtggccgagcggtcta

SEQ ID NO: 12672 - DNA, 12 bp, Artificial Sequence
  synthetic circulating small noncoding RNA (sncRNA) 5' transfer RNA (tRNA) half
agcggtctaagg

SEQ ID NO: 12673 - DNA, 14 bp, Artificial Sequence
  synthetic circulating small noncoding RNA (sncRNA) 5' transfer RNA (tRNA) half
gcccggatgatcct

SEQ ID NO: 12674 - DNA, 12 bp, Artificial Sequence
  synthetic circulating small noncoding RNA (sncRNA) 5' transfer RNA (tRNA) half
aacccgcaacct

SEQ ID NO: 12675 - DNA, 16 bp, Artificial Sequence
  synthetic circulating small noncoding RNA (sncRNA) 5' transfer RNA (tRNA) half
cgctctaccaactgag

SEQ ID NO: 12676 - DNA, 40 bp, Artificial Sequence
  synthetic circulating small noncoding RNA (sncRNA) 5' transfer RNA (tRNA) half
gagtcgaacccgggccgcctgggtgaaaaccaggaatcct

SEQ ID NO: 12677 - DNA, 7 bp, Artificial Sequence
  synthetic circulating small noncoding RNA (sncRNA) 5' transfer RNA (tRNA) half
cgcgggt

SEQ ID NO: 12678 - DNA, 27 bp, Artificial Sequence
  synthetic circulating small noncoding RNA (sncRNA) 5' transfer RNA (tRNA) half
ctgcttggaaggcagctatgctcacca

SEQ ID NO: 12679 - DNA, 16 bp, Artificial Sequence
  synthetic circulating small noncoding RNA (sncRNA) 5' transfer RNA (tRNA) half
aggaatcctaaccgct

SEQ ID NO: 12680 - DNA, 15 bp, Artificial Sequence
  synthetic circulating small noncoding RNA (sncRNA) 5' transfer RNA (tRNA) half
cacgcgaaaggtccc

SEQ ID NO: 12681 - DNA, 25 bp, Artificial Sequence
  synthetic circulating small noncoding RNA (sncRNA) 5' transfer RNA (tRNA) half
gatcacggcgagctaccagggacct

SEQ ID NO: 12682 - DNA, 8 bp, Artificial Sequence
  synthetic circulating small noncoding RNA (sncRNA) 5' transfer RNA (tRNA) half
cgccgcgg

SEQ ID NO: 12683 - DNA, 6 bp, Artificial Sequence
  synthetic circulating small noncoding RNA (sncRNA) 5' transfer RNA (tRNA) half
ccgtcg

SEQ ID NO: 12684 - DNA, 15 bp, Artificial Sequence
  synthetic circulating small noncoding RNA (sncRNA) 5' transfer RNA (tRNA) half
cgactcccggtatgg

SEQ ID NO: 12685 - DNA, 16 bp, Artificial Sequence
  synthetic circulating small noncoding RNA (sncRNA) 5' transfer RNA (tRNA) half
ccagaggtcgatggat

SEQ ID NO: 12686 - DNA, 21 bp, Artificial Sequence
  synthetic circulating small noncoding RNA (sncRNA) 5' transfer RNA (tRNA) half
aggcgaatgtgataaccacta

SEQ ID NO: 12687 - DNA, 24 bp, Artificial Sequence
  synthetic circulating small noncoding RNA (sncRNA) 5' transfer RNA (tRNA) half
ctctaccgactgagctagccgggc

SEQ ID NO: 12688 - DNA, 23 bp, Artificial Sequence
  synthetic circulating small noncoding RNA (sncRNA) 5' transfer RNA (tRNA) half
cttaaccactcggccatcgctgc

SEQ ID NO: 12689 - DNA, 33 bp, Artificial Sequence
  synthetic circulating small noncoding RNA (sncRNA) 5' transfer RNA (tRNA) half
gccagggattgtgggttcgagtcccatctgggg

SEQ ID NO: 12690 - DNA, 20 bp, Artificial Sequence
  synthetic circulating small noncoding RNA (sncRNA) 5' transfer RNA (tRNA) half
gagagcgccgaatcctaacc

SEQ ID NO: 12691 - DNA, 32 bp, Artificial Sequence
  synthetic circulating small noncoding RNA (sncRNA) 5' transfer RNA (tRNA) half
gccctatagctcaggggttagagcactggtct

SEQ ID NO: 12692 - DNA, 14 bp, Artificial Sequence
  synthetic circulating small noncoding RNA (sncRNA) 5' transfer RNA (tRNA) half
ctgaaccaccaatg

SEQ ID NO: 12693 - DNA, 25 bp, Artificial Sequence
  synthetic circulating small noncoding RNA (sncRNA) 5' transfer RNA (tRNA) half
gttcgaactcaggaccttcagatta

SEQ ID NO: 12694 - DNA, 20 bp, Artificial Sequence
  synthetic circulating small noncoding RNA (sncRNA) 5' transfer RNA (tRNA) half
aaagtagggctcgtccggga

SEQ ID NO: 12695 - DNA, 20 bp, Artificial Sequence
  synthetic circulating small noncoding RNA (sncRNA) 5' transfer RNA (tRNA) half
catgctctaccgactgagct

SEQ ID NO: 12696 - DNA, 24 bp, Artificial Sequence
  synthetic circulating small noncoding RNA (sncRNA) 5' transfer RNA (tRNA) half
gcttagttggttaaagcgcctgtc

SEQ ID NO: 12697 - DNA, 26 bp, Artificial Sequence
  synthetic circulating small noncoding RNA (sncRNA) 5' transfer RNA (tRNA) half
gcccgtacggggatcgaacccgcgac

SEQ ID NO: 12698 - DNA, 20 bp, Artificial Sequence
  synthetic circulating small noncoding RNA (sncRNA) 5' transfer RNA (tRNA) half
cgccaaatcctaaccactag

SEQ ID NO: 12699 - DNA, 25 bp, Artificial Sequence
  synthetic circulating small noncoding RNA (sncRNA) 5' transfer RNA (tRNA) half
gcggaagcgtgctgggcccataacc

SEQ ID NO: 12700 - DNA, 20 bp, Artificial Sequence
  synthetic circulating small noncoding RNA (sncRNA) 5' transfer RNA (tRNA) half
gtgattcgaacacgcagcct

SEQ ID NO: 12701 - DNA, 21 bp, Artificial Sequence
  synthetic circulating small noncoding RNA (sncRNA) 5' transfer RNA (tRNA) half
ataaccactacactacggaaa

SEQ ID NO: 12702 - DNA, 40 bp, Artificial Sequence
  synthetic circulating small noncoding RNA (sncRNA) 5' transfer RNA (tRNA) half
gaactcggatcgctggattcagagtccagagtgctaacca

SEQ ID NO: 12703 - DNA, 22 bp, Artificial Sequence
  synthetic circulating small noncoding RNA (sncRNA) 5' transfer RNA (tRNA) half
agtcccacgctctaccaactga

SEQ ID NO: 12704 - DNA, 39 bp, Artificial Sequence
  synthetic circulating small noncoding RNA (sncRNA) 5' transfer RNA (tRNA) half
acccacgaccctgggattaagagtcccatgctctaccga

SEQ ID NO: 12705 - DNA, 33 bp, Artificial Sequence
  synthetic circulating small noncoding RNA (sncRNA) 5' transfer RNA (tRNA) half
acaacgcagagtactaaccactatacgatcacg

SEQ ID NO: 12706 - DNA, 24 bp, Artificial Sequence
  synthetic circulating small noncoding RNA (sncRNA) 5' transfer RNA (tRNA) half
cagggttcaagtccctgttcgggc

SEQ ID NO: 12707 - DNA, 8 bp, Artificial Sequence
  synthetic circulating small noncoding RNA (sncRNA) 5' transfer RNA (tRNA) half
aaccgggc

SEQ ID NO: 12708 - DNA, 14 bp, Artificial Sequence
  synthetic circulating small noncoding RNA (sncRNA) 5' transfer RNA (tRNA) half
tcgattcccgggcg

SEQ ID NO: 12709 - DNA, 14 bp, Artificial Sequence
  synthetic circulating small noncoding RNA (sncRNA) 5' transfer RNA (tRNA) half
caggttcgaatcct

SEQ ID NO: 12710 - DNA, 25 bp, Artificial Sequence
  synthetic circulating small noncoding RNA (sncRNA) 5' transfer RNA (tRNA) half
gaatcctaaccactagaccaccagg

SEQ ID NO: 12711 - DNA, 17 bp, Artificial Sequence
  synthetic circulating small noncoding RNA (sncRNA) 5' transfer RNA (tRNA) half
gcgagaggtcccgggtt

SEQ ID NO: 12712 - DNA, 26 bp, Artificial Sequence
  synthetic circulating small noncoding RNA (sncRNA) 5' transfer RNA (tRNA) half
tgggttcgatccccagcatctccagg

SEQ ID NO: 12713 - DNA, 27 bp, Artificial Sequence
  synthetic circulating small noncoding RNA (sncRNA) 5' transfer RNA (tRNA) half
gacgaaggtgggattcgaacccacgcg

SEQ ID NO: 12714 - DNA, 30 bp, Artificial Sequence
  synthetic circulating small noncoding RNA (sncRNA) 5' transfer RNA (tRNA) half
cgcagcgccttagaccgctcggccatcctg

SEQ ID NO: 12715 - DNA, 41 bp, Artificial Sequence
  synthetic circulating small noncoding RNA (sncRNA) 5' transfer RNA (tRNA) half
cgcctccccgtcggggaatcgaaccccggtctcccgcgtga

SEQ ID NO: 12716 - DNA, 17 bp, Artificial Sequence
  synthetic circulating small noncoding RNA (sncRNA) 5' transfer RNA (tRNA) half
ggttcgactccggctcg

SEQ ID NO: 12717 - DNA, 14 bp, Artificial Sequence
  synthetic circulating small noncoding RNA (sncRNA) 5' transfer RNA (tRNA) half
ggaagcgtgctggg

SEQ ID NO: 12718 - DNA, 43 bp, Artificial Sequence
  synthetic circulating small noncoding RNA (sncRNA) 5' transfer RNA (tRNA) half
ctgttcccataccgggagtcgaacccgggccgcctgggtgaaa

SEQ ID NO: 12719 - DNA, 34 bp, Artificial Sequence
  synthetic circulating small noncoding RNA (sncRNA) 5' transfer RNA (tRNA) half
cagcgatccgagttcaaatctcggtggaacctgc

SEQ ID NO: 12720 - DNA, 41 bp, Artificial Sequence
  synthetic circulating small noncoding RNA (sncRNA) 5' transfer RNA (tRNA) half
ggttgccccctctgaggttcgaactcaggaccttcagatta

SEQ ID NO: 12721 - DNA, 33 bp, Artificial Sequence
  synthetic circulating small noncoding RNA (sncRNA) 5' transfer RNA (tRNA) half
agggcatgggtggttcagtggtagaattctcgc

SEQ ID NO: 12722 - DNA, 24 bp, Artificial Sequence
  synthetic circulating small noncoding RNA (sncRNA) 5' transfer RNA (tRNA) half
cagaaggtcctgggttcgagcccc

SEQ ID NO: 12723 - DNA, 23 bp, Artificial Sequence
  synthetic circulating small noncoding RNA (sncRNA) 5' transfer RNA (tRNA) half
tccgcccggtttcgaaccgggga

SEQ ID NO: 12724 - DNA, 15 bp, Artificial Sequence
  synthetic circulating small noncoding RNA (sncRNA) 5' transfer RNA (tRNA) half
ccaatgcgctatcca

SEQ ID NO: 12725 - DNA, 13 bp, Artificial Sequence
  synthetic circulating small noncoding RNA (sncRNA) 5' transfer RNA (tRNA) half
acgaggatgggat

SEQ ID NO: 12726 - DNA, 32 bp, Artificial Sequence
  synthetic circulating small noncoding RNA (sncRNA) 5' transfer RNA (tRNA) half
tgatgctctaccgactgagctatccgggctct

SEQ ID NO: 12727 - DNA, 17 bp, Artificial Sequence
  synthetic circulating small noncoding RNA (sncRNA) 5' transfer RNA (tRNA) half
tcgattcccggcccatg

SEQ ID NO: 12728 - DNA, 7 bp, Artificial Sequence
  synthetic circulating small noncoding RNA (sncRNA) 5' transfer RNA (tRNA) half
ggacctt

SEQ ID NO: 12729 - DNA, 35 bp, Artificial Sequence
  synthetic circulating small noncoding RNA (sncRNA) 5' transfer RNA (tRNA) half
ctgggtgaaaaccaggaatcctaaccgctagacca

SEQ ID NO: 12730 - DNA, 25 bp, Artificial Sequence
  synthetic circulating small noncoding RNA (sncRNA) 5' transfer RNA (tRNA) half
aaggtccccggttcgaaaccgggcg

SEQ ID NO: 12731 - DNA, 18 bp, Artificial Sequence
  synthetic circulating small noncoding RNA (sncRNA) 5' transfer RNA (tRNA) half
ttccttcgagccggattc

SEQ ID NO: 12732 - DNA, 39 bp, Artificial Sequence
  synthetic circulating small noncoding RNA (sncRNA) 5' transfer RNA (tRNA) half
aacccgggccgcctgggtgaaaaccaggaatcctaaccg

SEQ ID NO: 12733 - DNA, 11 bp, Artificial Sequence
  synthetic circulating small noncoding RNA (sncRNA) 5' transfer RNA (tRNA) half
ccactcggcca

SEQ ID NO: 12734 - DNA, 10 bp, Artificial Sequence
  synthetic circulating small noncoding RNA (sncRNA) 5' transfer RNA (tRNA) half
gagatgccgg

SEQ ID NO: 12735 - DNA, 37 bp, Artificial Sequence
  synthetic circulating small noncoding RNA (sncRNA) 5' transfer RNA (tRNA) half
actcggatcgctggattcaaagtccagagtgctaacc

SEQ ID NO: 12736 - DNA, 8 bp, Artificial Sequence
  synthetic circulating small noncoding RNA (sncRNA) 5' transfer RNA (tRNA) half
ccgggttc

SEQ ID NO: 12737 - DNA, 23 bp, Artificial Sequence
  synthetic circulating small noncoding RNA (sncRNA) 5' transfer RNA (tRNA) half
gggttcgaacccacgcagacata

SEQ ID NO: 12738 - DNA, 24 bp, Artificial Sequence
  synthetic circulating small noncoding RNA (sncRNA) 5' transfer RNA (tRNA) half
tccgagttcaaatctcggtgggac

SEQ ID NO: 12739 - DNA, 21 bp, Artificial Sequence
  synthetic circulating small noncoding RNA (sncRNA) 5' transfer RNA (tRNA) half
gattaagagtcccatgctcta

SEQ ID NO: 12740 - DNA, 24 bp, Artificial Sequence
  synthetic circulating small noncoding RNA (sncRNA) 5' transfer RNA (tRNA) half
gctcagttggtagagcggaggact

SEQ ID NO: 12741 - DNA, 24 bp, Artificial Sequence
  synthetic circulating small noncoding RNA (sncRNA) 5' transfer RNA (tRNA) half
cgctctcaccgccgcggcccgggt

SEQ ID NO: 12742 - DNA, 22 bp, Artificial Sequence
  synthetic circulating small noncoding RNA (sncRNA) 5' transfer RNA (tRNA) half
cactttcgacgaggatgggatt

SEQ ID NO: 12743 - DNA, 25 bp, Artificial Sequence
  synthetic circulating small noncoding RNA (sncRNA) 5' transfer RNA (tRNA) half
ggggaattagctcaaatggtagagc

SEQ ID NO: 12744 - DNA, 6 bp, Artificial Sequence
  synthetic circulating small noncoding RNA (sncRNA) 5' transfer RNA (tRNA) half
cgagcg

SEQ ID NO: 12745 - DNA, 12 bp, Artificial Sequence
  synthetic circulating small noncoding RNA (sncRNA) 5' transfer RNA (tRNA) half
cgggccgcggcg

SEQ ID NO: 12746 - DNA, 10 bp, Artificial Sequence
  synthetic circulating small noncoding RNA (sncRNA) 5' transfer RNA (tRNA) half
agcgcccgaa

SEQ ID NO: 12747 - DNA, 16 bp, Artificial Sequence
  synthetic circulating small noncoding RNA (sncRNA) 5' transfer RNA (tRNA) half
cgaaccaccaaccttt

SEQ ID NO: 12748 - DNA, 37 bp, Artificial Sequence
  synthetic circulating small noncoding RNA (sncRNA) 5' transfer RNA (tRNA) half
gaatccagcgatccgagttcaaatctcggtgggacct

SEQ ID NO: 12749 - DNA, 20 bp, Artificial Sequence
  synthetic circulating small noncoding RNA (sncRNA) 5' transfer RNA (tRNA) half
ggtgagtatccccgcctgtc

SEQ ID NO: 12750 - DNA, 11 bp, Artificial Sequence
  synthetic circulating small noncoding RNA (sncRNA) 5' transfer RNA (tRNA) half
gagctataccc

SEQ ID NO: 12751 - DNA, 31 bp, Artificial Sequence
  synthetic circulating small noncoding RNA (sncRNA) 5' transfer RNA (tRNA) half
cccgaacagggacttgaaccctggaccctca

SEQ ID NO: 12752 - DNA, 17 bp, Artificial Sequence
  synthetic circulating small noncoding RNA (sncRNA) 5' transfer RNA (tRNA) half
ttcgattcccgggcggc

SEQ ID NO: 12753 - DNA, 19 bp, Artificial Sequence
  synthetic circulating small noncoding RNA (sncRNA) 5' transfer RNA (tRNA) half
gttcgattcccggccaatg

SEQ ID NO: 12754 - DNA, 34 bp, Artificial Sequence
  synthetic circulating small noncoding RNA (sncRNA) 5' transfer RNA (tRNA) half
aacaggagatcctgggttcaaatcccagcggggc

SEQ ID NO: 12755 - DNA, 36 bp, Artificial Sequence
  synthetic circulating small noncoding RNA (sncRNA) 5' transfer RNA (tRNA) half
agccagccaggagtcgaacctggaatcttctgatcc

SEQ ID NO: 12756 - DNA, 31 bp, Artificial Sequence
  synthetic circulating small noncoding RNA (sncRNA) 5' transfer RNA (tRNA) half
attggtggttcagtggtagaattctcgcctc

SEQ ID NO: 12757 - DNA, 24 bp, Artificial Sequence
  synthetic circulating small noncoding RNA (sncRNA) 5' transfer RNA (tRNA) half
tgctaataacgccaaggtcgcggg

SEQ ID NO: 12758 - DNA, 28 bp, Artificial Sequence
  synthetic circulating small noncoding RNA (sncRNA) 5' transfer RNA (tRNA) half
gattcagagtccagagtgctaaccatta

SEQ ID NO: 12759 - DNA, 33 bp, Artificial Sequence
  synthetic circulating small noncoding RNA (sncRNA) 5' transfer RNA (tRNA) half
gatgctctaccgactgagctatccgggcgctct

SEQ ID NO: 12760 - DNA, 20 bp, Artificial Sequence
  synthetic circulating small noncoding RNA (sncRNA) 5' transfer RNA (tRNA) half
cggcgagctaccagggacct

SEQ ID NO: 12761 - DNA, 22 bp, Artificial Sequence
  synthetic circulating small noncoding RNA (sncRNA) 5' transfer RNA (tRNA) half
ctcatgctctaccgactgagct

SEQ ID NO: 12762 - DNA, 34 bp, Artificial Sequence
  synthetic circulating small noncoding RNA (sncRNA) 5' transfer RNA (tRNA) half
tcgagccaggtaggagtcgaacctacaatcttct

SEQ ID NO: 12763 - DNA, 14 bp, Artificial Sequence
  synthetic circulating small noncoding RNA (sncRNA) 5' transfer RNA (tRNA) half
cgagccaggtagga

SEQ ID NO: 12764 - DNA, 33 bp, Artificial Sequence
  synthetic circulating small noncoding RNA (sncRNA) 5' transfer RNA (tRNA) half
cattcttgcgacccgggttcgattcccgggcgg

SEQ ID NO: 12765 - DNA, 23 bp, Artificial Sequence
  synthetic circulating small noncoding RNA (sncRNA) 5' transfer RNA (tRNA) half
ggcgggactcgaacccgcaacct

SEQ ID NO: 12766 - DNA, 11 bp, Artificial Sequence
  synthetic circulating small noncoding RNA (sncRNA) 5' transfer RNA (tRNA) half
gagtccagagt

SEQ ID NO: 12767 - DNA, 28 bp, Artificial Sequence
  synthetic circulating small noncoding RNA (sncRNA) 5' transfer RNA (tRNA) half
attggtagttcaatggtagaattctcgc

SEQ ID NO: 12768 - DNA, 42 bp, Artificial Sequence
  synthetic circulating small noncoding RNA (sncRNA) 5' transfer RNA (tRNA) half
gggccgcctgggtgaaaaccaggaatcctaaccgctagacca

SEQ ID NO: 12769 - DNA, 16 bp, Artificial Sequence
  synthetic circulating small noncoding RNA (sncRNA) 5' transfer RNA (tRNA) half
aatgcgctatccattg

SEQ ID NO: 12770 - DNA, 39 bp, Artificial Sequence
  synthetic circulating small noncoding RNA (sncRNA) 5' transfer RNA (tRNA) half
taaaccgaagatcgcgggttcgaaccccgtccgtgcctg

SEQ ID NO: 12771 - DNA, 14 bp, Artificial Sequence
  synthetic circulating small noncoding RNA (sncRNA) 5' transfer RNA (tRNA) half
tactaaccactata

SEQ ID NO: 12772 - DNA, 14 bp, Artificial Sequence
  synthetic circulating small noncoding RNA (sncRNA) 5' transfer RNA (tRNA) half
tcaccgccgcggcc

SEQ ID NO: 12773 - DNA, 15 bp, Artificial Sequence
  synthetic circulating small noncoding RNA (sncRNA) 5' transfer RNA (tRNA) half
ggttcgaaaccgggc

SEQ ID NO: 12774 - DNA, 22 bp, Artificial Sequence
  synthetic circulating small noncoding RNA (sncRNA) 5' transfer RNA (tRNA) half
atgtgtcaggatggccgagcgg

SEQ ID NO: 12775 - DNA, 11 bp, Artificial Sequence
  synthetic circulating small noncoding RNA (sncRNA) 5' transfer RNA (tRNA) half
cgggttcgaac

SEQ ID NO: 12776 - DNA, 11 bp, Artificial Sequence
  synthetic circulating small noncoding RNA (sncRNA) 5' transfer RNA (tRNA) half
gccatcctgac

SEQ ID NO: 12777 - DNA, 29 bp, Artificial Sequence
  synthetic circulating small noncoding RNA (sncRNA) 5' transfer RNA (tRNA) half
cccgggccgcggcggtgagagcgccgaat

SEQ ID NO: 12778 - DNA, 14 bp, Artificial Sequence
  synthetic circulating small noncoding RNA (sncRNA) 5' transfer RNA (tRNA) half
gcggttatcacgtc

SEQ ID NO: 12779 - DNA, 13 bp, Artificial Sequence
  synthetic circulating small noncoding RNA (sncRNA) 5' transfer RNA (tRNA) half
cgggacctctcgc

SEQ ID NO: 12780 - DNA, 33 bp, Artificial Sequence
  synthetic circulating small noncoding RNA (sncRNA) 5' transfer RNA (tRNA) half
ggttccaccgagatttgaactcggatcgctgga

SEQ ID NO: 12781 - DNA, 16 bp, Artificial Sequence
  synthetic circulating small noncoding RNA (sncRNA) 5' transfer RNA (tRNA) half
ggcgaatgtgataacc

SEQ ID NO: 12782 - DNA, 12 bp, Artificial Sequence
  synthetic circulating small noncoding RNA (sncRNA) 5' transfer RNA (tRNA) half
tcgcctgccacg

SEQ ID NO: 12783 - DNA, 14 bp, Artificial Sequence
  synthetic circulating small noncoding RNA (sncRNA) 5' transfer RNA (tRNA) half
cccatgctctaccg

SEQ ID NO: 12784 - DNA, 18 bp, Artificial Sequence
  synthetic circulating small noncoding RNA (sncRNA) 5' transfer RNA (tRNA) half
tcatgctctaccgactga

SEQ ID NO: 12785 - DNA, 20 bp, Artificial Sequence
  synthetic circulating small noncoding RNA (sncRNA) 5' transfer RNA (tRNA) half
ggttcgattcccggccaatg

SEQ ID NO: 12786 - DNA, 17 bp, Artificial Sequence
  synthetic circulating small noncoding RNA (sncRNA) 5' transfer RNA (tRNA) half
cacccaaagcgagaatc

SEQ ID NO: 12787 - DNA, 18 bp, Artificial Sequence
  synthetic circulating small noncoding RNA (sncRNA) 5' transfer RNA (tRNA) half
cgttcaggtcgcagtctc

SEQ ID NO: 12788 - DNA, 23 bp, Artificial Sequence
  synthetic circulating small noncoding RNA (sncRNA) 5' transfer RNA (tRNA) half
ggtagcgtggccgagcggtctaa

SEQ ID NO: 12789 - DNA, 31 bp, Artificial Sequence
  synthetic circulating small noncoding RNA (sncRNA) 5' transfer RNA (tRNA) half
tgggcccataacccagaggtcgatggatcga

SEQ ID NO: 12790 - DNA, 26 bp, Artificial Sequence
  synthetic circulating small noncoding RNA (sncRNA) 5' transfer RNA (tRNA) half
cacaccgggagtcgaacccgggccgc

SEQ ID NO: 12791 - DNA, 31 bp, Artificial Sequence
  synthetic circulating small noncoding RNA (sncRNA) 5' transfer RNA (tRNA) half
ggcgtccctgggtgggctcgaaccaccaacc

SEQ ID NO: 12792 - DNA, 32 bp, Artificial Sequence
  synthetic circulating small noncoding RNA (sncRNA) 5' transfer RNA (tRNA) half
gggacctctcgcaccctaagcgagaatcatac

SEQ ID NO: 12793 - DNA, 19 bp, Artificial Sequence
  synthetic circulating small noncoding RNA (sncRNA) 5' transfer RNA (tRNA) half
gggttccttcgagccggat

SEQ ID NO: 12794 - DNA, 34 bp, Artificial Sequence
  synthetic circulating small noncoding RNA (sncRNA) 5' transfer RNA (tRNA) half
ggttccttcgagccggattcgaaccagcgaccta

SEQ ID NO: 12795 - DNA, 41 bp, Artificial Sequence
  synthetic circulating small noncoding RNA (sncRNA) 5' transfer RNA (tRNA) half
cgaacccgggccgcggcggtgagagcgccgaatcctaacca

SEQ ID NO: 12796 - DNA, 17 bp, Artificial Sequence
  synthetic circulating small noncoding RNA (sncRNA) 5' transfer RNA (tRNA) half
gtagaattctcgcctgc

SEQ ID NO: 12797 - DNA, 23 bp, Artificial Sequence
  synthetic circulating small noncoding RNA (sncRNA) 5' transfer RNA (tRNA) half
ttcccattcttgcgacccgggtt

SEQ ID NO: 12798 - DNA, 32 bp, Artificial Sequence
  synthetic circulating small noncoding RNA (sncRNA) 5' transfer RNA (tRNA) half
agcgccaaatcctaaccactagaccaccaggg

SEQ ID NO: 12799 - DNA, 22 bp, Artificial Sequence
  synthetic circulating small noncoding RNA (sncRNA) 5' transfer RNA (tRNA) half
tcgtatagtggttagtactctg

SEQ ID NO: 12800 - DNA, 31 bp, Artificial Sequence
  synthetic circulating small noncoding RNA (sncRNA) 5' transfer RNA (tRNA) half
gcgagaattctaccattgaactaccaatgct

SEQ ID NO: 12801 - DNA, 31 bp, Artificial Sequence
  synthetic circulating small noncoding RNA (sncRNA) 5' transfer RNA (tRNA) half
taagccagggattgtgggttcgagtcccatc

SEQ ID NO: 12802 - DNA, 22 bp, Artificial Sequence
  synthetic circulating small noncoding RNA (sncRNA) 5' transfer RNA (tRNA) half
ttcgattcccggccaatgcacg

SEQ ID NO: 12803 - DNA, 21 bp, Artificial Sequence
  synthetic circulating small noncoding RNA (sncRNA) 5' transfer RNA (tRNA) half
tcaaatcacgtcggggtcatc

SEQ ID NO: 12804 - DNA, 33 bp, Artificial Sequence
  synthetic circulating small noncoding RNA (sncRNA) 5' transfer RNA (tRNA) half
cgggaggcccgggttcgattcccggcccatgca

SEQ ID NO: 12805 - DNA, 10 bp, Artificial Sequence
  synthetic circulating small noncoding RNA (sncRNA) 5' transfer RNA (tRNA) half
gcggcccggg

SEQ ID NO: 12806 - DNA, 14 bp, Artificial Sequence
  synthetic circulating small noncoding RNA (sncRNA) 5' transfer RNA (tRNA) half
gtgagagcgccgaa

SEQ ID NO: 12807 - DNA, 34 bp, Artificial Sequence
  synthetic circulating small noncoding RNA (sncRNA) 5' transfer RNA (tRNA) half
ggttccatggtgtaatggtgagcactctggactc

SEQ ID NO: 12808 - DNA, 21 bp, Artificial Sequence
  synthetic circulating small noncoding RNA (sncRNA) 5' transfer RNA (tRNA) half
gtcgatgaggatgggattcga

SEQ ID NO: 12809 - DNA, 14 bp, Artificial Sequence
  synthetic circulating small noncoding RNA (sncRNA) 5' transfer RNA (tRNA) half
acgaggccccgggt

SEQ ID NO: 12810 - DNA, 17 bp, Artificial Sequence
  synthetic circulating small noncoding RNA (sncRNA) 5' transfer RNA (tRNA) half
aaacccgggatcgaacc

SEQ ID NO: 12811 - DNA, 28 bp, Artificial Sequence
  synthetic circulating small noncoding RNA (sncRNA) 5' transfer RNA (tRNA) half
acccacgcctccgaagagactggagcct

SEQ ID NO: 12812 - DNA, 24 bp, Artificial Sequence
  synthetic circulating small noncoding RNA (sncRNA) 5' transfer RNA (tRNA) half
ttcagagtccagagtgctagccat

SEQ ID NO: 12813 - DNA, 17 bp, Artificial Sequence
  synthetic circulating small noncoding RNA (sncRNA) 5' transfer RNA (tRNA) half
gacctcgtggcgcaacg

SEQ ID NO: 12814 - DNA, 24 bp, Artificial Sequence
  synthetic circulating small noncoding RNA (sncRNA) 5' transfer RNA (tRNA) half
gttcgattccggctcgaaggactt

SEQ ID NO: 12815 - DNA, 14 bp, Artificial Sequence
  synthetic circulating small noncoding RNA (sncRNA) 5' transfer RNA (tRNA) half
tcggaggcgtgggt

SEQ ID NO: 12816 - DNA, 15 bp, Artificial Sequence
  synthetic circulating small noncoding RNA (sncRNA) 5' transfer RNA (tRNA) half
gattcgaaccagcga

SEQ ID NO: 12817 - DNA, 20 bp, Artificial Sequence
  synthetic circulating small noncoding RNA (sncRNA) 5' transfer RNA (tRNA) half
cttccgcagcgagcagggtt

SEQ ID NO: 12818 - DNA, 33 bp, Artificial Sequence
  synthetic circulating small noncoding RNA (sncRNA) 5' transfer RNA (tRNA) half
agaggtcccaccgagatttgaactcggatcgct

SEQ ID NO: 12819 - DNA, 20 bp, Artificial Sequence
  synthetic circulating small noncoding RNA (sncRNA) 5' transfer RNA (tRNA) half
gcgtgctgggcccataaccc

SEQ ID NO: 12820 - DNA, 23 bp, Artificial Sequence
  synthetic circulating small noncoding RNA (sncRNA) 5' transfer RNA (tRNA) half
agagcgccgaatcctaaccacta

SEQ ID NO: 12821 - DNA, 11 bp, Artificial Sequence
  synthetic circulating small noncoding RNA (sncRNA) 5' transfer RNA (tRNA) half
accgggaatcg

SEQ ID NO: 12822 - DNA, 14 bp, Artificial Sequence
  synthetic circulating small noncoding RNA (sncRNA) 5' transfer RNA (tRNA) half
ccttagaccactcg

SEQ ID NO: 12823 - DNA, 10 bp, Artificial Sequence
  synthetic circulating small noncoding RNA (sncRNA) 5' transfer RNA (tRNA) half
gtctggccgg

SEQ ID NO: 12824 - DNA, 23 bp, Artificial Sequence
  synthetic circulating small noncoding RNA (sncRNA) 5' transfer RNA (tRNA) half
gcccggtttcgaaccggggacct

SEQ ID NO: 12825 - DNA, 22 bp, Artificial Sequence
  synthetic circulating small noncoding RNA (sncRNA) 5' transfer RNA (tRNA) half
gggttcgatccccggcatctcc

SEQ ID NO: 12826 - DNA, 15 bp, Artificial Sequence
  synthetic circulating small noncoding RNA (sncRNA) 5' transfer RNA (tRNA) half
tgtcaggagtgggat

SEQ ID NO: 12827 - DNA, 34 bp, Artificial Sequence
  synthetic circulating small noncoding RNA (sncRNA) 5' transfer RNA (tRNA) half
gcagtcaaatgctctacccctgagctatgccccc

SEQ ID NO: 12828 - DNA, 23 bp, Artificial Sequence
  synthetic circulating small noncoding RNA (sncRNA) 5' transfer RNA (tRNA) half
aggtccccggttcgaaaccgggc

SEQ ID NO: 12829 - DNA, 33 bp, Artificial Sequence
  synthetic circulating small noncoding RNA (sncRNA) 5' transfer RNA (tRNA) half
tagcactctggactctgaatccagcgacccgag

SEQ ID NO: 12830 - DNA, 35 bp, Artificial Sequence
  synthetic circulating small noncoding RNA (sncRNA) 5' transfer RNA (tRNA) half
cttccctggtggtctagtggttaggattcggcgct

SEQ ID NO: 12831 - DNA, 14 bp, Artificial Sequence
  synthetic circulating small noncoding RNA (sncRNA) 5' transfer RNA (tRNA) half
tggagatgccgggg

SEQ ID NO: 12832 - DNA, 30 bp, Artificial Sequence
  synthetic circulating small noncoding RNA (sncRNA) 5' transfer RNA (tRNA) half
gtcgctggttcgactccggctcgaaggaga

SEQ ID NO: 12833 - DNA, 20 bp, Artificial Sequence
  synthetic circulating small noncoding RNA (sncRNA) 5' transfer RNA (tRNA) half
gttatcacgtctgctttaca

SEQ ID NO: 12834 - DNA, 31 bp, Artificial Sequence
  synthetic circulating small noncoding RNA (sncRNA) 5' transfer RNA (tRNA) half
gcacgaggccccgggttcaatccccggcacc

SEQ ID NO: 12835 - DNA, 21 bp, Artificial Sequence
  synthetic circulating small noncoding RNA (sncRNA) 5' transfer RNA (tRNA) half
gaggcccgggttcgattcccg

SEQ ID NO: 12836 - DNA, 24 bp, Artificial Sequence
  synthetic circulating small noncoding RNA (sncRNA) 5' transfer RNA (tRNA) half
tggactctgaatccagcgacccga

SEQ ID NO: 12837 - DNA, 7 bp, Artificial Sequence
  synthetic circulating small noncoding RNA (sncRNA) 5' transfer RNA (tRNA) half
gtagtcg

SEQ ID NO: 12838 - DNA, 16 bp, Artificial Sequence
  synthetic circulating small noncoding RNA (sncRNA) 5' transfer RNA (tRNA) half
aggcggcccgggttcg

SEQ ID NO: 12839 - DNA, 6 bp, Artificial Sequence
  synthetic circulating small noncoding RNA (sncRNA) 5' transfer RNA (tRNA) half
ccacgg

SEQ ID NO: 12840 - DNA, 24 bp, Artificial Sequence
  synthetic circulating small noncoding RNA (sncRNA) 5' transfer RNA (tRNA) half
cggaagcgtgctgggcccataacc

SEQ ID NO: 12841 - DNA, 19 bp, Artificial Sequence
  synthetic circulating small noncoding RNA (sncRNA) 5' transfer RNA (tRNA) half
acacgcgaaaggtccccgg

SEQ ID NO: 12842 - DNA, 26 bp, Artificial Sequence
  synthetic circulating small noncoding RNA (sncRNA) 5' transfer RNA (tRNA) half
gtggcagcggtgggattcgaacccac

SEQ ID NO: 12843 - DNA, 18 bp, Artificial Sequence
  synthetic circulating small noncoding RNA (sncRNA) 5' transfer RNA (tRNA) half
aaccgggcgggaacaaca

SEQ ID NO: 12844 - DNA, 28 bp, Artificial Sequence
  synthetic circulating small noncoding RNA (sncRNA) 5' transfer RNA (tRNA) half
aaatgctctacccctgagctataccccc

SEQ ID NO: 12845 - DNA, 18 bp, Artificial Sequence
  synthetic circulating small noncoding RNA (sncRNA) 5' transfer RNA (tRNA) half
tcgatccccggcatctcc

SEQ ID NO: 12846 - DNA, 16 bp, Artificial Sequence
  synthetic circulating small noncoding RNA (sncRNA) 5' transfer RNA (tRNA) half
gcgtgctgggcccata

SEQ ID NO: 12847 - DNA, 5 bp, Artificial Sequence
  synthetic circulating small noncoding RNA (sncRNA) 5' transfer RNA (tRNA) half
gcccc

SEQ ID NO: 12848 - DNA, 20 bp, Artificial Sequence
  synthetic circulating small noncoding RNA (sncRNA) 5' transfer RNA (tRNA) half
aggattcggcgctctcaccg

SEQ ID NO: 12849 - DNA, 18 bp, Artificial Sequence
  synthetic circulating small noncoding RNA (sncRNA) 5' transfer RNA (tRNA) half
agtggtagagcgcatgct

SEQ ID NO: 12850 - DNA, 26 bp, Artificial Sequence
  synthetic circulating small noncoding RNA (sncRNA) 5' transfer RNA (tRNA) half
ctaccgactgagctatccgggctctt

SEQ ID NO: 12851 - DNA, 25 bp, Artificial Sequence
  synthetic circulating small noncoding RNA (sncRNA) 5' transfer RNA (tRNA) half
agaccgctcggccatcctgacaact

SEQ ID NO: 12852 - DNA, 23 bp, Artificial Sequence
  synthetic circulating small noncoding RNA (sncRNA) 5' transfer RNA (tRNA) half
gattaagagtcccatgctctacc

SEQ ID NO: 12853 - DNA, 21 bp, Artificial Sequence
  synthetic circulating small noncoding RNA (sncRNA) 5' transfer RNA (tRNA) half
gtctcatgctctacccactga

SEQ ID NO: 12854 - DNA, 13 bp, Artificial Sequence
  synthetic circulating small noncoding RNA (sncRNA) 5' transfer RNA (tRNA) half
cctgccgcggtcg

SEQ ID NO: 12855 - DNA, 23 bp, Artificial Sequence
  synthetic circulating small noncoding RNA (sncRNA) 5' transfer RNA (tRNA) half
tctagtggttaggattcggcgct

SEQ ID NO: 12856 - DNA, 27 bp, Artificial Sequence
  synthetic circulating small noncoding RNA (sncRNA) 5' transfer RNA (tRNA) half
gtccctgggtgggctcgaaccaccaac

SEQ ID NO: 12857 - DNA, 9 bp, Artificial Sequence
  synthetic circulating small noncoding RNA (sncRNA) 5' transfer RNA (tRNA) half
gcgaccacg

SEQ ID NO: 12858 - DNA, 14 bp, Artificial Sequence
  synthetic circulating small noncoding RNA (sncRNA) 5' transfer RNA (tRNA) half
aggtcgatggatcg

SEQ ID NO: 12859 - DNA, 9 bp, Artificial Sequence
  synthetic circulating small noncoding RNA (sncRNA) 5' transfer RNA (tRNA) half
tggcgccgt

SEQ ID NO: 12860 - DNA, 30 bp, Artificial Sequence
  synthetic circulating small noncoding RNA (sncRNA) 5' transfer RNA (tRNA) half
agtgcattggccgggaatcgaacccgggcc

SEQ ID NO: 12861 - DNA, 14 bp, Artificial Sequence
  synthetic circulating small noncoding RNA (sncRNA) 5' transfer RNA (tRNA) half
agaggtagcgggat

SEQ ID NO: 12862 - DNA, 23 bp, Artificial Sequence
  synthetic circulating small noncoding RNA (sncRNA) 5' transfer RNA (tRNA) half
gttcgactccggctcgaaggaga

SEQ ID NO: 12863 - DNA, 16 bp, Artificial Sequence
  synthetic circulating small noncoding RNA (sncRNA) 5' transfer RNA (tRNA) half
aacctggaatcttctg

SEQ ID NO: 12864 - DNA, 31 bp, Artificial Sequence
  synthetic circulating small noncoding RNA (sncRNA) 5' transfer RNA (tRNA) half
caggaatcctaaccgctagaccatgtgggaa

SEQ ID NO: 12865 - DNA, 12 bp, Artificial Sequence
  synthetic circulating small noncoding RNA (sncRNA) 5' transfer RNA (tRNA) half
aagcgagaatca

SEQ ID NO: 12866 - DNA, 25 bp, Artificial Sequence
  synthetic circulating small noncoding RNA (sncRNA) 5' transfer RNA (tRNA) half
ctccagtctcttcggaggcgtgggt

SEQ ID NO: 12867 - DNA, 21 bp, Artificial Sequence
  synthetic circulating small noncoding RNA (sncRNA) 5' transfer RNA (tRNA) half
actcggatcgctggattcaaa

SEQ ID NO: 12868 - DNA, 34 bp, Artificial Sequence
  synthetic circulating small noncoding RNA (sncRNA) 5' transfer RNA (tRNA) half
gcgacagagtggttcaattccacctttcgggcgg

SEQ ID NO: 12869 - DNA, 38 bp, Artificial Sequence
  synthetic circulating small noncoding RNA (sncRNA) 5' transfer RNA (tRNA) half
tgtcagaagtgggattcgaacccacgcctccattcgga

SEQ ID NO: 12870 - DNA, 40 bp, Artificial Sequence
  synthetic circulating small noncoding RNA (sncRNA) 5' transfer RNA (tRNA) half
cccggggcctcatacatgcaaagcatgcgctctaccactg

SEQ ID NO: 12871 - DNA, 23 bp, Artificial Sequence
  synthetic circulating small noncoding RNA (sncRNA) 5' transfer RNA (tRNA) half
acccacgcccccgaagagactgg

SEQ ID NO: 12872 - DNA, 20 bp, Artificial Sequence
  synthetic circulating small noncoding RNA (sncRNA) 5' transfer RNA (tRNA) half
taccattgcgccacgaggtc

SEQ ID NO: 12873 - DNA, 20 bp, Artificial Sequence
  synthetic circulating small noncoding RNA (sncRNA) 5' transfer RNA (tRNA) half
tgcgttggccgggaatcgaa

SEQ ID NO: 12874 - DNA, 15 bp, Artificial Sequence
  synthetic circulating small noncoding RNA (sncRNA) 5' transfer RNA (tRNA) half
tagaccgctcggcca

SEQ ID NO: 12875 - DNA, 36 bp, Artificial Sequence
  synthetic circulating small noncoding RNA (sncRNA) 5' transfer RNA (tRNA) half
cacaacgcagagtactaaccactatacgatcacggc

SEQ ID NO: 12876 - DNA, 22 bp, Artificial Sequence
  synthetic circulating small noncoding RNA (sncRNA) 5' transfer RNA (tRNA) half
agtagtcgtggccgagtggtta

SEQ ID NO: 12877 - DNA, 15 bp, Artificial Sequence
  synthetic circulating small noncoding RNA (sncRNA) 5' transfer RNA (tRNA) half
ccttaaccactcggc

SEQ ID NO: 12878 - DNA, 18 bp, Artificial Sequence
  synthetic circulating small noncoding RNA (sncRNA) 5' transfer RNA (tRNA) half
agagtactaaccactata

SEQ ID NO: 12879 - DNA, 36 bp, Artificial Sequence
  synthetic circulating small noncoding RNA (sncRNA) 5' transfer RNA (tRNA) half
gtaaacaggagatcctgggttcgaatcccagcggtg

SEQ ID NO: 12880 - DNA, 29 bp, Artificial Sequence
  synthetic circulating small noncoding RNA (sncRNA) 5' transfer RNA (tRNA) half
gctgcggccacaacgcagagtactaacca

SEQ ID NO: 12881 - DNA, 13 bp, Artificial Sequence
  synthetic circulating small noncoding RNA (sncRNA) 5' transfer RNA (tRNA) half
cactccaccaact

SEQ ID NO: 12882 - DNA, 12 bp, Artificial Sequence
  synthetic circulating small noncoding RNA (sncRNA) 5' transfer RNA (tRNA) half
gtggcaggcgag

SEQ ID NO: 12883 - DNA, 21 bp, Artificial Sequence
  synthetic circulating small noncoding RNA (sncRNA) 5' transfer RNA (tRNA) half
ccttaaccactcggccacgac

SEQ ID NO: 12884 - DNA, 14 bp, Artificial Sequence
  synthetic circulating small noncoding RNA (sncRNA) 5' transfer RNA (tRNA) half
ctcggtgggacctc

SEQ ID NO: 12885 - DNA, 29 bp, Artificial Sequence
  synthetic circulating small noncoding RNA (sncRNA) 5' transfer RNA (tRNA) half
cggcccgggttcgactcccggtatgggaa

SEQ ID NO: 12886 - DNA, 33 bp, Artificial Sequence
  synthetic circulating small noncoding RNA (sncRNA) 5' transfer RNA (tRNA) half
agggggtatagctcagtggtagagcatttgact

SEQ ID NO: 12887 - DNA, 18 bp, Artificial Sequence
  synthetic circulating small noncoding RNA (sncRNA) 5' transfer RNA (tRNA) half
tgccgaaacccgggatcg

SEQ ID NO: 12888 - DNA, 19 bp, Artificial Sequence
  synthetic circulating small noncoding RNA (sncRNA) 5' transfer RNA (tRNA) half
gttcgatccccagcatctc

SEQ ID NO: 12889 - DNA, 21 bp, Artificial Sequence
  synthetic circulating small noncoding RNA (sncRNA) 5' transfer RNA (tRNA) half
agactgctcggccatcctgac

SEQ ID NO: 12890 - DNA, 18 bp, Artificial Sequence
  synthetic circulating small noncoding RNA (sncRNA) 5' transfer RNA (tRNA) half
ttcccataccgggagtcg

SEQ ID NO: 12891 - DNA, 20 bp, Artificial Sequence
  synthetic circulating small noncoding RNA (sncRNA) 5' transfer RNA (tRNA) half
ggttagcactctggactctg

SEQ ID NO: 12892 - DNA, 7 bp, Artificial Sequence
  synthetic circulating small noncoding RNA (sncRNA) 5' transfer RNA (tRNA) half
gtctgat

SEQ ID NO: 12893 - DNA, 27 bp, Artificial Sequence
  synthetic circulating small noncoding RNA (sncRNA) 5' transfer RNA (tRNA) half
tgactgcagatcaagaggtccccggtt

SEQ ID NO: 12894 - DNA, 25 bp, Artificial Sequence
  synthetic circulating small noncoding RNA (sncRNA) 5' transfer RNA (tRNA) half
gtttccgtagtgtagtggtcatcac

SEQ ID NO: 12895 - DNA, 19 bp, Artificial Sequence
  synthetic circulating small noncoding RNA (sncRNA) 5' transfer RNA (tRNA) half
gtcaggatggccgagtggt

SEQ ID NO: 12896 - DNA, 25 bp, Artificial Sequence
  synthetic circulating small noncoding RNA (sncRNA) 5' transfer RNA (tRNA) half
gccttaaccactcggccaccgtgac

SEQ ID NO: 12897 - DNA, 34 bp, Artificial Sequence
  synthetic circulating small noncoding RNA (sncRNA) 5' transfer RNA (tRNA) half
gtccctggtggtctagtggctaggattcggcgct

SEQ ID NO: 12898 - DNA, 16 bp, Artificial Sequence
  synthetic circulating small noncoding RNA (sncRNA) 5' transfer RNA (tRNA) half
actctggactctgaat

SEQ ID NO: 12899 - DNA, 41 bp, Artificial Sequence
  synthetic circulating small noncoding RNA (sncRNA) 5' transfer RNA (tRNA) half
aagacttaaaaccttgttcccagaggttcaaatcctctccc

SEQ ID NO: 12900 - DNA, 10 bp, Artificial Sequence
  synthetic circulating small noncoding RNA (sncRNA) 5' transfer RNA (tRNA) half
aattctcgcc

SEQ ID NO: 12901 - DNA, 11 bp, Artificial Sequence
  synthetic circulating small noncoding RNA (sncRNA) 5' transfer RNA (tRNA) half
agggctcgaac

SEQ ID NO: 12902 - DNA, 17 bp, Artificial Sequence
  synthetic circulating small noncoding RNA (sncRNA) 5' transfer RNA (tRNA) half
ttcagagtccagagtgc

SEQ ID NO: 12903 - DNA, 23 bp, Artificial Sequence
  synthetic circulating small noncoding RNA (sncRNA) 5' transfer RNA (tRNA) half
ggagggggcacccggatttgaac

SEQ ID NO: 12904 - DNA, 29 bp, Artificial Sequence
  synthetic circulating small noncoding RNA (sncRNA) 5' transfer RNA (tRNA) half
agtcaaatgctctacccctgagctatacc

SEQ ID NO: 12905 - DNA, 7 bp, Artificial Sequence
  synthetic circulating small noncoding RNA (sncRNA) 5' transfer RNA (tRNA) half
atggccg

SEQ ID NO: 12906 - DNA, 28 bp, Artificial Sequence
  synthetic circulating small noncoding RNA (sncRNA) 5' transfer RNA (tRNA) half
cagtgctctaacccctgagctatggagc

SEQ ID NO: 12907 - DNA, 20 bp, Artificial Sequence
  synthetic circulating small noncoding RNA (sncRNA) 5' transfer RNA (tRNA) half
aggcaagtgcattggccggg

SEQ ID NO: 12908 - DNA, 22 bp, Artificial Sequence
  synthetic circulating small noncoding RNA (sncRNA) 5' transfer RNA (tRNA) half
ctggggtgcaggcttcaaacct

SEQ ID NO: 12909 - DNA, 12 bp, Artificial Sequence
  synthetic circulating small noncoding RNA (sncRNA) 5' transfer RNA (tRNA) half
gttcccataccg

SEQ ID NO: 12910 - DNA, 25 bp, Artificial Sequence
  synthetic circulating small noncoding RNA (sncRNA) 5' transfer RNA (tRNA) half
tcctggttttcacccaggcggcccg

SEQ ID NO: 12911 - DNA, 35 bp, Artificial Sequence
  synthetic circulating small noncoding RNA (sncRNA) 5' transfer RNA (tRNA) half
gtatggaggcgtgggttcgaatcccacttctgaca

SEQ ID NO: 12912 - DNA, 23 bp, Artificial Sequence
  synthetic circulating small noncoding RNA (sncRNA) 5' transfer RNA (tRNA) half
ctctaccactgagctataccccc

SEQ ID NO: 12913 - DNA, 26 bp, Artificial Sequence
  synthetic circulating small noncoding RNA (sncRNA) 5' transfer RNA (tRNA) half
cgggttcgactcccggtgtgggaacg

SEQ ID NO: 12914 - DNA, 18 bp, Artificial Sequence
  synthetic circulating small noncoding RNA (sncRNA) 5' transfer RNA (tRNA) half
aatggtagagcgctcgct

SEQ ID NO: 12915 - DNA, 13 bp, Artificial Sequence
  synthetic circulating small noncoding RNA (sncRNA) 5' transfer RNA (tRNA) half
aacccggaacctt

SEQ ID NO: 12916 - DNA, 13 bp, Artificial Sequence
  synthetic circulating small noncoding RNA (sncRNA) 5' transfer RNA (tRNA) half
gcaggttcgaatc

SEQ ID NO: 12917 - DNA, 16 bp, Artificial Sequence
  synthetic circulating small noncoding RNA (sncRNA) 5' transfer RNA (tRNA) half
actcggccattctggt

SEQ ID NO: 12918 - DNA, 30 bp, Artificial Sequence
  synthetic circulating small noncoding RNA (sncRNA) 5' transfer RNA (tRNA) half
ggcgagaattctaccattgaaccaccaatg

SEQ ID NO: 12919 - DNA, 21 bp, Artificial Sequence
  synthetic circulating small noncoding RNA (sncRNA) 5' transfer RNA (tRNA) half
cgaaccccggtctcccgcgtg

SEQ ID NO: 12920 - DNA, 28 bp, Artificial Sequence
  synthetic circulating small noncoding RNA (sncRNA) 5' transfer RNA (tRNA) half
aggccccgggttcaatccccggcacctc

SEQ ID NO: 12921 - DNA, 26 bp, Artificial Sequence
  synthetic circulating small noncoding RNA (sncRNA) 5' transfer RNA (tRNA) half
gattaagagtctcatgctctaccgac

SEQ ID NO: 12922 - DNA, 5 bp, Artificial Sequence
  synthetic circulating small noncoding RNA (sncRNA) 5' transfer RNA (tRNA) half
ccgga

SEQ ID NO: 12923 - DNA, 22 bp, Artificial Sequence
  synthetic circulating small noncoding RNA (sncRNA) 5' transfer RNA (tRNA) half
tagtggttaggattcggcgctc

SEQ ID NO: 12924 - DNA, 20 bp, Artificial Sequence
  synthetic circulating small noncoding RNA (sncRNA) 5' transfer RNA (tRNA) half
tctaccgactgagctagccg

SEQ ID NO: 12925 - DNA, 18 bp, Artificial Sequence
  synthetic circulating small noncoding RNA (sncRNA) 5' transfer RNA (tRNA) half
agctgtcagaagtgggat

SEQ ID NO: 12926 - DNA, 20 bp, Artificial Sequence
  synthetic circulating small noncoding RNA (sncRNA) 5' transfer RNA (tRNA) half
tgtttccgcccggtttcgaa

SEQ ID NO: 12927 - DNA, 19 bp, Artificial Sequence
  synthetic circulating small noncoding RNA (sncRNA) 5' transfer RNA (tRNA) half
gttcgatccccggcatctc

SEQ ID NO: 12928 - DNA, 14 bp, Artificial Sequence
  synthetic circulating small noncoding RNA (sncRNA) 5' transfer RNA (tRNA) half
tccgagaggtcccg

SEQ ID NO: 12929 - DNA, 29 bp, Artificial Sequence
  synthetic circulating small noncoding RNA (sncRNA) 5' transfer RNA (tRNA) half
tgggattaagagtcccatgctctaccgac

SEQ ID NO: 12930 - DNA, 16 bp, Artificial Sequence
  synthetic circulating small noncoding RNA (sncRNA) 5' transfer RNA (tRNA) half
tcacccaggcggcccg

SEQ ID NO: 12931 - DNA, 10 bp, Artificial Sequence
  synthetic circulating small noncoding RNA (sncRNA) 5' transfer RNA (tRNA) half
agtctgatgc

SEQ ID NO: 12932 - DNA, 17 bp, Artificial Sequence
  synthetic circulating small noncoding RNA (sncRNA) 5' transfer RNA (tRNA) half
ccgtcggggaatcgaac

SEQ ID NO: 12933 - DNA, 15 bp, Artificial Sequence
  synthetic circulating small noncoding RNA (sncRNA) 5' transfer RNA (tRNA) half
agggtcgtgggttcg

SEQ ID NO: 12934 - DNA, 23 bp, Artificial Sequence
  synthetic circulating small noncoding RNA (sncRNA) 5' transfer RNA (tRNA) half
cctggtggtctagtggttaggat

SEQ ID NO: 12935 - DNA, 13 bp, Artificial Sequence
  synthetic circulating small noncoding RNA (sncRNA) 5' transfer RNA (tRNA) half
caagactcgaact

SEQ ID NO: 12936 - DNA, 32 bp, Artificial Sequence
  synthetic circulating small noncoding RNA (sncRNA) 5' transfer RNA (tRNA) half
gggaggcccgggttcgattcccggcccatgca

SEQ ID NO: 12937 - DNA, 14 bp, Artificial Sequence
  synthetic circulating small noncoding RNA (sncRNA) 5' transfer RNA (tRNA) half
cgcccggtttcgaa

SEQ ID NO: 12938 - DNA, 19 bp, Artificial Sequence
  synthetic circulating small noncoding RNA (sncRNA) 5' transfer RNA (tRNA) half
actgcattggccgggaatc

SEQ ID NO: 12939 - DNA, 13 bp, Artificial Sequence
  synthetic circulating small noncoding RNA (sncRNA) 5' transfer RNA (tRNA) half
gacctcgtggcgc

SEQ ID NO: 12940 - DNA, 28 bp, Artificial Sequence
  synthetic circulating small noncoding RNA (sncRNA) 5' transfer RNA (tRNA) half
acccacgcgtgcaaagcacaatggatta

SEQ ID NO: 12941 - DNA, 34 bp, Artificial Sequence
  synthetic circulating small noncoding RNA (sncRNA) 5' transfer RNA (tRNA) half
gaagggattcgaaccctcaatcttctgatccgaa

SEQ ID NO: 12942 - DNA, 17 bp, Artificial Sequence
  synthetic circulating small noncoding RNA (sncRNA) 5' transfer RNA (tRNA) half
tcgatccccggcacctc

SEQ ID NO: 12943 - DNA, 35 bp, Artificial Sequence
  synthetic circulating small noncoding RNA (sncRNA) 5' transfer RNA (tRNA) half
ccagcgatccgagttcaaatctcggtggaacctgc

SEQ ID NO: 12944 - DNA, 18 bp, Artificial Sequence
  synthetic circulating small noncoding RNA (sncRNA) 5' transfer RNA (tRNA) half
aatcccacttctgacaca

SEQ ID NO: 12945 - DNA, 21 bp, Artificial Sequence
  synthetic circulating small noncoding RNA (sncRNA) 5' transfer RNA (tRNA) half
aaggccccagcgagatttgaa

SEQ ID NO: 12946 - DNA, 21 bp, Artificial Sequence
  synthetic circulating small noncoding RNA (sncRNA) 5' transfer RNA (tRNA) half
atcccacttctgacacagttg

SEQ ID NO: 12947 - DNA, 14 bp, Artificial Sequence
  synthetic circulating small noncoding RNA (sncRNA) 5' transfer RNA (tRNA) half
cgcaggttcgaatc

SEQ ID NO: 12948 - DNA, 20 bp, Artificial Sequence
  synthetic circulating small noncoding RNA (sncRNA) 5' transfer RNA (tRNA) half
cccctagaccaacgagccac

SEQ ID NO: 12949 - DNA, 20 bp, Artificial Sequence
  synthetic circulating small noncoding RNA (sncRNA) 5' transfer RNA (tRNA) half
gtctcatgatctaccaactg

SEQ ID NO: 12950 - DNA, 35 bp, Artificial Sequence
  synthetic circulating small noncoding RNA (sncRNA) 5' transfer RNA (tRNA) half
cgtctccccgtcggggaatcgaaccccggtctccc

SEQ ID NO: 12951 - DNA, 25 bp, Artificial Sequence
  synthetic circulating small noncoding RNA (sncRNA) 5' transfer RNA (tRNA) half
tgaatccagcgatccgagttcaaat

SEQ ID NO: 12952 - DNA, 29 bp, Artificial Sequence
  synthetic circulating small noncoding RNA (sncRNA) 5' transfer RNA (tRNA) half
gtcctgggttcgagccccagtggaaccac

SEQ ID NO: 12953 - DNA, 9 bp, Artificial Sequence
  synthetic circulating small noncoding RNA (sncRNA) 5' transfer RNA (tRNA) half
tcgactccc

SEQ ID NO: 12954 - DNA, 10 bp, Artificial Sequence
  synthetic circulating small noncoding RNA (sncRNA) 5' transfer RNA (tRNA) half
gccgggcctt

SEQ ID NO: 12955 - DNA, 12 bp, Artificial Sequence
  synthetic circulating small noncoding RNA (sncRNA) 5' transfer RNA (tRNA) half
cgccatcgaaat

SEQ ID NO: 12956 - DNA, 26 bp, Artificial Sequence
  synthetic circulating small noncoding RNA (sncRNA) 5' transfer RNA (tRNA) half
gtggcgcagcggaagcgtgctgggcc

SEQ ID NO: 12957 - DNA, 12 bp, Artificial Sequence
  synthetic circulating small noncoding RNA (sncRNA) 5' transfer RNA (tRNA) half
cgcgggaggccc

SEQ ID NO: 12958 - DNA, 13 bp, Artificial Sequence
  synthetic circulating small noncoding RNA (sncRNA) 5' transfer RNA (tRNA) half
gcgaccacgaagg

SEQ ID NO: 12959 - DNA, 41 bp, Artificial Sequence
  synthetic circulating small noncoding RNA (sncRNA) 5' transfer RNA (tRNA) half
atccattggggtttccccgcgcaggttcgaatcctgccgac

SEQ ID NO: 12960 - DNA, 11 bp, Artificial Sequence
  synthetic circulating small noncoding RNA (sncRNA) 5' transfer RNA (tRNA) half
ccccgacgggg

SEQ ID NO: 12961 - DNA, 14 bp, Artificial Sequence
  synthetic circulating small noncoding RNA (sncRNA) 5' transfer RNA (tRNA) half
gataaccgctacac

SEQ ID NO: 12962 - DNA, 21 bp, Artificial Sequence
  synthetic circulating small noncoding RNA (sncRNA) 5' transfer RNA (tRNA) half
gggaatcgaaccccggtctcc

SEQ ID NO: 12963 - DNA, 37 bp, Artificial Sequence
  synthetic circulating small noncoding RNA (sncRNA) 5' transfer RNA (tRNA) half
ccgcagcaacctcggttcgaatccgagtcacggcagt

SEQ ID NO: 12964 - DNA, 20 bp, Artificial Sequence
  synthetic circulating small noncoding RNA (sncRNA) 5' transfer RNA (tRNA) half
tagtggtatcatgcaagatt

SEQ ID NO: 12965 - DNA, 37 bp, Artificial Sequence
  synthetic circulating small noncoding RNA (sncRNA) 5' transfer RNA (tRNA) half
tttccccgcgcaggttcgaatcctgccgactacgtga

SEQ ID NO: 12966 - DNA, 19 bp, Artificial Sequence
  synthetic circulating small noncoding RNA (sncRNA) 5' transfer RNA (tRNA) half
aactcggatcgctggattc

SEQ ID NO: 12967 - DNA, 11 bp, Artificial Sequence
  synthetic circulating small noncoding RNA (sncRNA) 5' transfer RNA (tRNA) half
agctagccggg

SEQ ID NO: 12968 - DNA, 16 bp, Artificial Sequence
  synthetic circulating small noncoding RNA (sncRNA) 5' transfer RNA (tRNA) half
ggccgcctgggtgaaa

SEQ ID NO: 12969 - DNA, 30 bp, Artificial Sequence
  synthetic circulating small noncoding RNA (sncRNA) 5' transfer RNA (tRNA) half
cgagaattctaccactgaaccaccaatgca

SEQ ID NO: 12970 - DNA, 14 bp, Artificial Sequence
  synthetic circulating small noncoding RNA (sncRNA) 5' transfer RNA (tRNA) half
ttcggctgttaacc

SEQ ID NO: 12971 - DNA, 14 bp, Artificial Sequence
  synthetic circulating small noncoding RNA (sncRNA) 5' transfer RNA (tRNA) half
ccgggttcgactcc

SEQ ID NO: 12972 - DNA, 11 bp, Artificial Sequence
  synthetic circulating small noncoding RNA (sncRNA) 5' transfer RNA (tRNA) half
tcgtccgggat

SEQ ID NO: 12973 - DNA, 35 bp, Artificial Sequence
  synthetic circulating small noncoding RNA (sncRNA) 5' transfer RNA (tRNA) half
cattcttgcgacccgggttcgattcccgggcggcg

SEQ ID NO: 12974 - DNA, 16 bp, Artificial Sequence
  synthetic circulating small noncoding RNA (sncRNA) 5' transfer RNA (tRNA) half
gagctagccgggcagc

SEQ ID NO: 12975 - DNA, 19 bp, Artificial Sequence
  synthetic circulating small noncoding RNA (sncRNA) 5' transfer RNA (tRNA) half
tgcgagaggtcccgggttc

SEQ ID NO: 12976 - DNA, 30 bp, Artificial Sequence
  synthetic circulating small noncoding RNA (sncRNA) 5' transfer RNA (tRNA) half
cgcgtggcaggcgagaattctaccactgaa

SEQ ID NO: 12977 - DNA, 11 bp, Artificial Sequence
  synthetic circulating small noncoding RNA (sncRNA) 5' transfer RNA (tRNA) half
gggggtatagc

SEQ ID NO: 12978 - DNA, 19 bp, Artificial Sequence
  synthetic circulating small noncoding RNA (sncRNA) 5' transfer RNA (tRNA) half
agttctggctccgtggctt

SEQ ID NO: 12979 - DNA, 19 bp, Artificial Sequence
  synthetic circulating small noncoding RNA (sncRNA) 5' transfer RNA (tRNA) half
ccacgcgggaggcccgggt

SEQ ID NO: 12980 - DNA, 24 bp, Artificial Sequence
  synthetic circulating small noncoding RNA (sncRNA) 5' transfer RNA (tRNA) half
acccgggttcgattcccgggcggc

SEQ ID NO: 12981 - DNA, 28 bp, Artificial Sequence
  synthetic circulating small noncoding RNA (sncRNA) 5' transfer RNA (tRNA) half
gtggagatgccggggatcgaacccgggg

SEQ ID NO: 12982 - DNA, 34 bp, Artificial Sequence
  synthetic circulating small noncoding RNA (sncRNA) 5' transfer RNA (tRNA) half
accacgaagggactcgaaccctcaatcttctgat

SEQ ID NO: 12983 - DNA, 30 bp, Artificial Sequence
  synthetic circulating small noncoding RNA (sncRNA) 5' transfer RNA (tRNA) half
cttgcgacccgggttcgattcccgggcggc

SEQ ID NO: 12984 - DNA, 21 bp, Artificial Sequence
  synthetic circulating small noncoding RNA (sncRNA) 5' transfer RNA (tRNA) half
gcatgggtggttcagtggtag

SEQ ID NO: 12985 - DNA, 24 bp, Artificial Sequence
  synthetic circulating small noncoding RNA (sncRNA) 5' transfer RNA (tRNA) half
cttgaccccgacgtgacttgaaca

SEQ ID NO: 12986 - DNA, 23 bp, Artificial Sequence
  synthetic circulating small noncoding RNA (sncRNA) 5' transfer RNA (tRNA) half
aaaatggtggagatgccggggat

SEQ ID NO: 12987 - DNA, 22 bp, Artificial Sequence
  synthetic circulating small noncoding RNA (sncRNA) 5' transfer RNA (tRNA) half
gttaggcgaatgtgataaccac

SEQ ID NO: 12988 - DNA, 29 bp, Artificial Sequence
  synthetic circulating small noncoding RNA (sncRNA) 5' transfer RNA (tRNA) half
agtccagagtgctaaccattacaccatgg

SEQ ID NO: 12989 - DNA, 34 bp, Artificial Sequence
  synthetic circulating small noncoding RNA (sncRNA) 5' transfer RNA (tRNA) half
aatccagcgatccgagttcaaatctcggtgggac

SEQ ID NO: 12990 - DNA, 18 bp, Artificial Sequence
  synthetic circulating small noncoding RNA (sncRNA) 5' transfer RNA (tRNA) half
aattctcgcctgccacgc

SEQ ID NO: 12991 - DNA, 18 bp, Artificial Sequence
  synthetic circulating small noncoding RNA (sncRNA) 5' transfer RNA (tRNA) half
agccaggagtcgaaccta

SEQ ID NO: 12992 - DNA, 24 bp, Artificial Sequence
  synthetic circulating small noncoding RNA (sncRNA) 5' transfer RNA (tRNA) half
tcgcatgtgtgaggtcccgggttc

SEQ ID NO: 12993 - DNA, 22 bp, Artificial Sequence
  synthetic circulating small noncoding RNA (sncRNA) 5' transfer RNA (tRNA) half
gtgtttccgcccggtttcgaac

SEQ ID NO: 12994 - DNA, 33 bp, Artificial Sequence
  synthetic circulating small noncoding RNA (sncRNA) 5' transfer RNA (tRNA) half
tgccccctctgaggttcgaactcaggaccttca

SEQ ID NO: 12995 - DNA, 18 bp, Artificial Sequence
  synthetic circulating small noncoding RNA (sncRNA) 5' transfer RNA (tRNA) half
gtctcccgcgtgacaggc

SEQ ID NO: 12996 - DNA, 38 bp, Artificial Sequence
  synthetic circulating small noncoding RNA (sncRNA) 5' transfer RNA (tRNA) half
cgtgtgaggcgaacgtgataaccactacactacggaaa

SEQ ID NO: 12997 - DNA, 26 bp, Artificial Sequence
  synthetic circulating small noncoding RNA (sncRNA) 5' transfer RNA (tRNA) half
tgtgggttcgagtcccatctggggtg

SEQ ID NO: 12998 - DNA, 17 bp, Artificial Sequence
  synthetic circulating small noncoding RNA (sncRNA) 5' transfer RNA (tRNA) half
attaagagtcccatgct

SEQ ID NO: 12999 - DNA, 35 bp, Artificial Sequence
  synthetic circulating small noncoding RNA (sncRNA) 5' transfer RNA (tRNA) half
attaagagtcccatgctctaccgactgagctagcc

SEQ ID NO: 13000 - DNA, 39 bp, Artificial Sequence
  synthetic circulating small noncoding RNA (sncRNA) 5' transfer RNA (tRNA) half
taaacaggagatcctgggttcgaatcccagcggggcctt

SEQ ID NO: 13001 - DNA, 12 bp, Artificial Sequence
  synthetic circulating small noncoding RNA (sncRNA) 5' transfer RNA (tRNA) half
ctgggttatggg

SEQ ID NO: 13002 - DNA, 25 bp, Artificial Sequence
  synthetic circulating small noncoding RNA (sncRNA) 5' transfer RNA (tRNA) half
gggttcgattccccgacggggagtc

SEQ ID NO: 13003 - DNA, 12 bp, Artificial Sequence
  synthetic circulating small noncoding RNA (sncRNA) 5' transfer RNA (tRNA) half
acgcgggaggcc

SEQ ID NO: 13004 - DNA, 35 bp, Artificial Sequence
  synthetic circulating small noncoding RNA (sncRNA) 5' transfer RNA (tRNA) half
ggagggggcacccggatttgaaccagggacctctt

SEQ ID NO: 13005 - DNA, 11 bp, Artificial Sequence
  synthetic circulating small noncoding RNA (sncRNA) 5' transfer RNA (tRNA) half
gggacctctcg

SEQ ID NO: 13006 - DNA, 33 bp, Artificial Sequence
  synthetic circulating small noncoding RNA (sncRNA) 5' transfer RNA (tRNA) half
tttccgcccggtttcgaaccggggacctttcgc

SEQ ID NO: 13007 - DNA, 20 bp, Artificial Sequence
  synthetic circulating small noncoding RNA (sncRNA) 5' transfer RNA (tRNA) half
cactctggactctgaatcca

SEQ ID NO: 13008 - DNA, 26 bp, Artificial Sequence
  synthetic circulating small noncoding RNA (sncRNA) 5' transfer RNA (tRNA) half
cctcacacgcgaaaggtccccggttc

SEQ ID NO: 13009 - DNA, 21 bp, Artificial Sequence
  synthetic circulating small noncoding RNA (sncRNA) 5' transfer RNA (tRNA) half
tgatcattgtacctccccgtc

SEQ ID NO: 13010 - DNA, 16 bp, Artificial Sequence
  synthetic circulating small noncoding RNA (sncRNA) 5' transfer RNA (tRNA) half
ggtgcgagaggtcccg

SEQ ID NO: 13011 - DNA, 27 bp, Artificial Sequence
  synthetic circulating small noncoding RNA (sncRNA) 5' transfer RNA (tRNA) half
ccccgacgtgacttgaacacgcaacct

SEQ ID NO: 13012 - DNA, 14 bp, Artificial Sequence
  synthetic circulating small noncoding RNA (sncRNA) 5' transfer RNA (tRNA) half
cggggaatcgaacc

SEQ ID NO: 13013 - DNA, 18 bp, Artificial Sequence
  synthetic circulating small noncoding RNA (sncRNA) 5' transfer RNA (tRNA) half
gctggtgtagtggtatca

SEQ ID NO: 13014 - DNA, 26 bp, Artificial Sequence
  synthetic circulating small noncoding RNA (sncRNA) 5' transfer RNA (tRNA) half
tcctgagttcgaacctcagagggggc

SEQ ID NO: 13015 - DNA, 33 bp, Artificial Sequence
  synthetic circulating small noncoding RNA (sncRNA) 5' transfer RNA (tRNA) half
cttgcgacccgggttcgattcccgggcggcgca

SEQ ID NO: 13016 - DNA, 27 bp, Artificial Sequence
  synthetic circulating small noncoding RNA (sncRNA) 5' transfer RNA (tRNA) half
gtcctccgctctaccaactgagctatc

SEQ ID NO: 13017 - DNA, 12 bp, Artificial Sequence
  synthetic circulating small noncoding RNA (sncRNA) 5' transfer RNA (tRNA) half
cccgacggggag

SEQ ID NO: 13018 - DNA, 23 bp, Artificial Sequence
  synthetic circulating small noncoding RNA (sncRNA) 5' transfer RNA (tRNA) half
gggattaagagtcccatgctcta

SEQ ID NO: 13019 - DNA, 24 bp, Artificial Sequence
  synthetic circulating small noncoding RNA (sncRNA) 5' transfer RNA (tRNA) half
ggccggttagctcagttggttaga

SEQ ID NO: 13020 - DNA, 35 bp, Artificial Sequence
  synthetic circulating small noncoding RNA (sncRNA) 5' transfer RNA (tRNA) half
ctcggatcgctggattcaaagtccagagtgctaac

SEQ ID NO: 13021 - DNA, 19 bp, Artificial Sequence
  synthetic circulating small noncoding RNA (sncRNA) 5' transfer RNA (tRNA) half
ctttgaatccagcgatccg

SEQ ID NO: 13022 - DNA, 36 bp, Artificial Sequence
  synthetic circulating small noncoding RNA (sncRNA) 5' transfer RNA (tRNA) half
tcctgccgtgactcggattcgaaccgaggttgctgc

SEQ ID NO: 13023 - DNA, 7 bp, Artificial Sequence
  synthetic circulating small noncoding RNA (sncRNA) 5' transfer RNA (tRNA) half
gtaggca

SEQ ID NO: 13024 - DNA, 17 bp, Artificial Sequence
  synthetic circulating small noncoding RNA (sncRNA) 5' transfer RNA (tRNA) half
attcccggtcagggaag

SEQ ID NO: 13025 - DNA, 34 bp, Artificial Sequence
  synthetic circulating small noncoding RNA (sncRNA) 5' transfer RNA (tRNA) half
aagcgagaatcatacccctagaccaacgagccac

SEQ ID NO: 13026 - DNA, 17 bp, Artificial Sequence
  synthetic circulating small noncoding RNA (sncRNA) 5' transfer RNA (tRNA) half
cagaagattccaggttc

SEQ ID NO: 13027 - DNA, 18 bp, Artificial Sequence
  synthetic circulating small noncoding RNA (sncRNA) 5' transfer RNA (tRNA) half
gatggccgagtggttaag

SEQ ID NO: 13028 - DNA, 17 bp, Artificial Sequence
  synthetic circulating small noncoding RNA (sncRNA) 5' transfer RNA (tRNA) half
catgagactcttaatct

SEQ ID NO: 13029 - DNA, 22 bp, Artificial Sequence
  synthetic circulating small noncoding RNA (sncRNA) 5' transfer RNA (tRNA) half
tcaaatggtagagcgctcgctt

SEQ ID NO: 13030 - DNA, 23 bp, Artificial Sequence
  synthetic circulating small noncoding RNA (sncRNA) 5' transfer RNA (tRNA) half
cggaagcgtgctgggcccataac

SEQ ID NO: 13031 - DNA, 42 bp, Artificial Sequence
  synthetic circulating small noncoding RNA (sncRNA) 5' transfer RNA (tRNA) half
aagacttaaaaccttgttcccagaggttcaaatcctctccct

SEQ ID NO: 13032 - DNA, 9 bp, Artificial Sequence
  synthetic circulating small noncoding RNA (sncRNA) 5' transfer RNA (tRNA) half
ttcgcccgg

SEQ ID NO: 13033 - DNA, 20 bp, Artificial Sequence
  synthetic circulating small noncoding RNA (sncRNA) 5' transfer RNA (tRNA) half
agaattctaccactgaacca

SEQ ID NO: 13034 - DNA, 23 bp, Artificial Sequence
  synthetic circulating small noncoding RNA (sncRNA) 5' transfer RNA (tRNA) half
tgagttcgaacctcagagggggc

SEQ ID NO: 13035 - DNA, 9 bp, Artificial Sequence
  synthetic circulating small noncoding RNA (sncRNA) 5' transfer RNA (tRNA) half
acccgcgac

SEQ ID NO: 13036 - DNA, 12 bp, Artificial Sequence
  synthetic circulating small noncoding RNA (sncRNA) 5' transfer RNA (tRNA) half
ggacctctcgca

SEQ ID NO: 13037 - DNA, 14 bp, Artificial Sequence
  synthetic circulating small noncoding RNA (sncRNA) 5' transfer RNA (tRNA) half
ttcccggccaatgc

SEQ ID NO: 13038 - DNA, 35 bp, Artificial Sequence
  synthetic circulating small noncoding RNA (sncRNA) 5' transfer RNA (tRNA) half
accgagccagccaggagtcgaacctggaatcttct

SEQ ID NO: 13039 - DNA, 29 bp, Artificial Sequence
  synthetic circulating small noncoding RNA (sncRNA) 5' transfer RNA (tRNA) half
ggtccagggttcaagtccctgttcgggcg

SEQ ID NO: 13040 - DNA, 19 bp, Artificial Sequence
  synthetic circulating small noncoding RNA (sncRNA) 5' transfer RNA (tRNA) half
ctcggtgggacctctttga

SEQ ID NO: 13041 - DNA, 16 bp, Artificial Sequence
  synthetic circulating small noncoding RNA (sncRNA) 5' transfer RNA (tRNA) half
cgccgaatcctagcca

SEQ ID NO: 13042 - DNA, 35 bp, Artificial Sequence
  synthetic circulating small noncoding RNA (sncRNA) 5' transfer RNA (tRNA) half
acgaggccccgggttcaatccccggcacctccagt

SEQ ID NO: 13043 - DNA, 31 bp, Artificial Sequence
  synthetic circulating small noncoding RNA (sncRNA) 5' transfer RNA (tRNA) half
actctggactctgaatccagcgatccgagtt

SEQ ID NO: 13044 - DNA, 32 bp, Artificial Sequence
  synthetic circulating small noncoding RNA (sncRNA) 5' transfer RNA (tRNA) half
agcgcccaacgtggggctcgaacccacgaccc

SEQ ID NO: 13045 - DNA, 31 bp, Artificial Sequence
  synthetic circulating small noncoding RNA (sncRNA) 5' transfer RNA (tRNA) half
ggcggggatactcaccactatactaacgagg

SEQ ID NO: 13046 - DNA, 13 bp, Artificial Sequence
  synthetic circulating small noncoding RNA (sncRNA) 5' transfer RNA (tRNA) half
cggaagcgtgctg

SEQ ID NO: 13047 - DNA, 40 bp, Artificial Sequence
  synthetic circulating small noncoding RNA (sncRNA) 5' transfer RNA (tRNA) half
gccccctctgaggttcgaactcaggaccttcagattatga

SEQ ID NO: 13048 - DNA, 12 bp, Artificial Sequence
  synthetic circulating small noncoding RNA (sncRNA) 5' transfer RNA (tRNA) half
taacagccgaac

SEQ ID NO: 13049 - DNA, 25 bp, Artificial Sequence
  synthetic circulating small noncoding RNA (sncRNA) 5' transfer RNA (tRNA) half
ggattcaaagtccagagtgctaacc

SEQ ID NO: 13050 - DNA, 20 bp, Artificial Sequence
  synthetic circulating small noncoding RNA (sncRNA) 5' transfer RNA (tRNA) half
gcactctggactctgaatcc

SEQ ID NO: 13051 - DNA, 45 bp, Artificial Sequence
  synthetic circulating small noncoding RNA (sncRNA) 5' transfer RNA (tRNA) half
ggcagcggtgggattcgaacccacgcccccgaagagactggagcc

SEQ ID NO: 13052 - DNA, 9 bp, Artificial Sequence
  synthetic circulating small noncoding RNA (sncRNA) 5' transfer RNA (tRNA) half
aggcccggg

SEQ ID NO: 13053 - DNA, 24 bp, Artificial Sequence
  synthetic circulating small noncoding RNA (sncRNA) 5' transfer RNA (tRNA) half
agttcaaatctcggtggaacctgc

SEQ ID NO: 13054 - DNA, 11 bp, Artificial Sequence
  synthetic circulating small noncoding RNA (sncRNA) 5' transfer RNA (tRNA) half
cactcggccat

SEQ ID NO: 13055 - DNA, 11 bp, Artificial Sequence
  synthetic circulating small noncoding RNA (sncRNA) 5' transfer RNA (tRNA) half
tcgattccccg

SEQ ID NO: 13056 - DNA, 35 bp, Artificial Sequence
  synthetic circulating small noncoding RNA (sncRNA) 5' transfer RNA (tRNA) half
accccgacgtgatttgaacacgcaaccttctgatc

SEQ ID NO: 13057 - DNA, 24 bp, Artificial Sequence
  synthetic circulating small noncoding RNA (sncRNA) 5' transfer RNA (tRNA) half
tgtgcattggccgggaatcgaacc

SEQ ID NO: 13058 - DNA, 13 bp, Artificial Sequence
  synthetic circulating small noncoding RNA (sncRNA) 5' transfer RNA (tRNA) half
accgaggttgctg

SEQ ID NO: 13059 - DNA, 44 bp, Artificial Sequence
  synthetic circulating small noncoding RNA (sncRNA) 5' transfer RNA (tRNA) half
ggttgccccctctgaggttcgaactcaggaccttcagattatga

SEQ ID NO: 13060 - DNA, 39 bp, Artificial Sequence
  synthetic circulating small noncoding RNA (sncRNA) 5' transfer RNA (tRNA) half
aggccccagcgagatttgaactcgcgacccctggtttac

SEQ ID NO: 13061 - DNA, 19 bp, Artificial Sequence
  synthetic circulating small noncoding RNA (sncRNA) 5' transfer RNA (tRNA) half
tcgatgcccgcattctcca

SEQ ID NO: 13062 - DNA, 15 bp, Artificial Sequence
  synthetic circulating small noncoding RNA (sncRNA) 5' transfer RNA (tRNA) half
tcagttggttagagc

SEQ ID NO: 13063 - DNA, 8 bp, Artificial Sequence
  synthetic circulating small noncoding RNA (sncRNA) 5' transfer RNA (tRNA) half
cggtctcc

SEQ ID NO: 13064 - DNA, 17 bp, Artificial Sequence
  synthetic circulating small noncoding RNA (sncRNA) 5' transfer RNA (tRNA) half
tctaaccaactgagcta

SEQ ID NO: 13065 - DNA, 21 bp, Artificial Sequence
  synthetic circulating small noncoding RNA (sncRNA) 5' transfer RNA (tRNA) half
ttcagtgaggtcccaccgaga

SEQ ID NO: 13066 - DNA, 21 bp, Artificial Sequence
  synthetic circulating small noncoding RNA (sncRNA) 5' transfer RNA (tRNA) half
tgtgcattggccgggaatcga

SEQ ID NO: 13067 - DNA, 30 bp, Artificial Sequence
  synthetic circulating small noncoding RNA (sncRNA) 5' transfer RNA (tRNA) half
agacgacgaggatgggattcgaacccacgc

SEQ ID NO: 13068 - DNA, 14 bp, Artificial Sequence
  synthetic circulating small noncoding RNA (sncRNA) 5' transfer RNA (tRNA) half
gagctataccccca

SEQ ID NO: 13069 - DNA, 22 bp, Artificial Sequence
  synthetic circulating small noncoding RNA (sncRNA) 5' transfer RNA (tRNA) half
gtcaaatgctctacccctgagc

SEQ ID NO: 13070 - DNA, 21 bp, Artificial Sequence
  synthetic circulating small noncoding RNA (sncRNA) 5' transfer RNA (tRNA) half
tgtgccccgtgtgaggatcga

SEQ ID NO: 13071 - DNA, 12 bp, Artificial Sequence
  synthetic circulating small noncoding RNA (sncRNA) 5' transfer RNA (tRNA) half
tctcgcacccaa

SEQ ID NO: 13072 - DNA, 22 bp, Artificial Sequence
  synthetic circulating small noncoding RNA (sncRNA) 5' transfer RNA (tRNA) half
ttcaaatcccggacgagcccca

SEQ ID NO: 13073 - DNA, 26 bp, Artificial Sequence
  synthetic circulating small noncoding RNA (sncRNA) 5' transfer RNA (tRNA) half
ccagggttcaagtccctgttcgggcg

SEQ ID NO: 13074 - DNA, 22 bp, Artificial Sequence
  synthetic circulating small noncoding RNA (sncRNA) 5' transfer RNA (tRNA) half
ggttatgggcccagcacgcttc

SEQ ID NO: 13075 - DNA, 14 bp, Artificial Sequence
  synthetic circulating small noncoding RNA (sncRNA) 5' transfer RNA (tRNA) half
gattatgagactga

SEQ ID NO: 13076 - DNA, 32 bp, Artificial Sequence
  synthetic circulating small noncoding RNA (sncRNA) 5' transfer RNA (tRNA) half
ccgtgatcgtataggggttagtactctgcgtt

SEQ ID NO: 13077 - DNA, 23 bp, Artificial Sequence
  synthetic circulating small noncoding RNA (sncRNA) 5' transfer RNA (tRNA) half
gttcgaatcccaccactgccaac

SEQ ID NO: 13078 - DNA, 22 bp, Artificial Sequence
  synthetic circulating small noncoding RNA (sncRNA) 5' transfer RNA (tRNA) half
agagtccagagtgctaaccatt

SEQ ID NO: 13079 - DNA, 15 bp, Artificial Sequence
  synthetic circulating small noncoding RNA (sncRNA) 5' transfer RNA (tRNA) half
tcctgccgactacgg

SEQ ID NO: 13080 - DNA, 13 bp, Artificial Sequence
  synthetic circulating small noncoding RNA (sncRNA) 5' transfer RNA (tRNA) half
ctaccgactgagc

SEQ ID NO: 13081 - DNA, 13 bp, Artificial Sequence
  synthetic circulating small noncoding RNA (sncRNA) 5' transfer RNA (tRNA) half
gttcgaacccacg

SEQ ID NO: 13082 - DNA, 25 bp, Artificial Sequence
  synthetic circulating small noncoding RNA (sncRNA) 5' transfer RNA (tRNA) half
gtggttatcacgttcgcctaacacg

SEQ ID NO: 13083 - DNA, 22 bp, Artificial Sequence
  synthetic circulating small noncoding RNA (sncRNA) 5' transfer RNA (tRNA) half
tcgggtgcgagaggtcccgggt

SEQ ID NO: 13084 - DNA, 11 bp, Artificial Sequence
  synthetic circulating small noncoding RNA (sncRNA) 5' transfer RNA (tRNA) half
cgcctccgaag

SEQ ID NO: 13085 - DNA, 26 bp, Artificial Sequence
  synthetic circulating small noncoding RNA (sncRNA) 5' transfer RNA (tRNA) half
cgtgatcgtatagtggttagtactct

SEQ ID NO: 13086 - DNA, 24 bp, Artificial Sequence
  synthetic circulating small noncoding RNA (sncRNA) 5' transfer RNA (tRNA) half
gctcagtcggtagagcatcagact

SEQ ID NO: 13087 - DNA, 19 bp, Artificial Sequence
  synthetic circulating small noncoding RNA (sncRNA) 5' transfer RNA (tRNA) half
gcgagcgctctaccatttg

SEQ ID NO: 13088 - DNA, 23 bp, Artificial Sequence
  synthetic circulating small noncoding RNA (sncRNA) 5' transfer RNA (tRNA) half
tcgaaccaccaacctttcggtta

SEQ ID NO: 13089 - DNA, 29 bp, Artificial Sequence
  synthetic circulating small noncoding RNA (sncRNA) 5' transfer RNA (tRNA) half
ggcatgggtggttcagtggtagaattctc

SEQ ID NO: 13090 - DNA, 11 bp, Artificial Sequence
  synthetic circulating small noncoding RNA (sncRNA) 5' transfer RNA (tRNA) half
gagccagccag

SEQ ID NO: 13091 - DNA, 22 bp, Artificial Sequence
  synthetic circulating small noncoding RNA (sncRNA) 5' transfer RNA (tRNA) half
ttaaccactcggccacctcgtc

SEQ ID NO: 13092 - DNA, 28 bp, Artificial Sequence
  synthetic circulating small noncoding RNA (sncRNA) 5' transfer RNA (tRNA) half
ggcaagaattctaccactgaaccaccaa

SEQ ID NO: 13093 - DNA, 19 bp, Artificial Sequence
  synthetic circulating small noncoding RNA (sncRNA) 5' transfer RNA (tRNA) half
ctcagtcggtagagcatca

SEQ ID NO: 13094 - DNA, 36 bp, Artificial Sequence
  synthetic circulating small noncoding RNA (sncRNA) 5' transfer RNA (tRNA) half
gtagagcatgagactcttaatctcagggtcgtgggt

SEQ ID NO: 13095 - DNA, 13 bp, Artificial Sequence
  synthetic circulating small noncoding RNA (sncRNA) 5' transfer RNA (tRNA) half
gcacccggatttg

SEQ ID NO: 13096 - DNA, 21 bp, Artificial Sequence
  synthetic circulating small noncoding RNA (sncRNA) 5' transfer RNA (tRNA) half
cgtagtcggcaggattcgaac

SEQ ID NO: 13097 - DNA, 16 bp, Artificial Sequence
  synthetic circulating small noncoding RNA (sncRNA) 5' transfer RNA (tRNA) half
cttcgggggcgtgggt

SEQ ID NO: 13098 - DNA, 15 bp, Artificial Sequence
  synthetic circulating small noncoding RNA (sncRNA) 5' transfer RNA (tRNA) half
gctcggccacgctac

SEQ ID NO: 13099 - DNA, 11 bp, Artificial Sequence
  synthetic circulating small noncoding RNA (sncRNA) 5' transfer RNA (tRNA) half
cctttcgggcg

SEQ ID NO: 13100 - DNA, 35 bp, Artificial Sequence
  synthetic circulating small noncoding RNA (sncRNA) 5' transfer RNA (tRNA) half
tcgcgtgtgaggcgaacgtgataaccactacacta

SEQ ID NO: 13101 - DNA, 11 bp, Artificial Sequence
  synthetic circulating small noncoding RNA (sncRNA) 5' transfer RNA (tRNA) half
accccggtctc

SEQ ID NO: 13102 - DNA, 38 bp, Artificial Sequence
  synthetic circulating small noncoding RNA (sncRNA) 5' transfer RNA (tRNA) half
tcacacgcgaaaggtccccggttcgaaaccgggcggaa

SEQ ID NO: 13103 - DNA, 28 bp, Artificial Sequence
  synthetic circulating small noncoding RNA (sncRNA) 5' transfer RNA (tRNA) half
tagtggtgagtatccccgcctgtcacgc

SEQ ID NO: 13104 - DNA, 15 bp, Artificial Sequence
  synthetic circulating small noncoding RNA (sncRNA) 5' transfer RNA (tRNA) half
gctcgaacccacgac

SEQ ID NO: 13105 - DNA, 22 bp, Artificial Sequence
  synthetic circulating small noncoding RNA (sncRNA) 5' transfer RNA (tRNA) half
tcgaatcctgctcacagcgcta

SEQ ID NO: 13106 - DNA, 38 bp, Artificial Sequence
  synthetic circulating small noncoding RNA (sncRNA) 5' transfer RNA (tRNA) half
agtaaccacgaagggattcgaaccctcaatcttctgat

SEQ ID NO: 13107 - DNA, 16 bp, Artificial Sequence
  synthetic circulating small noncoding RNA (sncRNA) 5' transfer RNA (tRNA) half
gaacctagaatcttct

SEQ ID NO: 13108 - DNA, 18 bp, Artificial Sequence
  synthetic circulating small noncoding RNA (sncRNA) 5' transfer RNA (tRNA) half
gtctccccgtcggggaat

SEQ ID NO: 13109 - DNA, 23 bp, Artificial Sequence
  synthetic circulating small noncoding RNA (sncRNA) 5' transfer RNA (tRNA) half
ggttcgattcccggtcagggaaa

SEQ ID NO: 13110 - DNA, 32 bp, Artificial Sequence
  synthetic circulating small noncoding RNA (sncRNA) 5' transfer RNA (tRNA) half
ggttccaccgagatttgaactcggatcgctgg

SEQ ID NO: 13111 - DNA, 20 bp, Artificial Sequence
  synthetic circulating small noncoding RNA (sncRNA) 5' transfer RNA (tRNA) half
gaccactcggccacgctacc

SEQ ID NO: 13112 - DNA, 14 bp, Artificial Sequence
  synthetic circulating small noncoding RNA (sncRNA) 5' transfer RNA (tRNA) half
cgcagcgagcaggg

SEQ ID NO: 13113 - DNA, 15 bp, Artificial Sequence
  synthetic circulating small noncoding RNA (sncRNA) 5' transfer RNA (tRNA) half
accaggaatcctaac

SEQ ID NO: 13114 - DNA, 28 bp, Artificial Sequence
  synthetic circulating small noncoding RNA (sncRNA) 5' transfer RNA (tRNA) half
ccataccgggagtcgaacccgggccgcc

SEQ ID NO: 13115 - DNA, 19 bp, Artificial Sequence
  synthetic circulating small noncoding RNA (sncRNA) 5' transfer RNA (tRNA) half
agcactctggactctgaat

SEQ ID NO: 13116 - DNA, 17 bp, Artificial Sequence
  synthetic circulating small noncoding RNA (sncRNA) 5' transfer RNA (tRNA) half
gcccgtagtcggcagga

SEQ ID NO: 13117 - DNA, 7 bp, Artificial Sequence
  synthetic circulating small noncoding RNA (sncRNA) 5' transfer RNA (tRNA) half
cgggaac

SEQ ID NO: 13118 - DNA, 33 bp, Artificial Sequence
  synthetic circulating small noncoding RNA (sncRNA) 5' transfer RNA (tRNA) half
cgcggcccgggttcgattcccggtcagggaagc

SEQ ID NO: 13119 - DNA, 7 bp, Artificial Sequence
  synthetic circulating small noncoding RNA (sncRNA) 5' transfer RNA (tRNA) half
cggccaa

SEQ ID NO: 13120 - DNA, 12 bp, Artificial Sequence
  synthetic circulating small noncoding RNA (sncRNA) 5' transfer RNA (tRNA) half
gagatgccgggg

SEQ ID NO: 13121 - DNA, 18 bp, Artificial Sequence
  synthetic circulating small noncoding RNA (sncRNA) 5' transfer RNA (tRNA) half
cactggcccgtacgggga

SEQ ID NO: 13122 - DNA, 25 bp, Artificial Sequence
  synthetic circulating small noncoding RNA (sncRNA) 5' transfer RNA (tRNA) half
tcccataccgggagtcgaacccggg

SEQ ID NO: 13123 - DNA, 18 bp, Artificial Sequence
  synthetic circulating small noncoding RNA (sncRNA) 5' transfer RNA (tRNA) half
gactccgccgggactcga

SEQ ID NO: 13124 - DNA, 36 bp, Artificial Sequence
  synthetic circulating small noncoding RNA (sncRNA) 5' transfer RNA (tRNA) half
caccacgctctaaccaactgagctaaccggccagat

SEQ ID NO: 13125 - DNA, 13 bp, Artificial Sequence
  synthetic circulating small noncoding RNA (sncRNA) 5' transfer RNA (tRNA) half
tcccacttctgac

SEQ ID NO: 13126 - DNA, 28 bp, Artificial Sequence
  synthetic circulating small noncoding RNA (sncRNA) 5' transfer RNA (tRNA) half
tccgactccgccgggactcgaacccgga

SEQ ID NO: 13127 - DNA, 29 bp, Artificial Sequence
  synthetic circulating small noncoding RNA (sncRNA) 5' transfer RNA (tRNA) half
gttccttcgagccggattcgaaccagcga

SEQ ID NO: 13128 - DNA, 19 bp, Artificial Sequence
  synthetic circulating small noncoding RNA (sncRNA) 5' transfer RNA (tRNA) half
tcccggacgagccctgtag

SEQ ID NO: 13129 - DNA, 19 bp, Artificial Sequence
  synthetic circulating small noncoding RNA (sncRNA) 5' transfer RNA (tRNA) half
caagtccctgttcgggcgc

SEQ ID NO: 13130 - DNA, 23 bp, Artificial Sequence
  synthetic circulating small noncoding RNA (sncRNA) 5' transfer RNA (tRNA) half
gttcaaatcacgtcggggtcatc

SEQ ID NO: 13131 - DNA, 19 bp, Artificial Sequence
  synthetic circulating small noncoding RNA (sncRNA) 5' transfer RNA (tRNA) half
cagtggtagagcatttgac

SEQ ID NO: 13132 - DNA, 12 bp, Artificial Sequence
  synthetic circulating small noncoding RNA (sncRNA) 5' transfer RNA (tRNA) half
cgttggccggga

SEQ ID NO: 13133 - DNA, 15 bp, Artificial Sequence
  synthetic circulating small noncoding RNA (sncRNA) 5' transfer RNA (tRNA) half
gggggcacccggatt

SEQ ID NO: 13134 - DNA, 24 bp, Artificial Sequence
  synthetic circulating small noncoding RNA (sncRNA) 5' transfer RNA (tRNA) half
cgagaatcatacccctagaccaac

SEQ ID NO: 13135 - DNA, 26 bp, Artificial Sequence
  synthetic circulating small noncoding RNA (sncRNA) 5' transfer RNA (tRNA) half
atggttagcactctggactctgaatc

SEQ ID NO: 13136 - DNA, 23 bp, Artificial Sequence
  synthetic circulating small noncoding RNA (sncRNA) 5' transfer RNA (tRNA) half
tggcaggcgagaattctaccact

SEQ ID NO: 13137 - DNA, 18 bp, Artificial Sequence
  synthetic circulating small noncoding RNA (sncRNA) 5' transfer RNA (tRNA) half
gattccccgacggggagt

SEQ ID NO: 13138 - DNA, 36 bp, Artificial Sequence
  synthetic circulating small noncoding RNA (sncRNA) 5' transfer RNA (tRNA) half
gtggtctggggtgcaggcttcaaacctgtagctgtt

SEQ ID NO: 13139 - DNA, 17 bp, Artificial Sequence
  synthetic circulating small noncoding RNA (sncRNA) 5' transfer RNA (tRNA) half
ttcgaatcccaccgctg

SEQ ID NO: 13140 - DNA, 25 bp, Artificial Sequence
  synthetic circulating small noncoding RNA (sncRNA) 5' transfer RNA (tRNA) half
aaggccccagcgagatttgaactcg

SEQ ID NO: 13141 - DNA, 16 bp, Artificial Sequence
  synthetic circulating small noncoding RNA (sncRNA) 5' transfer RNA (tRNA) half
ccggatagctcagtcg

SEQ ID NO: 13142 - DNA, 24 bp, Artificial Sequence
  synthetic circulating small noncoding RNA (sncRNA) 5' transfer RNA (tRNA) half
gttcgagcctcacctggagcacga

SEQ ID NO: 13143 - DNA, 26 bp, Artificial Sequence
  synthetic circulating small noncoding RNA (sncRNA) 5' transfer RNA (tRNA) half
atccattggggtttccccgcgcaggt

SEQ ID NO: 13144 - DNA, 19 bp, Artificial Sequence
  synthetic circulating small noncoding RNA (sncRNA) 5' transfer RNA (tRNA) half
tccaatgcgctatccattg

SEQ ID NO: 13145 - DNA, 26 bp, Artificial Sequence
  synthetic circulating small noncoding RNA (sncRNA) 5' transfer RNA (tRNA) half
tccgcccggtttcgaaccggggacct

SEQ ID NO: 13146 - DNA, 35 bp, Artificial Sequence
  synthetic circulating small noncoding RNA (sncRNA) 5' transfer RNA (tRNA) half
cgtggcaggcgagaattctaccactgaaccaccaa

SEQ ID NO: 13147 - DNA, 40 bp, Artificial Sequence
  synthetic circulating small noncoding RNA (sncRNA) 5' transfer RNA (tRNA) half
acccacgaccctgagattaagagtctcatgctctaccgac

SEQ ID NO: 13148 - DNA, 14 bp, Artificial Sequence
  synthetic circulating small noncoding RNA (sncRNA) 5' transfer RNA (tRNA) half
cctccgaagagact

SEQ ID NO: 13149 - DNA, 7 bp, Artificial Sequence
  synthetic circulating small noncoding RNA (sncRNA) 5' transfer RNA (tRNA) half
cgggccg

SEQ ID NO: 13150 - DNA, 39 bp, Artificial Sequence
  synthetic circulating small noncoding RNA (sncRNA) 5' transfer RNA (tRNA) half
gccgcccgaacagggacttgaaccctggaccctcagatt

SEQ ID NO: 13151 - DNA, 27 bp, Artificial Sequence
  synthetic circulating small noncoding RNA (sncRNA) 5' transfer RNA (tRNA) half
aatccagcgccttagaccactcggcca

SEQ ID NO: 13152 - DNA, 28 bp, Artificial Sequence
  synthetic circulating small noncoding RNA (sncRNA) 5' transfer RNA (tRNA) half
cggcaggattcgaacctgcgcggggaga

SEQ ID NO: 13153 - DNA, 30 bp, Artificial Sequence
  synthetic circulating small noncoding RNA (sncRNA) 5' transfer RNA (tRNA) half
ccccgacgtgacttgaacacgcaaccttct

SEQ ID NO: 13154 - DNA, 21 bp, Artificial Sequence
  synthetic circulating small noncoding RNA (sncRNA) 5' transfer RNA (tRNA) half
cccgcgaccttggcgttatta

SEQ ID NO: 13155 - DNA, 32 bp, Artificial Sequence
  synthetic circulating small noncoding RNA (sncRNA) 5' transfer RNA (tRNA) half
agggtcgtgggttcgagccccacgttgggcgc

SEQ ID NO: 13156 - DNA, 19 bp, Artificial Sequence
  synthetic circulating small noncoding RNA (sncRNA) 5' transfer RNA (tRNA) half
tcagtcggtagagcatcag

SEQ ID NO: 13157 - DNA, 27 bp, Artificial Sequence
  synthetic circulating small noncoding RNA (sncRNA) 5' transfer RNA (tRNA) half
tggtgtagtggtatcatgcaagattcc

SEQ ID NO: 13158 - DNA, 36 bp, Artificial Sequence
  synthetic circulating small noncoding RNA (sncRNA) 5' transfer RNA (tRNA) half
gttagcactctggactctgaatccagcgatccgagt

SEQ ID NO: 13159 - DNA, 23 bp, Artificial Sequence
  synthetic circulating small noncoding RNA (sncRNA) 5' transfer RNA (tRNA) half
ggcgcagcggaagcgtgctgggc

SEQ ID NO: 13160 - DNA, 23 bp, Artificial Sequence
  synthetic circulating small noncoding RNA (sncRNA) 5' transfer RNA (tRNA) half
aatcctaaccactagaccaccag

SEQ ID NO: 13161 - DNA, 17 bp, Artificial Sequence
  synthetic circulating small noncoding RNA (sncRNA) 5' transfer RNA (tRNA) half
ccaggggtcgcgagttc

SEQ ID NO: 13162 - DNA, 16 bp, Artificial Sequence
  synthetic circulating small noncoding RNA (sncRNA) 5' transfer RNA (tRNA) half
tccgccgggactcgaa

SEQ ID NO: 13163 - DNA, 23 bp, Artificial Sequence
  synthetic circulating small noncoding RNA (sncRNA) 5' transfer RNA (tRNA) half
atcgaacccgggccgcggcggtg

SEQ ID NO: 13164 - DNA, 14 bp, Artificial Sequence
  synthetic circulating small noncoding RNA (sncRNA) 5' transfer RNA (tRNA) half
ccggtctcccgcgt

SEQ ID NO: 13165 - DNA, 18 bp, Artificial Sequence
  synthetic circulating small noncoding RNA (sncRNA) 5' transfer RNA (tRNA) half
aatgcagagtactaacca

SEQ ID NO: 13166 - DNA, 20 bp, Artificial Sequence
  synthetic circulating small noncoding RNA (sncRNA) 5' transfer RNA (tRNA) half
atggtctagcggttaggatt

SEQ ID NO: 13167 - DNA, 33 bp, Artificial Sequence
  synthetic circulating small noncoding RNA (sncRNA) 5' transfer RNA (tRNA) half
ctaaaggtccctggttcgatcccgggtttcggc

SEQ ID NO: 13168 - DNA, 42 bp, Artificial Sequence
  synthetic circulating small noncoding RNA (sncRNA) 5' transfer RNA (tRNA) half
tggtctagtggttaggattcggcgctctcaccgccgcggccc

SEQ ID NO: 13169 - DNA, 27 bp, Artificial Sequence
  synthetic circulating small noncoding RNA (sncRNA) 5' transfer RNA (tRNA) half
atccagcgccttagaccactcggccac

SEQ ID NO: 13170 - DNA, 12 bp, Artificial Sequence
  synthetic circulating small noncoding RNA (sncRNA) 5' transfer RNA (tRNA) half
cgggttcgactc

SEQ ID NO: 13171 - DNA, 39 bp, Artificial Sequence
  synthetic circulating small noncoding RNA (sncRNA) 5' transfer RNA (tRNA) half
ggtgcgagaggtcccgggttcaaatcccggacgagcccc

SEQ ID NO: 13172 - DNA, 31 bp, Artificial Sequence
  synthetic circulating small noncoding RNA (sncRNA) 5' transfer RNA (tRNA) half
aggtcccgggttcaaatcccggacgagcccc

SEQ ID NO: 13173 - DNA, 19 bp, Artificial Sequence
  synthetic circulating small noncoding RNA (sncRNA) 5' transfer RNA (tRNA) half
gccagccaggagtcgaacc

SEQ ID NO: 13174 - DNA, 27 bp, Artificial Sequence
  synthetic circulating small noncoding RNA (sncRNA) 5' transfer RNA (tRNA) half
gcccgtacggggatcgaacccgcgacc

SEQ ID NO: 13175 - DNA, 19 bp, Artificial Sequence
  synthetic circulating small noncoding RNA (sncRNA) 5' transfer RNA (tRNA) half
gtggttatcacgctcgcct

SEQ ID NO: 13176 - DNA, 12 bp, Artificial Sequence
  synthetic circulating small noncoding RNA (sncRNA) 5' transfer RNA (tRNA) half
cgaaccagggac

SEQ ID NO: 13177 - DNA, 21 bp, Artificial Sequence
  synthetic circulating small noncoding RNA (sncRNA) 5' transfer RNA (tRNA) half
cccagcacgcttccgctgcgc

SEQ ID NO: 13178 - DNA, 17 bp, Artificial Sequence
  synthetic circulating small noncoding RNA (sncRNA) 5' transfer RNA (tRNA) half
ggcccgtacggggatcg

SEQ ID NO: 13179 - DNA, 33 bp, Artificial Sequence
  synthetic circulating small noncoding RNA (sncRNA) 5' transfer RNA (tRNA) half
tttccgtagtgtagtggttatcacgttcgccta

SEQ ID NO: 13180 - DNA, 21 bp, Artificial Sequence
  synthetic circulating small noncoding RNA (sncRNA) 5' transfer RNA (tRNA) half
cagtctgtagagcatgagact

SEQ ID NO: 13181 - DNA, 24 bp, Artificial Sequence
  synthetic circulating small noncoding RNA (sncRNA) 5' transfer RNA (tRNA) half
gtctagtggttaggattcggcgct

SEQ ID NO: 13182 - DNA, 15 bp, Artificial Sequence
  synthetic circulating small noncoding RNA (sncRNA) 5' transfer RNA (tRNA) half
cgacgaaggtgggat

SEQ ID NO: 13183 - DNA, 18 bp, Artificial Sequence
  synthetic circulating small noncoding RNA (sncRNA) 5' transfer RNA (tRNA) half
acgacgaggatgggattc

SEQ ID NO: 13184 - DNA, 25 bp, Artificial Sequence
  synthetic circulating small noncoding RNA (sncRNA) 5' transfer RNA (tRNA) half
tgggttcgatccccagcatctccag

SEQ ID NO: 13185 - DNA, 19 bp, Artificial Sequence
  synthetic circulating small noncoding RNA (sncRNA) 5' transfer RNA (tRNA) half
aaccgctagaccatgtggg

SEQ ID NO: 13186 - DNA, 33 bp, Artificial Sequence
  synthetic circulating small noncoding RNA (sncRNA) 5' transfer RNA (tRNA) half
cgggccgcctgggtgaaaaccaggaatcctaac

SEQ ID NO: 13187 - DNA, 22 bp, Artificial Sequence
  synthetic circulating small noncoding RNA (sncRNA) 5' transfer RNA (tRNA) half
atcgatcccactacctcttgca

SEQ ID NO: 13188 - DNA, 16 bp, Artificial Sequence
  synthetic circulating small noncoding RNA (sncRNA) 5' transfer RNA (tRNA) half
aatgttcccgcccggt

SEQ ID NO: 13189 - DNA, 31 bp, Artificial Sequence
  synthetic circulating small noncoding RNA (sncRNA) 5' transfer RNA (tRNA) half
actcggatcgctggattcagagtccagagtg

SEQ ID NO: 13190 - DNA, 15 bp, Artificial Sequence
  synthetic circulating small noncoding RNA (sncRNA) 5' transfer RNA (tRNA) half
gggacctctcgcacc

SEQ ID NO: 13191 - DNA, 23 bp, Artificial Sequence
  synthetic circulating small noncoding RNA (sncRNA) 5' transfer RNA (tRNA) half
gctggtgtagtggtatcatgcaa

SEQ ID NO: 13192 - DNA, 13 bp, Artificial Sequence
  synthetic circulating small noncoding RNA (sncRNA) 5' transfer RNA (tRNA) half
cctcagagggggc

SEQ ID NO: 13193 - DNA, 12 bp, Artificial Sequence
  synthetic circulating small noncoding RNA (sncRNA) 5' transfer RNA (tRNA) half
gggccgcggcgg

SEQ ID NO: 13194 - DNA, 28 bp, Artificial Sequence
  synthetic circulating small noncoding RNA (sncRNA) 5' transfer RNA (tRNA) half
cattggccgggaatcgaacccgggcctc

SEQ ID NO: 13195 - DNA, 21 bp, Artificial Sequence
  synthetic circulating small noncoding RNA (sncRNA) 5' transfer RNA (tRNA) half
cattcttgcgacccgggttcg

SEQ ID NO: 13196 - DNA, 17 bp, Artificial Sequence
  synthetic circulating small noncoding RNA (sncRNA) 5' transfer RNA (tRNA) half
caagtccctgttcgggc

SEQ ID NO: 13197 - DNA, 15 bp, Artificial Sequence
  synthetic circulating small noncoding RNA (sncRNA) 5' transfer RNA (tRNA) half
ggaatcgaaccccgg

SEQ ID NO: 13198 - DNA, 20 bp, Artificial Sequence
  synthetic circulating small noncoding RNA (sncRNA) 5' transfer RNA (tRNA) half
gtgcagagcacaatggatta

SEQ ID NO: 13199 - DNA, 20 bp, Artificial Sequence
  synthetic circulating small noncoding RNA (sncRNA) 5' transfer RNA (tRNA) half
tactaaccactatacgatca

SEQ ID NO: 13200 - DNA, 40 bp, Artificial Sequence
  synthetic circulating small noncoding RNA (sncRNA) 5' transfer RNA (tRNA) half
cacccaggcggcccgggttcgactcccggtatgggaacag

SEQ ID NO: 13201 - DNA, 27 bp, Artificial Sequence
  synthetic circulating small noncoding RNA (sncRNA) 5' transfer RNA (tRNA) half
attgtgggttcgagtcccatctggggt

SEQ ID NO: 13202 - DNA, 29 bp, Artificial Sequence
  synthetic circulating small noncoding RNA (sncRNA) 5' transfer RNA (tRNA) half
cggtctcccgcgtgacaggcggggatact

SEQ ID NO: 13203 - DNA, 22 bp, Artificial Sequence
  synthetic circulating small noncoding RNA (sncRNA) 5' transfer RNA (tRNA) half
gaggcgaacgtgataaccacta

SEQ ID NO: 13204 - DNA, 15 bp, Artificial Sequence
  synthetic circulating small noncoding RNA (sncRNA) 5' transfer RNA (tRNA) half
ccgggccgcggcggt

SEQ ID NO: 13205 - DNA, 26 bp, Artificial Sequence
  synthetic circulating small noncoding RNA (sncRNA) 5' transfer RNA (tRNA) half
tgcaggttcgagtcctgccgcggtcg

SEQ ID NO: 13206 - DNA, 11 bp, Artificial Sequence
  synthetic circulating small noncoding RNA (sncRNA) 5' transfer RNA (tRNA) half
ttcgactcctg

SEQ ID NO: 13207 - DNA, 35 bp, Artificial Sequence
  synthetic circulating small noncoding RNA (sncRNA) 5' transfer RNA (tRNA) half
gcacgaggccccgggttcaatccccggcacctcca

SEQ ID NO: 13208 - DNA, 20 bp, Artificial Sequence
  synthetic circulating small noncoding RNA (sncRNA) 5' transfer RNA (tRNA) half
tcaaatgctctaccactgag

SEQ ID NO: 13209 - DNA, 18 bp, Artificial Sequence
  synthetic circulating small noncoding RNA (sncRNA) 5' transfer RNA (tRNA) half
aatggataaggcatcagc

SEQ ID NO: 13210 - DNA, 30 bp, Artificial Sequence
  synthetic circulating small noncoding RNA (sncRNA) 5' transfer RNA (tRNA) half
gggctcgtccgggatttgaacccgggacct

SEQ ID NO: 13211 - DNA, 20 bp, Artificial Sequence
  synthetic circulating small noncoding RNA (sncRNA) 5' transfer RNA (tRNA) half
cgacgaggatgggattcgaa

SEQ ID NO: 13212 - DNA, 40 bp, Artificial Sequence
  synthetic circulating small noncoding RNA (sncRNA) 5' transfer RNA (tRNA) half
agaagtgcccggctagctcagtcggtagagcatgagactc

SEQ ID NO: 13213 - DNA, 21 bp, Artificial Sequence
  synthetic circulating small noncoding RNA (sncRNA) 5' transfer RNA (tRNA) half
tagaccgctcggccatcctga

SEQ ID NO: 13214 - DNA, 18 bp, Artificial Sequence
  synthetic circulating small noncoding RNA (sncRNA) 5' transfer RNA (tRNA) half
ggcggtgagagcgccgaa

SEQ ID NO: 13215 - DNA, 13 bp, Artificial Sequence
  synthetic circulating small noncoding RNA (sncRNA) 5' transfer RNA (tRNA) half
tccccggcacctc

SEQ ID NO: 13216 - DNA, 37 bp, Artificial Sequence
  synthetic circulating small noncoding RNA (sncRNA) 5' transfer RNA (tRNA) half
tgacaggcggggatactcaccactatactaacgagga

SEQ ID NO: 13217 - DNA, 11 bp, Artificial Sequence
  synthetic circulating small noncoding RNA (sncRNA) 5' transfer RNA (tRNA) half
caggagtcgaa

SEQ ID NO: 13218 - DNA, 15 bp, Artificial Sequence
  synthetic circulating small noncoding RNA (sncRNA) 5' transfer RNA (tRNA) half
ttcgattcccggcca

SEQ ID NO: 13219 - DNA, 21 bp, Artificial Sequence
  synthetic circulating small noncoding RNA (sncRNA) 5' transfer RNA (tRNA) half
cgcccaacgtggggctcgaac

SEQ ID NO: 13220 - DNA, 23 bp, Artificial Sequence
  synthetic circulating small noncoding RNA (sncRNA) 5' transfer RNA (tRNA) half
tcacacgcgaaaggtccccggtt

SEQ ID NO: 13221 - DNA, 10 bp, Artificial Sequence
  synthetic circulating small noncoding RNA (sncRNA) 5' transfer RNA (tRNA) half
gccgaacgcg

SEQ ID NO: 13222 - DNA, 15 bp, Artificial Sequence
  synthetic circulating small noncoding RNA (sncRNA) 5' transfer RNA (tRNA) half
aacccacgcctccag

SEQ ID NO: 13223 - DNA, 13 bp, Artificial Sequence
  synthetic circulating small noncoding RNA (sncRNA) 5' transfer RNA (tRNA) half
tatcacgtctgct

SEQ ID NO: 13224 - DNA, 19 bp, Artificial Sequence
  synthetic circulating small noncoding RNA (sncRNA) 5' transfer RNA (tRNA) half
aacggtagcgcgtctgact

SEQ ID NO: 13225 - DNA, 24 bp, Artificial Sequence
  synthetic circulating small noncoding RNA (sncRNA) 5' transfer RNA (tRNA) half
cccgggttcgactcccggtgtggg

SEQ ID NO: 13226 - DNA, 29 bp, Artificial Sequence
  synthetic circulating small noncoding RNA (sncRNA) 5' transfer RNA (tRNA) half
aaaggcaccgctgggattcgaacccagga

SEQ ID NO: 13227 - DNA, 22 bp, Artificial Sequence
  synthetic circulating small noncoding RNA (sncRNA) 5' transfer RNA (tRNA) half
gttcgaatccggctcgaaggaa

SEQ ID NO: 13228 - DNA, 16 bp, Artificial Sequence
  synthetic circulating small noncoding RNA (sncRNA) 5' transfer RNA (tRNA) half
tcaggaccttcagatt

SEQ ID NO: 13229 - DNA, 14 bp, Artificial Sequence
  synthetic circulating small noncoding RNA (sncRNA) 5' transfer RNA (tRNA) half
ccggtgtgggaaac

SEQ ID NO: 13230 - DNA, 16 bp, Artificial Sequence
  synthetic circulating small noncoding RNA (sncRNA) 5' transfer RNA (tRNA) half
gccacgcgggaggccc

SEQ ID NO: 13231 - DNA, 9 bp, Artificial Sequence
  synthetic circulating small noncoding RNA (sncRNA) 5' transfer RNA (tRNA) half
ccggtctcc

SEQ ID NO: 13232 - DNA, 11 bp, Artificial Sequence
  synthetic circulating small noncoding RNA (sncRNA) 5' transfer RNA (tRNA) half
gaacccgggac

SEQ ID NO: 13233 - DNA, 27 bp, Artificial Sequence
  synthetic circulating small noncoding RNA (sncRNA) 5' transfer RNA (tRNA) half
ccgacgaggatgggattcgaacccacg

SEQ ID NO: 13234 - DNA, 13 bp, Artificial Sequence
  synthetic circulating small noncoding RNA (sncRNA) 5' transfer RNA (tRNA) half
ggtcgtgggttcg

SEQ ID NO: 13235 - DNA, 20 bp, Artificial Sequence
  synthetic circulating small noncoding RNA (sncRNA) 5' transfer RNA (tRNA) half
accctcaatcttctgatccg

SEQ ID NO: 13236 - DNA, 8 bp, Artificial Sequence
  synthetic circulating small noncoding RNA (sncRNA) 5' transfer RNA (tRNA) half
gccgaatc

SEQ ID NO: 13237 - DNA, 30 bp, Artificial Sequence
  synthetic circulating small noncoding RNA (sncRNA) 5' transfer RNA (tRNA) half
gaccccgacgtgatttgaacacgcaacctt

SEQ ID NO: 13238 - DNA, 17 bp, Artificial Sequence
  synthetic circulating small noncoding RNA (sncRNA) 5' transfer RNA (tRNA) half
ggctccatagctcaggg

SEQ ID NO: 13239 - DNA, 18 bp, Artificial Sequence
  synthetic circulating small noncoding RNA (sncRNA) 5' transfer RNA (tRNA) half
ccccggtctcccgcgtga

SEQ ID NO: 13240 - DNA, 32 bp, Artificial Sequence
  synthetic circulating small noncoding RNA (sncRNA) 5' transfer RNA (tRNA) half
ccgtcggggaatcgaaccccggtctcccgcgt

SEQ ID NO: 13241 - DNA, 21 bp, Artificial Sequence
  synthetic circulating small noncoding RNA (sncRNA) 5' transfer RNA (tRNA) half
aatcgaaccccggtctcccgc

SEQ ID NO: 13242 - DNA, 28 bp, Artificial Sequence
  synthetic circulating small noncoding RNA (sncRNA) 5' transfer RNA (tRNA) half
ccgactccgccgggactcgaacccggaa

SEQ ID NO: 13243 - DNA, 23 bp, Artificial Sequence
  synthetic circulating small noncoding RNA (sncRNA) 5' transfer RNA (tRNA) half
tttccgtagtgtagtggttatca

SEQ ID NO: 13244 - DNA, 12 bp, Artificial Sequence
  synthetic circulating small noncoding RNA (sncRNA) 5' transfer RNA (tRNA) half
tagcgtggccga

SEQ ID NO: 13245 - DNA, 31 bp, Artificial Sequence
  synthetic circulating small noncoding RNA (sncRNA) 5' transfer RNA (tRNA) half
ttaggattcggcgctctcaccgccgcggccc

SEQ ID NO: 13246 - DNA, 24 bp, Artificial Sequence
  synthetic circulating small noncoding RNA (sncRNA) 5' transfer RNA (tRNA) half
ggggttcgaacccacgcagacata

SEQ ID NO: 13247 - DNA, 24 bp, Artificial Sequence
  synthetic circulating small noncoding RNA (sncRNA) 5' transfer RNA (tRNA) half
gtggtcatcacgctcgcctcacac

SEQ ID NO: 13248 - DNA, 18 bp, Artificial Sequence
  synthetic circulating small noncoding RNA (sncRNA) 5' transfer RNA (tRNA) half
gccgggcgactgtcactt

SEQ ID NO: 13249 - DNA, 36 bp, Artificial Sequence
  synthetic circulating small noncoding RNA (sncRNA) 5' transfer RNA (tRNA) half
ctgccgtgactcggattcgaaccgaggttgctgcgg

SEQ ID NO: 13250 - DNA, 24 bp, Artificial Sequence
  synthetic circulating small noncoding RNA (sncRNA) 5' transfer RNA (tRNA) half
ggcaggcgagaattctaccactga

SEQ ID NO: 13251 - DNA, 36 bp, Artificial Sequence
  synthetic circulating small noncoding RNA (sncRNA) 5' transfer RNA (tRNA) half
gattaagagtcccatgctctaccgactgagctagcc

SEQ ID NO: 13252 - DNA, 23 bp, Artificial Sequence
  synthetic circulating small noncoding RNA (sncRNA) 5' transfer RNA (tRNA) half
tctccccatcggggaatcgaacc

SEQ ID NO: 13253 - DNA, 11 bp, Artificial Sequence
  synthetic circulating small noncoding RNA (sncRNA) 5' transfer RNA (tRNA) half
aaccggggacc

SEQ ID NO: 13254 - DNA, 21 bp, Artificial Sequence
  synthetic circulating small noncoding RNA (sncRNA) 5' transfer RNA (tRNA) half
ggttcgactcccggtatggga

SEQ ID NO: 13255 - DNA, 22 bp, Artificial Sequence
  synthetic circulating small noncoding RNA (sncRNA) 5' transfer RNA (tRNA) half
ccgggagtcgaacccgggccgc

SEQ ID NO: 13256 - DNA, 38 bp, Artificial Sequence
  synthetic circulating small noncoding RNA (sncRNA) 5' transfer RNA (tRNA) half
taatctcagggtcgtgggttcgagccccacgttgggcg

SEQ ID NO: 13257 - DNA, 18 bp, Artificial Sequence
  synthetic circulating small noncoding RNA (sncRNA) 5' transfer RNA (tRNA) half
tccccgtcggggaatcga

SEQ ID NO: 13258 - DNA, 14 bp, Artificial Sequence
  synthetic circulating small noncoding RNA (sncRNA) 5' transfer RNA (tRNA) half
cgaggttgctgcgg

SEQ ID NO: 13259 - DNA, 21 bp, Artificial Sequence
  synthetic circulating small noncoding RNA (sncRNA) 5' transfer RNA (tRNA) half
attcgaacctgtgcggggaaa

SEQ ID NO: 13260 - DNA, 15 bp, Artificial Sequence
  synthetic circulating small noncoding RNA (sncRNA) 5' transfer RNA (tRNA) half
gttcgattcccggca

SEQ ID NO: 13261 - DNA, 14 bp, Artificial Sequence
  synthetic circulating small noncoding RNA (sncRNA) 5' transfer RNA (tRNA) half
ttcccggcccatgc

SEQ ID NO: 13262 - DNA, 11 bp, Artificial Sequence
  synthetic circulating small noncoding RNA (sncRNA) 5' transfer RNA (tRNA) half
cgaacccgcga

SEQ ID NO: 13263 - DNA, 43 bp, Artificial Sequence
  synthetic circulating small noncoding RNA (sncRNA) 5' transfer RNA (tRNA) half
cgggccgcggcggtgagagcgccgaatcctaaccactagacca

SEQ ID NO: 13264 - DNA, 12 bp, Artificial Sequence
  synthetic circulating small noncoding RNA (sncRNA) 5' transfer RNA (tRNA) half
ccactcggccat

SEQ ID NO: 13265 - DNA, 38 bp, Artificial Sequence
  synthetic circulating small noncoding RNA (sncRNA) 5' transfer RNA (tRNA) half
taccccgggtgggactcgaacccacaatccctggctta

SEQ ID NO: 13266 - DNA, 32 bp, Artificial Sequence
  synthetic circulating small noncoding RNA (sncRNA) 5' transfer RNA (tRNA) half
tccagcgatccgagttcaaatctcggtgggac

SEQ ID NO: 13267 - DNA, 14 bp, Artificial Sequence
  synthetic circulating small noncoding RNA (sncRNA) 5' transfer RNA (tRNA) half
cacgccatcgaaat

SEQ ID NO: 13268 - DNA, 27 bp, Artificial Sequence
  synthetic circulating small noncoding RNA (sncRNA) 5' transfer RNA (tRNA) half
aatccagcgccttagaccgctcggcca

SEQ ID NO: 13269 - DNA, 18 bp, Artificial Sequence
  synthetic circulating small noncoding RNA (sncRNA) 5' transfer RNA (tRNA) half
ccacgctctaaccaactg

SEQ ID NO: 13270 - DNA, 28 bp, Artificial Sequence
  synthetic circulating small noncoding RNA (sncRNA) 5' transfer RNA (tRNA) half
gtagtgtagtggttatcacgttcgcctc

SEQ ID NO: 13271 - DNA, 27 bp, Artificial Sequence
  synthetic circulating small noncoding RNA (sncRNA) 5' transfer RNA (tRNA) half
tccagggttcaagtccctgttcgggcg

SEQ ID NO: 13272 - DNA, 41 bp, Artificial Sequence
  synthetic circulating small noncoding RNA (sncRNA) 5' transfer RNA (tRNA) half
aactcggatcgctggattcaaagtccagagtgctaaccatt

SEQ ID NO: 13273 - DNA, 18 bp, Artificial Sequence
  synthetic circulating small noncoding RNA (sncRNA) 5' transfer RNA (tRNA) half
tcaatccccggcacctcc

SEQ ID NO: 13274 - DNA, 25 bp, Artificial Sequence
  synthetic circulating small noncoding RNA (sncRNA) 5' transfer RNA (tRNA) half
tcgatccatcgacctctgggttatg

SEQ ID NO: 13275 - DNA, 29 bp, Artificial Sequence
  synthetic circulating small noncoding RNA (sncRNA) 5' transfer RNA (tRNA) half
cgctgggattcgaacccaggatctcctgt

SEQ ID NO: 13276 - DNA, 27 bp, Artificial Sequence
  synthetic circulating small noncoding RNA (sncRNA) 5' transfer RNA (tRNA) half
gcgactctggtgggactcgaacccaca

SEQ ID NO: 13277 - DNA, 18 bp, Artificial Sequence
  synthetic circulating small noncoding RNA (sncRNA) 5' transfer RNA (tRNA) half
ctcgtccgggatttgaac

SEQ ID NO: 13278 - DNA, 35 bp, Artificial Sequence
  synthetic circulating small noncoding RNA (sncRNA) 5' transfer RNA (tRNA) half
gttgtttccgtagtgtagtggttatcacgttcgcc

SEQ ID NO: 13279 - DNA, 24 bp, Artificial Sequence
  synthetic circulating small noncoding RNA (sncRNA) 5' transfer RNA (tRNA) half
ctctaccgactgagctatccgggc

SEQ ID NO: 13280 - DNA, 21 bp, Artificial Sequence
  synthetic circulating small noncoding RNA (sncRNA) 5' transfer RNA (tRNA) half
cagtggtagaattctcgcctg

SEQ ID NO: 13281 - DNA, 22 bp, Artificial Sequence
  synthetic circulating small noncoding RNA (sncRNA) 5' transfer RNA (tRNA) half
ttcccggccaatgcactctctc

SEQ ID NO: 13282 - DNA, 25 bp, Artificial Sequence
  synthetic circulating small noncoding RNA (sncRNA) 5' transfer RNA (tRNA) half
tttgaactcggatcgctggattcag

SEQ ID NO: 13283 - DNA, 27 bp, Artificial Sequence
  synthetic circulating small noncoding RNA (sncRNA) 5' transfer RNA (tRNA) half
gcattggtggttcaatggtagaattct

SEQ ID NO: 13284 - DNA, 37 bp, Artificial Sequence
  synthetic circulating small noncoding RNA (sncRNA) 5' transfer RNA (tRNA) half
gaacccgggccgcggcggtgagagcgccgaatcctaa

SEQ ID NO: 13285 - DNA, 17 bp, Artificial Sequence
  synthetic circulating small noncoding RNA (sncRNA) 5' transfer RNA (tRNA) half
ggttaggattcctggtt

SEQ ID NO: 13286 - DNA, 35 bp, Artificial Sequence
  synthetic circulating small noncoding RNA (sncRNA) 5' transfer RNA (tRNA) half
gcattggtggttcagtggtagaattctcgcctccc

SEQ ID NO: 13287 - DNA, 23 bp, Artificial Sequence
  synthetic circulating small noncoding RNA (sncRNA) 5' transfer RNA (tRNA) half
gaccgacgaggatgggattcgaa

SEQ ID NO: 13288 - DNA, 13 bp, Artificial Sequence
  synthetic circulating small noncoding RNA (sncRNA) 5' transfer RNA (tRNA) half
aaccggggacctt

SEQ ID NO: 13289 - DNA, 8 bp, Artificial Sequence
  synthetic circulating small noncoding RNA (sncRNA) 5' transfer RNA (tRNA) half
gcgcccga

SEQ ID NO: 13290 - DNA, 23 bp, Artificial Sequence
  synthetic circulating small noncoding RNA (sncRNA) 5' transfer RNA (tRNA) half
aaccgggcggaaacatatctttt

SEQ ID NO: 13291 - DNA, 20 bp, Artificial Sequence
  synthetic circulating small noncoding RNA (sncRNA) 5' transfer RNA (tRNA) half
aagcgagcgctctaccattt

SEQ ID NO: 13292 - DNA, 10 bp, Artificial Sequence
  synthetic circulating small noncoding RNA (sncRNA) 5' transfer RNA (tRNA) half
cgaacccagg

SEQ ID NO: 13293 - DNA, 28 bp, Artificial Sequence
  synthetic circulating small noncoding RNA (sncRNA) 5' transfer RNA (tRNA) half
agccaggagtcgaacctagaatcttctg

SEQ ID NO: 13294 - DNA, 37 bp, Artificial Sequence
  synthetic circulating small noncoding RNA (sncRNA) 5' transfer RNA (tRNA) half
agagtctcatgctctaccgactgagctagccgggcga

SEQ ID NO: 13295 - DNA, 34 bp, Artificial Sequence
  synthetic circulating small noncoding RNA (sncRNA) 5' transfer RNA (tRNA) half
ccggatgatcctcagtggtctggggtgcaggctt

SEQ ID NO: 13296 - DNA, 19 bp, Artificial Sequence
  synthetic circulating small noncoding RNA (sncRNA) 5' transfer RNA (tRNA) half
atgattctcgctttgggtg

SEQ ID NO: 13297 - DNA, 16 bp, Artificial Sequence
  synthetic circulating small noncoding RNA (sncRNA) 5' transfer RNA (tRNA) half
agcgacagagtggttc

SEQ ID NO: 13298 - DNA, 32 bp, Artificial Sequence
  synthetic circulating small noncoding RNA (sncRNA) 5' transfer RNA (tRNA) half
taaaggtccctggttcgatcccgggtttcggc

SEQ ID NO: 13299 - DNA, 29 bp, Artificial Sequence
  synthetic circulating small noncoding RNA (sncRNA) 5' transfer RNA (tRNA) half
gccgcggcccgggttcgattcccggtcag

SEQ ID NO: 13300 - DNA, 17 bp, Artificial Sequence
  synthetic circulating small noncoding RNA (sncRNA) 5' transfer RNA (tRNA) half
tggttagcactctggac

SEQ ID NO: 13301 - DNA, 23 bp, Artificial Sequence
  synthetic circulating small noncoding RNA (sncRNA) 5' transfer RNA (tRNA) half
acccggggcctcatacatgcaaa

SEQ ID NO: 13302 - DNA, 22 bp, Artificial Sequence
  synthetic circulating small noncoding RNA (sncRNA) 5' transfer RNA (tRNA) half
acatggtctagcggttaggatt

SEQ ID NO: 13303 - DNA, 24 bp, Artificial Sequence
  synthetic circulating small noncoding RNA (sncRNA) 5' transfer RNA (tRNA) half
ttgcatgtatgaggccccgggttc

SEQ ID NO: 13304 - DNA, 14 bp, Artificial Sequence
  synthetic circulating small noncoding RNA (sncRNA) 5' transfer RNA (tRNA) half
cgctcggccatcct

SEQ ID NO: 13305 - DNA, 13 bp, Artificial Sequence
  synthetic circulating small noncoding RNA (sncRNA) 5' transfer RNA (tRNA) half
aattctcgcctgc

SEQ ID NO: 13306 - DNA, 24 bp, Artificial Sequence
  synthetic circulating small noncoding RNA (sncRNA) 5' transfer RNA (tRNA) half
catgctctaccgactgagctagcc

SEQ ID NO: 13307 - DNA, 24 bp, Artificial Sequence
  synthetic circulating small noncoding RNA (sncRNA) 5' transfer RNA (tRNA) half
ctagcggttaggattcctggtttt

SEQ ID NO: 13308 - DNA, 13 bp, Artificial Sequence
  synthetic circulating small noncoding RNA (sncRNA) 5' transfer RNA (tRNA) half
cgccgggactcga

SEQ ID NO: 13309 - DNA, 19 bp, Artificial Sequence
  synthetic circulating small noncoding RNA (sncRNA) 5' transfer RNA (tRNA) half
gtagaattctcgcctgcca

SEQ ID NO: 13310 - DNA, 25 bp, Artificial Sequence
  synthetic circulating small noncoding RNA (sncRNA) 5' transfer RNA (tRNA) half
ccagggttcaagtccctgttcgggc

SEQ ID NO: 13311 - DNA, 21 bp, Artificial Sequence
  synthetic circulating small noncoding RNA (sncRNA) 5' transfer RNA (tRNA) half
gtgacaggcggggatactaac

SEQ ID NO: 13312 - DNA, 13 bp, Artificial Sequence
  synthetic circulating small noncoding RNA (sncRNA) 5' transfer RNA (tRNA) half
ttcccgggcggcg

SEQ ID NO: 13313 - DNA, 30 bp, Artificial Sequence
  synthetic circulating small noncoding RNA (sncRNA) 5' transfer RNA (tRNA) half
aaggttggtggttcgagcccacccagggac

SEQ ID NO: 13314 - DNA, 43 bp, Artificial Sequence
  synthetic circulating small noncoding RNA (sncRNA) 5' transfer RNA (tRNA) half
tgccgtccctgggtgggctcgaaccaccaacctttcggttaac

SEQ ID NO: 13315 - DNA, 9 bp, Artificial Sequence
  synthetic circulating small noncoding RNA (sncRNA) 5' transfer RNA (tRNA) half
aacccgcga

SEQ ID NO: 13316 - DNA, 27 bp, Artificial Sequence
  synthetic circulating small noncoding RNA (sncRNA) 5' transfer RNA (tRNA) half
cgagccagccaggagtcgaacctagaa

SEQ ID NO: 13317 - DNA, 30 bp, Artificial Sequence
  synthetic circulating small noncoding RNA (sncRNA) 5' transfer RNA (tRNA) half
tccctgggtgggctcgaaccaccaaccttt

SEQ ID NO: 13318 - DNA, 21 bp, Artificial Sequence
  synthetic circulating small noncoding RNA (sncRNA) 5' transfer RNA (tRNA) half
gtagaattctcgcctgccacg

SEQ ID NO: 13319 - DNA, 23 bp, Artificial Sequence
  synthetic circulating small noncoding RNA (sncRNA) 5' transfer RNA (tRNA) half
actggtagcgtggccgagcggtc

SEQ ID NO: 13320 - DNA, 12 bp, Artificial Sequence
  synthetic circulating small noncoding RNA (sncRNA) 5' transfer RNA (tRNA) half
gtcaggagtggg

SEQ ID NO: 13321 - DNA, 34 bp, Artificial Sequence
  synthetic circulating small noncoding RNA (sncRNA) 5' transfer RNA (tRNA) half
ccgtacggggatcgaacccgcgaccttggcgtta

SEQ ID NO: 13322 - DNA, 14 bp, Artificial Sequence
  synthetic circulating small noncoding RNA (sncRNA) 5' transfer RNA (tRNA) half
cttatccattaggc

SEQ ID NO: 13323 - DNA, 21 bp, Artificial Sequence
  synthetic circulating small noncoding RNA (sncRNA) 5' transfer RNA (tRNA) half
ccatagtgtagcggttatcac

SEQ ID NO: 13324 - DNA, 13 bp, Artificial Sequence
  synthetic circulating small noncoding RNA (sncRNA) 5' transfer RNA (tRNA) half
gattccaggttcg

SEQ ID NO: 13325 - DNA, 10 bp, Artificial Sequence
  synthetic circulating small noncoding RNA (sncRNA) 5' transfer RNA (tRNA) half
cgcaggttcg

SEQ ID NO: 13326 - DNA, 16 bp, Artificial Sequence
  synthetic circulating small noncoding RNA (sncRNA) 5' transfer RNA (tRNA) half
gactgagctagccggg

SEQ ID NO: 13327 - DNA, 16 bp, Artificial Sequence
  synthetic circulating small noncoding RNA (sncRNA) 5' transfer RNA (tRNA) half
ctggtttgatcccggg

SEQ ID NO: 13328 - DNA, 18 bp, Artificial Sequence
  synthetic circulating small noncoding RNA (sncRNA) 5' transfer RNA (tRNA) half
cgagtcccatctggggtg

SEQ ID NO: 13329 - DNA, 24 bp, Artificial Sequence
  synthetic circulating small noncoding RNA (sncRNA) 5' transfer RNA (tRNA) half
gcgagaattctaccattgaactac

SEQ ID NO: 13330 - DNA, 30 bp, Artificial Sequence
  synthetic circulating small noncoding RNA (sncRNA) 5' transfer RNA (tRNA) half
cccgggcctcccgcgtggcaggcgagaatt

SEQ ID NO: 13331 - DNA, 15 bp, Artificial Sequence
  synthetic circulating small noncoding RNA (sncRNA) 5' transfer RNA (tRNA) half
ctcccgcgtgacagg

SEQ ID NO: 13332 - DNA, 22 bp, Artificial Sequence
  synthetic circulating small noncoding RNA (sncRNA) 5' transfer RNA (tRNA) half
accggggacctttcgcgtgtga

SEQ ID NO: 13333 - DNA, 14 bp, Artificial Sequence
  synthetic circulating small noncoding RNA (sncRNA) 5' transfer RNA (tRNA) half
gaaccctcaatctt

SEQ ID NO: 13334 - DNA, 33 bp, Artificial Sequence
  synthetic circulating small noncoding RNA (sncRNA) 5' transfer RNA (tRNA) half
agtcagacgccttatccgttaggccacgtggtc

SEQ ID NO: 13335 - DNA, 19 bp, Artificial Sequence
  synthetic circulating small noncoding RNA (sncRNA) 5' transfer RNA (tRNA) half
tcgaatcccaccactgcca

SEQ ID NO: 13336 - DNA, 26 bp, Artificial Sequence
  synthetic circulating small noncoding RNA (sncRNA) 5' transfer RNA (tRNA) half
ggtcccaccgagatttgaactcggat

SEQ ID NO: 13337 - DNA, 14 bp, Artificial Sequence
  synthetic circulating small noncoding RNA (sncRNA) 5' transfer RNA (tRNA) half
gaattctaccactg

SEQ ID NO: 13338 - DNA, 26 bp, Artificial Sequence
  synthetic circulating small noncoding RNA (sncRNA) 5' transfer RNA (tRNA) half
cgtgggttcgagccccacgttgggcg

SEQ ID NO: 13339 - DNA, 18 bp, Artificial Sequence
  synthetic circulating small noncoding RNA (sncRNA) 5' transfer RNA (tRNA) half
ttccctgaccgggaatcg

SEQ ID NO: 13340 - DNA, 14 bp, Artificial Sequence
  synthetic circulating small noncoding RNA (sncRNA) 5' transfer RNA (tRNA) half
gtgtagtggttatc

SEQ ID NO: 13341 - DNA, 38 bp, Artificial Sequence
  synthetic circulating small noncoding RNA (sncRNA) 5' transfer RNA (tRNA) half
atctgagggtccagggttcaagtccctgttcgggcgct

SEQ ID NO: 13342 - DNA, 27 bp, Artificial Sequence
  synthetic circulating small noncoding RNA (sncRNA) 5' transfer RNA (tRNA) half
agccgtttggagatgccggggatcgaa

SEQ ID NO: 13343 - DNA, 10 bp, Artificial Sequence
  synthetic circulating small noncoding RNA (sncRNA) 5' transfer RNA (tRNA) half
ccgggccgcg

SEQ ID NO: 13344 - DNA, 30 bp, Artificial Sequence
  synthetic circulating small noncoding RNA (sncRNA) 5' transfer RNA (tRNA) half
agagcgccgaatcctaaccactagaccacc

SEQ ID NO: 13345 - DNA, 27 bp, Artificial Sequence
  synthetic circulating small noncoding RNA (sncRNA) 5' transfer RNA (tRNA) half
gtatagctcagtggtagagcatttgac

SEQ ID NO: 13346 - DNA, 28 bp, Artificial Sequence
  synthetic circulating small noncoding RNA (sncRNA) 5' transfer RNA (tRNA) half
tgttcccacaccgggagtcgaacccggg

SEQ ID NO: 13347 - DNA, 32 bp, Artificial Sequence
  synthetic circulating small noncoding RNA (sncRNA) 5' transfer RNA (tRNA) half
gaacccgggccgcggcggtgagagcgccgaat

SEQ ID NO: 13348 - DNA, 14 bp, Artificial Sequence
  synthetic circulating small noncoding RNA (sncRNA) 5' transfer RNA (tRNA) half
ttcgattccccgac

SEQ ID NO: 13349 - DNA, 23 bp, Artificial Sequence
  synthetic circulating small noncoding RNA (sncRNA) 5' transfer RNA (tRNA) half
ccggtctcccgcgtgacaggcgg

SEQ ID NO: 13350 - DNA, 14 bp, Artificial Sequence
  synthetic circulating small noncoding RNA (sncRNA) 5' transfer RNA (tRNA) half
gtttctgcccggtt

SEQ ID NO: 13351 - DNA, 15 bp, Artificial Sequence
  synthetic circulating small noncoding RNA (sncRNA) 5' transfer RNA (tRNA) half
agccggattcgaacc

SEQ ID NO: 13352 - DNA, 35 bp, Artificial Sequence
  synthetic circulating small noncoding RNA (sncRNA) 5' transfer RNA (tRNA) half
cccgggccgcggcggtgagagcgccgaatcctaac

SEQ ID NO: 13353 - DNA, 27 bp, Artificial Sequence
  synthetic circulating small noncoding RNA (sncRNA) 5' transfer RNA (tRNA) half
aaaccaggaatcctaaccgctagacca

SEQ ID NO: 13354 - DNA, 22 bp, Artificial Sequence
  synthetic circulating small noncoding RNA (sncRNA) 5' transfer RNA (tRNA) half
aaaccgggcgggaacaacactt

SEQ ID NO: 13355 - DNA, 20 bp, Artificial Sequence
  synthetic circulating small noncoding RNA (sncRNA) 5' transfer RNA (tRNA) half
tcttacgctgtgagcaggat

SEQ ID NO: 13356 - DNA, 16 bp, Artificial Sequence
  synthetic circulating small noncoding RNA (sncRNA) 5' transfer RNA (tRNA) half
aatggttagcactctg

SEQ ID NO: 13357 - DNA, 31 bp, Artificial Sequence
  synthetic circulating small noncoding RNA (sncRNA) 5' transfer RNA (tRNA) half
accgaccacgaagggactcgaaccctcaatc

SEQ ID NO: 13358 - DNA, 9 bp, Artificial Sequence
  synthetic circulating small noncoding RNA (sncRNA) 5' transfer RNA (tRNA) half
cgggccgcg

SEQ ID NO: 13359 - DNA, 18 bp, Artificial Sequence
  synthetic circulating small noncoding RNA (sncRNA) 5' transfer RNA (tRNA) half
cctgtcacgcgggagacc

SEQ ID NO: 13360 - DNA, 44 bp, Artificial Sequence
  synthetic circulating small noncoding RNA (sncRNA) 5' transfer RNA (tRNA) half
gacgaggatgggattcgaacccacgcgtgcaaagcacaatggat

SEQ ID NO: 13361 - DNA, 35 bp, Artificial Sequence
  synthetic circulating small noncoding RNA (sncRNA) 5' transfer RNA (tRNA) half
ttagcactctggactctgaatccagcgatccgagt

SEQ ID NO: 13362 - DNA, 31 bp, Artificial Sequence
  synthetic circulating small noncoding RNA (sncRNA) 5' transfer RNA (tRNA) half
gtcacgaacaggattcgaacctgtgcgggga

SEQ ID NO: 13363 - DNA, 22 bp, Artificial Sequence
  synthetic circulating small noncoding RNA (sncRNA) 5' transfer RNA (tRNA) half
cggccaatgcactctctcactt

SEQ ID NO: 13364 - DNA, 6 bp, Artificial Sequence
  synthetic circulating small noncoding RNA (sncRNA) 5' transfer RNA (tRNA) half
acggcg

SEQ ID NO: 13365 - DNA, 14 bp, Artificial Sequence
  synthetic circulating small noncoding RNA (sncRNA) 5' transfer RNA (tRNA) half
ggagggggcacccg

SEQ ID NO: 13366 - DNA, 21 bp, Artificial Sequence
  synthetic circulating small noncoding RNA (sncRNA) 5' transfer RNA (tRNA) half
cgggactcgaacccggaacct

SEQ ID NO: 13367 - DNA, 14 bp, Artificial Sequence
  synthetic circulating small noncoding RNA (sncRNA) 5' transfer RNA (tRNA) half
ggggtcgcgagttc

SEQ ID NO: 13368 - DNA, 22 bp, Artificial Sequence
  synthetic circulating small noncoding RNA (sncRNA) 5' transfer RNA (tRNA) half
tgctctaccgactgagctagcc

SEQ ID NO: 13369 - DNA, 22 bp, Artificial Sequence
  synthetic circulating small noncoding RNA (sncRNA) 5' transfer RNA (tRNA) half
cggggaatcgaaccccggtctc

SEQ ID NO: 13370 - DNA, 22 bp, Artificial Sequence
  synthetic circulating small noncoding RNA (sncRNA) 5' transfer RNA (tRNA) half
atgaccccgacgtgattcgaac

SEQ ID NO: 13371 - DNA, 26 bp, Artificial Sequence
  synthetic circulating small noncoding RNA (sncRNA) 5' transfer RNA (tRNA) half
agagcgccgaatcctaaccactagac

SEQ ID NO: 13372 - DNA, 24 bp, Artificial Sequence
  synthetic circulating small noncoding RNA (sncRNA) 5' transfer RNA (tRNA) half
gaagtccaatgcgctatccattgc

SEQ ID NO: 13373 - DNA, 33 bp, Artificial Sequence
  synthetic circulating small noncoding RNA (sncRNA) 5' transfer RNA (tRNA) half
gaccccgacgtgattcgaacacgcagccttctg

SEQ ID NO: 13374 - DNA, 12 bp, Artificial Sequence
  synthetic circulating small noncoding RNA (sncRNA) 5' transfer RNA (tRNA) half
cggccatcctga

SEQ ID NO: 13375 - DNA, 20 bp, Artificial Sequence
  synthetic circulating small noncoding RNA (sncRNA) 5' transfer RNA (tRNA) half
gatttgaactcgcgacccct

SEQ ID NO: 13376 - DNA, 19 bp, Artificial Sequence
  synthetic circulating small noncoding RNA (sncRNA) 5' transfer RNA (tRNA) half
gttcgagcccacccaggga

SEQ ID NO: 13377 - DNA, 23 bp, Artificial Sequence
  synthetic circulating small noncoding RNA (sncRNA) 5' transfer RNA (tRNA) half
gcgaatgtgataaccactacact

SEQ ID NO: 13378 - DNA, 15 bp, Artificial Sequence
  synthetic circulating small noncoding RNA (sncRNA) 5' transfer RNA (tRNA) half
gggggattagctcaa

SEQ ID NO: 13379 - DNA, 34 bp, Artificial Sequence
  synthetic circulating small noncoding RNA (sncRNA) 5' transfer RNA (tRNA) half
tcacgaggtccctggttcaaatcgaggtgccccc

SEQ ID NO: 13380 - DNA, 35 bp, Artificial Sequence
  synthetic circulating small noncoding RNA (sncRNA) 5' transfer RNA (tRNA) half
aagtctgatgctctaccgactgagctatccgggct

SEQ ID NO: 13381 - DNA, 33 bp, Artificial Sequence
  synthetic circulating small noncoding RNA (sncRNA) 5' transfer RNA (tRNA) half
ggccggttagctcagttggttagagtgtggtgc

SEQ ID NO: 13382 - DNA, 12 bp, Artificial Sequence
  synthetic circulating small noncoding RNA (sncRNA) 5' transfer RNA (tRNA) half
cgaaccaccaac

SEQ ID NO: 13383 - DNA, 17 bp, Artificial Sequence
  synthetic circulating small noncoding RNA (sncRNA) 5' transfer RNA (tRNA) half
tccctgggtgggctcga

SEQ ID NO: 13384 - DNA, 16 bp, Artificial Sequence
  synthetic circulating small noncoding RNA (sncRNA) 5' transfer RNA (tRNA) half
actgcgctaacgaggc

SEQ ID NO: 13385 - DNA, 14 bp, Artificial Sequence
  synthetic circulating small noncoding RNA (sncRNA) 5' transfer RNA (tRNA) half
atcacgtctgcttt

SEQ ID NO: 13386 - DNA, 32 bp, Artificial Sequence
  synthetic circulating small noncoding RNA (sncRNA) 5' transfer RNA (tRNA) half
aacgcagcgccttagaccgctcggccatcctg

SEQ ID NO: 13387 - DNA, 14 bp, Artificial Sequence
  synthetic circulating small noncoding RNA (sncRNA) 5' transfer RNA (tRNA) half
tcggccatcgctgc

SEQ ID NO: 13388 - DNA, 13 bp, Artificial Sequence
  synthetic circulating small noncoding RNA (sncRNA) 5' transfer RNA (tRNA) half
ggggacctctcgc

SEQ ID NO: 13389 - DNA, 31 bp, Artificial Sequence
  synthetic circulating small noncoding RNA (sncRNA) 5' transfer RNA (tRNA) half
gccggttagctcagttggttagagcgtggtg

SEQ ID NO: 13390 - DNA, 15 bp, Artificial Sequence
  synthetic circulating small noncoding RNA (sncRNA) 5' transfer RNA (tRNA) half
aggcgaacgtgataa

SEQ ID NO: 13391 - DNA, 14 bp, Artificial Sequence
  synthetic circulating small noncoding RNA (sncRNA) 5' transfer RNA (tRNA) half
gggtcgtgggttcg

SEQ ID NO: 13392 - DNA, 39 bp, Artificial Sequence
  synthetic circulating small noncoding RNA (sncRNA) 5' transfer RNA (tRNA) half
gtaaaccaggggtcgcgagttcaaatctcgctggggcct

SEQ ID NO: 13393 - DNA, 36 bp, Artificial Sequence
  synthetic circulating small noncoding RNA (sncRNA) 5' transfer RNA (tRNA) half
cagggcatgggtggttcagtggtagaattctcgcct

SEQ ID NO: 13394 - DNA, 12 bp, Artificial Sequence
  synthetic circulating small noncoding RNA (sncRNA) 5' transfer RNA (tRNA) half
accagggacctc

SEQ ID NO: 13395 - DNA, 35 bp, Artificial Sequence
  synthetic circulating small noncoding RNA (sncRNA) 5' transfer RNA (tRNA) half
aacgcagagtactaaccactatacgatcacggcga

SEQ ID NO: 13396 - DNA, 21 bp, Artificial Sequence
  synthetic circulating small noncoding RNA (sncRNA) 5' transfer RNA (tRNA) half
cggggatcgaacccggggcct

SEQ ID NO: 13397 - DNA, 32 bp, Artificial Sequence
  synthetic circulating small noncoding RNA (sncRNA) 5' transfer RNA (tRNA) half
tttcgacgaggatgggattcgaacccatgcgt

SEQ ID NO: 13398 - DNA, 43 bp, Artificial Sequence
  synthetic circulating small noncoding RNA (sncRNA) 5' transfer RNA (tRNA) half
accgacgaggatgggattcgaacccacgcgtgcaaagcacaat

SEQ ID NO: 13399 - DNA, 27 bp, Artificial Sequence
  synthetic circulating small noncoding RNA (sncRNA) 5' transfer RNA (tRNA) half
gtccagagtgctaaccattacaccatg

SEQ ID NO: 13400 - DNA, 17 bp, Artificial Sequence
  synthetic circulating small noncoding RNA (sncRNA) 5' transfer RNA (tRNA) half
gaaccggggacctctcg

SEQ ID NO: 13401 - DNA, 16 bp, Artificial Sequence
  synthetic circulating small noncoding RNA (sncRNA) 5' transfer RNA (tRNA) half
cgcgggaggcccgggt

SEQ ID NO: 13402 - DNA, 34 bp, Artificial Sequence
  synthetic circulating small noncoding RNA (sncRNA) 5' transfer RNA (tRNA) half
gaacagggacttgaaccctggaccctcagattaa

SEQ ID NO: 13403 - DNA, 35 bp, Artificial Sequence
  synthetic circulating small noncoding RNA (sncRNA) 5' transfer RNA (tRNA) half
agtcgcccggctagctcagtcggtagagcatgaga

SEQ ID NO: 13404 - DNA, 32 bp, Artificial Sequence
  synthetic circulating small noncoding RNA (sncRNA) 5' transfer RNA (tRNA) half
gaaaggtccccggttcgaaaccgggcggaaac

SEQ ID NO: 13405 - DNA, 44 bp, Artificial Sequence
  synthetic circulating small noncoding RNA (sncRNA) 5' transfer RNA (tRNA) half
cgctgcgttggccgggaatcgaacccgggtcaactgcttggaag

SEQ ID NO: 13406 - DNA, 16 bp, Artificial Sequence
  synthetic circulating small noncoding RNA (sncRNA) 5' transfer RNA (tRNA) half
ccttaaccactcggcc

SEQ ID NO: 13407 - DNA, 29 bp, Artificial Sequence
  synthetic circulating small noncoding RNA (sncRNA) 5' transfer RNA (tRNA) half
gagtggcgcagcggaagcgtgctgggccc

SEQ ID NO: 13408 - DNA, 23 bp, Artificial Sequence
  synthetic circulating small noncoding RNA (sncRNA) 5' transfer RNA (tRNA) half
ggttcgactcctggctggctcgt

SEQ ID NO: 13409 - DNA, 23 bp, Artificial Sequence
  synthetic circulating small noncoding RNA (sncRNA) 5' transfer RNA (tRNA) half
acccacgcgtgcagagcacaatg

SEQ ID NO: 13410 - DNA, 18 bp, Artificial Sequence
  synthetic circulating small noncoding RNA (sncRNA) 5' transfer RNA (tRNA) half
cagtggtctggggtgcag

SEQ ID NO: 13411 - DNA, 7 bp, Artificial Sequence
  synthetic circulating small noncoding RNA (sncRNA) 5' transfer RNA (tRNA) half
cgggcca

SEQ ID NO: 13412 - DNA, 20 bp, Artificial Sequence
  synthetic circulating small noncoding RNA (sncRNA) 5' transfer RNA (tRNA) half
atgctctaccgactgagcta

SEQ ID NO: 13413 - DNA, 10 bp, Artificial Sequence
  synthetic circulating small noncoding RNA (sncRNA) 5' transfer RNA (tRNA) half
ggccgcggcg

SEQ ID NO: 13414 - DNA, 24 bp, Artificial Sequence
  synthetic circulating small noncoding RNA (sncRNA) 5' transfer RNA (tRNA) half
ggcggtgagagcgccgaatcctaa

SEQ ID NO: 13415 - DNA, 16 bp, Artificial Sequence
  synthetic circulating small noncoding RNA (sncRNA) 5' transfer RNA (tRNA) half
gaacctggaatcttct

SEQ ID NO: 13416 - DNA, 25 bp, Artificial Sequence
  synthetic circulating small noncoding RNA (sncRNA) 5' transfer RNA (tRNA) half
gtctcatgctctacccactgagcta

SEQ ID NO: 13417 - DNA, 13 bp, Artificial Sequence
  synthetic circulating small noncoding RNA (sncRNA) 5' transfer RNA (tRNA) half
gtccctgggtggg

SEQ ID NO: 13418 - DNA, 16 bp, Artificial Sequence
  synthetic circulating small noncoding RNA (sncRNA) 5' transfer RNA (tRNA) half
caactgagctatcgaa

SEQ ID NO: 13419 - DNA, 38 bp, Artificial Sequence
  synthetic circulating small noncoding RNA (sncRNA) 5' transfer RNA (tRNA) half
gctggggattgtgggttcgagtcccatctgggtcgcat

SEQ ID NO: 13420 - DNA, 19 bp, Artificial Sequence
  synthetic circulating small noncoding RNA (sncRNA) 5' transfer RNA (tRNA) half
aaaactgggctcgtccggg

SEQ ID NO: 13421 - DNA, 23 bp, Artificial Sequence
  synthetic circulating small noncoding RNA (sncRNA) 5' transfer RNA (tRNA) half
ggcagcggtgggattcgaaccca

SEQ ID NO: 13422 - DNA, 11 bp, Artificial Sequence
  synthetic circulating small noncoding RNA (sncRNA) 5' transfer RNA (tRNA) half
cgtcggtctcg

SEQ ID NO: 13423 - DNA, 10 bp, Artificial Sequence
  synthetic circulating small noncoding RNA (sncRNA) 5' transfer RNA (tRNA) half
agaccgctcg

SEQ ID NO: 13424 - DNA, 45 bp, Artificial Sequence
  synthetic circulating small noncoding RNA (sncRNA) 5' transfer RNA (tRNA) half
gcctccgatagcagaggatggtttcgatccatcgacctctgggtt

SEQ ID NO: 13425 - DNA, 35 bp, Artificial Sequence
  synthetic circulating small noncoding RNA (sncRNA) 5' transfer RNA (tRNA) half
cgcccaacgtggggctcgaacccacgaccctggga

SEQ ID NO: 13426 - DNA, 32 bp, Artificial Sequence
  synthetic circulating small noncoding RNA (sncRNA) 5' transfer RNA (tRNA) half
gtcccaccgagatttgaactcggatcgctgga

SEQ ID NO: 13427 - DNA, 12 bp, Artificial Sequence
  synthetic circulating small noncoding RNA (sncRNA) 5' transfer RNA (tRNA) half
ccggtcagggaa

SEQ ID NO: 13428 - DNA, 18 bp, Artificial Sequence
  synthetic circulating small noncoding RNA (sncRNA) 5' transfer RNA (tRNA) half
ccgggccgcggcggtgag

SEQ ID NO: 13429 - DNA, 33 bp, Artificial Sequence
  synthetic circulating small noncoding RNA (sncRNA) 5' transfer RNA (tRNA) half
atgggtggttcagtggtagaattctcgcctgcc

SEQ ID NO: 13430 - DNA, 29 bp, Artificial Sequence
  synthetic circulating small noncoding RNA (sncRNA) 5' transfer RNA (tRNA) half
cgaccacgaagggactcgaaccctcaatc

SEQ ID NO: 13431 - DNA, 18 bp, Artificial Sequence
  synthetic circulating small noncoding RNA (sncRNA) 5' transfer RNA (tRNA) half
cctccccgtcggggaatc

SEQ ID NO: 13432 - DNA, 18 bp, Artificial Sequence
  synthetic circulating small noncoding RNA (sncRNA) 5' transfer RNA (tRNA) half
atcccactacctcttgca

SEQ ID NO: 13433 - DNA, 39 bp, Artificial Sequence
  synthetic circulating small noncoding RNA (sncRNA) 5' transfer RNA (tRNA) half
gtaaacaggagatcctgggttcgaatcccagcggtgcct

SEQ ID NO: 13434 - DNA, 17 bp, Artificial Sequence
  synthetic circulating small noncoding RNA (sncRNA) 5' transfer RNA (tRNA) half
cgactcccggtgtggga

SEQ ID NO: 13435 - DNA, 33 bp, Artificial Sequence
  synthetic circulating small noncoding RNA (sncRNA) 5' transfer RNA (tRNA) half
gaggcccgggttcgattcccggccaatgcacga

SEQ ID NO: 13436 - DNA, 16 bp, Artificial Sequence
  synthetic circulating small noncoding RNA (sncRNA) 5' transfer RNA (tRNA) half
gataaggcgtctgact

SEQ ID NO: 13437 - DNA, 26 bp, Artificial Sequence
  synthetic circulating small noncoding RNA (sncRNA) 5' transfer RNA (tRNA) half
ttgcgtgttcaaatcacgtcggggtc

SEQ ID NO: 13438 - DNA, 30 bp, Artificial Sequence
  synthetic circulating small noncoding RNA (sncRNA) 5' transfer RNA (tRNA) half
tgccgtccctgggtgggctcgaaccaccaa

SEQ ID NO: 13439 - DNA, 31 bp, Artificial Sequence
  synthetic circulating small noncoding RNA (sncRNA) 5' transfer RNA (tRNA) half
gcgggagaccggggttcgattccccgacggg

SEQ ID NO: 13440 - DNA, 15 bp, Artificial Sequence
  synthetic circulating small noncoding RNA (sncRNA) 5' transfer RNA (tRNA) half
cgaaccggggacctc

SEQ ID NO: 13441 - DNA, 15 bp, Artificial Sequence
  synthetic circulating small noncoding RNA (sncRNA) 5' transfer RNA (tRNA) half
cctggaggcgtgggt

SEQ ID NO: 13442 - DNA, 18 bp, Artificial Sequence
  synthetic circulating small noncoding RNA (sncRNA) 5' transfer RNA (tRNA) half
ttcccgggcggcgcatgt

SEQ ID NO: 13443 - DNA, 13 bp, Artificial Sequence
  synthetic circulating small noncoding RNA (sncRNA) 5' transfer RNA (tRNA) half
ctgaccgggaatc

SEQ ID NO: 13444 - DNA, 12 bp, Artificial Sequence
  synthetic circulating small noncoding RNA (sncRNA) 5' transfer RNA (tRNA) half
ggctcgaacagg

SEQ ID NO: 13445 - DNA, 38 bp, Artificial Sequence
  synthetic circulating small noncoding RNA (sncRNA) 5' transfer RNA (tRNA) half
cccacgaccctgagattaagagtctcatgctctaccga

SEQ ID NO: 13446 - DNA, 26 bp, Artificial Sequence
  synthetic circulating small noncoding RNA (sncRNA) 5' transfer RNA (tRNA) half
ttcagtggtagaattctcgcctgcca

SEQ ID NO: 13447 - DNA, 19 bp, Artificial Sequence
  synthetic circulating small noncoding RNA (sncRNA) 5' transfer RNA (tRNA) half
actcaggaccttcagatta

SEQ ID NO: 13448 - DNA, 21 bp, Artificial Sequence
  synthetic circulating small noncoding RNA (sncRNA) 5' transfer RNA (tRNA) half
cggttatcacgtctgctttac

SEQ ID NO: 13449 - DNA, 21 bp, Artificial Sequence
  synthetic circulating small noncoding RNA (sncRNA) 5' transfer RNA (tRNA) half
tgggttcgaatcccagcgggg

SEQ ID NO: 13450 - DNA, 21 bp, Artificial Sequence
  synthetic circulating small noncoding RNA (sncRNA) 5' transfer RNA (tRNA) half
ggggaattagctcaaatggta

SEQ ID NO: 13451 - DNA, 23 bp, Artificial Sequence
  synthetic circulating small noncoding RNA (sncRNA) 5' transfer RNA (tRNA) half
atcgtatagtggttagtactctg

SEQ ID NO: 13452 - DNA, 22 bp, Artificial Sequence
  synthetic circulating small noncoding RNA (sncRNA) 5' transfer RNA (tRNA) half
actcctggctggctcgttggga

SEQ ID NO: 13453 - DNA, 18 bp, Artificial Sequence
  synthetic circulating small noncoding RNA (sncRNA) 5' transfer RNA (tRNA) half
gcgagctaccagggacct

SEQ ID NO: 13454 - DNA, 12 bp, Artificial Sequence
  synthetic circulating small noncoding RNA (sncRNA) 5' transfer RNA (tRNA) half
ccccgacgtgat

SEQ ID NO: 13455 - DNA, 44 bp, Artificial Sequence
  synthetic circulating small noncoding RNA (sncRNA) 5' transfer RNA (tRNA) half
gtgtaatggttagcactctggactctgaatccagcgatccgagt

SEQ ID NO: 13456 - DNA, 13 bp, Artificial Sequence
  synthetic circulating small noncoding RNA (sncRNA) 5' transfer RNA (tRNA) half
ctccggctcgaag

SEQ ID NO: 13457 - DNA, 16 bp, Artificial Sequence
  synthetic circulating small noncoding RNA (sncRNA) 5' transfer RNA (tRNA) half
tgagggggcacccgga

SEQ ID NO: 13458 - DNA, 20 bp, Artificial Sequence
  synthetic circulating small noncoding RNA (sncRNA) 5' transfer RNA (tRNA) half
ttcccattcttgcgacccgg

SEQ ID NO: 13459 - DNA, 15 bp, Artificial Sequence
  synthetic circulating small noncoding RNA (sncRNA) 5' transfer RNA (tRNA) half
cgtgggttcgaatcc

SEQ ID NO: 13460 - DNA, 14 bp, Artificial Sequence
  synthetic circulating small noncoding RNA (sncRNA) 5' transfer RNA (tRNA) half
actcggccaccgtg

SEQ ID NO: 13461 - DNA, 15 bp, Artificial Sequence
  synthetic circulating small noncoding RNA (sncRNA) 5' transfer RNA (tRNA) half
tcctaaccactagac

SEQ ID NO: 13462 - DNA, 23 bp, Artificial Sequence
  synthetic circulating small noncoding RNA (sncRNA) 5' transfer RNA (tRNA) half
gttccatagtgtagcggttatca

SEQ ID NO: 13463 - DNA, 21 bp, Artificial Sequence
  synthetic circulating small noncoding RNA (sncRNA) 5' transfer RNA (tRNA) half
ctctgaatccagcgatccgag

SEQ ID NO: 13464 - DNA, 20 bp, Artificial Sequence
  synthetic circulating small noncoding RNA (sncRNA) 5' transfer RNA (tRNA) half
gctcagtcggtagagcatga

SEQ ID NO: 13465 - DNA, 30 bp, Artificial Sequence
  synthetic circulating small noncoding RNA (sncRNA) 5' transfer RNA (tRNA) half
gggatgtagctcagtggtagagcgcgcgct

SEQ ID NO: 13466 - DNA, 23 bp, Artificial Sequence
  synthetic circulating small noncoding RNA (sncRNA) 5' transfer RNA (tRNA) half
cccggccaatgcactctctcact

SEQ ID NO: 13467 - DNA, 20 bp, Artificial Sequence
  synthetic circulating small noncoding RNA (sncRNA) 5' transfer RNA (tRNA) half
aggcggtagccgtttggaga

SEQ ID NO: 13468 - DNA, 34 bp, Artificial Sequence
  synthetic circulating small noncoding RNA (sncRNA) 5' transfer RNA (tRNA) half
gtgcccggctagctcagtcggtagagcatgagac

SEQ ID NO: 13469 - DNA, 24 bp, Artificial Sequence
  synthetic circulating small noncoding RNA (sncRNA) 5' transfer RNA (tRNA) half
agacgacgaggatgggattcgaac

SEQ ID NO: 13470 - DNA, 21 bp, Artificial Sequence
  synthetic circulating small noncoding RNA (sncRNA) 5' transfer RNA (tRNA) half
aaccaccaacctttcggttaa

SEQ ID NO: 13471 - DNA, 24 bp, Artificial Sequence
  synthetic circulating small noncoding RNA (sncRNA) 5' transfer RNA (tRNA) half
ggagatgccggggatcgaacccgg

SEQ ID NO: 13472 - DNA, 29 bp, Artificial Sequence
  synthetic circulating small noncoding RNA (sncRNA) 5' transfer RNA (tRNA) half
cagagtgctagccattacaccatggaacc

SEQ ID NO: 13473 - DNA, 27 bp, Artificial Sequence
  synthetic circulating small noncoding RNA (sncRNA) 5' transfer RNA (tRNA) half
agcgactctggtgggactcgaacccac

SEQ ID NO: 13474 - DNA, 34 bp, Artificial Sequence
  synthetic circulating small noncoding RNA (sncRNA) 5' transfer RNA (tRNA) half
aggcggggatactaaccactatactaacgaggag

SEQ ID NO: 13475 - DNA, 25 bp, Artificial Sequence
  synthetic circulating small noncoding RNA (sncRNA) 5' transfer RNA (tRNA) half
tggtctagtggtatgattctcagtt

SEQ ID NO: 13476 - DNA, 20 bp, Artificial Sequence
  synthetic circulating small noncoding RNA (sncRNA) 5' transfer RNA (tRNA) half
aggcaagaattctaccactg

SEQ ID NO: 13477 - DNA, 27 bp, Artificial Sequence
  synthetic circulating small noncoding RNA (sncRNA) 5' transfer RNA (tRNA) half
ccctgaccgggaatcgaacccgggccg

SEQ ID NO: 13478 - DNA, 24 bp, Artificial Sequence
  synthetic circulating small noncoding RNA (sncRNA) 5' transfer RNA (tRNA) half
tcccacaccgggagtcgaacccgg

SEQ ID NO: 13479 - DNA, 24 bp, Artificial Sequence
  synthetic circulating small noncoding RNA (sncRNA) 5' transfer RNA (tRNA) half
acccacgcgtgcaaagcacaatgg

SEQ ID NO: 13480 - DNA, 25 bp, Artificial Sequence
  synthetic circulating small noncoding RNA (sncRNA) 5' transfer RNA (tRNA) half
tcccatatggtctagcggttaggat

SEQ ID NO: 13481 - DNA, 13 bp, Artificial Sequence
  synthetic circulating small noncoding RNA (sncRNA) 5' transfer RNA (tRNA) half
ggttagcactctg

SEQ ID NO: 13482 - DNA, 31 bp, Artificial Sequence
  synthetic circulating small noncoding RNA (sncRNA) 5' transfer RNA (tRNA) half
gcgatccgagttcaaatctcggtggaaccta

SEQ ID NO: 13483 - DNA, 30 bp, Artificial Sequence
  synthetic circulating small noncoding RNA (sncRNA) 5' transfer RNA (tRNA) half
agggattgtgggttcgagtcccatctgggg

SEQ ID NO: 13484 - DNA, 28 bp, Artificial Sequence
  synthetic circulating small noncoding RNA (sncRNA) 5' transfer RNA (tRNA) half
tggcccgtacggggatcgaacccgcgac

SEQ ID NO: 13485 - DNA, 18 bp, Artificial Sequence
  synthetic circulating small noncoding RNA (sncRNA) 5' transfer RNA (tRNA) half
accactagaccaccaggg

SEQ ID NO: 13486 - DNA, 33 bp, Artificial Sequence
  synthetic circulating small noncoding RNA (sncRNA) 5' transfer RNA (tRNA) half
gtcccaccgagatttgaactcggatcgctggat

SEQ ID NO: 13487 - DNA, 21 bp, Artificial Sequence
  synthetic circulating small noncoding RNA (sncRNA) 5' transfer RNA (tRNA) half
tatggtctagcggttaggatt

SEQ ID NO: 13488 - DNA, 12 bp, Artificial Sequence
  synthetic circulating small noncoding RNA (sncRNA) 5' transfer RNA (tRNA) half
agcgcccgaaca

SEQ ID NO: 13489 - DNA, 37 bp, Artificial Sequence
  synthetic circulating small noncoding RNA (sncRNA) 5' transfer RNA (tRNA) half
gggattaagagtcccatgctctaccgactgagctagc

SEQ ID NO: 13490 - DNA, 17 bp, Artificial Sequence
  synthetic circulating small noncoding RNA (sncRNA) 5' transfer RNA (tRNA) half
atgtggcagcggtggga

SEQ ID NO: 13491 - DNA, 14 bp, Artificial Sequence
  synthetic circulating small noncoding RNA (sncRNA) 5' transfer RNA (tRNA) half
ggtctaaggcgctg

SEQ ID NO: 13492 - DNA, 39 bp, Artificial Sequence
  synthetic circulating small noncoding RNA (sncRNA) 5' transfer RNA (tRNA) half
acccaggcggcccgggttcgactcccggtgtgggaacag

SEQ ID NO: 13493 - DNA, 16 bp, Artificial Sequence
  synthetic circulating small noncoding RNA (sncRNA) 5' transfer RNA (tRNA) half
tcgactccggctcgaa

SEQ ID NO: 13494 - DNA, 15 bp, Artificial Sequence
  synthetic circulating small noncoding RNA (sncRNA) 5' transfer RNA (tRNA) half
gcggttaggattcct

SEQ ID NO: 13495 - DNA, 34 bp, Artificial Sequence
  synthetic circulating small noncoding RNA (sncRNA) 5' transfer RNA (tRNA) half
cgcccaacgtggggctcgaacccacgaccctggg

SEQ ID NO: 13496 - DNA, 17 bp, Artificial Sequence
  synthetic circulating small noncoding RNA (sncRNA) 5' transfer RNA (tRNA) half
tccgactccgccgggac

SEQ ID NO: 13497 - DNA, 13 bp, Artificial Sequence
  synthetic circulating small noncoding RNA (sncRNA) 5' transfer RNA (tRNA) half
ccccagtggaacc

SEQ ID NO: 13498 - DNA, 20 bp, Artificial Sequence
  synthetic circulating small noncoding RNA (sncRNA) 5' transfer RNA (tRNA) half
atgcgttggccgggaatcga

SEQ ID NO: 13499 - DNA, 21 bp, Artificial Sequence
  synthetic circulating small noncoding RNA (sncRNA) 5' transfer RNA (tRNA) half
ttccgactccgccgggactcg

SEQ ID NO: 13500 - DNA, 18 bp, Artificial Sequence
  synthetic circulating small noncoding RNA (sncRNA) 5' transfer RNA (tRNA) half
gctctcaccgccgcggcc

SEQ ID NO: 13501 - DNA, 20 bp, Artificial Sequence
  synthetic circulating small noncoding RNA (sncRNA) 5' transfer RNA (tRNA) half
tctcgctggggcctgagtct

SEQ ID NO: 13502 - DNA, 19 bp, Artificial Sequence
  synthetic circulating small noncoding RNA (sncRNA) 5' transfer RNA (tRNA) half
agctgaccccgacgtgatt

SEQ ID NO: 13503 - DNA, 23 bp, Artificial Sequence
  synthetic circulating small noncoding RNA (sncRNA) 5' transfer RNA (tRNA) half
atccttaggtcgctggttcgatt

SEQ ID NO: 13504 - DNA, 15 bp, Artificial Sequence
  synthetic circulating small noncoding RNA (sncRNA) 5' transfer RNA (tRNA) half
accggggacctcttg

SEQ ID NO: 13505 - DNA, 7 bp, Artificial Sequence
  synthetic circulating small noncoding RNA (sncRNA) 5' transfer RNA (tRNA) half
cggtctc

SEQ ID NO: 13506 - DNA, 31 bp, Artificial Sequence
  synthetic circulating small noncoding RNA (sncRNA) 5' transfer RNA (tRNA) half
tcgagccagccaggagtcgaacctagaatct

SEQ ID NO: 13507 - DNA, 7 bp, Artificial Sequence
  synthetic circulating small noncoding RNA (sncRNA) 5' transfer RNA (tRNA) half
gcggccc

SEQ ID NO: 13508 - DNA, 12 bp, Artificial Sequence
  synthetic circulating small noncoding RNA (sncRNA) 5' transfer RNA (tRNA) half
cccggcatctcc

SEQ ID NO: 13509 - DNA, 12 bp, Artificial Sequence
  synthetic circulating small noncoding RNA (sncRNA) 5' transfer RNA (tRNA) half
gcgaccacgaag

SEQ ID NO: 13510 - DNA, 25 bp, Artificial Sequence
  synthetic circulating small noncoding RNA (sncRNA) 5' transfer RNA (tRNA) half
ccgggttcgactcccggtgtgggaa

SEQ ID NO: 13511 - DNA, 31 bp, Artificial Sequence
  synthetic circulating small noncoding RNA (sncRNA) 5' transfer RNA (tRNA) half
gtatcatgcaagattcccattcttgcgaccc

SEQ ID NO: 13512 - DNA, 12 bp, Artificial Sequence
  synthetic circulating small noncoding RNA (sncRNA) 5' transfer RNA (tRNA) half
cgtgacaggcgg

SEQ ID NO: 13513 - DNA, 25 bp, Artificial Sequence
  synthetic circulating small noncoding RNA (sncRNA) 5' transfer RNA (tRNA) half
agtggttcaattccacctttcgggc

SEQ ID NO: 13514 - DNA, 20 bp, Artificial Sequence
  synthetic circulating small noncoding RNA (sncRNA) 5' transfer RNA (tRNA) half
tccatagtgtagcggttatc

SEQ ID NO: 13515 - DNA, 25 bp, Artificial Sequence
  synthetic circulating small noncoding RNA (sncRNA) 5' transfer RNA (tRNA) half
gttcagtggtagaattctcgcctgc

SEQ ID NO: 13516 - DNA, 17 bp, Artificial Sequence
  synthetic circulating small noncoding RNA (sncRNA) 5' transfer RNA (tRNA) half
cagtggtagagcgcgcg

SEQ ID NO: 13517 - DNA, 19 bp, Artificial Sequence
  synthetic circulating small noncoding RNA (sncRNA) 5' transfer RNA (tRNA) half
tggtttcgatccatcgacc

SEQ ID NO: 13518 - DNA, 29 bp, Artificial Sequence
  synthetic circulating small noncoding RNA (sncRNA) 5' transfer RNA (tRNA) half
ccgaccacgaagggactcgaaccctcaat

SEQ ID NO: 13519 - DNA, 11 bp, Artificial Sequence
  synthetic circulating small noncoding RNA (sncRNA) 5' transfer RNA (tRNA) half
gctctacccct

SEQ ID NO: 13520 - DNA, 31 bp, Artificial Sequence
  synthetic circulating small noncoding RNA (sncRNA) 5' transfer RNA (tRNA) half
gcctcccgcgtggcaggcgagaattctacca

SEQ ID NO: 13521 - DNA, 16 bp, Artificial Sequence
  synthetic circulating small noncoding RNA (sncRNA) 5' transfer RNA (tRNA) half
ccctgcctgtcacgca

SEQ ID NO: 13522 - DNA, 32 bp, Artificial Sequence
  synthetic circulating small noncoding RNA (sncRNA) 5' transfer RNA (tRNA) half
cttccctggtggtctagtggttaggattcggc

SEQ ID NO: 13523 - DNA, 38 bp, Artificial Sequence
  synthetic circulating small noncoding RNA (sncRNA) 5' transfer RNA (tRNA) half
aacaggagatcctgggttcgactcccagtggggccttc

SEQ ID NO: 13524 - DNA, 15 bp, Artificial Sequence
  synthetic circulating small noncoding RNA (sncRNA) 5' transfer RNA (tRNA) half
tgcattggccgggaa

SEQ ID NO: 13525 - DNA, 11 bp, Artificial Sequence
  synthetic circulating small noncoding RNA (sncRNA) 5' transfer RNA (tRNA) half
ccacgttgggc

SEQ ID NO: 13526 - DNA, 24 bp, Artificial Sequence
  synthetic circulating small noncoding RNA (sncRNA) 5' transfer RNA (tRNA) half
aaaaaatggtggagatgccgggga

SEQ ID NO: 13527 - DNA, 18 bp, Artificial Sequence
  synthetic circulating small noncoding RNA (sncRNA) 5' transfer RNA (tRNA) half
atggccgagtggttaagg

SEQ ID NO: 13528 - DNA, 12 bp, Artificial Sequence
  synthetic circulating small noncoding RNA (sncRNA) 5' transfer RNA (tRNA) half
catctgggtcgc

SEQ ID NO: 13529 - DNA, 32 bp, Artificial Sequence
  synthetic circulating small noncoding RNA (sncRNA) 5' transfer RNA (tRNA) half
tgccccctctgaggttcgaactcaggaccttc

SEQ ID NO: 13530 - DNA, 27 bp, Artificial Sequence
  synthetic circulating small noncoding RNA (sncRNA) 5' transfer RNA (tRNA) half
gcgctctaccactgagctacatcccca

SEQ ID NO: 13531 - DNA, 31 bp, Artificial Sequence
  synthetic circulating small noncoding RNA (sncRNA) 5' transfer RNA (tRNA) half
atccttaggtcgctggttcgattccggctcg

SEQ ID NO: 13532 - DNA, 24 bp, Artificial Sequence
  synthetic circulating small noncoding RNA (sncRNA) 5' transfer RNA (tRNA) half
tagtggtgagtatccccgcctgtc

SEQ ID NO: 13533 - DNA, 25 bp, Artificial Sequence
  synthetic circulating small noncoding RNA (sncRNA) 5' transfer RNA (tRNA) half
tggttcgaatccggctcgaaggaat

SEQ ID NO: 13534 - DNA, 22 bp, Artificial Sequence
  synthetic circulating small noncoding RNA (sncRNA) 5' transfer RNA (tRNA) half
ctgttcccataccgggagtcga

SEQ ID NO: 13535 - DNA, 22 bp, Artificial Sequence
  synthetic circulating small noncoding RNA (sncRNA) 5' transfer RNA (tRNA) half
acgtgtttccgcccggtttcga

SEQ ID NO: 13536 - DNA, 18 bp, Artificial Sequence
  synthetic circulating small noncoding RNA (sncRNA) 5' transfer RNA (tRNA) half
ctgctcggccatcctgac

SEQ ID NO: 13537 - DNA, 12 bp, Artificial Sequence
  synthetic circulating small noncoding RNA (sncRNA) 5' transfer RNA (tRNA) half
ggattcggcgct

SEQ ID NO: 13538 - DNA, 19 bp, Artificial Sequence
  synthetic circulating small noncoding RNA (sncRNA) 5' transfer RNA (tRNA) half
agtccaatgcgctatccat

SEQ ID NO: 13539 - DNA, 17 bp, Artificial Sequence
  synthetic circulating small noncoding RNA (sncRNA) 5' transfer RNA (tRNA) half
atccccggcacctccac

SEQ ID NO: 13540 - DNA, 10 bp, Artificial Sequence
  synthetic circulating small noncoding RNA (sncRNA) 5' transfer RNA (tRNA) half
cggattcgaa

SEQ ID NO: 13541 - DNA, 43 bp, Artificial Sequence
  synthetic circulating small noncoding RNA (sncRNA) 5' transfer RNA (tRNA) half
cagtctcttcgggggcgtgggttcgaatcccaccgctgccaac

SEQ ID NO: 13542 - DNA, 17 bp, Artificial Sequence
  synthetic circulating small noncoding RNA (sncRNA) 5' transfer RNA (tRNA) half
ttcgaacccaggatctc

SEQ ID NO: 13543 - DNA, 18 bp, Artificial Sequence
  synthetic circulating small noncoding RNA (sncRNA) 5' transfer RNA (tRNA) half
tcgactcctggctggctc

SEQ ID NO: 13544 - DNA, 37 bp, Artificial Sequence
  synthetic circulating small noncoding RNA (sncRNA) 5' transfer RNA (tRNA) half
gcctccccgtcggggaatcgaaccccggtctcccgcg

SEQ ID NO: 13545 - DNA, 24 bp, Artificial Sequence
  synthetic circulating small noncoding RNA (sncRNA) 5' transfer RNA (tRNA) half
cccataccgggagtcgaacccggg

SEQ ID NO: 13546 - DNA, 12 bp, Artificial Sequence
  synthetic circulating small noncoding RNA (sncRNA) 5' transfer RNA (tRNA) half
ttcgatccccgg

SEQ ID NO: 13547 - DNA, 15 bp, Artificial Sequence
  synthetic circulating small noncoding RNA (sncRNA) 5' transfer RNA (tRNA) half
cacgctctaccaact

SEQ ID NO: 13548 - DNA, 39 bp, Artificial Sequence
  synthetic circulating small noncoding RNA (sncRNA) 5' transfer RNA (tRNA) half
agacttaaaaccttgttcccagaggttcaaatcctctcc

SEQ ID NO: 13549 - DNA, 23 bp, Artificial Sequence
  synthetic circulating small noncoding RNA (sncRNA) 5' transfer RNA (tRNA) half
tcaccgccgcggcccgggttcga

SEQ ID NO: 13550 - DNA, 34 bp, Artificial Sequence
  synthetic circulating small noncoding RNA (sncRNA) 5' transfer RNA (tRNA) half
ccagcgatccgagttcaaatctcggtggaacctg

SEQ ID NO: 13551 - DNA, 16 bp, Artificial Sequence
  synthetic circulating small noncoding RNA (sncRNA) 5' transfer RNA (tRNA) half
agcctccgatagcaga

SEQ ID NO: 13552 - DNA, 16 bp, Artificial Sequence
  synthetic circulating small noncoding RNA (sncRNA) 5' transfer RNA (tRNA) half
ttcgattccccgacgg

SEQ ID NO: 13553 - DNA, 31 bp, Artificial Sequence
  synthetic circulating small noncoding RNA (sncRNA) 5' transfer RNA (tRNA) half
aaggccccagcgagatttgaactcgcgaccc

SEQ ID NO: 13554 - DNA, 34 bp, Artificial Sequence
  synthetic circulating small noncoding RNA (sncRNA) 5' transfer RNA (tRNA) half
gtgttcccacaccgggagtcgaacccgggccgcc

SEQ ID NO: 13555 - DNA, 18 bp, Artificial Sequence
  synthetic circulating small noncoding RNA (sncRNA) 5' transfer RNA (tRNA) half
aacccacgcccccgaaga

SEQ ID NO: 13556 - DNA, 20 bp, Artificial Sequence
  synthetic circulating small noncoding RNA (sncRNA) 5' transfer RNA (tRNA) half
gagtcgaacccgggccgcct

SEQ ID NO: 13557 - DNA, 10 bp, Artificial Sequence
  synthetic circulating small noncoding RNA (sncRNA) 5' transfer RNA (tRNA) half
aggcggcccg

SEQ ID NO: 13558 - DNA, 30 bp, Artificial Sequence
  synthetic circulating small noncoding RNA (sncRNA) 5' transfer RNA (tRNA) half
cgagaattctaccactgaaccaccaatgct

SEQ ID NO: 13559 - DNA, 34 bp, Artificial Sequence
  synthetic circulating small noncoding RNA (sncRNA) 5' transfer RNA (tRNA) half
tcagggtcgtgggttcgagccccacgttgggcgc

SEQ ID NO: 13560 - DNA, 18 bp, Artificial Sequence
  synthetic circulating small noncoding RNA (sncRNA) 5' transfer RNA (tRNA) half
gattcccattcttgcgac

SEQ ID NO: 13561 - DNA, 31 bp, Artificial Sequence
  synthetic circulating small noncoding RNA (sncRNA) 5' transfer RNA (tRNA) half
ggccggttagctcagttggttagagcgtggt

SEQ ID NO: 13562 - DNA, 15 bp, Artificial Sequence
  synthetic circulating small noncoding RNA (sncRNA) 5' transfer RNA (tRNA) half
cggtagagcatcaga

SEQ ID NO: 13563 - DNA, 31 bp, Artificial Sequence
  synthetic circulating small noncoding RNA (sncRNA) 5' transfer RNA (tRNA) half
ccccagcgagatttgaactcgcgacccctgg

SEQ ID NO: 13564 - DNA, 12 bp, Artificial Sequence
  synthetic circulating small noncoding RNA (sncRNA) 5' transfer RNA (tRNA) half
gccggttagctc

SEQ ID NO: 13565 - DNA, 20 bp, Artificial Sequence
  synthetic circulating small noncoding RNA (sncRNA) 5' transfer RNA (tRNA) half
atgctaaggttccaccgaga

SEQ ID NO: 13566 - DNA, 11 bp, Artificial Sequence
  synthetic circulating small noncoding RNA (sncRNA) 5' transfer RNA (tRNA) half
ggtctggccgg

SEQ ID NO: 13567 - DNA, 35 bp, Artificial Sequence
  synthetic circulating small noncoding RNA (sncRNA) 5' transfer RNA (tRNA) half
ttgtgccccgtgtgaggatcgaactcacgaccttc

SEQ ID NO: 13568 - DNA, 11 bp, Artificial Sequence
  synthetic circulating small noncoding RNA (sncRNA) 5' transfer RNA (tRNA) half
atcgaaccccg

SEQ ID NO: 13569 - DNA, 28 bp, Artificial Sequence
  synthetic circulating small noncoding RNA (sncRNA) 5' transfer RNA (tRNA) half
tcccataccgggagtcgaacccgggccg

SEQ ID NO: 13570 - DNA, 21 bp, Artificial Sequence
  synthetic circulating small noncoding RNA (sncRNA) 5' transfer RNA (tRNA) half
cgtatagtggttagtactctg

SEQ ID NO: 13571 - DNA, 13 bp, Artificial Sequence
  synthetic circulating small noncoding RNA (sncRNA) 5' transfer RNA (tRNA) half
tagcactctggac

SEQ ID NO: 13572 - DNA, 34 bp, Artificial Sequence
  synthetic circulating small noncoding RNA (sncRNA) 5' transfer RNA (tRNA) half
ggcatgggtggttcagtggtagaattctcgcctg

SEQ ID NO: 13573 - DNA, 33 bp, Artificial Sequence
  synthetic circulating small noncoding RNA (sncRNA) 5' transfer RNA (tRNA) half
agagtcccatgctctaccgactgagctagccgg

SEQ ID NO: 13574 - DNA, 27 bp, Artificial Sequence
  synthetic circulating small noncoding RNA (sncRNA) 5' transfer RNA (tRNA) half
gcgcccaacgtggggctcgaacccacg

SEQ ID NO: 13575 - DNA, 32 bp, Artificial Sequence
  synthetic circulating small noncoding RNA (sncRNA) 5' transfer RNA (tRNA) half
ggcgagaattctaccattgaactaccaatgct

SEQ ID NO: 13576 - DNA, 16 bp, Artificial Sequence
  synthetic circulating small noncoding RNA (sncRNA) 5' transfer RNA (tRNA) half
gccaatgccttatcca

SEQ ID NO: 13577 - DNA, 23 bp, Artificial Sequence
  synthetic circulating small noncoding RNA (sncRNA) 5' transfer RNA (tRNA) half
gttcaaatcccggacgagcccca

SEQ ID NO: 13578 - DNA, 23 bp, Artificial Sequence
  synthetic circulating small noncoding RNA (sncRNA) 5' transfer RNA (tRNA) half
actctgaatccagcgacccgagt

SEQ ID NO: 13579 - DNA, 15 bp, Artificial Sequence
  synthetic circulating small noncoding RNA (sncRNA) 5' transfer RNA (tRNA) half
accgaagatcgcggg

SEQ ID NO: 13580 - DNA, 19 bp, Artificial Sequence
  synthetic circulating small noncoding RNA (sncRNA) 5' transfer RNA (tRNA) half
tggaccctcagattaaaag

SEQ ID NO: 13581 - DNA, 34 bp, Artificial Sequence
  synthetic circulating small noncoding RNA (sncRNA) 5' transfer RNA (tRNA) half
ctcccacatggtctagcggttaggattcctggtt

SEQ ID NO: 13582 - DNA, 28 bp, Artificial Sequence
  synthetic circulating small noncoding RNA (sncRNA) 5' transfer RNA (tRNA) half
ggcgagaattctaccattgaactaccaa

SEQ ID NO: 13583 - DNA, 25 bp, Artificial Sequence
  synthetic circulating small noncoding RNA (sncRNA) 5' transfer RNA (tRNA) half
agcgaccacgaagggactcgaaccc

SEQ ID NO: 13584 - DNA, 7 bp, Artificial Sequence
  synthetic circulating small noncoding RNA (sncRNA) 5' transfer RNA (tRNA) half
accgccg

SEQ ID NO: 13585 - DNA, 33 bp, Artificial Sequence
  synthetic circulating small noncoding RNA (sncRNA) 5' transfer RNA (tRNA) half
cgtgatcgtatagtggttagtactctgcgttgt

SEQ ID NO: 13586 - DNA, 29 bp, Artificial Sequence
  synthetic circulating small noncoding RNA (sncRNA) 5' transfer RNA (tRNA) half
gcaggcgagaattctaccactgaaccacc

SEQ ID NO: 13587 - DNA, 35 bp, Artificial Sequence
  synthetic circulating small noncoding RNA (sncRNA) 5' transfer RNA (tRNA) half
tcagaagattgagggttcgagtcccttcgtggtcg

SEQ ID NO: 13588 - DNA, 17 bp, Artificial Sequence
  synthetic circulating small noncoding RNA (sncRNA) 5' transfer RNA (tRNA) half
tagggctcgtccgggat

SEQ ID NO: 13589 - DNA, 24 bp, Artificial Sequence
  synthetic circulating small noncoding RNA (sncRNA) 5' transfer RNA (tRNA) half
cgcggcccgggttcgattcccggt

SEQ ID NO: 13590 - DNA, 19 bp, Artificial Sequence
  synthetic circulating small noncoding RNA (sncRNA) 5' transfer RNA (tRNA) half
aaccgggcggaaacaaaag

SEQ ID NO: 13591 - DNA, 20 bp, Artificial Sequence
  synthetic circulating small noncoding RNA (sncRNA) 5' transfer RNA (tRNA) half
atctgggtcgcatggtcgtt

SEQ ID NO: 13592 - DNA, 29 bp, Artificial Sequence
  synthetic circulating small noncoding RNA (sncRNA) 5' transfer RNA (tRNA) half
tcaggatggccgagcggtctaaggcgctg

SEQ ID NO: 13593 - DNA, 27 bp, Artificial Sequence
  synthetic circulating small noncoding RNA (sncRNA) 5' transfer RNA (tRNA) half
aggattcggcgctctcaccgccgcggc

SEQ ID NO: 13594 - DNA, 20 bp, Artificial Sequence
  synthetic circulating small noncoding RNA (sncRNA) 5' transfer RNA (tRNA) half
cggctagctcagtcggtaga

SEQ ID NO: 13595 - DNA, 22 bp, Artificial Sequence
  synthetic circulating small noncoding RNA (sncRNA) 5' transfer RNA (tRNA) half
gtctagcggttaggattcctgg

SEQ ID NO: 13596 - DNA, 40 bp, Artificial Sequence
  synthetic circulating small noncoding RNA (sncRNA) 5' transfer RNA (tRNA) half
acgcgaaaggtccccggttcgaaaccgggcggaaacagca

SEQ ID NO: 13597 - DNA, 20 bp, Artificial Sequence
  synthetic circulating small noncoding RNA (sncRNA) 5' transfer RNA (tRNA) half
gttcgaatcccagtggggcc

SEQ ID NO: 13598 - DNA, 20 bp, Artificial Sequence
  synthetic circulating small noncoding RNA (sncRNA) 5' transfer RNA (tRNA) half
gtcctgccgcggtcgacttg

SEQ ID NO: 13599 - DNA, 31 bp, Artificial Sequence
  synthetic circulating small noncoding RNA (sncRNA) 5' transfer RNA (tRNA) half
gcgagaatcatacccctagaccaacgagccg

SEQ ID NO: 13600 - DNA, 21 bp, Artificial Sequence
  synthetic circulating small noncoding RNA (sncRNA) 5' transfer RNA (tRNA) half
gaatccgagtcacggcattat

SEQ ID NO: 13601 - DNA, 19 bp, Artificial Sequence
  synthetic circulating small noncoding RNA (sncRNA) 5' transfer RNA (tRNA) half
ttgagccccagtggaacta

SEQ ID NO: 13602 - DNA, 33 bp, Artificial Sequence
  synthetic circulating small noncoding RNA (sncRNA) 5' transfer RNA (tRNA) half
taagtgagaatcatacccctagaccaacaagcc

SEQ ID NO: 13603 - DNA, 20 bp, Artificial Sequence
  synthetic circulating small noncoding RNA (sncRNA) 5' transfer RNA (tRNA) half
aaccactacactacggaaac

SEQ ID NO: 13604 - DNA, 13 bp, Artificial Sequence
  synthetic circulating small noncoding RNA (sncRNA) 5' transfer RNA (tRNA) half
ttgcgccacgagg

SEQ ID NO: 13605 - DNA, 34 bp, Artificial Sequence
  synthetic circulating small noncoding RNA (sncRNA) 5' transfer RNA (tRNA) half
atggaggcgtgggttcgaatcccacttctgacac

SEQ ID NO: 13606 - DNA, 20 bp, Artificial Sequence
  synthetic circulating small noncoding RNA (sncRNA) 5' transfer RNA (tRNA) half
gcccagcatgcttccgctgc

SEQ ID NO: 13607 - DNA, 30 bp, Artificial Sequence
  synthetic circulating small noncoding RNA (sncRNA) 5' transfer RNA (tRNA) half
acgcagcgccttagaccgctcggccatcct

SEQ ID NO: 13608 - DNA, 17 bp, Artificial Sequence
  synthetic circulating small noncoding RNA (sncRNA) 5' transfer RNA (tRNA) half
acctgcgcggggaaacc

SEQ ID NO: 13609 - DNA, 34 bp, Artificial Sequence
  synthetic circulating small noncoding RNA (sncRNA) 5' transfer RNA (tRNA) half
ggagtcagacgcgctaccgttgcgccacgaggtc

SEQ ID NO: 13610 - DNA, 22 bp, Artificial Sequence
  synthetic circulating small noncoding RNA (sncRNA) 5' transfer RNA (tRNA) half
cgaaccaccaacctttcggtta

SEQ ID NO: 13611 - DNA, 30 bp, Artificial Sequence
  synthetic circulating small noncoding RNA (sncRNA) 5' transfer RNA (tRNA) half
cgccaaatcctaaccactagaccaccaggg

SEQ ID NO: 13612 - DNA, 15 bp, Artificial Sequence
  synthetic circulating small noncoding RNA (sncRNA) 5' transfer RNA (tRNA) half
cggatgatcctcagt

SEQ ID NO: 13613 - DNA, 20 bp, Artificial Sequence
  synthetic circulating small noncoding RNA (sncRNA) 5' transfer RNA (tRNA) half
ggcaagaattctaccactga

SEQ ID NO: 13614 - DNA, 35 bp, Artificial Sequence
  synthetic circulating small noncoding RNA (sncRNA) 5' transfer RNA (tRNA) half
acgccaaggtcgcgggttcgatccccgtacgggcc

SEQ ID NO: 13615 - DNA, 15 bp, Artificial Sequence
  synthetic circulating small noncoding RNA (sncRNA) 5' transfer RNA (tRNA) half
tgagattaagagtct

SEQ ID NO: 13616 - DNA, 21 bp, Artificial Sequence
  synthetic circulating small noncoding RNA (sncRNA) 5' transfer RNA (tRNA) half
agccagccaggagtcgaacct

SEQ ID NO: 13617 - DNA, 17 bp, Artificial Sequence
  synthetic circulating small noncoding RNA (sncRNA) 5' transfer RNA (tRNA) half
cccagcacgcttccgct

SEQ ID NO: 13618 - DNA, 29 bp, Artificial Sequence
  synthetic circulating small noncoding RNA (sncRNA) 5' transfer RNA (tRNA) half
acctgtgcggggaaaccccattggatttc

SEQ ID NO: 13619 - DNA, 28 bp, Artificial Sequence
  synthetic circulating small noncoding RNA (sncRNA) 5' transfer RNA (tRNA) half
cggaagcgtgctgggcccataacccaga

SEQ ID NO: 13620 - DNA, 24 bp, Artificial Sequence
  synthetic circulating small noncoding RNA (sncRNA) 5' transfer RNA (tRNA) half
cgcctccccgtcggggaatcgaac

SEQ ID NO: 13621 - DNA, 15 bp, Artificial Sequence
  synthetic circulating small noncoding RNA (sncRNA) 5' transfer RNA (tRNA) half
acgggccaggggagt

SEQ ID NO: 13622 - DNA, 10 bp, Artificial Sequence
  synthetic circulating small noncoding RNA (sncRNA) 5' transfer RNA (tRNA) half
gccgggactc

SEQ ID NO: 13623 - DNA, 20 bp, Artificial Sequence
  synthetic circulating small noncoding RNA (sncRNA) 5' transfer RNA (tRNA) half
gagattaagagtctcatgct

SEQ ID NO: 13624 - DNA, 19 bp, Artificial Sequence
  synthetic circulating small noncoding RNA (sncRNA) 5' transfer RNA (tRNA) half
gaactcacgaccttcagat

SEQ ID NO: 13625 - DNA, 13 bp, Artificial Sequence
  synthetic circulating small noncoding RNA (sncRNA) 5' transfer RNA (tRNA) half
tcgactcccggtg

SEQ ID NO: 13626 - DNA, 19 bp, Artificial Sequence
  synthetic circulating small noncoding RNA (sncRNA) 5' transfer RNA (tRNA) half
cagtggtagagcgcgcgct

SEQ ID NO: 13627 - DNA, 17 bp, Artificial Sequence
  synthetic circulating small noncoding RNA (sncRNA) 5' transfer RNA (tRNA) half
ccctgggtgggctcgaa

SEQ ID NO: 13628 - DNA, 19 bp, Artificial Sequence
  synthetic circulating small noncoding RNA (sncRNA) 5' transfer RNA (tRNA) half
ggtttcgatccatcgacct

SEQ ID NO: 13629 - DNA, 35 bp, Artificial Sequence
  synthetic circulating small noncoding RNA (sncRNA) 5' transfer RNA (tRNA) half
ccagcgatccgagttcaaatctcggtggaacctac

SEQ ID NO: 13630 - DNA, 19 bp, Artificial Sequence
  synthetic circulating small noncoding RNA (sncRNA) 5' transfer RNA (tRNA) half
gaccgacgaggatgggatt

SEQ ID NO: 13631 - DNA, 11 bp, Artificial Sequence
  synthetic circulating small noncoding RNA (sncRNA) 5' transfer RNA (tRNA) half
gagcccaagca

SEQ ID NO: 13632 - DNA, 12 bp, Artificial Sequence
  synthetic circulating small noncoding RNA (sncRNA) 5' transfer RNA (tRNA) half
tctaaggcgctg

SEQ ID NO: 13633 - DNA, 20 bp, Artificial Sequence
  synthetic circulating small noncoding RNA (sncRNA) 5' transfer RNA (tRNA) half
cccatgctctaccgactgag

SEQ ID NO: 13634 - DNA, 21 bp, Artificial Sequence
  synthetic circulating small noncoding RNA (sncRNA) 5' transfer RNA (tRNA) half
aagcatgcgctctaccactga

SEQ ID NO: 13635 - DNA, 33 bp, Artificial Sequence
  synthetic circulating small noncoding RNA (sncRNA) 5' transfer RNA (tRNA) half
aggccaatgccttatccattaggccaccggggc

SEQ ID NO: 13636 - DNA, 14 bp, Artificial Sequence
  synthetic circulating small noncoding RNA (sncRNA) 5' transfer RNA (tRNA) half
ttcgaaaccgggcg

SEQ ID NO: 13637 - DNA, 28 bp, Artificial Sequence
  synthetic circulating small noncoding RNA (sncRNA) 5' transfer RNA (tRNA) half
tgtgggttcgagtcccatctgggtcgca

SEQ ID NO: 13638 - DNA, 32 bp, Artificial Sequence
  synthetic circulating small noncoding RNA (sncRNA) 5' transfer RNA (tRNA) half
ctctggtgggactcgaacccacaacctttgaa

SEQ ID NO: 13639 - DNA, 36 bp, Artificial Sequence
  synthetic circulating small noncoding RNA (sncRNA) 5' transfer RNA (tRNA) half
cagcgaccacgaagggactcgaacccccaatcttct

SEQ ID NO: 13640 - DNA, 28 bp, Artificial Sequence
  synthetic circulating small noncoding RNA (sncRNA) 5' transfer RNA (tRNA) half
agagtccagagtgctaaccattacacca

SEQ ID NO: 13641 - DNA, 35 bp, Artificial Sequence
  synthetic circulating small noncoding RNA (sncRNA) 5' transfer RNA (tRNA) half
gggagaccggggttcgattccccgacggggagtct

SEQ ID NO: 13642 - DNA, 17 bp, Artificial Sequence
  synthetic circulating small noncoding RNA (sncRNA) 5' transfer RNA (tRNA) half
gtctagcggttaggatt

SEQ ID NO: 13643 - DNA, 19 bp, Artificial Sequence
  synthetic circulating small noncoding RNA (sncRNA) 5' transfer RNA (tRNA) half
gtcctccgctctaccaact

SEQ ID NO: 13644 - DNA, 15 bp, Artificial Sequence
  synthetic circulating small noncoding RNA (sncRNA) 5' transfer RNA (tRNA) half
gtccaatgcgctatc

SEQ ID NO: 13645 - DNA, 31 bp, Artificial Sequence
  synthetic circulating small noncoding RNA (sncRNA) 5' transfer RNA (tRNA) half
gcagagtactaaccactatacgatctcggca

SEQ ID NO: 13646 - DNA, 20 bp, Artificial Sequence
  synthetic circulating small noncoding RNA (sncRNA) 5' transfer RNA (tRNA) half
tgggcccagcacgcttccgc

SEQ ID NO: 13647 - DNA, 31 bp, Artificial Sequence
  synthetic circulating small noncoding RNA (sncRNA) 5' transfer RNA (tRNA) half
cagtggtagaattctcgcctgccacgcggga

SEQ ID NO: 13648 - DNA, 28 bp, Artificial Sequence
  synthetic circulating small noncoding RNA (sncRNA) 5' transfer RNA (tRNA) half
tcgacgaggatgggattcgaacccatgc

SEQ ID NO: 13649 - DNA, 28 bp, Artificial Sequence
  synthetic circulating small noncoding RNA (sncRNA) 5' transfer RNA (tRNA) half
gagatgccggggatcgaacccggggcct

SEQ ID NO: 13650 - DNA, 35 bp, Artificial Sequence
  synthetic circulating small noncoding RNA (sncRNA) 5' transfer RNA (tRNA) half
gcccagcacgcttccgctgcgccactctgctaccc

SEQ ID NO: 13651 - DNA, 21 bp, Artificial Sequence
  synthetic circulating small noncoding RNA (sncRNA) 5' transfer RNA (tRNA) half
tcaccgccgcggcccgggttc

SEQ ID NO: 13652 - DNA, 15 bp, Artificial Sequence
  synthetic circulating small noncoding RNA (sncRNA) 5' transfer RNA (tRNA) half
cgaacccccaatctt

SEQ ID NO: 13653 - DNA, 16 bp, Artificial Sequence
  synthetic circulating small noncoding RNA (sncRNA) 5' transfer RNA (tRNA) half
cagtcggtagagcatg

SEQ ID NO: 13654 - DNA, 28 bp, Artificial Sequence
  synthetic circulating small noncoding RNA (sncRNA) 5' transfer RNA (tRNA) half
tcggcgctctcaccgccgcggcccgggt

SEQ ID NO: 13655 - DNA, 31 bp, Artificial Sequence
  synthetic circulating small noncoding RNA (sncRNA) 5' transfer RNA (tRNA) half
ggttccatagggtagtggttatcacatctgc

SEQ ID NO: 13656 - DNA, 18 bp, Artificial Sequence
  synthetic circulating small noncoding RNA (sncRNA) 5' transfer RNA (tRNA) half
ttcgattcccggccaacg

SEQ ID NO: 13657 - DNA, 25 bp, Artificial Sequence
  synthetic circulating small noncoding RNA (sncRNA) 5' transfer RNA (tRNA) half
agtggttatcacgttcgcctcacac

SEQ ID NO: 13658 - DNA, 21 bp, Artificial Sequence
  synthetic circulating small noncoding RNA (sncRNA) 5' transfer RNA (tRNA) half
actttcgacgaggatgggatt

SEQ ID NO: 13659 - DNA, 35 bp, Artificial Sequence
  synthetic circulating small noncoding RNA (sncRNA) 5' transfer RNA (tRNA) half
taaacaggagatcctgggttcgaatcccagcggtg

SEQ ID NO: 13660 - DNA, 11 bp, Artificial Sequence
  synthetic circulating small noncoding RNA (sncRNA) 5' transfer RNA (tRNA) half
cccccgaccgc

SEQ ID NO: 13661 - DNA, 18 bp, Artificial Sequence
  synthetic circulating small noncoding RNA (sncRNA) 5' transfer RNA (tRNA) half
agagaggtcccaccgaga

SEQ ID NO: 13662 - DNA, 16 bp, Artificial Sequence
  synthetic circulating small noncoding RNA (sncRNA) 5' transfer RNA (tRNA) half
ggattcggcgctctca

SEQ ID NO: 13663 - DNA, 16 bp, Artificial Sequence
  synthetic circulating small noncoding RNA (sncRNA) 5' transfer RNA (tRNA) half
cgaacccacaatccct

SEQ ID NO: 13664 - DNA, 19 bp, Artificial Sequence
  synthetic circulating small noncoding RNA (sncRNA) 5' transfer RNA (tRNA) half
gccccctctgaggttcgaa

SEQ ID NO: 13665 - DNA, 23 bp, Artificial Sequence
  synthetic circulating small noncoding RNA (sncRNA) 5' transfer RNA (tRNA) half
agtggtagaattctcgcctgcca

SEQ ID NO: 13666 - DNA, 27 bp, Artificial Sequence
  synthetic circulating small noncoding RNA (sncRNA) 5' transfer RNA (tRNA) half
aggcgagaattctaccattgaactacc

SEQ ID NO: 13667 - DNA, 21 bp, Artificial Sequence
  synthetic circulating small noncoding RNA (sncRNA) 5' transfer RNA (tRNA) half
atttcaagtccatcgccttaa

SEQ ID NO: 13668 - DNA, 6 bp, Artificial Sequence
  synthetic circulating small noncoding RNA (sncRNA) 5' transfer RNA (tRNA) half
ggccag

SEQ ID NO: 13669 - DNA, 31 bp, Artificial Sequence
  synthetic circulating small noncoding RNA (sncRNA) 5' transfer RNA (tRNA) half
acatggtctagcggttaggattcctggtttt

SEQ ID NO: 13670 - DNA, 21 bp, Artificial Sequence
  synthetic circulating small noncoding RNA (sncRNA) 5' transfer RNA (tRNA) half
taatctgagggtccagggttc

SEQ ID NO: 13671 - DNA, 10 bp, Artificial Sequence
  synthetic circulating small noncoding RNA (sncRNA) 5' transfer RNA (tRNA) half
ggcacccgga

SEQ ID NO: 13672 - DNA, 15 bp, Artificial Sequence
  synthetic circulating small noncoding RNA (sncRNA) 5' transfer RNA (tRNA) half
ccaggaatcctaacc

SEQ ID NO: 13673 - DNA, 35 bp, Artificial Sequence
  synthetic circulating small noncoding RNA (sncRNA) 5' transfer RNA (tRNA) half
agtctcatgctctaccgactgagctagccgggcct

SEQ ID NO: 13674 - DNA, 8 bp, Artificial Sequence
  synthetic circulating small noncoding RNA (sncRNA) 5' transfer RNA (tRNA) half
cggcccgg

SEQ ID NO: 13675 - DNA, 12 bp, Artificial Sequence
  synthetic circulating small noncoding RNA (sncRNA) 5' transfer RNA (tRNA) half
tcggtggaacct

SEQ ID NO: 13676 - DNA, 14 bp, Artificial Sequence
  synthetic circulating small noncoding RNA (sncRNA) 5' transfer RNA (tRNA) half
accgccgcggcccg

SEQ ID NO: 13677 - DNA, 17 bp, Artificial Sequence
  synthetic circulating small noncoding RNA (sncRNA) 5' transfer RNA (tRNA) half
aattccacctttcgggc

SEQ ID NO: 13678 - DNA, 22 bp, Artificial Sequence
  synthetic circulating small noncoding RNA (sncRNA) 5' transfer RNA (tRNA) half
aaacccacaatcgtagtcggca

SEQ ID NO: 13679 - DNA, 29 bp, Artificial Sequence
  synthetic circulating small noncoding RNA (sncRNA) 5' transfer RNA (tRNA) half
ccaggagtggggttcgaacccacgcagac

SEQ ID NO: 13680 - DNA, 14 bp, Artificial Sequence
  synthetic circulating small noncoding RNA (sncRNA) 5' transfer RNA (tRNA) half
accctcaatcttct

SEQ ID NO: 13681 - DNA, 12 bp, Artificial Sequence
  synthetic circulating small noncoding RNA (sncRNA) 5' transfer RNA (tRNA) half
accgaggttgct

SEQ ID NO: 13682 - DNA, 41 bp, Artificial Sequence
  synthetic circulating small noncoding RNA (sncRNA) 5' transfer RNA (tRNA) half
aaatgttccgactccgccgggactcgaacccggaacctttg

SEQ ID NO: 13683 - DNA, 36 bp, Artificial Sequence
  synthetic circulating small noncoding RNA (sncRNA) 5' transfer RNA (tRNA) half
ggccccagcgagatttgaactcgcgacccctggttt

SEQ ID NO: 13684 - DNA, 12 bp, Artificial Sequence
  synthetic circulating small noncoding RNA (sncRNA) 5' transfer RNA (tRNA) half
tgcgttggccgg

SEQ ID NO: 13685 - DNA, 33 bp, Artificial Sequence
  synthetic circulating small noncoding RNA (sncRNA) 5' transfer RNA (tRNA) half
tgccccgtgtgaggatcgaactcacgaccttca

SEQ ID NO: 13686 - DNA, 28 bp, Artificial Sequence
  synthetic circulating small noncoding RNA (sncRNA) 5' transfer RNA (tRNA) half
tctccccgcgcaggttcgaatcctgccg

SEQ ID NO: 13687 - DNA, 29 bp, Artificial Sequence
  synthetic circulating small noncoding RNA (sncRNA) 5' transfer RNA (tRNA) half
ggcgccttagaccactcggccatcctgac

SEQ ID NO: 13688 - DNA, 21 bp, Artificial Sequence
  synthetic circulating small noncoding RNA (sncRNA) 5' transfer RNA (tRNA) half
cccggccaatgcactctctca

SEQ ID NO: 13689 - DNA, 9 bp, Artificial Sequence
  synthetic circulating small noncoding RNA (sncRNA) 5' transfer RNA (tRNA) half
aggtcgcgg

SEQ ID NO: 13690 - DNA, 20 bp, Artificial Sequence
  synthetic circulating small noncoding RNA (sncRNA) 5' transfer RNA (tRNA) half
ttcgaaccccgtccgtgcct

SEQ ID NO: 13691 - DNA, 24 bp, Artificial Sequence
  synthetic circulating small noncoding RNA (sncRNA) 5' transfer RNA (tRNA) half
cgtcggggaatcgaaccccggtct

SEQ ID NO: 13692 - DNA, 13 bp, Artificial Sequence
  synthetic circulating small noncoding RNA (sncRNA) 5' transfer RNA (tRNA) half
gtagagcatgaga

SEQ ID NO: 13693 - DNA, 15 bp, Artificial Sequence
  synthetic circulating small noncoding RNA (sncRNA) 5' transfer RNA (tRNA) half
ccgctcggccatcct

SEQ ID NO: 13694 - DNA, 27 bp, Artificial Sequence
  synthetic circulating small noncoding RNA (sncRNA) 5' transfer RNA (tRNA) half
gtccagggttcaagtccctgttcgggc

SEQ ID NO: 13695 - DNA, 39 bp, Artificial Sequence
  synthetic circulating small noncoding RNA (sncRNA) 5' transfer RNA (tRNA) half
cgtgttaggcgaatgtgataaccactacactacggaaac

SEQ ID NO: 13696 - DNA, 22 bp, Artificial Sequence
  synthetic circulating small noncoding RNA (sncRNA) 5' transfer RNA (tRNA) half
ggttcgagtcccatctggggtg

SEQ ID NO: 13697 - DNA, 22 bp, Artificial Sequence
  synthetic circulating small noncoding RNA (sncRNA) 5' transfer RNA (tRNA) half
gatggtttcgatccatcgacct

SEQ ID NO: 13698 - DNA, 20 bp, Artificial Sequence
  synthetic circulating small noncoding RNA (sncRNA) 5' transfer RNA (tRNA) half
tcgagtcccatctgggtcgc

SEQ ID NO: 13699 - DNA, 15 bp, Artificial Sequence
  synthetic circulating small noncoding RNA (sncRNA) 5' transfer RNA (tRNA) half
catgctctaccgact

SEQ ID NO: 13700 - DNA, 21 bp, Artificial Sequence
  synthetic circulating small noncoding RNA (sncRNA) 5' transfer RNA (tRNA) half
tagtggttaggattcggtgct

SEQ ID NO: 13701 - DNA, 27 bp, Artificial Sequence
  synthetic circulating small noncoding RNA (sncRNA) 5' transfer RNA (tRNA) half
atgtctctgtggcgcaatcggttagcg

SEQ ID NO: 13702 - DNA, 19 bp, Artificial Sequence
  synthetic circulating small noncoding RNA (sncRNA) 5' transfer RNA (tRNA) half
gccagtgccttatccatta

SEQ ID NO: 13703 - DNA, 45 bp, Artificial Sequence
  synthetic circulating small noncoding RNA (sncRNA) 5' transfer RNA (tRNA) half
cgctgcgttggccgggaatcgaacccgggtcaactgcttggaagg

SEQ ID NO: 13704 - DNA, 6 bp, Artificial Sequence
  synthetic circulating small noncoding RNA (sncRNA) 5' transfer RNA (tRNA) half
gccccc

SEQ ID NO: 13705 - DNA, 12 bp, Artificial Sequence
  synthetic circulating small noncoding RNA (sncRNA) 5' transfer RNA (tRNA) half
tcgcagtctccc

SEQ ID NO: 13706 - DNA, 19 bp, Artificial Sequence
  synthetic circulating small noncoding RNA (sncRNA) 5' transfer RNA (tRNA) half
ccgtatggaggcgtgggtt

SEQ ID NO: 13707 - DNA, 15 bp, Artificial Sequence
  synthetic circulating small noncoding RNA (sncRNA) 5' transfer RNA (tRNA) half
ccgggccgcctgggt

SEQ ID NO: 13708 - DNA, 13 bp, Artificial Sequence
  synthetic circulating small noncoding RNA (sncRNA) 5' transfer RNA (tRNA) half
gggatcgaacccg

SEQ ID NO: 13709 - DNA, 6 bp, Artificial Sequence
  synthetic circulating small noncoding RNA (sncRNA) 5' transfer RNA (tRNA) half
tcgaac

SEQ ID NO: 13710 - DNA, 25 bp, Artificial Sequence
  synthetic circulating small noncoding RNA (sncRNA) 5' transfer RNA (tRNA) half
ttggtctaggggtatgattctcggt

SEQ ID NO: 13711 - DNA, 22 bp, Artificial Sequence
  synthetic circulating small noncoding RNA (sncRNA) 5' transfer RNA (tRNA) half
ttcgattcccggccaatgcact

SEQ ID NO: 13712 - DNA, 20 bp, Artificial Sequence
  synthetic circulating small noncoding RNA (sncRNA) 5' transfer RNA (tRNA) half
tccccggcacctccacttcc

SEQ ID NO: 13713 - DNA, 27 bp, Artificial Sequence
  synthetic circulating small noncoding RNA (sncRNA) 5' transfer RNA (tRNA) half
ttcgattccggctcgaaggacttcgtg

SEQ ID NO: 13714 - DNA, 38 bp, Artificial Sequence
  synthetic circulating small noncoding RNA (sncRNA) 5' transfer RNA (tRNA) half
gcccaacgtggggctcgaacccacgaccctgagattaa

SEQ ID NO: 13715 - DNA, 13 bp, Artificial Sequence
  synthetic circulating small noncoding RNA (sncRNA) 5' transfer RNA (tRNA) half
cacccggatttga

SEQ ID NO: 13716 - DNA, 38 bp, Artificial Sequence
  synthetic circulating small noncoding RNA (sncRNA) 5' transfer RNA (tRNA) half
gtccagagtgctaaccattacaccatggaaccccctct

SEQ ID NO: 13717 - DNA, 29 bp, Artificial Sequence
  synthetic circulating small noncoding RNA (sncRNA) 5' transfer RNA (tRNA) half
ccccgggttcaatccccggcacctccagt

SEQ ID NO: 13718 - DNA, 21 bp, Artificial Sequence
  synthetic circulating small noncoding RNA (sncRNA) 5' transfer RNA (tRNA) half
ccatgctctaccgactgagct

SEQ ID NO: 13719 - DNA, 26 bp, Artificial Sequence
  synthetic circulating small noncoding RNA (sncRNA) 5' transfer RNA (tRNA) half
acaacgcagagtactaaccactatac

SEQ ID NO: 13720 - DNA, 37 bp, Artificial Sequence
  synthetic circulating small noncoding RNA (sncRNA) 5' transfer RNA (tRNA) half
ctaagccagggattgtgggttcgagtcccatctgggg

SEQ ID NO: 13721 - DNA, 13 bp, Artificial Sequence
  synthetic circulating small noncoding RNA (sncRNA) 5' transfer RNA (tRNA) half
ggtcgctggttcg

SEQ ID NO: 13722 - DNA, 25 bp, Artificial Sequence
  synthetic circulating small noncoding RNA (sncRNA) 5' transfer RNA (tRNA) half
ctctaaccaactgagctaaccggcc

SEQ ID NO: 13723 - DNA, 17 bp, Artificial Sequence
  synthetic circulating small noncoding RNA (sncRNA) 5' transfer RNA (tRNA) half
agcagaggatggtttcg

SEQ ID NO: 13724 - DNA, 10 bp, Artificial Sequence
  synthetic circulating small noncoding RNA (sncRNA) 5' transfer RNA (tRNA) half
tccccgtcgg

SEQ ID NO: 13725 - DNA, 34 bp, Artificial Sequence
  synthetic circulating small noncoding RNA (sncRNA) 5' transfer RNA (tRNA) half
accgctgggattcgaacccaggatctcctgttta

SEQ ID NO: 13726 - DNA, 11 bp, Artificial Sequence
  synthetic circulating small noncoding RNA (sncRNA) 5' transfer RNA (tRNA) half
gaatcgaaccc

SEQ ID NO: 13727 - DNA, 28 bp, Artificial Sequence
  synthetic circulating small noncoding RNA (sncRNA) 5' transfer RNA (tRNA) half
tccctggtagtctagtggttaggattcg

SEQ ID NO: 13728 - DNA, 31 bp, Artificial Sequence
  synthetic circulating small noncoding RNA (sncRNA) 5' transfer RNA (tRNA) half
gattcagagtccagagtgctaaccattacac

SEQ ID NO: 13729 - DNA, 9 bp, Artificial Sequence
  synthetic circulating small noncoding RNA (sncRNA) 5' transfer RNA (tRNA) half
atcccggac

SEQ ID NO: 13730 - DNA, 18 bp, Artificial Sequence
  synthetic circulating small noncoding RNA (sncRNA) 5' transfer RNA (tRNA) half
ggctagctcagtcggtag

SEQ ID NO: 13731 - DNA, 16 bp, Artificial Sequence
  synthetic circulating small noncoding RNA (sncRNA) 5' transfer RNA (tRNA) half
ctgaccccgacgtgat

SEQ ID NO: 13732 - DNA, 25 bp, Artificial Sequence
  synthetic circulating small noncoding RNA (sncRNA) 5' transfer RNA (tRNA) half
gttgccccctctgaggttcgaactc

SEQ ID NO: 13733 - DNA, 41 bp, Artificial Sequence
  synthetic circulating small noncoding RNA (sncRNA) 5' transfer RNA (tRNA) half
gggccgcggcggtgagagcgccgaatcctaaccactagacc

SEQ ID NO: 13734 - DNA, 8 bp, Artificial Sequence
  synthetic circulating small noncoding RNA (sncRNA) 5' transfer RNA (tRNA) half
gggctcgt

SEQ ID NO: 13735 - DNA, 23 bp, Artificial Sequence
  synthetic circulating small noncoding RNA (sncRNA) 5' transfer RNA (tRNA) half
tagcactctggactctgaatcca

SEQ ID NO: 13736 - DNA, 20 bp, Artificial Sequence
  synthetic circulating small noncoding RNA (sncRNA) 5' transfer RNA (tRNA) half
gaccacgtggcctaatggat

SEQ ID NO: 13737 - DNA, 18 bp, Artificial Sequence
  synthetic circulating small noncoding RNA (sncRNA) 5' transfer RNA (tRNA) half
tgcacgaggccccgggtt

SEQ ID NO: 13738 - DNA, 15 bp, Artificial Sequence
  synthetic circulating small noncoding RNA (sncRNA) 5' transfer RNA (tRNA) half
ctcggccatcacagc

SEQ ID NO: 13739 - DNA, 19 bp, Artificial Sequence
  synthetic circulating small noncoding RNA (sncRNA) 5' transfer RNA (tRNA) half
agaccggggttcgattccc

SEQ ID NO: 13740 - DNA, 34 bp, Artificial Sequence
  synthetic circulating small noncoding RNA (sncRNA) 5' transfer RNA (tRNA) half
agagtctcatgctctaccgactgagctagccggg

SEQ ID NO: 13741 - DNA, 10 bp, Artificial Sequence
  synthetic circulating small noncoding RNA (sncRNA) 5' transfer RNA (tRNA) half
ggcgaacgtg

SEQ ID NO: 13742 - DNA, 21 bp, Artificial Sequence
  synthetic circulating small noncoding RNA (sncRNA) 5' transfer RNA (tRNA) half
ttcgaaccccgtccgtgcctg

SEQ ID NO: 13743 - DNA, 15 bp, Artificial Sequence
  synthetic circulating small noncoding RNA (sncRNA) 5' transfer RNA (tRNA) half
aagctaagcgcccga

SEQ ID NO: 13744 - DNA, 18 bp, Artificial Sequence
  synthetic circulating small noncoding RNA (sncRNA) 5' transfer RNA (tRNA) half
gagactgcgacctgaacg

SEQ ID NO: 13745 - DNA, 31 bp, Artificial Sequence
  synthetic circulating small noncoding RNA (sncRNA) 5' transfer RNA (tRNA) half
gttaggattcggcgctctcaccgccgcggcc

SEQ ID NO: 13746 - DNA, 14 bp, Artificial Sequence
  synthetic circulating small noncoding RNA (sncRNA) 5' transfer RNA (tRNA) half
tcgaaaccgggcgg

SEQ ID NO: 13747 - DNA, 15 bp, Artificial Sequence
  synthetic circulating small noncoding RNA (sncRNA) 5' transfer RNA (tRNA) half
cgccttaaccactcg

SEQ ID NO: 13748 - DNA, 21 bp, Artificial Sequence
  synthetic circulating small noncoding RNA (sncRNA) 5' transfer RNA (tRNA) half
catgccgtgactcggattcga

SEQ ID NO: 13749 - DNA, 15 bp, Artificial Sequence
  synthetic circulating small noncoding RNA (sncRNA) 5' transfer RNA (tRNA) half
taccgggagtcgaac

SEQ ID NO: 13750 - DNA, 23 bp, Artificial Sequence
  synthetic circulating small noncoding RNA (sncRNA) 5' transfer RNA (tRNA) half
tagcggttaggattcctggtttt

SEQ ID NO: 13751 - DNA, 40 bp, Artificial Sequence
  synthetic circulating small noncoding RNA (sncRNA) 5' transfer RNA (tRNA) half
gtctccccgtcggggaatcgaaccccggtctcccgcgtga

SEQ ID NO: 13752 - DNA, 24 bp, Artificial Sequence
  synthetic circulating small noncoding RNA (sncRNA) 5' transfer RNA (tRNA) half
cgaccacgaagggactcgaacccc

SEQ ID NO: 13753 - DNA, 25 bp, Artificial Sequence
  synthetic circulating small noncoding RNA (sncRNA) 5' transfer RNA (tRNA) half
ccttccaagcagttgacccgggttc

SEQ ID NO: 13754 - DNA, 22 bp, Artificial Sequence
  synthetic circulating small noncoding RNA (sncRNA) 5' transfer RNA (tRNA) half
tcgatccccggcacctccactt

SEQ ID NO: 13755 - DNA, 26 bp, Artificial Sequence
  synthetic circulating small noncoding RNA (sncRNA) 5' transfer RNA (tRNA) half
tatggaggcgtgggttcgaatcccac

SEQ ID NO: 13756 - DNA, 30 bp, Artificial Sequence
  synthetic circulating small noncoding RNA (sncRNA) 5' transfer RNA (tRNA) half
acccaggcggcccgggttcgactcccggta

SEQ ID NO: 13757 - DNA, 25 bp, Artificial Sequence
  synthetic circulating small noncoding RNA (sncRNA) 5' transfer RNA (tRNA) half
ggggaatcgaaccccggtctcccgc

SEQ ID NO: 13758 - DNA, 36 bp, Artificial Sequence
  synthetic circulating small noncoding RNA (sncRNA) 5' transfer RNA (tRNA) half
gtgagtatccccgcctgtcacgcgggagaccggggt

SEQ ID NO: 13759 - DNA, 30 bp, Artificial Sequence
  synthetic circulating small noncoding RNA (sncRNA) 5' transfer RNA (tRNA) half
taaaccgaagatcacgggttcgaaccccgt

SEQ ID NO: 13760 - DNA, 33 bp, Artificial Sequence
  synthetic circulating small noncoding RNA (sncRNA) 5' transfer RNA (tRNA) half
gggcccagcatgcttccgctgcgccactctgct

SEQ ID NO: 13761 - DNA, 18 bp, Artificial Sequence
  synthetic circulating small noncoding RNA (sncRNA) 5' transfer RNA (tRNA) half
tgctagccattacaccat

SEQ ID NO: 13762 - DNA, 28 bp, Artificial Sequence
  synthetic circulating small noncoding RNA (sncRNA) 5' transfer RNA (tRNA) half
ccgctggtgtagtggtatcatgcaagat

SEQ ID NO: 13763 - DNA, 37 bp, Artificial Sequence
  synthetic circulating small noncoding RNA (sncRNA) 5' transfer RNA (tRNA) half
atctgaaggtcctgagttcgaacctcagagggggcag

SEQ ID NO: 13764 - DNA, 30 bp, Artificial Sequence
  synthetic circulating small noncoding RNA (sncRNA) 5' transfer RNA (tRNA) half
gagaattctaccattgaaccaccaatgcac

SEQ ID NO: 13765 - DNA, 22 bp, Artificial Sequence
  synthetic circulating small noncoding RNA (sncRNA) 5' transfer RNA (tRNA) half
cgaccacgaagggactcgaacc

SEQ ID NO: 13766 - DNA, 35 bp, Artificial Sequence
  synthetic circulating small noncoding RNA (sncRNA) 5' transfer RNA (tRNA) half
ggattaagagtcccatgctctaccgactgagctag

SEQ ID NO: 13767 - DNA, 31 bp, Artificial Sequence
  synthetic circulating small noncoding RNA (sncRNA) 5' transfer RNA (tRNA) half
cggcccgggttcgactcccggtgtgggaaca

SEQ ID NO: 13768 - DNA, 30 bp, Artificial Sequence
  synthetic circulating small noncoding RNA (sncRNA) 5' transfer RNA (tRNA) half
tggtagaattctcgcctgccacgcgggagg

SEQ ID NO: 13769 - DNA, 14 bp, Artificial Sequence
  synthetic circulating small noncoding RNA (sncRNA) 5' transfer RNA (tRNA) half
gcattggccgggaa

SEQ ID NO: 13770 - DNA, 8 bp, Artificial Sequence
  synthetic circulating small noncoding RNA (sncRNA) 5' transfer RNA (tRNA) half
acggcgag

SEQ ID NO: 13771 - DNA, 13 bp, Artificial Sequence
  synthetic circulating small noncoding RNA (sncRNA) 5' transfer RNA (tRNA) half
gggtcgcgagttc

SEQ ID NO: 13772 - DNA, 22 bp, Artificial Sequence
  synthetic circulating small noncoding RNA (sncRNA) 5' transfer RNA (tRNA) half
tcaattggtagagcatcagact

SEQ ID NO: 13773 - DNA, 30 bp, Artificial Sequence
  synthetic circulating small noncoding RNA (sncRNA) 5' transfer RNA (tRNA) half
gattcaaagtccagagtgctaaccattaca

SEQ ID NO: 13774 - DNA, 15 bp, Artificial Sequence
  synthetic circulating small noncoding RNA (sncRNA) 5' transfer RNA (tRNA) half
tcgagccccagtgga

SEQ ID NO: 13775 - DNA, 35 bp, Artificial Sequence
  synthetic circulating small noncoding RNA (sncRNA) 5' transfer RNA (tRNA) half
gcgccgaatcctaaccactagaccaccagggaagt

SEQ ID NO: 13776 - DNA, 27 bp, Artificial Sequence
  synthetic circulating small noncoding RNA (sncRNA) 5' transfer RNA (tRNA) half
acctccccgtcggggaattgaaccccg

SEQ ID NO: 13777 - DNA, 19 bp, Artificial Sequence
  synthetic circulating small noncoding RNA (sncRNA) 5' transfer RNA (tRNA) half
gacgaggtggccgagtggt

SEQ ID NO: 13778 - DNA, 13 bp, Artificial Sequence
  synthetic circulating small noncoding RNA (sncRNA) 5' transfer RNA (tRNA) half
caggatggccgag

SEQ ID NO: 13779 - DNA, 32 bp, Artificial Sequence
  synthetic circulating small noncoding RNA (sncRNA) 5' transfer RNA (tRNA) half
cgggacctctcgcacccaaagcgagaatcata

SEQ ID NO: 13780 - DNA, 13 bp, Artificial Sequence
  synthetic circulating small noncoding RNA (sncRNA) 5' transfer RNA (tRNA) half
gagtctcatgctc

SEQ ID NO: 13781 - DNA, 33 bp, Artificial Sequence
  synthetic circulating small noncoding RNA (sncRNA) 5' transfer RNA (tRNA) half
aggagatcctgggttcgaatcccagcggtgcct

SEQ ID NO: 13782 - DNA, 21 bp, Artificial Sequence
  synthetic circulating small noncoding RNA (sncRNA) 5' transfer RNA (tRNA) half
tcgaatccgagtcacggcatt

SEQ ID NO: 13783 - DNA, 34 bp, Artificial Sequence
  synthetic circulating small noncoding RNA (sncRNA) 5' transfer RNA (tRNA) half
ggcctcgtggcgcaacggtagcgcgtctgactcc

SEQ ID NO: 13784 - DNA, 6 bp, Artificial Sequence
  synthetic circulating small noncoding RNA (sncRNA) 5' transfer RNA (tRNA) half
tgcccg

SEQ ID NO: 13785 - DNA, 23 bp, Artificial Sequence
  synthetic circulating small noncoding RNA (sncRNA) 5' transfer RNA (tRNA) half
atcgatgcccgcatcctccactt

SEQ ID NO: 13786 - DNA, 29 bp, Artificial Sequence
  synthetic circulating small noncoding RNA (sncRNA) 5' transfer RNA (tRNA) half
cggcccgggttcgactcccggtgtgggaa

SEQ ID NO: 13787 - DNA, 21 bp, Artificial Sequence
  synthetic circulating small noncoding RNA (sncRNA) 5' transfer RNA (tRNA) half
atcccggacgagccccacttt

SEQ ID NO: 13788 - DNA, 8 bp, Artificial Sequence
  synthetic circulating small noncoding RNA (sncRNA) 5' transfer RNA (tRNA) half
ctcgccgt

SEQ ID NO: 13789 - DNA, 42 bp, Artificial Sequence
  synthetic circulating small noncoding RNA (sncRNA) 5' transfer RNA (tRNA) half
cccacgaccctgagattaagagtctcatgctctaccgactga

SEQ ID NO: 13790 - DNA, 32 bp, Artificial Sequence
  synthetic circulating small noncoding RNA (sncRNA) 5' transfer RNA (tRNA) half
gtccatcgccttaaccactcggccacctcatc

SEQ ID NO: 13791 - DNA, 35 bp, Artificial Sequence
  synthetic circulating small noncoding RNA (sncRNA) 5' transfer RNA (tRNA) half
agtcaaatgctctaccactgagctataccccctct

SEQ ID NO: 13792 - DNA, 23 bp, Artificial Sequence
  synthetic circulating small noncoding RNA (sncRNA) 5' transfer RNA (tRNA) half
gggaatcgaacccaggaccccat

SEQ ID NO: 13793 - DNA, 42 bp, Artificial Sequence
  synthetic circulating small noncoding RNA (sncRNA) 5' transfer RNA (tRNA) half
aacccgggccgcggcggtgagagcgccgaatcctaaccacta

SEQ ID NO: 13794 - DNA, 29 bp, Artificial Sequence
  synthetic circulating small noncoding RNA (sncRNA) 5' transfer RNA (tRNA) half
aagtctgatgctctaccgactgagctatc

SEQ ID NO: 13795 - DNA, 22 bp, Artificial Sequence
  synthetic circulating small noncoding RNA (sncRNA) 5' transfer RNA (tRNA) half
ctcaccactataccaccaacgc

SEQ ID NO: 13796 - DNA, 14 bp, Artificial Sequence
  synthetic circulating small noncoding RNA (sncRNA) 5' transfer RNA (tRNA) half
gcacccaaagcgag

SEQ ID NO: 13797 - DNA, 31 bp, Artificial Sequence
  synthetic circulating small noncoding RNA (sncRNA) 5' transfer RNA (tRNA) half
gagattaagagtctcatgctctaccgactga

SEQ ID NO: 13798 - DNA, 22 bp, Artificial Sequence
  synthetic circulating small noncoding RNA (sncRNA) 5' transfer RNA (tRNA) half
cgatagcagaggatggtttcga

SEQ ID NO: 13799 - DNA, 26 bp, Artificial Sequence
  synthetic circulating small noncoding RNA (sncRNA) 5' transfer RNA (tRNA) half
tttgaactcggatcgctggattcaga

SEQ ID NO: 13800 - DNA, 13 bp, Artificial Sequence
  synthetic circulating small noncoding RNA (sncRNA) 5' transfer RNA (tRNA) half
caccgggagtcga

SEQ ID NO: 13801 - DNA, 24 bp, Artificial Sequence
  synthetic circulating small noncoding RNA (sncRNA) 5' transfer RNA (tRNA) half
ctggactctgaatccagcgacccg

SEQ ID NO: 13802 - DNA, 18 bp, Artificial Sequence
  synthetic circulating small noncoding RNA (sncRNA) 5' transfer RNA (tRNA) half
attcccggtcagggaagc

SEQ ID NO: 13803 - DNA, 18 bp, Artificial Sequence
  synthetic circulating small noncoding RNA (sncRNA) 5' transfer RNA (tRNA) half
ggtttcgatccatcgacc

SEQ ID NO: 13804 - DNA, 10 bp, Artificial Sequence
  synthetic circulating small noncoding RNA (sncRNA) 5' transfer RNA (tRNA) half
cggtctcccg

SEQ ID NO: 13805 - DNA, 6 bp, Artificial Sequence
  synthetic circulating small noncoding RNA (sncRNA) 5' transfer RNA (tRNA) half
gcggct

SEQ ID NO: 13806 - DNA, 15 bp, Artificial Sequence
  synthetic circulating small noncoding RNA (sncRNA) 5' transfer RNA (tRNA) half
tccgccgggactcga

SEQ ID NO: 13807 - DNA, 12 bp, Artificial Sequence
  synthetic circulating small noncoding RNA (sncRNA) 5' transfer RNA (tRNA) half
gttcgatccccg

SEQ ID NO: 13808 - DNA, 9 bp, Artificial Sequence
  synthetic circulating small noncoding RNA (sncRNA) 5' transfer RNA (tRNA) half
ttcgacgag

SEQ ID NO: 13809 - DNA, 40 bp, Artificial Sequence
  synthetic circulating small noncoding RNA (sncRNA) 5' transfer RNA (tRNA) half
ggttagcactctggactctgaatccagcgatccgagttca

SEQ ID NO: 13810 - DNA, 25 bp, Artificial Sequence
  synthetic circulating small noncoding RNA (sncRNA) 5' transfer RNA (tRNA) half
tgccgaaacccgggatcgaaccagg

SEQ ID NO: 13811 - DNA, 23 bp, Artificial Sequence
  synthetic circulating small noncoding RNA (sncRNA) 5' transfer RNA (tRNA) half
gcggaaacaaaaggtgaaaactt

SEQ ID NO: 13812 - DNA, 26 bp, Artificial Sequence
  synthetic circulating small noncoding RNA (sncRNA) 5' transfer RNA (tRNA) half
agggttcaagtccctgttcgggcgct

SEQ ID NO: 13813 - DNA, 19 bp, Artificial Sequence
  synthetic circulating small noncoding RNA (sncRNA) 5' transfer RNA (tRNA) half
gtctcatgctctacccact

SEQ ID NO: 13814 - DNA, 29 bp, Artificial Sequence
  synthetic circulating small noncoding RNA (sncRNA) 5' transfer RNA (tRNA) half
gaaccagggacctcttgatctgcagtcaa

SEQ ID NO: 13815 - DNA, 19 bp, Artificial Sequence
  synthetic circulating small noncoding RNA (sncRNA) 5' transfer RNA (tRNA) half
gtggtagaattctcgcctg

SEQ ID NO: 13816 - DNA, 29 bp, Artificial Sequence
  synthetic circulating small noncoding RNA (sncRNA) 5' transfer RNA (tRNA) half
gtttccgcccggtttcgaaccggggacct

SEQ ID NO: 13817 - DNA, 28 bp, Artificial Sequence
  synthetic circulating small noncoding RNA (sncRNA) 5' transfer RNA (tRNA) half
cagagtggcgcagcggaagcgtgctggg

SEQ ID NO: 13818 - DNA, 34 bp, Artificial Sequence
  synthetic circulating small noncoding RNA (sncRNA) 5' transfer RNA (tRNA) half
aagtccaatgcgctatccattgcgccacggagcc

SEQ ID NO: 13819 - DNA, 20 bp, Artificial Sequence
  synthetic circulating small noncoding RNA (sncRNA) 5' transfer RNA (tRNA) half
cccagcacgcttccgctgcg

SEQ ID NO: 13820 - DNA, 14 bp, Artificial Sequence
  synthetic circulating small noncoding RNA (sncRNA) 5' transfer RNA (tRNA) half
tcccactcctgaca

SEQ ID NO: 13821 - DNA, 32 bp, Artificial Sequence
  synthetic circulating small noncoding RNA (sncRNA) 5' transfer RNA (tRNA) half
cgggggtatagctcagtggtagagcatttgac

SEQ ID NO: 13822 - DNA, 12 bp, Artificial Sequence
  synthetic circulating small noncoding RNA (sncRNA) 5' transfer RNA (tRNA) half
tggcccgtacgg

SEQ ID NO: 13823 - DNA, 19 bp, Artificial Sequence
  synthetic circulating small noncoding RNA (sncRNA) 5' transfer RNA (tRNA) half
aaaccgaagatcgcgggtt

SEQ ID NO: 13824 - DNA, 9 bp, Artificial Sequence
  synthetic circulating small noncoding RNA (sncRNA) 5' transfer RNA (tRNA) half
ggaggcccg

SEQ ID NO: 13825 - DNA, 15 bp, Artificial Sequence
  synthetic circulating small noncoding RNA (sncRNA) 5' transfer RNA (tRNA) half
cggttatcacgtctg

SEQ ID NO: 13826 - DNA, 18 bp, Artificial Sequence
  synthetic circulating small noncoding RNA (sncRNA) 5' transfer RNA (tRNA) half
ccacgaggccggccggcc

SEQ ID NO: 13827 - DNA, 14 bp, Artificial Sequence
  synthetic circulating small noncoding RNA (sncRNA) 5' transfer RNA (tRNA) half
gcgccttagaccgc

SEQ ID NO: 13828 - DNA, 20 bp, Artificial Sequence
  synthetic circulating small noncoding RNA (sncRNA) 5' transfer RNA (tRNA) half
taaccgctagaccatgtggg

SEQ ID NO: 13829 - DNA, 18 bp, Artificial Sequence
  synthetic circulating small noncoding RNA (sncRNA) 5' transfer RNA (tRNA) half
gttcaaatctcggtggga

SEQ ID NO: 13830 - DNA, 37 bp, Artificial Sequence
  synthetic circulating small noncoding RNA (sncRNA) 5' transfer RNA (tRNA) half
tctgagggttcagggttcaagtccctgttcaggcgct

SEQ ID NO: 13831 - DNA, 16 bp, Artificial Sequence
  synthetic circulating small noncoding RNA (sncRNA) 5' transfer RNA (tRNA) half
tgagcccggatagctc

SEQ ID NO: 13832 - DNA, 38 bp, Artificial Sequence
  synthetic circulating small noncoding RNA (sncRNA) 5' transfer RNA (tRNA) half
agcgccgaatcctaaccactagaccaccagggagcgtc

SEQ ID NO: 13833 - DNA, 18 bp, Artificial Sequence
  synthetic circulating small noncoding RNA (sncRNA) 5' transfer RNA (tRNA) half
gactcccggtatgggaac

SEQ ID NO: 13834 - DNA, 43 bp, Artificial Sequence
  synthetic circulating small noncoding RNA (sncRNA) 5' transfer RNA (tRNA) half
ctcgcgtgttaggcgagcgtgatgaccactacactacggaaac

SEQ ID NO: 13835 - DNA, 20 bp, Artificial Sequence
  synthetic circulating small noncoding RNA (sncRNA) 5' transfer RNA (tRNA) half
cgaaccagcgacctaaggat

SEQ ID NO: 13836 - DNA, 37 bp, Artificial Sequence
  synthetic circulating small noncoding RNA (sncRNA) 5' transfer RNA (tRNA) half
cgcgggagaccggggttcgattccccgacggggagtc

SEQ ID NO: 13837 - DNA, 30 bp, Artificial Sequence
  synthetic circulating small noncoding RNA (sncRNA) 5' transfer RNA (tRNA) half
cgtcgagccagccaggagtcgaacctagaa

SEQ ID NO: 13838 - DNA, 34 bp, Artificial Sequence
  synthetic circulating small noncoding RNA (sncRNA) 5' transfer RNA (tRNA) half
ccagcgatccgagttcaaatctcggtgggacctc

SEQ ID NO: 13839 - DNA, 15 bp, Artificial Sequence
  synthetic circulating small noncoding RNA (sncRNA) 5' transfer RNA (tRNA) half
atgccggggatcgaa

SEQ ID NO: 13840 - DNA, 17 bp, Artificial Sequence
  synthetic circulating small noncoding RNA (sncRNA) 5' transfer RNA (tRNA) half
gccccagcgagatttga

SEQ ID NO: 13841 - DNA, 16 bp, Artificial Sequence
  synthetic circulating small noncoding RNA (sncRNA) 5' transfer RNA (tRNA) half
tcacgtcggggtcaag

SEQ ID NO: 13842 - DNA, 38 bp, Artificial Sequence
  synthetic circulating small noncoding RNA (sncRNA) 5' transfer RNA (tRNA) half
taatctgaaggtcctgagttcgaacctcagagggggca

SEQ ID NO: 13843 - DNA, 18 bp, Artificial Sequence
  synthetic circulating small noncoding RNA (sncRNA) 5' transfer RNA (tRNA) half
gcgggaggcccgggttcg

SEQ ID NO: 13844 - DNA, 12 bp, Artificial Sequence
  synthetic circulating small noncoding RNA (sncRNA) 5' transfer RNA (tRNA) half
cgaccacgaagg

SEQ ID NO: 13845 - DNA, 18 bp, Artificial Sequence
  synthetic circulating small noncoding RNA (sncRNA) 5' transfer RNA (tRNA) half
tccacctttcgggcggga

SEQ ID NO: 13846 - DNA, 8 bp, Artificial Sequence
  synthetic circulating small noncoding RNA (sncRNA) 5' transfer RNA (tRNA) half
agccgggc

SEQ ID NO: 13847 - DNA, 17 bp, Artificial Sequence
  synthetic circulating small noncoding RNA (sncRNA) 5' transfer RNA (tRNA) half
ttcgaaccccgtccgtg

SEQ ID NO: 13848 - DNA, 21 bp, Artificial Sequence
  synthetic circulating small noncoding RNA (sncRNA) 5' transfer RNA (tRNA) half
gctggattcagagtccagagt

SEQ ID NO: 13849 - DNA, 18 bp, Artificial Sequence
  synthetic circulating small noncoding RNA (sncRNA) 5' transfer RNA (tRNA) half
gtctcatgctctacccac

SEQ ID NO: 13850 - DNA, 43 bp, Artificial Sequence
  synthetic circulating small noncoding RNA (sncRNA) 5' transfer RNA (tRNA) half
tgttcccacaccgggagtcgaacccgggccgcctgggtgaaaa

SEQ ID NO: 13851 - DNA, 36 bp, Artificial Sequence
  synthetic circulating small noncoding RNA (sncRNA) 5' transfer RNA (tRNA) half
gctgaccccgacgtgatttgaacacgcaaccttctg

SEQ ID NO: 13852 - DNA, 28 bp, Artificial Sequence
  synthetic circulating small noncoding RNA (sncRNA) 5' transfer RNA (tRNA) half
gcattggtagttcaatggtagaattctc

SEQ ID NO: 13853 - DNA, 36 bp, Artificial Sequence
  synthetic circulating small noncoding RNA (sncRNA) 5' transfer RNA (tRNA) half
cctccccgtcggggaatcgaaccccggtctcccgcg

SEQ ID NO: 13854 - DNA, 13 bp, Artificial Sequence
  synthetic circulating small noncoding RNA (sncRNA) 5' transfer RNA (tRNA) half
tgagctatccggg

SEQ ID NO: 13855 - DNA, 15 bp, Artificial Sequence
  synthetic circulating small noncoding RNA (sncRNA) 5' transfer RNA (tRNA) half
tagctcagttgggag

SEQ ID NO: 13856 - DNA, 12 bp, Artificial Sequence
  synthetic circulating small noncoding RNA (sncRNA) 5' transfer RNA (tRNA) half
cgaacccacgcg

SEQ ID NO: 13857 - DNA, 20 bp, Artificial Sequence
  synthetic circulating small noncoding RNA (sncRNA) 5' transfer RNA (tRNA) half
atcccggacgagccctgtac

SEQ ID NO: 13858 - DNA, 43 bp, Artificial Sequence
  synthetic circulating small noncoding RNA (sncRNA) 5' transfer RNA (tRNA) half
ggaattgaaccccggtctcccgcgtgacaggcggggatactaa

SEQ ID NO: 13859 - DNA, 37 bp, Artificial Sequence
  synthetic circulating small noncoding RNA (sncRNA) 5' transfer RNA (tRNA) half
atcagaagattgcaggttcgagtcctgccgcggtcga

SEQ ID NO: 13860 - DNA, 19 bp, Artificial Sequence
  synthetic circulating small noncoding RNA (sncRNA) 5' transfer RNA (tRNA) half
tcagacgccttatccatta

SEQ ID NO: 13861 - DNA, 21 bp, Artificial Sequence
  synthetic circulating small noncoding RNA (sncRNA) 5' transfer RNA (tRNA) half
tgccgtgactcggattcgaac

SEQ ID NO: 13862 - DNA, 24 bp, Artificial Sequence
  synthetic circulating small noncoding RNA (sncRNA) 5' transfer RNA (tRNA) half
taggagtcgaacctacaatcttct

SEQ ID NO: 13863 - DNA, 35 bp, Artificial Sequence
  synthetic circulating small noncoding RNA (sncRNA) 5' transfer RNA (tRNA) half
aaacaggagatcctgggttcgaatcccagcggggc

SEQ ID NO: 13864 - DNA, 18 bp, Artificial Sequence
  synthetic circulating small noncoding RNA (sncRNA) 5' transfer RNA (tRNA) half
cagcggaagcgtgctggg

SEQ ID NO: 13865 - DNA, 24 bp, Artificial Sequence
  synthetic circulating small noncoding RNA (sncRNA) 5' transfer RNA (tRNA) half
gggattcgaacccatgcgtgcaga

SEQ ID NO: 13866 - DNA, 18 bp, Artificial Sequence
  synthetic circulating small noncoding RNA (sncRNA) 5' transfer RNA (tRNA) half
cgaaaccgggcggaaaca

SEQ ID NO: 13867 - DNA, 35 bp, Artificial Sequence
  synthetic circulating small noncoding RNA (sncRNA) 5' transfer RNA (tRNA) half
ccctgaccgggaatcgaacccgggccgcggcggtg

SEQ ID NO: 13868 - DNA, 16 bp, Artificial Sequence
  synthetic circulating small noncoding RNA (sncRNA) 5' transfer RNA (tRNA) half
gccgctggtgtagtgg

SEQ ID NO: 13869 - DNA, 16 bp, Artificial Sequence
  synthetic circulating small noncoding RNA (sncRNA) 5' transfer RNA (tRNA) half
gcccggctagctcagt

SEQ ID NO: 13870 - DNA, 24 bp, Artificial Sequence
  synthetic circulating small noncoding RNA (sncRNA) 5' transfer RNA (tRNA) half
ttcccattcttgcgacccgggttc

SEQ ID NO: 13871 - DNA, 36 bp, Artificial Sequence
  synthetic circulating small noncoding RNA (sncRNA) 5' transfer RNA (tRNA) half
aaggagcattggtggttcagtggtagaattctcgcc

SEQ ID NO: 13872 - DNA, 21 bp, Artificial Sequence
  synthetic circulating small noncoding RNA (sncRNA) 5' transfer RNA (tRNA) half
agtctcatgctctaccaactg

SEQ ID NO: 13873 - DNA, 19 bp, Artificial Sequence
  synthetic circulating small noncoding RNA (sncRNA) 5' transfer RNA (tRNA) half
ccagggacgaccacagcga

SEQ ID NO: 13874 - DNA, 14 bp, Artificial Sequence
  synthetic circulating small noncoding RNA (sncRNA) 5' transfer RNA (tRNA) half
ccgggtttcggcag

SEQ ID NO: 13875 - DNA, 17 bp, Artificial Sequence
  synthetic circulating small noncoding RNA (sncRNA) 5' transfer RNA (tRNA) half
ggtagtgtggccgagcg

SEQ ID NO: 13876 - DNA, 29 bp, Artificial Sequence
  synthetic circulating small noncoding RNA (sncRNA) 5' transfer RNA (tRNA) half
tccctggtggtctagtggctaggattcgg

SEQ ID NO: 13877 - DNA, 33 bp, Artificial Sequence
  synthetic circulating small noncoding RNA (sncRNA) 5' transfer RNA (tRNA) half
tctcagggtcgtgggttcgagccccacgttggg

SEQ ID NO: 13878 - DNA, 14 bp, Artificial Sequence
  synthetic circulating small noncoding RNA (sncRNA) 5' transfer RNA (tRNA) half
aatgcgctatccat

SEQ ID NO: 13879 - DNA, 24 bp, Artificial Sequence
  synthetic circulating small noncoding RNA (sncRNA) 5' transfer RNA (tRNA) half
ccttaaccactcggccatcctggt

SEQ ID NO: 13880 - DNA, 43 bp, Artificial Sequence
  synthetic circulating small noncoding RNA (sncRNA) 5' transfer RNA (tRNA) half
ccgtgatcgtatagtggttagtactctgcgttgtggccgcagc

SEQ ID NO: 13881 - DNA, 18 bp, Artificial Sequence
  synthetic circulating small noncoding RNA (sncRNA) 5' transfer RNA (tRNA) half
gaaccagcgacctaagga

SEQ ID NO: 13882 - DNA, 21 bp, Artificial Sequence
  synthetic circulating small noncoding RNA (sncRNA) 5' transfer RNA (tRNA) half
gtcggtagagcatcagacttt

SEQ ID NO: 13883 - DNA, 21 bp, Artificial Sequence
  synthetic circulating small noncoding RNA (sncRNA) 5' transfer RNA (tRNA) half
atcatacccctagaccaacga

SEQ ID NO: 13884 - DNA, 22 bp, Artificial Sequence
  synthetic circulating small noncoding RNA (sncRNA) 5' transfer RNA (tRNA) half
agcaccacgctctaaccaactg

SEQ ID NO: 13885 - DNA, 12 bp, Artificial Sequence
  synthetic circulating small noncoding RNA (sncRNA) 5' transfer RNA (tRNA) half
actcggccacga

SEQ ID NO: 13886 - DNA, 15 bp, Artificial Sequence
  synthetic circulating small noncoding RNA (sncRNA) 5' transfer RNA (tRNA) half
gtactaaccactata

SEQ ID NO: 13887 - DNA, 38 bp, Artificial Sequence
  synthetic circulating small noncoding RNA (sncRNA) 5' transfer RNA (tRNA) half
agaagtgcccggctagctcagtcggtagagcatgagac

SEQ ID NO: 13888 - DNA, 26 bp, Artificial Sequence
  synthetic circulating small noncoding RNA (sncRNA) 5' transfer RNA (tRNA) half
gacgtgacttgaacacgcaaccttct

SEQ ID NO: 13889 - DNA, 13 bp, Artificial Sequence
  synthetic circulating small noncoding RNA (sncRNA) 5' transfer RNA (tRNA) half
cgcgtgacaggcg

SEQ ID NO: 13890 - DNA, 19 bp, Artificial Sequence
  synthetic circulating small noncoding RNA (sncRNA) 5' transfer RNA (tRNA) half
tgtagtttccgtagtgtag

SEQ ID NO: 13891 - DNA, 21 bp, Artificial Sequence
  synthetic circulating small noncoding RNA (sncRNA) 5' transfer RNA (tRNA) half
accggggacctcttgatctgc

SEQ ID NO: 13892 - DNA, 7 bp, Artificial Sequence
  synthetic circulating small noncoding RNA (sncRNA) 5' transfer RNA (tRNA) half
tgacgcg

SEQ ID NO: 13893 - DNA, 13 bp, Artificial Sequence
  synthetic circulating small noncoding RNA (sncRNA) 5' transfer RNA (tRNA) half
cccggatttgaac

SEQ ID NO: 13894 - DNA, 32 bp, Artificial Sequence
  synthetic circulating small noncoding RNA (sncRNA) 5' transfer RNA (tRNA) half
gcccagctagctcagtctgtagagcatgagac

SEQ ID NO: 13895 - DNA, 20 bp, Artificial Sequence
  synthetic circulating small noncoding RNA (sncRNA) 5' transfer RNA (tRNA) half
caccctaagcgagaatcata

SEQ ID NO: 13896 - DNA, 20 bp, Artificial Sequence
  synthetic circulating small noncoding RNA (sncRNA) 5' transfer RNA (tRNA) half
actcaggaccttcagattat

SEQ ID NO: 13897 - DNA, 15 bp, Artificial Sequence
  synthetic circulating small noncoding RNA (sncRNA) 5' transfer RNA (tRNA) half
taggggtatgattct

SEQ ID NO: 13898 - DNA, 39 bp, Artificial Sequence
  synthetic circulating small noncoding RNA (sncRNA) 5' transfer RNA (tRNA) half
ccgtagtgtagtggttatcacgttcgcctcacacgcgaa

SEQ ID NO: 13899 - DNA, 20 bp, Artificial Sequence
  synthetic circulating small noncoding RNA (sncRNA) 5' transfer RNA (tRNA) half
tcccactcctgacagcctcg

SEQ ID NO: 13900 - DNA, 23 bp, Artificial Sequence
  synthetic circulating small noncoding RNA (sncRNA) 5' transfer RNA (tRNA) half
gtgtagtggttatcacgctcgcc

SEQ ID NO: 13901 - DNA, 20 bp, Artificial Sequence
  synthetic circulating small noncoding RNA (sncRNA) 5' transfer RNA (tRNA) half
gcagtcaaatgctctacccc

SEQ ID NO: 13902 - DNA, 16 bp, Artificial Sequence
  synthetic circulating small noncoding RNA (sncRNA) 5' transfer RNA (tRNA) half
ccataccgggagtcga

SEQ ID NO: 13903 - DNA, 17 bp, Artificial Sequence
  synthetic circulating small noncoding RNA (sncRNA) 5' transfer RNA (tRNA) half
cgagtcctgccgcggtc

SEQ ID NO: 13904 - DNA, 18 bp, Artificial Sequence
  synthetic circulating small noncoding RNA (sncRNA) 5' transfer RNA (tRNA) half
gaacctggaatcttctga

SEQ ID NO: 13905 - DNA, 40 bp, Artificial Sequence
  synthetic circulating small noncoding RNA (sncRNA) 5' transfer RNA (tRNA) half
acccacgaccctgggattaagagtcccatgctctaccgac

SEQ ID NO: 13906 - DNA, 29 bp, Artificial Sequence
  synthetic circulating small noncoding RNA (sncRNA) 5' transfer RNA (tRNA) half
tgcaggttcgagtcctgccgcggtcgact

SEQ ID NO: 13907 - DNA, 14 bp, Artificial Sequence
  synthetic circulating small noncoding RNA (sncRNA) 5' transfer RNA (tRNA) half
cgtcggggaattga

SEQ ID NO: 13908 - DNA, 20 bp, Artificial Sequence
  synthetic circulating small noncoding RNA (sncRNA) 5' transfer RNA (tRNA) half
gccagtgccttatccattag

SEQ ID NO: 13909 - DNA, 16 bp, Artificial Sequence
  synthetic circulating small noncoding RNA (sncRNA) 5' transfer RNA (tRNA) half
tgaactcgcgacccct

SEQ ID NO: 13910 - DNA, 45 bp, Artificial Sequence
  synthetic circulating small noncoding RNA (sncRNA) 5' transfer RNA (tRNA) half
tccagtctcttcgggggcgtgggttcgaatcccaccgctgccatc

SEQ ID NO: 13911 - DNA, 13 bp, Artificial Sequence
  synthetic circulating small noncoding RNA (sncRNA) 5' transfer RNA (tRNA) half
accgggagtcgaa

SEQ ID NO: 13912 - DNA, 12 bp, Artificial Sequence
  synthetic circulating small noncoding RNA (sncRNA) 5' transfer RNA (tRNA) half
ctcggatcgctg

SEQ ID NO: 13913 - DNA, 28 bp, Artificial Sequence
  synthetic circulating small noncoding RNA (sncRNA) 5' transfer RNA (tRNA) half
aaccaggaatcctaaccgctagaccata

SEQ ID NO: 13914 - DNA, 15 bp, Artificial Sequence
  synthetic circulating small noncoding RNA (sncRNA) 5' transfer RNA (tRNA) half
ctgcgctaaggaggc

SEQ ID NO: 13915 - DNA, 29 bp, Artificial Sequence
  synthetic circulating small noncoding RNA (sncRNA) 5' transfer RNA (tRNA) half
taatggataaggcactggcctcctaagcc

SEQ ID NO: 13916 - DNA, 19 bp, Artificial Sequence
  synthetic circulating small noncoding RNA (sncRNA) 5' transfer RNA (tRNA) half
gtgagagcgccgaatccta

SEQ ID NO: 13917 - DNA, 14 bp, Artificial Sequence
  synthetic circulating small noncoding RNA (sncRNA) 5' transfer RNA (tRNA) half
cagagtggcgcagc

SEQ ID NO: 13918 - DNA, 10 bp, Artificial Sequence
  synthetic circulating small noncoding RNA (sncRNA) 5' transfer RNA (tRNA) half
gggccgcctg

SEQ ID NO: 13919 - DNA, 31 bp, Artificial Sequence
  synthetic circulating small noncoding RNA (sncRNA) 5' transfer RNA (tRNA) half
tcagtggtctggggtgcaggcttcaaacctg

SEQ ID NO: 13920 - DNA, 32 bp, Artificial Sequence
  synthetic circulating small noncoding RNA (sncRNA) 5' transfer RNA (tRNA) half
tagcgcccgaacagggacttgaaccctggacc

SEQ ID NO: 13921 - DNA, 33 bp, Artificial Sequence
  synthetic circulating small noncoding RNA (sncRNA) 5' transfer RNA (tRNA) half
tcaagaggtccccggttcaaatccgggtgcccc

SEQ ID NO: 13922 - DNA, 13 bp, Artificial Sequence
  synthetic circulating small noncoding RNA (sncRNA) 5' transfer RNA (tRNA) half
ttcccacaccggg

SEQ ID NO: 13923 - DNA, 14 bp, Artificial Sequence
  synthetic circulating small noncoding RNA (sncRNA) 5' transfer RNA (tRNA) half
tctcttcggaggcg

SEQ ID NO: 13924 - DNA, 40 bp, Artificial Sequence
  synthetic circulating small noncoding RNA (sncRNA) 5' transfer RNA (tRNA) half
cataatctgaaggtcctgagttcgaacctcagagggggca

SEQ ID NO: 13925 - DNA, 24 bp, Artificial Sequence
  synthetic circulating small noncoding RNA (sncRNA) 5' transfer RNA (tRNA) half
aggcggcccgggttcgactcccgg

SEQ ID NO: 13926 - DNA, 25 bp, Artificial Sequence
  synthetic circulating small noncoding RNA (sncRNA) 5' transfer RNA (tRNA) half
tggttcgactccggctcgaaggaga

SEQ ID NO: 13927 - DNA, 23 bp, Artificial Sequence
  synthetic circulating small noncoding RNA (sncRNA) 5' transfer RNA (tRNA) half
tctaaggcgccagactcaagctt

SEQ ID NO: 13928 - DNA, 30 bp, Artificial Sequence
  synthetic circulating small noncoding RNA (sncRNA) 5' transfer RNA (tRNA) half
gtcggggaattgaaccccggtctcccgcgt

SEQ ID NO: 13929 - DNA, 20 bp, Artificial Sequence
  synthetic circulating small noncoding RNA (sncRNA) 5' transfer RNA (tRNA) half
cgaacccacgcagacatatg

SEQ ID NO: 13930 - DNA, 33 bp, Artificial Sequence
  synthetic circulating small noncoding RNA (sncRNA) 5' transfer RNA (tRNA) half
ggcggcccgggttcgactcccggtgtgggaaca

SEQ ID NO: 13931 - DNA, 22 bp, Artificial Sequence
  synthetic circulating small noncoding RNA (sncRNA) 5' transfer RNA (tRNA) half
accgggagtcgaacccgggccg

SEQ ID NO: 13932 - DNA, 26 bp, Artificial Sequence
  synthetic circulating small noncoding RNA (sncRNA) 5' transfer RNA (tRNA) half
aggccccgggttcaatccccggcacc

SEQ ID NO: 13933 - DNA, 17 bp, Artificial Sequence
  synthetic circulating small noncoding RNA (sncRNA) 5' transfer RNA (tRNA) half
cgactcctggctggctc

SEQ ID NO: 13934 - DNA, 20 bp, Artificial Sequence
  synthetic circulating small noncoding RNA (sncRNA) 5' transfer RNA (tRNA) half
gttcgaatcccaccgctgcc

SEQ ID NO: 13935 - DNA, 8 bp, Artificial Sequence
  synthetic circulating small noncoding RNA (sncRNA) 5' transfer RNA (tRNA) half
acgagccc

SEQ ID NO: 13936 - DNA, 38 bp, Artificial Sequence
  synthetic circulating small noncoding RNA (sncRNA) 5' transfer RNA (tRNA) half
tccatcgacctctgggttatgggcccagcacgcttccg

SEQ ID NO: 13937 - DNA, 27 bp, Artificial Sequence
  synthetic circulating small noncoding RNA (sncRNA) 5' transfer RNA (tRNA) half
tgtgctctacctctgagctacatcccc

SEQ ID NO: 13938 - DNA, 11 bp, Artificial Sequence
  synthetic circulating small noncoding RNA (sncRNA) 5' transfer RNA (tRNA) half
cgactccggct

SEQ ID NO: 13939 - DNA, 17 bp, Artificial Sequence
  synthetic circulating small noncoding RNA (sncRNA) 5' transfer RNA (tRNA) half
gagtcccatctgggtcg

SEQ ID NO: 13940 - DNA, 16 bp, Artificial Sequence
  synthetic circulating small noncoding RNA (sncRNA) 5' transfer RNA (tRNA) half
tggttagcactctgga

SEQ ID NO: 13941 - DNA, 37 bp, Artificial Sequence
  synthetic circulating small noncoding RNA (sncRNA) 5' transfer RNA (tRNA) half
gtaaaccgaagatcacgggttcgaaccccgtccgtgc

SEQ ID NO: 13942 - DNA, 40 bp, Artificial Sequence
  synthetic circulating small noncoding RNA (sncRNA) 5' transfer RNA (tRNA) half
gtcggcaggattcgaacctgcgcggggaaaccccaatgga

SEQ ID NO: 13943 - DNA, 13 bp, Artificial Sequence
  synthetic circulating small noncoding RNA (sncRNA) 5' transfer RNA (tRNA) half
gattcggcgctct

SEQ ID NO: 13944 - DNA, 22 bp, Artificial Sequence
  synthetic circulating small noncoding RNA (sncRNA) 5' transfer RNA (tRNA) half
ggccgagcggtctaaggcgctg

SEQ ID NO: 13945 - DNA, 41 bp, Artificial Sequence
  synthetic circulating small noncoding RNA (sncRNA) 5' transfer RNA (tRNA) half
acacgcagaaggtcctgggttcgagccccagtggaaccacg

SEQ ID NO: 13946 - DNA, 26 bp, Artificial Sequence
  synthetic circulating small noncoding RNA (sncRNA) 5' transfer RNA (tRNA) half
cgccttaaccactcggccatcctggt

SEQ ID NO: 13947 - DNA, 23 bp, Artificial Sequence
  synthetic circulating small noncoding RNA (sncRNA) 5' transfer RNA (tRNA) half
tacctccccgtcggggaatcgaa

SEQ ID NO: 13948 - DNA, 11 bp, Artificial Sequence
  synthetic circulating small noncoding RNA (sncRNA) 5' transfer RNA (tRNA) half
gcggtctaagg

SEQ ID NO: 13949 - DNA, 14 bp, Artificial Sequence
  synthetic circulating small noncoding RNA (sncRNA) 5' transfer RNA (tRNA) half
acaggcggggatac

SEQ ID NO: 13950 - DNA, 19 bp, Artificial Sequence
  synthetic circulating small noncoding RNA (sncRNA) 5' transfer RNA (tRNA) half
ctctaccatttgagctaat

SEQ ID NO: 13951 - DNA, 30 bp, Artificial Sequence
  synthetic circulating small noncoding RNA (sncRNA) 5' transfer RNA (tRNA) half
agtggttatcacgttcgcctcacacgcgaa

SEQ ID NO: 13952 - DNA, 36 bp, Artificial Sequence
  synthetic circulating small noncoding RNA (sncRNA) 5' transfer RNA (tRNA) half
ggttagcactctggactttgaatccagcgatccgag

SEQ ID NO: 13953 - DNA, 15 bp, Artificial Sequence
  synthetic circulating small noncoding RNA (sncRNA) 5' transfer RNA (tRNA) half
gcgaccttggcgtta

SEQ ID NO: 13954 - DNA, 14 bp, Artificial Sequence
  synthetic circulating small noncoding RNA (sncRNA) 5' transfer RNA (tRNA) half
cacatggtctagcg

SEQ ID NO: 13955 - DNA, 18 bp, Artificial Sequence
  synthetic circulating small noncoding RNA (sncRNA) 5' transfer RNA (tRNA) half
aaacccgggatcgaacca

SEQ ID NO: 13956 - DNA, 21 bp, Artificial Sequence
  synthetic circulating small noncoding RNA (sncRNA) 5' transfer RNA (tRNA) half
catggtctagcggttaggatt

SEQ ID NO: 13957 - DNA, 8 bp, Artificial Sequence
  synthetic circulating small noncoding RNA (sncRNA) 5' transfer RNA (tRNA) half
agcgcgcg

SEQ ID NO: 13958 - DNA, 18 bp, Artificial Sequence
  synthetic circulating small noncoding RNA (sncRNA) 5' transfer RNA (tRNA) half
ggattcaaagtccagagt

SEQ ID NO: 13959 - DNA, 32 bp, Artificial Sequence
  synthetic circulating small noncoding RNA (sncRNA) 5' transfer RNA (tRNA) half
tgccgaaacccgggatcgaaccagggaccttt

SEQ ID NO: 13960 - DNA, 19 bp, Artificial Sequence
  synthetic circulating small noncoding RNA (sncRNA) 5' transfer RNA (tRNA) half
gccttagaccactcggcca

SEQ ID NO: 13961 - DNA, 25 bp, Artificial Sequence
  synthetic circulating small noncoding RNA (sncRNA) 5' transfer RNA (tRNA) half
acgggccaaagctgaagcgtttttt

SEQ ID NO: 13962 - DNA, 30 bp, Artificial Sequence
  synthetic circulating small noncoding RNA (sncRNA) 5' transfer RNA (tRNA) half
gaagattgcaggttcgagtcctgccgcggt

SEQ ID NO: 13963 - DNA, 24 bp, Artificial Sequence
  synthetic circulating small noncoding RNA (sncRNA) 5' transfer RNA (tRNA) half
aagcgatgccgaggttgtgagttc

SEQ ID NO: 13964 - DNA, 21 bp, Artificial Sequence
  synthetic circulating small noncoding RNA (sncRNA) 5' transfer RNA (tRNA) half
caaatcccggacgagccctgt

SEQ ID NO: 13965 - DNA, 14 bp, Artificial Sequence
  synthetic circulating small noncoding RNA (sncRNA) 5' transfer RNA (tRNA) half
tagcactctggact

SEQ ID NO: 13966 - DNA, 15 bp, Artificial Sequence
  synthetic circulating small noncoding RNA (sncRNA) 5' transfer RNA (tRNA) half
aaccgctacactaca

SEQ ID NO: 13967 - DNA, 18 bp, Artificial Sequence
  synthetic circulating small noncoding RNA (sncRNA) 5' transfer RNA (tRNA) half
tgaactcggatcgctgga

SEQ ID NO: 13968 - DNA, 19 bp, Artificial Sequence
  synthetic circulating small noncoding RNA (sncRNA) 5' transfer RNA (tRNA) half
aaccactagaccaccaggg

SEQ ID NO: 13969 - DNA, 17 bp, Artificial Sequence
  synthetic circulating small noncoding RNA (sncRNA) 5' transfer RNA (tRNA) half
cgaaccgaggttgctgc

SEQ ID NO: 13970 - DNA, 20 bp, Artificial Sequence
  synthetic circulating small noncoding RNA (sncRNA) 5' transfer RNA (tRNA) half
gacgaggatgggattcgaac

SEQ ID NO: 13971 - DNA, 13 bp, Artificial Sequence
  synthetic circulating small noncoding RNA (sncRNA) 5' transfer RNA (tRNA) half
cgggccgcctggg

SEQ ID NO: 13972 - DNA, 32 bp, Artificial Sequence
  synthetic circulating small noncoding RNA (sncRNA) 5' transfer RNA (tRNA) half
gtagaattctcgcctgccacgcgggaggcccg

SEQ ID NO: 13973 - DNA, 23 bp, Artificial Sequence
  synthetic circulating small noncoding RNA (sncRNA) 5' transfer RNA (tRNA) half
ggttcgaatccggctcgaaggaa

SEQ ID NO: 13974 - DNA, 23 bp, Artificial Sequence
  synthetic circulating small noncoding RNA (sncRNA) 5' transfer RNA (tRNA) half
tcgattcccggccaatgcactct

SEQ ID NO: 13975 - DNA, 17 bp, Artificial Sequence
  synthetic circulating small noncoding RNA (sncRNA) 5' transfer RNA (tRNA) half
agtcggtagagcatcag

SEQ ID NO: 13976 - DNA, 25 bp, Artificial Sequence
  synthetic circulating small noncoding RNA (sncRNA) 5' transfer RNA (tRNA) half
cccatgctctaccgactgagctagc

SEQ ID NO: 13977 - DNA, 22 bp, Artificial Sequence
  synthetic circulating small noncoding RNA (sncRNA) 5' transfer RNA (tRNA) half
tcccggacgagcccaagcattt

SEQ ID NO: 13978 - DNA, 21 bp, Artificial Sequence
  synthetic circulating small noncoding RNA (sncRNA) 5' transfer RNA (tRNA) half
accgacgaggatgggattcga

SEQ ID NO: 13979 - DNA, 13 bp, Artificial Sequence
  synthetic circulating small noncoding RNA (sncRNA) 5' transfer RNA (tRNA) half
cagttggtagagc

SEQ ID NO: 13980 - DNA, 26 bp, Artificial Sequence
  synthetic circulating small noncoding RNA (sncRNA) 5' transfer RNA (tRNA) half
catagtgtagcggttatcacgtctgc

SEQ ID NO: 13981 - DNA, 15 bp, Artificial Sequence
  synthetic circulating small noncoding RNA (sncRNA) 5' transfer RNA (tRNA) half
cgcgggaggcccggg

SEQ ID NO: 13982 - DNA, 36 bp, Artificial Sequence
  synthetic circulating small noncoding RNA (sncRNA) 5' transfer RNA (tRNA) half
taaccgaaaggttggtggttcgagcccacccaggga

SEQ ID NO: 13983 - DNA, 17 bp, Artificial Sequence
  synthetic circulating small noncoding RNA (sncRNA) 5' transfer RNA (tRNA) half
acgcgaaaggtccccgg

SEQ ID NO: 13984 - DNA, 11 bp, Artificial Sequence
  synthetic circulating small noncoding RNA (sncRNA) 5' transfer RNA (tRNA) half
cggccacaacg

SEQ ID NO: 13985 - DNA, 34 bp, Artificial Sequence
  synthetic circulating small noncoding RNA (sncRNA) 5' transfer RNA (tRNA) half
agaaggttgcgtgttcaaatcacgtcggggtcaa

SEQ ID NO: 13986 - DNA, 21 bp, Artificial Sequence
  synthetic circulating small noncoding RNA (sncRNA) 5' transfer RNA (tRNA) half
cgaaccccgtccgtgcctgcg

SEQ ID NO: 13987 - DNA, 37 bp, Artificial Sequence
  synthetic circulating small noncoding RNA (sncRNA) 5' transfer RNA (tRNA) half
atcagaagattgagggttcgagtcccttcgtggtcga

SEQ ID NO: 13988 - DNA, 21 bp, Artificial Sequence
  synthetic circulating small noncoding RNA (sncRNA) 5' transfer RNA (tRNA) half
gagaccggggttcgattcccc

SEQ ID NO: 13989 - DNA, 16 bp, Artificial Sequence
  synthetic circulating small noncoding RNA (sncRNA) 5' transfer RNA (tRNA) half
tagagcatttgactgc

SEQ ID NO: 13990 - DNA, 26 bp, Artificial Sequence
  synthetic circulating small noncoding RNA (sncRNA) 5' transfer RNA (tRNA) half
ctgttcccataccgggagtcgaaccc

SEQ ID NO: 13991 - DNA, 28 bp, Artificial Sequence
  synthetic circulating small noncoding RNA (sncRNA) 5' transfer RNA (tRNA) half
gactccgccgggactcgaacccggaacc

SEQ ID NO: 13992 - DNA, 11 bp, Artificial Sequence
  synthetic circulating small noncoding RNA (sncRNA) 5' transfer RNA (tRNA) half
cgggccgcctg

SEQ ID NO: 13993 - DNA, 25 bp, Artificial Sequence
  synthetic circulating small noncoding RNA (sncRNA) 5' transfer RNA (tRNA) half
ctaccgactgagctatccgggctct

SEQ ID NO: 13994 - DNA, 29 bp, Artificial Sequence
  synthetic circulating small noncoding RNA (sncRNA) 5' transfer RNA (tRNA) half
gcgacccgggttcgattcccgggcggcgc

SEQ ID NO: 13995 - DNA, 41 bp, Artificial Sequence
  synthetic circulating small noncoding RNA (sncRNA) 5' transfer RNA (tRNA) half
ctgttcccataccgggagtcgaacccgggccgcctgggtga

SEQ ID NO: 13996 - DNA, 22 bp, Artificial Sequence
  synthetic circulating small noncoding RNA (sncRNA) 5' transfer RNA (tRNA) half
gtttctgtagtgtagtggttat

SEQ ID NO: 13997 - DNA, 22 bp, Artificial Sequence
  synthetic circulating small noncoding RNA (sncRNA) 5' transfer RNA (tRNA) half
gggacctcttgatctgcagtca

SEQ ID NO: 13998 - DNA, 19 bp, Artificial Sequence
  synthetic circulating small noncoding RNA (sncRNA) 5' transfer RNA (tRNA) half
gggcctcccgcgtggcagg

SEQ ID NO: 13999 - DNA, 23 bp, Artificial Sequence
  synthetic circulating small noncoding RNA (sncRNA) 5' transfer RNA (tRNA) half
gtgcaaagcacaatggattagca

SEQ ID NO: 14000 - DNA, 27 bp, Artificial Sequence
  synthetic circulating small noncoding RNA (sncRNA) 5' transfer RNA (tRNA) half
cgcccgaacagggacttgaaccctgga

SEQ ID NO: 14001 - DNA, 30 bp, Artificial Sequence
  synthetic circulating small noncoding RNA (sncRNA) 5' transfer RNA (tRNA) half
agattgagggttcgagtcccttcgtggtcg

SEQ ID NO: 14002 - DNA, 25 bp, Artificial Sequence
  synthetic circulating small noncoding RNA (sncRNA) 5' transfer RNA (tRNA) half
ccagagtgctaaccattacaccatg

SEQ ID NO: 14003 - DNA, 36 bp, Artificial Sequence
  synthetic circulating small noncoding RNA (sncRNA) 5' transfer RNA (tRNA) half
gccgcggcccgggttcgattcccggtcagggaagca

SEQ ID NO: 14004 - DNA, 17 bp, Artificial Sequence
  synthetic circulating small noncoding RNA (sncRNA) 5' transfer RNA (tRNA) half
gaacccgggccgcggcg

SEQ ID NO: 14005 - DNA, 19 bp, Artificial Sequence
  synthetic circulating small noncoding RNA (sncRNA) 5' transfer RNA (tRNA) half
aggcggggatactaaccac

SEQ ID NO: 14006 - DNA, 22 bp, Artificial Sequence
  synthetic circulating small noncoding RNA (sncRNA) 5' transfer RNA (tRNA) half
gaggcccgggttcgattcccgg

SEQ ID NO: 14007 - DNA, 13 bp, Artificial Sequence
  synthetic circulating small noncoding RNA (sncRNA) 5' transfer RNA (tRNA) half
ggtggagatgccg

SEQ ID NO: 14008 - DNA, 21 bp, Artificial Sequence
  synthetic circulating small noncoding RNA (sncRNA) 5' transfer RNA (tRNA) half
ctcagtggtctggggtgcagg

SEQ ID NO: 14009 - DNA, 15 bp, Artificial Sequence
  synthetic circulating small noncoding RNA (sncRNA) 5' transfer RNA (tRNA) half
cgtatggaggcgtgg

SEQ ID NO: 14010 - DNA, 19 bp, Artificial Sequence
  synthetic circulating small noncoding RNA (sncRNA) 5' transfer RNA (tRNA) half
ttcgaatccgagtcacggc

SEQ ID NO: 14011 - DNA, 15 bp, Artificial Sequence
  synthetic circulating small noncoding RNA (sncRNA) 5' transfer RNA (tRNA) half
agcctccgatagcag

SEQ ID NO: 14012 - DNA, 22 bp, Artificial Sequence
  synthetic circulating small noncoding RNA (sncRNA) 5' transfer RNA (tRNA) half
ggttcgaaccccgtccgtgcct

SEQ ID NO: 14013 - DNA, 19 bp, Artificial Sequence
  synthetic circulating small noncoding RNA (sncRNA) 5' transfer RNA (tRNA) half
tcgacgaggatgggattcg

SEQ ID NO: 14014 - DNA, 34 bp, Artificial Sequence
  synthetic circulating small noncoding RNA (sncRNA) 5' transfer RNA (tRNA) half
ccgggccgcggcggtgagagcgccgaatcctaac

SEQ ID NO: 14015 - DNA, 13 bp, Artificial Sequence
  synthetic circulating small noncoding RNA (sncRNA) 5' transfer RNA (tRNA) half
gccggattcgaac

SEQ ID NO: 14016 - DNA, 12 bp, Artificial Sequence
  synthetic circulating small noncoding RNA (sncRNA) 5' transfer RNA (tRNA) half
ggggacctttcg

SEQ ID NO: 14017 - DNA, 26 bp, Artificial Sequence
  synthetic circulating small noncoding RNA (sncRNA) 5' transfer RNA (tRNA) half
ttcggcgctctcaccgccgcggcccg

SEQ ID NO: 14018 - DNA, 25 bp, Artificial Sequence
  synthetic circulating small noncoding RNA (sncRNA) 5' transfer RNA (tRNA) half
cagagtccagagtgctaaccattac

SEQ ID NO: 14019 - DNA, 22 bp, Artificial Sequence
  synthetic circulating small noncoding RNA (sncRNA) 5' transfer RNA (tRNA) half
aggaccttcagattatgagact

SEQ ID NO: 14020 - DNA, 21 bp, Artificial Sequence
  synthetic circulating small noncoding RNA (sncRNA) 5' transfer RNA (tRNA) half
aaatgtttgggctcgtccggg

SEQ ID NO: 14021 - DNA, 40 bp, Artificial Sequence
  synthetic circulating small noncoding RNA (sncRNA) 5' transfer RNA (tRNA) half
aaaagatcgcacacgtcgagccagccaggagtcgaaccta

SEQ ID NO: 14022 - DNA, 37 bp, Artificial Sequence
  synthetic circulating small noncoding RNA (sncRNA) 5' transfer RNA (tRNA) half
tcccaccgagatttgaactcggatcgctggattcaga

SEQ ID NO: 14023 - DNA, 32 bp, Artificial Sequence
  synthetic circulating small noncoding RNA (sncRNA) 5' transfer RNA (tRNA) half
gtcagacgccttatccgttaggccacgtggtc

SEQ ID NO: 14024 - DNA, 27 bp, Artificial Sequence
  synthetic circulating small noncoding RNA (sncRNA) 5' transfer RNA (tRNA) half
gcgtgtgaggcgaacgtgataaccact

SEQ ID NO: 14025 - DNA, 12 bp, Artificial Sequence
  synthetic circulating small noncoding RNA (sncRNA) 5' transfer RNA (tRNA) half
ggtcgcgagttc

SEQ ID NO: 14026 - DNA, 9 bp, Artificial Sequence
  synthetic circulating small noncoding RNA (sncRNA) 5' transfer RNA (tRNA) half
gccgcggcg

SEQ ID NO: 14027 - DNA, 32 bp, Artificial Sequence
  synthetic circulating small noncoding RNA (sncRNA) 5' transfer RNA (tRNA) half
cgactctggcgggactcgaacccgcaaccttt

SEQ ID NO: 14028 - DNA, 19 bp, Artificial Sequence
  synthetic circulating small noncoding RNA (sncRNA) 5' transfer RNA (tRNA) half
gaaccagcgacctaaggat

SEQ ID NO: 14029 - DNA, 23 bp, Artificial Sequence
  synthetic circulating small noncoding RNA (sncRNA) 5' transfer RNA (tRNA) half
tgccttccaagcagttgacccgg

SEQ ID NO: 14030 - DNA, 18 bp, Artificial Sequence
  synthetic circulating small noncoding RNA (sncRNA) 5' transfer RNA (tRNA) half
gtggtagagcatttgact

SEQ ID NO: 14031 - DNA, 34 bp, Artificial Sequence
  synthetic circulating small noncoding RNA (sncRNA) 5' transfer RNA (tRNA) half
cgatccatcgacctctgggttatgggcccagcac

SEQ ID NO: 14032 - DNA, 23 bp, Artificial Sequence
  synthetic circulating small noncoding RNA (sncRNA) 5' transfer RNA (tRNA) half
acgcgggagaccggggttcgatt

SEQ ID NO: 14033 - DNA, 16 bp, Artificial Sequence
  synthetic circulating small noncoding RNA (sncRNA) 5' transfer RNA (tRNA) half
gaactcgcgacccctg

SEQ ID NO: 14034 - DNA, 22 bp, Artificial Sequence
  synthetic circulating small noncoding RNA (sncRNA) 5' transfer RNA (tRNA) half
gctgaccccgacgtgatttgaa

SEQ ID NO: 14035 - DNA, 12 bp, Artificial Sequence
  synthetic circulating small noncoding RNA (sncRNA) 5' transfer RNA (tRNA) half
agtctcatgctc

SEQ ID NO: 14036 - DNA, 37 bp, Artificial Sequence
  synthetic circulating small noncoding RNA (sncRNA) 5' transfer RNA (tRNA) half
atgaccccgacgtgatttgaacacgcaaccttctgat

SEQ ID NO: 14037 - DNA, 23 bp, Artificial Sequence
  synthetic circulating small noncoding RNA (sncRNA) 5' transfer RNA (tRNA) half
caggattcgaacctgcgcgggga

SEQ ID NO: 14038 - DNA, 12 bp, Artificial Sequence
  synthetic circulating small noncoding RNA (sncRNA) 5' transfer RNA (tRNA) half
cccctgagctat

SEQ ID NO: 14039 - DNA, 17 bp, Artificial Sequence
  synthetic circulating small noncoding RNA (sncRNA) 5' transfer RNA (tRNA) half
agctaagcgcccgaaca

SEQ ID NO: 14040 - DNA, 9 bp, Artificial Sequence
  synthetic circulating small noncoding RNA (sncRNA) 5' transfer RNA (tRNA) half
gggttcgaa

SEQ ID NO: 14041 - DNA, 33 bp, Artificial Sequence
  synthetic circulating small noncoding RNA (sncRNA) 5' transfer RNA (tRNA) half
tccgactccgccgggactcgaacccggaacctt

SEQ ID NO: 14042 - DNA, 29 bp, Artificial Sequence
  synthetic circulating small noncoding RNA (sncRNA) 5' transfer RNA (tRNA) half
aggcgaatgtgataaccactacactacgg

SEQ ID NO: 14043 - DNA, 32 bp, Artificial Sequence
  synthetic circulating small noncoding RNA (sncRNA) 5' transfer RNA (tRNA) half
ctccgccgggactcgaacccggaacctttgaa

SEQ ID NO: 14044 - DNA, 15 bp, Artificial Sequence
  synthetic circulating small noncoding RNA (sncRNA) 5' transfer RNA (tRNA) half
tgatgctctaccgac

SEQ ID NO: 14045 - DNA, 20 bp, Artificial Sequence
  synthetic circulating small noncoding RNA (sncRNA) 5' transfer RNA (tRNA) half
agaccagtgctctaacccct

SEQ ID NO: 14046 - DNA, 10 bp, Artificial Sequence
  synthetic circulating small noncoding RNA (sncRNA) 5' transfer RNA (tRNA) half
ggtctcccgc

SEQ ID NO: 14047 - DNA, 31 bp, Artificial Sequence
  synthetic circulating small noncoding RNA (sncRNA) 5' transfer RNA (tRNA) half
cactctggactttgaatccagcgatccgagt

SEQ ID NO: 14048 - DNA, 23 bp, Artificial Sequence
  synthetic circulating small noncoding RNA (sncRNA) 5' transfer RNA (tRNA) half
tgccgtccctgggtgggctcgaa

SEQ ID NO: 14049 - DNA, 17 bp, Artificial Sequence
  synthetic circulating small noncoding RNA (sncRNA) 5' transfer RNA (tRNA) half
cagtagtcgtggccgag

SEQ ID NO: 14050 - DNA, 10 bp, Artificial Sequence
  synthetic circulating small noncoding RNA (sncRNA) 5' transfer RNA (tRNA) half
agtctcatgc

SEQ ID NO: 14051 - DNA, 35 bp, Artificial Sequence
  synthetic circulating small noncoding RNA (sncRNA) 5' transfer RNA (tRNA) half
tgccgaaacccgggattgaaccagggacctttaga

SEQ ID NO: 14052 - DNA, 11 bp, Artificial Sequence
  synthetic circulating small noncoding RNA (sncRNA) 5' transfer RNA (tRNA) half
gattcgaaccc

SEQ ID NO: 14053 - DNA, 24 bp, Artificial Sequence
  synthetic circulating small noncoding RNA (sncRNA) 5' transfer RNA (tRNA) half
gggggtatagctcagtggtagagc

SEQ ID NO: 14054 - DNA, 22 bp, Artificial Sequence
  synthetic circulating small noncoding RNA (sncRNA) 5' transfer RNA (tRNA) half
cggttaggattcctggttttca

SEQ ID NO: 14055 - DNA, 40 bp, Artificial Sequence
  synthetic circulating small noncoding RNA (sncRNA) 5' transfer RNA (tRNA) half
gaacccgggccgcggcggtgagagcgccgaatcctaacca

SEQ ID NO: 14056 - DNA, 23 bp, Artificial Sequence
  synthetic circulating small noncoding RNA (sncRNA) 5' transfer RNA (tRNA) half
tcccacatggtctagcggttagg

SEQ ID NO: 14057 - DNA, 15 bp, Artificial Sequence
  synthetic circulating small noncoding RNA (sncRNA) 5' transfer RNA (tRNA) half
gaacgtgataaccac

SEQ ID NO: 14058 - DNA, 11 bp, Artificial Sequence
  synthetic circulating small noncoding RNA (sncRNA) 5' transfer RNA (tRNA) half
cgagaggtccc

SEQ ID NO: 14059 - DNA, 9 bp, Artificial Sequence
  synthetic circulating small noncoding RNA (sncRNA) 5' transfer RNA (tRNA) half
tgccgaaac

SEQ ID NO: 14060 - DNA, 14 bp, Artificial Sequence
  synthetic circulating small noncoding RNA (sncRNA) 5' transfer RNA (tRNA) half
agtggttagtactc

SEQ ID NO: 14061 - DNA, 33 bp, Artificial Sequence
  synthetic circulating small noncoding RNA (sncRNA) 5' transfer RNA (tRNA) half
aaagtgagaatcatacccctagaccaacgagcc

SEQ ID NO: 14062 - DNA, 21 bp, Artificial Sequence
  synthetic circulating small noncoding RNA (sncRNA) 5' transfer RNA (tRNA) half
aaagtctgatgctctaccgac

SEQ ID NO: 14063 - DNA, 19 bp, Artificial Sequence
  synthetic circulating small noncoding RNA (sncRNA) 5' transfer RNA (tRNA) half
agtcgatgaggatgggatt

SEQ ID NO: 14064 - DNA, 17 bp, Artificial Sequence
  synthetic circulating small noncoding RNA (sncRNA) 5' transfer RNA (tRNA) half
cgcacccaaagcgagaa

SEQ ID NO: 14065 - DNA, 20 bp, Artificial Sequence
  synthetic circulating small noncoding RNA (sncRNA) 5' transfer RNA (tRNA) half
gtctagcggttaggattcct

SEQ ID NO: 14066 - DNA, 19 bp, Artificial Sequence
  synthetic circulating small noncoding RNA (sncRNA) 5' transfer RNA (tRNA) half
aggcgagaattctaccatt

SEQ ID NO: 14067 - DNA, 40 bp, Artificial Sequence
  synthetic circulating small noncoding RNA (sncRNA) 5' transfer RNA (tRNA) half
cgcgtgtgaggcgaacgtgataaccactacactacggaaa

SEQ ID NO: 14068 - DNA, 22 bp, Artificial Sequence
  synthetic circulating small noncoding RNA (sncRNA) 5' transfer RNA (tRNA) half
tggcccgtacggggatcgaacc

SEQ ID NO: 14069 - DNA, 13 bp, Artificial Sequence
  synthetic circulating small noncoding RNA (sncRNA) 5' transfer RNA (tRNA) half
cccacttctgaca

SEQ ID NO: 14070 - DNA, 14 bp, Artificial Sequence
  synthetic circulating small noncoding RNA (sncRNA) 5' transfer RNA (tRNA) half
gggagaccggggtt

SEQ ID NO: 14071 - DNA, 19 bp, Artificial Sequence
  synthetic circulating small noncoding RNA (sncRNA) 5' transfer RNA (tRNA) half
acccagaggtcgatggatc

SEQ ID NO: 14072 - DNA, 23 bp, Artificial Sequence
  synthetic circulating small noncoding RNA (sncRNA) 5' transfer RNA (tRNA) half
gtcccaccgagatttgaactcgg

SEQ ID NO: 14073 - DNA, 31 bp, Artificial Sequence
  synthetic circulating small noncoding RNA (sncRNA) 5' transfer RNA (tRNA) half
cattggtagttcaatggtagaattctcgcct

SEQ ID NO: 14074 - DNA, 21 bp, Artificial Sequence
  synthetic circulating small noncoding RNA (sncRNA) 5' transfer RNA (tRNA) half
aatcctaaccgctagaccata

SEQ ID NO: 14075 - DNA, 12 bp, Artificial Sequence
  synthetic circulating small noncoding RNA (sncRNA) 5' transfer RNA (tRNA) half
ctggctggctcg

SEQ ID NO: 14076 - DNA, 24 bp, Artificial Sequence
  synthetic circulating small noncoding RNA (sncRNA) 5' transfer RNA (tRNA) half
aatcctaaccactagaccaccagg

SEQ ID NO: 14077 - DNA, 13 bp, Artificial Sequence
  synthetic circulating small noncoding RNA (sncRNA) 5' transfer RNA (tRNA) half
ccaggagtcgaac

SEQ ID NO: 14078 - DNA, 30 bp, Artificial Sequence
  synthetic circulating small noncoding RNA (sncRNA) 5' transfer RNA (tRNA) half
gcgccaaatcctaaccactagaccaccagg

SEQ ID NO: 14079 - DNA, 10 bp, Artificial Sequence
  synthetic circulating small noncoding RNA (sncRNA) 5' transfer RNA (tRNA) half
agctatccgg

SEQ ID NO: 14080 - DNA, 15 bp, Artificial Sequence
  synthetic circulating small noncoding RNA (sncRNA) 5' transfer RNA (tRNA) half
ggccccagcgagatt

SEQ ID NO: 14081 - DNA, 22 bp, Artificial Sequence
  synthetic circulating small noncoding RNA (sncRNA) 5' transfer RNA (tRNA) half
agggcccggatagctcagtcgg

SEQ ID NO: 14082 - DNA, 19 bp, Artificial Sequence
  synthetic circulating small noncoding RNA (sncRNA) 5' transfer RNA (tRNA) half
tcccgcgtggcaggcgaga

SEQ ID NO: 14083 - DNA, 20 bp, Artificial Sequence
  synthetic circulating small noncoding RNA (sncRNA) 5' transfer RNA (tRNA) half
atgggcccagcacgcttccg

SEQ ID NO: 14084 - DNA, 43 bp, Artificial Sequence
  synthetic circulating small noncoding RNA (sncRNA) 5' transfer RNA (tRNA) half
actcggatcgctggattcagagtccagagtgctaaccattaca

SEQ ID NO: 14085 - DNA, 17 bp, Artificial Sequence
  synthetic circulating small noncoding RNA (sncRNA) 5' transfer RNA (tRNA) half
tgcattggccgggaatc

SEQ ID NO: 14086 - DNA, 27 bp, Artificial Sequence
  synthetic circulating small noncoding RNA (sncRNA) 5' transfer RNA (tRNA) half
cgctggtgtagtggtatcatgcaagat

SEQ ID NO: 14087 - DNA, 23 bp, Artificial Sequence
  synthetic circulating small noncoding RNA (sncRNA) 5' transfer RNA (tRNA) half
gccgaaacccgggatcgaaccag

SEQ ID NO: 14088 - DNA, 31 bp, Artificial Sequence
  synthetic circulating small noncoding RNA (sncRNA) 5' transfer RNA (tRNA) half
aaaaccaggaatcctaaccgctagaccatgt

SEQ ID NO: 14089 - DNA, 22 bp, Artificial Sequence
  synthetic circulating small noncoding RNA (sncRNA) 5' transfer RNA (tRNA) half
ccgaagatcgcgggttcgaacc

SEQ ID NO: 14090 - DNA, 34 bp, Artificial Sequence
  synthetic circulating small noncoding RNA (sncRNA) 5' transfer RNA (tRNA) half
gcgtccctgggtgggctcgaaccaccaacctttc

SEQ ID NO: 14091 - DNA, 15 bp, Artificial Sequence
  synthetic circulating small noncoding RNA (sncRNA) 5' transfer RNA (tRNA) half
gaatcctaaccacta

SEQ ID NO: 14092 - DNA, 20 bp, Artificial Sequence
  synthetic circulating small noncoding RNA (sncRNA) 5' transfer RNA (tRNA) half
attcgaacctgcgcggggag

SEQ ID NO: 14093 - DNA, 16 bp, Artificial Sequence
  synthetic circulating small noncoding RNA (sncRNA) 5' transfer RNA (tRNA) half
gcgctaacgaggcacc

SEQ ID NO: 14094 - DNA, 27 bp, Artificial Sequence
  synthetic circulating small noncoding RNA (sncRNA) 5' transfer RNA (tRNA) half
ggcatgggtggttcagtggtagaattc

SEQ ID NO: 14095 - DNA, 18 bp, Artificial Sequence
  synthetic circulating small noncoding RNA (sncRNA) 5' transfer RNA (tRNA) half
gttaggattcggcgctct

SEQ ID NO: 14096 - DNA, 10 bp, Artificial Sequence
  synthetic circulating small noncoding RNA (sncRNA) 5' transfer RNA (tRNA) half
actccgccgg

SEQ ID NO: 14097 - DNA, 15 bp, Artificial Sequence
  synthetic circulating small noncoding RNA (sncRNA) 5' transfer RNA (tRNA) half
gtgcattggccggga

SEQ ID NO: 14098 - DNA, 26 bp, Artificial Sequence
  synthetic circulating small noncoding RNA (sncRNA) 5' transfer RNA (tRNA) half
cggggaatcgaaccccggtctcccgc

SEQ ID NO: 14099 - DNA, 17 bp, Artificial Sequence
  synthetic circulating small noncoding RNA (sncRNA) 5' transfer RNA (tRNA) half
actggagatgccgggga

SEQ ID NO: 14100 - DNA, 20 bp, Artificial Sequence
  synthetic circulating small noncoding RNA (sncRNA) 5' transfer RNA (tRNA) half
gtcagacgcgttatccattg

SEQ ID NO: 14101 - DNA, 13 bp, Artificial Sequence
  synthetic circulating small noncoding RNA (sncRNA) 5' transfer RNA (tRNA) half
ctcggccacctcg

SEQ ID NO: 14102 - DNA, 44 bp, Artificial Sequence
  synthetic circulating small noncoding RNA (sncRNA) 5' transfer RNA (tRNA) half
gctggattcagagtccagagtgctaaccattacaccatggaacc

SEQ ID NO: 14103 - DNA, 22 bp, Artificial Sequence
  synthetic circulating small noncoding RNA (sncRNA) 5' transfer RNA (tRNA) half
gtccagagtgctagccattaca

SEQ ID NO: 14104 - DNA, 19 bp, Artificial Sequence
  synthetic circulating small noncoding RNA (sncRNA) 5' transfer RNA (tRNA) half
cactctggactctgaatcc

SEQ ID NO: 14105 - DNA, 24 bp, Artificial Sequence
  synthetic circulating small noncoding RNA (sncRNA) 5' transfer RNA (tRNA) half
atcgctggattcagagtccagagt

SEQ ID NO: 14106 - DNA, 15 bp, Artificial Sequence
  synthetic circulating small noncoding RNA (sncRNA) 5' transfer RNA (tRNA) half
tgcgctctaccactg

SEQ ID NO: 14107 - DNA, 41 bp, Artificial Sequence
  synthetic circulating small noncoding RNA (sncRNA) 5' transfer RNA (tRNA) half
cacgcagaaggtcctgggttcgagccccagtggaaccacgt

SEQ ID NO: 14108 - DNA, 14 bp, Artificial Sequence
  synthetic circulating small noncoding RNA (sncRNA) 5' transfer RNA (tRNA) half
gataaccactacac

SEQ ID NO: 14109 - DNA, 11 bp, Artificial Sequence
  synthetic circulating small noncoding RNA (sncRNA) 5' transfer RNA (tRNA) half
aagcgagaatc

SEQ ID NO: 14110 - DNA, 34 bp, Artificial Sequence
  synthetic circulating small noncoding RNA (sncRNA) 5' transfer RNA (tRNA) half
tggtttccgtagtgtagtggttatcacgttcgcc

SEQ ID NO: 14111 - DNA, 26 bp, Artificial Sequence
  synthetic circulating small noncoding RNA (sncRNA) 5' transfer RNA (tRNA) half
agtcctccgctctaccaactgagcta

SEQ ID NO: 14112 - DNA, 21 bp, Artificial Sequence
  synthetic circulating small noncoding RNA (sncRNA) 5' transfer RNA (tRNA) half
aggcggcccgggttcgactcc

SEQ ID NO: 14113 - DNA, 11 bp, Artificial Sequence
  synthetic circulating small noncoding RNA (sncRNA) 5' transfer RNA (tRNA) half
accagggacct

SEQ ID NO: 14114 - DNA, 14 bp, Artificial Sequence
  synthetic circulating small noncoding RNA (sncRNA) 5' transfer RNA (tRNA) half
gagagcgccgaatc

SEQ ID NO: 14115 - DNA, 21 bp, Artificial Sequence
  synthetic circulating small noncoding RNA (sncRNA) 5' transfer RNA (tRNA) half
ccagggacgaccacagcgact

SEQ ID NO: 14116 - DNA, 30 bp, Artificial Sequence
  synthetic circulating small noncoding RNA (sncRNA) 5' transfer RNA (tRNA) half
tggtctagcggttaggattcctggttttca

SEQ ID NO: 14117 - DNA, 13 bp, Artificial Sequence
  synthetic circulating small noncoding RNA (sncRNA) 5' transfer RNA (tRNA) half
tcccagcggtgcc

SEQ ID NO: 14118 - DNA, 31 bp, Artificial Sequence
  synthetic circulating small noncoding RNA (sncRNA) 5' transfer RNA (tRNA) half
gcctggatagctcaattggtagagcatcaga

SEQ ID NO: 14119 - DNA, 33 bp, Artificial Sequence
  synthetic circulating small noncoding RNA (sncRNA) 5' transfer RNA (tRNA) half
tagaattctcgcctgccacgcgggaggcccggg

SEQ ID NO: 14120 - DNA, 38 bp, Artificial Sequence
  synthetic circulating small noncoding RNA (sncRNA) 5' transfer RNA (tRNA) half
agcatgcgctctaccactgagctacatccccagccgct

SEQ ID NO: 14121 - DNA, 19 bp, Artificial Sequence
  synthetic circulating small noncoding RNA (sncRNA) 5' transfer RNA (tRNA) half
gactccggctcgaaggaga

SEQ ID NO: 14122 - DNA, 33 bp, Artificial Sequence
  synthetic circulating small noncoding RNA (sncRNA) 5' transfer RNA (tRNA) half
gcgaccacgaagggactcgaacccccaatcttc

SEQ ID NO: 14123 - DNA, 18 bp, Artificial Sequence
  synthetic circulating small noncoding RNA (sncRNA) 5' transfer RNA (tRNA) half
acccagaggtcgatggat

SEQ ID NO: 14124 - DNA, 24 bp, Artificial Sequence
  synthetic circulating small noncoding RNA (sncRNA) 5' transfer RNA (tRNA) half
tgatgaccactacactacggaaac

SEQ ID NO: 14125 - DNA, 16 bp, Artificial Sequence
  synthetic circulating small noncoding RNA (sncRNA) 5' transfer RNA (tRNA) half
cccgtcggggaatcga

SEQ ID NO: 14126 - DNA, 24 bp, Artificial Sequence
  synthetic circulating small noncoding RNA (sncRNA) 5' transfer RNA (tRNA) half
gtcggggaattgaaccccggtctc

SEQ ID NO: 14127 - DNA, 32 bp, Artificial Sequence
  synthetic circulating small noncoding RNA (sncRNA) 5' transfer RNA (tRNA) half
ggcgcggtggccaagtggtaaggcgtcggtct

SEQ ID NO: 14128 - DNA, 21 bp, Artificial Sequence
  synthetic circulating small noncoding RNA (sncRNA) 5' transfer RNA (tRNA) half
gcccgaacagggacttgaacc

SEQ ID NO: 14129 - DNA, 33 bp, Artificial Sequence
  synthetic circulating small noncoding RNA (sncRNA) 5' transfer RNA (tRNA) half
gatccatcgacctctgggttatgggcccagcac

SEQ ID NO: 14130 - DNA, 14 bp, Artificial Sequence
  synthetic circulating small noncoding RNA (sncRNA) 5' transfer RNA (tRNA) half
cggggacctcttga

SEQ ID NO: 14131 - DNA, 13 bp, Artificial Sequence
  synthetic circulating small noncoding RNA (sncRNA) 5' transfer RNA (tRNA) half
tcccggtcaggga

SEQ ID NO: 14132 - DNA, 18 bp, Artificial Sequence
  synthetic circulating small noncoding RNA (sncRNA) 5' transfer RNA (tRNA) half
gttcgactcccggtatgg

SEQ ID NO: 14133 - DNA, 18 bp, Artificial Sequence
  synthetic circulating small noncoding RNA (sncRNA) 5' transfer RNA (tRNA) half
cataccgggagtcgaacc

SEQ ID NO: 14134 - DNA, 36 bp, Artificial Sequence
  synthetic circulating small noncoding RNA (sncRNA) 5' transfer RNA (tRNA) half
ccccaggtgggactcgaacccacaatccctggctta

SEQ ID NO: 14135 - DNA, 17 bp, Artificial Sequence
  synthetic circulating small noncoding RNA (sncRNA) 5' transfer RNA (tRNA) half
gggttcgaacccacgac

SEQ ID NO: 14136 - DNA, 23 bp, Artificial Sequence
  synthetic circulating small noncoding RNA (sncRNA) 5' transfer RNA (tRNA) half
caggcgagaattctaccactgaa

SEQ ID NO: 14137 - DNA, 17 bp, Artificial Sequence
  synthetic circulating small noncoding RNA (sncRNA) 5' transfer RNA (tRNA) half
ctagctcagtcggtaga

SEQ ID NO: 14138 - DNA, 23 bp, Artificial Sequence
  synthetic circulating small noncoding RNA (sncRNA) 5' transfer RNA (tRNA) half
ctaaccaactgagctaaccggcc

SEQ ID NO: 14139 - DNA, 22 bp, Artificial Sequence
  synthetic circulating small noncoding RNA (sncRNA) 5' transfer RNA (tRNA) half
gtgaggcgaacgtgataaccac

SEQ ID NO: 14140 - DNA, 28 bp, Artificial Sequence
  synthetic circulating small noncoding RNA (sncRNA) 5' transfer RNA (tRNA) half
acccacgccatcgaaatgactggagcct

SEQ ID NO: 14141 - DNA, 30 bp, Artificial Sequence
  synthetic circulating small noncoding RNA (sncRNA) 5' transfer RNA (tRNA) half
gggcccagcacgcttccgctgcgccactct

SEQ ID NO: 14142 - DNA, 25 bp, Artificial Sequence
  synthetic circulating small noncoding RNA (sncRNA) 5' transfer RNA (tRNA) half
atatggtctagcggttaggattcct

SEQ ID NO: 14143 - DNA, 34 bp, Artificial Sequence
  synthetic circulating small noncoding RNA (sncRNA) 5' transfer RNA (tRNA) half
atctaaaggtccctggttcgatcccgggtttcgg

SEQ ID NO: 14144 - DNA, 23 bp, Artificial Sequence
  synthetic circulating small noncoding RNA (sncRNA) 5' transfer RNA (tRNA) half
aatcctaaccgctagaccatatg

SEQ ID NO: 14145 - DNA, 28 bp, Artificial Sequence
  synthetic circulating small noncoding RNA (sncRNA) 5' transfer RNA (tRNA) half
cgctgggattcgaacccaggatctcctg

SEQ ID NO: 14146 - DNA, 22 bp, Artificial Sequence
  synthetic circulating small noncoding RNA (sncRNA) 5' transfer RNA (tRNA) half
ggaggcccgggttcgattcccg

SEQ ID NO: 14147 - DNA, 18 bp, Artificial Sequence
  synthetic circulating small noncoding RNA (sncRNA) 5' transfer RNA (tRNA) half
cggatcgctggattcaga

SEQ ID NO: 14148 - DNA, 39 bp, Artificial Sequence
  synthetic circulating small noncoding RNA (sncRNA) 5' transfer RNA (tRNA) half
ataacgccaaggtcgcgggttcgatccccgtacgggcca

SEQ ID NO: 14149 - DNA, 16 bp, Artificial Sequence
  synthetic circulating small noncoding RNA (sncRNA) 5' transfer RNA (tRNA) half
cacgaccttcagatta

SEQ ID NO: 14150 - DNA, 29 bp, Artificial Sequence
  synthetic circulating small noncoding RNA (sncRNA) 5' transfer RNA (tRNA) half
gcgaccacgaagggactcgaacccccaat

SEQ ID NO: 14151 - DNA, 22 bp, Artificial Sequence
  synthetic circulating small noncoding RNA (sncRNA) 5' transfer RNA (tRNA) half
cgcctccccgtcggggaatcga

SEQ ID NO: 14152 - DNA, 12 bp, Artificial Sequence
  synthetic circulating small noncoding RNA (sncRNA) 5' transfer RNA (tRNA) half
gacgcgctacca

SEQ ID NO: 14153 - DNA, 27 bp, Artificial Sequence
  synthetic circulating small noncoding RNA (sncRNA) 5' transfer RNA (tRNA) half
aggagtggggttcgaacccacgcagac

SEQ ID NO: 14154 - DNA, 34 bp, Artificial Sequence
  synthetic circulating small noncoding RNA (sncRNA) 5' transfer RNA (tRNA) half
aatgcagagtactaaccactatacgatctcggca

SEQ ID NO: 14155 - DNA, 8 bp, Artificial Sequence
  synthetic circulating small noncoding RNA (sncRNA) 5' transfer RNA (tRNA) half
gcggcccg

SEQ ID NO: 14156 - DNA, 7 bp, Artificial Sequence
  synthetic circulating small noncoding RNA (sncRNA) 5' transfer RNA (tRNA) half
cgccggg

SEQ ID NO: 14157 - DNA, 27 bp, Artificial Sequence
  synthetic circulating small noncoding RNA (sncRNA) 5' transfer RNA (tRNA) half
aagcgagaatcatacccctagaccaac

SEQ ID NO: 14158 - DNA, 23 bp, Artificial Sequence
  synthetic circulating small noncoding RNA (sncRNA) 5' transfer RNA (tRNA) half
cgaacgtgataaccactacacta

SEQ ID NO: 14159 - DNA, 42 bp, Artificial Sequence
  synthetic circulating small noncoding RNA (sncRNA) 5' transfer RNA (tRNA) half
agctggcccgtacggggatcgaacccgcgaccttggcgttat

SEQ ID NO: 14160 - DNA, 35 bp, Artificial Sequence
  synthetic circulating small noncoding RNA (sncRNA) 5' transfer RNA (tRNA) half
aaatccagcgccttagaccgctcggccacactacc

SEQ ID NO: 14161 - DNA, 27 bp, Artificial Sequence
  synthetic circulating small noncoding RNA (sncRNA) 5' transfer RNA (tRNA) half
ggttcagtggtagaattctcgcctgcc

SEQ ID NO: 14162 - DNA, 15 bp, Artificial Sequence
  synthetic circulating small noncoding RNA (sncRNA) 5' transfer RNA (tRNA) half
gttcgaacccacgcg

SEQ ID NO: 14163 - DNA, 14 bp, Artificial Sequence
  synthetic circulating small noncoding RNA (sncRNA) 5' transfer RNA (tRNA) half
gcctccgatagcag

SEQ ID NO: 14164 - DNA, 28 bp, Artificial Sequence
  synthetic circulating small noncoding RNA (sncRNA) 5' transfer RNA (tRNA) half
ttcccataccgggagtcgaacccgggcc

SEQ ID NO: 14165 - DNA, 11 bp, Artificial Sequence
  synthetic circulating small noncoding RNA (sncRNA) 5' transfer RNA (tRNA) half
ggttagcgcgc

SEQ ID NO: 14166 - DNA, 14 bp, Artificial Sequence
  synthetic circulating small noncoding RNA (sncRNA) 5' transfer RNA (tRNA) half
cccccgaagagact

SEQ ID NO: 14167 - DNA, 34 bp, Artificial Sequence
  synthetic circulating small noncoding RNA (sncRNA) 5' transfer RNA (tRNA) half
tccttaggtcgctggttcgattccggctcgaagg

SEQ ID NO: 14168 - DNA, 17 bp, Artificial Sequence
  synthetic circulating small noncoding RNA (sncRNA) 5' transfer RNA (tRNA) half
gaaccagcgacctaagg

SEQ ID NO: 14169 - DNA, 26 bp, Artificial Sequence
  synthetic circulating small noncoding RNA (sncRNA) 5' transfer RNA (tRNA) half
gagcgtgatgaccactacactacgga

SEQ ID NO: 14170 - DNA, 34 bp, Artificial Sequence
  synthetic circulating small noncoding RNA (sncRNA) 5' transfer RNA (tRNA) half
tgccccctctgaggttcgaactcaggaccttcag

SEQ ID NO: 14171 - DNA, 20 bp, Artificial Sequence
  synthetic circulating small noncoding RNA (sncRNA) 5' transfer RNA (tRNA) half
tttgggtgcgagaggtcccg

SEQ ID NO: 14172 - DNA, 28 bp, Artificial Sequence
  synthetic circulating small noncoding RNA (sncRNA) 5' transfer RNA (tRNA) half
ttcggcgctctcaccgccgcggcccggg

SEQ ID NO: 14173 - DNA, 9 bp, Artificial Sequence
  synthetic circulating small noncoding RNA (sncRNA) 5' transfer RNA (tRNA) half
ctgggttcg

SEQ ID NO: 14174 - DNA, 36 bp, Artificial Sequence
  synthetic circulating small noncoding RNA (sncRNA) 5' transfer RNA (tRNA) half
tccccgtcggggaattgaaccccggtctcccgcgtg

SEQ ID NO: 14175 - DNA, 41 bp, Artificial Sequence
  synthetic circulating small noncoding RNA (sncRNA) 5' transfer RNA (tRNA) half
ttgaactcggatcgctggattcagagtccagagtgctaacc

SEQ ID NO: 14176 - DNA, 31 bp, Artificial Sequence
  synthetic circulating small noncoding RNA (sncRNA) 5' transfer RNA (tRNA) half
attggccgggaatcgaacccgggcctcccgc

SEQ ID NO: 14177 - DNA, 26 bp, Artificial Sequence
  synthetic circulating small noncoding RNA (sncRNA) 5' transfer RNA (tRNA) half
catgggtggttcagtggtagaattct

SEQ ID NO: 14178 - DNA, 36 bp, Artificial Sequence
  synthetic circulating small noncoding RNA (sncRNA) 5' transfer RNA (tRNA) half
ccggctagctcagtcggtagagcatgagactcttaa

SEQ ID NO: 14179 - DNA, 19 bp, Artificial Sequence
  synthetic circulating small noncoding RNA (sncRNA) 5' transfer RNA (tRNA) half
cgcagcgccttagaccgct

SEQ ID NO: 14180 - DNA, 41 bp, Artificial Sequence
  synthetic circulating small noncoding RNA (sncRNA) 5' transfer RNA (tRNA) half
gaagtgggattcgaacccacgcctccattcggagaccagaa

SEQ ID NO: 14181 - DNA, 16 bp, Artificial Sequence
  synthetic circulating small noncoding RNA (sncRNA) 5' transfer RNA (tRNA) half
gtgcattggccgggaa

SEQ ID NO: 14182 - DNA, 15 bp, Artificial Sequence
  synthetic circulating small noncoding RNA (sncRNA) 5' transfer RNA (tRNA) half
acgctctaaccaact

SEQ ID NO: 14183 - DNA, 32 bp, Artificial Sequence
  synthetic circulating small noncoding RNA (sncRNA) 5' transfer RNA (tRNA) half
gggattaagagtcccatgctctaccgactgag

SEQ ID NO: 14184 - DNA, 28 bp, Artificial Sequence
  synthetic circulating small noncoding RNA (sncRNA) 5' transfer RNA (tRNA) half
agccagccaggagtcgaacctggaatct

SEQ ID NO: 14185 - DNA, 18 bp, Artificial Sequence
  synthetic circulating small noncoding RNA (sncRNA) 5' transfer RNA (tRNA) half
gattcccggtcagggaag

SEQ ID NO: 14186 - DNA, 20 bp, Artificial Sequence
  synthetic circulating small noncoding RNA (sncRNA) 5' transfer RNA (tRNA) half
ccgggcctcccgcgtggcag

SEQ ID NO: 14187 - DNA, 29 bp, Artificial Sequence
  synthetic circulating small noncoding RNA (sncRNA) 5' transfer RNA (tRNA) half
gtccatcgccttaaccactcggccacctc

SEQ ID NO: 14188 - DNA, 26 bp, Artificial Sequence
  synthetic circulating small noncoding RNA (sncRNA) 5' transfer RNA (tRNA) half
cggtagagcatgagactcttaatctc

SEQ ID NO: 14189 - DNA, 15 bp, Artificial Sequence
  synthetic circulating small noncoding RNA (sncRNA) 5' transfer RNA (tRNA) half
cagtggtagaattct

SEQ ID NO: 14190 - DNA, 12 bp, Artificial Sequence
  synthetic circulating small noncoding RNA (sncRNA) 5' transfer RNA (tRNA) half
agtcccatgctc

SEQ ID NO: 14191 - DNA, 26 bp, Artificial Sequence
  synthetic circulating small noncoding RNA (sncRNA) 5' transfer RNA (tRNA) half
tcggggaattgaaccccggtctcccg

SEQ ID NO: 14192 - DNA, 22 bp, Artificial Sequence
  synthetic circulating small noncoding RNA (sncRNA) 5' transfer RNA (tRNA) half
cgcccaacgtggggctcgaacc

SEQ ID NO: 14193 - DNA, 18 bp, Artificial Sequence
  synthetic circulating small noncoding RNA (sncRNA) 5' transfer RNA (tRNA) half
cccgggccgcggcggtga

SEQ ID NO: 14194 - DNA, 20 bp, Artificial Sequence
  synthetic circulating small noncoding RNA (sncRNA) 5' transfer RNA (tRNA) half
gggttcgactcccggtatgg

SEQ ID NO: 14195 - DNA, 12 bp, Artificial Sequence
  synthetic circulating small noncoding RNA (sncRNA) 5' transfer RNA (tRNA) half
tcgagtcccggc

SEQ ID NO: 14196 - DNA, 9 bp, Artificial Sequence
  synthetic circulating small noncoding RNA (sncRNA) 5' transfer RNA (tRNA) half
cggttcccg

SEQ ID NO: 14197 - DNA, 35 bp, Artificial Sequence
  synthetic circulating small noncoding RNA (sncRNA) 5' transfer RNA (tRNA) half
aggagatcctgggttcgaatcccagcggtgcctgg

SEQ ID NO: 14198 - DNA, 20 bp, Artificial Sequence
  synthetic circulating small noncoding RNA (sncRNA) 5' transfer RNA (tRNA) half
atgcattggccgggaatcaa

SEQ ID NO: 14199 - DNA, 12 bp, Artificial Sequence
  synthetic circulating small noncoding RNA (sncRNA) 5' transfer RNA (tRNA) half
ccggggacctct

SEQ ID NO: 14200 - DNA, 37 bp, Artificial Sequence
  synthetic circulating small noncoding RNA (sncRNA) 5' transfer RNA (tRNA) half
gggtgaaaaccaggaatcctaaccgctagaccatgtg

SEQ ID NO: 14201 - DNA, 35 bp, Artificial Sequence
  synthetic circulating small noncoding RNA (sncRNA) 5' transfer RNA (tRNA) half
tccccgcgcaggttcgaatcctgccgactacgtca

SEQ ID NO: 14202 - DNA, 29 bp, Artificial Sequence
  synthetic circulating small noncoding RNA (sncRNA) 5' transfer RNA (tRNA) half
acgcgtgcagagcacaatggattagcagt

SEQ ID NO: 14203 - DNA, 10 bp, Artificial Sequence
  synthetic circulating small noncoding RNA (sncRNA) 5' transfer RNA (tRNA) half
cgtgggttcg

SEQ ID NO: 14204 - DNA, 17 bp, Artificial Sequence
  synthetic circulating small noncoding RNA (sncRNA) 5' transfer RNA (tRNA) half
aaccgaggttgctgcgg

SEQ ID NO: 14205 - DNA, 29 bp, Artificial Sequence
  synthetic circulating small noncoding RNA (sncRNA) 5' transfer RNA (tRNA) half
ggccgcggcggtgagagcgccgaatccta

SEQ ID NO: 14206 - DNA, 12 bp, Artificial Sequence
  synthetic circulating small noncoding RNA (sncRNA) 5' transfer RNA (tRNA) half
tcgtagtcggca

SEQ ID NO: 14207 - DNA, 16 bp, Artificial Sequence
  synthetic circulating small noncoding RNA (sncRNA) 5' transfer RNA (tRNA) half
atcccggacgagccca

SEQ ID NO: 14208 - DNA, 29 bp, Artificial Sequence
  synthetic circulating small noncoding RNA (sncRNA) 5' transfer RNA (tRNA) half
aaccctcaatcttctgatccgaagtcaga

SEQ ID NO: 14209 - DNA, 16 bp, Artificial Sequence
  synthetic circulating small noncoding RNA (sncRNA) 5' transfer RNA (tRNA) half
tcaggtcgcagtctcc

SEQ ID NO: 14210 - DNA, 15 bp, Artificial Sequence
  synthetic circulating small noncoding RNA (sncRNA) 5' transfer RNA (tRNA) half
tctagtggtatgatt

SEQ ID NO: 14211 - DNA, 34 bp, Artificial Sequence
  synthetic circulating small noncoding RNA (sncRNA) 5' transfer RNA (tRNA) half
cgccgaatcctagccactagaccaccagggacgg

SEQ ID NO: 14212 - DNA, 27 bp, Artificial Sequence
  synthetic circulating small noncoding RNA (sncRNA) 5' transfer RNA (tRNA) half
cgtcgagccagccaggagtcgaaccta

SEQ ID NO: 14213 - DNA, 11 bp, Artificial Sequence
  synthetic circulating small noncoding RNA (sncRNA) 5' transfer RNA (tRNA) half
acgaggcacct

SEQ ID NO: 14214 - DNA, 35 bp, Artificial Sequence
  synthetic circulating small noncoding RNA (sncRNA) 5' transfer RNA (tRNA) half
agagggggtatagctcagtggtagagcatttgact

SEQ ID NO: 14215 - DNA, 20 bp, Artificial Sequence
  synthetic circulating small noncoding RNA (sncRNA) 5' transfer RNA (tRNA) half
gattcccggccaatgcactc

SEQ ID NO: 14216 - DNA, 14 bp, Artificial Sequence
  synthetic circulating small noncoding RNA (sncRNA) 5' transfer RNA (tRNA) half
cccggaacctttga

SEQ ID NO: 14217 - DNA, 15 bp, Artificial Sequence
  synthetic circulating small noncoding RNA (sncRNA) 5' transfer RNA (tRNA) half
gaaccagcgacctaa

SEQ ID NO: 14218 - DNA, 14 bp, Artificial Sequence
  synthetic circulating small noncoding RNA (sncRNA) 5' transfer RNA (tRNA) half
gagatgccggggat

SEQ ID NO: 14219 - DNA, 14 bp, Artificial Sequence
  synthetic circulating small noncoding RNA (sncRNA) 5' transfer RNA (tRNA) half
acatggtctagcgg

SEQ ID NO: 14220 - DNA, 19 bp, Artificial Sequence
  synthetic circulating small noncoding RNA (sncRNA) 5' transfer RNA (tRNA) half
aaccccgtccgtgcctgcg

SEQ ID NO: 14221 - DNA, 24 bp, Artificial Sequence
  synthetic circulating small noncoding RNA (sncRNA) 5' transfer RNA (tRNA) half
cgtgtttccgcccggtttcgaacc

SEQ ID NO: 14222 - DNA, 17 bp, Artificial Sequence
  synthetic circulating small noncoding RNA (sncRNA) 5' transfer RNA (tRNA) half
tcggcgctctcaccgcc

SEQ ID NO: 14223 - DNA, 19 bp, Artificial Sequence
  synthetic circulating small noncoding RNA (sncRNA) 5' transfer RNA (tRNA) half
tgtaatggttagcactctg

SEQ ID NO: 14224 - DNA, 18 bp, Artificial Sequence
  synthetic circulating small noncoding RNA (sncRNA) 5' transfer RNA (tRNA) half
gaaccctggaccctcaga

SEQ ID NO: 14225 - DNA, 22 bp, Artificial Sequence
  synthetic circulating small noncoding RNA (sncRNA) 5' transfer RNA (tRNA) half
tgccgaaacccgggatcgaacc

SEQ ID NO: 14226 - DNA, 32 bp, Artificial Sequence
  synthetic circulating small noncoding RNA (sncRNA) 5' transfer RNA (tRNA) half
ccacgaagggattcgaaccctcaatcttctga

SEQ ID NO: 14227 - DNA, 43 bp, Artificial Sequence
  synthetic circulating small noncoding RNA (sncRNA) 5' transfer RNA (tRNA) half
tgtggcagcggtgggattcgaacccacgccatcgaaatgactg

SEQ ID NO: 14228 - DNA, 17 bp, Artificial Sequence
  synthetic circulating small noncoding RNA (sncRNA) 5' transfer RNA (tRNA) half
gaagatgccggggctcg

SEQ ID NO: 14229 - DNA, 16 bp, Artificial Sequence
  synthetic circulating small noncoding RNA (sncRNA) 5' transfer RNA (tRNA) half
gcgagaattctaccat

SEQ ID NO: 14230 - DNA, 13 bp, Artificial Sequence
  synthetic circulating small noncoding RNA (sncRNA) 5' transfer RNA (tRNA) half
aggagtcgaacct

SEQ ID NO: 14231 - DNA, 23 bp, Artificial Sequence
  synthetic circulating small noncoding RNA (sncRNA) 5' transfer RNA (tRNA) half
cggcggtgagagcgccgaatcct

SEQ ID NO: 14232 - DNA, 39 bp, Artificial Sequence
  synthetic circulating small noncoding RNA (sncRNA) 5' transfer RNA (tRNA) half
aaggcaccgctgggattcgaacccaggatctcctgttta

SEQ ID NO: 14233 - DNA, 24 bp, Artificial Sequence
  synthetic circulating small noncoding RNA (sncRNA) 5' transfer RNA (tRNA) half
gctcagctggtagagcggaggact

SEQ ID NO: 14234 - DNA, 30 bp, Artificial Sequence
  synthetic circulating small noncoding RNA (sncRNA) 5' transfer RNA (tRNA) half
gcccgtacggggatcgaacccgcgaccttg

SEQ ID NO: 14235 - DNA, 18 bp, Artificial Sequence
  synthetic circulating small noncoding RNA (sncRNA) 5' transfer RNA (tRNA) half
atccatcgacctctgggt

SEQ ID NO: 14236 - DNA, 41 bp, Artificial Sequence
  synthetic circulating small noncoding RNA (sncRNA) 5' transfer RNA (tRNA) half
gtaatggttagcactctggactctgaatccagcgatccgag

SEQ ID NO: 14237 - DNA, 15 bp, Artificial Sequence
  synthetic circulating small noncoding RNA (sncRNA) 5' transfer RNA (tRNA) half
gttcgagtcctgccg

SEQ ID NO: 14238 - DNA, 19 bp, Artificial Sequence
  synthetic circulating small noncoding RNA (sncRNA) 5' transfer RNA (tRNA) half
ttagcactctggactttga

SEQ ID NO: 14239 - DNA, 16 bp, Artificial Sequence
  synthetic circulating small noncoding RNA (sncRNA) 5' transfer RNA (tRNA) half
cggatagctcagtcgg

SEQ ID NO: 14240 - DNA, 32 bp, Artificial Sequence
  synthetic circulating small noncoding RNA (sncRNA) 5' transfer RNA (tRNA) half
cctggtggtctagtggttaggattcggcgctc

SEQ ID NO: 14241 - DNA, 21 bp, Artificial Sequence
  synthetic circulating small noncoding RNA (sncRNA) 5' transfer RNA (tRNA) half
cgccgaatcctagccactaga

SEQ ID NO: 14242 - DNA, 21 bp, Artificial Sequence
  synthetic circulating small noncoding RNA (sncRNA) 5' transfer RNA (tRNA) half
actgtttccgcccggtttcga

SEQ ID NO: 14243 - DNA, 44 bp, Artificial Sequence
  synthetic circulating small noncoding RNA (sncRNA) 5' transfer RNA (tRNA) half
ctgtcacgcgggagaccggggttcgattccccgacggggagtct

SEQ ID NO: 14244 - DNA, 19 bp, Artificial Sequence
  synthetic circulating small noncoding RNA (sncRNA) 5' transfer RNA (tRNA) half
agtcctgccgcggtcgact

SEQ ID NO: 14245 - DNA, 18 bp, Artificial Sequence
  synthetic circulating small noncoding RNA (sncRNA) 5' transfer RNA (tRNA) half
gagaccggggttcgattc

SEQ ID NO: 14246 - DNA, 16 bp, Artificial Sequence
  synthetic circulating small noncoding RNA (sncRNA) 5' transfer RNA (tRNA) half
aattctaccactgaac

SEQ ID NO: 14247 - DNA, 16 bp, Artificial Sequence
  synthetic circulating small noncoding RNA (sncRNA) 5' transfer RNA (tRNA) half
gattcccgggcggcgc

SEQ ID NO: 14248 - DNA, 33 bp, Artificial Sequence
  synthetic circulating small noncoding RNA (sncRNA) 5' transfer RNA (tRNA) half
acatggtctagcggttaggattcctggttttca

SEQ ID NO: 14249 - DNA, 14 bp, Artificial Sequence
  synthetic circulating small noncoding RNA (sncRNA) 5' transfer RNA (tRNA) half
ggattgtgggttcg

SEQ ID NO: 14250 - DNA, 13 bp, Artificial Sequence
  synthetic circulating small noncoding RNA (sncRNA) 5' transfer RNA (tRNA) half
gcggtgagagcgc

SEQ ID NO: 14251 - DNA, 19 bp, Artificial Sequence
  synthetic circulating small noncoding RNA (sncRNA) 5' transfer RNA (tRNA) half
gttccaccgagatttgaac

SEQ ID NO: 14252 - DNA, 22 bp, Artificial Sequence
  synthetic circulating small noncoding RNA (sncRNA) 5' transfer RNA (tRNA) half
tcggggaattgaaccccggtct

SEQ ID NO: 14253 - DNA, 11 bp, Artificial Sequence
  synthetic circulating small noncoding RNA (sncRNA) 5' transfer RNA (tRNA) half
tcgattccggc

SEQ ID NO: 14254 - DNA, 19 bp, Artificial Sequence
  synthetic circulating small noncoding RNA (sncRNA) 5' transfer RNA (tRNA) half
agtactaaccactatacga

SEQ ID NO: 14255 - DNA, 11 bp, Artificial Sequence
  synthetic circulating small noncoding RNA (sncRNA) 5' transfer RNA (tRNA) half
taggattcggc

SEQ ID NO: 14256 - DNA, 19 bp, Artificial Sequence
  synthetic circulating small noncoding RNA (sncRNA) 5' transfer RNA (tRNA) half
gagtccagagtgctaacca

SEQ ID NO: 14257 - DNA, 9 bp, Artificial Sequence
  synthetic circulating small noncoding RNA (sncRNA) 5' transfer RNA (tRNA) half
gtccgggat

SEQ ID NO: 14258 - DNA, 18 bp, Artificial Sequence
  synthetic circulating small noncoding RNA (sncRNA) 5' transfer RNA (tRNA) half
tgtttccgcccggtttcg

SEQ ID NO: 14259 - DNA, 20 bp, Artificial Sequence
  synthetic circulating small noncoding RNA (sncRNA) 5' transfer RNA (tRNA) half
aatcccaccactgccaacag

SEQ ID NO: 14260 - DNA, 16 bp, Artificial Sequence
  synthetic circulating small noncoding RNA (sncRNA) 5' transfer RNA (tRNA) half
tctaccaactgagcta

SEQ ID NO: 14261 - DNA, 22 bp, Artificial Sequence
  synthetic circulating small noncoding RNA (sncRNA) 5' transfer RNA (tRNA) half
gttcaatccccggcatctccaa

SEQ ID NO: 14262 - DNA, 10 bp, Artificial Sequence
  synthetic circulating small noncoding RNA (sncRNA) 5' transfer RNA (tRNA) half
ggcgtccctg

SEQ ID NO: 14263 - DNA, 23 bp, Artificial Sequence
  synthetic circulating small noncoding RNA (sncRNA) 5' transfer RNA (tRNA) half
atggtggagatgccggggatcga

SEQ ID NO: 14264 - DNA, 12 bp, Artificial Sequence
  synthetic circulating small noncoding RNA (sncRNA) 5' transfer RNA (tRNA) half
ttcgactcccgg

SEQ ID NO: 14265 - DNA, 12 bp, Artificial Sequence
  synthetic circulating small noncoding RNA (sncRNA) 5' transfer RNA (tRNA) half
tcggccacgact

SEQ ID NO: 14266 - DNA, 37 bp, Artificial Sequence
  synthetic circulating small noncoding RNA (sncRNA) 5' transfer RNA (tRNA) half
acccgggacctctcgcaccctaagcgagaatcatacc

SEQ ID NO: 14267 - DNA, 12 bp, Artificial Sequence
  synthetic circulating small noncoding RNA (sncRNA) 5' transfer RNA (tRNA) half
acccacgaccct

SEQ ID NO: 14268 - DNA, 15 bp, Artificial Sequence
  synthetic circulating small noncoding RNA (sncRNA) 5' transfer RNA (tRNA) half
atgattctcgctttg

SEQ ID NO: 14269 - DNA, 29 bp, Artificial Sequence
  synthetic circulating small noncoding RNA (sncRNA) 5' transfer RNA (tRNA) half
tccccgcctgtcacgcgggagaccggggt

SEQ ID NO: 14270 - DNA, 30 bp, Artificial Sequence
  synthetic circulating small noncoding RNA (sncRNA) 5' transfer RNA (tRNA) half
gcggcggtgagagcgccgaatcctaaccac

SEQ ID NO: 14271 - DNA, 16 bp, Artificial Sequence
  synthetic circulating small noncoding RNA (sncRNA) 5' transfer RNA (tRNA) half
ggtagagcatttgact

SEQ ID NO: 14272 - DNA, 13 bp, Artificial Sequence
  synthetic circulating small noncoding RNA (sncRNA) 5' transfer RNA (tRNA) half
gaccgctcggcca

SEQ ID NO: 14273 - DNA, 21 bp, Artificial Sequence
  synthetic circulating small noncoding RNA (sncRNA) 5' transfer RNA (tRNA) half
ggttcgattcccggcccatgc

SEQ ID NO: 14274 - DNA, 11 bp, Artificial Sequence
  synthetic circulating small noncoding RNA (sncRNA) 5' transfer RNA (tRNA) half
ccgggacctct

SEQ ID NO: 14275 - DNA, 33 bp, Artificial Sequence
  synthetic circulating small noncoding RNA (sncRNA) 5' transfer RNA (tRNA) half
ccaaggtcgcgggttcgatccccgtacgggcca

SEQ ID NO: 14276 - DNA, 11 bp, Artificial Sequence
  synthetic circulating small noncoding RNA (sncRNA) 5' transfer RNA (tRNA) half
ccttcgagccg

SEQ ID NO: 14277 - DNA, 32 bp, Artificial Sequence
  synthetic circulating small noncoding RNA (sncRNA) 5' transfer RNA (tRNA) half
gatgctctaccgactgagctatccgggctctt

SEQ ID NO: 14278 - DNA, 13 bp, Artificial Sequence
  synthetic circulating small noncoding RNA (sncRNA) 5' transfer RNA (tRNA) half
gaggtccctggtt

SEQ ID NO: 14279 - DNA, 24 bp, Artificial Sequence
  synthetic circulating small noncoding RNA (sncRNA) 5' transfer RNA (tRNA) half
atagtggttagtactctgcgttgt

SEQ ID NO: 14280 - DNA, 33 bp, Artificial Sequence
  synthetic circulating small noncoding RNA (sncRNA) 5' transfer RNA (tRNA) half
gtctgatgctctaccgactgagctatccgggct

SEQ ID NO: 14281 - DNA, 11 bp, Artificial Sequence
  synthetic circulating small noncoding RNA (sncRNA) 5' transfer RNA (tRNA) half
cgggaatcgaa

SEQ ID NO: 14282 - DNA, 19 bp, Artificial Sequence
  synthetic circulating small noncoding RNA (sncRNA) 5' transfer RNA (tRNA) half
tcacgtctgctttacacgc

SEQ ID NO: 14283 - DNA, 43 bp, Artificial Sequence
  synthetic circulating small noncoding RNA (sncRNA) 5' transfer RNA (tRNA) half
ttgtgtcagaagtgggattcgaacccacgcctccattcggaga

SEQ ID NO: 14284 - DNA, 16 bp, Artificial Sequence
  synthetic circulating small noncoding RNA (sncRNA) 5' transfer RNA (tRNA) half
gagtcctgccgcggtc

SEQ ID NO: 14285 - DNA, 17 bp, Artificial Sequence
  synthetic circulating small noncoding RNA (sncRNA) 5' transfer RNA (tRNA) half
tgcagagtactaaccac

SEQ ID NO: 14286 - DNA, 13 bp, Artificial Sequence
  synthetic circulating small noncoding RNA (sncRNA) 5' transfer RNA (tRNA) half
tctgatgctctac

SEQ ID NO: 14287 - DNA, 15 bp, Artificial Sequence
  synthetic circulating small noncoding RNA (sncRNA) 5' transfer RNA (tRNA) half
aacccacgccatcga

SEQ ID NO: 14288 - DNA, 38 bp, Artificial Sequence
  synthetic circulating small noncoding RNA (sncRNA) 5' transfer RNA (tRNA) half
tttccgtagtgtagtggttatcacgttcgcctcacacg

SEQ ID NO: 14289 - DNA, 13 bp, Artificial Sequence
  synthetic circulating small noncoding RNA (sncRNA) 5' transfer RNA (tRNA) half
cgttggccgggaa

SEQ ID NO: 14290 - DNA, 23 bp, Artificial Sequence
  synthetic circulating small noncoding RNA (sncRNA) 5' transfer RNA (tRNA) half
ttgtgtcagaagtgggattcgaa

SEQ ID NO: 14291 - DNA, 36 bp, Artificial Sequence
  synthetic circulating small noncoding RNA (sncRNA) 5' transfer RNA (tRNA) half
ccagtttccgtagtgtagtggttatcacgttcgcct

SEQ ID NO: 14292 - DNA, 28 bp, Artificial Sequence
  synthetic circulating small noncoding RNA (sncRNA) 5' transfer RNA (tRNA) half
gaacgtgataaccactacactacggaaa

SEQ ID NO: 14293 - DNA, 23 bp, Artificial Sequence
  synthetic circulating small noncoding RNA (sncRNA) 5' transfer RNA (tRNA) half
gcgagaattctaccattgaacta

SEQ ID NO: 14294 - DNA, 15 bp, Artificial Sequence
  synthetic circulating small noncoding RNA (sncRNA) 5' transfer RNA (tRNA) half
cgattcccgggcggc

SEQ ID NO: 14295 - DNA, 18 bp, Artificial Sequence
  synthetic circulating small noncoding RNA (sncRNA) 5' transfer RNA (tRNA) half
cccacgcctccattcgga

SEQ ID NO: 14296 - DNA, 25 bp, Artificial Sequence
  synthetic circulating small noncoding RNA (sncRNA) 5' transfer RNA (tRNA) half
cacaccgggagtcgaacccgggccg

SEQ ID NO: 14297 - DNA, 33 bp, Artificial Sequence
  synthetic circulating small noncoding RNA (sncRNA) 5' transfer RNA (tRNA) half
agatgccggggatcgaacccggggcctcataca

SEQ ID NO: 14298 - DNA, 28 bp, Artificial Sequence
  synthetic circulating small noncoding RNA (sncRNA) 5' transfer RNA (tRNA) half
gcgaccacgaagggactcgaacccccaa

SEQ ID NO: 14299 - DNA, 33 bp, Artificial Sequence
  synthetic circulating small noncoding RNA (sncRNA) 5' transfer RNA (tRNA) half
cagtcaaatgctctacccctgagctatgccccc

SEQ ID NO: 14300 - DNA, 21 bp, Artificial Sequence
  synthetic circulating small noncoding RNA (sncRNA) 5' transfer RNA (tRNA) half
tcgaaccagcgacctaaggat

SEQ ID NO: 14301 - DNA, 10 bp, Artificial Sequence
  synthetic circulating small noncoding RNA (sncRNA) 5' transfer RNA (tRNA) half
gttcgagccc

SEQ ID NO: 14302 - DNA, 23 bp, Artificial Sequence
  synthetic circulating small noncoding RNA (sncRNA) 5' transfer RNA (tRNA) half
gtcaaatgctctaccactgagct

SEQ ID NO: 14303 - DNA, 19 bp, Artificial Sequence
  synthetic circulating small noncoding RNA (sncRNA) 5' transfer RNA (tRNA) half
tcagagtccagagtgctag

SEQ ID NO: 14304 - DNA, 21 bp, Artificial Sequence
  synthetic circulating small noncoding RNA (sncRNA) 5' transfer RNA (tRNA) half
gccccctctgaggttcgaact

SEQ ID NO: 14305 - DNA, 9 bp, Artificial Sequence
  synthetic circulating small noncoding RNA (sncRNA) 5' transfer RNA (tRNA) half
gtcgaaccc

SEQ ID NO: 14306 - DNA, 31 bp, Artificial Sequence
  synthetic circulating small noncoding RNA (sncRNA) 5' transfer RNA (tRNA) half
gaagattgagggttcgagtcccttcgtggtc

SEQ ID NO: 14307 - DNA, 19 bp, Artificial Sequence
  synthetic circulating small noncoding RNA (sncRNA) 5' transfer RNA (tRNA) half
gtcagacgcgttatccatt

SEQ ID NO: 14308 - DNA, 11 bp, Artificial Sequence
  synthetic circulating small noncoding RNA (sncRNA) 5' transfer RNA (tRNA) half
cgattccggct

SEQ ID NO: 14309 - DNA, 23 bp, Artificial Sequence
  synthetic circulating small noncoding RNA (sncRNA) 5' transfer RNA (tRNA) half
tggccgggaatcgaacccgggtc

SEQ ID NO: 14310 - DNA, 15 bp, Artificial Sequence
  synthetic circulating small noncoding RNA (sncRNA) 5' transfer RNA (tRNA) half
ccgaagatcacgggt

SEQ ID NO: 14311 - DNA, 26 bp, Artificial Sequence
  synthetic circulating small noncoding RNA (sncRNA) 5' transfer RNA (tRNA) half
gtagtgtagtggtcatcacgctcgcc

SEQ ID NO: 14312 - DNA, 13 bp, Artificial Sequence
  synthetic circulating small noncoding RNA (sncRNA) 5' transfer RNA (tRNA) half
cgggaggcccggg

SEQ ID NO: 14313 - DNA, 23 bp, Artificial Sequence
  synthetic circulating small noncoding RNA (sncRNA) 5' transfer RNA (tRNA) half
gctctaccaactgagctatccag

SEQ ID NO: 14314 - DNA, 18 bp, Artificial Sequence
  synthetic circulating small noncoding RNA (sncRNA) 5' transfer RNA (tRNA) half
aaaggccgagaccgtccc

SEQ ID NO: 14315 - DNA, 30 bp, Artificial Sequence
  synthetic circulating small noncoding RNA (sncRNA) 5' transfer RNA (tRNA) half
ccgtagtgtagtggttatcacgttcgcctc

SEQ ID NO: 14316 - DNA, 27 bp, Artificial Sequence
  synthetic circulating small noncoding RNA (sncRNA) 5' transfer RNA (tRNA) half
taatggttagcactctggactctgaat

SEQ ID NO: 14317 - DNA, 17 bp, Artificial Sequence
  synthetic circulating small noncoding RNA (sncRNA) 5' transfer RNA (tRNA) half
accgctagaccatatgg

SEQ ID NO: 14318 - DNA, 16 bp, Artificial Sequence
  synthetic circulating small noncoding RNA (sncRNA) 5' transfer RNA (tRNA) half
aaccaggaatcctaac

SEQ ID NO: 14319 - DNA, 16 bp, Artificial Sequence
  synthetic circulating small noncoding RNA (sncRNA) 5' transfer RNA (tRNA) half
gcgactctggtgggac

SEQ ID NO: 14320 - DNA, 36 bp, Artificial Sequence
  synthetic circulating small noncoding RNA (sncRNA) 5' transfer RNA (tRNA) half
ttccgcccggtttcgaaccggggacctttcgcgtgt

SEQ ID NO: 14321 - DNA, 16 bp, Artificial Sequence
  synthetic circulating small noncoding RNA (sncRNA) 5' transfer RNA (tRNA) half
agtccctgttcgggcg

SEQ ID NO: 14322 - DNA, 21 bp, Artificial Sequence
  synthetic circulating small noncoding RNA (sncRNA) 5' transfer RNA (tRNA) half
ggccgcctgggtgaaaaccag

SEQ ID NO: 14323 - DNA, 32 bp, Artificial Sequence
  synthetic circulating small noncoding RNA (sncRNA) 5' transfer RNA (tRNA) half
ctccccgtcggggaattgaaccccggtctccc

SEQ ID NO: 14324 - DNA, 14 bp, Artificial Sequence
  synthetic circulating small noncoding RNA (sncRNA) 5' transfer RNA (tRNA) half
cctcgtggcgcaac

SEQ ID NO: 14325 - DNA, 24 bp, Artificial Sequence
  synthetic circulating small noncoding RNA (sncRNA) 5' transfer RNA (tRNA) half
aaaccgggcggaaacaagacactt

SEQ ID NO: 14326 - DNA, 16 bp, Artificial Sequence
  synthetic circulating small noncoding RNA (sncRNA) 5' transfer RNA (tRNA) half
cacgcctccgaagaga

SEQ ID NO: 14327 - DNA, 17 bp, Artificial Sequence
  synthetic circulating small noncoding RNA (sncRNA) 5' transfer RNA (tRNA) half
aggtagaccgcgtggcc

SEQ ID NO: 14328 - DNA, 12 bp, Artificial Sequence
  synthetic circulating small noncoding RNA (sncRNA) 5' transfer RNA (tRNA) half
agatcgcgggtt

SEQ ID NO: 14329 - DNA, 24 bp, Artificial Sequence
  synthetic circulating small noncoding RNA (sncRNA) 5' transfer RNA (tRNA) half
tcccgcgtggcaggcgagaattct

SEQ ID NO: 14330 - DNA, 26 bp, Artificial Sequence
  synthetic circulating small noncoding RNA (sncRNA) 5' transfer RNA (tRNA) half
tctgatgctctaccgactgagctatc

SEQ ID NO: 14331 - DNA, 19 bp, Artificial Sequence
  synthetic circulating small noncoding RNA (sncRNA) 5' transfer RNA (tRNA) half
ttagttgtttctgcccggt

SEQ ID NO: 14332 - DNA, 14 bp, Artificial Sequence
  synthetic circulating small noncoding RNA (sncRNA) 5' transfer RNA (tRNA) half
gattcgaacctgtg

SEQ ID NO: 14333 - DNA, 11 bp, Artificial Sequence
  synthetic circulating small noncoding RNA (sncRNA) 5' transfer RNA (tRNA) half
acctcggttcg

SEQ ID NO: 14334 - DNA, 28 bp, Artificial Sequence
  synthetic circulating small noncoding RNA (sncRNA) 5' transfer RNA (tRNA) half
gccagccaggagtcgaacctagaatctt

SEQ ID NO: 14335 - DNA, 18 bp, Artificial Sequence
  synthetic circulating small noncoding RNA (sncRNA) 5' transfer RNA (tRNA) half
ggcaccgctgggattcga

SEQ ID NO: 14336 - DNA, 21 bp, Artificial Sequence
  synthetic circulating small noncoding RNA (sncRNA) 5' transfer RNA (tRNA) half
cctcccgcgtggcaggcgaga

SEQ ID NO: 14337 - DNA, 17 bp, Artificial Sequence
  synthetic circulating small noncoding RNA (sncRNA) 5' transfer RNA (tRNA) half
ccgtgactcggattcga

SEQ ID NO: 14338 - DNA, 12 bp, Artificial Sequence
  synthetic circulating small noncoding RNA (sncRNA) 5' transfer RNA (tRNA) half
cggcatgtcgtc

SEQ ID NO: 14339 - DNA, 17 bp, Artificial Sequence
  synthetic circulating small noncoding RNA (sncRNA) 5' transfer RNA (tRNA) half
ccagaggtcgatggatc

SEQ ID NO: 14340 - DNA, 38 bp, Artificial Sequence
  synthetic circulating small noncoding RNA (sncRNA) 5' transfer RNA (tRNA) half
tgcacgaggccctgggttcgatccccagcacctccatt

SEQ ID NO: 14341 - DNA, 28 bp, Artificial Sequence
  synthetic circulating small noncoding RNA (sncRNA) 5' transfer RNA (tRNA) half
gctccatagctcaggggttagagcactg

SEQ ID NO: 14342 - DNA, 28 bp, Artificial Sequence
  synthetic circulating small noncoding RNA (sncRNA) 5' transfer RNA (tRNA) half
ttgtgggttcgagtcccatctgggtcgc

SEQ ID NO: 14343 - DNA, 32 bp, Artificial Sequence
  synthetic circulating small noncoding RNA (sncRNA) 5' transfer RNA (tRNA) half
taccccgggtgggactcgaacccacaatccct

SEQ ID NO: 14344 - DNA, 34 bp, Artificial Sequence
  synthetic circulating small noncoding RNA (sncRNA) 5' transfer RNA (tRNA) half
aagaccagtgctctaacccctgagctatggagcc

SEQ ID NO: 14345 - DNA, 38 bp, Artificial Sequence
  synthetic circulating small noncoding RNA (sncRNA) 5' transfer RNA (tRNA) half
ccgcagcaacctcggttcgaatccgagtcacggcatta

SEQ ID NO: 14346 - DNA, 30 bp, Artificial Sequence
  synthetic circulating small noncoding RNA (sncRNA) 5' transfer RNA (tRNA) half
gggtatagctcaggggtagagcatttgact

SEQ ID NO: 14347 - DNA, 13 bp, Artificial Sequence
  synthetic circulating small noncoding RNA (sncRNA) 5' transfer RNA (tRNA) half
atcgacctctggg

SEQ ID NO: 14348 - DNA, 15 bp, Artificial Sequence
  synthetic circulating small noncoding RNA (sncRNA) 5' transfer RNA (tRNA) half
tggtctaggggtatg

SEQ ID NO: 14349 - DNA, 11 bp, Artificial Sequence
  synthetic circulating small noncoding RNA (sncRNA) 5' transfer RNA (tRNA) half
gacgaggatgg

SEQ ID NO: 14350 - DNA, 22 bp, Artificial Sequence
  synthetic circulating small noncoding RNA (sncRNA) 5' transfer RNA (tRNA) half
tcgattcccggccaatgcactc

SEQ ID NO: 14351 - DNA, 37 bp, Artificial Sequence
  synthetic circulating small noncoding RNA (sncRNA) 5' transfer RNA (tRNA) half
tgccccgtgtgaggatcgaactcacgaccttcagatt

SEQ ID NO: 14352 - DNA, 23 bp, Artificial Sequence
  synthetic circulating small noncoding RNA (sncRNA) 5' transfer RNA (tRNA) half
ggttccaccgagatttgaactcg

SEQ ID NO: 14353 - DNA, 18 bp, Artificial Sequence
  synthetic circulating small noncoding RNA (sncRNA) 5' transfer RNA (tRNA) half
cgtgctgggcccataacc

SEQ ID NO: 14354 - DNA, 25 bp, Artificial Sequence
  synthetic circulating small noncoding RNA (sncRNA) 5' transfer RNA (tRNA) half
tggtggttcgagcccacccagggac

SEQ ID NO: 14355 - DNA, 16 bp, Artificial Sequence
  synthetic circulating small noncoding RNA (sncRNA) 5' transfer RNA (tRNA) half
gcccaacgtggggctc

SEQ ID NO: 14356 - DNA, 37 bp, Artificial Sequence
  synthetic circulating small noncoding RNA (sncRNA) 5' transfer RNA (tRNA) half
gcgcccaacgtggggctcgaacccacgaccctgagat

SEQ ID NO: 14357 - DNA, 21 bp, Artificial Sequence
  synthetic circulating small noncoding RNA (sncRNA) 5' transfer RNA (tRNA) half
agtctgatgctctaccaactg

SEQ ID NO: 14358 - DNA, 28 bp, Artificial Sequence
  synthetic circulating small noncoding RNA (sncRNA) 5' transfer RNA (tRNA) half
tgggcccataacccagaggtcgatggat

SEQ ID NO: 14359 - DNA, 45 bp, Artificial Sequence
  synthetic circulating small noncoding RNA (sncRNA) 5' transfer RNA (tRNA) half
agatttgaactcggatcgctggattcagagtccagagtgctaacc

SEQ ID NO: 14360 - DNA, 26 bp, Artificial Sequence
  synthetic circulating small noncoding RNA (sncRNA) 5' transfer RNA (tRNA) half
tcaaagtccagtgtgctaaccattac

SEQ ID NO: 14361 - DNA, 37 bp, Artificial Sequence
  synthetic circulating small noncoding RNA (sncRNA) 5' transfer RNA (tRNA) half
gattaagagtcccatgctctaccgactgagctagccg

SEQ ID NO: 14362 - DNA, 28 bp, Artificial Sequence
  synthetic circulating small noncoding RNA (sncRNA) 5' transfer RNA (tRNA) half
gtcggggaattgaaccccggtctcccgc

SEQ ID NO: 14363 - DNA, 36 bp, Artificial Sequence
  synthetic circulating small noncoding RNA (sncRNA) 5' transfer RNA (tRNA) half
cgaccacgaagggactcgaacccccaatcttctgat

SEQ ID NO: 14364 - DNA, 21 bp, Artificial Sequence
  synthetic circulating small noncoding RNA (sncRNA) 5' transfer RNA (tRNA) half
tgcgttggccgggaatcgaac

SEQ ID NO: 14365 - DNA, 16 bp, Artificial Sequence
  synthetic circulating small noncoding RNA (sncRNA) 5' transfer RNA (tRNA) half
caccgctgggattcga

SEQ ID NO: 14366 - DNA, 15 bp, Artificial Sequence
  synthetic circulating small noncoding RNA (sncRNA) 5' transfer RNA (tRNA) half
ggctcgtccgggatt

SEQ ID NO: 14367 - DNA, 20 bp, Artificial Sequence
  synthetic circulating small noncoding RNA (sncRNA) 5' transfer RNA (tRNA) half
gtgttcccacaccgggagtc

SEQ ID NO: 14368 - DNA, 21 bp, Artificial Sequence
  synthetic circulating small noncoding RNA (sncRNA) 5' transfer RNA (tRNA) half
tctccccgcgcaggttcgaat

SEQ ID NO: 14369 - DNA, 12 bp, Artificial Sequence
  synthetic circulating small noncoding RNA (sncRNA) 5' transfer RNA (tRNA) half
cggacgagccct

SEQ ID NO: 14370 - DNA, 19 bp, Artificial Sequence
  synthetic circulating small noncoding RNA (sncRNA) 5' transfer RNA (tRNA) half
aaagtctgatgctctaccg

SEQ ID NO: 14371 - DNA, 18 bp, Artificial Sequence
  synthetic circulating small noncoding RNA (sncRNA) 5' transfer RNA (tRNA) half
ctccgccgggactcgaac

SEQ ID NO: 14372 - DNA, 26 bp, Artificial Sequence
  synthetic circulating small noncoding RNA (sncRNA) 5' transfer RNA (tRNA) half
ccgacgaggatgggattcgaacccac

SEQ ID NO: 14373 - DNA, 17 bp, Artificial Sequence
  synthetic circulating small noncoding RNA (sncRNA) 5' transfer RNA (tRNA) half
ggctcgaaggacttcgt

SEQ ID NO: 14374 - DNA, 17 bp, Artificial Sequence
  synthetic circulating small noncoding RNA (sncRNA) 5' transfer RNA (tRNA) half
tccgagaggtcccgggt

SEQ ID NO: 14375 - DNA, 19 bp, Artificial Sequence
  synthetic circulating small noncoding RNA (sncRNA) 5' transfer RNA (tRNA) half
gtacgggccaaagctgaag

SEQ ID NO: 14376 - DNA, 19 bp, Artificial Sequence
  synthetic circulating small noncoding RNA (sncRNA) 5' transfer RNA (tRNA) half
accgggcggaaacattact

SEQ ID NO: 14377 - DNA, 18 bp, Artificial Sequence
  synthetic circulating small noncoding RNA (sncRNA) 5' transfer RNA (tRNA) half
ccagtgctctaacccctg

SEQ ID NO: 14378 - DNA, 13 bp, Artificial Sequence
  synthetic circulating small noncoding RNA (sncRNA) 5' transfer RNA (tRNA) half
acgccatcgaaat

SEQ ID NO: 14379 - DNA, 17 bp, Artificial Sequence
  synthetic circulating small noncoding RNA (sncRNA) 5' transfer RNA (tRNA) half
taccgggagtcgaaccc

SEQ ID NO: 14380 - DNA, 20 bp, Artificial Sequence
  synthetic circulating small noncoding RNA (sncRNA) 5' transfer RNA (tRNA) half
accgactgagctagccgggc

SEQ ID NO: 14381 - DNA, 22 bp, Artificial Sequence
  synthetic circulating small noncoding RNA (sncRNA) 5' transfer RNA (tRNA) half
ggctcgttggtctaggggtatg

SEQ ID NO: 14382 - DNA, 32 bp, Artificial Sequence
  synthetic circulating small noncoding RNA (sncRNA) 5' transfer RNA (tRNA) half
gcagagtggcgcagcggaagcgtgctgggccc

SEQ ID NO: 14383 - DNA, 7 bp, Artificial Sequence
  synthetic circulating small noncoding RNA (sncRNA) 5' transfer RNA (tRNA) half
cccggcc

SEQ ID NO: 14384 - DNA, 11 bp, Artificial Sequence
  synthetic circulating small noncoding RNA (sncRNA) 5' transfer RNA (tRNA) half
cccggtctccc

SEQ ID NO: 14385 - DNA, 32 bp, Artificial Sequence
  synthetic circulating small noncoding RNA (sncRNA) 5' transfer RNA (tRNA) half
gcgacccgggttcgattcccgggcggcgcatg

SEQ ID NO: 14386 - DNA, 19 bp, Artificial Sequence
  synthetic circulating small noncoding RNA (sncRNA) 5' transfer RNA (tRNA) half
ttccggctcgaaggacttc

SEQ ID NO: 14387 - DNA, 12 bp, Artificial Sequence
  synthetic circulating small noncoding RNA (sncRNA) 5' transfer RNA (tRNA) half
cggtgggacctc

SEQ ID NO: 14388 - DNA, 22 bp, Artificial Sequence
  synthetic circulating small noncoding RNA (sncRNA) 5' transfer RNA (tRNA) half
catgctctaccgactgagctag

SEQ ID NO: 14389 - DNA, 23 bp, Artificial Sequence
  synthetic circulating small noncoding RNA (sncRNA) 5' transfer RNA (tRNA) half
ggcggggatactaaccactatac

SEQ ID NO: 14390 - DNA, 12 bp, Artificial Sequence
  synthetic circulating small noncoding RNA (sncRNA) 5' transfer RNA (tRNA) half
gacctctcgcac

SEQ ID NO: 14391 - DNA, 35 bp, Artificial Sequence
  synthetic circulating small noncoding RNA (sncRNA) 5' transfer RNA (tRNA) half
ggcatgggtggttcagtggtagaattctcgcctgc

SEQ ID NO: 14392 - DNA, 19 bp, Artificial Sequence
  synthetic circulating small noncoding RNA (sncRNA) 5' transfer RNA (tRNA) half
cttaaccactcggccatcg

SEQ ID NO: 14393 - DNA, 21 bp, Artificial Sequence
  synthetic circulating small noncoding RNA (sncRNA) 5' transfer RNA (tRNA) half
gaccagtgctctaacccctga

SEQ ID NO: 14394 - DNA, 23 bp, Artificial Sequence
  synthetic circulating small noncoding RNA (sncRNA) 5' transfer RNA (tRNA) half
aggcgtccctgggtgggctcgaa

SEQ ID NO: 14395 - DNA, 43 bp, Artificial Sequence
  synthetic circulating small noncoding RNA (sncRNA) 5' transfer RNA (tRNA) half
ggcagtggtgggattcgaacccacgcctccgaagagactggag

SEQ ID NO: 14396 - DNA, 16 bp, Artificial Sequence
  synthetic circulating small noncoding RNA (sncRNA) 5' transfer RNA (tRNA) half
gaaccctcaatcttct

SEQ ID NO: 14397 - DNA, 29 bp, Artificial Sequence
  synthetic circulating small noncoding RNA (sncRNA) 5' transfer RNA (tRNA) half
tcgttggtctaggggtatgattctcgctt

SEQ ID NO: 14398 - DNA, 15 bp, Artificial Sequence
  synthetic circulating small noncoding RNA (sncRNA) 5' transfer RNA (tRNA) half
gctcaaatggtagag

SEQ ID NO: 14399 - DNA, 32 bp, Artificial Sequence
  synthetic circulating small noncoding RNA (sncRNA) 5' transfer RNA (tRNA) half
aacccgggccgcggcggtgagagcgccgaatc

SEQ ID NO: 14400 - DNA, 23 bp, Artificial Sequence
  synthetic circulating small noncoding RNA (sncRNA) 5' transfer RNA (tRNA) half
gtgtggcccgtacggggatcgaa

SEQ ID NO: 14401 - DNA, 17 bp, Artificial Sequence
  synthetic circulating small noncoding RNA (sncRNA) 5' transfer RNA (tRNA) half
cccgggccgcggcggtg

SEQ ID NO: 14402 - DNA, 34 bp, Artificial Sequence
  synthetic circulating small noncoding RNA (sncRNA) 5' transfer RNA (tRNA) half
gcatgaggccccgggttcgatccccggcacctcc

SEQ ID NO: 14403 - DNA, 12 bp, Artificial Sequence
  synthetic circulating small noncoding RNA (sncRNA) 5' transfer RNA (tRNA) half
ccgcggcccggg

SEQ ID NO: 14404 - DNA, 22 bp, Artificial Sequence
  synthetic circulating small noncoding RNA (sncRNA) 5' transfer RNA (tRNA) half
accgctgggattcgaacccagg

SEQ ID NO: 14405 - DNA, 20 bp, Artificial Sequence
  synthetic circulating small noncoding RNA (sncRNA) 5' transfer RNA (tRNA) half
actcggccatcctgacactt

SEQ ID NO: 14406 - DNA, 19 bp, Artificial Sequence
  synthetic circulating small noncoding RNA (sncRNA) 5' transfer RNA (tRNA) half
gttggtagagcatgagact

SEQ ID NO: 14407 - DNA, 36 bp, Artificial Sequence
  synthetic circulating small noncoding RNA (sncRNA) 5' transfer RNA (tRNA) half
ttcttgcgacccgggttcgattcccgggcggcgcat

SEQ ID NO: 14408 - DNA, 24 bp, Artificial Sequence
  synthetic circulating small noncoding RNA (sncRNA) 5' transfer RNA (tRNA) half
tcggggaattgaaccccggtctcc

SEQ ID NO: 14409 - DNA, 42 bp, Artificial Sequence
  synthetic circulating small noncoding RNA (sncRNA) 5' transfer RNA (tRNA) half
ccgacgaggatgggattcgaacccacgcgtgcaaagcacaat

SEQ ID NO: 14410 - DNA, 19 bp, Artificial Sequence
  synthetic circulating small noncoding RNA (sncRNA) 5' transfer RNA (tRNA) half
catagtgtagcggttatca

SEQ ID NO: 14411 - DNA, 25 bp, Artificial Sequence
  synthetic circulating small noncoding RNA (sncRNA) 5' transfer RNA (tRNA) half
caggcggcccgggttcgactcccgg

SEQ ID NO: 14412 - DNA, 22 bp, Artificial Sequence
  synthetic circulating small noncoding RNA (sncRNA) 5' transfer RNA (tRNA) half
tcagtctaacgctctcccaact

SEQ ID NO: 14413 - DNA, 30 bp, Artificial Sequence
  synthetic circulating small noncoding RNA (sncRNA) 5' transfer RNA (tRNA) half
accgaagatcacgggttcgaaccccgtccg

SEQ ID NO: 14414 - DNA, 39 bp, Artificial Sequence
  synthetic circulating small noncoding RNA (sncRNA) 5' transfer RNA (tRNA) half
atccatcgacctctgggttatgggcccagcacgcttccg

SEQ ID NO: 14415 - DNA, 39 bp, Artificial Sequence
  synthetic circulating small noncoding RNA (sncRNA) 5' transfer RNA (tRNA) half
attaccccgggtgggactcgaacccacaatccctggctt

SEQ ID NO: 14416 - DNA, 11 bp, Artificial Sequence
  synthetic circulating small noncoding RNA (sncRNA) 5' transfer RNA (tRNA) half
gcgaccacgaa

SEQ ID NO: 14417 - DNA, 16 bp, Artificial Sequence
  synthetic circulating small noncoding RNA (sncRNA) 5' transfer RNA (tRNA) half
cataccgggagtcgaa

SEQ ID NO: 14418 - DNA, 22 bp, Artificial Sequence
  synthetic circulating small noncoding RNA (sncRNA) 5' transfer RNA (tRNA) half
gggccgcggcggtgagagcgcc

SEQ ID NO: 14419 - DNA, 20 bp, Artificial Sequence
  synthetic circulating small noncoding RNA (sncRNA) 5' transfer RNA (tRNA) half
atccatcgacctctgggtta

SEQ ID NO: 14420 - DNA, 38 bp, Artificial Sequence
  synthetic circulating small noncoding RNA (sncRNA) 5' transfer RNA (tRNA) half
agattaagagtctcatgctctaccgactgagctagccg

SEQ ID NO: 14421 - DNA, 34 bp, Artificial Sequence
  synthetic circulating small noncoding RNA (sncRNA) 5' transfer RNA (tRNA) half
ccgaagatcacgggttcgaaccccgtccgtgcct

SEQ ID NO: 14422 - DNA, 16 bp, Artificial Sequence
  synthetic circulating small noncoding RNA (sncRNA) 5' transfer RNA (tRNA) half
ggaatcgaaccccggt

SEQ ID NO: 14423 - DNA, 28 bp, Artificial Sequence
  synthetic circulating small noncoding RNA (sncRNA) 5' transfer RNA (tRNA) half
gattgtgggttcgagtcccatctgggtc

SEQ ID NO: 14424 - DNA, 18 bp, Artificial Sequence
  synthetic circulating small noncoding RNA (sncRNA) 5' transfer RNA (tRNA) half
tttcgagtccaacgcctt

SEQ ID NO: 14425 - DNA, 27 bp, Artificial Sequence
  synthetic circulating small noncoding RNA (sncRNA) 5' transfer RNA (tRNA) half
ctcgttggtctaggggtatgattctcg

SEQ ID NO: 14426 - DNA, 24 bp, Artificial Sequence
  synthetic circulating small noncoding RNA (sncRNA) 5' transfer RNA (tRNA) half
gggggtgtagctcagtggtagagc

SEQ ID NO: 14427 - DNA, 21 bp, Artificial Sequence
  synthetic circulating small noncoding RNA (sncRNA) 5' transfer RNA (tRNA) half
ggcaagaattctaccactgaa

SEQ ID NO: 14428 - DNA, 17 bp, Artificial Sequence
  synthetic circulating small noncoding RNA (sncRNA) 5' transfer RNA (tRNA) half
ttcgattcccggtcagg

SEQ ID NO: 14429 - DNA, 14 bp, Artificial Sequence
  synthetic circulating small noncoding RNA (sncRNA) 5' transfer RNA (tRNA) half
tcggctgttaaccg

SEQ ID NO: 14430 - DNA, 5 bp, Artificial Sequence
  synthetic circulating small noncoding RNA (sncRNA) 5' transfer RNA (tRNA) half
cgtcg

SEQ ID NO: 14431 - DNA, 30 bp, Artificial Sequence
  synthetic circulating small noncoding RNA (sncRNA) 5' transfer RNA (tRNA) half
cagaaggtcctgggttcgagccccagtgga

SEQ ID NO: 14432 - DNA, 12 bp, Artificial Sequence
  synthetic circulating small noncoding RNA (sncRNA) 5' transfer RNA (tRNA) half
gtccatcgcctt

SEQ ID NO: 14433 - DNA, 10 bp, Artificial Sequence
  synthetic circulating small noncoding RNA (sncRNA) 5' transfer RNA (tRNA) half
ggcaccgctg

SEQ ID NO: 14434 - DNA, 45 bp, Artificial Sequence
  synthetic circulating small noncoding RNA (sncRNA) 5' transfer RNA (tRNA) half
aggcgtccctgggtgggctcgaaccaccaacctttcggttaacag

SEQ ID NO: 14435 - DNA, 17 bp, Artificial Sequence
  synthetic circulating small noncoding RNA (sncRNA) 5' transfer RNA (tRNA) half
acgcagcgccttagacc

SEQ ID NO: 14436 - DNA, 19 bp, Artificial Sequence
  synthetic circulating small noncoding RNA (sncRNA) 5' transfer RNA (tRNA) half
ggcctcgtggcgcaacggt

SEQ ID NO: 14437 - DNA, 23 bp, Artificial Sequence
  synthetic circulating small noncoding RNA (sncRNA) 5' transfer RNA (tRNA) half
actcacgaccttcagattatgag

SEQ ID NO: 14438 - DNA, 20 bp, Artificial Sequence
  synthetic circulating small noncoding RNA (sncRNA) 5' transfer RNA (tRNA) half
gttcgagtcctgccgcggtc

SEQ ID NO: 14439 - DNA, 17 bp, Artificial Sequence
  synthetic circulating small noncoding RNA (sncRNA) 5' transfer RNA (tRNA) half
tccagcgatccgagttc

SEQ ID NO: 14440 - DNA, 20 bp, Artificial Sequence
  synthetic circulating small noncoding RNA (sncRNA) 5' transfer RNA (tRNA) half
ttcaaagtccagagtgctaa

SEQ ID NO: 14441 - DNA, 20 bp, Artificial Sequence
  synthetic circulating small noncoding RNA (sncRNA) 5' transfer RNA (tRNA) half
tcagtggtagagcgcatgct

SEQ ID NO: 14442 - DNA, 25 bp, Artificial Sequence
  synthetic circulating small noncoding RNA (sncRNA) 5' transfer RNA (tRNA) half
gtccagagtgctaaccattacacca

SEQ ID NO: 14443 - DNA, 23 bp, Artificial Sequence
  synthetic circulating small noncoding RNA (sncRNA) 5' transfer RNA (tRNA) half
gtctaggggtatgattctcggtt

SEQ ID NO: 14444 - DNA, 18 bp, Artificial Sequence
  synthetic circulating small noncoding RNA (sncRNA) 5' transfer RNA (tRNA) half
ggtggagatgccggggat

SEQ ID NO: 14445 - DNA, 14 bp, Artificial Sequence
  synthetic circulating small noncoding RNA (sncRNA) 5' transfer RNA (tRNA) half
tcaaatgctctacc

SEQ ID NO: 14446 - DNA, 31 bp, Artificial Sequence
  synthetic circulating small noncoding RNA (sncRNA) 5' transfer RNA (tRNA) half
cggcccgggttcgactcccggtgtgggaacg

SEQ ID NO: 14447 - DNA, 12 bp, Artificial Sequence
  synthetic circulating small noncoding RNA (sncRNA) 5' transfer RNA (tRNA) half
attccaggttcg

SEQ ID NO: 14448 - DNA, 14 bp, Artificial Sequence
  synthetic circulating small noncoding RNA (sncRNA) 5' transfer RNA (tRNA) half
gttcgattccccga

SEQ ID NO: 14449 - DNA, 11 bp, Artificial Sequence
  synthetic circulating small noncoding RNA (sncRNA) 5' transfer RNA (tRNA) half
gctcggccatc

SEQ ID NO: 14450 - DNA, 20 bp, Artificial Sequence
  synthetic circulating small noncoding RNA (sncRNA) 5' transfer RNA (tRNA) half
ttactggcccgtacggggat

SEQ ID NO: 14451 - DNA, 18 bp, Artificial Sequence
  synthetic circulating small noncoding RNA (sncRNA) 5' transfer RNA (tRNA) half
ctttgcgttggccgggaa

SEQ ID NO: 14452 - DNA, 23 bp, Artificial Sequence
  synthetic circulating small noncoding RNA (sncRNA) 5' transfer RNA (tRNA) half
aaggtcctgggttcgagccccag

SEQ ID NO: 14453 - DNA, 9 bp, Artificial Sequence
  synthetic circulating small noncoding RNA (sncRNA) 5' transfer RNA (tRNA) half
tccccgtcg

SEQ ID NO: 14454 - DNA, 14 bp, Artificial Sequence
  synthetic circulating small noncoding RNA (sncRNA) 5' transfer RNA (tRNA) half
ttcggttcccggcc

SEQ ID NO: 14455 - DNA, 17 bp, Artificial Sequence
  synthetic circulating small noncoding RNA (sncRNA) 5' transfer RNA (tRNA) half
ccgacgaggatgggatt

SEQ ID NO: 14456 - DNA, 18 bp, Artificial Sequence
  synthetic circulating small noncoding RNA (sncRNA) 5' transfer RNA (tRNA) half
tcgattccccgacgggga

SEQ ID NO: 14457 - DNA, 24 bp, Artificial Sequence
  synthetic circulating small noncoding RNA (sncRNA) 5' transfer RNA (tRNA) half
ggagaccggggttcgattccccga

SEQ ID NO: 14458 - DNA, 22 bp, Artificial Sequence
  synthetic circulating small noncoding RNA (sncRNA) 5' transfer RNA (tRNA) half
gctcgtccgggatttgaacccg

SEQ ID NO: 14459 - DNA, 23 bp, Artificial Sequence
  synthetic circulating small noncoding RNA (sncRNA) 5' transfer RNA (tRNA) half
ggccgagaccgtccctgggtggg

SEQ ID NO: 14460 - DNA, 28 bp, Artificial Sequence
  synthetic circulating small noncoding RNA (sncRNA) 5' transfer RNA (tRNA) half
cccaacgtggggctcgaacccacgaccc

SEQ ID NO: 14461 - DNA, 19 bp, Artificial Sequence
  synthetic circulating small noncoding RNA (sncRNA) 5' transfer RNA (tRNA) half
tccgtatggaggcgtgggt

SEQ ID NO: 14462 - DNA, 34 bp, Artificial Sequence
  synthetic circulating small noncoding RNA (sncRNA) 5' transfer RNA (tRNA) half
cccgtcggggaatcgaaccccggtctcccgcgtg

SEQ ID NO: 14463 - DNA, 32 bp, Artificial Sequence
  synthetic circulating small noncoding RNA (sncRNA) 5' transfer RNA (tRNA) half
ctcatgctctaccgactgagctagccgggcga

SEQ ID NO: 14464 - DNA, 14 bp, Artificial Sequence
  synthetic circulating small noncoding RNA (sncRNA) 5' transfer RNA (tRNA) half
gaacccgggacctc

SEQ ID NO: 14465 - DNA, 27 bp, Artificial Sequence
  synthetic circulating small noncoding RNA (sncRNA) 5' transfer RNA (tRNA) half
tatggtctagcggttaggattcctggt

SEQ ID NO: 14466 - DNA, 15 bp, Artificial Sequence
  synthetic circulating small noncoding RNA (sncRNA) 5' transfer RNA (tRNA) half
gtcgaacccgggccg

SEQ ID NO: 14467 - DNA, 43 bp, Artificial Sequence
  synthetic circulating small noncoding RNA (sncRNA) 5' transfer RNA (tRNA) half
gcttccctgaccgggaatcgaacccgggccgcggcggtgagag

SEQ ID NO: 14468 - DNA, 36 bp, Artificial Sequence
  synthetic circulating small noncoding RNA (sncRNA) 5' transfer RNA (tRNA) half
ccccgtcggggaatcgaaccccggtctcccgcgtga

SEQ ID NO: 14469 - DNA, 26 bp, Artificial Sequence
  synthetic circulating small noncoding RNA (sncRNA) 5' transfer RNA (tRNA) half
ggtagttcaatggtagaattctcgcc

SEQ ID NO: 14470 - DNA, 8 bp, Artificial Sequence
  synthetic circulating small noncoding RNA (sncRNA) 5' transfer RNA (tRNA) half
gaccccga

SEQ ID NO: 14471 - DNA, 25 bp, Artificial Sequence
  synthetic circulating small noncoding RNA (sncRNA) 5' transfer RNA (tRNA) half
ggcgaatgtgataaccactacacta

SEQ ID NO: 14472 - DNA, 31 bp, Artificial Sequence
  synthetic circulating small noncoding RNA (sncRNA) 5' transfer RNA (tRNA) half
gagccaggtaggagtcgaacctacaatcttc

SEQ ID NO: 14473 - DNA, 25 bp, Artificial Sequence
  synthetic circulating small noncoding RNA (sncRNA) 5' transfer RNA (tRNA) half
ggtctagtggttaggattcggcgct

SEQ ID NO: 14474 - DNA, 45 bp, Artificial Sequence
  synthetic circulating small noncoding RNA (sncRNA) 5' transfer RNA (tRNA) half
gacgaggatgggattcgaacccacgcgtgcaaagcacaatggatt

SEQ ID NO: 14475 - DNA, 34 bp, Artificial Sequence
  synthetic circulating small noncoding RNA (sncRNA) 5' transfer RNA (tRNA) half
ggcaggcgagaattctaccactgaaccaccaatg

SEQ ID NO: 14476 - DNA, 30 bp, Artificial Sequence
  synthetic circulating small noncoding RNA (sncRNA) 5' transfer RNA (tRNA) half
gcctccccgtcggggaatcgaaccccggtc

SEQ ID NO: 14477 - DNA, 19 bp, Artificial Sequence
  synthetic circulating small noncoding RNA (sncRNA) 5' transfer RNA (tRNA) half
aggcgagcgtgatgaccac

SEQ ID NO: 14478 - DNA, 27 bp, Artificial Sequence
  synthetic circulating small noncoding RNA (sncRNA) 5' transfer RNA (tRNA) half
cgagaatcatacccctagaccaacgag

SEQ ID NO: 14479 - DNA, 15 bp, Artificial Sequence
  synthetic circulating small noncoding RNA (sncRNA) 5' transfer RNA (tRNA) half
tgccgggagtcgaac

SEQ ID NO: 14480 - DNA, 13 bp, Artificial Sequence
  synthetic circulating small noncoding RNA (sncRNA) 5' transfer RNA (tRNA) half
cgaacccgggcct

SEQ ID NO: 14481 - DNA, 32 bp, Artificial Sequence
  synthetic circulating small noncoding RNA (sncRNA) 5' transfer RNA (tRNA) half
tctcgcccaacgtggggctcgaacccacgacc

SEQ ID NO: 14482 - DNA, 24 bp, Artificial Sequence
  synthetic circulating small noncoding RNA (sncRNA) 5' transfer RNA (tRNA) half
taagacttaaaaccttgttcccag

SEQ ID NO: 14483 - DNA, 36 bp, Artificial Sequence
  synthetic circulating small noncoding RNA (sncRNA) 5' transfer RNA (tRNA) half
ttccgactccgccgggactcgaacccggaacctttg

SEQ ID NO: 14484 - DNA, 25 bp, Artificial Sequence
  synthetic circulating small noncoding RNA (sncRNA) 5' transfer RNA (tRNA) half
gtttcgatccatcgacctctgggtt

SEQ ID NO: 14485 - DNA, 20 bp, Artificial Sequence
  synthetic circulating small noncoding RNA (sncRNA) 5' transfer RNA (tRNA) half
aaccagggctcgtccgggat

SEQ ID NO: 14486 - DNA, 12 bp, Artificial Sequence
  synthetic circulating small noncoding RNA (sncRNA) 5' transfer RNA (tRNA) half
ccctgttcgggc

SEQ ID NO: 14487 - DNA, 25 bp, Artificial Sequence
  synthetic circulating small noncoding RNA (sncRNA) 5' transfer RNA (tRNA) half
tggtggtctagtggttaggattcgg

SEQ ID NO: 14488 - DNA, 34 bp, Artificial Sequence
  synthetic circulating small noncoding RNA (sncRNA) 5' transfer RNA (tRNA) half
gccgaaacccgggattgaaccagggacctttaga

SEQ ID NO: 14489 - DNA, 38 bp, Artificial Sequence
  synthetic circulating small noncoding RNA (sncRNA) 5' transfer RNA (tRNA) half
atggttagcactctggactctgaatccagcgatccgag

SEQ ID NO: 14490 - DNA, 34 bp, Artificial Sequence
  synthetic circulating small noncoding RNA (sncRNA) 5' transfer RNA (tRNA) half
accccgacgtgatttgaacacgcaaccttctgat

SEQ ID NO: 14491 - DNA, 17 bp, Artificial Sequence
  synthetic circulating small noncoding RNA (sncRNA) 5' transfer RNA (tRNA) half
cgagtcccatctgggtc

SEQ ID NO: 14492 - DNA, 21 bp, Artificial Sequence
  synthetic circulating small noncoding RNA (sncRNA) 5' transfer RNA (tRNA) half
cggatcagaagattgcaggtt

SEQ ID NO: 14493 - DNA, 23 bp, Artificial Sequence
  synthetic circulating small noncoding RNA (sncRNA) 5' transfer RNA (tRNA) half
atgtagctcagtggtagagcgca

SEQ ID NO: 14494 - DNA, 15 bp, Artificial Sequence
  synthetic circulating small noncoding RNA (sncRNA) 5' transfer RNA (tRNA) half
gaacccgggccgcct

SEQ ID NO: 14495 - DNA, 17 bp, Artificial Sequence
  synthetic circulating small noncoding RNA (sncRNA) 5' transfer RNA (tRNA) half
aaagagctgaccccgac

SEQ ID NO: 14496 - DNA, 23 bp, Artificial Sequence
  synthetic circulating small noncoding RNA (sncRNA) 5' transfer RNA (tRNA) half
tgggttcgaatcccagcggggcc

SEQ ID NO: 14497 - DNA, 16 bp, Artificial Sequence
  synthetic circulating small noncoding RNA (sncRNA) 5' transfer RNA (tRNA) half
tccctgggtgggctcg

SEQ ID NO: 14498 - DNA, 31 bp, Artificial Sequence
  synthetic circulating small noncoding RNA (sncRNA) 5' transfer RNA (tRNA) half
ccttcgagccggattcgaaccagcgacctaa

SEQ ID NO: 14499 - DNA, 21 bp, Artificial Sequence
  synthetic circulating small noncoding RNA (sncRNA) 5' transfer RNA (tRNA) half
agaatcatacccctagaccaa

SEQ ID NO: 14500 - DNA, 30 bp, Artificial Sequence
  synthetic circulating small noncoding RNA (sncRNA) 5' transfer RNA (tRNA) half
tgccgaaacccgggatcgaaccagggacct

SEQ ID NO: 14501 - DNA, 19 bp, Artificial Sequence
  synthetic circulating small noncoding RNA (sncRNA) 5' transfer RNA (tRNA) half
ctcgtccgggatttgaacc

SEQ ID NO: 14502 - DNA, 18 bp, Artificial Sequence
  synthetic circulating small noncoding RNA (sncRNA) 5' transfer RNA (tRNA) half
gttaggcgaatgtgataa

SEQ ID NO: 14503 - DNA, 22 bp, Artificial Sequence
  synthetic circulating small noncoding RNA (sncRNA) 5' transfer RNA (tRNA) half
caaagtccagagtgctaaccat

SEQ ID NO: 14504 - DNA, 24 bp, Artificial Sequence
  synthetic circulating small noncoding RNA (sncRNA) 5' transfer RNA (tRNA) half
gcccgtacggggatcgaacccgcg

SEQ ID NO: 14505 - DNA, 27 bp, Artificial Sequence
  synthetic circulating small noncoding RNA (sncRNA) 5' transfer RNA (tRNA) half
tgccggggatcgaacccggggcctcat

SEQ ID NO: 14506 - DNA, 24 bp, Artificial Sequence
  synthetic circulating small noncoding RNA (sncRNA) 5' transfer RNA (tRNA) half
gacaggcgctttaaccaactaagc

SEQ ID NO: 14507 - DNA, 18 bp, Artificial Sequence
  synthetic circulating small noncoding RNA (sncRNA) 5' transfer RNA (tRNA) half
aggtcgatggatcgaaac

SEQ ID NO: 14508 - DNA, 10 bp, Artificial Sequence
  synthetic circulating small noncoding RNA (sncRNA) 5' transfer RNA (tRNA) half
cgagcggtct

SEQ ID NO: 14509 - DNA, 9 bp, Artificial Sequence
  synthetic circulating small noncoding RNA (sncRNA) 5' transfer RNA (tRNA) half
gccgaaacc

SEQ ID NO: 14510 - DNA, 20 bp, Artificial Sequence
  synthetic circulating small noncoding RNA (sncRNA) 5' transfer RNA (tRNA) half
aacccgggacctctcgcacc

SEQ ID NO: 14511 - DNA, 30 bp, Artificial Sequence
  synthetic circulating small noncoding RNA (sncRNA) 5' transfer RNA (tRNA) half
ccatagtgtagcggttatcacgtctgcttt

SEQ ID NO: 14512 - DNA, 26 bp, Artificial Sequence
  synthetic circulating small noncoding RNA (sncRNA) 5' transfer RNA (tRNA) half
ccgtagtgtagtggttatcacgttcg

SEQ ID NO: 14513 - DNA, 24 bp, Artificial Sequence
  synthetic circulating small noncoding RNA (sncRNA) 5' transfer RNA (tRNA) half
agttcgatcctcacctggagcact

SEQ ID NO: 14514 - DNA, 39 bp, Artificial Sequence
  synthetic circulating small noncoding RNA (sncRNA) 5' transfer RNA (tRNA) half
cttgaccccgacgtgacttgaacacgcaaccttctgatc

SEQ ID NO: 14515 - DNA, 32 bp, Artificial Sequence
  synthetic circulating small noncoding RNA (sncRNA) 5' transfer RNA (tRNA) half
caccgctgggattcgaacccaggatctcctgt

SEQ ID NO: 14516 - DNA, 12 bp, Artificial Sequence
  synthetic circulating small noncoding RNA (sncRNA) 5' transfer RNA (tRNA) half
cgcgtgacaggc

SEQ ID NO: 14517 - DNA, 12 bp, Artificial Sequence
  synthetic circulating small noncoding RNA (sncRNA) 5' transfer RNA (tRNA) half
cagcgatccgag

SEQ ID NO: 14518 - DNA, 22 bp, Artificial Sequence
  synthetic circulating small noncoding RNA (sncRNA) 5' transfer RNA (tRNA) half
agtcggtagagcatcagacttt

SEQ ID NO: 14519 - DNA, 17 bp, Artificial Sequence
  synthetic circulating small noncoding RNA (sncRNA) 5' transfer RNA (tRNA) half
cacgtctgctttacacg

SEQ ID NO: 14520 - DNA, 13 bp, Artificial Sequence
  synthetic circulating small noncoding RNA (sncRNA) 5' transfer RNA (tRNA) half
acaggcggggata

SEQ ID NO: 14521 - DNA, 33 bp, Artificial Sequence
  synthetic circulating small noncoding RNA (sncRNA) 5' transfer RNA (tRNA) half
cgttccttcgagccggattcgaaccagcgacct

SEQ ID NO: 14522 - DNA, 36 bp, Artificial Sequence
  synthetic circulating small noncoding RNA (sncRNA) 5' transfer RNA (tRNA) half
aggccccagcgagatttgaactcgcgacccctggtt

SEQ ID NO: 14523 - DNA, 14 bp, Artificial Sequence
  synthetic circulating small noncoding RNA (sncRNA) 5' transfer RNA (tRNA) half
tcccccgaccgctc

SEQ ID NO: 14524 - DNA, 23 bp, Artificial Sequence
  synthetic circulating small noncoding RNA (sncRNA) 5' transfer RNA (tRNA) half
aatcctaaccgctagaccatgtg

SEQ ID NO: 14525 - DNA, 37 bp, Artificial Sequence
  synthetic circulating small noncoding RNA (sncRNA) 5' transfer RNA (tRNA) half
tgaaaaccaggaatcctaaccgctagaccatatggga

SEQ ID NO: 14526 - DNA, 24 bp, Artificial Sequence
  synthetic circulating small noncoding RNA (sncRNA) 5' transfer RNA (tRNA) half
ccttaaccactcggccaccgtgac

SEQ ID NO: 14527 - DNA, 26 bp, Artificial Sequence
  synthetic circulating small noncoding RNA (sncRNA) 5' transfer RNA (tRNA) half
cctcagtggtctggggtgcaggcttc

SEQ ID NO: 14528 - DNA, 28 bp, Artificial Sequence
  synthetic circulating small noncoding RNA (sncRNA) 5' transfer RNA (tRNA) half
acgacgaggatgggattcgaacccacgc

SEQ ID NO: 14529 - DNA, 19 bp, Artificial Sequence
  synthetic circulating small noncoding RNA (sncRNA) 5' transfer RNA (tRNA) half
tgcaggttcgagtcctgcc

SEQ ID NO: 14530 - DNA, 44 bp, Artificial Sequence
  synthetic circulating small noncoding RNA (sncRNA) 5' transfer RNA (tRNA) half
gtcagaagtgggattcgaacccacgcctccattcggagaccaga

SEQ ID NO: 14531 - DNA, 13 bp, Artificial Sequence
  synthetic circulating small noncoding RNA (sncRNA) 5' transfer RNA (tRNA) half
gattcgaacctgc

SEQ ID NO: 14532 - DNA, 16 bp, Artificial Sequence
  synthetic circulating small noncoding RNA (sncRNA) 5' transfer RNA (tRNA) half
ggggtatgattctcgg

SEQ ID NO: 14533 - DNA, 39 bp, Artificial Sequence
  synthetic circulating small noncoding RNA (sncRNA) 5' transfer RNA (tRNA) half
gatgccccgtgtgaggatcgaactcacgaccttcagatt

SEQ ID NO: 14534 - DNA, 36 bp, Artificial Sequence
  synthetic circulating small noncoding RNA (sncRNA) 5' transfer RNA (tRNA) half
cggttatcacgtctgctttacacgcagaaggtcctg

SEQ ID NO: 14535 - DNA, 17 bp, Artificial Sequence
  synthetic circulating small noncoding RNA (sncRNA) 5' transfer RNA (tRNA) half
gttgtcaggagtgggat

SEQ ID NO: 14536 - DNA, 8 bp, Artificial Sequence
  synthetic circulating small noncoding RNA (sncRNA) 5' transfer RNA (tRNA) half
accggcca

SEQ ID NO: 14537 - DNA, 21 bp, Artificial Sequence
  synthetic circulating small noncoding RNA (sncRNA) 5' transfer RNA (tRNA) half
ctgtggaggatgtgggcatcg

SEQ ID NO: 14538 - DNA, 9 bp, Artificial Sequence
  synthetic circulating small noncoding RNA (sncRNA) 5' transfer RNA (tRNA) half
cgcgttcgg

SEQ ID NO: 14539 - DNA, 20 bp, Artificial Sequence
  synthetic circulating small noncoding RNA (sncRNA) 5' transfer RNA (tRNA) half
agtcagacgcgttatccatt

SEQ ID NO: 14540 - DNA, 18 bp, Artificial Sequence
  synthetic circulating small noncoding RNA (sncRNA) 5' transfer RNA (tRNA) half
tccctgggtgggctcgaa

SEQ ID NO: 14541 - DNA, 12 bp, Artificial Sequence
  synthetic circulating small noncoding RNA (sncRNA) 5' transfer RNA (tRNA) half
aactcggatcgc

SEQ ID NO: 14542 - DNA, 14 bp, Artificial Sequence
  synthetic circulating small noncoding RNA (sncRNA) 5' transfer RNA (tRNA) half
tccggctcgaagga

SEQ ID NO: 14543 - DNA, 33 bp, Artificial Sequence
  synthetic circulating small noncoding RNA (sncRNA) 5' transfer RNA (tRNA) half
tgaccccgacgtgattcgaacacgcagccttct

SEQ ID NO: 14544 - DNA, 23 bp, Artificial Sequence
  synthetic circulating small noncoding RNA (sncRNA) 5' transfer RNA (tRNA) half
tctaccgactgagctatccaggc

SEQ ID NO: 14545 - DNA, 19 bp, Artificial Sequence
  synthetic circulating small noncoding RNA (sncRNA) 5' transfer RNA (tRNA) half
tgcacgaggccccgggttc

SEQ ID NO: 14546 - DNA, 35 bp, Artificial Sequence
  synthetic circulating small noncoding RNA (sncRNA) 5' transfer RNA (tRNA) half
agtggttaggattcggcgctctcaccgccgcggcc

SEQ ID NO: 14547 - DNA, 28 bp, Artificial Sequence
  synthetic circulating small noncoding RNA (sncRNA) 5' transfer RNA (tRNA) half
ggcccagcacgcttccgctgcgccactc

SEQ ID NO: 14548 - DNA, 20 bp, Artificial Sequence
  synthetic circulating small noncoding RNA (sncRNA) 5' transfer RNA (tRNA) half
aaaaccgactctggtgggat

SEQ ID NO: 14549 - DNA, 18 bp, Artificial Sequence
  synthetic circulating small noncoding RNA (sncRNA) 5' transfer RNA (tRNA) half
agcggttatcacgtctgc

SEQ ID NO: 14550 - DNA, 44 bp, Artificial Sequence
  synthetic circulating small noncoding RNA (sncRNA) 5' transfer RNA (tRNA) half
ctggcagcggtgggattcgaacccacgcccccgaagagactgga

SEQ ID NO: 14551 - DNA, 16 bp, Artificial Sequence
  synthetic circulating small noncoding RNA (sncRNA) 5' transfer RNA (tRNA) half
cccgggccgcggcggt

SEQ ID NO: 14552 - DNA, 36 bp, Artificial Sequence
  synthetic circulating small noncoding RNA (sncRNA) 5' transfer RNA (tRNA) half
cgtccctgggtgggctcgaaccaccaacctttcggt

SEQ ID NO: 14553 - DNA, 29 bp, Artificial Sequence
  synthetic circulating small noncoding RNA (sncRNA) 5' transfer RNA (tRNA) half
gttcccacaccgggagtcgaacccgggcc

SEQ ID NO: 14554 - DNA, 24 bp, Artificial Sequence
  synthetic circulating small noncoding RNA (sncRNA) 5' transfer RNA (tRNA) half
aaccctcaatcttctgatccgaag

SEQ ID NO: 14555 - DNA, 37 bp, Artificial Sequence
  synthetic circulating small noncoding RNA (sncRNA) 5' transfer RNA (tRNA) half
cgtggcaggcgagaattctaccactgaaccaccaatg

SEQ ID NO: 14556 - DNA, 7 bp, Artificial Sequence
  synthetic circulating small noncoding RNA (sncRNA) 5' transfer RNA (tRNA) half
ggctcgt

SEQ ID NO: 14557 - DNA, 28 bp, Artificial Sequence
  synthetic circulating small noncoding RNA (sncRNA) 5' transfer RNA (tRNA) half
caacctcggttcgaatccgagtcacggc

SEQ ID NO: 14558 - DNA, 18 bp, Artificial Sequence
  synthetic circulating small noncoding RNA (sncRNA) 5' transfer RNA (tRNA) half
ctagtggttaggattcgg

SEQ ID NO: 14559 - DNA, 44 bp, Artificial Sequence
  synthetic circulating small noncoding RNA (sncRNA) 5' transfer RNA (tRNA) half
tttcgcgtgtgaggcgaacgtgataaccactacactacggaaac

SEQ ID NO: 14560 - DNA, 21 bp, Artificial Sequence
  synthetic circulating small noncoding RNA (sncRNA) 5' transfer RNA (tRNA) half
tagtggtatcatgcaagattc

SEQ ID NO: 14561 - DNA, 29 bp, Artificial Sequence
  synthetic circulating small noncoding RNA (sncRNA) 5' transfer RNA (tRNA) half
tcaaatgctctaccactgagctatacccc

SEQ ID NO: 14562 - DNA, 37 bp, Artificial Sequence
  synthetic circulating small noncoding RNA (sncRNA) 5' transfer RNA (tRNA) half
acaggagatcctgggttcgaatcccagtggggcctgg

SEQ ID NO: 14563 - DNA, 20 bp, Artificial Sequence
  synthetic circulating small noncoding RNA (sncRNA) 5' transfer RNA (tRNA) half
gccttagaccactcggccac

SEQ ID NO: 14564 - DNA, 18 bp, Artificial Sequence
  synthetic circulating small noncoding RNA (sncRNA) 5' transfer RNA (tRNA) half
gtcgagccagccaggagt

SEQ ID NO: 14565 - DNA, 19 bp, Artificial Sequence
  synthetic circulating small noncoding RNA (sncRNA) 5' transfer RNA (tRNA) half
gaccgctcggccatcctga

SEQ ID NO: 14566 - DNA, 10 bp, Artificial Sequence
  synthetic circulating small noncoding RNA (sncRNA) 5' transfer RNA (tRNA) half
aggattcggc

SEQ ID NO: 14567 - DNA, 15 bp, Artificial Sequence
  synthetic circulating small noncoding RNA (sncRNA) 5' transfer RNA (tRNA) half
agaggtagcgggatc

SEQ ID NO: 14568 - DNA, 11 bp, Artificial Sequence
  synthetic circulating small noncoding RNA (sncRNA) 5' transfer RNA (tRNA) half
cggactcgaac

SEQ ID NO: 14569 - DNA, 23 bp, Artificial Sequence
  synthetic circulating small noncoding RNA (sncRNA) 5' transfer RNA (tRNA) half
aggccccgggttcaatccccggc

SEQ ID NO: 14570 - DNA, 13 bp, Artificial Sequence
  synthetic circulating small noncoding RNA (sncRNA) 5' transfer RNA (tRNA) half
gaacccacgcctc

SEQ ID NO: 14571 - DNA, 15 bp, Artificial Sequence
  synthetic circulating small noncoding RNA (sncRNA) 5' transfer RNA (tRNA) half
gtggttatcacgttc

SEQ ID NO: 14572 - DNA, 22 bp, Artificial Sequence
  synthetic circulating small noncoding RNA (sncRNA) 5' transfer RNA (tRNA) half
cgtgtgaggcgaacgtgataac

SEQ ID NO: 14573 - DNA, 16 bp, Artificial Sequence
  synthetic circulating small noncoding RNA (sncRNA) 5' transfer RNA (tRNA) half
cttagaccgctcggcc

SEQ ID NO: 14574 - DNA, 14 bp, Artificial Sequence
  synthetic circulating small noncoding RNA (sncRNA) 5' transfer RNA (tRNA) half
cccggcatctccac

SEQ ID NO: 14575 - DNA, 18 bp, Artificial Sequence
  synthetic circulating small noncoding RNA (sncRNA) 5' transfer RNA (tRNA) half
tcagacgcgttatccatt

SEQ ID NO: 14576 - DNA, 25 bp, Artificial Sequence
  synthetic circulating small noncoding RNA (sncRNA) 5' transfer RNA (tRNA) half
cggttatcacgtctgctttacacgc

SEQ ID NO: 14577 - DNA, 22 bp, Artificial Sequence
  synthetic circulating small noncoding RNA (sncRNA) 5' transfer RNA (tRNA) half
tagaactgtgcattggccggga

SEQ ID NO: 14578 - DNA, 17 bp, Artificial Sequence
  synthetic circulating small noncoding RNA (sncRNA) 5' transfer RNA (tRNA) half
ccactcggccatcgctg

SEQ ID NO: 14579 - DNA, 15 bp, Artificial Sequence
  synthetic circulating small noncoding RNA (sncRNA) 5' transfer RNA (tRNA) half
cagtcggtagagcat

SEQ ID NO: 14580 - DNA, 24 bp, Artificial Sequence
  synthetic circulating small noncoding RNA (sncRNA) 5' transfer RNA (tRNA) half
aaccggggacctcttgatctgcag

SEQ ID NO: 14581 - DNA, 9 bp, Artificial Sequence
  synthetic circulating small noncoding RNA (sncRNA) 5' transfer RNA (tRNA) half
cccgggcct

SEQ ID NO: 14582 - DNA, 9 bp, Artificial Sequence
  synthetic circulating small noncoding RNA (sncRNA) 5' transfer RNA (tRNA) half
ccccgtcgg

SEQ ID NO: 14583 - DNA, 36 bp, Artificial Sequence
  synthetic circulating small noncoding RNA (sncRNA) 5' transfer RNA (tRNA) half
agtcagacgcgctaccgttgcgccacgaggccggcc

SEQ ID NO: 14584 - DNA, 7 bp, Artificial Sequence
  synthetic circulating small noncoding RNA (sncRNA) 5' transfer RNA (tRNA) half
cgcctgc

SEQ ID NO: 14585 - DNA, 22 bp, Artificial Sequence
  synthetic circulating small noncoding RNA (sncRNA) 5' transfer RNA (tRNA) half
ctccccgcgcaggttcgaatcc

SEQ ID NO: 14586 - DNA, 18 bp, Artificial Sequence
  synthetic circulating small noncoding RNA (sncRNA) 5' transfer RNA (tRNA) half
gcttgagtctggcgcctt

SEQ ID NO: 14587 - DNA, 22 bp, Artificial Sequence
  synthetic circulating small noncoding RNA (sncRNA) 5' transfer RNA (tRNA) half
gggggtatagctcaggggtgga

SEQ ID NO: 14588 - DNA, 31 bp, Artificial Sequence
  synthetic circulating small noncoding RNA (sncRNA) 5' transfer RNA (tRNA) half
ccaaggtcgcgggttcgatccccgtacgggc

SEQ ID NO: 14589 - DNA, 8 bp, Artificial Sequence
  synthetic circulating small noncoding RNA (sncRNA) 5' transfer RNA (tRNA) half
tccgccgg

SEQ ID NO: 14590 - DNA, 8 bp, Artificial Sequence
  synthetic circulating small noncoding RNA (sncRNA) 5' transfer RNA (tRNA) half
tcgtccga

SEQ ID NO: 14591 - DNA, 33 bp, Artificial Sequence
  synthetic circulating small noncoding RNA (sncRNA) 5' transfer RNA (tRNA) half
ccacatggtctagcggttaggattcctggtttt

SEQ ID NO: 14592 - DNA, 18 bp, Artificial Sequence
  synthetic circulating small noncoding RNA (sncRNA) 5' transfer RNA (tRNA) half
accccgacgtgatttgaa

SEQ ID NO: 14593 - DNA, 36 bp, Artificial Sequence
  synthetic circulating small noncoding RNA (sncRNA) 5' transfer RNA (tRNA) half
tttccctgaccgggaatcgaacccgggccgcggcgg

SEQ ID NO: 14594 - DNA, 23 bp, Artificial Sequence
  synthetic circulating small noncoding RNA (sncRNA) 5' transfer RNA (tRNA) half
cgggccgcctgggtgaaaaccag

SEQ ID NO: 14595 - DNA, 14 bp, Artificial Sequence
  synthetic circulating small noncoding RNA (sncRNA) 5' transfer RNA (tRNA) half
gagtatccccgcct

SEQ ID NO: 14596 - DNA, 26 bp, Artificial Sequence
  synthetic circulating small noncoding RNA (sncRNA) 5' transfer RNA (tRNA) half
ttgtgggttcgagccccacattgggc

SEQ ID NO: 14597 - DNA, 18 bp, Artificial Sequence
  synthetic circulating small noncoding RNA (sncRNA) 5' transfer RNA (tRNA) half
tggcccgtacggggatcg

SEQ ID NO: 14598 - DNA, 18 bp, Artificial Sequence
  synthetic circulating small noncoding RNA (sncRNA) 5' transfer RNA (tRNA) half
aacccgcgaccttggcgt

SEQ ID NO: 14599 - DNA, 22 bp, Artificial Sequence
  synthetic circulating small noncoding RNA (sncRNA) 5' transfer RNA (tRNA) half
gcacacgtcgagccagccagga

SEQ ID NO: 14600 - DNA, 13 bp, Artificial Sequence
  synthetic circulating small noncoding RNA (sncRNA) 5' transfer RNA (tRNA) half
ttccggctcgaag

SEQ ID NO: 14601 - DNA, 32 bp, Artificial Sequence
  synthetic circulating small noncoding RNA (sncRNA) 5' transfer RNA (tRNA) half
gtttccgcccggtttcgaaccggggacctttc

SEQ ID NO: 14602 - DNA, 14 bp, Artificial Sequence
  synthetic circulating small noncoding RNA (sncRNA) 5' transfer RNA (tRNA) half
acgggttcgaaccc

SEQ ID NO: 14603 - DNA, 16 bp, Artificial Sequence
  synthetic circulating small noncoding RNA (sncRNA) 5' transfer RNA (tRNA) half
gctctaccgactgagc

SEQ ID NO: 14604 - DNA, 27 bp, Artificial Sequence
  synthetic circulating small noncoding RNA (sncRNA) 5' transfer RNA (tRNA) half
gtggcaggcgagaattctaccactgaa

SEQ ID NO: 14605 - DNA, 30 bp, Artificial Sequence
  synthetic circulating small noncoding RNA (sncRNA) 5' transfer RNA (tRNA) half
ccgctgggattcgaacccaggatctcctgt

SEQ ID NO: 14606 - DNA, 42 bp, Artificial Sequence
  synthetic circulating small noncoding RNA (sncRNA) 5' transfer RNA (tRNA) half
ataacgccaaggtcgcgggttcgatccccgtacgggccacat

SEQ ID NO: 14607 - DNA, 10 bp, Artificial Sequence
  synthetic circulating small noncoding RNA (sncRNA) 5' transfer RNA (tRNA) half
tcgcgggttc

SEQ ID NO: 14608 - DNA, 35 bp, Artificial Sequence
  synthetic circulating small noncoding RNA (sncRNA) 5' transfer RNA (tRNA) half
gttagcactctggactctgaatccagcgatccgag

SEQ ID NO: 14609 - DNA, 42 bp, Artificial Sequence
  synthetic circulating small noncoding RNA (sncRNA) 5' transfer RNA (tRNA) half
tagtggttaggattcggcgctctcaccgccgcggcccgggtt

SEQ ID NO: 14610 - DNA, 18 bp, Artificial Sequence
  synthetic circulating small noncoding RNA (sncRNA) 5' transfer RNA (tRNA) half
gtcagaagtgggattcga

SEQ ID NO: 14611 - DNA, 30 bp, Artificial Sequence
  synthetic circulating small noncoding RNA (sncRNA) 5' transfer RNA (tRNA) half
gcgagcgctctaccatttgagctaatcccc

SEQ ID NO: 14612 - DNA, 21 bp, Artificial Sequence
  synthetic circulating small noncoding RNA (sncRNA) 5' transfer RNA (tRNA) half
cgaatcccactcctgacagcc

SEQ ID NO: 14613 - DNA, 12 bp, Artificial Sequence
  synthetic circulating small noncoding RNA (sncRNA) 5' transfer RNA (tRNA) half
ctgccgcggtcg

SEQ ID NO: 14614 - DNA, 11 bp, Artificial Sequence
  synthetic circulating small noncoding RNA (sncRNA) 5' transfer RNA (tRNA) half
tcggccacgac

SEQ ID NO: 14615 - DNA, 33 bp, Artificial Sequence
  synthetic circulating small noncoding RNA (sncRNA) 5' transfer RNA (tRNA) half
tcgattccggctcgaaggacttcgtgcactact

SEQ ID NO: 14616 - DNA, 39 bp, Artificial Sequence
  synthetic circulating small noncoding RNA (sncRNA) 5' transfer RNA (tRNA) half
attaagagtcccatgctctaccgactgagctagccgggc

SEQ ID NO: 14617 - DNA, 30 bp, Artificial Sequence
  synthetic circulating small noncoding RNA (sncRNA) 5' transfer RNA (tRNA) half
ctcgttggtctaggggtatgattctcgctt

SEQ ID NO: 14618 - DNA, 14 bp, Artificial Sequence
  synthetic circulating small noncoding RNA (sncRNA) 5' transfer RNA (tRNA) half
taccgactgagcta

SEQ ID NO: 14619 - DNA, 21 bp, Artificial Sequence
  synthetic circulating small noncoding RNA (sncRNA) 5' transfer RNA (tRNA) half
cacaacgcagagtactaacca

SEQ ID NO: 14620 - DNA, 13 bp, Artificial Sequence
  synthetic circulating small noncoding RNA (sncRNA) 5' transfer RNA (tRNA) half
ccttcgagccgga

SEQ ID NO: 14621 - DNA, 21 bp, Artificial Sequence
  synthetic circulating small noncoding RNA (sncRNA) 5' transfer RNA (tRNA) half
gacctgtacggggaacgaacc

SEQ ID NO: 14622 - DNA, 28 bp, Artificial Sequence
  synthetic circulating small noncoding RNA (sncRNA) 5' transfer RNA (tRNA) half
gccggggatcgaacccggggcctcatac

SEQ ID NO: 14623 - DNA, 27 bp, Artificial Sequence
  synthetic circulating small noncoding RNA (sncRNA) 5' transfer RNA (tRNA) half
tggtggagatgccggggatcgaacccg

SEQ ID NO: 14624 - DNA, 20 bp, Artificial Sequence
  synthetic circulating small noncoding RNA (sncRNA) 5' transfer RNA (tRNA) half
cggtctcccgcgtgacaggc

SEQ ID NO: 14625 - DNA, 14 bp, Artificial Sequence
  synthetic circulating small noncoding RNA (sncRNA) 5' transfer RNA (tRNA) half
cgaaccccggtctc

SEQ ID NO: 14626 - DNA, 18 bp, Artificial Sequence
  synthetic circulating small noncoding RNA (sncRNA) 5' transfer RNA (tRNA) half
cgaaccgaggttgctgcg

SEQ ID NO: 14627 - DNA, 16 bp, Artificial Sequence
  synthetic circulating small noncoding RNA (sncRNA) 5' transfer RNA (tRNA) half
ccgagtggtctaaggc

SEQ ID NO: 14628 - DNA, 36 bp, Artificial Sequence
  synthetic circulating small noncoding RNA (sncRNA) 5' transfer RNA (tRNA) half
acaggagatcctgggttcgaatcccagtggggccta

SEQ ID NO: 14629 - DNA, 23 bp, Artificial Sequence
  synthetic circulating small noncoding RNA (sncRNA) 5' transfer RNA (tRNA) half
ttctaccattgaaccaccaatgc

SEQ ID NO: 14630 - DNA, 15 bp, Artificial Sequence
  synthetic circulating small noncoding RNA (sncRNA) 5' transfer RNA (tRNA) half
gccccacgttgggcg

SEQ ID NO: 14631 - DNA, 36 bp, Artificial Sequence
  synthetic circulating small noncoding RNA (sncRNA) 5' transfer RNA (tRNA) half
tagtgtagtggttatcacgttcgcctcacacgcgaa

SEQ ID NO: 14632 - DNA, 17 bp, Artificial Sequence
  synthetic circulating small noncoding RNA (sncRNA) 5' transfer RNA (tRNA) half
atccggctcgaaggaat

SEQ ID NO: 14633 - DNA, 28 bp, Artificial Sequence
  synthetic circulating small noncoding RNA (sncRNA) 5' transfer RNA (tRNA) half
gatagctcagttggtagagcggaggact

SEQ ID NO: 14634 - DNA, 18 bp, Artificial Sequence
  synthetic circulating small noncoding RNA (sncRNA) 5' transfer RNA (tRNA) half
caatgcgctatccattgc

SEQ ID NO: 14635 - DNA, 18 bp, Artificial Sequence
  synthetic circulating small noncoding RNA (sncRNA) 5' transfer RNA (tRNA) half
ggttatcacgttcgcctc

SEQ ID NO: 14636 - DNA, 12 bp, Artificial Sequence
  synthetic circulating small noncoding RNA (sncRNA) 5' transfer RNA (tRNA) half
ggccggttagct

SEQ ID NO: 14637 - DNA, 20 bp, Artificial Sequence
  synthetic circulating small noncoding RNA (sncRNA) 5' transfer RNA (tRNA) half
ccgggccgcctgggtgaaaa

SEQ ID NO: 14638 - DNA, 32 bp, Artificial Sequence
  synthetic circulating small noncoding RNA (sncRNA) 5' transfer RNA (tRNA) half
gggggcacccggatttgaaccagggacctctt

SEQ ID NO: 14639 - DNA, 18 bp, Artificial Sequence
  synthetic circulating small noncoding RNA (sncRNA) 5' transfer RNA (tRNA) half
tggtctagtggtatgatt

SEQ ID NO: 14640 - DNA, 26 bp, Artificial Sequence
  synthetic circulating small noncoding RNA (sncRNA) 5' transfer RNA (tRNA) half
gtcgcgagttcaaatctcgctggggc

SEQ ID NO: 14641 - DNA, 21 bp, Artificial Sequence
  synthetic circulating small noncoding RNA (sncRNA) 5' transfer RNA (tRNA) half
ataaaaccgactctggtggga

SEQ ID NO: 14642 - DNA, 22 bp, Artificial Sequence
  synthetic circulating small noncoding RNA (sncRNA) 5' transfer RNA (tRNA) half
atgtgcccggctagctcagtcg

SEQ ID NO: 14643 - DNA, 38 bp, Artificial Sequence
  synthetic circulating small noncoding RNA (sncRNA) 5' transfer RNA (tRNA) half
agcgcccgaacagggacttgaaccctggaccctcagat

SEQ ID NO: 14644 - DNA, 32 bp, Artificial Sequence
  synthetic circulating small noncoding RNA (sncRNA) 5' transfer RNA (tRNA) half
acgcagcgccttagaccgctcggccatcctga

SEQ ID NO: 14645 - DNA, 26 bp, Artificial Sequence
  synthetic circulating small noncoding RNA (sncRNA) 5' transfer RNA (tRNA) half
tcacacgcgaaaggtccccggttcga

SEQ ID NO: 14646 - DNA, 30 bp, Artificial Sequence
  synthetic circulating small noncoding RNA (sncRNA) 5' transfer RNA (tRNA) half
gtgagaatcatacccctagaccaacaagcc

SEQ ID NO: 14647 - DNA, 30 bp, Artificial Sequence
  synthetic circulating small noncoding RNA (sncRNA) 5' transfer RNA (tRNA) half
tttccgtagtgtagtggtcatcacgctcgc

SEQ ID NO: 14648 - DNA, 25 bp, Artificial Sequence
  synthetic circulating small noncoding RNA (sncRNA) 5' transfer RNA (tRNA) half
ccccgtcggggaattgaaccccggt

SEQ ID NO: 14649 - DNA, 11 bp, Artificial Sequence
  synthetic circulating small noncoding RNA (sncRNA) 5' transfer RNA (tRNA) half
gagtactaacc

SEQ ID NO: 14650 - DNA, 33 bp, Artificial Sequence
  synthetic circulating small noncoding RNA (sncRNA) 5' transfer RNA (tRNA) half
cgacagagtggttcaattccacctttcgggcgg

SEQ ID NO: 14651 - DNA, 23 bp, Artificial Sequence
  synthetic circulating small noncoding RNA (sncRNA) 5' transfer RNA (tRNA) half
tctgatgctctaccgactgagct

SEQ ID NO: 14652 - DNA, 16 bp, Artificial Sequence
  synthetic circulating small noncoding RNA (sncRNA) 5' transfer RNA (tRNA) half
cgaacccgggccgcct

SEQ ID NO: 14653 - DNA, 19 bp, Artificial Sequence
  synthetic circulating small noncoding RNA (sncRNA) 5' transfer RNA (tRNA) half
cttaaccactcggccacct

SEQ ID NO: 14654 - DNA, 25 bp, Artificial Sequence
  synthetic circulating small noncoding RNA (sncRNA) 5' transfer RNA (tRNA) half
acttccctgaccgggaatcgaaccc

SEQ ID NO: 14655 - DNA, 22 bp, Artificial Sequence
  synthetic circulating small noncoding RNA (sncRNA) 5' transfer RNA (tRNA) half
ttcgatccatcgacctctgggt

SEQ ID NO: 14656 - DNA, 22 bp, Artificial Sequence
  synthetic circulating small noncoding RNA (sncRNA) 5' transfer RNA (tRNA) half
actctgaatccagcgatccgag

SEQ ID NO: 14657 - DNA, 42 bp, Artificial Sequence
  synthetic circulating small noncoding RNA (sncRNA) 5' transfer RNA (tRNA) half
tttccgtagtgtagtggttatcacgttcgcctcacacgcgaa

SEQ ID NO: 14658 - DNA, 15 bp, Artificial Sequence
  synthetic circulating small noncoding RNA (sncRNA) 5' transfer RNA (tRNA) half
aactcggatcgctgg

SEQ ID NO: 14659 - DNA, 32 bp, Artificial Sequence
  synthetic circulating small noncoding RNA (sncRNA) 5' transfer RNA (tRNA) half
cctgaacagggacttgaaccctggaccctcag

SEQ ID NO: 14660 - DNA, 13 bp, Artificial Sequence
  synthetic circulating small noncoding RNA (sncRNA) 5' transfer RNA (tRNA) half
actcggccatcgc

SEQ ID NO: 14661 - DNA, 23 bp, Artificial Sequence
  synthetic circulating small noncoding RNA (sncRNA) 5' transfer RNA (tRNA) half
ggcaagaattctaccactgaacc

SEQ ID NO: 14662 - DNA, 24 bp, Artificial Sequence
  synthetic circulating small noncoding RNA (sncRNA) 5' transfer RNA (tRNA) half
gcggcccgggttcgactcccggta

SEQ ID NO: 14663 - DNA, 42 bp, Artificial Sequence
  synthetic circulating small noncoding RNA (sncRNA) 5' transfer RNA (tRNA) half
cccattcttgcgacccgggttcgattcccgggcggcgcatgt

SEQ ID NO: 14664 - DNA, 23 bp, Artificial Sequence
  synthetic circulating small noncoding RNA (sncRNA) 5' transfer RNA (tRNA) half
gtataggggttagtactctgcgt

SEQ ID NO: 14665 - DNA, 9 bp, Artificial Sequence
  synthetic circulating small noncoding RNA (sncRNA) 5' transfer RNA (tRNA) half
cgacgagga

SEQ ID NO: 14666 - DNA, 28 bp, Artificial Sequence
  synthetic circulating small noncoding RNA (sncRNA) 5' transfer RNA (tRNA) half
gtcgctggttcgactccggctcgaagga

SEQ ID NO: 14667 - DNA, 37 bp, Artificial Sequence
  synthetic circulating small noncoding RNA (sncRNA) 5' transfer RNA (tRNA) half
ttcttgcgacccgggttcgattcccgggcggcgcatg

SEQ ID NO: 14668 - DNA, 25 bp, Artificial Sequence
  synthetic circulating small noncoding RNA (sncRNA) 5' transfer RNA (tRNA) half
gccgggaatcgaacccgggcctccc

SEQ ID NO: 14669 - DNA, 23 bp, Artificial Sequence
  synthetic circulating small noncoding RNA (sncRNA) 5' transfer RNA (tRNA) half
ggttcgagtcccatctgggtcgc

SEQ ID NO: 14670 - DNA, 27 bp, Artificial Sequence
  synthetic circulating small noncoding RNA (sncRNA) 5' transfer RNA (tRNA) half
caggcggcccgggttcgactcccggta

SEQ ID NO: 14671 - DNA, 24 bp, Artificial Sequence
  synthetic circulating small noncoding RNA (sncRNA) 5' transfer RNA (tRNA) half
gttcgattccccgacggggagtct

SEQ ID NO: 14672 - DNA, 26 bp, Artificial Sequence
  synthetic circulating small noncoding RNA (sncRNA) 5' transfer RNA (tRNA) half
ccgggttcgactcccggtgtgggaac

SEQ ID NO: 14673 - DNA, 24 bp, Artificial Sequence
  synthetic circulating small noncoding RNA (sncRNA) 5' transfer RNA (tRNA) half
ggtctaggggtatgattctcgctt

SEQ ID NO: 14674 - DNA, 23 bp, Artificial Sequence
  synthetic circulating small noncoding RNA (sncRNA) 5' transfer RNA (tRNA) half
gtgtagtggttagcgcgttcgcc

SEQ ID NO: 14675 - DNA, 21 bp, Artificial Sequence
  synthetic circulating small noncoding RNA (sncRNA) 5' transfer RNA (tRNA) half
tgtcaggagtgggattcgaac

SEQ ID NO: 14676 - DNA, 11 bp, Artificial Sequence
  synthetic circulating small noncoding RNA (sncRNA) 5' transfer RNA (tRNA) half
gaaccagggac

SEQ ID NO: 14677 - DNA, 23 bp, Artificial Sequence
  synthetic circulating small noncoding RNA (sncRNA) 5' transfer RNA (tRNA) half
tgaatccagcgatccgagttcaa

SEQ ID NO: 14678 - DNA, 33 bp, Artificial Sequence
  synthetic circulating small noncoding RNA (sncRNA) 5' transfer RNA (tRNA) half
tgtcagaagtgggattcgaacccacgcctccag

SEQ ID NO: 14679 - DNA, 13 bp, Artificial Sequence
  synthetic circulating small noncoding RNA (sncRNA) 5' transfer RNA (tRNA) half
cgaacccgcgacc

SEQ ID NO: 14680 - DNA, 22 bp, Artificial Sequence
  synthetic circulating small noncoding RNA (sncRNA) 5' transfer RNA (tRNA) half
tcgagccagccaggagtcgaac

SEQ ID NO: 14681 - DNA, 26 bp, Artificial Sequence
  synthetic circulating small noncoding RNA (sncRNA) 5' transfer RNA (tRNA) half
ctaccgactgagctagccgggcgctg

SEQ ID NO: 14682 - DNA, 17 bp, Artificial Sequence
  synthetic circulating small noncoding RNA (sncRNA) 5' transfer RNA (tRNA) half
gataaccactacactac

SEQ ID NO: 14683 - DNA, 16 bp, Artificial Sequence
  synthetic circulating small noncoding RNA (sncRNA) 5' transfer RNA (tRNA) half
cctgtcacgcgggaga

SEQ ID NO: 14684 - DNA, 21 bp, Artificial Sequence
  synthetic circulating small noncoding RNA (sncRNA) 5' transfer RNA (tRNA) half
tgaccccgacgtgacttgaac

SEQ ID NO: 14685 - DNA, 17 bp, Artificial Sequence
  synthetic circulating small noncoding RNA (sncRNA) 5' transfer RNA (tRNA) half
tcctcgttagtatagtg

SEQ ID NO: 14686 - DNA, 16 bp, Artificial Sequence
  synthetic circulating small noncoding RNA (sncRNA) 5' transfer RNA (tRNA) half
tggtagagcgcatgct

SEQ ID NO: 14687 - DNA, 28 bp, Artificial Sequence
  synthetic circulating small noncoding RNA (sncRNA) 5' transfer RNA (tRNA) half
gcggcggtgagagcgccgaatcctaacc

SEQ ID NO: 14688 - DNA, 16 bp, Artificial Sequence
  synthetic circulating small noncoding RNA (sncRNA) 5' transfer RNA (tRNA) half
gaacccacgcctccga

SEQ ID NO: 14689 - DNA, 14 bp, Artificial Sequence
  synthetic circulating small noncoding RNA (sncRNA) 5' transfer RNA (tRNA) half
gaacccccaatctt

SEQ ID NO: 14690 - DNA, 16 bp, Artificial Sequence
  synthetic circulating small noncoding RNA (sncRNA) 5' transfer RNA (tRNA) half
aacccacaacctttga

SEQ ID NO: 14691 - DNA, 25 bp, Artificial Sequence
  synthetic circulating small noncoding RNA (sncRNA) 5' transfer RNA (tRNA) half
cgggttcgattcccggtcagggaaa

SEQ ID NO: 14692 - DNA, 17 bp, Artificial Sequence
  synthetic circulating small noncoding RNA (sncRNA) 5' transfer RNA (tRNA) half
ggctaggattcggcgct

SEQ ID NO: 14693 - DNA, 17 bp, Artificial Sequence
  synthetic circulating small noncoding RNA (sncRNA) 5' transfer RNA (tRNA) half
cgaacccacgcctccag

SEQ ID NO: 14694 - DNA, 20 bp, Artificial Sequence
  synthetic circulating small noncoding RNA (sncRNA) 5' transfer RNA (tRNA) half
cagagtccagagtgctaacc

SEQ ID NO: 14695 - DNA, 23 bp, Artificial Sequence
  synthetic circulating small noncoding RNA (sncRNA) 5' transfer RNA (tRNA) half
cccattcttgcgacccgggttcg

SEQ ID NO: 14696 - DNA, 18 bp, Artificial Sequence
  synthetic circulating small noncoding RNA (sncRNA) 5' transfer RNA (tRNA) half
cccctgagctatggagcc

SEQ ID NO: 14697 - DNA, 35 bp, Artificial Sequence
  synthetic circulating small noncoding RNA (sncRNA) 5' transfer RNA (tRNA) half
gaaggtcctgggttcgagccccagtggaaccacgt

SEQ ID NO: 14698 - DNA, 22 bp, Artificial Sequence
  synthetic circulating small noncoding RNA (sncRNA) 5' transfer RNA (tRNA) half
aaatgccgtgactcggattcga

SEQ ID NO: 14699 - DNA, 18 bp, Artificial Sequence
  synthetic circulating small noncoding RNA (sncRNA) 5' transfer RNA (tRNA) half
cgaaccctcaatcttctg

SEQ ID NO: 14700 - DNA, 21 bp, Artificial Sequence
  synthetic circulating small noncoding RNA (sncRNA) 5' transfer RNA (tRNA) half
ccccgcgcaggttcgaatcct

SEQ ID NO: 14701 - DNA, 10 bp, Artificial Sequence
  synthetic circulating small noncoding RNA (sncRNA) 5' transfer RNA (tRNA) half
gcccggtttc

SEQ ID NO: 14702 - DNA, 23 bp, Artificial Sequence
  synthetic circulating small noncoding RNA (sncRNA) 5' transfer RNA (tRNA) half
taggttccaccgagatttgaact

SEQ ID NO: 14703 - DNA, 32 bp, Artificial Sequence
  synthetic circulating small noncoding RNA (sncRNA) 5' transfer RNA (tRNA) half
aggagatcctgggttcgaatcccagcggtgcc

SEQ ID NO: 14704 - DNA, 17 bp, Artificial Sequence
  synthetic circulating small noncoding RNA (sncRNA) 5' transfer RNA (tRNA) half
gaccgcgtggcctaatg

SEQ ID NO: 14705 - DNA, 13 bp, Artificial Sequence
  synthetic circulating small noncoding RNA (sncRNA) 5' transfer RNA (tRNA) half
cggcggtgagagc

SEQ ID NO: 14706 - DNA, 41 bp, Artificial Sequence
  synthetic circulating small noncoding RNA (sncRNA) 5' transfer RNA (tRNA) half
gagattaagagtctcatgctctaccgactgagctagccggg

SEQ ID NO: 14707 - DNA, 22 bp, Artificial Sequence
  synthetic circulating small noncoding RNA (sncRNA) 5' transfer RNA (tRNA) half
catggtcgagccagccaggagt

SEQ ID NO: 14708 - DNA, 33 bp, Artificial Sequence
  synthetic circulating small noncoding RNA (sncRNA) 5' transfer RNA (tRNA) half
gtctctgtggcgcaatcggttagcgcgttcggc

SEQ ID NO: 14709 - DNA, 20 bp, Artificial Sequence
  synthetic circulating small noncoding RNA (sncRNA) 5' transfer RNA (tRNA) half
agcatgcgctctaccactga

SEQ ID NO: 14710 - DNA, 15 bp, Artificial Sequence
  synthetic circulating small noncoding RNA (sncRNA) 5' transfer RNA (tRNA) half
tccctgttcgggcgc

SEQ ID NO: 14711 - DNA, 38 bp, Artificial Sequence
  synthetic circulating small noncoding RNA (sncRNA) 5' transfer RNA (tRNA) half
tggagggggcacccggatttgaaccagggacctcttga

SEQ ID NO: 14712 - DNA, 14 bp, Artificial Sequence
  synthetic circulating small noncoding RNA (sncRNA) 5' transfer RNA (tRNA) half
aaccaactgagcta

SEQ ID NO: 14713 - DNA, 12 bp, Artificial Sequence
  synthetic circulating small noncoding RNA (sncRNA) 5' transfer RNA (tRNA) half
tctccccgtcgg

SEQ ID NO: 14714 - DNA, 31 bp, Artificial Sequence
  synthetic circulating small noncoding RNA (sncRNA) 5' transfer RNA (tRNA) half
attcagagtccagagtgctaaccattacacc

SEQ ID NO: 14715 - DNA, 21 bp, Artificial Sequence
  synthetic circulating small noncoding RNA (sncRNA) 5' transfer RNA (tRNA) half
cccggacgagccctgtagctt

SEQ ID NO: 14716 - DNA, 12 bp, Artificial Sequence
  synthetic circulating small noncoding RNA (sncRNA) 5' transfer RNA (tRNA) half
cagtggaaccac

SEQ ID NO: 14717 - DNA, 21 bp, Artificial Sequence
  synthetic circulating small noncoding RNA (sncRNA) 5' transfer RNA (tRNA) half
ccgtgactcggattcgaaccg

SEQ ID NO: 14718 - DNA, 28 bp, Artificial Sequence
  synthetic circulating small noncoding RNA (sncRNA) 5' transfer RNA (tRNA) half
ggtccccggttcgaaaccgggcggaaac

SEQ ID NO: 14719 - DNA, 24 bp, Artificial Sequence
  synthetic circulating small noncoding RNA (sncRNA) 5' transfer RNA (tRNA) half
cttagaccactcggccatcctgac

SEQ ID NO: 14720 - DNA, 20 bp, Artificial Sequence
  synthetic circulating small noncoding RNA (sncRNA) 5' transfer RNA (tRNA) half
cgggccaggggagtttgttt

SEQ ID NO: 14721 - DNA, 28 bp, Artificial Sequence
  synthetic circulating small noncoding RNA (sncRNA) 5' transfer RNA (tRNA) half
ggcggcccgggttcgactcccggtatgg

SEQ ID NO: 14722 - DNA, 20 bp, Artificial Sequence
  synthetic circulating small noncoding RNA (sncRNA) 5' transfer RNA (tRNA) half
atggagggggcacccggatt

SEQ ID NO: 14723 - DNA, 19 bp, Artificial Sequence
  synthetic circulating small noncoding RNA (sncRNA) 5' transfer RNA (tRNA) half
agcagaggatggtttcgat

SEQ ID NO: 14724 - DNA, 26 bp, Artificial Sequence
  synthetic circulating small noncoding RNA (sncRNA) 5' transfer RNA (tRNA) half
aaagtccagagtgctaaccattacac

SEQ ID NO: 14725 - DNA, 8 bp, Artificial Sequence
  synthetic circulating small noncoding RNA (sncRNA) 5' transfer RNA (tRNA) half
ggtccccg

SEQ ID NO: 14726 - DNA, 25 bp, Artificial Sequence
  synthetic circulating small noncoding RNA (sncRNA) 5' transfer RNA (tRNA) half
gagaccggggttcgattccccgacg

SEQ ID NO: 14727 - DNA, 13 bp, Artificial Sequence
  synthetic circulating small noncoding RNA (sncRNA) 5' transfer RNA (tRNA) half
agtccaacgcctt

SEQ ID NO: 14728 - DNA, 13 bp, Artificial Sequence
  synthetic circulating small noncoding RNA (sncRNA) 5' transfer RNA (tRNA) half
gcaggattcgaac

SEQ ID NO: 14729 - DNA, 25 bp, Artificial Sequence
  synthetic circulating small noncoding RNA (sncRNA) 5' transfer RNA (tRNA) half
cctgggttcgagccccagtggaacc

SEQ ID NO: 14730 - DNA, 28 bp, Artificial Sequence
  synthetic circulating small noncoding RNA (sncRNA) 5' transfer RNA (tRNA) half
ctcccgcgtggcaggcgagaattctacc

SEQ ID NO: 14731 - DNA, 13 bp, Artificial Sequence
  synthetic circulating small noncoding RNA (sncRNA) 5' transfer RNA (tRNA) half
cggtctaaggcgc

SEQ ID NO: 14732 - DNA, 22 bp, Artificial Sequence
  synthetic circulating small noncoding RNA (sncRNA) 5' transfer RNA (tRNA) half
ggcgaatgtgataaccactaca

SEQ ID NO: 14733 - DNA, 26 bp, Artificial Sequence
  synthetic circulating small noncoding RNA (sncRNA) 5' transfer RNA (tRNA) half
tttgggtgcgagaggtcccgggttca

SEQ ID NO: 14734 - DNA, 17 bp, Artificial Sequence
  synthetic circulating small noncoding RNA (sncRNA) 5' transfer RNA (tRNA) half
atggataaggcgtctga

SEQ ID NO: 14735 - DNA, 24 bp, Artificial Sequence
  synthetic circulating small noncoding RNA (sncRNA) 5' transfer RNA (tRNA) half
tactcaccactatactaacgagga

SEQ ID NO: 14736 - DNA, 31 bp, Artificial Sequence
  synthetic circulating small noncoding RNA (sncRNA) 5' transfer RNA (tRNA) half
agggattgtgggttcgagtcccacctggggt

SEQ ID NO: 14737 - DNA, 26 bp, Artificial Sequence
  synthetic circulating small noncoding RNA (sncRNA) 5' transfer RNA (tRNA) half
gaattctaccattgaaccaccaatgc

SEQ ID NO: 14738 - DNA, 19 bp, Artificial Sequence
  synthetic circulating small noncoding RNA (sncRNA) 5' transfer RNA (tRNA) half
cgggacctctcgcacccaa

SEQ ID NO: 14739 - DNA, 26 bp, Artificial Sequence
  synthetic circulating small noncoding RNA (sncRNA) 5' transfer RNA (tRNA) half
gtgctctaccactgagctacatcccc

SEQ ID NO: 14740 - DNA, 14 bp, Artificial Sequence
  synthetic circulating small noncoding RNA (sncRNA) 5' transfer RNA (tRNA) half
gaattctcgcctgc

SEQ ID NO: 14741 - DNA, 20 bp, Artificial Sequence
  synthetic circulating small noncoding RNA (sncRNA) 5' transfer RNA (tRNA) half
aagggttccttcgagccgga

SEQ ID NO: 14742 - DNA, 30 bp, Artificial Sequence
  synthetic circulating small noncoding RNA (sncRNA) 5' transfer RNA (tRNA) half
tcgcccaacgtggggctcgaacccacgacc

SEQ ID NO: 14743 - DNA, 21 bp, Artificial Sequence
  synthetic circulating small noncoding RNA (sncRNA) 5' transfer RNA (tRNA) half
ataggggttagtactctgcgt

SEQ ID NO: 14744 - DNA, 20 bp, Artificial Sequence
  synthetic circulating small noncoding RNA (sncRNA) 5' transfer RNA (tRNA) half
taatctgagggtccagggtt

SEQ ID NO: 14745 - DNA, 39 bp, Artificial Sequence
  synthetic circulating small noncoding RNA (sncRNA) 5' transfer RNA (tRNA) half
ctcggatcgctggattcagagtccagagtgctaaccatt

SEQ ID NO: 14746 - DNA, 10 bp, Artificial Sequence
  synthetic circulating small noncoding RNA (sncRNA) 5' transfer RNA (tRNA) half
cggtcaggga

SEQ ID NO: 14747 - DNA, 21 bp, Artificial Sequence
  synthetic circulating small noncoding RNA (sncRNA) 5' transfer RNA (tRNA) half
cgaccttcagattatgagact

SEQ ID NO: 14748 - DNA, 13 bp, Artificial Sequence
  synthetic circulating small noncoding RNA (sncRNA) 5' transfer RNA (tRNA) half
ttagtactctgcg

SEQ ID NO: 14749 - DNA, 43 bp, Artificial Sequence
  synthetic circulating small noncoding RNA (sncRNA) 5' transfer RNA (tRNA) half
ggttccatagtgtagcggttatcacgtctgctttacacgcaga

SEQ ID NO: 14750 - DNA, 25 bp, Artificial Sequence
  synthetic circulating small noncoding RNA (sncRNA) 5' transfer RNA (tRNA) half
ttcagtggtagaattctcgcctgcc

SEQ ID NO: 14751 - DNA, 30 bp, Artificial Sequence
  synthetic circulating small noncoding RNA (sncRNA) 5' transfer RNA (tRNA) half
tcaaatgctctacccctgagctatacgccc

SEQ ID NO: 14752 - DNA, 21 bp, Artificial Sequence
  synthetic circulating small noncoding RNA (sncRNA) 5' transfer RNA (tRNA) half
ggttcgatccccgtacgggcc

SEQ ID NO: 14753 - DNA, 34 bp, Artificial Sequence
  synthetic circulating small noncoding RNA (sncRNA) 5' transfer RNA (tRNA) half
ctaaaggtccctggttcgatcccgggtttcggca

SEQ ID NO: 14754 - DNA, 19 bp, Artificial Sequence
  synthetic circulating small noncoding RNA (sncRNA) 5' transfer RNA (tRNA) half
tagcaccacgctctaacca

SEQ ID NO: 14755 - DNA, 30 bp, Artificial Sequence
  synthetic circulating small noncoding RNA (sncRNA) 5' transfer RNA (tRNA) half
tctgaatccagcgatccgagttcaaatctc

SEQ ID NO: 14756 - DNA, 24 bp, Artificial Sequence
  synthetic circulating small noncoding RNA (sncRNA) 5' transfer RNA (tRNA) half
gactcgaacccacaacctttgaat

SEQ ID NO: 14757 - DNA, 20 bp, Artificial Sequence
  synthetic circulating small noncoding RNA (sncRNA) 5' transfer RNA (tRNA) half
gttactggcagcggtgggat

SEQ ID NO: 14758 - DNA, 13 bp, Artificial Sequence
  synthetic circulating small noncoding RNA (sncRNA) 5' transfer RNA (tRNA) half
aggcgaacgtgat

SEQ ID NO: 14759 - DNA, 28 bp, Artificial Sequence
  synthetic circulating small noncoding RNA (sncRNA) 5' transfer RNA (tRNA) half
ggagaccggggttcgattccccgacggg

SEQ ID NO: 14760 - DNA, 21 bp, Artificial Sequence
  synthetic circulating small noncoding RNA (sncRNA) 5' transfer RNA (tRNA) half
tctcggtgggacctcatgaca

SEQ ID NO: 14761 - DNA, 11 bp, Artificial Sequence
  synthetic circulating small noncoding RNA (sncRNA) 5' transfer RNA (tRNA) half
tacgatcacgg

SEQ ID NO: 14762 - DNA, 22 bp, Artificial Sequence
  synthetic circulating small noncoding RNA (sncRNA) 5' transfer RNA (tRNA) half
aatcccaccgctgccatctttg

SEQ ID NO: 14763 - DNA, 17 bp, Artificial Sequence
  synthetic circulating small noncoding RNA (sncRNA) 5' transfer RNA (tRNA) half
agaatcatacccctaga

SEQ ID NO: 14764 - DNA, 17 bp, Artificial Sequence
  synthetic circulating small noncoding RNA (sncRNA) 5' transfer RNA (tRNA) half
ggtcccaccgagatttg

SEQ ID NO: 14765 - DNA, 17 bp, Artificial Sequence
  synthetic circulating small noncoding RNA (sncRNA) 5' transfer RNA (tRNA) half
gaacccgggtcacccgc

SEQ ID NO: 14766 - DNA, 21 bp, Artificial Sequence
  synthetic circulating small noncoding RNA (sncRNA) 5' transfer RNA (tRNA) half
tcccaccgagatttgaactcg

SEQ ID NO: 14767 - DNA, 16 bp, Artificial Sequence
  synthetic circulating small noncoding RNA (sncRNA) 5' transfer RNA (tRNA) half
gaattctaccactgaa

SEQ ID NO: 14768 - DNA, 21 bp, Artificial Sequence
  synthetic circulating small noncoding RNA (sncRNA) 5' transfer RNA (tRNA) half
aatccagcgatccgagttcaa

SEQ ID NO: 14769 - DNA, 39 bp, Artificial Sequence
  synthetic circulating small noncoding RNA (sncRNA) 5' transfer RNA (tRNA) half
aactcggatcgctggattcaaagtccagagtgctaacca

SEQ ID NO: 14770 - DNA, 26 bp, Artificial Sequence
  synthetic circulating small noncoding RNA (sncRNA) 5' transfer RNA (tRNA) half
agtctccccgtcggggaatcgaaccc

SEQ ID NO: 14771 - DNA, 17 bp, Artificial Sequence
  synthetic circulating small noncoding RNA (sncRNA) 5' transfer RNA (tRNA) half
cctggtggtctagtggt

SEQ ID NO: 14772 - DNA, 23 bp, Artificial Sequence
  synthetic circulating small noncoding RNA (sncRNA) 5' transfer RNA (tRNA) half
agtcagacgcgttatccattgcg

SEQ ID NO: 14773 - DNA, 16 bp, Artificial Sequence
  synthetic circulating small noncoding RNA (sncRNA) 5' transfer RNA (tRNA) half
cgcgtggcaggcgaga

SEQ ID NO: 14774 - DNA, 32 bp, Artificial Sequence
  synthetic circulating small noncoding RNA (sncRNA) 5' transfer RNA (tRNA) half
cgtggcaggcgagaattctaccactgaaccac

SEQ ID NO: 14775 - DNA, 21 bp, Artificial Sequence
  synthetic circulating small noncoding RNA (sncRNA) 5' transfer RNA (tRNA) half
gctggcccgtacggggatcga

SEQ ID NO: 14776 - DNA, 25 bp, Artificial Sequence
  synthetic circulating small noncoding RNA (sncRNA) 5' transfer RNA (tRNA) half
cgggaggcccgggttcgattcccgg

SEQ ID NO: 14777 - DNA, 18 bp, Artificial Sequence
  synthetic circulating small noncoding RNA (sncRNA) 5' transfer RNA (tRNA) half
tggtagaattctcgcctg

SEQ ID NO: 14778 - DNA, 18 bp, Artificial Sequence
  synthetic circulating small noncoding RNA (sncRNA) 5' transfer RNA (tRNA) half
aacctttcggttaacagc

SEQ ID NO: 14779 - DNA, 12 bp, Artificial Sequence
  synthetic circulating small noncoding RNA (sncRNA) 5' transfer RNA (tRNA) half
ggaggcccgggt

SEQ ID NO: 14780 - DNA, 18 bp, Artificial Sequence
  synthetic circulating small noncoding RNA (sncRNA) 5' transfer RNA (tRNA) half
gttcgaatcccttcgtgg

SEQ ID NO: 14781 - DNA, 20 bp, Artificial Sequence
  synthetic circulating small noncoding RNA (sncRNA) 5' transfer RNA (tRNA) half
ggttcgattcccggcccatg

SEQ ID NO: 14782 - DNA, 25 bp, Artificial Sequence
  synthetic circulating small noncoding RNA (sncRNA) 5' transfer RNA (tRNA) half
gtgatgaccactacactacggaaac

SEQ ID NO: 14783 - DNA, 20 bp, Artificial Sequence
  synthetic circulating small noncoding RNA (sncRNA) 5' transfer RNA (tRNA) half
acctagaatcttctgatccg

SEQ ID NO: 14784 - DNA, 12 bp, Artificial Sequence
  synthetic circulating small noncoding RNA (sncRNA) 5' transfer RNA (tRNA) half
ccgtgactcgga

SEQ ID NO: 14785 - DNA, 32 bp, Artificial Sequence
  synthetic circulating small noncoding RNA (sncRNA) 5' transfer RNA (tRNA) half
accccgacgtgacttgaacacgcaaccttctg

SEQ ID NO: 14786 - DNA, 28 bp, Artificial Sequence
  synthetic circulating small noncoding RNA (sncRNA) 5' transfer RNA (tRNA) half
attgtgggttcgagtcccatctggggtg

SEQ ID NO: 14787 - DNA, 32 bp, Artificial Sequence
  synthetic circulating small noncoding RNA (sncRNA) 5' transfer RNA (tRNA) half
cggttccatagtgtagcggttatcacgtctgc

SEQ ID NO: 14788 - DNA, 19 bp, Artificial Sequence
  synthetic circulating small noncoding RNA (sncRNA) 5' transfer RNA (tRNA) half
ttcagtggtagaattctcg

SEQ ID NO: 14789 - DNA, 32 bp, Artificial Sequence
  synthetic circulating small noncoding RNA (sncRNA) 5' transfer RNA (tRNA) half
cgggccgcggcggtgagagcgccgaatcctaa

SEQ ID NO: 14790 - DNA, 18 bp, Artificial Sequence
  synthetic circulating small noncoding RNA (sncRNA) 5' transfer RNA (tRNA) half
gggtatgattctcggttt

SEQ ID NO: 14791 - DNA, 19 bp, Artificial Sequence
  synthetic circulating small noncoding RNA (sncRNA) 5' transfer RNA (tRNA) half
gaaccagggacctcttgat

SEQ ID NO: 14792 - DNA, 25 bp, Artificial Sequence
  synthetic circulating small noncoding RNA (sncRNA) 5' transfer RNA (tRNA) half
aggttccaccgagatttgaactcgg

SEQ ID NO: 14793 - DNA, 10 bp, Artificial Sequence
  synthetic circulating small noncoding RNA (sncRNA) 5' transfer RNA (tRNA) half
acgcagagta

SEQ ID NO: 14794 - DNA, 20 bp, Artificial Sequence
  synthetic circulating small noncoding RNA (sncRNA) 5' transfer RNA (tRNA) half
aacccgggtcaactgcttgg

SEQ ID NO: 14795 - DNA, 34 bp, Artificial Sequence
  synthetic circulating small noncoding RNA (sncRNA) 5' transfer RNA (tRNA) half
tgtggaggcgtgggttcgaatcccacttctgaca

SEQ ID NO: 14796 - DNA, 18 bp, Artificial Sequence
  synthetic circulating small noncoding RNA (sncRNA) 5' transfer RNA (tRNA) half
caacgccttaaccactcg

SEQ ID NO: 14797 - DNA, 12 bp, Artificial Sequence
  synthetic circulating small noncoding RNA (sncRNA) 5' transfer RNA (tRNA) half
cccgggcggcgc

SEQ ID NO: 14798 - DNA, 15 bp, Artificial Sequence
  synthetic circulating small noncoding RNA (sncRNA) 5' transfer RNA (tRNA) half
agaggtccccggttc

SEQ ID NO: 14799 - DNA, 16 bp, Artificial Sequence
  synthetic circulating small noncoding RNA (sncRNA) 5' transfer RNA (tRNA) half
ttcgattcccggccca

SEQ ID NO: 14800 - DNA, 30 bp, Artificial Sequence
  synthetic circulating small noncoding RNA (sncRNA) 5' transfer RNA (tRNA) half
ggattcagagtccagagtgctaaccattac

SEQ ID NO: 14801 - DNA, 37 bp, Artificial Sequence
  synthetic circulating small noncoding RNA (sncRNA) 5' transfer RNA (tRNA) half
atcactccctggtggtctagtggttaggattcggcgc

SEQ ID NO: 14802 - DNA, 14 bp, Artificial Sequence
  synthetic circulating small noncoding RNA (sncRNA) 5' transfer RNA (tRNA) half
gcaggcgagaattc

SEQ ID NO: 14803 - DNA, 17 bp, Artificial Sequence
  synthetic circulating small noncoding RNA (sncRNA) 5' transfer RNA (tRNA) half
accactgaaccaccaat

SEQ ID NO: 14804 - DNA, 33 bp, Artificial Sequence
  synthetic circulating small noncoding RNA (sncRNA) 5' transfer RNA (tRNA) half
accaggaatcctaaccgctagaccatatgggag

SEQ ID NO: 14805 - DNA, 44 bp, Artificial Sequence
  synthetic circulating small noncoding RNA (sncRNA) 5' transfer RNA (tRNA) half
tctcgcgtgttaggcgagcgtgatgaccactacactacggaaac

SEQ ID NO: 14806 - DNA, 20 bp, Artificial Sequence
  synthetic circulating small noncoding RNA (sncRNA) 5' transfer RNA (tRNA) half
gcagcgagcagggttcgaac

SEQ ID NO: 14807 - DNA, 25 bp, Artificial Sequence
  synthetic circulating small noncoding RNA (sncRNA) 5' transfer RNA (tRNA) half
cttgaaccctggaccctcagattaa

SEQ ID NO: 14808 - DNA, 36 bp, Artificial Sequence
  synthetic circulating small noncoding RNA (sncRNA) 5' transfer RNA (tRNA) half
gggccgcggcggtgaaagcgccgaatcctagccact

SEQ ID NO: 14809 - DNA, 30 bp, Artificial Sequence
  synthetic circulating small noncoding RNA (sncRNA) 5' transfer RNA (tRNA) half
gcgggaggcccgggttcggttcccggccaa

SEQ ID NO: 14810 - DNA, 21 bp, Artificial Sequence
  synthetic circulating small noncoding RNA (sncRNA) 5' transfer RNA (tRNA) half
ttcgagccccagtggaaccac

SEQ ID NO: 14811 - DNA, 13 bp, Artificial Sequence
  synthetic circulating small noncoding RNA (sncRNA) 5' transfer RNA (tRNA) half
cccggcccatgca

SEQ ID NO: 14812 - DNA, 26 bp, Artificial Sequence
  synthetic circulating small noncoding RNA (sncRNA) 5' transfer RNA (tRNA) half
ccgattgcgccacagagaccggtgat

SEQ ID NO: 14813 - DNA, 23 bp, Artificial Sequence
  synthetic circulating small noncoding RNA (sncRNA) 5' transfer RNA (tRNA) half
tcgaaccgaggttgctgcggcca

SEQ ID NO: 14814 - DNA, 7 bp, Artificial Sequence
  synthetic circulating small noncoding RNA (sncRNA) 5' transfer RNA (tRNA) half
gtcggca

SEQ ID NO: 14815 - DNA, 11 bp, Artificial Sequence
  synthetic circulating small noncoding RNA (sncRNA) 5' transfer RNA (tRNA) half
ggcgaacgtga

SEQ ID NO: 14816 - DNA, 42 bp, Artificial Sequence
  synthetic circulating small noncoding RNA (sncRNA) 5' transfer RNA (tRNA) half
ctgaatccagcgatccgagttcaaatctcggtggaacctact

SEQ ID NO: 14817 - DNA, 16 bp, Artificial Sequence
  synthetic circulating small noncoding RNA (sncRNA) 5' transfer RNA (tRNA) half
agtcggcaggattcga

SEQ ID NO: 14818 - DNA, 13 bp, Artificial Sequence
  synthetic circulating small noncoding RNA (sncRNA) 5' transfer RNA (tRNA) half
aactcgcgacccc

SEQ ID NO: 14819 - DNA, 18 bp, Artificial Sequence
  synthetic circulating small noncoding RNA (sncRNA) 5' transfer RNA (tRNA) half
tcaaatgctctaccactg

SEQ ID NO: 14820 - DNA, 43 bp, Artificial Sequence
  synthetic circulating small noncoding RNA (sncRNA) 5' transfer RNA (tRNA) half
tccagtctcttcggaggcgtgggttcgaatcccaccgctgcca

SEQ ID NO: 14821 - DNA, 33 bp, Artificial Sequence
  synthetic circulating small noncoding RNA (sncRNA) 5' transfer RNA (tRNA) half
gcagtcaaatgctctacccctgagctatacccc

SEQ ID NO: 14822 - DNA, 24 bp, Artificial Sequence
  synthetic circulating small noncoding RNA (sncRNA) 5' transfer RNA (tRNA) half
aaggtccccggttcgaaaccgggc

SEQ ID NO: 14823 - DNA, 24 bp, Artificial Sequence
  synthetic circulating small noncoding RNA (sncRNA) 5' transfer RNA (tRNA) half
agagtcccatgctctaccgactga

SEQ ID NO: 14824 - DNA, 10 bp, Artificial Sequence
  synthetic circulating small noncoding RNA (sncRNA) 5' transfer RNA (tRNA) half
acccgggccg

SEQ ID NO: 14825 - DNA, 10 bp, Artificial Sequence
  synthetic circulating small noncoding RNA (sncRNA) 5' transfer RNA (tRNA) half
tttccgcccg

SEQ ID NO: 14826 - DNA, 18 bp, Artificial Sequence
  synthetic circulating small noncoding RNA (sncRNA) 5' transfer RNA (tRNA) half
cgactccgccgggactcg

SEQ ID NO: 14827 - DNA, 13 bp, Artificial Sequence
  synthetic circulating small noncoding RNA (sncRNA) 5' transfer RNA (tRNA) half
ctctaaccaactg

SEQ ID NO: 14828 - DNA, 24 bp, Artificial Sequence
  synthetic circulating small noncoding RNA (sncRNA) 5' transfer RNA (tRNA) half
atatggtctagcggttaggattcc

SEQ ID NO: 14829 - DNA, 16 bp, Artificial Sequence
  synthetic circulating small noncoding RNA (sncRNA) 5' transfer RNA (tRNA) half
tggaggcgtgggttcg

SEQ ID NO: 14830 - DNA, 14 bp, Artificial Sequence
  synthetic circulating small noncoding RNA (sncRNA) 5' transfer RNA (tRNA) half
cccggacgagccct

SEQ ID NO: 14831 - DNA, 21 bp, Artificial Sequence
  synthetic circulating small noncoding RNA (sncRNA) 5' transfer RNA (tRNA) half
cgggttcgactcccggtatgg

SEQ ID NO: 14832 - DNA, 14 bp, Artificial Sequence
  synthetic circulating small noncoding RNA (sncRNA) 5' transfer RNA (tRNA) half
agaggtcccgggtt

SEQ ID NO: 14833 - DNA, 38 bp, Artificial Sequence
  synthetic circulating small noncoding RNA (sncRNA) 5' transfer RNA (tRNA) half
ttaatctcagggtcgtgggttcgagccccacgttgggc

SEQ ID NO: 14834 - DNA, 28 bp, Artificial Sequence
  synthetic circulating small noncoding RNA (sncRNA) 5' transfer RNA (tRNA) half
aaacccgggcctcccgcgtggcaggcga

SEQ ID NO: 14835 - DNA, 26 bp, Artificial Sequence
  synthetic circulating small noncoding RNA (sncRNA) 5' transfer RNA (tRNA) half
cccgaacagggacttgaaccctggac

SEQ ID NO: 14836 - DNA, 34 bp, Artificial Sequence
  synthetic circulating small noncoding RNA (sncRNA) 5' transfer RNA (tRNA) half
ggagtcagacgcgctaccattgcgccacgaggtc

SEQ ID NO: 14837 - DNA, 20 bp, Artificial Sequence
  synthetic circulating small noncoding RNA (sncRNA) 5' transfer RNA (tRNA) half
atccattgcgccacggagcc

SEQ ID NO: 14838 - DNA, 31 bp, Artificial Sequence
  synthetic circulating small noncoding RNA (sncRNA) 5' transfer RNA (tRNA) half
gggagaccggggttcgattccccgacgggga

SEQ ID NO: 14839 - DNA, 28 bp, Artificial Sequence
  synthetic circulating small noncoding RNA (sncRNA) 5' transfer RNA (tRNA) half
ttcgcctcacacgcgaaaggtccccggt

SEQ ID NO: 14840 - DNA, 13 bp, Artificial Sequence
  synthetic circulating small noncoding RNA (sncRNA) 5' transfer RNA (tRNA) half
gggacctttagat

SEQ ID NO: 14841 - DNA, 12 bp, Artificial Sequence
  synthetic circulating small noncoding RNA (sncRNA) 5' transfer RNA (tRNA) half
cacacgcgaaag

SEQ ID NO: 14842 - DNA, 22 bp, Artificial Sequence
  synthetic circulating small noncoding RNA (sncRNA) 5' transfer RNA (tRNA) half
tgtgtcagaagtgggattcgaa

SEQ ID NO: 14843 - DNA, 13 bp, Artificial Sequence
  synthetic circulating small noncoding RNA (sncRNA) 5' transfer RNA (tRNA) half
gaagcgtgctggg

SEQ ID NO: 14844 - DNA, 27 bp, Artificial Sequence
  synthetic circulating small noncoding RNA (sncRNA) 5' transfer RNA (tRNA) half
cctccccgtcggggaatcgaaccccgg

SEQ ID NO: 14845 - DNA, 13 bp, Artificial Sequence
  synthetic circulating small noncoding RNA (sncRNA) 5' transfer RNA (tRNA) half
gctcagttgggag

SEQ ID NO: 14846 - DNA, 31 bp, Artificial Sequence
  synthetic circulating small noncoding RNA (sncRNA) 5' transfer RNA (tRNA) half
tgcattggccgggaatcgaacccgggcctcc

SEQ ID NO: 14847 - DNA, 27 bp, Artificial Sequence
  synthetic circulating small noncoding RNA (sncRNA) 5' transfer RNA (tRNA) half
cgacccgggttcgattcccgggcggcg

SEQ ID NO: 14848 - DNA, 24 bp, Artificial Sequence
  synthetic circulating small noncoding RNA (sncRNA) 5' transfer RNA (tRNA) half
aacctgcgcggggaaaccccaatg

SEQ ID NO: 14849 - DNA, 36 bp, Artificial Sequence
  synthetic circulating small noncoding RNA (sncRNA) 5' transfer RNA (tRNA) half
gcattggtggttcagtggtagaattctcgcctccca

SEQ ID NO: 14850 - DNA, 14 bp, Artificial Sequence
  synthetic circulating small noncoding RNA (sncRNA) 5' transfer RNA (tRNA) half
gcgtgacaggcggg

SEQ ID NO: 14851 - DNA, 24 bp, Artificial Sequence
  synthetic circulating small noncoding RNA (sncRNA) 5' transfer RNA (tRNA) half
tgccccctctgaggttcgaactca

SEQ ID NO: 14852 - DNA, 21 bp, Artificial Sequence
  synthetic circulating small noncoding RNA (sncRNA) 5' transfer RNA (tRNA) half
gttcaaatctcggtgggacct

SEQ ID NO: 14853 - DNA, 11 bp, Artificial Sequence
  synthetic circulating small noncoding RNA (sncRNA) 5' transfer RNA (tRNA) half
aggattcgaac

SEQ ID NO: 14854 - DNA, 26 bp, Artificial Sequence
  synthetic circulating small noncoding RNA (sncRNA) 5' transfer RNA (tRNA) half
cagggttcaagtccctgttcgggcgc

SEQ ID NO: 14855 - DNA, 16 bp, Artificial Sequence
  synthetic circulating small noncoding RNA (sncRNA) 5' transfer RNA (tRNA) half
attcagagtccagagt

SEQ ID NO: 14856 - DNA, 10 bp, Artificial Sequence
  synthetic circulating small noncoding RNA (sncRNA) 5' transfer RNA (tRNA) half
cgaaccgagg

SEQ ID NO: 14857 - DNA, 13 bp, Artificial Sequence
  synthetic circulating small noncoding RNA (sncRNA) 5' transfer RNA (tRNA) half
cggccattctggt

SEQ ID NO: 14858 - DNA, 17 bp, Artificial Sequence
  synthetic circulating small noncoding RNA (sncRNA) 5' transfer RNA (tRNA) half
aggtccccggttcgaaa

SEQ ID NO: 14859 - DNA, 15 bp, Artificial Sequence
  synthetic circulating small noncoding RNA (sncRNA) 5' transfer RNA (tRNA) half
tatcatgcaagattc

SEQ ID NO: 14860 - DNA, 23 bp, Artificial Sequence
  synthetic circulating small noncoding RNA (sncRNA) 5' transfer RNA (tRNA) half
ttagaccactcggccacgctacc

SEQ ID NO: 14861 - DNA, 31 bp, Artificial Sequence
  synthetic circulating small noncoding RNA (sncRNA) 5' transfer RNA (tRNA) half
cgagccagccaggagtcgaacctagaatctt

SEQ ID NO: 14862 - DNA, 18 bp, Artificial Sequence
  synthetic circulating small noncoding RNA (sncRNA) 5' transfer RNA (tRNA) half
gagtcgaacctagaatct

SEQ ID NO: 14863 - DNA, 18 bp, Artificial Sequence
  synthetic circulating small noncoding RNA (sncRNA) 5' transfer RNA (tRNA) half
aaaccgggcggaaacagt

SEQ ID NO: 14864 - DNA, 17 bp, Artificial Sequence
  synthetic circulating small noncoding RNA (sncRNA) 5' transfer RNA (tRNA) half
tgaccccgacgtgattc

SEQ ID NO: 14865 - DNA, 37 bp, Artificial Sequence
  synthetic circulating small noncoding RNA (sncRNA) 5' transfer RNA (tRNA) half
aactcggatcgctggattcaaagtccagagtgctaac

SEQ ID NO: 14866 - DNA, 19 bp, Artificial Sequence
  synthetic circulating small noncoding RNA (sncRNA) 5' transfer RNA (tRNA) half
aaaaccaggaatcctaacc

SEQ ID NO: 14867 - DNA, 9 bp, Artificial Sequence
  synthetic circulating small noncoding RNA (sncRNA) 5' transfer RNA (tRNA) half
ggcaccgct

SEQ ID NO: 14868 - DNA, 17 bp, Artificial Sequence
  synthetic circulating small noncoding RNA (sncRNA) 5' transfer RNA (tRNA) half
gcgcccgaacagggact

SEQ ID NO: 14869 - DNA, 20 bp, Artificial Sequence
  synthetic circulating small noncoding RNA (sncRNA) 5' transfer RNA (tRNA) half
aaacaaagcctccgatagca

SEQ ID NO: 14870 - DNA, 24 bp, Artificial Sequence
  synthetic circulating small noncoding RNA (sncRNA) 5' transfer RNA (tRNA) half
ccgactgagctatccgggcgctct

SEQ ID NO: 14871 - DNA, 30 bp, Artificial Sequence
  synthetic circulating small noncoding RNA (sncRNA) 5' transfer RNA (tRNA) half
ggcaggcgagaattctaccactgaaccacc

SEQ ID NO: 14872 - DNA, 20 bp, Artificial Sequence
  synthetic circulating small noncoding RNA (sncRNA) 5' transfer RNA (tRNA) half
ccacgcgtgcagagcacaat

SEQ ID NO: 14873 - DNA, 24 bp, Artificial Sequence
  synthetic circulating small noncoding RNA (sncRNA) 5' transfer RNA (tRNA) half
tccgcagcgagcagggttcgaacc

SEQ ID NO: 14874 - DNA, 19 bp, Artificial Sequence
  synthetic circulating small noncoding RNA (sncRNA) 5' transfer RNA (tRNA) half
ttcgattcccggccaatgc

SEQ ID NO: 14875 - DNA, 24 bp, Artificial Sequence
  synthetic circulating small noncoding RNA (sncRNA) 5' transfer RNA (tRNA) half
tggcaggcgagaattctaccactg

SEQ ID NO: 14876 - DNA, 22 bp, Artificial Sequence
  synthetic circulating small noncoding RNA (sncRNA) 5' transfer RNA (tRNA) half
tccccgtacgggccaaagctga

SEQ ID NO: 14877 - DNA, 44 bp, Artificial Sequence
  synthetic circulating small noncoding RNA (sncRNA) 5' transfer RNA (tRNA) half
aactcggatcgctggattcagagtccagagtgctaaccattaca

SEQ ID NO: 14878 - DNA, 42 bp, Artificial Sequence
  synthetic circulating small noncoding RNA (sncRNA) 5' transfer RNA (tRNA) half
ctgaatccagcgatccgagttcaaatctcggtggaacctgct

SEQ ID NO: 14879 - DNA, 15 bp, Artificial Sequence
  synthetic circulating small noncoding RNA (sncRNA) 5' transfer RNA (tRNA) half
aatccgggtgccccc

SEQ ID NO: 14880 - DNA, 12 bp, Artificial Sequence
  synthetic circulating small noncoding RNA (sncRNA) 5' transfer RNA (tRNA) half
gttcgatcccgg

SEQ ID NO: 14881 - DNA, 33 bp, Artificial Sequence
  synthetic circulating small noncoding RNA (sncRNA) 5' transfer RNA (tRNA) half
ggcaggcgagaattctaccactgaaccaccaat

SEQ ID NO: 14882 - DNA, 32 bp, Artificial Sequence
  synthetic circulating small noncoding RNA (sncRNA) 5' transfer RNA (tRNA) half
tccgactccgccgggactcgaacccggaacct

SEQ ID NO: 14883 - DNA, 41 bp, Artificial Sequence
  synthetic circulating small noncoding RNA (sncRNA) 5' transfer RNA (tRNA) half
atcgaacccgggccgcggcggtgagagcgccgaatcctaac

SEQ ID NO: 14884 - DNA, 23 bp, Artificial Sequence
  synthetic circulating small noncoding RNA (sncRNA) 5' transfer RNA (tRNA) half
aaaccgggcggaaacagcaactt

SEQ ID NO: 14885 - DNA, 13 bp, Artificial Sequence
  synthetic circulating small noncoding RNA (sncRNA) 5' transfer RNA (tRNA) half
gaggtcgatggat

SEQ ID NO: 14886 - DNA, 13 bp, Artificial Sequence
  synthetic circulating small noncoding RNA (sncRNA) 5' transfer RNA (tRNA) half
tggtctaggggta

SEQ ID NO: 14887 - DNA, 20 bp, Artificial Sequence
  synthetic circulating small noncoding RNA (sncRNA) 5' transfer RNA (tRNA) half
acagctgtcagaagtgggat

SEQ ID NO: 14888 - DNA, 15 bp, Artificial Sequence
  synthetic circulating small noncoding RNA (sncRNA) 5' transfer RNA (tRNA) half
aacccgggccgcctg

SEQ ID NO: 14889 - DNA, 33 bp, Artificial Sequence
  synthetic circulating small noncoding RNA (sncRNA) 5' transfer RNA (tRNA) half
gaacgcagcgccttagaccgctcggccatcctg

SEQ ID NO: 14890 - DNA, 8 bp, Artificial Sequence
  synthetic circulating small noncoding RNA (sncRNA) 5' transfer RNA (tRNA) half
cgagcctc

SEQ ID NO: 14891 - DNA, 17 bp, Artificial Sequence
  synthetic circulating small noncoding RNA (sncRNA) 5' transfer RNA (tRNA) half
atgccggggatcgaacc

SEQ ID NO: 14892 - DNA, 21 bp, Artificial Sequence
  synthetic circulating small noncoding RNA (sncRNA) 5' transfer RNA (tRNA) half
gtagcggttatcacgtctgct

SEQ ID NO: 14893 - DNA, 40 bp, Artificial Sequence
  synthetic circulating small noncoding RNA (sncRNA) 5' transfer RNA (tRNA) half
ccgtatggaggcgtgggttcgaatcccacttctgacacag

SEQ ID NO: 14894 - DNA, 36 bp, Artificial Sequence
  synthetic circulating small noncoding RNA (sncRNA) 5' transfer RNA (tRNA) half
caccgctgggattcgaacccaggatctcctgtttac

SEQ ID NO: 14895 - DNA, 33 bp, Artificial Sequence
  synthetic circulating small noncoding RNA (sncRNA) 5' transfer RNA (tRNA) half
tggccgggaatcgaacccgggtcaactgcttgg

SEQ ID NO: 14896 - DNA, 22 bp, Artificial Sequence
  synthetic circulating small noncoding RNA (sncRNA) 5' transfer RNA (tRNA) half
ttccatagtgtagcggttatca

SEQ ID NO: 14897 - DNA, 18 bp, Artificial Sequence
  synthetic circulating small noncoding RNA (sncRNA) 5' transfer RNA (tRNA) half
tagtggtatcatgcaaga

SEQ ID NO: 14898 - DNA, 41 bp, Artificial Sequence
  synthetic circulating small noncoding RNA (sncRNA) 5' transfer RNA (tRNA) half
gatgccccgtgtgaggatcgaactcacgaccttcagattat

SEQ ID NO: 14899 - DNA, 40 bp, Artificial Sequence
  synthetic circulating small noncoding RNA (sncRNA) 5' transfer RNA (tRNA) half
cgggccgcggcggtgagagcgccgaatcctaaccactaga

SEQ ID NO: 14900 - DNA, 19 bp, Artificial Sequence
  synthetic circulating small noncoding RNA (sncRNA) 5' transfer RNA (tRNA) half
ggtcgatggatcgaaacca

SEQ ID NO: 14901 - DNA, 11 bp, Artificial Sequence
  synthetic circulating small noncoding RNA (sncRNA) 5' transfer RNA (tRNA) half
ccccggtctcc

SEQ ID NO: 14902 - DNA, 15 bp, Artificial Sequence
  synthetic circulating small noncoding RNA (sncRNA) 5' transfer RNA (tRNA) half
ccccgcctgtcacgc

SEQ ID NO: 14903 - DNA, 24 bp, Artificial Sequence
  synthetic circulating small noncoding RNA (sncRNA) 5' transfer RNA (tRNA) half
tcagtggtctggggtgcaggcttc

SEQ ID NO: 14904 - DNA, 12 bp, Artificial Sequence
  synthetic circulating small noncoding RNA (sncRNA) 5' transfer RNA (tRNA) half
ggcgtccctggg

SEQ ID NO: 14905 - DNA, 38 bp, Artificial Sequence
  synthetic circulating small noncoding RNA (sncRNA) 5' transfer RNA (tRNA) half
acccgggtcaactgcttggaaggcagctatgctcacca

SEQ ID NO: 14906 - DNA, 28 bp, Artificial Sequence
  synthetic circulating small noncoding RNA (sncRNA) 5' transfer RNA (tRNA) half
ggttaggattcctggttttcacccaggc

SEQ ID NO: 14907 - DNA, 24 bp, Artificial Sequence
  synthetic circulating small noncoding RNA (sncRNA) 5' transfer RNA (tRNA) half
aaccggggacctttcgcgtgtgag

SEQ ID NO: 14908 - DNA, 20 bp, Artificial Sequence
  synthetic circulating small noncoding RNA (sncRNA) 5' transfer RNA (tRNA) half
ccggacgagcccaagcattt

SEQ ID NO: 14909 - DNA, 17 bp, Artificial Sequence
  synthetic circulating small noncoding RNA (sncRNA) 5' transfer RNA (tRNA) half
gcgccgctggtgtagtg

SEQ ID NO: 14910 - DNA, 23 bp, Artificial Sequence
  synthetic circulating small noncoding RNA (sncRNA) 5' transfer RNA (tRNA) half
gcgacccgggttcgattcccggg

SEQ ID NO: 14911 - DNA, 16 bp, Artificial Sequence
  synthetic circulating small noncoding RNA (sncRNA) 5' transfer RNA (tRNA) half
ccgaatcctaaccact

SEQ ID NO: 14912 - DNA, 30 bp, Artificial Sequence
  synthetic circulating small noncoding RNA (sncRNA) 5' transfer RNA (tRNA) half
ccgtatggaggcgtgggttcgaatcccact

SEQ ID NO: 14913 - DNA, 8 bp, Artificial Sequence
  synthetic circulating small noncoding RNA (sncRNA) 5' transfer RNA (tRNA) half
gcggaaac

SEQ ID NO: 14914 - DNA, 16 bp, Artificial Sequence
  synthetic circulating small noncoding RNA (sncRNA) 5' transfer RNA (tRNA) half
aacctagaatcttctg

SEQ ID NO: 14915 - DNA, 19 bp, Artificial Sequence
  synthetic circulating small noncoding RNA (sncRNA) 5' transfer RNA (tRNA) half
tgggcccagcacgcttccg

SEQ ID NO: 14916 - DNA, 36 bp, Artificial Sequence
  synthetic circulating small noncoding RNA (sncRNA) 5' transfer RNA (tRNA) half
aagcgagaatcatacccctagaccaacgagccacgg

SEQ ID NO: 14917 - DNA, 14 bp, Artificial Sequence
  synthetic circulating small noncoding RNA (sncRNA) 5' transfer RNA (tRNA) half
ttggccacgactac

SEQ ID NO: 14918 - DNA, 13 bp, Artificial Sequence
  synthetic circulating small noncoding RNA (sncRNA) 5' transfer RNA (tRNA) half
agcgcccaacgtg

SEQ ID NO: 14919 - DNA, 6 bp, Artificial Sequence
  synthetic circulating small noncoding RNA (sncRNA) 5' transfer RNA (tRNA) half
cccgcg

SEQ ID NO: 14920 - DNA, 12 bp, Artificial Sequence
  synthetic circulating small noncoding RNA (sncRNA) 5' transfer RNA (tRNA) half
ggtcgctggttc

SEQ ID NO: 14921 - DNA, 23 bp, Artificial Sequence
  synthetic circulating small noncoding RNA (sncRNA) 5' transfer RNA (tRNA) half
ctctacccactgagctatctggg

SEQ ID NO: 14922 - DNA, 8 bp, Artificial Sequence
  synthetic circulating small noncoding RNA (sncRNA) 5' transfer RNA (tRNA) half
atgagact

SEQ ID NO: 14923 - DNA, 36 bp, Artificial Sequence
  synthetic circulating small noncoding RNA (sncRNA) 5' transfer RNA (tRNA) half
attaagagtctcatgctctaccgactgagctagccg

SEQ ID NO: 14924 - DNA, 37 bp, Artificial Sequence
  synthetic circulating small noncoding RNA (sncRNA) 5' transfer RNA (tRNA) half
aattgcgtaagacttaaaaccttgttcccagaggttc

SEQ ID NO: 14925 - DNA, 14 bp, Artificial Sequence
  synthetic circulating small noncoding RNA (sncRNA) 5' transfer RNA (tRNA) half
ttaaccactcggcc

SEQ ID NO: 14926 - DNA, 21 bp, Artificial Sequence
  synthetic circulating small noncoding RNA (sncRNA) 5' transfer RNA (tRNA) half
ggcgagcgtgatgaccactac

SEQ ID NO: 14927 - DNA, 19 bp, Artificial Sequence
  synthetic circulating small noncoding RNA (sncRNA) 5' transfer RNA (tRNA) half
gccactagaccaccaggga

SEQ ID NO: 14928 - DNA, 26 bp, Artificial Sequence
  synthetic circulating small noncoding RNA (sncRNA) 5' transfer RNA (tRNA) half
gtcggggaattgaaccccggtctccc

SEQ ID NO: 14929 - DNA, 32 bp, Artificial Sequence
  synthetic circulating small noncoding RNA (sncRNA) 5' transfer RNA (tRNA) half
ggttccttcgagccggattcgaaccagcgacc

SEQ ID NO: 14930 - DNA, 20 bp, Artificial Sequence
  synthetic circulating small noncoding RNA (sncRNA) 5' transfer RNA (tRNA) half
gttcgaatcccagcggtgcc

SEQ ID NO: 14931 - DNA, 32 bp, Artificial Sequence
  synthetic circulating small noncoding RNA (sncRNA) 5' transfer RNA (tRNA) half
ggccgcggcggtgagagcgccgaatcctaacc

SEQ ID NO: 14932 - DNA, 25 bp, Artificial Sequence
  synthetic circulating small noncoding RNA (sncRNA) 5' transfer RNA (tRNA) half
ttctcgcctgccacgcgggaggccc

SEQ ID NO: 14933 - DNA, 25 bp, Artificial Sequence
  synthetic circulating small noncoding RNA (sncRNA) 5' transfer RNA (tRNA) half
tcgttggtctaggggtatgattctc

SEQ ID NO: 14934 - DNA, 33 bp, Artificial Sequence
  synthetic circulating small noncoding RNA (sncRNA) 5' transfer RNA (tRNA) half
agaattctcgcctgccacgcgggaggcccgggt

SEQ ID NO: 14935 - DNA, 24 bp, Artificial Sequence
  synthetic circulating small noncoding RNA (sncRNA) 5' transfer RNA (tRNA) half
agtctcatgctctacccactgagc

SEQ ID NO: 14936 - DNA, 33 bp, Artificial Sequence
  synthetic circulating small noncoding RNA (sncRNA) 5' transfer RNA (tRNA) half
ttaaccgaaaggttggtggttcgagcccaccca

SEQ ID NO: 14937 - DNA, 27 bp, Artificial Sequence
  synthetic circulating small noncoding RNA (sncRNA) 5' transfer RNA (tRNA) half
cgcctccccgtcggggaatcgaacccc

SEQ ID NO: 14938 - DNA, 11 bp, Artificial Sequence
  synthetic circulating small noncoding RNA (sncRNA) 5' transfer RNA (tRNA) half
gttcgagccca

SEQ ID NO: 14939 - DNA, 35 bp, Artificial Sequence
  synthetic circulating small noncoding RNA (sncRNA) 5' transfer RNA (tRNA) half
gagtctggcgccttagaccactcggccatcctgac

SEQ ID NO: 14940 - DNA, 16 bp, Artificial Sequence
  synthetic circulating small noncoding RNA (sncRNA) 5' transfer RNA (tRNA) half
aggttgtgggttcgat

SEQ ID NO: 14941 - DNA, 15 bp, Artificial Sequence
  synthetic circulating small noncoding RNA (sncRNA) 5' transfer RNA (tRNA) half
gaggtcccaccgaga

SEQ ID NO: 14942 - DNA, 32 bp, Artificial Sequence
  synthetic circulating small noncoding RNA (sncRNA) 5' transfer RNA (tRNA) half
ggttgctgcggccacaacgcagagtactaacc

SEQ ID NO: 14943 - DNA, 16 bp, Artificial Sequence
  synthetic circulating small noncoding RNA (sncRNA) 5' transfer RNA (tRNA) half
agcgagcgctctacca

SEQ ID NO: 14944 - DNA, 19 bp, Artificial Sequence
  synthetic circulating small noncoding RNA (sncRNA) 5' transfer RNA (tRNA) half
gggttatgggcccagcacg

SEQ ID NO: 14945 - DNA, 34 bp, Artificial Sequence
  synthetic circulating small noncoding RNA (sncRNA) 5' transfer RNA (tRNA) half
gtggcccgtacggggatcgaacccgcgaccttgg

SEQ ID NO: 14946 - DNA, 28 bp, Artificial Sequence
  synthetic circulating small noncoding RNA (sncRNA) 5' transfer RNA (tRNA) half
cggttaggattcctggttttcacccagg

SEQ ID NO: 14947 - DNA, 28 bp, Artificial Sequence
  synthetic circulating small noncoding RNA (sncRNA) 5' transfer RNA (tRNA) half
ggtttcgatccatcgacctctgggttat

SEQ ID NO: 14948 - DNA, 7 bp, Artificial Sequence
  synthetic circulating small noncoding RNA (sncRNA) 5' transfer RNA (tRNA) half
tgccgcg

SEQ ID NO: 14949 - DNA, 28 bp, Artificial Sequence
  synthetic circulating small noncoding RNA (sncRNA) 5' transfer RNA (tRNA) half
tggattcagagtccagagtgctagccat

SEQ ID NO: 14950 - DNA, 16 bp, Artificial Sequence
  synthetic circulating small noncoding RNA (sncRNA) 5' transfer RNA (tRNA) half
cagaagattgcaggtt

SEQ ID NO: 14951 - DNA, 13 bp, Artificial Sequence
  synthetic circulating small noncoding RNA (sncRNA) 5' transfer RNA (tRNA) half
tcgcagtctcccc

SEQ ID NO: 14952 - DNA, 16 bp, Artificial Sequence
  synthetic circulating small noncoding RNA (sncRNA) 5' transfer RNA (tRNA) half
gctgcgccactctgct

SEQ ID NO: 14953 - DNA, 24 bp, Artificial Sequence
  synthetic circulating small noncoding RNA (sncRNA) 5' transfer RNA (tRNA) half
accgggcggaaacagcaactttgt

SEQ ID NO: 14954 - DNA, 20 bp, Artificial Sequence
  synthetic circulating small noncoding RNA (sncRNA) 5' transfer RNA (tRNA) half
tccgactccgccgggactcg

SEQ ID NO: 14955 - DNA, 20 bp, Artificial Sequence
  synthetic circulating small noncoding RNA (sncRNA) 5' transfer RNA (tRNA) half
tgaacccgggacctctcgca

SEQ ID NO: 14956 - DNA, 41 bp, Artificial Sequence
  synthetic circulating small noncoding RNA (sncRNA) 5' transfer RNA (tRNA) half
atggttagcactctggactctgaatccagcgatccgagttc

SEQ ID NO: 14957 - DNA, 29 bp, Artificial Sequence
  synthetic circulating small noncoding RNA (sncRNA) 5' transfer RNA (tRNA) half
atgcgtgcagagcacaatggattagcagt

SEQ ID NO: 14958 - DNA, 7 bp, Artificial Sequence
  synthetic circulating small noncoding RNA (sncRNA) 5' transfer RNA (tRNA) half
agccgaa

SEQ ID NO: 14959 - DNA, 34 bp, Artificial Sequence
  synthetic circulating small noncoding RNA (sncRNA) 5' transfer RNA (tRNA) half
cttaggtcgctggttcgattccggctcgaaggac

SEQ ID NO: 14960 - DNA, 24 bp, Artificial Sequence
  synthetic circulating small noncoding RNA (sncRNA) 5' transfer RNA (tRNA) half
cggatgatcctcagtggtctgggg

SEQ ID NO: 14961 - DNA, 27 bp, Artificial Sequence
  synthetic circulating small noncoding RNA (sncRNA) 5' transfer RNA (tRNA) half
ttcaaagtccagagtgctaaccattac

SEQ ID NO: 14962 - DNA, 10 bp, Artificial Sequence
  synthetic circulating small noncoding RNA (sncRNA) 5' transfer RNA (tRNA) half
tggcccgtac

SEQ ID NO: 14963 - DNA, 18 bp, Artificial Sequence
  synthetic circulating small noncoding RNA (sncRNA) 5' transfer RNA (tRNA) half
cctccccgtcggggaatt

SEQ ID NO: 14964 - DNA, 23 bp, Artificial Sequence
  synthetic circulating small noncoding RNA (sncRNA) 5' transfer RNA (tRNA) half
aaaccgggcggaaacatatcttt

SEQ ID NO: 14965 - DNA, 18 bp, Artificial Sequence
  synthetic circulating small noncoding RNA (sncRNA) 5' transfer RNA (tRNA) half
cgaatgtgataaccacta

SEQ ID NO: 14966 - DNA, 31 bp, Artificial Sequence
  synthetic circulating small noncoding RNA (sncRNA) 5' transfer RNA (tRNA) half
acctccccgtcggggaattgaaccccggtct

SEQ ID NO: 14967 - DNA, 35 bp, Artificial Sequence
  synthetic circulating small noncoding RNA (sncRNA) 5' transfer RNA (tRNA) half
aaccgaagatcgcgggttcgaaccccgtccgtgcc

SEQ ID NO: 14968 - DNA, 18 bp, Artificial Sequence
  synthetic circulating small noncoding RNA (sncRNA) 5' transfer RNA (tRNA) half
cgcacccaaagcgagaat

SEQ ID NO: 14969 - DNA, 15 bp, Artificial Sequence
  synthetic circulating small noncoding RNA (sncRNA) 5' transfer RNA (tRNA) half
cagtgccttatccat

SEQ ID NO: 14970 - DNA, 13 bp, Artificial Sequence
  synthetic circulating small noncoding RNA (sncRNA) 5' transfer RNA (tRNA) half
ctatacgatcacg

SEQ ID NO: 14971 - DNA, 20 bp, Artificial Sequence
  synthetic circulating small noncoding RNA (sncRNA) 5' transfer RNA (tRNA) half
ccgcgtggcaggcgagaatt

SEQ ID NO: 14972 - DNA, 20 bp, Artificial Sequence
  synthetic circulating small noncoding RNA (sncRNA) 5' transfer RNA (tRNA) half
tgaccccgacgtgattcgaa

SEQ ID NO: 14973 - DNA, 37 bp, Artificial Sequence
  synthetic circulating small noncoding RNA (sncRNA) 5' transfer RNA (tRNA) half
tagcactctggactctgaatccagcgatccgagttca

SEQ ID NO: 14974 - DNA, 14 bp, Artificial Sequence
  synthetic circulating small noncoding RNA (sncRNA) 5' transfer RNA (tRNA) half
ccttagaccgctcg

SEQ ID NO: 14975 - DNA, 13 bp, Artificial Sequence
  synthetic circulating small noncoding RNA (sncRNA) 5' transfer RNA (tRNA) half
tgcattggccggg

SEQ ID NO: 14976 - DNA, 11 bp, Artificial Sequence
  synthetic circulating small noncoding RNA (sncRNA) 5' transfer RNA (tRNA) half
tgcattggccg

SEQ ID NO: 14977 - DNA, 31 bp, Artificial Sequence
  synthetic circulating small noncoding RNA (sncRNA) 5' transfer RNA (tRNA) half
ggcccagcacgcttccgctgcgccactctgc

SEQ ID NO: 14978 - DNA, 23 bp, Artificial Sequence
  synthetic circulating small noncoding RNA (sncRNA) 5' transfer RNA (tRNA) half
gttcaatccccggcacctccagt

SEQ ID NO: 14979 - DNA, 17 bp, Artificial Sequence
  synthetic circulating small noncoding RNA (sncRNA) 5' transfer RNA (tRNA) half
ctcatgctctaccgact

SEQ ID NO: 14980 - DNA, 19 bp, Artificial Sequence
  synthetic circulating small noncoding RNA (sncRNA) 5' transfer RNA (tRNA) half
cgaatcctaaccactagac

SEQ ID NO: 14981 - DNA, 25 bp, Artificial Sequence
  synthetic circulating small noncoding RNA (sncRNA) 5' transfer RNA (tRNA) half
caggattcgaacctgcgcggggaga

SEQ ID NO: 14982 - DNA, 24 bp, Artificial Sequence
  synthetic circulating small noncoding RNA (sncRNA) 5' transfer RNA (tRNA) half
tccttaggtcgctggttcgattcc

SEQ ID NO: 14983 - DNA, 34 bp, Artificial Sequence
  synthetic circulating small noncoding RNA (sncRNA) 5' transfer RNA (tRNA) half
aagattgagggttcgagtcccttcgtggtcgaaa

SEQ ID NO: 14984 - DNA, 24 bp, Artificial Sequence
  synthetic circulating small noncoding RNA (sncRNA) 5' transfer RNA (tRNA) half
gtagttcaatggtagaattctcgc

SEQ ID NO: 14985 - DNA, 18 bp, Artificial Sequence
  synthetic circulating small noncoding RNA (sncRNA) 5' transfer RNA (tRNA) half
tttcgaaccggggacctt

SEQ ID NO: 14986 - DNA, 13 bp, Artificial Sequence
  synthetic circulating small noncoding RNA (sncRNA) 5' transfer RNA (tRNA) half
catacccctagac

SEQ ID NO: 14987 - DNA, 24 bp, Artificial Sequence
  synthetic circulating small noncoding RNA (sncRNA) 5' transfer RNA (tRNA) half
gtgccgagactcggattcgaaccg

SEQ ID NO: 14988 - DNA, 32 bp, Artificial Sequence
  synthetic circulating small noncoding RNA (sncRNA) 5' transfer RNA (tRNA) half
accaggggtcgcgagttcaaatctcgctgggg

SEQ ID NO: 14989 - DNA, 23 bp, Artificial Sequence
  synthetic circulating small noncoding RNA (sncRNA) 5' transfer RNA (tRNA) half
ttgtaaaccaggggtcgcgagtt

SEQ ID NO: 14990 - DNA, 12 bp, Artificial Sequence
  synthetic circulating small noncoding RNA (sncRNA) 5' transfer RNA (tRNA) half
attccccgacgg

SEQ ID NO: 14991 - DNA, 22 bp, Artificial Sequence
  synthetic circulating small noncoding RNA (sncRNA) 5' transfer RNA (tRNA) half
ttcgattcccgggcggcgcatg

SEQ ID NO: 14992 - DNA, 34 bp, Artificial Sequence
  synthetic circulating small noncoding RNA (sncRNA) 5' transfer RNA (tRNA) half
ccgtcggggaatcgaaccccggtctcccgcgtga

SEQ ID NO: 14993 - DNA, 16 bp, Artificial Sequence
  synthetic circulating small noncoding RNA (sncRNA) 5' transfer RNA (tRNA) half
cggttaggattcctgg

SEQ ID NO: 14994 - DNA, 15 bp, Artificial Sequence
  synthetic circulating small noncoding RNA (sncRNA) 5' transfer RNA (tRNA) half
cgcagcgccttagac

SEQ ID NO: 14995 - DNA, 9 bp, Artificial Sequence
  synthetic circulating small noncoding RNA (sncRNA) 5' transfer RNA (tRNA) half
gaacccgcg

SEQ ID NO: 14996 - DNA, 20 bp, Artificial Sequence
  synthetic circulating small noncoding RNA (sncRNA) 5' transfer RNA (tRNA) half
ggagatgccgggaatcgaac

SEQ ID NO: 14997 - DNA, 22 bp, Artificial Sequence
  synthetic circulating small noncoding RNA (sncRNA) 5' transfer RNA (tRNA) half
gttcgattcccggccaacgcat

SEQ ID NO: 14998 - DNA, 44 bp, Artificial Sequence
  synthetic circulating small noncoding RNA (sncRNA) 5' transfer RNA (tRNA) half
gtttccgtagtgtagtggttatcacgttcgcctaacacgcgaaa

SEQ ID NO: 14999 - DNA, 17 bp, Artificial Sequence
  synthetic circulating small noncoding RNA (sncRNA) 5' transfer RNA (tRNA) half
ccgaaaggttggtggtt

SEQ ID NO: 15000 - DNA, 18 bp, Artificial Sequence
  synthetic circulating small noncoding RNA (sncRNA) 5' transfer RNA (tRNA) half
cgcccaacgtggggctcg

SEQ ID NO: 15001 - DNA, 38 bp, Artificial Sequence
  synthetic circulating small noncoding RNA (sncRNA) 5' transfer RNA (tRNA) half
cgtgtttccgcccggtttcgaaccggggacctttcgcg

SEQ ID NO: 15002 - DNA, 12 bp, Artificial Sequence
  synthetic circulating small noncoding RNA (sncRNA) 5' transfer RNA (tRNA) half
ctcagagggggc

SEQ ID NO: 15003 - DNA, 17 bp, Artificial Sequence
  synthetic circulating small noncoding RNA (sncRNA) 5' transfer RNA (tRNA) half
cccacgcctccattcgg

SEQ ID NO: 15004 - DNA, 24 bp, Artificial Sequence
  synthetic circulating small noncoding RNA (sncRNA) 5' transfer RNA (tRNA) half
cgcccggtttcgaaccggggacct

SEQ ID NO: 15005 - DNA, 19 bp, Artificial Sequence
  synthetic circulating small noncoding RNA (sncRNA) 5' transfer RNA (tRNA) half
ccagagtgctagccattac

SEQ ID NO: 15006 - DNA, 10 bp, Artificial Sequence
  synthetic circulating small noncoding RNA (sncRNA) 5' transfer RNA (tRNA) half
ccctgaccgg

SEQ ID NO: 15007 - DNA, 37 bp, Artificial Sequence
  synthetic circulating small noncoding RNA (sncRNA) 5' transfer RNA (tRNA) half
ttcagtggtagaattctcgcctgccacgcgggaggcc

SEQ ID NO: 15008 - DNA, 32 bp, Artificial Sequence
  synthetic circulating small noncoding RNA (sncRNA) 5' transfer RNA (tRNA) half
cggctcgttggtctaggggtatgattctcgct

SEQ ID NO: 15009 - DNA, 26 bp, Artificial Sequence
  synthetic circulating small noncoding RNA (sncRNA) 5' transfer RNA (tRNA) half
cgggttcaatccccggcatctccaac

SEQ ID NO: 15010 - DNA, 37 bp, Artificial Sequence
  synthetic circulating small noncoding RNA (sncRNA) 5' transfer RNA (tRNA) half
cggctagctcagtcggtagagcatgagactcttaatc

SEQ ID NO: 15011 - DNA, 15 bp, Artificial Sequence
  synthetic circulating small noncoding RNA (sncRNA) 5' transfer RNA (tRNA) half
aaccggggacctctc

SEQ ID NO: 15012 - DNA, 19 bp, Artificial Sequence
  synthetic circulating small noncoding RNA (sncRNA) 5' transfer RNA (tRNA) half
aaacaaagcctccgatagc

SEQ ID NO: 15013 - DNA, 37 bp, Artificial Sequence
  synthetic circulating small noncoding RNA (sncRNA) 5' transfer RNA (tRNA) half
gggacctctcgcaccctaagcgagaatcataccccta

SEQ ID NO: 15014 - DNA, 15 bp, Artificial Sequence
  synthetic circulating small noncoding RNA (sncRNA) 5' transfer RNA (tRNA) half
gttcgactccggctc

SEQ ID NO: 15015 - DNA, 36 bp, Artificial Sequence
  synthetic circulating small noncoding RNA (sncRNA) 5' transfer RNA (tRNA) half
aaaccaggggtcgcgagttcaaatctcgctggggcc

SEQ ID NO: 15016 - DNA, 44 bp, Artificial Sequence
  synthetic circulating small noncoding RNA (sncRNA) 5' transfer RNA (tRNA) half
ctgttcccataccgggagtcgaacccgggccgcctgggtgaaaa

SEQ ID NO: 15017 - DNA, 9 bp, Artificial Sequence
  synthetic circulating small noncoding RNA (sncRNA) 5' transfer RNA (tRNA) half
aggtccccg

SEQ ID NO: 15018 - DNA, 26 bp, Artificial Sequence
  synthetic circulating small noncoding RNA (sncRNA) 5' transfer RNA (tRNA) half
cgggttcgactcccggtgtgggaaac

SEQ ID NO: 15019 - DNA, 13 bp, Artificial Sequence
  synthetic circulating small noncoding RNA (sncRNA) 5' transfer RNA (tRNA) half
gttcgattccccg

SEQ ID NO: 15020 - DNA, 8 bp, Artificial Sequence
  synthetic circulating small noncoding RNA (sncRNA) 5' transfer RNA (tRNA) half
atttgact

SEQ ID NO: 15021 - DNA, 40 bp, Artificial Sequence
  synthetic circulating small noncoding RNA (sncRNA) 5' transfer RNA (tRNA) half
ctaagccagggattgtgggttcgagtcccatctggggtgg

SEQ ID NO: 15022 - DNA, 24 bp, Artificial Sequence
  synthetic circulating small noncoding RNA (sncRNA) 5' transfer RNA (tRNA) half
actggtagcgtggccgagcggtct

SEQ ID NO: 15023 - DNA, 15 bp, Artificial Sequence
  synthetic circulating small noncoding RNA (sncRNA) 5' transfer RNA (tRNA) half
gcccgcatcctccac

SEQ ID NO: 15024 - DNA, 34 bp, Artificial Sequence
  synthetic circulating small noncoding RNA (sncRNA) 5' transfer RNA (tRNA) half
accccgacgtgattcgaacacgcagccttctgat

SEQ ID NO: 15025 - DNA, 36 bp, Artificial Sequence
  synthetic circulating small noncoding RNA (sncRNA) 5' transfer RNA (tRNA) half
cgggccgcctgggtgaaaaccaggaatcctaaccgc

SEQ ID NO: 15026 - DNA, 28 bp, Artificial Sequence
  synthetic circulating small noncoding RNA (sncRNA) 5' transfer RNA (tRNA) half
tggtggttcagtggtagaattctcgcct

SEQ ID NO: 15027 - DNA, 24 bp, Artificial Sequence
  synthetic circulating small noncoding RNA (sncRNA) 5' transfer RNA (tRNA) half
aaccgaagatcgcgggttcgaacc

SEQ ID NO: 15028 - DNA, 13 bp, Artificial Sequence
  synthetic circulating small noncoding RNA (sncRNA) 5' transfer RNA (tRNA) half
gccgaacgcgcta

SEQ ID NO: 15029 - DNA, 16 bp, Artificial Sequence
  synthetic circulating small noncoding RNA (sncRNA) 5' transfer RNA (tRNA) half
gccggggatcgaaccc

SEQ ID NO: 15030 - DNA, 25 bp, Artificial Sequence
  synthetic circulating small noncoding RNA (sncRNA) 5' transfer RNA (tRNA) half
cgcggcggtgagagcgccgaatcct

SEQ ID NO: 15031 - DNA, 21 bp, Artificial Sequence
  synthetic circulating small noncoding RNA (sncRNA) 5' transfer RNA (tRNA) half
ctacagacgacgaggatggga

SEQ ID NO: 15032 - DNA, 21 bp, Artificial Sequence
  synthetic circulating small noncoding RNA (sncRNA) 5' transfer RNA (tRNA) half
cgaatcctgccgactacgtca

SEQ ID NO: 15033 - DNA, 16 bp, Artificial Sequence
  synthetic circulating small noncoding RNA (sncRNA) 5' transfer RNA (tRNA) half
agggcccggatagctc

SEQ ID NO: 15034 - DNA, 34 bp, Artificial Sequence
  synthetic circulating small noncoding RNA (sncRNA) 5' transfer RNA (tRNA) half
ggcccgtacggggatcgaacccgcgaccttggcg

SEQ ID NO: 15035 - DNA, 30 bp, Artificial Sequence
  synthetic circulating small noncoding RNA (sncRNA) 5' transfer RNA (tRNA) half
attggtggttcaatggtagaattctcgcct

SEQ ID NO: 15036 - DNA, 15 bp, Artificial Sequence
  synthetic circulating small noncoding RNA (sncRNA) 5' transfer RNA (tRNA) half
agtcctgccgcggtc

SEQ ID NO: 15037 - DNA, 31 bp, Artificial Sequence
  synthetic circulating small noncoding RNA (sncRNA) 5' transfer RNA (tRNA) half
gggggtatagctcagaggtagagcatttgac

SEQ ID NO: 15038 - DNA, 18 bp, Artificial Sequence
  synthetic circulating small noncoding RNA (sncRNA) 5' transfer RNA (tRNA) half
tgagagcgccgaatccta

SEQ ID NO: 15039 - DNA, 17 bp, Artificial Sequence
  synthetic circulating small noncoding RNA (sncRNA) 5' transfer RNA (tRNA) half
tggtctggggtgcaggc

SEQ ID NO: 15040 - DNA, 33 bp, Artificial Sequence
  synthetic circulating small noncoding RNA (sncRNA) 5' transfer RNA (tRNA) half
tttcgacgaggatgggattcgaacccatgcgtg

SEQ ID NO: 15041 - DNA, 20 bp, Artificial Sequence
  synthetic circulating small noncoding RNA (sncRNA) 5' transfer RNA (tRNA) half
tcgattccccgacggggagt

SEQ ID NO: 15042 - DNA, 30 bp, Artificial Sequence
  synthetic circulating small noncoding RNA (sncRNA) 5' transfer RNA (tRNA) half
ctcccacatggtctagcggttaggattcct

SEQ ID NO: 15043 - DNA, 17 bp, Artificial Sequence
  synthetic circulating small noncoding RNA (sncRNA) 5' transfer RNA (tRNA) half
ctggttcgattccggct

SEQ ID NO: 15044 - DNA, 21 bp, Artificial Sequence
  synthetic circulating small noncoding RNA (sncRNA) 5' transfer RNA (tRNA) half
ttaaccactcggccacgacta

SEQ ID NO: 15045 - DNA, 13 bp, Artificial Sequence
  synthetic circulating small noncoding RNA (sncRNA) 5' transfer RNA (tRNA) half
tcccggtatggga

SEQ ID NO: 15046 - DNA, 32 bp, Artificial Sequence
  synthetic circulating small noncoding RNA (sncRNA) 5' transfer RNA (tRNA) half
agtccaatgcgctatccattgcgccacggagc

SEQ ID NO: 15047 - DNA, 21 bp, Artificial Sequence
  synthetic circulating small noncoding RNA (sncRNA) 5' transfer RNA (tRNA) half
gtggtatgattctcagtttgg

SEQ ID NO: 15048 - DNA, 15 bp, Artificial Sequence
  synthetic circulating small noncoding RNA (sncRNA) 5' transfer RNA (tRNA) half
gcgttggccgggaat

SEQ ID NO: 15049 - DNA, 13 bp, Artificial Sequence
  synthetic circulating small noncoding RNA (sncRNA) 5' transfer RNA (tRNA) half
cccaccgctgcca

SEQ ID NO: 15050 - DNA, 27 bp, Artificial Sequence
  synthetic circulating small noncoding RNA (sncRNA) 5' transfer RNA (tRNA) half
ggtggttcaatggtagaattctcgcct

SEQ ID NO: 15051 - DNA, 15 bp, Artificial Sequence
  synthetic circulating small noncoding RNA (sncRNA) 5' transfer RNA (tRNA) half
ggtttccccgcgcag

SEQ ID NO: 15052 - DNA, 18 bp, Artificial Sequence
  synthetic circulating small noncoding RNA (sncRNA) 5' transfer RNA (tRNA) half
cgctggtgtagtggtatc

SEQ ID NO: 15053 - DNA, 23 bp, Artificial Sequence
  synthetic circulating small noncoding RNA (sncRNA) 5' transfer RNA (tRNA) half
tgtgtcagaagtgggattcgaac

SEQ ID NO: 15054 - DNA, 13 bp, Artificial Sequence
  synthetic circulating small noncoding RNA (sncRNA) 5' transfer RNA (tRNA) half
gcgacctaaggat

SEQ ID NO: 15055 - DNA, 16 bp, Artificial Sequence
  synthetic circulating small noncoding RNA (sncRNA) 5' transfer RNA (tRNA) half
accgaggttgctgcgg

SEQ ID NO: 15056 - DNA, 37 bp, Artificial Sequence
  synthetic circulating small noncoding RNA (sncRNA) 5' transfer RNA (tRNA) half
tccagcgccttagaccgctcggccacactaccaagct

SEQ ID NO: 15057 - DNA, 23 bp, Artificial Sequence
  synthetic circulating small noncoding RNA (sncRNA) 5' transfer RNA (tRNA) half
tcctcgttagtatagtggtgagt

SEQ ID NO: 15058 - DNA, 37 bp, Artificial Sequence
  synthetic circulating small noncoding RNA (sncRNA) 5' transfer RNA (tRNA) half
aacaggagatcctgggttcgaatcccagtggggccta

SEQ ID NO: 15059 - DNA, 35 bp, Artificial Sequence
  synthetic circulating small noncoding RNA (sncRNA) 5' transfer RNA (tRNA) half
gtgtggcccgtacggggatcgaacccgcgaccttg

SEQ ID NO: 15060 - DNA, 25 bp, Artificial Sequence
  synthetic circulating small noncoding RNA (sncRNA) 5' transfer RNA (tRNA) half
cagggttcaagtccctgttcgggcg

SEQ ID NO: 15061 - DNA, 35 bp, Artificial Sequence
  synthetic circulating small noncoding RNA (sncRNA) 5' transfer RNA (tRNA) half
cccacgaccctgggattaagagtcccatgctctac

SEQ ID NO: 15062 - DNA, 13 bp, Artificial Sequence
  synthetic circulating small noncoding RNA (sncRNA) 5' transfer RNA (tRNA) half
cgaggttgctgcg

SEQ ID NO: 15063 - DNA, 8 bp, Artificial Sequence
  synthetic circulating small noncoding RNA (sncRNA) 5' transfer RNA (tRNA) half
cgagtccc

SEQ ID NO: 15064 - DNA, 14 bp, Artificial Sequence
  synthetic circulating small noncoding RNA (sncRNA) 5' transfer RNA (tRNA) half
gaggtcccaccgag

SEQ ID NO: 15065 - DNA, 23 bp, Artificial Sequence
  synthetic circulating small noncoding RNA (sncRNA) 5' transfer RNA (tRNA) half
actctggtgggattcgaacccac

SEQ ID NO: 15066 - DNA, 25 bp, Artificial Sequence
  synthetic circulating small noncoding RNA (sncRNA) 5' transfer RNA (tRNA) half
ctcccgcgtggcaggcgagaattct

SEQ ID NO: 15067 - DNA, 26 bp, Artificial Sequence
  synthetic circulating small noncoding RNA (sncRNA) 5' transfer RNA (tRNA) half
ccgtcacgaacaggattcgaacctgt

SEQ ID NO: 15068 - DNA, 13 bp, Artificial Sequence
  synthetic circulating small noncoding RNA (sncRNA) 5' transfer RNA (tRNA) half
tcctaaccgctag

SEQ ID NO: 15069 - DNA, 27 bp, Artificial Sequence
  synthetic circulating small noncoding RNA (sncRNA) 5' transfer RNA (tRNA) half
agcgaccacgaagggactcgaaccccc

SEQ ID NO: 15070 - DNA, 11 bp, Artificial Sequence
  synthetic circulating small noncoding RNA (sncRNA) 5' transfer RNA (tRNA) half
cgggcggcgca

SEQ ID NO: 15071 - DNA, 23 bp, Artificial Sequence
  synthetic circulating small noncoding RNA (sncRNA) 5' transfer RNA (tRNA) half
gttatgggcccagcacgcttccg

SEQ ID NO: 15072 - DNA, 33 bp, Artificial Sequence
  synthetic circulating small noncoding RNA (sncRNA) 5' transfer RNA (tRNA) half
tgcgagaggtcccgggttcaaatcccggacgag

SEQ ID NO: 15073 - DNA, 23 bp, Artificial Sequence
  synthetic circulating small noncoding RNA (sncRNA) 5' transfer RNA (tRNA) half
caggttcgagtcctgccgcggtc

SEQ ID NO: 15074 - DNA, 40 bp, Artificial Sequence
  synthetic circulating small noncoding RNA (sncRNA) 5' transfer RNA (tRNA) half
taccccgggtgggactcgaacccacaatccctggcttagg

SEQ ID NO: 15075 - DNA, 22 bp, Artificial Sequence
  synthetic circulating small noncoding RNA (sncRNA) 5' transfer RNA (tRNA) half
caggcggcccgggttcgactcc

SEQ ID NO: 15076 - DNA, 23 bp, Artificial Sequence
  synthetic circulating small noncoding RNA (sncRNA) 5' transfer RNA (tRNA) half
cctcacacgcgaaaggtccccgg

SEQ ID NO: 15077 - DNA, 23 bp, Artificial Sequence
  synthetic circulating small noncoding RNA (sncRNA) 5' transfer RNA (tRNA) half
taaacaggagatcctgggttcga

SEQ ID NO: 15078 - DNA, 15 bp, Artificial Sequence
  synthetic circulating small noncoding RNA (sncRNA) 5' transfer RNA (tRNA) half
gttcaaatctcggtg

SEQ ID NO: 15079 - DNA, 13 bp, Artificial Sequence
  synthetic circulating small noncoding RNA (sncRNA) 5' transfer RNA (tRNA) half
gcgcggggaaacc

SEQ ID NO: 15080 - DNA, 22 bp, Artificial Sequence
  synthetic circulating small noncoding RNA (sncRNA) 5' transfer RNA (tRNA) half
ttagcactctggactctgaatc

SEQ ID NO: 15081 - DNA, 18 bp, Artificial Sequence
  synthetic circulating small noncoding RNA (sncRNA) 5' transfer RNA (tRNA) half
ccgaggacctctcgcgtg

SEQ ID NO: 15082 - DNA, 24 bp, Artificial Sequence
  synthetic circulating small noncoding RNA (sncRNA) 5' transfer RNA (tRNA) half
tctggactctgaatccagcgatcc

SEQ ID NO: 15083 - DNA, 26 bp, Artificial Sequence
  synthetic circulating small noncoding RNA (sncRNA) 5' transfer RNA (tRNA) half
ggttcaattccacctttcgggcggga

SEQ ID NO: 15084 - DNA, 21 bp, Artificial Sequence
  synthetic circulating small noncoding RNA (sncRNA) 5' transfer RNA (tRNA) half
ctccccgtcggggaatcgaac

SEQ ID NO: 15085 - DNA, 23 bp, Artificial Sequence
  synthetic circulating small noncoding RNA (sncRNA) 5' transfer RNA (tRNA) half
cttcagattatgagactgacgcg

SEQ ID NO: 15086 - DNA, 23 bp, Artificial Sequence
  synthetic circulating small noncoding RNA (sncRNA) 5' transfer RNA (tRNA) half
cttccaagcagttgacccgggtt

SEQ ID NO: 15087 - DNA, 34 bp, Artificial Sequence
  synthetic circulating small noncoding RNA (sncRNA) 5' transfer RNA (tRNA) half
tctcccacatggtctagcggttaggattcctggt

SEQ ID NO: 15088 - DNA, 17 bp, Artificial Sequence
  synthetic circulating small noncoding RNA (sncRNA) 5' transfer RNA (tRNA) half
gagcgccaaatcctaac

SEQ ID NO: 15089 - DNA, 11 bp, Artificial Sequence
  synthetic circulating small noncoding RNA (sncRNA) 5' transfer RNA (tRNA) half
cgacggggagt

SEQ ID NO: 15090 - DNA, 43 bp, Artificial Sequence
  synthetic circulating small noncoding RNA (sncRNA) 5' transfer RNA (tRNA) half
ctcggatcgctggattcagagtccagagtgctaaccattacac

SEQ ID NO: 15091 - DNA, 23 bp, Artificial Sequence
  synthetic circulating small noncoding RNA (sncRNA) 5' transfer RNA (tRNA) half
agcctccccgtcggggaatcgaa

SEQ ID NO: 15092 - DNA, 33 bp, Artificial Sequence
  synthetic circulating small noncoding RNA (sncRNA) 5' transfer RNA (tRNA) half
aggttccaccgagatttgaactcggatcgctgg

SEQ ID NO: 15093 - DNA, 27 bp, Artificial Sequence
  synthetic circulating small noncoding RNA (sncRNA) 5' transfer RNA (tRNA) half
gactctgaatccagcgacccgagttca

SEQ ID NO: 15094 - DNA, 26 bp, Artificial Sequence
  synthetic circulating small noncoding RNA (sncRNA) 5' transfer RNA (tRNA) half
ctcgttggtctaggggtatgattctc

SEQ ID NO: 15095 - DNA, 32 bp, Artificial Sequence
  synthetic circulating small noncoding RNA (sncRNA) 5' transfer RNA (tRNA) half
cgtccctgggtgggctcgaaccaccaaccttt

SEQ ID NO: 15096 - DNA, 14 bp, Artificial Sequence
  synthetic circulating small noncoding RNA (sncRNA) 5' transfer RNA (tRNA) half
ggcgagcgtgataa

SEQ ID NO: 15097 - DNA, 6 bp, Artificial Sequence
  synthetic circulating small noncoding RNA (sncRNA) 5' transfer RNA (tRNA) half
cggtct

SEQ ID NO: 15098 - DNA, 23 bp, Artificial Sequence
  synthetic circulating small noncoding RNA (sncRNA) 5' transfer RNA (tRNA) half
ggttcgaatcccatcctcgtccg

SEQ ID NO: 15099 - DNA, 40 bp, Artificial Sequence
  synthetic circulating small noncoding RNA (sncRNA) 5' transfer RNA (tRNA) half
gcgcccgaacagggacttgaaccctggaccctcagattaa

SEQ ID NO: 15100 - DNA, 21 bp, Artificial Sequence
  synthetic circulating small noncoding RNA (sncRNA) 5' transfer RNA (tRNA) half
aaaaccagggctcgtccggga

SEQ ID NO: 15101 - DNA, 9 bp, Artificial Sequence
  synthetic circulating small noncoding RNA (sncRNA) 5' transfer RNA (tRNA) half
tagtcggca

SEQ ID NO: 15102 - DNA, 12 bp, Artificial Sequence
  synthetic circulating small noncoding RNA (sncRNA) 5' transfer RNA (tRNA) half
cagcctcgcctt

SEQ ID NO: 15103 - DNA, 15 bp, Artificial Sequence
  synthetic circulating small noncoding RNA (sncRNA) 5' transfer RNA (tRNA) half
ctataccaccaacgc

SEQ ID NO: 15104 - DNA, 31 bp, Artificial Sequence
  synthetic circulating small noncoding RNA (sncRNA) 5' transfer RNA (tRNA) half
ctggggattgtgggttcgagtcccatctggg

SEQ ID NO: 15105 - DNA, 15 bp, Artificial Sequence
  synthetic circulating small noncoding RNA (sncRNA) 5' transfer RNA (tRNA) half
gaggtagcgggatcg

SEQ ID NO: 15106 - DNA, 40 bp, Artificial Sequence
  synthetic circulating small noncoding RNA (sncRNA) 5' transfer RNA (tRNA) half
tccctggtggtctagtggttaggattcggcgctctcaccg

SEQ ID NO: 15107 - DNA, 39 bp, Artificial Sequence
  synthetic circulating small noncoding RNA (sncRNA) 5' transfer RNA (tRNA) half
gaactcggatcgctggattcagagtccagagtgctagcc

SEQ ID NO: 15108 - DNA, 22 bp, Artificial Sequence
  synthetic circulating small noncoding RNA (sncRNA) 5' transfer RNA (tRNA) half
agtctcttcgggggcgtgggtt

SEQ ID NO: 15109 - DNA, 25 bp, Artificial Sequence
  synthetic circulating small noncoding RNA (sncRNA) 5' transfer RNA (tRNA) half
tcgcgggttcgatccccgtacgggc

SEQ ID NO: 15110 - DNA, 19 bp, Artificial Sequence
  synthetic circulating small noncoding RNA (sncRNA) 5' transfer RNA (tRNA) half
ccttcgatagctcagttgg

SEQ ID NO: 15111 - DNA, 13 bp, Artificial Sequence
  synthetic circulating small noncoding RNA (sncRNA) 5' transfer RNA (tRNA) half
ccgagtggttaag

SEQ ID NO: 15112 - DNA, 19 bp, Artificial Sequence
  synthetic circulating small noncoding RNA (sncRNA) 5' transfer RNA (tRNA) half
cgaacctggaatcttctga

SEQ ID NO: 15113 - DNA, 25 bp, Artificial Sequence
  synthetic circulating small noncoding RNA (sncRNA) 5' transfer RNA (tRNA) half
cggttcgaaaccgggcggaaacaac

SEQ ID NO: 15114 - DNA, 29 bp, Artificial Sequence
  synthetic circulating small noncoding RNA (sncRNA) 5' transfer RNA (tRNA) half
ggccgggaatcgaacccgggcctcccgcg

SEQ ID NO: 15115 - DNA, 18 bp, Artificial Sequence
  synthetic circulating small noncoding RNA (sncRNA) 5' transfer RNA (tRNA) half
acctgcgcggggaaaccc

SEQ ID NO: 15116 - DNA, 12 bp, Artificial Sequence
  synthetic circulating small noncoding RNA (sncRNA) 5' transfer RNA (tRNA) half
gttgctgcggcc

SEQ ID NO: 15117 - DNA, 38 bp, Artificial Sequence
  synthetic circulating small noncoding RNA (sncRNA) 5' transfer RNA (tRNA) half
ggtgcgagaggtcccgggttcaaatcccggacgagccc

SEQ ID NO: 15118 - DNA, 21 bp, Artificial Sequence
  synthetic circulating small noncoding RNA (sncRNA) 5' transfer RNA (tRNA) half
tggtggtctagtggttaggat

SEQ ID NO: 15119 - DNA, 18 bp, Artificial Sequence
  synthetic circulating small noncoding RNA (sncRNA) 5' transfer RNA (tRNA) half
aaggcgtccctgggtggg

SEQ ID NO: 15120 - DNA, 12 bp, Artificial Sequence
  synthetic circulating small noncoding RNA (sncRNA) 5' transfer RNA (tRNA) half
aaagcgccgaat

SEQ ID NO: 15121 - DNA, 12 bp, Artificial Sequence
  synthetic circulating small noncoding RNA (sncRNA) 5' transfer RNA (tRNA) half
atctcggtggga

SEQ ID NO: 15122 - DNA, 32 bp, Artificial Sequence
  synthetic circulating small noncoding RNA (sncRNA) 5' transfer RNA (tRNA) half
tcctcgttagtatagtggtgagtatccctgcc

SEQ ID NO: 15123 - DNA, 19 bp, Artificial Sequence
  synthetic circulating small noncoding RNA (sncRNA) 5' transfer RNA (tRNA) half
gcggggatactcaccacta

SEQ ID NO: 15124 - DNA, 15 bp, Artificial Sequence
  synthetic circulating small noncoding RNA (sncRNA) 5' transfer RNA (tRNA) half
tcggaggcgtgggtt

SEQ ID NO: 15125 - DNA, 21 bp, Artificial Sequence
  synthetic circulating small noncoding RNA (sncRNA) 5' transfer RNA (tRNA) half
tggcagcggtgggattcgaac

SEQ ID NO: 15126 - DNA, 26 bp, Artificial Sequence
  synthetic circulating small noncoding RNA (sncRNA) 5' transfer RNA (tRNA) half
cccataccgggagtcgaacccgggcc

SEQ ID NO: 15127 - DNA, 23 bp, Artificial Sequence
  synthetic circulating small noncoding RNA (sncRNA) 5' transfer RNA (tRNA) half
agtggttatcacgttcgcctcac

SEQ ID NO: 15128 - DNA, 27 bp, Artificial Sequence
  synthetic circulating small noncoding RNA (sncRNA) 5' transfer RNA (tRNA) half
aacccgggccgcggcggtgagagcgcc

SEQ ID NO: 15129 - DNA, 12 bp, Artificial Sequence
  synthetic circulating small noncoding RNA (sncRNA) 5' transfer RNA (tRNA) half
ggattcgaaccg

SEQ ID NO: 15130 - DNA, 32 bp, Artificial Sequence
  synthetic circulating small noncoding RNA (sncRNA) 5' transfer RNA (tRNA) half
ctaagcgagaatcatacccctagaccaacgag

SEQ ID NO: 15131 - DNA, 15 bp, Artificial Sequence
  synthetic circulating small noncoding RNA (sncRNA) 5' transfer RNA (tRNA) half
tctgagggtccaggg

SEQ ID NO: 15132 - DNA, 33 bp, Artificial Sequence
  synthetic circulating small noncoding RNA (sncRNA) 5' transfer RNA (tRNA) half
gggctcatccgggatttgaacccgggacctctc

SEQ ID NO: 15133 - DNA, 33 bp, Artificial Sequence
  synthetic circulating small noncoding RNA (sncRNA) 5' transfer RNA (tRNA) half
aggcaagaattctaccactgaaccaccaatgct

SEQ ID NO: 15134 - DNA, 15 bp, Artificial Sequence
  synthetic circulating small noncoding RNA (sncRNA) 5' transfer RNA (tRNA) half
agtcggcaggattcg

SEQ ID NO: 15135 - DNA, 11 bp, Artificial Sequence
  synthetic circulating small noncoding RNA (sncRNA) 5' transfer RNA (tRNA) half
ggacgtcgtgt

SEQ ID NO: 15136 - DNA, 32 bp, Artificial Sequence
  synthetic circulating small noncoding RNA (sncRNA) 5' transfer RNA (tRNA) half
ctcagggtcgtgggttcgagccccacgttggg

SEQ ID NO: 15137 - DNA, 32 bp, Artificial Sequence
  synthetic circulating small noncoding RNA (sncRNA) 5' transfer RNA (tRNA) half
gtggttcagtggtagaattctcgcctgccacg

SEQ ID NO: 15138 - DNA, 26 bp, Artificial Sequence
  synthetic circulating small noncoding RNA (sncRNA) 5' transfer RNA (tRNA) half
cctgaccgggaatcgaacccgggccg

SEQ ID NO: 15139 - DNA, 29 bp, Artificial Sequence
  synthetic circulating small noncoding RNA (sncRNA) 5' transfer RNA (tRNA) half
tccgtagtgtagtggttagcgcgttcgcc

SEQ ID NO: 15140 - DNA, 19 bp, Artificial Sequence
  synthetic circulating small noncoding RNA (sncRNA) 5' transfer RNA (tRNA) half
aatccccggcacctccagt

SEQ ID NO: 15141 - DNA, 23 bp, Artificial Sequence
  synthetic circulating small noncoding RNA (sncRNA) 5' transfer RNA (tRNA) half
tcggtagagcatgagactcttaa

SEQ ID NO: 15142 - DNA, 35 bp, Artificial Sequence
  synthetic circulating small noncoding RNA (sncRNA) 5' transfer RNA (tRNA) half
gtgcgagaggtcccgggttcaaatcccggacgagc

SEQ ID NO: 15143 - DNA, 26 bp, Artificial Sequence
  synthetic circulating small noncoding RNA (sncRNA) 5' transfer RNA (tRNA) half
accctcaatcttctgatccgaagtca

SEQ ID NO: 15144 - DNA, 33 bp, Artificial Sequence
  synthetic circulating small noncoding RNA (sncRNA) 5' transfer RNA (tRNA) half
acaggagatcctgggttcgaatcccagtggggc

SEQ ID NO: 15145 - DNA, 42 bp, Artificial Sequence
  synthetic circulating small noncoding RNA (sncRNA) 5' transfer RNA (tRNA) half
gttcccataccgggagtcgaacccgggccgcctgggtgaaaa

SEQ ID NO: 15146 - DNA, 7 bp, Artificial Sequence
  synthetic circulating small noncoding RNA (sncRNA) 5' transfer RNA (tRNA) half
aacccgg

SEQ ID NO: 15147 - DNA, 13 bp, Artificial Sequence
  synthetic circulating small noncoding RNA (sncRNA) 5' transfer RNA (tRNA) half
tgaacccgggacc

SEQ ID NO: 15148 - DNA, 23 bp, Artificial Sequence
  synthetic circulating small noncoding RNA (sncRNA) 5' transfer RNA (tRNA) half
ggggattgtgggttcgagtccca

SEQ ID NO: 15149 - DNA, 23 bp, Artificial Sequence
  synthetic circulating small noncoding RNA (sncRNA) 5' transfer RNA (tRNA) half
ggttcgattccccgacggggaga

SEQ ID NO: 15150 - DNA, 21 bp, Artificial Sequence
  synthetic circulating small noncoding RNA (sncRNA) 5' transfer RNA (tRNA) half
gattcgaacctgcgcggggaa

SEQ ID NO: 15151 - DNA, 19 bp, Artificial Sequence
  synthetic circulating small noncoding RNA (sncRNA) 5' transfer RNA (tRNA) half
aacccgggacctctcgcac

SEQ ID NO: 15152 - DNA, 14 bp, Artificial Sequence
  synthetic circulating small noncoding RNA (sncRNA) 5' transfer RNA (tRNA) half
cagtggtagaattc

SEQ ID NO: 15153 - DNA, 24 bp, Artificial Sequence
  synthetic circulating small noncoding RNA (sncRNA) 5' transfer RNA (tRNA) half
aaggctccagtctcttcgggggcg

SEQ ID NO: 15154 - DNA, 39 bp, Artificial Sequence
  synthetic circulating small noncoding RNA (sncRNA) 5' transfer RNA (tRNA) half
gatccatcgacctctgggttatgggcccagcacgcttcc

SEQ ID NO: 15155 - DNA, 19 bp, Artificial Sequence
  synthetic circulating small noncoding RNA (sncRNA) 5' transfer RNA (tRNA) half
ccccgtcggggaattgaac

SEQ ID NO: 15156 - DNA, 25 bp, Artificial Sequence
  synthetic circulating small noncoding RNA (sncRNA) 5' transfer RNA (tRNA) half
tcaaagtccagtgtgctaaccatta

SEQ ID NO: 15157 - DNA, 17 bp, Artificial Sequence
  synthetic circulating small noncoding RNA (sncRNA) 5' transfer RNA (tRNA) half
cgagcggtctaaggcgc

SEQ ID NO: 15158 - DNA, 19 bp, Artificial Sequence
  synthetic circulating small noncoding RNA (sncRNA) 5' transfer RNA (tRNA) half
gctctaccgactgagctag

SEQ ID NO: 15159 - DNA, 23 bp, Artificial Sequence
  synthetic circulating small noncoding RNA (sncRNA) 5' transfer RNA (tRNA) half
ttcgactcccggtatgggaacag

SEQ ID NO: 15160 - DNA, 25 bp, Artificial Sequence
  synthetic circulating small noncoding RNA (sncRNA) 5' transfer RNA (tRNA) half
acagacgacgaggatgggattcgaa

SEQ ID NO: 15161 - DNA, 8 bp, Artificial Sequence
  synthetic circulating small noncoding RNA (sncRNA) 5' transfer RNA (tRNA) half
ggattcga

SEQ ID NO: 15162 - DNA, 20 bp, Artificial Sequence
  synthetic circulating small noncoding RNA (sncRNA) 5' transfer RNA (tRNA) half
gagtggttaaggcgatggac

SEQ ID NO: 15163 - DNA, 42 bp, Artificial Sequence
  synthetic circulating small noncoding RNA (sncRNA) 5' transfer RNA (tRNA) half
gctctcaccgccgcggcccgggttcgattcccggtcagggaa

SEQ ID NO: 15164 - DNA, 21 bp, Artificial Sequence
  synthetic circulating small noncoding RNA (sncRNA) 5' transfer RNA (tRNA) half
gttcgaatcccagcggggcct

SEQ ID NO: 15165 - DNA, 16 bp, Artificial Sequence
  synthetic circulating small noncoding RNA (sncRNA) 5' transfer RNA (tRNA) half
gtcctccgctctacca

SEQ ID NO: 15166 - DNA, 25 bp, Artificial Sequence
  synthetic circulating small noncoding RNA (sncRNA) 5' transfer RNA (tRNA) half
atggtctagcggttaggattcctgg

SEQ ID NO: 15167 - DNA, 10 bp, Artificial Sequence
  synthetic circulating small noncoding RNA (sncRNA) 5' transfer RNA (tRNA) half
atgattctcg

SEQ ID NO: 15168 - DNA, 19 bp, Artificial Sequence
  synthetic circulating small noncoding RNA (sncRNA) 5' transfer RNA (tRNA) half
gatcccactacctctcgca

SEQ ID NO: 15169 - DNA, 10 bp, Artificial Sequence
  synthetic circulating small noncoding RNA (sncRNA) 5' transfer RNA (tRNA) half
aaggtccccg

SEQ ID NO: 15170 - DNA, 17 bp, Artificial Sequence
  synthetic circulating small noncoding RNA (sncRNA) 5' transfer RNA (tRNA) half
ctcggccacctcgtccc

SEQ ID NO: 15171 - DNA, 41 bp, Artificial Sequence
  synthetic circulating small noncoding RNA (sncRNA) 5' transfer RNA (tRNA) half
ttccgtagtgtagtggttatcacgttcgcctcacacgcgaa

SEQ ID NO: 15172 - DNA, 14 bp, Artificial Sequence
  synthetic circulating small noncoding RNA (sncRNA) 5' transfer RNA (tRNA) half
cagacgcgctaccg

SEQ ID NO: 15173 - DNA, 20 bp, Artificial Sequence
  synthetic circulating small noncoding RNA (sncRNA) 5' transfer RNA (tRNA) half
gccacgcgggaggcccgggt

SEQ ID NO: 15174 - DNA, 17 bp, Artificial Sequence
  synthetic circulating small noncoding RNA (sncRNA) 5' transfer RNA (tRNA) half
agctcagtcggtagagc

SEQ ID NO: 15175 - DNA, 16 bp, Artificial Sequence
  synthetic circulating small noncoding RNA (sncRNA) 5' transfer RNA (tRNA) half
gttcgagtcctgccgc

SEQ ID NO: 15176 - DNA, 25 bp, Artificial Sequence
  synthetic circulating small noncoding RNA (sncRNA) 5' transfer RNA (tRNA) half
gaggccccgggttcgatccccggca

SEQ ID NO: 15177 - DNA, 27 bp, Artificial Sequence
  synthetic circulating small noncoding RNA (sncRNA) 5' transfer RNA (tRNA) half
catgctctacccactgagctatctggg

SEQ ID NO: 15178 - DNA, 11 bp, Artificial Sequence
  synthetic circulating small noncoding RNA (sncRNA) 5' transfer RNA (tRNA) half
catctgggtcg

SEQ ID NO: 15179 - DNA, 24 bp, Artificial Sequence
  synthetic circulating small noncoding RNA (sncRNA) 5' transfer RNA (tRNA) half
agggttcgaacctgcgcggggaga

SEQ ID NO: 15180 - DNA, 17 bp, Artificial Sequence
  synthetic circulating small noncoding RNA (sncRNA) 5' transfer RNA (tRNA) half
aagattgcaggttcgag

SEQ ID NO: 15181 - DNA, 22 bp, Artificial Sequence
  synthetic circulating small noncoding RNA (sncRNA) 5' transfer RNA (tRNA) half
gtcggtagagcatcagactttt

SEQ ID NO: 15182 - DNA, 15 bp, Artificial Sequence
  synthetic circulating small noncoding RNA (sncRNA) 5' transfer RNA (tRNA) half
gcctcccgcgtggca

SEQ ID NO: 15183 - DNA, 20 bp, Artificial Sequence
  synthetic circulating small noncoding RNA (sncRNA) 5' transfer RNA (tRNA) half
ggcggaaacaatgactcttt

SEQ ID NO: 15184 - DNA, 20 bp, Artificial Sequence
  synthetic circulating small noncoding RNA (sncRNA) 5' transfer RNA (tRNA) half
gaaccggggacctttcgcgt

SEQ ID NO: 15185 - DNA, 15 bp, Artificial Sequence
  synthetic circulating small noncoding RNA (sncRNA) 5' transfer RNA (tRNA) half
ccgaacgcgctaacc

SEQ ID NO: 15186 - DNA, 18 bp, Artificial Sequence
  synthetic circulating small noncoding RNA (sncRNA) 5' transfer RNA (tRNA) half
ggagactgcgacctgaac

SEQ ID NO: 15187 - DNA, 9 bp, Artificial Sequence
  synthetic circulating small noncoding RNA (sncRNA) 5' transfer RNA (tRNA) half
ctccccgtc

SEQ ID NO: 15188 - DNA, 31 bp, Artificial Sequence
  synthetic circulating small noncoding RNA (sncRNA) 5' transfer RNA (tRNA) half
tgtttccgcccggtttcgaaccggggacctc

SEQ ID NO: 15189 - DNA, 15 bp, Artificial Sequence
  synthetic circulating small noncoding RNA (sncRNA) 5' transfer RNA (tRNA) half
ccggacgagcccagc

SEQ ID NO: 15190 - DNA, 32 bp, Artificial Sequence
  synthetic circulating small noncoding RNA (sncRNA) 5' transfer RNA (tRNA) half
tagtgccgagactcggattcgaaccgaggttg

SEQ ID NO: 15191 - DNA, 25 bp, Artificial Sequence
  synthetic circulating small noncoding RNA (sncRNA) 5' transfer RNA (tRNA) half
ttcgatccatcgacctctgggttat

SEQ ID NO: 15192 - DNA, 25 bp, Artificial Sequence
  synthetic circulating small noncoding RNA (sncRNA) 5' transfer RNA (tRNA) half
ctcgaaccaccaacctttcggttaa

SEQ ID NO: 15193 - DNA, 12 bp, Artificial Sequence
  synthetic circulating small noncoding RNA (sncRNA) 5' transfer RNA (tRNA) half
ctcctgtttact

SEQ ID NO: 15194 - DNA, 35 bp, Artificial Sequence
  synthetic circulating small noncoding RNA (sncRNA) 5' transfer RNA (tRNA) half
ttgtttccgtagtgtagtggttatcacgttcgcct

SEQ ID NO: 15195 - DNA, 23 bp, Artificial Sequence
  synthetic circulating small noncoding RNA (sncRNA) 5' transfer RNA (tRNA) half
tccagagtgctaaccattacacc

SEQ ID NO: 15196 - DNA, 22 bp, Artificial Sequence
  synthetic circulating small noncoding RNA (sncRNA) 5' transfer RNA (tRNA) half
tctggactctgaatccagcgat

SEQ ID NO: 15197 - DNA, 22 bp, Artificial Sequence
  synthetic circulating small noncoding RNA (sncRNA) 5' transfer RNA (tRNA) half
gcgcccaacgtggggctcgaac

SEQ ID NO: 15198 - DNA, 24 bp, Artificial Sequence
  synthetic circulating small noncoding RNA (sncRNA) 5' transfer RNA (tRNA) half
tgccgtgactcggattcgaaccga

SEQ ID NO: 15199 - DNA, 19 bp, Artificial Sequence
  synthetic circulating small noncoding RNA (sncRNA) 5' transfer RNA (tRNA) half
gttcgattcccggcccatg

SEQ ID NO: 15200 - DNA, 17 bp, Artificial Sequence
  synthetic circulating small noncoding RNA (sncRNA) 5' transfer RNA (tRNA) half
ggcttccctgaccggga

SEQ ID NO: 15201 - DNA, 27 bp, Artificial Sequence
  synthetic circulating small noncoding RNA (sncRNA) 5' transfer RNA (tRNA) half
tggttagcactctggactttgaatcca

SEQ ID NO: 15202 - DNA, 26 bp, Artificial Sequence
  synthetic circulating small noncoding RNA (sncRNA) 5' transfer RNA (tRNA) half
gaggtcccaccgagatttgaactcgg

SEQ ID NO: 15203 - DNA, 35 bp, Artificial Sequence
  synthetic circulating small noncoding RNA (sncRNA) 5' transfer RNA (tRNA) half
gccgcggcccgggttcgattcccggtcagggaagc

SEQ ID NO: 15204 - DNA, 20 bp, Artificial Sequence
  synthetic circulating small noncoding RNA (sncRNA) 5' transfer RNA (tRNA) half
ctaccaactgagctatcgaa

SEQ ID NO: 15205 - DNA, 21 bp, Artificial Sequence
  synthetic circulating small noncoding RNA (sncRNA) 5' transfer RNA (tRNA) half
agtggtagaattctcgcctgc

SEQ ID NO: 15206 - DNA, 34 bp, Artificial Sequence
  synthetic circulating small noncoding RNA (sncRNA) 5' transfer RNA (tRNA) half
cccatatggtctagcggttaggattcctggtttt

SEQ ID NO: 15207 - DNA, 12 bp, Artificial Sequence
  synthetic circulating small noncoding RNA (sncRNA) 5' transfer RNA (tRNA) half
ggggtatagctc

SEQ ID NO: 15208 - DNA, 19 bp, Artificial Sequence
  synthetic circulating small noncoding RNA (sncRNA) 5' transfer RNA (tRNA) half
gccgaaacccgggatcgaa

SEQ ID NO: 15209 - DNA, 13 bp, Artificial Sequence
  synthetic circulating small noncoding RNA (sncRNA) 5' transfer RNA (tRNA) half
gcgactctggtgg

SEQ ID NO: 15210 - DNA, 24 bp, Artificial Sequence
  synthetic circulating small noncoding RNA (sncRNA) 5' transfer RNA (tRNA) half
tggttcgaatccggctcgaaggag

SEQ ID NO: 15211 - DNA, 27 bp, Artificial Sequence
  synthetic circulating small noncoding RNA (sncRNA) 5' transfer RNA (tRNA) half
atgcgctctaccactgagctacatccc

SEQ ID NO: 15212 - DNA, 20 bp, Artificial Sequence
  synthetic circulating small noncoding RNA (sncRNA) 5' transfer RNA (tRNA) half
ggccgagcggtctaaggcgc

SEQ ID NO: 15213 - DNA, 22 bp, Artificial Sequence
  synthetic circulating small noncoding RNA (sncRNA) 5' transfer RNA (tRNA) half
cgcctgtcacgcgggagaccgg

SEQ ID NO: 15214 - DNA, 20 bp, Artificial Sequence
  synthetic circulating small noncoding RNA (sncRNA) 5' transfer RNA (tRNA) half
tgttcaggtcgcagtctccc

SEQ ID NO: 15215 - DNA, 37 bp, Artificial Sequence
  synthetic circulating small noncoding RNA (sncRNA) 5' transfer RNA (tRNA) half
gcagaaggtcctgggttcgagccccagtggaaccata

SEQ ID NO: 15216 - DNA, 19 bp, Artificial Sequence
  synthetic circulating small noncoding RNA (sncRNA) 5' transfer RNA (tRNA) half
taatggataaggcactggc

SEQ ID NO: 15217 - DNA, 24 bp, Artificial Sequence
  synthetic circulating small noncoding RNA (sncRNA) 5' transfer RNA (tRNA) half
tctcaccgccgcggcccgggttcg

SEQ ID NO: 15218 - DNA, 31 bp, Artificial Sequence
  synthetic circulating small noncoding RNA (sncRNA) 5' transfer RNA (tRNA) half
ccctggtggtctagtggctaggattcggcgc

SEQ ID NO: 15219 - DNA, 44 bp, Artificial Sequence
  synthetic circulating small noncoding RNA (sncRNA) 5' transfer RNA (tRNA) half
tcagtcggtagagcatgagactcttaatctcagggtcgtgggtt

SEQ ID NO: 15220 - DNA, 34 bp, Artificial Sequence
  synthetic circulating small noncoding RNA (sncRNA) 5' transfer RNA (tRNA) half
ccccgcgcaggttcgaatcctgccgactacgtca

SEQ ID NO: 15221 - DNA, 19 bp, Artificial Sequence
  synthetic circulating small noncoding RNA (sncRNA) 5' transfer RNA (tRNA) half
agcctccctggtggtctag

SEQ ID NO: 15222 - DNA, 34 bp, Artificial Sequence
  synthetic circulating small noncoding RNA (sncRNA) 5' transfer RNA (tRNA) half
ctggctccatagctcaggggttagagcactggtc

SEQ ID NO: 15223 - DNA, 19 bp, Artificial Sequence
  synthetic circulating small noncoding RNA (sncRNA) 5' transfer RNA (tRNA) half
gaacccggggcctcataca

SEQ ID NO: 15224 - DNA, 20 bp, Artificial Sequence
  synthetic circulating small noncoding RNA (sncRNA) 5' transfer RNA (tRNA) half
gatccatcgacctctgggtt

SEQ ID NO: 15225 - DNA, 21 bp, Artificial Sequence
  synthetic circulating small noncoding RNA (sncRNA) 5' transfer RNA (tRNA) half
acccctagaccaacgagccac

SEQ ID NO: 15226 - DNA, 44 bp, Artificial Sequence
  synthetic circulating small noncoding RNA (sncRNA) 5' transfer RNA (tRNA) half
cgtcacgaacaggattcgaacctgtgcggggaaaccccattgga

SEQ ID NO: 15227 - DNA, 31 bp, Artificial Sequence
  synthetic circulating small noncoding RNA (sncRNA) 5' transfer RNA (tRNA) half
acgcgggagaccggggttcgattccccgacg

SEQ ID NO: 15228 - DNA, 24 bp, Artificial Sequence
  synthetic circulating small noncoding RNA (sncRNA) 5' transfer RNA (tRNA) half
tgggttcgaatcccatcctcgtcg

SEQ ID NO: 15229 - DNA, 11 bp, Artificial Sequence
  synthetic circulating small noncoding RNA (sncRNA) 5' transfer RNA (tRNA) half
gcggtgagagc

SEQ ID NO: 15230 - DNA, 26 bp, Artificial Sequence
  synthetic circulating small noncoding RNA (sncRNA) 5' transfer RNA (tRNA) half
acctgcgcggggagaccccaatggat

SEQ ID NO: 15231 - DNA, 32 bp, Artificial Sequence
  synthetic circulating small noncoding RNA (sncRNA) 5' transfer RNA (tRNA) half
tatgaggccccgggttcgatccccggcatctc

SEQ ID NO: 15232 - DNA, 13 bp, Artificial Sequence
  synthetic circulating small noncoding RNA (sncRNA) 5' transfer RNA (tRNA) half
gccttagaccact

SEQ ID NO: 15233 - DNA, 12 bp, Artificial Sequence
  synthetic circulating small noncoding RNA (sncRNA) 5' transfer RNA (tRNA) half
cggggacctctt

SEQ ID NO: 15234 - DNA, 32 bp, Artificial Sequence
  synthetic circulating small noncoding RNA (sncRNA) 5' transfer RNA (tRNA) half
ccggggacctcttgatctgcagtcaaatgctc

SEQ ID NO: 15235 - DNA, 28 bp, Artificial Sequence
  synthetic circulating small noncoding RNA (sncRNA) 5' transfer RNA (tRNA) half
tgccccctctgaggttcgaactcaggac

SEQ ID NO: 15236 - DNA, 21 bp, Artificial Sequence
  synthetic circulating small noncoding RNA (sncRNA) 5' transfer RNA (tRNA) half
tgattctcggtttgggtccga

SEQ ID NO: 15237 - DNA, 40 bp, Artificial Sequence
  synthetic circulating small noncoding RNA (sncRNA) 5' transfer RNA (tRNA) half
gacgaggatgggattcgaacccacgcgtgcagagcacaat

SEQ ID NO: 15238 - DNA, 33 bp, Artificial Sequence
  synthetic circulating small noncoding RNA (sncRNA) 5' transfer RNA (tRNA) half
tccagcgatccgagttcaaatctcggtggaacc

SEQ ID NO: 15239 - DNA, 38 bp, Artificial Sequence
  synthetic circulating small noncoding RNA (sncRNA) 5' transfer RNA (tRNA) half
ggccctgctgggatttgaacccaggatctcctgtttac

SEQ ID NO: 15240 - DNA, 24 bp, Artificial Sequence
  synthetic circulating small noncoding RNA (sncRNA) 5' transfer RNA (tRNA) half
cacccaggcggcccgggttcgact

SEQ ID NO: 15241 - DNA, 13 bp, Artificial Sequence
  synthetic circulating small noncoding RNA (sncRNA) 5' transfer RNA (tRNA) half
aggcgagcgtgat

SEQ ID NO: 15242 - DNA, 27 bp, Artificial Sequence
  synthetic circulating small noncoding RNA (sncRNA) 5' transfer RNA (tRNA) half
aacctcggttcgaatccgagtcacggc

SEQ ID NO: 15243 - DNA, 30 bp, Artificial Sequence
  synthetic circulating small noncoding RNA (sncRNA) 5' transfer RNA (tRNA) half
tgggattaagagtcccatgctctaccgact

SEQ ID NO: 15244 - DNA, 15 bp, Artificial Sequence
  synthetic circulating small noncoding RNA (sncRNA) 5' transfer RNA (tRNA) half
cgaccttcagattat

SEQ ID NO: 15245 - DNA, 24 bp, Artificial Sequence
  synthetic circulating small noncoding RNA (sncRNA) 5' transfer RNA (tRNA) half
cagaagattgcaggttcgagtcct

SEQ ID NO: 15246 - DNA, 15 bp, Artificial Sequence
  synthetic circulating small noncoding RNA (sncRNA) 5' transfer RNA (tRNA) half
gaggtccccggttcg

SEQ ID NO: 15247 - DNA, 21 bp, Artificial Sequence
  synthetic circulating small noncoding RNA (sncRNA) 5' transfer RNA (tRNA) half
gtaaacaggagatcctgggtt

SEQ ID NO: 15248 - DNA, 30 bp, Artificial Sequence
  synthetic circulating small noncoding RNA (sncRNA) 5' transfer RNA (tRNA) half
agaaggttgcgtgttcaaatcacgtcgggg

SEQ ID NO: 15249 - DNA, 21 bp, Artificial Sequence
  synthetic circulating small noncoding RNA (sncRNA) 5' transfer RNA (tRNA) half
tcgaatccgagtcacggcatg

SEQ ID NO: 15250 - DNA, 15 bp, Artificial Sequence
  synthetic circulating small noncoding RNA (sncRNA) 5' transfer RNA (tRNA) half
tcagagtccagagtg

SEQ ID NO: 15251 - DNA, 26 bp, Artificial Sequence
  synthetic circulating small noncoding RNA (sncRNA) 5' transfer RNA (tRNA) half
gtccaatgcgctatccattgcgccac

SEQ ID NO: 15252 - DNA, 22 bp, Artificial Sequence
  synthetic circulating small noncoding RNA (sncRNA) 5' transfer RNA (tRNA) half
tggccgcagcaacctcggttcg

SEQ ID NO: 15253 - DNA, 21 bp, Artificial Sequence
  synthetic circulating small noncoding RNA (sncRNA) 5' transfer RNA (tRNA) half
gttcgattccccgacggggag

SEQ ID NO: 15254 - DNA, 15 bp, Artificial Sequence
  synthetic circulating small noncoding RNA (sncRNA) 5' transfer RNA (tRNA) half
acctccccgtcgggg

SEQ ID NO: 15255 - DNA, 10 bp, Artificial Sequence
  synthetic circulating small noncoding RNA (sncRNA) 5' transfer RNA (tRNA) half
ggggctcgaa

SEQ ID NO: 15256 - DNA, 30 bp, Artificial Sequence
  synthetic circulating small noncoding RNA (sncRNA) 5' transfer RNA (tRNA) half
ggggatgtagctcaatggtagagcacatgc

SEQ ID NO: 15257 - DNA, 36 bp, Artificial Sequence
  synthetic circulating small noncoding RNA (sncRNA) 5' transfer RNA (tRNA) half
caggagatcctgggttcgaatcccagcggtgcctgg

SEQ ID NO: 15258 - DNA, 25 bp, Artificial Sequence
  synthetic circulating small noncoding RNA (sncRNA) 5' transfer RNA (tRNA) half
agagcgccgaatcctaaccactaga

SEQ ID NO: 15259 - DNA, 34 bp, Artificial Sequence
  synthetic circulating small noncoding RNA (sncRNA) 5' transfer RNA (tRNA) half
gccgaatcctaaccactagaccaccagggaagag

SEQ ID NO: 15260 - DNA, 17 bp, Artificial Sequence
  synthetic circulating small noncoding RNA (sncRNA) 5' transfer RNA (tRNA) half
cccgtcggggaatcgaa

SEQ ID NO: 15261 - DNA, 20 bp, Artificial Sequence
  synthetic circulating small noncoding RNA (sncRNA) 5' transfer RNA (tRNA) half
cagtgtgctaaccattacac

SEQ ID NO: 15262 - DNA, 25 bp, Artificial Sequence
  synthetic circulating small noncoding RNA (sncRNA) 5' transfer RNA (tRNA) half
tatggtctagcggttaggattcctg

SEQ ID NO: 15263 - DNA, 16 bp, Artificial Sequence
  synthetic circulating small noncoding RNA (sncRNA) 5' transfer RNA (tRNA) half
tgaatccagcgatccg

SEQ ID NO: 15264 - DNA, 46 bp, Artificial Sequence
  synthetic circulating small noncoding RNA (sncRNA) 5' transfer RNA (tRNA) half
gcctgtcacgcgggagaccggggttcgattccccgacggggagtct

SEQ ID NO: 15265 - DNA, 13 bp, Artificial Sequence
  synthetic circulating small noncoding RNA (sncRNA) 5' transfer RNA (tRNA) half
ttctcgcctgcca

SEQ ID NO: 15266 - DNA, 26 bp, Artificial Sequence
  synthetic circulating small noncoding RNA (sncRNA) 5' transfer RNA (tRNA) half
tccgtagtgtagtggttatcacgctc

SEQ ID NO: 15267 - DNA, 13 bp, Artificial Sequence
  synthetic circulating small noncoding RNA (sncRNA) 5' transfer RNA (tRNA) half
tctcatgctctac

SEQ ID NO: 15268 - DNA, 16 bp, Artificial Sequence
  synthetic circulating small noncoding RNA (sncRNA) 5' transfer RNA (tRNA) half
ttcgaacccacaacct

SEQ ID NO: 15269 - DNA, 12 bp, Artificial Sequence
  synthetic circulating small noncoding RNA (sncRNA) 5' transfer RNA (tRNA) half
cgcaatggacga

SEQ ID NO: 15270 - DNA, 43 bp, Artificial Sequence
  synthetic circulating small noncoding RNA (sncRNA) 5' transfer RNA (tRNA) half
gccccgtgtgaggatcgaactcacgaccttcagattatgagac

SEQ ID NO: 15271 - DNA, 11 bp, Artificial Sequence
  synthetic circulating small noncoding RNA (sncRNA) 5' transfer RNA (tRNA) half
cggttcgaaac

SEQ ID NO: 15272 - DNA, 19 bp, Artificial Sequence
  synthetic circulating small noncoding RNA (sncRNA) 5' transfer RNA (tRNA) half
ggagaccggggttcgattc

SEQ ID NO: 15273 - DNA, 13 bp, Artificial Sequence
  synthetic circulating small noncoding RNA (sncRNA) 5' transfer RNA (tRNA) half
ctcgcctgccacg

SEQ ID NO: 15274 - DNA, 15 bp, Artificial Sequence
  synthetic circulating small noncoding RNA (sncRNA) 5' transfer RNA (tRNA) half
tctagcggttaggat

SEQ ID NO: 15275 - DNA, 21 bp, Artificial Sequence
  synthetic circulating small noncoding RNA (sncRNA) 5' transfer RNA (tRNA) half
gactttgaatccagcgatccg

SEQ ID NO: 15276 - DNA, 23 bp, Artificial Sequence
  synthetic circulating small noncoding RNA (sncRNA) 5' transfer RNA (tRNA) half
gttagcactctggactttgaatc

SEQ ID NO: 15277 - DNA, 23 bp, Artificial Sequence
  synthetic circulating small noncoding RNA (sncRNA) 5' transfer RNA (tRNA) half
tcgcacacgtcgagccagccagg

SEQ ID NO: 15278 - DNA, 28 bp, Artificial Sequence
  synthetic circulating small noncoding RNA (sncRNA) 5' transfer RNA (tRNA) half
cagaagattgagggttcgagtcccttcg

SEQ ID NO: 15279 - DNA, 31 bp, Artificial Sequence
  synthetic circulating small noncoding RNA (sncRNA) 5' transfer RNA (tRNA) half
gctgggattcgaacccaggatctcctgttta

SEQ ID NO: 15280 - DNA, 17 bp, Artificial Sequence
  synthetic circulating small noncoding RNA (sncRNA) 5' transfer RNA (tRNA) half
tgccacgcgggaggccc

SEQ ID NO: 15281 - DNA, 20 bp, Artificial Sequence
  synthetic circulating small noncoding RNA (sncRNA) 5' transfer RNA (tRNA) half
tgaaccctggaccctcagat

SEQ ID NO: 15282 - DNA, 16 bp, Artificial Sequence
  synthetic circulating small noncoding RNA (sncRNA) 5' transfer RNA (tRNA) half
gttagcactctggact

SEQ ID NO: 15283 - DNA, 12 bp, Artificial Sequence
  synthetic circulating small noncoding RNA (sncRNA) 5' transfer RNA (tRNA) half
gccttaaccact

SEQ ID NO: 15284 - DNA, 39 bp, Artificial Sequence
  synthetic circulating small noncoding RNA (sncRNA) 5' transfer RNA (tRNA) half
aacccgggacctctcgcacccaaagcgagaatcataccc

SEQ ID NO: 15285 - DNA, 18 bp, Artificial Sequence
  synthetic circulating small noncoding RNA (sncRNA) 5' transfer RNA (tRNA) half
caggattcgaacctgcgc

SEQ ID NO: 15286 - DNA, 12 bp, Artificial Sequence
  synthetic circulating small noncoding RNA (sncRNA) 5' transfer RNA (tRNA) half
acgaggccggcc

SEQ ID NO: 15287 - DNA, 9 bp, Artificial Sequence
  synthetic circulating small noncoding RNA (sncRNA) 5' transfer RNA (tRNA) half
gttgcgttg

SEQ ID NO: 15288 - DNA, 25 bp, Artificial Sequence
  synthetic circulating small noncoding RNA (sncRNA) 5' transfer RNA (tRNA) half
gccttagaccgctcggccacgctac

SEQ ID NO: 15289 - DNA, 14 bp, Artificial Sequence
  synthetic circulating small noncoding RNA (sncRNA) 5' transfer RNA (tRNA) half
ctcccaactgagct

SEQ ID NO: 15290 - DNA, 17 bp, Artificial Sequence
  synthetic circulating small noncoding RNA (sncRNA) 5' transfer RNA (tRNA) half
ctctcaccgccgcggcc

SEQ ID NO: 15291 - DNA, 14 bp, Artificial Sequence
  synthetic circulating small noncoding RNA (sncRNA) 5' transfer RNA (tRNA) half
gccgagtggttaag

SEQ ID NO: 15292 - DNA, 22 bp, Artificial Sequence
  synthetic circulating small noncoding RNA (sncRNA) 5' transfer RNA (tRNA) half
tggttagcactctggactctga

SEQ ID NO: 15293 - DNA, 36 bp, Artificial Sequence
  synthetic circulating small noncoding RNA (sncRNA) 5' transfer RNA (tRNA) half
tgcatgaggccccgggttcgatccccggcacctcca

SEQ ID NO: 15294 - DNA, 25 bp, Artificial Sequence
  synthetic circulating small noncoding RNA (sncRNA) 5' transfer RNA (tRNA) half
tggtctaggggtatgattctcgctt

SEQ ID NO: 15295 - DNA, 20 bp, Artificial Sequence
  synthetic circulating small noncoding RNA (sncRNA) 5' transfer RNA (tRNA) half
aggttctgggttcgagtccc

SEQ ID NO: 15296 - DNA, 27 bp, Artificial Sequence
  synthetic circulating small noncoding RNA (sncRNA) 5' transfer RNA (tRNA) half
cgaagggactcgaacccccaatcttct

SEQ ID NO: 15297 - DNA, 19 bp, Artificial Sequence
  synthetic circulating small noncoding RNA (sncRNA) 5' transfer RNA (tRNA) half
ccgcgcaggttcgaatcct

SEQ ID NO: 15298 - DNA, 32 bp, Artificial Sequence
  synthetic circulating small noncoding RNA (sncRNA) 5' transfer RNA (tRNA) half
ataacgccaaggtcgcgggttcgatccccgta

SEQ ID NO: 15299 - DNA, 16 bp, Artificial Sequence
  synthetic circulating small noncoding RNA (sncRNA) 5' transfer RNA (tRNA) half
gagccccacgttgggc

SEQ ID NO: 15300 - DNA, 29 bp, Artificial Sequence
  synthetic circulating small noncoding RNA (sncRNA) 5' transfer RNA (tRNA) half
cagacgcgctaccgttgcgccacgaggcc

SEQ ID NO: 15301 - DNA, 21 bp, Artificial Sequence
  synthetic circulating small noncoding RNA (sncRNA) 5' transfer RNA (tRNA) half
tcaggggttagagcactggtc

SEQ ID NO: 15302 - DNA, 20 bp, Artificial Sequence
  synthetic circulating small noncoding RNA (sncRNA) 5' transfer RNA (tRNA) half
ttcgaacccacgcagacata

SEQ ID NO: 15303 - DNA, 27 bp, Artificial Sequence
  synthetic circulating small noncoding RNA (sncRNA) 5' transfer RNA (tRNA) half
agctggaggatgtgggcatcgatccca

SEQ ID NO: 15304 - DNA, 14 bp, Artificial Sequence
  synthetic circulating small noncoding RNA (sncRNA) 5' transfer RNA (tRNA) half
tcgaacccgggcct

SEQ ID NO: 15305 - DNA, 17 bp, Artificial Sequence
  synthetic circulating small noncoding RNA (sncRNA) 5' transfer RNA (tRNA) half
accgggcggaaacaatg

SEQ ID NO: 15306 - DNA, 20 bp, Artificial Sequence
  synthetic circulating small noncoding RNA (sncRNA) 5' transfer RNA (tRNA) half
gagaattctaccactgaacc

SEQ ID NO: 15307 - DNA, 14 bp, Artificial Sequence
  synthetic circulating small noncoding RNA (sncRNA) 5' transfer RNA (tRNA) half
agaattctcgcctg

SEQ ID NO: 15308 - DNA, 23 bp, Artificial Sequence
  synthetic circulating small noncoding RNA (sncRNA) 5' transfer RNA (tRNA) half
ggcaccgctggaattcgaaccca

SEQ ID NO: 15309 - DNA, 23 bp, Artificial Sequence
  synthetic circulating small noncoding RNA (sncRNA) 5' transfer RNA (tRNA) half
aggcgagcgtgatgaccactaca

SEQ ID NO: 15310 - DNA, 30 bp, Artificial Sequence
  synthetic circulating small noncoding RNA (sncRNA) 5' transfer RNA (tRNA) half
caggatggccgagcggtctaaggcgctgcg

SEQ ID NO: 15311 - DNA, 17 bp, Artificial Sequence
  synthetic circulating small noncoding RNA (sncRNA) 5' transfer RNA (tRNA) half
gcggggatactcaccac

SEQ ID NO: 15312 - DNA, 30 bp, Artificial Sequence
  synthetic circulating small noncoding RNA (sncRNA) 5' transfer RNA (tRNA) half
accacgctctaaccaactgagctaaccggc

SEQ ID NO: 15313 - DNA, 11 bp, Artificial Sequence
  synthetic circulating small noncoding RNA (sncRNA) 5' transfer RNA (tRNA) half
cggttagcgcg

SEQ ID NO: 15314 - DNA, 20 bp, Artificial Sequence
  synthetic circulating small noncoding RNA (sncRNA) 5' transfer RNA (tRNA) half
aacctggcggaaacagtttg

SEQ ID NO: 15315 - DNA, 13 bp, Artificial Sequence
  synthetic circulating small noncoding RNA (sncRNA) 5' transfer RNA (tRNA) half
ggcgagcgtgata

SEQ ID NO: 15316 - DNA, 28 bp, Artificial Sequence
  synthetic circulating small noncoding RNA (sncRNA) 5' transfer RNA (tRNA) half
accggggacctcttgatctgcagtcaaa

SEQ ID NO: 15317 - DNA, 33 bp, Artificial Sequence
  synthetic circulating small noncoding RNA (sncRNA) 5' transfer RNA (tRNA) half
agctggggattgtgggttcgagtcccatctggg

SEQ ID NO: 15318 - DNA, 22 bp, Artificial Sequence
  synthetic circulating small noncoding RNA (sncRNA) 5' transfer RNA (tRNA) half
aggcggtagccgtttggagatg

SEQ ID NO: 15319 - DNA, 34 bp, Artificial Sequence
  synthetic circulating small noncoding RNA (sncRNA) 5' transfer RNA (tRNA) half
tgtagtggttatcacgttcgcctcacacgcgaaa

SEQ ID NO: 15320 - DNA, 24 bp, Artificial Sequence
  synthetic circulating small noncoding RNA (sncRNA) 5' transfer RNA (tRNA) half
atgtccattggatcttaagtccaa

SEQ ID NO: 15321 - DNA, 24 bp, Artificial Sequence
  synthetic circulating small noncoding RNA (sncRNA) 5' transfer RNA (tRNA) half
ctctgaatccagcgacccgagttc

SEQ ID NO: 15322 - DNA, 17 bp, Artificial Sequence
  synthetic circulating small noncoding RNA (sncRNA) 5' transfer RNA (tRNA) half
gaacgtgataaccacta

SEQ ID NO: 15323 - DNA, 25 bp, Artificial Sequence
  synthetic circulating small noncoding RNA (sncRNA) 5' transfer RNA (tRNA) half
gtcccatgctgtaccgactgagcca

SEQ ID NO: 15324 - DNA, 15 bp, Artificial Sequence
  synthetic circulating small noncoding RNA (sncRNA) 5' transfer RNA (tRNA) half
tcccggccaatgcag

SEQ ID NO: 15325 - DNA, 15 bp, Artificial Sequence
  synthetic circulating small noncoding RNA (sncRNA) 5' transfer RNA (tRNA) half
ggggatgtagctcag

SEQ ID NO: 15326 - DNA, 8 bp, Artificial Sequence
  synthetic circulating small noncoding RNA (sncRNA) 5' transfer RNA (tRNA) half
gggagacc

SEQ ID NO: 15327 - DNA, 17 bp, Artificial Sequence
  synthetic circulating small noncoding RNA (sncRNA) 5' transfer RNA (tRNA) half
gataaccgctacactac

SEQ ID NO: 15328 - DNA, 13 bp, Artificial Sequence
  synthetic circulating small noncoding RNA (sncRNA) 5' transfer RNA (tRNA) half
ctgggttcgaatc

SEQ ID NO: 15329 - DNA, 14 bp, Artificial Sequence
  synthetic circulating small noncoding RNA (sncRNA) 5' transfer RNA (tRNA) half
tgaaccctggaccc

SEQ ID NO: 15330 - DNA, 34 bp, Artificial Sequence
  synthetic circulating small noncoding RNA (sncRNA) 5' transfer RNA (tRNA) half
ttccgtagtgtagtggttatcacgttcgcctcac

SEQ ID NO: 15331 - DNA, 20 bp, Artificial Sequence
  synthetic circulating small noncoding RNA (sncRNA) 5' transfer RNA (tRNA) half
tagaccgctcggccacacta

SEQ ID NO: 15332 - DNA, 8 bp, Artificial Sequence
  synthetic circulating small noncoding RNA (sncRNA) 5' transfer RNA (tRNA) half
gccgagcg

SEQ ID NO: 15333 - DNA, 9 bp, Artificial Sequence
  synthetic circulating small noncoding RNA (sncRNA) 5' transfer RNA (tRNA) half
cggctagct

SEQ ID NO: 15334 - DNA, 16 bp, Artificial Sequence
  synthetic circulating small noncoding RNA (sncRNA) 5' transfer RNA (tRNA) half
aggttggtggttcgag

SEQ ID NO: 15335 - DNA, 25 bp, Artificial Sequence
  synthetic circulating small noncoding RNA (sncRNA) 5' transfer RNA (tRNA) half
gtgacaggcggggatactaaccact

SEQ ID NO: 15336 - DNA, 17 bp, Artificial Sequence
  synthetic circulating small noncoding RNA (sncRNA) 5' transfer RNA (tRNA) half
gcggggatactaaccac

SEQ ID NO: 15337 - DNA, 33 bp, Artificial Sequence
  synthetic circulating small noncoding RNA (sncRNA) 5' transfer RNA (tRNA) half
ggaggcgtgggttcgaatcccacttctgacaca

SEQ ID NO: 15338 - DNA, 14 bp, Artificial Sequence
  synthetic circulating small noncoding RNA (sncRNA) 5' transfer RNA (tRNA) half
gccactagaccacc

SEQ ID NO: 15339 - DNA, 15 bp, Artificial Sequence
  synthetic circulating small noncoding RNA (sncRNA) 5' transfer RNA (tRNA) half
atcccactcctgaca

SEQ ID NO: 15340 - DNA, 21 bp, Artificial Sequence
  synthetic circulating small noncoding RNA (sncRNA) 5' transfer RNA (tRNA) half
tcccggacgagcccaagcatt

SEQ ID NO: 15341 - DNA, 36 bp, Artificial Sequence
  synthetic circulating small noncoding RNA (sncRNA) 5' transfer RNA (tRNA) half
agttcccacatggtctagcggttaggattcctggtt

SEQ ID NO: 15342 - DNA, 18 bp, Artificial Sequence
  synthetic circulating small noncoding RNA (sncRNA) 5' transfer RNA (tRNA) half
aatcccaccgctgccaac

SEQ ID NO: 15343 - DNA, 22 bp, Artificial Sequence
  synthetic circulating small noncoding RNA (sncRNA) 5' transfer RNA (tRNA) half
tcaccgccgcggcccgggttcg

SEQ ID NO: 15344 - DNA, 24 bp, Artificial Sequence
  synthetic circulating small noncoding RNA (sncRNA) 5' transfer RNA (tRNA) half
gcgcgctaaccgattgcgccactg

SEQ ID NO: 15345 - DNA, 12 bp, Artificial Sequence
  synthetic circulating small noncoding RNA (sncRNA) 5' transfer RNA (tRNA) half
agacgcgctacc

SEQ ID NO: 15346 - DNA, 15 bp, Artificial Sequence
  synthetic circulating small noncoding RNA (sncRNA) 5' transfer RNA (tRNA) half
cgaacctgcgcgggg

SEQ ID NO: 15347 - DNA, 26 bp, Artificial Sequence
  synthetic circulating small noncoding RNA (sncRNA) 5' transfer RNA (tRNA) half
gacgtgattcgaacacgcagccttct

SEQ ID NO: 15348 - DNA, 23 bp, Artificial Sequence
  synthetic circulating small noncoding RNA (sncRNA) 5' transfer RNA (tRNA) half
gggttcgagccccagtggaacca

SEQ ID NO: 15349 - DNA, 21 bp, Artificial Sequence
  synthetic circulating small noncoding RNA (sncRNA) 5' transfer RNA (tRNA) half
tggtagaattctcgcctgcca

SEQ ID NO: 15350 - DNA, 35 bp, Artificial Sequence
  synthetic circulating small noncoding RNA (sncRNA) 5' transfer RNA (tRNA) half
aggcgaatgtgataaccactacactacggaaacac

SEQ ID NO: 15351 - DNA, 36 bp, Artificial Sequence
  synthetic circulating small noncoding RNA (sncRNA) 5' transfer RNA (tRNA) half
agctgaccccgacgtgatttgaacacgcaaccttct

SEQ ID NO: 15352 - DNA, 8 bp, Artificial Sequence
  synthetic circulating small noncoding RNA (sncRNA) 5' transfer RNA (tRNA) half
tttaggct

SEQ ID NO: 15353 - DNA, 24 bp, Artificial Sequence
  synthetic circulating small noncoding RNA (sncRNA) 5' transfer RNA (tRNA) half
gctctaccgactgagctatccggg

SEQ ID NO: 15354 - DNA, 32 bp, Artificial Sequence
  synthetic circulating small noncoding RNA (sncRNA) 5' transfer RNA (tRNA) half
tggtctagtggttaggattcggcgctctcacc

SEQ ID NO: 15355 - DNA, 35 bp, Artificial Sequence
  synthetic circulating small noncoding RNA (sncRNA) 5' transfer RNA (tRNA) half
gtcaggatggccgagtggtctaaggcgccagactc

SEQ ID NO: 15356 - DNA, 44 bp, Artificial Sequence
  synthetic circulating small noncoding RNA (sncRNA) 5' transfer RNA (tRNA) half
tggcagcggtgggattcgaacccacgccatcgaaatgactggag

SEQ ID NO: 15357 - DNA, 11 bp, Artificial Sequence
  synthetic circulating small noncoding RNA (sncRNA) 5' transfer RNA (tRNA) half
acgatcacggc

SEQ ID NO: 15358 - DNA, 26 bp, Artificial Sequence
  synthetic circulating small noncoding RNA (sncRNA) 5' transfer RNA (tRNA) half
attaagagtctcatgctctaccgact

SEQ ID NO: 15359 - DNA, 18 bp, Artificial Sequence
  synthetic circulating small noncoding RNA (sncRNA) 5' transfer RNA (tRNA) half
atcccaccgctgccaacc

SEQ ID NO: 15360 - DNA, 12 bp, Artificial Sequence
  synthetic circulating small noncoding RNA (sncRNA) 5' transfer RNA (tRNA) half
caggttcgactc

SEQ ID NO: 15361 - DNA, 14 bp, Artificial Sequence
  synthetic circulating small noncoding RNA (sncRNA) 5' transfer RNA (tRNA) half
gaacccgcgacctt

SEQ ID NO: 15362 - DNA, 24 bp, Artificial Sequence
  synthetic circulating small noncoding RNA (sncRNA) 5' transfer RNA (tRNA) half
ccacgcctccattcggagaccaga

SEQ ID NO: 15363 - DNA, 27 bp, Artificial Sequence
  synthetic circulating small noncoding RNA (sncRNA) 5' transfer RNA (tRNA) half
ggagctggggattgtgggttcgagtcc

SEQ ID NO: 15364 - DNA, 23 bp, Artificial Sequence
  synthetic circulating small noncoding RNA (sncRNA) 5' transfer RNA (tRNA) half
tggtggtctagtggttaggattc

SEQ ID NO: 15365 - DNA, 20 bp, Artificial Sequence
  synthetic circulating small noncoding RNA (sncRNA) 5' transfer RNA (tRNA) half
ttcgaacccacgcctccatt

SEQ ID NO: 15366 - DNA, 20 bp, Artificial Sequence
  synthetic circulating small noncoding RNA (sncRNA) 5' transfer RNA (tRNA) half
gactcccggtgtgggaacag

SEQ ID NO: 15367 - DNA, 13 bp, Artificial Sequence
  synthetic circulating small noncoding RNA (sncRNA) 5' transfer RNA (tRNA) half
tagtggtatgatt

SEQ ID NO: 15368 - DNA, 9 bp, Artificial Sequence
  synthetic circulating small noncoding RNA (sncRNA) 5' transfer RNA (tRNA) half
cgttcgcct

SEQ ID NO: 15369 - DNA, 34 bp, Artificial Sequence
  synthetic circulating small noncoding RNA (sncRNA) 5' transfer RNA (tRNA) half
agtccagagtgctaaccattacaccatggaacct

SEQ ID NO: 15370 - DNA, 22 bp, Artificial Sequence
  synthetic circulating small noncoding RNA (sncRNA) 5' transfer RNA (tRNA) half
cgaaccggggacctttcgcgtg

SEQ ID NO: 15371 - DNA, 20 bp, Artificial Sequence
  synthetic circulating small noncoding RNA (sncRNA) 5' transfer RNA (tRNA) half
cttagaccgctcggccacgc

SEQ ID NO: 15372 - DNA, 8 bp, Artificial Sequence
  synthetic circulating small noncoding RNA (sncRNA) 5' transfer RNA (tRNA) half
gtcacggc

SEQ ID NO: 15373 - DNA, 33 bp, Artificial Sequence
  synthetic circulating small noncoding RNA (sncRNA) 5' transfer RNA (tRNA) half
tcttgtaaaccaggggtcgcgagttcaaatctc

SEQ ID NO: 15374 - DNA, 20 bp, Artificial Sequence
  synthetic circulating small noncoding RNA (sncRNA) 5' transfer RNA (tRNA) half
cgccgaatcctagccactag

SEQ ID NO: 15375 - DNA, 28 bp, Artificial Sequence
  synthetic circulating small noncoding RNA (sncRNA) 5' transfer RNA (tRNA) half
cgtgtgaggcgaacgtgataaccactac

SEQ ID NO: 15376 - DNA, 41 bp, Artificial Sequence
  synthetic circulating small noncoding RNA (sncRNA) 5' transfer RNA (tRNA) half
gtaaaccgaagatcgcgggttcgaaccccgtccgtgcctgc

SEQ ID NO: 15377 - DNA, 25 bp, Artificial Sequence
  synthetic circulating small noncoding RNA (sncRNA) 5' transfer RNA (tRNA) half
ggtagagcatgagactcttaatctc

SEQ ID NO: 15378 - DNA, 16 bp, Artificial Sequence
  synthetic circulating small noncoding RNA (sncRNA) 5' transfer RNA (tRNA) half
acccacgcccccgaag

SEQ ID NO: 15379 - DNA, 22 bp, Artificial Sequence
  synthetic circulating small noncoding RNA (sncRNA) 5' transfer RNA (tRNA) half
tggcagcggtgggattcgaacc

SEQ ID NO: 15380 - DNA, 25 bp, Artificial Sequence
  synthetic circulating small noncoding RNA (sncRNA) 5' transfer RNA (tRNA) half
tgagtctggcgccttagaccactcg

SEQ ID NO: 15381 - DNA, 16 bp, Artificial Sequence
  synthetic circulating small noncoding RNA (sncRNA) 5' transfer RNA (tRNA) half
cgtagtcggcaggatt

SEQ ID NO: 15382 - DNA, 20 bp, Artificial Sequence
  synthetic circulating small noncoding RNA (sncRNA) 5' transfer RNA (tRNA) half
gggggcacccggatttgaac

SEQ ID NO: 15383 - DNA, 39 bp, Artificial Sequence
  synthetic circulating small noncoding RNA (sncRNA) 5' transfer RNA (tRNA) half
cagtctcttcgggggcgtgggttcgaatcccaccgctgc

SEQ ID NO: 15384 - DNA, 16 bp, Artificial Sequence
  synthetic circulating small noncoding RNA (sncRNA) 5' transfer RNA (tRNA) half
agcacaatggattagc

SEQ ID NO: 15385 - DNA, 13 bp, Artificial Sequence
  synthetic circulating small noncoding RNA (sncRNA) 5' transfer RNA (tRNA) half
cacgcagccttct

SEQ ID NO: 15386 - DNA, 15 bp, Artificial Sequence
  synthetic circulating small noncoding RNA (sncRNA) 5' transfer RNA (tRNA) half
taggcgaatgtgata

SEQ ID NO: 15387 - DNA, 16 bp, Artificial Sequence
  synthetic circulating small noncoding RNA (sncRNA) 5' transfer RNA (tRNA) half
ggtgagagcgccgaat

SEQ ID NO: 15388 - DNA, 12 bp, Artificial Sequence
  synthetic circulating small noncoding RNA (sncRNA) 5' transfer RNA (tRNA) half
aaaccgggcgga

SEQ ID NO: 15389 - DNA, 21 bp, Artificial Sequence
  synthetic circulating small noncoding RNA (sncRNA) 5' transfer RNA (tRNA) half
agggactcgaacccccaatct

SEQ ID NO: 15390 - DNA, 7 bp, Artificial Sequence
  synthetic circulating small noncoding RNA (sncRNA) 5' transfer RNA (tRNA) half
gcgcccg

SEQ ID NO: 15391 - DNA, 39 bp, Artificial Sequence
  synthetic circulating small noncoding RNA (sncRNA) 5' transfer RNA (tRNA) half
cgctggtgtagtggtatcatgcaagattcccattcttgc

SEQ ID NO: 15392 - DNA, 19 bp, Artificial Sequence
  synthetic circulating small noncoding RNA (sncRNA) 5' transfer RNA (tRNA) half
aaagcgagaatcatacccc

SEQ ID NO: 15393 - DNA, 33 bp, Artificial Sequence
  synthetic circulating small noncoding RNA (sncRNA) 5' transfer RNA (tRNA) half
agcgagaatcatacccctagaccaacgagccgc

SEQ ID NO: 15394 - DNA, 35 bp, Artificial Sequence
  synthetic circulating small noncoding RNA (sncRNA) 5' transfer RNA (tRNA) half
tctcatgctctaccgactgagctagccgggcgact

SEQ ID NO: 15395 - DNA, 19 bp, Artificial Sequence
  synthetic circulating small noncoding RNA (sncRNA) 5' transfer RNA (tRNA) half
agccagccaggagtcgaac

SEQ ID NO: 15396 - DNA, 31 bp, Artificial Sequence
  synthetic circulating small noncoding RNA (sncRNA) 5' transfer RNA (tRNA) half
ttcagagtccagagtgctaaccattacacca

SEQ ID NO: 15397 - DNA, 34 bp, Artificial Sequence
  synthetic circulating small noncoding RNA (sncRNA) 5' transfer RNA (tRNA) half
cgcgggagaccggggttcgattccccgacgggga

SEQ ID NO: 15398 - DNA, 18 bp, Artificial Sequence
  synthetic circulating small noncoding RNA (sncRNA) 5' transfer RNA (tRNA) half
tcgtccgggatttgaacc

SEQ ID NO: 15399 - DNA, 24 bp, Artificial Sequence
  synthetic circulating small noncoding RNA (sncRNA) 5' transfer RNA (tRNA) half
gatctgcagtcaaatgctctacca

SEQ ID NO: 15400 - DNA, 25 bp, Artificial Sequence
  synthetic circulating small noncoding RNA (sncRNA) 5' transfer RNA (tRNA) half
ccataacccagaggtcgatggatcg

SEQ ID NO: 15401 - DNA, 29 bp, Artificial Sequence
  synthetic circulating small noncoding RNA (sncRNA) 5' transfer RNA (tRNA) half
accggggttcgattccccgacggggagtc

SEQ ID NO: 15402 - DNA, 11 bp, Artificial Sequence
  synthetic circulating small noncoding RNA (sncRNA) 5' transfer RNA (tRNA) half
agtcgtggccg

SEQ ID NO: 15403 - DNA, 11 bp, Artificial Sequence
  synthetic circulating small noncoding RNA (sncRNA) 5' transfer RNA (tRNA) half
atccccagcac

SEQ ID NO: 15404 - DNA, 43 bp, Artificial Sequence
  synthetic circulating small noncoding RNA (sncRNA) 5' transfer RNA (tRNA) half
gttgccccctctgaggttcgaactcaggaccttcagattatga

SEQ ID NO: 15405 - DNA, 18 bp, Artificial Sequence
  synthetic circulating small noncoding RNA (sncRNA) 5' transfer RNA (tRNA) half
gtcccaccgagatttgaa

SEQ ID NO: 15406 - DNA, 34 bp, Artificial Sequence
  synthetic circulating small noncoding RNA (sncRNA) 5' transfer RNA (tRNA) half
ggataaggcatcagcctccggagctggggattgt

SEQ ID NO: 15407 - DNA, 15 bp, Artificial Sequence
  synthetic circulating small noncoding RNA (sncRNA) 5' transfer RNA (tRNA) half
actcggccatcctga

SEQ ID NO: 15408 - DNA, 18 bp, Artificial Sequence
  synthetic circulating small noncoding RNA (sncRNA) 5' transfer RNA (tRNA) half
gaacccacgcctccattc

SEQ ID NO: 15409 - DNA, 31 bp, Artificial Sequence
  synthetic circulating small noncoding RNA (sncRNA) 5' transfer RNA (tRNA) half
ggggtatagctcaggggtagagcatttgact

SEQ ID NO: 15410 - DNA, 9 bp, Artificial Sequence
  synthetic circulating small noncoding RNA (sncRNA) 5' transfer RNA (tRNA) half
gacttcgga

SEQ ID NO: 15411 - DNA, 16 bp, Artificial Sequence
  synthetic circulating small noncoding RNA (sncRNA) 5' transfer RNA (tRNA) half
accgagtcctaaccac

SEQ ID NO: 15412 - DNA, 9 bp, Artificial Sequence
  synthetic circulating small noncoding RNA (sncRNA) 5' transfer RNA (tRNA) half
ggttcgagc

SEQ ID NO: 15413 - DNA, 17 bp, Artificial Sequence
  synthetic circulating small noncoding RNA (sncRNA) 5' transfer RNA (tRNA) half
acgcgagaggtccccgg

SEQ ID NO: 15414 - DNA, 27 bp, Artificial Sequence
  synthetic circulating small noncoding RNA (sncRNA) 5' transfer RNA (tRNA) half
aatgctctacccctgagttataccccc

SEQ ID NO: 15415 - DNA, 19 bp, Artificial Sequence
  synthetic circulating small noncoding RNA (sncRNA) 5' transfer RNA (tRNA) half
tcaattccacctttcgggc

SEQ ID NO: 15416 - DNA, 30 bp, Artificial Sequence
  synthetic circulating small noncoding RNA (sncRNA) 5' transfer RNA (tRNA) half
ttaggtcgctggttcgactccggctcgaag

SEQ ID NO: 15417 - DNA, 16 bp, Artificial Sequence
  synthetic circulating small noncoding RNA (sncRNA) 5' transfer RNA (tRNA) half
ctaatggataaggcat

SEQ ID NO: 15418 - DNA, 24 bp, Artificial Sequence
  synthetic circulating small noncoding RNA (sncRNA) 5' transfer RNA (tRNA) half
tagcctccccgtcggggaatcgaa

SEQ ID NO: 15419 - DNA, 14 bp, Artificial Sequence
  synthetic circulating small noncoding RNA (sncRNA) 5' transfer RNA (tRNA) half
ggttcgaatccggc

SEQ ID NO: 15420 - DNA, 22 bp, Artificial Sequence
  synthetic circulating small noncoding RNA (sncRNA) 5' transfer RNA (tRNA) half
caggatggccgagtggtctaag

SEQ ID NO: 15421 - DNA, 15 bp, Artificial Sequence
  synthetic circulating small noncoding RNA (sncRNA) 5' transfer RNA (tRNA) half
aaccgggcagaaaca

SEQ ID NO: 15422 - DNA, 18 bp, Artificial Sequence
  synthetic circulating small noncoding RNA (sncRNA) 5' transfer RNA (tRNA) half
atctggggtggttcgttt

SEQ ID NO: 15423 - DNA, 10 bp, Artificial Sequence
  synthetic circulating small noncoding RNA (sncRNA) 5' transfer RNA (tRNA) half
tcgattcccg

SEQ ID NO: 15424 - DNA, 13 bp, Artificial Sequence
  synthetic circulating small noncoding RNA (sncRNA) 5' transfer RNA (tRNA) half
cagtctcataatc

SEQ ID NO: 15425 - DNA, 35 bp, Artificial Sequence
  synthetic circulating small noncoding RNA (sncRNA) 5' transfer RNA (tRNA) half
ggcctcccgcgtggcaggcgagaattctaccactg

SEQ ID NO: 15426 - DNA, 37 bp, Artificial Sequence
  synthetic circulating small noncoding RNA (sncRNA) 5' transfer RNA (tRNA) half
taaacaggagatcctgggttcgactcccagtggggcc

SEQ ID NO: 15427 - DNA, 28 bp, Artificial Sequence
  synthetic circulating small noncoding RNA (sncRNA) 5' transfer RNA (tRNA) half
ggcggtgagagcgccaaatcctaaccac

SEQ ID NO: 15428 - DNA, 28 bp, Artificial Sequence
  synthetic circulating small noncoding RNA (sncRNA) 5' transfer RNA (tRNA) half
cggcccgggttcgactcccggtatggga

SEQ ID NO: 15429 - DNA, 21 bp, Artificial Sequence
  synthetic circulating small noncoding RNA (sncRNA) 5' transfer RNA (tRNA) half
cgatcccactacctctcgcat

SEQ ID NO: 15430 - DNA, 32 bp, Artificial Sequence
  synthetic circulating small noncoding RNA (sncRNA) 5' transfer RNA (tRNA) half
agaagattgagggttcgagtcccttcgtggtc

SEQ ID NO: 15431 - DNA, 32 bp, Artificial Sequence
  synthetic circulating small noncoding RNA (sncRNA) 5' transfer RNA (tRNA) half
ggggttgtagctcagaggtagagcacatgctt

SEQ ID NO: 15432 - DNA, 22 bp, Artificial Sequence
  synthetic circulating small noncoding RNA (sncRNA) 5' transfer RNA (tRNA) half
caatgcagagtactaaccacta

SEQ ID NO: 15433 - DNA, 18 bp, Artificial Sequence
  synthetic circulating small noncoding RNA (sncRNA) 5' transfer RNA (tRNA) half
gaggttgtgagttcgagc

SEQ ID NO: 15434 - DNA, 12 bp, Artificial Sequence
  synthetic circulating small noncoding RNA (sncRNA) 5' transfer RNA (tRNA) half
ccggggaccttt

SEQ ID NO: 15435 - DNA, 12 bp, Artificial Sequence
  synthetic circulating small noncoding RNA (sncRNA) 5' transfer RNA (tRNA) half
tccgggtgcccc

SEQ ID NO: 15436 - DNA, 35 bp, Artificial Sequence
  synthetic circulating small noncoding RNA (sncRNA) 5' transfer RNA (tRNA) half
caggattcgaacctgcgcggggaaaccccaatgga

SEQ ID NO: 15437 - DNA, 13 bp, Artificial Sequence
  synthetic circulating small noncoding RNA (sncRNA) 5' transfer RNA (tRNA) half
cgcggggagaccc

SEQ ID NO: 15438 - DNA, 23 bp, Artificial Sequence
  synthetic circulating small noncoding RNA (sncRNA) 5' transfer RNA (tRNA) half
gactctgaatccagcgacccgag

SEQ ID NO: 15439 - DNA, 16 bp, Artificial Sequence
  synthetic circulating small noncoding RNA (sncRNA) 5' transfer RNA (tRNA) half
cgtgtgaggcgaacgt

SEQ ID NO: 15440 - DNA, 21 bp, Artificial Sequence
  synthetic circulating small noncoding RNA (sncRNA) 5' transfer RNA (tRNA) half
ctgagggtccagggttcaagt

SEQ ID NO: 15441 - DNA, 9 bp, Artificial Sequence
  synthetic circulating small noncoding RNA (sncRNA) 5' transfer RNA (tRNA) half
gcggccaag

SEQ ID NO: 15442 - DNA, 27 bp, Artificial Sequence
  synthetic circulating small noncoding RNA (sncRNA) 5' transfer RNA (tRNA) half
aatccattggggtttccccgcgcaggt

SEQ ID NO: 15443 - DNA, 9 bp, Artificial Sequence
  synthetic circulating small noncoding RNA (sncRNA) 5' transfer RNA (tRNA) half
gtactaacc

SEQ ID NO: 15444 - DNA, 34 bp, Artificial Sequence
  synthetic circulating small noncoding RNA (sncRNA) 5' transfer RNA (tRNA) half
agattaagagtctcatgctctaccgactgagcta

SEQ ID NO: 15445 - DNA, 17 bp, Artificial Sequence
  synthetic circulating small noncoding RNA (sncRNA) 5' transfer RNA (tRNA) half
ccatatggtctagcggt

SEQ ID NO: 15446 - DNA, 16 bp, Artificial Sequence
  synthetic circulating small noncoding RNA (sncRNA) 5' transfer RNA (tRNA) half
ctagcggttaggattc

SEQ ID NO: 15447 - DNA, 12 bp, Artificial Sequence
  synthetic circulating small noncoding RNA (sncRNA) 5' transfer RNA (tRNA) half
cgaatcctaacc

SEQ ID NO: 15448 - DNA, 11 bp, Artificial Sequence
  synthetic circulating small noncoding RNA (sncRNA) 5' transfer RNA (tRNA) half
ggacgagcccc

SEQ ID NO: 15449 - DNA, 7 bp, Artificial Sequence
  synthetic circulating small noncoding RNA (sncRNA) 5' transfer RNA (tRNA) half
gcaaccg

SEQ ID NO: 15450 - DNA, 15 bp, Artificial Sequence
  synthetic circulating small noncoding RNA (sncRNA) 5' transfer RNA (tRNA) half
tggcagtggtgggat

SEQ ID NO: 15451 - DNA, 12 bp, Artificial Sequence
  synthetic circulating small noncoding RNA (sncRNA) 5' transfer RNA (tRNA) half
accactagacca

SEQ ID NO: 15452 - DNA, 13 bp, Artificial Sequence
  synthetic circulating small noncoding RNA (sncRNA) 5' transfer RNA (tRNA) half
tccgactccgccg

SEQ ID NO: 15453 - DNA, 24 bp, Artificial Sequence
  synthetic circulating small noncoding RNA (sncRNA) 5' transfer RNA (tRNA) half
ccgggatcgaaccagggaccttta

SEQ ID NO: 15454 - DNA, 32 bp, Artificial Sequence
  synthetic circulating small noncoding RNA (sncRNA) 5' transfer RNA (tRNA) half
ccaggaatcctaaccgctagaccatatgggag

SEQ ID NO: 15455 - DNA, 38 bp, Artificial Sequence
  synthetic circulating small noncoding RNA (sncRNA) 5' transfer RNA (tRNA) half
gtcgtctcccacatggtctagcggttaggattcctggt

SEQ ID NO: 15456 - DNA, 19 bp, Artificial Sequence
  synthetic circulating small noncoding RNA (sncRNA) 5' transfer RNA (tRNA) half
atggataacgcgtctgact

SEQ ID NO: 15457 - DNA, 19 bp, Artificial Sequence
  synthetic circulating small noncoding RNA (sncRNA) 5' transfer RNA (tRNA) half
catcgccttaaccactcgg

SEQ ID NO: 15458 - DNA, 25 bp, Artificial Sequence
  synthetic circulating small noncoding RNA (sncRNA) 5' transfer RNA (tRNA) half
gcccgggttcgactcccggtgtggg

SEQ ID NO: 15459 - DNA, 18 bp, Artificial Sequence
  synthetic circulating small noncoding RNA (sncRNA) 5' transfer RNA (tRNA) half
gcgagcgtgatgaccact

SEQ ID NO: 15460 - DNA, 14 bp, Artificial Sequence
  synthetic circulating small noncoding RNA (sncRNA) 5' transfer RNA (tRNA) half
tgctctacccctga

SEQ ID NO: 15461 - DNA, 17 bp, Artificial Sequence
  synthetic circulating small noncoding RNA (sncRNA) 5' transfer RNA (tRNA) half
tctgacacagtactctt

SEQ ID NO: 15462 - DNA, 37 bp, Artificial Sequence
  synthetic circulating small noncoding RNA (sncRNA) 5' transfer RNA (tRNA) half
ccgggcctcccgcgtggcaggcgagaattctaccact

SEQ ID NO: 15463 - DNA, 18 bp, Artificial Sequence
  synthetic circulating small noncoding RNA (sncRNA) 5' transfer RNA (tRNA) half
gccccagcgagatttgaa

SEQ ID NO: 15464 - DNA, 24 bp, Artificial Sequence
  synthetic circulating small noncoding RNA (sncRNA) 5' transfer RNA (tRNA) half
ttccctgtctggggattctggtct

SEQ ID NO: 15465 - DNA, 25 bp, Artificial Sequence
  synthetic circulating small noncoding RNA (sncRNA) 5' transfer RNA (tRNA) half
gtggttcaatggtagaattctcgcc

SEQ ID NO: 15466 - DNA, 36 bp, Artificial Sequence
  synthetic circulating small noncoding RNA (sncRNA) 5' transfer RNA (tRNA) half
cagagtccagagtgctaaccattacaccatggaacc

SEQ ID NO: 15467 - DNA, 21 bp, Artificial Sequence
  synthetic circulating small noncoding RNA (sncRNA) 5' transfer RNA (tRNA) half
cgcagcgagcagggttcgaac

SEQ ID NO: 15468 - DNA, 24 bp, Artificial Sequence
  synthetic circulating small noncoding RNA (sncRNA) 5' transfer RNA (tRNA) half
gggggtagcgtggccgagcggtct

SEQ ID NO: 15469 - DNA, 25 bp, Artificial Sequence
  synthetic circulating small noncoding RNA (sncRNA) 5' transfer RNA (tRNA) half
ccgacgtgattcgaacacgcagcct

SEQ ID NO: 15470 - DNA, 19 bp, Artificial Sequence
  synthetic circulating small noncoding RNA (sncRNA) 5' transfer RNA (tRNA) half
ctcggccatcctgacaact

SEQ ID NO: 15471 - DNA, 15 bp, Artificial Sequence
  synthetic circulating small noncoding RNA (sncRNA) 5' transfer RNA (tRNA) half
aacctggaatcttct

SEQ ID NO: 15472 - DNA, 14 bp, Artificial Sequence
  synthetic circulating small noncoding RNA (sncRNA) 5' transfer RNA (tRNA) half
gttcgactcccggc

SEQ ID NO: 15473 - DNA, 34 bp, Artificial Sequence
  synthetic circulating small noncoding RNA (sncRNA) 5' transfer RNA (tRNA) half
gggacctcttgatctgcagtcaaatgctctacca

SEQ ID NO: 15474 - DNA, 11 bp, Artificial Sequence
  synthetic circulating small noncoding RNA (sncRNA) 5' transfer RNA (tRNA) half
cccgcgtggca

SEQ ID NO: 15475 - DNA, 29 bp, Artificial Sequence
  synthetic circulating small noncoding RNA (sncRNA) 5' transfer RNA (tRNA) half
ggcccgggttcgactcccggtatgggaac

SEQ ID NO: 15476 - DNA, 12 bp, Artificial Sequence
  synthetic circulating small noncoding RNA (sncRNA) 5' transfer RNA (tRNA) half
ggagaccggggt

SEQ ID NO: 15477 - DNA, 18 bp, Artificial Sequence
  synthetic circulating small noncoding RNA (sncRNA) 5' transfer RNA (tRNA) half
ggggattagctcaaatgg

SEQ ID NO: 15478 - DNA, 17 bp, Artificial Sequence
  synthetic circulating small noncoding RNA (sncRNA) 5' transfer RNA (tRNA) half
gagagcgccgaatccta

SEQ ID NO: 15479 - DNA, 7 bp, Artificial Sequence
  synthetic circulating small noncoding RNA (sncRNA) 5' transfer RNA (tRNA) half
gcccata

SEQ ID NO: 15480 - DNA, 32 bp, Artificial Sequence
  synthetic circulating small noncoding RNA (sncRNA) 5' transfer RNA (tRNA) half
tggattcaaagtccagagtgctaaccattaca

SEQ ID NO: 15481 - DNA, 16 bp, Artificial Sequence
  synthetic circulating small noncoding RNA (sncRNA) 5' transfer RNA (tRNA) half
ttccggctcgaaggaa

SEQ ID NO: 15482 - DNA, 20 bp, Artificial Sequence
  synthetic circulating small noncoding RNA (sncRNA) 5' transfer RNA (tRNA) half
ttagcactctggactctgaa

SEQ ID NO: 15483 - DNA, 14 bp, Artificial Sequence
  synthetic circulating small noncoding RNA (sncRNA) 5' transfer RNA (tRNA) half
gcagctatgctcac

SEQ ID NO: 15484 - DNA, 28 bp, Artificial Sequence
  synthetic circulating small noncoding RNA (sncRNA) 5' transfer RNA (tRNA) half
tcctgggttcgagccccagtggaaccac

SEQ ID NO: 15485 - DNA, 23 bp, Artificial Sequence
  synthetic circulating small noncoding RNA (sncRNA) 5' transfer RNA (tRNA) half
atcgctttctcgtcactagaagt

SEQ ID NO: 15486 - DNA, 34 bp, Artificial Sequence
  synthetic circulating small noncoding RNA (sncRNA) 5' transfer RNA (tRNA) half
cccgggccgcggcggtgagagcgccgaatcctaa

SEQ ID NO: 15487 - DNA, 21 bp, Artificial Sequence
  synthetic circulating small noncoding RNA (sncRNA) 5' transfer RNA (tRNA) half
cgagtggttaaggcgatggac

SEQ ID NO: 15488 - DNA, 22 bp, Artificial Sequence
  synthetic circulating small noncoding RNA (sncRNA) 5' transfer RNA (tRNA) half
agcgaccacgaagggactcgaa

SEQ ID NO: 15489 - DNA, 19 bp, Artificial Sequence
  synthetic circulating small noncoding RNA (sncRNA) 5' transfer RNA (tRNA) half
cgaccacgaagggactcga

SEQ ID NO: 15490 - DNA, 14 bp, Artificial Sequence
  synthetic circulating small noncoding RNA (sncRNA) 5' transfer RNA (tRNA) half
aacccacgccatcg

SEQ ID NO: 15491 - DNA, 27 bp, Artificial Sequence
  synthetic circulating small noncoding RNA (sncRNA) 5' transfer RNA (tRNA) half
gttcagtggtagaattctcgcctgcca

SEQ ID NO: 15492 - DNA, 16 bp, Artificial Sequence
  synthetic circulating small noncoding RNA (sncRNA) 5' transfer RNA (tRNA) half
tctcaccgccgcggcc

SEQ ID NO: 15493 - DNA, 7 bp, Artificial Sequence
  synthetic circulating small noncoding RNA (sncRNA) 5' transfer RNA (tRNA) half
caccggg

SEQ ID NO: 15494 - DNA, 19 bp, Artificial Sequence
  synthetic circulating small noncoding RNA (sncRNA) 5' transfer RNA (tRNA) half
ttagcactctggactctga

SEQ ID NO: 15495 - DNA, 15 bp, Artificial Sequence
  synthetic circulating small noncoding RNA (sncRNA) 5' transfer RNA (tRNA) half
ctcccggtgtgggaa

SEQ ID NO: 15496 - DNA, 31 bp, Artificial Sequence
  synthetic circulating small noncoding RNA (sncRNA) 5' transfer RNA (tRNA) half
ttaggtcgctggttcgactccggctcgaagg

SEQ ID NO: 15497 - DNA, 19 bp, Artificial Sequence
  synthetic circulating small noncoding RNA (sncRNA) 5' transfer RNA (tRNA) half
tgaccccgacgtgatttga

SEQ ID NO: 15498 - DNA, 21 bp, Artificial Sequence
  synthetic circulating small noncoding RNA (sncRNA) 5' transfer RNA (tRNA) half
aactgggctcgtccgggattt

SEQ ID NO: 15499 - DNA, 15 bp, Artificial Sequence
  synthetic circulating small noncoding RNA (sncRNA) 5' transfer RNA (tRNA) half
agtctcttcggaggc

SEQ ID NO: 15500 - DNA, 11 bp, Artificial Sequence
  synthetic circulating small noncoding RNA (sncRNA) 5' transfer RNA (tRNA) half
gttcgaatccg

SEQ ID NO: 15501 - DNA, 22 bp, Artificial Sequence
  synthetic circulating small noncoding RNA (sncRNA) 5' transfer RNA (tRNA) half
ctgtgcattggccgggaatcga

SEQ ID NO: 15502 - DNA, 27 bp, Artificial Sequence
  synthetic circulating small noncoding RNA (sncRNA) 5' transfer RNA (tRNA) half
gtttccctagtgtagtggttatcacgt

SEQ ID NO: 15503 - DNA, 38 bp, Artificial Sequence
  synthetic circulating small noncoding RNA (sncRNA) 5' transfer RNA (tRNA) half
ggagggggcacccggatttgaaccagggacctcttgat

SEQ ID NO: 15504 - DNA, 29 bp, Artificial Sequence
  synthetic circulating small noncoding RNA (sncRNA) 5' transfer RNA (tRNA) half
gggattagctcaaatggtagagcgctcgc

SEQ ID NO: 15505 - DNA, 22 bp, Artificial Sequence
  synthetic circulating small noncoding RNA (sncRNA) 5' transfer RNA (tRNA) half
cgaacccgggtcaactgcttgg

SEQ ID NO: 15506 - DNA, 16 bp, Artificial Sequence
  synthetic circulating small noncoding RNA (sncRNA) 5' transfer RNA (tRNA) half
actcgaacccgcaacc

SEQ ID NO: 15507 - DNA, 17 bp, Artificial Sequence
  synthetic circulating small noncoding RNA (sncRNA) 5' transfer RNA (tRNA) half
cgaatcccagcggtgcc

SEQ ID NO: 15508 - DNA, 39 bp, Artificial Sequence
  synthetic circulating small noncoding RNA (sncRNA) 5' transfer RNA (tRNA) half
taaacaggagatcctgggttcgaatcccagcggtgcctt

SEQ ID NO: 15509 - DNA, 14 bp, Artificial Sequence
  synthetic circulating small noncoding RNA (sncRNA) 5' transfer RNA (tRNA) half
tcccgcgtgacagg

SEQ ID NO: 15510 - DNA, 13 bp, Artificial Sequence
  synthetic circulating small noncoding RNA (sncRNA) 5' transfer RNA (tRNA) half
caccaacgcaggt

SEQ ID NO: 15511 - DNA, 7 bp, Artificial Sequence
  synthetic circulating small noncoding RNA (sncRNA) 5' transfer RNA (tRNA) half
tcagacg

SEQ ID NO: 15512 - DNA, 16 bp, Artificial Sequence
  synthetic circulating small noncoding RNA (sncRNA) 5' transfer RNA (tRNA) half
gtcgaacctagaatct

SEQ ID NO: 15513 - DNA, 25 bp, Artificial Sequence
  synthetic circulating small noncoding RNA (sncRNA) 5' transfer RNA (tRNA) half
attcgaacccaggatctcctgttta

SEQ ID NO: 15514 - DNA, 12 bp, Artificial Sequence
  synthetic circulating small noncoding RNA (sncRNA) 5' transfer RNA (tRNA) half
gctcggccatcc

SEQ ID NO: 15515 - DNA, 18 bp, Artificial Sequence
  synthetic circulating small noncoding RNA (sncRNA) 5' transfer RNA (tRNA) half
tcgactccggctcgaagg

SEQ ID NO: 15516 - DNA, 34 bp, Artificial Sequence
  synthetic circulating small noncoding RNA (sncRNA) 5' transfer RNA (tRNA) half
ggctcatccgggatttgaacccgggacctctctc

SEQ ID NO: 15517 - DNA, 30 bp, Artificial Sequence
  synthetic circulating small noncoding RNA (sncRNA) 5' transfer RNA (tRNA) half
gttccttcgagccggattcgaaccagcgac

SEQ ID NO: 15518 - DNA, 22 bp, Artificial Sequence
  synthetic circulating small noncoding RNA (sncRNA) 5' transfer RNA (tRNA) half
cctggatagctcagtcggtaga

SEQ ID NO: 15519 - DNA, 17 bp, Artificial Sequence
  synthetic circulating small noncoding RNA (sncRNA) 5' transfer RNA (tRNA) half
atcgaacccgggccgcg

SEQ ID NO: 15520 - DNA, 32 bp, Artificial Sequence
  synthetic circulating small noncoding RNA (sncRNA) 5' transfer RNA (tRNA) half
tgaactcggatcgctggattcagagtccagag

SEQ ID NO: 15521 - DNA, 14 bp, Artificial Sequence
  synthetic circulating small noncoding RNA (sncRNA) 5' transfer RNA (tRNA) half
cagttgacccgggt

SEQ ID NO: 15522 - DNA, 20 bp, Artificial Sequence
  synthetic circulating small noncoding RNA (sncRNA) 5' transfer RNA (tRNA) half
gggttcgattcccgggcggc

SEQ ID NO: 15523 - DNA, 18 bp, Artificial Sequence
  synthetic circulating small noncoding RNA (sncRNA) 5' transfer RNA (tRNA) half
gattcccggcccatgcag

SEQ ID NO: 15524 - DNA, 17 bp, Artificial Sequence
  synthetic circulating small noncoding RNA (sncRNA) 5' transfer RNA (tRNA) half
tcaaagtccagagtgct

SEQ ID NO: 15525 - DNA, 9 bp, Artificial Sequence
  synthetic circulating small noncoding RNA (sncRNA) 5' transfer RNA (tRNA) half
cgccactgg

SEQ ID NO: 15526 - DNA, 27 bp, Artificial Sequence
  synthetic circulating small noncoding RNA (sncRNA) 5' transfer RNA (tRNA) half
gcgagaattctaccattgaactaccaa

SEQ ID NO: 15527 - DNA, 28 bp, Artificial Sequence
  synthetic circulating small noncoding RNA (sncRNA) 5' transfer RNA (tRNA) half
cgggacctctcgcacccaaagcgagaat

SEQ ID NO: 15528 - DNA, 14 bp, Artificial Sequence
  synthetic circulating small noncoding RNA (sncRNA) 5' transfer RNA (tRNA) half
aaaccgggcggaaa

SEQ ID NO: 15529 - DNA, 32 bp, Artificial Sequence
  synthetic circulating small noncoding RNA (sncRNA) 5' transfer RNA (tRNA) half
ttccgtagtgtagtggttatcacgttcgccta

SEQ ID NO: 15530 - DNA, 17 bp, Artificial Sequence
  synthetic circulating small noncoding RNA (sncRNA) 5' transfer RNA (tRNA) half
accccgacgtgatttga

SEQ ID NO: 15531 - DNA, 25 bp, Artificial Sequence
  synthetic circulating small noncoding RNA (sncRNA) 5' transfer RNA (tRNA) half
agtgtagcggttatcacgtctgctt

SEQ ID NO: 15532 - DNA, 15 bp, Artificial Sequence
  synthetic circulating small noncoding RNA (sncRNA) 5' transfer RNA (tRNA) half
aatccccggcacctc

SEQ ID NO: 15533 - DNA, 29 bp, Artificial Sequence
  synthetic circulating small noncoding RNA (sncRNA) 5' transfer RNA (tRNA) half
caaatgctctacccctgagctataccacc

SEQ ID NO: 15534 - DNA, 22 bp, Artificial Sequence
  synthetic circulating small noncoding RNA (sncRNA) 5' transfer RNA (tRNA) half
cctgccacgcgggaggcccggg

SEQ ID NO: 15535 - DNA, 13 bp, Artificial Sequence
  synthetic circulating small noncoding RNA (sncRNA) 5' transfer RNA (tRNA) half
tcttcggaggcgt

SEQ ID NO: 15536 - DNA, 13 bp, Artificial Sequence
  synthetic circulating small noncoding RNA (sncRNA) 5' transfer RNA (tRNA) half
tcggtagagcatg

SEQ ID NO: 15537 - DNA, 18 bp, Artificial Sequence
  synthetic circulating small noncoding RNA (sncRNA) 5' transfer RNA (tRNA) half
tagctcagttgggagagc

SEQ ID NO: 15538 - DNA, 16 bp, Artificial Sequence
  synthetic circulating small noncoding RNA (sncRNA) 5' transfer RNA (tRNA) half
cacgctctaaccaact

SEQ ID NO: 15539 - DNA, 27 bp, Artificial Sequence
  synthetic circulating small noncoding RNA (sncRNA) 5' transfer RNA (tRNA) half
gcccgggttcgactcccggtgtgggaa

SEQ ID NO: 15540 - DNA, 23 bp, Artificial Sequence
  synthetic circulating small noncoding RNA (sncRNA) 5' transfer RNA (tRNA) half
ttcccggccaatgcactctctca

SEQ ID NO: 15541 - DNA, 30 bp, Artificial Sequence
  synthetic circulating small noncoding RNA (sncRNA) 5' transfer RNA (tRNA) half
caggtcgcagtctcccctggaggcgtgggt

SEQ ID NO: 15542 - DNA, 25 bp, Artificial Sequence
  synthetic circulating small noncoding RNA (sncRNA) 5' transfer RNA (tRNA) half
ggggatgtagctcagcggtagagca

SEQ ID NO: 15543 - DNA, 21 bp, Artificial Sequence
  synthetic circulating small noncoding RNA (sncRNA) 5' transfer RNA (tRNA) half
ttcccagaggttcaaatcctc

SEQ ID NO: 15544 - DNA, 22 bp, Artificial Sequence
  synthetic circulating small noncoding RNA (sncRNA) 5' transfer RNA (tRNA) half
gagcggtctaaggcgctggatt

SEQ ID NO: 15545 - DNA, 11 bp, Artificial Sequence
  synthetic circulating small noncoding RNA (sncRNA) 5' transfer RNA (tRNA) half
tcggcgctctc

SEQ ID NO: 15546 - DNA, 21 bp, Artificial Sequence
  synthetic circulating small noncoding RNA (sncRNA) 5' transfer RNA (tRNA) half
cccggacgagcccaattttat

SEQ ID NO: 15547 - DNA, 20 bp, Artificial Sequence
  synthetic circulating small noncoding RNA (sncRNA) 5' transfer RNA (tRNA) half
ctagtggttaggattcggtg

SEQ ID NO: 15548 - DNA, 21 bp, Artificial Sequence
  synthetic circulating small noncoding RNA (sncRNA) 5' transfer RNA (tRNA) half
agatcgttccttcgagccgga

SEQ ID NO: 15549 - DNA, 16 bp, Artificial Sequence
  synthetic circulating small noncoding RNA (sncRNA) 5' transfer RNA (tRNA) half
cagtggtagagcgcgc

SEQ ID NO: 15550 - DNA, 29 bp, Artificial Sequence
  synthetic circulating small noncoding RNA (sncRNA) 5' transfer RNA (tRNA) half
ggccccatggtgtaatggttagcactctg

SEQ ID NO: 15551 - DNA, 22 bp, Artificial Sequence
  synthetic circulating small noncoding RNA (sncRNA) 5' transfer RNA (tRNA) half
gttgcgttggccgggaatcgaa

SEQ ID NO: 15552 - DNA, 27 bp, Artificial Sequence
  synthetic circulating small noncoding RNA (sncRNA) 5' transfer RNA (tRNA) half
acccacgaccctgagattaagagtctc

SEQ ID NO: 15553 - DNA, 17 bp, Artificial Sequence
  synthetic circulating small noncoding RNA (sncRNA) 5' transfer RNA (tRNA) half
tcggggaatcgaacccc

SEQ ID NO: 15554 - DNA, 30 bp, Artificial Sequence
  synthetic circulating small noncoding RNA (sncRNA) 5' transfer RNA (tRNA) half
gccaggtaggagtcgaacctacaatcttct

SEQ ID NO: 15555 - DNA, 14 bp, Artificial Sequence
  synthetic circulating small noncoding RNA (sncRNA) 5' transfer RNA (tRNA) half
gaaaggtccccggt

SEQ ID NO: 15556 - DNA, 34 bp, Artificial Sequence
  synthetic circulating small noncoding RNA (sncRNA) 5' transfer RNA (tRNA) half
agtcaaatgctctaccactgagctataccccctc

SEQ ID NO: 15557 - DNA, 9 bp, Artificial Sequence
  synthetic circulating small noncoding RNA (sncRNA) 5' transfer RNA (tRNA) half
aggtctcgt

SEQ ID NO: 15558 - DNA, 20 bp, Artificial Sequence
  synthetic circulating small noncoding RNA (sncRNA) 5' transfer RNA (tRNA) half
ccttcgatagctcagctggt

SEQ ID NO: 15559 - DNA, 21 bp, Artificial Sequence
  synthetic circulating small noncoding RNA (sncRNA) 5' transfer RNA (tRNA) half
gggagaccggggttcgattcc

SEQ ID NO: 15560 - DNA, 38 bp, Artificial Sequence
  synthetic circulating small noncoding RNA (sncRNA) 5' transfer RNA (tRNA) half
aagccagggattgtgggttcgagtcccatctggggtgg

SEQ ID NO: 15561 - DNA, 15 bp, Artificial Sequence
  synthetic circulating small noncoding RNA (sncRNA) 5' transfer RNA (tRNA) half
tcaaatgctctacca

SEQ ID NO: 15562 - DNA, 29 bp, Artificial Sequence
  synthetic circulating small noncoding RNA (sncRNA) 5' transfer RNA (tRNA) half
ggtatagctcaggggtagagcatttgact

SEQ ID NO: 15563 - DNA, 12 bp, Artificial Sequence
  synthetic circulating small noncoding RNA (sncRNA) 5' transfer RNA (tRNA) half
tcgagccccacg

SEQ ID NO: 15564 - DNA, 15 bp, Artificial Sequence
  synthetic circulating small noncoding RNA (sncRNA) 5' transfer RNA (tRNA) half
cccggtcagggaagt

SEQ ID NO: 15565 - DNA, 12 bp, Artificial Sequence
  synthetic circulating small noncoding RNA (sncRNA) 5' transfer RNA (tRNA) half
aggagtcgaacc

SEQ ID NO: 15566 - DNA, 18 bp, Artificial Sequence
  synthetic circulating small noncoding RNA (sncRNA) 5' transfer RNA (tRNA) half
ctccccgtcggggaatcg

SEQ ID NO: 15567 - DNA, 22 bp, Artificial Sequence
  synthetic circulating small noncoding RNA (sncRNA) 5' transfer RNA (tRNA) half
ttgaatccagcgatccgagttc

SEQ ID NO: 15568 - DNA, 35 bp, Artificial Sequence
  synthetic circulating small noncoding RNA (sncRNA) 5' transfer RNA (tRNA) half
ttccaagcagttgacccgggttcgattcccggcca

SEQ ID NO: 15569 - DNA, 29 bp, Artificial Sequence
  synthetic circulating small noncoding RNA (sncRNA) 5' transfer RNA (tRNA) half
tgagattaagagtctcatgctctaccgac

SEQ ID NO: 15570 - DNA, 23 bp, Artificial Sequence
  synthetic circulating small noncoding RNA (sncRNA) 5' transfer RNA (tRNA) half
acccgggccgcctgggtgaaaac

SEQ ID NO: 15571 - DNA, 16 bp, Artificial Sequence
  synthetic circulating small noncoding RNA (sncRNA) 5' transfer RNA (tRNA) half
agcagaggatggtttc

SEQ ID NO: 15572 - DNA, 31 bp, Artificial Sequence
  synthetic circulating small noncoding RNA (sncRNA) 5' transfer RNA (tRNA) half
gattgcaggttcgagtcctgccgcggtcgac

SEQ ID NO: 15573 - DNA, 31 bp, Artificial Sequence
  synthetic circulating small noncoding RNA (sncRNA) 5' transfer RNA (tRNA) half
cgggggtgtagctcagtggtagagcgcgtgc

SEQ ID NO: 15574 - DNA, 13 bp, Artificial Sequence
  synthetic circulating small noncoding RNA (sncRNA) 5' transfer RNA (tRNA) half
cttccgctgcgcc

SEQ ID NO: 15575 - DNA, 19 bp, Artificial Sequence
  synthetic circulating small noncoding RNA (sncRNA) 5' transfer RNA (tRNA) half
tctgaatccagcgacccga

SEQ ID NO: 15576 - DNA, 16 bp, Artificial Sequence
  synthetic circulating small noncoding RNA (sncRNA) 5' transfer RNA (tRNA) half
agatgccggggctcga

SEQ ID NO: 15577 - DNA, 15 bp, Artificial Sequence
  synthetic circulating small noncoding RNA (sncRNA) 5' transfer RNA (tRNA) half
gtttccctagtgtag

SEQ ID NO: 15578 - DNA, 37 bp, Artificial Sequence
  synthetic circulating small noncoding RNA (sncRNA) 5' transfer RNA (tRNA) half
ggtgagagcgccgaatcctaaccactagaccaccagg

SEQ ID NO: 15579 - DNA, 34 bp, Artificial Sequence
  synthetic circulating small noncoding RNA (sncRNA) 5' transfer RNA (tRNA) half
aacccgggacctctcgcacccaaagcgagaatca

SEQ ID NO: 15580 - DNA, 23 bp, Artificial Sequence
  synthetic circulating small noncoding RNA (sncRNA) 5' transfer RNA (tRNA) half
ccacaacgcagagtactaaccac

SEQ ID NO: 15581 - DNA, 13 bp, Artificial Sequence
  synthetic circulating small noncoding RNA (sncRNA) 5' transfer RNA (tRNA) half
gccgaatcctagc

SEQ ID NO: 15582 - DNA, 13 bp, Artificial Sequence
  synthetic circulating small noncoding RNA (sncRNA) 5' transfer RNA (tRNA) half
ctgcgccactctg

SEQ ID NO: 15583 - DNA, 14 bp, Artificial Sequence
  synthetic circulating small noncoding RNA (sncRNA) 5' transfer RNA (tRNA) half
tcgacgaggatggg

SEQ ID NO: 15584 - DNA, 20 bp, Artificial Sequence
  synthetic circulating small noncoding RNA (sncRNA) 5' transfer RNA (tRNA) half
ttcgagccccacgttgggcg

SEQ ID NO: 15585 - DNA, 15 bp, Artificial Sequence
  synthetic circulating small noncoding RNA (sncRNA) 5' transfer RNA (tRNA) half
caaatccgggtgccc

SEQ ID NO: 15586 - DNA, 29 bp, Artificial Sequence
  synthetic circulating small noncoding RNA (sncRNA) 5' transfer RNA (tRNA) half
cgcgggtgacccgggttcgattcccggcc

SEQ ID NO: 15587 - DNA, 11 bp, Artificial Sequence
  synthetic circulating small noncoding RNA (sncRNA) 5' transfer RNA (tRNA) half
cgcccggtttc

SEQ ID NO: 15588 - DNA, 19 bp, Artificial Sequence
  synthetic circulating small noncoding RNA (sncRNA) 5' transfer RNA (tRNA) half
tgtttgggctcgtccggga

SEQ ID NO: 15589 - DNA, 43 bp, Artificial Sequence
  synthetic circulating small noncoding RNA (sncRNA) 5' transfer RNA (tRNA) half
gggaatcgaaccccggtctcccgcgtgacaggcggggatactc

SEQ ID NO: 15590 - DNA, 15 bp, Artificial Sequence
  synthetic circulating small noncoding RNA (sncRNA) 5' transfer RNA (tRNA) half
tggtagagcatttga

SEQ ID NO: 15591 - DNA, 16 bp, Artificial Sequence
  synthetic circulating small noncoding RNA (sncRNA) 5' transfer RNA (tRNA) half
caggcggcccgggttc

SEQ ID NO: 15592 - DNA, 12 bp, Artificial Sequence
  synthetic circulating small noncoding RNA (sncRNA) 5' transfer RNA (tRNA) half
ggccatcacagc

SEQ ID NO: 15593 - DNA, 10 bp, Artificial Sequence
  synthetic circulating small noncoding RNA (sncRNA) 5' transfer RNA (tRNA) half
gcccccttct

SEQ ID NO: 15594 - DNA, 10 bp, Artificial Sequence
  synthetic circulating small noncoding RNA (sncRNA) 5' transfer RNA (tRNA) half
cgaaccaggg

SEQ ID NO: 15595 - DNA, 7 bp, Artificial Sequence
  synthetic circulating small noncoding RNA (sncRNA) 5' transfer RNA (tRNA) half
tcggcgc

SEQ ID NO: 15596 - DNA, 12 bp, Artificial Sequence
  synthetic circulating small noncoding RNA (sncRNA) 5' transfer RNA (tRNA) half
aaggtcccaccg

SEQ ID NO: 15597 - DNA, 15 bp, Artificial Sequence
  synthetic circulating small noncoding RNA (sncRNA) 5' transfer RNA (tRNA) half
gcagcgagcagggtt

SEQ ID NO: 15598 - DNA, 28 bp, Artificial Sequence
  synthetic circulating small noncoding RNA (sncRNA) 5' transfer RNA (tRNA) half
tccccgtcggggaatcgaaccccggtct

SEQ ID NO: 15599 - DNA, 18 bp, Artificial Sequence
  synthetic circulating small noncoding RNA (sncRNA) 5' transfer RNA (tRNA) half
gttcaatccccggcacct

SEQ ID NO: 15600 - DNA, 21 bp, Artificial Sequence
  synthetic circulating small noncoding RNA (sncRNA) 5' transfer RNA (tRNA) half
ttccgctgcgccactctgcta

SEQ ID NO: 15601 - DNA, 13 bp, Artificial Sequence
  synthetic circulating small noncoding RNA (sncRNA) 5' transfer RNA (tRNA) half
gttgcgccacgag

SEQ ID NO: 15602 - DNA, 14 bp, Artificial Sequence
  synthetic circulating small noncoding RNA (sncRNA) 5' transfer RNA (tRNA) half
cactatactaacga

SEQ ID NO: 15603 - DNA, 38 bp, Artificial Sequence
  synthetic circulating small noncoding RNA (sncRNA) 5' transfer RNA (tRNA) half
accccgacgtgatttgaacacgcaaccttctgatctgg

SEQ ID NO: 15604 - DNA, 37 bp, Artificial Sequence
  synthetic circulating small noncoding RNA (sncRNA) 5' transfer RNA (tRNA) half
ccccaggtgggactcgaacccacaatccctggcttag

SEQ ID NO: 15605 - DNA, 23 bp, Artificial Sequence
  synthetic circulating small noncoding RNA (sncRNA) 5' transfer RNA (tRNA) half
ccagaggtcgatggatcgaaacc

SEQ ID NO: 15606 - DNA, 18 bp, Artificial Sequence
  synthetic circulating small noncoding RNA (sncRNA) 5' transfer RNA (tRNA) half
cgtggcctaatggataag

SEQ ID NO: 15607 - DNA, 14 bp, Artificial Sequence
  synthetic circulating small noncoding RNA (sncRNA) 5' transfer RNA (tRNA) half
acccacgcctccga

SEQ ID NO: 15608 - DNA, 33 bp, Artificial Sequence
  synthetic circulating small noncoding RNA (sncRNA) 5' transfer RNA (tRNA) half
cgtgtgaggatcgaactcacgaccttcagatta

SEQ ID NO: 15609 - DNA, 31 bp, Artificial Sequence
  synthetic circulating small noncoding RNA (sncRNA) 5' transfer RNA (tRNA) half
acgacgaggatgggattcgaacccacgcgtg

SEQ ID NO: 15610 - DNA, 14 bp, Artificial Sequence
  synthetic circulating small noncoding RNA (sncRNA) 5' transfer RNA (tRNA) half
ccgagtggttaagg

SEQ ID NO: 15611 - DNA, 11 bp, Artificial Sequence
  synthetic circulating small noncoding RNA (sncRNA) 5' transfer RNA (tRNA) half
tcgaatccggc

SEQ ID NO: 15612 - DNA, 19 bp, Artificial Sequence
  synthetic circulating small noncoding RNA (sncRNA) 5' transfer RNA (tRNA) half
aggccccgggttcgatccc

SEQ ID NO: 15613 - DNA, 29 bp, Artificial Sequence
  synthetic circulating small noncoding RNA (sncRNA) 5' transfer RNA (tRNA) half
cgcggcccgggttcgattcccggtcaggg

SEQ ID NO: 15614 - DNA, 8 bp, Artificial Sequence
  synthetic circulating small noncoding RNA (sncRNA) 5' transfer RNA (tRNA) half
cgcccgaa

SEQ ID NO: 15615 - DNA, 13 bp, Artificial Sequence
  synthetic circulating small noncoding RNA (sncRNA) 5' transfer RNA (tRNA) half
tcggccacctcgt

SEQ ID NO: 15616 - DNA, 27 bp, Artificial Sequence
  synthetic circulating small noncoding RNA (sncRNA) 5' transfer RNA (tRNA) half
acgaccttcagattatgagactgacgc

SEQ ID NO: 15617 - DNA, 30 bp, Artificial Sequence
  synthetic circulating small noncoding RNA (sncRNA) 5' transfer RNA (tRNA) half
ccgcggcccgggttcgattcccggtcaggg

SEQ ID NO: 15618 - DNA, 22 bp, Artificial Sequence
  synthetic circulating small noncoding RNA (sncRNA) 5' transfer RNA (tRNA) half
gattcaaagtccagagtgctaa

SEQ ID NO: 15619 - DNA, 20 bp, Artificial Sequence
  synthetic circulating small noncoding RNA (sncRNA) 5' transfer RNA (tRNA) half
agcactctggactttgaatc

SEQ ID NO: 15620 - DNA, 12 bp, Artificial Sequence
  synthetic circulating small noncoding RNA (sncRNA) 5' transfer RNA (tRNA) half
cgtgctgggccc

SEQ ID NO: 15621 - DNA, 16 bp, Artificial Sequence
  synthetic circulating small noncoding RNA (sncRNA) 5' transfer RNA (tRNA) half
caggcggggatactca

SEQ ID NO: 15622 - DNA, 35 bp, Artificial Sequence
  synthetic circulating small noncoding RNA (sncRNA) 5' transfer RNA (tRNA) half
ttccgcccggtttcgaaccggggacctttcgcgtg

SEQ ID NO: 15623 - DNA, 19 bp, Artificial Sequence
  synthetic circulating small noncoding RNA (sncRNA) 5' transfer RNA (tRNA) half
gggttcgattcccggtcag

SEQ ID NO: 15624 - DNA, 12 bp, Artificial Sequence
  synthetic circulating small noncoding RNA (sncRNA) 5' transfer RNA (tRNA) half
ggccgggaatca

SEQ ID NO: 15625 - DNA, 32 bp, Artificial Sequence
  synthetic circulating small noncoding RNA (sncRNA) 5' transfer RNA (tRNA) half
acaggagatcctgggttcgaatcccagcgggg

SEQ ID NO: 15626 - DNA, 11 bp, Artificial Sequence
  synthetic circulating small noncoding RNA (sncRNA) 5' transfer RNA (tRNA) half
cgagaatcata

SEQ ID NO: 15627 - DNA, 18 bp, Artificial Sequence
  synthetic circulating small noncoding RNA (sncRNA) 5' transfer RNA (tRNA) half
gttcgattcccgggcggc

SEQ ID NO: 15628 - DNA, 36 bp, Artificial Sequence
  synthetic circulating small noncoding RNA (sncRNA) 5' transfer RNA (tRNA) half
ccagggattgtgggttcgagtcccacctggggtggt

SEQ ID NO: 15629 - DNA, 15 bp, Artificial Sequence
  synthetic circulating small noncoding RNA (sncRNA) 5' transfer RNA (tRNA) half
gtctcatgatctacc

SEQ ID NO: 15630 - DNA, 23 bp, Artificial Sequence
  synthetic circulating small noncoding RNA (sncRNA) 5' transfer RNA (tRNA) half
gacgaaggtgggattcgaaccca

SEQ ID NO: 15631 - DNA, 35 bp, Artificial Sequence
  synthetic circulating small noncoding RNA (sncRNA) 5' transfer RNA (tRNA) half
acctccccgtcggggaatcgaaccccggtctcccg

SEQ ID NO: 15632 - DNA, 11 bp, Artificial Sequence
  synthetic circulating small noncoding RNA (sncRNA) 5' transfer RNA (tRNA) half
ccagcggtgcc

SEQ ID NO: 15633 - DNA, 30 bp, Artificial Sequence
  synthetic circulating small noncoding RNA (sncRNA) 5' transfer RNA (tRNA) half
tgactcggattcgaaccgaggttgctgcgg

SEQ ID NO: 15634 - DNA, 12 bp, Artificial Sequence
  synthetic circulating small noncoding RNA (sncRNA) 5' transfer RNA (tRNA) half
tcccataccggg

SEQ ID NO: 15635 - DNA, 16 bp, Artificial Sequence
  synthetic circulating small noncoding RNA (sncRNA) 5' transfer RNA (tRNA) half
taagcgagaatcatac

SEQ ID NO: 15636 - DNA, 12 bp, Artificial Sequence
  synthetic circulating small noncoding RNA (sncRNA) 5' transfer RNA (tRNA) half
actaaaccgccc

SEQ ID NO: 15637 - DNA, 24 bp, Artificial Sequence
  synthetic circulating small noncoding RNA (sncRNA) 5' transfer RNA (tRNA) half
tagtgtagtggttatcacgttcgc

SEQ ID NO: 15638 - DNA, 10 bp, Artificial Sequence
  synthetic circulating small noncoding RNA (sncRNA) 5' transfer RNA (tRNA) half
cttagaccgc

SEQ ID NO: 15639 - DNA, 23 bp, Artificial Sequence
  synthetic circulating small noncoding RNA (sncRNA) 5' transfer RNA (tRNA) half
tctgggttatgggcccagcacgc

SEQ ID NO: 15640 - DNA, 16 bp, Artificial Sequence
  synthetic circulating small noncoding RNA (sncRNA) 5' transfer RNA (tRNA) half
ttcgaatcccaccgct

SEQ ID NO: 15641 - DNA, 7 bp, Artificial Sequence
  synthetic circulating small noncoding RNA (sncRNA) 5' transfer RNA (tRNA) half
tgccgaa

SEQ ID NO: 15642 - DNA, 15 bp, Artificial Sequence
  synthetic circulating small noncoding RNA (sncRNA) 5' transfer RNA (tRNA) half
tctgcacgcgtgggt

SEQ ID NO: 15643 - DNA, 20 bp, Artificial Sequence
  synthetic circulating small noncoding RNA (sncRNA) 5' transfer RNA (tRNA) half
agttggtagagcatgagact

SEQ ID NO: 15644 - DNA, 32 bp, Artificial Sequence
  synthetic circulating small noncoding RNA (sncRNA) 5' transfer RNA (tRNA) half
cgtgtttccgcccggtttcgaaccggggacct

SEQ ID NO: 15645 - DNA, 22 bp, Artificial Sequence
  synthetic circulating small noncoding RNA (sncRNA) 5' transfer RNA (tRNA) half
acacgtcgagccagccaggagt

SEQ ID NO: 15646 - DNA, 30 bp, Artificial Sequence
  synthetic circulating small noncoding RNA (sncRNA) 5' transfer RNA (tRNA) half
cccaggcggcccgggttcgactcccggtgt

SEQ ID NO: 15647 - DNA, 16 bp, Artificial Sequence
  synthetic circulating small noncoding RNA (sncRNA) 5' transfer RNA (tRNA) half
gaatcttctgatccgt

SEQ ID NO: 15648 - DNA, 20 bp, Artificial Sequence
  synthetic circulating small noncoding RNA (sncRNA) 5' transfer RNA (tRNA) half
gttcgaaaccgggcggaaac

SEQ ID NO: 15649 - DNA, 19 bp, Artificial Sequence
  synthetic circulating small noncoding RNA (sncRNA) 5' transfer RNA (tRNA) half
ggcgagctaccagggacct

SEQ ID NO: 15650 - DNA, 10 bp, Artificial Sequence
  synthetic circulating small noncoding RNA (sncRNA) 5' transfer RNA (tRNA) half
accgccgcgg

SEQ ID NO: 15651 - DNA, 38 bp, Artificial Sequence
  synthetic circulating small noncoding RNA (sncRNA) 5' transfer RNA (tRNA) half
tttccctgaccgggaatcgaacccgggccgcggcggtg

SEQ ID NO: 15652 - DNA, 13 bp, Artificial Sequence
  synthetic circulating small noncoding RNA (sncRNA) 5' transfer RNA (tRNA) half
gaggcgaacgtga

SEQ ID NO: 15653 - DNA, 12 bp, Artificial Sequence
  synthetic circulating small noncoding RNA (sncRNA) 5' transfer RNA (tRNA) half
ctgagctatccg

SEQ ID NO: 15654 - DNA, 38 bp, Artificial Sequence
  synthetic circulating small noncoding RNA (sncRNA) 5' transfer RNA (tRNA) half
aacctgggcctcccgggtggcaggcaagaattctacca

SEQ ID NO: 15655 - DNA, 24 bp, Artificial Sequence
  synthetic circulating small noncoding RNA (sncRNA) 5' transfer RNA (tRNA) half
gaccgggaatcgaacccgggacgc

SEQ ID NO: 15656 - DNA, 17 bp, Artificial Sequence
  synthetic circulating small noncoding RNA (sncRNA) 5' transfer RNA (tRNA) half
tggccgagtggttaagg

SEQ ID NO: 15657 - DNA, 17 bp, Artificial Sequence
  synthetic circulating small noncoding RNA (sncRNA) 5' transfer RNA (tRNA) half
gtgttcccacaccggga

SEQ ID NO: 15658 - DNA, 28 bp, Artificial Sequence
  synthetic circulating small noncoding RNA (sncRNA) 5' transfer RNA (tRNA) half
gcagcgccttagaccgctcggccatcct

SEQ ID NO: 15659 - DNA, 10 bp, Artificial Sequence
  synthetic circulating small noncoding RNA (sncRNA) 5' transfer RNA (tRNA) half
gtccctgggt

SEQ ID NO: 15660 - DNA, 30 bp, Artificial Sequence
  synthetic circulating small noncoding RNA (sncRNA) 5' transfer RNA (tRNA) half
ggagtcagacgcgctaccattgcgccacga

SEQ ID NO: 15661 - DNA, 29 bp, Artificial Sequence
  synthetic circulating small noncoding RNA (sncRNA) 5' transfer RNA (tRNA) half
cagcggtgggattcgaacccacgccatcg

SEQ ID NO: 15662 - DNA, 18 bp, Artificial Sequence
  synthetic circulating small noncoding RNA (sncRNA) 5' transfer RNA (tRNA) half
aatggataaggcattggc

SEQ ID NO: 15663 - DNA, 14 bp, Artificial Sequence
  synthetic circulating small noncoding RNA (sncRNA) 5' transfer RNA (tRNA) half
ttccgcccggtttc

SEQ ID NO: 15664 - DNA, 20 bp, Artificial Sequence
  synthetic circulating small noncoding RNA (sncRNA) 5' transfer RNA (tRNA) half
gttcgatccccggcacctcc

SEQ ID NO: 15665 - DNA, 18 bp, Artificial Sequence
  synthetic circulating small noncoding RNA (sncRNA) 5' transfer RNA (tRNA) half
ttcgatccccagcatctc

SEQ ID NO: 15666 - DNA, 14 bp, Artificial Sequence
  synthetic circulating small noncoding RNA (sncRNA) 5' transfer RNA (tRNA) half
gtagagcgctcgct

SEQ ID NO: 15667 - DNA, 22 bp, Artificial Sequence
  synthetic circulating small noncoding RNA (sncRNA) 5' transfer RNA (tRNA) half
gcacccgaagcgagaatcatac

SEQ ID NO: 15668 - DNA, 18 bp, Artificial Sequence
  synthetic circulating small noncoding RNA (sncRNA) 5' transfer RNA (tRNA) half
ggtttcggcagtgatttt

SEQ ID NO: 15669 - DNA, 13 bp, Artificial Sequence
  synthetic circulating small noncoding RNA (sncRNA) 5' transfer RNA (tRNA) half
cgtgggttcgaat

SEQ ID NO: 15670 - DNA, 23 bp, Artificial Sequence
  synthetic circulating small noncoding RNA (sncRNA) 5' transfer RNA (tRNA) half
aaaagtctgatgctctaccgact

SEQ ID NO: 15671 - DNA, 37 bp, Artificial Sequence
  synthetic circulating small noncoding RNA (sncRNA) 5' transfer RNA (tRNA) half
tgttaggcgagcgtgatgaccactacactacggaaac

SEQ ID NO: 15672 - DNA, 25 bp, Artificial Sequence
  synthetic circulating small noncoding RNA (sncRNA) 5' transfer RNA (tRNA) half
gtgtgaggcgaacgtgataaccact

SEQ ID NO: 15673 - DNA, 33 bp, Artificial Sequence
  synthetic circulating small noncoding RNA (sncRNA) 5' transfer RNA (tRNA) half
tggttagtactctgcgttgtggccgcagcaacc

SEQ ID NO: 15674 - DNA, 41 bp, Artificial Sequence
  synthetic circulating small noncoding RNA (sncRNA) 5' transfer RNA (tRNA) half
acccacgaccctgggattaagagtcccatgctctaccgact

SEQ ID NO: 15675 - DNA, 16 bp, Artificial Sequence
  synthetic circulating small noncoding RNA (sncRNA) 5' transfer RNA (tRNA) half
ggttgtgggttcgagc

SEQ ID NO: 15676 - DNA, 20 bp, Artificial Sequence
  synthetic circulating small noncoding RNA (sncRNA) 5' transfer RNA (tRNA) half
gatgtggcagcggtgggatt

SEQ ID NO: 15677 - DNA, 31 bp, Artificial Sequence
  synthetic circulating small noncoding RNA (sncRNA) 5' transfer RNA (tRNA) half
gaggcccgggttcgattcccggccaatgcac

SEQ ID NO: 15678 - DNA, 19 bp, Artificial Sequence
  synthetic circulating small noncoding RNA (sncRNA) 5' transfer RNA (tRNA) half
tcccgggtttcggcagtga

SEQ ID NO: 15679 - DNA, 21 bp, Artificial Sequence
  synthetic circulating small noncoding RNA (sncRNA) 5' transfer RNA (tRNA) half
gtggtagagcgcgtgcttagc

SEQ ID NO: 15680 - DNA, 33 bp, Artificial Sequence
  synthetic circulating small noncoding RNA (sncRNA) 5' transfer RNA (tRNA) half
gggggtatagctcagaggtagagcatttgactg

SEQ ID NO: 15681 - DNA, 19 bp, Artificial Sequence
  synthetic circulating small noncoding RNA (sncRNA) 5' transfer RNA (tRNA) half
ggactcgaacccgcaacct

SEQ ID NO: 15682 - DNA, 34 bp, Artificial Sequence
  synthetic circulating small noncoding RNA (sncRNA) 5' transfer RNA (tRNA) half
gccagggattgtgggttcgagtcccatctggggt

SEQ ID NO: 15683 - DNA, 19 bp, Artificial Sequence
  synthetic circulating small noncoding RNA (sncRNA) 5' transfer RNA (tRNA) half
gtgtgtcaggatggccgag

SEQ ID NO: 15684 - DNA, 12 bp, Artificial Sequence
  synthetic circulating small noncoding RNA (sncRNA) 5' transfer RNA (tRNA) half
cactctggactc

SEQ ID NO: 15685 - DNA, 39 bp, Artificial Sequence
  synthetic circulating small noncoding RNA (sncRNA) 5' transfer RNA (tRNA) half
tttgggctcgtccgggatttgaacccgggacctctcgca

SEQ ID NO: 15686 - DNA, 15 bp, Artificial Sequence
  synthetic circulating small noncoding RNA (sncRNA) 5' transfer RNA (tRNA) half
cacgcagaaggtcct

SEQ ID NO: 15687 - DNA, 16 bp, Artificial Sequence
  synthetic circulating small noncoding RNA (sncRNA) 5' transfer RNA (tRNA) half
gatcgaaccagggacc

SEQ ID NO: 15688 - DNA, 21 bp, Artificial Sequence
  synthetic circulating small noncoding RNA (sncRNA) 5' transfer RNA (tRNA) half
cgaatccgagtcacggcatta

SEQ ID NO: 15689 - DNA, 12 bp, Artificial Sequence
  synthetic circulating small noncoding RNA (sncRNA) 5' transfer RNA (tRNA) half
gagcatcagact

SEQ ID NO: 15690 - DNA, 38 bp, Artificial Sequence
  synthetic circulating small noncoding RNA (sncRNA) 5' transfer RNA (tRNA) half
tccattggggtttccccgcgcaggttcgaatcctgccg

SEQ ID NO: 15691 - DNA, 31 bp, Artificial Sequence
  synthetic circulating small noncoding RNA (sncRNA) 5' transfer RNA (tRNA) half
tgtaatggttagcactctggactttgaatcc

SEQ ID NO: 15692 - DNA, 30 bp, Artificial Sequence
  synthetic circulating small noncoding RNA (sncRNA) 5' transfer RNA (tRNA) half
tcttgcgacccgggttcgattcccgggcgg

SEQ ID NO: 15693 - DNA, 29 bp, Artificial Sequence
  synthetic circulating small noncoding RNA (sncRNA) 5' transfer RNA (tRNA) half
taacgccaaggtcgcgggttcgatccccg

SEQ ID NO: 15694 - DNA, 19 bp, Artificial Sequence
  synthetic circulating small noncoding RNA (sncRNA) 5' transfer RNA (tRNA) half
taggtcgctggttcgattc

SEQ ID NO: 15695 - DNA, 33 bp, Artificial Sequence
  synthetic circulating small noncoding RNA (sncRNA) 5' transfer RNA (tRNA) half
gacgaggtggccgagtggttaaagcgatggact

SEQ ID NO: 15696 - DNA, 15 bp, Artificial Sequence
  synthetic circulating small noncoding RNA (sncRNA) 5' transfer RNA (tRNA) half
cgactctggcgggac

SEQ ID NO: 15697 - DNA, 24 bp, Artificial Sequence
  synthetic circulating small noncoding RNA (sncRNA) 5' transfer RNA (tRNA) half
cgtcacgaacaggattcgaacctg

SEQ ID NO: 15698 - DNA, 15 bp, Artificial Sequence
  synthetic circulating small noncoding RNA (sncRNA) 5' transfer RNA (tRNA) half
ccccgcgcaggttcg

SEQ ID NO: 15699 - DNA, 15 bp, Artificial Sequence
  synthetic circulating small noncoding RNA (sncRNA) 5' transfer RNA (tRNA) half
tgagactgacgcgct

SEQ ID NO: 15700 - DNA, 21 bp, Artificial Sequence
  synthetic circulating small noncoding RNA (sncRNA) 5' transfer RNA (tRNA) half
gtcgtggccgagtggttaagg

SEQ ID NO: 15701 - DNA, 20 bp, Artificial Sequence
  synthetic circulating small noncoding RNA (sncRNA) 5' transfer RNA (tRNA) half
ttcaagtccctgttcaggcg

SEQ ID NO: 15702 - DNA, 21 bp, Artificial Sequence
  synthetic circulating small noncoding RNA (sncRNA) 5' transfer RNA (tRNA) half
ctcagagcgaggaagccatag

SEQ ID NO: 15703 - DNA, 23 bp, Artificial Sequence
  synthetic circulating small noncoding RNA (sncRNA) 5' transfer RNA (tRNA) half
agctgtcagaagtgggattcgaa

SEQ ID NO: 15704 - DNA, 11 bp, Artificial Sequence
  synthetic circulating small noncoding RNA (sncRNA) 5' transfer RNA (tRNA) half
taatggttagc

SEQ ID NO: 15705 - DNA, 31 bp, Artificial Sequence
  synthetic circulating small noncoding RNA (sncRNA) 5' transfer RNA (tRNA) half
agtctgatgctctaccgactgagctatccag

SEQ ID NO: 15706 - DNA, 19 bp, Artificial Sequence
  synthetic circulating small noncoding RNA (sncRNA) 5' transfer RNA (tRNA) half
gggattcgaacccacgcct

SEQ ID NO: 15707 - DNA, 21 bp, Artificial Sequence
  synthetic circulating small noncoding RNA (sncRNA) 5' transfer RNA (tRNA) half
gctctaccgactgagctatcc

SEQ ID NO: 15708 - DNA, 20 bp, Artificial Sequence
  synthetic circulating small noncoding RNA (sncRNA) 5' transfer RNA (tRNA) half
ggaggcccgggttcgattcc

SEQ ID NO: 15709 - DNA, 13 bp, Artificial Sequence
  synthetic circulating small noncoding RNA (sncRNA) 5' transfer RNA (tRNA) half
cggccacaacgca

SEQ ID NO: 15710 - DNA, 20 bp, Artificial Sequence
  synthetic circulating small noncoding RNA (sncRNA) 5' transfer RNA (tRNA) half
cagttgggagagcgttagac

SEQ ID NO: 15711 - DNA, 18 bp, Artificial Sequence
  synthetic circulating small noncoding RNA (sncRNA) 5' transfer RNA (tRNA) half
agtcctgccgcggtcgac

SEQ ID NO: 15712 - DNA, 13 bp, Artificial Sequence
  synthetic circulating small noncoding RNA (sncRNA) 5' transfer RNA (tRNA) half
cgcaatggataac

SEQ ID NO: 15713 - DNA, 20 bp, Artificial Sequence
  synthetic circulating small noncoding RNA (sncRNA) 5' transfer RNA (tRNA) half
ctctgaatccagcgacccga

SEQ ID NO: 15714 - DNA, 40 bp, Artificial Sequence
  synthetic circulating small noncoding RNA (sncRNA) 5' transfer RNA (tRNA) half
tgtggcccgtacggggatcgaacccgcgaccttggcgtta

SEQ ID NO: 15715 - DNA, 31 bp, Artificial Sequence
  synthetic circulating small noncoding RNA (sncRNA) 5' transfer RNA (tRNA) half
ggccgcctgggtgaaaaccaggaatcctaac

SEQ ID NO: 15716 - DNA, 29 bp, Artificial Sequence
  synthetic circulating small noncoding RNA (sncRNA) 5' transfer RNA (tRNA) half
tcgctggattcagagtccagagtgctaac

SEQ ID NO: 15717 - DNA, 28 bp, Artificial Sequence
  synthetic circulating small noncoding RNA (sncRNA) 5' transfer RNA (tRNA) half
gcccagcatgcttccgctgcgccactct

SEQ ID NO: 15718 - DNA, 13 bp, Artificial Sequence
  synthetic circulating small noncoding RNA (sncRNA) 5' transfer RNA (tRNA) half
gagctatccaggc

SEQ ID NO: 15719 - DNA, 21 bp, Artificial Sequence
  synthetic circulating small noncoding RNA (sncRNA) 5' transfer RNA (tRNA) half
tcccggccaatgcaggtctcg

SEQ ID NO: 15720 - DNA, 44 bp, Artificial Sequence
  synthetic circulating small noncoding RNA (sncRNA) 5' transfer RNA (tRNA) half
tccagtctcttcgggggcgtgggttcgaatcccaccgctgccat

SEQ ID NO: 15721 - DNA, 37 bp, Artificial Sequence
  synthetic circulating small noncoding RNA (sncRNA) 5' transfer RNA (tRNA) half
aaacaggagatcctgggttcgaatcccagtggggcct

SEQ ID NO: 15722 - DNA, 14 bp, Artificial Sequence
  synthetic circulating small noncoding RNA (sncRNA) 5' transfer RNA (tRNA) half
ccgggacctctcgc

SEQ ID NO: 15723 - DNA, 16 bp, Artificial Sequence
  synthetic circulating small noncoding RNA (sncRNA) 5' transfer RNA (tRNA) half
gagtcgaacctagaat

SEQ ID NO: 15724 - DNA, 19 bp, Artificial Sequence
  synthetic circulating small noncoding RNA (sncRNA) 5' transfer RNA (tRNA) half
cgaacccacgccatcgaaa

SEQ ID NO: 15725 - DNA, 15 bp, Artificial Sequence
  synthetic circulating small noncoding RNA (sncRNA) 5' transfer RNA (tRNA) half
atccccgtacgggcc

SEQ ID NO: 15726 - DNA, 19 bp, Artificial Sequence
  synthetic circulating small noncoding RNA (sncRNA) 5' transfer RNA (tRNA) half
aggtccctggttcaaatcg

SEQ ID NO: 15727 - DNA, 6 bp, Artificial Sequence
  synthetic circulating small noncoding RNA (sncRNA) 5' transfer RNA (tRNA) half
acgacc

SEQ ID NO: 15728 - DNA, 6 bp, Artificial Sequence
  synthetic circulating small noncoding RNA (sncRNA) 5' transfer RNA (tRNA) half
cgacca

SEQ ID NO: 15729 - DNA, 14 bp, Artificial Sequence
  synthetic circulating small noncoding RNA (sncRNA) 5' transfer RNA (tRNA) half
tgtttctgcccggt

SEQ ID NO: 15730 - DNA, 17 bp, Artificial Sequence
  synthetic circulating small noncoding RNA (sncRNA) 5' transfer RNA (tRNA) half
acctcgtggcgcaacgg

SEQ ID NO: 15731 - DNA, 22 bp, Artificial Sequence
  synthetic circulating small noncoding RNA (sncRNA) 5' transfer RNA (tRNA) half
ttcgactccggctcgaaggaga

SEQ ID NO: 15732 - DNA, 20 bp, Artificial Sequence
  synthetic circulating small noncoding RNA (sncRNA) 5' transfer RNA (tRNA) half
ggagaccggggttcgattcc

SEQ ID NO: 15733 - DNA, 18 bp, Artificial Sequence
  synthetic circulating small noncoding RNA (sncRNA) 5' transfer RNA (tRNA) half
ccccgacgtgattcgaac

SEQ ID NO: 15734 - DNA, 25 bp, Artificial Sequence
  synthetic circulating small noncoding RNA (sncRNA) 5' transfer RNA (tRNA) half
cgacgtgattcgaacacgcagcctt

SEQ ID NO: 15735 - DNA, 23 bp, Artificial Sequence
  synthetic circulating small noncoding RNA (sncRNA) 5' transfer RNA (tRNA) half
gtcacgaacaggattcgaacctg

SEQ ID NO: 15736 - DNA, 22 bp, Artificial Sequence
  synthetic circulating small noncoding RNA (sncRNA) 5' transfer RNA (tRNA) half
aaaaaatgttcccgcccggttt

SEQ ID NO: 15737 - DNA, 15 bp, Artificial Sequence
  synthetic circulating small noncoding RNA (sncRNA) 5' transfer RNA (tRNA) half
tagtcgtggccgagt

SEQ ID NO: 15738 - DNA, 22 bp, Artificial Sequence
  synthetic circulating small noncoding RNA (sncRNA) 5' transfer RNA (tRNA) half
gactctgaatccagcgacccga

SEQ ID NO: 15739 - DNA, 10 bp, Artificial Sequence
  synthetic circulating small noncoding RNA (sncRNA) 5' transfer RNA (tRNA) half
ctgttcgggc

SEQ ID NO: 15740 - DNA, 38 bp, Artificial Sequence
  synthetic circulating small noncoding RNA (sncRNA) 5' transfer RNA (tRNA) half
accgaggttgctgcggccacaacgcagagtactaacca

SEQ ID NO: 15741 - DNA, 15 bp, Artificial Sequence
  synthetic circulating small noncoding RNA (sncRNA) 5' transfer RNA (tRNA) half
ccgggtcaactgctt

SEQ ID NO: 15742 - DNA, 16 bp, Artificial Sequence
  synthetic circulating small noncoding RNA (sncRNA) 5' transfer RNA (tRNA) half
gttatcacatctgctt

SEQ ID NO: 15743 - DNA, 25 bp, Artificial Sequence
  synthetic circulating small noncoding RNA (sncRNA) 5' transfer RNA (tRNA) half
agacgacgaggatgggattcgaacc

SEQ ID NO: 15744 - DNA, 40 bp, Artificial Sequence
  synthetic circulating small noncoding RNA (sncRNA) 5' transfer RNA (tRNA) half
gtaaaccgaagatcgcgggttcgaaccccgtccgtgcctg

SEQ ID NO: 15745 - DNA, 21 bp, Artificial Sequence
  synthetic circulating small noncoding RNA (sncRNA) 5' transfer RNA (tRNA) half
cttaaccactcggccacctcg

SEQ ID NO: 15746 - DNA, 13 bp, Artificial Sequence
  synthetic circulating small noncoding RNA (sncRNA) 5' transfer RNA (tRNA) half
ggtcgcagtctcc

SEQ ID NO: 15747 - DNA, 16 bp, Artificial Sequence
  synthetic circulating small noncoding RNA (sncRNA) 5' transfer RNA (tRNA) half
ggccatcctgacaact

SEQ ID NO: 15748 - DNA, 22 bp, Artificial Sequence
  synthetic circulating small noncoding RNA (sncRNA) 5' transfer RNA (tRNA) half
gccgaacgcgctaaccgattgc

SEQ ID NO: 15749 - DNA, 13 bp, Artificial Sequence
  synthetic circulating small noncoding RNA (sncRNA) 5' transfer RNA (tRNA) half
tcagtcggtagag

SEQ ID NO: 15750 - DNA, 14 bp, Artificial Sequence
  synthetic circulating small noncoding RNA (sncRNA) 5' transfer RNA (tRNA) half
tataccaccaacgc

SEQ ID NO: 15751 - DNA, 30 bp, Artificial Sequence
  synthetic circulating small noncoding RNA (sncRNA) 5' transfer RNA (tRNA) half
ggctcgtccgggatttgaacccgggacctc

SEQ ID NO: 15752 - DNA, 32 bp, Artificial Sequence
  synthetic circulating small noncoding RNA (sncRNA) 5' transfer RNA (tRNA) half
gaaggtcctgagttcgaacctcagagggggca

SEQ ID NO: 15753 - DNA, 26 bp, Artificial Sequence
  synthetic circulating small noncoding RNA (sncRNA) 5' transfer RNA (tRNA) half
cgtcgactctggcgggactcgaaccc

SEQ ID NO: 15754 - DNA, 15 bp, Artificial Sequence
  synthetic circulating small noncoding RNA (sncRNA) 5' transfer RNA (tRNA) half
tggtctggggtgcag

SEQ ID NO: 15755 - DNA, 11 bp, Artificial Sequence
  synthetic circulating small noncoding RNA (sncRNA) 5' transfer RNA (tRNA) half
cgaaccaggga

SEQ ID NO: 15756 - DNA, 19 bp, Artificial Sequence
  synthetic circulating small noncoding RNA (sncRNA) 5' transfer RNA (tRNA) half
aactatgaccccgacgtga

SEQ ID NO: 15757 - DNA, 19 bp, Artificial Sequence
  synthetic circulating small noncoding RNA (sncRNA) 5' transfer RNA (tRNA) half
gttatcacgtctgctttac

SEQ ID NO: 15758 - DNA, 9 bp, Artificial Sequence
  synthetic circulating small noncoding RNA (sncRNA) 5' transfer RNA (tRNA) half
ccgaccgct

SEQ ID NO: 15759 - DNA, 6 bp, Artificial Sequence
  synthetic circulating small noncoding RNA (sncRNA) 5' transfer RNA (tRNA) half
cggacc

SEQ ID NO: 15760 - DNA, 17 bp, Artificial Sequence
  synthetic circulating small noncoding RNA (sncRNA) 5' transfer RNA (tRNA) half
cctggttcgatcccggg

SEQ ID NO: 15761 - DNA, 24 bp, Artificial Sequence
  synthetic circulating small noncoding RNA (sncRNA) 5' transfer RNA (tRNA) half
tccttcgagccggattcgaaccag

SEQ ID NO: 15762 - DNA, 10 bp, Artificial Sequence
  synthetic circulating small noncoding RNA (sncRNA) 5' transfer RNA (tRNA) half
atccgggtgc

SEQ ID NO: 15763 - DNA, 10 bp, Artificial Sequence
  synthetic circulating small noncoding RNA (sncRNA) 5' transfer RNA (tRNA) half
ccctggttcg

SEQ ID NO: 15764 - DNA, 15 bp, Artificial Sequence
  synthetic circulating small noncoding RNA (sncRNA) 5' transfer RNA (tRNA) half
gagaccggggttcga

SEQ ID NO: 15765 - DNA, 14 bp, Artificial Sequence
  synthetic circulating small noncoding RNA (sncRNA) 5' transfer RNA (tRNA) half
aatcctaaccgcta

SEQ ID NO: 15766 - DNA, 12 bp, Artificial Sequence
  synthetic circulating small noncoding RNA (sncRNA) 5' transfer RNA (tRNA) half
gggtcgtgggtt

SEQ ID NO: 15767 - DNA, 21 bp, Artificial Sequence
  synthetic circulating small noncoding RNA (sncRNA) 5' transfer RNA (tRNA) half
ttgaatccagcgatccgagtt

SEQ ID NO: 15768 - DNA, 34 bp, Artificial Sequence
  synthetic circulating small noncoding RNA (sncRNA) 5' transfer RNA (tRNA) half
acgcgaaaggtccccggttcgaaaccgggcggaa

SEQ ID NO: 15769 - DNA, 22 bp, Artificial Sequence
  synthetic circulating small noncoding RNA (sncRNA) 5' transfer RNA (tRNA) half
cccgaacagggacttgaaccct

SEQ ID NO: 15770 - DNA, 12 bp, Artificial Sequence
  synthetic circulating small noncoding RNA (sncRNA) 5' transfer RNA (tRNA) half
taccgggagtcg

SEQ ID NO: 15771 - DNA, 17 bp, Artificial Sequence
  synthetic circulating small noncoding RNA (sncRNA) 5' transfer RNA (tRNA) half
cgtatagtggttagtac

SEQ ID NO: 15772 - DNA, 27 bp, Artificial Sequence
  synthetic circulating small noncoding RNA (sncRNA) 5' transfer RNA (tRNA) half
gtctccccgtcggggaatcgaaccccg

SEQ ID NO: 15773 - DNA, 17 bp, Artificial Sequence
  synthetic circulating small noncoding RNA (sncRNA) 5' transfer RNA (tRNA) half
agaattctaccactgaa

SEQ ID NO: 15774 - DNA, 18 bp, Artificial Sequence
  synthetic circulating small noncoding RNA (sncRNA) 5' transfer RNA (tRNA) half
aaaccgggcgggaacaac

SEQ ID NO: 15775 - DNA, 32 bp, Artificial Sequence
  synthetic circulating small noncoding RNA (sncRNA) 5' transfer RNA (tRNA) half
atccatcgacctctgggttatgggcccagcac

SEQ ID NO: 15776 - DNA, 28 bp, Artificial Sequence
  synthetic circulating small noncoding RNA (sncRNA) 5' transfer RNA (tRNA) half
acggggatcgaacccgcgaccttggcgt

SEQ ID NO: 15777 - DNA, 29 bp, Artificial Sequence
  synthetic circulating small noncoding RNA (sncRNA) 5' transfer RNA (tRNA) half
tggttagtactctgcgttgtggccgcagc

SEQ ID NO: 15778 - DNA, 13 bp, Artificial Sequence
  synthetic circulating small noncoding RNA (sncRNA) 5' transfer RNA (tRNA) half
aatgcgctatcca

SEQ ID NO: 15779 - DNA, 14 bp, Artificial Sequence
  synthetic circulating small noncoding RNA (sncRNA) 5' transfer RNA (tRNA) half
ctaatggataaggc

SEQ ID NO: 15780 - DNA, 22 bp, Artificial Sequence
  synthetic circulating small noncoding RNA (sncRNA) 5' transfer RNA (tRNA) half
catcgacctctgggttatgggc

SEQ ID NO: 15781 - DNA, 19 bp, Artificial Sequence
  synthetic circulating small noncoding RNA (sncRNA) 5' transfer RNA (tRNA) half
caaacccgggcctcccgcg

SEQ ID NO: 15782 - DNA, 24 bp, Artificial Sequence
  synthetic circulating small noncoding RNA (sncRNA) 5' transfer RNA (tRNA) half
tagttcaatggtagaattctcgcc

SEQ ID NO: 15783 - DNA, 20 bp, Artificial Sequence
  synthetic circulating small noncoding RNA (sncRNA) 5' transfer RNA (tRNA) half
tcctgccgcggtcgacttgt

SEQ ID NO: 15784 - DNA, 6 bp, Artificial Sequence
  synthetic circulating small noncoding RNA (sncRNA) 5' transfer RNA (tRNA) half
gagcgc

SEQ ID NO: 15785 - DNA, 20 bp, Artificial Sequence
  synthetic circulating small noncoding RNA (sncRNA) 5' transfer RNA (tRNA) half
aatgtttgggctcgtccggg

SEQ ID NO: 15786 - DNA, 29 bp, Artificial Sequence
  synthetic circulating small noncoding RNA (sncRNA) 5' transfer RNA (tRNA) half
gtggcaggcgagaattctaccactgaacc

SEQ ID NO: 15787 - DNA, 5 bp, Artificial Sequence
  synthetic circulating small noncoding RNA (sncRNA) 5' transfer RNA (tRNA) half
gtccc

SEQ ID NO: 15788 - DNA, 15 bp, Artificial Sequence
  synthetic circulating small noncoding RNA (sncRNA) 5' transfer RNA (tRNA) half
tggggattgtgggtt

SEQ ID NO: 15789 - DNA, 41 bp, Artificial Sequence
  synthetic circulating small noncoding RNA (sncRNA) 5' transfer RNA (tRNA) half
tcacccaggcggcccgggttcgactcccggtatgggaacag

SEQ ID NO: 15790 - DNA, 16 bp, Artificial Sequence
  synthetic circulating small noncoding RNA (sncRNA) 5' transfer RNA (tRNA) half
ctcagttggttagagc

SEQ ID NO: 15791 - DNA, 15 bp, Artificial Sequence
  synthetic circulating small noncoding RNA (sncRNA) 5' transfer RNA (tRNA) half
tccccgcgcaggttc

SEQ ID NO: 15792 - DNA, 21 bp, Artificial Sequence
  synthetic circulating small noncoding RNA (sncRNA) 5' transfer RNA (tRNA) half
attaaaagtctgatgctctac

SEQ ID NO: 15793 - DNA, 17 bp, Artificial Sequence
  synthetic circulating small noncoding RNA (sncRNA) 5' transfer RNA (tRNA) half
tcttgcgacccgggttc

SEQ ID NO: 15794 - DNA, 20 bp, Artificial Sequence
  synthetic circulating small noncoding RNA (sncRNA) 5' transfer RNA (tRNA) half
acaggcggggatactcacca

SEQ ID NO: 15795 - DNA, 38 bp, Artificial Sequence
  synthetic circulating small noncoding RNA (sncRNA) 5' transfer RNA (tRNA) half
tcgagccagccaggagtcgaacctagaatcttctgatc

SEQ ID NO: 15796 - DNA, 9 bp, Artificial Sequence
  synthetic circulating small noncoding RNA (sncRNA) 5' transfer RNA (tRNA) half
ccggtttcg

SEQ ID NO: 15797 - DNA, 38 bp, Artificial Sequence
  synthetic circulating small noncoding RNA (sncRNA) 5' transfer RNA (tRNA) half
aagtagggggcacccggatttgaaccggggacctcttg

SEQ ID NO: 15798 - DNA, 16 bp, Artificial Sequence
  synthetic circulating small noncoding RNA (sncRNA) 5' transfer RNA (tRNA) half
tatgaggccccgggtt

SEQ ID NO: 15799 - DNA, 17 bp, Artificial Sequence
  synthetic circulating small noncoding RNA (sncRNA) 5' transfer RNA (tRNA) half
gtccagagtgctaacca

SEQ ID NO: 15800 - DNA, 14 bp, Artificial Sequence
  synthetic circulating small noncoding RNA (sncRNA) 5' transfer RNA (tRNA) half
ccgaagatcgcggg

SEQ ID NO: 15801 - DNA, 45 bp, Artificial Sequence
  synthetic circulating small noncoding RNA (sncRNA) 5' transfer RNA (tRNA) half
ggcagtggtgggattcgaacccacgcctccgaagagactggagcc

SEQ ID NO: 15802 - DNA, 19 bp, Artificial Sequence
  synthetic circulating small noncoding RNA (sncRNA) 5' transfer RNA (tRNA) half
ctggcgccttagaccactc

SEQ ID NO: 15803 - DNA, 24 bp, Artificial Sequence
  synthetic circulating small noncoding RNA (sncRNA) 5' transfer RNA (tRNA) half
atccatcgacctctgggttatggg

SEQ ID NO: 15804 - DNA, 22 bp, Artificial Sequence
  synthetic circulating small noncoding RNA (sncRNA) 5' transfer RNA (tRNA) half
agtgcattggccgggaatcgaa

SEQ ID NO: 15805 - DNA, 18 bp, Artificial Sequence
  synthetic circulating small noncoding RNA (sncRNA) 5' transfer RNA (tRNA) half
tcctgccgactacgtcat

SEQ ID NO: 15806 - DNA, 18 bp, Artificial Sequence
  synthetic circulating small noncoding RNA (sncRNA) 5' transfer RNA (tRNA) half
gcatgcgctctaccactg

SEQ ID NO: 15807 - DNA, 14 bp, Artificial Sequence
  synthetic circulating small noncoding RNA (sncRNA) 5' transfer RNA (tRNA) half
tatccccgcctgtc

SEQ ID NO: 15808 - DNA, 27 bp, Artificial Sequence
  synthetic circulating small noncoding RNA (sncRNA) 5' transfer RNA (tRNA) half
agcgcccgaacagggacttgaaccctg

SEQ ID NO: 15809 - DNA, 19 bp, Artificial Sequence
  synthetic circulating small noncoding RNA (sncRNA) 5' transfer RNA (tRNA) half
gagcgtgataaccgctaca

SEQ ID NO: 15810 - DNA, 23 bp, Artificial Sequence
  synthetic circulating small noncoding RNA (sncRNA) 5' transfer RNA (tRNA) half
ccgagtggttaaggcgatggact

SEQ ID NO: 15811 - DNA, 26 bp, Artificial Sequence
  synthetic circulating small noncoding RNA (sncRNA) 5' transfer RNA (tRNA) half
gacgaggatgggattcgaacccacgc

SEQ ID NO: 15812 - DNA, 13 bp, Artificial Sequence
  synthetic circulating small noncoding RNA (sncRNA) 5' transfer RNA (tRNA) half
ccggacgagccca

SEQ ID NO: 15813 - DNA, 15 bp, Artificial Sequence
  synthetic circulating small noncoding RNA (sncRNA) 5' transfer RNA (tRNA) half
ccgactgagctagcc

SEQ ID NO: 15814 - DNA, 12 bp, Artificial Sequence
  synthetic circulating small noncoding RNA (sncRNA) 5' transfer RNA (tRNA) half
cttcggaggcgt

SEQ ID NO: 15815 - DNA, 8 bp, Artificial Sequence
  synthetic circulating small noncoding RNA (sncRNA) 5' transfer RNA (tRNA) half
ggtagagc

SEQ ID NO: 15816 - DNA, 36 bp, Artificial Sequence
  synthetic circulating small noncoding RNA (sncRNA) 5' transfer RNA (tRNA) half
cggctagctcagtcggtagagcatgagactcttaat

SEQ ID NO: 15817 - DNA, 19 bp, Artificial Sequence
  synthetic circulating small noncoding RNA (sncRNA) 5' transfer RNA (tRNA) half
cgggagaccggggttcgat

SEQ ID NO: 15818 - DNA, 22 bp, Artificial Sequence
  synthetic circulating small noncoding RNA (sncRNA) 5' transfer RNA (tRNA) half
cttatccattaggccacgcggc

SEQ ID NO: 15819 - DNA, 20 bp, Artificial Sequence
  synthetic circulating small noncoding RNA (sncRNA) 5' transfer RNA (tRNA) half
agtgcattggccgggaatcg

SEQ ID NO: 15820 - DNA, 11 bp, Artificial Sequence
  synthetic circulating small noncoding RNA (sncRNA) 5' transfer RNA (tRNA) half
ggttagtactc

SEQ ID NO: 15821 - DNA, 25 bp, Artificial Sequence
  synthetic circulating small noncoding RNA (sncRNA) 5' transfer RNA (tRNA) half
gccttaaccactcggccattctggt

SEQ ID NO: 15822 - DNA, 12 bp, Artificial Sequence
  synthetic circulating small noncoding RNA (sncRNA) 5' transfer RNA (tRNA) half
cgggtcaactgc

SEQ ID NO: 15823 - DNA, 24 bp, Artificial Sequence
  synthetic circulating small noncoding RNA (sncRNA) 5' transfer RNA (tRNA) half
cttgaaccctggaccctcagatta

SEQ ID NO: 15824 - DNA, 23 bp, Artificial Sequence
  synthetic circulating small noncoding RNA (sncRNA) 5' transfer RNA (tRNA) half
aagagtcccatgctctaccgact

SEQ ID NO: 15825 - DNA, 12 bp, Artificial Sequence
  synthetic circulating small noncoding RNA (sncRNA) 5' transfer RNA (tRNA) half
gtagcgcccgaa

SEQ ID NO: 15826 - DNA, 42 bp, Artificial Sequence
  synthetic circulating small noncoding RNA (sncRNA) 5' transfer RNA (tRNA) half
aaccccggtctcccgcgtgacaggcggggatactcaccacta

SEQ ID NO: 15827 - DNA, 16 bp, Artificial Sequence
  synthetic circulating small noncoding RNA (sncRNA) 5' transfer RNA (tRNA) half
gtgtggaggcgtgggt

SEQ ID NO: 15828 - DNA, 16 bp, Artificial Sequence
  synthetic circulating small noncoding RNA (sncRNA) 5' transfer RNA (tRNA) half
cgaaaggttggtggtt

SEQ ID NO: 15829 - DNA, 16 bp, Artificial Sequence
  synthetic circulating small noncoding RNA (sncRNA) 5' transfer RNA (tRNA) half
tagcgcgtctgactcc

SEQ ID NO: 15830 - DNA, 14 bp, Artificial Sequence
  synthetic circulating small noncoding RNA (sncRNA) 5' transfer RNA (tRNA) half
gaccgctcggccat

SEQ ID NO: 15831 - DNA, 16 bp, Artificial Sequence
  synthetic circulating small noncoding RNA (sncRNA) 5' transfer RNA (tRNA) half
cgacgaggatgggatt

SEQ ID NO: 15832 - DNA, 28 bp, Artificial Sequence
  synthetic circulating small noncoding RNA (sncRNA) 5' transfer RNA (tRNA) half
atcctcagtggtctggggtgcaggcttc

SEQ ID NO: 15833 - DNA, 38 bp, Artificial Sequence
  synthetic circulating small noncoding RNA (sncRNA) 5' transfer RNA (tRNA) half
gaccccgacgtgacttgaacacgcaaccttctgatctg

SEQ ID NO: 15834 - DNA, 18 bp, Artificial Sequence
  synthetic circulating small noncoding RNA (sncRNA) 5' transfer RNA (tRNA) half
acccgtagtcggcaggat

SEQ ID NO: 15835 - DNA, 28 bp, Artificial Sequence
  synthetic circulating small noncoding RNA (sncRNA) 5' transfer RNA (tRNA) half
accccggtctcccgcgtgacaggcgggg

SEQ ID NO: 15836 - DNA, 35 bp, Artificial Sequence
  synthetic circulating small noncoding RNA (sncRNA) 5' transfer RNA (tRNA) half
aactcggatcgctggattcaaagtccagagtgcta

SEQ ID NO: 15837 - DNA, 22 bp, Artificial Sequence
  synthetic circulating small noncoding RNA (sncRNA) 5' transfer RNA (tRNA) half
acgaggatgggattcgaaccca

SEQ ID NO: 15838 - DNA, 33 bp, Artificial Sequence
  synthetic circulating small noncoding RNA (sncRNA) 5' transfer RNA (tRNA) half
gagtcagacgcgctaccattgcgccacgaggtc

SEQ ID NO: 15839 - DNA, 17 bp, Artificial Sequence
  synthetic circulating small noncoding RNA (sncRNA) 5' transfer RNA (tRNA) half
gttcgaatcccttcgtg

SEQ ID NO: 15840 - DNA, 21 bp, Artificial Sequence
  synthetic circulating small noncoding RNA (sncRNA) 5' transfer RNA (tRNA) half
tcgagccccagtggaaccata

SEQ ID NO: 15841 - DNA, 20 bp, Artificial Sequence
  synthetic circulating small noncoding RNA (sncRNA) 5' transfer RNA (tRNA) half
aggccgcggcggtgagagcg

SEQ ID NO: 15842 - DNA, 33 bp, Artificial Sequence
  synthetic circulating small noncoding RNA (sncRNA) 5' transfer RNA (tRNA) half
actcggatcgctggattcagagtccagagtgct

SEQ ID NO: 15843 - DNA, 35 bp, Artificial Sequence
  synthetic circulating small noncoding RNA (sncRNA) 5' transfer RNA (tRNA) half
tgtggcccgtacggggatcgaacccgcgaccttgg

SEQ ID NO: 15844 - DNA, 16 bp, Artificial Sequence
  synthetic circulating small noncoding RNA (sncRNA) 5' transfer RNA (tRNA) half
aatggtagagcgctcg

SEQ ID NO: 15845 - DNA, 31 bp, Artificial Sequence
  synthetic circulating small noncoding RNA (sncRNA) 5' transfer RNA (tRNA) half
ttggtggttcagtggtagaattctcgcctgc

SEQ ID NO: 15846 - DNA, 19 bp, Artificial Sequence
  synthetic circulating small noncoding RNA (sncRNA) 5' transfer RNA (tRNA) half
actctggactctgaatcca

SEQ ID NO: 15847 - DNA, 12 bp, Artificial Sequence
  synthetic circulating small noncoding RNA (sncRNA) 5' transfer RNA (tRNA) half
gccgcggtcgac

SEQ ID NO: 15848 - DNA, 17 bp, Artificial Sequence
  synthetic circulating small noncoding RNA (sncRNA) 5' transfer RNA (tRNA) half
tgcaggttcgagtcctg

SEQ ID NO: 15849 - DNA, 20 bp, Artificial Sequence
  synthetic circulating small noncoding RNA (sncRNA) 5' transfer RNA (tRNA) half
tgccgaaacccgggatcgaa

SEQ ID NO: 15850 - DNA, 23 bp, Artificial Sequence
  synthetic circulating small noncoding RNA (sncRNA) 5' transfer RNA (tRNA) half
gagcggtctaaggcgctgcgttc

SEQ ID NO: 15851 - DNA, 13 bp, Artificial Sequence
  synthetic circulating small noncoding RNA (sncRNA) 5' transfer RNA (tRNA) half
gttcgattcccgg

SEQ ID NO: 15852 - DNA, 9 bp, Artificial Sequence
  synthetic circulating small noncoding RNA (sncRNA) 5' transfer RNA (tRNA) half
gggagtcga

SEQ ID NO: 15853 - DNA, 34 bp, Artificial Sequence
  synthetic circulating small noncoding RNA (sncRNA) 5' transfer RNA (tRNA) half
tcagtctaacgctctcccaactgagctatttcgg

SEQ ID NO: 15854 - DNA, 28 bp, Artificial Sequence
  synthetic circulating small noncoding RNA (sncRNA) 5' transfer RNA (tRNA) half
gttaggattcggcgctctcaccgccgcg

SEQ ID NO: 15855 - DNA, 11 bp, Artificial Sequence
  synthetic circulating small noncoding RNA (sncRNA) 5' transfer RNA (tRNA) half
ggccacgacta

SEQ ID NO: 15856 - DNA, 41 bp, Artificial Sequence
  synthetic circulating small noncoding RNA (sncRNA) 5' transfer RNA (tRNA) half
agtcggtagagcatgagactcttaatctcagggtcgtgggt

SEQ ID NO: 15857 - DNA, 37 bp, Artificial Sequence
  synthetic circulating small noncoding RNA (sncRNA) 5' transfer RNA (tRNA) half
tctccccgcgcaggttcgaatcctgccgactacgtca

SEQ ID NO: 15858 - DNA, 32 bp, Artificial Sequence
  synthetic circulating small noncoding RNA (sncRNA) 5' transfer RNA (tRNA) half
gggtggcagagccaggaaattgcgtaagactt

SEQ ID NO: 15859 - DNA, 22 bp, Artificial Sequence
  synthetic circulating small noncoding RNA (sncRNA) 5' transfer RNA (tRNA) half
cgactccgccgggactcgaacc

SEQ ID NO: 15860 - DNA, 34 bp, Artificial Sequence
  synthetic circulating small noncoding RNA (sncRNA) 5' transfer RNA (tRNA) half
ggctccatagctcaggggttagagcactggtctt

SEQ ID NO: 15861 - DNA, 13 bp, Artificial Sequence
  synthetic circulating small noncoding RNA (sncRNA) 5' transfer RNA (tRNA) half
aacccacgaccct

SEQ ID NO: 15862 - DNA, 32 bp, Artificial Sequence
  synthetic circulating small noncoding RNA (sncRNA) 5' transfer RNA (tRNA) half
tggtggagatgccggggatcgaacccggggcc

SEQ ID NO: 15863 - DNA, 15 bp, Artificial Sequence
  synthetic circulating small noncoding RNA (sncRNA) 5' transfer RNA (tRNA) half
ttcccggcccatgca

SEQ ID NO: 15864 - DNA, 10 bp, Artificial Sequence
  synthetic circulating small noncoding RNA (sncRNA) 5' transfer RNA (tRNA) half
gctctacccc

SEQ ID NO: 15865 - DNA, 19 bp, Artificial Sequence
  synthetic circulating small noncoding RNA (sncRNA) 5' transfer RNA (tRNA) half
aatccgagtcacggcagta

SEQ ID NO: 15866 - DNA, 18 bp, Artificial Sequence
  synthetic circulating small noncoding RNA (sncRNA) 5' transfer RNA (tRNA) half
gcttccgctgcgccactc

SEQ ID NO: 15867 - DNA, 20 bp, Artificial Sequence
  synthetic circulating small noncoding RNA (sncRNA) 5' transfer RNA (tRNA) half
tagtgtggccgagcggtcta

SEQ ID NO: 15868 - DNA, 25 bp, Artificial Sequence
  synthetic circulating small noncoding RNA (sncRNA) 5' transfer RNA (tRNA) half
cgacgaggatgggattcgaacccat

SEQ ID NO: 15869 - DNA, 22 bp, Artificial Sequence
  synthetic circulating small noncoding RNA (sncRNA) 5' transfer RNA (tRNA) half
aggggtcgcgagttcaaatctc

SEQ ID NO: 15870 - DNA, 42 bp, Artificial Sequence
  synthetic circulating small noncoding RNA (sncRNA) 5' transfer RNA (tRNA) half
tgtggcagcggtgggattcgaacccacgccatcgaaatgact

SEQ ID NO: 15871 - DNA, 17 bp, Artificial Sequence
  synthetic circulating small noncoding RNA (sncRNA) 5' transfer RNA (tRNA) half
ttgaccccgacgtgact

SEQ ID NO: 15872 - DNA, 28 bp, Artificial Sequence
  synthetic circulating small noncoding RNA (sncRNA) 5' transfer RNA (tRNA) half
cagtcggtagagcatgagactcttaatc

SEQ ID NO: 15873 - DNA, 36 bp, Artificial Sequence
  synthetic circulating small noncoding RNA (sncRNA) 5' transfer RNA (tRNA) half
tccctgaccgggaatcgaacccgggccgcggcggtg

SEQ ID NO: 15874 - DNA, 12 bp, Artificial Sequence
  synthetic circulating small noncoding RNA (sncRNA) 5' transfer RNA (tRNA) half
tcggccacacta

SEQ ID NO: 15875 - DNA, 21 bp, Artificial Sequence
  synthetic circulating small noncoding RNA (sncRNA) 5' transfer RNA (tRNA) half
ggaatcgaaccccggtctccc

SEQ ID NO: 15876 - DNA, 26 bp, Artificial Sequence
  synthetic circulating small noncoding RNA (sncRNA) 5' transfer RNA (tRNA) half
ccgtgatcgtataggggttagtactc

SEQ ID NO: 15877 - DNA, 11 bp, Artificial Sequence
  synthetic circulating small noncoding RNA (sncRNA) 5' transfer RNA (tRNA) half
ggacctcttga

SEQ ID NO: 15878 - DNA, 7 bp, Artificial Sequence
  synthetic circulating small noncoding RNA (sncRNA) 5' transfer RNA (tRNA) half
agtccct

SEQ ID NO: 15879 - DNA, 13 bp, Artificial Sequence
  synthetic circulating small noncoding RNA (sncRNA) 5' transfer RNA (tRNA) half
tccatttgtctag

SEQ ID NO: 15880 - DNA, 23 bp, Artificial Sequence
  synthetic circulating small noncoding RNA (sncRNA) 5' transfer RNA (tRNA) half
atggtctagcggttaggattcct

SEQ ID NO: 15881 - DNA, 19 bp, Artificial Sequence
  synthetic circulating small noncoding RNA (sncRNA) 5' transfer RNA (tRNA) half
tccccggcatctccaagca

SEQ ID NO: 15882 - DNA, 10 bp, Artificial Sequence
  synthetic circulating small noncoding RNA (sncRNA) 5' transfer RNA (tRNA) half
atcccggacg

SEQ ID NO: 15883 - DNA, 16 bp, Artificial Sequence
  synthetic circulating small noncoding RNA (sncRNA) 5' transfer RNA (tRNA) half
tcgattcccggccaat

SEQ ID NO: 15884 - DNA, 22 bp, Artificial Sequence
  synthetic circulating small noncoding RNA (sncRNA) 5' transfer RNA (tRNA) half
tgcgacccgggttcgattcccg

SEQ ID NO: 15885 - DNA, 33 bp, Artificial Sequence
  synthetic circulating small noncoding RNA (sncRNA) 5' transfer RNA (tRNA) half
cccgcgcaggttcgaatcctgccgactacgtca

SEQ ID NO: 15886 - DNA, 34 bp, Artificial Sequence
  synthetic circulating small noncoding RNA (sncRNA) 5' transfer RNA (tRNA) half
gagggggtatagctcagtggtagagcatttgact

SEQ ID NO: 15887 - DNA, 19 bp, Artificial Sequence
  synthetic circulating small noncoding RNA (sncRNA) 5' transfer RNA (tRNA) half
cctccccgtcggggaatcg

SEQ ID NO: 15888 - DNA, 17 bp, Artificial Sequence
  synthetic circulating small noncoding RNA (sncRNA) 5' transfer RNA (tRNA) half
gatagctcagtcggtag

SEQ ID NO: 15889 - DNA, 10 bp, Artificial Sequence
  synthetic circulating small noncoding RNA (sncRNA) 5' transfer RNA (tRNA) half
gggcacccgg

SEQ ID NO: 15890 - DNA, 11 bp, Artificial Sequence
  synthetic circulating small noncoding RNA (sncRNA) 5' transfer RNA (tRNA) half
tgatccgaagt

SEQ ID NO: 15891 - DNA, 29 bp, Artificial Sequence
  synthetic circulating small noncoding RNA (sncRNA) 5' transfer RNA (tRNA) half
gttccatggtgtaatggttagcactctgg

SEQ ID NO: 15892 - DNA, 12 bp, Artificial Sequence
  synthetic circulating small noncoding RNA (sncRNA) 5' transfer RNA (tRNA) half
caggccgcggcg

SEQ ID NO: 15893 - DNA, 18 bp, Artificial Sequence
  synthetic circulating small noncoding RNA (sncRNA) 5' transfer RNA (tRNA) half
gtccaatgcgctatccat

SEQ ID NO: 15894 - DNA, 22 bp, Artificial Sequence
  synthetic circulating small noncoding RNA (sncRNA) 5' transfer RNA (tRNA) half
gggaatcgaacccgggcctccc

SEQ ID NO: 15895 - DNA, 16 bp, Artificial Sequence
  synthetic circulating small noncoding RNA (sncRNA) 5' transfer RNA (tRNA) half
tagctcagttggttag

SEQ ID NO: 15896 - DNA, 21 bp, Artificial Sequence
  synthetic circulating small noncoding RNA (sncRNA) 5' transfer RNA (tRNA) half
aaccctcaatcttctgatccg

SEQ ID NO: 15897 - DNA, 15 bp, Artificial Sequence
  synthetic circulating small noncoding RNA (sncRNA) 5' transfer RNA (tRNA) half
gtggttaggattcgg

SEQ ID NO: 15898 - DNA, 34 bp, Artificial Sequence
  synthetic circulating small noncoding RNA (sncRNA) 5' transfer RNA (tRNA) half
ggctcgttggtctaggggtatgattctcgcttag

SEQ ID NO: 15899 - DNA, 35 bp, Artificial Sequence
  synthetic circulating small noncoding RNA (sncRNA) 5' transfer RNA (tRNA) half
cagggattgtgggttcgagtcccacctggggtaaa

SEQ ID NO: 15900 - DNA, 16 bp, Artificial Sequence
  synthetic circulating small noncoding RNA (sncRNA) 5' transfer RNA (tRNA) half
gctcgaaccaccaacc

SEQ ID NO: 15901 - DNA, 35 bp, Artificial Sequence
  synthetic circulating small noncoding RNA (sncRNA) 5' transfer RNA (tRNA) half
atgtttccgcccggtttcgaaccggggacctctcg

SEQ ID NO: 15902 - DNA, 30 bp, Artificial Sequence
  synthetic circulating small noncoding RNA (sncRNA) 5' transfer RNA (tRNA) half
cagcgccttagaccactcggccacgctacc

SEQ ID NO: 15903 - DNA, 23 bp, Artificial Sequence
  synthetic circulating small noncoding RNA (sncRNA) 5' transfer RNA (tRNA) half
aggtcctgggttcgagccccagt

SEQ ID NO: 15904 - DNA, 43 bp, Artificial Sequence
  synthetic circulating small noncoding RNA (sncRNA) 5' transfer RNA (tRNA) half
ccgcctgtcacgcgggagaccggggttcgattccccgacgggg

SEQ ID NO: 15905 - DNA, 31 bp, Artificial Sequence
  synthetic circulating small noncoding RNA (sncRNA) 5' transfer RNA (tRNA) half
cctgggtgggctcgaaccaccaacctttcgg

SEQ ID NO: 15906 - DNA, 19 bp, Artificial Sequence
  synthetic circulating small noncoding RNA (sncRNA) 5' transfer RNA (tRNA) half
accactgagctataccccc

SEQ ID NO: 15907 - DNA, 21 bp, Artificial Sequence
  synthetic circulating small noncoding RNA (sncRNA) 5' transfer RNA (tRNA) half
gcactctggactctgaatcca

SEQ ID NO: 15908 - DNA, 25 bp, Artificial Sequence
  synthetic circulating small noncoding RNA (sncRNA) 5' transfer RNA (tRNA) half
cgctggattcagagtccagagtgct

SEQ ID NO: 15909 - DNA, 20 bp, Artificial Sequence
  synthetic circulating small noncoding RNA (sncRNA) 5' transfer RNA (tRNA) half
gggggtatagctcaggggtg

SEQ ID NO: 15910 - DNA, 15 bp, Artificial Sequence
  synthetic circulating small noncoding RNA (sncRNA) 5' transfer RNA (tRNA) half
cgtgataaccactac

SEQ ID NO: 15911 - DNA, 36 bp, Artificial Sequence
  synthetic circulating small noncoding RNA (sncRNA) 5' transfer RNA (tRNA) half
gactgacgcgctacctactgcgctaacgaggcacct

SEQ ID NO: 15912 - DNA, 8 bp, Artificial Sequence
  synthetic circulating small noncoding RNA (sncRNA) 5' transfer RNA (tRNA) half
tgagcccg

SEQ ID NO: 15913 - DNA, 19 bp, Artificial Sequence
  synthetic circulating small noncoding RNA (sncRNA) 5' transfer RNA (tRNA) half
atgaccccgacgtgatttg

SEQ ID NO: 15914 - DNA, 42 bp, Artificial Sequence
  synthetic circulating small noncoding RNA (sncRNA) 5' transfer RNA (tRNA) half
actgtgcattggccgggaatcgaacccgggcctcccgcgtgg

SEQ ID NO: 15915 - DNA, 11 bp, Artificial Sequence
  synthetic circulating small noncoding RNA (sncRNA) 5' transfer RNA (tRNA) half
gtgctctacct

SEQ ID NO: 15916 - DNA, 29 bp, Artificial Sequence
  synthetic circulating small noncoding RNA (sncRNA) 5' transfer RNA (tRNA) half
gtcgtgggttcgagccccacgttgggcgc

SEQ ID NO: 15917 - DNA, 16 bp, Artificial Sequence
  synthetic circulating small noncoding RNA (sncRNA) 5' transfer RNA (tRNA) half
taaacaggagatcctg

SEQ ID NO: 15918 - DNA, 31 bp, Artificial Sequence
  synthetic circulating small noncoding RNA (sncRNA) 5' transfer RNA (tRNA) half
cccgacgtgattcgaacacgcagccttctga

SEQ ID NO: 15919 - DNA, 20 bp, Artificial Sequence
  synthetic circulating small noncoding RNA (sncRNA) 5' transfer RNA (tRNA) half
agtggttaggattcggcgct

SEQ ID NO: 15920 - DNA, 21 bp, Artificial Sequence
  synthetic circulating small noncoding RNA (sncRNA) 5' transfer RNA (tRNA) half
aacccaggatctcctgtttac

SEQ ID NO: 15921 - DNA, 43 bp, Artificial Sequence
  synthetic circulating small noncoding RNA (sncRNA) 5' transfer RNA (tRNA) half
ccagtctcttcgggggcgtgggttcgaatcccaccgctgccat

SEQ ID NO: 15922 - DNA, 18 bp, Artificial Sequence
  synthetic circulating small noncoding RNA (sncRNA) 5' transfer RNA (tRNA) half
ggggatactcaccactat

SEQ ID NO: 15923 - DNA, 27 bp, Artificial Sequence
  synthetic circulating small noncoding RNA (sncRNA) 5' transfer RNA (tRNA) half
ggcggcccgggttcgactcccggtgtg

SEQ ID NO: 15924 - DNA, 13 bp, Artificial Sequence
  synthetic circulating small noncoding RNA (sncRNA) 5' transfer RNA (tRNA) half
ccggacgagccct

SEQ ID NO: 15925 - DNA, 21 bp, Artificial Sequence
  synthetic circulating small noncoding RNA (sncRNA) 5' transfer RNA (tRNA) half
tagaccaacgagccgctgtga

SEQ ID NO: 15926 - DNA, 11 bp, Artificial Sequence
  synthetic circulating small noncoding RNA (sncRNA) 5' transfer RNA (tRNA) half
gtcgctggttc

SEQ ID NO: 15927 - DNA, 16 bp, Artificial Sequence
  synthetic circulating small noncoding RNA (sncRNA) 5' transfer RNA (tRNA) half
cccattcttgcgaccc

SEQ ID NO: 15928 - DNA, 29 bp, Artificial Sequence
  synthetic circulating small noncoding RNA (sncRNA) 5' transfer RNA (tRNA) half
atccatcgacctctgggttatgggcccag

SEQ ID NO: 15929 - DNA, 17 bp, Artificial Sequence
  synthetic circulating small noncoding RNA (sncRNA) 5' transfer RNA (tRNA) half
gctcgaaccaccaacct

SEQ ID NO: 15930 - DNA, 14 bp, Artificial Sequence
  synthetic circulating small noncoding RNA (sncRNA) 5' transfer RNA (tRNA) half
aacgtgataaccac

SEQ ID NO: 15931 - DNA, 36 bp, Artificial Sequence
  synthetic circulating small noncoding RNA (sncRNA) 5' transfer RNA (tRNA) half
ccagcacgcttccgctgcgccactctgctacccact

SEQ ID NO: 15932 - DNA, 19 bp, Artificial Sequence
  synthetic circulating small noncoding RNA (sncRNA) 5' transfer RNA (tRNA) half
gaccagtgctctaacccct

SEQ ID NO: 15933 - DNA, 19 bp, Artificial Sequence
  synthetic circulating small noncoding RNA (sncRNA) 5' transfer RNA (tRNA) half
tatgggcccagcacgcttc

SEQ ID NO: 15934 - DNA, 31 bp, Artificial Sequence
  synthetic circulating small noncoding RNA (sncRNA) 5' transfer RNA (tRNA) half
aattctcgcctgccacgcgggaggcccgggt

SEQ ID NO: 15935 - DNA, 34 bp, Artificial Sequence
  synthetic circulating small noncoding RNA (sncRNA) 5' transfer RNA (tRNA) half
aagtccaacgccttaaccactcggccatcgctgc

SEQ ID NO: 15936 - DNA, 31 bp, Artificial Sequence
  synthetic circulating small noncoding RNA (sncRNA) 5' transfer RNA (tRNA) half
gggattgtgggttcgagtcccatctgggtcg

SEQ ID NO: 15937 - DNA, 22 bp, Artificial Sequence
  synthetic circulating small noncoding RNA (sncRNA) 5' transfer RNA (tRNA) half
cgggttcgatccccgtacgggc

SEQ ID NO: 15938 - DNA, 18 bp, Artificial Sequence
  synthetic circulating small noncoding RNA (sncRNA) 5' transfer RNA (tRNA) half
ttagctcaaatggtagag

SEQ ID NO: 15939 - DNA, 20 bp, Artificial Sequence
  synthetic circulating small noncoding RNA (sncRNA) 5' transfer RNA (tRNA) half
cagaggtagagcatttgact

SEQ ID NO: 15940 - DNA, 20 bp, Artificial Sequence
  synthetic circulating small noncoding RNA (sncRNA) 5' transfer RNA (tRNA) half
ccggttcgaaaccgggcgga

SEQ ID NO: 15941 - DNA, 32 bp, Artificial Sequence
  synthetic circulating small noncoding RNA (sncRNA) 5' transfer RNA (tRNA) half
gggtatagctcagtggtagagcatttgactgc

SEQ ID NO: 15942 - DNA, 24 bp, Artificial Sequence
  synthetic circulating small noncoding RNA (sncRNA) 5' transfer RNA (tRNA) half
cccggccaatgcactctctcactt

SEQ ID NO: 15943 - DNA, 16 bp, Artificial Sequence
  synthetic circulating small noncoding RNA (sncRNA) 5' transfer RNA (tRNA) half
tcgagtccaacgcctt

SEQ ID NO: 15944 - DNA, 11 bp, Artificial Sequence
  synthetic circulating small noncoding RNA (sncRNA) 5' transfer RNA (tRNA) half
agactcgaact

SEQ ID NO: 15945 - DNA, 21 bp, Artificial Sequence
  synthetic circulating small noncoding RNA (sncRNA) 5' transfer RNA (tRNA) half
aatcccggacgagcccagcta

SEQ ID NO: 15946 - DNA, 23 bp, Artificial Sequence
  synthetic circulating small noncoding RNA (sncRNA) 5' transfer RNA (tRNA) half
gttcgatcctcacctggagcact

SEQ ID NO: 15947 - DNA, 26 bp, Artificial Sequence
  synthetic circulating small noncoding RNA (sncRNA) 5' transfer RNA (tRNA) half
gtagtcggcaggattcgaacctgcgc

SEQ ID NO: 15948 - DNA, 15 bp, Artificial Sequence
  synthetic circulating small noncoding RNA (sncRNA) 5' transfer RNA (tRNA) half
gatccttaggtcgct

SEQ ID NO: 15949 - DNA, 27 bp, Artificial Sequence
  synthetic circulating small noncoding RNA (sncRNA) 5' transfer RNA (tRNA) half
cagggattgtgggttcgagtcccatct

SEQ ID NO: 15950 - DNA, 24 bp, Artificial Sequence
  synthetic circulating small noncoding RNA (sncRNA) 5' transfer RNA (tRNA) half
ctgggtgaaaaccaggaatcctaa

SEQ ID NO: 15951 - DNA, 11 bp, Artificial Sequence
  synthetic circulating small noncoding RNA (sncRNA) 5' transfer RNA (tRNA) half
cgatccccgta

SEQ ID NO: 15952 - DNA, 10 bp, Artificial Sequence
  synthetic circulating small noncoding RNA (sncRNA) 5' transfer RNA (tRNA) half
gtcggggaat

SEQ ID NO: 15953 - DNA, 36 bp, Artificial Sequence
  synthetic circulating small noncoding RNA (sncRNA) 5' transfer RNA (tRNA) half
gcatgaggccccgggttcgatccccggcacctccac

SEQ ID NO: 15954 - DNA, 15 bp, Artificial Sequence
  synthetic circulating small noncoding RNA (sncRNA) 5' transfer RNA (tRNA) half
atggaggcgtgggtt

SEQ ID NO: 15955 - DNA, 16 bp, Artificial Sequence
  synthetic circulating small noncoding RNA (sncRNA) 5' transfer RNA (tRNA) half
gggactcgaacccgca

SEQ ID NO: 15956 - DNA, 22 bp, Artificial Sequence
  synthetic circulating small noncoding RNA (sncRNA) 5' transfer RNA (tRNA) half
gtccagtgtgctaaccattaca

SEQ ID NO: 15957 - DNA, 13 bp, Artificial Sequence
  synthetic circulating small noncoding RNA (sncRNA) 5' transfer RNA (tRNA) half
ctcataatctgaa

SEQ ID NO: 15958 - DNA, 19 bp, Artificial Sequence
  synthetic circulating small noncoding RNA (sncRNA) 5' transfer RNA (tRNA) half
cttaaccactcggccacga

SEQ ID NO: 15959 - DNA, 13 bp, Artificial Sequence
  synthetic circulating small noncoding RNA (sncRNA) 5' transfer RNA (tRNA) half
gtcctgccgcggt

SEQ ID NO: 15960 - DNA, 19 bp, Artificial Sequence
  synthetic circulating small noncoding RNA (sncRNA) 5' transfer RNA (tRNA) half
gaccttggcgttattagca

SEQ ID NO: 15961 - DNA, 23 bp, Artificial Sequence
  synthetic circulating small noncoding RNA (sncRNA) 5' transfer RNA (tRNA) half
ccttaaccactcggccacgacta

SEQ ID NO: 15962 - DNA, 16 bp, Artificial Sequence
  synthetic circulating small noncoding RNA (sncRNA) 5' transfer RNA (tRNA) half
tagcggttatcacgtc

SEQ ID NO: 15963 - DNA, 34 bp, Artificial Sequence
  synthetic circulating small noncoding RNA (sncRNA) 5' transfer RNA (tRNA) half
tcttcggaggcgtgggttcgaatcccaccgctgc

SEQ ID NO: 15964 - DNA, 34 bp, Artificial Sequence
  synthetic circulating small noncoding RNA (sncRNA) 5' transfer RNA (tRNA) half
gaagatcgcgggttcgaaccccgtccgtgcctgc

SEQ ID NO: 15965 - DNA, 20 bp, Artificial Sequence
  synthetic circulating small noncoding RNA (sncRNA) 5' transfer RNA (tRNA) half
atcccactcctgacagcctc

SEQ ID NO: 15966 - DNA, 37 bp, Artificial Sequence
  synthetic circulating small noncoding RNA (sncRNA) 5' transfer RNA (tRNA) half
gtttctgtagtgtagtggttatcacgttcgcctcaca

SEQ ID NO: 15967 - DNA, 23 bp, Artificial Sequence
  synthetic circulating small noncoding RNA (sncRNA) 5' transfer RNA (tRNA) half
ggctgttaaccgaaaggttggtg

SEQ ID NO: 15968 - DNA, 16 bp, Artificial Sequence
  synthetic circulating small noncoding RNA (sncRNA) 5' transfer RNA (tRNA) half
ccagccaggagtcgaa

SEQ ID NO: 15969 - DNA, 20 bp, Artificial Sequence
  synthetic circulating small noncoding RNA (sncRNA) 5' transfer RNA (tRNA) half
agaatcatacccctagacca

SEQ ID NO: 15970 - DNA, 38 bp, Artificial Sequence
  synthetic circulating small noncoding RNA (sncRNA) 5' transfer RNA (tRNA) half
gaacccgggacctctcgcacccaaagcgagaatcatac

SEQ ID NO: 15971 - DNA, 23 bp, Artificial Sequence
  synthetic circulating small noncoding RNA (sncRNA) 5' transfer RNA (tRNA) half
gctggattcagagtccagagtgc

SEQ ID NO: 15972 - DNA, 31 bp, Artificial Sequence
  synthetic circulating small noncoding RNA (sncRNA) 5' transfer RNA (tRNA) half
attgtgggttcgagtcccatctgggtcgcat

SEQ ID NO: 15973 - DNA, 9 bp, Artificial Sequence
  synthetic circulating small noncoding RNA (sncRNA) 5' transfer RNA (tRNA) half
ctgtgtcgg

SEQ ID NO: 15974 - DNA, 14 bp, Artificial Sequence
  synthetic circulating small noncoding RNA (sncRNA) 5' transfer RNA (tRNA) half
ggccgcctgggtga

SEQ ID NO: 15975 - DNA, 22 bp, Artificial Sequence
  synthetic circulating small noncoding RNA (sncRNA) 5' transfer RNA (tRNA) half
caggatttgaacctgcgcggga

SEQ ID NO: 15976 - DNA, 20 bp, Artificial Sequence
  synthetic circulating small noncoding RNA (sncRNA) 5' transfer RNA (tRNA) half
actctgagggggcacccgga

SEQ ID NO: 15977 - DNA, 31 bp, Artificial Sequence
  synthetic circulating small noncoding RNA (sncRNA) 5' transfer RNA (tRNA) half
tggtagaattctcgcctgccacgcgggaggc

SEQ ID NO: 15978 - DNA, 25 bp, Artificial Sequence
  synthetic circulating small noncoding RNA (sncRNA) 5' transfer RNA (tRNA) half
gtgagcatagctgccttccaagcag

SEQ ID NO: 15979 - DNA, 15 bp, Artificial Sequence
  synthetic circulating small noncoding RNA (sncRNA) 5' transfer RNA (tRNA) half
gccagtgccttatcc

SEQ ID NO: 15980 - DNA, 11 bp, Artificial Sequence
  synthetic circulating small noncoding RNA (sncRNA) 5' transfer RNA (tRNA) half
gaaccaccaat

SEQ ID NO: 15981 - DNA, 22 bp, Artificial Sequence
  synthetic circulating small noncoding RNA (sncRNA) 5' transfer RNA (tRNA) half
ggtgtagtggtatcatgcaaga

SEQ ID NO: 15982 - DNA, 14 bp, Artificial Sequence
  synthetic circulating small noncoding RNA (sncRNA) 5' transfer RNA (tRNA) half
cataccgggagtcg

SEQ ID NO: 15983 - DNA, 16 bp, Artificial Sequence
  synthetic circulating small noncoding RNA (sncRNA) 5' transfer RNA (tRNA) half
agtcgaacctagaatc

SEQ ID NO: 15984 - DNA, 20 bp, Artificial Sequence
  synthetic circulating small noncoding RNA (sncRNA) 5' transfer RNA (tRNA) half
atgattctcggtttgggtcc

SEQ ID NO: 15985 - DNA, 17 bp, Artificial Sequence
  synthetic circulating small noncoding RNA (sncRNA) 5' transfer RNA (tRNA) half
cgaccacgaagggactc

SEQ ID NO: 15986 - DNA, 35 bp, Artificial Sequence
  synthetic circulating small noncoding RNA (sncRNA) 5' transfer RNA (tRNA) half
ggcgaacgtgataaccactacactacggaaactcg

SEQ ID NO: 15987 - DNA, 8 bp, Artificial Sequence
  synthetic circulating small noncoding RNA (sncRNA) 5' transfer RNA (tRNA) half
tgccgtga

SEQ ID NO: 15988 - DNA, 18 bp, Artificial Sequence
  synthetic circulating small noncoding RNA (sncRNA) 5' transfer RNA (tRNA) half
tgcgagaggtcccgggtt

SEQ ID NO: 15989 - DNA, 18 bp, Artificial Sequence
  synthetic circulating small noncoding RNA (sncRNA) 5' transfer RNA (tRNA) half
acccacgcgtgcaaagca

SEQ ID NO: 15990 - DNA, 14 bp, Artificial Sequence
  synthetic circulating small noncoding RNA (sncRNA) 5' transfer RNA (tRNA) half
aacgcagcgcctta

SEQ ID NO: 15991 - DNA, 7 bp, Artificial Sequence
  synthetic circulating small noncoding RNA (sncRNA) 5' transfer RNA (tRNA) half
gagaccg

SEQ ID NO: 15992 - DNA, 11 bp, Artificial Sequence
  synthetic circulating small noncoding RNA (sncRNA) 5' transfer RNA (tRNA) half
cagcggtgcct

SEQ ID NO: 15993 - DNA, 38 bp, Artificial Sequence
  synthetic circulating small noncoding RNA (sncRNA) 5' transfer RNA (tRNA) half
tgcattggccgggaatcgaacccgggcctcccgcgtgg

SEQ ID NO: 15994 - DNA, 29 bp, Artificial Sequence
  synthetic circulating small noncoding RNA (sncRNA) 5' transfer RNA (tRNA) half
acaacgcagagtactaaccactatacgat

SEQ ID NO: 15995 - DNA, 21 bp, Artificial Sequence
  synthetic circulating small noncoding RNA (sncRNA) 5' transfer RNA (tRNA) half
tcaggatggccgagcggtcta

SEQ ID NO: 15996 - DNA, 14 bp, Artificial Sequence
  synthetic circulating small noncoding RNA (sncRNA) 5' transfer RNA (tRNA) half
ccgctcggccatcc

SEQ ID NO: 15997 - DNA, 8 bp, Artificial Sequence
  synthetic circulating small noncoding RNA (sncRNA) 5' transfer RNA (tRNA) half
cgagccct

SEQ ID NO: 15998 - DNA, 24 bp, Artificial Sequence
  synthetic circulating small noncoding RNA (sncRNA) 5' transfer RNA (tRNA) half
tggattcaaagtccagagtgctaa

SEQ ID NO: 15999 - DNA, 18 bp, Artificial Sequence
  synthetic circulating small noncoding RNA (sncRNA) 5' transfer RNA (tRNA) half
cgtagtcggcaggattcg

SEQ ID NO: 16000 - DNA, 33 bp, Artificial Sequence
  synthetic circulating small noncoding RNA (sncRNA) 5' transfer RNA (tRNA) half
cagacgcgctaccgttgcgccacgaggccggcc

SEQ ID NO: 16001 - DNA, 24 bp, Artificial Sequence
  synthetic circulating small noncoding RNA (sncRNA) 5' transfer RNA (tRNA) half
atcgaacccgggccgcggcggtga

SEQ ID NO: 16002 - DNA, 40 bp, Artificial Sequence
  synthetic circulating small noncoding RNA (sncRNA) 5' transfer RNA (tRNA) half
cggatagctcagtcggtagagcatcagacttttaatctga

SEQ ID NO: 16003 - DNA, 21 bp, Artificial Sequence
  synthetic circulating small noncoding RNA (sncRNA) 5' transfer RNA (tRNA) half
tgtcagaagtgggattcgaac

SEQ ID NO: 16004 - DNA, 33 bp, Artificial Sequence
  synthetic circulating small noncoding RNA (sncRNA) 5' transfer RNA (tRNA) half
gccgctggtgtagtggtatcatgcaagattccc

SEQ ID NO: 16005 - DNA, 29 bp, Artificial Sequence
  synthetic circulating small noncoding RNA (sncRNA) 5' transfer RNA (tRNA) half
tagtgtagtggttatcacgttcgcctcac

SEQ ID NO: 16006 - DNA, 27 bp, Artificial Sequence
  synthetic circulating small noncoding RNA (sncRNA) 5' transfer RNA (tRNA) half
ttccgtagtgtagtggttatcacgttc

SEQ ID NO: 16007 - DNA, 21 bp, Artificial Sequence
  synthetic circulating small noncoding RNA (sncRNA) 5' transfer RNA (tRNA) half
gggagtcgaacccgggccgcc

SEQ ID NO: 16008 - DNA, 25 bp, Artificial Sequence
  synthetic circulating small noncoding RNA (sncRNA) 5' transfer RNA (tRNA) half
agtgtagtggtcatcacgctcgcct

SEQ ID NO: 16009 - DNA, 23 bp, Artificial Sequence
  synthetic circulating small noncoding RNA (sncRNA) 5' transfer RNA (tRNA) half
aggcggcccgggttcgactcccg

SEQ ID NO: 16010 - DNA, 20 bp, Artificial Sequence
  synthetic circulating small noncoding RNA (sncRNA) 5' transfer RNA (tRNA) half
aaccactcggccatcacagc

SEQ ID NO: 16011 - DNA, 17 bp, Artificial Sequence
  synthetic circulating small noncoding RNA (sncRNA) 5' transfer RNA (tRNA) half
accagcgacctaaggat

SEQ ID NO: 16012 - DNA, 14 bp, Artificial Sequence
  synthetic circulating small noncoding RNA (sncRNA) 5' transfer RNA (tRNA) half
cggccaatgcacga

SEQ ID NO: 16013 - DNA, 34 bp, Artificial Sequence
  synthetic circulating small noncoding RNA (sncRNA) 5' transfer RNA (tRNA) half
gagtccaacgccttaaccactcggccatcacagc

SEQ ID NO: 16014 - DNA, 23 bp, Artificial Sequence
  synthetic circulating small noncoding RNA (sncRNA) 5' transfer RNA (tRNA) half
cttgaccccgacgtgacttgaac

SEQ ID NO: 16015 - DNA, 14 bp, Artificial Sequence
  synthetic circulating small noncoding RNA (sncRNA) 5' transfer RNA (tRNA) half
gcgccaaatcctaa

SEQ ID NO: 16016 - DNA, 21 bp, Artificial Sequence
  synthetic circulating small noncoding RNA (sncRNA) 5' transfer RNA (tRNA) half
ctctcaccgccgcggcccggg

SEQ ID NO: 16017 - DNA, 10 bp, Artificial Sequence
  synthetic circulating small noncoding RNA (sncRNA) 5' transfer RNA (tRNA) half
gccagccagg

SEQ ID NO: 16018 - DNA, 15 bp, Artificial Sequence
  synthetic circulating small noncoding RNA (sncRNA) 5' transfer RNA (tRNA) half
tcctaaccgctagac

SEQ ID NO: 16019 - DNA, 15 bp, Artificial Sequence
  synthetic circulating small noncoding RNA (sncRNA) 5' transfer RNA (tRNA) half
ggggattagctcaaa

SEQ ID NO: 16020 - DNA, 20 bp, Artificial Sequence
  synthetic circulating small noncoding RNA (sncRNA) 5' transfer RNA (tRNA) half
gggttcgactcccggtgtgg

SEQ ID NO: 16021 - DNA, 16 bp, Artificial Sequence
  synthetic circulating small noncoding RNA (sncRNA) 5' transfer RNA (tRNA) half
tccattaggccacgcg

SEQ ID NO: 16022 - DNA, 24 bp, Artificial Sequence
  synthetic circulating small noncoding RNA (sncRNA) 5' transfer RNA (tRNA) half
ccgactgagctatccgggctctta

SEQ ID NO: 16023 - DNA, 10 bp, Artificial Sequence
  synthetic circulating small noncoding RNA (sncRNA) 5' transfer RNA (tRNA) half
gagcgccgaa

SEQ ID NO: 16024 - DNA, 20 bp, Artificial Sequence
  synthetic circulating small noncoding RNA (sncRNA) 5' transfer RNA (tRNA) half
cgaacccacaatccctggct

SEQ ID NO: 16025 - DNA, 34 bp, Artificial Sequence
  synthetic circulating small noncoding RNA (sncRNA) 5' transfer RNA (tRNA) half
tcccgcgtggcaggcgagaattctaccactgaac

SEQ ID NO: 16026 - DNA, 22 bp, Artificial Sequence
  synthetic circulating small noncoding RNA (sncRNA) 5' transfer RNA (tRNA) half
tctagcggttaggattcctggt

SEQ ID NO: 16027 - DNA, 31 bp, Artificial Sequence
  synthetic circulating small noncoding RNA (sncRNA) 5' transfer RNA (tRNA) half
agaaggtcctgggttcgagccccagtggaac

SEQ ID NO: 16028 - DNA, 13 bp, Artificial Sequence
  synthetic circulating small noncoding RNA (sncRNA) 5' transfer RNA (tRNA) half
agtcggcaggatt

SEQ ID NO: 16029 - DNA, 45 bp, Artificial Sequence
  synthetic circulating small noncoding RNA (sncRNA) 5' transfer RNA (tRNA) half
cagcgagcagggttcgaacctgcgcggggagaccccattggattt

SEQ ID NO: 16030 - DNA, 15 bp, Artificial Sequence
  synthetic circulating small noncoding RNA (sncRNA) 5' transfer RNA (tRNA) half
gtcggtagagcatca

SEQ ID NO: 16031 - DNA, 10 bp, Artificial Sequence
  synthetic circulating small noncoding RNA (sncRNA) 5' transfer RNA (tRNA) half
gccgcggcgg

SEQ ID NO: 16032 - DNA, 36 bp, Artificial Sequence
  synthetic circulating small noncoding RNA (sncRNA) 5' transfer RNA (tRNA) half
cgactccgccgggactcgaacccggaacctttgaat

SEQ ID NO: 16033 - DNA, 44 bp, Artificial Sequence
  synthetic circulating small noncoding RNA (sncRNA) 5' transfer RNA (tRNA) half
cttaaaaccttgttcccagaggttcaaatcctctccctaatagt

SEQ ID NO: 16034 - DNA, 20 bp, Artificial Sequence
  synthetic circulating small noncoding RNA (sncRNA) 5' transfer RNA (tRNA) half
atcccggacgagcccaattt

SEQ ID NO: 16035 - DNA, 18 bp, Artificial Sequence
  synthetic circulating small noncoding RNA (sncRNA) 5' transfer RNA (tRNA) half
agctcagtcggtagagca

SEQ ID NO: 16036 - DNA, 18 bp, Artificial Sequence
  synthetic circulating small noncoding RNA (sncRNA) 5' transfer RNA (tRNA) half
cttaaccactcggccacc

SEQ ID NO: 16037 - DNA, 21 bp, Artificial Sequence
  synthetic circulating small noncoding RNA (sncRNA) 5' transfer RNA (tRNA) half
aatcagacgccttatccatta

SEQ ID NO: 16038 - DNA, 22 bp, Artificial Sequence
  synthetic circulating small noncoding RNA (sncRNA) 5' transfer RNA (tRNA) half
acaacgcagagtactaaccact

SEQ ID NO: 16039 - DNA, 29 bp, Artificial Sequence
  synthetic circulating small noncoding RNA (sncRNA) 5' transfer RNA (tRNA) half
ttcccatatggtctagcggttaggattcc

SEQ ID NO: 16040 - DNA, 22 bp, Artificial Sequence
  synthetic circulating small noncoding RNA (sncRNA) 5' transfer RNA (tRNA) half
ccgctcggccatcctgacttac

SEQ ID NO: 16041 - DNA, 26 bp, Artificial Sequence
  synthetic circulating small noncoding RNA (sncRNA) 5' transfer RNA (tRNA) half
gccggggatcgaacccggggcctcat

SEQ ID NO: 16042 - DNA, 19 bp, Artificial Sequence
  synthetic circulating small noncoding RNA (sncRNA) 5' transfer RNA (tRNA) half
ccatagtgtagcggttatc

SEQ ID NO: 16043 - DNA, 40 bp, Artificial Sequence
  synthetic circulating small noncoding RNA (sncRNA) 5' transfer RNA (tRNA) half
aaaactgcacttccctgaccgggaatcgaacccgggccgc

SEQ ID NO: 16044 - DNA, 28 bp, Artificial Sequence
  synthetic circulating small noncoding RNA (sncRNA) 5' transfer RNA (tRNA) half
gactcaaagtccagtgtgctaaccatta

SEQ ID NO: 16045 - DNA, 13 bp, Artificial Sequence
  synthetic circulating small noncoding RNA (sncRNA) 5' transfer RNA (tRNA) half
cattaggccacgc

SEQ ID NO: 16046 - DNA, 24 bp, Artificial Sequence
  synthetic circulating small noncoding RNA (sncRNA) 5' transfer RNA (tRNA) half
gcgacccgggttcgattcccgggc

SEQ ID NO: 16047 - DNA, 12 bp, Artificial Sequence
  synthetic circulating small noncoding RNA (sncRNA) 5' transfer RNA (tRNA) half
cggatgatcctc

SEQ ID NO: 16048 - DNA, 20 bp, Artificial Sequence
  synthetic circulating small noncoding RNA (sncRNA) 5' transfer RNA (tRNA) half
gaccacgaagggactcgaac

SEQ ID NO: 16049 - DNA, 18 bp, Artificial Sequence
  synthetic circulating small noncoding RNA (sncRNA) 5' transfer RNA (tRNA) half
ccattaggccacgtggtc

SEQ ID NO: 16050 - DNA, 14 bp, Artificial Sequence
  synthetic circulating small noncoding RNA (sncRNA) 5' transfer RNA (tRNA) half
gttcgaaaccgggc

SEQ ID NO: 16051 - DNA, 33 bp, Artificial Sequence
  synthetic circulating small noncoding RNA (sncRNA) 5' transfer RNA (tRNA) half
cggttaggattcctggttttcacccaggcggcc

SEQ ID NO: 16052 - DNA, 19 bp, Artificial Sequence
  synthetic circulating small noncoding RNA (sncRNA) 5' transfer RNA (tRNA) half
aatccccggcatctccaac

SEQ ID NO: 16053 - DNA, 29 bp, Artificial Sequence
  synthetic circulating small noncoding RNA (sncRNA) 5' transfer RNA (tRNA) half
cagtcaaatgctctaccactgagctatac

SEQ ID NO: 16054 - DNA, 20 bp, Artificial Sequence
  synthetic circulating small noncoding RNA (sncRNA) 5' transfer RNA (tRNA) half
gttcgaaccccgtccgtgcc

SEQ ID NO: 16055 - DNA, 17 bp, Artificial Sequence
  synthetic circulating small noncoding RNA (sncRNA) 5' transfer RNA (tRNA) half
aacctggaatcttctga

SEQ ID NO: 16056 - DNA, 31 bp, Artificial Sequence
  synthetic circulating small noncoding RNA (sncRNA) 5' transfer RNA (tRNA) half
aggttgtgagttcgagcctcacctggagcac

SEQ ID NO: 16057 - DNA, 17 bp, Artificial Sequence
  synthetic circulating small noncoding RNA (sncRNA) 5' transfer RNA (tRNA) half
gttcgaaccccgtccgt

SEQ ID NO: 16058 - DNA, 26 bp, Artificial Sequence
  synthetic circulating small noncoding RNA (sncRNA) 5' transfer RNA (tRNA) half
agtcaaatgctctacccctgagctat

SEQ ID NO: 16059 - DNA, 30 bp, Artificial Sequence
  synthetic circulating small noncoding RNA (sncRNA) 5' transfer RNA (tRNA) half
agccaggtaggagtcgaacctacaatcttc

SEQ ID NO: 16060 - DNA, 34 bp, Artificial Sequence
  synthetic circulating small noncoding RNA (sncRNA) 5' transfer RNA (tRNA) half
cggttccatagtgtagcggttatcacgtctgctt

SEQ ID NO: 16061 - DNA, 8 bp, Artificial Sequence
  synthetic circulating small noncoding RNA (sncRNA) 5' transfer RNA (tRNA) half
cggccatc

SEQ ID NO: 16062 - DNA, 34 bp, Artificial Sequence
  synthetic circulating small noncoding RNA (sncRNA) 5' transfer RNA (tRNA) half
cattggtggttcagtggtagaattctcgcctgcc

SEQ ID NO: 16063 - DNA, 23 bp, Artificial Sequence
  synthetic circulating small noncoding RNA (sncRNA) 5' transfer RNA (tRNA) half
gcgactctggtgggactcgaacc

SEQ ID NO: 16064 - DNA, 12 bp, Artificial Sequence
  synthetic circulating small noncoding RNA (sncRNA) 5' transfer RNA (tRNA) half
atacccctagac

SEQ ID NO: 16065 - DNA, 12 bp, Artificial Sequence
  synthetic circulating small noncoding RNA (sncRNA) 5' transfer RNA (tRNA) half
cggctcgaagga

SEQ ID NO: 16066 - DNA, 23 bp, Artificial Sequence
  synthetic circulating small noncoding RNA (sncRNA) 5' transfer RNA (tRNA) half
ttcggcgctctcaccgccgcggc

SEQ ID NO: 16067 - DNA, 19 bp, Artificial Sequence
  synthetic circulating small noncoding RNA (sncRNA) 5' transfer RNA (tRNA) half
gcgacccgggttcgattcc

SEQ ID NO: 16068 - DNA, 28 bp, Artificial Sequence
  synthetic circulating small noncoding RNA (sncRNA) 5' transfer RNA (tRNA) half
cgaagggactcgaaccctcaatcttctg

SEQ ID NO: 16069 - DNA, 37 bp, Artificial Sequence
  synthetic circulating small noncoding RNA (sncRNA) 5' transfer RNA (tRNA) half
gtgagtttccgtagtgtagtggttatcacgttcgcct

SEQ ID NO: 16070 - DNA, 19 bp, Artificial Sequence
  synthetic circulating small noncoding RNA (sncRNA) 5' transfer RNA (tRNA) half
accgggcggaaacatatct

SEQ ID NO: 16071 - DNA, 11 bp, Artificial Sequence
  synthetic circulating small noncoding RNA (sncRNA) 5' transfer RNA (tRNA) half
tctggtctccg

SEQ ID NO: 16072 - DNA, 28 bp, Artificial Sequence
  synthetic circulating small noncoding RNA (sncRNA) 5' transfer RNA (tRNA) half
acctgtgcggggaaaccccattggattt

SEQ ID NO: 16073 - DNA, 32 bp, Artificial Sequence
  synthetic circulating small noncoding RNA (sncRNA) 5' transfer RNA (tRNA) half
gggaggcccgggttcgattcccggccaatgca

SEQ ID NO: 16074 - DNA, 28 bp, Artificial Sequence
  synthetic circulating small noncoding RNA (sncRNA) 5' transfer RNA (tRNA) half
gcctccccgtcggggaatcgaaccccgg

SEQ ID NO: 16075 - DNA, 19 bp, Artificial Sequence
  synthetic circulating small noncoding RNA (sncRNA) 5' transfer RNA (tRNA) half
gatgccgggaatcgaaccc

SEQ ID NO: 16076 - DNA, 16 bp, Artificial Sequence
  synthetic circulating small noncoding RNA (sncRNA) 5' transfer RNA (tRNA) half
atcacgtcggggtcaa

SEQ ID NO: 16077 - DNA, 20 bp, Artificial Sequence
  synthetic circulating small noncoding RNA (sncRNA) 5' transfer RNA (tRNA) half
ctaagccagggattgtgggt

SEQ ID NO: 16078 - DNA, 13 bp, Artificial Sequence
  synthetic circulating small noncoding RNA (sncRNA) 5' transfer RNA (tRNA) half
gtccgggatttga

SEQ ID NO: 16079 - DNA, 17 bp, Artificial Sequence
  synthetic circulating small noncoding RNA (sncRNA) 5' transfer RNA (tRNA) half
ttccgcccggtttcgaa

SEQ ID NO: 16080 - DNA, 22 bp, Artificial Sequence
  synthetic circulating small noncoding RNA (sncRNA) 5' transfer RNA (tRNA) half
ccgggaatcgaacccgggtcaa

SEQ ID NO: 16081 - DNA, 13 bp, Artificial Sequence
  synthetic circulating small noncoding RNA (sncRNA) 5' transfer RNA (tRNA) half
gtgatcgtatagt

SEQ ID NO: 16082 - DNA, 27 bp, Artificial Sequence
  synthetic circulating small noncoding RNA (sncRNA) 5' transfer RNA (tRNA) half
gaaccggggacctttcgcgtgtgaggc

SEQ ID NO: 16083 - DNA, 29 bp, Artificial Sequence
  synthetic circulating small noncoding RNA (sncRNA) 5' transfer RNA (tRNA) half
agcagttgacccgggttcgattcccggcc

SEQ ID NO: 16084 - DNA, 12 bp, Artificial Sequence
  synthetic circulating small noncoding RNA (sncRNA) 5' transfer RNA (tRNA) half
tggagatgccgg

SEQ ID NO: 16085 - DNA, 32 bp, Artificial Sequence
  synthetic circulating small noncoding RNA (sncRNA) 5' transfer RNA (tRNA) half
aagggactcgaacccccaatcttctgatccgg

SEQ ID NO: 16086 - DNA, 38 bp, Artificial Sequence
  synthetic circulating small noncoding RNA (sncRNA) 5' transfer RNA (tRNA) half
gcggtgggattcgaacccacgccatcgaaatgactgga

SEQ ID NO: 16087 - DNA, 36 bp, Artificial Sequence
  synthetic circulating small noncoding RNA (sncRNA) 5' transfer RNA (tRNA) half
agaccagtgctctaacccctgagctatggagccctc

SEQ ID NO: 16088 - DNA, 36 bp, Artificial Sequence
  synthetic circulating small noncoding RNA (sncRNA) 5' transfer RNA (tRNA) half
agggggcacccggatttgaaccagggacctcttgat

SEQ ID NO: 16089 - DNA, 15 bp, Artificial Sequence
  synthetic circulating small noncoding RNA (sncRNA) 5' transfer RNA (tRNA) half
acctggattcgaacc

SEQ ID NO: 16090 - DNA, 33 bp, Artificial Sequence
  synthetic circulating small noncoding RNA (sncRNA) 5' transfer RNA (tRNA) half
gcccagcacgcttccgctgcgccactctgctac

SEQ ID NO: 16091 - DNA, 18 bp, Artificial Sequence
  synthetic circulating small noncoding RNA (sncRNA) 5' transfer RNA (tRNA) half
gttttcacccaggcggcc

SEQ ID NO: 16092 - DNA, 14 bp, Artificial Sequence
  synthetic circulating small noncoding RNA (sncRNA) 5' transfer RNA (tRNA) half
gccggattcgaacc

SEQ ID NO: 16093 - DNA, 19 bp, Artificial Sequence
  synthetic circulating small noncoding RNA (sncRNA) 5' transfer RNA (tRNA) half
cagtcaaatgctctaccac

SEQ ID NO: 16094 - DNA, 22 bp, Artificial Sequence
  synthetic circulating small noncoding RNA (sncRNA) 5' transfer RNA (tRNA) half
gttcgagcctcacctggagcac

SEQ ID NO: 16095 - DNA, 25 bp, Artificial Sequence
  synthetic circulating small noncoding RNA (sncRNA) 5' transfer RNA (tRNA) half
ggtgaaaaccaggaatcctaaccgc

SEQ ID NO: 16096 - DNA, 20 bp, Artificial Sequence
  synthetic circulating small noncoding RNA (sncRNA) 5' transfer RNA (tRNA) half
ctaccgactgagctagccgg

SEQ ID NO: 16097 - DNA, 30 bp, Artificial Sequence
  synthetic circulating small noncoding RNA (sncRNA) 5' transfer RNA (tRNA) half
agagtcccatgctctaccgactgagctagc

SEQ ID NO: 16098 - DNA, 27 bp, Artificial Sequence
  synthetic circulating small noncoding RNA (sncRNA) 5' transfer RNA (tRNA) half
tcgtatagtggttagtactctgcgttg

SEQ ID NO: 16099 - DNA, 31 bp, Artificial Sequence
  synthetic circulating small noncoding RNA (sncRNA) 5' transfer RNA (tRNA) half
gtccatcgccttaaccactcggccacctcgt

SEQ ID NO: 16100 - DNA, 25 bp, Artificial Sequence
  synthetic circulating small noncoding RNA (sncRNA) 5' transfer RNA (tRNA) half
ccttcgatagctcagttggtagagc

SEQ ID NO: 16101 - DNA, 21 bp, Artificial Sequence
  synthetic circulating small noncoding RNA (sncRNA) 5' transfer RNA (tRNA) half
attctaccactgaaccaccaa

SEQ ID NO: 16102 - DNA, 39 bp, Artificial Sequence
  synthetic circulating small noncoding RNA (sncRNA) 5' transfer RNA (tRNA) half
ggagtggggttcgaacccacgcagacatatgtccattgg

SEQ ID NO: 16103 - DNA, 34 bp, Artificial Sequence
  synthetic circulating small noncoding RNA (sncRNA) 5' transfer RNA (tRNA) half
acccacgaccctgagattaagagtctcatgctct

SEQ ID NO: 16104 - DNA, 5 bp, Artificial Sequence
  synthetic circulating small noncoding RNA (sncRNA) 5' transfer RNA (tRNA) half
tcgcg

SEQ ID NO: 16105 - DNA, 11 bp, Artificial Sequence
  synthetic circulating small noncoding RNA (sncRNA) 5' transfer RNA (tRNA) half
tcccgcgtggc

SEQ ID NO: 16106 - DNA, 17 bp, Artificial Sequence
  synthetic circulating small noncoding RNA (sncRNA) 5' transfer RNA (tRNA) half
agagcgccgaatcctaa

SEQ ID NO: 16107 - DNA, 17 bp, Artificial Sequence
  synthetic circulating small noncoding RNA (sncRNA) 5' transfer RNA (tRNA) half
aggcggggatactaacc

SEQ ID NO: 16108 - DNA, 26 bp, Artificial Sequence
  synthetic circulating small noncoding RNA (sncRNA) 5' transfer RNA (tRNA) half
cagggattgtgggttcgagtcccatc

SEQ ID NO: 16109 - DNA, 9 bp, Artificial Sequence
  synthetic circulating small noncoding RNA (sncRNA) 5' transfer RNA (tRNA) half
ggggatgta

SEQ ID NO: 16110 - DNA, 15 bp, Artificial Sequence
  synthetic circulating small noncoding RNA (sncRNA) 5' transfer RNA (tRNA) half
gcgaatgtgataacc

SEQ ID NO: 16111 - DNA, 16 bp, Artificial Sequence
  synthetic circulating small noncoding RNA (sncRNA) 5' transfer RNA (tRNA) half
gcgggttcgatccccg

SEQ ID NO: 16112 - DNA, 17 bp, Artificial Sequence
  synthetic circulating small noncoding RNA (sncRNA) 5' transfer RNA (tRNA) half
ttccctgaccgggaatc

SEQ ID NO: 16113 - DNA, 22 bp, Artificial Sequence
  synthetic circulating small noncoding RNA (sncRNA) 5' transfer RNA (tRNA) half
agaggtcgatggatcgaaacca

SEQ ID NO: 16114 - DNA, 20 bp, Artificial Sequence
  synthetic circulating small noncoding RNA (sncRNA) 5' transfer RNA (tRNA) half
atggataaggcatcagcctc

SEQ ID NO: 16115 - DNA, 17 bp, Artificial Sequence
  synthetic circulating small noncoding RNA (sncRNA) 5' transfer RNA (tRNA) half
tccccggcatctccaac

SEQ ID NO: 16116 - DNA, 45 bp, Artificial Sequence
  synthetic circulating small noncoding RNA (sncRNA) 5' transfer RNA (tRNA) half
cggatgatcctcagtggtctggggtgcaggcttcaaacctgtagc

SEQ ID NO: 16117 - DNA, 37 bp, Artificial Sequence
  synthetic circulating small noncoding RNA (sncRNA) 5' transfer RNA (tRNA) half
ggaagcgtgctgggcccataacccagaggtcgatgga

SEQ ID NO: 16118 - DNA, 9 bp, Artificial Sequence
  synthetic circulating small noncoding RNA (sncRNA) 5' transfer RNA (tRNA) half
gcagcccgt

SEQ ID NO: 16119 - DNA, 30 bp, Artificial Sequence
  synthetic circulating small noncoding RNA (sncRNA) 5' transfer RNA (tRNA) half
gttccatagggtagtggttatcacatctgc

SEQ ID NO: 16120 - DNA, 27 bp, Artificial Sequence
  synthetic circulating small noncoding RNA (sncRNA) 5' transfer RNA (tRNA) half
gccgtgatcgtataggggttagtactc

SEQ ID NO: 16121 - DNA, 14 bp, Artificial Sequence
  synthetic circulating small noncoding RNA (sncRNA) 5' transfer RNA (tRNA) half
ggattcgaaccctc

SEQ ID NO: 16122 - DNA, 27 bp, Artificial Sequence
  synthetic circulating small noncoding RNA (sncRNA) 5' transfer RNA (tRNA) half
ccagggttcaagtccctgttcgggcgc

SEQ ID NO: 16123 - DNA, 25 bp, Artificial Sequence
  synthetic circulating small noncoding RNA (sncRNA) 5' transfer RNA (tRNA) half
aggcggcccgggttcgactcccggt

SEQ ID NO: 16124 - DNA, 16 bp, Artificial Sequence
  synthetic circulating small noncoding RNA (sncRNA) 5' transfer RNA (tRNA) half
cgaacccacgaccctg

SEQ ID NO: 16125 - DNA, 34 bp, Artificial Sequence
  synthetic circulating small noncoding RNA (sncRNA) 5' transfer RNA (tRNA) half
gttatgggcccagcacgcttccgctgcgccactc

SEQ ID NO: 16126 - DNA, 21 bp, Artificial Sequence
  synthetic circulating small noncoding RNA (sncRNA) 5' transfer RNA (tRNA) half
ttccggctcgaaggacttcgt

SEQ ID NO: 16127 - DNA, 18 bp, Artificial Sequence
  synthetic circulating small noncoding RNA (sncRNA) 5' transfer RNA (tRNA) half
aaaacttgggctcgtccg

SEQ ID NO: 16128 - DNA, 27 bp, Artificial Sequence
  synthetic circulating small noncoding RNA (sncRNA) 5' transfer RNA (tRNA) half
gggtgggctcgaaccaccaacctttcg

SEQ ID NO: 16129 - DNA, 15 bp, Artificial Sequence
  synthetic circulating small noncoding RNA (sncRNA) 5' transfer RNA (tRNA) half
cgtccctgggtgggc

SEQ ID NO: 16130 - DNA, 15 bp, Artificial Sequence
  synthetic circulating small noncoding RNA (sncRNA) 5' transfer RNA (tRNA) half
tcgaacccgcaacct

SEQ ID NO: 16131 - DNA, 23 bp, Artificial Sequence
  synthetic circulating small noncoding RNA (sncRNA) 5' transfer RNA (tRNA) half
ctgaacgcagcgccttagaccgc

SEQ ID NO: 16132 - DNA, 15 bp, Artificial Sequence
  synthetic circulating small noncoding RNA (sncRNA) 5' transfer RNA (tRNA) half
gtatagtggttagta

SEQ ID NO: 16133 - DNA, 36 bp, Artificial Sequence
  synthetic circulating small noncoding RNA (sncRNA) 5' transfer RNA (tRNA) half
aacccacgaccctgagattaagagtctcatgctcta

SEQ ID NO: 16134 - DNA, 21 bp, Artificial Sequence
  synthetic circulating small noncoding RNA (sncRNA) 5' transfer RNA (tRNA) half
actttgaatccagcgatccga

SEQ ID NO: 16135 - DNA, 16 bp, Artificial Sequence
  synthetic circulating small noncoding RNA (sncRNA) 5' transfer RNA (tRNA) half
tcagaagattgagggt

SEQ ID NO: 16136 - DNA, 18 bp, Artificial Sequence
  synthetic circulating small noncoding RNA (sncRNA) 5' transfer RNA (tRNA) half
caagtccctgttcgggcg

SEQ ID NO: 16137 - DNA, 20 bp, Artificial Sequence
  synthetic circulating small noncoding RNA (sncRNA) 5' transfer RNA (tRNA) half
caggccgcggcggtgagagc

SEQ ID NO: 16138 - DNA, 25 bp, Artificial Sequence
  synthetic circulating small noncoding RNA (sncRNA) 5' transfer RNA (tRNA) half
agggattgtgggttcgagtcccacc

SEQ ID NO: 16139 - DNA, 22 bp, Artificial Sequence
  synthetic circulating small noncoding RNA (sncRNA) 5' transfer RNA (tRNA) half
ccgagcggtctaaggcgctgcg

SEQ ID NO: 16140 - DNA, 16 bp, Artificial Sequence
  synthetic circulating small noncoding RNA (sncRNA) 5' transfer RNA (tRNA) half
gtgctctaacccctga

SEQ ID NO: 16141 - DNA, 22 bp, Artificial Sequence
  synthetic circulating small noncoding RNA (sncRNA) 5' transfer RNA (tRNA) half
gccttagaccgctcggccacac

SEQ ID NO: 16142 - DNA, 26 bp, Artificial Sequence
  synthetic circulating small noncoding RNA (sncRNA) 5' transfer RNA (tRNA) half
tccgagttcaaatctcggtgggacct

SEQ ID NO: 16143 - DNA, 20 bp, Artificial Sequence
  synthetic circulating small noncoding RNA (sncRNA) 5' transfer RNA (tRNA) half
caggcgagaattctaccact

SEQ ID NO: 16144 - DNA, 25 bp, Artificial Sequence
  synthetic circulating small noncoding RNA (sncRNA) 5' transfer RNA (tRNA) half
aggctcgaactcacaacctcggcat

SEQ ID NO: 16145 - DNA, 12 bp, Artificial Sequence
  synthetic circulating small noncoding RNA (sncRNA) 5' transfer RNA (tRNA) half
ttcgacgaggat

SEQ ID NO: 16146 - DNA, 10 bp, Artificial Sequence
  synthetic circulating small noncoding RNA (sncRNA) 5' transfer RNA (tRNA) half
gtcccaccga

SEQ ID NO: 16147 - DNA, 13 bp, Artificial Sequence
  synthetic circulating small noncoding RNA (sncRNA) 5' transfer RNA (tRNA) half
cccggtctcccgc

SEQ ID NO: 16148 - DNA, 29 bp, Artificial Sequence
  synthetic circulating small noncoding RNA (sncRNA) 5' transfer RNA (tRNA) half
acctcttgatctgcagtcaaatgctctac

SEQ ID NO: 16149 - DNA, 9 bp, Artificial Sequence
  synthetic circulating small noncoding RNA (sncRNA) 5' transfer RNA (tRNA) half
tcgaaccgg

SEQ ID NO: 16150 - DNA, 14 bp, Artificial Sequence
  synthetic circulating small noncoding RNA (sncRNA) 5' transfer RNA (tRNA) half
agtcgaacccggga

SEQ ID NO: 16151 - DNA, 21 bp, Artificial Sequence
  synthetic circulating small noncoding RNA (sncRNA) 5' transfer RNA (tRNA) half
gttcaatggtagaattctcgc

SEQ ID NO: 16152 - DNA, 20 bp, Artificial Sequence
  synthetic circulating small noncoding RNA (sncRNA) 5' transfer RNA (tRNA) half
gatgctctaccgactgagct

SEQ ID NO: 16153 - DNA, 11 bp, Artificial Sequence
  synthetic circulating small noncoding RNA (sncRNA) 5' transfer RNA (tRNA) half
ccggccagacc

SEQ ID NO: 16154 - DNA, 9 bp, Artificial Sequence
  synthetic circulating small noncoding RNA (sncRNA) 5' transfer RNA (tRNA) half
gagcgccga

SEQ ID NO: 16155 - DNA, 23 bp, Artificial Sequence
  synthetic circulating small noncoding RNA (sncRNA) 5' transfer RNA (tRNA) half
taacgccaaggtcgcgggttcga

SEQ ID NO: 16156 - DNA, 11 bp, Artificial Sequence
  synthetic circulating small noncoding RNA (sncRNA) 5' transfer RNA (tRNA) half
tctaccgactg

SEQ ID NO: 16157 - DNA, 34 bp, Artificial Sequence
  synthetic circulating small noncoding RNA (sncRNA) 5' transfer RNA (tRNA) half
aacccacgcctccaggggagactgcgacctgaac

SEQ ID NO: 16158 - DNA, 14 bp, Artificial Sequence
  synthetic circulating small noncoding RNA (sncRNA) 5' transfer RNA (tRNA) half
gtatgaggccccgg

SEQ ID NO: 16159 - DNA, 14 bp, Artificial Sequence
  synthetic circulating small noncoding RNA (sncRNA) 5' transfer RNA (tRNA) half
aacccacgcctccg

SEQ ID NO: 16160 - DNA, 19 bp, Artificial Sequence
  synthetic circulating small noncoding RNA (sncRNA) 5' transfer RNA (tRNA) half
aacccacgcccccgaagag

SEQ ID NO: 16161 - DNA, 18 bp, Artificial Sequence
  synthetic circulating small noncoding RNA (sncRNA) 5' transfer RNA (tRNA) half
ccccgggtgggctcgaac

SEQ ID NO: 16162 - DNA, 13 bp, Artificial Sequence
  synthetic circulating small noncoding RNA (sncRNA) 5' transfer RNA (tRNA) half
gagtatccccgcc

SEQ ID NO: 16163 - DNA, 19 bp, Artificial Sequence
  synthetic circulating small noncoding RNA (sncRNA) 5' transfer RNA (tRNA) half
gcgctctcaccgccgcggc

SEQ ID NO: 16164 - DNA, 16 bp, Artificial Sequence
  synthetic circulating small noncoding RNA (sncRNA) 5' transfer RNA (tRNA) half
ttcaggtcgcagtctc

SEQ ID NO: 16165 - DNA, 13 bp, Artificial Sequence
  synthetic circulating small noncoding RNA (sncRNA) 5' transfer RNA (tRNA) half
tagagcatgagac

SEQ ID NO: 16166 - DNA, 29 bp, Artificial Sequence
  synthetic circulating small noncoding RNA (sncRNA) 5' transfer RNA (tRNA) half
agcgactctggtgggactcgaacccacaa

SEQ ID NO: 16167 - DNA, 16 bp, Artificial Sequence
  synthetic circulating small noncoding RNA (sncRNA) 5' transfer RNA (tRNA) half
attggccgggaatcga

SEQ ID NO: 16168 - DNA, 15 bp, Artificial Sequence
  synthetic circulating small noncoding RNA (sncRNA) 5' transfer RNA (tRNA) half
aaccagcgacctaag

SEQ ID NO: 16169 - DNA, 20 bp, Artificial Sequence
  synthetic circulating small noncoding RNA (sncRNA) 5' transfer RNA (tRNA) half
acctgcgcggggaaacccca

SEQ ID NO: 16170 - DNA, 22 bp, Artificial Sequence
  synthetic circulating small noncoding RNA (sncRNA) 5' transfer RNA (tRNA) half
tcccacttctgacagaattcct

SEQ ID NO: 16171 - DNA, 21 bp, Artificial Sequence
  synthetic circulating small noncoding RNA (sncRNA) 5' transfer RNA (tRNA) half
ggttccatggtgtaatggtta

SEQ ID NO: 16172 - DNA, 17 bp, Artificial Sequence
  synthetic circulating small noncoding RNA (sncRNA) 5' transfer RNA (tRNA) half
agctggggattgtgggt

SEQ ID NO: 16173 - DNA, 33 bp, Artificial Sequence
  synthetic circulating small noncoding RNA (sncRNA) 5' transfer RNA (tRNA) half
cggatcgctggattcagagtccagagtgctaac

SEQ ID NO: 16174 - DNA, 40 bp, Artificial Sequence
  synthetic circulating small noncoding RNA (sncRNA) 5' transfer RNA (tRNA) half
ttagcactctggactctgaatccagcgatccgagttcaaa

SEQ ID NO: 16175 - DNA, 37 bp, Artificial Sequence
  synthetic circulating small noncoding RNA (sncRNA) 5' transfer RNA (tRNA) half
agcgccgaatcctaaccactagaccaccagggaagag

SEQ ID NO: 16176 - DNA, 24 bp, Artificial Sequence
  synthetic circulating small noncoding RNA (sncRNA) 5' transfer RNA (tRNA) half
gagtctcatgctctaccgactgag

SEQ ID NO: 16177 - DNA, 12 bp, Artificial Sequence
  synthetic circulating small noncoding RNA (sncRNA) 5' transfer RNA (tRNA) half
ttagcactctgg

SEQ ID NO: 16178 - DNA, 28 bp, Artificial Sequence
  synthetic circulating small noncoding RNA (sncRNA) 5' transfer RNA (tRNA) half
gggaggcccgggttcgattcccggccaa

SEQ ID NO: 16179 - DNA, 17 bp, Artificial Sequence
  synthetic circulating small noncoding RNA (sncRNA) 5' transfer RNA (tRNA) half
aatggtagaattctcgc

SEQ ID NO: 16180 - DNA, 8 bp, Artificial Sequence
  synthetic circulating small noncoding RNA (sncRNA) 5' transfer RNA (tRNA) half
cgaacgcg

SEQ ID NO: 16181 - DNA, 18 bp, Artificial Sequence
  synthetic circulating small noncoding RNA (sncRNA) 5' transfer RNA (tRNA) half
aacccgggacctctcgca

SEQ ID NO: 16182 - DNA, 9 bp, Artificial Sequence
  synthetic circulating small noncoding RNA (sncRNA) 5' transfer RNA (tRNA) half
tagccgggc

SEQ ID NO: 16183 - DNA, 32 bp, Artificial Sequence
  synthetic circulating small noncoding RNA (sncRNA) 5' transfer RNA (tRNA) half
cacgaggccccgggttcaatccccggcacctc

SEQ ID NO: 16184 - DNA, 13 bp, Artificial Sequence
  synthetic circulating small noncoding RNA (sncRNA) 5' transfer RNA (tRNA) half
tgttcccgcccgg

SEQ ID NO: 16185 - DNA, 5 bp, Artificial Sequence
  synthetic circulating small noncoding RNA (sncRNA) 5' transfer RNA (tRNA) half
caggc

SEQ ID NO: 16186 - DNA, 22 bp, Artificial Sequence
  synthetic circulating small noncoding RNA (sncRNA) 5' transfer RNA (tRNA) half
gaagcgagaatcatacccctag

SEQ ID NO: 16187 - DNA, 26 bp, Artificial Sequence
  synthetic circulating small noncoding RNA (sncRNA) 5' transfer RNA (tRNA) half
agtcccatgctgtaccgactgagcca

SEQ ID NO: 16188 - DNA, 30 bp, Artificial Sequence
  synthetic circulating small noncoding RNA (sncRNA) 5' transfer RNA (tRNA) half
cgagaatcatacccctagaccaacgagccg

SEQ ID NO: 16189 - DNA, 29 bp, Artificial Sequence
  synthetic circulating small noncoding RNA (sncRNA) 5' transfer RNA (tRNA) half
ctggactctgaatccagcgatccgagttc

SEQ ID NO: 16190 - DNA, 39 bp, Artificial Sequence
  synthetic circulating small noncoding RNA (sncRNA) 5' transfer RNA (tRNA) half
tcggcaggattcgaacctgcgcggggagaccccaatgga

SEQ ID NO: 16191 - DNA, 16 bp, Artificial Sequence
  synthetic circulating small noncoding RNA (sncRNA) 5' transfer RNA (tRNA) half
aatggataaggcattg

SEQ ID NO: 16192 - DNA, 31 bp, Artificial Sequence
  synthetic circulating small noncoding RNA (sncRNA) 5' transfer RNA (tRNA) half
ggggttgtagctcagaggtagagcacatgct

SEQ ID NO: 16193 - DNA, 11 bp, Artificial Sequence
  synthetic circulating small noncoding RNA (sncRNA) 5' transfer RNA (tRNA) half
ggtctcccgcg

SEQ ID NO: 16194 - DNA, 21 bp, Artificial Sequence
  synthetic circulating small noncoding RNA (sncRNA) 5' transfer RNA (tRNA) half
tcggcgctctcaccgccgcgg

SEQ ID NO: 16195 - DNA, 14 bp, Artificial Sequence
  synthetic circulating small noncoding RNA (sncRNA) 5' transfer RNA (tRNA) half
cgagaggtagcggg

SEQ ID NO: 16196 - DNA, 16 bp, Artificial Sequence
  synthetic circulating small noncoding RNA (sncRNA) 5' transfer RNA (tRNA) half
acgaggatgggattcg

SEQ ID NO: 16197 - DNA, 15 bp, Artificial Sequence
  synthetic circulating small noncoding RNA (sncRNA) 5' transfer RNA (tRNA) half
ttgaaccaccaatgc

SEQ ID NO: 16198 - DNA, 30 bp, Artificial Sequence
  synthetic circulating small noncoding RNA (sncRNA) 5' transfer RNA (tRNA) half
tccatggtgtaatggttagcactctggact

SEQ ID NO: 16199 - DNA, 28 bp, Artificial Sequence
  synthetic circulating small noncoding RNA (sncRNA) 5' transfer RNA (tRNA) half
tacggggatcgaacccgcgaccttggcg

SEQ ID NO: 16200 - DNA, 33 bp, Artificial Sequence
  synthetic circulating small noncoding RNA (sncRNA) 5' transfer RNA (tRNA) half
aggttgctgcggccacaacgcagagtactaacc

SEQ ID NO: 16201 - DNA, 22 bp, Artificial Sequence
  synthetic circulating small noncoding RNA (sncRNA) 5' transfer RNA (tRNA) half
aggttcgaactcaggaccttca

SEQ ID NO: 16202 - DNA, 15 bp, Artificial Sequence
  synthetic circulating small noncoding RNA (sncRNA) 5' transfer RNA (tRNA) half
ttcggcgctctcacc

SEQ ID NO: 16203 - DNA, 11 bp, Artificial Sequence
  synthetic circulating small noncoding RNA (sncRNA) 5' transfer RNA (tRNA) half
ggttcgagccc

SEQ ID NO: 16204 - DNA, 27 bp, Artificial Sequence
  synthetic circulating small noncoding RNA (sncRNA) 5' transfer RNA (tRNA) half
ctgggttatgggcccagcacgcttccg

SEQ ID NO: 16205 - DNA, 16 bp, Artificial Sequence
  synthetic circulating small noncoding RNA (sncRNA) 5' transfer RNA (tRNA) half
ccactcggccacctcg

SEQ ID NO: 16206 - DNA, 22 bp, Artificial Sequence
  synthetic circulating small noncoding RNA (sncRNA) 5' transfer RNA (tRNA) half
caccaacctttcggttaacagc

SEQ ID NO: 16207 - DNA, 38 bp, Artificial Sequence
  synthetic circulating small noncoding RNA (sncRNA) 5' transfer RNA (tRNA) half
agccgcccgaacagggacttgaaccctggaccctcaga

SEQ ID NO: 16208 - DNA, 12 bp, Artificial Sequence
  synthetic circulating small noncoding RNA (sncRNA) 5' transfer RNA (tRNA) half
ggcggaaacaag

SEQ ID NO: 16209 - DNA, 34 bp, Artificial Sequence
  synthetic circulating small noncoding RNA (sncRNA) 5' transfer RNA (tRNA) half
tttccctgaccgggaatcgaacccgggccgcggc

SEQ ID NO: 16210 - DNA, 18 bp, Artificial Sequence
  synthetic circulating small noncoding RNA (sncRNA) 5' transfer RNA (tRNA) half
ttcagagtccagagtgct

SEQ ID NO: 16211 - DNA, 33 bp, Artificial Sequence
  synthetic circulating small noncoding RNA (sncRNA) 5' transfer RNA (tRNA) half
gtccagagtgctaaccattacaccatggaacct

SEQ ID NO: 16212 - DNA, 20 bp, Artificial Sequence
  synthetic circulating small noncoding RNA (sncRNA) 5' transfer RNA (tRNA) half
aactggagatgccggggatc

SEQ ID NO: 16213 - DNA, 15 bp, Artificial Sequence
  synthetic circulating small noncoding RNA (sncRNA) 5' transfer RNA (tRNA) half
tggagatgccgggaa

SEQ ID NO: 16214 - DNA, 27 bp, Artificial Sequence
  synthetic circulating small noncoding RNA (sncRNA) 5' transfer RNA (tRNA) half
cggggaatcgaaccccggtctcccgcg

SEQ ID NO: 16215 - DNA, 9 bp, Artificial Sequence
  synthetic circulating small noncoding RNA (sncRNA) 5' transfer RNA (tRNA) half
cggccagat

SEQ ID NO: 16216 - DNA, 22 bp, Artificial Sequence
  synthetic circulating small noncoding RNA (sncRNA) 5' transfer RNA (tRNA) half
agaactgtgcattggccgggaa

SEQ ID NO: 16217 - DNA, 17 bp, Artificial Sequence
  synthetic circulating small noncoding RNA (sncRNA) 5' transfer RNA (tRNA) half
ttccggctcgaaggaaa

SEQ ID NO: 16218 - DNA, 30 bp, Artificial Sequence
  synthetic circulating small noncoding RNA (sncRNA) 5' transfer RNA (tRNA) half
gatgctctaccgactgagctatccgggcgc

SEQ ID NO: 16219 - DNA, 19 bp, Artificial Sequence
  synthetic circulating small noncoding RNA (sncRNA) 5' transfer RNA (tRNA) half
tgagtatccccgcctgtca

SEQ ID NO: 16220 - DNA, 20 bp, Artificial Sequence
  synthetic circulating small noncoding RNA (sncRNA) 5' transfer RNA (tRNA) half
agaccgctcggccacgctac

SEQ ID NO: 16221 - DNA, 13 bp, Artificial Sequence
  synthetic circulating small noncoding RNA (sncRNA) 5' transfer RNA (tRNA) half
ttcgaaccccgtc

SEQ ID NO: 16222 - DNA, 15 bp, Artificial Sequence
  synthetic circulating small noncoding RNA (sncRNA) 5' transfer RNA (tRNA) half
gaacccacgcctccg

SEQ ID NO: 16223 - DNA, 22 bp, Artificial Sequence
  synthetic circulating small noncoding RNA (sncRNA) 5' transfer RNA (tRNA) half
ttcaatggtagaattctcgcct

SEQ ID NO: 16224 - DNA, 24 bp, Artificial Sequence
  synthetic circulating small noncoding RNA (sncRNA) 5' transfer RNA (tRNA) half
aatccagcgccttagaccactcgg

SEQ ID NO: 16225 - DNA, 23 bp, Artificial Sequence
  synthetic circulating small noncoding RNA (sncRNA) 5' transfer RNA (tRNA) half
gttcgaaccccgtccgtgcctgc

SEQ ID NO: 16226 - DNA, 27 bp, Artificial Sequence
  synthetic circulating small noncoding RNA (sncRNA) 5' transfer RNA (tRNA) half
attaaaagtctgatgctctaccaactg

SEQ ID NO: 16227 - DNA, 36 bp, Artificial Sequence
  synthetic circulating small noncoding RNA (sncRNA) 5' transfer RNA (tRNA) half
tctgagggtccagggttcaagtccctgttcaggcgg

SEQ ID NO: 16228 - DNA, 12 bp, Artificial Sequence
  synthetic circulating small noncoding RNA (sncRNA) 5' transfer RNA (tRNA) half
ctcagcggtaga

SEQ ID NO: 16229 - DNA, 31 bp, Artificial Sequence
  synthetic circulating small noncoding RNA (sncRNA) 5' transfer RNA (tRNA) half
caggagatcctgggttcgaatcccagcgggg

SEQ ID NO: 16230 - DNA, 33 bp, Artificial Sequence
  synthetic circulating small noncoding RNA (sncRNA) 5' transfer RNA (tRNA) half
ttaggtcgctggttcgattccggctcgaaggac

SEQ ID NO: 16231 - DNA, 28 bp, Artificial Sequence
  synthetic circulating small noncoding RNA (sncRNA) 5' transfer RNA (tRNA) half
attatcagcaccatgctctaaccaactg

SEQ ID NO: 16232 - DNA, 23 bp, Artificial Sequence
  synthetic circulating small noncoding RNA (sncRNA) 5' transfer RNA (tRNA) half
gaacccgggacctctcgcaccca

SEQ ID NO: 16233 - DNA, 9 bp, Artificial Sequence
  synthetic circulating small noncoding RNA (sncRNA) 5' transfer RNA (tRNA) half
acgagccct

SEQ ID NO: 16234 - DNA, 9 bp, Artificial Sequence
  synthetic circulating small noncoding RNA (sncRNA) 5' transfer RNA (tRNA) half
gtgccgccc

SEQ ID NO: 16235 - DNA, 22 bp, Artificial Sequence
  synthetic circulating small noncoding RNA (sncRNA) 5' transfer RNA (tRNA) half
ttccgagccagccaggagtcga

SEQ ID NO: 16236 - DNA, 16 bp, Artificial Sequence
  synthetic circulating small noncoding RNA (sncRNA) 5' transfer RNA (tRNA) half
cgtcggggaattgaac

SEQ ID NO: 16237 - DNA, 26 bp, Artificial Sequence
  synthetic circulating small noncoding RNA (sncRNA) 5' transfer RNA (tRNA) half
ccttccaagcagttgacccgggttcg

SEQ ID NO: 16238 - DNA, 26 bp, Artificial Sequence
  synthetic circulating small noncoding RNA (sncRNA) 5' transfer RNA (tRNA) half
gatgccggggatcgaacccggggcct

SEQ ID NO: 16239 - DNA, 10 bp, Artificial Sequence
  synthetic circulating small noncoding RNA (sncRNA) 5' transfer RNA (tRNA) half
cgttcggctg

SEQ ID NO: 16240 - DNA, 12 bp, Artificial Sequence
  synthetic circulating small noncoding RNA (sncRNA) 5' transfer RNA (tRNA) half
cggtgaaagcgc

SEQ ID NO: 16241 - DNA, 7 bp, Artificial Sequence
  synthetic circulating small noncoding RNA (sncRNA) 5' transfer RNA (tRNA) half
ctcggcc

SEQ ID NO: 16242 - DNA, 15 bp, Artificial Sequence
  synthetic circulating small noncoding RNA (sncRNA) 5' transfer RNA (tRNA) half
cgaaccccggtctcc

SEQ ID NO: 16243 - DNA, 25 bp, Artificial Sequence
  synthetic circulating small noncoding RNA (sncRNA) 5' transfer RNA (tRNA) half
acgaggccccgggttcaatccccgg

SEQ ID NO: 16244 - DNA, 19 bp, Artificial Sequence
  synthetic circulating small noncoding RNA (sncRNA) 5' transfer RNA (tRNA) half
tcgagccaggtaggagtcg

SEQ ID NO: 16245 - DNA, 14 bp, Artificial Sequence
  synthetic circulating small noncoding RNA (sncRNA) 5' transfer RNA (tRNA) half
tccgactccgccgg

SEQ ID NO: 16246 - DNA, 26 bp, Artificial Sequence
  synthetic circulating small noncoding RNA (sncRNA) 5' transfer RNA (tRNA) half
cccagcacgcttccgctgcgccactc

SEQ ID NO: 16247 - DNA, 36 bp, Artificial Sequence
  synthetic circulating small noncoding RNA (sncRNA) 5' transfer RNA (tRNA) half
tagtgtagtggttatcacgttcgcctaacacgcgaa

SEQ ID NO: 16248 - DNA, 31 bp, Artificial Sequence
  synthetic circulating small noncoding RNA (sncRNA) 5' transfer RNA (tRNA) half
gccaggtaggagtcgaacctacaatcttctg

SEQ ID NO: 16249 - DNA, 37 bp, Artificial Sequence
  synthetic circulating small noncoding RNA (sncRNA) 5' transfer RNA (tRNA) half
agtctcatgctctaccgactgagctagccgggcgact

SEQ ID NO: 16250 - DNA, 18 bp, Artificial Sequence
  synthetic circulating small noncoding RNA (sncRNA) 5' transfer RNA (tRNA) half
ccggggacctcttgatct

SEQ ID NO: 16251 - DNA, 33 bp, Artificial Sequence
  synthetic circulating small noncoding RNA (sncRNA) 5' transfer RNA (tRNA) half
ggccgcctgggtgaaaaccaggaatcctaaccg

SEQ ID NO: 16252 - DNA, 32 bp, Artificial Sequence
  synthetic circulating small noncoding RNA (sncRNA) 5' transfer RNA (tRNA) half
ggttagcactctggactctgaatccagcgatc

SEQ ID NO: 16253 - DNA, 36 bp, Artificial Sequence
  synthetic circulating small noncoding RNA (sncRNA) 5' transfer RNA (tRNA) half
ttatcacgttcgcctcacacgcgaaaggtccccggt

SEQ ID NO: 16254 - DNA, 20 bp, Artificial Sequence
  synthetic circulating small noncoding RNA (sncRNA) 5' transfer RNA (tRNA) half
aggcccgggttcgattcccg

SEQ ID NO: 16255 - DNA, 20 bp, Artificial Sequence
  synthetic circulating small noncoding RNA (sncRNA) 5' transfer RNA (tRNA) half
ccactgaaccaccaatgcga

SEQ ID NO: 16256 - DNA, 16 bp, Artificial Sequence
  synthetic circulating small noncoding RNA (sncRNA) 5' transfer RNA (tRNA) half
cgtgataaccgctaca

SEQ ID NO: 16257 - DNA, 36 bp, Artificial Sequence
  synthetic circulating small noncoding RNA (sncRNA) 5' transfer RNA (tRNA) half
gtggcaggcgagaattctaccactgaaccaccaatg

SEQ ID NO: 16258 - DNA, 14 bp, Artificial Sequence
  synthetic circulating small noncoding RNA (sncRNA) 5' transfer RNA (tRNA) half
ttatcacgctcgcc

SEQ ID NO: 16259 - DNA, 25 bp, Artificial Sequence
  synthetic circulating small noncoding RNA (sncRNA) 5' transfer RNA (tRNA) half
cccgaacagggacttgaaccctgga

SEQ ID NO: 16260 - DNA, 6 bp, Artificial Sequence
  synthetic circulating small noncoding RNA (sncRNA) 5' transfer RNA (tRNA) half
gcgggt

SEQ ID NO: 16261 - DNA, 12 bp, Artificial Sequence
  synthetic circulating small noncoding RNA (sncRNA) 5' transfer RNA (tRNA) half
tcgattccccga

SEQ ID NO: 16262 - DNA, 19 bp, Artificial Sequence
  synthetic circulating small noncoding RNA (sncRNA) 5' transfer RNA (tRNA) half
tccatagtgtagcggttat

SEQ ID NO: 16263 - DNA, 24 bp, Artificial Sequence
  synthetic circulating small noncoding RNA (sncRNA) 5' transfer RNA (tRNA) half
ccaccaacctttcggttaacagcc

SEQ ID NO: 16264 - DNA, 12 bp, Artificial Sequence
  synthetic circulating small noncoding RNA (sncRNA) 5' transfer RNA (tRNA) half
tcagtcggtaga

SEQ ID NO: 16265 - DNA, 21 bp, Artificial Sequence
  synthetic circulating small noncoding RNA (sncRNA) 5' transfer RNA (tRNA) half
aagattgcaggttcgagtcct

SEQ ID NO: 16266 - DNA, 20 bp, Artificial Sequence
  synthetic circulating small noncoding RNA (sncRNA) 5' transfer RNA (tRNA) half
aaccgggcggaaacaatgac

SEQ ID NO: 16267 - DNA, 17 bp, Artificial Sequence
  synthetic circulating small noncoding RNA (sncRNA) 5' transfer RNA (tRNA) half
attctcgcctgccacgc

SEQ ID NO: 16268 - DNA, 38 bp, Artificial Sequence
  synthetic circulating small noncoding RNA (sncRNA) 5' transfer RNA (tRNA) half
aattgcgtaagacttaaaaccttgttcccagaggttca

SEQ ID NO: 16269 - DNA, 16 bp, Artificial Sequence
  synthetic circulating small noncoding RNA (sncRNA) 5' transfer RNA (tRNA) half
tctcggtggaacctac

SEQ ID NO: 16270 - DNA, 14 bp, Artificial Sequence
  synthetic circulating small noncoding RNA (sncRNA) 5' transfer RNA (tRNA) half
ctcggccacctcgt

SEQ ID NO: 16271 - DNA, 36 bp, Artificial Sequence
  synthetic circulating small noncoding RNA (sncRNA) 5' transfer RNA (tRNA) half
ctcggatcgctggattcagagtccagagtgctagcc

SEQ ID NO: 16272 - DNA, 21 bp, Artificial Sequence
  synthetic circulating small noncoding RNA (sncRNA) 5' transfer RNA (tRNA) half
ctcacgaccttcagattatga

SEQ ID NO: 16273 - DNA, 19 bp, Artificial Sequence
  synthetic circulating small noncoding RNA (sncRNA) 5' transfer RNA (tRNA) half
atgaccccgacgtgattcg

SEQ ID NO: 16274 - DNA, 35 bp, Artificial Sequence
  synthetic circulating small noncoding RNA (sncRNA) 5' transfer RNA (tRNA) half
caccgctgggattcgaacccaggatctcctgttta

SEQ ID NO: 16275 - DNA, 35 bp, Artificial Sequence
  synthetic circulating small noncoding RNA (sncRNA) 5' transfer RNA (tRNA) half
cgaacccacgaccctgggattaagagtcccatgct

SEQ ID NO: 16276 - DNA, 18 bp, Artificial Sequence
  synthetic circulating small noncoding RNA (sncRNA) 5' transfer RNA (tRNA) half
cgtgtgaggcgaacgtga

SEQ ID NO: 16277 - DNA, 23 bp, Artificial Sequence
  synthetic circulating small noncoding RNA (sncRNA) 5' transfer RNA (tRNA) half
agtagtcgtggccgagtggttaa

SEQ ID NO: 16278 - DNA, 22 bp, Artificial Sequence
  synthetic circulating small noncoding RNA (sncRNA) 5' transfer RNA (tRNA) half
gcccgtacggggatcgaacccg

SEQ ID NO: 16279 - DNA, 36 bp, Artificial Sequence
  synthetic circulating small noncoding RNA (sncRNA) 5' transfer RNA (tRNA) half
cccgggtgggactcgaacccacaatccctggcttag

SEQ ID NO: 16280 - DNA, 11 bp, Artificial Sequence
  synthetic circulating small noncoding RNA (sncRNA) 5' transfer RNA (tRNA) half
gatgctctacc

SEQ ID NO: 16281 - DNA, 31 bp, Artificial Sequence
  synthetic circulating small noncoding RNA (sncRNA) 5' transfer RNA (tRNA) half
gccgcggcggtgagagcgccgaatcctaacc

SEQ ID NO: 16282 - DNA, 22 bp, Artificial Sequence
  synthetic circulating small noncoding RNA (sncRNA) 5' transfer RNA (tRNA) half
tccctggtggtctagtggctag

SEQ ID NO: 16283 - DNA, 13 bp, Artificial Sequence
  synthetic circulating small noncoding RNA (sncRNA) 5' transfer RNA (tRNA) half
gccttatccgtta

SEQ ID NO: 16284 - DNA, 14 bp, Artificial Sequence
  synthetic circulating small noncoding RNA (sncRNA) 5' transfer RNA (tRNA) half
aatcctgccgacta

SEQ ID NO: 16285 - DNA, 17 bp, Artificial Sequence
  synthetic circulating small noncoding RNA (sncRNA) 5' transfer RNA (tRNA) half
attcttgcgacccgggt

SEQ ID NO: 16286 - DNA, 14 bp, Artificial Sequence
  synthetic circulating small noncoding RNA (sncRNA) 5' transfer RNA (tRNA) half
tggccgggaatcaa

SEQ ID NO: 16287 - DNA, 18 bp, Artificial Sequence
  synthetic circulating small noncoding RNA (sncRNA) 5' transfer RNA (tRNA) half
atgcgttggccgggaatc

SEQ ID NO: 16288 - DNA, 34 bp, Artificial Sequence
  synthetic circulating small noncoding RNA (sncRNA) 5' transfer RNA (tRNA) half
cagggattgtgggttcgagtcccacctggggtaa

SEQ ID NO: 16289 - DNA, 24 bp, Artificial Sequence
  synthetic circulating small noncoding RNA (sncRNA) 5' transfer RNA (tRNA) half
gaacccacgcgtgcaaagcacaat

SEQ ID NO: 16290 - DNA, 38 bp, Artificial Sequence
  synthetic circulating small noncoding RNA (sncRNA) 5' transfer RNA (tRNA) half
cttctccccgtcggggaatcgaaccccggtctcccgcg

SEQ ID NO: 16291 - DNA, 33 bp, Artificial Sequence
  synthetic circulating small noncoding RNA (sncRNA) 5' transfer RNA (tRNA) half
accgcccaacgtggggctcgaacccacgaccct

SEQ ID NO: 16292 - DNA, 35 bp, Artificial Sequence
  synthetic circulating small noncoding RNA (sncRNA) 5' transfer RNA (tRNA) half
caggagatcctgggttcgactcccagtggggcctt

SEQ ID NO: 16293 - DNA, 28 bp, Artificial Sequence
  synthetic circulating small noncoding RNA (sncRNA) 5' transfer RNA (tRNA) half
acgccaaggtcgcgggttcgatccccgt

SEQ ID NO: 16294 - DNA, 32 bp, Artificial Sequence
  synthetic circulating small noncoding RNA (sncRNA) 5' transfer RNA (tRNA) half
tcgagccagccaggagtcgaacctagaatctt

SEQ ID NO: 16295 - DNA, 13 bp, Artificial Sequence
  synthetic circulating small noncoding RNA (sncRNA) 5' transfer RNA (tRNA) half
aaagcgagaatca

SEQ ID NO: 16296 - DNA, 11 bp, Artificial Sequence
  synthetic circulating small noncoding RNA (sncRNA) 5' transfer RNA (tRNA) half
gacgcgctacc

SEQ ID NO: 16297 - DNA, 22 bp, Artificial Sequence
  synthetic circulating small noncoding RNA (sncRNA) 5' transfer RNA (tRNA) half
ccgactgagctagccgggcctt

SEQ ID NO: 16298 - DNA, 6 bp, Artificial Sequence
  synthetic circulating small noncoding RNA (sncRNA) 5' transfer RNA (tRNA) half
ggccat

SEQ ID NO: 16299 - DNA, 13 bp, Artificial Sequence
  synthetic circulating small noncoding RNA (sncRNA) 5' transfer RNA (tRNA) half
gttagcactctgg

SEQ ID NO: 16300 - DNA, 22 bp, Artificial Sequence
  synthetic circulating small noncoding RNA (sncRNA) 5' transfer RNA (tRNA) half
atagctcagtcggtagagcatc

SEQ ID NO: 16301 - DNA, 28 bp, Artificial Sequence
  synthetic circulating small noncoding RNA (sncRNA) 5' transfer RNA (tRNA) half
tgggattaagagtcccatgctctaccga

SEQ ID NO: 16302 - DNA, 18 bp, Artificial Sequence
  synthetic circulating small noncoding RNA (sncRNA) 5' transfer RNA (tRNA) half
ggctcgaacccacgaccc

SEQ ID NO: 16303 - DNA, 17 bp, Artificial Sequence
  synthetic circulating small noncoding RNA (sncRNA) 5' transfer RNA (tRNA) half
tcctgccgactacgtct

SEQ ID NO: 16304 - DNA, 18 bp, Artificial Sequence
  synthetic circulating small noncoding RNA (sncRNA) 5' transfer RNA (tRNA) half
aacccgggtcaactgctt

SEQ ID NO: 16305 - DNA, 19 bp, Artificial Sequence
  synthetic circulating small noncoding RNA (sncRNA) 5' transfer RNA (tRNA) half
gcgtggccgagcggtctaa

SEQ ID NO: 16306 - DNA, 22 bp, Artificial Sequence
  synthetic circulating small noncoding RNA (sncRNA) 5' transfer RNA (tRNA) half
agctggctcgttggtctagggg

SEQ ID NO: 16307 - DNA, 11 bp, Artificial Sequence
  synthetic circulating small noncoding RNA (sncRNA) 5' transfer RNA (tRNA) half
cgggttcgatt

SEQ ID NO: 16308 - DNA, 36 bp, Artificial Sequence
  synthetic circulating small noncoding RNA (sncRNA) 5' transfer RNA (tRNA) half
acaggcggggatactaaccactatactaacgaggag

SEQ ID NO: 16309 - DNA, 24 bp, Artificial Sequence
  synthetic circulating small noncoding RNA (sncRNA) 5' transfer RNA (tRNA) half
tggactttgaatccagcgatccga

SEQ ID NO: 16310 - DNA, 37 bp, Artificial Sequence
  synthetic circulating small noncoding RNA (sncRNA) 5' transfer RNA (tRNA) half
aaaccaggggtcgcgagttcaaatctcgctggggcct

SEQ ID NO: 16311 - DNA, 36 bp, Artificial Sequence
  synthetic circulating small noncoding RNA (sncRNA) 5' transfer RNA (tRNA) half
cgtgtgaggcgaacgtgataaccactacactacgga

SEQ ID NO: 16312 - DNA, 34 bp, Artificial Sequence
  synthetic circulating small noncoding RNA (sncRNA) 5' transfer RNA (tRNA) half
cccatgctctaccgactgagctagccgggcagct

SEQ ID NO: 16313 - DNA, 30 bp, Artificial Sequence
  synthetic circulating small noncoding RNA (sncRNA) 5' transfer RNA (tRNA) half
caaacctgtagctgtttagcgacagagtgg

SEQ ID NO: 16314 - DNA, 15 bp, Artificial Sequence
  synthetic circulating small noncoding RNA (sncRNA) 5' transfer RNA (tRNA) half
gattccggctcgaag

SEQ ID NO: 16315 - DNA, 19 bp, Artificial Sequence
  synthetic circulating small noncoding RNA (sncRNA) 5' transfer RNA (tRNA) half
ttcaggtcgcagtctcccc

SEQ ID NO: 16316 - DNA, 8 bp, Artificial Sequence
  synthetic circulating small noncoding RNA (sncRNA) 5' transfer RNA (tRNA) half
atcgaacc

SEQ ID NO: 16317 - DNA, 14 bp, Artificial Sequence
  synthetic circulating small noncoding RNA (sncRNA) 5' transfer RNA (tRNA) half
gcctccttagcgca

SEQ ID NO: 16318 - DNA, 22 bp, Artificial Sequence
  synthetic circulating small noncoding RNA (sncRNA) 5' transfer RNA (tRNA) half
tctcccaactgagctatttcgg

SEQ ID NO: 16319 - DNA, 12 bp, Artificial Sequence
  synthetic circulating small noncoding RNA (sncRNA) 5' transfer RNA (tRNA) half
tgcgctatccat

SEQ ID NO: 16320 - DNA, 26 bp, Artificial Sequence
  synthetic circulating small noncoding RNA (sncRNA) 5' transfer RNA (tRNA) half
agctgaccccgacgtgatttgaacac

SEQ ID NO: 16321 - DNA, 20 bp, Artificial Sequence
  synthetic circulating small noncoding RNA (sncRNA) 5' transfer RNA (tRNA) half
tccgccgggactcgaacccg

SEQ ID NO: 16322 - DNA, 27 bp, Artificial Sequence
  synthetic circulating small noncoding RNA (sncRNA) 5' transfer RNA (tRNA) half
acccgggcctcccgcgtggcaggcgag

SEQ ID NO: 16323 - DNA, 22 bp, Artificial Sequence
  synthetic circulating small noncoding RNA (sncRNA) 5' transfer RNA (tRNA) half
ttggtctaggggtatgattctc

SEQ ID NO: 16324 - DNA, 11 bp, Artificial Sequence
  synthetic circulating small noncoding RNA (sncRNA) 5' transfer RNA (tRNA) half
tcgagtcccgg

SEQ ID NO: 16325 - DNA, 28 bp, Artificial Sequence
  synthetic circulating small noncoding RNA (sncRNA) 5' transfer RNA (tRNA) half
ggtagtgtggccgagcggtctaaggcgc

SEQ ID NO: 16326 - DNA, 18 bp, Artificial Sequence
  synthetic circulating small noncoding RNA (sncRNA) 5' transfer RNA (tRNA) half
caaatctcggtggaacct

SEQ ID NO: 16327 - DNA, 27 bp, Artificial Sequence
  synthetic circulating small noncoding RNA (sncRNA) 5' transfer RNA (tRNA) half
aatggttagcactctggactctgaatc

SEQ ID NO: 16328 - DNA, 22 bp, Artificial Sequence
  synthetic circulating small noncoding RNA (sncRNA) 5' transfer RNA (tRNA) half
agtgtagcggttatcacgtctg

SEQ ID NO: 16329 - DNA, 23 bp, Artificial Sequence
  synthetic circulating small noncoding RNA (sncRNA) 5' transfer RNA (tRNA) half
accgggaatcgaacccgggacgc

SEQ ID NO: 16330 - DNA, 30 bp, Artificial Sequence
  synthetic circulating small noncoding RNA (sncRNA) 5' transfer RNA (tRNA) half
gaaggttgcgtgttcaaatcacgtcggggt

SEQ ID NO: 16331 - DNA, 36 bp, Artificial Sequence
  synthetic circulating small noncoding RNA (sncRNA) 5' transfer RNA (tRNA) half
cccggatgatcctcagtggtctggggtgcaggcttc

SEQ ID NO: 16332 - DNA, 34 bp, Artificial Sequence
  synthetic circulating small noncoding RNA (sncRNA) 5' transfer RNA (tRNA) half
caggggtcgcgagttcaaatctcgctggggcctt

SEQ ID NO: 16333 - DNA, 26 bp, Artificial Sequence
  synthetic circulating small noncoding RNA (sncRNA) 5' transfer RNA (tRNA) half
ggcttccctgaccgggaatcgaaccc

SEQ ID NO: 16334 - DNA, 15 bp, Artificial Sequence
  synthetic circulating small noncoding RNA (sncRNA) 5' transfer RNA (tRNA) half
aggtccccggttcga

SEQ ID NO: 16335 - DNA, 31 bp, Artificial Sequence
  synthetic circulating small noncoding RNA (sncRNA) 5' transfer RNA (tRNA) half
tggcagcggtgggattcgaacccacgccccc

SEQ ID NO: 16336 - DNA, 12 bp, Artificial Sequence
  synthetic circulating small noncoding RNA (sncRNA) 5' transfer RNA (tRNA) half
ctgccgaaaccc

SEQ ID NO: 16337 - DNA, 16 bp, Artificial Sequence
  synthetic circulating small noncoding RNA (sncRNA) 5' transfer RNA (tRNA) half
ccggatgatcctcagt

SEQ ID NO: 16338 - DNA, 25 bp, Artificial Sequence
  synthetic circulating small noncoding RNA (sncRNA) 5' transfer RNA (tRNA) half
attcctggttttcacccaggcggcc

SEQ ID NO: 16339 - DNA, 26 bp, Artificial Sequence
  synthetic circulating small noncoding RNA (sncRNA) 5' transfer RNA (tRNA) half
ttggtggttcagtggtagaattctcg

SEQ ID NO: 16340 - DNA, 9 bp, Artificial Sequence
  synthetic circulating small noncoding RNA (sncRNA) 5' transfer RNA (tRNA) half
cgggcggaa

SEQ ID NO: 16341 - DNA, 28 bp, Artificial Sequence
  synthetic circulating small noncoding RNA (sncRNA) 5' transfer RNA (tRNA) half
accaccaacctttcggttaacagccgaa

SEQ ID NO: 16342 - DNA, 43 bp, Artificial Sequence
  synthetic circulating small noncoding RNA (sncRNA) 5' transfer RNA (tRNA) half
acccgggccgcggcggtgagagcgccgaatcctaaccactaga

SEQ ID NO: 16343 - DNA, 30 bp, Artificial Sequence
  synthetic circulating small noncoding RNA (sncRNA) 5' transfer RNA (tRNA) half
tccagggttcaagtccctgttcgggcgctg

SEQ ID NO: 16344 - DNA, 37 bp, Artificial Sequence
  synthetic circulating small noncoding RNA (sncRNA) 5' transfer RNA (tRNA) half
catgggtggttcagtggtagaattctcgcctgccacg

SEQ ID NO: 16345 - DNA, 19 bp, Artificial Sequence
  synthetic circulating small noncoding RNA (sncRNA) 5' transfer RNA (tRNA) half
ccgacgaggatgggattcg

SEQ ID NO: 16346 - DNA, 34 bp, Artificial Sequence
  synthetic circulating small noncoding RNA (sncRNA) 5' transfer RNA (tRNA) half
cagggattgtgggttcgagtcccacctggggtgg

SEQ ID NO: 16347 - DNA, 16 bp, Artificial Sequence
  synthetic circulating small noncoding RNA (sncRNA) 5' transfer RNA (tRNA) half
gcaagaattctaccac

SEQ ID NO: 16348 - DNA, 14 bp, Artificial Sequence
  synthetic circulating small noncoding RNA (sncRNA) 5' transfer RNA (tRNA) half
aaaccaggaatcct

SEQ ID NO: 16349 - DNA, 23 bp, Artificial Sequence
  synthetic circulating small noncoding RNA (sncRNA) 5' transfer RNA (tRNA) half
aacccagaggtcgatggatcgaa

SEQ ID NO: 16350 - DNA, 32 bp, Artificial Sequence
  synthetic circulating small noncoding RNA (sncRNA) 5' transfer RNA (tRNA) half
tagcactctggactttgaatccagcgatccga

SEQ ID NO: 16351 - DNA, 22 bp, Artificial Sequence
  synthetic circulating small noncoding RNA (sncRNA) 5' transfer RNA (tRNA) half
tcacacgcgaaaggtccccggt

SEQ ID NO: 16352 - DNA, 18 bp, Artificial Sequence
  synthetic circulating small noncoding RNA (sncRNA) 5' transfer RNA (tRNA) half
gaccccgacgtgacttga

SEQ ID NO: 16353 - DNA, 24 bp, Artificial Sequence
  synthetic circulating small noncoding RNA (sncRNA) 5' transfer RNA (tRNA) half
gtcccaccgagatttgaactcgga

SEQ ID NO: 16354 - DNA, 34 bp, Artificial Sequence
  synthetic circulating small noncoding RNA (sncRNA) 5' transfer RNA (tRNA) half
gaaaaccaggaatcctaaccgctagaccatgtgg

SEQ ID NO: 16355 - DNA, 33 bp, Artificial Sequence
  synthetic circulating small noncoding RNA (sncRNA) 5' transfer RNA (tRNA) half
ggcggcccgggttcgactcccggtatgggaaca

SEQ ID NO: 16356 - DNA, 21 bp, Artificial Sequence
  synthetic circulating small noncoding RNA (sncRNA) 5' transfer RNA (tRNA) half
taaccgctacactacaaaaac

SEQ ID NO: 16357 - DNA, 22 bp, Artificial Sequence
  synthetic circulating small noncoding RNA (sncRNA) 5' transfer RNA (tRNA) half
tatgattctcgcttcgggtgcg

SEQ ID NO: 16358 - DNA, 34 bp, Artificial Sequence
  synthetic circulating small noncoding RNA (sncRNA) 5' transfer RNA (tRNA) half
gggcccagcacgcttccgctgcgccactctgctg

SEQ ID NO: 16359 - DNA, 21 bp, Artificial Sequence
  synthetic circulating small noncoding RNA (sncRNA) 5' transfer RNA (tRNA) half
ggactcgaacccacaatccct

SEQ ID NO: 16360 - DNA, 12 bp, Artificial Sequence
  synthetic circulating small noncoding RNA (sncRNA) 5' transfer RNA (tRNA) half
cccaggcggccc

SEQ ID NO: 16361 - DNA, 22 bp, Artificial Sequence
  synthetic circulating small noncoding RNA (sncRNA) 5' transfer RNA (tRNA) half
ggctgttaaccgaaaggttggt

SEQ ID NO: 16362 - DNA, 21 bp, Artificial Sequence
  synthetic circulating small noncoding RNA (sncRNA) 5' transfer RNA (tRNA) half
gctggtgtagtggtatcatgc

SEQ ID NO: 16363 - DNA, 24 bp, Artificial Sequence
  synthetic circulating small noncoding RNA (sncRNA) 5' transfer RNA (tRNA) half
aaaagacctgtacattccgagcca

SEQ ID NO: 16364 - DNA, 33 bp, Artificial Sequence
  synthetic circulating small noncoding RNA (sncRNA) 5' transfer RNA (tRNA) half
tggcagcggtgggattcgaacccacgccatcga

SEQ ID NO: 16365 - DNA, 38 bp, Artificial Sequence
  synthetic circulating small noncoding RNA (sncRNA) 5' transfer RNA (tRNA) half
gctgaccccgacgtgatttgaacacgcaaccttctgat

SEQ ID NO: 16366 - DNA, 20 bp, Artificial Sequence
  synthetic circulating small noncoding RNA (sncRNA) 5' transfer RNA (tRNA) half
gaatcctaaccgctagacca

SEQ ID NO: 16367 - DNA, 21 bp, Artificial Sequence
  synthetic circulating small noncoding RNA (sncRNA) 5' transfer RNA (tRNA) half
gtttctgtagtgtagtggtta

SEQ ID NO: 16368 - DNA, 21 bp, Artificial Sequence
  synthetic circulating small noncoding RNA (sncRNA) 5' transfer RNA (tRNA) half
aaaaagatcgcacacgtcgag

SEQ ID NO: 16369 - DNA, 34 bp, Artificial Sequence
  synthetic circulating small noncoding RNA (sncRNA) 5' transfer RNA (tRNA) half
tcacccaggcggcccgggttcgactcccggtgtg

SEQ ID NO: 16370 - DNA, 45 bp, Artificial Sequence
  synthetic circulating small noncoding RNA (sncRNA) 5' transfer RNA (tRNA) half
ccataccgggagtcgaacccgggccgcctgggtgaaaaccaggaa

SEQ ID NO: 16371 - DNA, 15 bp, Artificial Sequence
  synthetic circulating small noncoding RNA (sncRNA) 5' transfer RNA (tRNA) half
tctcggtgggacctt

SEQ ID NO: 16372 - DNA, 17 bp, Artificial Sequence
  synthetic circulating small noncoding RNA (sncRNA) 5' transfer RNA (tRNA) half
agtccatcgccttaacc

SEQ ID NO: 16373 - DNA, 36 bp, Artificial Sequence
  synthetic circulating small noncoding RNA (sncRNA) 5' transfer RNA (tRNA) half
ttcgcgtgtgaggcgaacgtgataaccactacacta

SEQ ID NO: 16374 - DNA, 16 bp, Artificial Sequence
  synthetic circulating small noncoding RNA (sncRNA) 5' transfer RNA (tRNA) half
catgccgtgactcgga

SEQ ID NO: 16375 - DNA, 22 bp, Artificial Sequence
  synthetic circulating small noncoding RNA (sncRNA) 5' transfer RNA (tRNA) half
tcggaggcgtgggttcgaatcc

SEQ ID NO: 16376 - DNA, 33 bp, Artificial Sequence
  synthetic circulating small noncoding RNA (sncRNA) 5' transfer RNA (tRNA) half
ccgaaacccgggattgaaccagggacctttaga

SEQ ID NO: 16377 - DNA, 33 bp, Artificial Sequence
  synthetic circulating small noncoding RNA (sncRNA) 5' transfer RNA (tRNA) half
acaggagatcctgggttcgactcccagtggggc

SEQ ID NO: 16378 - DNA, 16 bp, Artificial Sequence
  synthetic circulating small noncoding RNA (sncRNA) 5' transfer RNA (tRNA) half
aagaattctaccactg

SEQ ID NO: 16379 - DNA, 25 bp, Artificial Sequence
  synthetic circulating small noncoding RNA (sncRNA) 5' transfer RNA (tRNA) half
aggcgagaattctaccattgaacca

SEQ ID NO: 16380 - DNA, 23 bp, Artificial Sequence
  synthetic circulating small noncoding RNA (sncRNA) 5' transfer RNA (tRNA) half
cgggatcgatgcccgcattctcc

SEQ ID NO: 16381 - DNA, 10 bp, Artificial Sequence
  synthetic circulating small noncoding RNA (sncRNA) 5' transfer RNA (tRNA) half
cgctggcggc

SEQ ID NO: 16382 - DNA, 22 bp, Artificial Sequence
  synthetic circulating small noncoding RNA (sncRNA) 5' transfer RNA (tRNA) half
ttctcgcctcccacgcgggtga

SEQ ID NO: 16383 - DNA, 34 bp, Artificial Sequence
  synthetic circulating small noncoding RNA (sncRNA) 5' transfer RNA (tRNA) half
gagagcgccgaatcctaaccactagaccaccagg

SEQ ID NO: 16384 - DNA, 19 bp, Artificial Sequence
  synthetic circulating small noncoding RNA (sncRNA) 5' transfer RNA (tRNA) half
tcaaatcccagcggggcct

SEQ ID NO: 16385 - DNA, 13 bp, Artificial Sequence
  synthetic circulating small noncoding RNA (sncRNA) 5' transfer RNA (tRNA) half
gtctaggggtatg

SEQ ID NO: 16386 - DNA, 23 bp, Artificial Sequence
  synthetic circulating small noncoding RNA (sncRNA) 5' transfer RNA (tRNA) half
ggaatcctaaccgctagaccata

SEQ ID NO: 16387 - DNA, 10 bp, Artificial Sequence
  synthetic circulating small noncoding RNA (sncRNA) 5' transfer RNA (tRNA) half
gccccctctg

SEQ ID NO: 16388 - DNA, 28 bp, Artificial Sequence
  synthetic circulating small noncoding RNA (sncRNA) 5' transfer RNA (tRNA) half
gttccatggtgtaatggttagcactctg

SEQ ID NO: 16389 - DNA, 14 bp, Artificial Sequence
  synthetic circulating small noncoding RNA (sncRNA) 5' transfer RNA (tRNA) half
tatcacgtctgctt

SEQ ID NO: 16390 - DNA, 11 bp, Artificial Sequence
  synthetic circulating small noncoding RNA (sncRNA) 5' transfer RNA (tRNA) half
tggctggctcg

SEQ ID NO: 16391 - DNA, 26 bp, Artificial Sequence
  synthetic circulating small noncoding RNA (sncRNA) 5' transfer RNA (tRNA) half
agggattgtgggttcgagtcccatct

SEQ ID NO: 16392 - DNA, 18 bp, Artificial Sequence
  synthetic circulating small noncoding RNA (sncRNA) 5' transfer RNA (tRNA) half
tagaccgctcggccatcc

SEQ ID NO: 16393 - DNA, 16 bp, Artificial Sequence
  synthetic circulating small noncoding RNA (sncRNA) 5' transfer RNA (tRNA) half
gcccgcatcctccact

SEQ ID NO: 16394 - DNA, 28 bp, Artificial Sequence
  synthetic circulating small noncoding RNA (sncRNA) 5' transfer RNA (tRNA) half
attctaggttcgactcctgtctggctcg

SEQ ID NO: 16395 - DNA, 35 bp, Artificial Sequence
  synthetic circulating small noncoding RNA (sncRNA) 5' transfer RNA (tRNA) half
ccgctggtgtagtggtatcatgcaagattcccatt

SEQ ID NO: 16396 - DNA, 8 bp, Artificial Sequence
  synthetic circulating small noncoding RNA (sncRNA) 5' transfer RNA (tRNA) half
catgcgct

SEQ ID NO: 16397 - DNA, 13 bp, Artificial Sequence
  synthetic circulating small noncoding RNA (sncRNA) 5' transfer RNA (tRNA) half
aggaccttcagat

SEQ ID NO: 16398 - DNA, 36 bp, Artificial Sequence
  synthetic circulating small noncoding RNA (sncRNA) 5' transfer RNA (tRNA) half
gtttctgtagtgtagtggttatcacgctcgcctaac

SEQ ID NO: 16399 - DNA, 11 bp, Artificial Sequence
  synthetic circulating small noncoding RNA (sncRNA) 5' transfer RNA (tRNA) half
gggcacccgga

SEQ ID NO: 16400 - DNA, 30 bp, Artificial Sequence
  synthetic circulating small noncoding RNA (sncRNA) 5' transfer RNA (tRNA) half
aggcgagaattctaccattgaactaccaat

SEQ ID NO: 16401 - DNA, 25 bp, Artificial Sequence
  synthetic circulating small noncoding RNA (sncRNA) 5' transfer RNA (tRNA) half
tgctctacccctgagctatgccccc

SEQ ID NO: 16402 - DNA, 12 bp, Artificial Sequence
  synthetic circulating small noncoding RNA (sncRNA) 5' transfer RNA (tRNA) half
cccttcgtggtc

SEQ ID NO: 16403 - DNA, 8 bp, Artificial Sequence
  synthetic circulating small noncoding RNA (sncRNA) 5' transfer RNA (tRNA) half
ggccgagc

SEQ ID NO: 16404 - DNA, 12 bp, Artificial Sequence
  synthetic circulating small noncoding RNA (sncRNA) 5' transfer RNA (tRNA) half
aagatcgcgggt

SEQ ID NO: 16405 - DNA, 16 bp, Artificial Sequence
  synthetic circulating small noncoding RNA (sncRNA) 5' transfer RNA (tRNA) half
agggtcgtgagttcga

SEQ ID NO: 16406 - DNA, 12 bp, Artificial Sequence
  synthetic circulating small noncoding RNA (sncRNA) 5' transfer RNA (tRNA) half
ggctcgaaggaa

SEQ ID NO: 16407 - DNA, 16 bp, Artificial Sequence
  synthetic circulating small noncoding RNA (sncRNA) 5' transfer RNA (tRNA) half
agcactctggactctg

SEQ ID NO: 16408 - DNA, 29 bp, Artificial Sequence
  synthetic circulating small noncoding RNA (sncRNA) 5' transfer RNA (tRNA) half
agaccggggttcgattccccgacggggag

SEQ ID NO: 16409 - DNA, 23 bp, Artificial Sequence
  synthetic circulating small noncoding RNA (sncRNA) 5' transfer RNA (tRNA) half
gaaccaccaacctttcggttaac

SEQ ID NO: 16410 - DNA, 18 bp, Artificial Sequence
  synthetic circulating small noncoding RNA (sncRNA) 5' transfer RNA (tRNA) half
agtggtatgattctcagt

SEQ ID NO: 16411 - DNA, 17 bp, Artificial Sequence
  synthetic circulating small noncoding RNA (sncRNA) 5' transfer RNA (tRNA) half
aagcgccgaatcctagc

SEQ ID NO: 16412 - DNA, 21 bp, Artificial Sequence
  synthetic circulating small noncoding RNA (sncRNA) 5' transfer RNA (tRNA) half
gattcaaagtccagagtgcta

SEQ ID NO: 16413 - DNA, 19 bp, Artificial Sequence
  synthetic circulating small noncoding RNA (sncRNA) 5' transfer RNA (tRNA) half
cgcgtgcagagcacaatgg

SEQ ID NO: 16414 - DNA, 27 bp, Artificial Sequence
  synthetic circulating small noncoding RNA (sncRNA) 5' transfer RNA (tRNA) half
tggtctagtggttaggattcggcgctc

SEQ ID NO: 16415 - DNA, 12 bp, Artificial Sequence
  synthetic circulating small noncoding RNA (sncRNA) 5' transfer RNA (tRNA) half
cggcatctccac

SEQ ID NO: 16416 - DNA, 15 bp, Artificial Sequence
  synthetic circulating small noncoding RNA (sncRNA) 5' transfer RNA (tRNA) half
aggacaaccatgatg

SEQ ID NO: 16417 - DNA, 35 bp, Artificial Sequence
  synthetic circulating small noncoding RNA (sncRNA) 5' transfer RNA (tRNA) half
aacaggagatcctgggttcgactcccagtggggcc

SEQ ID NO: 16418 - DNA, 27 bp, Artificial Sequence
  synthetic circulating small noncoding RNA (sncRNA) 5' transfer RNA (tRNA) half
aggatgggattcgaacccacgcgtgca

SEQ ID NO: 16419 - DNA, 11 bp, Artificial Sequence
  synthetic circulating small noncoding RNA (sncRNA) 5' transfer RNA (tRNA) half
gcgaacgtgat

SEQ ID NO: 16420 - DNA, 18 bp, Artificial Sequence
  synthetic circulating small noncoding RNA (sncRNA) 5' transfer RNA (tRNA) half
cggacgagcccaagcatt

SEQ ID NO: 16421 - DNA, 11 bp, Artificial Sequence
  synthetic circulating small noncoding RNA (sncRNA) 5' transfer RNA (tRNA) half
gtttcgaaccg

SEQ ID NO: 16422 - DNA, 18 bp, Artificial Sequence
  synthetic circulating small noncoding RNA (sncRNA) 5' transfer RNA (tRNA) half
ccattgcgccacagagcc

SEQ ID NO: 16423 - DNA, 19 bp, Artificial Sequence
  synthetic circulating small noncoding RNA (sncRNA) 5' transfer RNA (tRNA) half
gggttcgatccccgtatgg

SEQ ID NO: 16424 - DNA, 35 bp, Artificial Sequence
  synthetic circulating small noncoding RNA (sncRNA) 5' transfer RNA (tRNA) half
ttgaactcggatcgctggattcagagtccagagtg

SEQ ID NO: 16425 - DNA, 6 bp, Artificial Sequence
  synthetic circulating small noncoding RNA (sncRNA) 5' transfer RNA (tRNA) half
tcgcgt

SEQ ID NO: 16426 - DNA, 15 bp, Artificial Sequence
  synthetic circulating small noncoding RNA (sncRNA) 5' transfer RNA (tRNA) half
gtggtctggggtgca

SEQ ID NO: 16427 - DNA, 17 bp, Artificial Sequence
  synthetic circulating small noncoding RNA (sncRNA) 5' transfer RNA (tRNA) half
cggagctggggattgtg

SEQ ID NO: 16428 - DNA, 9 bp, Artificial Sequence
  synthetic circulating small noncoding RNA (sncRNA) 5' transfer RNA (tRNA) half
gcgcgttcg

SEQ ID NO: 16429 - DNA, 18 bp, Artificial Sequence
  synthetic circulating small noncoding RNA (sncRNA) 5' transfer RNA (tRNA) half
accactcggccacctcgt

SEQ ID NO: 16430 - DNA, 12 bp, Artificial Sequence
  synthetic circulating small noncoding RNA (sncRNA) 5' transfer RNA (tRNA) half
agtctgatgctc

SEQ ID NO: 16431 - DNA, 30 bp, Artificial Sequence
  synthetic circulating small noncoding RNA (sncRNA) 5' transfer RNA (tRNA) half
tggcgcccaacgtgaggctcgaacccacga

SEQ ID NO: 16432 - DNA, 10 bp, Artificial Sequence
  synthetic circulating small noncoding RNA (sncRNA) 5' transfer RNA (tRNA) half
ggttcgatcc

SEQ ID NO: 16433 - DNA, 12 bp, Artificial Sequence
  synthetic circulating small noncoding RNA (sncRNA) 5' transfer RNA (tRNA) half
cccaccgctgcc

SEQ ID NO: 16434 - DNA, 14 bp, Artificial Sequence
  synthetic circulating small noncoding RNA (sncRNA) 5' transfer RNA (tRNA) half
acccggaacctttg

SEQ ID NO: 16435 - DNA, 14 bp, Artificial Sequence
  synthetic circulating small noncoding RNA (sncRNA) 5' transfer RNA (tRNA) half
cgggtcaactgctt

SEQ ID NO: 16436 - DNA, 20 bp, Artificial Sequence
  synthetic circulating small noncoding RNA (sncRNA) 5' transfer RNA (tRNA) half
cgcccaacgtggggctcgaa

SEQ ID NO: 16437 - DNA, 35 bp, Artificial Sequence
  synthetic circulating small noncoding RNA (sncRNA) 5' transfer RNA (tRNA) half
acacgcgaaaggtccccggttcgaaaccgggcgga

SEQ ID NO: 16438 - DNA, 20 bp, Artificial Sequence
  synthetic circulating small noncoding RNA (sncRNA) 5' transfer RNA (tRNA) half
gaaggccccagcgagatttg

SEQ ID NO: 16439 - DNA, 17 bp, Artificial Sequence
  synthetic circulating small noncoding RNA (sncRNA) 5' transfer RNA (tRNA) half
cggggaatcgaaccccg

SEQ ID NO: 16440 - DNA, 16 bp, Artificial Sequence
  synthetic circulating small noncoding RNA (sncRNA) 5' transfer RNA (tRNA) half
aggcggggatactcac

SEQ ID NO: 16441 - DNA, 16 bp, Artificial Sequence
  synthetic circulating small noncoding RNA (sncRNA) 5' transfer RNA (tRNA) half
gctcagtcggtagagc

SEQ ID NO: 16442 - DNA, 11 bp, Artificial Sequence
  synthetic circulating small noncoding RNA (sncRNA) 5' transfer RNA (tRNA) half
agactgcgacc

SEQ ID NO: 16443 - DNA, 37 bp, Artificial Sequence
  synthetic circulating small noncoding RNA (sncRNA) 5' transfer RNA (tRNA) half
aaaggccctgctgggatttgaacccaggatctcctgt

SEQ ID NO: 16444 - DNA, 16 bp, Artificial Sequence
  synthetic circulating small noncoding RNA (sncRNA) 5' transfer RNA (tRNA) half
ggagacgacgaaggtg

SEQ ID NO: 16445 - DNA, 33 bp, Artificial Sequence
  synthetic circulating small noncoding RNA (sncRNA) 5' transfer RNA (tRNA) half
ggtggagatgccggggatcgaacccggggcctc

SEQ ID NO: 16446 - DNA, 21 bp, Artificial Sequence
  synthetic circulating small noncoding RNA (sncRNA) 5' transfer RNA (tRNA) half
atgaccactacactacggaaa

SEQ ID NO: 16447 - DNA, 22 bp, Artificial Sequence
  synthetic circulating small noncoding RNA (sncRNA) 5' transfer RNA (tRNA) half
aatgccttcagcctctagaagt

SEQ ID NO: 16448 - DNA, 15 bp, Artificial Sequence
  synthetic circulating small noncoding RNA (sncRNA) 5' transfer RNA (tRNA) half
cgttcgcctcacacg

SEQ ID NO: 16449 - DNA, 9 bp, Artificial Sequence
  synthetic circulating small noncoding RNA (sncRNA) 5' transfer RNA (tRNA) half
gcagcgagc

SEQ ID NO: 16450 - DNA, 19 bp, Artificial Sequence
  synthetic circulating small noncoding RNA (sncRNA) 5' transfer RNA (tRNA) half
cacgcgaaaggtccccggt

SEQ ID NO: 16451 - DNA, 10 bp, Artificial Sequence
  synthetic circulating small noncoding RNA (sncRNA) 5' transfer RNA (tRNA) half
gagagcgccg

SEQ ID NO: 16452 - DNA, 37 bp, Artificial Sequence
  synthetic circulating small noncoding RNA (sncRNA) 5' transfer RNA (tRNA) half
accccaggtgggactcgaacccacaatccctggctta

SEQ ID NO: 16453 - DNA, 35 bp, Artificial Sequence
  synthetic circulating small noncoding RNA (sncRNA) 5' transfer RNA (tRNA) half
agccagccaggagtcgaacctggaatcttctgatc

SEQ ID NO: 16454 - DNA, 21 bp, Artificial Sequence
  synthetic circulating small noncoding RNA (sncRNA) 5' transfer RNA (tRNA) half
ggagtcagacgcgctaccgtt

SEQ ID NO: 16455 - DNA, 16 bp, Artificial Sequence
  synthetic circulating small noncoding RNA (sncRNA) 5' transfer RNA (tRNA) half
atttccctgaccggga

SEQ ID NO: 16456 - DNA, 35 bp, Artificial Sequence
  synthetic circulating small noncoding RNA (sncRNA) 5' transfer RNA (tRNA) half
aacccgggccgcggcggtgagagcgccgaatccta

SEQ ID NO: 16457 - DNA, 21 bp, Artificial Sequence
  synthetic circulating small noncoding RNA (sncRNA) 5' transfer RNA (tRNA) half
gagatttgaactcggatcgct

SEQ ID NO: 16458 - DNA, 25 bp, Artificial Sequence
  synthetic circulating small noncoding RNA (sncRNA) 5' transfer RNA (tRNA) half
gccgtgactcggattcgaaccgagg

SEQ ID NO: 16459 - DNA, 20 bp, Artificial Sequence
  synthetic circulating small noncoding RNA (sncRNA) 5' transfer RNA (tRNA) half
cgatcctcacctggagcact

SEQ ID NO: 16460 - DNA, 26 bp, Artificial Sequence
  synthetic circulating small noncoding RNA (sncRNA) 5' transfer RNA (tRNA) half
ggtctagcggttaggattcctggttt

SEQ ID NO: 16461 - DNA, 34 bp, Artificial Sequence
  synthetic circulating small noncoding RNA (sncRNA) 5' transfer RNA (tRNA) half
aggcgtccctgggtgggctcgaaccaccaacctt

SEQ ID NO: 16462 - DNA, 39 bp, Artificial Sequence
  synthetic circulating small noncoding RNA (sncRNA) 5' transfer RNA (tRNA) half
cgtgacaggcggggatactcaccactatactaacgagga

SEQ ID NO: 16463 - DNA, 34 bp, Artificial Sequence
  synthetic circulating small noncoding RNA (sncRNA) 5' transfer RNA (tRNA) half
cgttccttcgagccggattcgaaccagcgaccta

SEQ ID NO: 16464 - DNA, 10 bp, Artificial Sequence
  synthetic circulating small noncoding RNA (sncRNA) 5' transfer RNA (tRNA) half
cagtgctcta

SEQ ID NO: 16465 - DNA, 23 bp, Artificial Sequence
  synthetic circulating small noncoding RNA (sncRNA) 5' transfer RNA (tRNA) half
ccgaagatcgcgggttcgaaccc

SEQ ID NO: 16466 - DNA, 25 bp, Artificial Sequence
  synthetic circulating small noncoding RNA (sncRNA) 5' transfer RNA (tRNA) half
cgagttcaaatctcgctggggcctg

SEQ ID NO: 16467 - DNA, 24 bp, Artificial Sequence
  synthetic circulating small noncoding RNA (sncRNA) 5' transfer RNA (tRNA) half
gggttcgactcccggtgtgggaaa

SEQ ID NO: 16468 - DNA, 38 bp, Artificial Sequence
  synthetic circulating small noncoding RNA (sncRNA) 5' transfer RNA (tRNA) half
gtgacaggcggggatactaaccactatactaacgagga

SEQ ID NO: 16469 - DNA, 31 bp, Artificial Sequence
  synthetic circulating small noncoding RNA (sncRNA) 5' transfer RNA (tRNA) half
tgggtggttcagtggtagaattctcgcctgc

SEQ ID NO: 16470 - DNA, 18 bp, Artificial Sequence
  synthetic circulating small noncoding RNA (sncRNA) 5' transfer RNA (tRNA) half
gtcggggaatcgaacccc

SEQ ID NO: 16471 - DNA, 18 bp, Artificial Sequence
  synthetic circulating small noncoding RNA (sncRNA) 5' transfer RNA (tRNA) half
ctcagttggttagagcgt

SEQ ID NO: 16472 - DNA, 14 bp, Artificial Sequence
  synthetic circulating small noncoding RNA (sncRNA) 5' transfer RNA (tRNA) half
aggtcctgggttcg

SEQ ID NO: 16473 - DNA, 40 bp, Artificial Sequence
  synthetic circulating small noncoding RNA (sncRNA) 5' transfer RNA (tRNA) half
gtttctgtagtgtagtggttatcacgctcgcctaacacgc

SEQ ID NO: 16474 - DNA, 29 bp, Artificial Sequence
  synthetic circulating small noncoding RNA (sncRNA) 5' transfer RNA (tRNA) half
cataatctgaaggtcctgagttcgaacct

SEQ ID NO: 16475 - DNA, 16 bp, Artificial Sequence
  synthetic circulating small noncoding RNA (sncRNA) 5' transfer RNA (tRNA) half
acccgcgaccttggcg

SEQ ID NO: 16476 - DNA, 26 bp, Artificial Sequence
  synthetic circulating small noncoding RNA (sncRNA) 5' transfer RNA (tRNA) half
cgcgggttcgatccccgtacgggcca

SEQ ID NO: 16477 - DNA, 21 bp, Artificial Sequence
  synthetic circulating small noncoding RNA (sncRNA) 5' transfer RNA (tRNA) half
ttcgactccggctcgaaggag

SEQ ID NO: 16478 - DNA, 24 bp, Artificial Sequence
  synthetic circulating small noncoding RNA (sncRNA) 5' transfer RNA (tRNA) half
cactcctgacagcctcgcctttag

SEQ ID NO: 16479 - DNA, 27 bp, Artificial Sequence
  synthetic circulating small noncoding RNA (sncRNA) 5' transfer RNA (tRNA) half
cgggttcgactcccggtgtgggaacag

SEQ ID NO: 16480 - DNA, 14 bp, Artificial Sequence
  synthetic circulating small noncoding RNA (sncRNA) 5' transfer RNA (tRNA) half
gcccacccagggac

SEQ ID NO: 16481 - DNA, 20 bp, Artificial Sequence
  synthetic circulating small noncoding RNA (sncRNA) 5' transfer RNA (tRNA) half
ctaaccactagaccaccagg

SEQ ID NO: 16482 - DNA, 35 bp, Artificial Sequence
  synthetic circulating small noncoding RNA (sncRNA) 5' transfer RNA (tRNA) half
ccctgggtgggctcgaaccaccaacctttcggtta

SEQ ID NO: 16483 - DNA, 35 bp, Artificial Sequence
  synthetic circulating small noncoding RNA (sncRNA) 5' transfer RNA (tRNA) half
tcacgaggtccctggttcaaatcgaggtgccccct

SEQ ID NO: 16484 - DNA, 10 bp, Artificial Sequence
  synthetic circulating small noncoding RNA (sncRNA) 5' transfer RNA (tRNA) half
atgccgtgac

SEQ ID NO: 16485 - DNA, 27 bp, Artificial Sequence
  synthetic circulating small noncoding RNA (sncRNA) 5' transfer RNA (tRNA) half
gatgggattcgaacccacgcgtgcaga

SEQ ID NO: 16486 - DNA, 14 bp, Artificial Sequence
  synthetic circulating small noncoding RNA (sncRNA) 5' transfer RNA (tRNA) half
tcaggtcgcagtct

SEQ ID NO: 16487 - DNA, 24 bp, Artificial Sequence
  synthetic circulating small noncoding RNA (sncRNA) 5' transfer RNA (tRNA) half
ccgcggcggtgagagcgccgaatc

SEQ ID NO: 16488 - DNA, 19 bp, Artificial Sequence
  synthetic circulating small noncoding RNA (sncRNA) 5' transfer RNA (tRNA) half
gaatcatacccctagacca

SEQ ID NO: 16489 - DNA, 16 bp, Artificial Sequence
  synthetic circulating small noncoding RNA (sncRNA) 5' transfer RNA (tRNA) half
gaatcatacccctaga

SEQ ID NO: 16490 - DNA, 17 bp, Artificial Sequence
  synthetic circulating small noncoding RNA (sncRNA) 5' transfer RNA (tRNA) half
cattgaactaccaatgc

SEQ ID NO: 16491 - DNA, 28 bp, Artificial Sequence
  synthetic circulating small noncoding RNA (sncRNA) 5' transfer RNA (tRNA) half
tttccgtagtgtagtggtcatcacgctc

SEQ ID NO: 16492 - DNA, 21 bp, Artificial Sequence
  synthetic circulating small noncoding RNA (sncRNA) 5' transfer RNA (tRNA) half
aaaccgggcggaaacaagaca

SEQ ID NO: 16493 - DNA, 28 bp, Artificial Sequence
  synthetic circulating small noncoding RNA (sncRNA) 5' transfer RNA (tRNA) half
tgactcctaaccactagaccaccaggga

SEQ ID NO: 16494 - DNA, 19 bp, Artificial Sequence
  synthetic circulating small noncoding RNA (sncRNA) 5' transfer RNA (tRNA) half
aggattcggcgctctcacc

SEQ ID NO: 16495 - DNA, 26 bp, Artificial Sequence
  synthetic circulating small noncoding RNA (sncRNA) 5' transfer RNA (tRNA) half
gaacccgggacctctcgcacccaaag

SEQ ID NO: 16496 - DNA, 25 bp, Artificial Sequence
  synthetic circulating small noncoding RNA (sncRNA) 5' transfer RNA (tRNA) half
cctgccgtgactcggattcgaaccg

SEQ ID NO: 16497 - DNA, 45 bp, Artificial Sequence
  synthetic circulating small noncoding RNA (sncRNA) 5' transfer RNA (tRNA) half
cctgccacgcgggaggcccgggttcgattcccggccaatgcacga

SEQ ID NO: 16498 - DNA, 36 bp, Artificial Sequence
  synthetic circulating small noncoding RNA (sncRNA) 5' transfer RNA (tRNA) half
ggcgagaattctaccattgaaccaccaatgcaccct

SEQ ID NO: 16499 - DNA, 31 bp, Artificial Sequence
  synthetic circulating small noncoding RNA (sncRNA) 5' transfer RNA (tRNA) half
gttagtactctgcgttgtggccgcagcaacc

SEQ ID NO: 16500 - DNA, 26 bp, Artificial Sequence
  synthetic circulating small noncoding RNA (sncRNA) 5' transfer RNA (tRNA) half
cgccaaatcctaaccactagaccacc

SEQ ID NO: 16501 - DNA, 31 bp, Artificial Sequence
  synthetic circulating small noncoding RNA (sncRNA) 5' transfer RNA (tRNA) half
gacgacgaggatgggattcgaacccacgcgt

SEQ ID NO: 16502 - DNA, 24 bp, Artificial Sequence
  synthetic circulating small noncoding RNA (sncRNA) 5' transfer RNA (tRNA) half
ctcggatcgctggattcagagtcc

SEQ ID NO: 16503 - DNA, 22 bp, Artificial Sequence
  synthetic circulating small noncoding RNA (sncRNA) 5' transfer RNA (tRNA) half
ggttcgactccggctcgaagga

SEQ ID NO: 16504 - DNA, 18 bp, Artificial Sequence
  synthetic circulating small noncoding RNA (sncRNA) 5' transfer RNA (tRNA) half
cgtgatcgtatagtggtt

SEQ ID NO: 16505 - DNA, 24 bp, Artificial Sequence
  synthetic circulating small noncoding RNA (sncRNA) 5' transfer RNA (tRNA) half
gctcagttgggagagcgttagact

SEQ ID NO: 16506 - DNA, 37 bp, Artificial Sequence
  synthetic circulating small noncoding RNA (sncRNA) 5' transfer RNA (tRNA) half
tgtgtcagaagtgggattcgaacccacgcctccattc

SEQ ID NO: 16507 - DNA, 9 bp, Artificial Sequence
  synthetic circulating small noncoding RNA (sncRNA) 5' transfer RNA (tRNA) half
cggtcgact

SEQ ID NO: 16508 - DNA, 34 bp, Artificial Sequence
  synthetic circulating small noncoding RNA (sncRNA) 5' transfer RNA (tRNA) half
ccctgaccgggaatcgaacccaggccgcggcggt

SEQ ID NO: 16509 - DNA, 36 bp, Artificial Sequence
  synthetic circulating small noncoding RNA (sncRNA) 5' transfer RNA (tRNA) half
gaccacgaagggactcgaaccctcaatcttctgatc

SEQ ID NO: 16510 - DNA, 17 bp, Artificial Sequence
  synthetic circulating small noncoding RNA (sncRNA) 5' transfer RNA (tRNA) half
ggacctctcgcacccaa

SEQ ID NO: 16511 - DNA, 23 bp, Artificial Sequence
  synthetic circulating small noncoding RNA (sncRNA) 5' transfer RNA (tRNA) half
cggcccgggttcgattcccggtc

SEQ ID NO: 16512 - DNA, 34 bp, Artificial Sequence
  synthetic circulating small noncoding RNA (sncRNA) 5' transfer RNA (tRNA) half
gggacctctcgcaccctaagcgagaatcataccc

SEQ ID NO: 16513 - DNA, 12 bp, Artificial Sequence
  synthetic circulating small noncoding RNA (sncRNA) 5' transfer RNA (tRNA) half
tgaacccgggac

SEQ ID NO: 16514 - DNA, 35 bp, Artificial Sequence
  synthetic circulating small noncoding RNA (sncRNA) 5' transfer RNA (tRNA) half
gcggttaggattcctggttttcacccaggcggccc

SEQ ID NO: 16515 - DNA, 28 bp, Artificial Sequence
  synthetic circulating small noncoding RNA (sncRNA) 5' transfer RNA (tRNA) half
tctggactctgaatccagcgatccgagt

SEQ ID NO: 16516 - DNA, 14 bp, Artificial Sequence
  synthetic circulating small noncoding RNA (sncRNA) 5' transfer RNA (tRNA) half
atccatcgacctct

SEQ ID NO: 16517 - DNA, 26 bp, Artificial Sequence
  synthetic circulating small noncoding RNA (sncRNA) 5' transfer RNA (tRNA) half
gggatgtagctcagtggtagagcgca

SEQ ID NO: 16518 - DNA, 24 bp, Artificial Sequence
  synthetic circulating small noncoding RNA (sncRNA) 5' transfer RNA (tRNA) half
gaacccggggcctcatacatgcaa

SEQ ID NO: 16519 - DNA, 31 bp, Artificial Sequence
  synthetic circulating small noncoding RNA (sncRNA) 5' transfer RNA (tRNA) half
ggtggagatgccggggatcgaacccggggcc

SEQ ID NO: 16520 - DNA, 16 bp, Artificial Sequence
  synthetic circulating small noncoding RNA (sncRNA) 5' transfer RNA (tRNA) half
gcctcccgcgtggcag

SEQ ID NO: 16521 - DNA, 39 bp, Artificial Sequence
  synthetic circulating small noncoding RNA (sncRNA) 5' transfer RNA (tRNA) half
cacccaggcggcccgggttcgactcccggtgtgggaaca

SEQ ID NO: 16522 - DNA, 23 bp, Artificial Sequence
  synthetic circulating small noncoding RNA (sncRNA) 5' transfer RNA (tRNA) half
ccaactgagctaaccggccagac

SEQ ID NO: 16523 - DNA, 13 bp, Artificial Sequence
  synthetic circulating small noncoding RNA (sncRNA) 5' transfer RNA (tRNA) half
gccgaaatagctc

SEQ ID NO: 16524 - DNA, 12 bp, Artificial Sequence
  synthetic circulating small noncoding RNA (sncRNA) 5' transfer RNA (tRNA) half
tcccggtcaggg

SEQ ID NO: 16525 - DNA, 17 bp, Artificial Sequence
  synthetic circulating small noncoding RNA (sncRNA) 5' transfer RNA (tRNA) half
gccgaatcctagccact

SEQ ID NO: 16526 - DNA, 22 bp, Artificial Sequence
  synthetic circulating small noncoding RNA (sncRNA) 5' transfer RNA (tRNA) half
cgggttcgattcccgggcggcg

SEQ ID NO: 16527 - DNA, 11 bp, Artificial Sequence
  synthetic circulating small noncoding RNA (sncRNA) 5' transfer RNA (tRNA) half
caacctcggtt

SEQ ID NO: 16528 - DNA, 22 bp, Artificial Sequence
  synthetic circulating small noncoding RNA (sncRNA) 5' transfer RNA (tRNA) half
gtttccgtagtgtagtggtcat

SEQ ID NO: 16529 - DNA, 18 bp, Artificial Sequence
  synthetic circulating small noncoding RNA (sncRNA) 5' transfer RNA (tRNA) half
gatgccggggctcgaacc

SEQ ID NO: 16530 - DNA, 14 bp, Artificial Sequence
  synthetic circulating small noncoding RNA (sncRNA) 5' transfer RNA (tRNA) half
accccgacgtgact

SEQ ID NO: 16531 - DNA, 9 bp, Artificial Sequence
  synthetic circulating small noncoding RNA (sncRNA) 5' transfer RNA (tRNA) half
cggattcga

SEQ ID NO: 16532 - DNA, 19 bp, Artificial Sequence
  synthetic circulating small noncoding RNA (sncRNA) 5' transfer RNA (tRNA) half
ccttagaccactcggccac

SEQ ID NO: 16533 - DNA, 8 bp, Artificial Sequence
  synthetic circulating small noncoding RNA (sncRNA) 5' transfer RNA (tRNA) half
attgcgcc

SEQ ID NO: 16534 - DNA, 14 bp, Artificial Sequence
  synthetic circulating small noncoding RNA (sncRNA) 5' transfer RNA (tRNA) half
gattcgaaccgagg

SEQ ID NO: 16535 - DNA, 28 bp, Artificial Sequence
  synthetic circulating small noncoding RNA (sncRNA) 5' transfer RNA (tRNA) half
gcacgcagcgaccacgaagggactcgaa

SEQ ID NO: 16536 - DNA, 26 bp, Artificial Sequence
  synthetic circulating small noncoding RNA (sncRNA) 5' transfer RNA (tRNA) half
cgtgatgaccactacactacggaaac

SEQ ID NO: 16537 - DNA, 16 bp, Artificial Sequence
  synthetic circulating small noncoding RNA (sncRNA) 5' transfer RNA (tRNA) half
gaacccgggtcacccg

SEQ ID NO: 16538 - DNA, 33 bp, Artificial Sequence
  synthetic circulating small noncoding RNA (sncRNA) 5' transfer RNA (tRNA) half
ccttcgatagctcagctggtagagcggaggact

SEQ ID NO: 16539 - DNA, 16 bp, Artificial Sequence
  synthetic circulating small noncoding RNA (sncRNA) 5' transfer RNA (tRNA) half
ggcaggattcgaacct

SEQ ID NO: 16540 - DNA, 15 bp, Artificial Sequence
  synthetic circulating small noncoding RNA (sncRNA) 5' transfer RNA (tRNA) half
cccacgttgggcgca

SEQ ID NO: 16541 - DNA, 8 bp, Artificial Sequence
  synthetic circulating small noncoding RNA (sncRNA) 5' transfer RNA (tRNA) half
acccgcga

SEQ ID NO: 16542 - DNA, 8 bp, Artificial Sequence
  synthetic circulating small noncoding RNA (sncRNA) 5' transfer RNA (tRNA) half
ggggtgga

SEQ ID NO: 16543 - DNA, 18 bp, Artificial Sequence
  synthetic circulating small noncoding RNA (sncRNA) 5' transfer RNA (tRNA) half
gtctgtagagcatgagac

SEQ ID NO: 16544 - DNA, 11 bp, Artificial Sequence
  synthetic circulating small noncoding RNA (sncRNA) 5' transfer RNA (tRNA) half
aatcgaacccc

SEQ ID NO: 16545 - DNA, 37 bp, Artificial Sequence
  synthetic circulating small noncoding RNA (sncRNA) 5' transfer RNA (tRNA) half
atggaggcgtgggttcgaatcccacttctgacacagt

SEQ ID NO: 16546 - DNA, 38 bp, Artificial Sequence
  synthetic circulating small noncoding RNA (sncRNA) 5' transfer RNA (tRNA) half
gccgcccgaacagggacttgaaccctggaccctcagat

SEQ ID NO: 16547 - DNA, 23 bp, Artificial Sequence
  synthetic circulating small noncoding RNA (sncRNA) 5' transfer RNA (tRNA) half
gccaggagtcgaacctggaatct

SEQ ID NO: 16548 - DNA, 13 bp, Artificial Sequence
  synthetic circulating small noncoding RNA (sncRNA) 5' transfer RNA (tRNA) half
ggtagcgggatcg

SEQ ID NO: 16549 - DNA, 20 bp, Artificial Sequence
  synthetic circulating small noncoding RNA (sncRNA) 5' transfer RNA (tRNA) half
tctcggtggaacctgctccc

SEQ ID NO: 16550 - DNA, 37 bp, Artificial Sequence
  synthetic circulating small noncoding RNA (sncRNA) 5' transfer RNA (tRNA) half
gaacccgggcctcccgcgtggcaggcgagaattctac

SEQ ID NO: 16551 - DNA, 12 bp, Artificial Sequence
  synthetic circulating small noncoding RNA (sncRNA) 5' transfer RNA (tRNA) half
ttagtactctgc

SEQ ID NO: 16552 - DNA, 13 bp, Artificial Sequence
  synthetic circulating small noncoding RNA (sncRNA) 5' transfer RNA (tRNA) half
cctcgacgggggt

SEQ ID NO: 16553 - DNA, 15 bp, Artificial Sequence
  synthetic circulating small noncoding RNA (sncRNA) 5' transfer RNA (tRNA) half
gagctatccgggctc

SEQ ID NO: 16554 - DNA, 16 bp, Artificial Sequence
  synthetic circulating small noncoding RNA (sncRNA) 5' transfer RNA (tRNA) half
gaactcacaacctcgg

SEQ ID NO: 16555 - DNA, 37 bp, Artificial Sequence
  synthetic circulating small noncoding RNA (sncRNA) 5' transfer RNA (tRNA) half
ctcttcgggggcgtgggttcgaatcccaccgctgcca

SEQ ID NO: 16556 - DNA, 10 bp, Artificial Sequence
  synthetic circulating small noncoding RNA (sncRNA) 5' transfer RNA (tRNA) half
ggagtcgaac

SEQ ID NO: 16557 - DNA, 20 bp, Artificial Sequence
  synthetic circulating small noncoding RNA (sncRNA) 5' transfer RNA (tRNA) half
tggttagtactctgcgttgt

SEQ ID NO: 16558 - DNA, 19 bp, Artificial Sequence
  synthetic circulating small noncoding RNA (sncRNA) 5' transfer RNA (tRNA) half
cactctggactttgaatcc

SEQ ID NO: 16559 - DNA, 40 bp, Artificial Sequence
  synthetic circulating small noncoding RNA (sncRNA) 5' transfer RNA (tRNA) half
cttccctgaccgggaatcgaacccgggccgcggcggtgag

SEQ ID NO: 16560 - DNA, 17 bp, Artificial Sequence
  synthetic circulating small noncoding RNA (sncRNA) 5' transfer RNA (tRNA) half
gcattggccgggaatcg

SEQ ID NO: 16561 - DNA, 37 bp, Artificial Sequence
  synthetic circulating small noncoding RNA (sncRNA) 5' transfer RNA (tRNA) half
agctgaccccgacgtgatttgaacacgcaaccttctg

SEQ ID NO: 16562 - DNA, 9 bp, Artificial Sequence
  synthetic circulating small noncoding RNA (sncRNA) 5' transfer RNA (tRNA) half
gcacccgga

SEQ ID NO: 16563 - DNA, 27 bp, Artificial Sequence
  synthetic circulating small noncoding RNA (sncRNA) 5' transfer RNA (tRNA) half
cccgacgtgattcgaacacgcagcctt

SEQ ID NO: 16564 - DNA, 25 bp, Artificial Sequence
  synthetic circulating small noncoding RNA (sncRNA) 5' transfer RNA (tRNA) half
cggggaatcgaaccccggtctcccg

SEQ ID NO: 16565 - DNA, 26 bp, Artificial Sequence
  synthetic circulating small noncoding RNA (sncRNA) 5' transfer RNA (tRNA) half
gctcagtggtagagcatttgactgca

SEQ ID NO: 16566 - DNA, 14 bp, Artificial Sequence
  synthetic circulating small noncoding RNA (sncRNA) 5' transfer RNA (tRNA) half
ctccgatagcagag

SEQ ID NO: 16567 - DNA, 13 bp, Artificial Sequence
  synthetic circulating small noncoding RNA (sncRNA) 5' transfer RNA (tRNA) half
gaacccgggacgc

SEQ ID NO: 16568 - DNA, 32 bp, Artificial Sequence
  synthetic circulating small noncoding RNA (sncRNA) 5' transfer RNA (tRNA) half
tgtggcccgtacggggatcgaacccgcgacct

SEQ ID NO: 16569 - DNA, 26 bp, Artificial Sequence
  synthetic circulating small noncoding RNA (sncRNA) 5' transfer RNA (tRNA) half
ggggatactaaccactatactaacga

SEQ ID NO: 16570 - DNA, 7 bp, Artificial Sequence
  synthetic circulating small noncoding RNA (sncRNA) 5' transfer RNA (tRNA) half
accgagt

SEQ ID NO: 16571 - DNA, 17 bp, Artificial Sequence
  synthetic circulating small noncoding RNA (sncRNA) 5' transfer RNA (tRNA) half
gtccagagtgctagcca

SEQ ID NO: 16572 - DNA, 29 bp, Artificial Sequence
  synthetic circulating small noncoding RNA (sncRNA) 5' transfer RNA (tRNA) half
gccgggaatcgaacccgggcctcccgcgt

SEQ ID NO: 16573 - DNA, 13 bp, Artificial Sequence
  synthetic circulating small noncoding RNA (sncRNA) 5' transfer RNA (tRNA) half
gtcacgaacagga

SEQ ID NO: 16574 - DNA, 43 bp, Artificial Sequence
  synthetic circulating small noncoding RNA (sncRNA) 5' transfer RNA (tRNA) half
cagtctcttcggaggcgtgggttcgaatcccaccgctgccagg

SEQ ID NO: 16575 - DNA, 23 bp, Artificial Sequence
  synthetic circulating small noncoding RNA (sncRNA) 5' transfer RNA (tRNA) half
ctggtggtctagtggttaggatt

SEQ ID NO: 16576 - DNA, 22 bp, Artificial Sequence
  synthetic circulating small noncoding RNA (sncRNA) 5' transfer RNA (tRNA) half
tttccctgaccgggaatcgaac

SEQ ID NO: 16577 - DNA, 24 bp, Artificial Sequence
  synthetic circulating small noncoding RNA (sncRNA) 5' transfer RNA (tRNA) half
ggttcgatccccagcatctccagg

SEQ ID NO: 16578 - DNA, 11 bp, Artificial Sequence
  synthetic circulating small noncoding RNA (sncRNA) 5' transfer RNA (tRNA) half
ccggggacctc

SEQ ID NO: 16579 - DNA, 8 bp, Artificial Sequence
  synthetic circulating small noncoding RNA (sncRNA) 5' transfer RNA (tRNA) half
cggccaga

SEQ ID NO: 16580 - DNA, 18 bp, Artificial Sequence
  synthetic circulating small noncoding RNA (sncRNA) 5' transfer RNA (tRNA) half
gcgccaaatcctaaccac

SEQ ID NO: 16581 - DNA, 12 bp, Artificial Sequence
  synthetic circulating small noncoding RNA (sncRNA) 5' transfer RNA (tRNA) half
ccccggcatctc

SEQ ID NO: 16582 - DNA, 9 bp, Artificial Sequence
  synthetic circulating small noncoding RNA (sncRNA) 5' transfer RNA (tRNA) half
cggttagct

SEQ ID NO: 16583 - DNA, 26 bp, Artificial Sequence
  synthetic circulating small noncoding RNA (sncRNA) 5' transfer RNA (tRNA) half
caggagtcgaacctggaatcttctga

SEQ ID NO: 16584 - DNA, 18 bp, Artificial Sequence
  synthetic circulating small noncoding RNA (sncRNA) 5' transfer RNA (tRNA) half
tcgagccccacgttgggc

SEQ ID NO: 16585 - DNA, 29 bp, Artificial Sequence
  synthetic circulating small noncoding RNA (sncRNA) 5' transfer RNA (tRNA) half
acccgggatcgaaccagggacctttagat

SEQ ID NO: 16586 - DNA, 20 bp, Artificial Sequence
  synthetic circulating small noncoding RNA (sncRNA) 5' transfer RNA (tRNA) half
tccctggtggtctagtggct

SEQ ID NO: 16587 - DNA, 24 bp, Artificial Sequence
  synthetic circulating small noncoding RNA (sncRNA) 5' transfer RNA (tRNA) half
agaccgacgaggatgggattcgaa

SEQ ID NO: 16588 - DNA, 15 bp, Artificial Sequence
  synthetic circulating small noncoding RNA (sncRNA) 5' transfer RNA (tRNA) half
gtcacgggttcgatc

SEQ ID NO: 16589 - DNA, 12 bp, Artificial Sequence
  synthetic circulating small noncoding RNA (sncRNA) 5' transfer RNA (tRNA) half
ttcgattccccg

SEQ ID NO: 16590 - DNA, 38 bp, Artificial Sequence
  synthetic circulating small noncoding RNA (sncRNA) 5' transfer RNA (tRNA) half
atgttcccgcccggtttcgaaccggggacctctcgcgt

SEQ ID NO: 16591 - DNA, 41 bp, Artificial Sequence
  synthetic circulating small noncoding RNA (sncRNA) 5' transfer RNA (tRNA) half
aacccgggccgcggcggtgagagcgccgaatcctaaccact

SEQ ID NO: 16592 - DNA, 21 bp, Artificial Sequence
  synthetic circulating small noncoding RNA (sncRNA) 5' transfer RNA (tRNA) half
tttgaatccagcgatccgagt

SEQ ID NO: 16593 - DNA, 38 bp, Artificial Sequence
  synthetic circulating small noncoding RNA (sncRNA) 5' transfer RNA (tRNA) half
ggtgagagcgccgaatcctaaccactagaccaccaggg

SEQ ID NO: 16594 - DNA, 15 bp, Artificial Sequence
  synthetic circulating small noncoding RNA (sncRNA) 5' transfer RNA (tRNA) half
gaccaacgagccgat

SEQ ID NO: 16595 - DNA, 24 bp, Artificial Sequence
  synthetic circulating small noncoding RNA (sncRNA) 5' transfer RNA (tRNA) half
aagacttaaaaccttgttcccaga

SEQ ID NO: 16596 - DNA, 29 bp, Artificial Sequence
  synthetic circulating small noncoding RNA (sncRNA) 5' transfer RNA (tRNA) half
ccagagtgctagccattacaccatggaac

SEQ ID NO: 16597 - DNA, 7 bp, Artificial Sequence
  synthetic circulating small noncoding RNA (sncRNA) 5' transfer RNA (tRNA) half
gccgcag

SEQ ID NO: 16598 - DNA, 14 bp, Artificial Sequence
  synthetic circulating small noncoding RNA (sncRNA) 5' transfer RNA (tRNA) half
ccacatggtctagc

SEQ ID NO: 16599 - DNA, 12 bp, Artificial Sequence
  synthetic circulating small noncoding RNA (sncRNA) 5' transfer RNA (tRNA) half
tctcgcctgcca

SEQ ID NO: 16600 - DNA, 23 bp, Artificial Sequence
  synthetic circulating small noncoding RNA (sncRNA) 5' transfer RNA (tRNA) half
tgccccctctgaggttcgaactc

SEQ ID NO: 16601 - DNA, 17 bp, Artificial Sequence
  synthetic circulating small noncoding RNA (sncRNA) 5' transfer RNA (tRNA) half
gtctccccgtcggggaa

SEQ ID NO: 16602 - DNA, 22 bp, Artificial Sequence
  synthetic circulating small noncoding RNA (sncRNA) 5' transfer RNA (tRNA) half
gccaaatcctaaccactagacc

SEQ ID NO: 16603 - DNA, 16 bp, Artificial Sequence
  synthetic circulating small noncoding RNA (sncRNA) 5' transfer RNA (tRNA) half
cgcgagaggtccccgg

SEQ ID NO: 16604 - DNA, 39 bp, Artificial Sequence
  synthetic circulating small noncoding RNA (sncRNA) 5' transfer RNA (tRNA) half
gttagcactctggactctgaatccagcgatccgagttca

SEQ ID NO: 16605 - DNA, 22 bp, Artificial Sequence
  synthetic circulating small noncoding RNA (sncRNA) 5' transfer RNA (tRNA) half
gtatgattctcggtttgggtcc

SEQ ID NO: 16606 - DNA, 17 bp, Artificial Sequence
  synthetic circulating small noncoding RNA (sncRNA) 5' transfer RNA (tRNA) half
agaagattccaggttcg

SEQ ID NO: 16607 - DNA, 25 bp, Artificial Sequence
  synthetic circulating small noncoding RNA (sncRNA) 5' transfer RNA (tRNA) half
tttgggtgcgagaggtcccgggttc

SEQ ID NO: 16608 - DNA, 6 bp, Artificial Sequence
  synthetic circulating small noncoding RNA (sncRNA) 5' transfer RNA (tRNA) half
gatccg

SEQ ID NO: 16609 - DNA, 34 bp, Artificial Sequence
  synthetic circulating small noncoding RNA (sncRNA) 5' transfer RNA (tRNA) half
gcaggcgcggtggccaagtggtaaggcgtcggtc

SEQ ID NO: 16610 - DNA, 25 bp, Artificial Sequence
  synthetic circulating small noncoding RNA (sncRNA) 5' transfer RNA (tRNA) half
gcgaatgtgataaccactacactac

SEQ ID NO: 16611 - DNA, 16 bp, Artificial Sequence
  synthetic circulating small noncoding RNA (sncRNA) 5' transfer RNA (tRNA) half
caggggtcgcgagttc

SEQ ID NO: 16612 - DNA, 39 bp, Artificial Sequence
  synthetic circulating small noncoding RNA (sncRNA) 5' transfer RNA (tRNA) half
cacccaggcggcccgggttcgactcccggtgtgggaaac

SEQ ID NO: 16613 - DNA, 17 bp, Artificial Sequence
  synthetic circulating small noncoding RNA (sncRNA) 5' transfer RNA (tRNA) half
cccacttctgacacagt

SEQ ID NO: 16614 - DNA, 15 bp, Artificial Sequence
  synthetic circulating small noncoding RNA (sncRNA) 5' transfer RNA (tRNA) half
cggccacaacgcaga

SEQ ID NO: 16615 - DNA, 32 bp, Artificial Sequence
  synthetic circulating small noncoding RNA (sncRNA) 5' transfer RNA (tRNA) half
aacaggagatcctgggttcgaatcccagcggt

SEQ ID NO: 16616 - DNA, 14 bp, Artificial Sequence
  synthetic circulating small noncoding RNA (sncRNA) 5' transfer RNA (tRNA) half
tcgagccagccagg

SEQ ID NO: 16617 - DNA, 15 bp, Artificial Sequence
  synthetic circulating small noncoding RNA (sncRNA) 5' transfer RNA (tRNA) half
cccccgaccgctccg

SEQ ID NO: 16618 - DNA, 30 bp, Artificial Sequence
  synthetic circulating small noncoding RNA (sncRNA) 5' transfer RNA (tRNA) half
ttgtgggttcgagtcccatctgggtcgcat

SEQ ID NO: 16619 - DNA, 11 bp, Artificial Sequence
  synthetic circulating small noncoding RNA (sncRNA) 5' transfer RNA (tRNA) half
tcgaacccggg

SEQ ID NO: 16620 - DNA, 15 bp, Artificial Sequence
  synthetic circulating small noncoding RNA (sncRNA) 5' transfer RNA (tRNA) half
gagctagccgggcga

SEQ ID NO: 16621 - DNA, 25 bp, Artificial Sequence
  synthetic circulating small noncoding RNA (sncRNA) 5' transfer RNA (tRNA) half
tccccgtcggggaatcgaaccccgg

SEQ ID NO: 16622 - DNA, 28 bp, Artificial Sequence
  synthetic circulating small noncoding RNA (sncRNA) 5' transfer RNA (tRNA) half
agtggttaggattcggcgctctcaccgc

SEQ ID NO: 16623 - DNA, 32 bp, Artificial Sequence
  synthetic circulating small noncoding RNA (sncRNA) 5' transfer RNA (tRNA) half
aagaggtccccggttcaaatccgggtgccccc

SEQ ID NO: 16624 - DNA, 18 bp, Artificial Sequence
  synthetic circulating small noncoding RNA (sncRNA) 5' transfer RNA (tRNA) half
tactctgcgttgtggccg

SEQ ID NO: 16625 - DNA, 15 bp, Artificial Sequence
  synthetic circulating small noncoding RNA (sncRNA) 5' transfer RNA (tRNA) half
agtactaaccactat

SEQ ID NO: 16626 - DNA, 10 bp, Artificial Sequence
  synthetic circulating small noncoding RNA (sncRNA) 5' transfer RNA (tRNA) half
ttcgaaccct

SEQ ID NO: 16627 - DNA, 27 bp, Artificial Sequence
  synthetic circulating small noncoding RNA (sncRNA) 5' transfer RNA (tRNA) half
gtgagtatccccgcctgtcacgcggga

SEQ ID NO: 16628 - DNA, 22 bp, Artificial Sequence
  synthetic circulating small noncoding RNA (sncRNA) 5' transfer RNA (tRNA) half
tcgaaaccgggcggaaacaaaa

SEQ ID NO: 16629 - DNA, 14 bp, Artificial Sequence
  synthetic circulating small noncoding RNA (sncRNA) 5' transfer RNA (tRNA) half
attcccgggcggcg

SEQ ID NO: 16630 - DNA, 16 bp, Artificial Sequence
  synthetic circulating small noncoding RNA (sncRNA) 5' transfer RNA (tRNA) half
ggcggggatactcacc

SEQ ID NO: 16631 - DNA, 34 bp, Artificial Sequence
  synthetic circulating small noncoding RNA (sncRNA) 5' transfer RNA (tRNA) half
atctgaaggtcctgagttcgaacctcagaggggg

SEQ ID NO: 16632 - DNA, 21 bp, Artificial Sequence
  synthetic circulating small noncoding RNA (sncRNA) 5' transfer RNA (tRNA) half
tcagctggtagagcggaggac

SEQ ID NO: 16633 - DNA, 26 bp, Artificial Sequence
  synthetic circulating small noncoding RNA (sncRNA) 5' transfer RNA (tRNA) half
ggattcggcgctctcaccgccgcggc

SEQ ID NO: 16634 - DNA, 15 bp, Artificial Sequence
  synthetic circulating small noncoding RNA (sncRNA) 5' transfer RNA (tRNA) half
gattcagagtccaga

SEQ ID NO: 16635 - DNA, 12 bp, Artificial Sequence
  synthetic circulating small noncoding RNA (sncRNA) 5' transfer RNA (tRNA) half
acccgggatcga

SEQ ID NO: 16636 - DNA, 29 bp, Artificial Sequence
  synthetic circulating small noncoding RNA (sncRNA) 5' transfer RNA (tRNA) half
ggttagcactctggactttgaatccagcg

SEQ ID NO: 16637 - DNA, 18 bp, Artificial Sequence
  synthetic circulating small noncoding RNA (sncRNA) 5' transfer RNA (tRNA) half
cattggtggttcagtggt

SEQ ID NO: 16638 - DNA, 16 bp, Artificial Sequence
  synthetic circulating small noncoding RNA (sncRNA) 5' transfer RNA (tRNA) half
ttcgaaaccgggcgga

SEQ ID NO: 16639 - DNA, 19 bp, Artificial Sequence
  synthetic circulating small noncoding RNA (sncRNA) 5' transfer RNA (tRNA) half
ccgtgatcgtatagtggtt

SEQ ID NO: 16640 - DNA, 32 bp, Artificial Sequence
  synthetic circulating small noncoding RNA (sncRNA) 5' transfer RNA (tRNA) half
caggcgagaattctaccactgaaccaccaatg

SEQ ID NO: 16641 - DNA, 20 bp, Artificial Sequence
  synthetic circulating small noncoding RNA (sncRNA) 5' transfer RNA (tRNA) half
accccggtctcccgcgtgac

SEQ ID NO: 16642 - DNA, 22 bp, Artificial Sequence
  synthetic circulating small noncoding RNA (sncRNA) 5' transfer RNA (tRNA) half
agactgctcggccatcctgacc

SEQ ID NO: 16643 - DNA, 22 bp, Artificial Sequence
  synthetic circulating small noncoding RNA (sncRNA) 5' transfer RNA (tRNA) half
ggtatgattctcgctttgggtg

SEQ ID NO: 16644 - DNA, 21 bp, Artificial Sequence
  synthetic circulating small noncoding RNA (sncRNA) 5' transfer RNA (tRNA) half
cgagtggtctaaggagctgtg

SEQ ID NO: 16645 - DNA, 28 bp, Artificial Sequence
  synthetic circulating small noncoding RNA (sncRNA) 5' transfer RNA (tRNA) half
agagtctcatgctctaccgactgagcta

SEQ ID NO: 16646 - DNA, 16 bp, Artificial Sequence
  synthetic circulating small noncoding RNA (sncRNA) 5' transfer RNA (tRNA) half
cgggccgcctgggtga

SEQ ID NO: 16647 - DNA, 10 bp, Artificial Sequence
  synthetic circulating small noncoding RNA (sncRNA) 5' transfer RNA (tRNA) half
gctctacctc

SEQ ID NO: 16648 - DNA, 21 bp, Artificial Sequence
  synthetic circulating small noncoding RNA (sncRNA) 5' transfer RNA (tRNA) half
cgtgataaccgctacactaca

SEQ ID NO: 16649 - DNA, 22 bp, Artificial Sequence
  synthetic circulating small noncoding RNA (sncRNA) 5' transfer RNA (tRNA) half
gcaccctaagcgagaatcatac

SEQ ID NO: 16650 - DNA, 16 bp, Artificial Sequence
  synthetic circulating small noncoding RNA (sncRNA) 5' transfer RNA (tRNA) half
gagtgctagccattac

SEQ ID NO: 16651 - DNA, 30 bp, Artificial Sequence
  synthetic circulating small noncoding RNA (sncRNA) 5' transfer RNA (tRNA) half
cagagtggttcaattccacctttcgggcgg

SEQ ID NO: 16652 - DNA, 16 bp, Artificial Sequence
  synthetic circulating small noncoding RNA (sncRNA) 5' transfer RNA (tRNA) half
aaatctcgctggggcc

SEQ ID NO: 16653 - DNA, 22 bp, Artificial Sequence
  synthetic circulating small noncoding RNA (sncRNA) 5' transfer RNA (tRNA) half
aagcgagcgctctaccatttga

SEQ ID NO: 16654 - DNA, 12 bp, Artificial Sequence
  synthetic circulating small noncoding RNA (sncRNA) 5' transfer RNA (tRNA) half
ctgcgttggccg

SEQ ID NO: 16655 - DNA, 12 bp, Artificial Sequence
  synthetic circulating small noncoding RNA (sncRNA) 5' transfer RNA (tRNA) half
ggtagcgggatc

SEQ ID NO: 16656 - DNA, 31 bp, Artificial Sequence
  synthetic circulating small noncoding RNA (sncRNA) 5' transfer RNA (tRNA) half
ccgaaacccgggatcgaaccagggaccttta

SEQ ID NO: 16657 - DNA, 30 bp, Artificial Sequence
  synthetic circulating small noncoding RNA (sncRNA) 5' transfer RNA (tRNA) half
ggcgcggtggccaagtggtaaggcgtcggt

SEQ ID NO: 16658 - DNA, 31 bp, Artificial Sequence
  synthetic circulating small noncoding RNA (sncRNA) 5' transfer RNA (tRNA) half
gtcagacgtgctaccattgtgccacgaggtc

SEQ ID NO: 16659 - DNA, 15 bp, Artificial Sequence
  synthetic circulating small noncoding RNA (sncRNA) 5' transfer RNA (tRNA) half
acccgggccgcggcg

SEQ ID NO: 16660 - DNA, 22 bp, Artificial Sequence
  synthetic circulating small noncoding RNA (sncRNA) 5' transfer RNA (tRNA) half
tcgaacccgggtcaactgcttg

SEQ ID NO: 16661 - DNA, 21 bp, Artificial Sequence
  synthetic circulating small noncoding RNA (sncRNA) 5' transfer RNA (tRNA) half
atacccctagaccaacgagcc

SEQ ID NO: 16662 - DNA, 12 bp, Artificial Sequence
  synthetic circulating small noncoding RNA (sncRNA) 5' transfer RNA (tRNA) half
tgagctatccgg

SEQ ID NO: 16663 - DNA, 21 bp, Artificial Sequence
  synthetic circulating small noncoding RNA (sncRNA) 5' transfer RNA (tRNA) half
gtgattcgaacacgcagcctt

SEQ ID NO: 16664 - DNA, 8 bp, Artificial Sequence
  synthetic circulating small noncoding RNA (sncRNA) 5' transfer RNA (tRNA) half
gcgccacg

SEQ ID NO: 16665 - DNA, 13 bp, Artificial Sequence
  synthetic circulating small noncoding RNA (sncRNA) 5' transfer RNA (tRNA) half
gaggcgtgggttc

SEQ ID NO: 16666 - DNA, 35 bp, Artificial Sequence
  synthetic circulating small noncoding RNA (sncRNA) 5' transfer RNA (tRNA) half
accgggggtatagctcagtggtagagcatttgact

SEQ ID NO: 16667 - DNA, 39 bp, Artificial Sequence
  synthetic circulating small noncoding RNA (sncRNA) 5' transfer RNA (tRNA) half
ggttagcactctggactctgaatccagcgatccgagttc

SEQ ID NO: 16668 - DNA, 30 bp, Artificial Sequence
  synthetic circulating small noncoding RNA (sncRNA) 5' transfer RNA (tRNA) half
ggattgtgggttcgagtcccatctggggtg

SEQ ID NO: 16669 - DNA, 29 bp, Artificial Sequence
  synthetic circulating small noncoding RNA (sncRNA) 5' transfer RNA (tRNA) half
aggtccctggttcgatcccgggtttcggc

SEQ ID NO: 16670 - DNA, 5 bp, Artificial Sequence
  synthetic circulating small noncoding RNA (sncRNA) 5' transfer RNA (tRNA) half
accgg

SEQ ID NO: 16671 - DNA, 18 bp, Artificial Sequence
  synthetic circulating small noncoding RNA (sncRNA) 5' transfer RNA (tRNA) half
gttggtagagcatgagac

SEQ ID NO: 16672 - DNA, 42 bp, Artificial Sequence
  synthetic circulating small noncoding RNA (sncRNA) 5' transfer RNA (tRNA) half
ggttccatggtgtaatggttagcactctggactctgaatcca

SEQ ID NO: 16673 - DNA, 25 bp, Artificial Sequence
  synthetic circulating small noncoding RNA (sncRNA) 5' transfer RNA (tRNA) half
actcggatcgctggattcagagtcc

SEQ ID NO: 16674 - DNA, 34 bp, Artificial Sequence
  synthetic circulating small noncoding RNA (sncRNA) 5' transfer RNA (tRNA) half
accgaccacgaagggactcgaaccctcaatcttc

SEQ ID NO: 16675 - DNA, 26 bp, Artificial Sequence
  synthetic circulating small noncoding RNA (sncRNA) 5' transfer RNA (tRNA) half
ccgggaatcgaacccgggccgcggcg

SEQ ID NO: 16676 - DNA, 21 bp, Artificial Sequence
  synthetic circulating small noncoding RNA (sncRNA) 5' transfer RNA (tRNA) half
tagtcgtggccgagtggttaa

SEQ ID NO: 16677 - DNA, 7 bp, Artificial Sequence
  synthetic circulating small noncoding RNA (sncRNA) 5' transfer RNA (tRNA) half
agcccgt

SEQ ID NO: 16678 - DNA, 28 bp, Artificial Sequence
  synthetic circulating small noncoding RNA (sncRNA) 5' transfer RNA (tRNA) half
gagcaacttgtcagaagtgggattcgaa

SEQ ID NO: 16679 - DNA, 21 bp, Artificial Sequence
  synthetic circulating small noncoding RNA (sncRNA) 5' transfer RNA (tRNA) half
cgggaatcgaacccgggtcaa

SEQ ID NO: 16680 - DNA, 35 bp, Artificial Sequence
  synthetic circulating small noncoding RNA (sncRNA) 5' transfer RNA (tRNA) half
tggattcaaagtccagagtgctaaccattacacca

SEQ ID NO: 16681 - DNA, 9 bp, Artificial Sequence
  synthetic circulating small noncoding RNA (sncRNA) 5' transfer RNA (tRNA) half
agtggggcc

SEQ ID NO: 16682 - DNA, 24 bp, Artificial Sequence
  synthetic circulating small noncoding RNA (sncRNA) 5' transfer RNA (tRNA) half
tcgaacccatgcgtgcagagcaca

SEQ ID NO: 16683 - DNA, 36 bp, Artificial Sequence
  synthetic circulating small noncoding RNA (sncRNA) 5' transfer RNA (tRNA) half
tatgaccccgacgtgattcgaacacgcagccttctg

SEQ ID NO: 16684 - DNA, 15 bp, Artificial Sequence
  synthetic circulating small noncoding RNA (sncRNA) 5' transfer RNA (tRNA) half
tgggtggttcagtgg

SEQ ID NO: 16685 - DNA, 18 bp, Artificial Sequence
  synthetic circulating small noncoding RNA (sncRNA) 5' transfer RNA (tRNA) half
tccgactccgccgggact

SEQ ID NO: 16686 - DNA, 24 bp, Artificial Sequence
  synthetic circulating small noncoding RNA (sncRNA) 5' transfer RNA (tRNA) half
cagggttcaagtccctgttcaggc

SEQ ID NO: 16687 - DNA, 22 bp, Artificial Sequence
  synthetic circulating small noncoding RNA (sncRNA) 5' transfer RNA (tRNA) half
gaacccacgcctccaggggaga

SEQ ID NO: 16688 - DNA, 20 bp, Artificial Sequence
  synthetic circulating small noncoding RNA (sncRNA) 5' transfer RNA (tRNA) half
gtaaaccaggggtcgcgagt

SEQ ID NO: 16689 - DNA, 22 bp, Artificial Sequence
  synthetic circulating small noncoding RNA (sncRNA) 5' transfer RNA (tRNA) half
gttcgatccccggcacctccac

SEQ ID NO: 16690 - DNA, 18 bp, Artificial Sequence
  synthetic circulating small noncoding RNA (sncRNA) 5' transfer RNA (tRNA) half
gtcaggagtgggattcga

SEQ ID NO: 16691 - DNA, 23 bp, Artificial Sequence
  synthetic circulating small noncoding RNA (sncRNA) 5' transfer RNA (tRNA) half
cgggttcaaatcccggacgagcc

SEQ ID NO: 16692 - DNA, 15 bp, Artificial Sequence
  synthetic circulating small noncoding RNA (sncRNA) 5' transfer RNA (tRNA) half
gagccggactcgaac

SEQ ID NO: 16693 - DNA, 42 bp, Artificial Sequence
  synthetic circulating small noncoding RNA (sncRNA) 5' transfer RNA (tRNA) half
ttcacccaggcggcccgggttcgactcccggtatgggaacag

SEQ ID NO: 16694 - DNA, 12 bp, Artificial Sequence
  synthetic circulating small noncoding RNA (sncRNA) 5' transfer RNA (tRNA) half
tggcaggcgaga

SEQ ID NO: 16695 - DNA, 46 bp, Artificial Sequence
  synthetic circulating small noncoding RNA (sncRNA) 5' transfer RNA (tRNA) half
tctccccgtcggggaatcgaaccccggtctcccgcgtgacaggcgg

SEQ ID NO: 16696 - DNA, 20 bp, Artificial Sequence
  synthetic circulating small noncoding RNA (sncRNA) 5' transfer RNA (tRNA) half
aacctgcgcggggagacccc

SEQ ID NO: 16697 - DNA, 13 bp, Artificial Sequence
  synthetic circulating small noncoding RNA (sncRNA) 5' transfer RNA (tRNA) half
atcacgtctgctt

SEQ ID NO: 16698 - DNA, 44 bp, Artificial Sequence
  synthetic circulating small noncoding RNA (sncRNA) 5' transfer RNA (tRNA) half
gctccagtctcttcgggggcgtgggttcgaatcccaccgctgcc

SEQ ID NO: 16699 - DNA, 20 bp, Artificial Sequence
  synthetic circulating small noncoding RNA (sncRNA) 5' transfer RNA (tRNA) half
aaccactcggccattctggt

SEQ ID NO: 16700 - DNA, 32 bp, Artificial Sequence
  synthetic circulating small noncoding RNA (sncRNA) 5' transfer RNA (tRNA) half
acccacgccatcgaaatgactggagcctaaat

SEQ ID NO: 16701 - DNA, 22 bp, Artificial Sequence
  synthetic circulating small noncoding RNA (sncRNA) 5' transfer RNA (tRNA) half
gggtggttcagtggtagaattc

SEQ ID NO: 16702 - DNA, 33 bp, Artificial Sequence
  synthetic circulating small noncoding RNA (sncRNA) 5' transfer RNA (tRNA) half
cctggtggtctagtggttaggattcggcgctct

SEQ ID NO: 16703 - DNA, 31 bp, Artificial Sequence
  synthetic circulating small noncoding RNA (sncRNA) 5' transfer RNA (tRNA) half
aaaaccaggaatcctaaccgctagaccatat

SEQ ID NO: 16704 - DNA, 12 bp, Artificial Sequence
  synthetic circulating small noncoding RNA (sncRNA) 5' transfer RNA (tRNA) half
tctcggtgggac

SEQ ID NO: 16705 - DNA, 14 bp, Artificial Sequence
  synthetic circulating small noncoding RNA (sncRNA) 5' transfer RNA (tRNA) half
agtatccccgcctg

SEQ ID NO: 16706 - DNA, 33 bp, Artificial Sequence
  synthetic circulating small noncoding RNA (sncRNA) 5' transfer RNA (tRNA) half
tgtagtggttatcacgttcgcctcacacgcgaa

SEQ ID NO: 16707 - DNA, 34 bp, Artificial Sequence
  synthetic circulating small noncoding RNA (sncRNA) 5' transfer RNA (tRNA) half
ccgggggtatagctcagtggtagagcatttgact

SEQ ID NO: 16708 - DNA, 31 bp, Artificial Sequence
  synthetic circulating small noncoding RNA (sncRNA) 5' transfer RNA (tRNA) half
gatccatcgacctctgggttatgggcccagc

SEQ ID NO: 16709 - DNA, 30 bp, Artificial Sequence
  synthetic circulating small noncoding RNA (sncRNA) 5' transfer RNA (tRNA) half
ccagtggcctaatggataaggcatcagcct

SEQ ID NO: 16710 - DNA, 17 bp, Artificial Sequence
  synthetic circulating small noncoding RNA (sncRNA) 5' transfer RNA (tRNA) half
ttcgactcccggtgtgg

SEQ ID NO: 16711 - DNA, 27 bp, Artificial Sequence
  synthetic circulating small noncoding RNA (sncRNA) 5' transfer RNA (tRNA) half
aatccattggggtctccccgcgcaggt

SEQ ID NO: 16712 - DNA, 17 bp, Artificial Sequence
  synthetic circulating small noncoding RNA (sncRNA) 5' transfer RNA (tRNA) half
ccgttgcgccacgaggt

SEQ ID NO: 16713 - DNA, 28 bp, Artificial Sequence
  synthetic circulating small noncoding RNA (sncRNA) 5' transfer RNA (tRNA) half
ggtgagcactctggactctgaatccagc

SEQ ID NO: 16714 - DNA, 22 bp, Artificial Sequence
  synthetic circulating small noncoding RNA (sncRNA) 5' transfer RNA (tRNA) half
gctcccttcgatagctcagctg

SEQ ID NO: 16715 - DNA, 37 bp, Artificial Sequence
  synthetic circulating small noncoding RNA (sncRNA) 5' transfer RNA (tRNA) half
gattaagagtctcatgctctaccgactgagctagccg

SEQ ID NO: 16716 - DNA, 30 bp, Artificial Sequence
  synthetic circulating small noncoding RNA (sncRNA) 5' transfer RNA (tRNA) half
ttgagggttcgaatcccttcgtggttggta

SEQ ID NO: 16717 - DNA, 16 bp, Artificial Sequence
  synthetic circulating small noncoding RNA (sncRNA) 5' transfer RNA (tRNA) half
cgaacccggggcctca

SEQ ID NO: 16718 - DNA, 32 bp, Artificial Sequence
  synthetic circulating small noncoding RNA (sncRNA) 5' transfer RNA (tRNA) half
gtcggggaattgaaccccggtctcccgcgtga

SEQ ID NO: 16719 - DNA, 39 bp, Artificial Sequence
  synthetic circulating small noncoding RNA (sncRNA) 5' transfer RNA (tRNA) half
cctaagccagggattgtgggttcgagtcccatctggggt

SEQ ID NO: 16720 - DNA, 19 bp, Artificial Sequence
  synthetic circulating small noncoding RNA (sncRNA) 5' transfer RNA (tRNA) half
ccgattgcgccacggagac

SEQ ID NO: 16721 - DNA, 14 bp, Artificial Sequence
  synthetic circulating small noncoding RNA (sncRNA) 5' transfer RNA (tRNA) half
tgagtatccccgcc

SEQ ID NO: 16722 - DNA, 11 bp, Artificial Sequence
  synthetic circulating small noncoding RNA (sncRNA) 5' transfer RNA (tRNA) half
tatgattctcg

SEQ ID NO: 16723 - DNA, 19 bp, Artificial Sequence
  synthetic circulating small noncoding RNA (sncRNA) 5' transfer RNA (tRNA) half
cgaatgtgataaccactac

SEQ ID NO: 16724 - DNA, 43 bp, Artificial Sequence
  synthetic circulating small noncoding RNA (sncRNA) 5' transfer RNA (tRNA) half
gttgcgttggccgggaatcgaacccgggtcaactgcttggaag

SEQ ID NO: 16725 - DNA, 38 bp, Artificial Sequence
  synthetic circulating small noncoding RNA (sncRNA) 5' transfer RNA (tRNA) half
agtctcatgctctaccgactgagctagccgggcgactg

SEQ ID NO: 16726 - DNA, 16 bp, Artificial Sequence
  synthetic circulating small noncoding RNA (sncRNA) 5' transfer RNA (tRNA) half
cttaggtcgctggttc

SEQ ID NO: 16727 - DNA, 20 bp, Artificial Sequence
  synthetic circulating small noncoding RNA (sncRNA) 5' transfer RNA (tRNA) half
cagttgtcaggagtgggatt

SEQ ID NO: 16728 - DNA, 33 bp, Artificial Sequence
  synthetic circulating small noncoding RNA (sncRNA) 5' transfer RNA (tRNA) half
cgtctccccgtcggggaatcgaaccccggtctc

SEQ ID NO: 16729 - DNA, 19 bp, Artificial Sequence
  synthetic circulating small noncoding RNA (sncRNA) 5' transfer RNA (tRNA) half
ctcccgcgtggcaggcgag

SEQ ID NO: 16730 - DNA, 12 bp, Artificial Sequence
  synthetic circulating small noncoding RNA (sncRNA) 5' transfer RNA (tRNA) half
gagcatgagact

SEQ ID NO: 16731 - DNA, 32 bp, Artificial Sequence
  synthetic circulating small noncoding RNA (sncRNA) 5' transfer RNA (tRNA) half
tctcatgctctaccgactgagctagccgggcg

SEQ ID NO: 16732 - DNA, 33 bp, Artificial Sequence
  synthetic circulating small noncoding RNA (sncRNA) 5' transfer RNA (tRNA) half
acaggcggggatactaaccactatactaacgag

SEQ ID NO: 16733 - DNA, 33 bp, Artificial Sequence
  synthetic circulating small noncoding RNA (sncRNA) 5' transfer RNA (tRNA) half
agggattgtgggttcgagtcccacctggggtaa

SEQ ID NO: 16734 - DNA, 21 bp, Artificial Sequence
  synthetic circulating small noncoding RNA (sncRNA) 5' transfer RNA (tRNA) half
actctgagggggcacccggat

SEQ ID NO: 16735 - DNA, 38 bp, Artificial Sequence
  synthetic circulating small noncoding RNA (sncRNA) 5' transfer RNA (tRNA) half
cggcaggattcgaacctgcgcggggaaaccccaatgga

SEQ ID NO: 16736 - DNA, 22 bp, Artificial Sequence
  synthetic circulating small noncoding RNA (sncRNA) 5' transfer RNA (tRNA) half
ggcaccgctgggattcgaaccc

SEQ ID NO: 16737 - DNA, 22 bp, Artificial Sequence
  synthetic circulating small noncoding RNA (sncRNA) 5' transfer RNA (tRNA) half
tgcgctctaccactgagctaca

SEQ ID NO: 16738 - DNA, 21 bp, Artificial Sequence
  synthetic circulating small noncoding RNA (sncRNA) 5' transfer RNA (tRNA) half
agctgaccccgacgtgatttg

SEQ ID NO: 16739 - DNA, 23 bp, Artificial Sequence
  synthetic circulating small noncoding RNA (sncRNA) 5' transfer RNA (tRNA) half
ctaaccactatacgatctcggca

SEQ ID NO: 16740 - DNA, 19 bp, Artificial Sequence
  synthetic circulating small noncoding RNA (sncRNA) 5' transfer RNA (tRNA) half
attcatgaccccgacgtga

SEQ ID NO: 16741 - DNA, 15 bp, Artificial Sequence
  synthetic circulating small noncoding RNA (sncRNA) 5' transfer RNA (tRNA) half
gactcgaaccagcga

SEQ ID NO: 16742 - DNA, 16 bp, Artificial Sequence
  synthetic circulating small noncoding RNA (sncRNA) 5' transfer RNA (tRNA) half
aaaggtccccggttcg

SEQ ID NO: 16743 - DNA, 36 bp, Artificial Sequence
  synthetic circulating small noncoding RNA (sncRNA) 5' transfer RNA (tRNA) half
taggttccaccgagatttgaactcggatcgctggat

SEQ ID NO: 16744 - DNA, 11 bp, Artificial Sequence
  synthetic circulating small noncoding RNA (sncRNA) 5' transfer RNA (tRNA) half
tggcccgtacg

SEQ ID NO: 16745 - DNA, 28 bp, Artificial Sequence
  synthetic circulating small noncoding RNA (sncRNA) 5' transfer RNA (tRNA) half
attggtggttcaatggtagaattctcgc

SEQ ID NO: 16746 - DNA, 9 bp, Artificial Sequence
  synthetic circulating small noncoding RNA (sncRNA) 5' transfer RNA (tRNA) half
agtactaac

SEQ ID NO: 16747 - DNA, 37 bp, Artificial Sequence
  synthetic circulating small noncoding RNA (sncRNA) 5' transfer RNA (tRNA) half
gtttccgtagtgtagtggtcatcacgctcgcctcaca

SEQ ID NO: 16748 - DNA, 7 bp, Artificial Sequence
  synthetic circulating small noncoding RNA (sncRNA) 5' transfer RNA (tRNA) half
ccccgac

SEQ ID NO: 16749 - DNA, 45 bp, Artificial Sequence
  synthetic circulating small noncoding RNA (sncRNA) 5' transfer RNA (tRNA) half
gggccgcctgggtgaaaaccaggaatcctaaccgctagaccatgt

SEQ ID NO: 16750 - DNA, 41 bp, Artificial Sequence
  synthetic circulating small noncoding RNA (sncRNA) 5' transfer RNA (tRNA) half
ttcgcgtgtgaggcgaacgtgataaccactacactacggaa

SEQ ID NO: 16751 - DNA, 17 bp, Artificial Sequence
  synthetic circulating small noncoding RNA (sncRNA) 5' transfer RNA (tRNA) half
ccgggcctcccgcgtgg

SEQ ID NO: 16752 - DNA, 34 bp, Artificial Sequence
  synthetic circulating small noncoding RNA (sncRNA) 5' transfer RNA (tRNA) half
atctcagggtcgtgggttcgagccccacgttggg

SEQ ID NO: 16753 - DNA, 13 bp, Artificial Sequence
  synthetic circulating small noncoding RNA (sncRNA) 5' transfer RNA (tRNA) half
agtcagacgcgtt

SEQ ID NO: 16754 - DNA, 33 bp, Artificial Sequence
  synthetic circulating small noncoding RNA (sncRNA) 5' transfer RNA (tRNA) half
acccagctagctcagtgggtagagcatgagact

SEQ ID NO: 16755 - DNA, 20 bp, Artificial Sequence
  synthetic circulating small noncoding RNA (sncRNA) 5' transfer RNA (tRNA) half
agatgtgcattggccgggaa

SEQ ID NO: 16756 - DNA, 34 bp, Artificial Sequence
  synthetic circulating small noncoding RNA (sncRNA) 5' transfer RNA (tRNA) half
actcggatcgctggattcaaagtccagagtgcta

SEQ ID NO: 16757 - DNA, 15 bp, Artificial Sequence
  synthetic circulating small noncoding RNA (sncRNA) 5' transfer RNA (tRNA) half
ccgccgcggcccggg

SEQ ID NO: 16758 - DNA, 23 bp, Artificial Sequence
  synthetic circulating small noncoding RNA (sncRNA) 5' transfer RNA (tRNA) half
ggaatcgaacccgggccgcggcg

SEQ ID NO: 16759 - DNA, 26 bp, Artificial Sequence
  synthetic circulating small noncoding RNA (sncRNA) 5' transfer RNA (tRNA) half
atctccccgtcggggaatcgaacccc

SEQ ID NO: 16760 - DNA, 10 bp, Artificial Sequence
  synthetic circulating small noncoding RNA (sncRNA) 5' transfer RNA (tRNA) half
gttcgaatcc

SEQ ID NO: 16761 - DNA, 20 bp, Artificial Sequence
  synthetic circulating small noncoding RNA (sncRNA) 5' transfer RNA (tRNA) half
cggagctggggattgtgggt

SEQ ID NO: 16762 - DNA, 23 bp, Artificial Sequence
  synthetic circulating small noncoding RNA (sncRNA) 5' transfer RNA (tRNA) half
tcaaatcccggacgagccctgta

SEQ ID NO: 16763 - DNA, 17 bp, Artificial Sequence
  synthetic circulating small noncoding RNA (sncRNA) 5' transfer RNA (tRNA) half
cgggagaccggggttcg

SEQ ID NO: 16764 - DNA, 24 bp, Artificial Sequence
  synthetic circulating small noncoding RNA (sncRNA) 5' transfer RNA (tRNA) half
gagctgccgaaacccgggatcgaa

SEQ ID NO: 16765 - DNA, 37 bp, Artificial Sequence
  synthetic circulating small noncoding RNA (sncRNA) 5' transfer RNA (tRNA) half
acaggagatcctgggttcgactcccagtggggccttc

SEQ ID NO: 16766 - DNA, 21 bp, Artificial Sequence
  synthetic circulating small noncoding RNA (sncRNA) 5' transfer RNA (tRNA) half
cgtcacgaacaggattcgaac

SEQ ID NO: 16767 - DNA, 26 bp, Artificial Sequence
  synthetic circulating small noncoding RNA (sncRNA) 5' transfer RNA (tRNA) half
ccccgggttcgatccccggcatctcc

SEQ ID NO: 16768 - DNA, 33 bp, Artificial Sequence
  synthetic circulating small noncoding RNA (sncRNA) 5' transfer RNA (tRNA) half
tgtgaggcgaacgtgataaccactacactacgg

SEQ ID NO: 16769 - DNA, 7 bp, Artificial Sequence
  synthetic circulating small noncoding RNA (sncRNA) 5' transfer RNA (tRNA) half
cggctcg

SEQ ID NO: 16770 - DNA, 18 bp, Artificial Sequence
  synthetic circulating small noncoding RNA (sncRNA) 5' transfer RNA (tRNA) half
ctaccgactgagctagcc

SEQ ID NO: 16771 - DNA, 10 bp, Artificial Sequence
  synthetic circulating small noncoding RNA (sncRNA) 5' transfer RNA (tRNA) half
atcctcgtcg

SEQ ID NO: 16772 - DNA, 23 bp, Artificial Sequence
  synthetic circulating small noncoding RNA (sncRNA) 5' transfer RNA (tRNA) half
ggttcgaatcctgccgactacgt

SEQ ID NO: 16773 - DNA, 18 bp, Artificial Sequence
  synthetic circulating small noncoding RNA (sncRNA) 5' transfer RNA (tRNA) half
ataacccagaggtcgatg

SEQ ID NO: 16774 - DNA, 12 bp, Artificial Sequence
  synthetic circulating small noncoding RNA (sncRNA) 5' transfer RNA (tRNA) half
cccgggttcgac

SEQ ID NO: 16775 - DNA, 15 bp, Artificial Sequence
  synthetic circulating small noncoding RNA (sncRNA) 5' transfer RNA (tRNA) half
cgagaatcatacccc

SEQ ID NO: 16776 - DNA, 36 bp, Artificial Sequence
  synthetic circulating small noncoding RNA (sncRNA) 5' transfer RNA (tRNA) half
ttagcactctggactttgaatccagcgatccgagtt

SEQ ID NO: 16777 - DNA, 27 bp, Artificial Sequence
  synthetic circulating small noncoding RNA (sncRNA) 5' transfer RNA (tRNA) half
ggaagcgtgctgggcccataacccaga

SEQ ID NO: 16778 - DNA, 19 bp, Artificial Sequence
  synthetic circulating small noncoding RNA (sncRNA) 5' transfer RNA (tRNA) half
agactgacgcgctacctac

SEQ ID NO: 16779 - DNA, 23 bp, Artificial Sequence
  synthetic circulating small noncoding RNA (sncRNA) 5' transfer RNA (tRNA) half
cttaaccactcggccatcacagc

SEQ ID NO: 16780 - DNA, 43 bp, Artificial Sequence
  synthetic circulating small noncoding RNA (sncRNA) 5' transfer RNA (tRNA) half
ttcgacgaggatgggattcgaacccatgcgtgcagagcacaat

SEQ ID NO: 16781 - DNA, 34 bp, Artificial Sequence
  synthetic circulating small noncoding RNA (sncRNA) 5' transfer RNA (tRNA) half
ttaatctgagggtccagggttcaagtccctgttc

SEQ ID NO: 16782 - DNA, 13 bp, Artificial Sequence
  synthetic circulating small noncoding RNA (sncRNA) 5' transfer RNA (tRNA) half
ggccacaacgcag

SEQ ID NO: 16783 - DNA, 35 bp, Artificial Sequence
  synthetic circulating small noncoding RNA (sncRNA) 5' transfer RNA (tRNA) half
gccgcggcggtgagagcgccgaatcctaaccacta

SEQ ID NO: 16784 - DNA, 19 bp, Artificial Sequence
  synthetic circulating small noncoding RNA (sncRNA) 5' transfer RNA (tRNA) half
tcaccgccgcggcccgggt

SEQ ID NO: 16785 - DNA, 33 bp, Artificial Sequence
  synthetic circulating small noncoding RNA (sncRNA) 5' transfer RNA (tRNA) half
tagtttccgtagtgtagtggttatcacgttcgc

SEQ ID NO: 16786 - DNA, 30 bp, Artificial Sequence
  synthetic circulating small noncoding RNA (sncRNA) 5' transfer RNA (tRNA) half
cgagccagccaggagtcgaacctggaatct

SEQ ID NO: 16787 - DNA, 20 bp, Artificial Sequence
  synthetic circulating small noncoding RNA (sncRNA) 5' transfer RNA (tRNA) half
aacccacgcctccattcgga

SEQ ID NO: 16788 - DNA, 9 bp, Artificial Sequence
  synthetic circulating small noncoding RNA (sncRNA) 5' transfer RNA (tRNA) half
tcgtccggg

SEQ ID NO: 16789 - DNA, 23 bp, Artificial Sequence
  synthetic circulating small noncoding RNA (sncRNA) 5' transfer RNA (tRNA) half
gagtgctaaccattacaccatgg

SEQ ID NO: 16790 - DNA, 13 bp, Artificial Sequence
  synthetic circulating small noncoding RNA (sncRNA) 5' transfer RNA (tRNA) half
agtccaatgcgct

SEQ ID NO: 16791 - DNA, 34 bp, Artificial Sequence
  synthetic circulating small noncoding RNA (sncRNA) 5' transfer RNA (tRNA) half
ggccgcgtggcctaatggataaggcgtctgactt

SEQ ID NO: 16792 - DNA, 16 bp, Artificial Sequence
  synthetic circulating small noncoding RNA (sncRNA) 5' transfer RNA (tRNA) half
ctggactctgaatcca

SEQ ID NO: 16793 - DNA, 23 bp, Artificial Sequence
  synthetic circulating small noncoding RNA (sncRNA) 5' transfer RNA (tRNA) half
aatcccggacgagcccaagcatt

SEQ ID NO: 16794 - DNA, 14 bp, Artificial Sequence
  synthetic circulating small noncoding RNA (sncRNA) 5' transfer RNA (tRNA) half
agcgccttagaccg

SEQ ID NO: 16795 - DNA, 15 bp, Artificial Sequence
  synthetic circulating small noncoding RNA (sncRNA) 5' transfer RNA (tRNA) half
tgctctacccctgag

SEQ ID NO: 16796 - DNA, 16 bp, Artificial Sequence
  synthetic circulating small noncoding RNA (sncRNA) 5' transfer RNA (tRNA) half
aacccacgcgtgcaga

SEQ ID NO: 16797 - DNA, 11 bp, Artificial Sequence
  synthetic circulating small noncoding RNA (sncRNA) 5' transfer RNA (tRNA) half
tcgtatagggg

SEQ ID NO: 16798 - DNA, 12 bp, Artificial Sequence
  synthetic circulating small noncoding RNA (sncRNA) 5' transfer RNA (tRNA) half
cgtgatcgtata

SEQ ID NO: 16799 - DNA, 33 bp, Artificial Sequence
  synthetic circulating small noncoding RNA (sncRNA) 5' transfer RNA (tRNA) half
gggtccagggttcaagtccctgttcgggcgctt

SEQ ID NO: 16800 - DNA, 12 bp, Artificial Sequence
  synthetic circulating small noncoding RNA (sncRNA) 5' transfer RNA (tRNA) half
ctctaccgactg

SEQ ID NO: 16801 - DNA, 20 bp, Artificial Sequence
  synthetic circulating small noncoding RNA (sncRNA) 5' transfer RNA (tRNA) half
ggttcgagcccacccaggga

SEQ ID NO: 16802 - DNA, 19 bp, Artificial Sequence
  synthetic circulating small noncoding RNA (sncRNA) 5' transfer RNA (tRNA) half
agctacagacgacgaggat

SEQ ID NO: 16803 - DNA, 15 bp, Artificial Sequence
  synthetic circulating small noncoding RNA (sncRNA) 5' transfer RNA (tRNA) half
tcagggtcgtgggtt

SEQ ID NO: 16804 - DNA, 38 bp, Artificial Sequence
  synthetic circulating small noncoding RNA (sncRNA) 5' transfer RNA (tRNA) half
cttaaaaccttgttcccagaggttcaaatcctctccct

SEQ ID NO: 16805 - DNA, 33 bp, Artificial Sequence
  synthetic circulating small noncoding RNA (sncRNA) 5' transfer RNA (tRNA) half
tgtgtcagaagtgggattcgaacccacgcctcc

SEQ ID NO: 16806 - DNA, 14 bp, Artificial Sequence
  synthetic circulating small noncoding RNA (sncRNA) 5' transfer RNA (tRNA) half
cggacgagcccagc

SEQ ID NO: 16807 - DNA, 25 bp, Artificial Sequence
  synthetic circulating small noncoding RNA (sncRNA) 5' transfer RNA (tRNA) half
gttatcacgtctgctttacacgcag

SEQ ID NO: 16808 - DNA, 32 bp, Artificial Sequence
  synthetic circulating small noncoding RNA (sncRNA) 5' transfer RNA (tRNA) half
aagcatgtgctctaccactgagctacatcccc

SEQ ID NO: 16809 - DNA, 43 bp, Artificial Sequence
  synthetic circulating small noncoding RNA (sncRNA) 5' transfer RNA (tRNA) half
cccggatttgaaccagggacctcttgatctgcagtcaaatgct

SEQ ID NO: 16810 - DNA, 21 bp, Artificial Sequence
  synthetic circulating small noncoding RNA (sncRNA) 5' transfer RNA (tRNA) half
ttgggctcgtccgggatttga

SEQ ID NO: 16811 - DNA, 16 bp, Artificial Sequence
  synthetic circulating small noncoding RNA (sncRNA) 5' transfer RNA (tRNA) half
ttccttcgagccggat

SEQ ID NO: 16812 - DNA, 15 bp, Artificial Sequence
  synthetic circulating small noncoding RNA (sncRNA) 5' transfer RNA (tRNA) half
atgccttatccatta

SEQ ID NO: 16813 - DNA, 24 bp, Artificial Sequence
  synthetic circulating small noncoding RNA (sncRNA) 5' transfer RNA (tRNA) half
aatcccggacgagcccaagcattt

SEQ ID NO: 16814 - DNA, 10 bp, Artificial Sequence
  synthetic circulating small noncoding RNA (sncRNA) 5' transfer RNA (tRNA) half
gccggggatc

SEQ ID NO: 16815 - DNA, 12 bp, Artificial Sequence
  synthetic circulating small noncoding RNA (sncRNA) 5' transfer RNA (tRNA) half
gcgttcaggtcg

SEQ ID NO: 16816 - DNA, 21 bp, Artificial Sequence
  synthetic circulating small noncoding RNA (sncRNA) 5' transfer RNA (tRNA) half
aacctgcgcggggaaacccca

SEQ ID NO: 16817 - DNA, 36 bp, Artificial Sequence
  synthetic circulating small noncoding RNA (sncRNA) 5' transfer RNA (tRNA) half
aatgccgaggttgtgagttcgagcctcacctggagc

SEQ ID NO: 16818 - DNA, 22 bp, Artificial Sequence
  synthetic circulating small noncoding RNA (sncRNA) 5' transfer RNA (tRNA) half
accccgacgtgattcgaacacg

SEQ ID NO: 16819 - DNA, 37 bp, Artificial Sequence
  synthetic circulating small noncoding RNA (sncRNA) 5' transfer RNA (tRNA) half
ccgctggtgtagtggtatcatgcaagattcccattct

SEQ ID NO: 16820 - DNA, 23 bp, Artificial Sequence
  synthetic circulating small noncoding RNA (sncRNA) 5' transfer RNA (tRNA) half
gagaccggggttcgattccccga

SEQ ID NO: 16821 - DNA, 14 bp, Artificial Sequence
  synthetic circulating small noncoding RNA (sncRNA) 5' transfer RNA (tRNA) half
gccttatccgttag

SEQ ID NO: 16822 - DNA, 31 bp, Artificial Sequence
  synthetic circulating small noncoding RNA (sncRNA) 5' transfer RNA (tRNA) half
agatcctgggttcgaatcccagcggggcctt

SEQ ID NO: 16823 - DNA, 8 bp, Artificial Sequence
  synthetic circulating small noncoding RNA (sncRNA) 5' transfer RNA (tRNA) half
tcggggtc

SEQ ID NO: 16824 - DNA, 42 bp, Artificial Sequence
  synthetic circulating small noncoding RNA (sncRNA) 5' transfer RNA (tRNA) half
ggctcgttggtctaggggtatgattctcggtttgggtccgag

SEQ ID NO: 16825 - DNA, 24 bp, Artificial Sequence
  synthetic circulating small noncoding RNA (sncRNA) 5' transfer RNA (tRNA) half
atgagcccggatagctcagtcggt

SEQ ID NO: 16826 - DNA, 44 bp, Artificial Sequence
  synthetic circulating small noncoding RNA (sncRNA) 5' transfer RNA (tRNA) half
agtctcatgctctaccgactgagctagccgggcgactgtcactt

SEQ ID NO: 16827 - DNA, 41 bp, Artificial Sequence
  synthetic circulating small noncoding RNA (sncRNA) 5' transfer RNA (tRNA) half
cggaagcgtgctgggcccataacccagaggtcgatggatcg

SEQ ID NO: 16828 - DNA, 25 bp, Artificial Sequence
  synthetic circulating small noncoding RNA (sncRNA) 5' transfer RNA (tRNA) half
ggttccttcgagccggattcgaacc

SEQ ID NO: 16829 - DNA, 15 bp, Artificial Sequence
  synthetic circulating small noncoding RNA (sncRNA) 5' transfer RNA (tRNA) half
gaagattctaggttc

SEQ ID NO: 16830 - DNA, 36 bp, Artificial Sequence
  synthetic circulating small noncoding RNA (sncRNA) 5' transfer RNA (tRNA) half
tggcaggcgagaattctaccactgaaccaccaatgc

SEQ ID NO: 16831 - DNA, 16 bp, Artificial Sequence
  synthetic circulating small noncoding RNA (sncRNA) 5' transfer RNA (tRNA) half
agaggtcccgggttca

SEQ ID NO: 16832 - DNA, 14 bp, Artificial Sequence
  synthetic circulating small noncoding RNA (sncRNA) 5' transfer RNA (tRNA) half
tggttaggattcgg

SEQ ID NO: 16833 - DNA, 13 bp, Artificial Sequence
  synthetic circulating small noncoding RNA (sncRNA) 5' transfer RNA (tRNA) half
agactcgaactcg

SEQ ID NO: 16834 - DNA, 21 bp, Artificial Sequence
  synthetic circulating small noncoding RNA (sncRNA) 5' transfer RNA (tRNA) half
ttatccattaggccacgcggc

SEQ ID NO: 16835 - DNA, 14 bp, Artificial Sequence
  synthetic circulating small noncoding RNA (sncRNA) 5' transfer RNA (tRNA) half
ggtagagcatgaga

SEQ ID NO: 16836 - DNA, 19 bp, Artificial Sequence
  synthetic circulating small noncoding RNA (sncRNA) 5' transfer RNA (tRNA) half
gttggttagagcgtggtgc

SEQ ID NO: 16837 - DNA, 10 bp, Artificial Sequence
  synthetic circulating small noncoding RNA (sncRNA) 5' transfer RNA (tRNA) half
ggccgcctgg

SEQ ID NO: 16838 - DNA, 31 bp, Artificial Sequence
  synthetic circulating small noncoding RNA (sncRNA) 5' transfer RNA (tRNA) half
ggctcgtccgggatttgaacccgggacctct

SEQ ID NO: 16839 - DNA, 30 bp, Artificial Sequence
  synthetic circulating small noncoding RNA (sncRNA) 5' transfer RNA (tRNA) half
aagcgagaatcatacccctagaccaacgag

SEQ ID NO: 16840 - DNA, 14 bp, Artificial Sequence
  synthetic circulating small noncoding RNA (sncRNA) 5' transfer RNA (tRNA) half
cccggatgatcctc

SEQ ID NO: 16841 - DNA, 13 bp, Artificial Sequence
  synthetic circulating small noncoding RNA (sncRNA) 5' transfer RNA (tRNA) half
tcatgctctaccg

SEQ ID NO: 16842 - DNA, 13 bp, Artificial Sequence
  synthetic circulating small noncoding RNA (sncRNA) 5' transfer RNA (tRNA) half
ctcgtggcgcaac

SEQ ID NO: 16843 - DNA, 21 bp, Artificial Sequence
  synthetic circulating small noncoding RNA (sncRNA) 5' transfer RNA (tRNA) half
cgggccaaagctgaagcgttt

SEQ ID NO: 16844 - DNA, 23 bp, Artificial Sequence
  synthetic circulating small noncoding RNA (sncRNA) 5' transfer RNA (tRNA) half
cgtataggggttagtactctgcg

SEQ ID NO: 16845 - DNA, 28 bp, Artificial Sequence
  synthetic circulating small noncoding RNA (sncRNA) 5' transfer RNA (tRNA) half
acccacgaccctgggattaagagtccca

SEQ ID NO: 16846 - DNA, 38 bp, Artificial Sequence
  synthetic circulating small noncoding RNA (sncRNA) 5' transfer RNA (tRNA) half
accgactctggtgggattcgaacccacaacctttgaat

SEQ ID NO: 16847 - DNA, 20 bp, Artificial Sequence
  synthetic circulating small noncoding RNA (sncRNA) 5' transfer RNA (tRNA) half
tcagtggtagagcgcgcgct

SEQ ID NO: 16848 - DNA, 14 bp, Artificial Sequence
  synthetic circulating small noncoding RNA (sncRNA) 5' transfer RNA (tRNA) half
tcgaacccgcgacc

SEQ ID NO: 16849 - DNA, 17 bp, Artificial Sequence
  synthetic circulating small noncoding RNA (sncRNA) 5' transfer RNA (tRNA) half
agagactggagcctaaa

SEQ ID NO: 16850 - DNA, 16 bp, Artificial Sequence
  synthetic circulating small noncoding RNA (sncRNA) 5' transfer RNA (tRNA) half
ggctcgaacccacgac

SEQ ID NO: 16851 - DNA, 32 bp, Artificial Sequence
  synthetic circulating small noncoding RNA (sncRNA) 5' transfer RNA (tRNA) half
ccgagccagccaggagtcgaacctggaatctt

SEQ ID NO: 16852 - DNA, 35 bp, Artificial Sequence
  synthetic circulating small noncoding RNA (sncRNA) 5' transfer RNA (tRNA) half
gaagattgagggttcgagtcccttcgtggtcgaaa

SEQ ID NO: 16853 - DNA, 15 bp, Artificial Sequence
  synthetic circulating small noncoding RNA (sncRNA) 5' transfer RNA (tRNA) half
gatcacggcgagcca

SEQ ID NO: 16854 - DNA, 25 bp, Artificial Sequence
  synthetic circulating small noncoding RNA (sncRNA) 5' transfer RNA (tRNA) half
actcggatcgctggattcaaagtcc

SEQ ID NO: 16855 - DNA, 25 bp, Artificial Sequence
  synthetic circulating small noncoding RNA (sncRNA) 5' transfer RNA (tRNA) half
gaccagtgctctaacccctgagcta

SEQ ID NO: 16856 - DNA, 12 bp, Artificial Sequence
  synthetic circulating small noncoding RNA (sncRNA) 5' transfer RNA (tRNA) half
gtcagaagtggg

SEQ ID NO: 16857 - DNA, 22 bp, Artificial Sequence
  synthetic circulating small noncoding RNA (sncRNA) 5' transfer RNA (tRNA) half
cggttcgaaaccgggcggaaac

SEQ ID NO: 16858 - DNA, 29 bp, Artificial Sequence
  synthetic circulating small noncoding RNA (sncRNA) 5' transfer RNA (tRNA) half
cagtggcctaatggataaggcatcagcct

SEQ ID NO: 16859 - DNA, 17 bp, Artificial Sequence
  synthetic circulating small noncoding RNA (sncRNA) 5' transfer RNA (tRNA) half
gcagcgccttagaccgc

SEQ ID NO: 16860 - DNA, 11 bp, Artificial Sequence
  synthetic circulating small noncoding RNA (sncRNA) 5' transfer RNA (tRNA) half
gggttcgaacc

SEQ ID NO: 16861 - DNA, 14 bp, Artificial Sequence
  synthetic circulating small noncoding RNA (sncRNA) 5' transfer RNA (tRNA) half
cagcggaagcgtgc

SEQ ID NO: 16862 - DNA, 19 bp, Artificial Sequence
  synthetic circulating small noncoding RNA (sncRNA) 5' transfer RNA (tRNA) half
aaccaggggtcgcgagttc

SEQ ID NO: 16863 - DNA, 6 bp, Artificial Sequence
  synthetic circulating small noncoding RNA (sncRNA) 5' transfer RNA (tRNA) half
acggtg

SEQ ID NO: 16864 - DNA, 13 bp, Artificial Sequence
  synthetic circulating small noncoding RNA (sncRNA) 5' transfer RNA (tRNA) half
tcaggtcgcagtc

SEQ ID NO: 16865 - DNA, 29 bp, Artificial Sequence
  synthetic circulating small noncoding RNA (sncRNA) 5' transfer RNA (tRNA) half
ccctggtagtctagtggttaggattcggt

SEQ ID NO: 16866 - DNA, 31 bp, Artificial Sequence
  synthetic circulating small noncoding RNA (sncRNA) 5' transfer RNA (tRNA) half
aggccaatgccttatccattaggccaccggg

SEQ ID NO: 16867 - DNA, 10 bp, Artificial Sequence
  synthetic circulating small noncoding RNA (sncRNA) 5' transfer RNA (tRNA) half
cggcgagcta

SEQ ID NO: 16868 - DNA, 14 bp, Artificial Sequence
  synthetic circulating small noncoding RNA (sncRNA) 5' transfer RNA (tRNA) half
gaaccctggaccct

SEQ ID NO: 16869 - DNA, 26 bp, Artificial Sequence
  synthetic circulating small noncoding RNA (sncRNA) 5' transfer RNA (tRNA) half
cagagtgctaaccattacaccatgga

SEQ ID NO: 16870 - DNA, 33 bp, Artificial Sequence
  synthetic circulating small noncoding RNA (sncRNA) 5' transfer RNA (tRNA) half
agtcccatgctctatggactgagctagccaggc

SEQ ID NO: 16871 - DNA, 14 bp, Artificial Sequence
  synthetic circulating small noncoding RNA (sncRNA) 5' transfer RNA (tRNA) half
cggcccgggttcga

SEQ ID NO: 16872 - DNA, 31 bp, Artificial Sequence
  synthetic circulating small noncoding RNA (sncRNA) 5' transfer RNA (tRNA) half
gcggcccgggttcgattcccggtcagggaaa

SEQ ID NO: 16873 - DNA, 11 bp, Artificial Sequence
  synthetic circulating small noncoding RNA (sncRNA) 5' transfer RNA (tRNA) half
ctcggtggaac

SEQ ID NO: 16874 - DNA, 35 bp, Artificial Sequence
  synthetic circulating small noncoding RNA (sncRNA) 5' transfer RNA (tRNA) half
gtcggggaatcgaaccccggtctcccgcgtgacag

SEQ ID NO: 16875 - DNA, 11 bp, Artificial Sequence
  synthetic circulating small noncoding RNA (sncRNA) 5' transfer RNA (tRNA) half
cgtccgtgcct

SEQ ID NO: 16876 - DNA, 16 bp, Artificial Sequence
  synthetic circulating small noncoding RNA (sncRNA) 5' transfer RNA (tRNA) half
ggagtggggttcgaac

SEQ ID NO: 16877 - DNA, 25 bp, Artificial Sequence
  synthetic circulating small noncoding RNA (sncRNA) 5' transfer RNA (tRNA) half
aaaaagacctgtacattccgagcca

SEQ ID NO: 16878 - DNA, 9 bp, Artificial Sequence
  synthetic circulating small noncoding RNA (sncRNA) 5' transfer RNA (tRNA) half
ccggctcga

SEQ ID NO: 16879 - DNA, 24 bp, Artificial Sequence
  synthetic circulating small noncoding RNA (sncRNA) 5' transfer RNA (tRNA) half
ccggtctcccgcgtgacaggcggg

SEQ ID NO: 16880 - DNA, 31 bp, Artificial Sequence
  synthetic circulating small noncoding RNA (sncRNA) 5' transfer RNA (tRNA) half
aaggtcgcgggttcgatccccgtacgggcca

SEQ ID NO: 16881 - DNA, 31 bp, Artificial Sequence
  synthetic circulating small noncoding RNA (sncRNA) 5' transfer RNA (tRNA) half
agaagattgcaggttcgagtcctgccgcggt

SEQ ID NO: 16882 - DNA, 19 bp, Artificial Sequence
  synthetic circulating small noncoding RNA (sncRNA) 5' transfer RNA (tRNA) half
ttgcattggccgggaatcg

SEQ ID NO: 16883 - DNA, 23 bp, Artificial Sequence
  synthetic circulating small noncoding RNA (sncRNA) 5' transfer RNA (tRNA) half
agctcagtcggtagagcatcaga

SEQ ID NO: 16884 - DNA, 14 bp, Artificial Sequence
  synthetic circulating small noncoding RNA (sncRNA) 5' transfer RNA (tRNA) half
attcgaacccagga

SEQ ID NO: 16885 - DNA, 13 bp, Artificial Sequence
  synthetic circulating small noncoding RNA (sncRNA) 5' transfer RNA (tRNA) half
cgcgtctgactcc

SEQ ID NO: 16886 - DNA, 24 bp, Artificial Sequence
  synthetic circulating small noncoding RNA (sncRNA) 5' transfer RNA (tRNA) half
agtcctccgctctaccaactgagc

SEQ ID NO: 16887 - DNA, 22 bp, Artificial Sequence
  synthetic circulating small noncoding RNA (sncRNA) 5' transfer RNA (tRNA) half
cccgggacctctcgcaccctaa

SEQ ID NO: 16888 - DNA, 15 bp, Artificial Sequence
  synthetic circulating small noncoding RNA (sncRNA) 5' transfer RNA (tRNA) half
ggttccatagtgtag

SEQ ID NO: 16889 - DNA, 17 bp, Artificial Sequence
  synthetic circulating small noncoding RNA (sncRNA) 5' transfer RNA (tRNA) half
tcttcggaggcgtgggt

SEQ ID NO: 16890 - DNA, 26 bp, Artificial Sequence
  synthetic circulating small noncoding RNA (sncRNA) 5' transfer RNA (tRNA) half
aagtaaaaccagggctcgtccgggat

SEQ ID NO: 16891 - DNA, 37 bp, Artificial Sequence
  synthetic circulating small noncoding RNA (sncRNA) 5' transfer RNA (tRNA) half
gtagaattctcgcctgccacgcgggaggcccgggttc

SEQ ID NO: 16892 - DNA, 36 bp, Artificial Sequence
  synthetic circulating small noncoding RNA (sncRNA) 5' transfer RNA (tRNA) half
cgcagaaggtcctgggttcgagccccagtggaacca

SEQ ID NO: 16893 - DNA, 22 bp, Artificial Sequence
  synthetic circulating small noncoding RNA (sncRNA) 5' transfer RNA (tRNA) half
gctcagtggtagagcatttgac

SEQ ID NO: 16894 - DNA, 37 bp, Artificial Sequence
  synthetic circulating small noncoding RNA (sncRNA) 5' transfer RNA (tRNA) half
taccccgggtgggactcgaacccacaatccctggctt

SEQ ID NO: 16895 - DNA, 9 bp, Artificial Sequence
  synthetic circulating small noncoding RNA (sncRNA) 5' transfer RNA (tRNA) half
gggacctct

SEQ ID NO: 16896 - DNA, 27 bp, Artificial Sequence
  synthetic circulating small noncoding RNA (sncRNA) 5' transfer RNA (tRNA) half
tgtgtcaggatggccgagcggtctaag

SEQ ID NO: 16897 - DNA, 19 bp, Artificial Sequence
  synthetic circulating small noncoding RNA (sncRNA) 5' transfer RNA (tRNA) half
aatctgagggtccagggtt

SEQ ID NO: 16898 - DNA, 42 bp, Artificial Sequence
  synthetic circulating small noncoding RNA (sncRNA) 5' transfer RNA (tRNA) half
tactggcccgtacggggatcgaacccgcgaccttggcgttat

SEQ ID NO: 16899 - DNA, 28 bp, Artificial Sequence
  synthetic circulating small noncoding RNA (sncRNA) 5' transfer RNA (tRNA) half
gcctggatagctcagtcggtagagcatc

SEQ ID NO: 16900 - DNA, 12 bp, Artificial Sequence
  synthetic circulating small noncoding RNA (sncRNA) 5' transfer RNA (tRNA) half
atgctctaccga

SEQ ID NO: 16901 - DNA, 13 bp, Artificial Sequence
  synthetic circulating small noncoding RNA (sncRNA) 5' transfer RNA (tRNA) half
gaccacgaaggga

SEQ ID NO: 16902 - DNA, 24 bp, Artificial Sequence
  synthetic circulating small noncoding RNA (sncRNA) 5' transfer RNA (tRNA) half
tgtagtggtcatcacgctcgccta

SEQ ID NO: 16903 - DNA, 8 bp, Artificial Sequence
  synthetic circulating small noncoding RNA (sncRNA) 5' transfer RNA (tRNA) half
gcccagca

SEQ ID NO: 16904 - DNA, 22 bp, Artificial Sequence
  synthetic circulating small noncoding RNA (sncRNA) 5' transfer RNA (tRNA) half
caacggtagcgcgtctgactcc

SEQ ID NO: 16905 - DNA, 18 bp, Artificial Sequence
  synthetic circulating small noncoding RNA (sncRNA) 5' transfer RNA (tRNA) half
ctaaccactagaccacca

SEQ ID NO: 16906 - DNA, 6 bp, Artificial Sequence
  synthetic circulating small noncoding RNA (sncRNA) 5' transfer RNA (tRNA) half
ggtcga

SEQ ID NO: 16907 - DNA, 22 bp, Artificial Sequence
  synthetic circulating small noncoding RNA (sncRNA) 5' transfer RNA (tRNA) half
caggcggggatactcaccacta

SEQ ID NO: 16908 - DNA, 20 bp, Artificial Sequence
  synthetic circulating small noncoding RNA (sncRNA) 5' transfer RNA (tRNA) half
aaggcatcagcctccggagc

SEQ ID NO: 16909 - DNA, 6 bp, Artificial Sequence
  synthetic circulating small noncoding RNA (sncRNA) 5' transfer RNA (tRNA) half
cggtcg

SEQ ID NO: 16910 - DNA, 31 bp, Artificial Sequence
  synthetic circulating small noncoding RNA (sncRNA) 5' transfer RNA (tRNA) half
aagattgcaggttcgagtcctgccgcggtcg

SEQ ID NO: 16911 - DNA, 40 bp, Artificial Sequence
  synthetic circulating small noncoding RNA (sncRNA) 5' transfer RNA (tRNA) half
tccctgaccgggaatcgaacccgggccgcggcggtgagag

SEQ ID NO: 16912 - DNA, 34 bp, Artificial Sequence
  synthetic circulating small noncoding RNA (sncRNA) 5' transfer RNA (tRNA) half
gacagagtggttcaattccacctttcgggcggga

SEQ ID NO: 16913 - DNA, 18 bp, Artificial Sequence
  synthetic circulating small noncoding RNA (sncRNA) 5' transfer RNA (tRNA) half
actcggatcgctggattc

SEQ ID NO: 16914 - DNA, 14 bp, Artificial Sequence
  synthetic circulating small noncoding RNA (sncRNA) 5' transfer RNA (tRNA) half
tgtgaggatcgaac

SEQ ID NO: 16915 - DNA, 19 bp, Artificial Sequence
  synthetic circulating small noncoding RNA (sncRNA) 5' transfer RNA (tRNA) half
tggccgagcggtctaaggc

SEQ ID NO: 16916 - DNA, 8 bp, Artificial Sequence
  synthetic circulating small noncoding RNA (sncRNA) 5' transfer RNA (tRNA) half
gcgcttcg

SEQ ID NO: 16917 - DNA, 13 bp, Artificial Sequence
  synthetic circulating small noncoding RNA (sncRNA) 5' transfer RNA (tRNA) half
tgttccgactccg

SEQ ID NO: 16918 - DNA, 29 bp, Artificial Sequence
  synthetic circulating small noncoding RNA (sncRNA) 5' transfer RNA (tRNA) half
gccgctggtgtagtggtatcatgcaagat

SEQ ID NO: 16919 - DNA, 24 bp, Artificial Sequence
  synthetic circulating small noncoding RNA (sncRNA) 5' transfer RNA (tRNA) half
aactcaggaccttcagattatgag

SEQ ID NO: 16920 - DNA, 6 bp, Artificial Sequence
  synthetic circulating small noncoding RNA (sncRNA) 5' transfer RNA (tRNA) half
tcgccg

SEQ ID NO: 16921 - DNA, 32 bp, Artificial Sequence
  synthetic circulating small noncoding RNA (sncRNA) 5' transfer RNA (tRNA) half
tatgattctcgctttgggtgcgagaggtcccg

SEQ ID NO: 16922 - DNA, 13 bp, Artificial Sequence
  synthetic circulating small noncoding RNA (sncRNA) 5' transfer RNA (tRNA) half
gtgacaggcgggg

SEQ ID NO: 16923 - DNA, 23 bp, Artificial Sequence
  synthetic circulating small noncoding RNA (sncRNA) 5' transfer RNA (tRNA) half
tgaactcggatcgctggattcaa

SEQ ID NO: 16924 - DNA, 20 bp, Artificial Sequence
  synthetic circulating small noncoding RNA (sncRNA) 5' transfer RNA (tRNA) half
tggtctagtggtatgattct

SEQ ID NO: 16925 - DNA, 15 bp, Artificial Sequence
  synthetic circulating small noncoding RNA (sncRNA) 5' transfer RNA (tRNA) half
aaggttgtgggttcg

SEQ ID NO: 16926 - DNA, 24 bp, Artificial Sequence
  synthetic circulating small noncoding RNA (sncRNA) 5' transfer RNA (tRNA) half
atataacgtgtttccgcccggttt

SEQ ID NO: 16927 - DNA, 24 bp, Artificial Sequence
  synthetic circulating small noncoding RNA (sncRNA) 5' transfer RNA (tRNA) half
gggagtcgaacccgggccgcctgg

SEQ ID NO: 16928 - DNA, 35 bp, Artificial Sequence
  synthetic circulating small noncoding RNA (sncRNA) 5' transfer RNA (tRNA) half
agaagattccaggttcgactcctggctggctcgtt

SEQ ID NO: 16929 - DNA, 11 bp, Artificial Sequence
  synthetic circulating small noncoding RNA (sncRNA) 5' transfer RNA (tRNA) half
cacgttcgcct

SEQ ID NO: 16930 - DNA, 21 bp, Artificial Sequence
  synthetic circulating small noncoding RNA (sncRNA) 5' transfer RNA (tRNA) half
gttcgagtcctgccgcggtcg

SEQ ID NO: 16931 - DNA, 22 bp, Artificial Sequence
  synthetic circulating small noncoding RNA (sncRNA) 5' transfer RNA (tRNA) half
tgggttcgaatcccagtggggc

SEQ ID NO: 16932 - DNA, 20 bp, Artificial Sequence
  synthetic circulating small noncoding RNA (sncRNA) 5' transfer RNA (tRNA) half
ctggtgtagtggtatcatgc

SEQ ID NO: 16933 - DNA, 16 bp, Artificial Sequence
  synthetic circulating small noncoding RNA (sncRNA) 5' transfer RNA (tRNA) half
gcactctggactctga

SEQ ID NO: 16934 - DNA, 22 bp, Artificial Sequence
  synthetic circulating small noncoding RNA (sncRNA) 5' transfer RNA (tRNA) half
caggcttcaaacctgtagctgt

SEQ ID NO: 16935 - DNA, 12 bp, Artificial Sequence
  synthetic circulating small noncoding RNA (sncRNA) 5' transfer RNA (tRNA) half
gtctcttcgggg

SEQ ID NO: 16936 - DNA, 24 bp, Artificial Sequence
  synthetic circulating small noncoding RNA (sncRNA) 5' transfer RNA (tRNA) half
ttaggattcggcgctctcaccgcc

SEQ ID NO: 16937 - DNA, 21 bp, Artificial Sequence
  synthetic circulating small noncoding RNA (sncRNA) 5' transfer RNA (tRNA) half
gcagcgccttagaccgctcgg

SEQ ID NO: 16938 - DNA, 27 bp, Artificial Sequence
  synthetic circulating small noncoding RNA (sncRNA) 5' transfer RNA (tRNA) half
cggcggtgagagcgccgaatcctaacc

SEQ ID NO: 16939 - DNA, 11 bp, Artificial Sequence
  synthetic circulating small noncoding RNA (sncRNA) 5' transfer RNA (tRNA) half
ctccaccaact

SEQ ID NO: 16940 - DNA, 20 bp, Artificial Sequence
  synthetic circulating small noncoding RNA (sncRNA) 5' transfer RNA (tRNA) half
gattccggctcgaaggagta

SEQ ID NO: 16941 - DNA, 25 bp, Artificial Sequence
  synthetic circulating small noncoding RNA (sncRNA) 5' transfer RNA (tRNA) half
tccattggggtctccccgcgcaggt

SEQ ID NO: 16942 - DNA, 20 bp, Artificial Sequence
  synthetic circulating small noncoding RNA (sncRNA) 5' transfer RNA (tRNA) half
atccccggcacctccacttc

SEQ ID NO: 16943 - DNA, 18 bp, Artificial Sequence
  synthetic circulating small noncoding RNA (sncRNA) 5' transfer RNA (tRNA) half
agatcctgggttcgactc

SEQ ID NO: 16944 - DNA, 21 bp, Artificial Sequence
  synthetic circulating small noncoding RNA (sncRNA) 5' transfer RNA (tRNA) half
gtaactctacagtcctccgct

SEQ ID NO: 16945 - DNA, 27 bp, Artificial Sequence
  synthetic circulating small noncoding RNA (sncRNA) 5' transfer RNA (tRNA) half
ccccggtctcccgcgtgacaggcgggg

SEQ ID NO: 16946 - DNA, 15 bp, Artificial Sequence
  synthetic circulating small noncoding RNA (sncRNA) 5' transfer RNA (tRNA) half
ctcagctggtagagc

SEQ ID NO: 16947 - DNA, 20 bp, Artificial Sequence
  synthetic circulating small noncoding RNA (sncRNA) 5' transfer RNA (tRNA) half
agatttgaactcgcgacccc

SEQ ID NO: 16948 - DNA, 9 bp, Artificial Sequence
  synthetic circulating small noncoding RNA (sncRNA) 5' transfer RNA (tRNA) half
cgagtccct

SEQ ID NO: 16949 - DNA, 34 bp, Artificial Sequence
  synthetic circulating small noncoding RNA (sncRNA) 5' transfer RNA (tRNA) half
cagacttttaatctgagggtccagggttcaagtc

SEQ ID NO: 16950 - DNA, 20 bp, Artificial Sequence
  synthetic circulating small noncoding RNA (sncRNA) 5' transfer RNA (tRNA) half
ccggtctcccgcgtgacagg

SEQ ID NO: 16951 - DNA, 36 bp, Artificial Sequence
  synthetic circulating small noncoding RNA (sncRNA) 5' transfer RNA (tRNA) half
aggagcattggtggttcagtggtagaattctcgcct

SEQ ID NO: 16952 - DNA, 28 bp, Artificial Sequence
  synthetic circulating small noncoding RNA (sncRNA) 5' transfer RNA (tRNA) half
acttccgcccgaacagggacttgaaccc

SEQ ID NO: 16953 - DNA, 17 bp, Artificial Sequence
  synthetic circulating small noncoding RNA (sncRNA) 5' transfer RNA (tRNA) half
gtctgatgctctaccaa

SEQ ID NO: 16954 - DNA, 37 bp, Artificial Sequence
  synthetic circulating small noncoding RNA (sncRNA) 5' transfer RNA (tRNA) half
ggcttccctgaccgggaatcgaacccgggccgcggcg

SEQ ID NO: 16955 - DNA, 14 bp, Artificial Sequence
  synthetic circulating small noncoding RNA (sncRNA) 5' transfer RNA (tRNA) half
gctcagttgggaga

SEQ ID NO: 16956 - DNA, 22 bp, Artificial Sequence
  synthetic circulating small noncoding RNA (sncRNA) 5' transfer RNA (tRNA) half
tccccgtacgggccaggggagt

SEQ ID NO: 16957 - DNA, 12 bp, Artificial Sequence
  synthetic circulating small noncoding RNA (sncRNA) 5' transfer RNA (tRNA) half
ttcgaatccggc

SEQ ID NO: 16958 - DNA, 37 bp, Artificial Sequence
  synthetic circulating small noncoding RNA (sncRNA) 5' transfer RNA (tRNA) half
gccagggattgtgggttcgagtcccacctggggtaaa

SEQ ID NO: 16959 - DNA, 39 bp, Artificial Sequence
  synthetic circulating small noncoding RNA (sncRNA) 5' transfer RNA (tRNA) half
ggttgccccctctgaggttcgaactcaggaccttcagat

SEQ ID NO: 16960 - DNA, 35 bp, Artificial Sequence
  synthetic circulating small noncoding RNA (sncRNA) 5' transfer RNA (tRNA) half
tcctcgttagtatagtggtgagtatccctgcctgt

SEQ ID NO: 16961 - DNA, 40 bp, Artificial Sequence
  synthetic circulating small noncoding RNA (sncRNA) 5' transfer RNA (tRNA) half
gtgtggcccgtacggggatcgaacccgcgaccttggcgtt

SEQ ID NO: 16962 - DNA, 32 bp, Artificial Sequence
  synthetic circulating small noncoding RNA (sncRNA) 5' transfer RNA (tRNA) half
tctgatgctctaccgactgagctatccgggcg

SEQ ID NO: 16963 - DNA, 37 bp, Artificial Sequence
  synthetic circulating small noncoding RNA (sncRNA) 5' transfer RNA (tRNA) half
acgcgggagaccggggttcgattccccgacggggagt

SEQ ID NO: 16964 - DNA, 21 bp, Artificial Sequence
  synthetic circulating small noncoding RNA (sncRNA) 5' transfer RNA (tRNA) half
ccgcggcccgggttcgattcc

SEQ ID NO: 16965 - DNA, 15 bp, Artificial Sequence
  synthetic circulating small noncoding RNA (sncRNA) 5' transfer RNA (tRNA) half
ccacatggtctagcg

SEQ ID NO: 16966 - DNA, 37 bp, Artificial Sequence
  synthetic circulating small noncoding RNA (sncRNA) 5' transfer RNA (tRNA) half
ctcagggtcgtgggttcgagccccacgttgggcgcaa

SEQ ID NO: 16967 - DNA, 19 bp, Artificial Sequence
  synthetic circulating small noncoding RNA (sncRNA) 5' transfer RNA (tRNA) half
atcgaaaccatcctctgct

SEQ ID NO: 16968 - DNA, 17 bp, Artificial Sequence
  synthetic circulating small noncoding RNA (sncRNA) 5' transfer RNA (tRNA) half
acccggggcctcataca

SEQ ID NO: 16969 - DNA, 30 bp, Artificial Sequence
  synthetic circulating small noncoding RNA (sncRNA) 5' transfer RNA (tRNA) half
cagcgaccacgaagggactcgaacccccaa

SEQ ID NO: 16970 - DNA, 26 bp, Artificial Sequence
  synthetic circulating small noncoding RNA (sncRNA) 5' transfer RNA (tRNA) half
cgtatagtggttagtactctgcgttg

SEQ ID NO: 16971 - DNA, 19 bp, Artificial Sequence
  synthetic circulating small noncoding RNA (sncRNA) 5' transfer RNA (tRNA) half
gtcgcgggttcgatccccg

SEQ ID NO: 16972 - DNA, 17 bp, Artificial Sequence
  synthetic circulating small noncoding RNA (sncRNA) 5' transfer RNA (tRNA) half
gaggcgagaattctacc

SEQ ID NO: 16973 - DNA, 15 bp, Artificial Sequence
  synthetic circulating small noncoding RNA (sncRNA) 5' transfer RNA (tRNA) half
gtggtagaattctcg

SEQ ID NO: 16974 - DNA, 13 bp, Artificial Sequence
  synthetic circulating small noncoding RNA (sncRNA) 5' transfer RNA (tRNA) half
tcgctggcggccg

SEQ ID NO: 16975 - DNA, 36 bp, Artificial Sequence
  synthetic circulating small noncoding RNA (sncRNA) 5' transfer RNA (tRNA) half
ctgcattggccgggaatcgaacccgggtcacccgcg

SEQ ID NO: 16976 - DNA, 12 bp, Artificial Sequence
  synthetic circulating small noncoding RNA (sncRNA) 5' transfer RNA (tRNA) half
aggcgaacgtga

SEQ ID NO: 16977 - DNA, 33 bp, Artificial Sequence
  synthetic circulating small noncoding RNA (sncRNA) 5' transfer RNA (tRNA) half
attaagagtcccatgctctaccgactgagctag

SEQ ID NO: 16978 - DNA, 13 bp, Artificial Sequence
  synthetic circulating small noncoding RNA (sncRNA) 5' transfer RNA (tRNA) half
gagctagccaggc

SEQ ID NO: 16979 - DNA, 19 bp, Artificial Sequence
  synthetic circulating small noncoding RNA (sncRNA) 5' transfer RNA (tRNA) half
gaactcacaacctcggcat

SEQ ID NO: 16980 - DNA, 28 bp, Artificial Sequence
  synthetic circulating small noncoding RNA (sncRNA) 5' transfer RNA (tRNA) half
ctcggatcgctggattcaaagtccagag

SEQ ID NO: 16981 - DNA, 18 bp, Artificial Sequence
  synthetic circulating small noncoding RNA (sncRNA) 5' transfer RNA (tRNA) half
taatggataaggcatcag

SEQ ID NO: 16982 - DNA, 37 bp, Artificial Sequence
  synthetic circulating small noncoding RNA (sncRNA) 5' transfer RNA (tRNA) half
acgcgagaggtccccggttcgaaaccgggcgggaaca

SEQ ID NO: 16983 - DNA, 14 bp, Artificial Sequence
  synthetic circulating small noncoding RNA (sncRNA) 5' transfer RNA (tRNA) half
accgggagtcgaac

SEQ ID NO: 16984 - DNA, 24 bp, Artificial Sequence
  synthetic circulating small noncoding RNA (sncRNA) 5' transfer RNA (tRNA) half
tcgacgaggatgggattcgaaccc

SEQ ID NO: 16985 - DNA, 34 bp, Artificial Sequence
  synthetic circulating small noncoding RNA (sncRNA) 5' transfer RNA (tRNA) half
aaaactgcacttccctgaccgggaatcgaacccg

SEQ ID NO: 16986 - DNA, 19 bp, Artificial Sequence
  synthetic circulating small noncoding RNA (sncRNA) 5' transfer RNA (tRNA) half
agcgtggccgagcggtcta

SEQ ID NO: 16987 - DNA, 37 bp, Artificial Sequence
  synthetic circulating small noncoding RNA (sncRNA) 5' transfer RNA (tRNA) half
tcccatatggtctagcggttaggattcctggttttca

SEQ ID NO: 16988 - DNA, 12 bp, Artificial Sequence
  synthetic circulating small noncoding RNA (sncRNA) 5' transfer RNA (tRNA) half
gcagagtactaa

SEQ ID NO: 16989 - DNA, 9 bp, Artificial Sequence
  synthetic circulating small noncoding RNA (sncRNA) 5' transfer RNA (tRNA) half
cgtccggga

SEQ ID NO: 16990 - DNA, 32 bp, Artificial Sequence
  synthetic circulating small noncoding RNA (sncRNA) 5' transfer RNA (tRNA) half
gtgaggcgaacgtgataaccactacactacgg

SEQ ID NO: 16991 - DNA, 19 bp, Artificial Sequence
  synthetic circulating small noncoding RNA (sncRNA) 5' transfer RNA (tRNA) half
aggattcgaacctgtgcgg

SEQ ID NO: 16992 - DNA, 24 bp, Artificial Sequence
  synthetic circulating small noncoding RNA (sncRNA) 5' transfer RNA (tRNA) half
cgggccgcggcggtgagagcgccg

SEQ ID NO: 16993 - DNA, 12 bp, Artificial Sequence
  synthetic circulating small noncoding RNA (sncRNA) 5' transfer RNA (tRNA) half
gagaggtcccgg

SEQ ID NO: 16994 - DNA, 45 bp, Artificial Sequence
  synthetic circulating small noncoding RNA (sncRNA) 5' transfer RNA (tRNA) half
cgttgcgttggccgggaatcgaacccgggtcaactgcttggaagg

SEQ ID NO: 16995 - DNA, 29 bp, Artificial Sequence
  synthetic circulating small noncoding RNA (sncRNA) 5' transfer RNA (tRNA) half
ttcgattccggctcgaaggagtagcctgt

SEQ ID NO: 16996 - DNA, 27 bp, Artificial Sequence
  synthetic circulating small noncoding RNA (sncRNA) 5' transfer RNA (tRNA) half
ttgtgggttcgagtcccatctggggtg

SEQ ID NO: 16997 - DNA, 20 bp, Artificial Sequence
  synthetic circulating small noncoding RNA (sncRNA) 5' transfer RNA (tRNA) half
ctctgagggggcacccggat

SEQ ID NO: 16998 - DNA, 27 bp, Artificial Sequence
  synthetic circulating small noncoding RNA (sncRNA) 5' transfer RNA (tRNA) half
cgaccacgaagggactcgaaccctcaa

SEQ ID NO: 16999 - DNA, 12 bp, Artificial Sequence
  synthetic circulating small noncoding RNA (sncRNA) 5' transfer RNA (tRNA) half
cagagccacctg

SEQ ID NO: 17000 - DNA, 14 bp, Artificial Sequence
  synthetic circulating small noncoding RNA (sncRNA) 5' transfer RNA (tRNA) half
ttcaaatccgggtg

SEQ ID NO: 17001 - DNA, 22 bp, Artificial Sequence
  synthetic circulating small noncoding RNA (sncRNA) 5' transfer RNA (tRNA) half
cctgtcacgcgggagaccgggg

SEQ ID NO: 17002 - DNA, 33 bp, Artificial Sequence
  synthetic circulating small noncoding RNA (sncRNA) 5' transfer RNA (tRNA) half
tgtttccgcccggtttcgaaccggggacctttc

SEQ ID NO: 17003 - DNA, 15 bp, Artificial Sequence
  synthetic circulating small noncoding RNA (sncRNA) 5' transfer RNA (tRNA) half
agcgacctaaggatc

SEQ ID NO: 17004 - DNA, 38 bp, Artificial Sequence
  synthetic circulating small noncoding RNA (sncRNA) 5' transfer RNA (tRNA) half
ggttagcactctggactttgaatccagcgatccgagtt

SEQ ID NO: 17005 - DNA, 21 bp, Artificial Sequence
  synthetic circulating small noncoding RNA (sncRNA) 5' transfer RNA (tRNA) half
gtcagacgccttatccattag

SEQ ID NO: 17006 - DNA, 18 bp, Artificial Sequence
  synthetic circulating small noncoding RNA (sncRNA) 5' transfer RNA (tRNA) half
gctgaccccgacgtgatt

SEQ ID NO: 17007 - DNA, 24 bp, Artificial Sequence
  synthetic circulating small noncoding RNA (sncRNA) 5' transfer RNA (tRNA) half
ttcaaagtccagagtgctaaccat

SEQ ID NO: 17008 - DNA, 41 bp, Artificial Sequence
  synthetic circulating small noncoding RNA (sncRNA) 5' transfer RNA (tRNA) half
cgatccatcgacctctgggttatgggcccagcacgcttccg

SEQ ID NO: 17009 - DNA, 16 bp, Artificial Sequence
  synthetic circulating small noncoding RNA (sncRNA) 5' transfer RNA (tRNA) half
ccgggcggaaacagca

SEQ ID NO: 17010 - DNA, 22 bp, Artificial Sequence
  synthetic circulating small noncoding RNA (sncRNA) 5' transfer RNA (tRNA) half
atggtctagcggttaggattcc

SEQ ID NO: 17011 - DNA, 24 bp, Artificial Sequence
  synthetic circulating small noncoding RNA (sncRNA) 5' transfer RNA (tRNA) half
gattcagagtccagagtgctagcc

SEQ ID NO: 17012 - DNA, 43 bp, Artificial Sequence
  synthetic circulating small noncoding RNA (sncRNA) 5' transfer RNA (tRNA) half
aagacttaaaaccttgttcccagaggttcaaatcctctcccta

SEQ ID NO: 17013 - DNA, 21 bp, Artificial Sequence
  synthetic circulating small noncoding RNA (sncRNA) 5' transfer RNA (tRNA) half
gtgctctaacccctgagctat

SEQ ID NO: 17014 - DNA, 19 bp, Artificial Sequence
  synthetic circulating small noncoding RNA (sncRNA) 5' transfer RNA (tRNA) half
cgagaatcatacccctaga

SEQ ID NO: 17015 - DNA, 40 bp, Artificial Sequence
  synthetic circulating small noncoding RNA (sncRNA) 5' transfer RNA (tRNA) half
gtcggtagagcatgagactcttaatctcagggtcgtgggt

SEQ ID NO: 17016 - DNA, 12 bp, Artificial Sequence
  synthetic circulating small noncoding RNA (sncRNA) 5' transfer RNA (tRNA) half
agccggattcga

SEQ ID NO: 17017 - DNA, 24 bp, Artificial Sequence
  synthetic circulating small noncoding RNA (sncRNA) 5' transfer RNA (tRNA) half
ctggttcgatcccgggtttcggca

SEQ ID NO: 17018 - DNA, 16 bp, Artificial Sequence
  synthetic circulating small noncoding RNA (sncRNA) 5' transfer RNA (tRNA) half
cgggagaccggggttc

SEQ ID NO: 17019 - DNA, 17 bp, Artificial Sequence
  synthetic circulating small noncoding RNA (sncRNA) 5' transfer RNA (tRNA) half
gcggaggactgtagtca

SEQ ID NO: 17020 - DNA, 43 bp, Artificial Sequence
  synthetic circulating small noncoding RNA (sncRNA) 5' transfer RNA (tRNA) half
gtttccgtagtgtagtggttatcacgttcgcctaacacgcgaa

SEQ ID NO: 17021 - DNA, 38 bp, Artificial Sequence
  synthetic circulating small noncoding RNA (sncRNA) 5' transfer RNA (tRNA) half
aggccgcggcggtgagagcgccaaatcctaaccactag

SEQ ID NO: 17022 - DNA, 19 bp, Artificial Sequence
  synthetic circulating small noncoding RNA (sncRNA) 5' transfer RNA (tRNA) half
actttgcgttggccgggaa

SEQ ID NO: 17023 - DNA, 19 bp, Artificial Sequence
  synthetic circulating small noncoding RNA (sncRNA) 5' transfer RNA (tRNA) half
gaattctaccactgaacca

SEQ ID NO: 17024 - DNA, 22 bp, Artificial Sequence
  synthetic circulating small noncoding RNA (sncRNA) 5' transfer RNA (tRNA) half
aggtcgctggttcgattccggc

SEQ ID NO: 17025 - DNA, 27 bp, Artificial Sequence
  synthetic circulating small noncoding RNA (sncRNA) 5' transfer RNA (tRNA) half
gcgagcgtgatgaccactacactacgg

SEQ ID NO: 17026 - DNA, 14 bp, Artificial Sequence
  synthetic circulating small noncoding RNA (sncRNA) 5' transfer RNA (tRNA) half
tcgatccccggcat

SEQ ID NO: 17027 - DNA, 31 bp, Artificial Sequence
  synthetic circulating small noncoding RNA (sncRNA) 5' transfer RNA (tRNA) half
gtgtgaggcgaacgtgataaccactacacta

SEQ ID NO: 17028 - DNA, 14 bp, Artificial Sequence
  synthetic circulating small noncoding RNA (sncRNA) 5' transfer RNA (tRNA) half
agtagtcgtggccg

SEQ ID NO: 17029 - DNA, 24 bp, Artificial Sequence
  synthetic circulating small noncoding RNA (sncRNA) 5' transfer RNA (tRNA) half
ggccgggaatcgaacccgggtcac

SEQ ID NO: 17030 - DNA, 15 bp, Artificial Sequence
  synthetic circulating small noncoding RNA (sncRNA) 5' transfer RNA (tRNA) half
cgaacccgcgacctt

SEQ ID NO: 17031 - DNA, 29 bp, Artificial Sequence
  synthetic circulating small noncoding RNA (sncRNA) 5' transfer RNA (tRNA) half
ccacgctctaaccaactgagctaaccggc

SEQ ID NO: 17032 - DNA, 29 bp, Artificial Sequence
  synthetic circulating small noncoding RNA (sncRNA) 5' transfer RNA (tRNA) half
atgcagagtactaaccactatacgatctc

SEQ ID NO: 17033 - DNA, 20 bp, Artificial Sequence
  synthetic circulating small noncoding RNA (sncRNA) 5' transfer RNA (tRNA) half
tcacgtctgctttacacgca

SEQ ID NO: 17034 - DNA, 14 bp, Artificial Sequence
  synthetic circulating small noncoding RNA (sncRNA) 5' transfer RNA (tRNA) half
actagaccaccagg

SEQ ID NO: 17035 - DNA, 28 bp, Artificial Sequence
  synthetic circulating small noncoding RNA (sncRNA) 5' transfer RNA (tRNA) half
tcagtggtctggggtgcaggcttcaaac

SEQ ID NO: 17036 - DNA, 15 bp, Artificial Sequence
  synthetic circulating small noncoding RNA (sncRNA) 5' transfer RNA (tRNA) half
aggattcggcgctct

SEQ ID NO: 17037 - DNA, 33 bp, Artificial Sequence
  synthetic circulating small noncoding RNA (sncRNA) 5' transfer RNA (tRNA) half
tcacgcgggagaccggggttcgattccccgacg

SEQ ID NO: 17038 - DNA, 13 bp, Artificial Sequence
  synthetic circulating small noncoding RNA (sncRNA) 5' transfer RNA (tRNA) half
cggccacactacc

SEQ ID NO: 17039 - DNA, 31 bp, Artificial Sequence
  synthetic circulating small noncoding RNA (sncRNA) 5' transfer RNA (tRNA) half
gcaccacgctctaaccaactgagctaaccgg

SEQ ID NO: 17040 - DNA, 35 bp, Artificial Sequence
  synthetic circulating small noncoding RNA (sncRNA) 5' transfer RNA (tRNA) half
gggtgcgagaggtcccgggttcaaatcccggacga

SEQ ID NO: 17041 - DNA, 32 bp, Artificial Sequence
  synthetic circulating small noncoding RNA (sncRNA) 5' transfer RNA (tRNA) half
ggaggcccgggttcgattcccggccaatgcac

SEQ ID NO: 17042 - DNA, 24 bp, Artificial Sequence
  synthetic circulating small noncoding RNA (sncRNA) 5' transfer RNA (tRNA) half
attcccggccaatgcactctctca

SEQ ID NO: 17043 - DNA, 28 bp, Artificial Sequence
  synthetic circulating small noncoding RNA (sncRNA) 5' transfer RNA (tRNA) half
accccgacgtgacttgaacacgcaacct

SEQ ID NO: 17044 - DNA, 13 bp, Artificial Sequence
  synthetic circulating small noncoding RNA (sncRNA) 5' transfer RNA (tRNA) half
tcaaatgctctac

SEQ ID NO: 17045 - DNA, 15 bp, Artificial Sequence
  synthetic circulating small noncoding RNA (sncRNA) 5' transfer RNA (tRNA) half
acgcgggagaccggg

SEQ ID NO: 17046 - DNA, 13 bp, Artificial Sequence
  synthetic circulating small noncoding RNA (sncRNA) 5' transfer RNA (tRNA) half
ccagggttcgatt

SEQ ID NO: 17047 - DNA, 18 bp, Artificial Sequence
  synthetic circulating small noncoding RNA (sncRNA) 5' transfer RNA (tRNA) half
acaacgcagagtactaac

SEQ ID NO: 17048 - DNA, 12 bp, Artificial Sequence
  synthetic circulating small noncoding RNA (sncRNA) 5' transfer RNA (tRNA) half
tccgggatttga

SEQ ID NO: 17049 - DNA, 20 bp, Artificial Sequence
  synthetic circulating small noncoding RNA (sncRNA) 5' transfer RNA (tRNA) half
tcgagtcccatctggggtgg

SEQ ID NO: 17050 - DNA, 21 bp, Artificial Sequence
  synthetic circulating small noncoding RNA (sncRNA) 5' transfer RNA (tRNA) half
cgaaaccatcctctgctaact

SEQ ID NO: 17051 - DNA, 44 bp, Artificial Sequence
  synthetic circulating small noncoding RNA (sncRNA) 5' transfer RNA (tRNA) half
ggcagcggtgggattcgaacccacgccatcgaaatgactggagc

SEQ ID NO: 17052 - DNA, 26 bp, Artificial Sequence
  synthetic circulating small noncoding RNA (sncRNA) 5' transfer RNA (tRNA) half
tccgccgggactcgaacccggaacct

SEQ ID NO: 17053 - DNA, 36 bp, Artificial Sequence
  synthetic circulating small noncoding RNA (sncRNA) 5' transfer RNA (tRNA) half
agagtctcatgctctaccgactgagctagccgggcg

SEQ ID NO: 17054 - DNA, 15 bp, Artificial Sequence
  synthetic circulating small noncoding RNA (sncRNA) 5' transfer RNA (tRNA) half
cctgggtgggctcga

SEQ ID NO: 17055 - DNA, 29 bp, Artificial Sequence
  synthetic circulating small noncoding RNA (sncRNA) 5' transfer RNA (tRNA) half
tggactctgaatccagcgatccgagttca

SEQ ID NO: 17056 - DNA, 38 bp, Artificial Sequence
  synthetic circulating small noncoding RNA (sncRNA) 5' transfer RNA (tRNA) half
ttaaaagtctgatgctctaccgactgagctatccgggc

SEQ ID NO: 17057 - DNA, 18 bp, Artificial Sequence
  synthetic circulating small noncoding RNA (sncRNA) 5' transfer RNA (tRNA) half
cgagaatcatacccctag

SEQ ID NO: 17058 - DNA, 25 bp, Artificial Sequence
  synthetic circulating small noncoding RNA (sncRNA) 5' transfer RNA (tRNA) half
tgctctaccgactgagctatccggg

SEQ ID NO: 17059 - DNA, 39 bp, Artificial Sequence
  synthetic circulating small noncoding RNA (sncRNA) 5' transfer RNA (tRNA) half
caccccaggtgggactcgaacccacaatccctggcttag

SEQ ID NO: 17060 - DNA, 30 bp, Artificial Sequence
  synthetic circulating small noncoding RNA (sncRNA) 5' transfer RNA (tRNA) half
agagtggcgcagcggaagcgtgctgggccc

SEQ ID NO: 17061 - DNA, 20 bp, Artificial Sequence
  synthetic circulating small noncoding RNA (sncRNA) 5' transfer RNA (tRNA) half
catcgacctctgggttatgg

SEQ ID NO: 17062 - DNA, 12 bp, Artificial Sequence
  synthetic circulating small noncoding RNA (sncRNA) 5' transfer RNA (tRNA) half
aacgcagagtac

SEQ ID NO: 17063 - DNA, 41 bp, Artificial Sequence
  synthetic circulating small noncoding RNA (sncRNA) 5' transfer RNA (tRNA) half
cccttcgatagctcagctggtagagcggaggactgtaggct

SEQ ID NO: 17064 - DNA, 15 bp, Artificial Sequence
  synthetic circulating small noncoding RNA (sncRNA) 5' transfer RNA (tRNA) half
aaggccccagcgaga

SEQ ID NO: 17065 - DNA, 31 bp, Artificial Sequence
  synthetic circulating small noncoding RNA (sncRNA) 5' transfer RNA (tRNA) half
caaacccgggcctcccgcgtggcaggcgaga

SEQ ID NO: 17066 - DNA, 19 bp, Artificial Sequence
  synthetic circulating small noncoding RNA (sncRNA) 5' transfer RNA (tRNA) half
ggcccgggttcggttcccg

SEQ ID NO: 17067 - DNA, 18 bp, Artificial Sequence
  synthetic circulating small noncoding RNA (sncRNA) 5' transfer RNA (tRNA) half
acccgggccgcggcggtg

SEQ ID NO: 17068 - DNA, 15 bp, Artificial Sequence
  synthetic circulating small noncoding RNA (sncRNA) 5' transfer RNA (tRNA) half
cataccgggagtcga

SEQ ID NO: 17069 - DNA, 20 bp, Artificial Sequence
  synthetic circulating small noncoding RNA (sncRNA) 5' transfer RNA (tRNA) half
atgccgaggttgtgagttcg

SEQ ID NO: 17070 - DNA, 12 bp, Artificial Sequence
  synthetic circulating small noncoding RNA (sncRNA) 5' transfer RNA (tRNA) half
gaacccacaacc

SEQ ID NO: 17071 - DNA, 31 bp, Artificial Sequence
  synthetic circulating small noncoding RNA (sncRNA) 5' transfer RNA (tRNA) half
agcgagcgctctaccatttgagctaatcccc

SEQ ID NO: 17072 - DNA, 37 bp, Artificial Sequence
  synthetic circulating small noncoding RNA (sncRNA) 5' transfer RNA (tRNA) half
tctcctcgttagtatagtggtgagtatccccgcctgt

SEQ ID NO: 17073 - DNA, 30 bp, Artificial Sequence
  synthetic circulating small noncoding RNA (sncRNA) 5' transfer RNA (tRNA) half
attctcgcctgccacgcgggaggcccgggt

SEQ ID NO: 17074 - DNA, 21 bp, Artificial Sequence
  synthetic circulating small noncoding RNA (sncRNA) 5' transfer RNA (tRNA) half
gcgagaattctaccattgaac

SEQ ID NO: 17075 - DNA, 28 bp, Artificial Sequence
  synthetic circulating small noncoding RNA (sncRNA) 5' transfer RNA (tRNA) half
acaacgcagagtactaaccactatacga

SEQ ID NO: 17076 - DNA, 11 bp, Artificial Sequence
  synthetic circulating small noncoding RNA (sncRNA) 5' transfer RNA (tRNA) half
gcatgggtggt

SEQ ID NO: 17077 - DNA, 23 bp, Artificial Sequence
  synthetic circulating small noncoding RNA (sncRNA) 5' transfer RNA (tRNA) half
gggttcgattccccgacggggag

SEQ ID NO: 17078 - DNA, 26 bp, Artificial Sequence
  synthetic circulating small noncoding RNA (sncRNA) 5' transfer RNA (tRNA) half
accagggacctcttgatctgcagtca

SEQ ID NO: 17079 - DNA, 16 bp, Artificial Sequence
  synthetic circulating small noncoding RNA (sncRNA) 5' transfer RNA (tRNA) half
tggtctggggtgcagg

SEQ ID NO: 17080 - DNA, 24 bp, Artificial Sequence
  synthetic circulating small noncoding RNA (sncRNA) 5' transfer RNA (tRNA) half
agcagagtggcgcagcggaagcgt

SEQ ID NO: 17081 - DNA, 21 bp, Artificial Sequence
  synthetic circulating small noncoding RNA (sncRNA) 5' transfer RNA (tRNA) half
tatccattgcgccactggccc

SEQ ID NO: 17082 - DNA, 35 bp, Artificial Sequence
  synthetic circulating small noncoding RNA (sncRNA) 5' transfer RNA (tRNA) half
gcgtgctgggcccataacccagaggtcgatggatc

SEQ ID NO: 17083 - DNA, 26 bp, Artificial Sequence
  synthetic circulating small noncoding RNA (sncRNA) 5' transfer RNA (tRNA) half
gggttcgattccccgacggggagtct

SEQ ID NO: 17084 - DNA, 29 bp, Artificial Sequence
  synthetic circulating small noncoding RNA (sncRNA) 5' transfer RNA (tRNA) half
atctaaaggtccctggttcgatcccgggt

SEQ ID NO: 17085 - DNA, 33 bp, Artificial Sequence
  synthetic circulating small noncoding RNA (sncRNA) 5' transfer RNA (tRNA) half
aactcggatcgctggattcaaagtccagagtgc

SEQ ID NO: 17086 - DNA, 25 bp, Artificial Sequence
  synthetic circulating small noncoding RNA (sncRNA) 5' transfer RNA (tRNA) half
ctccccgtcggggaatcgaaccccg

SEQ ID NO: 17087 - DNA, 21 bp, Artificial Sequence
  synthetic circulating small noncoding RNA (sncRNA) 5' transfer RNA (tRNA) half
cctagaccaacgagccacggt

SEQ ID NO: 17088 - DNA, 17 bp, Artificial Sequence
  synthetic circulating small noncoding RNA (sncRNA) 5' transfer RNA (tRNA) half
gttctgggttcgagtcc

SEQ ID NO: 17089 - DNA, 18 bp, Artificial Sequence
  synthetic circulating small noncoding RNA (sncRNA) 5' transfer RNA (tRNA) half
ttcaaatctcgctggggc

SEQ ID NO: 17090 - DNA, 11 bp, Artificial Sequence
  synthetic circulating small noncoding RNA (sncRNA) 5' transfer RNA (tRNA) half
ctgagctatcg

SEQ ID NO: 17091 - DNA, 43 bp, Artificial Sequence
  synthetic circulating small noncoding RNA (sncRNA) 5' transfer RNA (tRNA) half
tggtgtagtggtatcatgcaagattcccattcttgcgacccgg

SEQ ID NO: 17092 - DNA, 37 bp, Artificial Sequence
  synthetic circulating small noncoding RNA (sncRNA) 5' transfer RNA (tRNA) half
agtggttaggattcggcgctctcaccgccgcggcccg

SEQ ID NO: 17093 - DNA, 35 bp, Artificial Sequence
  synthetic circulating small noncoding RNA (sncRNA) 5' transfer RNA (tRNA) half
agcgccgaatcctagccactagaccaccagggacg

SEQ ID NO: 17094 - DNA, 17 bp, Artificial Sequence
  synthetic circulating small noncoding RNA (sncRNA) 5' transfer RNA (tRNA) half
tcgctggttcgattccg

SEQ ID NO: 17095 - DNA, 22 bp, Artificial Sequence
  synthetic circulating small noncoding RNA (sncRNA) 5' transfer RNA (tRNA) half
ggggatgtagctcaatggtaga

SEQ ID NO: 17096 - DNA, 33 bp, Artificial Sequence
  synthetic circulating small noncoding RNA (sncRNA) 5' transfer RNA (tRNA) half
tcgagccagccaggagtcgaacctagaatcttc

SEQ ID NO: 17097 - DNA, 19 bp, Artificial Sequence
  synthetic circulating small noncoding RNA (sncRNA) 5' transfer RNA (tRNA) half
cccggacgagcccaatttt

SEQ ID NO: 17098 - DNA, 19 bp, Artificial Sequence
  synthetic circulating small noncoding RNA (sncRNA) 5' transfer RNA (tRNA) half
tgataaccactacactacg

SEQ ID NO: 17099 - DNA, 36 bp, Artificial Sequence
  synthetic circulating small noncoding RNA (sncRNA) 5' transfer RNA (tRNA) half
cagctgggggattagctcaaatggtagagcgctcgc

SEQ ID NO: 17100 - DNA, 13 bp, Artificial Sequence
  synthetic circulating small noncoding RNA (sncRNA) 5' transfer RNA (tRNA) half
aaggtcgcgggtt

SEQ ID NO: 17101 - DNA, 12 bp, Artificial Sequence
  synthetic circulating small noncoding RNA (sncRNA) 5' transfer RNA (tRNA) half
gacgcgctaccg

SEQ ID NO: 17102 - DNA, 21 bp, Artificial Sequence
  synthetic circulating small noncoding RNA (sncRNA) 5' transfer RNA (tRNA) half
ttatcacgttcgcctaacacg

SEQ ID NO: 17103 - DNA, 23 bp, Artificial Sequence
  synthetic circulating small noncoding RNA (sncRNA) 5' transfer RNA (tRNA) half
ggttagcactctggactttgaat

SEQ ID NO: 17104 - DNA, 15 bp, Artificial Sequence
  synthetic circulating small noncoding RNA (sncRNA) 5' transfer RNA (tRNA) half
tcagtggtagaattc

SEQ ID NO: 17105 - DNA, 30 bp, Artificial Sequence
  synthetic circulating small noncoding RNA (sncRNA) 5' transfer RNA (tRNA) half
gcgttggtggtatagtggtgagcatagctg

SEQ ID NO: 17106 - DNA, 27 bp, Artificial Sequence
  synthetic circulating small noncoding RNA (sncRNA) 5' transfer RNA (tRNA) half
agagtcccatgctctaccgactgagct

SEQ ID NO: 17107 - DNA, 19 bp, Artificial Sequence
  synthetic circulating small noncoding RNA (sncRNA) 5' transfer RNA (tRNA) half
aatcccaccactgccaaca

SEQ ID NO: 17108 - DNA, 21 bp, Artificial Sequence
  synthetic circulating small noncoding RNA (sncRNA) 5' transfer RNA (tRNA) half
aaggtcctgggttcgagcccc

SEQ ID NO: 17109 - DNA, 21 bp, Artificial Sequence
  synthetic circulating small noncoding RNA (sncRNA) 5' transfer RNA (tRNA) half
gtggttcagtggtagaattct

SEQ ID NO: 17110 - DNA, 17 bp, Artificial Sequence
  synthetic circulating small noncoding RNA (sncRNA) 5' transfer RNA (tRNA) half
cccatgctctaccgact

SEQ ID NO: 17111 - DNA, 26 bp, Artificial Sequence
  synthetic circulating small noncoding RNA (sncRNA) 5' transfer RNA (tRNA) half
agtgctaaccattacaccatggaacc

SEQ ID NO: 17112 - DNA, 29 bp, Artificial Sequence
  synthetic circulating small noncoding RNA (sncRNA) 5' transfer RNA (tRNA) half
agccagccaggagtcgaacctagaatctt

SEQ ID NO: 17113 - DNA, 30 bp, Artificial Sequence
  synthetic circulating small noncoding RNA (sncRNA) 5' transfer RNA (tRNA) half
ggtcgtgggttcgagccccacgttgggcgc

SEQ ID NO: 17114 - DNA, 28 bp, Artificial Sequence
  synthetic circulating small noncoding RNA (sncRNA) 5' transfer RNA (tRNA) half
tgccgtgactcggattcgaaccgaggtt

SEQ ID NO: 17115 - DNA, 13 bp, Artificial Sequence
  synthetic circulating small noncoding RNA (sncRNA) 5' transfer RNA (tRNA) half
cagggacctcttg

SEQ ID NO: 17116 - DNA, 15 bp, Artificial Sequence
  synthetic circulating small noncoding RNA (sncRNA) 5' transfer RNA (tRNA) half
gagcatttgactgca

SEQ ID NO: 17117 - DNA, 21 bp, Artificial Sequence
  synthetic circulating small noncoding RNA (sncRNA) 5' transfer RNA (tRNA) half
taatggataaggcgtctgact

SEQ ID NO: 17118 - DNA, 8 bp, Artificial Sequence
  synthetic circulating small noncoding RNA (sncRNA) 5' transfer RNA (tRNA) half
tgagcccc

SEQ ID NO: 17119 - DNA, 29 bp, Artificial Sequence
  synthetic circulating small noncoding RNA (sncRNA) 5' transfer RNA (tRNA) half
caaatgctctacccctgagttataccccc

SEQ ID NO: 17120 - DNA, 15 bp, Artificial Sequence
  synthetic circulating small noncoding RNA (sncRNA) 5' transfer RNA (tRNA) half
acccccaatcttctg

SEQ ID NO: 17121 - DNA, 20 bp, Artificial Sequence
  synthetic circulating small noncoding RNA (sncRNA) 5' transfer RNA (tRNA) half
agaggtcccaccgagatttg

SEQ ID NO: 17122 - DNA, 28 bp, Artificial Sequence
  synthetic circulating small noncoding RNA (sncRNA) 5' transfer RNA (tRNA) half
ttcgacgaggatgggattcgaacccatg

SEQ ID NO: 17123 - DNA, 13 bp, Artificial Sequence
  synthetic circulating small noncoding RNA (sncRNA) 5' transfer RNA (tRNA) half
agactgacgcgct

SEQ ID NO: 17124 - DNA, 20 bp, Artificial Sequence
  synthetic circulating small noncoding RNA (sncRNA) 5' transfer RNA (tRNA) half
agcggttaggattcctggtt

SEQ ID NO: 17125 - DNA, 16 bp, Artificial Sequence
  synthetic circulating small noncoding RNA (sncRNA) 5' transfer RNA (tRNA) half
agctgaccccgacgtg

SEQ ID NO: 17126 - DNA, 26 bp, Artificial Sequence
  synthetic circulating small noncoding RNA (sncRNA) 5' transfer RNA (tRNA) half
cctccccgtcggggaattgaaccccg

SEQ ID NO: 17127 - DNA, 13 bp, Artificial Sequence
  synthetic circulating small noncoding RNA (sncRNA) 5' transfer RNA (tRNA) half
gggattagctcaa

SEQ ID NO: 17128 - DNA, 19 bp, Artificial Sequence
  synthetic circulating small noncoding RNA (sncRNA) 5' transfer RNA (tRNA) half
ccgagtggttaaggcgatg

SEQ ID NO: 17129 - DNA, 17 bp, Artificial Sequence
  synthetic circulating small noncoding RNA (sncRNA) 5' transfer RNA (tRNA) half
cgggaggcccgggttcg

SEQ ID NO: 17130 - DNA, 10 bp, Artificial Sequence
  synthetic circulating small noncoding RNA (sncRNA) 5' transfer RNA (tRNA) half
ctcggccatc

SEQ ID NO: 17131 - DNA, 10 bp, Artificial Sequence
  synthetic circulating small noncoding RNA (sncRNA) 5' transfer RNA (tRNA) half
attcgaaccg

SEQ ID NO: 17132 - DNA, 16 bp, Artificial Sequence
  synthetic circulating small noncoding RNA (sncRNA) 5' transfer RNA (tRNA) half
tctaggggtatgattc

SEQ ID NO: 17133 - DNA, 37 bp, Artificial Sequence
  synthetic circulating small noncoding RNA (sncRNA) 5' transfer RNA (tRNA) half
cgcgtgtgaggcgaacgtgataaccactacactacgg

SEQ ID NO: 17134 - DNA, 30 bp, Artificial Sequence
  synthetic circulating small noncoding RNA (sncRNA) 5' transfer RNA (tRNA) half
aggggtatgattctcgctttgggtgcgaga

SEQ ID NO: 17135 - DNA, 22 bp, Artificial Sequence
  synthetic circulating small noncoding RNA (sncRNA) 5' transfer RNA (tRNA) half
caggaccttcagattatgagac

SEQ ID NO: 17136 - DNA, 31 bp, Artificial Sequence
  synthetic circulating small noncoding RNA (sncRNA) 5' transfer RNA (tRNA) half
acgcagcgccttagaccgctcggccatcctg

SEQ ID NO: 17137 - DNA, 12 bp, Artificial Sequence
  synthetic circulating small noncoding RNA (sncRNA) 5' transfer RNA (tRNA) half
tcccacatggtc

SEQ ID NO: 17138 - DNA, 36 bp, Artificial Sequence
  synthetic circulating small noncoding RNA (sncRNA) 5' transfer RNA (tRNA) half
caccgccgcggcccgggttcgattcccggtcaggga

SEQ ID NO: 17139 - DNA, 32 bp, Artificial Sequence
  synthetic circulating small noncoding RNA (sncRNA) 5' transfer RNA (tRNA) half
ccgacgaggatgggattcgaacccacgcgtgc

SEQ ID NO: 17140 - DNA, 17 bp, Artificial Sequence
  synthetic circulating small noncoding RNA (sncRNA) 5' transfer RNA (tRNA) half
acctgtagctgtttagc

SEQ ID NO: 17141 - DNA, 18 bp, Artificial Sequence
  synthetic circulating small noncoding RNA (sncRNA) 5' transfer RNA (tRNA) half
aaacccgggcctcccgcg

SEQ ID NO: 17142 - DNA, 19 bp, Artificial Sequence
  synthetic circulating small noncoding RNA (sncRNA) 5' transfer RNA (tRNA) half
accactcggccacgctacc

SEQ ID NO: 17143 - DNA, 37 bp, Artificial Sequence
  synthetic circulating small noncoding RNA (sncRNA) 5' transfer RNA (tRNA) half
tcacacgcgaaaggtccccggttcgaaaccgggcgga

SEQ ID NO: 17144 - DNA, 18 bp, Artificial Sequence
  synthetic circulating small noncoding RNA (sncRNA) 5' transfer RNA (tRNA) half
cgagccccagtggaacca

SEQ ID NO: 17145 - DNA, 28 bp, Artificial Sequence
  synthetic circulating small noncoding RNA (sncRNA) 5' transfer RNA (tRNA) half
cagacgcgctaccattgcgccacgaggt

SEQ ID NO: 17146 - DNA, 42 bp, Artificial Sequence
  synthetic circulating small noncoding RNA (sncRNA) 5' transfer RNA (tRNA) half
tttgaactcggatcgctggattcagagtccagagtgctaacc

SEQ ID NO: 17147 - DNA, 12 bp, Artificial Sequence
  synthetic circulating small noncoding RNA (sncRNA) 5' transfer RNA (tRNA) half
cgactcccggtg

SEQ ID NO: 17148 - DNA, 38 bp, Artificial Sequence
  synthetic circulating small noncoding RNA (sncRNA) 5' transfer RNA (tRNA) half
aacccgggacctctcgcacccaaagcgagaatcatacc

SEQ ID NO: 17149 - DNA, 12 bp, Artificial Sequence
  synthetic circulating small noncoding RNA (sncRNA) 5' transfer RNA (tRNA) half
gtggcgcaattg

SEQ ID NO: 17150 - DNA, 17 bp, Artificial Sequence
  synthetic circulating small noncoding RNA (sncRNA) 5' transfer RNA (tRNA) half
agtgctaaccattacac

SEQ ID NO: 17151 - DNA, 10 bp, Artificial Sequence
  synthetic circulating small noncoding RNA (sncRNA) 5' transfer RNA (tRNA) half
ccttaaccac

SEQ ID NO: 17152 - DNA, 24 bp, Artificial Sequence
  synthetic circulating small noncoding RNA (sncRNA) 5' transfer RNA (tRNA) half
tggttcaatggtagaattctcgcc

SEQ ID NO: 17153 - DNA, 16 bp, Artificial Sequence
  synthetic circulating small noncoding RNA (sncRNA) 5' transfer RNA (tRNA) half
accactatactaacga

SEQ ID NO: 17154 - DNA, 37 bp, Artificial Sequence
  synthetic circulating small noncoding RNA (sncRNA) 5' transfer RNA (tRNA) half
acctccccgtcggggaattgaaccccggtctcccgcg

SEQ ID NO: 17155 - DNA, 12 bp, Artificial Sequence
  synthetic circulating small noncoding RNA (sncRNA) 5' transfer RNA (tRNA) half
cacccagggacg

SEQ ID NO: 17156 - DNA, 32 bp, Artificial Sequence
  synthetic circulating small noncoding RNA (sncRNA) 5' transfer RNA (tRNA) half
taagccagggattgtgggttcgagtcccacct

SEQ ID NO: 17157 - DNA, 15 bp, Artificial Sequence
  synthetic circulating small noncoding RNA (sncRNA) 5' transfer RNA (tRNA) half
aatctcggtgggacc

SEQ ID NO: 17158 - DNA, 30 bp, Artificial Sequence
  synthetic circulating small noncoding RNA (sncRNA) 5' transfer RNA (tRNA) half
gtcaggatggccgagcggtctaaggcgctg

SEQ ID NO: 17159 - DNA, 8 bp, Artificial Sequence
  synthetic circulating small noncoding RNA (sncRNA) 5' transfer RNA (tRNA) half
gcgcccaa

SEQ ID NO: 17160 - DNA, 32 bp, Artificial Sequence
  synthetic circulating small noncoding RNA (sncRNA) 5' transfer RNA (tRNA) half
gtcagacgccttatccattaggccacgtggtc

SEQ ID NO: 17161 - DNA, 15 bp, Artificial Sequence
  synthetic circulating small noncoding RNA (sncRNA) 5' transfer RNA (tRNA) half
gtcctccgctctacc

SEQ ID NO: 17162 - DNA, 6 bp, Artificial Sequence
  synthetic circulating small noncoding RNA (sncRNA) 5' transfer RNA (tRNA) half
acccgg

SEQ ID NO: 17163 - DNA, 16 bp, Artificial Sequence
  synthetic circulating small noncoding RNA (sncRNA) 5' transfer RNA (tRNA) half
tctcttcggaggcgtg

SEQ ID NO: 17164 - DNA, 12 bp, Artificial Sequence
  synthetic circulating small noncoding RNA (sncRNA) 5' transfer RNA (tRNA) half
gattcgaaccga

SEQ ID NO: 17165 - DNA, 7 bp, Artificial Sequence
  synthetic circulating small noncoding RNA (sncRNA) 5' transfer RNA (tRNA) half
gcgggtt

SEQ ID NO: 17166 - DNA, 32 bp, Artificial Sequence
  synthetic circulating small noncoding RNA (sncRNA) 5' transfer RNA (tRNA) half
tgagagcgccgaatcctaaccactagaccacc

SEQ ID NO: 17167 - DNA, 20 bp, Artificial Sequence
  synthetic circulating small noncoding RNA (sncRNA) 5' transfer RNA (tRNA) half
cacgtcgagccagccaggag

SEQ ID NO: 17168 - DNA, 8 bp, Artificial Sequence
  synthetic circulating small noncoding RNA (sncRNA) 5' transfer RNA (tRNA) half
tgccgaaa

SEQ ID NO: 17169 - DNA, 22 bp, Artificial Sequence
  synthetic circulating small noncoding RNA (sncRNA) 5' transfer RNA (tRNA) half
tgtgctctgcacgcgtgggttc

SEQ ID NO: 17170 - DNA, 24 bp, Artificial Sequence
  synthetic circulating small noncoding RNA (sncRNA) 5' transfer RNA (tRNA) half
agttcaatggtagaattctcgcct

SEQ ID NO: 17171 - DNA, 14 bp, Artificial Sequence
  synthetic circulating small noncoding RNA (sncRNA) 5' transfer RNA (tRNA) half
gggattcgaaccct

SEQ ID NO: 17172 - DNA, 30 bp, Artificial Sequence
  synthetic circulating small noncoding RNA (sncRNA) 5' transfer RNA (tRNA) half
aaaaccaggaatcctaaccgctagaccatg

SEQ ID NO: 17173 - DNA, 26 bp, Artificial Sequence
  synthetic circulating small noncoding RNA (sncRNA) 5' transfer RNA (tRNA) half
gtgggttcgagccccacgttgggcgc

SEQ ID NO: 17174 - DNA, 18 bp, Artificial Sequence
  synthetic circulating small noncoding RNA (sncRNA) 5' transfer RNA (tRNA) half
cagaagattgagggttcg

SEQ ID NO: 17175 - DNA, 16 bp, Artificial Sequence
  synthetic circulating small noncoding RNA (sncRNA) 5' transfer RNA (tRNA) half
actataccaccaacgc

SEQ ID NO: 17176 - DNA, 20 bp, Artificial Sequence
  synthetic circulating small noncoding RNA (sncRNA) 5' transfer RNA (tRNA) half
tacctccccgtcggggaatc

SEQ ID NO: 17177 - DNA, 12 bp, Artificial Sequence
  synthetic circulating small noncoding RNA (sncRNA) 5' transfer RNA (tRNA) half
gctcggccacgc

SEQ ID NO: 17178 - DNA, 24 bp, Artificial Sequence
  synthetic circulating small noncoding RNA (sncRNA) 5' transfer RNA (tRNA) half
aaaggcaagtgcattggccgggaa

SEQ ID NO: 17179 - DNA, 18 bp, Artificial Sequence
  synthetic circulating small noncoding RNA (sncRNA) 5' transfer RNA (tRNA) half
ctgagggggcacccggat

SEQ ID NO: 17180 - DNA, 39 bp, Artificial Sequence
  synthetic circulating small noncoding RNA (sncRNA) 5' transfer RNA (tRNA) half
cgcagaaggtcctgggttcgagccccagtggaaccacgt

SEQ ID NO: 17181 - DNA, 10 bp, Artificial Sequence
  synthetic circulating small noncoding RNA (sncRNA) 5' transfer RNA (tRNA) half
atccggctcg

SEQ ID NO: 17182 - DNA, 14 bp, Artificial Sequence
  synthetic circulating small noncoding RNA (sncRNA) 5' transfer RNA (tRNA) half
caggggagactgcg

SEQ ID NO: 17183 - DNA, 11 bp, Artificial Sequence
  synthetic circulating small noncoding RNA (sncRNA) 5' transfer RNA (tRNA) half
gcgcgttcggc

SEQ ID NO: 17184 - DNA, 8 bp, Artificial Sequence
  synthetic circulating small noncoding RNA (sncRNA) 5' transfer RNA (tRNA) half
tggctccg

SEQ ID NO: 17185 - DNA, 12 bp, Artificial Sequence
  synthetic circulating small noncoding RNA (sncRNA) 5' transfer RNA (tRNA) half
gtccctgggtgg

SEQ ID NO: 17186 - DNA, 34 bp, Artificial Sequence
  synthetic circulating small noncoding RNA (sncRNA) 5' transfer RNA (tRNA) half
ctaagcgagaatcatacccctagaccaacgagcc

SEQ ID NO: 17187 - DNA, 25 bp, Artificial Sequence
  synthetic circulating small noncoding RNA (sncRNA) 5' transfer RNA (tRNA) half
gtccatcgccttaaccactcggcca

SEQ ID NO: 17188 - DNA, 38 bp, Artificial Sequence
  synthetic circulating small noncoding RNA (sncRNA) 5' transfer RNA (tRNA) half
taaacaggagatcctgggttcaaatcccagcggggcct

SEQ ID NO: 17189 - DNA, 14 bp, Artificial Sequence
  synthetic circulating small noncoding RNA (sncRNA) 5' transfer RNA (tRNA) half
gaggtccctggttc

SEQ ID NO: 17190 - DNA, 24 bp, Artificial Sequence
  synthetic circulating small noncoding RNA (sncRNA) 5' transfer RNA (tRNA) half
ccgggttcgatccccggcatctcc

SEQ ID NO: 17191 - DNA, 17 bp, Artificial Sequence
  synthetic circulating small noncoding RNA (sncRNA) 5' transfer RNA (tRNA) half
gtcgaacctggaatctt

SEQ ID NO: 17192 - DNA, 15 bp, Artificial Sequence
  synthetic circulating small noncoding RNA (sncRNA) 5' transfer RNA (tRNA) half
ggcgaatgtgataac

SEQ ID NO: 17193 - DNA, 22 bp, Artificial Sequence
  synthetic circulating small noncoding RNA (sncRNA) 5' transfer RNA (tRNA) half
gatgggattcgaacccacgcgt

SEQ ID NO: 17194 - DNA, 28 bp, Artificial Sequence
  synthetic circulating small noncoding RNA (sncRNA) 5' transfer RNA (tRNA) half
gattcctggttttcacccaggcggcccg

SEQ ID NO: 17195 - DNA, 9 bp, Artificial Sequence
  synthetic circulating small noncoding RNA (sncRNA) 5' transfer RNA (tRNA) half
gcgctctac

SEQ ID NO: 17196 - DNA, 26 bp, Artificial Sequence
  synthetic circulating small noncoding RNA (sncRNA) 5' transfer RNA (tRNA) half
cggcggtgagagcgccgaatcctaac

SEQ ID NO: 17197 - DNA, 19 bp, Artificial Sequence
  synthetic circulating small noncoding RNA (sncRNA) 5' transfer RNA (tRNA) half
agtcagacgcgctaccgtt

SEQ ID NO: 17198 - DNA, 23 bp, Artificial Sequence
  synthetic circulating small noncoding RNA (sncRNA) 5' transfer RNA (tRNA) half
gctggcccgtacggggatcgaac

SEQ ID NO: 17199 - DNA, 19 bp, Artificial Sequence
  synthetic circulating small noncoding RNA (sncRNA) 5' transfer RNA (tRNA) half
cgcgggtgacccgggttcg

SEQ ID NO: 17200 - DNA, 19 bp, Artificial Sequence
  synthetic circulating small noncoding RNA (sncRNA) 5' transfer RNA (tRNA) half
cgggccgcggcggtgaaag

SEQ ID NO: 17201 - DNA, 7 bp, Artificial Sequence
  synthetic circulating small noncoding RNA (sncRNA) 5' transfer RNA (tRNA) half
cgggctc

SEQ ID NO: 17202 - DNA, 30 bp, Artificial Sequence
  synthetic circulating small noncoding RNA (sncRNA) 5' transfer RNA (tRNA) half
gcgcccaacgtggggctcgaacccacgacc

SEQ ID NO: 17203 - DNA, 23 bp, Artificial Sequence
  synthetic circulating small noncoding RNA (sncRNA) 5' transfer RNA (tRNA) half
tcgaacccgggccgcggcggtga

SEQ ID NO: 17204 - DNA, 22 bp, Artificial Sequence
  synthetic circulating small noncoding RNA (sncRNA) 5' transfer RNA (tRNA) half
accgggcggaaacatatctttt

SEQ ID NO: 17205 - DNA, 37 bp, Artificial Sequence
  synthetic circulating small noncoding RNA (sncRNA) 5' transfer RNA (tRNA) half
ggcggtgagagcgccgaatcctaaccactagaccacc

SEQ ID NO: 17206 - DNA, 13 bp, Artificial Sequence
  synthetic circulating small noncoding RNA (sncRNA) 5' transfer RNA (tRNA) half
gcaatggataacg

SEQ ID NO: 17207 - DNA, 40 bp, Artificial Sequence
  synthetic circulating small noncoding RNA (sncRNA) 5' transfer RNA (tRNA) half
acatggtctagcggttaggattcctggttttcacccaggc

SEQ ID NO: 17208 - DNA, 11 bp, Artificial Sequence
  synthetic circulating small noncoding RNA (sncRNA) 5' transfer RNA (tRNA) half
caggttcgact

SEQ ID NO: 17209 - DNA, 5 bp, Artificial Sequence
  synthetic circulating small noncoding RNA (sncRNA) 5' transfer RNA (tRNA) half
gctcg

SEQ ID NO: 17210 - DNA, 35 bp, Artificial Sequence
  synthetic circulating small noncoding RNA (sncRNA) 5' transfer RNA (tRNA) half
gttgccccctctgaggttcgaactcaggaccttca

SEQ ID NO: 17211 - DNA, 17 bp, Artificial Sequence
  synthetic circulating small noncoding RNA (sncRNA) 5' transfer RNA (tRNA) half
tggtgagtatccccgcc

SEQ ID NO: 17212 - DNA, 42 bp, Artificial Sequence
  synthetic circulating small noncoding RNA (sncRNA) 5' transfer RNA (tRNA) half
ctgttcccataccgggagtcgaacccgggccgcctgggtgaa

SEQ ID NO: 17213 - DNA, 10 bp, Artificial Sequence
  synthetic circulating small noncoding RNA (sncRNA) 5' transfer RNA (tRNA) half
tccccgacgg

SEQ ID NO: 17214 - DNA, 18 bp, Artificial Sequence
  synthetic circulating small noncoding RNA (sncRNA) 5' transfer RNA (tRNA) half
agtggttaggattcggtg

SEQ ID NO: 17215 - DNA, 30 bp, Artificial Sequence
  synthetic circulating small noncoding RNA (sncRNA) 5' transfer RNA (tRNA) half
ggccgcgtggcctaatggataaggcgtctg

SEQ ID NO: 17216 - DNA, 25 bp, Artificial Sequence
  synthetic circulating small noncoding RNA (sncRNA) 5' transfer RNA (tRNA) half
gacgaggatgggattcgaacccatg

SEQ ID NO: 17217 - DNA, 24 bp, Artificial Sequence
  synthetic circulating small noncoding RNA (sncRNA) 5' transfer RNA (tRNA) half
cggttatcacgtctgctttacacg

SEQ ID NO: 17218 - DNA, 11 bp, Artificial Sequence
  synthetic circulating small noncoding RNA (sncRNA) 5' transfer RNA (tRNA) half
gattcccggtc

SEQ ID NO: 17219 - DNA, 15 bp, Artificial Sequence
  synthetic circulating small noncoding RNA (sncRNA) 5' transfer RNA (tRNA) half
ctgaccgggaatcga

SEQ ID NO: 17220 - DNA, 17 bp, Artificial Sequence
  synthetic circulating small noncoding RNA (sncRNA) 5' transfer RNA (tRNA) half
ccggttcgaaaccgggc

SEQ ID NO: 17221 - DNA, 42 bp, Artificial Sequence
  synthetic circulating small noncoding RNA (sncRNA) 5' transfer RNA (tRNA) half
gaacccacgaccctgagattaagagtctcatgctctaccgac

SEQ ID NO: 17222 - DNA, 16 bp, Artificial Sequence
  synthetic circulating small noncoding RNA (sncRNA) 5' transfer RNA (tRNA) half
ttcgaatcctgccgac

SEQ ID NO: 17223 - DNA, 33 bp, Artificial Sequence
  synthetic circulating small noncoding RNA (sncRNA) 5' transfer RNA (tRNA) half
acttccctgaccgggaatcgaacccgggccgcg

SEQ ID NO: 17224 - DNA, 17 bp, Artificial Sequence
  synthetic circulating small noncoding RNA (sncRNA) 5' transfer RNA (tRNA) half
ctgggtgggctcgaacc

SEQ ID NO: 17225 - DNA, 21 bp, Artificial Sequence
  synthetic circulating small noncoding RNA (sncRNA) 5' transfer RNA (tRNA) half
tcgagtcctgccgcggtcgac

SEQ ID NO: 17226 - DNA, 11 bp, Artificial Sequence
  synthetic circulating small noncoding RNA (sncRNA) 5' transfer RNA (tRNA) half
ccagcgatccg

SEQ ID NO: 17227 - DNA, 26 bp, Artificial Sequence
  synthetic circulating small noncoding RNA (sncRNA) 5' transfer RNA (tRNA) half
aatcctagccactagaccaccaggga

SEQ ID NO: 17228 - DNA, 19 bp, Artificial Sequence
  synthetic circulating small noncoding RNA (sncRNA) 5' transfer RNA (tRNA) half
gtttccctagtgtagtggt

SEQ ID NO: 17229 - DNA, 16 bp, Artificial Sequence
  synthetic circulating small noncoding RNA (sncRNA) 5' transfer RNA (tRNA) half
ccgactgagctagccg

SEQ ID NO: 17230 - DNA, 19 bp, Artificial Sequence
  synthetic circulating small noncoding RNA (sncRNA) 5' transfer RNA (tRNA) half
cggctcgaaggacttcgtg

SEQ ID NO: 17231 - DNA, 20 bp, Artificial Sequence
  synthetic circulating small noncoding RNA (sncRNA) 5' transfer RNA (tRNA) half
aaaccgggcggaaacagcaa

SEQ ID NO: 17232 - DNA, 29 bp, Artificial Sequence
  synthetic circulating small noncoding RNA (sncRNA) 5' transfer RNA (tRNA) half
ccctggtggtctagtggctaggattcggc

SEQ ID NO: 17233 - DNA, 35 bp, Artificial Sequence
  synthetic circulating small noncoding RNA (sncRNA) 5' transfer RNA (tRNA) half
cggttatcacgtctgctttacacgcagaaggtcct

SEQ ID NO: 17234 - DNA, 29 bp, Artificial Sequence
  synthetic circulating small noncoding RNA (sncRNA) 5' transfer RNA (tRNA) half
aaaccgaagatcgcgggttcgaaccccgt

SEQ ID NO: 17235 - DNA, 15 bp, Artificial Sequence
  synthetic circulating small noncoding RNA (sncRNA) 5' transfer RNA (tRNA) half
cgaggacctctcgcg

SEQ ID NO: 17236 - DNA, 12 bp, Artificial Sequence
  synthetic circulating small noncoding RNA (sncRNA) 5' transfer RNA (tRNA) half
accagggacctt

SEQ ID NO: 17237 - DNA, 5 bp, Artificial Sequence
  synthetic circulating small noncoding RNA (sncRNA) 5' transfer RNA (tRNA) half
ggcct

SEQ ID NO: 17238 - DNA, 10 bp, Artificial Sequence
  synthetic circulating small noncoding RNA (sncRNA) 5' transfer RNA (tRNA) half
cgggactcga

SEQ ID NO: 17239 - DNA, 36 bp, Artificial Sequence
  synthetic circulating small noncoding RNA (sncRNA) 5' transfer RNA (tRNA) half
taaaccgaagatcgcgggttcgaaccccgtccgtgc

SEQ ID NO: 17240 - DNA, 10 bp, Artificial Sequence
  synthetic circulating small noncoding RNA (sncRNA) 5' transfer RNA (tRNA) half
ggattcggcg

SEQ ID NO: 17241 - DNA, 17 bp, Artificial Sequence
  synthetic circulating small noncoding RNA (sncRNA) 5' transfer RNA (tRNA) half
cgaaaccatcctctgct

SEQ ID NO: 17242 - DNA, 10 bp, Artificial Sequence
  synthetic circulating small noncoding RNA (sncRNA) 5' transfer RNA (tRNA) half
gcgaacgtga

SEQ ID NO: 17243 - DNA, 21 bp, Artificial Sequence
  synthetic circulating small noncoding RNA (sncRNA) 5' transfer RNA (tRNA) half
gcgcggggaaaccccaatgga

SEQ ID NO: 17244 - DNA, 23 bp, Artificial Sequence
  synthetic circulating small noncoding RNA (sncRNA) 5' transfer RNA (tRNA) half
ggcgagaattctaccattgaact

SEQ ID NO: 17245 - DNA, 16 bp, Artificial Sequence
  synthetic circulating small noncoding RNA (sncRNA) 5' transfer RNA (tRNA) half
actcctccgcccggtt

SEQ ID NO: 17246 - DNA, 23 bp, Artificial Sequence
  synthetic circulating small noncoding RNA (sncRNA) 5' transfer RNA (tRNA) half
ctcagctggtagagcggaggact

SEQ ID NO: 17247 - DNA, 20 bp, Artificial Sequence
  synthetic circulating small noncoding RNA (sncRNA) 5' transfer RNA (tRNA) half
attcatgaccccgacgtgat

SEQ ID NO: 17248 - DNA, 11 bp, Artificial Sequence
  synthetic circulating small noncoding RNA (sncRNA) 5' transfer RNA (tRNA) half
atcgaaggatc

SEQ ID NO: 17249 - DNA, 11 bp, Artificial Sequence
  synthetic circulating small noncoding RNA (sncRNA) 5' transfer RNA (tRNA) half
tagcgtggccg

SEQ ID NO: 17250 - DNA, 20 bp, Artificial Sequence
  synthetic circulating small noncoding RNA (sncRNA) 5' transfer RNA (tRNA) half
ggtgcgagaggtcccgggtt

SEQ ID NO: 17251 - DNA, 19 bp, Artificial Sequence
  synthetic circulating small noncoding RNA (sncRNA) 5' transfer RNA (tRNA) half
tagagaggtcccaccgaga

SEQ ID NO: 17252 - DNA, 17 bp, Artificial Sequence
  synthetic circulating small noncoding RNA (sncRNA) 5' transfer RNA (tRNA) half
gctctaccgactgagct

SEQ ID NO: 17253 - DNA, 25 bp, Artificial Sequence
  synthetic circulating small noncoding RNA (sncRNA) 5' transfer RNA (tRNA) half
ccgagcggtctaaggcgctgcgttc

SEQ ID NO: 17254 - DNA, 20 bp, Artificial Sequence
  synthetic circulating small noncoding RNA (sncRNA) 5' transfer RNA (tRNA) half
cccctagaccaacgagccgc

SEQ ID NO: 17255 - DNA, 20 bp, Artificial Sequence
  synthetic circulating small noncoding RNA (sncRNA) 5' transfer RNA (tRNA) half
taggttccaccgagatttga

SEQ ID NO: 17256 - DNA, 42 bp, Artificial Sequence
  synthetic circulating small noncoding RNA (sncRNA) 5' transfer RNA (tRNA) half
gacccagtggcctaatggataaggcatcagcctccggagctg

SEQ ID NO: 17257 - DNA, 18 bp, Artificial Sequence
  synthetic circulating small noncoding RNA (sncRNA) 5' transfer RNA (tRNA) half
ccgcggcccgggttcgat

SEQ ID NO: 17258 - DNA, 20 bp, Artificial Sequence
  synthetic circulating small noncoding RNA (sncRNA) 5' transfer RNA (tRNA) half
cgcctccccgtcggggaatc

SEQ ID NO: 17259 - DNA, 25 bp, Artificial Sequence
  synthetic circulating small noncoding RNA (sncRNA) 5' transfer RNA (tRNA) half
tcctgggttcgaatcccagcggtgc

SEQ ID NO: 17260 - DNA, 39 bp, Artificial Sequence
  synthetic circulating small noncoding RNA (sncRNA) 5' transfer RNA (tRNA) half
tggtggagatgccggggatcgaacccggggcctcataca

SEQ ID NO: 17261 - DNA, 28 bp, Artificial Sequence
  synthetic circulating small noncoding RNA (sncRNA) 5' transfer RNA (tRNA) half
aagattccaggttcgactcctggctggc

SEQ ID NO: 17262 - DNA, 17 bp, Artificial Sequence
  synthetic circulating small noncoding RNA (sncRNA) 5' transfer RNA (tRNA) half
tcccggccaatgcactc

SEQ ID NO: 17263 - DNA, 24 bp, Artificial Sequence
  synthetic circulating small noncoding RNA (sncRNA) 5' transfer RNA (tRNA) half
ggcccgtacggggatcgaacccgc

SEQ ID NO: 17264 - DNA, 13 bp, Artificial Sequence
  synthetic circulating small noncoding RNA (sncRNA) 5' transfer RNA (tRNA) half
gccctctctgagg

SEQ ID NO: 17265 - DNA, 24 bp, Artificial Sequence
  synthetic circulating small noncoding RNA (sncRNA) 5' transfer RNA (tRNA) half
acccagggacgaccacagcgactt

SEQ ID NO: 17266 - DNA, 32 bp, Artificial Sequence
  synthetic circulating small noncoding RNA (sncRNA) 5' transfer RNA (tRNA) half
gctccaggtgaggctcgaactcacaacctcgg

SEQ ID NO: 17267 - DNA, 23 bp, Artificial Sequence
  synthetic circulating small noncoding RNA (sncRNA) 5' transfer RNA (tRNA) half
cccagcacgcttccgctgcgcca

SEQ ID NO: 17268 - DNA, 35 bp, Artificial Sequence
  synthetic circulating small noncoding RNA (sncRNA) 5' transfer RNA (tRNA) half
gctggcccgtacggggatcgaacccgcgaccttgg

SEQ ID NO: 17269 - DNA, 27 bp, Artificial Sequence
  synthetic circulating small noncoding RNA (sncRNA) 5' transfer RNA (tRNA) half
gggatgtagctcagtggtagagcgcat

SEQ ID NO: 17270 - DNA, 17 bp, Artificial Sequence
  synthetic circulating small noncoding RNA (sncRNA) 5' transfer RNA (tRNA) half
cagggcccggatagctc

SEQ ID NO: 17271 - DNA, 17 bp, Artificial Sequence
  synthetic circulating small noncoding RNA (sncRNA) 5' transfer RNA (tRNA) half
gtggtgagtatccccgc

SEQ ID NO: 17272 - DNA, 11 bp, Artificial Sequence
  synthetic circulating small noncoding RNA (sncRNA) 5' transfer RNA (tRNA) half
cgggacctctc

SEQ ID NO: 17273 - DNA, 22 bp, Artificial Sequence
  synthetic circulating small noncoding RNA (sncRNA) 5' transfer RNA (tRNA) half
aggtcgatggatcgaaaccatc

SEQ ID NO: 17274 - DNA, 40 bp, Artificial Sequence
  synthetic circulating small noncoding RNA (sncRNA) 5' transfer RNA (tRNA) half
aggttccaccgagatttgaactcggatcgctggattcaga

SEQ ID NO: 17275 - DNA, 27 bp, Artificial Sequence
  synthetic circulating small noncoding RNA (sncRNA) 5' transfer RNA (tRNA) half
agaattctaccattgaaccaccaatgc

SEQ ID NO: 17276 - DNA, 28 bp, Artificial Sequence
  synthetic circulating small noncoding RNA (sncRNA) 5' transfer RNA (tRNA) half
gttcagggttcaagtccctgttcaggcg

SEQ ID NO: 17277 - DNA, 27 bp, Artificial Sequence
  synthetic circulating small noncoding RNA (sncRNA) 5' transfer RNA (tRNA) half
agcctccccgtcggggaatcgaacccc

SEQ ID NO: 17278 - DNA, 15 bp, Artificial Sequence
  synthetic circulating small noncoding RNA (sncRNA) 5' transfer RNA (tRNA) half
agtccctgttcgggc

SEQ ID NO: 17279 - DNA, 11 bp, Artificial Sequence
  synthetic circulating small noncoding RNA (sncRNA) 5' transfer RNA (tRNA) half
ggtagcgtggc

SEQ ID NO: 17280 - DNA, 33 bp, Artificial Sequence
  synthetic circulating small noncoding RNA (sncRNA) 5' transfer RNA (tRNA) half
atccttaggtcgctggttcgattccggctcgaa

SEQ ID NO: 17281 - DNA, 15 bp, Artificial Sequence
  synthetic circulating small noncoding RNA (sncRNA) 5' transfer RNA (tRNA) half
ggattcgaacccacg

SEQ ID NO: 17282 - DNA, 29 bp, Artificial Sequence
  synthetic circulating small noncoding RNA (sncRNA) 5' transfer RNA (tRNA) half
cagcggaagcgtgctgggcccataaccca

SEQ ID NO: 17283 - DNA, 25 bp, Artificial Sequence
  synthetic circulating small noncoding RNA (sncRNA) 5' transfer RNA (tRNA) half
ccacatggtctagcggttaggattc

SEQ ID NO: 17284 - DNA, 29 bp, Artificial Sequence
  synthetic circulating small noncoding RNA (sncRNA) 5' transfer RNA (tRNA) half
cgtcgactctggcgggactcgaacccgca

SEQ ID NO: 17285 - DNA, 26 bp, Artificial Sequence
  synthetic circulating small noncoding RNA (sncRNA) 5' transfer RNA (tRNA) half
ccaccaacctttcggttaacagccga

SEQ ID NO: 17286 - DNA, 18 bp, Artificial Sequence
  synthetic circulating small noncoding RNA (sncRNA) 5' transfer RNA (tRNA) half
acctggagcacttctttt

SEQ ID NO: 17287 - DNA, 20 bp, Artificial Sequence
  synthetic circulating small noncoding RNA (sncRNA) 5' transfer RNA (tRNA) half
agcgcccgaacagggacttg

SEQ ID NO: 17288 - DNA, 7 bp, Artificial Sequence
  synthetic circulating small noncoding RNA (sncRNA) 5' transfer RNA (tRNA) half
atgggcc

SEQ ID NO: 17289 - DNA, 29 bp, Artificial Sequence
  synthetic circulating small noncoding RNA (sncRNA) 5' transfer RNA (tRNA) half
tcggggaatcgaaccccggtctcccgcgt

SEQ ID NO: 17290 - DNA, 17 bp, Artificial Sequence
  synthetic circulating small noncoding RNA (sncRNA) 5' transfer RNA (tRNA) half
accgaagatcgcgggtt

SEQ ID NO: 17291 - DNA, 29 bp, Artificial Sequence
  synthetic circulating small noncoding RNA (sncRNA) 5' transfer RNA (tRNA) half
ccagggttcaagtccctgttcgggcgctt

SEQ ID NO: 17292 - DNA, 33 bp, Artificial Sequence
  synthetic circulating small noncoding RNA (sncRNA) 5' transfer RNA (tRNA) half
aacaggagatcctgggttcaaatcccagcgggg

SEQ ID NO: 17293 - DNA, 16 bp, Artificial Sequence
  synthetic circulating small noncoding RNA (sncRNA) 5' transfer RNA (tRNA) half
tctcccaactgagcta

SEQ ID NO: 17294 - DNA, 17 bp, Artificial Sequence
  synthetic circulating small noncoding RNA (sncRNA) 5' transfer RNA (tRNA) half
agtcgaacccgggccgc

SEQ ID NO: 17295 - DNA, 17 bp, Artificial Sequence
  synthetic circulating small noncoding RNA (sncRNA) 5' transfer RNA (tRNA) half
atgtttccgcccggttt

SEQ ID NO: 17296 - DNA, 9 bp, Artificial Sequence
  synthetic circulating small noncoding RNA (sncRNA) 5' transfer RNA (tRNA) half
gcgcgataa

SEQ ID NO: 17297 - DNA, 6 bp, Artificial Sequence
  synthetic circulating small noncoding RNA (sncRNA) 5' transfer RNA (tRNA) half
cgacgg

SEQ ID NO: 17298 - DNA, 14 bp, Artificial Sequence
  synthetic circulating small noncoding RNA (sncRNA) 5' transfer RNA (tRNA) half
ctcgacgtgtaggt

SEQ ID NO: 17299 - DNA, 23 bp, Artificial Sequence
  synthetic circulating small noncoding RNA (sncRNA) 5' transfer RNA (tRNA) half
aggtcgctggttcgattccggct

SEQ ID NO: 17300 - DNA, 36 bp, Artificial Sequence
  synthetic circulating small noncoding RNA (sncRNA) 5' transfer RNA (tRNA) half
gcacccaaagcgagaatcatacccctagaccaacga

SEQ ID NO: 17301 - DNA, 31 bp, Artificial Sequence
  synthetic circulating small noncoding RNA (sncRNA) 5' transfer RNA (tRNA) half
cgagaggtcccgggttcaaatcccggacgag

SEQ ID NO: 17302 - DNA, 19 bp, Artificial Sequence
  synthetic circulating small noncoding RNA (sncRNA) 5' transfer RNA (tRNA) half
gagcgccaaatcctaacca

SEQ ID NO: 17303 - DNA, 34 bp, Artificial Sequence
  synthetic circulating small noncoding RNA (sncRNA) 5' transfer RNA (tRNA) half
cagaagattgagggttcgagtcccttcgtggtcg

SEQ ID NO: 17304 - DNA, 20 bp, Artificial Sequence
  synthetic circulating small noncoding RNA (sncRNA) 5' transfer RNA (tRNA) half
cgaagatcgcgggttcgaac

SEQ ID NO: 17305 - DNA, 21 bp, Artificial Sequence
  synthetic circulating small noncoding RNA (sncRNA) 5' transfer RNA (tRNA) half
gggaggcccgggttcggttcc

SEQ ID NO: 17306 - DNA, 10 bp, Artificial Sequence
  synthetic circulating small noncoding RNA (sncRNA) 5' transfer RNA (tRNA) half
atccgtagtc

SEQ ID NO: 17307 - DNA, 17 bp, Artificial Sequence
  synthetic circulating small noncoding RNA (sncRNA) 5' transfer RNA (tRNA) half
gtatgattctcgcttcg

SEQ ID NO: 17308 - DNA, 14 bp, Artificial Sequence
  synthetic circulating small noncoding RNA (sncRNA) 5' transfer RNA (tRNA) half
gattcgaacccagg

SEQ ID NO: 17309 - DNA, 19 bp, Artificial Sequence
  synthetic circulating small noncoding RNA (sncRNA) 5' transfer RNA (tRNA) half
ggcagcggtgggattcgaa

SEQ ID NO: 17310 - DNA, 18 bp, Artificial Sequence
  synthetic circulating small noncoding RNA (sncRNA) 5' transfer RNA (tRNA) half
cctgccacgcgggaggcc

SEQ ID NO: 17311 - DNA, 19 bp, Artificial Sequence
  synthetic circulating small noncoding RNA (sncRNA) 5' transfer RNA (tRNA) half
ggcgtccctgggtgggctc

SEQ ID NO: 17312 - DNA, 18 bp, Artificial Sequence
  synthetic circulating small noncoding RNA (sncRNA) 5' transfer RNA (tRNA) half
ttcgattcccggcccatg

SEQ ID NO: 17313 - DNA, 16 bp, Artificial Sequence
  synthetic circulating small noncoding RNA (sncRNA) 5' transfer RNA (tRNA) half
gcgaatgtgataacca

SEQ ID NO: 17314 - DNA, 40 bp, Artificial Sequence
  synthetic circulating small noncoding RNA (sncRNA) 5' transfer RNA (tRNA) half
gtaaacaggagatcctgggttcgaatcccagcggtgcctt

SEQ ID NO: 17315 - DNA, 21 bp, Artificial Sequence
  synthetic circulating small noncoding RNA (sncRNA) 5' transfer RNA (tRNA) half
aaacctggcggaaacagtttg

SEQ ID NO: 17316 - DNA, 25 bp, Artificial Sequence
  synthetic circulating small noncoding RNA (sncRNA) 5' transfer RNA (tRNA) half
caccgggagtcgaacccgggccgcc

SEQ ID NO: 17317 - DNA, 15 bp, Artificial Sequence
  synthetic circulating small noncoding RNA (sncRNA) 5' transfer RNA (tRNA) half
gtgagagcgccgaat

SEQ ID NO: 17318 - DNA, 15 bp, Artificial Sequence
  synthetic circulating small noncoding RNA (sncRNA) 5' transfer RNA (tRNA) half
gccaatgccttatcc

SEQ ID NO: 17319 - DNA, 28 bp, Artificial Sequence
  synthetic circulating small noncoding RNA (sncRNA) 5' transfer RNA (tRNA) half
tccagagtgctaaccattacaccatggg

SEQ ID NO: 17320 - DNA, 21 bp, Artificial Sequence
  synthetic circulating small noncoding RNA (sncRNA) 5' transfer RNA (tRNA) half
ggcgtccctgggtgggctcga

SEQ ID NO: 17321 - DNA, 19 bp, Artificial Sequence
  synthetic circulating small noncoding RNA (sncRNA) 5' transfer RNA (tRNA) half
tcgaacccacgcagacata

SEQ ID NO: 17322 - DNA, 14 bp, Artificial Sequence
  synthetic circulating small noncoding RNA (sncRNA) 5' transfer RNA (tRNA) half
gccctctctgaggt

SEQ ID NO: 17323 - DNA, 14 bp, Artificial Sequence
  synthetic circulating small noncoding RNA (sncRNA) 5' transfer RNA (tRNA) half
ctcggccatcctga

SEQ ID NO: 17324 - DNA, 16 bp, Artificial Sequence
  synthetic circulating small noncoding RNA (sncRNA) 5' transfer RNA (tRNA) half
gaacccacgcctccat

SEQ ID NO: 17325 - DNA, 26 bp, Artificial Sequence
  synthetic circulating small noncoding RNA (sncRNA) 5' transfer RNA (tRNA) half
ctggtggtctagtggttaggattcgg

SEQ ID NO: 17326 - DNA, 36 bp, Artificial Sequence
  synthetic circulating small noncoding RNA (sncRNA) 5' transfer RNA (tRNA) half
acacgcgaaaggtccccggttcgaaaccgggcggaa

SEQ ID NO: 17327 - DNA, 22 bp, Artificial Sequence
  synthetic circulating small noncoding RNA (sncRNA) 5' transfer RNA (tRNA) half
cactcctgacagcctcgccttt

SEQ ID NO: 17328 - DNA, 14 bp, Artificial Sequence
  synthetic circulating small noncoding RNA (sncRNA) 5' transfer RNA (tRNA) half
gagctagccgggcg

SEQ ID NO: 17329 - DNA, 30 bp, Artificial Sequence
  synthetic circulating small noncoding RNA (sncRNA) 5' transfer RNA (tRNA) half
gagaccggggttcgattccccgacggggag

SEQ ID NO: 17330 - DNA, 22 bp, Artificial Sequence
  synthetic circulating small noncoding RNA (sncRNA) 5' transfer RNA (tRNA) half
cagtctcttcgggggcgtgggt

SEQ ID NO: 17331 - DNA, 14 bp, Artificial Sequence
  synthetic circulating small noncoding RNA (sncRNA) 5' transfer RNA (tRNA) half
agaatcatacccct

SEQ ID NO: 17332 - DNA, 35 bp, Artificial Sequence
  synthetic circulating small noncoding RNA (sncRNA) 5' transfer RNA (tRNA) half
gcattggccgggaatcgaacccgggtcacccgcgt

SEQ ID NO: 17333 - DNA, 18 bp, Artificial Sequence
  synthetic circulating small noncoding RNA (sncRNA) 5' transfer RNA (tRNA) half
gggacctttcgcgtgtga

SEQ ID NO: 17334 - DNA, 21 bp, Artificial Sequence
  synthetic circulating small noncoding RNA (sncRNA) 5' transfer RNA (tRNA) half
gcaagaattctaccactgaac

SEQ ID NO: 17335 - DNA, 19 bp, Artificial Sequence
  synthetic circulating small noncoding RNA (sncRNA) 5' transfer RNA (tRNA) half
gttcaaatctcggtggaac

SEQ ID NO: 17336 - DNA, 17 bp, Artificial Sequence
  synthetic circulating small noncoding RNA (sncRNA) 5' transfer RNA (tRNA) half
gcagcggtgggattcga

SEQ ID NO: 17337 - DNA, 17 bp, Artificial Sequence
  synthetic circulating small noncoding RNA (sncRNA) 5' transfer RNA (tRNA) half
ggtcgcgggttcgatcc

SEQ ID NO: 17338 - DNA, 24 bp, Artificial Sequence
  synthetic circulating small noncoding RNA (sncRNA) 5' transfer RNA (tRNA) half
aatcccggacgagcccagctactt

SEQ ID NO: 17339 - DNA, 23 bp, Artificial Sequence
  synthetic circulating small noncoding RNA (sncRNA) 5' transfer RNA (tRNA) half
gccgtgatcgtatagtggttagt

SEQ ID NO: 17340 - DNA, 17 bp, Artificial Sequence
  synthetic circulating small noncoding RNA (sncRNA) 5' transfer RNA (tRNA) half
gcacccggatttgaacc

SEQ ID NO: 17341 - DNA, 24 bp, Artificial Sequence
  synthetic circulating small noncoding RNA (sncRNA) 5' transfer RNA (tRNA) half
tcagagtccagagtgctagccatt

SEQ ID NO: 17342 - DNA, 21 bp, Artificial Sequence
  synthetic circulating small noncoding RNA (sncRNA) 5' transfer RNA (tRNA) half
aggccccgggttcgatccccg

SEQ ID NO: 17343 - DNA, 17 bp, Artificial Sequence
  synthetic circulating small noncoding RNA (sncRNA) 5' transfer RNA (tRNA) half
cggggacctttcgcgtg

SEQ ID NO: 17344 - DNA, 16 bp, Artificial Sequence
  synthetic circulating small noncoding RNA (sncRNA) 5' transfer RNA (tRNA) half
ccgttgcgccacgagg

SEQ ID NO: 17345 - DNA, 37 bp, Artificial Sequence
  synthetic circulating small noncoding RNA (sncRNA) 5' transfer RNA (tRNA) half
tgggtccgagaggtcccgggttcaaatcccggacgag

SEQ ID NO: 17346 - DNA, 14 bp, Artificial Sequence
  synthetic circulating small noncoding RNA (sncRNA) 5' transfer RNA (tRNA) half
ccgcggcggtgaga

SEQ ID NO: 17347 - DNA, 36 bp, Artificial Sequence
  synthetic circulating small noncoding RNA (sncRNA) 5' transfer RNA (tRNA) half
agagcgccgaatcctaaccactagaccaccagggag

SEQ ID NO: 17348 - DNA, 17 bp, Artificial Sequence
  synthetic circulating small noncoding RNA (sncRNA) 5' transfer RNA (tRNA) half
aaaggagttgtgtcaga

SEQ ID NO: 17349 - DNA, 15 bp, Artificial Sequence
  synthetic circulating small noncoding RNA (sncRNA) 5' transfer RNA (tRNA) half
gcgcccaacgtgggg

SEQ ID NO: 17350 - DNA, 15 bp, Artificial Sequence
  synthetic circulating small noncoding RNA (sncRNA) 5' transfer RNA (tRNA) half
gctctaccaactgag

SEQ ID NO: 17351 - DNA, 14 bp, Artificial Sequence
  synthetic circulating small noncoding RNA (sncRNA) 5' transfer RNA (tRNA) half
ggccacgactacag

SEQ ID NO: 17352 - DNA, 12 bp, Artificial Sequence
  synthetic circulating small noncoding RNA (sncRNA) 5' transfer RNA (tRNA) half
agtactctgcgt

SEQ ID NO: 17353 - DNA, 18 bp, Artificial Sequence
  synthetic circulating small noncoding RNA (sncRNA) 5' transfer RNA (tRNA) half
aagtccctgttcgggcgc

SEQ ID NO: 17354 - DNA, 16 bp, Artificial Sequence
  synthetic circulating small noncoding RNA (sncRNA) 5' transfer RNA (tRNA) half
gcgctctaccaactga

SEQ ID NO: 17355 - DNA, 23 bp, Artificial Sequence
  synthetic circulating small noncoding RNA (sncRNA) 5' transfer RNA (tRNA) half
tggcagcggtgggattcgaaccc

SEQ ID NO: 17356 - DNA, 17 bp, Artificial Sequence
  synthetic circulating small noncoding RNA (sncRNA) 5' transfer RNA (tRNA) half
ggggagactgcgacctg

SEQ ID NO: 17357 - DNA, 27 bp, Artificial Sequence
  synthetic circulating small noncoding RNA (sncRNA) 5' transfer RNA (tRNA) half
attgtgggttcgagtcccatctgggtc

SEQ ID NO: 17358 - DNA, 30 bp, Artificial Sequence
  synthetic circulating small noncoding RNA (sncRNA) 5' transfer RNA (tRNA) half
tgtcgtccctgggtgggctcgaaccaccaa

SEQ ID NO: 17359 - DNA, 24 bp, Artificial Sequence
  synthetic circulating small noncoding RNA (sncRNA) 5' transfer RNA (tRNA) half
agtgtagtggtcatcacgctcgcc

SEQ ID NO: 17360 - DNA, 36 bp, Artificial Sequence
  synthetic circulating small noncoding RNA (sncRNA) 5' transfer RNA (tRNA) half
ttcctggttttcacccaggcggcccgggttcgactc

SEQ ID NO: 17361 - DNA, 9 bp, Artificial Sequence
  synthetic circulating small noncoding RNA (sncRNA) 5' transfer RNA (tRNA) half
tccattgcg

SEQ ID NO: 17362 - DNA, 19 bp, Artificial Sequence
  synthetic circulating small noncoding RNA (sncRNA) 5' transfer RNA (tRNA) half
aggtcctgggttcgagccc

SEQ ID NO: 17363 - DNA, 35 bp, Artificial Sequence
  synthetic circulating small noncoding RNA (sncRNA) 5' transfer RNA (tRNA) half
agtaaccacgaagggattcgaaccctcaatcttct

SEQ ID NO: 17364 - DNA, 42 bp, Artificial Sequence
  synthetic circulating small noncoding RNA (sncRNA) 5' transfer RNA (tRNA) half
gggacctcttgatctgcagtcaaatgctctaccactgagcta

SEQ ID NO: 17365 - DNA, 39 bp, Artificial Sequence
  synthetic circulating small noncoding RNA (sncRNA) 5' transfer RNA (tRNA) half
accaccccaggtgggactcgaacccacaatccctggctt

SEQ ID NO: 17366 - DNA, 17 bp, Artificial Sequence
  synthetic circulating small noncoding RNA (sncRNA) 5' transfer RNA (tRNA) half
ggagtcgaacctggaat

SEQ ID NO: 17367 - DNA, 32 bp, Artificial Sequence
  synthetic circulating small noncoding RNA (sncRNA) 5' transfer RNA (tRNA) half
tctgagggttcagggttcaagtccctgttcag

SEQ ID NO: 17368 - DNA, 7 bp, Artificial Sequence
  synthetic circulating small noncoding RNA (sncRNA) 5' transfer RNA (tRNA) half
ccgtcgg

SEQ ID NO: 17369 - DNA, 21 bp, Artificial Sequence
  synthetic circulating small noncoding RNA (sncRNA) 5' transfer RNA (tRNA) half
aaaactttgtcaggagtggga

SEQ ID NO: 17370 - DNA, 30 bp, Artificial Sequence
  synthetic circulating small noncoding RNA (sncRNA) 5' transfer RNA (tRNA) half
ccccatggtgtaatggttagcactctggac

SEQ ID NO: 17371 - DNA, 23 bp, Artificial Sequence
  synthetic circulating small noncoding RNA (sncRNA) 5' transfer RNA (tRNA) half
tcccggccaatgcactctctcac

SEQ ID NO: 17372 - DNA, 17 bp, Artificial Sequence
  synthetic circulating small noncoding RNA (sncRNA) 5' transfer RNA (tRNA) half
agtcaaatgctctaccc

SEQ ID NO: 17373 - DNA, 18 bp, Artificial Sequence
  synthetic circulating small noncoding RNA (sncRNA) 5' transfer RNA (tRNA) half
gacccagtggcctaatgg

SEQ ID NO: 17374 - DNA, 20 bp, Artificial Sequence
  synthetic circulating small noncoding RNA (sncRNA) 5' transfer RNA (tRNA) half
agtactaaccactatacgat

SEQ ID NO: 17375 - DNA, 17 bp, Artificial Sequence
  synthetic circulating small noncoding RNA (sncRNA) 5' transfer RNA (tRNA) half
cgaacctagaatcttct

SEQ ID NO: 17376 - DNA, 21 bp, Artificial Sequence
  synthetic circulating small noncoding RNA (sncRNA) 5' transfer RNA (tRNA) half
gaacccgggccgcctgggtga

SEQ ID NO: 17377 - DNA, 17 bp, Artificial Sequence
  synthetic circulating small noncoding RNA (sncRNA) 5' transfer RNA (tRNA) half
atccttaggtcgctggt

SEQ ID NO: 17378 - DNA, 20 bp, Artificial Sequence
  synthetic circulating small noncoding RNA (sncRNA) 5' transfer RNA (tRNA) half
ggacctttcgcgtgtgaggc

SEQ ID NO: 17379 - DNA, 13 bp, Artificial Sequence
  synthetic circulating small noncoding RNA (sncRNA) 5' transfer RNA (tRNA) half
tgaggcgaacgtg

SEQ ID NO: 17380 - DNA, 10 bp, Artificial Sequence
  synthetic circulating small noncoding RNA (sncRNA) 5' transfer RNA (tRNA) half
tcggccacga

SEQ ID NO: 17381 - DNA, 30 bp, Artificial Sequence
  synthetic circulating small noncoding RNA (sncRNA) 5' transfer RNA (tRNA) half
tccgcccggtttcgaaccggggacctttcg

SEQ ID NO: 17382 - DNA, 28 bp, Artificial Sequence
  synthetic circulating small noncoding RNA (sncRNA) 5' transfer RNA (tRNA) half
cctgggttcgagccccagtggaaccacg

SEQ ID NO: 17383 - DNA, 31 bp, Artificial Sequence
  synthetic circulating small noncoding RNA (sncRNA) 5' transfer RNA (tRNA) half
ccagcgccttagaccgctcggccacgctacc

SEQ ID NO: 17384 - DNA, 39 bp, Artificial Sequence
  synthetic circulating small noncoding RNA (sncRNA) 5' transfer RNA (tRNA) half
agtggttaggattcggcgctctcaccgccgcggcccggg

SEQ ID NO: 17385 - DNA, 37 bp, Artificial Sequence
  synthetic circulating small noncoding RNA (sncRNA) 5' transfer RNA (tRNA) half
actcggatcgctggattcagagtccagagtgctagcc

SEQ ID NO: 17386 - DNA, 38 bp, Artificial Sequence
  synthetic circulating small noncoding RNA (sncRNA) 5' transfer RNA (tRNA) half
gggctcgtccgggatttgaacccgggacctctcgcacc

SEQ ID NO: 17387 - DNA, 19 bp, Artificial Sequence
  synthetic circulating small noncoding RNA (sncRNA) 5' transfer RNA (tRNA) half
ggttcgattcccggccaat

SEQ ID NO: 17388 - DNA, 23 bp, Artificial Sequence
  synthetic circulating small noncoding RNA (sncRNA) 5' transfer RNA (tRNA) half
accgctcggccatcctgacaact

SEQ ID NO: 17389 - DNA, 20 bp, Artificial Sequence
  synthetic circulating small noncoding RNA (sncRNA) 5' transfer RNA (tRNA) half
cagggttcgaacctgcgcgg

SEQ ID NO: 17390 - DNA, 16 bp, Artificial Sequence
  synthetic circulating small noncoding RNA (sncRNA) 5' transfer RNA (tRNA) half
aattctcgcctcccac

SEQ ID NO: 17391 - DNA, 19 bp, Artificial Sequence
  synthetic circulating small noncoding RNA (sncRNA) 5' transfer RNA (tRNA) half
gttaggcgagcgtgatgac

SEQ ID NO: 17392 - DNA, 23 bp, Artificial Sequence
  synthetic circulating small noncoding RNA (sncRNA) 5' transfer RNA (tRNA) half
cccgggccgcggcggtgagagcg

SEQ ID NO: 17393 - DNA, 34 bp, Artificial Sequence
  synthetic circulating small noncoding RNA (sncRNA) 5' transfer RNA (tRNA) half
cacaccgggagtcgaacccgggccgcctgggtga

SEQ ID NO: 17394 - DNA, 23 bp, Artificial Sequence
  synthetic circulating small noncoding RNA (sncRNA) 5' transfer RNA (tRNA) half
tgcgagaggtagcgggatcgatg

SEQ ID NO: 17395 - DNA, 23 bp, Artificial Sequence
  synthetic circulating small noncoding RNA (sncRNA) 5' transfer RNA (tRNA) half
agcgtggccgagcggtctaaggc

SEQ ID NO: 17396 - DNA, 13 bp, Artificial Sequence
  synthetic circulating small noncoding RNA (sncRNA) 5' transfer RNA (tRNA) half
gcgccgctggtgt

SEQ ID NO: 17397 - DNA, 20 bp, Artificial Sequence
  synthetic circulating small noncoding RNA (sncRNA) 5' transfer RNA (tRNA) half
tcagtggtagagcatttgac

SEQ ID NO: 17398 - DNA, 42 bp, Artificial Sequence
  synthetic circulating small noncoding RNA (sncRNA) 5' transfer RNA (tRNA) half
ggagtcgaacccgggccgcctgggtgaaaaccaggaatccta

SEQ ID NO: 17399 - DNA, 19 bp, Artificial Sequence
  synthetic circulating small noncoding RNA (sncRNA) 5' transfer RNA (tRNA) half
gtccaatgcgctatccatt

SEQ ID NO: 17400 - DNA, 28 bp, Artificial Sequence
  synthetic circulating small noncoding RNA (sncRNA) 5' transfer RNA (tRNA) half
cgcgggaggcccgggttcgattcccggc

SEQ ID NO: 17401 - DNA, 39 bp, Artificial Sequence
  synthetic circulating small noncoding RNA (sncRNA) 5' transfer RNA (tRNA) half
aacccgggacctctcgcaccctaagcgagaatcataccc

SEQ ID NO: 17402 - DNA, 31 bp, Artificial Sequence
  synthetic circulating small noncoding RNA (sncRNA) 5' transfer RNA (tRNA) half
aggagatcctgggttcaaatcccagcggggc

SEQ ID NO: 17403 - DNA, 18 bp, Artificial Sequence
  synthetic circulating small noncoding RNA (sncRNA) 5' transfer RNA (tRNA) half
ccacgcgtgcagagcaca

SEQ ID NO: 17404 - DNA, 19 bp, Artificial Sequence
  synthetic circulating small noncoding RNA (sncRNA) 5' transfer RNA (tRNA) half
gccgaatcctagccactag

SEQ ID NO: 17405 - DNA, 22 bp, Artificial Sequence
  synthetic circulating small noncoding RNA (sncRNA) 5' transfer RNA (tRNA) half
tgtcagaagtgggattcgaacc

SEQ ID NO: 17406 - DNA, 5 bp, Artificial Sequence
  synthetic circulating small noncoding RNA (sncRNA) 5' transfer RNA (tRNA) half
tcgac

SEQ ID NO: 17407 - DNA, 42 bp, Artificial Sequence
  synthetic circulating small noncoding RNA (sncRNA) 5' transfer RNA (tRNA) half
ttcgcgtgttaggcgaatgtgataaccactacactacggaaa

SEQ ID NO: 17408 - DNA, 15 bp, Artificial Sequence
  synthetic circulating small noncoding RNA (sncRNA) 5' transfer RNA (tRNA) half
tcgactcccggtgtg

SEQ ID NO: 17409 - DNA, 12 bp, Artificial Sequence
  synthetic circulating small noncoding RNA (sncRNA) 5' transfer RNA (tRNA) half
ttcgactccggc

SEQ ID NO: 17410 - DNA, 22 bp, Artificial Sequence
  synthetic circulating small noncoding RNA (sncRNA) 5' transfer RNA (tRNA) half
agtcgatgaggatgggattcga

SEQ ID NO: 17411 - DNA, 35 bp, Artificial Sequence
  synthetic circulating small noncoding RNA (sncRNA) 5' transfer RNA (tRNA) half
agcgccgaatcctaaccactagaccaccagggagc

SEQ ID NO: 17412 - DNA, 38 bp, Artificial Sequence
  synthetic circulating small noncoding RNA (sncRNA) 5' transfer RNA (tRNA) half
aacaggagatcctgggttcgaatcccagcggggccttt

SEQ ID NO: 17413 - DNA, 18 bp, Artificial Sequence
  synthetic circulating small noncoding RNA (sncRNA) 5' transfer RNA (tRNA) half
cgctggttcgactccggc

SEQ ID NO: 17414 - DNA, 34 bp, Artificial Sequence
  synthetic circulating small noncoding RNA (sncRNA) 5' transfer RNA (tRNA) half
agtccagagtgctaaccattacaccatggaaccc

SEQ ID NO: 17415 - DNA, 34 bp, Artificial Sequence
  synthetic circulating small noncoding RNA (sncRNA) 5' transfer RNA (tRNA) half
ggtttctgtagtgtagtggttatcacgttcgcct

SEQ ID NO: 17416 - DNA, 14 bp, Artificial Sequence
  synthetic circulating small noncoding RNA (sncRNA) 5' transfer RNA (tRNA) half
cccggccaatgcac

SEQ ID NO: 17417 - DNA, 23 bp, Artificial Sequence
  synthetic circulating small noncoding RNA (sncRNA) 5' transfer RNA (tRNA) half
tgaaaaccaggaatcctaaccgc

SEQ ID NO: 17418 - DNA, 26 bp, Artificial Sequence
  synthetic circulating small noncoding RNA (sncRNA) 5' transfer RNA (tRNA) half
gtctgatgctctaccaactgagctat

SEQ ID NO: 17419 - DNA, 34 bp, Artificial Sequence
  synthetic circulating small noncoding RNA (sncRNA) 5' transfer RNA (tRNA) half
gaacccgggccgcggcggtgagagcgccgaatcc

SEQ ID NO: 17420 - DNA, 17 bp, Artificial Sequence
  synthetic circulating small noncoding RNA (sncRNA) 5' transfer RNA (tRNA) half
caagaggtccctggttc

SEQ ID NO: 17421 - DNA, 35 bp, Artificial Sequence
  synthetic circulating small noncoding RNA (sncRNA) 5' transfer RNA (tRNA) half
gtttctgtagtgtagtggttatcacgctcgcctaa

SEQ ID NO: 17422 - DNA, 12 bp, Artificial Sequence
  synthetic circulating small noncoding RNA (sncRNA) 5' transfer RNA (tRNA) half
gtcctgggttcg

SEQ ID NO: 17423 - DNA, 35 bp, Artificial Sequence
  synthetic circulating small noncoding RNA (sncRNA) 5' transfer RNA (tRNA) half
cccacaccgggagtcgaacccgggccgcctgggtg

SEQ ID NO: 17424 - DNA, 24 bp, Artificial Sequence
  synthetic circulating small noncoding RNA (sncRNA) 5' transfer RNA (tRNA) half
acccgggcctcccgcgtggcaggc

SEQ ID NO: 17425 - DNA, 15 bp, Artificial Sequence
  synthetic circulating small noncoding RNA (sncRNA) 5' transfer RNA (tRNA) half
gttccaccgagattt

SEQ ID NO: 17426 - DNA, 23 bp, Artificial Sequence
  synthetic circulating small noncoding RNA (sncRNA) 5' transfer RNA (tRNA) half
aaagtctgatgctctaccaactg

SEQ ID NO: 17427 - DNA, 21 bp, Artificial Sequence
  synthetic circulating small noncoding RNA (sncRNA) 5' transfer RNA (tRNA) half
tccccatcggggaatcgaacc

SEQ ID NO: 17428 - DNA, 32 bp, Artificial Sequence
  synthetic circulating small noncoding RNA (sncRNA) 5' transfer RNA (tRNA) half
aggccccgggttcaatccccggcatctccaac

SEQ ID NO: 17429 - DNA, 28 bp, Artificial Sequence
  synthetic circulating small noncoding RNA (sncRNA) 5' transfer RNA (tRNA) half
cgctggttcgactccggctcgaaggaga

SEQ ID NO: 17430 - DNA, 15 bp, Artificial Sequence
  synthetic circulating small noncoding RNA (sncRNA) 5' transfer RNA (tRNA) half
ttaatctcagggtcg

SEQ ID NO: 17431 - DNA, 15 bp, Artificial Sequence
  synthetic circulating small noncoding RNA (sncRNA) 5' transfer RNA (tRNA) half
gtcccatctggggtg

SEQ ID NO: 17432 - DNA, 23 bp, Artificial Sequence
  synthetic circulating small noncoding RNA (sncRNA) 5' transfer RNA (tRNA) half
cgaacccacgcctccaggggaga

SEQ ID NO: 17433 - DNA, 12 bp, Artificial Sequence
  synthetic circulating small noncoding RNA (sncRNA) 5' transfer RNA (tRNA) half
cccggccaatgc

SEQ ID NO: 17434 - DNA, 10 bp, Artificial Sequence
  synthetic circulating small noncoding RNA (sncRNA) 5' transfer RNA (tRNA) half
gagctatccg

SEQ ID NO: 17435 - DNA, 17 bp, Artificial Sequence
  synthetic circulating small noncoding RNA (sncRNA) 5' transfer RNA (tRNA) half
ttcaaatctcggtggga

SEQ ID NO: 17436 - DNA, 17 bp, Artificial Sequence
  synthetic circulating small noncoding RNA (sncRNA) 5' transfer RNA (tRNA) half
tccaggttcgactcctg

SEQ ID NO: 17437 - DNA, 11 bp, Artificial Sequence
  synthetic circulating small noncoding RNA (sncRNA) 5' transfer RNA (tRNA) half
cggatttgaac

SEQ ID NO: 17438 - DNA, 19 bp, Artificial Sequence
  synthetic circulating small noncoding RNA (sncRNA) 5' transfer RNA (tRNA) half
gtcggggaatcgaaccccg

SEQ ID NO: 17439 - DNA, 12 bp, Artificial Sequence
  synthetic circulating small noncoding RNA (sncRNA) 5' transfer RNA (tRNA) half
aggtcgctggtt

SEQ ID NO: 17440 - DNA, 15 bp, Artificial Sequence
  synthetic circulating small noncoding RNA (sncRNA) 5' transfer RNA (tRNA) half
ctcgtggcgcaacgg

SEQ ID NO: 17441 - DNA, 19 bp, Artificial Sequence
  synthetic circulating small noncoding RNA (sncRNA) 5' transfer RNA (tRNA) half
tctcggtgggaccttcttt

SEQ ID NO: 17442 - DNA, 35 bp, Artificial Sequence
  synthetic circulating small noncoding RNA (sncRNA) 5' transfer RNA (tRNA) half
acgcgagaggtccccggttcgaaaccgggcggaaa

SEQ ID NO: 17443 - DNA, 17 bp, Artificial Sequence
  synthetic circulating small noncoding RNA (sncRNA) 5' transfer RNA (tRNA) half
aaccactagaccaccag

SEQ ID NO: 17444 - DNA, 8 bp, Artificial Sequence
  synthetic circulating small noncoding RNA (sncRNA) 5' transfer RNA (tRNA) half
cggccacg

SEQ ID NO: 17445 - DNA, 16 bp, Artificial Sequence
  synthetic circulating small noncoding RNA (sncRNA) 5' transfer RNA (tRNA) half
ttcggttcccggccaa

SEQ ID NO: 17446 - DNA, 24 bp, Artificial Sequence
  synthetic circulating small noncoding RNA (sncRNA) 5' transfer RNA (tRNA) half
ttcctggttttcacccaggcggcc

SEQ ID NO: 17447 - DNA, 23 bp, Artificial Sequence
  synthetic circulating small noncoding RNA (sncRNA) 5' transfer RNA (tRNA) half
gtggttaggattcggcgctctca

SEQ ID NO: 17448 - DNA, 24 bp, Artificial Sequence
  synthetic circulating small noncoding RNA (sncRNA) 5' transfer RNA (tRNA) half
gagttcgaacctcagagggggcag

SEQ ID NO: 17449 - DNA, 26 bp, Artificial Sequence
  synthetic circulating small noncoding RNA (sncRNA) 5' transfer RNA (tRNA) half
agtaaccacgaagggattcgaaccct

SEQ ID NO: 17450 - DNA, 35 bp, Artificial Sequence
  synthetic circulating small noncoding RNA (sncRNA) 5' transfer RNA (tRNA) half
ccacaccgggagtcgaacccgggccgcctgggtga

SEQ ID NO: 17451 - DNA, 18 bp, Artificial Sequence
  synthetic circulating small noncoding RNA (sncRNA) 5' transfer RNA (tRNA) half
caaatctcgctggggcct

SEQ ID NO: 17452 - DNA, 12 bp, Artificial Sequence
  synthetic circulating small noncoding RNA (sncRNA) 5' transfer RNA (tRNA) half
caccgccgcggc

SEQ ID NO: 17453 - DNA, 18 bp, Artificial Sequence
  synthetic circulating small noncoding RNA (sncRNA) 5' transfer RNA (tRNA) half
gtggttaggattcggtgc

SEQ ID NO: 17454 - DNA, 18 bp, Artificial Sequence
  synthetic circulating small noncoding RNA (sncRNA) 5' transfer RNA (tRNA) half
aaggcgccagactcaagc

SEQ ID NO: 17455 - DNA, 24 bp, Artificial Sequence
  synthetic circulating small noncoding RNA (sncRNA) 5' transfer RNA (tRNA) half
gtgggttcgaatcccaccgctgcc

SEQ ID NO: 17456 - DNA, 25 bp, Artificial Sequence
  synthetic circulating small noncoding RNA (sncRNA) 5' transfer RNA (tRNA) half
aaagacctgtacattccgagccagc

SEQ ID NO: 17457 - DNA, 29 bp, Artificial Sequence
  synthetic circulating small noncoding RNA (sncRNA) 5' transfer RNA (tRNA) half
ggtggtctagtggttaggattcggcgctc

SEQ ID NO: 17458 - DNA, 43 bp, Artificial Sequence
  synthetic circulating small noncoding RNA (sncRNA) 5' transfer RNA (tRNA) half
ccgacgaggatgggattcgaacccacgcgtgcaaagcacaatg

SEQ ID NO: 17459 - DNA, 8 bp, Artificial Sequence
  synthetic circulating small noncoding RNA (sncRNA) 5' transfer RNA (tRNA) half
cctccgct

SEQ ID NO: 17460 - DNA, 15 bp, Artificial Sequence
  synthetic circulating small noncoding RNA (sncRNA) 5' transfer RNA (tRNA) half
gtaaacaggagatcc

SEQ ID NO: 17461 - DNA, 18 bp, Artificial Sequence
  synthetic circulating small noncoding RNA (sncRNA) 5' transfer RNA (tRNA) half
aggattcggcgctctcac

SEQ ID NO: 17462 - DNA, 20 bp, Artificial Sequence
  synthetic circulating small noncoding RNA (sncRNA) 5' transfer RNA (tRNA) half
gttcgattcccggtcaggga

SEQ ID NO: 17463 - DNA, 28 bp, Artificial Sequence
  synthetic circulating small noncoding RNA (sncRNA) 5' transfer RNA (tRNA) half
caggagtggggttcgaacccacgcagac

SEQ ID NO: 17464 - DNA, 22 bp, Artificial Sequence
  synthetic circulating small noncoding RNA (sncRNA) 5' transfer RNA (tRNA) half
tcgaatcctgccgactacgtct

SEQ ID NO: 17465 - DNA, 18 bp, Artificial Sequence
  synthetic circulating small noncoding RNA (sncRNA) 5' transfer RNA (tRNA) half
cgagtcccttcgtggtcg

SEQ ID NO: 17466 - DNA, 18 bp, Artificial Sequence
  synthetic circulating small noncoding RNA (sncRNA) 5' transfer RNA (tRNA) half
ggccacctcgtcctctct

SEQ ID NO: 17467 - DNA, 21 bp, Artificial Sequence
  synthetic circulating small noncoding RNA (sncRNA) 5' transfer RNA (tRNA) half
taggggtatgattctcggttt

SEQ ID NO: 17468 - DNA, 18 bp, Artificial Sequence
  synthetic circulating small noncoding RNA (sncRNA) 5' transfer RNA (tRNA) half
cggatagctcagtcggta

SEQ ID NO: 17469 - DNA, 18 bp, Artificial Sequence
  synthetic circulating small noncoding RNA (sncRNA) 5' transfer RNA (tRNA) half
tccctggtggtctagtgg

SEQ ID NO: 17470 - DNA, 27 bp, Artificial Sequence
  synthetic circulating small noncoding RNA (sncRNA) 5' transfer RNA (tRNA) half
gacttaaaaccttgttcccagaggttc

SEQ ID NO: 17471 - DNA, 25 bp, Artificial Sequence
  synthetic circulating small noncoding RNA (sncRNA) 5' transfer RNA (tRNA) half
gatccatcgacctctgggttatggg

SEQ ID NO: 17472 - DNA, 23 bp, Artificial Sequence
  synthetic circulating small noncoding RNA (sncRNA) 5' transfer RNA (tRNA) half
ccgggagtcgaacccgggccgcc

SEQ ID NO: 17473 - DNA, 18 bp, Artificial Sequence
  synthetic circulating small noncoding RNA (sncRNA) 5' transfer RNA (tRNA) half
cgattgcgccacagagac

SEQ ID NO: 17474 - DNA, 23 bp, Artificial Sequence
  synthetic circulating small noncoding RNA (sncRNA) 5' transfer RNA (tRNA) half
aaccctggaccctcagattaaaa

SEQ ID NO: 17475 - DNA, 10 bp, Artificial Sequence
  synthetic circulating small noncoding RNA (sncRNA) 5' transfer RNA (tRNA) half
agcacccgga

SEQ ID NO: 17476 - DNA, 19 bp, Artificial Sequence
  synthetic circulating small noncoding RNA (sncRNA) 5' transfer RNA (tRNA) half
ccactgaaccaccaatgca

SEQ ID NO: 17477 - DNA, 19 bp, Artificial Sequence
  synthetic circulating small noncoding RNA (sncRNA) 5' transfer RNA (tRNA) half
atcccggacgagccccact

SEQ ID NO: 17478 - DNA, 11 bp, Artificial Sequence
  synthetic circulating small noncoding RNA (sncRNA) 5' transfer RNA (tRNA) half
gagctaatccc

SEQ ID NO: 17479 - DNA, 21 bp, Artificial Sequence
  synthetic circulating small noncoding RNA (sncRNA) 5' transfer RNA (tRNA) half
ggcgggactcgaacccgcaac

SEQ ID NO: 17480 - DNA, 19 bp, Artificial Sequence
  synthetic circulating small noncoding RNA (sncRNA) 5' transfer RNA (tRNA) half
cgcgaaaggtccccggttc

SEQ ID NO: 17481 - DNA, 17 bp, Artificial Sequence
  synthetic circulating small noncoding RNA (sncRNA) 5' transfer RNA (tRNA) half
gcgtggccgagcggtct

SEQ ID NO: 17482 - DNA, 27 bp, Artificial Sequence
  synthetic circulating small noncoding RNA (sncRNA) 5' transfer RNA (tRNA) half
cccaggcggcccgggttcgactcccgg

SEQ ID NO: 17483 - DNA, 22 bp, Artificial Sequence
  synthetic circulating small noncoding RNA (sncRNA) 5' transfer RNA (tRNA) half
aactgccgtcacgaacaggatt

SEQ ID NO: 17484 - DNA, 17 bp, Artificial Sequence
  synthetic circulating small noncoding RNA (sncRNA) 5' transfer RNA (tRNA) half
attcgaacccacgccat

SEQ ID NO: 17485 - DNA, 29 bp, Artificial Sequence
  synthetic circulating small noncoding RNA (sncRNA) 5' transfer RNA (tRNA) half
gggaggcgagaattctaccattgaaccac

SEQ ID NO: 17486 - DNA, 25 bp, Artificial Sequence
  synthetic circulating small noncoding RNA (sncRNA) 5' transfer RNA (tRNA) half
gcgccaaatcctaaccactagacca

SEQ ID NO: 17487 - DNA, 29 bp, Artificial Sequence
  synthetic circulating small noncoding RNA (sncRNA) 5' transfer RNA (tRNA) half
gtggttaggattcggcgctctcaccgccg

SEQ ID NO: 17488 - DNA, 30 bp, Artificial Sequence
  synthetic circulating small noncoding RNA (sncRNA) 5' transfer RNA (tRNA) half
aaggccccagcgagatttgaactcgcgacc

SEQ ID NO: 17489 - DNA, 24 bp, Artificial Sequence
  synthetic circulating small noncoding RNA (sncRNA) 5' transfer RNA (tRNA) half
tcacgaccttcagattatgagact

SEQ ID NO: 17490 - DNA, 12 bp, Artificial Sequence
  synthetic circulating small noncoding RNA (sncRNA) 5' transfer RNA (tRNA) half
ttccgtagtgta

SEQ ID NO: 17491 - DNA, 11 bp, Artificial Sequence
  synthetic circulating small noncoding RNA (sncRNA) 5' transfer RNA (tRNA) half
gttcgattccc

SEQ ID NO: 17492 - DNA, 35 bp, Artificial Sequence
  synthetic circulating small noncoding RNA (sncRNA) 5' transfer RNA (tRNA) half
accgtagtcggcaggattcgaacctgcgcggggaa

SEQ ID NO: 17493 - DNA, 15 bp, Artificial Sequence
  synthetic circulating small noncoding RNA (sncRNA) 5' transfer RNA (tRNA) half
tcagacgcgctaccg

SEQ ID NO: 17494 - DNA, 17 bp, Artificial Sequence
  synthetic circulating small noncoding RNA (sncRNA) 5' transfer RNA (tRNA) half
cgccgctggtgtagtgg

SEQ ID NO: 17495 - DNA, 38 bp, Artificial Sequence
  synthetic circulating small noncoding RNA (sncRNA) 5' transfer RNA (tRNA) half
ctgccctctctgaggttcgaactcaggaccttcagatt

SEQ ID NO: 17496 - DNA, 12 bp, Artificial Sequence
  synthetic circulating small noncoding RNA (sncRNA) 5' transfer RNA (tRNA) half
tcctgccgacta

SEQ ID NO: 17497 - DNA, 22 bp, Artificial Sequence
  synthetic circulating small noncoding RNA (sncRNA) 5' transfer RNA (tRNA) half
gtttcgatccatcgacctctgg

SEQ ID NO: 17498 - DNA, 13 bp, Artificial Sequence
  synthetic circulating small noncoding RNA (sncRNA) 5' transfer RNA (tRNA) half
ctgttaaccgaaa

SEQ ID NO: 17499 - DNA, 43 bp, Artificial Sequence
  synthetic circulating small noncoding RNA (sncRNA) 5' transfer RNA (tRNA) half
tcccacatggtctagcggttaggattcctggttttcacccagg

SEQ ID NO: 17500 - DNA, 19 bp, Artificial Sequence
  synthetic circulating small noncoding RNA (sncRNA) 5' transfer RNA (tRNA) half
gtgttcccacaccgggagt

SEQ ID NO: 17501 - DNA, 11 bp, Artificial Sequence
  synthetic circulating small noncoding RNA (sncRNA) 5' transfer RNA (tRNA) half
ctgccgcggtc

SEQ ID NO: 17502 - DNA, 12 bp, Artificial Sequence
  synthetic circulating small noncoding RNA (sncRNA) 5' transfer RNA (tRNA) half
agttataccccc

SEQ ID NO: 17503 - DNA, 38 bp, Artificial Sequence
  synthetic circulating small noncoding RNA (sncRNA) 5' transfer RNA (tRNA) half
gcccgaacagggacttgaaccctggaccctcagattaa

SEQ ID NO: 17504 - DNA, 14 bp, Artificial Sequence
  synthetic circulating small noncoding RNA (sncRNA) 5' transfer RNA (tRNA) half
ggcggggatactaa

SEQ ID NO: 17505 - DNA, 20 bp, Artificial Sequence
  synthetic circulating small noncoding RNA (sncRNA) 5' transfer RNA (tRNA) half
cactctggactttgaatcca

SEQ ID NO: 17506 - DNA, 22 bp, Artificial Sequence
  synthetic circulating small noncoding RNA (sncRNA) 5' transfer RNA (tRNA) half
gactctgaatccagcgatccga

SEQ ID NO: 17507 - DNA, 29 bp, Artificial Sequence
  synthetic circulating small noncoding RNA (sncRNA) 5' transfer RNA (tRNA) half
cccaacgtggggctcgaacccacgaccct

SEQ ID NO: 17508 - DNA, 20 bp, Artificial Sequence
  synthetic circulating small noncoding RNA (sncRNA) 5' transfer RNA (tRNA) half
gtctgatgctctaccaactg

SEQ ID NO: 17509 - DNA, 18 bp, Artificial Sequence
  synthetic circulating small noncoding RNA (sncRNA) 5' transfer RNA (tRNA) half
atcagaagattccaggtt

SEQ ID NO: 17510 - DNA, 21 bp, Artificial Sequence
  synthetic circulating small noncoding RNA (sncRNA) 5' transfer RNA (tRNA) half
tctacagtcctccgctctacc

SEQ ID NO: 17511 - DNA, 20 bp, Artificial Sequence
  synthetic circulating small noncoding RNA (sncRNA) 5' transfer RNA (tRNA) half
agtgggtagagcatgagact

SEQ ID NO: 17512 - DNA, 31 bp, Artificial Sequence
  synthetic circulating small noncoding RNA (sncRNA) 5' transfer RNA (tRNA) half
tggccgggaatcgaacccgggcctcccgcgt

SEQ ID NO: 17513 - DNA, 45 bp, Artificial Sequence
  synthetic circulating small noncoding RNA (sncRNA) 5' transfer RNA (tRNA) half
cgacgaggatgggattcgaacccacgcgtgcaaagcacaatggat

SEQ ID NO: 17514 - DNA, 32 bp, Artificial Sequence
  synthetic circulating small noncoding RNA (sncRNA) 5' transfer RNA (tRNA) half
gaaaaccaggaatcctaaccgctagaccatat

SEQ ID NO: 17515 - DNA, 13 bp, Artificial Sequence
  synthetic circulating small noncoding RNA (sncRNA) 5' transfer RNA (tRNA) half
gtagtcggcagga

SEQ ID NO: 17516 - DNA, 19 bp, Artificial Sequence
  synthetic circulating small noncoding RNA (sncRNA) 5' transfer RNA (tRNA) half
cctaatggataaggcactg

SEQ ID NO: 17517 - DNA, 17 bp, Artificial Sequence
  synthetic circulating small noncoding RNA (sncRNA) 5' transfer RNA (tRNA) half
aatggtagagcgctcgc

SEQ ID NO: 17518 - DNA, 10 bp, Artificial Sequence
  synthetic circulating small noncoding RNA (sncRNA) 5' transfer RNA (tRNA) half
tttcgcccgg

SEQ ID NO: 17519 - DNA, 12 bp, Artificial Sequence
  synthetic circulating small noncoding RNA (sncRNA) 5' transfer RNA (tRNA) half
cagagtggcgca

SEQ ID NO: 17520 - DNA, 18 bp, Artificial Sequence
  synthetic circulating small noncoding RNA (sncRNA) 5' transfer RNA (tRNA) half
ggatcgaacccgcgacct

SEQ ID NO: 17521 - DNA, 15 bp, Artificial Sequence
  synthetic circulating small noncoding RNA (sncRNA) 5' transfer RNA (tRNA) half
acccgggccgcctgg

SEQ ID NO: 17522 - DNA, 14 bp, Artificial Sequence
  synthetic circulating small noncoding RNA (sncRNA) 5' transfer RNA (tRNA) half
ccgaagagactgga

SEQ ID NO: 17523 - DNA, 12 bp, Artificial Sequence
  synthetic circulating small noncoding RNA (sncRNA) 5' transfer RNA (tRNA) half
ccccgacgtgac

SEQ ID NO: 17524 - DNA, 18 bp, Artificial Sequence
  synthetic circulating small noncoding RNA (sncRNA) 5' transfer RNA (tRNA) half
agtggtctggggtgcagg

SEQ ID NO: 17525 - DNA, 30 bp, Artificial Sequence
  synthetic circulating small noncoding RNA (sncRNA) 5' transfer RNA (tRNA) half
tccctggttcgatcccgggtttcggcagtg

SEQ ID NO: 17526 - DNA, 26 bp, Artificial Sequence
  synthetic circulating small noncoding RNA (sncRNA) 5' transfer RNA (tRNA) half
gatgctctaccaactgagctatccag

SEQ ID NO: 17527 - DNA, 31 bp, Artificial Sequence
  synthetic circulating small noncoding RNA (sncRNA) 5' transfer RNA (tRNA) half
ggccccgggttcaatccccggcacctccagt

SEQ ID NO: 17528 - DNA, 22 bp, Artificial Sequence
  synthetic circulating small noncoding RNA (sncRNA) 5' transfer RNA (tRNA) half
cataacccagaggtcgatggat

SEQ ID NO: 17529 - DNA, 15 bp, Artificial Sequence
  synthetic circulating small noncoding RNA (sncRNA) 5' transfer RNA (tRNA) half
ctccttcgagccgga

SEQ ID NO: 17530 - DNA, 8 bp, Artificial Sequence
  synthetic circulating small noncoding RNA (sncRNA) 5' transfer RNA (tRNA) half
cgttcggc

SEQ ID NO: 17531 - DNA, 21 bp, Artificial Sequence
  synthetic circulating small noncoding RNA (sncRNA) 5' transfer RNA (tRNA) half
ccggagctggggattgtgggt

SEQ ID NO: 17532 - DNA, 21 bp, Artificial Sequence
  synthetic circulating small noncoding RNA (sncRNA) 5' transfer RNA (tRNA) half
gtgccgagactcggattcgaa

SEQ ID NO: 17533 - DNA, 21 bp, Artificial Sequence
  synthetic circulating small noncoding RNA (sncRNA) 5' transfer RNA (tRNA) half
tgtgttcaggtcgcagtctcc

SEQ ID NO: 17534 - DNA, 26 bp, Artificial Sequence
  synthetic circulating small noncoding RNA (sncRNA) 5' transfer RNA (tRNA) half
catggtgtaatggttagcactctgga

SEQ ID NO: 17535 - DNA, 13 bp, Artificial Sequence
  synthetic circulating small noncoding RNA (sncRNA) 5' transfer RNA (tRNA) half
gataaccactaca

SEQ ID NO: 17536 - DNA, 7 bp, Artificial Sequence
  synthetic circulating small noncoding RNA (sncRNA) 5' transfer RNA (tRNA) half
cgggacg

SEQ ID NO: 17537 - DNA, 23 bp, Artificial Sequence
  synthetic circulating small noncoding RNA (sncRNA) 5' transfer RNA (tRNA) half
aaaagtagggctcgtccgggatt

SEQ ID NO: 17538 - DNA, 13 bp, Artificial Sequence
  synthetic circulating small noncoding RNA (sncRNA) 5' transfer RNA (tRNA) half
ggcctcgtggcgc

SEQ ID NO: 17539 - DNA, 13 bp, Artificial Sequence
  synthetic circulating small noncoding RNA (sncRNA) 5' transfer RNA (tRNA) half
ttccccgacgggg

SEQ ID NO: 17540 - DNA, 13 bp, Artificial Sequence
  synthetic circulating small noncoding RNA (sncRNA) 5' transfer RNA (tRNA) half
ggccacctcatcc

SEQ ID NO: 17541 - DNA, 11 bp, Artificial Sequence
  synthetic circulating small noncoding RNA (sncRNA) 5' transfer RNA (tRNA) half
gggtcgtgggt

SEQ ID NO: 17542 - DNA, 22 bp, Artificial Sequence
  synthetic circulating small noncoding RNA (sncRNA) 5' transfer RNA (tRNA) half
tgggtcgcatggtcgttcattt

SEQ ID NO: 17543 - DNA, 22 bp, Artificial Sequence
  synthetic circulating small noncoding RNA (sncRNA) 5' transfer RNA (tRNA) half
ggttcgagtcccttcgtggtcg

SEQ ID NO: 17544 - DNA, 10 bp, Artificial Sequence
  synthetic circulating small noncoding RNA (sncRNA) 5' transfer RNA (tRNA) half
gaaccgagga

SEQ ID NO: 17545 - DNA, 24 bp, Artificial Sequence
  synthetic circulating small noncoding RNA (sncRNA) 5' transfer RNA (tRNA) half
cctcccgcgtggcaggcgagaatt

SEQ ID NO: 17546 - DNA, 30 bp, Artificial Sequence
  synthetic circulating small noncoding RNA (sncRNA) 5' transfer RNA (tRNA) half
tcaggatggccgagcggtctaaggcgctgc

SEQ ID NO: 17547 - DNA, 20 bp, Artificial Sequence
  synthetic circulating small noncoding RNA (sncRNA) 5' transfer RNA (tRNA) half
gatgaccactacactacgga

SEQ ID NO: 17548 - DNA, 40 bp, Artificial Sequence
  synthetic circulating small noncoding RNA (sncRNA) 5' transfer RNA (tRNA) half
tctcttcgggggcgtgggttcgaatcccaccgctgccaac

SEQ ID NO: 17549 - DNA, 22 bp, Artificial Sequence
  synthetic circulating small noncoding RNA (sncRNA) 5' transfer RNA (tRNA) half
ggctcgaacccacgaccctgag

SEQ ID NO: 17550 - DNA, 45 bp, Artificial Sequence
  synthetic circulating small noncoding RNA (sncRNA) 5' transfer RNA (tRNA) half
gctctcaccgccgcggcccgggttcgattcccggtcagggaagca

SEQ ID NO: 17551 - DNA, 24 bp, Artificial Sequence
  synthetic circulating small noncoding RNA (sncRNA) 5' transfer RNA (tRNA) half
tgccggggatcgaacccggggcct

SEQ ID NO: 17552 - DNA, 9 bp, Artificial Sequence
  synthetic circulating small noncoding RNA (sncRNA) 5' transfer RNA (tRNA) half
ccccgtatg

SEQ ID NO: 17553 - DNA, 22 bp, Artificial Sequence
  synthetic circulating small noncoding RNA (sncRNA) 5' transfer RNA (tRNA) half
tcagtgggtagagcatgagact

SEQ ID NO: 17554 - DNA, 17 bp, Artificial Sequence
  synthetic circulating small noncoding RNA (sncRNA) 5' transfer RNA (tRNA) half
gcgtgacaggcggggat

SEQ ID NO: 17555 - DNA, 13 bp, Artificial Sequence
  synthetic circulating small noncoding RNA (sncRNA) 5' transfer RNA (tRNA) half
agtggtctaaggc

SEQ ID NO: 17556 - DNA, 38 bp, Artificial Sequence
  synthetic circulating small noncoding RNA (sncRNA) 5' transfer RNA (tRNA) half
aagcgcccgaacagggacttgaaccctggaccctcaga

SEQ ID NO: 17557 - DNA, 15 bp, Artificial Sequence
  synthetic circulating small noncoding RNA (sncRNA) 5' transfer RNA (tRNA) half
agggctcgaacaggg

SEQ ID NO: 17558 - DNA, 21 bp, Artificial Sequence
  synthetic circulating small noncoding RNA (sncRNA) 5' transfer RNA (tRNA) half
aggaatcctaaccgctagacc

SEQ ID NO: 17559 - DNA, 13 bp, Artificial Sequence
  synthetic circulating small noncoding RNA (sncRNA) 5' transfer RNA (tRNA) half
ccgacggggagtc

SEQ ID NO: 17560 - DNA, 11 bp, Artificial Sequence
  synthetic circulating small noncoding RNA (sncRNA) 5' transfer RNA (tRNA) half
cagagtgctaa

SEQ ID NO: 17561 - DNA, 12 bp, Artificial Sequence
  synthetic circulating small noncoding RNA (sncRNA) 5' transfer RNA (tRNA) half
aacccacaacct

SEQ ID NO: 17562 - DNA, 13 bp, Artificial Sequence
  synthetic circulating small noncoding RNA (sncRNA) 5' transfer RNA (tRNA) half
ccaaagcgagaat

SEQ ID NO: 17563 - DNA, 23 bp, Artificial Sequence
  synthetic circulating small noncoding RNA (sncRNA) 5' transfer RNA (tRNA) half
catatggtctagcggttaggatt

SEQ ID NO: 17564 - DNA, 15 bp, Artificial Sequence
  synthetic circulating small noncoding RNA (sncRNA) 5' transfer RNA (tRNA) half
gttggccgggaatcg

SEQ ID NO: 17565 - DNA, 23 bp, Artificial Sequence
  synthetic circulating small noncoding RNA (sncRNA) 5' transfer RNA (tRNA) half
ctagtggtatgattctcagtttg

SEQ ID NO: 17566 - DNA, 10 bp, Artificial Sequence
  synthetic circulating small noncoding RNA (sncRNA) 5' transfer RNA (tRNA) half
cccatcgggg

SEQ ID NO: 17567 - DNA, 24 bp, Artificial Sequence
  synthetic circulating small noncoding RNA (sncRNA) 5' transfer RNA (tRNA) half
cggcggtgagagcgccgaatccta

SEQ ID NO: 17568 - DNA, 20 bp, Artificial Sequence
  synthetic circulating small noncoding RNA (sncRNA) 5' transfer RNA (tRNA) half
cgggatcgaaccagggacct

SEQ ID NO: 17569 - DNA, 13 bp, Artificial Sequence
  synthetic circulating small noncoding RNA (sncRNA) 5' transfer RNA (tRNA) half
aatcctgccgact

SEQ ID NO: 17570 - DNA, 33 bp, Artificial Sequence
  synthetic circulating small noncoding RNA (sncRNA) 5' transfer RNA (tRNA) half
ctcagggttgtgggttcgagccccacattgggc

SEQ ID NO: 17571 - DNA, 23 bp, Artificial Sequence
  synthetic circulating small noncoding RNA (sncRNA) 5' transfer RNA (tRNA) half
tataggggttagtactctgcgtt

SEQ ID NO: 17572 - DNA, 15 bp, Artificial Sequence
  synthetic circulating small noncoding RNA (sncRNA) 5' transfer RNA (tRNA) half
ggtagagcgcgcgct

SEQ ID NO: 17573 - DNA, 16 bp, Artificial Sequence
  synthetic circulating small noncoding RNA (sncRNA) 5' transfer RNA (tRNA) half
tcgagccggattcgaa

SEQ ID NO: 17574 - DNA, 15 bp, Artificial Sequence
  synthetic circulating small noncoding RNA (sncRNA) 5' transfer RNA (tRNA) half
caggttcgaatcctg

SEQ ID NO: 17575 - DNA, 24 bp, Artificial Sequence
  synthetic circulating small noncoding RNA (sncRNA) 5' transfer RNA (tRNA) half
gcgggttcgaaccccgtccgtgcc

SEQ ID NO: 17576 - DNA, 15 bp, Artificial Sequence
  synthetic circulating small noncoding RNA (sncRNA) 5' transfer RNA (tRNA) half
atgcagagtactaac

SEQ ID NO: 17577 - DNA, 18 bp, Artificial Sequence
  synthetic circulating small noncoding RNA (sncRNA) 5' transfer RNA (tRNA) half
tttccctgaccgggaatc

SEQ ID NO: 17578 - DNA, 20 bp, Artificial Sequence
  synthetic circulating small noncoding RNA (sncRNA) 5' transfer RNA (tRNA) half
aacccgggccgcctgggtga

SEQ ID NO: 17579 - DNA, 28 bp, Artificial Sequence
  synthetic circulating small noncoding RNA (sncRNA) 5' transfer RNA (tRNA) half
cgaagggattcgaaccctcaatcttctg

SEQ ID NO: 17580 - DNA, 22 bp, Artificial Sequence
  synthetic circulating small noncoding RNA (sncRNA) 5' transfer RNA (tRNA) half
ggcggccgcgtggcctaatgga

SEQ ID NO: 17581 - DNA, 15 bp, Artificial Sequence
  synthetic circulating small noncoding RNA (sncRNA) 5' transfer RNA (tRNA) half
ctacactacagaaac

SEQ ID NO: 17582 - DNA, 16 bp, Artificial Sequence
  synthetic circulating small noncoding RNA (sncRNA) 5' transfer RNA (tRNA) half
ccggattcgaaccagc

SEQ ID NO: 17583 - DNA, 21 bp, Artificial Sequence
  synthetic circulating small noncoding RNA (sncRNA) 5' transfer RNA (tRNA) half
gccagccaggagtcgaaccta

SEQ ID NO: 17584 - DNA, 7 bp, Artificial Sequence
  synthetic circulating small noncoding RNA (sncRNA) 5' transfer RNA (tRNA) half
agggggc

SEQ ID NO: 17585 - DNA, 18 bp, Artificial Sequence
  synthetic circulating small noncoding RNA (sncRNA) 5' transfer RNA (tRNA) half
ggttcgagccccacgttg

SEQ ID NO: 17586 - DNA, 16 bp, Artificial Sequence
  synthetic circulating small noncoding RNA (sncRNA) 5' transfer RNA (tRNA) half
ttagcactctggactc

SEQ ID NO: 17587 - DNA, 18 bp, Artificial Sequence
  synthetic circulating small noncoding RNA (sncRNA) 5' transfer RNA (tRNA) half
gtagagcatcagactttt

SEQ ID NO: 17588 - DNA, 17 bp, Artificial Sequence
  synthetic circulating small noncoding RNA (sncRNA) 5' transfer RNA (tRNA) half
caggcggggatactcac

SEQ ID NO: 17589 - DNA, 24 bp, Artificial Sequence
  synthetic circulating small noncoding RNA (sncRNA) 5' transfer RNA (tRNA) half
cccagcacgcttccgctgcgccac

SEQ ID NO: 17590 - DNA, 33 bp, Artificial Sequence
  synthetic circulating small noncoding RNA (sncRNA) 5' transfer RNA (tRNA) half
ttcgagccggattcgaaccagcgacctaaggat

SEQ ID NO: 17591 - DNA, 39 bp, Artificial Sequence
  synthetic circulating small noncoding RNA (sncRNA) 5' transfer RNA (tRNA) half
cccacaccgggagtcgaacccgggccgcctgggtgaaaa

SEQ ID NO: 17592 - DNA, 13 bp, Artificial Sequence
  synthetic circulating small noncoding RNA (sncRNA) 5' transfer RNA (tRNA) half
ctgagctatcgaa

SEQ ID NO: 17593 - DNA, 27 bp, Artificial Sequence
  synthetic circulating small noncoding RNA (sncRNA) 5' transfer RNA (tRNA) half
cgctctaaccaactgagctaaccggcc

SEQ ID NO: 17594 - DNA, 35 bp, Artificial Sequence
  synthetic circulating small noncoding RNA (sncRNA) 5' transfer RNA (tRNA) half
cctgggtgggctcgaaccaccaacctttcggttaa

SEQ ID NO: 17595 - DNA, 30 bp, Artificial Sequence
  synthetic circulating small noncoding RNA (sncRNA) 5' transfer RNA (tRNA) half
tcgatagctcagttggtagagcggaggact

SEQ ID NO: 17596 - DNA, 11 bp, Artificial Sequence
  synthetic circulating small noncoding RNA (sncRNA) 5' transfer RNA (tRNA) half
gtcggtagagc

SEQ ID NO: 17597 - DNA, 37 bp, Artificial Sequence
  synthetic circulating small noncoding RNA (sncRNA) 5' transfer RNA (tRNA) half
aagacttaaaaccttgttcccagaggttcaaatcctc

SEQ ID NO: 17598 - DNA, 36 bp, Artificial Sequence
  synthetic circulating small noncoding RNA (sncRNA) 5' transfer RNA (tRNA) half
cttgttcccagaggttcaaatcctctccctaatagt

SEQ ID NO: 17599 - DNA, 23 bp, Artificial Sequence
  synthetic circulating small noncoding RNA (sncRNA) 5' transfer RNA (tRNA) half
cggcccgggttcgactcccggtg

SEQ ID NO: 17600 - DNA, 8 bp, Artificial Sequence
  synthetic circulating small noncoding RNA (sncRNA) 5' transfer RNA (tRNA) half
acttcgga

SEQ ID NO: 17601 - DNA, 37 bp, Artificial Sequence
  synthetic circulating small noncoding RNA (sncRNA) 5' transfer RNA (tRNA) half
gcaccacgctctaaccaactgagctaaccggccagac

SEQ ID NO: 17602 - DNA, 18 bp, Artificial Sequence
  synthetic circulating small noncoding RNA (sncRNA) 5' transfer RNA (tRNA) half
ggccccatggtgtaatgg

SEQ ID NO: 17603 - DNA, 10 bp, Artificial Sequence
  synthetic circulating small noncoding RNA (sncRNA) 5' transfer RNA (tRNA) half
cgaacccacg

SEQ ID NO: 17604 - DNA, 19 bp, Artificial Sequence
  synthetic circulating small noncoding RNA (sncRNA) 5' transfer RNA (tRNA) half
ctgccgtcacgaacaggat

SEQ ID NO: 17605 - DNA, 24 bp, Artificial Sequence
  synthetic circulating small noncoding RNA (sncRNA) 5' transfer RNA (tRNA) half
tgccgaaacccgggatcgaaccag

SEQ ID NO: 17606 - DNA, 42 bp, Artificial Sequence
  synthetic circulating small noncoding RNA (sncRNA) 5' transfer RNA (tRNA) half
gaactcggatcgctggattcagagtccagagtgctaaccatt

SEQ ID NO: 17607 - DNA, 13 bp, Artificial Sequence
  synthetic circulating small noncoding RNA (sncRNA) 5' transfer RNA (tRNA) half
tcccactcctgac

SEQ ID NO: 17608 - DNA, 23 bp, Artificial Sequence
  synthetic circulating small noncoding RNA (sncRNA) 5' transfer RNA (tRNA) half
ccgttgcgttggccgggaatcga

SEQ ID NO: 17609 - DNA, 19 bp, Artificial Sequence
  synthetic circulating small noncoding RNA (sncRNA) 5' transfer RNA (tRNA) half
atccccggcatctccaact

SEQ ID NO: 17610 - DNA, 35 bp, Artificial Sequence
  synthetic circulating small noncoding RNA (sncRNA) 5' transfer RNA (tRNA) half
atccagcgccttagaccactcggccacgctacctc

SEQ ID NO: 17611 - DNA, 23 bp, Artificial Sequence
  synthetic circulating small noncoding RNA (sncRNA) 5' transfer RNA (tRNA) half
cctagccactagaccaccaggga

SEQ ID NO: 17612 - DNA, 39 bp, Artificial Sequence
  synthetic circulating small noncoding RNA (sncRNA) 5' transfer RNA (tRNA) half
agcgcccgaacagggacttgaaccctggaccctcagatt

SEQ ID NO: 17613 - DNA, 31 bp, Artificial Sequence
  synthetic circulating small noncoding RNA (sncRNA) 5' transfer RNA (tRNA) half
caggagatcctgggttcgaatcccagtgggg

SEQ ID NO: 17614 - DNA, 13 bp, Artificial Sequence
  synthetic circulating small noncoding RNA (sncRNA) 5' transfer RNA (tRNA) half
attctcgcctgcc

SEQ ID NO: 17615 - DNA, 12 bp, Artificial Sequence
  synthetic circulating small noncoding RNA (sncRNA) 5' transfer RNA (tRNA) half
tggttagtactc

SEQ ID NO: 17616 - DNA, 14 bp, Artificial Sequence
  synthetic circulating small noncoding RNA (sncRNA) 5' transfer RNA (tRNA) half
ccttatccattagg

SEQ ID NO: 17617 - DNA, 21 bp, Artificial Sequence
  synthetic circulating small noncoding RNA (sncRNA) 5' transfer RNA (tRNA) half
gcggtgagagcgccgaatcct

SEQ ID NO: 17618 - DNA, 7 bp, Artificial Sequence
  synthetic circulating small noncoding RNA (sncRNA) 5' transfer RNA (tRNA) half
ctggtac

SEQ ID NO: 17619 - DNA, 19 bp, Artificial Sequence
  synthetic circulating small noncoding RNA (sncRNA) 5' transfer RNA (tRNA) half
ggttcgagtcccttcgtgg

SEQ ID NO: 17620 - DNA, 31 bp, Artificial Sequence
  synthetic circulating small noncoding RNA (sncRNA) 5' transfer RNA (tRNA) half
gctgcggccacaacgcagagtactaaccact

SEQ ID NO: 17621 - DNA, 22 bp, Artificial Sequence
  synthetic circulating small noncoding RNA (sncRNA) 5' transfer RNA (tRNA) half
ccaggaatcctaaccgctagac

SEQ ID NO: 17622 - DNA, 27 bp, Artificial Sequence
  synthetic circulating small noncoding RNA (sncRNA) 5' transfer RNA (tRNA) half
ggcaccgctgggattcgaacccaggat

SEQ ID NO: 17623 - DNA, 15 bp, Artificial Sequence
  synthetic circulating small noncoding RNA (sncRNA) 5' transfer RNA (tRNA) half
gacgaggatgggatt

SEQ ID NO: 17624 - DNA, 20 bp, Artificial Sequence
  synthetic circulating small noncoding RNA (sncRNA) 5' transfer RNA (tRNA) half
cggatcgctggattcaaagt

SEQ ID NO: 17625 - DNA, 21 bp, Artificial Sequence
  synthetic circulating small noncoding RNA (sncRNA) 5' transfer RNA (tRNA) half
cgaaccggggacctttcgcgt

SEQ ID NO: 17626 - DNA, 31 bp, Artificial Sequence
  synthetic circulating small noncoding RNA (sncRNA) 5' transfer RNA (tRNA) half
gtctcccgcgtgacaggcggggatactcacc

SEQ ID NO: 17627 - DNA, 18 bp, Artificial Sequence
  synthetic circulating small noncoding RNA (sncRNA) 5' transfer RNA (tRNA) half
cgaatcccacttctgaca

SEQ ID NO: 17628 - DNA, 7 bp, Artificial Sequence
  synthetic circulating small noncoding RNA (sncRNA) 5' transfer RNA (tRNA) half
gccgcct

SEQ ID NO: 17629 - DNA, 44 bp, Artificial Sequence
  synthetic circulating small noncoding RNA (sncRNA) 5' transfer RNA (tRNA) half
cgaggttgctgcggccacaacgcagagtactaaccactatacga

SEQ ID NO: 17630 - DNA, 7 bp, Artificial Sequence
  synthetic circulating small noncoding RNA (sncRNA) 5' transfer RNA (tRNA) half
gacgcgc

SEQ ID NO: 17631 - DNA, 9 bp, Artificial Sequence
  synthetic circulating small noncoding RNA (sncRNA) 5' transfer RNA (tRNA) half
gcccggttt

SEQ ID NO: 17632 - DNA, 39 bp, Artificial Sequence
  synthetic circulating small noncoding RNA (sncRNA) 5' transfer RNA (tRNA) half
gggtatgattctcgctttgggtgcgagaggtcccgggtt

SEQ ID NO: 17633 - DNA, 12 bp, Artificial Sequence
  synthetic circulating small noncoding RNA (sncRNA) 5' transfer RNA (tRNA) half
gggattcgaacc

SEQ ID NO: 17634 - DNA, 6 bp, Artificial Sequence
  synthetic circulating small noncoding RNA (sncRNA) 5' transfer RNA (tRNA) half
tgcccc

SEQ ID NO: 17635 - DNA, 20 bp, Artificial Sequence
  synthetic circulating small noncoding RNA (sncRNA) 5' transfer RNA (tRNA) half
gaatcgaacccgggccgcgg

SEQ ID NO: 17636 - DNA, 28 bp, Artificial Sequence
  synthetic circulating small noncoding RNA (sncRNA) 5' transfer RNA (tRNA) half
aggattcctggttttcacccaggcggcc

SEQ ID NO: 17637 - DNA, 38 bp, Artificial Sequence
  synthetic circulating small noncoding RNA (sncRNA) 5' transfer RNA (tRNA) half
cggctagctcagtcggtagagcatgagactcttaatct

SEQ ID NO: 17638 - DNA, 37 bp, Artificial Sequence
  synthetic circulating small noncoding RNA (sncRNA) 5' transfer RNA (tRNA) half
gagggggcacccggatttgaaccggggacctcttgat

SEQ ID NO: 17639 - DNA, 27 bp, Artificial Sequence
  synthetic circulating small noncoding RNA (sncRNA) 5' transfer RNA (tRNA) half
cgctggattcagagtccagagtgctaa

SEQ ID NO: 17640 - DNA, 26 bp, Artificial Sequence
  synthetic circulating small noncoding RNA (sncRNA) 5' transfer RNA (tRNA) half
gccgtcacgaacaggattcgaacctg

SEQ ID NO: 17641 - DNA, 20 bp, Artificial Sequence
  synthetic circulating small noncoding RNA (sncRNA) 5' transfer RNA (tRNA) half
agcagagtggcgcagcggaa

SEQ ID NO: 17642 - DNA, 25 bp, Artificial Sequence
  synthetic circulating small noncoding RNA (sncRNA) 5' transfer RNA (tRNA) half
ccgacgaggatgggattcgaaccca

SEQ ID NO: 17643 - DNA, 21 bp, Artificial Sequence
  synthetic circulating small noncoding RNA (sncRNA) 5' transfer RNA (tRNA) half
cggctagctcagtcggtagag

SEQ ID NO: 17644 - DNA, 18 bp, Artificial Sequence
  synthetic circulating small noncoding RNA (sncRNA) 5' transfer RNA (tRNA) half
cgttccttcgagccggat

SEQ ID NO: 17645 - DNA, 15 bp, Artificial Sequence
  synthetic circulating small noncoding RNA (sncRNA) 5' transfer RNA (tRNA) half
atctcgctggggcct

SEQ ID NO: 17646 - DNA, 18 bp, Artificial Sequence
  synthetic circulating small noncoding RNA (sncRNA) 5' transfer RNA (tRNA) half
agcatgcgctctaccact

SEQ ID NO: 17647 - DNA, 19 bp, Artificial Sequence
  synthetic circulating small noncoding RNA (sncRNA) 5' transfer RNA (tRNA) half
aagtctgatgctctaccga

SEQ ID NO: 17648 - DNA, 15 bp, Artificial Sequence
  synthetic circulating small noncoding RNA (sncRNA) 5' transfer RNA (tRNA) half
cctccgatagcagag

SEQ ID NO: 17649 - DNA, 14 bp, Artificial Sequence
  synthetic circulating small noncoding RNA (sncRNA) 5' transfer RNA (tRNA) half
gagaggtccccggt

SEQ ID NO: 17650 - DNA, 37 bp, Artificial Sequence
  synthetic circulating small noncoding RNA (sncRNA) 5' transfer RNA (tRNA) half
aactcgggggattagctcaaatggtagagcgctcgct

SEQ ID NO: 17651 - DNA, 41 bp, Artificial Sequence
  synthetic circulating small noncoding RNA (sncRNA) 5' transfer RNA (tRNA) half
agtcggcaggattcgaacctgcgcggggaaaccccaatgga

SEQ ID NO: 17652 - DNA, 24 bp, Artificial Sequence
  synthetic circulating small noncoding RNA (sncRNA) 5' transfer RNA (tRNA) half
tagcactctggactctgaatccag

SEQ ID NO: 17653 - DNA, 21 bp, Artificial Sequence
  synthetic circulating small noncoding RNA (sncRNA) 5' transfer RNA (tRNA) half
ctgccacgcgggaggcccggg

SEQ ID NO: 17654 - DNA, 23 bp, Artificial Sequence
  synthetic circulating small noncoding RNA (sncRNA) 5' transfer RNA (tRNA) half
atgggtggttcagtggtagaatt

SEQ ID NO: 17655 - DNA, 32 bp, Artificial Sequence
  synthetic circulating small noncoding RNA (sncRNA) 5' transfer RNA (tRNA) half
cgacagagtggttcaattccacctttcgggcg

SEQ ID NO: 17656 - DNA, 37 bp, Artificial Sequence
  synthetic circulating small noncoding RNA (sncRNA) 5' transfer RNA (tRNA) half
gagtcccatgctctaccgactgagctagccgggcaga

SEQ ID NO: 17657 - DNA, 21 bp, Artificial Sequence
  synthetic circulating small noncoding RNA (sncRNA) 5' transfer RNA (tRNA) half
aatgtttgggctcgtccggga

SEQ ID NO: 17658 - DNA, 30 bp, Artificial Sequence
  synthetic circulating small noncoding RNA (sncRNA) 5' transfer RNA (tRNA) half
agtccagagtgctaaccattacaccatggg

SEQ ID NO: 17659 - DNA, 20 bp, Artificial Sequence
  synthetic circulating small noncoding RNA (sncRNA) 5' transfer RNA (tRNA) half
cgactccgccgggactcgaa

SEQ ID NO: 17660 - DNA, 37 bp, Artificial Sequence
  synthetic circulating small noncoding RNA (sncRNA) 5' transfer RNA (tRNA) half
taggggtatgattctcggtttgggtccgagaggtccc

SEQ ID NO: 17661 - DNA, 9 bp, Artificial Sequence
  synthetic circulating small noncoding RNA (sncRNA) 5' transfer RNA (tRNA) half
gacctcttg

SEQ ID NO: 17662 - DNA, 13 bp, Artificial Sequence
  synthetic circulating small noncoding RNA (sncRNA) 5' transfer RNA (tRNA) half
cgaagatcgcggg

SEQ ID NO: 17663 - DNA, 36 bp, Artificial Sequence
  synthetic circulating small noncoding RNA (sncRNA) 5' transfer RNA (tRNA) half
gtttccgtagtgtagtggtcatcacgctcgcctcac

SEQ ID NO: 17664 - DNA, 21 bp, Artificial Sequence
  synthetic circulating small noncoding RNA (sncRNA) 5' transfer RNA (tRNA) half
caggggtcgcgagttcaaatc

SEQ ID NO: 17665 - DNA, 25 bp, Artificial Sequence
  synthetic circulating small noncoding RNA (sncRNA) 5' transfer RNA (tRNA) half
tctcgcacccgaagcgagaatcata

SEQ ID NO: 17666 - DNA, 12 bp, Artificial Sequence
  synthetic circulating small noncoding RNA (sncRNA) 5' transfer RNA (tRNA) half
acgccaaggtcg

SEQ ID NO: 17667 - DNA, 7 bp, Artificial Sequence
  synthetic circulating small noncoding RNA (sncRNA) 5' transfer RNA (tRNA) half
gagccag

SEQ ID NO: 17668 - DNA, 28 bp, Artificial Sequence
  synthetic circulating small noncoding RNA (sncRNA) 5' transfer RNA (tRNA) half
gtaaaccgaagatcgcgggttcgaaccc

SEQ ID NO: 17669 - DNA, 25 bp, Artificial Sequence
  synthetic circulating small noncoding RNA (sncRNA) 5' transfer RNA (tRNA) half
tagctcaggggtagagcatttgact

SEQ ID NO: 17670 - DNA, 28 bp, Artificial Sequence
  synthetic circulating small noncoding RNA (sncRNA) 5' transfer RNA (tRNA) half
cccgggccgcggcggtgaaagcgccgaa

SEQ ID NO: 17671 - DNA, 17 bp, Artificial Sequence
  synthetic circulating small noncoding RNA (sncRNA) 5' transfer RNA (tRNA) half
aaccggggacctctcgc

SEQ ID NO: 17672 - DNA, 42 bp, Artificial Sequence
  synthetic circulating small noncoding RNA (sncRNA) 5' transfer RNA (tRNA) half
tcagtcggtagagcatgagactcttaatctcagggtcgtggg

SEQ ID NO: 17673 - DNA, 21 bp, Artificial Sequence
  synthetic circulating small noncoding RNA (sncRNA) 5' transfer RNA (tRNA) half
cagtctcataatctgaaggtc

SEQ ID NO: 17674 - DNA, 16 bp, Artificial Sequence
  synthetic circulating small noncoding RNA (sncRNA) 5' transfer RNA (tRNA) half
tggtcatcacgctcgc

SEQ ID NO: 17675 - DNA, 19 bp, Artificial Sequence
  synthetic circulating small noncoding RNA (sncRNA) 5' transfer RNA (tRNA) half
cgaaccggggacctttcgc

SEQ ID NO: 17676 - DNA, 23 bp, Artificial Sequence
  synthetic circulating small noncoding RNA (sncRNA) 5' transfer RNA (tRNA) half
gttcgatccccagcacctccatt

SEQ ID NO: 17677 - DNA, 14 bp, Artificial Sequence
  synthetic circulating small noncoding RNA (sncRNA) 5' transfer RNA (tRNA) half
gaaccaccaacctt

SEQ ID NO: 17678 - DNA, 38 bp, Artificial Sequence
  synthetic circulating small noncoding RNA (sncRNA) 5' transfer RNA (tRNA) half
tggttagcactctggactctgaatccagcgatccgagt

SEQ ID NO: 17679 - DNA, 15 bp, Artificial Sequence
  synthetic circulating small noncoding RNA (sncRNA) 5' transfer RNA (tRNA) half
aggcggggatactaa

SEQ ID NO: 17680 - DNA, 22 bp, Artificial Sequence
  synthetic circulating small noncoding RNA (sncRNA) 5' transfer RNA (tRNA) half
gtagtcggcaggattcgaacct

SEQ ID NO: 17681 - DNA, 30 bp, Artificial Sequence
  synthetic circulating small noncoding RNA (sncRNA) 5' transfer RNA (tRNA) half
ggtcctgggttcgatccccagcatctccag

SEQ ID NO: 17682 - DNA, 19 bp, Artificial Sequence
  synthetic circulating small noncoding RNA (sncRNA) 5' transfer RNA (tRNA) half
aaatgccgtgactcggatt

SEQ ID NO: 17683 - DNA, 16 bp, Artificial Sequence
  synthetic circulating small noncoding RNA (sncRNA) 5' transfer RNA (tRNA) half
gaacctacaatcttct

SEQ ID NO: 17684 - DNA, 25 bp, Artificial Sequence
  synthetic circulating small noncoding RNA (sncRNA) 5' transfer RNA (tRNA) half
aacccgggccgcggcggtgagagcg

SEQ ID NO: 17685 - DNA, 6 bp, Artificial Sequence
  synthetic circulating small noncoding RNA (sncRNA) 5' transfer RNA (tRNA) half
agggac

SEQ ID NO: 17686 - DNA, 8 bp, Artificial Sequence
  synthetic circulating small noncoding RNA (sncRNA) 5' transfer RNA (tRNA) half
cccgggtt

SEQ ID NO: 17687 - DNA, 9 bp, Artificial Sequence
  synthetic circulating small noncoding RNA (sncRNA) 5' transfer RNA (tRNA) half
tcccgggcg

SEQ ID NO: 17688 - DNA, 16 bp, Artificial Sequence
  synthetic circulating small noncoding RNA (sncRNA) 5' transfer RNA (tRNA) half
ctcaccactatactaa

SEQ ID NO: 17689 - DNA, 16 bp, Artificial Sequence
  synthetic circulating small noncoding RNA (sncRNA) 5' transfer RNA (tRNA) half
cgattccggctcgaag

SEQ ID NO: 17690 - DNA, 22 bp, Artificial Sequence
  synthetic circulating small noncoding RNA (sncRNA) 5' transfer RNA (tRNA) half
gtccaatgcgctatccattgcg

SEQ ID NO: 17691 - DNA, 37 bp, Artificial Sequence
  synthetic circulating small noncoding RNA (sncRNA) 5' transfer RNA (tRNA) half
cccctctgaggttcgaactcaggaccttcagattatg

SEQ ID NO: 17692 - DNA, 34 bp, Artificial Sequence
  synthetic circulating small noncoding RNA (sncRNA) 5' transfer RNA (tRNA) half
gctggcccgtacggggatcgaacccgcgaccttg

SEQ ID NO: 17693 - DNA, 21 bp, Artificial Sequence
  synthetic circulating small noncoding RNA (sncRNA) 5' transfer RNA (tRNA) half
tctggactctgaatccagcga

SEQ ID NO: 17694 - DNA, 21 bp, Artificial Sequence
  synthetic circulating small noncoding RNA (sncRNA) 5' transfer RNA (tRNA) half
gctttcaccgccgcggcccgg

SEQ ID NO: 17695 - DNA, 12 bp, Artificial Sequence
  synthetic circulating small noncoding RNA (sncRNA) 5' transfer RNA (tRNA) half
cccccgaccgct

SEQ ID NO: 17696 - DNA, 44 bp, Artificial Sequence
  synthetic circulating small noncoding RNA (sncRNA) 5' transfer RNA (tRNA) half
ctccagtctcttcgggggcgtgggttcgaatcccaccactgcca

SEQ ID NO: 17697 - DNA, 16 bp, Artificial Sequence
  synthetic circulating small noncoding RNA (sncRNA) 5' transfer RNA (tRNA) half
ttgtttctgcccggtt

SEQ ID NO: 17698 - DNA, 22 bp, Artificial Sequence
  synthetic circulating small noncoding RNA (sncRNA) 5' transfer RNA (tRNA) half
tgaccccgacgtgatttgaaca

SEQ ID NO: 17699 - DNA, 36 bp, Artificial Sequence
  synthetic circulating small noncoding RNA (sncRNA) 5' transfer RNA (tRNA) half
ggttccttcgagccggattcgaaccagcgacctaag

SEQ ID NO: 17700 - DNA, 20 bp, Artificial Sequence
  synthetic circulating small noncoding RNA (sncRNA) 5' transfer RNA (tRNA) half
aatcctaaccgctagaccat

SEQ ID NO: 17701 - DNA, 15 bp, Artificial Sequence
  synthetic circulating small noncoding RNA (sncRNA) 5' transfer RNA (tRNA) half
ccggctcgaaggact

SEQ ID NO: 17702 - DNA, 24 bp, Artificial Sequence
  synthetic circulating small noncoding RNA (sncRNA) 5' transfer RNA (tRNA) half
atcgacctctgggttatgggccca

SEQ ID NO: 17703 - DNA, 36 bp, Artificial Sequence
  synthetic circulating small noncoding RNA (sncRNA) 5' transfer RNA (tRNA) half
cggagcattggtggttcagtggtagaattctcgcct

SEQ ID NO: 17704 - DNA, 7 bp, Artificial Sequence
  synthetic circulating small noncoding RNA (sncRNA) 5' transfer RNA (tRNA) half
atgcccg

SEQ ID NO: 17705 - DNA, 25 bp, Artificial Sequence
  synthetic circulating small noncoding RNA (sncRNA) 5' transfer RNA (tRNA) half
gctagctcagtcggtagagcatgag

SEQ ID NO: 17706 - DNA, 14 bp, Artificial Sequence
  synthetic circulating small noncoding RNA (sncRNA) 5' transfer RNA (tRNA) half
tgattctcgctttg

SEQ ID NO: 17707 - DNA, 9 bp, Artificial Sequence
  synthetic circulating small noncoding RNA (sncRNA) 5' transfer RNA (tRNA) half
gcggtctaa

SEQ ID NO: 17708 - DNA, 15 bp, Artificial Sequence
  synthetic circulating small noncoding RNA (sncRNA) 5' transfer RNA (tRNA) half
aggttcgaatcctgc

SEQ ID NO: 17709 - DNA, 31 bp, Artificial Sequence
  synthetic circulating small noncoding RNA (sncRNA) 5' transfer RNA (tRNA) half
tccttaggtcgctggttcgattccggctcga

SEQ ID NO: 17710 - DNA, 28 bp, Artificial Sequence
  synthetic circulating small noncoding RNA (sncRNA) 5' transfer RNA (tRNA) half
gtttcgatccatcgacctctgggttatg

SEQ ID NO: 17711 - DNA, 21 bp, Artificial Sequence
  synthetic circulating small noncoding RNA (sncRNA) 5' transfer RNA (tRNA) half
gaggcgaacgtgataaccact

SEQ ID NO: 17712 - DNA, 23 bp, Artificial Sequence
  synthetic circulating small noncoding RNA (sncRNA) 5' transfer RNA (tRNA) half
ttggtggttcagtggtagaattc

SEQ ID NO: 17713 - DNA, 35 bp, Artificial Sequence
  synthetic circulating small noncoding RNA (sncRNA) 5' transfer RNA (tRNA) half
ccgactctggtgggattcgaacccacaacctttga

SEQ ID NO: 17714 - DNA, 41 bp, Artificial Sequence
  synthetic circulating small noncoding RNA (sncRNA) 5' transfer RNA (tRNA) half
cccggctagctcagtcggtagagcatgagactcttaatctc

SEQ ID NO: 17715 - DNA, 32 bp, Artificial Sequence
  synthetic circulating small noncoding RNA (sncRNA) 5' transfer RNA (tRNA) half
gtggagatgccggggatcgaacccggggcctc

SEQ ID NO: 17716 - DNA, 15 bp, Artificial Sequence
  synthetic circulating small noncoding RNA (sncRNA) 5' transfer RNA (tRNA) half
tagtgtagcggttat

SEQ ID NO: 17717 - DNA, 12 bp, Artificial Sequence
  synthetic circulating small noncoding RNA (sncRNA) 5' transfer RNA (tRNA) half
cctgttcgggcg

SEQ ID NO: 17718 - DNA, 33 bp, Artificial Sequence
  synthetic circulating small noncoding RNA (sncRNA) 5' transfer RNA (tRNA) half
ggtgtaatggttagcactctggactctgaatcc

SEQ ID NO: 17719 - DNA, 27 bp, Artificial Sequence
  synthetic circulating small noncoding RNA (sncRNA) 5' transfer RNA (tRNA) half
gattaagagtcccatgctctaccgact

SEQ ID NO: 17720 - DNA, 27 bp, Artificial Sequence
  synthetic circulating small noncoding RNA (sncRNA) 5' transfer RNA (tRNA) half
ggccgggaatcgaacccgggtcaactg

SEQ ID NO: 17721 - DNA, 36 bp, Artificial Sequence
  synthetic circulating small noncoding RNA (sncRNA) 5' transfer RNA (tRNA) half
accccaggtgggactcgaacccacaatccctggctt

SEQ ID NO: 17722 - DNA, 31 bp, Artificial Sequence
  synthetic circulating small noncoding RNA (sncRNA) 5' transfer RNA (tRNA) half
attcggcgctctcaccgccgcggcccgggtt

SEQ ID NO: 17723 - DNA, 8 bp, Artificial Sequence
  synthetic circulating small noncoding RNA (sncRNA) 5' transfer RNA (tRNA) half
cctcggca

SEQ ID NO: 17724 - DNA, 37 bp, Artificial Sequence
  synthetic circulating small noncoding RNA (sncRNA) 5' transfer RNA (tRNA) half
tccatcgacctctgggttatgggcccagcacgcttcc

SEQ ID NO: 17725 - DNA, 27 bp, Artificial Sequence
  synthetic circulating small noncoding RNA (sncRNA) 5' transfer RNA (tRNA) half
gagtactaaccactatacgatctcggc

SEQ ID NO: 17726 - DNA, 8 bp, Artificial Sequence
  synthetic circulating small noncoding RNA (sncRNA) 5' transfer RNA (tRNA) half
tggtcccg

SEQ ID NO: 17727 - DNA, 32 bp, Artificial Sequence
  synthetic circulating small noncoding RNA (sncRNA) 5' transfer RNA (tRNA) half
gaaaggttggtggttcaagcccacccagggac

SEQ ID NO: 17728 - DNA, 40 bp, Artificial Sequence
  synthetic circulating small noncoding RNA (sncRNA) 5' transfer RNA (tRNA) half
tgtgtcagaagtgggattcgaacccacgcctccattcgga

SEQ ID NO: 17729 - DNA, 42 bp, Artificial Sequence
  synthetic circulating small noncoding RNA (sncRNA) 5' transfer RNA (tRNA) half
tggcagcggtgggattcgaacccacgccatcgaaatgactgg

SEQ ID NO: 17730 - DNA, 18 bp, Artificial Sequence
  synthetic circulating small noncoding RNA (sncRNA) 5' transfer RNA (tRNA) half
ccgtagtcggcaggattc

SEQ ID NO: 17731 - DNA, 30 bp, Artificial Sequence
  synthetic circulating small noncoding RNA (sncRNA) 5' transfer RNA (tRNA) half
gagactggagccttaatccagcgccttaga

SEQ ID NO: 17732 - DNA, 18 bp, Artificial Sequence
  synthetic circulating small noncoding RNA (sncRNA) 5' transfer RNA (tRNA) half
cgcagcaacctcggttcg

SEQ ID NO: 17733 - DNA, 24 bp, Artificial Sequence
  synthetic circulating small noncoding RNA (sncRNA) 5' transfer RNA (tRNA) half
taagccagggattgtgggttcgag

SEQ ID NO: 17734 - DNA, 20 bp, Artificial Sequence
  synthetic circulating small noncoding RNA (sncRNA) 5' transfer RNA (tRNA) half
ccgtcggggaatcgaacccc

SEQ ID NO: 17735 - DNA, 18 bp, Artificial Sequence
  synthetic circulating small noncoding RNA (sncRNA) 5' transfer RNA (tRNA) half
tgccacgcgggaggcccg

SEQ ID NO: 17736 - DNA, 6 bp, Artificial Sequence
  synthetic circulating small noncoding RNA (sncRNA) 5' transfer RNA (tRNA) half
tgccgg

SEQ ID NO: 17737 - DNA, 24 bp, Artificial Sequence
  synthetic circulating small noncoding RNA (sncRNA) 5' transfer RNA (tRNA) half
caccaacctttcggttaacagccg

SEQ ID NO: 17738 - DNA, 23 bp, Artificial Sequence
  synthetic circulating small noncoding RNA (sncRNA) 5' transfer RNA (tRNA) half
tatgattctcgcttcgggtgcga

SEQ ID NO: 17739 - DNA, 17 bp, Artificial Sequence
  synthetic circulating small noncoding RNA (sncRNA) 5' transfer RNA (tRNA) half
cataatctgaaggtcct

SEQ ID NO: 17740 - DNA, 8 bp, Artificial Sequence
  synthetic circulating small noncoding RNA (sncRNA) 5' transfer RNA (tRNA) half
ccgccaca

SEQ ID NO: 17741 - DNA, 25 bp, Artificial Sequence
  synthetic circulating small noncoding RNA (sncRNA) 5' transfer RNA (tRNA) half
gggaggcccgggttcgattcccggc

SEQ ID NO: 17742 - DNA, 12 bp, Artificial Sequence
  synthetic circulating small noncoding RNA (sncRNA) 5' transfer RNA (tRNA) half
gcgacccgggtt

SEQ ID NO: 17743 - DNA, 11 bp, Artificial Sequence
  synthetic circulating small noncoding RNA (sncRNA) 5' transfer RNA (tRNA) half
catcctcgtcg

SEQ ID NO: 17744 - DNA, 37 bp, Artificial Sequence
  synthetic circulating small noncoding RNA (sncRNA) 5' transfer RNA (tRNA) half
aggttgctgcggccacaacgcagagtactaaccacta

SEQ ID NO: 17745 - DNA, 21 bp, Artificial Sequence
  synthetic circulating small noncoding RNA (sncRNA) 5' transfer RNA (tRNA) half
tccctgttcgggcgcttgtct

SEQ ID NO: 17746 - DNA, 38 bp, Artificial Sequence
  synthetic circulating small noncoding RNA (sncRNA) 5' transfer RNA (tRNA) half
ggatgatcctcagtggtctggggtgcaggcttcaaacc

SEQ ID NO: 17747 - DNA, 25 bp, Artificial Sequence
  synthetic circulating small noncoding RNA (sncRNA) 5' transfer RNA (tRNA) half
gtagtggttatcacgctcgcctcac

SEQ ID NO: 17748 - DNA, 22 bp, Artificial Sequence
  synthetic circulating small noncoding RNA (sncRNA) 5' transfer RNA (tRNA) half
cacgcgaaaggtccccggttcg

SEQ ID NO: 17749 - DNA, 24 bp, Artificial Sequence
  synthetic circulating small noncoding RNA (sncRNA) 5' transfer RNA (tRNA) half
gtttccgtagtgtagtggttagcg

SEQ ID NO: 17750 - DNA, 21 bp, Artificial Sequence
  synthetic circulating small noncoding RNA (sncRNA) 5' transfer RNA (tRNA) half
agccggattcgaaccagcgac

SEQ ID NO: 17751 - DNA, 18 bp, Artificial Sequence
  synthetic circulating small noncoding RNA (sncRNA) 5' transfer RNA (tRNA) half
acccgggtcaactgcttg

SEQ ID NO: 17752 - DNA, 28 bp, Artificial Sequence
  synthetic circulating small noncoding RNA (sncRNA) 5' transfer RNA (tRNA) half
ctcgttggtctaggggtatgattctcgc

SEQ ID NO: 17753 - DNA, 29 bp, Artificial Sequence
  synthetic circulating small noncoding RNA (sncRNA) 5' transfer RNA (tRNA) half
aaaagtctgatgctctaccgactgagcta

SEQ ID NO: 17754 - DNA, 33 bp, Artificial Sequence
  synthetic circulating small noncoding RNA (sncRNA) 5' transfer RNA (tRNA) half
aaccgaagatcacgggttcgaaccccgtccgtg

SEQ ID NO: 17755 - DNA, 25 bp, Artificial Sequence
  synthetic circulating small noncoding RNA (sncRNA) 5' transfer RNA (tRNA) half
gcgccttagaccgctcggccatcct

SEQ ID NO: 17756 - DNA, 37 bp, Artificial Sequence
  synthetic circulating small noncoding RNA (sncRNA) 5' transfer RNA (tRNA) half
acgcgggtgacccgggttcgattcccggccaatgcag

SEQ ID NO: 17757 - DNA, 22 bp, Artificial Sequence
  synthetic circulating small noncoding RNA (sncRNA) 5' transfer RNA (tRNA) half
ccagaggtcgatggatcgaaac

SEQ ID NO: 17758 - DNA, 40 bp, Artificial Sequence
  synthetic circulating small noncoding RNA (sncRNA) 5' transfer RNA (tRNA) half
cgggccgcctgggtgaaaaccaggaatcctaaccgctaga

SEQ ID NO: 17759 - DNA, 16 bp, Artificial Sequence
  synthetic circulating small noncoding RNA (sncRNA) 5' transfer RNA (tRNA) half
cccggatgatcctcag

SEQ ID NO: 17760 - DNA, 30 bp, Artificial Sequence
  synthetic circulating small noncoding RNA (sncRNA) 5' transfer RNA (tRNA) half
gagccaggtaggagtcgaacctacaatctt

SEQ ID NO: 17761 - DNA, 27 bp, Artificial Sequence
  synthetic circulating small noncoding RNA (sncRNA) 5' transfer RNA (tRNA) half
agtggggttcgaacccacgcagacata

SEQ ID NO: 17762 - DNA, 20 bp, Artificial Sequence
  synthetic circulating small noncoding RNA (sncRNA) 5' transfer RNA (tRNA) half
atggtttcgatccatcgacc

SEQ ID NO: 17763 - DNA, 22 bp, Artificial Sequence
  synthetic circulating small noncoding RNA (sncRNA) 5' transfer RNA (tRNA) half
ccatgtttccgcccggtttcga

SEQ ID NO: 17764 - DNA, 41 bp, Artificial Sequence
  synthetic circulating small noncoding RNA (sncRNA) 5' transfer RNA (tRNA) half
gttaggattcctggttttcacccaggcggcccgggttcgac

SEQ ID NO: 17765 - DNA, 21 bp, Artificial Sequence
  synthetic circulating small noncoding RNA (sncRNA) 5' transfer RNA (tRNA) half
agtggtatcatgcaagattcc

SEQ ID NO: 17766 - DNA, 34 bp, Artificial Sequence
  synthetic circulating small noncoding RNA (sncRNA) 5' transfer RNA (tRNA) half
ggttgctgcggccacaacgcagagtactaaccac

SEQ ID NO: 17767 - DNA, 37 bp, Artificial Sequence
  synthetic circulating small noncoding RNA (sncRNA) 5' transfer RNA (tRNA) half
ctgaagatctaaaggtccctggttcgatcccgggttt

SEQ ID NO: 17768 - DNA, 15 bp, Artificial Sequence
  synthetic circulating small noncoding RNA (sncRNA) 5' transfer RNA (tRNA) half
cgactgagctagccg

SEQ ID NO: 17769 - DNA, 14 bp, Artificial Sequence
  synthetic circulating small noncoding RNA (sncRNA) 5' transfer RNA (tRNA) half
tgagagcgccgaat

SEQ ID NO: 17770 - DNA, 16 bp, Artificial Sequence
  synthetic circulating small noncoding RNA (sncRNA) 5' transfer RNA (tRNA) half
ggcgagcgtgatgacc

SEQ ID NO: 17771 - DNA, 16 bp, Artificial Sequence
  synthetic circulating small noncoding RNA (sncRNA) 5' transfer RNA (tRNA) half
tccccgacggggagtc

SEQ ID NO: 17772 - DNA, 18 bp, Artificial Sequence
  synthetic circulating small noncoding RNA (sncRNA) 5' transfer RNA (tRNA) half
ctccccgtcggggaattg

SEQ ID NO: 17773 - DNA, 26 bp, Artificial Sequence
  synthetic circulating small noncoding RNA (sncRNA) 5' transfer RNA (tRNA) half
ttgtgggttcgagtcccatctggggt

SEQ ID NO: 17774 - DNA, 34 bp, Artificial Sequence
  synthetic circulating small noncoding RNA (sncRNA) 5' transfer RNA (tRNA) half
ggccttgctgggattcgaacccaggatctcctgt

SEQ ID NO: 17775 - DNA, 30 bp, Artificial Sequence
  synthetic circulating small noncoding RNA (sncRNA) 5' transfer RNA (tRNA) half
ggcagcggtgggattcgaacccacgccccc

SEQ ID NO: 17776 - DNA, 18 bp, Artificial Sequence
  synthetic circulating small noncoding RNA (sncRNA) 5' transfer RNA (tRNA) half
tcacttggccacgactac

SEQ ID NO: 17777 - DNA, 12 bp, Artificial Sequence
  synthetic circulating small noncoding RNA (sncRNA) 5' transfer RNA (tRNA) half
gttggactcgaa

SEQ ID NO: 17778 - DNA, 19 bp, Artificial Sequence
  synthetic circulating small noncoding RNA (sncRNA) 5' transfer RNA (tRNA) half
gccgaaatagctcagttgg

SEQ ID NO: 17779 - DNA, 26 bp, Artificial Sequence
  synthetic circulating small noncoding RNA (sncRNA) 5' transfer RNA (tRNA) half
tccatagtgtagcggttatcacgtct

SEQ ID NO: 17780 - DNA, 18 bp, Artificial Sequence
  synthetic circulating small noncoding RNA (sncRNA) 5' transfer RNA (tRNA) half
tcacgaccttcagattat

SEQ ID NO: 17781 - DNA, 37 bp, Artificial Sequence
  synthetic circulating small noncoding RNA (sncRNA) 5' transfer RNA (tRNA) half
agggaggcctcgtggcgcaacggtagcgcgtctgact

SEQ ID NO: 17782 - DNA, 27 bp, Artificial Sequence
  synthetic circulating small noncoding RNA (sncRNA) 5' transfer RNA (tRNA) half
agaattctaccattgaactaccaatgc

SEQ ID NO: 17783 - DNA, 14 bp, Artificial Sequence
  synthetic circulating small noncoding RNA (sncRNA) 5' transfer RNA (tRNA) half
gtcctccgctctac

SEQ ID NO: 17784 - DNA, 24 bp, Artificial Sequence
  synthetic circulating small noncoding RNA (sncRNA) 5' transfer RNA (tRNA) half
ggattcaaagtccagagtgctaac

SEQ ID NO: 17785 - DNA, 26 bp, Artificial Sequence
  synthetic circulating small noncoding RNA (sncRNA) 5' transfer RNA (tRNA) half
gaccagtgctctaacccctgagctat

SEQ ID NO: 17786 - DNA, 18 bp, Artificial Sequence
  synthetic circulating small noncoding RNA (sncRNA) 5' transfer RNA (tRNA) half
cgactcctggctggctcg

SEQ ID NO: 17787 - DNA, 18 bp, Artificial Sequence
  synthetic circulating small noncoding RNA (sncRNA) 5' transfer RNA (tRNA) half
gggttccttcgagccgga

SEQ ID NO: 17788 - DNA, 18 bp, Artificial Sequence
  synthetic circulating small noncoding RNA (sncRNA) 5' transfer RNA (tRNA) half
accgacgaggatgggatt

SEQ ID NO: 17789 - DNA, 26 bp, Artificial Sequence
  synthetic circulating small noncoding RNA (sncRNA) 5' transfer RNA (tRNA) half
gagtggttcaattccacctttcgggc

SEQ ID NO: 17790 - DNA, 29 bp, Artificial Sequence
  synthetic circulating small noncoding RNA (sncRNA) 5' transfer RNA (tRNA) half
agagtctcatgctctaccgactgagctag

SEQ ID NO: 17791 - DNA, 8 bp, Artificial Sequence
  synthetic circulating small noncoding RNA (sncRNA) 5' transfer RNA (tRNA) half
cgcctccg

SEQ ID NO: 17792 - DNA, 13 bp, Artificial Sequence
  synthetic circulating small noncoding RNA (sncRNA) 5' transfer RNA (tRNA) half
gttcgaatcctgc

SEQ ID NO: 17793 - DNA, 22 bp, Artificial Sequence
  synthetic circulating small noncoding RNA (sncRNA) 5' transfer RNA (tRNA) half
tgggtggttcagtggtagaatt

SEQ ID NO: 17794 - DNA, 18 bp, Artificial Sequence
  synthetic circulating small noncoding RNA (sncRNA) 5' transfer RNA (tRNA) half
cgaacccccaatcttctg

SEQ ID NO: 17795 - DNA, 29 bp, Artificial Sequence
  synthetic circulating small noncoding RNA (sncRNA) 5' transfer RNA (tRNA) half
gaccagtgctctaacccctgagctatgga

SEQ ID NO: 17796 - DNA, 15 bp, Artificial Sequence
  synthetic circulating small noncoding RNA (sncRNA) 5' transfer RNA (tRNA) half
tctcttcgggggcgt

SEQ ID NO: 17797 - DNA, 35 bp, Artificial Sequence
  synthetic circulating small noncoding RNA (sncRNA) 5' transfer RNA (tRNA) half
gaaggccccagcgagatttgaactcgcgacccctg

SEQ ID NO: 17798 - DNA, 12 bp, Artificial Sequence
  synthetic circulating small noncoding RNA (sncRNA) 5' transfer RNA (tRNA) half
gcaccgctggga

SEQ ID NO: 17799 - DNA, 32 bp, Artificial Sequence
  synthetic circulating small noncoding RNA (sncRNA) 5' transfer RNA (tRNA) half
ggggatgtagctcagtggtagagcacatgctt

SEQ ID NO: 17800 - DNA, 21 bp, Artificial Sequence
  synthetic circulating small noncoding RNA (sncRNA) 5' transfer RNA (tRNA) half
ccataccgggagtcgaacccg

SEQ ID NO: 17801 - DNA, 29 bp, Artificial Sequence
  synthetic circulating small noncoding RNA (sncRNA) 5' transfer RNA (tRNA) half
tctgatgctctaccgactgagctatccag

SEQ ID NO: 17802 - DNA, 27 bp, Artificial Sequence
  synthetic circulating small noncoding RNA (sncRNA) 5' transfer RNA (tRNA) half
gtggcctaatggataaggcatcagcct

SEQ ID NO: 17803 - DNA, 26 bp, Artificial Sequence
  synthetic circulating small noncoding RNA (sncRNA) 5' transfer RNA (tRNA) half
cagcgaccacgaagggactcgaaccc

SEQ ID NO: 17804 - DNA, 41 bp, Artificial Sequence
  synthetic circulating small noncoding RNA (sncRNA) 5' transfer RNA (tRNA) half
tcaggcaccgctgggattcgaacccaggatctcctgtttac

SEQ ID NO: 17805 - DNA, 17 bp, Artificial Sequence
  synthetic circulating small noncoding RNA (sncRNA) 5' transfer RNA (tRNA) half
aacccacgccatcgaaa

SEQ ID NO: 17806 - DNA, 16 bp, Artificial Sequence
  synthetic circulating small noncoding RNA (sncRNA) 5' transfer RNA (tRNA) half
aagtccctgttcgggc

SEQ ID NO: 17807 - DNA, 26 bp, Artificial Sequence
  synthetic circulating small noncoding RNA (sncRNA) 5' transfer RNA (tRNA) half
cataacccagaggtcgatggatcgaa

SEQ ID NO: 17808 - DNA, 24 bp, Artificial Sequence
  synthetic circulating small noncoding RNA (sncRNA) 5' transfer RNA (tRNA) half
atccagcgccttagaccactcggc

SEQ ID NO: 17809 - DNA, 27 bp, Artificial Sequence
  synthetic circulating small noncoding RNA (sncRNA) 5' transfer RNA (tRNA) half
gtctcatgctctaccaactgagctagc

SEQ ID NO: 17810 - DNA, 10 bp, Artificial Sequence
  synthetic circulating small noncoding RNA (sncRNA) 5' transfer RNA (tRNA) half
ggtgtttccg

SEQ ID NO: 17811 - DNA, 23 bp, Artificial Sequence
  synthetic circulating small noncoding RNA (sncRNA) 5' transfer RNA (tRNA) half
gattaagagtctcatgctctacc

SEQ ID NO: 17812 - DNA, 31 bp, Artificial Sequence
  synthetic circulating small noncoding RNA (sncRNA) 5' transfer RNA (tRNA) half
ggaggcccgggttcggttcccggccaatgca

SEQ ID NO: 17813 - DNA, 13 bp, Artificial Sequence
  synthetic circulating small noncoding RNA (sncRNA) 5' transfer RNA (tRNA) half
agtctcttcgggg

SEQ ID NO: 17814 - DNA, 17 bp, Artificial Sequence
  synthetic circulating small noncoding RNA (sncRNA) 5' transfer RNA (tRNA) half
ccgtgtggaggcgtggg

SEQ ID NO: 17815 - DNA, 45 bp, Artificial Sequence
  synthetic circulating small noncoding RNA (sncRNA) 5' transfer RNA (tRNA) half
acttccctgaccgggaatcgaacccgggccgcggcggtgagagcg

SEQ ID NO: 17816 - DNA, 8 bp, Artificial Sequence
  synthetic circulating small noncoding RNA (sncRNA) 5' transfer RNA (tRNA) half
cggctcga

SEQ ID NO: 17817 - DNA, 13 bp, Artificial Sequence
  synthetic circulating small noncoding RNA (sncRNA) 5' transfer RNA (tRNA) half
ggcccgtcggcgt

SEQ ID NO: 17818 - DNA, 13 bp, Artificial Sequence
  synthetic circulating small noncoding RNA (sncRNA) 5' transfer RNA (tRNA) half
gcctgccacgcgg

SEQ ID NO: 17819 - DNA, 21 bp, Artificial Sequence
  synthetic circulating small noncoding RNA (sncRNA) 5' transfer RNA (tRNA) half
ggagtcgaacccgggccgcct

SEQ ID NO: 17820 - DNA, 13 bp, Artificial Sequence
  synthetic circulating small noncoding RNA (sncRNA) 5' transfer RNA (tRNA) half
actgagctaaccg

SEQ ID NO: 17821 - DNA, 20 bp, Artificial Sequence
  synthetic circulating small noncoding RNA (sncRNA) 5' transfer RNA (tRNA) half
agggttccttcgagccggat

SEQ ID NO: 17822 - DNA, 44 bp, Artificial Sequence
  synthetic circulating small noncoding RNA (sncRNA) 5' transfer RNA (tRNA) half
gaaatccattggggtttccccgcgcaggttcgaatcctgccgac

SEQ ID NO: 17823 - DNA, 18 bp, Artificial Sequence
  synthetic circulating small noncoding RNA (sncRNA) 5' transfer RNA (tRNA) half
gatactaaccactatact

SEQ ID NO: 17824 - DNA, 28 bp, Artificial Sequence
  synthetic circulating small noncoding RNA (sncRNA) 5' transfer RNA (tRNA) half
gctcgaacccacgaccctgggattaaga

SEQ ID NO: 17825 - DNA, 15 bp, Artificial Sequence
  synthetic circulating small noncoding RNA (sncRNA) 5' transfer RNA (tRNA) half
gagtcgaacccggga

SEQ ID NO: 17826 - DNA, 34 bp, Artificial Sequence
  synthetic circulating small noncoding RNA (sncRNA) 5' transfer RNA (tRNA) half
ccccctctgaggttcgaactcaggaccttcagat

SEQ ID NO: 17827 - DNA, 22 bp, Artificial Sequence
  synthetic circulating small noncoding RNA (sncRNA) 5' transfer RNA (tRNA) half
aagattcccattcttgcgaccc

SEQ ID NO: 17828 - DNA, 16 bp, Artificial Sequence
  synthetic circulating small noncoding RNA (sncRNA) 5' transfer RNA (tRNA) half
tcgactcctggctggc

SEQ ID NO: 17829 - DNA, 32 bp, Artificial Sequence
  synthetic circulating small noncoding RNA (sncRNA) 5' transfer RNA (tRNA) half
caggaatcctaaccgctagaccatgtgggaac

SEQ ID NO: 17830 - DNA, 23 bp, Artificial Sequence
  synthetic circulating small noncoding RNA (sncRNA) 5' transfer RNA (tRNA) half
gggattagctcaaatggtagagc

SEQ ID NO: 17831 - DNA, 10 bp, Artificial Sequence
  synthetic circulating small noncoding RNA (sncRNA) 5' transfer RNA (tRNA) half
tggacgagcg

SEQ ID NO: 17832 - DNA, 16 bp, Artificial Sequence
  synthetic circulating small noncoding RNA (sncRNA) 5' transfer RNA (tRNA) half
tgccgtgactcggatt

SEQ ID NO: 17833 - DNA, 22 bp, Artificial Sequence
  synthetic circulating small noncoding RNA (sncRNA) 5' transfer RNA (tRNA) half
cgggccgcggcggtgagagcgc

SEQ ID NO: 17834 - DNA, 8 bp, Artificial Sequence
  synthetic circulating small noncoding RNA (sncRNA) 5' transfer RNA (tRNA) half
ggcctccc

SEQ ID NO: 17835 - DNA, 17 bp, Artificial Sequence
  synthetic circulating small noncoding RNA (sncRNA) 5' transfer RNA (tRNA) half
cgactccgccgggactc

SEQ ID NO: 17836 - DNA, 37 bp, Artificial Sequence
  synthetic circulating small noncoding RNA (sncRNA) 5' transfer RNA (tRNA) half
tgccgtccctgggtgggctcgaaccaccaacctttcg

SEQ ID NO: 17837 - DNA, 17 bp, Artificial Sequence
  synthetic circulating small noncoding RNA (sncRNA) 5' transfer RNA (tRNA) half
ctccgaagagactggag

SEQ ID NO: 17838 - DNA, 35 bp, Artificial Sequence
  synthetic circulating small noncoding RNA (sncRNA) 5' transfer RNA (tRNA) half
cgcctccccgtcggggaatcgaaccccggtctccc

SEQ ID NO: 17839 - DNA, 16 bp, Artificial Sequence
  synthetic circulating small noncoding RNA (sncRNA) 5' transfer RNA (tRNA) half
acaatccctggcttag

SEQ ID NO: 17840 - DNA, 5 bp, Artificial Sequence
  synthetic circulating small noncoding RNA (sncRNA) 5' transfer RNA (tRNA) half
cggtg

SEQ ID NO: 17841 - DNA, 8 bp, Artificial Sequence
  synthetic circulating small noncoding RNA (sncRNA) 5' transfer RNA (tRNA) half
tcggtctc

SEQ ID NO: 17842 - DNA, 43 bp, Artificial Sequence
  synthetic circulating small noncoding RNA (sncRNA) 5' transfer RNA (tRNA) half
gccgcggcggtgagagcgccgaatcctaaccactagaccacca

SEQ ID NO: 17843 - DNA, 38 bp, Artificial Sequence
  synthetic circulating small noncoding RNA (sncRNA) 5' transfer RNA (tRNA) half
gcgcccgaacagggacttgaaccctggaccctcagatt

SEQ ID NO: 17844 - DNA, 36 bp, Artificial Sequence
  synthetic circulating small noncoding RNA (sncRNA) 5' transfer RNA (tRNA) half
ttgaactcggatcgctggattcagagtccagagtgc

SEQ ID NO: 17845 - DNA, 17 bp, Artificial Sequence
  synthetic circulating small noncoding RNA (sncRNA) 5' transfer RNA (tRNA) half
gatttgaactcggatcg

SEQ ID NO: 17846 - DNA, 17 bp, Artificial Sequence
  synthetic circulating small noncoding RNA (sncRNA) 5' transfer RNA (tRNA) half
ccgaagatcgcgggttc

SEQ ID NO: 17847 - DNA, 19 bp, Artificial Sequence
  synthetic circulating small noncoding RNA (sncRNA) 5' transfer RNA (tRNA) half
attccaggttcgactcctg

SEQ ID NO: 17848 - DNA, 17 bp, Artificial Sequence
  synthetic circulating small noncoding RNA (sncRNA) 5' transfer RNA (tRNA) half
cgagccccacgttgggc

SEQ ID NO: 17849 - DNA, 21 bp, Artificial Sequence
  synthetic circulating small noncoding RNA (sncRNA) 5' transfer RNA (tRNA) half
tatgattctcgcttcgggtgc

SEQ ID NO: 17850 - DNA, 35 bp, Artificial Sequence
  synthetic circulating small noncoding RNA (sncRNA) 5' transfer RNA (tRNA) half
cgtccccgggtgggctcgaaccaccaacctttcgg

SEQ ID NO: 17851 - DNA, 19 bp, Artificial Sequence
  synthetic circulating small noncoding RNA (sncRNA) 5' transfer RNA (tRNA) half
cgccgaatcctagccacta

SEQ ID NO: 17852 - DNA, 7 bp, Artificial Sequence
  synthetic circulating small noncoding RNA (sncRNA) 5' transfer RNA (tRNA) half
tagaccg

SEQ ID NO: 17853 - DNA, 13 bp, Artificial Sequence
  synthetic circulating small noncoding RNA (sncRNA) 5' transfer RNA (tRNA) half
gctaaccattaca

SEQ ID NO: 17854 - DNA, 24 bp, Artificial Sequence
  synthetic circulating small noncoding RNA (sncRNA) 5' transfer RNA (tRNA) half
agggttcaagtccctgttcgggcg

SEQ ID NO: 17855 - DNA, 8 bp, Artificial Sequence
  synthetic circulating small noncoding RNA (sncRNA) 5' transfer RNA (tRNA) half
gccggccg

SEQ ID NO: 17856 - DNA, 32 bp, Artificial Sequence
  synthetic circulating small noncoding RNA (sncRNA) 5' transfer RNA (tRNA) half
catgggtggttcagtggtagaattctcgcctg

SEQ ID NO: 17857 - DNA, 7 bp, Artificial Sequence
  synthetic circulating small noncoding RNA (sncRNA) 5' transfer RNA (tRNA) half
ggacgag

SEQ ID NO: 17858 - DNA, 21 bp, Artificial Sequence
  synthetic circulating small noncoding RNA (sncRNA) 5' transfer RNA (tRNA) half
taatggataaggcattggcct

SEQ ID NO: 17859 - DNA, 29 bp, Artificial Sequence
  synthetic circulating small noncoding RNA (sncRNA) 5' transfer RNA (tRNA) half
ggaatcctaaccgctagaccatatgggag

SEQ ID NO: 17860 - DNA, 13 bp, Artificial Sequence
  synthetic circulating small noncoding RNA (sncRNA) 5' transfer RNA (tRNA) half
tcccggccaatgc

SEQ ID NO: 17861 - DNA, 35 bp, Artificial Sequence
  synthetic circulating small noncoding RNA (sncRNA) 5' transfer RNA (tRNA) half
aagggggcacctggatttgaaccagggacctcttg

SEQ ID NO: 17862 - DNA, 9 bp, Artificial Sequence
  synthetic circulating small noncoding RNA (sncRNA) 5' transfer RNA (tRNA) half
gaaccgagg

SEQ ID NO: 17863 - DNA, 22 bp, Artificial Sequence
  synthetic circulating small noncoding RNA (sncRNA) 5' transfer RNA (tRNA) half
aaggtcgcgggttcgatccccg

SEQ ID NO: 17864 - DNA, 11 bp, Artificial Sequence
  synthetic circulating small noncoding RNA (sncRNA) 5' transfer RNA (tRNA) half
tggccgagtgg

SEQ ID NO: 17865 - DNA, 20 bp, Artificial Sequence
  synthetic circulating small noncoding RNA (sncRNA) 5' transfer RNA (tRNA) half
gtctagtggttaggattcgg

SEQ ID NO: 17866 - DNA, 34 bp, Artificial Sequence
  synthetic circulating small noncoding RNA (sncRNA) 5' transfer RNA (tRNA) half
tcgtccgggatttgaacccgggacctctcgcacc

SEQ ID NO: 17867 - DNA, 23 bp, Artificial Sequence
  synthetic circulating small noncoding RNA (sncRNA) 5' transfer RNA (tRNA) half
tagctcagtcggtagagcatcag

SEQ ID NO: 17868 - DNA, 28 bp, Artificial Sequence
  synthetic circulating small noncoding RNA (sncRNA) 5' transfer RNA (tRNA) half
agatcctgggttcgaatcccagcggtgc

SEQ ID NO: 17869 - DNA, 25 bp, Artificial Sequence
  synthetic circulating small noncoding RNA (sncRNA) 5' transfer RNA (tRNA) half
cggtgaaagcgccgaatcctagcca

SEQ ID NO: 17870 - DNA, 13 bp, Artificial Sequence
  synthetic circulating small noncoding RNA (sncRNA) 5' transfer RNA (tRNA) half
gccgcccgaacag

SEQ ID NO: 17871 - DNA, 12 bp, Artificial Sequence
  synthetic circulating small noncoding RNA (sncRNA) 5' transfer RNA (tRNA) half
ctgagctatcga

SEQ ID NO: 17872 - DNA, 21 bp, Artificial Sequence
  synthetic circulating small noncoding RNA (sncRNA) 5' transfer RNA (tRNA) half
cccgggcctcccgcgtggcag

SEQ ID NO: 17873 - DNA, 15 bp, Artificial Sequence
  synthetic circulating small noncoding RNA (sncRNA) 5' transfer RNA (tRNA) half
tgcgttggccgggaa

SEQ ID NO: 17874 - DNA, 17 bp, Artificial Sequence
  synthetic circulating small noncoding RNA (sncRNA) 5' transfer RNA (tRNA) half
tcccggtcagggaagca

SEQ ID NO: 17875 - DNA, 34 bp, Artificial Sequence
  synthetic circulating small noncoding RNA (sncRNA) 5' transfer RNA (tRNA) half
caccacgctctaaccaactgagctaaccggccag

SEQ ID NO: 17876 - DNA, 36 bp, Artificial Sequence
  synthetic circulating small noncoding RNA (sncRNA) 5' transfer RNA (tRNA) half
ccaaggtcgcgggttcgatccccgtacgggccacat

SEQ ID NO: 17877 - DNA, 14 bp, Artificial Sequence
  synthetic circulating small noncoding RNA (sncRNA) 5' transfer RNA (tRNA) half
tcgaacccgggccg

SEQ ID NO: 17878 - DNA, 23 bp, Artificial Sequence
  synthetic circulating small noncoding RNA (sncRNA) 5' transfer RNA (tRNA) half
gcaagaattctaccactgaacca

SEQ ID NO: 17879 - DNA, 37 bp, Artificial Sequence
  synthetic circulating small noncoding RNA (sncRNA) 5' transfer RNA (tRNA) half
cgaaaggtccccggttcgaaaccgggcggaaacagca

SEQ ID NO: 17880 - DNA, 23 bp, Artificial Sequence
  synthetic circulating small noncoding RNA (sncRNA) 5' transfer RNA (tRNA) half
accgggcggaaacattacttttt

SEQ ID NO: 17881 - DNA, 16 bp, Artificial Sequence
  synthetic circulating small noncoding RNA (sncRNA) 5' transfer RNA (tRNA) half
tcgaatcccagcgggg

SEQ ID NO: 17882 - DNA, 29 bp, Artificial Sequence
  synthetic circulating small noncoding RNA (sncRNA) 5' transfer RNA (tRNA) half
tgatcgtatagtggttagtactctgcgtt

SEQ ID NO: 17883 - DNA, 35 bp, Artificial Sequence
  synthetic circulating small noncoding RNA (sncRNA) 5' transfer RNA (tRNA) half
aaggttccaccgagatttgaactcggatcgctgga

SEQ ID NO: 17884 - DNA, 29 bp, Artificial Sequence
  synthetic circulating small noncoding RNA (sncRNA) 5' transfer RNA (tRNA) half
gaagtgggattcgaacccacgcctccatt

SEQ ID NO: 17885 - DNA, 11 bp, Artificial Sequence
  synthetic circulating small noncoding RNA (sncRNA) 5' transfer RNA (tRNA) half
cggcggtgaga

SEQ ID NO: 17886 - DNA, 13 bp, Artificial Sequence
  synthetic circulating small noncoding RNA (sncRNA) 5' transfer RNA (tRNA) half
gcgttggccggga

SEQ ID NO: 17887 - DNA, 27 bp, Artificial Sequence
  synthetic circulating small noncoding RNA (sncRNA) 5' transfer RNA (tRNA) half
cgacgaggatgggattcgaacccatgc

SEQ ID NO: 17888 - DNA, 7 bp, Artificial Sequence
  synthetic circulating small noncoding RNA (sncRNA) 5' transfer RNA (tRNA) half
ggccggt

SEQ ID NO: 17889 - DNA, 36 bp, Artificial Sequence
  synthetic circulating small noncoding RNA (sncRNA) 5' transfer RNA (tRNA) half
tgtatgaggccccgggttcaatccccggcatctcca

SEQ ID NO: 17890 - DNA, 32 bp, Artificial Sequence
  synthetic circulating small noncoding RNA (sncRNA) 5' transfer RNA (tRNA) half
atgcgctctaccactgagctacatccccactc

SEQ ID NO: 17891 - DNA, 26 bp, Artificial Sequence
  synthetic circulating small noncoding RNA (sncRNA) 5' transfer RNA (tRNA) half
atggttagcactctggactttgaatc

SEQ ID NO: 17892 - DNA, 12 bp, Artificial Sequence
  synthetic circulating small noncoding RNA (sncRNA) 5' transfer RNA (tRNA) half
agctatccgggc

SEQ ID NO: 17893 - DNA, 35 bp, Artificial Sequence
  synthetic circulating small noncoding RNA (sncRNA) 5' transfer RNA (tRNA) half
accacgctctaaccaactgagctaaccggccagat

SEQ ID NO: 17894 - DNA, 21 bp, Artificial Sequence
  synthetic circulating small noncoding RNA (sncRNA) 5' transfer RNA (tRNA) half
gttcgattcccggcccatgca

SEQ ID NO: 17895 - DNA, 12 bp, Artificial Sequence
  synthetic circulating small noncoding RNA (sncRNA) 5' transfer RNA (tRNA) half
tctacccctgag

SEQ ID NO: 17896 - DNA, 28 bp, Artificial Sequence
  synthetic circulating small noncoding RNA (sncRNA) 5' transfer RNA (tRNA) half
cgggttcgactcccggtgtgggaacagc

SEQ ID NO: 17897 - DNA, 33 bp, Artificial Sequence
  synthetic circulating small noncoding RNA (sncRNA) 5' transfer RNA (tRNA) half
ttaatctgagggttcagggttcaagtccctgtt

SEQ ID NO: 17898 - DNA, 22 bp, Artificial Sequence
  synthetic circulating small noncoding RNA (sncRNA) 5' transfer RNA (tRNA) half
cgcaccctaagcgagaatcata

SEQ ID NO: 17899 - DNA, 18 bp, Artificial Sequence
  synthetic circulating small noncoding RNA (sncRNA) 5' transfer RNA (tRNA) half
ttcatgaccccgacgtga

SEQ ID NO: 17900 - DNA, 23 bp, Artificial Sequence
  synthetic circulating small noncoding RNA (sncRNA) 5' transfer RNA (tRNA) half
cccgcgaccttggcgttattagc

SEQ ID NO: 17901 - DNA, 43 bp, Artificial Sequence
  synthetic circulating small noncoding RNA (sncRNA) 5' transfer RNA (tRNA) half
gtgttcccacaccgggagtcgaacccgggccgcctgggtgaaa

SEQ ID NO: 17902 - DNA, 32 bp, Artificial Sequence
  synthetic circulating small noncoding RNA (sncRNA) 5' transfer RNA (tRNA) half
aaaggttggtggttcgagcccacccagggacg

SEQ ID NO: 17903 - DNA, 35 bp, Artificial Sequence
  synthetic circulating small noncoding RNA (sncRNA) 5' transfer RNA (tRNA) half
aggccgcggcggtgagagcgccaaatcctaaccac

SEQ ID NO: 17904 - DNA, 31 bp, Artificial Sequence
  synthetic circulating small noncoding RNA (sncRNA) 5' transfer RNA (tRNA) half
agaaggttgcgtgttcaaatcacgtcggggt

SEQ ID NO: 17905 - DNA, 42 bp, Artificial Sequence
  synthetic circulating small noncoding RNA (sncRNA) 5' transfer RNA (tRNA) half
ctccgtatggaggcgtgggttcgaatcccacttctgacacag

SEQ ID NO: 17906 - DNA, 17 bp, Artificial Sequence
  synthetic circulating small noncoding RNA (sncRNA) 5' transfer RNA (tRNA) half
tcccatctgggtcgcat

SEQ ID NO: 17907 - DNA, 29 bp, Artificial Sequence
  synthetic circulating small noncoding RNA (sncRNA) 5' transfer RNA (tRNA) half
ggattcagagtccagagtgctaaccatta

SEQ ID NO: 17908 - DNA, 36 bp, Artificial Sequence
  synthetic circulating small noncoding RNA (sncRNA) 5' transfer RNA (tRNA) half
atccagcgatccgagttcaaatctcggtggaacctg

SEQ ID NO: 17909 - DNA, 25 bp, Artificial Sequence
  synthetic circulating small noncoding RNA (sncRNA) 5' transfer RNA (tRNA) half
tcacgcgggagaccggggttcgatt

SEQ ID NO: 17910 - DNA, 11 bp, Artificial Sequence
  synthetic circulating small noncoding RNA (sncRNA) 5' transfer RNA (tRNA) half
ttccgactccg

SEQ ID NO: 17911 - DNA, 19 bp, Artificial Sequence
  synthetic circulating small noncoding RNA (sncRNA) 5' transfer RNA (tRNA) half
cggtagcgcgtctgactcc

SEQ ID NO: 17912 - DNA, 17 bp, Artificial Sequence
  synthetic circulating small noncoding RNA (sncRNA) 5' transfer RNA (tRNA) half
aatgcagagtactaacc

SEQ ID NO: 17913 - DNA, 25 bp, Artificial Sequence
  synthetic circulating small noncoding RNA (sncRNA) 5' transfer RNA (tRNA) half
ggttcaaatcccggacgagccccat

SEQ ID NO: 17914 - DNA, 13 bp, Artificial Sequence
  synthetic circulating small noncoding RNA (sncRNA) 5' transfer RNA (tRNA) half
aacccacgccccc

SEQ ID NO: 17915 - DNA, 14 bp, Artificial Sequence
  synthetic circulating small noncoding RNA (sncRNA) 5' transfer RNA (tRNA) half
ggagactgcgacct

SEQ ID NO: 17916 - DNA, 36 bp, Artificial Sequence
  synthetic circulating small noncoding RNA (sncRNA) 5' transfer RNA (tRNA) half
ttaaccgaaaggttggtggttcgagcccacccaggg

SEQ ID NO: 17917 - DNA, 10 bp, Artificial Sequence
  synthetic circulating small noncoding RNA (sncRNA) 5' transfer RNA (tRNA) half
gtcacggcat

SEQ ID NO: 17918 - DNA, 18 bp, Artificial Sequence
  synthetic circulating small noncoding RNA (sncRNA) 5' transfer RNA (tRNA) half
ccacaccgggagtcgaac

SEQ ID NO: 17919 - DNA, 27 bp, Artificial Sequence
  synthetic circulating small noncoding RNA (sncRNA) 5' transfer RNA (tRNA) half
cgtgggttcgaatcccacttctgacac

SEQ ID NO: 17920 - DNA, 25 bp, Artificial Sequence
  synthetic circulating small noncoding RNA (sncRNA) 5' transfer RNA (tRNA) half
gtctcatgctctaccaactgagcta

SEQ ID NO: 17921 - DNA, 16 bp, Artificial Sequence
  synthetic circulating small noncoding RNA (sncRNA) 5' transfer RNA (tRNA) half
gataaggcatcagcct

SEQ ID NO: 17922 - DNA, 35 bp, Artificial Sequence
  synthetic circulating small noncoding RNA (sncRNA) 5' transfer RNA (tRNA) half
agtcccatgctctaccgactgagctagccgggcag

SEQ ID NO: 17923 - DNA, 17 bp, Artificial Sequence
  synthetic circulating small noncoding RNA (sncRNA) 5' transfer RNA (tRNA) half
aaggcgttggactcgaa

SEQ ID NO: 17924 - DNA, 23 bp, Artificial Sequence
  synthetic circulating small noncoding RNA (sncRNA) 5' transfer RNA (tRNA) half
atccccgtacgggccaaagctga

SEQ ID NO: 17925 - DNA, 22 bp, Artificial Sequence
  synthetic circulating small noncoding RNA (sncRNA) 5' transfer RNA (tRNA) half
gtggcccgtacggggatcgaac

SEQ ID NO: 17926 - DNA, 23 bp, Artificial Sequence
  synthetic circulating small noncoding RNA (sncRNA) 5' transfer RNA (tRNA) half
ggttcgatccccgtacgggccac

SEQ ID NO: 17927 - DNA, 24 bp, Artificial Sequence
  synthetic circulating small noncoding RNA (sncRNA) 5' transfer RNA (tRNA) half
gtggttatcacgttcgcctaacac

SEQ ID NO: 17928 - DNA, 17 bp, Artificial Sequence
  synthetic circulating small noncoding RNA (sncRNA) 5' transfer RNA (tRNA) half
cgccaaggtcgcgggtt

SEQ ID NO: 17929 - DNA, 15 bp, Artificial Sequence
  synthetic circulating small noncoding RNA (sncRNA) 5' transfer RNA (tRNA) half
cagggttcgaacctg

SEQ ID NO: 17930 - DNA, 28 bp, Artificial Sequence
  synthetic circulating small noncoding RNA (sncRNA) 5' transfer RNA (tRNA) half
gcgccttagaccgctcggccatcctgac

SEQ ID NO: 17931 - DNA, 12 bp, Artificial Sequence
  synthetic circulating small noncoding RNA (sncRNA) 5' transfer RNA (tRNA) half
atcgaaccaggg

SEQ ID NO: 17932 - DNA, 11 bp, Artificial Sequence
  synthetic circulating small noncoding RNA (sncRNA) 5' transfer RNA (tRNA) half
cggccagacct

SEQ ID NO: 17933 - DNA, 8 bp, Artificial Sequence
  synthetic circulating small noncoding RNA (sncRNA) 5' transfer RNA (tRNA) half
ggtctccc

SEQ ID NO: 17934 - DNA, 15 bp, Artificial Sequence
  synthetic circulating small noncoding RNA (sncRNA) 5' transfer RNA (tRNA) half
gcgaccacgaaggga

SEQ ID NO: 17935 - DNA, 17 bp, Artificial Sequence
  synthetic circulating small noncoding RNA (sncRNA) 5' transfer RNA (tRNA) half
gatcgaaccagggacct

SEQ ID NO: 17936 - DNA, 17 bp, Artificial Sequence
  synthetic circulating small noncoding RNA (sncRNA) 5' transfer RNA (tRNA) half
tcaaatcacgtcggggt

SEQ ID NO: 17937 - DNA, 23 bp, Artificial Sequence
  synthetic circulating small noncoding RNA (sncRNA) 5' transfer RNA (tRNA) half
aacccgcgaccttggcgttatta

SEQ ID NO: 17938 - DNA, 29 bp, Artificial Sequence
  synthetic circulating small noncoding RNA (sncRNA) 5' transfer RNA (tRNA) half
gagccagccaggagtcgaacctggaatct

SEQ ID NO: 17939 - DNA, 39 bp, Artificial Sequence
  synthetic circulating small noncoding RNA (sncRNA) 5' transfer RNA (tRNA) half
actcggatcgctggattcagagtccagagtgctagccat

SEQ ID NO: 17940 - DNA, 9 bp, Artificial Sequence
  synthetic circulating small noncoding RNA (sncRNA) 5' transfer RNA (tRNA) half
cggactcga

SEQ ID NO: 17941 - DNA, 18 bp, Artificial Sequence
  synthetic circulating small noncoding RNA (sncRNA) 5' transfer RNA (tRNA) half
aactcgcgacccctggtt

SEQ ID NO: 17942 - DNA, 28 bp, Artificial Sequence
  synthetic circulating small noncoding RNA (sncRNA) 5' transfer RNA (tRNA) half
aaggttccaccgagatttgaactcggat

SEQ ID NO: 17943 - DNA, 11 bp, Artificial Sequence
  synthetic circulating small noncoding RNA (sncRNA) 5' transfer RNA (tRNA) half
gccgaaacccg

SEQ ID NO: 17944 - DNA, 24 bp, Artificial Sequence
  synthetic circulating small noncoding RNA (sncRNA) 5' transfer RNA (tRNA) half
gaggccccgggttcgatccccggc

SEQ ID NO: 17945 - DNA, 30 bp, Artificial Sequence
  synthetic circulating small noncoding RNA (sncRNA) 5' transfer RNA (tRNA) half
ggggtgtagctcagtggtagagcgcgtgct

SEQ ID NO: 17946 - DNA, 34 bp, Artificial Sequence
  synthetic circulating small noncoding RNA (sncRNA) 5' transfer RNA (tRNA) half
cgccgaatcctaaccactagaccaccagggaagt

SEQ ID NO: 17947 - DNA, 15 bp, Artificial Sequence
  synthetic circulating small noncoding RNA (sncRNA) 5' transfer RNA (tRNA) half
gggttccttcgagcc

SEQ ID NO: 17948 - DNA, 13 bp, Artificial Sequence
  synthetic circulating small noncoding RNA (sncRNA) 5' transfer RNA (tRNA) half
tagcggttatcac

SEQ ID NO: 17949 - DNA, 7 bp, Artificial Sequence
  synthetic circulating small noncoding RNA (sncRNA) 5' transfer RNA (tRNA) half
cggggtc

SEQ ID NO: 17950 - DNA, 33 bp, Artificial Sequence
  synthetic circulating small noncoding RNA (sncRNA) 5' transfer RNA (tRNA) half
gttcaggtcgcagtctcccctggaggcgtgggt

SEQ ID NO: 17951 - DNA, 14 bp, Artificial Sequence
  synthetic circulating small noncoding RNA (sncRNA) 5' transfer RNA (tRNA) half
tcgaacccacgacc

SEQ ID NO: 17952 - DNA, 34 bp, Artificial Sequence
  synthetic circulating small noncoding RNA (sncRNA) 5' transfer RNA (tRNA) half
ccgcggcccgggttcgattcccggtcagggaagc

SEQ ID NO: 17953 - DNA, 19 bp, Artificial Sequence
  synthetic circulating small noncoding RNA (sncRNA) 5' transfer RNA (tRNA) half
ttcaaagtccagagtgcta

SEQ ID NO: 17954 - DNA, 17 bp, Artificial Sequence
  synthetic circulating small noncoding RNA (sncRNA) 5' transfer RNA (tRNA) half
ctcagtggtagagcgca

SEQ ID NO: 17955 - DNA, 18 bp, Artificial Sequence
  synthetic circulating small noncoding RNA (sncRNA) 5' transfer RNA (tRNA) half
tagcaccacgctctaacc

SEQ ID NO: 17956 - DNA, 20 bp, Artificial Sequence
  synthetic circulating small noncoding RNA (sncRNA) 5' transfer RNA (tRNA) half
gaacccgggacctctcgcac

SEQ ID NO: 17957 - DNA, 18 bp, Artificial Sequence
  synthetic circulating small noncoding RNA (sncRNA) 5' transfer RNA (tRNA) half
cgaactcacgaccttcag

SEQ ID NO: 17958 - DNA, 32 bp, Artificial Sequence
  synthetic circulating small noncoding RNA (sncRNA) 5' transfer RNA (tRNA) half
cccatgctctaccgactgagctagccgggcag

SEQ ID NO: 17959 - DNA, 32 bp, Artificial Sequence
  synthetic circulating small noncoding RNA (sncRNA) 5' transfer RNA (tRNA) half
ggggtcgcgagttcaaatctcgctggggcctg

SEQ ID NO: 17960 - DNA, 8 bp, Artificial Sequence
  synthetic circulating small noncoding RNA (sncRNA) 5' transfer RNA (tRNA) half
tccctagt

SEQ ID NO: 17961 - DNA, 16 bp, Artificial Sequence
  synthetic circulating small noncoding RNA (sncRNA) 5' transfer RNA (tRNA) half
caatgccttatccatt

SEQ ID NO: 17962 - DNA, 20 bp, Artificial Sequence
  synthetic circulating small noncoding RNA (sncRNA) 5' transfer RNA (tRNA) half
ttttcacccaggcggcccgg

SEQ ID NO: 17963 - DNA, 27 bp, Artificial Sequence
  synthetic circulating small noncoding RNA (sncRNA) 5' transfer RNA (tRNA) half
gagattaagagtctcatgctctaccaa

SEQ ID NO: 17964 - DNA, 18 bp, Artificial Sequence
  synthetic circulating small noncoding RNA (sncRNA) 5' transfer RNA (tRNA) half
ccgtgatcgtatagtggt

SEQ ID NO: 17965 - DNA, 20 bp, Artificial Sequence
  synthetic circulating small noncoding RNA (sncRNA) 5' transfer RNA (tRNA) half
cgtcgagccagccaggagtc

SEQ ID NO: 17966 - DNA, 17 bp, Artificial Sequence
  synthetic circulating small noncoding RNA (sncRNA) 5' transfer RNA (tRNA) half
gatttgaacccgggacc

SEQ ID NO: 17967 - DNA, 20 bp, Artificial Sequence
  synthetic circulating small noncoding RNA (sncRNA) 5' transfer RNA (tRNA) half
gggattcgaacccacgcctc

SEQ ID NO: 17968 - DNA, 14 bp, Artificial Sequence
  synthetic circulating small noncoding RNA (sncRNA) 5' transfer RNA (tRNA) half
caggcgagaattct

SEQ ID NO: 17969 - DNA, 6 bp, Artificial Sequence
  synthetic circulating small noncoding RNA (sncRNA) 5' transfer RNA (tRNA) half
atcgaa

SEQ ID NO: 17970 - DNA, 20 bp, Artificial Sequence
  synthetic circulating small noncoding RNA (sncRNA) 5' transfer RNA (tRNA) half
ccagagtgctagccattaca

SEQ ID NO: 17971 - DNA, 23 bp, Artificial Sequence
  synthetic circulating small noncoding RNA (sncRNA) 5' transfer RNA (tRNA) half
ccggggacctcttgatctgcagt

SEQ ID NO: 17972 - DNA, 24 bp, Artificial Sequence
  synthetic circulating small noncoding RNA (sncRNA) 5' transfer RNA (tRNA) half
tcccacatggtctagcggttagga

SEQ ID NO: 17973 - DNA, 16 bp, Artificial Sequence
  synthetic circulating small noncoding RNA (sncRNA) 5' transfer RNA (tRNA) half
agtccaatgcgctatc

SEQ ID NO: 17974 - DNA, 24 bp, Artificial Sequence
  synthetic circulating small noncoding RNA (sncRNA) 5' transfer RNA (tRNA) half
tggtgagtatccccgcctgtcacg

SEQ ID NO: 17975 - DNA, 22 bp, Artificial Sequence
  synthetic circulating small noncoding RNA (sncRNA) 5' transfer RNA (tRNA) half
tctaccgactgagctatccagg

SEQ ID NO: 17976 - DNA, 41 bp, Artificial Sequence
  synthetic circulating small noncoding RNA (sncRNA) 5' transfer RNA (tRNA) half
gcttccctgaccgggaatcgaacccgggccgcggcggtgag

SEQ ID NO: 17977 - DNA, 12 bp, Artificial Sequence
  synthetic circulating small noncoding RNA (sncRNA) 5' transfer RNA (tRNA) half
ccagcgatccga

SEQ ID NO: 17978 - DNA, 15 bp, Artificial Sequence
  synthetic circulating small noncoding RNA (sncRNA) 5' transfer RNA (tRNA) half
ggagatcctgggttc

SEQ ID NO: 17979 - DNA, 16 bp, Artificial Sequence
  synthetic circulating small noncoding RNA (sncRNA) 5' transfer RNA (tRNA) half
tgcacgaggccccggg

SEQ ID NO: 17980 - DNA, 30 bp, Artificial Sequence
  synthetic circulating small noncoding RNA (sncRNA) 5' transfer RNA (tRNA) half
agccttaatccagcgccttagaccgctcgg

SEQ ID NO: 17981 - DNA, 14 bp, Artificial Sequence
  synthetic circulating small noncoding RNA (sncRNA) 5' transfer RNA (tRNA) half
aggtcgcgggttcg

SEQ ID NO: 17982 - DNA, 40 bp, Artificial Sequence
  synthetic circulating small noncoding RNA (sncRNA) 5' transfer RNA (tRNA) half
tcataatctgaaggtcctgagttcgaacctcagagggggc

SEQ ID NO: 17983 - DNA, 12 bp, Artificial Sequence
  synthetic circulating small noncoding RNA (sncRNA) 5' transfer RNA (tRNA) half
gttatccattgc

SEQ ID NO: 17984 - DNA, 12 bp, Artificial Sequence
  synthetic circulating small noncoding RNA (sncRNA) 5' transfer RNA (tRNA) half
agcgagaatcat

SEQ ID NO: 17985 - DNA, 23 bp, Artificial Sequence
  synthetic circulating small noncoding RNA (sncRNA) 5' transfer RNA (tRNA) half
gttgtcaggagtgggattcgaac

SEQ ID NO: 17986 - DNA, 8 bp, Artificial Sequence
  synthetic circulating small noncoding RNA (sncRNA) 5' transfer RNA (tRNA) half
ggagaccg

SEQ ID NO: 17987 - DNA, 21 bp, Artificial Sequence
  synthetic circulating small noncoding RNA (sncRNA) 5' transfer RNA (tRNA) half
cggttcgaatccgagtcacgg

SEQ ID NO: 17988 - DNA, 14 bp, Artificial Sequence
  synthetic circulating small noncoding RNA (sncRNA) 5' transfer RNA (tRNA) half
tgaacccgggacct

SEQ ID NO: 17989 - DNA, 31 bp, Artificial Sequence
  synthetic circulating small noncoding RNA (sncRNA) 5' transfer RNA (tRNA) half
ggcctcccgcgtggcaggcgagaattctacc

SEQ ID NO: 17990 - DNA, 23 bp, Artificial Sequence
  synthetic circulating small noncoding RNA (sncRNA) 5' transfer RNA (tRNA) half
ctggttcgattccggctcgaagg

SEQ ID NO: 17991 - DNA, 27 bp, Artificial Sequence
  synthetic circulating small noncoding RNA (sncRNA) 5' transfer RNA (tRNA) half
agcgagaatcatacccctagaccaacg

SEQ ID NO: 17992 - DNA, 22 bp, Artificial Sequence
  synthetic circulating small noncoding RNA (sncRNA) 5' transfer RNA (tRNA) half
ttcgatccccgtacgggccagt

SEQ ID NO: 17993 - DNA, 29 bp, Artificial Sequence
  synthetic circulating small noncoding RNA (sncRNA) 5' transfer RNA (tRNA) half
aaggtcgcgggttcgatccccgtacgggc

SEQ ID NO: 17994 - DNA, 33 bp, Artificial Sequence
  synthetic circulating small noncoding RNA (sncRNA) 5' transfer RNA (tRNA) half
cccatgctctaccgactgagctagccgggcaga

SEQ ID NO: 17995 - DNA, 12 bp, Artificial Sequence
  synthetic circulating small noncoding RNA (sncRNA) 5' transfer RNA (tRNA) half
cgagcggtctaa

SEQ ID NO: 17996 - DNA, 15 bp, Artificial Sequence
  synthetic circulating small noncoding RNA (sncRNA) 5' transfer RNA (tRNA) half
atgtttccgcccggt

SEQ ID NO: 17997 - DNA, 37 bp, Artificial Sequence
  synthetic circulating small noncoding RNA (sncRNA) 5' transfer RNA (tRNA) half
ttagcactctggactctgaatccagcgatccgagttc

SEQ ID NO: 17998 - DNA, 12 bp, Artificial Sequence
  synthetic circulating small noncoding RNA (sncRNA) 5' transfer RNA (tRNA) half
accgccgcggcc

SEQ ID NO: 17999 - DNA, 39 bp, Artificial Sequence
  synthetic circulating small noncoding RNA (sncRNA) 5' transfer RNA (tRNA) half
gtggctaggattcggcgctttcaccgccgcggcccgggt

SEQ ID NO: 18000 - DNA, 15 bp, Artificial Sequence
  synthetic circulating small noncoding RNA (sncRNA) 5' transfer RNA (tRNA) half
attcccaccgtccct

SEQ ID NO: 18001 - DNA, 19 bp, Artificial Sequence
  synthetic circulating small noncoding RNA (sncRNA) 5' transfer RNA (tRNA) half
aatgcagagtactaaccac

SEQ ID NO: 18002 - DNA, 24 bp, Artificial Sequence
  synthetic circulating small noncoding RNA (sncRNA) 5' transfer RNA (tRNA) half
actagaagtccaatgcgctatcca

SEQ ID NO: 18003 - DNA, 22 bp, Artificial Sequence
  synthetic circulating small noncoding RNA (sncRNA) 5' transfer RNA (tRNA) half
aacaaagcctccgatagcagag

SEQ ID NO: 18004 - DNA, 22 bp, Artificial Sequence
  synthetic circulating small noncoding RNA (sncRNA) 5' transfer RNA (tRNA) half
gggttcgattccccgacgggga

SEQ ID NO: 18005 - DNA, 19 bp, Artificial Sequence
  synthetic circulating small noncoding RNA (sncRNA) 5' transfer RNA (tRNA) half
aggagtcgaacctggaatc

SEQ ID NO: 18006 - DNA, 20 bp, Artificial Sequence
  synthetic circulating small noncoding RNA (sncRNA) 5' transfer RNA (tRNA) half
aaaccgggcggaaacaactt

SEQ ID NO: 18007 - DNA, 14 bp, Artificial Sequence
  synthetic circulating small noncoding RNA (sncRNA) 5' transfer RNA (tRNA) half
cgaacccaggccgc

SEQ ID NO: 18008 - DNA, 38 bp, Artificial Sequence
  synthetic circulating small noncoding RNA (sncRNA) 5' transfer RNA (tRNA) half
tctccccgtcggggaatcgaaccccggtctcccgcgtg

SEQ ID NO: 18009 - DNA, 11 bp, Artificial Sequence
  synthetic circulating small noncoding RNA (sncRNA) 5' transfer RNA (tRNA) half
gccgctggtgt

SEQ ID NO: 18010 - DNA, 34 bp, Artificial Sequence
  synthetic circulating small noncoding RNA (sncRNA) 5' transfer RNA (tRNA) half
ccccggtctcccgcgtgacaggcggggatactaa

SEQ ID NO: 18011 - DNA, 34 bp, Artificial Sequence
  synthetic circulating small noncoding RNA (sncRNA) 5' transfer RNA (tRNA) half
cagcgaccacgaagggactcgaacccccaatctt

SEQ ID NO: 18012 - DNA, 24 bp, Artificial Sequence
  synthetic circulating small noncoding RNA (sncRNA) 5' transfer RNA (tRNA) half
tcgaacccgggccgcggcggtgag

SEQ ID NO: 18013 - DNA, 18 bp, Artificial Sequence
  synthetic circulating small noncoding RNA (sncRNA) 5' transfer RNA (tRNA) half
gaaccggggaccttttgc

SEQ ID NO: 18014 - DNA, 22 bp, Artificial Sequence
  synthetic circulating small noncoding RNA (sncRNA) 5' transfer RNA (tRNA) half
tgcagagtactaaccactatac

SEQ ID NO: 18015 - DNA, 21 bp, Artificial Sequence
  synthetic circulating small noncoding RNA (sncRNA) 5' transfer RNA (tRNA) half
tttccgtagtgtagtggtcat

SEQ ID NO: 18016 - DNA, 24 bp, Artificial Sequence
  synthetic circulating small noncoding RNA (sncRNA) 5' transfer RNA (tRNA) half
acttgaaccctggaccctcagatt

SEQ ID NO: 18017 - DNA, 16 bp, Artificial Sequence
  synthetic circulating small noncoding RNA (sncRNA) 5' transfer RNA (tRNA) half
agattctaggttcgac

SEQ ID NO: 18018 - DNA, 13 bp, Artificial Sequence
  synthetic circulating small noncoding RNA (sncRNA) 5' transfer RNA (tRNA) half
gttcgactcccgg

SEQ ID NO: 18019 - DNA, 35 bp, Artificial Sequence
  synthetic circulating small noncoding RNA (sncRNA) 5' transfer RNA (tRNA) half
taccccgggtgggactcgaacccacaatccctggc

SEQ ID NO: 18020 - DNA, 17 bp, Artificial Sequence
  synthetic circulating small noncoding RNA (sncRNA) 5' transfer RNA (tRNA) half
tgggattcgaacccagg

SEQ ID NO: 18021 - DNA, 33 bp, Artificial Sequence
  synthetic circulating small noncoding RNA (sncRNA) 5' transfer RNA (tRNA) half
gggggtgtagctcagtggtagagcgcgtgctta

SEQ ID NO: 18022 - DNA, 26 bp, Artificial Sequence
  synthetic circulating small noncoding RNA (sncRNA) 5' transfer RNA (tRNA) half
tcgacgaggatgggattcgaacccat

SEQ ID NO: 18023 - DNA, 36 bp, Artificial Sequence
  synthetic circulating small noncoding RNA (sncRNA) 5' transfer RNA (tRNA) half
aggcgaatgtgataaccactacactacggaaacacc

SEQ ID NO: 18024 - DNA, 7 bp, Artificial Sequence
  synthetic circulating small noncoding RNA (sncRNA) 5' transfer RNA (tRNA) half
cgccaca

SEQ ID NO: 18025 - DNA, 13 bp, Artificial Sequence
  synthetic circulating small noncoding RNA (sncRNA) 5' transfer RNA (tRNA) half
ggtggttcagtgg

SEQ ID NO: 18026 - DNA, 24 bp, Artificial Sequence
  synthetic circulating small noncoding RNA (sncRNA) 5' transfer RNA (tRNA) half
atagctcagtggtagagcatttga

SEQ ID NO: 18027 - DNA, 8 bp, Artificial Sequence
  synthetic circulating small noncoding RNA (sncRNA) 5' transfer RNA (tRNA) half
tcccggta

SEQ ID NO: 18028 - DNA, 15 bp, Artificial Sequence
  synthetic circulating small noncoding RNA (sncRNA) 5' transfer RNA (tRNA) half
tcgggggcgtgggtt

SEQ ID NO: 18029 - DNA, 35 bp, Artificial Sequence
  synthetic circulating small noncoding RNA (sncRNA) 5' transfer RNA (tRNA) half
cccgggtcaactgcttggaaggcagctatgctcac

SEQ ID NO: 18030 - DNA, 27 bp, Artificial Sequence
  synthetic circulating small noncoding RNA (sncRNA) 5' transfer RNA (tRNA) half
agcagaggatggtttcgatccatcgac

SEQ ID NO: 18031 - DNA, 27 bp, Artificial Sequence
  synthetic circulating small noncoding RNA (sncRNA) 5' transfer RNA (tRNA) half
attcttgcgacccgggttcgattcccg

SEQ ID NO: 18032 - DNA, 16 bp, Artificial Sequence
  synthetic circulating small noncoding RNA (sncRNA) 5' transfer RNA (tRNA) half
aatcccggacgagccc

SEQ ID NO: 18033 - DNA, 12 bp, Artificial Sequence
  synthetic circulating small noncoding RNA (sncRNA) 5' transfer RNA (tRNA) half
cggctgttaacc

SEQ ID NO: 18034 - DNA, 44 bp, Artificial Sequence
  synthetic circulating small noncoding RNA (sncRNA) 5' transfer RNA (tRNA) half
aactgcttggaaggcagctatgctcaccactataccaccaacgc

SEQ ID NO: 18035 - DNA, 24 bp, Artificial Sequence
  synthetic circulating small noncoding RNA (sncRNA) 5' transfer RNA (tRNA) half
acacccgtaggtaaggcttgtcac

SEQ ID NO: 18036 - DNA, 9 bp, Artificial Sequence
  synthetic circulating small noncoding RNA (sncRNA) 5' transfer RNA (tRNA) half
aggtggccg

SEQ ID NO: 18037 - DNA, 12 bp, Artificial Sequence
  synthetic circulating small noncoding RNA (sncRNA) 5' transfer RNA (tRNA) half
agctggtagagc

SEQ ID NO: 18038 - DNA, 14 bp, Artificial Sequence
  synthetic circulating small noncoding RNA (sncRNA) 5' transfer RNA (tRNA) half
ccaggggtcgcgag

SEQ ID NO: 18039 - DNA, 7 bp, Artificial Sequence
  synthetic circulating small noncoding RNA (sncRNA) 5' transfer RNA (tRNA) half
cggacga

SEQ ID NO: 18040 - DNA, 16 bp, Artificial Sequence
  synthetic circulating small noncoding RNA (sncRNA) 5' transfer RNA (tRNA) half
tccctgttcgggcgct

SEQ ID NO: 18041 - DNA, 35 bp, Artificial Sequence
  synthetic circulating small noncoding RNA (sncRNA) 5' transfer RNA (tRNA) half
cccaggcggcccgggttcgactcccggtgtgggaa

SEQ ID NO: 18042 - DNA, 26 bp, Artificial Sequence
  synthetic circulating small noncoding RNA (sncRNA) 5' transfer RNA (tRNA) half
ggtgggattcgaacccacgccatcga

SEQ ID NO: 18043 - DNA, 31 bp, Artificial Sequence
  synthetic circulating small noncoding RNA (sncRNA) 5' transfer RNA (tRNA) half
gatcctgggttcgaatcccagcggtgccttt

SEQ ID NO: 18044 - DNA, 28 bp, Artificial Sequence
  synthetic circulating small noncoding RNA (sncRNA) 5' transfer RNA (tRNA) half
gagtggcgcagcggaagcgtgctgggcc

SEQ ID NO: 18045 - DNA, 21 bp, Artificial Sequence
  synthetic circulating small noncoding RNA (sncRNA) 5' transfer RNA (tRNA) half
acggagggggatgtagctcag

SEQ ID NO: 18046 - DNA, 30 bp, Artificial Sequence
  synthetic circulating small noncoding RNA (sncRNA) 5' transfer RNA (tRNA) half
ccagtgtgctaaccattacaccatgagacc

SEQ ID NO: 18047 - DNA, 30 bp, Artificial Sequence
  synthetic circulating small noncoding RNA (sncRNA) 5' transfer RNA (tRNA) half
aggtcgctggttcgactccggctcgaagga

SEQ ID NO: 18048 - DNA, 19 bp, Artificial Sequence
  synthetic circulating small noncoding RNA (sncRNA) 5' transfer RNA (tRNA) half
tcaaatcacgtcggggtca

SEQ ID NO: 18049 - DNA, 35 bp, Artificial Sequence
  synthetic circulating small noncoding RNA (sncRNA) 5' transfer RNA (tRNA) half
ggcagcggtgggattcgaacccacgcccccgaaga

SEQ ID NO: 18050 - DNA, 9 bp, Artificial Sequence
  synthetic circulating small noncoding RNA (sncRNA) 5' transfer RNA (tRNA) half
cgaacccac

SEQ ID NO: 18051 - DNA, 37 bp, Artificial Sequence
  synthetic circulating small noncoding RNA (sncRNA) 5' transfer RNA (tRNA) half
agcgcccaacgtggggctcgaacccacgaccctgaga

SEQ ID NO: 18052 - DNA, 20 bp, Artificial Sequence
  synthetic circulating small noncoding RNA (sncRNA) 5' transfer RNA (tRNA) half
ggattcaaagtccagagtgc

SEQ ID NO: 18053 - DNA, 23 bp, Artificial Sequence
  synthetic circulating small noncoding RNA (sncRNA) 5' transfer RNA (tRNA) half
agctggtagagcggaggactgta

SEQ ID NO: 18054 - DNA, 37 bp, Artificial Sequence
  synthetic circulating small noncoding RNA (sncRNA) 5' transfer RNA (tRNA) half
actgcattggccgggaatcgaacccgggtcacccgcg

SEQ ID NO: 18055 - DNA, 14 bp, Artificial Sequence
  synthetic circulating small noncoding RNA (sncRNA) 5' transfer RNA (tRNA) half
atggaggcgtgggt

SEQ ID NO: 18056 - DNA, 29 bp, Artificial Sequence
  synthetic circulating small noncoding RNA (sncRNA) 5' transfer RNA (tRNA) half
aggtcgcgggttcgatccccgtacgggcc

SEQ ID NO: 18057 - DNA, 20 bp, Artificial Sequence
  synthetic circulating small noncoding RNA (sncRNA) 5' transfer RNA (tRNA) half
gaaggtcctgggttcgagcc

SEQ ID NO: 18058 - DNA, 22 bp, Artificial Sequence
  synthetic circulating small noncoding RNA (sncRNA) 5' transfer RNA (tRNA) half
tttccgtagtgtagtggtcatc

SEQ ID NO: 18059 - DNA, 21 bp, Artificial Sequence
  synthetic circulating small noncoding RNA (sncRNA) 5' transfer RNA (tRNA) half
gttcgaacccacgcagacata

SEQ ID NO: 18060 - DNA, 9 bp, Artificial Sequence
  synthetic circulating small noncoding RNA (sncRNA) 5' transfer RNA (tRNA) half
gcccgtcgg

SEQ ID NO: 18061 - DNA, 11 bp, Artificial Sequence
  synthetic circulating small noncoding RNA (sncRNA) 5' transfer RNA (tRNA) half
agattgagggt

SEQ ID NO: 18062 - DNA, 34 bp, Artificial Sequence
  synthetic circulating small noncoding RNA (sncRNA) 5' transfer RNA (tRNA) half
acgcagagtactaaccactatacgatcacggcga

SEQ ID NO: 18063 - DNA, 14 bp, Artificial Sequence
  synthetic circulating small noncoding RNA (sncRNA) 5' transfer RNA (tRNA) half
gtcccttcgtggtc

SEQ ID NO: 18064 - DNA, 17 bp, Artificial Sequence
  synthetic circulating small noncoding RNA (sncRNA) 5' transfer RNA (tRNA) half
gctctcccaactgagct

SEQ ID NO: 18065 - DNA, 16 bp, Artificial Sequence
  synthetic circulating small noncoding RNA (sncRNA) 5' transfer RNA (tRNA) half
gcccggtttcgaaccg

SEQ ID NO: 18066 - DNA, 20 bp, Artificial Sequence
  synthetic circulating small noncoding RNA (sncRNA) 5' transfer RNA (tRNA) half
ccccgtcggggaattgaacc

SEQ ID NO: 18067 - DNA, 13 bp, Artificial Sequence
  synthetic circulating small noncoding RNA (sncRNA) 5' transfer RNA (tRNA) half
gatcgaaccaggg

SEQ ID NO: 18068 - DNA, 23 bp, Artificial Sequence
  synthetic circulating small noncoding RNA (sncRNA) 5' transfer RNA (tRNA) half
gctcagctggtagagcggaggac

SEQ ID NO: 18069 - DNA, 34 bp, Artificial Sequence
  synthetic circulating small noncoding RNA (sncRNA) 5' transfer RNA (tRNA) half
ccagggattgtgggttcgagtcccacctggggtg

SEQ ID NO: 18070 - DNA, 20 bp, Artificial Sequence
  synthetic circulating small noncoding RNA (sncRNA) 5' transfer RNA (tRNA) half
tctaccatttgagctaatcc

SEQ ID NO: 18071 - DNA, 38 bp, Artificial Sequence
  synthetic circulating small noncoding RNA (sncRNA) 5' transfer RNA (tRNA) half
aggccccagcgagatttgaactcgcgacccctggttta

SEQ ID NO: 18072 - DNA, 20 bp, Artificial Sequence
  synthetic circulating small noncoding RNA (sncRNA) 5' transfer RNA (tRNA) half
atgtcaggatggccgagcgg

SEQ ID NO: 18073 - DNA, 18 bp, Artificial Sequence
  synthetic circulating small noncoding RNA (sncRNA) 5' transfer RNA (tRNA) half
acgcgagaggtccccggt

SEQ ID NO: 18074 - DNA, 26 bp, Artificial Sequence
  synthetic circulating small noncoding RNA (sncRNA) 5' transfer RNA (tRNA) half
gtcaggatggccgagtggtctaagga

SEQ ID NO: 18075 - DNA, 20 bp, Artificial Sequence
  synthetic circulating small noncoding RNA (sncRNA) 5' transfer RNA (tRNA) half
cgattccccgacggggagtc

SEQ ID NO: 18076 - DNA, 27 bp, Artificial Sequence
  synthetic circulating small noncoding RNA (sncRNA) 5' transfer RNA (tRNA) half
agctcagtcggtagagcatcagacttt

SEQ ID NO: 18077 - DNA, 16 bp, Artificial Sequence
  synthetic circulating small noncoding RNA (sncRNA) 5' transfer RNA (tRNA) half
agaccgctcggccatc

SEQ ID NO: 18078 - DNA, 8 bp, Artificial Sequence
  synthetic circulating small noncoding RNA (sncRNA) 5' transfer RNA (tRNA) half
aggcgcgg

SEQ ID NO: 18079 - DNA, 23 bp, Artificial Sequence
  synthetic circulating small noncoding RNA (sncRNA) 5' transfer RNA (tRNA) half
ttagcactctggactctgaatcc

SEQ ID NO: 18080 - DNA, 15 bp, Artificial Sequence
  synthetic circulating small noncoding RNA (sncRNA) 5' transfer RNA (tRNA) half
aaccaggaatcctaa

SEQ ID NO: 18081 - DNA, 34 bp, Artificial Sequence
  synthetic circulating small noncoding RNA (sncRNA) 5' transfer RNA (tRNA) half
cgaccacgaagggactcgaacccccaatcttctg

SEQ ID NO: 18082 - DNA, 28 bp, Artificial Sequence
  synthetic circulating small noncoding RNA (sncRNA) 5' transfer RNA (tRNA) half
gccaaatcctaaccactagaccaccagg

SEQ ID NO: 18083 - DNA, 12 bp, Artificial Sequence
  synthetic circulating small noncoding RNA (sncRNA) 5' transfer RNA (tRNA) half
aggattcgaacc

SEQ ID NO: 18084 - DNA, 20 bp, Artificial Sequence
  synthetic circulating small noncoding RNA (sncRNA) 5' transfer RNA (tRNA) half
gctgaccccgacgtgatttg

SEQ ID NO: 18085 - DNA, 15 bp, Artificial Sequence
  synthetic circulating small noncoding RNA (sncRNA) 5' transfer RNA (tRNA) half
gcgctctaccaactg

SEQ ID NO: 18086 - DNA, 37 bp, Artificial Sequence
  synthetic circulating small noncoding RNA (sncRNA) 5' transfer RNA (tRNA) half
aacccgggacctctcgcaccctaagcgagaatcatac

SEQ ID NO: 18087 - DNA, 17 bp, Artificial Sequence
  synthetic circulating small noncoding RNA (sncRNA) 5' transfer RNA (tRNA) half
cccacatggtctagcgg

SEQ ID NO: 18088 - DNA, 25 bp, Artificial Sequence
  synthetic circulating small noncoding RNA (sncRNA) 5' transfer RNA (tRNA) half
ggtctagcggttaggattcctggtt

SEQ ID NO: 18089 - DNA, 8 bp, Artificial Sequence
  synthetic circulating small noncoding RNA (sncRNA) 5' transfer RNA (tRNA) half
tcgaacct

SEQ ID NO: 18090 - DNA, 41 bp, Artificial Sequence
  synthetic circulating small noncoding RNA (sncRNA) 5' transfer RNA (tRNA) half
tggcagtggtgggattcgaacccacgcctccgaagagactg

SEQ ID NO: 18091 - DNA, 23 bp, Artificial Sequence
  synthetic circulating small noncoding RNA (sncRNA) 5' transfer RNA (tRNA) half
cattggggtttccccgcgcaggt

SEQ ID NO: 18092 - DNA, 13 bp, Artificial Sequence
  synthetic circulating small noncoding RNA (sncRNA) 5' transfer RNA (tRNA) half
ccgggtttcggca

SEQ ID NO: 18093 - DNA, 17 bp, Artificial Sequence
  synthetic circulating small noncoding RNA (sncRNA) 5' transfer RNA (tRNA) half
gcgccacagagccaggt

SEQ ID NO: 18094 - DNA, 16 bp, Artificial Sequence
  synthetic circulating small noncoding RNA (sncRNA) 5' transfer RNA (tRNA) half
gtaccgcgcgctaacc

SEQ ID NO: 18095 - DNA, 9 bp, Artificial Sequence
  synthetic circulating small noncoding RNA (sncRNA) 5' transfer RNA (tRNA) half
gattcgaac

SEQ ID NO: 18096 - DNA, 26 bp, Artificial Sequence
  synthetic circulating small noncoding RNA (sncRNA) 5' transfer RNA (tRNA) half
ctcgcctgccacgcgggaggcccggg

SEQ ID NO: 18097 - DNA, 14 bp, Artificial Sequence
  synthetic circulating small noncoding RNA (sncRNA) 5' transfer RNA (tRNA) half
cgactccggctcga

SEQ ID NO: 18098 - DNA, 21 bp, Artificial Sequence
  synthetic circulating small noncoding RNA (sncRNA) 5' transfer RNA (tRNA) half
cgaaccgaggttgctgcggcc

SEQ ID NO: 18099 - DNA, 32 bp, Artificial Sequence
  synthetic circulating small noncoding RNA (sncRNA) 5' transfer RNA (tRNA) half
ttcaaacctgtagctgtttagcgacagagtgg

SEQ ID NO: 18100 - DNA, 10 bp, Artificial Sequence
  synthetic circulating small noncoding RNA (sncRNA) 5' transfer RNA (tRNA) half
gtgctgggcc

SEQ ID NO: 18101 - DNA, 30 bp, Artificial Sequence
  synthetic circulating small noncoding RNA (sncRNA) 5' transfer RNA (tRNA) half
gaatcgaaccccggtctcccgcgtgacagg

SEQ ID NO: 18102 - DNA, 13 bp, Artificial Sequence
  synthetic circulating small noncoding RNA (sncRNA) 5' transfer RNA (tRNA) half
tccggctcgaagg

SEQ ID NO: 18103 - DNA, 26 bp, Artificial Sequence
  synthetic circulating small noncoding RNA (sncRNA) 5' transfer RNA (tRNA) half
agccgctcggctgtcaggcgcggtgg

SEQ ID NO: 18104 - DNA, 13 bp, Artificial Sequence
  synthetic circulating small noncoding RNA (sncRNA) 5' transfer RNA (tRNA) half
cgaaaggtccccg

SEQ ID NO: 18105 - DNA, 44 bp, Artificial Sequence
  synthetic circulating small noncoding RNA (sncRNA) 5' transfer RNA (tRNA) half
agtctccccgtcggggaatcgaaccccggtctcccgcgtgacag

SEQ ID NO: 18106 - DNA, 13 bp, Artificial Sequence
  synthetic circulating small noncoding RNA (sncRNA) 5' transfer RNA (tRNA) half
caatgcgctatcc

SEQ ID NO: 18107 - DNA, 28 bp, Artificial Sequence
  synthetic circulating small noncoding RNA (sncRNA) 5' transfer RNA (tRNA) half
gtccctgggtgggctcgaaccaccaacc

SEQ ID NO: 18108 - DNA, 26 bp, Artificial Sequence
  synthetic circulating small noncoding RNA (sncRNA) 5' transfer RNA (tRNA) half
ctggttcgactccggctcgaaggaga

SEQ ID NO: 18109 - DNA, 13 bp, Artificial Sequence
  synthetic circulating small noncoding RNA (sncRNA) 5' transfer RNA (tRNA) half
gagctatacgccc

SEQ ID NO: 18110 - DNA, 12 bp, Artificial Sequence
  synthetic circulating small noncoding RNA (sncRNA) 5' transfer RNA (tRNA) half
gtacggggatcg

SEQ ID NO: 18111 - DNA, 34 bp, Artificial Sequence
  synthetic circulating small noncoding RNA (sncRNA) 5' transfer RNA (tRNA) half
cgaagcgagaatcatacccctagaccaacgagcc

SEQ ID NO: 18112 - DNA, 29 bp, Artificial Sequence
  synthetic circulating small noncoding RNA (sncRNA) 5' transfer RNA (tRNA) half
cgggaggcccgggttcgattcccggccaa

SEQ ID NO: 18113 - DNA, 40 bp, Artificial Sequence
  synthetic circulating small noncoding RNA (sncRNA) 5' transfer RNA (tRNA) half
tagcgcccgaacagggacttgaaccctggaccctcagatt

SEQ ID NO: 18114 - DNA, 40 bp, Artificial Sequence
  synthetic circulating small noncoding RNA (sncRNA) 5' transfer RNA (tRNA) half
gtaaacaggagatcctgggttcgactcccagtggggcctt

SEQ ID NO: 18115 - DNA, 10 bp, Artificial Sequence
  synthetic circulating small noncoding RNA (sncRNA) 5' transfer RNA (tRNA) half
cgtcggggaa

SEQ ID NO: 18116 - DNA, 17 bp, Artificial Sequence
  synthetic circulating small noncoding RNA (sncRNA) 5' transfer RNA (tRNA) half
gctaaccattacaccat

SEQ ID NO: 18117 - DNA, 13 bp, Artificial Sequence
  synthetic circulating small noncoding RNA (sncRNA) 5' transfer RNA (tRNA) half
cgggagtcgaacc

SEQ ID NO: 18118 - DNA, 15 bp, Artificial Sequence
  synthetic circulating small noncoding RNA (sncRNA) 5' transfer RNA (tRNA) half
ggttccaccgagatt

SEQ ID NO: 18119 - DNA, 20 bp, Artificial Sequence
  synthetic circulating small noncoding RNA (sncRNA) 5' transfer RNA (tRNA) half
acatggtctagcggttagga

SEQ ID NO: 18120 - DNA, 36 bp, Artificial Sequence
  synthetic circulating small noncoding RNA (sncRNA) 5' transfer RNA (tRNA) half
agcgcccaacgtggggctcgaacccacgaccctgag

SEQ ID NO: 18121 - DNA, 34 bp, Artificial Sequence
  synthetic circulating small noncoding RNA (sncRNA) 5' transfer RNA (tRNA) half
gcgccgaatcctaaccactagaccaccagggagc

SEQ ID NO: 18122 - DNA, 20 bp, Artificial Sequence
  synthetic circulating small noncoding RNA (sncRNA) 5' transfer RNA (tRNA) half
tctggactctgaatccagcg

SEQ ID NO: 18123 - DNA, 28 bp, Artificial Sequence
  synthetic circulating small noncoding RNA (sncRNA) 5' transfer RNA (tRNA) half
gaacccgggccgcggcggtgagagcgcc

SEQ ID NO: 18124 - DNA, 46 bp, Artificial Sequence
  synthetic circulating small noncoding RNA (sncRNA) 5' transfer RNA (tRNA) half
gcttccctgaccgggaatcgaacccgggccgcggcggtgagagcgc

SEQ ID NO: 18125 - DNA, 15 bp, Artificial Sequence
  synthetic circulating small noncoding RNA (sncRNA) 5' transfer RNA (tRNA) half
agccagccaggagtc

SEQ ID NO: 18126 - DNA, 17 bp, Artificial Sequence
  synthetic circulating small noncoding RNA (sncRNA) 5' transfer RNA (tRNA) half
ttcgagtcctgccgcgg

SEQ ID NO: 18127 - DNA, 12 bp, Artificial Sequence
  synthetic circulating small noncoding RNA (sncRNA) 5' transfer RNA (tRNA) half
tgattctcgctt

SEQ ID NO: 18128 - DNA, 17 bp, Artificial Sequence
  synthetic circulating small noncoding RNA (sncRNA) 5' transfer RNA (tRNA) half
tgtttgggctcgtccgg

SEQ ID NO: 18129 - DNA, 9 bp, Artificial Sequence
  synthetic circulating small noncoding RNA (sncRNA) 5' transfer RNA (tRNA) half
tcggccacg

SEQ ID NO: 18130 - DNA, 19 bp, Artificial Sequence
  synthetic circulating small noncoding RNA (sncRNA) 5' transfer RNA (tRNA) half
aaccatgtttccgcccggt

SEQ ID NO: 18131 - DNA, 7 bp, Artificial Sequence
  synthetic circulating small noncoding RNA (sncRNA) 5' transfer RNA (tRNA) half
tcgcgca

SEQ ID NO: 18132 - DNA, 14 bp, Artificial Sequence
  synthetic circulating small noncoding RNA (sncRNA) 5' transfer RNA (tRNA) half
caacggtagtgtgg

SEQ ID NO: 18133 - DNA, 12 bp, Artificial Sequence
  synthetic circulating small noncoding RNA (sncRNA) 5' transfer RNA (tRNA) half
gccccagcgaga

SEQ ID NO: 18134 - DNA, 44 bp, Artificial Sequence
  synthetic circulating small noncoding RNA (sncRNA) 5' transfer RNA (tRNA) half
aacccgggccgcggcggtgagagcgccgaatcctaaccactaga

SEQ ID NO: 18135 - DNA, 11 bp, Artificial Sequence
  synthetic circulating small noncoding RNA (sncRNA) 5' transfer RNA (tRNA) half
cagacgcgcta

SEQ ID NO: 18136 - DNA, 7 bp, Artificial Sequence
  synthetic circulating small noncoding RNA (sncRNA) 5' transfer RNA (tRNA) half
tgccgag

SEQ ID NO: 18137 - DNA, 23 bp, Artificial Sequence
  synthetic circulating small noncoding RNA (sncRNA) 5' transfer RNA (tRNA) half
gttcgatccccggcacctccact

SEQ ID NO: 18138 - DNA, 33 bp, Artificial Sequence
  synthetic circulating small noncoding RNA (sncRNA) 5' transfer RNA (tRNA) half
aacaatgacctacagtcctccgctctaccaact

SEQ ID NO: 18139 - DNA, 8 bp, Artificial Sequence
  synthetic circulating small noncoding RNA (sncRNA) 5' transfer RNA (tRNA) half
tgccgact

SEQ ID NO: 18140 - DNA, 20 bp, Artificial Sequence
  synthetic circulating small noncoding RNA (sncRNA) 5' transfer RNA (tRNA) half
aaccggggacctttcgcgtg

SEQ ID NO: 18141 - DNA, 34 bp, Artificial Sequence
  synthetic circulating small noncoding RNA (sncRNA) 5' transfer RNA (tRNA) half
gagcaatgactcctaaccactagaccaccaggga

SEQ ID NO: 18142 - DNA, 23 bp, Artificial Sequence
  synthetic circulating small noncoding RNA (sncRNA) 5' transfer RNA (tRNA) half
ggttgccccctctgaggttcgaa

SEQ ID NO: 18143 - DNA, 20 bp, Artificial Sequence
  synthetic circulating small noncoding RNA (sncRNA) 5' transfer RNA (tRNA) half
ctgttcccataccgggagtc

SEQ ID NO: 18144 - DNA, 6 bp, Artificial Sequence
  synthetic circulating small noncoding RNA (sncRNA) 5' transfer RNA (tRNA) half
gcccag

SEQ ID NO: 18145 - DNA, 26 bp, Artificial Sequence
  synthetic circulating small noncoding RNA (sncRNA) 5' transfer RNA (tRNA) half
tccccgtcggggaatcgaaccccggt

SEQ ID NO: 18146 - DNA, 31 bp, Artificial Sequence
  synthetic circulating small noncoding RNA (sncRNA) 5' transfer RNA (tRNA) half
tctggactctgaatccagcgatccgagttca

SEQ ID NO: 18147 - DNA, 19 bp, Artificial Sequence
  synthetic circulating small noncoding RNA (sncRNA) 5' transfer RNA (tRNA) half
ttcgaatcccagcggggcc

SEQ ID NO: 18148 - DNA, 17 bp, Artificial Sequence
  synthetic circulating small noncoding RNA (sncRNA) 5' transfer RNA (tRNA) half
cttgagtctggcgcctt

SEQ ID NO: 18149 - DNA, 30 bp, Artificial Sequence
  synthetic circulating small noncoding RNA (sncRNA) 5' transfer RNA (tRNA) half
tcgatggatcgaaaccatcctctgctaact

SEQ ID NO: 18150 - DNA, 21 bp, Artificial Sequence
  synthetic circulating small noncoding RNA (sncRNA) 5' transfer RNA (tRNA) half
aggggtcgcgagttcaaatct

SEQ ID NO: 18151 - DNA, 33 bp, Artificial Sequence
  synthetic circulating small noncoding RNA (sncRNA) 5' transfer RNA (tRNA) half
ggtttccgtagtgtagtggttatcacgctcgcc

SEQ ID NO: 18152 - DNA, 8 bp, Artificial Sequence
  synthetic circulating small noncoding RNA (sncRNA) 5' transfer RNA (tRNA) half
ggccgcag

SEQ ID NO: 18153 - DNA, 30 bp, Artificial Sequence
  synthetic circulating small noncoding RNA (sncRNA) 5' transfer RNA (tRNA) half
aggtcccgggttcaaatcccggacgagccc

SEQ ID NO: 18154 - DNA, 28 bp, Artificial Sequence
  synthetic circulating small noncoding RNA (sncRNA) 5' transfer RNA (tRNA) half
gccccagcgagatttgaactcgcgaccc

SEQ ID NO: 18155 - DNA, 20 bp, Artificial Sequence
  synthetic circulating small noncoding RNA (sncRNA) 5' transfer RNA (tRNA) half
tcacacgcgaaaggtccccg

SEQ ID NO: 18156 - DNA, 22 bp, Artificial Sequence
  synthetic circulating small noncoding RNA (sncRNA) 5' transfer RNA (tRNA) half
cgcggcccgggttcgattcccg

SEQ ID NO: 18157 - DNA, 20 bp, Artificial Sequence
  synthetic circulating small noncoding RNA (sncRNA) 5' transfer RNA (tRNA) half
tcccttcgatagctcagctg

SEQ ID NO: 18158 - DNA, 40 bp, Artificial Sequence
  synthetic circulating small noncoding RNA (sncRNA) 5' transfer RNA (tRNA) half
ctgggtgggctcgaaccaccaacctttcggttaacagccg

SEQ ID NO: 18159 - DNA, 19 bp, Artificial Sequence
  synthetic circulating small noncoding RNA (sncRNA) 5' transfer RNA (tRNA) half
atcgaaccccggtctcccg

SEQ ID NO: 18160 - DNA, 22 bp, Artificial Sequence
  synthetic circulating small noncoding RNA (sncRNA) 5' transfer RNA (tRNA) half
gtcggggtcatctgtgttcttt

SEQ ID NO: 18161 - DNA, 17 bp, Artificial Sequence
  synthetic circulating small noncoding RNA (sncRNA) 5' transfer RNA (tRNA) half
tctagcggttaggattc

SEQ ID NO: 18162 - DNA, 24 bp, Artificial Sequence
  synthetic circulating small noncoding RNA (sncRNA) 5' transfer RNA (tRNA) half
aggcaagaattctaccactgaacc

SEQ ID NO: 18163 - DNA, 21 bp, Artificial Sequence
  synthetic circulating small noncoding RNA (sncRNA) 5' transfer RNA (tRNA) half
ccgactccgccgggactcgaa

SEQ ID NO: 18164 - DNA, 26 bp, Artificial Sequence
  synthetic circulating small noncoding RNA (sncRNA) 5' transfer RNA (tRNA) half
gtcgagccagccaggagtcgaaccta

SEQ ID NO: 18165 - DNA, 11 bp, Artificial Sequence
  synthetic circulating small noncoding RNA (sncRNA) 5' transfer RNA (tRNA) half
tcgaacccgcg

SEQ ID NO: 18166 - DNA, 26 bp, Artificial Sequence
  synthetic circulating small noncoding RNA (sncRNA) 5' transfer RNA (tRNA) half
tgaaccccggtctcccgcgtgacagg

SEQ ID NO: 18167 - DNA, 37 bp, Artificial Sequence
  synthetic circulating small noncoding RNA (sncRNA) 5' transfer RNA (tRNA) half
gaacccgggtcaactgcttggaaggcagctatgctca

SEQ ID NO: 18168 - DNA, 15 bp, Artificial Sequence
  synthetic circulating small noncoding RNA (sncRNA) 5' transfer RNA (tRNA) half
gacgagcccaatttt

SEQ ID NO: 18169 - DNA, 17 bp, Artificial Sequence
  synthetic circulating small noncoding RNA (sncRNA) 5' transfer RNA (tRNA) half
cggccatcctgacactt

SEQ ID NO: 18170 - DNA, 23 bp, Artificial Sequence
  synthetic circulating small noncoding RNA (sncRNA) 5' transfer RNA (tRNA) half
gcctcccgcgtggcaggcgagaa

SEQ ID NO: 18171 - DNA, 22 bp, Artificial Sequence
  synthetic circulating small noncoding RNA (sncRNA) 5' transfer RNA (tRNA) half
tcgctttgggtgcgagaggtcc

SEQ ID NO: 18172 - DNA, 35 bp, Artificial Sequence
  synthetic circulating small noncoding RNA (sncRNA) 5' transfer RNA (tRNA) half
cccgtcggggaatcgaaccccggtctcccgcgtga

SEQ ID NO: 18173 - DNA, 20 bp, Artificial Sequence
  synthetic circulating small noncoding RNA (sncRNA) 5' transfer RNA (tRNA) half
acccacgcgtgcaaagcaca

SEQ ID NO: 18174 - DNA, 23 bp, Artificial Sequence
  synthetic circulating small noncoding RNA (sncRNA) 5' transfer RNA (tRNA) half
aggtcccgggttcaaatcccgga

SEQ ID NO: 18175 - DNA, 8 bp, Artificial Sequence
  synthetic circulating small noncoding RNA (sncRNA) 5' transfer RNA (tRNA) half
gccccggg

SEQ ID NO: 18176 - DNA, 22 bp, Artificial Sequence
  synthetic circulating small noncoding RNA (sncRNA) 5' transfer RNA (tRNA) half
aaccctcaatcttctgatccgg

SEQ ID NO: 18177 - DNA, 15 bp, Artificial Sequence
  synthetic circulating small noncoding RNA (sncRNA) 5' transfer RNA (tRNA) half
tctaaaggtccctgg

SEQ ID NO: 18178 - DNA, 11 bp, Artificial Sequence
  synthetic circulating small noncoding RNA (sncRNA) 5' transfer RNA (tRNA) half
ccgggttcgac

SEQ ID NO: 18179 - DNA, 14 bp, Artificial Sequence
  synthetic circulating small noncoding RNA (sncRNA) 5' transfer RNA (tRNA) half
cgtgacaggcgggg

SEQ ID NO: 18180 - DNA, 18 bp, Artificial Sequence
  synthetic circulating small noncoding RNA (sncRNA) 5' transfer RNA (tRNA) half
acgctctaaccaactgag

SEQ ID NO: 18181 - DNA, 42 bp, Artificial Sequence
  synthetic circulating small noncoding RNA (sncRNA) 5' transfer RNA (tRNA) half
cattggggtctccccgcgcaggttcgaatcctgccgactacg

SEQ ID NO: 18182 - DNA, 8 bp, Artificial Sequence
  synthetic circulating small noncoding RNA (sncRNA) 5' transfer RNA (tRNA) half
ggggacct

SEQ ID NO: 18183 - DNA, 27 bp, Artificial Sequence
  synthetic circulating small noncoding RNA (sncRNA) 5' transfer RNA (tRNA) half
cagcgagcagggttcgaacctgcgcgg

SEQ ID NO: 18184 - DNA, 23 bp, Artificial Sequence
  synthetic circulating small noncoding RNA (sncRNA) 5' transfer RNA (tRNA) half
gaaccctcaatcttctgatccga

SEQ ID NO: 18185 - DNA, 16 bp, Artificial Sequence
  synthetic circulating small noncoding RNA (sncRNA) 5' transfer RNA (tRNA) half
ttggccgggaatcgaa

SEQ ID NO: 18186 - DNA, 14 bp, Artificial Sequence
  synthetic circulating small noncoding RNA (sncRNA) 5' transfer RNA (tRNA) half
ggccatcctgacat

SEQ ID NO: 18187 - DNA, 8 bp, Artificial Sequence
  synthetic circulating small noncoding RNA (sncRNA) 5' transfer RNA (tRNA) half
cgactacg

SEQ ID NO: 18188 - DNA, 15 bp, Artificial Sequence
  synthetic circulating small noncoding RNA (sncRNA) 5' transfer RNA (tRNA) half
cccggacgagcccca

SEQ ID NO: 18189 - DNA, 16 bp, Artificial Sequence
  synthetic circulating small noncoding RNA (sncRNA) 5' transfer RNA (tRNA) half
gactccgccgggactc

SEQ ID NO: 18190 - DNA, 17 bp, Artificial Sequence
  synthetic circulating small noncoding RNA (sncRNA) 5' transfer RNA (tRNA) half
tgtttccgcccggtttc

SEQ ID NO: 18191 - DNA, 33 bp, Artificial Sequence
  synthetic circulating small noncoding RNA (sncRNA) 5' transfer RNA (tRNA) half
gcgtgctgggcccataacccagaggtcgatgga

SEQ ID NO: 18192 - DNA, 15 bp, Artificial Sequence
  synthetic circulating small noncoding RNA (sncRNA) 5' transfer RNA (tRNA) half
cattcggagaccaga

SEQ ID NO: 18193 - DNA, 14 bp, Artificial Sequence
  synthetic circulating small noncoding RNA (sncRNA) 5' transfer RNA (tRNA) half
gtactaaccactat

SEQ ID NO: 18194 - DNA, 17 bp, Artificial Sequence
  synthetic circulating small noncoding RNA (sncRNA) 5' transfer RNA (tRNA) half
gttcgactccggctcga

SEQ ID NO: 18195 - DNA, 12 bp, Artificial Sequence
  synthetic circulating small noncoding RNA (sncRNA) 5' transfer RNA (tRNA) half
cgcgtgggttcg

SEQ ID NO: 18196 - DNA, 20 bp, Artificial Sequence
  synthetic circulating small noncoding RNA (sncRNA) 5' transfer RNA (tRNA) half
gattcaaagtccagagtgct

SEQ ID NO: 18197 - DNA, 29 bp, Artificial Sequence
  synthetic circulating small noncoding RNA (sncRNA) 5' transfer RNA (tRNA) half
cgcctgggtgaaaaccaggaatcctaacc

SEQ ID NO: 18198 - DNA, 19 bp, Artificial Sequence
  synthetic circulating small noncoding RNA (sncRNA) 5' transfer RNA (tRNA) half
gttcaaatctcgctggggc

SEQ ID NO: 18199 - DNA, 20 bp, Artificial Sequence
  synthetic circulating small noncoding RNA (sncRNA) 5' transfer RNA (tRNA) half
taggattcggcgctctcacc

SEQ ID NO: 18200 - DNA, 17 bp, Artificial Sequence
  synthetic circulating small noncoding RNA (sncRNA) 5' transfer RNA (tRNA) half
aattggttagcgcgttc

SEQ ID NO: 18201 - DNA, 18 bp, Artificial Sequence
  synthetic circulating small noncoding RNA (sncRNA) 5' transfer RNA (tRNA) half
cgtatggaggcgtgggtt

SEQ ID NO: 18202 - DNA, 18 bp, Artificial Sequence
  synthetic circulating small noncoding RNA (sncRNA) 5' transfer RNA (tRNA) half
ttcgaaaccgggcggaaa

SEQ ID NO: 18203 - DNA, 15 bp, Artificial Sequence
  synthetic circulating small noncoding RNA (sncRNA) 5' transfer RNA (tRNA) half
tccgagaggtcccgg

SEQ ID NO: 18204 - DNA, 35 bp, Artificial Sequence
  synthetic circulating small noncoding RNA (sncRNA) 5' transfer RNA (tRNA) half
ggctcgttggtctaggggtatgattctcggtttgg

SEQ ID NO: 18205 - DNA, 29 bp, Artificial Sequence
  synthetic circulating small noncoding RNA (sncRNA) 5' transfer RNA (tRNA) half
cttcagtctaacgctctcccaactgagct

SEQ ID NO: 18206 - DNA, 25 bp, Artificial Sequence
  synthetic circulating small noncoding RNA (sncRNA) 5' transfer RNA (tRNA) half
gtccaacgccttaaccactcggcca

SEQ ID NO: 18207 - DNA, 13 bp, Artificial Sequence
  synthetic circulating small noncoding RNA (sncRNA) 5' transfer RNA (tRNA) half
gtgctaaccatta

SEQ ID NO: 18208 - DNA, 28 bp, Artificial Sequence
  synthetic circulating small noncoding RNA (sncRNA) 5' transfer RNA (tRNA) half
ccgaaacccgggatcgaaccagggacct

SEQ ID NO: 18209 - DNA, 34 bp, Artificial Sequence
  synthetic circulating small noncoding RNA (sncRNA) 5' transfer RNA (tRNA) half
ggcgagaattctaccactgaaccaccaatgccac

SEQ ID NO: 18210 - DNA, 8 bp, Artificial Sequence
  synthetic circulating small noncoding RNA (sncRNA) 5' transfer RNA (tRNA) half
ccccgtcg

SEQ ID NO: 18211 - DNA, 33 bp, Artificial Sequence
  synthetic circulating small noncoding RNA (sncRNA) 5' transfer RNA (tRNA) half
ccccgacgtgatttgaacacgcaaccttctgat

SEQ ID NO: 18212 - DNA, 13 bp, Artificial Sequence
  synthetic circulating small noncoding RNA (sncRNA) 5' transfer RNA (tRNA) half
tgcgagaggtagc

SEQ ID NO: 18213 - DNA, 36 bp, Artificial Sequence
  synthetic circulating small noncoding RNA (sncRNA) 5' transfer RNA (tRNA) half
caggagatcctgggttcaaatcccagcggggccttt

SEQ ID NO: 18214 - DNA, 19 bp, Artificial Sequence
  synthetic circulating small noncoding RNA (sncRNA) 5' transfer RNA (tRNA) half
ccgctcggccatcctgact

SEQ ID NO: 18215 - DNA, 12 bp, Artificial Sequence
  synthetic circulating small noncoding RNA (sncRNA) 5' transfer RNA (tRNA) half
tcgcccaacgtg

SEQ ID NO: 18216 - DNA, 13 bp, Artificial Sequence
  synthetic circulating small noncoding RNA (sncRNA) 5' transfer RNA (tRNA) half
agggttcgaacct

SEQ ID NO: 18217 - DNA, 27 bp, Artificial Sequence
  synthetic circulating small noncoding RNA (sncRNA) 5' transfer RNA (tRNA) half
cgttggtctaggggtatgattctcgct

SEQ ID NO: 18218 - DNA, 20 bp, Artificial Sequence
  synthetic circulating small noncoding RNA (sncRNA) 5' transfer RNA (tRNA) half
ttcgagcccacccagggacg

SEQ ID NO: 18219 - DNA, 22 bp, Artificial Sequence
  synthetic circulating small noncoding RNA (sncRNA) 5' transfer RNA (tRNA) half
agttcaaatctcggtgggacct

SEQ ID NO: 18220 - DNA, 29 bp, Artificial Sequence
  synthetic circulating small noncoding RNA (sncRNA) 5' transfer RNA (tRNA) half
tcccgggttcaaatcccggacgagcccca

SEQ ID NO: 18221 - DNA, 16 bp, Artificial Sequence
  synthetic circulating small noncoding RNA (sncRNA) 5' transfer RNA (tRNA) half
acccggaacctttgaa

SEQ ID NO: 18222 - DNA, 27 bp, Artificial Sequence
  synthetic circulating small noncoding RNA (sncRNA) 5' transfer RNA (tRNA) half
gtcaggatggccgagcggtctaaggcg

SEQ ID NO: 18223 - DNA, 17 bp, Artificial Sequence
  synthetic circulating small noncoding RNA (sncRNA) 5' transfer RNA (tRNA) half
taggcgaatgtgataac

SEQ ID NO: 18224 - DNA, 15 bp, Artificial Sequence
  synthetic circulating small noncoding RNA (sncRNA) 5' transfer RNA (tRNA) half
ccatatggtctagcg

SEQ ID NO: 18225 - DNA, 15 bp, Artificial Sequence
  synthetic circulating small noncoding RNA (sncRNA) 5' transfer RNA (tRNA) half
ccctgggtgggctcg

SEQ ID NO: 18226 - DNA, 33 bp, Artificial Sequence
  synthetic circulating small noncoding RNA (sncRNA) 5' transfer RNA (tRNA) half
gggggtacctggatttgaaccagggacctcttg

SEQ ID NO: 18227 - DNA, 33 bp, Artificial Sequence
  synthetic circulating small noncoding RNA (sncRNA) 5' transfer RNA (tRNA) half
ggccgggaatcgaacccgggtcaactgcttgga

SEQ ID NO: 18228 - DNA, 31 bp, Artificial Sequence
  synthetic circulating small noncoding RNA (sncRNA) 5' transfer RNA (tRNA) half
cattggtggttcaatggtagaattctcgcct

SEQ ID NO: 18229 - DNA, 27 bp, Artificial Sequence
  synthetic circulating small noncoding RNA (sncRNA) 5' transfer RNA (tRNA) half
tagaccaccagggaaactgccagttgt

SEQ ID NO: 18230 - DNA, 17 bp, Artificial Sequence
  synthetic circulating small noncoding RNA (sncRNA) 5' transfer RNA (tRNA) half
ggttcaaatccgggtgc

SEQ ID NO: 18231 - DNA, 30 bp, Artificial Sequence
  synthetic circulating small noncoding RNA (sncRNA) 5' transfer RNA (tRNA) half
agcaccacgctctaaccaactgagctaacc

SEQ ID NO: 18232 - DNA, 28 bp, Artificial Sequence
  synthetic circulating small noncoding RNA (sncRNA) 5' transfer RNA (tRNA) half
tcgacctctgggttatgggcccagcacg

SEQ ID NO: 18233 - DNA, 13 bp, Artificial Sequence
  synthetic circulating small noncoding RNA (sncRNA) 5' transfer RNA (tRNA) half
gcgagcgctctac

SEQ ID NO: 18234 - DNA, 10 bp, Artificial Sequence
  synthetic circulating small noncoding RNA (sncRNA) 5' transfer RNA (tRNA) half
ccgagcggtc

SEQ ID NO: 18235 - DNA, 38 bp, Artificial Sequence
  synthetic circulating small noncoding RNA (sncRNA) 5' transfer RNA (tRNA) half
aggattcctggttttcacccaggcggcccgggttcgac

SEQ ID NO: 18236 - DNA, 13 bp, Artificial Sequence
  synthetic circulating small noncoding RNA (sncRNA) 5' transfer RNA (tRNA) half
gattctcgctttg

SEQ ID NO: 18237 - DNA, 39 bp, Artificial Sequence
  synthetic circulating small noncoding RNA (sncRNA) 5' transfer RNA (tRNA) half
agcctccccgtcggggaatcgaaccccggtctcccgcgt

SEQ ID NO: 18238 - DNA, 36 bp, Artificial Sequence
  synthetic circulating small noncoding RNA (sncRNA) 5' transfer RNA (tRNA) half
ggcctcccgcgtggcaggcgagaattctaccactga

SEQ ID NO: 18239 - DNA, 39 bp, Artificial Sequence
  synthetic circulating small noncoding RNA (sncRNA) 5' transfer RNA (tRNA) half
cgtcgactctggcgggactcgaacccgcaacctttgaat

SEQ ID NO: 18240 - DNA, 23 bp, Artificial Sequence
  synthetic circulating small noncoding RNA (sncRNA) 5' transfer RNA (tRNA) half
ctgggttcgagccccagtggaac

SEQ ID NO: 18241 - DNA, 20 bp, Artificial Sequence
  synthetic circulating small noncoding RNA (sncRNA) 5' transfer RNA (tRNA) half
ttccgcccggtttcgaaccg

SEQ ID NO: 18242 - DNA, 23 bp, Artificial Sequence
  synthetic circulating small noncoding RNA (sncRNA) 5' transfer RNA (tRNA) half
ctctaccatttgagctaatcccc

SEQ ID NO: 18243 - DNA, 27 bp, Artificial Sequence
  synthetic circulating small noncoding RNA (sncRNA) 5' transfer RNA (tRNA) half
ctggactctgaatccagcgatccgagt

SEQ ID NO: 18244 - DNA, 21 bp, Artificial Sequence
  synthetic circulating small noncoding RNA (sncRNA) 5' transfer RNA (tRNA) half
cggtgagagcgccgaatccta

SEQ ID NO: 18245 - DNA, 18 bp, Artificial Sequence
  synthetic circulating small noncoding RNA (sncRNA) 5' transfer RNA (tRNA) half
aaccgggcggaaacaaaa

SEQ ID NO: 18246 - DNA, 11 bp, Artificial Sequence
  synthetic circulating small noncoding RNA (sncRNA) 5' transfer RNA (tRNA) half
tggtctggggt

SEQ ID NO: 18247 - DNA, 19 bp, Artificial Sequence
  synthetic circulating small noncoding RNA (sncRNA) 5' transfer RNA (tRNA) half
cgcgtggcaggcgagaatt

SEQ ID NO: 18248 - DNA, 14 bp, Artificial Sequence
  synthetic circulating small noncoding RNA (sncRNA) 5' transfer RNA (tRNA) half
acgcgggagaccgg

SEQ ID NO: 18249 - DNA, 21 bp, Artificial Sequence
  synthetic circulating small noncoding RNA (sncRNA) 5' transfer RNA (tRNA) half
ccgggcctcccgcgtggcagg

SEQ ID NO: 18250 - DNA, 14 bp, Artificial Sequence
  synthetic circulating small noncoding RNA (sncRNA) 5' transfer RNA (tRNA) half
gctagctcagtcgg

SEQ ID NO: 18251 - DNA, 20 bp, Artificial Sequence
  synthetic circulating small noncoding RNA (sncRNA) 5' transfer RNA (tRNA) half
cgggcctcccgcgtggcagg

SEQ ID NO: 18252 - DNA, 32 bp, Artificial Sequence
  synthetic circulating small noncoding RNA (sncRNA) 5' transfer RNA (tRNA) half
gcgatccgagttcaaatctcggtggaacctgc

SEQ ID NO: 18253 - DNA, 14 bp, Artificial Sequence
  synthetic circulating small noncoding RNA (sncRNA) 5' transfer RNA (tRNA) half
cgactcccggtgtg

SEQ ID NO: 18254 - DNA, 20 bp, Artificial Sequence
  synthetic circulating small noncoding RNA (sncRNA) 5' transfer RNA (tRNA) half
gttcgatcccgggtttcggc

SEQ ID NO: 18255 - DNA, 34 bp, Artificial Sequence
  synthetic circulating small noncoding RNA (sncRNA) 5' transfer RNA (tRNA) half
aaacaggagatcctgggttcgaatcccagcgggg

SEQ ID NO: 18256 - DNA, 39 bp, Artificial Sequence
  synthetic circulating small noncoding RNA (sncRNA) 5' transfer RNA (tRNA) half
tggttatcacgttcgcctcacacgcgaaaggtccccggt

SEQ ID NO: 18257 - DNA, 24 bp, Artificial Sequence
  synthetic circulating small noncoding RNA (sncRNA) 5' transfer RNA (tRNA) half
gcgggaggcccgggttcgattccc

SEQ ID NO: 18258 - DNA, 21 bp, Artificial Sequence
  synthetic circulating small noncoding RNA (sncRNA) 5' transfer RNA (tRNA) half
tcacgaccttcagattatgag

SEQ ID NO: 18259 - DNA, 16 bp, Artificial Sequence
  synthetic circulating small noncoding RNA (sncRNA) 5' transfer RNA (tRNA) half
gccgaatcctagccac

SEQ ID NO: 18260 - DNA, 33 bp, Artificial Sequence
  synthetic circulating small noncoding RNA (sncRNA) 5' transfer RNA (tRNA) half
tcagaagattccaggttcgactcctggctggct

SEQ ID NO: 18261 - DNA, 31 bp, Artificial Sequence
  synthetic circulating small noncoding RNA (sncRNA) 5' transfer RNA (tRNA) half
agaggtcccgggttcaaatcccggacgagcc

SEQ ID NO: 18262 - DNA, 20 bp, Artificial Sequence
  synthetic circulating small noncoding RNA (sncRNA) 5' transfer RNA (tRNA) half
ttagaccgctcggccatcct

SEQ ID NO: 18263 - DNA, 21 bp, Artificial Sequence
  synthetic circulating small noncoding RNA (sncRNA) 5' transfer RNA (tRNA) half
caaccatgtttccgcccggtt

SEQ ID NO: 18264 - DNA, 32 bp, Artificial Sequence
  synthetic circulating small noncoding RNA (sncRNA) 5' transfer RNA (tRNA) half
caaccacgaagggattcgaaccctcaatcttc

SEQ ID NO: 18265 - DNA, 19 bp, Artificial Sequence
  synthetic circulating small noncoding RNA (sncRNA) 5' transfer RNA (tRNA) half
aatcctaaccactagacca

SEQ ID NO: 18266 - DNA, 7 bp, Artificial Sequence
  synthetic circulating small noncoding RNA (sncRNA) 5' transfer RNA (tRNA) half
cgcccaa

SEQ ID NO: 18267 - DNA, 24 bp, Artificial Sequence
  synthetic circulating small noncoding RNA (sncRNA) 5' transfer RNA (tRNA) half
gtggtctagtggctaggattcggc

SEQ ID NO: 18268 - DNA, 28 bp, Artificial Sequence
  synthetic circulating small noncoding RNA (sncRNA) 5' transfer RNA (tRNA) half
tccgccgggactcgaacccggaaccttt

SEQ ID NO: 18269 - DNA, 24 bp, Artificial Sequence
  synthetic circulating small noncoding RNA (sncRNA) 5' transfer RNA (tRNA) half
cctcacacgcgaaaggtccccggt

SEQ ID NO: 18270 - DNA, 9 bp, Artificial Sequence
  synthetic circulating small noncoding RNA (sncRNA) 5' transfer RNA (tRNA) half
ggagtcgaa

SEQ ID NO: 18271 - DNA, 32 bp, Artificial Sequence
  synthetic circulating small noncoding RNA (sncRNA) 5' transfer RNA (tRNA) half
tatgcgttggccgggaatcgaacccgggtcaa

SEQ ID NO: 18272 - DNA, 37 bp, Artificial Sequence
  synthetic circulating small noncoding RNA (sncRNA) 5' transfer RNA (tRNA) half
ccttgttcccagaggttcaaatcctctccctaatagt

SEQ ID NO: 18273 - DNA, 22 bp, Artificial Sequence
  synthetic circulating small noncoding RNA (sncRNA) 5' transfer RNA (tRNA) half
ttcccattcttgcgacccgggt

SEQ ID NO: 18274 - DNA, 30 bp, Artificial Sequence
  synthetic circulating small noncoding RNA (sncRNA) 5' transfer RNA (tRNA) half
tccgactccgccgggactcgaacccggaac

SEQ ID NO: 18275 - DNA, 14 bp, Artificial Sequence
  synthetic circulating small noncoding RNA (sncRNA) 5' transfer RNA (tRNA) half
cgagaggtcccggg

SEQ ID NO: 18276 - DNA, 17 bp, Artificial Sequence
  synthetic circulating small noncoding RNA (sncRNA) 5' transfer RNA (tRNA) half
gccgtgatcgtataggg

SEQ ID NO: 18277 - DNA, 10 bp, Artificial Sequence
  synthetic circulating small noncoding RNA (sncRNA) 5' transfer RNA (tRNA) half
ttgggcgaga

SEQ ID NO: 18278 - DNA, 16 bp, Artificial Sequence
  synthetic circulating small noncoding RNA (sncRNA) 5' transfer RNA (tRNA) half
gcgtgtgaggcgaacg

SEQ ID NO: 18279 - DNA, 10 bp, Artificial Sequence
  synthetic circulating small noncoding RNA (sncRNA) 5' transfer RNA (tRNA) half
tcgggcgctg

SEQ ID NO: 18280 - DNA, 8 bp, Artificial Sequence
  synthetic circulating small noncoding RNA (sncRNA) 5' transfer RNA (tRNA) half
catcgacc

SEQ ID NO: 18281 - DNA, 13 bp, Artificial Sequence
  synthetic circulating small noncoding RNA (sncRNA) 5' transfer RNA (tRNA) half
gacctttcgcgtg

SEQ ID NO: 18282 - DNA, 26 bp, Artificial Sequence
  synthetic circulating small noncoding RNA (sncRNA) 5' transfer RNA (tRNA) half
ggccccagcgagatttgaactcgcga

SEQ ID NO: 18283 - DNA, 15 bp, Artificial Sequence
  synthetic circulating small noncoding RNA (sncRNA) 5' transfer RNA (tRNA) half
caccacgctctaacc

SEQ ID NO: 18284 - DNA, 34 bp, Artificial Sequence
  synthetic circulating small noncoding RNA (sncRNA) 5' transfer RNA (tRNA) half
ccccaggtgggactcgaacccacaatccctggct

SEQ ID NO: 18285 - DNA, 17 bp, Artificial Sequence
  synthetic circulating small noncoding RNA (sncRNA) 5' transfer RNA (tRNA) half
agctcagttggttagag

SEQ ID NO: 18286 - DNA, 30 bp, Artificial Sequence
  synthetic circulating small noncoding RNA (sncRNA) 5' transfer RNA (tRNA) half
aggattcctggttttcacccaggcggcccg

SEQ ID NO: 18287 - DNA, 24 bp, Artificial Sequence
  synthetic circulating small noncoding RNA (sncRNA) 5' transfer RNA (tRNA) half
tcccggccaatgcacgatgcgtac

SEQ ID NO: 18288 - DNA, 16 bp, Artificial Sequence
  synthetic circulating small noncoding RNA (sncRNA) 5' transfer RNA (tRNA) half
attcgaacctgcgcgg

SEQ ID NO: 18289 - DNA, 24 bp, Artificial Sequence
  synthetic circulating small noncoding RNA (sncRNA) 5' transfer RNA (tRNA) half
ggattcagagtccagagtgctaac

SEQ ID NO: 18290 - DNA, 5 bp, Artificial Sequence
  synthetic circulating small noncoding RNA (sncRNA) 5' transfer RNA (tRNA) half
cgcga

SEQ ID NO: 18291 - DNA, 39 bp, Artificial Sequence
  synthetic circulating small noncoding RNA (sncRNA) 5' transfer RNA (tRNA) half
cggttaggattcctggttttcacccaggcggcccgggtt

SEQ ID NO: 18292 - DNA, 36 bp, Artificial Sequence
  synthetic circulating small noncoding RNA (sncRNA) 5' transfer RNA (tRNA) half
aagcgtgctgggcccataacccagaggtcgatggat

SEQ ID NO: 18293 - DNA, 33 bp, Artificial Sequence
  synthetic circulating small noncoding RNA (sncRNA) 5' transfer RNA (tRNA) half
ccacgaagggattcgaaccctcaatcttctgat

SEQ ID NO: 18294 - DNA, 24 bp, Artificial Sequence
  synthetic circulating small noncoding RNA (sncRNA) 5' transfer RNA (tRNA) half
gcgtgttcaaatcacgtcggggtc

SEQ ID NO: 18295 - DNA, 28 bp, Artificial Sequence
  synthetic circulating small noncoding RNA (sncRNA) 5' transfer RNA (tRNA) half
ccccggtctcccgcgtgacaggcgggga

SEQ ID NO: 18296 - DNA, 37 bp, Artificial Sequence
  synthetic circulating small noncoding RNA (sncRNA) 5' transfer RNA (tRNA) half
tccctggtggtctagtggttaggattcggcgctctca

SEQ ID NO: 18297 - DNA, 35 bp, Artificial Sequence
  synthetic circulating small noncoding RNA (sncRNA) 5' transfer RNA (tRNA) half
aacaggagatcctgggttcgaatcccagtggggcc

SEQ ID NO: 18298 - DNA, 13 bp, Artificial Sequence
  synthetic circulating small noncoding RNA (sncRNA) 5' transfer RNA (tRNA) half
tgtagtcgtggcc

SEQ ID NO: 18299 - DNA, 19 bp, Artificial Sequence
  synthetic circulating small noncoding RNA (sncRNA) 5' transfer RNA (tRNA) half
cggaagcgtgctgggccca

SEQ ID NO: 18300 - DNA, 26 bp, Artificial Sequence
  synthetic circulating small noncoding RNA (sncRNA) 5' transfer RNA (tRNA) half
cacgctctaaccaactgagctaaccg

SEQ ID NO: 18301 - DNA, 11 bp, Artificial Sequence
  synthetic circulating small noncoding RNA (sncRNA) 5' transfer RNA (tRNA) half
ccccgacgtga

SEQ ID NO: 18302 - DNA, 21 bp, Artificial Sequence
  synthetic circulating small noncoding RNA (sncRNA) 5' transfer RNA (tRNA) half
gtctaggggtatgattctcgg

SEQ ID NO: 18303 - DNA, 33 bp, Artificial Sequence
  synthetic circulating small noncoding RNA (sncRNA) 5' transfer RNA (tRNA) half
aaggtcgcgggttcgatccccgtacgggccaca

SEQ ID NO: 18304 - DNA, 13 bp, Artificial Sequence
  synthetic circulating small noncoding RNA (sncRNA) 5' transfer RNA (tRNA) half
gataaccgctaca

SEQ ID NO: 18305 - DNA, 14 bp, Artificial Sequence
  synthetic circulating small noncoding RNA (sncRNA) 5' transfer RNA (tRNA) half
gcattggtggttca

SEQ ID NO: 18306 - DNA, 25 bp, Artificial Sequence
  synthetic circulating small noncoding RNA (sncRNA) 5' transfer RNA (tRNA) half
gccttaaccactcggccatcgctgc

SEQ ID NO: 18307 - DNA, 13 bp, Artificial Sequence
  synthetic circulating small noncoding RNA (sncRNA) 5' transfer RNA (tRNA) half
aacagcgccgctg

SEQ ID NO: 18308 - DNA, 22 bp, Artificial Sequence
  synthetic circulating small noncoding RNA (sncRNA) 5' transfer RNA (tRNA) half
gttcgaatcccacttctgacac

SEQ ID NO: 18309 - DNA, 13 bp, Artificial Sequence
  synthetic circulating small noncoding RNA (sncRNA) 5' transfer RNA (tRNA) half
gcgtgacaggcgg

SEQ ID NO: 18310 - DNA, 21 bp, Artificial Sequence
  synthetic circulating small noncoding RNA (sncRNA) 5' transfer RNA (tRNA) half
ctggattcagagtccagagtg

SEQ ID NO: 18311 - DNA, 6 bp, Artificial Sequence
  synthetic circulating small noncoding RNA (sncRNA) 5' transfer RNA (tRNA) half
acctcg

SEQ ID NO: 18312 - DNA, 23 bp, Artificial Sequence
  synthetic circulating small noncoding RNA (sncRNA) 5' transfer RNA (tRNA) half
tgatgctctaccgactgagctat

SEQ ID NO: 18313 - DNA, 20 bp, Artificial Sequence
  synthetic circulating small noncoding RNA (sncRNA) 5' transfer RNA (tRNA) half
aacccgggcctcccgcgtgg

SEQ ID NO: 18314 - DNA, 10 bp, Artificial Sequence
  synthetic circulating small noncoding RNA (sncRNA) 5' transfer RNA (tRNA) half
cgctcggcca

SEQ ID NO: 18315 - DNA, 15 bp, Artificial Sequence
  synthetic circulating small noncoding RNA (sncRNA) 5' transfer RNA (tRNA) half
ttcccggtcagggaa

SEQ ID NO: 18316 - DNA, 14 bp, Artificial Sequence
  synthetic circulating small noncoding RNA (sncRNA) 5' transfer RNA (tRNA) half
gggaatcgaacccc

SEQ ID NO: 18317 - DNA, 15 bp, Artificial Sequence
  synthetic circulating small noncoding RNA (sncRNA) 5' transfer RNA (tRNA) half
aatccgagtcacggc

SEQ ID NO: 18318 - DNA, 11 bp, Artificial Sequence
  synthetic circulating small noncoding RNA (sncRNA) 5' transfer RNA (tRNA) half
gggtatagctc

SEQ ID NO: 18319 - DNA, 19 bp, Artificial Sequence
  synthetic circulating small noncoding RNA (sncRNA) 5' transfer RNA (tRNA) half
cgggacctctcgcacccga

SEQ ID NO: 18320 - DNA, 15 bp, Artificial Sequence
  synthetic circulating small noncoding RNA (sncRNA) 5' transfer RNA (tRNA) half
gcacccaaagcgaga

SEQ ID NO: 18321 - DNA, 30 bp, Artificial Sequence
  synthetic circulating small noncoding RNA (sncRNA) 5' transfer RNA (tRNA) half
gcgggaggcccgggttcgattcccggccca

SEQ ID NO: 18322 - DNA, 23 bp, Artificial Sequence
  synthetic circulating small noncoding RNA (sncRNA) 5' transfer RNA (tRNA) half
cggggaatcgaaccccggtctcc

SEQ ID NO: 18323 - DNA, 12 bp, Artificial Sequence
  synthetic circulating small noncoding RNA (sncRNA) 5' transfer RNA (tRNA) half
gggaggcccggg

SEQ ID NO: 18324 - DNA, 18 bp, Artificial Sequence
  synthetic circulating small noncoding RNA (sncRNA) 5' transfer RNA (tRNA) half
ttcggttcccggccaatg

SEQ ID NO: 18325 - DNA, 38 bp, Artificial Sequence
  synthetic circulating small noncoding RNA (sncRNA) 5' transfer RNA (tRNA) half
ctcaaccacgaagggattcgaaccctcaatcttctgat

SEQ ID NO: 18326 - DNA, 14 bp, Artificial Sequence
  synthetic circulating small noncoding RNA (sncRNA) 5' transfer RNA (tRNA) half
actccgccgggact

SEQ ID NO: 18327 - DNA, 31 bp, Artificial Sequence
  synthetic circulating small noncoding RNA (sncRNA) 5' transfer RNA (tRNA) half
ggaggcccgggttcgattcccggccaatgca

SEQ ID NO: 18328 - DNA, 21 bp, Artificial Sequence
  synthetic circulating small noncoding RNA (sncRNA) 5' transfer RNA (tRNA) half
gaatcccaccgctgccatctt

SEQ ID NO: 18329 - DNA, 27 bp, Artificial Sequence
  synthetic circulating small noncoding RNA (sncRNA) 5' transfer RNA (tRNA) half
gggccgcggcggtgaaagcgccgaatc

SEQ ID NO: 18330 - DNA, 13 bp, Artificial Sequence
  synthetic circulating small noncoding RNA (sncRNA) 5' transfer RNA (tRNA) half
gaaccgaggacct

SEQ ID NO: 18331 - DNA, 18 bp, Artificial Sequence
  synthetic circulating small noncoding RNA (sncRNA) 5' transfer RNA (tRNA) half
cggttaggattcctggtt

SEQ ID NO: 18332 - DNA, 27 bp, Artificial Sequence
  synthetic circulating small noncoding RNA (sncRNA) 5' transfer RNA (tRNA) half
ttccaggttcgactcctggctggctcg

SEQ ID NO: 18333 - DNA, 34 bp, Artificial Sequence
  synthetic circulating small noncoding RNA (sncRNA) 5' transfer RNA (tRNA) half
atcggctcgttggtctaggggtatgattctcgct

SEQ ID NO: 18334 - DNA, 11 bp, Artificial Sequence
  synthetic circulating small noncoding RNA (sncRNA) 5' transfer RNA (tRNA) half
cgagccggatt

SEQ ID NO: 18335 - DNA, 19 bp, Artificial Sequence
  synthetic circulating small noncoding RNA (sncRNA) 5' transfer RNA (tRNA) half
aaccggggacctttcgcgt

SEQ ID NO: 18336 - DNA, 20 bp, Artificial Sequence
  synthetic circulating small noncoding RNA (sncRNA) 5' transfer RNA (tRNA) half
aactgtgcattggccgggaa

SEQ ID NO: 18337 - DNA, 10 bp, Artificial Sequence
  synthetic circulating small noncoding RNA (sncRNA) 5' transfer RNA (tRNA) half
acttcggatc

SEQ ID NO: 18338 - DNA, 19 bp, Artificial Sequence
  synthetic circulating small noncoding RNA (sncRNA) 5' transfer RNA (tRNA) half
gaaaccgggcggaaacagc

SEQ ID NO: 18339 - DNA, 29 bp, Artificial Sequence
  synthetic circulating small noncoding RNA (sncRNA) 5' transfer RNA (tRNA) half
cccgggcctcccgcgtggcaggcgagaat

SEQ ID NO: 18340 - DNA, 21 bp, Artificial Sequence
  synthetic circulating small noncoding RNA (sncRNA) 5' transfer RNA (tRNA) half
ttcaaatcacgtcggggtcag

SEQ ID NO: 18341 - DNA, 24 bp, Artificial Sequence
  synthetic circulating small noncoding RNA (sncRNA) 5' transfer RNA (tRNA) half
acgtgataaccactacactacgga

SEQ ID NO: 18342 - DNA, 16 bp, Artificial Sequence
  synthetic circulating small noncoding RNA (sncRNA) 5' transfer RNA (tRNA) half
cagtggtagagcgcat

SEQ ID NO: 18343 - DNA, 11 bp, Artificial Sequence
  synthetic circulating small noncoding RNA (sncRNA) 5' transfer RNA (tRNA) half
gatccatcgac

SEQ ID NO: 18344 - DNA, 23 bp, Artificial Sequence
  synthetic circulating small noncoding RNA (sncRNA) 5' transfer RNA (tRNA) half
tcggtagagcatcagacttttaa

SEQ ID NO: 18345 - DNA, 20 bp, Artificial Sequence
  synthetic circulating small noncoding RNA (sncRNA) 5' transfer RNA (tRNA) half
tcgatccccgtacgggccac

SEQ ID NO: 18346 - DNA, 45 bp, Artificial Sequence
  synthetic circulating small noncoding RNA (sncRNA) 5' transfer RNA (tRNA) half
ctggtgtagtggtatcatgcaagattcccattcttgcgacccggg

SEQ ID NO: 18347 - DNA, 19 bp, Artificial Sequence
  synthetic circulating small noncoding RNA (sncRNA) 5' transfer RNA (tRNA) half
gtactaaccactatacgat

SEQ ID NO: 18348 - DNA, 24 bp, Artificial Sequence
  synthetic circulating small noncoding RNA (sncRNA) 5' transfer RNA (tRNA) half
gcaagaattctaccactgaaccac

SEQ ID NO: 18349 - DNA, 20 bp, Artificial Sequence
  synthetic circulating small noncoding RNA (sncRNA) 5' transfer RNA (tRNA) half
gctaagcgagcgctctacca

SEQ ID NO: 18350 - DNA, 26 bp, Artificial Sequence
  synthetic circulating small noncoding RNA (sncRNA) 5' transfer RNA (tRNA) half
ccggggacctcttgatctgcagtcaa

SEQ ID NO: 18351 - DNA, 12 bp, Artificial Sequence
  synthetic circulating small noncoding RNA (sncRNA) 5' transfer RNA (tRNA) half
cccagtggaacc

SEQ ID NO: 18352 - DNA, 15 bp, Artificial Sequence
  synthetic circulating small noncoding RNA (sncRNA) 5' transfer RNA (tRNA) half
aaaccaggaatccta

SEQ ID NO: 18353 - DNA, 35 bp, Artificial Sequence
  synthetic circulating small noncoding RNA (sncRNA) 5' transfer RNA (tRNA) half
gggggtatagctcagtggtagagcatttgactgca

SEQ ID NO: 18354 - DNA, 9 bp, Artificial Sequence
  synthetic circulating small noncoding RNA (sncRNA) 5' transfer RNA (tRNA) half
cgaaaggtc

SEQ ID NO: 18355 - DNA, 16 bp, Artificial Sequence
  synthetic circulating small noncoding RNA (sncRNA) 5' transfer RNA (tRNA) half
cgaatcccatcctcgt

SEQ ID NO: 18356 - DNA, 24 bp, Artificial Sequence
  synthetic circulating small noncoding RNA (sncRNA) 5' transfer RNA (tRNA) half
ttaaccgaaaggttggtggttcga

SEQ ID NO: 18357 - DNA, 18 bp, Artificial Sequence
  synthetic circulating small noncoding RNA (sncRNA) 5' transfer RNA (tRNA) half
tcctcgttagtatagtgg

SEQ ID NO: 18358 - DNA, 17 bp, Artificial Sequence
  synthetic circulating small noncoding RNA (sncRNA) 5' transfer RNA (tRNA) half
aattctaccactgaacc

SEQ ID NO: 18359 - DNA, 27 bp, Artificial Sequence
  synthetic circulating small noncoding RNA (sncRNA) 5' transfer RNA (tRNA) half
cgggaggcccgggttcgattcccggcc

SEQ ID NO: 18360 - DNA, 22 bp, Artificial Sequence
  synthetic circulating small noncoding RNA (sncRNA) 5' transfer RNA (tRNA) half
tcgattcccggcccatgcagag

SEQ ID NO: 18361 - DNA, 40 bp, Artificial Sequence
  synthetic circulating small noncoding RNA (sncRNA) 5' transfer RNA (tRNA) half
tggattcagagtccagagtgctaaccattacaccatggaa

SEQ ID NO: 18362 - DNA, 20 bp, Artificial Sequence
  synthetic circulating small noncoding RNA (sncRNA) 5' transfer RNA (tRNA) half
tgattctcgcttcgggtgcg

SEQ ID NO: 18363 - DNA, 20 bp, Artificial Sequence
  synthetic circulating small noncoding RNA (sncRNA) 5' transfer RNA (tRNA) half
taaaccgaagatcgcgggtt

SEQ ID NO: 18364 - DNA, 19 bp, Artificial Sequence
  synthetic circulating small noncoding RNA (sncRNA) 5' transfer RNA (tRNA) half
gaggcccgggttcgattcc

SEQ ID NO: 18365 - DNA, 24 bp, Artificial Sequence
  synthetic circulating small noncoding RNA (sncRNA) 5' transfer RNA (tRNA) half
tacctccccgtcggggaatcgaac

SEQ ID NO: 18366 - DNA, 38 bp, Artificial Sequence
  synthetic circulating small noncoding RNA (sncRNA) 5' transfer RNA (tRNA) half
actggcagtggtgggattcgaacccacgcctccgaaga

SEQ ID NO: 18367 - DNA, 24 bp, Artificial Sequence
  synthetic circulating small noncoding RNA (sncRNA) 5' transfer RNA (tRNA) half
tcccataccgggagtcgaacccgg

SEQ ID NO: 18368 - DNA, 41 bp, Artificial Sequence
  synthetic circulating small noncoding RNA (sncRNA) 5' transfer RNA (tRNA) half
acccgggtcaactgcttggaaggcagctatgctcaccacta

SEQ ID NO: 18369 - DNA, 34 bp, Artificial Sequence
  synthetic circulating small noncoding RNA (sncRNA) 5' transfer RNA (tRNA) half
gccgcggcccgggttcgattcccggtcagggaag

SEQ ID NO: 18370 - DNA, 9 bp, Artificial Sequence
  synthetic circulating small noncoding RNA (sncRNA) 5' transfer RNA (tRNA) half
aatccagcg

SEQ ID NO: 18371 - DNA, 10 bp, Artificial Sequence
  synthetic circulating small noncoding RNA (sncRNA) 5' transfer RNA (tRNA) half
ttcgaaaccg

SEQ ID NO: 18372 - DNA, 30 bp, Artificial Sequence
  synthetic circulating small noncoding RNA (sncRNA) 5' transfer RNA (tRNA) half
cccatgctctatggactgagctagccaggc

SEQ ID NO: 18373 - DNA, 13 bp, Artificial Sequence
  synthetic circulating small noncoding RNA (sncRNA) 5' transfer RNA (tRNA) half
gccccagcgagat

SEQ ID NO: 18374 - DNA, 9 bp, Artificial Sequence
  synthetic circulating small noncoding RNA (sncRNA) 5' transfer RNA (tRNA) half
ataccgtcg

SEQ ID NO: 18375 - DNA, 23 bp, Artificial Sequence
  synthetic circulating small noncoding RNA (sncRNA) 5' transfer RNA (tRNA) half
cacgcgaaaggtccccggttcga

SEQ ID NO: 18376 - DNA, 36 bp, Artificial Sequence
  synthetic circulating small noncoding RNA (sncRNA) 5' transfer RNA (tRNA) half
ttagcactctggactctgaatccagcgatccgagtt

SEQ ID NO: 18377 - DNA, 26 bp, Artificial Sequence
  synthetic circulating small noncoding RNA (sncRNA) 5' transfer RNA (tRNA) half
tcaaatgctctaccactgagctatac

SEQ ID NO: 18378 - DNA, 20 bp, Artificial Sequence
  synthetic circulating small noncoding RNA (sncRNA) 5' transfer RNA (tRNA) half
aatcccacttctgacacagt

SEQ ID NO: 18379 - DNA, 23 bp, Artificial Sequence
  synthetic circulating small noncoding RNA (sncRNA) 5' transfer RNA (tRNA) half
ccgactgagctagccgggcagat

SEQ ID NO: 18380 - DNA, 19 bp, Artificial Sequence
  synthetic circulating small noncoding RNA (sncRNA) 5' transfer RNA (tRNA) half
tcacccaggcggcccgggt

SEQ ID NO: 18381 - DNA, 9 bp, Artificial Sequence
  synthetic circulating small noncoding RNA (sncRNA) 5' transfer RNA (tRNA) half
gtcacggca

SEQ ID NO: 18382 - DNA, 14 bp, Artificial Sequence
  synthetic circulating small noncoding RNA (sncRNA) 5' transfer RNA (tRNA) half
gcatgggtggttca

SEQ ID NO: 18383 - DNA, 29 bp, Artificial Sequence
  synthetic circulating small noncoding RNA (sncRNA) 5' transfer RNA (tRNA) half
tggtggagatgccggggatcgaacccggg

SEQ ID NO: 18384 - DNA, 12 bp, Artificial Sequence
  synthetic circulating small noncoding RNA (sncRNA) 5' transfer RNA (tRNA) half
agattaagagtc

SEQ ID NO: 18385 - DNA, 30 bp, Artificial Sequence
  synthetic circulating small noncoding RNA (sncRNA) 5' transfer RNA (tRNA) half
ctcgttggtctaggggtatgattctcggtt

SEQ ID NO: 18386 - DNA, 8 bp, Artificial Sequence
  synthetic circulating small noncoding RNA (sncRNA) 5' transfer RNA (tRNA) half
gttcgagc

SEQ ID NO: 18387 - DNA, 35 bp, Artificial Sequence
  synthetic circulating small noncoding RNA (sncRNA) 5' transfer RNA (tRNA) half
cacaacgcagagtactaaccactatacgatcacgg

SEQ ID NO: 18388 - DNA, 24 bp, Artificial Sequence
  synthetic circulating small noncoding RNA (sncRNA) 5' transfer RNA (tRNA) half
gggattgtgggttcgagtcccacc

SEQ ID NO: 18389 - DNA, 14 bp, Artificial Sequence
  synthetic circulating small noncoding RNA (sncRNA) 5' transfer RNA (tRNA) half
ggattcggcgctct

SEQ ID NO: 18390 - DNA, 10 bp, Artificial Sequence
  synthetic circulating small noncoding RNA (sncRNA) 5' transfer RNA (tRNA) half
cgtcggggtc

SEQ ID NO: 18391 - DNA, 9 bp, Artificial Sequence
  synthetic circulating small noncoding RNA (sncRNA) 5' transfer RNA (tRNA) half
ggttccacc

SEQ ID NO: 18392 - DNA, 12 bp, Artificial Sequence
  synthetic circulating small noncoding RNA (sncRNA) 5' transfer RNA (tRNA) half
gttcccgcccgg

SEQ ID NO: 18393 - DNA, 14 bp, Artificial Sequence
  synthetic circulating small noncoding RNA (sncRNA) 5' transfer RNA (tRNA) half
cacgaccttcagat

SEQ ID NO: 18394 - DNA, 28 bp, Artificial Sequence
  synthetic circulating small noncoding RNA (sncRNA) 5' transfer RNA (tRNA) half
ctatagctcaggggttagagcactggtc

SEQ ID NO: 18395 - DNA, 14 bp, Artificial Sequence
  synthetic circulating small noncoding RNA (sncRNA) 5' transfer RNA (tRNA) half
ccaaagcgagaatc

SEQ ID NO: 18396 - DNA, 31 bp, Artificial Sequence
  synthetic circulating small noncoding RNA (sncRNA) 5' transfer RNA (tRNA) half
taggcgaatgtgataaccactacactacgga

SEQ ID NO: 18397 - DNA, 25 bp, Artificial Sequence
  synthetic circulating small noncoding RNA (sncRNA) 5' transfer RNA (tRNA) half
agggttcaagtccctgttcgggcgc

SEQ ID NO: 18398 - DNA, 19 bp, Artificial Sequence
  synthetic circulating small noncoding RNA (sncRNA) 5' transfer RNA (tRNA) half
ggttcgaatcctgccgact

SEQ ID NO: 18399 - DNA, 26 bp, Artificial Sequence
  synthetic circulating small noncoding RNA (sncRNA) 5' transfer RNA (tRNA) half
cctgggttcgagccccagtggaacca

SEQ ID NO: 18400 - DNA, 30 bp, Artificial Sequence
  synthetic circulating small noncoding RNA (sncRNA) 5' transfer RNA (tRNA) half
ggtcctgggttcgagccccagtggaaccac

SEQ ID NO: 18401 - DNA, 12 bp, Artificial Sequence
  synthetic circulating small noncoding RNA (sncRNA) 5' transfer RNA (tRNA) half
cttagaccgctc

SEQ ID NO: 18402 - DNA, 32 bp, Artificial Sequence
  synthetic circulating small noncoding RNA (sncRNA) 5' transfer RNA (tRNA) half
caggatggccgagcggtctaaggcgctgcgtt

SEQ ID NO: 18403 - DNA, 16 bp, Artificial Sequence
  synthetic circulating small noncoding RNA (sncRNA) 5' transfer RNA (tRNA) half
acgtctgctttacacg

SEQ ID NO: 18404 - DNA, 26 bp, Artificial Sequence
  synthetic circulating small noncoding RNA (sncRNA) 5' transfer RNA (tRNA) half
tcccgcgtgacaggcggggatactca

SEQ ID NO: 18405 - DNA, 7 bp, Artificial Sequence
  synthetic circulating small noncoding RNA (sncRNA) 5' transfer RNA (tRNA) half
agggacg

SEQ ID NO: 18406 - DNA, 8 bp, Artificial Sequence
  synthetic circulating small noncoding RNA (sncRNA) 5' transfer RNA (tRNA) half
gtggccta

SEQ ID NO: 18407 - DNA, 23 bp, Artificial Sequence
  synthetic circulating small noncoding RNA (sncRNA) 5' transfer RNA (tRNA) half
agtcggtagagcatcagactttt

SEQ ID NO: 18408 - DNA, 30 bp, Artificial Sequence
  synthetic circulating small noncoding RNA (sncRNA) 5' transfer RNA (tRNA) half
tgccgtgactcggattcgaaccgaggttgc

SEQ ID NO: 18409 - DNA, 24 bp, Artificial Sequence
  synthetic circulating small noncoding RNA (sncRNA) 5' transfer RNA (tRNA) half
tgaactcggatcgctggattcaaa

SEQ ID NO: 18410 - DNA, 26 bp, Artificial Sequence
  synthetic circulating small noncoding RNA (sncRNA) 5' transfer RNA (tRNA) half
ggggattgtgggttcgagtcccatct

SEQ ID NO: 18411 - DNA, 38 bp, Artificial Sequence
  synthetic circulating small noncoding RNA (sncRNA) 5' transfer RNA (tRNA) half
ggatcagaagattccaggttcgactcctggctggctcg

SEQ ID NO: 18412 - DNA, 46 bp, Artificial Sequence
  synthetic circulating small noncoding RNA (sncRNA) 5' transfer RNA (tRNA) half
tagcgcccgaacagggacttgaaccctggaccctcagattaaaagt

SEQ ID NO: 18413 - DNA, 21 bp, Artificial Sequence
  synthetic circulating small noncoding RNA (sncRNA) 5' transfer RNA (tRNA) half
ctagaactgtgcattggccgg

SEQ ID NO: 18414 - DNA, 26 bp, Artificial Sequence
  synthetic circulating small noncoding RNA (sncRNA) 5' transfer RNA (tRNA) half
gtcacgaacaggattcgaacctgtgc

SEQ ID NO: 18415 - DNA, 18 bp, Artificial Sequence
  synthetic circulating small noncoding RNA (sncRNA) 5' transfer RNA (tRNA) half
cggggatactaaccacta

SEQ ID NO: 18416 - DNA, 16 bp, Artificial Sequence
  synthetic circulating small noncoding RNA (sncRNA) 5' transfer RNA (tRNA) half
gtggccgagcggtcta

SEQ ID NO: 18417 - DNA, 32 bp, Artificial Sequence
  synthetic circulating small noncoding RNA (sncRNA) 5' transfer RNA (tRNA) half
ccccggctagctcagtcagtagagcttgagaa

SEQ ID NO: 18418 - DNA, 36 bp, Artificial Sequence
  synthetic circulating small noncoding RNA (sncRNA) 5' transfer RNA (tRNA) half
tccttcgagccggattcgaaccagcgacctaaggat

SEQ ID NO: 18419 - DNA, 27 bp, Artificial Sequence
  synthetic circulating small noncoding RNA (sncRNA) 5' transfer RNA (tRNA) half
ctcgcaccctaagcgagaatcataccc

SEQ ID NO: 18420 - DNA, 34 bp, Artificial Sequence
  synthetic circulating small noncoding RNA (sncRNA) 5' transfer RNA (tRNA) half
agctggggattgtgggttcgagtcccatctgggt

SEQ ID NO: 18421 - DNA, 19 bp, Artificial Sequence
  synthetic circulating small noncoding RNA (sncRNA) 5' transfer RNA (tRNA) half
tgttaggcgaatgtgataa

SEQ ID NO: 18422 - DNA, 30 bp, Artificial Sequence
  synthetic circulating small noncoding RNA (sncRNA) 5' transfer RNA (tRNA) half
gcccgggttcgactcccggtgtgggaaact

SEQ ID NO: 18423 - DNA, 17 bp, Artificial Sequence
  synthetic circulating small noncoding RNA (sncRNA) 5' transfer RNA (tRNA) half
gggagactgcgacctga

SEQ ID NO: 18424 - DNA, 14 bp, Artificial Sequence
  synthetic circulating small noncoding RNA (sncRNA) 5' transfer RNA (tRNA) half
accaggaatcctaa

SEQ ID NO: 18425 - DNA, 33 bp, Artificial Sequence
  synthetic circulating small noncoding RNA (sncRNA) 5' transfer RNA (tRNA) half
gtggcccgtacggggatcgaacccgcgaccttg

SEQ ID NO: 18426 - DNA, 39 bp, Artificial Sequence
  synthetic circulating small noncoding RNA (sncRNA) 5' transfer RNA (tRNA) half
aggttccaccgagatttgaactcggatcgctggattcag

SEQ ID NO: 18427 - DNA, 36 bp, Artificial Sequence
  synthetic circulating small noncoding RNA (sncRNA) 5' transfer RNA (tRNA) half
gaagggggcacctggatttgaaccagggacctcttg

SEQ ID NO: 18428 - DNA, 15 bp, Artificial Sequence
  synthetic circulating small noncoding RNA (sncRNA) 5' transfer RNA (tRNA) half
agaagattgagggtt

SEQ ID NO: 18429 - DNA, 26 bp, Artificial Sequence
  synthetic circulating small noncoding RNA (sncRNA) 5' transfer RNA (tRNA) half
aaaaccaggaatcctaaccgctagac

SEQ ID NO: 18430 - DNA, 15 bp, Artificial Sequence
  synthetic circulating small noncoding RNA (sncRNA) 5' transfer RNA (tRNA) half
gggttcgaacctgcg

SEQ ID NO: 18431 - DNA, 14 bp, Artificial Sequence
  synthetic circulating small noncoding RNA (sncRNA) 5' transfer RNA (tRNA) half
agatgtgcattggc

SEQ ID NO: 18432 - DNA, 14 bp, Artificial Sequence
  synthetic circulating small noncoding RNA (sncRNA) 5' transfer RNA (tRNA) half
gcgagaggtcccgg

SEQ ID NO: 18433 - DNA, 16 bp, Artificial Sequence
  synthetic circulating small noncoding RNA (sncRNA) 5' transfer RNA (tRNA) half
ccgactctggtgggat

SEQ ID NO: 18434 - DNA, 38 bp, Artificial Sequence
  synthetic circulating small noncoding RNA (sncRNA) 5' transfer RNA (tRNA) half
cccgtcggggaatcgaaccccggtctcccgcgtgacag

SEQ ID NO: 18435 - DNA, 16 bp, Artificial Sequence
  synthetic circulating small noncoding RNA (sncRNA) 5' transfer RNA (tRNA) half
agggttgtgggttcga

SEQ ID NO: 18436 - DNA, 12 bp, Artificial Sequence
  synthetic circulating small noncoding RNA (sncRNA) 5' transfer RNA (tRNA) half
gtagagcatgag

SEQ ID NO: 18437 - DNA, 25 bp, Artificial Sequence
  synthetic circulating small noncoding RNA (sncRNA) 5' transfer RNA (tRNA) half
aaaccgggcggaaacagcaactttg

SEQ ID NO: 18438 - DNA, 16 bp, Artificial Sequence
  synthetic circulating small noncoding RNA (sncRNA) 5' transfer RNA (tRNA) half
gatccccgtacgggcc

SEQ ID NO: 18439 - DNA, 36 bp, Artificial Sequence
  synthetic circulating small noncoding RNA (sncRNA) 5' transfer RNA (tRNA) half
ccggatgatcctcagtggtctggggtgcaggcttca

SEQ ID NO: 18440 - DNA, 11 bp, Artificial Sequence
  synthetic circulating small noncoding RNA (sncRNA) 5' transfer RNA (tRNA) half
tcctgggttcg

SEQ ID NO: 18441 - DNA, 21 bp, Artificial Sequence
  synthetic circulating small noncoding RNA (sncRNA) 5' transfer RNA (tRNA) half
ttaagagtctcatgctctacc

SEQ ID NO: 18442 - DNA, 11 bp, Artificial Sequence
  synthetic circulating small noncoding RNA (sncRNA) 5' transfer RNA (tRNA) half
tcgaacccagg

SEQ ID NO: 18443 - DNA, 24 bp, Artificial Sequence
  synthetic circulating small noncoding RNA (sncRNA) 5' transfer RNA (tRNA) half
cacccggatttgaaccagggacct

SEQ ID NO: 18444 - DNA, 18 bp, Artificial Sequence
  synthetic circulating small noncoding RNA (sncRNA) 5' transfer RNA (tRNA) half
acacgcgaaaggtccccg

SEQ ID NO: 18445 - DNA, 18 bp, Artificial Sequence
  synthetic circulating small noncoding RNA (sncRNA) 5' transfer RNA (tRNA) half
aatcacgtcggggtcatc

SEQ ID NO: 18446 - DNA, 15 bp, Artificial Sequence
  synthetic circulating small noncoding RNA (sncRNA) 5' transfer RNA (tRNA) half
gaagatcgcgggttc

SEQ ID NO: 18447 - DNA, 16 bp, Artificial Sequence
  synthetic circulating small noncoding RNA (sncRNA) 5' transfer RNA (tRNA) half
cagctatgctcaccac

SEQ ID NO: 18448 - DNA, 23 bp, Artificial Sequence
  synthetic circulating small noncoding RNA (sncRNA) 5' transfer RNA (tRNA) half
aaaaggcaagtgcattggccggg

SEQ ID NO: 18449 - DNA, 34 bp, Artificial Sequence
  synthetic circulating small noncoding RNA (sncRNA) 5' transfer RNA (tRNA) half
tgcagaaggtcctgagtttgagccccagtggaac

SEQ ID NO: 18450 - DNA, 16 bp, Artificial Sequence
  synthetic circulating small noncoding RNA (sncRNA) 5' transfer RNA (tRNA) half
agcgagcagggttcga

SEQ ID NO: 18451 - DNA, 21 bp, Artificial Sequence
  synthetic circulating small noncoding RNA (sncRNA) 5' transfer RNA (tRNA) half
cgaatcccttcgtggttggta

SEQ ID NO: 18452 - DNA, 8 bp, Artificial Sequence
  synthetic circulating small noncoding RNA (sncRNA) 5' transfer RNA (tRNA) half
gcccgaac

SEQ ID NO: 18453 - DNA, 15 bp, Artificial Sequence
  synthetic circulating small noncoding RNA (sncRNA) 5' transfer RNA (tRNA) half
ccaaggtcgcgggtt

SEQ ID NO: 18454 - DNA, 32 bp, Artificial Sequence
  synthetic circulating small noncoding RNA (sncRNA) 5' transfer RNA (tRNA) half
ttgccccctctgaggttcgaactcaggacctt

SEQ ID NO: 18455 - DNA, 24 bp, Artificial Sequence
  synthetic circulating small noncoding RNA (sncRNA) 5' transfer RNA (tRNA) half
gggattgtgggttcgagtcccatc

SEQ ID NO: 18456 - DNA, 19 bp, Artificial Sequence
  synthetic circulating small noncoding RNA (sncRNA) 5' transfer RNA (tRNA) half
tctaccactgaaccaccaa

SEQ ID NO: 18457 - DNA, 12 bp, Artificial Sequence
  synthetic circulating small noncoding RNA (sncRNA) 5' transfer RNA (tRNA) half
ctgaccgggaat

SEQ ID NO: 18458 - DNA, 13 bp, Artificial Sequence
  synthetic circulating small noncoding RNA (sncRNA) 5' transfer RNA (tRNA) half
tagctcagtcggt

SEQ ID NO: 18459 - DNA, 38 bp, Artificial Sequence
  synthetic circulating small noncoding RNA (sncRNA) 5' transfer RNA (tRNA) half
ggagctggggattgtgggttcgagtcccatctgggtcg

SEQ ID NO: 18460 - DNA, 33 bp, Artificial Sequence
  synthetic circulating small noncoding RNA (sncRNA) 5' transfer RNA (tRNA) half
aaagtctgatgctctaccgactgagctatccgg

SEQ ID NO: 18461 - DNA, 23 bp, Artificial Sequence
  synthetic circulating small noncoding RNA (sncRNA) 5' transfer RNA (tRNA) half
gaacgctgccgtccctgggtggg

SEQ ID NO: 18462 - DNA, 16 bp, Artificial Sequence
  synthetic circulating small noncoding RNA (sncRNA) 5' transfer RNA (tRNA) half
accgacgaggatggga

SEQ ID NO: 18463 - DNA, 39 bp, Artificial Sequence
  synthetic circulating small noncoding RNA (sncRNA) 5' transfer RNA (tRNA) half
agctgccgaaacccgggatcgaaccagggacctttagat

SEQ ID NO: 18464 - DNA, 22 bp, Artificial Sequence
  synthetic circulating small noncoding RNA (sncRNA) 5' transfer RNA (tRNA) half
gtaaaccgaagatcgcgggttc

SEQ ID NO: 18465 - DNA, 30 bp, Artificial Sequence
  synthetic circulating small noncoding RNA (sncRNA) 5' transfer RNA (tRNA) half
accggggacctcttgatctgcagtcaaatg

SEQ ID NO: 18466 - DNA, 23 bp, Artificial Sequence
  synthetic circulating small noncoding RNA (sncRNA) 5' transfer RNA (tRNA) half
gtttcgatccatcgacctctggg

SEQ ID NO: 18467 - DNA, 40 bp, Artificial Sequence
  synthetic circulating small noncoding RNA (sncRNA) 5' transfer RNA (tRNA) half
tccattggggtttccccgcgcaggttcgaatcctgccgac

SEQ ID NO: 18468 - DNA, 10 bp, Artificial Sequence
  synthetic circulating small noncoding RNA (sncRNA) 5' transfer RNA (tRNA) half
tcgaacccgc

SEQ ID NO: 18469 - DNA, 21 bp, Artificial Sequence
  synthetic circulating small noncoding RNA (sncRNA) 5' transfer RNA (tRNA) half
aatcccacttctgacacagtt

SEQ ID NO: 18470 - DNA, 16 bp, Artificial Sequence
  synthetic circulating small noncoding RNA (sncRNA) 5' transfer RNA (tRNA) half
ctgatgctctaccgac

SEQ ID NO: 18471 - DNA, 15 bp, Artificial Sequence
  synthetic circulating small noncoding RNA (sncRNA) 5' transfer RNA (tRNA) half
aggccccagcgagat

SEQ ID NO: 18472 - DNA, 18 bp, Artificial Sequence
  synthetic circulating small noncoding RNA (sncRNA) 5' transfer RNA (tRNA) half
ttagatccaatgggcgga

SEQ ID NO: 18473 - DNA, 23 bp, Artificial Sequence
  synthetic circulating small noncoding RNA (sncRNA) 5' transfer RNA (tRNA) half
ctggattcagagtccagagtgct

SEQ ID NO: 18474 - DNA, 34 bp, Artificial Sequence
  synthetic circulating small noncoding RNA (sncRNA) 5' transfer RNA (tRNA) half
aaagacctgtacattccgagccagccaggagtcg

SEQ ID NO: 18475 - DNA, 34 bp, Artificial Sequence
  synthetic circulating small noncoding RNA (sncRNA) 5' transfer RNA (tRNA) half
gactcgaacccccaatcttctgatccggaatcag

SEQ ID NO: 18476 - DNA, 22 bp, Artificial Sequence
  synthetic circulating small noncoding RNA (sncRNA) 5' transfer RNA (tRNA) half
aacccagaggtcgatggatcga

SEQ ID NO: 18477 - DNA, 28 bp, Artificial Sequence
  synthetic circulating small noncoding RNA (sncRNA) 5' transfer RNA (tRNA) half
gcgccaaatcctaaccactagaccacca

SEQ ID NO: 18478 - DNA, 8 bp, Artificial Sequence
  synthetic circulating small noncoding RNA (sncRNA) 5' transfer RNA (tRNA) half
gtcgaacc

SEQ ID NO: 18479 - DNA, 14 bp, Artificial Sequence
  synthetic circulating small noncoding RNA (sncRNA) 5' transfer RNA (tRNA) half
gaacccggaacctt

SEQ ID NO: 18480 - DNA, 31 bp, Artificial Sequence
  synthetic circulating small noncoding RNA (sncRNA) 5' transfer RNA (tRNA) half
ctggtggtctagtggttaggattcggcgctc

SEQ ID NO: 18481 - DNA, 21 bp, Artificial Sequence
  synthetic circulating small noncoding RNA (sncRNA) 5' transfer RNA (tRNA) half
cagggctcgtccgggatttga

SEQ ID NO: 18482 - DNA, 34 bp, Artificial Sequence
  synthetic circulating small noncoding RNA (sncRNA) 5' transfer RNA (tRNA) half
atcagaagattccaggttcgactcctggctggct

SEQ ID NO: 18483 - DNA, 12 bp, Artificial Sequence
  synthetic circulating small noncoding RNA (sncRNA) 5' transfer RNA (tRNA) half
ggggagactgcg

SEQ ID NO: 18484 - DNA, 30 bp, Artificial Sequence
  synthetic circulating small noncoding RNA (sncRNA) 5' transfer RNA (tRNA) half
aagtctgatgctctaccgactgagctatcc

SEQ ID NO: 18485 - DNA, 13 bp, Artificial Sequence
  synthetic circulating small noncoding RNA (sncRNA) 5' transfer RNA (tRNA) half
gcctccccgtcgg

SEQ ID NO: 18486 - DNA, 28 bp, Artificial Sequence
  synthetic circulating small noncoding RNA (sncRNA) 5' transfer RNA (tRNA) half
gatcgtatagtggttagtactctgcgtt

SEQ ID NO: 18487 - DNA, 12 bp, Artificial Sequence
  synthetic circulating small noncoding RNA (sncRNA) 5' transfer RNA (tRNA) half
cgcgaccttggc

SEQ ID NO: 18488 - DNA, 32 bp, Artificial Sequence
  synthetic circulating small noncoding RNA (sncRNA) 5' transfer RNA (tRNA) half
tcggatcgctggattcagagtccagagtgcta

SEQ ID NO: 18489 - DNA, 22 bp, Artificial Sequence
  synthetic circulating small noncoding RNA (sncRNA) 5' transfer RNA (tRNA) half
aaaccgggcggaaacaagacac

SEQ ID NO: 18490 - DNA, 31 bp, Artificial Sequence
  synthetic circulating small noncoding RNA (sncRNA) 5' transfer RNA (tRNA) half
cgctggtgtagtggtatcatgcaagattccc

SEQ ID NO: 18491 - DNA, 21 bp, Artificial Sequence
  synthetic circulating small noncoding RNA (sncRNA) 5' transfer RNA (tRNA) half
ccttaaccactcggccatcct

SEQ ID NO: 18492 - DNA, 32 bp, Artificial Sequence
  synthetic circulating small noncoding RNA (sncRNA) 5' transfer RNA (tRNA) half
aagcgagcgctctaccatttgagctaatcccc

SEQ ID NO: 18493 - DNA, 37 bp, Artificial Sequence
  synthetic circulating small noncoding RNA (sncRNA) 5' transfer RNA (tRNA) half
gctgccgaaacccgggatcgaaccagggacctttaga

SEQ ID NO: 18494 - DNA, 20 bp, Artificial Sequence
  synthetic circulating small noncoding RNA (sncRNA) 5' transfer RNA (tRNA) half
atcctaaccactagaccacc

SEQ ID NO: 18495 - DNA, 36 bp, Artificial Sequence
  synthetic circulating small noncoding RNA (sncRNA) 5' transfer RNA (tRNA) half
aaaaccaggaatcctaaccgctagaccatatgggag

SEQ ID NO: 18496 - DNA, 18 bp, Artificial Sequence
  synthetic circulating small noncoding RNA (sncRNA) 5' transfer RNA (tRNA) half
gtttgggctcgtccggga

SEQ ID NO: 18497 - DNA, 16 bp, Artificial Sequence
  synthetic circulating small noncoding RNA (sncRNA) 5' transfer RNA (tRNA) half
cggattcgaaccgagg

SEQ ID NO: 18498 - DNA, 24 bp, Artificial Sequence
  synthetic circulating small noncoding RNA (sncRNA) 5' transfer RNA (tRNA) half
ccgtgactcggattcgaaccgagg

SEQ ID NO: 18499 - DNA, 22 bp, Artificial Sequence
  synthetic circulating small noncoding RNA (sncRNA) 5' transfer RNA (tRNA) half
tcgtataggggttagtactctg

SEQ ID NO: 18500 - DNA, 23 bp, Artificial Sequence
  synthetic circulating small noncoding RNA (sncRNA) 5' transfer RNA (tRNA) half
gttcgagtcccatctgggtcgca

SEQ ID NO: 18501 - DNA, 23 bp, Artificial Sequence
  synthetic circulating small noncoding RNA (sncRNA) 5' transfer RNA (tRNA) half
aagacttaaaaccttgttcccag

SEQ ID NO: 18502 - DNA, 32 bp, Artificial Sequence
  synthetic circulating small noncoding RNA (sncRNA) 5' transfer RNA (tRNA) half
agactggagcctaaatccagcgccttagaccg

SEQ ID NO: 18503 - DNA, 23 bp, Artificial Sequence
  synthetic circulating small noncoding RNA (sncRNA) 5' transfer RNA (tRNA) half
gccgcccgaacagggacttgaac

SEQ ID NO: 18504 - DNA, 33 bp, Artificial Sequence
  synthetic circulating small noncoding RNA (sncRNA) 5' transfer RNA (tRNA) half
ggttgctgcggccacaacgcagagtactaacca

SEQ ID NO: 18505 - DNA, 24 bp, Artificial Sequence
  synthetic circulating small noncoding RNA (sncRNA) 5' transfer RNA (tRNA) half
tgagttcgaacctcagagggggca

SEQ ID NO: 18506 - DNA, 17 bp, Artificial Sequence
  synthetic circulating small noncoding RNA (sncRNA) 5' transfer RNA (tRNA) half
cgatcccgggtttcggc

SEQ ID NO: 18507 - DNA, 28 bp, Artificial Sequence
  synthetic circulating small noncoding RNA (sncRNA) 5' transfer RNA (tRNA) half
gctggggattgtgggttcgagtcccatc

SEQ ID NO: 18508 - DNA, 39 bp, Artificial Sequence
  synthetic circulating small noncoding RNA (sncRNA) 5' transfer RNA (tRNA) half
tggtgagcatagctgccttccaagcagttgacccgggtt

SEQ ID NO: 18509 - DNA, 17 bp, Artificial Sequence
  synthetic circulating small noncoding RNA (sncRNA) 5' transfer RNA (tRNA) half
tgtatgaggccccgggt

SEQ ID NO: 18510 - DNA, 17 bp, Artificial Sequence
  synthetic circulating small noncoding RNA (sncRNA) 5' transfer RNA (tRNA) half
gtaaaccaggggtcgcg

SEQ ID NO: 18511 - DNA, 21 bp, Artificial Sequence
  synthetic circulating small noncoding RNA (sncRNA) 5' transfer RNA (tRNA) half
tcaccactatactaacgagga

SEQ ID NO: 18512 - DNA, 22 bp, Artificial Sequence
  synthetic circulating small noncoding RNA (sncRNA) 5' transfer RNA (tRNA) half
agctcagtcggtagagcatgag

SEQ ID NO: 18513 - DNA, 15 bp, Artificial Sequence
  synthetic circulating small noncoding RNA (sncRNA) 5' transfer RNA (tRNA) half
aattctcgcctgcca

SEQ ID NO: 18514 - DNA, 6 bp, Artificial Sequence
  synthetic circulating small noncoding RNA (sncRNA) 5' transfer RNA (tRNA) half
cgccgt

SEQ ID NO: 18515 - DNA, 16 bp, Artificial Sequence
  synthetic circulating small noncoding RNA (sncRNA) 5' transfer RNA (tRNA) half
gctcgtccgggatttg

SEQ ID NO: 18516 - DNA, 28 bp, Artificial Sequence
  synthetic circulating small noncoding RNA (sncRNA) 5' transfer RNA (tRNA) half
cgcggcccgggttcgattcccggtcagg

SEQ ID NO: 18517 - DNA, 19 bp, Artificial Sequence
  synthetic circulating small noncoding RNA (sncRNA) 5' transfer RNA (tRNA) half
tgacaggcggggatactca

SEQ ID NO: 18518 - DNA, 28 bp, Artificial Sequence
  synthetic circulating small noncoding RNA (sncRNA) 5' transfer RNA (tRNA) half
cagcggtgggattcgaacccacgccatc

SEQ ID NO: 18519 - DNA, 23 bp, Artificial Sequence
  synthetic circulating small noncoding RNA (sncRNA) 5' transfer RNA (tRNA) half
gccttaaccactcggccatcctg

SEQ ID NO: 18520 - DNA, 10 bp, Artificial Sequence
  synthetic circulating small noncoding RNA (sncRNA) 5' transfer RNA (tRNA) half
tcggtgggac

SEQ ID NO: 18521 - DNA, 14 bp, Artificial Sequence
  synthetic circulating small noncoding RNA (sncRNA) 5' transfer RNA (tRNA) half
tcccgggttcgact

SEQ ID NO: 18522 - DNA, 21 bp, Artificial Sequence
  synthetic circulating small noncoding RNA (sncRNA) 5' transfer RNA (tRNA) half
cgtcggggtcatctgtgttct

SEQ ID NO: 18523 - DNA, 16 bp, Artificial Sequence
  synthetic circulating small noncoding RNA (sncRNA) 5' transfer RNA (tRNA) half
ccgggtcaactgcttg

SEQ ID NO: 18524 - DNA, 21 bp, Artificial Sequence
  synthetic circulating small noncoding RNA (sncRNA) 5' transfer RNA (tRNA) half
caccctaagcgagaatcatac

SEQ ID NO: 18525 - DNA, 6 bp, Artificial Sequence
  synthetic circulating small noncoding RNA (sncRNA) 5' transfer RNA (tRNA) half
acgagg

SEQ ID NO: 18526 - DNA, 12 bp, Artificial Sequence
  synthetic circulating small noncoding RNA (sncRNA) 5' transfer RNA (tRNA) half
ccttaggtcgct

SEQ ID NO: 18527 - DNA, 36 bp, Artificial Sequence
  synthetic circulating small noncoding RNA (sncRNA) 5' transfer RNA (tRNA) half
ccgccgcggcccgggttcgattcccggtcagggaag

SEQ ID NO: 18528 - DNA, 16 bp, Artificial Sequence
  synthetic circulating small noncoding RNA (sncRNA) 5' transfer RNA (tRNA) half
tcgactcccggtgtgg

SEQ ID NO: 18529 - DNA, 11 bp, Artificial Sequence
  synthetic circulating small noncoding RNA (sncRNA) 5' transfer RNA (tRNA) half
gtctaggggta

SEQ ID NO: 18530 - DNA, 13 bp, Artificial Sequence
  synthetic circulating small noncoding RNA (sncRNA) 5' transfer RNA (tRNA) half
ggatttgaaccgg

SEQ ID NO: 18531 - DNA, 32 bp, Artificial Sequence
  synthetic circulating small noncoding RNA (sncRNA) 5' transfer RNA (tRNA) half
gctgtcagaagtgggattcgaacccacgcctc

SEQ ID NO: 18532 - DNA, 12 bp, Artificial Sequence
  synthetic circulating small noncoding RNA (sncRNA) 5' transfer RNA (tRNA) half
cgaactcacgac

SEQ ID NO: 18533 - DNA, 7 bp, Artificial Sequence
  synthetic circulating small noncoding RNA (sncRNA) 5' transfer RNA (tRNA) half
gggggat

SEQ ID NO: 18534 - DNA, 16 bp, Artificial Sequence
  synthetic circulating small noncoding RNA (sncRNA) 5' transfer RNA (tRNA) half
tcgaatcctgccgact

SEQ ID NO: 18535 - DNA, 20 bp, Artificial Sequence
  synthetic circulating small noncoding RNA (sncRNA) 5' transfer RNA (tRNA) half
cgagccccagtggaaccata

SEQ ID NO: 18536 - DNA, 17 bp, Artificial Sequence
  synthetic circulating small noncoding RNA (sncRNA) 5' transfer RNA (tRNA) half
cacgttcgcctcacacg

SEQ ID NO: 18537 - DNA, 5 bp, Artificial Sequence
  synthetic circulating small noncoding RNA (sncRNA) 5' transfer RNA (tRNA) half
cagcg

SEQ ID NO: 18538 - DNA, 17 bp, Artificial Sequence
  synthetic circulating small noncoding RNA (sncRNA) 5' transfer RNA (tRNA) half
tcgaaaccatcctctgc

SEQ ID NO: 18539 - DNA, 21 bp, Artificial Sequence
  synthetic circulating small noncoding RNA (sncRNA) 5' transfer RNA (tRNA) half
ggcatctccaagcagccggaa

SEQ ID NO: 18540 - DNA, 18 bp, Artificial Sequence
  synthetic circulating small noncoding RNA (sncRNA) 5' transfer RNA (tRNA) half
cgaacccatgcgtgcaga

SEQ ID NO: 18541 - DNA, 25 bp, Artificial Sequence
  synthetic circulating small noncoding RNA (sncRNA) 5' transfer RNA (tRNA) half
cgtgggttcgagccccacgttgggc

SEQ ID NO: 18542 - DNA, 19 bp, Artificial Sequence
  synthetic circulating small noncoding RNA (sncRNA) 5' transfer RNA (tRNA) half
gagggggcacccggatttg

SEQ ID NO: 18543 - DNA, 20 bp, Artificial Sequence
  synthetic circulating small noncoding RNA (sncRNA) 5' transfer RNA (tRNA) half
cgagccaggtaggagtcgaa

SEQ ID NO: 18544 - DNA, 27 bp, Artificial Sequence
  synthetic circulating small noncoding RNA (sncRNA) 5' transfer RNA (tRNA) half
cgccttagaccactcggccacgctacc

SEQ ID NO: 18545 - DNA, 29 bp, Artificial Sequence
  synthetic circulating small noncoding RNA (sncRNA) 5' transfer RNA (tRNA) half
ggactcaaagtccagtgtgctaaccatta

SEQ ID NO: 18546 - DNA, 7 bp, Artificial Sequence
  synthetic circulating small noncoding RNA (sncRNA) 5' transfer RNA (tRNA) half
acggaca

SEQ ID NO: 18547 - DNA, 13 bp, Artificial Sequence
  synthetic circulating small noncoding RNA (sncRNA) 5' transfer RNA (tRNA) half
ctctggactttga

SEQ ID NO: 18548 - DNA, 26 bp, Artificial Sequence
  synthetic circulating small noncoding RNA (sncRNA) 5' transfer RNA (tRNA) half
ctggttcgattccggctcgaaggaaa

SEQ ID NO: 18549 - DNA, 15 bp, Artificial Sequence
  synthetic circulating small noncoding RNA (sncRNA) 5' transfer RNA (tRNA) half
cctaatggataaggc

SEQ ID NO: 18550 - DNA, 45 bp, Artificial Sequence
  synthetic circulating small noncoding RNA (sncRNA) 5' transfer RNA (tRNA) half
ggtctagtggttaggattcggcgctctcaccgccgcggcccgggt

SEQ ID NO: 18551 - DNA, 36 bp, Artificial Sequence
  synthetic circulating small noncoding RNA (sncRNA) 5' transfer RNA (tRNA) half
taccccgggtgggactcgaacccacaatccctggct

SEQ ID NO: 18552 - DNA, 16 bp, Artificial Sequence
  synthetic circulating small noncoding RNA (sncRNA) 5' transfer RNA (tRNA) half
cccgggccgcctgggt

SEQ ID NO: 18553 - DNA, 28 bp, Artificial Sequence
  synthetic circulating small noncoding RNA (sncRNA) 5' transfer RNA (tRNA) half
gaggatggtttcgatccatcgacctctg

SEQ ID NO: 18554 - DNA, 35 bp, Artificial Sequence
  synthetic circulating small noncoding RNA (sncRNA) 5' transfer RNA (tRNA) half
tccagagtgctaaccattacaccatggaaccccac

SEQ ID NO: 18555 - DNA, 29 bp, Artificial Sequence
  synthetic circulating small noncoding RNA (sncRNA) 5' transfer RNA (tRNA) half
tcctcgttagtatagtggtgagtatcccc

SEQ ID NO: 18556 - DNA, 25 bp, Artificial Sequence
  synthetic circulating small noncoding RNA (sncRNA) 5' transfer RNA (tRNA) half
gaaggcagctatgctcaccactata

SEQ ID NO: 18557 - DNA, 36 bp, Artificial Sequence
  synthetic circulating small noncoding RNA (sncRNA) 5' transfer RNA (tRNA) half
tgtggaggcgtgggttcgaatcccacttctgacaca

SEQ ID NO: 18558 - DNA, 9 bp, Artificial Sequence
  synthetic circulating small noncoding RNA (sncRNA) 5' transfer RNA (tRNA) half
tcgaatccc

SEQ ID NO: 18559 - DNA, 21 bp, Artificial Sequence
  synthetic circulating small noncoding RNA (sncRNA) 5' transfer RNA (tRNA) half
ttcgactcctggctggctcgt

SEQ ID NO: 18560 - DNA, 12 bp, Artificial Sequence
  synthetic circulating small noncoding RNA (sncRNA) 5' transfer RNA (tRNA) half
cggggacctttc

SEQ ID NO: 18561 - DNA, 41 bp, Artificial Sequence
  synthetic circulating small noncoding RNA (sncRNA) 5' transfer RNA (tRNA) half
gttagcactctggactctgaatccagcgacccgagttcaaa

SEQ ID NO: 18562 - DNA, 25 bp, Artificial Sequence
  synthetic circulating small noncoding RNA (sncRNA) 5' transfer RNA (tRNA) half
tagcggttaggattcctggttttca

SEQ ID NO: 18563 - DNA, 26 bp, Artificial Sequence
  synthetic circulating small noncoding RNA (sncRNA) 5' transfer RNA (tRNA) half
tggtgtaatggtgagcactctggact

SEQ ID NO: 18564 - DNA, 23 bp, Artificial Sequence
  synthetic circulating small noncoding RNA (sncRNA) 5' transfer RNA (tRNA) half
cgagttcaaatctcggtgggacc

SEQ ID NO: 18565 - DNA, 22 bp, Artificial Sequence
  synthetic circulating small noncoding RNA (sncRNA) 5' transfer RNA (tRNA) half
gggggcacccggatttgaaccg

SEQ ID NO: 18566 - DNA, 24 bp, Artificial Sequence
  synthetic circulating small noncoding RNA (sncRNA) 5' transfer RNA (tRNA) half
ggttcaatggtagaattctcgcct

SEQ ID NO: 18567 - DNA, 22 bp, Artificial Sequence
  synthetic circulating small noncoding RNA (sncRNA) 5' transfer RNA (tRNA) half
tagctcagtcggtagagcatca

SEQ ID NO: 18568 - DNA, 11 bp, Artificial Sequence
  synthetic circulating small noncoding RNA (sncRNA) 5' transfer RNA (tRNA) half
cgggagaccgg

SEQ ID NO: 18569 - DNA, 21 bp, Artificial Sequence
  synthetic circulating small noncoding RNA (sncRNA) 5' transfer RNA (tRNA) half
caaatcccggacgagccccat

SEQ ID NO: 18570 - DNA, 20 bp, Artificial Sequence
  synthetic circulating small noncoding RNA (sncRNA) 5' transfer RNA (tRNA) half
aatccgagtcacggcagtat

SEQ ID NO: 18571 - DNA, 24 bp, Artificial Sequence
  synthetic circulating small noncoding RNA (sncRNA) 5' transfer RNA (tRNA) half
aacccagaggtcgatggatcgaaa

SEQ ID NO: 18572 - DNA, 19 bp, Artificial Sequence
  synthetic circulating small noncoding RNA (sncRNA) 5' transfer RNA (tRNA) half
tcggggaatcgaaccccgg

SEQ ID NO: 18573 - DNA, 30 bp, Artificial Sequence
  synthetic circulating small noncoding RNA (sncRNA) 5' transfer RNA (tRNA) half
catggtctagcggttaggattcctggtttt

SEQ ID NO: 18574 - DNA, 23 bp, Artificial Sequence
  synthetic circulating small noncoding RNA (sncRNA) 5' transfer RNA (tRNA) half
acaatgcagagtactaaccacta

SEQ ID NO: 18575 - DNA, 21 bp, Artificial Sequence
  synthetic circulating small noncoding RNA (sncRNA) 5' transfer RNA (tRNA) half
tctacccactgagctatctgg

SEQ ID NO: 18576 - DNA, 25 bp, Artificial Sequence
  synthetic circulating small noncoding RNA (sncRNA) 5' transfer RNA (tRNA) half
tggagatgccggggatcgaacccgg

SEQ ID NO: 18577 - DNA, 21 bp, Artificial Sequence
  synthetic circulating small noncoding RNA (sncRNA) 5' transfer RNA (tRNA) half
ggttcgaatcctgccgactac

SEQ ID NO: 18578 - DNA, 25 bp, Artificial Sequence
  synthetic circulating small noncoding RNA (sncRNA) 5' transfer RNA (tRNA) half
cgcctgtcacgcgggagaccggggt

SEQ ID NO: 18579 - DNA, 23 bp, Artificial Sequence
  synthetic circulating small noncoding RNA (sncRNA) 5' transfer RNA (tRNA) half
ctcgagccaggtaggagtcgaac

SEQ ID NO: 18580 - DNA, 16 bp, Artificial Sequence
  synthetic circulating small noncoding RNA (sncRNA) 5' transfer RNA (tRNA) half
ccacgcctccattcgg

SEQ ID NO: 18581 - DNA, 31 bp, Artificial Sequence
  synthetic circulating small noncoding RNA (sncRNA) 5' transfer RNA (tRNA) half
tgcgctctaccactgagctacatccccactc

SEQ ID NO: 18582 - DNA, 11 bp, Artificial Sequence
  synthetic circulating small noncoding RNA (sncRNA) 5' transfer RNA (tRNA) half
ccccgggttcg

SEQ ID NO: 18583 - DNA, 17 bp, Artificial Sequence
  synthetic circulating small noncoding RNA (sncRNA) 5' transfer RNA (tRNA) half
gagtatccccgcctgtc

SEQ ID NO: 18584 - DNA, 20 bp, Artificial Sequence
  synthetic circulating small noncoding RNA (sncRNA) 5' transfer RNA (tRNA) half
ggttcgaaccccgtccgtgc

SEQ ID NO: 18585 - DNA, 33 bp, Artificial Sequence
  synthetic circulating small noncoding RNA (sncRNA) 5' transfer RNA (tRNA) half
tagcactctggactctgaatccagcgatccgag

SEQ ID NO: 18586 - DNA, 13 bp, Artificial Sequence
  synthetic circulating small noncoding RNA (sncRNA) 5' transfer RNA (tRNA) half
tccagcgatccga

SEQ ID NO: 18587 - DNA, 21 bp, Artificial Sequence
  synthetic circulating small noncoding RNA (sncRNA) 5' transfer RNA (tRNA) half
cttccctgaccgggaatcgaa

SEQ ID NO: 18588 - DNA, 23 bp, Artificial Sequence
  synthetic circulating small noncoding RNA (sncRNA) 5' transfer RNA (tRNA) half
cagttgtcaggagtgggattcga

SEQ ID NO: 18589 - DNA, 15 bp, Artificial Sequence
  synthetic circulating small noncoding RNA (sncRNA) 5' transfer RNA (tRNA) half
ttagtactctgcgtt

SEQ ID NO: 18590 - DNA, 22 bp, Artificial Sequence
  synthetic circulating small noncoding RNA (sncRNA) 5' transfer RNA (tRNA) half
taaccgaaaggttggtggttcg

SEQ ID NO: 18591 - DNA, 22 bp, Artificial Sequence
  synthetic circulating small noncoding RNA (sncRNA) 5' transfer RNA (tRNA) half
gttatcacgttcgcctcacacg

SEQ ID NO: 18592 - DNA, 39 bp, Artificial Sequence
  synthetic circulating small noncoding RNA (sncRNA) 5' transfer RNA (tRNA) half
ctcgagccaggtaggagtcgaacctacaatcttctgatc

SEQ ID NO: 18593 - DNA, 19 bp, Artificial Sequence
  synthetic circulating small noncoding RNA (sncRNA) 5' transfer RNA (tRNA) half
cagctatgctcaccactat

SEQ ID NO: 18594 - DNA, 21 bp, Artificial Sequence
  synthetic circulating small noncoding RNA (sncRNA) 5' transfer RNA (tRNA) half
tcggctgttaaccgaaaggtt

SEQ ID NO: 18595 - DNA, 17 bp, Artificial Sequence
  synthetic circulating small noncoding RNA (sncRNA) 5' transfer RNA (tRNA) half
caggatctcctgtttac

SEQ ID NO: 18596 - DNA, 40 bp, Artificial Sequence
  synthetic circulating small noncoding RNA (sncRNA) 5' transfer RNA (tRNA) half
cacgcgaaaggtccccggttcgaaaccgggcggaaacaat

SEQ ID NO: 18597 - DNA, 14 bp, Artificial Sequence
  synthetic circulating small noncoding RNA (sncRNA) 5' transfer RNA (tRNA) half
ggatggccgagcgg

SEQ ID NO: 18598 - DNA, 25 bp, Artificial Sequence
  synthetic circulating small noncoding RNA (sncRNA) 5' transfer RNA (tRNA) half
gcgagaattctaccattgaactacc

SEQ ID NO: 18599 - DNA, 31 bp, Artificial Sequence
  synthetic circulating small noncoding RNA (sncRNA) 5' transfer RNA (tRNA) half
tgctgggcccataacccagaggtcgatggat

SEQ ID NO: 18600 - DNA, 18 bp, Artificial Sequence
  synthetic circulating small noncoding RNA (sncRNA) 5' transfer RNA (tRNA) half
gcgcaggttcgaatcctg

SEQ ID NO: 18601 - DNA, 8 bp, Artificial Sequence
  synthetic circulating small noncoding RNA (sncRNA) 5' transfer RNA (tRNA) half
ccgaacgc

SEQ ID NO: 18602 - DNA, 10 bp, Artificial Sequence
  synthetic circulating small noncoding RNA (sncRNA) 5' transfer RNA (tRNA) half
cagcggtgcc

SEQ ID NO: 18603 - DNA, 36 bp, Artificial Sequence
  synthetic circulating small noncoding RNA (sncRNA) 5' transfer RNA (tRNA) half
cgccgtgatcgtatagtggttagtactctgcgttgt

SEQ ID NO: 18604 - DNA, 23 bp, Artificial Sequence
  synthetic circulating small noncoding RNA (sncRNA) 5' transfer RNA (tRNA) half
ctctaccgactgagctagccggg

SEQ ID NO: 18605 - DNA, 33 bp, Artificial Sequence
  synthetic circulating small noncoding RNA (sncRNA) 5' transfer RNA (tRNA) half
cgcgggaggcccgggttcggttcccggccaatg

SEQ ID NO: 18606 - DNA, 14 bp, Artificial Sequence
  synthetic circulating small noncoding RNA (sncRNA) 5' transfer RNA (tRNA) half
ccctgaccgggaat

SEQ ID NO: 18607 - DNA, 32 bp, Artificial Sequence
  synthetic circulating small noncoding RNA (sncRNA) 5' transfer RNA (tRNA) half
gaagattccaggttcgactcctggctggctcg

SEQ ID NO: 18608 - DNA, 32 bp, Artificial Sequence
  synthetic circulating small noncoding RNA (sncRNA) 5' transfer RNA (tRNA) half
gacaggcggggatactcaccactatactaacg

SEQ ID NO: 18609 - DNA, 14 bp, Artificial Sequence
  synthetic circulating small noncoding RNA (sncRNA) 5' transfer RNA (tRNA) half
cgagaggtccccgg

SEQ ID NO: 18610 - DNA, 32 bp, Artificial Sequence
  synthetic circulating small noncoding RNA (sncRNA) 5' transfer RNA (tRNA) half
gtgatcgtatagtggttagtactctgcgttgt

SEQ ID NO: 18611 - DNA, 11 bp, Artificial Sequence
  synthetic circulating small noncoding RNA (sncRNA) 5' transfer RNA (tRNA) half
tcgcagtctcc

SEQ ID NO: 18612 - DNA, 26 bp, Artificial Sequence
  synthetic circulating small noncoding RNA (sncRNA) 5' transfer RNA (tRNA) half
caccccaggtgggactcgaacccaca

SEQ ID NO: 18613 - DNA, 27 bp, Artificial Sequence
  synthetic circulating small noncoding RNA (sncRNA) 5' transfer RNA (tRNA) half
agagtccagagtgctaaccattacacc

SEQ ID NO: 18614 - DNA, 45 bp, Artificial Sequence
  synthetic circulating small noncoding RNA (sncRNA) 5' transfer RNA (tRNA) half
tgtggcagcggtgggattcgaacccacgccatcgaaatgactgga

SEQ ID NO: 18615 - DNA, 14 bp, Artificial Sequence
  synthetic circulating small noncoding RNA (sncRNA) 5' transfer RNA (tRNA) half
atcccactcctgac

SEQ ID NO: 18616 - DNA, 34 bp, Artificial Sequence
  synthetic circulating small noncoding RNA (sncRNA) 5' transfer RNA (tRNA) half
ttccctggtggtctagtggttaggattcggcgct

SEQ ID NO: 18617 - DNA, 13 bp, Artificial Sequence
  synthetic circulating small noncoding RNA (sncRNA) 5' transfer RNA (tRNA) half
cccggtgtgggaa

SEQ ID NO: 18618 - DNA, 23 bp, Artificial Sequence
  synthetic circulating small noncoding RNA (sncRNA) 5' transfer RNA (tRNA) half
cgggggtgtagctcagtggtaga

SEQ ID NO: 18619 - DNA, 40 bp, Artificial Sequence
  synthetic circulating small noncoding RNA (sncRNA) 5' transfer RNA (tRNA) half
gattcagagtccagagtgctaaccattacaccatggaacc

SEQ ID NO: 18620 - DNA, 8 bp, Artificial Sequence
  synthetic circulating small noncoding RNA (sncRNA) 5' transfer RNA (tRNA) half
tcgaatcc

SEQ ID NO: 18621 - DNA, 19 bp, Artificial Sequence
  synthetic circulating small noncoding RNA (sncRNA) 5' transfer RNA (tRNA) half
aatggtagagcgctcgctt

SEQ ID NO: 18622 - DNA, 33 bp, Artificial Sequence
  synthetic circulating small noncoding RNA (sncRNA) 5' transfer RNA (tRNA) half
gccgaacgcgctaaccgattgcgccacagagac

SEQ ID NO: 18623 - DNA, 11 bp, Artificial Sequence
  synthetic circulating small noncoding RNA (sncRNA) 5' transfer RNA (tRNA) half
atccgggtgcc

SEQ ID NO: 18624 - DNA, 36 bp, Artificial Sequence
  synthetic circulating small noncoding RNA (sncRNA) 5' transfer RNA (tRNA) half
caggagatcctgggttcgaatcccagtggggcctgg

SEQ ID NO: 18625 - DNA, 15 bp, Artificial Sequence
  synthetic circulating small noncoding RNA (sncRNA) 5' transfer RNA (tRNA) half
gattcccggtcaggg

SEQ ID NO: 18626 - DNA, 19 bp, Artificial Sequence
  synthetic circulating small noncoding RNA (sncRNA) 5' transfer RNA (tRNA) half
atcccggacgagccctgaa

SEQ ID NO: 18627 - DNA, 28 bp, Artificial Sequence
  synthetic circulating small noncoding RNA (sncRNA) 5' transfer RNA (tRNA) half
ttcccacaccgggagtcgaacccgggcc

SEQ ID NO: 18628 - DNA, 7 bp, Artificial Sequence
  synthetic circulating small noncoding RNA (sncRNA) 5' transfer RNA (tRNA) half
gaccgcg

SEQ ID NO: 18629 - DNA, 22 bp, Artificial Sequence
  synthetic circulating small noncoding RNA (sncRNA) 5' transfer RNA (tRNA) half
cgcacccgaagcgagaatcata

SEQ ID NO: 18630 - DNA, 28 bp, Artificial Sequence
  synthetic circulating small noncoding RNA (sncRNA) 5' transfer RNA (tRNA) half
agtctcatgctctaccaactgagctagc

SEQ ID NO: 18631 - DNA, 18 bp, Artificial Sequence
  synthetic circulating small noncoding RNA (sncRNA) 5' transfer RNA (tRNA) half
tggtagagcgcgcgcttc

SEQ ID NO: 18632 - DNA, 26 bp, Artificial Sequence
  synthetic circulating small noncoding RNA (sncRNA) 5' transfer RNA (tRNA) half
taaaagtctgatgctctaccgactga

SEQ ID NO: 18633 - DNA, 19 bp, Artificial Sequence
  synthetic circulating small noncoding RNA (sncRNA) 5' transfer RNA (tRNA) half
attgcaggttcgagtcctg

SEQ ID NO: 18634 - DNA, 17 bp, Artificial Sequence
  synthetic circulating small noncoding RNA (sncRNA) 5' transfer RNA (tRNA) half
gttcgattcccggccca

SEQ ID NO: 18635 - DNA, 19 bp, Artificial Sequence
  synthetic circulating small noncoding RNA (sncRNA) 5' transfer RNA (tRNA) half
gcccgtacggggatcgaac

SEQ ID NO: 18636 - DNA, 28 bp, Artificial Sequence
  synthetic circulating small noncoding RNA (sncRNA) 5' transfer RNA (tRNA) half
cgtcgagccagccaggagtcgaacctag

SEQ ID NO: 18637 - DNA, 12 bp, Artificial Sequence
  synthetic circulating small noncoding RNA (sncRNA) 5' transfer RNA (tRNA) half
acctccccgtcg

SEQ ID NO: 18638 - DNA, 12 bp, Artificial Sequence
  synthetic circulating small noncoding RNA (sncRNA) 5' transfer RNA (tRNA) half
cgaacccagggc

SEQ ID NO: 18639 - DNA, 21 bp, Artificial Sequence
  synthetic circulating small noncoding RNA (sncRNA) 5' transfer RNA (tRNA) half
gtccatcgccttaaccactcg

SEQ ID NO: 18640 - DNA, 23 bp, Artificial Sequence
  synthetic circulating small noncoding RNA (sncRNA) 5' transfer RNA (tRNA) half
tatggaggcgtgggttcgaatcc

SEQ ID NO: 18641 - DNA, 17 bp, Artificial Sequence
  synthetic circulating small noncoding RNA (sncRNA) 5' transfer RNA (tRNA) half
cccggggttcgattccc

SEQ ID NO: 18642 - DNA, 18 bp, Artificial Sequence
  synthetic circulating small noncoding RNA (sncRNA) 5' transfer RNA (tRNA) half
ctagtggtatgattctca

SEQ ID NO: 18643 - DNA, 38 bp, Artificial Sequence
  synthetic circulating small noncoding RNA (sncRNA) 5' transfer RNA (tRNA) half
ggtgagcactctggactctgaatccagcgatccgagtt

SEQ ID NO: 18644 - DNA, 25 bp, Artificial Sequence
  synthetic circulating small noncoding RNA (sncRNA) 5' transfer RNA (tRNA) half
aaccgggcggaaacagcaactttgt

SEQ ID NO: 18645 - DNA, 21 bp, Artificial Sequence
  synthetic circulating small noncoding RNA (sncRNA) 5' transfer RNA (tRNA) half
agtcccatgctgtaccgactg

SEQ ID NO: 18646 - DNA, 11 bp, Artificial Sequence
  synthetic circulating small noncoding RNA (sncRNA) 5' transfer RNA (tRNA) half
ggaggcccggg

SEQ ID NO: 18647 - DNA, 20 bp, Artificial Sequence
  synthetic circulating small noncoding RNA (sncRNA) 5' transfer RNA (tRNA) half
gggacctctcgcacccaaag

SEQ ID NO: 18648 - DNA, 19 bp, Artificial Sequence
  synthetic circulating small noncoding RNA (sncRNA) 5' transfer RNA (tRNA) half
aaaaccagggctcgtccgg

SEQ ID NO: 18649 - DNA, 8 bp, Artificial Sequence
  synthetic circulating small noncoding RNA (sncRNA) 5' transfer RNA (tRNA) half
cgacgcgc

SEQ ID NO: 18650 - DNA, 26 bp, Artificial Sequence
  synthetic circulating small noncoding RNA (sncRNA) 5' transfer RNA (tRNA) half
ggggtgtagctcagtggtagagcgca

SEQ ID NO: 18651 - DNA, 27 bp, Artificial Sequence
  synthetic circulating small noncoding RNA (sncRNA) 5' transfer RNA (tRNA) half
ggattcggcgctctcaccgccgcggcc

SEQ ID NO: 18652 - DNA, 34 bp, Artificial Sequence
  synthetic circulating small noncoding RNA (sncRNA) 5' transfer RNA (tRNA) half
cgggaggcccgggttcgattcccggcccatgcag

SEQ ID NO: 18653 - DNA, 19 bp, Artificial Sequence
  synthetic circulating small noncoding RNA (sncRNA) 5' transfer RNA (tRNA) half
taccaggagtggggttcga

SEQ ID NO: 18654 - DNA, 19 bp, Artificial Sequence
  synthetic circulating small noncoding RNA (sncRNA) 5' transfer RNA (tRNA) half
ttacacgcagaaggtcctg

SEQ ID NO: 18655 - DNA, 26 bp, Artificial Sequence
  synthetic circulating small noncoding RNA (sncRNA) 5' transfer RNA (tRNA) half
atccgagttcaaatctcggtgggacc

SEQ ID NO: 18656 - DNA, 45 bp, Artificial Sequence
  synthetic circulating small noncoding RNA (sncRNA) 5' transfer RNA (tRNA) half
cgaggatgggattcgaacccacgcgtgcaaagcacaatggattag

SEQ ID NO: 18657 - DNA, 19 bp, Artificial Sequence
  synthetic circulating small noncoding RNA (sncRNA) 5' transfer RNA (tRNA) half
atccatcgacctctgggtt

SEQ ID NO: 18658 - DNA, 22 bp, Artificial Sequence
  synthetic circulating small noncoding RNA (sncRNA) 5' transfer RNA (tRNA) half
gattcgaacctgcgcggggaga

SEQ ID NO: 18659 - DNA, 13 bp, Artificial Sequence
  synthetic circulating small noncoding RNA (sncRNA) 5' transfer RNA (tRNA) half
ttgagctaatccc

SEQ ID NO: 18660 - DNA, 22 bp, Artificial Sequence
  synthetic circulating small noncoding RNA (sncRNA) 5' transfer RNA (tRNA) half
agccgtttggagatgccgggga

SEQ ID NO: 18661 - DNA, 9 bp, Artificial Sequence
  synthetic circulating small noncoding RNA (sncRNA) 5' transfer RNA (tRNA) half
gtgtttccg

SEQ ID NO: 18662 - DNA, 10 bp, Artificial Sequence
  synthetic circulating small noncoding RNA (sncRNA) 5' transfer RNA (tRNA) half
caaggtcgcg

SEQ ID NO: 18663 - DNA, 26 bp, Artificial Sequence
  synthetic circulating small noncoding RNA (sncRNA) 5' transfer RNA (tRNA) half
aacccacgcccccgaagagactggag

SEQ ID NO: 18664 - DNA, 19 bp, Artificial Sequence
  synthetic circulating small noncoding RNA (sncRNA) 5' transfer RNA (tRNA) half
cgactccgccgggactcga

SEQ ID NO: 18665 - DNA, 34 bp, Artificial Sequence
  synthetic circulating small noncoding RNA (sncRNA) 5' transfer RNA (tRNA) half
tcgcaccctaagcgagaatcatacccctagacca

SEQ ID NO: 18666 - DNA, 15 bp, Artificial Sequence
  synthetic circulating small noncoding RNA (sncRNA) 5' transfer RNA (tRNA) half
gaacccacgccatcg

SEQ ID NO: 18667 - DNA, 18 bp, Artificial Sequence
  synthetic circulating small noncoding RNA (sncRNA) 5' transfer RNA (tRNA) half
atcccttcgtggttggta

SEQ ID NO: 18668 - DNA, 38 bp, Artificial Sequence
  synthetic circulating small noncoding RNA (sncRNA) 5' transfer RNA (tRNA) half
caccgccgcggcccgggttcgattcccggtcagggaag

SEQ ID NO: 18669 - DNA, 11 bp, Artificial Sequence
  synthetic circulating small noncoding RNA (sncRNA) 5' transfer RNA (tRNA) half
ggtgagagcgc

SEQ ID NO: 18670 - DNA, 10 bp, Artificial Sequence
  synthetic circulating small noncoding RNA (sncRNA) 5' transfer RNA (tRNA) half
ggggaatcga

SEQ ID NO: 18671 - DNA, 25 bp, Artificial Sequence
  synthetic circulating small noncoding RNA (sncRNA) 5' transfer RNA (tRNA) half
cgagttcaaatctcggtggaaccta

SEQ ID NO: 18672 - DNA, 26 bp, Artificial Sequence
  synthetic circulating small noncoding RNA (sncRNA) 5' transfer RNA (tRNA) half
cccacaccgggagtcgaacccgggcc

SEQ ID NO: 18673 - DNA, 8 bp, Artificial Sequence
  synthetic circulating small noncoding RNA (sncRNA) 5' transfer RNA (tRNA) half
acccgggg

SEQ ID NO: 18674 - DNA, 19 bp, Artificial Sequence
  synthetic circulating small noncoding RNA (sncRNA) 5' transfer RNA (tRNA) half
aggccgcggcggtgagagc

SEQ ID NO: 18675 - DNA, 17 bp, Artificial Sequence
  synthetic circulating small noncoding RNA (sncRNA) 5' transfer RNA (tRNA) half
tagtggttatcacgctc

SEQ ID NO: 18676 - DNA, 12 bp, Artificial Sequence
  synthetic circulating small noncoding RNA (sncRNA) 5' transfer RNA (tRNA) half
aaccgaggacct

SEQ ID NO: 18677 - DNA, 20 bp, Artificial Sequence
  synthetic circulating small noncoding RNA (sncRNA) 5' transfer RNA (tRNA) half
aaaaggccgagaccgtccct

SEQ ID NO: 18678 - DNA, 24 bp, Artificial Sequence
  synthetic circulating small noncoding RNA (sncRNA) 5' transfer RNA (tRNA) half
gggttcgaatcccatcctcgtcgt

SEQ ID NO: 18679 - DNA, 28 bp, Artificial Sequence
  synthetic circulating small noncoding RNA (sncRNA) 5' transfer RNA (tRNA) half
ggcccgggttcgactcccggtgtgggaa

SEQ ID NO: 18680 - DNA, 20 bp, Artificial Sequence
  synthetic circulating small noncoding RNA (sncRNA) 5' transfer RNA (tRNA) half
aggttcgactcctggctggc

SEQ ID NO: 18681 - DNA, 15 bp, Artificial Sequence
  synthetic circulating small noncoding RNA (sncRNA) 5' transfer RNA (tRNA) half
gtcagaagtgggatt

SEQ ID NO: 18682 - DNA, 19 bp, Artificial Sequence
  synthetic circulating small noncoding RNA (sncRNA) 5' transfer RNA (tRNA) half
ttcccattcttgcgacccg

SEQ ID NO: 18683 - DNA, 13 bp, Artificial Sequence
  synthetic circulating small noncoding RNA (sncRNA) 5' transfer RNA (tRNA) half
atgtccattggat

SEQ ID NO: 18684 - DNA, 28 bp, Artificial Sequence
  synthetic circulating small noncoding RNA (sncRNA) 5' transfer RNA (tRNA) half
gcggaagcgtgctgggcccataacccag

SEQ ID NO: 18685 - DNA, 10 bp, Artificial Sequence
  synthetic circulating small noncoding RNA (sncRNA) 5' transfer RNA (tRNA) half
tcccggacga

SEQ ID NO: 18686 - DNA, 16 bp, Artificial Sequence
  synthetic circulating small noncoding RNA (sncRNA) 5' transfer RNA (tRNA) half
atcctaaccgctagac

SEQ ID NO: 18687 - DNA, 20 bp, Artificial Sequence
  synthetic circulating small noncoding RNA (sncRNA) 5' transfer RNA (tRNA) half
ggaggcgtgggttcgaatcc

SEQ ID NO: 18688 - DNA, 33 bp, Artificial Sequence
  synthetic circulating small noncoding RNA (sncRNA) 5' transfer RNA (tRNA) half
ccgaacagggacttgaaccctggaccctcagat

SEQ ID NO: 18689 - DNA, 19 bp, Artificial Sequence
  synthetic circulating small noncoding RNA (sncRNA) 5' transfer RNA (tRNA) half
accagtagtcgtggccgag

SEQ ID NO: 18690 - DNA, 14 bp, Artificial Sequence
  synthetic circulating small noncoding RNA (sncRNA) 5' transfer RNA (tRNA) half
cggaagcgtgctgg

SEQ ID NO: 18691 - DNA, 35 bp, Artificial Sequence
  synthetic circulating small noncoding RNA (sncRNA) 5' transfer RNA (tRNA) half
ttccgagccagccaggagtcgaacctggaatcttc

SEQ ID NO: 18692 - DNA, 19 bp, Artificial Sequence
  synthetic circulating small noncoding RNA (sncRNA) 5' transfer RNA (tRNA) half
tctcaccgccgcggcccgg

SEQ ID NO: 18693 - DNA, 16 bp, Artificial Sequence
  synthetic circulating small noncoding RNA (sncRNA) 5' transfer RNA (tRNA) half
atgtttccgcccggtt

SEQ ID NO: 18694 - DNA, 25 bp, Artificial Sequence
  synthetic circulating small noncoding RNA (sncRNA) 5' transfer RNA (tRNA) half
tccaatgcgctatccattgcgccac

SEQ ID NO: 18695 - DNA, 35 bp, Artificial Sequence
  synthetic circulating small noncoding RNA (sncRNA) 5' transfer RNA (tRNA) half
tcgtccgggatttgaacccgggacctctcgcaccc

SEQ ID NO: 18696 - DNA, 17 bp, Artificial Sequence
  synthetic circulating small noncoding RNA (sncRNA) 5' transfer RNA (tRNA) half
ttcgactcccggtatgg

SEQ ID NO: 18697 - DNA, 18 bp, Artificial Sequence
  synthetic circulating small noncoding RNA (sncRNA) 5' transfer RNA (tRNA) half
cccctgagctataccccc

SEQ ID NO: 18698 - DNA, 23 bp, Artificial Sequence
  synthetic circulating small noncoding RNA (sncRNA) 5' transfer RNA (tRNA) half
aaaccgggcggaaacattacttt

SEQ ID NO: 18699 - DNA, 15 bp, Artificial Sequence
  synthetic circulating small noncoding RNA (sncRNA) 5' transfer RNA (tRNA) half
gcctaaccactagac

SEQ ID NO: 18700 - DNA, 10 bp, Artificial Sequence
  synthetic circulating small noncoding RNA (sncRNA) 5' transfer RNA (tRNA) half
ggcgagctac

SEQ ID NO: 18701 - DNA, 42 bp, Artificial Sequence
  synthetic circulating small noncoding RNA (sncRNA) 5' transfer RNA (tRNA) half
gctgtttagcgacagagtggttcaattccacctttcgggcgg

SEQ ID NO: 18702 - DNA, 23 bp, Artificial Sequence
  synthetic circulating small noncoding RNA (sncRNA) 5' transfer RNA (tRNA) half
ttccccgcgcaggttcgaatcct

SEQ ID NO: 18703 - DNA, 20 bp, Artificial Sequence
  synthetic circulating small noncoding RNA (sncRNA) 5' transfer RNA (tRNA) half
tcgaatcccagcggggcctt

SEQ ID NO: 18704 - DNA, 16 bp, Artificial Sequence
  synthetic circulating small noncoding RNA (sncRNA) 5' transfer RNA (tRNA) half
gctggggattgtgggt

SEQ ID NO: 18705 - DNA, 34 bp, Artificial Sequence
  synthetic circulating small noncoding RNA (sncRNA) 5' transfer RNA (tRNA) half
caccgccgcggcccgggttcgattcccggtcagg

SEQ ID NO: 18706 - DNA, 37 bp, Artificial Sequence
  synthetic circulating small noncoding RNA (sncRNA) 5' transfer RNA (tRNA) half
tcccattcttgcgacccgggttcgattcccgggcggc

SEQ ID NO: 18707 - DNA, 25 bp, Artificial Sequence
  synthetic circulating small noncoding RNA (sncRNA) 5' transfer RNA (tRNA) half
cgggttcgactcccggtgtgggaaa

SEQ ID NO: 18708 - DNA, 17 bp, Artificial Sequence
  synthetic circulating small noncoding RNA (sncRNA) 5' transfer RNA (tRNA) half
tggcaggcgagaattct

SEQ ID NO: 18709 - DNA, 16 bp, Artificial Sequence
  synthetic circulating small noncoding RNA (sncRNA) 5' transfer RNA (tRNA) half
aacccgcaacctttga

SEQ ID NO: 18710 - DNA, 32 bp, Artificial Sequence
  synthetic circulating small noncoding RNA (sncRNA) 5' transfer RNA (tRNA) half
gagatgccggggatcgaacccggggcctcata

SEQ ID NO: 18711 - DNA, 16 bp, Artificial Sequence
  synthetic circulating small noncoding RNA (sncRNA) 5' transfer RNA (tRNA) half
acacgcagccttctga

SEQ ID NO: 18712 - DNA, 21 bp, Artificial Sequence
  synthetic circulating small noncoding RNA (sncRNA) 5' transfer RNA (tRNA) half
aacctacaatcttctgatccg

SEQ ID NO: 18713 - DNA, 20 bp, Artificial Sequence
  synthetic circulating small noncoding RNA (sncRNA) 5' transfer RNA (tRNA) half
tcaaatcccggacgagccct

SEQ ID NO: 18714 - DNA, 12 bp, Artificial Sequence
  synthetic circulating small noncoding RNA (sncRNA) 5' transfer RNA (tRNA) half
agaccgctcggc

SEQ ID NO: 18715 - DNA, 25 bp, Artificial Sequence
  synthetic circulating small noncoding RNA (sncRNA) 5' transfer RNA (tRNA) half
ggttcaattccacctttcgggcggg

SEQ ID NO: 18716 - DNA, 12 bp, Artificial Sequence
  synthetic circulating small noncoding RNA (sncRNA) 5' transfer RNA (tRNA) half
cccagcacgctt

SEQ ID NO: 18717 - DNA, 35 bp, Artificial Sequence
  synthetic circulating small noncoding RNA (sncRNA) 5' transfer RNA (tRNA) half
attaccccgggtgggactcgaacccacaatccctg

SEQ ID NO: 18718 - DNA, 39 bp, Artificial Sequence
  synthetic circulating small noncoding RNA (sncRNA) 5' transfer RNA (tRNA) half
agcgactctggtgggactcgaacccacaacctttgaatg

SEQ ID NO: 18719 - DNA, 10 bp, Artificial Sequence
  synthetic circulating small noncoding RNA (sncRNA) 5' transfer RNA (tRNA) half
gctcatccgg

SEQ ID NO: 18720 - DNA, 18 bp, Artificial Sequence
  synthetic circulating small noncoding RNA (sncRNA) 5' transfer RNA (tRNA) half
aatggataaggcgtctga

SEQ ID NO: 18721 - DNA, 40 bp, Artificial Sequence
  synthetic circulating small noncoding RNA (sncRNA) 5' transfer RNA (tRNA) half
tctagtggttaggattcggcgctctcaccgccgcggcccg

SEQ ID NO: 18722 - DNA, 12 bp, Artificial Sequence
  synthetic circulating small noncoding RNA (sncRNA) 5' transfer RNA (tRNA) half
gttaggattcgg

SEQ ID NO: 18723 - DNA, 34 bp, Artificial Sequence
  synthetic circulating small noncoding RNA (sncRNA) 5' transfer RNA (tRNA) half
tcccataccgggagtcgaacccgggccgcctggg

SEQ ID NO: 18724 - DNA, 35 bp, Artificial Sequence
  synthetic circulating small noncoding RNA (sncRNA) 5' transfer RNA (tRNA) half
cgtgtttccgcccggtttcgaaccggggacctttc

SEQ ID NO: 18725 - DNA, 43 bp, Artificial Sequence
  synthetic circulating small noncoding RNA (sncRNA) 5' transfer RNA (tRNA) half
cgacgaggatgggattcgaacccacgcgtgcaaagcacaatgg

SEQ ID NO: 18726 - DNA, 29 bp, Artificial Sequence
  synthetic circulating small noncoding RNA (sncRNA) 5' transfer RNA (tRNA) half
tggttaggattcggcgctctcaccgccgc

SEQ ID NO: 18727 - DNA, 16 bp, Artificial Sequence
  synthetic circulating small noncoding RNA (sncRNA) 5' transfer RNA (tRNA) half
ctaggggtatgattct

SEQ ID NO: 18728 - DNA, 41 bp, Artificial Sequence
  synthetic circulating small noncoding RNA (sncRNA) 5' transfer RNA (tRNA) half
ggttagcactctggactctgaatccagcgatccgagttcaa

SEQ ID NO: 18729 - DNA, 20 bp, Artificial Sequence
  synthetic circulating small noncoding RNA (sncRNA) 5' transfer RNA (tRNA) half
gggaggcgagaattctacca

SEQ ID NO: 18730 - DNA, 10 bp, Artificial Sequence
  synthetic circulating small noncoding RNA (sncRNA) 5' transfer RNA (tRNA) half
cggaaacacc

SEQ ID NO: 18731 - DNA, 13 bp, Artificial Sequence
  synthetic circulating small noncoding RNA (sncRNA) 5' transfer RNA (tRNA) half
gttcgactcctgt

SEQ ID NO: 18732 - DNA, 20 bp, Artificial Sequence
  synthetic circulating small noncoding RNA (sncRNA) 5' transfer RNA (tRNA) half
cgggccgcctgggtgaaaac

SEQ ID NO: 18733 - DNA, 17 bp, Artificial Sequence
  synthetic circulating small noncoding RNA (sncRNA) 5' transfer RNA (tRNA) half
tgagggggcacccggat

SEQ ID NO: 18734 - DNA, 23 bp, Artificial Sequence
  synthetic circulating small noncoding RNA (sncRNA) 5' transfer RNA (tRNA) half
ttcccggccaatgcaggtctcgt

SEQ ID NO: 18735 - DNA, 14 bp, Artificial Sequence
  synthetic circulating small noncoding RNA (sncRNA) 5' transfer RNA (tRNA) half
gccgcccgaacagg

SEQ ID NO: 18736 - DNA, 26 bp, Artificial Sequence
  synthetic circulating small noncoding RNA (sncRNA) 5' transfer RNA (tRNA) half
ggctagctcagtcggtagagcatgag

SEQ ID NO: 18737 - DNA, 10 bp, Artificial Sequence
  synthetic circulating small noncoding RNA (sncRNA) 5' transfer RNA (tRNA) half
ttcgaaccgg

SEQ ID NO: 18738 - DNA, 12 bp, Artificial Sequence
  synthetic circulating small noncoding RNA (sncRNA) 5' transfer RNA (tRNA) half
cgcctgtcacgc

SEQ ID NO: 18739 - DNA, 18 bp, Artificial Sequence
  synthetic circulating small noncoding RNA (sncRNA) 5' transfer RNA (tRNA) half
aaaatgttccgactccgc

SEQ ID NO: 18740 - DNA, 14 bp, Artificial Sequence
  synthetic circulating small noncoding RNA (sncRNA) 5' transfer RNA (tRNA) half
cgactctggcggga

SEQ ID NO: 18741 - DNA, 19 bp, Artificial Sequence
  synthetic circulating small noncoding RNA (sncRNA) 5' transfer RNA (tRNA) half
gattcccattcttgcgacc

SEQ ID NO: 18742 - DNA, 15 bp, Artificial Sequence
  synthetic circulating small noncoding RNA (sncRNA) 5' transfer RNA (tRNA) half
tggagggggcacccg

SEQ ID NO: 18743 - DNA, 10 bp, Artificial Sequence
  synthetic circulating small noncoding RNA (sncRNA) 5' transfer RNA (tRNA) half
ctcccgcgtg

SEQ ID NO: 18744 - DNA, 17 bp, Artificial Sequence
  synthetic circulating small noncoding RNA (sncRNA) 5' transfer RNA (tRNA) half
ggttcgattcccggccc

SEQ ID NO: 18745 - DNA, 35 bp, Artificial Sequence
  synthetic circulating small noncoding RNA (sncRNA) 5' transfer RNA (tRNA) half
tggccgggaatcgaacccgggcctcccgcgtggca

SEQ ID NO: 18746 - DNA, 26 bp, Artificial Sequence
  synthetic circulating small noncoding RNA (sncRNA) 5' transfer RNA (tRNA) half
gcggaagcgtgctgggcccataaccc

SEQ ID NO: 18747 - DNA, 19 bp, Artificial Sequence
  synthetic circulating small noncoding RNA (sncRNA) 5' transfer RNA (tRNA) half
ctgccgaaacccgggatcg

SEQ ID NO: 18748 - DNA, 15 bp, Artificial Sequence
  synthetic circulating small noncoding RNA (sncRNA) 5' transfer RNA (tRNA) half
ttcgactccggctcg

SEQ ID NO: 18749 - DNA, 42 bp, Artificial Sequence
  synthetic circulating small noncoding RNA (sncRNA) 5' transfer RNA (tRNA) half
aacccacgaccctgagattaagagtctcatgctctaccgact

SEQ ID NO: 18750 - DNA, 19 bp, Artificial Sequence
  synthetic circulating small noncoding RNA (sncRNA) 5' transfer RNA (tRNA) half
gatggccgagtggtctaag

SEQ ID NO: 18751 - DNA, 23 bp, Artificial Sequence
  synthetic circulating small noncoding RNA (sncRNA) 5' transfer RNA (tRNA) half
ggattcgaacccacgcctccatt

SEQ ID NO: 18752 - DNA, 22 bp, Artificial Sequence
  synthetic circulating small noncoding RNA (sncRNA) 5' transfer RNA (tRNA) half
ggttcgattcccggccaatgca

SEQ ID NO: 18753 - DNA, 12 bp, Artificial Sequence
  synthetic circulating small noncoding RNA (sncRNA) 5' transfer RNA (tRNA) half
cgcgcaggttcg

SEQ ID NO: 18754 - DNA, 16 bp, Artificial Sequence
  synthetic circulating small noncoding RNA (sncRNA) 5' transfer RNA (tRNA) half
tcagacgcgctaccat

SEQ ID NO: 18755 - DNA, 14 bp, Artificial Sequence
  synthetic circulating small noncoding RNA (sncRNA) 5' transfer RNA (tRNA) half
gttccttcgagccg

SEQ ID NO: 18756 - DNA, 23 bp, Artificial Sequence
  synthetic circulating small noncoding RNA (sncRNA) 5' transfer RNA (tRNA) half
agtcggtagagcatgagactctt

SEQ ID NO: 18757 - DNA, 15 bp, Artificial Sequence
  synthetic circulating small noncoding RNA (sncRNA) 5' transfer RNA (tRNA) half
cccgggacctctcgc

SEQ ID NO: 18758 - DNA, 32 bp, Artificial Sequence
  synthetic circulating small noncoding RNA (sncRNA) 5' transfer RNA (tRNA) half
gaacgcagcgccttagaccgctcggccatcct

SEQ ID NO: 18759 - DNA, 33 bp, Artificial Sequence
  synthetic circulating small noncoding RNA (sncRNA) 5' transfer RNA (tRNA) half
gaaaggtccccggttcgaaaccgggcggaaaca

SEQ ID NO: 18760 - DNA, 26 bp, Artificial Sequence
  synthetic circulating small noncoding RNA (sncRNA) 5' transfer RNA (tRNA) half
acctgtgcggggaaaccccattggat

SEQ ID NO: 18761 - DNA, 39 bp, Artificial Sequence
  synthetic circulating small noncoding RNA (sncRNA) 5' transfer RNA (tRNA) half
tgtgcttcccttcgatagctcagctggtagagcggagga

SEQ ID NO: 18762 - DNA, 35 bp, Artificial Sequence
  synthetic circulating small noncoding RNA (sncRNA) 5' transfer RNA (tRNA) half
ggcagtggtgggattcgaacccacgcctccgaaga

SEQ ID NO: 18763 - DNA, 21 bp, Artificial Sequence
  synthetic circulating small noncoding RNA (sncRNA) 5' transfer RNA (tRNA) half
gaactgtgcattggccgggaa

SEQ ID NO: 18764 - DNA, 15 bp, Artificial Sequence
  synthetic circulating small noncoding RNA (sncRNA) 5' transfer RNA (tRNA) half
ttcgaaccgaggttg

SEQ ID NO: 18765 - DNA, 15 bp, Artificial Sequence
  synthetic circulating small noncoding RNA (sncRNA) 5' transfer RNA (tRNA) half
gcgactctggtggga

SEQ ID NO: 18766 - DNA, 15 bp, Artificial Sequence
  synthetic circulating small noncoding RNA (sncRNA) 5' transfer RNA (tRNA) half
acccaggatctcctg

SEQ ID NO: 18767 - DNA, 28 bp, Artificial Sequence
  synthetic circulating small noncoding RNA (sncRNA) 5' transfer RNA (tRNA) half
tcccaccgtccctgggtgggctcgaacc

SEQ ID NO: 18768 - DNA, 21 bp, Artificial Sequence
  synthetic circulating small noncoding RNA (sncRNA) 5' transfer RNA (tRNA) half
cgcgaccttggcgttattagc

SEQ ID NO: 18769 - DNA, 22 bp, Artificial Sequence
  synthetic circulating small noncoding RNA (sncRNA) 5' transfer RNA (tRNA) half
gccgaaacccgggatcgaacca

SEQ ID NO: 18770 - DNA, 20 bp, Artificial Sequence
  synthetic circulating small noncoding RNA (sncRNA) 5' transfer RNA (tRNA) half
ggcggggatactaaccacta

SEQ ID NO: 18771 - DNA, 20 bp, Artificial Sequence
  synthetic circulating small noncoding RNA (sncRNA) 5' transfer RNA (tRNA) half
cctgtcacgcgggagaccgg

SEQ ID NO: 18772 - DNA, 17 bp, Artificial Sequence
  synthetic circulating small noncoding RNA (sncRNA) 5' transfer RNA (tRNA) half
gtcaggagtgggattcg

SEQ ID NO: 18773 - DNA, 18 bp, Artificial Sequence
  synthetic circulating small noncoding RNA (sncRNA) 5' transfer RNA (tRNA) half
ttctaccactgaaccacc

SEQ ID NO: 18774 - DNA, 17 bp, Artificial Sequence
  synthetic circulating small noncoding RNA (sncRNA) 5' transfer RNA (tRNA) half
cccacccagggacgacc

SEQ ID NO: 18775 - DNA, 37 bp, Artificial Sequence
  synthetic circulating small noncoding RNA (sncRNA) 5' transfer RNA (tRNA) half
cgtgagtttccgtagtgtagtggttatcacgttcgcc

SEQ ID NO: 18776 - DNA, 29 bp, Artificial Sequence
  synthetic circulating small noncoding RNA (sncRNA) 5' transfer RNA (tRNA) half
ggaggcccgggttcgattcccggcccatg

SEQ ID NO: 18777 - DNA, 24 bp, Artificial Sequence
  synthetic circulating small noncoding RNA (sncRNA) 5' transfer RNA (tRNA) half
tcgcaccctaagcgagaatcatac

SEQ ID NO: 18778 - DNA, 26 bp, Artificial Sequence
  synthetic circulating small noncoding RNA (sncRNA) 5' transfer RNA (tRNA) half
ggcctcccgcgtggcaggcgagaatt

SEQ ID NO: 18779 - DNA, 15 bp, Artificial Sequence
  synthetic circulating small noncoding RNA (sncRNA) 5' transfer RNA (tRNA) half
aagaggtccctggtt

SEQ ID NO: 18780 - DNA, 20 bp, Artificial Sequence
  synthetic circulating small noncoding RNA (sncRNA) 5' transfer RNA (tRNA) half
gatagctcagctggtagagc

SEQ ID NO: 18781 - DNA, 20 bp, Artificial Sequence
  synthetic circulating small noncoding RNA (sncRNA) 5' transfer RNA (tRNA) half
ctcatgctctaccgactgag

SEQ ID NO: 18782 - DNA, 34 bp, Artificial Sequence
  synthetic circulating small noncoding RNA (sncRNA) 5' transfer RNA (tRNA) half
gtcagaagtgggattcgaacccacgcctccattc

SEQ ID NO: 18783 - DNA, 17 bp, Artificial Sequence
  synthetic circulating small noncoding RNA (sncRNA) 5' transfer RNA (tRNA) half
gttcaaatccgggtgcc

SEQ ID NO: 18784 - DNA, 9 bp, Artificial Sequence
  synthetic circulating small noncoding RNA (sncRNA) 5' transfer RNA (tRNA) half
atccaggtg

SEQ ID NO: 18785 - DNA, 12 bp, Artificial Sequence
  synthetic circulating small noncoding RNA (sncRNA) 5' transfer RNA (tRNA) half
ctgggttcgatc

SEQ ID NO: 18786 - DNA, 24 bp, Artificial Sequence
  synthetic circulating small noncoding RNA (sncRNA) 5' transfer RNA (tRNA) half
tgtagtggttatcacgttcgccta

SEQ ID NO: 18787 - DNA, 37 bp, Artificial Sequence
  synthetic circulating small noncoding RNA (sncRNA) 5' transfer RNA (tRNA) half
cccaggcggcccgggttcgactcccggtgtgggaacg

SEQ ID NO: 18788 - DNA, 21 bp, Artificial Sequence
  synthetic circulating small noncoding RNA (sncRNA) 5' transfer RNA (tRNA) half
gtcctgccgcggtcgacttgt

SEQ ID NO: 18789 - DNA, 25 bp, Artificial Sequence
  synthetic circulating small noncoding RNA (sncRNA) 5' transfer RNA (tRNA) half
ggggattgtgggttcgagtcccatc

SEQ ID NO: 18790 - DNA, 22 bp, Artificial Sequence
  synthetic circulating small noncoding RNA (sncRNA) 5' transfer RNA (tRNA) half
actcgcgacccctggtttacaa

SEQ ID NO: 18791 - DNA, 27 bp, Artificial Sequence
  synthetic circulating small noncoding RNA (sncRNA) 5' transfer RNA (tRNA) half
gttggtggttcgagcccacccagggac

SEQ ID NO: 18792 - DNA, 29 bp, Artificial Sequence
  synthetic circulating small noncoding RNA (sncRNA) 5' transfer RNA (tRNA) half
ttccaggttcgactcctggctggctcgtt

SEQ ID NO: 18793 - DNA, 38 bp, Artificial Sequence
  synthetic circulating small noncoding RNA (sncRNA) 5' transfer RNA (tRNA) half
taagccagggattgtgggttcgagtcccacctggggtg

SEQ ID NO: 18794 - DNA, 23 bp, Artificial Sequence
  synthetic circulating small noncoding RNA (sncRNA) 5' transfer RNA (tRNA) half
agtcccacgctctaccaactgag

SEQ ID NO: 18795 - DNA, 14 bp, Artificial Sequence
  synthetic circulating small noncoding RNA (sncRNA) 5' transfer RNA (tRNA) half
cgattcccggccaa

SEQ ID NO: 18796 - DNA, 14 bp, Artificial Sequence
  synthetic circulating small noncoding RNA (sncRNA) 5' transfer RNA (tRNA) half
atgattctcggttt

SEQ ID NO: 18797 - DNA, 25 bp, Artificial Sequence
  synthetic circulating small noncoding RNA (sncRNA) 5' transfer RNA (tRNA) half
ttaagtccaacgccttaaccactcg

SEQ ID NO: 18798 - DNA, 30 bp, Artificial Sequence
  synthetic circulating small noncoding RNA (sncRNA) 5' transfer RNA (tRNA) half
agtcgcccggctagctcagtcggtagagca

SEQ ID NO: 18799 - DNA, 17 bp, Artificial Sequence
  synthetic circulating small noncoding RNA (sncRNA) 5' transfer RNA (tRNA) half
ccttaaccactcggcca

SEQ ID NO: 18800 - DNA, 39 bp, Artificial Sequence
  synthetic circulating small noncoding RNA (sncRNA) 5' transfer RNA (tRNA) half
ggtcgagccagccaggagtcgaacctagaatcttctgat

SEQ ID NO: 18801 - DNA, 21 bp, Artificial Sequence
  synthetic circulating small noncoding RNA (sncRNA) 5' transfer RNA (tRNA) half
ggcggggatactaaccactat

SEQ ID NO: 18802 - DNA, 19 bp, Artificial Sequence
  synthetic circulating small noncoding RNA (sncRNA) 5' transfer RNA (tRNA) half
ccaactaagccacggcgcc

SEQ ID NO: 18803 - DNA, 13 bp, Artificial Sequence
  synthetic circulating small noncoding RNA (sncRNA) 5' transfer RNA (tRNA) half
cacgcagaaggtc

SEQ ID NO: 18804 - DNA, 18 bp, Artificial Sequence
  synthetic circulating small noncoding RNA (sncRNA) 5' transfer RNA (tRNA) half
tagtggttatcacgttcg

SEQ ID NO: 18805 - DNA, 16 bp, Artificial Sequence
  synthetic circulating small noncoding RNA (sncRNA) 5' transfer RNA (tRNA) half
ccgccgcggcccgggt

SEQ ID NO: 18806 - DNA, 36 bp, Artificial Sequence
  synthetic circulating small noncoding RNA (sncRNA) 5' transfer RNA (tRNA) half
gtgaggtcccaccgagatttgaactcggatcgctgg

SEQ ID NO: 18807 - DNA, 14 bp, Artificial Sequence
  synthetic circulating small noncoding RNA (sncRNA) 5' transfer RNA (tRNA) half
cccggacgagccca

SEQ ID NO: 18808 - DNA, 11 bp, Artificial Sequence
  synthetic circulating small noncoding RNA (sncRNA) 5' transfer RNA (tRNA) half
tggccgagcgg

SEQ ID NO: 18809 - DNA, 31 bp, Artificial Sequence
  synthetic circulating small noncoding RNA (sncRNA) 5' transfer RNA (tRNA) half
ggtcccgggttcaaatcccggacgagcccca

SEQ ID NO: 18810 - DNA, 16 bp, Artificial Sequence
  synthetic circulating small noncoding RNA (sncRNA) 5' transfer RNA (tRNA) half
caggcgctttaaccaa

SEQ ID NO: 18811 - DNA, 13 bp, Artificial Sequence
  synthetic circulating small noncoding RNA (sncRNA) 5' transfer RNA (tRNA) half
accctcaatcttc

SEQ ID NO: 18812 - DNA, 18 bp, Artificial Sequence
  synthetic circulating small noncoding RNA (sncRNA) 5' transfer RNA (tRNA) half
gtagagcatttgactgca

SEQ ID NO: 18813 - DNA, 34 bp, Artificial Sequence
  synthetic circulating small noncoding RNA (sncRNA) 5' transfer RNA (tRNA) half
gacgacgaggatgggattcgaacccacgcgtgca

SEQ ID NO: 18814 - DNA, 23 bp, Artificial Sequence
  synthetic circulating small noncoding RNA (sncRNA) 5' transfer RNA (tRNA) half
ccgggccgcggcggtgagagcgc

SEQ ID NO: 18815 - DNA, 32 bp, Artificial Sequence
  synthetic circulating small noncoding RNA (sncRNA) 5' transfer RNA (tRNA) half
tcggccccatggtgtaatggttagcactctgg

SEQ ID NO: 18816 - DNA, 40 bp, Artificial Sequence
  synthetic circulating small noncoding RNA (sncRNA) 5' transfer RNA (tRNA) half
gttagcactctggactctgaatccagcgatccgagttcaa

SEQ ID NO: 18817 - DNA, 25 bp, Artificial Sequence
  synthetic circulating small noncoding RNA (sncRNA) 5' transfer RNA (tRNA) half
ccttagaccactcggccacgctacc

SEQ ID NO: 18818 - DNA, 30 bp, Artificial Sequence
  synthetic circulating small noncoding RNA (sncRNA) 5' transfer RNA (tRNA) half
tcatgctctaccgactgagctagccgggcc

SEQ ID NO: 18819 - DNA, 13 bp, Artificial Sequence
  synthetic circulating small noncoding RNA (sncRNA) 5' transfer RNA (tRNA) half
cccagcggggcct

SEQ ID NO: 18820 - DNA, 22 bp, Artificial Sequence
  synthetic circulating small noncoding RNA (sncRNA) 5' transfer RNA (tRNA) half
tcggctgttaaccgaaaggttg

SEQ ID NO: 18821 - DNA, 31 bp, Artificial Sequence
  synthetic circulating small noncoding RNA (sncRNA) 5' transfer RNA (tRNA) half
gagcgccgaatcctaaccactagaccaccag

SEQ ID NO: 18822 - DNA, 15 bp, Artificial Sequence
  synthetic circulating small noncoding RNA (sncRNA) 5' transfer RNA (tRNA) half
gcgacccctggttta

SEQ ID NO: 18823 - DNA, 13 bp, Artificial Sequence
  synthetic circulating small noncoding RNA (sncRNA) 5' transfer RNA (tRNA) half
tatacgatctcgg

SEQ ID NO: 18824 - DNA, 17 bp, Artificial Sequence
  synthetic circulating small noncoding RNA (sncRNA) 5' transfer RNA (tRNA) half
ggactcgaaccagcgac

SEQ ID NO: 18825 - DNA, 12 bp, Artificial Sequence
  synthetic circulating small noncoding RNA (sncRNA) 5' transfer RNA (tRNA) half
gtcacccgcgtg

SEQ ID NO: 18826 - DNA, 21 bp, Artificial Sequence
  synthetic circulating small noncoding RNA (sncRNA) 5' transfer RNA (tRNA) half
cgaatcccaccactgccaaca

SEQ ID NO: 18827 - DNA, 40 bp, Artificial Sequence
  synthetic circulating small noncoding RNA (sncRNA) 5' transfer RNA (tRNA) half
taacgccaaggtcgcgggttcgatccccgtacgggccaca

SEQ ID NO: 18828 - DNA, 38 bp, Artificial Sequence
  synthetic circulating small noncoding RNA (sncRNA) 5' transfer RNA (tRNA) half
ctggactctgaatccagcgatccgagttcaaatctcgg

SEQ ID NO: 18829 - DNA, 24 bp, Artificial Sequence
  synthetic circulating small noncoding RNA (sncRNA) 5' transfer RNA (tRNA) half
ggttcgagtcccatctggggtggt

SEQ ID NO: 18830 - DNA, 41 bp, Artificial Sequence
  synthetic circulating small noncoding RNA (sncRNA) 5' transfer RNA (tRNA) half
gcctgggtgaaaaccaggaatcctaaccgctagaccatgtg

SEQ ID NO: 18831 - DNA, 12 bp, Artificial Sequence
  synthetic circulating small noncoding RNA (sncRNA) 5' transfer RNA (tRNA) half
gaatcctaaccg

SEQ ID NO: 18832 - DNA, 17 bp, Artificial Sequence
  synthetic circulating small noncoding RNA (sncRNA) 5' transfer RNA (tRNA) half
aggggttagtactctgc

SEQ ID NO: 18833 - DNA, 13 bp, Artificial Sequence
  synthetic circulating small noncoding RNA (sncRNA) 5' transfer RNA (tRNA) half
ggggatactcacc

SEQ ID NO: 18834 - DNA, 9 bp, Artificial Sequence
  synthetic circulating small noncoding RNA (sncRNA) 5' transfer RNA (tRNA) half
agtcaaatg

SEQ ID NO: 18835 - DNA, 8 bp, Artificial Sequence
  synthetic circulating small noncoding RNA (sncRNA) 5' transfer RNA (tRNA) half
tgaccccg

SEQ ID NO: 18836 - DNA, 24 bp, Artificial Sequence
  synthetic circulating small noncoding RNA (sncRNA) 5' transfer RNA (tRNA) half
gtggcaggcgagaattctaccact

SEQ ID NO: 18837 - DNA, 16 bp, Artificial Sequence
  synthetic circulating small noncoding RNA (sncRNA) 5' transfer RNA (tRNA) half
tccggctcgaaggagt

SEQ ID NO: 18838 - DNA, 28 bp, Artificial Sequence
  synthetic circulating small noncoding RNA (sncRNA) 5' transfer RNA (tRNA) half
ggtagtctagtggttaggattcggtgct

SEQ ID NO: 18839 - DNA, 25 bp, Artificial Sequence
  synthetic circulating small noncoding RNA (sncRNA) 5' transfer RNA (tRNA) half
agctcagttgggagagcgttagact

SEQ ID NO: 18840 - DNA, 24 bp, Artificial Sequence
  synthetic circulating small noncoding RNA (sncRNA) 5' transfer RNA (tRNA) half
aacccggggcctcatacatgcaaa

SEQ ID NO: 18841 - DNA, 7 bp, Artificial Sequence
  synthetic circulating small noncoding RNA (sncRNA) 5' transfer RNA (tRNA) half
gacaggc

SEQ ID NO: 18842 - DNA, 24 bp, Artificial Sequence
  synthetic circulating small noncoding RNA (sncRNA) 5' transfer RNA (tRNA) half
cacccggatttgaaccggggacct

SEQ ID NO: 18843 - DNA, 21 bp, Artificial Sequence
  synthetic circulating small noncoding RNA (sncRNA) 5' transfer RNA (tRNA) half
tcgaaccccggtctcccgcgt

SEQ ID NO: 18844 - DNA, 20 bp, Artificial Sequence
  synthetic circulating small noncoding RNA (sncRNA) 5' transfer RNA (tRNA) half
ctccttcgagccggattcga

SEQ ID NO: 18845 - DNA, 23 bp, Artificial Sequence
  synthetic circulating small noncoding RNA (sncRNA) 5' transfer RNA (tRNA) half
aaggagttgtgtcagaagtggga

SEQ ID NO: 18846 - DNA, 25 bp, Artificial Sequence
  synthetic circulating small noncoding RNA (sncRNA) 5' transfer RNA (tRNA) half
tgggattcgaacccacgcctccatt

SEQ ID NO: 18847 - DNA, 19 bp, Artificial Sequence
  synthetic circulating small noncoding RNA (sncRNA) 5' transfer RNA (tRNA) half
gagcggtctaaggcgctgc

SEQ ID NO: 18848 - DNA, 37 bp, Artificial Sequence
  synthetic circulating small noncoding RNA (sncRNA) 5' transfer RNA (tRNA) half
cagaagattgcaggttcgagtcctgccgcggtcgact

SEQ ID NO: 18849 - DNA, 14 bp, Artificial Sequence
  synthetic circulating small noncoding RNA (sncRNA) 5' transfer RNA (tRNA) half
attctcgcctgcca

SEQ ID NO: 18850 - DNA, 9 bp, Artificial Sequence
  synthetic circulating small noncoding RNA (sncRNA) 5' transfer RNA (tRNA) half
gagctatcg

SEQ ID NO: 18851 - DNA, 26 bp, Artificial Sequence
  synthetic circulating small noncoding RNA (sncRNA) 5' transfer RNA (tRNA) half
agtctgatgctctaccaactgagcta

SEQ ID NO: 18852 - DNA, 21 bp, Artificial Sequence
  synthetic circulating small noncoding RNA (sncRNA) 5' transfer RNA (tRNA) half
tcccaccgctgccatctttgt

SEQ ID NO: 18853 - DNA, 28 bp, Artificial Sequence
  synthetic circulating small noncoding RNA (sncRNA) 5' transfer RNA (tRNA) half
cccagcacgcttccgctgcgccactctg

SEQ ID NO: 18854 - DNA, 15 bp, Artificial Sequence
  synthetic circulating small noncoding RNA (sncRNA) 5' transfer RNA (tRNA) half
gaacctacaatcttc

SEQ ID NO: 18855 - DNA, 20 bp, Artificial Sequence
  synthetic circulating small noncoding RNA (sncRNA) 5' transfer RNA (tRNA) half
acaatgacctacagtcctcc

SEQ ID NO: 18856 - DNA, 19 bp, Artificial Sequence
  synthetic circulating small noncoding RNA (sncRNA) 5' transfer RNA (tRNA) half
aaaccagggctcgtccggg

SEQ ID NO: 18857 - DNA, 35 bp, Artificial Sequence
  synthetic circulating small noncoding RNA (sncRNA) 5' transfer RNA (tRNA) half
tgagggtccagggttcaagtccctgttcgggcgct

SEQ ID NO: 18858 - DNA, 29 bp, Artificial Sequence
  synthetic circulating small noncoding RNA (sncRNA) 5' transfer RNA (tRNA) half
cgtagtgtagtggttatcacgttcgcctc

SEQ ID NO: 18859 - DNA, 16 bp, Artificial Sequence
  synthetic circulating small noncoding RNA (sncRNA) 5' transfer RNA (tRNA) half
tagctcagcggtagag

SEQ ID NO: 18860 - DNA, 24 bp, Artificial Sequence
  synthetic circulating small noncoding RNA (sncRNA) 5' transfer RNA (tRNA) half
gtataggggttagtactctgcgtt

SEQ ID NO: 18861 - DNA, 45 bp, Artificial Sequence
  synthetic circulating small noncoding RNA (sncRNA) 5' transfer RNA (tRNA) half
agtcggtagagcatgagactcttaatctcagggtcgtgggttcga

SEQ ID NO: 18862 - DNA, 13 bp, Artificial Sequence
  synthetic circulating small noncoding RNA (sncRNA) 5' transfer RNA (tRNA) half
caaagcgagaatc

SEQ ID NO: 18863 - DNA, 25 bp, Artificial Sequence
  synthetic circulating small noncoding RNA (sncRNA) 5' transfer RNA (tRNA) half
ggcggggatactaaccactatacta

SEQ ID NO: 18864 - DNA, 15 bp, Artificial Sequence
  synthetic circulating small noncoding RNA (sncRNA) 5' transfer RNA (tRNA) half
gatcccactacctct

SEQ ID NO: 18865 - DNA, 16 bp, Artificial Sequence
  synthetic circulating small noncoding RNA (sncRNA) 5' transfer RNA (tRNA) half
acgaccctgggattaa

SEQ ID NO: 18866 - DNA, 17 bp, Artificial Sequence
  synthetic circulating small noncoding RNA (sncRNA) 5' transfer RNA (tRNA) half
gcatgcgctctaccact

SEQ ID NO: 18867 - DNA, 30 bp, Artificial Sequence
  synthetic circulating small noncoding RNA (sncRNA) 5' transfer RNA (tRNA) half
cagagtactaaccactatacgatctcggca

SEQ ID NO: 18868 - DNA, 14 bp, Artificial Sequence
  synthetic circulating small noncoding RNA (sncRNA) 5' transfer RNA (tRNA) half
agctcagttggtag

SEQ ID NO: 18869 - DNA, 20 bp, Artificial Sequence
  synthetic circulating small noncoding RNA (sncRNA) 5' transfer RNA (tRNA) half
gctgtgatggccgagtggtt

SEQ ID NO: 18870 - DNA, 21 bp, Artificial Sequence
  synthetic circulating small noncoding RNA (sncRNA) 5' transfer RNA (tRNA) half
gcagcgagcagggttcgaacc

SEQ ID NO: 18871 - DNA, 17 bp, Artificial Sequence
  synthetic circulating small noncoding RNA (sncRNA) 5' transfer RNA (tRNA) half
agattaagagtctcatg

SEQ ID NO: 18872 - DNA, 20 bp, Artificial Sequence
  synthetic circulating small noncoding RNA (sncRNA) 5' transfer RNA (tRNA) half
agcctccgatagcagaggat

SEQ ID NO: 18873 - DNA, 36 bp, Artificial Sequence
  synthetic circulating small noncoding RNA (sncRNA) 5' transfer RNA (tRNA) half
ctcccacatggtctagcggttaggattcctggtttt

SEQ ID NO: 18874 - DNA, 6 bp, Artificial Sequence
  synthetic circulating small noncoding RNA (sncRNA) 5' transfer RNA (tRNA) half
cgcggc

SEQ ID NO: 18875 - DNA, 30 bp, Artificial Sequence
  synthetic circulating small noncoding RNA (sncRNA) 5' transfer RNA (tRNA) half
agattaagagtctcatgctctaccgactga

SEQ ID NO: 18876 - DNA, 19 bp, Artificial Sequence
  synthetic circulating small noncoding RNA (sncRNA) 5' transfer RNA (tRNA) half
ttgcgttggccgggaatcg

SEQ ID NO: 18877 - DNA, 26 bp, Artificial Sequence
  synthetic circulating small noncoding RNA (sncRNA) 5' transfer RNA (tRNA) half
aggcaagaattctaccactgaaccac

SEQ ID NO: 18878 - DNA, 24 bp, Artificial Sequence
  synthetic circulating small noncoding RNA (sncRNA) 5' transfer RNA (tRNA) half
caggttcgactcctggctggctcg

SEQ ID NO: 18879 - DNA, 15 bp, Artificial Sequence
  synthetic circulating small noncoding RNA (sncRNA) 5' transfer RNA (tRNA) half
ccggggttcgattcc

SEQ ID NO: 18880 - DNA, 32 bp, Artificial Sequence
  synthetic circulating small noncoding RNA (sncRNA) 5' transfer RNA (tRNA) half
aagtgagaatcatacccctagaccaacaagcc

SEQ ID NO: 18881 - DNA, 21 bp, Artificial Sequence
  synthetic circulating small noncoding RNA (sncRNA) 5' transfer RNA (tRNA) half
gggcacctggattcgaaccag

SEQ ID NO: 18882 - DNA, 21 bp, Artificial Sequence
  synthetic circulating small noncoding RNA (sncRNA) 5' transfer RNA (tRNA) half
gttcgattcccgggcggcgca

SEQ ID NO: 18883 - DNA, 27 bp, Artificial Sequence
  synthetic circulating small noncoding RNA (sncRNA) 5' transfer RNA (tRNA) half
ctccatagctcaggggttagagcactg

SEQ ID NO: 18884 - DNA, 37 bp, Artificial Sequence
  synthetic circulating small noncoding RNA (sncRNA) 5' transfer RNA (tRNA) half
agtccaatgcgctatccattgcgccacggagccacct

SEQ ID NO: 18885 - DNA, 26 bp, Artificial Sequence
  synthetic circulating small noncoding RNA (sncRNA) 5' transfer RNA (tRNA) half
tgatcgtataggggttagtactctgc

SEQ ID NO: 18886 - DNA, 33 bp, Artificial Sequence
  synthetic circulating small noncoding RNA (sncRNA) 5' transfer RNA (tRNA) half
gagaccggggttcgattccccgacggggagtct

SEQ ID NO: 18887 - DNA, 19 bp, Artificial Sequence
  synthetic circulating small noncoding RNA (sncRNA) 5' transfer RNA (tRNA) half
ggttcgattcccgggcggc

SEQ ID NO: 18888 - DNA, 43 bp, Artificial Sequence
  synthetic circulating small noncoding RNA (sncRNA) 5' transfer RNA (tRNA) half
cgcctccccgtcggggaatcgaaccccggtctcccgcgtgaca

SEQ ID NO: 18889 - DNA, 27 bp, Artificial Sequence
  synthetic circulating small noncoding RNA (sncRNA) 5' transfer RNA (tRNA) half
ccgactccgccgggactcgaacccgga

SEQ ID NO: 18890 - DNA, 32 bp, Artificial Sequence
  synthetic circulating small noncoding RNA (sncRNA) 5' transfer RNA (tRNA) half
gcctccttagcgcagtaggcagcgcgtcagtc

SEQ ID NO: 18891 - DNA, 28 bp, Artificial Sequence
  synthetic circulating small noncoding RNA (sncRNA) 5' transfer RNA (tRNA) half
ggtagaattctcgcctgccacgcgggag

SEQ ID NO: 18892 - DNA, 17 bp, Artificial Sequence
  synthetic circulating small noncoding RNA (sncRNA) 5' transfer RNA (tRNA) half
tcaggatggccgagcgg

SEQ ID NO: 18893 - DNA, 20 bp, Artificial Sequence
  synthetic circulating small noncoding RNA (sncRNA) 5' transfer RNA (tRNA) half
taccattgaactaccaatgc

SEQ ID NO: 18894 - DNA, 45 bp, Artificial Sequence
  synthetic circulating small noncoding RNA (sncRNA) 5' transfer RNA (tRNA) half
cccgggccgcggcggtgagagcgccgaatcctaaccactagacca

SEQ ID NO: 18895 - DNA, 20 bp, Artificial Sequence
  synthetic circulating small noncoding RNA (sncRNA) 5' transfer RNA (tRNA) half
ataatctgaaggtcctgagt

SEQ ID NO: 18896 - DNA, 14 bp, Artificial Sequence
  synthetic circulating small noncoding RNA (sncRNA) 5' transfer RNA (tRNA) half
taggattcggcgct

SEQ ID NO: 18897 - DNA, 20 bp, Artificial Sequence
  synthetic circulating small noncoding RNA (sncRNA) 5' transfer RNA (tRNA) half
ggatggccgagcggtctaag

SEQ ID NO: 18898 - DNA, 17 bp, Artificial Sequence
  synthetic circulating small noncoding RNA (sncRNA) 5' transfer RNA (tRNA) half
ggcggggatactaacca

SEQ ID NO: 18899 - DNA, 12 bp, Artificial Sequence
  synthetic circulating small noncoding RNA (sncRNA) 5' transfer RNA (tRNA) half
cccgggccgcgg

SEQ ID NO: 18900 - DNA, 21 bp, Artificial Sequence
  synthetic circulating small noncoding RNA (sncRNA) 5' transfer RNA (tRNA) half
aggcgtgggttcgaatcccac

SEQ ID NO: 18901 - DNA, 12 bp, Artificial Sequence
  synthetic circulating small noncoding RNA (sncRNA) 5' transfer RNA (tRNA) half
ccacccagggac

SEQ ID NO: 18902 - DNA, 12 bp, Artificial Sequence
  synthetic circulating small noncoding RNA (sncRNA) 5' transfer RNA (tRNA) half
aacccacgaccc

SEQ ID NO: 18903 - DNA, 15 bp, Artificial Sequence
  synthetic circulating small noncoding RNA (sncRNA) 5' transfer RNA (tRNA) half
gctctaccatttgag

SEQ ID NO: 18904 - DNA, 19 bp, Artificial Sequence
  synthetic circulating small noncoding RNA (sncRNA) 5' transfer RNA (tRNA) half
gttgggagagcattagact

SEQ ID NO: 18905 - DNA, 18 bp, Artificial Sequence
  synthetic circulating small noncoding RNA (sncRNA) 5' transfer RNA (tRNA) half
tgctctgcacgcgtgggt

SEQ ID NO: 18906 - DNA, 40 bp, Artificial Sequence
  synthetic circulating small noncoding RNA (sncRNA) 5' transfer RNA (tRNA) half
atggataaggcattggcctcctaagccagggattgtgggt

SEQ ID NO: 18907 - DNA, 15 bp, Artificial Sequence
  synthetic circulating small noncoding RNA (sncRNA) 5' transfer RNA (tRNA) half
tggttcgattccggc

SEQ ID NO: 18908 - DNA, 12 bp, Artificial Sequence
  synthetic circulating small noncoding RNA (sncRNA) 5' transfer RNA (tRNA) half
atcgaacccagg

SEQ ID NO: 18909 - DNA, 34 bp, Artificial Sequence
  synthetic circulating small noncoding RNA (sncRNA) 5' transfer RNA (tRNA) half
ggtttccgtagtgtagtggttatcacgctcgcct

SEQ ID NO: 18910 - DNA, 22 bp, Artificial Sequence
  synthetic circulating small noncoding RNA (sncRNA) 5' transfer RNA (tRNA) half
ttcgaatcccactcctgacagc

SEQ ID NO: 18911 - DNA, 14 bp, Artificial Sequence
  synthetic circulating small noncoding RNA (sncRNA) 5' transfer RNA (tRNA) half
caggcggcccgggt

SEQ ID NO: 18912 - DNA, 26 bp, Artificial Sequence
  synthetic circulating small noncoding RNA (sncRNA) 5' transfer RNA (tRNA) half
agagtactaaccactatacgatctcg

SEQ ID NO: 18913 - DNA, 15 bp, Artificial Sequence
  synthetic circulating small noncoding RNA (sncRNA) 5' transfer RNA (tRNA) half
cgaacccacaatccc

SEQ ID NO: 18914 - DNA, 15 bp, Artificial Sequence
  synthetic circulating small noncoding RNA (sncRNA) 5' transfer RNA (tRNA) half
gtcggcaggattcga

SEQ ID NO: 18915 - DNA, 6 bp, Artificial Sequence
  synthetic circulating small noncoding RNA (sncRNA) 5' transfer RNA (tRNA) half
gtcggg

SEQ ID NO: 18916 - DNA, 24 bp, Artificial Sequence
  synthetic circulating small noncoding RNA (sncRNA) 5' transfer RNA (tRNA) half
aactccagctggcccgtacgggga

SEQ ID NO: 18917 - DNA, 28 bp, Artificial Sequence
  synthetic circulating small noncoding RNA (sncRNA) 5' transfer RNA (tRNA) half
gtcgctggttcgattccggctcgaagga

SEQ ID NO: 18918 - DNA, 32 bp, Artificial Sequence
  synthetic circulating small noncoding RNA (sncRNA) 5' transfer RNA (tRNA) half
tgtttccgcccggtttcgaaccggggaccttt

SEQ ID NO: 18919 - DNA, 27 bp, Artificial Sequence
  synthetic circulating small noncoding RNA (sncRNA) 5' transfer RNA (tRNA) half
tctccccgcgcaggttcgaatcctgct

SEQ ID NO: 18920 - DNA, 26 bp, Artificial Sequence
  synthetic circulating small noncoding RNA (sncRNA) 5' transfer RNA (tRNA) half
acccacgccatcgaaatgactggagc

SEQ ID NO: 18921 - DNA, 13 bp, Artificial Sequence
  synthetic circulating small noncoding RNA (sncRNA) 5' transfer RNA (tRNA) half
ccagtctcttcgg

SEQ ID NO: 18922 - DNA, 28 bp, Artificial Sequence
  synthetic circulating small noncoding RNA (sncRNA) 5' transfer RNA (tRNA) half
ctctaccgactgagctatccgggctctt

SEQ ID NO: 18923 - DNA, 28 bp, Artificial Sequence
  synthetic circulating small noncoding RNA (sncRNA) 5' transfer RNA (tRNA) half
gctagctcagtgggtagagcatgagact

SEQ ID NO: 18924 - DNA, 13 bp, Artificial Sequence
  synthetic circulating small noncoding RNA (sncRNA) 5' transfer RNA (tRNA) half
gcactctggactc

SEQ ID NO: 18925 - DNA, 23 bp, Artificial Sequence
  synthetic circulating small noncoding RNA (sncRNA) 5' transfer RNA (tRNA) half
actaaccactatacgatcacggc

SEQ ID NO: 18926 - DNA, 29 bp, Artificial Sequence
  synthetic circulating small noncoding RNA (sncRNA) 5' transfer RNA (tRNA) half
cagcggtgggattcgaacccacgcccccg

SEQ ID NO: 18927 - DNA, 23 bp, Artificial Sequence
  synthetic circulating small noncoding RNA (sncRNA) 5' transfer RNA (tRNA) half
tctaccaactgagctatcgaagg

SEQ ID NO: 18928 - DNA, 18 bp, Artificial Sequence
  synthetic circulating small noncoding RNA (sncRNA) 5' transfer RNA (tRNA) half
aacccacgcctccattcg

SEQ ID NO: 18929 - DNA, 14 bp, Artificial Sequence
  synthetic circulating small noncoding RNA (sncRNA) 5' transfer RNA (tRNA) half
ggggatactcacca

SEQ ID NO: 18930 - DNA, 13 bp, Artificial Sequence
  synthetic circulating small noncoding RNA (sncRNA) 5' transfer RNA (tRNA) half
taacagccgaacg

SEQ ID NO: 18931 - DNA, 35 bp, Artificial Sequence
  synthetic circulating small noncoding RNA (sncRNA) 5' transfer RNA (tRNA) half
ggccgggaatcgaacccgggtcaactgcttggaag

SEQ ID NO: 18932 - DNA, 11 bp, Artificial Sequence
  synthetic circulating small noncoding RNA (sncRNA) 5' transfer RNA (tRNA) half
gttcgattccg

SEQ ID NO: 18933 - DNA, 16 bp, Artificial Sequence
  synthetic circulating small noncoding RNA (sncRNA) 5' transfer RNA (tRNA) half
cggtgagagcgccgaa

SEQ ID NO: 18934 - DNA, 24 bp, Artificial Sequence
  synthetic circulating small noncoding RNA (sncRNA) 5' transfer RNA (tRNA) half
gaccactcggccatcctgacactt

SEQ ID NO: 18935 - DNA, 9 bp, Artificial Sequence
  synthetic circulating small noncoding RNA (sncRNA) 5' transfer RNA (tRNA) half
gacgagccc

SEQ ID NO: 18936 - DNA, 17 bp, Artificial Sequence
  synthetic circulating small noncoding RNA (sncRNA) 5' transfer RNA (tRNA) half
ctcagttggttagagca

SEQ ID NO: 18937 - DNA, 17 bp, Artificial Sequence
  synthetic circulating small noncoding RNA (sncRNA) 5' transfer RNA (tRNA) half
ggctcgaaccaccaacc

SEQ ID NO: 18938 - DNA, 19 bp, Artificial Sequence
  synthetic circulating small noncoding RNA (sncRNA) 5' transfer RNA (tRNA) half
ggatttgaaccagggacct

SEQ ID NO: 18939 - DNA, 20 bp, Artificial Sequence
  synthetic circulating small noncoding RNA (sncRNA) 5' transfer RNA (tRNA) half
ggaggcccgggttcggttcc

SEQ ID NO: 18940 - DNA, 24 bp, Artificial Sequence
  synthetic circulating small noncoding RNA (sncRNA) 5' transfer RNA (tRNA) half
aactcagattgctggattcaaagt

SEQ ID NO: 18941 - DNA, 6 bp, Artificial Sequence
  synthetic circulating small noncoding RNA (sncRNA) 5' transfer RNA (tRNA) half
gagccg

SEQ ID NO: 18942 - DNA, 34 bp, Artificial Sequence
  synthetic circulating small noncoding RNA (sncRNA) 5' transfer RNA (tRNA) half
ccaaggtcgcgggttcgatccccgtacgggccac

SEQ ID NO: 18943 - DNA, 13 bp, Artificial Sequence
  synthetic circulating small noncoding RNA (sncRNA) 5' transfer RNA (tRNA) half
ccgactgagctat

SEQ ID NO: 18944 - DNA, 10 bp, Artificial Sequence
  synthetic circulating small noncoding RNA (sncRNA) 5' transfer RNA (tRNA) half
ctcgtccggg

SEQ ID NO: 18945 - DNA, 22 bp, Artificial Sequence
  synthetic circulating small noncoding RNA (sncRNA) 5' transfer RNA (tRNA) half
cacgcagccttctgatctggag

SEQ ID NO: 18946 - DNA, 30 bp, Artificial Sequence
  synthetic circulating small noncoding RNA (sncRNA) 5' transfer RNA (tRNA) half
gtcctgggttcgagccccagtggaaccacg

SEQ ID NO: 18947 - DNA, 25 bp, Artificial Sequence
  synthetic circulating small noncoding RNA (sncRNA) 5' transfer RNA (tRNA) half
gaaggccccagcgagatttgaactc

SEQ ID NO: 18948 - DNA, 22 bp, Artificial Sequence
  synthetic circulating small noncoding RNA (sncRNA) 5' transfer RNA (tRNA) half
tcgatccccgtacgggccacat

SEQ ID NO: 18949 - DNA, 16 bp, Artificial Sequence
  synthetic circulating small noncoding RNA (sncRNA) 5' transfer RNA (tRNA) half
aagcgcccgaacaggg

SEQ ID NO: 18950 - DNA, 36 bp, Artificial Sequence
  synthetic circulating small noncoding RNA (sncRNA) 5' transfer RNA (tRNA) half
tgccgaaacccgggattgaaccagggacctttagat

SEQ ID NO: 18951 - DNA, 29 bp, Artificial Sequence
  synthetic circulating small noncoding RNA (sncRNA) 5' transfer RNA (tRNA) half
agatttgaactcggatcgctggattcaga

SEQ ID NO: 18952 - DNA, 20 bp, Artificial Sequence
  synthetic circulating small noncoding RNA (sncRNA) 5' transfer RNA (tRNA) half
ccactgaaccaccaatgcag

SEQ ID NO: 18953 - DNA, 11 bp, Artificial Sequence
  synthetic circulating small noncoding RNA (sncRNA) 5' transfer RNA (tRNA) half
gtgtttccgcc

SEQ ID NO: 18954 - DNA, 19 bp, Artificial Sequence
  synthetic circulating small noncoding RNA (sncRNA) 5' transfer RNA (tRNA) half
gttcaatccccggcatctc

SEQ ID NO: 18955 - DNA, 26 bp, Artificial Sequence
  synthetic circulating small noncoding RNA (sncRNA) 5' transfer RNA (tRNA) half
gcgcccaacgtggggctcgaacccac

SEQ ID NO: 18956 - DNA, 19 bp, Artificial Sequence
  synthetic circulating small noncoding RNA (sncRNA) 5' transfer RNA (tRNA) half
cagtggtagagcgcgtgct

SEQ ID NO: 18957 - DNA, 14 bp, Artificial Sequence
  synthetic circulating small noncoding RNA (sncRNA) 5' transfer RNA (tRNA) half
cgaacctacaatct

SEQ ID NO: 18958 - DNA, 17 bp, Artificial Sequence
  synthetic circulating small noncoding RNA (sncRNA) 5' transfer RNA (tRNA) half
tcagaagattccaggtt

SEQ ID NO: 18959 - DNA, 33 bp, Artificial Sequence
  synthetic circulating small noncoding RNA (sncRNA) 5' transfer RNA (tRNA) half
tagcactctggactttgaatccagcgatccgag

SEQ ID NO: 18960 - DNA, 39 bp, Artificial Sequence
  synthetic circulating small noncoding RNA (sncRNA) 5' transfer RNA (tRNA) half
cgcctccccgtcggggaatcgaaccccggtctcccgcgt

SEQ ID NO: 18961 - DNA, 26 bp, Artificial Sequence
  synthetic circulating small noncoding RNA (sncRNA) 5' transfer RNA (tRNA) half
gcgtgggttcgaatcccaccgctgcc

SEQ ID NO: 18962 - DNA, 14 bp, Artificial Sequence
  synthetic circulating small noncoding RNA (sncRNA) 5' transfer RNA (tRNA) half
gaatcctaaccgct

SEQ ID NO: 18963 - DNA, 23 bp, Artificial Sequence
  synthetic circulating small noncoding RNA (sncRNA) 5' transfer RNA (tRNA) half
agaatcatacccctagaccaacg

SEQ ID NO: 18964 - DNA, 29 bp, Artificial Sequence
  synthetic circulating small noncoding RNA (sncRNA) 5' transfer RNA (tRNA) half
ccttgagtctggcgccttagaccactcgg

SEQ ID NO: 18965 - DNA, 30 bp, Artificial Sequence
  synthetic circulating small noncoding RNA (sncRNA) 5' transfer RNA (tRNA) half
tggtctagtggttaggattcggcgctctca

SEQ ID NO: 18966 - DNA, 17 bp, Artificial Sequence
  synthetic circulating small noncoding RNA (sncRNA) 5' transfer RNA (tRNA) half
tcccgcgtgacaggcgg

SEQ ID NO: 18967 - DNA, 40 bp, Artificial Sequence
  synthetic circulating small noncoding RNA (sncRNA) 5' transfer RNA (tRNA) half
cgtagtcggcaggattcgaacctgcgcggggaaaccccaa

SEQ ID NO: 18968 - DNA, 29 bp, Artificial Sequence
  synthetic circulating small noncoding RNA (sncRNA) 5' transfer RNA (tRNA) half
atcgaacccggggcctcatacatgcaaag

SEQ ID NO: 18969 - DNA, 27 bp, Artificial Sequence
  synthetic circulating small noncoding RNA (sncRNA) 5' transfer RNA (tRNA) half
ctccccgtcggggaatcgaaccccggt

SEQ ID NO: 18970 - DNA, 6 bp, Artificial Sequence
  synthetic circulating small noncoding RNA (sncRNA) 5' transfer RNA (tRNA) half
ggtccc

SEQ ID NO: 18971 - DNA, 21 bp, Artificial Sequence
  synthetic circulating small noncoding RNA (sncRNA) 5' transfer RNA (tRNA) half
gcgcagcggaagcgtgctggg

SEQ ID NO: 18972 - DNA, 31 bp, Artificial Sequence
  synthetic circulating small noncoding RNA (sncRNA) 5' transfer RNA (tRNA) half
gatgccggggatcgaacccggggcctcatac

SEQ ID NO: 18973 - DNA, 19 bp, Artificial Sequence
  synthetic circulating small noncoding RNA (sncRNA) 5' transfer RNA (tRNA) half
gacctgtacggggaacgaa

SEQ ID NO: 18974 - DNA, 14 bp, Artificial Sequence
  synthetic circulating small noncoding RNA (sncRNA) 5' transfer RNA (tRNA) half
accagggacctctt

SEQ ID NO: 18975 - DNA, 6 bp, Artificial Sequence
  synthetic circulating small noncoding RNA (sncRNA) 5' transfer RNA (tRNA) half
accccg

SEQ ID NO: 18976 - DNA, 12 bp, Artificial Sequence
  synthetic circulating small noncoding RNA (sncRNA) 5' transfer RNA (tRNA) half
atcccccgaccg

SEQ ID NO: 18977 - DNA, 28 bp, Artificial Sequence
  synthetic circulating small noncoding RNA (sncRNA) 5' transfer RNA (tRNA) half
atgtctctgtggcgcaatcggttagcgc

SEQ ID NO: 18978 - DNA, 10 bp, Artificial Sequence
  synthetic circulating small noncoding RNA (sncRNA) 5' transfer RNA (tRNA) half
atcctaaccg

SEQ ID NO: 18979 - DNA, 19 bp, Artificial Sequence
  synthetic circulating small noncoding RNA (sncRNA) 5' transfer RNA (tRNA) half
ccaatgccttatccattag

SEQ ID NO: 18980 - DNA, 19 bp, Artificial Sequence
  synthetic circulating small noncoding RNA (sncRNA) 5' transfer RNA (tRNA) half
tcaatccccggcatctcca

SEQ ID NO: 18981 - DNA, 20 bp, Artificial Sequence
  synthetic circulating small noncoding RNA (sncRNA) 5' transfer RNA (tRNA) half
gtggtcatcacgctcgcctc

SEQ ID NO: 18982 - DNA, 35 bp, Artificial Sequence
  synthetic circulating small noncoding RNA (sncRNA) 5' transfer RNA (tRNA) half
cagaggatggtttcgatccatcgacctctgggtta

SEQ ID NO: 18983 - DNA, 39 bp, Artificial Sequence
  synthetic circulating small noncoding RNA (sncRNA) 5' transfer RNA (tRNA) half
cccacgaccctgagattaagagtctcatgctctaccgac

SEQ ID NO: 18984 - DNA, 35 bp, Artificial Sequence
  synthetic circulating small noncoding RNA (sncRNA) 5' transfer RNA (tRNA) half
gttagcactctggactctgaatccagcgacccgag

SEQ ID NO: 18985 - DNA, 7 bp, Artificial Sequence
  synthetic circulating small noncoding RNA (sncRNA) 5' transfer RNA (tRNA) half
gagccgc

SEQ ID NO: 18986 - DNA, 28 bp, Artificial Sequence
  synthetic circulating small noncoding RNA (sncRNA) 5' transfer RNA (tRNA) half
gtcgcgggttcgatccccgtacgggcca

SEQ ID NO: 18987 - DNA, 20 bp, Artificial Sequence
  synthetic circulating small noncoding RNA (sncRNA) 5' transfer RNA (tRNA) half
gcgcccgaacagggacttga

SEQ ID NO: 18988 - DNA, 21 bp, Artificial Sequence
  synthetic circulating small noncoding RNA (sncRNA) 5' transfer RNA (tRNA) half
agcggttaggattcctggttt

SEQ ID NO: 18989 - DNA, 11 bp, Artificial Sequence
  synthetic circulating small noncoding RNA (sncRNA) 5' transfer RNA (tRNA) half
gagaattctac

SEQ ID NO: 18990 - DNA, 30 bp, Artificial Sequence
  synthetic circulating small noncoding RNA (sncRNA) 5' transfer RNA (tRNA) half
attggtagttcaatggtagaattctcgcct

SEQ ID NO: 18991 - DNA, 14 bp, Artificial Sequence
  synthetic circulating small noncoding RNA (sncRNA) 5' transfer RNA (tRNA) half
agcagaggatggtt

SEQ ID NO: 18992 - DNA, 14 bp, Artificial Sequence
  synthetic circulating small noncoding RNA (sncRNA) 5' transfer RNA (tRNA) half
cgccgaatcctagc

SEQ ID NO: 18993 - DNA, 14 bp, Artificial Sequence
  synthetic circulating small noncoding RNA (sncRNA) 5' transfer RNA (tRNA) half
gtctcttcggaggc

SEQ ID NO: 18994 - DNA, 27 bp, Artificial Sequence
  synthetic circulating small noncoding RNA (sncRNA) 5' transfer RNA (tRNA) half
gcccggatagctcagtcggtagagcat

SEQ ID NO: 18995 - DNA, 14 bp, Artificial Sequence
  synthetic circulating small noncoding RNA (sncRNA) 5' transfer RNA (tRNA) half
gctcgaaccaccaa

SEQ ID NO: 18996 - DNA, 32 bp, Artificial Sequence
  synthetic circulating small noncoding RNA (sncRNA) 5' transfer RNA (tRNA) half
aaaaccaggaatcctaaccgctagaccatgtg

SEQ ID NO: 18997 - DNA, 30 bp, Artificial Sequence
  synthetic circulating small noncoding RNA (sncRNA) 5' transfer RNA (tRNA) half
actctggtgggactcgaacccacaaccttt

SEQ ID NO: 18998 - DNA, 31 bp, Artificial Sequence
  synthetic circulating small noncoding RNA (sncRNA) 5' transfer RNA (tRNA) half
aaggtccccggttcgaaaccgggcggaaaca

SEQ ID NO: 18999 - DNA, 21 bp, Artificial Sequence
  synthetic circulating small noncoding RNA (sncRNA) 5' transfer RNA (tRNA) half
tatgtgtggcccgtacgggga

SEQ ID NO: 19000 - DNA, 28 bp, Artificial Sequence
  synthetic circulating small noncoding RNA (sncRNA) 5' transfer RNA (tRNA) half
agattgcaggttcgagtcctgccgcggt

SEQ ID NO: 19001 - DNA, 36 bp, Artificial Sequence
  synthetic circulating small noncoding RNA (sncRNA) 5' transfer RNA (tRNA) half
atctcagggtcgtgggttcgagccccacgttgggcg

SEQ ID NO: 19002 - DNA, 18 bp, Artificial Sequence
  synthetic circulating small noncoding RNA (sncRNA) 5' transfer RNA (tRNA) half
aatcccaccgctgccatc

SEQ ID NO: 19003 - DNA, 22 bp, Artificial Sequence
  synthetic circulating small noncoding RNA (sncRNA) 5' transfer RNA (tRNA) half
gtagtggttatcacgctcgcct

SEQ ID NO: 19004 - DNA, 23 bp, Artificial Sequence
  synthetic circulating small noncoding RNA (sncRNA) 5' transfer RNA (tRNA) half
ccccgtcggggaattgaaccccg

SEQ ID NO: 19005 - DNA, 25 bp, Artificial Sequence
  synthetic circulating small noncoding RNA (sncRNA) 5' transfer RNA (tRNA) half
ggtcgagccagccaggagtcgaacc

SEQ ID NO: 19006 - DNA, 38 bp, Artificial Sequence
  synthetic circulating small noncoding RNA (sncRNA) 5' transfer RNA (tRNA) half
gcctgggtgaaaaccaggaatcctaaccgctagaccat

SEQ ID NO: 19007 - DNA, 13 bp, Artificial Sequence
  synthetic circulating small noncoding RNA (sncRNA) 5' transfer RNA (tRNA) half
gaaaccgggcgga

SEQ ID NO: 19008 - DNA, 27 bp, Artificial Sequence
  synthetic circulating small noncoding RNA (sncRNA) 5' transfer RNA (tRNA) half
ctggttcgattccggctcgaaggaaag

SEQ ID NO: 19009 - DNA, 34 bp, Artificial Sequence
  synthetic circulating small noncoding RNA (sncRNA) 5' transfer RNA (tRNA) half
tggctaggattcggcgctttcaccgccgcggccc

SEQ ID NO: 19010 - DNA, 29 bp, Artificial Sequence
  synthetic circulating small noncoding RNA (sncRNA) 5' transfer RNA (tRNA) half
tcgacgaggatgggattcgaacccatgcg

SEQ ID NO: 19011 - DNA, 28 bp, Artificial Sequence
  synthetic circulating small noncoding RNA (sncRNA) 5' transfer RNA (tRNA) half
gaccccgacgtgacttgaacacgcaacc

SEQ ID NO: 19012 - DNA, 28 bp, Artificial Sequence
  synthetic circulating small noncoding RNA (sncRNA) 5' transfer RNA (tRNA) half
gtcggcaggattcgaacctgcgcgggga

SEQ ID NO: 19013 - DNA, 17 bp, Artificial Sequence
  synthetic circulating small noncoding RNA (sncRNA) 5' transfer RNA (tRNA) half
gaggtcccaccgagatt

SEQ ID NO: 19014 - DNA, 12 bp, Artificial Sequence
  synthetic circulating small noncoding RNA (sncRNA) 5' transfer RNA (tRNA) half
agctaatccccc

SEQ ID NO: 19015 - DNA, 30 bp, Artificial Sequence
  synthetic circulating small noncoding RNA (sncRNA) 5' transfer RNA (tRNA) half
gtagtgtagtggttatcacgttcgcctcac

SEQ ID NO: 19016 - DNA, 17 bp, Artificial Sequence
  synthetic circulating small noncoding RNA (sncRNA) 5' transfer RNA (tRNA) half
tccagcgacccgagttc

SEQ ID NO: 19017 - DNA, 17 bp, Artificial Sequence
  synthetic circulating small noncoding RNA (sncRNA) 5' transfer RNA (tRNA) half
gtcccaccgagatttga

SEQ ID NO: 19018 - DNA, 19 bp, Artificial Sequence
  synthetic circulating small noncoding RNA (sncRNA) 5' transfer RNA (tRNA) half
ttcaaatctcgctggggcc

SEQ ID NO: 19019 - DNA, 15 bp, Artificial Sequence
  synthetic circulating small noncoding RNA (sncRNA) 5' transfer RNA (tRNA) half
ctgggttcgactccc

SEQ ID NO: 19020 - DNA, 15 bp, Artificial Sequence
  synthetic circulating small noncoding RNA (sncRNA) 5' transfer RNA (tRNA) half
gctaggattcggcgc

SEQ ID NO: 19021 - DNA, 14 bp, Artificial Sequence
  synthetic circulating small noncoding RNA (sncRNA) 5' transfer RNA (tRNA) half
ccacctttcgggcg

SEQ ID NO: 19022 - DNA, 13 bp, Artificial Sequence
  synthetic circulating small noncoding RNA (sncRNA) 5' transfer RNA (tRNA) half
gtttctgcccggt

SEQ ID NO: 19023 - DNA, 12 bp, Artificial Sequence
  synthetic circulating small noncoding RNA (sncRNA) 5' transfer RNA (tRNA) half
gaacccgggacc

SEQ ID NO: 19024 - DNA, 15 bp, Artificial Sequence
  synthetic circulating small noncoding RNA (sncRNA) 5' transfer RNA (tRNA) half
atcccactacctctc

SEQ ID NO: 19025 - DNA, 18 bp, Artificial Sequence
  synthetic circulating small noncoding RNA (sncRNA) 5' transfer RNA (tRNA) half
ccggggacctctcgcgtg

SEQ ID NO: 19026 - DNA, 19 bp, Artificial Sequence
  synthetic circulating small noncoding RNA (sncRNA) 5' transfer RNA (tRNA) half
cgtcggggtcatctgtgtt

SEQ ID NO: 19027 - DNA, 32 bp, Artificial Sequence
  synthetic circulating small noncoding RNA (sncRNA) 5' transfer RNA (tRNA) half
gggacctctcgcacccgaagcgagaatcatac

SEQ ID NO: 19028 - DNA, 30 bp, Artificial Sequence
  synthetic circulating small noncoding RNA (sncRNA) 5' transfer RNA (tRNA) half
attcaaagtccagagtgctaaccattacac

SEQ ID NO: 19029 - DNA, 24 bp, Artificial Sequence
  synthetic circulating small noncoding RNA (sncRNA) 5' transfer RNA (tRNA) half
gcctgccacgcgggaggcccgggt

SEQ ID NO: 19030 - DNA, 10 bp, Artificial Sequence
  synthetic circulating small noncoding RNA (sncRNA) 5' transfer RNA (tRNA) half
cgggcggcgc

SEQ ID NO: 19031 - DNA, 38 bp, Artificial Sequence
  synthetic circulating small noncoding RNA (sncRNA) 5' transfer RNA (tRNA) half
cgagccagccaggagtcgaacctggaatcttctgatcc

SEQ ID NO: 19032 - DNA, 28 bp, Artificial Sequence
  synthetic circulating small noncoding RNA (sncRNA) 5' transfer RNA (tRNA) half
ggggacctttcgcgtgtgaggcgaacgt

SEQ ID NO: 19033 - DNA, 21 bp, Artificial Sequence
  synthetic circulating small noncoding RNA (sncRNA) 5' transfer RNA (tRNA) half
tcaaatcccggacgagccctg

SEQ ID NO: 19034 - DNA, 37 bp, Artificial Sequence
  synthetic circulating small noncoding RNA (sncRNA) 5' transfer RNA (tRNA) half
tgcgcccaacgtggggctcgaacccacgaccctgaga

SEQ ID NO: 19035 - DNA, 28 bp, Artificial Sequence
  synthetic circulating small noncoding RNA (sncRNA) 5' transfer RNA (tRNA) half
tttccgtagtgtagtggttatcacgttc

SEQ ID NO: 19036 - DNA, 14 bp, Artificial Sequence
  synthetic circulating small noncoding RNA (sncRNA) 5' transfer RNA (tRNA) half
gaagggactcgaac

SEQ ID NO: 19037 - DNA, 7 bp, Artificial Sequence
  synthetic circulating small noncoding RNA (sncRNA) 5' transfer RNA (tRNA) half
cggcgag

SEQ ID NO: 19038 - DNA, 16 bp, Artificial Sequence
  synthetic circulating small noncoding RNA (sncRNA) 5' transfer RNA (tRNA) half
ggttagagcactggtc

SEQ ID NO: 19039 - DNA, 11 bp, Artificial Sequence
  synthetic circulating small noncoding RNA (sncRNA) 5' transfer RNA (tRNA) half
ccgggcggcgc

SEQ ID NO: 19040 - DNA, 36 bp, Artificial Sequence
  synthetic circulating small noncoding RNA (sncRNA) 5' transfer RNA (tRNA) half
ccctgggtgggctcgaaccaccaacctttcggttaa

SEQ ID NO: 19041 - DNA, 21 bp, Artificial Sequence
  synthetic circulating small noncoding RNA (sncRNA) 5' transfer RNA (tRNA) half
accgactgagctatccgggct

SEQ ID NO: 19042 - DNA, 17 bp, Artificial Sequence
  synthetic circulating small noncoding RNA (sncRNA) 5' transfer RNA (tRNA) half
catcgaaatgactggag

SEQ ID NO: 19043 - DNA, 30 bp, Artificial Sequence
  synthetic circulating small noncoding RNA (sncRNA) 5' transfer RNA (tRNA) half
atggtgtaatggttagcactctggactctg

SEQ ID NO: 19044 - DNA, 13 bp, Artificial Sequence
  synthetic circulating small noncoding RNA (sncRNA) 5' transfer RNA (tRNA) half
ctaccatttgagc

SEQ ID NO: 19045 - DNA, 22 bp, Artificial Sequence
  synthetic circulating small noncoding RNA (sncRNA) 5' transfer RNA (tRNA) half
ggttcgaatccggctcgaagga

SEQ ID NO: 19046 - DNA, 20 bp, Artificial Sequence
  synthetic circulating small noncoding RNA (sncRNA) 5' transfer RNA (tRNA) half
agcggctgggggatgtagct

SEQ ID NO: 19047 - DNA, 24 bp, Artificial Sequence
  synthetic circulating small noncoding RNA (sncRNA) 5' transfer RNA (tRNA) half
tacgggccaaagctgaagcgtttt

SEQ ID NO: 19048 - DNA, 13 bp, Artificial Sequence
  synthetic circulating small noncoding RNA (sncRNA) 5' transfer RNA (tRNA) half
accaggggtcgcg

SEQ ID NO: 19049 - DNA, 29 bp, Artificial Sequence
  synthetic circulating small noncoding RNA (sncRNA) 5' transfer RNA (tRNA) half
tgcagtcaaatgctctaccactgagctat

SEQ ID NO: 19050 - DNA, 17 bp, Artificial Sequence
  synthetic circulating small noncoding RNA (sncRNA) 5' transfer RNA (tRNA) half
agtggttatcacgttcg

SEQ ID NO: 19051 - DNA, 10 bp, Artificial Sequence
  synthetic circulating small noncoding RNA (sncRNA) 5' transfer RNA (tRNA) half
aggagtcgaa

SEQ ID NO: 19052 - DNA, 21 bp, Artificial Sequence
  synthetic circulating small noncoding RNA (sncRNA) 5' transfer RNA (tRNA) half
ggttagcactctggactttga

SEQ ID NO: 19053 - DNA, 14 bp, Artificial Sequence
  synthetic circulating small noncoding RNA (sncRNA) 5' transfer RNA (tRNA) half
ctgagctatcgaag

SEQ ID NO: 19054 - DNA, 24 bp, Artificial Sequence
  synthetic circulating small noncoding RNA (sncRNA) 5' transfer RNA (tRNA) half
tgaccccgacgtgattcgaacacg

SEQ ID NO: 19055 - DNA, 29 bp, Artificial Sequence
  synthetic circulating small noncoding RNA (sncRNA) 5' transfer RNA (tRNA) half
aggttgtgagttcgatcctcacctggagc

SEQ ID NO: 19056 - DNA, 33 bp, Artificial Sequence
  synthetic circulating small noncoding RNA (sncRNA) 5' transfer RNA (tRNA) half
caaacctgtagctgtttagcgacagagtggttc

SEQ ID NO: 19057 - DNA, 20 bp, Artificial Sequence
  synthetic circulating small noncoding RNA (sncRNA) 5' transfer RNA (tRNA) half
accgacgaggatgggattcg

SEQ ID NO: 19058 - DNA, 19 bp, Artificial Sequence
  synthetic circulating small noncoding RNA (sncRNA) 5' transfer RNA (tRNA) half
cgtgctgggcccataaccc

SEQ ID NO: 19059 - DNA, 19 bp, Artificial Sequence
  synthetic circulating small noncoding RNA (sncRNA) 5' transfer RNA (tRNA) half
atcctgccgactacgtgaa

SEQ ID NO: 19060 - DNA, 21 bp, Artificial Sequence
  synthetic circulating small noncoding RNA (sncRNA) 5' transfer RNA (tRNA) half
taatggataaggcactggcct

SEQ ID NO: 19061 - DNA, 12 bp, Artificial Sequence
  synthetic circulating small noncoding RNA (sncRNA) 5' transfer RNA (tRNA) half
cggcccgggttc

SEQ ID NO: 19062 - DNA, 32 bp, Artificial Sequence
  synthetic circulating small noncoding RNA (sncRNA) 5' transfer RNA (tRNA) half
caggagtggggttcgaacccacgcagacatat

SEQ ID NO: 19063 - DNA, 30 bp, Artificial Sequence
  synthetic circulating small noncoding RNA (sncRNA) 5' transfer RNA (tRNA) half
acaccgggagtcgaacccgggccgcctggg

SEQ ID NO: 19064 - DNA, 31 bp, Artificial Sequence
  synthetic circulating small noncoding RNA (sncRNA) 5' transfer RNA (tRNA) half
catatggtctagcggttaggattcctggttt

SEQ ID NO: 19065 - DNA, 21 bp, Artificial Sequence
  synthetic circulating small noncoding RNA (sncRNA) 5' transfer RNA (tRNA) half
aaaccactacactacagaaac

SEQ ID NO: 19066 - DNA, 21 bp, Artificial Sequence
  synthetic circulating small noncoding RNA (sncRNA) 5' transfer RNA (tRNA) half
ctggagatgccggggatcgaa

SEQ ID NO: 19067 - DNA, 15 bp, Artificial Sequence
  synthetic circulating small noncoding RNA (sncRNA) 5' transfer RNA (tRNA) half
tcggtagagcatgag

SEQ ID NO: 19068 - DNA, 16 bp, Artificial Sequence
  synthetic circulating small noncoding RNA (sncRNA) 5' transfer RNA (tRNA) half
cgggtgacccgggttc

SEQ ID NO: 19069 - DNA, 16 bp, Artificial Sequence
  synthetic circulating small noncoding RNA (sncRNA) 5' transfer RNA (tRNA) half
gccaaggtcgcgggtt

SEQ ID NO: 19070 - DNA, 41 bp, Artificial Sequence
  synthetic circulating small noncoding RNA (sncRNA) 5' transfer RNA (tRNA) half
ctaagccagggattgtgggttcgagtcccacctggggtaaa

SEQ ID NO: 19071 - DNA, 15 bp, Artificial Sequence
  synthetic circulating small noncoding RNA (sncRNA) 5' transfer RNA (tRNA) half
ggcacccggatttga

SEQ ID NO: 19072 - DNA, 12 bp, Artificial Sequence
  synthetic circulating small noncoding RNA (sncRNA) 5' transfer RNA (tRNA) half
tcgactccggct

SEQ ID NO: 19073 - DNA, 18 bp, Artificial Sequence
  synthetic circulating small noncoding RNA (sncRNA) 5' transfer RNA (tRNA) half
gacaggcggggatactaa

SEQ ID NO: 19074 - DNA, 19 bp, Artificial Sequence
  synthetic circulating small noncoding RNA (sncRNA) 5' transfer RNA (tRNA) half
aagtccaatgcgctatcca

SEQ ID NO: 19075 - DNA, 29 bp, Artificial Sequence
  synthetic circulating small noncoding RNA (sncRNA) 5' transfer RNA (tRNA) half
agggggatgtagctcagtggtagagcgca

SEQ ID NO: 19076 - DNA, 30 bp, Artificial Sequence
  synthetic circulating small noncoding RNA (sncRNA) 5' transfer RNA (tRNA) half
ggccgggaatcgaacccgggtcaactgctt

SEQ ID NO: 19077 - DNA, 9 bp, Artificial Sequence
  synthetic circulating small noncoding RNA (sncRNA) 5' transfer RNA (tRNA) half
cgcgcgcta

SEQ ID NO: 19078 - DNA, 14 bp, Artificial Sequence
  synthetic circulating small noncoding RNA (sncRNA) 5' transfer RNA (tRNA) half
agagcgccgaatcc

SEQ ID NO: 19079 - DNA, 18 bp, Artificial Sequence
  synthetic circulating small noncoding RNA (sncRNA) 5' transfer RNA (tRNA) half
ggatggccgagcggtcta

SEQ ID NO: 19080 - DNA, 41 bp, Artificial Sequence
  synthetic circulating small noncoding RNA (sncRNA) 5' transfer RNA (tRNA) half
gccccgtgtgaggatcgaactcacgaccttcagattatgag

SEQ ID NO: 19081 - DNA, 26 bp, Artificial Sequence
  synthetic circulating small noncoding RNA (sncRNA) 5' transfer RNA (tRNA) half
aacttccgcccgaacagggacttgaa

SEQ ID NO: 19082 - DNA, 35 bp, Artificial Sequence
  synthetic circulating small noncoding RNA (sncRNA) 5' transfer RNA (tRNA) half
accgactctggtgggattcgaacccacaacctttg

SEQ ID NO: 19083 - DNA, 16 bp, Artificial Sequence
  synthetic circulating small noncoding RNA (sncRNA) 5' transfer RNA (tRNA) half
tggataaggcgtctga

SEQ ID NO: 19084 - DNA, 11 bp, Artificial Sequence
  synthetic circulating small noncoding RNA (sncRNA) 5' transfer RNA (tRNA) half
gcagccaaacc

SEQ ID NO: 19085 - DNA, 41 bp, Artificial Sequence
  synthetic circulating small noncoding RNA (sncRNA) 5' transfer RNA (tRNA) half
tgggtgaaaaccaggaatcctaaccgctagaccatatggga

SEQ ID NO: 19086 - DNA, 15 bp, Artificial Sequence
  synthetic circulating small noncoding RNA (sncRNA) 5' transfer RNA (tRNA) half
ggggagactgcgacc

SEQ ID NO: 19087 - DNA, 28 bp, Artificial Sequence
  synthetic circulating small noncoding RNA (sncRNA) 5' transfer RNA (tRNA) half
ttccttcgagccggattcgaaccagcga

SEQ ID NO: 19088 - DNA, 29 bp, Artificial Sequence
  synthetic circulating small noncoding RNA (sncRNA) 5' transfer RNA (tRNA) half
gggtcgtgggttggagccccacgttgggc

SEQ ID NO: 19089 - DNA, 18 bp, Artificial Sequence
  synthetic circulating small noncoding RNA (sncRNA) 5' transfer RNA (tRNA) half
catcgccttaaccactcg

SEQ ID NO: 19090 - DNA, 7 bp, Artificial Sequence
  synthetic circulating small noncoding RNA (sncRNA) 5' transfer RNA (tRNA) half
ccgccgt

SEQ ID NO: 19091 - DNA, 25 bp, Artificial Sequence
  synthetic circulating small noncoding RNA (sncRNA) 5' transfer RNA (tRNA) half
tggactctgaatccagcgacccgag

SEQ ID NO: 19092 - DNA, 31 bp, Artificial Sequence
  synthetic circulating small noncoding RNA (sncRNA) 5' transfer RNA (tRNA) half
acccgggtcaactgcttggaaggcagctatg

SEQ ID NO: 19093 - DNA, 11 bp, Artificial Sequence
  synthetic circulating small noncoding RNA (sncRNA) 5' transfer RNA (tRNA) half
aaccagcgacc

SEQ ID NO: 19094 - DNA, 21 bp, Artificial Sequence
  synthetic circulating small noncoding RNA (sncRNA) 5' transfer RNA (tRNA) half
tggccgagcggtctaaggcgc

SEQ ID NO: 19095 - DNA, 30 bp, Artificial Sequence
  synthetic circulating small noncoding RNA (sncRNA) 5' transfer RNA (tRNA) half
gtgactcggattcgaaccgaggttgctgcg

SEQ ID NO: 19096 - DNA, 13 bp, Artificial Sequence
  synthetic circulating small noncoding RNA (sncRNA) 5' transfer RNA (tRNA) half
cgagtcacggcat

SEQ ID NO: 19097 - DNA, 13 bp, Artificial Sequence
  synthetic circulating small noncoding RNA (sncRNA) 5' transfer RNA (tRNA) half
cgcctccgaagag

SEQ ID NO: 19098 - DNA, 35 bp, Artificial Sequence
  synthetic circulating small noncoding RNA (sncRNA) 5' transfer RNA (tRNA) half
gcgccgaatcctaaccactagaccaccagggagcg

SEQ ID NO: 19099 - DNA, 15 bp, Artificial Sequence
  synthetic circulating small noncoding RNA (sncRNA) 5' transfer RNA (tRNA) half
gttcgattccggctc

SEQ ID NO: 19100 - DNA, 24 bp, Artificial Sequence
  synthetic circulating small noncoding RNA (sncRNA) 5' transfer RNA (tRNA) half
cagtggtagaattctcgcctgcca

SEQ ID NO: 19101 - DNA, 16 bp, Artificial Sequence
  synthetic circulating small noncoding RNA (sncRNA) 5' transfer RNA (tRNA) half
gagccggactcgaacc

SEQ ID NO: 19102 - DNA, 13 bp, Artificial Sequence
  synthetic circulating small noncoding RNA (sncRNA) 5' transfer RNA (tRNA) half
cctgttcgggcgc

SEQ ID NO: 19103 - DNA, 11 bp, Artificial Sequence
  synthetic circulating small noncoding RNA (sncRNA) 5' transfer RNA (tRNA) half
ggcggtgagag

SEQ ID NO: 19104 - DNA, 19 bp, Artificial Sequence
  synthetic circulating small noncoding RNA (sncRNA) 5' transfer RNA (tRNA) half
cctggctggctcgttggga

SEQ ID NO: 19105 - DNA, 11 bp, Artificial Sequence
  synthetic circulating small noncoding RNA (sncRNA) 5' transfer RNA (tRNA) half
tagagcgcgtg

SEQ ID NO: 19106 - DNA, 20 bp, Artificial Sequence
  synthetic circulating small noncoding RNA (sncRNA) 5' transfer RNA (tRNA) half
agagtactaaccactatacg

SEQ ID NO: 19107 - DNA, 18 bp, Artificial Sequence
  synthetic circulating small noncoding RNA (sncRNA) 5' transfer RNA (tRNA) half
cccgtccgtgcctgcgtt

SEQ ID NO: 19108 - DNA, 40 bp, Artificial Sequence
  synthetic circulating small noncoding RNA (sncRNA) 5' transfer RNA (tRNA) half
ttcgcgtgttaggcgaatgtgataaccactacactacgga

SEQ ID NO: 19109 - DNA, 34 bp, Artificial Sequence
  synthetic circulating small noncoding RNA (sncRNA) 5' transfer RNA (tRNA) half
ggcgaacgtgataaccactacactacggaaactc

SEQ ID NO: 19110 - DNA, 6 bp, Artificial Sequence
  synthetic circulating small noncoding RNA (sncRNA) 5' transfer RNA (tRNA) half
cgtccg

SEQ ID NO: 19111 - DNA, 10 bp, Artificial Sequence
  synthetic circulating small noncoding RNA (sncRNA) 5' transfer RNA (tRNA) half
gagccctgta

SEQ ID NO: 19112 - DNA, 33 bp, Artificial Sequence
  synthetic circulating small noncoding RNA (sncRNA) 5' transfer RNA (tRNA) half
cgtccctggtggtctagtggctaggattcggcg

SEQ ID NO: 19113 - DNA, 21 bp, Artificial Sequence
  synthetic circulating small noncoding RNA (sncRNA) 5' transfer RNA (tRNA) half
ttcgacgaggatgggattcga

SEQ ID NO: 19114 - DNA, 23 bp, Artificial Sequence
  synthetic circulating small noncoding RNA (sncRNA) 5' transfer RNA (tRNA) half
tcagtggtagagcatttgactgc

SEQ ID NO: 19115 - DNA, 17 bp, Artificial Sequence
  synthetic circulating small noncoding RNA (sncRNA) 5' transfer RNA (tRNA) half
cagtcggtagagcatga

SEQ ID NO: 19116 - DNA, 10 bp, Artificial Sequence
  synthetic circulating small noncoding RNA (sncRNA) 5' transfer RNA (tRNA) half
gaacccgcga

SEQ ID NO: 19117 - DNA, 25 bp, Artificial Sequence
  synthetic circulating small noncoding RNA (sncRNA) 5' transfer RNA (tRNA) half
acccgggttcgattcccgggcggcg

SEQ ID NO: 19118 - DNA, 19 bp, Artificial Sequence
  synthetic circulating small noncoding RNA (sncRNA) 5' transfer RNA (tRNA) half
cgaatccgagtcacggcat

SEQ ID NO: 19119 - DNA, 33 bp, Artificial Sequence
  synthetic circulating small noncoding RNA (sncRNA) 5' transfer RNA (tRNA) half
ttccgtagtgtagtggttatcacgttcgcctaa

SEQ ID NO: 19120 - DNA, 39 bp, Artificial Sequence
  synthetic circulating small noncoding RNA (sncRNA) 5' transfer RNA (tRNA) half
gcgtggcaggcgagaattctaccactgaaccaccaatgc

SEQ ID NO: 19121 - DNA, 34 bp, Artificial Sequence
  synthetic circulating small noncoding RNA (sncRNA) 5' transfer RNA (tRNA) half
cattggccgggaatcgaacccgggtcacccgcgt

SEQ ID NO: 19122 - DNA, 13 bp, Artificial Sequence
  synthetic circulating small noncoding RNA (sncRNA) 5' transfer RNA (tRNA) half
cccgcgcaggttc

SEQ ID NO: 19123 - DNA, 24 bp, Artificial Sequence
  synthetic circulating small noncoding RNA (sncRNA) 5' transfer RNA (tRNA) half
cccacaccgggagtcgaacccggg

SEQ ID NO: 19124 - DNA, 26 bp, Artificial Sequence
  synthetic circulating small noncoding RNA (sncRNA) 5' transfer RNA (tRNA) half
ctcgttagtatagtggtgagtatccc

SEQ ID NO: 19125 - DNA, 35 bp, Artificial Sequence
  synthetic circulating small noncoding RNA (sncRNA) 5' transfer RNA (tRNA) half
aaggcattggtggttcagtggtagaattctcgcct

SEQ ID NO: 19126 - DNA, 10 bp, Artificial Sequence
  synthetic circulating small noncoding RNA (sncRNA) 5' transfer RNA (tRNA) half
tgtttccgcc

SEQ ID NO: 19127 - DNA, 32 bp, Artificial Sequence
  synthetic circulating small noncoding RNA (sncRNA) 5' transfer RNA (tRNA) half
gctggcccgtacggggatcgaacccgcgacct

SEQ ID NO: 19128 - DNA, 29 bp, Artificial Sequence
  synthetic circulating small noncoding RNA (sncRNA) 5' transfer RNA (tRNA) half
tagctcagtcggtagagcatcagactttt

SEQ ID NO: 19129 - DNA, 17 bp, Artificial Sequence
  synthetic circulating small noncoding RNA (sncRNA) 5' transfer RNA (tRNA) half
accgggcggaaacaaga

SEQ ID NO: 19130 - DNA, 17 bp, Artificial Sequence
  synthetic circulating small noncoding RNA (sncRNA) 5' transfer RNA (tRNA) half
cgtccgggatttgaacc

SEQ ID NO: 19131 - DNA, 23 bp, Artificial Sequence
  synthetic circulating small noncoding RNA (sncRNA) 5' transfer RNA (tRNA) half
tgtagcggttatcacgtctgctt

SEQ ID NO: 19132 - DNA, 30 bp, Artificial Sequence
  synthetic circulating small noncoding RNA (sncRNA) 5' transfer RNA (tRNA) half
cggttccatagtgtagcggttatcacgtct

SEQ ID NO: 19133 - DNA, 20 bp, Artificial Sequence
  synthetic circulating small noncoding RNA (sncRNA) 5' transfer RNA (tRNA) half
acgcgaaaggtccccggttc

SEQ ID NO: 19134 - DNA, 18 bp, Artificial Sequence
  synthetic circulating small noncoding RNA (sncRNA) 5' transfer RNA (tRNA) half
ccctgaatggggtccagt

SEQ ID NO: 19135 - DNA, 19 bp, Artificial Sequence
  synthetic circulating small noncoding RNA (sncRNA) 5' transfer RNA (tRNA) half
gcggaggactgtagtcagt

SEQ ID NO: 19136 - DNA, 26 bp, Artificial Sequence
  synthetic circulating small noncoding RNA (sncRNA) 5' transfer RNA (tRNA) half
atccatcgacctctgggttatgggcc

SEQ ID NO: 19137 - DNA, 21 bp, Artificial Sequence
  synthetic circulating small noncoding RNA (sncRNA) 5' transfer RNA (tRNA) half
ctgtcacgcgggagaccgggg

SEQ ID NO: 19138 - DNA, 20 bp, Artificial Sequence
  synthetic circulating small noncoding RNA (sncRNA) 5' transfer RNA (tRNA) half
tgtagtggtatcatgcaaga

SEQ ID NO: 19139 - DNA, 39 bp, Artificial Sequence
  synthetic circulating small noncoding RNA (sncRNA) 5' transfer RNA (tRNA) half
ttagcgacagagtggttcaattccacctttcgggcggga

SEQ ID NO: 19140 - DNA, 14 bp, Artificial Sequence
  synthetic circulating small noncoding RNA (sncRNA) 5' transfer RNA (tRNA) half
tggataaggcattg

SEQ ID NO: 19141 - DNA, 26 bp, Artificial Sequence
  synthetic circulating small noncoding RNA (sncRNA) 5' transfer RNA (tRNA) half
gagtcgaacccgggccgcctgggtga

SEQ ID NO: 19142 - DNA, 14 bp, Artificial Sequence
  synthetic circulating small noncoding RNA (sncRNA) 5' transfer RNA (tRNA) half
cgcccccgaagaga

SEQ ID NO: 19143 - DNA, 28 bp, Artificial Sequence
  synthetic circulating small noncoding RNA (sncRNA) 5' transfer RNA (tRNA) half
cgcggcggtgagagcgccgaatcctaac

SEQ ID NO: 19144 - DNA, 21 bp, Artificial Sequence
  synthetic circulating small noncoding RNA (sncRNA) 5' transfer RNA (tRNA) half
agagtctcatgctctaccgac

SEQ ID NO: 19145 - DNA, 18 bp, Artificial Sequence
  synthetic circulating small noncoding RNA (sncRNA) 5' transfer RNA (tRNA) half
agcgcccgaacagggact

SEQ ID NO: 19146 - DNA, 8 bp, Artificial Sequence
  synthetic circulating small noncoding RNA (sncRNA) 5' transfer RNA (tRNA) half
gcccgcat

SEQ ID NO: 19147 - DNA, 32 bp, Artificial Sequence
  synthetic circulating small noncoding RNA (sncRNA) 5' transfer RNA (tRNA) half
accacgaagggattcgaaccctcaatcttctg

SEQ ID NO: 19148 - DNA, 16 bp, Artificial Sequence
  synthetic circulating small noncoding RNA (sncRNA) 5' transfer RNA (tRNA) half
gggaattgaaccccgg

SEQ ID NO: 19149 - DNA, 10 bp, Artificial Sequence
  synthetic circulating small noncoding RNA (sncRNA) 5' transfer RNA (tRNA) half
tcgaaccccg

SEQ ID NO: 19150 - DNA, 22 bp, Artificial Sequence
  synthetic circulating small noncoding RNA (sncRNA) 5' transfer RNA (tRNA) half
ttcgatccccagcatctccagg

SEQ ID NO: 19151 - DNA, 19 bp, Artificial Sequence
  synthetic circulating small noncoding RNA (sncRNA) 5' transfer RNA (tRNA) half
gggggtatagctcagtggt

SEQ ID NO: 19152 - DNA, 7 bp, Artificial Sequence
  synthetic circulating small noncoding RNA (sncRNA) 5' transfer RNA (tRNA) half
ccacgcg

SEQ ID NO: 19153 - DNA, 12 bp, Artificial Sequence
  synthetic circulating small noncoding RNA (sncRNA) 5' transfer RNA (tRNA) half
gtcaaatgctct

SEQ ID NO: 19154 - DNA, 10 bp, Artificial Sequence
  synthetic circulating small noncoding RNA (sncRNA) 5' transfer RNA (tRNA) half
gcctgtcacg

SEQ ID NO: 19155 - DNA, 29 bp, Artificial Sequence
  synthetic circulating small noncoding RNA (sncRNA) 5' transfer RNA (tRNA) half
acccgggccgcctgggtgaaaaccaggaa

SEQ ID NO: 19156 - DNA, 18 bp, Artificial Sequence
  synthetic circulating small noncoding RNA (sncRNA) 5' transfer RNA (tRNA) half
aaactccagctggcccgt

SEQ ID NO: 19157 - DNA, 24 bp, Artificial Sequence
  synthetic circulating small noncoding RNA (sncRNA) 5' transfer RNA (tRNA) half
gagtggtctaaggcgccagactca

SEQ ID NO: 19158 - DNA, 36 bp, Artificial Sequence
  synthetic circulating small noncoding RNA (sncRNA) 5' transfer RNA (tRNA) half
agcggttaggattcctggttttcacccaggcggccc

SEQ ID NO: 19159 - DNA, 17 bp, Artificial Sequence
  synthetic circulating small noncoding RNA (sncRNA) 5' transfer RNA (tRNA) half
gacaggcggggatactc

SEQ ID NO: 19160 - DNA, 16 bp, Artificial Sequence
  synthetic circulating small noncoding RNA (sncRNA) 5' transfer RNA (tRNA) half
cggggatcgaacccgc

SEQ ID NO: 19161 - DNA, 15 bp, Artificial Sequence
  synthetic circulating small noncoding RNA (sncRNA) 5' transfer RNA (tRNA) half
ggataaggcgtctga

SEQ ID NO: 19162 - DNA, 26 bp, Artificial Sequence
  synthetic circulating small noncoding RNA (sncRNA) 5' transfer RNA (tRNA) half
aaatttaaaacttagggatgtggcag

SEQ ID NO: 19163 - DNA, 12 bp, Artificial Sequence
  synthetic circulating small noncoding RNA (sncRNA) 5' transfer RNA (tRNA) half
taggcagcgcgt

SEQ ID NO: 19164 - DNA, 11 bp, Artificial Sequence
  synthetic circulating small noncoding RNA (sncRNA) 5' transfer RNA (tRNA) half
gagaatcatac

SEQ ID NO: 19165 - DNA, 17 bp, Artificial Sequence
  synthetic circulating small noncoding RNA (sncRNA) 5' transfer RNA (tRNA) half
agattccaggttcgact

SEQ ID NO: 19166 - DNA, 30 bp, Artificial Sequence
  synthetic circulating small noncoding RNA (sncRNA) 5' transfer RNA (tRNA) half
aaaggttggtggttcgagcccacccaggga

SEQ ID NO: 19167 - DNA, 29 bp, Artificial Sequence
  synthetic circulating small noncoding RNA (sncRNA) 5' transfer RNA (tRNA) half
ctctggactctgaatccagcgatccgagt

SEQ ID NO: 19168 - DNA, 35 bp, Artificial Sequence
  synthetic circulating small noncoding RNA (sncRNA) 5' transfer RNA (tRNA) half
ctcgtccgggatttgaacccgggacctctcgcacc

SEQ ID NO: 19169 - DNA, 20 bp, Artificial Sequence
  synthetic circulating small noncoding RNA (sncRNA) 5' transfer RNA (tRNA) half
tggttaggattcggcgctct

SEQ ID NO: 19170 - DNA, 18 bp, Artificial Sequence
  synthetic circulating small noncoding RNA (sncRNA) 5' transfer RNA (tRNA) half
gaatcccacttctgacac

SEQ ID NO: 19171 - DNA, 18 bp, Artificial Sequence
  synthetic circulating small noncoding RNA (sncRNA) 5' transfer RNA (tRNA) half
ccgagcggtctaaggcgc

SEQ ID NO: 19172 - DNA, 15 bp, Artificial Sequence
  synthetic circulating small noncoding RNA (sncRNA) 5' transfer RNA (tRNA) half
gtgataaccgctaca

SEQ ID NO: 19173 - DNA, 28 bp, Artificial Sequence
  synthetic circulating small noncoding RNA (sncRNA) 5' transfer RNA (tRNA) half
ttccgtagtgtagtggtcatcacgctcg

SEQ ID NO: 19174 - DNA, 44 bp, Artificial Sequence
  synthetic circulating small noncoding RNA (sncRNA) 5' transfer RNA (tRNA) half
aaagtattgtgccccgtgtgaggatcgaactcacgaccttcaga

SEQ ID NO: 19175 - DNA, 27 bp, Artificial Sequence
  synthetic circulating small noncoding RNA (sncRNA) 5' transfer RNA (tRNA) half
gtgtggcccgtacggggatcgaacccg

SEQ ID NO: 19176 - DNA, 8 bp, Artificial Sequence
  synthetic circulating small noncoding RNA (sncRNA) 5' transfer RNA (tRNA) half
gcggtaga

SEQ ID NO: 19177 - DNA, 21 bp, Artificial Sequence
  synthetic circulating small noncoding RNA (sncRNA) 5' transfer RNA (tRNA) half
agggggcacccggatttgaac

SEQ ID NO: 19178 - DNA, 22 bp, Artificial Sequence
  synthetic circulating small noncoding RNA (sncRNA) 5' transfer RNA (tRNA) half
gcgagaattctaccattgaacc

SEQ ID NO: 19179 - DNA, 11 bp, Artificial Sequence
  synthetic circulating small noncoding RNA (sncRNA) 5' transfer RNA (tRNA) half
cagtcggtaga

SEQ ID NO: 19180 - DNA, 21 bp, Artificial Sequence
  synthetic circulating small noncoding RNA (sncRNA) 5' transfer RNA (tRNA) half
ggacttgaaccctggaccctc

SEQ ID NO: 19181 - DNA, 11 bp, Artificial Sequence
  synthetic circulating small noncoding RNA (sncRNA) 5' transfer RNA (tRNA) half
cgaatcctaac

SEQ ID NO: 19182 - DNA, 6 bp, Artificial Sequence
  synthetic circulating small noncoding RNA (sncRNA) 5' transfer RNA (tRNA) half
cggcga

SEQ ID NO: 19183 - DNA, 44 bp, Artificial Sequence
  synthetic circulating small noncoding RNA (sncRNA) 5' transfer RNA (tRNA) half
cgaggatgggattcgaacccacgcgtgcaaagcacaatggatta

SEQ ID NO: 19184 - DNA, 42 bp, Artificial Sequence
  synthetic circulating small noncoding RNA (sncRNA) 5' transfer RNA (tRNA) half
gtttccgtagtgtagtggttatcacgttcgcctaacacgcga

SEQ ID NO: 19185 - DNA, 23 bp, Artificial Sequence
  synthetic circulating small noncoding RNA (sncRNA) 5' transfer RNA (tRNA) half
tcaaagtccagagtgctaaccat

SEQ ID NO: 19186 - DNA, 37 bp, Artificial Sequence
  synthetic circulating small noncoding RNA (sncRNA) 5' transfer RNA (tRNA) half
agacttaaaaccttgttcccagaggttcaaatcctct

SEQ ID NO: 19187 - DNA, 38 bp, Artificial Sequence
  synthetic circulating small noncoding RNA (sncRNA) 5' transfer RNA (tRNA) half
acagctgggggattagctcaaatggtagagcgctcgct

SEQ ID NO: 19188 - DNA, 31 bp, Artificial Sequence
  synthetic circulating small noncoding RNA (sncRNA) 5' transfer RNA (tRNA) half
ccacgaagggactcgaaccctcaatcttctg

SEQ ID NO: 19189 - DNA, 25 bp, Artificial Sequence
  synthetic circulating small noncoding RNA (sncRNA) 5' transfer RNA (tRNA) half
cgcgagttcaaatctcgctggggcc

SEQ ID NO: 19190 - DNA, 16 bp, Artificial Sequence
  synthetic circulating small noncoding RNA (sncRNA) 5' transfer RNA (tRNA) half
ggagaccggggttcga

SEQ ID NO: 19191 - DNA, 14 bp, Artificial Sequence
  synthetic circulating small noncoding RNA (sncRNA) 5' transfer RNA (tRNA) half
ctagcggttaggat

SEQ ID NO: 19192 - DNA, 36 bp, Artificial Sequence
  synthetic circulating small noncoding RNA (sncRNA) 5' transfer RNA (tRNA) half
ccaccccaggtgggactcgaacccacaatccctggc

SEQ ID NO: 19193 - DNA, 14 bp, Artificial Sequence
  synthetic circulating small noncoding RNA (sncRNA) 5' transfer RNA (tRNA) half
cgggggattagctc

SEQ ID NO: 19194 - DNA, 23 bp, Artificial Sequence
  synthetic circulating small noncoding RNA (sncRNA) 5' transfer RNA (tRNA) half
agtggtgagtatccccgcctgtc

SEQ ID NO: 19195 - DNA, 17 bp, Artificial Sequence
  synthetic circulating small noncoding RNA (sncRNA) 5' transfer RNA (tRNA) half
agtgcattggccgggaa

SEQ ID NO: 19196 - DNA, 21 bp, Artificial Sequence
  synthetic circulating small noncoding RNA (sncRNA) 5' transfer RNA (tRNA) half
gtgtcagaagtgggattcgaa

SEQ ID NO: 19197 - DNA, 29 bp, Artificial Sequence
  synthetic circulating small noncoding RNA (sncRNA) 5' transfer RNA (tRNA) half
aaaaccaggaatcctaaccgctagaccat

SEQ ID NO: 19198 - DNA, 16 bp, Artificial Sequence
  synthetic circulating small noncoding RNA (sncRNA) 5' transfer RNA (tRNA) half
gtccctgttcgggcgc

SEQ ID NO: 19199 - DNA, 36 bp, Artificial Sequence
  synthetic circulating small noncoding RNA (sncRNA) 5' transfer RNA (tRNA) half
agattaagagtctcatgctctaccgactgagctagc

SEQ ID NO: 19200 - DNA, 30 bp, Artificial Sequence
  synthetic circulating small noncoding RNA (sncRNA) 5' transfer RNA (tRNA) half
agccagggattgtgggttcgagtcccatct

SEQ ID NO: 19201 - DNA, 16 bp, Artificial Sequence
  synthetic circulating small noncoding RNA (sncRNA) 5' transfer RNA (tRNA) half
gtcgtgggttggagcc

SEQ ID NO: 19202 - DNA, 15 bp, Artificial Sequence
  synthetic circulating small noncoding RNA (sncRNA) 5' transfer RNA (tRNA) half
ggataaggcactggc

SEQ ID NO: 19203 - DNA, 20 bp, Artificial Sequence
  synthetic circulating small noncoding RNA (sncRNA) 5' transfer RNA (tRNA) half
caggcggggatactcaccac

SEQ ID NO: 19204 - DNA, 35 bp, Artificial Sequence
  synthetic circulating small noncoding RNA (sncRNA) 5' transfer RNA (tRNA) half
gagccaggtaggagtcgaacctacaatcttctgat

SEQ ID NO: 19205 - DNA, 34 bp, Artificial Sequence
  synthetic circulating small noncoding RNA (sncRNA) 5' transfer RNA (tRNA) half
tgcccggctagctcagtcggtagagcatgagact

SEQ ID NO: 19206 - DNA, 18 bp, Artificial Sequence
  synthetic circulating small noncoding RNA (sncRNA) 5' transfer RNA (tRNA) half
tcacacgcgaaaggtccc

SEQ ID NO: 19207 - DNA, 6 bp, Artificial Sequence
  synthetic circulating small noncoding RNA (sncRNA) 5' transfer RNA (tRNA) half
cagacg

SEQ ID NO: 19208 - DNA, 11 bp, Artificial Sequence
  synthetic circulating small noncoding RNA (sncRNA) 5' transfer RNA (tRNA) half
cggttcaaatc

SEQ ID NO: 19209 - DNA, 12 bp, Artificial Sequence
  synthetic circulating small noncoding RNA (sncRNA) 5' transfer RNA (tRNA) half
tcgaacccggga

SEQ ID NO: 19210 - DNA, 12 bp, Artificial Sequence
  synthetic circulating small noncoding RNA (sncRNA) 5' transfer RNA (tRNA) half
ccatctggggtg

SEQ ID NO: 19211 - DNA, 19 bp, Artificial Sequence
  synthetic circulating small noncoding RNA (sncRNA) 5' transfer RNA (tRNA) half
ctgggctcgtccgggattt

SEQ ID NO: 19212 - DNA, 11 bp, Artificial Sequence
  synthetic circulating small noncoding RNA (sncRNA) 5' transfer RNA (tRNA) half
cccgggacctc

SEQ ID NO: 19213 - DNA, 27 bp, Artificial Sequence
  synthetic circulating small noncoding RNA (sncRNA) 5' transfer RNA (tRNA) half
aggcgagaattctaccattgaaccacc

SEQ ID NO: 19214 - DNA, 10 bp, Artificial Sequence
  synthetic circulating small noncoding RNA (sncRNA) 5' transfer RNA (tRNA) half
atcgaacccg

SEQ ID NO: 19215 - DNA, 30 bp, Artificial Sequence
  synthetic circulating small noncoding RNA (sncRNA) 5' transfer RNA (tRNA) half
ccccgcgcaggttcgaatcctgctcacagc

SEQ ID NO: 19216 - DNA, 36 bp, Artificial Sequence
  synthetic circulating small noncoding RNA (sncRNA) 5' transfer RNA (tRNA) half
tgagggtccagggttcaagtccctgttcgggcgctt

SEQ ID NO: 19217 - DNA, 33 bp, Artificial Sequence
  synthetic circulating small noncoding RNA (sncRNA) 5' transfer RNA (tRNA) half
gggggcacctggatttgaaccagggacctcttg

SEQ ID NO: 19218 - DNA, 24 bp, Artificial Sequence
  synthetic circulating small noncoding RNA (sncRNA) 5' transfer RNA (tRNA) half
agtggttaggattcggcgctctca

SEQ ID NO: 19219 - DNA, 40 bp, Artificial Sequence
  synthetic circulating small noncoding RNA (sncRNA) 5' transfer RNA (tRNA) half
gcctgggtgaaaaccaggaatcctaaccgctagaccatgt

SEQ ID NO: 19220 - DNA, 33 bp, Artificial Sequence
  synthetic circulating small noncoding RNA (sncRNA) 5' transfer RNA (tRNA) half
tctgatgctctaccgactgagctatccgggctc

SEQ ID NO: 19221 - DNA, 23 bp, Artificial Sequence
  synthetic circulating small noncoding RNA (sncRNA) 5' transfer RNA (tRNA) half
cacacgcgaaaggtccccggttc

SEQ ID NO: 19222 - DNA, 16 bp, Artificial Sequence
  synthetic circulating small noncoding RNA (sncRNA) 5' transfer RNA (tRNA) half
atcgaaccccggtctc

SEQ ID NO: 19223 - DNA, 16 bp, Artificial Sequence
  synthetic circulating small noncoding RNA (sncRNA) 5' transfer RNA (tRNA) half
ggagtcagacgcgcta

SEQ ID NO: 19224 - DNA, 17 bp, Artificial Sequence
  synthetic circulating small noncoding RNA (sncRNA) 5' transfer RNA (tRNA) half
atcgcgggttcgaaccc

SEQ ID NO: 19225 - DNA, 20 bp, Artificial Sequence
  synthetic circulating small noncoding RNA (sncRNA) 5' transfer RNA (tRNA) half
ccgggcggaaacatatcttt

SEQ ID NO: 19226 - DNA, 37 bp, Artificial Sequence
  synthetic circulating small noncoding RNA (sncRNA) 5' transfer RNA (tRNA) half
attgcattggccgggaatcgaacccgggtcacccgcg

SEQ ID NO: 19227 - DNA, 20 bp, Artificial Sequence
  synthetic circulating small noncoding RNA (sncRNA) 5' transfer RNA (tRNA) half
aatcccggacgagccccact

SEQ ID NO: 19228 - DNA, 19 bp, Artificial Sequence
  synthetic circulating small noncoding RNA (sncRNA) 5' transfer RNA (tRNA) half
ccggggacctcttgatctg

SEQ ID NO: 19229 - DNA, 33 bp, Artificial Sequence
  synthetic circulating small noncoding RNA (sncRNA) 5' transfer RNA (tRNA) half
gagggggtgtagctcagtggtagagcgcgtgct

SEQ ID NO: 19230 - DNA, 30 bp, Artificial Sequence
  synthetic circulating small noncoding RNA (sncRNA) 5' transfer RNA (tRNA) half
tgaccgggaatcgaacccgggccgcggcgg

SEQ ID NO: 19231 - DNA, 20 bp, Artificial Sequence
  synthetic circulating small noncoding RNA (sncRNA) 5' transfer RNA (tRNA) half
gagccaggtaggagtcgaac

SEQ ID NO: 19232 - DNA, 19 bp, Artificial Sequence
  synthetic circulating small noncoding RNA (sncRNA) 5' transfer RNA (tRNA) half
tcgagccccacgttgggcg

SEQ ID NO: 19233 - DNA, 12 bp, Artificial Sequence
  synthetic circulating small noncoding RNA (sncRNA) 5' transfer RNA (tRNA) half
tggttagagcgt

SEQ ID NO: 19234 - DNA, 10 bp, Artificial Sequence
  synthetic circulating small noncoding RNA (sncRNA) 5' transfer RNA (tRNA) half
tggccgagcg

SEQ ID NO: 19235 - DNA, 26 bp, Artificial Sequence
  synthetic circulating small noncoding RNA (sncRNA) 5' transfer RNA (tRNA) half
tcctgggttcgagccccagtggaacc

SEQ ID NO: 19236 - DNA, 17 bp, Artificial Sequence
  synthetic circulating small noncoding RNA (sncRNA) 5' transfer RNA (tRNA) half
cgaactcacgaccttca

SEQ ID NO: 19237 - DNA, 21 bp, Artificial Sequence
  synthetic circulating small noncoding RNA (sncRNA) 5' transfer RNA (tRNA) half
ttcgattccggctcgaaggag

SEQ ID NO: 19238 - DNA, 35 bp, Artificial Sequence
  synthetic circulating small noncoding RNA (sncRNA) 5' transfer RNA (tRNA) half
gactctggtgggattcgaacccacaacctttgaat

SEQ ID NO: 19239 - DNA, 30 bp, Artificial Sequence
  synthetic circulating small noncoding RNA (sncRNA) 5' transfer RNA (tRNA) half
taggtcgctggttcgattccggctcgaagg

SEQ ID NO: 19240 - DNA, 12 bp, Artificial Sequence
  synthetic circulating small noncoding RNA (sncRNA) 5' transfer RNA (tRNA) half
aggttgtgggtt

SEQ ID NO: 19241 - DNA, 22 bp, Artificial Sequence
  synthetic circulating small noncoding RNA (sncRNA) 5' transfer RNA (tRNA) half
tggtagaattctcgcctgccac

SEQ ID NO: 19242 - DNA, 36 bp, Artificial Sequence
  synthetic circulating small noncoding RNA (sncRNA) 5' transfer RNA (tRNA) half
gcacgaggccccgggttcaatccccggcacctccag

SEQ ID NO: 19243 - DNA, 15 bp, Artificial Sequence
  synthetic circulating small noncoding RNA (sncRNA) 5' transfer RNA (tRNA) half
gaacacgcagccttc

SEQ ID NO: 19244 - DNA, 20 bp, Artificial Sequence
  synthetic circulating small noncoding RNA (sncRNA) 5' transfer RNA (tRNA) half
gtggtagagcatttgactgc

SEQ ID NO: 19245 - DNA, 35 bp, Artificial Sequence
  synthetic circulating small noncoding RNA (sncRNA) 5' transfer RNA (tRNA) half
gaagtccaatgcgctatccattgcgccacggagcc

SEQ ID NO: 19246 - DNA, 30 bp, Artificial Sequence
  synthetic circulating small noncoding RNA (sncRNA) 5' transfer RNA (tRNA) half
gattgtgggttcgagtcccatctggggtgg

SEQ ID NO: 19247 - DNA, 24 bp, Artificial Sequence
  synthetic circulating small noncoding RNA (sncRNA) 5' transfer RNA (tRNA) half
tgtgtcagaagtgggattcgaacc

SEQ ID NO: 19248 - DNA, 19 bp, Artificial Sequence
  synthetic circulating small noncoding RNA (sncRNA) 5' transfer RNA (tRNA) half
gaacacgcagccttctgat

SEQ ID NO: 19249 - DNA, 36 bp, Artificial Sequence
  synthetic circulating small noncoding RNA (sncRNA) 5' transfer RNA (tRNA) half
tagggggcacctggatttgaaccagggacctcttga

SEQ ID NO: 19250 - DNA, 18 bp, Artificial Sequence
  synthetic circulating small noncoding RNA (sncRNA) 5' transfer RNA (tRNA) half
caatggtagaattctcgc

SEQ ID NO: 19251 - DNA, 23 bp, Artificial Sequence
  synthetic circulating small noncoding RNA (sncRNA) 5' transfer RNA (tRNA) half
ttggggtttccccgcgcaggttc

SEQ ID NO: 19252 - DNA, 13 bp, Artificial Sequence
  synthetic circulating small noncoding RNA (sncRNA) 5' transfer RNA (tRNA) half
gctccaggtgagg

SEQ ID NO: 19253 - DNA, 19 bp, Artificial Sequence
  synthetic circulating small noncoding RNA (sncRNA) 5' transfer RNA (tRNA) half
gcgtgctgggcccataacc

SEQ ID NO: 19254 - DNA, 16 bp, Artificial Sequence
  synthetic circulating small noncoding RNA (sncRNA) 5' transfer RNA (tRNA) half
acccacgcagacatat

SEQ ID NO: 19255 - DNA, 27 bp, Artificial Sequence
  synthetic circulating small noncoding RNA (sncRNA) 5' transfer RNA (tRNA) half
aaggccccagcgagatttgaactcgcg

SEQ ID NO: 19256 - DNA, 11 bp, Artificial Sequence
  synthetic circulating small noncoding RNA (sncRNA) 5' transfer RNA (tRNA) half
ctcggtgggac

SEQ ID NO: 19257 - DNA, 18 bp, Artificial Sequence
  synthetic circulating small noncoding RNA (sncRNA) 5' transfer RNA (tRNA) half
tcgacctctgggttatgg

SEQ ID NO: 19258 - DNA, 22 bp, Artificial Sequence
  synthetic circulating small noncoding RNA (sncRNA) 5' transfer RNA (tRNA) half
cgagttcaaatctcggtggaac

SEQ ID NO: 19259 - DNA, 11 bp, Artificial Sequence
  synthetic circulating small noncoding RNA (sncRNA) 5' transfer RNA (tRNA) half
ggtgtgggaac

SEQ ID NO: 19260 - DNA, 22 bp, Artificial Sequence
  synthetic circulating small noncoding RNA (sncRNA) 5' transfer RNA (tRNA) half
aatcgaacccgggccgcggcgg

SEQ ID NO: 19261 - DNA, 27 bp, Artificial Sequence
  synthetic circulating small noncoding RNA (sncRNA) 5' transfer RNA (tRNA) half
agccgcccgaacagggacttgaaccct

SEQ ID NO: 19262 - DNA, 11 bp, Artificial Sequence
  synthetic circulating small noncoding RNA (sncRNA) 5' transfer RNA (tRNA) half
ccccgcctgtc

SEQ ID NO: 19263 - DNA, 36 bp, Artificial Sequence
  synthetic circulating small noncoding RNA (sncRNA) 5' transfer RNA (tRNA) half
gatcagaaggttgcgtgttcaaatcacgtcggggtc

SEQ ID NO: 19264 - DNA, 21 bp, Artificial Sequence
  synthetic circulating small noncoding RNA (sncRNA) 5' transfer RNA (tRNA) half
gtgagtatccccgcctgtcac

SEQ ID NO: 19265 - DNA, 20 bp, Artificial Sequence
  synthetic circulating small noncoding RNA (sncRNA) 5' transfer RNA (tRNA) half
tctggctccgtggcttagct

SEQ ID NO: 19266 - DNA, 11 bp, Artificial Sequence
  synthetic circulating small noncoding RNA (sncRNA) 5' transfer RNA (tRNA) half
gcggcggtgag

SEQ ID NO: 19267 - DNA, 15 bp, Artificial Sequence
  synthetic circulating small noncoding RNA (sncRNA) 5' transfer RNA (tRNA) half
ccagcgatccgagtt

SEQ ID NO: 19268 - DNA, 22 bp, Artificial Sequence
  synthetic circulating small noncoding RNA (sncRNA) 5' transfer RNA (tRNA) half
ttcggcgctctcaccgccgcgg

SEQ ID NO: 19269 - DNA, 7 bp, Artificial Sequence
  synthetic circulating small noncoding RNA (sncRNA) 5' transfer RNA (tRNA) half
cgagccg

SEQ ID NO: 19270 - DNA, 17 bp, Artificial Sequence
  synthetic circulating small noncoding RNA (sncRNA) 5' transfer RNA (tRNA) half
attagggtggcagagcc

SEQ ID NO: 19271 - DNA, 24 bp, Artificial Sequence
  synthetic circulating small noncoding RNA (sncRNA) 5' transfer RNA (tRNA) half
tagctcagtggtagagcgcgcgct

SEQ ID NO: 19272 - DNA, 22 bp, Artificial Sequence
  synthetic circulating small noncoding RNA (sncRNA) 5' transfer RNA (tRNA) half
gaacctgcgcggggagacccca

SEQ ID NO: 19273 - DNA, 23 bp, Artificial Sequence
  synthetic circulating small noncoding RNA (sncRNA) 5' transfer RNA (tRNA) half
tcgaaccccggtctcccgcgtga

SEQ ID NO: 19274 - DNA, 14 bp, Artificial Sequence
  synthetic circulating small noncoding RNA (sncRNA) 5' transfer RNA (tRNA) half
caccgctgggattc

SEQ ID NO: 19275 - DNA, 21 bp, Artificial Sequence
  synthetic circulating small noncoding RNA (sncRNA) 5' transfer RNA (tRNA) half
gggactcgaacccacaatccc

SEQ ID NO: 19276 - DNA, 18 bp, Artificial Sequence
  synthetic circulating small noncoding RNA (sncRNA) 5' transfer RNA (tRNA) half
gtagtggtatcatgcaag

SEQ ID NO: 19277 - DNA, 24 bp, Artificial Sequence
  synthetic circulating small noncoding RNA (sncRNA) 5' transfer RNA (tRNA) half
tctagtggtatgattctcagtttg

SEQ ID NO: 19278 - DNA, 13 bp, Artificial Sequence
  synthetic circulating small noncoding RNA (sncRNA) 5' transfer RNA (tRNA) half
ccggcatctccac

SEQ ID NO: 19279 - DNA, 17 bp, Artificial Sequence
  synthetic circulating small noncoding RNA (sncRNA) 5' transfer RNA (tRNA) half
gtcactccaacatctct

SEQ ID NO: 19280 - DNA, 9 bp, Artificial Sequence
  synthetic circulating small noncoding RNA (sncRNA) 5' transfer RNA (tRNA) half
ggtttcggc

SEQ ID NO: 19281 - DNA, 11 bp, Artificial Sequence
  synthetic circulating small noncoding RNA (sncRNA) 5' transfer RNA (tRNA) half
tcccacttctg

SEQ ID NO: 19282 - DNA, 10 bp, Artificial Sequence
  synthetic circulating small noncoding RNA (sncRNA) 5' transfer RNA (tRNA) half
aggcgagcgt

SEQ ID NO: 19283 - DNA, 21 bp, Artificial Sequence
  synthetic circulating small noncoding RNA (sncRNA) 5' transfer RNA (tRNA) half
gttcgaaaccgggcggaaaca

SEQ ID NO: 19284 - DNA, 36 bp, Artificial Sequence
  synthetic circulating small noncoding RNA (sncRNA) 5' transfer RNA (tRNA) half
gagaggtcccgggttcaaatcccggacgagccccat

SEQ ID NO: 19285 - DNA, 16 bp, Artificial Sequence
  synthetic circulating small noncoding RNA (sncRNA) 5' transfer RNA (tRNA) half
tggagatgccggggat

SEQ ID NO: 19286 - DNA, 27 bp, Artificial Sequence
  synthetic circulating small noncoding RNA (sncRNA) 5' transfer RNA (tRNA) half
ccgcctgtcacgcgggagaccggggtt

SEQ ID NO: 19287 - DNA, 26 bp, Artificial Sequence
  synthetic circulating small noncoding RNA (sncRNA) 5' transfer RNA (tRNA) half
gccaggagtcgaacctagaatcttct

SEQ ID NO: 19288 - DNA, 17 bp, Artificial Sequence
  synthetic circulating small noncoding RNA (sncRNA) 5' transfer RNA (tRNA) half
gtttccctagtgtagtg

SEQ ID NO: 19289 - DNA, 10 bp, Artificial Sequence
  synthetic circulating small noncoding RNA (sncRNA) 5' transfer RNA (tRNA) half
ctcgcctaac

SEQ ID NO: 19290 - DNA, 14 bp, Artificial Sequence
  synthetic circulating small noncoding RNA (sncRNA) 5' transfer RNA (tRNA) half
ctttgggtgcgaga

SEQ ID NO: 19291 - DNA, 36 bp, Artificial Sequence
  synthetic circulating small noncoding RNA (sncRNA) 5' transfer RNA (tRNA) half
cttaggtcgctggttcgattccggctcgaaggactt

SEQ ID NO: 19292 - DNA, 14 bp, Artificial Sequence
  synthetic circulating small noncoding RNA (sncRNA) 5' transfer RNA (tRNA) half
caatgccttatcca

SEQ ID NO: 19293 - DNA, 26 bp, Artificial Sequence
  synthetic circulating small noncoding RNA (sncRNA) 5' transfer RNA (tRNA) half
gacgaggatgggattcgaacccatgc

SEQ ID NO: 19294 - DNA, 19 bp, Artificial Sequence
  synthetic circulating small noncoding RNA (sncRNA) 5' transfer RNA (tRNA) half
aaaccgtagtcggcaggat

SEQ ID NO: 19295 - DNA, 24 bp, Artificial Sequence
  synthetic circulating small noncoding RNA (sncRNA) 5' transfer RNA (tRNA) half
tccctggtggtctagtggttagga

SEQ ID NO: 19296 - DNA, 24 bp, Artificial Sequence
  synthetic circulating small noncoding RNA (sncRNA) 5' transfer RNA (tRNA) half
gtcggtagagcatgagactcttaa

SEQ ID NO: 19297 - DNA, 28 bp, Artificial Sequence
  synthetic circulating small noncoding RNA (sncRNA) 5' transfer RNA (tRNA) half
gtcctgggttcgagccccagtggaacca

SEQ ID NO: 19298 - DNA, 19 bp, Artificial Sequence
  synthetic circulating small noncoding RNA (sncRNA) 5' transfer RNA (tRNA) half
aaccgggcggaaacaatga

SEQ ID NO: 19299 - DNA, 38 bp, Artificial Sequence
  synthetic circulating small noncoding RNA (sncRNA) 5' transfer RNA (tRNA) half
agggtgtttctgtagtgtagtggttatcacgctcgcct

SEQ ID NO: 19300 - DNA, 21 bp, Artificial Sequence
  synthetic circulating small noncoding RNA (sncRNA) 5' transfer RNA (tRNA) half
tcgatccccggcacctccact

SEQ ID NO: 19301 - DNA, 12 bp, Artificial Sequence
  synthetic circulating small noncoding RNA (sncRNA) 5' transfer RNA (tRNA) half
cgcctccattcg

SEQ ID NO: 19302 - DNA, 24 bp, Artificial Sequence
  synthetic circulating small noncoding RNA (sncRNA) 5' transfer RNA (tRNA) half
ttcgagccccagtggaaccacgtg

SEQ ID NO: 19303 - DNA, 15 bp, Artificial Sequence
  synthetic circulating small noncoding RNA (sncRNA) 5' transfer RNA (tRNA) half
agaggtcgatggatc

SEQ ID NO: 19304 - DNA, 27 bp, Artificial Sequence
  synthetic circulating small noncoding RNA (sncRNA) 5' transfer RNA (tRNA) half
tggccgagcggtctaaggcgctgcgtt

SEQ ID NO: 19305 - DNA, 33 bp, Artificial Sequence
  synthetic circulating small noncoding RNA (sncRNA) 5' transfer RNA (tRNA) half
atccatcgacctctgggttatgggcccagcacg

SEQ ID NO: 19306 - DNA, 25 bp, Artificial Sequence
  synthetic circulating small noncoding RNA (sncRNA) 5' transfer RNA (tRNA) half
gatcgaacccgcgaccttggcgtta

SEQ ID NO: 19307 - DNA, 21 bp, Artificial Sequence
  synthetic circulating small noncoding RNA (sncRNA) 5' transfer RNA (tRNA) half
aggcgagcgtgataaccgcta

SEQ ID NO: 19308 - DNA, 17 bp, Artificial Sequence
  synthetic circulating small noncoding RNA (sncRNA) 5' transfer RNA (tRNA) half
gttagtactctgcgttg

SEQ ID NO: 19309 - DNA, 20 bp, Artificial Sequence
  synthetic circulating small noncoding RNA (sncRNA) 5' transfer RNA (tRNA) half
tgccgtgactcggattcgaa

SEQ ID NO: 19310 - DNA, 36 bp, Artificial Sequence
  synthetic circulating small noncoding RNA (sncRNA) 5' transfer RNA (tRNA) half
gcgagaatcatacccctagaccaacgagccgctctc

SEQ ID NO: 19311 - DNA, 14 bp, Artificial Sequence
  synthetic circulating small noncoding RNA (sncRNA) 5' transfer RNA (tRNA) half
gaacccgcaacctt

SEQ ID NO: 19312 - DNA, 11 bp, Artificial Sequence
  synthetic circulating small noncoding RNA (sncRNA) 5' transfer RNA (tRNA) half
acccagggacg

SEQ ID NO: 19313 - DNA, 18 bp, Artificial Sequence
  synthetic circulating small noncoding RNA (sncRNA) 5' transfer RNA (tRNA) half
gtttctgtagtgtagtgg

SEQ ID NO: 19314 - DNA, 22 bp, Artificial Sequence
  synthetic circulating small noncoding RNA (sncRNA) 5' transfer RNA (tRNA) half
gtctgatgctctaccaactgag

SEQ ID NO: 19315 - DNA, 28 bp, Artificial Sequence
  synthetic circulating small noncoding RNA (sncRNA) 5' transfer RNA (tRNA) half
gatagctcagctggtagagcggaggact

SEQ ID NO: 19316 - DNA, 17 bp, Artificial Sequence
  synthetic circulating small noncoding RNA (sncRNA) 5' transfer RNA (tRNA) half
ttggtagagcatgagac

SEQ ID NO: 19317 - DNA, 12 bp, Artificial Sequence
  synthetic circulating small noncoding RNA (sncRNA) 5' transfer RNA (tRNA) half
aacgaggcacct

SEQ ID NO: 19318 - DNA, 37 bp, Artificial Sequence
  synthetic circulating small noncoding RNA (sncRNA) 5' transfer RNA (tRNA) half
ctgagggtccagggttcaagtccctgttcgggcgctt

SEQ ID NO: 19319 - DNA, 10 bp, Artificial Sequence
  synthetic circulating small noncoding RNA (sncRNA) 5' transfer RNA (tRNA) half
gcgcccaacg

SEQ ID NO: 19320 - DNA, 20 bp, Artificial Sequence
  synthetic circulating small noncoding RNA (sncRNA) 5' transfer RNA (tRNA) half
attcccattcttgcgacccg

SEQ ID NO: 19321 - DNA, 11 bp, Artificial Sequence
  synthetic circulating small noncoding RNA (sncRNA) 5' transfer RNA (tRNA) half
ccgtacgggcc

SEQ ID NO: 19322 - DNA, 6 bp, Artificial Sequence
  synthetic circulating small noncoding RNA (sncRNA) 5' transfer RNA (tRNA) half
cgtcgg

SEQ ID NO: 19323 - DNA, 35 bp, Artificial Sequence
  synthetic circulating small noncoding RNA (sncRNA) 5' transfer RNA (tRNA) half
ctgaccgggaatcgaacccgggccgcggcggtgag

SEQ ID NO: 19324 - DNA, 26 bp, Artificial Sequence
  synthetic circulating small noncoding RNA (sncRNA) 5' transfer RNA (tRNA) half
gcggcccgggttcgactcccggtgtg

SEQ ID NO: 19325 - DNA, 30 bp, Artificial Sequence
  synthetic circulating small noncoding RNA (sncRNA) 5' transfer RNA (tRNA) half
ctggactctgaatccagcgacccgagttca

SEQ ID NO: 19326 - DNA, 27 bp, Artificial Sequence
  synthetic circulating small noncoding RNA (sncRNA) 5' transfer RNA (tRNA) half
cgagccaggtaggagtcgaacctacaa

SEQ ID NO: 19327 - DNA, 17 bp, Artificial Sequence
  synthetic circulating small noncoding RNA (sncRNA) 5' transfer RNA (tRNA) half
cgccaaatcctaaccac

SEQ ID NO: 19328 - DNA, 30 bp, Artificial Sequence
  synthetic circulating small noncoding RNA (sncRNA) 5' transfer RNA (tRNA) half
ctggatagctcagtcggtagagcatcagac

SEQ ID NO: 19329 - DNA, 25 bp, Artificial Sequence
  synthetic circulating small noncoding RNA (sncRNA) 5' transfer RNA (tRNA) half
ttccttcgagccggattcgaaccag

SEQ ID NO: 19330 - DNA, 25 bp, Artificial Sequence
  synthetic circulating small noncoding RNA (sncRNA) 5' transfer RNA (tRNA) half
gctcaggggttagagcactggtctt

SEQ ID NO: 19331 - DNA, 20 bp, Artificial Sequence
  synthetic circulating small noncoding RNA (sncRNA) 5' transfer RNA (tRNA) half
gcttccgcagcgagcagggt

SEQ ID NO: 19332 - DNA, 7 bp, Artificial Sequence
  synthetic circulating small noncoding RNA (sncRNA) 5' transfer RNA (tRNA) half
actggcg

SEQ ID NO: 19333 - DNA, 10 bp, Artificial Sequence
  synthetic circulating small noncoding RNA (sncRNA) 5' transfer RNA (tRNA) half
gctagccggg

SEQ ID NO: 19334 - DNA, 18 bp, Artificial Sequence
  synthetic circulating small noncoding RNA (sncRNA) 5' transfer RNA (tRNA) half
gcgagaggtagcgggatc

SEQ ID NO: 19335 - DNA, 19 bp, Artificial Sequence
  synthetic circulating small noncoding RNA (sncRNA) 5' transfer RNA (tRNA) half
agggacgaccacagcgact

SEQ ID NO: 19336 - DNA, 12 bp, Artificial Sequence
  synthetic circulating small noncoding RNA (sncRNA) 5' transfer RNA (tRNA) half
attctcgctttg

SEQ ID NO: 19337 - DNA, 29 bp, Artificial Sequence
  synthetic circulating small noncoding RNA (sncRNA) 5' transfer RNA (tRNA) half
gattcggcgctctcaccgccgcggcccgg

SEQ ID NO: 19338 - DNA, 28 bp, Artificial Sequence
  synthetic circulating small noncoding RNA (sncRNA) 5' transfer RNA (tRNA) half
agatcctgggttcgaatcccagtggggc

SEQ ID NO: 19339 - DNA, 17 bp, Artificial Sequence
  synthetic circulating small noncoding RNA (sncRNA) 5' transfer RNA (tRNA) half
gttcaaatctcggtgga

SEQ ID NO: 19340 - DNA, 16 bp, Artificial Sequence
  synthetic circulating small noncoding RNA (sncRNA) 5' transfer RNA (tRNA) half
tcccggtgtgggaaca

SEQ ID NO: 19341 - DNA, 10 bp, Artificial Sequence
  synthetic circulating small noncoding RNA (sncRNA) 5' transfer RNA (tRNA) half
agtcgaaccc

SEQ ID NO: 19342 - DNA, 12 bp, Artificial Sequence
  synthetic circulating small noncoding RNA (sncRNA) 5' transfer RNA (tRNA) half
gtcctccgctct

SEQ ID NO: 19343 - DNA, 18 bp, Artificial Sequence
  synthetic circulating small noncoding RNA (sncRNA) 5' transfer RNA (tRNA) half
cgatccccagcatctcca

SEQ ID NO: 19344 - DNA, 37 bp, Artificial Sequence
  synthetic circulating small noncoding RNA (sncRNA) 5' transfer RNA (tRNA) half
ccgagccagccaggagtcgaacctggaatcttctgat

SEQ ID NO: 19345 - DNA, 27 bp, Artificial Sequence
  synthetic circulating small noncoding RNA (sncRNA) 5' transfer RNA (tRNA) half
cgggccgcctgggtgaaaaccaggaat

SEQ ID NO: 19346 - DNA, 33 bp, Artificial Sequence
  synthetic circulating small noncoding RNA (sncRNA) 5' transfer RNA (tRNA) half
agtggctcgttggtctaggggtatgattctcgc

SEQ ID NO: 19347 - DNA, 22 bp, Artificial Sequence
  synthetic circulating small noncoding RNA (sncRNA) 5' transfer RNA (tRNA) half
tctgatgctctaccgactgagc

SEQ ID NO: 19348 - DNA, 18 bp, Artificial Sequence
  synthetic circulating small noncoding RNA (sncRNA) 5' transfer RNA (tRNA) half
gtccagagtgctagccat

SEQ ID NO: 19349 - DNA, 26 bp, Artificial Sequence
  synthetic circulating small noncoding RNA (sncRNA) 5' transfer RNA (tRNA) half
cgggttcgattcccggtcagggaagc

SEQ ID NO: 19350 - DNA, 27 bp, Artificial Sequence
  synthetic circulating small noncoding RNA (sncRNA) 5' transfer RNA (tRNA) half
acccgagttcaaatctcggtgggacct

SEQ ID NO: 19351 - DNA, 29 bp, Artificial Sequence
  synthetic circulating small noncoding RNA (sncRNA) 5' transfer RNA (tRNA) half
gagatgccggggatcgaacccggggcctc

SEQ ID NO: 19352 - DNA, 26 bp, Artificial Sequence
  synthetic circulating small noncoding RNA (sncRNA) 5' transfer RNA (tRNA) half
ggtgggactcgaacccacaatccctg

SEQ ID NO: 19353 - DNA, 26 bp, Artificial Sequence
  synthetic circulating small noncoding RNA (sncRNA) 5' transfer RNA (tRNA) half
ggcaggcgagaattctaccactgaac

SEQ ID NO: 19354 - DNA, 31 bp, Artificial Sequence
  synthetic circulating small noncoding RNA (sncRNA) 5' transfer RNA (tRNA) half
ggcctcgtggcgcaacggtagcgcgtctgac

SEQ ID NO: 19355 - DNA, 18 bp, Artificial Sequence
  synthetic circulating small noncoding RNA (sncRNA) 5' transfer RNA (tRNA) half
ataaccgctacactacaa

SEQ ID NO: 19356 - DNA, 17 bp, Artificial Sequence
  synthetic circulating small noncoding RNA (sncRNA) 5' transfer RNA (tRNA) half
cccatgcgtgcagagca

SEQ ID NO: 19357 - DNA, 34 bp, Artificial Sequence
  synthetic circulating small noncoding RNA (sncRNA) 5' transfer RNA (tRNA) half
ggcaccgctggaattcgaacccaggatctcctgt

SEQ ID NO: 19358 - DNA, 22 bp, Artificial Sequence
  synthetic circulating small noncoding RNA (sncRNA) 5' transfer RNA (tRNA) half
ttgaccccgacgtgacttgaac

SEQ ID NO: 19359 - DNA, 40 bp, Artificial Sequence
  synthetic circulating small noncoding RNA (sncRNA) 5' transfer RNA (tRNA) half
gtaaacaggagatcctgggttcgaatcccagcggtgcctg

SEQ ID NO: 19360 - DNA, 26 bp, Artificial Sequence
  synthetic circulating small noncoding RNA (sncRNA) 5' transfer RNA (tRNA) half
cggggttcgattccccgacggggagt

SEQ ID NO: 19361 - DNA, 21 bp, Artificial Sequence
  synthetic circulating small noncoding RNA (sncRNA) 5' transfer RNA (tRNA) half
ccgggaatcgaacccgggccg

SEQ ID NO: 19362 - DNA, 14 bp, Artificial Sequence
  synthetic circulating small noncoding RNA (sncRNA) 5' transfer RNA (tRNA) half
ggcccggtgctgag

SEQ ID NO: 19363 - DNA, 15 bp, Artificial Sequence
  synthetic circulating small noncoding RNA (sncRNA) 5' transfer RNA (tRNA) half
ccgagccagccagga

SEQ ID NO: 19364 - DNA, 22 bp, Artificial Sequence
  synthetic circulating small noncoding RNA (sncRNA) 5' transfer RNA (tRNA) half
tcgagccaggtaggagtcgaac

SEQ ID NO: 19365 - DNA, 22 bp, Artificial Sequence
  synthetic circulating small noncoding RNA (sncRNA) 5' transfer RNA (tRNA) half
gaaaccgggcggaaacaacttt

SEQ ID NO: 19366 - DNA, 33 bp, Artificial Sequence
  synthetic circulating small noncoding RNA (sncRNA) 5' transfer RNA (tRNA) half
ggacctctcgcaccctaagcgagaatcataccc

SEQ ID NO: 19367 - DNA, 30 bp, Artificial Sequence
  synthetic circulating small noncoding RNA (sncRNA) 5' transfer RNA (tRNA) half
ggagaccggggttcgattccccgacgggga

SEQ ID NO: 19368 - DNA, 16 bp, Artificial Sequence
  synthetic circulating small noncoding RNA (sncRNA) 5' transfer RNA (tRNA) half
aggagatcctgggttc

SEQ ID NO: 19369 - DNA, 15 bp, Artificial Sequence
  synthetic circulating small noncoding RNA (sncRNA) 5' transfer RNA (tRNA) half
gaggatcgaactcac

SEQ ID NO: 19370 - DNA, 17 bp, Artificial Sequence
  synthetic circulating small noncoding RNA (sncRNA) 5' transfer RNA (tRNA) half
accactatacgatcacg

SEQ ID NO: 19371 - DNA, 14 bp, Artificial Sequence
  synthetic circulating small noncoding RNA (sncRNA) 5' transfer RNA (tRNA) half
gtgaggcgaacgtg

SEQ ID NO: 19372 - DNA, 25 bp, Artificial Sequence
  synthetic circulating small noncoding RNA (sncRNA) 5' transfer RNA (tRNA) half
tcttgcgacccgggttcgattcccg

SEQ ID NO: 19373 - DNA, 10 bp, Artificial Sequence
  synthetic circulating small noncoding RNA (sncRNA) 5' transfer RNA (tRNA) half
ggcgcgataa

SEQ ID NO: 19374 - DNA, 30 bp, Artificial Sequence
  synthetic circulating small noncoding RNA (sncRNA) 5' transfer RNA (tRNA) half
cgaccctgggattaagagtcccatgctcta

SEQ ID NO: 19375 - DNA, 16 bp, Artificial Sequence
  synthetic circulating small noncoding RNA (sncRNA) 5' transfer RNA (tRNA) half
gaaccctggaccctca

SEQ ID NO: 19376 - DNA, 35 bp, Artificial Sequence
  synthetic circulating small noncoding RNA (sncRNA) 5' transfer RNA (tRNA) half
aaccaggggtcgcgagttcaaatctcgctggggcc

SEQ ID NO: 19377 - DNA, 13 bp, Artificial Sequence
  synthetic circulating small noncoding RNA (sncRNA) 5' transfer RNA (tRNA) half
atccagcgatccg

SEQ ID NO: 19378 - DNA, 14 bp, Artificial Sequence
  synthetic circulating small noncoding RNA (sncRNA) 5' transfer RNA (tRNA) half
gttcgattcccggt

SEQ ID NO: 19379 - DNA, 14 bp, Artificial Sequence
  synthetic circulating small noncoding RNA (sncRNA) 5' transfer RNA (tRNA) half
aggagtgggattcg

SEQ ID NO: 19380 - DNA, 8 bp, Artificial Sequence
  synthetic circulating small noncoding RNA (sncRNA) 5' transfer RNA (tRNA) half
ctggctcg

SEQ ID NO: 19381 - DNA, 7 bp, Artificial Sequence
  synthetic circulating small noncoding RNA (sncRNA) 5' transfer RNA (tRNA) half
ggccgcg

SEQ ID NO: 19382 - DNA, 6 bp, Artificial Sequence
  synthetic circulating small noncoding RNA (sncRNA) 5' transfer RNA (tRNA) half
cgggat

SEQ ID NO: 19383 - DNA, 21 bp, Artificial Sequence
  synthetic circulating small noncoding RNA (sncRNA) 5' transfer RNA (tRNA) half
atgtttgggctcgtccgggat

SEQ ID NO: 19384 - DNA, 11 bp, Artificial Sequence
  synthetic circulating small noncoding RNA (sncRNA) 5' transfer RNA (tRNA) half
ccgccgcggcc

SEQ ID NO: 19385 - DNA, 41 bp, Artificial Sequence
  synthetic circulating small noncoding RNA (sncRNA) 5' transfer RNA (tRNA) half
ggtctagtggttaggattcggcgctctcaccgccgcggccc

SEQ ID NO: 19386 - DNA, 10 bp, Artificial Sequence
  synthetic circulating small noncoding RNA (sncRNA) 5' transfer RNA (tRNA) half
gcgggagacc

SEQ ID NO: 19387 - DNA, 22 bp, Artificial Sequence
  synthetic circulating small noncoding RNA (sncRNA) 5' transfer RNA (tRNA) half
atccatcgacctctgggttatg

SEQ ID NO: 19388 - DNA, 33 bp, Artificial Sequence
  synthetic circulating small noncoding RNA (sncRNA) 5' transfer RNA (tRNA) half
ccgagactcggattcgaaccgaggttgctgcag

SEQ ID NO: 19389 - DNA, 21 bp, Artificial Sequence
  synthetic circulating small noncoding RNA (sncRNA) 5' transfer RNA (tRNA) half
actcatgaccccgacgtgatt

SEQ ID NO: 19390 - DNA, 18 bp, Artificial Sequence
  synthetic circulating small noncoding RNA (sncRNA) 5' transfer RNA (tRNA) half
gttcgagcccacccaggg

SEQ ID NO: 19391 - DNA, 20 bp, Artificial Sequence
  synthetic circulating small noncoding RNA (sncRNA) 5' transfer RNA (tRNA) half
tcaaatctcgctggggcctt

SEQ ID NO: 19392 - DNA, 16 bp, Artificial Sequence
  synthetic circulating small noncoding RNA (sncRNA) 5' transfer RNA (tRNA) half
gaacctcagagggggc

SEQ ID NO: 19393 - DNA, 15 bp, Artificial Sequence
  synthetic circulating small noncoding RNA (sncRNA) 5' transfer RNA (tRNA) half
gttcgaatcccactc

SEQ ID NO: 19394 - DNA, 15 bp, Artificial Sequence
  synthetic circulating small noncoding RNA (sncRNA) 5' transfer RNA (tRNA) half
cgaaccaccaacctt

SEQ ID NO: 19395 - DNA, 35 bp, Artificial Sequence
  synthetic circulating small noncoding RNA (sncRNA) 5' transfer RNA (tRNA) half
atggttagcactctggactctgaatccagcgatcc

SEQ ID NO: 19396 - DNA, 22 bp, Artificial Sequence
  synthetic circulating small noncoding RNA (sncRNA) 5' transfer RNA (tRNA) half
gagcggtctaaggcgctgcgtt

SEQ ID NO: 19397 - DNA, 5 bp, Artificial Sequence
  synthetic circulating small noncoding RNA (sncRNA) 5' transfer RNA (tRNA) half
aggtc

SEQ ID NO: 19398 - DNA, 31 bp, Artificial Sequence
  synthetic circulating small noncoding RNA (sncRNA) 5' transfer RNA (tRNA) half
tccctgaccgggaatcgaacccgggccgcgg

SEQ ID NO: 19399 - DNA, 22 bp, Artificial Sequence
  synthetic circulating small noncoding RNA (sncRNA) 5' transfer RNA (tRNA) half
ggtatgattctcgcttcgggtg

SEQ ID NO: 19400 - DNA, 18 bp, Artificial Sequence
  synthetic circulating small noncoding RNA (sncRNA) 5' transfer RNA (tRNA) half
gaacacgcaaccttctga

SEQ ID NO: 19401 - DNA, 16 bp, Artificial Sequence
  synthetic circulating small noncoding RNA (sncRNA) 5' transfer RNA (tRNA) half
cccggcacctccactt

SEQ ID NO: 19402 - DNA, 15 bp, Artificial Sequence
  synthetic circulating small noncoding RNA (sncRNA) 5' transfer RNA (tRNA) half
aggctccagtctctt

SEQ ID NO: 19403 - DNA, 23 bp, Artificial Sequence
  synthetic circulating small noncoding RNA (sncRNA) 5' transfer RNA (tRNA) half
ggttatcacgtctgctttacacg

SEQ ID NO: 19404 - DNA, 26 bp, Artificial Sequence
  synthetic circulating small noncoding RNA (sncRNA) 5' transfer RNA (tRNA) half
gcgtgggttcgaatcccacttctgac

SEQ ID NO: 19405 - DNA, 21 bp, Artificial Sequence
  synthetic circulating small noncoding RNA (sncRNA) 5' transfer RNA (tRNA) half
gttagcagaggatggtttcga

SEQ ID NO: 19406 - DNA, 29 bp, Artificial Sequence
  synthetic circulating small noncoding RNA (sncRNA) 5' transfer RNA (tRNA) half
aggttgtgagttcgagcctcacctggagc

SEQ ID NO: 19407 - DNA, 20 bp, Artificial Sequence
  synthetic circulating small noncoding RNA (sncRNA) 5' transfer RNA (tRNA) half
tcgaacccgggtcaactgct

SEQ ID NO: 19408 - DNA, 18 bp, Artificial Sequence
  synthetic circulating small noncoding RNA (sncRNA) 5' transfer RNA (tRNA) half
ttggtagagcatgagact

SEQ ID NO: 19409 - DNA, 20 bp, Artificial Sequence
  synthetic circulating small noncoding RNA (sncRNA) 5' transfer RNA (tRNA) half
gcgtggcaggcgagaattct

SEQ ID NO: 19410 - DNA, 16 bp, Artificial Sequence
  synthetic circulating small noncoding RNA (sncRNA) 5' transfer RNA (tRNA) half
ttaggattcggcgctc

SEQ ID NO: 19411 - DNA, 33 bp, Artificial Sequence
  synthetic circulating small noncoding RNA (sncRNA) 5' transfer RNA (tRNA) half
aagagtctcatgctctaccgactgagctagccg

SEQ ID NO: 19412 - DNA, 27 bp, Artificial Sequence
  synthetic circulating small noncoding RNA (sncRNA) 5' transfer RNA (tRNA) half
aatgctctacccctgagctataccacc

SEQ ID NO: 19413 - DNA, 22 bp, Artificial Sequence
  synthetic circulating small noncoding RNA (sncRNA) 5' transfer RNA (tRNA) half
ttcaaagtccagagtgctaacc

SEQ ID NO: 19414 - DNA, 40 bp, Artificial Sequence
  synthetic circulating small noncoding RNA (sncRNA) 5' transfer RNA (tRNA) half
acccacaatccctggcttaggaggccaatgccttatccat

SEQ ID NO: 19415 - DNA, 31 bp, Artificial Sequence
  synthetic circulating small noncoding RNA (sncRNA) 5' transfer RNA (tRNA) half
gggctcgtccgggatttgaacccgggacctc

SEQ ID NO: 19416 - DNA, 13 bp, Artificial Sequence
  synthetic circulating small noncoding RNA (sncRNA) 5' transfer RNA (tRNA) half
cggggcctcatac

SEQ ID NO: 19417 - DNA, 15 bp, Artificial Sequence
  synthetic circulating small noncoding RNA (sncRNA) 5' transfer RNA (tRNA) half
ggagaccggggttcg

SEQ ID NO: 19418 - DNA, 18 bp, Artificial Sequence
  synthetic circulating small noncoding RNA (sncRNA) 5' transfer RNA (tRNA) half
aaaaccaggaatcctaac

SEQ ID NO: 19419 - DNA, 18 bp, Artificial Sequence
  synthetic circulating small noncoding RNA (sncRNA) 5' transfer RNA (tRNA) half
cgggccgcctgggtgaaa

SEQ ID NO: 19420 - DNA, 39 bp, Artificial Sequence
  synthetic circulating small noncoding RNA (sncRNA) 5' transfer RNA (tRNA) half
ggcggtgagagcgccgaatcctaaccactagaccaccag

SEQ ID NO: 19421 - DNA, 23 bp, Artificial Sequence
  synthetic circulating small noncoding RNA (sncRNA) 5' transfer RNA (tRNA) half
ataggggttagtactctgcgttg

SEQ ID NO: 19422 - DNA, 13 bp, Artificial Sequence
  synthetic circulating small noncoding RNA (sncRNA) 5' transfer RNA (tRNA) half
ccccgtcggggaa

SEQ ID NO: 19423 - DNA, 16 bp, Artificial Sequence
  synthetic circulating small noncoding RNA (sncRNA) 5' transfer RNA (tRNA) half
ccggggacctttcgcg

SEQ ID NO: 19424 - DNA, 25 bp, Artificial Sequence
  synthetic circulating small noncoding RNA (sncRNA) 5' transfer RNA (tRNA) half
tgggattcgaacccacgcgtgcaga

SEQ ID NO: 19425 - DNA, 22 bp, Artificial Sequence
  synthetic circulating small noncoding RNA (sncRNA) 5' transfer RNA (tRNA) half
cgtcaggatggccgagcggtct

SEQ ID NO: 19426 - DNA, 14 bp, Artificial Sequence
  synthetic circulating small noncoding RNA (sncRNA) 5' transfer RNA (tRNA) half
gctcgaacccacga

SEQ ID NO: 19427 - DNA, 9 bp, Artificial Sequence
  synthetic circulating small noncoding RNA (sncRNA) 5' transfer RNA (tRNA) half
gaccgctcg

SEQ ID NO: 19428 - DNA, 28 bp, Artificial Sequence
  synthetic circulating small noncoding RNA (sncRNA) 5' transfer RNA (tRNA) half
ataacccagaggtcgatggatcgaaacc

SEQ ID NO: 19429 - DNA, 34 bp, Artificial Sequence
  synthetic circulating small noncoding RNA (sncRNA) 5' transfer RNA (tRNA) half
aaggtcctgggttcgagccccagtggaaccacgt

SEQ ID NO: 19430 - DNA, 27 bp, Artificial Sequence
  synthetic circulating small noncoding RNA (sncRNA) 5' transfer RNA (tRNA) half
ggcaggattcgaacctgcgcggggaga

SEQ ID NO: 19431 - DNA, 18 bp, Artificial Sequence
  synthetic circulating small noncoding RNA (sncRNA) 5' transfer RNA (tRNA) half
ggagggggcacccggatt

SEQ ID NO: 19432 - DNA, 32 bp, Artificial Sequence
  synthetic circulating small noncoding RNA (sncRNA) 5' transfer RNA (tRNA) half
agaggtcccaccgagatttgaactcggatcgc

SEQ ID NO: 19433 - DNA, 19 bp, Artificial Sequence
  synthetic circulating small noncoding RNA (sncRNA) 5' transfer RNA (tRNA) half
gctgtgatggccgagtggt

SEQ ID NO: 19434 - DNA, 12 bp, Artificial Sequence
  synthetic circulating small noncoding RNA (sncRNA) 5' transfer RNA (tRNA) half
atgcgttggccg

SEQ ID NO: 19435 - DNA, 18 bp, Artificial Sequence
  synthetic circulating small noncoding RNA (sncRNA) 5' transfer RNA (tRNA) half
gacctctcgcacccaaag

SEQ ID NO: 19436 - DNA, 39 bp, Artificial Sequence
  synthetic circulating small noncoding RNA (sncRNA) 5' transfer RNA (tRNA) half
ggtatgattctcgctttgggtgcgagaggtcccgggttc

SEQ ID NO: 19437 - DNA, 22 bp, Artificial Sequence
  synthetic circulating small noncoding RNA (sncRNA) 5' transfer RNA (tRNA) half
tcggcgctctcaccgccgcggc

SEQ ID NO: 19438 - DNA, 25 bp, Artificial Sequence
  synthetic circulating small noncoding RNA (sncRNA) 5' transfer RNA (tRNA) half
tggttatcacgttcgcctcacacgc

SEQ ID NO: 19439 - DNA, 22 bp, Artificial Sequence
  synthetic circulating small noncoding RNA (sncRNA) 5' transfer RNA (tRNA) half
gccgtgatcgtatagtggttag

SEQ ID NO: 19440 - DNA, 18 bp, Artificial Sequence
  synthetic circulating small noncoding RNA (sncRNA) 5' transfer RNA (tRNA) half
tagcgtggccgagcggtc

SEQ ID NO: 19441 - DNA, 22 bp, Artificial Sequence
  synthetic circulating small noncoding RNA (sncRNA) 5' transfer RNA (tRNA) half
tagtggttatcacgttcgcctc

SEQ ID NO: 19442 - DNA, 37 bp, Artificial Sequence
  synthetic circulating small noncoding RNA (sncRNA) 5' transfer RNA (tRNA) half
acccacaatccctggcttaggaggccaatgccttatc

SEQ ID NO: 19443 - DNA, 19 bp, Artificial Sequence
  synthetic circulating small noncoding RNA (sncRNA) 5' transfer RNA (tRNA) half
tggtatcatgcaagattcc

SEQ ID NO: 19444 - DNA, 18 bp, Artificial Sequence
  synthetic circulating small noncoding RNA (sncRNA) 5' transfer RNA (tRNA) half
agtcggcaggattcgaac

SEQ ID NO: 19445 - DNA, 19 bp, Artificial Sequence
  synthetic circulating small noncoding RNA (sncRNA) 5' transfer RNA (tRNA) half
aaatcccggacgagcccca

SEQ ID NO: 19446 - DNA, 12 bp, Artificial Sequence
  synthetic circulating small noncoding RNA (sncRNA) 5' transfer RNA (tRNA) half
tgagctaaccgg

SEQ ID NO: 19447 - DNA, 9 bp, Artificial Sequence
  synthetic circulating small noncoding RNA (sncRNA) 5' transfer RNA (tRNA) half
tagggctcg

SEQ ID NO: 19448 - DNA, 14 bp, Artificial Sequence
  synthetic circulating small noncoding RNA (sncRNA) 5' transfer RNA (tRNA) half
tgaatccagcgacc

SEQ ID NO: 19449 - DNA, 37 bp, Artificial Sequence
  synthetic circulating small noncoding RNA (sncRNA) 5' transfer RNA (tRNA) half
agggctcgtccgggatttgaacccgggacctctcgca

SEQ ID NO: 19450 - DNA, 22 bp, Artificial Sequence
  synthetic circulating small noncoding RNA (sncRNA) 5' transfer RNA (tRNA) half
cgaacgtgataaccactacact

SEQ ID NO: 19451 - DNA, 39 bp, Artificial Sequence
  synthetic circulating small noncoding RNA (sncRNA) 5' transfer RNA (tRNA) half
ctgaccccgacgtgatttgaacacgcaaccttctgatct

SEQ ID NO: 19452 - DNA, 38 bp, Artificial Sequence
  synthetic circulating small noncoding RNA (sncRNA) 5' transfer RNA (tRNA) half
agttcccacatggtctagcggttaggattcctggtttt

SEQ ID NO: 19453 - DNA, 22 bp, Artificial Sequence
  synthetic circulating small noncoding RNA (sncRNA) 5' transfer RNA (tRNA) half
cggccacaacgcagagtactaa

SEQ ID NO: 19454 - DNA, 19 bp, Artificial Sequence
  synthetic circulating small noncoding RNA (sncRNA) 5' transfer RNA (tRNA) half
catcggggaatcgaacccc

SEQ ID NO: 19455 - DNA, 20 bp, Artificial Sequence
  synthetic circulating small noncoding RNA (sncRNA) 5' transfer RNA (tRNA) half
tagcaccacgctctaaccaa

SEQ ID NO: 19456 - DNA, 15 bp, Artificial Sequence
  synthetic circulating small noncoding RNA (sncRNA) 5' transfer RNA (tRNA) half
accagggacctttag

SEQ ID NO: 19457 - DNA, 23 bp, Artificial Sequence
  synthetic circulating small noncoding RNA (sncRNA) 5' transfer RNA (tRNA) half
acgcgtgcagagcacaatggatt

SEQ ID NO: 19458 - DNA, 17 bp, Artificial Sequence
  synthetic circulating small noncoding RNA (sncRNA) 5' transfer RNA (tRNA) half
gctcggccatcctgact

SEQ ID NO: 19459 - DNA, 25 bp, Artificial Sequence
  synthetic circulating small noncoding RNA (sncRNA) 5' transfer RNA (tRNA) half
ccaccaacctttcggttaacagccg

SEQ ID NO: 19460 - DNA, 9 bp, Artificial Sequence
  synthetic circulating small noncoding RNA (sncRNA) 5' transfer RNA (tRNA) half
gggccgcgg

SEQ ID NO: 19461 - DNA, 40 bp, Artificial Sequence
  synthetic circulating small noncoding RNA (sncRNA) 5' transfer RNA (tRNA) half
accccggtctcccgcgtgacaggcggggatactcaccact

SEQ ID NO: 19462 - DNA, 18 bp, Artificial Sequence
  synthetic circulating small noncoding RNA (sncRNA) 5' transfer RNA (tRNA) half
cgagccccacgttgggcg

SEQ ID NO: 19463 - DNA, 28 bp, Artificial Sequence
  synthetic circulating small noncoding RNA (sncRNA) 5' transfer RNA (tRNA) half
ctgtagtgtagtggttatcacgttcgcc

SEQ ID NO: 19464 - DNA, 10 bp, Artificial Sequence
  synthetic circulating small noncoding RNA (sncRNA) 5' transfer RNA (tRNA) half
cgatcacggc

SEQ ID NO: 19465 - DNA, 7 bp, Artificial Sequence
  synthetic circulating small noncoding RNA (sncRNA) 5' transfer RNA (tRNA) half
accggcc

SEQ ID NO: 19466 - DNA, 32 bp, Artificial Sequence
  synthetic circulating small noncoding RNA (sncRNA) 5' transfer RNA (tRNA) half
ggttccatggtgtaatggtgagcactctggac

SEQ ID NO: 19467 - DNA, 12 bp, Artificial Sequence
  synthetic circulating small noncoding RNA (sncRNA) 5' transfer RNA (tRNA) half
gaaccccggtct

SEQ ID NO: 19468 - DNA, 9 bp, Artificial Sequence
  synthetic circulating small noncoding RNA (sncRNA) 5' transfer RNA (tRNA) half
cccggacga

SEQ ID NO: 19469 - DNA, 14 bp, Artificial Sequence
  synthetic circulating small noncoding RNA (sncRNA) 5' transfer RNA (tRNA) half
ctgccgcggtcgac

SEQ ID NO: 19470 - DNA, 15 bp, Artificial Sequence
  synthetic circulating small noncoding RNA (sncRNA) 5' transfer RNA (tRNA) half
ttgccgaaacccggg

SEQ ID NO: 19471 - DNA, 24 bp, Artificial Sequence
  synthetic circulating small noncoding RNA (sncRNA) 5' transfer RNA (tRNA) half
acgcagcgccttagaccgctcggc

SEQ ID NO: 19472 - DNA, 22 bp, Artificial Sequence
  synthetic circulating small noncoding RNA (sncRNA) 5' transfer RNA (tRNA) half
acttgggctcgtccgggatttg

SEQ ID NO: 19473 - DNA, 34 bp, Artificial Sequence
  synthetic circulating small noncoding RNA (sncRNA) 5' transfer RNA (tRNA) half
gggttcgactcccggtgtgggaacagcagctttt

SEQ ID NO: 19474 - DNA, 36 bp, Artificial Sequence
  synthetic circulating small noncoding RNA (sncRNA) 5' transfer RNA (tRNA) half
gtaaccacgaagggattcgaaccctcaatcttctga

SEQ ID NO: 19475 - DNA, 37 bp, Artificial Sequence
  synthetic circulating small noncoding RNA (sncRNA) 5' transfer RNA (tRNA) half
cgaaaggttggtggttcgagcccacccagggacgaca

SEQ ID NO: 19476 - DNA, 16 bp, Artificial Sequence
  synthetic circulating small noncoding RNA (sncRNA) 5' transfer RNA (tRNA) half
ccggacgagccctgct

SEQ ID NO: 19477 - DNA, 21 bp, Artificial Sequence
  synthetic circulating small noncoding RNA (sncRNA) 5' transfer RNA (tRNA) half
ctttgggtgcgagaggtcccg

SEQ ID NO: 19478 - DNA, 12 bp, Artificial Sequence
  synthetic circulating small noncoding RNA (sncRNA) 5' transfer RNA (tRNA) half
cagggttcgaac

SEQ ID NO: 19479 - DNA, 37 bp, Artificial Sequence
  synthetic circulating small noncoding RNA (sncRNA) 5' transfer RNA (tRNA) half
gccctgctgggatttgaacccaggatctcctgtttac

SEQ ID NO: 19480 - DNA, 18 bp, Artificial Sequence
  synthetic circulating small noncoding RNA (sncRNA) 5' transfer RNA (tRNA) half
aaagtattgtgccccgtg

SEQ ID NO: 19481 - DNA, 34 bp, Artificial Sequence
  synthetic circulating small noncoding RNA (sncRNA) 5' transfer RNA (tRNA) half
tagtttccgtagtgtagtggttatcacgttcgcc

SEQ ID NO: 19482 - DNA, 26 bp, Artificial Sequence
  synthetic circulating small noncoding RNA (sncRNA) 5' transfer RNA (tRNA) half
ggcggggatactaaccactatactaa

SEQ ID NO: 19483 - DNA, 14 bp, Artificial Sequence
  synthetic circulating small noncoding RNA (sncRNA) 5' transfer RNA (tRNA) half
gagtctggcgcctt

SEQ ID NO: 19484 - DNA, 22 bp, Artificial Sequence
  synthetic circulating small noncoding RNA (sncRNA) 5' transfer RNA (tRNA) half
tcccggacgagccccacttttc

SEQ ID NO: 19485 - DNA, 36 bp, Artificial Sequence
  synthetic circulating small noncoding RNA (sncRNA) 5' transfer RNA (tRNA) half
aaccgaagatcacgggttcgaaccccgtccgtgcct

SEQ ID NO: 19486 - DNA, 16 bp, Artificial Sequence
  synthetic circulating small noncoding RNA (sncRNA) 5' transfer RNA (tRNA) half
cgaacacgcagccttc

SEQ ID NO: 19487 - DNA, 19 bp, Artificial Sequence
  synthetic circulating small noncoding RNA (sncRNA) 5' transfer RNA (tRNA) half
tcccaccgctgccatcttt

SEQ ID NO: 19488 - DNA, 21 bp, Artificial Sequence
  synthetic circulating small noncoding RNA (sncRNA) 5' transfer RNA (tRNA) half
aatcccggacgagccccatct

SEQ ID NO: 19489 - DNA, 31 bp, Artificial Sequence
  synthetic circulating small noncoding RNA (sncRNA) 5' transfer RNA (tRNA) half
ccttaggtcgctggttcgaatccggctcgaa

SEQ ID NO: 19490 - DNA, 26 bp, Artificial Sequence
  synthetic circulating small noncoding RNA (sncRNA) 5' transfer RNA (tRNA) half
ttcccacaccgggagtcgaacccggg

SEQ ID NO: 19491 - DNA, 12 bp, Artificial Sequence
  synthetic circulating small noncoding RNA (sncRNA) 5' transfer RNA (tRNA) half
gagcggtctaag

SEQ ID NO: 19492 - DNA, 15 bp, Artificial Sequence
  synthetic circulating small noncoding RNA (sncRNA) 5' transfer RNA (tRNA) half
attgcattggccggg

SEQ ID NO: 19493 - DNA, 21 bp, Artificial Sequence
  synthetic circulating small noncoding RNA (sncRNA) 5' transfer RNA (tRNA) half
cctccccgtcggggaattgaa

SEQ ID NO: 19494 - DNA, 14 bp, Artificial Sequence
  synthetic circulating small noncoding RNA (sncRNA) 5' transfer RNA (tRNA) half
tctaaccaactgag

SEQ ID NO: 19495 - DNA, 44 bp, Artificial Sequence
  synthetic circulating small noncoding RNA (sncRNA) 5' transfer RNA (tRNA) half
ctggcagtggtgggattcgaacccacgcctccgaagagactgga

SEQ ID NO: 19496 - DNA, 39 bp, Artificial Sequence
  synthetic circulating small noncoding RNA (sncRNA) 5' transfer RNA (tRNA) half
accgagatttgaactcggatcgctggattcagagtccag

SEQ ID NO: 19497 - DNA, 14 bp, Artificial Sequence
  synthetic circulating small noncoding RNA (sncRNA) 5' transfer RNA (tRNA) half
gagtctcatgctct

SEQ ID NO: 19498 - DNA, 24 bp, Artificial Sequence
  synthetic circulating small noncoding RNA (sncRNA) 5' transfer RNA (tRNA) half
aggttcgaactcaggaccttcaga

SEQ ID NO: 19499 - DNA, 31 bp, Artificial Sequence
  synthetic circulating small noncoding RNA (sncRNA) 5' transfer RNA (tRNA) half
gaacccacgaccctgggattaagagtcccat

SEQ ID NO: 19500 - DNA, 30 bp, Artificial Sequence
  synthetic circulating small noncoding RNA (sncRNA) 5' transfer RNA (tRNA) half
ttggtggttcgagcccacccagggacgaca

SEQ ID NO: 19501 - DNA, 18 bp, Artificial Sequence
  synthetic circulating small noncoding RNA (sncRNA) 5' transfer RNA (tRNA) half
cccggccaatgcactctc

SEQ ID NO: 19502 - DNA, 28 bp, Artificial Sequence
  synthetic circulating small noncoding RNA (sncRNA) 5' transfer RNA (tRNA) half
ggtccagggttcaagtccctgttcgggc

SEQ ID NO: 19503 - DNA, 17 bp, Artificial Sequence
  synthetic circulating small noncoding RNA (sncRNA) 5' transfer RNA (tRNA) half
tagcaccacgctctaac

SEQ ID NO: 19504 - DNA, 29 bp, Artificial Sequence
  synthetic circulating small noncoding RNA (sncRNA) 5' transfer RNA (tRNA) half
gttggtagagcggaggactgtagtcagta

SEQ ID NO: 19505 - DNA, 18 bp, Artificial Sequence
  synthetic circulating small noncoding RNA (sncRNA) 5' transfer RNA (tRNA) half
gatagctcagtcggtaga

SEQ ID NO: 19506 - DNA, 23 bp, Artificial Sequence
  synthetic circulating small noncoding RNA (sncRNA) 5' transfer RNA (tRNA) half
ggaattgaaccccggtctcccgc

SEQ ID NO: 19507 - DNA, 24 bp, Artificial Sequence
  synthetic circulating small noncoding RNA (sncRNA) 5' transfer RNA (tRNA) half
tggcccgtacggggatcgaacccg

SEQ ID NO: 19508 - DNA, 10 bp, Artificial Sequence
  synthetic circulating small noncoding RNA (sncRNA) 5' transfer RNA (tRNA) half
ggtggagggg

SEQ ID NO: 19509 - DNA, 27 bp, Artificial Sequence
  synthetic circulating small noncoding RNA (sncRNA) 5' transfer RNA (tRNA) half
tcccacaccgggagtcgaacccgggcc

SEQ ID NO: 19510 - DNA, 14 bp, Artificial Sequence
  synthetic circulating small noncoding RNA (sncRNA) 5' transfer RNA (tRNA) half
gctgaccccgacgt

SEQ ID NO: 19511 - DNA, 7 bp, Artificial Sequence
  synthetic circulating small noncoding RNA (sncRNA) 5' transfer RNA (tRNA) half
attgcgc

SEQ ID NO: 19512 - DNA, 13 bp, Artificial Sequence
  synthetic circulating small noncoding RNA (sncRNA) 5' transfer RNA (tRNA) half
actcggatcgctg

SEQ ID NO: 19513 - DNA, 20 bp, Artificial Sequence
  synthetic circulating small noncoding RNA (sncRNA) 5' transfer RNA (tRNA) half
gtccgggatttgaacccggg

SEQ ID NO: 19514 - DNA, 12 bp, Artificial Sequence
  synthetic circulating small noncoding RNA (sncRNA) 5' transfer RNA (tRNA) half
cgcaacggtagc

SEQ ID NO: 19515 - DNA, 29 bp, Artificial Sequence
  synthetic circulating small noncoding RNA (sncRNA) 5' transfer RNA (tRNA) half
agctgaccccgacgtgatttgaacacgca

SEQ ID NO: 19516 - DNA, 42 bp, Artificial Sequence
  synthetic circulating small noncoding RNA (sncRNA) 5' transfer RNA (tRNA) half
cagtctcttcggaggcgtgggttcgaatcccaccgctgccag

SEQ ID NO: 19517 - DNA, 23 bp, Artificial Sequence
  synthetic circulating small noncoding RNA (sncRNA) 5' transfer RNA (tRNA) half
gcggtgagagcgccgaatcctaa

SEQ ID NO: 19518 - DNA, 8 bp, Artificial Sequence
  synthetic circulating small noncoding RNA (sncRNA) 5' transfer RNA (tRNA) half
aagggggc

SEQ ID NO: 19519 - DNA, 16 bp, Artificial Sequence
  synthetic circulating small noncoding RNA (sncRNA) 5' transfer RNA (tRNA) half
gcctccccgtcgggga

SEQ ID NO: 19520 - DNA, 19 bp, Artificial Sequence
  synthetic circulating small noncoding RNA (sncRNA) 5' transfer RNA (tRNA) half
cagagtggcgcagcggaag

SEQ ID NO: 19521 - DNA, 43 bp, Artificial Sequence
  synthetic circulating small noncoding RNA (sncRNA) 5' transfer RNA (tRNA) half
agtctcatgctctaccgactgagctagccgggcgactgtcact

SEQ ID NO: 19522 - DNA, 12 bp, Artificial Sequence
  synthetic circulating small noncoding RNA (sncRNA) 5' transfer RNA (tRNA) half
acccgggcctcc

SEQ ID NO: 19523 - DNA, 17 bp, Artificial Sequence
  synthetic circulating small noncoding RNA (sncRNA) 5' transfer RNA (tRNA) half
aaccgggcggaaacata

SEQ ID NO: 19524 - DNA, 21 bp, Artificial Sequence
  synthetic circulating small noncoding RNA (sncRNA) 5' transfer RNA (tRNA) half
aggcgagcgtgatgaccacta

SEQ ID NO: 19525 - DNA, 20 bp, Artificial Sequence
  synthetic circulating small noncoding RNA (sncRNA) 5' transfer RNA (tRNA) half
tatcacgttcgcctcacacg

SEQ ID NO: 19526 - DNA, 12 bp, Artificial Sequence
  synthetic circulating small noncoding RNA (sncRNA) 5' transfer RNA (tRNA) half
ctccggctcgaa

SEQ ID NO: 19527 - DNA, 20 bp, Artificial Sequence
  synthetic circulating small noncoding RNA (sncRNA) 5' transfer RNA (tRNA) half
gccttagaccgctcggccat

SEQ ID NO: 19528 - DNA, 34 bp, Artificial Sequence
  synthetic circulating small noncoding RNA (sncRNA) 5' transfer RNA (tRNA) half
tccgcccggtttcgaaccggggacctttcgcgtg

SEQ ID NO: 19529 - DNA, 27 bp, Artificial Sequence
  synthetic circulating small noncoding RNA (sncRNA) 5' transfer RNA (tRNA) half
ggtaggagtcgaacctacaatcttctg

SEQ ID NO: 19530 - DNA, 18 bp, Artificial Sequence
  synthetic circulating small noncoding RNA (sncRNA) 5' transfer RNA (tRNA) half
taatctgaaggtcctgag

SEQ ID NO: 19531 - DNA, 21 bp, Artificial Sequence
  synthetic circulating small noncoding RNA (sncRNA) 5' transfer RNA (tRNA) half
tgacctgtacggggaacgaac

SEQ ID NO: 19532 - DNA, 25 bp, Artificial Sequence
  synthetic circulating small noncoding RNA (sncRNA) 5' transfer RNA (tRNA) half
aatggttagcactctggactctgaa

SEQ ID NO: 19533 - DNA, 30 bp, Artificial Sequence
  synthetic circulating small noncoding RNA (sncRNA) 5' transfer RNA (tRNA) half
gtcggggaatcgaaccccggtctcccgcgt

SEQ ID NO: 19534 - DNA, 45 bp, Artificial Sequence
  synthetic circulating small noncoding RNA (sncRNA) 5' transfer RNA (tRNA) half
ggttccatggtgtaatggttagcactctggactctgaatccagcg

SEQ ID NO: 19535 - DNA, 12 bp, Artificial Sequence
  synthetic circulating small noncoding RNA (sncRNA) 5' transfer RNA (tRNA) half
ccttagaccgct

SEQ ID NO: 19536 - DNA, 30 bp, Artificial Sequence
  synthetic circulating small noncoding RNA (sncRNA) 5' transfer RNA (tRNA) half
ccgccgcggcccgggttcgattcccggtca

SEQ ID NO: 19537 - DNA, 18 bp, Artificial Sequence
  synthetic circulating small noncoding RNA (sncRNA) 5' transfer RNA (tRNA) half
cagaggtcgatggatcga

SEQ ID NO: 19538 - DNA, 12 bp, Artificial Sequence
  synthetic circulating small noncoding RNA (sncRNA) 5' transfer RNA (tRNA) half
cggtctaaggcg

SEQ ID NO: 19539 - DNA, 43 bp, Artificial Sequence
  synthetic circulating small noncoding RNA (sncRNA) 5' transfer RNA (tRNA) half
gacgaggatgggattcgaacccacgcgtgcaaagcacaatgga

SEQ ID NO: 19540 - DNA, 16 bp, Artificial Sequence
  synthetic circulating small noncoding RNA (sncRNA) 5' transfer RNA (tRNA) half
accgctagaccatgtg

SEQ ID NO: 19541 - DNA, 15 bp, Artificial Sequence
  synthetic circulating small noncoding RNA (sncRNA) 5' transfer RNA (tRNA) half
caaagcgagaatcat

SEQ ID NO: 19542 - DNA, 18 bp, Artificial Sequence
  synthetic circulating small noncoding RNA (sncRNA) 5' transfer RNA (tRNA) half
cggcggtgagagcgccga

SEQ ID NO: 19543 - DNA, 7 bp, Artificial Sequence
  synthetic circulating small noncoding RNA (sncRNA) 5' transfer RNA (tRNA) half
gcccggg

SEQ ID NO: 19544 - DNA, 33 bp, Artificial Sequence
  synthetic circulating small noncoding RNA (sncRNA) 5' transfer RNA (tRNA) half
cgcggcggtgagagcgccgaatcctaaccacta

SEQ ID NO: 19545 - DNA, 33 bp, Artificial Sequence
  synthetic circulating small noncoding RNA (sncRNA) 5' transfer RNA (tRNA) half
ggcgagaattctaccactgaaccaccaatgcaa

SEQ ID NO: 19546 - DNA, 7 bp, Artificial Sequence
  synthetic circulating small noncoding RNA (sncRNA) 5' transfer RNA (tRNA) half
cggcgca

SEQ ID NO: 19547 - DNA, 18 bp, Artificial Sequence
  synthetic circulating small noncoding RNA (sncRNA) 5' transfer RNA (tRNA) half
aaccactatacgatcacg

SEQ ID NO: 19548 - DNA, 37 bp, Artificial Sequence
  synthetic circulating small noncoding RNA (sncRNA) 5' transfer RNA (tRNA) half
cgcccaacgtggggctcgaacccacgaccctgagatt

SEQ ID NO: 19549 - DNA, 26 bp, Artificial Sequence
  synthetic circulating small noncoding RNA (sncRNA) 5' transfer RNA (tRNA) half
gatgtagctcagtggtagagcgcgcg

SEQ ID NO: 19550 - DNA, 24 bp, Artificial Sequence
  synthetic circulating small noncoding RNA (sncRNA) 5' transfer RNA (tRNA) half
agtctaacgctctcccaactgagc

SEQ ID NO: 19551 - DNA, 24 bp, Artificial Sequence
  synthetic circulating small noncoding RNA (sncRNA) 5' transfer RNA (tRNA) half
ggttcgaaaccgggcggaaacaac

SEQ ID NO: 19552 - DNA, 29 bp, Artificial Sequence
  synthetic circulating small noncoding RNA (sncRNA) 5' transfer RNA (tRNA) half
cccgacgtgattcgaacacgcagccttct

SEQ ID NO: 19553 - DNA, 27 bp, Artificial Sequence
  synthetic circulating small noncoding RNA (sncRNA) 5' transfer RNA (tRNA) half
gtgccgagactcggattcgaaccgagg

SEQ ID NO: 19554 - DNA, 40 bp, Artificial Sequence
  synthetic circulating small noncoding RNA (sncRNA) 5' transfer RNA (tRNA) half
gcgtccctgggtgggctcgaaccaccaacctttcggttaa

SEQ ID NO: 19555 - DNA, 14 bp, Artificial Sequence
  synthetic circulating small noncoding RNA (sncRNA) 5' transfer RNA (tRNA) half
accgctacactaca

SEQ ID NO: 19556 - DNA, 31 bp, Artificial Sequence
  synthetic circulating small noncoding RNA (sncRNA) 5' transfer RNA (tRNA) half
actcggatcgctggattcaaagtccagagtg

SEQ ID NO: 19557 - DNA, 26 bp, Artificial Sequence
  synthetic circulating small noncoding RNA (sncRNA) 5' transfer RNA (tRNA) half
tgaggcgaacgtgataaccactacac

SEQ ID NO: 19558 - DNA, 30 bp, Artificial Sequence
  synthetic circulating small noncoding RNA (sncRNA) 5' transfer RNA (tRNA) half
ctccgccgggactcgaacccggaacctttg

SEQ ID NO: 19559 - DNA, 30 bp, Artificial Sequence
  synthetic circulating small noncoding RNA (sncRNA) 5' transfer RNA (tRNA) half
aaaagtctgatgctctaccgactgagctat

SEQ ID NO: 19560 - DNA, 41 bp, Artificial Sequence
  synthetic circulating small noncoding RNA (sncRNA) 5' transfer RNA (tRNA) half
gcagcggtgggattcgaacccacgccatcgaaatgactgga

SEQ ID NO: 19561 - DNA, 14 bp, Artificial Sequence
  synthetic circulating small noncoding RNA (sncRNA) 5' transfer RNA (tRNA) half
ctcgcgacccctgg

SEQ ID NO: 19562 - DNA, 34 bp, Artificial Sequence
  synthetic circulating small noncoding RNA (sncRNA) 5' transfer RNA (tRNA) half
tccgagccagccaggagtcgaacctggaatcttc

SEQ ID NO: 19563 - DNA, 16 bp, Artificial Sequence
  synthetic circulating small noncoding RNA (sncRNA) 5' transfer RNA (tRNA) half
ttttcacccaggcggc

SEQ ID NO: 19564 - DNA, 11 bp, Artificial Sequence
  synthetic circulating small noncoding RNA (sncRNA) 5' transfer RNA (tRNA) half
agcgatccgag

SEQ ID NO: 19565 - DNA, 19 bp, Artificial Sequence
  synthetic circulating small noncoding RNA (sncRNA) 5' transfer RNA (tRNA) half
caattggtagagcatcaga

SEQ ID NO: 19566 - DNA, 7 bp, Artificial Sequence
  synthetic circulating small noncoding RNA (sncRNA) 5' transfer RNA (tRNA) half
gcggcgg

SEQ ID NO: 19567 - DNA, 25 bp, Artificial Sequence
  synthetic circulating small noncoding RNA (sncRNA) 5' transfer RNA (tRNA) half
taatggttagcactctggactttga

SEQ ID NO: 19568 - DNA, 31 bp, Artificial Sequence
  synthetic circulating small noncoding RNA (sncRNA) 5' transfer RNA (tRNA) half
agtccagagtgctaaccattacaccatggaa

SEQ ID NO: 19569 - DNA, 11 bp, Artificial Sequence
  synthetic circulating small noncoding RNA (sncRNA) 5' transfer RNA (tRNA) half
tgggctcgaac

SEQ ID NO: 19570 - DNA, 42 bp, Artificial Sequence
  synthetic circulating small noncoding RNA (sncRNA) 5' transfer RNA (tRNA) half
tcgtatagtggttagtactctgcgttgtggccgcagcaacct

SEQ ID NO: 19571 - DNA, 27 bp, Artificial Sequence
  synthetic circulating small noncoding RNA (sncRNA) 5' transfer RNA (tRNA) half
gttaggattcggcgctctcaccgccgc

SEQ ID NO: 19572 - DNA, 39 bp, Artificial Sequence
  synthetic circulating small noncoding RNA (sncRNA) 5' transfer RNA (tRNA) half
tggtgagtatccccgcctgtcacgcgggagaccggggtt

SEQ ID NO: 19573 - DNA, 25 bp, Artificial Sequence
  synthetic circulating small noncoding RNA (sncRNA) 5' transfer RNA (tRNA) half
agtcccacgctctaccaactgagct

SEQ ID NO: 19574 - DNA, 25 bp, Artificial Sequence
  synthetic circulating small noncoding RNA (sncRNA) 5' transfer RNA (tRNA) half
tgtcagaagtgggattcgaacccac

SEQ ID NO: 19575 - DNA, 27 bp, Artificial Sequence
  synthetic circulating small noncoding RNA (sncRNA) 5' transfer RNA (tRNA) half
tggtggttcgagcccacccagggacga

SEQ ID NO: 19576 - DNA, 35 bp, Artificial Sequence
  synthetic circulating small noncoding RNA (sncRNA) 5' transfer RNA (tRNA) half
ggcgagaattctaccactgaaccaccaatgcgact

SEQ ID NO: 19577 - DNA, 22 bp, Artificial Sequence
  synthetic circulating small noncoding RNA (sncRNA) 5' transfer RNA (tRNA) half
cctccccgtcggggaatcgaac

SEQ ID NO: 19578 - DNA, 20 bp, Artificial Sequence
  synthetic circulating small noncoding RNA (sncRNA) 5' transfer RNA (tRNA) half
gttcgaatcccatcctcgtc

SEQ ID NO: 19579 - DNA, 27 bp, Artificial Sequence
  synthetic circulating small noncoding RNA (sncRNA) 5' transfer RNA (tRNA) half
gtaaaccgaagatcgcgggttcgaacc

SEQ ID NO: 19580 - DNA, 19 bp, Artificial Sequence
  synthetic circulating small noncoding RNA (sncRNA) 5' transfer RNA (tRNA) half
gtcggcaggattcgaacct

SEQ ID NO: 19581 - DNA, 22 bp, Artificial Sequence
  synthetic circulating small noncoding RNA (sncRNA) 5' transfer RNA (tRNA) half
ttccgactccgccgggactcga

SEQ ID NO: 19582 - DNA, 12 bp, Artificial Sequence
  synthetic circulating small noncoding RNA (sncRNA) 5' transfer RNA (tRNA) half
ggtcacccgcgt

SEQ ID NO: 19583 - DNA, 24 bp, Artificial Sequence
  synthetic circulating small noncoding RNA (sncRNA) 5' transfer RNA (tRNA) half
cgctggattcagagtccagagtgc

SEQ ID NO: 19584 - DNA, 20 bp, Artificial Sequence
  synthetic circulating small noncoding RNA (sncRNA) 5' transfer RNA (tRNA) half
ctctccccatcggggaatcg

SEQ ID NO: 19585 - DNA, 33 bp, Artificial Sequence
  synthetic circulating small noncoding RNA (sncRNA) 5' transfer RNA (tRNA) half
ttaggcgagcgtgatgaccactacactacggaa

SEQ ID NO: 19586 - DNA, 16 bp, Artificial Sequence
  synthetic circulating small noncoding RNA (sncRNA) 5' transfer RNA (tRNA) half
aaggcgtcggtctcgt

SEQ ID NO: 19587 - DNA, 29 bp, Artificial Sequence
  synthetic circulating small noncoding RNA (sncRNA) 5' transfer RNA (tRNA) half
gcggggatactaaccactatactaacgag

SEQ ID NO: 19588 - DNA, 17 bp, Artificial Sequence
  synthetic circulating small noncoding RNA (sncRNA) 5' transfer RNA (tRNA) half
ttcgaatcccacttctg

SEQ ID NO: 19589 - DNA, 20 bp, Artificial Sequence
  synthetic circulating small noncoding RNA (sncRNA) 5' transfer RNA (tRNA) half
tctcaccgccgcggcccggg

SEQ ID NO: 19590 - DNA, 37 bp, Artificial Sequence
  synthetic circulating small noncoding RNA (sncRNA) 5' transfer RNA (tRNA) half
gccgcggcggtgagagcgccgaatcctaaccactaga

SEQ ID NO: 19591 - DNA, 33 bp, Artificial Sequence
  synthetic circulating small noncoding RNA (sncRNA) 5' transfer RNA (tRNA) half
ccgggtcaactgcttggaaggcagctatgctca

SEQ ID NO: 19592 - DNA, 32 bp, Artificial Sequence
  synthetic circulating small noncoding RNA (sncRNA) 5' transfer RNA (tRNA) half
gtcaaatgctctaccactgagctataccccct

SEQ ID NO: 19593 - DNA, 30 bp, Artificial Sequence
  synthetic circulating small noncoding RNA (sncRNA) 5' transfer RNA (tRNA) half
tcatgctctaccgactgagctagccgggcg

SEQ ID NO: 19594 - DNA, 7 bp, Artificial Sequence
  synthetic circulating small noncoding RNA (sncRNA) 5' transfer RNA (tRNA) half
tcggcca

SEQ ID NO: 19595 - DNA, 30 bp, Artificial Sequence
  synthetic circulating small noncoding RNA (sncRNA) 5' transfer RNA (tRNA) half
caggagtggggttcgaacccacgcagacat

SEQ ID NO: 19596 - DNA, 23 bp, Artificial Sequence
  synthetic circulating small noncoding RNA (sncRNA) 5' transfer RNA (tRNA) half
gctcgaactcacaacctcggcat

SEQ ID NO: 19597 - DNA, 35 bp, Artificial Sequence
  synthetic circulating small noncoding RNA (sncRNA) 5' transfer RNA (tRNA) half
gcatgaggccccgggttcgatccccggcacctcca

SEQ ID NO: 19598 - DNA, 23 bp, Artificial Sequence
  synthetic circulating small noncoding RNA (sncRNA) 5' transfer RNA (tRNA) half
tctacccactgagctatctgggc

SEQ ID NO: 19599 - DNA, 19 bp, Artificial Sequence
  synthetic circulating small noncoding RNA (sncRNA) 5' transfer RNA (tRNA) half
agtagggctcgtccgggat

SEQ ID NO: 19600 - DNA, 29 bp, Artificial Sequence
  synthetic circulating small noncoding RNA (sncRNA) 5' transfer RNA (tRNA) half
accccgacgtgattcgaacacgcagcctt

SEQ ID NO: 19601 - DNA, 15 bp, Artificial Sequence
  synthetic circulating small noncoding RNA (sncRNA) 5' transfer RNA (tRNA) half
tacacgcagaaggtc

SEQ ID NO: 19602 - DNA, 20 bp, Artificial Sequence
  synthetic circulating small noncoding RNA (sncRNA) 5' transfer RNA (tRNA) half
cgatccccggcatctccaag

SEQ ID NO: 19603 - DNA, 12 bp, Artificial Sequence
  synthetic circulating small noncoding RNA (sncRNA) 5' transfer RNA (tRNA) half
gagtactaacca

SEQ ID NO: 19604 - DNA, 13 bp, Artificial Sequence
  synthetic circulating small noncoding RNA (sncRNA) 5' transfer RNA (tRNA) half
gcacctggatttg

SEQ ID NO: 19605 - DNA, 28 bp, Artificial Sequence
  synthetic circulating small noncoding RNA (sncRNA) 5' transfer RNA (tRNA) half
cctcccgcgtggcaggcgagaattctac

SEQ ID NO: 19606 - DNA, 28 bp, Artificial Sequence
  synthetic circulating small noncoding RNA (sncRNA) 5' transfer RNA (tRNA) half
accgagccagccaggagtcgaacctgga

SEQ ID NO: 19607 - DNA, 35 bp, Artificial Sequence
  synthetic circulating small noncoding RNA (sncRNA) 5' transfer RNA (tRNA) half
ctcgagccaggtaggagtcgaacctacaatcttct

SEQ ID NO: 19608 - DNA, 19 bp, Artificial Sequence
  synthetic circulating small noncoding RNA (sncRNA) 5' transfer RNA (tRNA) half
ggattcaaagtccagagtg

SEQ ID NO: 19609 - DNA, 17 bp, Artificial Sequence
  synthetic circulating small noncoding RNA (sncRNA) 5' transfer RNA (tRNA) half
acaggcggggatactca

SEQ ID NO: 19610 - DNA, 12 bp, Artificial Sequence
  synthetic circulating small noncoding RNA (sncRNA) 5' transfer RNA (tRNA) half
gcctccgaagag

SEQ ID NO: 19611 - DNA, 28 bp, Artificial Sequence
  synthetic circulating small noncoding RNA (sncRNA) 5' transfer RNA (tRNA) half
ctgggttatgggcccagcacgcttccgc

SEQ ID NO: 19612 - DNA, 17 bp, Artificial Sequence
  synthetic circulating small noncoding RNA (sncRNA) 5' transfer RNA (tRNA) half
agatgccggggctcgaa

SEQ ID NO: 19613 - DNA, 16 bp, Artificial Sequence
  synthetic circulating small noncoding RNA (sncRNA) 5' transfer RNA (tRNA) half
cagattatgagactga

SEQ ID NO: 19614 - DNA, 29 bp, Artificial Sequence
  synthetic circulating small noncoding RNA (sncRNA) 5' transfer RNA (tRNA) half
agaagattgcaggttcgagtcctgccgcg

SEQ ID NO: 19615 - DNA, 20 bp, Artificial Sequence
  synthetic circulating small noncoding RNA (sncRNA) 5' transfer RNA (tRNA) half
agtgctagccattacaccat

SEQ ID NO: 19616 - DNA, 13 bp, Artificial Sequence
  synthetic circulating small noncoding RNA (sncRNA) 5' transfer RNA (tRNA) half
tcatgcaagattc

SEQ ID NO: 19617 - DNA, 25 bp, Artificial Sequence
  synthetic circulating small noncoding RNA (sncRNA) 5' transfer RNA (tRNA) half
cgcggcccgggttcgattcccggtc

SEQ ID NO: 19618 - DNA, 24 bp, Artificial Sequence
  synthetic circulating small noncoding RNA (sncRNA) 5' transfer RNA (tRNA) half
cccgcgtggcaggcgagaattcta

SEQ ID NO: 19619 - DNA, 29 bp, Artificial Sequence
  synthetic circulating small noncoding RNA (sncRNA) 5' transfer RNA (tRNA) half
gtgttaggcgaatgtgataaccactacac

SEQ ID NO: 19620 - DNA, 13 bp, Artificial Sequence
  synthetic circulating small noncoding RNA (sncRNA) 5' transfer RNA (tRNA) half
ctagaccatgtgg

SEQ ID NO: 19621 - DNA, 35 bp, Artificial Sequence
  synthetic circulating small noncoding RNA (sncRNA) 5' transfer RNA (tRNA) half
cgccgaatcctagccactagaccaccagggacgga

SEQ ID NO: 19622 - DNA, 9 bp, Artificial Sequence
  synthetic circulating small noncoding RNA (sncRNA) 5' transfer RNA (tRNA) half
gggggcacc

SEQ ID NO: 19623 - DNA, 43 bp, Artificial Sequence
  synthetic circulating small noncoding RNA (sncRNA) 5' transfer RNA (tRNA) half
tgagattaagagtctcatgctctaccgactgagctagccgggc

SEQ ID NO: 19624 - DNA, 30 bp, Artificial Sequence
  synthetic circulating small noncoding RNA (sncRNA) 5' transfer RNA (tRNA) half
gagtggttcaattccacctttcgggcggga

SEQ ID NO: 19625 - DNA, 14 bp, Artificial Sequence
  synthetic circulating small noncoding RNA (sncRNA) 5' transfer RNA (tRNA) half
gccttatccattag

SEQ ID NO: 19626 - DNA, 34 bp, Artificial Sequence
  synthetic circulating small noncoding RNA (sncRNA) 5' transfer RNA (tRNA) half
aggccttgctgggattcgaacccaggatctcctg

SEQ ID NO: 19627 - DNA, 19 bp, Artificial Sequence
  synthetic circulating small noncoding RNA (sncRNA) 5' transfer RNA (tRNA) half
ccgactgagctatccaggc

SEQ ID NO: 19628 - DNA, 22 bp, Artificial Sequence
  synthetic circulating small noncoding RNA (sncRNA) 5' transfer RNA (tRNA) half
cgagttcaaatctcggtgggac

SEQ ID NO: 19629 - DNA, 9 bp, Artificial Sequence
  synthetic circulating small noncoding RNA (sncRNA) 5' transfer RNA (tRNA) half
tttcgcccg

SEQ ID NO: 19630 - DNA, 7 bp, Artificial Sequence
  synthetic circulating small noncoding RNA (sncRNA) 5' transfer RNA (tRNA) half
ttcgcgt

SEQ ID NO: 19631 - DNA, 22 bp, Artificial Sequence
  synthetic circulating small noncoding RNA (sncRNA) 5' transfer RNA (tRNA) half
tcccaccgctgccatctttgtt

SEQ ID NO: 19632 - DNA, 22 bp, Artificial Sequence
  synthetic circulating small noncoding RNA (sncRNA) 5' transfer RNA (tRNA) half
tcccatgctctaccgactgagc

SEQ ID NO: 19633 - DNA, 21 bp, Artificial Sequence
  synthetic circulating small noncoding RNA (sncRNA) 5' transfer RNA (tRNA) half
ccaaggttgtgggttcgatgc

SEQ ID NO: 19634 - DNA, 23 bp, Artificial Sequence
  synthetic circulating small noncoding RNA (sncRNA) 5' transfer RNA (tRNA) half
gctgaccccgacgtgatttgaac

SEQ ID NO: 19635 - DNA, 32 bp, Artificial Sequence
  synthetic circulating small noncoding RNA (sncRNA) 5' transfer RNA (tRNA) half
accacgaagggactcgaaccctcaatcttctg

SEQ ID NO: 19636 - DNA, 36 bp, Artificial Sequence
  synthetic circulating small noncoding RNA (sncRNA) 5' transfer RNA (tRNA) half
cgcctccccgtcggggaatcgaaccccggtctcccg

SEQ ID NO: 19637 - DNA, 28 bp, Artificial Sequence
  synthetic circulating small noncoding RNA (sncRNA) 5' transfer RNA (tRNA) half
cccgtcggggaattgaaccccggtctcc

SEQ ID NO: 19638 - DNA, 29 bp, Artificial Sequence
  synthetic circulating small noncoding RNA (sncRNA) 5' transfer RNA (tRNA) half
cgcagcaacctcggttcgaatccgagtca

SEQ ID NO: 19639 - DNA, 24 bp, Artificial Sequence
  synthetic circulating small noncoding RNA (sncRNA) 5' transfer RNA (tRNA) half
gcactctggactctgaatccagcg

SEQ ID NO: 19640 - DNA, 18 bp, Artificial Sequence
  synthetic circulating small noncoding RNA (sncRNA) 5' transfer RNA (tRNA) half
gcgtgacaggcggggata

SEQ ID NO: 19641 - DNA, 29 bp, Artificial Sequence
  synthetic circulating small noncoding RNA (sncRNA) 5' transfer RNA (tRNA) half
gcgcccaacgtggggctcgaacccacgac

SEQ ID NO: 19642 - DNA, 17 bp, Artificial Sequence
  synthetic circulating small noncoding RNA (sncRNA) 5' transfer RNA (tRNA) half
ctccccgtcggggaatt

SEQ ID NO: 19643 - DNA, 15 bp, Artificial Sequence
  synthetic circulating small noncoding RNA (sncRNA) 5' transfer RNA (tRNA) half
tgccgggaatcgaac

SEQ ID NO: 19644 - DNA, 24 bp, Artificial Sequence
  synthetic circulating small noncoding RNA (sncRNA) 5' transfer RNA (tRNA) half
agcactctggactctgaatccagc

SEQ ID NO: 19645 - DNA, 26 bp, Artificial Sequence
  synthetic circulating small noncoding RNA (sncRNA) 5' transfer RNA (tRNA) half
ctctccccgtcggggaatcgaacccc

SEQ ID NO: 19646 - DNA, 23 bp, Artificial Sequence
  synthetic circulating small noncoding RNA (sncRNA) 5' transfer RNA (tRNA) half
gttcgagtcctgccgcggtcgac

SEQ ID NO: 19647 - DNA, 15 bp, Artificial Sequence
  synthetic circulating small noncoding RNA (sncRNA) 5' transfer RNA (tRNA) half
gttcgagcccaccca

SEQ ID NO: 19648 - DNA, 22 bp, Artificial Sequence
  synthetic circulating small noncoding RNA (sncRNA) 5' transfer RNA (tRNA) half
aacccgggtcaactgcttggaa

SEQ ID NO: 19649 - DNA, 30 bp, Artificial Sequence
  synthetic circulating small noncoding RNA (sncRNA) 5' transfer RNA (tRNA) half
caaggtcgcgggttcgatccccgtacgggc

SEQ ID NO: 19650 - DNA, 38 bp, Artificial Sequence
  synthetic circulating small noncoding RNA (sncRNA) 5' transfer RNA (tRNA) half
gcgaccacgaagggactcgaacccccaatcttctgatc

SEQ ID NO: 19651 - DNA, 22 bp, Artificial Sequence
  synthetic circulating small noncoding RNA (sncRNA) 5' transfer RNA (tRNA) half
tgtgcattggccgggaatcgaa

SEQ ID NO: 19652 - DNA, 31 bp, Artificial Sequence
  synthetic circulating small noncoding RNA (sncRNA) 5' transfer RNA (tRNA) half
ggtctcccgcgtgacaggcggggatactcac

SEQ ID NO: 19653 - DNA, 36 bp, Artificial Sequence
  synthetic circulating small noncoding RNA (sncRNA) 5' transfer RNA (tRNA) half
tcccacaccgggagtcgaacccgggccgcctgggtg

SEQ ID NO: 19654 - DNA, 30 bp, Artificial Sequence
  synthetic circulating small noncoding RNA (sncRNA) 5' transfer RNA (tRNA) half
ttgactgcagatcaagaggtccccggttca

SEQ ID NO: 19655 - DNA, 15 bp, Artificial Sequence
  synthetic circulating small noncoding RNA (sncRNA) 5' transfer RNA (tRNA) half
agcagagtggcgcag

SEQ ID NO: 19656 - DNA, 21 bp, Artificial Sequence
  synthetic circulating small noncoding RNA (sncRNA) 5' transfer RNA (tRNA) half
ccggatgatcctcagtggtct

SEQ ID NO: 19657 - DNA, 17 bp, Artificial Sequence
  synthetic circulating small noncoding RNA (sncRNA) 5' transfer RNA (tRNA) half
aacccacgcctccattc

SEQ ID NO: 19658 - DNA, 15 bp, Artificial Sequence
  synthetic circulating small noncoding RNA (sncRNA) 5' transfer RNA (tRNA) half
agggtcgtgagttcg

SEQ ID NO: 19659 - DNA, 43 bp, Artificial Sequence
  synthetic circulating small noncoding RNA (sncRNA) 5' transfer RNA (tRNA) half
gtttccgtagtgtagtggttatcacgctcgcctcacacgcgag

SEQ ID NO: 19660 - DNA, 20 bp, Artificial Sequence
  synthetic circulating small noncoding RNA (sncRNA) 5' transfer RNA (tRNA) half
cacaacgcagagtactaacc

SEQ ID NO: 19661 - DNA, 19 bp, Artificial Sequence
  synthetic circulating small noncoding RNA (sncRNA) 5' transfer RNA (tRNA) half
aagcctccgatagcagagg

SEQ ID NO: 19662 - DNA, 7 bp, Artificial Sequence
  synthetic circulating small noncoding RNA (sncRNA) 5' transfer RNA (tRNA) half
ggcggcc

SEQ ID NO: 19663 - DNA, 13 bp, Artificial Sequence
  synthetic circulating small noncoding RNA (sncRNA) 5' transfer RNA (tRNA) half
acaggattcgaac

SEQ ID NO: 19664 - DNA, 40 bp, Artificial Sequence
  synthetic circulating small noncoding RNA (sncRNA) 5' transfer RNA (tRNA) half
ctcagtcggtagagcatgagactcttaatctcagggtcgt

SEQ ID NO: 19665 - DNA, 29 bp, Artificial Sequence
  synthetic circulating small noncoding RNA (sncRNA) 5' transfer RNA (tRNA) half
gccgggaatcgaacccgggtcacccgcgt

SEQ ID NO: 19666 - DNA, 16 bp, Artificial Sequence
  synthetic circulating small noncoding RNA (sncRNA) 5' transfer RNA (tRNA) half
atcacgtcggggtcag

SEQ ID NO: 19667 - DNA, 13 bp, Artificial Sequence
  synthetic circulating small noncoding RNA (sncRNA) 5' transfer RNA (tRNA) half
gttcaattcccgg

SEQ ID NO: 19668 - DNA, 30 bp, Artificial Sequence
  synthetic circulating small noncoding RNA (sncRNA) 5' transfer RNA (tRNA) half
cgtcggggaatcgaaccccggtctcccgcg

SEQ ID NO: 19669 - DNA, 8 bp, Artificial Sequence
  synthetic circulating small noncoding RNA (sncRNA) 5' transfer RNA (tRNA) half
aacccgcg

SEQ ID NO: 19670 - DNA, 17 bp, Artificial Sequence
  synthetic circulating small noncoding RNA (sncRNA) 5' transfer RNA (tRNA) half
cgcccaacgtggggctc

SEQ ID NO: 19671 - DNA, 21 bp, Artificial Sequence
  synthetic circulating small noncoding RNA (sncRNA) 5' transfer RNA (tRNA) half
gaacccacgccatcgaaatga

SEQ ID NO: 19672 - DNA, 45 bp, Artificial Sequence
  synthetic circulating small noncoding RNA (sncRNA) 5' transfer RNA (tRNA) half
tagcgcccgaacagggacttgaaccctggaccctcagattaaaag

SEQ ID NO: 19673 - DNA, 15 bp, Artificial Sequence
  synthetic circulating small noncoding RNA (sncRNA) 5' transfer RNA (tRNA) half
gcgccaaatcctaac

SEQ ID NO: 19674 - DNA, 23 bp, Artificial Sequence
  synthetic circulating small noncoding RNA (sncRNA) 5' transfer RNA (tRNA) half
ctgtggaggatgtgggcatcgat

SEQ ID NO: 19675 - DNA, 31 bp, Artificial Sequence
  synthetic circulating small noncoding RNA (sncRNA) 5' transfer RNA (tRNA) half
accgctgggattcgaacccaggatctcctgt

SEQ ID NO: 19676 - DNA, 13 bp, Artificial Sequence
  synthetic circulating small noncoding RNA (sncRNA) 5' transfer RNA (tRNA) half
cgcacccgaagcg

SEQ ID NO: 19677 - DNA, 24 bp, Artificial Sequence
  synthetic circulating small noncoding RNA (sncRNA) 5' transfer RNA (tRNA) half
gttcgattcccggtcagggaagca

SEQ ID NO: 19678 - DNA, 9 bp, Artificial Sequence
  synthetic circulating small noncoding RNA (sncRNA) 5' transfer RNA (tRNA) half
ggggttcga

SEQ ID NO: 19679 - DNA, 36 bp, Artificial Sequence
  synthetic circulating small noncoding RNA (sncRNA) 5' transfer RNA (tRNA) half
aaccaggggtcgcgagttcaaatctcgctggggcct

SEQ ID NO: 19680 - DNA, 13 bp, Artificial Sequence
  synthetic circulating small noncoding RNA (sncRNA) 5' transfer RNA (tRNA) half
gggccgcctgggt

SEQ ID NO: 19681 - DNA, 13 bp, Artificial Sequence
  synthetic circulating small noncoding RNA (sncRNA) 5' transfer RNA (tRNA) half
gcagaggatggtt

SEQ ID NO: 19682 - DNA, 35 bp, Artificial Sequence
  synthetic circulating small noncoding RNA (sncRNA) 5' transfer RNA (tRNA) half
gcattggtagttcaatggtagaattctcgcctccc

SEQ ID NO: 19683 - DNA, 23 bp, Artificial Sequence
  synthetic circulating small noncoding RNA (sncRNA) 5' transfer RNA (tRNA) half
gtcggggaattgaaccccggtct

SEQ ID NO: 19684 - DNA, 13 bp, Artificial Sequence
  synthetic circulating small noncoding RNA (sncRNA) 5' transfer RNA (tRNA) half
agtcgtggccgag

SEQ ID NO: 19685 - DNA, 6 bp, Artificial Sequence
  synthetic circulating small noncoding RNA (sncRNA) 5' transfer RNA (tRNA) half
aggtcg

SEQ ID NO: 19686 - DNA, 19 bp, Artificial Sequence
  synthetic circulating small noncoding RNA (sncRNA) 5' transfer RNA (tRNA) half
gttcaaatctcggtgggac

SEQ ID NO: 19687 - DNA, 37 bp, Artificial Sequence
  synthetic circulating small noncoding RNA (sncRNA) 5' transfer RNA (tRNA) half
taaaccgaagatcacgggttcgaaccccgtccgtgcc

SEQ ID NO: 19688 - DNA, 38 bp, Artificial Sequence
  synthetic circulating small noncoding RNA (sncRNA) 5' transfer RNA (tRNA) half
atcagaagattgagggttcgagtcccttcgtggtcgaa

SEQ ID NO: 19689 - DNA, 38 bp, Artificial Sequence
  synthetic circulating small noncoding RNA (sncRNA) 5' transfer RNA (tRNA) half
actggagccttaatccagcgccttagaccgctcggcca

SEQ ID NO: 19690 - DNA, 12 bp, Artificial Sequence
  synthetic circulating small noncoding RNA (sncRNA) 5' transfer RNA (tRNA) half
gagcgctctacc

SEQ ID NO: 19691 - DNA, 40 bp, Artificial Sequence
  synthetic circulating small noncoding RNA (sncRNA) 5' transfer RNA (tRNA) half
aaaggtaggcggtagccgtttggagatgccggggatcgaa

SEQ ID NO: 19692 - DNA, 39 bp, Artificial Sequence
  synthetic circulating small noncoding RNA (sncRNA) 5' transfer RNA (tRNA) half
taaacaggagatcctgggttcgaatcccagcggtgcctg

SEQ ID NO: 19693 - DNA, 18 bp, Artificial Sequence
  synthetic circulating small noncoding RNA (sncRNA) 5' transfer RNA (tRNA) half
gaggatgggattcgaacc

SEQ ID NO: 19694 - DNA, 44 bp, Artificial Sequence
  synthetic circulating small noncoding RNA (sncRNA) 5' transfer RNA (tRNA) half
tccagtctcttcgggggcgtgggttcgaatcccaccgctgccaa

SEQ ID NO: 19695 - DNA, 20 bp, Artificial Sequence
  synthetic circulating small noncoding RNA (sncRNA) 5' transfer RNA (tRNA) half
attcgaacccacgcctccag

SEQ ID NO: 19696 - DNA, 25 bp, Artificial Sequence
  synthetic circulating small noncoding RNA (sncRNA) 5' transfer RNA (tRNA) half
tttgggctcgtccgggatttgaacc

SEQ ID NO: 19697 - DNA, 15 bp, Artificial Sequence
  synthetic circulating small noncoding RNA (sncRNA) 5' transfer RNA (tRNA) half
ctaaccactatacta

SEQ ID NO: 19698 - DNA, 16 bp, Artificial Sequence
  synthetic circulating small noncoding RNA (sncRNA) 5' transfer RNA (tRNA) half
aatccagcgccttaga

SEQ ID NO: 19699 - DNA, 36 bp, Artificial Sequence
  synthetic circulating small noncoding RNA (sncRNA) 5' transfer RNA (tRNA) half
gagtctcatgctctaccgactgagctagccgggcga

SEQ ID NO: 19700 - DNA, 12 bp, Artificial Sequence
  synthetic circulating small noncoding RNA (sncRNA) 5' transfer RNA (tRNA) half
tcgaacccgcaa

SEQ ID NO: 19701 - DNA, 9 bp, Artificial Sequence
  synthetic circulating small noncoding RNA (sncRNA) 5' transfer RNA (tRNA) half
attcgaacc

SEQ ID NO: 19702 - DNA, 32 bp, Artificial Sequence
  synthetic circulating small noncoding RNA (sncRNA) 5' transfer RNA (tRNA) half
tggtgtaatggttagcactctggactttgaat

SEQ ID NO: 19703 - DNA, 15 bp, Artificial Sequence
  synthetic circulating small noncoding RNA (sncRNA) 5' transfer RNA (tRNA) half
caggggagactgcga

SEQ ID NO: 19704 - DNA, 14 bp, Artificial Sequence
  synthetic circulating small noncoding RNA (sncRNA) 5' transfer RNA (tRNA) half
ggcagtggtgggat

SEQ ID NO: 19705 - DNA, 25 bp, Artificial Sequence
  synthetic circulating small noncoding RNA (sncRNA) 5' transfer RNA (tRNA) half
caggagtggggttcgaacccacgca

SEQ ID NO: 19706 - DNA, 34 bp, Artificial Sequence
  synthetic circulating small noncoding RNA (sncRNA) 5' transfer RNA (tRNA) half
cgctggattcagagtccagagtgctaaccattac

SEQ ID NO: 19707 - DNA, 15 bp, Artificial Sequence
  synthetic circulating small noncoding RNA (sncRNA) 5' transfer RNA (tRNA) half
gctatccgggctctt

SEQ ID NO: 19708 - DNA, 31 bp, Artificial Sequence
  synthetic circulating small noncoding RNA (sncRNA) 5' transfer RNA (tRNA) half
gtccagggttcaagtccctgttcgggcgctg

SEQ ID NO: 19709 - DNA, 13 bp, Artificial Sequence
  synthetic circulating small noncoding RNA (sncRNA) 5' transfer RNA (tRNA) half
ggccgagcggtct

SEQ ID NO: 19710 - DNA, 16 bp, Artificial Sequence
  synthetic circulating small noncoding RNA (sncRNA) 5' transfer RNA (tRNA) half
cgcgggagaccggggt

SEQ ID NO: 19711 - DNA, 10 bp, Artificial Sequence
  synthetic circulating small noncoding RNA (sncRNA) 5' transfer RNA (tRNA) half
ggatcgaacc

SEQ ID NO: 19712 - DNA, 31 bp, Artificial Sequence
  synthetic circulating small noncoding RNA (sncRNA) 5' transfer RNA (tRNA) half
tccatcgccttaaccactcggccacctcatc

SEQ ID NO: 19713 - DNA, 13 bp, Artificial Sequence
  synthetic circulating small noncoding RNA (sncRNA) 5' transfer RNA (tRNA) half
tccgcccggtttc

SEQ ID NO: 19714 - DNA, 32 bp, Artificial Sequence
  synthetic circulating small noncoding RNA (sncRNA) 5' transfer RNA (tRNA) half
gtcacgaacaggattcgaacctgtgcggggaa

SEQ ID NO: 19715 - DNA, 18 bp, Artificial Sequence
  synthetic circulating small noncoding RNA (sncRNA) 5' transfer RNA (tRNA) half
ttcccggccaatgcactc

SEQ ID NO: 19716 - DNA, 21 bp, Artificial Sequence
  synthetic circulating small noncoding RNA (sncRNA) 5' transfer RNA (tRNA) half
atcccggacgagcccaatttt

SEQ ID NO: 19717 - DNA, 8 bp, Artificial Sequence
  synthetic circulating small noncoding RNA (sncRNA) 5' transfer RNA (tRNA) half
tcgcccgg

SEQ ID NO: 19718 - DNA, 21 bp, Artificial Sequence
  synthetic circulating small noncoding RNA (sncRNA) 5' transfer RNA (tRNA) half
tcgctggattcagagtccaga

SEQ ID NO: 19719 - DNA, 14 bp, Artificial Sequence
  synthetic circulating small noncoding RNA (sncRNA) 5' transfer RNA (tRNA) half
gagaattctaccac

SEQ ID NO: 19720 - DNA, 14 bp, Artificial Sequence
  synthetic circulating small noncoding RNA (sncRNA) 5' transfer RNA (tRNA) half
ccttaaccactcag

SEQ ID NO: 19721 - DNA, 14 bp, Artificial Sequence
  synthetic circulating small noncoding RNA (sncRNA) 5' transfer RNA (tRNA) half
aagaggtccctggt

SEQ ID NO: 19722 - DNA, 31 bp, Artificial Sequence
  synthetic circulating small noncoding RNA (sncRNA) 5' transfer RNA (tRNA) half
tggtttcgatccatcgacctctgggttatgg

SEQ ID NO: 19723 - DNA, 18 bp, Artificial Sequence
  synthetic circulating small noncoding RNA (sncRNA) 5' transfer RNA (tRNA) half
atcctgccgactacggta

SEQ ID NO: 19724 - DNA, 22 bp, Artificial Sequence
  synthetic circulating small noncoding RNA (sncRNA) 5' transfer RNA (tRNA) half
ggttcgattccggctcgaagga

SEQ ID NO: 19725 - DNA, 14 bp, Artificial Sequence
  synthetic circulating small noncoding RNA (sncRNA) 5' transfer RNA (tRNA) half
gcgccacggagcca

SEQ ID NO: 19726 - DNA, 34 bp, Artificial Sequence
  synthetic circulating small noncoding RNA (sncRNA) 5' transfer RNA (tRNA) half
ctgggtgggctcgaaccaccaacctttcggttaa

SEQ ID NO: 19727 - DNA, 22 bp, Artificial Sequence
  synthetic circulating small noncoding RNA (sncRNA) 5' transfer RNA (tRNA) half
tccggctcgaaggacttcgtgc

SEQ ID NO: 19728 - DNA, 35 bp, Artificial Sequence
  synthetic circulating small noncoding RNA (sncRNA) 5' transfer RNA (tRNA) half
agcgcccgaacagggacttgaaccctggaccctca

SEQ ID NO: 19729 - DNA, 23 bp, Artificial Sequence
  synthetic circulating small noncoding RNA (sncRNA) 5' transfer RNA (tRNA) half
taagagtctcatgctctaccgac

SEQ ID NO: 19730 - DNA, 26 bp, Artificial Sequence
  synthetic circulating small noncoding RNA (sncRNA) 5' transfer RNA (tRNA) half
aggccgcggcggtgagagcgccaaat

SEQ ID NO: 19731 - DNA, 16 bp, Artificial Sequence
  synthetic circulating small noncoding RNA (sncRNA) 5' transfer RNA (tRNA) half
cgagcccacccaggga

SEQ ID NO: 19732 - DNA, 11 bp, Artificial Sequence
  synthetic circulating small noncoding RNA (sncRNA) 5' transfer RNA (tRNA) half
tctccccgtcg

SEQ ID NO: 19733 - DNA, 32 bp, Artificial Sequence
  synthetic circulating small noncoding RNA (sncRNA) 5' transfer RNA (tRNA) half
caacctcggttcgaatccgagtcacggcatta

SEQ ID NO: 19734 - DNA, 28 bp, Artificial Sequence
  synthetic circulating small noncoding RNA (sncRNA) 5' transfer RNA (tRNA) half
cccggatagctcagtcggtagagcatca

SEQ ID NO: 19735 - DNA, 14 bp, Artificial Sequence
  synthetic circulating small noncoding RNA (sncRNA) 5' transfer RNA (tRNA) half
gaagatcgcgggtt

SEQ ID NO: 19736 - DNA, 17 bp, Artificial Sequence
  synthetic circulating small noncoding RNA (sncRNA) 5' transfer RNA (tRNA) half
tccctggttcgatcccg

SEQ ID NO: 19737 - DNA, 36 bp, Artificial Sequence
  synthetic circulating small noncoding RNA (sncRNA) 5' transfer RNA (tRNA) half
cagaagattgagggttcgaatcccttcgtggttggt

SEQ ID NO: 19738 - DNA, 22 bp, Artificial Sequence
  synthetic circulating small noncoding RNA (sncRNA) 5' transfer RNA (tRNA) half
ttcaaatctcggtggaacctgc

SEQ ID NO: 19739 - DNA, 17 bp, Artificial Sequence
  synthetic circulating small noncoding RNA (sncRNA) 5' transfer RNA (tRNA) half
tcaggggttagagcact

SEQ ID NO: 19740 - DNA, 10 bp, Artificial Sequence
  synthetic circulating small noncoding RNA (sncRNA) 5' transfer RNA (tRNA) half
caggcgggga

SEQ ID NO: 19741 - DNA, 12 bp, Artificial Sequence
  synthetic circulating small noncoding RNA (sncRNA) 5' transfer RNA (tRNA) half
caggatttgaac

SEQ ID NO: 19742 - DNA, 24 bp, Artificial Sequence
  synthetic circulating small noncoding RNA (sncRNA) 5' transfer RNA (tRNA) half
cttctccccgtcggggaatcgaac

SEQ ID NO: 19743 - DNA, 26 bp, Artificial Sequence
  synthetic circulating small noncoding RNA (sncRNA) 5' transfer RNA (tRNA) half
attaagagtcccatgctctaccgact

SEQ ID NO: 19744 - DNA, 30 bp, Artificial Sequence
  synthetic circulating small noncoding RNA (sncRNA) 5' transfer RNA (tRNA) half
tcacccaggcggcccgggttcgactcccgg

SEQ ID NO: 19745 - DNA, 22 bp, Artificial Sequence
  synthetic circulating small noncoding RNA (sncRNA) 5' transfer RNA (tRNA) half
cggatgatcctcagtggtctgg

SEQ ID NO: 19746 - DNA, 28 bp, Artificial Sequence
  synthetic circulating small noncoding RNA (sncRNA) 5' transfer RNA (tRNA) half
ggctccatagctcaggggttagagcact

SEQ ID NO: 19747 - DNA, 14 bp, Artificial Sequence
  synthetic circulating small noncoding RNA (sncRNA) 5' transfer RNA (tRNA) half
cggctagctcagtc

SEQ ID NO: 19748 - DNA, 19 bp, Artificial Sequence
  synthetic circulating small noncoding RNA (sncRNA) 5' transfer RNA (tRNA) half
cagctgtcagaagtgggat

SEQ ID NO: 19749 - DNA, 25 bp, Artificial Sequence
  synthetic circulating small noncoding RNA (sncRNA) 5' transfer RNA (tRNA) half
gccgtgatcgtatagtggttagtac

SEQ ID NO: 19750 - DNA, 26 bp, Artificial Sequence
  synthetic circulating small noncoding RNA (sncRNA) 5' transfer RNA (tRNA) half
cataatctgaaggtcctgagttcgaa

SEQ ID NO: 19751 - DNA, 31 bp, Artificial Sequence
  synthetic circulating small noncoding RNA (sncRNA) 5' transfer RNA (tRNA) half
cgcgggaggcccgggttcgattcccggccca

SEQ ID NO: 19752 - DNA, 25 bp, Artificial Sequence
  synthetic circulating small noncoding RNA (sncRNA) 5' transfer RNA (tRNA) half
tctagcggttaggattcctggtttt

SEQ ID NO: 19753 - DNA, 33 bp, Artificial Sequence
  synthetic circulating small noncoding RNA (sncRNA) 5' transfer RNA (tRNA) half
cttccctgaccgggaatcgaacccgggccgcgg

SEQ ID NO: 19754 - DNA, 28 bp, Artificial Sequence
  synthetic circulating small noncoding RNA (sncRNA) 5' transfer RNA (tRNA) half
cgcagaaggtcctgggttcgagccccag

SEQ ID NO: 19755 - DNA, 30 bp, Artificial Sequence
  synthetic circulating small noncoding RNA (sncRNA) 5' transfer RNA (tRNA) half
agcattggtggttcagtggtagaattctcg

SEQ ID NO: 19756 - DNA, 24 bp, Artificial Sequence
  synthetic circulating small noncoding RNA (sncRNA) 5' transfer RNA (tRNA) half
gtgtcaggatggccgagcggtcta

SEQ ID NO: 19757 - DNA, 32 bp, Artificial Sequence
  synthetic circulating small noncoding RNA (sncRNA) 5' transfer RNA (tRNA) half
cgcggcggtgagagcgccgaatcctaaccact

SEQ ID NO: 19758 - DNA, 20 bp, Artificial Sequence
  synthetic circulating small noncoding RNA (sncRNA) 5' transfer RNA (tRNA) half
acttgaaccctggaccctca

SEQ ID NO: 19759 - DNA, 35 bp, Artificial Sequence
  synthetic circulating small noncoding RNA (sncRNA) 5' transfer RNA (tRNA) half
aatctgaaggtcctgagttcgaacctcagaggggg

SEQ ID NO: 19760 - DNA, 17 bp, Artificial Sequence
  synthetic circulating small noncoding RNA (sncRNA) 5' transfer RNA (tRNA) half
gcgggagaccggggttc

SEQ ID NO: 19761 - DNA, 19 bp, Artificial Sequence
  synthetic circulating small noncoding RNA (sncRNA) 5' transfer RNA (tRNA) half
caggcggggatactcacca

SEQ ID NO: 19762 - DNA, 14 bp, Artificial Sequence
  synthetic circulating small noncoding RNA (sncRNA) 5' transfer RNA (tRNA) half
ttcgatccccggca

SEQ ID NO: 19763 - DNA, 7 bp, Artificial Sequence
  synthetic circulating small noncoding RNA (sncRNA) 5' transfer RNA (tRNA) half
atccgga

SEQ ID NO: 19764 - DNA, 25 bp, Artificial Sequence
  synthetic circulating small noncoding RNA (sncRNA) 5' transfer RNA (tRNA) half
agaccgctcggccacactaccaagc

SEQ ID NO: 19765 - DNA, 28 bp, Artificial Sequence
  synthetic circulating small noncoding RNA (sncRNA) 5' transfer RNA (tRNA) half
gccaggagtcgaacctagaatcttctga

SEQ ID NO: 19766 - DNA, 28 bp, Artificial Sequence
  synthetic circulating small noncoding RNA (sncRNA) 5' transfer RNA (tRNA) half
tggtgctaataacgccaaggtcgcgggt

SEQ ID NO: 19767 - DNA, 7 bp, Artificial Sequence
  synthetic circulating small noncoding RNA (sncRNA) 5' transfer RNA (tRNA) half
cagtcga

SEQ ID NO: 19768 - DNA, 18 bp, Artificial Sequence
  synthetic circulating small noncoding RNA (sncRNA) 5' transfer RNA (tRNA) half
ttcaatccccggcatctc

SEQ ID NO: 19769 - DNA, 18 bp, Artificial Sequence
  synthetic circulating small noncoding RNA (sncRNA) 5' transfer RNA (tRNA) half
acgcagaaggtcctgggt

SEQ ID NO: 19770 - DNA, 15 bp, Artificial Sequence
  synthetic circulating small noncoding RNA (sncRNA) 5' transfer RNA (tRNA) half
cgctgtgagcaggat

SEQ ID NO: 19771 - DNA, 15 bp, Artificial Sequence
  synthetic circulating small noncoding RNA (sncRNA) 5' transfer RNA (tRNA) half
ccgtcggggaattga

SEQ ID NO: 19772 - DNA, 16 bp, Artificial Sequence
  synthetic circulating small noncoding RNA (sncRNA) 5' transfer RNA (tRNA) half
gcgcaggttcgaatcc

SEQ ID NO: 19773 - DNA, 27 bp, Artificial Sequence
  synthetic circulating small noncoding RNA (sncRNA) 5' transfer RNA (tRNA) half
ggagatgccggggatcgaacccggggc

SEQ ID NO: 19774 - DNA, 19 bp, Artificial Sequence
  synthetic circulating small noncoding RNA (sncRNA) 5' transfer RNA (tRNA) half
tactggcagcggtgggatt

SEQ ID NO: 19775 - DNA, 12 bp, Artificial Sequence
  synthetic circulating small noncoding RNA (sncRNA) 5' transfer RNA (tRNA) half
cagagtgctaac

SEQ ID NO: 19776 - DNA, 10 bp, Artificial Sequence
  synthetic circulating small noncoding RNA (sncRNA) 5' transfer RNA (tRNA) half
ctcgaacagg

SEQ ID NO: 19777 - DNA, 33 bp, Artificial Sequence
  synthetic circulating small noncoding RNA (sncRNA) 5' transfer RNA (tRNA) half
tgatgctctaccgactgagctatccaggctctt

SEQ ID NO: 19778 - DNA, 31 bp, Artificial Sequence
  synthetic circulating small noncoding RNA (sncRNA) 5' transfer RNA (tRNA) half
tgaactcggatcgctggattcagagtccaga

SEQ ID NO: 19779 - DNA, 28 bp, Artificial Sequence
  synthetic circulating small noncoding RNA (sncRNA) 5' transfer RNA (tRNA) half
cctgaacgcagcgccttagaccgctcgg

SEQ ID NO: 19780 - DNA, 17 bp, Artificial Sequence
  synthetic circulating small noncoding RNA (sncRNA) 5' transfer RNA (tRNA) half
agcctccgatagcagag

SEQ ID NO: 19781 - DNA, 14 bp, Artificial Sequence
  synthetic circulating small noncoding RNA (sncRNA) 5' transfer RNA (tRNA) half
tggttagcactctg

SEQ ID NO: 19782 - DNA, 31 bp, Artificial Sequence
  synthetic circulating small noncoding RNA (sncRNA) 5' transfer RNA (tRNA) half
acgaggccccgggttcaatccccggcacctc

SEQ ID NO: 19783 - DNA, 17 bp, Artificial Sequence
  synthetic circulating small noncoding RNA (sncRNA) 5' transfer RNA (tRNA) half
tcgaacccggggcctca

SEQ ID NO: 19784 - DNA, 42 bp, Artificial Sequence
  synthetic circulating small noncoding RNA (sncRNA) 5' transfer RNA (tRNA) half
acacgcagaaggtcctgggttcgagccccagtggaaccacgt

SEQ ID NO: 19785 - DNA, 27 bp, Artificial Sequence
  synthetic circulating small noncoding RNA (sncRNA) 5' transfer RNA (tRNA) half
aatgtgataaccactacactacggaaa

SEQ ID NO: 19786 - DNA, 11 bp, Artificial Sequence
  synthetic circulating small noncoding RNA (sncRNA) 5' transfer RNA (tRNA) half
tccaatgcgct

SEQ ID NO: 19787 - DNA, 34 bp, Artificial Sequence
  synthetic circulating small noncoding RNA (sncRNA) 5' transfer RNA (tRNA) half
accacgaagggactcgaacccccaatcttctgat

SEQ ID NO: 19788 - DNA, 12 bp, Artificial Sequence
  synthetic circulating small noncoding RNA (sncRNA) 5' transfer RNA (tRNA) half
tagaccaccagg

SEQ ID NO: 19789 - DNA, 28 bp, Artificial Sequence
  synthetic circulating small noncoding RNA (sncRNA) 5' transfer RNA (tRNA) half
ccgggaatcgaacccgggcctcccgcgt

SEQ ID NO: 19790 - DNA, 9 bp, Artificial Sequence
  synthetic circulating small noncoding RNA (sncRNA) 5' transfer RNA (tRNA) half
aggccacgt

SEQ ID NO: 19791 - DNA, 10 bp, Artificial Sequence
  synthetic circulating small noncoding RNA (sncRNA) 5' transfer RNA (tRNA) half
cgaccacgaa

SEQ ID NO: 19792 - DNA, 18 bp, Artificial Sequence
  synthetic circulating small noncoding RNA (sncRNA) 5' transfer RNA (tRNA) half
ggggaatcgaaccccggt

SEQ ID NO: 19793 - DNA, 21 bp, Artificial Sequence
  synthetic circulating small noncoding RNA (sncRNA) 5' transfer RNA (tRNA) half
tcagttggttagagcgtggtg

SEQ ID NO: 19794 - DNA, 20 bp, Artificial Sequence
  synthetic circulating small noncoding RNA (sncRNA) 5' transfer RNA (tRNA) half
ccgtcggggaattgaacccc

SEQ ID NO: 19795 - DNA, 23 bp, Artificial Sequence
  synthetic circulating small noncoding RNA (sncRNA) 5' transfer RNA (tRNA) half
gtaatggttagcactctggactt

SEQ ID NO: 19796 - DNA, 15 bp, Artificial Sequence
  synthetic circulating small noncoding RNA (sncRNA) 5' transfer RNA (tRNA) half
ccgggttcgactccc

SEQ ID NO: 19797 - DNA, 20 bp, Artificial Sequence
  synthetic circulating small noncoding RNA (sncRNA) 5' transfer RNA (tRNA) half
ccgactccgccgggactcga

SEQ ID NO: 19798 - DNA, 19 bp, Artificial Sequence
  synthetic circulating small noncoding RNA (sncRNA) 5' transfer RNA (tRNA) half
attccccgacggggagtct

SEQ ID NO: 19799 - DNA, 34 bp, Artificial Sequence
  synthetic circulating small noncoding RNA (sncRNA) 5' transfer RNA (tRNA) half
ccgtgatcgtatagtggttagtactctgcgttgt

SEQ ID NO: 19800 - DNA, 22 bp, Artificial Sequence
  synthetic circulating small noncoding RNA (sncRNA) 5' transfer RNA (tRNA) half
gaacccacgcgtgcagagcaca

SEQ ID NO: 19801 - DNA, 29 bp, Artificial Sequence
  synthetic circulating small noncoding RNA (sncRNA) 5' transfer RNA (tRNA) half
gctggattcagagtccagagtgctaacca

SEQ ID NO: 19802 - DNA, 17 bp, Artificial Sequence
  synthetic circulating small noncoding RNA (sncRNA) 5' transfer RNA (tRNA) half
gactcccggtatgggaa

SEQ ID NO: 19803 - DNA, 19 bp, Artificial Sequence
  synthetic circulating small noncoding RNA (sncRNA) 5' transfer RNA (tRNA) half
cccaacgtggggctcgaac

SEQ ID NO: 19804 - DNA, 33 bp, Artificial Sequence
  synthetic circulating small noncoding RNA (sncRNA) 5' transfer RNA (tRNA) half
atggctcgttggtctaggggtatgattctcgct

SEQ ID NO: 19805 - DNA, 19 bp, Artificial Sequence
  synthetic circulating small noncoding RNA (sncRNA) 5' transfer RNA (tRNA) half
gttttcacccaggcggccc

SEQ ID NO: 19806 - DNA, 10 bp, Artificial Sequence
  synthetic circulating small noncoding RNA (sncRNA) 5' transfer RNA (tRNA) half
gttcgagtcc

SEQ ID NO: 19807 - DNA, 20 bp, Artificial Sequence
  synthetic circulating small noncoding RNA (sncRNA) 5' transfer RNA (tRNA) half
tcacgaccttcagattatga

SEQ ID NO: 19808 - DNA, 32 bp, Artificial Sequence
  synthetic circulating small noncoding RNA (sncRNA) 5' transfer RNA (tRNA) half
gatgccggggatcgaacccggggcctcataca

SEQ ID NO: 19809 - DNA, 15 bp, Artificial Sequence
  synthetic circulating small noncoding RNA (sncRNA) 5' transfer RNA (tRNA) half
aggaaaggcgtccct

SEQ ID NO: 19810 - DNA, 33 bp, Artificial Sequence
  synthetic circulating small noncoding RNA (sncRNA) 5' transfer RNA (tRNA) half
gttccaccgagatttgaactcggatcgctggat

SEQ ID NO: 19811 - DNA, 23 bp, Artificial Sequence
  synthetic circulating small noncoding RNA (sncRNA) 5' transfer RNA (tRNA) half
cggcgctctcaccgccgcggccc

SEQ ID NO: 19812 - DNA, 26 bp, Artificial Sequence
  synthetic circulating small noncoding RNA (sncRNA) 5' transfer RNA (tRNA) half
cgagcggtctaaggcgctgcgttcag

SEQ ID NO: 19813 - DNA, 24 bp, Artificial Sequence
  synthetic circulating small noncoding RNA (sncRNA) 5' transfer RNA (tRNA) half
ggttcgattccggctcgaaggact

SEQ ID NO: 19814 - DNA, 14 bp, Artificial Sequence
  synthetic circulating small noncoding RNA (sncRNA) 5' transfer RNA (tRNA) half
gcacccggatttga

SEQ ID NO: 19815 - DNA, 16 bp, Artificial Sequence
  synthetic circulating small noncoding RNA (sncRNA) 5' transfer RNA (tRNA) half
ggttcgactcccggta

SEQ ID NO: 19816 - DNA, 38 bp, Artificial Sequence
  synthetic circulating small noncoding RNA (sncRNA) 5' transfer RNA (tRNA) half
ggttaggattcggcgctctcaccgccgcggcccgggtt

SEQ ID NO: 19817 - DNA, 20 bp, Artificial Sequence
  synthetic circulating small noncoding RNA (sncRNA) 5' transfer RNA (tRNA) half
tcgtagtcggcaggattcga

SEQ ID NO: 19818 - DNA, 13 bp, Artificial Sequence
  synthetic circulating small noncoding RNA (sncRNA) 5' transfer RNA (tRNA) half
aagattgagggtt

SEQ ID NO: 19819 - DNA, 24 bp, Artificial Sequence
  synthetic circulating small noncoding RNA (sncRNA) 5' transfer RNA (tRNA) half
agagtctcatgctctaccgactga

SEQ ID NO: 19820 - DNA, 15 bp, Artificial Sequence
  synthetic circulating small noncoding RNA (sncRNA) 5' transfer RNA (tRNA) half
tgatgctctaccaac

SEQ ID NO: 19821 - DNA, 15 bp, Artificial Sequence
  synthetic circulating small noncoding RNA (sncRNA) 5' transfer RNA (tRNA) half
tccgggtgccccctt

SEQ ID NO: 19822 - DNA, 13 bp, Artificial Sequence
  synthetic circulating small noncoding RNA (sncRNA) 5' transfer RNA (tRNA) half
cagcgatccgagt

SEQ ID NO: 19823 - DNA, 30 bp, Artificial Sequence
  synthetic circulating small noncoding RNA (sncRNA) 5' transfer RNA (tRNA) half
ccatcgccttaaccactcggccacgactac

SEQ ID NO: 19824 - DNA, 22 bp, Artificial Sequence
  synthetic circulating small noncoding RNA (sncRNA) 5' transfer RNA (tRNA) half
acccgggccgcggcggtgaaag

SEQ ID NO: 19825 - DNA, 11 bp, Artificial Sequence
  synthetic circulating small noncoding RNA (sncRNA) 5' transfer RNA (tRNA) half
agccggattcg

SEQ ID NO: 19826 - DNA, 21 bp, Artificial Sequence
  synthetic circulating small noncoding RNA (sncRNA) 5' transfer RNA (tRNA) half
accgagccagccaggagtcga

SEQ ID NO: 19827 - DNA, 18 bp, Artificial Sequence
  synthetic circulating small noncoding RNA (sncRNA) 5' transfer RNA (tRNA) half
gcagtcaaatgctctacc

SEQ ID NO: 19828 - DNA, 10 bp, Artificial Sequence
  synthetic circulating small noncoding RNA (sncRNA) 5' transfer RNA (tRNA) half
gagctagccg

SEQ ID NO: 19829 - DNA, 26 bp, Artificial Sequence
  synthetic circulating small noncoding RNA (sncRNA) 5' transfer RNA (tRNA) half
atccagcgccttagaccactcggcca

SEQ ID NO: 19830 - DNA, 19 bp, Artificial Sequence
  synthetic circulating small noncoding RNA (sncRNA) 5' transfer RNA (tRNA) half
attgcattggccgggaatc

SEQ ID NO: 19831 - DNA, 9 bp, Artificial Sequence
  synthetic circulating small noncoding RNA (sncRNA) 5' transfer RNA (tRNA) half
agctggccg

SEQ ID NO: 19832 - DNA, 10 bp, Artificial Sequence
  synthetic circulating small noncoding RNA (sncRNA) 5' transfer RNA (tRNA) half
ttcgattccg

SEQ ID NO: 19833 - DNA, 25 bp, Artificial Sequence
  synthetic circulating small noncoding RNA (sncRNA) 5' transfer RNA (tRNA) half
ctagtggttaggattcggcgctctc

SEQ ID NO: 19834 - DNA, 35 bp, Artificial Sequence
  synthetic circulating small noncoding RNA (sncRNA) 5' transfer RNA (tRNA) half
aggcggcccgggttcgactcccggtgtgggaacag

SEQ ID NO: 19835 - DNA, 22 bp, Artificial Sequence
  synthetic circulating small noncoding RNA (sncRNA) 5' transfer RNA (tRNA) half
agtttactggcccgtacgggga

SEQ ID NO: 19836 - DNA, 16 bp, Artificial Sequence
  synthetic circulating small noncoding RNA (sncRNA) 5' transfer RNA (tRNA) half
cccgggtttcggcaac

SEQ ID NO: 19837 - DNA, 37 bp, Artificial Sequence
  synthetic circulating small noncoding RNA (sncRNA) 5' transfer RNA (tRNA) half
cccaggcggcccgggttcgactcccggtgtgggaaac

SEQ ID NO: 19838 - DNA, 35 bp, Artificial Sequence
  synthetic circulating small noncoding RNA (sncRNA) 5' transfer RNA (tRNA) half
gaaaggtccccggttcgaaaccgggcggaaacaac

SEQ ID NO: 19839 - DNA, 34 bp, Artificial Sequence
  synthetic circulating small noncoding RNA (sncRNA) 5' transfer RNA (tRNA) half
gggtccagggttcaagtccctgttcgggcgcttg

SEQ ID NO: 19840 - DNA, 8 bp, Artificial Sequence
  synthetic circulating small noncoding RNA (sncRNA) 5' transfer RNA (tRNA) half
gtccccgg

SEQ ID NO: 19841 - DNA, 29 bp, Artificial Sequence
  synthetic circulating small noncoding RNA (sncRNA) 5' transfer RNA (tRNA) half
acgcagaaggtcctgggttcgagccccag

SEQ ID NO: 19842 - DNA, 16 bp, Artificial Sequence
  synthetic circulating small noncoding RNA (sncRNA) 5' transfer RNA (tRNA) half
gttcaaatcccggacg

SEQ ID NO: 19843 - DNA, 18 bp, Artificial Sequence
  synthetic circulating small noncoding RNA (sncRNA) 5' transfer RNA (tRNA) half
gtggtgagtatccccgcc

SEQ ID NO: 19844 - DNA, 31 bp, Artificial Sequence
  synthetic circulating small noncoding RNA (sncRNA) 5' transfer RNA (tRNA) half
ggccggttagctcagttggttagagcatggt

SEQ ID NO: 19845 - DNA, 11 bp, Artificial Sequence
  synthetic circulating small noncoding RNA (sncRNA) 5' transfer RNA (tRNA) half
cgcggcccggg

SEQ ID NO: 19846 - DNA, 20 bp, Artificial Sequence
  synthetic circulating small noncoding RNA (sncRNA) 5' transfer RNA (tRNA) half
actctgaatccagcgatccg

SEQ ID NO: 19847 - DNA, 20 bp, Artificial Sequence
  synthetic circulating small noncoding RNA (sncRNA) 5' transfer RNA (tRNA) half
gttcaaatctcggtgggacc

SEQ ID NO: 19848 - DNA, 21 bp, Artificial Sequence
  synthetic circulating small noncoding RNA (sncRNA) 5' transfer RNA (tRNA) half
gatgccggggatcgaacccgg

SEQ ID NO: 19849 - DNA, 22 bp, Artificial Sequence
  synthetic circulating small noncoding RNA (sncRNA) 5' transfer RNA (tRNA) half
tcaggggttagagcactggtct

SEQ ID NO: 19850 - DNA, 28 bp, Artificial Sequence
  synthetic circulating small noncoding RNA (sncRNA) 5' transfer RNA (tRNA) half
gcgccttagaccactcggccatcctgac

SEQ ID NO: 19851 - DNA, 33 bp, Artificial Sequence
  synthetic circulating small noncoding RNA (sncRNA) 5' transfer RNA (tRNA) half
gcacgaggccctgggttcgatccccagcacctc

SEQ ID NO: 19852 - DNA, 36 bp, Artificial Sequence
  synthetic circulating small noncoding RNA (sncRNA) 5' transfer RNA (tRNA) half
cttaaaaccttgttcccagaggttcaaatcctctcc

SEQ ID NO: 19853 - DNA, 34 bp, Artificial Sequence
  synthetic circulating small noncoding RNA (sncRNA) 5' transfer RNA (tRNA) half
gatccatcgacctctgggttatgggcccagcacg

SEQ ID NO: 19854 - DNA, 11 bp, Artificial Sequence
  synthetic circulating small noncoding RNA (sncRNA) 5' transfer RNA (tRNA) half
gccccgtgtga

SEQ ID NO: 19855 - DNA, 19 bp, Artificial Sequence
  synthetic circulating small noncoding RNA (sncRNA) 5' transfer RNA (tRNA) half
gaacccgggtcaactgctt

SEQ ID NO: 19856 - DNA, 33 bp, Artificial Sequence
  synthetic circulating small noncoding RNA (sncRNA) 5' transfer RNA (tRNA) half
gggttccatggtgtaatggttagcactctggac

SEQ ID NO: 19857 - DNA, 20 bp, Artificial Sequence
  synthetic circulating small noncoding RNA (sncRNA) 5' transfer RNA (tRNA) half
ctcaaccacgaagggattcg

SEQ ID NO: 19858 - DNA, 20 bp, Artificial Sequence
  synthetic circulating small noncoding RNA (sncRNA) 5' transfer RNA (tRNA) half
ttcgactcctggctggctcg

SEQ ID NO: 19859 - DNA, 15 bp, Artificial Sequence
  synthetic circulating small noncoding RNA (sncRNA) 5' transfer RNA (tRNA) half
agtagtcgtggccga

SEQ ID NO: 19860 - DNA, 33 bp, Artificial Sequence
  synthetic circulating small noncoding RNA (sncRNA) 5' transfer RNA (tRNA) half
accggggacctttcgcgtgtgaggcgaacgtga

SEQ ID NO: 19861 - DNA, 36 bp, Artificial Sequence
  synthetic circulating small noncoding RNA (sncRNA) 5' transfer RNA (tRNA) half
tagcactctggactttgaatccagcgatccgagttc

SEQ ID NO: 19862 - DNA, 22 bp, Artificial Sequence
  synthetic circulating small noncoding RNA (sncRNA) 5' transfer RNA (tRNA) half
acccagaggtcgatggatcgaa

SEQ ID NO: 19863 - DNA, 12 bp, Artificial Sequence
  synthetic circulating small noncoding RNA (sncRNA) 5' transfer RNA (tRNA) half
cgcagtctcccc

SEQ ID NO: 19864 - DNA, 18 bp, Artificial Sequence
  synthetic circulating small noncoding RNA (sncRNA) 5' transfer RNA (tRNA) half
ggattcagagtccagagt

SEQ ID NO: 19865 - DNA, 22 bp, Artificial Sequence
  synthetic circulating small noncoding RNA (sncRNA) 5' transfer RNA (tRNA) half
cagagtgctaaccattacacca

SEQ ID NO: 19866 - DNA, 16 bp, Artificial Sequence
  synthetic circulating small noncoding RNA (sncRNA) 5' transfer RNA (tRNA) half
agtatccctgcctgtc

SEQ ID NO: 19867 - DNA, 20 bp, Artificial Sequence
  synthetic circulating small noncoding RNA (sncRNA) 5' transfer RNA (tRNA) half
ccactcggccacgactacat

SEQ ID NO: 19868 - DNA, 23 bp, Artificial Sequence
  synthetic circulating small noncoding RNA (sncRNA) 5' transfer RNA (tRNA) half
tcaaatgctctacccctgagcta

SEQ ID NO: 19869 - DNA, 23 bp, Artificial Sequence
  synthetic circulating small noncoding RNA (sncRNA) 5' transfer RNA (tRNA) half
ctagtggttaggattcggcgctc

SEQ ID NO: 19870 - DNA, 38 bp, Artificial Sequence
  synthetic circulating small noncoding RNA (sncRNA) 5' transfer RNA (tRNA) half
ctccccgtcggggaatcgaaccccggtctcccgcgtga

SEQ ID NO: 19871 - DNA, 8 bp, Artificial Sequence
  synthetic circulating small noncoding RNA (sncRNA) 5' transfer RNA (tRNA) half
tcaggtcg

SEQ ID NO: 19872 - DNA, 15 bp, Artificial Sequence
  synthetic circulating small noncoding RNA (sncRNA) 5' transfer RNA (tRNA) half
agtggttagtactct

SEQ ID NO: 19873 - DNA, 17 bp, Artificial Sequence
  synthetic circulating small noncoding RNA (sncRNA) 5' transfer RNA (tRNA) half
ccttagaccgctcggcc

SEQ ID NO: 19874 - DNA, 32 bp, Artificial Sequence
  synthetic circulating small noncoding RNA (sncRNA) 5' transfer RNA (tRNA) half
gcgagaatcatacccctagaccaacgagccgc

SEQ ID NO: 19875 - DNA, 20 bp, Artificial Sequence
  synthetic circulating small noncoding RNA (sncRNA) 5' transfer RNA (tRNA) half
acccacgcgtgcagagcaca

SEQ ID NO: 19876 - DNA, 13 bp, Artificial Sequence
  synthetic circulating small noncoding RNA (sncRNA) 5' transfer RNA (tRNA) half
agtcccatgctct

SEQ ID NO: 19877 - DNA, 22 bp, Artificial Sequence
  synthetic circulating small noncoding RNA (sncRNA) 5' transfer RNA (tRNA) half
ccgtgatcgtatagtggttagt

SEQ ID NO: 19878 - DNA, 31 bp, Artificial Sequence
  synthetic circulating small noncoding RNA (sncRNA) 5' transfer RNA (tRNA) half
cgttgcgttggccgggaatcgaacccgggtc

SEQ ID NO: 19879 - DNA, 17 bp, Artificial Sequence
  synthetic circulating small noncoding RNA (sncRNA) 5' transfer RNA (tRNA) half
tcacgttcgcctcacac

SEQ ID NO: 19880 - DNA, 29 bp, Artificial Sequence
  synthetic circulating small noncoding RNA (sncRNA) 5' transfer RNA (tRNA) half
ctgtagtgtagtggttatcacgttcgcct

SEQ ID NO: 19881 - DNA, 26 bp, Artificial Sequence
  synthetic circulating small noncoding RNA (sncRNA) 5' transfer RNA (tRNA) half
gcagtcaaatgctctaccactgagct

SEQ ID NO: 19882 - DNA, 26 bp, Artificial Sequence
  synthetic circulating small noncoding RNA (sncRNA) 5' transfer RNA (tRNA) half
gggaggcccgggttcgattcccggcc

SEQ ID NO: 19883 - DNA, 37 bp, Artificial Sequence
  synthetic circulating small noncoding RNA (sncRNA) 5' transfer RNA (tRNA) half
ggttagcactctggactttgaatccagcgatccgagt

SEQ ID NO: 19884 - DNA, 23 bp, Artificial Sequence
  synthetic circulating small noncoding RNA (sncRNA) 5' transfer RNA (tRNA) half
gttcgagcctcacctggagcacg

SEQ ID NO: 19885 - DNA, 8 bp, Artificial Sequence
  synthetic circulating small noncoding RNA (sncRNA) 5' transfer RNA (tRNA) half
ggtcgagc

SEQ ID NO: 19886 - DNA, 27 bp, Artificial Sequence
  synthetic circulating small noncoding RNA (sncRNA) 5' transfer RNA (tRNA) half
gagatgccggggatcgaacccggggcc

SEQ ID NO: 19887 - DNA, 38 bp, Artificial Sequence
  synthetic circulating small noncoding RNA (sncRNA) 5' transfer RNA (tRNA) half
ttccggctcgaaggacttcgtgcactacttttagttta

SEQ ID NO: 19888 - DNA, 36 bp, Artificial Sequence
  synthetic circulating small noncoding RNA (sncRNA) 5' transfer RNA (tRNA) half
aggccctgctgggatttgaacccaggatctcctgtt

SEQ ID NO: 19889 - DNA, 19 bp, Artificial Sequence
  synthetic circulating small noncoding RNA (sncRNA) 5' transfer RNA (tRNA) half
ggttatcacgtctgcttta

SEQ ID NO: 19890 - DNA, 12 bp, Artificial Sequence
  synthetic circulating small noncoding RNA (sncRNA) 5' transfer RNA (tRNA) half
ggtcgatggatc

SEQ ID NO: 19891 - DNA, 18 bp, Artificial Sequence
  synthetic circulating small noncoding RNA (sncRNA) 5' transfer RNA (tRNA) half
ggccgcctgggtgaaaac

SEQ ID NO: 19892 - DNA, 9 bp, Artificial Sequence
  synthetic circulating small noncoding RNA (sncRNA) 5' transfer RNA (tRNA) half
gcccggcta

SEQ ID NO: 19893 - DNA, 25 bp, Artificial Sequence
  synthetic circulating small noncoding RNA (sncRNA) 5' transfer RNA (tRNA) half
gggttcgagccccagtggaaccacg

SEQ ID NO: 19894 - DNA, 27 bp, Artificial Sequence
  synthetic circulating small noncoding RNA (sncRNA) 5' transfer RNA (tRNA) half
gagaattctaccattgaaccaccaatg

SEQ ID NO: 19895 - DNA, 19 bp, Artificial Sequence
  synthetic circulating small noncoding RNA (sncRNA) 5' transfer RNA (tRNA) half
tccccgtcggggaattgaa

SEQ ID NO: 19896 - DNA, 22 bp, Artificial Sequence
  synthetic circulating small noncoding RNA (sncRNA) 5' transfer RNA (tRNA) half
ggattcgaacctgtgcggggaa

SEQ ID NO: 19897 - DNA, 19 bp, Artificial Sequence
  synthetic circulating small noncoding RNA (sncRNA) 5' transfer RNA (tRNA) half
ttaggattcggcgctctca

SEQ ID NO: 19898 - DNA, 12 bp, Artificial Sequence
  synthetic circulating small noncoding RNA (sncRNA) 5' transfer RNA (tRNA) half
aggccccagcga

SEQ ID NO: 19899 - DNA, 20 bp, Artificial Sequence
  synthetic circulating small noncoding RNA (sncRNA) 5' transfer RNA (tRNA) half
tgcattggccgggaatcgaa

SEQ ID NO: 19900 - DNA, 13 bp, Artificial Sequence
  synthetic circulating small noncoding RNA (sncRNA) 5' transfer RNA (tRNA) half
ctatactaacgag

SEQ ID NO: 19901 - DNA, 30 bp, Artificial Sequence
  synthetic circulating small noncoding RNA (sncRNA) 5' transfer RNA (tRNA) half
gcgacccgggttcgattcccgggcggcgca

SEQ ID NO: 19902 - DNA, 11 bp, Artificial Sequence
  synthetic circulating small noncoding RNA (sncRNA) 5' transfer RNA (tRNA) half
cgaacccgggg

SEQ ID NO: 19903 - DNA, 21 bp, Artificial Sequence
  synthetic circulating small noncoding RNA (sncRNA) 5' transfer RNA (tRNA) half
aggagtcgaacctagaatctt

SEQ ID NO: 19904 - DNA, 23 bp, Artificial Sequence
  synthetic circulating small noncoding RNA (sncRNA) 5' transfer RNA (tRNA) half
agtgtagcggttatcacgtctgc

SEQ ID NO: 19905 - DNA, 16 bp, Artificial Sequence
  synthetic circulating small noncoding RNA (sncRNA) 5' transfer RNA (tRNA) half
aagcgcccaacgtggg

SEQ ID NO: 19906 - DNA, 13 bp, Artificial Sequence
  synthetic circulating small noncoding RNA (sncRNA) 5' transfer RNA (tRNA) half
atacccctagacc

SEQ ID NO: 19907 - DNA, 31 bp, Artificial Sequence
  synthetic circulating small noncoding RNA (sncRNA) 5' transfer RNA (tRNA) half
ggtagcgtggccgagcggtctaaggcgctgg

SEQ ID NO: 19908 - DNA, 22 bp, Artificial Sequence
  synthetic circulating small noncoding RNA (sncRNA) 5' transfer RNA (tRNA) half
taaaaccagggctcgtccggga

SEQ ID NO: 19909 - DNA, 10 bp, Artificial Sequence
  synthetic circulating small noncoding RNA (sncRNA) 5' transfer RNA (tRNA) half
tgcccggcta

SEQ ID NO: 19910 - DNA, 39 bp, Artificial Sequence
  synthetic circulating small noncoding RNA (sncRNA) 5' transfer RNA (tRNA) half
agtggtagagcgcatgctttgcatgtatgaggccccggg

SEQ ID NO: 19911 - DNA, 46 bp, Artificial Sequence
  synthetic circulating small noncoding RNA (sncRNA) 5' transfer RNA (tRNA) half
ccctggaccctcagattaaaagtctgatgctctaccgactgagcta

SEQ ID NO: 19912 - DNA, 22 bp, Artificial Sequence
  synthetic circulating small noncoding RNA (sncRNA) 5' transfer RNA (tRNA) half
tcgactcccggtgtgggaacgc

SEQ ID NO: 19913 - DNA, 38 bp, Artificial Sequence
  synthetic circulating small noncoding RNA (sncRNA) 5' transfer RNA (tRNA) half
acttaaaaccttgttcccagaggttcaaatcctctccc

SEQ ID NO: 19914 - DNA, 30 bp, Artificial Sequence
  synthetic circulating small noncoding RNA (sncRNA) 5' transfer RNA (tRNA) half
aacccgggatcgaaccagggacctttagat

SEQ ID NO: 19915 - DNA, 12 bp, Artificial Sequence
  synthetic circulating small noncoding RNA (sncRNA) 5' transfer RNA (tRNA) half
gtatgattctcg

SEQ ID NO: 19916 - DNA, 24 bp, Artificial Sequence
  synthetic circulating small noncoding RNA (sncRNA) 5' transfer RNA (tRNA) half
gtgtagtggtatcatgcaagattc

SEQ ID NO: 19917 - DNA, 26 bp, Artificial Sequence
  synthetic circulating small noncoding RNA (sncRNA) 5' transfer RNA (tRNA) half
ggttccttcgagccggattcgaacca

SEQ ID NO: 19918 - DNA, 20 bp, Artificial Sequence
  synthetic circulating small noncoding RNA (sncRNA) 5' transfer RNA (tRNA) half
ggttatgggcccagcacgct

SEQ ID NO: 19919 - DNA, 19 bp, Artificial Sequence
  synthetic circulating small noncoding RNA (sncRNA) 5' transfer RNA (tRNA) half
accactatactaacgagga

SEQ ID NO: 19920 - DNA, 12 bp, Artificial Sequence
  synthetic circulating small noncoding RNA (sncRNA) 5' transfer RNA (tRNA) half
ccggcacctcca

SEQ ID NO: 19921 - DNA, 30 bp, Artificial Sequence
  synthetic circulating small noncoding RNA (sncRNA) 5' transfer RNA (tRNA) half
cgtcggggaattgaaccccggtctcccgcg

SEQ ID NO: 19922 - DNA, 23 bp, Artificial Sequence
  synthetic circulating small noncoding RNA (sncRNA) 5' transfer RNA (tRNA) half
gttcgaatcccactcctgacagc

SEQ ID NO: 19923 - DNA, 11 bp, Artificial Sequence
  synthetic circulating small noncoding RNA (sncRNA) 5' transfer RNA (tRNA) half
attcggcgctc

SEQ ID NO: 19924 - DNA, 12 bp, Artificial Sequence
  synthetic circulating small noncoding RNA (sncRNA) 5' transfer RNA (tRNA) half
ataaggcgtctg

SEQ ID NO: 19925 - DNA, 21 bp, Artificial Sequence
  synthetic circulating small noncoding RNA (sncRNA) 5' transfer RNA (tRNA) half
ggccgcggcggtgagagcgcc

SEQ ID NO: 19926 - DNA, 13 bp, Artificial Sequence
  synthetic circulating small noncoding RNA (sncRNA) 5' transfer RNA (tRNA) half
gggggtgtagctc

SEQ ID NO: 19927 - DNA, 12 bp, Artificial Sequence
  synthetic circulating small noncoding RNA (sncRNA) 5' transfer RNA (tRNA) half
ccgggcctcccg

SEQ ID NO: 19928 - DNA, 26 bp, Artificial Sequence
  synthetic circulating small noncoding RNA (sncRNA) 5' transfer RNA (tRNA) half
tccccgtcggggaattgaaccccggt

SEQ ID NO: 19929 - DNA, 27 bp, Artificial Sequence
  synthetic circulating small noncoding RNA (sncRNA) 5' transfer RNA (tRNA) half
tcgctggattcagagtccagagtgcta

SEQ ID NO: 19930 - DNA, 15 bp, Artificial Sequence
  synthetic circulating small noncoding RNA (sncRNA) 5' transfer RNA (tRNA) half
ggttcgactcccggc

SEQ ID NO: 19931 - DNA, 11 bp, Artificial Sequence
  synthetic circulating small noncoding RNA (sncRNA) 5' transfer RNA (tRNA) half
ccccgtcgggg

SEQ ID NO: 19932 - DNA, 34 bp, Artificial Sequence
  synthetic circulating small noncoding RNA (sncRNA) 5' transfer RNA (tRNA) half
gcagcaacctcggttcgaatccgagtcacggcat

SEQ ID NO: 19933 - DNA, 17 bp, Artificial Sequence
  synthetic circulating small noncoding RNA (sncRNA) 5' transfer RNA (tRNA) half
aaatgccgtgactcgga

SEQ ID NO: 19934 - DNA, 18 bp, Artificial Sequence
  synthetic circulating small noncoding RNA (sncRNA) 5' transfer RNA (tRNA) half
gcagcgagcagggttcga

SEQ ID NO: 19935 - DNA, 35 bp, Artificial Sequence
  synthetic circulating small noncoding RNA (sncRNA) 5' transfer RNA (tRNA) half
tagcactctggactctgaatccagcgatccgagtt

SEQ ID NO: 19936 - DNA, 21 bp, Artificial Sequence
  synthetic circulating small noncoding RNA (sncRNA) 5' transfer RNA (tRNA) half
ccccggtctcccgcgtgacag

SEQ ID NO: 19937 - DNA, 20 bp, Artificial Sequence
  synthetic circulating small noncoding RNA (sncRNA) 5' transfer RNA (tRNA) half
aggatggccgagcggtctaa

SEQ ID NO: 19938 - DNA, 29 bp, Artificial Sequence
  synthetic circulating small noncoding RNA (sncRNA) 5' transfer RNA (tRNA) half
atgatcctcagtggtctggggtgcaggct

SEQ ID NO: 19939 - DNA, 28 bp, Artificial Sequence
  synthetic circulating small noncoding RNA (sncRNA) 5' transfer RNA (tRNA) half
gtggcagcggtgggattcgaacccacgc

SEQ ID NO: 19940 - DNA, 10 bp, Artificial Sequence
  synthetic circulating small noncoding RNA (sncRNA) 5' transfer RNA (tRNA) half
cgggccgcct

SEQ ID NO: 19941 - DNA, 23 bp, Artificial Sequence
  synthetic circulating small noncoding RNA (sncRNA) 5' transfer RNA (tRNA) half
gttggtctaggggtatgattctc

SEQ ID NO: 19942 - DNA, 17 bp, Artificial Sequence
  synthetic circulating small noncoding RNA (sncRNA) 5' transfer RNA (tRNA) half
ggttccaccgagatttg

SEQ ID NO: 19943 - DNA, 15 bp, Artificial Sequence
  synthetic circulating small noncoding RNA (sncRNA) 5' transfer RNA (tRNA) half
ctcagtggtagagcg

SEQ ID NO: 19944 - DNA, 18 bp, Artificial Sequence
  synthetic circulating small noncoding RNA (sncRNA) 5' transfer RNA (tRNA) half
ggagacgacgaaggtggg

SEQ ID NO: 19945 - DNA, 17 bp, Artificial Sequence
  synthetic circulating small noncoding RNA (sncRNA) 5' transfer RNA (tRNA) half
agcacaatggattagca

SEQ ID NO: 19946 - DNA, 27 bp, Artificial Sequence
  synthetic circulating small noncoding RNA (sncRNA) 5' transfer RNA (tRNA) half
ggttatcacgttcgcctcacacgcgaa

SEQ ID NO: 19947 - DNA, 10 bp, Artificial Sequence
  synthetic circulating small noncoding RNA (sncRNA) 5' transfer RNA (tRNA) half
accggggacc

SEQ ID NO: 19948 - DNA, 20 bp, Artificial Sequence
  synthetic circulating small noncoding RNA (sncRNA) 5' transfer RNA (tRNA) half
cgtgataaccgctacactac

SEQ ID NO: 19949 - DNA, 16 bp, Artificial Sequence
  synthetic circulating small noncoding RNA (sncRNA) 5' transfer RNA (tRNA) half
gaccacgaagggactc

SEQ ID NO: 19950 - DNA, 28 bp, Artificial Sequence
  synthetic circulating small noncoding RNA (sncRNA) 5' transfer RNA (tRNA) half
cgcgggttcgatccccgtacgggccaca

SEQ ID NO: 19951 - DNA, 20 bp, Artificial Sequence
  synthetic circulating small noncoding RNA (sncRNA) 5' transfer RNA (tRNA) half
caaatcccggacgagcccca

SEQ ID NO: 19952 - DNA, 8 bp, Artificial Sequence
  synthetic circulating small noncoding RNA (sncRNA) 5' transfer RNA (tRNA) half
gggacctc

SEQ ID NO: 19953 - DNA, 28 bp, Artificial Sequence
  synthetic circulating small noncoding RNA (sncRNA) 5' transfer RNA (tRNA) half
ctctaccgactgagctagccgggcgctg

SEQ ID NO: 19954 - DNA, 28 bp, Artificial Sequence
  synthetic circulating small noncoding RNA (sncRNA) 5' transfer RNA (tRNA) half
ggttccttcgagccggattcgaaccagc

SEQ ID NO: 19955 - DNA, 22 bp, Artificial Sequence
  synthetic circulating small noncoding RNA (sncRNA) 5' transfer RNA (tRNA) half
ttcgaatcccacttctgacaca

SEQ ID NO: 19956 - DNA, 15 bp, Artificial Sequence
  synthetic circulating small noncoding RNA (sncRNA) 5' transfer RNA (tRNA) half
gaacccacaatccct

SEQ ID NO: 19957 - DNA, 18 bp, Artificial Sequence
  synthetic circulating small noncoding RNA (sncRNA) 5' transfer RNA (tRNA) half
gcgagaggtccccggttc

SEQ ID NO: 19958 - DNA, 17 bp, Artificial Sequence
  synthetic circulating small noncoding RNA (sncRNA) 5' transfer RNA (tRNA) half
gaacctacaatcttctg

SEQ ID NO: 19959 - DNA, 19 bp, Artificial Sequence
  synthetic circulating small noncoding RNA (sncRNA) 5' transfer RNA (tRNA) half
accggggacctctcgcgtg

SEQ ID NO: 19960 - DNA, 25 bp, Artificial Sequence
  synthetic circulating small noncoding RNA (sncRNA) 5' transfer RNA (tRNA) half
cgaaccccggtctcccgcgtgacag

SEQ ID NO: 19961 - DNA, 29 bp, Artificial Sequence
  synthetic circulating small noncoding RNA (sncRNA) 5' transfer RNA (tRNA) half
agtcctccgctctaccaactgagctatcg

SEQ ID NO: 19962 - DNA, 19 bp, Artificial Sequence
  synthetic circulating small noncoding RNA (sncRNA) 5' transfer RNA (tRNA) half
ggtctggggtgcaggcttc

SEQ ID NO: 19963 - DNA, 10 bp, Artificial Sequence
  synthetic circulating small noncoding RNA (sncRNA) 5' transfer RNA (tRNA) half
ccgggcggaa

SEQ ID NO: 19964 - DNA, 17 bp, Artificial Sequence
  synthetic circulating small noncoding RNA (sncRNA) 5' transfer RNA (tRNA) half
aacccgggccgcctggg

SEQ ID NO: 19965 - DNA, 19 bp, Artificial Sequence
  synthetic circulating small noncoding RNA (sncRNA) 5' transfer RNA (tRNA) half
ttcgaatcccaccgctgcc

SEQ ID NO: 19966 - DNA, 18 bp, Artificial Sequence
  synthetic circulating small noncoding RNA (sncRNA) 5' transfer RNA (tRNA) half
taacgtgtttccgcccgg

SEQ ID NO: 19967 - DNA, 28 bp, Artificial Sequence
  synthetic circulating small noncoding RNA (sncRNA) 5' transfer RNA (tRNA) half
agatgccggggatcgaacccggggcctc

SEQ ID NO: 19968 - DNA, 41 bp, Artificial Sequence
  synthetic circulating small noncoding RNA (sncRNA) 5' transfer RNA (tRNA) half
ttttcacccaggcggcccgggttcgactcccggtgtgggaa

SEQ ID NO: 19969 - DNA, 10 bp, Artificial Sequence
  synthetic circulating small noncoding RNA (sncRNA) 5' transfer RNA (tRNA) half
catgcccata

SEQ ID NO: 19970 - DNA, 19 bp, Artificial Sequence
  synthetic circulating small noncoding RNA (sncRNA) 5' transfer RNA (tRNA) half
aattctcgcctgccacgcg

SEQ ID NO: 19971 - DNA, 22 bp, Artificial Sequence
  synthetic circulating small noncoding RNA (sncRNA) 5' transfer RNA (tRNA) half
gggttcgaaccccgtccgtgcc

SEQ ID NO: 19972 - DNA, 27 bp, Artificial Sequence
  synthetic circulating small noncoding RNA (sncRNA) 5' transfer RNA (tRNA) half
ggtcctgggttcgagccccagtggaac

SEQ ID NO: 19973 - DNA, 13 bp, Artificial Sequence
  synthetic circulating small noncoding RNA (sncRNA) 5' transfer RNA (tRNA) half
ccacgttgggcgc

SEQ ID NO: 19974 - DNA, 20 bp, Artificial Sequence
  synthetic circulating small noncoding RNA (sncRNA) 5' transfer RNA (tRNA) half
ttcgatccccgtacgggcca

SEQ ID NO: 19975 - DNA, 37 bp, Artificial Sequence
  synthetic circulating small noncoding RNA (sncRNA) 5' transfer RNA (tRNA) half
atcagaagattgagggttcgaatcccttcgtggttgg

SEQ ID NO: 19976 - DNA, 17 bp, Artificial Sequence
  synthetic circulating small noncoding RNA (sncRNA) 5' transfer RNA (tRNA) half
tggccgggaatcgaacc

SEQ ID NO: 19977 - DNA, 23 bp, Artificial Sequence
  synthetic circulating small noncoding RNA (sncRNA) 5' transfer RNA (tRNA) half
gtggtctagtggttaggattcgg

SEQ ID NO: 19978 - DNA, 23 bp, Artificial Sequence
  synthetic circulating small noncoding RNA (sncRNA) 5' transfer RNA (tRNA) half
gtgtagtggtatcatgcaagatt

SEQ ID NO: 19979 - DNA, 26 bp, Artificial Sequence
  synthetic circulating small noncoding RNA (sncRNA) 5' transfer RNA (tRNA) half
gaaccggggacctttcgcgtgtgagg

SEQ ID NO: 19980 - DNA, 34 bp, Artificial Sequence
  synthetic circulating small noncoding RNA (sncRNA) 5' transfer RNA (tRNA) half
agccaggtaggagtcgaacctacaatcttctgat

SEQ ID NO: 19981 - DNA, 30 bp, Artificial Sequence
  synthetic circulating small noncoding RNA (sncRNA) 5' transfer RNA (tRNA) half
aaagtctgatgctctaccgactgagctatc

SEQ ID NO: 19982 - DNA, 16 bp, Artificial Sequence
  synthetic circulating small noncoding RNA (sncRNA) 5' transfer RNA (tRNA) half
cagaagattccaggtt

SEQ ID NO: 19983 - DNA, 27 bp, Artificial Sequence
  synthetic circulating small noncoding RNA (sncRNA) 5' transfer RNA (tRNA) half
tggattcaaagtccagagtgctaacca

SEQ ID NO: 19984 - DNA, 16 bp, Artificial Sequence
  synthetic circulating small noncoding RNA (sncRNA) 5' transfer RNA (tRNA) half
cgatccccggcatctc

SEQ ID NO: 19985 - DNA, 39 bp, Artificial Sequence
  synthetic circulating small noncoding RNA (sncRNA) 5' transfer RNA (tRNA) half
gtttccgtagtgtagtggttatcacgctcgcctcacacg

SEQ ID NO: 19986 - DNA, 32 bp, Artificial Sequence
  synthetic circulating small noncoding RNA (sncRNA) 5' transfer RNA (tRNA) half
acccacgcgtgcagagcacaatggattagcag

SEQ ID NO: 19987 - DNA, 22 bp, Artificial Sequence
  synthetic circulating small noncoding RNA (sncRNA) 5' transfer RNA (tRNA) half
tctcccctggaggcgtgggttc

SEQ ID NO: 19988 - DNA, 31 bp, Artificial Sequence
  synthetic circulating small noncoding RNA (sncRNA) 5' transfer RNA (tRNA) half
agctggcccgtacggggatcgaacccgcgac

SEQ ID NO: 19989 - DNA, 19 bp, Artificial Sequence
  synthetic circulating small noncoding RNA (sncRNA) 5' transfer RNA (tRNA) half
cgagccaggtaggagtcga

SEQ ID NO: 19990 - DNA, 24 bp, Artificial Sequence
  synthetic circulating small noncoding RNA (sncRNA) 5' transfer RNA (tRNA) half
aggcgtccctgggtgggctcgaac

SEQ ID NO: 19991 - DNA, 22 bp, Artificial Sequence
  synthetic circulating small noncoding RNA (sncRNA) 5' transfer RNA (tRNA) half
gtgtagcggttatcacgtctgc

SEQ ID NO: 19992 - DNA, 21 bp, Artificial Sequence
  synthetic circulating small noncoding RNA (sncRNA) 5' transfer RNA (tRNA) half
gttcgagtcccttcgtggtcg

SEQ ID NO: 19993 - DNA, 23 bp, Artificial Sequence
  synthetic circulating small noncoding RNA (sncRNA) 5' transfer RNA (tRNA) half
atccttaggtcgctggttcgaat

SEQ ID NO: 19994 - DNA, 22 bp, Artificial Sequence
  synthetic circulating small noncoding RNA (sncRNA) 5' transfer RNA (tRNA) half
ccaactgagctatcgaaggaag

SEQ ID NO: 19995 - DNA, 37 bp, Artificial Sequence
  synthetic circulating small noncoding RNA (sncRNA) 5' transfer RNA (tRNA) half
aaaccaggaatcctaaccgctagaccatatgggagct

SEQ ID NO: 19996 - DNA, 23 bp, Artificial Sequence
  synthetic circulating small noncoding RNA (sncRNA) 5' transfer RNA (tRNA) half
gtcggtagagcatgagactctta

SEQ ID NO: 19997 - DNA, 19 bp, Artificial Sequence
  synthetic circulating small noncoding RNA (sncRNA) 5' transfer RNA (tRNA) half
cgtctccccgtcggggaat

SEQ ID NO: 19998 - DNA, 28 bp, Artificial Sequence
  synthetic circulating small noncoding RNA (sncRNA) 5' transfer RNA (tRNA) half
tgccgaaacccgggatcgaaccagggac

SEQ ID NO: 19999 - DNA, 37 bp, Artificial Sequence
  synthetic circulating small noncoding RNA (sncRNA) 5' transfer RNA (tRNA) half
gaactcggatcgctggattcagagtccagagtgctaa

SEQ ID NO: 20000 - DNA, 14 bp, Artificial Sequence
  synthetic circulating small noncoding RNA (sncRNA) 5' transfer RNA (tRNA) half
ctcggccacactac

SEQ ID NO: 20001 - DNA, 27 bp, Artificial Sequence
  synthetic circulating small noncoding RNA (sncRNA) 5' transfer RNA (tRNA) half
cgcttccgctgcgccactctgctactt

SEQ ID NO: 20002 - DNA, 15 bp, Artificial Sequence
  synthetic circulating small noncoding RNA (sncRNA) 5' transfer RNA (tRNA) half
gcaggattcgaacct

SEQ ID NO: 20003 - DNA, 27 bp, Artificial Sequence
  synthetic circulating small noncoding RNA (sncRNA) 5' transfer RNA (tRNA) half
tcgccttaaccactcggccacgactac

SEQ ID NO: 20004 - DNA, 22 bp, Artificial Sequence
  synthetic circulating small noncoding RNA (sncRNA) 5' transfer RNA (tRNA) half
tactaaccactatacgatcacg

SEQ ID NO: 20005 - DNA, 29 bp, Artificial Sequence
  synthetic circulating small noncoding RNA (sncRNA) 5' transfer RNA (tRNA) half
gtcgctggttcgattccggctcgaaggac

SEQ ID NO: 20006 - DNA, 15 bp, Artificial Sequence
  synthetic circulating small noncoding RNA (sncRNA) 5' transfer RNA (tRNA) half
cgcccaacgtgaggc

SEQ ID NO: 20007 - DNA, 16 bp, Artificial Sequence
  synthetic circulating small noncoding RNA (sncRNA) 5' transfer RNA (tRNA) half
ttcgattcccgggcgg

SEQ ID NO: 20008 - DNA, 13 bp, Artificial Sequence
  synthetic circulating small noncoding RNA (sncRNA) 5' transfer RNA (tRNA) half
acccacgcgtgca

SEQ ID NO: 20009 - DNA, 18 bp, Artificial Sequence
  synthetic circulating small noncoding RNA (sncRNA) 5' transfer RNA (tRNA) half
tctccccgcgcaggttcg

SEQ ID NO: 20010 - DNA, 35 bp, Artificial Sequence
  synthetic circulating small noncoding RNA (sncRNA) 5' transfer RNA (tRNA) half
gttaggattcctggttttcacccaggcggcccggg

SEQ ID NO: 20011 - DNA, 19 bp, Artificial Sequence
  synthetic circulating small noncoding RNA (sncRNA) 5' transfer RNA (tRNA) half
agtcagacgcgttatccat

SEQ ID NO: 20012 - DNA, 16 bp, Artificial Sequence
  synthetic circulating small noncoding RNA (sncRNA) 5' transfer RNA (tRNA) half
cgcagcgagcagggtt

SEQ ID NO: 20013 - DNA, 36 bp, Artificial Sequence
  synthetic circulating small noncoding RNA (sncRNA) 5' transfer RNA (tRNA) half
ccgacgaggatgggattcgaacccacgcgtgcaaag

SEQ ID NO: 20014 - DNA, 39 bp, Artificial Sequence
  synthetic circulating small noncoding RNA (sncRNA) 5' transfer RNA (tRNA) half
gttagcactctggactttgaatccagcgatccgagttca

SEQ ID NO: 20015 - DNA, 24 bp, Artificial Sequence
  synthetic circulating small noncoding RNA (sncRNA) 5' transfer RNA (tRNA) half
gcgcaatggataacgcgtctgact

SEQ ID NO: 20016 - DNA, 5 bp, Artificial Sequence
  synthetic circulating small noncoding RNA (sncRNA) 5' transfer RNA (tRNA) half
gcgag

SEQ ID NO: 20017 - DNA, 37 bp, Artificial Sequence
  synthetic circulating small noncoding RNA (sncRNA) 5' transfer RNA (tRNA) half
ggatcagaagattccaggttcgactcctggctggctc

SEQ ID NO: 20018 - DNA, 36 bp, Artificial Sequence
  synthetic circulating small noncoding RNA (sncRNA) 5' transfer RNA (tRNA) half
accccgacgtgatttgaacacgcaaccttctgatct

SEQ ID NO: 20019 - DNA, 14 bp, Artificial Sequence
  synthetic circulating small noncoding RNA (sncRNA) 5' transfer RNA (tRNA) half
gaacccgggcctcc

SEQ ID NO: 20020 - DNA, 39 bp, Artificial Sequence
  synthetic circulating small noncoding RNA (sncRNA) 5' transfer RNA (tRNA) half
taaacaggagatcctgggttcaaatcccagcggggcctt

SEQ ID NO: 20021 - DNA, 11 bp, Artificial Sequence
  synthetic circulating small noncoding RNA (sncRNA) 5' transfer RNA (tRNA) half
aaccgggcgga

SEQ ID NO: 20022 - DNA, 21 bp, Artificial Sequence
  synthetic circulating small noncoding RNA (sncRNA) 5' transfer RNA (tRNA) half
cagttggtagagcggaggact

SEQ ID NO: 20023 - DNA, 16 bp, Artificial Sequence
  synthetic circulating small noncoding RNA (sncRNA) 5' transfer RNA (tRNA) half
gaacccacgccatcga

SEQ ID NO: 20024 - DNA, 32 bp, Artificial Sequence
  synthetic circulating small noncoding RNA (sncRNA) 5' transfer RNA (tRNA) half
gggcccggatagctcagtcggtagagcatcag

SEQ ID NO: 20025 - DNA, 21 bp, Artificial Sequence
  synthetic circulating small noncoding RNA (sncRNA) 5' transfer RNA (tRNA) half
cgattcccggcatctccacag

SEQ ID NO: 20026 - DNA, 11 bp, Artificial Sequence
  synthetic circulating small noncoding RNA (sncRNA) 5' transfer RNA (tRNA) half
gtcaggatggc

SEQ ID NO: 20027 - DNA, 17 bp, Artificial Sequence
  synthetic circulating small noncoding RNA (sncRNA) 5' transfer RNA (tRNA) half
ccgagccagccaggagt

SEQ ID NO: 20028 - DNA, 19 bp, Artificial Sequence
  synthetic circulating small noncoding RNA (sncRNA) 5' transfer RNA (tRNA) half
attagctcaaatggtagag

SEQ ID NO: 20029 - DNA, 18 bp, Artificial Sequence
  synthetic circulating small noncoding RNA (sncRNA) 5' transfer RNA (tRNA) half
gttcgattcccggcccat

SEQ ID NO: 20030 - DNA, 42 bp, Artificial Sequence
  synthetic circulating small noncoding RNA (sncRNA) 5' transfer RNA (tRNA) half
ggctcgttggtctaggggtatgattctcgctttgggtgcgag

SEQ ID NO: 20031 - DNA, 36 bp, Artificial Sequence
  synthetic circulating small noncoding RNA (sncRNA) 5' transfer RNA (tRNA) half
ttgccgaaacccgggatcgaaccagggacctttaga

SEQ ID NO: 20032 - DNA, 14 bp, Artificial Sequence
  synthetic circulating small noncoding RNA (sncRNA) 5' transfer RNA (tRNA) half
ggttatcacgtctg

SEQ ID NO: 20033 - DNA, 15 bp, Artificial Sequence
  synthetic circulating small noncoding RNA (sncRNA) 5' transfer RNA (tRNA) half
ctttcgcgtgtgagg

SEQ ID NO: 20034 - DNA, 23 bp, Artificial Sequence
  synthetic circulating small noncoding RNA (sncRNA) 5' transfer RNA (tRNA) half
gccgtcacgaacaggattcgaac

SEQ ID NO: 20035 - DNA, 32 bp, Artificial Sequence
  synthetic circulating small noncoding RNA (sncRNA) 5' transfer RNA (tRNA) half
ccgtagtgtagtggttatcacgttcgcctcac

SEQ ID NO: 20036 - DNA, 11 bp, Artificial Sequence
  synthetic circulating small noncoding RNA (sncRNA) 5' transfer RNA (tRNA) half
tcccgggttcg

SEQ ID NO: 20037 - DNA, 25 bp, Artificial Sequence
  synthetic circulating small noncoding RNA (sncRNA) 5' transfer RNA (tRNA) half
ttaatctgagggtccagggttcaag

SEQ ID NO: 20038 - DNA, 18 bp, Artificial Sequence
  synthetic circulating small noncoding RNA (sncRNA) 5' transfer RNA (tRNA) half
gtgtggccgagcggtcta

SEQ ID NO: 20039 - DNA, 23 bp, Artificial Sequence
  synthetic circulating small noncoding RNA (sncRNA) 5' transfer RNA (tRNA) half
ggttcaattccacctttcgggcg

SEQ ID NO: 20040 - DNA, 18 bp, Artificial Sequence
  synthetic circulating small noncoding RNA (sncRNA) 5' transfer RNA (tRNA) half
cgcccccgaagagactgg

SEQ ID NO: 20041 - DNA, 12 bp, Artificial Sequence
  synthetic circulating small noncoding RNA (sncRNA) 5' transfer RNA (tRNA) half
ccccgaagagac

SEQ ID NO: 20042 - DNA, 19 bp, Artificial Sequence
  synthetic circulating small noncoding RNA (sncRNA) 5' transfer RNA (tRNA) half
cgattccccgacggggagt

SEQ ID NO: 20043 - DNA, 7 bp, Artificial Sequence
  synthetic circulating small noncoding RNA (sncRNA) 5' transfer RNA (tRNA) half
gggccgc

SEQ ID NO: 20044 - DNA, 13 bp, Artificial Sequence
  synthetic circulating small noncoding RNA (sncRNA) 5' transfer RNA (tRNA) half
gcgagctaccagg

SEQ ID NO: 20045 - DNA, 27 bp, Artificial Sequence
  synthetic circulating small noncoding RNA (sncRNA) 5' transfer RNA (tRNA) half
ggccggttagctcagttggttagagcg

SEQ ID NO: 20046 - DNA, 22 bp, Artificial Sequence
  synthetic circulating small noncoding RNA (sncRNA) 5' transfer RNA (tRNA) half
ccggctagctcagtcggtagag

SEQ ID NO: 20047 - DNA, 16 bp, Artificial Sequence
  synthetic circulating small noncoding RNA (sncRNA) 5' transfer RNA (tRNA) half
tctcgcctgccacgcg

SEQ ID NO: 20048 - DNA, 29 bp, Artificial Sequence
  synthetic circulating small noncoding RNA (sncRNA) 5' transfer RNA (tRNA) half
cgacccgggttcgattcccgggcggcgca

SEQ ID NO: 20049 - DNA, 23 bp, Artificial Sequence
  synthetic circulating small noncoding RNA (sncRNA) 5' transfer RNA (tRNA) half
ttccgactccgccgggactcgaa

SEQ ID NO: 20050 - DNA, 28 bp, Artificial Sequence
  synthetic circulating small noncoding RNA (sncRNA) 5' transfer RNA (tRNA) half
aaaagcgactctggtgggactcgaaccc

SEQ ID NO: 20051 - DNA, 15 bp, Artificial Sequence
  synthetic circulating small noncoding RNA (sncRNA) 5' transfer RNA (tRNA) half
cactacactacggaa

SEQ ID NO: 20052 - DNA, 14 bp, Artificial Sequence
  synthetic circulating small noncoding RNA (sncRNA) 5' transfer RNA (tRNA) half
gaccacgaagggac

SEQ ID NO: 20053 - DNA, 32 bp, Artificial Sequence
  synthetic circulating small noncoding RNA (sncRNA) 5' transfer RNA (tRNA) half
agaggtcccgggttcaaatcccggacgagccc

SEQ ID NO: 20054 - DNA, 11 bp, Artificial Sequence
  synthetic circulating small noncoding RNA (sncRNA) 5' transfer RNA (tRNA) half
acgttgggcgc

SEQ ID NO: 20055 - DNA, 30 bp, Artificial Sequence
  synthetic circulating small noncoding RNA (sncRNA) 5' transfer RNA (tRNA) half
agatcctgggttcgaatcccagcggggcct

SEQ ID NO: 20056 - DNA, 10 bp, Artificial Sequence
  synthetic circulating small noncoding RNA (sncRNA) 5' transfer RNA (tRNA) half
gatgctctac

SEQ ID NO: 20057 - DNA, 15 bp, Artificial Sequence
  synthetic circulating small noncoding RNA (sncRNA) 5' transfer RNA (tRNA) half
cgaacccgggcctcc

SEQ ID NO: 20058 - DNA, 35 bp, Artificial Sequence
  synthetic circulating small noncoding RNA (sncRNA) 5' transfer RNA (tRNA) half
ctccctggtggtctagtggttaggattcggcgctc

SEQ ID NO: 20059 - DNA, 18 bp, Artificial Sequence
  synthetic circulating small noncoding RNA (sncRNA) 5' transfer RNA (tRNA) half
ggttcgattcccggccaa

SEQ ID NO: 20060 - DNA, 33 bp, Artificial Sequence
  synthetic circulating small noncoding RNA (sncRNA) 5' transfer RNA (tRNA) half
cagaaggttgcgtgttcaaatcacgtcggggtc

SEQ ID NO: 20061 - DNA, 20 bp, Artificial Sequence
  synthetic circulating small noncoding RNA (sncRNA) 5' transfer RNA (tRNA) half
ttgccccctctgaggttcga

SEQ ID NO: 20062 - DNA, 32 bp, Artificial Sequence
  synthetic circulating small noncoding RNA (sncRNA) 5' transfer RNA (tRNA) half
ccgaccacgaagggactcgaaccctcaatctt

SEQ ID NO: 20063 - DNA, 35 bp, Artificial Sequence
  synthetic circulating small noncoding RNA (sncRNA) 5' transfer RNA (tRNA) half
gaggccttgctgggattcgaacccaggatctcctg

SEQ ID NO: 20064 - DNA, 36 bp, Artificial Sequence
  synthetic circulating small noncoding RNA (sncRNA) 5' transfer RNA (tRNA) half
actcggatcgctggattcagagtccagagtgctaac

SEQ ID NO: 20065 - DNA, 31 bp, Artificial Sequence
  synthetic circulating small noncoding RNA (sncRNA) 5' transfer RNA (tRNA) half
aaccggggacctcttgatctgcagtcaaatg

SEQ ID NO: 20066 - DNA, 39 bp, Artificial Sequence
  synthetic circulating small noncoding RNA (sncRNA) 5' transfer RNA (tRNA) half
gtcgtctcccacatggtctagcggttaggattcctggtt

SEQ ID NO: 20067 - DNA, 21 bp, Artificial Sequence
  synthetic circulating small noncoding RNA (sncRNA) 5' transfer RNA (tRNA) half
atttgaaccagggacctcttg

SEQ ID NO: 20068 - DNA, 16 bp, Artificial Sequence
  synthetic circulating small noncoding RNA (sncRNA) 5' transfer RNA (tRNA) half
ctaaccaactgagcta

SEQ ID NO: 20069 - DNA, 19 bp, Artificial Sequence
  synthetic circulating small noncoding RNA (sncRNA) 5' transfer RNA (tRNA) half
gagcccggatagctcagtc

SEQ ID NO: 20070 - DNA, 43 bp, Artificial Sequence
  synthetic circulating small noncoding RNA (sncRNA) 5' transfer RNA (tRNA) half
agaagctgaaggccccagcgagatttgaactcgcgacccctgg

SEQ ID NO: 20071 - DNA, 25 bp, Artificial Sequence
  synthetic circulating small noncoding RNA (sncRNA) 5' transfer RNA (tRNA) half
ggtgtaatggttagcactctggact

SEQ ID NO: 20072 - DNA, 37 bp, Artificial Sequence
  synthetic circulating small noncoding RNA (sncRNA) 5' transfer RNA (tRNA) half
aacccgggccgcctgggtgaaaaccaggaatcctaac

SEQ ID NO: 20073 - DNA, 20 bp, Artificial Sequence
  synthetic circulating small noncoding RNA (sncRNA) 5' transfer RNA (tRNA) half
gaatcatacccctagaccaa

SEQ ID NO: 20074 - DNA, 23 bp, Artificial Sequence
  synthetic circulating small noncoding RNA (sncRNA) 5' transfer RNA (tRNA) half
agagtctcatgctctaccgactg

SEQ ID NO: 20075 - DNA, 22 bp, Artificial Sequence
  synthetic circulating small noncoding RNA (sncRNA) 5' transfer RNA (tRNA) half
ttcgcctaacacgcgaaaggtc

SEQ ID NO: 20076 - DNA, 35 bp, Artificial Sequence
  synthetic circulating small noncoding RNA (sncRNA) 5' transfer RNA (tRNA) half
caagtttccgtagtgtagtggttatcacgttcgcc

SEQ ID NO: 20077 - DNA, 34 bp, Artificial Sequence
  synthetic circulating small noncoding RNA (sncRNA) 5' transfer RNA (tRNA) half
ggcgagaattctaccactgaaccaccaatgcaag

SEQ ID NO: 20078 - DNA, 13 bp, Artificial Sequence
  synthetic circulating small noncoding RNA (sncRNA) 5' transfer RNA (tRNA) half
agggggcacctgg

SEQ ID NO: 20079 - DNA, 23 bp, Artificial Sequence
  synthetic circulating small noncoding RNA (sncRNA) 5' transfer RNA (tRNA) half
cttagaccgctcggccatcctga

SEQ ID NO: 20080 - DNA, 19 bp, Artificial Sequence
  synthetic circulating small noncoding RNA (sncRNA) 5' transfer RNA (tRNA) half
ctttcaccgccgcggcccg

SEQ ID NO: 20081 - DNA, 17 bp, Artificial Sequence
  synthetic circulating small noncoding RNA (sncRNA) 5' transfer RNA (tRNA) half
gggatgtagctcagtgg

SEQ ID NO: 20082 - DNA, 23 bp, Artificial Sequence
  synthetic circulating small noncoding RNA (sncRNA) 5' transfer RNA (tRNA) half
ggtctagtggtatgattctcagt

SEQ ID NO: 20083 - DNA, 22 bp, Artificial Sequence
  synthetic circulating small noncoding RNA (sncRNA) 5' transfer RNA (tRNA) half
ggattcgaacctgcgcggggag

SEQ ID NO: 20084 - DNA, 17 bp, Artificial Sequence
  synthetic circulating small noncoding RNA (sncRNA) 5' transfer RNA (tRNA) half
gaggttcaaatcctctc

SEQ ID NO: 20085 - DNA, 9 bp, Artificial Sequence
  synthetic circulating small noncoding RNA (sncRNA) 5' transfer RNA (tRNA) half
cgccgggac

SEQ ID NO: 20086 - DNA, 34 bp, Artificial Sequence
  synthetic circulating small noncoding RNA (sncRNA) 5' transfer RNA (tRNA) half
agtggtctggggtgcaggcttcaaacctgtagct

SEQ ID NO: 20087 - DNA, 15 bp, Artificial Sequence
  synthetic circulating small noncoding RNA (sncRNA) 5' transfer RNA (tRNA) half
caagaggtccctggt

SEQ ID NO: 20088 - DNA, 12 bp, Artificial Sequence
  synthetic circulating small noncoding RNA (sncRNA) 5' transfer RNA (tRNA) half
acgaggatggga

SEQ ID NO: 20089 - DNA, 14 bp, Artificial Sequence
  synthetic circulating small noncoding RNA (sncRNA) 5' transfer RNA (tRNA) half
gtccgggatttgaa

SEQ ID NO: 20090 - DNA, 21 bp, Artificial Sequence
  synthetic circulating small noncoding RNA (sncRNA) 5' transfer RNA (tRNA) half
tttccgtagtgtagtggttat

SEQ ID NO: 20091 - DNA, 7 bp, Artificial Sequence
  synthetic circulating small noncoding RNA (sncRNA) 5' transfer RNA (tRNA) half
agcgcgt

SEQ ID NO: 20092 - DNA, 13 bp, Artificial Sequence
  synthetic circulating small noncoding RNA (sncRNA) 5' transfer RNA (tRNA) half
gtccaatgcgcta

SEQ ID NO: 20093 - DNA, 34 bp, Artificial Sequence
  synthetic circulating small noncoding RNA (sncRNA) 5' transfer RNA (tRNA) half
ggctcgttggtctaggggtatgattctcgctttg

SEQ ID NO: 20094 - DNA, 38 bp, Artificial Sequence
  synthetic circulating small noncoding RNA (sncRNA) 5' transfer RNA (tRNA) half
tccctgaccgggaatcgaacccgggccgcggcggtgag

SEQ ID NO: 20095 - DNA, 5 bp, Artificial Sequence
  synthetic circulating small noncoding RNA (sncRNA) 5' transfer RNA (tRNA) half
cgcct

SEQ ID NO: 20096 - DNA, 15 bp, Artificial Sequence
  synthetic circulating small noncoding RNA (sncRNA) 5' transfer RNA (tRNA) half
cactctggactctga

SEQ ID NO: 20097 - DNA, 13 bp, Artificial Sequence
  synthetic circulating small noncoding RNA (sncRNA) 5' transfer RNA (tRNA) half
aagaggtccccgg

SEQ ID NO: 20098 - DNA, 11 bp, Artificial Sequence
  synthetic circulating small noncoding RNA (sncRNA) 5' transfer RNA (tRNA) half
ggtcccgggtt

SEQ ID NO: 20099 - DNA, 24 bp, Artificial Sequence
  synthetic circulating small noncoding RNA (sncRNA) 5' transfer RNA (tRNA) half
tcggatcgctggattcaaagtcca

SEQ ID NO: 20100 - DNA, 26 bp, Artificial Sequence
  synthetic circulating small noncoding RNA (sncRNA) 5' transfer RNA (tRNA) half
tgaaccaccaacctttcggttaacag

SEQ ID NO: 20101 - DNA, 20 bp, Artificial Sequence
  synthetic circulating small noncoding RNA (sncRNA) 5' transfer RNA (tRNA) half
ctaatggataaggcactggc

SEQ ID NO: 20102 - DNA, 24 bp, Artificial Sequence
  synthetic circulating small noncoding RNA (sncRNA) 5' transfer RNA (tRNA) half
aatggttagcactctggactctga

SEQ ID NO: 20103 - DNA, 20 bp, Artificial Sequence
  synthetic circulating small noncoding RNA (sncRNA) 5' transfer RNA (tRNA) half
tcaaatctcggtgggacctc

SEQ ID NO: 20104 - DNA, 37 bp, Artificial Sequence
  synthetic circulating small noncoding RNA (sncRNA) 5' transfer RNA (tRNA) half
tagtgccgagactcggattcgaaccgaggttgctgca

SEQ ID NO: 20105 - DNA, 20 bp, Artificial Sequence
  synthetic circulating small noncoding RNA (sncRNA) 5' transfer RNA (tRNA) half
gatagctcagtcggtagagc

SEQ ID NO: 20106 - DNA, 21 bp, Artificial Sequence
  synthetic circulating small noncoding RNA (sncRNA) 5' transfer RNA (tRNA) half
ccgcggcggtgagagcgccga

SEQ ID NO: 20107 - DNA, 32 bp, Artificial Sequence
  synthetic circulating small noncoding RNA (sncRNA) 5' transfer RNA (tRNA) half
ccccagcgagatttgaactcgcgacccctggt

SEQ ID NO: 20108 - DNA, 12 bp, Artificial Sequence
  synthetic circulating small noncoding RNA (sncRNA) 5' transfer RNA (tRNA) half
tcgaacccgcga

SEQ ID NO: 20109 - DNA, 39 bp, Artificial Sequence
  synthetic circulating small noncoding RNA (sncRNA) 5' transfer RNA (tRNA) half
caggcaccgctgggattcgaacccaggatctcctgttta

SEQ ID NO: 20110 - DNA, 17 bp, Artificial Sequence
  synthetic circulating small noncoding RNA (sncRNA) 5' transfer RNA (tRNA) half
gtggtagagcgcgcgct

SEQ ID NO: 20111 - DNA, 39 bp, Artificial Sequence
  synthetic circulating small noncoding RNA (sncRNA) 5' transfer RNA (tRNA) half
tggtagagcgcgtgcttagcatgcacgaggccccgggtt

SEQ ID NO: 20112 - DNA, 8 bp, Artificial Sequence
  synthetic circulating small noncoding RNA (sncRNA) 5' transfer RNA (tRNA) half
gccgagtg

SEQ ID NO: 20113 - DNA, 23 bp, Artificial Sequence
  synthetic circulating small noncoding RNA (sncRNA) 5' transfer RNA (tRNA) half
ggccgggaatcgaacccgggcct

SEQ ID NO: 20114 - DNA, 19 bp, Artificial Sequence
  synthetic circulating small noncoding RNA (sncRNA) 5' transfer RNA (tRNA) half
gctctaccaactgagctat

SEQ ID NO: 20115 - DNA, 16 bp, Artificial Sequence
  synthetic circulating small noncoding RNA (sncRNA) 5' transfer RNA (tRNA) half
ttccggctcgaaggag

SEQ ID NO: 20116 - DNA, 32 bp, Artificial Sequence
  synthetic circulating small noncoding RNA (sncRNA) 5' transfer RNA (tRNA) half
gccaaggtcgcgggttcgatccccgtacgggc

SEQ ID NO: 20117 - DNA, 20 bp, Artificial Sequence
  synthetic circulating small noncoding RNA (sncRNA) 5' transfer RNA (tRNA) half
tgagactgacgcgctgccta

SEQ ID NO: 20118 - DNA, 16 bp, Artificial Sequence
  synthetic circulating small noncoding RNA (sncRNA) 5' transfer RNA (tRNA) half
tgagactcttaatctc

SEQ ID NO: 20119 - DNA, 38 bp, Artificial Sequence
  synthetic circulating small noncoding RNA (sncRNA) 5' transfer RNA (tRNA) half
ctggcagtggtgggattcgaacccacgcctccgaagag

SEQ ID NO: 20120 - DNA, 21 bp, Artificial Sequence
  synthetic circulating small noncoding RNA (sncRNA) 5' transfer RNA (tRNA) half
aactttgtcaggagtgggatt

SEQ ID NO: 20121 - DNA, 12 bp, Artificial Sequence
  synthetic circulating small noncoding RNA (sncRNA) 5' transfer RNA (tRNA) half
agctagccgggc

SEQ ID NO: 20122 - DNA, 19 bp, Artificial Sequence
  synthetic circulating small noncoding RNA (sncRNA) 5' transfer RNA (tRNA) half
tcttacgctgtgagcagga

SEQ ID NO: 20123 - DNA, 6 bp, Artificial Sequence
  synthetic circulating small noncoding RNA (sncRNA) 5' transfer RNA (tRNA) half
gcgccg

SEQ ID NO: 20124 - DNA, 12 bp, Artificial Sequence
  synthetic circulating small noncoding RNA (sncRNA) 5' transfer RNA (tRNA) half
gttagcactctg

SEQ ID NO: 20125 - DNA, 29 bp, Artificial Sequence
  synthetic circulating small noncoding RNA (sncRNA) 5' transfer RNA (tRNA) half
caacgcagagtactaaccactatacgatc

SEQ ID NO: 20126 - DNA, 27 bp, Artificial Sequence
  synthetic circulating small noncoding RNA (sncRNA) 5' transfer RNA (tRNA) half
taacccagaggtcgatggatcgaaacc

SEQ ID NO: 20127 - DNA, 16 bp, Artificial Sequence
  synthetic circulating small noncoding RNA (sncRNA) 5' transfer RNA (tRNA) half
cgcgtggcctaatgga

SEQ ID NO: 20128 - DNA, 30 bp, Artificial Sequence
  synthetic circulating small noncoding RNA (sncRNA) 5' transfer RNA (tRNA) half
tgaaaaccaggaatcctaaccgctagacca

SEQ ID NO: 20129 - DNA, 16 bp, Artificial Sequence
  synthetic circulating small noncoding RNA (sncRNA) 5' transfer RNA (tRNA) half
ttaagagtcccatgct

SEQ ID NO: 20130 - DNA, 33 bp, Artificial Sequence
  synthetic circulating small noncoding RNA (sncRNA) 5' transfer RNA (tRNA) half
aggtcccaccgagatttgaactcggatcgctgg

SEQ ID NO: 20131 - DNA, 11 bp, Artificial Sequence
  synthetic circulating small noncoding RNA (sncRNA) 5' transfer RNA (tRNA) half
atcgaacccgc

SEQ ID NO: 20132 - DNA, 21 bp, Artificial Sequence
  synthetic circulating small noncoding RNA (sncRNA) 5' transfer RNA (tRNA) half
gcttcgcatgtgtgaggtccc

SEQ ID NO: 20133 - DNA, 26 bp, Artificial Sequence
  synthetic circulating small noncoding RNA (sncRNA) 5' transfer RNA (tRNA) half
ccccgtcggggaatcgaaccccggtc

SEQ ID NO: 20134 - DNA, 11 bp, Artificial Sequence
  synthetic circulating small noncoding RNA (sncRNA) 5' transfer RNA (tRNA) half
ggttcgattcc

SEQ ID NO: 20135 - DNA, 21 bp, Artificial Sequence
  synthetic circulating small noncoding RNA (sncRNA) 5' transfer RNA (tRNA) half
ccttagaccgctcggccatcc

SEQ ID NO: 20136 - DNA, 17 bp, Artificial Sequence
  synthetic circulating small noncoding RNA (sncRNA) 5' transfer RNA (tRNA) half
tgggattcgaacccacg

SEQ ID NO: 20137 - DNA, 28 bp, Artificial Sequence
  synthetic circulating small noncoding RNA (sncRNA) 5' transfer RNA (tRNA) half
gcgggatcgatgcccgcatcctccactt

SEQ ID NO: 20138 - DNA, 14 bp, Artificial Sequence
  synthetic circulating small noncoding RNA (sncRNA) 5' transfer RNA (tRNA) half
agccggattcgaac

SEQ ID NO: 20139 - DNA, 16 bp, Artificial Sequence
  synthetic circulating small noncoding RNA (sncRNA) 5' transfer RNA (tRNA) half
ttgggctcgtccggga

SEQ ID NO: 20140 - DNA, 38 bp, Artificial Sequence
  synthetic circulating small noncoding RNA (sncRNA) 5' transfer RNA (tRNA) half
gaacccgggacctctcgcacccgaagcgagaatcatac

SEQ ID NO: 20141 - DNA, 25 bp, Artificial Sequence
  synthetic circulating small noncoding RNA (sncRNA) 5' transfer RNA (tRNA) half
caccaacctttcggttaacagccga

SEQ ID NO: 20142 - DNA, 20 bp, Artificial Sequence
  synthetic circulating small noncoding RNA (sncRNA) 5' transfer RNA (tRNA) half
ctggcagtggtgggattcga

SEQ ID NO: 20143 - DNA, 29 bp, Artificial Sequence
  synthetic circulating small noncoding RNA (sncRNA) 5' transfer RNA (tRNA) half
cgaagggattcgaaccctcaatcttctga

SEQ ID NO: 20144 - DNA, 28 bp, Artificial Sequence
  synthetic circulating small noncoding RNA (sncRNA) 5' transfer RNA (tRNA) half
gagtctggcgccttagaccactcggcca

SEQ ID NO: 20145 - DNA, 8 bp, Artificial Sequence
  synthetic circulating small noncoding RNA (sncRNA) 5' transfer RNA (tRNA) half
tagcgcgt

SEQ ID NO: 20146 - DNA, 35 bp, Artificial Sequence
  synthetic circulating small noncoding RNA (sncRNA) 5' transfer RNA (tRNA) half
atgaccccgacgtgatttgaacacgcaaccttctg

SEQ ID NO: 20147 - DNA, 19 bp, Artificial Sequence
  synthetic circulating small noncoding RNA (sncRNA) 5' transfer RNA (tRNA) half
ggtcgcgggttcgatcccc

SEQ ID NO: 20148 - DNA, 7 bp, Artificial Sequence
  synthetic circulating small noncoding RNA (sncRNA) 5' transfer RNA (tRNA) half
cgacgag

SEQ ID NO: 20149 - DNA, 16 bp, Artificial Sequence
  synthetic circulating small noncoding RNA (sncRNA) 5' transfer RNA (tRNA) half
gatccccggcatctcc

SEQ ID NO: 20150 - DNA, 22 bp, Artificial Sequence
  synthetic circulating small noncoding RNA (sncRNA) 5' transfer RNA (tRNA) half
agagcgccgaatcctaaccact

SEQ ID NO: 20151 - DNA, 28 bp, Artificial Sequence
  synthetic circulating small noncoding RNA (sncRNA) 5' transfer RNA (tRNA) half
tgaccgggaatcgaacccgggccgcggc

SEQ ID NO: 20152 - DNA, 20 bp, Artificial Sequence
  synthetic circulating small noncoding RNA (sncRNA) 5' transfer RNA (tRNA) half
tcaattggtagagcatcaga

SEQ ID NO: 20153 - DNA, 14 bp, Artificial Sequence
  synthetic circulating small noncoding RNA (sncRNA) 5' transfer RNA (tRNA) half
cgctaacgaggcac

SEQ ID NO: 20154 - DNA, 24 bp, Artificial Sequence
  synthetic circulating small noncoding RNA (sncRNA) 5' transfer RNA (tRNA) half
tcggttcgaatccgagtcacggca

SEQ ID NO: 20155 - DNA, 23 bp, Artificial Sequence
  synthetic circulating small noncoding RNA (sncRNA) 5' transfer RNA (tRNA) half
aacccggggcctcatacatgcaa

SEQ ID NO: 20156 - DNA, 32 bp, Artificial Sequence
  synthetic circulating small noncoding RNA (sncRNA) 5' transfer RNA (tRNA) half
gagggggtgtagctcagtggtagagcgcgtgc

SEQ ID NO: 20157 - DNA, 20 bp, Artificial Sequence
  synthetic circulating small noncoding RNA (sncRNA) 5' transfer RNA (tRNA) half
accgagccagccaggagtcg

SEQ ID NO: 20158 - DNA, 22 bp, Artificial Sequence
  synthetic circulating small noncoding RNA (sncRNA) 5' transfer RNA (tRNA) half
aaaaccaggaatcctaaccgct

SEQ ID NO: 20159 - DNA, 40 bp, Artificial Sequence
  synthetic circulating small noncoding RNA (sncRNA) 5' transfer RNA (tRNA) half
cgtatagtggttagtactctgcgttgtggccgcagcaacc

SEQ ID NO: 20160 - DNA, 21 bp, Artificial Sequence
  synthetic circulating small noncoding RNA (sncRNA) 5' transfer RNA (tRNA) half
cgagccccagtggaaccacgt

SEQ ID NO: 20161 - DNA, 16 bp, Artificial Sequence
  synthetic circulating small noncoding RNA (sncRNA) 5' transfer RNA (tRNA) half
accgggcggaaacagt

SEQ ID NO: 20162 - DNA, 42 bp, Artificial Sequence
  synthetic circulating small noncoding RNA (sncRNA) 5' transfer RNA (tRNA) half
cattggggtttccccgcgcaggttcgaatcctgccgactacg

SEQ ID NO: 20163 - DNA, 12 bp, Artificial Sequence
  synthetic circulating small noncoding RNA (sncRNA) 5' transfer RNA (tRNA) half
gtgacaggcggg

SEQ ID NO: 20164 - DNA, 19 bp, Artificial Sequence
  synthetic circulating small noncoding RNA (sncRNA) 5' transfer RNA (tRNA) half
ccgtgtggaggcgtgggtt

SEQ ID NO: 20165 - DNA, 22 bp, Artificial Sequence
  synthetic circulating small noncoding RNA (sncRNA) 5' transfer RNA (tRNA) half
ggattaagagtcccacgctcta

SEQ ID NO: 20166 - DNA, 18 bp, Artificial Sequence
  synthetic circulating small noncoding RNA (sncRNA) 5' transfer RNA (tRNA) half
aatcccatcctcgtcgtt

SEQ ID NO: 20167 - DNA, 37 bp, Artificial Sequence
  synthetic circulating small noncoding RNA (sncRNA) 5' transfer RNA (tRNA) half
cccagcacgcttccgctgcgccactctgctacccact

SEQ ID NO: 20168 - DNA, 18 bp, Artificial Sequence
  synthetic circulating small noncoding RNA (sncRNA) 5' transfer RNA (tRNA) half
gtactaaccactatacga

SEQ ID NO: 20169 - DNA, 24 bp, Artificial Sequence
  synthetic circulating small noncoding RNA (sncRNA) 5' transfer RNA (tRNA) half
ccgcgtggcaggcgagaattctac

SEQ ID NO: 20170 - DNA, 14 bp, Artificial Sequence
  synthetic circulating small noncoding RNA (sncRNA) 5' transfer RNA (tRNA) half
atggataaggcatc

SEQ ID NO: 20171 - DNA, 19 bp, Artificial Sequence
  synthetic circulating small noncoding RNA (sncRNA) 5' transfer RNA (tRNA) half
acccacgcccccgaagaga

SEQ ID NO: 20172 - DNA, 15 bp, Artificial Sequence
  synthetic circulating small noncoding RNA (sncRNA) 5' transfer RNA (tRNA) half
ccctgaccgggaatc

SEQ ID NO: 20173 - DNA, 26 bp, Artificial Sequence
  synthetic circulating small noncoding RNA (sncRNA) 5' transfer RNA (tRNA) half
attaaaagtctgatgctctaccgact

SEQ ID NO: 20174 - DNA, 19 bp, Artificial Sequence
  synthetic circulating small noncoding RNA (sncRNA) 5' transfer RNA (tRNA) half
gaccccgacgtgacttgaa

SEQ ID NO: 20175 - DNA, 31 bp, Artificial Sequence
  synthetic circulating small noncoding RNA (sncRNA) 5' transfer RNA (tRNA) half
gaagcgagaatcatacccctagaccaacgag

SEQ ID NO: 20176 - DNA, 21 bp, Artificial Sequence
  synthetic circulating small noncoding RNA (sncRNA) 5' transfer RNA (tRNA) half
taactttgcgttggccgggaa

SEQ ID NO: 20177 - DNA, 20 bp, Artificial Sequence
  synthetic circulating small noncoding RNA (sncRNA) 5' transfer RNA (tRNA) half
aattggtagagcatcagact

SEQ ID NO: 20178 - DNA, 18 bp, Artificial Sequence
  synthetic circulating small noncoding RNA (sncRNA) 5' transfer RNA (tRNA) half
cttccaagcagttgaccc

SEQ ID NO: 20179 - DNA, 30 bp, Artificial Sequence
  synthetic circulating small noncoding RNA (sncRNA) 5' transfer RNA (tRNA) half
cggttagctcagttggttagagcgtggtgc

SEQ ID NO: 20180 - DNA, 13 bp, Artificial Sequence
  synthetic circulating small noncoding RNA (sncRNA) 5' transfer RNA (tRNA) half
ttcgcctcacacg

SEQ ID NO: 20181 - DNA, 24 bp, Artificial Sequence
  synthetic circulating small noncoding RNA (sncRNA) 5' transfer RNA (tRNA) half
ccggggttcgattccccgacgggg

SEQ ID NO: 20182 - DNA, 19 bp, Artificial Sequence
  synthetic circulating small noncoding RNA (sncRNA) 5' transfer RNA (tRNA) half
gaggttgctgcggccacaa

SEQ ID NO: 20183 - DNA, 33 bp, Artificial Sequence
  synthetic circulating small noncoding RNA (sncRNA) 5' transfer RNA (tRNA) half
aggcattggtggttcagtggtagaattctcgcc

SEQ ID NO: 20184 - DNA, 25 bp, Artificial Sequence
  synthetic circulating small noncoding RNA (sncRNA) 5' transfer RNA (tRNA) half
gcgggaggcccgggttcgattcccg

SEQ ID NO: 20185 - DNA, 19 bp, Artificial Sequence
  synthetic circulating small noncoding RNA (sncRNA) 5' transfer RNA (tRNA) half
accactacactacagaaac

SEQ ID NO: 20186 - DNA, 34 bp, Artificial Sequence
  synthetic circulating small noncoding RNA (sncRNA) 5' transfer RNA (tRNA) half
tcacccaggcggcccgggttcgactcccggtatg

SEQ ID NO: 20187 - DNA, 23 bp, Artificial Sequence
  synthetic circulating small noncoding RNA (sncRNA) 5' transfer RNA (tRNA) half
aaatgctaaggttccaccgagat

SEQ ID NO: 20188 - DNA, 8 bp, Artificial Sequence
  synthetic circulating small noncoding RNA (sncRNA) 5' transfer RNA (tRNA) half
cacccgga

SEQ ID NO: 20189 - DNA, 22 bp, Artificial Sequence
  synthetic circulating small noncoding RNA (sncRNA) 5' transfer RNA (tRNA) half
accgggcggaaacaagacactt

SEQ ID NO: 20190 - DNA, 23 bp, Artificial Sequence
  synthetic circulating small noncoding RNA (sncRNA) 5' transfer RNA (tRNA) half
taagacttaaaaccttgttccca

SEQ ID NO: 20191 - DNA, 16 bp, Artificial Sequence
  synthetic circulating small noncoding RNA (sncRNA) 5' transfer RNA (tRNA) half
ttccgcccgaacaggg

SEQ ID NO: 20192 - DNA, 30 bp, Artificial Sequence
  synthetic circulating small noncoding RNA (sncRNA) 5' transfer RNA (tRNA) half
gttaggcgaatgtgataaccactacactac

SEQ ID NO: 20193 - DNA, 10 bp, Artificial Sequence
  synthetic circulating small noncoding RNA (sncRNA) 5' transfer RNA (tRNA) half
ccgcgacctt

SEQ ID NO: 20194 - DNA, 22 bp, Artificial Sequence
  synthetic circulating small noncoding RNA (sncRNA) 5' transfer RNA (tRNA) half
ggccccatggtgtaatggttag

SEQ ID NO: 20195 - DNA, 13 bp, Artificial Sequence
  synthetic circulating small noncoding RNA (sncRNA) 5' transfer RNA (tRNA) half
ctcggatcgctgg

SEQ ID NO: 20196 - DNA, 21 bp, Artificial Sequence
  synthetic circulating small noncoding RNA (sncRNA) 5' transfer RNA (tRNA) half
aaaccgggcggaaacagcaac

SEQ ID NO: 20197 - DNA, 30 bp, Artificial Sequence
  synthetic circulating small noncoding RNA (sncRNA) 5' transfer RNA (tRNA) half
atggttagcactctggactctgaatccagc

SEQ ID NO: 20198 - DNA, 24 bp, Artificial Sequence
  synthetic circulating small noncoding RNA (sncRNA) 5' transfer RNA (tRNA) half
ggttcgattcccgggcggcgcatg

SEQ ID NO: 20199 - DNA, 17 bp, Artificial Sequence
  synthetic circulating small noncoding RNA (sncRNA) 5' transfer RNA (tRNA) half
ctgtagagcatgagact

SEQ ID NO: 20200 - DNA, 39 bp, Artificial Sequence
  synthetic circulating small noncoding RNA (sncRNA) 5' transfer RNA (tRNA) half
ccaccccaggtgggactcgaacccacaatccctggctta

SEQ ID NO: 20201 - DNA, 14 bp, Artificial Sequence
  synthetic circulating small noncoding RNA (sncRNA) 5' transfer RNA (tRNA) half
gattcccggtcagg

SEQ ID NO: 20202 - DNA, 32 bp, Artificial Sequence
  synthetic circulating small noncoding RNA (sncRNA) 5' transfer RNA (tRNA) half
gtatgattctcgcttcgggtgcgagaggtccc

SEQ ID NO: 20203 - DNA, 23 bp, Artificial Sequence
  synthetic circulating small noncoding RNA (sncRNA) 5' transfer RNA (tRNA) half
ctgaatccagcgacccgagttca

SEQ ID NO: 20204 - DNA, 9 bp, Artificial Sequence
  synthetic circulating small noncoding RNA (sncRNA) 5' transfer RNA (tRNA) half
cgtgggttc

SEQ ID NO: 20205 - DNA, 9 bp, Artificial Sequence
  synthetic circulating small noncoding RNA (sncRNA) 5' transfer RNA (tRNA) half
cgttggccg

SEQ ID NO: 20206 - DNA, 42 bp, Artificial Sequence
  synthetic circulating small noncoding RNA (sncRNA) 5' transfer RNA (tRNA) half
cgaggatgggattcgaacccacgcgtgcaaagcacaatggat

SEQ ID NO: 20207 - DNA, 19 bp, Artificial Sequence
  synthetic circulating small noncoding RNA (sncRNA) 5' transfer RNA (tRNA) half
attgcgccactggcccggt

SEQ ID NO: 20208 - DNA, 23 bp, Artificial Sequence
  synthetic circulating small noncoding RNA (sncRNA) 5' transfer RNA (tRNA) half
aaccgggcggaaacaagacactt

SEQ ID NO: 20209 - DNA, 11 bp, Artificial Sequence
  synthetic circulating small noncoding RNA (sncRNA) 5' transfer RNA (tRNA) half
ggtagcgggat

SEQ ID NO: 20210 - DNA, 15 bp, Artificial Sequence
  synthetic circulating small noncoding RNA (sncRNA) 5' transfer RNA (tRNA) half
cccgcgaccttggcg

SEQ ID NO: 20211 - DNA, 10 bp, Artificial Sequence
  synthetic circulating small noncoding RNA (sncRNA) 5' transfer RNA (tRNA) half
tgctctaccg

SEQ ID NO: 20212 - DNA, 13 bp, Artificial Sequence
  synthetic circulating small noncoding RNA (sncRNA) 5' transfer RNA (tRNA) half
gcgctaacgaggc

SEQ ID NO: 20213 - DNA, 37 bp, Artificial Sequence
  synthetic circulating small noncoding RNA (sncRNA) 5' transfer RNA (tRNA) half
ggaagccatagcttgagtctggcgccttagaccactc

SEQ ID NO: 20214 - DNA, 24 bp, Artificial Sequence
  synthetic circulating small noncoding RNA (sncRNA) 5' transfer RNA (tRNA) half
atgccgtgactcggattcgaaccg

SEQ ID NO: 20215 - DNA, 25 bp, Artificial Sequence
  synthetic circulating small noncoding RNA (sncRNA) 5' transfer RNA (tRNA) half
cgattgcgccacagagaccggtgat

SEQ ID NO: 20216 - DNA, 16 bp, Artificial Sequence
  synthetic circulating small noncoding RNA (sncRNA) 5' transfer RNA (tRNA) half
ctccgccgggactcga

SEQ ID NO: 20217 - DNA, 12 bp, Artificial Sequence
  synthetic circulating small noncoding RNA (sncRNA) 5' transfer RNA (tRNA) half
cactcggccacg

SEQ ID NO: 20218 - DNA, 15 bp, Artificial Sequence
  synthetic circulating small noncoding RNA (sncRNA) 5' transfer RNA (tRNA) half
aaaggtcccaccgag

SEQ ID NO: 20219 - DNA, 17 bp, Artificial Sequence
  synthetic circulating small noncoding RNA (sncRNA) 5' transfer RNA (tRNA) half
tcgaacccgggccgcgg

SEQ ID NO: 20220 - DNA, 12 bp, Artificial Sequence
  synthetic circulating small noncoding RNA (sncRNA) 5' transfer RNA (tRNA) half
ccgctcggccat

SEQ ID NO: 20221 - DNA, 7 bp, Artificial Sequence
  synthetic circulating small noncoding RNA (sncRNA) 5' transfer RNA (tRNA) half
gccgaat

SEQ ID NO: 20222 - DNA, 23 bp, Artificial Sequence
  synthetic circulating small noncoding RNA (sncRNA) 5' transfer RNA (tRNA) half
tggttcgattccggctcgaagga

SEQ ID NO: 20223 - DNA, 28 bp, Artificial Sequence
  synthetic circulating small noncoding RNA (sncRNA) 5' transfer RNA (tRNA) half
aacctgcgcggggaaaccccaatggatt

SEQ ID NO: 20224 - DNA, 17 bp, Artificial Sequence
  synthetic circulating small noncoding RNA (sncRNA) 5' transfer RNA (tRNA) half
ggcgctgcgttcaggtc

SEQ ID NO: 20225 - DNA, 15 bp, Artificial Sequence
  synthetic circulating small noncoding RNA (sncRNA) 5' transfer RNA (tRNA) half
actaaccactatacg

SEQ ID NO: 20226 - DNA, 10 bp, Artificial Sequence
  synthetic circulating small noncoding RNA (sncRNA) 5' transfer RNA (tRNA) half
cattggccgg

SEQ ID NO: 20227 - DNA, 26 bp, Artificial Sequence
  synthetic circulating small noncoding RNA (sncRNA) 5' transfer RNA (tRNA) half
acccgggccgcggcggtgagagcgcc

SEQ ID NO: 20228 - DNA, 23 bp, Artificial Sequence
  synthetic circulating small noncoding RNA (sncRNA) 5' transfer RNA (tRNA) half
acccacgcgtgcaaagcacaatg

SEQ ID NO: 20229 - DNA, 13 bp, Artificial Sequence
  synthetic circulating small noncoding RNA (sncRNA) 5' transfer RNA (tRNA) half
cgtgataaccgct

SEQ ID NO: 20230 - DNA, 20 bp, Artificial Sequence
  synthetic circulating small noncoding RNA (sncRNA) 5' transfer RNA (tRNA) half
ttcgaatcccacttctgaca

SEQ ID NO: 20231 - DNA, 17 bp, Artificial Sequence
  synthetic circulating small noncoding RNA (sncRNA) 5' transfer RNA (tRNA) half
gcagcggaagcgtgctg

SEQ ID NO: 20232 - DNA, 26 bp, Artificial Sequence
  synthetic circulating small noncoding RNA (sncRNA) 5' transfer RNA (tRNA) half
gtgagagcgccgaatcctaaccacta

SEQ ID NO: 20233 - DNA, 26 bp, Artificial Sequence
  synthetic circulating small noncoding RNA (sncRNA) 5' transfer RNA (tRNA) half
aggtcccaccgagatttgaactcgga

SEQ ID NO: 20234 - DNA, 19 bp, Artificial Sequence
  synthetic circulating small noncoding RNA (sncRNA) 5' transfer RNA (tRNA) half
tctggactctgaatccagc

SEQ ID NO: 20235 - DNA, 15 bp, Artificial Sequence
  synthetic circulating small noncoding RNA (sncRNA) 5' transfer RNA (tRNA) half
gctctcaccgccgcg

SEQ ID NO: 20236 - DNA, 23 bp, Artificial Sequence
  synthetic circulating small noncoding RNA (sncRNA) 5' transfer RNA (tRNA) half
taagccagggattgtgggttcga

SEQ ID NO: 20237 - DNA, 13 bp, Artificial Sequence
  synthetic circulating small noncoding RNA (sncRNA) 5' transfer RNA (tRNA) half
cacctttcgggcg

SEQ ID NO: 20238 - DNA, 11 bp, Artificial Sequence
  synthetic circulating small noncoding RNA (sncRNA) 5' transfer RNA (tRNA) half
ccggcatctcc

SEQ ID NO: 20239 - DNA, 25 bp, Artificial Sequence
  synthetic circulating small noncoding RNA (sncRNA) 5' transfer RNA (tRNA) half
cgtcgagccagccaggagtcgaacc

SEQ ID NO: 20240 - DNA, 24 bp, Artificial Sequence
  synthetic circulating small noncoding RNA (sncRNA) 5' transfer RNA (tRNA) half
acgaccttcagattatgagactga

SEQ ID NO: 20241 - DNA, 20 bp, Artificial Sequence
  synthetic circulating small noncoding RNA (sncRNA) 5' transfer RNA (tRNA) half
gttagcctccccgtcgggga

SEQ ID NO: 20242 - DNA, 8 bp, Artificial Sequence
  synthetic circulating small noncoding RNA (sncRNA) 5' transfer RNA (tRNA) half
tggccgag

SEQ ID NO: 20243 - DNA, 17 bp, Artificial Sequence
  synthetic circulating small noncoding RNA (sncRNA) 5' transfer RNA (tRNA) half
tcaaatgctctaccact

SEQ ID NO: 20244 - DNA, 24 bp, Artificial Sequence
  synthetic circulating small noncoding RNA (sncRNA) 5' transfer RNA (tRNA) half
gaccgctcggccatcctgacaact

SEQ ID NO: 20245 - DNA, 13 bp, Artificial Sequence
  synthetic circulating small noncoding RNA (sncRNA) 5' transfer RNA (tRNA) half
tcggattcgaacc

SEQ ID NO: 20246 - DNA, 35 bp, Artificial Sequence
  synthetic circulating small noncoding RNA (sncRNA) 5' transfer RNA (tRNA) half
tggtttccgtagtgtagtggttatcacgttcgcct

SEQ ID NO: 20247 - DNA, 15 bp, Artificial Sequence
  synthetic circulating small noncoding RNA (sncRNA) 5' transfer RNA (tRNA) half
tgggtgggctcgaac

SEQ ID NO: 20248 - DNA, 20 bp, Artificial Sequence
  synthetic circulating small noncoding RNA (sncRNA) 5' transfer RNA (tRNA) half
gcgtggccgagcggtctaag

SEQ ID NO: 20249 - DNA, 19 bp, Artificial Sequence
  synthetic circulating small noncoding RNA (sncRNA) 5' transfer RNA (tRNA) half
gaggttgctgcagccacaa

SEQ ID NO: 20250 - DNA, 10 bp, Artificial Sequence
  synthetic circulating small noncoding RNA (sncRNA) 5' transfer RNA (tRNA) half
cgcggcccgg

SEQ ID NO: 20251 - DNA, 22 bp, Artificial Sequence
  synthetic circulating small noncoding RNA (sncRNA) 5' transfer RNA (tRNA) half
gcaccacgctctaaccaactga

SEQ ID NO: 20252 - DNA, 33 bp, Artificial Sequence
  synthetic circulating small noncoding RNA (sncRNA) 5' transfer RNA (tRNA) half
ttcccacatggtctagcggttaggattcctggt

SEQ ID NO: 20253 - DNA, 10 bp, Artificial Sequence
  synthetic circulating small noncoding RNA (sncRNA) 5' transfer RNA (tRNA) half
ggcccagcac

SEQ ID NO: 20254 - DNA, 15 bp, Artificial Sequence
  synthetic circulating small noncoding RNA (sncRNA) 5' transfer RNA (tRNA) half
tgtttgggctcgtcc

SEQ ID NO: 20255 - DNA, 23 bp, Artificial Sequence
  synthetic circulating small noncoding RNA (sncRNA) 5' transfer RNA (tRNA) half
ccgtcacgaacaggattcgaacc

SEQ ID NO: 20256 - DNA, 29 bp, Artificial Sequence
  synthetic circulating small noncoding RNA (sncRNA) 5' transfer RNA (tRNA) half
cttgatctgcagtcaaatgctctaccact

SEQ ID NO: 20257 - DNA, 23 bp, Artificial Sequence
  synthetic circulating small noncoding RNA (sncRNA) 5' transfer RNA (tRNA) half
tgggttcgatccccagcatctcc

SEQ ID NO: 20258 - DNA, 12 bp, Artificial Sequence
  synthetic circulating small noncoding RNA (sncRNA) 5' transfer RNA (tRNA) half
gcaggttcgaat

SEQ ID NO: 20259 - DNA, 22 bp, Artificial Sequence
  synthetic circulating small noncoding RNA (sncRNA) 5' transfer RNA (tRNA) half
cgtaaaccgaagatcgcgggtt

SEQ ID NO: 20260 - DNA, 12 bp, Artificial Sequence
  synthetic circulating small noncoding RNA (sncRNA) 5' transfer RNA (tRNA) half
gtcgtggccgag

SEQ ID NO: 20261 - DNA, 19 bp, Artificial Sequence
  synthetic circulating small noncoding RNA (sncRNA) 5' transfer RNA (tRNA) half
gatgccgggagtcgaaccc

SEQ ID NO: 20262 - DNA, 20 bp, Artificial Sequence
  synthetic circulating small noncoding RNA (sncRNA) 5' transfer RNA (tRNA) half
taatggataaggcgtctgac

SEQ ID NO: 20263 - DNA, 33 bp, Artificial Sequence
  synthetic circulating small noncoding RNA (sncRNA) 5' transfer RNA (tRNA) half
agcgactctggtgggactcgaacccacaacctt

SEQ ID NO: 20264 - DNA, 26 bp, Artificial Sequence
  synthetic circulating small noncoding RNA (sncRNA) 5' transfer RNA (tRNA) half
acccacgcccccgaagagactggagc

SEQ ID NO: 20265 - DNA, 37 bp, Artificial Sequence
  synthetic circulating small noncoding RNA (sncRNA) 5' transfer RNA (tRNA) half
gagtctcatgctctaccgactgagctagccgggcctt

SEQ ID NO: 20266 - DNA, 15 bp, Artificial Sequence
  synthetic circulating small noncoding RNA (sncRNA) 5' transfer RNA (tRNA) half
aggatggccgagcgg

SEQ ID NO: 20267 - DNA, 13 bp, Artificial Sequence
  synthetic circulating small noncoding RNA (sncRNA) 5' transfer RNA (tRNA) half
tcgattccggctc

SEQ ID NO: 20268 - DNA, 17 bp, Artificial Sequence
  synthetic circulating small noncoding RNA (sncRNA) 5' transfer RNA (tRNA) half
gtctagtggtatgattc

SEQ ID NO: 20269 - DNA, 21 bp, Artificial Sequence
  synthetic circulating small noncoding RNA (sncRNA) 5' transfer RNA (tRNA) half
tgaggccccgggttcgatccc

SEQ ID NO: 20270 - DNA, 31 bp, Artificial Sequence
  synthetic circulating small noncoding RNA (sncRNA) 5' transfer RNA (tRNA) half
caggcggggatactaaccactatactaacga

SEQ ID NO: 20271 - DNA, 33 bp, Artificial Sequence
  synthetic circulating small noncoding RNA (sncRNA) 5' transfer RNA (tRNA) half
agcgagaatcatacccctagaccaacgagccac

SEQ ID NO: 20272 - DNA, 14 bp, Artificial Sequence
  synthetic circulating small noncoding RNA (sncRNA) 5' transfer RNA (tRNA) half
ggagtgggattcga

SEQ ID NO: 20273 - DNA, 35 bp, Artificial Sequence
  synthetic circulating small noncoding RNA (sncRNA) 5' transfer RNA (tRNA) half
gttagcactctggactttgaatccagcgatccgag

SEQ ID NO: 20274 - DNA, 17 bp, Artificial Sequence
  synthetic circulating small noncoding RNA (sncRNA) 5' transfer RNA (tRNA) half
ggaggcgagaattctac

SEQ ID NO: 20275 - DNA, 34 bp, Artificial Sequence
  synthetic circulating small noncoding RNA (sncRNA) 5' transfer RNA (tRNA) half
tgcatgaggccccgggttcgatccccggcacctc

SEQ ID NO: 20276 - DNA, 18 bp, Artificial Sequence
  synthetic circulating small noncoding RNA (sncRNA) 5' transfer RNA (tRNA) half
gtggccgagtggttaagg

SEQ ID NO: 20277 - DNA, 28 bp, Artificial Sequence
  synthetic circulating small noncoding RNA (sncRNA) 5' transfer RNA (tRNA) half
acccagaccgacgaggatgggattcgaa

SEQ ID NO: 20278 - DNA, 12 bp, Artificial Sequence
  synthetic circulating small noncoding RNA (sncRNA) 5' transfer RNA (tRNA) half
acccgggccgcg

SEQ ID NO: 20279 - DNA, 30 bp, Artificial Sequence
  synthetic circulating small noncoding RNA (sncRNA) 5' transfer RNA (tRNA) half
cagacgccttatccattaggccacgcggcc

SEQ ID NO: 20280 - DNA, 14 bp, Artificial Sequence
  synthetic circulating small noncoding RNA (sncRNA) 5' transfer RNA (tRNA) half
catcgacctctggg

SEQ ID NO: 20281 - DNA, 16 bp, Artificial Sequence
  synthetic circulating small noncoding RNA (sncRNA) 5' transfer RNA (tRNA) half
atcctgccgactacgt

SEQ ID NO: 20282 - DNA, 18 bp, Artificial Sequence
  synthetic circulating small noncoding RNA (sncRNA) 5' transfer RNA (tRNA) half
cgattcccggccaatgca

SEQ ID NO: 20283 - DNA, 35 bp, Artificial Sequence
  synthetic circulating small noncoding RNA (sncRNA) 5' transfer RNA (tRNA) half
gtgagtttccgtagtgtagtggttatcacgttcgc

SEQ ID NO: 20284 - DNA, 18 bp, Artificial Sequence
  synthetic circulating small noncoding RNA (sncRNA) 5' transfer RNA (tRNA) half
agcgagcgctctaccatt

SEQ ID NO: 20285 - DNA, 8 bp, Artificial Sequence
  synthetic circulating small noncoding RNA (sncRNA) 5' transfer RNA (tRNA) half
tcccggac

SEQ ID NO: 20286 - DNA, 11 bp, Artificial Sequence
  synthetic circulating small noncoding RNA (sncRNA) 5' transfer RNA (tRNA) half
cgagaattcta

SEQ ID NO: 20287 - DNA, 26 bp, Artificial Sequence
  synthetic circulating small noncoding RNA (sncRNA) 5' transfer RNA (tRNA) half
cgaatcctaaccactagaccaccagg

SEQ ID NO: 20288 - DNA, 22 bp, Artificial Sequence
  synthetic circulating small noncoding RNA (sncRNA) 5' transfer RNA (tRNA) half
agcctccccgtcggggaatcga

SEQ ID NO: 20289 - DNA, 24 bp, Artificial Sequence
  synthetic circulating small noncoding RNA (sncRNA) 5' transfer RNA (tRNA) half
acccgcgaccttggcgttattagc

SEQ ID NO: 20290 - DNA, 8 bp, Artificial Sequence
  synthetic circulating small noncoding RNA (sncRNA) 5' transfer RNA (tRNA) half
cggggacc

SEQ ID NO: 20291 - DNA, 24 bp, Artificial Sequence
  synthetic circulating small noncoding RNA (sncRNA) 5' transfer RNA (tRNA) half
attggtggttcagtggtagaattc

SEQ ID NO: 20292 - DNA, 32 bp, Artificial Sequence
  synthetic circulating small noncoding RNA (sncRNA) 5' transfer RNA (tRNA) half
tgcgacccgggttcgattcccgggcggcgcat

SEQ ID NO: 20293 - DNA, 13 bp, Artificial Sequence
  synthetic circulating small noncoding RNA (sncRNA) 5' transfer RNA (tRNA) half
agtcgaacctgga

SEQ ID NO: 20294 - DNA, 10 bp, Artificial Sequence
  synthetic circulating small noncoding RNA (sncRNA) 5' transfer RNA (tRNA) half
cccgggacct

SEQ ID NO: 20295 - DNA, 29 bp, Artificial Sequence
  synthetic circulating small noncoding RNA (sncRNA) 5' transfer RNA (tRNA) half
acgaggatgggattcgaacccatgcgtgc

SEQ ID NO: 20296 - DNA, 9 bp, Artificial Sequence
  synthetic circulating small noncoding RNA (sncRNA) 5' transfer RNA (tRNA) half
cgggacctc

SEQ ID NO: 20297 - DNA, 12 bp, Artificial Sequence
  synthetic circulating small noncoding RNA (sncRNA) 5' transfer RNA (tRNA) half
gagctatcgaag

SEQ ID NO: 20298 - DNA, 39 bp, Artificial Sequence
  synthetic circulating small noncoding RNA (sncRNA) 5' transfer RNA (tRNA) half
gtaaacaggagatcctgggttcgactcccagtggggcct

SEQ ID NO: 20299 - DNA, 16 bp, Artificial Sequence
  synthetic circulating small noncoding RNA (sncRNA) 5' transfer RNA (tRNA) half
accaggggtcgcgagt

SEQ ID NO: 20300 - DNA, 12 bp, Artificial Sequence
  synthetic circulating small noncoding RNA (sncRNA) 5' transfer RNA (tRNA) half
gattaagagtcc

SEQ ID NO: 20301 - DNA, 27 bp, Artificial Sequence
  synthetic circulating small noncoding RNA (sncRNA) 5' transfer RNA (tRNA) half
ttccgagccagccaggagtcgaacctg

SEQ ID NO: 20302 - DNA, 16 bp, Artificial Sequence
  synthetic circulating small noncoding RNA (sncRNA) 5' transfer RNA (tRNA) half
gagctagccgggcctt

SEQ ID NO: 20303 - DNA, 25 bp, Artificial Sequence
  synthetic circulating small noncoding RNA (sncRNA) 5' transfer RNA (tRNA) half
ggcaagaattctaccactgaaccac

SEQ ID NO: 20304 - DNA, 27 bp, Artificial Sequence
  synthetic circulating small noncoding RNA (sncRNA) 5' transfer RNA (tRNA) half
gtctagcggttaggattcctggttttc

SEQ ID NO: 20305 - DNA, 34 bp, Artificial Sequence
  synthetic circulating small noncoding RNA (sncRNA) 5' transfer RNA (tRNA) half
cgactctggcgggactcgaacccgcaacctttga

SEQ ID NO: 20306 - DNA, 31 bp, Artificial Sequence
  synthetic circulating small noncoding RNA (sncRNA) 5' transfer RNA (tRNA) half
cgactctggcgggactcgaacccgcaacctt

SEQ ID NO: 20307 - DNA, 16 bp, Artificial Sequence
  synthetic circulating small noncoding RNA (sncRNA) 5' transfer RNA (tRNA) half
ttcgattcccggccaa

SEQ ID NO: 20308 - DNA, 23 bp, Artificial Sequence
  synthetic circulating small noncoding RNA (sncRNA) 5' transfer RNA (tRNA) half
agaccgacgaggatgggattcga

SEQ ID NO: 20309 - DNA, 38 bp, Artificial Sequence
  synthetic circulating small noncoding RNA (sncRNA) 5' transfer RNA (tRNA) half
gcccaacgtggggctcgaacccacgaccctgggattaa

SEQ ID NO: 20310 - DNA, 18 bp, Artificial Sequence
  synthetic circulating small noncoding RNA (sncRNA) 5' transfer RNA (tRNA) half
gcagcggtgggattcgaa

SEQ ID NO: 20311 - DNA, 22 bp, Artificial Sequence
  synthetic circulating small noncoding RNA (sncRNA) 5' transfer RNA (tRNA) half
tcgaatcccatcctcgtcgttc

SEQ ID NO: 20312 - DNA, 24 bp, Artificial Sequence
  synthetic circulating small noncoding RNA (sncRNA) 5' transfer RNA (tRNA) half
atggaggcgtgggttcgaatccca

SEQ ID NO: 20313 - DNA, 8 bp, Artificial Sequence
  synthetic circulating small noncoding RNA (sncRNA) 5' transfer RNA (tRNA) half
ttcgcccg

SEQ ID NO: 20314 - DNA, 11 bp, Artificial Sequence
  synthetic circulating small noncoding RNA (sncRNA) 5' transfer RNA (tRNA) half
cggagaccaga

SEQ ID NO: 20315 - DNA, 21 bp, Artificial Sequence
  synthetic circulating small noncoding RNA (sncRNA) 5' transfer RNA (tRNA) half
ccgcagcgagcagggttcgaa

SEQ ID NO: 20316 - DNA, 14 bp, Artificial Sequence
  synthetic circulating small noncoding RNA (sncRNA) 5' transfer RNA (tRNA) half
ccgtgatcgtatag

SEQ ID NO: 20317 - DNA, 18 bp, Artificial Sequence
  synthetic circulating small noncoding RNA (sncRNA) 5' transfer RNA (tRNA) half
cctgggtgggctcgaacc

SEQ ID NO: 20318 - DNA, 32 bp, Artificial Sequence
  synthetic circulating small noncoding RNA (sncRNA) 5' transfer RNA (tRNA) half
ccttcgatagctcagttggtagagcggaggac

SEQ ID NO: 20319 - DNA, 35 bp, Artificial Sequence
  synthetic circulating small noncoding RNA (sncRNA) 5' transfer RNA (tRNA) half
gggccgcggcggtgaaagcgccgaatcctagccac

SEQ ID NO: 20320 - DNA, 11 bp, Artificial Sequence
  synthetic circulating small noncoding RNA (sncRNA) 5' transfer RNA (tRNA) half
ttcgactcccg

SEQ ID NO: 20321 - DNA, 33 bp, Artificial Sequence
  synthetic circulating small noncoding RNA (sncRNA) 5' transfer RNA (tRNA) half
cttaatccagcgccttagaccgctcggccacgc

SEQ ID NO: 20322 - DNA, 23 bp, Artificial Sequence
  synthetic circulating small noncoding RNA (sncRNA) 5' transfer RNA (tRNA) half
gcgtgctgggcccataacccaga

SEQ ID NO: 20323 - DNA, 7 bp, Artificial Sequence
  synthetic circulating small noncoding RNA (sncRNA) 5' transfer RNA (tRNA) half
ggtctcg

SEQ ID NO: 20324 - DNA, 12 bp, Artificial Sequence
  synthetic circulating small noncoding RNA (sncRNA) 5' transfer RNA (tRNA) half
gattcgaaccca

SEQ ID NO: 20325 - DNA, 33 bp, Artificial Sequence
  synthetic circulating small noncoding RNA (sncRNA) 5' transfer RNA (tRNA) half
aacccacgaccctgggattaagagtcccatgct

SEQ ID NO: 20326 - DNA, 22 bp, Artificial Sequence
  synthetic circulating small noncoding RNA (sncRNA) 5' transfer RNA (tRNA) half
ggattcgaacccacgcctccat

SEQ ID NO: 20327 - DNA, 41 bp, Artificial Sequence
  synthetic circulating small noncoding RNA (sncRNA) 5' transfer RNA (tRNA) half
gctggcccgtacggggatcgaacccgcgaccttggcgttat

SEQ ID NO: 20328 - DNA, 13 bp, Artificial Sequence
  synthetic circulating small noncoding RNA (sncRNA) 5' transfer RNA (tRNA) half
taatggataaggc

SEQ ID NO: 20329 - DNA, 14 bp, Artificial Sequence
  synthetic circulating small noncoding RNA (sncRNA) 5' transfer RNA (tRNA) half
aacccacaatccct

SEQ ID NO: 20330 - DNA, 23 bp, Artificial Sequence
  synthetic circulating small noncoding RNA (sncRNA) 5' transfer RNA (tRNA) half
gggtgggctcgaaccaccaacct

SEQ ID NO: 20331 - DNA, 15 bp, Artificial Sequence
  synthetic circulating small noncoding RNA (sncRNA) 5' transfer RNA (tRNA) half
gccttatccgttagg

SEQ ID NO: 20332 - DNA, 19 bp, Artificial Sequence
  synthetic circulating small noncoding RNA (sncRNA) 5' transfer RNA (tRNA) half
ctgccgtgactcggattcg

SEQ ID NO: 20333 - DNA, 24 bp, Artificial Sequence
  synthetic circulating small noncoding RNA (sncRNA) 5' transfer RNA (tRNA) half
ggccgcctgggtgaaaaccaggaa

SEQ ID NO: 20334 - DNA, 28 bp, Artificial Sequence
  synthetic circulating small noncoding RNA (sncRNA) 5' transfer RNA (tRNA) half
ccggggttcgattccccgacggggagtc

SEQ ID NO: 20335 - DNA, 15 bp, Artificial Sequence
  synthetic circulating small noncoding RNA (sncRNA) 5' transfer RNA (tRNA) half
tcctgccgactacgt

SEQ ID NO: 20336 - DNA, 17 bp, Artificial Sequence
  synthetic circulating small noncoding RNA (sncRNA) 5' transfer RNA (tRNA) half
acccgggccgcggcggt

SEQ ID NO: 20337 - DNA, 9 bp, Artificial Sequence
  synthetic circulating small noncoding RNA (sncRNA) 5' transfer RNA (tRNA) half
gcgccgtgg

SEQ ID NO: 20338 - DNA, 22 bp, Artificial Sequence
  synthetic circulating small noncoding RNA (sncRNA) 5' transfer RNA (tRNA) half
aatcatacccctagaccaacga

SEQ ID NO: 20339 - DNA, 27 bp, Artificial Sequence
  synthetic circulating small noncoding RNA (sncRNA) 5' transfer RNA (tRNA) half
cagtcctccgctctaccaactgagcta

SEQ ID NO: 20340 - DNA, 25 bp, Artificial Sequence
  synthetic circulating small noncoding RNA (sncRNA) 5' transfer RNA (tRNA) half
tgctaataacgccaaggtcgcgggt

SEQ ID NO: 20341 - DNA, 23 bp, Artificial Sequence
  synthetic circulating small noncoding RNA (sncRNA) 5' transfer RNA (tRNA) half
cgtgtgaggcgaacgtgataacc

SEQ ID NO: 20342 - DNA, 20 bp, Artificial Sequence
  synthetic circulating small noncoding RNA (sncRNA) 5' transfer RNA (tRNA) half
ttcaatccccggcacctcca

SEQ ID NO: 20343 - DNA, 11 bp, Artificial Sequence
  synthetic circulating small noncoding RNA (sncRNA) 5' transfer RNA (tRNA) half
ccggggacctt

SEQ ID NO: 20344 - DNA, 38 bp, Artificial Sequence
  synthetic circulating small noncoding RNA (sncRNA) 5' transfer RNA (tRNA) half
gcgagaggtcccgggttcaaatcccggacgagccccat

SEQ ID NO: 20345 - DNA, 29 bp, Artificial Sequence
  synthetic circulating small noncoding RNA (sncRNA) 5' transfer RNA (tRNA) half
cgcgggttcgatccccgtacgggccacat

SEQ ID NO: 20346 - DNA, 20 bp, Artificial Sequence
  synthetic circulating small noncoding RNA (sncRNA) 5' transfer RNA (tRNA) half
aatccgagtcacggcattat

SEQ ID NO: 20347 - DNA, 20 bp, Artificial Sequence
  synthetic circulating small noncoding RNA (sncRNA) 5' transfer RNA (tRNA) half
gggctcatccgggatttgaa

SEQ ID NO: 20348 - DNA, 9 bp, Artificial Sequence
  synthetic circulating small noncoding RNA (sncRNA) 5' transfer RNA (tRNA) half
cgaaccggg

SEQ ID NO: 20349 - DNA, 12 bp, Artificial Sequence
  synthetic circulating small noncoding RNA (sncRNA) 5' transfer RNA (tRNA) half
gggagaccgggg

SEQ ID NO: 20350 - DNA, 7 bp, Artificial Sequence
  synthetic circulating small noncoding RNA (sncRNA) 5' transfer RNA (tRNA) half
cacggcg

SEQ ID NO: 20351 - DNA, 24 bp, Artificial Sequence
  synthetic circulating small noncoding RNA (sncRNA) 5' transfer RNA (tRNA) half
agccagccaggagtcgaacctaga

SEQ ID NO: 20352 - DNA, 28 bp, Artificial Sequence
  synthetic circulating small noncoding RNA (sncRNA) 5' transfer RNA (tRNA) half
gtcaaatgctctaccactgagctatacc

SEQ ID NO: 20353 - DNA, 19 bp, Artificial Sequence
  synthetic circulating small noncoding RNA (sncRNA) 5' transfer RNA (tRNA) half
taatggttagcactctgga

SEQ ID NO: 20354 - DNA, 22 bp, Artificial Sequence
  synthetic circulating small noncoding RNA (sncRNA) 5' transfer RNA (tRNA) half
ctaggggtatgattctcggttt

SEQ ID NO: 20355 - DNA, 31 bp, Artificial Sequence
  synthetic circulating small noncoding RNA (sncRNA) 5' transfer RNA (tRNA) half
cccaacgtggggctcgaacccacgaccctga

SEQ ID NO: 20356 - DNA, 19 bp, Artificial Sequence
  synthetic circulating small noncoding RNA (sncRNA) 5' transfer RNA (tRNA) half
tctgtcgtccctgggtggg

SEQ ID NO: 20357 - DNA, 8 bp, Artificial Sequence
  synthetic circulating small noncoding RNA (sncRNA) 5' transfer RNA (tRNA) half
ctggccgg

SEQ ID NO: 20358 - DNA, 10 bp, Artificial Sequence
  synthetic circulating small noncoding RNA (sncRNA) 5' transfer RNA (tRNA) half
cgagaccgtc

SEQ ID NO: 20359 - DNA, 12 bp, Artificial Sequence
  synthetic circulating small noncoding RNA (sncRNA) 5' transfer RNA (tRNA) half
ccgggccgcggc

SEQ ID NO: 20360 - DNA, 18 bp, Artificial Sequence
  synthetic circulating small noncoding RNA (sncRNA) 5' transfer RNA (tRNA) half
cgaatcccagcggggcct

SEQ ID NO: 20361 - DNA, 19 bp, Artificial Sequence
  synthetic circulating small noncoding RNA (sncRNA) 5' transfer RNA (tRNA) half
gaaccggggacctcttgat

SEQ ID NO: 20362 - DNA, 22 bp, Artificial Sequence
  synthetic circulating small noncoding RNA (sncRNA) 5' transfer RNA (tRNA) half
ccccggtctcccgcgtgacagg

SEQ ID NO: 20363 - DNA, 20 bp, Artificial Sequence
  synthetic circulating small noncoding RNA (sncRNA) 5' transfer RNA (tRNA) half
cagtggtagagcgcatgctt

SEQ ID NO: 20364 - DNA, 36 bp, Artificial Sequence
  synthetic circulating small noncoding RNA (sncRNA) 5' transfer RNA (tRNA) half
cggatcgctggattcagagtccagagtgctaaccat

SEQ ID NO: 20365 - DNA, 33 bp, Artificial Sequence
  synthetic circulating small noncoding RNA (sncRNA) 5' transfer RNA (tRNA) half
ccgctgggattcgaacccaggatctcctgttta

SEQ ID NO: 20366 - DNA, 16 bp, Artificial Sequence
  synthetic circulating small noncoding RNA (sncRNA) 5' transfer RNA (tRNA) half
cctgggtgggctcgaa

SEQ ID NO: 20367 - DNA, 31 bp, Artificial Sequence
  synthetic circulating small noncoding RNA (sncRNA) 5' transfer RNA (tRNA) half
ggttaggattcggcgctctcaccgccgcggc

SEQ ID NO: 20368 - DNA, 16 bp, Artificial Sequence
  synthetic circulating small noncoding RNA (sncRNA) 5' transfer RNA (tRNA) half
agtcggtagagcatca

SEQ ID NO: 20369 - DNA, 16 bp, Artificial Sequence
  synthetic circulating small noncoding RNA (sncRNA) 5' transfer RNA (tRNA) half
agtatccccgcctgtc

SEQ ID NO: 20370 - DNA, 25 bp, Artificial Sequence
  synthetic circulating small noncoding RNA (sncRNA) 5' transfer RNA (tRNA) half
gccccctctgaggttcgaactcagg

SEQ ID NO: 20371 - DNA, 33 bp, Artificial Sequence
  synthetic circulating small noncoding RNA (sncRNA) 5' transfer RNA (tRNA) half
ggcgtccctgggtgggctcgaaccaccaacctt

SEQ ID NO: 20372 - DNA, 17 bp, Artificial Sequence
  synthetic circulating small noncoding RNA (sncRNA) 5' transfer RNA (tRNA) half
tcgggtgcgagaggtcc

SEQ ID NO: 20373 - DNA, 38 bp, Artificial Sequence
  synthetic circulating small noncoding RNA (sncRNA) 5' transfer RNA (tRNA) half
tcggggaatcgaaccccggtctcccgcgtgacaggcgg

SEQ ID NO: 20374 - DNA, 17 bp, Artificial Sequence
  synthetic circulating small noncoding RNA (sncRNA) 5' transfer RNA (tRNA) half
cgtctccccgtcgggga

SEQ ID NO: 20375 - DNA, 14 bp, Artificial Sequence
  synthetic circulating small noncoding RNA (sncRNA) 5' transfer RNA (tRNA) half
cgcaaccttctgat

SEQ ID NO: 20376 - DNA, 31 bp, Artificial Sequence
  synthetic circulating small noncoding RNA (sncRNA) 5' transfer RNA (tRNA) half
gcttccctgaccgggaatcgaacccgggccg

SEQ ID NO: 20377 - DNA, 17 bp, Artificial Sequence
  synthetic circulating small noncoding RNA (sncRNA) 5' transfer RNA (tRNA) half
gcgccttagaccgctcg

SEQ ID NO: 20378 - DNA, 15 bp, Artificial Sequence
  synthetic circulating small noncoding RNA (sncRNA) 5' transfer RNA (tRNA) half
gaacccacgcctcca

SEQ ID NO: 20379 - DNA, 13 bp, Artificial Sequence
  synthetic circulating small noncoding RNA (sncRNA) 5' transfer RNA (tRNA) half
cgcttcgggtgcg

SEQ ID NO: 20380 - DNA, 15 bp, Artificial Sequence
  synthetic circulating small noncoding RNA (sncRNA) 5' transfer RNA (tRNA) half
gccgcccgaacaggg

SEQ ID NO: 20381 - DNA, 44 bp, Artificial Sequence
  synthetic circulating small noncoding RNA (sncRNA) 5' transfer RNA (tRNA) half
cttccaagcagttgacccgggttcgattcccggccaacgcataa

SEQ ID NO: 20382 - DNA, 12 bp, Artificial Sequence
  synthetic circulating small noncoding RNA (sncRNA) 5' transfer RNA (tRNA) half
ttgcgccacgag

SEQ ID NO: 20383 - DNA, 8 bp, Artificial Sequence
  synthetic circulating small noncoding RNA (sncRNA) 5' transfer RNA (tRNA) half
aggttcga

SEQ ID NO: 20384 - DNA, 35 bp, Artificial Sequence
  synthetic circulating small noncoding RNA (sncRNA) 5' transfer RNA (tRNA) half
gtttccctagtgtagtggttatcacgttcgcctca

SEQ ID NO: 20385 - DNA, 15 bp, Artificial Sequence
  synthetic circulating small noncoding RNA (sncRNA) 5' transfer RNA (tRNA) half
gcttccgctgcgcca

SEQ ID NO: 20386 - DNA, 11 bp, Artificial Sequence
  synthetic circulating small noncoding RNA (sncRNA) 5' transfer RNA (tRNA) half
cggcgccgccc

SEQ ID NO: 20387 - DNA, 30 bp, Artificial Sequence
  synthetic circulating small noncoding RNA (sncRNA) 5' transfer RNA (tRNA) half
agattaaaagtctgatgctctaccaactga

SEQ ID NO: 20388 - DNA, 30 bp, Artificial Sequence
  synthetic circulating small noncoding RNA (sncRNA) 5' transfer RNA (tRNA) half
agagtccagagtgctaaccattacaccatg

SEQ ID NO: 20389 - DNA, 35 bp, Artificial Sequence
  synthetic circulating small noncoding RNA (sncRNA) 5' transfer RNA (tRNA) half
ggccccatggtgtaatggttagcactctggacttt

SEQ ID NO: 20390 - DNA, 17 bp, Artificial Sequence
  synthetic circulating small noncoding RNA (sncRNA) 5' transfer RNA (tRNA) half
gtttcggcagtgatttt

SEQ ID NO: 20391 - DNA, 32 bp, Artificial Sequence
  synthetic circulating small noncoding RNA (sncRNA) 5' transfer RNA (tRNA) half
cattggccgggaatcaaacccgggcctcccgc

SEQ ID NO: 20392 - DNA, 22 bp, Artificial Sequence
  synthetic circulating small noncoding RNA (sncRNA) 5' transfer RNA (tRNA) half
tctaccattgaaccaccaatgc

SEQ ID NO: 20393 - DNA, 22 bp, Artificial Sequence
  synthetic circulating small noncoding RNA (sncRNA) 5' transfer RNA (tRNA) half
aaaccgggcggaaacaatgact

SEQ ID NO: 20394 - DNA, 30 bp, Artificial Sequence
  synthetic circulating small noncoding RNA (sncRNA) 5' transfer RNA (tRNA) half
gattcagagtccagagtgctaaccattaca

SEQ ID NO: 20395 - DNA, 23 bp, Artificial Sequence
  synthetic circulating small noncoding RNA (sncRNA) 5' transfer RNA (tRNA) half
ggaatcgaacccgggcctcccgc

SEQ ID NO: 20396 - DNA, 5 bp, Artificial Sequence
  synthetic circulating small noncoding RNA (sncRNA) 5' transfer RNA (tRNA) half
ggtcg

SEQ ID NO: 20397 - DNA, 23 bp, Artificial Sequence
  synthetic circulating small noncoding RNA (sncRNA) 5' transfer RNA (tRNA) half
caccaacctttcggttaacagcc

SEQ ID NO: 20398 - DNA, 27 bp, Artificial Sequence
  synthetic circulating small noncoding RNA (sncRNA) 5' transfer RNA (tRNA) half
gggggtatagctcaggggtggagcatt

SEQ ID NO: 20399 - DNA, 19 bp, Artificial Sequence
  synthetic circulating small noncoding RNA (sncRNA) 5' transfer RNA (tRNA) half
gcagcgccttagaccgctc

SEQ ID NO: 20400 - DNA, 12 bp, Artificial Sequence
  synthetic circulating small noncoding RNA (sncRNA) 5' transfer RNA (tRNA) half
cagacgcgctac

SEQ ID NO: 20401 - DNA, 37 bp, Artificial Sequence
  synthetic circulating small noncoding RNA (sncRNA) 5' transfer RNA (tRNA) half
gaactcggatcgctggattcaaagtccagagtgctaa

SEQ ID NO: 20402 - DNA, 17 bp, Artificial Sequence
  synthetic circulating small noncoding RNA (sncRNA) 5' transfer RNA (tRNA) half
aaccagggacctcttga

SEQ ID NO: 20403 - DNA, 18 bp, Artificial Sequence
  synthetic circulating small noncoding RNA (sncRNA) 5' transfer RNA (tRNA) half
gagcgccaaatcctaacc

SEQ ID NO: 20404 - DNA, 33 bp, Artificial Sequence
  synthetic circulating small noncoding RNA (sncRNA) 5' transfer RNA (tRNA) half
gttccttcgagccggattcgaaccagcgaccta

SEQ ID NO: 20405 - DNA, 24 bp, Artificial Sequence
  synthetic circulating small noncoding RNA (sncRNA) 5' transfer RNA (tRNA) half
gtctccccgtcggggaatcgaacc

SEQ ID NO: 20406 - DNA, 19 bp, Artificial Sequence
  synthetic circulating small noncoding RNA (sncRNA) 5' transfer RNA (tRNA) half
aggcaagaattctaccact

SEQ ID NO: 20407 - DNA, 23 bp, Artificial Sequence
  synthetic circulating small noncoding RNA (sncRNA) 5' transfer RNA (tRNA) half
cttaaccactcggccaccgtgac

SEQ ID NO: 20408 - DNA, 13 bp, Artificial Sequence
  synthetic circulating small noncoding RNA (sncRNA) 5' transfer RNA (tRNA) half
cccatcctcgtcg

SEQ ID NO: 20409 - DNA, 22 bp, Artificial Sequence
  synthetic circulating small noncoding RNA (sncRNA) 5' transfer RNA (tRNA) half
cgacgaggatgggattcgaacc

SEQ ID NO: 20410 - DNA, 10 bp, Artificial Sequence
  synthetic circulating small noncoding RNA (sncRNA) 5' transfer RNA (tRNA) half
ttcggcgctc

SEQ ID NO: 20411 - DNA, 31 bp, Artificial Sequence
  synthetic circulating small noncoding RNA (sncRNA) 5' transfer RNA (tRNA) half
gcgacccgggttcgattcccgggcggcgcat

SEQ ID NO: 20412 - DNA, 31 bp, Artificial Sequence
  synthetic circulating small noncoding RNA (sncRNA) 5' transfer RNA (tRNA) half
tgccgaaacccgggatcgaaccagggacctt

SEQ ID NO: 20413 - DNA, 34 bp, Artificial Sequence
  synthetic circulating small noncoding RNA (sncRNA) 5' transfer RNA (tRNA) half
tgaactcggatcgctggattcagagtccagagtg

SEQ ID NO: 20414 - DNA, 15 bp, Artificial Sequence
  synthetic circulating small noncoding RNA (sncRNA) 5' transfer RNA (tRNA) half
gggggtgtagctcag

SEQ ID NO: 20415 - DNA, 18 bp, Artificial Sequence
  synthetic circulating small noncoding RNA (sncRNA) 5' transfer RNA (tRNA) half
gaatcctaaccactagac

SEQ ID NO: 20416 - DNA, 23 bp, Artificial Sequence
  synthetic circulating small noncoding RNA (sncRNA) 5' transfer RNA (tRNA) half
cgaatcctaaccactagaccacc

SEQ ID NO: 20417 - DNA, 18 bp, Artificial Sequence
  synthetic circulating small noncoding RNA (sncRNA) 5' transfer RNA (tRNA) half
cgtgataaccgctacact

SEQ ID NO: 20418 - DNA, 12 bp, Artificial Sequence
  synthetic circulating small noncoding RNA (sncRNA) 5' transfer RNA (tRNA) half
caatggataacg

SEQ ID NO: 20419 - DNA, 34 bp, Artificial Sequence
  synthetic circulating small noncoding RNA (sncRNA) 5' transfer RNA (tRNA) half
cgaggccctgggttcgatccccagcacctccatt

SEQ ID NO: 20420 - DNA, 11 bp, Artificial Sequence
  synthetic circulating small noncoding RNA (sncRNA) 5' transfer RNA (tRNA) half
ttccccgacgg

SEQ ID NO: 20421 - DNA, 32 bp, Artificial Sequence
  synthetic circulating small noncoding RNA (sncRNA) 5' transfer RNA (tRNA) half
cagaagattccaggttcgactcctggctggct

SEQ ID NO: 20422 - DNA, 12 bp, Artificial Sequence
  synthetic circulating small noncoding RNA (sncRNA) 5' transfer RNA (tRNA) half
agagtactaacc

SEQ ID NO: 20423 - DNA, 15 bp, Artificial Sequence
  synthetic circulating small noncoding RNA (sncRNA) 5' transfer RNA (tRNA) half
gtggccgagcggtct

SEQ ID NO: 20424 - DNA, 21 bp, Artificial Sequence
  synthetic circulating small noncoding RNA (sncRNA) 5' transfer RNA (tRNA) half
cttagttggttaaagcgcctg

SEQ ID NO: 20425 - DNA, 20 bp, Artificial Sequence
  synthetic circulating small noncoding RNA (sncRNA) 5' transfer RNA (tRNA) half
cagttggtagagcggaggac

SEQ ID NO: 20426 - DNA, 26 bp, Artificial Sequence
  synthetic circulating small noncoding RNA (sncRNA) 5' transfer RNA (tRNA) half
actttgaatccagcgatccgagttca

SEQ ID NO: 20427 - DNA, 22 bp, Artificial Sequence
  synthetic circulating small noncoding RNA (sncRNA) 5' transfer RNA (tRNA) half
ggcaggcaagaattctaccact

SEQ ID NO: 20428 - DNA, 12 bp, Artificial Sequence
  synthetic circulating small noncoding RNA (sncRNA) 5' transfer RNA (tRNA) half
cctggttcgatc

SEQ ID NO: 20429 - DNA, 22 bp, Artificial Sequence
  synthetic circulating small noncoding RNA (sncRNA) 5' transfer RNA (tRNA) half
ttcgagccccagtggaaccacg

SEQ ID NO: 20430 - DNA, 10 bp, Artificial Sequence
  synthetic circulating small noncoding RNA (sncRNA) 5' transfer RNA (tRNA) half
ggacgagccc

SEQ ID NO: 20431 - DNA, 12 bp, Artificial Sequence
  synthetic circulating small noncoding RNA (sncRNA) 5' transfer RNA (tRNA) half
atccgggctctt

SEQ ID NO: 20432 - DNA, 33 bp, Artificial Sequence
  synthetic circulating small noncoding RNA (sncRNA) 5' transfer RNA (tRNA) half
tgaaggtcctgagttcgaacctcagagggggca

SEQ ID NO: 20433 - DNA, 5 bp, Artificial Sequence
  synthetic circulating small noncoding RNA (sncRNA) 5' transfer RNA (tRNA) half
ctgct

SEQ ID NO: 20434 - DNA, 32 bp, Artificial Sequence
  synthetic circulating small noncoding RNA (sncRNA) 5' transfer RNA (tRNA) half
tcagattaaaagtctgatgctctaccgactga

SEQ ID NO: 20435 - DNA, 18 bp, Artificial Sequence
  synthetic circulating small noncoding RNA (sncRNA) 5' transfer RNA (tRNA) half
atccctgcctgtcacgca

SEQ ID NO: 20436 - DNA, 19 bp, Artificial Sequence
  synthetic circulating small noncoding RNA (sncRNA) 5' transfer RNA (tRNA) half
gtttctgtagtgtagtggt

SEQ ID NO: 20437 - DNA, 26 bp, Artificial Sequence
  synthetic circulating small noncoding RNA (sncRNA) 5' transfer RNA (tRNA) half
cgtggcaggcgagaattctaccactg

SEQ ID NO: 20438 - DNA, 39 bp, Artificial Sequence
  synthetic circulating small noncoding RNA (sncRNA) 5' transfer RNA (tRNA) half
tgaactcggatcgctggattcagagtccagagtgctagc

SEQ ID NO: 20439 - DNA, 13 bp, Artificial Sequence
  synthetic circulating small noncoding RNA (sncRNA) 5' transfer RNA (tRNA) half
aacccaggatctc

SEQ ID NO: 20440 - DNA, 13 bp, Artificial Sequence
  synthetic circulating small noncoding RNA (sncRNA) 5' transfer RNA (tRNA) half
ggattcgaaccct

SEQ ID NO: 20441 - DNA, 25 bp, Artificial Sequence
  synthetic circulating small noncoding RNA (sncRNA) 5' transfer RNA (tRNA) half
gcaagaattctaccactgaaccacc

SEQ ID NO: 20442 - DNA, 19 bp, Artificial Sequence
  synthetic circulating small noncoding RNA (sncRNA) 5' transfer RNA (tRNA) half
ccccatcggggaatcgaac

SEQ ID NO: 20443 - DNA, 25 bp, Artificial Sequence
  synthetic circulating small noncoding RNA (sncRNA) 5' transfer RNA (tRNA) half
gagttcaaatctcggtggaacctgc

SEQ ID NO: 20444 - DNA, 32 bp, Artificial Sequence
  synthetic circulating small noncoding RNA (sncRNA) 5' transfer RNA (tRNA) half
ccttgctgggattcgaacccaggatctcctgt

SEQ ID NO: 20445 - DNA, 12 bp, Artificial Sequence
  synthetic circulating small noncoding RNA (sncRNA) 5' transfer RNA (tRNA) half
tcgaatccggct

SEQ ID NO: 20446 - DNA, 15 bp, Artificial Sequence
  synthetic circulating small noncoding RNA (sncRNA) 5' transfer RNA (tRNA) half
acctcagagggggca

SEQ ID NO: 20447 - DNA, 35 bp, Artificial Sequence
  synthetic circulating small noncoding RNA (sncRNA) 5' transfer RNA (tRNA) half
gcactctggactctgaatccagcgatccgagttca

SEQ ID NO: 20448 - DNA, 20 bp, Artificial Sequence
  synthetic circulating small noncoding RNA (sncRNA) 5' transfer RNA (tRNA) half
acccacgcccccgaagagac

SEQ ID NO: 20449 - DNA, 23 bp, Artificial Sequence
  synthetic circulating small noncoding RNA (sncRNA) 5' transfer RNA (tRNA) half
cgttgcgttggccgggaatcgaa

SEQ ID NO: 20450 - DNA, 19 bp, Artificial Sequence
  synthetic circulating small noncoding RNA (sncRNA) 5' transfer RNA (tRNA) half
ccggctcgaaggacttcgt

SEQ ID NO: 20451 - DNA, 13 bp, Artificial Sequence
  synthetic circulating small noncoding RNA (sncRNA) 5' transfer RNA (tRNA) half
gcgaccttggcgt

SEQ ID NO: 20452 - DNA, 21 bp, Artificial Sequence
  synthetic circulating small noncoding RNA (sncRNA) 5' transfer RNA (tRNA) half
ccggggacctttcgcgtgtga

SEQ ID NO: 20453 - DNA, 36 bp, Artificial Sequence
  synthetic circulating small noncoding RNA (sncRNA) 5' transfer RNA (tRNA) half
cataacccagaggtcgatggatcgaaaccatcctct

SEQ ID NO: 20454 - DNA, 13 bp, Artificial Sequence
  synthetic circulating small noncoding RNA (sncRNA) 5' transfer RNA (tRNA) half
ctaaccgctagac

SEQ ID NO: 20455 - DNA, 19 bp, Artificial Sequence
  synthetic circulating small noncoding RNA (sncRNA) 5' transfer RNA (tRNA) half
cccggccaatgcactctct

SEQ ID NO: 20456 - DNA, 33 bp, Artificial Sequence
  synthetic circulating small noncoding RNA (sncRNA) 5' transfer RNA (tRNA) half
gtgtaatggttagcactctggactctgaatcca

SEQ ID NO: 20457 - DNA, 32 bp, Artificial Sequence
  synthetic circulating small noncoding RNA (sncRNA) 5' transfer RNA (tRNA) half
caaacctgtagctgtttagcgacagagtggtt

SEQ ID NO: 20458 - DNA, 16 bp, Artificial Sequence
  synthetic circulating small noncoding RNA (sncRNA) 5' transfer RNA (tRNA) half
ggttagcgcgcggtac

SEQ ID NO: 20459 - DNA, 34 bp, Artificial Sequence
  synthetic circulating small noncoding RNA (sncRNA) 5' transfer RNA (tRNA) half
gtggcaggcgagaattctaccactgaaccaccaa

SEQ ID NO: 20460 - DNA, 12 bp, Artificial Sequence
  synthetic circulating small noncoding RNA (sncRNA) 5' transfer RNA (tRNA) half
ggggattagctc

SEQ ID NO: 20461 - DNA, 20 bp, Artificial Sequence
  synthetic circulating small noncoding RNA (sncRNA) 5' transfer RNA (tRNA) half
gggattaagagtcccatgct

SEQ ID NO: 20462 - DNA, 15 bp, Artificial Sequence
  synthetic circulating small noncoding RNA (sncRNA) 5' transfer RNA (tRNA) half
gccgcggcccgggtt

SEQ ID NO: 20463 - DNA, 14 bp, Artificial Sequence
  synthetic circulating small noncoding RNA (sncRNA) 5' transfer RNA (tRNA) half
tgagattaagagtc

SEQ ID NO: 20464 - DNA, 24 bp, Artificial Sequence
  synthetic circulating small noncoding RNA (sncRNA) 5' transfer RNA (tRNA) half
cgccgctggtgtagtggtatcatg

SEQ ID NO: 20465 - DNA, 26 bp, Artificial Sequence
  synthetic circulating small noncoding RNA (sncRNA) 5' transfer RNA (tRNA) half
aatcccggacgagccccatcttactt

SEQ ID NO: 20466 - DNA, 12 bp, Artificial Sequence
  synthetic circulating small noncoding RNA (sncRNA) 5' transfer RNA (tRNA) half
gaccgctcggcc

SEQ ID NO: 20467 - DNA, 27 bp, Artificial Sequence
  synthetic circulating small noncoding RNA (sncRNA) 5' transfer RNA (tRNA) half
ggtggagatgccggggatcgaacccgg

SEQ ID NO: 20468 - DNA, 36 bp, Artificial Sequence
  synthetic circulating small noncoding RNA (sncRNA) 5' transfer RNA (tRNA) half
ttagcgacagagtggttcaattccacctttcgggcg

SEQ ID NO: 20469 - DNA, 17 bp, Artificial Sequence
  synthetic circulating small noncoding RNA (sncRNA) 5' transfer RNA (tRNA) half
ggttcgaacccacgcgg

SEQ ID NO: 20470 - DNA, 30 bp, Artificial Sequence
  synthetic circulating small noncoding RNA (sncRNA) 5' transfer RNA (tRNA) half
gccttagaccactcggccatcctgacactt

SEQ ID NO: 20471 - DNA, 18 bp, Artificial Sequence
  synthetic circulating small noncoding RNA (sncRNA) 5' transfer RNA (tRNA) half
aaaccgggcggaaacatt

SEQ ID NO: 20472 - DNA, 23 bp, Artificial Sequence
  synthetic circulating small noncoding RNA (sncRNA) 5' transfer RNA (tRNA) half
tccattggggtttccccgcgcag

SEQ ID NO: 20473 - DNA, 38 bp, Artificial Sequence
  synthetic circulating small noncoding RNA (sncRNA) 5' transfer RNA (tRNA) half
gaacccgggccgcggcggtgagagcgccgaatcctaac

SEQ ID NO: 20474 - DNA, 12 bp, Artificial Sequence
  synthetic circulating small noncoding RNA (sncRNA) 5' transfer RNA (tRNA) half
cgaaccccggtc

SEQ ID NO: 20475 - DNA, 18 bp, Artificial Sequence
  synthetic circulating small noncoding RNA (sncRNA) 5' transfer RNA (tRNA) half
cgatccatcgacctctgg

SEQ ID NO: 20476 - DNA, 27 bp, Artificial Sequence
  synthetic circulating small noncoding RNA (sncRNA) 5' transfer RNA (tRNA) half
cggtctcccgcgtgacaggcggggata

SEQ ID NO: 20477 - DNA, 35 bp, Artificial Sequence
  synthetic circulating small noncoding RNA (sncRNA) 5' transfer RNA (tRNA) half
gggaggcgagaattctaccattgaactaccaatgc

SEQ ID NO: 20478 - DNA, 15 bp, Artificial Sequence
  synthetic circulating small noncoding RNA (sncRNA) 5' transfer RNA (tRNA) half
cgggtcaactgcttg

SEQ ID NO: 20479 - DNA, 12 bp, Artificial Sequence
  synthetic circulating small noncoding RNA (sncRNA) 5' transfer RNA (tRNA) half
atggccgagtgg

SEQ ID NO: 20480 - DNA, 10 bp, Artificial Sequence
  synthetic circulating small noncoding RNA (sncRNA) 5' transfer RNA (tRNA) half
attctcgctt

SEQ ID NO: 20481 - DNA, 15 bp, Artificial Sequence
  synthetic circulating small noncoding RNA (sncRNA) 5' transfer RNA (tRNA) half
ggtagagcgctcgct

SEQ ID NO: 20482 - DNA, 22 bp, Artificial Sequence
  synthetic circulating small noncoding RNA (sncRNA) 5' transfer RNA (tRNA) half
ggttcgattcccggtcagggaa

SEQ ID NO: 20483 - DNA, 9 bp, Artificial Sequence
  synthetic circulating small noncoding RNA (sncRNA) 5' transfer RNA (tRNA) half
cgagccgga

SEQ ID NO: 20484 - DNA, 23 bp, Artificial Sequence
  synthetic circulating small noncoding RNA (sncRNA) 5' transfer RNA (tRNA) half
ttcgaaccccgtccgtgcctgcc

SEQ ID NO: 20485 - DNA, 13 bp, Artificial Sequence
  synthetic circulating small noncoding RNA (sncRNA) 5' transfer RNA (tRNA) half
aacccacgcctcc

SEQ ID NO: 20486 - DNA, 23 bp, Artificial Sequence
  synthetic circulating small noncoding RNA (sncRNA) 5' transfer RNA (tRNA) half
cgtgataaccactacactacgga

SEQ ID NO: 20487 - DNA, 10 bp, Artificial Sequence
  synthetic circulating small noncoding RNA (sncRNA) 5' transfer RNA (tRNA) half
tggcggaaac

SEQ ID NO: 20488 - DNA, 14 bp, Artificial Sequence
  synthetic circulating small noncoding RNA (sncRNA) 5' transfer RNA (tRNA) half
ggcggtgagagcgc

SEQ ID NO: 20489 - DNA, 31 bp, Artificial Sequence
  synthetic circulating small noncoding RNA (sncRNA) 5' transfer RNA (tRNA) half
cgggcctcccgcgtggcaggcgagaattcta

SEQ ID NO: 20490 - DNA, 19 bp, Artificial Sequence
  synthetic circulating small noncoding RNA (sncRNA) 5' transfer RNA (tRNA) half
gaactcaggaccttcagat

SEQ ID NO: 20491 - DNA, 16 bp, Artificial Sequence
  synthetic circulating small noncoding RNA (sncRNA) 5' transfer RNA (tRNA) half
gagaggtagcgggatc

SEQ ID NO: 20492 - DNA, 33 bp, Artificial Sequence
  synthetic circulating small noncoding RNA (sncRNA) 5' transfer RNA (tRNA) half
tgtgaggatcgaactcacgaccttcagattatg

SEQ ID NO: 20493 - DNA, 19 bp, Artificial Sequence
  synthetic circulating small noncoding RNA (sncRNA) 5' transfer RNA (tRNA) half
tccggctcgaaggagacag

SEQ ID NO: 20494 - DNA, 27 bp, Artificial Sequence
  synthetic circulating small noncoding RNA (sncRNA) 5' transfer RNA (tRNA) half
cagagtgctaaccattacaccatggga

SEQ ID NO: 20495 - DNA, 9 bp, Artificial Sequence
  synthetic circulating small noncoding RNA (sncRNA) 5' transfer RNA (tRNA) half
cgggttcga

SEQ ID NO: 20496 - DNA, 17 bp, Artificial Sequence
  synthetic circulating small noncoding RNA (sncRNA) 5' transfer RNA (tRNA) half
ctcctggctggctcgtt

SEQ ID NO: 20497 - DNA, 15 bp, Artificial Sequence
  synthetic circulating small noncoding RNA (sncRNA) 5' transfer RNA (tRNA) half
ggcaggcgagaattc

SEQ ID NO: 20498 - DNA, 23 bp, Artificial Sequence
  synthetic circulating small noncoding RNA (sncRNA) 5' transfer RNA (tRNA) half
ggttcaatggtagaattctcgcc

SEQ ID NO: 20499 - DNA, 25 bp, Artificial Sequence
  synthetic circulating small noncoding RNA (sncRNA) 5' transfer RNA (tRNA) half
gctcagttggtagagcggaggactg

SEQ ID NO: 20500 - DNA, 18 bp, Artificial Sequence
  synthetic circulating small noncoding RNA (sncRNA) 5' transfer RNA (tRNA) half
ccacgaagggactcgaac

SEQ ID NO: 20501 - DNA, 14 bp, Artificial Sequence
  synthetic circulating small noncoding RNA (sncRNA) 5' transfer RNA (tRNA) half
ccgccgcggcccgg

SEQ ID NO: 20502 - DNA, 20 bp, Artificial Sequence
  synthetic circulating small noncoding RNA (sncRNA) 5' transfer RNA (tRNA) half
gtggctcgttggtctagggg

SEQ ID NO: 20503 - DNA, 26 bp, Artificial Sequence
  synthetic circulating small noncoding RNA (sncRNA) 5' transfer RNA (tRNA) half
tagtgtagtggtcatcacgctcgcct

SEQ ID NO: 20504 - DNA, 38 bp, Artificial Sequence
  synthetic circulating small noncoding RNA (sncRNA) 5' transfer RNA (tRNA) half
cctgaccgggaatcgaacccgggccgcggcggtgagag

SEQ ID NO: 20505 - DNA, 24 bp, Artificial Sequence
  synthetic circulating small noncoding RNA (sncRNA) 5' transfer RNA (tRNA) half
ctctaccgactgagctatccaggc

SEQ ID NO: 20506 - DNA, 12 bp, Artificial Sequence
  synthetic circulating small noncoding RNA (sncRNA) 5' transfer RNA (tRNA) half
ggggatactcac

SEQ ID NO: 20507 - DNA, 29 bp, Artificial Sequence
  synthetic circulating small noncoding RNA (sncRNA) 5' transfer RNA (tRNA) half
atgacctacagtcctccgctctaccaact

SEQ ID NO: 20508 - DNA, 37 bp, Artificial Sequence
  synthetic circulating small noncoding RNA (sncRNA) 5' transfer RNA (tRNA) half
gtcgaacccgggccgcctgggtgaaaaccaggaatcc

SEQ ID NO: 20509 - DNA, 23 bp, Artificial Sequence
  synthetic circulating small noncoding RNA (sncRNA) 5' transfer RNA (tRNA) half
ggcctcccgcgtggcaggcgaga

SEQ ID NO: 20510 - DNA, 19 bp, Artificial Sequence
  synthetic circulating small noncoding RNA (sncRNA) 5' transfer RNA (tRNA) half
gactgacgcgctgcctact

SEQ ID NO: 20511 - DNA, 39 bp, Artificial Sequence
  synthetic circulating small noncoding RNA (sncRNA) 5' transfer RNA (tRNA) half
aggcggtggttccatggtgtaatggttagcactctggac

SEQ ID NO: 20512 - DNA, 8 bp, Artificial Sequence
  synthetic circulating small noncoding RNA (sncRNA) 5' transfer RNA (tRNA) half
gccgggaa

SEQ ID NO: 20513 - DNA, 16 bp, Artificial Sequence
  synthetic circulating small noncoding RNA (sncRNA) 5' transfer RNA (tRNA) half
cgcaggttcgaatcct

SEQ ID NO: 20514 - DNA, 41 bp, Artificial Sequence
  synthetic circulating small noncoding RNA (sncRNA) 5' transfer RNA (tRNA) half
ctcggatcgctggattcaaagtccagagtgctaaccattac

SEQ ID NO: 20515 - DNA, 12 bp, Artificial Sequence
  synthetic circulating small noncoding RNA (sncRNA) 5' transfer RNA (tRNA) half
gggttcgactcc

SEQ ID NO: 20516 - DNA, 21 bp, Artificial Sequence
  synthetic circulating small noncoding RNA (sncRNA) 5' transfer RNA (tRNA) half
ggtctcccgcgtgacaggcgg

SEQ ID NO: 20517 - DNA, 19 bp, Artificial Sequence
  synthetic circulating small noncoding RNA (sncRNA) 5' transfer RNA (tRNA) half
accattgaactaccaatgc

SEQ ID NO: 20518 - DNA, 34 bp, Artificial Sequence
  synthetic circulating small noncoding RNA (sncRNA) 5' transfer RNA (tRNA) half
cgcggcccgggttcgattcccggtcagggaagca

SEQ ID NO: 20519 - DNA, 12 bp, Artificial Sequence
  synthetic circulating small noncoding RNA (sncRNA) 5' transfer RNA (tRNA) half
atcacgctcgcc

SEQ ID NO: 20520 - DNA, 25 bp, Artificial Sequence
  synthetic circulating small noncoding RNA (sncRNA) 5' transfer RNA (tRNA) half
gtgtgtcaggatggccgagtggtct

SEQ ID NO: 20521 - DNA, 33 bp, Artificial Sequence
  synthetic circulating small noncoding RNA (sncRNA) 5' transfer RNA (tRNA) half
ggtagaattctcgcctgccacgcgggaggcccg

SEQ ID NO: 20522 - DNA, 25 bp, Artificial Sequence
  synthetic circulating small noncoding RNA (sncRNA) 5' transfer RNA (tRNA) half
caggaatcctaaccgctagaccata

SEQ ID NO: 20523 - DNA, 17 bp, Artificial Sequence
  synthetic circulating small noncoding RNA (sncRNA) 5' transfer RNA (tRNA) half
tcctgctcacagcgcta

SEQ ID NO: 20524 - DNA, 38 bp, Artificial Sequence
  synthetic circulating small noncoding RNA (sncRNA) 5' transfer RNA (tRNA) half
ttagcactctggactctgaatccagcgatccgagttca

SEQ ID NO: 20525 - DNA, 16 bp, Artificial Sequence
  synthetic circulating small noncoding RNA (sncRNA) 5' transfer RNA (tRNA) half
aaacaacttccgcccg

SEQ ID NO: 20526 - DNA, 41 bp, Artificial Sequence
  synthetic circulating small noncoding RNA (sncRNA) 5' transfer RNA (tRNA) half
ctccccgtcggggaatcgaaccccggtctcccgcgtgacag

SEQ ID NO: 20527 - DNA, 13 bp, Artificial Sequence
  synthetic circulating small noncoding RNA (sncRNA) 5' transfer RNA (tRNA) half
aaccagggacctt

SEQ ID NO: 20528 - DNA, 21 bp, Artificial Sequence
  synthetic circulating small noncoding RNA (sncRNA) 5' transfer RNA (tRNA) half
caaatcacgtcggggtcatct

SEQ ID NO: 20529 - DNA, 38 bp, Artificial Sequence
  synthetic circulating small noncoding RNA (sncRNA) 5' transfer RNA (tRNA) half
cagcgaccacgaagggactcgaacccccaatcttctga

SEQ ID NO: 20530 - DNA, 25 bp, Artificial Sequence
  synthetic circulating small noncoding RNA (sncRNA) 5' transfer RNA (tRNA) half
cccgggttcaaatcccggacgagcc

SEQ ID NO: 20531 - DNA, 27 bp, Artificial Sequence
  synthetic circulating small noncoding RNA (sncRNA) 5' transfer RNA (tRNA) half
ttccgcccgaacagggacttgaaccct

SEQ ID NO: 20532 - DNA, 23 bp, Artificial Sequence
  synthetic circulating small noncoding RNA (sncRNA) 5' transfer RNA (tRNA) half
ggactcgaacccccaatcttctg

SEQ ID NO: 20533 - DNA, 19 bp, Artificial Sequence
  synthetic circulating small noncoding RNA (sncRNA) 5' transfer RNA (tRNA) half
ggttccttcgagccggatt

SEQ ID NO: 20534 - DNA, 21 bp, Artificial Sequence
  synthetic circulating small noncoding RNA (sncRNA) 5' transfer RNA (tRNA) half
accgagtcctaaccactatac

SEQ ID NO: 20535 - DNA, 24 bp, Artificial Sequence
  synthetic circulating small noncoding RNA (sncRNA) 5' transfer RNA (tRNA) half
tctcgtaaaccgaagatcgcgggt

SEQ ID NO: 20536 - DNA, 19 bp, Artificial Sequence
  synthetic circulating small noncoding RNA (sncRNA) 5' transfer RNA (tRNA) half
accagcgacctaaggattt

SEQ ID NO: 20537 - DNA, 21 bp, Artificial Sequence
  synthetic circulating small noncoding RNA (sncRNA) 5' transfer RNA (tRNA) half
cgttccttcgagccggattcg

SEQ ID NO: 20538 - DNA, 44 bp, Artificial Sequence
  synthetic circulating small noncoding RNA (sncRNA) 5' transfer RNA (tRNA) half
gaacccacgaccctgagattaagagtctcatgctctaccgactg

SEQ ID NO: 20539 - DNA, 26 bp, Artificial Sequence
  synthetic circulating small noncoding RNA (sncRNA) 5' transfer RNA (tRNA) half
tgaacccgggacctctcgcacccaaa

SEQ ID NO: 20540 - DNA, 27 bp, Artificial Sequence
  synthetic circulating small noncoding RNA (sncRNA) 5' transfer RNA (tRNA) half
gtaatggttagcactctggactctgaa

SEQ ID NO: 20541 - DNA, 28 bp, Artificial Sequence
  synthetic circulating small noncoding RNA (sncRNA) 5' transfer RNA (tRNA) half
gagcgtgatgaccactacactacggaaa

SEQ ID NO: 20542 - DNA, 39 bp, Artificial Sequence
  synthetic circulating small noncoding RNA (sncRNA) 5' transfer RNA (tRNA) half
aacgccaaggtcgcgggttcgatccccgtacgggccaca

SEQ ID NO: 20543 - DNA, 13 bp, Artificial Sequence
  synthetic circulating small noncoding RNA (sncRNA) 5' transfer RNA (tRNA) half
actgagctatccg

SEQ ID NO: 20544 - DNA, 44 bp, Artificial Sequence
  synthetic circulating small noncoding RNA (sncRNA) 5' transfer RNA (tRNA) half
ttcgagccccagtggaaccatagctgcaaagccagctgacattt

SEQ ID NO: 20545 - DNA, 34 bp, Artificial Sequence
  synthetic circulating small noncoding RNA (sncRNA) 5' transfer RNA (tRNA) half
cgtagtcggcaggattcgaacctgcgcggggaaa

SEQ ID NO: 20546 - DNA, 18 bp, Artificial Sequence
  synthetic circulating small noncoding RNA (sncRNA) 5' transfer RNA (tRNA) half
tctgagggtccagggttc

SEQ ID NO: 20547 - DNA, 28 bp, Artificial Sequence
  synthetic circulating small noncoding RNA (sncRNA) 5' transfer RNA (tRNA) half
acgttcgcctcacacgcgaaaggtcccc

SEQ ID NO: 20548 - DNA, 12 bp, Artificial Sequence
  synthetic circulating small noncoding RNA (sncRNA) 5' transfer RNA (tRNA) half
gtctccccgtcg

SEQ ID NO: 20549 - DNA, 30 bp, Artificial Sequence
  synthetic circulating small noncoding RNA (sncRNA) 5' transfer RNA (tRNA) half
acaggagatcctgggttcgaatcccagcgg

SEQ ID NO: 20550 - DNA, 9 bp, Artificial Sequence
  synthetic circulating small noncoding RNA (sncRNA) 5' transfer RNA (tRNA) half
gccgccccc

SEQ ID NO: 20551 - DNA, 13 bp, Artificial Sequence
  synthetic circulating small noncoding RNA (sncRNA) 5' transfer RNA (tRNA) half
ctgagctaaccgg

SEQ ID NO: 20552 - DNA, 12 bp, Artificial Sequence
  synthetic circulating small noncoding RNA (sncRNA) 5' transfer RNA (tRNA) half
tccaatgcgcta

SEQ ID NO: 20553 - DNA, 38 bp, Artificial Sequence
  synthetic circulating small noncoding RNA (sncRNA) 5' transfer RNA (tRNA) half
ccgaccacgaagggactcgaaccctcaatcttctgatc

SEQ ID NO: 20554 - DNA, 24 bp, Artificial Sequence
  synthetic circulating small noncoding RNA (sncRNA) 5' transfer RNA (tRNA) half
gggtggcaggcaagaattctacca

SEQ ID NO: 20555 - DNA, 12 bp, Artificial Sequence
  synthetic circulating small noncoding RNA (sncRNA) 5' transfer RNA (tRNA) half
gtggttcagtgg

SEQ ID NO: 20556 - DNA, 38 bp, Artificial Sequence
  synthetic circulating small noncoding RNA (sncRNA) 5' transfer RNA (tRNA) half
tgaccccgacgtgacttgaacacgcaaccttctgatct

SEQ ID NO: 20557 - DNA, 15 bp, Artificial Sequence
  synthetic circulating small noncoding RNA (sncRNA) 5' transfer RNA (tRNA) half
actgccgaaacccgg

SEQ ID NO: 20558 - DNA, 16 bp, Artificial Sequence
  synthetic circulating small noncoding RNA (sncRNA) 5' transfer RNA (tRNA) half
tagtgtagcggttatc

SEQ ID NO: 20559 - DNA, 42 bp, Artificial Sequence
  synthetic circulating small noncoding RNA (sncRNA) 5' transfer RNA (tRNA) half
ctggcagcggtgggattcgaacccacgcccccgaagagactg

SEQ ID NO: 20560 - DNA, 18 bp, Artificial Sequence
  synthetic circulating small noncoding RNA (sncRNA) 5' transfer RNA (tRNA) half
cgaacccgggtcaactgc

SEQ ID NO: 20561 - DNA, 29 bp, Artificial Sequence
  synthetic circulating small noncoding RNA (sncRNA) 5' transfer RNA (tRNA) half
cgtgttaggcgagcgtgatgaccactaca

SEQ ID NO: 20562 - DNA, 21 bp, Artificial Sequence
  synthetic circulating small noncoding RNA (sncRNA) 5' transfer RNA (tRNA) half
ataacccagaggtcgatggat

SEQ ID NO: 20563 - DNA, 15 bp, Artificial Sequence
  synthetic circulating small noncoding RNA (sncRNA) 5' transfer RNA (tRNA) half
accctggaccctcag

SEQ ID NO: 20564 - DNA, 15 bp, Artificial Sequence
  synthetic circulating small noncoding RNA (sncRNA) 5' transfer RNA (tRNA) half
gttaggattcctggt

SEQ ID NO: 20565 - DNA, 27 bp, Artificial Sequence
  synthetic circulating small noncoding RNA (sncRNA) 5' transfer RNA (tRNA) half
agacgacgaaggtgggattcgaaccca

SEQ ID NO: 20566 - DNA, 42 bp, Artificial Sequence
  synthetic circulating small noncoding RNA (sncRNA) 5' transfer RNA (tRNA) half
actcttaatctcagggtcgtgggttcgagccccacgttgggc

SEQ ID NO: 20567 - DNA, 36 bp, Artificial Sequence
  synthetic circulating small noncoding RNA (sncRNA) 5' transfer RNA (tRNA) half
tcccataccgggagtcgaacccgggccgcctgggtg

SEQ ID NO: 20568 - DNA, 21 bp, Artificial Sequence
  synthetic circulating small noncoding RNA (sncRNA) 5' transfer RNA (tRNA) half
ttgggtgcgagaggtcccggg

SEQ ID NO: 20569 - DNA, 26 bp, Artificial Sequence
  synthetic circulating small noncoding RNA (sncRNA) 5' transfer RNA (tRNA) half
cgacgaggatgggattcgaacccacg

SEQ ID NO: 20570 - DNA, 22 bp, Artificial Sequence
  synthetic circulating small noncoding RNA (sncRNA) 5' transfer RNA (tRNA) half
aggcccgggttcgattcccggc

SEQ ID NO: 20571 - DNA, 16 bp, Artificial Sequence
  synthetic circulating small noncoding RNA (sncRNA) 5' transfer RNA (tRNA) half
ggttatcacgctcgcc

SEQ ID NO: 20572 - DNA, 22 bp, Artificial Sequence
  synthetic circulating small noncoding RNA (sncRNA) 5' transfer RNA (tRNA) half
atgtttgggctcgtccgggatt

SEQ ID NO: 20573 - DNA, 12 bp, Artificial Sequence
  synthetic circulating small noncoding RNA (sncRNA) 5' transfer RNA (tRNA) half
atcacgtctgct

SEQ ID NO: 20574 - DNA, 19 bp, Artificial Sequence
  synthetic circulating small noncoding RNA (sncRNA) 5' transfer RNA (tRNA) half
ctcgcctgccacgcgggag

SEQ ID NO: 20575 - DNA, 32 bp, Artificial Sequence
  synthetic circulating small noncoding RNA (sncRNA) 5' transfer RNA (tRNA) half
tctcccacatggtctagcggttaggattcctg

SEQ ID NO: 20576 - DNA, 19 bp, Artificial Sequence
  synthetic circulating small noncoding RNA (sncRNA) 5' transfer RNA (tRNA) half
ggccttttaagccgtgagt

SEQ ID NO: 20577 - DNA, 11 bp, Artificial Sequence
  synthetic circulating small noncoding RNA (sncRNA) 5' transfer RNA (tRNA) half
aacccggaacc

SEQ ID NO: 20578 - DNA, 36 bp, Artificial Sequence
  synthetic circulating small noncoding RNA (sncRNA) 5' transfer RNA (tRNA) half
aaacaggagatcctgggttcgaatcccagcggtgcc

SEQ ID NO: 20579 - DNA, 18 bp, Artificial Sequence
  synthetic circulating small noncoding RNA (sncRNA) 5' transfer RNA (tRNA) half
gagtcgaacctggaatct

SEQ ID NO: 20580 - DNA, 37 bp, Artificial Sequence
  synthetic circulating small noncoding RNA (sncRNA) 5' transfer RNA (tRNA) half
tgtatgaggccccgggttcaatccccggcatctccaa

SEQ ID NO: 20581 - DNA, 17 bp, Artificial Sequence
  synthetic circulating small noncoding RNA (sncRNA) 5' transfer RNA (tRNA) half
cgtcgagccagccagga

SEQ ID NO: 20582 - DNA, 13 bp, Artificial Sequence
  synthetic circulating small noncoding RNA (sncRNA) 5' transfer RNA (tRNA) half
aggttcgaatcct

SEQ ID NO: 20583 - DNA, 11 bp, Artificial Sequence
  synthetic circulating small noncoding RNA (sncRNA) 5' transfer RNA (tRNA) half
cgaaccctcaa

SEQ ID NO: 20584 - DNA, 27 bp, Artificial Sequence
  synthetic circulating small noncoding RNA (sncRNA) 5' transfer RNA (tRNA) half
gggcccataacccagaggtcgatggat

SEQ ID NO: 20585 - DNA, 27 bp, Artificial Sequence
  synthetic circulating small noncoding RNA (sncRNA) 5' transfer RNA (tRNA) half
gccgggaatcgaacccgggtcacccgc

SEQ ID NO: 20586 - DNA, 31 bp, Artificial Sequence
  synthetic circulating small noncoding RNA (sncRNA) 5' transfer RNA (tRNA) half
gcgaaaggtccccggttcgaaaccgggcgga

SEQ ID NO: 20587 - DNA, 9 bp, Artificial Sequence
  synthetic circulating small noncoding RNA (sncRNA) 5' transfer RNA (tRNA) half
tcgtcccac

SEQ ID NO: 20588 - DNA, 23 bp, Artificial Sequence
  synthetic circulating small noncoding RNA (sncRNA) 5' transfer RNA (tRNA) half
gaaccggggacctttcgcgtgtg

SEQ ID NO: 20589 - DNA, 33 bp, Artificial Sequence
  synthetic circulating small noncoding RNA (sncRNA) 5' transfer RNA (tRNA) half
caccccaggtgggactcgaacccacaatccctg

SEQ ID NO: 20590 - DNA, 11 bp, Artificial Sequence
  synthetic circulating small noncoding RNA (sncRNA) 5' transfer RNA (tRNA) half
tcgtgagttcg

SEQ ID NO: 20591 - DNA, 31 bp, Artificial Sequence
  synthetic circulating small noncoding RNA (sncRNA) 5' transfer RNA (tRNA) half
cggttccatagtgtagcggttatcacgtctg

SEQ ID NO: 20592 - DNA, 23 bp, Artificial Sequence
  synthetic circulating small noncoding RNA (sncRNA) 5' transfer RNA (tRNA) half
cccagggacgaccacagcgactt

SEQ ID NO: 20593 - DNA, 13 bp, Artificial Sequence
  synthetic circulating small noncoding RNA (sncRNA) 5' transfer RNA (tRNA) half
attcgaaccagcg

SEQ ID NO: 20594 - DNA, 8 bp, Artificial Sequence
  synthetic circulating small noncoding RNA (sncRNA) 5' transfer RNA (tRNA) half
ttctcgcc

SEQ ID NO: 20595 - DNA, 34 bp, Artificial Sequence
  synthetic circulating small noncoding RNA (sncRNA) 5' transfer RNA (tRNA) half
gagggggcacccggatttgaaccagggacctctt

SEQ ID NO: 20596 - DNA, 19 bp, Artificial Sequence
  synthetic circulating small noncoding RNA (sncRNA) 5' transfer RNA (tRNA) half
gaacgtgataaccactaca

SEQ ID NO: 20597 - DNA, 20 bp, Artificial Sequence
  synthetic circulating small noncoding RNA (sncRNA) 5' transfer RNA (tRNA) half
ggttcgatccccgtacgggc

SEQ ID NO: 20598 - DNA, 13 bp, Artificial Sequence
  synthetic circulating small noncoding RNA (sncRNA) 5' transfer RNA (tRNA) half
gttatcacgttcg

SEQ ID NO: 20599 - DNA, 19 bp, Artificial Sequence
  synthetic circulating small noncoding RNA (sncRNA) 5' transfer RNA (tRNA) half
ggttcccggccaatgcata

SEQ ID NO: 20600 - DNA, 34 bp, Artificial Sequence
  synthetic circulating small noncoding RNA (sncRNA) 5' transfer RNA (tRNA) half
ggggcacccggatttgaaccggggacctcttgat

SEQ ID NO: 20601 - DNA, 36 bp, Artificial Sequence
  synthetic circulating small noncoding RNA (sncRNA) 5' transfer RNA (tRNA) half
tgactggagcctaaatccagcgccttagaccactcg

SEQ ID NO: 20602 - DNA, 27 bp, Artificial Sequence
  synthetic circulating small noncoding RNA (sncRNA) 5' transfer RNA (tRNA) half
gctcagctggtagagcggaggactgta

SEQ ID NO: 20603 - DNA, 13 bp, Artificial Sequence
  synthetic circulating small noncoding RNA (sncRNA) 5' transfer RNA (tRNA) half
atctcggtgggac

SEQ ID NO: 20604 - DNA, 16 bp, Artificial Sequence
  synthetic circulating small noncoding RNA (sncRNA) 5' transfer RNA (tRNA) half
ggggattgtgggttcg

SEQ ID NO: 20605 - DNA, 10 bp, Artificial Sequence
  synthetic circulating small noncoding RNA (sncRNA) 5' transfer RNA (tRNA) half
cggggatcga

SEQ ID NO: 20606 - DNA, 28 bp, Artificial Sequence
  synthetic circulating small noncoding RNA (sncRNA) 5' transfer RNA (tRNA) half
gaatgtgataaccactacactacggaaa

SEQ ID NO: 20607 - DNA, 34 bp, Artificial Sequence
  synthetic circulating small noncoding RNA (sncRNA) 5' transfer RNA (tRNA) half
cacatggtctagcggttaggattcctggttttca

SEQ ID NO: 20608 - DNA, 37 bp, Artificial Sequence
  synthetic circulating small noncoding RNA (sncRNA) 5' transfer RNA (tRNA) half
atggttagcactctggactctgaatccagcgatccga

SEQ ID NO: 20609 - DNA, 36 bp, Artificial Sequence
  synthetic circulating small noncoding RNA (sncRNA) 5' transfer RNA (tRNA) half
agtctaacgctctcccaactgagctatttcggcggc

SEQ ID NO: 20610 - DNA, 26 bp, Artificial Sequence
  synthetic circulating small noncoding RNA (sncRNA) 5' transfer RNA (tRNA) half
acgaggatgggattcgaacccacgcg

SEQ ID NO: 20611 - DNA, 28 bp, Artificial Sequence
  synthetic circulating small noncoding RNA (sncRNA) 5' transfer RNA (tRNA) half
agcgactctggtgggactcgaacccaca

SEQ ID NO: 20612 - DNA, 44 bp, Artificial Sequence
  synthetic circulating small noncoding RNA (sncRNA) 5' transfer RNA (tRNA) half
gcccaacgtggggctcgaacccacgaccctgagattaagagtct

SEQ ID NO: 20613 - DNA, 12 bp, Artificial Sequence
  synthetic circulating small noncoding RNA (sncRNA) 5' transfer RNA (tRNA) half
aaccccggtctc

SEQ ID NO: 20614 - DNA, 20 bp, Artificial Sequence
  synthetic circulating small noncoding RNA (sncRNA) 5' transfer RNA (tRNA) half
aggtcgatggatcgaaacca

SEQ ID NO: 20615 - DNA, 14 bp, Artificial Sequence
  synthetic circulating small noncoding RNA (sncRNA) 5' transfer RNA (tRNA) half
cggggatactaacc

SEQ ID NO: 20616 - DNA, 33 bp, Artificial Sequence
  synthetic circulating small noncoding RNA (sncRNA) 5' transfer RNA (tRNA) half
tggattcagagtccagagtgctaaccattacac

SEQ ID NO: 20617 - DNA, 36 bp, Artificial Sequence
  synthetic circulating small noncoding RNA (sncRNA) 5' transfer RNA (tRNA) half
acaacgcagagtactaaccactatacgatcacggcg

SEQ ID NO: 20618 - DNA, 14 bp, Artificial Sequence
  synthetic circulating small noncoding RNA (sncRNA) 5' transfer RNA (tRNA) half
gcgagcgctctacc

SEQ ID NO: 20619 - DNA, 31 bp, Artificial Sequence
  synthetic circulating small noncoding RNA (sncRNA) 5' transfer RNA (tRNA) half
gggacctctcgcacccaaagcgagaatcata

SEQ ID NO: 20620 - DNA, 25 bp, Artificial Sequence
  synthetic circulating small noncoding RNA (sncRNA) 5' transfer RNA (tRNA) half
ccgccgcggcccgggttcgattccc

SEQ ID NO: 20621 - DNA, 22 bp, Artificial Sequence
  synthetic circulating small noncoding RNA (sncRNA) 5' transfer RNA (tRNA) half
tggttcgatcccgggtttcggc

SEQ ID NO: 20622 - DNA, 42 bp, Artificial Sequence
  synthetic circulating small noncoding RNA (sncRNA) 5' transfer RNA (tRNA) half
ccatatggtctagcggttaggattcctggttttcacccaggc

SEQ ID NO: 20623 - DNA, 21 bp, Artificial Sequence
  synthetic circulating small noncoding RNA (sncRNA) 5' transfer RNA (tRNA) half
tcccaactgagctatttcggc

SEQ ID NO: 20624 - DNA, 37 bp, Artificial Sequence
  synthetic circulating small noncoding RNA (sncRNA) 5' transfer RNA (tRNA) half
tgacaggcggggatactaaccactatactaacgagga

SEQ ID NO: 20625 - DNA, 20 bp, Artificial Sequence
  synthetic circulating small noncoding RNA (sncRNA) 5' transfer RNA (tRNA) half
tgttaggcgaatgtgataac

SEQ ID NO: 20626 - DNA, 12 bp, Artificial Sequence
  synthetic circulating small noncoding RNA (sncRNA) 5' transfer RNA (tRNA) half
agaggtccccgg

SEQ ID NO: 20627 - DNA, 20 bp, Artificial Sequence
  synthetic circulating small noncoding RNA (sncRNA) 5' transfer RNA (tRNA) half
cagtctgtagagcatgagac

SEQ ID NO: 20628 - DNA, 29 bp, Artificial Sequence
  synthetic circulating small noncoding RNA (sncRNA) 5' transfer RNA (tRNA) half
aggcgagaattctaccattgaaccaccaa

SEQ ID NO: 20629 - DNA, 25 bp, Artificial Sequence
  synthetic circulating small noncoding RNA (sncRNA) 5' transfer RNA (tRNA) half
ggccccagcgagatttgaactcgcg

SEQ ID NO: 20630 - DNA, 18 bp, Artificial Sequence
  synthetic circulating small noncoding RNA (sncRNA) 5' transfer RNA (tRNA) half
tggccgagcggtctaagg

SEQ ID NO: 20631 - DNA, 18 bp, Artificial Sequence
  synthetic circulating small noncoding RNA (sncRNA) 5' transfer RNA (tRNA) half
ttcaaagtccagagtgct

SEQ ID NO: 20632 - DNA, 11 bp, Artificial Sequence
  synthetic circulating small noncoding RNA (sncRNA) 5' transfer RNA (tRNA) half
ttctcgcctgc

SEQ ID NO: 20633 - DNA, 15 bp, Artificial Sequence
  synthetic circulating small noncoding RNA (sncRNA) 5' transfer RNA (tRNA) half
tctggactctgaatc

SEQ ID NO: 20634 - DNA, 26 bp, Artificial Sequence
  synthetic circulating small noncoding RNA (sncRNA) 5' transfer RNA (tRNA) half
ggccggttagctcagttggttagagc

SEQ ID NO: 20635 - DNA, 22 bp, Artificial Sequence
  synthetic circulating small noncoding RNA (sncRNA) 5' transfer RNA (tRNA) half
aggcaagtgcattggccgggaa

SEQ ID NO: 20636 - DNA, 34 bp, Artificial Sequence
  synthetic circulating small noncoding RNA (sncRNA) 5' transfer RNA (tRNA) half
aggcgagaattctaccactgaaccaccaatgcca

SEQ ID NO: 20637 - DNA, 14 bp, Artificial Sequence
  synthetic circulating small noncoding RNA (sncRNA) 5' transfer RNA (tRNA) half
ccgctcggccacgc

SEQ ID NO: 20638 - DNA, 33 bp, Artificial Sequence
  synthetic circulating small noncoding RNA (sncRNA) 5' transfer RNA (tRNA) half
aggcgagaattctaccattgaaccaccaatgca

SEQ ID NO: 20639 - DNA, 20 bp, Artificial Sequence
  synthetic circulating small noncoding RNA (sncRNA) 5' transfer RNA (tRNA) half
gttccaccgagatttgaact

SEQ ID NO: 20640 - DNA, 29 bp, Artificial Sequence
  synthetic circulating small noncoding RNA (sncRNA) 5' transfer RNA (tRNA) half
cgaggccccgggttcaatccccggcacct

SEQ ID NO: 20641 - DNA, 31 bp, Artificial Sequence
  synthetic circulating small noncoding RNA (sncRNA) 5' transfer RNA (tRNA) half
cagaagtgggattcgaacccacgcctccatt

SEQ ID NO: 20642 - DNA, 12 bp, Artificial Sequence
  synthetic circulating small noncoding RNA (sncRNA) 5' transfer RNA (tRNA) half
ccgggccgcctg

SEQ ID NO: 20643 - DNA, 22 bp, Artificial Sequence
  synthetic circulating small noncoding RNA (sncRNA) 5' transfer RNA (tRNA) half
ggcgtccctgggtgggctcgaa

SEQ ID NO: 20644 - DNA, 17 bp, Artificial Sequence
  synthetic circulating small noncoding RNA (sncRNA) 5' transfer RNA (tRNA) half
gagtcctgccgcggtcg

SEQ ID NO: 20645 - DNA, 21 bp, Artificial Sequence
  synthetic circulating small noncoding RNA (sncRNA) 5' transfer RNA (tRNA) half
agatttgaactcgcgacccct

SEQ ID NO: 20646 - DNA, 20 bp, Artificial Sequence
  synthetic circulating small noncoding RNA (sncRNA) 5' transfer RNA (tRNA) half
gttcaaatccgggtgccccc

SEQ ID NO: 20647 - DNA, 6 bp, Artificial Sequence
  synthetic circulating small noncoding RNA (sncRNA) 5' transfer RNA (tRNA) half
cgaacc

SEQ ID NO: 20648 - DNA, 31 bp, Artificial Sequence
  synthetic circulating small noncoding RNA (sncRNA) 5' transfer RNA (tRNA) half
agagtccagagtgctaaccattacaccatgg

SEQ ID NO: 20649 - DNA, 23 bp, Artificial Sequence
  synthetic circulating small noncoding RNA (sncRNA) 5' transfer RNA (tRNA) half
taataacgccaaggtcgcgggtt

SEQ ID NO: 20650 - DNA, 21 bp, Artificial Sequence
  synthetic circulating small noncoding RNA (sncRNA) 5' transfer RNA (tRNA) half
tcggatcagaagattgagggt

SEQ ID NO: 20651 - DNA, 20 bp, Artificial Sequence
  synthetic circulating small noncoding RNA (sncRNA) 5' transfer RNA (tRNA) half
ggtcgatggatcgaaaccat

SEQ ID NO: 20652 - DNA, 13 bp, Artificial Sequence
  synthetic circulating small noncoding RNA (sncRNA) 5' transfer RNA (tRNA) half
cccgaacagggac

SEQ ID NO: 20653 - DNA, 18 bp, Artificial Sequence
  synthetic circulating small noncoding RNA (sncRNA) 5' transfer RNA (tRNA) half
cagtctgtagagcatgag

SEQ ID NO: 20654 - DNA, 18 bp, Artificial Sequence
  synthetic circulating small noncoding RNA (sncRNA) 5' transfer RNA (tRNA) half
tgtcagaagtgggattcg

SEQ ID NO: 20655 - DNA, 18 bp, Artificial Sequence
  synthetic circulating small noncoding RNA (sncRNA) 5' transfer RNA (tRNA) half
gcaagaattctaccactg

SEQ ID NO: 20656 - DNA, 38 bp, Artificial Sequence
  synthetic circulating small noncoding RNA (sncRNA) 5' transfer RNA (tRNA) half
tatacgtacaccctctaacctagagaaggttattaggg

SEQ ID NO: 20657 - DNA, 16 bp, Artificial Sequence
  synthetic circulating small noncoding RNA (sncRNA) 5' transfer RNA (tRNA) half
tccttaggtcgctggt

SEQ ID NO: 20658 - DNA, 11 bp, Artificial Sequence
  synthetic circulating small noncoding RNA (sncRNA) 5' transfer RNA (tRNA) half
agccagccagg

SEQ ID NO: 20659 - DNA, 11 bp, Artificial Sequence
  synthetic circulating small noncoding RNA (sncRNA) 5' transfer RNA (tRNA) half
ggtccccggtt

SEQ ID NO: 20660 - DNA, 20 bp, Artificial Sequence
  synthetic circulating small noncoding RNA (sncRNA) 5' transfer RNA (tRNA) half
ttcaattccacctttcgggc

SEQ ID NO: 20661 - DNA, 15 bp, Artificial Sequence
  synthetic circulating small noncoding RNA (sncRNA) 5' transfer RNA (tRNA) half
ggttcgactcccggt

SEQ ID NO: 20662 - DNA, 22 bp, Artificial Sequence
  synthetic circulating small noncoding RNA (sncRNA) 5' transfer RNA (tRNA) half
gcggaggactgtagtcagtaca

SEQ ID NO: 20663 - DNA, 13 bp, Artificial Sequence
  synthetic circulating small noncoding RNA (sncRNA) 5' transfer RNA (tRNA) half
ccgtatggaggcg

SEQ ID NO: 20664 - DNA, 16 bp, Artificial Sequence
  synthetic circulating small noncoding RNA (sncRNA) 5' transfer RNA (tRNA) half
gcgtgacaggcgggga

SEQ ID NO: 20665 - DNA, 32 bp, Artificial Sequence
  synthetic circulating small noncoding RNA (sncRNA) 5' transfer RNA (tRNA) half
tcggggaattgaaccccggtctcccgcgtgac

SEQ ID NO: 20666 - DNA, 23 bp, Artificial Sequence
  synthetic circulating small noncoding RNA (sncRNA) 5' transfer RNA (tRNA) half
gctctaccatttgagctaatccc

SEQ ID NO: 20667 - DNA, 25 bp, Artificial Sequence
  synthetic circulating small noncoding RNA (sncRNA) 5' transfer RNA (tRNA) half
tggtctagcggttaggattcctggt

SEQ ID NO: 20668 - DNA, 23 bp, Artificial Sequence
  synthetic circulating small noncoding RNA (sncRNA) 5' transfer RNA (tRNA) half
gccgaaatagctcagttgggaga

SEQ ID NO: 20669 - DNA, 19 bp, Artificial Sequence
  synthetic circulating small noncoding RNA (sncRNA) 5' transfer RNA (tRNA) half
aaatgttcccgcccggttt

SEQ ID NO: 20670 - DNA, 17 bp, Artificial Sequence
  synthetic circulating small noncoding RNA (sncRNA) 5' transfer RNA (tRNA) half
gagccccacgttgggcg

SEQ ID NO: 20671 - DNA, 25 bp, Artificial Sequence
  synthetic circulating small noncoding RNA (sncRNA) 5' transfer RNA (tRNA) half
agttcaaatctcggtggaacctgct

SEQ ID NO: 20672 - DNA, 16 bp, Artificial Sequence
  synthetic circulating small noncoding RNA (sncRNA) 5' transfer RNA (tRNA) half
gtcccatctgggtcgc

SEQ ID NO: 20673 - DNA, 15 bp, Artificial Sequence
  synthetic circulating small noncoding RNA (sncRNA) 5' transfer RNA (tRNA) half
cgcagaaggtcctgg

SEQ ID NO: 20674 - DNA, 17 bp, Artificial Sequence
  synthetic circulating small noncoding RNA (sncRNA) 5' transfer RNA (tRNA) half
gactgacgcgctaccta

SEQ ID NO: 20675 - DNA, 13 bp, Artificial Sequence
  synthetic circulating small noncoding RNA (sncRNA) 5' transfer RNA (tRNA) half
ggggtgtagctca

SEQ ID NO: 20676 - DNA, 12 bp, Artificial Sequence
  synthetic circulating small noncoding RNA (sncRNA) 5' transfer RNA (tRNA) half
cgagaattctac

SEQ ID NO: 20677 - DNA, 34 bp, Artificial Sequence
  synthetic circulating small noncoding RNA (sncRNA) 5' transfer RNA (tRNA) half
agcgagaatcatacccctagaccaacgagccgct

SEQ ID NO: 20678 - DNA, 19 bp, Artificial Sequence
  synthetic circulating small noncoding RNA (sncRNA) 5' transfer RNA (tRNA) half
ccccagcgagatttgaact

SEQ ID NO: 20679 - DNA, 19 bp, Artificial Sequence
  synthetic circulating small noncoding RNA (sncRNA) 5' transfer RNA (tRNA) half
tagcactctggactctgaa

SEQ ID NO: 20680 - DNA, 18 bp, Artificial Sequence
  synthetic circulating small noncoding RNA (sncRNA) 5' transfer RNA (tRNA) half
gtgttcccacaccgggag

SEQ ID NO: 20681 - DNA, 10 bp, Artificial Sequence
  synthetic circulating small noncoding RNA (sncRNA) 5' transfer RNA (tRNA) half
ggacctttcg

SEQ ID NO: 20682 - DNA, 36 bp, Artificial Sequence
  synthetic circulating small noncoding RNA (sncRNA) 5' transfer RNA (tRNA) half
acccgggacctctcgcaccctaagcgagaatcatac

SEQ ID NO: 20683 - DNA, 19 bp, Artificial Sequence
  synthetic circulating small noncoding RNA (sncRNA) 5' transfer RNA (tRNA) half
cgctctcaccgccgcggcc

SEQ ID NO: 20684 - DNA, 20 bp, Artificial Sequence
  synthetic circulating small noncoding RNA (sncRNA) 5' transfer RNA (tRNA) half
acctgtacggggaacgaacc

SEQ ID NO: 20685 - DNA, 24 bp, Artificial Sequence
  synthetic circulating small noncoding RNA (sncRNA) 5' transfer RNA (tRNA) half
ggccgagcggtctaaggcgctgcg

SEQ ID NO: 20686 - DNA, 15 bp, Artificial Sequence
  synthetic circulating small noncoding RNA (sncRNA) 5' transfer RNA (tRNA) half
cacaccgggagtcga

SEQ ID NO: 20687 - DNA, 27 bp, Artificial Sequence
  synthetic circulating small noncoding RNA (sncRNA) 5' transfer RNA (tRNA) half
caggcggggatactaaccactatacta

SEQ ID NO: 20688 - DNA, 30 bp, Artificial Sequence
  synthetic circulating small noncoding RNA (sncRNA) 5' transfer RNA (tRNA) half
ggagatcctgggttcgaatcccagcggggc

SEQ ID NO: 20689 - DNA, 36 bp, Artificial Sequence
  synthetic circulating small noncoding RNA (sncRNA) 5' transfer RNA (tRNA) half
cgcgaaaggtccccggttcgaaaccgggcggaaaca

SEQ ID NO: 20690 - DNA, 12 bp, Artificial Sequence
  synthetic circulating small noncoding RNA (sncRNA) 5' transfer RNA (tRNA) half
tggtggagatgc

SEQ ID NO: 20691 - DNA, 16 bp, Artificial Sequence
  synthetic circulating small noncoding RNA (sncRNA) 5' transfer RNA (tRNA) half
ggattcaaagtccaga

SEQ ID NO: 20692 - DNA, 17 bp, Artificial Sequence
  synthetic circulating small noncoding RNA (sncRNA) 5' transfer RNA (tRNA) half
ccactatacgatcacgg

SEQ ID NO: 20693 - DNA, 8 bp, Artificial Sequence
  synthetic circulating small noncoding RNA (sncRNA) 5' transfer RNA (tRNA) half
aggtcccg

SEQ ID NO: 20694 - DNA, 11 bp, Artificial Sequence
  synthetic circulating small noncoding RNA (sncRNA) 5' transfer RNA (tRNA) half
aggttcgactc

SEQ ID NO: 20695 - DNA, 8 bp, Artificial Sequence
  synthetic circulating small noncoding RNA (sncRNA) 5' transfer RNA (tRNA) half
gtttccgc

SEQ ID NO: 20696 - DNA, 18 bp, Artificial Sequence
  synthetic circulating small noncoding RNA (sncRNA) 5' transfer RNA (tRNA) half
aatccagcgatccgagtt

SEQ ID NO: 20697 - DNA, 11 bp, Artificial Sequence
  synthetic circulating small noncoding RNA (sncRNA) 5' transfer RNA (tRNA) half
tgagctatccg

SEQ ID NO: 20698 - DNA, 19 bp, Artificial Sequence
  synthetic circulating small noncoding RNA (sncRNA) 5' transfer RNA (tRNA) half
ttcgagtcccatctgggtc

SEQ ID NO: 20699 - DNA, 24 bp, Artificial Sequence
  synthetic circulating small noncoding RNA (sncRNA) 5' transfer RNA (tRNA) half
caggcgagaattctaccactgaac

SEQ ID NO: 20700 - DNA, 5 bp, Artificial Sequence
  synthetic circulating small noncoding RNA (sncRNA) 5' transfer RNA (tRNA) half
ccggg

SEQ ID NO: 20701 - DNA, 13 bp, Artificial Sequence
  synthetic circulating small noncoding RNA (sncRNA) 5' transfer RNA (tRNA) half
ggggttatagctc

SEQ ID NO: 20702 - DNA, 32 bp, Artificial Sequence
  synthetic circulating small noncoding RNA (sncRNA) 5' transfer RNA (tRNA) half
gagagcgccgaatcctaaccactagaccacca

SEQ ID NO: 20703 - DNA, 11 bp, Artificial Sequence
  synthetic circulating small noncoding RNA (sncRNA) 5' transfer RNA (tRNA) half
cgcgctaccta

SEQ ID NO: 20704 - DNA, 30 bp, Artificial Sequence
  synthetic circulating small noncoding RNA (sncRNA) 5' transfer RNA (tRNA) half
aagcgcccaacgtggggctcgaacccacga

SEQ ID NO: 20705 - DNA, 33 bp, Artificial Sequence
  synthetic circulating small noncoding RNA (sncRNA) 5' transfer RNA (tRNA) half
gggacctctcgcaccctaagcgagaatcatacc

SEQ ID NO: 20706 - DNA, 40 bp, Artificial Sequence
  synthetic circulating small noncoding RNA (sncRNA) 5' transfer RNA (tRNA) half
tactggcagcggtgggattcgaacccacgcccccgaagag

SEQ ID NO: 20707 - DNA, 15 bp, Artificial Sequence
  synthetic circulating small noncoding RNA (sncRNA) 5' transfer RNA (tRNA) half
ctgaatccagcgatc

SEQ ID NO: 20708 - DNA, 18 bp, Artificial Sequence
  synthetic circulating small noncoding RNA (sncRNA) 5' transfer RNA (tRNA) half
attcaaagtccagagtgc

SEQ ID NO: 20709 - DNA, 15 bp, Artificial Sequence
  synthetic circulating small noncoding RNA (sncRNA) 5' transfer RNA (tRNA) half
cgcgggtgacccggg

SEQ ID NO: 20710 - DNA, 16 bp, Artificial Sequence
  synthetic circulating small noncoding RNA (sncRNA) 5' transfer RNA (tRNA) half
gactcctggctggctc

SEQ ID NO: 20711 - DNA, 13 bp, Artificial Sequence
  synthetic circulating small noncoding RNA (sncRNA) 5' transfer RNA (tRNA) half
gtagagcgcgtgc

SEQ ID NO: 20712 - DNA, 15 bp, Artificial Sequence
  synthetic circulating small noncoding RNA (sncRNA) 5' transfer RNA (tRNA) half
ggattcagagtccag

SEQ ID NO: 20713 - DNA, 17 bp, Artificial Sequence
  synthetic circulating small noncoding RNA (sncRNA) 5' transfer RNA (tRNA) half
gagtggcgcagcggaag

SEQ ID NO: 20714 - DNA, 17 bp, Artificial Sequence
  synthetic circulating small noncoding RNA (sncRNA) 5' transfer RNA (tRNA) half
ggttgctgcggccacaa

SEQ ID NO: 20715 - DNA, 21 bp, Artificial Sequence
  synthetic circulating small noncoding RNA (sncRNA) 5' transfer RNA (tRNA) half
gttcgagccccacgttgggcg

SEQ ID NO: 20716 - DNA, 8 bp, Artificial Sequence
  synthetic circulating small noncoding RNA (sncRNA) 5' transfer RNA (tRNA) half
accgctgc

SEQ ID NO: 20717 - DNA, 17 bp, Artificial Sequence
  synthetic circulating small noncoding RNA (sncRNA) 5' transfer RNA (tRNA) half
tccccgtcggggaatcg

SEQ ID NO: 20718 - DNA, 7 bp, Artificial Sequence
  synthetic circulating small noncoding RNA (sncRNA) 5' transfer RNA (tRNA) half
cggccat

SEQ ID NO: 20719 - DNA, 39 bp, Artificial Sequence
  synthetic circulating small noncoding RNA (sncRNA) 5' transfer RNA (tRNA) half
gtaaacaggagatcctgggttcaaatcccagcggggcct

SEQ ID NO: 20720 - DNA, 18 bp, Artificial Sequence
  synthetic circulating small noncoding RNA (sncRNA) 5' transfer RNA (tRNA) half
gttcgagtcctgccgcgg

SEQ ID NO: 20721 - DNA, 13 bp, Artificial Sequence
  synthetic circulating small noncoding RNA (sncRNA) 5' transfer RNA (tRNA) half
ccagagtgctaac

SEQ ID NO: 20722 - DNA, 35 bp, Artificial Sequence
  synthetic circulating small noncoding RNA (sncRNA) 5' transfer RNA (tRNA) half
ctcccacatggtctagcggttaggattcctggttt

SEQ ID NO: 20723 - DNA, 34 bp, Artificial Sequence
  synthetic circulating small noncoding RNA (sncRNA) 5' transfer RNA (tRNA) half
gagtttccgtagtgtagtggttatcacgttcgcc

SEQ ID NO: 20724 - DNA, 19 bp, Artificial Sequence
  synthetic circulating small noncoding RNA (sncRNA) 5' transfer RNA (tRNA) half
tccccggcacctccagttt

SEQ ID NO: 20725 - DNA, 35 bp, Artificial Sequence
  synthetic circulating small noncoding RNA (sncRNA) 5' transfer RNA (tRNA) half
gtgtgaggtcccgggttcaatccccggcatctcca

SEQ ID NO: 20726 - DNA, 20 bp, Artificial Sequence
  synthetic circulating small noncoding RNA (sncRNA) 5' transfer RNA (tRNA) half
aaccgggcggaaacaaaagg

SEQ ID NO: 20727 - DNA, 29 bp, Artificial Sequence
  synthetic circulating small noncoding RNA (sncRNA) 5' transfer RNA (tRNA) half
taggcgaatgtgataaccactacactacg

SEQ ID NO: 20728 - DNA, 15 bp, Artificial Sequence
  synthetic circulating small noncoding RNA (sncRNA) 5' transfer RNA (tRNA) half
ccggatagctcagtc

SEQ ID NO: 20729 - DNA, 17 bp, Artificial Sequence
  synthetic circulating small noncoding RNA (sncRNA) 5' transfer RNA (tRNA) half
ccccgaagagactggag

SEQ ID NO: 20730 - DNA, 25 bp, Artificial Sequence
  synthetic circulating small noncoding RNA (sncRNA) 5' transfer RNA (tRNA) half
ccccgtcggggaatcgaaccccggt

SEQ ID NO: 20731 - DNA, 21 bp, Artificial Sequence
  synthetic circulating small noncoding RNA (sncRNA) 5' transfer RNA (tRNA) half
tgcagagtccagtcccttttg

SEQ ID NO: 20732 - DNA, 23 bp, Artificial Sequence
  synthetic circulating small noncoding RNA (sncRNA) 5' transfer RNA (tRNA) half
tcgactcccggtatgggaacagt

SEQ ID NO: 20733 - DNA, 31 bp, Artificial Sequence
  synthetic circulating small noncoding RNA (sncRNA) 5' transfer RNA (tRNA) half
acccgggcctcccgcgtggcaggcgagaatt

SEQ ID NO: 20734 - DNA, 37 bp, Artificial Sequence
  synthetic circulating small noncoding RNA (sncRNA) 5' transfer RNA (tRNA) half
ggggcctcatacatgcaaagcatgcgctctaccactg

SEQ ID NO: 20735 - DNA, 21 bp, Artificial Sequence
  synthetic circulating small noncoding RNA (sncRNA) 5' transfer RNA (tRNA) half
gtcgaacccgggccgcctggg

SEQ ID NO: 20736 - DNA, 23 bp, Artificial Sequence
  synthetic circulating small noncoding RNA (sncRNA) 5' transfer RNA (tRNA) half
gctctaccgactgagctatccag

SEQ ID NO: 20737 - DNA, 8 bp, Artificial Sequence
  synthetic circulating small noncoding RNA (sncRNA) 5' transfer RNA (tRNA) half
cccaggga

SEQ ID NO: 20738 - DNA, 11 bp, Artificial Sequence
  synthetic circulating small noncoding RNA (sncRNA) 5' transfer RNA (tRNA) half
gctcgcctaac

SEQ ID NO: 20739 - DNA, 28 bp, Artificial Sequence
  synthetic circulating small noncoding RNA (sncRNA) 5' transfer RNA (tRNA) half
tggcaggcgagaattctaccactgaacc

SEQ ID NO: 20740 - DNA, 7 bp, Artificial Sequence
  synthetic circulating small noncoding RNA (sncRNA) 5' transfer RNA (tRNA) half
gactcga

SEQ ID NO: 20741 - DNA, 44 bp, Artificial Sequence
  synthetic circulating small noncoding RNA (sncRNA) 5' transfer RNA (tRNA) half
aggcgtccctgggtgggctcgaaccaccaacctttcggttaaca

SEQ ID NO: 20742 - DNA, 32 bp, Artificial Sequence
  synthetic circulating small noncoding RNA (sncRNA) 5' transfer RNA (tRNA) half
gaggcccgggttcgattcccggccaatgcact

SEQ ID NO: 20743 - DNA, 34 bp, Artificial Sequence
  synthetic circulating small noncoding RNA (sncRNA) 5' transfer RNA (tRNA) half
cccgggtgggactcgaacccacaatccctggctt

SEQ ID NO: 20744 - DNA, 37 bp, Artificial Sequence
  synthetic circulating small noncoding RNA (sncRNA) 5' transfer RNA (tRNA) half
ttaaccgaaaggttggtggttcgagcccacccaggga

SEQ ID NO: 20745 - DNA, 11 bp, Artificial Sequence
  synthetic circulating small noncoding RNA (sncRNA) 5' transfer RNA (tRNA) half
tcccggtcagg

SEQ ID NO: 20746 - DNA, 18 bp, Artificial Sequence
  synthetic circulating small noncoding RNA (sncRNA) 5' transfer RNA (tRNA) half
tcgaaccccggtctcccg

SEQ ID NO: 20747 - DNA, 19 bp, Artificial Sequence
  synthetic circulating small noncoding RNA (sncRNA) 5' transfer RNA (tRNA) half
ttcgattcccgggcggcgc

SEQ ID NO: 20748 - DNA, 35 bp, Artificial Sequence
  synthetic circulating small noncoding RNA (sncRNA) 5' transfer RNA (tRNA) half
gcgggaggcccgggttcgattcccggccaatgcac

SEQ ID NO: 20749 - DNA, 23 bp, Artificial Sequence
  synthetic circulating small noncoding RNA (sncRNA) 5' transfer RNA (tRNA) half
gcgctctcaccgccgcggcccgg

SEQ ID NO: 20750 - DNA, 16 bp, Artificial Sequence
  synthetic circulating small noncoding RNA (sncRNA) 5' transfer RNA (tRNA) half
tttccgcccggtttcg

SEQ ID NO: 20751 - DNA, 23 bp, Artificial Sequence
  synthetic circulating small noncoding RNA (sncRNA) 5' transfer RNA (tRNA) half
gggcccagcacgcttccgctgcg

SEQ ID NO: 20752 - DNA, 28 bp, Artificial Sequence
  synthetic circulating small noncoding RNA (sncRNA) 5' transfer RNA (tRNA) half
agtgctctaacccctgagctatggagcc

SEQ ID NO: 20753 - DNA, 10 bp, Artificial Sequence
  synthetic circulating small noncoding RNA (sncRNA) 5' transfer RNA (tRNA) half
ggcggcccgg

SEQ ID NO: 20754 - DNA, 21 bp, Artificial Sequence
  synthetic circulating small noncoding RNA (sncRNA) 5' transfer RNA (tRNA) half
ccgccgggactcgaacccgga

SEQ ID NO: 20755 - DNA, 37 bp, Artificial Sequence
  synthetic circulating small noncoding RNA (sncRNA) 5' transfer RNA (tRNA) half
tgcatgaggccccgggttcgatccccggcacctccac

SEQ ID NO: 20756 - DNA, 13 bp, Artificial Sequence
  synthetic circulating small noncoding RNA (sncRNA) 5' transfer RNA (tRNA) half
gcctgggtgaaaa

SEQ ID NO: 20757 - DNA, 10 bp, Artificial Sequence
  synthetic circulating small noncoding RNA (sncRNA) 5' transfer RNA (tRNA) half
ggtccccggt

SEQ ID NO: 20758 - DNA, 26 bp, Artificial Sequence
  synthetic circulating small noncoding RNA (sncRNA) 5' transfer RNA (tRNA) half
ggaggcccgggttcggttcccggcca

SEQ ID NO: 20759 - DNA, 13 bp, Artificial Sequence
  synthetic circulating small noncoding RNA (sncRNA) 5' transfer RNA (tRNA) half
ttcgatcccgggt

SEQ ID NO: 20760 - DNA, 28 bp, Artificial Sequence
  synthetic circulating small noncoding RNA (sncRNA) 5' transfer RNA (tRNA) half
ttgactgcagatcacgaggtccctggtt

SEQ ID NO: 20761 - DNA, 14 bp, Artificial Sequence
  synthetic circulating small noncoding RNA (sncRNA) 5' transfer RNA (tRNA) half
ggattcgaacctgc

SEQ ID NO: 20762 - DNA, 39 bp, Artificial Sequence
  synthetic circulating small noncoding RNA (sncRNA) 5' transfer RNA (tRNA) half
ggttagcactctggactctgaatccagcgacccgagttc

SEQ ID NO: 20763 - DNA, 30 bp, Artificial Sequence
  synthetic circulating small noncoding RNA (sncRNA) 5' transfer RNA (tRNA) half
gtgtaatggttagcactctggactctgaat

SEQ ID NO: 20764 - DNA, 28 bp, Artificial Sequence
  synthetic circulating small noncoding RNA (sncRNA) 5' transfer RNA (tRNA) half
agagtcccatgctctaccgactgagcta

SEQ ID NO: 20765 - DNA, 24 bp, Artificial Sequence
  synthetic circulating small noncoding RNA (sncRNA) 5' transfer RNA (tRNA) half
aggaatcctaaccgctagaccata

SEQ ID NO: 20766 - DNA, 19 bp, Artificial Sequence
  synthetic circulating small noncoding RNA (sncRNA) 5' transfer RNA (tRNA) half
tcctaaccactagaccacc

SEQ ID NO: 20767 - DNA, 30 bp, Artificial Sequence
  synthetic circulating small noncoding RNA (sncRNA) 5' transfer RNA (tRNA) half
tgccgaaacccgggattgaaccagggacct

SEQ ID NO: 20768 - DNA, 18 bp, Artificial Sequence
  synthetic circulating small noncoding RNA (sncRNA) 5' transfer RNA (tRNA) half
gttcgaatcccactcctg

SEQ ID NO: 20769 - DNA, 24 bp, Artificial Sequence
  synthetic circulating small noncoding RNA (sncRNA) 5' transfer RNA (tRNA) half
ggtctaggggtatgattctcggtt

SEQ ID NO: 20770 - DNA, 24 bp, Artificial Sequence
  synthetic circulating small noncoding RNA (sncRNA) 5' transfer RNA (tRNA) half
gtccgggatttgaacccgggacct

SEQ ID NO: 20771 - DNA, 42 bp, Artificial Sequence
  synthetic circulating small noncoding RNA (sncRNA) 5' transfer RNA (tRNA) half
ggttgccccctctgaggttcgaactcaggaccttcagattat

SEQ ID NO: 20772 - DNA, 17 bp, Artificial Sequence
  synthetic circulating small noncoding RNA (sncRNA) 5' transfer RNA (tRNA) half
gtaatggttagcactct

SEQ ID NO: 20773 - DNA, 19 bp, Artificial Sequence
  synthetic circulating small noncoding RNA (sncRNA) 5' transfer RNA (tRNA) half
cgcccgaacagggacttga

SEQ ID NO: 20774 - DNA, 44 bp, Artificial Sequence
  synthetic circulating small noncoding RNA (sncRNA) 5' transfer RNA (tRNA) half
gcctgggtgaaaaccaggaatcctaaccgctagaccatatggga

SEQ ID NO: 20775 - DNA, 22 bp, Artificial Sequence
  synthetic circulating small noncoding RNA (sncRNA) 5' transfer RNA (tRNA) half
gagttcaaatctcgctggggcc

SEQ ID NO: 20776 - DNA, 36 bp, Artificial Sequence
  synthetic circulating small noncoding RNA (sncRNA) 5' transfer RNA (tRNA) half
gtgtgaggcgaacgtgataaccactacactacggaa

SEQ ID NO: 20777 - DNA, 34 bp, Artificial Sequence
  synthetic circulating small noncoding RNA (sncRNA) 5' transfer RNA (tRNA) half
cccaggcggcccgggttcgactcccggtatggga

SEQ ID NO: 20778 - DNA, 27 bp, Artificial Sequence
  synthetic circulating small noncoding RNA (sncRNA) 5' transfer RNA (tRNA) half
ataacccagaggtcgatggatcgaaac

SEQ ID NO: 20779 - DNA, 20 bp, Artificial Sequence
  synthetic circulating small noncoding RNA (sncRNA) 5' transfer RNA (tRNA) half
tgtgtcagaagtgggattcg

SEQ ID NO: 20780 - DNA, 22 bp, Artificial Sequence
  synthetic circulating small noncoding RNA (sncRNA) 5' transfer RNA (tRNA) half
ctggcagtggtgggattcgaac

SEQ ID NO: 20781 - DNA, 20 bp, Artificial Sequence
  synthetic circulating small noncoding RNA (sncRNA) 5' transfer RNA (tRNA) half
tagaccactcggccatcctg

SEQ ID NO: 20782 - DNA, 26 bp, Artificial Sequence
  synthetic circulating small noncoding RNA (sncRNA) 5' transfer RNA (tRNA) half
acaggcggggatactaaccactatac

SEQ ID NO: 20783 - DNA, 29 bp, Artificial Sequence
  synthetic circulating small noncoding RNA (sncRNA) 5' transfer RNA (tRNA) half
gctcagtcggtagagcatgagactcttaa

SEQ ID NO: 20784 - DNA, 7 bp, Artificial Sequence
  synthetic circulating small noncoding RNA (sncRNA) 5' transfer RNA (tRNA) half
tctggcg

SEQ ID NO: 20785 - DNA, 30 bp, Artificial Sequence
  synthetic circulating small noncoding RNA (sncRNA) 5' transfer RNA (tRNA) half
gtccagagtgctaaccattacaccatggga

SEQ ID NO: 20786 - DNA, 6 bp, Artificial Sequence
  synthetic circulating small noncoding RNA (sncRNA) 5' transfer RNA (tRNA) half
cagcgg

SEQ ID NO: 20787 - DNA, 28 bp, Artificial Sequence
  synthetic circulating small noncoding RNA (sncRNA) 5' transfer RNA (tRNA) half
cgaggccccgggttcaatccccggcacc

SEQ ID NO: 20788 - DNA, 21 bp, Artificial Sequence
  synthetic circulating small noncoding RNA (sncRNA) 5' transfer RNA (tRNA) half
caggcgctttaaccaactaag

SEQ ID NO: 20789 - DNA, 21 bp, Artificial Sequence
  synthetic circulating small noncoding RNA (sncRNA) 5' transfer RNA (tRNA) half
gtagtggtcatcacgctcgcc

SEQ ID NO: 20790 - DNA, 18 bp, Artificial Sequence
  synthetic circulating small noncoding RNA (sncRNA) 5' transfer RNA (tRNA) half
gaccccgacgtgatttga

SEQ ID NO: 20791 - DNA, 30 bp, Artificial Sequence
  synthetic circulating small noncoding RNA (sncRNA) 5' transfer RNA (tRNA) half
agaccggggttcgattccccgacggggaga

SEQ ID NO: 20792 - DNA, 35 bp, Artificial Sequence
  synthetic circulating small noncoding RNA (sncRNA) 5' transfer RNA (tRNA) half
aggcggcccgggttcgactcccggtgtgggaacgc

SEQ ID NO: 20793 - DNA, 37 bp, Artificial Sequence
  synthetic circulating small noncoding RNA (sncRNA) 5' transfer RNA (tRNA) half
aggccgcggcggtgagagcgccaaatcctaaccacta

SEQ ID NO: 20794 - DNA, 45 bp, Artificial Sequence
  synthetic circulating small noncoding RNA (sncRNA) 5' transfer RNA (tRNA) half
tggtggtctagtggttaggattcggcgctctcaccgccgcggccc

SEQ ID NO: 20795 - DNA, 23 bp, Artificial Sequence
  synthetic circulating small noncoding RNA (sncRNA) 5' transfer RNA (tRNA) half
gataaccgctacactacaaaaac

SEQ ID NO: 20796 - DNA, 20 bp, Artificial Sequence
  synthetic circulating small noncoding RNA (sncRNA) 5' transfer RNA (tRNA) half
acccacaatccctggcttag

SEQ ID NO: 20797 - DNA, 22 bp, Artificial Sequence
  synthetic circulating small noncoding RNA (sncRNA) 5' transfer RNA (tRNA) half
ggtagaattctcgcctgccacg

SEQ ID NO: 20798 - DNA, 11 bp, Artificial Sequence
  synthetic circulating small noncoding RNA (sncRNA) 5' transfer RNA (tRNA) half
ttccaggttcg

SEQ ID NO: 20799 - DNA, 15 bp, Artificial Sequence
  synthetic circulating small noncoding RNA (sncRNA) 5' transfer RNA (tRNA) half
ctctaccaactgagc

SEQ ID NO: 20800 - DNA, 16 bp, Artificial Sequence
  synthetic circulating small noncoding RNA (sncRNA) 5' transfer RNA (tRNA) half
gtcggcaggattcgaa

SEQ ID NO: 20801 - DNA, 5 bp, Artificial Sequence
  synthetic circulating small noncoding RNA (sncRNA) 5' transfer RNA (tRNA) half
cagct

SEQ ID NO: 20802 - DNA, 17 bp, Artificial Sequence
  synthetic circulating small noncoding RNA (sncRNA) 5' transfer RNA (tRNA) half
tcagaagattgcaggtt

SEQ ID NO: 20803 - DNA, 18 bp, Artificial Sequence
  synthetic circulating small noncoding RNA (sncRNA) 5' transfer RNA (tRNA) half
ccactgagctataccccc

SEQ ID NO: 20804 - DNA, 11 bp, Artificial Sequence
  synthetic circulating small noncoding RNA (sncRNA) 5' transfer RNA (tRNA) half
actcttaatct

SEQ ID NO: 20805 - DNA, 21 bp, Artificial Sequence
  synthetic circulating small noncoding RNA (sncRNA) 5' transfer RNA (tRNA) half
gggattgtgggttcgagtccc

SEQ ID NO: 20806 - DNA, 10 bp, Artificial Sequence
  synthetic circulating small noncoding RNA (sncRNA) 5' transfer RNA (tRNA) half
ggggttcgaa

SEQ ID NO: 20807 - DNA, 21 bp, Artificial Sequence
  synthetic circulating small noncoding RNA (sncRNA) 5' transfer RNA (tRNA) half
agagcggaggactgtagtcag

SEQ ID NO: 20808 - DNA, 10 bp, Artificial Sequence
  synthetic circulating small noncoding RNA (sncRNA) 5' transfer RNA (tRNA) half
gctctaccaa

SEQ ID NO: 20809 - DNA, 24 bp, Artificial Sequence
  synthetic circulating small noncoding RNA (sncRNA) 5' transfer RNA (tRNA) half
ctgtcacgcgggagaccggggttc

SEQ ID NO: 20810 - DNA, 16 bp, Artificial Sequence
  synthetic circulating small noncoding RNA (sncRNA) 5' transfer RNA (tRNA) half
gcatgggtggttcagt

SEQ ID NO: 20811 - DNA, 28 bp, Artificial Sequence
  synthetic circulating small noncoding RNA (sncRNA) 5' transfer RNA (tRNA) half
ccagggttcaagtccctgttcgggcgct

SEQ ID NO: 20812 - DNA, 17 bp, Artificial Sequence
  synthetic circulating small noncoding RNA (sncRNA) 5' transfer RNA (tRNA) half
atttgagctaatccccc

SEQ ID NO: 20813 - DNA, 11 bp, Artificial Sequence
  synthetic circulating small noncoding RNA (sncRNA) 5' transfer RNA (tRNA) half
cgaacccgggc

SEQ ID NO: 20814 - DNA, 22 bp, Artificial Sequence
  synthetic circulating small noncoding RNA (sncRNA) 5' transfer RNA (tRNA) half
gttcgattcccggccaatgcac

SEQ ID NO: 20815 - DNA, 15 bp, Artificial Sequence
  synthetic circulating small noncoding RNA (sncRNA) 5' transfer RNA (tRNA) half
ccaggcggcccgggt

SEQ ID NO: 20816 - DNA, 33 bp, Artificial Sequence
  synthetic circulating small noncoding RNA (sncRNA) 5' transfer RNA (tRNA) half
agtccaacgccttaaccactcggccattctggt

SEQ ID NO: 20817 - DNA, 32 bp, Artificial Sequence
  synthetic circulating small noncoding RNA (sncRNA) 5' transfer RNA (tRNA) half
attggccgggaatcgaacccgggcctcccgcg

SEQ ID NO: 20818 - DNA, 34 bp, Artificial Sequence
  synthetic circulating small noncoding RNA (sncRNA) 5' transfer RNA (tRNA) half
ccgaagatcgcgggttcgaaccccgtccgtgcct

SEQ ID NO: 20819 - DNA, 35 bp, Artificial Sequence
  synthetic circulating small noncoding RNA (sncRNA) 5' transfer RNA (tRNA) half
tggtgcattggtggttcaatggtagaattctcgcc

SEQ ID NO: 20820 - DNA, 14 bp, Artificial Sequence
  synthetic circulating small noncoding RNA (sncRNA) 5' transfer RNA (tRNA) half
caaccacgaaggga

SEQ ID NO: 20821 - DNA, 32 bp, Artificial Sequence
  synthetic circulating small noncoding RNA (sncRNA) 5' transfer RNA (tRNA) half
tcagtcggtagagcatgagactcttaatctca

SEQ ID NO: 20822 - DNA, 12 bp, Artificial Sequence
  synthetic circulating small noncoding RNA (sncRNA) 5' transfer RNA (tRNA) half
catacccctaga

SEQ ID NO: 20823 - DNA, 13 bp, Artificial Sequence
  synthetic circulating small noncoding RNA (sncRNA) 5' transfer RNA (tRNA) half
ctcccaactgagc

SEQ ID NO: 20824 - DNA, 23 bp, Artificial Sequence
  synthetic circulating small noncoding RNA (sncRNA) 5' transfer RNA (tRNA) half
cccgtcggggaattgaaccccgg

SEQ ID NO: 20825 - DNA, 18 bp, Artificial Sequence
  synthetic circulating small noncoding RNA (sncRNA) 5' transfer RNA (tRNA) half
ttcccggcatctccacag

SEQ ID NO: 20826 - DNA, 15 bp, Artificial Sequence
  synthetic circulating small noncoding RNA (sncRNA) 5' transfer RNA (tRNA) half
tatgattctcgcttt

SEQ ID NO: 20827 - DNA, 20 bp, Artificial Sequence
  synthetic circulating small noncoding RNA (sncRNA) 5' transfer RNA (tRNA) half
accaacctttcggttaacag

SEQ ID NO: 20828 - DNA, 22 bp, Artificial Sequence
  synthetic circulating small noncoding RNA (sncRNA) 5' transfer RNA (tRNA) half
gtgacaggcggggatactaacc

SEQ ID NO: 20829 - DNA, 14 bp, Artificial Sequence
  synthetic circulating small noncoding RNA (sncRNA) 5' transfer RNA (tRNA) half
ccacttctgacaaa

SEQ ID NO: 20830 - DNA, 27 bp, Artificial Sequence
  synthetic circulating small noncoding RNA (sncRNA) 5' transfer RNA (tRNA) half
ccgacgtgattcgaacacgcagccttc

SEQ ID NO: 20831 - DNA, 17 bp, Artificial Sequence
  synthetic circulating small noncoding RNA (sncRNA) 5' transfer RNA (tRNA) half
ttcgaaaccgggcggaa

SEQ ID NO: 20832 - DNA, 20 bp, Artificial Sequence
  synthetic circulating small noncoding RNA (sncRNA) 5' transfer RNA (tRNA) half
attaagagtcccatgctcta

SEQ ID NO: 20833 - DNA, 32 bp, Artificial Sequence
  synthetic circulating small noncoding RNA (sncRNA) 5' transfer RNA (tRNA) half
cgtcacgaacaggattcgaacctgtgcgggga

SEQ ID NO: 20834 - DNA, 41 bp, Artificial Sequence
  synthetic circulating small noncoding RNA (sncRNA) 5' transfer RNA (tRNA) half
ctggcagcggtgggattcgaacccacgcccccgaagagact

SEQ ID NO: 20835 - DNA, 19 bp, Artificial Sequence
  synthetic circulating small noncoding RNA (sncRNA) 5' transfer RNA (tRNA) half
tcccggacgagccctgctt

SEQ ID NO: 20836 - DNA, 15 bp, Artificial Sequence
  synthetic circulating small noncoding RNA (sncRNA) 5' transfer RNA (tRNA) half
aaccggggacctttc

SEQ ID NO: 20837 - DNA, 18 bp, Artificial Sequence
  synthetic circulating small noncoding RNA (sncRNA) 5' transfer RNA (tRNA) half
tcgagtcccatctggggt

SEQ ID NO: 20838 - DNA, 21 bp, Artificial Sequence
  synthetic circulating small noncoding RNA (sncRNA) 5' transfer RNA (tRNA) half
aaacagcaactttaccaggag

SEQ ID NO: 20839 - DNA, 11 bp, Artificial Sequence
  synthetic circulating small noncoding RNA (sncRNA) 5' transfer RNA (tRNA) half
cagggttcgaa

SEQ ID NO: 20840 - DNA, 15 bp, Artificial Sequence
  synthetic circulating small noncoding RNA (sncRNA) 5' transfer RNA (tRNA) half
tcccacaccgggagt

SEQ ID NO: 20841 - DNA, 27 bp, Artificial Sequence
  synthetic circulating small noncoding RNA (sncRNA) 5' transfer RNA (tRNA) half
gagactcttaatctcagggtcgtgggt

SEQ ID NO: 20842 - DNA, 12 bp, Artificial Sequence
  synthetic circulating small noncoding RNA (sncRNA) 5' transfer RNA (tRNA) half
gaaccaccaatg

SEQ ID NO: 20843 - DNA, 16 bp, Artificial Sequence
  synthetic circulating small noncoding RNA (sncRNA) 5' transfer RNA (tRNA) half
actcccggtgtgggaa

SEQ ID NO: 20844 - DNA, 32 bp, Artificial Sequence
  synthetic circulating small noncoding RNA (sncRNA) 5' transfer RNA (tRNA) half
aatccagcgccttagaccactcggccacgcta

SEQ ID NO: 20845 - DNA, 9 bp, Artificial Sequence
  synthetic circulating small noncoding RNA (sncRNA) 5' transfer RNA (tRNA) half
ggccgcctg

SEQ ID NO: 20846 - DNA, 42 bp, Artificial Sequence
  synthetic circulating small noncoding RNA (sncRNA) 5' transfer RNA (tRNA) half
tgtagcagaggatggtttcgatccatcgacctctgggttatg

SEQ ID NO: 20847 - DNA, 33 bp, Artificial Sequence
  synthetic circulating small noncoding RNA (sncRNA) 5' transfer RNA (tRNA) half
cctcgttagtatagtggtgagtatccccgcctg

SEQ ID NO: 20848 - DNA, 24 bp, Artificial Sequence
  synthetic circulating small noncoding RNA (sncRNA) 5' transfer RNA (tRNA) half
ctctacccactgagctatctgggc

SEQ ID NO: 20849 - DNA, 22 bp, Artificial Sequence
  synthetic circulating small noncoding RNA (sncRNA) 5' transfer RNA (tRNA) half
aggccaatgccttatccattag

SEQ ID NO: 20850 - DNA, 36 bp, Artificial Sequence
  synthetic circulating small noncoding RNA (sncRNA) 5' transfer RNA (tRNA) half
gtaaacaggagatcctgggttcgaatcccagcgggg

SEQ ID NO: 20851 - DNA, 13 bp, Artificial Sequence
  synthetic circulating small noncoding RNA (sncRNA) 5' transfer RNA (tRNA) half
gttccgactccgc

SEQ ID NO: 20852 - DNA, 25 bp, Artificial Sequence
  synthetic circulating small noncoding RNA (sncRNA) 5' transfer RNA (tRNA) half
agtctcatgctctaccaactgagct

SEQ ID NO: 20853 - DNA, 17 bp, Artificial Sequence
  synthetic circulating small noncoding RNA (sncRNA) 5' transfer RNA (tRNA) half
ttcccattcttgcgacc

SEQ ID NO: 20854 - DNA, 32 bp, Artificial Sequence
  synthetic circulating small noncoding RNA (sncRNA) 5' transfer RNA (tRNA) half
cgagccaggtaggagtcgaacctacaatcttc

SEQ ID NO: 20855 - DNA, 30 bp, Artificial Sequence
  synthetic circulating small noncoding RNA (sncRNA) 5' transfer RNA (tRNA) half
ctcgagccaggtaggagtcgaacctacaat

SEQ ID NO: 20856 - DNA, 17 bp, Artificial Sequence
  synthetic circulating small noncoding RNA (sncRNA) 5' transfer RNA (tRNA) half
gttcgaactcaggacct

SEQ ID NO: 20857 - DNA, 27 bp, Artificial Sequence
  synthetic circulating small noncoding RNA (sncRNA) 5' transfer RNA (tRNA) half
tcgctggttcgattccggctcgaagga

SEQ ID NO: 20858 - DNA, 32 bp, Artificial Sequence
  synthetic circulating small noncoding RNA (sncRNA) 5' transfer RNA (tRNA) half
agcaccacgctctaaccaactgagctaaccgg

SEQ ID NO: 20859 - DNA, 13 bp, Artificial Sequence
  synthetic circulating small noncoding RNA (sncRNA) 5' transfer RNA (tRNA) half
tacccctagacca

SEQ ID NO: 20860 - DNA, 16 bp, Artificial Sequence
  synthetic circulating small noncoding RNA (sncRNA) 5' transfer RNA (tRNA) half
agactgcgacctgaac

SEQ ID NO: 20861 - DNA, 22 bp, Artificial Sequence
  synthetic circulating small noncoding RNA (sncRNA) 5' transfer RNA (tRNA) half
ctctaccgactgagctagccgg

SEQ ID NO: 20862 - DNA, 30 bp, Artificial Sequence
  synthetic circulating small noncoding RNA (sncRNA) 5' transfer RNA (tRNA) half
atctaaaggtccctggttcgatcccgggtt

SEQ ID NO: 20863 - DNA, 19 bp, Artificial Sequence
  synthetic circulating small noncoding RNA (sncRNA) 5' transfer RNA (tRNA) half
gccttaaccactcggccat

SEQ ID NO: 20864 - DNA, 19 bp, Artificial Sequence
  synthetic circulating small noncoding RNA (sncRNA) 5' transfer RNA (tRNA) half
aacctggcggaaacagttt

SEQ ID NO: 20865 - DNA, 8 bp, Artificial Sequence
  synthetic circulating small noncoding RNA (sncRNA) 5' transfer RNA (tRNA) half
gggctcga

SEQ ID NO: 20866 - DNA, 19 bp, Artificial Sequence
  synthetic circulating small noncoding RNA (sncRNA) 5' transfer RNA (tRNA) half
atcccggacgagccctgct

SEQ ID NO: 20867 - DNA, 22 bp, Artificial Sequence
  synthetic circulating small noncoding RNA (sncRNA) 5' transfer RNA (tRNA) half
aaaagtagggctcgtccgggat

SEQ ID NO: 20868 - DNA, 21 bp, Artificial Sequence
  synthetic circulating small noncoding RNA (sncRNA) 5' transfer RNA (tRNA) half
gtcctccgctctaccaactga

SEQ ID NO: 20869 - DNA, 14 bp, Artificial Sequence
  synthetic circulating small noncoding RNA (sncRNA) 5' transfer RNA (tRNA) half
cgaacccccaatct

SEQ ID NO: 20870 - DNA, 20 bp, Artificial Sequence
  synthetic circulating small noncoding RNA (sncRNA) 5' transfer RNA (tRNA) half
aactgggctcgtccgggatt

SEQ ID NO: 20871 - DNA, 22 bp, Artificial Sequence
  synthetic circulating small noncoding RNA (sncRNA) 5' transfer RNA (tRNA) half
aggttcgactcctggctggctc

SEQ ID NO: 20872 - DNA, 10 bp, Artificial Sequence
  synthetic circulating small noncoding RNA (sncRNA) 5' transfer RNA (tRNA) half
gtagtcggca

SEQ ID NO: 20873 - DNA, 13 bp, Artificial Sequence
  synthetic circulating small noncoding RNA (sncRNA) 5' transfer RNA (tRNA) half
ttcggctgttaac

SEQ ID NO: 20874 - DNA, 25 bp, Artificial Sequence
  synthetic circulating small noncoding RNA (sncRNA) 5' transfer RNA (tRNA) half
taacgccaaggtcgcgggttcgatc

SEQ ID NO: 20875 - DNA, 30 bp, Artificial Sequence
  synthetic circulating small noncoding RNA (sncRNA) 5' transfer RNA (tRNA) half
tgaccccgacgtgacttgaacacgcaacct

SEQ ID NO: 20876 - DNA, 16 bp, Artificial Sequence
  synthetic circulating small noncoding RNA (sncRNA) 5' transfer RNA (tRNA) half
cactgaaccaccaatg

SEQ ID NO: 20877 - DNA, 15 bp, Artificial Sequence
  synthetic circulating small noncoding RNA (sncRNA) 5' transfer RNA (tRNA) half
tagagcatgagactc

SEQ ID NO: 20878 - DNA, 12 bp, Artificial Sequence
  synthetic circulating small noncoding RNA (sncRNA) 5' transfer RNA (tRNA) half
gcagtcaaatgc

SEQ ID NO: 20879 - DNA, 31 bp, Artificial Sequence
  synthetic circulating small noncoding RNA (sncRNA) 5' transfer RNA (tRNA) half
ttcgaaaccgggcggaaacaatgactctttt

SEQ ID NO: 20880 - DNA, 35 bp, Artificial Sequence
  synthetic circulating small noncoding RNA (sncRNA) 5' transfer RNA (tRNA) half
tctcaccgccgcggcccgggttcgattcccggtca

SEQ ID NO: 20881 - DNA, 31 bp, Artificial Sequence
  synthetic circulating small noncoding RNA (sncRNA) 5' transfer RNA (tRNA) half
gcaccgctgggattcgaacccaggatctcct

SEQ ID NO: 20882 - DNA, 28 bp, Artificial Sequence
  synthetic circulating small noncoding RNA (sncRNA) 5' transfer RNA (tRNA) half
cagagtggttcaattccacctttcgggc

SEQ ID NO: 20883 - DNA, 34 bp, Artificial Sequence
  synthetic circulating small noncoding RNA (sncRNA) 5' transfer RNA (tRNA) half
ccagggattgtgggttcgagtcccatctggggtg

SEQ ID NO: 20884 - DNA, 24 bp, Artificial Sequence
  synthetic circulating small noncoding RNA (sncRNA) 5' transfer RNA (tRNA) half
ataacccagaggtcgatggatcga

SEQ ID NO: 20885 - DNA, 23 bp, Artificial Sequence
  synthetic circulating small noncoding RNA (sncRNA) 5' transfer RNA (tRNA) half
tctccgtatggaggcgtgggttc

SEQ ID NO: 20886 - DNA, 13 bp, Artificial Sequence
  synthetic circulating small noncoding RNA (sncRNA) 5' transfer RNA (tRNA) half
agagcgccgaatc

SEQ ID NO: 20887 - DNA, 34 bp, Artificial Sequence
  synthetic circulating small noncoding RNA (sncRNA) 5' transfer RNA (tRNA) half
agaggtcccgggttcaaatcccggacgagcccca

SEQ ID NO: 20888 - DNA, 7 bp, Artificial Sequence
  synthetic circulating small noncoding RNA (sncRNA) 5' transfer RNA (tRNA) half
gtcgggg

SEQ ID NO: 20889 - DNA, 18 bp, Artificial Sequence
  synthetic circulating small noncoding RNA (sncRNA) 5' transfer RNA (tRNA) half
aacctggaatcttctgat

SEQ ID NO: 20890 - DNA, 35 bp, Artificial Sequence
  synthetic circulating small noncoding RNA (sncRNA) 5' transfer RNA (tRNA) half
agcattggtggttcagtggtagaattctcgcctgc

SEQ ID NO: 20891 - DNA, 9 bp, Artificial Sequence
  synthetic circulating small noncoding RNA (sncRNA) 5' transfer RNA (tRNA) half
gtctgatgc

SEQ ID NO: 20892 - DNA, 20 bp, Artificial Sequence
  synthetic circulating small noncoding RNA (sncRNA) 5' transfer RNA (tRNA) half
tcagtgggtagagcatgaga

SEQ ID NO: 20893 - DNA, 15 bp, Artificial Sequence
  synthetic circulating small noncoding RNA (sncRNA) 5' transfer RNA (tRNA) half
ggtagagcatttgac

SEQ ID NO: 20894 - DNA, 45 bp, Artificial Sequence
  synthetic circulating small noncoding RNA (sncRNA) 5' transfer RNA (tRNA) half
ctgttaaccgaaaggttggtggttcgagcccacccagggacgaca

SEQ ID NO: 20895 - DNA, 21 bp, Artificial Sequence
  synthetic circulating small noncoding RNA (sncRNA) 5' transfer RNA (tRNA) half
agcactctggactctgaatcc

SEQ ID NO: 20896 - DNA, 32 bp, Artificial Sequence
  synthetic circulating small noncoding RNA (sncRNA) 5' transfer RNA (tRNA) half
cagaagtgggattcgaacccacgcctccattc

SEQ ID NO: 20897 - DNA, 11 bp, Artificial Sequence
  synthetic circulating small noncoding RNA (sncRNA) 5' transfer RNA (tRNA) half
gagcggtctaa

SEQ ID NO: 20898 - DNA, 37 bp, Artificial Sequence
  synthetic circulating small noncoding RNA (sncRNA) 5' transfer RNA (tRNA) half
aacctccccgtcggggaattgaaccccggtctcccgc

SEQ ID NO: 20899 - DNA, 15 bp, Artificial Sequence
  synthetic circulating small noncoding RNA (sncRNA) 5' transfer RNA (tRNA) half
tcccggtcagggaag

SEQ ID NO: 20900 - DNA, 31 bp, Artificial Sequence
  synthetic circulating small noncoding RNA (sncRNA) 5' transfer RNA (tRNA) half
aggcgagaattctaccattgaactaccaatg

SEQ ID NO: 20901 - DNA, 9 bp, Artificial Sequence
  synthetic circulating small noncoding RNA (sncRNA) 5' transfer RNA (tRNA) half
gaaccgggg

SEQ ID NO: 20902 - DNA, 23 bp, Artificial Sequence
  synthetic circulating small noncoding RNA (sncRNA) 5' transfer RNA (tRNA) half
ggcgagaattctaccattgaacc

SEQ ID NO: 20903 - DNA, 25 bp, Artificial Sequence
  synthetic circulating small noncoding RNA (sncRNA) 5' transfer RNA (tRNA) half
gtagttcaatggtagaattctcgcc

SEQ ID NO: 20904 - DNA, 17 bp, Artificial Sequence
  synthetic circulating small noncoding RNA (sncRNA) 5' transfer RNA (tRNA) half
ggtatgattctcgctta

SEQ ID NO: 20905 - DNA, 13 bp, Artificial Sequence
  synthetic circulating small noncoding RNA (sncRNA) 5' transfer RNA (tRNA) half
ggaatcgaacccg

SEQ ID NO: 20906 - DNA, 12 bp, Artificial Sequence
  synthetic circulating small noncoding RNA (sncRNA) 5' transfer RNA (tRNA) half
cgatccccggca

SEQ ID NO: 20907 - DNA, 29 bp, Artificial Sequence
  synthetic circulating small noncoding RNA (sncRNA) 5' transfer RNA (tRNA) half
cacgctctaaccaactgagctaaccggcc

SEQ ID NO: 20908 - DNA, 17 bp, Artificial Sequence
  synthetic circulating small noncoding RNA (sncRNA) 5' transfer RNA (tRNA) half
ttcgatccccggcatct

SEQ ID NO: 20909 - DNA, 24 bp, Artificial Sequence
  synthetic circulating small noncoding RNA (sncRNA) 5' transfer RNA (tRNA) half
gccgcctgggtgaaaaccaggaat

SEQ ID NO: 20910 - DNA, 26 bp, Artificial Sequence
  synthetic circulating small noncoding RNA (sncRNA) 5' transfer RNA (tRNA) half
cccgcctgtcacgcgggagaccgggg

SEQ ID NO: 20911 - DNA, 17 bp, Artificial Sequence
  synthetic circulating small noncoding RNA (sncRNA) 5' transfer RNA (tRNA) half
cccggatagctcagtcg

SEQ ID NO: 20912 - DNA, 29 bp, Artificial Sequence
  synthetic circulating small noncoding RNA (sncRNA) 5' transfer RNA (tRNA) half
atagtgtagcggttatcacgtctgcttta

SEQ ID NO: 20913 - DNA, 16 bp, Artificial Sequence
  synthetic circulating small noncoding RNA (sncRNA) 5' transfer RNA (tRNA) half
gaccttcagattatga

SEQ ID NO: 20914 - DNA, 15 bp, Artificial Sequence
  synthetic circulating small noncoding RNA (sncRNA) 5' transfer RNA (tRNA) half
tagagcatttgactg

SEQ ID NO: 20915 - DNA, 39 bp, Artificial Sequence
  synthetic circulating small noncoding RNA (sncRNA) 5' transfer RNA (tRNA) half
atcagaagattgagggttcgaatcccttcgtggttggta

SEQ ID NO: 20916 - DNA, 14 bp, Artificial Sequence
  synthetic circulating small noncoding RNA (sncRNA) 5' transfer RNA (tRNA) half
agattaagagtctc

SEQ ID NO: 20917 - DNA, 35 bp, Artificial Sequence
  synthetic circulating small noncoding RNA (sncRNA) 5' transfer RNA (tRNA) half
ccaaagcgagaatcatacccctagaccaacgagcc

SEQ ID NO: 20918 - DNA, 28 bp, Artificial Sequence
  synthetic circulating small noncoding RNA (sncRNA) 5' transfer RNA (tRNA) half
ggccgggaatcgaacccgggtcacccgc

SEQ ID NO: 20919 - DNA, 19 bp, Artificial Sequence
  synthetic circulating small noncoding RNA (sncRNA) 5' transfer RNA (tRNA) half
tctcgcctgccacgcggga

SEQ ID NO: 20920 - DNA, 6 bp, Artificial Sequence
  synthetic circulating small noncoding RNA (sncRNA) 5' transfer RNA (tRNA) half
tcgacc

SEQ ID NO: 20921 - DNA, 23 bp, Artificial Sequence
  synthetic circulating small noncoding RNA (sncRNA) 5' transfer RNA (tRNA) half
gggagagcgttagactgaagatc

SEQ ID NO: 20922 - DNA, 18 bp, Artificial Sequence
  synthetic circulating small noncoding RNA (sncRNA) 5' transfer RNA (tRNA) half
ggatcgaaccagggacct

SEQ ID NO: 20923 - DNA, 28 bp, Artificial Sequence
  synthetic circulating small noncoding RNA (sncRNA) 5' transfer RNA (tRNA) half
gcccggatgatcctcagtggtctggggt

SEQ ID NO: 20924 - DNA, 33 bp, Artificial Sequence
  synthetic circulating small noncoding RNA (sncRNA) 5' transfer RNA (tRNA) half
aagtccagagtgctaaccattacaccatgggac

SEQ ID NO: 20925 - DNA, 15 bp, Artificial Sequence
  synthetic circulating small noncoding RNA (sncRNA) 5' transfer RNA (tRNA) half
ctacactacaaaaac

SEQ ID NO: 20926 - DNA, 10 bp, Artificial Sequence
  synthetic circulating small noncoding RNA (sncRNA) 5' transfer RNA (tRNA) half
tgttcgggcg

SEQ ID NO: 20927 - DNA, 17 bp, Artificial Sequence
  synthetic circulating small noncoding RNA (sncRNA) 5' transfer RNA (tRNA) half
cttcgagccggattcga

SEQ ID NO: 20928 - DNA, 39 bp, Artificial Sequence
  synthetic circulating small noncoding RNA (sncRNA) 5' transfer RNA (tRNA) half
aacccgggtcaactgcttggaaggcagctatgctcacca

SEQ ID NO: 20929 - DNA, 22 bp, Artificial Sequence
  synthetic circulating small noncoding RNA (sncRNA) 5' transfer RNA (tRNA) half
gccgggaatcgaacccgggcct

SEQ ID NO: 20930 - DNA, 19 bp, Artificial Sequence
  synthetic circulating small noncoding RNA (sncRNA) 5' transfer RNA (tRNA) half
acgcagaaggtcctgggtt

SEQ ID NO: 20931 - DNA, 11 bp, Artificial Sequence
  synthetic circulating small noncoding RNA (sncRNA) 5' transfer RNA (tRNA) half
cgacctaagga

SEQ ID NO: 20932 - DNA, 13 bp, Artificial Sequence
  synthetic circulating small noncoding RNA (sncRNA) 5' transfer RNA (tRNA) half
tcgattcccggtc

SEQ ID NO: 20933 - DNA, 8 bp, Artificial Sequence
  synthetic circulating small noncoding RNA (sncRNA) 5' transfer RNA (tRNA) half
ggcgagaa

SEQ ID NO: 20934 - DNA, 19 bp, Artificial Sequence
  synthetic circulating small noncoding RNA (sncRNA) 5' transfer RNA (tRNA) half
agtctcatgctctaccaac

SEQ ID NO: 20935 - DNA, 13 bp, Artificial Sequence
  synthetic circulating small noncoding RNA (sncRNA) 5' transfer RNA (tRNA) half
gccgggagtcgaa

SEQ ID NO: 20936 - DNA, 9 bp, Artificial Sequence
  synthetic circulating small noncoding RNA (sncRNA) 5' transfer RNA (tRNA) half
ccgggcggc

SEQ ID NO: 20937 - DNA, 16 bp, Artificial Sequence
  synthetic circulating small noncoding RNA (sncRNA) 5' transfer RNA (tRNA) half
ctgcgttggccgggaa

SEQ ID NO: 20938 - DNA, 38 bp, Artificial Sequence
  synthetic circulating small noncoding RNA (sncRNA) 5' transfer RNA (tRNA) half
ggcgtccctgggtgggctcgaaccaccaacctttcggt

SEQ ID NO: 20939 - DNA, 46 bp, Artificial Sequence
  synthetic circulating small noncoding RNA (sncRNA) 5' transfer RNA (tRNA) half
ttgtgccccgtgtgaggatcgaactcacgaccttcagattatgaga

SEQ ID NO: 20940 - DNA, 12 bp, Artificial Sequence
  synthetic circulating small noncoding RNA (sncRNA) 5' transfer RNA (tRNA) half
ctcggccacgct

SEQ ID NO: 20941 - DNA, 18 bp, Artificial Sequence
  synthetic circulating small noncoding RNA (sncRNA) 5' transfer RNA (tRNA) half
ctcggccatcgctgctac

SEQ ID NO: 20942 - DNA, 21 bp, Artificial Sequence
  synthetic circulating small noncoding RNA (sncRNA) 5' transfer RNA (tRNA) half
cttccaagcagttgacccggg

SEQ ID NO: 20943 - DNA, 8 bp, Artificial Sequence
  synthetic circulating small noncoding RNA (sncRNA) 5' transfer RNA (tRNA) half
ctgatccg

SEQ ID NO: 20944 - DNA, 8 bp, Artificial Sequence
  synthetic circulating small noncoding RNA (sncRNA) 5' transfer RNA (tRNA) half
cattgcgc

SEQ ID NO: 20945 - DNA, 32 bp, Artificial Sequence
  synthetic circulating small noncoding RNA (sncRNA) 5' transfer RNA (tRNA) half
gagtccagagtgctaaccattacaccatggaa

SEQ ID NO: 20946 - DNA, 28 bp, Artificial Sequence
  synthetic circulating small noncoding RNA (sncRNA) 5' transfer RNA (tRNA) half
aagcgactctggtgggactcgaacccac

SEQ ID NO: 20947 - DNA, 20 bp, Artificial Sequence
  synthetic circulating small noncoding RNA (sncRNA) 5' transfer RNA (tRNA) half
accgggcggaaacaagcagt

SEQ ID NO: 20948 - DNA, 17 bp, Artificial Sequence
  synthetic circulating small noncoding RNA (sncRNA) 5' transfer RNA (tRNA) half
gctggtgtagtggtatc

SEQ ID NO: 20949 - DNA, 23 bp, Artificial Sequence
  synthetic circulating small noncoding RNA (sncRNA) 5' transfer RNA (tRNA) half
tccggctcgaaggacttcgtgca

SEQ ID NO: 20950 - DNA, 19 bp, Artificial Sequence
  synthetic circulating small noncoding RNA (sncRNA) 5' transfer RNA (tRNA) half
tctcatgctctacccactg

SEQ ID NO: 20951 - DNA, 12 bp, Artificial Sequence
  synthetic circulating small noncoding RNA (sncRNA) 5' transfer RNA (tRNA) half
tctcggtggaac

SEQ ID NO: 20952 - DNA, 38 bp, Artificial Sequence
  synthetic circulating small noncoding RNA (sncRNA) 5' transfer RNA (tRNA) half
aaagtctgatgctctaccgactgagctatccgggctct

SEQ ID NO: 20953 - DNA, 16 bp, Artificial Sequence
  synthetic circulating small noncoding RNA (sncRNA) 5' transfer RNA (tRNA) half
gaggcgagaattctac

SEQ ID NO: 20954 - DNA, 13 bp, Artificial Sequence
  synthetic circulating small noncoding RNA (sncRNA) 5' transfer RNA (tRNA) half
ccgggccgcggcg

SEQ ID NO: 20955 - DNA, 18 bp, Artificial Sequence
  synthetic circulating small noncoding RNA (sncRNA) 5' transfer RNA (tRNA) half
ggcgagcgtgataaccgc

SEQ ID NO: 20956 - DNA, 19 bp, Artificial Sequence
  synthetic circulating small noncoding RNA (sncRNA) 5' transfer RNA (tRNA) half
gactcccggtatgggaaca

SEQ ID NO: 20957 - DNA, 11 bp, Artificial Sequence
  synthetic circulating small noncoding RNA (sncRNA) 5' transfer RNA (tRNA) half
gaggcgagcgt

SEQ ID NO: 20958 - DNA, 27 bp, Artificial Sequence
  synthetic circulating small noncoding RNA (sncRNA) 5' transfer RNA (tRNA) half
cgggttcgattcccggtcagggaagca

SEQ ID NO: 20959 - DNA, 30 bp, Artificial Sequence
  synthetic circulating small noncoding RNA (sncRNA) 5' transfer RNA (tRNA) half
ttggtggttcagtggtagaattctcgcctg

SEQ ID NO: 20960 - DNA, 32 bp, Artificial Sequence
  synthetic circulating small noncoding RNA (sncRNA) 5' transfer RNA (tRNA) half
cctggatagctcagtcggtagagcatcagact

SEQ ID NO: 20961 - DNA, 31 bp, Artificial Sequence
  synthetic circulating small noncoding RNA (sncRNA) 5' transfer RNA (tRNA) half
gaaaggtccccggttcgaaaccgggcggaaa

SEQ ID NO: 20962 - DNA, 30 bp, Artificial Sequence
  synthetic circulating small noncoding RNA (sncRNA) 5' transfer RNA (tRNA) half
tgtaatggttagcactctggactttgaatc

SEQ ID NO: 20963 - DNA, 35 bp, Artificial Sequence
  synthetic circulating small noncoding RNA (sncRNA) 5' transfer RNA (tRNA) half
caaccacgaagggattcgaaccctcaatcttctga

SEQ ID NO: 20964 - DNA, 11 bp, Artificial Sequence
  synthetic circulating small noncoding RNA (sncRNA) 5' transfer RNA (tRNA) half
tacggggatcg

SEQ ID NO: 20965 - DNA, 15 bp, Artificial Sequence
  synthetic circulating small noncoding RNA (sncRNA) 5' transfer RNA (tRNA) half
gaccccgacgtgact

SEQ ID NO: 20966 - DNA, 35 bp, Artificial Sequence
  synthetic circulating small noncoding RNA (sncRNA) 5' transfer RNA (tRNA) half
agggggcacctggatttgaaccagagacctcttga

SEQ ID NO: 20967 - DNA, 16 bp, Artificial Sequence
  synthetic circulating small noncoding RNA (sncRNA) 5' transfer RNA (tRNA) half
aggggtcgcgagttca

SEQ ID NO: 20968 - DNA, 12 bp, Artificial Sequence
  synthetic circulating small noncoding RNA (sncRNA) 5' transfer RNA (tRNA) half
tctcatgctcta

SEQ ID NO: 20969 - DNA, 31 bp, Artificial Sequence
  synthetic circulating small noncoding RNA (sncRNA) 5' transfer RNA (tRNA) half
gcactctggactctgaatccagcgatccgag

SEQ ID NO: 20970 - DNA, 17 bp, Artificial Sequence
  synthetic circulating small noncoding RNA (sncRNA) 5' transfer RNA (tRNA) half
ggttcgattcccgggcg

SEQ ID NO: 20971 - DNA, 17 bp, Artificial Sequence
  synthetic circulating small noncoding RNA (sncRNA) 5' transfer RNA (tRNA) half
ctggttcgactccggct

SEQ ID NO: 20972 - DNA, 13 bp, Artificial Sequence
  synthetic circulating small noncoding RNA (sncRNA) 5' transfer RNA (tRNA) half
tgatgctctaccg

SEQ ID NO: 20973 - DNA, 20 bp, Artificial Sequence
  synthetic circulating small noncoding RNA (sncRNA) 5' transfer RNA (tRNA) half
ggctcatccgggatttgaac

SEQ ID NO: 20974 - DNA, 21 bp, Artificial Sequence
  synthetic circulating small noncoding RNA (sncRNA) 5' transfer RNA (tRNA) half
agcactctggactttgaatcc

SEQ ID NO: 20975 - DNA, 20 bp, Artificial Sequence
  synthetic circulating small noncoding RNA (sncRNA) 5' transfer RNA (tRNA) half
gggtcctgggttcgattccc

SEQ ID NO: 20976 - DNA, 31 bp, Artificial Sequence
  synthetic circulating small noncoding RNA (sncRNA) 5' transfer RNA (tRNA) half
ccgaacagggacttgaaccctggaccctcag

SEQ ID NO: 20977 - DNA, 29 bp, Artificial Sequence
  synthetic circulating small noncoding RNA (sncRNA) 5' transfer RNA (tRNA) half
ggaggcccgggttcggttcccggccaatg

SEQ ID NO: 20978 - DNA, 22 bp, Artificial Sequence
  synthetic circulating small noncoding RNA (sncRNA) 5' transfer RNA (tRNA) half
cgcagcgagcagggttcgaacc

SEQ ID NO: 20979 - DNA, 21 bp, Artificial Sequence
  synthetic circulating small noncoding RNA (sncRNA) 5' transfer RNA (tRNA) half
atggataaggcatcagcctcc

SEQ ID NO: 20980 - DNA, 46 bp, Artificial Sequence
  synthetic circulating small noncoding RNA (sncRNA) 5' transfer RNA (tRNA) half
ctccagtctcttcgggggcgtgggttcgaatcccaccgctgccaac

SEQ ID NO: 20981 - DNA, 27 bp, Artificial Sequence
  synthetic circulating small noncoding RNA (sncRNA) 5' transfer RNA (tRNA) half
tggtctggggtgcaggcttcaaacctg

SEQ ID NO: 20982 - DNA, 17 bp, Artificial Sequence
  synthetic circulating small noncoding RNA (sncRNA) 5' transfer RNA (tRNA) half
atgcagagtactaacca

SEQ ID NO: 20983 - DNA, 19 bp, Artificial Sequence
  synthetic circulating small noncoding RNA (sncRNA) 5' transfer RNA (tRNA) half
acttgggctcgtccgggat

SEQ ID NO: 20984 - DNA, 22 bp, Artificial Sequence
  synthetic circulating small noncoding RNA (sncRNA) 5' transfer RNA (tRNA) half
cgcttccgcagcgagcagggtt

SEQ ID NO: 20985 - DNA, 14 bp, Artificial Sequence
  synthetic circulating small noncoding RNA (sncRNA) 5' transfer RNA (tRNA) half
tacccctagaccaa

SEQ ID NO: 20986 - DNA, 18 bp, Artificial Sequence
  synthetic circulating small noncoding RNA (sncRNA) 5' transfer RNA (tRNA) half
cgtgacaggcggggatac

SEQ ID NO: 20987 - DNA, 25 bp, Artificial Sequence
  synthetic circulating small noncoding RNA (sncRNA) 5' transfer RNA (tRNA) half
ccgggcctcccgcgtggcaggcgag

SEQ ID NO: 20988 - DNA, 19 bp, Artificial Sequence
  synthetic circulating small noncoding RNA (sncRNA) 5' transfer RNA (tRNA) half
cgaacccgggccgcggcgg

SEQ ID NO: 20989 - DNA, 15 bp, Artificial Sequence
  synthetic circulating small noncoding RNA (sncRNA) 5' transfer RNA (tRNA) half
gactcgaacccccaa

SEQ ID NO: 20990 - DNA, 22 bp, Artificial Sequence
  synthetic circulating small noncoding RNA (sncRNA) 5' transfer RNA (tRNA) half
gtttccgtagtgtagtggttag

(The sequence listing continues in the following parts.)
